(19) United States
(12) Patent Application Publication
(10) Pub. No.: US 2026/0062450 A1
(43) Pub. Date: Mar. 5, 2026

(54) RECOMBINANT AAVS WITH IMPROVED TROPISM AND SPECIFICITY

(71) Applicant: AFFINIA THERAPEUTICS INC., Waltham, MA (US)

(72) Inventors: Charles Francis ALBRIGHT, Boston, MA (US); Kevin C. OLIVIERI, Boston, MA (US); Xiaohong CAO, Southborough, MA (US); Jie TAN, Somerville, MA (US)

(21) Appl. No.: 19/104,215

(22) PCT Filed: Aug. 17, 2023
(86) PCT No.: PCT/US2023/072424

§ 371 Date: Feb. 15, 2025

Related U.S. Application Data
(60) Provisional application No. 63/371,743, filed on Aug. 17, 2022.
(60) Provisional application No. 63/371,744, filed on Aug. 17, 2022.
(60) Provisional application No. 63/371,715, filed on Aug. 17, 2022.
(60) Provisional application No. 63/482,754, filed on Feb. 1, 2023.
(60) Provisional application No. 63/482,758, filed on Feb. 1, 2023.
(60) Provisional application No. 63/482,776, filed on Feb. 1, 2023.
(60) Provisional application No. 63/502,577, filed on May 16, 2023.
(60) Provisional application No. 63/502,525, filed on May 16, 2023.
(60) Provisional application No. 63/502,595, filed on May 16, 2023.

(51) Int. Cl. C07K 14/005; C12N 15/86

(52) U.S. Cl. CPC C07K 14/005; C12N 15/86; C12N 2750/14122; C12N 2750/14143

(57) ABSTRACT

The present disclosure provides a modified AAV capsid protein comprising a targeting peptide in variable region VIII (VR, VIII) and/or a peptide segment in variable region I (VR I). The modified AAV capsid protein can form an rAAV, which has a preferred tropism, specificity or biodistribution in vivo or in vitro. The rAAV of the present disclosure can be used for gene therapies targeted at a specific tissue.

### 1. CROSS-REFERENCE TO RELATED APPLICATIONS

[0001] This application claims the benefit of U.S. Provisional Application Nos. 63/371,715 filed Aug. 17, 2022; 63/371,743 filed Aug. 17, 2022; 63/371,744 filed Aug. 17, 2022; 63/482,754 filed Feb. 1, 2023; 63/482,758 filed Feb. 1, 2023; 63/482,776 filed Feb. 1, 2023; 63/502,525 filed May 16, 2023; 63/502,577 filed May 16, 2023, and 63/502,595 filed on May 16, 2023, each of which is hereby incorporated by reference in its entirety.

### 2. SEQUENCE LISTING

[0002] The instant application contains a Sequence Listing, which has been submitted as an XML file on triplicate CD-Rs (labeled as CRF, Copy 1, and Copy 2) and mailed on Aug. 17, 2023 via USPS Priority Mail Express; and is hereby incorporated by reference in its entirety. Said XML file, created on Aug. 15, 2023, is named 53019WO_CRF_sequencelisting.XML, and is 137,114,243 bytes in size.

### 3. BACKGROUND

[0003] Adeno-associated virus (AAV) has become the vector system of choice for in vivo gene therapy. A growing variety of recombinant AAVs (rAAVs) engineered to deliver therapeutic nucleic acids have been developed and tested in nonhuman primates and humans, and the FDA has recently approved two rAAV gene therapy products for commercialization.

[0004] Although AAV vectors are safer and less inflammatory than other viruses, toxicities have occurred following administration of high doses of rAAVs for gene therapy. Thus, local administration of rAAVs to a target tissue or organ has been used to improve targeting and reduce systemic toxicity. Further, various natural and synthetic AAV variants have been tested to develop an AAV vector with desired tropism and specificity.

[0005] In general, the capsid is thought to be the primary determinant of infectivity and host-vector related properties such as adaptive immune responses, tropism, specificity, potency, and bio-distribution. Indeed, several of these properties are known to vary between natural serotypes and engineered AAV variants. Over the last decade, novel synthetic AAV variants have been developed by using a variety of capsid engineering techniques, one of which is the insertion of small, 7 amino acid-long, peptides into an exposed loop of the capsid protein, called variable region VIII (VRVIII). In some circumstances, the insertion of a novel peptide into a wild type capsid changes the tropism of the variant. For example, insertion of a peptide having the sequence RGDLGLS (SEQ ID NO: 156) into the capsid of AAV9 was found to increase infection of astrocytes (see PHD thesis of Eike Kienle, Ruprecht-Karls-Universitat Heidelberg, 2014) and primary breast cancer cells (Michelfelder et al. (2009)).

[0006] To date, however, there is little understanding as to how these changes on the capsid functionally alter these properties. Additionally, AAV vectors with a desired tropism and specificity to common therapeutic targets, such as muscles, have not yet been available.

### 4. SUMMARY

[0007] The present disclosure provides a modified AAV capsid protein that can form an rAAV having a preferred tropism and specificity to a therapeutic target. In some embodiments, a modified adeno-associated virus (AAV) capsid protein with the preferred tropism comprises (i) a targeting peptide at a site within variable region VIII (VR VIII); or (ii) a peptide segment within variable region I (VR I), wherein the targeting peptide has a sequence of X₁X₂X=RGDX₇X₈X₉X₁₀, wherein X₁, X₂, X₃, X₇, X₈, X₉ and X₁₀ are independently selected from any amino acid residue, wherein the peptide segment has an amino acid sequence of P₁P₂P₃P₄P₅P₆P₇P₈NDNP₁₂ and P₁, P₂, P₃, P₄, P₅, P₆, P₇, P₈, and P₁₂ are independently selected from any amino acid residue. In some cases, the modified AAV capsid protein comprises both (i) the targeting peptide and (ii) the peptide segment. In some cases, the AAV capsid protein comprises the targeting peptide but not the peptide segment. In some cases, the AAV capsid protein comprises the peptide segment but not the targeting peptide.

[0008] Applicant demonstrated an ability to modify AAV capsid proteins with a targeting peptide selected from SEQ ID NO. 1, and SEQ ID NOs.: 238-44858, in the VR VIII. In particular, the modified AAV capsid protein can include a targeting peptide selected from SEQ ID NOs.: 44859-44879, 44881-44883, 44911, 44912, 44913, and 44918-44919 in the VR VIII region. The resulting rAAVs containing the modified AAV capsid protein having a targeting peptide at a site within variable region VIII (VR VIII) demonstrated better targeting with more specific expression in muscle tissue.

[0009] Additionally, Applicant demonstrated an ability to optimize the modified AAV capsid protein by identifying which amino acid modifications at which residues (or combinations of amino acid modifications at various residues) in VR I decrease liver tropism and increase muscle tropism (or do not effect reduced muscle tropism as compared to a control capsid, such as the reference capsid). Applicant previously demonstrated that a liver-toggle mutation is associated with liver-on or liver-off tropism (i.e. G266A). Applicant now reports a modified AAV capsid protein comprising one, two, three or more amino modifications (within the variable region I (VR I)) that either alone or together provide synergistic effects to the specific targeting of an rAAV to a target tissue. Therefore, the modified AAV capsid proteins of the present disclosure can change the tropism, specificity and/or bio-distribution of an AAV comprising the modified AAV capsid protein.

[0010] Overall, the resulting rAAVs containing the modified AAV capsid protein comprising (i) a targeting peptide at a site within variable region VIII (VR VIII); and (ii) a peptide segment within variable region I (VR I) demonstrated better targeting with more specific expression of a transgene in the target tissue, e.g., muscles, and also exhibited reduced liver tropism when systemically administered to a mammalian subject.

[0011] The use of AAV for gene therapy for muscular disorders (e.g., XLMTM) has been limited because of liver toxicity. Modified AAV capsid proteins provided herein provide an improved way to treat the diseases with better safety. The modified AAV capsid proteins could deliver a construct encoding a therapeutic gene (e.g., MTM1) with reduced liver tropism and/or improved muscle tropism. Additionally, the construct could drive higher and more specific MTM1 expression at the target by virtue of appropriate expression regulatory elements (ERE) (e.g., promoter sequences) and/or codon optimized coding sequences.

[0012] In one aspect, this disclosure features a modified adeno-associated virus (AAV) capsid protein, comprising: a targeting peptide within VR VIII; and a peptide segment within VR I, wherein the targeting peptide has a sequence of X₁X₂X₃RGDX₇X₈X₉X₁₀, wherein X₁, X₂, X₃, X₇, X₈, X₉ and X₁₀ are independently selected from any amino acid residue, and wherein the peptide segment has an amino acid sequence of P₁P₂P₃P₄P₅P₆P₇P₈NDNP₁₂ and P₁, P₂, P₃, P₄, P₅, P₆, P₇, P₈, and P₁₂ are independently selected from any amino acid residue.

[0013] In another aspect, the present disclosure features a modified adeno-associated virus (AAV) capsid protein comprising: a sequence of a reference AAV capsid protein comprising: (i) a targeting peptide at a site within variable region VIII (VR VIII) of the reference AAV capsid protein; and (ii) one or more modifications to comprise a peptide segment within variable region I (VR I) of the reference AAV capsid protein, wherein the targeting peptide has a sequence of X₁X₂X₃RGDX₇X₈X₉X₁₀, wherein X₁, X₂, X₃, X₇, X₈, X₉ and X₁₀ are independently selected from any amino acid residue, wherein the peptide segment has an amino acid sequence of P₁P₂P₃P₄P₅P₆P₇P₈NDNP₁ and P₁, P₂, P₃, P₄, P₅, P₆, P₇, P₈, and P₁₂ are independently selected from any amino acid residue.

[0014] In some embodiments, the modified AAV capsid protein described herein comprises: (i) the targeting peptide within VR VIII; and (ii) the peptide segment within VR I

[0015] In some embodiments, the targeting peptide does not comprise RGDLLLS (SEQ ID NO: 1).

[0016] In some embodiments, the peptide segment does not comprise an alanine (A) at P₆ and a threonine (T) at P₈.

[0017] In some embodiments, the targeting peptide does not comprise RGDLLLS (SEQ ID NO: 1); and the peptide segment does not comprise an alanine (A) at P₆ and a threonine (T) at P₈.

[0018] In some embodiments, the modified AAV capsid protein has one or more modifications comprising amino acid insertions, deletions, substitutions, or combinations thereof as compared to a reference AAV capsid protein.

[0019] In some embodiments, the modified AAV capsid protein comprises one or more modifications comprising an amino acid insertion, deletion, substitution, or a combination thereof as compared to a reference AAV capsid protein to introduce the targeting peptide within VR VIII. In some embodiments, the modified AAV capsid protein also includes more modifications outside of the VR I and VR VIII of the reference AAV capsid protein.

[0020] In some embodiments, the modified AAV capsid protein has at least 90%, 95%, 98%, 99% or 99.5% sequence identity to the sequence of the reference AAV capsid protein.

[0021] In some embodiments, the modified AAV capsid protein is selected from VP1, VP2 and VP3.

[0022] In some embodiments, the reference AAV capsid protein is a capsid protein of an AAV variant selected from the group consisting of: AAV9; Anc8065; Anc80-55; Anc80-129; Anc80-156; Anc80-751; Anc80-1029; Anc80-1712; AAV2; AAV1; AAV6; AAV3; AAV LK03; AAV7; AAV8; AAV hu.37; AAV rh.10; AAV hu.68; AAV10; AAV5; AAV3-3; AAV4-4; AAV1-A; hu.46-A; hu.48-A; hu.44-A; hu.43-A; AAV6-A; hu.34-B; hu.47-B; hu.29-B; rh.63-B; hu.56-B; hu.45-B; rh.57-B; rh.35-B; rh.58-B; rh.28-B; rh.51-B; rh.19-B; rh.49-B; rh.52-B; rh.13-B; AAV2-B; rh.20-B; rh.24-B; rh.64-B; hu.27-B; hu.21-B; hu.22-B; hu.23-B; hu.7-C; hu.61-C; rh.56-C; hu.9-C; hu.54-C; hu.53-C; hu.60-C; hu.55-C; hu.2-C; hu.1-C; hu.18-C; hu.3-C; hu.25-C; hu.15-C; hu.16-C; hu.11-C; hu.10-C; hu.4-C; rh.54-D; rh.48-D; rh.55-D; rh.62-D; AAV7-D; rh.52-E; rh.51-E; hu.39-E; rh.53-E; hu.37-E; rh.43-E; rh.50-E; rh.49-E; rh.61-E; hu.41-E; rh.64-E; rh74; hu.42-E; rh.57-E; rh.40-E; hu.67-E; hu.17-E; hu.6-E; hu.66-E; rh.38-E; hu.32-F; AAV9/hu; hu.31-F; Anc80; Anc81; Anc82; Anc83; Anc84; Anc94; Anc113; Anc126; Anc127; Anc80L27; Anc80L59; Anc80L60; Anc80L62; Anc80L33; Anc80L36; Anc80L44; Anc80L1; Anc110; and Anc80DI.

[0023] In some embodiments, the reference AAV capsid protein is a capsid protein having a sequence selected from SEQ ID Nos: 54-152, 44885-44898, 44916-44917, or a fragment thereof.

[0024] In some embodiments, the reference AAV capsid protein is a capsid protein having a sequence of SEQ ID NO: 61 or a fragment thereof.

[0025] In some embodiments, the reference AAV capsid protein is a capsid protein having a sequence of SEQ ID NO: 132 or a fragment thereof.

[0026] In some embodiments, the reference AAV capsid protein is a capsid protein having a sequence of SEQ ID NO: 142 or a fragment thereof.

[0027] In some embodiments, the reference AAV capsid protein is a capsid protein selected from: Anc80-55, Anc80-129, Anc80-156, Anc80-751, Anc80-1029, and Anc80-1712.

[0028] In some embodiments, the reference AAV capsid protein is a capsid protein having a sequence selected from SEQ ID NOs: 44885-44898, and 44916-44917.

[0029] In some embodiments, the AAV capsid protein has the sequence selected from SEQ ID NOs.: 44900-44909.

[0030] In some embodiments, X₇, X₈, X₉ and X₁₀ are independently selected from A, D, E, F, G, H, I, K, L, N, Q, R, S, T, V, and Y.

[0031] In some embodiments, X₁, X₂, and X₃ are independently selected from any amino acid residue.

[0032] In some embodiments, X₁, X₂, and X₃ are amino acids identical to the amino acids at corresponding positions of the reference AAV capsid protein.

[0033] In some embodiments, X₁ is an amino acid that is identical to the amino acid at a corresponding position of the reference AAV capsid protein.

[0034] In some embodiments, X₂ is an amino acid that is identical to the amino acid at a corresponding position of the reference AAV capsid protein.

[0035] In some embodiments, X₃ is an amino acid that is identical to the amino acid at a corresponding position of the reference AAV capsid protein.

[0036] In some embodiments, X₁ and X₃ are amino acids that are identical to the amino acids at corresponding positions of the reference AAV capsid protein.

[0037] In some embodiments, X₁ and X₂ are amino acids that are identical to the amino acids at corresponding positions of the reference AAV capsid protein.

[0038] In some embodiments, X₂ and X₃ are amino acids that are identical to the amino acids at corresponding positions of the reference AAV capsid protein.

[0039] In some embodiments, X₁, X₂, and X₃ are amino acids that are not identical to the amino acids at corresponding positions of the reference AAV capsid protein.

[0040] In some embodiments, X₁ is an amino acid that is not identical to the amino acid at a corresponding position of the reference AAV capsid protein.

[0041] In some embodiments, X₂ is an amino acid that is not identical to the amino acid at a corresponding position of the reference AAV capsid protein.

[0042] In some embodiments, X₃ is an amino acid that is not identical to the amino acid at a corresponding position of the reference AAV capsid protein.

[0043] In some embodiments, X₁ and X₃ are amino acids that are not identical to the amino acids at corresponding positions of the reference AAV capsid protein.

[0044] In some embodiments, X₁ and X₂ are amino acids that are not identical to the amino acids at corresponding positions of the reference AAV capsid protein.

[0045] In some embodiments, X₂ and X₃ are amino acids that are not identical to the amino acids at corresponding positions of the reference AAV capsid protein.

[0046] In some embodiments, the modified AAV capsid protein comprises one or more substitutions, one or more insertions, one or more deletions, or a combination thereof into VR VIII of the reference AAV capsid protein. In some embodiments, one or more modifications comprises a substitution of one or more amino acids between amino acid positions 565 and 595 of the reference AAV capsid.

[0047] In some embodiments, X₁ is selected from S, E, A, D, N, Q, or T.

[0048] In some embodiments, X₁ is D or E. In some embodiments, X₁ is S, A or T. In some embodiments, X₁ is S, A or E.

[0049] In some embodiments, X₂ is selected from N, A, D, E, F, G, H, I, K, L, M, N, P, Q, R, S, T, V, W, or Y.

[0050] In some embodiments, X₂ is selected from K, E, D, A, S, F, N, V or L. In some embodiments, X₂ is selected from K, E or D. In some embodiments, X₂ is selected from N, A or Y. In some embodiments, X₂ is selected from N, Y or S.

[0051] In some embodiments, X₃ is selected from R, Q, A, D, E, F, G, H, I, K, L, M, N, P, S, T, V, W, or Y.

[0052] In some embodiments, X₂X₃ is NR.

[0053] In some embodiments, X₁X₂X₃ is ENR.

[0054] In some embodiments, X₁X₂X₃ is SNR.

[0055] In some embodiments, X₁X₂X₃ is selected from the group consisting of: DII, DWM, EEI, DML, DWI, SLE, EIN, NHE, DFI, EEL, TEQ, TDA, EDT, NEV, TDW, QFE, EDY, DTT, EPL, SEN, SEQ, TAE, EVN, ELN, DVQ, ETI, EVI, ESV, ETW, SEW, DNW, EVF, EAW, EPF, EIY, EIF, EPY, DVI, DMM, DQI, DHL, DTL, DVL, NDL, DLL, DMQ, NEF, DFL, DIM, TEW, DYI, SDY, DYY, DHF, DKE, DTW, DTI, ELY, TEY, TEI, DAI, DQY, DMY, EWG, DMV, DMI, EPH, QEG, DIN, NEI, EYY, DIV, SEG, DVG, DYQ, EGF, NDI, EGY, DVF, DVH, DGF, DIY, DSF, DGW, EHY, DRE, TEH, DTS, NEN, NEM, NEH, TEN, DSN, DVT, DQS, DKD, DTH, DVV, DQK, NET, DKP, TEV, NDS, QET, EVL, SET, SDT, AEQ, QEF, SEY, SEF, SPF, EGQ, ETH, TDQ, QEA, QDQ, AEN, ESS, NDT, EFM, EFI, EHM, DFM, QDT, SME, DYT, EHV, ENV, EAV, EAI, ESI, DAT, ENQ, EAM, ADN, EFQ, SDS, TDH, SDH, DAS, TWE, SSF, DRD, EFL, TDF, QDA, EMH, SGE, AEW, DAH, TET, TDM, TNE, SAE, NSE, SFE, QDI, DSA, ADV, SEI, AEI, QDV, ADT, DNM, DNQ, ADL, TDL, SDL, SDM, TDV, DNI, DHY, DTY, DAA, DSY, QLY, DVM, DAY, DMT, DQT, DAQ, DTV, DSH, QDF, DST, DNL, DSI, DFV, DNY, DAF, DKI, DKF, DTM, DSL, NDV, TDI, DSV, DAV, DKV, DAM, DNV, DKM, DKL, DKW, DSM, ENI, SDI, DKT, QGE, NNE, QYW, AGM, ESH, QDH, QEH, DYH, ENS, DKQ, TGE, DSS, EST, DSQ, DNS, EFV, SWE, DKN, DKS, SEH, EAL, EAS, ADQ, SDQ, ADI, SDV, EAH, ASE, EAF, EYV, DKA, SNE, AGE, EGV, EQF, ETF, EVY, EQY, QEY, QEN, SAD, AEF, EMF, SDF, ADF, ADY, AVF, TLY, SIY, SLY, AIY, DYV, AEY, ENF, EMY, QDY, ETY, EAY, TVY, SVY, QVF, QVY, TMY, DKY, ALY, AVY, TMW, EQW, SPW, SIW, DTQ, TFF, AMF, EYT, DRV, SPY, SIF, SLF, ENY, EWY, EYI, EFY, TLF, TVF, TYY, TFY, SVF, SYW, TAW, SAW, TIY, NIM, NFM, NII, NIV, SII, SIV, SEM, TTI, NSY, SSY, SNY, SEV, AEH, ALT, SGQ, QTY, SYY, AMY, QMY, SGF, SGY, ALF, TTF, SFN, QAF, ASF, SAF, TAF, TAY, TGL, SAY, QAY, ADH, ASI, SSV, SSI, TGV, SGV, DPH, TEG, DLY, ESE, TEF, NPE, DHA, DLI, DWG, EWM, EET, EIL, TEL, DYL, EMW, EVW, EPV, EDV, SLD, EGH, QRY, TDG, SQE, ELH, EYW, EMM, EFF, QEI, EQG, DVS, ESP, EIQ, EPM, EPQ, SPE, EPN, NQD, ELQ, TDT, ELT, EPI, ETM, ETG, EHI, EMI, EIT, ETV, EVV, EVM, TPY, QEW, EIW, EPT, EIH, DFY, DQL, NDA, DIW, TDY, ELF, DVY, ESG, EPG, EIG, ELG, EVG, DHI, EIS, DYM, DFT, DFH, EQS, TPF, EEF, DWN, SDN, EYL, AET, DMN, QSP, DNA, DHM, DHT, EQI, ESN, EYF, EHF, NAD, AEG, AES, TEM, SEL, DYS, EVH, EAN, EGL, TFE, ETL, TYE, SHE, ELM, TYD, SYE, ESA, EFT, EAT, AMD, AND, DMS, QMD, SLQ, EYS, QDN, EYQ, EKD, QYD, QFD, DER, AFD, EAA, EFS, DHV, QSE, TSD, SFD, DGY, TWD, QWD, EHL, QGD, QSD, AWD, AGD, QIY, EMQ, EAG, ERD, DDR, DAL, QDL, DNT, EGN, ENH, NGE, DYN, DNH, DNF, ESQ, ESM, ESL, SSD, ENL, EMV, QDS, TSE, SWD, ASD, ENT, SSE, EGM, EGS, EGT, EGI, AIF, NIN, NIQ, NYW, EPW, EGG, TIW, QIW, TTW, EKW, NLY, SVM, TPT, AAW, AIH, TIH, QGT, QFF, QYF, QFY, EHH, QLH, TYF, STY, DRL, EYM, SFF, QLF, QIF, APF, TYW, QII, QPF, SPI, TIL, SVL, NVI, SIM, SLL, QEL, AEM, AEL, QEV, QDM, NDM, SYL, ASL, TPL, ANI, NML, TIM, AEV, TMI, SWI, SFI, SNW, TNF, NAF, ASP, QSQ, APY, SFM, TAN, QAW, SGS, SGH, TGF, QSN, ERY, QMN, TGQ, NGM, NGV, AMN, ALN, QFV, AAF, TFV, TSY, EDK, ASN, SAV, QSV, QGV, QST, ASM, TAI, QSM, QSL, QSI, SSL, AGV, TGT, AGL, QGM, TGM, SGM, SGI, THD, QVE, ALE, QLE, EWP, AFP, AEE, ADE, NIE, TYP, QIE, TFP, SYP, ELW, DVW, NEW, EPA, EVA, TLE, AWE, NME, QME, ATE, AYE, DOM, TPD, DFG, QPE, EDI, EWL, ELL, QPD, EWF, ALD, SVD, QVD, ADA, APD, AHE, EQL, DTA, AFE, DAW, QAE, TME, STE, THE, QID, AAE, EIA, EML, SDA, SIE, TQE, TVD, NWE, NOE, EYG, QYP, EIV, EII, QFP, TID, EQN, EVS, TYG, EAQ, ELV, QLD, TLD, QQD, TIN, TLN, SPN, TPN, NFD, NEY, DSW, NMD, DGA, DYA, DIH, DNP, DQW, DQV, EFA, EPS, DEN, DWV, ELI, DTF, EQT, DHW, ESF, DEK, DMH, EWS, EHA, TTD, EWI, QLQ, SQD, QHD, NSD, EMA, TND, ATD, DGS, TAD, TMD, QES, AHD, QAD, DGH, DGL, NTE, ENG, SMD, NDQ, EMS, ENA, EMT, EYN, DDK, EWA, EWQ, EFH, QWE, DGT, DGM, EWV, EWH, EWT, QND, DGV, ESY, AAD, SND, ANE, TIG, QIG, AVD, SFP, AWP, QDW, SLW, TPA, AII, TIV, SWP, AFY, APN, AVN, TVN, TIS, TIQ, TLQ, AIQ, QVN, NFY, QFG, EMN, NVF, SYF, SFW, TPQ, AIL, TWI, QWN, TWN, QWQ, AQF, ASA, TWV, EWN, TMF, NGI, ATN, SAS, TMQ, TMN, AYN, TQF, SMF, QMQ, SMQ, QAN, AAY, SFQ, TYQ, TFQ, TWQ, AVI, and SGL.

[0056] In some embodiments, X₁X₂X₃ is selected from the group consisting of: APW, TEL, TDA, QPY, SPN, EHY, DWK, DLK, DFK, DVK, NSI, DIR, SPF, SEL, DRT, DRF, ADL, TDL, SDL, DNY, DKI, NDV, DKM, DNH, DNF, DSS, EST, EWT, DKN, DKS, SEH, ESQ, ESL, QND, EAH, AIF, AVF, QVF, TMY, ALY, NNG, NIF, NTF, NFF, AWF, NPY, SWF, AII, AYF, AQW, NFY, AGP, QQF, TKE, TNG, NSF, NAW, QAG, ERG, NKD, QSG, QNG, EAK, QWF, SWY, TFF, TYF, NYY, QFG, NWA, AMF, STY, TNW, ANW, AWM, TSF, DRL, DRV, SPY, NVF, SIF, QLF, SLF, QIF, SYF, APF, AGF, SVF, SAW, TIY, DHK, DAK, EGK, DYK, QNL, QPL, SPV, NPM, STL, NIL, AGA, NTV, SQA, QQA, NNF, NWL, NMA, NNA, NHN, NFH, ELR, NYM, ERA, NFS, SRD, NMM, NNL, NNQ, NNS, QDR, SDK, NNI, AQH, ANA, QNH, QWG, AWA, QWA, EQK, SHS, QFA, SFA, TFA, AYG, EKQ, ERN, EMR, EFR, AYM, EAR, EMK, EYK, EWK, QPI, QPF, NPL, SPI, SPL, NPI, SIV, SLL, SSA, AEM, TML, TLL, SML, TYL, QDM, NSN, AQL, NAT, SQQ, QTI, NAH, SQL, STH, NTT, AEK, ANV, QGL, AGL, QMV, STM, NOM, STI, TQL, SMM, SKE, SQT, SYL, ASL, SLV, NAM, TTV, TPI, TPL, ATL, DNK, DSR, ANL, SHL, SNL, TNL, QNI, QAL, ANI, QNM, QYM, SQI, SNI, QNV, SHV, SHM, QMM, ANM, AHM, SQM, NAL, AQT, EKL, NNM, TNM, SNM, QQI, TQV, TQI, THM, SQV, AAV, THL, AQI, NNV, TNN, TNI, SNN, TQM, NAI, TNV, SWT, NMV, NQI, NQL, NMI, NSS, SHF, QNF, SWL, AQM, SYV, TFM, SYM, TYM, ATI, TTI, SLI, ALI, AYI, QLV, TMI, SMI, QFI, NMY, NAY, NMN, NMF, ANF, NWT, QWM, TFT, SWM, TWM, QNW, STF, AFM, NSY, SSY, SNY, THY, TNY, QNY, THE, NSV, ATY, SKD, TNF, TWT, QWT, SFS, TFS, DRQ, NYN, DER, EKG, ENN, AWN, QWQ, TQH, ALV, QHQ, DVR, STS, SQS, AAA, QGQ, QSQ, QAQ, SIH, APY, QGN, AGQ, ASQ, AAQ, SQN, NON, ERM, ALH, NYH, TGH, ATH, QTH, TQT, QQH, AQF, QMH, EKN, ERV, ERS, AFT, EKF, EKT, QSA, NFT, QYH, NYS, TSA, QYY, AYY, AHY, QFN, AWQ, NWQ, QAW, NMS, NWN, QMF, AMH, TSN, TAH, TMH, QFH, NWS, SWN, QRD, QKD, AKE, TSS, AYH, TSH, AHQ, ADK, ADR, ASA, ASS, SNS, QSS, SAH, SMH, QAH, AAH, AHN, QNS, QAS, ANS, ANN, SWA, SWS, TWS, ERI, EKS, QWS, AYS, AFS, SYS, QFS, QYN, QFT, AYT, TNS, TYS, SFT, QNQ, QYS, SYT, ANQ, SWV, SNQ, ANY, TNQ, ATF, SSQ, SSN, TWA, SGQ, SSS, TWY, SMY, TGN, TGY, QWY, SQF, TGF, QTY, TTY, AMY, QMY, ERY, TGQ, SGY, TMF, ALN, ARD, ATN, NAS, SAS, AQN, SYG, SYN, TFN, TMN, AYN, SGN, QNN, DKG, AAN, SMN, SAN, TTF, TQF, SFN, QAF, QFV, AAF, ASF, SAF, SMF, ASY, AFN, TAF, TSY, TAY, QMQ, SMQ, TYV, TGL, QAY, AAY, ADH, EDK, ASN, QYQ, SFQ, TYQ, TWQ, SWQ, AYQ, SYQ, AMV, TMV, TAV, AQV, TYT, TAT, QGI, QQV, SAQ, NAV, SAV, ASV, QSV, QAV, QAI, QAM, TAM, DTR, DOR, DMR, NNT, NYT, NMT, NST, ATT, SMV, SNT, QNT, AAT, SAM, SAL, QGV, QST, QYT, ASM, TSM, AMT, TST, ANH, SNV, TNT, ANT, SST, AST, TAI, DAR, SSM, TAL, NSM, TSL, SNF, TSI, TSV, TDK, SAT, SAI, QSL, QSI, ASI, SSL, SSV, SSI, AGI, QGM, TGM, SGM, SGL, SGV, ARL, NWE, SFL, TPY, DRP, DTK, DMK, SEY, SME, EAI, AHD, ADN, EFQ, EMH, SGE, DNQ, DNI, QLY, DGT, EGN, DYN, EWV, ESM, EAL, ASD, DKA, ADF, ADY, SLY, AEY, ETY, EAY, TGA, AVM, TPT, SVI, QSH, TTQ, QTN, TLH, AWY, SLT, AWV, QQY, NFV, SFY, TYY, SHA, TEK, QFK, NNY, EPR_NIT, NHI, NTY, SHY, NFM, NFN, NDK, NER, SER, NDR, QDK, SDR, QNA, TNA, THT, SNH, AYA, NFA, AFA, AHA, QHA, EYR, ENR, EHK, QVL, SVL, NIV, NVI, ADM, SAA, SQH, NQV, ALL, ATM, QYA, STT, DGR, NHT, SHT, QHT, TTL, NHM, QHL, DNR, QHM, QFM, QMI, AHV, THI, AHT, TNH, NHV, THV, SHI, ATV, TWI, NYV, TYI, DYR, SFI, NOF, NWM, NSL, NSP, TQY, DRS, ASP, TKD, QWI, QWN, TWN, QWV, THN, TTM, TQQ, NMQ, TYA, STQ, STN, AGN, EKH, ERT, TFH, SFH, AFH, ENK, NYQ, SFM, QGS, AHF, QLT, QHY, AQY, TRD, ERH, QWH, TYH, TRE, TAQ, AER, TDR, ASH, EKI, AFV, TYN, ALT, NGN, SYY, EWN, NGM, NAN, TAS, TFV, SFV, QAN, SGT, SAY, AFQ, TFQ, QFQ, EFK, SYH, QHV, AMM, THQ, AAI, AAM, NSQ, QAT, TSQ, SHQ, QSM, AGV, AGT, TGT, TGI, AVI, TGV, SGI, ESP, SDA, TPN, EAW, NEQ, DSN, DIK, DNA, QES, SLQ, EKD, SDH, SSF, TET, QDI, DSA, DNM, DKT, DGM, SQY, TLT, QEH, DKQ, TGE, DNS, SDV, SNE, EGT, EGV, AAP, AHG, TWK, TQA, TVT, APQ, SVT, NGT, SSH, NLV, AGY, QFF, QYF, NWV, EKA, EKY, SMG, NAG, ASG, TFI, ELK, SEK, QTL, NML, DHS, ETR, NQQ, QWL, ANP, AHH, NEK, NNN, SNA, EWR, ESR, SHN, SFG, SYA, APV, QPV, SPT, TPQ, QVI, TPV, AVL, SEM, NDM, API, QLM, QTM, QQL, QHI, NFL, AYV, NKE, TIM, QYV, SWI, DRN, AWI, SMA, NRE, QTS, QVV, QQT, QMA, QQS, QAA, ATQ, ERL, TGS, QQQ, AQQ, QHF, TAN, QSY, QSN, NGQ, TWH, TMS, QMS, TQN, TMT, QTV, THS, TTT, SMT, QMT, SMR, ADA, AAE, EPY, EYL, NWI, TSP, DGQ, NDH, QFD, EHL, ERD, DAF, ENI, ENH, QQW, AGM, ENL, EAF, EYV, ENT, SSE, AGE, QEY, DRH, NIQ, SVV, SVM, QPT, TVL, QTQ, SVQ, TIQ, NLQ, SIQ, AWL, EHH, NGY, NHF, NSA, NAA, NTH, QLI, NWH, QRE, AML, EVR, SNP, NHS, THH, NOS, TTS, AHS, EKV, NFQ, APL, QPM, NPV, SIL, TII, STV, QEL, TFL, SIT, NAQ, TMM, AAL, QQM, AMI, QFL, AHI, SYI, SSP, NVV, TTN, TAA, TQS, TMA, ALA, QQN, NSH, TTH, SRE, ERQ, QHS, SWH, SEV, AVT, ALQ, DKH, AMQ, ARE, TWV, NGL, NGV, TMQ, TLV, EER and QTT.

[0057] In some embodiments, X₁X₂X₃ is selected from the group consisting of: DMK, ATD, EEK, QMD, EFS, ERD, DDR, TDM, SAE, EHS, ENH, SWE, SNE, NNG, QAG, ERG, QSG, QNG, ASG, QFG, AMF, ELR, NEM, NNS, NNI, SDR, EQR, EHR, EWR, EQK, ESR, EKQ, EYR, ENR, EMK, EYK, EHK, EWK, QNI, TNI, TYI, SNY, DRQ, AWI, QWI, DFR, EKG, QYG, QWQ, EKN, EKF, EKT, AFH, ENK, NYS, DKH, AAG, QMF, QFH, QKD, ARE, AHQ, ADK, ADR, AHN, QNS, ANN, SWS, EKS, AFS, QFS, TNQ, TGY, NGL, ARD, AKD, AAF, SMF, AFN, SGT, TGL, ASN, SFQ, AFQ, TFQ, QFQ, EFK, SWQ, AYQ, SYQ, DQR, DMR, ASM, ANT, SHQ, TSL, SNF, QSL, ASI, SGL, SGI, NDA, DHQ, DFK, DTK, DNA, SDS, TDH, DGL, QDV, SDM, DKT, DGM, SQY, DKS, SSD, EMV, TSE, EYV, SSE, EGM, SDF, TTG, QLG, NNP, AGS, QSF, TLM, NGA, AWY, NKD, SWY, TFF, NSG, NGY, QEK, SEK, TEK, AQA, NVL, NHI, TER, NML, NMA, NNA, NHN, ANP, AMS, NER, SER, DKK, NMM, QDK, AHS, TNA, THT, SNH, QNH, ESK, SHS, AYM, SSA, NAT, QLM, QQM, SQL, SNI, QNV, SHV, SHM, NNV, TNN, AHT, TNH, NHV, TQM, THV, SHI, NYL, NMV, NFL, AYV, NOI, NQL, NMI, NSS, SHF, SYM, NYV, AYI, SWI, QFI, ANF, TFT, TWM, QNW, NSY, THY, TNY, NYN, AWN, SMA, NSH, TGH, SFH, SWH, SFM, NFT, QYH, QGS, TGS, TSA, QQQ, QYY, AMQ, TAN, AWH, NMS, TSN, TAH, TMH, QWH, NWS, SWN, QRD, TYH, AKE, TAQ, AER, AYH, ASA, SNS, QSS, SAH, SMH, ASH, QAS, ANS, SYS, QYN, TYN, TNS, SFT, ANQ, SGS, SGH, SSS, TWY, QTY, SYY, NGM, TMS, SYG, TON, SYN, TFN, TMN, AYN, SGN, QNN, SMN, SAN, QAF, ASF, ASY, TAS, TAF, TFV, SMQ, SFV, TMT, QAN, SAY, EDK, AMV, QHV, THS, TAT, QGI, QQV, NAV, SAV, ASV, QSV, QAV, AAI, AAM, QAM, TAM, DTR, NNT, NYT, NMT, ATT, QTT, TTT, QAT, SMV, SNT, QNT, AAT, SAM, SAL, QGV, QST, QYT, TSM, ANH, SNV, TSQ, TNT, SST, AST, TAI, TSI, TSV, TDK, SAT, QSM, SAI, QSI, SSV, SSI, AGT, TGT, AGI, QGM, TGM, TGV, SGM, SGV, SQE, EHT, EYL, DSG, SFE, QND, TQA, AWV, NFV, TSG, SSG, DRG, ANW, TFI, TSF, QNL, STL, TWL, NNF, NND, NYM, NFI, ETR, SNP, EIR, NFS, NNH, NNL, AHL, NNQ, NDR, NNN, QDR, SDK, SNA, AFG, NYA, QHA, QFA, SHN, NFQ, SYA, TFA, EMR, EFR, EAR, NOM, TTL, TQL, SMM, SKE, SYL, ASL, SLV, TTV, AAL, NHL, NHM, QYL, QHL, ATL, DNR, DSR, ANL, SHL, SNL, TNL, QAL, AMI, ANI, QNM, QYM, QHM, QFM, QMM, QMI, ANM, AHM, SQM, AQT, EKL, NNM, TNM, SNM, QQI, TQV, TQI, THI, QHI, THL, SNN, TNV, SWL, AQM, SYV, TFM, TYM, TWI, AFI, ATI, DYR, QLV, TMI, SYI, SFI, NWM, NWT, NSL, STF, SNW, AFM, SSY, NSV, TNF, NAF, TFS, QWV, ERT, TQT, AFT, NYQ, ERL, NRD, TRD, AWQ, TDR, TSH, ASS, AYT, TYS, QYS, SYT, SWV, SNQ, SMS, NAS, SAS, QFV, SAF, TWQ, TAV, AMM, TYT, QAI, TST, DAR, SSM, TAL, NES, DWK, DLR, DIR, SDT, EAN, ETH, TYD, SYE, EAM, TND, AYD, TSP, DRT, NDH, SSF, EFH, DNQ, DSH, DNT, SDI, DKQ, EWT, EAL, EAS, ESL, ASD, EAH, ASE, EAF, ENT, SIY, QDY, APG, AIG, SSW, NPG, ERP, TVI, QSH, SLS, EDR, AWL, SLH, EQH, EHH, NWV, EKY, STY, DRI, EYH, DRV, SPY, NNY, DWR, ERA, QRE, EVR, SRD, AWA, SFA, QTI, SHT, THM, AQI, AHI, SWT, ATV, TTI, SMI, QYV, NMY, SWM, QNY, TWT, QWT, TQY, NRE, QTS, QHQ, DVR, AAA, TYA, EKH, ALH, AWT, ATH, SRE, TFH, QMH, ERV, ERS, QHY, ALQ, QSY, ERH, TRE, TSS, QAH, AAH, SWA, TWS, QWS, AYS, AFV, QNQ, ANY, ALT, SMY, TWV, TTY, AMY, QMY, ERY, TWH, TSY, TAY, TYV, QAY, AAY, QYQ, TYQ, SYH, AQV, EER, THQ, and SMT.

[0058] In some embodiments, RGDX₇X₈X₉X₁₀ has an amino acid sequence selected from SEQ ID NOs.: 238-44858.

[0059] In some embodiments, RGDX₇X₈X₉X₁₀ has an amino acid sequence selected from SEQ ID NOs.: 238-248.

[0060] In some embodiments, RGDX₇X₈X₉X₁₀ has an amino acid sequence selected from SEQ ID NOs.: 238-338.

[0061] In some embodiments, RGDX₇X₈X₉X₁₀ has an amino acid sequence selected from SEQ ID NOs.: 238-438.

[0062] In some embodiments, RGDX₇X₈X₉X₁₀ has an amino acid sequence selected from SEQ ID NOs.: 238-538.

[0063] In some embodiments, RGDX₇X₈X₉X₁₀ has an amino acid sequence selected from SEQ ID NOs.: 238-638.

[0064] In some embodiments, RGDX₇X₈X₉X₁₀ has an amino acid sequence selected from SEQ ID NOs.: 238-738.

[0065] In some embodiments, RGDX₇X₈X₉X₁₀ has an amino acid sequence selected from SEQ ID NOs.: 3881, 12092, 14601, 15342, 21498, and 31396.

[0066] In some embodiments, RGDX₇X₈X₉X₁₀ has the amino acid sequence of SEQ ID NO: 238.

[0067] In some embodiments, X₁X₂X₃RGDX₇X₈X₉X₁₀ has an amino acid sequence selected from SEQ ID NOs.: 44859-44883, 44911, 44912, 44913, 44918-44919, and 48391-157057.

[0068] In some embodiments, X₁X₂X₃RGDX₇X₈X₉X₁₀ has an amino acid sequence selected from SEQ ID NOs.: 44864-44867, and 44879-44883.

[0069] In some embodiments, X₁X₂X₃RGDX₇X₈X₉X₁₀ has an amino acid sequence selected from SEQ ID NOs.: 44859-44878, 44911, 44912, 44913, 44918-44919, and 48391-157057.

[0070] In some embodiments, the X₇ is selected from R, F, H, L, Q, R, and Y.

[0071] In some embodiments, X₇ is R. In some embodiments, X₇ is Y or H. In some embodiments, X> is F or Y.

[0072] In some embodiments, the X₇ is selected from S, G, D, I, L, N, Q, T, and V.

[0073] In some embodiments, X₈ is S or G. In some embodiments, X₈ is T, G or S. In some embodiments, X₈ is N or Q.

[0074] In some embodiments, the X₉ is selected from any of the amino acids. In some embodiments, X₉ is selected from V, S, N, G, Q, L, T, and Y.

[0075] In some embodiments, X₉ is selected from V, S, N, G, Q, L, T, and Y. In some embodiments, X₉ is selected from V or Q. In some embodiments, X₉ is selected from S or V. In some embodiments, X₉ is selected from N or S.

[0076] In some embodiments, X₁₀ is selected from I, V, S, L, M, R, T, and Q.

[0077] In some embodiments, X₁₀ is I or V. In some embodiments, X₁₀ is V, L or M. In some embodiments, X₁₀ is T or L.

[0078] In some embodiments, the targeting peptide has a sequence of X₁X₂X₃RGDRGVV (SEQ ID NO: 98928), X₁X₂X₃RGDRSVV (SEQ ID NO: 98931), X₁X₂X₃RGDRGQI (SEQ ID NO: 98927), X₁X₂X₃RGDRSQT (SEQ ID NO: 98930), X₁X₂X₃RGDRQGI (SEQ ID NO: 98929), X₁X₂X₃RGDFQNT (SEQ ID NO: 98934), X₁X₂X₃RGDHGVL (SEQ ID NO: 98938), X₁X₂X₃RGDYTSV (SEQ ID NO: 98941), X₁X₂X₃RGDYTSM (SEQ ID NO: 98942), X₁X₂X₃RGDLTVT (SEQ ID NO: 98935), X₁X₂X₃RGDFNNT (SEQ ID NO: 98943), X₁X₂X₃RGDYSSV (SEQ ID NO: 98937), X₁X₂X₃RGDHVNL (SEQ ID NO: 98924), X₁X₂X₃RGDQSTL (SEQ ID NO: 98926), X₁X₂X₃RGDLIGR (SEQ ID NO: 98925), X₁X₂X₃RGDFNNL (SEQ ID NO: 98933), X₁X₂X₃RGDLLLS (SEQ ID NO: 98932), X₁X₂X₃RGDYNSL (SEQ ID NO: 98940), X₁X₂X₃RGDRDYL (SEQ ID NO: 98939), or X₁X₂X₃RGDYVGL (SEQ ID NO: 98936).

[0079] In some embodiments, the targeting peptide has a sequence of X₁X₂X₃RGDRGVV (SEQ ID NO: 98928), X₁X₂X₃RGDRSVV (SEQ ID NO. 98931) or X₁X₂X₃RGDRGQI (SEQ ID NO: 98927).

[0080] In some embodiments, the targeting peptide has a sequence of X₁X₂X₃RGDYTSV (SEQ ID NO: 98941), X₁X₂X₃RGDYTSM (SEQ ID NO: 98942), X₁X₂X₃RGDRGVV (SEQ ID NO: 98928), X₁X₂X₃RGDRSVV (SEQ ID NO: 98931), X₁X₂X₃RGDYSSV (SEQ ID NO: 98937), or X₁X₂X₃RGDHGVL (SEQ ID NO: 98938).

[0081] In some embodiments, the targeting peptide has a sequence of X₁X₂X₃RGDFQNT (SEQ ID NO: 98934), X₁X₂X₃RGDHGVL (SEQ ID NO: 98938), X₁X₂X₃RGDLIGR (SEQ ID NO: 98925), X₁X₂X₃RGDRGQI (SEQ ID NO. 98927), X₁X₂X₃RGDRGVV (SEQ ID NO: 98928), X₁X₂X₃RGDYTSM (SEQ ID NO: 98942) or X₁X₂X₃RGDYTSV (SEQ ID NO: 98941).

[0082] In some embodiments, X₁X₂X₃ is selected from the group consisting of EFK, AAY, DQK, QVY, DKL, DNV, ENF, EWK, QNV, and TFM.

[0083] In some embodiments, the targeting peptide has an amino acid sequence selected from: RGDRSX₉I, RGDRGX₉I, RGDRSX₉V, or RGDRGX₉V.

[0084] In some embodiments, the targeting peptide has an amino acid sequence selected from X₁X₂X₃RGDRGQI (SEQ ID NO: 98927), X₁X₂X₃RGDRSVV (SEQ ID NO: 98931) or X₁X₂X₃RGDRGVV (SEQ ID NO: 98928).

[0085] In some embodiments, X₁ is Dor E, X₂ is K, E, D, A, S, F or N, and X₃ is Y, V, or F. In some embodiments, X₁X₂X₃ is selected from the group consisting of: DII, DWM, EEI, DML, DWI, SLE, EIN, NHE, DFI, EEL, TEQ, TDA, EDT, NEV, TDW, QFE, EDY, DTT, EPL, SEN, SEQ, TAE, EVN, ELN, DVQ, ETI, EVI, ESV, ETW, SEW, DNW, EVF, EAW, EPF, EIY, EIF, EPY, DVI, DMM, DQI, DHL, DTL, DVL, NDL, DLL, DMQ, NEF, DFL, DIM, TEW, DYI, SDY, DYY, DHF, DKE, DTW, DTI, ELY, TEY, TEI, DAI, DQY, DMY, EWG, DMV, DMI, EPH, QEG, DIN, NEI, EYY, DIV, SEG, DVG, DYQ, EGF, NDI, EGY, DVF, DVH, DGF, DIY, DSF, DGW, EHY, DRE, TEH, DTS, NEN, NEM, NEH, TEN, DSN, DVT, DQS, DKD, DTH, DVV, DQK, NET, DKP, TEV, NDS, QET, EVL, SET, SDT, AEQ, QEF, SEY, SEF, SPF, EGQ, ETH, TDQ, QEA, QDQ, AEN, ESS, NDT, EFM, EFI, EHM, DFM, QDT, SME, DYT, EHV, ENV, EAV, EAI, ESI, DAT, ENQ, EAM, ADN, EFQ, SDS, TDH, SDH, DAS, TWE, SSF, DRD, EFL, TDF, QDA, EMH, SGE, AEW, DAH, TET, TDM, TNE, SAE, NSE, SFE, QDI, DSA, ADV, SEI, AEI, QDV, ADT, DNM, DNQ, ADL, TDL, SDL, SDM, TDV, DNI, DHY, DTY, DAA, DSY, QLY, DVM, DAY, DMT, DQT, DAQ, DTV, DSH, QDF, DST, DNL, DSI, DFV, DNY, DAF, DKI, DKF, DTM, DSL, NDV, TDI, DSV, DAV, DKV, DAM, DNV, DKM, DKL, DKW, DSM, ENI, SDI, DKT, QGE, NNE, QYW, AGM, ESH, QDH, QEH, DYH, ENS, DKQ, TGE, DSS, EST, DSQ, DNS, EFV, SWE, DKN, DKS, SEH, EAL, EAS, ADQ, SDQ, ADI, SDV, EAH, ASE, EAF, EYV, DKA, SNE, AGE, EGV, EQF, ETF, EVY, EQY, QEY, QEN, SAD, AEF, EMF, SDF, ADF, ADY, AVF, TLY, SIY, SLY, AIY, DYV, AEY, ENF, EMY, QDY, ETY, EAY, TVY, SVY, QVF, QVY, TMY, DKY, ALY, AVY, TMW, EQW, SPW, SIW, DTQ, TFF, AMF, EYT, DRV, SPY, SIF, SLF, ENY, EWY, EYI, EFY, TLF, TVF, TYY, TFY, SVF, SYW, TAW, SAW, TIY, NIM, NFM, NII, NIV, SII, SIV, SEM, TTI, NSY, SSY, SNY, SEV, AEH, ALT, SGQ, QTY, SYY, AMY, QMY, SGF, SGY, ALF, TTF, SEN, QAF, ASF, SAF, TAF, TAY, TGL, SAY, QAY, ADH, ASI, SSV, SSI, TGV, SGV, DPH, TEG, DLY, ESE, TEF, NPE, DHA, DLI, DWG, EWM, EET, EIL, TEL, DYL, EMW, EVW, EPV, EDV, SLD, EGH, QRY, TDG, SQE, ELH, EYW, EMM, EFF, QEI, EQG, DVS, ESP, EIQ, EPM, EPQ, SPE, EPN, NQD, ELQ, TDT, ELT, EPI, ETM, ETG, EHI, EMI, EIT, ETV, EVV, EVM, TPY, QEW, EIW, EPT, EIH, DFY, DQL, NDA, DIW, TDY, ELF, DVY, ESG, EPG, EIG, ELG, EVG, DHI, EIS, DYM, DFT, DFH, EQS, TPF, EEF, DWN, SDN, EYL, AET, DMN, QSP, DNA, DHM, DHT, EQI, ESN, EYF, EHF, NAD, AEG, AES, TEM, SEL, DYS, EVH, EAN, EGL, TFE, ETL, TYE, SHE, ELM, TYD, SYE, ESA, EFT, EAT, AMD, AND, DMS, QMD, SLQ, EYS, QDN, EYQ, EKD, QYD, QFD, DER, AFD, EAA, EFS, DHV, QSE, TSD, SFD, DGY, TWD, QWD, EHL, QGD, QSD, AWD, AGD, QIY, EMQ, EAG, ERD, DDR, DAL, QDL, DNT, EGN, ENH, NGE, DYN, DNH, DNF, ESQ, ESM, ESL, SSD, ENL, EMV, QDS, TSE, SWD, ASD, ENT, SSE, EGM, EGS, EGT, EGI, AIF, NIN, NIQ, NYW, EPW, EGG, TIW, QIW, TIW, EKW, NLY, SVM, TPT, AAW, AIH, TIH, QGT, QFF, QYF, QFY, EHH, QLH, TYF, STY, DRL, EYM, SFF, QLF, QIF, APF, TYW, QII, QPF, SPI, TIL, SVL, NVI, SIM, SLL, QEL, AEM, AEL, QEV, QDM, NDM, SYL, ASL, TPL, ANI, NMI, TIM, AEV, TMI, SWI, SFI, SNW, TNF, NAF, ASP, QSQ, APY, SFM, TAN, QAW, SGS, SGH, TGF, QSN, ERY, QMN, TGQ, NGM, NGV, AMN, ALN, QFV, AAF, TFV, TSY, EDK, ASN, SAV, QSV, QGV, QST, ASM, TAI, QSM, QSL, QSI, SSL, AGV, TGT, AGI, QGM, TGM, SGM, SGI, THD, QVE, ALE, QLE, EWP, AFP, AEE, ADE, NIE, TYP, QIE, TFP, SYP, ELW, DVW, NEW, EPA, EVA, TLE, AWE, NME, QME, ATE, AYE, DQM, TPD, DFG, QPE, EDI, EWL, ELL, QPD, EWF, ALD, SVD, QVD, ADA, APD, AHE, EQL, DTA, AFE, DAW, QAE, TME, STE, THE, QID, AAE, EIA, EML, SDA, SIE, TQE, TVD, NWE, NOE, EYG, QYP, EIV, EII, QFP, TID, EQN, EVS, TYG, EAQ, ELV, QLD, TLD, QQD, TIN, TLN, SPN, TPN, NFD, NEY, DSW, NMD, DGA, DYA, DIH, DNP, DQW, DQV, EFA, EPS, DEN, DWV, ELI, DTF, EQT, DHW, ESF, DEK, DMH, EWS, EHA, TTD, EWI, QLQ, SQD, QHD, NSD, EMA, TND, ATD, DGS, TAD, TMD, QES, AHD, QAD, DGH, DGL, NTE, ENG, SMD, NDQ, EMS, ENA, EMT, EYN, DDK, EWA, EWQ, EFH, QWE, DGT, DGM, EWV, EWH, EWT, QND, DGV, ESY, AAD, SND, ANE, TIG, QIG, AVD, SFP, AWP, QDW, SLW, TPA, AII, TIV, SWP, AFY, APN, AVN, TVN, TIS, TIQ, TLQ, AIQ, QVN, NFY, QFG, EMN, NVF, SYF, SFW, TPQ, AIL, TWI, QWN, TWN, QWQ, AQF, ASA, TWV, EWN, TMF, NGI, ATN, SAS, TMQ, TMN, AYN, TQF, SMF, QMQ, SMQ, QAN, AAY, SFQ, TYQ, TFQ, TWQ, AVI, and SGL.

[0086] In some embodiments, X₁X₂X₃ is selected from the group consisting of: DAV, DKW. EAY, AEY, DFV, DKF, DKI, DKL, DNV, DNY, DSL, DSV, EFI, SEF, SEY, SLY, ADF, ADY, ALY, AVF, DAF, DAL, DAM, DAT, DHV, DIV, DKA, DKM, DKT, DKV, DKY, DMI, DNF, DNI, DQT, DSL, DVY, DYN, DYV, EAT, EAW, EFV, EGL, EIY, EMF, EMY, ENF, EPF, EPY, EQY, ESY, ETF, EWI, EWT, EYI, EYV, NEM, QDF, QDY, QEY, QLY, QND, QVF, QVY, SDL, SDV, SEH, SII, SIY, SSL, SVY, SWD, SWE, TDF, TDV, TDY, TEF, TEY, TIY, TLY, and TWQ.

[0087] In some embodiments, X₇ is selected from Y and H; X₈ is selected from T, G and S; X₉ is selected from S and V; X₁₀ is selected from V, L and M.

[0088] In some embodiments, the targeting peptide has an amino acid sequence selected from: X₁X₂X₃RGDHGVL (SEQ ID NO: 98938), X₁X₂X₃RGDYSSV (SEQ ID NO: 98937). X₁X₂X₃RGDYTSM (SEQ ID NO: 98942) or X₁X₂X₃RGDYTSV (SEQ ID NO: 98941).

[0089] In some embodiments, X₁ is S, A or T. X₂ is N, A or Y, and X₃ is I, V, M, Q, T, Y or K.

[0090] In some embodiments, X₁X₂X₃ is selected from the group consisting of: APW, TEL, TDA, QPY, SPN, EHY, DWK, DLK, DFK, DVK, NSI, DIR, SPF, SEL, DRT, DRF, ADL, TDL, SDL, DNY, DKI, NDV, DKM, DNH, DNF, DSS, EST, EWT, DKN, DKS, SEH, ESQ, ESL, QND, EAH, AIF, AVF, QVF, TMY, ALY, NNG, NIF, NTF, NFF, AWF, NPY, SWF, AII, AYF, AQW, NFY, AGP, QQF, TKE, TNG, NSF, NAW, QAG, ERG, NKD, QSG, QNG, EAK, QWF, SWY, TFF, TYF, NYY, QFG, NWA, AMF, STY, TNW, ANW, AWM, TSF, DRL, DRV, SPY, NVF, SIF, QLF, SLF, QIF, SYF, APF, AGF, SVF, SAW, TIY, DHK, DAK, EGK, DYK, QNL, QPL, SPV, NPM, STL, NIL, AGA, NTV, SQA, QQA, NNF, NWL, NMA, NNA, NHN, NFH, ELR, NYM, ERA, NFS, SRD, NMM, NNL, NNQ, NNS, QDR, SDK, NNI, AQH, ANA, QNH, QWG, AWA, QWA, EQK, SHS, QFA, SFA, TFA, AYG, EKQ, ERN, EMR, EFR, AYM, EAR, EMK, EYK, EWK, QPI, QPF, NPL, SPI, SPL, NPI, SIV, SLL, SSA, AEM, TML, TLL, SML, TYL, QDM, NSN, AQL, NAT, SQQ, QTI, NAH, SQL, STH, NTT, AEK, ANV, QGL, AGL, QMV, STM, NOM, STI, TQL, SMM, SKE, SQT, SYL, ASL, SLV, NAM, TTV, TPI, TPL, ATL, DNK, DSR, ANL, SHL, SNL, TNL, QNI, QAL, ANI, QNM, QYM, SQL SNI, QNV, SHV, SHM, QMM, ANM, AHM, SQM, NAL, AQT, EKL, NNM, TNM, SNM, QQI, TQV, TQI, THM, SQV, AAV, THL, AQI NNV, TNN, TNI, SNN, TQM, NAI, INV, SWT, NMV, NQI, NQL, NMI, NSS, SHF, QNF, SWL, AQM, SYV, TFM, SYM, TYM, ATI, TTI, SLI, ALI, AYI, QLV, TMI, SMI, QFI, NMY, NAY, NMN, NMF, ANF, NWT, QWM, TFT, SWM, TWM, QNW, STF, AFM, NSY, SSY, SNY, THY, TNY, QNY, THE, NSV, ATY, SKD, TNF, TWT, QWT, SFS, TFS, DRQ, NYN, DFR, EKG, ENN, AWN, QWQ, TQH, ALV, QHQ, DVR, STS, SQS, AAA, QGQ, QSQ, QAQ, SIH, APY, QGN, AGQ, ASQ, AAQ, SQN, NON, ERM, ALH, NYH, TGH, ATH, QTH, TQT, QQH, AQF, QMH, EKN, ERV, ERS, AFT, EKF, EKT, QSA, NFT, QYH, NYS, TSA, QYY, AYY, AHY, QFN, AWQ, NWQ, QAW, NMS, NWN, QMF, AMH, TSN, TAH, TMH, QFH, NWS, SWN, QRD, QKD, AKE, TSS, AYH, TSH, AHQ, ADK, ADR, ASA, ASS, SNS, QSS, SAH, SMH, QAH, AAH, AHN, QNS, QAS, ANS, ANN, SWA, SWS, TWS, ERI, EKS, QWS, AYS, AFS, SYS, QFS, QYN, QFT, AYT, TNS, TYS, SFT, QNQ, QYS, SYT, ANQ, SWV, SNQ, ANY, TNQ, ATF, SSQ, SSN, TWA, SGQ, SSS, TWY, SMY, TGN, TGY, QWY, SQF, TGF, QTY, TTY, AMY, QMY, ERY, TGQ, SGY, TMF, ALN, ARD, ATN, NAS, SAS, AQN, SYG, SYN, TEN, TMN, AYN, SGN, QNN, DKG, AAN, SMN, SAN, TTF, TQF, SFN, QAF, QFV, AAF, ASF, SAF, SMF, ASY, AFN, TAF, TSY, TAY, QMQ, SMQ, TYV, TGL, QAY, AAY, ADH, EDK, ASN, QYQ, SFQ, TYQ, TWQ, SWQ, AYQ, SYQ, AMV, TMV, TAV, AQV, TYT, TAT, QGI, QQV, SAQ, NAV, SAV, ASV, QSV, QAV, QAI, QAM, TAM, DTR, DOR, DMR, NNT, NYT, NMT, NST, ATT, SMV, SNT, QNT, AAT, SAM, SAL, QGV, QST, QYT, ASM, TSM, AMT, TST, ANH, SNV, TNT, ANT, SST, AST, TAI, DAR, SSM, TAL, NSM, TSL, SNF, TSI, TSV, TDK, SAT, SAL, QSL, QSI, ASI, SSL, SSV, SSI, AGI, QGM, TGM, SGM, SGL, SGV, ARL, NWE, SFL, TPY, DRP, DTK, DMK, SEY, SME, EAI, AHD, ADN, EFQ, EMH, SGE, DNQ, DNI, QLY, DGT, EGN, DYN, EWV, ESM, EAL, ASD, DKA, ADF, ADY, SLY, AEY, ETY, EAY, TGA, AVM, TPT, SVI, QSH, TTQ, QTN, TLH, AWY, SLT, AWV, QQY, NFV, SFY, TYY, SHA, TEK, QFK, NNY, EPR, NIT, NHI, NTY, SHY, NFM, NFN, NDK, NER, SER, NDR, QDK, SDR, QNA, TNA, THT, SNH, AYA, NFA, AFA, AHA, QHA, EYR, ENR, EHK, QVL, SVL, NIV, NVI, ADM, SAA, SQH, NQV, ALL, ATM, QYA, STT, DGR, NHT, SHT, QHT, TTL, NHM, QHL, DNR, QHM, QFM, QMI, AHV, THI, AHT, TNH, NHV, THV, SHI, ATV, TWI, NYV, TYI, DYR, SFI, NQF, NWM, NSL, NSP, TQY, DRS, ASP, TKD, QWI, QWN, TWN, QWV, THN, TTM, TQQ, NMQ, TYA, STQ, STN, AGN, EKH, ERT, TFH, SFH, AFH, ENK, NYQ, SFM, QGS, AHF, QLT, QHY, AQY, TRD, ERH, QWH, TYH, TRE, TAQ, AER, TDR, ASH, EKI, AFV, TYN, ALT, NGN, SYY, EWN, NGM, NAN, TAS, TFV, SFV, QAN, SGT, SAY, AFQ, TFQ, QFQ, EFK, SYH, QHV, AMM, THQ, AAI, AAM, NSQ, QAT, TSQ, SHQ, QSM, AGV, AGT, TGT, TGI, AVI, TGV, SGI, ESP, SDA, TPN, EAW, NEQ, DSN, DIK, DNA, QES, SLQ, EKD, SDH, SSF, TET, QDI, DSA, DNM, DKT, DGM, SQY, TLT, QEH, DKQ, TGE, DNS, SDV, SNE, EGT, EGV, AAP, AHG, TWK, TQA, TVT, APQ, SVT, NGT, SSH, NLV, AGY, QFF, QYF, NWV, EKA, EKY, SMG, NAG, ASG, TFI, ELK, SEK, QTL, NML, DHS, ETR, NQQ, QWL, ANP, AHH, NEK, NNN, SNA, EWR, ESR, SHN, SFG, SYA, APV, QPV, SPT, TPQ, QVI, TPV, AVL, SEM, NDM, API, QLM, QTM, QQL, QHI, NFL, AYV, NKE, TIM, QYV, SWI, DRN, AWI, SMA, NRE, QTS, QVV, QQT, QMA, QQS, QAA, ATQ, ERL, TGS, QQQ, AQQ, QHF, TAN, QSY, QSN, NGQ, TWH, TMS, QMS, TON, TMT, QTV, THS, TTT, SMT, QMT, SMR, ADA, AAE, EPY, EYL, NWI, TSP, DGQ, NDH, QFD, EHL, ERD, DAF, ENI, ENH, QQW, AGM, ENL, EAF, EYV, ENT, SSE, AGE, QEY, DRH, NIQ, SVV, SVM, QPT, TVL, QTQ, SVQ, TIQ, NLQ, SIQ, AWL, EHH, NGY, NHF, NSA, NAA, NTH, QLI, NWH, QRE, AML, EVR, SNP, NHS, THH, NOS, TTS, AHS, EKV, NFQ, APL, QPM, NPV, SIL, TII, STV, QEL, TFL, SIT, NAQ, TMM, AAL, QQM, AMI, QFL, AHI, SYL, SSP, NVV, TIN, TAA, TQS, TMA, ALA, QQN, NSH, TTH, SRE, ERQ, QHS, SWH, SEV, AVT, ALQ, DKH, AMQ, ARE, TWV, NGL, NGV, TMQ, TLV, EER and QTT.

[0091] In some embodiments, X₁X₂X₃ is selected from ANY, SNI, AAI, AAM, ANT, AST, AYQ, EHK, ENK, ENR, SFQ, SSI, TAY, TDK, TNT, AAF, AAL, AAY, ADK, AFA, ANF, ANI, ANQ, ANS, AQM, ARE, ASV, AYH, AYT, EMK, EWK, NNM, QAF, QAI, QAM, QAT, QAY, QFT, QGM, QHL, QNF, QNQ, QNS, QNT, QNV, QNY, SAH, SAI, SAL, SFT, SFV, SHI, SHV, SMM, SNF, SNM, SNN, SNQ, SNV, SNY, SQI, SQV, SSL, SWQ, SWS, SYI, SYM, SYN, SYQ, TAM, TAT, TDR, TFM, THV, TNF, TNH, TNI, TNM, TNQ, TNV, TSY, TWA, and TYM.

[0092] In some embodiments, X₇ is selected from F and Y; X₈ is selected from N and Q; X₉ is selected from N and S; X₁₀ is selected from T and L.

[0093] In some embodiments, the targeting peptide has an amino acid sequence selected from: X₁X₂X₃RGDFNNT (SEQ ID NO: 98943), X₁X₂X₃RGDENNL (SEQ ID NO: 98933), X₁X₂X₃RGDFQNT (SEQ ID NO: 98934) or X₁X₂X₃RGDYNSL (SEQ ID NO: 98940).

[0094] In some embodiments, X₁ is S, A or E, X₂ is N, Y or S, X₃ is I, Q, R, V, T, M or K.

[0095] In some embodiments, X₁X₂X₃ is selected from the group consisting of: DMK, ATD, EEK, QMD, EFS, ERD, DDR, TDM, SAE, EHS, ENH, SWE, SNE, NNG, QAG, ERG, QSG, QNG, ASG, QFG, AMF, ELR, NFM, NNS, NNI, SDR, EQR, EHR, EWR, EQK, ESR, EKQ, EYR, ENR, EMK, EYK, EHK, EWK, QNI, TNI, TYI, SNY, DRQ, AWI, QWI, DFR, EKG, QYG, QWQ, EKN, EKF, EKT, AFH, ENK, NYS, DKH, AAG, QMF, QFH, QKD, ARE, AHQ, ADK, ADR, AHN, QNS, ANN, SWS, EKS, AFS, QFS, TNQ, TGY, NGL, ARD, AKD, AAF, SMF, AFN, SGT, TGL, ASN, SFQ, AFQ, TFQ, QFQ, EFK, SWQ, AYQ, SYQ, DQR, DMR, ASM, ANT, SHQ, TSL, SNF, QSL, ASI, SGL, SGI, NDA, DHQ, DFK, DTK, DNA, SDS, TDH, DGL, QDV, SDM, DKT, DGM, SQY, DKS, SSD, EMV, TSE, EYV, SSE, EGM, SDF, TTG, QLG, NNP, AGS, QSF, TLM, NGA, AWY, NKD, SWY, TFF, NSG, NGY, QEK, SEK, TEK, AQA, NVL, NHI, TER, NML, NMA, NNA, NHN, ANP, AMS, NER, SER, DKK, NMM, QDK, AHS, TNA, THT, SNH, QNH, ESK, SHS, AYM, SSA, NAT, QLM, QQM, SQI, SNI, QNV, SHV, SHM, NNV, TNN, AHT, TNH, NHV, TQM, THV, SHI, NYL, NMV, NFL, AYV, NQI, NQL, NMI, NSS, SHF, SYM, NYV, AYI, SWI, QFI, ANF, TFT, TWM, QNW, NSY, THY, TNY, NYN, AWN, SMA, NSH, TGH, SFH, SWH, SFM, NFT, QYH, QGS, TGS, TSA, QQQ, QYY, AMQ, TAN, AWH, NMS, TSN, TAH, TMH, QWH, NWS, SWN, QRD, TYH, AKE, TAQ, AER, AYH, ASA, SNS, QSS, SAH, SMH, ASH, QAS, ANS, SYS, QYN, TYN, TNS, SFT, ANQ, SGS, SGH, SSS, TWY, QTY, SYY, NGM, TMS, SYG, TON, SYN, TFN, TMN, AYN, SGN, QNN, SMN, SAN, QAF, ASF, ASY, TAS, TAF, TFV, SMQ, SFV, TMT, QAN, SAY, EDK, AMV, QHV, THS, TAT, QGI, QQV, NAV, SAV, ASV, QSV, QAV, AAI, AAM, QAM, TAM, DTR, NNT, NYT, NMT, ATT, QTT, TTT, QAT, SMV, SNT, QNT, AAT, SAM, SAL, QGV, QST, QYT, TSM, ANH, SNV, TSQ, TNT, SST, AST, TAI, TSI, TSV, TDK, SAT, QSM, SAI, QSI, SSV, SSI, AGT, TGT, AGI, QGM, TGM, TGV, SGM, SGV, SQE, EHT, EYL, DSG, SFE, QND, TQA, AWV, NFV, TSG, SSG, DRG, ANW, TFI, TSF, QNL, STL, TWL, NNF, NND, NYM, NFI, ETR, SNP, EIR, NFS, NNH, NNL, AHL, NNQ, NDR, NNN, QDR, SDK, SNA, AFG, NYA, QHA, QFA, SHN, NFQ, SYA, TFA, EMR, EFR, EAR, NOM, TTL, TQL, SMM, SKE, SYL, ASL, SLV, TTV, AAL, NHL, NHM, QYL, QHL, ATL, DNR, DSR, ANL, SHL, SNL, TNL, QAL, AMI, ANI, QNM, QYM, QHM, QFM, QMM, QMI, ANM, AHM, SQM, AQT, EKL, NNM, TNM, SNM, QQI, TQV, TQI, THI, QHI, THL, SNN, TNV, SWL, AQM, SYV, TFM, TYM, TWI, AFI, ATI, DYR, QLV, TMI, SYI, SFI, NWM, NWT, NSL, STF, SNW, AFM, SSY, NSV, TNF, NAF, TFS, QWV, ERT, TQT, AFT, NYQ, ERL, NRD, TRD, AWQ, TDR, TSH, ASS, AYT, TYS, QYS, SYT, SWV, SNQ, SMS, NAS, SAS, QFV, SAF, TWQ, TAV, AMM, TYT, QAI, TST, DAR, SSM, TAL, NES, DWK, DLR, DIR, SDT, EAN, ETH, TYD, SYE, EAM, TND, AYD, TSP, DRT, NDH, SSF, EFH, DNQ, DSH, DNT, SDI, DKQ, EWT, EAL, EAS, ESL, ASD, EAH, ASE, EAF, ENT, SIY, QDY, APG, AIG, SSW, NPG, ERP, TVI, QSH, SLS, EDR, AWL, SLH, EQH, EHH, NWV, EKY, STY, DRI, EYH, DRV, SPY, NNY, DWR, ERA, QRE, EVR, SRD, AWA, SFA, QTI, SHT, THM, AQI, AHI, SWT, ATV, TTI, SMI, QYV, NMY, SWM, QNY, TWT, QWT, TQY, NRE, QTS, QHQ, DVR, AAA, TYA, EKH, ALH, AWT, ATH, SRE, TFH, QMH, ERV, ERS, QHY, ALQ, QSY, ERH, TRE, TSS, QAH, AAH, SWA, TWS, QWS, AYS, AFV, QNQ, ANY, ALT, SMY, TWV, TTY, AMY, QMY, ERY, TWH, TSY, TAY, TYV, QAY, AAY, QYQ, TYQ, SYH, AQV, EER, THQ, and SMT.

[0096] In some embodiments, X₁X₂X₃ is selected from the group consisting of: ADR, ASI, EFK, EHK, EWK, SYQ, AAF, AAT, AAY, AFI, AFQ, AGI, AGT, AHI, ANH, ANM, ANN, AQI, ASA, ASH, AST, ASV, AWT, AYQ, AYT, DAR, DMK, DQR, DVR, EAR, EFR, EMK, EMR, EQK, ERA, ERS, ESR, NDA, NDR, NMI, NMV, NNM, NNN, NYL, NYM, NYN, NYQ, NYV, QAM, QFQ, QFV, QGV, QNH, QNI, QNM, QQV, QSF, QSY, SAL SAM, SAS, SDR, SFQ, SGH, SGM, SGT, SGV, SHL, SHM, SHQ, SHV, SMH, SNA, SNE, SNF, SNI, SNQ, SNT, SRE, SST, SWQ, SWT, SYG, SYY, TFQ, THL, THQ, THV, TMI, TNL, TNS, TSH, TSQ, and TWQ.

[0097] In some embodiments, RGDRX₈X₉X₁₀ has an amino acid sequence selected from: RGDRGVX₁₀ (SEQ ID NO: 157058), RGDRGSX₁₀ (SEQ ID NO: 157059), RGDRGNX₁₀ (SEQ ID NO: 157060), RGDRGGX₁₀ (SEQ ID NO: 157061), RGDRGQX₁₀ (SEQ ID NO: 157062), RGDRGX₉V (SEQ ID NO: 157063), RGDRGX₉I (SEQ ID NO: 157064), RGDRGX₉S (SEQ ID NO: 157065), RGDRGX₉L (SEQ ID NO: 157066). RGDRGX₉Q (SEQ ID NO: 157067), RGDHX₈X₉L (SEQ ID NO. 157068), RGDRX₈X₉I (SEQ ID NO: 157069). RGDRX₈X₉V (SEQ ID NO. 157070). RGDRX₈X₉L (SEQ ID NO: 157071). RGDYX₈X₉L (SEQ ID NO: 157072), RGDYX₈X₉V (SEQ ID NO: 157073), RGDYX₈X₉M (SEQ ID NO: 157074), and RGDLX₈X₉T (SEQ ID NO: 157075).

[0098] In some embodiments, the modified sequence does not comprise an amino acid sequence selected from: RGDRMVF (SEQ ID NO: 157080), RGDRTVI (SEQ ID NO: 157081), SRODRPM (SEQ ID NO: 157082), ISLRGDR (SEQ ID NO: 157083), and RGDLLLS (SEQ ID NO: 1).

[0099] In some embodiments, the targeting peptide has a sequence selected from: X₁X₂X₃RGDHVNL (SEQ ID NO: 98924); X₁X₂X₃RGDLIGR (SEQ ID NO: 98925); X₁X₂X₃RGDQSTL (SEQ ID NO: 98926); X₁X₂X₃RGDRGQI (SEQ ID NO: 98927); X₁X₂X₃RGDRGVV (SEQ ID NO: 98928); X₁X₂X₃RGDRQGI (SEQ ID NO: 98929); X₁X₂X₃RGDRSQT (SEQ ID NO: 98930); X₁X₂X₃RGDRSVV (SEQ ID NO: 98931); X₁X₂X₃RGDLLLS (SEQ ID NO: 98932); X₁X₂X₃RGDFNNL (SEQ ID NO: 98933); X₁X₂X₃RGDFQNT (SEQ ID NO: 98934); X₁X₂X₃RGDLTVT (SEQ ID NO: 98935); X₁X₂X₃RGDYVGL (SEQ ID NO: 98936); X₁X₂X₃RGDYSSV (SEQ ID NO: 98937); X₁X₂X₃RGDHGVL (SEQ ID NO: 98938); X₁X₂X₃RGDRDYL (SEQ ID NO: 98939); X₁X₂X₃RGDYNSL (SEQ ID NO: 98940); X₁X₂X₃RGDYTSV (SEQ ID NO: 98941); X₁X₂X₃RGDYTSM (SEQ ID NO: 98942); and X₁X₂X₃RGDFNNT (SEQ ID NO: 98943). In some embodiments, X₁ is selected from S, E, A, D, N, Q, or T. In some embodiments, X₁ is selected from S or E. In some embodiments, X₁ is S. In some embodiments, X₁ is E. In some embodiments, X₂ is selected from N, A, D, E, F, G, H, I, K, L, M, N, P, Q, R, S, T, V, W, or Y. In some embodiments, X₂ is selected from N or A. In some embodiments, X₂ is N. In some embodiments, X₂ is A. In some embodiments, X₃ is selected from R, Q, A, D, E, F, G, H, I, K, L, M, N, P, S, T, V, W, or Y. In some embodiments, X₃ is selected from R or Q. In some embodiments. X₃ is R. In some embodiments, X₃ is Q. In some embodiments, X₂ is N; and X₃ is R. In some embodiments, X₁ is E; X₂ is N; and X₃ is R. In some embodiments, X₁ is S; X₂ is N; and X₃ is R.

[0100] In some embodiments, the targeting peptide is positioned between 565 and 595 within VR VIII of the modified AAV capsid protein.

[0101] In some embodiments,
[0102] the reference AAV capsid protein is a capsid protein of AAV1 or a modification thereof and the targeting peptide is between Q585 and T589 of the reference AAV capsid protein;
[0103] the reference AAV capsid protein is a capsid protein of AAV2 or a modification thereof and the targeting peptide is between Q584 and R588 or between N587 and R588 of the reference AAV capsid protein;
[0104] the reference AAV capsid protein is a capsid protein of AAV3 or a modification thereof and the targeting peptide is between Q585 and T589 of the reference AAV capsid protein;
[0105] the reference AAV capsid protein is a capsid protein of AAV4 or a modification thereof and the targeting peptide is between G581 and N585 of the reference AAV capsid protein;
[0106] the reference AAV capsid protein is a capsid protein of AAV5 or a modification thereof and the targeting peptide is between Q574 and T578 of the reference AAV capsid protein;
[0107] the reference AAV capsid protein is a capsid protein of AAV6 or a modification thereof and the targeting peptide is between Q585 and T589 of the reference AAV capsid protein;
[0108] the reference AAV capsid protein is a capsid protein of AAV7 or a modification thereof and the targeting peptide is between Q586 and T590 of the reference AAV capsid protein;
[0109] the reference AAV capsid protein is a capsid protein of AAV8 or a modification thereof and the targeting peptide is between Q587 and A591 of the modified AAV capsid protein;
[0110] the reference AAV capsid protein is a capsid protein of AAV9 or a modification thereof and the targeting peptide is between H587 and A591 of the reference AAV capsid protein;
[0111] the reference AAV capsid protein is a capsid protein of AAVrh10 or a modification thereof and the targeting peptide is between Q587 and A591 of the reference AAV capsid protein;
[0112] the reference AAV capsid protein is a capsid protein of AAVpo.1 or a modification thereof and the targeting peptide is between N564 and S568 of the reference AAV capsid protein;
[0113] the reference AAV capsid protein is a capsid protein of AAV12 or a modification thereof and the targeting peptide is between N589 and A593 of the reference AAV capsid protein;
[0114] the reference AAV capsid protein is a capsid protein of Anc80 or a modification thereof and the targeting peptide is between Q585 and T589 of the reference AAV capsid protein;
[0115] the reference AAV capsid protein is a capsid protein of Anc80L65 or a modification thereof and the targeting peptide is between Q585 and T589 of the reference AAV capsid protein;
[0116] the reference AAV capsid protein is a capsid protein of Anc80-55 or a modification thereof and the targeting peptide is between Q585 and T589 of the reference AAV capsid protein;
[0117] the reference AAV capsid protein is a capsid protein of Anc80-129 or a modification thereof and the targeting peptide is between Q585 and T589 of the reference AAV capsid protein;
[0118] the reference AAV capsid protein is a capsid protein of Anc80-156 or a modification thereof and the targeting peptide is between Q585 and T589 of the reference AAV capsid protein;
[0119] the reference AAV capsid protein is a capsid protein of Anc80-751 or a modification thereof and the targeting peptide is between Q585 and T589 of the reference AAV capsid protein;
[0120] the reference AAV capsid protein is a capsid protein of Ane80-1029 or a modification thereof and the targeting peptide is between Q585 and T589 of the reference AAV capsid protein; or
[0121] the reference AAV capsid protein is a capsid protein of Anc80-1712 or a modification thereof and the targeting peptide is between Q585 and T589 of the reference AAV capsid protein.

[0122] In some embodiments,
[0123] the reference AAV capsid protein is a capsid protein of AAV1 or a modification thereof and the targeting peptide is between D590 and P591 or between S588 and T589 of the reference AAV capsid protein;
[0124] the reference AAV capsid protein is a capsid protein of AAV2 or a modification thereof and the targeting peptide is between R588 and Q589 or between N587 and R588 of the reference AAV capsid protein;
[0125] the reference AAV capsid protein is a capsid protein of AAV3 or a modification thereof and the targeting peptide is between S586 and S587 or between N588 and T589 of the reference AAV capsid protein;
[0126] the reference AAV capsid protein is a capsid protein of AAV4 or a modification thereof and the targeting peptide is between S584 and N585 or between S586 and N587 of the reference AAV capsid protein;
[0127] the reference AAV capsid protein is a capsid protein of AAV5 or a modification thereof and the targeting peptide is between S575 and S576 or between T577 and T578 of the reference AAV capsid protein;
[0128] the reference AAV capsid protein is a capsid protein of AAV6 or a modification thereof and the targeting peptide is between D590 and P591 or S588 and T589 of the reference AAV capsid protein;
[0129] the reference AAV capsid protein is a capsid protein of AAV7 or a modification thereof and the targeting peptide is between N589 and T590 of the reference AAV capsid protein;
[0130] the reference AAV capsid protein is a capsid protein of AAV8 or a modification thereof and the targeting peptide is between N590 and T591 of the modified AAV capsid protein;
[0131] the reference AAV capsid protein is a capsid protein of AAV9 or a modification thereof and the targeting peptide is between Q588 and A589 of the reference AAV capsid protein;
[0132] the reference AAV capsid protein is a capsid protein of AAVrh10 or a modification thereof and the targeting peptide is between N590 and A591 of the reference AAV capsid protein;
[0133] the reference AAV capsid protein is a capsid protein of AAVpo.1 or a modification thereof and the targeting peptide is between N567 and S568 or between N569 and T570 of the reference AAV capsid protein;
[0134] the reference AAV capsid protein is a capsid protein of AAV12 or a modification thereof and the targeting peptide is between N592 and A593 or between TS94 and T595 of the reference AAV capsid protein;
[0135] the reference AAV capsid protein is a capsid protein of Anc80 or a modification thereof and the targeting peptide is between T589 and A590 or between N587 and T588 of the reference AAV capsid protein;
[0136] the reference AAV capsid protein is a capsid protein of Anc80165 or a modification thereof and the targeting peptide is between T589 and A590 or between N587 and T588 of the reference AAV capsid protein;
[0137] the reference AAV capsid protein is a capsid protein of Anc80-55 or a modification thereof and the targeting peptide is between T589 and A590 or between N587 and T588 of the reference AAV capsid protein;
[0138] the reference AAV capsid protein is a capsid protein of Anc80-129 or a modification thereof and the targeting peptide is between T589 and A590 or between NS87 and T588 of the reference AAV capsid protein;
[0139] the reference AAV capsid protein is a capsid protein of Ane80-156 or a modification thereof and the targeting peptide is between T589 and A590 or between N587 and T588 of the reference AAV capsid protein;
[0140] the reference AAV capsid protein is a capsid protein of Anc80-751 or a modification thereof and the targeting peptide is between T589 and A590 or between N587 and T588 of the reference AAV capsid protein;
[0141] the reference AAV capsid protein is a capsid protein of Anc80-1029 or a modification thereof and the targeting peptide is between T589 and A590 or between N587 and T588 of the reference AAV capsid protein; or
[0142] the reference AAV capsid protein is a capsid protein of Anc80-1712 or a modification thereof and the targeting peptide is between T589 and A590 or between N587 and T588 of the reference AAV capsid protein.

[0143] In some embodiments,
[0144] P₁ is independently selected from an asparagine (N), a serine (S), or a threonine (T);
[0145] P₂ is independently selected from a serine (S) or a glycine (G);
[0146] P₃ is independently selected from a threonine (T), a glutamine (Q), an alanine (A), or glutamate (E);
[0147] P₄ is independently selected from a serine (S), a threonine (T), or an alanine (A);
[0148] P₅ is independently selected from a glycine (G) or an alanine (A);
[0149] P₆ is independently selected from a glycine (G) or an alanine (A);
[0150] P₇ is independently selected from an alanine (A) or a serine (S);
[0151] P₈ is independently selected from a serine (S) or a threonine (T); and
[0152] P₁₂ is independently selected from a histidine (H), a threonine (T), or an alanine (A).

[0153] In some embodiments, P₅, P₆ or both P₅ and P₆ are not an alanine (A).

[0154] In some embodiments, the peptide segment does not comprise an alanine (A) at P₆ and a threonine (T) at P₈.

[0155] In some embodiments, the peptide segment has a sequence of P₁P₂P₃P₄GGP₇P₈NDNP₁₂ (SEQ ID NO: 44921), wherein P₁, P₂, P₃, P₄, P₇, P₈, and P₁₂ are independently selected from any amino acid residue.

[0156] In some embodiments,
[0157] P₁ is independently selected from an asparagine (N) or a serine (S);
[0158] P₂ is independently selected from a serine (S) or a glycine (G);
[0159] P₃ is independently selected from a threonine (T) or a glutamine (Q);
[0160] P₄ is independently selected from a serine (S), a threonine (T), or an alanine (A);
[0161] P₇ is independently selected from an alanine (A) or a serine (S);
[0162] P₈ is independently selected from a serine (S) or a threonine (T); and
[0163] P₁₂ is independently selected from a histidine (H), a threonine (T), or an alanine (A).

[0164] In some embodiments, the peptide segment has a sequence of P₁P₂TP₄GGP₇P₈NDNP₁₂ (SEQ ID NO: 44922), wherein P₁, P₂, P₄, P₇, P₈, and P₁₂ are independently selected from any amino acid residue.

[0165] In some embodiments, the peptide segment has a sequence of P₁P₂QP₄GGP₇P₈NDNP₁₂ (SEQ ID NO: 44923), wherein P₁, P₂, P₄, P₇, P₈, and P₁₂ are independently selected from any amino acid residue.

[0166] In some embodiments, the peptide segment has a sequence of P₁P₂TP₄GGP₇TNDNP₁₂ (SEQ ID NO: 44924), wherein P₁, P₂, P₄, P₇, and P₁₂ are independently selected from any amino acid residue.

[0167] In some embodiments, the peptide segment has a sequence of NP₂TP₄GGP₇P₈NDNP₁₂ (SEQ ID NO: 44925), wherein P₂, P₄, P₇, and P₁₂ are independently selected from any amino acid residue.

[0168] In some embodiments, the peptide segment has a sequence of SP₂TP₄GGP₇P₈NDNP₁₂ (SEQ ID NO: 44926), wherein P₂, P₄, P₇, P₈, and P₁₂ are independently selected from any amino acid residue.

[0169] In some embodiments, the peptide segment is NSTSGGP₇P₈NDNH (SEQ ID NO: 44927), wherein P₇ and P₈ are independently selected from any amino acid residue.

[0170] In some embodiments, P₇ is independently selected from an alanine (A) or a serine (S) and P₈ is independently selected from a serine (S) or a threonine (T).

[0171] In some embodiments, the peptide segment comprises:

(SEQ ID NO: 46026)
NSTSGGASNDNH,
(SEQ ID NO: 46029)
NSTSGGATNDNH,
(SEQ ID NO: 46031)
NSTSGGSSNDNH,
or
(SEQ ID NO: 46034)
NSTSGGSTNDNH.

[0172] In some embodiments, the peptide segment is NSTTGGP₇P₈NDNH (SEQ ID NO: 44928), wherein P₇ and P₈ are independently selected from any amino acid residue.

[0173] In some embodiments, P₇ is independently selected from an alanine (A) or a serine (S) and P₈ is independently selected from a serine (S) or a threonine (T).

[0174] In some embodiments, the peptide segment comprises:

(SEQ ID NO: 46073)
NSTTGGASNDNH,
(SEQ ID NO: 46076)
NSTTGGATNDNH,
(SEQ ID NO: 46079)
NSTTGGSSNDNH,
or
(SEQ ID NO: 46082)
NSTTGGSTNDNH.

[0175] In some embodiments, the peptide segment is SGQTGGP₇P₈NDNH (SEQ ID NO: 44929), wherein P₇ and P₈ are independently selected from any amino acid residue.

[0176] In some embodiments, P₇ is independently selected from an alanine (A) or a serine (S) and P₈ is independently selected from a serine (S) or a threonine (T).

[0177] In some embodiments, the peptide segment comprises:

(SEQ ID NO: 46505)
SGQTGGASNDNH,
(SEQ ID NO: 46508)
SGQTGGATNDNH,
(SEQ ID NO: 46511)
SGQTGGSSNDNH,
or
(SEQ ID NO: 46514)
SGQTGGSTNDNH.

[0178] In some embodiments, the peptide segment is SGTAGGP₇P₈NDNT (SEQ ID NO: 44930), wherein P₇ and P₈ are independently selected from any amino acid residue.

[0179] In some embodiments, P₇ is independently selected from an alanine (A) or a serine (S) and P₈ is independently selected from a serine (S) or a threonine (T).

[0180] In some embodiments, the peptide segment comprises:

(SEQ ID NO: 46554)
SGTAGGASNDNT,
or
(SEQ ID NO: 46560)
SGTAGGSSNDNT.

[0181] In some embodiments, the peptide segment does not comprise SGTAGGATNDNT (SEQ ID NO: 46557) or SGTAGGSTNDNT (SEQ ID NO: 46563).

[0182] In some embodiments, the peptide segment is SGTSGGP₇P₈NDNA (SEQ ID NO: 44931), wherein P₇ and P₈ are independently selected from any amino acid residue.

[0183] In some embodiments, P₇ is independently selected from an alanine (A) or a serine (S) and P₈ is independently selected from a serine (S) or a threonine (T).

[0184] In some embodiments, the peptide segment comprises:

(SEQ ID NO: 46600)
SGTSGGASNDNA,
(SEQ ID NO: 46603)
SGTSGGATNDNA,
(SEQ ID NO: 46606)
SGTSGGSSNDNA,
or
(SEQ ID NO: 46609)
SGTSGGSTNDNA.

[0185] In some embodiments, the peptide segment is SGTTGGP₇P₈NDNT (SEQ ID NO: 44932), wherein P₇ and P₈ are independently selected from any amino acid residue.

[0186] In some embodiments, P₇ is independently selected from an alanine (A) or a serine (S) and P₈ is independently selected from a serine (S) or a threonine (T).

[0187] In some embodiments, the peptide segment comprises:

(SEQ ID NO: 46650)
SGTTGGASNDNT,
(SEQ ID NO: 46653)
SGTTGGATNDNT,
(SEQ ID NO: 46656)
SGTTGGSSNDNT,
or
(SEQ ID NO: 46659)
SGTTGGSTNDNT.

[0188] In some embodiments, the peptide segment is SSTAGGP₇P₈NDNA (SEQ ID NO: 44933), wherein P₇ and P₈ are independently selected from any amino acid residue.

[0189] The In some embodiments, P₇ is independently selected from an alanine (A) or a serine (S) and P₈ is independently selected from a serine (S) or a threonine (T).

[0190] In some embodiments, the peptide segment comprises:

(SEQ ID NO: 47128)
SSTAGGASNDNA,
(SEQ ID NO: 47131)
SSTAGGATNDNA,
(SEQ ID NO: 47134)
SSTAGGSSNDNA,
or
(SEQ ID NO: 47137)
SSTAGGSTNDNA.

[0191] In some embodiments, the peptide segment is SSTAGGASNDNA (SEQ ID NO: 47128).

[0192] In some embodiments, the peptide segment is SSTAGGATNDNA (SEQ ID NO: 47131).

[0193] In some embodiments, the peptide segment is NSTSGASTNDNA (SEQ ID NO: 48390).

[0194] In some embodiments, the peptide segment is selected from a peptide segment as shown in Tables 20 or 28.

[0195] In some embodiments, variable region I (VR I) corresponds to amino acid residues between about position 259 to about position 275 of the modified capsid protein.

[0196] In some embodiments, the peptide segment is at a position between S261 and Y274 of an AAV9 capsid protein (SEQ ID NO: 61).

[0197] In some embodiments, the peptide segment is at a position between S260 and Y273 of an Anc80 capsid protein (SEQ ID NO: 132).

[0198] In some embodiments, the peptide segment is at a position between S260 and Y273 of an Ane801.65 capsid protein (SEQ ID NO: 142).

[0199] In some embodiments, the peptide segment is at a position between S260 and Y273 of an AAV2 capsid protein (SEQ ID NO: 55).

[0200] In some embodiments, the targeting peptide has an amino acid sequence selected from SEQ ID NOs: 44864-44867, 44879-44883, 44911, 44912, 44913, and 44918-44919; and the peptide segment has an amino acid sequence selected from SEQ ID NOs: 46026, 46029, 46031, 46035, 46073, 46076, 46079, 46082, 46505, 46508, 46511, 46514, 46554, 46560, 46609, 46600, 46603, 46606, 46650, 46653, 46656, 46659, 47128, 47131, 47134, and 47137.

[0201] In some embodiments, the targeting peptide has an amino acid sequence selected from SEQ ID NOs: 44864-44867, 44879-44883, 44911, 44912, 44913, and 44918-44919; and the peptide segment has the amino acid sequence SGTAGGASNDNT (SEQ ID NO: 46554).

[0202] In some embodiments, the targeting peptide has an amino acid sequence selected from SEQ ID NOs: 44864-44867, 44879-44883, 44911, 44912, 44913, and 44918-44919; and the peptide segment has the amino acid sequence SGTSGGSTNDNA (SEQ ID NO: 46609).

[0203] In some embodiments, the targeting peptide has an amino acid sequence selected from SEQ ID NOs: 44864-44867, 44879-44883, 44911, 44912, 44913, and 44918-44919; and the peptide segment has the amino acid sequence SGTTGGSTNDNT (SEQ ID NO: 46659).

[0204] In some embodiments, the targeting peptide has an amino acid sequence selected from SEQ ID NOs: 44864-44867, 44879-44883, 44911, 44912, 44913, and 44918-44919; and the peptide segment has the amino acid sequence SGTTGGSTNDNT (SEQ ID NO: 47128).

[0205] In some embodiments, the targeting peptide has an amino acid sequence selected from SEQ ID NOs: 44864-44867, 44879-44883, 44911, 44912, 44913, and 44918-44919; and the peptide segment has the amino acid sequence NSTSGGSSNDNA (SEQ ID NO: 48388).

[0206] In some embodiments, the targeting peptide has an amino acid sequence selected from SEQ ID NOs: 44864-44867, 44879-44883, 44911, 44912, 44913, and 44918-44919; and the peptide segment has the amino acid sequence NSTSGASTNDNA (SEQ ID NO: 48390).

[0207] In some embodiments, the targeting peptide has the amino acid sequence ENRRGDENNL (SEQ ID NOs: 44864); and the peptide segment has the amino acid sequence SGTTGGSTNDNT (SEQ ID NO: 46659).

[0208] In some embodiments, the targeting peptide has the amino acid sequence ENRRGDFNNL (SEQ ID NOs: 44864); and the peptide segment has the amino acid sequence SGTTGGSSNDNT (SEQ ID NO: 46656).

[0209] In some embodiments, the targeting peptide has the amino acid sequence ENRRGDFNNL (SEQ ID NOs: 44864); and the peptide segment has the amino acid sequence SSTAGGASNDNA (SEQ ID NO: 47128).

[0210] In some embodiments, the targeting peptide has the amino acid sequence SAQRGDLLLS (SEQ ID NO: 44882); and the peptide segment has the amino acid sequence SSTAGGATNDNA (SEQ ID NO: 47131).

[0211] In some embodiments, the targeting peptide has the amino acid sequence SAQRGDLLLS (SEQ ID NO: 44882); and the peptide segment has the amino acid sequence SGTTGGSTNDNT (SEQ ID NO: 46659).

[0212] In some embodiments, the targeting peptide has the amino acid sequence SAQRGDLLLS (SEQ ID NO: 44882); and the peptide segment has the amino acid sequence SGTTGGSSNDNT (SEQ ID NO: 46656).

[0213] In some embodiments, the targeting peptide has the amino acid sequence SAQRGDLLLS (SEQ ID NO: 44882); and the peptide segment has the amino acid sequence SSTAGGASNDNA (SEQ ID NO: 47128).

[0214] In some embodiments, the targeting peptide has the amino acid sequence ENRRGDFQNT (SEQ ID NO: 44866); and the peptide segment has the amino acid sequence SSTAGGATNDNA (SEQ ID NO: 47131).

[0215] In some embodiments, the targeting peptide has the amino acid sequence ENRRGDFQNT (SEQ ID NO: 44866); and the peptide segment has the amino acid sequence SGTTGGSTNDNT (SEQ ID NO: 46659).

[0216] In some embodiments, the targeting peptide has the amino acid sequence ENRRGDFQNT (SEQ ID NO: 44866); and the peptide segment has the amino acid sequence SGTTGGSSNDNT (SEQ ID NO: 46656).

[0217] In some embodiments, the targeting peptide has the amino acid sequence SNRRGDFNNT (SEQ ID NO: 44883); and the peptide segment has the amino acid sequence SSTAGGASNDNA (SEQ ID NO: 47128).

[0218] In another aspect, this disclosure features a modified adeno-associated virus (AAV) capsid protein, comprising: a targeting peptide at a site within VR VIII, wherein the targeting peptide has a sequence selected from SEQ ID NOs: 44864-44867, 44879-44883, 44911, 44912, 44913, and 44918-44919; and a peptide segment within VR I, wherein the peptide segment has a sequence selected from SEQ ID NOs: 46026, 46029, 46031, 46035, 46073, 46076, 46079, 46082, 46505, 46508, 46511, 46514, 46554, 46560, 46609, 46600, 46603, 46606, 46650, 46653, 46656, 46659, 47128, 47131, 47134, and 47137.

[0219] In another aspect, this disclosure features a polynucleotide encoding any of the modified AAV capsid proteins described herein.

[0220] In another aspect, this disclosure features a vector comprising any of the polynucleotides described herein.

[0221] In some embodiments, the vector also includes a promoter operably linked to the polynucleotide.

[0222] In another aspect, this disclosure features a host cell comprising any of the modified AAV capsid proteins described herein, any of the polynucleotides described herein, or any of the vectors described herein.

[0223] In another aspect, this disclosure features a recombinant AAV virion (rAAV) any of the modified AAV capsid proteins described herein.

[0224] In some embodiments, the AAV virion also includes an exogenous polynucleotide.

[0225] In some embodiments, the exogenous polynucleotide comprises a template for homology directed repair.

[0226] In some embodiments, the exogenous polynucleotide comprises an expressible polynucleotide encoding a therapeutic tRNA, miRNA, gene editing guide RNA, or RNA-editing guide RNA.

[0227] In some embodiments, the exogenous polynucleotide comprises an expressible polynucleotide encoding a therapeutic protein.

[0228] In some embodiments, the therapeutic protein is MTM1 or a fragment thereof.

[0229] In some embodiments, the expressible polypeptide comprises the sequence of SEQ ID NO: 165 or a fragment thereof.

[0230] In some embodiments, the expressible polypeptide comprises the sequence having at least 80%, 85%, 90%, 95%, 98%, 99% or 100% sequence identity to any of SEQ ID Nos: 166-170.

[0231] In some embodiments, the exogenous polynucleotide further comprises a regulatory sequence. In some embodiments, the regulatory sequence comprises expression regulatory elements (EREs). In some embodiments, the EREs comprise a CAG promoter. In some embodiments, the EREs comprise a sequence having at least 90%, at least 95%, at least 98%, at least 99% or 100% sequence identity to any one of SEQ IDs NO: 171-173.

[0232] In another aspect, this disclosure features a pharmaceutical composition comprising any of the modified AAV capsid proteins described herein or any of the rAAV virions described herein.

[0233] In another aspect, this disclosure features a method for treating or ameliorating or preventing a disease or condition in a subject, comprising administering a therapeutically effective amount of any of the AAV virions described herein or any of the pharmaceutical compositions described herein.

[0234] In some embodiments of any of the methods of treating or ameliorating or preventing a disease as described herein, the disease is a muscular disease and/or the condition is muscle degeneration.

[0235] In some embodiments of any of the methods of treating or ameliorating or preventing a disease as described herein, said muscle is a striated muscle, preferably heart or a skeletal muscle or diaphragm.

[0236] In some embodiments of any of the methods of treating or ameliorating or preventing a disease as described herein, wherein said muscular disease is a muscular dystrophy, a cardiomyopathy, a myotonia, a muscular atrophy, a myoclonus dystonia, a mitochondrial myopathy, a rhabdomyolysis, a fibromyalgia, and/or a myofascial pain syndrome.

[0237] In some embodiments, any of the modified adeno-associated virus (AAV) capsid proteins described herein for use in treating and/or preventing a muscular disease and/or muscle degeneration.

[0238] In another aspect, this disclosure features an AAV virion comprising any of the modified AAV capsid proteins described herein or any of the rAAV virions described herein for use in treating and/or preventing a muscular disease and/or in muscle regeneration.

[0239] In another aspect, this disclosure features a pharmaceutical composition comprising any of the modified AAV capsid proteins described herein, and/or any of the rAAV virions described herein for use in treating and/or preventing a muscular disease and/or in muscle regeneration.

[0240] In another aspect, this disclosure features a method of transferring an exogenous polynucleotide into a muscle cell, comprising the step of administering any of the rAAV virions described herein to a subject.

[0241] In some embodiments, the administration results in transfer of the exogenous polynucleotide in the muscle cell, at a muscle:liver infection ratio of greater than 1 when measured by genome copies of the AAV virion.

[0242] In some embodiments, the muscle:liver infection ratio ranges from 1 to 100. In some embodiments, the muscle:liver infection ration ranges from 1 to 10.

[0243] In some embodiments, the muscle:liver infection ratio ranges from 2 to 8.

[0244] In some embodiments, the administration results in expression of the exogenous polynucleotide in the muscle cell, at a muscle:liver expression ratio of greater than 10.

[0245] In some embodiments, the muscle:liver expression ratio ranges from 10 to 100.

[0246] In some embodiments, the muscle:liver expression ratio ranges from 20 to 80.

[0247] In some embodiments, the muscle:liver expression ratio ranges from 50 to 80 when measured by mRNA transcript expression.

[0248] In some embodiments, the muscle:liver expression ratio ranges from 10 to 50 when measured by protein expression.

[0249] In some embodiments, the muscle cell is selected from triceps surae, biceps, heart and quadricep.

[0250] In another aspect, this disclosure features use of the any of the modified AAV capsid proteins described herein, and/or any of the AAV virions described herein for transferring an exogenous polynucleotide into a muscle cell.

[0251] In some embodiments, said use is a non-therapeutic use, preferably wherein said use is an in vitro use. In some embodiments, the muscle cell is selected from triceps surae, biceps, heart and quadricep.

[0252] Accordingly, one aspect of the present disclosure provides a modified adeno-associated virus (AAV) capsid protein, comprising: (i) a reference AAV capsid protein, and (ii) a 7-mer peptide having the sequence RGDLLLS (SEQ ID NO: 1) inserted into a site within VR VIII of the reference AAV capsid protein.

[0253] In some embodiments, the AAV capsid protein is selected from one or more of VP1, VP2 and VP3. In some embodiments, the reference AAV capsid protein is a capsid protein of an AAV variant selected from the group consisting of: AAV2; AAV1; AAV6; AAV3; AAV LK03; AAV7; AAV8; AAV hu.37; AAV rh.10; AAV9; AAV hu.68; AAV10; AAV5; AAV3-3; AAV4-4; AAV1-A; hu.46-A; hu.48-A; hu.44-A; hu.43-A; AAV6-A; hu.34-B; hu.47-B; hu.29-B; rh.63-B; hu.56-B; hu.45-B; rh.57-B; rh.35-B; rh.58-B; rh.28-B; rh.51-B; rh.19-B; rh.49-B; rh.52-B; rh.13-B; AAV2-B; rh.20-B; rh.24-B, rh.64-B; hu.27-B; hu.21-B; hu.22-B; hu.23-B; hu.7-C; hu.61-C; rh.56-C; hu.9-C; hu.54-C; hu.53-C; hu.60-C; hu.55-C; hu.2-C; hu.1-C; hu.18-C; hu.3-C; hu.25-C; hu.15-C; hu.16-C; hu.11-C; hu.10-C; hu.4-C; rh.54-D; rh.48-D; rh.55-D; rh.62-D; AAV7-D; rh.52-E; rh.51-E; hu.39-E; rh.53-E; hu.37-E; rh.43-E; rh.50-E; rh.49-E; rh.61-E; hu.41-E; rh.64-E; rh74; hu.42-E; rh.57-E; rh.40-E; hu.67-E; hu.17-E; hu.6-E; hu.66-E; rh.38-E; hu.32-F; AAV9/hu; hu.31-F; Anc80; Anc81; Anc82; Anc83; Anc84; Anc94; Anc113; Anc126; Anc127; Anc80L27; Anc80L59; Anc80L60; Anc80L62; Anc80L65; Anc80L33; Anc80L36; Anc80-55, Anc80-129, Anc80-156, Anc80-751, Anc80-1029, Anc80-1712, Anc80L44; Anc80L1; Anc110; and Anc80DI. In some embodiments, the reference AAV capsid protein is a capsid protein having a sequence selected from SEQ ID Nos: 54-152 or a fragment thereof.

[0254] In some embodiments, the 7-mer peptide is inserted into an amino acid position between 565 and 595 of the reference AAV capsid protein. In some embodiments, (i) the reference AAV capsid protein is a capsid protein of AAV1 and the 7-mer peptide is inserted between D590 and P591 or between S588 and T589 of the capsid protein; (ii) the reference AAV capsid protein is a capsid protein of AAV2 and the 7-mer peptide is inserted between R588 and Q589 or between N587 and R588 of the capsid protein; (iii) the reference AAV capsid protein is a capsid protein of AAV3b and the 7-mer peptide is inserted between S586 and S587 or between N588 and T589 of the capsid protein; (iv) the reference AAV capsid protein is a capsid protein of AAV4 and the 7-mer peptide is inserted between S584 and N585 or between S586 and N587 of the capsid protein; (v) the reference AAV capsid protein is a capsid protein of AAV5 and the 7-mer peptide is inserted between S575 and S576 or between T577 and T578 of the capsid protein; (vi) the reference AAV capsid protein is a capsid protein of AAV6 and the 7-mer peptide is inserted between D590 and P591 or S588 and TS89 of the capsid protein; (vii) the reference AAV capsid protein is a capsid protein of AAV7 and the 7-mer peptide is inserted between N589 and T590 of the capsid protein; (viii) the reference AAV capsid protein is a capsid protein of AAV8 and the 7-mer peptide is inserted between N590 and T591 of the capsid protein; (ix) the reference AAV capsid protein is a capsid protein of AAV9 and the 7-mer peptide is inserted between Q588 and A589 of the capsid protein; (x) the reference AAV capsid protein is a capsid protein of AAVrh10 and the 7-mer peptide is inserted between N590 and A591 of the capsid protein; (vi) the reference AAV capsid protein is a capsid protein of AAVpo.1 and the 7-mer peptide is inserted between N567 and S568 or between N569 and TS70 of the capsid protein; or (xii) the reference AAV capsid protein is a capsid protein of AAV12 and the 7-mer peptide is inserted between N592 and A593 or between T594 and T595 of the capsid protein.

[0255] In some embodiments, the modified AAV capsid protein has a sequence of SEQ ID NO: 158.

[0256] In some embodiments, the reference AAV capsid protein is a liver-toggle mutant of a capsid protein of an AAV variant selected from the group consisting of: AAV2; AAV1; AAV6; AAV3; AAV LK03; AAV7; AAV8; AAV hu.37; AAV rh.10; AAV9; AAV hu.68; AAV10; AAV5; AAV3-3; AAV4-4; AAV1-A; hu.46-A; hu.48-A; hu.44-A; hu.43-A; AAV6-A; hu.34-B; hu.47-B; hu.29-B; rh.63-B; hu.56-B; hu.45-B; rh.57-B; rh.35-B; rh.58-B; rh.28-B; rh.51-B; rh.19-B; rh.49-B; rh.52-B; rh.13-B; AAV2-B; rh.20-B; rh.24-B; rh.64-B; hu.27-B; hu.21-B; hu.22-B; hu.23-B; hu.7-C; hu.61-C; rh.56-C; hu.9-C; hu.54-C; hu.53-C; hu.60-C; hu.55-C; hu.2-C; hu.1-C; hu.18-C; hu.3-C; hu.25-C; hu.15-C; hu.16-C; hu.11-C; hu.10-C; hu.4-C; rh.54-D; rh.48-D; rh.55-D; rh.62-D; AAV7-D; rh.52-E; rh.51-E; hu.39-E; rh.53-E; hu.37-E; rh.43-E; rh.50-E; rh.49-E; rh.61-E; hu.41-E; rh.64-E; rh74; hu.42-E; rh.57-E; rh.40-E; hu.67-E; hu.17-E; hu.6-E; hu.66-E; rh.38-E; hu.32-F; AAV9/hu; hu.31-F; Anc80; Anc81; Ane82; Anc83; Anc84; Anc94; Ane113; Ane126; Anc127; Anc80L27; Anc80L59; Anc80L60; Anc80L62; Anc80L65; Anc80L33; Anc80L36; Anc80L44; Anc80L1; Anc80-55, Anc80-129, Anc80-156, Anc80-751, Anc80-1029, Anc80-1712, Anc110; and Anc80DI. In some embodiments, the reference AAV capsid protein is a liver-toggle mutant of a capsid protein having a sequence selected from SEQ ID Nos: 54-152 or a fragment thereof.

[0257] In some embodiments, the modified AAV capsid protein comprises an alanine (A) amino acid residue at an amino acid position corresponding to position 266 in Anc80; or a lysine (K) amino acid residue at an amino acid position corresponding to position 168 in Anc80.

[0258] In some embodiments, the modified AAV capsid protein comprises a glycine (G) amino acid residue at an amino acid position corresponding to position 266 in Anc80; or an arginine (R) amino acid residue at an amino acid position corresponding to position 168 in Anc80.

[0259] In some embodiments, the reference AAV capsid protein is a liver toggle mutant of a capsid protein of AAV9 comprising an alanine (A) amino acid residue at an amino acid position 267 and a threonine (T) amino acid residue at an amino acid position 269. In some embodiments, the modified AAV capsid protein comprises the sequence of SEQ ID NO: 159.

[0260] In some embodiments, the modified AAV capsid protein comprises a glycine (G) amino acid residue at an amino acid position corresponding to position 266 in Anc80; or a lysine (K) amino acid residue at an amino acid position corresponding to position 168 in Anc80.

[0261] In another aspect, the present disclosure provides a modified adeno-associated virus (AAV) capsid protein, comprising: (i) a liver-toggle mutant of a reference AAV capsid protein, comprising a) an alanine (A) or glycine (G) amino acid residue at an amino acid position corresponding to position 266 in Ane80; or b) a lysine (K) or arginine (R) amino acid residue at an amino acid position corresponding to position 168 in Anc80; and (ii) a targeting peptide inserted into a site within VR VIII of the liver-toggle mutant.

[0262] In some embodiments, the liver-toggle mutant comprises: a) an alanine (A) amino acid residue at an amino acid position corresponding to position 266 in Anc80; or b) a lysine (K) amino acid residue at an amino acid position corresponding to position 168 in Anc80. In some embodiments, the liver-toggle mutant comprises: a) an alanine (A) amino acid residue at an amino acid position corresponding to position 266 in Anc80; and b) a lysine (K) amino acid residue at an amino acid position corresponding to position 168 in Anc80.

[0263] In some embodiments, the liver-toggle mutant comprises: a) a glycine (G) amino acid residue at an amino acid position corresponding to position 266 in Anc80; or b) an arginine (R) amino acid residue at an amino acid position corresponding to position 168 in Anc80. In some embodiments, the liver-toggle mutant comprises: a) a glycine (G) amino acid residue at an amino acid position corresponding to position 266 in Anc80; and b) an arginine (R) amino acid residue at an amino acid position corresponding to position 168 in Anc80.

[0264] In some embodiments, the targeting peptide is 7-mer peptide having the sequence RGDX₁X₂X₃X₄, wherein X₁ to X₄ are independently selected amino acid residues. In some embodiments, X₁, X₂, and X₃ are independently selected from L, G, V, and A; and X₄ is selected from S, V, A, G, and L. In some embodiments, X₁, X₂, and X₃ are independently selected from L, V, and A; and at least two of X₁, X₂, and X₃ are independently L. In some embodiments, X₂ is L. In some embodiments, 7-mer peptide has a sequence of RGDLLLS (SEQ ID NO: 1).

[0265] In some embodiments, the targeting peptide is the 7-mer peptide TLAVPFK (SEQ ID NO: 53). In some embodiments, the targeting peptide has a sequence selected from SEQ ID Nos: 2-51 and 53.

[0266] In some embodiments, the reference AAV capsid protein is a capsid protein of an AAV variant selected from the group consisting of: AAV2; AAV1; AAV6; AAV3; AAV LK03; AAV7; AAV8; AAV hu.37; AAV rh.10; AAV9; AAV hu.68; AAV10; AAV5; AAV3-3; AAV4-4; AAV1-A; hu.46-A; hu.48-A; hu.44-A; hu.43-A; AAV6-A; hu.34-B; hu.47-B; hu.29-B; rh.63-B; hu.56-B; hu.45-B; rh.57-B; rh.35-B; rh.58-B; rh.28-B; rh.51-B; rh.19-B; rh.49-B; rh.52-B; rh.13-B; AAV2-B; rh.20-B; rh.24-B; rh.64-B; hu.27-B; hu.21-B; hu.22-B; hu.23-B; hu.7-C; hu.61-C; rh.56-C; hu.9-C; hu.54-C; hu.53-C; hu.60-C; hu.55-C; hu.2-C; hu.1-C; hu.18-C; hu.3-C; hu.25-C; hu.15-C; hu.16-C; hu.11-C; hu.10-C; hu.4-C; rh.54-D; rh.48-D; rh.55-D; rh.62-D; AAV7-D; rh.52-E; rh.51-E; hu.39-E; rh.53-E; hu.37-E; rh.43-E; rh.50-E; rh.49-E; rh.61-E; hu.41-E; rh.64-E; rh74; hu.42-E; rh.57-E; rh.40-E; hu.67-E; hu.17-E; hu.6-E; hu.66-E; rh.38-E; hu.32-F; AAV9/hu; hu.31-F; Anc80; Anc81; Anc82; Anc83; Anc84; Anc94; Anc113; Anc126; Anc127; Anc80L27; Anc80L59; Anc80L60; Anc80L62; Anc80L65; Anc80L33; Anc80L36; Anc80L44; Anc80L1; Anc80-55; Anc80-129. Anc80-156; Anc80-751; Anc80-1029; Anc80-1712. Anc110; and Anc80DI. In some embodiments, the reference AAV capsid protein is a capsid protein having a sequence selected from SEQ ID Nos: 54-152 or a fragment thereof.

[0267] In some embodiments, the reference AAV capsid polypeptide is an AAV9 capsid protein.

[0268] In some embodiments, the liver-toggle mutant comprises an alanine (A) amino acid residue at position 267. In some embodiments, the liver-toggle mutant comprises a threonine (T) amino acid residue at position 269. In some embodiments, the liver-toggle mutant comprises an alanine (A) amino acid residue at position 267 and a threonine (T) amino acid residue at position 269.

[0269] In some embodiments, the targeting peptide is inserted into an amino acid position between 565 and 595 of the liver toggle mutant. In some embodiments, (i) the reference AAV capsid protein is a capsid protein of AAV1 and the targeting peptide is inserted between D590 and P591 or between S588 and T589 of the liver-toggle mutant; (ii) the reference AAV capsid protein is a capsid protein of AAV2 and the targeting peptide is inserted between R588 and Q589 or between N587 and R588 of the liver-toggle mutant; (iii) the reference AAV capsid protein is a capsid protein of AAV3b and the targeting peptide is inserted between S586 and S587 or between N588 and T589 of the liver-toggle mutant; (iv) the reference AAV capsid protein is a capsid protein of AAV4 and the targeting peptide is inserted between S584 and N585 or between S586 and N587 of the liver-toggle mutant; (v) the reference AAV capsid protein is a capsid protein of AAV5 and the targeting peptide is inserted between S575 and S576 or between T577 and T578 of the liver-toggle mutant; (vi) the reference AAV capsid protein is a capsid protein of AAV6 and the targeting peptide is inserted between D590 and P591 or S588 and T589 of the liver-toggle mutant; (vii) the reference AAV capsid protein is a capsid protein of AAV7 and the targeting peptide is inserted between N589 and TS90 of the liver-toggle mutant; (viii) the reference AAV capsid protein is a capsid protein of AAV8 and the targeting peptide is inserted between N590 and T591 of the liver-toggle mutant; (ix) the reference AAV capsid protein is a capsid protein of AAV9 and the targeting peptide is inserted between Q588 and A589 of the liver-toggle mutant; (x) the reference AAV capsid protein is a capsid protein of AAVrh10 and the targeting peptide is inserted between N590 and A591 of the liver-toggle mutant; (xi) the reference AAV capsid protein is a capsid protein of AAVpo.1 and the targeting peptide is inserted between N567 and S568 or between NS69 and T570 of the liver-toggle mutant; or (xii) the reference AAV capsid protein is a capsid protein of AAV12 and the targeting peptide is inserted between N592 and A593 or between T594 and T595 of the liver-toggle mutant.

[0270] In some embodiments, the liver-toggle mutant comprises a sequence selected from NSTSGASS (SEQ ID NO: 160), NSTSGGST (SEQ ID NO: 161) and NSTSGAST (SEQ ID NO: 162).

[0271] In some embodiments, the liver-toggle mutant of a reference AAV capsid protein, comprises a) an alanine (A) amino acid residue at an amino acid position corresponding to position 266 in Anc80; and b) a lysine (K) amino acid residue at an amino acid position corresponding to position 168 in Anc80

[0272] In some embodiments, the liver-toggle mutant of a reference AAV capsid protein, comprises a) an alanine (A) amino acid residue at an amino acid position corresponding to position 267 in AAV9; and b) a threonine (T) amino acid residue at an amino acid position corresponding to position 269 in AAV9.

[0273] In some embodiments, the liver-toggle mutant further comprises a) an alanine (A) amino acid residue at an amino acid position corresponding to position 504 in AAV9; and b) an alanine (A) amino acid residue at an amino acid position corresponding to position 505 in AAV9.

[0274] In some embodiments, the modified AAV capsid protein comprises a sequence of SEQ ID NO: 159.

[0275] In yet another aspect, the present disclosure provides a polynucleotide encoding the modified AAV capsid protein disclosed herein. In one aspect, the present disclosure relates to a vector comprising the polynucleotide. In some embodiments, the vector further comprises a promoter operably linked to the polynucleotide. Further disclosed herein includes a host cell comprising the modified AAV capsid protein, the polynucleotide, or the vector.

[0276] One aspect of the present disclosure provides a recombinant AAV virion (rAAV) comprising the modified AAV capsid protein disclosed herein. In some embodiments, the rAAV virion further comprises an exogenous polynucleotide. In some embodiments, the exogenous polynucleotide comprises a template for homology directed repair. In some embodiments, the exogenous polynucleotide comprises an expressible polynucleotide encoding a therapeutic tRNA, miRNA, gene editing guide RNA, or RNA-editing guide RNA. In some embodiments, the exogenous polynucleotide comprises an expressible polynucleotide encoding a therapeutic protein.

[0277] Another aspect of the present disclosure provides a pharmaceutical composition comprising the modified AAV capsid protein or the AAV virion.

[0278] It further discloses a method for treating or ameliorating or preventing a disease or condition in a subject, comprising administering a therapeutically effective amount of the AAV virion or the pharmaceutical composition of the present disclosure. In some embodiments, the disease is a muscular disease and/or the condition is muscle degeneration. In some embodiments, said muscle is a striated muscle, preferably heart or a skeletal muscle or diaphragm. In some embodiments, said muscular disease is a muscular dystrophy, a cardiomyopathy, a myotonia, a muscular atrophy, a myoclonus dystonia, a mitochondrial myopathy, a rhabdomyolysis, a fibromyalgia, and/or a myofascial pain syndrome.

[0279] In one aspect, the present disclosure provides a modified adeno-associated virus (AAV) capsid protein for use in treating and/or preventing a muscular disease and/or muscle degeneration. It further discloses an AAV virion comprising the modified AAV capsid protein for use in treating and/or preventing a muscular disease and/or in muscle regeneration. It also discloses a pharmaceutical composition comprising the modified AAV capsid protein, and/or the AAV virion for use in treating and/or preventing a muscular disease and/or in muscle regeneration. Additionally, provided herein includes use of the AAV capsid polypeptide, and/or the AAV virion for transferring an active compound into a muscle cell. In some embodiments, said use is a non-therapeutic use, preferably wherein said use is an in vitro use.

[0280] In one aspect, the present disclosure provides a method of transferring an exogenous polynucleotide into a muscle cell, comprising the step of administering the AAV virion of the present disclosure to a subject. In some embodiments, the administration results in transfer of the exogenous polynucleotide in the muscle cell, at a muscle:liver infection ratio of greater than 1 when measured by genome copies of the AAV virion. In some embodiments, the muscle:liver infection ratio ranges from 1 to 100. In some embodiments, the muscle:liver infection ration ranges from 1 to 10. In some embodiments, the muscle:liver infection ratio ranges from 2 to 8.

[0281] In some embodiments, the administration results in expression of the exogenous polynucleotide in the muscle cell, at a muscle:liver expression ratio of greater than 10. In some embodiments, the muscle:liver expression ratio ranges from 10 to 100. In some embodiments, the muscle:liver expression ratio ranges from 20 to 80. In some embodiments, the muscle:liver expression ratio ranges from 50 to 80 when measured by mRNA transcript expression. In some embodiments, the muscle:liver expression ratio ranges from 10 to 50 when measured by protein expression.

[0282] In some embodiments, the muscle cell is selected from triceps surae, biceps, heart and quadricep.

[0283] In another aspect, the present disclosure provides an rAAV whose genome comprises an MIMI coding sequence operably linked to an expression regulatory element (ERE); and one, two or all three of the following features: (a) the ERE is a hybrid expression regulatory element (ERE) comprising a CMV enhancer and a chicken beta actin promoter operably linked to the MTM1 coding sequence; and/or (b) the rAAV comprises a modified AAV capsid protein comprising at least one liver-toggle mutation and/or one muscle-targeting element; and/or (c) the MTM1 coding sequence is codon optimized for expression in human cells, optionally wherein the coding sequence has at least 90%, at least 95%, at least 98% or at least 99% sequence identity to any one of SEQ ID NOS: 167 to 170.

[0284] In some embodiments, the MTM1 sequence encodes a protein comprising an amino acid sequence having at least 95% sequence identity to the amino acid sequence of SEQ ID NO:164. In some embodiments, the MTM1 protein comprises an amino acid sequence having at least 98% or at least 99% sequence identity to the amino acid sequence of SEQ ID NO: 164. In some embodiments, the MTM1 protein comprises an amino acid sequence having 100% sequence identity to the amino acid sequence of SEQ ID NO: 164.

[0285] In some embodiments, the MTM1 sequence encodes a protein comprising an amino acid sequence having at least 95% sequence identity to the amino acid sequence of SEQ ID NO: 165. In some embodiments, the MTM1 protein comprises an amino acid sequence having at least 98% sequence identity to the amino acid sequence of SEQ ID NO: 165. In some embodiments, the MTM1 protein comprises an amino acid sequence having at least 99% sequence identity to the amino acid sequence of SEQ ID NO: 165. In some embodiments, the MTM1 protein comprises an amino acid sequence having 100% sequence identity to the amino acid sequence of SEQ ID NO: 165.

[0286] In some embodiments, the MTM1 coding sequence comprises a nucleotide sequence having at least 90% sequence identity to SEQ ID NO 166. In some embodiments, the MTM1 coding sequence comprises a nucleotide sequence having at least 95% sequence identity to SEQ ID NO: 166. In some embodiments, the MTM1 coding sequence comprises a nucleotide sequence having at least 98% sequence identity to SEQ ID NO: 166. In some embodiments, the MTM1 coding sequence comprises a nucleotide sequence having at least 99% sequence identity to SEQ ID NO: 166. In some embodiments, the MTM1 coding sequence comprises a nucleotide sequence having 100% sequence identity to SEQ ID NO: 166.

[0287] In some embodiments, the MTM1 coding sequence is codon optimized for expression in human cells. In some embodiments, the MTM1 coding sequence comprises a nucleotide sequence having at least 90% sequence identity to any one of SEQ ID NOS: 167 to 170. In some embodiments, the MTM1 coding sequence comprises a nucleotide sequence having at least 95% sequence identity to any one of SEQ ID NOS: 167 to 170. In some embodiments, the MTM1 coding sequence comprises a nucleotide sequence having at least 98% sequence identity to any one of SEQ ID NOS: 167 to 170. In some embodiments, the MTM1 coding sequence comprises a nucleotide sequence having at least 99% sequence identity to any one of SEQ ID NOS: 167 to 170. In some embodiments, the MTM1 coding sequence comprises a nucleotide sequence having 100% sequence identity to any one of SEQ ID NOS: 167 to 170. In some embodiments, the sequence identity is to SEQ ID NO: 167 In some embodiments, the sequence identity is to SEQ ID NO: 168. In some embodiments, the sequence identity is to SEQ ID NO: 169. In some embodiments, the sequence identity is to SEQ ID NO:169.

[0288] In some embodiments, the rAAV comprises a hybrid expression regulatory element (ERE) comprising a CMV enhancer and a chicken beta actin promoter operably linked to the MTM1 coding sequence.

[0289] In some embodiments, the ERE comprises (a) a nucleotide sequence having at least 90% sequence identity to SEQ ID NO:171 and a nucleotide sequence having at least 90% sequence identity to SEQ ID NO: 172 or (b) a nucleotide sequence having at least 90% sequence identity to SEQ ID NO: 173. In some embodiments, the ERE comprises (a) a nucleotide sequence having at least 95% sequence identity to SEQ ID NO: 171 and a nucleotide sequence having at least 95% sequence identity to SEQ ID NO: 172 or (b) a nucleotide sequence having at least 95% sequence identity to SEQ ID NO: 173. In some embodiments, the ERE comprises (a) a nucleotide sequence having at least 98% sequence identity to SEQ ID NO: 171 and a nucleotide sequence having at least 98% sequence identity to SEQ ID NO: 172 or (b) a nucleotide sequence having at least 98% sequence identity to SEQ ID NO:173. In some embodiments, the ERE comprises (a) a nucleotide sequence having at least 99% sequence identity to SEQ ID NO: 171 and a nucleotide sequence having at least 99% sequence identity to SEQ ID NO:172 or (b) a nucleotide sequence having at least 99% sequence identity to SEQ ID NO: 173. In some embodiments, the ERE comprises (a) a nucleotide sequence having 100% sequence identity to SEQ ID NO: 171 and a nucleotide sequence having 100% sequence identity to SEQ ID NO: 172 or (b) a nucleotide sequence having 100% sequence identity to SEQ ID NO: 173.

[0290] In some embodiments, the rAAV further comprises a chimeric intron formed from intron sequences derived from chicken beta actin and/or human betaherpes virus and/or human beta globin and/or operably linked to the MTM1 coding sequence.

[0291] In some embodiments, the chimeric intron comprises a nucleotide sequence derived from human beta globin, which optionally comprises a nucleotide sequence having at least 90% sequence identity to SEQ ID NO: 174. In some embodiments, the chimeric intron comprises a nucleotide sequence derived from human beta globin comprises SEQ ID NO: 174.

[0292] In some embodiments, the chimeric intron comprises a nucleotide sequence derived from human beta herpes virus, which optionally comprises a nucleotide sequence having at least 90% sequence identity to SEQ ID NO: 175. In some embodiments, the nucleotide sequence is derived from human human beta herpes virus comprises SEQ ID NO: 175.

[0293] In some embodiments, the chimeric intron is formed from introns from human beta herpes virus and rabbit beta globin. In some embodiments, the chimeric intron comprises a nucleotide sequence having at least 90% sequence identity to SEQ ID NO: 176. In some embodiments, the chimeric intron comprises a nucleotide sequence having at least 95% sequence identity to SEQ ID NO: 176. In some embodiments, the chimeric intron comprises a nucleotide sequence having at least 98% sequence identity to SEQ ID NO: 176. In some embodiments, the chimeric intron comprises a nucleotide sequence having at least 99% sequence identity to SEQ ID NO: 176. In some embodiments, the chimeric intron comprises a nucleotide sequence having 100% sequence identity to SEQ ID NO: 176. In some embodiments, the chimeric intron comprises the nucleotide sequence of SEQ ID NO: 176.

[0294] In some embodiments, the rAAV comprises an unmodified or modified AAV2; AAV1; AAV6; AAV3; AAV LK03; AAV7; AAV8; AAV hu.37; AAV rh.10; AAV9; AAV hu.68; AAV10; AAV5; AAV3-3; AAV4-4; AAV1-A; hu.46-A; hu.48-A; hu.44-A; hu.43-A; AAV6-A; hu.34-B; hu.47-B; hu.29-B; rh.63-B; hu.56-B; hu.45-B; rh.57-B; rh.35-B; rh.58-B; rh.28-B; rh.51-B; rh.19-B; rh.49-B; rh.52-B; rh.13-B; AAV2-B; rh.20-B; rh.24-B; rh.64-B; hu.27-B; hu.21-B; hu.22-B; hu.23-B; hu.7-C; hu.61-C; rh.56-C; hu.9-C; hu.54-C; hu.53-C; hu.60-C; hu.55-C; hu.2-C; hu.1-C; hu.18-C; hu.3-C; hu.25-C; hu.15-C; hu.16-C; hu.11-C; hu.10-C; hu.4-C; rh.54-D; rh.48-D; rh.55-D; rh.62-D; AAV7-D; rh.52-E; rh.51-E; hu.39-E; rh.53-E; hu.37-E; rh.43-E; rh.50-E; rh.49-E; rh.61-E; hu.41-E; rh.64-E; rh74; hu.42-E; rh.57-E; rh.40-E; hu.67-E; hu.17-E; hu.6-E; hu.66-E; rh.38-E; hu.32-F; AAV9/hu; hu.31-F; Anc80; Anc81; Anc82; Anc83; Anc84; Anc94; Anc113; Anc126; Anc127; Anc80L27; Anc80L59; Anc80L60; Anc80L62; Anc80L65; Anc80L33; Anc80L36; Anc80L44; Anc80L1; Anc80-55; Anc80-129; Anc80-156; Anc80-751; Anc80-1029; Anc80-1712; Anc110; or Anc80DI capsid protein.

[0295] In some embodiments, the rAAV comprises an unmodified or modified rAAV9 capsid protein. In some embodiments, the rAAV comprises a VP1, VP2 and/or VP3 capsid protein comprising an amino acid sequence having at least 90% sequence identity to the corresponding protein(s) in AAV2; AAV1; AAV6; AAV3; AAV LK03; AAV7; AAV8; AAV hu.37; AAV rh.10; AAV9; AAV hu.68; AAV10; AAV5; AAV3-3; AAV4-4; AAV1-A; hu.46-A; hu.48-A; hu.44-A; hu.43-A; AAV6-A; hu.34-B; hu.47-B; hu.29-B; rh.63-B; hu.56-B; hu.45-B; rh.57-B; rh.35-B; rh.58-B; rh.28-B; rh.51-B; rh.19-B; rh.49-B; rh.52-B; rh.13-B; AAV2-B; rh.20-B; rh.24-B; rh.64-B; hu.27-B; hu.21-B; hu.22-B; hu.23-B; hu.7-C; hu.61-C; rh.56-C; hu.9-C; hu.54-C; hu.53-C; hu.60-C; hu.55-C; hu.2-C; hu.1-C; hu.18-C; hu.3-C; hu.25-C; hu.15-C; hu.16-C; hu.11-C; hu.10-C; hu.4-C; rh.54-D; rh.48-D; rh.55-D; rh.62-D; AAV7-D; rh.52-E; rh.51-E; hu.39-E; rh.53-E; hu.37-E; rh.43-E; rh.50-E; rh.49-E; rh.61-E; hu.41-E; rh.64-E; rh74; hu.42-E; rh.57-E; rh.40-E; hu.67-E; hu.17-E; hu.6-E; hu.66-E; rh.38-E; hu.32-F; AAV9/hu; hu.31-F; Anc80; Anc81; Anc82; Anc83; Anc84; Anc94; Anc113; Anc126; Anc127; Anc80L27; Anc80L59; Anc80L60; Anc80L62; Anc80L65; Anc80L33; Anc80L36; Anc80L44; Anc80L1; Anc80-55; Anc80-129; Anc80-156; Anc80-751; Anc80-1029; Anc80-1712; Anc110; or Anc80DI.

[0296] In some embodiments, the rAAV comprises a VP1, VP2 and/or VP3 capsid protein comprising an amino acid sequence having at least 95% sequence identity to the corresponding protein(s) in AAV2; AAV1; AAV6; AAV3; AAV LK03; AAV7; AAV8; AAV hu.37; AAV rh.10; AAV9; AAV hu.68; AAV10; AAV5; AAV3-3; AAV4-4; AAV1-A; hu.46-A; hu.48-A; hu.44-A; hu.43-A; AAV6-A; hu.34-B; hu.47-B; hu.29-B; rh.63-B; hu.56-B; hu.45-B; rh.57-B; rh.35-B; rh.58-B; rh.28-B; rh.51-B; rh.19-B; rh.49-B; rh.52-B; rh.13-B; AAV2-B; rh.20-B; rh.24-B; rh.64-B; hu.27-B; hu.21-B; hu.22-B; hu.23-B; hu.7-C; hu.61-C; rh.56-C; hu.9-C; hu.54-C; hu.53-C; hu.60-C; hu.55-C; hu.2-C; hu.1-C; hu.18-C; hu.3-C; hu.25-C; hu.15-C; hu.16-C; hu.11-C; hu.10-C; hu.4-C; rh.54-D; rh.48-D; rh.55-D, rh.62-D, AAV7-D; rh.52-E; rh.51-E; hu.39-E; rh.53-E; hu.37-E; rh.43-E; rh.50-E; rh.49-E; rh.61-E; hu.41-E; rh.64-E; rh74; hu.42-E; rh.57-E; rh.40-E; hu.67-E; hu.17-E; hu.6-E; hu.66-E; rh.38-E; hu.32-F; AAV9/hu; hu.31-F; Anc80; Anc81; Anc82; Anc83; Anc84; Anc94; Anc113; Anc126; Anc127; Anc80L27; Anc80L59; Anc80L60; Anc80L62; Anc80L65; Anc80L33; Anc80L36; Anc80L44; Anc80L1; Anc80-55; Anc80-129; Anc80-156; Anc80-751; Anc80-1029; Anc80-1712; Anc110; or Anc80DI.

[0297] In some embodiments, the rAAV comprises a VP1, VP2 and/or VP3 capsid protein comprising an amino acid sequence having at least 98% sequence identity to the corresponding protein(s) in AAV2; AAV1; AAV6; AAV3; AAV LK03; AAV7; AAV8; AAV hu.37; AAV rh.10; AAV9; AAV hu.68; AAV10; AAV5; AAV3-3; AAV4-4; AAV1-A; hu.46-A; hu.48-A; hu.44-A; hu.43-A; AAV6-A; hu.34-B; hu.47-B; hu.29-B; rh.63-B; hu.56-B; hu.45-B; rh.57-B; rh.35-B; rh.58-B; rh.28-B; rh.51-B; rh.19-B; rh.49-B; rh.52-B; rh.13-B; AAV2-B; rh.20-B, rh.24-B; rh.64-B; hu.27-B; hu.21-B; hu.22-B; hu.23-B; hu.7-C; hu.61-C; rh.56-C; hu.9-C; hu.54-C; hu.53-C; hu.60-C; hu.55-C; hu.2-C; hu.1-C; hu.18-C; hu.3-C; hu.25-C; hu.15-C; hu.16-C; hu.11-C; hu.10-C; hu.4-C; rh.54-D; rh.48-D; rh.55-D; rh.62-D; AAV7-D; rh.52-E; rh.51-E; hu.39-E; rh.53-E; hu.37-E; rh.43-E; rh.50-E; rh.49-E; rh.61-E; hu.41-E; rh.64-E; rh74, hu.42-E; rh.57-E; rh.40-E; hu.67-E; hu.17-E; hu.6-E; hu.66-E; rh.38-E; hu.32-F; AAV9/hu; hu.31-F; Anc80; Anc81; Anc82; Anc83; Anc84; Anc94; Anc113; Anc126; Anc127; Anc80L27; Anc80L59; Anc80L60; Anc80L62; Anc80L65; Anc80L33; Anc80L36; Anc80L44; Anc80L1, Anc80-55; Anc80-129, Anc80-156; Anc80-751; Anc80-1029; Anc80-1712; Anc110; or Anc80DI.

[0298] In some embodiments, the rAAV comprises a VP1, VP2 and/or VP3 capsid protein comprising an amino acid sequence having at least 99% sequence identity to the corresponding protein(s) in AAV2; AAV1; AAV6; AAV3; AAV LK03; AAV7; AAV8; AAV hu.37; AAV rh.10; AAV9; AAV hu.68; AAV10; AAV5; AAV3-3; AAV4-4; AAV1-A; hu.46-A; hu.48-A; hu.44-A; hu.43-A; AAV6-A; hu.34-B; hu.47-B; hu.29-B; rh.63-B; hu.56-B; hu.45-B; rh.57-B; rh.35-B; rh.58-B; rh.28-B; rh.51-B; rh.19-B; rh.49-B; rh.52-B; rh.13-B; AAV2-B; rh.20-B; rh.24-B; rh.64-B; hu.27-B; hu.21-B; hu.22-B; hu.23-B; hu.7-C; hu.61-C; rh.56-C; hu.9-C; hu.54-C; hu.53-C; hu.60-C; hu.55-C; hu.2-C; hu.1-C; hu.18-C; hu.3-C; hu.25-C; hu.15-C; hu.16-C; hu.11-C; hu.10-C; hu.4-C; rh.54-D; rh.48-D; rh.55-D; rh.62-D; AAV7-D; rh.52-E; rh.51-E; hu.39-E; rh.53-E; hu.37-E; rh.43-E; rh.50-E; rh.49-E; rh.61-E; hu.41-E; rh.64-E; rh.74; hu.42-E; rh.57-E; rh.40-E; hu.67-E; hu.17-E; hu.6-E; hu.66-E; rh.38-E; hu.32-F; AAV9/hu; hu.31-F; Anc80; Anc81; Anc82; Anc83; Anc84; Anc94; Anc113; Anc126; Anc127; Anc80L27; Anc80L59; Anc80L60; Anc80L62; Anc80L65; Anc80L33; Anc80L36; Anc80L44; Anc80L1; Anc80-55; Anc80-129; Anc80-156; Anc80-751; Anc80-1029; Anc80-1712; Anc110; or Anc80DI.

[0299] In some embodiments, the rAAV comprises a VP1, VP2 and/or VP3 capsid protein comprising an amino acid sequence having 100% sequence identity to the corresponding protein(s) in AAV2; AAV1; AAV6; AAV3; AAV LK03; AAV7, AAV8; AAV hu.37; AAV rh.10; AAV9; AAV hu.68; AAV10; AAV5; AAV3-3; AAV4-4; AAV1-A; hu.46-A; hu.48-A; hu.44-A; hu.43-A; AAV6-A; hu.34-B; hu.47-B; hu.29-B; rh.63-B; hu.56-B; hu.45-B; rh.57-B; rh.35-B; rh.58-B; rh.28-B; rh.51-B; rh.19-B; rh.49-B; rh.52-B; rh.13-B; AAV2-B; rh.20-B; rh.24-B; rh.64-B; hu.27-B; hu.21-B; hu.22-B; hu.23-B; hu.7-C; hu.61-C; rh.56-C; hu.9-C; hu.54-C; hu.53-C; hu.60-C; hu.55-C; hu.2-C; hu.1-C; hu.18-C; hu.3-C; hu.25-C; hu.15-C; hu.16-C; hu.11-C; hu.10-C; hu.4-C; rh.54-D; rh.48-D; rh.55-D; rh.62-D; AAV7-D; rh.52-E; rh.51-E; hu.39-E; rh.53-E; hu.37-E; rh.43-E; rh.50-E; rh.49-E; rh.61-E; hu.41-E; rh.64-E; rh74; hu.42-E; rh.57-E; rh.40-E; hu.67-E; hu.17-E; hu.6-E; hu.66-E; rh.38-E; hu.32-F; AAV9/hu; hu.31-F; Anc80; Anc81; Anc82; Anc83; Anc84; Anc94; Anc113; Anc126; Anc127; Anc80L27; Anc80L59; Anc80L60; Anc80L62; Anc80L65; Anc80L33; Anc80L36; Anc80L44; Anc80L1; Anc80-55; Anc80-129; Anc80-156; Anc80-751; Anc80-1029; Anc80-1712; Anc110; or Anc80DI.

[0300] In some embodiments, the rAAV comprises a modified AAV capsid protein comprising at least one liver-toggle mutation as compared to a reference capsid protein.

[0301] In some embodiments, the reference capsid protein is a VP1, VP2 and/or VP3 protein. In some embodiments, the reference AAV capsid protein is a capsid protein having any one of SEQ ID NOs: 54-152 or a fragment thereof.

[0302] In some embodiments, the at least one liver-toggle mutation comprises: an alanine (A) or glycine (G) amino acid residue at an amino acid position corresponding to position 266 in Anc80; and/or a lysine (K) or arginine (R) amino acid residue at an amino acid position corresponding to position 168 in Anc80.

[0303] In some embodiments, the at least one liver-toggle mutation comprises: an alanine (A) amino acid residue at an amino acid position corresponding to position 266 in Anc80; and/or a lysine (K) amino acid residue at an amino acid position corresponding to position 168 in Anc80.

[0304] In some embodiments, the at least one liver-toggle mutation comprises: an alanine (A) amino acid residue at an amino acid position corresponding to position 266 in Anc80; and/or an arginine (R) amino acid residue at an amino acid position corresponding to position 168 in Anc80.

[0305] In some embodiments, the at least one liver-toggle mutation comprises: a glycine (G) amino acid residue at an amino acid position corresponding to position 266 in Anc80; and/or a lysine (K) amino acid residue at an amino acid position corresponding to position 168 in Anc80.

[0306] In some embodiments, the at least one liver-toggle mutation comprises: a glycine (G) amino acid residue at an amino acid position corresponding to position 266 in Anc80; and/or an arginine (R) amino acid residue at an amino acid position corresponding to position 168 in Anc80.

[0307] In some embodiments, the at least one liver-toggle mutation comprises an alanine (A) at an amino acid position corresponding to position 267 in AAV9. In some embodiments, the at least one liver-toggle mutation comprises a threonine (T) at an amino acid position corresponding to position 269 in AAV9.

[0308] In some embodiments, the capsid protein is a modified AAV9 capsid protein, optionally wherein the capsid protein is a modified AAV9 VP1 capsid protein.

[0309] In some embodiments, the liver-toggle mutation comprises: an alanine (A) amino acid residue at an amino acid position corresponding to position 267 in AAV9; and a threonine (T) amino acid residue at an amino acid position corresponding to position 269 in AAV9.

[0310] In some embodiments, the liver-toggle mutation further comprises an alanine (A) amino acid residue at an amino acid position corresponding to position 504 in AAV9; and/or an Alanine (A) amino acid residue at an amino acid position corresponding to position 505 in AAV9.

[0311] In some embodiments, the liver-toggle mutant comprises the sequence NSTSGASS (SEQ ID NO: 160), NSTSGGST (SEQ ID NO: 161) or NSTSGAST (SEQ ID NO: 162). In some embodiments, the rAAV capsid protein has the sequence of SEQ ID NO: 159. In some embodiments, the rAAV capsid protein has the sequence of SEQ ID NO: 163.

[0312] In some embodiments, the one or more liver toggle mutations comprise one or more amino acid substitutions at one or more of Q263, S264. G265, A266, S267, N268, H271, N382. G383, S384, Q385, S446, R471, W502, T503, D528. D529, Q589, K706, and V708 as compared to an AAV2 reference capsid protein (SEQ ID NO:1 of WO2021/050614, which is incorporated by reference herein).

[0313] In some embodiments, the one or more liver toggle mutations comprise the amino acid substitution S446R as compared to a reference capsid protein. In some embodiments, the one or more liver toggle mutations comprise the amino acid substitution R471A as compared to a reference capsid protein. In some embodiments, the one or more liver toggle mutations comprise the amino acid substitution V708T or V708A as compared to a reference capsid protein.

[0314] In some embodiments, the rAAV comprises a modified AAV capsid protein comprising at least one muscle-targeting element as compared to a reference capsid protein. In some embodiments, the reference capsid protein is a VP1, VP2 and/or VP3 protein.

[0315] In some embodiments, the muscle targeting element is 7-mer peptide having the sequence RGDX₁X₂X₃X₄ (SEQ ID NO:52), wherein X₁ to X₄ are independently selected amino acid residues. In some embodiments, X₁, X₂, and X₃ are independently selected from L, G, V, and A; and X₄ is selected from S, V, A, G, and L. In some embodiments, X₁, X₂, and X₃ are independently selected from L, V, and A; and at least two of X₁, X₂, and X₃ are independently L. In some embodiments, X₂ is L.

[0316] In some embodiments, the muscle targeting element is 7-mer peptide having the sequence RGDX₁X₂X₃X₄ (SEQ ID NO:52), wherein X₁, X₂, X₃ and X₄ are independently selected from A, D, E, F, G, H, I, K, L, N, Q, R, S, T, V, and Y. In some embodiments, the 7-mer has a sequence selected from SEQ ID NOs.: 238-44858. In some embodiments, the 7-mer has a sequence selected from SEQ ID NOs.: 238-338. In some embodiments, the 7-mer has a sequence selected from SEQ ID NOs.: 238-438 In some embodiments, the 7-mer has a sequence selected from SEQ ID NOs.: 238-538. In some embodiments, the 7-mer has a sequence selected from SEQ ID NOs.: 238-638. In some embodiments, the 7-mer has a sequence selected from SEQ ID NOs.: 238-738. In some embodiments, the 7-mer has a sequence selected from SEQ ID NOs.: 238-838. In some embodiments, the 7-mer has a sequence selected from SEQ ID NOs.: 238-938. In some embodiments, the 7-mer has a sequence selected from SEQ ID NOs.: 238-1038.

[0317] In some embodiments, 7-mer peptide has a sequence of RGDLLLS (SEQ ID NO: 1). In some embodiments, the targeting peptide is the 7-mer peptide TLAVPFK (SEQ ID NO: 53). In some embodiments, the targeting peptide is a peptide having any one of SEQ ID NOs: 2-51 and 53.

[0318] In some embodiments, the muscle-targeting element consists of a 7-mer peptide having the sequence selected from SEQ ID NOs.: 238-44858 is inserted into a site within VR VIII of the AAV capsid protein. In some embodiments, the muscle-targeting element consists of a 7-mer peptide having the sequence RGDLLLS (SEQ ID NO: 1) inserted into a site within VR VIII of the AAV capsid protein. In some embodiments, the 7-mer peptide is inserted into an amino acid position between 565 and 595 of the reference AAV capsid protein.

[0319] In some embodiments, the reference AAV capsid protein is a capsid protein of AAV1 and a 7-mer muscle-targeting peptide is inserted between D590 and P591 or between S588 and T589 of the capsid protein; the reference AAV capsid protein is a capsid protein of AAV2 and the 7-mer muscle-targeting peptide is inserted between R588 and Q589 or between N587 and R588 of the capsid protein; the reference AAV capsid protein is a capsid protein of AAV3b and the 7-mer muscle-targeting peptide is inserted between S586 and S587 or between N588 and T589 of the capsid protein; the reference AAV capsid protein is a capsid protein of AAV4 and the 7-mer muscle-targeting peptide is inserted between S584 and N585 or between S586 and N587 of the capsid protein; the reference AAV capsid protein is a capsid protein of AAV5 and the 7-mer muscle-targeting peptide is inserted between S575 and S576 or between T577 and T578 of the capsid protein; the reference AAV capsid protein is a capsid protein of AA V6 and the 7-mer muscle-targeting peptide is inserted between D590 and P591 or S588 and T589 of the capsid protein; the reference AAV capsid protein is a capsid protein of AAV7 and the 7-mer muscle-targeting peptide is inserted between N589 and T590 of the capsid protein; the reference AAV capsid protein is a capsid protein of AAV8 and the 7-mer muscle-targeting peptide is inserted between N590 and T591 of the capsid protein; the reference AAV capsid protein is a capsid protein of AAV9 and the 7-mer muscle-targeting peptide is inserted between Q588 and A589 of the capsid protein; the reference AAV capsid protein is a capsid protein of AAVrh10 and the 7-mer muscle-targeting peptide is inserted between N590 and A591 of the capsid protein; the reference AAV capsid protein is a capsid protein of AAVpo.1 and the 7-mer muscle-targeting peptide is inserted between N567 and S568 or between N569 and T570 of the capsid protein; or the reference AAV capsid protein is a capsid protein of AAV12 and the 7-mer muscle-targeting peptide is inserted between N592 and A593 or between T594 and T595 of the capsid protein.

[0320] In some embodiments, the muscle targeting peptide is inserted into a site within VR VIII of a liver-toggle mutant capsid, optionally a liver-toggle mutant capsid as described in any one of embodiments 49 to 62. In some embodiments, the muscle targeting peptide is inserted into an amino acid position between 565 and 595 of the liver toggle mutant.

[0321] In some embodiments, the reference AAV capsid protein is a capsid protein of AAV1 and the targeting peptide is inserted between D590 and P591 or between S588 and T589 of the liver-toggle mutant; the reference AAV capsid protein is a capsid protein of AAV2 and the targeting peptide is inserted between R588 and Q589 or between N587 and R588 of the liver-toggle mutant; the reference AAV capsid protein is a capsid protein of AAV3b and the targeting peptide is inserted between S586 and S587 or between N588 and T589 of the liver-toggle mutant; the reference AAV capsid protein is a capsid protein of AAV4 and the targeting peptide is inserted between S584 and N585 or between S586 and N587 of the liver-toggle mutant; the reference AAV capsid protein is a capsid protein of AAV5 and the targeting peptide is inserted between S575 and S576 or between T577 and T578 of the liver-toggle mutant; the reference AAV capsid protein is a capsid protein of AAV6 and the targeting peptide is inserted between D590 and P591 or S588 and TS89 of the liver-toggle mutant; the reference AAV capsid protein is a capsid protein of AAV7 and the targeting peptide is inserted between N589 and T590 of the liver-toggle mutant; the reference AAV capsid protein is a capsid protein of AAV8 and the targeting peptide is inserted between N590 and T591 of the liver-toggle mutant; the reference AAV capsid protein is a capsid protein of AAV9 and the targeting peptide is inserted between Q588 and A589 of the liver-toggle mutant; the reference AAV capsid protein is a capsid protein of AAVrh10 and the targeting peptide is inserted between N590 and A591 of the liver-toggle mutant; the reference AAV capsid protein is a capsid protein of AAVpo.1 and the targeting peptide is inserted between N567 and S568 or between N569 and T570 of the liver-toggle mutant; or the reference AAV capsid protein is a capsid protein of AAV12 and the targeting peptide is inserted between N592 and A593 or between T594 and T595 of the liver-toggle mutant.

[0322] In some embodiments, the capsid protein has the sequence of SEQ ID NO: 158. In some embodiments, the rAAV capsid protein has the sequence of SEQ ID NO: 159.

[0323] In some embodiments, the ERE comprises a constitutive promoter. In some embodiments, the constitutive promoter is the Rous sarcoma virus (RSV) LTR promoter (optionally with the RSV enhancer), the cytomegalovirus (CMV) promoter (optionally with the CMV enhancer), the SV40 promoter, the dihydrofolate reductase (DHFR) promoter, the β-actin promoter, the phosphoglycerol kinase 1 (PGK1) promoter (optionally the minimal PGK1 promoter), or the EF1 alpha promoter (optionally with intron).

[0324] In some embodiments, the ERE comprises an inducible promoter. In some embodiments, the inducible promoter is a tetracycline or rapamycin inducible promoter. In some embodiments, the ERE comprises a muscle-specific promoter. In some embodiments, the muscle specific promoter is a desmin promoter (which is optionally a CpG depleted desmin promoter), a CKM promoter derivative or an MTM1 promoter. In some embodiments, the promoter is a human promoter.

[0325] In some embodiments, the rAAV comprises a rabbit globin poly A sequence 3′ to the MTM1 coding sequence, optionally wherein the rabbit globin poly A sequence has at least 90% sequence identity to SEQ ID NO: 177. In some embodiments, the rabbit globin poly A sequence has at least 95% sequence identity to SEQ ID NO: 177. In some embodiments, the rabbit globin poly A sequence has at least 98% sequence identity to SEQ ID NO: 177. In some embodiments, the rabbit globin poly A sequence has at least 99% sequence identity to SEQ ID NO: 177. In some embodiments, the rabbit globin poly A sequence has 100% sequence identity to SEQ ID NO: 177.

[0326] In some embodiments, the genome of the rAAV comprises AAV-derived inverted terminal repeat sequences (ITRs). In some embodiments, the ITRs are derived from AAV serotype 2. In some embodiments, the rAAV comprises a first ITR having at least 90% sequence identity to SEQ ID NO: 178 and a second ITR having at least 90% sequence identity to SEQ ID NO: 179. In some embodiments, the first ITR has at least 95% sequence identity to SEQ ID NO: 178 and the second ITR has at least 95% sequence identity to SEQ ID NO: 179. In some embodiments, the first ITR has at least 98% sequence identity to SEQ ID NO: 178 and the second ITR has at least 98% sequence identity to SEQ ID NO:179. In some embodiments, the first ITR has at least 99% sequence identity to SEQ ID NO: 178 and the second ITR has at least 99% sequence identity to SEQ ID NO: 179. In some embodiments, the first ITR 100% sequence identity to SEQ ID NO: 178 and the second ITR has 100% sequence identity to SEQ ID NO: 179.

[0327] In some embodiments, the rAAV comprises a heterologous splice acceptor sequence 5′ to the MTM1 coding sequence. In some embodiments, the heterologous splice acceptor sequence is derived from human beta globin exon 3. In some embodiments, the heterologous splice acceptor sequence comprises the nucleotide sequence of SEQ ID NO: 180.

[0328] In one aspect, the present disclosure provides an rAAV comprising: modified AAV capsid protein comprising at least one liver-toggle mutation and/or one muscle-targeting element, optionally wherein the modified capsid protein comprises the amino acid sequence of SEQ ID NO:158, SEQ ID NO: 159, or SEQ ID NO: 163, and a genome comprising: a first ITR sequence; a hybrid expression regulatory element (ERE) comprising a CMV enhancer and a chicken beta actin promoter, optionally wherein the ERE comprises the nucleotide sequence of SEQ ID NO: 173; an MTM1 coding sequence operably linked to the ERE; and a second ITR sequence.

[0329] In some embodiments, the rAAV further comprises a chimeric intron between the ERE and the MTM1 coding sequence, optionally wherein the chimeric intron comprises the nucleotide sequence of SEQ ID NO: 176. In some embodiments, the rAAV further comprises a splice acceptor site 5′ to the MTM1 coding sequence, optionally wherein the splice acceptor site comprises the nucleotide sequence of SEQ ID NO:180. In some embodiments, the rAAV further comprises a polyadenylation sequence 3′ to the MTM1 coding sequence, optionally wherein the polyadenylation sequence comprises the nucleotide sequence of SEQ ID NO: 177.

[0330] In some embodiments, the MTM1 coding sequence is codon optimized for expression in human cells, optionally wherein the MTM1 coding sequence comprises the nucleotide sequence of SEQ ID NO: 167, SEQ ID NO:168, SEQ ID NO: 169 or SEQ ID NO: 170.

[0331] In some embodiments, the rAAV has a genome which is self-complementary, optionally wherein the genome is fully self-complementary.

[0332] The present disclosure further provides a pharmaceutical composition comprising the rAAV described herein and a pharmaceutically acceptable carrier. In some embodiments, the pharmaceutical composition is in the form of a unit dose.

[0333] In some embodiments, the pharmaceutical composition comprises 1×10¹⁰ to 1×10¹⁶ genome copy numbers (GC) of the rAAV and/or in which the rAAV concentration is 1×10¹⁰ vg/ml to 1×10¹⁶ vg/ml.

[0334] In some embodiments, the pharmaceutical composition is formulated for parenteral administration, for example systemic (e.g., intravenous), intramuscular or subcutaneous administration.

[0335] The present disclosure further discloses a host cell engineered to produce the rAAV described herein. In some embodiments, the host cell comprises a polynucleotide expressing one or more capsid proteins of the rAAV, a functional rep gene, and a recombinant nucleic acid vector comprising AAV ITRs and the MTM coding sequence operably linked to an expression regulatory element (ERE), optionally wherein the ERE is a hybrid ERE comprising a CMV enhancer and a chicken beta actin promoter.

[0336] In another aspect, the present disclosure provides a method for treating or ameliorating or preventing X-linked myotubular myopathy in a subject, comprising administering a therapeutically effective amount of the rAAV or the pharmaceutical composition described herein. In some embodiments, the effective dose comprises 1×10¹⁰ to 1×10¹⁶ genome copy numbers (GC) of the rAAV. In some embodiments, the effective dose is 1×10¹⁵ GC or less. In some embodiments, the effective dose is 5×10¹⁴ GC or less. In some embodiments, the effective dose is 1×10¹⁴ GC or less. In some embodiments, the effective dose is 5×10¹³ GC or less. In some embodiments, the effective dose is 1×10¹³ GC or less.

[0337] In some embodiments, the administration is parenteral. In some embodiments, the administration is systemic (e.g., intravenous). In some embodiments, the administration is intramuscular. In some embodiments, the administration is subcutaneous.

[0338] In yet another aspect, the present disclosure provides the rAAV or the pharmaceutical composition described herein for use in treating and/or preventing X-linked myotubular myopathy. In some embodiments, the rAAV or the pharmaceutical composition is for use in expressing myotubularin in a muscle cell.

[0339] Without being bound by theory, it is believed that the rAAVs of the disclosure have improved therapeutics indices due to higher MTM1 expression levels per viral genome administered and/or reduce off-target (e.g., liver) tropism or expression per viral genome administered as compared to a control rAAV whose genome comprises the MTM1 coding sequence under the control of the desmin promoter and/or includes an unmodified capsid protein.

### 5. BRIEF DESCRIPTION OF THE SEVERAL VIEWS OF THE DRAWINGS

[0340] These and other features, aspects, and advantages of the present invention will become better understood with regard to the following description, and accompanying drawings where:

[0341] FIG. 1 illustrates the structure of an AAV VP1 protein with certain variable regions (VR I, VR III, VR IV) highlighted. The location of the liver toggle (mut1) in VR I and the peptide insertion (deco1) in VR VIII are indicated.

[0342] FIGS. 2A-2C provide the sequence alignment of VP1 sequences of certain AAV variants using AAV2 VP1 as a reference. The location of residue 168, the liver toggle site, mut1 (FIG. 2A), and the insertion site of a targeting peptide (FIG. 2B), are indicated. FIGS. 2A-2B disclose SEQ ID NOs: 55, 54, 58, 56, 64, 59, 60, 89, 111, 61, 63, 62, and 57, respectively, in order of appearance.

[0343] FIGS. 3A-3D provide the sequence alignment of VP1 sequences of ancestral AAVs using AAV2 as a reference. The location of the liver toggle sites, residue 168 (FIG. 3A), and residue 266 (FIG. 3B), and the insertion site of a targeting peptide (FIG. 3C), are indicated. One or more representative member sequences for each of the Anc80. Anc81. Anc82, Anc83, Anc84, Anc94, Ac110, Anc113, Anc126 and Ane127 libraries were used for the alignment. FIGS. 3A-3D disclose SEQ ID NOs: 217-237, respectively, in order of appearance.

[0344] FIGS. 4A-4J shows immunohistochemistry data obtained from the experiment described in Example 2 below in the Example section. Anti-GFP immunohistochemistry was performed on liver with vehicle (FIG. 4A), AAV9 (FIG. 4B), AAV^{mut1} (FIG. 4C), AAV^{deco1} (FIG. 4D), or AAV^{mut1-deco1} (FIG. 4E); and skeletal muscle (quadriceps) tissue cross-sections of mice injected with vehicle (FIG. 4F), AAV9 (FIG. 4G), AAV^{mut1} (FIG. 4H), AAV^{deco1}) (FIG. 4I), or AAV^{mut1-deco1} (FIG. 4J).

[0345] FIGS. 5A-5B show mRNA expression in various tissues of C57BL/6 mice treated with different AAV vectors, as measure by RT-ddPCR. Y-axis represents the ratio of copies of eGFP mRNA transcripts over RPP30 mRNA and x-axis represents AAV vectors and the dose injected into the experimental animals. Each graph shows eGFP expression in liver (FIG. 5A) and quadriceps (FIG. 5B).

[0346] FIGS. 6A-6E show eGFP mRNA expression in various tissues of C57BL/6 mice treated with different AAV vectors, as measure by RT-ddPCR. Y-axis represents the ratio of copies of eGFP over RPP30 mRNA and x-axis represents AAV vectors and the dose injected into the experimental animals. Each graph shows eGFP expression in liver (FIG. 6A), heart (FIG. 6B), triceps surae (FIG. 6C), quadriceps (FIG. 6D), or diaphragm (FIG. 6E).

[0347] FIGS. 7A-7D show eGFP vector genome (DNA) and eGFP expression (mRNA) in liver and quad tissues of C57BL/6 mice treated with vehicle. AAV^{Mut1} and AAV^{Mut1-deco1} AAV vectors. DNA data is shown in FIGS. 7A and 7B with eGFP genomic copies as measured by RT-ddPCR plotted at 14 and 28 days, respectively. Y-axis represents vector genome (copies per DPG) and x-axis represents vehicle and AAV vectors. mRNA data is shown in FIGS. 7C and 7D with eGFP expression as measured by RT-ddPCR plotted at 14 and 28 days, respectively. Y-axis represents the ratio of copies of eGFP over RPP30 mRNA and x-axis represents AAV vectors.

[0348] FIG. 8 shows eGFP mRNA expression in various tissues of BalbC mice treated with vehicle, AAV^{mut1} and AAV^{mut1-deco1} AAV vectors, as measured by RT-ddPCR. Y-axis represents the ratio of copies of eGFP over RPP30 mRNA and x-axis represents AAV vectors and the dose injected into the experimental animals. The graph shows eGFP expression in liver (left) and quadriceps (right).

[0349] FIGS. 9A and 9B show exemplary IHC tissue analysis obtained from of Run 1 samples from NHPs. Liver tissue is shown in FIG. 9A, the left side shows tissue obtained from an AAV9 vector treated NHP and the right side shows tissue obtained from an AAV^{mut1_deco1} vector treated NHP; exemplary IHC quadriceps tissue is shown in FIG. 9B, obtained from AAV9 vector treated NHP on left and AAV^{mut1_deco1} vector treated NHP on the right.

[0350] FIG. 10 shows the % GFP positive cells in the liver tissue (right and left side of the organ) and quadriceps tissue (right and left leg) in slides obtained from Run 1 from NHPs administered vehicle, AAV9 or AAV^{mut1_deco1} vector.

[0351] FIG. 11 shows the % GFP positive cells in various skeletal muscle and liver tissue (average from Runs 1 and 2) in slides obtained from NHPs administered vehicle, AAV9 or AAV^{mut1_deco1} vector.

[0352] FIG. 12 shows the % GFP positive cells per animal in various skeletal muscle and liver tissue (average from Runs 1 and 2) in slides obtained from NHPs administered vehicle, AAV9 or AAV^{mut1_deco1} vector.

[0353] FIG. 13 shows the average combined quantification of % GFP positive cells per animal in various skeletal muscle and liver tissue (average from Runs 1 and 2) obtained from NHPs administered vehicle, AAV9 or AAV^{mut1_deco1} vector.

[0354] FIG. 14 shows the % GFP positive cells in various cardiac tissues (average from Runs 1 and 2) obtained from NHPs administered vehicle, AAV9 or AAV^{mut1_deco1} vector.

[0355] FIG. 15 shows the % GFP positive cells per animal in various cardiac muscle (average from Runs 1 and 2) obtained from NHPs administered vehicle, AAV9 or AAV^{mut1_deco1} vector.

[0356] FIG. 16 shows the average % GFP positive cells per animal in ventricle wall, atria, inter ventr septum slides (average from Runs 1 and 2) obtained from NHPs administered vehicle, AAV9 or AAV^{mut1_deco1} vectors.

[0357] FIGS. 17A-17C shows the average % GFP positive cells per NHP animal in various tissues (average from Runs 1 and 2) administered vehicle and AAV9 and AAV^{mut1_deco1} vectors. FIG. 17A shows average % GFP positive cells per animal in liver tissue. FIG. 17B shows average % GFP positive cells per animal in various skeletal muscle tissue. FIG. 17C shows average % GFP positive cells per animal in various cardiac tissue.

[0358] FIGS. 18A-18D show the results of DNA samples analyzed for biodistribution of vector genomes in the liver and quadriceps tissue using a duplexed ddPCR method targeting the transgene (eGFP) and a reference gene (RPP30). The results are shown in FIG. 18A (liver), FIG. 18B (quadriceps), FIG. 18C (biceps), and FIG. 18D (heart) where the x-axis represents AAV vectors (wild type AAV9 on the left and AAV^{mut1deco1} on the right of each plot) and indicating whether the sample was taken from the left or right side of the organ/animal.

[0359] FIGS. 19A-19D show the results of mRNA transcript analysis measured by eGFP copies of eGFP over RPP30 mRNA. FIG. 19A (liver), FIG. 19B (quadriceps), FIG. 19C (biceps), and FIG. 19D (heart), are illustrated where the x-axis represents AAV vectors (wild type AAV9 on the left and AAV^{mut1deco1} on the right) and indicating whether the sample was taken from the left or right side of the organ/animal.

[0360] FIG. 20 shows human MTM1 protein expression in RD cells. The expression level of human MTM protein was determined by automated JESS-ProteinSimple instrument. Each bar represents by peak area values of JESS, either before (blue) or after (orange) being normalized to total protein load. Data were obtained from one run using the 1:4 dilution as described in the western protocol.

[0361] FIG. 21 provides a study design to assess distribution patterns of Anc80 variants in non-human primates, as described in Example 8.

[0362] FIG. 22 provides a scatter plot of Anc80 variant counts from an Anc80 library showing each variant's enrichment in muscle (y-axis) and the liver (x-axis).

[0363] FIG. 23 shows negative log fold changes in tissues compared to the test article input (Anc80 variants of Anc80 library) on day 28 in liver-off variants (variants with “A” at P3) of Anc80 library (left) and liver-on variants (variants with “G” at P3) of Anc80 library (right). The test article, used herein, refers to the pool of vectors administered.

[0364] FIG. 24 shows the effect of P3 on log fold-change of tissue enrichment in primate G62N of Group 2 in day 28 quadriceps. A significant difference of Log fold-change of tissue enrichment in the quadriceps was found between “liver off” “0” and “liver on” “1” Anc80 variants. On the x-axis, “0” represents amino acid residue “G”, and “1.0” represents amino acid “A”.

[0365] FIG. 25 shows the effect of P3 on log fold-change of tissue enrichment in the quadriceps in primate 066E of Group 2 in day 28 quadriceps. A significant difference of log fold-change of tissue enrichment in the quadriceps was found between “liver off” “0” and “liver on” “I” Anc80 variants. On the x-axis, “0” represents amino acid residue “G”, and “1.0” represents amino acid “A”.

[0366] FIG. 26 shows the effect of P3 on average log fold-change of tissue enrichment in the quadriceps in both primates of Group 2 on day 28 quadriceps. A significant difference of log fold-change of tissue enrichment in the quadriceps was found between “liver off” “0” and “liver on” “1” Anc80 variants. On the x-axis, “0” represents amino acid residue “G”, and “1.0” represents amino acid “A”.

[0367] FIG. 27 shows a quadrant liver plot of G62N primate on day 28. The upper left (UL) quadrant bad higher biodistribution of 74 Anc80 variants in the quadricep muscle with liver toggle on “liver on”. The upper right (UR) quadrant had high biodistribution of 3 Anc80 variants in the quadricep muscle with liver toggle on and off. The lower left (LR) quadrant had low biodistribution of 56 Anc80 variants in the quadricep muscle with liver toggle on. The lower right (LL) quadrant bad higher distribution of 891 Anc80 variants in the quadricep muscle with liver toggle on “liver on” and off.

[0368] FIG. 28 shows a quadrant liver plot of G66E primate on day 28. The upper left (UL) quadrant had higher biodistribution of 66 Anc80 variants in the quadricep muscle with liver toggle on “liver on”. The upper right (UR) quadrant had high biodistribution of 125 Anc80 variants with liver toggle on and off. The lower left (LL) quadrant had low biodistribution of 271 Anc80 variants in the quadricep muscle with liver toggle on and off. The lower right (LR) quadrant had lower distribution of 566 Anc80 variants in the quadricep muscle with liver toggle on “liver on”.

[0369] FIG. 29 provides a flow chart representing comparative data amongst animals in each of Group 1 and Group 2. When the tissue enrichment data for 2 primates for each group was averaged, 13 variant pairs were found to have an effect on liver toggle. Variability in AAV transduction is common, particularly at low doses in primates. To use the limited data from two primates to evaluate the low doses of each variant in the ANc80 library, the average fold-enrichment of each variant was used rather than rely solely on enrichments from each animal.

[0370] FIG. 30 shows an average of the liver toggle data between both non-primate animals G62N and G66E of Group 2. The upper left (UL) quadrant had higher biodistribution of 69 Anc80 variants in the quadricep muscle with liver toggle on “liver on” The upper right (UR) quadrant had high biodistribution of 13 Anc80 variants in the quadricep muscle with liver toggle on and off. The lower left (LL) quadrant had low biodistribution of 687 Anc80 variants in the quadricep muscle with liver toggle on and off. The lower right (LR) quadrant had lower distribution of 257 Anc80 variants in the quadricep muscle with liver toggle on “liver on”.

[0371] FIG. 31 shows a fingerprint plot for the top 100 Anc80 variant positions P1 (amino acid 168 of Anc80 capsid), P2 (amino acid 205), P3 (amino acid 266), P4, . . . . P10 (amino acid 587), P11 (amino acid 609) on Anc80 scaffold. The Anc80 variants are color coded by the toggle amino acid at that particular position (P1-P11). “0” represents the color green, while 1 represents the color red. Variants having different amino acids at the variation positions are color coded. Variants were sorted and ranked in decreasing order by liver on fold-change of tissue enrichment in quadricep muscle. As shown, position P3 contains amino acid G in red for all 100 Anc80 variants.

[0372] FIG. 32 shows linear modeling of a position pattern evaluation on average log fold-change of P1-P11 variant pairs. The position pattern evaluation provides tissue enrichment scores versus average log fold changes at every amino acid position (P1-P11) The analysis shows that variations at P3, P5, P6 and P10 have some pattern impact on the average log fold changes (log (FC)) to the quadricep muscle.

[0373] FIG. 33 provides binary codes described in FIG. 31 for liver toggle variant pairs in the Anc80 library of Example 8. P3 represents liver toggle variant pairs of “liver off” and “liver on”. As shown in the bottom left scatter plot, some Anc80 variants are more present in muscle only with “liver off” (LR) which was dependent on liver toggle, while other variants worked well in both states “liver on” and “liver off” (UR).

[0374] FIG. 34 provides amino acid positions of 50,625 RGD targeting peptides in the RGD targeting peptide library of as described in Table 27. “Y1, Y2, Y3. Y4. Y5, Y6, and Y7”. Y1 denotes amino acid residue “R”, Y2 denotes amino acid residue “G”, and Y3 denotes amino acid residue “D”, in X₁X₂X₃RGDX₇X₈X₉X₁₀ described in the present disclosure. Y4 is denoted as “X₇” of X₁X₂X₃RGDX₇X₈X₉X₁₀, Y5 is denoted as “X₈” of X₁X₂X₃RGDX₇X₈X₉X₁₀, Y6 is denoted as X₉” of X₁X₂X₃RGDX₇X₈X₉X₁₀, and Y7 is denoted as “X₁₀” of X₁X₂X₃RGDX₇X₈X₉X₁₀. Example amino acid modifications of Y4, Y5, Y6, and Y7 regions of the targeting peptide include those described herein.

[0375] FIG. 35 shows a density plot of the density of vector DNA at a specific enrichment score ((Log 2 (Fold)) for AAV9 capsids having specific amino acids in position 4 (“Y4”, or “X₇” in X₁X₂X₃RGDX₇X₈X₉X₁₀), position 5 (“Y5”, or “X₈” in SEQ ID NO: 44915), position 6 (“Y6”, or “X₉” in X₁X₂X₃RGDX₇X₈X₉X₁₀) or position 7 (“Y7”, or “X₁₀” in X₁X₂X₃RGDX₇X₈X₉X₁₀) within the targeting peptide sequence. The various colors represent the amino acid at the particular position.

[0376] FIG. 36A shows the muscle-tropic sequence motif identified from the experiments described in Example 11. FIG. 36B is a scatter plot showing muscle enrichment through distribution of scaled enrichment scores of variants tested in Example 11 (an inverse coefficient of variation (ICV)). The red dots on the scatter plot represent variants with a muscle-tropic sequence motif. The mean-ICV plot shows the relationship between mean enrichment score and inverse CV (ICV) of the enrichment score for each variant in the library. The ICV plot is useful for selecting variants with high average tissue enrichment score and low variability (high ICV). FIG. 36C compares distribution scaled enrichment scores of variants with and without the muscle-tropic motif. The cumulative density of variants is shown at specific tissue enrichment scores (Log 2 (fold)). The lines are colored by the probability of amino acids at a particular position.

[0377] FIG. 37A shows a sequence motif identified from top 10 myotropic variants as described in Table 27 that was shown to have significant sequence similarity. FIG. 37B is a scatter plot showing muscle enrichment scores of variants (an inverse coefficient of variation (ICV)) where the top muscle targeting peptides are in red. The mean-ICV plot shows the relationship between mean enrichment score and inverse CV (ICV) of the enrichment score for each variant in the library. The ICV plot is useful for selecting variants with high average tissue enrichment score and low variability (high ICV). FIG. 37C is a network plot where the lines connect dots representing variants with similar sequences. 8 out of 10 top variants were connected in a sequence similarity network. FIG. 37C shows the sequence similarity network of SEQ ID NO: 238 (“ATLVT013XX38181”), the top targeting peptide for muscle tropism.

[0378] FIG. 37D shows a sequence motif enriched in muscle tropic capsids.

[0379] FIG. 37E shows a network comparison of the targeting peptides described herein to literature myopeptides.

[0380] FIG. 38A provides a network plot and FIG. 38B provides a scatter plot showing tissue enrichment scores for each tissue region assessed. The network analysis and scatter plot show that SEQ ID NO: 238 (“ATLVT013XX38181”) outperformed wild-type AAV9. AAV9^{deco1} (AAV9 capsid with the deco1 peptide), and AAV9^{myo3E} (AAV9 capsid with a myo3E peptide) capsids for muscle tropism, and reduces liver toxicity due to the liver-detargeting phenotype Mut1 as compared to wild-type AAV9. The targeting peptide SEQ ID NO: 238 (“ATLVT013XX38181”) consistently ranked at the top for target enrichment in all tissues except for the triceps.

[0381] FIG. 38C shows a plot of tissue enrichment scores (log 10 scale of expression) for liver and the indicated muscle tissues. Capsids tested included AAV9 and AAV9 comprising an M3 (MYODV6 (SEQ ID NO: 44864)) targeting peptide located in VR VIII or an M2 (RGDRSVV (SEQ ID NO: 239)) targeting peptide located in VR VIII between amino acids at positions 588 and 589. Muscle tissues analyzed included ventricle wall of the heart, biceps femoris, diaphragm, tibialis anterior, and triceps brachii Higher tissue enrichment score values represent greater tropism.

[0382] FIG. 39 shows the probability of the top 100 targeting peptides at positions Y4, Y5, Y6 and Y7, where amino acid “R” at position 4 (Y4) is enriched, and amino acids “V, I, and L” are enriched at position 7 (Y7).

[0383] FIG. 40 shows a comparison of Anc80 variants with and without: a deco1 (SEQ ID NO: 1) targeting peptide inserted into the VR VIII region of the Anc80 variant capsid. 6 out of 7 Anc80 variants with a deco1 insertion at VR VIII enhanced muscle delivery of Anc80 variants.

[0384] FIG. 41, the present inventors created additional targeting peptide variants for insertion, substitution, or modification within the VR8 region of an AAV capsid by modifying the 3 amino acids preceding amino acids “RGD” in the targeting peptide having an amino acid sequence of SEQ ID NO: 44910 (termed “triplet”) and the 4 amino acids after “RGD” in the targeting peptide having an amino acid sequence of SEQ ID NO: 44910 peptide (termed “quad” or “quadruplet”). Additionally, the present inventors created additional targeting peptides for insertion, substitution, or modification within the VR8 region of an AAV capsid by modifying the 3 amino acids preceding amino acids “RGD” in the targeting peptide having an amino acid sequence of SEQ ID NO: 44880 and the 4 amino acids after the amino acids “RGD” in the targeting peptide having an amino acid sequence of SEQ ID NO: 44880.

[0385] FIG. 41 shows a list of 20 targeting peptide variants (myoDV1-myoDV10 and myoCD5-myoCD14). FIG. 41 shows tissue enrichment scores for each of the 20 targeting peptide variants in muscle tissue (diaphragm, flexor digitorum profundus, heart left ventricle wall, tibialis anterior, and triceps brachii). Higher tissue enrichment score values represent greater muscle tropism, with MYODV6 and MYODV8 having the highest averages tissue enrichment score for all muscle tissue regions.

[0386] FIG. 42 shows a network plot showing log 2 fold change (tissue enrichment score) for each of the muscle tissues analyzed for SEQ ID NO: 44880, MYODV6 (SEQ ID NO: 44864), MYODV8 (SEQ ID NO: 44866). MYOCD10 (SEQ ID NO: 44874), and MYOCD12 (SEQ ID NO: 44876) targeting peptides. Surprisingly, as shown in the network plot, MYODV6 and MYODV8 each have the highest overall log 2 fold change of tissue enrichment in each muscle tissue compared to MYOCD10 and MYCD12 (which contain amino acid residues “SNR” (triplet) preceding “RGD” within the targeting peptide. Additionally, MYODV6 and MYODV8 each have a higher overall log 2 fold change of tissue enrichment in each muscle tissue compared to the targeting peptide having an amino acid sequence of SEQ ID NO: 44880.

[0387] FIG. 43 shows a plot of tissue enrichment scores (log 10 scale of expression) for liver and the indicated muscle tissues. Capsids tested included AAV9 and AAV9 comprising an H1 (RGDLIGR (SEQ ID NO: 1422)) targeting peptide located in VR VIII between amino acids at positions 588 and 589 or an H2 (RGDQSTL (SEQ ID NO: 3052)) targeting peptide located in VR VIII between amino acids at positions 588 and 589. Muscle tissues analyzed included biceps femoris, diaphragm, tibialis anterior, triceps brachii, and ventricle wall of the heart. Higher tissue enrichment score values represent greater tropism.

[0388] FIG. 44 shows a plot of tissue enrichment scores (log 10 scale of expression) for liver and the indicated muscle tissues. Capsids tested included AAV9 and AAV9 comprising an S1 (RGDISRT (SEQ ID NO. 263)) targeting peptide located in VR VIII between amino acids at positions 588 and 589 or an S2 (RGDRSQT (SEQ ID NO: 251)) targeting peptide located in VR VIII between amino acids at positions 588 and 589. Muscle tissues analyzed included ventricle wall of the heart, biceps femoris, diaphragm, tibialis anterior, and triceps brachii. Higher tissue enrichment score values represent greater tropism.

[0389] FIG. 45 shows a plot for median percent GFP⁺ cells for liver and the indicated muscle tissues. Capsids tested included AAV9 and AAV9 comprising an M3 (“DV6” ENRRGDFNNL (SEQ ID NO: 44864)) targeting peptide located in VR VIII (M3 targeting peptide was inserted between 585 and 589 such that amino acids at positions 586, 587 and 588 were replaced with three amino acids from the targeting peptide); an M1 (“38181” SAQRGDRGQI (SEQ ID NO: 44911)) targeting peptide located in VR VIII (M1 targeting peptide was inserted between 585 and 589 such that amino acids at positions 586, 587 and 588 were replaced with three amino acids from the targeting peptide), and a mut1 VR I substitution, or an M1 (“38181” SAQRGDRGQI (SEQ ID NO: 44911)) targeting peptide located in VR VIII (M1 targeting peptide was inserted between 585 and 589 such that amino acids at positions 586, 587 and 588 were replaced with three amino acids from the targeting peptide) with a wild type VR I. Higher percent GFP⁺ cells represent greater tropism.

[0390] FIG. 46 shows representative IHC images for anti-GFP staining for the indicated tissues (quads, heart, and liver) for various AAV capsid proteins (AAV9. AAV9 comprising SEQ ID NO: 44880, AAV9 comprising an M3 targeting peptide (SEQ ID NO: 48391), and an AAV9 comprising an M1 targeting peptide (SEQ ID NO: 44864). Images were taken at 10× magnification. The IHC images in FIG. 46 served, in part, as the basis for the quantification in FIG. 45.

[0391] FIG. 47 shows a plot for ddPCR data for cells for liver and the indicated muscle tissues. Capsids tested included AAV9 and AAV9 comprising an M3 (“DV6” ENRRGDFNNL (SEQ ID NO: 44864)) targeting peptide located in VR VIII (M3 targeting peptide was inserted between 585 and 589 such that amino acids at positions 586, 587 and 588 were replaced with three amino acids from the targeting peptide); an M1 (“38181” SAQRGDRGQI (SEQ ID NO: 44911)) targeting peptide located in VR VIII (M1 targeting peptide was inserted between 585 and 589 such that amino acids at positions 586, 587 and 588 were replaced with three amino acids from the targeting peptide) and a mut1 VR I substitution, or an M1 (“38181” SAQRGDRGQI (SEQ ID NO: 44911)) targeting peptide located in VR VIII (M1 targeting peptide was inserted between 585 and 589 such that amino acids at positions 586, 587 and 588 were replaced with three amino acids from the targeting peptide) with a wild type VR I.

[0392] FIG. 48 provides a summary of eGFP mRNA expression in various tissues of C57BL/6 mice treated with different AAV vectors, as measured by RT-ddPCR and eGFP vector genomes copies per DPG (DNA) in various tissues of C57BL/6 mice treated with different AAV vectors, as measure by RT-ddPCR.

[0393] FIG. 49A provides a peptide segment within variable region I (VRI) of the AAV9 capsid protein, various amino acid positions (P₁, P₂, P₃, P₄, P₅, P₆, P₇, P₈, P₉, P₁₀, P₁₁, P₁₂) within the peptide segment and modifications made to the various positions for capsids present in the AAV^{-Lib1} capsid library.

[0394] FIG. 49B provides a sequence alignment of variable region I in certain AAV variants using AAV2 variable region I as a reference for numbering.

[0395] FIG. 50 shows vector genome (DNA) in liver of C57BL/6 mice treated with the AAV^{-Lib1} Library. Log 2Fold DNA levels are presented for each of the 3,456 capsid variants (variant ID on x-axis) in addition to AAV9 and AAV^{mut1}. Log 2Fold DNA levels of AAV9 and AAV^{mut1} are identified specifically in FIG. 50.

[0396] FIG. 51A is a schematic showing the amino acid residues in VRI with a box highlighting position P6, including the two amino acid residues at P6 for the AAV^{-Lib1} library: alanine (A) and glycine (G).

[0397] FIG. 51B shows a density plot of the amount of vector DNA in the liver (Log 2 (Fold)) for the sum of all capsids in AAV^{-Lib1} that include an alanine (A) at P6 (amino acid position 266) and a density plot of the amount of vector DNA in the liver (Log 2 (Fold)) for the sum of all capsids in AAV^{-Lib1} that include a glycine (G) at P6 (amino acid position 266).

[0398] FIG. 51C is an empirical cumulative distribution function (eCDF) plot showing the amount of vector DNA in the liver (Log 2 (Fold)) for the sum of all capsids in AAV^{-Lib1} that include an alanine (A) at P6 (amino acid position 266) and the amount of vector DNA in the liver (Log 2 (Fold)) for the sum of all capsids in AAV^{-Lib1} that include a glycine (G) at P6 (amino acid position 266).

[0399] FIG. 52A is a schematic showing the amino acid residues in VRI with boxes highlighting positions of interest: P₁, P₃, P₅, P₆, P₈, and P₁₂. In addition, FIG. 52A provides an example formula for calculating an enrichment score for the modified capsid proteins in the AAV^{-Lib1} library.

[0400] FIG. 52B is an empirical cumulative distribution function (eCDF) plot showing the amount of vector DNA in the liver (Log 2 (Fold)) for the sum of all capsids in the AAV^{-Lib1} library that include cither an alanine (A), a glutamate (E), a glutamine (Q), and a threonine (T) at P₃ (amino acid position 263).

[0401] FIG. 52C is an empirical cumulative distribution function (eCDF) plot showing the amount of vector DNA in the liver (Log 2 (Fold)) for the sum of all capsids in the AAV^{-Lib1} library that include either an alanine (A) or a glycine (G) at P₅ (amino acid position 265).

[0402] FIG. 52D is an empirical cumulative distribution function (eCDF) plot showing the amount of vector DNA in the liver (Log 2 (Fold)) for the sum of all capsids in the AAV^{-Lib1} library that include either an alanine (A) or a glycine (G) at P⁶ (amino acid position 266).

[0403] FIG. 53A is an enrichment plot showing the amount of vector DNA in the liver for the sum of all the capsids the AAV^{-Lib1} library that include either an alanine (A) or a glycine (G) at P⁶ (amino acid position 266).

[0404] FIG. 53B is an enrichment plot showing the amount of vector DNA in the liver for the sum of all the capsids the AAV-Lidl library having a P₅P₆ combination of AA, AG, GA, or GG.

[0405] FIG. 53C is an enrichment plot showing the amount of vector DNA in the liver for the sum of all the capsids in the AAV^{-Lib1} library having a P₃, P₅, and P₆ combination of AAA, AAG, AGA, AGG, EAA, EAG, EGA, EGG, QAA, QAG, QGA, QGG, TAA, TAG, TGA, and TGG (appearing from left to right on the x-axis).

[0406] FIG. 54 shows output of a network analysis of data from the AAV^{-Lib1} library Each circle indicates a capsid variant and a line connecting the capsids indicates sequence similarity.

[0407] FIG. 55 is an illustration of the structure of an AAV VP1 protein with positions P₃, P₅, P₆, and P₈ in VRI highlighted.

[0408] FIG. 56A is an empirical cumulative distribution function (eCDF) plot showing RNA expression in the liver (Log 2 (Fold)) for the sum of all capsids in the AAV^{-Lib1} library that include an alanine (A), a glutamate (E), a glutamine (Q), or a threonine (T) at P₃ (amino acid position 263).

[0409] FIG. 56B is an empirical cumulative distribution function (eCDF) plot showing RNA expression in the heart (Log 2 (Fold) for the sum of all capsids in the AAV^{-Lib1} library that include an alanine (A), a glutamate (E), a glutamine (Q), or a threonine (T) at P3 (amino acid position 263).

[0410] FIG. 56C is an empirical cumulative distribution function (eCDF) plot showing RNA expression in the liver (Log 2 (Fold)) for the sum of all capsids in the AAV^{-Lib1} library that include either an alanine (A) or a glycine (G) at P₅ (amino acid position 265).

[0411] FIG. 56D is an empirical cumulative distribution function (eCDF) plot showing the RNA expression in the heart (Log 2 (Fold)) for the sum of all capsids in the AAV^{-Lib1} library that include either an alanine (A) or a glycine (G) at P⁵ (amino acid position 265).

[0412] FIG. 56E is an empirical cumulative distribution function (eCDF) plot showing RNA expression in the liver (Log 2 (Fold)) for the sum of all capsids in the AAV^{-Lib1} library that include either an alanine (A) or a glycine (G) at P⁵ (amino acid position 266).

[0413] FIG. 56F is an empirical cumulative distribution function (eCDF) plot showing RNA expression in the heart (Log 2 (Fold) for the sum of all capsids in the AAV^{-Lib1} library that include either an alanine (A) or a glycine (G) at P₆ (amino acid position 266).

[0414] FIG. 57A shows enrichment in liver DNA (x-axis) plotted against enrichment in liver RNA (y-axis) for capsids comprising various combination of amino acid modifications at P₃, P₅, and P₆. Positions of AAV^{mut1} and AAV9 controls are indicated by arrows and corresponding text.

[0415] FIG. 57B shows enrichment in liver DNA (x-axis) plotted against enrichment in heart RNA (y-axis) for capsids comprising various combination of amino acid modification at P₃, P₅, and P₆. Positions of AAV^{mut1} and AAV9 controls are indicated by arrows and corresponding text.

[0416] FIG. 58A shows enrichment in liver DNA (x-axis) plotted against enrichment in liver RNA (y-axis) for capsids having a threonine (T), a glycine (G), and a glycine (G) combination of amino acid modifications at P₃, P₅, and P₆, respectively. Positions of AAV^{mut1} and AAV9 controls are indicated by arrows and corresponding text.

[0417] FIG. 58B shows enrichment in liver DNA (x-axis) plotted against enrichment in heart RNA (y-axis) for capsids having a threonine (T), a glycine (G), and a glycine (G) combination of amino acid modifications at P₃, P₅, and P₆, respectively. Positions of AAV^{mut1} and AAV9 controls are indicated by arrows and corresponding text.

[0418] FIG. 58C shows enrichment in liver DNA (x-axis) plotted against enrichment in heart RNA (y-axis) for capsids having a threonine (T), a glycine (G), and a glycine (G) combination of amino acid modifications at P₃, P₅, and P₆, respectively. Sub-populations of the capsids having a threonine (T) (yellow dots) or an asparagine (N)/a serine (S) (blue dots) at position P₁ are color-coded. Positions of AAV^{mut1} and AAV9 controls are indicated by arrows and corresponding text.

[0419] FIG. 58D shows enrichment in liver RNA (x-axis) plotted against enrichment in heart RNA (y-axis) for capsids having a threonine (T), a glycine (G), and a glycine (G) combination of amino acid residues at P₃, P₅, and P₆, respectively. Each dot represent a capsid having TGG at P₃, P₅, and P₆. Capsids having a particular amino acid residue (or combinations of amino acid residues) at positions P₁, P₂, PA, and P₁₂ (e.g., an asparagine (N), a glycine (G), a threonine (T), a serine (S), and/or an alanine (A)) are identified and shaded accordingly. Particular subpopulations having NGTT, NSTT, SGAA, and SGAT at positions P₁, P₂, P₄, and P₁₂ are identified. Positions of AAV^{mut1} and AAV9 controls are indicated by arrows and corresponding text.

[0420] FIG. 58E shows enrichment in liver RNA (x-axis) plotted against enrichment in heart RNA (y-axis) for capsids having a glutamine (Q), a glycine (G), and a glycine (G) combination of amino acid residues at P₃, P₅, and P₆, respectively. Each dot represent a capsid having TGG at P₃, P₅, and P₆. A subpopulation having a serine (S), a glycine (G), a threonine, and a histidine (H) at positions at positions P₁, P₂, P₄, and P₁₂ is identified. Positions of AAV^{mut1} and AAV9 controls are indicated by arrows and corresponding text.

[0421] FIG. 58F shows average enrichment in liver RNA (x-axis) plotted against enrichment in heart RNA (y-axis) for all AAV^{-Lib1} capsids having a threonine (T), a glycine (G), and a glycine (G) combination of amino acid residues at P₃, P₅, and P₆, respectively. Positions of AAV^{mut1} and AAV9 controls are indicated by corresponding text.

[0422] FIG. 58G shows enrichment in liver RNA (x-axis) plotted against enrichment in heart RNA (y-axis) for 24 selected capsids having a threonine (T), a glycine (G), and a glycine (G) combination of amino acid residues at P₃, P⁵, and P⁶, respectively. The 24 selected capsids correspond to groups: 1 NSTSGGP₇P₈NDNH (e.g., SEQ ID NO: 44927); group 2: NSTTGGP₇P₈NDNH (SEQ ID NO: 44928); group 4: SGTAGGP₇P₈NDNT (SEQ ID NO: 44930); group 5: SGTSGGP₇P₈NDNA (SEQ ID NO: 44931); group 6: SGTTGGP₇P₈NDNT (SEQ ID NO: 44932); and group 7: SSTAGGP₇P₈NDNA (SEQ ID NO: 44933). Positions of AAV^{mut1} and AAV9 controls are indicated by corresponding text.

[0423] FIGS. 58H-58I shows enrichment in liver RNA (x-axis) plotted against enrichment in heart RNA (y-axis) for 6 groups where each group has a threonine (T), a glycine (G), and a glycine (G) combination of amino acid residues at P₃, P₅, and P₆, respectively. FIG. 58H includes dark circles that identify the VRI mini-Lib peptide segments in the key. FIG. 58I includes dark circles that identify the VRI mini-Lib peptide segments in the key.

[0424] FIG. 59 shows vector genome (DNA) in liver of NHP treated with the AAV^{-Lib1} Library. Log 2Fold DNA levels are presented for each of the 3,456 capsid variants (variant ID on x-axis) in addition to AAV9 and AAV^{mut1}. Log 2Fold DNA levels of AAV9 and AAV^{mut1} are identified specifically in FIG. 59.

[0425] FIG. 60 is a box plot showing the distribution of liver RNA log 2FC enrichment score from capsids in all sequence groups defined by P₃, P₅, P₆, P₈ positions (see also positions P₃, P₅, P₆, P₈ in VR I).

[0426] FIG. 61 is a plot showing liver enrichment for rAAV from AAV^{-Lib1} in mice (y-axis) versus liver enrichment for rAAV from AAV^{-Lib1} in NHP (x-axis) Correlation is indicated by 0.72 R\hat{ }2-value. Capsids plotted on FIG. 61 include capsids having a peptide segment with a P3TPSGP6G motif.

[0427] FIGS. 62A-62E shows non-limiting examples of combination of targeting peptides, comprising: variable triplets, a constant RGD, a variable quad, and, optionally, peptide segments in the AAV-Lib3 library in Example 27. FIG. 62A shows possible amino acid residues in the variable triplet corresponding X₁, X₂, and X₃ where the color indicates the type of amino acid. FIG. 62B shows the constant RGD quad that is in each targeting peptide. FIG. 62C shows the amino acid residue category (genus) and specific quads. FIG. 62D shows non-limiting examples of peptide segments present in VR I. FIG. 62E shows amino acids at positions X₇, X₈, X₉, and X₁₀, where the color indicates the type of amino acid residue.

[0428] FIGS. 63A-63B show an enrichment plots (Avg_logFC versus Inverse CV (Coefficient of Variation)) for capsids in the AAV^{-Lib2} library. FIG. 63A is an enrichment plot showing capsid performance in muscle (i.e., all muscle tissue) for all 50,500 capsids in the AAV^{-Lib2} library. FIG. 63B shows enrichment plots for capsids from the AAV^{-Lib2} library having a quad selected from: FNNL, FNNT, and RGQI.

[0429] FIG. 64 shows an enrichment plot of the amount of vector RNA in muscle tissue for the sum of all the capsids in the AAV^{-Lib2} library having the indicated quad sequences.

[0430] FIG. 65 shows a heatmap of tissue enrichment scores in muscle tissues for each of the capsids in the AAV^{-Lib2} library. AAV^{-Lib2} library includes about 50,500 capsids having one of the 20 quad and one of XX triplet sequences. Data for each capsid appears as a cell in the heatmap where the row indicates the quad and the column indicates the triplet. Data is grouped using hierarchical clustering. Clustering identified Group I, Group II, and Group III.

[0431] FIG. 66A shows enrichment scores averaged across all muscle tissue for each of the capsids in the AAV^{-Lib2} library having a quad selected from: RGQI, RSVV, and RGVV (Group 1). The top 100 capsids are identified by the larger of the two dots on the plot.

[0432] FIG. 66B shows a motif plot of the targeting peptides for the top 100 capsids in the AAV^{-Lib2} library having a quad selected from: RGQI. RSVV, and RGVV (Group 1). Data used to generate the motif plot is averaged across all muscle tissue.

[0433] FIG. 66C shows a plot of unique variant count for the indicated triplets for the top 100 capsids in the AAV^{-Lib2} library having a quad selected from: RGQI, RSVV, and RGVV (Group 1).

[0434] FIG. 67A shows enrichment scores averaged across all muscle tissue for each of the capsids in the AAV^{-Lib2} library having a quad selected from: HGVL, YSSV, YSTM, and YTSV (Group 2). The top 100 capsids are identified by the larger of the two dots on the plot.

[0435] FIG. 67B shows a motif plot of the targeting peptides for the top 100 capsids in the AAV^{-Lib2} library having a quad selected from: HGVL, YSSV, YSTM, and YTSV (Group 2). Data used to generate the motif plot is averaged across all muscle tissue.

[0436] FIG. 67C shows a plot of unique variant count for the indicated triplets for the top 100 capsids in the AAV^{-Lib2} library having a quad selected from: HGVL, YSSV, YSTM, and YTSV (Group 2).

[0437] FIG. 68A shows enrichment scores averaged across all muscle tissue for each of the capsids in the AAV^{-Lib2} library having a quad selected from: FNNT, FNNL, FONT, and YNSL (Group 3). The top 100 capsids are identified by the larger of the two dots on the plot.

[0438] FIG. 68B shows a motif plot of the targeting peptides for the top 100 capsids in the AAV^{-Lib2} library having a quad selected from: FNNT, FNNL, FONT, and YNSL (Group 3). Data used to generate the motif plot is averaged across all muscle tissue.

[0439] FIG. 68C shows a plot of unique variant count for the indicated triplets for the top 100 capsids in the AAV^{-Lib2} library having a quad selected from: FNNT, FNNL, FONT, and YNSL (Group 3).

[0440] FIG. 69 shows an enrichment plot of the amount of vector RNA in liver tissue for the sum of all the capsids in the AAV^{-LIB2} library having the indicated quad sequences.

[0441] FIG. 70A shows enrichment scores for liver tissue for each of the capsids in the AAV^{-Lib2} library having a quad selected from: RGQI, RSVV, RGVV, RQGI, and RSQT. The top 100 capsids are identified by the larger of the two dots on the plot.

[0442] FIG. 70B shows a motif plot of the targeting peptides for the top 100 capsids in the AAV^{-Lib2} library (from FIG. 70A) having a quad selected from: RGQI, RSVV, RGVV, RQGI, and RSQT. Data used to generate the motif plot is averaged across the liver tissue.

[0443] FIG. 71A shows an enrichment score plots (inverse VC versus AverageMN_FC) for biceps femoris, quadriceps, diaphragm, heart-atria, heart-ventricle, and liver for each of the capsids in the AAV^{-Lib2} library. The top 10 performing capsids are identified by the darker shaded circles.

[0444] FIG. 71B shows a table of enrichment scores for the top 10 capsids, where the top 10 capsids include the indicated targeting peptide.

[0445] FIG. 71C shows a table of the amino acid residues (at each position for the targeting peptides described in FIG. 71B and shown also in FIG. 71A.

[0446] FIG. 72A shows an enrichment score plot (Log FC mean versus inverse CV (count of variants)) for capsids having the indicated quads. Targeting peptides with specific triplets are identified.

[0447] FIG. 72B shows a table of the amino acid residues at each position or the targeting peptides described in FIG. 72A.

[0448] FIG. 73A shows enrichment score plot (Log FC mean versus inverse CV (count of variants)) for capsids having the indicated quads. Targeting peptides with specific triplets are identified.

[0449] FIG. 73B shows a table of the amino acid residues (and properties for the respective amino acid residues (e.g., polar)) for the targeting peptides described in FIG. 73A

[0450] FIG. 74A shows enrichment scores in skeletal muscle versus heart for each of the capsids in the AAV^{-Lib2} library. The 10 capsids are highlighted.

[0451] FIG. 74B shows enrichment scores in skeletal muscle versus heart for each of the capsids in the AAV^{-Lib2} library. The 10 capsids are highlighted.

[0452] FIG. 75A shows enrichment scores in skeletal muscle versus enrichment scores heart for each of the capsids in the AAV^{-Lib2} library.

[0453] FIG. 75B shows enrichment scores in skeletal muscle versus enrichment scores in heart for each of the capsids in the AAV^{-Lib2} library having the quad “LIGR”.

[0454] FIG. 75C shows enrichment scores in skeletal muscle versus enrichment scores in heart for each of the capsids in the AAV^{-Lib2} library having the quad (“QSTL”).

[0455] FIG. 75D shows enrichment scores in skeletal muscle versus enrichment scores in heart for each of the capsids in the AAV^{-Lib2} library having the quad (“RGVV”).

[0456] FIG. 75E shows enrichment scores for heart over enrichment scores in skeletal muscle for each of the capsids in the AAV^{-Lib2} library having the indicated quads.

### 6. DETAILED DESCRIPTION

### 6.1. Definitions

[0457] “AAV” is adeno-associated virus and may be used to refer to the virus itself or derivatives thereof. The term covers all subtypes, serotypes and pseudotypes, and both naturally occurring and recombinant forms, except where required otherwise.

[0458] The term “AAV capsid protein” or simply “capsid protein” refers to a VP1, VP2, or VP3 capsid protein. In some embodiments, the AAV capsid protein is a wild type or modified capsid protein of AAV9; AAV2; AAV1; AAV6; AAV3; AAV LK03; AAV7; AAV8; AAV hu.37; AAV rh.10; AAV hu.68; AAV10; AAV5; AAV3-3; AAV4-4; AAV1-A; hu.46-A; hu.48-A; hu.44-A; hu.43-A; AAV6-A; hu.34-B; hu.47-B; hu.29-B; rh.63-B; hu.56-B; hu.45-B; rh.57-B; rh.35-B; rh.58-B; rh.28-B; rh.51-B; rh.19-B; rh.49-B; rh.52-B; rh.13-B; AAV2-B; rh.20-B; rh.24-B; rh.64-B; hu.27-B; hu.21-B; hu.22-B; hu.23-B; hu.7-C; hu.61-C; rh.56-C; hu.9-C; hu.54-C; hu.53-C; hu.60-C; hu.55-C; hu.2-C; hu.1-C; hu.18-C; hu.3-C; hu.25-C; hu.15-C; hu.16-C; hu.11-C; hu.10-C; hu.4-C; rh.54-D; rh.48-D; rh.55-D; rh.62-D; AAV7-D; rh.52-E; rh.51-E; hu.39-E; rh.53-E; hu.37-E; rh.43-E; rh.50-E; rh.49-E; rh.61-E; hu.41-E; rh.64-E; rh74, hu.42-E; rh.57-E; rh.40-E; hu.67-E; hu.17-E; hu.6-E; hu.66-E; rh.38-E; hu.32-F; AAV9/hu; hu.31-F; Anc80; Anc81; Anc82; Anc83; Anc84; Anc94; Anc113; Anc126; Anc127; Anc80L27; Anc80159; Anc80L60; Anc80162; Anc80L65; Anc80L33; Anc80L36; Anc80L44; Anc80L1; Anc110; and Anc80DI.

[0459] The term “modified AAV capsid protein” or simply “modified capsid protein” refers to a capsid protein that is modified as compared to such naturally occurring or synthetic/artificial capsid protein, which is referred to as the “reference AAV capsid protein” or “reference capsid protein.” The reference AAV capsid protein as used herein may be a VP1, VP2, or VP3 capsid protein of a naturally occurring AAV variant or a non-naturally occurring VP1, VP2, or VP3 capsid protein that is known in the art.

[0460] The term “targeting peptide” as used herein refers to a 10 amino acid sequence (X₁X₂X₃RGDX₇X₈X₉X₁₀) within the variable region VIII (VRVIII) of a modified AAV capsid protein introduced by one or more modifications described herein. AAVs comprising a modified capsid protein with a targeting peptide can have localization and distribution in a target cell, tissue or organ different from the AAV with a capsid protein without the target peptide.

[0461] The term “peptide segment” as used herein refers to a part of variable region I (VR I) of an AAV capsid protein comprising 10, 11, or 12 amino acids. In preferred embodiments, the peptide segment is positioned between amino acid 250 and 280 of the AAV capsid protein. A modified AAV capsid protein provided herein includes a peptide segment having a sequence different from the corresponding sequence of a reference AAV capsid protein by having one or more modifications. The peptide segment can be referred to as P₁P₂P₃P₄P₅P₆P₇P₈P₉P₁₀P₁₁P₁₂ within VR I where “Pn” refers to a position in the peptide segment.

[0462] The term “amino acid position” within an AAV capsid protein as here herein refers to a position of an amino acid residue in an AAV VP1 protein sequence, counted from the first amino acid in the N terminal. As used herein, the term “amino acid” comprises naturally occurring L- and D-amino acids and artificial, i.e. non-naturally occurring, α-amino acids. Preferably, the amino acid is a naturally occurring amino acid. In preferred embodiments, the amino acid is a naturally occurring L-α-amino acid.

[0463] For the avoidance of doubt, as used herein, the indication that an insertion site is at amino acid position X means that the targeting peptide is inserted between amino acids X and X+1. i.e., the targeting peptide is inserted after the indicated amino acid.

[0464] The term “liver off” is used herein to describe an AAV having a lower tropism to liver or less biodistribution in liver when administered to a mammalian subject compared to other AAV variants. The term “liver off” is also used to describe a modification in the AAV capsid protein that reduces the tropism to liver or biodistribution in liver when administered to a mammalian subject. The term “liver off” is also used to describe a species of an AAV capsid with a variable region 1 (VRI) that reduces the tropism to liver or biodistribution in liver when administered to a mammalian subject.

[0465] The term “liver on” is used herein to describe an AAV having a higher tropism to liver or more biodistribution in liver when administered to a mammalian subject compared to other AAV variants. The term “liver on” is also used to describe a modification in the AAV capsid protein that increases the tropism to liver or biodistribution in liver when administered to a mammalian subject.

[0466] The term “CAG” when used in relation to a promoter or ERE refers to a promoter or ERE with chicken beta actin promoter and CMV enhancer sequences.

[0467] The term “constitutive” promoter or ERE as used herein refers to a nucleotide sequence which, when operably linked with a polynucleotide which encodes or specifies a gene product, causes the gene product to be produced in a cell under most or all physiological conditions of the cell.

[0468] The term “expression regulatory element” or “ERE” as used herein in the context of the rAAV of the disclosure refers to a nucleic acid sequence which is required for expression of the MTM1 coding sequence operably linked to the ERE. In some instances, an ERE sequence may be the core promoter sequence and in other instances, this sequence may also include an enhancer sequence and other regulatory elements which are required for expression of the gene product, for example exon sequences.

[0469] The term “functional fragment” in the context of the myotubularin or MTM1 refers to a biologically functional fragment of myotubularin or MTM1. As would be understood in the art, a biologically functional fragment is a portion or portions of a full length sequence that retain a biological function of the full length sequence. An exemplary functional fragment corresponds to amino acids 29-486 of SEQ ID NO: 165 (and is disclosed herein as SEQ ID NO:164). Biological functions of MTM1 include the ability cleave or hydrolyze an endogenous phosphoinositide substrate known in the art, or an artificial phosphoinositide substrate for in vitro assays (i.e., a phosphoinositide phosphatase activity), to recruit and/or associate with other proteins such as, for example, the GTPase Rab5, the PI 3-kinase Vps34 or Vps15 (i.e., proper localization), or treat myotubular myopathy.

[0470] The term “functional variant” in the context of the myotubularin or MTM1 refers to various splicing isoforms, variants, fusion proteins, and modified forms of the wildtype MTM1 polypeptide or a functional fragment thereof. Such isoforms, bioactive fragments or variants, fusion proteins, and modified forms of the MTM1 polypeptides retain at least one biological function of the full length MTM1 protein (e.g., a protein of SEQ ID NO: 165).

[0471] The term “inducible” promoter or ERE as used herein refers to a nucleotide sequence which, when operably linked with a polynucleotide which encodes or specifics a gene product, causes the gene product to be produced in a cell substantially only when an inducer which corresponds to the promoter is present in the cell.

[0472] As used herein, the term “internalizing moiety” refers to a moiety capable of interacting with a target tissue or a cell type to effect delivery of the attached molecule into the cell (i.e., penetrate desired cell; transport across a cellular membrane). In certain embodiments, an MTM1 polypeptide encoded by the rAAV of the disclosure can be a fusion protein comprising an internalizing moiety. In some embodiments, the internalizing moiety selectively, although not necessarily exclusively, targets and penetrates muscle cells. In certain embodiments, the internalizing moiety has limited cross-reactivity, and thus preferentially targets a particular cell or tissue type. In certain embodiments, suitable internalizing moieties include, for example, antibodies, monoclonal antibodies, or derivatives or analogs thereof. Other internalizing moieties include for example, homing peptides, receptors, and ligands. In certain embodiments, the internalizing moiety mediates transit across cellular membranes via an ENT2 transporter. Exemplary internalizing moieties are disclosed in U.S. Pat. No. 9,447,394 B2, the contents of which are incorporated by reference herein.

[0473] The term “inverted terminal repeat” (or “ITR”) refers to a polynucleotide sequence found at the ends of AAV genomes that form a hairpin, which contributes to the genome's ability to self-prime (allowing for primase-independent synthesis of the complementary second DNA strand) and provides for encapsidation of the genome into an AAV particle. An ITR can be a wild-type ITR or a variant thereof.

[0474] The terms “liver-toggle mutant”, “liver-toggle mutant of a reference AAV capsid protein” and the like, as used herein, refers to a capsid protein comprising a sequence different from a reference AAV capsid protein by having one or more mutations (e.g., amino acid substitutions) that alter tropism, specificity or distribution in a liver as compared to the reference AAV capsid protein when administered to a mammalian subject (such a sequence difference referred to herein as a “liver toggle mutation”). The mammalian subject can be a human, non-human primate (NHP), mice, rats, birds, rabbits, guinea pigs, hamsters, farm animals (including pigs and sheep), dogs, or cats. Exemplary liver toggle mutations are disclosed in WO2019/217911 and WO2021/050614, incorporated by reference in their entireties herein. In some embodiments, the liver toggle mutations comprise (i) an alanine (A) or guanine (G) amino acid residue at an amino acid position corresponding to position 266 in Anc80 VP1 and/or b) a lysine (K) or arginine (R) amino acid residue at an amino acid position corresponding to position 168 in Anc80 VP1. In other embodiments, a liver-toggle mutant of a reference AAV capsid protein is a capsid protein comprising a sequence different from the reference AAV capsid protein by having an alanine (A) amino acid residue at an amino acid position corresponding to position 267 in AAV9 VP1 protein and a threonine (T) amino acid residue at an amino acid position corresponding to position 269 in AAV9 VP1. In yet further embodiments, the liver toggle mutations comprise a sequence different from the reference AAV capsid protein by having any combination of (i) an arginine (R) instead of serine (S) at position 446; (ii) an alanine (A) instead of an arginine (R) at position 471; and (iii) a threonine (T) or alanine (A) instead of a valine (V) at position 708, in each case numbered according to an AAV2 reference capsid protein (SEQ ID NO: 1 of WO2021/050614, which is incorporated by reference herein).

[0475] The term “modification” when in conjunction with an amino acid residue, amino acid residues, or a modified sequence, refers to insertion(s), deletion(s), and/or substitution(s).

[0476] The term “MTM1 coding sequence” is used herein to refer to a specific sequence of nucleotides in a polynucleotide, such as an rAAV genome or mRNA produced thereby, that encodes an MTM1 polypeptide.

[0477] The term “MTM1 polypeptide” refers to a polypeptide comprising an amino acid sequence having at least 90%, at least 95%, at least 98%, at least 99% or 100% identity to human MTM1 (SEQ ID NO: 165) or a functional fragment (e.g., SEQ ID NO: 164) or functional variant thereof.

[0478] The terms “operably linked” and “operatively linked” refer to the functional relationship of the nucleic acid sequences with regulatory sequences of nucleotides, such as promoters, enhancers, transcriptional and translational stop sites, and other signal sequences and indicates that two or more DNA segments are joined together such that they function in concert for their intended purposes. For example, operative linkage of nucleic acid sequences, typically DNA, to a regulatory sequence or promoter region refers to the physical and functional relationship between the DNA and the regulatory sequence or promoter such that the transcription of such DNA is initiated from the regulatory sequence or promoter, by an RNA polymerase that specifically recognizes, binds and transcribes the DNA.

[0479] The term “parenteral” administration of a composition includes, e.g., subcutaneous (s.c.), intravenous (i.v.), intramuscular (i.m.), or intrasternal injection, or infusion techniques.

[0480] The terms “peptide”, “polypeptide” and “protein” are used interchangeably herein to refer to a polymer of amino acid residues.

[0481] The term “pharmaceutically acceptable carrier” includes any of the standard pharmaceutical carriers, excipients, stabilizers and adjuvants. For examples of carriers, excipients, stabilizers and adjuvants, see Remington: The Science and Practice of Pharmacy, 22nd Revised Ed., Pharmaceutical Press, 2012.

[0482] The abbreviation “rAAV” refers to a recombinant adeno-associated viral particle composed of at least one AAV capsid protein and an encapsidated polynucleotide, sometimes referred to herein as a “genome”. rAAV can include a genome that comprises a heterologous polynucleotide (i.e., a polynucleotide other than a wild-type AAV genome), such as a heterologous polynucleotide encoding a gene delivered to a mammalian cell such as the MTM1 gene. The heterologous nucleotide is sometimes referred to as a transgene.

[0483] The term “self-complementary” rAAV vector or genome as used herein means a fully or partially self-complementary rAAV vector or genome, respectively. A “fully self-complementary” rAAV vector refers to a vector containing a genome generated by the absence of a terminal resolution site (TR) from one of the ITRs of the rAAV. The absence of a TR prevents the initiation of replication at the vector terminus where the TR is not present. In general, fully self-complementary rAAV vectors generate single-stranded, inverted repeat genomes, with a wild-type (wt) AAV TR at each end and a mutated TR (mTR) in the middle. Thus, a fully self-complementary rAAV genome is typically a single stranded polynucleotide having, in the 5′ to 3′ direction, a first ITR sequence, a heterologous sequence (e.g., MTM1 coding sequence and/or ERE), a second ITR sequence, a second heterologous sequence that is complementary to the first heterologous sequence, and a third ITR sequence. A “partially self-complementary” rAAV genome refers to a single stranded polynucleotide having, in the 5′ to 3′ direction or the 3′ to 5′ direction, a first ITR sequence, a heterologous sequence (e.g., MTM1 coding sequence and/or ERE), a second ITR sequence, and a self-complementary region that is complementary to a portion of the heterologous sequence and has a length that is less than the entire length the heterologous sequence.

[0484] The term “tissue-specific” promoter or ERE as used herein refers to a nucleotide sequence which, when operably linked with a polynucleotide encodes or specified by a gene, causes the gene product to be produced in a cell substantially only if the cell is a cell of the tissue type corresponding to the promoter.

[0485] The terms “treatment”, “treating”, and the like are used herein to generally mean obtaining a desired pharmacologic and/or physiologic effect. The effect may be prophylactic in terms of completely or partially preventing a disease, condition, or symptoms thereof, and/or may be therapeutic in terms of a partial or complete cure for a disease or condition and/or adverse effect attributable to the disease or condition. “Treatment” as used herein covers any treatment of a disease or condition of a mammal, particularly a human, and includes: (a) preventing the disease or condition from occurring in a subject which may be predisposed to the disease or condition but has not yet been diagnosed as having it; (b) inhibiting the disease or condition (e.g., arresting its development); or (c) relieving the disease or condition (e.g., causing regression of the disease or condition, providing improvement in one or more symptoms).

[0486] The terms “vector”, “AAV vector” and “rAAV vector” refer to an rAAV that comprises a heterologous polynucleotide, e.g., a transgene.

[0487] The terms “variable region” or “VR” as used herein refer to one or more of nine sequence variable regions (e.g., VRI to VRIX) in an AAV capsid protein previously defined by comparison and alignment of various AAV capsid proteins. See e.g., Govindasamy et al., Structurally mapping the diverse phenotype of adeno-associated virus serotype 4, J. Virol (2006); Meyer et al. Structure of the gene therapy vector, adeno-associated virus with its cell receptor, AAVR, eLife (2019). The VRs are known to contain amino acids that contribute to slight differences in surface topologies and distinct functional phenotypes, such as in receptor binding, transduction efficiency, and antigenic re-activity. The relative positions of the VR I, VR IV and VIIII are illustrated in FIG. 1, but the specific positions of the variable regions within a capsid protein can vary depending on the capsid protein and/or the sequence alignment method.

[0488] Unless otherwise defined, all technical and scientific terms used herein have the same meaning as commonly understood by one of ordinary skill in the art to which the methods and compositions of matter belong. Although methods and materials similar or equivalent to those described herein can be used in the practice or testing of the methods and compositions of matter, suitable methods and materials are described below. In addition, the materials, methods, and examples are illustrative only and not intended to be limiting. All publications, patent applications, patents, and other references mentioned herein are incorporated by reference in their entirety.

### 6.2. Modified AAV Capsid Proteins

[0489] One aspect of the present disclosure provides a modified adeno-associated virus (AAV) capsid protein comprising (i) a targeting peptide at a site within variable region VIII (VR VIII); or (ii) a peptide segment within variable region I (VR I), wherein the targeting peptide has a sequence of X₁X₂X₃RGDX₇X₈X₉X₁₀, wherein X₁, X₂, X₃, X₇, X₈, X₉ and X₁₀ are independently selected from any amino acid residue, wherein the peptide segment has an amino acid sequence of P₁P₂P₃P₄P₅P₆P₇P₈NDNP₁₂ and P₁, P₂, P₃, P₄, P₅, P₆, P₇, P₈, and P₁₂ are independently selected from any amino acid residue. In some embodiments, the modified AAV capsid protein comprises both (i) the targeting peptide and (ii) the peptide segment. In some embodiments, the AAV capsid protein comprises the targeting peptide but not the peptide segment. In some embodiments, the AAV capsid protein comprises the peptide segment but not the targeting peptide.

[0490] One aspect of the present disclosure provides a modified adeno-associated virus (AAV) capsid protein comprising: a sequence of a reference AAV capsid protein comprising: (i) a targeting peptide at a site within variable region VIII (VR VIII) of the reference AAV capsid protein; and (ii) one or more modifications to comprise a peptide segment within variable region I (VR I) of the reference AAV capsid protein, wherein the targeting peptide has a sequence of X₁X₂X₃RGDX₇X₈X₉X₁₀, wherein X₁, X₂, X₃, X₇, X₈. X₉ and X₁₀ are independently selected from any amino acid residue, wherein the peptide segment has an amino acid sequence of P₁P₂P₃P₄P₅P₆P₇P₈NDNP₁₂ and P₁, P₂, P₃, P₄, P₅, P₆, P₇, P₈, and P₁₂ are independently selected from any amino acid residue.

[0491] In some embodiments, the modified AAV capsid protein does not comprise RGDLLLS (SEQ ID NO: 1).

[0492] In some embodiments, the modified AAV capsid protein has a peptide segment that does not comprise an alanine (A) at P₆ and a threonine (T) at P₈

[0493] In some embodiments, the modified AAV capsid does not comprise RGDLLLS (SEQ ID NO: 1), and the peptide segment does not comprise an alanine (A) at P₆ and a threonine (T) at P₈.

[0494] In some embodiments, the modified AAV capsid protein has one or more amino acid insertions, deletions, substitutions, or combinations thereof as compared to a reference AAV capsid.

[0495] In some embodiments, the reference AAV capsid protein further comprises one or more modifications comprising an amino acid insertion, deletion, substitution, or a combination thereof to introduce the targeting peptide within VR VIII of the reference AAV capsid protein.

[0496] In some embodiments, the capsid protein further comprises one or more modifications outside of the VR I and VR VIII of the reference AAV capsid protein.

[0497] In some embodiments, the reference AAV capsid protein includes one or more modifications comprising an amino acid insertion, deletion, substitution, or a combination thereof to introduce the targeting peptide within VR VIII (e.g., wherein VR VIII corresponds to amino acids between positions 565 and 595 of the reference AAV capsid protein).

[0498] In some embodiments, the reference AAV capsid protein includes one or more modifications outside of VR I (e.g., VR I corresponds to amino acids between position 259 to position 275 of the reference AAV capsid protein) of the reference capsid protein. In some embodiments, the reference AAV capsid protein includes one or more modifications outside of VR VIII (e.g., VR VIII corresponds to amino acids between positions 565 and 595 of the reference AAV capsid protein) of the reference AAV capsid protein. In some embodiments, the reference AAV capsid protein includes one or more modifications outside of VR I (e.g., VR I corresponds to amino acids between position 259 to position 275 of the reference AAV capsid protein) and VR VIII (e.g., VR VIII corresponds to amino acids between positions 565 and 595 of the reference AAV capsid protein) of the reference AAV capsid protein.

[0499] In some embodiments, the one or more modifications is an amino acid insertion, deletion, substitution, or a combination thereof to introduce the targeting peptide within VR VIII of the reference AAV capsid protein. In some embodiments, the one or more modifications is an amino acid insertion, substitution, or a combination in a region outside of the VR VIII region of the reference AAV capsid protein. In some embodiments, the one or more modifications outside of the VR VIII is a modification in the VR I region of the reference AAV capsid protein. In some embodiments, the one or more modifications results in a liver-off phenotype. In some embodiments, the one or more modifications outside of the VR VIII is a liver toggle mutation.

### 6.2.1. Targeting Peptide

[0500] In some embodiments, the targeting peptide has a sequence X₁X₂X₃RGDX₇X₈X₉X₁₀, wherein X₁, X₂, X₃, X₇, X₈, X₉ and X₁₀ are independently selected from any amino acid residue. In some embodiments, X₇, X₈, X₉ and X₁₀ are independently selected from A, D, E, F, G, H, I, K, L, N, Q, R, S, T, V, and Y. In some embodiments, X₇, X₈, X₉ and X₁₀ are independently selected from A, D, E, F, G, H, I, K, L, N, Q, R, S, T, and V.

[0501] In some embodiments, the modified AAV capsid protein has at least 90% sequence identity to the sequence of the reference AAV capsid protein. In some embodiments, the modified AAV capsid protein has at least 95% sequence identity to the sequence of the reference AAV capsid protein. In some embodiments, the modified AAV capsid protein has at least 96% sequence identity to the sequence of the reference AAV capsid protein. In some embodiments, the modified AAV capsid protein has at least 97% sequence identity to the sequence of the reference AAV capsid protein. In some embodiments, the modified AAV capsid protein has at least 98% sequence identity to the sequence of the reference AAV capsid protein. In some embodiments, the modified AAV capsid protein has at least 99% sequence identity to the sequence of the reference AAV capsid protein.

[0502] In some embodiments, X₁, X₂, and X₃ are independently selected from any amino acid residue.

[0503] In yet other embodiments, X₁, X₂, and X₃ have not been modified from the amino acids at corresponding positions of the reference AAV capsid protein. In this case, X₁, X₂, and X₃ are identical to the amino acids at corresponding positions of the reference AAV capsid protein.

[0504] In yet other embodiments, X₁, and X₂ have not been modified from the amino acids at corresponding positions of the reference AAV capsid protein. In yet other embodiments, X₁ has not been modified from the amino acids at corresponding position of the reference AAV capsid protein. In yet other embodiments, X₂ has not been modified from the amino acids at corresponding position of the reference AAV capsid protein. In some embodiments, X₁, X₂, and/or X₃ are the natural amino acid residues of the reference AAV capsid protein.

[0505] X₁, X₂, and X₃ can be introduced by amino acid substitutions, insertions, mutations, and/or deletions of the amino acids at the corresponding sites in the reference AAV capsid. For example, in some embodiments, any one of the corresponding sites X₁, X₂, and X₃ in the reference AAV capsid can be deleted or substituted. In some embodiments, the corresponding site X₁ in the reference AAV capsid is deleted or substituted. In some embodiments, the corresponding site X₂ in the reference AAV capsid is deleted or substituted. In some embodiments, the corresponding site X₃ in the reference AAV capsid is deleted or substituted. In some embodiments, the corresponding sites X₁, and X₂ in the reference AAV capsid are deleted or substituted. In some embodiments, the corresponding sites X₂ and X₃ in the reference AAV capsid are deleted or substituted. In some embodiments, the corresponding sites X₁ and X₃ in the reference AAV capsid are deleted or substituted. In some embodiments, the corresponding sites X₁, X₂, and X₃ in the reference AAV capsid are deleted or substituted.

[0506] In some embodiments, X₁ is selected from S, E, A, D, N, Q, or T. In some embodiments, X₁ is D or E. In some embodiments, X₁ is S, A or T. In some embodiments, X₁ is S, A or E. In some embodiments, X₁ is selected from S or E. In some embodiments, X₁ is S. In some embodiments, X₁ is E.

[0507] In some embodiments, X> is selected from N, A, D, E, F, G, H, I, K, L, M, N, P, Q, R, S, T, V, W, or Y. In some embodiments, X₂ is selected from Nor A. In some embodiments, X₂ is selected from K, E, D, A, S, F, N, V or L. In some embodiments, Xe is selected from K, E or D. In some embodiments, X₂ is selected from N, A or Y. In some embodiments, X₂ is selected from N, Y or S.

[0508] In some embodiments, X₃ is selected from R, Q, A, D, E, F, G, H, L, K, L, M, N, P, S, T, V, W, or Y. In some embodiments, X₂ is N. In some embodiments, X₃ is A. In some embodiments. X₃ is selected from R or Q. In some embodiments, X₃ is R. In some embodiments, X₃ is Q. In some embodiments, X₂ is N; and X₃ is R. In some embodiments, X₁ is E; X₂ is N; and X₃ is R. In some embodiments, X₁ is S; X₂ is N; and X₃ is R. In some embodiments, X₃ is selected from Y, V or F. In some embodiments, X₃ is selected from N, A, Y or S. In some embodiments, X₃ is selected from I, Q, R, V, T or M.

[0509] In some embodiments, X₂X₃ is NR. In some embodiments, X₁X₂X₃ is ENR.

[0510] In some embodiments, X₁X₂X₃ is SNR.

[0511] In some embodiments, X₁X₂X₃ is selected from the groups consisting of: DII, DWM, EEI, DML, DWI, SLE, EIN, NHE, DFI, EEL, TEQ, TDA, EDT, NEV, TDW, QFE, EDY, DTT, EPL, SEN, SEQ, TAE, EVN, ELN, DVQ, ETI, EVI, ESV, ETW, SEW, DNW, EVF, EAW, EPF, EIY, EIF, EPY, DVI, DMM, DQI, DHL, DTL, DVL, NDL, DLL, DMQ, NEF, DFL, DIM, TEW, DYI, SDY, DYY, DHF, DKE, DTW, DTI, ELY, TEY, TEI, DAI, DQY, DMY, EWG, DMV, DMI, EPH, QEG, DIN, NEI, EYY, DIV, SEG, DVG, DYQ, EGF, NDI, EGY, DVF, DVH, DGF, DIY, DSF, DGW, EHY, DRE, TEH, DTS, NEN, NEM, NEH, TEN, DSN, DVT, DQS, DKD, DTH, DVV, DQK, NET, DKP, TEV, NDS, QET, EVL, SET, SDT, AEQ, QEF, SEY, SEF, SPF, EGQ, ETH, TDQ, QEA, QDQ, AEN, ESS, NDT, EFM, EFI, EHM, DFM, QDT, SME, DYT, EHV, ENV, EAV, EAI, ESI, DAT, ENQ, EAM, ADN, EFQ, SDS, TDH, SDH, DAS, TWE, SSF, DRD, EFL, TDF, QDA, EMH, SGE, AEW, DAH, TET, TDM, TNE, SAE, NSE, SFE, QDI, DSA, ADV, SEI, AEI, QDV, ADT, DNM, DNQ, ADL, TDL, SDL, SDM, TDV, DNI, DHY, DTY, DAA, DSY, QLY, DVM, DAY, DMT, DQT, DAQ, DTV, DSH, QDF, DST, DNL, DSI, DFV, DNY, DAF, DKI, DKF, DTM, DSL, NDV, TDI, DSV, DAV, DKV, DAM, DNV, DKM, DKL, DKW, DSM, ENI, SDI, DKT, QGE, NNE, QYW, AGM, ESH, QDH, QEH, DYH, ENS, DKQ, TGE, DSS, EST, DSQ, DNS, EFV, SWE, DKN, DKS, SEH, EAL, EAS, ADQ, SDQ, ADI, SDV, EAH, ASE, EAF, EYV, DKA, SNE, AGE, EGV, EQF, ETF, EVY, EQY, QEY, QEN, SAD, AEF, EMF, SDF, ADF, ADY, AVF, TLY, SIY, SLY, ATY, DYV, AEY, ENF, EMY, QDY, ETY, EAY, TVY, SVY, QVF, QVY, TMY, DKY, ALY, AVY, TMW, EQW, SPW, SIW, DTQ, TFF, AMF, EYT, DRV, SPY, SIF, SLF, ENY, EWY, EYI, EFY, TLF, TVF, TYY, TFY, SVF, SYW, TAW, SAW, TIY, NIM, NFM, NII, NIV, SII, SIV, SEM, TTI, NSY, SSY, SNY, SEV, AEH, ALT, SGQ, QTY, SYY, AMY, QMY, SGF, SGY, ALF, TTF, SFN, QAF, ASF, SAF, TAF, TAY, TGL, SAY, QAY, ADH, ASI, SSV, SSI, TGV, SGV, DPH, TEG, DLY, ESE, TEF, NPE, DHA, DLI, DWG, EWM, EET, EIL, TEL, DYL, EMW, EVW, EPV, EDV, SLD, EGH, QRY, TDG, SQE, ELH, EYW, EMM, EFF, QEI, EQG, DVS, ESP, EIQ, EPM, EPQ, SPE, EPN, NQD, ELQ, TDT, ELT, EPI, ETM, ETG, EHI, EMI, EIT, ETV, EVV, EVM, TPY, QEW, EIW, EPT, EIH, DFY, DQL, NDA, DIW, TDY, ELF, DVY, ESG, EPG, EIG, ELG, EVG, DHI, EIS, DYM, DFT, DFH, EQS, TPF, EEF, DWN, SDN, EYL, AET, DMN, QSP, DNA, DHM, DHT, EQL ESN, EYF, EHF, NAD, AEG, AES, TEM, SEL, DYS, EVH, EAN, EGL, TFE, ETL, TYE, SHE, ELM, TYD, SYE, ESA, EFT, EAT, AMD, AND, DMS, QMD, SLQ, EYS, QDN, EYQ, EKD, QYD, QFD, DER, AFD, EAA, EFS, DHV, QSE, TSD, SFD, DGY, TWD, QWD, EHL, QGD, QSD, AWD, AGD, QIY, EMQ, EAG, ERD, DDR, DAL, QDL, DNT, EGN, ENH, NGE, DYN, DNH, DNF, ESQ, ESM, ESL, SSD, ENL, EMV, QDS, TSE, SWD, ASD, ENT, SSE, EGM, EGS, EGT, EGI, AIF, NIN, NIQ, NYW, EPW, EGG, TIW, QIW, TIW, EKW, NLY, SVM, TPT, AAW, AIH, TIH, QGT, QFF, QYF, QFY, EHH, QLH, TYF, STY, DRL, EYM, SFF, QLF, QIF, APF, TYW, QII, QPF, SPI, TIL, SVL, NVI, SIM, SLL, QEL, AEM, AEL, QEV, QDM, NDM, SYL, ASL, TPL, ANI, NMI, TIM, AEV, TMI, SWI, SFI, SNW, TNF, NAF, ASP, QSQ, APY, SFM, TAN, QAW, SGS, SGH, TGF, QSN, ERY, QMN, TGQ, NGM, NGV, AMN, ALN, QFV, AAF, TFV, TSY, EDK, ASN, SAV, QSV, QGV, QST, ASM, TAI, QSM, QSL, QSI, SSL, AGV, TGT, AGI, QGM, TGM, SGM, SGI, THD, QVE, ALE, QLE, EWP, AFP, AEE, ADE, NIE, TYP, QIE, TFP, SYP, ELW, DVW, NEW, EPA, EVA, TLE, AWE, NME, QME, ATE, AYE, DQM, TPD, DFG, QPE, EDI, EWL, ELL, QPD, EWF, ALD, SVD, QVD, ADA, APD, AHE, EQL, DTA, AFE, DAW, QAE, TME, STE, THE, QID, AAE, EIA, EML, SDA, SIE, TQE, TVD, NWE, NOE, EYG, QYP, EIV, EII, QFP, TID, EQN, EVS, TYG, EAQ, ELV, QLD, TLD, QQD, TIN, TLN, SPN, TPN, NFD, NEY, DSW, NMD, DGA, DYA, DIH, DNP, DQW, DQV, EFA, EPS, DEN, DWV, ELI, DTF, EQT, DHW, ESF, DEK, DMH, EWS, EHA, TTD, EWI, QLQ, SQD, QHD, NSD, EMA, TND, ATD, DGS, TAD, TMD, QES, AHD, QAD, DGH, DGL, NTE, ENG, SMD, NDQ, EMS, ENA, EMT, EYN, DDK, EWA, EWQ, EFH, QWE, DGT, DGM, EWV, EWH, EWT, QND, DGV, ESY, AAD, SND, ANE, TIG, QIG, AVD, SFP, AWP, QDW, SLW, TPA, AII, TIV, SWP, AFY, APN, AVN, TVN, TIS, TIQ, TLQ, AIQ, QVN, NFY, QFG, EMN, NVF, SYF, SFW, TPQ, AIL, TWI, QWN, TWN, QWQ, AQF, ASA, TWV, EWN, TMF, NGI, ATN, SAS, TMQ, TMN, AYN, TQF, SMF, QMQ, SMQ, QAN, AAY, SFQ, TYQ, TFQ, TWQ, AVI, and SGL.

[0512] In some embodiments, X₁X₂X₃ is selected from the group consisting of: DAV, DKW, EAY, AEY, DFV, DKF, DKI, DKL, DNV, DNY, DSL, DSV, EFI, SEF, SEY, SLY, ADF, ADY, ALY, AVF, DAF, DAL, DAM, DAT, DHV, DIV, DKA, DKM, DKT, DKV, DKY, DMI, DNF, DNI, DQT, DSI, DVY, DYN, DYV, EAT, EAW, EFV, EGL, EIY, EMF, EMY, ENF, EPF, EPY, EQY, ESY, ETF, EWI, EWT, EYI, EYV, NEM, QDF, QDY, QEY, QLY, QND, QVF, QVY, SDL, SDV, SEH, SII, SIY, SSL, SVY, SWD, SWE, TDF, TDV, TDY, TEF, TEY, TIY, TLY, and TWQ.

[0513] In some embodiments, X₁X₂X₃ is selected from the group consisting of: APW, TEL, TDA, QPY, SPN, EHY, DWK, DLK, DFK, DVK, NSI, DIR, SPF, SEL, DRT, DRF, ADL, TDL, SDL, DNY, DKI, NDV, DKM, DNH, DNF, DSS, EST, EWT, DKN, DKS, SEH, ESQ, ESL, QND, EAH, AIF, AVF, QVF, TMY, ALY, NNG, NIF, NTF, NFF, AWF, NPY, SWF, AII, AYF, AQW, NFY, AGP, QQF, TKE, TNG, NSF, NAW, QAG, ERG, NKD, QSG, QNG, EAK, QWF, SWY, TFF, TYF, NYY, QFG, NWA, AMF, STY, TNW, ANW, AWM, TSF, DRL, DRV, SPY, NVF, SIF, QLF, SLF, QIF, SYF, APF, AGF, SVF, SAW, TIY, DHK, DAK, EGK, DYK, QNL, QPL, SPV, NPM, STL, NIL, AGA, NTV, SQA, QQA, NNF, NWL, NMA, NNA, NHN, NFH, ELR, NYM, ERA, NFS, SRD, NMM, NNL, NNQ, NNS, QDR, SDK, NNI, AQH, ANA, QNH, QWG, AWA, QWA, EQK, SHS, QFA, SFA, TFA, AYG, EKQ, ERN, EMR, EFR, AYM, EAR, EMK, EYK, EWK, QPI, QPF, NPL, SPI, SPL, NPI, SIV, SLL, SSA, AEM, TML, TLL, SML, TYL, QDM, NSN, AQL, NAT, SQQ, QTI, NAH, SQL, STH, NTT, AEK, ANV, QGL, AGL, QMV, STM, NOM, STI, TQL, SMM, SKE, SQT, SYL, ASL, SLV, NAM, TTV, TPI, TPL, ATL, DNK, DSR, ANL, SHL, SNL, TNL, QNI, QAL, ANI, QNM, QYM, SQI, SNI, QNV, SHV, SHM, QMM, ANM, AHM, SQM, NAL, AQT, EKL, NNM, TNM, SNM, QQI, TQV, TQI, THM, SQV, AAV, THL, AQI, NNV, INN, TNI, SNN, TQM, NAI, TNV, SWT, NMV, NOI, NOL, NMI, NSS, SHF, QNF, SWL, AQM, SYV, TFM, SYM, TYM, ATI, TTI, SLI, ALI, AYI, QLV, TMI, SMI, QFI, NMY, NAY, NMN, NMF, ANF, NWT, QWM, TFT, SWM, TWM, QNW, STF, AFM, NSY, SSY, SNY, THY, TNY, QNY, THE, NSV, ATY, SKD, INF, TWT, QWT, SFS, TFS, DRQ, NYN, DFR, EKG, ENN, AWN, QWQ, TQH, ALV, QHQ, DVR, STS, SQS, AAA, QGQ, QSQ, QAQ, SIH, APY, QGN, AGQ, ASQ, AAQ, SQN, NON, ERM, ALH, NYH, TGH, ATH, QTH, TQT, QQH, AQF, QMH, EKN, ERV, ERS, AFT, EKF, EKT, QSA, NFT, QYH, NYS, TSA, QYY, AYY, AHY, QFN, AWQ, NWQ, QAW, NMS, NWN, QMF, AMH, TSN, TAH, TMH, QFH, NWS, SWN, QRD, QKD, AKE, TSS, AYH, TSH, AHQ, ADK, ADR, ASA, ASS, SNS, QSS, SAH, SMH, QAH, AAH, AHN, QNS, QAS, ANS, ANN, SWA, SWS, TWS, ERI, EKS, QWS, AYS, AFS, SYS, QFS, QYN, QFT, AYT, TNS, TYS, SFT, QNQ, QYS, SYT, ANQ, SWV, SNQ, ANY, TNQ, ATF, SSQ, SSN, TWA, SGQ, SSS, TWY, SMY, TGN, TGY, QWY, SQF, TGF, QTY, TTY, AMY, QMY, ERY, TGQ, SGY, TMF, ALN, ARD, ATN, NAS, SAS, AQN, SYG, SYN, TFN, TMN, AYN, SGN, QNN, DKG, AAN, SMN, SAN, TTF, TQF, SFN, QAF, QFV, AAF, ASF, SAF, SMF, ASY, AFN, TAF, TSY, TAY, QMQ, SMQ, TYV, TGL, QAY, AAY, ADH, EDK, ASN, QYQ, SFQ, TYQ, TWQ, SWQ, AYQ, SYQ, AMV, TMV, TAV, AQV, TYT, TAT, QGI, QQV, SAQ, NAV, SAV, ASV, QSV, QAV, QAI QAM, TAM, DTR, DQR, DMR, NNT, NYT, NMT, NST, ATT, SMV, SNT, QNT, AAT, SAM, SAL, QGV, QST, QYT, ASM, TSM, AMT, TST, ANH, SNV, TNT, ANT, SST, AST, TAI, DAR, SSM, TAL, NSM, TSL, SNF, TSI, TSV, TDK, SAT, SAI, QSL, QSI, ASI, SSL, SSV, SSI, AGI, QGM, TGM, SGM, SGL, SGV, ARL, NWE, SFL, TPY, DRP, DTK, DMK, SEY, SME, EAI, AHD, ADN, EFQ, EMH, SGE, DNQ, DNI, QLY, DGT, EGN, DYN, EWV, ESM, EAL, ASD, DKA, ADF, ADY, SLY, AEY, ETY, EAY, TGA, AVM, TPT, SVI, QSH, TTQ, QTN, TLH, AWY, SLT, AWV, QQY, NFV, SFY, TYY, SHA, TEK, QFK, NNY, EPR, NIT, NHI, NTY, SHY, NFM, NFN, NDK, NER, SER, NDR, QDK, SDR, QNA, TNA, THT, SNH, AYA, NFA, AFA, AHA, QHA, EYR, ENR, EHK, QVL, SVL, NIV, NVI, ADM, SAA, SQH, NQV, ALL, ATM, QYA, STT, DGR, NHT, SHT, QHT, TTL, NHM, QHL, DNR, QHM, QFM, QMI, AHV, THI, AHT, TNH, NHV, THV, SHI, ATV, TWI, NYV, TYI, DYR, SFI, NQF, NWM, NSL, NSP, TQY, DRS, ASP, TKD, QWI, QWN, TWN, QWV, THN, TTM, TQQ, NMQ, TYA, STQ, STN, AGN, EKH, ERT, TFH, SFH, AFH, ENK, NYQ, SFM, QGS, AHF, QLT, QHY, AQY, TRD, ERH, QWH, TYH, TRE, TAQ, AER, TDR, ASH, EKI, AFV, TYN, ALT, NGN, SYY, EWN, NGM, NAN, TAS, TFV, SFV, QAN, SGT, SAY, AFQ, TFQ, QFQ, EFK, SYH, QHV, AMM, THQ, AAI, AAM, NSQ, QAT, TSQ, SHQ, QSM, AGV, AGT, TGT, TGI, AVI, TGV, SGI, ESP, SDA, TPN, EAW, NEQ, DSN, DIK, DNA, QES, SLQ, EKD, SDH, SSF, TET, QDI, DSA, DNM, DKT, DGM, SQY, TLT, QEH, DKQ, TGE, DNS, SDV, SNE, EGT, EGV, AAP, AHG, TWK, TQA, TVT, APQ, SVT, NGT, SSH, NLV, AGY, QFF, QYF, NWV, EKA, EKY, SMG, NAG, ASG, TFI, ELK, SEK, QTL, NML, DHS, ETR, NQQ, QWL, ANP, AHH, NEK, NNN, SNA, EWR, ESR, SHN, SFG, SYA, APV, QPV, SPT, TPQ, QVI, TPV, AVL, SEM, NDM, API, QLM, QTM, QQL, QHI, NFL, AYV, NKE, TIM, QYV, SWI, DRN, AWI, SMA, NRE, QTS, QVV, QQT, QMA, QQS, QAA, ATQ, ERL, TGS, QQQ, AQQ, QHF, TAN, QSY, QSN, NGQ, TWH, TMS, QMS, TQN, TMT, QTV, THS, TTT, SMT, QMT, SMR, ADA, AAE, EPY, EYL, NWI, TSP, DGQ, NDH, QFD, EHL, ERD, DAF, ENI, ENH, QQW, AGM, ENL, EAF, EYV, ENT, SSE, AGE, QEY, DRH, NIQ, SVV, SVM, QPT, TVL, QTQ, SVQ, TIQ, NLQ, SIQ, AWL, EHH, NGY, NHF, NSA, NAA, NTH, QLI, NWH, QRE, AML, EVR, SNP, NHS, THH, NOS, TTS, AHS, EKV, NFQ, APL, QPM, NPV, SIL, TII, STV, QEL, TFL, SIT, NAQ, TMM, AAL, QQM, AMI, QFL, AHI, SYI, SSP, NVV, TIN, TAA, TQS, TMA, ALA, QQN, NSH, TTH, SRE, ERQ, QHS, SWH, SEV, AVT, ALQ, DKH, AMQ, ARE, TWV, NGL, NGV, TMQ, TLV, EER and QTT.

[0514] In some embodiments, X₁X₂X₃ is selected from the group consisting of: ANY, SNL AAL AAM, ANT, AST, AYQ, EHK, ENK, ENR, SFQ, SSI, TAY, TDK, TNT, AAF, AAL, AAY, ADK, AFA, ANF, ANI, ANQ, ANS, AQM, ARE, ASV, AYH, AYT, EMK, EWK, NNM, QAF, QAI, QAM, QAT, QAY, QFT, QGM, QHL, QNF, QNQ, QNS, QNT, QNV, QNY, SAH, SAI, SAL, SFT, SFV, SHI, SHV, SMM, SNF, SNM, SNN, SNQ, SNV, SNY, SQL SQV, SSL, SWQ, SWS, SYL, SYM, SYN, SYQ, TAM, TAT, TDR, TFM, THV, TNF, TNH, TNI, TNM, TNQ, TNV, TSY, TWA, and TYM.

[0515] In some embodiments, X₁X₂X₃ is selected from the group consisting of: DMK, ATD, EEK, QMD, EFS, ERD, DDR, TDM, SAE, EHS, ENH, SWE, SNE, NNG, QAG, ERG, QSG, QNG, ASG, QFG, AMF, ELR, NFM, NNS, NNI, SDR, EQR, EHR, EWR, EQK, ESR, EKQ, EYR, ENR, EMK, EYK, EHK, EWK, QNI, TNI, TYI, SNY, DRQ, AWI, QWI, DFR, EKG, QYG, QWQ, EKN, EKF, EKT, AFH, ENK, NYS, DKH, AAG, QMF, QFH, QKD, ARE, AHQ, ADK, ADR, AHN, QNS, ANN, SWS, EKS, AFS, QFS, TNQ, TGY, NGL, ARD, AKD, AAF, SMF, AFN, SGT, TGL, ASN, SFQ, AFQ, TFQ, QFQ, EFK, SWQ, AYQ, SYQ, DQR, DMR, ASM, ANT, SHQ, TSL, SNF, QSL, ASI, SGL, SGI, NDA, DHQ, DFK, DTK, DNA, SDS, TDH, DGL, QDV, SDM, DKT, DGM, SQY, DKS, SSD, EMV, TSE, EYV, SSE, EGM, SDF, TTG, QLG, NNP, AGS, QSF, TLM, NGA, AWY, NKD, SWY, TFF, NSG, NGY, QEK, SEK, TEK, AQA, NVL, NHI, TER, NML, NMA, NNA, NHN, ANP, AMS, NER, SER, DKK, NMM, QDK, AHS, TNA, THT, SNH, QNH, ESK, SHS, AYM, SSA, NAT, QLM, QQM, SQI, SNI, QNV, SHV, SHM, NNV, TNN, AHT, TNH, NHV, TQM, THV, SHI, NYL, NMV, NFL, AYV, NQI, NOL, NMI, NSS, SHF, SYM, NYV, AYI, SWI, QFI, ANF, TFT, TWM, QNW, NSY, THY, TNY, NYN, AWN, SMA, NSH, TGH, SFH, SWH, SFM, NFT, QYH, QGS, TGS, TSA, QQQ, QYY, AMQ, TAN, AWH, NMS, TSN, TAH, TMH, QWH, NWS, SWN, QRD, TYH, AKE, TAQ, AER, AYH, ASA, SNS, QSS, SAH, SMH, ASH, QAS, ANS, SYS, QYN, TYN, TNS, SFT, ANQ, SGS, SGH, SSS, TWY, QTY, SYY, NGM, TMS, SYG, TQN, SYN, TEN, TMN, AYN, SGN, QNN, SMN, SAN, QAF, ASF, ASY, TAS, TAF, TFV, SMQ, SFV, TMT, QAN, SAY, EDK, AMV, QHV, THS, TAT, QGI, QQV, NAV, SAV, ASV, QSV, QAV, AAI, AAM, QAM, TAM, DTR, NNT, NYT, NMT, ATT, QTT, TTT, QAT, SMV, SNT, QNT, AAT, SAM, SAL, QGV, QST, QYT, TSM, ANH, SNV, TSQ, INT, SST, AST, TAI, TSI, TSV, TDK, SAT, QSM, SAI, QSI, SSV, SSI, AGT, TGT, AGI, QGM, TGM, TGV, SGM, SGV, SQE, EHT, EYL, DSG, SFE, QND, TQA, AWV, NFV, TSG, SSG, DRG, ANW, TFI, TSF, QNL, STL, TWL, NNF, NND, NYM, NFI, ETR, SNP, EIR, NFS, NNH, NNL, AHL, NNQ, NDR, NNN, QDR, SDK, SNA, AFG, NYA, QHA, QFA, SHN, NFQ, SYA, TFA, EMR, EFR, EAR, NOM, TTL, TQL, SMM, SKE, SYL, ASL, SLV, TTV, AAL, NHL, NHM, QYL, QHL, ATL, DNR, DSR, ANL, SHL, SNL, TNL, QAL, AMI, ANI, QNM, QYM, QHM, QFM, QMM, QMI, ANM, AHM, SQM, AQT, EKL, NNM, TNM, SNM, QQI, TQV, TQI, THI, QHI, THL, SNN, TNV, SWL, AQM, SYV, TFM, TYM, TWI, AFI, ATI, DYR, QLV, TMI, SYI, SFI, NWM, NWT, NSL, STF, SNW, AFM, SSY, NSV, TNF, NAF, TFS, QWV, ERT, TQT, AFT, NYQ, ERL, NRD, TRD, AWQ, TDR, TSH, ASS, AYT, TYS, QYS, SYT, SWV, SNQ, SMS, NAS, SAS, QFV, SAF, TWQ, TAV, AMM, TYT, QAI, TST, DAR, SSM, TAL, NES, DWK, DLR, DIR, SDT, EAN, ETH, TYD, SYE, EAM, TND, AYD, TSP, DRT, NDH, SSF, EFH, DNQ, DSH, DNT, SDI, DKQ, EWT, EAL, EAS, ESL, ASD, EAH, ASE, EAF, ENT, SIY, QDY, APG, AIG, SSW, NPG, ERP, TVI, QSH, SLS, EDR, AWL, SLH, EQH, EHH, NWV, EKY, STY, DRI, EYH, DRV, SPY, NNY, DWR, ERA, QRE, EVR, SRD, AWA, SFA, QTI, SHT, THM, AQI, AHI, SWT, ATV, TTI, SMI, QYV, NMY, SWM, QNY, TWT, QWT, TQY, NRE, QTS, QHQ, DVR, AAA, TYA, EKH, ALH, AWT, ATH, SRE, TFH, QMH, ERV, ERS, QHY, ALQ, QSY, ERH, TRE, TSS, QAH, AAH, SWA, TWS, QWS, AYS, AFV, QNQ, ANY, ALT, SMY, TWV, TTY, AMY, QMY, ERY, TWH, TSY, TAY, TYV, QAY, AAY, QYQ, TYQ, SYH, AQV, EER, THQ, and SMT.

[0516] In some embodiments, X₁X₂X₃ is selected from the group consisting of: ADR, ASI, EFK, EHK, EWK, SYQ, AAF, AAT, AAY, AFI, AFQ, AGI, AGT, AHI, ANH, ANM, ANN, AQI, ASA, ASH, AST, ASV, AWT, AYQ, AYT, DAR, DMK, DQR, DVR, EAR, EFR, EMK, EMR, EQK, ERA, ERS, ESR, NDA, NDR, NMI, NMV, NNM, NNN, NYL, NYM, NYN, NYQ, NYV, QAM, QFQ, QFV, QGV, QNH, QNI, QNM, QQV, QSF, QSY, SAI, SAM, SAS, SDR, SFQ, SGH, SGM, SGT, SGV, SHL, SHM, SHQ, SHV, SMH, SNA, SNE, SNF, SNI, SNQ, SNT, SRE, SST, SWQ, SWT, SYG, SYY, TFQ, THL, THQ, THV, TMI, TNL, TNS, TSH, TSQ, and TWQ.

[0517] In some embodiments, the targeting peptide comprises a 7-mer peptide (RGDX₇X₈X₉X₁₀) having an amino acid sequence selected from SEQ ID NOs.: 238-44858. In this case, X₁X₂X₃ can be the amino acids at the corresponding positions of the reference AAV capsid. For example, X₁X₂X₃ can be the naturally occurring amino acids at the corresponding positions of the reference AAV capsid. In some embodiments, the targeting peptide comprises a 7-mer peptide (RGDX₇X₈X₉X₁₀) having an amino acid sequence with at least 90%, 95%, 98%, 99% sequence identity to the amino acid sequence selected from SEQ ID NOs.: 238-44858.

[0518] In some embodiments, the modified AAV capsid protein comprises targeting peptide including a 7-mer peptide (RGDX₇X₈X₉X₁₀) having an amino acid sequence selected from SEQ ID NOs.: 238-247. In this case, X₁X₂X₃ can be the amino acids at the corresponding positions of the reference AAV capsid. In some embodiments, X₁X₂X₃ has a sequence that is different from the sequence at the corresponding positions of the reference AAV capsid. In some embodiments, any one of the corresponding positions X₁, X₂, X₃ of the reference AAV can be substituted with any amino acid. In some embodiments, the 7-mer has a sequence selected from SEQ ID NOs.: 238-337. In some embodiments, the 7-mer has a sequence selected from SEQ ID NOs.: 238-437. In some embodiments, the 7-mer has a sequence selected from SEQ ID NOs.: 238-537. In some embodiments, the 7-mer has a sequence selected from SEQ ID NOs.: 238-637. In some embodiments, the 7-mer has a sequence selected from SEQ ID NOs.: 238-737. In some embodiments, the 7-mer has a sequence selected from SEQ ID NOs.: 238-837. In some embodiments, the 7-mer has a sequence selected from SEQ ID NOs.: 238-937. In some embodiments, the 7-mer has a sequence selected from SEQ ID NOs.: 238-1037.

[0519] In some embodiments, the targeting peptide comprises a 7-mer peptide (RGD X₇ X₈ X₉ X₁₀) having an amino acid sequence selected from SEQ ID NOs.: 3881, 12092, 14601, 15342, 21498, and 31396.

[0520] In some embodiments, the targeting peptide comprises a 7-mer peptide (RGD X₇ X₈ X₉ X₁₀) having an amino acid sequence of SEQ ID NO: 238.

[0521] In some embodiments, the targeting peptide comprises an amino acid sequence selected from SEQ ID NOs.: 44859-44883, 44911, 44912, 44913, and 44918-44919. In some embodiments, the targeting peptide comprises an amino acid sequence selected from SEQ ID NOs.: 44859-44878. In some embodiments, the targeting peptide comprises an amino acid sequence of 44859. In some embodiments, the targeting peptide comprises an amino acid sequence of 44860. In some embodiments, the targeting peptide comprises an amino acid sequence of 44861. In some embodiments, the targeting peptide comprises an amino acid sequence of 44862. In some embodiments, the targeting peptide comprises an amino acid sequence of 44863. In some embodiments, the targeting peptide comprises an amino acid sequence of 44864. In some embodiments, the targeting peptide comprises an amino acid sequence of 44865. In some embodiments, the targeting peptide comprises an amino acid sequence of 44866. In some embodiments, the targeting peptide comprises an amino acid sequence of 44867. In some embodiments, the targeting peptide comprises an amino acid sequence of 44868. In some embodiments, the targeting peptide comprises an amino acid sequence of 44869. In some embodiments, the targeting peptide comprises an amino acid sequence of 44870. In some embodiments, the targeting peptide comprises an amino acid sequence of 44871. In some embodiments, the targeting peptide comprises an amino acid sequence of 44872. In some embodiments, the targeting peptide comprises an amino acid sequence of 44873. In some embodiments, the targeting peptide comprises an amino acid sequence of 44874. In some embodiments, the targeting peptide comprises an amino acid sequence of 44875. In some embodiments, the targeting peptide comprises an amino acid sequence of 44876. In some embodiments, the targeting peptide comprises an amino acid sequence of 44877. In some embodiments, the targeting peptide comprises an amino acid sequence of 44878. In some embodiments, the targeting peptide comprises an amino acid sequence of 44879. In some embodiments, the targeting peptide comprises an amino acid sequence of 44880. In some embodiments, the targeting peptide comprises an amino acid sequence of 44881. In some embodiments, the targeting peptide comprises an amino acid sequence of 44882. In some embodiments, the targeting peptide comprises an amino acid sequence of 44883. In some embodiments, the targeting peptide comprises an amino acid sequence of 44911. In some embodiments, the targeting peptide comprises an amino acid sequence of 44912. In some embodiments, the targeting peptide comprises an amino acid sequence of 44913. In some embodiments, the targeting peptide comprises an amino acid sequence of 44918. In some embodiments, the targeting peptide comprises an amino acid sequence of 44919. In some embodiments, the targeting peptide does not comprise a peptide selected from: SEQ ID NOs: 44855 and 3000. In some embodiments, the targeting peptide does not comprise a peptide selected from: SEQ ID NOs: 44880 and 44910. In certain embodiments, the targeting peptide comprises an amino acid sequence having at least 90%, 95%, 98%, 99% sequence identity to the amino acid sequence selected from SEQ ID NOs.: 44859-44883, 44911, 44912, 44913, and 44918-44919.

[0522] In some embodiments, the targeting peptide comprises an amino acid sequence selected from SEQ ID NOs.: 44864-44867, 44879-44883, 44911, 44912, 44913, and 44918-44919. In certain embodiments, the targeting peptide comprises an amino acid sequence having at least 90%, 95%, 98%, 99% sequence identity to the amino acid sequence selected from SEQ ID NOs.: 44864-44867, 44879-44883, 44911, 44912, 44913, and 44918-44919. In some embodiments, the targeting peptide comprises an amino acid sequence of SEQ ID NO: 44864. In some embodiments, the targeting peptide comprises an amino acid sequence of SEQ ID NO: 44865. In some embodiments, the targeting peptide comprises an amino acid sequence of SEQ ID NO: 44866. In some embodiments, the targeting peptide comprises an amino acid sequence of SEQ ID NO: 44867. In some embodiments, the targeting peptide comprises an amino acid sequence of SEQ ID NO: 44879. In some embodiments, the targeting peptide comprises an amino acid sequence of SEQ ID NO: 44880. In some embodiments, the targeting peptide comprises an amino acid sequence of SEQ ID NO: 44881. In some embodiments, the targeting peptide comprises an amino acid sequence of SEQ ID NO: 44882. In some embodiments, the targeting peptide comprises an amino acid sequence of SEQ ID NO: 44883. In some embodiments, the targeting peptide comprises an amino acid sequence of SEQ ID NO: 44911. In some embodiments, the targeting peptide comprises an amino acid sequence of SEQ ID NO: 44912. In some embodiments, the targeting peptide comprises an amino acid sequence of SEQ ID NO: 44913. In some embodiments, the targeting peptide comprises an amino acid sequence of SEQ ID NO: 44918. In some embodiments, the targeting peptide comprises an amino acid sequence of SEQ ID NO: 44919.

[0523] In some embodiments, the targeting peptide comprises a sequence X₇ is selected from R, F, H, L, Q, R, and Y. In some embodiments, X₇ is R. In some embodiments, X₇ is Y or H In some embodiments, X₇ is F or Y.

[0524] In some embodiments, X₈ is selected from S, G, D, I, L, N, Q, T, and V. In some embodiments. X₈ is S or G. In some embodiments, X₈ is S. In some embodiments, X₈ is G. In some embodiments, X₈ is T, G or S. In some embodiments, X₈ is N or Q. In some embodiments, X₉ is selected from S or V.

[0525] In some embodiments, X₉ is selected from any of the amino acids. In some embodiments, X₉ is selected from V, S, N, G, Q, L, T, and Y. In some embodiments, X₉ is selected from V or Q. In some embodiments, X₉ is selected from N or S.

[0526] In some embodiments, X₁₀ is selected from I, V, S, L, M, R, T, and Q. In some embodiments, X₁₀ is I or V. In some embodiments, X₁₀ is I. X₁₀ is V. In some embodiments, X₁₀ is V, L or M. In some embodiments, X₁₀ is T or L.

[0527] In some embodiments, the targeting peptide comprises a sequence of RGDRX₈X₉X₁₀. In some embodiments, X₈ is S or G. In some embodiments, X₈ is S. In some embodiments, X₈ is G. In some embodiments, X₉ is selected from any amino acid residue. In some embodiments, X₉ is selected from V, S, N, G, and Q. In some embodiments, X₉ is V. In some embodiments, X₉ is S. In some embodiments, X₉ is N. In some embodiments, X₉ is G. In some embodiments, X₉ is Q. In some embodiments, X₁₀ is selected from I, V, S, L and Q. In some embodiments, X₁₀ is I. In some embodiments, X₁₀ is V. In some embodiments, X₁₀ is S. In some embodiments, X₁₀ is L. In some embodiments, X₁₀ is Q. In some embodiments, X₁₀ is I or V.

[0528] In some embodiments, the targeting peptide has a sequence of X₁X₂X₃RGDRGVV (SEQ ID NO: 98928), X₁X₂X₃RGDRSVV (SEQ ID NO: 98931), X₁X₂X₃RGDRGQI (SEQ ID NO: 98927), X₁X₂X₃RGDRSQT (SEQ ID NO: 98930), X₁X₂X₃RGDRQGI (SEQ ID NO: 98929), X₁X₂X₃RGDFQNT (SEQ ID NO: 98934), X₁X₂X₃RGDHGVL (SEQ ID NO: 98938), X₁X₂X₃RGDYTSV (SEQ ID NO: 98941), X₁X₂X₃RGDYTSM (SEQ ID NO: 98942), X₁X₂X₃RGDLTVT (SEQ ID NO: 98935), X₁X₂X₃RGDFNNT (SEQ ID NO: 98943), X₁X₂X₃RGDYSSV (SEQ ID NO: 98937), X₁X₂X₃RGDHVNL (SEQ ID NO: 98924), X₁X₂X₃RGDQSTL (SEQ ID NO: 98926), X₁X₂X₃RGDLIGR (SEQ ID NO: 98925), X₁X₂X₃RGDFNNL (SEQ ID NO: 98933), X₁X₂X₃RGDLLLS (SEQ ID NO: 98932), X₁X₂X₃RGDYNSL (SEQ ID NO: 98940), X₁X₂X₃RGDRDYL (SEQ ID NO: 98939), or X₁X₂X₃RGDYVGL (SEQ ID NO: 98936).

[0529] In some embodiments, the targeting peptide has a sequence of X₁X₂X₃RGDRGVV (SEQ ID NO: 98928), X₁X₂X₃RGDRSVV (SEQ ID NO: 98931) or X₁X₂X₃RGDRGQI (SEQ ID NO: 98927).

[0530] In some embodiments, the targeting peptide has a sequence of X₁X₂X₃RGDYTSV (SEQ ID NO: 98941), X₁X₂X₃RGDYTSM (SEQ ID NO: 98942), X₁X₂X₃RGDRGVV (SEQ ID NO: 98928), X₁X₂X₃RGDRSVV (SEQ ID NO: 98931), X₁X₂X₃RGDYSSV (SEQ ID NO: 98937), or X₁X₂X₃RGDHGVL (SEQ ID NO: 98938).

[0531] In some embodiments, the targeting peptide has a sequence of X₁X₂X₃RGDFQNT (SEQ ID NO: 98934), X₁X₂X₃RGDHGVL (SEQ ID NO: 98938), X₁X₂X₃RGDLIGR (SEQ ID NO: 98925), X₁X₂X₃RGDRGQI (SEQ ID NO: 98927), X₁X₂X₃RGDRGVV (SEQ ID NO: 98928), X₁X₂X₃RGDYTSM (SEQ ID NO: 98942) or X₁X₂X₃RGDYTSV (SEQ ID NO: 98941).

[0532] In some embodiments, X₁X₂X₃ is selected from the group consisting of EFK, AAY, DQK, QVY, DKL, DNV, ENF, EWK, QNV, and TFM.

[0533] In certain embodiments, the modified sequence comprises a 7-mer peptide selected from: RGDRSX₉I, RGDRGX₉I, RGDRSX₉V, or RGDRGX₉V.

[0534] In some embodiments, the targeting peptide has an amino acid sequence selected from X₁X₂X₃RGDRGQI (SEQ ID NO: 98927), X₁X₂X₃RGDRSVV (SEQ ID NO: 98931) or X₁X₂X₃RGDRGVV (SEQ ID NO: 98928).

[0535] In some embodiments, X₁X₂X₃ is selected from the group consisting of DAV, DKW, EAY, AEY, DFV, DKF, DKI, DKL, DNV, DNY, DSL, DSV, EFI, SEF, SEY, SLY, ADF, ADY, ALY, AVF, DAF, DAL, DAM, DAT, DHV, DIV, DKA, DKM, DKT, DKV, DKY, DMI, DNF, DNL, DQT, DSI, DVY, DYN, DYV, EAT, EAW, EFV, EGL, EIY, EMF, EMY, ENF, EPF, EPY, EQY, ESY, ETF, EWI, EWT, EYI, EYV, NEM, QDF, QDY, QEY, QLY, QND, QVF, QVY, SDL, SDV, SEH, SII, SIY, SSL, SVY, SWD, SWE, TDF, TDV, TDY, TEF, TEY, TIY, TLY, and TWQ.

[0536] In some embodiments, X₁X₂X₃ is selected from the group consisting of: ETI, DQN, DLL, EKW, DNN, EYS, or TVF.

[0537] In some embodiments, X₇ is selected from Y and H; X₈ is selected from T, G and S; X₉ is selected from S and V; X₁₀ is selected from V, L and M

[0538] In some embodiments, the targeting peptide has an amino acid sequence selected from: X₁X₂X₃RGDHGVL (SEQ ID NO: 98938), X₁X₂X₃RGDYSSV (SEQ ID NO: 98937), X₁X₂X₃RGDYTSM (SEQ ID NO: 98942) or X₁X₂X₃RGDYTSV (SEQ ID NO: 98941).

[0539] In some embodiments, X₁X₂X₃ is selected from the group consisting of: ANY, SNI, AAI, AAM, ANT, AST, AYQ, EHK, ENK, ENR, SFQ, SSI, TAY, TDK, TNT, AAF, AAL, AAY, ADK, AFA, ANF, ANI, ANQ, ANS, AQM, ARE, ASV, AYH, AYT, EMK, EWK, NNM, QAF, QAI, QAM, QAT, QAY, QFT, QGM, QHL, QNF, QNQ, QNS, QNT, QNV, QNY, SAH, SAI, SAL, SFT, SFV, SHI, SHV, SMM, SNF, SNM, SNN, SNQ, SNV, SNY, SQI, SQV, SSL, SWQ, SWS, SYI, SYM, SYN, SYQ, TAM, TAT, TDR, TFM, THV, TNF, TNH, TNI, TNM, TNQ, TNV, TSY, TWA, and TYM.

[0540] In some embodiments, X₁X₂X₃ is selected from TVF, APM, AQI, TTS, NQF, NFL or SMN.

[0541] In some embodiments, X₇ is selected from F and Y; X₈ is selected from N and Q; X₉ is selected from N and S; X₁₀ is selected from T and L.

[0542] In some embodiments, the targeting peptide has an amino acid sequence selected from: X₁X₂X₃RGDFNNT (SEQ ID NO: 98943), X₁X₂X₃RGDENNL (SEQ ID NO: 98933), X₁X₂X₃RGDFQNT (SEQ ID NO: 98934) or X₁X₂X₃RGDYNSL (SEQ ID NO: 98940).

[0543] In some embodiments, X₁X₂X₃ is selected from the group consisting of: ADR, ASI, EFK, EHK, EWK, SYQ, AAF, AAT, AAY, AFI, AFQ, AGI, AGT, AHI, ANH, ANM, ANN, AQI, ASA, ASH, AST, ASV, AWT, AYQ, AYT, DAR, DMK, DQR, DVR, EAR, EFR, EMK, EMR, EQK, ERA, ERS, ESR, NDA, NDR, NMI, NMV, NNM, NNN, NYL, NYM, NYN, NYQ, NYV, QAM, QFQ, QFV, QGV, QNH, QNI, QNM, QQV, QSF, QSY, SAI, SAM, SAS, SDR, SFQ, SGH, SGM, SGT, SGV, SHL, SHM, SHQ, SHV, SMH, SNA, SNE, SNF, SNI, SNQ, SNT, SRE, SST, SWQ, SWT, SYG, SYY, TFQ, THL, THQ, THV, TMI, TNL, TNS, TSH, TSQ, and TWQ.

[0544] In some embodiments, X₁X₂X₃ is selected from the group consisting of: TVF, APM, AQI, TTS, NOF, NFL or SMN.

[0545] In certain embodiments, the modified sequence comprises a 7-mer peptide selected from: RGDRGVX₁₀ (SEQ ID NO: 157058), RGDRGSX₁₀ (SEQ ID NO: 157059), RGDRGNX₁₀ (SEQ ID NO: 157060), RGDRGGX₁₀ (SEQ ID NO: 157061), RGDRGQX₁₀ (SEQ ID NO: 157062), RGDRGX₉V (SEQ ID NO: 157063), RGDRGX₉I (SEQ ID NO: 157064), RGDRGX₉S (SEQ ID NO: 157065), RGDRGX₉L (SEQ ID NO: 157066). RGDROX₉Q (SEQ ID NO: 157067), RGDHX₈X₉L (SEQ ID NO. 157068). RGDRX₈X₉I (SEQ ID NO: 157069). RGDRX₈X₉V (SEQ ID NO: 157070). RGDRX₈X₉L (SEQ ID NO: 157071). RGDYX₈X₉L (SEQ ID NO: 157072), RGDYX₈X₉V (SEQ ID NO: 157073), RGDYX₈X₉M (SEQ ID NO: 157074), and RGDLX₈X₉T (SEQ ID NO: 157075).

[0546] In certain embodiments, the targeting peptide comprises a sequence of H1 (RGDLIGR (SEQ ID NO: 1422)) or a sequence of H2 (RGDQSTL (SEQ ID NO: 3052)). In some embodiments, the targeting peptide comprises a sequence of H1 (RGDLIGR (SEQ ID NO: 1422)) targeting peptide located in VR VIII between amino acids at positions 588 and 589 or a sequence of H2 (RGDQSTL (SEQ ID NO: 3052)) targeting peptide located in VR VIII between amino acids at positions 588 and 589. In such embodiments, a modified AAV capsid protein comprising an H1 or H2 targeting peptide have increased tissue enrichment (tropism) in cardiac muscle tissue as compared to skeletal muscle tissue.

[0547] In certain embodiments, the targeting peptide comprises a sequence of S1 (RGDISRT (SEQ ID NO: 263)) targeting peptide located in VR VIII or a sequence of S2 (RGDRSQT (SEQ ID NO: 251)). In some embodiments, the targeting peptide comprises a sequence of S1 (RGDISRT (SEQ ID NO. 263)) targeting peptide located in VR VIII between amino acids 588 and 589 or a sequence of S2 (RGDRSQT (SEQ ID NO: 251) targeting peptide located in VR VIII between amino acids at positions 588 and 589. In such embodiments, a modified AAV capsid protein comprising an S1 or S2 targeting peptide have increased tissue enrichment (tropism) in skeletal tissue as compared to cardiac muscle tissue.

[0548] In certain embodiments, the modified sequence does not comprise a 7-mer peptide selected from: RGDRMVF, RGDRTVI, SRGDRPM, and ISLRGDR. In some embodiments, the modified sequence does not comprise a 7-mer peptide having an amino acid sequence of SEQ ID NO: 1 (RGDLLLS). In certain embodiments, the modified sequence does not comprise a 7-mer peptide of RGDRMVF. In certain embodiments, the modified sequence does not comprise a 7-mer peptide of RGDRTVI. In certain embodiments, the modified sequence does not comprise a 7-mer peptide selected from SRGDRPM, or ISLRGDR. In some embodiments, the modified sequence does not comprise a 7-mer peptide selected from: RGDRMVF, RGDRTVI, SRGDRPM, and ISLRGDR. In some embodiments, the modified sequence does not comprise a 7-mer peptide of X₁SLRGDR, where X₁ is any amino acid residue. In some embodiments, the modified sequence does not comprise a 7-mer peptide of X₁X₂LRGDR, where X₁ and X₂ are independently any amino acid residue.

[0549] In some embodiments, the targeting peptide has a sequence selected from: X₁X₂X₃RGDHVNL (SEQ ID NO: 98924); X₁X₂X₃RGDLIGR (SEQ ID NO: 98925); X₁X₂X₃RGDQSTL (SEQ ID NO: 98926); X₁X₂X₃RGDRGQI (SEQ ID NO: 98927); X₁X₂X₃RGDRGVV (SEQ ID NO. 98928); X₁X₂X₃RGDRQGI (SEQ ID NO: 98929); X₁X₂X₃RGDRSQT (SEQ ID NO: 98930); X₁X₂X₃RGDRSVV (SEQ ID NO: 98931); X₁X₂X₃RGDLLLS (SEQ ID NO: 98932); X₁X₂X₃RGDFNNL (SEQ ID NO: 98933); X₁X₂X₃RGDFQNT (SEQ ID NO: 98934); X₁X₂X₃RGDLTVT (SEQ ID NO: 98935); X₁X₂X₃RGDYVGL (SEQ ID NO: 98936); X₁X₂X₃RGDYSSV (SEQ ID NO: 98937); X₁X₂X₃RGDHGVL (SEQ ID NO: 98938); X₁X₂X₃RGDRDYL (SEQ ID NO: 98939); X₁X₂X₃RGDYNSL (SEQ ID NO: 98940); X₁X₂X₃RGDYTSV (SEQ ID NO: 98941); X₁X₂X₃RGDYTSM (SEQ ID NO: 98942); and X₁X₂X₃RGDFNNT (SEQ ID NO. 98943). In some embodiments, X₁ is selected from S, E, A, D, N, Q, or T. In some embodiments, X₁ is selected from S or E. In some embodiments, X₁ is S. In some embodiments, X₁ is E. In some embodiments, X₂ is selected from N, A, D, E, F, G, H, I, K, L, M, N, P, Q, R, S, T, V, W, or Y. In some embodiments, X₂ is selected from N or A. In some embodiments, X₂ is N. In some embodiments, X₂ is A. In some embodiments, X₃ is selected from R, Q, A, D, E, F, G, H, I, K, L, M, N, P, S, T, V, W, or Y In some embodiments, X₃ is selected from R or Q. In some embodiments, X₃ is R. In some embodiments, X₃ is Q. In some embodiments, X₂ is N. and X₃ is R. In some embodiments, X₁ is E; X₂ is N; and X₃ is R. In some embodiments, X₁ is S; X₂ is N; and X₃ is R.

[0550] In some embodiments, the modified AAV capsid protein further includes one or more mutations outside of the VRVIII. The mutant outside of VRVIII can comprise (1) an alanine (A) or glycine (G) amino acid residue at an amino acid position corresponding to position 266 in Anc80 VP1; and/or (2) a lysine (K) or arginine (R) amino acid residue at an amino acid position corresponding to position 168 in Anc80 VP1. The modified AAV capsid protein can comprise an alanine (A) amino acid residue at an amino acid position 267 and a threonine (T) amino acid residue at an amino acid position 269 in AAV9 VP1.

[0551] In some embodiments, the modified AAV capsid protein further includes one or more deletions or substitutions within the VRVIII. In some embodiments, the modified AAV capsid protein further includes one or more deletions or substitutions between positions 565 and 595 of the reference capsid protein. In some embodiments, the modified AAV capsid protein further includes one or more deletions or substitutions within the VRVIII, followed by an insertion of the targeting peptide. In some embodiments, the modified AAV capsid protein further includes one or more substitutions within the VRVIII, followed by an insertion of the targeting peptide. In some embodiments, the modified AAV capsid protein further includes one or more substitutions within the VRVIII. In some embodiments, the modified AAV capsid protein further includes one or more substitutions between positions 565 and 595 of the reference capsid protein. In some embodiments, the modified AAV capsid protein further includes one or more substitutions within the VRVIII, followed by an insertion of the targeting peptide.

[0552] In some embodiments, the targeting peptide can enhance targeting of an AAV to a brain, muscle, spinal cord, eye, liver, heart, muscle, or other organ. In some embodiments, the targeting peptide can decrease targeting of an AAV to a brain, muscle, spinal cord, eye, liver, heart, muscle, or other organ.

[0553] Sequences of exemplary targeting peptides that can be used various embodiments of the present disclosure are provided in SEQ ID Nos: 1-53, 153-157, 160-162, 238-44858, 3881, 12092, 14601, 15342, 21498, 31396, 44859-44883, 44910, 44911, 44912, 44913, 44918, 44919, and 48391-157057.

[0554] In some embodiments, the targeting peptide comprises at least 90%, at least 95%, at least 98%, at least 99%, or at least 100% sequence identity to the amino acid sequence of ENRRGDYNSL (SEQ ID NO: 44859). In some embodiments, the targeting peptide comprises at least 90%, at least 95%, at least 98%, at least 99%, or at least 100% sequence identity to the amino acid sequence of ENRRGDYNNL (SEQ ID NO: 44860). In some embodiments, the targeting peptide comprises at least 90%, at least 95%, at least 98%, at least 99%, or at least 100% sequence identity to the amino acid sequence of ENRRGDYNST (SEQ ID NO: 44861). In some embodiments, the targeting peptide comprises at least 90%, at least 95%, at least 98%, at least 99%, or at least 100% sequence identity to the amino acid sequence of ENRRGDYNNT (SEQ ID NO. 44862). In some embodiments, the targeting peptide comprises at least 90%, at least 95%, at least 98%, at least 99%, or at least 100% sequence identity to the amino acid sequence of ENRRGDFNSL (SEQ ID NO: 44863). In some embodiments, the targeting peptide comprises at least 90%, at least 95%, at least 98%, at least 99%, or at least 100% sequence identity to the amino acid sequence of ENRRGDFNNL (SEQ ID NO: 44864). In some embodiments, the targeting peptide comprises at least 90%, at least 95%, at least 98%, at least 99%, or at least 100% sequence identity to the amino acid sequence of ENRRGDENST (SEQ ID NO: 44865). In some embodiments, the targeting peptide comprises at least 90%, at least 95%, at least 98%, at least 99%, or at least 100% sequence identity to the amino acid sequence of ENRRGDFQNT (SEQ ID NO: 44866). In some embodiments, the targeting peptide comprises at least 90%, at least 95%, at least 98%, at least 99%, or at least 100% sequence identity to the amino acid sequence of ENRRGDEQNT (SEQ ID NO: 44867). In some embodiments, the targeting peptide comprises at least 90%, at least 95%, at least 98%, at least 99%, or at least 100% sequence identity to the amino acid sequence of ENRRGDQQNT (SEQ ID NO: 44868). In some embodiments, the targeting peptide comprises at least 90%, at least 95%, at least 98%, at least 99%, or at least 100% sequence identity to the amino acid sequence of SNRRGDYNSL (SEQ ID NO: 44869) In some embodiments, the targeting peptide comprises at least 90%, at least 95%, at least 98%, at least 99%, or at least 100% sequence identity to the amino acid sequence of SNRRGDYNNL (SEQ ID NO: 44870). In some embodiments, the targeting peptide comprises at least 90%, at least 95%, at least 98%, at least 99%, or at least 100% sequence identity to the amino acid sequence of SNRRGDYNST (SEQ ID NO: 44871). In some embodiments, the targeting peptide comprises at least 90%, at least 95%, at least 98%, at least 99%, or at least 100% sequence identity to the amino acid sequence of SNRRGDYNNT (SEQ ID NO: 44872) In some embodiments, the targeting peptide comprises at least 90%, at least 95%, at least 98%, at least 99%, or at least 100% sequence identity to the amino acid sequence of SNRRGDFNSL (SEQ ID NO: 44873). In some embodiments, the targeting peptide comprises at least 90%, at least 95%, at least 98%, at least 99%, or at least 100% sequence identity to the amino acid sequence of SNRRGDFNNL (SEQ ID NO: 44874). In some embodiments, the targeting peptide comprises at least 90%, at least 95%, at least 98%, at least 99%, or at least 100% sequence identity to the amino acid sequence of SNRRGDFNST (SEQ ID NO: 44875). In some embodiments, the targeting peptide comprises at least 90%, at least 95%, at least 98%, at least 99%, or at least 100% sequence identity to the amino acid sequence of SNRRGDFQNT (SEQ ID NO: 44876). In some embodiments, the targeting peptide comprises at least 90%, at least 95%, at least 98%, at least 99%, or at least 100% sequence identity to the amino acid sequence of SNRRGDEQNT (SEQ ID NO: 44877). In some embodiments, the targeting peptide comprises at least 90%, at least 95%, at least 98%, at least 99%, or at least 100% sequence identity to the amino acid sequence of SNRRGDQQNT (SEQ ID NO: 44878). In some embodiments, the targeting peptide comprises at least 90%, at least 95%, at least 98%, at least 99%, or at least 100% sequence identity to the amino acid sequence of ENRRGDFNGL (SEQ ID NO: 44879). In some embodiments, the targeting peptide comprises at least 90%, at least 95%, at least 98%, at least 99%, or at least 100% sequence identity to the amino acid sequence of ENRRGDFNNT (SEQ ID NO: 44880) In some embodiments, the targeting peptide comprises at least 90%, at least 95%, at least 98%, at least 99%, or at least 100% sequence identity to the amino acid sequence of SAQRGDFNNT (SEQ ID NO: 44881). In some embodiments, the targeting peptide comprises at least 90%, at least 95%, at least 98%, at least 99%, or at least 100% sequence identity to the amino acid sequence of SAQRGDLLLS (SEQ ID NO: 44882). In some embodiments, the targeting peptide comprises at least 90%, at least 95%, at least 98%, at least 99%, or at least 100% sequence identity to the amino acid sequence of SNRRGDFNNT (SEQ ID NO: 44883). In some embodiments, the targeting peptide comprises at least 90%, at least 95%, at least 98%, at least 99%, or at least 100% sequence identity to the amino acid sequence of (SEQ ID NO: 44911). In some embodiments, the targeting peptide comprises at least 90%, at least 95%, at least 98%, at least 99%, or at least 100% sequence identity to the amino acid sequence of (SEQ ID NO: 44912). In some embodiments, the targeting peptide comprises at least 90%, at least 95%, at least 98%, at least 99%, or at least 100% sequence identity to the amino acid sequence of (SEQ ID NO: 44913). In some embodiments, the targeting peptide comprises at least 90%, at least 95%, at least 98%, at least 99%, or at least 100% sequence identity to the amino acid sequence of (SEQ ID NO: 44918). In some embodiments, the targeting peptide comprises at least 90%, at least 95%, at least 98%, at least 99%, or at least 100% sequence identity to the amino acid sequence of (SEQ ID NO: 44919). In some embodiments, the targeting peptide does not have the amino acid sequence of SEQ ID NO: 44910. In some embodiments, the targeting peptide does not have the amino acid sequence of SEQ ID NO: 44880. In some embodiments, the targeting peptide does not have the amino acid sequence selected from SEQ ID NOs: 44855-44858.

[0555] In some embodiments, in the targeting peptide. X₇, X₈, and X₉ are independently selected from L, G, V, and A; and X₇ is S, V, A, G, or L. In some embodiments, X₇ is selected from A, D, E, F, G, H, I, K, L, N, Q, R, S, T, V, and Y. In some embodiments, X₈ is selected from A, D, E, F, G, H, I, K, L, N, Q, R, S, T, V, and Y. In some embodiments, X₉ is selected from A, D, E, F, G, H, I, K, L, N, Q, R, S, T, V, and Y. In some embodiments, X₁₀ is selected from A, D, E, F, G, H, I, K, L, N, Q, R, S, T, V, and Y.

[0556] In some embodiments, X₇ is selected from L, Q, D, H, M, P, and K. In some embodiments, X₇ is L. In some embodiments, X₈ is selected from G, V, S, D, M, and N. In some embodiments, X₈ is G. In some embodiments, X₉ is selected from V, M, P, S, and D. In some embodiments, X₉ is V. In some embodiments, X₁₀ is selected from S, N, L, H, and M. In some embodiments, X₁₀ is S.

[0557] In some embodiments, X₇ is L. In further embodiments, X₈ is G. In further embodiments, X₉ is L. In further embodiments, X₁₀ is S.

[0558] In some embodiments, X₇ is A. In further embodiments, X₈ is V. In further embodiments, X₉ is G. In further embodiments, X₁₀ is V.

[0559] In some embodiments, X₇ is L. In further embodiments, X₈ is L. In further embodiments, X₉ is L. In further embodiments, X₁₀ is S.

[0560] In some embodiments, X₇ is L; X₈ is selected from G, L and V; X₉ is selected from L and G; and/or X₁₀ is selected from S, V and L. In a further embodiment, X₇ is L, X₈ is G or L, and/or X₁₀ is S. In certain embodiments, X₈ and X₉ is G or L.

[0561] In certain embodiments. X₇, X₈, and X₉ are independently selected from L, V, and A; at least two of X₇, X₈, and X₉ are independently L. In some embodiments, X₇, X₈, and X₉ are L. In certain embodiments, X₈ is L.

[0562] In some embodiments, the targeting peptide has a sequence of X₁X₂X₃RGDX₇X₈X₉X₁₀, wherein X₇X₈X₉X₁₀ is a quad selected for enhanced targeting to muscle. In some embodiments, the targeting peptide has a sequence of X₁X₂X₃RGDX₇X₈X₉X₁₀, wherein X₇X₈X₉X₁₀ is a quad selected for enhanced targeting to a specific muscle (e.g., biceps, quadriceps, diaphragm, heart).

[0563] In some embodiments, the targeting peptide has a sequence of X₁X₂X₃RGDX₇X₈X₉X₁₀, wherein X₇X₈X₉X₁₀ is a quad selected for enhanced targeting to skeletal muscle. In some embodiments, the quad is FNNL, YNSL, RQGI, FONT, YVGL, YSSV, YTSM, RSVV, YTSV, RDYL, or FNNT.

[0564] In some embodiments, the targeting peptide has a sequence of X₁X₂X₃RGDX₇X₈X₉X₁₀, wherein X₇X₈X₉X₁₀ is a quad selected for enhanced targeting to cardiac muscle. In some embodiments, the quad is LIGR, QSTL, or RGVV.

[0565] In some embodiments, the targeting peptide has a sequence of X₁X₂X₃RGDX₇X₈X₉X₁₀, wherein X₇X₈X₉X₁₀ is a quad selected for enhanced targeting to liver. In some embodiments, the quad is RGVV, RSVV, RGQI, RSQT, RQGI, FONT, HGVL, YTSV, YTSM, LTVT, FNNT, YSSV, or HVNL

[0566] In certain embodiments, the targeting peptide comprises the amino acid sequence selected from RGDLRVS (SEQ ID NO: 153), RGDAVGV (SEQ ID NO: 154), RGDFTPTS (SEQ ID NO: 155), RGDLGLS (SEQ ID NO: 156), and RGDMSRE (SEQ ID NO: 157), and/or a sequence comprising at most two, preferably at most one, amino acid substitution compared to one of the aforesaid specific sequences. In certain embodiments, the targeting peptide does not comprise an amino acid sequence selected from RGDLRVS (SEQ ID NO: 153), RGDAVOV (SEQ ID NO: 154), RGDFTPTS (SEQ ID NO: 155), RGDLGLS (SEQ ID NO: 156), and RGDMSRE (SEQ ID NO: 157).

[0567] In some embodiments, the targeting peptide comprises a sequence of RGDLLLS (SEQ ID NO: 1).

[0568] In some embodiments, the targeting peptide comprises a sequence selected from: SEQ ID NOs.: 238-44858. In some embodiments, the modified AAV capsid protein comprises a targeting peptide comprising an amino acid sequence selected from SEQ ID NOs.: 238-247.

[0569] In some embodiments, the targeting peptide comprises a sequence selected from SEQ ID NOs.: 238-337. In some embodiments, the targeting peptide comprises a sequence selected from SEQ ID NOs.: 238-437. In some embodiments, the targeting peptide comprises a sequence selected from SEQ ID NOs.: 238-537. In some embodiments, the targeting peptide comprises a sequence selected from SEQ ID NOs.: 238-637. In some embodiments, the targeting peptide comprises a sequence selected from SEQ ID NOs.: 238-737. In some embodiments, the targeting peptide comprises a sequence selected from SEQ ID NOs.: 238-837. In some embodiments, the targeting peptide comprises a sequence selected from SEQ ID NOs.: 238-937. In some embodiments, the targeting peptide comprises a sequence selected from SEQ ID NOs.: 238-1037.

[0570] In some embodiments, the targeting peptide is the targeting peptide disclosed in US2017/0166926, incorporated by reference in its entirety herein.

[0571] The targeting peptide can have any of the sequences selected from SEQ ID NOs: 2-51 and 53 provided herein. In some embodiments, the targeting peptide is the 7-mer peptide TLAVPFK (SEQ ID NO: 53).

[0572] In some embodiments, the targeting peptide is not a targeting peptide disclosed in US2017/0166926, WO2019/028306, WO2020/072683, WO2021/042909, WO2021/050974, WO2021/077000, or WO2021/222831, incorporated by reference in their entireties herein.

### 6.2.2. Targeting Peptide Site

[0573] A modified AAV capsid protein of the present disclosure comprises a targeting peptide within VR VIII of the reference AAV capsid protein (FIG. 1).

[0574] Preferably, the targeting peptide is at a site exposed to the exterior of the capsid, preferably based on structure predictions and/or experimental data. More preferably, the targeting peptide is at a site exposed to the exterior of the AAV capsid in a manner that does not interfere with the activity of said protein in capsid assembly.

[0575] The position of the targeting peptide in an AAV capsid protein that “corresponds to” the position in the AAV9 capsid protein can be established by the skilled person by known methods, preferably by aligning the amino acids of the capsid proteins. In some embodiments, the site of the targeting peptide corresponds to amino acid position 588 of the AAV9 VP1 capsid protein. In other words, X₁ of the targeting peptide is at a site corresponding to amino acid position 580 of the AAV9 VP1 capsid protein. In other words, X₁ of the targeting peptide is at a site corresponding to amino acid position 581 of the AAV9 VP1 capsid protein. In other words, X₁ of the targeting peptide is at a site corresponding to amino acid position 582 of the AAV9 VP1 capsid protein. In other words, X₁ of the targeting peptide is at a site corresponding to amino acid position 583 of the AAV9 VP1 capsid protein. In other words, X₁ of the targeting peptide is at a site corresponding to amino acid position 584 of the AAV9 VP1 capsid protein. In other words, X₁ of the targeting peptide is at a site corresponding to amino acid position 588 of the AAV9 VP1 capsid protein. In other words, X₁ of the targeting peptide is at a site corresponding to amino acid position 585 of the AAV9 VP1 capsid protein. In other words, X₁ of the targeting peptide is at a site corresponding to amino acid position 586 of the AAV9 VP1 capsid protein. In other words, X₁ of the targeting peptide is at a site corresponding to amino acid position 587 of the AAV9 VP1 capsid protein. In other words, X₁ of the targeting peptide is at a site corresponding to amino acid position 588 of the AAV9 VP1 capsid protein. In other words, X₁ of the targeting peptide is at a site corresponding to amino acid position 587 of the AAV9 VP1 capsid protein. In other words, X₁ of the targeting peptide is at a site corresponding to amino acid position 586 of the AAV9 VP1 capsid protein. In other words, X₁ of the targeting peptide is at a site corresponding to amino acid position 585 of the AAV9 VP1 capsid protein. In other words, X₁ of the targeting peptide is at a site corresponding to amino acid position 589 of the AAV9 VP1 capsid protein. In other words, X₁ of the targeting peptide is at a site corresponding to amino acid position 590 of the AAV9 VP1 capsid protein. In other words, X₁ of the targeting peptide is at a site corresponding to amino acid position 591 of the AAV9 VP1 capsid protein. In other words, X₁ of the targeting peptide is at a site corresponding to amino acid position 592 of the AAV9 VP1 capsid protein.

[0576] The position of the targeting peptide can be any one of those described in WO2019/207132, incorporated by reference in its entirety herein. Some of the sites are provided below in Table 1 and highlighted in FIGS. 2A-2C and FIGS. 3A-3D. In Table 1, the preferred sites are indicated by a “-” relative to wild type VP1 capsid polypeptide.

TABLE 1
Exemplary insertion sites

| | Insertion sites 1 | | Insertion sites 2 | | Insertion sites 3 | |
|---|---|---|---|---|---|---|
| AAV1 | D590 | STD- | S588 | SSS- | Q585 | Q-SSS-T |
| | P591 | PAT | T589 | TDP | T589 | |
| AAV2 | R588 | GNR- | N587 | RGN- | Q584 | Q-RGN-R |
| | Q589 | QAA | R588 | RQA | R588 | |
| AAV3b | S586 | LQS- | N588 | SSN- | Q585 | Q-SSN-T |
| | S587 | SNT | T589 | TAP | T589 | |
| AAV4 | S584 | DQS- | S586 | SNS- | G581 | G-DQS-N |
| | N585 | NSN | N587 | NLP | N585 | |
| AAV5 | S575 | NQS- | T577 | SST- | Q574 | Q-SST-T |
| | S576 | STT | T578 | TAP | T578 | |
| AAV6 | DS90 | STD- | S588 | SSS- | Q585 | Q-SSS-T |
| | P591 | PAT | T589 | TDP | T589 | |
| AAV7 | N589 | AAN- | | | Q586 | Q-AAN-T |
| | T590 | TAA | | | T590 | |
| AAV8 | N590 | QQN- | | | Q587 | Q-QQN-T |
| | T591 | TAP | | | T591 | |
| AAV9 | Q588 | SAQ- | | | Q585 | Q-SAQ-A |
| | A589 | AQA | | | A589 | |
| AAVrh10 | N590 | QQN- | | | Q587 | Q-QQN-A |
| | A591 | AAP | | | A591 | |
| AAVpo.1 | N567 | NQN- | N569 | NSN- | N564 | N-NQN-S |
| | S568 | SNT | T570 | THP | S568 | |
| AAV12 | N592 | NQN- | T594 | NAT- | N589 | N-NQN-A |
| | A593 | ATT | T595 | TAP | A593 | |
| Anc80 | N588 | QSXN-T | | | Q585 | Q-SXN-T |
| | T589 | | | | T589 | |
| Anc80L65 | N588 | QSAN-T | | | Q585 | Q-SAN-T |
| | T589 | | | | T589 | |
| Anc80-55 | N588 | QSSN-T | | | Q585 | Q-SSN-T |
| | T589 | | | | T589 | |
| Anc80-129 | N588 | QSAN-T | | | Q585 | Q-SAN-T |
| | T589 | | | | T589 | |
| Anc80-156 | N588 | QSAN-T | | | Q585 | Q-SAN-T |
| | T589 | | | | T589 | |
| Anc80-751 | N588 | QSAN-T | | | Q585 | Q-SAN-T |
| | T589 | | | | T589 | |
| Anc80-1029 | N588 | QSAN-T | | | Q585 | Q-SAN-T |
| | T589 | | | | T589 | |
| Anc80-1712 | N588 | QSAN-T | | | Q585 | Q-SAN-T |
| | T589 | | | | T589 | |

[0577] 3 exemplary insertion sites are indicated in Table 1. For insertion sites 1 and 2, the targeting peptide is inserted between 2 amino acid positions, where the insertion site is denoted as “-”. For example, for AAV1 capsid protein insertion site 1, the targeting peptide is inserted between positions D590 and P591. In some embodiments, the AAV capsid protein is modified by way of mutation or substitution of one or more amino acids, followed by insertion of the targeting peptide. For example, for insertion site 3 of Table 1, 3 amino acids positioned between the insertion sites are substituted or mutated prior to insertion of the targeting peptide. For example, for AAV1 capsid protein insertion site 3, the targeting peptide is inserted between position Q585 and T589 after the amino acids “SSS” positioned between Q585 and T589 (S586, S587, and S588) are deleted, denoted as “Q-SSS-T”.

[0578] In some embodiments, the targeting peptide is at between 560 and 600 within the VR VIII of the modified AAV capsid protein. In some embodiments, the targeting peptide is at between 565 and 595 within the VR VIII of the modified AAV capsid protein.

[0579] In some embodiments, the targeting peptide is at between 570 and 610 within the VR VIII of the modified AAV capsid protein. In some embodiments, the targeting peptide is at between 580 and 610 within the VR VIII of the modified AAV capsid protein. In some embodiments, the targeting peptide is at between 580 and 595 within the VR VIII of the modified AAV capsid protein. In some embodiments, the targeting peptide is at between 582 and 600 within the VR VIII of the modified AAV capsid protein.

[0580] In some embodiments, the reference AAV capsid protein is a capsid protein of AAV1 or a modification thereof and the targeting peptide is between D590 and P591 or between S588 and T589 of the modified AAV capsid protein. In some embodiments, the reference AAV capsid protein is a capsid protein of AAV1 or a modification thereof and the targeting peptide is between positions 587 and 594 or between positions 585 and 592 of the modified AAV capsid protein. In some embodiments, the reference AAV capsid protein is a capsid protein of AAV1 or a modification thereof and the targeting peptide is between Q585 and TS89 of the reference AAV capsid protein.

[0581] In some embodiments, the reference AAV capsid protein is a capsid protein of AAV2 or a modification thereof and the targeting peptide is between R585 and Q589 or between N587 and R588 of the modified AAV capsid protein. In some embodiments, the reference AAV capsid protein is a capsid protein of AAV2 or a modification thereof and the targeting peptide is between positions 582 and 592 or between positions 585 and 591 of the modified AAV capsid protein. In some embodiments, the reference AAV capsid protein is a capsid protein of AAV2 or a modification thereof and the targeting peptide is between Q584 and R588.

[0582] In some embodiments, the reference AAV capsid protein is a capsid protein of AAV3 or a modification thereof and the targeting peptide is between S586 and S587 or between N588 and T589 of the modified AAV capsid protein. In some embodiments, the reference AAV capsid protein is a capsid protein of AAV3 or a modification thereof and the targeting peptide is between positions 583 and 590 or between positions 585 and 592 of the modified AAV capsid protein. In some embodiments, the reference AAV capsid protein is a capsid protein of AAV3 or a modification thereof and the targeting peptide is between Q585 and T589 of the reference AAV capsid protein.

[0583] In some embodiments, the reference AAV capsid protein is a capsid protein of AAV4 and the targeting peptide is between S584 and N585 or between S586 and N587 of the modified AAV capsid protein. In some embodiments, the reference AAV capsid protein is a capsid protein of AAV4 or a modification thereof and the targeting peptide is between positions 581 and 586 or between positions 583 and 590 of the modified AAV capsid protein. In some embodiments, the reference AAV capsid protein is a capsid protein of AAV4 or a modification thereof and the targeting peptide is between G581 and N585 of the reference AAV capsid protein.

[0584] In some embodiments, the reference AAV capsid protein is a capsid protein of AAV5 or a modification thereof and the targeting peptide is between S575 and S576 or between T577 and T578 of the capsid protein. In some embodiments, the reference AAV capsid protein is a capsid protein of AAV5 or a modification thereof and the targeting peptide is between positions 572 and 579 or between positions 574 and 581 of the capsid protein. In some embodiments, the reference AAV capsid protein is a capsid protein of AAV5 and the targeting peptide is between Q574 and T589 of the reference AAV capsid protein.

[0585] In some embodiments, the reference AAV capsid protein is a capsid protein of AAV6 or a modification thereof and the targeting peptide is between D590 and P591 or S588 and T589 of the modified AAV capsid protein. In some embodiments, the reference AAV capsid protein is a capsid protein of AAV6 or a modification thereof and the targeting peptide is between positions 587 and 594 or positions 585 and 592 of the modified AAV capsid protein. In some embodiments, the reference AAV capsid protein is a capsid protein of AAV6 or a modification thereof and the targeting peptide is between Q585 and T589 of the reference AAV capsid protein.

[0586] In some embodiments, the reference AAV capsid protein is a capsid protein of AAV7 or a modification thereof and the targeting peptide is between N589 and T590 of the modified AAV capsid protein. In some embodiments, the reference AAV capsid protein is a capsid protein of AAV7 or a modification thereof and the targeting peptide is between positions 586 and 593 of the modified AAV capsid protein. In some embodiments, the reference AAV capsid protein is a capsid protein of AAV7 or a modification thereof and the targeting peptide is between Q586 and T590 of the reference AAV capsid protein.

[0587] In some embodiments, the reference AAV capsid protein is a capsid protein of AAV8 and the targeting peptide is between N590 and T591 of the modified AAV capsid protein. In some embodiments, the reference AAV capsid protein is a capsid protein of AAV8 or a modification thereof and the targeting peptide is between positions 587 and 594 of the modified AAV capsid protein. In some embodiments, the reference AAV capsid protein is a capsid protein of AAV8 or a modification thereof and the targeting peptide is between Q587 and T591 of the modified AAV capsid protein.

[0588] In some embodiments, the reference AAV capsid protein is a capsid protein of AAV9 and the targeting peptide is between Q588 and A589 of the modified AAV capsid protein. In some embodiments, the reference AAV capsid protein is a capsid protein of AAV9 or a modification thereof and the targeting peptide is between positions 585 and 592 of the modified AAV capsid protein. In some embodiments, the reference AAV capsid protein is a capsid protein of AAV9 or a modification thereof and the targeting peptide is between Q585 and A589 of the reference AAV capsid protein.

[0589] In some embodiments, the reference AAV capsid protein is a capsid protein of AAVrh10 or a modification thereof and the targeting peptide is between N590 and A591 of the modified AAV capsid protein. In some embodiments, the reference AAV capsid protein is a capsid protein of AAVrh10 or a modification thereof and the targeting peptide is between positions 587 and 594 of the modified AAV capsid protein. In some embodiments, the reference AAV capsid protein is a capsid protein of AAVrh10 or a modification thereof and the targeting peptide is between Q587 and A591 of the reference AAV capsid protein.

[0590] In some embodiments, the reference AAV capsid protein is a capsid protein of AAVpo.1 or a modification thereof and the targeting peptide is between N567 and S568 or between N569 and T570 of the modified AAV capsid protein. In some embodiments, the reference AAV capsid protein is a capsid protein of AAVpo.1 or a modification thereof and the targeting peptide is between positions 570 and 571 or between positions 566 and 573 of the modified AAV capsid protein. In some embodiments, the reference AAV capsid protein is a capsid protein of AAVpo.1 or a modification thereof and the targeting peptide is between N564 and S568 of the reference AAV capsid protein.

[0591] In some embodiments, the reference AAV capsid protein is a capsid protein of AAV12 or a modification thereof and the targeting peptide is between N592 and A593 or between T594 and T595 of the modified AAV capsid protein. In some embodiments, the reference AAV capsid protein is a capsid protein of AAV12 or a modification thereof and the targeting peptide is between positions 589 and 596 or between positions 591 and 598 of the modified AAV capsid protein. In some embodiments, the reference AAV capsid protein is a capsid protein of AAV12 or a modification thereof and the targeting peptide is between N589 and A593 of the reference AAV capsid protein.

[0592] In some embodiments, the reference AAV capsid protein is a capsid protein of Anc80 or a modification thereof and the targeting peptide is between T589 and A590 or between N587 and T588 of the modified AAV capsid protein. In some embodiments, the reference AAV capsid protein is a capsid protein of Anc80 or a modification thereof and the targeting peptide is between positions 586 and 593 or between positions 584 and 591 of the modified AAV capsid protein. In some embodiments, the reference AAV capsid protein is a capsid protein of Anc80 or a modification thereof and the targeting peptide is between Q585 and T589 of the reference AAV capsid protein.

[0593] In some embodiments, the reference AAV capsid protein is a capsid protein of Anc80L65 or a modification thereof and the targeting peptide is between T589 and A590 or between N587 and T588 of the modified AAV capsid protein. In some embodiments, the reference AAV capsid protein is a capsid protein of Ane80L65 or a modification thereof and the targeting peptide is between positions 586 and 593 or between positions 584 and 591 of the modified AAV capsid protein. In some embodiments, the reference AAV capsid protein is a capsid protein of Anc80L65 or a modification thereof and the targeting peptide is between Q585 and T589 of the reference AAV capsid protein.

[0594] In some embodiments, the reference AAV capsid protein is a capsid protein of Anc80-55 or a modification thereof and the targeting peptide is between T589 and A590 or between N587 and T588 of the modified AAV capsid protein. In some embodiments, the reference AAV capsid protein is a capsid protein of Anc80-55 or a modification thereof and the targeting peptide is between positions 586 and 593 or between positions 584 and 591 of the modified AAV capsid protein. In some embodiments, the reference AAV capsid protein is a capsid protein of Anc80-55 or a modification thereof and the targeting peptide is between Q585 and T589 of the reference AAV capsid protein.

[0595] In some embodiments, the reference AAV capsid protein is a capsid protein of Anc80-129 or a modification thereof and the targeting peptide is between T589 and A590 or between N587 and T588 of the modified AAV capsid protein. In some embodiments, the reference AAV capsid protein is a capsid protein of Anc80-129 or a modification thereof and the targeting peptide is between positions 586 and 593 or between positions 584 and 591 of the modified AAV capsid protein. In some embodiments, the reference AAV capsid protein is a capsid protein of Anc80-129 or a modification thereof and the targeting peptide is between Q585 and T589 of the reference AAV capsid protein.

[0596] In some embodiments, the reference AAV capsid protein is a capsid protein of Anc80-156 or a modification thereof and the targeting peptide is between T589 and A590 or between N587 and T588 of the modified AAV capsid protein. In some embodiments, the reference AAV capsid protein is a capsid protein of Anc80-156 or a modification thereof and the targeting peptide is between positions 586 and 593 or between positions 584 and 591 of the modified AAV capsid protein. In some embodiments, the reference AAV capsid protein is a capsid protein of Anc80-156 or a modification thereof and the targeting peptide is between Q585 and T589 of the reference AAV capsid protein.

[0597] In some embodiments, the reference AAV capsid protein is a capsid protein of Anc80-751 or a modification thereof and the targeting peptide is between T589 and A590 or between N587 and T588 of the modified AAV capsid protein. In some embodiments, the reference AAV capsid protein is a capsid protein of Anc80-751 or a modification thereof and the targeting peptide is between positions 586 and 593 or between positions 584 and 591 of the modified AAV capsid protein. In some embodiments, the reference AAV capsid protein is a capsid protein of Anc80-751 or a modification thereof and the targeting peptide is between Q585 and T589 of the reference AAV capsid protein.

[0598] In some embodiments, the reference AAV capsid protein is a capsid protein of Anc80-1029 or a modification thereof and the targeting peptide is between T589 and A590 or between N587 and T588 of the modified AAV capsid protein. In some embodiments, the reference AAV capsid protein is a capsid protein of Anc80-1029 or a modification thereof and the targeting peptide is between positions 586 and 593 or between positions 584 and 591 of the modified AAV capsid protein. In some embodiments, the reference AAV capsid protein is a capsid protein of Anc80-1029 or a modification thereof and the targeting peptide is between Q585 and T589 of the reference AAV capsid protein.

[0599] In some embodiments, the reference AAV capsid protein is a capsid protein of Anc80-1712 or a modification thereof and the targeting peptide is between T589 and A590 or between N587 and T588 of the modified AAV capsid protein. In some embodiments, the reference AAV capsid protein is a capsid protein of Anc80-1712 or a modification thereof and the targeting peptide is between positions 586 and 593 or between positions 584 and 591 of the modified AAV capsid protein. In some embodiments, the reference AAV capsid protein is a capsid protein of Anc80-1712 or a modification thereof and the targeting peptide is between Q585 and T589 of the reference AAV capsid protein.

### 6.2.3. Various Embodiments of Modified AAV Capsid Proteins

[0600] The present disclosure provides a modified AAV capsid protein comprising a reference AAV capsid protein with one or more modifications to comprise a targeting peptide at a site within VR VIII of the reference AAV capsid protein, wherein the targeting peptide has a sequence X₁X₂X₃RGDX₇X₈X₉X₁₀. In some embodiments, the modified AAV capsid protein comprises a targeting peptide selected from SEQ ID NOs.: 238-44858 introduced into the VR VIII. In some embodiments, the modified AAV capsid protein comprises a targeting peptide having at least 90%, at least 95%, at least 98%, at least 99% or at least 100% sequence identity to the amino acid sequence selected from SEQ ID NOs. 238-44858 introduced into the VRVIII.

[0601] In some embodiments, the modified AAV capsid protein is an AAV9 capsid protein containing a targeting peptide, RGDLLLS (SEQ ID NO: 1), inserted into the VR VIII. In one embodiment, the modified AAV capsid protein has a sequence of SEQ ID NO: 158. In some embodiments, the modified AAV capsid protein has the amino acids 138 to 736 of SEQ ID NO: 158. In some embodiments, the modified AAV capsid protein has the amino acids 203 to 736 of SEQ ID NO: 158. In some embodiments, the modified AAV capsid protein has the amino acid sequence selected from SEQ ID NOs.: 44900-44909. In some embodiments, the modified AAV capsid protein has the amino acid sequence of SEQ ID NO.: 44900. In some embodiments, the modified AAV capsid protein has the amino acid sequence of SEQ ID NO: 44901. In some embodiments, the modified AAV capsid protein has the amino acid sequence of SEQ ID NO.: 44902. In some embodiments, the modified AAV capsid protein has the amino acid sequence of SEQ ID NO.: 44903. In some embodiments, the modified AAV capsid protein has the amino acid sequence of SEQ ID NO.: 44904 In some embodiments, the modified AAV capsid protein has the amino acid sequence of SEQ ID NO.: 44905. In some embodiments, the modified AAV capsid protein has the amino acid sequence of SEQ ID NO.: 44906. In some embodiments, the modified AAV capsid protein has the amino acid sequence of SEQ ID NO.: 44907. In some embodiments, the modified AAV capsid protein has the amino acid sequence of SEQ ID NO.: 44908. In some embodiments, the modified AAV capsid protein has the amino acid sequence of SEQ ID NO.: 44909. some embodiments, the modified AAV capsid protein has a sequence having at least 90%, 91%, 92%, 93%, 94%, 95%, 96%, 97%, 98%, or 99% identity to an amino acid sequence selected from: SEQ ID NOs.: 44900-44909.

[0602] In some embodiments, the modified AAV capsid protein has a sequence having at least 90%, 91%, 92%, 93%, 94%, 95%, 96%, 97%, 98%, or 99% identity to SEQ ID NO: 158.

[0603] In another aspect, the present disclosure provides a modified AAV capsid protein comprising (i) a) an alanine (A) amino acid residue at an amino acid position corresponding to position 266 in Anc80; or b) a lysine (K) amino acid residue at an amino acid position corresponding to position 168 in Anc80; and (it) a targeting peptide introduced into a site within VR VIII of the liver-toggle mutant.

[0604] In one embodiment, the modified AAV capsid protein is an AAV9 capsid protein containing a targeting peptide, RGDLLLS (SEQ ID NO: 1), inserted into the VR VIII. The modified AAV capsid protein can comprise one or more additional modifications to comprise (i) a) an alanine (A) amino acid residue at an amino acid position corresponding to position 266 in Anc80; or b) a lysine (K) amino acid residue at an amino acid position corresponding to position 168 in Anc80. In one embodiment, the modified AAV capsid protein has a sequence of SEQ ID NO: 159. In some embodiments, the modified AAV capsid protein has the amino acids 138 to 736 of SEQ ID NO: 159. In some embodiments, the modified AAV capsid protein has the amino acids 203 to 736 of SEQ ID NO: 159.

[0605] In some embodiments, the modified AAV capsid protein has a sequence having at least 90%, 91%, 92%, 93%, 94%, 95%, 96%, 97%, 98%, or 99% identity to SEQ ID NO: 159.

[0606] A modified AAV capsid protein of the present disclosure can change the tropism, specificity and/or bio-distribution of an AAV comprising the modified AAV capsid protein. In preferred embodiments, an AAV comprising the modified AAV capsid protein has increased targeting to a target cell, tissue or organ when administered to a subject. In some embodiments, an AAV comprising the modified AAV capsid protein has decreased distribution outside of a target cell, tissue or organ when administered to a subject. In some embodiments, tropism of a modified AAV capsid protein can be measured using an enrichment score. A non-limiting example of an enrichment score is based on the combination of amino acid residues present in the modified sequence within VR VIII. An exemplary enrichment formula is provided below:

$$Tissue Enrichment score = log 2 FoldChange = log 2 {MN}_{Tissue} - log 2 {MN}_{TestArticle}$$

[0607] The formula for the scaled log 2 fold change is provided below:

$$Scaled log 2 FoldChange = ( log 2 FoldChange - min ( log 2 FoldChange ) ) / ( max ( log 2 FoldChange ) - min ( log 2 FC ) )$$

[0608] In some embodiments, the modified AAV capsid protein comprises (i) a reference AAV capsid protein, and (ii) a 7-mer peptide having the sequence RGDLLLS (SEQ ID NO: 1) inserted into a site within VR VIII of the reference AAV capsid protein.

### 6.2.4. Reference AAV Capsid Proteins

[0609] The reference AAV capsid protein used in various embodiments of the present disclosure is a VP1, VP2 or VP3 capsid protein of an AAV known in the art. It can be a VP1, VP2 or VP3 capsid protein of a naturally occurring or non-naturally occurring AAV variant.

[0610] The non-naturally occurring VP1, VP2, or VP3 capsid protein includes a capsid protein generated by biological or chemical alteration or in silico design, or variation of a naturally occurring AAV capsid protein. Accordingly, the reference AAV capsid protein includes, but is not limited to, a capsid protein of various AAV serotypes (e.g., AAV1, AAV2, AAV3B, AAV5, AAV6, AAV8, and AAV9) or a variant thereof. A non-naturally occurring VP1, VP2, or VP3 capsid protein further includes an artificial capsid protein created by in silico design or synthesis. An artificial capsid protein includes, but is not limited to, AAV capsid proteins disclosed in PCT/US2014/060163, U.S. Pat. No. 9,695,220, PCT/US2016/044819, PCT/US2018/032166, PCT/US2019/031851, and PCT/US2019/047546, which are incorporated herein by reference in their entireties.

[0611] In some embodiments, the reference AAV capsid protein is the capsid protein of AAV9 (Genbank Acc. No: AAS99264.1), AAV1 (Genbank Acc. No: AAD27757.1), AAV2 (Genbank Acc. No: AAC03780.1). AAV3 (Genbank Acc. No: AAC55049.1), AAV3b (Genbank Acc. No: AF028705.1), AAV4 (Genbank Acc. No: AAC58045.1), AAV5 (Genbank Acc. No: AAD13756.1), AAV6 (Genbank Acc. No: AF028704.1), AAV7 (Genbank Acc. No: AAN03855.1), AAV 8 (Genbank Acc. No: AAN03857.1), AAV10 (Genbank Acc. No: AAT46337.1), AAVrh10 (Genbank Acc. No: AY243015.1), AAV1I (Genbank Acc. No: AAT46339.1), AAV12 (Genbank Acc. No: ABI16639.1), or AAV13 (Genbank Acc. No: ABZ10812.1), AAVpol (Genbank Acc. No: FJ688147.1). In certain embodiments, the AAV capsid protein is the capsid protein of AAV9 (Genbank Acc. No: AAS99264.1).

[0612] The reference AAV capsid protein can be VP1 capsid protein having a sequence selected from: SEQ ID NO: 54 (AAV1 (AAD27757)), SEQ ID NO: 55 (AAV2 (AAC03780), SEQ ID NO: 56 (AAV3 (AAC55049)), SEQ ID NO: 57 (AAV5 (AAD13756)), SEQ ID NO: 58 (AAV6 (AAB95450), SEQ ID NO: 59 (AAV7 (AF513851_2), SEQ ID NO: 60 (AAV8 (AF513852_2)), SEQ ID NO: 61 (AAV9 (AAS99264), SEQ ID NO: 62 (AAV10 (AAT46337)), SEQ ID NO: 63 (AAV hu.68), SEQ ID NO: 64 (AAV LK03), SEQ ID NO: 65 (AAV hu.1 (AAS99260)), SEQ ID NO: 66 (AAV hu.2 (AAS99270)), SEQ ID NO: 67 (AAV hu.3 (AAS99280), SEQ ID NO: 68 (AAV hu.4 (AAS99287), SEQ ID NO: 69 (AAV hu.6 (AAS99306), SEQ ID NO: 70 (AAV hu.7 (AAS99313)), SEQ ID NO: 71 (AAV hu.9 (AAS99314)), SEQ ID NO: 72 (AAV hu.10 (AAS99261)), SEQ ID NO: 73 (AAV hu.11 (AAS99262)), SEQ ID NO: 74 (AAV hu.15 (AAS99265)), SEQ ID NO: 75 (AAV hu.16 (AAS99266)), SEQ ID NO: 76 (AAV hu.17 (AAS99267), SEQ ID NO: 77 (AAV hu.18 (AAS99268)), SEQ ID NO: 78 (AAV hu.20 (AAS99271)), SEQ ID NO: 79 (AAV hu.21 (AAS99272)), SEQ ID NO: 80 (AAV hu.22 (AAS99273), SEQ ID NO: 81 (AAV hu.23 (AAS99274)), SEQ ID NO: 82 (AA V hu.25 (AAS99276)), SEQ ID NO: 83 (AAV hu.27 (AAS99277)), SEQ ID NO: 84 (AAV hu.28 (AAS99278)), SEQ ID NO: 85 (AAV hu.29 (AAS99279)), SEQ ID NO. 86 (AAV hu.31 (AAS99281)), SEQ ID NO: 87 (AAV hu.32 (AAS99282)), SEQ ID NO: 88 (AAV hu.34 (AAS99283)), SEQ ID NO: 89 (AAV hu.37 (AAS99285), SEQ ID NO: 90 (AAV hu.39 (AAS99286)), SEQ ID NO: 91 (AAV hu.41 (AAS99289), SEQ ID NO: 92 (AAV hu.42 (AAS99290), SEQ ID NO: 93 (AAV hu.43 (AAS99291)), SEQ ID NO: 94 (AAV hu.44 (AAS99292), SEQ ID NO: 95 (AAV hu.45 (AAS99293)), SEQ ID NO: 96 (AAV hu.46 (AAS99294)), SEQ ID NO: 97 (AAV hu.47 (AAS99295)), SEQ ID NO: 98 (AAV hu.48 (AAS99296)), SEQ ID NO: 99 (AAV hu.51 (AAS99298)), SEQ ID NO: 100 (AAV hu.52 (AAS99299)), SEQ ID NO: 101 (AAV hu.53 (AAS99300)), SEQ ID NO: 102 (AAV hu.54 (AAS99301)), SEQ ID NO: 103 (AAV hu.55 (AAS99302)), SEQ ID NO: 104 (AAV hu.56 (AAS99303)), SEQ ID NO: 105 (AAV hu.57 (AAS99304), SEQ ID NO: 106 (AAV hu.60 (AAS99307)), SEQ ID NO: 107 (AAV hu.61 (AAS99308), SEQ ID NO. 108 (AAV hu.63 (AAS99309), SEQ ID NO: 109 (AAV hu.66 (AAS99311)), SEQ ID NO: 110 (AAV hu.67 (AAS99312)), SEQ ID NO: 111 (AAV rh.10 (AAO88201)), SEQ ID NO: 112 (AAV rh.13 (AAO88199)), SEQ ID NO: 113 (AAV rh.19 (AAO88194)), SEQ ID NO: 114 (AAV rh.22 (AAO88192)), SEQ ID NO: 115 (AAV rh.23 (AAO88191)), SEQ ID NO: 116 (AAV rh.24 (AAO88190), SEQ ID NO: 117 (AAV rh.35 (AAO88186), SEQ ID NO: 118 (AAV rh.43 (AAS99245), SEQ ID NO: 119 (AAV rh.48 (AAS99246), SEQ ID NO: 120 (AAV rh.49 (AAS99247), SEQ ID NO: 121 (AAV rh.50 (AAS99248), SEQ ID NO. 122 (AAV rh.51 (AAS99249), SEQ ID NO: 123 (AAV rh.52 (AAS99250)), SEQ ID NO: 124 (AAV rh.53 (AAS99251)), SEQ ID NO: 125 (AAV rh.54 (AAS99252)), SEQ ID NO: 126 (AAV rh.55 (AAS99253)), SEQ ID NO: 127 (AAV rh.57 (AAS99254)), SEQ ID NO: 128 (AAV rh.58 (AAS99255)), SEQ ID NO: 129 (AAV rh.62 (AAS99258)), SEQ ID NO: 130 (AAV rh.64 (AAS99259)), SEQ ID NO: 131 (AAV rh.56 (JA400164)), SEQ ID NO: 143 (Anc80L1), SEQ ID NO: 144 (Anc80L27), SEQ ID NO: 145 (Anc80L33), SEQ ID NO: 146 (Anc80L36), SEQ ID NO: 147 (Anc80L44), SEQ ID NO: 148 (Anc80L59), SEQ ID NO: 149 (Anc80L60), SEQ ID NO: 150 (Anc80L62), SEQ ID NO: 151 (Anc82DI), SEQ ID NO: 152 (AAV rh.74). Anc80-55 (SEQ ID NO: 44885); Anc80-129 (SEQ ID NO: 44887); Anc80-156 (SEQ ID NO: 44889); Anc80-751 (SEQ ID NO: 44916); Anc80-1029 (SEQ ID NO: 44917); and Anc80-1712 (SEQ ID NO: 44893). The reference AAV capsid protein can be a VP2 or VP3 protein having a part of one of the sequences. For example, VP2 protein can have a sequence corresponding to amino acids 138 to 736 of AAV9 VP1 and VP3 protein can have a sequence corresponding to amino acids 138 to 736 of AAV9 VP1 protein.

[0613] The reference AAV capsid protein can be VP1 capsid protein having any member sequence of the ancestral AAV library selected from SEQ ID NO: 132 (Anc80), SEQ ID NO: 133 (Anc8) (AKU89596)), SEQ ID NO: 134 (Anc82 (AKU89597)), SEQ ID NO: 135 (Anc83 (AKU89598), SEQ ID NO: 136 (Anc84 (AKU89599)), SEQ ID NO: 137 (Anc94) SEQ ID NO: 138 (Anc110 (AKU89600)), SEQ ID NO: 139 (Anc113 (AKU89601)), SEQ ID NO: 140 (Anc126 (AKU89602)), SEQ ID NO: 141 Anc127 (AKU89603), and SEQ ID NO: 142 (Anc80L65 (AKU89595)). The reference AAV capsid protein can be a VP2 or VP3 protein having a part of one of the sequences. For example, VP2 protein can have a sequence corresponding to amino acids 138 to 736 of AAV9 VP1 and VP3 protein can have a sequence corresponding to amino acids 138 to 736 of AAV9 VP1 protein. When a SEQ ID NO for a library sequence is used in this disclosure, it refers to a sequence of any one member of the library.

[0614] In some embodiments, the reference AAV capsid protein is a liver-toggle mutant described in WO2019/217911, which is incorporated by reference in its entirety herein.

[0615] In some embodiments, the reference AAV capsid protein is a capsid protein (VP1, VP2 or VP3) of an AAV variant selected from the group consisting of: AAV2; AAV1; AAV6; AAV3; AAV LK03; AAV7; AAV8; AAV hu.37; AAV rh.10; AAV9; AAV hu.68; AAV10; AAV5; AAV3-3; AAV4-4; AAV1-A; hu.46-A; hu.48-A; hu.44-A; hu.43-A; AAV6-A; hu.34-B; hu.47-B; hu.29-B; rh.63-B; hu.56-B; hu.45-B; rh.57-B; rh.35-B, rh.58-B; rh.28-B; rh.51-B; rh.19-B; rh.49-B; rh.52-B; rh.13-B; AAV2-B; rh.20-B; rh.24-B; rh.64-B; hu.27-B; hu.21-B; hu.22-B; hu.23-B; hu.7-C; hu.61-C; rh.56-C; hu.9-C; hu.54-C; hu.53-C; hu.60-C; hu.55-C; hu.2-C; hu.1-C; hu.18-C; hu.3-C; hu.25-C; hu.15-C; hu.16-C; hu.11-C; hu.10-C; hu.4-C; rh.54-D; rh.48-D; rh.55-D; rh.62-D; AAV7-D; rh.52-E; rh.51-E; hu.39-E; rh.53-E; hu.37-E; rh.43-E; rh.50-E; rh.49-E; rh.61-E; hu.41-E; rh.64-E; hu.42-E; rh.57-E; rh.40-E; rh74; hu.67-E; hu.17-E; hu.6-E; hu.66-E; rh.38-E; hu.32-F; AAV9/hu; hu.31-F; Anc80L.27; Anc80159; Anc80L60; Anc80L62; Anc80L65; Anc80L33; Anc80L36; Anc80L44; Anc80L1; Anc80-55, Anc80-129, Anc80-156, Anc80-751, Anc80-1029, Anc80-1712; Anc110; and Anc80DI. In some embodiments, the reference AAV capsid protein is a capsid protein of any member protein of an ancestral AAV library selected from: Anc80; Anc81; Anc82; Ane83; Anc84; Anc94; Anc113; Anc126; and Anc127.

[0616] In some embodiments, the reference AAV capsid protein is a protein having a sequence selected from SEQ ID Nos: 54-131 and 143-152. In some embodiments, the reference AAV capsid protein is a protein having a VP2 (corresponding to amino acids 138 to 736 of AAV9 VP1) or VP3 portion (corresponding to amino acids 138 to 736 of AAV9 VP1) of the protein having a sequence selected from SEQ ID NOs: 54-131 and 143-152.

[0617] In some embodiments, the reference AAV capsid protein is a capsid protein of the AAV variant modified to include one or more liver-toggle mutations described in WO2019/217911. In some embodiments, the reference AAV capsid protein comprises (1) an alanine (A) or glycine (G) amino acid residue at an amino acid position corresponding to position 266 in Anc80 VP1 and/or (2) a lysine (K) or arginine (R) amino acid residue at an amino acid position corresponding to position 168 in Anc80 VP1. In some embodiments, the reference AAV capsid protein comprises (i) an alanine (A) amino acid residue at an amino acid position corresponding to position 266 in Anc80 VP1 and/or b) a lysine (K) amino acid residue at an amino acid position corresponding to position 168 in Anc80 VP1. In some embodiments, the reference AAV capsid protein comprises (ii) an alanine (A) amino acid residue at an amino acid position corresponding to position 267 in AAV9 VP1 protein and/or a threonine (T) amino acid residue at an amino acid position corresponding to position 269 in AAV9 VP1.

[0618] In some embodiments, the reference AAV capsid protein is a capsid protein having a sequence selected from SEQ ID NOs.: 44885-44898, 44916-44917, or a fragment thereof. In some embodiments, the reference AAV capsid protein is a capsid protein having a sequence with at least 90%, at least 95%, at least 98%, at least 99%, or at least 100% sequence identity to the amino acid sequence selected from SEQ ID NOs.: 44885-44898, 44916-44917, or a fragment thereof.

[0619] In some embodiments, the reference AAV capsid protein comprises one or more modifications as described in WO2019/217911 or WO 2021/050614, which are both incorporated by reference herein in their entireties. In some embodiments, the reference AAV capsid protein comprises one or more modifications as described in PCT Application No. PCT/US2022/015842, which is herein incorporated by reference in its entirety.

### 6.2.5. Peptide Segment

[0620] In some embodiments, the modified AAV capsid protein comprises a peptide segment within variable region I (VR I). In some embodiments, the modified AAV capsid protein comprises a tropism-altering peptide segment within VR I. In some embodiments, the modified AAV capsid protein comprises a peptide segment of 12 amino acids (P₁P₂P₃P₄P₅P₆P₇P₈P₉P₁₀P₁₁P₁₂) within VR I which is different from the reference AAV capsid protein. In some embodiments, among the 12 amino acids, only one amino acid is different from the amino acids in the corresponding positions within the reference AAV capsid protein. In some embodiments, more than one amino acid residues in the peptide segment are different from the amino acid residues in the corresponding positions within the reference AAV capsid protein.

[0621] In some embodiments, the peptide segment comprises 12 amino acids positioned between about amino acid 259 to about amino acid 275 in a reference AAV capsid protein (e.g., any of the reference AAV capsid proteins described herein). In some embodiments, the peptide segment comprises 12 amino acids (P₁P₂P₃P₄P₅P₆P₇P₈P₉P₁₀P₁₁P₁₂) located between position 261 and position 274 in a reference AAV capsid protein or between position 260 and position 273 in a reference AAV capsid protein. In some embodiments, the peptide segment comprises 11 amino acids (P₁P₂P₃P₄P₅P₆P₇P₈P₉P₁₀P₁₁P₁₂) between about amino acid 259 to about amino acid 275 in a reference AAV capsid protein (e.g., any of the reference AAV capsid proteins described herein). In some embodiments, the peptide segment comprises 10 amino acids between about amino acid 259 to about amino acid 275 in a reference AAV capsid protein (e.g., any of the reference AAV capsid proteins described herein).

[0622] In some embodiments, one or more amino acids in P₁P₂P₃P₄P₅P₆P₇P₈P₉P₁₀P₁₁P₁₂ are same as the one or more amino acids at corresponding positions within the reference AAV capsid protein.

[0623] In some embodiments, the peptide segment has a sequence selected from SEQ ID NOs: 44935-47387. In some embodiments, the peptide segment has a sequence having at least 80% or at least 90% sequence identity to a sequence selected from SEQ ID NOs: 44935-47387.

[0624] In some embodiments, a modified adeno-associated virus (AAV) capsid protein includes a reference AAV capsid protein with one or more modifications to comprise a peptide segment within variable region I (VR I) of the reference AAV capsid protein, wherein the peptide segment has an amino acid sequence of P₁P₂P₃P₄P₅P₆P₇P₈NDNP₁₂ and P₁, P₂, P₃, P₄, P₅, P₆, P₇, P₈, and P₁₂ are independently selected from any amino acid residue.

[0625] In some embodiments, a modified adeno-associated virus (AAV) capsid protein includes a peptide segment within variable region I (VR I), wherein the peptide segment has an amino acid sequence of P₁P₂P₃P₄P₅P₆P₇P₈NDNP₁₂ and P₁, P₂, P₃, P₄, P₅, P₆, P₇, P₈, and P₁₂ are independently selected from any amino acid residue.

[0626] In some embodiments, the modified AAV capsid protein can include a peptide segment having the amino acid sequence of P₁P₂P₃P₄P₅P₆P₇P₈NDNP₁₂ where:
[0627] (i) P₁ is independently selected from an asparagine (N), a serine (S), or a threonine (T),
[0628] (ii) P₂ is independently selected from a serine (S) or a glycine (G),
[0629] (iii) P₃ is independently selected from a threonine (T), a glutamine (Q), an alanine (A), or glutamate (E),
[0630] (iv) P₄ is independently selected from a serine (S), a threonine (T), or an alanine (A),
[0631] (v) P₅ is independently selected from a glycine (G) or an alanine (A),
[0632] (vi) P₆ is independently selected from a glycine (G) or an alanine (A),
[0633] (vii) P₇ is independently selected from an alanine (A) or a serine (S),
[0634] (viii) P₈ is independently selected from a serine (S) or a threonine (T), and
[0635] (ix) P₁₂ is independently selected from a histidine (H), a threonine (T), or an alanine (A).

[0636] In some embodiments, a modified adeno-associated virus (AAV) capsid protein comprises a reference AAV capsid protein with one or more modifications to comprise a peptide segment within variable region I (VR I) of the reference AAV capsid protein, wherein the peptide segment has an amino acid sequence of P₁P₂P₃P₄P₅P₆P₇P₈P₉P₁₀P₁₁P₁₂, wherein positions P₉, P₁₀, and P₁₁, or a combination thereof, are not modified compared to a reference AAV capsid protein.

[0637] In some embodiments, a modified adeno-associated virus (AAV) capsid protein comprises a peptide segment within variable region I (VR I), wherein the peptide segment has an amino acid sequence of P₁P₂P₃P₄P₅P₆P₇P₈P₉P₁₀P₁₁P₁₂, wherein positions P₉, P₁₀, and P₁₁, or a combination thereof, are not modified compared to a reference AAV capsid protein.

[0638] In another aspect, the present disclosure provides a modified adeno-associated virus (AAV) capsid protein comprising a reference AAV capsid protein with one or more modifications to comprise a peptide segment within variable region I (VR I) of the reference AAV capsid protein, where the peptide segment has an amino acid sequence P₁P₂P₃P₄GGP₇P₈NDNP₁₂ (SEQ ID NO: 44921), wherein P₁, P₂, P₃, P₄, P₇, P₈, and P₁₂ are independently selected from any amino acid residue.

[0639] In another aspect, the present disclosure provides a modified adeno-associated virus (AAV) capsid protein comprising a peptide segment within variable region I (VR I), where the peptide segment has an amino acid sequence P₁P₂P₃P₄GGP₇P₈NDNP₁₂ (SEQ ID NO: 44921), wherein P₁, P₂, P₃, P₄, P₇, P₈, and P₁₂ are independently selected from any amino acid residue.

[0640] In some embodiments, the modified AAV capsid protein can comprise a peptide segment having the amino acid sequence of P₁P₂P₃P₄GGP₇P₈NDNP₁₂ (SEQ ID NO: 44921) where:
[0641] (i) P₂ is independently selected from an asparagine (N) or a serine (S);
[0642] (ii) P₂ is independently selected from a serine (S) or a glycine (G);
[0643] (iii) P₃ is independently selected from a threonine (T) or a glutamine (Q);
[0644] (iv) P₄ is independently selected from a serine (S), a threonine (T), or an alanine (A);
[0645] (v) P₇ is independently selected from an alanine (A) or a serine (S);
[0646] (vi) P₈ is independently selected from a serine (S) or a threonine (T); and
[0647] (vii) P₁₂ is independently selected from a histidine (H), a threonine (T), or an alanine (A).

[0648] In some embodiments, the modified AAV capsid protein can comprise a peptide segment having a sequence of P₁P₂TP₄GGP₇P₈NDNP₁₂ (SEQ ID NO: 44922), wherein P₁, P₂, P₄, P₇, P₈, and P₁₂ are independently selected from any amino acid residue.

[0649] In some embodiments, the modified AAV capsid protein can comprise a peptide segment has a sequence of P₁P₂QP₄GGP₇P₈NDNP₁₂ (SEQ ID NO: 44923), wherein P₁, P₂, P₄, P₇, P₈, and P₁₂ are independently selected from any amino acid residue.

[0650] In some embodiments, the modified AAV capsid protein can comprise a peptide segment having a sequence of P₁P₂TP₄GGP₇TNDNP₁₂ (SEQ ID NO: 44924), wherein P₁, P₂, P₄, P₇, and P₁₂ are independently selected from any amino acid residue.

[0651] In some embodiments, the modified AAV capsid protein can comprise a peptide segment has a sequence of NP₂TP₄GGP₇P₈NDNP₁₂ (SEQ ID NO: 44925), wherein P₂, P₄, P₇, P₈, and P₁₂ are independently selected from any amino acid residue.

[0652] In some embodiments, the modified AAV capsid protein can comprise a peptide segment has a sequence of SP₂TP₄GGP₇P₈NDNP₁₂ (SEQ ID NO: 44926), wherein P₂, P₄, P₇, P₈, and P₁₂ are independently selected from any amino acid residue.

[0653] In some embodiments, a modified adeno-associated virus (AAV) capsid protein includes a reference AAV capsid protein with one or more modifications to comprise a peptide segment within variable region I (VR I) of the reference AAV capsid protein, where the peptide segment has an amino acid sequence of P₁P₂P₃P₄P₅P₆P₇P₈P₉P₁₀P₁₁P₁₂, wherein positions P₅, P₆, or a combination thereof, are not modified compared to a reference AAV capsid protein. In some embodiments, a modified adeno-associated virus (AAV) capsid protein includes a reference AAV capsid protein with one or more modifications to comprise a peptide segment within variable region I (VR I) of the reference AAV capsid protein, where the peptide segment has an amino acid sequence of P₁P₂P₃P₄P₅P₆P₇P₈P₉P₁₀P₁₁P₁₂, wherein positions P₅, P₆, P₉, P₁₀, and P₁₁, or a combination thereof, are not modified compared to a reference AAV capsid protein.

[0654] In another aspect, the present disclosure provides a modified adeno-associated virus (AAV) capsid protein comprising a reference AAV capsid protein with one or more modifications to comprise a peptide segment within variable region I (VR I) of the reference AAV capsid protein, wherein the peptide segment has an amino acid sequence of NSTSGGP₇P₈NDNH (SEQ ID NO: 44927), wherein P₇ and P₈ are independently selected from any amino acid residue. In some embodiments, P₇ is independently selected from an alanine (A) or a serine (S) and P₈ is independently selected from a serine (S) or a threonine (T). In some embodiments, the modified adeno-associated virus (AAV) capsid protein comprises a peptide segment within variable region I (VR I), wherein the peptide segment has an amino acid sequence of NSTSGGP₇P₈NDNH (SEQ ID NO: 44927), wherein P₇ and P₈ are independently selected from any amino acid residue. In some embodiments, P₇ is independently selected from an alanine (A) or a serine (S) and P₈ is independently selected from a serine (S) or a threonine (T). In some embodiments, the peptide segment includes (i) NSTSGGASNDNH (SEQ ID NO: 46026), (ii) NSTSGGATNDNH (SEQ ID NO: 46029), (iii) NSTSGGSSNDNH (SEQ ID NO: 46031), (iv) NSTSGGSTNDNH (SEQ ID NO: 46034), or a corresponding sequence having one or more modifications (e.g., insertion, deletion, mutation, and/or substitution).

[0655] In another aspect, the present disclosure provides a modified adeno-associated virus (AAV) capsid protein comprising a reference AAV capsid protein with one or more modifications to comprise a peptide segment within variable region I (VR I) of the reference AAV capsid protein, wherein the peptide segment has an amino acid sequence of NSTTGGP₇P₈NDNH (SEQ ID NO: 44928), wherein P₇ and P₈ are independently selected from any amino acid residue. In some embodiments, P₇ is independently selected from an alanine (A) or a serine (S) and P₈ is independently selected from a serine (S) or a threonine (T). In some embodiments, the modified adeno-associated virus (AAV) capsid protein comprises a peptide segment within variable region I (VR I), wherein the peptide segment has an amino acid sequence of NSTTGGP₇P₈NDNH (SEQ ID NO: 44928), wherein P₇ and P₈ are independently selected from any amino acid residue. In some embodiments, P₇ is independently selected from an alanine (A) or a serine (S) and Pa is independently selected from a serine (S) or a threonine (T). In some embodiments, the peptide segment includes: (i) NSTTGGASNDNH (SEQ ID NO: 46073), (ii) NSTTGGATNDNH (SEQ ID NO: 46076), (iii) NSTTGGSSNDNH (SEQ ID NO: 46079), (iv) NSTTGGSTNDNH (SEQ ID NO: 46082), or a corresponding sequence having one or more modifications (e.g., insertion, deletion, mutation, and/or substitution).

[0656] In another aspect, the present disclosure provides a modified adeno-associated virus (AAV) capsid protein comprising a reference AAV capsid protein with one or more modifications to comprise a peptide segment within variable region I (VR I) of the reference AAV capsid protein, wherein the peptide segment has an amino acid sequence of SGQTGGP₇P₈NDNH (SEQ ID NO: 44929), wherein P₇ and P₈ are independently selected from any amino acid residue. In some embodiments, P₇ is independently selected from an alanine (A) or a serine (S) and P₈ is independently selected from a serine (S) or a threonine (T). In some embodiments, the modified adeno-associated virus (AAV) capsid protein comprises a peptide segment within variable region I (VR I), wherein the peptide segment has an amino acid sequence of SGQTGGP₇P₈NDNH (SEQ ID NO: 44929), wherein P₇ and P₈ are independently selected from any amino acid residue. In some embodiments, P₇ is independently selected from an alanine (A) or a serine (S) and Pa is independently selected from a serine (S) or a threonine (T). In some embodiments, the peptide segment includes: (i) SGQTGGASNDNH (SEQ ID NO: 46505), (ii) SGQTGGATNDNH (SEQ ID NO: 46508), (iii) SGQTGGSSNDNH (SEQ ID NO: 46511), (iv) SGQTGGSTNDNH (SEQ ID NO: 46514), or a corresponding sequence having one or more modifications (e.g., insertion, deletion, and/or substitution).

[0657] In another aspect, the present disclosure provides a modified adeno-associated virus (AAV) capsid protein comprising a reference AAV capsid protein with one or more modifications to comprise a peptide segment within variable region I (VR I) of the reference AAV capsid protein, wherein the peptide segment has an amino acid sequence of SGTAGGP₇P₈NDNT (SEQ ID NO: 44930), wherein P₇ and P₈ are independently selected from any amino acid residue. In some embodiments, P₇ is independently selected from an alanine (A) or a serine (S) and P₈ is independently selected from a serine (S) or a threonine (T). In some embodiments, the modified adeno-associated virus (AAV) capsid protein comprises a peptide segment within variable region I (VR I), wherein the peptide segment has an amino acid sequence of SGTAGGP₇P₈NDNT (SEQ ID NO: 44930), wherein P₇ and P₈ are independently selected from any amino acid residue. In some embodiments, P₇ is independently selected from an alanine (A) or a serine (S) and Pa is independently selected from a serine (S) or a threonine (T). In some embodiments, the peptide segment has a sequence of (i) SGTAGGASNDNT (SEQ ID NO: 46554), (ii) SGTAGGSSNDNT (SEQ ID NO: 46560), or a corresponding sequence having one or more modifications (e.g., insertion, deletion, and/or substitution). In some embodiments, the peptide segment does not comprise SGTAGGATNDNT (SEQ ID NO: 46557) or SGTAGGSINDNT (SEQ ID NO: 46563).

[0658] In another aspect, the present disclosure provides a modified adeno-associated virus (AAV) capsid protein comprising a reference AAV capsid protein with one or more modifications to comprise a peptide segment within variable region I (VR I) of the reference AAV capsid protein, wherein the peptide segment has an amino acid sequence of SGTSGGP₇P₈NDNA (SEQ ID NO: 44931), wherein P₇ and P₈ are independently selected from any amino acid residue. In some embodiments, P₇ is independently selected from an alanine (A) or a serine (S) and Pa is independently selected from a serine (S) or a threonine (T). In some embodiments, the modified adeno-associated virus (AAV) capsid protein comprises a peptide segment within variable region I (VR I), wherein the peptide segment has an amino acid sequence of SGTSGGP₇P₈NDNA (SEQ ID NO: 44931), wherein P₇ and P₈ are independently selected from any amino acid residue. In some embodiments, P₇ is independently selected from an alanine (A) or a serine (S) and Pa is independently selected from a serine (S) or a threonine (T). In some embodiments, the peptide segment includes: (i) SGTSGGASNDNA (SEQ ID NO: 46600), (ii) SGTSGGATNDNA (SEQ ID NO: 46600), (iii) SGTSGGSSNDNA (SEQ ID NO: 46603), (iv) SGTSGGSINDNA (SEQ ID NO: 46609), or a corresponding sequence having one or more modifications (e.g., insertion, deletion, and/or substitution).

[0659] In another aspect, the present disclosure provides a modified adeno-associated virus (AAV) capsid protein comprising a reference AAV capsid protein with one or more modifications to comprise a peptide segment within variable region I (VR I) of the reference AAV capsid protein, wherein the peptide segment has an amino acid sequence of SGTTGGP₇P₈NDNT (SEQ ID NO: 44932), wherein P₇ and P₈ are independently selected from any amino acid residue. In some embodiments, P₇ is independently selected from an alanine (A) or a serine (S) and P₈ is independently selected from a serine (S) or a threonine (T). In some embodiments, the modified adeno-associated virus (AAV) capsid protein comprises a peptide segment within variable region I (VR I) of the reference AAV capsid protein, wherein the peptide segment has an amino acid sequence of SGTTGGP₇P₈NDNT (SEQ ID NO: 44932), wherein P₇ and P₈ are independently selected from any amino acid residue. In some embodiments, P₇ is independently selected from an alanine (A) or a serine (S) and P₈ is independently selected from a serine (S) or a threonine (T). In some embodiments, the peptide segment includes: (i) SGTTGGASNDNT (SEQ ID NO: 46650), (ii) SGTTGGATNDNT (SEQ ID NO: 46653), (iii) SGTTGGSSNDNT (SEQ ID NO: 46656), (iv) SGTTGGSTNDNT (SEQ ID NO: 46659), or a corresponding sequence having one or more modifications (e.g., insertion, deletion, and/or substitution). In some embodiments, the peptide segment is SGTTGGSSNDNT (SEQ ID NO: 46656).

[0660] In another aspect, the present disclosure provides a modified adeno-associated virus (AAV) capsid protein comprising a reference AAV capsid protein with one or more modifications to comprise a peptide segment within variable region I (VR I) of the reference AAV capsid protein, wherein the peptide segment has an amino acid sequence of SSTAGGP₇P₈NDNA (SEQ ID NO: 44933), wherein P₇ and P₈ are independently selected from any amino acid residue. In some embodiments, P₇ is independently selected from an alanine (A) or a serine (S) and P₈ is independently selected from a serine (S) or a threonine (T). In some embodiments, the modified adeno-associated virus (AAV) capsid protein comprises a peptide segment within variable region I (VR I), wherein the peptide segment has an amino acid sequence of SSTAGGP₇P₈NDNA (SEQ ID NO: 44933), wherein P₇ and P₈ are independently selected from any amino acid residue. In some embodiments, P₇ is independently selected from an alanine (A) or a serine (S) and P₈ is independently selected from a serine (S) or a threonine (T). In some embodiments, the peptide segment includes: (i) SSTAGGASNDNA (SEQ ID NO: 47128), (ii) SSTAGGATNDNA (SEQ ID NO: 47131), (iii) SSTAGGSSNDNA (SEQ ID NO: 47134), (iv) SSTAGGSTNDNA (SEQ ID NO: 47137), or a corresponding sequence having one or more modifications (e.g., insertion, deletion, and/or substitution). In some embodiments, the peptide segment is SSTAGGASNDNA (SEQ ID NO: 47128). In some embodiments, the peptide segment is SSTAGGATNDNA (SEQ ID NO: 47131).

[0661] In some embodiments, the peptide segment is NSTSGASTNDNA (SEQ ID NO: 48390).

[0662] In some embodiments, the peptide segment is selected a peptide segment as shown in Table 20.

[0663] In some embodiments, a modified AAV capsid protein of the present disclosure can change the tropism, specificity and/or bio-distribution of an AAV comprising the modified AAV capsid protein. In some embodiments, an AAV comprising the modified AAV capsid protein has increased targeting to a target cell, tissue or organ when administered to a subject. In some embodiments, an AAV comprising the modified AAV capsid protein has decreased distribution outside of a target cell, tissue or organ when administered to a subject.

[0664] In some embodiments, tropism of a modified AAV capsid protein can be measured using an enrichment score. A non-limiting example of an enrichment score is based on the combination of amino acid residues present in the modified sequence within VR I, where the modified sequence includes P₁P₂P₃P₄P₅P₆P₇P₈P₉P₁₀P₁₁P₁₂. FIG. 52A provides an exemplary enrichment score formula, which is reproduced below.

$$Enrichment score = {a}_{0} + {a}_{1} {X}_{1} T + {a}_{2} {X}_{1} S + {a}_{3} {X}_{2} S + {a}_{4} {X}_{3} E + {a}_{5} {X}_{3} Q + {a}_{5} {X}_{3} T + … + {a}_{13} {X}_{12} H + {a}_{14} {X}_{12} T$$

where X₁ refers to, for example, amino acid position 1 (i.e., P₁), a refers to the metric calculated for the assigned amino acid residue at the amino acid position, and “T”, “S”, “E”, “Q”, “H”, and “T” refer to the amino acid residue at the X amino acid position.

### 6.2.6. Variable Region I (VR I)

[0665] In some embodiments, variable region I (VR I) corresponds to sequences between about position 259 to about position 275 in the modified AAV capsid protein. In some embodiments, variable region I (VR I) corresponds to sequences between about position 259 to about position 275 in the reference AAV capsid protein (e.g., any of the reference AAV capsid proteins described herein (sec. e.g., Section 4.2.4).

[0666] In some embodiments, a modified adeno-associated virus (AAV) capsid protein comprises a reference AAV capsid protein with one or more modifications to comprise a peptide segment within variable region I (VR I) of the reference AAV capsid protein

[0667] In some embodiments, the peptide segment is at a position between S261 and Y274 of an AAV9 capsid protein (SEQ ID NO: 61).

[0668] In some embodiments, the peptide segment is at a position c between S260 and Y273 of an Anc80 capsid protein (SEQ ID NO: 132).

[0669] In some embodiments, the peptide segment is at a position between S260 and Y273 of an Anc80L65 capsid protein (SEQ ID NO: 142).

[0670] In some embodiments, the peptide segment is at a position S260 and Y273 of an AAV2 capsid protein (SEQ ID NO: 55).

### 6.2.7. Other Modifications

[0671] In some embodiments, the modified AAV capsid protein comprises one or more additional modifications compared to a reference AAV capsid protein. The one or more additional modifications can be a insertion, deletion, substitution or a combination thereof, and can be located in the VRVIII or outside of the VRVIII.

[0672] In some embodiments, the modified AAV capsid protein is different from the reference AAV capsid protein by having one or more amino acid substitutions at a variable region of the reference AAV capsid protein. In some embodiments, the one or more amino acid substitutions is at a variable region, VR I, of the reference AAV capsid protein (FIG. 1).

[0673] The modified AAV capsid protein can be biologically or chemically produced. The modified AAV capsid protein can have tropism, specificity or localization different from the reference AAV capsid protein, particularly in liver, when administered to a mammalian subject. The mammalian subject can be a human, non-human primate (NHP), mice, rats, birds, rabbits, guinea pigs, hamsters, farm animals (including pigs and sheep), dogs, or cats.

[0674] In some embodiments, the modified AAV capsid protein comprises a sequence different from a reference AAV capsid protein by having an amino acid substitution at an amino acid position corresponding to position 266 in Anc80 VP1 and/or at an amino acid position corresponding to position 168 in Anc80 VP1.

[0675] In some embodiments, the modified AAV capsid protein comprises a sequence different from a reference AAV capsid protein by having (1) an alanine (A) amino acid residue at an amino acid position corresponding to position 266 in Anc80 VP1 or (2) a lysine (K) amino acid residue at an amino acid position corresponding to position 168 in Anc80 VP1. In some embodiments, the modified AAV capsid protein comprises a sequence different from a reference AAV capsid protein by having (1) an alanine (A) amino acid residue at an amino acid position corresponding to position 266 in Anc80 VP1 and (2) a lysine (K) amino acid residue at an amino acid position corresponding to position 168 in Anc80 VP1.

[0676] In some embodiments, the modified AAV capsid protein comprises a sequence different from a reference AAV capsid protein by having a glycine (G) amino acid residue at an amino acid position corresponding to position 266 in Anc80; or an arginine (R) amino acid residue at an amino acid position corresponding to position 168 in Anc80. In some embodiments, the modified AAV capsid protein comprises a sequence different from a reference AAV capsid protein by having a glycine (G) amino acid residue at an amino acid position corresponding to position 266 in Anc80; and an arginine (R) amino acid residue at an amino acid position corresponding to position 168 in Anc80.

[0677] An amino acid position corresponding to position 266 in Anc80 VP1 and an amino acid position corresponding to position 168 in Anc80 VP1 in various VP1 protein sequences are indicated with boxes in FIGS. 3A-C and FIGS. 4A-D.

[0678] In some embodiments, the modified AAV capsid protein is different from a reference AAV capsid protein only at an amino acid position corresponding to position 266 in Anc80 VP1 or an amino acid position corresponding to position 168 in Anc80 VP1, other than the targeting peptide. In some embodiments, the modified AAV capsid protein is different from a reference AAV capsid protein only at two amino acid positions—an amino acid position corresponding to position 266 in Anc80 VP1 and an amino acid position corresponding to position 168 in Anc80 VP1, other than the targeting peptide. In some embodiments, the modified AAV capsid protein is different from a reference AAV capsid protein by more than the two amino acid substitutions.

[0679] In some embodiments, the modified AAV capsid protein comprises a sequence different from a reference AAV capsid protein by having an alanine (A) amino acid residue at an amino acid position corresponding to position 267 in AAV9 VP1 protein or a threonine (T) amino acid residue at an amino acid position corresponding to position 269 in AAV9 VP1. In some embodiments, the modified AAV capsid protein comprises a sequence different from a reference AAV capsid protein by having an alanine (A) amino acid residue at an amino acid position corresponding to position 267 in AAV9 VP1 protein and a threonine (T) amino acid residue at an amino acid position corresponding to position 269 in AAV9 VP1. In some embodiments, the modified AAV capsid protein is different from a reference AAV capsid protein only at an amino acid position corresponding to position 267 in AAV9 VP1 protein or an amino acid position corresponding to position 269 in AAV9 VP1, other than the targeting peptide. In some embodiments, the modified AAV capsid protein is different from a reference AAV capsid protein only at two amino acid positions—an amino acid position corresponding to position 267 in AAV9 VP1 protein and an amino acid position corresponding to position 269 in AAV9 VP1, other than the targeting peptide.

[0680] In some embodiments, a reference AAV capsid is an AAV capsid protein disclosed in WO2019/217911, which is incorporated by reference in its entirety herein.

[0681] In particular, an AAV capsid protein that is described therein to generate a “liver off” (“liver de-targeting”) AAV can be used in embodiments herein. In other embodiments, an AAV capsid protein that is described therein to generate a “liver on” (“liver targeting”) AAV can be used herein.

[0682] In some embodiments, two amino acid positions corresponding to position 266 and position 168 of Anc80 VP1 protein are used as liver-toggle positions. In some embodiments, AAV with a capsid protein having an alanine (A) amino acid residue at an amino acid position corresponding to position 266 in Anc80 VP1 or b) a lysine (K) amino acid residue at an amino acid position corresponding to position 168 in Anc80 VP1 exhibits liver-off phenotypes. In some embodiments, AAV with a capsid protein having a glycine (G) amino acid residue at an amino acid position corresponding to position 266 in Anc80 VP1 or b) an arginine (R) amino acid residue at an amino acid position corresponding to position 168 in Anc80 VP1 exhibits liver-on phenotypes.

[0683] In some embodiments, more than one toggle region residues are introduced to enhance the liver-off or the liver-on phenotypes. In some embodiments, a double mutant AAV9 G267A S269T is used.

[0684] In some embodiments, a reference AAV capsid is Anc80L65 capsid protein with a G266A mutation. In some embodiments, a reference AAV capsid is Anc80-55 capsid protein with a G266A mutation. In some embodiments, a reference AAV capsid is Anc80-129 capsid protein with a G266A mutation. In some embodiments, a reference AAV capsid is Anc80-156 capsid protein with a G266A mutation. In some embodiments, a reference AAV capsid is Anc80-751 capsid protein with a G266A mutation. In some embodiments, a reference AAV capsid is Anc80-1029 capsid protein with a G266A mutation. In some embodiments, a reference AAV capsid is Anc80-1712 capsid protein with a G266A mutation. In some embodiments, a reference AAV capsid is AAV9 capsid protein with a G267A mutation. In some embodiments, a reference AAV capsid is AAV9 capsid protein with G267A and S269T mutations.

[0685] In some embodiments, a reference AAV capsid comprises (1) an alanine (A) amino acid residue at an amino acid position corresponding to position 504 in AAV9; and (2) an alanine (A) amino acid residue at an amino acid position corresponding to position 505 in AAV9.

[0686] In some embodiments, the modified AAV capsid protein does not include one or more modifications as described in WO2019/217911 or WO 2021/050614. WO 2021/050614 showed that in a non-naturally occurring AAV capsid that A266 variants were less efficient in liver uptake compared to G266 variants. Amino acid position 266 from Anc80 in WO 2021/050614 corresponds to position 267 in AAV9 VP1. In some embodiments, the reference AAV capsid protein does not include an alanine (A) at an amino acid position corresponding to position 267 in AAV9 VP1. In some embodiments, the one or more modifications to a reference AAV capsid protein to comprise a peptide segment within variable region I (VR I) do not include modification to an alanine (A) at an amino acid position corresponding to position 267 in AAV9 VP1. In some embodiments, the reference AAV capsid protein comprises a glycine (G) at an amino acid position corresponding to position 267 in AAV9 VP1.

[0687] In some embodiments, the modified AAV capsid protein does not include an alanine (A) at an amino acid position corresponding to position 267 in AAV9 VP1 protein and a threonine (T) at an amino acid position corresponding to position 269 in AAV9 VP1. In some embodiments, the modified AAV capsid protein does not include an alanine (A) at an amino acid position corresponding to position 267 in AAV9 VP1 protein and a threonine (T) at an amino acid position corresponding to position 269 in AAV9 VP1.

### 6.2.8. Combinations of Targeting Peptides and Peptide Segments

[0688] In some embodiments, a modified AAV capsid protein comprises: (i) a targeting peptide at a site within VR VIII, wherein the targeting peptide has a sequence selected from SEQ ID NOs: 238-44858; and (ii) a peptide segment within variable region I (VR I), wherein the peptide segment as a sequence selected from SEQ ID NOs: 44935-47387.

[0689] In some embodiments, a modified AAV capsid protein comprises: (i) a targeting peptide at a site within VR VIII, wherein the targeting peptide has a sequence selected from SEQ ID NOs: 44864-44867, 44879-44883, 44911, 44912, 44913, 44918-44919, and 48391-157057; and (ii) a peptide segment within variable region I (VR I), wherein the peptide segment has a sequence selected from SEQ ID NOs: 46026, 46029, 46031, 46035, 46073, 46076, 46079, 46082, 46505, 46508, 46511, 46514, 46554, 46557, 46560, 46563, 46609, 46600, 46603, 46606, 46650, 46653, 46656, 46659, 47128, 47131, 47134, 47137, and 48390.

[0690] In some embodiments, the modified AAV capsid protein comprises an (i) a targeting peptide having an amino acid sequence selected from SEQ ID NOs 44864-44867, 44879-44883, 44911, 44912, 44913, 44918-44919, and 48391-157057; and (ii) a peptide segment that has the amino acid of sequence SGTAGGASNDNT (SEQ ID NO: 46554).

[0691] In some embodiments, the modified AAV capsid protein comprises an (i) a targeting peptide having an amino acid sequence selected from SEQ ID NOs: 44864-44867, 44879-44883, 44911, 44912, 44913, 44918-44919, and 48391-157057; and a peptide segment that has the amino acid sequence of SGTSGGSINDNA (SEQ ID NO: 46609).

[0692] In some embodiments, the modified AAV capsid protein comprises an (i a targeting peptide having an amino acid sequence selected from SEQ ID NOs: 44864-44867, 44879-44883, 44911, 44912, 44913, 44918-44919, and 48391-157057; and (ii) a peptide segment that has the amino acid sequence of SGTTGGSTNDNT (SEQ ID NO: 46659).

[0693] In some embodiments, the modified AAV capsid protein comprises an (i) a targeting peptide having an amino acid sequence selected from SEQ ID NOs: 44864-44867, 44879-44883, 44911, 44912, 44913, 44918-44919, and 48391-157057; and (ii) a peptide segment that has the amino acid sequence of SGTTGGSTNDNT (SEQ ID NO: 47128).

[0694] In some embodiments, the modified AAV capsid protein comprises an (i) a targeting peptide having an amino acid sequence selected from SEQ ID NOs: 44864-44867, 44879-44883, 44911, 44912, 44913, 44918-44919, and 48391-157057; and (ii) a peptide segment that has the amino acid sequence of SSTAGGATNDNA (SEQ ID NO: 47131).

[0695] In some embodiments, the modified AAV capsid protein comprises an (i) a targeting peptide having an amino acid sequence selected from SEQ ID NOs: 44864-44867, 44879-44883, 44911, 44912, 44913, 44918-44919, and 48391-157057; and (ii) a peptide segment that has the amino acid sequence of NSTSGGSSNDNA (SEQ ID NO: 48388).

[0696] In some embodiments, the modified AAV capsid protein comprises an (i) a targeting peptide having an amino acid sequence selected from SEQ ID NOs: 44864-44867, 44879-44883, 44911, 44912, 44913, 44918-44919, and 48391-157057; and (ii) a peptide segment that has the amino acid sequence of NSTSGASTNDNA (SEQ ID NO: 48390).

[0697] In some embodiments, a modified adeno-associated virus (AAV) capsid protein, comprising: a targeting peptide at a site within VR VIII, wherein the targeting peptide has a sequence selected from SEQ ID NOs: 48882, 44864, 44866, 44911, 44918, 98944-157057 and a peptide segment within VR I, wherein the peptide segment has a sequence selected from SEQ ID NOs: 48388, 48390, 46656, 47128, and 47131.

[0698] In some embodiments, a modified adeno-associated virus (AAV) capsid protein, comprising: a targeting peptide at a site within VR VIII, wherein the targeting peptide has a sequence selected from SEQ ID NOs: 44882, 44911, 44918, 49394, and 98944-144426 and a peptide segment within VR I, wherein the peptide segment has a sequence of NSTSGASTNDNA (SEQ ID NO: 48390).

[0699] In some embodiments, a modified adeno-associated virus (AAV) capsid protein, comprising: a targeting peptide at a site within VR VIII, wherein the targeting peptide has a sequence selected from SEQ ID NOs: 44880, 44886, 44864, and 144427-152004 and a peptide segment within VR I, wherein the peptide segment has a sequence of SGTTGGSSNDNT (SEQ ID NO: 46656).

[0700] In some embodiments, a modified adeno-associated virus (AAV) capsid protein, comprising: a targeting peptide at a site within VR VIII, wherein the targeting peptide has a sequence selected from SEQ ID NOs: 44864 and 152005-154530 and a peptide segment within VR I, wherein the peptide segment has a sequence of SSTAGGASNDNA (SEQ ID NO: 47128).

[0701] In some embodiments, a modified adeno-associated virus (AAV) capsid protein, comprising: a targeting peptide at a site within VR VIII, wherein the targeting peptide has a sequence selected from SEQ ID NOs: 44860 and 154531-157056 and a peptide segment within VR I, wherein the peptide segment has a sequence of SSTAGGATNDNA (SEQ ID NO: 47131).

[0702] In some embodiments, a modified adeno-associated virus (AAV) capsid protein, comprising: a targeting peptide at a site within VR VIII, wherein the targeting peptide has a sequence of selected from: SAQRGDRGQI (SEQ ID NO: 44911), SAQRGDHASW (SEQ ID NO: 157057), ENRRGDFNNT (SEQ ID NO: 44880), ENRRGDFNNL (SEQ ID NO: 44864), ENRRGDFQNT (SEQ ID NO: 44866), and SAQRGDLLLS (SEQ ID NO: 44882) and a peptide segment within VR I, wherein the peptide segment has a sequence of NSTSGGSSNDNA (SEQ ID NO: 48388).

### 6.3. Polynucleotides Encoding Modified AAV Capsid Proteins; Vectors; Host Cells

[0703] In another aspect, the present disclosure provides a polynucleotide encoding a modified AAV capsid protein described herein. In some embodiments, the polynucleotide is codon optimized for expression in a bacterial or mammalian cell.

[0704] In some embodiments, the polynucleotide is inserted into an expression vector. In some embodiments, the polynucleotide is operably linked to a promoter or a sequence inducing expression of a protein from the polynucleotide. The present disclosure provides a vector including the polynucleotide encoding a modified AAV capsid protein. The vector can be used for generation of the modified AAV capsid protein. In some embodiments, the vector is used to generate an AAV virion comprising the modified AAV capsid protein. In some embodiments, the vector further comprises an AAV rep protein or a fragment thereof. In some embodiments, the reference capsid protein for the modified AAV capsid protein and the rep protein are originated from an AAV of the same clade. In some embodiments, the reference capsid protein for the modified AAV capsid protein and the rep protein are originated from an AAV of different clades.

[0705] In some embodiments, the polynucleotide is transfected to a host cell. The present disclosure provides a host cell comprising the polynucleotide encoding a modified AAV capsid protein. The host cell can be a prokaryotic cell or eukaryotic cell. In some embodiments, the host cell is a mammalian cell or a yeast cell.

[0706] In some embodiments, the host cell further comprises another polynucleotide encoding an AAV protein. In some embodiments, the host cell comprises a functional rep gene; a recombinant nucleic acid vector comprising AAV inverted terminal repeats (ITRs) and an expressible polynucleotide; and sufficient helper functions to permit packaging of the recombinant nucleic acid vector into the modified AAV capsid protein.

[0707] In some embodiments, the components required for the host cell to package a recombinant nucleic acid vector in a modified AAV capsid protein are provided to the host cell in trans. In some embodiments, any one or more of the required components (e.g., a recombinant nucleic acid vector, rep sequences, cap sequences, and/or helper functions) are provided by a stable host cell which has been engineered to contain one or more of the required components using methods known to those of skill in the art. In some embodiments, such a stable host cell contains the required component(s) under the control of an inducible promoter. In some embodiments, the required component(s) is under the control of a constitutive promoter.

### 6.4. Recombinant Nucleic Acid Vector Containing an Expressible Polynucleotide

[0708] In one aspect, the present disclosure provides a recombinant nucleic acid vector containing an expressible polynucleotide. In some embodiments, the recombinant nucleic acid vector is encapsulated in the modified AAV capsid proteins disclosed herein. In preferred embodiments, the expressible polynucleotide comprises a transgene (in cis or trans configuration with other viral sequences).

[0709] The transgene can be, for example, a reporter gene (e.g., beta-lactamase, beta-galactosidase (LacZ), alkaline phosphatase, thymidine kinase, green fluorescent polypeptide (GFP), chloramphenicol acetyltransferase (CAT), or luciferase, or fusion polypeptides that include an antigen tag domain such as hemagglutinin or Myc), or a therapeutic gene (e.g., genes encoding hormones or receptors thereof, growth factors or receptors thereof, differentiation factors or receptors thereof, immune system regulators (e.g., cytokines and interleukins) or receptors thereof, enzymes, RNAs (e.g., inhibitory RNAs or catalytic RNAs), or target antigens (e.g., oncogenic antigens, autoimmune antigens). In some embodiments, the modified rAAV comprises an expressible polynucleotide encoding a therapeutic tRNA, miRNA, gene editing guide RNA, or RNA-editing guide RNA.

[0710] The transgene can be selected depending, at least in part, on the particular disease or deficiency being treated. Simply by way of example, gene transfer or gene therapy can be applied to the treatment of hemophilia, retinitis pigmentosa, cystic fibrosis, leber congenital amaurosis, lysosomal storage disorders, inborn errors of metabolism (e.g., inborn errors of amino acid metabolism including phenylketonuria, inborn errors of organic acid metabolism including propionic acidemia, inborn errors of fatty acid metabolism including medium-chain acyl-CoA dehydrogenase deficiency (MCAD)), cancer, achromatopsia, cone-rod dystrophies, macular degenerations (e.g., age-related macular degeneration), lipopolypeptide lipase deficiency, familial hypercholesterolemia, spinal muscular atrophy. Duchenne's muscular dystrophy, Alzheimer's disease, Parkinson's disease, obesity, inflammatory bowel disorder, diabetes, congestive heart failure, hypercholesterolemia, hearing loss, coronary heart disease, familial renal amyloidosis, Marfan's syndrome, fatal familial insomnia, Creutzfeldt-Jakob disease, sickle-cell disease, Huntington's disease, fronto-temporal lobar degeneration, Usher syndrome, lactose intolerance, lipid storage disorders (e.g., Niemann-Pick disease, type C), Batten disease, choroideremia, glycogen storage disease type II (Pompe disease), ataxia telangiectasia (Louis-Bar syndrome), congenital hypothyroidism, severe combined immunodeficiency (SCID), and/or amyotrophic lateral sclerosis (ALS). A transgene also can be, for example, an immunogen that is useful for immunizing a subject (e.g., a human, an animal (e.g., a companion animal, a farm animal, an endangered animal). For example, immunogens can be obtained from an organism (e.g., a pathogenic organism) or an immunogenic portion or component thereof (e.g., a toxin polypeptide or a by-product thereof). By way of example, pathogenic organisms from which immunogenic polypeptides can be obtained include viruses (e.g., picornavirus, enteroviruses, orthomyxovirus, reovirus, retrovirus), prokaryotes (e.g., Pneumococci, Staphylococci, Listeria, Pseudomonas), and eukaryotes (e.g., amebiasis, malaria, leishmaniasis, nematodes). It would be understood that the methods described herein and compositions produced by such methods are not to be limited by any particular transgene.

### 6.4.1. MTM1 Transgene

[0711] In certain embodiment, the transgene is the MTM1 transgene for treatment of subjects (preferably human subjects) suffering from XLMTM and/or carrying mutations in the MTM1 gene as described in PCT Application No. PCT/US2022/015842, which is herein incorporated by reference in its entirety.

[0712] A modified rAAV of the present disclosure can be administered to a subject in a suitable pharmaceutical carrier, e.g., as described herein, and as described in PCT Application No. PCT/US2022/015842, which is herein incorporated by reference in its entirety

[0713] Exemplary functional fragments of an MTM1 polypeptide include fragments comprising amino acids 29-486 of SEQ ID NO:165 (i.e., the amino acid sequence of SEQ ID NO: 164). Thus, in certain embodiments, the MTM1 polypeptides comprise amino acid residues 29-486 of SEQ ID NO: 165 or the amino acid sequence of SEQ ID NO:164.

[0714] In some embodiments, the MTM1 polypeptide comprises an amino acid sequence having at least 90%, at least 95%, at least 98%, at least 99% or 100% identity to a functional fragment of human MTM1 having the amino acid sequence of SEQ ID NO: 164. In some embodiments, the MTM1 polypeptide is a full length MTM1 polypeptide (e.g., a polypeptide of SEQ ID NO: 165)

[0715] In other embodiments, the MTM1 polypeptide is a fusion polypeptide comprising an amino acid sequence having at least at least 90%, at least 95%, at least 98%, at least 99% or 100% identity to SEQ ID NO: 164 fused to another polypeptide portion, e.g., one or more polypeptide portions that enhance one or more of in vivo stability, in vivo half-life, uptake/administration, and/or purification. In some embodiments, the polypeptide portion is an internalizing moiety.

[0716] In some embodiments, the MTM1 coding sequence comprises a nucleotide sequence having at least 80% sequence identity to SEQ ID NO: 166, which is of the native MTM1 coding sequence, or a portion thereof encoding a functional fragment of wild type MTM1, e.g., the functional fragment corresponding to amino acids 29-486 of MTM1 (SEQ ID NO: 164). In certain embodiments, the MTM1 coding sequence comprises a nucleotide sequence at least 80%, at least 85%, at least 90%, at least 95%, at least 97%, at least 98%, at least 99% or 100% identical to SEQ ID NO: 166 or a portion thereof encoding a functional fragment of wild type MTM1, e.g., the functional fragment corresponding to amino acids 29-486 of MTM1 (SEQ ID NO:164).

[0717] In other embodiments, the MTM1 coding sequence comprises a nucleotide sequence having at least 80% sequence identity to any of SEQ ID NOs: 167, 168 and 169, which are codon-optimized for expression in human cells, or to a portion of any of SEQ ID NOs: 167, 168 and 169 encoding a functional fragment of wild type MTM1, e.g., the functional fragment corresponding to amino acids 29-486 of MTM1 (SEQ ID NO: 164). In certain embodiments, the MTM1 coding sequence comprises a nucleotide sequence at least 80%, at least 85%, at least 90%, at least 95%, at least 97%, at least 98%, at least 99% or 100% identical to any one of SEQ ID NOs: 167, 168 and 169, or to or to a portion of any of SEQ ID NOs: 167, 168 and 169 encoding a functional fragment of wild type MTM1, e.g., the functional fragment corresponding to amino acids 29-486 of MTM1 (SEQ ID NO:164).

[0718] In some embodiments, the MTM1 coding sequence may further comprise a nucleotide sequence that encodes a linker and/or an internalizing moiety. In some embodiments, the internalizing moiety is an antibody or an antigen-binding fragment thereof.

### 6.4.2. Regulatory Sequences

[0719] The recombinant nucleic acid vector of the disclosure typically comprise regulatory sequences operably linked to expressible polynucleotide (e.g., the MTM1 coding sequence), for example, as described in PCT Application No. PCT/US2022/015842, which is herein incorporated by reference in its entirety. The regulatory sequence can comprise a promoter, an enhancer, and/or a repressor. In some embodiments, the regulatory sequence is tissue specific. For example, the regulatory sequence induces expression of a transgene in a specific target such as heart, liver, skeletal muscle, cardiac muscle, or other muscle.

[0720] Other suitable features of the rAAV include ITR sequences (e.g., wild type ITRs or a combination of wild type ITR sequences and an ITR sequence lacking a functional terminal resolution site, for example as set forth in SEQ ID NO: 178 and SEQ ID NO: 179), a intron (e.g., a chimeric intron comprising human herpesvirus beta and human globin 3 intronic sequences, for example as set forth in SEQ ID NO:176), a splice acceptor sequence 5′ of the MTM1 coding sequence (e.g., a human globin 3 splice acceptor sequence, for example as set forth in SEQ ID NO: 180), a polyadenylation sequence (e.g., a rabbit globin polyadenylation sequence, for example as set forth in SEQ ID NO: 177).

### 6.4.2.1 CAG Promoters

[0721] Certain embodiments of the present disclosure are based in part on the discovery that an ERE comprising a CAG promoter can drive far greater expression levels of the expressible polynucleotide (e.g., MTM1 coding sequence) than the desmin promoter in clinical development, for example, as described in PCT Application No. PCT/US2022/015842, which is herein incorporated by reference in its entirety. Without being bound by theory, it is believed the rAAV with the MTM1 coding sequence under the control of the CAG promoter can be therapeutically effective at lower doses than corresponding vectors in which the MTM1 coding sequence is under the control of the desmin promoter, and thus such vectors are believed to have improved therapeutic indexes as compared to corresponding vectors in which the MTM1 coding sequence is under the control of the desmin promoter.

[0722] In some embodiments, the CMV enhancer component of the CAG promoter or ERE comprises a sequence having at least 90%, at least 95%, at least 98%, at least 99% or 100% sequence identity to SEQ ID NO: 171.

[0723] In some embodiments, the chicken beta actin promoter component of the CAG promoter or ERE comprises a nucleotide sequence having at least 90%, at least 95%, at least 98%, at least 99% or 100% sequence identity to SEQ ID NO:172.

[0724] In some embodiments, the CAG promoter or ERE comprises a nucleotide sequence having at least 90%, at least 95%, at least 98%, at least 99% or 100% sequence identity to SEQ ID NO: 173.

[0725] An exemplary CAG ERE is used in the rAVE expression cassette (GeneDetect.com).

[0726] In some embodiments, the CAG ERE further comprises a chimeric intron, for example a chimeric intron formed from introns from the human betaherpes virus and rabbit beta globin. In some embodiments, the chimeric intron comprises a nucleotide sequence having at least 90%, at least 95%, at least 98%, at least 99% or 100% sequence identity to SEQ ID NO:174.

[0727] Further modifications of the CAG promoter can be used in the rAAV of the disclosure. For example, the intron in the 5′ untranslated region (UTR) of the CAG promoter can be truncated to accommodate larger inserts (Richardson et al., 2009, PLOS One, 4 (4), e5308. doi: 10.1371/journal.pone.0005308). Deletions in intron A of the hCMV promoter can also result in enhanced expression (Quilici et al., 2013, Biotechnol Lett. 35 (1), 21-27. doi: 10.1007/s10529-012-1043-z). Thus, a person skilled in the art could modify the CAG ERE or promoter sequences without compromising the high MTM1 expression levels observed with the constructs disclosed in Example 7.

### 6.4.2.2 Other Promoters

[0728] The rAAV of the disclosure may comprise, in lieu of a CAG ERE, an ERE comprising another constitutive promoter or a tissue specific or inducible promoter. Promoters that drive lower expression levels than a CAG promoter may be combined with other features that increase transgene expression (e.g., using codon optimized coding sequences) and/or reduce off target tropism of the virus (e.g., using muscle targeting and/or liver toggle capsid proteins).

[0729] In various embodiments the promoter is a constitutive, tissue-specific (e.g., muscle-specific) or inducible promoter. The promoters may be either naturally occurring promoters, or hybrid promoters that combine elements of more than one promoter.

[0730] In some embodiments, the promoter is a skeletal-muscle specific promoter. In some embodiments, the promoter is a cardiac-specific promoter.

[0731] Examples of constitutive promoters include, without limitation, a retroviral Rous sarcoma virus (RSV) LTR promoter (optionally with an RSV enhancer), a cytomegalovirus (CMV) promoter (optionally with a CMV enhancer), a SV40 promoter, a dihydrofolate reductase promoter, a β-actin promoter, a phosphoglycerol kinase (PGK) promoter, and a EF1α promoter.

[0732] Examples of tissue-specific promoters include, without limitation a synapsin-1 (Syn) promoter, a creatine kinase (MCK) promoter, a mammalian desmin (DES) promoter, an α-myosin heavy chain (a-MHC) promoter, or a cardiac Troponin T (cTnT) promoter.

[0733] Examples of inducible promoters include a zinc-inducible metallothionine (MT) promoter, a dexamethasone (Dex)-inducible mouse mammary tumor virus (MMTV) promoter, a tetracycline-inducible promoter, or a rapamycin-inducible promoter.

### 6.5. Modified AAV Virions

[0734] The present disclosure further provides a modified recombinant AAV (rAAV) virion comprising a modified AAV capsid protein described herein. In some embodiments, the modified rAAV comprises a modified AAV capsid protein and a recombinant nucleic acid vector.

[0735] In some embodiments, the modified rAAV comprising a modified AAV capsid protein achieves higher infection of a target following administration to a mammalian subject as compared to an rAAV comprising a corresponding reference AAV capsid protein. In some embodiments, the modified rAAV achieves higher expression in a target of an expressible polynucleotide within the recombinant nucleic acid vector following administration to a mammalian subject when compared to expression of the expressible polynucleotide administered in an rAAV comprising a corresponding reference AAV capsid protein.

[0736] In some embodiments, the modified rAAV comprising a modified AAV capsid protein achieves lower infection of an off-target following administration to a mammalian subject as compared to an rAAV comprising a corresponding reference AAV capsid protein. In some embodiments, the modified rAAV achieves lower expression in an off-target of an expressible polynucleotide within the recombinant nucleic acid vector following administration to a mammalian subject as compared to expression of the expressible polynucleotide administered in an rAAV comprising a corresponding reference AAV capsid protein. In typical embodiments, the corresponding reference AAV capsid protein is a capsid protein identical to the modified AAV capsid protein except that it does not include a targeting peptide and/or a liver-toggle mutation described above.

[0737] In some embodiments, the target is brain, muscle, spinal cord, eye, liver, muscle, or other organ. In some embodiments, the off-target tissue is brain, muscle, spinal cord, eye, liver, muscle, or other organ. In one embodiment, the target is muscle.

[0738] In some embodiments, the modified rAAV has less liver toxicity than an rAAV comprising a corresponding reference AAV capsid protein administered by the same route of administration and in the same dose. In some embodiments, the less liver toxicity is because of de-targeting of the modified rAAV to a liver.

### 6.6. Methods of Producing rAAV

[0739] The rAAV of the disclosure comprise a recombinant nucleic acid vector containing an expressible polynucleotide. In some embodiments, the expressible polynucleotide is operably linked to an ERE. The expressible polynucleotide and ERE optionally replace the AAV genomic coding region (e.g., replace the AAV rep and cap genes). The expressible polynucleotide and ERE are generally flanked on either side by AAV inverted terminal repeat (ITR) regions, although a single ITR may be sufficient to carry out the functions normally associated with configurations comprising two ITRs (see, for example, WO 94/13788), and vector constructs with only one ITR can thus be employed in conjunction with the rAAV of the present disclosure.

[0740] In some embodiments, the rAAV of the disclosure comprise an MTM1 coding sequence operably linked to an ERE. The MTM1 coding sequence and ERE optionally replace the AAV genomic coding region (e.g., replace the AAV rep and cap genes).

[0741] In order to replicate and package the vector, the missing functions are complemented with a packaging gene, or a plurality thereof, which together encode the necessary functions for the various missing rep and/or cap gene products. The packaging genes or gene cassettes are in one embodiment not flanked by AAV ITRs and in one embodiment do not share any substantial homology with the rAAV genome.

[0742] The rAAV vector construct, and the complementary packaging gene constructs can be implemented in a number of different forms. Viral particles, plasmids, and stably transformed host cells can all be used to introduce such constructs into the packaging cell, either transiently or stably.

[0743] In certain embodiments of this invention, the AAV vector and complementary packaging gene(s), if any, are provided in the form of bacterial plasmids, AAV particles, or any combination thereof. In other embodiments, either the AAV vector sequence, the packaging gene(s), or both, are provided in the form of genetically altered (preferably inheritably altered) eukaryotic cells. The development of host cells inheritably altered to express the AAV vector sequence, AAV packaging genes, or both, provides an established source of the material that is expressed at a reliable level.

[0744] A variety of different genetically altered cells can thus be used in the context of this invention. By way of illustration, a mammalian host cell may be used with at least one intact copy of a stably integrated rAAV vector. An AAV packaging plasmid comprising at least an AAV rep gene operably linked to a promoter can be used to supply replication functions (as described in U.S. Pat. No. 5,658,776). Alternatively, a stable mammalian cell line with an AAV rep gene operably linked to a promoter can be used to supply replication functions (see, e.g., WO 95/13392; WO 98/23018; and U.S. Pat. No. 5,656,785). The AAV cap gene, providing the encapsidation proteins as described above, can be provided together with an AAV rep gene or separately (see, e.g., the above-referenced patent documents as well as WO 98/27204.

[0745] Thus, the rAAV of the disclosure can be assembled by, for example, expression of its components in a packaging host cell. The components of a virus particle (e.g., rep sequences, cap sequences, inverted terminal repeat (ITR) sequences) can be introduced into a packaging host cell using one or more viral vectors.

[0746] Once assembled, rAAV particles can be purified, if desired, using routine methods. As used herein, “purified” virus particles refer to virus particles that are removed from components in the mixture in which they were made such as, but not limited to, viral components (e.g., rep sequences, cap sequences), packaging host cells, and partially- or incompletely-assembled virus particles.

### 6.7. Pharmaceutical Composition Comprising Modified rAAV

[0747] In one aspect, the present disclosure provides a pharmaceutical composition comprising a modified AAV capsid protein or a modified rAAV of the present disclosure and a pharmaceutically acceptable carrier. The modified rAAV can comprise a modified AAV capsid protein as described herein and a recombinant nucleic acid vector containing an expressible polynucleotide.

[0748] In particular embodiments, the present disclosure provides a pharmaceutical composition comprising an rAAV whose genome comprising an MTM1 coding sequence operably linked to an expression regulatory element (ERE); and one, two or all three of the following features: (a) the ERE is a hybrid expression regulatory element (ERE) comprising a CMV enhancer and a chicken beta actin promoter operably linked to the MTM1 coding sequence; and/or (b) the rAAV comprises a modified AAV capsid protein comprising at least one liver-toggle mutation and/or one muscle-targeting element; and/or (c) the MTM1 coding sequence is codon optimized for expression in human cells, optionally wherein the coding sequence has at least 90%, at least 95%, at least 98% or at least 99% sequence identity to any one of SEQ ID NOS: 167 to 170.

[0749] The pharmaceutical composition can be used to deliver the recombinant nucleic acid vector to a target within a mammalian subject. When the pharmaceutical composition is administered, the modified rAAV can achieve a higher infection of target cells following administration to a mammalian subject as compared to an rAAV comprising a corresponding reference AAV capsid protein administered by the same route of administration and in the same dose. In some embodiments, the modified rAAV achieves higher expression in target cells of an expressible polynucleotide within the recombinant nucleic acid genome following administration to a mammalian subject as compared to the expressible polynucleotide administered in an rAAV comprising a corresponding reference AAV capsid protein administered by the same route of administration and in the same dose.

[0750] The pharmaceutical composition can be formulated using one or more carriers, excipients, stabilizers and adjuvants to, for example: (1) increase stability; (2) increase cell transfection or transduction; (3) permit the sustained or delayed release; (4) alter the biodistribution (e.g., target the rAAV particle to specific tissues or cell types); (5) increase the translation of encoded protein in vivo; and/or (6) alter the release profile of encoded protein in vivo.

[0751] Formulations of the pharmaceutical compositions provided herein can include, without limitation, saline, which may be formulated with a variety of buffering solutions (e.g., phosphate buffered saline), lactose, sucrose, calcium phosphate, gelatin, dextran, agar, pectin, water, lipidoids, liposomes, lipid nanoparticles, polymers, lipoplexes, core-shell nanoparticles, peptides, proteins, nanoparticle mimics and combinations thereof.

[0752] Formulations of the pharmaceutical compositions described herein can be prepared by any method known or hereafter developed in the art of pharmacology. In general, such preparatory methods include the step of associating the active ingredient with a carrier and/or one or more other accessory ingredients (e.g., excipients, stabilizers and adjuvants).

[0753] A pharmaceutical composition in accordance with the present disclosure can be prepared, packaged, and/or sold in bulk, as a single unit dose, and/or as a plurality of single unit doses. As used herein, a unit dose refers to a discrete amount of the pharmaceutical composition including a predetermined amount of the active ingredient. The amount of the active ingredient is generally equal to the dosage of the active ingredient which would be administered to a subject and/or a convenient fraction of such a dosage such as, for example, one-half or one-third of such a dosage.

[0754] Relative amounts of the active ingredient (e.g., rAAV), the pharmaceutically acceptable carrier, and/or any additional ingredients in a pharmaceutical composition in accordance with the present disclosure can vary, depending upon the identity, size, and/or condition of the subject being treated and further depending upon the route by which the composition is to be administered.

[0755] Various carriers, excipients, stabilizers and adjuvants for formulating pharmaceutical compositions and techniques for preparing the composition are known in the art (see Remington: The Science and Practice of Pharmacy, 22nd Revised Ed., Pharmaceutical Press, 2012; incorporated herein by reference in its entirety). The use of suitable conventional carriers, excipients, stabilizers and adjuvants is contemplated within the scope of the present disclosure.

[0756] In some embodiments, the pharmaceutical composition is in the form of a solution containing concentrations of from about 1×101 to about 1×1016 genome copies (GCs)/ml of rAAV (e.g., a solution containing concentrations of from about 1×103 to about 1×1014 GCs/ml).

### 6.7.1. Routes of Administration

[0757] A modified rAAV of the present disclosure can be administered to a subject (e.g., a human or non-human mammal) in a suitable carrier. Suitable carriers include saline, which may be formulated with a variety of buffering solutions (e.g., phosphate buffered saline), lactose, sucrose, calcium phosphate, gelatin, dextran, agar, pectin, and water. A modified rAAV typically is administered in sufficient amounts to transduce or infect the desired cells and to provide sufficient levels of gene transfer and expression to provide a therapeutic benefit without undue adverse effects. Conventional and pharmaceutically acceptable routes of administration include, but are not limited to, direct delivery to an organ such as, for example, the muscle, liver or lung, orally, intranasally, intratracheally, intrathecally, intravenously, intramuscularly, intraocularly, subcutaneously, intradermally, or by other routes of administration. Routes of administration can be combined, if desired.

### 6.7.2. Dosages

[0758] The dose of a viral vector administered to a subject will depend primarily on factors such as the condition being treated, and the age, weight, and health of the subject. For example, a therapeutically effective dosage of a viral vector to be administered to a human subject generally is in the range of from about 0.1 ml to about 10 ml of a solution containing concentrations of from about 1×10¹ to about 1×10¹⁶ genome copies (GCs)/ml of viruses (e.g., a solution containing concentrations of from about 1×10³ to about 1×10¹⁴ GCs/ml). In some embodiments, the total dose of the rAAV administered to a subject is less than 3×10¹⁴ GCs, e.g., 1×10¹⁴ GCs or less, 5×10¹³ GCs or less, 1×10¹³ GCs or less, 5×10¹² GCs or less, or 1×10¹² GCs or less.

[0759] In another embodiment, a therapeutically effective dosage of a viral vector to be administered to a human subject generally is in the range of from about 0.1 ml to about 10 ml of a solution containing concentrations of from about 1×10¹ to 1×10¹² genome copies (GCs) of viruses (e.g., about 1×10³ to 1×10⁹ GCs). Transduction and/or expression of a transgene can be monitored at various time points following administration by DNA, RNA, or protein assays. In some instances, the levels of expression of the transgene can be monitored to determine the frequency and/or amount of dosage. Dosage regimens similar to those described for therapeutic purposes also may be utilized for immunization.

### 6.7.3. Targeting

[0760] Targeting of modified rAAVs can be tested in an experimental animal by measuring rAAV infection or expression of an expressible polynucleotide. In some embodiments, targeting is measured in a non-human primate (NHP), mice, rats, birds, rabbits, guinea pigs, hamsters, farm animals (including pigs and sheep), dogs, or cats.

[0761] Targeting of modified rAAVs can be measured after systemic or local administration of rAAVs. In some embodiments, targeting of modified rAAVs is measured after intravenous infusion of rAAVs.

### 6.7.3.1 RNA Data—Muscle:Liver Infection Ratio

[0762] In some embodiments, targeting of modified rAAVs is measured by measuring the ratio between the copy numbers of the transgene transcripts and housekeeping gene (e.g., RPP30) transcripts. In a particular embodiment, the transcripts are measured by RT-ddPCR. In some embodiments, the ratio is measured after a first administration into a mammal, e.g., a mouse, or a non-human primate such as a marmoset or rhesus macaque.

[0763] In some embodiments, a muscle:liver infection ratio (RNA) is measured by comparing the ratios between the copy numbers of the transgene transcripts and housekeeping gene (e.g., RPP30) transcripts in the two different organs (e.g., muscle v. liver).

$$muscle : liver infection ratio ( R N A ) = \frac{( \frac{transgene transcripts}{housekeeping transcripts} ) in muscle}{( \frac{transgene transcripts}{housekeeping transcripts} ) in liver}$$

[0764] In some embodiments, modified rAAV of the present disclosure provides a (transgene transcripts/housekeeping transcripts) ratio in liver of less than 1000, less than 900, less than 800, less than 700, less than 600, less than 500, less than 400, less than 300, less than 200, less than 100, less than 90, less than 80, less than 70, less than 60, less than 50, less than 40, less than 30, less than 20, or less than 10.

[0765] In certain embodiments, when the (transgene transcripts/housekeeping transcripts) in the liver is zero or below detection limits, the muscle:liver infection ratio is reported as >10,000 by convention.

[0766] In some embodiments, the modified rAAV of the present disclosure provides a muscle:liver infection ratio (RNA) of at least 10, at least 15, at least 20, at least 25, at least 30, at least 35, at least 40, at least 45, at least 50, at least 55, at least 60, at least 65, at least 70, at least 75, at least 80, at least 85, at least 90, at least 95, at least 100, at least 150, at least 200, at least 500, at least 1000. In some embodiments, the muscle is triceps surae, biceps, heart or quadricep.

[0767] In some embodiments, modified rAAV of the present disclosure provides a muscle:liver infection ratio (RNA) of 1 to 10, 1 to 100, 10 to 20, 10 to 50, 10 to 80, 10 to 100, 20 to 100, 100 to 500, 100 to 1000, or 500 to 1000. In some embodiments, the muscle is triceps surae, bicep, heart or quadricep.

### 6.7.3.2 DNA Data—Muscle:Liver Infection Ratio

[0768] In some embodiments, targeting of modified rAAVs is measured by measuring the ratio between the copy numbers of the transgene DNA genomes to copy numbers of host genes or genetic loci (e.g., RPP30). In a particular embodiment, the genomes are measured by RT-ddPCR. In some embodiments, the ratio is measured after a first administration into a mammal, e.g., a mouse, or a non-human primate such as a marmoset or rhesus macaque.

[0769] In some embodiments, a muscle:liver infection ratio (DNA) is measured by comparing the ratios between the copy numbers of the transgene DNA genomes and housekeeping gene (e.g., RPP30) genomes in the two different organs (e.g., muscle v. liver).

$$muscle : liver infection ratio ( D N A ) = \frac{( \frac{transgene D N A genomes}{housekeeping genomes} ) in muscle}{( \frac{transgene D N A genomes}{housekeeping genomes} ) in liver}$$

[0770] In some embodiments, modified rAAV of the present disclosure provides a (transgene genomes/housekeeping genomes) ratio in liver of less than 1, or in a range from 1 to 10, 1 to 5, 1 to 2, 0.1 to 1, 0 to 1, 0.01 to 0.1, 0.01 to 0.5, or 0.01 to 0.05.

[0771] In certain embodiments, when the (transgene genomes/housekeeping genomes) in the liver is zero or below detection limits, the muscle:liver infection ratio is reported as >10,000 by convention.

[0772] In some embodiments, the modified rAAV of the present disclosure provides a muscle:liver infection ratio (DNA) of at least 1, at least 1.5, at least 2, at least 2.5, at least 3, at least 3.5, at least 4, at least 4.5, at least 5, at least 5.5, at least 6, at least 6.5, at least 7, at least 7.5, at least 8, at least 8.5, at least 9, at least 9.5, at least 10, at least 11, at least 12, at least 13, at least 14, at least 15, at least 16, at least 17, at least 18, at least 19, at least 20, at least 30, at least 40, at least 50, at least 60, at least 70, at least 80, at least 90, at least 100, at least 150, at least 200, at least 500, at least 1,000 or at least 10,000. In some embodiments, the muscle is triceps surae, biceps, heart or quadricep.

[0773] In some embodiments, modified rAAV of the present disclosure provides a muscle:liver infection ratio (DNA) in the range of 0.5 to 1, 0.5 to 5, 0.5 to 10, 1 to 10, 1 to 100, 2 to 8, 5 to 10, 10 to 20, 20 to 80, 10 to 50, 10 to 100, 50 to 80, 100 to 500, 100 to 1000, or 500 to 1000. In some embodiments, the muscle is triceps surae, biceps, heart, or quadricep. In some embodiments, the modified rAAV achieves a muscle:liver infection ratio (DNA) of at least 2, at least 5, at least 10, at least 20, at least 30, at least 40, at least 50, at least 60, at least 70, at least 80, at least 90, at least 100, at least 150, at least 200, at least 500, at least 1000. In some embodiments, the modified rAAV achieves a muscle:liver infection ratio of 0.1 to 1, 1 to 5, 1 to 10, 1 to 20, 1 to 50, 1 to 100, 1 to 200, 1 to 300, 100 to 500, 250 to 750, or 500 to 1000.

### 6.7.3.3 IHC Data Muscle:Liver Infection Ratio

[0774] In some embodiments, targeting of modified rAAVs is calculated using the % of cells that have been successfully transduced and express a transgene in a tissue (e.g., eGFP). In a particular embodiment, the transgene expression is measured by immunohistochemistry. In some embodiments, the ratio is measured after a first administration into a mammal, e.g., a mouse, or a non-human primate such as a marmoset or rhesus macaque.

[0775] In some embodiments, a muscle:liver infection ratio (IHC) is measured by comparing the ratios between the transgene % GFP+cells and housekeeping gene (e.g., RPP30) % GFP+cells in the two different organs (e.g., muscle v. liver).

$$muscle : liver infection ratio ( I H C ) = \frac{( \frac{transgene \% GFP + cells}{housekeeping \% GFP + cells} ) in muscle}{( \frac{transgene \% GFP + cells}{housekeeping \% GFP + cells} ) in liver}$$

[0776] In some embodiments, modified rAAV of the present disclosure provides a (transgene % GFP/housekeeping % GFP) ratio in liver of less than 1, less than 5, less than 10, or in a range from 1 to 10, 1 to 5, 1 to 2, 0.1 to 1, 0 to 1, 0.01 to 0.1, 0.01 to 0.5, or 0.01 to 0.05.

[0777] In certain embodiments, when the (transgene % GFP/housekeeping % GFP) in the liver is zero or below detection limits, the muscle:liver infection ratio is reported as >10,000 by convention.

[0778] In some embodiments, the modified rAAV of the present disclosure provides a muscle:liver infection ratio (IHC) of at least 1, at least 1.5, at least 2, at least 2.5, at least 3, at least 3.5, at least 4, at least 4.5, at least 5, at least 5.5, at least 6, at least 6.5, at least 7, at least 7.5, at least 8, at least 8.5, at least 9, at least 9.5, at least 10, at least 11, at least 12, at least 13, at least 14, at least 15, at least 16, at least 17, at least 18, at least 19, at least 20, at least 30, at least 40, at least 50, at least 60, at least 70, at least 80, at least 90, at least 100, at least 150, at least 200, at least 500, at least 1000. In some embodiments, the muscle is triceps surae, biceps, heart or quadricep.

[0779] In some embodiments, modified rAAV of the present disclosure provides a muscle:liver infection ratio (IHC) of 1 to 5, 1 to 10, 1 to 100, 2 to 8, 10 to 20, 20 to 30, 10 to 50, 10 to 100, 20 to 80, 50 to 80, 100 to 500, 100 to 1000, or 500 to 1000. In some embodiments, the muscle is triceps surae, bicep, heart or quadricep.

### 6.8. Method of Use

[0780] A modified rAAV as described herein can be used in research and/or therapeutic applications. In some embodiments, a modified rAAV is for genetically modifying a cell in vitro or in vivo. In some embodiments, a modified rAAV is used for gene therapy or for vaccination in a human or animal. More specifically, a modified rAAV can be used for gene addition, gene augmentation, genetic delivery of a polypeptide therapeutic, genetic vaccination, gene silencing, genome editing, gene therapy, RNAi delivery, cDNA delivery, mRNA delivery, miRNA delivery, miRNA sponging, genetic immunization, optogenetic gene therapy, transgenesis, DNA vaccination, or DNA immunization of liver cells or non-liver cells.

[0781] In some embodiments, a modified rAAV of the present disclosure is used for treatment of a muscle disease. In some embodiments, the disease is a muscular disease and/or the condition is muscle degeneration. In some embodiments, said muscular disease is a muscular dystrophy, a cardiomyopathy, a myotonia, a muscular atrophy, a myoclonus dystonia, a mitochondrial myopathy, a rhabdomyolysis, a fibromyalgia, and/or a myofascial pain syndrome. In some embodiments, the modified rAAV is used to deliver the rAAV to a striated muscle, preferably heart or a skeletal muscle or diaphragm.

[0782] In some embodiments, the rAAVs or pharmaceutical compositions described are useful in the treatment of subjects (preferably human subjects) suffering from XLMTM and/or carrying mutations in the MTM1 gene. “Treatment” of MTM encompasses a complete reversal or cure of the disease, or any range of improvement in conditions and/or adverse effects attributable to MTM. Merely to illustrate, “treatment” of MTM includes an improvement in any of the following effects associated with MTM or combination thereof: short life expectancy, respiratory insufficiency (partially or completely), poor muscle tone, drooping eyelids, poor strength in proximal muscles, poor strength in distal muscles, facial weakness with or without eye muscle weakness, abnormal curvature of the spine, joint deformities, and weakness in the muscles that control eye movement (ophthalmoplegia). Improvements in any of these conditions can be readily assessed according to standard methods and techniques known in the art.

[0783] A modified rAAV of the present disclosure can be administered to a subject in a suitable pharmaceutical carrier, e.g., as described in Section 4.7.

[0784] The rAAV of the disclosure are typically administered in sufficient amounts to transduce or infect the desired cells and to provide sufficient levels of gene transfer and expression to provide a therapeutic benefit to subjects suffering from a disease. In particular embodiments, the rAAV is administered in sufficient amounts to provide a therapeutic benefit to subjects suffering from XLMTM or carrying a mutation in the MTM1 gene, without undue adverse effects.

[0785] Conventional and pharmaceutically acceptable routes of administration include, but are not limited to, direct delivery to an organ such as, for example, the muscle, liver or lung, orally, intranasally, intratracheally, intrathecally, intravenously, intramuscularly, intraocularly, subcutaneously, intradermally, or by other routes of administration. Routes of administration can be combined, if desired.

[0786] The dose of a viral vector administered to a subject will depend primarily on factors such as the age, weight, and health (e.g., disease progression) of the subject. For example, a therapeutically effective dosage of a viral vector to be administered to a human subject generally is in the range of from about 0.1 ml to about 10 ml of a solution containing concentrations of from about 1×10¹ to about 1×10¹⁶ genome copies (GCs)/ml of viruses (e.g., a solution containing concentrations of from about 1×10³ to about 1×10¹⁴ GCs/ml). In some embodiments, the total dose of the rAAV administered to a subject is less than 3×10¹⁴ GCs, e.g., 1×10¹⁴ GCs or less, 5×10¹³ GCs or less, 1×10¹³ GCs or less, 5×10¹² GCs or less, or 1×10¹² GCs or less.

[0787] Transduction and/or expression of the transgene can be monitored at various time points following administration by DNA, RNA, or protein assays.

[0788] Accordingly, the present disclosure provides a method of treating and/or preventing a muscular disease and/or muscle degeneration by administering a modified rAAV described herein.

[0789] In some embodiments, the modified rAAV capsid of the present disclosure is used to deliver a transgene to a target tissue. In some embodiments the target tissue is cardiac muscle, diaphragm, tibialis anterior, quadriceps, biceps femoris, tibia gastrocnemius, tibialis anterior, triceps brachii, heart-ventricle wall, heart-atria, other skeletal muscle, or any muscle tissue described herein.

[0790] In some embodiments, the target tissue is heart. In some embodiments, the target tissue is liver.

### 7. ADDITIONAL EMBODIMENTS

### 7.1. Embodiment A

[0791] Embodiment A1. A modified adeno-associated virus (AAV) capsid protein, wherein: the capsid protein comprises: a targeting peptide within variable region (VR) VIII, wherein the targeting peptide has the sequence X₁X₂X₃RGDX₇X₈X₉X₁₀ and X₁, X₂, X₃, X₇, X₈, X₉ and X₁₀ are each independently selected from any amino acid residue.

[0792] Embodiment A2. The modified AAV capsid protein of Embodiment A1, wherein the AAV capsid protein has one or more modifications comprising amino acid insertions, deletions, substitutions, or combinations thereof as compared to a reference AAV capsid protein.

[0793] Embodiment A3. The modified AAV capsid protein of any one of Embodiment A1-A2, wherein the targeting peptide is at a site within variable region (VR) VIII.

[0794] Embodiment A4. The modified AAV capsid protein of any one of Embodiment A2-A3, wherein the one or more modifications comprises an amino acid insertion, deletion, substitution, or a combination thereof to introduce the targeting peptide into VR VIII of the reference AAV capsid protein.

[0795] Embodiment A5. The modified AAV capsid protein of any one of Embodiment A2-A4, wherein the one or more modifications comprises an amino acid modification outside of VR VIII of the reference AAV capsid protein.

[0796] Embodiment A6. The modified AAV capsid protein of any one of Embodiments A2-A5, having at least 90%, 95%, 98%, 99% or 99.5% sequence identity to the sequence of the reference AAV capsid protein.

[0797] Embodiment A7. The modified AAV capsid protein of any one of Embodiments A1-A6, wherein X₇, X₈, X₉ and X₁₀ are independently selected from A, D, E, F, G, H, I, K, L, M, N, Q, R, S, T, V, and Y.

[0798] Embodiment A8. The modified AAV capsid protein of any one of Embodiments A2-A7, wherein X₁, X₂, and X₃ are independently selected from any amino acid residue.

[0799] Embodiment A9. The modified AAV capsid protein of Embodiment A8, wherein X₁, X₂, and X₃ are amino acids identical to the amino acids at corresponding positions of the reference AAV capsid protein.

[0800] Embodiment A10. The modified AAV capsid protein of Embodiment A8, wherein X₁ is an amino acid that is identical to the amino acid at a corresponding position of the reference AAV capsid protein.

[0801] Embodiment A11. The modified AAV capsid protein of Embodiment A8, wherein X₂ is an amino acid that is identical to the amino acid at a corresponding position of the reference AAV capsid protein.

[0802] Embodiment A12. The modified AAV capsid protein of Embodiment A8, wherein X₃ is an amino acid that is identical to the amino acid at a corresponding position of the reference AAV capsid protein.

[0803] Embodiment A13. The modified AAV capsid protein of Embodiment A8, wherein X₁ and X₃ are amino acids that are identical to the amino acids at corresponding positions of the reference AAV capsid protein.

[0804] Embodiment A14. The modified AAV capsid protein of Embodiment A8, wherein X₁ and X₂ are amino acids that are identical to the amino acids at corresponding positions of the reference AAV capsid protein.

[0805] Embodiment A15. The modified AAV capsid protein of Embodiment A8, wherein X₂ and X₃ are amino acids that are identical to the amino acids at corresponding positions of the reference AAV capsid protein.

[0806] Embodiment A16. The modified AAV capsid protein of Embodiment A8, wherein X₁, X₂, and X₃ are amino acids that are not identical to the amino acids at corresponding positions of the reference AAV capsid protein.

[0807] Embodiment A17. The modified AAV capsid protein of Embodiment A8, wherein X₁ is an amino acid that is not identical to the amino acid at a corresponding position of the reference AAV capsid protein.

[0808] Embodiment A18. The modified AAV capsid protein of Embodiment A8, wherein X₂ is an amino acid that is not identical to the amino acid at a corresponding position of the reference AAV capsid protein.

[0809] Embodiment A19. The modified AAV capsid protein of Embodiment A8, wherein X₃ is an amino acid that is not identical to the amino acid at a corresponding position of the reference AAV capsid protein.

[0810] Embodiment A20. The modified AAV capsid protein of Embodiment A8, wherein X₁ and X₃ are amino acids that are not identical to the amino acids at corresponding positions of the reference AAV capsid protein.

[0811] Embodiment A21. The modified AAV capsid protein of Embodiment A8, wherein X₁ and X₂ are amino acids that are not identical to the amino acids at corresponding positions of the reference AAV capsid protein.

[0812] Embodiment A22. The modified AAV capsid protein of Embodiment A8, wherein X₂ and X₃ are amino acids that are not identical to the amino acids at corresponding positions of the reference AAV capsid protein.

[0813] Embodiment A23. The modified AAV capsid protein of any one of Embodiment A2-A22, wherein the modified AAV capsid protein comprises one or more substitutions, one or more insertions, one or more deletions, or a combination thereof into VR VIII of the reference AAV capsid protein.

[0814] Embodiment A24. The modified AAV capsid protein of Embodiment A23, wherein one or more modifications comprises a substitution of one or more amino acids between amino acid positions 565 and 595 of the reference AAV capsid.

[0815] Embodiment A25. The modified AAV capsid protein of any one of Embodiments A1-A24, wherein X₁ is selected from S, E, A, D, N, Q, or T.

[0816] Embodiment A26. The modified AAV capsid protein of any one of Embodiments A1-A24, wherein X₂ is selected from N, A, D, E, F, G, H, I, K, L, M, N, P, Q, R, S, T, V, W, or Y.

[0817] Embodiment A27. The modified AAV capsid protein of any one of Embodiments A1-A24, wherein X₃ is selected from R, Q, A, D, E, F, G, H, I, K, L, M, N, P, S, T, V, W, or Y.

[0818] Embodiment A28. The modified AAV capsid protein of any one of Embodiments A1-A24, wherein: X₂ is N; and X₃ is R.

[0819] Embodiment A29. The modified AAV capsid protein of any one of Embodiments A1-A28, wherein: X₁ is E; X₂ is N; and X₃ is R.

[0820] Embodiment A30. The modified AAV capsid protein of any one of Embodiments A1-A28, wherein: X₁ is S; X₂ is N; and X₃ is R.

[0821] Embodiment A31. The modified AAV capsid protein of any one of Embodiments A1-A30, wherein RGDX₇X₈X₉X₁₀ has an amino acid sequence selected from SEQ ID NOs.: 238-44858.

[0822] Embodiment A32. The modified AAV capsid protein of any one of Embodiments A1-A30, wherein RGDX₇X₈X₉X₁₀ has an amino acid sequence selected from SEQ ID NOs.: 238-248.

[0823] Embodiment A33. The modified AAV capsid protein of any one of Embodiments A1-A30 wherein RGDX₇X₈X₉X₁₀ has an amino acid sequence selected from SEQ ID NOs.: 238-338.

[0824] Embodiment A34. The modified AAV capsid protein of any one of Embodiments A1-A30, wherein RGDX₇X₈X₉X₁₀ has an amino acid sequence selected from SEQ ID NOs.: 238-438.

[0825] Embodiment A35. The modified AAV capsid protein of any one of Embodiments A1-A30, wherein RGDX₇X₈X₉X₁₀ has an amino acid sequence selected from SEQ ID NOs.: 238-538.

[0826] Embodiment A36. The modified AAV capsid protein of any one of Embodiments A1-A30, wherein RGDX₇X₈X₉X₁₀ has an amino acid sequence selected from SEQ ID NOs.: 238-638.

[0827] Embodiment A37. The modified AAV capsid protein of any one of Embodiments A1-A30, wherein RGDX₇X₈X₉X₁₀ has an amino acid sequence selected from SEQ ID NOs.: 238-738.

[0828] Embodiment A38. The modified AAV capsid protein of any one of Embodiments A1-A30, wherein RGDX₇X₈X₉X₁₀ has an amino acid sequence selected from SEQ ID NOs.: 3881, 12092, 14601, 15342, 21498, and 31396.

[0829] Embodiment A39. The modified AAV capsid protein of any one of Embodiments A1-A30, wherein RGDX₇X₈X₉X₁₀ has the amino acid sequence of SEQ ID NO: 238.

[0830] Embodiment A40. The modified AAV capsid protein of any one of Embodiments A1-A30, wherein X₁X₂X₃RGDX₇X₈X₉X₁₀ (SEQ ID NO: 44915) has an amino acid sequence selected from SEQ ID NOs.: 44859-44883, 44911, 44912, 44913, 44918-44919, and 44921-95452.

[0831] Embodiment A41. The modified AAV capsid protein of any one of Embodiments A1-A30, wherein X₁X₂X₃RGDX₇X₈X₉X₁₀ (SEQ ID NO: 44915) has an amino acid sequence selected from SEQ ID NOs.: 44864-44865, 44867, and 44879-44883.

[0832] Embodiment A42. The modified AAV capsid protein of any one of Embodiments A1-A30, wherein X₁X₂X₃RGDX₇X₈X₉X₁₀ has an amino acid sequence selected from SEQ ID NOs.: 44859-44878, 44911, 44912, 44913, and 44918-44919.

[0833] Embodiment A43. The modified AAV capsid protein of any one of Embodiments A1-A30, wherein the X₇ is selected from R, F, H, L, Q, R, and Y.

[0834] Embodiment A44. The modified AAV capsid protein of any one of Embodiments A43, wherein the X₇ is R.

[0835] Embodiment A45. The modified AAV capsid protein of Embodiment A43 or A44, wherein X₈ is selected from S, G, D, I, L, N, Q, T, and V.

[0836] Embodiment A46. The modified AAV capsid protein of Embodiment A45, wherein X₈ is S or G.

[0837] Embodiment A47. The modified AAV capsid protein of any one of Embodiments A1-A30, A45 or A46, wherein X₉ is selected from any of the amino acids.

[0838] Embodiment A48. The modified AAV capsid protein of any one of Embodiment A47, wherein X₉ is selected from V, S, N, G, Q, L, T, and Y.

[0839] Embodiment A49. The modified AAV capsid protein of any one of Embodiments A1-A30 and A47-A48, wherein X₁₀ is selected from I, V, S, L, M, R, T, and Q.

[0840] Embodiment A50. The modified AAV capsid protein of Embodiment A49, wherein X₁₀ is I or V.

[0841] Embodiment A51. The modified AAV capsid protein of any one of Embodiments A1-A30 and A45-A48, wherein RGDRX₈X₉X₁₀ has an amino acid sequence selected from: RGDRSX₉I, RGDRGX₉I, RGDRSX₉V, or RGDRGX₉V.

[0842] Embodiment A52. The modified AAV capsid protein of any one of Embodiments A1-A30 and A45-A48, wherein RGDRX₈X₉X₁₀ has an amino acid sequence selected from: RGDRGVX₁₀ (SEQ ID NO: 157058), RGDRGSX₁₀ (SEQ ID NO: 157059), RGDRGNX₁₀ (SEQ ID NO: 157060), RGDRGGX₁₀ (SEQ ID NO: 157061), RGDRGQX₁₀ (SEQ ID NO: 157062), RGDRGX₉V (SEQ ID NO: 157063), RGDRGX₉I (SEQ ID NO: 157064). RGDRGX₉S (SEQ ID NO. 157065), RGDRGX₉L (SEQ ID NO: 157066), RGDRGX₉Q (SEQ ID NO: 157067), RGDHX₈X₉L (SEQ ID NO: 157068), RGDRX₈X₉I (SEQ ID NO: 157069), RGDRX₈X₉V (SEQ ID NO: 157070), RGDRX₈X₉L (SEQ ID NO: 157071), RGDYX₈X₉L (SEQ ID NO: 157072), RGDYX₈X₉V (SEQ ID NO. 157073). RGDYX₈X₉M (SEQ ID NO: 157074), and RGDLX₈X₉T (SEQ ID NO: 157075).

[0843] Embodiment A53. The modified AAV capsid protein of any one of Embodiments A1-A30 and A47-A50, wherein the modified AAV capsid protein does not comprise an amino acid sequence selected from: RGDRMVF, RGDRTVI, SRGDRPM, ISLRGDR, and RGDLLLS (SEQ ID NO: 1).

[0844] Embodiment A54. The modified AAV capsid protein of any one of Embodiments A1-A30 and A43-A50, wherein the targeting peptide has a sequence selected from: X₁X₂X₃RGDHVNL (SEQ ID NO: 98924); X₁X₂X₃RGDLIGR (SEQ ID NO: 98925); X₁X₂X₃RGDQSTL (SEQ ID NO: 98926); X₁X₂X₃RGDRGQI (SEQ ID NO: 98927); X₁X₂X₃RGDRGVV (SEQ ID NO: 98928); X₁X₂X₃RGDRQGI (SEQ ID NO: 98929); X₁X₂X₃RGDRSQT (SEQ ID NO: 98930); X₁X₂X₃RGDRSVV (SEQ ID NO: 98931); X₁X₂X₃RGDLLLS (SEQ ID NO: 98932); X₁X₂X₃RGDFNNL (SEQ ID NO: 98933); X₁X₂X₃RGDFQNT (SEQ ID NO: 98934); X₁X₂X₃RGDLTVT (SEQ ID NO: 98935); X₁X₂X₃RGDYVGL (SEQ ID NO: 98936); X₁X₂X₃RGDYSSV (SEQ ID NO: 98937); X₁X₂X₃RGDHGVL (SEQ ID NO: 98938); X₁X₂X₃RGDRDYL (SEQ ID NO: 98939); X₁X₂X₃RGDYNSL (SEQ ID NO: 98940); X₁X₂X₃RGDYTSV (SEQ ID NO: 98941); X₁X₂X₃RGDYTSM (SEQ ID NO: 98942); and X₁X₂X₃RGDFNNT (SEQ ID NO: 98943).

[0845] Embodiment A55. The modified AAV capsid protein of any one of Embodiments A1-A54, wherein the reference AAV capsid protein is selected from VP1, VP2 and VP3.

[0846] Embodiment A56. The modified AAV capsid protein of any one of Embodiments A2-A55, wherein the reference AAV capsid protein is a capsid protein of an AAV selected from the group consisting of; AAV9; Anc8065; Anc80-55, Anc80-129, Anc80-156, Anc80-751, Anc80-1029, Anc80-1712, AAV2; AAV1; AAV6; AAV3; AAV LK03; AAV7; AAV8; AAV hu.37; AAV rh.10; AAV hu.68; AAV10; AAV5; AAV3-3; AAV4-4; AAV1-A; hu.46-A; hu.48-A; hu.44-A; hu.43-A; AAV6-A; hu.34-B; hu.47-B; hu.29-B; rh.63-B; hu.56-B; hu.45-B; rh.57-B; rh.35-B; rh.58-B; rh.28-B; rh.51-B; rh.19-B; rh.49-B; rh.52-B; rh.13-B; AAV2-B; rh.20-B; rh.24-B; rh.64-B; hu.27-B; hu.21-B; hu.22-B; hu.23-B; hu.7-C; hu.61-C; rh.56-C; hu.9-C; hu.54-C; hu.53-C; hu.60-C; hu.55-C; hu.2-C; hu.1-C; hu.18-C; hu.3-C; hu.25-C; hu.15-C; hu.16-C; hu.11-C; hu.10-C; hu.4-C; rh.54-D; rh.48-D; rh.55-D; rh.62-D; AAV7-D; rh.52-E; rh.51-E; hu.39-E; rh.53-E; hu.37-E; rh.43-E; rh.50-E; rh.49-E; rh.61-E; hu.41-E; rh.64-E; rh74; hu.42-E; rh.57-E; rh.40-E; hu.67-E; hu.17-E; hu.6-E; hu.66-E; rh.38-E; hu.32-F; AAV9/hu; hu.31-F; Anc80; Anc81; Anc82; Anc83; Anc84; Anc94; Anc113; Anc126; Anc127; Anc80L27; Anc80L59; Anc80L60; Anc80L62; Anc80L33; Anc80L36; Anc80L44; Anc80L1; Anc110; and Anc80DI.

[0847] Embodiment A57. The modified AAV capsid protein of any one of Embodiments A2-A56, wherein the reference AAV capsid protein is a capsid protein having a sequence selected from SEQ ID Nos: 54-152, 44885-44898, 44916-44917, or a fragment thereof.

[0848] Embodiment A58. The modified AAV capsid protein of any one of Embodiments A2-A57, wherein the reference AAV capsid protein is a capsid protein having a sequence of SEQ ID NO: 61 or a fragment thereof.

[0849] Embodiment A59. The modified AAV capsid protein of any one of Embodiments A2-A57, wherein the reference AAV capsid protein is a capsid protein having a sequence of SEQ ID NO: 142 or a fragment thereof.

[0850] Embodiment A60. The modified AAV capsid protein of any one of Embodiments A2-A57, wherein the targeting peptide is positioned between 565 and 595 within VR VIII of the modified AAV capsid protein.

[0851] Embodiment A61. The modified AAV capsid protein of any one of Embodiments A2-A60, wherein: (i) the reference AAV capsid protein is a capsid protein of AAV1 or a modification thereof and the targeting peptide is between Q585 and T589 of the reference AAV capsid protein; (ii) the reference AAV capsid protein is a capsid protein of AAV2 or a modification thereof and the targeting peptide is between Q584 and R588 or between N587 and R588 of the reference AAV capsid protein; (iii) the reference AAV capsid protein is a capsid protein of AAV3 or a modification thereof and the targeting peptide is between Q585 and T589 of the reference AAV capsid protein; (iv) the reference AAV capsid protein is a capsid protein of AAV4 or a modification thereof and the targeting peptide is between G581 and N585 of the reference AAV capsid protein; (v) the reference AAV capsid protein is a capsid protein of AAV5 or a modification thereof and the targeting peptide is between Q574 and T578 of the reference AAV capsid protein; (vi) the reference AAV capsid protein is a capsid protein of AAV6 or a modification thereof and the targeting peptide is between Q585 and T589 of the reference AAV capsid protein; (vii) the reference AAV capsid protein is a capsid protein of AAV7 or a modification thereof and the targeting peptide is between Q586 and T590 of the reference AAV capsid protein; (viii) the reference AAV capsid protein is a capsid protein of AAV8 or a modification thereof and the targeting peptide is between Q587 and A591 of the modified AAV capsid protein; (ix) the reference AAV capsid protein is a capsid protein of AAV9 or a modification thereof and the targeting peptide is between H587 and A591 of the reference AAV capsid protein; (x) the reference AAV capsid protein is a capsid protein of AAVrh10 or a modification thereof and the targeting peptide is between Q587 and A591 of the reference AAV capsid protein; (xi) the reference AAV capsid protein is a capsid protein of AAVpo.1 or a modification thereof and the targeting peptide is between N564 and S568 of the reference AAV capsid protein; (xii) the reference AAV capsid protein is a capsid protein of AAV12 or a modification thereof and the targeting peptide is between N589 and A593 of the reference AAV capsid protein; (xiii) the reference AAV capsid protein is a capsid protein of Anc80 or a modification thereof and the targeting peptide is between Q585 and T589 of the reference AAV capsid protein; (xiv) the reference AAV capsid protein is a capsid protein of Anc80L65 or a modification thereof and the targeting peptide is between Q585 and T589 of the reference AAV capsid protein; (xv) the reference AAV capsid protein is a capsid protein of Anc80-55 or a modification thereof and the targeting peptide is between Q585 and T589 of the reference AAV capsid protein; (xvi) the reference AAV capsid protein is a capsid protein of Anc80-129 or a modification thereof and the targeting peptide is between Q585 and T589 of the reference AAV capsid protein; (xvii) the reference AAV capsid protein is a capsid protein of Anc80-156 or a modification thereof and the targeting peptide is between Q585 and T589 of the reference AAV capsid protein; (xviii) the reference AAV capsid protein is a capsid protein of Anc80-751 or a modification thereof and the targeting peptide is between Q585 and T589 of the reference AAV capsid protein; (xix) the reference AAV capsid protein is a capsid protein of Anc80-1029 or a modification thereof and the targeting peptide is between Q585 and T589 of the reference AAV capsid protein; or (xx) the reference AAV capsid protein is a capsid protein of Anc80-1712 or a modification thereof and the targeting peptide is between Q585 and T589 of the reference AAV capsid protein.

[0852] Embodiment A62. The modified AAV capsid protein of any one of Embodiments A2-A60, wherein: (i) the reference AAV capsid protein is a capsid protein of AAV1 or a modification thereof and the targeting peptide is between D590 and P591 or between S588 and T589 of the reference AAV capsid protein; (ii) the reference AAV capsid protein is a capsid protein of AAV2 or a modification thereof and the targeting peptide is between R588 and Q589 or between N587 and R588 of the reference AAV capsid protein; (iii) the reference AAV capsid protein is a capsid protein of AAV3 or a modification thereof and the targeting peptide is between S586 and S587 or between N588 and T589 of the reference AAV capsid protein; (iv) the reference AAV capsid protein is a capsid protein of AAV4 or a modification thereof and the targeting peptide is between S584 and N585 or between S586 and N587 of the reference AAV capsid protein; (v) the reference AAV capsid protein is a capsid protein of AAV5 or a modification thereof and the targeting peptide is between S575 and S576 or between T577 and T578 of the reference AAV capsid protein; (vi) the reference AAV capsid protein is a capsid protein of AAV6 or a modification thereof and the targeting peptide is between D590 and P591 or S588 and T589 of the reference AAV capsid protein; (vii) the reference AAV capsid protein is a capsid protein of AAV7 or a modification thereof and the targeting peptide is between N589 and T590 of the reference AAV capsid protein; (viii) the reference AAV capsid protein is a capsid protein of AAV8 or a modification thereof and the targeting peptide is between N590 and T591 of the modified AAV capsid protein; (ix) the reference AAV capsid protein is a capsid protein of AAV9 or a modification thereof and the targeting peptide is between Q588 and A589 of the reference AAV capsid protein; (x) the reference AAV capsid protein is a capsid protein of AAVrh10 or a modification thereof and the targeting peptide is between N590 and A591 of the reference AAV capsid protein; (xi) the reference AAV capsid protein is a capsid protein of AAVpo.1 or a modification thereof and the targeting peptide is between N567 and S568 or between N569 and T570 of the reference AAV capsid protein; (xii) the reference AAV capsid protein is a capsid protein of AAV12 or a modification thereof and the targeting peptide is between N592 and A593 or between T594 and T595 of the reference AAV capsid protein; (xiii) the reference AAV capsid protein is a capsid protein of Anc80 or a modification thereof and the targeting peptide is between T589 and A590 or between N587 and T588 of the reference AAV capsid protein; (xiv) the reference AAV capsid protein is a capsid protein of Anc80L65 or a modification thereof and the targeting peptide is between T589 and A590 or between N587 and T588 of the reference AAV capsid protein; (xv) the reference AAV capsid protein is a capsid protein of Anc80-55 or a modification thereof and the targeting peptide is between T589 and A590 or between N587 and T588 of the reference AAV capsid protein; (xvi) the reference AAV capsid protein is a capsid protein of Anc80-129 or a modification thereof and the targeting peptide is between T589 and A590 or between N587 and T588 of the reference AAV capsid protein; (xvii) the reference AAV capsid protein is a capsid protein of Anc80-156 or a modification thereof and the targeting peptide is between T589 and A590 or between N587 and T588 of the reference AAV capsid protein; (xviii) the reference AAV capsid protein is a capsid protein of Anc80-75 J or a modification thereof and the targeting peptide is between T589 and A590 or between N587 and T588 of the reference AAV capsid protein; (xix) the reference AAV capsid protein is a capsid protein of Anc80-1029 or a modification thereof and the targeting peptide is between T589 and A590 or between N587 and T588 of the reference AAV capsid protein; or (xx) the reference AAV capsid protein is a capsid protein of Anc80-1712 or a modification thereof and the targeting peptide is between T589 and A590 or between N587 and T588 of the reference AAV capsid protein.

[0853] Embodiment A63. The modified AAV capsid protein of any one of Embodiments A1-A55, having the sequence selected from SEQ ID NOs.: 44900-44909.

[0854] Embodiment A64. The modified AAV capsid protein of any one of Embodiments A2-A63, wherein the reference AAV capsid protein is a liver-toggle mutant of a capsid protein of an AAV variant selected from the group consisting of: AAV9; Anc80L65; Anc80-55. Anc80-129, Anc80-156, Anc80-751, Anc80-1029, Anc80-1712, AAV2; AAV1; AAV6; AAV3; AAV LK03; AAV7; AAV8; AAV hu.37; AAV rh.10; AAV hu.68; AAV10; AAV5; AAV3-3; AAV4-4; AAV1-A; hu.46-A; hu.48-A; hu.44-A; hu.43-A; AAV6-A; hu.34-B; hu.47-B; hu.29-B; rh.63-B; hu.56-B; hu.45-B; rh.57-B; rh.35-B; rh.58-B; rh.28-B; rh.51-B; rh.19-B; rh.49-B; rh.52-B; rh.13-B; AAV2-B; rh.20-B; rh.24-B; rh.64-B; hu.27-B; hu.21-B; hu.22-B; hu.23-B; hu.7-C; hu.61-C; rh.56-C; hu.9-C; hu.54-C; hu.53-C; hu.60-C; hu.55-C; hu.2-C; hu.1-C; hu.18-C; hu.3-C; hu.25-C; hu.15-C; hu.16-C; hu.11-C; hu.10-C; hu.4-C; rh.54-D; rh.48-D; rh.55-D; rh.62-D; AAV7-D; rh.52-E; rh.51-E; hu.39-E; rh.53-E; hu.37-E; rh.43-E; rh.50-E; rh.49-E; rh.61-E; hu.41-E; rh.64-E; rh74; hu.42-E; rh.57-E; rh.40-E; hu.67-E; hu.17-E; hu.6-E; hu.66-E; rh.38-E; hu.32-F; AAV9/hu; hu.31-F; Anc80; Anc81; Anc82; Anc83; Anc84; Anc94; Anc113; Anc126; Anc127; Anc80L27; Anc80L59; Anc80L60; Anc80L62; Anc80L33; Anc80L36; Anc80L44; Anc80L1; Anc110; and Anc80DI.

[0855] Embodiment A65. The modified AAV capsid protein of any one of Embodiments A2-A64, wherein the reference AAV capsid protein is a liver-toggle mutant of a capsid protein having a sequence selected from SEQ ID Nos: 54-152, 44885-44898, 44916-44917, or a fragment thereof.

[0856] Embodiment A66. The modified AAV capsid protein of any one of Embodiments A63-A65, comprising: an alanine (A) amino acid residue at an amino acid position corresponding to position 266 in Anc80; or a lysine (K) amino acid residue at an amino acid position corresponding to position 168 in Anc80.

[0857] Embodiment A67. The modified AAV capsid protein of any one of Embodiments A63-A65, wherein the reference AAV capsid protein is a liver toggle mutant of a capsid protein of AAV9 comprising an alanine (A) amino acid residue at an amino acid position 267 and a threonine (T) amino acid residue at an amino acid position 269.

[0858] Embodiment A68. The modified AAV capsid protein of any one of Embodiments A2-A67, wherein the reference AAV capsid protein is a capsid protein having a sequence of SEQ ID NO: 163.

[0859] Embodiment A69. The modified protein of any one of Embodiments A63-A65, wherein the reference AAV capsid protein is a liver toggle mutant of a capsid protein of Anc80L65.

[0860] Embodiment A70. The modified protein of Embodiment A69, wherein the capsid protein of Anc80L65 comprises the sequence of SEQ ID NO: 142.

[0861] Embodiment A71. The modified protein of any one of Embodiments A64-A70, wherein the reference AAV capsid protein is a capsid protein selected from: Anc80-55, Anc80-129, Anc80-156, Anc80-751, Anc80-1029, and Anc80-1712.

[0862] Embodiment A72. The modified protein of Embodiment A71, wherein the reference AAV capsid protein is a capsid protein having a sequence selected from SEQ ID NOs: 44885-44898, and 44916-44917.

[0863] Embodiment A73. A polynucleotide encoding the modified AAV capsid protein of any one of Embodiments A1 to A72.

[0864] Embodiment A74. A vector comprising the polynucleotide of Embodiment A73.

[0865] Embodiment A75. The vector of Embodiment A74, further comprising a promoter operably linked to the polynucleotide.

[0866] Embodiment A76. A host cell comprising the modified AAV capsid protein of any one of Embodiments A1 to A72, the polynucleotide specified in Embodiment A73, or the vector of Embodiment A74 or A75.

[0867] Embodiment A77. A recombinant AAV virion (rAAV) comprising the modified AAV capsid protein of any one of Embodiments A1 to A72.

[0868] Embodiment A78. The AAV virion of Embodiment A77, further comprising an exogenous polynucleotide.

[0869] Embodiment A79. The AAV virion of Embodiment A78, wherein the exogenous polynucleotide comprises a template for homology directed repair.

[0870] Embodiment A80. The AAV virion of Embodiment A78, wherein the exogenous polynucleotide comprises an expressible polynucleotide encoding a therapeutic tRNA, miRNA, gene editing guide RNA, or RNA-editing guide RNA.

[0871] Embodiment A81. The AAV virion of Embodiment A78, wherein the exogenous polynucleotide comprises an expressible polynucleotide encoding a therapeutic protein.

[0872] Embodiment A82. The AAV virion of Embodiment A81, wherein the therapeutic protein is MTM1 or a fragment thereof.

[0873] Embodiment A83. The AAV virion of Embodiment A82, wherein the expressible polypeptide comprises the sequence of SEQ ID NO: 165 or a fragment thereof.

[0874] Embodiment A84. The AAV virion of Embodiment A82, wherein the expressible polypeptide comprises the sequence having at least 80%, 85%, 90%, 95%, 98%, 99% or 100% sequence identity to any of SEQ ID Nos: 166-170.

[0875] Embodiment A85. The AAV virion of any one of Embodiments A78-A84, wherein the exogenous polynucleotide further comprises a regulatory sequence.

[0876] Embodiment A86. The AAV virion of Embodiment A85, wherein the regulatory sequence comprises expression regulatory elements (EREs).

[0877] Embodiment A87. The AAV virion of Embodiment A86, wherein the EREs comprise a CAG promoter.

[0878] Embodiment A88. The AAV virion of Embodiment A86, wherein the EREs comprise a sequence having at least 90%, at least 95%, at least 98%, at least 99% or 100% sequence identity to any one of SEQ IDs NO: 171-173.

[0879] Embodiment A89. A pharmaceutical composition comprising the AAV virion of any one of Embodiments A77-A88.

[0880] Embodiment A90. A method for treating or ameliorating or preventing a disease or condition in a subject, comprising administering a therapeutically effective amount of the AAV virion of Embodiment A77 or the pharmaceutical composition of claim 89.

[0881] Embodiment A91. The method of treating or ameliorating or preventing a disease according to Embodiment A90, wherein the disease is a muscular disease and/or the condition is muscle degeneration.

[0882] Embodiment A92. The method of treating or ameliorating or preventing a disease according to Embodiment A91, wherein said muscle is a striated muscle, preferably heart or a skeletal muscle or diaphragm.

[0883] Embodiment A93. The method of treating or ameliorating or preventing a disease according to Embodiment A92, wherein said muscular disease is a muscular dystrophy, a cardiomyopathy, a myotonia, a muscular atrophy, a myoclonus dystonia, a mitochondrial myopathy, a rhabdomyolysis, a fibromyalgia, and/or a myofascial pain syndrome.

[0884] Embodiment A94. The modified adeno-associated virus (AAV) capsid protein of any one of Embodiments A1-A72, for use in treating and/or preventing a muscular disease and/or muscle degeneration.

[0885] Embodiment A95. An AAV virion comprising the modified AAV capsid protein of any one of Embodiments A1-A72 or an AAV virion of any one of Embodiments 77-88 for use in treating and/or preventing a muscular disease and/or in muscle regeneration.

[0886] Embodiment A96. A pharmaceutical composition comprising the modified AAV capsid protein of any one of Embodiments A1 to A72, and/or the AAV virion specified in any one of Embodiments A77-A88 for use in treating and/or preventing a muscular disease and/or in muscle regeneration.

[0887] Embodiment A97. A method of transferring an exogenous polynucleotide into a muscle cell, comprising the step of administering the AAV virion specified in any one of Embodiments A77-A88 to a subject.

[0888] Embodiment A98. The method of Embodiment A97, wherein the administration results in transfer of the exogenous polynucleotide in the muscle cell, at a muscle:liver infection ratio of greater than 1 when measured by genome copies of the AAV virion.

[0889] Embodiment A99. The method of Embodiment A97, wherein the muscle:liver infection ratio ranges from 1 to 100.

[0890] Embodiment A100. The method of Embodiment A98, wherein the muscle:liver infection ratio ranges from 1 to 10.

[0891] Embodiment A101. The method of Embodiment A100, wherein the muscle:liver infection ratio ranges from 2 to 8.

[0892] Embodiment A102. The method of any one of Embodiments A97-A101, wherein the administration results in expression of the exogenous polynucleotide in the muscle cell, at a muscle:liver expression ratio of greater than 10.

[0893] Embodiment A103. The method of Embodiment A102, wherein the muscle:liver expression ratio ranges from 10 to 100.

[0894] Embodiment A104. The method of Embodiment A103, wherein the muscle:liver expression ratio ranges from 20 to 80.

[0895] Embodiment A105. The method of any one of Embodiments A97-A104, wherein the muscle:liver expression ratio ranges from 50 to 80 when measured by mRNA transcript expression.

[0896] Embodiment A106. The method of any one of Embodiments A97-A105, wherein the muscle:liver expression ratio ranges from 10 to 50 when measured by protein expression.

[0897] Embodiment A107. The method of any one of Embodiments A97-A106, wherein the muscle cell is selected from triceps surae, biceps, heart and quadricep.

[0898] Embodiment A108. Use of the AAV capsid polypeptide of any one of Embodiments A1 to A72, and/or the AAV virion specified in any one of Embodiments A77-A88 for transferring an exogenous polynucleotide into a muscle cell.

[0899] Embodiment A109. The use according to Embodiment A108, wherein said use is a non-therapeutic use, preferably wherein said use is an in vitro use.

[0900] Embodiment A110. The use according to Embodiment A108, wherein the muscle cell is selected from triceps surae, biceps, heart and quadricep.

### 7.2. Embodiment B

[0901] Embodiment B1. A modified adeno-associated virus (AAV) capsid protein, comprising a peptide segment within variable region I (VR I) having an amino acid sequence of P₁P₂P₃P₄P₅P₆P₇P₈NDNP₁₂, wherein P₁, P₂, P₃, P₄, P₅, P₆, P₇, Pa, and Pin are independently selected from any amino acid residue.

[0902] Embodiment B2. The modified AAV capsid protein of Embodiment B1, wherein (i) P₁ is independently selected from an asparagine (N), a serine (S), or a threonine (T); (ii) P₂ is independently selected from a serine (S) or a glycine (G); (iii) P₃ is independently selected from a threonine (T), a glutamine (Q), an alanine (A), or glutamate (E); (iv) P₄ is independently selected from a serine (S), a threonine (T), or an alanine (A); (v) P₅ is independently selected from a glycine (G) or an alanine (A); (vi) P₆ is independently selected from a glycine (G) or an alanine (A); (vii) P₇ is independently selected from an alanine (A) or a serine (S); (viii) P₈ is independently selected from a serine (S) or a threonine (T); and (ix) P₁₂ is independently selected from a histidine (H), a threonine (T), or an alanine (A).

[0903] Embodiment B3. The modified AAV capsid protein of Embodiment B1 or B2, wherein P₅, P₆ or both P₅ and P₆ are not an alanine (A).

[0904] Embodiment B4. The modified AAV capsid protein of Embodiment B1 or B2, wherein the peptide segment does not comprise an alanine (A) at P₆ and a threonine (T) at Pa.

[0905] Embodiment B5. The modified AAV capsid protein of any one of Embodiments B1-B4, wherein the peptide segment has a sequence of P₁P₂P₃P₄GGP₇P₈NDNP₁₂ (SEQ ID NO: 44921), wherein P₁, P₂, P₃, P₄, P₇, Pa, and Pre are independently selected from any amino acid residue.

[0906] Embodiment B6. The modified AAV capsid protein of Embodiment B5, wherein (i) P₁ is independently selected from an asparagine (N) or a serine (S); (ii) P₂ is independently selected from a serine (S) or a glycine (G); (iii) P₃ is independently selected from a threonine (T) or a glutamine (Q); (iv) P₄ is independently selected from a serine (S), a threonine (T), or an alanine (A); (v) P₇ is independently selected from an alanine (A) or a serine (S); (vi) P₈ is independently selected from a serine (S) or a threonine (T); and (vii) P₁₂ is independently selected from a histidine (H), a threonine (T), or an alanine (A).

[0907] Embodiment B7. The modified AAV capsid protein of Embodiment B5, wherein the peptide segment has a sequence of P₁P₂TP₄GGP₇P₈NDNP₁₂ (SEQ ID NO: 44922), wherein P₁, P₂, P₄, P₇, P₈, and P₁₂ are independently selected from any amino acid residue.

[0908] Embodiment B8. The modified AAV capsid protein of Embodiment B5, wherein the peptide segment has a sequence of P₁P₂QP₄GGP₇P₈NDNP₁₂ (SEQ ID NO: 44923), wherein P₁, P₂, P₄, P₇, P₈, and P₁₂ are independently selected from any amino acid residue.

[0909] Embodiment B9. The modified AAV capsid protein of Embodiment B5, wherein the peptide segment has a sequence of P₁P₂TP₄GGP₇TNDNP₁₂ (SEQ ID NO: 44924), wherein P₁, P₂, P₄, P₇, and P₁₂ are independently selected from any amino acid residue.

[0910] Embodiment B10. The modified AAV capsid protein of Embodiment B5, wherein the peptide segment has a sequence of NP₂TP₄GGP₇P₈NDNP₁₂ (SEQ ID NO: 44925), wherein P₂, P₄, P₇, P₈, and P₁₂ are independently selected from any amino acid residue.

[0911] Embodiment B11. The modified AAV capsid protein of Embodiment B5, wherein the peptide segment has a sequence of SP₂TP₄GGP₇P₈NDNP₁₂ (SEQ ID NO: 44926), wherein P₂, P₄, P₇, P₈, and P₁₂ are independently selected from any amino acid residue.

[0912] Embodiment B12. The modified AAV capsid protein of any one of Embodiments B1-B6, wherein the peptide segment is NSTSGGP₇P₈NDNH (SEQ ID NO: 44927), wherein P₇ and P₈ are independently selected from any amino acid residue.

[0913] Embodiment B13. The modified AAV capsid of protein of Embodiment B12, wherein P₇ is independently selected from an alanine (A) or a serine (S) and P₈ is independently selected from a serine (S) or a threonine (T).

[0914] Embodiment B14. The modified AAV capsid protein of Embodiment B12 or B13, wherein the peptide segment comprises: (i) NSTSGGASNDNH (SEQ ID NO: 46026), (ii) NSTSGGATNDNH (SEQ ID NO: 46029), (iii) NSTSGGSSNDNH (SEQ ID NO: 46031), or (iv) NSTSGGSTNDNH (SEQ ID NO: 46034).

[0915] Embodiment B15. The modified AAV capsid protein of any one of Embodiments B1-6, wherein the peptide segment is NSTTGGP₇P₈NDNH (SEQ ID NO: 44928), wherein P₇ and P₈ are independently selected from any amino acid residue.

[0916] Embodiment B16. The modified AAV capsid protein of Embodiment B15, wherein P₇ is independently selected from an alanine (A) or a serine (S) and P₈ is independently selected from a serine (S) or a threonine (T).

[0917] Embodiment B17. The modified AAV capsid protein of Embodiment B15 or B16, wherein the peptide segment comprises: (i) NSTTGGASNDNH (SEQ ID NO: 46073), (ii) NSTTGGATNDNH (SEQ ID NO: 46076), (iii) NSTTGGSSNDNH (SEQ ID NO: 46079), or (iv) NSTTGGSTNDNH (SEQ ID NO: 46082).

[0918] Embodiment B18. The modified AAV capsid protein of any one of Embodiments B1-B6, wherein the peptide segment is SGQTGGP₇P₈NDNH (SEQ ID NO: 44929), wherein P₇ and P₈ are independently selected from any amino acid residue.

[0919] Embodiment B19. The modified AAV capsid protein of Embodiment B18, wherein P₇ is independently selected from an alanine (A) or a serine (S) and P₈ is independently selected from a serine (S) or a threonine (T).

[0920] Embodiment B20. The modified AAV capsid protein of Embodiment B18 or B19, wherein the peptide segment comprises: (i) SGQTGGASNDNH (SEQ ID NO: 46505), (ii) SGQTGGATNDNH (SEQ ID NO: 46508). (iii) SGQTGGSSNDNH (SEQ ID NO: 46511), or (iv) SGQTGGSTNDNH (SEQ ID NO: 46514).

[0921] Embodiment B21. The modified AAV capsid protein of any one of Embodiments B1-B6, wherein the peptide segment is SGTAGGP₇P₈NDNT (SEQ ID NO: 44930), wherein P₇ and P₈ are independently selected from any amino acid residue.

[0922] Embodiment B22. The modified AAV capsid protein of Embodiment B21, wherein P₇ is independently selected from an alanine (A) or a serine (S) and P₈ is independently selected from a serine (S) or a threonine (T).

[0923] Embodiment B23. The modified AAV capsid protein of Embodiment B21 or B22, wherein the peptide segment comprises: (i) SGTAGGASNDNT (SEQ ID NO: 46554), or (ii) SGTAGGSSNDNT (SEQ ID NO: 46560).

[0924] Embodiment B24. The modified AAV capsid protein of Embodiment B21 or B22, wherein the peptide segment does not comprise SGTAGGATNDNT (SEQ ID NO: 46557) or SGTAGGSTNDNT (SEQ ID NO: 46563).

[0925] Embodiment B25. The modified AAV capsid protein of any one of Embodiments B1-6, wherein the peptide segment is SGTSGGP₇P₈NDNA (SEQ ID NO: 44931), wherein P₇ and P₈ are independently selected from any amino acid residue.

[0926] Embodiment B26. The modified AAV capsid protein of Embodiment B25, wherein P₇ is independently selected from an alanine (A) or a serine (S) and P₈ is independently selected from a serine (S) or a threonine (T).

[0927] Embodiment B27. The modified AAV capsid protein of Embodiment B25 or B26, wherein the peptide segment comprises: (i) SGTSGGASNDNA (SEQ ID NO: 46600), (ii) SGTSGGATNDNA (SEQ ID NO: 46603), (iii) SGTSGGSSNDNA (SEQ ID NO: 46606), or (iv) SGTSGGSTNDNA (SEQ ID NO: 46609).

[0928] Embodiment B28. The modified AAV capsid protein of any one of Embodiments B1-B6, wherein the peptide segment is SGTTGGP₇P₈NDNT (SEQ ID NO: 44932), wherein P₇ and P₈ are independently selected from any amino acid residue.

[0929] Embodiment B29. The modified AAV capsid protein of Embodiment B28, wherein P₇ is independently selected from an alanine (A) or a serine (S) and P₈ is independently selected from a serine (S) or a threonine (T).

[0930] Embodiment B30. The modified AAV capsid protein of Embodiment B28 or B29, wherein the peptide segment comprises: (i) SGTTGGASNDNT (SEQ ID NO: 46650), (ii) SGTTGGATNDNT (SEQ ID NO: 46653), (iii) SGTTGGSSNDNT (SEQ ID NO: 46656), or (iv) SGTTGGSTNDNT (SEQ ID NO: 46659).

[0931] Embodiment B31. The modified AAV capsid protein of any one of Embodiments B1-B6, wherein the peptide segment is SSTAGGP₇P₈NDNA (SEQ ID NO: 44933), wherein P₇ and P₈ are independently selected from any amino acid residue.

[0932] Embodiment B32. The modified AAV capsid protein of Embodiment B31, wherein P₇ is independently selected from an alanine (A) or a serine (S) and P₈ is independently selected from a serine (S) or a threonine (T).

[0933] Embodiment B33. The modified AAV capsid protein of Embodiment B31 or B32, wherein the peptide segment comprises: (i) SSTAGGASNDNA (SEQ ID NO: 47128), (ii) SSTAGGATNDNA (SEQ ID NO: 47131), (iii) SSTAGGSSNDNA (SEQ ID NO: 47134), or (iv) SSTAGGSTNDNA (SEQ ID NO: 47137).

[0934] Embodiment B34. The modified AAV capsid protein of any one of Embodiments B1-B33, wherein peptide segment has a sequence selected from Tables 28 or 30.

[0935] Embodiment B35. The modified AAV capsid protein of any one of Embodiments B1-B34, having at least 90%, 95%, 98%, 99% or 99.5% sequence identity to the sequence of a reference AAV capsid protein.

[0936] Embodiment B36. The modified AAV capsid protein of Embodiment B35, wherein the modified AAV capsid protein has one or more amino acid insertions, deletions, substitutions, or combinations thereof as compared to the reference AAV capsid.

[0937] Embodiment B37. The modified AAV capsid protein of Embodiment B35 or B36, wherein the reference AAV capsid protein is selected from VP1, VP2 and VP3.

[0938] Embodiment B38. The modified AAV capsid protein of any one of Embodiments B35-B37, wherein the reference AAV capsid protein is a capsid protein of an AAV variant selected from the group consisting of: AAV9; AAV1; AAV2; AAV6; AAV3; AAV LK03; AAV7; AAV8; AAV hu.37; AAV rh.10; AAV hu.68; AAV10; AAV5; AAV3-3; AAV4-4; AAV1-A; hu.46-A; hu.48-A; hu.44-A; hu.43-A; AAV6-A; hu.34-B; hu.47-B; hu.29-B; rh.63-B; hu.56-B; hu.45-B; rh.57-B; rh.35-B; rh.58-B; rh.28-B; rh.51-B; rh.19-B; rh.49-B; rh.52-B; rh.13-B; AAV2-B; rh.20-B; rh.24-B; rh.64-B; hu.27-B; hu.21-B; hu.22-B; hu.23-B; hu.7-C; hu.61-C; rh.56-C; hu.9-C; hu.54-C; hu.53-C; hu.60-C; hu.55-C; hu.2-C; hu.1-C; hu.18-C; hu.3-C; hu.25-C; hu.15-C; hu.16-C; hu.11-C; hu.10-C; hu.4-C; rh.54-D; rh.48-D; rh.55-D; rh.62-D; AAV7-D; rh.52-E; rh.51-E; hu.39-E; rh.53-E; hu.37-E; rh.43-E; rh.50-E; rh.49-E; rh.61-E; hu.41-E; rh.64-E; rh74; hu.42-E; rh.57-E; rh.40-E; hu.67-E; hu.17-E; hu.6-E; hu.66-E; rh.38-E; hu.32-F; AAV9/hu; hu.31-F; Anc80; Anc81; Anc82; Anc83; Anc84; Anc94; Anc113; Anc126; Anc127; Anc80L27; Anc80L59; Anc80L60; Anc80L62; Anc80L65; Anc80L33; Anc80L36; Anc80L44; Anc80L1; Anc80-55; Anc80-129; Anc80-156; Anc80-751; Anc80-1029; Anc80-1712; Anc110; and Anc80DI.

[0939] Embodiment B39. The modified AAV capsid protein of any one of Embodiments B1-B38, wherein the modified AAV capsid protein is an AAV capsid protein having a sequence selected from SEQ ID Nos: 54-152 and 215-220, or a fragment thereof.

[0940] Embodiment B40. The modified AAV capsid protein of any one of Embodiments B1-B39, wherein variable region I (VR I) corresponds to amino acid residues between position 259 to position 275 in SEQ ID NOs 54-152 or 215-220.

[0941] Embodiment B41. The modified AAV capsid protein of any one of Embodiments B1-B37, wherein the peptide segment is at a position corresponding to between S261 and Y274 of an AAV9 capsid protein (SEQ ID NO: 61).

[0942] Embodiment B42. The modified AAV capsid protein of any one of Embodiments B1-B37, wherein the peptide segment is at a position corresponding to between S260 and Y273 of an Anc80 capsid protein (SEQ ID NO: 132).

[0943] Embodiment B43. The modified AAV capsid protein of any one of Embodiments B1-B40, wherein the peptide segment is at a position corresponding to between S260 and Y273 of an Anc80L65 capsid protein (SEQ ID NO: 142).

[0944] Embodiment B44. The modified AAV capsid protein of any one of Embodiments B1-B40, wherein the peptide segment is at a position corresponding to between S260 and Y273 of an AAV2 capsid protein (SEQ ID NO: 55).

[0945] Embodiment B45. A polynucleotide encoding the modified AAV capsid protein of any one of Embodiments B1-B44.

[0946] Embodiment B46. A vector comprising the polynucleotide of Embodiment B45.

[0947] Embodiment B47. The vector of Embodiment B46, further comprising a promoter operably linked to the polynucleotide.

[0948] Embodiment B48. A host cell comprising the modified AAV capsid protein of any one of Embodiments B1-44, the polynucleotide specified in claim 45, or the vector of Embodiment B46 or B47.

[0949] Embodiment B49. A recombinant AAV virion (rAAV) comprising the modified AAV capsid protein of any one of Embodiments B1-B44.

[0950] Embodiment B50. The rAAV virion of Embodiment B49, further comprising at least one exogenous polynucleotide.

[0951] Embodiment B51. The rAAV virion of Embodiment B50, wherein the exogenous polynucleotide comprises a template for homology directed repair.

[0952] Embodiment B52. The rAAV virion of Embodiment B50, wherein the exogenous polynucleotide comprises at least one expressible polynucleotide encoding a therapeutic tRNA, miRNA, gene editing guide RNA, or RNA-editing guide RNA.

[0953] Embodiment B53. The rAAV virion of Embodiment B50, wherein the exogenous polynucleotide comprises an expressible polynucleotide encoding a therapeutic protein.

[0954] Embodiment B54. The rAAV virion of Embodiment B53, wherein the therapeutic protein is MTM1 or a fragment thereof.

[0955] Embodiment B55. The rAAV virion of Embodiment B54, wherein the expressible polynucleotide comprises the sequence of SEQ ID NO: 165 or a fragment thereof.

[0956] Embodiment B56. The rAAV virion of Embodiment B55, wherein the expressible polynucleotide comprises a sequence having at least 80%, 85%, 90%, 95%, 98%, 99% or 100% sequence identity to any of SEQ ID Nos: 166-170.

[0957] Embodiment B57. The rAAV virion of Embodiment B50, wherein the exogenous polynucleotide further comprises a regulatory sequence.

[0958] Embodiment B58. The rAAV virion of Embodiment B55, wherein the regulatory sequence comprises expression regulatory elements (EREs).

[0959] Embodiment B59. The rAAV virion of Embodiment B58, wherein the EREs comprise a CAG promoter.

[0960] Embodiment B60. The rAAV virion of Embodiment B58, wherein the EREs comprise a sequence having at least 90%, at least 95%, at least 98%, at least 99% or 100% sequence identity to any one of SEQ IDs NO: 171-173.

[0961] Embodiment B61. A pharmaceutical composition comprising the rAAV virion of any one of Embodiments B49-B60 a pharmaceutically acceptable carrier.

[0962] Embodiment B62. The pharmaceutical composition of Embodiment B61 which is in the form of a unit dose.

[0963] Embodiment B63. The pharmaceutical composition of Embodiment B61 or B62 which comprises 1×10¹⁰ to 1×10¹⁶ genome copy numbers (GC) of the rAAV and/or in which the rAAV concentration is 1×10¹⁰ vg/ml to 1×10¹⁶ vg/ml.

[0964] Embodiment B64. The pharmaceutical composition of any one of Embodiments B61-B63 which is formulated for parenteral administration, for example systemic (e.g., intravenous), intramuscular or subcutaneous administration.

[0965] Embodiment B65. An AAV virion comprising the modified AAV capsid protein of any one of Embodiments B1-B44 or the AAV virion of any one of Embodiments B49-B60 for use in treating and/or preventing a muscular disease and/or in muscle regeneration.

[0966] Embodiment B66. A pharmaceutical composition comprising the modified AAV capsid protein of any one of Embodiments B1-B44, and/or the AAV virion specified in any one of Embodiments B49-B60 for use in treating and/or preventing a muscular disease and/or in muscle regeneration.

[0967] Embodiment B67. A method for treating or ameliorating or preventing a disease or condition in a subject, comprising administering a therapeutically effective amount of the AAV virion of any one of Embodiments B49-B60 or the pharmaceutical composition of any one of Embodiments B61-B64.

[0968] Embodiment B68. The method of treating or ameliorating or preventing a disease according to Embodiment B67, wherein the effective dose comprises 1×10¹⁰ to 1×10¹⁶ genome copy numbers (GC) of the rAAV.

[0969] Embodiment B69. The method of Embodiment B67 or B68, wherein the administration is parenteral.

[0970] Embodiment B70. The method of Embodiment B67 or B68, wherein the administration is systemic (e.g., intravenous).

[0971] Embodiment B71. The method of Embodiment B67 or B68, wherein the administration is intramuscular.

[0972] Embodiment B72. The method of Embodiment B67 or B68, wherein the administration is subcutaneous.

[0973] Embodiment B73. The method of treating or ameliorating or preventing a disease according to Embodiment B67, wherein the disease is a muscular disease and/or the condition is muscle degeneration.

[0974] Embodiment B74. The method of treating or ameliorating or preventing a disease according to Embodiment B67, wherein said muscle is a striated muscle, preferably heart or a skeletal muscle or diaphragm.

[0975] Embodiment B75. The method of treating or ameliorating or preventing a disease according to Embodiment B67, wherein said muscular disease is a muscular dystrophy, a cardiomyopathy, a myotonia, a muscular atrophy, a myoclonus dystonia, a mitochondrial myopathy, a rhabdomyolysis, a fibromyalgia, and/or a myofascial pain syndrome.

[0976] Embodiment B76. A method of transferring an exogenous polynucleotide into a muscle cell, comprising the step of administering the AAV virion specified in any one of Embodiments B49-B60 to a subject.

[0977] Embodiment B77. The method of Embodiment B76, wherein the administration results in transfer of the exogenous polynucleotide in the muscle cell, at a muscle:liver infection ratio of greater than 1 when measured by genome copies of the AAV virion.

[0978] Embodiment B78. The method of Embodiment B76, wherein the muscle:liver infection ratio ranges from 1 to 100.

[0979] Embodiment B79. The method of Embodiment B77, wherein the muscle:liver infection ration ranges from 1 to 10.

[0980] Embodiment B80. The method of Embodiment B79, wherein the muscle:liver infection ratio ranges from 2 to 8.

[0981] Embodiment B81. The method of any one of Embodiments B76-B80, wherein the administration results in expression of the exogenous polynucleotide in the muscle cell, at a muscle:liver expression ratio of greater than 10.

[0982] Embodiment B82. The method of Embodiment B81, wherein the muscle:liver expression ratio ranges from 10 to 100.

[0983] Embodiment B83. The method of Embodiment B82, wherein the muscle:liver expression ratio ranges from 20 to 80.

[0984] Embodiment B84. The method of any one of Embodiments B76-B83, wherein the muscle:liver expression ratio ranges from 50 to 80 when measured by mRNA transcript expression.

[0985] Embodiment B85. The method of any one of Embodiments B76-B84, wherein the muscle:liver expression ratio ranges from 10 to 50 when measured by protein expression.

[0986] Embodiment B86. The method of any one of Embodiments B76-B85, wherein the muscle cell is selected from triceps surae, biceps, heart and quadricep.

[0987] Embodiment B87. Use of the AAV capsid polypeptide of any one of Embodiments B1-B44, and/or the AAV virion specified in any one of Embodiments B49-B60, for transferring an exogenous polynucleotide into a muscle cell.

[0988] Embodiment B88. The use according to Embodiment B87, wherein said use is a non-therapeutic use, preferably wherein said use is an in vitro use.

[0989] Embodiment B89. The use according to Embodiment B87, wherein the muscle cell is selected from triceps surae, biceps, heart and quadricep.

### 8. EXAMPLES

### 8.1. Example 1: Analysis of Muscle Tropism and Liver Tropism for AAV^{-Mut1-deco1}

[0990] Experiment AFT-MR0001 was designed to test the hypothesis that the peptide RGDLLLS (SEQ ID NO:1), when inserted into VR VIII to create a modified adeno-associated virus capsid protein, enhances gene delivery to skeletal muscle versus the unmodified protein. Further, the experiment was designed to test the hypothesis that the liver toggle mutation provides a structure that can determine efficiency of liver gene delivery and that the peptide insertion into VR VIII can act independently and/or synergistically. Two doses were also used, a low dose of 1×10¹³ gc/kg and a high dose of 5×10¹³ gc/kg, seeking to demonstrate possible equivalence of eGFP expression afforded by the modified AAV vector at a low dose with the eGFP expression observed with the unmodified vector at high dose. This experiment proved both hypotheses: the targeting peptide insertion into VR VIII of an adeno-associated virus VP1 protein enhances gene delivery to the muscle, and that combination with the liver-detargeting phenotype produces a vector with robust gene delivery to the muscle with the expected reduction in liver. Further, at a 5× lower dose, the level of expression between high dose unenhanced variants and matching low dose enhanced variants is not statistically significant.

### 8.2. Example 2: AAV Variants

[0991] The polynucleotide encoding the wild-type AAV9 VP1 capsid protein (SEQ ID NO: 61) or AAV^{mut1} capsid protein (SEQ ID NO: 163) was modified by inserting a coding sequence for the 7-mer peptide RGDLLLS (SEQ ID NO: 1) at a position that effected insertion of the peptide between amino acid residues 588 and 589 of the encoded polypeptide. The produced modified polynucleotides encode modified VP1 proteins referred to as: AAV^{deco1} capsid protein (SEQ ID NO: 158) or AAV^{mut1_deco1} capsid protein (SEQ ID NO: 159).

[0992] Corresponding AAV vectors were manufactured with the modified capsid proteins in the Affinia Therapeutics Vector Core facility via standard triple transfection into HEK293 cells. The AAV vectors produced by the method include AAV9 CAG.GFP (CAG.GFP construct encapsulated in AAV9 capsid), AAV^{mut1_deco1} CAG.GFP (CAG.GFP construct encapsulated in a capsid comprising the AAV^{mut1} capsid protein), AAV9^{deco1} CAG.GFP (CAG.GFP construct encapsulated in a capsid comprising the AAV^{deco1} capsid protein), and AAV^{mut1_deco1} CAG.GFP (CAG.GFP construct encapsulated in a capsid comprising the AAV^{mut1_deco1} capsid protein). Successful gene transfer by these vectors was detected by GFP expression in target cells. Please note that the vectors comprising a particular modified capsid protein is referred to in the Figures related to the following examples by the abbreviated term for the capsid protein itself, as will be clear from the context of the experiment.

### 8.3. Example 3: Confirmed Enhanced Muscle Tropism with Limited Liver Tropism for AAV^{mut1_deco1} in C57BL/6 Mice at Both Low and High Dosage Regimes

[0993] Gene transfer efficacy of each AAV vector prepared according to Example 1 was tested with three C57BL/6 mice, injected with one of the AAVs at one of the two different doses by intravenous tail vein injection. Total twenty-four mice were injected in total as summarized in the below table. The low dose was 1×10¹³ gc/kg (total 2×10¹¹ gc), and the high dose was 5×10¹³ gc/kg (total 1×10¹² gc). Additionally, a control mouse was injected with vehicle (1×PBS, 35 mM NaCl, 0.001% Pluronic) alone. Thus, a total 25 mice comprised the study.

TABLE 2

| | low dose | high dose |
|---|---|---|
| Vector (AAV) | (1 × 10¹³ gc/kg) | (5 × 10¹³ gc/kg) |
| AAV9 CAG.GFP | 3 mice | 3 mice |
| “AAV9” | | |
| AAVmut1 CAG.GFP | 3 mice | 3 mice |
| “AAV^{mut1}” | | |
| AAV9deco1 CAG.GFP | 3 mice | 3 mice |
| “AAV^{deco1}” | | |
| AAVmut1_deco1 CAG.GFP | 3 mice | 2 mice |
| “AAV^{mut1}^{_{—}}^{deco1}” | | |

| | |
|---|---|
| Control (vehicle) | 2 mice |

[0994] The mice were sacrificed 28 days after the injection. Individual tissues, notably the liver, major skeletal muscles of the hind limb, heart, and diaphragm, were collected at the time of necropsy. Tissue were immediately placed into the preservative RNAlater, after which the RNAlater was removed and the tissue flash frozen. The same tissues were fixed and embedded for sectioning and anti-GFP staining by immunohistochemistry (IHC).

[0995] GFP expression was assessed by anti-GFP IHC, and ddRT-PCR for the eGFP vector genome copies per DPG (DNA) and transcript (mRNA). The eGFR transcript level was compared against the transcript of a housekeeping standard RPP30. THC was performed at Histoserv Inc. (Germantown, MD). ddRT-PCR was performed at Affinia Therapeutics (Waltham, MA).

[0996] Images of exemplary liver and skeletal muscle tissue cross-sections obtained from the anti-GFP IHC are provided in FIGS. 4A-4J. The tissue cross-sections were stained with an anti-GFP primary antibody followed by an HRP-linked secondary staining and substrate addition. Brown staining of cells above the counterstain for intact cells and nuclei indicates eGFP expression. The vehicle control tissues from liver or skeletal muscle show the structure and organization expected from healthy tissues. AAV9 at 5×10¹³ gc/kg robustly transduces the liver and muscle cells (brown individual cells). GFP expression within the liver is reduced in mice injected with AAV-mut1-deco1, such that isolated individual cells are stained. On the other hand, GFP expression within muscle tissue was significantly increased in the mice injected with AAV-mut1-deco1.

[0997] Transgene transfer and expression capabilities of administered AAVs were also evaluated with ddPCR, by measuring amounts of DNA and mRNA of the transgene (eGFP) in the various tissue samples 28 days after injection. DNA genome copies and mRNA transcript copies of the transgene (eGFP) were quantified in comparison to the amounts of DNA genome copies or mRNA transcript copies of a house keeping gene (RPP30), respectively. Specifically, DNA genome copies are reported as vector genomes copies per diploid genome (VGC/DG). The formula for calculating the output is VGC/DG=(eGFP cp/μL÷RPP30 cp/μL)×2. RNA transcript copies are reported as % eGFP expression, which is calculated according to the formula. % eGFP expression=(eGFP cp/μL÷RPP30 cp/μL)×100.

[0998] Tissues were homogenized in a Qiagen Tissuelyser II (20 rps for 2 min) in lysis buffer from the Qiagen Dneasy Blood and Tissue Kit or the Qiagen RNeasy Lipid Tissue Mini Kit following the standard Qiagen protocol. Samples were eluted in 50 μL of buffer. Prior to analysis, DNA and RNA concentration and quality were determined using a NanoDrop One, using the nucleic acid (DNA or RNA) program. DNA samples were analyzed for biodistribution of vector genomes using a duplexed ddPCR method targeting the transgene (eGFP) and a reference gene (RPP30). RNA samples were analyzed for expression of the eGFP transgene using a duplexed, one-step RT-ddPCR method and a reference gene (RPP30).

[0999] mRNA was extracted from 30 mg sections of liver, and quadriceps. The results of the ddPCR assays are shown in FIG. 5A and FIG. 5B which show that AAV^{Mut1} reduces liver tropism but does not enhance muscle tropism, AAV^{Deco1} has high liver tropism and comparatively high muscle tropism, and that AAV^{mut1_deco1} has decreased liver tropism and increased muscle tropism compared to AAV9 (WT). Other muscle tissues examined, discussed below, and showed a similar trend and the DNA and RNA results generally agree.

[1000] eGFP mRNA expression in various tissues was measured by RT-ddPCR and presented as the ratio of eGFP transcripts over RPP30 transcripts, a rough indicator of eGFP mRNA copies per cell. The results are provided in FIG. 6A (liver), FIG. 6B (heart), FIG. 6C (tricep surae), FIG. 6D (quadricep), and FIG. 6E (diaphragm). For each tissue, results from three biological replicates are provided for each AAV variant at each dose (high or low dose). Statistically significant differences were determined by an ANOVA 1-way test with P-values and indicated with asterisks. * P<0.1, ** P<0.01, *** P<0.001. **** P<0.0001, ns=not significant.

[1001] FIG. 6A provides the ratio of eGFP to RPP30 transcripts in the liver. At 5×10¹³ gc/kg dose, both AAV^{mut1} and AAV^{mut1_deco1} had a greater than 3-log lower levels of eGFF expression in the liver compared to AAV9. AAV^{deco1} had almost 3-logs higher expression in the liver than AAV^{mut1_deco1}.

[1002] FIG. 6B shows the ratio of eGFP to RPP30 transcripts in the heart. Both AAV^{deco1} and AAV^{mut1} deco1 had higher expression in the heart, although the difference and significance are reduced by a single outlier within the AAV9 at 5×10¹³ gc/kg dose group, and possible signal saturation within the AAV^{deco} and AAV^{mut1_deco1} high dose group. The level of expression is significantly higher in AAV^{deco1} compared to AAVmut1 at 5×10¹³ gc/kg, and there was no significant difference between high dose AAV^{deco1} and AAV^{mut1_deco1}, notwithstanding the possible signal saturation.

[1003] FIG. 6C shows the ratio of eGFP to RPP30 transcripts in the triceps surae. Within the 5×10¹³ gc/kg groups, there was more than 1-log increase in the eGFP per RPP30 mRNA ratio in AAV9^{deco1} and AAV^{mut1_deco1} compared to AAV9 in the calf muscle tissue of the study subjects. Importantly, there was no significant difference between the high dose AAV9 group and the 1×10¹³ gc/kg low dose groups of AAV^{deco1} and AAV^{mut1_deco1}.

[1004] FIG. 6D shows the ratio of eGFP to RPP30 transcripts in the quadricep. Results were similar to the triceps surae, the other skeletal muscle tested in this study. Within the 5×10¹³ gc/kg groups, there is more than 1 log increase in eGFP per RPP30 mRNA ratio in AAV^{deco1} and AAV^{mut1_deco1} compared to AAV9 in quadricep tissue of the study subjects. Importantly, there is no significant difference between the high dose AAV9 group and the 1×10¹³ gc/kg low dose groups of AAV^{deco1} and AAV^{mut1_deco1}.

[1005] FIG. 6E shows the ratio of eGFP to RPP30 transcripts in the diaphragm.

[1006] Increase of gene delivery efficacy in deco-containing vectors was also observed in the diaphragm, but in this study all but one comparison exceeded the threshold of significance: high dose AAV9 versus high dose AAV^{deco}.

### 8.4. Example 4: Enhanced Muscle Tropism with Limited Liver Tropism for AAV^{-mut1-deco1} Confirmed at the Earlier d14 Time Point in C57BL/6 Mice

[1007] Gene transfer efficacy of AAV9 vector and AAV^{mut1_deco1} vector was tested with groups of three C57BL/6 mice, injected with one of the AAVs by intravenous tail vein injection. Total thirteen mice were injected in total as summarized in the below table. The dose was 1×10¹³ gc/kg (total 2×10¹¹ gc). Additionally, a control mouse was injected with vehicle (1×PBS, 35 mM NaCl, 0.001% pluronic) alone.

TABLE 3

| | | Dose | No. of | Study | |
|---|---|---|---|---|---|
| Treatment | Route | (vgs) | Animal | Duration | Necroscopy |
| Vehicle /control | IV | 0 | 1 | 14 days | Organ |
| AAV^{mut1} | IV | 1.00E + 13 | 3 | | collection |
| AAV^{mut1}_deco1 | IV | 1.00E + 13 | 3 | | |
| AAV^{mut1} | IV | 1.00E + 13 | 3 | 28 days | |
| AAV^{mut1}_deco1 | IV | 1.00E + 13 | 3 | | |

[1008] The mice were sacrificed 14 or 28 days after the injection. Individual tissues, notably the liver and major skeletal muscles of the hind limb (quad), were collected at the time of necropsy. Tissues were immediately placed into the preservative RNAlater, after which the RNAlater was removed and the tissue flash frozen. The same tissues were fixed and embedded for sectioning and anti-GFP staining by immunohistochemistry (IHC).

[1009] eGFP expression was assessed by anti-GFP IHC. IHC was performed at Histoserv Inc. (Germantown, MD). ddRT-PCR was performed at Affinia Therapeutics (Waltham, MA) as described above.

[1010] DNA and RNA were extracted from 30 mg sections. DNA and RNA samples were assayed for eGFP vector genome or mRNA transcript by ddRT-PCR and normalized to murine RPP30 genomic copies or RPP30 mRNA copies, respectively. Triplicate technical replicates were performed. The results are shown in FIGS. 7A-7D.

[1011] FIGS. 7A-7B show eGFP vector genome (DNA) in liver and quad tissues of C57BL/6 mice 14 days (FIG. 7A) or 28 days (FIG. 7B) after treatment with vehicle. AAV^{Mut1} and AAV^{Mut1_deco1} AAV vectors. FIGS. 7C-7D show eGFP mRNA expression in liver and quad tissues of C57BL/6 mice 14 days (FIG. 7C) or 28 days (FIG. 7D) after treatment with vehicle, AAV^{Mut1} and AAV^{Mut1_deco1} AAV vectors.

[1012] As can be seen from these data, AAV^{Mut1_deco1} enhancement of muscle tropism is observable at d14, AAV^{Mut1} and AAV^{Mut1_deco1} vector genome copies (VGs) are stable from d14 to d28; AAV^{Mut1_deco1} enhancement leads to greater accumulation of eGFP signal; and liver tropism is consistently low through all samples.

### 8.5. Example 5: Confirmed Enhanced Muscle Tropism with Limited Tropism to Liver and Other Organs for AAV^{mut1_deco1} in BALB/c Mice

[1013] Gene transfer efficacy of AAV^{mut1} and AAV^{mut1_deco1} were tested with three or six BALB/c mice, injected with one of the vectors at 5×10¹³ gc/kg (total 1×10¹² gc) by intravenous tail vein injection. Additionally, control mice were injected with vehicle (1×PBS, 35 mM NaCl, 0.001% pluronic) alone. Total twelve mice were injected in total as summarized in the below table.

TABLE 4

| | 5 × 10¹³ gc/kg |
|---|---|
| Vector (AAV) | (total 1 × 10¹² gc) |
| Control (vehicle) | 3 mice |
| AAVmut1 CAG.GFP | 6 mice |
| AAVmut1_deco1 CAG.GFP | 3 mice |

[1014] The mice were sacrificed 28 days after the injection. Individual tissues, notably the liver, major skeletal muscles of the hind limb, heart, diaphragm, brain, spinal cord, and spleen were collected at the time of necropsy.

[1015] DNA and RNA were extracted from 30 mg sections of liver and quadricep. DNA and RNA samples were assayed for eGFP vector genome or mRNA by ddRT-PCR and normalized to murine RPP30 genomic copies or RPP30 mRNA copies. Triplicate technical replicates were performed. The results are provided in FIG. 8.

[1016] The results show no increase in liver tropism with AAV^{mut1 deco1} but increase of tropism in the quadriceps compared to AAV^{mut1}. Further the data showed a similar AAV^{mut1 deco1} enhancement in the heart, triceps surae, and diaphragm compared to AAV^{mut1} There was no significant difference found in the spleen, spinal cord, or liver.

### 8.6. Example 6: Summary of Mouse Data

[1017] The below Table 5 exemplifies the Muscle:Liver infection ratios calculated for the DNA biodistribution data, the RNA expression data and the IHC expression data obtained for administration of AAV^{mut1_deco1} vector compared to AAV9 vector in Mice.

TABLE 5

| | | | DNA | | RNA | | IHC |
|---|---|---|---|---|---|---|---|
| | | DNA | Muscle:Liver | | Muscle:Liver | | Muscle:Liver |
| | | Biodis- | infection | RNA | infection | IHC | infection |
| Tissue | Treatment | tribution† | ratio | % Expression† | ratio | Expression† | ratio |
| Liver | AAV9 | 151.4 | | 418083 | | 99 | |
| Liver | AAV^{mut1}^{_{—}}^{deco1} | 0* | | 373.9 | | 4.3 | |
| Quadriceps | AAV9 | 0.9 | 0.01 | 184.0 | 0.00 | 0.7 | 0.01 |
| Quadriceps | AAV^{mut1}^{_{—}}^{deco1} | 0.3 | >10,000* | 7277.0 | 19.46 | 8.7 | 2.02 |
| Triceps | AAV9 | 0.3 | 0.00 | 322.2 | 0.00 | 0.0 | 0.00 |
| Surae | | | | | | | |
| Triceps | AAV^{mut1}^{_{—}}^{deco1} | 0.5 | >10,000* | 7092.3 | 18.97 | 15.0 | 3.49 |
| Surae | | | | | | | |
| Heart | AAV9 | 0.5 | 0.00 | 4975.2 | 0.01 | 10.7 | 0.11 |
| Heart | AAV^{mut1}^{_{—}}^{deco1} | 3.8 | >10,000* | 322.2 | 0.86 | 68.3 | 15.88 |

*when liver value is zero, then the ratio is >10,000 by convention.

### 8.7. Example 7: Confirmed Enhanced AAV^{mut1_deco1} Muscle Tropism with Limited Liver Tropism Confirmed in NHP

[1018] The objective of this study is to confirm liver retargeting and muscle transduction superiority of AAV^{mut1_deco1} vector compared to AAV9 vector in non-human primates (NHP) as was observed in mice. The results confirm enhanced muscle transduction superiority and liver de-targeting of AAV^{Mut1_Deco1} vector compared to AAV9.

[1019] Two AAV constructs were used in the experiment: (i) AAV^{-mut1.deco1}-CAG-GFP, and (ii) AAV9-CAG-GFP, each including an AAV genome construct containing a coding sequence of GFP. GFP was used to detect distribution of AAVs and expression of the transgene. Marmoset monkeys were used as the subject animals.

[1020] Total of 7 animals were divided into 3 groups as summarized in the below TABLE #. Immunosuppression of the animals began 7 days prior to AAV administration. Group 1 is a control animal administered with vehicle. Animals in Group 2 and 3 were administered with 1×10¹⁴ vg (viral genome or GC) of AAV9 vector or AAV^{mut1_deco1} vector by IV to the right saphenous vein. Animals were sacrificed on day 28 after the vehicle or AAV vector administration and their organ samples were collected for analysis.

TABLE 6

| | Route of | | | | |
|---|---|---|---|---|---|
| | Adminis- | Dose | No. of | Volume | Study |
| Treatment | tration | (vgs) | Animal | (ml) | Duration |
| Vehicle/ | IV | 0 | 1 | 0.625 | 28 days |
| control | | | | | |
| AAV9 (WT) | IV | 1.00E+14 | 3 | 0.625 | |
| AAV^{mut1}^{_{—}}^{deco1} | IV | 1.00E+14 | 3 | 0.625 | |

[1021] IHC for GFP expression were scored (blinded) by a pathologist. A second pathologist peer reviewed the data. Initial assessment for GFP expression by IHC was conducted on one section per tissue-referred to as Run 1 tissues and included liver, heart and skeletal muscle (right and left sides-tibialis, biceps, quadriceps, gastrocnemius. Two additional sections per muscle group were run to assess consistency of expression within each muscle group-referred to as Run 2.

[1022] Analysis of Run 1 tissue samples is shown in FIGS. 9A and 9B. Exemplary IHC liver tissue is shown in FIG. 9A, obtained from AAV9 treated animal on the left, and AAV^{mut1_deco1} treated animal illustrated on the right side of the chart. Exemplary IHC quadriceps tissue is shown in FIG. 9B, obtained from AAV9 treated animal on the left, and AAV^{mut1_deco1} treated animal on the right.

[1023] FIG. 10 shows the % GFP positive cells in the liver tissue (right and left side of the organ) and quadriceps tissue (right and left leg) in slides obtained from Run 1 for each animal administered vehicle or AAV (AAV9 or AAV^{mut1_deco1}).

[1024] FIG. 11 shows the % GFP positive cells in various skeletal muscle and liver tissue (average from Runs 1 and 2) for each animal administered vehicle and AAV (AAV9 or AAV^{mut1_deco1}). FIG. 12 shows the % GFP positive cells per animal in various skeletal muscle and liver tissue (average from Runs 1 and 2) for each animal administered vehicle and AAV (AAV9) or AAV^{mut1_deco1}). FIG. 13 shows the average combined quantification of % GFP positive cells per animal in various skeletal muscle and liver tissue (average from Runs 1 and 2) for each animal administered vehicle and vector (AAV9 or AAV^{mut1_deco1}).

[1025] FIG. 14 shows the % GFP positive cells in various cardiac tissue (average from Runs 1 and 2) for each animal administered vehicle and AAV (AAV9 or AAV^{mut1_deco1}). FIG. 15 shows the % GFP positive cells per animal in various cardiac muscle (average from Runs 1 and 2) for each animal administered vehicle and AAV (AAV9 or AAV^{mut1_deco1}). FIG. 16 shows the average % GFP positive cells per animal in various cardiac muscle (average from Runs 1 and 2) for each animal administered vehicle and AAV (AAV9 or AAV^{mut1_deco1}).

[1026] FIGS. 17A-17C show the average % GFP positive cells per animal in various tissues (average from Runs 1 and 2) for vehicle, AAV9 and AAV^{mut1_deco1}. FIG. 17A shows average % GFP positive cells per animal in liver tissue. FIG. 17B shows average % GFP positive cells per animal in various skeletal muscle tissue. FIG. 17C shows average % GFP positive cells per animal in various cardiac tissue.

[1027] DNA samples were analyzed for biodistribution of vector genomes in the liver and quadriceps tissue using a duplexed ddPCR method targeting the transgene (eGFP) and a reference gene (RPP30). The results are shown in FIG. 18A (liver), FIG. 18B (quadriceps). FIG. 18C (biceps), and FIG. 18D (heart) where the x-axis represents AAV vectors (wild type AAV9 on the left and AAV^{mut1deco1} on the right) and whether the sample was taken from the left or right side of the organ/animal.

[1028] mRNA transcript amounts measured by eGFP copies of eGFP over RPP30 mRNA are shown in FIG. 19A (liver), FIG. 19B (quadriceps). FIG. 19C (biceps), and FIG. 19D (heart). The x-axis represents AAV vectors (wild type AAV9 on the left and AAV^{mut1deco1} on the right) and whether the sample was taken from the left or right side of the organ/animal.

[1029] The DNA, RNA and IHC expression data obtained from NHP experiments are quantified and summarized in the below Table 7 where each IHC stain is a technical replicate, data from all tissues combined including left and right sides; averages of the data obtained for all three animals is shown. Notably, heart data includes data from ventricles and atria but does not include septum.

TABLE 7

| | | DNA Bio- | | IHC |
|---|---|---|---|---|
| | | distribution^{†} | RNA % | Expression^{†} |
| Tissue | Treatment | VGC/DG | Expression^{†} | % GFP |
| Liver | AAV9 | 73.7 (32.7) | 104.1 (107.6) | 17.5 (4.9) |
| Liver | AAV^{mut1}^{_{—}}^{deco1} | 0.7 (0.6) | 51.1 (68.3) | 1.9 (1.4) |
| Quadriceps | AAV9 | 2.2 (1.3) | 589.5(693.1) | 35.8 (17.7) |
| Quadriceps | AAV^{mut1}^{_{—}}^{deco1} | 3.8 (3.6) | 3814.4 (5954.5) | 46.4 (21.0) |
| Biceps | AAV9 | 2.5 (1.0) | 1327.3 (3005.6) | 22.6 (11.6) |
| Biceps | AAV^{mut1}^{_{—}}^{deco1} | 4.4 (6.0) | 3677.6 (3962.5) | 47.2 (14.9) |
| Heart | AAV9 | 3.6 (2.2) | 2303.6 (1503.9) | 44.6 (10.1) |
| Heart | AAV^{mut1}^{_{—}}^{deco1} | 0.5 (1.5) | 134.3 (52.1) | 20.44 (15.8) |

^{†}Mean (St. Dev.)

[1030] The below Table & exemplifies the Muscle:Liver infection ratios calculated for the DNA biodistribution data, the RNA expression data and the IHC expression data obtained for administration of AAV^{mut1_deco1} compared to AAV9 in non-human primates (NHP) as shown in the table above.

TABLE 8

| | | | DNA | | RNA | | IHC |
|---|---|---|---|---|---|---|---|
| | | DNA | Muscle:Liver | | Muscle:Liver | | Muscle:Liver |
| | | Biodis- | infection | RNA | infection | IHC | infection |
| Tissue | Treatment | tribution† | ratio | % Expression† | ratio | Expression† | ratio |
| Liver | AAV9 | 73.7 | | 104.1 | | 17.5 | |
| Liver | AAV^{mut1}^{_{—}}^{deco1} | 0.7 | | 51.1 | | 1.9 | |
| Quadriceps | AAV9 | 2.2 | 0.03 | 589.5 | 5.66 | 35.8 | 2.05 |
| Quadriceps | AAV^{mut1}^{_{—}}^{deco1} | 3.8 | 5.43 | 3814.4 | 74.65 | 46.4 | 24.42 |
| Biceps | AAV9 | 2.5 | 0.03 | 1327.3 | 12.75 | 22.6 | 1.29 |
| Biceps | AAV^{mut1}^{_{—}}^{deco1} | 4.4 | 6.29 | 3677.6 | 71.97 | 47.2 | 24.84 |
| Heart | AAV9 | 3.6 | 0.05 | 2303.6 | 22.13 | 44.6 | 2.55 |
| Heart | AAV^{mut1}^{_{—}}^{deco1} | 0.5 | 0.71 | 134.3 | 2.63 | 20.44 | 10.76 |

### 8.8. Example 8: Development of rAAV Constructs with High MTM1 Expression

[1031] Myotubular myopathy (XLMTM, OMIM 310400) is a severe congenital muscular disease due to mutations in the myotubularin gene (MTM1) and characterized by the presence of small myofibers with frequent occurrence of central nuclei. Myotubularin is a ubiquitously expressed phosphoinositide phosphatase with a muscle-specific role in man and mouse that is poorly understood.

[1032] The objective of the current study was to identify a promoter that provides a broad biodistribution of expression within skeletal muscle. We have constructed nine human MTM1 expressing AAV gene expression constructs with various promoters and transgenes to transduce skeletal muscle and express adequate amounts of MTM1 protein for the treatment of XLMTM.

### 8.8.1. Materials & Methods

### 8.8.1.1 Cloning of MTM1 Expression Constructs

[1033] A nucleotide sequence was synthesized to include the untranslated first exon and a portion of the intron from the human Cytomegalovirus (hCMV) IE gene, a portion of the intron of the second intron of the human beta globin gene, a portion of the 3^{rd} exon of the human beta globin gene, a NotI restriction site, a predicted optimal Kozak sequence, a codon optimized human MTM1 CDS with a modified stop codon using a sequence provided by Genscript, a PacI restriction site which overlaps with the modified stop codon, the Rabbit beta-globin PolyA signal sequence, an AvrII site, and the first 10 bp of the AAV2 ITR. This fragment and SA024, an AAV2 ITR plasmid containing a Desmin promoter, a chimeric intron and exon of the CMV IE gene and human beta globin, a gene of interest, and a Rabbit beta-globin PolyA signal, were digested with BstBI, which has a site in CMV IE exon I, and XhoI, which has a site in the Rabbit beta-globin PolyA signal. Portions of SA024 containing the first ITR and expression regulatory sequences 5′ to the gene of interest are provided as SEQ ID NO:204 and the portions of SA024 from the 3′ of the open reading frame of the gene of interest through the second ITR are provided as SEQ ID NO:205. The 2443 bp long fragment containing MTM1 and the 6693 bp long fragment containing the plasmid elements were isolated by agarose gel electrophoresis and eluted from the agarose using NEB Monarch DNA Gel isolation kit. Ligations of the sticky end fragments were performed with T4 DNA ligase. Successful ligation products were isolated from E. coli transformants and confirmed by restriction digest and Sanger sequencing to confirm the insertion of the codon optimized MTM1 sequence and the additional features. The portions of the vector within the ITRs (and including the ITRs) are provided as SEQ ID NO.181.

[1034] Two additional codon optimizations for the MTM1 CDS using sequences derived from algorithms provided by GeneArt and Eurofins as well as the native MTM1 CDS (SEQ ID NO:202) were synthesized (used in SEQ ID NOS: 182, 183 and 184 described below, respectively). These three sequences with the addition of a NotI site and a Kozak site at the 5′ end and a modified stop codon and PacI site at the 3′ end of the sequence were synthesized at GeneArt, Eurofins, and Genscript, respectively, An additional sequence was synthesized by Genscript using an algorithm to both optimize the codons for expression and reduce the number of CpG sequences within the synthetic product (used in SEQ ID NO:185). These fragments or plasmids containing these fragments were digested with NotI and Pack along with the vector containing SEQ ID NO: 181. The 1823 bp fragment containing the MTM1 CDSs and the 7350 bp fragment containing the plasmid and ITR sequence and other SEQ ID NO: 181 features were isolated by agarose gel electrophoresis and eluted from the agarose using NEB Monarch DNA Gel isolation kit. Ligations of the sticky end fragments were performed with T4 DNA ligase. Successful ligation products were isolated from E. coli transformants and confirmed by restriction digest and Sanger sequencing to confirm the insertion of the codon optimized or native MTM1 sequence and the additional features (the portions of these vectors within (and including) the ITRs are provided as SEQ ID NOS: 182-185).

[1035] Constructs containing a promoter which is a hybrid of the CMV immediate early enhancer, and the chicken beta-actin promoter were also made. The hybrid is referred to as the CAG promoter. The CAG promoter was amplified from construct 7701591057 (the portion of which within (and including) the ITRs is provided as SEQ ID NO:201), which had been synthesized previously, using a 5′ primer with the sequence SEQ ID NO: 209 (ttttGGTACCgacattgattattgactagttatt) which contains a KpnI restriction site and a Poly T tag to aid in restriction digestion and a region matching the start of the CMV immediate early promoter in a linear amplification reaction. The amplification product was isolated from the amplification mixture with NEB Monarch DNA Gel isolation kit. A second amplification step was performed with a primer with the sequence SEQ ID NO: 210 (aaaaaa gatate cgccegeegegc) which contains a region matching the reverse complement of the Chicken beta actin promoter, an EcoRV restriction site, and a poly A sequence to aid in fragment digestion. The 675 base pair fragment (SEQ ID NO:200) was isolated by agarose gel electrophoresis and eluted from the agarose using NEB Monarch DNA Gel isolation kit. The 675 bp fragment and SEQ ID NO:181 vector were digested with KpnI and EcoRV. The 663 bp digested fragment of the amplification and the 8581 bp fragment of the SEQ ID NO: 181 vector were isolated by agarose gel electrophoresis and eluted from the agarose using NEB Monarch DNA Gel isolation kit. Ligations of the sticky end fragments were performed with T4 DNA ligase. Successful ligation products were isolated from E. coli transformants and confirmed by restriction digest and Sanger sequencing to confirm the insertion of the CAG promoter sequence into the vector containing SEQ ID NO: 181 resulting in a vector containing SEQ ID NO.186, which includes an MTM1 CDS with codon optimizations provided by Genscript.

[1036] To insert the GeneArt codon optimized MTM1 sequence and the Eurofins codon optimized MTM1 sequence into the SEQ ID NO: 186 containing vector, vectors with SEQ ID NO: 182. SEQ ID NO: 183, and SEQ ID NO: 186 were digested with KpnI and EcoRV. The 663 base pair fragment from the SEQ ID NO: 186 containing vector and the 8581 bp fragment from the digests of the vector with SEQ ID NO:182 and SEQ ID NO:183 were isolated by agarose gel electrophoresis and eluted from the agarose using NEB Monarch DNA Gel isolation kit. Ligations of the sticky end fragments were performed with T4 DNA ligase. Successful ligation products were isolated from E. coli transformants and confirmed by restriction digest and Sanger sequencing to confirm the insertion of the CAG promoter sequence into the SEQ ID NO. 182 and SEQ ID NO: 183 vectors, resulting in vectors containing SEQ ID NO: 187 (GeneArt) and SEQ ID NO: 188 (Eurofins).

[1037] To insert the native MTM1 sequence into the vector containing SEQ ID NO: 186, the native MTM1 sequence was amplified from the vector containing SEQ ID NO: 184 using a 5′ primer with the sequence TTTGAGCGGCCOCCA (SEQ ID NO: 215) which corresponds to the Kozak and start sequence of MTM1 and contains a NotI restriction site and a 3′ primer with the sequence GATCTTAATTAAAAGTGAGTTTGCACATGGG (SEQ ID NO: 216) which contains the reverse complement to the 3′ end of MTM1, an altered stop codon, and a PacI restriction site. The 1837 base pair PCR product (SEQ ID NO: 19) was isolated by agarose gel electrophoresis and eluted from the agarose using NEB Monarch DNA Gel isolation kit. The purified amplicon and the vector containing SEQ ID NO:186 were digested with NotI and PacI. The 1823 bp fragment containing the MTM1 CDS and the 7350 bp fragment containing the plasmid and ITR sequence and other SEQ ID NO.186 features were isolated by agarose gel electrophoresis and eluted from the agarose using NEB Monarch DNA Gel isolation kit. Ligations of the sticky end fragments were performed with T4 DNA ligase. Successful ligation products were isolated from E. coli transformants and confirmed by restriction digest and Sanger sequencing to confirm the insertion of the native MTM1 sequence and the additional features SEQ ID NO: 186 resulting in a vector with SEQ ID NO: 189.

### 8.8.1.2 Cloning of Self-Complementary MTM1 Expression Constructs

[1038] The vectors described above are single stranded vectors. To overcome potential limitations on expression from these vectors, self-complementary vectors were constructed. Genscript synthesized a vector which contained the sequence of the miniTK promoter, an alternate gene of interest, the Rabbit beta-globin Poly A signal, and an AAV2 ITR which contains a deletion in the D region of the ITR. A miniTK portion of the vector is provided as SEQ ID NO: 190 and the portion of the vector containing the rabbit globin poly A and ITR is provided as SEQ ID NO: 191. This synthetic sequence was flanked by SalI site at the 5′ end and AseI at the 3′ end. This fragment was introduced into the vector comprising SEQ ID NO:201 via restriction enzyme digestion, agarose gel fragment isolation, and T4 DNA ligase ligation. Successful ligation products were isolated from E. coli transformants and confirmed by restriction digest and Sanger sequencing to confirm the insertion of self-complementary vector sequence into the vector comprising SEQ ID NO:201 resulting in a vector containing SEQ ID NOS: 190 and 191. The first ITR and miniTK portions of the vector are provided as SEQ ID NO:206 and the rabbit poly and second ITR portions of the vector are provided as SEQ ID NO:207.

[1039] To create self-complementary vectors of the appropriate size for successful packaging into AAV capsids, the miniTK promoter was synthesized with KpnI restriction site at the 5′ end and a NotI site at the 3′ end. Additionally, bases were added to the synthesize product to enhance the efficiency of restriction digestion SEQ ID NO: 192. The fragment containing SEQ ID NO: 192 was digested with KpnI and NotI and inserted into a vector containing SEQ ID NO: 184 via the same restriction sites following agarose gel electrophoresis, gel extraction, T4 ligation. This vector (the portion of which within (and including) the ITRs is provided as SEQ ID NO: 11B) after sequencing, was determined to have an undesired deletion in the 5′ ITR. However, the insert of SEQ ID NO: 193 was identical to the desired sequence. The miniTK-native MTM1 sequence was PCR amplified using the 5′ primer SEQ ID NO. 211 (tttttGtcGACTTCGCATATTAAGGTGACGCGT) which contains a polyT sequence to aid in restriction digestion, the KpnI site, and the 5′ end of the miniTK promoter and the 3′ primer SEQ ID NO. 212 (tttttt cctagg gagTGAGAGACACAAAAAATTCCAACACAC), which contains a polyT sequence to aid in restriction digestion, an AvrII site, and the reverse complement of the 3′ end of the Rabbit beta-globin PolyA signal creating SEQ ID NO: 194. SEQ ID NO: 194 and the vector containing SEQ ID NOS: 190 and 191 were digested with KpnI and SalI. The 2024 bp fragment with SEQ ID NO: 194 and the 6603 bp fragment comprising SEQ ID NO: 190 and SEQ ID NO: 191 were isolated by agarose gel electrophoresis and eluted from the agarose using NEB Monarch DNA Gel isolation kit. Ligations of the sticky end fragments were performed with T4 DNA ligase. Successful ligation products were isolated from E. coli transformants and confirmed by restriction digest and Sanger sequencing to confirm the insertion of the promoter and native MTM1 CDS into the vector with appropriate ITRs for creating a self-complementary AAV vector. The vector created this way contains a full ITR, the miniTK promoter, the native MTM1 CDS, the Rabbit beta-globin Poly A signal and an ITR with an appropriate deletion to create a self-complementary AAV vector. The portion of this vector within (and including) the ITRs is provided as SEQ ID NO:208.

[1040] To create a similar vector with a miniaturized version of the Desmin promoter, the mini Desmin promoter was synthesized with KpnI site at the 5′ end and NotI site at the 3″ end (SEQ ID NO: 195). Additional bases were added to the synthesized product to enhance the efficiency of restriction digestion (SEQ ID NO: 196). The fragment containing SEQ ID NO: 196 was digested with KpnI and NotI and inserted into a vector containing SEQ ID NO: 184 via the same restriction sites following agarose gel electrophoresis, gel extraction. T4 ligation. This vector (the portion of which within (and including) the ITRs is provided as SEQ ID NO: 197), after sequencing, was determined to have a undesired deletion in the 5″ ITR. However, the insert of SEQ ID NO: 197 was identical to the desired sequence. The miniDes-native MTM1 sequence was PCR amplified using the 5′ primer SEQ ID NO: 213 (tttttGtcGACCCTCTATAAATACCCGCTCTGG) which contains a polyT sequence to aid in restriction digestion, the KpnI site, and the 5′ end of the miniDesmin promoter and the 3″ primer SEQ ID NO. 214 (tttttt cctagg gagTGAGAGACACAAAAAATTCCAACACAC) which contains a polyT sequence to aid in restriction digestion, an Avril site, and the reverse complement of the 3′ end of the Rabbit beta-globin PolyA signal creating SEQ ID NO: 198. SEQ ID NO: 198 and the vector comprising SEQ ID NO: 190 and SEQ ID NO: 191 were digested with KpnI and SalI. The 2185 bp fragment containing SEQ ID NO: 198 and the 6603 bp fragment containing comprising SEQ ID NO: 190 and SEQ ID NO: 191 were isolated by agarose gel electrophoresis and eluted from the agarose using NEB Monarch DNA Gel isolation kit. Ligations of the sticky end fragments were performed with T4 DNA ligase. Successful ligation products were isolated from E. coli transformants and confirmed by restriction digest and Sanger sequencing to confirm the insertion of the promoter and native MTM1 CDS into the vector with appropriate ITRs for creating a self-complementary AAV vector. The vector created this way contains a full ITR, the miniDesmin promoter, the native MTM1 CDS, the Rabbit beta-globin Poly A signal and an ITR with an appropriate deletion to create a self-complementary AAV vector. The portion of this vector within (and including) the ITRs is provided as SEQ ID NO: 199.

### 8.8.1.3 Expression Studies by Cell Transfection

[1041] The RD cell line (ATCC CCL-136) was used for our in vitro expression studies. RD cells are derived from patients with Rhabdomyosarcoma, a rare form of pediatric cancer that develops from skeletal muscles. RD cells were maintained in 10% FBS DMEM inside a humidified 37 degrees C. incubator with 5% CO₂ air with serial passage every three to four days following TrypLE non-enzymatic lifting and replating at ¼th density.

[1042] 24 h prior to transfection, RD cells were lifted with TrypLE, pelleted (7, room temperature, 1400×g), and resuspended in media. Viability was determined by Trypan Blue exclusion using two chambers of a Countess automated cell counter (Thermo Fisher). Average cell density was adjusted to 3.2E5 live cells per mL and 1.6E5 viable cells were plated in 500 uL media. In a 24 well plate.

[1043] On the day of transfection, all reagents were warmed to room temperature before use. Plasmid DNA was diluted to 250 ng/uL in TE buffer. Enough reagent was used to transfect 4 wells per plasmid. 100 uL OptiMEM (gibco) plus 6 uL Lipofectamine 3000 (Thermofisher, lot 2170726) was prepared per plasmid. Separately, 100 uL of OptiMEM plus 6 ug of DNA (24 uL of 250 ng/uL diluted plasmid) plus 12 uL 3000 Reagent (Thermo Fisher) were combined. The diluted DNA was then mixed with the diluted Lipofectamine 3000, spun down briefly, and incubated at room temperature for 16 minutes. 57 uL, of the mixture was added to each of 4 wells per plasmid. Some wells of cells were left untransfected to serve as a negative control.

[1044] 24 hours post-transfection, RD cells were imaged on a BioTek Lionheart for eGFP expression to confirm successful transfection and to estimate % transfection efficiency. A 1 second exposure using the LED intensity setting of 10 was used. After imaging, the cells were washed with 500 uL DPBS. The DPBS was removed and 125 uL TrypLE was added and incubated for 5 minutes at 37 degrees C. in a humidified incubator with 5% CO2. The cells were triturated to resuspend and pelleted at 140×g at 4 degrees C. for 7 minutes. 5 mL of 2× lysis was buffer was prepared in sterile filtered dH2O with 10×RIPA buffer (Cell Signaling) with 1 tablet of Roche EDTA-free Mini Complete Protease Inhibitor. 12 uL of the 2× lysis buffer was added to the cell pellet. The lysate was vortexed briefly and spun down. Samples, lysed or unlysed, were stored at minus 80 degrees C.

[1045] Plasmids used: In addition to the MTM1 expression constructs (Seq 1 to 9) certain reference plasmids were used. Plasmid 7701591057, a fully-synthesized plasmid vector, which contains AAV2 ITRs and eGFP under the control of the CAG promoter and the Rabbit beta-globin PolyA signal was used as a transfection control for fluorescently visualizing eGFP and percent of cells successfully transfected as well as a negative control for antibody-mediated MTM1 detection. pCDNA3.1+C/(K) DYK with human native MTM1 under the control of the CMV promoter, an in-frame DYK epitope tag, and a bovine Growth Hormone PolyA signal. This was obtained from Genscript.

### 8.8.1.4 Automated Western Analysis

[1046] In vitro expression of MIMI was analyzed using the ProteinSimple Jess automated western blot. Jess was utilized to fully automate capillary loading, protein separation, incubation, and detection. Protein lysates from transfected and untransfected RD cells were diluted 1:4 in 0.1× Sample Buffer+1× Fluorescent Master Mix (ProteinSimple, PS-ST01EZ-8) and 3 uL was loaded onto a separation module (ProteinSimple, SM-W004). Capillaries were incubated with an MTM1 polyclonal antibody at a 1:15 dilution (Proteintech, 13924-1-AP) and a Secondary Mouse Antibody conjugated with HRP (ProteinSimple. DM-001). In addition to an immunoassay, the Total Protein Detection module (ProteinSimple, DM-TP01-1) was included to allow for normalization of MTM1 expression by total protein load. Total protein and MTM1 were detected by the chemiluminescence channel.

### 8.8.2. Results

[1047] Results are shown in FIG. 20. Total human myotubularin protein levels were quantified in RD muscle cells following transfection with 9 different MIMI containing expression plasmids. All Mtm1 expression plasmids expressed levels of MTM1 protein significantly greater than controls (untransfected and GFP transfected controls). The CAG promoter expressed higher MTM1 protein levels in RD cells compared to Desmin promoter containing plasmids. Codon optimization of the MTM1 transgene using Gene Art. Genscript. and Eurofins algorithms had minimal impact on expression of MTM1 protein in RD cells. These findings indicate that the CAG promoter drove higher levels of MTM1 protein expression in human RD muscle cells in vitro compared to plasmids containing the Desmin promoter.

### 8.9. Example 9: Anc80 Variants

[1048] The distribution of AA Vs containing the Anc80 library capsids (SEQ ID NO: 132) systematically administered to non-human primates (NHPs) as outlined in FIG. 21 and Table X. From this study, Applicant aimed to identify capsids in the Anc80 library having preferred distribution patterns in non-human primates.

[1049] In short, AAV capsids of the Anc80 library and 5 control capsids (AAV2, AAV5, AAV8, LK-03, Rh10) were systemically administered to four NHPs by i.v. injection at the dose of 1.6×10¹² gc/kg. In the first two animals (G72E. H92R), serum samples were obtained on days 1, 3, and 7, and other tissue samples were obtained on day 7 after the animals were sacrificed. In the second two animals (G62N, G66E), serum samples were obtained on days 1, 3, 7, 14, 28 and other tissue samples were obtained on day 28 after the animals were sacrificed.

TABLE 9
Study design for Anc80 capsid library.

| | | Route of | | | | Post |
|---|---|---|---|---|---|---|
| Group | No. of | Admini- | | | Dosage | Procedure |
| No. | Animals | stration | Animals | AAVS | (vg/kg) | Analysis |
| 3 | 2 | IV | G72E and | Anc80 | 1.6E12 | 7 days |
| | | | H92R | Library | | |
| 2 | 2 | IV | G62N and | Anc80 | 1.6E12 | 28 days |
| | | | G66E | Library | | |

[1050] Individual tissues, including the liver and major skeletal muscles of the hind limb, heart, and diaphragm, were collected at the time of necropsy. For RNA, tissues were immediately placed into the preservative RNAlater, after which the RNAlater was removed and the tissue flash frozen For DNA, tissues were homogenized in a Qiagen Tissuelyser II (20 rps for 2 min) in lysis buffer from the Qiagen Dneasy Blood and Tissue Kit or the Qiagen RNeasy Lipid Tissue Mini Kit following the standard Qiagen protocol. Samples were eluted in 50 μL of buffer. For tissue expression analysis. NGS was performed on RNA harvested from non-human primate tissue following IV infusion of the Anc80 library and reverse transcribed into cDNA for analysis. As noted above, individual tissues (i.e., the liver and major skeletal muscles of the hind limb (quad)), were collected at the time of necropsy. Tissues were immediately placed into the preservative RNAlater, after which the RNAlater was removed and the tissue flash frozen.

[1051] The viral DNA and RNA of each of the Anc80 variants were measured and enrichment of Ane80 variants in the quadricep muscle and the liver was analyzed. PCR amplified products corresponding to the bar code of the vector were analyzed via Illumina sequencers, either MiSeq or NovaSeq, to quantify the presence of each variant in tissue or test article. These counts were normalized to one million reads. Tissue enrichment was calculated by dividing tissue counts per million by test article counts per million. The base two logarithm is often used to present this last calculation. Enrichment data of Anc80 variants in the quadricep muscle (y-axis) and the liver (x-axis) are presented as individual dots in the plot in FIG. 22.

[1052] In the previous study described in WO2019217911, which is incorporated by reference in its entirety herein, it was demonstrated that amino acid at the position “P3” corresponding to amino acid 266 of Anc80 capsid protein can affect liver tropism of the AAVs containing the capsid protein. Specifically, capsids having a glycine (G) at P3 tend to have “liver on” whereas capsids having alanine (A) at P3 tend to have “liver off” properties.

[1053] Anc80 capsid variants having G (“liver on”) or A (“liver off”) at P3 position respectively were separately analyzed and their log fold changes (log (FC)) in the quadricep muscle are plotted in FIG. 23. FIG. 23 shows that most of the Anc80 variants, both liver on and liver off, have negative log fold changes in tissues compared to target input (the pool of AAV variants that were administered). The data were further analyzed in FIG. 26 by box plotting log fold changes of liver-off Anc80 capsids (left) compared to liver-on Anc80 capsids (right). Paired t-test between liver-on and liver-off variants show that there is significant difference between the two groups. FIG. 26 provides the data of two experimental animals on average, and FIG. 24 (G62N) and FIG. 25 (G66E) provide data from individual animals.

[1054] The quadricep enrichment data for the two animals are also provided in the quadrant plots of FIG. 27 (G62N) and FIG. 28 (G66E). The average data of the two animals are provided in FIG. 30. In the quadrant plots, each dot represents the quadricep enrichment of an Anc80 variant with G (“liver on”) (y-axis) or A (“liver off”) (x-axis) at P₃ position. Dots on the upper left box (UL) represent Anc80 variants with higher quadricep enrichment with G (“liver on”), dots in the upper right box (UR) represent Anc80 variants with high quadricep enrichment in both G (“liver on”) and A (“liver off”), dots in the lower left box (LL) represent Anc80 variants with low quadricep enrichment in both G (“liver on”) and A (“liver off”), and dots in the lower right box (LR) represent Anc80 variants with lower quadricep enrichment with G (“liver on”). The enrichment data from two different animals in each group were individually compared or averaged as illustrated in FIG. 29.

[1055] Anc80 variants having different amino acids at other positions—P1 (amino acid 168 of Anc80 capsid). P2 (amino acid 205), P3 (amino acid 266), P4, . . . . P10 (amino acid 587), P11 (amino acid 609)—were also analyzed and the results are provided in FIG. 31. Alternative amino acids at each variation site are summarized in the below table.

TABLE 10

| | P1 | P2 | P3 | P4 | P5 | P6 | P7 | P8 | P9 | P10 | P11 |
|---|---|---|---|---|---|---|---|---|---|---|---|
| Amino acid | 168 | 205 | 266 | 311 | 411 | 460 | 493 | 562 | 576 | 587 | 609 |
| position in | | | | | | | | | | | |
| Anc80 | | | | | | | | | | | |
| Alternative | K/R | A/S | A/G | K/R | Q/E | T/E | T/A | N/S | Q/E | Q/S | N/D |
| amino acids | | | | | | | | | | | |

In FIG. 31, Anc80 variants were sorted by decreasing order by liver-on fold change, and alternative amino acids at each variation site are color coded. The relationship of the variations at the sites and the liver-on fold changes were then analyzed as provided in FIG. 32. The analysis showed that variations at P3, P5, P6, and P10 have some pattern impact on the average log fold changes (log (FC)) of tropism to the quadricep muscle. FIG. 33 shows exemplary amino acids at the P1 to P11 positions in three liver-toggle variant pairs. Two capsids in each pair differs only at one of the P1 to P11 positions, and the one amino acid difference makes one capsid liver-on and the other capsid liver-off.

[1056] With these analysis, 6 Anc80 variants (Anc80-55, Ane80-129, Anc80-156, Anc80-751, Anc80-1029, and Anc80-1712) were selected from the Anc80 library for the high muscle tropism in the quadricep.

### 8.10. Example 10: Deco1 Targeting Peptide Enhances Muscle Delivery in Anc80 Variants

[1057] To study the effect of a targeting peptide on Anc80 variants, a targeting peptide having SEQ ID NO: 1 (“deco1”) was inserted into VR VIII of Anc80 variants (Anc80L65 (SEQ ID NO: 44895), Anc80L65^{MuT1} (SEQ ID NO: 44896), Anc80-55 (SEQ ID NO: 44885), Anc80-129 (SEQ ID NO: 44887), Anc80-156 (SEQ ID NO: 44889), Anc80-751 (SEQ ID NO: 44916), Anc80-1029 (SEQ ID NO: 44917), and Anc80-1712 (SEQ ID NO: 44893). The Anc80 variants with the deco 1 insertion are referred to here as Anc80L65^{deco1} (SEQ ID NO: 44897), Anc80L65^{mut1deco1} (SEQ ID NO: 44898), Anc80-55^{deco1} (SEQ ID NO: 44886), Anc80-129^{deco1} (SEQ ID NO: 44888), Anc80-156^{deco1} (SEQ ID NO: 44890), Anc80-1712^{deco1} (SEQ ID NO: 44894), and Anc80-751^{deco1} (SEQ ID NO: 44891), Anc80-1029^{deco1} (SEQ ID NO: 44892).

[1058] The Anc80 variants with or without deco1 peptide were then administered via IV injection to non-human primates at a concentration of 1×10¹⁴ vg/ml. The variants targeted to the muscles were quantified and the log 2 fold changes of tissue enrichment are show in FIG. 40. In some cases, the tissue enrichment is the ratio of the amount of each individual variant in the tissue divided by the amount of that same variant in the pool of AAV variants administered.

[1059] The results show that insertion of deco1 peptide increases muscle tropism of Anc variants. Six (6) out of 7 Anc80 variants with a deco1 insertion at VR VIII enhanced muscle delivery of Anc80 variants (FIG. 40). Tissue enrichment is the ratio of the amount of each individual variant in the tissue divided by the amount of that same variant in the pool of AAV variants administered.

### 8.11. Example 11: Muscle Targeting of AAV Capsids Including RGD Peptides (“VRVIII Library”)

[1060] A library of AAVs (VRVIII library) containing capsids modified to comprise a unique targeting peptide inserted into the VR VIII region of the capsid protein was generated. The modified capsid proteins include one of 44,617 unique 7-mer peptides between Q588 and A589 of AAV9^{mut1} (SEQ ID NO: 163) (“VRVIII library”). The sequences of the 7-mer peptides are provided as SEQ ID NOs: 238-44,853 (the “RGD peptide library” of as described in Table 27).

[1061] The seven amino acid positions of the targeting peptides inserted between (2588 and A589 of AAV^{mut1} VP1 capsid sequence are identified as “Y1, Y2, Y3, Y4, Y5, Y6, and Y7” in FIG. 34. The 7 amino acid positions (P1, P2, P3, Y4, P5, P6, P7) of FIG. 34 correspond to RGDX₇X₈X₉X₁₀ within X₁X₂X₃RGDX₇X₈X₉X₁₀ described as a targeting peptide in the present disclosure, where “Y1” is “R”, “Y2” is “G”, “Y3” is “D”, “Y4” is “X₇”, “Y5” is “X₈”, “Y6” is “X₉”, and “Y7” is “X₁₀” of X₁X₂X₃RGDX₇X₈X₉X₁₀ (SEQ ID NO: 44915). The peptides have amino acid residue “R” at the Y1 position, amino acid residue “G” at the Y2 position, and amino acid residue “D” at the Y3 position. Further, the peptides have amino acid residues “SAQ” as X₁X₂X₃ which are original amino acids positioned upstream of the insertion site (amino acid positions 586, 587 and 588) in AAV9mut1 VP1 capsid. Thus, capsid proteins in the VRVIII library include a targeting peptide having a sequence of “SAQRGD X₇X₈X₉X₁₀” at VRVIII.

[1062] The targeting peptides in the library include one of 15 amino acids (A, D, E, F, G, H, I, K, L, N, Q, R, S, T, V) at Y4, Y5, Y6, and Y7 positions as illustrated in FIG. 34. Random combinations of the 15 amino acids at Y4, Y5, Y6, and Y7 positions allow creation of 50,625 (15\hat{ }4) unique targeting peptide sequences. The 50,625 unique targeting peptide sequences were then quality filtered to remove variation, resulting in 40,617 unique targeting peptide sequences.

[1063] AAVs containing the modified AAV capsid proteins were produced using HEK293 cells containing an adenoviral helper gene plasmid construct and a plasmid containing the AAV rep expression cassette and a capsid coding sequence. The modified capsid coding sequence was flanked by the AAV ITR sequences to generate AAVs containing the modified capsid coding sequence encapsidated in the modified capsid proteins. After production of the AAVs, the AAV samples were analyzed by next-generation sequencing using Illumina reagents and hardware. Viral genomic DNA containing the capsid coding sequence was isolated from viral supernatant and sequenced. The analysis confirmed the presence of 44,617 capsids.

[1064] To identify modified capsid proteins that provide the desired AAV tropism (e.g., muscle targeting) in NHPs, AAVs containing the modified AAV capsids were administered to cynomolgus monkeys by IV administration. AAV containing the wild-type AAV9 capsids was included in the mixture for comparison. A control animal treated with a buffer was also included.

TABLE 11

| Group | | | Dose | | Volume |
|---|---|---|---|---|---|
| # | N | Treatment | (vg/kg) | Route | (mL) |
| 1 | 1 | TB-0017 (buffer) | NA | IV | 10 |
| 2 | 3 | TV-0080 (AAVs with | 5e13 | IV | 10 |
| | | capsids modified with | | | |
| | | 50,625 RGDX₁X₂X₃X₄ | | | |
| | | targeting peptides) and | | | |
| | | ATV-0048 (AAV with | | | |
| | | wild type AAV9 capsid | | | |
| | | protein) | | | |

[1065] Prior to the AAV administration blood samples (2.0 mL) were collected from the monkey's femoral, saphenous, or other available vein via direct venipuncture for AAV neutralizing antibodies and IgG evaluation. Blood was placed into a serum separator tube and serum was collected into 1 aliquot. The aliquot was labeled with “AA V NAb & IgG”. Serum sample was stored in −80° C. until shipment.

TABLE 12
Blood Collection

| | AAV NAbs & IGg |
|---|---|
| | (Affinia) |
| Study Day | 2 mL Blood for Serum |
| Pre-dose Day −28 | X |
| Day 1 (Prior to injection) | X |

[1066] On Day 29 after AAV administration, all study animals, were euthanized and underwent a tissue collection in accordance with PP LLC euthanasia procedures. Their tissue samples were collected with care to avoid contamination among samples. Viral genomic DNA was isolated from the tissue samples and sequenced to identify the targeting peptides in the AAVs localized in each tissue. Using the sequence data, enrichment scores for each tissue were calculated for each AAV variant containing a unique targeting peptide. In particular, the AAV variants including each targeting peptide were ranked based on a mean log fold-change tissue score (Column C of Table 27). Table 27 also includes tissue enrichment scores for each individual tissue analyzed. After determining a sequence count from sequence read data (FASTQ) following sequencing, AAV variants containing a unique targeting peptide were counted and normalized, followed by performing a tissue enrichment analysis for each tissue. Tissue enrichment analysis included Sequence Activity Relationship (SAR) analysis, Network analysis, and structural modeling. SAR analysis identified particular amino acid at a specific capsid position or sequence motifs (combination of amino acids at several positions) that significantly affects tissue tropism. Network analysis identified modules of variants that shared amino acid or peptide sequences of top performing variants. Structural modeling provided understanding of the structural effect of significant amino acids at specific capsid positions for mechanistic hypothesis formulation.

[1067] A mean log fold-change tissue enrichment score is based on the combination of amino acid residues present in the modified sequence within VR VIII. The formula used to determine a tissue enrichment score is provided below:

$$Tissue Enrichment score = log 2 FC = log 2 {MN}_{Tissue} - log 2 {MN}_{TestArticle}$$

$$scaled log 2 FC = ( log 2 FC - min ( log 2 FC ) ) / ( max ( log 2 FC ) - min ( log 2 FC ) )$$

[1068] After performing a SAR analysis, network analysis, and structural modeling, the RGD peptide library variants were ranked and a tissue enrichment score was calculated. A higher individual tissue enrichment score of columns F, G, H, I, J, K, and L equate to a higher amount of the AAV variant found in that particular tissue. Individual tissue enrichment scores for each AAV variant are shown in columns F, G, H, I, J, K, and L of Table 27.

[1069] By analyzing muscle enrichment scores corresponding to the targeting peptides having variants having an “R” amino acid residue at Y4 position (or “X₇” in X₁X₂X₃RGDX₇X₈X₉X₁₀) were found to have higher muscle enrichment scores compared to other variants having different amino acid residues at the position. A higher enrichment score is equated to a higher amount of the modified AAV capsid protein found in that particular tissue. Based on the finding, Y4 was identified to be an important position that affects muscle tropism, with amino acid residue “R” in position 4 being particularly effective. As shown in FIG. 35, the density plot shows highest tissue enrichment when Y4 is “R” as compared to other amino acid residues F, K, D, E, S, G, I, or V. Additionally, after fixing R at position 4, amino acid residues S or G at position 5 (or “X₈” in X₁X₂X₃RGDX₇X₈X₉X₁₀) (P5) and I or V at position 7 (or “X₁₀” in X₁X₂X₃RGDX₇X₈X₉X₁₀) were found to lead to higher muscle enrichment scores.

[1070] Based on the analysis the muscle-tropic sequence motif was identified as provided in FIG. 36A. FIG. 36B is a scatter plot showing muscle enrichment scores of variants (an inverse coefficient of variation, which is the mean divided by the standard deviation). Each dot represents a single variant with a unique targeting peptide, and dots corresponding to variants with the muscle-tropic motif of FIG. 36A are colored in red. The muscle enrichment scores of the variants with and without the muscle-tropic motif were further analyzed as provided in FIG. 36C, which shows that there was significant separation between targeting peptide with the muscle-tropic motif and targeting peptide without the motif.

[1071] FIG. 37A shows amino acid probability distribution of the targeting peptides that provided top 10 muscle enrichment (see Table 27). Many of the top 10 peptides included amino acid residue “R” at position 4, amino acid residues S or G at position 5 and I or V at position 7 showing significant sequence similarity to the muscle-tropic motif in FIG. 36A. In particular, the top targeting peptides (FIG. 37B) belong to a muscle-tropic sequence motif by having R, G, Q, and I, at Y4, Y5, Y6, and Y7 position, respectively. Further, the top 10 peptides bad highly similar sequences to each other. 8 out of 10 top variants were connected in a sequence similarity network. The network plot (FIG. 37C) shows a capsid represented by a “dot”, where the lines connecting various dots represent sequence connectivity between the capsids. The sequence similarity network shows that SEQ ID NO: 238 (“ATLVT013XX38181”) was the top targeting peptide for muscle tropism and has a sequence similar to other targeting peptides providing high muscle enrichment. In the network plot, each dot/line is a AAV variant. The radial axis represents the tissue enrichment score for a particular tissue. The most inner circle represents a “low tissue enrichment”, while an outer circle represents a “high tissue enrichment”. Network plots are useful for comparing the performance of a small number of variants in multiple tissues. Similar analysis was performed in muscle tropic sequence motifs (FIG. 37D) including a network comparison to literature myopeptides (FIG. 37E), thereby showing the differences between the targeting peptides descried herein and those described in the art.

[1072] FIG. 38A shows enrichment of four AAV variants (AAV9^{mut1} containing SEQ ID NO: 238 (“ATLVT013XX38181”); wild-type AAV9, AAV9^{deco1} (AAV9 capsid with the deco1 peptide), and AAV9 with SEQ ID NO. 44880). FIG. 38B is a scatter plot showing tissue enrichment scores for each tissue region assessed. The network analysis and scatter plot show that AAV9^{mut1} containing SEQ ID NO: 238 (“ATLVT013XX38181”) outperformed wild-type AAV9, AAV9^{deco1}, and AAV9 with SEQ ID NO: 44880 for muscle tropism. Further, AAV9^{mut1} containing SEQ ID NO: 238 maintained the liver-detargeting phenotype AAV9^{mut1} as compared to wild-type AAV9, showing lower liver enrichment. The targeting peptide SEQ ID NO: 238 (“ATLVT013XX38181”) consistently ranked at the top for target enrichment in all muscles except for the triceps.

[1073] FIG. 38C shows a plot of tissue enrichment scores for liver and the indicated muscle tissues for AAV9 and AAV9 comprising an M1 (RGDRGQI (SEQ ID NO: 238) targeting peptide located in VR VIII between amino acids at positions 588 and 589 or an M2 (RGDRSVV (SEQ ID NO: 239)) targeting peptide located in VR VIII between amino acids at positions 588 and 589. Capsids comprising either an M1 targeting peptide or an M2 targeting peptide showed a 4-log reduction in tissue enrichment in the liver, which indicates a 4-log reduction in liver tropism, as compared to AAV9 (see FIG. 38C). Additionally, capsids comprising either an M3 targeting peptide or an M2 targeting peptide also showed increased tissue enrichment (i.e., increased tropism) in each of the muscle tissues analyzed as compared to AAV9 (see FIG. 38C). The increased muscle tropism in capsids comprising either an M1 targeting peptide or an M2 targeting peptide ranged from 10-100 fold increased expression compared to AAV9.

[1074] FIG. 39 shows amino acid probability distribution of the targeting peptides that provided top 100 muscle enrichment. Similar to the earlier data with top 10 variants, amino acid “R” is enriched at position 4 (Y4), and amino acids “V, I, and L” are enriched at position 7 (Y7).

[1075] From this study, several targeting peptides that can drastically improve muscle delivery in the heart, diaphragm, biceps femoris, flexor digitorum, tibialis anterior, triceps, Quadriceps and gastrocnemius, were identified.

### 8.12. Example 12: Muscle Targeting of AAV Capsids Including RGD Peptides (VRVIII Mini-Library)

[1076] A library of AAVs (VRVIII mini-library) containing capsids modified to comprise a different set of targeting peptides inserted into the VR VIII region of the capsid protein was generated.

[1077] The modified capsid proteins include one of 22 unique targeting peptides (SEQ ID NO: 44859-44878, 44879, and 44883) between Q585 and A589 of AAV9 (SEQ ID NO: 61). The modified capsid proteins include the targeting peptide having the sequence of X₁X₂X₃RGDX₇X₈X₉X₁₀ in place of “SAQ”, the original amino acids at positions 586, 587 and 588 in AAV9 VP1 capsid protein. In some modified capsid proteins, X₁X₂X₃ has the original sequence, “SAQ” of the AAV9 capsid protein (SEQ ID NOs.: 44881-44882, 44911, 44912, 44913, 44918-44919), whereas in other modified capsid proteins, X₁X₂X₃ has a sequence different from the original “SAQ” (SEQ ID NOs: 44859-44878, 44879, 44880, 44883, and 44910).

[1078] AAVs containing the modified capsid proteins of the VRVIII mini-library were generated and tested as described in Example 11. They were administered to the NHPs and muscle enrichment of the variants was analyzed.

[1079] FIG. 41 shows a list of 20 targeting peptides (myoDV1-myoDV10 and myoCD5-myoCD14) in the VRVIII mini-library. FIG. 41 shows tissue enrichment scores for each of the 20 targeting peptides in muscle tissue (diaphragm, flexor digitorum profundus, heart left ventricle wall, tibialis anterior, and triceps brachii). Higher tissue enrichment score values represent greater muscle tropism, with MYODV6 and MYODV8 having the highest averages tissue enrichment score for all muscle tissue regions.

[1080] FIG. 42 shows a network plot showing log 2 fold change of tissue enrichment for each of the muscle tissues analyzed for the targeting peptide having an amino acid sequence of SEQ ID NO: 44880. MYODV6, MYODV8, MYOCD10, and MYOCD12 targeting peptides. Surprisingly, as shown in the network plot, MYODV6 and MYODV8 each have the highest overall log 2 fold change of tissue enrichment in each muscle tissue compared to MYOCD10 and MYCD12 (which contain amino acid residues “SNR” (triplet) preceding “RGD” within the targeting peptide. Additionally, MYODV6 and MYODV8 each have a higher overall log 2 fold change of tissue enrichment in each muscle tissue compared to a targeting peptide having an amino acid sequence of SEQ ID NO: 44880.

### 8.13. Example 13: SAR Analysis of Modified AAV Capsid Proteins Identifies Cardiac-Tropic Capsids

[1081] Using the data from Example 11, SAR analysis was performed with the aim of identifying modified AAV capsid proteins having different tropism for different types of muscle tissue. For example, SAR was used to identify modified AAV capsid proteins that had increased enrichment in cardiac muscle tissue as compared to skeletal muscle tissues. The reverse analysis was also performed, that is. SAR was used to identify modified AAV capsid proteins that had increased enrichment in skeletal muscle tissue as compared to cardiac muscle tissue.

[1082] As shown in FIG. 43. SAR analysis identified at least two modified AAV capsid proteins (i.e., modified AAV capsid proteins comprising either targeting peptide H1 (RGDLIGR (SEQ ID NO: 1422)) or targeting peptide H2 (RGDQSTL (SEQ ID NO: 3052)) inserted into VR VIII of AAV9 between amino acids at positions 588 and 589)) that increased tissue enrichment in cardiac muscle tissue as compared to skeletal muscle tissue.

[1083] As shown in FIG. 44, SAR analysis also identified at least two modified AAV capsid proteins (i.e., modified AAV capsid proteins comprising either targeting peptide S1 (RGDISRT (SEQ ID NO: 263)) or targeting peptide S2 (RGDRSQT (SEQ ID NO: 251)) inserted into VR VIII of AAV9 between amino acids at positions 588 and 589) that increased tissue enrichment in skeletal tissue as compared to cardiac muscle tissue.

### 8.14. Example 14: Clonal Analysis of a Subset of Modified AAV Capsid Proteins in Non-Human Primates

[1084] The objective of this study was a clonal assessment of selected modified AAV capsid proteins comprising different targeting peptides in VR VIII in non-human primates.

[1085] rAAVs comprising modified capsid proteins having a targeting peptide having a sequence of SEQ ID NO: 44864 (ENRRGDFNNL) (M3 or MYODV6) or a targeting peptide having a sequence of SEQ ID NO: 44911 (SAQRGDRGQI)) in VR VIII of AAV9 were constructed as described herein (i.e., the targeting peptide was inserted between 585 and 589 such that amino acids at positions 586, 587 and 588 were replaced with three amino acids from the targeting peptide in AAV9 VP1 capsid protein). rAAVs comprising an M1 targeting peptide in VR VIII of AAV9 were constructed as described herein (i.e., the targeting peptide was inserted between 585 and 589 such that amino acids at positions 586, 587 and 588 were replaced with three amino acids from the targeting peptide in AAV9 VP1 capsid protein) and a mut1 VR I were also tested. rAAV comprising capsid proteins having a targeting peptide with the amino acid sequence of SEQ ID NO: 44880 (ENRRGDFNNT) was used as a control. AAV9 with no targeting peptide in VR VIII was also used as a control. The control rAAV and rAAV comprising the modified capsid proteins were administered to the NHPs according to the experimental design in the table 13 below.

TABLE 13
Experimental design for Example 14.

| | | | | | Study end |
|---|---|---|---|---|---|
| | | Dose | Dose | Dose (vg/ | point (necropsy |
| Animals | Treatment | Route | Vol (ml) | animal or kg) | day 28) |
| 1-3 | AAV9 | IV | 10.0 | 5E13 vg/kg | 3 |
| 4-6 | ATLVT019XXAAV9_1000 | IV | 10.0 | 5E13 vg/kg | 3 |
| | (SEQ ID NO: 44880 | | | | |
| | (ENRRGDFNNT)) | | | | |
| 7-9 | ATLVT019XX67 | IV | 10.0 | 5E13 vg/kg | 3 |
| | SEQ ID NO: 44864 | | | | |
| | (ENRRGDFNNL) | | | | |
| | (M1 or MYODV6) | | | | |
| 10-12 | ATLVT013XX38181 | IV | 10.0 | 5E13 vg/kg | 3 |
| | SEQ ID NO: 44911 | | | | |
| | (SAQRGDRGQI) | | | | |
| | (38181) | | | | |
| 13-15 | ATLVT013XX38181 | IV | 10.0 | 5E13 vg/kg | 3 |
| | SEQ ID NO: 44911 | | | | |
| | (SAQRGDRGQI) | | | | |
| | (38181mut1) | | | | |

[1086] The NHPs were sacrificed 28 days after the injection. Individual muscle tissues, notably the tibialis anterior, quadriceps, biceps femoris, gastrocnemius, or ventricle wall were collected at the time of necropsy. For RNA, tissues were immediately placed into the preservative RNAlater, after which the RNAlater was removed and the tissue flash frozen. For DNA, tissues were homogenized in a Qiagen Tissuelyser II (20 rps for 2 min) in lysis buffer from the Qiagen Dneasy Blood and Tissue Kit or the Qiagen RNeasy Lipid Tissue Mini Kit following the standard Qiagen protocol. The same tissues were fixed and embedded for sectioning and anti-GFP staining by immunohistochemistry (IHC) as described herein.

[1087] FIG. 45 shows the median percent GFP⁺ cells for liver and the indicated muscle tissues for AAV9 and AAV9 comprising an M3 (“DV6” ENRRGDFNNL (SEQ ID NO: 44864)) targeting peptide located in VR VIII (M3 targeting peptide was inserted between 585 and 589 such that amino acids at positions 586, 587 and 588 were replaced with three amino acids from the targeting peptide in AAV9 VP1 capsid protein); an M1 (“38181” SAQRGDRGQI (SEQ ID NO: 44911)) targeting peptide located in VR VIII (M1 targeting peptide was inserted between 585 and 589 such that amino acids at positions 586, 587 and 588 were replaced with three amino acids from the targeting peptide in AAV9 VP1 capsid protein) and a mut1 VR I substitution, or an M1 (“38181” SAQRGDRGQI (SEQ ID NO: 44911)) targeting peptide located in VR VIII (M1 targeting peptide was inserted between 585 and 589 such that amino acids at positions 586, 587 and 588 were replaced with three amino acids from the targeting peptide in AAV9 VP1 capsid protein) with a wild type VR I. Capsids comprising either the M1 targeting peptide or the M3 targeting peptide also showed increased tissue enrichment (i.e., increased tropism) in each of the muscle tissues analyzed as compared to AAV9 (see FIG. 45). FIG. 46 shows representative images of IHC quantified in FIG. 45.

[1088] Results for ddRT-PCR shown eGFP RNA copies per copies of NHP RPP30 RNA is shown in the table 14 below) and FIG. 47. ddRT-PCR was performed at Affinia Therapeutics (Waltham, MA).

TABLE 14
ddRT-PCR data.

| | | VR VIII | | | | | | | |
|---|---|---|---|---|---|---|---|---|---|
| | | SEQ ID | | | Tibialis | | Biceps | | Ventricle |
| Variant | VR VIII | NO: | Animal | Diaphragm | Anterior | Quadriceps | Femoris | Gastrocnemius | Wall |
| AAV9 | Wt | — | 1 | 492.1 | 705.1 | 2505.7 | 232.6 | 173.5 | 1924.0 |
| | | | 2 | 8750.7 | 853.8 | 418.8 | 3507.0 | 287.1 | 11831.9 |
| | | | 3 | 208.3 | 42.2 | 380.5 | 641.7 | 92.8 | 4567.5 |
| ATLVT019 | ENRRGDFNNT | 44880 | 4 | 40173.1 | 26599.4 | 20347.2 | 7955.1 | 8242.2 | 17843.3 |
| XXAAV9_1000 | | | 5 | 641.5 | 26642.8 | 9801.2 | 45916.7 | 25697.3 | 10854.0 |
| | | | 6 | 18439.5 | 12852.9 | 4068.8 | 23015.3 | 4089.0 | 33818.0 |
| ATLVT019 | ENRRGDFNNL | 44864 | 7 | 17928.1 | 5638.9 | 19437.9 | 15907.5 | 27087.2 | 16086.6 |
| XX67 | | | 8 | 256249.4 | 97848.5 | 266768.8 | 87402.1 | 115773.9 | 14348.7 |
| (MYODV6) | | | 9 | 21159.9 | 13508.0 | 62078.7 | 89611.3 | 34642.6 | 7992.1 |
| ATLVT013 | SAQRGDRGQI | 44911 | 10 | 25910.0 | 20711.1 | 57160.4 | 235158.3 | 24079.2 | 17205.9 |
| XX38181 | | | 11 | 860.1 | 23940.4 | 19592.8 | 5034.9 | 11440.6 | 7624.6 |
| (38181) | | | 12 | 5371.3 | 4221.9 | 12590.9 | 12922.0 | 9971.5 | 14680.2 |
| ATLVT013 | SAQRGDRGQI | 44911 | 13 | 168927.6 | 10874.6 | 38166.3 | 12894.7 | 20214.1 | 72001.5 |
| XX38181 | | | 14 | 6651.2 | 17956.0 | 16984.7 | 56899.1 | 34666.0 | 5808.5 |
| (38181mut1) | | | 15 | 369.6 | 2415.7 | 12711.1 | 54755.1 | 20692.4 | 11766.4 |

[1089] Overall, this data showed that a modified AAV capsid protein comprising a targeting peptide of SEQ ID NO: 44864 and a modified AAV capsid protein comprising a targeting peptide of SEQ ID NO: 48391 each had increased muscle tropism compared to the controls.

### 8.15. Example 15: Analysis of AAV VRI (AAV^{-Lib1}) Capsid Library

[1090] Experiment AFT-MR0026 was designed to identify one or more amino acid modifications in variable region I (VR I) of an AAV capsid protein that decreases liver tropism and increases muscle tropism (or do not effect reduced muscle tropism as compared to a control capsid, such as the reference capsid). Initially, amino acid modifications were made in VR I based, in part, on the idea that amino acid residues in VR I that are important for binding to AAV-R overlap with the residues known to impact liver tropism (e.g., G267A in AAV9, which is the same as GP₆A in the instant application). However, to explore VR I's hidden potential to impact tropism, amino acid modifications were made at amino acid positions throughout the VR I region (e.g., between about position 258 and position 275 in a AAV9 reference capsid protein) (see FIG. 49A). Surprisingly, amino acid modifications made at amino acid residues within VR I known to target the liver (e.g., G267G in AAV9 which is the same as GP₆G in the instant application) resulted in modified capsid proteins having reduced liver tropism and increased muscle tropism (as compared to control capsids). These surprising results were also seen when analyzing modified capsid proteins having combinations of modifications, including, but not limited to, modifications at P₃P₅P₆P₈ that included threonine (T), glycine (G), glycine (G), and threonine (T), respectively (see FIG. 55, FIGS. 56A-56E, and FIGS. 57A-57B). Overall, this experiment proved that one or more amino acid modifications in the VR I region of an AAV capsid protein can enhance muscle tropism while also decreasing liver tropism.

### 8.16. Example 16: Wild Type AAV9 and AAV^{mut1} Tropism in Liver and Muscle in C57BL/6 Mice

[1091] As a preliminary assessment for determining whether mice were a suitable system for an initial screen of the AAV-^{Lib1} capsid proteins, an analysis of AAV vector tissue distribution was performed in mice following IV injection of AAV^{mut1} and wild type AAV9. A low dose of 1×10¹³ gc/kg and a high dose of 5×10¹³ go/kg were IV administered for AAV capsid to 10 week old C57BL/6 mice (see Table below). Additionally, a control mouse was injected with vehicle (1×PBS, 35 mM NaCl, 0.001% pluronic) alone. Thus, a total 14 mice comprised the study

TABLE 15
Study design table for assessing mice as
suitable model for screening AAV^{-Lib1}

| | low dose | high dose |
|---|---|---|
| Vector (AAV) | (1 × 10¹³ gc/kg) | (5 × 10¹³ gc/kg) |
| AAV9 CAG.GFP “AAV9” | 3 mice | 3 mice |
| AAVmut1 CAG.GFP “AAV^{mut1}” | 3 mice | 3 mice |

| | |
|---|---|
| Control (vehicle) | 2 mice |

[1092] Tissues were harvested 28 days after administration. Gene transfer efficacy of each AAV vector was tested with three C57BL/6 mice, injected with wild type AAV9 or AAV^{mut1} at one of the two different doses by intravenous tail vein injection. Total fourteen mice were injected in total as summarized in the above table. The low dose was 1×10¹³ gc/kg (total 2×10¹¹ gc), and the high dose was 5×10¹³ gc/kg (total 1×10¹² gc).

[1093] GFP expression was assessed by ddRT-PCR for the eGFP vector genome copies per DPG (DNA) and transcript (mRNA). The eGFP transcript level was compared against the transcript of a housekeeping standard RPP30. IHC was performed at Histoserv Inc. (Germantown, MD). ddRT-PCR was performed at Affinia Therapeutics (Waltham, MA).

[1094] Transgene transfer and expression capabilities of administered vectors were also evaluated with ddPCR, by measuring amounts of DNA and mRNA of the transgene (eGFP) in the various tissue samples 28 days after injection. DNA genome copies and mRNA transcript copies of the transgene (eGFP) were quantified in comparison to the amounts of DNA genome copies or mRNA transcript copies of a house keeping gene (RPP30), respectively. Specifically, DNA genome copies are reported as vector genomes copies per diploid genome (VGC/DG). The formula for calculating the output is VGC/DG=(eGFP cp/μL÷RPP30 cp/μL)×2. RNA transcript copies are reported as % eGFP expression, which is calculated according to the formula, % eGFP expression=(eGFP cp/μL÷RPP30 cp/μL)×100.

[1095] Tissues were homogenized in a Qiagen Tissuelyser II (20 rps for 2 min) in lysis buffer from the Qiagen Dneasy Blood and Tissue Kit or the Qiagen RNeasy Lipid Tissue Mini Kit following the standard Qiagen protocol. Samples were eluted in 50 μL of buffer. Prior to analysis, DNA and RNA concentration and quality were determined using a NanoDrop One, using the nucleic acid (DNA or RNA) program. DNA samples were analyzed for biodistribution of vector genomes using a duplexed ddPCR method targeting the transgene (eGFP) and a reference gene (RPP30). RNA samples were analyzed for expression of the eGFP transgene using a duplexed, one-step RT-ddPCR method and a reference gene (RPP30).

[1096] mRNA was extracted from 30 mg sections of liver, and quadriceps. The results of the ddPCR assays are shown in FIG. 48 which show that AAV^{Mut1} has low liver tropism but does not have high muscle tropism, AAV^{Deco1} has high liver tropism and comparatively high muscle tropism, and that AAV^{Mut1_deco1} has decreased liver tropism and increased muscle tropism compared to AAV9 (WT). Other muscle tissues examined, discussed below, and showed a similar trend and the DNA and RNA results generally agree.

[1097] eGFP mRNA expression in various tissues was measured by RT-ddPCR and presented as the ratio of eGFP transcripts over RPP30 transcripts, a rough indicator of eGFP mRNA copies per cell. The results are provided in FIG. 48 for liver, heart, tricep surae, quadricep, and diaphragm. For each tissue, results from three biological replicates are provided for each AAV variant at each dose (high or low dose).

[1098] FIG. 48 provides the eGFP mRNA per murineRPP30 transcript in the liver, quadriceps, triceps surae, heart, and diaphragm. For each dose group, mice treated with AAV^{mut1} had lower eGFP expression compared to mice treated with AAV9 for each of the five tissues measured (see FIG. 48). FIG. 48 also provides the vector genomes per DPG in the liver, quadriceps, triceps surae, heart, and diaphragm. For liver, quadriceps, triceps surae, and diaphragm, mice treated with AAV^{mut1} had fewer vector genomes per DPG compared to mice treated with AAV9 for ease dose group (see FIG. 48). For heart, AAV^{mut1} and AAV9 showed similar vector genomes per DPG for each dose group (FIG. 48).

### 8.17. Example 17: AAV VRI (AAV^{-Lib1}) Capsid Libraries

[1099] The polynucleotide encoding the wild-type AAV9 VP1 capsid protein (SEQ ID NO: 61) was modified by insertion, deletion or substitution of one or more amino acid residues between S261 and Y274 in the VR I region of AAV9. The amino acid positions between S261 and Y274 of AAV9 capsid are represented as “P₁, P₂, P₃, P₄, P₅, P₆, P₇, P₈, P₉, P₁₀, P₁₁, and P₁₂” as illustrated in FIG. 49A. In total, a library containing 3,456 unique sequences of modified AAV9 VP1 capsid proteins was produced, which is referred to herein as the AAV^{-Lib1} library or AAV^{-Lib1} capsid library. The amino acid sequences (a peptide segment in the VR I region) corresponding to the 12 amino acids between S261 and Y274 for each of the 3,456 sequences are as described in SEQ ID NOs: 251-3703. The amino acid modifications (insertion, deletion, substitution) in the VR I region of AAV9 include those described herein as shown in FIG. 49A. For reference, a sequence alignment of variable region I for certain AAV variants is shown in FIG. 49B.

### Library Construct Design and Capsid Library Preparation

[1100] The construct used for generating each of the AAVs for the AAV library (AAV^{-Lib1}) included a polynucleotide sequence located between the ITRs that encoded a sequence that was reflective of the genome of the virus that transduced the cell. For example, the AAV9 control construct included a polynucleotide sequence encoding the wild type AAV9 capsid protein (e.g., SEQ ID NO: 61). This polynucleotide was then encapsulated in an AAV virion that included an AAV9 capsid protein. For the AAV^{mut1} control, the construct included a polynucleotide sequence encoding the AAV^{mut1} capsid protein (e.g., SEQ ID NO: 163). This polynucleotide was then encapsulated in an AAV virion that included an AAV^{mut1} capsid protein. For each of the AAVs in the AAV^{-Lib1} library, each construct included polynucleotide sequence encoding a modified AAV capsid protein. This polynucleotide was then encapsulated in an AAV virion that included the same modified AAV capsid protein.

[1101] An AAV library was generated by transfecting the pooled plasmid library into HEK293 cells together with an adenoviral helper gene plasmid construct and a plasmid containing the AAV rep expression cassette. After AAV production, the AAV library was assessed for its diversity using sequencing (i.e., next-generation sequencing using Illumina reagents and hardware). DNA was isolated from viral supernatant and assessed for the presence of each of the 3,456 modified capsids based on the presence of the polynucleotide sequence encoding the same modified capsid variant present in the AAV virion. This data provided a count for each polynucleotide sequence encoding the same modified capsid variant present on the AAV virion by the sequencing, and thereby, gave a relative representation of the capsid variant using the barcode as a proxy. NOS sequencing data of the AAV library indicated that the AAV^{-VRI} library included each the 3,456 capsids as expected and included an equal distribution of the 3,456 capsid variants. As noted above, wild-type AAV9 and AAV^{mut1} capsid proteins were used as controls.

[1102] The transduction process by AAVs and related vectors resulted in both the presence of DNA and the production of an mRNA molecule both of which were reflective of the genome of the virus that transduced the cell. As demonstrated herein, in some embodiments, mRNA based-detection of a modified capsid protein using NGS was more specific and effective to determine a virus particle capable of functionally transducing a cell because it was based on the functional product produced from the AAV genome. Viral DNA using NOS was also used to detect the presence of a virus particle in the cell.

### Experimental Design

[1103] Experimental designed for testing the AAV^{-Lib1} library is as described in the Table 16 below. Group I included a control mouse injected with vehicle (1×PBS, 35 mM NaCl, 0.001% pluronic) alone. For Group 2, 5×10¹³ gc/kg of AAV^{-Lib1} Library was administered intravenously to each 10 week old C57BL/6 mice.

TABLE 16
Study designed for AAV^{-Lib1} capsid library.

| | | | | | | | Post |
|---|---|---|---|---|---|---|---|
| Group | No. of | Route of | | | | | Procedure |
| No. | Animals | Administration | Strain | Treatment | Dosage | Dosage | Analysis |
| 1 | 1 | IV | C57BL/6 | Vehicle | NA | vg/kg | 28 days |
| 2 | 8 | IV | C57BL/6 | AAV^{-Lib1} Library | 5E13 | vg/kg | 28 days |

### Tissue Analysis

[1104] Successful gene transfer by AAV^{-Lib1} Library (and controls) was detected by NGS sequencing of DNA and/or RNA harvested from mouse tissue following IV injection of the AAV^{-Lib1} library. In particular, the mice were sacrificed 28 days after the injection. Individual tissues, notably the liver, major skeletal muscles of the hind limb, heart, and diaphragm, were collected at the time of necropsy. For DNA, tissues were homogenized in a Qiagen Tissuelyser II (20 rps for 2 min) in lysis buffer from the Qiagen Dneasy Blood and Tissue Kit or the Qiagen RNeasy Lipid Tissue Mini Kit following the standard Qiagen protocol. Samples were eluted in 50 μL of buffer. For RNA, tissues were immediately placed into the preservative RNAlater, after which the RNAlater was removed and the tissue flash frozen. Variations to these general protocols are as described below.

### AAV^{-Lib1} Library Screen Data Informatics Analysis

[1105] Next generation sequencing (NGS) was used to determine the presence of AAV vector genomes (i.e., DNA) and to determine expression of AAV components (i.e., viral RNA) such as capsid sequences encoded by the AAV vector DNA. Following DNA and/or RNA isolation, sequencing library preparation, and sequencing, the resulting FASTQ reads were subjected to SeqCount QC (i.e., quality control of sequencing reads) before determining Variant Counts. Variant Counts represent the total Variant Count (i.e., sequencing reads associated with a particular capsid variant) in a sample or input test article. Prior to determining tissue enrichment, Variant Count data was normalized. Normalization included two steps. Step 1 included sequencing depth normalization:

$$log 2 CPM = log 2 ( \frac{RawVariantCount + 0.5}{TotalVariantCount + 1} \times 1 , 000 , 000 )$$

[1106] Step 2 included distribution normalization by median:

$$log 2 MN = log 2 CPM - median ( log 2 CPM )$$

[1107] Tissue enrichment score was calculated using:

$$log 2 FC = log 2 {MN}_{Tissue} - log 2 {MN}_{TestArticle}$$

$$scaled log 2 FC = \frac{( log 2 FC - min ( log 2 FC ) )}{( max ( log 2 FC ) - min ( log 2 FC ) )}$$

[1108] Tissue enrichment scores for all 3,456 variants and controls are as shown in Table 28, which is herein incorporated by reference in its entirety. The tissue enrichment measurements were used for functional interpretation of the data as well as for variant ranking and selecting capsids from the AAV^{-Lib1} library. As shown in the following Examples, tissue enrichment analysis identified numerous peptides segments having the desired tropism (e.g., decreased liver tropism and increased muscle tropism (or do not effect reduced muscle tropism as compared to a control capsid, such as the reference capsid (e.g., AAV9)). The tissue enrichment scores were also used for sequence activity relationship (SAR) analysis, network analysis, and structural modeling.

[1109] Sequence activity relationship (SAR) analysis of the AAV^{-Lib1} data was used to identify particular amino acid residues at specific amino acid positions and/or peptide segments (i.e., combinations of specific amino acid residues at specific amino acid positions) within VRI of the AAV capsid protein that significantly impact tissue tropism. Tissue enrichment scores from Table 28 were used for SAR analysis. Example 13 provides an example SAR analysis performed using the AAV^{-Lib1} data that identified particular amino acid residues at specific amino acid position and/or peptide segments within VRI of the AAV capsid proteins that significantly impacted tissue tropism (see, e.g., peptide segments 1-5 corresponding to SEQ ID NO: 44921-44926).

[1110] Network analysis of the AAV^{-Lib1} data was used to identify AAV capsid variants (from the 3,456 capsids of AAV^{-Lib1}) that shared amino acid residues at specific amino acid positions and/or peptide segments within VRI based. Tissue enrichment scores from Table 28 were used for the network analysis. For example, network analysis was used to identify the peptide segments (i.e., amino acid sequences) within VRI for the top performing capsids from the AAV^{-Lib1} library data (i.e., the AAV^{-Lib1} tissue enrichment data provided in Table 28). This analysis helped identify AAV capsids from the AAV^{-Lib1} data that significantly impacted tissue tropism and had similar peptide segments in VRI, including clusters 1-7 corresponding to SEQ ID NOs: 44927-44933.

[1111] Structural modeling was used to study the structural impact of particular amino acid residues at specific amino acid positions within the AAV^{-Lib1} capsids. Tissue enrichment scores from Table 28 were used for structural modeling. Results of structural modeling were used for mechanistic hypothesis formulation. In one example, Example 14 illustrates how structural modeling helped informed the hypothesis that particular amino acid residues at P₃, P₅, P₆, and P₈ interacted with AAV receptor (AAVR), and therefore, were key to tissue tropism.

[1112] Overall, tissue enrichment scores were used along with SAR analysis, network analysis, and structural modeling to interpret the data generated by the AAV^{-Lib1} library (e.g., data provided in Table 28). The Examples below show how analysis of tissue enrichment scores, SAR analysis, network analysis, and structural modeling were used to identify particular amino acid residues at particular amino acid positions that impact tropism.

### 8.18. Example 18: Analysis of AAV-Lil Data Showed Capsid Variants with Enhanced Muscle Tropism with Limited Liver Tropism in C57BL/6 Mice

[1113] For analysis of the AAV^{-Lib1} library. NGS was performed on DNA and/or RNA harvested from mouse tissues 28 days after IV injection of the AAV^{-Lib1} library according to the methods described herein.

[1114] In particular, gene transfer efficacy of each AAV within the AAV^{-Lib1} library was analyzed in liver and muscle (quadriceps) harvested 28 days after administration. DNA and RNA were isolated as described above and NGS was performed to determine levels of expression (RNA) and vector genomes (DNA) present in liver and muscle. Data (i.e., AAV^{-Lib1} library data) for all 3.456 capsids and controls (AAV^{mut1} and AAV9) is found in Table 28, which is herein incorporated by reference in its entirety.

[1115] FIG. 50 shows DNA levels of each capsid variant from the AAV^{-Lib1} library (variant ID on x-axis) in the liver represented as Log 2 Fold Change over test article (see AAV^{-Lib1} Library Screen Data Informatics Analysis in Example 11 above for Log 2Fold Change calculation). As noted above, the AAV^{-Lib1} library included AAV^{mut1} and wild type AAV9 as controls. As expected, AAV^{mut1} had lower liver tropism than wild type AAV9 (as described in PCT Application No. PCT/US2022/015842, which is herein incorporated by reference in its entirety). Additionally, FIG. 50 shows the AAV^{-Lib1} library includes modified capsid proteins having a range of liver tropic capsid variants. Overall, this data showed that the AAV^{-Lib1} library includes modified capsids having one or more amino acid modifications in VR I that decrease liver tropism.

[1116] As noted above, Applicant hypothesized that one or more of these modified capsid proteins would not only reduce liver tropism but also potentially increase muscle tropism (or do not effect reduced muscle tropism as compared to a control capsid, such as the reference capsid). The following examples provide a summary of the analysis performed on data from the AAV^{-Lib1} library study aiming to identify modified capsid proteins having the properties of interest.

### 8.19. Example 19: Sequence Activity Relationship (SAR) Analysis of AAV^{-Lib1}

[1117] Sequence activity relationships (SARs) of the data from the AAV^{-Lib1} library were used to determine which amino acid modifications at which residues (or combinations of amino acid modifications at various residues) in VRI decrease liver tropism. As one example of SAR, capsids with the AAV^{-Lib1} library having an amino acid substitution at position P₆ (amino acid position 266 in AAV9) were analyzed for impact on liver tropism. The AAV^{-Lib1} library includes capsid having an alanine (A) or a glycine (G) at amino acid position P₆ (FIG. 51A). This includes the alanine (A) found in the control AAV^{mut1} capsid (e.g., G266A) and the guanine (G) found in AAV9 (e.g., G266). Twenty-eight days after injection. DNA was isolated from mouse liver according to the methods described herein and sequenced to determine the amount of DNA from each capsid variant from AAV^{-Lib1} present in the liver. As shown in FIG. 51B (density plot) and FIG. 51C (empirical cumulative distribution function), an alanine (A) at P₆ (amino acid position 266) resulted in less AAV DNA in the liver than compared to when a glycine (G) was present at P₆ (amino acid position 266). This data showed that SAR could be used to identify amino acid residues in VRI that reduce liver tropism—an integral step in optimizing capsid amino acid sequences for suitability as a gene therapy vector.

[1118] Next, SAR analysis was used to determine which amino acid modifications at positions P₁, P₂, P₃, P₄, P₅, P₆, P₇, P₈, and P₁₂ decrease liver tropism (see FIG. 52A).

[1119] In particular, amino acid modifications at positions P₃, P₅, and P₆ induced statistically significant changes in liver tropism. Amino acid modifications that were tested at P₃ included an alanine (A), a glutamate (E), a glutamine (Q), and a threonine (T). As shown in FIG. 52B, modification to an alanine (A) or a glutamate (E) at P₃ reduce liver tropism as compared to capsids having a glutamine (Q) or a threonine (T) at P₃. Amino acid modifications that were tested at P₅ included an alanine (A) and a glycine (G). As shown in FIG. 52C, modification to an alanine (A) at P₅ reduced liver tropism compared to capsids having a glycine (G) at P₅. Amino acid modifications that were tested at P₆ included alanine (A) and glycine (G). As shown in FIG. 52D, modification to an alanine (A) at P₆ reduced liver tropism compared to capsids having a glycine (G) at P₆. Overall, this data that shows that amino acid modifications at individual positions P₃, P₅, and P₆ can each alone reduce liver tropism.

[1120] Next, Applicant hypothesized that amino acid substitutions at positions P₃, P₅, and P₆ could be combinatorial in the impact on liver tropism. Capsids comprising various amino acid residues at P₆ (FIG. 53A), P₅ and P₆ (FIG. 53B), and P₃, P₅, and P₆ (FIG. 53C) were assessed for liver tropism. FIG. 53A confirms previous SAR analysis showing that an analysis of all capsids in AAV^{-Lib1} having an alanine (A) at P⁶ decreased liver tropism (compared to capsids having a glycine (G) at P₆). FIG. 53B illustrates how different combinations of amino acid substitutions at P₅ and P₆ impact liver tropism. An analysis of all capsids in the AAV^{-Lib1} library having a P₅P₆ combination of AA, AG, and GA showed that these combinations reduced liver tropism compared to a P₅P₆ combination of GG. Lastly, combinations of amino acid substitutions at P₃, P₅, and P₆ were tested for impact on liver tropism. FIG. 53C provides an analysis of all capsids in the AAV^{-Lib1} library having a P₃, P₅, and P₆ combination of: AAA, AAG, AGA, AGG, EAA, EAG, EGA, EGG, QAA, QAG, QGA, QGG, TAA, TAG, TGA, and TGG (appearing from left to right on the x-axis in FIG. 53C).

[1121] Taken together, this Example showed that sequence activity relationship (SAR) analysis of the AAV^{-Lib1} library data could be used to determine which amino acid modifications at which residues or which peptide segments in VRI impact liver tropism. As the overall aim of the AAV^{-Lib1} library study was to identify AAV capsid proteins that decrease liver tropism and increase muscle tropism (or at least have comparable muscle tropism to a control (e.g., AAV9)), additional analysis (see Examples 20, 21 and 22) was performed to determine which peptide segments could produce the desired tropism.

### 8.20. Example 20: Network Analysis and Structural Modeling of AAV^{-Lib1} Library Data Identified Positions P₃, P₅, and P₆ as Important for Liver Tropism

[1122] Network analysis of AAV^{-Lib1} library data identified P₃, P₅, and P₆ as important for liver tropism. In particular, network analysis revealed that modified capsid proteins having a VRI region having a threonine (T) at P₃, a glycine (G) at P₅, and a glycine (G) at P₆ were enriched in capsid variants from the AAV^{-Lib1} library that exhibited greater liver tropism than AAV9. For example, as shown in FIG. 54 where each circle indicates a capsid variant and a line connecting the capsids indicates sequence similarity, network analysis revealed, for example, that NSTSGGSTNDNT (SEQ ID NO: 1351) had greater liver tropism than AAV9.

[1123] The network analysis supported the structural modeling data in FIG. 55. As shown in FIG. 55, P₃, P₅, P₆, and P₈ correspond to amino acid residues TGGT, respectively, where modelling predicted that P₃T is involved in internal stabilization, P₅G and P₆G maintain loop flexibility, and P₇ and P₈ form direct Hydrogen bonds with AAV receptor (AAVR), where a P₈T resulted in 2 more Hydrogen bonds than other amino acids at P₈.

[1124] Overall, network analysis and structural modeling of the AAV^{-Lib1} library data provided an independent means by which to identify amino acid modifications within VRI that impact liver tropism. As noted above, the overall aim of the AAV^{-Lib1} library study was to identify AAV capsid proteins that decrease liver tropism and increase muscle tropism (or do not effect reduced muscle tropism as compared to a control capsid, such as the reference capsid (e.g., AAV9))). Therefore, additional analysis (see Examples 21 and 22) was performed to determine which peptide segments harbored the desired tropism.

### 8.21. Example 21: Analysis of RNA Levels from AAV^{-Lib1} Showed Enrichment Variation in Liver and Heart Tropism Based on Amino Acid Modification P₃, P₅, and P₆

[1125] With one of the aims of the AAV^{-Lib1} library study to identify AAV capsid proteins that decrease liver tropism and increase muscle tropism (or at least have comparable muscle tropism to a control (e.g., AAV9)), expression data from mouse heart and mouse liver were analyzed to identify peptide segments that harbored the desired tropism.

[1126] For expression analysis, NGS was performed on RNA harvested from mouse tissue following IV infusion of the AAV^{-Lib1} library. As noted above, individual tissues (i.e., the liver and major skeletal muscles of the hind limb (quad)), were collected at the time of necropsy. Tissues were immediately placed into the preservative RNAlater, after which the RNAlater was removed and the tissue flash frozen. As shown in FIGS. 56A-56F, expression analysis of RNA isolated from liver and heart revealed that particular AAV capsids from the AAV^{-Lib1} library exhibited residue-specific variation in tropism based on the particular amino acid modifications at P₃, P₅, and/or P₆. In some instances, the amino acid residues that showed increased muscle tropism also exhibited liver tropism. This suggested that the AAV^{-Lib1} library includes capsids having a range of both muscle tropism and liver tropism.

### 8.22. Example 22: Sequence Activity Relationship (SAR) Analysis Comparing Heart and Liver Data for Amino Acid Modifications at P₃, P₅, and P₆ Showed Specific Amino Acid Combinations Enhanced Muscle Tropism but Reduced Liver Tropism

[1127] In this Example, Applicant hypothesized that capsids having particular amino acid residues at specific amino acid positions within VRI harbor both increased muscle tropism and reduced liver tropism and that by modifying the amino acid sequences surrounding these positions, the Applicant could create an AAV capsid that maximizes muscle tropism while also limiting liver tropism. Sequence activity relationship (SAR) analysis based on DNA and RNA isolated from the AAV^{-Lib1} library and analyzed according to the methods described above, revealed that specific combinations of amino acid modifications enhanced muscle tropism and reduced liver tropism. FIG. 57A shows enrichment in liver DNA (x-axis) plotted against enrichment in liver RNA (y-axis) for capsids comprising various combination of amino acid modifications at P₃, P₅, and P₆. As shown in FIG. 57A, some sequence combinations, such as TGG, provide a range of liver detargeting (i.e., capsids having a TGG at positions P₃, P₅, and P₆, respectively) whereas most other sequence combinations detarget the liver. FIG. 57B shows enrichment in liver DNA (x-axis) plotted against enrichment in heart RNA (y-axis) for capsids comprising various combination of amino acid modifications at P₃, P₅, and P₆. As shown in FIG. 57B, some sequence combinations, such as those including QGG and TGG were enriched in both liver and muscle. In contrast, some sequence combinations, such as AAA, AAG, AGA, QAA, QAG, QGA, TAA, TAG, and TGA, had enhanced liver detargeting and increased muscle tropism.

[1128] Looking closer at the data for capsids comprising peptide segments having the amino acid combination of a threonine (T), a glycine (G), and a glycine (G) (TGG) at P₃, P₅, and P₆ revealed that this combination at least partially uncoupled liver and heart expression. In other words, expression in the liver did not correlate as tightly with expression in the muscle for capsids comprising the amino acid combination of TGG at P₃, P₅, and P₆.

[1129] FIG. 58A shows enrichment in liver DNA (x-axis) plotted against enrichment in liver RNA (y-axis) for AAV capsids having a TGG combination of amino acid modifications at P₃, P₅, and P₆, respectively. Overlaying the data for AAV^{mut1} and AAV9 onto the plot in FIG. 58A shows AAV^{mut1} liver tropism compared to AAV9 liver tropism and the liver tropism for a subset capsid variants in the AAV^{-Lib1} library.

[1130] FIG. 58B shows enrichment in liver DNA (x-axis) plotted against enrichment in heart RNA (y-axis) for AAV capsids having a threonine (T), a glycine (G), and a glycine (G) at P₃, P₅, and P₆, respectively. Overlaying data for AAV^{mut1} and AAV9 onto the TGG plot in FIG. 58B highlights the lack of correlation between liver RNA and heart RNA for the modified capsids comprising TGG at P₃, P₅, and P₆.

[1131] Next, looking for mechanistic insight into the tropism for modified capsids comprising a TGG at P₃, P₅, and P₆, amino acid positions (e.g. P₁) within VRI were analyzed for correlation with the TGG tropism data (see FIG. 58C). This analysis revealed that particular amino acid modifications at the P₁ position correlated with the TOG group impact on tropism, meaning certain modification at P₁ correlated with liver tropism, reduced liver tropism, muscle tropisms, reduce muscle tropism, or a combination thereof. In particular, modified capsid proteins having a threonine (T) at P₁ exhibited heart enrichment levels below that of the control AAV^{mut1} (FIG. 58C, yellow dots). In contrast, modified capsid proteins having an asparagine (N) or a serine (S) at P₁ exhibited increased heart and increased liver enrichment compared to AAV^{mut1} (FIG. 58C, blue dots).

[1132] FIG. 58D shows enrichment in liver RNA (x-axis) plotted against enrichment in heart RNA (y-axis) for capsids having a threonine (T), a glycine (G), and a glycine (G) combination of amino acid residues at P₃, P₅, and P⁶, respectively. Particular subpopulations having NGTT, NSTT, SGAA, and SGAT at positions P₁, P₂, P₄, and P¹² are identified. Capsids comprising a peptide segment having a TGG at P₃, P⁵, and P₆ and SGAT at positions P₁, P₂, P₄, and P₁₂ were identified as capsids of interest based on mid to low levels of liver tropism (compared to AAV9) and increased muscle tropism (compared to AAV9). Positions of AAV^{mut1} and AAV9 controls are indicated by arrows and corresponding text.

[1133] FIG. 58E shows enrichment in liver RNA (x-axis) plotted against enrichment in heart RNA (y-axis) for capsids having a threonine (Q), a glycine (G), and a glycine (G) combination of amino acid residues at P₃, P₅, and P₆, respectively. Particular subpopulations having SGTH at positions P₁, P₂, P₄, and P₁₂ are identified. Capsids comprising a peptide segment having a TGG at P₃, P₅, and P₆ and SGTH at positions P₁, P₂, P₄, and P₁₂ were identified as capsids of interest based on mid to low levels of liver tropism (compared to AAV9) and increased muscle tropism (compared to AAV9). Positions of AAV^{mut1} and AAV9 controls are indicated by arrows and corresponding text.

[1134] FIG. 58F shows average enrichment in liver RNA (x-axis) plotted against enrichment in heart RNA (y-axis) for all AAV^{-Lib1} capsids having a threonine (T), a glycine (G), and a glycine (G) combination of amino acid residues at P₃, P₅, and P₆, respectively. Positions of AAVmut1 and AAV9 controls are indicated by corresponding text.

[1135] FIG. 58G shows enrichment in liver RNA (x-axis) plotted against enrichment in heart RNA (y-axis) for 24 selected capsids having a threonine (T), a glycine (G), and a glycine (G) combination of amino acid residues at P₃, P₅, and P₆, respectively. The 24 selected capsids correspond to groups: 1 NSTSGGP₇P₈NDNH (e.g., SEQ ID NO: 44927); group 2: NSTTGGP₇P₈NDNH (SEQ ID NO: 44928); group 4: SGTAGGP₇P₈NDNT (SEQ ID NO: 44930); group 5: SGTSGGP₇P₈NDNA (SEQ ID NO: 44931); group 6: SGTTGGP₇P₈NDNT (SEQ ID NO: 44932); and group 7: SSTAGGP₇P₈NDNA (SEQ ID NO: 44933). FIG. 58G shows that capsids comprising peptides segments sequences in groups 1 to 7 (i.e., SEQ ID NOs: 44927-44933) have detarget the liver while not effecting significant reduction muscle tropism. For example, 3× reduction in muscle (e.g., heart) tropism corresponds to 100× detargeting in the liver. FIG. 58H and FIG. 58I shows enrichment in liver RNA (x-axis) plotted against enrichment in heart RNA (y-axis) for 6 groups where each group has a threonine (T), a glycine (G), and a glycine (G) combination of amino acid residues at P₃, P₅, and P₆, respectively.

[1136] Overall, this data showed that AAV capsids comprising peptide segments having sequences in groups 1 to 7 (i.e., SEQ ID NOs: 44927-44933) include capsids having the desired tropism.

### 8.23. Example 23: Summary of Mouse Data

[1137] Overall, the AAV^{-Lib1} library data showed that AAV capsids comprising particular peptide segments in variable region I (VRI) bad decreased liver tropism and increased muscle tropism (or at least had comparable muscle tropism to the AAV9 control). For example, Table 17 lists data for 28 AAV capsids selected from the AAV^{-Lib1} library data (see Table 28) with each AAV capsid having a different peptide segment within VRI. These 28 AAV capsids met the criteria of having reduced liver tropism and had increased muscle tropism (or do not effect reduced muscle tropism as compared to a control capsid, such as the reference capsid (e.g., AAV9)). The Liver DNA, Liver RNA. Heart DNA, and Heart RNA values in Table 10 and Table 28 are tissue enrichment scores shown as Log 2Fold Change (FC) to test article.

TABLE 17
Tissue enrichment data for AAV capsids from AAV^{-Libl}
Library comprising the indicated peptide segment in VRI

| | SEQ | Sequence | | | | |
|---|---|---|---|---|---|---|
| | ID | (peptide | Liver | Liver | Heart | Heart |
| variant_id | NO: | segment) | DNA | RNA | DNA | RNA |
| ATLVT012XX1092 | 46026 | NSTSGGASNDNH | 7.98 | 9.47 | 1.07 | 3.41 |
| ATLVT012XX1095 | 46029 | NSTSGGATNDNH | 8.8 | 10.51 | 1.1 | 4.12 |
| ATLVT012XX1097 | 46031 | NSTSGGSSNDNH | 8.46 | 9.88 | 1.13 | 3.37 |
| ATLVT012XX1100 | 46034 | NSTSGGSTNDNH | 9.42 | 10.77 | 0.79 | 3.51 |
| ATLVT012XX1139 | 46073 | NSTTGGASNDNH | 5.29 | 6.39 | 0.68 | 3.29 |
| ATLVT012XX1142 | 46076 | NSTTGGATNDNH | 7.26 | 8.16 | 0.93 | 4.25 |
| ATLVT012XX1145 | 46079 | NSTTGGSSNDNH | 7.06 | 7.38 | 0.79 | 3.51 |
| ATLVT012XX1148 | 46082 | NSTTGGSTNDNH | 8.27 | 8.69 | 0.68 | 3.72 |
| ATLVT012XX1571 | 46505 | SGQTGGASNDNH | 6.54 | 8.15 | 1.31 | 3.5 |
| ATLVT012XX1574 | 46508 | SGQTGGATNDNH | 9.6 | 12.38 | 0.01 | 4.01 |
| ATLVT012XX1577 | 46511 | SGQTGGSSNDNH | 3.37 | 4.17 | 1.49 | 2.66 |
| ATLVT012XX1580 | 46514 | SGQTGGSTNDNH | 8 | 8.23 | 0.82 | 4.32 |
| ATLVT012XX1620 | 46554 | SGTAGGASNDNT | 6.3 | 9.6 | 0.57 | 4.51 |
| ATLVT012XX1626 | 46560 | SGTAGGSSNDNT | 5.86 | 5.69 | 2.35 | 4.55 |
| ATLVT012XX1666 | 46600 | SGTSGGASNDNA | 4.83 | 5.82 | 2.01 | 3.56 |
| ATLVT012XX1669 | 46603 | SGTSGGATNDNA | 4.75 | 6.4 | 1.26 | 3.69 |
| ATLVT012XX1672 | 46606 | SGTSGGSSNDNA | 4.17 | 5.83 | 0.54 | 3.47 |
| ATLVT012XX1675 | 46609 | SGTSGGSTNDNA | 6.06 | 5.89 | 0.78 | 3.95 |
| ATLVT012XX1716 | 46650 | SGTTGGASNDNT | 4.4 | 5.75 | 1.26 | 2.61 |
| ATLVT012XX1719 | 46653 | SGTTGGATNDNT | 5.54 | 6.78 | 0.98 | 2.47 |
| ATLVT012XX1722 | 46656 | SGTTGGSSNDNT | 4.01 | 5.43 | 0.54 | 2.99 |
| ATLVT012XX1725 | 46659 | SGTTGGSTNDNT | 5.83 | 5.77 | 1.3 | 3.32 |
| ATLVT012XX2194 | 47128 | SSTAGGASNDNA | 6.46 | 7.2 | 0.11 | 3.67 |
| ATLVT012XX2197 | 47131 | SSTAGGATNDNA | 7.08 | 9.46 | 1.03 | 3.88 |
| ATLVT012XX2200 | 47134 | SSTAGGSSNDNA | 5.42 | 5.4 | 0.59 | 3.84 |
| ATLVT012XX2203 | 47137 | SSTAGGSTNDNA | 7.17 | 7.86 | −0.09 | 4.47 |
| ATLVT012XXAAV9 | 48388 | NSTSGGSSNDNA | 10.85 | 13.11 | 1.65 | 3.83 |
| ATLVT012XXMUT1 | 48390 | NSTSGASTNDNA | 3.84 | 2.84 | 0.6 | 2.27 |
| ATLVT012XXAAV9LIO | 48389 | NSTSGASSNDNA | 3.35 | 3.29 | 1.18 | 1.56 |

### 8.24. Example 24: Analysis of AAV^{-Lib1} in Non-Human Primate to Identify VRI Variants with Enhanced Muscle Tropism with Limited Liver Tropism

[1138] The objective of this study was to assess the 3,456 modified capsid proteins from the AAV^{-Lib1} in non-human primates (NHP) to identify capsids having VRI variants that enhance muscle tropism and limit liver tropism.

[1139] NHPs were administered the same AAV^{-Lib1} library as described in Example 15. Briefly, a library containing 3,456 unique sequences of modified AAV9 VP1 capsid proteins was produced, which is referred to herein as the AAV-Lil library or AAV^{-Lib1} capsid library. The peptide segment of 12 amino acids positioned between S261 and Y274 for each of the 3,456 modified AAV9 VP1 capsid sequence are as described in SEQ ID NOs: 251-3703. The amino acid modifications (insertions, deletions, substitutions) in the VRI region of AAV9 included those described herein as shown in FIG. 49A. Additionally, wild-type AAV9 and AAV^{mut1} capsid proteins are used as controls. Wild-type AAV9 is known to target the liver whereas AAV^{mut1} has a liver detargeting phenotype.

### Experimental Design

[1140] A total of 6 animals were divided into 2 groups as summarized in the below Table 18. ATV-0071-001 and ATV-0071-002 represent different lots of the AAV^{-Lib1} library. Immunosuppression of the animals began 7 days prior to vector administration. Group 1 and 2 were administered with the indicated amounts or concentrations of AAV^{-Lib1} (comprising the 3,456 modified capsid proteins, an AAV9 capsid protein, AAV^{mut1} capsid protein) by ICM or IV. Animals were sacrificed on day 32 after AAV vector administration and their organ samples are collected for analysis.

TABLE 18
Experimental design for non-human primate study.

| | | | Dose | | | |
|---|---|---|---|---|---|---|
| Group | | Dose | Vol | Dose (vg/ | Dose | Study end point |
| No. | Treatment | Route | (ml) | animal or kg) | Concentration | (necropsy day 32) |
| 1 | ATV- | ICM | 2.0 | 3.4E13 vg/animal | 1.7E13 | 3 (2 M/1 F) |
| | 0071-001 | | | | | |
| 2 | ATV- | IV | 10.0 | 5E13 vg/kg | 1.05E14* | 3 (3M) |
| | 0071-002 | | | | 9.0E13** | |

*Dose concentration for two animals
**Dose concentration for one animal

### Tissue Analysis

[1141] Successful gene transfer by AAV^{-Lib1} Library (and controls) was detected by NGS sequencing of DNA and/or RNA harvested from mouse tissue following IV injection of the AAV^{-Lib1} library. In particular, the NHP were sacrificed 32 days after the injection. Individual tissues, notably the liver, heart, and diaphragm, were collected at the time of necropsy. For DNA, tissues were homogenized in a Qiagen Tissuelyser II (20 rps for 2 min) in lysis buffer from the Qiagen Dneasy Blood and Tissue Kit or the Qiagen RNeasy Lipid Tissue Mini Kit following the standard Qiagen protocol. Samples were eluted in 50 μL of buffer. For RNA, tissues were immediately placed into the preservative RNAlater, after which the RNAlater was removed and the tissue flash frozen. Variations to these general protocols are as described below.

### AAV^{-Lib1} Library Screen Data Informatics Analysis

[1142] Next generation sequencing (NGS) was used to determine the presence of AAV vector genomes (i.e., DNA) and to determine expression of AAV components (i.e., viral RNA) such as capsid sequences encoded by the AAV vector DNA. Following DNA and/or RNA isolation, sequencing library preparation, and sequencing, the resulting FASTQ reads were subjected to SeqCount QC (i.e., quality control of sequencing reads) before determining Variant Counts. Variant Counts represent the total Variant Count (i.e., sequencing reads associated with a particular capsid variant) in a sample or input test article. Prior to determining tissue enrichment, Variant Count data was normalized. Normalization included two steps. Step 1 included sequencing depth normalization:

$$log 2 CPM = log 2 ( \frac{RawVariantCount + 0.5}{TotalVariantCount + 1} \times 1 , 000 , 000 )$$

[1143] Step 2 included distribution normalization by median:

$$log 2 MN = log 2 CPM - median ( log 2 CPM )$$

[1144] Tissue enrichment score was calculated using:

$$log 2 FC = log 2 {MN}_{Tissue} - log 2 {MN}_{TestArticle}$$

$$scaled log 2 FC = \frac{( log 2 FC - min ( log 2 FC ) )}{( max ( log 2 FC ) - min ( log 2 FC ) )}$$

[1145] Tissue enrichment scores for all 3,456 variants and controls are as shown in Table 30, which is herein incorporated by reference in its entirety. Table 30 reports tissue enrichment scores for Liver DNA, Heart DNA, and Diaphragm DNA as Log 2 Fold Change (FC) to test article. The tissue enrichment measurements were used for functional interpretation of the data as well as for variant ranking and selecting capsids from the AAV^{-Lib1} library.

[1146] DNA samples were analyzed for biodistribution of vector genomes in the liver, diaphragm, and hear using NGS. Data (i.e., AAV^{-Lib1} library data) for all 3.456 capsids and controls (AAV^{mut1} and AAV9) is found in Table 30, which is herein incorporated by reference in its entirety. Table 30 shows tissue enrichment scores Log 2 Fold Change (Fc) compared to test article. The top 200 modified AAV capsids from Table 30 are shown in Table 20.

TABLE 19
Top 200 Modified AAV Capsids from Appendix E. (AAV-Lib1 in NHP)

| | | SEQ | | | | |
|---|---|---|---|---|---|---|
| Rank | variant_id | ID NO: | Sequence | Diaphragm | Heart | Liver |
| 1 | ATLVT012XXAAV9 | 48388 | NSTSGGSSNDNA | 11.26 | 21.08 | 19.61 |
| 2 | ATLVT012XX1099 | 46033 | NSTSGGSTNDNA | 8.69 | 11.7 | 18.88 |
| 3 | ATLVT012XX1094 | 46028 | NSTSGGATNDNA | 9.77 | 11.36 | 16.69 |
| 4 | ATLVT012XX1100 | 46034 | NSTSGGSTNDNH | 8.96 | 12.75 | 16.17 |
| 5 | ATLVT012XX1097 | 46031 | NSTSGGSSNDNH | 8.93 | 11.1 | 17.04 |
| 6 | ATLVT012XX1098 | 46032 | NSTSGGSSNDNT | 7.1 | 12.65 | 17.96 |
| 7 | ATLVT012XX1054 | 45988 | NSTAGGSTNDNA | 9.44 | 8.55 | 18.55 |
| 8 | ATLVT012XX1718 | 46652 | SGTTGGATNDNH | 9.02 | 11.49 | 14.24 |
| 9 | ATLVT012XX1147 | 46081 | NSTTGGSTNDNA | 7.39 | 10.36 | 18.33 |
| 10 | ATLVT012XX1101 | 46035 | NSTSGGSTNDNT | 7.29 | 10.97 | 17.33 |
| 11 | ATLVT012XX1144 | 46078 | NSTTGGSSNDNA | 6.52 | 12.04 | 17.21 |
| 12 | ATLVT012XX1091 | 46025 | NSTSGGASNDNA | 6.47 | 11.28 | 17.71 |
| 13 | ATLVT012XX1051 | 45985 | NSTAGGSSNDNA | 6.16 | 11.23 | 18.3 |
| 14 | ATLVT012XX2246 | 47180 | SSTSGGATNDNH | 7.85 | 10.16 | 16.7 |
| 15 | ATLVT012XX1093 | 46027 | NSTSGGASNDNT | 6.54 | 9.78 | 18.77 |
| 16 | ATLVT012XX1149 | 46083 | NSTTGGSTNDNT | 6.24 | 10.29 | 18.46 |
| 17 | ATLVT012XX523 | 45457 | NGTSGGSSNDNA | 7.82 | 10.99 | 14.84 |
| 18 | ATLVT012XX1053 | 45987 | NSTAGGSSNDNT | 6.11 | 10.03 | 18.82 |
| 19 | ATLVT012XX2243 | 47177 | SSTSGGASNDNH | 7.76 | 10.44 | 15.33 |
| 20 | ATLVT012XX1096 | 46030 | NSTSGGATNDNT | 5.83 | 10.7 | 18.3 |
| 21 | ATLVT012XX1670 | 46604 | SGTSGGATNDNH | 7.4 | 10.6 | 14.42 |
| 22 | ATLVT012XX1484 | 46418 | SGQAGGSTNDNH | 6.56 | 11.83 | 13.35 |
| 23 | ATLVT012XX2245 | 47179 | SSTSGGATNDNA | 7.25 | 11.27 | 12.73 |
| 24 | ATLVT012XX1142 | 46076 | NSTTGGATNDNH | 8.32 | 9.91 | 12.26 |
| 25 | ATLVT012XX1667 | 46601 | SGTSGGASNDNH | 8.08 | 9.25 | 13.33 |
| 26 | ATLVT012XX1056 | 45990 | NSTAGGSTNDNT | 6.42 | 9 | 16.44 |
| 27 | ATLVT012XX1095 | 46029 | NSTSGGATNDNH | 7.35 | 9.55 | 13.74 |
| 28 | ATLVT012XX1146 | 46080 | NSTTGGSSNDNT | 4.38 | 9.72 | 18.52 |
| 29 | ATLVT012XX2294 | 47228 | SSTTGGATNDNH | 8.07 | 8.33 | 13.8 |
| 30 | ATLVT012XX1055 | 45989 | NSTAGGSTNDNH | 7.57 | 9.8 | 12.76 |
| 31 | ATLVT012XX1047 | 45981 | NSTAGGASNDNT | 7.32 | 6.43 | 17.28 |
| 32 | ATLVT012XX1045 | 45979 | NSTAGGASNDNA | 5.47 | 10.24 | 14.81 |
| 33 | ATLVT012XX1141 | 46075 | NSTTGGATNDNA | 8.09 | 9.81 | 10.79 |
| 34 | ATLVT012XX1092 | 46026 | NSTSGGASNDNH | 7.04 | 7.89 | 14.34 |
| 35 | ATLVT012XX528 | 45462 | NGTSGGSTNDNT | 6.23 | 7.79 | 15.85 |
| 36 | ATLVT012XX1675 | 46609 | SGTSGGSTNDNA | 8.34 | 7.56 | 12.42 |
| 37 | ATLVT012XX1148 | 46082 | NSTTGGSTNDNH | 7.59 | 7.87 | 13.09 |
| 38 | ATLVT012XX1676 | 46610 | SGTSGGSTNDNH | 7.35 | 8.76 | 12.31 |
| 39 | ATLVT012XX571 | 45505 | NGTTGGSSNDNA | 7.68 | 8.14 | 12.16 |
| 40 | ATLVT012XX1052 | 45986 | NSTAGGSSNDNH | 6.03 | 8.92 | 13.8 |
| 41 | ATLVT012XX1140 | 46074 | NSTTGGASNDNT | 4.62 | 9.31 | 15.6 |
| 42 | ATLVT012XX1529 | 46463 | SGQSGGSSNDNH | 10.13 | 6.32 | 9.6 |
| 43 | ATLVT012XX1666 | 46600 | SGTSGGASNDNA | 8.04 | 8.48 | 10.31 |
| 44 | ATLVT012XX1143 | 46077 | NSTTGGATNDNT | 6.1 | 7.87 | 14.37 |
| 45 | ATLVT012XX1580 | 46514 | SGQTGGSTNDNH | 7.4 | 9.22 | 10.25 |
| 46 | ATLVT012XX1574 | 46508 | SGQTGGATNDNH | 6.97 | 7.32 | 13.42 |
| 47 | ATLVT012XX2054 | 46988 | SSQAGGATNDNH | 5.35 | 9.86 | 12.93 |
| 48 | ATLVT012XX2251 | 47185 | SSTSGGSTNDNA | 5.82 | 10.22 | 11.43 |
| 49 | ATLVT012XX2248 | 47182 | SSTSGGSSNDNA | 7.39 | 9.43 | 9.71 |
| 50 | ATLVT012XX1532 | 46466 | SGQSGGSTNDNH | 5.25 | 9.97 | 12.2 |
| 51 | ATLVT012XX2242 | 47176 | SSTSGGASNDNA | 5.92 | 8.57 | 12.68 |
| 52 | ATLVT012XX526 | 45460 | NGTSGGSTNDNA | 6.74 | 7.48 | 12.57 |
| 53 | ATLVT012XX1244 | 46178 | SGASGGSTNDNH | 7.97 | 9.41 | 7.95 |
| 54 | ATLVT012XX1579 | 46513 | SGQTGGSTNDNA | 5.34 | 10.71 | 10.65 |
| 55 | ATLVT012XX1720 | 46654 | SGTTGGSSNDNA | 6.16 | 9.07 | 10.95 |
| 56 | ATLVT012XX2102 | 47036 | SSQSGGATNDNH | 5.66 | 9.05 | 11.81 |
| 57 | ATLVT012XX525 | 45459 | NGTSGGSSNDNT | 5.23 | 6.43 | 15.89 |
| 58 | ATLVT012XX2108 | 47042 | SSQSGGSTNDNH | 8.25 | 9.5 | 6.64 |
| 59 | ATLVT012XX1719 | 46653 | SGTTGGATNDNT | 6.96 | 8.91 | 9.59 |
| 60 | ATLVT012XX2252 | 47186 | SSTSGGSTNDNH | 7.08 | 9.42 | 8.72 |
| 61 | ATLVT012XX1715 | 46649 | SGTTGGASNDNH | 5.11 | 9.59 | 11.78 |
| 62 | ATLVT012XX1145 | 46079 | NSTTGGSSNDNH | 4.26 | 9.95 | 12.54 |
| 63 | ATLVT012XX1526 | 46460 | SGQSGGATNDNH | 5.71 | 7.86 | 12.68 |
| 64 | ATLVT012XX1668 | 46602 | SGTSGGASNDNT | 7.37 | 7.46 | 10.34 |
| 65 | ATLVT012XX527 | 45461 | NGTSGGSTNDNH | 6.47 | 8.51 | 10.52 |
| 66 | ATLVT012XX2244 | 47178 | SSTSGGASNDNT | 5.83 | 7.69 | 12.28 |
| 67 | ATLVT012XX1046 | 45980 | NSTAGGASNDNH | 6.06 | 6.08 | 13.61 |
| 68 | ATLVT012XX1049 | 45983 | NSTAGGATNDNH | 6.07 | 6.27 | 13.11 |
| 69 | ATLVT012XX1531 | 46465 | SGQSGGSTNDNA | 5.24 | 9.4 | 10.5 |
| 70 | ATLVT012XX3446 | 48380 | TSTTGGATNDNH | 6.59 | 9.29 | 8.31 |
| 71 | ATLVT012XX1671 | 46605 | SGTSGGATNDNT | 4.9 | 9.38 | 10.77 |
| 72 | ATLVT012XX2250 | 47184 | SSTSGGSSNDNT | 7.72 | 6.67 | 9.37 |
| 73 | ATLVT012XX2203 | 47137 | SSTAGGSTNDNA | 5.49 | 9.59 | 9.37 |
| 74 | ATLVT012XX1814 | 46748 | SSASGGATNDNH | 6.43 | 10.77 | 6.23 |
| 75 | ATLVT012XX2291 | 47225 | SSTTGGASNDNH | 5.52 | 11.37 | 6.81 |
| 76 | ATLVT012XX1138 | 46072 | NSTTGGASNDNA | 4.8 | 6.48 | 14.2 |
| 77 | ATLVT012XX1139 | 46073 | NSTTGGASNDNH | 5.25 | 8.78 | 10.45 |
| 78 | ATLVT012XX1050 | 45984 | NSTAGGATNDNT | 5.09 | 6.01 | 14.28 |
| 79 | ATLVT012XX576 | 45510 | NGTTGGSTNDNT | 6.45 | 6.36 | 11.49 |
| 80 | ATLVT012XX2249 | 47183 | SSTSGGSSNDNH | 7.34 | 7.88 | 7.98 |
| 81 | ATLVT012XX524 | 45458 | NGTSGGSSNDNH | 6.4 | 6.89 | 10.8 |
| 82 | ATLVT012XX1533 | 46467 | SGQSGGSTNDNT | 3.5 | 11.85 | 9.36 |
| 83 | ATLVT012XX1528 | 46462 | SGQSGGSSNDNA | 7.93 | 6.53 | 8.46 |
| 84 | ATLVT012XX1382 | 46316 | SGESGGATNDNH | 8.11 | 6.14 | 8.62 |
| 85 | ATLVT012XX3395 | 48329 | TSTSGGASNDNH | 4.27 | 10.33 | 9.68 |
| 86 | ATLVT012XX1523 | 46457 | SGQSGGASNDNH | 5.7 | 7.33 | 10.93 |
| 87 | ATLVT012XX960 | 45894 | NSQSGGSTNDNT | 8.43 | 5.47 | 8.52 |
| 88 | ATLVT012XX1238 | 46172 | SGASGGATNDNH | 5.37 | 7.89 | 10.65 |
| 89 | ATLVT012XX2300 | 47234 | SSTTGGSTNDNH | 7.18 | 8.2 | 7.07 |
| 90 | ATLVT012XX1714 | 46648 | SGTTGGASNDNA | 6.11 | 8.36 | 8.66 |
| 91 | ATLVT012XX521 | 45455 | NGTSGGATNDNH | 7.45 | 5.79 | 9.66 |
| 92 | ATLVT012XX1717 | 46651 | SGTTGGATNDNA | 5.45 | 9.22 | 8.67 |
| 93 | ATLVT012XX1475 | 46409 | SGQAGGASNDNH | 4.94 | 7.89 | 11.24 |
| 94 | ATLVT012XX574 | 45508 | NGTTGGSTNDNA | 6.54 | 7.27 | 9.29 |
| 95 | ATLVT012XX1723 | 46657 | SGTTGGSTNDNA | 6.19 | 7.07 | 9.96 |
| 96 | ATLVT012XX1724 | 46658 | SGTTGGSTNDNH | 5.42 | 8.09 | 9.92 |
| 97 | ATLVT012XX1722 | 46656 | SGTTGGSSNDNT | 5.89 | 7.3 | 10.09 |
| 98 | ATLVT012XX1672 | 46606 | SGTSGGSSNDNA | 5.82 | 6.96 | 10.63 |
| 99 | ATLVT012XXMUT1 | 48390 | NSTSGASTNDNA | 3.73 | 10.26 | 9.82 |
| 100 | ATLVT012XX517 | 45451 | NGTSGGASNDNA | 5.54 | 8.57 | 8.74 |
| 101 | ATLVT012XX575 | 45509 | NGTTGGSTNDNH | 6.44 | 6.48 | 9.76 |
| 102 | ATLVT012XX3400 | 48334 | TSTSGGSSNDNA | 3.09 | 11.22 | 9.38 |
| 103 | ATLVT012XX2150 | 47084 | SSQTGGATNDNH | 4.32 | 6.83 | 12.91 |
| 104 | ATLVT012XX519 | 45453 | NGTSGGASNDNT | 6.54 | 5.74 | 10.47 |
| 105 | ATLVT012XX1485 | 46419 | SGQAGGSTNDNT | 6.45 | 6.19 | 10.03 |
| 106 | ATLVT012XX1483 | 46417 | SGQAGGSTNDNA | 6.14 | 6.75 | 9.82 |
| 107 | ATLVT012XX518 | 45452 | NGTSGGASNDNH | 8.18 | 4.75 | 8.86 |
| 108 | ATLVT012XX1622 | 46556 | SGTAGGATNDNH | 3.96 | 8 | 11.85 |
| 109 | ATLVT012XX1478 | 46412 | SGQAGGATNDNH | 3.81 | 9.14 | 10.57 |
| 110 | ATLVT012XX3398 | 48332 | TSTSGGATNDNH | 4.01 | 9.02 | 10.32 |
| 111 | ATLVT012XX1669 | 46603 | SGTSGGATNDNA | 6.42 | 6.39 | 9.37 |
| 112 | ATLVT012XX520 | 45454 | NGTSGGATNDNA | 7.24 | 6.05 | 8.2 |
| 113 | ATLVT012XX2253 | 47187 | SSTSGGSTNDNT | 5.41 | 7.59 | 9.25 |
| 114 | ATLVT012XX2299 | 47233 | SSTTGGSTNDNA | 7.26 | 5.95 | 8.2 |
| 115 | ATLVT012XX2870 | 47804 | TGTTGGATNDNH | 5.09 | 6.66 | 10.78 |
| 116 | ATLVT012XX2099 | 47033 | SSQSGGASNDNH | 6.03 | 6.58 | 9.21 |
| 117 | ATLVT012XX1628 | 46562 | SGTAGGSTNDNH | 3.87 | 9.58 | 8.95 |
| 118 | ATLVT012XX522 | 45456 | NGTSGGATNDNT | 4.75 | 6.91 | 10.8 |
| 119 | ATLVT012XX3403 | 48337 | TSTSGGSTNDNA | 4.34 | 8.42 | 9.53 |
| 120 | ATLVT012XX1048 | 45982 | NSTAGGATNDNA | 4.45 | 6.29 | 11.92 |
| 121 | ATLVT012XX1530 | 46464 | SGQSGGSSNDNT | 6.93 | 6.32 | 7.59 |
| 122 | ATLVT012XX477 | 45411 | NGTAGGSSNDNT | 3.86 | 7.4 | 11.31 |
| 123 | ATLVT012XX1436 | 46370 | SGETGGSTNDNH | 7.84 | 6.48 | 5.47 |
| 124 | ATLVT012XX573 | 45507 | NGTTGGSSNDNT | 4.16 | 7.38 | 10.63 |
| 125 | ATLVT012XX1430 | 46364 | SGETGGATNDNH | 4.68 | 7.69 | 9.3 |
| 126 | ATLVT012XX2247 | 47181 | SSTSGGATNDNT | 3.72 | 6.99 | 11.63 |
| 127 | ATLVT012XX1627 | 46561 | SGTAGGSTNDNA | 4.84 | 5.43 | 11.7 |
| 128 | ATLVT012XX1725 | 46659 | SGTTGGSTNDNT | 3.93 | 7.56 | 10.49 |
| 129 | ATLVT012XX2293 | 47227 | SSTTGGATNDNA | 4.5 | 9.42 | 6.94 |
| 130 | ATLVT012XX3302 | 48236 | TSQTGGATNDNH | 3.59 | 6.48 | 12.1 |
| 131 | ATLVT012XX1721 | 46655 | SGTTGGSSNDNH | 6.18 | 5.93 | 8.38 |
| 132 | ATLVT012XX3404 | 48338 | TSTSGGSTNDNH | 5.74 | 7.42 | 7.14 |
| 133 | ATLVT012XX3397 | 48331 | TSTSGGATNDNA | 5.77 | 6.41 | 8.22 |
| 134 | ATLVT012XX1623 | 46557 | SGTAGGATNDNT | 2.9 | 9.91 | 8.42 |
| 135 | ATLVT012XX2774 | 47708 | TGTAGGATNDNH | 7.08 | 2.26 | 11.07 |
| 136 | ATLVT012XX1626 | 46560 | SGTAGGSSNDNT | 2.66 | 9.25 | 9.64 |
| 137 | ATLVT012XX1958 | 46892 | SSESGGATNDNH | 7.1 | 7.32 | 4.5 |
| 138 | ATLVT012XX1527 | 46461 | SGQSGGATNDNT | 3.51 | 8.49 | 9.03 |
| 139 | ATLVT012XX2198 | 47132 | SSTAGGATNDNH | 4.15 | 3.92 | 13.77 |
| 140 | ATLVT012XX1677 | 46611 | SGTSGGSTNDNT | 4.49 | 5.49 | 11.15 |
| 141 | ATLVT012XX2290 | 47224 | SSTTGGASNDNA | 5.14 | 8.62 | 5.88 |
| 142 | ATLVT012XX2197 | 47131 | SSTAGGATNDNA | 3.98 | 6.27 | 10.88 |
| 143 | ATLVT012XX3299 | 48233 | TSQTGGASNDNH | 4.31 | 8.29 | 7.7 |
| 144 | ATLVT012XX3394 | 48328 | TSTSGGASNDNA | 2.55 | 9.48 | 9.14 |
| 145 | ATLVT012XX1916 | 46850 | SSEAGGSTNDNH | 8.85 | 5.76 | 3.08 |
| 146 | ATLVT012XX1243 | 46177 | SGASGGSTNDNA | 6.82 | 6.59 | 5.49 |
| 147 | ATLVT012XX1674 | 46608 | SGTSGGSSNDNT | 5.84 | 4.7 | 9.59 |
| 148 | ATLVT012XX2061 | 46995 | SSQAGGSTNDNT | 4.8 | 6.96 | 8.42 |
| 149 | ATLVT012XX1474 | 46408 | SGQAGGASNDNA | 3.52 | 8.55 | 8.39 |
| 150 | ATLVT012XX959 | 45893 | NSQSGGSTNDNH | 8.66 | 5.18 | 3.92 |
| 151 | ATLVT012XX1716 | 46650 | SGTTGGASNDNT | 4.75 | 4.39 | 11.62 |
| 152 | ATLVT012XXAAV9LIO | 48389 | NSTSGASSNDNA | 4.36 | 8.76 | 6.67 |
| 153 | ATLVT012XX1673 | 46607 | SGTSGGSSNDNH | 5.57 | 5.83 | 8.32 |
| 154 | ATLVT012XX2107 | 47041 | SSQSGGSTNDNA | 6.01 | 6.96 | 6.09 |
| 155 | ATLVT012XX1571 | 46505 | SGQTGGASNDNH | 3.83 | 6.45 | 10.38 |
| 156 | ATLVT012XX2819 | 47753 | TGTSGGASNDNH | 7.29 | 4.28 | 7.16 |
| 157 | ATLVT012XX2205 | 47139 | SSTAGGSTNDNT | 4.93 | 5.74 | 9.34 |
| 158 | ATLVT012XX471 | 45405 | NGTAGGASNDNT | 6.34 | 4.98 | 7.6 |
| 159 | ATLVT012XX2301 | 47235 | SSTTGGSTNDNT | 5.68 | 5.01 | 8.67 |
| 160 | ATLVT012XX1581 | 46515 | SGQTGGSTNDNT | 3.22 | 7.96 | 9.04 |
| 161 | ATLVT012XX2201 | 47135 | SSTAGGSSNDNH | 4.61 | 7.83 | 6.73 |
| 162 | ATLVT012XX2295 | 47229 | SSTTGGATNDNT | 3.68 | 7.97 | 8.01 |
| 163 | ATLVT012XX1577 | 46511 | SGQTGGSSNDNH | 5.49 | 6.96 | 6.22 |
| 164 | ATLVT012XX1624 | 46558 | SGTAGGSSNDNA | 2.93 | 6.5 | 11.21 |
| 165 | ATLVT012XX1196 | 46130 | SGAAGGSTNDNH | 2.79 | 7.46 | 10.12 |
| 166 | ATLVT012XX1573 | 46507 | SGQTGGATNDNA | 7.22 | 3.74 | 7.2 |
| 167 | ATLVT012XX2296 | 47230 | SSTTGGSSNDNA | 6.39 | 5.03 | 6.97 |
| 168 | ATLVT012XX569 | 45503 | NGTTGGATNDNH | 5.06 | 5.79 | 8.16 |
| 169 | ATLVT012XX1235 | 46169 | SGASGGASNDNH | 6.83 | 6.1 | 4.67 |
| 170 | ATLVT012XX958 | 45892 | NSQSGGSTNDNA | 7.97 | 5.14 | 3.95 |
| 171 | ATLVT012XX2109 | 47043 | SSQSGGSTNDNT | 6.08 | 6.47 | 5.47 |
| 172 | ATLVT012XX567 | 45501 | NGTTGGASNDNT | 3.12 | 7.07 | 9.59 |
| 173 | ATLVT012XX1570 | 46504 | SGQTGGASNDNA | 3.57 | 7.03 | 8.77 |
| 174 | ATLVT012XX2105 | 47039 | SSQSGGSSNDNH | 6.35 | 6.17 | 5.03 |
| 175 | ATLVT012XX2195 | 47129 | SSTAGGASNDNH | 4.6 | 4 | 10.75 |
| 176 | ATLVT012XX480 | 45414 | NGTAGGSTNDNT | 4.07 | 4.75 | 10.69 |
| 177 | ATLVT012XX3448 | 48382 | TSTTGGSSNDNA | 6.03 | 5.42 | 6.42 |
| 178 | ATLVT012XX1598 | 46532 | SGTAAGATNDNH | 5.76 | 8.56 | 2.75 |
| 179 | ATLVT012XX3444 | 48378 | TSTTGGASNDNT | 6.54 | 4.36 | 6.7 |
| 180 | ATLVT012XX572 | 45506 | NGTTGGSSNDNH | 4.56 | 5.62 | 8.33 |
| 181 | ATLVT012XX3401 | 48335 | TSTSGGSSNDNH | 5.01 | 5.79 | 7.29 |
| 182 | ATLVT012XX2200 | 47134 | SSTAGGSSNDNA | 3.92 | 5.57 | 9.37 |
| 183 | ATLVT012XX1090 | 46024 | NSTSGASTNDNT | 4.67 | 5.99 | 7.49 |
| 184 | ATLVT012XX2147 | 47081 | SSQTGGASNDNH | 4.03 | 6.06 | 8.45 |
| 185 | ATLVT012XX1077 | 46011 | NSTSAGSSNDNT | 1.63 | 9.84 | 7.69 |
| 186 | ATLVT012XX1629 | 46563 | SGTAGGSTNDNT | 3.09 | 7.28 | 8.43 |
| 187 | ATLVT012XX3451 | 48385 | TSTTGGSTNDNA | 4.37 | 6.17 | 7.66 |
| 188 | ATLVT012XX1388 | 46322 | SGESGGSTNDNH | 4.65 | 5.66 | 7.75 |
| 189 | ATLVT012XX2156 | 47090 | SSQTGGSTNDNH | 5.57 | 6.34 | 5.22 |
| 190 | ATLVT012XX1819 | 46753 | SSASGGSTNDNA | 5.4 | 7.14 | 4.49 |
| 191 | ATLVT012XX1524 | 46458 | SGQSGGASNDNT | 4.45 | 4.74 | 9.19 |
| 192 | ATLVT012XX1130 | 46064 | NSTTGAATNDNH | 5.66 | 4.61 | 7.25 |
| 193 | ATLVT012XX3308 | 48242 | TSQTGGSTNDNH | 3.3 | 9.43 | 5.04 |
| 194 | ATLVT012XX2822 | 47756 | TGTSGGATNDNH | 4.48 | 6.38 | 6.95 |
| 195 | ATLVT012XX3396 | 48330 | TSTSGGASNDNT | 3.02 | 6.68 | 9.03 |
| 196 | ATLVT012XX570 | 45504 | NGTTGGATNDNT | 3.15 | 8 | 7.12 |
| 197 | ATLVT012XX478 | 45412 | NGTAGGSTNDNA | 3.12 | 5.21 | 10.46 |
| 198 | ATLVT012XX1480 | 46414 | SGQAGGSSNDNA | 4.38 | 5.92 | 7.29 |
| 199 | ATLVT012XX1084 | 46018 | NSTSGAATNDNA | 5.48 | 5.24 | 6.28 |
| 200 | ATLVT012XX2060 | 46994 | SSQAGGSTNDNH | 5 | 4.44 | 8.01 |

[1147] As the overall aim of the AAV^{-Lib1} library study was to identify AAV capsid proteins that decrease liver tropism and increase muscle tropism for at least have comparable muscle tropism to a control (e.g., AAV9)), additional analysis was performed to determine which peptide segments could produce the desired tropism.

[1148] The data in Table 30 was used to identify interesting peptide segments, for example, peptide segments with liver enrichment between AAV9 and AAV9-mut 1 (see FIG. 59). Using the sequence data, enrichment scores for each tissue were calculated for each AAV variant containing a unique targeting peptide. In particular, the AAV variants including each targeting peptide were ranked based on a mean log fold-change tissue score (see, e.g., Table 30). After determining a sequence count from sequence read data (FASTQ) following sequencing. AAV variants containing a unique targeting peptide were counted and normalized, followed by performing a tissue enrichment analysis for each tissue. Tissue enrichment analysis included Sequence Activity Relationship (SAR) analysis, Network analysis, and structural modeling. SAR analysis identified particular amino acid at a specific capsid position or sequence motifs (combination of amino acids at several positions) that significantly affects tissue tropism. Network analysis identified modules of variants that shared amino acid or peptide sequences of top performing variants. Structural modeling provided understanding of the structural effect of significant amino acids at specific capsid positions for mechanistic hypothesis formulation. SAR analysis was performed on the peptide segments having liver enrichment between AAV9 and AAV9-mut1. As shown in FIG. 60, this identified sequence motifs at four different positions. SAR analysis was reproducible (i.e., showed good correlation) between NHP and mice (see FIG. 61).

[1149] Taken together, this Example showed that sequence activity relationship (SAR) analysis of the AAV^{-Lib1} library data could be used to determine which amino acid modifications at which residues or which peptide segments in VR I impact liver tropism.

### 8.25. Example 25: Assessment of AAVs Having Capsids a Targeting Peptide in VR VIII and a Peptide Segment within VR I in Mice and Non-Human Primates

[1150] The objective of this study was to assess AAVs comprising a capsid protein having a targeting peptide in VR VIII and a tropism-altering peptide segment within VR I in non-human primates (NHP) to identify heart neutral, liver detargeted. AAVs (e.g., moderate to low liver expression compared to a control (e.g., AAV9)) with potential for muscle targeting. Overall 28 peptide segments and 12 targeting peptides were selected for assessment.

[1151] Briefly, as noted above, the modified AAV capsid protein included peptide segments (e.g., the peptide segments described in Table 20) positioned between S261 and Y274 in VR I of AAV9. 28 peptide segments were selected based at least in part, on the data in Table 30, which is herein incorporated by reference in its entirety, including amino acid sequences selected from SEQ ID NO: 46026, 46029, 46031, 46035, 46073, 46076, 46079, 46082, 46505, 46508, 46511, 46514, 46554, 46560, 46609, 46600, 46603, 46606, 46650, 46653, 46656, 46659, 47128, 47131, 47134, and 47137. The 28 peptide segments can be divided into seven groups that are represented by SEQ ID NOs: 44927-44933, where each SEQ ID NO represents one of the seven groups. Six of the seven group include a threonine (T), a glycine (G), and a glycine (G) at positions P₃, P₅, and P₆, respectively, within the peptide segment. One group includes a glutamine (Q), a glycine (G), and a glycine (G) at positions P₃, P₅, and P₆, respectively, within the peptide segment. Within each of the seven groups, amino acid position P₇ is varied between an alanine (A) and a serine (S) and amino acid position P₈ is varied between a serine (S) and a threonine (T). Four of the seven groups (i.e., SEQ ID NOs: 44927-44933) were selected for testing in a modified AAV capsid protein that also includes a targeting peptide.

[1152] Briefly, the eight targeting peptides selected for testing in this example included targeting peptides having an amino acid sequence selected from SEQ ID NO: 44864-44867, 44879-44883, 44911, 44912, 44913, 44918, 44919.

[1153] Overall, in this experiment 116 AAV capsid proteins were assessed. AAV9 capsids were modified to include (i) the targeting peptide at a site within VR VIII of the reference AAV capsid protein and (ii) one or more modifications to comprise a peptide segment within variable region I (VR I) of the reference AAV capsid protein as described in Table 20

TABLE 20
Combinations of Targeting Peptides and Peptide Segments

| | | SEQ ID | | SEQ ID |
|---|---|---|---|---|
| Combinations | VR1 | NO: | VR8 | NO: |
| 1 | NSTSGGASNDNH | 46026 | wt VR8 | 48388 |
| 2 | NSTSGGATNDNH | 46029 | wt VR8 | 48388 |
| 3 | NSTSGGSSNDNH | 46031 | wt VR8 | 48388 |
| 4 | NSTSGGSTNDNH | 46034 | wt VR8 | 48388 |
| 5 | NSTTGGASNDNH | 46073 | wt VR8 | 48388 |
| 6 | NSTTGGATNDNH | 46076 | wt VR8 | 48388 |
| 7 | NSTTGGSSNDNH | 46079 | wt VR8 | 48388 |
| 8 | NSTTGGSTNDNH | 46082 | wt VR8 | 48388 |
| 9 | SGQTGGASNDNH | 46505 | wt VR8 | 48388 |
| 10 | SGQTGGATNDNH | 46508 | wt VR8 | 48388 |
| 11 | SGQTGGSSNDNH | 46511 | wt VR8 | 48388 |
| 12 | SGQTGGSTNDNH | 46514 | wt VR8 | 48388 |
| 13 | SGTAGGASNDNT | 46554 | ENR RGD EQNT | 44867 |
| 14 | SGTAGGASNDNT | 46554 | ENR RGD FNGL | 44879 |
| 15 | SGTAGGASNDNT | 46554 | ENR RGD FNNL | 44864 |
| 16 | SGTAGGASNDNT | 46554 | ENR RGD FNNT | 44880 |
| 17 | SGTAGGASNDNT | 46554 | ENR RGD FNST | 44865 |
| 18 | SGTAGGASNDNT | 46554 | SAQ RGD FNNT | 44881 |
| 19 | SGTAGGASNDNT | 46554 | SAQ RGD LLLS | 44882 |
| 20 | SGTAGGASNDNT | 46554 | SNR RGD FNNT | 44883 |
| 21 | SGTAGGASNDNT | 46554 | ENR RGD FQNT | 44866 |
| 22 | SGTAGGASNDNT | 46554 | SAQ RGD RGQI | 44911 |
| 23 | SGTAGGASNDNT | 46554 | SAQ RGD RGVV | 44918 |
| 24 | SGTAGGASNDNT | 46554 | SAQ RGD HVNL | 44919 |
| 25 | SGTAGGASNDNT | 46554 | wt VR8 | 48388 |
| 26 | SGTAGGATNDNT | 46557 | wt VR8 | 48388 |
| 27 | SGTAGGSSNDNT | 46560 | wt VR8 | 48388 |
| 28 | SGTAGGSTNDNT | 46563 | wt VR8 | 48388 |
| 29 | SGTSGGSTNDNA | 46609 | ENR RGD EQNT | 44867 |
| 30 | SGTSGGSTNDNA | 46609 | ENR RGD FNGL | 44879 |
| 31 | SGTSGGSTNDNA | 46609 | ENR RGD FNNL | 44864 |
| 32 | SGTSGGSTNDNA | 46609 | ENR RGD FNNT | 44880 |
| 33 | SGTSGGSTNDNA | 46609 | ENR RGD FNST | 44865 |
| 34 | SGTSGGSTNDNA | 46609 | SAQ RGD FNNT | 44881 |
| 35 | SGTSGGSTNDNA | 46609 | SAQ RGD LLLS | 44882 |
| 36 | SGTSGGSTNDNA | 46609 | SNR RGD FNNT | 44883 |
| 37 | SGTSGGSTNDNA | 46609 | ENR RGD FQNT | 44866 |
| 38 | SGTSGGSTNDNA | 46609 | SAQ RGD RGQI | 44911 |
| 39 | SGTSGGSTNDNA | 46609 | SAQ RGD RGVV | 44918 |
| 40 | SGTSGGSTNDNA | 46609 | SAQ RGD HVNL | 44919 |
| 41 | SGTSGGASNDNA | 46600 | wt VR8 | 48388 |
| 42 | SGTSGGATNDNA | 46603 | wt VR8 | 48388 |
| 43 | SGTSGGSSNDNA | 46606 | wt VR8 | 48388 |
| 44 | SGTSGGSTNDNA | 46609 | wt VR8 | 48388 |
| 45 | SGTTGGSTNDNT | 46659 | ENR RGD EQNT | 44867 |
| 46 | SGTTGGSTNDNT | 46659 | ENR RGD FNGL | 44879 |
| 47 | SGTTGGSTNDNT | 46659 | ENR RGD FNNL | 44864 |
| 48 | SGTTGGSTNDNT | 46659 | ENR RGD FNNT | 44880 |
| 49 | SGTTGGSTNDNT | 46659 | ENR RGD FNST | 44865 |
| 50 | SGTTGGSTNDNT | 46659 | SAQ RGD FNNT | 44881 |
| 51 | SGTTGGSTNDNT | 46659 | SAQ RGD LLLS | 44882 |
| 52 | SGTTGGSTNDNT | 46659 | SNR RGD FNNT | 44883 |
| 53 | SGTTGGSTNDNT | 46659 | ENR RGD FQNT | 44866 |
| 54 | SGTTGGSTNDNT | 46659 | SAQ RGD RGQI | 44911 |
| 55 | SGTTGGSTNDNT | 46659 | SAQ RGD RGVV | 44918 |
| 56 | SGTTGGSTNDNT | 46659 | SAQ RGD HVNL | 44919 |
| 57 | SGTTGGASNDNT | 46650 | wt VR8 | 48388 |
| 58 | SGTTGGATNDNT | 46653 | wt VR8 | 48388 |
| 59 | SGTTGGSSNDNT | 46656 | wt VR8 | 48388 |
| 60 | SGTTGGSTNDNT | 46659 | wt VR8 | 48388 |
| 61 | SSTAGGASNDNA | 47128 | ENR RGD EQNT | 44867 |
| 62 | SSTAGGASNDNA | 47128 | ENR RGD FNGL | 44879 |
| 63 | SSTAGGASNDNA | 47128 | ENR RGD FNNL | 44864 |
| 64 | SSTAGGASNDNA | 47128 | ENR RGD FNNT | 44880 |
| 65 | SSTAGGASNDNA | 47128 | ENR RGD FNST | 44865 |
| 66 | SSTAGGASNDNA | 47128 | SAQ RGD FNNT | 44881 |
| 67 | SSTAGGASNDNA | 47128 | SAQ RGD LLLS | 44882 |
| 68 | SSTAGGASNDNA | 47128 | SNR RGD FNNT | 44883 |
| 69 | SSTAGGASNDNA | 47128 | ENR RGD FQNT | 44866 |
| 70 | SSTAGGASNDNA | 47128 | SAQ RGD RGQI | 44911 |
| 71 | SSTAGGASNDNA | 47128 | SAQ RGD RGVV | 44918 |
| 672 | SSTAGGASNDNA | 47128 | SAQ RGD HVNL | 44919 |
| 73 | SSTAGGASNDNA | 47128 | wt VR8 | 48388 |
| 74 | SSTAGGATNDNA | 47131 | wt VR8 | 48388 |
| 75 | SSTAGGSSNDNA | 47134 | wt VR8 | 48388 |
| 76 | SSTAGGSTNDNA | 47137 | wt VR8 | 48388 |
| 77 | w/t | 48388 | SNR RGD FNNT | 44867 |
| 78 | w/t | 48388 | ENR RGD FNNT | 44879 |
| 79 | w/t | 48388 | ENR RGD EQNT | 44864 |
| 80 | w/t | 48388 | SAQ RGD LLLS | 44880 |
| 81 | w/t | 48388 | ENR RGD FNST | 44865 |
| 82 | w/t | 48388 | ENR RGD FNNL | 44881 |
| 83 | w/t | 48388 | SAQ RGD FNNT | 44882 |
| 84 | w/t | 48388 | ENR RGD FNGL | 44883 |
| 85 | w/t | 48388 | ENR RGD FQNT | 44866 |
| 86 | w/t | 48388 | SAQ RGD RGQI | 44911 |
| 87 | w/t | 48388 | SAQ RGD RGVV | 44918 |
| 88 | w/t | 48388 | SAQ RGD HVNL | 44919 |
| 89 | w/t | 48388 | w/t | 48388 |
| 90 | NSTSGASTNDNA | 48390 | SNR RGD FNNT | 44867 |
| 91 | NSTSGASTNDNA | 48390 | ENR RGD FNNT | 44879 |
| 92 | NSTSGASTNDNA | 48390 | ENR RGD EQNT | 44864 |
| 93 | NSTSGASTNDNA | 48390 | SAQ RGD LLLS | 44880 |
| 94 | NSTSGASTNDNA | 48390 | ENR RGD FNST | 44865 |
| 95 | NSTSGASTNDNA | 48390 | ENR RGD FNNL | 44881 |
| 96 | NSTSGASTNDNA | 48390 | SAQ RGD FNNT | 44882 |
| 97 | NSTSGASTNDNA | 48390 | ENR RGD FNGL | 44883 |
| 98 | NSTSGASTNDNA | 48390 | ENR RGD FQNT | 44866 |
| 99 | NSTSGASTNDNA | 48390 | SAQ RGD RGQI | 44911 |
| 100 | NSTSGASTNDNA | 48390 | SAQ RGD RGVV | 44918 |
| 101 | NSTSGASTNDNA | 48390 | SAQ RGD HVNL | 44919 |
| 102 | NSTSGASTNDNA | 48390 | w/t | 48388 |
| 103 | SGTTGGSSNDNT | 46656 | ENRRGDFNNL | 44864 |
| 104 | SGTTGGSSNDNT | 46656 | SAQRGDLLLS | 44882 |
| 105 | SGTTGGSSNDNT | 46656 | ENRRGDFQNT | 44866 |
| 106 | SGTTGGSSNDNT | 46656 | SAQRGDRQGI | 44912 |
| 107 | SGTTGGSSNDNT | 46656 | SAQRGDRGVV | 44918 |
| 108 | SGTTGGSSNDNT | 46656 | SAQRGDHVNL | 44919 |
| 109 | SGTTGGSSNDNT | 46656 | ENRRGDFNNT | 44880 |
| 110 | SSTAGGATNDNA | 47131 | SAQRGDLLLS | 44882 |
| 111 | SSTAGGATNDNA | 47131 | ENRRGDFQNT | 44866 |
| 112 | SSTAGGATNDNA | 47131 | SAQRGDRQGI | 44912 |
| 113 | SSTAGGATNDNA | 47131 | SAQRGDRGVV | 44918 |
| 114 | SSTAGGATNDNA | 47131 | SAQRGDHVNL | 44919 |
| 115 | SSTAGGATNDNA | 47131 | ENRRGDFNNT | 44880 |
| 116 | SSTAGGATNDNA | 47131 | ENRRGDFNNL | 44864 |

[1154] A library containing the 116 AAV capsids comprising the targeting peptides and/or the peptide segments described in Table 21 was produced according to the methods described herein. This library is referred to herein as the AAV-mini library or AAV-mini capsid library. Additionally, wild-type AAV9 and AAV^{mut1} capsid proteins were used as controls. Wild-type AAV9 is known to target the liver whereas AAV^{mut1} has a liver detargeting phenotype. The AAV-mini library was assessed in mice and non-human primates (NHPs).

### 8.25.1. AAV-Mini Library in NHPs

### Experimental Design

[1155] A total of 3 animals were used for this study according to the experimental design in Table 21. Immunosuppression of the animals began 7 days prior to AAV vector administration. NHPs were administered with the indicated amounts or concentrations of AAV^{-mini} library (comprising the 116 modified capsid proteins of Table 20) by IV. Table 21. Experimental design for non-human primate study.

TABLE 21

| | | | | | Study end |
|---|---|---|---|---|---|
| Group | | Dose | Dose | Dose (vg/ | point (necropsy |
| No. | Treatment | Route | Vol (ml) | animal or kg) | day 28) |
| 1 | Mini- | IV | 10.0 | 5E13 vg/kg | 3 |
| | Library | | | | |

[1156] Animals were sacrificed on day 28 after AAV vector administration and heart, liver, diaphragm, and quadricep samples were collected for analysis. Tissues were immediately placed into the preservative RNAlater, after which the RNAlater was removed and the tissue flash frozen. RNA was isolated from the tissue samples and sequenced to identify the AAVs (AAVs from AAV^{-mini} library, each AAV containing a unique targeting peptide in VR VIII and a unique peptide segment in VR I) localized in each tissue. Using the sequence data, enrichment scores for each tissue were calculated for each AAV variant (calculated as described in Example 11). After determining a sequence count from sequence read data (FASTQ) following sequencing, AAV variants were counted and normalized. The AAV variants were assigned tissue enrichment scores for each individual tissue analyzed (i.e., heart, liver, diaphragm, and quadriceps, biceps, gastrocnemius, and Tibialis). Tissue enrichment data for the AAV^{-mini} library in NHP is shown in Table 23 with tissue enrichment scores in columns F-L for the respective tissues.

TABLE 22

| | | | | VR | | | | | | | | | | |
|---|---|---|---|---|---|---|---|---|---|---|---|---|---|---|
| | | VR1 | | VIII | | | | | | | | | | |
| | | SEQ | | SEQ | Dia- | Heart | Liver | Liver | Liver | Liver | | Bicep | Gastroc- | Tibialis |
| | VR1_ | ID | VR | ID | phragm | VW | LL | LL | ML | ML | Quads | Femoris | nemius | Anterior |
| variant_id | mutation | NO: | VIII | NO: | Left | Left | Left | Right | Left | Right | Right | Left | Left | Left |
| ATLVT019XX1 | SSTAGGAS | 47128 | SNRR | 44883 | −0.21 | −0.32 | −0.11 | −0.09 | −0.25 | 0.16 | −0.18 | −0.70 | −0.55 | −0.58 |
| | NDNA | | GDFN | | | | | | | | | | | |
| | | | NT | | | | | | | | | | | |
| ATLVT019XX10 | SGTTGGST | 46659 | ENRR | 44864 | 0.73 | 1.17 | 0.93 | 0.78 | 0.45 | 0.89 | 1.40 | 1.84 | 1.72 | 1.45 |
| | NDNT | | GDFN | | | | | | | | | | | |
| | | | NL | | | | | | | | | | | |
| ATLVT019XX11 | SGTTGGSS | 46656 | ENRR | 44864 | 0.73 | 0.60 | 0.17 | 0.32 | 0.09 | 0.15 | 1.31 | 1.26 | 1.27 | 1.17 |
| | NDNT | | GDFN | | | | | | | | | | | |
| | | | NL | | | | | | | | | | | |
| ATLVT019XX12 | SSTAGGAS | 47128 | ENRR | 44864 | 1.76 | 1.32 | −0.05 | 1.73 | 1.45 | 1.97 | 1.90 | 1.69 | 2.05 | 1.67 |
| | NDNA | | GDFN | | | | | | | | | | | |
| | | | NL | | | | | | | | | | | |
| ATLVT019XX13 | SSTAGGAT | 47131 | SAQR | 44882 | −1.89 | −0.42 | 0.70 | 0.73 | 0.09 | −0.08 | −2.74 | −2.15 | −0.18 | −1.90 |
| | NDNA | | GDLL | | | | | | | | | | | |
| | | | LS | | | | | | | | | | | |
| ATLVT019XX14 | SGTTGGST | 46659 | SAQR | 44882 | −1.07 | −0.77 | −0.48 | −0.31 | −0.42 | −0.56 | −1.41 | −0.97 | −0.95 | −1.47 |
| | NDNT | | GDLL | | | | | | | | | | | |
| | | | LS | | | | | | | | | | | |
| ATLVT019XX15 | SGTTGGSS | 46656 | SAQR | 44882 | −1.80 | −0.72 | −0.03 | −0.17 | 0.06 | 0.42 | −1.41 | −0.56 | −0.94 | −1.44 |
| | NDNT | | GDLL | | | | | | | | | | | |
| | | | LS | | | | | | | | | | | |
| ATLVT019XX16 | SSTAGGAS | 47128 | SAQR | 44882 | 0.34 | 0.10 | 2.08 | 1.47 | 1.49 | 1.53 | 1.16 | 0.66 | 0.79 | −0.19 |
| | NDNA | | GDLL | | | | | | | | | | | |
| | | | LS | | | | | | | | | | | |
| ATLVT019XX17 | SSTAGGAT | 47131 | ENRR | 44866 | 0.49 | 1.11 | 1.08 | 0.85 | 0.67 | 0.80 | 1.25 | 1.36 | 0.88 | 1.12 |
| | NDNA | | GDFQ | | | | | | | | | | | |
| | | | NT | | | | | | | | | | | |
| ATLVT019XX18 | SGTTGGST | 46659 | ENRR | 44866 | 0.88 | 0.60 | −0.50 | −0.45 | −0.60 | −0.26 | 1.33 | 1.13 | 0.94 | 0.73 |
| | NDNT | | GDFQ | | | | | | | | | | | |
| | | | NT | | | | | | | | | | | |
| ATLVT019XX19 | SGTTGGSS | 46656 | ENRR | 44866 | 1.68 | 1.07 | −0.07 | −0.23 | −0.16 | −0.18 | 1.23 | 1.05 | 1.51 | 0.95 |
| | NDNT | | GDFQ | | | | | | | | | | | |
| | | | NT | | | | | | | | | | | |
| ATLVT019XX2 | SGTAGGAS | 46554 | SNRR | 44883 | −0.17 | −0.01 | 0.63 | 0.80 | 0.78 | 1.01 | −0.18 | −0.67 | −0.65 | −0.72 |
| | NDNT | | GDFN | | | | | | | | | | | |
| | | | NT | | | | | | | | | | | |
| ATLVT019XX20 | SSTAGGAS | 47128 | ENRR | 44866 | 0.62 | −0.59 | 1.32 | 1.24 | 1.35 | 1.34 | 0.49 | 0.31 | 0.53 | 0.51 |
| | NDNA | | GDFQ | | | | | | | | | | | |
| | | | NT | | | | | | | | | | | |
| ATLVT019XX21 | SSTAGGAT | 47131 | SAQR | 44912 | −0.09 | 0.10 | 1.27 | 1.43 | 1.08 | 1.38 | 0.00 | 0.25 | 0.11 | −0.02 |
| | NDNA | | GDRQ | | | | | | | | | | | |
| | | | GI | | | | | | | | | | | |
| ATLVT019XX23 | SGTTGGSS | 46656 | SAQR | 44912 | 0.32 | 0.60 | 1.24 | 1.00 | 1.22 | 1.29 | 0.39 | 0.83 | 0.57 | 0.58 |
| | NDNT | | GDRQ | | | | | | | | | | | |
| | | | GI | | | | | | | | | | | |
| ATLVT019XX24 | SSTAGGAS | 47128 | SAQR | 44912 | 0.87 | 0.77 | 1.66 | 1.20 | 1.50 | 1.29 | 1.06 | 0.68 | 0.80 | 0.77 |
| | NDNA | | GDRQ | | | | | | | | | | | |
| | | | GI | | | | | | | | | | | |
| ATLVT019XX25 | SSTAGGAT | 47131 | SAQR | 44918 | 1.02 | 1.19 | 1.57 | 1.65 | 1.51 | 1.71 | 1.06 | 1.19 | 0.81 | 1.05 |
| | NDNA | | GDRG | | | | | | | | | | | |
| | | | VV | | | | | | | | | | | |
| ATLVT019XX26 | SGTTGGST | 46659 | SAQR | 44918 | 1.26 | 1.40 | 0.62 | 1.47 | 0.89 | 1.18 | 1.28 | 1.19 | 1.19 | 1.13 |
| | NDNT | | GDRG | | | | | | | | | | | |
| | | | VV | | | | | | | | | | | |
| ATLVT019XX27 | SGTTGGSS | 46656 | SAQR | 44918 | 1.66 | 1.35 | 0.59 | 0.64 | 0.48 | 0.65 | 1.08 | 1.41 | 1.40 | 1.23 |
| | NDNT | | GDRG | | | | | | | | | | | |
| | | | VV | | | | | | | | | | | |
| ATLVT019XX28 | SSTAGGAS | 47128 | SAQR | 44918 | 0.69 | 0.62 | 1.66 | 1.71 | 1.62 | 1.66 | 0.25 | 0.54 | 0.39 | 0.37 |
| | NDNA | | GDRG | | | | | | | | | | | |
| | | | VV | | | | | | | | | | | |
| ATLVT019XX29 | SSTAGGAT | 47131 | SAQR | 44919 | 0.07 | 0.23 | 0.02 | −0.49 | −0.06 | −0.12 | 0.00 | 0.12 | −0.10 | −0.11 |
| | NDNA | | GDHV | | | | | | | | | | | |
| | | | NL | | | | | | | | | | | |
| ATLVT019XX3 | SGTSGGST | 46609 | SNRR | 44883 | −0.40 | −0.13 | −0.84 | −0.96 | −0.79 | −0.60 | −0.59 | −0.70 | −0.71 | −0.74 |
| | NDNA | | GDFN | | | | | | | | | | | |
| | | | NT | | | | | | | | | | | |
| ATLVT019XX30 | SGTTGGST | 46659 | SAQR | 44919 | 0.05 | −0.13 | −1.01 | −1.00 | −0.94 | −1.21 | −0.95 | −0.78 | −0.78 | −0.55 |
| | NDNT | | GDHV | | | | | | | | | | | |
| | | | NL | | | | | | | | | | | |
| ATLVT019XX31 | SGTTGGSS | 46656 | SAQR | 44919 | −0.47 | 0.63 | 0.44 | 0.19 | 0.44 | 0.54 | −0.60 | 0.47 | 0.21 | 0.30 |
| | NDNT | | GDHV | | | | | | | | | | | |
| | | | NL | | | | | | | | | | | |
| ATLVT019XX32 | SSTAGGAS | 47128 | SAQR | 44919 | 0.96 | 0.60 | 1.80 | 1.62 | 1.46 | 1.33 | 1.09 | 0.10 | 0.77 | 0.51 |
| | NDNA | | GDHV | | | | | | | | | | | |
| | | | NL | | | | | | | | | | | |
| ATLVT019XX4 | SGTTGGST | 46659 | SNRR | 44883 | −0.08 | 0.57 | −1.10 | −1.79 | −1.75 | −1.38 | −0.12 | −0.23 | 0.12 | −0.46 |
| | NDNT | | GDFN | | | | | | | | | | | |
| | | | NT | | | | | | | | | | | |
| ATLVT019XX41 | SGTSGGAS | 46600 | SAQ- | 48388 | −1.72 | −1.12 | −1.73 | −1.57 | −1.55 | −2.16 | −1.27 | −0.99 | −0.64 | −0.84 |
| | NDNA | | ---- | | | | | | | | | | | |
| | | | -- | | | | | | | | | | | |
| ATLVT019XX44 | SGTSGGST | 46609 | SAQ- | 48388 | −0.75 | −1.18 | −1.79 | −1.82 | −1.75 | −1.62 | −1.20 | −1.11 | −1.30 | −1.10 |
| | NDNA | | ---- | | | | | | | | | | | |
| | | | -- | | | | | | | | | | | |
| ATLVT019XX45 | SGTTGGAS | 46650 | SAQ- | 48388 | −0.92 | −1.04 | −2.05 | −2.19 | −2.29 | −2.44 | −1.19 | −1.07 | −0.98 | −0.99 |
| | NDNT | | ---- | | | | | | | | | | | |
| | | | -- | | | | | | | | | | | |
| ATLVT019XX46 | SGTTGGAT | 46653 | SAQ- | 48388 | −0.82 | −1.68 | −5.37 | −5.35 | −3.65 | −4.45 | −1.31 | −1.37 | −1.37 | −1.08 |
| | NDNT | | ---- | | | | | | | | | | | |
| | | | -- | | | | | | | | | | | |
| ATLVT019XX47 | SGTTGGSS | 46656 | SAQ- | 48388 | −0.72 | −1.17 | −4.53 | −2.59 | −3.50 | −3.93 | −1.21 | −1.93 | −1.13 | −1.73 |
| | NDNT | | ---- | | | | | | | | | | | |
| | | | -- | | | | | | | | | | | |
| ATLVT019XX48 | SGTTGGST | 46659 | SAQ- | 48388 | 0.05 | −0.92 | −4.28 | −2.97 | −3.05 | −2.83 | −0.63 | −1.09 | −0.88 | −0.54 |
| | NDNT | | ---- | | | | | | | | | | | |
| | | | -- | | | | | | | | | | | |
| ATLVT019XX49 | SSTAGGAS | 47128 | SAQ- | 48388 | 0.56 | −0.47 | −1.79 | −1.65 | −1.85 | −2.41 | 0.01 | −0.51 | −0.69 | 0.02 |
| | NDNA | | ---- | | | | | | | | | | | |
| | | | -- | | | | | | | | | | | |
| ATLVT019XX5 | SSTAGGAT | 47131 | ENRR | 44880 | 2.12 | 1.16 | 0.09 | −0.22 | −0.16 | 0.01 | 1.31 | 1.76 | 1.24 | 1.19 |
| | NDNA | | GDFN | | | | | | | | | | | |
| | | | NT | | | | | | | | | | | |
| ATLVT019XX50 | SSTAGGAT | 47131 | SAQ- | 48388 | −0.21 | −1.18 | −1.53 | −1.09 | −1.56 | −2.04 | −0.41 | −1.08 | −1.06 | −1.53 |
| | NDNA | | ---- | | | | | | | | | | | |
| | | | -- | | | | | | | | | | | |
| ATLVT019XX51 | SSTAGGSS | 47134 | SAQ- | 48388 | −0.65 | −0.76 | −0.89 | −1.27 | −1.19 | −1.56 | −0.49 | −0.46 | −0.55 | −0.33 |
| | NDNA | | ---- | | | | | | | | | | | |
| | | | -- | | | | | | | | | | | |
| ATLVT019XX52 | SSTAGGST | 47137 | SAQ- | 48388 | −0.91 | −1.39 | −1.44 | −1.53 | −1.51 | −1.69 | −0.97 | −1.36 | −1.44 | −1.06 |
| | NDNA | | ---- | | | | | | | | | | | |
| | | | -- | | | | | | | | | | | |
| ATLVT019XX53 | NSTSGGAS | 46026 | SAQ- | 48388 | −1.60 | −1.57 | −1.66 | −1.73 | −1.61 | −1.82 | −1.55 | −1.82 | −1.20 | −0.82 |
| | NDNH | | ---- | | | | | | | | | | | |
| | | | -- | | | | | | | | | | | |
| ATLVT019XX55 | NSTSGGSS | 46031 | SAQ- | 48388 | −0.59 | −1.10 | 0.25 | 0.34 | 0.17 | 0.25 | −0.83 | −1.18 | −1.10 | −0.52 |
| | NDNH | | ---- | | | | | | | | | | | |
| | | | -- | | | | | | | | | | | |
| ATLVT019XX56 | NSTSGGST | 46034 | SAQ- | 48388 | −1.17 | −0.86 | 0.79 | 0.76 | 0.63 | 0.85 | −1.14 | −0.68 | −0.75 | −0.31 |
| | NDNH | | ---- | | | | | | | | | | | |
| | | | -- | | | | | | | | | | | |
| ATLVT019XX57 | SGQTGGAS | 46505 | SAQ- | 48388 | −1.39 | −1.22 | −3.42 | −3.18 | −3.61 | −3.46 | −1.87 | −2.07 | −1.40 | −1.83 |
| | NDNH | | ---- | | | | | | | | | | | |
| | | | -- | | | | | | | | | | | |
| ATLVT019XX58 | SGQTGGAT | 46508 | SAQ- | 48388 | −0.36 | −0.87 | 1.23 | 1.20 | 1.11 | 1.05 | −0.80 | −1.29 | −1.46 | −1.05 |
| | NDNH | | ---- | | | | | | | | | | | |
| | | | -- | | | | | | | | | | | |
| ATLVT019XX59 | SGQTGGSS | 46511 | SAQ- | 48388 | −1.21 | −2.42 | −9.13 | −5.27 | −7.76 | −6.52 | −1.80 | −2.91 | −1.96 | −2.08 |
| | NDNH | | ---- | | | | | | | | | | | |
| | | | -- | | | | | | | | | | | |
| ATLVT019XX6 | SGTTGGST | 46659 | ENRR | 44880 | 1.58 | 0.99 | 0.19 | −0.42 | 0.22 | −0.18 | 0.96 | 1.62 | 1.18 | 1.08 |
| | NDNT | | GDFN | | | | | | | | | | | |
| | | | NT | | | | | | | | | | | |
| ATLVT019XX60 | SGQTGGST | 46514 | SAQ- | 48388 | −2.28 | −1.23 | −4.51 | −2.68 | −1.32 | −4.18 | −3.35 | −3.67 | −2.14 | −1.80 |
| | NDNH | | ---- | | | | | | | | | | | |
| | | | -- | | | | | | | | | | | |
| ATLVT019XX61 | NSTSGGSS | 48388 | ENRR | 44859 | 1.54 | 1.51 | 1.81 | 1.82 | 1.78 | 1.84 | 1.76 | 1.44 | 1.21 | 1.34 |
| | NDNA | | GDYN | | | | | | | | | | | |
| | | | SL | | | | | | | | | | | |
| ATLVT019XX62 | NSTSGGSS | 48388 | ENRR | 44866 | 0.80 | 1.05 | 2.16 | 2.09 | 2.04 | 2.25 | 1.18 | 1.14 | 0.84 | 0.88 |
| | NDNA | | GDFQ | | | | | | | | | | | |
| | | | NT | | | | | | | | | | | |
| ATLVT019XX63 | NSTSGAST | 48390 | ENRR | 44859 | −0.74 | −1.32 | −2.38 | −2.32 | −2.51 | −2.24 | −0.52 | −1.07 | −1.26 | −1.12 |
| | NDNA | | GDYN | | | | | | | | | | | |
| | | | SL | | | | | | | | | | | |
| ATLVT019XX64 | NSTSGAST | 48390 | ENRR | 44866 | 0.42 | 0.35 | 0.35 | 0.40 | 0.21 | 0.40 | 1.11 | 0.86 | 0.65 | 0.67 |
| | NDNA | | GDFQ | | | | | | | | | | | |
| | | | NT | | | | | | | | | | | |
| ATLVT019XX65 | NSTSGGSS | 48388 | SAQR | 44912 | −0.64 | −0.55 | 2.01 | 2.09 | 2.03 | 2.15 | −0.47 | −0.27 | −0.42 | −0.18 |
| | NDNA | | GDRQ | | | | | | | | | | | |
| | | | GI | | | | | | | | | | | |
| ATLVT019XX66 | NSTSGAST | 48390 | SAQR | 44912 | 0.72 | −0.20 | 0.25 | 0.41 | 0.29 | 0.43 | 0.57 | 0.27 | −0.01 | 0.21 |
| | NDNA | | GDRQ | | | | | | | | | | | |
| | | | GI | | | | | | | | | | | |
| ATLVT019XX67 | NSTSGGSS | 48388 | ENRR | 44864 | 1.03 | 0.83 | 2.23 | 2.29 | 2.23 | 2.35 | 1.52 | 1.59 | 1.40 | 1.52 |
| | NDNA | | GDFN | | | | | | | | | | | |
| | | | NL | | | | | | | | | | | |
| ATLVT019XX68 | NSTSGGSS | 48388 | SAQR | 44918 | −0.49 | −0.51 | 2.10 | 2.09 | 2.03 | 2.22 | −0.43 | −0.52 | −0.59 | −0.26 |
| | NDNA | | GDRG | | | | | | | | | | | |
| | | | VV | | | | | | | | | | | |
| ATLVT019XX69 | NSTSGAST | 48390 | ENRR | 44864 | 0.72 | −0.25 | −0.18 | −0.29 | −0.15 | −0.47 | 1.17 | 0.40 | 0.46 | 0.64 |
| | NDNA | | GDFN | | | | | | | | | | | |
| | | | NL | | | | | | | | | | | |
| ATLVT019XX7 | SGTTGGSS | 46656 | ENRR | 44880 | 1.79 | 1.28 | 0.62 | 0.60 | 0.37 | 0.37 | 1.49 | 1.48 | 1.52 | 1.65 |
| | NDNT | | GDFN | | | | | | | | | | | |
| | | | NT | | | | | | | | | | | |
| ATLVT019XX70 | NSTSGAST | 48390 | SAQR | 44918 | 2.07 | 1.79 | 1.01 | 0.82 | 0.79 | 1.29 | 1.91 | 1.71 | 2.50 | 1.98 |
| | NDNA | | GDRG | | | | | | | | | | | |
| | | | VV | | | | | | | | | | | |
| ATLVT019XX71 | NSTSGGSS | 48388 | SAQR | 44919 | −0.11 | −0.16 | 1.55 | 1.42 | 1.38 | 1.16 | −0.19 | −0.53 | −0.46 | −0.30 |
| | NDNA | | GDHV | | | | | | | | | | | |
| | | | NL | | | | | | | | | | | |
| ATLVT019XX72 | NSTSGAST | 48390 | SAQR | 44919 | 0.01 | 0.01 | −0.21 | 0.05 | −0.22 | −0.21 | 0.02 | −0.01 | −0.29 | −0.12 |
| | NDNA | | GDHV | | | | | | | | | | | |
| | | | NL | | | | | | | | | | | |
| ATLVT019XX8 | SSTAGGAS | 47128 | ENRR | 44880 | 1.07 | 0.65 | 1.24 | 0.62 | 1.02 | 1.04 | −0.18 | 0.48 | 0.63 | 0.65 |
| | NDNA | | GDFN | | | | | | | | | | | |
| | | | NT | | | | | | | | | | | |
| ATLVT019XX9 | SSTAGGAT | 47131 | ENRR | 44864 | 0.95 | 0.57 | 0.08 | 0.09 | 0.00 | 0.06 | 1.33 | 1.07 | 1.00 | 0.82 |
| | NDNA | | GDFN | | | | | | | | | | | |
| | | | NL | | | | | | | | | | | |
| ATLVT019XXAAV9 | NSTSGGSS | 48388 | SAQ- | 48388 | −0.14 | −0.92 | 0.87 | 0.78 | 0.64 | 0.86 | −0.62 | −1.10 | −1.15 | −0.89 |
| | NDNA | | ---- | | | | | | | | | | | |
| | | | -- | | | | | | | | | | | |
| ATLVT019XXAAV9deco1 | NSTSGGSS | 48388 | SAQR | 44882 | −0.11 | 0.48 | 2.18 | 2.10 | 1.99 | 2.13 | −0.05 | 0.01 | −0.17 | −0.04 |
| | NDNA | | GDLL | | | | | | | | | | | |
| | | | LS | | | | | | | | | | | |
| ATLVT019XXAAV9_1000 | NSTSGGSS | 48388 | ENRR | 44880 | 0.99 | 1.40 | 2.93 | 2.78 | 2.80 | 2.82 | 1.02 | 1.36 | 0.91 | 1.18 |
| | NDNA | | GDFN | | | | | | | | | | | |
| | | | NT | | | | | | | | | | | |
| ATLVT019XXMut1_1000 | NSTSGAST | 48390 | ENRR | 44880 | 1.12 | 0.13 | −0.04 | 0.06 | 0.04 | 0.02 | 1.04 | 0.84 | 0.82 | 0.81 |
| | NDNA | | GDFN | | | | | | | | | | | |
| | | | NT | | | | | | | | | | | |

VW = ventricle wall,
LL = lateral lobe,
ML = median lobe

[1157] Overall, this data showed that a subset of the modified AAV capsids from Table 22 tested in NHPs had reduced liver tropism and increased muscle tropism. Modified AAV capsids with “variant-ids” ATLVT019XX10 to ATLVT019XX20 exhibited the greatest reductions in liver tropism and the greatest increases in muscle tropism (or at least not effecting significant reduction in muscle tropism).

[1158] DNA samples are analyzed for biodistribution of vector genomes in the liver and quadriceps tissue using NGS. All analytical work is conducted, using an analytical method developed and qualified by that laboratory. Samples were collected at 4 weeks pre-dose and on day 28 following administration.

### 8.25.2. AAV^{-mini} Library in Mice

### Experimental Design

[1159] A total of 5 C57BL/6 mice were used for this study according to the experimental design in Table 23. Mice were administered with the indicated amounts or concentrations of AAV^{-mini} library (comprising the 116 modified capsid proteins of Table 20) by intravenous tail vein injection.

TABLE 23
Experimental design for mouse study.

| | | | | | Study end |
|---|---|---|---|---|---|
| Group | | Dose | Dose | Dose (vg/ | point (necropsy |
| No. | Treatment | Route | Vol (ml) | animal or kg) | day 28) |
| 1 | Mini- | IV | 10.0 | 5E13 vg/kg | 5 |
| | Library | | | | |

[1160] The mice were sacrificed 28 days after the injection. Individual tissues, notably the liver, heart, and diaphragm, were collected at the time of necropsy. Tissue were immediately placed into the preservative RNAlater, after which the RNAlater was removed and the tissue flash frozen. RNA was isolated from the tissue samples and sequenced to identify the AAVs (AAVs from AAV^{-mini} library, each AAV containing a unique targeting peptide in VR VIII and a unique peptide segment in VR I) localized in each tissue. Using the sequence data, enrichment scores for each tissue were calculated for each AAV (calculated as described in Example 11). After determining a sequence count from sequence read data (FASTQ) following sequencing, AAV variants were counted and normalized. The AAV variants were assigned tissue enrichment scores for each individual tissue analyzed (i.e., heart, liver, diaphragm, and quadriceps). Tissue enrichment data for the AAV^{-mini} library in mice is shown in Table 24 with tissue enrichment scores in columns F-H for the respective tissues.

TABLE 24

| | | | | VR VIII | | | |
|---|---|---|---|---|---|---|---|
| | | VRI SEQ | VR8_ | SEQ ID | | | |
| variant_id | VR1_mutation | ID NO: | insertion | NO: | Diaphragm | Heart | Liver |
| ATLVT019XX1 | SSTAGGASNDNA | 47128 | SNRRGDFNNT | 44883 | −0.56 | −0.10 | −0.08 |
| ATLVT019XX10 | SGTTGGSTNDNT | 46659 | ENRRGDFNNL | 44864 | 0.03 | 0.48 | 0.05 |
| ATLVT019XX11 | SGTTGGSSNDNT | 46656 | ENRRGDFNNL | 44864 | −0.31 | 0.09 | −0.24 |
| ATLVT019XX12 | SSTAGGASNDNA | 47128 | ENRRGDFNNL | 44864 | 1.55 | 1.68 | 1.73 |
| ATLVT019XX13 | SSTAGGATNDNA | 47131 | SAQRGDLLLS | 44882 | −0.51 | 0.49 | 0.09 |
| ATLVT019XX14 | SGTTGGSTNDNT | 46659 | SAQRGDLLLS | 44882 | −0.69 | 0.27 | −0.33 |
| ATLVT019XX15 | SGTTGGSSNDNT | 46656 | SAQRGDLLLS | 44882 | −0.48 | 0.40 | −0.36 |
| ATLVT019XX16 | SSTAGGASNDNA | 47128 | SAQRGDLLLS | 44882 | 0.85 | 1.14 | 2.03 |
| ATLVT019XX17 | SSTAGGATNDNA | 47131 | ENRRGDFQNT | 44866 | 0.29 | 0.74 | 0.08 |
| ATLVT019XX18 | SGTTGGSTNDNT | 46659 | ENRRGDFQNT | 44866 | 0.02 | 0.38 | −0.41 |
| ATLVT019XX19 | SGTTGGSSNDNT | 46656 | ENRRGDFQNT | 44866 | 1.04 | 1.20 | 0.65 |
| ATLVT019XX2 | SGTAGGASNDNT | 46554 | SNRRGDFNNT | 44883 | −0.46 | −0.15 | −0.01 |
| ATLVT019XX20 | SSTAGGASNDNA | 47128 | ENRRGDFQNT | 44866 | 0.29 | 0.58 | 1.52 |
| ATLVT019XX21 | SSTAGGATNDNA | 47131 | SAQRGDRQGI | 44912 | 0.54 | 0.81 | 1.46 |
| ATLVT019XX23 | SGTTGGSSNDNT | 46656 | SAQRGDRQGI | 44912 | 0.37 | 0.51 | 0.46 |
| ATLVT019XX24 | SSTAGGASNDNA | 47128 | SAQRGDRQGI | 44912 | 0.54 | 0.78 | 1.34 |
| ATLVT019XX25 | SSTAGGATNDNA | 47131 | SAQRGDRGVV | 44918 | 0.79 | 1.12 | 1.04 |
| ATLVT019XX26 | SGTTGGSTNDNT | 46659 | SAQRGDRGVV | 44918 | −0.24 | 0.02 | 0.87 |
| ATLVT019XX27 | SGTTGGSSNDNT | 46656 | SAQRGDRGVV | 44918 | −0.63 | 0.11 | 0.33 |
| ATLVT019XX28 | SSTAGGASNDNA | 47128 | SAQRGDRGVV | 44918 | 1.84 | 3.25 | 2.37 |
| ATLVT019XX29 | SSTAGGATNDNA | 47131 | SAQRGDHVNL | 44919 | 2.06 | 0.60 | 0.45 |
| ATLVT019XX3 | SGTSGGSTNDNA | 46609 | SNRRGDFNNT | 44883 | −0.53 | −0.06 | −0.50 |
| ATLVT019XX30 | SGTTGGSTNDNT | 46659 | SAQRGDHVNL | 44919 | 0.62 | 0.10 | −0.14 |
| ATLVT019XX31 | SGTTGGSSNDNT | 46656 | SAQRGDHVNL | 44919 | 0.80 | 0.48 | 0.05 |
| ATLVT019XX32 | SSTAGGASNDNA | 47128 | SAQRGDHVNL | 44919 | 0.45 | 0.68 | 1.23 |
| ATLVT019XX4 | SGTTGGSTNDNT | 46659 | SNRRGDFNNT | 44883 | −0.03 | 0.40 | −0.31 |
| ATLVT019XX41 | SGTSGGASNDNA | 46600 | SAQ------- | 48388 | 0.27 | −0.09 | −0.71 |
| ATLVT019XX44 | SGTSGGSTNDNA | 46609 | SAQ------- | 48388 | −0.55 | −0.87 | −0.95 |
| ATLVT019XX45 | SGTTGGASNDNT | 46650 | SAQ------- | 48388 | −0.76 | −1.16 | −1.86 |
| ATLVT019XX46 | SGTTGGATNDNT | 46653 | SAQ------- | 48388 | −0.71 | −1.17 | −2.03 |
| ATLVT019XX47 | SGTTGGSSNDNT | 46656 | SAQ------- | 48388 | −0.78 | −1.20 | −2.01 |
| ATLVT019XX48 | SGTTGGSTNDNT | 46659 | SAQ------- | 48388 | 0.05 | −0.33 | −1.04 |
| ATLVT019XX49 | SSTAGGASNDNA | 47128 | SAQ------- | 48388 | 1.33 | −0.04 | −0.51 |
| ATLVT019XX5 | SSTAGGATNDNA | 47131 | ENERGDFNNT | 44880 | 1.21 | 0.55 | 0.25 |
| ATLVT019XX50 | SSTAGGATNDNA | 47131 | SAQ------- | 48388 | −0.37 | −0.61 | −0.22 |
| ATLVT019XX51 | SSTAGGSSNDNA | 47134 | SAQ------- | 48388 | −0.53 | −0.81 | −0.93 |
| ATLVT019XX52 | SSTAGGSTNDNA | 47137 | SAQ------- | 48388 | −0.58 | −0.76 | −0.10 |
| ATLVT019XX53 | NSTSGGASNDNH | 46026 | SAQ------- | 48388 | −0.72 | −1.07 | −1.21 |
| ATLVT019XX55 | NSTSGGSSNDNH | 46031 | SAQ------- | 48388 | −0.76 | −0.92 | −0.05 |
| ATLVT019XX56 | NSTSGGSTNDNH | 46034 | SAQ------- | 48388 | −0.52 | −0.53 | 1.15 |
| ATLVT019XX57 | SGQTGGASNDNH | 46505 | SAQ------- | 48388 | −0.92 | −1.22 | −1.24 |
| ATLVT019XX58 | SGQTGGATNDNH | 46508 | SAQ------- | 48388 | −0.31 | −0.40 | 2.01 |
| ATLVT019XX59 | SGQTGGSSNDNH | 46511 | SAQ------- | 48388 | −1.34 | −1.63 | −2.09 |
| ATLVT019XX6 | SGTTGGSTNDNT | 46659 | ENRRGDFNNT | 44880 | 0.57 | 0.34 | −0.16 |
| ATLVT019XX60 | SGQTGGSTNDNH | 46514 | SAQ------- | 48388 | −0.12 | −0.31 | 0.25 |
| ATLVT019XX61 | NSTSGGSSNDNA | 48388 | ENRRGDYNSL | 44859 | 1.70 | 0.48 | 0.89 |
| ATLVT019XX62 | NSTSGGSSNDNA | 48388 | ENRRGDFQNT | 44866 | 0.21 | 0.72 | 1.42 |
| ATLVT019XX63 | NSTSGASTNDNA | 48390 | ENRRGDYNSL | 44859 | −1.17 | −0.92 | −1.40 |
| ATLVT019XX64 | NSTSGASTNDNA | 48390 | ENRRGDFQNT | 44866 | 0.66 | 0.32 | −0.31 |
| ATLVT019XX65 | NSTSGGSSNDNA | 48388 | SAQRGDRQGI | 44912 | −0.16 | 0.14 | 2.19 |
| ATLVT019XX66 | NSTSGASTNDNA | 48390 | SAQRGDRQGI | 44912 | 0.26 | 0.48 | 0.23 |
| ATLVT019XX67 | NSTSGGSSNDNA | 48388 | ENRRGDFNNL | 44864 | 0.21 | 0.50 | 1.49 |
| ATLVT019XX68 | NSTSGGSSNDNA | 48388 | SAQRGDRGVV | 44918 | 0.18 | −0.11 | 1.54 |
| ATLVT019XX69 | NSTSGASTNDNA | 48390 | ENRRGDFNNL | 44864 | −0.39 | 0.01 | −0.38 |
| ATLVT019XX7 | SGTTGGSSNDNT | 46656 | ENRRGDFNNT | 44880 | 0.99 | 0.96 | 0.34 |
| ATLVT019XX70 | NSTSGASTNDNA | 48390 | SAQRGDRGVV | 44918 | 1.62 | 1.57 | 1.98 |
| ATLVT019XX71 | NSTSGGSSNDNA | 48388 | SAQRGDHVNL | 44919 | 1.33 | 0.65 | 2.20 |
| ATLVT019XX72 | NSTSGASTNDNA | 48390 | SAQRGDHVNL | 44919 | 0.42 | 0.30 | −0.06 |
| ATLVT019XX8 | SSTAGGASNDNA | 47128 | ENRRGDFNNT | 44880 | 1.24 | 0.97 | 1.79 |
| ATLVT019XX9 | SSTAGGATNDNA | 47131 | ENRRGDFNNL | 44864 | −0.07 | 0.29 | 0.42 |
| ATLVT019XXAAV9 | NSTSGGSSNDNA | 48388 | SAQ------- | 48388 | 0.28 | −0.32 | 1.03 |
| ATLVT019XXAAV9deco1 | NSTSGGSSNDNA | 48388 | SAQRGDLLLS | 44882 | 0.21 | 0.92 | 1.80 |
| ATLVT019XXAAV9_1000 | NSTSGGSSNDNA | 48388 | ENRRGDFNNT | 44880 | 0.59 | 0.57 | 1.76 |
| ATLVT019XXMut1_1000 | NSTSGASTNDNA | 48390 | ENRRGDFNNT | 44880 | 0.29 | 0.25 | −0.12 |

[1161] Overall, this data showed that a subset of the modified AAV capsids from Table 25 tested in mice had reduced liver tropism and had increased muscle tropism. Similar to the NHP data, modified AAV capsids with “variant-ids” ATLVT019XX10 to ATLVT019XX20 exhibited the greatest reductions in liver tropism and the greatest increases in muscle tropism (or at least not effecting significant reduction in muscle tropism).

[1162] DNA samples are analyzed for biodistribution of vector genomes in the liver and quadriceps tissue using NGS. All analytical work is conducted using an analytical method developed and qualified by that laboratory. Samples were collected at 4 weeks pre-dose and on day 28 following administration.

### 8.26. Example 26: Assessment of AA Vs Having Capsids a Targeting Peptide in VR VIII and a Peptide Segment within VR I in Mice and Non-Human Primates

[1163] The objective of this study is to assess AA Vs comprising a capsid protein having a targeting peptide in VR VIII and a tropism-altering peptide segment within VR I in non-human primates (NHP) to identify modified AAV capsid proteins with potential for muscle targeting (e.g., cardiac tissue, skeletal muscle, or cardiac tissue and skeletal muscle). Overall, 58,129 modified AAV capsid proteins are tested. The combination of targeting peptides and peptide segments tested in this example are as shown in FIGS. 62A-62E. The targeting peptides include a variable triplet, an RGD, and a variable quad (see FIG. 62A-62E).

[1164] In particular, a library containing the 58,129 modified AAV capsid proteins is produced, which is referred to herein as the AAV-Lib3 library (“AAV^{-Lib3} library”). The combinations of targeting peptides and peptide segments included the modified AAV capsid proteins that comprised AAV-^{Lib3} are as described herein. The targeting peptides are positioned in VR VIII of AAV9 between amino acid residues 585 and 589, replacing amino acids 586, 587, and 588. The peptide segments are positioned in VR I. For example, the amino acid sequences for the peptide segments in VR I correspond to the 12 amino acids between S261 and Y274. Controls include AAV9.

[1165] Three animals are treated as summarized in Table 25 below. Immunosuppression of the animals begins 7 days prior to vector administration. The animals are administered with the indicated amounts or concentrations of AAV-Lib3 (comprising the about 58,129 modified AAV capsid proteins and controls) by IV.

TABLE 25
Experimental design for non-human
primate study with AAV^{-Lib3} Library

| | | | | | Study end |
|---|---|---|---|---|---|
| Group | | Dose | Dose | Dose (vg/ | point (necropsy |
| No. | Treatment | Route | Vol (ml) | animal or kg) | day 28) |
| 1 | AAV^{-Lib3} | IV | 2.0 | 2E+13 | 3 animals |
| | | | | (3.7E+8 per | |
| | | | | variant) | |

[1166] Animals are sacrificed on day 28 after AAV vector administration and their organ samples are collected for analysis. Tissue samples include various muscle tissues and the liver.

[1167] DNA samples are analyzed for biodistribution of vector genomes in the muscle tissues and the liver using NGS.

[1168] Gene transfer efficacy of each AAV vector is assessed by measuring mRNA transcript in the muscle tissues and the liver using NGS.

[1169] Overall, this data shows that a subset of the modified AAV capsid comprising various targeting peptides tested in NHP have increased muscle tropism.

### 8.27. Example 27: Analysis of AAV Capsids Including X₁X₂X₃RGDX₇X₈X₉X₁₀ Targeting Peptides

[1170] The objective of this study was to assess the 50,500 modified AAV capsid proteins from AAV^{-Lib2} library in non-human primates (NHP) to identify capsids having targeting peptides that enhance muscle tropism.

[1171] In particular, a library containing the 50,500 modified AAV capsid proteins was produced, which was referred to herein as the AAV^{-Lib2} library. The library was constructed as described elsewhere herein. The targeting peptides were positioned in VR VIII of AAV9 between amino acid residues 585 and 589, replacing amino acids 586, 587, and 588. Targeting peptides included the sequences as described in SEQ ID NOs: 48391-98943 (see Table 29), which is hereby incorporated by reference in its entirety). Controls include AAV9. See also FIGS. 62A-62C.

[1172] Three animals were treated as summarized in the table below. The animals were administered with the indicated amounts or concentrations of AAV^{-Lib2} (comprising the about 50,500 modified capsid proteins and controls) (see Table 26 below) by IV.

TABLE 26
Experimental design for non-human
primate study with AAV^{-Lib2} Library

| | | | | | Study end |
|---|---|---|---|---|---|
| Group | | Dose | Dose | Dose (vg/ | point (necropsy |
| No. | Treatment | Route | Vol (ml) | animal or kg) | day 28) |
| 1 | AAV^{-Lib2} | IV | 2.0 | 2E+13 | 3 animals |
| | | | | (3.7E+8 per | |
| | | | | variant) | |

[1173] Animals were sacrificed on day 28 after AAV vector administration and their organ samples are collected for analysis. Individual muscle tissues, notably the biceps femoris, quadriceps, diaphragm, heart aria, heart ventricle wall, and liver were collected at the time of necropsy. Tissue isolated and analysis was performed as described elsewhere herein.

[1174] DNA samples will be analyzed for biodistribution of vector genomes in biceps femoris, quadriceps, diaphragm, heart aria, heart ventricle wall, and liver.

[1175] RNA samples were analyzed for vector expression in the each of the six tissue types collected at day 28 (biceps femoris, quadriceps, diaphragm, heart aria, heart ventricle wall, and liver). AAV^{-Lib2} library data was analyzed as described elsewhere herein (see. e.g., Example 17 “AAV VRI (AAV^{-Lib1}) Capsid Libraries”).

[1176] The AAV^{-Lib2} library data (see FIG. 63A) was analyzed to determine how targeting peptides having a particular quad sequence performed. FIG. 63B shows performance of capsids having a targeting peptide where the targeting peptide had a quad selected from FNNL, FNNT, and RGQI.

[1177] As noted above, AAV^{-Lib2} included targeting peptides having one of 20 different quads. FIG. 64 shows the amount of RNA in muscle tissue for the sum of all the capsids in the AAV^{-Lib2} library having the indicated quad sequences. This analysis revealed that targeting peptides having YTSV, YTSM, RGVV, RSVV, YSSV, and HGVL were the most muscle tropic quads. Targeting peptides having these quad sequences corresponded to X₁X₂X₃RGDYTSV (SEQ ID NO: 98941). X₁X₂X₃RGDYTSM (SEQ ID NO: 98942), X₁X₂X₃RGDRGVV (SEQ ID NO: 98928), X₁X₂X₃RGDRSVV (SEQ ID NO: 98931). X₁X₂X₃RGDYSSV (SEQ ID NO: 98937), and X₁X₂X₃RGDHGVL (SEQ ID NO: 98938), respectively.

[1178] Looking globally at roughly all 50,500 capsids in the AAV^{-Lib2} library FIG. 65 is a heatmap showing enrichment scores averaged across all muscle tissues for each of the capsids in the AAV^{-Lib2} library. Hierarchical clustering of the data revealed at least three groups of capsids performed similarly: Group 1, Group 2, and Group 3 (see FIG. 65). Data associated with FIG. 65 can be found in Table 29. The data show that targeting peptides with quads in group 1 have enhanced muscle tropism when combined with certain X₁X₂X₃, e.g., DII, DWM, EEI, DML, DWI, SLE, EIN, NHE, DFI, EEL, TEQ, TDA, EDT, NEV, TDW, QFE, EDY, DTT, EPL, SEN, SEQ, TAE, EVN, ELN, DVQ, ETI, EVI, ESV, ETW, SEW, DNW, EVF, EAW, EPF, EIY, EIF, EPY, DVI, DMM, DQI, DHL, DTL, DVL, NDL, DLL, DMQ, NEF, DFL, DIM, TEW, DYI, SDY, DYY, DHF, DKE, DTW, DTI, ELY, TEY, TEI, DAI, DQY, DMY, EWG, DMV, DMI, EPH, QEG, DIN, NEI, EYY, DIV, SEG, DVG, DYQ, EGF, NDI, EGY, DVF, DVH, DGF, DIY, DSF, DGW, EHY, DRE, TEH, DTS, NEN, NEM, NEH, TEN, DSN, DVT, DQS, DKD, DTH, DVV, DQK, NET, DKP, TEV, NDS, QET, EVL, SET, SDT, AEQ, QEF, SEY, SEF, SPF, EGQ, ETH, TDQ, QEA, QDQ, AEN, ESS, NDT, EFM, EFI, EHM, DFM, QDT, SME, DYT, EHV, ENV, EAV, EAI, ESI, DAT, ENQ, EAM, ADN, EFQ, SDS, TDH, SDH, DAS, TWE, SSF, DRD, EFL, TDF, QDA, EMH, SGE, AEW, DAH, TET, TDM, TNE, SAE, NSE, SFE, QDI, DSA, ADV, SEI, AEI, QDV, ADT, DNM, DNQ, ADL, TDL, SDL, SDM, TDV, DNI, DHY, DTY, DAA, DSY, QLY, DVM, DAY, DMT, DQT, DAQ, DTV, DSH, QDF, DST, DNL, DSI, DFV, DNY, DAF, DKI, DKF, DTM, DSL, NDV, TDI, DSV, DAV, DKV, DAM, DNV, DKM, DKL, DKW, DSM, ENI, SDI, DKT, QGE, NNE, QYW, AGM, ESH, QDH, QEH, DYH, ENS, DKQ, TGE, DSS, EST, DSQ, DNS, EFV, SWE, DKN, DKS, SEH, EAL, EAS, ADQ, SDQ, ADI, SDV, EAH, ASE, EAF, EYV, DKA, SNE, AGE, EGV, EQF, ETF, EVY, EQY, QEY, QEN, SAD, AEF, EMF, SDF, ADF, ADY, AVF, TLY, SIY, SLY, AIY, DYV, AEY, ENF, EMY, QDY, ETY, EAY, TVY, SVY, QVF, QVY, TMY, DKY, ALY, AVY, TMW, EQW, SPW, SIW, DTQ, TFF, AMF, EYT, DRV, SPY, SIF, SLF, ENY, EWY, EYI, EFY, TLF, TVF, TYY, TFY, SVF, SYW, TAW, SAW, TIY, NIM, NEM, NII, NIV, SII, SIV, SEM, TTI, NSY, SSY, SNY, SEV, AEH, ALT, SGQ, QTY, SYY, AMY, QMY, SGF, SGY, ALF, TTF, SFN, QAF, ASF, SAF, TAF, TAY, TGL, SAY, QAY, ADH, ASI, SSV, SSI, TGV, SGV, DPH, TEG, DLY, ESE, TEF, NPE, DHA, DLI, DWG, EWM, EET, EIL, TEL, DYL, EMW, EVW, EPV, EDV, SLD, EGH, QRY, TDG, SQE, ELH, EYW, EMM, EFF, QEI, EQG, DVS, ESP, EIQ, EPM, EPQ, SPE, EPN, NQD, ELQ, TDT, ELT, EPI, ETM, ETG, EHI, EMI, EIT, ETV, EVV, EVM, TPY, QEW, EIW, EPT, EIH, DFY, DQL, NDA, DIW, TDY, ELF, DVY, ESG, EPG, EIG, ELG, EVG, DHI, EIS, DYM, DFT, DFH, EQS, TPF, EEF, DWN, SDN, EYL, AET, DMN, QSP, DNA, DHM, DHT, EQL ESN, EYF, EHF, NAD, AEG, AES, TEM, SEL, DYS, EVH, EAN, EGL, TFE, ETL, TYE, SHE, ELM, TYD, SYE, ESA, EFT, EAT, AMD, AND, DMS, QMD, SLQ, EYS, QDN, EYQ, EKD, QYD, QFD, DER, AFD, EAA, EFS, DHV, QSE, TSD, SFD, DGY, TWD, QWD, EHL, QGD, QSD, AWD, AGD, QIY, EMQ, EAG, ERD, DDR, DAL, QDL, DNT, EGN, ENH, NGE, DYN, DNH, DNF, ESQ, ESM, ESL, SSD, ENL, EMV, QDS, TSE, SWD, ASD, ENT, SSE, EGM, EGS, EGT, EGI, AIF, NIN, NIQ, NYW, EPW, EGG, TIW, QIW, TIW, EKW, NLY, SVM, TPT, AAW, AIH, TIH, QGT, QFF, QYF, QFY, EHH, QLH, TYF, STY, DRL, EYM, SFF, QLF, QIF, APF, TYW, QUI, QPF, SPI, TIL, SVL, NVI, SIM, SLL, QEL, AEM, AEL, QEV, QDM, NDM, SYL, ASL, TPL, ANI, NMI, TIM, AEV, TMI, SWI, SFI, SNW, TNF, NAF, ASP, QSQ, APY, SFM, TAN, QAW, SGS, SGH, TGF, QSN, ERY, QMN, TGQ, NGM, NGV, AMN, ALN, QFV, AAF, TFV, TSY, EDK, ASN, SAV, QSV, QGV, QST, ASM, TAI, QSM, QSL, QSI, SSL, AGV, TGT, AGI, QGM, TGM, SGM, SGI, THD, QVE, ALE, QLE, EWP, AFP, AEE, ADE, NIE, TYP, QIE, TFP, SYP, ELW, DVW, NEW, EPA, EVA, TLE, AWE, NME, QME, ATE, AYE, DQM, TPD, DFG, QPE, EDI, EWL, ELL, QPD, EWF, ALD, SVD, QVD, ADA, APD, AHE, EQL, DTA, AFE, DAW, QAE, TME, STE, THE, QID, AAE, EIA, EML, SDA, SIE, TQE, TVD, NWE, NOE, EYG, QYP, EIV, EII, QFP, TID, EQN, EVS, TYG, EAQ, ELV, QLD, TLD, QQD, TIN, TLN, SPN, TPN, NFD, NEY, DSW, NMD, DGA, DYA, DIH, DNP, DQW, DQV, EFA, EPS, DFN, DWV, ELI, DTF, EQT, DHW, ESF, DEK, DMH, EWS, EHA, TTD, EWI, QLQ, SQD, QHD, NSD, EMA, TND, ATD, DGS, TAD, TMD, QES, AHD, QAD, DGH, DGL, NTE, ENG, SMD, NDQ, EMS, ENA, EMT, EYN, DDK, EWA, EWQ, EFH, QWE, DGT, DGM, EWV, EWH, EWT, QND, DGV, ESY, AAD, SND, ANE, TIG, QIG, AVD, SFP, AWP, QDW, SLW, TPA, AII, TIV, SWP, AFY, APN, AVN, TVN, TIS, TIQ, TLQ, AIQ, QVN, NFY, QFG, EMN, NVF, SYF, SFW, TPQ, AIL, TWI, QWN, TWN, QWQ, AQF, ASA, TWV, EWN, TMF, NGI, ATN, SAS, TMQ, TMN, AYN, TQF, SMF, QMQ, SMQ, QAN, AAY, SFQ, TYQ, TFQ, TWQ, AVI, and SGL. Targeting peptides with quads in group 2 have enhanced muscle tropism when combined with certain X₁X₂X₃, e.g., APW, TEL, TDA, QPY, SPN, EHY, DWK, DLK, DFK, DVK, NSI, DIR, SPF, SEL, DRT, DRF, ADL, TDL, SDL, DNY, DKI, NDV, DKM, DNH, DNF, DSS, EST, EWT, DKN, DKS, SEH, ESQ, ESL, QND, EAH, AIF, AVF, QVF, TMY, ALY, NNG, NIF, NTF, NFF, AWF, NPY, SWF, AII, AYF, AQW, NFY, AGP, QQF, TKE, TNG, NSF, NAW, QAG, ERG, NKD, QSG, QNG, EAK, QWF, SWY, TFF, TYF, NYY, QFG, NWA, AMF, STY, TNW, ANW, AWM, TSF, DRL, DRV, SPY, NVF, SIF, QLF, SLF, QIF, SYF, APF, AGF, SVF, SAW, TIY, DHK, DAK, EGK, DYK, QNL, QPL, SPV, NPM, STL, NIL, AGA, NTV, SQA, QQA, NNF, NWL, NMA, NNA, NHN, NFH, ELR, NYM, ERA, NFS, SRD, NMM, NNL, NNQ, NNS, QDR, SDK, NNI, AQH, ANA, QNH, QWG, AWA, QWA, EQK, SHS, QFA, SFA, TFA, AYG, EKQ, ERN, EMR, EFR, AYM, EAR, EMK, EYK, EWK, QPI, QPF, NPL, SPI, SPL, NPI, SIV, SLL, SSA, AEM, TML, TLL, SML, TYL, QDM, NSN, AQL, NAT, SQQ, QTI, NAH, SQL, STH, NTT, AEK, ANV, QGL, AGL, QMV, STM, NOM, STI, TQL, SMM, SKE, SQT, SYL, ASL, SLV, NAM, TTV, TPL, TPL, ATL, DNK, DSR, ANL, SHL, SNL, TNL, QNI, QAL, ANI, QNM, QYM, SQL, SNI, QNV, SHV, SHM, QMM, ANM, AHM, SQM, NAL, AQT, EKL, NNM, TNM, SNM, QQI, TQV, TQI THM, SQV, AAV, THL, AQI, NNV, TNN, TNI, SNN, TQM, NAI, TNV, SWT, NMV, NQI NQL, NMI, NSS, SHF, QNF, SWL, AQM, SYV, TFM, SYM, TYM, ATI, TTI, SLI, ALI, AYI, QLV, TMI, SMI, QFI, NMY, NAY, NMN, NMF, ANF, NWT, QWM, TFT, SWM, TWM, QNW, STF, AFM, NSY, SSY, SNY, THY, TNY, QNY, THF, NSV, ATY, SKD, TNF, TWT, QWT, SFS, TFS, DRQ, NYN, DER, EKG, ENN, AWN, QWQ, TQH, ALV, QHQ, DVR, STS, SQS, AAA, QGQ, QSQ, QAQ, SIH, APY, QGN, AGQ, ASQ, AAQ, SQN, NON, ERM, ALH, NYH, TGH, ATH, QTH, TQT, QQH, AQF, QMH, EKN, ERV, ERS, AFT, EKF, EKT, QSA, NFT, QYH, NYS, TSA, QYY, AYY, AHY, QFN, AWQ, NWQ, QAW, NMS, NWN, QMF, AMH, TSN, TAH, TMH, QFH, NWS, SWN, QRD, QKD, AKE, TSS, AYH, TSH, AHQ, ADK, ADR, ASA, ASS, SNS, QSS, SAH, SMH, QAH, AAH, AHN, QNS, QAS, ANS, ANN, SWA, SWS, TWS, ERI, EKS, QWS, AYS, AFS, SYS, QFS, QYN, QFT, AYT, TNS, TYS, SFT, QNQ, QYS, SYT, ANQ, SWV, SNQ, ANY, TNQ, ATF, SSQ, SSN, TWA, SGQ, SSS, TWY, SMY, TGN, TGY, QWY, SQF, TGF, QTY, TTY, AMY, QMY, ERY, TGQ, SGY, TMF, ALN, ARD, ATN, NAS, SAS, AQN, SYG, SYN, TFN, TMN, AYN, SGN, QNN, DKG, AAN, SMN, SAN, TTF, TQF, SFN, QAF, QFV, AAF, ASF, SAF, SMF, ASY, AFN, TAF, TSY, TAY, QMQ, SMQ, TYV, TGL, QAY, AAY, ADH, EDK, ASN, QYQ, SFQ, TYQ, TWQ, SWQ, AYQ, SYQ, AMV, TMV, TAV, AQV, TYT, TAT, QGI, QQV, SAQ, NAV, SAV, ASV, QSV, QAV, QAI, QAM, TAM, DTR, DQR, DMR, NNT, NYT, NMT, NST, ATT, SMV, SNT, QNT, AAT, SAM, SAL, QGV, QST, QYT, ASM, TSM, AMT, TST, ANH, SNV, TNT, ANT, SST, AST, TAI, DAR, SSM, TAL, NSM, TSL, SNF, TSI, TSV, TDK, SAT, SAI, QSL, QSI, ASI, SSL, SSV, SSI, AGI, QGM, TGM, SGM, SGL, SGV, ARL, NWE, SFL, TPY, DRP, DTK, DMK, SEY, SME, EAI, AHD, ADN, EFQ, EMH, SGE, DNQ, DNI, QLY, DGT, EGN, DYN, EWV, ESM, EAL, ASD, DKA, ADF, ADY, SLY, AEY, ETY, EAY, TGA, AVM, TPT, SVI, QSH, TTQ, QTN, TLH, AWY, SLT, AWV, QQY, NFV, SFY, TYY, SHA, TEK, QFK, NNY, EPR, NIT, NHI, NTY, SHY, NFM, NFN, NDK, NER, SER, NDR, QDK, SDR, QNA, TNA, THT, SNH, AYA, NFA, AFA, AHA, QHA, EYR, ENR, EHK, QVL, SVL, NIV, NVI, ADM, SAA, SQH, NQV, ALL, ATM, QYA, STT, DGR, NHT, SHT, QHT, TTL, NHM, QHL, DNR, QHM, QFM, QMI, AHV, THI, AHT, TNH, NHV, THV, SHI, ATV, TWI, NYV, TYI, DYR, SFI, NQF, NWM, NSL, NSP, TQY, DRS, ASP, TKD, QWI, QWN, TWN, QWV, THN, TTM, TQQ, NMQ, TYA, STQ, STN, AGN, EKH, ERT, TFH, SFH, AFH, ENK, NYQ, SFM, QGS, AHF, QLT, QHY, AQY, TRD, ERH, QWH, TYH, TRE, TAQ, AER, TDR, ASH, EKI, AFV, TYN, ALT, NGN, SYY, EWN, NGM, NAN, TAS, TFV, SFV, QAN, SGT, SAY, AFQ, TFQ, QFQ, EFK, SYH, QHV, AMM, THQ, AAI, AAM, NSQ, QAT, TSQ, SHQ, QSM, AGV, AGT, TGT, TGI, AVI, TGV, SGI, ESP, SDA, TPN, EAW, NEQ, DSN, DIK, DNA, QES, SLQ, EKD, SDH, SSF, TET, QDI, DSA, DNM, DKT, DGM, SQY, TLT, QEH, DKQ, TGE, DNS, SDV, SNE, EGT, EGV, AAP, AHG, TWK, TQA, TVT, APQ, SVT, NGT, SSH, NLV, AGY, QFF, QYF, NWV, EKA, EKY, SMG, NAG, ASG, TFI, ELK, SEK, QTL, NML, DHS, ETR, NQQ, QWL, ANP, AHH, NEK, NNN, SNA, EWR, ESR, SHN, SFG, SYA, APV, QPV, SPT, TPQ, QVI, TPV, AVL, SEM, NDM, API, QLM, QTM, QQL, QHI, NFL, AYV, NKE, TIM, QYV, SWI, DRN, AWI, SMA, NRE, QTS, QVV, QQT, QMA, QQS, QAA, ATQ, ERL, TGS, QQQ, AQQ, QHF, TAN, QSY, QSN, NGQ, TWH, TMS, QMS, TQN, TMT, QTV, THS, TTT, SMT, QMT, SMR, ADA, AAE, EPY, EYL, NWI, TSP, DGQ, NDH, QFD, EHL, ERD, DAF, ENI, ENH, QQW, AGM, ENL, EAF, EYV, ENT, SSE, AGE, QEY, DRH, NIQ, SVV, SVM, QPT, TVL, QTQ, SVQ, TIQ, NLQ, SIQ, AWL, EHH, NGY, NHF, NSA, NAA, NTH, QLI, NWH, QRE, AML, EVR, SNP, NHS, THH, NOS, TTS, AHS, EKV, NFQ, APL, QPM, NPV, SIL, TII, STV, QEL, TFL, SIT, NAQ, TMM, AAL, QQM, AMI, QFL, AHI, SYI, SSP, NVV, TTN, TAA, TQS, TMA, ALA, QQN, NSH, TTH, SRE, ERQ, QHS, SWH, SEV, AVT, ALQ, DKH, AMQ, ARE, TWV, NGL, NGV, TMQ, TLV, EER and QTT. Targeting peptides with quads in group 3 have enhanced muscle tropism when combined with certain X₁X₂X₃ e.g., DMK, ATD, EEK, QMD, EFS, ERD, DDR, TDM, SAE, EHS, ENH, SWE, SNE, NNG, QAG, ERG, QSG, QNG, ASG, QFG, AMF, ELR, NFM, NNS, NNI, SDR, EQR, EHR, EWR, EQK, ESR, EKQ, EYR, ENR, EMK, EYK, EHK, EWK, QNI, TNI, TYI, SNY, DRQ, AWI, QWI, DFR, EKG, QYG, QWQ, EKN, EKF, EKT, AFH, ENK, NYS, DKH, AAG, QMF, QFH, QKD, ARE, AHQ, ADK, ADR, AHN, QNS, ANN, SWS, EKS, AFS, QFS, TNQ, TGY, NGL, ARD, AKD, AAF, SMF, AFN, SGT, TGL, ASN, SFQ, AFQ, TFQ, QFQ, EFK, SWQ, AYQ, SYQ, DQR, DMR, ASM, ANT, SHQ, TSL, SNF, QSL, ASI, SGL, SGI, NDA, DHQ, DFK, DTK, DNA, SDS, TDH, DGL, QDV, SDM, DKT, DGM, SQY, DKS, SSD, EMV, TSE, EYV, SSE, EGM, SDF, TTG, QLG, NNP, AGS, QSF, TLM, NGA, AWY, NKD, SWY, TFF, NSG, NGY, QEK, SEK, TEK, AQA, NVL, NHI, TER, NML, NMA, NNA, NHN, ANP, AMS, NER, SER, DKK, NMM, QDK, AHS, TNA, THT, SNH, QNH, ESK, SHS, AYM, SSA, NAT, QLM, QQM, SQI, SNI, QNV, SHV, SHM, NNV, TNN, AHT, TNH, NHV, TQM, THV, SHI, NYL, NMV, NFL, AYV, NOI, NOL, NMI, NSS, SHF, SYM, NYV, AYI, SWI, QFI, ANF, TFT, TWM, QNW, NSY, THY, TNY, NYN, AWN, SMA, NSH, TGH, SFH, SWH, SFM, NFT, QYH, QGS, TGS, TSA, QQQ, QYY, AMQ, TAN, AWH, NMS, TSN, TAH, TMH, QWH, NWS, SWN, QRD, TYH, AKE, TAQ, AER, AYH, ASA, SNS, QSS, SAH, SMH, ASH, QAS, ANS, SYS, QYN, TYN, TNS, SFT, ANQ, SGS, SGH, SSS, TWY, QTY, SYY, NGM, TMS, SYG, TQN, SYN, TFN, TMN, AYN, SGN, QNN, SMN, SAN, QAF, ASF, ASY, TAS, TAF, TFV, SMQ, SFV, TMT, QAN, SAY, EDK, AMV, QHV, THS, TAT, QGI, QQV, NAV, SAV, ASV, QSV, QAV, AAI, AAM, QAM, TAM, DTR, NNT, NYT, NMT, ATT, QTT, TTT, QAT, SMV, SNT, QNT, AAT, SAM, SAL, QGV, QST, QYT, TSM, ANH, SNV, TSQ, TNT, SST, AST, TAI, TSI, TSV, TDK, SAT, QSM, SAI, QSI, SSV, SSI, AGT, TGT, AGI, QGM, TGM, TGV, SGM, SGV, SQE, EHT, EYL, DSG, SFE, QND, TQA, AWV, NFV, TSG, SSG, DRG, ANW, TFI, TSF, QNL, STL, TWL, NNF, NND, NYM, NFI, ETR, SNP, EIR, NFS, NNH, NNL, AHL, NNQ, NDR, NNN, QDR, SDK, SNA, AFG, NYA, QHA, QFA, SHN, NFQ, SYA, TFA, EMR, EFR, EAR, NOM, TTL, TQL, SMM, SKE, SYL, ASL, SLV, TTV, AAL, NHL, NHM, QYL, QHL, ATL, DNR, DSR, ANL, SHL, SNL, TNL, QAL, AMI, ANI, QNM, QYM, QHM, QFM, QMM, QMI, ANM, AHM, SQM, AQT, EKL, NNM, TNM, SNM, QQI, TQV, TQI, THI, QHI, THL, SNN, TNV, SWL, AQM, SYV, TFM, TYM, TWI, AFI, ATI, DYR, QLV, TMI, SYI, SFI, NWM, NWT, NSL, STF, SNW, AFM, SSY, NSV, TNF, NAF, TFS, QWV, ERT, TQT, AFT, NYQ, ERL, NRD, TRD, AWQ, TDR, TSH, ASS, AYT, TYS, QYS, SYT, SWV, SNQ, SMS, NAS, SAS, QFV, SAF, TWQ, TAV, AMM, TYT, QAI, TST, DAR, SSM, TAL, NES, DWK, DLR, DIR, SDT, EAN, ETH, TYD, SYE, EAM, TND, AYD, TSP, DRT, NDH, SSF, EFH, DNQ, DSH, DNT, SDI, DKQ, EWT, EAL, EAS, ESL, ASD, EAH, ASE, EAF, ENT, SIY, QDY, APG, AIG, SSW, NPG, ERP, TVI, QSH, SLS, EDR, AWL, SLH, EQH, EHH, NWV, EKY, STY, DRI, EYH, DRV, SPY, NNY, DWR, ERA, QRE, EVR, SRD, AWA, SFA, QTI, SHT, THM, AQI, AHI, SWT, ATV, TTI, SMI, QYV, NMY, SWM, QNY, TWT, QWT, TQY, NRE, QTS, QHQ, DVR, AAA, TYA, EKH, ALH, AWT, ATH, SRE, TFH, QMH, ERV, ERS, QHY, ALQ, QSY, ERH, TRE, TSS, QAH, AAH, SWA, TWS, QWS, AYS, AFV, QNQ, ANY, ALT, SMY, TWV, TTY, AMY, QMY, ERY, TWH, TSY, TAY, TYV, QAY, AAY, QYQ, TYQ, SYH, AQV, EER, THQ, SMT.

[1179] Analysis of capsids in Group 1 is shown in FIGS. 66A-66C. Group 1 included capsids comprising targeting peptides having a quad selected from: RGQI, RSVV, and RGVV. FIG. 66A shows enrichment scores averaged across all muscle tissue for each of the capsids in the AAV^{-Lib2} library having a quad selected from: RGQI, RSVV, and RGVV. The top 100 capsids are identified by the larger of the two dots on the plot. A motif analysis was performed to determine if there was a pattern of motifs enriched in the top 100 capsids in FIG. 66A. FIG. 66B shows the motif plot that identifies the enriched motifs in the top 100. Additional analysis of the triplets for the top 100 capsids was provided in FIG. 66C. For example, FIG. 66C shows the unique variant count of the triplet sequences present in the top 100 capsids in FIG. 66A. Interestingly, this data shows that for Group 1 the X₁ position favors amino acid residues D or E and the X₃ position favors amino acid residues Y, V, or F.

[1180] Analysis of capsids in Group 2 is shown in FIGS. 67A-67C. Group 2 included capsids comprising targeting peptides having a quad selected from: HGVL, YSSV, YSTM, and YTSV. FIG. 67A shows enrichment scores averaged across all muscle tissue for each of the capsids in the AAV^{-Lib2} library having a quad selected from: HGVL, YSSV, YSTM, and YTSV. The top 100 capsids are identified by the larger of the two dots on the plot. A motif analysis was performed to determine if there was a pattern of motifs enriched in the top 100 capsids in FIG. 67A. FIG. 67B shows the motif plot that identifies the enriched motifs in the top 100. Additional analysis of the triplets for the top 100 capsids was provided in FIG. 67C. In particular, FIG. 67C shows the unique variant count of the triplet sequences present in the top 100 capsids in FIG. 67A. Interestingly, this data shows that for Group 2 the X₁ position favors amino acid residues S, A, or T and the X₃ position favors amino acid residues N, A, or Y.

[1181] Analysis of capsids in Group 3 is shown in FIGS. 68A-68C. Group 3 included capsids comprising targeting peptides having a quad selected from: HGVL, YSSV. YSTM, and YTSV. FIG. 68A shows enrichment scores averaged across all muscle tissue for each of the capsids in the AAV^{-Lib2} library having a quad selected from: FNNT, FNNL. FQNT, and YNSL. The top 100 capsids are identified by the larger of the two dots on the plot. A motif analysis was performed to determine if there was a pattern of motifs enriched in the top 100 capsids in FIG. 68A. FIG. 68B shows the motif plot that identifies the enriched motifs in the top 100. Additional analysis of the triplets for the top 100 capsids was provided in FIG. 68C. In particular, FIG. 68C shows the unique variant count of the triplet sequences present in the top 100 capsids in FIG. 68A. Interestingly, this data shows that for Group 3 the X₁ position favors amino acid residues S, A, or E and the X₃ position favors amino acid residues N, Y, or S.

[1182] Tissue enrichment in liver tissue was also assessed for the AAV^{-Lib2} library. In particular, FIG. 69 shows the amount of vector RNA in liver tissue for the sum of all the capsids in the AAV^{-Lib2} library having the indicated quad sequences. This analysis revealed that targeting peptides having RGVV, RSVV, RGQI, RSQT, and RQGI were the most liver tropic quads.

[1183] Additional analysis of capsids with highest liver enrichment is shown in FIGS. 70A-70B. As shown in FIG. 70A enrichment scores averaged across all liver tissue for each of the capsids in the AAV^{-Lib2} library enabled identification of the top 100 liver tropic capsids. The top 100 capsids are identified by the larger of the two dots on the plot (See FIG. 70A). A motif analysis was performed on the top 100 liver tropic capsids to determine if there was a pattern of motifs enriched in the top 100 capsids. FIG. 70B shows the enriched motifs in the top 100 capsids. Interestingly, this data shows that the triplets enriched in the muscle are different from the triplets enriched in the liver.

### 8.27.1. Top 10 Variants

[1184] From the AAV^{-Lib2} data, the top 10 muscle tropic capsids were identified and further analyzed (see FIGS. 71A-71C, 72A-72B, 73A-73B, and 74A-74B).

[1185] FIG. 71A shows enrichment score plots (inverse CV versus AverageMN_FC) for biceps femoris, quadriceps, diaphragm, heart-atria, heart-ventricle, and liver for each of the capsids in the AAV^{-Lib2} library. The top 10 performing capsids are identified by the darker shaded circles. Tissue enrichment scores for each capsid in the tissues from FIG. 71A are shown in FIG. 71B and FIG. 71C. The top 10 targeting peptides included triplets selected from: EFK, AAY, DQK. QVY, DKL, DNV. ENF, EWK, QNV, and TFM. The top 10 muscle variants ranked consistently high in all muscle tissues and moderate in liver.

[1186] FIG. 72A-72B looked at the how the triplets from the top 10 targeting peptides performed when combined with various quads. In particular, FIG. 72A shows the enrichment scores for capsids having quads selected from RGQI, RGVV, and RSVV and targeting peptides having the triplets identified in the top 10 targeting peptides. FIG. 72B provides the amino acid residues for the relevant targeting peptides in FIG. 72A.

[1187] FIG. 73A-73B looked at the how the triplets from the top 10 targeting peptides performed when combined with other quads. FIG. 73A shows the enrichment scores for capsids having quads selected from HGVL, YTSM. YSSV, and YTSV and targeting peptides having the triplets identified in the top 10 targeting peptides. FIG. 73B provides the amino acid residues for the relevant targeting peptides in FIG. 73A.

[1188] FIG. 74A-74B looked at how the top 10 targeting peptides performed compared to capsids: targeting peptide combinations identified in other studies (sec. Example 25). As shown in FIG. 74A, the top 10 targeting peptides performed similarly to previously identified targeting peptides when comparing enrichment in skeletal muscle versus heart. FIG. 74B shows how the top 10 targeting peptides performed when comparing enrichment in muscle versus liver. Overall, this data showed that the current study could successfully identify targeting peptides with muscle tropism and that these new targeting peptides performed as well or better than targeting peptides identified elsewhere herein.

### 8.27.2. Heart-Specific Targeting Peptides

[1189] The AAV^{-Lib2} library data was also analyzed to assess whether certain capsids had increased tropism for a particular subset of muscle tissue, for example, increased tropism in the heart over skeletal muscle or increased tropism in skeletal muscle over the heart.

[1190] As shown in FIG. 75A, the present study included capsids having a variety of tissue enrichment profiles as some capsids favored skeletal muscle over heart muscle and vice versa. In particular, analysis of the data in FIG. 75A revealed that targeting peptides having quads selected from: QSTL (36653), LIGR (28422), and RGVV were the most “heart-specific” quads.

[1191] FIG. 75B shows enrichment scores in skeletal muscle versus heart for each of the capsids in the AAV^{-Lib2} library having the indicated quad (“LIGR”).

[1192] FIG. 75C shows enrichment scores in skeletal muscle versus heart for each of the capsids in the AAV^{-Lib2} library having the indicated quad (“QSTL”).

[1193] FIG. 75D shows enrichment scores in skeletal muscle versus heart for each of the capsids in the AAV^{-Lib2} library having the indicated quad (“RGVV”).

[1194] FIG. 75E shows enrichment scores for heart over skeletal muscle for each of the capsids in the AAV^{-Lib2} library having the indicated quads.

### 8.27.3. Conclusion

[1195] Overall, this data shows that a subset of the modified AAV capsid comprising various targeting peptides tested in NHP have increased muscle tropism. Further analysis revealed that a subset of the targeting peptides were enriched in skeletal muscle over heart muscle and a second subset of the targeting peptides were enriched in heart muscle over skeletal muscle.

### 9. SEQUENCES

[1196] Many of the nucleotide sequences provided below are obtained from double stranded vectors. Thus, one of skill in the art would appreciate that, unless the references throughout the specification and claims to nucleotide sequences provided herein also include references to the complementary sequences unless the context dictates otherwise.

| | SEQUENCE (X or X″ can be any of the standard amino acids; |
|---|---|
| | for Anc library sequences (Anc80; Anc81; Anc82; Anc83; |
| | Anc84; Anc94; Anc110; Anc113; Anc126; and Anc127), |
| SEQ ID | X can be any one of the amino acids listed |
| NO | below for each toggle site) |
| SEQ ID | RGDLLLS |
| NO: 1 | |
| SEQ ID | AQTLAWPFKAQ |
| NO: 2 | |
| SEQ ID | AQSWSKPFLAQ |
| NO: 3 | |
| SEQ ID | DGTLAVPFKAQ |
| NO: 4 | |
| SEQ ID | ESTLAVPFKAQ |
| NO: 5 | |
| SEQ ID | ESTLAVPFKAQ |
| NO: 6 | |
| SEQ ID | GGTLAVPFKAQ |
| NO: 7 | |
| SEQ ID | AQTLATPFKAQ |
| NO: 8 | |
| SEQ ID | ATTLATPFKAQ |
| NO: 9 | |
| SEQ ID | DGTLATPFKAQ |
| NO: 10 | |
| SEQ ID | GGTLATPFKAQ |
| NO: 11 | |
| SEQ ID | SGSLAWPFKAQ |
| NO: 12 | |
| SEQ ID | AQTLAQPFKAQ |
| NO: 13 | |
| SEQ ID | AQTLQQPFKAQ |
| NO: 14 | |
| SEQ ID | AQTLSNPFKAQ |
| NO: 15 | |
| SEQ ID | AQTLAVPFSNP |
| NO: 16 | |
| SEQ ID | QGTLAVPFKAQ |
| NO: 17 | |
| SEQ ID | NQTLAVPFKAQ |
| NO: 18 | |
| SEQ ID | EGSLAVPFKAQ |
| NO: 19 | |
| SEQ ID | SGNLAVPFKAQ |
| NO: 20 | |
| SEQ ID | EGTLAVPFKAQ |
| NO: 21 | |
| SEQ ID | DSTLAVPFKAQ |
| NO: 22 | |
| SEQ ID | AVTLAVPFKAQ |
| NO: 23 | |
| SEQ ID | AQTLSTPFKAQ |
| NO: 24 | |
| SEQ ID | AQTLPQPFKAQ |
| NO: 25 | |
| SEQ ID | AQTLSQPFKAQ |
| NO: 26 | |
| SEQ ID | AQTLQLPFKAQ |
| NO: 27 | |
| SEQ ID | AQTLTMPFKAQ |
| NO: 28 | |
| SEQ ID | AQTLTTPFKAQ |
| NO: 29 | |
| SEQ ID | AQYTLSQGWAQ |
| NO: 30 | |
| SEQ ID | AQMNATKNVAQ |
| NO: 31 | |
| SEQ ID | AQVSGGHHSAQ |
| NO: 32 | |
| SEQ ID | AQTLPQPFKAQ |
| NO: 33 | |
| SEQ ID | AQTLATPFKAQ |
| NO: 34 | |
| SEQ ID | AQTLTMPFKAQ |
| NO: 35 | |
| SEQ ID | AQTLTAPFKAQ |
| NO: 36 | |
| SEQ ID | AQTLSKPFKAQ |
| NO: 37 | |
| SEQ ID | QAVRTSL |
| NO: 38 | |
| SEQ ID | YTLSQGW |
| NO: 39 | |
| SEQ ID | LAKERLS |
| NO: 40 | |
| SEQ ID | LAKERLS |
| NO: 41 | |
| SEQ ID | SVSKPFL |
| NO: 42 | |
| SEQ ID | FTLTTPK |
| NO: 43 | |
| SEQ ID | MNSTKNV |
| NO: 44 | |
| SEQ ID | VSGGHHS |
| NO: 45 | |
| SEQ ID | SAQTLAVPFKAQAQ |
| NO: 46 | |
| SEQ ID | SXXXLAVPFKAQAQ |
| NO: 47 | |
| SEQ ID | SAQXXXVPFKAQAQ |
| NO: 48 | |
| SEQ ID | SAQTLXXXFKAQAQ |
| NO: 49 | |
| SEQ ID | SAQTLAVXXXAQAQ |
| NO: 50 | |
| SEQ ID | SAQTLAVPFXXXAQ |
| NO: 51 | |
| RGD | RGDX₁X₂X₃X₄ |
| consensus | |
| SEQ ID | TLAVPFK |
| NO: 53 | |
| SEQ ID | MAADGYLPDWLEDNLSEGIREWWDLKPGAPKPKANQQKQDDGRGLVLPGY |
| NO: 54 | KYLGPFNGLDKGEPVNAADAAALEHDKAYDQQLKAGDNPYLRYNHADAEF |
| (AAV1 | QERLQEDTSFGGNLGRAVFQAKKRVLEPLGLVEEGAKTAPGKKRPVEQSP |
| (AAD27757)) | QEPDSSSGIGKTGQQPAKKRLNFGQTGDSESVPDPQPLGEPPATPAAVGP |
| | TTMASGGGAPMADNNEGADGVGNASGNWHCDSTWLGDRVITTSTRTWALP |
| | TYNNHLYKQISSASTGASNDNHYFGYSTPWGYFDFNRFHCHFSPRDWQRL |
| | INNNWGFRPKRLNFKLFNIQVKEVTTNDGVTTIANNLTSTVQVFSDSEYQ |
| | LPYVLGSAHQGCLPPFPADVFMIPQYGYLTLNNGSQAVGRSSFYCLEYFP |
| | SQMLRTGNNFTFSYTFEEVPFHSSYAHSQSLDRLMNPLIDQYLYYLNRTQ |
| | NQSGSAQNKDLLFSRGSPAGMSVQPKNWLPGPCYRQQRVSKTKTDNNNSN |
| | FTWTGASKYNLNGRESIINPGTAMASHKDDEDKFFPMSGVMIFGKESAGA |
| | SNTALDNVMITDEEEIKATNPVATERFGTVAVNFQSSSTDPATGDVHAMG |
| | ALPGMVWQDRDVYLQGPIWAKIPHTDGHFHPSPLMGGFGLKNPPPQILIK |
| | NTPVPANPPAEFSATKFASFITQYSTGQVSVEIEWELQKENSKRWNPEVQ |
| | YTSNYAKSANVDFTVDNNGLYTEPRPIGTRYLTRPL |
| SEQ ID | MAADGYLPDWLEDTLSEGIRQWWKLKPGPPPPKPAERHKDDSRGLVLPGY |
| NO: 55 | KYLGPFNGLDKGEPVNEADAAALEHDKAYDRQLDSGDNPYLKYNHADAEF |
| (AAV2 | QERLKEDTSFGGNLGRAVFQAKKRVLEPLGLVEEPVKTAPGKKRPVEHSP |
| (AAC03780)) | VEPDSSSGTGKAGQQPARKRLNFGQTGDADSVPDPQPLGQPPAAPSGLGT |
| | NTMATGSGAPMADNNEGADGVGNSSGNWHCDSTWMGDRVITTSTRTWALP |
| | TYNNHLYKQISSQSGASNDNHYFGYSTPWGYFDFNRFHCHFSPRDWQRLI |
| | NNNWGFRPKRLNFKLFNIQVKEVTQNDGTTTIANNLTSTVQVFTDSEYQL |
| | PYVLGSAHQGCLPPFPADVFMVPQYGYLTLNNGSQAVGRSSFYCLEYFPS |
| | QMLRTGNNFTFSYTFEDVPFHSSYAHSQSLDRLMNPLIDQYLYYLSRTNT |
| | PSGTTTQSRLQFSQAGASDIRDQSRNWLPGPCYRQQRVSKTSADNNNSEY |
| | SWTGATKYHLNGRDSLVNPGPAMASHKDDEEKFFPQSGVLIFGKQGSEKT |
| | NVDIEKVMITDEEEIRTTNPVATEQYGSVSTNLQRGNRQAATADVNTQGV |
| | LPGMVWQDRDVYLQGPIWAKIPHTDGHFHPSPLMGGFGLKHPPPQILIKN |
| | TPVPANPSTTFSAAKFASFITQYSTGQVSVEIEWELQKENSKRWNPEIQY |
| | TSNYNKSVNVDFTVDINGVYSEPRPIGTRYLTRNL |
| SEQ ID | MAADGYLPDWLEDNLSEGIREWWALKPGVPQPKANQQHQDNRRGLVLPGY |
| NO: 56 | KYLGPGNGLDKGEPVNEADAAALEHDKAYDQQLKAGDNPYLKYNHADAEF |
| (AAV3 | QERLQEDTSFGGNLGRAVFQAKKRILEPLGLVEEAAKTAPGKKGAVDQSP |
| (AAC55049)) | QEPDSSSGVGKSGKQPARKRLNFGQTGDSESVPDPQPLGEPPAAPTSLGS |
| | NTMASGGGAPMADNNEGADGVGNSSGNWHCDSQWLGDRVITTSTRTWALP |
| | TYNNHLYKQISSQSGASNDNHYFGYSTPWGYFDFNRFHCHFSPRDWQRLI |
| | NNNWGFRPKKLSFKLFNIQVRGVTQNDGTTTIANNLTSTVQVFTDSEYQL |
| | PYVLGSAHQGCLPPFPADVFMVPQYGYLTLNNGSQAVGRSSFYCLEYFPS |
| | QMLRTGNNFQFSYTFEDVPFHSSYAHSQSLDRLMNPLIDQYLYYLNRTQG |
| | TTSGTTNQSRLLFSQAGPQSMSLQARNWLPGPCYRQQRLSKTANDNNNSN |
| | FPWTAASKYHLNGRDSLVNPGPAMASHKDDEEKFFPMHGNLIFGKEGTTA |
| | SNAELDNVMITDEEEIRTTNPVATEQYGTVANNLQSSNTAPTTGTVNHQG |
| | ALPGMVWQDRDVYLQGPIWAKIPHTDGHFHPSPLMGGFGLKHPPPQIMIK |
| | NTPVPANPPTTFSPAKFASFITQYSTGQVSVEIEWELQKENSKRWNPEIQ |
| | YTSNYNKSVNVDFTVDTNGVYSEPRPIGTRYLTRNL |
| SEQ ID | MSFVDHPPDWLEEVGEGLREFLGLEAGPPKPKPNQQHQDQARGLVLPGYN |
| NO: 57 | YLGPGNGLDRGEPVNRADEVAREHDISYNEQLEAGDNPYLKYNHADAEFQ |
| (AAV5 | EKLADDTSFGGNLGKAVFQAKKRVLEPFGLVEEGAKTAPTGKRIDDHFPK |
| (AAD13756)) | RKKARTEEDSKPSTSSDAEAGPSGSQQLQIPAQPASSLGADTMSAGGGGP |
| | LGDNNQGADGVGNASGDWHCDSTWMGDRVVTKSTRTWVLPSYNNHQYREI |
| | KSGSVDGSNANAYFGYSTPWGYFDFNRFHSHWSPRDWQRLINNYWGFRPR |
| | SLRVKIFNIQVKEVTVQDSTTTIANNLTSTVQVFTDDDYQLPYVVGNGTE |
| | GCLPAFPPQVFTLPQYGYATLNRDNTENPTERSSFFCLEYFPSKMLRTGN |
| | NFEFTYNFEEVPFHSSFAPSQNLFKLANPLVDQYLYRFVSTNNTGGVQFN |
| | KNLAGRYANTYKNWFPGPMGRTQGWNLGSGVNRASVSAFATTNRMELEGA |
| | SYQVPPQPNGMINNLQGSNTYALENTMIFNSQPANPGTTATYLEGNMLIT |
| | SESETQPVNRVAYNVGGQMATNNQSSTTAPATGTYNLQEIVPGSVWMERD |
| | VYLQGPIWAKIPETGAHFHPSPAMGGFGLKHPPPMMLIKNTPVPGNITSF |
| | SDVPVSSFITQYSTGQVTVEMEWELKKENSKRWNPEIQYTNNYNDPQFVD |
| | FAPDSTGEYRTTRPIGTRYLTRPL |
| SEQ ID | MAADGYLPDWLEDNLSEGIREWWDLKPGAPKPKANQQKQDDGRGLVLPGY |
| NO: 58 | KYLGPFNGLDKGEPVNAADAAALEHDKAYDQQLKAGDNPYLRYNHADAEF |
| (AAV6 | QERLQEDTSFGGNLGRAVFQAKKRVLEPFGLVEEGAKTAPGKKRPVEQSP |
| (AAB95450)) | QEPDSSSGIGKTGQQPAKKRLNFGQTGDSESVPDPQPLGEPPATPAAVGP |
| | TTMASGGGAPMADNNEGADGVGNASGNWHCDSTWLGDRVITTSTRTWALP |
| | TYNNHLYKQISSASTGASNDNHYFGYSTPWGYFDFNRFHCHFSPRDWQRL |
| | INNNWGFRPKRLNFKLFNIQVKEVTTNDGVTTIANNLTSTVQVFSDSEYQ |
| | LPYVLGSAHQGCLPPFPADVFMIPQYGYLTLNNGSQAVGRSSFYCLEYFP |
| | SQMLRTGNNFTFSYTFEDVPFHSSYAHSQSLDRLMNPLIDQYLYYLNRTQ |
| | NQSGSAQNKDLLFSRGSPAGMSVQPKNWLPGPCYRQQRVSKTKTDNNNSN |
| | FTWTGASKYNLNGRESIINPGTAMASHKDDKDKFFPMSGVMIFGKESAGA |
| | SNTALDNVMITDEEEIKATNPVATERFGTVAVNLQSSSTDPATGDVHVMG |
| | ALPGMVWQDRDVYLQGPIWAKIPHTDGHFHPSPLMGGFGLKHPPPQILIK |
| | NTPVPANPPAEFSATKFASFITQYSTGQVSVEIEWELQKENSKRWNPEVQ |
| | YTSNYAKSANVDFTVDNNGLYTEPRPIGTRYLTRPL |
| SEQ ID | MAADGYLPDWLEDNLSEGIREWWDLKPGAPKPKANQQKQDNGRGLVLPGY |
| NO: 59 | KYLGPFNGLDKGEPVNAADAAALEHDKAYDQQLKAGDNPYLRYNHADAEF |
| (AAV7 | QERLQEDTSFGGNLGRAVFQAKKRVLEPLGLVEEGAKTAPAKKRPVEPSP |
| (AF513851_2)) | QRSPDSSTGIGKKGQQPARKRLNFGQTGDSESVPDPQPLGEPPAAPSSVG |
| | SGTVAAGGGAPMADNNEGADGVGNASGNWHCDSTWLGDRVITTSTRTWAL |
| | PTYNNHLYKQISSETAGSTNDNTYFGYSTPWGYFDFNRFHCHFSPRDWQR |
| | LINNNWGFRPKKLRFKLFNIQVKEVTTNDGVTTIANNLTSTIQVESDSEY |
| | QLPYVLGSAHQGCLPPFPADVFMIPQYGYLTLNNGSQSVGRSSFYCLEYF |
| | PSQMLRTGNNFEFSYSFEDVPFHSSYAHSQSLDRLMNPLIDQYLYYLART |
| | QSNPGGTAGNRELQFYQGGPSTMAEQAKNWLPGPCFRQQRVSKTLDQNNN |
| | SNFAWTGATKYHLNGRNSLVNPGVAMATHKDDEDRFFPSSGVLIFGKTGA |
| | TNKTTLENVLMTNEEEIRPTNPVATEEYGIVSSNLQAANTAAQTQVVNNQ |
| | GALPGMVWQNRDVYLQGPIWAKIPHTDGNFHPSPLMGGFGLKHPPPQILI |
| | KNTPVPANPPEVFTPAKFASFITQYSTGQVSVEIEWELQKENSKRWNPEI |
| | QYTSNFEKQTGVDFAVDSQGVYSEPRPIGTRYLTRNL |
| SEQ ID | MAADGYLPDWLEDNLSEGIREWWALKPGAPKPKANQQKQDDGRGLVLPGY |
| NO: 60 | KYLGPFNGLDKGEPVNAADAAALEHDKAYDQQLQAGDNPYLRYNHADAEF |
| (AAV8 | QERLQEDTSFGGNLGRAVFQAKKRVLEPLGLVEEGAKTAPGKKRPVEPSP |
| (AF513852_2)) | QRSPDSSTGIGKKGQQPARKRLNFGQTGDSESVPDPQPLGEPPAAPSGVG |
| | PNTMAAGGGAPMADNNEGADGVGSSSGNWHCDSTWLGDRVITTSTRTWAL |
| | PTYNNHLYKQISNGTSGGATNDNTYFGYSTPWGYFDFNRFHCHFSPRDWQ |
| | RLINNNWGFRPKRLSFKLFNIQVKEVTQNEGTKTIANNLTSTIQVFTDSE |
| | YQLPYVLGSAHQGCLPPFPADVFMIPQYGYLTLNNGSQAVGRSSFYCLEY |
| | FPSQMLRTGNNFQFTYTFEDVPFHSSYAHSQSLDRLMNPLIDQYLYYLSR |
| | TQTTGGTANTQTLGFSQGGPNTMANQAKNWLPGPCYRQQRVSTTTGQNNN |
| | SNFAWTAGTKYHLNGRNSLANPGIAMATHKDDEERFFPSNGILIFGKQNA |
| | ARDNADYSDVMLTSEEEIKTTNPVATEEYGIVADNLQQQNTAPQIGTVNS |
| | QGALPGMVWQNRDVYLQGPIWAKIPHTDGNFHPSPLMGGFGLKHPPPQIL |
| | IKNTPVPADPPTTFNQSKLNSFITQYSTGQVSVEIEWELQKENSKRWNPE |
| | IQYTSNYYKSTSVDFAVNTEGVYSEPRPIGTRYLTRNL |
| SEQ ID | MAADGYLPDWLEDNLSEGIREWWALKPGAPQPKANQQHQDNARGLVLPGY |
| NO: 61 | KYLGPGNGLDKGEPVNAADAAALEHDKAYDQQLKAGDNPYLKYNHADAEF |
| (AAV9 | QERLKEDTSFGGNLGRAVFQAKKRLLEPLGLVEEAAKTAPGKKRPVEQSP |
| (AAS99264)) | QEPDSSAGIGKSGAQPAKKRLNFGQTGDTESVPDPQPIGEPPAAPSGVGS |
| | LTMASGGGAPVADNNEGADGVGSSSGNWHCDSQWLGDRVITTSTRTWALP |
| | TYNNHLYKQISNSTSGGSSNDNAYFGYSTPWGYFDFNRFHCHFSPRDWQR |
| | LINNNWGFRPKRLNFKLFNIQVKEVTDNNGVKTIANNLTSTVQVFTDSDY |
| | QLPYVLGSAHEGCLPPFPADVFMIPQYGYLTLNDGSQAVGRSSFYCLEYF |
| | PSQMLRTGNNFQFSYEFENVPFHSSYAHSQSLDRLMNPLIDQYLYYLSKT |
| | INGSGQNQQTLKFSVAGPSNMAVQGRNYIPGPSYRQQRVSTTVTQNNNSE |
| | FAWPGASSWALNGRNSLMNPGPAMASHKEGEDRFFPLSGSLIFGKQGTGR |
| | DNVDADKVMITNEEEIKTTNPVATESYGQVATNHQSAQAQAQTGWVQNQG |
| | ILPGMVWQDRDVYLQGPIWAKIPHTDGNFHPSPLMGGFGMKHPPPQILIK |
| | NTPVPADPPTAFNKDKLNSFITQYSTGQVSVEIEWELQKENSKRWNPEIQ |
| | YTSNYYKSNNVEFAVNTEGVYSEPRPIGTRYLTRNL |
| SEQ ID | MAADGYLPDWLEDNLSEGIREWWDLKPGAPKPKANQQKQDDGRGLVLPGY |
| NO: 62 | KYLGPFNGLDKGEPVNAADAAALEHDKAYDQQLKAGDNPYLRYNHADAEF |
| (AAV10 | QERLQEDTSFGGNLGRAVFQAKKRVLEPLGLVEEAAKTAPGKKRPVEPSP |
| (AAT46337)) | QRSPDSSTGIGKKGQQPAKKRLNFGQTGESESVPDPQPIGEPPAGPSGLG |
| | SGTMAAGGGAPMADNNEGADGVGSSSGNWHCDSTWLGDRVITTSTRTWAL |
| | PTYNNHLYKQISNGTSGGSTNDNTYFGYSTPWGYFDFNRFHCHFSPRDWQ |
| | RLINNNWGFRPKRLSFKLFNIQVKEVTQNEGTKTIANNLTSTIQVFTDSE |
| | YQLPYVLGSAHQGCLPPFPADVFMIPQYGYLTLNNGSQAVGRSSFYCLEY |
| | FPSQMLRTGNNFEFSYTFEDVPFHSSYAHSQSLDRLMNPLIDQYLYYLSR |
| | TQSTGGTQGTQQLLFSQAGPANMSAQAKNWLPGPCYRQQRVSTTLSQNNN |
| | SNFAWTGATKYHLNGRDSLVNPGVAMATHKDDEERFFPSSGVLMFGKQGA |
| | GRDNVDYSSVMLTSEEEIKTTNPVATEQYGVVADNLQQANTGPIVGNVNS |
| | QGALPGMVWQNRDVYLQGPIWAKIPHTDGNFHPSPLMGGFGLKHPPPQIL |
| | IKNTPVPADPPTTFSQAKLASFITQYSTGQVSVEIEWELQKENSKRWNPE |
| | IQYTSNYYKSTNVDFAVNTEGTYSEPRPIGTRYLTRNL |
| SEQ ID | MAADGYLPDWLEDNLSEGIREWWALKPGAPQPKANQQHQDNARGLVLPGY |
| NO: 63 | KYLGPGNGLDKGEPVNEADAAALEHDKAYDQQLKAGDNPYLKYNHADAEF |
| (AAV | QERLKEDTSFGGNLGRAVFQAKKRLLEPLGLVEEAAKTAPGKKRPVEQSP |
| hu.68) | QEPDSSVGIGKSGAQPAKKRLNFGQTGDTESVPDPQPIGEPPAAPSGVGS |
| | LTMASGGGAPVADNNEGADGVGSSSGNWHCDSQWLGDRVITTSTRTWALP |
| | TYNNHLYKQISNSTSGGSSNDNAYFGYSTPWGYFDFNRFHCHFSPRDWQR |
| | LINNNWGFRPKRLNFKLFNIQVKEVTDNNGVKTIANNLTSTVQVFTDSDY |
| | QLPYVLGSAHEGCLPPFPADVFMIPQYGYLTLNDGSQAVGRSSPYCLEYF |
| | PSQMLRTGNNFQFSYEFENVPFHSSYAHSQSLDRLMNPLIDQYLYYLSKT |
| | INGSGQNQQTLKFSVAGPSNMAVQGRNYIPGPSYRQQRVSTTVTQNNNSE |
| | FAWPGASSWALNGRNSLMNPGPAMASHKEGEDRFFPLSGSLIFGKQGTGR |
| | DNVDADKVMITNEEEIKTTNPVATESYGQVATNHQSAQAQAQTGWVQNQG |
| | ILPGMVWQDRDVYLQGPIWAKIPHTDGNFHPSPLMGGFGMKHPPPQILIK |
| | NTPVPADPPTAFNKDKLNSFITQYSTGQVSVEIEWELQKENSKRWNPEIQ |
| | YTSNYYKSNNVEFAVNTEGVYSEPRPIGTRYLTRNL* |
| SEQ ID | MAADGYLPDWLEDNLSEGIREWWALQPGAPKPKANQQHQDNARGLVLPGY |
| NO: 64 | KYLGPGNGLDKGEPVNAADAAALEHDKAYDQQLKAGDNPYLKYNHADAEF |
| (AAV | QERLKEDTSFGGNLGRAVFQAKKRLLEPLGLVEEAAKTAPGKKRPVDQSP |
| LK03) | QEPDSSSGVGKSGKQPARKRLNFGQTGDSESVPDPQPLGEPPAAPTSLGS |
| | NTMASGGGAPMADNNEGADGVGNSSGNWHCDSQWLGDRVITTSTRTWALP |
| | TYNNHLYKQISSQSGASNDNHYFGYSTPWGYFDFNRFHCHFSPRDWQRLI |
| | NNNWGFRPKKLSFKLFNIQVKEVTQNDGTTTIANNLTSTVQVFTDSEYQL |
| | PYVLGSAHQGCLPPFPADVFMVPQYGYLTLNNGSQAVGRSSFYCLEYFPS |
| | QMLRTGNNFQFSYTFEDVPFHSSYAHSQSLDRLMNPLIDQYLYYLNRTQG |
| | TTSGTTNQSRLLFSQAGPQSMSLQARNWLPGPCYRQQRLSKTANDNNNSN |
| | FPWTAASKYHLNGRDSLVNPGPAMASHKDDEEKFFPMHGNLIFGKEGTTA |
| | SNAELDNVMITDEEEIRTTNPVATEQYGTVANNLQSSNTAPTTRTVNDQG |
| | ALPGMVWQDRDVYLQGPIWAKIPHTDGHFHPSPLMGGFGLKHPPPQIMIK |
| | NTPVPANPPTTFSPAKFASFITQYSTGQVSVEIEWELQKENSKRWNPEIQ |
| | YTSNYNKSVNVDFTVDINGVYSEPRPIGTRYLTRPL* |
| SEQ ID | MAADGYLPDWLEDTLSEGIRQWWKLKPGPPPPKPAERHKDDSRGLVLPGY |
| NO: 65 | KYLGPFNGLDKGEPVNEADAAALEHDKAYDRQLDSGDNPYLKYNHADAEF |
| (AAV | QERLKEDTSFGGNLGRAVFQAKKRVLEPLGLVEEPVKTAPGKKRPVEHSP |
| hu.1 | VEPDSSSGTGKAGQQPARKRLNFGQTGDADSVPDPQPLGQPPAAPSGLGS |
| (AAS99260)) | TTMATGSGAPMADNNEGADGVGNSSGNWHCDSQWLGDRVITTSTRTWALP |
| | TYNNHLYKQISSQSGASNDNHYFGYSTPWGYFDFNRFHCHFSPRDWQRLI |
| | NNNWGFRPKRLNFKLENIQVKEVTQNGGTTTIANNLTSTVQVFTDSEYQL |
| | PYVLGSAHQGCLPPFPADVFMVPQYGYLTLNNGSQAVGRSSFYCLEYFPS |
| | QMLRTGNNFQFSYTFEDVPFHSSYAHSQSLDRLMNPLIDQYLYYLNKTQT |
| | NSGTLQQSRLLFSQAGPTNMSLQAKNWLPGPCYRQQRLSKQANGNNNSNF |
| | PWTAATKYHLNGRDSLVNPGPAMASHKDDEEKFFPMHGTLIFGKQGTNAN |
| | DADLENVMITDEEEIRATNPVATEQYGTVSNNLQNSNTGPTTGTVNHQGA |
| | LPGMVWQDRDVYLQGPIWAKIPHTDGHFHPSPLTGGFGLKHPPPQIMIKN |
| | TPVPANPPTNFSSAKFASFITQYSTGQVSVEIEWELQKENSKRWNPEIQY |
| | TSNYNKSVNVDFTVDINGVYSEPRPIGTRYLTRNL |
| SEQ ID | MAADGYPPDWLEDTLSEGIRQWWKLKPGPPPPKPAERHKDDSRGLVLPGY |
| NO: 66 | KYLGPFNGLDKGEPVNEADAAALEHDKAYDRQLDSGDNPYLKYNHADAEF |
| (AAV | QERLKEDTSFGGNLGRAVFQAKKRVLEPLGLVEEPVKTAPGKKRPVEHSP |
| hu.2 | VEPDSSSGTGKAGQRPARKRLNFGQTGDADSVPDPQPLGQPPAAPSGLGS |
| (AAS99270)) | TTMATGSGAPMADNNEGADGVGNSSGNWHCDSQWLGDRVITTSTRTWALP |
| | TYNNHLYKQISSQSGASNDNHYFGYSTPWGYFDFNRFHCHFSPRDWQRLI |
| | NNNWGFRPKRLNFKLFNIQVKEVTQNDGTTTIANNLTSTVQVFTDSEYQL |
| | PYVLGSAHQGCLPPFPADVFMVPQYGYLTLNNGSQAVGRSSFYCLEYFPS |
| | QMLRTGNNFQFSYTFEDVPFHSSYAHSQSLDRLMNPLIDQYLYYLNKTQT |
| | NSGTLQQSRLLFSQAGPTNMSLQAKNWLPGPCYRQQRLSKQANDNNNSNF |
| | PWTAATKYHLNGRDSLVNPGPAMASHKDDEEKFFPMHGTLIFGKQGTNAN |
| | DADLENVMITDEEEIRATNPVATEQYGTVSNNLQNSNTGPTTGTVNRQGA |
| | LPGMVWQDRDVYLQGPIWAKIPHTDGHFHPSPLMGGFGLKHPPPQIMIKN |
| | TPVPANPPTNFSSAKFASFITQYSTGQVSVEIEWELQKENSKRWNPEIQY |
| | TSNYNKSVNVDFTVDINGVYSEPRPIGTRYLTRNL |
| SEQ ID | MAADGYLPDWLEDTLSEGIRQWWKLKPGPPPPKPAERHKDDSRGLVLPGY |
| NO: 67 | KYLGPFNGLDKGEPVNEADAAALEHDKAYDRQLDSGDNPYLKYNHADAEF |
| (AAV | QERLKEDTSFGGNLGRAVFQAKKRVLEPLRPGLRKPVKTAPGKKRPVEHS |
| hu.3 | PVEPDSSSGTGKAGQQPARKRLNFGQTGDADSVPDPQPLGQPPAAPSGLG |
| (AAS99280)) | STTMATGSGAPMADNNEGADGVGNSSGNWHCDSQWLDDRVIATSTRTWAL |
| | PTYNNHLYKQISSQSGACNDNHYFGYSTPWGYFDFNRFHCHFSPRDWQRL |
| | INSNWGFRPKRLNFKLFNIQVKEVTQNDGTTTIANNLTSTVQVFTDSEYQ |
| | LPYVPGSAHQGCLPPFPADVFMVPQYGYLTLNNGSQAVGRSSFYCLEYFP |
| | SQMLRTGNNFQFSYTFEDVPFHSSYAHCQSLDRLMNPLIDQYLYYLNKTQ |
| | TNSGTLQQSRLLFSQAGPTNMSLQAKNWLPGPCYRQQRLSKQANDNNNCN |
| | FPWTAATKYHLNGRDSLVNPGPAMASHKDDEEKFFPMHGTLIFGKQGTNA |
| | NDADLENVMITDEEEIRPTNPVATEQYGTVSNNLQNSNTGPTTGTVNHQG |
| | ALPGMVWQDRDVYLQGPIWAKIPHTDGHFHPSPLMGGFGLKHPPPQIMIK |
| | STPVPANPPTNFSSAKFASSITQYSTGQVSVEIEWELQKENSKRWNPEIQ |
| | YTSNYNKSVNVDFTVDTNGVYSEPRPIGTRYLTRNL |
| SEQ ID | MAADGYLPDWLEDTLSEGIRQWWKLKPGPPPPKPAERHKDDSRGLVLPGY |
| NO: 68 | KYLGPFNGLDKGEPVNEADAAALEHDKAYDRQLDSGDNPYLKYNHADAEF |
| (AAV | QERLKEDTSFGGNLGRAVFQAKKRVLEPLGLVEEPVKTAPGKKRPVEHSP |
| hu.4 | VEPDSSSGTGKAGQQPARKRLNFGQTGDADSVPDPQPLGQPPAAPSGLGS |
| (AAS99 | TTMATGSGAPMADNNEGADGVGNSSGNWHCDSQWLGDRVITTSTRTWALP |
| 287)) | TYNNHLYKQISSQSGASNDNHYFGYSTPWGYFDFNRFHCHFSPRDWQRLV |
| | NNNRGFRPKRLNFKLFNIQVKEVTQNDGTTTIANNLTSTVQVFTDSEYQL |
| | PYVLGSAHQGCLPPFPADVFMVPQYGYLTLNNGSQAVGRSSFYCLEYFPS |
| | QMLRTGNNFQFSYTFEDVPFHSSYAHSQSLDRLMNPLIDQYLYYLNKTQT |
| | NSGTLQQSRLLFSQAGPTNMSLQAKNWLPGPCYRQQRLSKQANDNNNSNF |
| | PWTAATKYHLNGRDSLVNPGPAMASHKDDEEKFFPMHGTLIFGKQGTNAN |
| | DADLENVMITDEEEIRATNPVATEQYGTVSNNLQNSNTGPTTGTVNHQGA |
| | LPGMVWQDRDVYLQGPIWAKIPHTDGHFHPSPLMGGFGLKHPPPQIMIKN |
| | TPVPANPPTNFSSAKFASFITQYSTGQVSVEIEWELQKENSKRWNPEIQY |
| | TSNYNKSVNVDFTVDINGVYSEPRPIGTRYLTRNL |
| SEQ ID | MAADGYLPDWLEDNLSEGIREWWDLKPGAPKPKANQQKQDDGRGLVLPGY |
| NO: 69 | KYLGPFNGLDKGEPVNAADAAALEHDKAYDQQLKAGDNPYLRYNHADAEF |
| (AAV | QERLQEDTSFGGNLGRAVFQAKKRVLEPLGLVEEGAKTAPGKKRPVEPSP |
| hu.6 | QRSPDSSTGIGKTGQQPAKKRLNFGQTGDSESVPDPQPIGEPPAGPSGLG |
| (AAS99306)) | SGTMAAGGGAPMADNNEGADGVGSSSGNWHCDSAWLGDRVITTSTRPWAL |
| | PTYNNHLYKQISNGTSGGSTNDNTYFGYSTPWGYFDFNRFHCHFSPRDWQ |
| | RLINNNWGFRPKRLNFKLFNIQVKEVTQNEGTKTIANNLTSTIQVFTDSE |
| | YQLPYVLGSAHQGCPPPFPADVFMIPQYGYLTLNNGSQAVGRSSFYCLEY |
| | FPSQMRRTGNNFEFSYQFEDVPFHSSYAHSQSLDRLMNPLIDQYLYYLSR |
| | TQSTGGTAGTQQLLFSQAGPNNMSAQAKNWLPGPCYRQQRVSTTLSQNNN |
| | SNFAWTGATKYHLNGRDSLVNPGVAMATHKDDEERFFPSSGVLMFGKQGA |
| | GKDNVDYSSVMLTSEEEIKTTNPVATEQYGVVADNLQQQNAAPIVGAVNS |
| | QGALPGMVWQNRDVYLQGPIWAKIPHTDGNFHPSPLMGGFGLKHPPPQIL |
| | IKNTPVPADPPTTFSQAKLASFITQYSTGQVSVEIEWELQKENSKRWNPE |
| | IQYTSNYYKSTNVDFAVNTEGTYSEPRPIGTRYLTRNL |
| SEQ ID | MAADGYLPDWLEDTLSEGIRQWWKLKPGPPPPKPAERHKDDSRGLVLPGY |
| NO: 70 | KYLGPFNGLDKGEPVNEADAAALEHDKAYDRQLDSGDNPYLKYNHADAEF |
| (AAV | QERLKEDTSFGGNLGRAVFQAKKRVLEPLGLVEGPVKTAPGKKRPVEHSP |
| hu.7 | AEPDSSSGTGKAGQQPARKRLNFGQTGDADSVPDPQPLGQPPAAPSGLGS |
| (AAS99313)) | TTMATGSGAPMADNNEGADGVGNSSGNWHCDSQWLGDRVITTSTRTWALP |
| | TYNNHLYKQISSQSGASNDNHYFGYSTPWGYFDFNRFHCHFSPRDWQRLI |
| | NNNWGFRPKRLNFKLFNIQVKEVTQNDGTTTIANNLTSTVQVFTDSEYQL |
| | PYVLGSAHQGCLPPFPADVFMVPQYGYLTLNNGSQAVGRSSFYCLEYFPS |
| | QMLRTGNNFQFSYTFEDVPFHSSYAHSQSLDRLMNPLIDQYLYYLNKTQS |
| | NSGTLQQSRLLFSQAGPTSMSLQAKNWLPGPCYRQQRLSKQANDNNNSNF |
| | PWTAATKYHLNGRDSLVNPGPAMASHKDDEEKFFPMHGTLIFGKQGTNAN |
| | DADLDNVMITDEEEIRTTNPVATEQYGYVSNNLQNSNTGPTTGTVNHQGA |
| | LPGMVWQDRDVYLQGPIWAKIPHTDGHFHPSPLMGGFGLKHPPPQIMIKN |
| | TPVPANPPTNFSSAKFASFITQYSTGQVSVEIEWELQKENSKRWNPEIQY |
| | TSNYNKSVNVDFTVDINGVYSEPRPIGTRYLTRNL |
| SEQ ID | MAADGYLPDWLEDTLSEGIRQWWKLKPGPPPPKPAERHQDNSRGLVLPGY |
| NO: 71 | KYLGPSNGLDKGEPVNEADAAALEHDKAYDRQLDSGDNPYLKYNHADAEF |
| (AAV | QERLKEDTSFGGNLGRAVFQAKKRVLEPLGLVEEPVKTAPGKKRPVEHSP |
| hu.9 | VEPDSSSGTGKAGHQPARKRLNFGQTGDADSVPDPQPLGQPPAAPTSLGS |
| (AAS99314)) | TTMATGSGAPMADNNEGADGVGNSSGNWHCDSQWLGDRVITTSTRTWALP |
| | TYNNHLYKQISSQSGASNDNHYFGCSTPWGYFDFNRFHCHFSPRDWQRLI |
| | NNNWGFRPKRLNFKLFNIQVKEVTQNDGTTTIANNLTSTVQVFTDSEYPL |
| | PYVLGSAHQGCLPPFPADVFMVPQYGYLTLNNGSQAVGRSSFYCLEYFPS |
| | QMLRTGNNFTFSYTFEDVPFHSSYAHSQSLDRLMNPLIDQYLYYLNRTQS |
| | NSGTLQQSRLLESQAGPTSMSLQAKNWLPGPCYRQQRLSKQANDNNNSNF |
| | PWTAATKYHLNGRDSLVNPGPAMASHKDDEEKFFPMHGTLIFGKQGTNAN |
| | DADLEHVMITDEEEIRTTNPVATEQYGNVSNNLQNSNTGPTTENVNHQGA |
| | LPGMVWQDRDVYLQGPIWAKIPHTDGHFHPSPLMGGFGLKHPPPQIMIKN |
| | TPVPANPPTNFSSAKFASFITQYSTGQVSVEIEWELQKENSKRWNPEIQY |
| | TSNYNKSVNVDFTVDINGVYSEPCPIGTRYLTRNL |
| SEQ ID | MAADGYLPDWLEDTLSEGIRQWWKLKPGPPPPKLAERHQDDSRGLVLPGY |
| NO: 72 | KYLGPFNGLDKGEPVNEADAAALEHDKAYDRQLDSGDNPYLKYNHADAEF |
| (AAV | QERLKEDTSFGGNLGRAVFQAKKRVLEPLGLVEEPVKTAPGKKRPVEHSP |
| hu.10 | VEPDSSSGTGKAGHQPARKRLNFGQTGDADSVPDPQPLGQPPAAPTSLGS |
| (AAS99261)) | TTMATGSGAPMADNNEGADGVGNSSGNWHCDSQWLGDRVITTSTRTWALP |
| | TYNNHLYKQISSQSGASNDNHYFGYSTPWGYFDFNRFHCHFSPRDWQRLI |
| | NNNWGFRPKRLNFKLENIQVKEVTQNDGTTTIANNLTSTVQVFTDSEYQL |
| | PYVLGSAHQGCLPPFPADVFTVPQYGYLTLNNGSQAVGRSSFYCLEYFPS |
| | QMLRTGNNLTFSYTFEDVPFHSSYAHSQSLDRLMNPLIDQYLYYLNRTQS |
| | NSGTLQQSRLLFSQAGPTSMSLQAKNWLPGPCYRQQRLSKQANDNNNSNF |
| | PWTAATKYHLNGRDSLVNPGPAMASHKDDEEKFFPMHGTLIFGKQGTNAN |
| | DADLEHVMITDEEEIRTTNPVATEQYGNVSNNLQNSNTGPTTENVNHQGA |
| | LPGMVWQDRDVYLQGPIWAKIPHTDGHFHPSPLMGGFGLKHPPPQIMIKN |
| | TPVPANPPTNYSSAKFASFITQYSTGQVSVEIEWELRKENSKRWNPEIQY |
| | TSNYNKSVNVDFTVDINGVYSEPRPIGTRYLTRNL |
| SEQ ID | MAADGYLPDWLEDTLSEGIRQWWKLKPGPPPPKPAERHQDDSRGLVLPGY |
| NO: 73 | KYLGPFNGLDKGEPVNEADAAALEHDKAYDRQLDSGDNPYLKYNHADAEF |
| (AAV | QERLKEDTSFGGNLGRAVFQAKKRVLEPLGLVEEPVKTAPGKKRPVEHSP |
| hu.11 | VEPDSSSGTGKAGHQPARKRLNFGQTGDADSVPDPQPLGQPPAAPTSLGS |
| (AAS99262)) | TTMATGSGAPMADNNEGADGVGNSSGNWHCDSQWLGDRVITTSTRTWALP |
| | TYNNHLYKQISSQSGASNDNHYFGYSTPWGYFDFNRFHCHFSPRDWQRLI |
| | NNNWGFRPKRLNFKLFNIQVKEVTQNDGTTTIANNLTSTVQVFTDSEYQL |
| | PYVLGSAHQGCLPPFPADVFMVPQYGYLTLNNGSQAVGRSSFYCLEYFPS |
| | QMLRTGNNFTFSYTFEDVPFHSSYAHSQSLDRLMNPLIDQYLYYLNRTQS |
| | NSGTLQQSRLLFSQAGPTSMSLQAKNWLPGPCYRQQRLSKQANDNNNSNF |
| | PWTAATKYRLNGRDSLVNPGPAMASHKDDEEKFFPMHGTLIFGKQGTNAN |
| | DADLEHVMITDEEEIRTTNPVATEQYGNVSNNLQNSNTGPTTENVNHQGA |
| | LPGMVWQDRDVYLQGPIWAKIPHTDGHFHPSPLMGGFGLKHPPPQIMIKN |
| | TPVPANPPTNFSSAKFASFITQYSTGQVSVEIEWELQKENSKRWNPEIQY |
| | TSNYNKSVNVDFTVDTNGVYSEPRPIGTRYLTRNL |
| SEQ ID | MAADGYLPDWLEDTLSEGIRQWWKLKPGPPPPKPAERHKDDSRGLVLPGY |
| NO: 74 | KYLGPFNGLYKGEPVDEADAAALEHDKAYDRQLDSGDNPYLKYNHADAEF |
| (AAV | QERLKEDTSFGGNLGRAVFQAKKRVLEPLGLVGEPVKTAPGKKRPVEHSP |
| hu.15 | VEPDSSSGTGKAGNQPARKRLNFGQTGDADSVPDPQPLGQPPAAPSGLGS |
| (AAS99265)) | TTMATGSGAPVADNNEGADGVGNSSGNWHCDSQWLGDRVITTSTRTWALP |
| | TYNNHLYKQISSQSGASNDNHYFGYSTPWGYFDFNRFHCHFSPRDRQRLI |
| | NNNWGFRPKRLNFKLFNIQVKEVTQNDGTTTIANNLTSTVQVFTDSGYQL |
| | PYVLGLAHQGCLPPFPADVFMVPQYGYLTLNNGSQAVGRSSFYCLEYFPS |
| | QMLRTGNNFQFSYTFEDVPFHSSYAHSQSLDRLMNPLIDQYLYYLNKTQS |
| | NSGTLQQSRLLFSQAGPTSMSLQAKNWLPGPCYRQQRLSKQANDNNNSNF |
| | PWTAATKYHLNGRDSLVNPGPAMASHKDDEEKFFPMHGTLIFGKQGTNAN |
| | DADLDNVMITDEEEIRTTNPVATEQYGYVSNNLQNSNTGPTTGTVNHQGA |
| | LPGMVWQDRDVYLQGPIWAKIPHTDGHFHPSPLMGGFGLKHPPPQIMIKN |
| | TPVPANPPTNFSSAKFASFITQYSTGQVSVEIEWELQKEDSKRWNPEIQY |
| | TSNYNKPVNVDFTVDINGVYSEPRPIGTRYLTRNL |
| SEQ ID | MAADGYLPDWLEDTLSEGIRQWWKLKPGPPPPKPAERHKDDSRGLVLPGY |
| NO: 75 | KYLGPFNGLYKGEPVNEADAAALEHDKAYDRQLDSGDNPYLKYNHAGAEF |
| (AAV | QERLKEDTSFGGNLGRAVFQAKKRVLEPLGLVEEPVKTAPGKKRPVEHSP |
| hu.16 | VEPDSSSGTGKAGNQPARKRLNFGQTGDADSVPDPQPLGQPPAAPSGLGS |
| (AAS99266)) | TTMATGSGAPVADNNEGADGVGNSSGNWHCDSQWLGDRVITTSTRTWALP |
| | TYNNHLYKQISSQSGASNDNHYFGYSTPWGYFDFNRFHCHFSPRDWQRLI |
| | NNNWGFRPKRLNFKLENIQVKEVTQNDGTTTIANNLTSTVQVFTDSEYQL |
| | PYVLGSAHQGCLPPFPADVEMVPQYGYLTLNNGSQAVGRSSFYCLEYFPS |
| | QMLRTGNNFQFSYTFEDVPFHSSYAHSQSLDRLMNPLIDQYLYYLNKTQS |
| | NSGTLQQSRLLFSQAGPTSMSLQAKNWLPGPCYRQQRLSKQANDNNNSNF |
| | PWTAATKYHLNGRDSLVNPGPAMASHKDDEEKFFPMHGTLIFGKQGTNAN |
| | DADLDNVMITDEEEIRTTNPVATEQYGYVSNNLQDSNTGPTTGTVNHQGA |
| | LPGMVWQDRDVYLQGPIWAKIPHTDGHFHPSPLMGGFGLKHPPPQIMIKN |
| | TPVPANPPTNFSSAKFASFITQYSTGQVSVEIEWELQKENSKRWNPEIQY |
| | TSNYNKSVNVDFTVDINGVYSEPRPIGTRYLTRNL |
| SEQ ID | MAADGYLPDWLEDNLSEGIREWWDLKPGAPKPKANQQKQDDGRGLVLPGC |
| NO: 76 | KYLGPFNGLDKGEPVNAADAAALEHDKAYDQQLKAGDNPYLRYNHADAEF |
| (AAV | QERLQEDTSFGGNLGRAVFQAKKRVLEPLGLVEEGAKTAPGKKRPVEPSP |
| hu.17 | QRSPDSSTGIGKTGQQPAKKRLNFGQTGDSESVPDPQPIGEPPAGPSGLG |
| (AAS99267)) | SGTMAAGGGAPMADNNEGADGVGSSSGNWHCDSTWLGDRVITTSTRTWAL |
| | PTYNNHLYKQISNGTSGGSTNDNTYFGYSTPWGYFDFNRFHCHFSPRDWQ |
| | RLINNNWGFRPKRLNFKLFNIQVKEVTQNEGTKTIANNLTSTIQVFTDSE |
| | YQLPYVLGSAHQGCPPPFPADVFMIPQYGYLTLNNGSQAVGRSSFYCLEY |
| | FPSQMRRTGNNFEFSYQFEDVPFHSSYAHSQSLDRLMNPLIDQYLYYLSR |
| | TQSTGGTAGTQQLLFSQAGPNNMSAQAKNWLPGPCYRQQRVSTTLSQNNN |
| | SNFAWTGATKYHLNGRDSLVNPGVAMATHKDDEERFFPSSGVLMFGKQGA |
| | GKDNVDYSSVMLTSEEEIKTTNPVATEQYGVVADNLQQQNAAPIVGAVNS |
| | QGALPGMVWQNRDVYLQGPIWAKIPHTDGNFHPSPLMGGFGLKHPPPQIL |
| | IKNTPVPADPPTTFSQAKLASFITQYSTGQVSVEIEWELQKENSKRWNPE |
| | IQYTSNYNKSVNVDFTVDINGVYSEPRPIGTRYLTRNL |
| SEQ ID | MAADGYLPDWLEDTLSEGIRQWWKLKPGPPPPKPAERHKDDSRGLVLPGY |
| NO: 77 | KYLGPFNGLDKGEPVNEADAAALEHDKAYDRQLESGDNPYLKYNHADAEF |
| (AAV | QERLKEDTSFGGNLGRAVFQAKKRVLEPLGLVEEPVKTAPGKKRPVEHSP |
| hu.18 | VEPDSSSGTGKAGQQPARKRLNFGQTGDADSVPDPQPLGQPPAAPSGLGS |
| (AAS99268)) | TTMASGSGAPVADNNEGADGVGNSSGNWHCDSQWLGDRVITTSTRTWALP |
| | TYNNHLYKQISSQSGASNDNHYFGYSTPWGYFDFNRFHCHFSPRDWQRLI |
| | NNSWGFRPKRLNFKLFNIQVKEVTQNDGTTTIANNLTSTVQVFTDSEYQL |
| | PYVLGSAHQGCLPPFPADVFMVPQYGYLTLNNGSQAVGRSSFYCLEYFPS |
| | QMLRTGNNFQFSYTFEDVPFHSSYAHSQSLDRLLNPLIDQYLYYLNKTQS |
| | NSGTLQQSRLLFSQAGPTSMSLQAKNWLPGPCYRQQRLSKQANDNNNSNF |
| | PWTAATKYHLNGRDSLVNPGPAMASHKDDEEKFFPMHGTLIFGKQGTNAN |
| | DADLDNVMITDEEEIRTTNPVATEQYGYVSNNLQNSNTGPTTGTVNHQGA |
| | LPGMVWQDRDVYLQGPIWAKIPHTDGHFHPSPLMGGFGLKHPPPQIMIKN |
| | TPVPANPPTNFSSSKFASFITQYSTGQVSVEIEWELQKENSKRWNPEIQY |
| | TSNYNKSVNVDFTVDINGVYSEPRPIGTRYPTRNL |
| SEQ ID | MAADGYLPDWLEDTLSEGIRQWWKLKPGPPPPKPAERHKDDSRGLVLPGY |
| NO: 78 | RYLGPFNGLDKGEPVNEADAAALEHDKAYDRQLDSGDNPYLKYNHVDAEF |
| (AAV | QERLKEDTSFGGNLGRAVFQAKKRILEPLGLVEEPVKAAPGEKRPVEHSP |
| hu.20 | AEPDSSSGTGKAGQQPARKRLNFGQTGDADSVPDPQPLGQPPAAPSGLGT |
| (AAS99271)) | NTMASGSGAPMADNNEGADGVGNSSGNWHCDSTWMGDRVITTSTRTWALP |
| | TYNNHLYKQISSQSGASNDNHYFGYSTPWGHFDFNRFHCHFSPRDWQRLI |
| | NNNWGFRPKRLSFKLFNIQVKEVTQNDGTTTIANNLTSTVQVFTDSEYQL |
| | PYVLGSAHQGCLPPFPADVFMVPQYGYLTLNNGSQAVGRSSFYCLEYFPS |
| | QMLRTGNNFTFSYTFEDVPFHSSYAHSQSLDRLMNPLIDQYLYYLSRTNT |
| | PSGTTTMSRLQFSQAGASDIRDQSRNWLPGPCYRQQRVSKTAADNNNSDY |
| | SWTGATKYHLNGRDSLVNPGPAMASHKDDEEKYFPQSGVLIFGKQDSGKT |
| | NVDIEKVMITDEEEIRTTNPVATEQYGSVSTNLQSGNTQAATSDVNTQGV |
| | LPGMVWQDRDVYLQGPIWAKIPHTDGHFHPSPPMGGFGLKHPPPQILIKN |
| | TPVPANPSTTFSAAKFASFITQYSTGQVSVEIEWELQKENSKRWNPEIQY |
| | TSNYNKSVNVDFTVDINGVYSEPRPIGARYLTRNL |
| SEQ ID | MAADGYLPDWLEDTLSEGIRQWWKLKPGPPPPKPAERHKDDSRGLVLPGY |
| NO: 79 | KYLGPFNGLDKGEPVNEADAAALEHDKAYDRQLDSGDNPYLKYNHADAEF |
| (AAV | QERLKEDTSFGGNLGRAVFQAKKRILEPLGLVEEPVKTAPGKKRPVEHSP |
| hu.21 | AEPDSSSGTGKAGQQPARKRLNFGQTGDADSVPDPRPLGQPPAAPSGLGT |
| (AAS99272)) | NTMASGSGAPMADNNEGADGVGNSSGNWHCDSTWMGDRVITTSTRTWALP |
| | TYNNHLYKQISSQSGASNDNHYFGYSTPWGYFDFNRFHCHFSPRDWQRLI |
| | NNNWGFRPKRLSFKLFNIQVKEVTQNDGTTTIANNLTSTVQVFTDSEYQL |
| | PYVLGSAHQGCLPPFPADVFMVPQYGYLTLNNGSQAVGRSSFYCLEYFPS |
| | QMLRTGNNFTFSYTFEDVPFHSSYAHSQSLDRLMNPLIDQYLYYLSRTNT |
| | PSGTTTMSRLQFSQAGASDIRDQSRNWLPGPCYRQQRVSKTAADNNNSDY |
| | SWTGATKYHLNGRDSLVNPGPAMASHKDDEEKYFPQSGVLIFGKQDSGKT |
| | NVDIEKVMITDEEEIRTTNPVATEQYGSVSTNLQSGNTQAATSDVNTQGV |
| | LPGMVWQDRDVYLQGPIWAKIPHTDGHFHPSPLMGGFGLKHPPPQILIKN |
| | TPVPANPSTTFSAAKFASFITQYSTGQVSVEIEWELQKENSKRWNPEIQY |
| | TSNYNKSVNVDFTVDINGVYSEPRPIGTRYLTRNL |
| SEQ ID | MAADGYLPDWLEDTLSEGIRQWWKLKPGPPPPKPAERHKDDSRGLVLPGY |
| NO: 80 | KYLGPFNGLDKGEPVNEADAAALEHDKAYDRQLDSGDNPYLKYNHADAEF |
| (AAV | QERLKGDTSFGGNLGRAVFQAKKRILEPLGLVEEPVKTAPGKKRPVEHSP |
| hu.22 | AEPDSSSGTGKAGQQPARKRLNFGQTGDADSVPDPQPLGQPPAAPSGLGT |
| (AAS99273)) | NTMASGSGAPMADNNEGADGVGNSSGNWHCDSTWMGGRVITTSTRTWALP |
| | TYNNHLYKQISSQSGASNDNHYFGYSTPWGYFDFNRFHCHFSPRDWQRLI |
| | NNNWGFRPKRLSFKLFNIQVKEVTQNDGTTTIANNLTSTVQVFTDSEYQL |
| | PYVLGSAHQGCLPPFPADVFMVPQYGYLTLNNGSQAVGRSSFYCLEYFPS |
| | QTLRTGNNFTFSYTFEDVPFHSSYAHSQSLDRLMNPLIDQYLYYLSRTNT |
| | PSGTTTMSRLQFSQAGASDIRDQSRNWLPGPCYRQQRVSKTAADNNNSDY |
| | SWTGATKYHLNGRDSLVNPGPAMASHKDDEEKYFPQSGVLIFGKQDSGKT |
| | NVDIEKVMITDEEEIRTTNPVATEQYGSVSTNLQSGNTQAATSDVNTQGV |
| | LPGMVWQDRDVYLQGPIWAKIPHTDGHFHPSPLMGGFGLKHPPPQILIKN |
| | TPVPANPSTTFSAAKFASFITQYSTGQVSVEIEWELQKENSKRWNPEIQY |
| | TSNYNKSVNVDFTVDINGVYSEPRPIGTRYLTRNL |
| SEQ ID | MAADGYLPDWLEDTLSEGIRQWWKLKPGPPPPKPAERHKDDSRGLVLPGY |
| NO: 81 | KYLGPFNGLDKGEPVNEADAAALEHDKAYDRQLDSGDNPYLKYNHADAEF |
| (AAV | QERLKEDTSFGGNLGRAVFQAKKRILEPLGLVEEPVKTAPGKKRPVEHSP |
| ho 23 | AEPDSSSGTGKAGQQPARKRLNFGQTGDADSVPDPQPLGQPPAAPSGLGT |
| (AAS99274)) | NTMASGSGAPMADNNEGADGVGNSSGNWHCDSTWMGDRVITTSTRTWALP |
| | TCNNHLYKQISSQSGASNDNHYFGYSTPWGYFDFNRFHCHFSPRDWQRLI |
| | NNNWGFRPKRLSFKLFNIQVKEVTQNDGTTTIANNLTSTVQVFTDSEYQL |
| | PYVLGSAHQGCLPPFPADVFMVPQYGYLTLNNGSQAVGRSSFYCLEYFPS |
| | QMLRTGNNFTFSYTFEDVPFHSSYAHSQSLDRLMNPLIDQYLYYLSRTNT |
| | PSGTTTMSRLQFSQAGASDIRDQSRNWLPGPCYRQQRVSKTAADNNNSDY |
| | SWTGATKYHLNGRDSLVNPGPAMASHKDDEEKYFPQSGVLIFGKQDSGKT |
| | NVDIEKVMITDEEEIRTTNPVATEQYGSVSTYLQSGNTQAATSDVNTQGV |
| | LPGMVWQDRDVYLRGPIWAKIPHTDGHFHPSPLMGGFGLKHPPPQILIKN |
| | TPVPANPSTTFSAAKFASFITQYSTGQVSVEIEWELQKENSKRWNPEIQY |
| | TSNYNKSVNVDFTVDTNGVYSEPRPIGTRYLTRNL |
| SEQ ID | MAADGYLPDWLEDTLSEGIRQWWKLKPGPPPPKPAERHKDGSRGLVLPGY |
| NO: 82 | KYLGPFNGLDKGEPVNEADAAALEHDKAYDRQLNSGDNPYLKYNHADAEF |
| (AAV | QERLKEDTSFGGNLGRAVFQAKKRVLEPLGLVEEPVKTAPGKKRPVEHSP |
| hu.25 | AEPDSSSGTGKAGQQPARKRLNFGQTGDADSVPDPQPLGQPPAAPSGLGS |
| (AAS99276)) | TTMATGSGAPMADNNEGADGVGNSSGNWHCDSQWLGDRVITTSTRTWALP |
| | TYNNHLYKQISSQSGASNDNHYFGYSTPWGYFDFNRFHCHFSPRDWQRLI |
| | NNNWGFRPKRLNFKLFNIQVKEVTQNDGTTTIANNLTSTVQVFTDSEYQL |
| | PYVLGSAHQGCLPPFPADVFMVPQYGYLTLNNGSQAVGRSPFYCLEYFPS |
| | QMLRTGNNFQFSYTFEDVPFHSSYAHSQSLDRLMNPLIDQYLYYLNKTQT |
| | NSGTLQQSRLLFSQAGPTNMSLQAKNWLPGPCYRQQRLSKQANDNNNSNF |
| | PWTAATKYHLNGRDSLVNPGPAMASHKDDEEKFFPMHGTLIFGKQGTNAN |
| | DADLENVMITDEEEIRTTNPVATEQYGTVSNNLQNSNTGPTTGTVNHQGA |
| | LPGMVWQDRDVYLQGPIWAKIPHTDGHFHPSPLMGGFGLKHPPPQIMIKN |
| | TPVPANPPTNFSSAKFASFITQYSTGQVSVEIEWELQKENSKRWNPEIQY |
| | TSNYNKSVNVDFTVDNNGVYSEPRPIGTRYLTRNL |
| SEQ ID | MAADGYLPDWLEDTLSEGIRQWWKLKPGPPPPKPAERHKDDSRGLVLPGY |
| NO: 83 | KYLGPFNGLDKGEPVNEADAAALEHDKAYDRQLDSGDNPYLKYNHADAEF |
| (AAV | QERLKEDTSFGGNLGRAVFQAKKRILEPLGLVEEPVKTAPGKKRPVEHSP |
| hu.27 | AEPDSSSGTGKAGQQPARKRLNFGQTGDADSVPDPQPLGQPPAAPSGLGT |
| (AAS99277)) | NTMASGSGAPMADNNEGADGVGNSSGNWHCDSTWMGDRVITTSTRTWALP |
| | TYNNHLYKQISSQSGASNDNHYFGYSTPWGYFDFNRFHCHFSPRDWQRLI |
| | NNNWGFRPKRLSFKLFNIQVKEVTQNDGTTTIANNLTSTVQVFTDSGYQL |
| | PYVLGSAHQGCLPPFPADVFMVPQYGYLTLNNGSQAVGRSSFYCLEYFPS |
| | QMLRTGNNFTFSYTFEDVPFHSSYAHGQSLDRLMNPLIDQYLYYLSRTNT |
| | PSGTTTMSRLQFSQAGASDVRDQSRNWLPGPCYRQQRVSKTAADNNNSDY |
| | SWTGATKYHLNGRDSLVNPGPAMASHKDDEEKYFPQSGVLVFGKQDSGKT |
| | NVDIEKVMITDEEEIRTINPAATEQYGSVSTNLQSGNTQAATSDVNTQGV |
| | LPGMVWQDRDVYLQGPIWAKIPHTDGHFHPSPLMGGFGLKHPPPQILIKN |
| | TPVPANPSTTFSAAKFVSFITQYSTGQVSVEIEWELQKENSKRWNPEIQY |
| | TSNYNKSVNVDFTVDINGVYSEPRPIGTRYLTRNL |
| SEQ ID | MAADGYLPDWLEDTLSEGIRQWWKLKPGPPPPKPAERHKDDSRGLVLPGY |
| NO: 84 | KYLGPFNGLDKGEPVNEADAAALEHDKAYDRQLDSGDNPYLKYNHADAEF |
| (AAV | QERLKEDTSFGGNLGRAVFQAKKRVLEPLSLVEEPVKTAPGKKRPVEHSP |
| hu.28 | AEPDSSSGTGKSGNQPARKRLNFGQTGDSDSVPDPQPLGQPPAAPSGLGT |
| (AAS99278)) | NTMATGSGAPMADNNEGADGVGNSSGNWHCDSTWMGDRVITTSTRTWALP |
| | TYNNHLYKQISSQSGASNDNHYFGYSTPWGYFDFNRFHCHFSPRDWQRLI |
| | NNNWGFRPKRLNFKLENIQVKEVTQNDGTTTIANNLTSTVQVFTDSEYQL |
| | PYVLGSAHQGCLPPFPADVFMVPQYGYLTLNNGSQAVGRSSFYCLEYFPS |
| | QMLRTGNNFTFSYTFEDVPFHSSYAHSQSLDRLMNPLIDQYLYYLSRTNT |
| | PSGTTTQSRLQFSQAGASDIQDQSRNWLPGPCYRQQRVSKTSADNNNSEY |
| | SWTGATKYHLNGRDSLVNPGPAMASHKDDEEKFFPQSGVLIFGKQGSEKT |
| | NVDIEKVMITDEEEIRTTNPVATEQYGSVSTNLQSGNTQAATADVNTQGV |
| | LPGMVGQDRDVYLQGPTWAKIPHTDGHFHPSPLMGGFGLKHPPPQILIKN |
| | TPVPANPSTTFSAAKFASFITQYSTGQVSVEIEWELQKENSKRWNPEIQY |
| | TSNYNKSVNVDFTVDTNGVYSEPRPIGTRYLTRNL |
| SEQ ID | MAADGYLPDWLEDTLSEGIRQWWKLKPGPPPPKPAERHKDDSRGLVLPGY |
| NO: 85 | KYLGPFNGLDKGEPVNEADAAALEHDKAYDRQLDSGDNPYLKYNHADAEF |
| (AAV | QERLKEDTSFGGNLGRAVFQAKKRVLEPLGLVEEPVKTAPGKKRPVEHSP |
| hu.29 | AEPDSSSGTGKSGNQPARKRLNFGQTGDSDSVPDPQPLGQPPAAPSGLGT |
| (AAS99279)) | NTMATGSGAPMADNNEGADGVGNSSGNWHCDSTWMGDRVITTSTRTWALP |
| | TYNNHLYKQISSQSGASNDNHYFGYSTPWGYFDFNRFHCHFSPRDWQRLI |
| | NNNWGFRPKRLNFKLENIQVKEVTQNDGTTTIANNLTSTVQVFTDSEYQL |
| | PYVLGSAHQGCLPPFPADVFMVPQYGYLTLNNGSQAVGRSSFYCLGYFPS |
| | QMLRTGNNFTFSYTFEDVPFHSSYAHSQSLDRLMNPLIDQYLYYLSRTNT |
| | PSGTTTQSRLQFSQAGASDIRDQSRNWLPGPCYRQQRVSKTSADNNNSEY |
| | SWTGATKYHLNGRDSLVNPGPAMASHKDDEEKFFPQSGVLIFGKQGPEKT |
| | NVDIEKVMITDEEEIRTTNPVATEQYGSVSTNLQSGNTQAATADVNTQGV |
| | LPGMVWQDRDVYLQGPIWAKIPHTDGHFHPSPLMGGFGLKHPPPQILIKN |
| | TPVPANPSTTFSAAKFASFITQYSTGQVSVEIEWELQKENSKRWNPEIQY |
| | TSNYNKSVNVDFTVDTNGVYSEPRPIGTRYLTRNL |
| SEQ ID | MAADGYLPDWLEDTLSEGIRQWWKLKPGPPPPKPAERHKDDSRGLVLPGY |
| NO: 86 | KYLGPGNGLDKGEPVNAADAAALEHDKAYDQQLKAGDNPYLKYNHADAEF |
| (AAV | QERLKEDTSFGGNLGRAVFQAKKRLLEPLGLVEEAAKTAPGKKRPVEQSP |
| hu.31 | QEPDSSAGIGKSGSQPAKKKLNFGQTGDTESVPDPQPIGEPPAAPSGVGS |
| (AAS99281)) | LTMASGGGAPVADNNEGADGVGSSSGNWHCDSQWLGDRVITTSTRTWALP |
| | TYNNHLYKQISNSTSGGSSNDNAYFGYSTPWGYFDFNRFHCHFSPRDWQR |
| | LINNNWGFRPKRLNFKLFNIQVKEVTDNNGVKTIANNLTSTVQVFTDSDY |
| | QLPYVLGSAHEGCLPPFPADVFMIPQYGYLTLNDGGQAVGRSSFYCLEYF |
| | PSQMLRTGNNFQFSYEFENVPFHSSYAHSQSLDRLMNPLIDQYLYYLSKT |
| | INGSGQNQQTLKFSVAGPSNMAVQGRNYIPGPSYRQQRVSTTVTQNNNSE |
| | FAWPGASSWALNGRNSLMNPGPAMASHKEGEDRFFPLSGSLIFGKQGTGR |
| | DNVDADKVMITNEEEIKTTNPVATESYGQVATNHQSAQAQAQTGWVQNQG |
| | ILPGMVWQDRDVYLQGPIWAKIPHTDGNFHPSPLMGGFGMKHPPPQILIK |
| | NTPVPADPPTAFNKDKLNSFITQYSTGQVSVEIEWELQKENSKRWNPEIQ |
| | YTSNYYKSNNVEFAVSTEGVYSEPRPIGTRYLTRNL |
| SEQ ID | MAADGYLPDWLEDTLSEGIRQWWKLKPGPPPPKPAERHKDDSRGLVLPGY |
| NO: 87 | KYLGPGNGLDKGEPVNAADAAALEHDKAYDQQLKAGDNPYLKYNHADAEF |
| (AAV | QERLKEDTSFGGNLGRAVFQAKKRLLEPLGLVEEAAKTAPGKKRPVEQSP |
| hu.32 | QEPDSSAGIGKSGSQPAKKKLNFGQTGDTESVPDPQPIGEPPAAPSGVGS |
| (AAS99282)) | LTMASGGGAPVADNNEGADGVGSSSGNWHCDSQWLGDRVITTSTRTWALP |
| | TYNNHLYKQISNSTSGGSSNDNAYFGYSTPWGYFDFNRFHCHFSPRDWQR |
| | LINNNWGFRPKRLNFKLFNIQVKEVTDNNGVKTIANNLTSTVQVFTDSDY |
| | QLPYVLGSAHEGCLPPFPADVFMIPQYGYLTLNDGSQAVGRSSFYCLEYF |
| | PSQMLRTGNNFQFSYEFENVPFHSSYAHSQSLDRLMNPLIDQYLYYLSKT |
| | INGSGQNQQTLKFSVAGPSNMAVQGRNYIPGPSYRQQRVSTTVTQNNNSE |
| | FAWPGASSWALNGRNSLMNPGPAMASHKEGEDRFFPLSGSLIFGKQGTGR |
| | DNVDADKVMITNEEEIKTTNPVATESYGQVATNHQSAQAQAQTGWVQNQG |
| | ILPGMVWQDRDVYLQGPIWAKIPHTDGNFHPSPLMGGFGMKHPPPQILIK |
| | NTPVPADPPTAFNKDKLNSFITQYSTGQVSVEIEWELQKENSKRWNPEIQ |
| | YTSNYYKSNNVEFAVNTEGVYSEPRPIGTRYLTRNL |
| SEQ ID | MAADGYLPDWLEDTLSEGIRQRWKLKPGPPPPEPAERHKDDSRGLVLPGY |
| NO: 88 | KYLGPFNGLDKGEPVNEADAAALEHDKAYDRQLDSGDNPYLKYNHADAEF |
| (AAV | QERLKEDTSFGGNLGRAVFQAKKRVLEPLGLVEEPVKTAPGKKRPVEHSP |
| hu.34 | VEPDSSSGTGKAGQQPARKRLNFGQTGDADSVPDPQPLGQPPAAPSGLGT |
| (AAS99283)) | NTMATGSGAPMADNNEGADGVGNSSGNWHCDSTWMGDRVITTSTRTWALP |
| | TYNNHLYKQISSQSGASNDNHYFGYSTPWGYFDFNRFHCHFSPRDWQRLI |
| | NNNWGFRPKRLNFKLFNIQVKEVTQNDGTTTIANNLTSTVQVFTDSEYQL |
| | PYVLGSAHQGCLPPFPADVFMVPQYGYLTLNNESQAVGRSSFYCLEYFPS |
| | QMLRTGNNFTFSYTFEDVPFHSSYAHSQSLGRLMNPLIDQYLYYLSRTNT |
| | PSGTTTQSRLQFSQAGASDIRDQSRNWLPGPCYRQQRVSKTSADNNNSEY |
| | SWTGATKYHLNGRDSLVNPGPAMASHKDDEEKFFPQSGVLIFGKQGSEKT |
| | NVDIEKVMITDEEEIRTTNPVATEQYGSVSTNLQRGNRQAATADVNTQGV |
| | LPGMVWQDRDVYLQGPIWAKIPHTDGHFHPSPLMGGFGLKHPPPQILIKN |
| | TPVPANPSTTFSAAKFASFITQYSTGQVSVEIEWELQKENSKRWNPEIQY |
| | TSNYNKSVNVDFTVDTNGVYSEPRPIGTRYLTRNL |
| SEQ ID | MAADGYLPDWLEDNLSEGIREWWDLKPGAPKPKANQQKQDDGRGLVLPGY |
| NO: 89 | KYLGPFNGLDKGEPVNAADAAALEHDKAYDQQLKAGDNPYLRYNHADAEF |
| (AAV | QERLQEDTSFGGNLGRAVFQAKKRVLEPLGLVEEAAKTAPGKKRPVEPSP |
| hu.37 | QRSPDSSTGIGKKGQQPAKKRLNFGQTGDSESVPDPQPIGEPPAGPSGLG |
| (AAS99285)) | SGTMAAGGGAPMADNNEGADGVGSSSGNWHCDSTWLGDRVITTSTRTWAL |
| | PTYNNHLYKQISNGTSGGSTNDNTYFGYSTPWGYFDFNRFHCHFSPRDWQ |
| | RLINNNWGFRPKRLSFKLFNIQVKEVTQNEGTKTIANNLTSTIQVFTDSE |
| | YQLPYVLGSAHQGCLPPFPADVFMIPQYGYLTLNNGSQAVGRSSFYCLEY |
| | FPSQMLRTGNNFEFSYTFEDVPFHSSYAHSQSLDRLMNPLIDQYLYYLSR |
| | TQSTGGTQGTQQLLFSQAGPANMSAQAKNWLPGPCYRQQRVSTTLSQNNN |
| | SNFAWTGATKYHLNGRDSLVNPGVAMATHKDDEERFFPSSGVLMFGKQGA |
| | GRDNVDYSSVMLTSEEEIKTTNPVATEQYGVVADNLQQTNTGPIVGNVNS |
| | QGALPGMVWQNRDVYLQGPIWAKIPHTDGNFHPSPLMGGFGLKHPPPQIL |
| | IKNTPVPADPPTTFSQAKLASFITQYSTGQVSVEIEWELQKENSKRWNPE |
| | IQYTSNYYKSTNVDFAVNTEGTYSEPRPIGTRYLTRNL |
| SEQ ID | MAADGYLPDWLEDNLSEGIREWWDLKPGAPKPKANQQKQDDGRGLVLPGY |
| NO: 90 | KYLGPFNGLDKGEPVNAADAAALEHDKAYDQQLKAGDNPYLRYNHADAEF |
| (AAV | QERLQEDTSFGGNLGRAVFQAKKRVLEPLGLVEEGAKTAPGKKRPVEPSP |
| hu.39 | QRSPDSSTGIGKKGQQPARKRLNFGRTGDSESVPDPQPIGEPPAAPSSVG |
| (AAS99286)) | SGTMAAGGGAPMADNNEGADGVGSSSGNWHCDSTWLGDRVITTSTRTWAL |
| | PTYNNHLYKQISNGTSGGSTNDNTYFGYSTPWGYLDENRFHCHFSPRDWQ |
| | RLINNNWGFRPKRLSFKLFNIQVKEVTQNEGTKTIANNLASTIQVFTDSE |
| | YQPPYVLGSAHQGCLPPFPADVFMIPQYGYLTLNNGSQAVGRSSFYCLEY |
| | FPSQMLRTGNNFSFSYTFEDVPFHSSYAHSQSLDRLMNPLIDQYLYYLSR |
| | TQSTGGTAGTQQLLFSRAGPSNMSAQARNWLPGPCYRQQRVSTTLSQNNN |
| | SNFAWTGATKYHLNGRDSLVNPGVAMATNKDDEDRFFPSSGILMFGKQGA |
| | GKDNVDYSNVMLTSEEEIKTTNPVATEQYGVVADNLQQQNTAPTVGAVNS |
| | QGALPGMVWQNRDVYLQGPIWAKIPHTDGNFHPSPLMGGFGLKHPPPQIL |
| | IKNTPVPADPPTAFNQAKLNSFIAQYSTGQVSVEIEWELQKENSKRWNPE |
| | IQYTSNYYKSTNADFAVNTEGVYSEPRPIGTRYLTRNL |
| SEQ ID | MAADGYLPDWLEDNLSEGIREWWDLKPGAPKPKANQQKQDDGRGLVLPGY |
| NO: 91 | KYLGPFNGLDKGEPVNAADAAALEHDKAYDQQLKAGDNPYLRYNHADAEF |
| (AAV | QERLQEDTSFGGNLGRAVFQAKKRVLEPLGPVEEAAKTAPGKKRPVEPPP |
| hu.41 | QRSPDSSTGIGKKGQQPAKKRLNFGQTGDSESVPDPQPIGEPPAGPSGLG |
| (AAS99289)) | SGTMAAGGGAPMADNNEGADGVGSSSGNWHCDSTWLGDRVITTSTRTWAL |
| | PTYNNHLYKQISNGTSGGSTNDNTYFGYSTPWGYFDFNRFHCHFSPRDWQ |
| | RLINNNWGFRPKRLSFKLFNIQVKEVTQNEGTKTVANNLTSTIQVFTDSE |
| | YQLPYVLGSAHQGCLPPFPADVFMIPQYGYLTLNNGSQAVGRSSFYCLEY |
| | FPSQMLRTGNNFEFSYTFEDVPFHSSYAHSQSLDRLMNPLIDQYLYYLSR |
| | TQSTGGTQGTQQLLFSQAGPANMSAQAKNWLPGPCYRQQRVSTTLSQNNN |
| | SNFAWTGATKYHLNGRDSLVNPGVAMATHKDDEERFFPSSGVLMFGKQGA |
| | GRDNVDYSSVMLTSEEEIKTTNPVATEQYGVVADNLQQTNTGPIVGNVNS |
| | QGALPGMVWQNRDVYLQGPIWAKIPHTDGNFHPSPLMGGFGLKHPPPQIL |
| | IKNTPVPADPPTTFSQAKLASFITQYSTGQVSVEIEWELQKENSKRWNPE |
| | IQYTSNYYKSTNVDFAVNTEGTYSEPRPIGTRYLTRNL |
| SEQ ID | MAADGYLPDWLEDNLSEGIREWWDLKPGAPKPKANQQKQDDGRGLVLPGY |
| NO: 92 | KYLGPFNGLDKGEPVNAADAAALEHDKAYDQQLKAGDNPYLRYNHADAEF |
| (AAV | QERLQEDTSFGGNLGRAVEQAKKRVLEPLGLVEBAAKTAPGKKRPVEPSP |
| hu.42 | QRSPDSSTGIGKKGQQPAKKRLNFGQTGDSESVPDPQPIGEPPAGPSGLG |
| (AAS99290)) | SGTMAAGGGAPMADNNEGADGVGSSSGNWHCDSTWLGDRVITTSTRTWAL |
| | PTYNNHLYKQISNGTSGGSTNDNTYFGYSTPWGYFDFNRFHCHFSPRDWQ |
| | RLINNNWGFRPKRLSFKLFNIQVKEVTQNEGTKTIANNLTSTIQVFTDSE |
| | YQLPYVLGSAHQGCLPPFPADVFMIPQYGYLTLNNGSQAVGRSSFYCLEY |
| | FPSQMLRTGNNFEFSYTFEDVPFHSSYAHSQSLDRLMNPLIDQYLYYLSR |
| | TQSTGGTQGTQQLLFSQAGPANMSAQAKNWLPGPCYRQQRVSTTLSQSNN |
| | SNFAWTGATKYHLNGRDSLVNPGVAMATHKDDEERFFPSSGVLMFGKQGA |
| | GRDNVDYSSVMLTSEEEIKTTNPVATEQYGVVADNLQQTNTGPIVGNVNS |
| | QGALPGMVWQNRDVYLQGPIWAKIPHTDGNFHPSPLMGGLGLKHPPPQIL |
| | IKNTPVPADPPTTFSQAKLASFITQYSTGQVSVEIEWELQKENSKRWNPE |
| | IQYTSNYYKSTNVDFAVNTEGTYSEPRPIGTRYLTRNL |
| SEQ ID | MAADGYLPDWLEDNLSEGIREWWDLKPGAPKPKANQQKQDDGRGLVLPGY |
| NO: 93 | KYLGPFNGLDKGEPVNAADAAALEHDKAYDQQLKAGDNPYPRYNHADAEF |
| (AAV | QERLQEDTPFGGNLGRAVFQAKKRVLEPLGLVEEAAKTAPGKKRPVEPSP |
| hu.43 | QRSPDSSTGIGKKGQQPAKKRLNFGQTGDSESVPDPQPIGEPPAGPSGLG |
| (AAS99291)) | SGTMAAGGGAPMADNNEGADGVGNASGNWHCDSTWLGDRVITTSTRTWAL |
| | PTYNNHLYKQISSASTGASNDNHYFGYSTPWGYFDFNRFHCHFSPRDWQR |
| | LINNNWGFRPKRLNFKLFNIQVKEVTTNDGVTTIANNLTSTVQVFSDSEY |
| | QLPYVLGSAHQGCLPPFPADVFMIPQYGYLTLNNGSQAVGRSSFYCLEYF |
| | PSQMLRTGNNFTFSYTFEEVPLHSSYAHSQSLDRLMNPLIVQYLYYLNRT |
| | QNQSGSAQNKDLLFSRGSPAGMSVQPKNWLPGPCYRQQRVSKTKTDNNNS |
| | NFTWTGASKYNLNGRESIINPGTAMASHKDDEDKFFPMSGVMIFGKESAG |
| | ASNTALDNVMITDEEEIKATNPVATERFGTVAVNFQSSSTDPATGDVHAM |
| | GALPGMVWQDRDVYLQGPIWAKIPHTDGHFHPSPLMGGFGLKNPPPQILI |
| | KNTPVPANPPAEFSATKFASFITQYSTGQVSVEIEWELQKENSKRWNPEV |
| | QYTSNYAKSASVDFTVDNNGLYTEPRPIGTRYLTRPL |
| SEQ ID | MAADGYLPDWLEDTLSEGIRQWWKLRPGPPPPKPAERHKDDSRGLVLPGY |
| NO: 94 | KYLGPFNGLDKGEPVNEADAAALEHDKAYDRQLDSGDNPYLKYNHADAEF |
| (AAV | QERLKEDTSFGGNLGRAVFQAKKRVLEPLGLVEEGAETAPGKKRPVEQSP |
| hu.44 | QGPDSSSGIGKTGQQPAKKRLNFGQTGDSESVPDPQPLGEPPATPAAVGP |
| (AAS99292)) | TTMASGGGAPMADNNEGADGVGNASGNWHCDSTWLGDRVITTSTRTWALP |
| | TYNNHLYKQISSASTGASNDNHYFGYSTPWGYFDFNRFHCHFSPRDWQRL |
| | INNNWGFRPKRLNFKLENIQVKEVTTNDGVTTIANNLTSTVQVFSDSEYQ |
| | LPYVLGSAHQGCLPPFPADVFMIPQYGYLTLNNGSQAVGRSSFYCLEYFP |
| | SQMLRTGNNFTFSYTFEEVPFHSSYAHSQSLDRLMNPLIDQYLYYPNRTQ |
| | NQSGSAQNKDLLFSRGSPAGMSVQPKNWLPGPCYRQQRVSKTKTDNNNSN |
| | FTWTGASKYNLNGRESIINPGTAMASHKDDEDKFFPMSGVMIFGKESAGA |
| | SNTALDNVMITDEEEIKATNPVATERFGTVAVNFQSSSTDPATGDVHAMG |
| | ALPGMVWQGRDVYLQGPIWAKIPHTDGHFHPSPLMGGFGLKNPPPQILIK |
| | NTPVPANPPAEFSATKFASFITQYSTGQVSVEIEWELQKENSKRWNPEVQ |
| | YTSNYAKSANVDFTVDNNGLYTEPRPIGTRYLTRPL |
| SEQ ID | MAADGYLPDWLEDTLSEGIRQWWKLKPGPPPPKPAERHRDDSRGLVLPGY |
| NO: 95 | KYLGPFNGLDKGEPVNEADAAALEHDKAYDRQLDSGDNPYLKYNHADAEF |
| (AAV | QERLKEDTSFGGNLGRAVFQAKKRVLEPLGLVEEPVKTAPGKKRPVEHSP |
| hu.45 | VEPDSSSGTGKAGQQPARKRLNFGQTGDADSVPDPQPLGQPPAAPSGLGT |
| (AAS99293)) | NTMATGSGAPMADNNEGADGVGNSSGNWHCDSTWMGDRVITTSTRTWALP |
| | TYNNHLYKQISSQSGASNDNHYFGYSTPWGYFDFNRFHCHFSPRDWQRLI |
| | NNNWGFRPKRLNFKLFNIQVKEVTQNDGTTTIANNLTSTVQVFTDSGYQL |
| | PYVLGSAHQGCLPPFPADVFMVPQYGYPTLNNGSQAVGRSSFYCLEYFPS |
| | QMLRTGNNFTFSYTFEDVPFHSSYAHSQSLDRLMNPLIDQYLYYLSTTNT |
| | PSGTTTQSRLQFSQAGASDIRDQSRNWLPGPCYRQQRVSKTSADNNNSEY |
| | SWTGATKYHLNGRDSLVNPGPAVASHKDDEEKFFPQSGVLIFGKQGSEKT |
| | NVDIEKVMITDEEEIRTINPVATEQYGSVSTNLQRGNRQAATADVNTQGV |
| | LPGMVWQDRDVYLQGPIWAKIPHTDGHFHPSPLMGGFGLKHPPPQILIKN |
| | TPVPANPSTTFSAAKFASFITQYSTGQVSVEIEWELQKENSKRWNPEIQY |
| | TSNYNKSVNVDFTVDINGVYSEPRPIGTRYLTRNL |
| SEQ ID | MAADGYLPDWLEDTLSEGIRQWWKLKPGPPPPKPAERHKDDSRGLVLPGY |
| NO: 96 | KYLGPFNGLDKGEPVNEADAAALEHDKAYDRQLDSGDNPYLKYNHADAEF |
| (AAV | QERLKEDTSFGGNLGRAVFQAKKRVLEPLGLVEEGAKTAPGKKRPVEQSP |
| hu.46 | QEPDSPSGIGKTGQQPAKKRLNFGQTGDSESVPDPQPLGEPPATPAAVGP |
| (AAS99294)) | TTMASGGGAPMADNNEGADGVGNASGNWHCDSTWLGDRVITTSTRTWALP |
| | TYNNHLYKQISSASTGASNDNHYFGYSTPWGYFDFNRFHCHFSPRDWQRL |
| | INNNWGFRPKRLNFKLENIQVKEVTTNDGVTTIANNLTSTVQVFSDSEYQ |
| | LPYVLGSAHQGRLPPFPADVFMIPQYGYLTLNNGSQAVGRSSSYCLEYFP |
| | SQMLRTGNNFTFSYTFEEVPLHSSCAHSQSLDRLMNPLIDQYLYYLNRTQ |
| | NQSGSAQNRDLLFSRGSPAGMSVQPKNWLPGPCYRQQRVSKTKTDNNNSN |
| | FTWTGASKYNLNGRESIINPGTAMASHKDDEDKFFPMSGVMIFGKESAGA |
| | SNTALDNVMITDEEEIKATNPVATERFGTVAVNFQSSSTDPATGDVHAMG |
| | ALPGMVWQDRDVYLQGPIWAKIPHTDGHFHPSPLMGGFGLKNPPPQILIK |
| | NTPVPANPPAEFSATKFASFITQYSAGQVSVEIEWELQKENSKRWNPEVQ |
| | YTSNYAKSANVDFTVDNNGLYTEPRPIGTRYLTRPL |
| SEQ ID | MAADGYLPDWLEDTLSEGIRQWWKLKPGPPPPKPAERHRDDSRGLVLPGY |
| NO: 97 | KYLGPFNGLDKGEPVNEADAAALEHDKAYDRQLDSGDNPYLKYNHADAEF |
| (AAV | QERLKEDTSFGGNLGRAVFQAKKRVLEPLGLVGEPVKTAPGKKRPVEHSP |
| hu.47 | VEPDSSSGTGKAGQQPARKRLNFGQTGDADSVPDPQPLGQPPAAPSGLGT |
| (AAS99295)) | NTMATGSGAPMADNNEGADGVGNSSGNWHCDSTWMGDRVITTSTRTWALP |
| | TYNNHLYKQISSQSGASNDSHYFGYSTPWGYFDFNRFHCHFSPRDWQRLI |
| | NNNWGFRPKRLNFKLFNIQVKEVTQNDGTTTIANNLTSTVQVFTDSEYQL |
| | PYVLGSAHQGCLPPFPADVFMVPQYGYLTLNNGSQAVGRSSFYCLEYFPS |
| | QMLRTGNNFTFSYTFEDVPFHSSYAHSQSLDRLMNPLIDQYLYYLSTTNT |
| | PSGTTTQSRLQFSQAGASDIRDQSRNWLPGPCYRQQRVSKTSADNNNSEY |
| | SWTGATKYHLNGRDSLVNPGPAMASHKDNEEKFFPQSGVLIFGKQGSEKT |
| | NVDIEKVMITDEEEIRTTNPVATEQYGSVSTNLQRGNRQAATADVNTQGV |
| | LPGMVWQDRDVYLQGPIWAKIPHTDGHFHPSPLMGGFGLKHPPPQILIKN |
| | TPVPANPSTTFSAAKFASFITQYSTGQVSVEIEWELQKENSKRWNPEIQY |
| | TSNYNKSVNVDFTVDINGVYSEPRPIGTRYLTRNL |
| SEQ ID | MAADGYLPDWLEDNLSEGIREWWDLKPGAPKPKANQQKQDDGRGLVLPGY |
| NO: 98 | KYLGPFNGLDKGEPVNAADAAALEHDKAYDQQLKAGDNPYLRYNHADAEF |
| (AAV | QERLQEDTSFGGNLGRAVFQAKKRVLEPLGLVEEGAKTAPGKKRPVEQSP |
| hu.48 | QEPDSSSGIGKTGQQPAKKRLNFGQTGDSESVPDPQPLGEPPATPAAVGP |
| (AAS99296)) | TTMASGGGAPMADNNEGADGVGNASGNWHCDSTWLGDRVITTSTRTWALP |
| | TYNNHLYKQISSTSTGASNDNHYFGYGTPWGYFDFNRFHCHFSPRDWQRL |
| | INNNWGFRPKRLNEKLFNIQVEEVTTNDGVTTIANNLTSTVQVFSDSEYQ |
| | LPYVLGSAHQGCLPPFPADVFMIPQYGYLTLNNGSQAVGRSSFYCLEYFP |
| | SQMLRTGNNFTFSYTFEEVPFHSSYAHSQSLDRLMNPLIDQYLYYLNRTQ |
| | NQSGSAQNKDLLFSRGSPAGMSVQPKNWLPGPCYRQQRVSKTKTDNNNSN |
| | FTWTGASKYNLNGRESIINPGTAVASHKDDEDKFFPMSGVMIFGKESAGA |
| | SSTALDNVMITDEEEIKATNPVATERFGTVAVNFQSSSTDPATGDVHAMG |
| | ALPGMVWQDRDVYLQGPIWAKIPHTDGHFHPSPLMGGFGLKNPPPQILIK |
| | NTPVPANPPAEFSATKFASFITQYSTGQVSVEIEWELQKENSKRWNPEVQ |
| | YTSNYAKSANVDFTVDNNGLYTEPRPIGTRYLTRPL |
| SEQ ID | MAADGYLPDWLEDTLSEGIRQWWKLKPGPPPPKPAERHKDDSRGLVLPGY |
| NO: 99 | KYLGPFNGLDKGEPVNEADAAALEHDKAYDRQLDSGDNPYLKYNHADAEF |
| (AAV | QERLKEDTSFGGNLGRAVFQAKKRVLEPLGLVGEPVKTAPGKKRPVEHSP |
| hu.51 | VEPDSSSGTGKAGQQPARKRLNFGQTGDADSVPDPQPLGQPPAAPSGLGT |
| (AAS99298)) | NTMATGSGAPMADNNEGADGVGNSSGNWHCDSTWMGDRVITTSTRTWALP |
| | TYNNHLYKQISSQSGASNDNHYFGYSTPWGYFDFNRFHCHFSPRDWQRLI |
| | NNNWGFRPKRLNFKLFNIQVKEVTQNDGTTTIANNLTSTVQVFTDSEYQL |
| | PYVLGSAHQGCLPPFPADVFMVPQYGYLTLNNGSQAVGRSSFYCLEYFPS |
| | QMLRTGNNFTFSYTFEDVPFHSGYAHSQSLDRLMNPLIDQYLYYLSTTNT |
| | PSGTTTQSRLQFSQAGASDIRDQSRNWLPGPCYRQQRVSKTSADNNNSEY |
| | SWTGATKYHLNGRDSLVNPGPAMASHKDNEEKFFPQSGVLIFGKQGSEKT |
| | NVDIEKVMITDEEEIRTTNPVATEQYGSVSTNLQRGNRQAATADVNTQGV |
| | LPGMVWQDRDVYLQGPIWAKIPHTDGHFHPSPLMGGFGLKHPPPQILIKN |
| | TPVPANPSTTFSAAKFASFITQYSTGQVSVEIEWELQKENSKRWNPEIQY |
| | TSNYNKSVNVDFTVDINGVYSEPRPIGTRYLTRNL |
| SEQ ID | MAADGYLPDWLEDTLSEGIRQWWKLKPGPPPPKPAERHKDDSRGLVLPGY |
| NO: | KYLGPFNGLDKGEPVNEADAAALEHDKAYDRQLDSGDNPYLKYNHADAEF |
| 100 | QERLKEDTSFGGNLGRAVFQAKKRVLEPLGLVGEPVKTAPGKKRPVEHSP |
| (AAV | VEPDSSSGTGKAGQQPARKRLNFGQTGDADSVPDPQPLGQPPAAPSGLGT |
| hu.52 | NTMATGSGAPMADNNEGADGVGNSSGNRHCDSTWMGDRVITTSTRTWALP |
| (AAS99299)) | TYNNHLYRQISSQSGASNDNHYFGYSTPWGYFDFNRFHCHFSPRDWQRLI |
| | NNNWGFRPKRLNFKLENIQVKEVTQNDGTTTIANNLTSTVQVFTDSEYQL |
| | PYVLGSAHQGCLPPFPADVFMVPQYGYLTLSNGSQAVGRSSFYCPEYFPS |
| | QMLRTGNNFTFSYTFEDVPFHSSYAHSQSLDRLMNPLIDQYLYYLSTTNT |
| | PSGTTTQSRLQFSQAGASDIRDQSRNWLPGPCYRQQRVSKTSADNNNSEY |
| | SWTGATKYHLNGRDSLVNPGPAMASHKDNEEKFFPQSGVLIFGKQGSEKT |
| | NVDIEKVMITDEEEIRTTNPVATEQYGSVSTNLQRGNRQAATADVNTQGV |
| | LPGMVWQDRDVYLQGPIWAKIPHTDGHFHPSPLMGGFGPKHPPPQILIKN |
| | TPVPANPSTTFSAAKFASFITQYSTGQVSVEIEWELQKENSKRWNPEIQY |
| | TSNYNKSVNVDFTVDINGVYSEPRPIGTRYLTRNL |
| SEQ ID | MAADGYLPDWLEDTLSEGIRQWWKLKPGPPPPKPAERHKDDSRGLVLPGY |
| NO: | KYLGPFNGLDKGEPVNEADAAALEHDKAYDRQLDSGDNPYLKYNHADAEF |
| 101 | QERLKEDTSFGGNLGRAVFQAKKRVLEPLGLVEEPVKTAPGKKRPVEHSP |
| (AAV | AEPDSSSGTGKAGQQPARKRLNFGQTGDADSVPDPQPLRQPPAAPTSLGS |
| hu.53 | TTMATGSGAPMADNNEGADGVGNSSGNWHCDSQWLGDRVITTSTRTWALP |
| (AAS99300)) | TYNNHLYKQISSQSGASNDNHYFGYSTPWGYFDFNRFHCHFSPRDWQRLI |
| | NNNWGFRPKRLNFKLFNIQVKEVTQNDGTTTIANNLTSTVQVFTDSEYQL |
| | PYVLGSAHQGCLPPFPADVFMVPQYGYLTLNNGSQAVGRSSFYCLEYFPS |
| | QMLRTGNNFQFSYTFEDVPFHSSYAHSQSLDRLMNPLIDQYLYYLNRTQT |
| | ASGTQQSRLLFSQAGPTSMSLQAKNWLPGPCYRQQRLSKQANDNNNSNFP |
| | WTGATKYYLNGRDSLVNPGPAMASHKDDEEKFFPMHGTLIFGKEGTNATN |
| | AELENVMITDEEEIRTTNPVATEQYGYVSNNLQNSNTAASTETVNHQGAL |
| | PGMVWQDRDVYLQGPIWAKIPHTDGHFHPSPLMGGFGLKHPPPQIMIKNT |
| | PVPANPPTNFSSAKFASFITQYSTGQVSVEIEWELQKENSKRWNPEIQYT |
| | SNYNKSVNVDFTVDINGVYSEPRPIGTRYLTRNL |
| SEQ ID | MAADGYLPDWLEDTLSEGIRQWWKLKPGPPPPKPAERHKDDSRGLVLPGY |
| NO: | KYLGPFNGLDKGEPVNEADAAALEHDKAYDRQLDSGDNPYLKYNHADAEF |
| 102 | QERLKEDTSFGGNLGRAVFQAKKRVLEPLGLVEEPVKTAPGKKRPVEHSP |
| (AAV | AEPDSSSGTGKAGQQPARKRLNFGQTGDADSVPDPQPLGQPPAAPTSLGS |
| hu.54 | TTMATGSGAPMADNNEGADGVGNSSGNWHCDSQWLGDRVITTSTRTWALP |
| (AAS99301)) | TYNNHLYKQISSQSGASNDNHYFGYSTPWGYFDFNRFHCRFSPRDWQRLI |
| | NNNWGFRPKRLNFKLFNIQVKEVTQNDGTTTIANNLTSTVQVFTDSEYQL |
| | PYVLGSAHQGCLPPFPADVFMVPQYGYLTLNNGSQAVGRSSFYCLEYFPS |
| | QMLRTGNNFQFSYTFEDVPFHSSYAHSQGLDRLMNPLIDQYLYYLNRTQT |
| | ASGTQQSRLLFSQAGPTSMSLQAKNWLPGPCYRQQRLSKQANDNNNSNFP |
| | WTGATKYHLNGGDSLVNPGPAMASHKDDEEKFFPMHGTLIFGKEGTNATN |
| | AELENVMITDEEEIRTTNPVATEQYGYVSNNLQNSNTAASTETVNHQGAL |
| | PGMVWQDRDVYLRGPIWAKIPHADGHFHPSPLMGGFGLKHPPPQIMIKNT |
| | PVPANPPTNFSSAKFASFITQYSTGQVSVEIEWELQKENSKRWNPEIQYT |
| | SNYNKSVNVDFTVDINGVYSEPRPIGTRYLTRNL |
| SEQ ID | MAADGYLPDWLEDTLSEGIRQWWKLKPGPPPPKPAERHKDDSRGLVLPGY |
| NO: | KYLGPFNGLDKGEPVNEADAAALEHDKAYDRQLDSGDNPYLKYNHADAEF |
| 103 | QERLKEDTSFGGNLGRAVFQAKKRVLEPLGLVEEPVKTAPGKKRPVEHSP |
| (AAV | AEPDSSSGTGKAGQQPARKRLNFGQTGDADSVPDPQPLGQPPAAPTSLGS |
| hu.55 | TTMATGSGAPMADNNEGADGVGNSSGNWHCDSQWLGDRVITTSTRTWALP |
| (AAS99302)) | TYNNHLYKQISSQSGASNDNHYFGYSTPWGYFDFNRFHCHFSPRDWQRLI |
| | NNNWGFRPKRLNFKLFNIQVKEVTQNDGTTTIANNLTSTVQVFTDSEYQL |
| | PYVLGSAHQGCLPPFPADVFMVPQYGYLTLNNGSQAVGRSSFYCLECFPS |
| | QMLRTGNNFQFSYTFEDVPFHSSYAHSQSLDRLMNPLIDQYLYYLNRTQT |
| | ASGTQQSRLLFSQAGPTSMSLQAKNWLPGPCYRQQRLSKQANDNNNSNFP |
| | WTGATKYHLNGRDSLVNPGPAMASHKDDEEKFFPMHGTLIFGKEGTNATN |
| | AELENVMITDEEEIRTTNPVATEQYGYVSNNLQNSNTAASTETVNHQGAL |
| | PGMVWQDRDVYLQGPIWAKIPHTDGHFHPSPLMGGFGLKHPPPQIMIKNT |
| | PVPANPPTNFSSAKFASFITQYSTGQVSVEIEWELQKENSKRWNPEIQYT |
| | SNYNKSVNVDFTVDINGVYSEPRPIGTRYLTRNL |
| SEQ ID | MAADGYLPDWLEDTLSEGIRQWWKLKPGPPPPKPAERHKDDSRGLVLPGY |
| NO: | KYLGPFNGLDKGEPVNEADAAALEHDKAYDRQLDSGDNPYLKYNHADAEF |
| 104 | QERLKEDTSFGGNLGRAVFQAKKRVLEPLGLVEEPVKTAPGKKRPVEHSP |
| (AAV | VEPDSSSGTGKAGNQPARKRLNFGQTGDADSVPDPQPLGQPPASPSGLGT |
| hu.56 | NTMATGSGAPMADNNEGADGVGNSSGNWHCDSTWMGDRVVTTSTRTWALP |
| (AAS99303)) | TYNNHLYKQISSQSGASNDNHYFGYSTPWGYFDFNRFHCHFSPRDWQRLI |
| | NNNWGFRPKRLNFKLFNIQVKEVTQNDGTTTIANNLTSTVQVFTDLEYQL |
| | PYVLGSAHQGCLPPFPADVFMVPQYGYLTLNNGSQAVGRSSFYCLEYFPS |
| | QMLRTGNNFTFSYTFEDVPFHSSYAHSQSLDRLMNPLIDQYLYYLSRTNT |
| | PSGTTTQSRLQFSQAGASDIRDQSRNWLPGPCYRQQRVSKTAADNNNSEY |
| | SWTGATKYHLNGRDSLVNPGPAMASHKDDEEKFFPQSGVLIFGKQGSEKT |
| | NVDIEKVMITDEEEIRTTNPVATEQYGSVSTNLQSGNTQAATSDVNTQGV |
| | LPGMVWQDRDVYLQGPIWAKIPHTDGHFHPSPLMGGFGLKHPPPQILIKN |
| | TPVPANPSTTFSAAKFASFITQYSTGQVSVEIEWELQKENSKRWNPEIQY |
| | TSNYNKSVNVDFTVDTNGVYSEPRPIGTRYLTRNL |
| SEQ ID | MAADGYLPDWLEDTLSEGIRQWWKLKPGPPPKPAERHKDDSRGLVLPGYK |
| NO: | YLGPFNGLDKGEPVNEADAAALEHDKAYDRQLDSGDNPYLKYNHADAEFQ |
| 105 | ERLKEDTSFGGNLGRAVFQAKKRVLEPLGLVEEPVKTAPGKKRPVEHSPV |
| (AAV | EPDSSSGTGKAGNQPARKRLNFGQTGDADSVPDPQPLGQPPAAPSGLGTN |
| hu.57 | TMATGSGAPMADNNEGADGVGNSSGDWHCDSTWMGDRVITTSTRTWALPT |
| (AAS99304)) | YNNHLYKQISSQSGASNDNHYFGYSTPWGYFDFNRFHCHFSPRDWQRLIN |
| | NNWGFRPKRLNLKLFNIQVKEVTQNDGTTTIANNLTSTVQVFTDLEYQLP |
| | YVLGSAHQGCLPPFPADVFMVPQYGYLTLNNGSQAVGRSSFYCLEYFPSQ |
| | MLRTGNNFTFSYTFEDVPFHSSYAHSQSLDRLMNPLIDQYLYYLSRTNTP |
| | SGTTTQSRLQFSQAGASDIRDQSRNWLPGPCYRQQRVSKTAADNNNGEYS |
| | WTGATKYHLNGRDSLVNPGPAMASHKDDEEKFFPQSGVLIFGKQGSEKTN |
| | VDIEKVMITDEEEIRTTNPVATEQYGSVSTNLQSGNTRAATSDVNTQGVL |
| | PGMVWQDRDVYLQGPIWAKIPHTDGHFHPSPLMGGFGLKHPPPQILIKNT |
| | PVPANPSTTFSAAKFASFITQYSTGQVSVEIEWELQKENSKRWNPEIQYT |
| | SNYNKSVNVDFTVDINGVYSEPRPIGTRYLTRNL |
| SEQ ID | MAADGYLPDWLEDTLSEGIRQWWKLKPGPPPPKPAERHKDDSRGLVLPGY |
| NO: | KYLGPFNGLDKGEPVNEADAAALEHDKAYDRQLDSGDNPYLKYNHADAEF |
| 106 | QERLKEDTSFGGNLGRAVFQAKKRVLEPLGLVEEPVKTAPGKKRPVEHSP |
| (AAV | VEPDSSSGTGKAGQQPARKRLNFGQTGDADSVPDPQPLGQPPAAPSGLGS |
| hu.60 | TTMATGSGAPMADNNEGADGVGNSSGNWHCDSQWLGDRVITTSTRTWALP |
| (AAS99307)) | TYNNHLYKQISSQSGASNDNHYFGYSTPWGYFDFNRFHCHFSPRDWQRLI |
| | NNNWGFRPKRLNFKLFNIQVKEVTQNDGTTTIANNLTSTVQVFTDSEYQL |
| | PYVLGSAHQGCLPPFPADVFMVPQYGYLTLNNGSQAVGRSSFYCLEYFPS |
| | QMLRTGNNFQFSYTFEDVPFHSSYAHSQSLDRLMNPLVDQYLYYLNKTQT |
| | NSGTLQQSRLLFSQAGPTNMSLQAKNWLPGPCYRQQRLSKQANDNNNSNF |
| | PWTAATKYHLNGRDSLVNPGPAMASHKDDEEKFFPMHGTLIFGKQGTNAN |
| | DADLENVMITDEEEIRTTNPVATEQYGTVSNNLQNSNTGPTTGTVNHQGA |
| | LPGMVWQDRDVYLQGPIWAKIPHTDGHFHPSPLMGGFGLKHPPPQIMIKN |
| | TPVPANPPTNFSSAKFASFITQYSTGQVSVEIEWELQKENSKRWNPEIQY |
| | TSNYNKSVNVDFTVDINGVYSEPRPIGTRYLTRNL |
| SEQ ID | MAADGYLPDWLEDTLSEGIRQWWKLKPGPPPPKPAERHKDDSRGLVLPGY |
| NO: | KYLGPFNGLDKGEPVNEADAAALEHDKAYDRQLDSGDNPYLKYNHADAEF |
| 107 | QERLKEDTSFGGNLGRAVFQAKKRVLEPLGLVEEPVKTAPGKKRPVEHPP |
| (AAV | VEPDSSSGTGKAGQQPARKRLNFGQTGDADSVPDPQPLGQPPAAPSGLGS |
| hu.61 | TTMATGSGAPMADNNEGADGVGNSSGNWHCDSQWLGDRVITTSTRTWALP |
| (AAS99308)) | TYNNHLYKQISSQSGASNDNHYFGYSTPWGYFDFNRFHCHFSPRDWQRLI |
| | NNNWGFRPKRLNFKLFNIQVKEVTQNDGTTTIANNLTSTVQVFTDSEYQL |
| | PYVLGSAHQGCLPPFPADVFMVPQYGYLTLNNGSQAVGRSSFYCLEYFPS |
| | QMLRTGNNFQFSYTFEDVPFHSSYAHSQSLDRLMNPLIDQYLYYLNKTQT |
| | NSGTLQQSRLLFSQAGPTNMSLQAKNRLPGPCYRQQRLSKQANDNNNSNF |
| | PWTAATKYHLNGRDSLVNPGPAMASHKDDEEKFFPMHGTLIFGKQGTNAN |
| | DADLENVMITDEEEIRTTNPVATEQYGTVSNNLQNSNTGPTTGTVNHQGA |
| | LPGMVWQDRDVYLQGPIWAKIPHTDGHFHPSPLVGGFGLKHPPPQIMIKN |
| | TPVPANPPTNFSSAKFASFITQYSTGQVSVEIEWELQKENSKRWNPEIQY |
| | TSNYNKSVNVDFTVDINGVYSEPRPIGTRYLTRNL |
| SEQ ID | MAADGYLPDWLEDTLSEGIRQWWKLKPGPPPPKPAERHKDDSRGLVLPGY |
| NO: | KYLGPFNGLDKGEPVNEADAAALEHDKAYDRQLDSGDNPYPKYNHADAEF |
| 108 | QERLKEDTSFGGNLGRAVFQAKKRVLEPLGLVEEPVKTAPGKKRPVEHSP |
| (AAV | AEPDSSSGTGKAGQQPARKRLNFGQTGDADSVPDPQPLGQPPAAPSGLGT |
| hu.63 | NTMATGSGAPMADNNEGADGVGNSSGNWHCDSTWMGDRVITTSTRTWALP |
| (AAS99309)) | TYNNHLYKQISSQSGASNDNHYFGYSTPWGYFDFNRFHCHFSPRDWQRLI |
| | NNNWGFRPKRLNFKLFNIQVKEVTQNDGTTTIANNLTSTVQVFTDSEYQL |
| | PYVLGSAHQGCLPPFPADVFMVPQYGYLTLNNGSQAVGRSSFYCLEYFPS |
| | QMLRTGNNFTFSYTFEDVPFHSSYAHSQSLDRLMNPLIDQYLYYLSRTNT |
| | PSGTTTQSRLQFSQAGASDIRDQSRNWLPGPCYRQQRVSKTSADNNNSEY |
| | SWTGATKYHLNGRDSLVNPGPAMASHKDDEEKFFPQSGVLIFGKQDSGKT |
| | NVDIEKVMITDEEEIRTTNPVATEQYGSVSTNLQSGNTQAATSDVNTQGV |
| | LPGMVWQDRDVYLQGPIWAKIPHTDGHFHPSPLMGGFGLKHPPPQILIKN |
| | TPVPANPSTTFSAAKFASFITQYSTGQVSVEIEWELQKENSKRWNPEIQY |
| | TSNYNKSVNVDFTVDTNGVYSEPRPIGTRYLTRNL |
| SEQ ID | MAADGYLPDWLEDNLSEGIREWWDLKPGAPKPKANQQKQDDGRGLVLPGY |
| NO: | KYLGPFNGLDKGEPVNAADAAALEHDKAYDQQLKAGDNPYLRYNHADAEF |
| 109 | QERLQEDTSFGGNLGRAVFQAKKRVLEPLGLVEEAAKTAPGKKRPVEPSP |
| (AAV | QRSPDSSAGIGKKGQQPAKKRLNFGQTGDSESVPDPQPIGEPPAGPSGLG |
| hu.66 | SGTMAAGGGAPMADNNEGADGVGSSSGNWHCDSTWLGDRVITTSTRTWAL |
| (AAS99311)) | PTYNNHLYKQISNGTSGGSTNDNTYFGYSTPWGYFDFNRFHCHFSPRDWQ |
| | RLINNNWGFRPKRLSFKLFNIQVKEVTQNEGTETIANNLTSTIQVFTDSE |
| | YQLPYVLGSAHQGCLPPFPADVFMIPQYGYLTLNNGSQAVGRSSFYCLEY |
| | FPSQMLRTGNNFEFSYTFEDVPFHSSCAHSQSSDRLMNPLIDQYLYYLSR |
| | TRSTGGTQGTQQLLFSQAGPANMSAQAKNWLPGPCYRQQRVSTTLSQNNN |
| | SNFAWTGATKYHLNGRDSLVNPGVAMATHKDDEERFFPSSGVLMFGKQGA |
| | GRDNVDYSSVMLTSEEEIKTTNPVATEQYGVVADNLQQTNTGPIVGNVNS |
| | QGALPGMVWQNRDVYLQGPIWAKIPHTDGNFHPSPLMGGFGLKHPPPQIL |
| | IKNTPVPADPPTTFSQAKLASFITQYSTGQVSVEIEWELQKENSKRWNPE |
| | IQYTSNYYKSTNVDFAVNTEGTYSEPRPIGTRYLTRNL |
| SEQ ID | MAADGYLPDWLEDNLSEGIREWWDLKPGAPKPKANQQKQDDGRGLVLLGY |
| NO: | KYLGPFNGLDKGEPVNAADAAALEHDKAYDQQLKAGDNPYLRYNHADAEF |
| 110 | QERLQEDTSFGGNLGRAVFQAKKRVLEPLGLVEBAAKTAPGKKRPVEPSP |
| (AAV | QRSPDSSTGIGKKGQQPAKKRLNFGQTGDSESVPDPQPIGEPPAGPSGLG |
| hu.67 | SGTMAAGGGAPMADNNEGADGVGSSSGNWHCDSTWLGDRVITTSTRTWAL |
| (AAS99312)) | PTYNNHLYKQISNGTSGGSTNDNTYFGYSTPWGYFDFNRFHCHFSPRDWQ |
| | RLINNNWGFRPKRLSFKLFNIQVKEVTQNEGTKTIANNLTSTIQVFTDSE |
| | YQLPYVLGSAHQGCLPPFPADVFMIPQYGYLTLNNGSQAVGRSSFYCLEY |
| | FPSQMLRTGNNFEFSYTFEDVPFHSGYAHSQSLDRLMNPLIDQYLYYLSR |
| | TQSTGGTQGTQQLLFSQAGPANMSAQAKNWLPGPCYRQQRVSTTLSQNNN |
| | SNFAWTGATKYHLNGRDSLVNPGVAMATHKDDEERFFPSSGVLMFGKQGA |
| | GRDNVDYSSVMLTSEEEIKTTNPVATEQYGVVADNLQQTNTGPIVGNVNS |
| | QGALPGMVWQNRDVYLQGPIWAKIPHTDGNFHPSPLMGGFGLKHPPPQIL |
| | IKNTPVPADPPTTFSQAKLASFITQYSTGQVSVEIEWELQKENSKRWNPE |
| | IQYTSNYYKSTNVDFAVNTEGTYSEPRPIGTRYLTRNL |
| SEQ ID | MAADGYLPDWLEDNLSEGIREWWDLKPGAPKPKANQQKQDDGRGLVLPGY |
| NO: | KYLGPFNGLDKGEPVNAADAAALEHDKAYDQQLKAGDNPYLRYNHADAEF |
| 111 | QERLQEDTSFGGNLGRAVFQAKKRVLEPLGLVEEGAKTAPGKKRPVEPSP |
| (AAV | QRSPDSSTGIGKKGQQPAKKRLNFGQTGDSESVPDPQPIGEPPAGPSGLG |
| rh.10 | SGTMAAGGGAPMADNNEGADGVGSSSGNWHCDSTWLGDRVITTSTRTWAL |
| (AAO88201)) | PTYNNHLYKQISNGTSGGSTNDNTYFGYSTPWGYFDFNRFHCHFSPRDWQ |
| | RLINNNWGFRPKRLNFKLFNIQVKEVTQNEGTKTIANNLTSTIQVFTDSE |
| | YQLPYVLGSAHQGCLPPFPADVFMIPQYGYLTLNNGSQAVGRSSFYCLEY |
| | FPSQMLRTGNNFEFSYQFEDVPFHSSYAHSQSLDRLMNPLIDQYLYYLSR |
| | TQSTGGTAGTQQLLFSQAGPNNMSAQAKNWLPGPCYRQQRVSTTLSQNNN |
| | SNFAWTGATKYHLNGRDSLVNPGVAMATHKDDEERFFPSSGVLMFGKQGA |
| | GKDNVDYSSVMLTSEEEIKTTNPVATEQYGVVADNLQQQNAAPIVGAVNS |
| | QGALPGMVWQNRDVYLQGPIWAKIPHTDGNFHPSPLMGGFGLKHPPPQIL |
| | IKNTPVPADPPTTFSQAKLASFITQYSTGQVSVEIEWELQKENSKRWNPE |
| | IQYTSNYYKSTNVDFAVNTDGTYSEPRPIGTRYLTRNL |
| SEQ ID | MAADGYLPDWLEDNLSEGIREWWDLKPGAPKPKANQQKQDDGRGLVLPGY |
| NO: | KYLGPFNGLDKGEPVNEADAAALEHDKAYDKQLEQGDNPYLKYNHADAEF |
| 112 | QERLQEDTSFGGNLGRAVFQAKKRVLEPLGLVEEGAKTAPGKKRPIESPD |
| (AAV | SSTGIGKKGQQPAKKKLNFGQTGDSESVPDPQPLGEPPAAPSGLGSGTMA |
| rh.13 | AGGGAPMADNNEGADGVGNASGNWHCDSTWLGDRVITTSTRTWALPTYNN |
| (AAO88199)) | HLYKQISSQSGATNDNHFFGYSTPWGYFDFNRFHCHFSPRDWQRLINNNW |
| | GFRPRKLRFKLFNIQVKEVTTNDGVTTIANNLTSTIQVFSDSEYQLPYVL |
| | GSAHQGCLPPFPADVEMIPQYGYLTLNNGSQSVGRSSFYCLEYFPSQMLR |
| | TGNNFEFSYTFEEVPFHSSYAHSQSLDRLMNPLIDQYLYYLARTQSTTGS |
| | TRELQFHQAGPNTMAEQSKNWLPGPCYRQQRLSKNIDSNNNSNFAWTGAT |
| | KYHLNGRNSLTNPGVAMATNKDDEDQFFPINGVLVFGETGAANKTTLENV |
| | LMTSEEEIKTTNPVATEEYGVVSSNLQSSTAGPQTQTVNSQGALPGMVWQ |
| | NRDVYLQGPIWAKIPHTDGNFHPSPLMGGFGLKHPPPQILIKNTPVPANP |
| | PEVFTPAKFASFITQYSTGQVSVEIEWELQKENSKRWNPEIQYTSNYAKS |
| | NNVEFAVNNEGVYTEPRPIGTRYLTRNL |
| SEQ ID | MAADGYLPDWLEDNLSEGIREWWDLKPGAPKPKANQQKQDDGRGLVLPGY |
| NO: | KYLGPFNGLDKGEPVNEADAAALEHDKAYDKQLEQGDNPYLKYNHADAEF |
| 113 | QERLQEDTSFGGNLGRAVFQAKKRVLEPLGLVEEGAKTAPGKKRPVEPSP |
| (AAV | QRSPDSSTGIGKTGQQPAKKRLNFGQTGDSESVPDPQPIGEPPAGPSGLG |
| rh.19 | SGTMAAGGGAPMADNNEGADGVGSSSGNWHCDSTWLGDRVITTSTRTWAL |
| (AAO88194)) | PTYNNHLYKQISNGTSGGSTNDNTYFGYSTPWGYFDFNRFHCHFSPRDWQ |
| | RLINNNWGFRPRKLRFKLFNIQVKEVTTDDGVTTIANNLTSTIQVFSDSE |
| | YQLPYVLGSAHQGCLPPFPADVFMIPQYGYLTLNNGSQSVGRSSFYCLEY |
| | FPSQMLRTGNNFEFSYTFEEVPFHSSYAHSQSLDRLMNPLIDQYLYYLAR |
| | TQSTTGSTRELQFHQAGPNTMAEQSKNWLPGPCYRQQRLSKNIDSNNNSN |
| | FAWTGATKYHLNGRNSLTNPGVAMATNKDDEDQFFPINGVLVFGKTGAAN |
| | KTTLENVLMTSEEEIKTTNPVATEEYGVVSSNLQSSTAGPQTQTVNSQGA |
| | LPGMVWQNRDVYLQGPIWAKIPHTDGNFHPSPLMDGFGLKHPPPQILIKN |
| | TPVPANPPEVFTPAKFASFITQYSTGQVSVEIEWELQKENSKRWNPEIQY |
| | TSNYAKSNNVEFAVNNEGVYTEPRPIGTRYLTRNL |
| SEQ ID | MAADGYLPDWLEDNLSEGIREWWDLKPGAPKPKANQQKQDDGRGLVLPGY |
| NO: | KYLGPFNGLDKGEPVNAADAAALEHDKAYDQQLKAGDNPYLRYNHADAEF |
| 114 | QERLQEDTSFGGNLGRAVFQAKKRVLEPLGLVEEGAKTAPGKKRPIESPD |
| (AAV | SSTGIGKKGQQPAKKKLNFGQTGDSESVPDPQPIGEPPAGPSGLGSGTMA |
| rh.22 | AGGGAPMADNNEGADGVGNASGNWHCDSTWLGDRVITTSTRTWALPTYNN |
| (AAO88192)) | HLYKQISSQSGATNDNHFFGYSTPWGYFDFNRFHCHFSPRDWQRLINNNW |
| | GFRPRKLRFKLFNIQVKEVTTNDGVTTIANNLTSTIQVESDSEYQLPYVL |
| | GSAHQGCLPPFPADVFMIPQYGYLTLNNGSQSVGRSSFYCLEYFPSQMLR |
| | TGNNFEFSYTFEEVPFHSSYAHSQSLDRLMNPLIDQYLYYLARTQSTTGS |
| | TRELQFHQAGPNTMAEQSKNWLPGPCYRRQRLSKDIDSNNNSNFAWTGAT |
| | KYHLNGRNSLTNPGVAMATNKDDEDQFFPINGVLVFGKTGAANKTTLENV |
| | LMTSEEEIKTTNPVATEEYGVVSSNLQSSTAGPQTQTVNSQGALPGMVWQ |
| | NRDVYLQGPIWAKIPHTDGNFHPSPLMGGFGLKHPPPQILIKNTPVPANP |
| | PEVFTPAKFASFITQYSTGQVSVEIEWELQKENSKRWNPEIQYTSNYAKS |
| | NNVEFAVNNEGVYTEPRPIGTRYLTRNL |
| SEQ ID | MAADGYLPDWLEDNLSEGIREWWDLKPGAPKPKANQQKQDDGRGLVLPGY |
| NO: | KYLGPFNGLDKGEPVNEADAAALEHDKAYDKQLEQGDNPYLKYNHADAEF |
| 115 | QERLQEDTSFGGNLGRAVFQAKKRVLEPLGLVEEGAKTAPGKKRPVEPSP |
| (AAV | QRSPDSSTGIGKTGQQPAKKRLNFGQTGDSESVPDPQPIGEPPAGPSGLG |
| rh.23 | SGTMAAGGGAPMADNNEGADGVGSSSGNWHCDSTWLGDRVITTSTRTWAL |
| (AAO88191)) | PTYNNHLYKQISNGTSGGSTNDNTYFGYSTPWGYFDFNRFHCHFSPRDWQ |
| | RLINNNWGFRPKRLNFKLFNIQVKEVTQNEGTKTIANNLTSTIQVFTDSE |
| | YQLPYVLGSAHQGCLPPFPADVFMIPQYGYLTLNNGSQAVGRSSFYCLEY |
| | FPSQMLRTGNNFEFSYQFEDVPFHSSYAHSQSLDRLTNPLIDQYLYYLAR |
| | TQSTTGSTRGLQFHQAGPNTMAEQSKNWLPGPCYRQQRLSKNIDSNNNSN |
| | FAWTGATKYHLNGRNSLTNPGVAMATNKDDEDQFFPINGVLVFGKTGAAN |
| | KTTLENVLMTSEEEIKTTNPVATEEYGVVSSNLQSSTAGPQTQTVNSQGA |
| | LPGMVWQNRDVYLQGPIWAKIPHTDGNFHPSPLMGGFGLKHPPPQILIKY |
| | TSNYYKSTNVDFAVNTEGTYSEPRPIGTRYLTRNL |
| SEQ ID | MAADGYLPDWLEDNLSEGIREWWDLKPGAPKPKANQQKQDDGRGLVLPGY |
| NO: | KYLGPFNGLDKGEPVNAADAAALEHDKAYDQQLKAGDNPYLRYNHADAEF |
| 116 | QERLQEDTSFGGNLGRAVFQAKKRVLEPLGLVEEGAKTAPGKKRPIESPD |
| (AAV | SSTGIGKKGQQPAKKKLNFGQTGDSESVPDPQPIGEPPAGPSGLGSGTMA |
| rh.24 | AGGGAPMADNNEGADGVGSSSGNWHCDSTWLGDRVITTSTRTWALPTYNN |
| (AAO88190)) | HLYKQISNGTSGGSTNDNTYFGYSTPWGYFDFNRFHCHFSPRDWQRLINN |
| | NWGFRPKRLNFKLFNIQVKEVTQNEGTKTIANNLTSTIQVFTDSEYQLPY |
| | VLGSAHQGCLPPFPADVFMIPQYGYLTLNNGSQAVGRSSFYCLEYFPSQM |
| | LRTGNNFEFSYQFEDVPFHSSYAHSQSLDRLMNPLIDQYLYYLSRTQSTG |
| | GTAGTQQLLFSQAGPNNMSAQAKNWLPGPCYRQQRVSTTVSQNNNSNFAW |
| | TGATKYHLNGRDSLVNPGVAMATHKGDEERFFPSSGVLMFGKQGAGKDNV |
| | DYSSVMLTSEEEIKTTNPVATEQYGVVADNLQQQNAAPIVGAVNSQGALP |
| | GMVWQNRDVYLQGPIWAKIPHTDGNFHPSPLMGGFGLKHPPPQILIKNTP |
| | VPADPPTTFSQAKLASFITQYSTGQVSVEIEWELQKENSKRWNPEIQYTS |
| | NYYKSTNVDFAVNTEGTYSEPRPIGTRYLTRSL |
| SEQ ID | MAADGYLPDWLEDNLSEGIREWWDLKPGAPKPKANQQKQDDGRGLVLPGY |
| NO: | KYLGPFNGLDKGEPVNAADAAALEHDKAYDQQLKAGDNPYLRYNHADAEF |
| 117 | QERLQEDTSFGGNLGRAVFQAKKRVLEPLGLVEEGAKTAPGKKRPIDSPD |
| (AAV | SSTGIGKKGQQPAKKKLNFGQTGDSESVPDPQPLGEPPAAPSSVGSGTMA |
| rh.35 | AGGGAPMADNNEGADGVGNASGNWHCDSTWLGDRVITTSTRTWALPTYNN |
| (AAO88186)) | HLYKQISSSSSGATNDNHYFGYSTPWGYFDFNRFHCHFSPRDWQRLINNN |
| | WGFRPKKLRFKLFNIQVKEVTTNDGVTTIANNLTSTVQVFSDSEYQLPYV |
| | LGSAHQGCLPPFPADVFMIPQYGYLTLNNGSQSVGRSSFYCLEYFPSQML |
| | RTGNNFEFSYSFEDVPFHSSYAHSQSLDRLMNPLIDQYLYYLARTQSTTG |
| | STRELQFHQAGPNTMAEQSKNWLPGPCYRQQGLSKNLDENNNSNFAWTAA |
| | TKYHLNGRNSLTNPGIPMATNKDDEDQFFPINGVLVFGKTGAANKTTLEN |
| | VLMTSEEEIKTTNPVATEBYGVVSSNLQPSTAGPQSQTINSQGALPGMVW |
| | QNRDVYLQGPIWAKIPHTDGNFHPSPLMGGFGLKHPPPQILIKNTPVPAN |
| | PPEVFTPAKFASFITQYSTGQVSVEIEWELQKENSKRWNPEIQYTSNYAK |
| | SNNVEFAVNPDGVYTEPRPIGTRYLPRNL |
| SEQ ID | MAADGYLPDWLEDNLSEGIREWWDLKPGAPKPKANQQKQDDGRGLVLPGY |
| NO: | KYLGPFNGLDKGEPVNAADAAALEHDKAYDQQLEAGDNPYLRYNHADAEF |
| 118 | QERLQEDTSFGGNLGRAVFQAKKRVLEPLGLVEEGAKTAPGKKRPVEQSP |
| (AAV | QEPDSSSGIGKKGQQPARKRLNFGQTGDSESVPDPQPLGEPPAAPSGVGP |
| rh.43 | NTMAAGGGAPMADNNEGADGVGSSSGNWHCDSTWLGDRVITTSTRTWALP |
| (AAS99245)) | TYNNHLYKQISNGTSGGATNDNTYFGYSTPWGYFDFNRFHCHFSPRDWQR |
| | LINNNWGFRPKRLSFKLFNIQVKEVTQNEGTKTIANNLTSTIQVFTDSEY |
| | QLPYVLGSAHQGCLPPFPADVFMIPQYGYLTLNNGSQAVGRSSFYCLEYF |
| | PSQMLRTGNNFQFTYTFEDVPFHSSYAHSQSLDRLMNPLIDQYLYYLSRT |
| | QTTGGTANTQTLGFSQGGPNTMANQAKNWLPGPCYRQQRVSTTTGQNNNS |
| | NFAWTAGTKYHLNGRNSLANPGIAMATHKDDEERFFPVTGSCFWQQNAAR |
| | DNADYSDVMLTSEEEIKTTNPVATEEYGIVADNLQQQNTAPQIGTVNSQG |
| | ALPGMVWQNRDVYLQGPIWAKIPHTDGNFHPSPLMGGFGLKHPPPQILIK |
| | NTPVPADPPTTFNQSKLNSFITQYSTGQVSVEIEWELQKENSKRWNPEIQ |
| | YTSNYYKSTSVDFAVNTEGVYSEPRPIGTRYLTRNL |
| SEQ ID | MAADGYLPDWLEDNLSEGIREWWDLKPGAPKPKANQQKQDDGRGLVLPGY |
| NO: | KYLGPFNGLDKGEPVNAADAAALEHDKAYDQQLKAGDNPYLRYNHADAEF |
| 119 | QERLQEDTSFGGNLGRAVFQAKKRVLEPLGLVEBAAKTAPGKKRPVEPSP |
| (AAV | QRSPDSSTGIGKKGQQPARKRLNFGQTGDSESVPDPQPIGEPPAGPSGLG |
| rh.48 | SGTMAAGGGAPMADNNKGADGVGNASGNWHCDSTWLGDRVITTSTRTWAL |
| (AAS99246)) | PTYNNHLYKQISSQSAGSTNDNVYFGYSTPWGYFDFNRFHCHFSPRDWQR |
| | LINSNWGFRPKKLNEKLFNIQVKEVTTNDGVTTIANNLTSTVQVFSDSEY |
| | QLPYVLGSAHQGCLPPFPADVFMIPQYGYLTLNNGSQSVGRSSFYCLEYF |
| | PSQMLRTGNNFTFSYTFEDVPFHSSYAHSQSLDRLMNPLIDQYLYYLART |
| | QSNAGGTAGNRELQFYQGGPTTMAEQAKNWLPGPCFRQQRVSKTLDQNNN |
| | SNFAWTGATKYHLNGRNSLVNPGVAMATHKDDEERFFPSSGVLIFGKTGA |
| | ANKTTLENVLMTNEEEIRPTNPVATEEYGTVSSNLQAANTAAQTQVVNNQ |
| | GALPGMVWQNRDVYLQGPIWAKIPHTDGNFHPSPLMGGFGLKHPPPQILI |
| | KNTPVPANPPEVFTPAKFASFITQYSTGQVSVEIEWELQKENSKRWNPEI |
| | QYTSNFDKQTGVDFAVDSQGVYSEPRPIGTRYLTRNL |
| SEQ ID | MAADGYLPDWLEDNLSEGIREWWDLKPGAPKPKANQQKQDDGRGLVLPGY |
| NO: | KYLGPFNGLDKGEPVNAADAAALEHDKAYDQQLKAGDNPHLRYNHADAEF |
| 120 | QERLQEDTSFGGNLGRAVFQAKKRVLEPLGLVEEGAKTAPGKKRPVEPSP |
| (AAV | QRSPDSSTGIGKKGQQPARKRLNFGQTGDSESVPDPQLIGEPPAAPSSVG |
| rb.49 | SGTMAAGGGAPMADNNEGADGVGSSSGNWHCDSTWLGDRVITTSTRTWAL |
| (AAS99247)) | PTYNNHLYKQISNGTSGGSTNDNTYFGYSTPWGYFDFNRFHCHFSPRDWQ |
| | RLINNNWGFRPKRLSFKLFNIQVKEVTQNEGTKTIANNLTSTIQVFTDSE |
| | YQLPYVLGSAHQGCLPPFPADVFMIPQYGNLTLNNGSQAVGRSSFYCLEY |
| | FPSQMLRTGNNFSFSYTFEDVPFHSSYAHSQSLDRLMNPLIDQYLYYLSR |
| | TQSTGGTAGTQQLLFSQAGPSNMSAQARNWLPGPCYRQQRVSTTLSQNNN |
| | SNFAWTGATKYHLNGRDSLVNPGVAMATNKDDEDRFFPSSGILMFGKQGA |
| | GKDNMGYSNVMLTSEEEIKTTNPVATEQYGVVADNLQQQNTAPIVGAVNS |
| | QGALPGMVWQNRDVYLQGPIWAKIPHTDGNFHPSPLMGGFGLKHPPPQIL |
| | IKNTPVPADPPTAFNQAKLNSFITQYGTGQVSVEIEWELQKENSKRWNPE |
| | IQYTSNYYKSTNVDFAVNTEGVYSEPRPIGTRYLTRNL |
| SEQ ID | MAADGYLPDWLEDNLSEGIREWWDLKPGAPKPKANQQKQDDGRGLVLPGY |
| NO: | KYLGPFNGLDKGEPVNAADAAALEHDKAYDQQLKAGDNPYLRYNHADAEF |
| 121 | QERLQEDTSFGGNLGRAVFQAKKRVLEPLGLVEEGAKTAPGKKRPVEPSP |
| (AAV | QRSPDSSTGIGKKGQQPAGKRLNFGQTGDSESVPDPQPIGEPPAAPSSVG |
| rh.50 | SGTMAAGGGAPMADNNEGADGVGSSSGNWHCDSTWLGDRVITTSTRTWAL |
| (AAS99248)) | PTYNNHLYKQISNGTSGGSTNDNTYFGYSTPWGYFDFNRFHCHFSPRDWQ |
| | RLINNNWGFRPKRLSFKLFNIQVKEVTQNEGTKTIANNLTSTIQVFTDSE |
| | YQLPYVLGSAHQGCLPPFPADVFMIPQYGYLTLNNGSQAVGRSSFYCLEY |
| | FPSQMLRTGNNFSFSYTFEDVPFHSSYAHSQSLDRLMNPLVDQYLYYLSR |
| | TQSTGGTAGTQQLLFSQAGPSNMSAQARNWLPGPCYRQQRVSTTLSQNNN |
| | SNFAWTGATKYHLNGRDSLVNPGVAMATNKDDEDRFFPSSGILMFGKQGA |
| | GKDNVDYSNVMLTSEEEIKTTNPVATEQYGVVADNLQQQNTAPIVGAVNS |
| | QGALPGMVWQNRDVYLQGPIWAKIPHTDGNFHPSPLMGGFGLKHPPPQIL |
| | IKNTPVPADPPTAFNQAKLNSFITQYSTGQVSVEIEWELQKENSKRWSPE |
| | IQYTSNYYKSTNVDFAVNTEGVYSEPRPIGTRYLTRNL |
| SEQ ID | MVADGYLPDWLEDNLSEGIREWWDLKPGAPKPKANQQKQGDGRGLVLPGY |
| NO: | KYLGPFNGLDKGEPVNAADAAALEHDKAYDQQLKAGDNPYLRYNHADAEL |
| 122 | QERLQEDTSFGGNLGRAVFQAKKRVLEPLGLVEEGAKTAPGKKRPVEPSP |
| (AAV | QRSPDSSTGIGKKGQQPARKRLNFGQTGDSESVPDPQPIGEPPAAPSSVG |
| rh.51 | SGTMAAGGGAPMADNNEGADGVGSSSGNWHCDSTWLGDRVITTSTRTWAL |
| (AAS99249)) | PTYNNHLYKQISNGTSGGSTNDNTYFGYSTPWGYFDFNRFHCHFSPRDWQ |
| | RLINNNWGFRPKRLSFKLFNIQVKEVTQNEGTKTIANNLTSTIQVFTDSE |
| | YQLPYVLGSAHQGCQPPFPADVFMIPQYGYLTLNNGSQAVGRSSFYCLEY |
| | FPSQMLRTGNNFSFSYTFEDVPFHSSYAHSQSLDRLMNPLIDQYLYYLSR |
| | TQSTGGTAGTQQLLFSQAGPSNMSAQARNWLPGPCYRQQRVSTTLSQNNN |
| | SNFAWTGATKYHLNGRDSLVNPGVAMATNKDDEDRFFPSSGILMFGKQGA |
| | GKDNVDYSNVMLTSEEEIKTTNPVATEQYGVVADNLQQQNTAPIVGAVNS |
| | QGALPGMVWQNRDVYLQGPIWAKIPHTDGNFHPSPLMGGFGLKHPPPQIL |
| | IKNTPVPADPPTAFNQAKLNSFITQYSTGQVSVEIEWEPQKENSKRWNPE |
| | IQYTSNYYKSTNVDFAVNTEGVYSEPRPIGTRYLTRNL |
| SEQ ID | MAADGYLPDWLEDNLSEGIREWWDLKPGAPKPKANQQKQDDGRGLVLPGY |
| NO: | KYLGPFNGLDKGEPVNAADAAALEHDKAYDQQLKAGDNPYLRYNHADAEF |
| 123 | QERLQEDTSFGGNLGRAVFQAKKRVLEPLGLVEEGAKTAPGKKRPVEPSP |
| (AAV | QRSPDSSTGIGKKGQQPARKRLNFGQTGDSESVPDPQPIGEPPAAPSSVG |
| rh.52 | SGTMAAGGGAPMADNNEGADGVGSSSGNWHCDSTWLGDRVITTSTRTWAL |
| (AAS99250) | PTYNNHLYKQISNGTSGGSTNDNTYFGYSTPWGYFDFNRFHCHFSPRDWQ |
| | RLINNNWGFRPKRLSFKLFNIQVKEVTQNEGTKTIANSLTSTIQVFTDSE |
| | YQLPYVLGSAHQGCLPPFPADVFMIPQYGYLTPNNGSQAVGRSSFYCLEY |
| | FPSQMLRTGNNFSFSYTFEDVPFHSSYAHSQSLDRLMNPLIDQYLYYLSR |
| | TQSTGGTAGTQQLLSSQAGPSNMSAQARNWLPGPCYRQQRVSTTLSQNNN |
| | SNFAWTGATKYHLNGRDSLVNPGVAMATNKDDEDRFFPSSGILMFGKQGA |
| | GKDNVDYSNVMLTSEEEIKTTNPVATEQYGVVADNLQQQNTAPIVGAVNS |
| | QGALPGMVWQNRDVYLQGPIWAKIPHTDGNFHPSPLMGGFGLKHPPPQIL |
| | IKNTPVPADPPTAFNQAKLNSFITQYSTGQVSVEIEWELQKENSKRWNPE |
| | IQYTSNYYKSTNVDFAVNTEGVYSEPRPIGTRYLTRNL |
| SEQ ID | MAADGYLPDWLEDNLSEGIREWWDLKPGAPKPKANQQKQDDGRGLVLPGY |
| NO: | KYLGPFNGLDKGEPVNAADAAALEHDKAYDQQLKAGDNPYLRYNHADAEF |
| 124 | QERLQEDTSFGGNLGRAVFQAKKRVLEPLGLVEEGAKTAPGKKRPVEPSP |
| (AAV | QRSPDSSTGIGKKGQQPARKRLNFGQTGDSESVPDPQPIGEPPAAPSSVG |
| rh.53 | SGTMAAGGGAPMADNNEGADGVGSSSGNWHCDSTWLGDRVITTSTRTWAL |
| (AAS99251)) | PTYNNHLYKQISNGTSGGSTNDNTYFGYSTPWGYFDFNRFHCHFSPRDWQ |
| | RLINNNWGFRPKRLSFKLFNIQVKEVTQNEGTKTIANNLTSTIQVFTDSE |
| | YQLPYVLGSAHQGCLPPFPADVFMIPQYGYLTLNNGSQAVGRSSFYCLEY |
| | FPSQMLRTGNNFSFSYTFEDVPFHSSYVHSQSLDRLMNPLIDQYLYYLSR |
| | TQSTGGTAGTQQLLFSQAGPSNMSAQARNWLPGPCYRQQRVSTTLSQNNN |
| | SNFAWTGATKYHLNGRDSLVNSGVAMATNKDDEDRFFPSSGILMFGKQGA |
| | GKDNVDYSNVMLTSEEEIKTTNPVATEQYGVVADNLQQQNTAPIVGAVNS |
| | QGALPGMVWQNRDVYLQGPIWAKIPHTDGNFHPSPLMGGFGLKHPPPQIL |
| | IKNTPVPADPPTAFNQAKLNSFITQYSTGQVSVEIEWELQKENSKRWNPE |
| | IQYTSNYYKSTNVDFAVNTEGVYSEPRPIGTRYPTRNL |
| SEQ ID | MAADGYLPDWLEDNLSEGIREWWDLKPGAPKPKANQQKQDDGRGLVLPGY |
| NO: | KYLGPFNGLDKGEPVNAADAAALEHDKAYDQQLKAGDNPYLRYNHADAEF |
| 125 | QERLQEDTSFGGNLGRAVFQAKKRVLEPLGLVERAAKTAPGKKRPVEPSP |
| (AAV | QRSPDSSTGIGKKGQQPARKRLNFGQTGDSESVPDPQPLGEPPAGPSGLG |
| rh.54 | SGTMAAGGGAPMADNNEGADGVGNASGNWHCDSTWLGDRVITTSTRTWAL |
| (AAS99252)) | PTYNNHLYKQISSQSAGSTNDNVYFGYSTPWGYFDFNRFHCHFSPRDWQR |
| | LINNNWGFRPKKLNFKLFNIQVKEVTTNDGVTTIANNLTSTVQVFSDSEY |
| | QLPYVLGSAHQGCLPPFPADVFMIPQYGYLTLNNGSQSVGRSSFYCLEYF |
| | PSQVLRTGNNFTFSYTFEDVPFHSSYAHSQSLDRLMNPLIDQYLYYLART |
| | QSNPGGTSGNRELQFYQGGPSTMAEQAKNWLPGPCFRQQRVSKTLDQNNN |
| | SNFAWTGATKYHLNGRNSLVNPGVAMATHKDDEDRFFPSSGVLIFGKTGA |
| | TNKTTLENVLMTNEEEIRPTNPVATEEYGIVSSNLQAANTAAQTQVVNNQ |
| | GALPGMVWQNRDVYLQGPIWAKIPHTDGNFHPSPLMGGFGLKHPPPQILI |
| | KNTPVPANPPEVFTPAKFASFITQYSTGQVSVEIEWELQKENSKRWNPEI |
| | QYTSNFDKQTGVDFAVDSQGVYSEPRPIGTRYLTRNL |
| SEQ ID | MAADGYLPDWLEDNLSEGIREWWDLKPGAPKPKANQQKQDDGRGLVLPGY |
| NO: | KYLGPFNGLDKGEPVNAADAAALEHDKAYDQQLKAGDNPYLRYNHADAEF |
| 126 | QERLQEDTSFGGNLGRAVFQAKKRVLEPLGLVEEGAKTAPGKKRPVEPSP |
| (AAV | QRSPDSSTGIGKKGQQPARKRLNFGQTGDSESVPDPQPIGEPPAAPSSVG |
| rh.55 | SGTMAAGGGAPMADNNEGADGVGSSSGNWHCDSTRLGDRVITTSTRTWAL |
| (AAS99253)) | PTYNNHLYKQISSQSAGSTNDNVYFGYSTPWGYFDFNRFHCHFSPRDWQR |
| | LINNNWGFRPKKLNFKLFNIQVKEVTTNDGVTTIANNLTSTVQVFSDSEY |
| | QLPYVLGSAHQGCLPPFPADVFMIPQYGYLTLNNGSQSVGRSSFYCLEYF |
| | PSQMLRTGNNFTFSYTFEDVPFHSSYAHSQSLDRLMNPLIDQYLYYLART |
| | QSNAGGTAGNRELQFYQGGPTTMAEQAKNWLPGPCFRQRRVSKTLDQNNN |
| | SNFAWTGATKYHLNGRNSLVNPGVAMATHKDDEERFFPSSGVLIFGKTGA |
| | ANKTTLENVLMTNEEEIRPTNPVATEEYGTVSSNLQAANTAAQTQVVNNQ |
| | GALPGMVWQNRDVYLQGPIWAKIPHTDGNFHPSPLMGGFGLKHPPPQILI |
| | KNTPVPANPPEVFTPAKFASFITQYSTGQVSVEIEWELQKENSKRWNPEI |
| | QYTSNFDKQTGVDFAVDSQGVYSEPRPIGTRYLTRNL |
| SEQ ID | MAADGYLPDWLEDNLSEGIREWWALKPGAPKPKANQQKQDDGRGLVLPGY |
| NO: | KYLGPFNGLDKGEPVNAADAAALEHDKAYDQQLQAGDNPYLRYNHADAEF |
| 127 | QERLQEDTSFGGNLGRAVFQAKKRVLEPLGLVEEGAKTAPGKKRPVEPSP |
| (AAV | QRSPDSSTGIGKKGQQPARKRLNFGQTGDSESVPDPQPIGEPPAAPSSVG |
| rb.57 | SGTMAAGGGAPMADNNEGADGVGSSSGNWHCDSTWLGDRVITTSTRTWAL |
| (AAS99254)) | PTYNNHLYKQTSNGTSGGSTNDNTYFGYSTPWGYFDFNRFHCHFSPRDWQ |
| | RLINNNWGFRPKRLSFKLFNIQVKEVTQNEGTKTIANNLTSTIQVFTDSE |
| | YQLPYVLGSAHQGCLPPFPADVFMIPQYGYLTLNNGSQAVGRSSFYCLEY |
| | FPSQMLRTGNNFSFSYTFEDVPFHSSYAHSQSLDRLMNPLIDQYLYYLSR |
| | TQSTGGTAGTQQLLFSQAGPSNMSAQARNWLPGPCYRQQRVSTTLSQNNN |
| | SNFAWTGATKYHLNGRDSLVNPGVAMATNKDDEDRFFPSSGILMFGKQGA |
| | GKDNVDYSNVMLTSEEEIKTTNPVATEQYGVVADNLQQQNTAPIVGAVNS |
| | QGALPGMVWQNRDVYLQGPIWAKIPHTDGNFHPSPLMGGFGLKHPPPQIL |
| | IKNTPVPADPPTAFNQAKLNSFITQYSTGQVSAEIEWELQKENSKRWNPE |
| | IQYTSNYYKSTNVDFAVNTEGVYSEPRPIGTRYLTRNL |
| SEQ ID | MAADGYLPDWLEDNLSEGIREWWDLKPGAPKPKANQQKQDDGRGLVLPGY |
| NO: | KYLGPFNGLDKGEPVNAADAAALEHDKAYDQQLKAGDNPYLRYNHADAEF |
| 128 | QERLQEDTSFGGNLGRAVFQAKKRVLEPLGLVEEAAKTAPGKKRPVEPSP |
| (AAV | QRSPDSSTGIGKKGQQPARKRLNFGQTGDSESVPDPQPIGEPPAAPSSVG |
| rh.58 | SGTMAAGGGAPMADNNEGADGVGSSSGNWHCDSTWLGDRVITTSTRTWAL |
| (AAS99255)) | PTYNNHLYKQISNGTSGGSTNDNTYFGYSTPWGYFDFNRFHCHFSPRDWQ |
| | RLINNNWGFRPKRLSFKLFNIQVKEVTQNEGTKTIANNLTSTIQVFTDSE |
| | YQLPYVLGSAHQGCLPPFPADVFMIPQYGYLTLNNGSQAVGRSSFYCLEY |
| | FPSQMLRTGNNFSFSYTFEDVPFHSSYAHSQSLDRLMNPLIDQYLYYLSR |
| | TQSTGGTAGTQQLLFSQAGPSNMSAQARNWLPGPCYRQQRVSTTLSQNNN |
| | SNFAWTGATKYHLNGRDSLVNPGVAMATNKDDEDRFFPSSGILMFGKQGA |
| | GKDNVDYSNVMLTSEEEIKTTNPVATEQYGVVADNLQQQNTAPIVGAVNS |
| | QGALPGMVWQNRDVYLQGPIWAKIPHTDGNFHPSPLMGGFGLKHPPPQIL |
| | IKSTPVPADPPTAFNQAKLNSFITQYSTGQVSVEIEWELQKENSKCWNPE |
| | IQYTSNYYKSTNVDFAVNTEGVYSEPRPIGTRYLTRNL |
| SEQ ID | MAADGYLPDWLEDNLSEGIREWWDLKPGAPKPKANQQKQDDGRGLVLPGY |
| NO: | KYLGPFNGLDKGEPVNAADAAALEHDKAYDQQLKAGDNPYLRYNHADAEF |
| 129 | QERLQEDTSFGGNLGRAVFQAKKRVLEPLGLAERAAKTAPGKKRPVEPSP |
| (AAV | QRSPDSSTGIGKKGQQPARKRLNFGQTGDSESVPDPQPIGEPPAGPSGLG |
| rh.62 | SGTMAAGGGAPMADNNKGADGVGNASGNWHCDSTWLGDRVITTSTRTWAL |
| (AAS99258)) | PTYNNHLYKQISSQSAGSTNDNVYFGYSTPWGYFDFNRFHCHFSPRDWQR |
| | LINNNWGFRPKKLNFKLFNIQVKEVTTGDGVTTIANNLTSTVQVFSDSEY |
| | QLPYVLGSAHQGCLPPFPADVFMIPQYGYLTLNNDSQSVGRSSFYCLEYF |
| | PSQMLRTGNNFTFSYTFEDVPFHSSYAHSQSLDRLMNPLIDQYLYYLART |
| | QSNAGGTAGNRELQFYQGGPTTMAEQAKNWLPGPCFRQQRVSKTLDQNNN |
| | SNFAWTGATKYHLNGRNSLVNPGVAMATHKDDEERFFPSSGVLIFGKTGA |
| | ANKTTLENVLMTNEEEIRPTNPVATEEYGTVSSNLQAANTAAQTQVVNNQ |
| | GALPGMVWQNRDVYLQGPIWAKIPHTDGNFHPSPLMGGFGLKHPPPQILI |
| | KNTPVPANPPEVFTPAKFASFITQYSTGQVSVEIEWELQKENSKRWNPEI |
| | QYTSNFDKQTGVDFAVDSQGVYSEPRPIGTRYLTRNL |
| SEQ ID | MAADGYLPDWLEDNLSEGIREWWDLKPGAPKPKANQQKQDDGRGLVLPGY |
| NO: | KYLGPFNGLDKGEPVNAADAAALEHDKAYDQQLKAGDNPYLRYNHADAEF |
| 130 | QERLQEDTSFGGNLGRAVFQAKKRVLEPLGLVEEGAKTAPGKKRPVEPSP |
| (AAV | QRSPDSSTGIGKKGQQPARKRLNFGQTGDSESVPDPQPIGEPPAAPSSVG |
| rh.64 | SGTMAAGGGAPMADNNEGADGVGSSSGNWHCDSTWLGDRVITTSTRTWAL |
| (AAS99259)) | PTYNNHLYKQISNGTSGGSTNDNTYFGYSTPWGYFDFNRFHCHFSPRDWQ |
| | RLINNNWGFRPKRLSFKLFNIQVKEVTQNEGTKTIANNLTSTIQVFTDSE |
| | YQLPYVLGSAHQGCLPPFPADVFMIPQYGYLTLNNGSQAVGRSSFYCLEY |
| | FPSQMLRTGNNFSFSYTFEDVPFHSSYAHSQSLDRLMNPLIDQYLYYLSR |
| | TQSTGGTAGTQQLLFSQAGPSNMSAQARNWLPGPCYRQQRVSTTLSQNNN |
| | SNFAWTGATKYHLNGRDSLVNPGVAMATNKDDEDRFFPSSGILMFGKQGA |
| | GKDNVDYSNVMLTSEEEIKTTNPVATEQYGVVADNLQQQNTAPIVGAVNS |
| | QGALPGMVWQNRDVYLQGPIWAKIPHTDGNFHPSPLMGGFGLKHPPPQIL |
| | IKNTPVPADPPTAFNQAKLNSFITQYSTGQVSVEIVWELQKENSKRRNPE |
| | IQYTSNYYKSTNVDFAVNTEGVYSEPRPIGTRYLTRNL |
| SEQ ID | MAADGYLPDWLEDTLSEGIRQWWKLKPGPPPPKPAERHKDDSRGLVLPGY |
| NO: | KYLGPFNGLDKGEPVNEADAAALEHDKAYDRQLDSGDNPYLKYNHADAEF |
| 131 | QERLKEDTSFGGNLGRAVFQAKKRVLEPLGLVEEPVKTAPGKKRPVEHSP |
| (AAV | AEPDSSSGTGKAGQQPARKRLNFGQTGDADSVPDPQPLGQPPAAPSGLGS |
| rh.56 | TTMATGSGAPMADNNEGADGVGNSSGNWHCDSQWLGDRVITTSTRTWAQP |
| (JA400164)) | TYNNHLYKQISSQSGASNDNHYFGYSTPWGYFDFNRFHCHFSPRDWQRLI |
| | NNNWGFRPKRLNFKLFNIQVKEVTQNDGTTTIANNLTSTVQVFTDSEYQL |
| | PYVLGSAHQGCLPPFPADVFMVPQYGYLTLNNGSQAVGRSSFYCLEYFPS |
| | QMLRTGNNFQFSYTFEDVPFHSSYAHSQSLDRLMNPLIDQYLYYLNKTQS |
| | NSGALQQSRLLFSQAGPTSMSLQAKNWLPGPCYRQQRLSKQANDNNNSNF |
| | PWTAATKYHLNGRDSLVNPGPAMASHKDDEEKFFPMHGTLIFGKQGTNAN |
| | DADLDNVMITDEEEIRTTNPVATEQYGYVSNNLQNSNTGPTTGTVNHRGA |
| | LPGMVWQDRDVYLQGPIWAKIPHTDGHFHPSPLMGGFGLKHPPPQIMIKN |
| | TPVPANPPTNFSSAKFASFITQYSTGQVSVEIEWELQKENSKRWNPEIQY |
| | TSNYNKSVNVDFTVDTNGVYSEPRPIGTRYLTRNL |
| SEQ ID | MAADGYLPDWLEDNLSEGIREWWDLKPGAPKPKANQQKQDDGRGLVLPGY |
| NO: | KYLGPFNGLDKGEPVNAADAAALEHDKAYDQQLKAGDNPYLRYNHADAEF |
| 132 | QERLQEDTSFGGNLGRAVFQAKKRVLEPLGLVEEGAKTAPGKKRPVEQSP |
| (Anc80) | QEPDSSSGIGKKGQQPAXKRLNFGQTGDSESVPDPQPLGEPPAAPSGVGS |
| | NTMAXGGGAPMADNNEGADGVGNASGNWHCDSTWLGDRVITTSTRTWALP |
| | TYNNHLYKQISSQSGXSTNDNTYFGYSTPWGYFDFNRFHCHFSPRDWQRL |
| | INNNWGFRPKXLNFKLFNIQVKEVTTNDGTTTIANNLTSTVQVFTDSEYQ |
| | LPYVLGSAHQGCLPPFPADVFMIPQYGYLTLNNGSQAVGRSSFYCLEYFP |
| | SQMLRTGNNFXFSYTFEDVPFHSSYAHSQSLDRLMNPLIDQYLYYLSRTQ |
| | TTSGTAGNRXLQFSQAGPSSMANQAKNWLPGPCYRQQRVSKTXNQNNNSN |
| | FAWTGATKYHLNGRDSLVNPGPAMATHKDDEDKFFPMSGVLIFGKQGAGN |
| | SNVDLDNVMITXEEEIKTTNPVATEXYGTVATNLQSXNTAPATGTVNSQG |
| | ALPGMVWQXRDVYLQGPIWAKIPHTDGHFHPSPLMGGFGLKHPPPQILIK |
| | NTPVPANPPTTFSPAKFASFITQYSTGQVSVEIEWELQKENSKRWNPEIQ |
| | YTSNYNKSTNVDFAVDTNGVYSEPRPIGTRYLTRNL |
| | (168) . . . (168) Lys or Arg |
| | (205) . . . (205) Ala or Ser |
| | (266) . . . (266) Ala or Gly |
| | (311) . . . (311) Arg or Lys |
| | (411) . . . (411) Glu or Gln |
| | (460) . . . (460) Thr or Glu |
| | (493) . . . (493) Ala or Thr |
| | (562) . . . (562) Ser or Asn |
| | (576) . . . (576) Gln or Glu |
| | (587) . . . (587) Ser or Ala |
| | (609) . . . (609) Asn or Asp |
| SEQ ID | MAADGYLPDWLEDNLSEGIREWWDLKPGAPKPKANQQKQDDGRGLVLPGYK |
| NO: | YLGPFNGLDKGEPVNAADAAALEHDKAYDQQLKAGDNPYLRYNHADAEFQ |
| 133 | ERLQEDTSFGGNLGRAVFQAKKRVLEPLGLVEEGAKTAPGKKRPVEQSPQ |
| (Anc81 | EPDSSXGIGKKGQQPAXKRLNFGQTGDSESVPDPQPLGEPPAAPSGVGSN |
| (AKU8 | TMAAGGGAPMADNNEGADGVGNASGNWHCDSTWLGDRVITTSTRTWALPT |
| 9596)) | YNNHLYKQISXXQSGGSTNDNTYFGYSTPWGYFDFNRFHCHFSPRDWQRL |
| | INNNWGFRPKXLNFKLFNIQVKEVTTNDGTTTIANNLTSTVQVFTDSEYQ |
| | LPYVLGSAHQGCLPPFPADVFMIPQYGYLTLNNGSQAVGRSSFYCLEYFP |
| | SQMLRTGNNFXFSYTFEDVPFHSSYAHSQSLDRLMNPLIDQYLYYLSRTQ |
| | TTGGTAGNXXLQFSQAGPSSMANQAKNWLPGPCYRQQRVSKTTNQNNNSN |
| | FAWTGATKYHLNGRDSLVNPGVAMATHKDDEDRFFPSSGVLIFGKQGAGN |
| | XNVDXXNVMITXEEEIKTTNPVATEEYGXVATNLQSXNTAPQTGTVNSQG |
| | ALPGMVWQNRDVYLQGPIWAKIPHTDGNFHPSPLMGGFGLKHPPPQILIK |
| | NTPVPANPPTTFXPAKFASFITQYSTGQVSVEIEWELQKENSKRWNPEIQ |
| | YTSNYNKSTNVDFAVDTEGVYSEPRPIGTRYLTRNL |
| | (157) . . . (157) Thr or Ser |
| | (168) . . . (168) Lys or Arg |
| | (262) . . . (262) Asn or Ser |
| | (263) . . . (263) Ser or His |
| | (312) . . . (312) Arg or Lys |
| | (412) . . . (412) Glu or Gln |
| | (460) . . . (460) Arg or Gln |
| | (461) . . . (461) Thr or Glu |
| | (552) . . . (552) Asp or Ser |
| | (556) . . . (556) Leu or Tyr |
| | (557) . . . (557) Asp or Ser |
| | (563) . . . (563) Ser or Asn |
| | (580) . . . (580) Val or Ile |
| | (588) . . . (588) Asn or Ser |
| | (664) . . . (664) Ser or Thr |
| SEQ ID | MAADGYLPDWLEDNLSEGIREWWDLKPGAPKPKANQQKQDDGRGLVLPGYK |
| NO: | YLGPFNGLDKGEPVNAADAAALEHDKAYDQQLKAGDNPYLRYNHADAEFQ |
| 134 | ERLQEDTSFGGNLGRAVFQAKKRVLEPLGLVEEGAKTAPGKKRPVEQSPQ |
| (Anc82 | REPDSSXGIGKKGQQPAXKRLNFGQTGDSESVPDPQPLGEPPAAPSGVGS |
| (AKU8 | NTMAAGGGAPMADNNEGADGVGNSSGNWHCDSTWLGDRVITTSTRTWALP |
| 9597)) | TYNNHLYKQISNGTSGGSTNDNTYFGYSTPWGYFDFNRFHCHFSPRDWQR |
| | LINNNWGFRPKRLNFKLFNIQVKEVTTNEGTKTIANNLTSTVQVFTDSEY |
| | QLPYVLGSAHQGCLPPFPADVFMIPQYGYLTLNNGSQAVGRSSFYCLEYF |
| | PSQMLRTGNNFQFSYTFEDVPFHSSYAHSQSLDRLMNPLIDQYLYYLSRT |
| | QTTGGTAGTQTLQFSQAGPSSMANQAKNWLPGPCYRQQRVSTTTNQNNNS |
| | NFAWTGATKYHLNGRDSLVNPGVAMATHKDDEDRFFPSSGVLIFGKQGAG |
| | NDNVDYSNVMITXEEEIKTTNPVATEEYGVVATNLQSANTAPQTGTVNSQ |
| | GALPGMVWQNRDVYLQGPIWAKIPHTDGNFHPSPLMGGFGLKHPPPQILI |
| | KNTPVPADPPTTFNQAKLNSFITQYSTGQVSVEIEWELQKENSKRWNPEI |
| | QYTSNYYKSTNVDFAVNTEGVYSEPRPIGTRYLTRNL |
| | (158) . . . (158) Thr or Ser |
| | (169) . . . (169) Lys or Arg |
| | (564) . . . (564) Ser or Asn |
| SEQ ID | MAADGYLPDWLEDNLSEGIREWWDLKPGAPKPKANQQKQDDGRGLVLPGYK |
| NO: | YLGPFNGLDKGEPVNAADAAALEHDKAYDQQLKAGDNPYLRYNHADAEFQ |
| 135 | ERLQEDTSFGGNLGRAVFQAKKRVLEPLGLVEEGAKTAPGKKRPVEQSPQ |
| (Anc83 | REPDSSXGIGKKGQQPAXKRLNFGQTGDSESVPDPQPLGEPPAAPSGVGS |
| (AKU8 | NTMAAGGGAPMADNNEGADGVGSSSGNWHCDSTWLGDRVITTSTRTWALP |
| 9598)) | TYNNHLYKQISNGTSGGSTNDNTYFGYSTPWGYFDFNRFHCHFSPRDWQR |
| | LINNNWGFRPKRLXFKLFNIQVKEVTQNEGTKTIANNLTSTIQVFTDSEY |
| | QLPYVLGSAHQGCLPPFPADVFMIPQYGYLTLNNGSQAVGRSSFYCLEYF |
| | PSQMLRTGNNFXFSYTFEDVPFHSSYAHSQSLDRLMNPLIDQYLYYLSRT |
| | QTTGGTAGTQTLQFSQAGPSXMANQAKNWLPGPCYRQQRVSTTTSQNNNS |
| | NFAWTGATKYHLNGRDSLVNPGVAMATHKDDEXRFFPSSGXLIFGKQGAG |
| | KDNVDYSNVMLTSEEEIKTTNPVATEEYGVVADNLQQQNTAPQXGTVNSQ |
| | GALPGMVWQNRDVYLQGPIWAKIPHTDGNFHPSPLMGGFGLKHPPPQILI |
| | KNTPVPADPPTTFNQAKLNSFITQYSTGQVSVEIEWELQKENSKRWNPEI |
| | QYTSNYYKSTNVDFAVNTEGVYSEPRPIGTRYLTRNL |
| | (158) . . . (158) Thr or Ser |
| | (169) . . . (169) Arg or Lys |
| | (315) . . . (315) Asn or Ser |
| | (413) . . . (413) Gln or Glu |
| | (472) . . . (472) Asn, Thr or Ser |
| | (534) . . . (534) Asp or Glu |
| | (542) . . . (542) Ile or Val |
| | (595) . . . (595) Ile or Val |
| SEQ ID | MAADGYLPDWLEDNLSEGIREWWDLKPGAPKPKANQQKQDDGRGLVLPGYK |
| NO: | YLGPFNGLDKGEPVNAADAAALEHDKAYDQQLKAGDNPYLRYNHADAEFQ |
| 136 | ERLQEDTSFGGNLGRAVFQAKKRVLEPLGLVEEGAKTAPGKKRPVEPSPQ |
| (Anc84 | RSPDSSTGIGKKGQQPAXKRLNFGQTGDSESVPDPQPIGEPPAAPSGVGS |
| (AKU8 | GTMAAGGGAPMADNNEGADGVGSSSGNWHCDSTWLGDRVITTSTRTWALP |
| 9599)) | TYNNHLYKQISNGTSGGSTNDNTYFGYSTPWGYFDFNRFHCHFSPRDWQR |
| | LINNNWGFRPKRLXFKLFNIQVKEVTQNEGTKTIANNLTSTIQVFTDSEY |
| | QLPYVLGSAHQGCLPPFPADVFMIPQYGYLTLNNGSQAVGRSSFYCLEYF |
| | PSQMLRTGNNFEFSYTFEDVPFHSSYAHSQSLDRLMNPLIDQYLYYLSRT |
| | QSTGGTAGTQQLLFSQAGPSNMSAQAKNWLPGPCYRQQRVSTTLSQNNNS |
| | NFAWTGATKYHLNGRDSLVNPGVAMATHKDDEXRFFPSSGXLMFGKQGAG |
| | KDNVDYSNVMLTSEEEIKTTNPVATEQYGVVADNLQQQNTAPIVGAVNSQ |
| | GALPGMVWQNRDVYLQGPIWAKIPHTDGNFHPSPLMGGFGLKHPPPQILI |
| | KNTPVPADPPTTFNQAKLNSFITQYSTGQVSVEIEWELQKENSKRWNPEI |
| | QYTSNYYKSTNVDFAVNTEGVYSEPRPIGTRYLTRNL |
| | (169) . . . (169) Arg or Lys |
| | (315) . . . (315) Asn or Ser |
| | (534) . . . (534) Asp or Glu |
| | (542) . . . (542) Ile or Val |
| SEQ ID | MAADGYLPDWLEDNLSEGIREWWDLKPGAPKPKANQQKQDDGRGLVLPGYK |
| NO: | YLGPFNGLDKGEPVNAADAAALEHDKAYDQQLKAGDNPYLRYNHADAEFQE |
| 137 | RLQEDTSFGGNLGRAVFQAKKRVLEPLGLVEEGAKTAPGKKRPVEPSPQRS |
| (Anc94) | PDSSTGIGKKGQQPAKKRLNFGQTGDSESVPDPQPIGEPPAGPSGLGSGTM |
| | AAGGGAPMADNNEGADGVGSSSGNWHCDSTWLGDRVITTSTRTWALPTYNN |
| | HLYKQISNGTSGGSTNDNTYFGYSTPWGYFDFNRFHCHFSPRDWQRLINNN |
| | WGFRPKRLNFKLFNIQVKEVTQNEGTKTIANNLTSTIQVFTDSEYQLPYVL |
| | GSAHQGCLPPFPADVFMIPQYGYLTLNNGSQAVGRSSFYCLEYFPSQMLRT |
| | GNNFEFSYTFEDVPFHSSYAHSQSLDRLMNPLIDQYLYYLSRTQSTGGTAG |
| | TQQLLFSQAGPXNMSAQAKNWLPGPCYRQQRVSTTLSQNNNSNFAWTGATK |
| | YHLNGRDSLVNPGVAMATHKDDEERFFPSSGVLMFGKQGAGKDNVDYSSVM |
| | LTSEEEIKTTNPVATEQYGVVADNLQQQNTAPIVGAVNSQGALPGMVWQNR |
| | DVYLQGPIWAKIPHTDGNFHPSPLMGGFGLKHPPPQILIKNTPVPADPPTT |
| | FSQAKLASFITQYSTGQVSVEIEWELQKENSKRWNPEIQYTSNYYKSTNVD |
| | FAVNTEGTYSEPRPIGTRYLTRNL |
| | (471) . . . (471) Ser or Asn |
| SEQ ID | MAADGYLPDWLEDNLSEGIREWWDLKPGAPKPKANQQKQDDGRGLVLPGYK |
| NO: | YLGPFNGLDKGEPVNAADAAALEHDKAYDQQLKAGDNPYLRYNHADAEFQER |
| 138 | LQEDTSFGGNLGRAVFQAKKRVLEPLGLVEEGAKTAPGKKRPVEQSPQEPDS |
| (Anc110 | SXLGIGKTGQQPAXKRLNFGQTGDSESVPDPQPLGEPPAAPSGVGSNTMASG |
| (AKU89600)) | GGAPMADNNEGADGVGNSSGNWHCDSTWLGDRVITTSTRTWALPTYNNHLYK |
| | QISNGTSGGSTNDNTYFGYSTPWGYFDFNRFHCHFSPRDWQRLINNNWGFRP |
| | KRLNFKLFNIQVKEVTTNEGTKTIANNLTSTVQVFTDSEYQLPYVLGSAHQG |
| | CLPPFPADVFMIPQYGYLTLNNGSQAVGRSSFYCLEYFPSQMLRTGNNFQFS |
| | YTFEDVPFHSSYAHSQSLDRLMNPLIDQYLYYLSRTQTTGTXGTQTLXFSQA |
| | GPSSMANQARNWVPGPCYRQQRVSTTTNQNNNSNFAWTGAXKXXLNGRDSLM |
| | NPGVAMASHKDDEDRFFPSSGVLIFGKQGAGNDNVDYSXVMITNEEEIKTTN |
| | PVATEEYGAVATNXQXLANTQAQTGLVHNQGVLPGMVWQNRDVYLQGPIWAK |
| | IPHTDGNFHPSPLMGGFGLKHPPPQILIKNTPVPADPPTTFNQAKLNSFITQ |
| | YSTGQVSVEIEWELQKENSKRWNPEIQYTSNYYKSTNVDFAVNTEGVYSEPR |
| | PIGTRYLTRNL |
| | (157) . . . (157) Ser or Thr |
| | (169) . . . (169) Lys or Arg |
| | (457) . . . (457) Ala or Gly |
| | (463) . . . (463) Gln or Ala |
| | (508) . . . (508) Thr or Ala |
| | (510) . . . (510) Tyr or Phe |
| | (511) . . . (511) His or Lys |
| | (558) . . . (558) Gln or Asn |
| | (585) . . . (585) Asn or His |
| | (587) . . . (587) Ser or Ala |
| SEQ ID | MAADGYLPDWLEDNLSEGIREWWDLKPGAPKPKANQQKQDDGRGLVLPGY |
| NO: | KYLGPFNGLDKGEPVNAADAAALEHDKAYDQQLKAGDNPYLRYNHADAEF |
| 139 | QERLQEDTSFGGNLGRAVFQAKKRVLEPLGLVEEGAKTAPGKKRPVEXSP |
| (Anc113 | QRSPDSSTGIGKKGQQPAXKRLNFGQTGDSESVPDPQPLGEPPAAPSGVG |
| (AKU89601)) | SGTMAAGGGAPMADNNEGADGVGNASGNWHCDSTWLGDRVITTSTRTWAL |
| | PTYNNHLYKQISSQSAGSTNDNTYFGYSTPWGYFDFNRFHCHFSPRDWQR |
| | LINNNWGFRPKKLXFKLFNIQVKEVTTNDGVTTIANNLTSTVQVFSDSEY |
| | QLPYVLGSAHQGCLPPFPADVFMIPQYGYLTLNNGSQSVGRSSFYCLEYF |
| | PSQMLRTGNNFEFSYTFEDVPFHSSYAHSQSLDRLMNPLIDQYLYYLART |
| | QSTTGGTAGNRELQFXQAGPSTMABQAKNWLPGPCYRQQRVSKTLDQNNN |
| | SNFAWTGATKYHLNGRNSLVNPGVAMATHKDDEDRFFPSSGVLIFGKTGA |
| | ANKTTLENVLMTXEEEIKTTNPVATEEYGXVSSNLQSXNTAPQTQTVNSQ |
| | GALPGMVWQNRDVYLQGPIWAKIPHTDGNFHPSPLMGGFGLKHPPPQILI |
| | KNTPVPANPPEVFTPAKFASFITQYSTGQVSVEIEWELQKENSKRWNPEI |
| | QYTSNYDKSTNVDFAVDSEGVYSEPRPIGTRYLTRNL |
| | (148) . . . (148) Pro or Gln |
| | (169) . . . (169) Lys or Arg |
| | (314) . . . (314) Arg or Asn |
| | (466) . . . (466) Tyr or His |
| | (563) . . . (563) Asn or Ser |
| | (580) . . . (580) Val or Ile |
| | (588) . . . (588) Ala or Ser |
| SEQ ID | MAADGYLPDWLEDNLSEGIREWWDLKPGAPKPKANQQKQDDGRGLVLPGYK |
| NO: | YLGPFNGLDKGEPVNAADAAALEHDKAYDQQLKAGDNPYLRYNHADAEFQ |
| 140 | ERLQEDTSFGGNLGRAVFQAKKRVLEPLGLVEEGAKTAPGKKRPVEQSPQ |
| (Anc126 | EPDSSSGIGKXGQQPAXKRLNFGQTGDSESVPDPQPLGEPPAAPSGVGSN |
| (AKU89602)) | TMASGGGAPMADNNEGADGVGNXSGNWHCDSTWLGDRVITTSTRTWALPT |
| | YNNHLYKQISSQSGASNDNHYFGYSTPWGYFDFNRFHCHFSPRDWQRLIN |
| | NNWGFRPKXLNFKLFNIQVKEVTTNDGTTTIANNLTSTVQVFTDSEYQLP |
| | YVLGSAHQGCLPPFPADVFMIPQYGYLTLNNGSQAVGRSSFYCLEYFPSQ |
| | MLRTGNNFXFSYTFEDVPFHSSYAHSQSLDRLMNPLIDQYLYYLXRTQTT |
| | SGTAQNRELXFSQAGPSSMXNQAKNWLPGPCYRQQRVSKTANDNNNSNFA |
| | WTGATKYHLNGRDSLVNPGPAMASHKDDEDKFFPMSGVLIFGKQGAGASN |
| | VDLDNVMITDEEEIKTTNPVATEQYGTVATNLQSSNTAPATGTVNSQGAL |
| | PGMVWQDRDVYLQGPIWAKIPHTDGHFHPSPLMGGFGLKHPPPQILIKNT |
| | PVPANPPTTFSPAKFASFITQYSTGQVSVEIEWELQKENSKRWNPEIQYT |
| | SNYNKSXNVDFTVDINGVYSEPRPIGTRYLTRNL |
| | (162) . . . (162) Ser or Thr |
| | (168) . . . (168) Lys or Arg |
| | (224) . . . (224) Ala or Ser |
| | (310) . . . (310) Arg or Lys |
| | (410) . . . (410) Thr or Gln |
| | (446) . . . (446) Ser or Asn |
| | (461) . . . (461) Gln or Leu |
| | (471) . . . (471) Ala or Ser |
| | (708) . . . (708) Ala or Thr |
| SEQ ID | MAADGYLPDWLEDNLSEGIREWWDLKPGAPQPKANQQHQDDXRGLVLPGY |
| NO: | KYLGPFNGLDKGEPVNEADAAALEHDKAYDQQLKAGDNPYLKYNHADAEF |
| 141 | QERLQEDTSFGGNLGRAVFQAKKRVLEPLGLVEEAAKTAPGKKRPVEQSP |
| Anc127 | QEPDSSSGIGKSGQQPAXKRLNFGQTGDSESVPDPQPLGEPPAAPSGVGS |
| (AKU89603) | NTMASGGGAPMADNNEGADGVGNSSGNWHCDSTWLGDRVITTSTRTWALP |
| | TYNNHLYKQISSQSGASNDNHYFGYSTPWGYFDFNRFHCHFSPRDWQRLI |
| | NNNWGFRPKXLNFKLFNIQVKEVTQNDGTTTIANNLTSTVQVFTDSEYQL |
| | PYVLGSAHQGCLPPFPADVFMIPQYGYLTLNNGSQAVGRSSFYCLEYFPS |
| | QMLRTGNNFXFSYTFEDVPFHSSYAHSQSLDRLMNPLIDQYLYYLXRTQT |
| | TSGTTQQSRLXFSQAGPSSMXQQAXNWLPGPCYRQQRVSKTANDNNNSNF |
| | AWTXATKYHLNGRDSLVNPGPAMASHKDDEEKFFPMHGXLIFGKQGTGAS |
| | NVDLDNVMITDEEEIRTTNPVATEQYGTVATNLQSSNTAPATGTVNSQGA |
| | LPGMVWQDRDVYLQGPIWAKIPHTDGHFHPSPLMGGFGLKHPPPQILIKN |
| | TPVPANPPTTFSPAKFASFITQYSTGQVSVEIEWELQKENSKRWNPEIQY |
| | TSNYNKSVNVDFTVDINGVYSEPRPIGTRYLTRNL |
| | (42) . . . (42) Gly or Ser |
| | (168) . . . (168) Arg or Lys |
| | (310) . . . (310) Lys or Arg |
| | (410) . . . (410) Thr or Gln |
| | (446) . . . (446) Ser or Arg |
| | (461) . . . (461) Gln or Leu |
| | (471) . . . (471) Ala or Ser |
| | (475) . . . (475) Lys or Arg |
| | (504) . . . (504) Gly or Ala |
| | (539) . . . (539) Val or Asn |
| SEQ ID | MAADGYLPDWLEDNLSEGIREWWDLKPGAPKPKANQQKQDDGRGLVLPGY |
| NO: | KYLGPFNGLDKGEPVNAADAAALEHDKAYDQQLKAGDNPYLRYNHADAEF |
| 142 | QERLQEDTSFGGNLGRAVFQAKKRVLEPLGLVEEGAKTAPGKKRPVEQSP |
| (Anc80 | QEPDSSSGIGKKGQQPARKRLNFGQTGDSESVPDPQPLGEPPAAPSGVGS |
| L65 | NTMAAGGGAPMADNNEGADGVGNASGNWHCDSTWLGDRVITTSTRTWALP |
| (AKU89595)) | TYNNHLYKQISSQSGGSTNDNTYFGYSTPWGYFDFNRFHCHFSPRDWQRL |
| | INNNWGFRPKKLNFKLFNIQVKEVTTNDGTTTIANNLTSTVQVFTDSEYQ |
| | LPYVLGSAHQGCLPPFPADVFMIPQYGYLTLNNGSQAVGRSSFYCLEYFP |
| | SQMLRTGNNFQFSYTFEDVPFHSSYAHSQSLDRLMNPLIDQYLYYLSRTQ |
| | TTSGTAGNRTLQFSQAGPSSMANQAKNWLPGPCYRQQRVSKTTNQNNNSN |
| | FAWTGATKYHLNGRDSLVNPGPAMATHKDDEDKFFPMSGVLIFGKQGAGN |
| | SNVDLDNVMITNEEEIKTTNPVATEEYGTVATNLQSANTAPATGTVNSQG |
| | ALPGMVWQDRDVYLQGPIWAKIPHTDGHFHPSPLMGGFGLKHPPPQILIK |
| | NTPVPANPPTTFSPAKFASFITQYSTGQVSVEIEWELQKENSKRWNPEIQ |
| | YTSNYNKSTNVDFAVDINGVYSEPRPIGTRYLTRNL |
| SEQ ID | MAADGYLPDWLEDNLSEGIREWWDLKPGAPKPKANQQKQDDGRGLVLPGY |
| NO: | KYLGPFNGLDKGEPVNAADAAALEHDKAYDQQLKAGDNPYLRYNHADAEF |
| 143 | QERLQEDTSFGGNLGRAVFQAKKRVLEPLGLVEEGAKTAPGKKRPVBQSP |
| (Anc80 | QEPDSSSGIGKKGQQPAKKRLNFGQTGDSESVPDPQPLGEPPAAPSGVGS |
| L1) | NTMAAGGGAPMADNNEGADGVGNASGNWHCDSTWLGDRVITTSTRTWALP |
| | TYNNHLYKQISSQSGASTNDNTYFGYSTPWGYFDFNRFHCHFSPRDWQRL |
| | INNNWGFRPKRLNFKLFNIQVKEVTTNDGTTTIANNLTSTVQVFTDSEYQ |
| | LPYVLGSAHQGCLPPFPADVFMIPQYGYLTLNNGSQAVGRSSFYCLEYFP |
| | SQMLRTGNNFEFSYTFEDVPFHSSYAHSQSLDRLMNPLIDQYLYYLSRTQ |
| | TTSGTAGNRTLQFSQAGPSSMANQAKNWLPGPCYRQQRVSKTANQNNNSN |
| | FAWTGATKYHLNGRDSLVNPGPAMATHKDDEDKFFPMSGVLIFGKQGAGN |
| | SNVDLDNVMITSEEEIKTTNPVATEQYGTVATNLQSSNTAPATGTVNSQG |
| | ALPGMVWQNRDVYLQGPIWAKIPHTDGHFHPSPLMGGFGLKHPPPQILIK |
| | NTPVPANPPTTFSPAKFASFITQYSTGQVSVEIEWELQKENSKRWNPEIQ |
| | YTSNYNKSTNVDFAVDINGVYSEPRPIGTRYLTRNL |
| SEQ ID | MAADGYLPDWLEDNLSEGIREWWDLKPGAPKPKANQQKQDDGRGLVLPGY |
| NO: | KYLGPFNGLDKGEPVNAADAAALEHDKAYDQQLKAGDNPYLRYNHADAEF |
| 144 | QERLQEDTSFGGNLGRAVFQAKKRVLEPLGLVEEGAKTAPGKKRPVEQSP |
| (Anc80 | QEPDSSSGIGKKGQQPARKRLNFGQTGDSESVPDPQPLGEPPAAPSGVGS |
| L27) | NTMAAGGGAPMADNNEGADGVGNASGNWHCDSTWLGDRVITTSTRTWALP |
| | TYNNHLYKQISSQSGGSTNDNTYFGYSTPWGYFDFNRFHCHFSPRDWQRL |
| | INNNWGFRPKRLNFKLFNIQVKEVTINDGTTTIANNLTSTVQVFTDSEYQ |
| | LPYVLGSAHQGCLPPFPADVFMIPQYGYLTLNNGSQAVGRSSFYCLEYFP |
| | SQMLRTGNNFEFSYTFEDVPFHSSYAHSQSLDRLMNPLIDQYLYYLSRTQ |
| | TTSGTAGNRTLQFSQAGPSSMANQAKNWLPGPCYRQQRVSKTANQNNNSN |
| | FAWTGATKYHLNGRDSLVNPGPAMATHKDDEDKFFPMSGVLIFGKQGAGN |
| | SNVDLDNVMITNEEEIKTTNPVATEQYGTVATNLQSANTAPATGTVNSQG |
| | ALPGMVWQDRDVYLQGPIWAKIPHTDGHFHPSPLMGGFGLKHPPPQILIK |
| | NTPVPANPPTTFSPAKFASFITQYSTGQVSVEIEWELQKENSKRWNPEIQ |
| | YTSNYNKSTNVDFAVDINGVYSEPRPIGTRYLTRNL |
| SEQ ID | MAADGYLPDWLEDNLSEGIREWWDLKPGAPKPKANQQKQDDGRGLVLPGY |
| NO: | KYLGPFNGLDKGEPVNAADAAALEHDKAYDQQLKAGDNPYLRYNHADAEF |
| 145 | QERLQEDTSFGGNLGRAVFQAKKRVLEPLGLVEEGAKTAPGKKRPVEQSP |
| (Anc80 | QEPDSSSGIGKKGQQPAKKRLNFGQTGDSESVPDPQPLGEPPAAPSGVGS |
| L33) | NTMAAGGGAPMADNNEGADGVGNASGNWHCDSTWLGDRVITTSTRTWALP |
| | TYNNHLYKQISSQSGGSTNDNTYFGYSTPWGYFDFNRFHCHFSPRDWQRL |
| | INNNWGFRPKKLNFKLFNIQVKEVTTNDGTTTIANNLTSTVQVFTDSEYQ |
| | LPYVLGSAHQGCLPPFPADVFMIPQYGYLTLNNGSQAVGRSSFYCLEYFP |
| | SQMLRTGNNFEFSYTFEDVPFHSSYAHSQSLDRLMNPLIDQYLYYLSRTQ |
| | TTSGTAGNRTLQFSQAGPSSMANQAKNWLPGPCYRQQRVSKTANQNNNSN |
| | FAWTGATKYHLNGRDSLVNPGPAMATHKDDEDKFFPMSGVLIFGKQGAGN |
| | SNVDLDNVMITSEEEIKTTNPVATEQYGTVATNLQSSNTAPATGTVNSQG |
| | ALPGMVWQNRDVYLQGPIWAKIPHTDGHFHPSPLMGGFGLKHPPPQILIK |
| | NTPVPANPPTTFSPAKFASFITQYSTGQVSVEIEWELQKENSKRWNPEIQ |
| | YTSNYNKSTNVDFAVDTNGVYSEPRPIGTRYLTRNL |
| SEQ ID | MAADGYLPDWLEDNLSEGIREWWDLKPGAPKPKANQQKQDDGRGLVLPGY |
| NO: | KYLGPFNGLDKGEPVNAADAAALEHDKAYDQQLKAGDNPYLRYNHADAEF |
| 146 | QERLQEDTSFGGNLGRAVFQAKKRVLEPLGLVEEGAKTAPGKKRPVEQSP |
| (Anc80 | QEPDSSSGIGKKGQQPAKKRLNFGQTGDSESVPDPQPLGEPPAAPSGVGS |
| L36) | NTMASGGGAPMADNNEGADGVGNASGNWHCDSTWLGDRVITTSTRTWALP |
| | TYNNHLYKQISSQSGGSTNDNTYFGYSTPWGYFDFNRFHCHFSPRDWQRL |
| | INNNWGFRPKKLNFKLFNIQVKEVTTNDGTTTIANNLTSTVQVFTDSEYQ |
| | LPYVLGSAHQGCLPPFPADVFMIPQYGYLTLNNGSQAVGRSSFYCLEYFP |
| | SQMLRTGNNFEFSYTFEDVPFHSSYAHSQSLDRLMNPLIDQYLYYLSRTQ |
| | TTSGTAGNRTLQFSQAGPSSMANQAKNWLPGPCYRQQRVSKTANQNNNSN |
| | FAWTGATKYHLNGRDSLVNPGPAMATHKDDEDKFFPMSGVLIFGKQGAGN |
| | SNVDLDNVMITSEEEIKTTNPVATEEYGTVATNLQSSNTAPATGTVNSQG |
| | ALPGMVWQNRDVYLQGPIWAKIPHTDGHFHPSPLMGGFGLKHPPPQILIK |
| | NTPVPANPPTTFSPAKFASFITQYSTGQVSVEIEWELQKENSKRWNPEIQ |
| | YTSNYNKSTNVDFAVDINGVYSEPRPIGTRYLTRNL |
| SEQ ID | MAADGYLPDWLEDNLSEGIREWWDLKPGAPKPKANQQKQDDGRGLVLPGY |
| NO: | KYLGPFNGLDKGEPVNAADAAALEHDKAYDQQLKAGDNPYLRYNHADAEF |
| 147 | QERLQEDTSFGGNLGRAVFQAKKRVLEPLGLVEEGAKTAPGKKRPVEQSP |
| (Anc80 | QEPDSSSGIGKKGQQPAKKRLNFGQTGDSESVPDPQPLGEPPAAPSGVGS |
| L44) | NTMASGGGAPMADNNEGADGVGNASGNWHCDSTWLGDRVITTSTRTWALP |
| | TYNNHLYKQISSQSGGSTNDNTYFGYSTPWGYFDFNRFHCHFSPRDWQRL |
| | INNNWGFRPKKLNFKLFNIQVKEVTTNDGTTTIANNLTSTVQVFTDSEYQ |
| | LPYVLGSAHQGCLPPFPADVFMIPQYGYLTLNNGSQAVGRSSFYCLEYFP |
| | SQMLRTGNNFQFSYTFEDVPFHSSYAHSQSLDRLMNPLIDQYLYYLSRTQ |
| | TTSGTAGNRELQFSQAGPSSMANQAKNWLPGPCYRQQRVSKTTNQNNNSN |
| | FAWTGATKYHLNGRDSLVNPGPAMATHKDDEDKFFPMSGVLIFGKQGAGN |
| | SNVDLDNVMITNEEEIKTINPVATEQYGTVATNLQSANTAPATGTVNSQG |
| | ALPGMVWQDRDVYLQGPIWAKIPHTDGHFHPSPLMGGFGLKHPPPQILIK |
| | NTPVPANPPTTFSPAKFASFITQYSTGQVSVEIEWELQKENSKRWNPEIQ |
| | YTSNYNKSTNVDFAVDINGVYSEPRPIGTRYLTRNL |
| SEQ ID | MAADGYLPDWLEDNLSEGIREWWDLKPGAPKPKANQQKQDDGRGLVLPGY |
| NO: | KYLGPFNGLDKGEPVNAADAAALEHDKAYDQQLKAGDNPYLRYNHADAEF |
| 148 | QERLQEDTSFGGNLGRAVFQAKKRVLEPLGLVEEGAKTAPGKKRPVEQSP |
| (Anc80 | QEPDSSSGIGKKGQQPAKKRLNFGQTGDSESVPDPQPLGEPPAAPSGVGS |
| L59) | NTMASGGGAPMADNNEGADGVGNASGNWHCDSTWLGDRVITTSTRTWALP |
| | TYNNHLYKQISSQSGASTNDNTYFGYSTPWGYFDFNRFHCHFSPRDWQRL |
| | INNNWGFRPKRLNEKLFNIQVKEVTINDGTTTIANNLTSTVQVFTDSEYQ |
| | LPYVLGSAHQGCLPPFPADVFMIPQYGYLTLNNGSQAVGRSSFYCLEYFP |
| | SQMLRTGNNFQFSYTFEDVPFHSSYAHSQSLDRLMNPLIDQYLYYLSRTQ |
| | TTSGTAGNRELQFSQAGPSSMANQAKNWLPGPCYRQQRVSKTTNQNNNSN |
| | FAWTGATKYHLNGRDSLVNPGPAMATHKDDEDKFFPMSGVLIFGKQGAGN |
| | SNVDLDNVMITNEEEIKTTNPVATBEYGTVATNLQSANTAPATGTVNSQG |
| | ALPGMVWQNRDVYLQGPIWAKIPHTDGHFHPSPLMGGFGLKHPPPQILIK |
| | NTPVPANPPTTFSPAKFASFITQYSTGQVSVEIEWELQKENSKRWNPEIQ |
| | YTSNYNKSTNVDFAVDINGVYSEPRPIGTRYLTRNL |
| SEQ ID | MAADGYLPDWLEDNLSEGIREWWDLKPGAPKPKANQQKQDDGRGLVLPGY |
| NO: | KYLGPFNGLDKGEPVNAADAAALEHDKAYDQQLKAGDNPYLRYNHADAEF |
| 149 | QERLQEDTSFGGNLGRAVFQAKKRVLEPLGLVEEGAKTAPGKKRPVEQSP |
| (Anc80 | QEPDSSSGIGKKGQQPARKRLNFGQTGDSESVPDPQPLGEPPAAPSGVGS |
| L60) | NTMAAGGGAPMADNNEGADGVGNASGNWHCDSTWLGDRVITTSTRTWALP |
| | TYNNHLYKQISSQSGGSTNDNTYFGYSTPWGYFDFNRFHCHFSPRDWQRL |
| | INNNWGFRPKRLNEKLFNIQVKEVTTNDGTTTIANNLTSTVQVFTDSEYQ |
| | LPYVLGSAHQGCLPPFPADVFMIPQYGYLTLNNGSQAVGRSSFYCLEYFP |
| | SQMLRTGNNFEFSYTFEDVPFHSSYAHSQSLDRLMNPLIDQYLYYLSRTQ |
| | TTSGTAGNRELQFSQAGPSSMANQAKNWLPGPCYRQQRVSKTTNQNNNSN |
| | FAWTGATKYHLNGRDSLVNPGPAMATHKDDEDKFFPMSGVLIFGKQGAGN |
| | SNVDLDNVMITSEEEIKTTNPVATEEYGTVATNLQSSNTAPATGTVNSQG |
| | ALPGMVWQERDVYLQGPIWAKIPHTDGHFHPSPLMGGFGLKHPPPQILIK |
| | NTPVPANPPTTFSPAKFASFITQYSTGQVSVEIEWELQKENSKRWNPEIQ |
| | YTSNYNKSTNVDFAVDINGVYSEPRPIGTRYLTRNL |
| SEQ ID | MAADGYLPDWLEDNLSEGIREWWDLKPGAPKPKANQQKQDDGRGLVLPGY |
| NO: | KYLGPFNGLDKGEPVNAADAAALEHDKAYDQQLKAGDNPYLRYNHADAEF |
| 150 | QERLQEDTSFGGNLGRAVFQAKKRVLEPLGLVEEGAKTAPGKKRPVEQSP |
| (Anc80 | QEPDSSSGIGKKGQQPARKRLNFGQTGDSESVPDPQPLGEPPAAPSGVGS |
| L62) | NTMASGGGAPMADNNEGADGVGNASGNWHCDSTWLGDRVITTSTRTWALP |
| | TYNNHLYKQISSQSGGSTNDNTYFGYSTPWGYFDFNRFHCHFSPRDWQRL |
| | INNNWGFRPKKLNFKLFNIQVKEVTTNDGTTTIANNLTSTVQVFTDSEYQ |
| | LPYVLGSAHQGCLPPFPADVFMIPQYGYLTLNNGSQAVGRSSFYCLEYFP |
| | SQMLRTGNNFEFSYTFEDVPFHSSYAHSQSLDRLMNPLIDQYLYYLSRTQ |
| | TTSGTAGNRELQFSQAGPSSMANQAKNWLPGPCYRQQRVSKTTNQNNNSN |
| | FAWTGATKYHLNGRDSLVNPGPAMATHKDDEDKFFPMSGVLIFGKQGAGN |
| | SNVDLDNVMITSEEEIKTTNPVATEEYGTVATNLQSANTAPATGTVNSQG |
| | ALPGMVWQDRDVYLQGPIWAKIPHTDGHFHPSPLMGGFGLKHPPPQILIK |
| | NTPVPANPPTTFSPAKFASFITQYSTGQVSVEIEWELQKENSKRWNPEIQ |
| | YTSNYNKSTNVDFAVDINGVYSEPRPIGTRYLTRNL |
| SEQ ID | MAADGYLPDWLEDNLSEGIREWWDLKPGAPKPKANQQKQDDGRGLVLPGY |
| NO: | KYLGPFNGLDKGEPVNAADAAALEHDKAYDQQLKAGDNPYLRYNHADAEF |
| 151 | QERLQEDTSFGGNLGRAVFQAKKRVLEPLGLVEEGAKTAPGKKRPVEQSP |
| (Anc82 | QREPDSSTGIGKSGQQPAKKRLNFGQTGDSESVPDPQPLGEPPAAPSGVG |
| DI) | SNTMASGGGAPMADNNEGADGVGNSSGNWHCDSTWLGDRVITTSTRTWAL |
| | PTYNNHLYKQISNGTSGGSTNDNTYFGYSTPWGYFDFNRFHCHFSPRDWQ |
| | RLINNNWGFRPKRLNFKLFNIQVKEVTTNEGTKTIANNLTSTVQVFTDSE |
| | YQLPYVLGSAHQGCLPPFPADVFMIPQYGYLTLNNGSQAVGRSSFYCLEY |
| | FPSQMLRTGNNFQFSYTFEDVPFHSSYAHSQSLDRLMNPLIDQYLYYLSR |
| | TQTTGGTAGTQTLQFSQAGPSSMANQARNWVPGPCYRQQRVSTTTNQNNN |
| | SNFAWTGATKYHLNGRDSLMNPGVAMASHKDDEDRFFPSSGVLIFGKQGA |
| | GNDNVDYSNVMITSEEEIKTTNPVATEEYGVVATNHQSANTQAQTGTVQN |
| | QGILPGMVWQNRDVYLQGPIWAKIPHTDGNFHPSPLMGGFGLKHPPPQIL |
| | IKNTPVPADPPTTFNQAKLNSFITQYSTGQVSVEIEWELQKENSKRWNPE |
| | IQYTSNYYKSTNVDFAVNTEGVYSEPRPIGTRYLTRNL |
| SEQ ID | MAADGYLPDWLEDNLSEGIREWWDLKPGAPKPKANQQKQDNGRGLVLPGY |
| NO: | KYLGPFNGLDKGEPVNAADAAALEHDKAYDQQLQAGDNPYLRYNHADAEF |
| 152 | QERLQEDTSFGGNLGRAVFQAKKRVLEPLGLVESPVKTAPGKKRPVEPSP |
| (AAV | QRSPDSSTGIGKKGQQPAKKRLNFGQTGDSESVPDPQPIGEPPAGPSGLG |
| rh. 74) | SGTMAAGGGAPMADNNEGADGVGSSSGNWHCDSTWLGDRVITTSTRTWAL |
| | PTYNNHLYKQISNGTSGGSTNDNTYFGYSTPWGYFDFNRFHCHFSPRDWQ |
| | RLINNNWGFRPKRLNFKLFNIQVKEVTQNEGTKTIANNLTSTIQVFTDSE |
| | YQLPYVLGSAHQGCLPPFPADVFMIPQYGYLTLNNGSQAVGRSSFYCLEY |
| | FPSQMLRTGNNFEFSYNFEDVPFHSSYAHSQSLDRLMNPLIDQYLYYLSR |
| | TQSTGGTAGTQQLLFSQAGPNNMSAQAKNWLPGPCYRQQRVSTTLSQNNN |
| | SNFAWTGATKYHLNGRDSLVNPGVAMATHKDDEERFFPSSGVLMFGKQGA |
| | GKDNVDYSSVMLTSEEEIKTTNPVATEQYGVVADNLQQQNAAPIVGAVNS |
| | QGALPGMVWQNRDVYLQGPIWAKIPHTDGNFHPSPLMGGFGLKHPPPQIL |
| | IKNTPVPADPPTTFNQAKLASFITQYSTGQVSVEIEWELQKENSKRWNPE |
| | IQYTSNYYKSTNVDFAVNTEGTYSEPRPIGTRYLTRNL |
| SEQ ID | RGDLRVS |
| NO: | |
| 153 | |
| SEQ ID | RGDAVGV |
| NO: | |
| 154 | |
| SEQ ID | RGDFTPTS |
| NO: | |
| 155 | |
| SEQ ID | RGDLGLS |
| NO: | |
| 156 | |
| SEQ ID | RGDMSRE |
| NO: | |
| 157 | |
| SEQ ID | MAADGYLPDWLEDNLSEGIREWWALKPGAPQPKANQQHQDNARGLVLPGY |
| NO: | KYLGPGNGLDKGEPVNAADAAALEHDKAYDQQLKAGDNPYLKYNHADAEF |
| 158 | QERLKEDTSFGGNLGRAVFQAKKRLLEPLGLVEEAAKTAPGKKRPVEQSP |
| (AAV9- | QEPDSSAGIGKSGAQPAKKRLNFGQTGDTESVPDPQPIGEPPAAPSGVGS |
| decol) | LTMASGGGAPVADNNEGADGVGSSSGNWHCDSQWLGDRVITTSTRTWALP |
| | TYNNHLYKQISNSTSGGSSNDNAYFGYSTPWGYFDFNRFHCHFSPRDWQR |
| | LINNNWGFRPKRLNFKLFNIQVKEVTDNNGVKTIANNLTSTVQVFTDSDY |
| | QLPYVLGSAHEGCLPPFPADVFMIPQYGYLTLNDGSQAVGRSSFYCLEYF |
| | PSQMLRTGNNFQFSYEFENVPFHSSYAHSQSLDRLMNPLIDQYLYYLSKT |
| | INGSGQNQQTLKFSVAGPSNMAVQGRNYIPGPSYRQQRVSTTVTQNNNSE |
| | FAWPGASSWALNGRNSLMNPGPAMASHKEGEDRFFPLSGSLIFGKQGTGR |
| | DNVDADKVMITNEEEIKTTNPVATESYGQVATNHQSAQRGDLLLSAQAQT |
| | GWVQNQGILPGMVWQDRDVYLQGPIWAKIPHTDGNFHPSPLMGGFGMKHP |
| | PPQILIKNTPVPADPPTAFNKDKLNSFITQYSTGQVSVEIEWELQKENSK |
| | RWNPEIQYTSNYYKSNNVEFAVNTEGVYSEPRPIGTRYLTRNL |
| SEQ ID | MAADGYLPDWLEDNLSEGIREWWALKPGAPQPKANQQHQDNARGLVLPGY |
| NO: | KYLGPGNGLDKGEPVNAADAAALEHDKAYDQQLKAGDNPYLKYNHADAEF |
| 159 | QERLKEDTSFGGNLGRAVFQAKKRLLEPLGLVEEAAKTAPGKKRPVEQSP |
| (AAV9. | QEPDSSAGIGKSGAQPAKKRLNFGQTGDTESVPDPQPIGEPPAAPSGVGS |
| decol- | LTMASGGGAPVADNNEGADGVGSSSGNWHCDSQWLGDRVITTSTRTWALP |
| mut1) | TYNNHLYKQISNSTSGASTNDNAYFGYSTPWGYFDFNRFHCHFSPRDWQR |
| | LINNNWGFRPKRLNFKLFNIQVKEVTDNNGVKTIANNLTSTVQVFTDSDY |
| | QLPYVLGSAHEGCLPPFPADVFMIPQYGYLTLNDGSQAVGRSSFYCLEYF |
| | PSQMLRTGNNFQFSYEFENVPFHSSYAHSQSLDRLMNPLIDQYLYYLSKT |
| | INGSGQNQQTLKFSVAGPSNMAVQGRNYIPGPSYRQQRVSTTVTQNNNSE |
| | FAWPGASSWALNGRNSLMNPGPAMASHKEGEDRFFPLSGSLIFGKQGTGR |
| | DNVDADKVMITNEEEIKTTNPVATESYGQVATNHQSAQRGDLLLSAQAQT |
| | GWVQNQGILPGMVWQDRDVYLQGPIWAKIPHTDGNFHPSPLMGGFGMKHP |
| | PPQILIKNTPVPADPPTAFNKDKLNSFITQYSTGQVSVEIEWELQKENSK |
| | RWNPEIQYTSNYYKSNNVEFAVNTEGVYSEPRPIGTRYLTRNL |
| SEQ ID | NSTSGASS |
| NO: | |
| 160 | |
| SEQ ID | NSTSGGST |
| NO: | |
| 161 | |
| SEQ ID | NSTSGAST |
| NO: | |
| 162 | |
| SEQ ID | MAADGYLPDWLEDNLSEGIREWWALKPGAPQPKANQQHQDNARGLVLPGY |
| NO: | KYLGPGNGLDKGEPVNAADAAALEHDKAYDQQLKAGDNPYLKYNHADAEF |
| 163 | QERLKEDTSFGGNLGRAVFQAKKRLLEPLGLVEEAAKTAPGKKRPVEQSP |
| (AAV9- | QEPDSSAGIGKSGAQPAKKRLNFGQTGDTESVPDPQPIGEPPAAPSGVGS |
| mut1) | LTMASGGGAPVADNNEGADGVGSSSGNWHCDSQWLGDRVITTSTRTWALP |
| | TYNNHLYKQISNSTSGASTNDNAYFGYSTPWGYFDFNRFHCHFSPRDWQR |
| | LINNNWGFRPKRLNEKLFNIQVKEVTDNNGVKTIANNLTSTVQVFTDSDY |
| | QLPYVLGSAHEGCLPPFPADVFMIPQYGYLTLNDGSQAVGRSSFYCLEYF |
| | PSQMLRTGNNFQFSYEFENVPFHSSYAHSQSLDRLMNPLIDQYLYYLSKT |
| | INGSGQNQQTLKFSVAGPSNMAVQGRNYIPGPSYRQQRVSTTVTQNNNSE |
| | FAWPGASSWALNGRNSLMNPGPAMASHKEGEDRFFPLSGSLIFGKQGTGR |
| | DNVDADKVMITNEEEIKTTNPVATESYGQVATNHQSAQAQAQTGWVQNQG |
| | ILPGMVWQDRDVYLQGPIWAKIPHTDGNFHPSPLMGGFGMKHPPPQILIK |
| | NTPVPADPPTAFNKDKLNSFITQYSTGQVSVEIEWELQKENSKRWNPEIQ |
| | YTSNYYKSNNVEFAVNTEGVYSEPRPIGTRYLTRNL |
| SEQ ID | RDLTEAVPRLPGETLITDKEVIYICPFNGPIKGRVYITNYRLYLRSLETD |
| NO: | SSLILDVPLGVISRIEKMGGATSRGENSYGLDITCKDMRNLRFALKQEGH |
| 164 | SRRDMFEILTRYAFPLAHSLPLFAFLNEEKFNVDGWTVYNPVEEYRRQGL |
| (A1) | PNHHWRITFINKCYELCDTYPALLVVPYRASDDDLRRVATFRSRNRIPVL |
| | SWIHPENKTVIVRCSQPLVGMSGKRNKDDEKYLDVIRETNKQISKLTIYD |
| | ARPSVNAVANKATGGGYESDDAYHNAELFFLDIHNIHVMRESLKKVKDIV |
| | YPNVEESHWLSSLESTHWLEHIKLVLTGAIQVADKVSSGKSSVLVHCSDG |
| | WDRTAQLTSLAMLMLDSFYRSIEGFEILVQKEWISFGHKFASRIGHGDKN |
| | HTDADRSPIFLQFIDCVWQMSKQFPTAFEFNEQFLIIILDHLYSCRFGTF |
| | LFNCESAR |
| SEQ ID | MASASTSKYNSHSLENESIKRTSRDGVNRDLTEAVPRLPGETLITDKEVI |
| NO: | YICPFNGPIKGRVYITNYRLYLRSLETDSSLILDVPLGVISRIEKMGGAT |
| 165 | SRGENSYGLDITCKDMRNLRFALKQEGHSRRDMFEILTRYAFPLAHSLPL |
| (MTM1 | FAFLNEEKFNVDGWTVYNPVEEYRRQGLPNHHWRITFINKCYELCDTYPA |
| amino | LLVVPYRASDDDLRRVATFRSRNRIPVLSWIHPENKTVIVRCSQPLVGMS |
| acid | GKRNKDDEKYLDVIRETNKQISKLTIYDARPSVNAVANKATGGGYESDDA |
| sequence: | YHNAELFFLDIHNIHVMRESLKKVKDIVYPNVEESHWLSSLESTHWLEHI |
| A2) | KLVLTGAIQVADKVSSGKSSVLVHCSDGWDRTAQLTSLAMLMLDSFYRSI |
| | EGFEILVQKEWISFGHKFASRIGHGDKNHTDADRSPIFLQFIDCVWQMSK |
| | QFPTAFEFNEQFLIULDHLYSCRFGTFLENCESARERQKVTERTVSLWSL |
| | INSNKEKFKNPFYTKEINRVLYPVASMRHLELWVNYYIRWNPRIKQQQPN |
| | PVEQRYMELLALRDEYIKRLEELQLANSAKLSDPPTSPSSPSQMMPHVQT |
| | HF |
| SEQ ID | ATGGCTTCTGCATCAACTTCTAAATATAATTCACACTCCTTGGAGAATGA |
| NO: | GTCTATTAAGAGGACGTCTCGAGATGGAGTCAATCGAGATCTCACTGAGG |
| 166 | CTGTTCCTCGACTTCCAGGAGAAACACTAATCACTGACAAAGAAGTTATT |
| (A3: | TACATATGTCCTTTCAATGGCCCCATTAAGGGAAGAGTTTACATCACAAA |
| MTM1 | TTATCGTCTTTATTTAAGAAGTTTGGAAACGGATTCTTCTCTAATACTTG |
| coding | ATGTTCCTCTGGGTGTGATCTCGAGAATTGAAAAAATGGGAGGCGCGACA |
| seq) | AGTAGAGGAGAAAATTCCTATGGTCTAGATATTACTTGTAAAGACATGAG |
| | AAACCTGAGGTTCGCTTTGAAACAGGAAGGCCACAGCAGAAGAGATATGT |
| | TTGAGATCCTCACGAGATACGCGTTTCCCCTGGCTCACAGTCTGCCATTA |
| | TTTGCATTTTTAAATGAAGAAAAGTTTAACGTGGATGGATGGACAGTTTA |
| | CAATCCAGTGGAAGAATACAGGAGGCAGGGCTTGCCCAATCACCATTGGA |
| | GAATAACTTTTATTAATAAGTGCTATGAGCTCTGTGACACTTACCCTGCT |
| | CTTTTGGTGGTTCCGTATCGTGCCTCAGATGATGACCTCCGGAGAGTTGC |
| | AACTTTTAGGTCCCGAAATCGAATTCCAGTGCTGTCATGGATTCATCCAG |
| | AAAATAAGACGGTCATTGTGCGTTGCAGTCAGCCTCTTGTCGGTATGAGT |
| | GGGAAACGAAATAAAGATGATGAGAAATATCTCGATGTTATCAGGGAGAC |
| | TAATAAACAAATTTCTAAACTCACCATTTATGATGCAAGACCCAGCGTAA |
| | ATGCAGTGGCCAACAAGGCAACAGGAGGAGGATATGAAAGTGATGATGCA |
| | TATCATAACGCCGAACTTTTCTTCTTAGACATTCATAATATTCATGTTAT |
| | GCGGGAATCTTTAAAAAAAGTGAAGGACATTGTTTATCCTAATGTAGAAG |
| | AATCTCATTGGTTGTCCAGTTTGGAGTCTACTCATTGGTTAGAACATATC |
| | AAGCTCGTTTTGACAGGAGCCATTCAAGTAGCAGACAAAGTTTCTTCAGG |
| | GAAGAGTTCAGTGCTTGTGCATTGCAGTGACGGATGGGACAGGACTGCTC |
| | AGCTGACATCCTTGGCCATGCTGATGTTGGATAGCTTCTATAGGAGCATT |
| | GAAGGGTTCGAAATACTGGTACAAAAAGAATGGATAAGTTTTGGACATAA |
| | ATTTGCATCTCGAATAGGTCATGGTGATAAAAACCACACCGATGCTGACC |
| | GTTCTCCTATTTTTCTCCAGTTTATTGATTGTGTGTGGCAAATGTCAAAA |
| | CAGTTCCCTACAGCTTTTGAATTCAATGAACAATTTTTGATTATAATTTT |
| | GGATCATCTGTATAGTTGCCGATTTGGTACTTTCTTATTCAACTGTGAAT |
| | CTGCTCGAGAAAGACAGAAGGTTACAGAAAGGACTGTTTCTTTATGGTCA |
| | CTGATAAACAGTAATAAAGAAAAATTCAAAAACCCCTTCTATACTAAAGA |
| | AATCAATCGAGTTTTATATCCAGTTGCCAGTATGCGTCACTTGGAACTCT |
| | GGGTGAATTACTACATTAGATGGAACCCCAGGATCAAGCAACAACAGCCG |
| | AATCCAGTGGAGCAGCGTTACATGGAGCTCTTAGCCTTACGCGACGAATA |
| | CATAAAGCGGCTTGAGGAACTGCAGCTCGCCAACTCTGCCAAGCTTTCTG |
| | ATCCCCCAACTTCACCTTCCAGTCCTTCGCAAATGATGCCCCATGTGCAA |
| | ACTCACTTTTAA |
| SEQ ID | TTAAAAGTGGGTCTGGACGTGGGGCATCATCTGTGAGGGGCTGCTTGGTG |
| NO: 167 | AAGTAGGTGGGTCGGACAGCTTGGCGCTATTGGCCAGCTGCAGCTCCTCC |
| (A4) | AGCCTCTTGATATACTCATCTCTCAGGGCCAGCAGCTCCATGTACCGCTG |
| (Genscript | CTCCACAGGGTTGGGCTGCTGCTGCTTGATCCGGGGATTCCAGCGGATAT |
| codon | AGTAGTTCACCCACAGCTCCAGGTGTCTCATGGATGCCACAGGATACAGC |
| optimized | ACGCGATTGATCTCCTTTGTGTAGAAGGGGTTCTTGAACTTCTCCTTATT |
| MTM1) | GCTGTTGATCAGGCTCCACAGAGACACTGTGCGCTCGGTCACCTTCTGCC |
| | TCTCTCTGGCAGACTCACAATTAAACAGGAATGTGCCGAACCTGCAGGAG |
| | TACAGGTGGTCCAGGATGATGATCAGAAACTGCTCGTTAAACTCGAAGGC |
| | GGTTGGGAACTGCTTGGACATCTGCCACACGCAGTCGATAAACTGCAGGA |
| | AGATAGGGCTGCGGTCGGCATCGGTGTGATTCTTATCGCCGTGGCCGATC |
| | CTGGAGGCAAACTTGTGGCCGAAGCTGATCCACTCCTTCTGCACCAGGAT |
| | CTCAAAGCCCTCGATAGATCTATAGAAGGAGTCCAGCATCAGCATaGCCA |
| | GGCTTGTCAGCTGTGCTGTTCTGTCCCACCCATCGGAACAGTGCAC |
| | CAGCACGGAGCTCTTGCCAGAGGACACCTTATCGGCCACCTGGATGGCGC |
| | CTGTCAGCACCAGCTTGATGTGCTCCAGCCAGTGGGTAGACTCCAGGCTA |
| | GACAGCCAGTGGGACTCCTCCACGTTTGGGTACACGATGTCCTTCACCTT |
| | CTTCAGGGACTCTCTCATCACGTGGATATTGTGGATATCCAGAAAGAACA |
| | GCTCGGCGTTGTGATAGGCGTCATCAGACTCATATCCTCCTCCTGTTGCC |
| | TTATTTGCCACTGCATTCACAGAAGGCCGGGCATCATAGATTGTCAGCTT |
| | GCTGATCTGCTTATTTGTCTCTCTGATCACATCCAGGTACTTCTCGTCAT |
| | CCTTGTTCCGCTTGCCAGACATTCCCACCAGTGGCTGGGAGCAGCGCACG |
| | ATCACTGTCTTATTCTCTGGGTGGATCCAGCTCAGCACAGGGATTCTGTT |
| | CCGGCTCCGGAAGGTGGCCACTCTCCGCAGGTCATCGTCGCTGGCTCTGT |
| | AGGGCACCACCAGCAGGGCTGGATATGTATCGCACAGCTCGTAGCACTTA |
| | TTGATAAAGGTGATCCGCCAGTGGTGGTTAGGCAGGCCCTGGCGCCTATA |
| | CTCCTCCACGGGGTTGTACACTGTCCAGCCGTCCACATTGAACTTCTCCT |
| | CGTTCAGAAAGGCGAACAGAGGCAGAGAGTGGGCCAGGGGAAAGGCATAT |
| | CTGGTCAGGATCTCGAACATATCTCTCCGGGAGTGGCCCTCCTGCTTCAG |
| | GGCAAACCGCAGATTGCGCATGTCCTTACAGGTGATATCCAGGCCGTAGC |
| | TGTTCTCTCCCCTAGAGGTGGCTCCTCCCATCTTCTCGATTCTGCTGATC |
| | ACGCCCAGAGGCACGTCCAGGATCAGGGAGCTATCTGTCTCCAGGCTCCG |
| | CAGGTACAGTCTGTAATTGGTGATATACACGCGGCCCTTGATTGGGCCGT |
| | TGAAAGGGCAGATGTAGATCACTTCCTTGTCTGTGATCAGTGTCTCTCCA |
| | GGCAGCCTTGGCACTGCCTCTGTCAGATCTCTATTGACCCCGTCCCTTGA |
| | GGTTCTCTTGATGCTCTCGTTTTCCAGGCTATGTGAGTTGTATTTGCTTG |
| | TGCTTGCTGATGCCAT |
| SEQ ID | ATGGCTTCTGCATCAACTTCTAAATATAATTCACACTCCTTGGAGAATGA |
| NO: | GTCTATTAAGAGGACGTCTCGAGATGGAGTCAATCGAGATCTCACTGAGG |
| 168 | CTGTTCCTCGACTTCCAGGAGAAACACTAATCACTGACAAAGAAGTTATT |
| (A5) | TACATATGTCCTTTCAATGGCCCCATTAAGGGAAGAGTTTACATCACAAA |
| (Eurofins | TTATCGTCTTTATTTAAGAAGTTTGGAAACGGATTCTTCTCTAATACTTG |
| codon | ATGTTCCTCTG |
| optimized | GGTGTGATCTCGAGAATTGAAAAAATGGGAGGCGCGACAAGTAGAGGAGA |
| MTM1) | AAATTCCTATGGTCTAGATATTACTTGTAAAGACATGAGAAACCTGAGGT |
| | TCGCTTTGAAACAGGAAGGCCACAGCAGAAGAGATATGTTTGAGATCCTC |
| | ACGAGATACGCGTTTCCCCTGGCTCACAGTCTGCCATTATTTGCATTTTT |
| | AAATGAAGAAAAGTTTAACGTGGATGGATGGACAGTTTACAATCCAGTGG |
| | AAGAATACAGGAGGCAGGGCTTGCCCAATCACCATTGGAGAATAACTTTT |
| | ATTAATAAGTGCTATGAGCTCTGTGACACTTACCCTGCTCTTTTGGTGGT |
| | TCCGTATCGTGCCTCAGATGATGACCTCCGGAGAGTTGCAACTTTTAGGT |
| | CCCGAAATCGAATTCCAGTGCTGTCATGGATTCATCCAGAAAATAAGACG |
| | GTCATTGTGCGTTGCAGTCAGCCTCTTGTCGGTATGAGTGGGAAACGAAA |
| | TAAAGATGATGAGAAATATCTCGATGTTATCAGGGAGACTAATAAACAAA |
| | TTTCTAAACTCACCATTTATGATGCAAGACCCAGCGTAAATGCAGTGGCC |
| | AACAAGGCAACAGGAGGAGGATATGAAAGTGATGATGCATATCATAACGC |
| | CGAACTTTTCTTCTTAGACATTCATAATATTCATGTTATGCGGGAATCTT |
| | TAAAAAAAGTGAAGGACATTGTTTATCCTAATGTAGAAGAATCTCATTGG |
| | TTGTCCAGTTTGGAGTCTACTCATTGGTTAGAACATATCAAGCTCGTTTT |
| | GACAGGAGCCATTCAAGTAGCAGACAAAGTTTCTTCAGGGAAGAGTTCAG |
| | TGCTTGTGCATTGCAGTGACGGATGGGACAGGACTGCTCAGCTGACATCC |
| | TTGGCCATGCTGATGTTGGATAGCTTCTATAGGAGCATTGAAGGGTTCGA |
| | AATACTGGTACAAAAAGAATGGATAAGTTTTGGACATAAATTTGCATCTC |
| | GAATAGGTCATGGTGATAAAAACCACACCGATGCTGACCGTTCTCCTATT |
| | TTTCTCCAGTTTATTGATTGTGTGTGGCAAATGTCAAAACAGTTCCCTAC |
| | AGCTTTTGAATTCAATGAACAATTTTTGATTATAATTTTGGATCATCTGT |
| | ATAGTTGCCGATTTGGTACTTTCTTATTCAACTGTGAATCTGCTCGAGAA |
| | AGACAGAAGGTTACAGAAAGGACTGTTTCTTTATGGTCACTGATAAACAG |
| | TAATAAAGAAAAATTCAAAAACCCATTCTATACTAAAGAAATCAATAGAG |
| | TTTTATATCCAGTTGCAAGTATGCGTCACTTGGAACTCTGGGTGAATTAC |
| | TACATTAGATGGAACCCCAGGATCAAACAACAACAACCAAATCCAGTGGA |
| | ACAACGTTACATGGAACTCTTAGCCTTACGAGATGAATACATAAAACGGC |
| | TTGAGGAACTGCAACTAGCAAACTCTGCAAAACTTTCTGATCCCCCAACT |
| | TCACCTTCCAGTCCTTCTCAAATGATGCCACATGTGCAAACTCACTTTTA |
| | A |
| SEQ ID | ATGGCCTCTGCCAGCACCTCTAAGTACAACAGCCACTCCCTGGAAAATGA |
| NO: | ATCCATCAAAAGGACCAGCAGAGATGGAGTGAACAGAGACCTAACTGAAG |
| 169 | CTGTGCCAAGACTGCCTGGAGAGACCCTGATCACAGACAAGGAAGTGATC |
| (A6) | TACATCTGCCCCTTCAATGGCCCTATCAAGGGAAGGGTGTACATCACCAA |
| (delCpG | CTACAGGCTTTACCTGAGATCCCTGGAGACAGACAGCAGCCTGATCCTGG |
| Genscript | ATGTGCCTCTGGGAGTGATCAGCAGAATAGAGAAGATGGGGGGTGCCACC |
| codon | AGCAGAGGAGAGAACAGCTATGGCCTGGACATCACCTGCAAGGACATGAG |
| optimized | AAACCTGAGATTTGCCCTGAAGCAGGAGGGCCACAGCAGAAGAGACATGT |
| MTM1) | TTGAAATCCTGACCAGGTATGCCTTCCCCCTGGCCCACTCTCTCCCCCTG |
| | TTTGCCTTCCTGAATGAGGAAAAGTTCAATGTTGATGGCTGGACAGTGTA |
| | CAACCCAGTGGAGGAGTACAGAAGACAGGGCCTGCCTAACCACCACTGGA |
| | GGATCACCTTCATCAACAAGTGCTATGAACTGTGTGACACATACCCTGCC |
| | CTGCTGGTGGTGCCTTACAGAGCCTCAGATGATGACCTGAGAAGAGTTGC |
| | CACCTTCAGAAGCAGGAACAGAATCCCTGTACTGAGCTGGATCCACCCTG |
| | AGAATAAGACTGTGATTGTGAGGTGCAGCCAGCCCCTGGTGGGCATGAGT |
| | GGCAAGAGAAACAAAGATGATGAAAAGTACCTGGATGTGATCAGAGAGAC |
| | CAACAAACAGATCAGCAAGCTCACCATCTATGATGCTAGACCCTCTGTTA |
| | ATGCTGTGGCCAACAAGGCCACAGGGGGAGGCTATGAATCTGATGATGCT |
| | TACCACAATGCTGAGCTGTTCTTCCTGGACATCCACAACATCCATGTGAT |
| | GAGAGAATCCCTCAAGAAAGTGAAGGACATTGTGTACCCTAATGTGGAAG |
| | AAAGTCACTGGCTGAGCAGCTTGGAGTCCACCCACTGGCTGGAGCACATC |
| | AAGCTGGTCCTGACAGGAGCCATCCAGGTGGCTGACAAGGTGAGTTCTGG |
| | CAAGTCCTCAGTGCTGGTCCACTGCTCTGATGGCTGGGACAGAACTGCCC |
| | AGCTGACCAGTCTGGCCATGCTGATGCTGGACTCCTTCTACAGAAGCATT |
| | GAAGGCTTTGAAATCCTGGTGCAAAAGGAATGGATCTCTTTTGGCCACAA |
| | GTTTGCCAGCAGAATTGGCCATGGTGACAAAAACCACACAGATGCTGACA |
| | GAAGCCCTATCTTCCTGCAGTTCATTGACTGTGTGTGGCAGATGAGCAAG |
| | CAGTTCCCCACAGCATTTGAGTTCAATGAGCAGTTCCTAATAATCATCCT |
| | GGACCACCTCTACAGCTGCAGATTTGGCACCTTCCTGTTCAACTGTGAGT |
| | CTGCCAGAGAAAGACAGAAGGTGACAGAGAGGACAGTGAGCCTGTGGAGC |
| | CTGATCAACTCCAACAAGGAGAAGTTCAAGAACCCCTTCTACACCAAGGA |
| | AATCAACAGGGTGCTGTACCCTGTGGCTAGCATGAGGCACCTGGAGCTGT |
| | GGGTCAACTACTACATCAGATGGAACCCTAGAATCAAACAGCAACAACCC |
| | AACCCTGTGGAGCAGAGGTACATGGAGTTACTGGCCCTGAGGGATGAGTA |
| | CATCAAGAGACTGGAGGAGCTGCAGCTGGCCAACTCTGCCAAACTGTCTG |
| | ACCCTCCTACCTCCCCCAGCTCCCCCTCTCAGATGATGCCACATGTGCAG |
| | ACCCACTTTTAA |
| SEQ ID | TTAAAAGTGGGTCTGCACGTGAGGCATCATCTGGCTGGGGCTGCTAGGGC |
| NQ 170 | TTGTAGGAGGATCGCTCAGCTTGGCGCTGTTGGCCAGCTGCAGTTCTTCC |
| (A7) | AGTCTCTTGATGTACTCGTCCCGCAGGGCCAGCAGTTCCATGTACCGCTG |
| (GeneArt | TTCCACAGGATTGGGCTGCTGCTGCTTGATTCTGGGGTTCCACCGGATGT |
| codon | AGTAGTTGACCCACAGTTCCAGATGTCTCATGCTGGCCACGGGGTACAGC |
| optimized | ACCCGGTTGATTTCTTTGGTGTAGAAGGGGTTCTTGAATTTCTCTTTGTT |
| MTM1) | GCTGTTGATCAGGGACCACAGAGACACGGTCCGCTCGGTCACTTTCTGCC |
| | GTTCTCTGGCGCTCTCGCAGTTGAACAGGAAGGTGCCGAATCTGCAGCTG |
| | TACAGGTGGTCCAGGATGATGATCAGGAACTGCTCGTTGAACTCGAAGGC |
| | GGTAGGGAACTGCTTGGACATCTGCCACACGCAGTCGATGAACTGCAGGA |
| | AGATGGGGCTTCTATCGGCGTCGGTGTGGTTCTTGTCGCCGTGTCCGATT |
| | CTGCTGGCGAACTTGTGGCCGAAGCTGATCCACTCTTTCTGCACCAGGAT |
| | CTCAAAGCCCTCGATGGATCTGTAGAAGCTGTCCAGCATCAGCATGGCCA |
| | GAGATGTCAGCTGGGCTGTTCTATCCCAGCCGTCGCTACAGTGCACCAGC |
| | ACGCTAGACTTGCCAGAGGACACCTTATCGGCCACCTGGATGGCGCCTGT |
| | CAGCACCAGCTTGATGTGTTCCAGCCAGTGTGTGCTTTCCAGACTGCTCA |
| | GCCAGTGGCTCTCTTCCACATTGGGGTACACGATGTCCTTCACTTTCTTC |
| | AGGCTTTCCCGCATCACGTGGATGTTGTGGATGTCCAGAAAGAACAGCTC |
| | GGCGTTATGATAGGCGTCGTCGCTCTCGTATCCGCCGCCTGTAGCTTTGT |
| | TGGCCACGGCGTTCACGCTAGGTCTGGCGTCGTAGATGGTCAGCTTGCTG |
| | ATCTGCTTGTTTGTCTCGCGGATCACGTCCAGGTACTTCTCGTCGTCCTT |
| | GTTTCTCTTGCCAGACATGCCCACGAGGGGCTGAGAACACCGCACGATCA |
| | CGGTCTTGTTCTCGGGGTGAATCCAGCTCAGCACAGGGATTCTGTTCCGG |
| | CTCCGAAAGGTGGCCACTCTTCTCAGGTCGTCGTCGGAGGCTCTGTAAGG |
| | CACCACCAGCAGTGCGGGGTATGTGTCGCACAGCTCGTAGCACTTGTTGA |
| | TGAAGGTGATCCGCCAGTGGTGATTAGGCAGGCCCTGTCTCCGATACTCT |
| | TCCACGGGGTTGTACACGGTCCAGCCGTCCACGTTGAACTTCTCTTCGTT |
| | CAGGAAGGCGAACAGAGGCAGGGAGTGAGCCAGAGGAAAGGQGTATCTGG |
| | TCAGGATCTCGAACATGTCCCGTCTGCTGTGGCCCTCTTGCTTCAGGGCG |
| | AATCTCAGGTTCCGCATGTCCTTGCATGTGATGTCCAGGCCGTAGCTATT |
| | CTCGCCTCTGGAGGTGGCTCCGCCCATTTTCTCAATCCGGCTGATCACGC |
| | CCAGGGGCACATCCAGGATCAGGCTGCTATCGGTTTCCAGGGACCGCAGG |
| | TACAGCCGGTAGTTGGTGATGTACACGCGGCCCTTGATGGGGCCGTTGAA |
| | GGGGCAGATGTAGATCACTTCTTTGTCGGTGATCAGTGTCTCGCCAGGCA |
| | GTCTAGGCACGGCCTCTGTCAGATCCCTGTTCACGCCATCTCTGCTGGTC |
| | CGCTTGATGCTCTCGTTTTCCAGGCTGTGGCTGTTGTACTTGCTTGTGCT |
| | GGCGCTAGCCAT |
| SEQ ID | GACATTGATTATTGACTAGTTATTAATAGTAATCAATTACGGGGTCATTA |
| NO: | GTTCATAGCCCATATATGGAGTTCCGCGTTACATAACTTACGGTAAATGG |
| 171 | CCCGCCTGGCTGACCGCCCAACGACCCCCGCCCATTGACGTCAATAATGA |
| (B1) | CGTATGTTCCCATAGTAACGCCAATAGGGACTTTCCATTGACGTCAATGG |
| (CMV-IE | GTGGAGTATTTACGGTAAACTGCCCACTTGGCAGTACATCAAGTGTATCA |
| sequence) | TATGCCAAGTACGCCCCCTATTGACGTCAATGACGGTAAATGGCCCGCCT |
| | GGCATTATGCCCAGTACATGACCTTATGGGACTTTCCTACTTGGCAGTAC |
| | ATCTACGTATTAGTCATCGCTATTACCATGGT |
| SEQ ID | TCGAGGTGAGCCCCACGTTCTGCTTCACTCTCCCCATCTCCCCCCCCTCC |
| NQ | CCACCCCCAATTTTGTATTTATTTATTTTTTAATTATTTTGTGCAGCGAT |
| 172 | GGGGGCGGGGGGGGGGGGGGGGCGCGCGCCAGGCGGGGGGGGGGGGGGCG |
| (B2) | AGGGGCGGGGCGGGGCGAGGCGGAGAGGTGCGGCGGCAGCCAATCAGAGC |
| (chicken | GGCGCGCTCCGAAAGTTTCCTTTTATGGCGAGGCGGCGGCGGCGGCGGCC |
| beta | CTATAAAAAGCGAAGCGCGCGGCGGGCG |
| actin | |
| promoter) | |
| SEQ | GACATTGATTATTGACTAGTTATTAATAGTAATCAATTACGGGGTCATTA |
| ID NO: | GTTCATAGCCCATATATGGAGTTCCGCGTTACATAACTTACGGTAAATGG |
| 173 | CCCGCCTGGCTGACCGCCCAACGACCCCCGCCCATTGACGTCAATAATGA |
| (B3) | CGTATGTTCCCATAGTAACGCCAATAGGGACTTTCCATTGACGTCAATGG |
| (CMV- | GTGGAGTATTTACGGTAAACTGCCCACTTGGCAGTACATCAAGTGTATCA |
| IE plus | TATGCCAAGTACGCCCCCTATTGACGTCAATGACGGTAAATGGCCCGCCT |
| chicken | GGCATTATGCCCAGTACATGACCTTATGGGACTTTCCTACTTGGCAGTAC |
| beta | ATCTACGTATTAGTCATCGCTATTACCATGGTTCGAGGTGAGCCCCACGT |
| actin | TCTGCTTCACTCTCCCCATCTCCCCCCCCTCCCCACCCCCAATTTTGTAT |
| promoter) | TTATTTATTTTTTAATTATTITGTGCAGCGATGGGGGCGGGGGGGGGGGG |
| | GGGGCGCGCGCCAGGCGGGGCGGGGCGGGGCGAGGGGGGGGGCGGGGCGA |
| | GGCGGAGAGGTGCGGCGGCAGCCAATCAGAGCGGCGCGCTCCGAAAGTTT |
| | CCTTTTATGGCGAGGCGGCGGCGGCGGCGGCCCTATAAAAAGCGAAGCGC |
| | GCGGCGGGCG |
| SEQ ID | AAAAAATGCTTTCTTCTTTTAATATACTTTTTTGTTTATCTTATTTCTAA |
| NO: | TACTTTCCCTAATCTCTTTCTTTCAGGGCAATAATGATACAATGTATCAT |
| 174 | GCCTCTTTGCACCATTCTAAAGAATAACAGTGATAATTTCTGGGTTAAGG |
| (B4) | CAATAGCAATATTTCTGCATATAAATATTTCTGCATATAAATTGTAACTG |
| (3′ end | ATGTAAGAGGTTTCATATTGCTAATAGCAGCTACAATCCAGCTACCATTC |
| of | TGCTTTTATTTTATGGTTGGGATAAGGCTGGATTATTCTGAGTCCAAGCT |
| human | AGGCCCTTTTGCTAATCATGTTCATACCTCTTATCTTCCTQCCACAG |
| beta | |
| globin | |
| intron | |
| 2) | |
| SEQ ID | GTGCATTGGAACGCGGATTCCCCGTGCCAAGAGTGACGTAAGTACCGCCT |
| NO: | ATAGAGTCTATAGGCCCAC |
| 175 | |
| (B5) | |
| (human | |
| betaberpes | |
| virus | |
| intron) | |
| SEQ ID | GTGCATTGGAACGCGGATTCCCCGTGCCAAGAGTGACGTAAGTACCGCCT |
| NO: | ATAGAGTCTATAGGCCCACAAAAAATGCTTTCTTCTTTTAATATACTTTT |
| 176 | TTGTTTATCTTATTTCTAATACTTTCCCTAATCTCTTTCTTTCAGGGCAA |
| (B6) | TAATGATACAATGTATCATGCCTCTTTGCACCATTCTAAAGAATAACAGT |
| (chimeric | GATAATTTCTGGGTTAAGGCAATAGCAATATTTCTGCATATAAATATTTC |
| intron) | TGCATATAAATTGTAACTGATGTAAGAGGTTTCATATTGCTAATAGCAGC |
| | TACAATCCAGCTACCATTCTGCTTTTATTTTATGGTTGGGATAAGGCTGG |
| | ATTATTCTGAGTCCAAGCTAGGCCCTTTTGCTAATCATGTTCATACCTCT |
| | TATCTTCCTQCCACAG |
| SEQ ID | GATCTTTTTCCCTCTGCCAAAAATTATGGGGACATCATGAAGCCCCTTGA |
| NO: | GCATCTGACTTCTGGCTAATAAAGGAAATTTATTTTCATTGCAATAGTGT |
| 177 | GTTGGAATTTTTTGTGTCTCTCA |
| (D1) | |
| SEQ ID | TTGGCCACTCCCTCTCTGCGCGCTCGCTCGCTCACTGAGGCCGCCCGGGC |
| NQ | AAAGCCCGGGCGTCGGGCGACCTTTGGTCGCCCGGCCTCAGTGAGCGAGC |
| 178 | GAGCGCGCAGAGAGGGAGTGGCCAACTCCATCACTAGGGGTTCCT |
| (D2) | |
| SEQ ID | AGGAACCCCTAGTGATGGAGTTGGCCACTCCCTCTCTGCGCGCTCGCTCG |
| NO: | CTCACTGAGGCCGGGCGACCAAAGGTCGCCCGACGCCCGGGCTTTGCCCG |
| 179 | GGCGGCCTCAGTGAGCGAGCGAGCGCGCAGAGAGGGAGTGGCCAA |
| (D3) | |
| SEQ ID | CTCCTGGGCAACGTGCTGGTCTGTGTGCTGGCCCATCACTTTGGCAAAGA |
| NO: | ATT |
| 180 | |
| (D4) | |
| SEQ ID | TTGGCCACTCCCTCTCTGCGCGCTCGCTCGCTCACTGAGGCCGCCCGGGC |
| NO: | AAAGCCCGGGCGTCGGGCGACCTTTGGTCGCCCGGCCTCAGTGAGCGAGC |
| 181 | GAGCGCGCAGAGAGGGAGTGGCCAACTCCATCACTAGGGGTTCCTTGCGC |
| (E1) | ACAGGTACCCCCCTGCCCCCACAGCTCCTCTCCTGTGCCTTGTTTCCCAG |
| | CCATGQGTTCTCCTCTATAAATACCCGCTCTGGTATTTGGGGTTGGCAGC |
| | TGTTGCTGCCAGGGAGATGGTTGGGTTGACATGCGGCTCCTGACAAAACA |
| | CAAACCCCTGGTGTGTGTGGGCGTGGGTGGTGTGAGTAGGGGGATGAATC |
| | AGGGAGGGGGCGGGGGACCCAGGGGGCAGGAGCCACACAAAGTCTGTGCG |
| | GGGGTGGGAGCGCACATAGCAATTGGAAACTGGCTGCAGACATGCTTGCT |
| | GCCTGCCCTGGCGAAGGATTGGTAGGCTTGCCGTCACAGGACCCCCGCTG |
| | GCTGACTCAGGGGCGCAGGCTCTTGCGGGGGAGCTGGCCTCCCGCCCCCA |
| | CGGCCACGGGCCCTTTCCTGGCAGGACAGCGGGATCTTGCAGCTGTCAGG |
| | GGAGGGGAGGCGGGGGCTGATGTCAGGAGGGATACAAATAGTGCCGACGG |
| | CTGGGGGCCCTGTCTCCCCTCGCCGCATCCACTCTCCGGCCGGCCGCCTG |
| | CCCGCCGCCTCCTCCGTGCGCCCGCCAGCCTCGCCCGCGCCGTCACCGAT |
| | ATCTCAGATCGCCTGGAGACGCCATCCACGCTGTTTTGACCTCCATAGAA |
| | GACACCGGGACCGATCCAGCCTCCGCGGATTCGAATCCCGGCCGGGAACG |
| | GTGCATTGGAACGCGGATTCCCCGTGCCAAGAGTGACGTAAGTACCGCCT |
| | ATAGAGTCTATAGGCCCACAAAAAATGCTTTCTTCTTTTAATATACTTTT |
| | TTGTTTATCTTATTTCTAATACTTTCCCTAATCTCTTTCTTTCAGGGCAA |
| | TAATGATACAATGTATCATGCCTCTTTGCACCATTCTAAAGAATAACAGT |
| | GATAATTTCTGGGTTAAGGCAATAGCAATATTTCTGCATATAAATATTTC |
| | TGCATATAAATTGTAACTGATGTAAGAGGTTTCATATTGCTAATAGCAGC |
| | TACAATCCAGCTACCATTCTGCTTTTATTTTATGGTTGGGATAAGGCTGG |
| | ATTATTCTGAGTCCAAGCTAGGCCCTTTTGCTAATCATGTTCATACCTCT |
| | TATCTTCCTCCCACAGCTCCTGGGCAACGTGCTGGTCTGTGTGCTGGCCC |
| | ATCACTTTGGCAAAGAATTTGAGCGGCCGCCACCATGGCATCAGCAAGCA |
| | CAAGCAAATACAACTCACATAGCCTGGAAAACGAGAGCATCAAGAGAACC |
| | TCAAGGGACGGGGTCAATAGAGATCTGACAGAGGCAGTGCCAAGGCTGCC |
| | TGGAGAGACACTGATCACAGACAAGGAAGTGATCTACATCTGCCCTTTCA |
| | ACGGCCCAATCAAGGGCCGCGTGTATATCACCAATTACAGACTGTACCTG |
| | CGGAGCCTGGAGACAGATAGCTCCCTGATCCTGGACGTGCCTCTGGGCGT |
| | GATCAGCAGAATCGAGAAGATGGGAGGAGCCACCTCTAGGGGAGAGAACA |
| | GCTACGGCCTGGATATCACCTGTAAGGACATGCGCAATCTGCGGTTTGCC |
| | CTGAAGCAGGAGGGCCACTCCCGGAGAGATATGTTCGAGATCCTGACCAG |
| | ATATGCCTTTCCCCTGGCCCACTCTCTGCCTCTGTTCGCCTTTCTGAACG |
| | AGGAGAAGTTCAATGTGGACGGCTGGACAGTGTACAACCCCGTGGAGGAG |
| | TATAGGCGCCAGGGCCTGCCTAACCACCACTGGQGGATCACCTTTATCAA |
| | TAAGTGCTACGAGCTGTGCGATACATATCCAGCCCTGCTGGTGGTGCCCT |
| | ACAGAGCCAGCGACGATGACCTGCGGAGAGTGGCCACCTTCCGGAGCCGG |
| | AACAGAATCCCTGTGCTGAGCTGGATCCACCCAGAGAATAAGACAGTGAT |
| | CGTGCGCTGCTCCCAGCCACTGGTGGGAATGTCTGGCAAGCGGAACAAGG |
| | ATGACGAGAAGTACCTGGATGTGATCAGAGAGACAAATAAGCAGATCAGC |
| | AAGCTGACAATCTATGATGCCCGGCCTTCTGTGAATGCAGTGGCAAATAA |
| | GGCAACAGGAGGAGGATATGAGTCTGATGACGCCTATCACAACGCCGAGC |
| | TGTTCTTTCTGGATATCCACAATATCCACGTGATGAGAGAGTCCCTGAAG |
| | AAGGTGAAGGACATCGTGTACCCAAACGTGGAGGAGTCCCACTGGCTGTC |
| | TAGCCTGGAGTCTACCCACTGGCTGGAGCACATCAAGCTGGTGCTGACAG |
| | GCGCCATCCAGGTGGCCGATAAGGTGTCCTCTGGCAAGAGCTCCGTGCTG |
| | GTGCACTGTTCCGATGGGTGGGACAGAACAGCACAGCTGACAAGCCTGGC |
| | TATGCTGATGCTGGACTCCTTCTATAGATCTATCGAGGGCTTTGAGATCC |
| | TGGTGCAGAAGGAGTGGATCAGCTTCGGCCACAAGTTTGCCTCCAGGATC |
| | GGCCACGGCGATAAGAATCACACCGATGCCGACCGCAGCCCTATCTTCCT |
| | GCAGTTTATCGACTGCGTGTGGCAGATGTCCAAGCAGTTCCCAACCGCCT |
| | TCGAGTTTAACGAGCAGTTTCTGATCATCATCCTGGACCACCTGTACTCC |
| | TGCAGGTTCGGCACATTCCTGTTTAATTGTGAGTCTGCCAGAGAGAGGCA |
| | GAAGGTGACCGAGCGCACAGTGTCTCTGTGGAGCCTGATCAACAGCAATA |
| | AGGAGAAGTTCAAGAACCCCTTCTACACAAAGGAGATCAATCGCGTGCTG |
| | TATCCTGTGGCATCCATGAGACACCTGGAGCTGTGGGTGAACTACTATAT |
| | CCGCTGGAATCCCCGGATCAAGCAGCAGCAGCCCAACCCTGTGGAGCAGC |
| | GGTACATGGAGCTGCTGGCCCTGAGAGATGAGTATATCAAGAGGCTGGAG |
| | GAGCTGCAGCTGGCCAATAGCGCCAAGCTGTCCGACCCACCTACTTCACC |
| | AAGCAGCCCCTCACAGATGATGCCCCACGTCCAGACCCACTTTTAATTAA |
| | GATCTTTTTCCCTCTGCCAAAAATTATGGGGACATCATGAAGCCCCTTGA |
| | GCATCTGACTTCTGGCTAATAAAGGAAATTTATTTTCATTGCAATAGTGT |
| | GTTGGAATTTTTTGTGTCTCTCACTCGAGGCCTAGGAACCCCTAGTGATG |
| | GAGTTGGCCACTCCCTCTCTGCGCGCTCGCTCGCTCACTGAGGCCGGGCG |
| | ACCAAAGGTCGCCCGACGCCCGGGCTTTGCCCGGGCGGCCTCAGTGAGCG |
| | AGCGAGCGCGCAGAGAGGGAGTGGCCAA |
| SEQ ID | TTGGCCACTCCCTCTCTGCGCGCTCGCTCGCTCACTGAGGCCGCCCGGGC |
| NO: | AAAGCCCGGGCGTCGGGCGACCTTTGGTCGCCCGGCCTCAGTGAGCGAGC |
| 182 | GAGCGCGCAGAGAGGGAGTGGCCAACTCCATCACTAGGGGTTCCTTGCGC |
| (E2) | ACAGGTACCGACATTGATTATTGACTAGTTATTAATAGTAATCAATTACG |
| | GGGTCATTAGTTCATAGCCCATATATGGAGTTCCGCGTTACATAACTTAC |
| | GGTAAATGGCCCGCCTGGCTGACCGCCCAACGACCCCCGCCCATTGACGT |
| | CAATAATGACGTATGTTCCCATAGTAACGCCAATAGGGACTTTCCATTGA |
| | CGTCAATGGGTGGAGTATTTACGGTAAACTGCCCACTTGGCAGTACATCA |
| | AGTGTATCATATGCCAAGTACGCCCCCTATTGACGTCAATGACGGTAAAT |
| | GGCCCGCCTGGCATTATGCCCAGTACATGACCTTATGGGACTTTCCTACT |
| | TGGCAGTACATCTACGTATTAGTCATCGCTATTACCATGGTCGAGGTGAG |
| | CCCCACGTTCTGCTTCACTCTCCCCATCTCCCCCCCCTCCCCACCCCCAA |
| | TTTTGTATTTATTTATTTTTTAATTATTTTGTGCAGCGATGGGGGGGGGG |
| | GGGGGGGGGGGGGGCGCGCCAGGCGGGGCGGGGCGGGGCGAGGGGGGGGG |
| | CGGGGCGAGGCGGAGAGGTGCGGCGGCAGCCAATCAGAGCGGCGCGCTCC |
| | GAAAGTTTCCTTTTATGGCGAGGCGGCGGCGGCGGCGGCCCTATAAAAAG |
| | CGAAGCGCGCGGCGGGCGGATATCTCAGATCGCCTGGAGACGCCATCCAC |
| | GCTGTTTTGACCTCCATAGAAGACACCGGGACCGATCCAGCCTCCGCGGA |
| | TTCGAATCCCGGCCGGGAACGGTGCATTGGAACGCGGATTCCCCGTGCCA |
| | AGAGTGACGTAAGTACCGCCTATAGAGTCTATAGGCCCACAAAAAATGCT |
| | TTCTTCTTTTAATATACTTTTTTGTTTATCTTATTTCTAATACTTTCCCT |
| | AATCTCTTTCTTTCAGGGCAATAATGATACAATGTATCATGCCTCTTTGC |
| | ACCATTCTAAAGAATAACAGTGATAATTTCTGGGTTAAGGCAATAGCAAT |
| | ATTTCTGCATATAAATATTTCTGCATATAAATTGTAACTGATGTAAGAGG |
| | TTTCATATTGCTAATAGCAGCTACAATCCAGCTACCATTCTGCTTTTATT |
| | TTATGGTTGGGATAAGGCTGGATTATTCTGAGTCCAAGCTAGGCCCTTTT |
| | GCTAATCATGTTCATACCTCTTATCTTCCTCCCACAGCTCCTGGGCAACG |
| | TGCTGGTCTGTGTGCTGGCCCATCACTTTGGCAAAGAATTTGAGCGGCCG |
| | CCACCATGGCTAGCGCCAGCACAAGCAAGTACAACAGCCACAGCCTGGAA |
| | AACGAGAGCATCAAGCGGACCAGCAGAGATGGCGTGAACAGGGATCTGAC |
| | AGAGGCCGTGCCTAGACTGCCTGGCGAGACACTGATCACCGACAAAGAAG |
| | TGATCTACATCTGCCCCTTCAACGGCCCCATCAAGGGCCGCGTGTACATC |
| | ACCAACTACCGGCTGTACCTGCGGTCCCTGGAAACCGATAGCAGCCTGAT |
| | CCTGGATGTGCCCCTGGGCGTGATCAGCCGGATTGAGAAAATGGGCGGAG |
| | CCACCTCCAGAGGCGAGAATAGCTACGGCCTGGACATCACATGCAAGGAC |
| | ATGCGGAACCTGAGATTCGCCCTGAAGCAAGAGGGCCACAGCAGACGGGA |
| | CATGTTCGAGATCCTGACCAGATACGCCTTTCCTCTGGCTCACTCCCTGC |
| | CTCTGTTCGCCTTCCTGAACGAAGAGAAGTTCAACGTGGACGGCTGGACC |
| | GTGTACAACCCCGTGGAAGAGTATCGGAGACAGGGCCTGCCTAATCACCA |
| | CTGGCGGATCACCTTCATCAACAAGTGCTACGAGCTGTGCGACACATACC |
| | CCGCACTGCTGGTGGTGCCTTACAGAGCCTCCGACGACGACCTGAGAAGA |
| | GTGGCCACCTTTCGGAGCCGGAACAGAATCCCTGTGCTGAGCTGGATTCA |
| | CCCCGAGAACAAGACCGTGATCGTGCGGTGTTCTCAGCCCCTCGTGGGCA |
| | TGTCTGGCAAGAGAAACAAGGACGACGAGAAGTACCTGGACGTGATCCGC |
| | GAGACAAACAAGCAGATCAGCAAGCTGACCATCTACGACGCCAGACCTAG |
| | CGTGAACGCCGTGGCCAACAAAGCTACAGGCGGCGGATACGAGAGCGACG |
| | ACGCCTATCATAACGCCGAGCTGTTCTTTCTGGACATCCACAACATCCAC |
| | GTGATGCGGGAAAGCCTGAAGAAAGTGAAGGACATCGTGTACCCCAATGT |
| | GGAAGAGAGCCACTGGCTGAGCAGTCTGGAAAGCACACACTGGCTGGAAC |
| | ACATCAAGCTGGTGCTGACAGGCGCCATCCAGGTGGCCGATAAGGTGTCC |
| | TCTGGCAAGTCTAGCGTGCTGGTGCACTGTAGCGACGGCTGGGATAGAAC |
| | AGCCCAGCTGACATCTCTGGCCATGCTGATGCTGGACAGCTTCTACAGAT |
| | CCATCGAGGGCTTTGAGATCCTGGTGCAGAAAGAGTGGATCAGCTTCGGC |
| | CACAAGTTCGCCAGCAGAATCGGACACGGCGACAAGAACCACACCGACGC |
| | CGATAGAAGCCCCATCTTCCTGCAGTTCATCGACTGCGTGTGGCAGATGT |
| | CCAAGCAGTTCCCTACCGCCTTCGAGTTCAACGAGCAGTTCCTGATCATC |
| | ATCCTGGACCACCTGTACAGCTGCAGATTCGGCACCTTCCTGTTCAACTG |
| | CGAGAGCGCCAGAGAACGGCAGAAAGTGACCGAGCGGACCGTGTCTCTGT |
| | GGTCCCTGATCAACAGCAACAAAGAGAAATTCAAGAACCCCTTCTACACC |
| | AAAGAAATCAACCGGGTGCTGTACCCCGTGGCCAGCATGAGACATCTGGA |
| | ACTGTGGGTCAACTACTACATCCGGTGGAACCCCAGAATCAAGCAGCAGC |
| | AGCCCAATCCTGTGGAACAGCGGTACATGGAACTGCTGGCCCTGCGGGAC |
| | GAGTACATCAAGAGACTGGAAGAACTGCAGCTGGCCAACAGCGCCAAGCT |
| | GAGCGATCCTCCTACAAGCCCTAGCAGCCCCAGCCAGATGATGCCTCACG |
| | TGCAGACCCACTTTTAATTAAGATCTTTTTCCCTCTGCCAAAAATTATGG |
| | GGACATCATGAAGCCCCTTGAGCATCTGACTTCTGGCTAATAAAGGAAAT |
| | TTATTTTCATTGCAATAGTGTGTTGGAATTTTTTGTGTCTCTCACTCGAG |
| | GCCTAGGAACCCCTAGTGATGGAGTTGGCCACTCCCTCTCTGCGCGCTCG |
| | CTCGCTCACTGAGGCCGGGCGACCAAAGGTCGCCCGACGCCCGGGCTTTG |
| | CCCGGGCGGCCTCAGTGAGCGAGCGAGCGCGCAGAGAGGGAGTGGCCAA |
| SEQ ID | TTGGCCACTCCCTCTCTGCGCGCTCGCTCGCTCACTGAGGCCGCCCGGGC |
| NO: | AAAGCCCGGGCGTCGGGCGACCTTTGGTCGCCCGGCCTCAGTGAGCGAGC |
| 183 | GAGCGCGCAGAGAGGGAGTGGCCAACTCCATCACTAGGGGTTCCTTGCGC |
| (E3) | ACAGGTACCCCCCTGCCCCCACAGCTCCTCTCCTGTGCCTTGTTTCCCAG |
| | CCATGCGTTCTCCTCTATAAATACCCGCTCTGGTATTTGGGGTTGGCAGC |
| | TGTTGCTGCCAGGGAGATGGTTGGGTTGACATGCGGCTCCTGACAAAACA |
| | CAAACCCCTGGTGTGTGTGGGCGTGGGTGGTGTGAGTAGGGGGATGAATC |
| | AGGGGGGGGCGGGGGACCCAGGGGGCAGGAGCCACACAAAGTCTGTGCGG |
| | GGGTGGGAGCGCACATAGCAATTGGAAACTGGCTGCAGACATGCTTGCTG |
| | CCTGCCCTGGCGAAGGATTGGTAGGCTTGCCGTCACAGGACCCCCGCTGG |
| | CTGACTCAGGGGCGCAGGCTCTTGCGGGGGAGCTGGCCTCCCGCCCCCAC |
| | GGCCACGGGCCCTTTCCTGGCAGGACAGCGGGATCTTGCAGCTGTCAGGG |
| | GAGGGGAGGCGGGGGCTGATGTCAGGAGGGATACAAATAGTGCCGACGGC |
| | TGGGGGCCCTGTCTCCCCTCGCCGCATCCACTCTCCGGCCGGCCGCCTGC |
| | CCGCCGCCTCCTCCGTGCGCCCGCCAGCCTCGCCCGCGCCGTCACCGATA |
| | TCTCAGATCGCCTGGAGACGCCATCCACGCTGTTTTGACCTCCATAGAAG |
| | ACACCGGGACCGATCCAGCCTCCGCGGATTCGAATCCCGGCCGGGAACGG |
| | TGCATTGGAACGCGGATTCCCCGTGCCAAGAGTGACGTAAGTACCGCCTA |
| | TAGAGTCTATAGGCCCACAAAAAATGCTTTCTTCTTTTAATATACTTTTT |
| | TGTTTATCTTATTTCTAATACTTTCCCTAATCTCTTTCTTTCAGGGCAAT |
| | AATGATACAATGTATCATGCCTCTTTGCACCATTCTAAAGAATAACAGTG |
| | ATAATTTCTGGGTTAAGGCAATAGCAATATTTCTGCATATAAATATTTCT |
| | GCATATAAATTGTAACTGATGTAAGAGGTTTCATATTGCTAATAGCAGCT |
| | ACAATCCAGCTACCATTCTGCTTTTATTTTATGGTTGGGATAAGGCTGGA |
| | TTATTCTGAGTCCAAGCTAGGCCCTTTTGCTAATCATGTTCATACCTCTT |
| | ATCTTCCTCCCACAGCTCCTGGGCAACGTGCTGGTCTGTGTGCTGGCCCA |
| | TCACTTTGGCAAAGAATTTGAGCGGCCGCCACCATGGCTTCTGCATCAAC |
| | TTCTAAATATAATTCACACTCCTTGGAGAATGAGTCTATTAAGAGGACGT |
| | CTCGAGATGGAGTCAATCGAGATCTCACTGAGGCTGTTCCTCGACTTCCA |
| | GGAGAAACACTAATCACTGACAAAGAAGTTATTTACATATGTCCTTTCAA |
| | TGGCCCCATTAAGGGAAGAGTTTACATCACAAATTATCGTCTTTATTTAA |
| | GAAGTTTGGAAACGGATTCTTCTCTAATACTTGATGTTCCTCTGGGTGTG |
| | ATCTCGAGAATTGAAAAAATGGGAGGCGCGACAAGTAGAGGAGAAAATTC |
| | CTATGGTCTAGATATTACTTGTAAAGACATGAGAAACCTGAGGTTCGCTT |
| | TGAAACAGGAAGGCCACAGCAGAAGAGATATGTTTGAGATCCTCACGAGA |
| | TACGCGTTTCCCCTGGCTCACAGTCTGCCATTATTTGCATTTTTAAATGA |
| | AGAAAAGTTTAACGTGGATGGATGGACAGTTTACAATCCAGTGGAAGAAT |
| | ACAGGAGGCAGGGCTTGCCCAATCACCATTGGAGAATAACTTTTATTAAT |
| | AAGTGCTATGAGCTCTGTGACACTTACCCTGCTCTTTTGGTGGTTCCGTA |
| | TCGTGCCTCAGATGATGACCTCCGGAGAGTTGCAACTTTTAGGTCCCGAA |
| | ATCGAATTCCAGTGCTGTCATGGATTCATCCAGAAAATAAGACGGTCATT |
| | GTGCGTTGCAGTCAGCCTCTTGTCGGTATGAGTGGGAAACGAAATAAAGA |
| | TGATGAGAAATATCTCGATGTTATCAGGGAGACTAATAAACAAATTTCTA |
| | AACTCACCATTTATGATGCAAGACCCAGCGTAAATGCAGTGGCCAACAAG |
| | GCAACAGGAGGAGGATATGAAAGTGATGATGCATATCATAACGCCGAACT |
| | TTTCTTCTTAGACATTCATAATATTCATGTTATGCGGGAATCTTTAAAAA |
| | AAGTGAAGGACATTGTTTATCCTAATGTAGAAGAATCTCATTGGTTGTCC |
| | AGTTTGGAGTCTACTCATTGGTTAGAACATATCAAGCTCGTTTTGACAGG |
| | AGCCATTCAAGTAGCAGACAAAGTTTCTTCAGGGAAGAGTTCAGTGCTTG |
| | TGCATTGCAGTGACGGATGGGACAGGACTGCTCAGCTGACATCCTTGGCC |
| | ATGCTGATGTTGGATAGCTTCTATAGGAGCATTGAAGGGTTCGAAATACT |
| | GGTACAAAAAGAATGGATAAGTTTTGGACATAAATTTGCATCTCGAATAG |
| | GTCATGGTGATAAAAACCACACCGATGCTGACCGTTCTCCTATTTTTCTC |
| | CAGTTTATTGATTGTGTGTGGCAAATGTCAAAACAGTTCCCTACAGCTTT |
| | TGAATTCAATGAACAATTTTTGATTATAATTTTGGATCATCTGTATAGTT |
| | GCCGATTTGGTACTTTCTTATTCAACTGTGAATCTGCTCGAGAAAGACAG |
| | AAGGTTACAGAAAGGACTGTTTCTTTATGGTCACTGATAAACAGTAATAA |
| | AGAAAAATTCAAAAACCCATTCTATACTAAAGAAATCAATAGAGTTTTAT |
| | ATCCAGTTGCAAGTATGCGTCACTTGGAACTCTGGGTGAATTACTACATT |
| | AGATGGAACCCCAGGATCAAACAACAACAACCAAATCCAGTGGAACAACG |
| | TTACATGGAACTCTTAGCCTTACGAGATGAATACATAAAACGGCTTGAGG |
| | AACTGCAACTAGCAAACTCTGCAAAACTTTCTGATCCCCCAACTTCACCT |
| | TCCAGTCCTTCTCAAATGATGCCACATGTGCAAACTCACTTTTAATTAAG |
| | ATCTTTTTCCCTCTGCCAAAAATTATGGGGACATCATGAAGCCCCTTGAG |
| | CATCTGACTTCTGGCTAATAAAGGAAATTTATTTTCATTGCAATAGTGTG |
| | TTGGAATTTTTTGTGTCTCTCACTCGAGGCCTAGGAACCCCTAGTGATGG |
| | AGTTGGCCACTCCCTCTCTGCGCGCTCGCTCGCTCACTGAGGCCGGGCGA |
| | CCAAAGGTCGCCCGACGCCCGGGCTTTGCCCGGGCGGCCTCAGTGAGCGA |
| | GCGAGCGCGCAGAGAGGGAGTGGCCAA |
| SEQ ID | TTGGCCACTCCCTCTCTGCGCGCTCGCTCGCTCACTGAGGCCGCCCGGGC |
| NO: | AAAGCCCGGGCGTCGGGCGACCTTTGGTCGCCCGGCCTCAGTGAGCGAGC |
| 184 | GAGCGCGCAGAGAGGGAGTGGCCAACTCCATCACTAGGGGTTCCTTGCGC |
| (E4) | ACAGGTACCCCCCTGCCCCCACAGCTCCTCTCCTGTGCCTTGTTTCCCAG |
| | CCATGCGTTCTCCTCTATAAATACCCGCTCTGGTATTTGGGGTTGGCAGC |
| | TGTTGCTGCCAGGGAGATGGTTGGGTTGACATGCGGCTCCTGACAAAACA |
| | CAAACCCCTGGTGTGTGTGGGCGTGGGTGGTGTGAGTAGGGGGATGAATC |
| | AGGGAGGGGGCGGGGGACCCAGGGGGCAGGAGCCACACAAAGTCTGTGCG |
| | GGGGGGGAGCGCACATAGCAATTGGAAACTGGCTGCAGACATGCTTGCTG |
| | CCTGCCCTGGCGAAGGATTGGTAGGCTTGCCGTCACAGGACCCCCGCTGG |
| | CTGACTCAGGGGCGCAGGCTCTTGCGGGGGAGCTGGCCTCCCGCCCCCAC |
| | GGCCACGGGCCCTTTCCTGGCAGGACAGCGGGATCTTGCAGCTGTCAGGG |
| | GAGGGGAGGCGGGGGCTGATGTCAGGAGGGATACAAATAGTGCCGACGGC |
| | TGGGGGCCCTGTCTCCCCTCGCCGCATCCACTCTCCGGCCGGCCGCCTGC |
| | CCGCCGCCTCCTCCGTGCGCCCGCCAGCCTCGCCCGCGCCGTCACCGATA |
| | TCTCAGATCGCCTGGAGACGCCATCCACGCTGTTTTGACCTCCATAGAAG |
| | ACACCGGGACCGATCCAGCCTCCGCGGATTCGAATCCCGGCCGGGAACGG |
| | TGCATTGGAACGCGGATTCCCCGTGCCAAGAGTGACGTAAGTACCGCCTA |
| | TAGAGTCTATAGGCCCACAAAAAATGCTTTCTTCTTTTAATATACTTTTT |
| | TGTTTATCTTATTTCTAATACTTTCCCTAATCTCTTTCTTTCAGGGCAAT |
| | AATGATACAATGTATCATGCCTCTTTGCACCATTCTAAAGAATAACAGTG |
| | ATAATTTCTGGGTTAAGGCAATAGCAATATTTCTGCATATAAATATTTCT |
| | GCATATAAATTGTAACTGATGTAAGAGGTTTCATATTGCTAATAGCAGCT |
| | ACAATCCAGCTACCATTCTGCTTTTATITTATGGTTGGGATAAGGCTGGA |
| | TTATTCTGAGTCCAAGCTAGGCCCTTTTGCTAATCATGTTCATACCTCTT |
| | ATCTTCCTCCCACAGCTCCTGGGCAACGTGCTGGTCTGTGTGCTGGCCCA |
| | TCACTTTGGCAAAGAATTTGAGCGGCCGCCACCATGGCTTCTGCATCAAC |
| | TTCTAAATATAATTCACACTCCTTGGAGAATGAGTCTATTAAGAGGACGT |
| | CTCGAGATGGAGTCAATCGAGATCTCACTGAGGCTGTTCCTCGACTTCCA |
| | GGAGAAACACTAATCACTGACAAAGAAGTTATTTACATATGTCCTTTCAA |
| | TGGCCCCATTAAGGGAAGAGTTTACATCACAAATTATCGTCTTTATTTAA |
| | GAAGTTTGGAAACGGATTCTTCTCTAATACTTGATGTTCCTCTGGGTGTG |
| | ATCTCGAGAATTGAAAAAATGGGAGGCGCGACAAGTAGAGGAGAAAATTC |
| | CTATGGTCTAGATATTACTTGTAAAGACATGAGAAACCTGAGGTTCGCTT |
| | TGAAACAGGAAGGCCACAGCAGAAGAGATATGTTTGAGATCCTCACGAGA |
| | TACGCGTTTCCCCTGGCTCACAGTCTGCCATTATTTGCATTTTTAAATGA |
| | AGAAAAGITTAACGTGGATGGATGGACAGTTTACAATCCAGTGGAAGAAT |
| | ACAGGAGGCAGGGCTTGCCCAATCACCATTGGAGAATAACTTTTATTAAT |
| | AAGTGCTATGAGCTCTGTGACACTTACCCTGCTCTTTTGGTGGTTCCGTA |
| | TCGTGCCTCAGATGATGACCTCCGGAGAGTTGCAACTTTTAGGTCCCGAA |
| | ATCGAATTCCAGTGCTGTCATGGATTCATCCAGAAAATAAGACGGTCATT |
| | GTGCGTTGCAGTCAGCCTCTTGTCGGTATGAGTGGGAAACGAAATAAAGA |
| | TGATGAGAAATATCTCGATGTTATCAGGGAGACTAATAAACAAATTTCTA |
| | AACTCACCATTTATGATGCAAGACCCAGCGTAAATGCAGTGGCCAACAAG |
| | GCAACAGGAGGAGGATATGAAAGTGATGATGCATATCATAACGCCGAACT |
| | TTTCTTCTTAGACATTCATAATATTCATGTTATGCGGGAATCTTTAAAAA |
| | AAGTGAAGGACATTGTTTATCCTAATGTAGAAGAATCTCATTGGTTGTCC |
| | AGTTTGGAGTCTACTCATTGGTTAGAACATATCAAGCTCGTTTTGACAGG |
| | AGCCATTCAAGTAGCAGACAAAGTTTCTTCAGGGAAGAGTTCAGTGCTTG |
| | TGCATTGCAGTGACGGATGGGACAGGACTGCTCAGCTGACATCCTTGGCC |
| | ATGCTGATGTTGGATAGCTTCTATAGGAGCATTGAAGGGTTCGAAATACT |
| | GGTACAAAAAGAATGGATAAGTTTTGGACATAAATTTGCATCTCGAATAG |
| | GTCATGGTGATAAAAACCACACCGATGCTGACCGTTCTCCTATTTTTCTC |
| | CAGTTTATTGATTGTGTGTGGCAAATGTCAAAACAGTTCCCTACAGCTTT |
| | TGAATTCAATGAACAATTTTTGATTATAATTTTGGATCATCTGTATAGTT |
| | GCCGATTTGGTACTTTCTTATTCAACTGTGAATCTGCTCGAGAAAGACAG |
| | AAGGTTACAGAAAGGACTGTTTCTTTATGGTCACTGATAAACAGTAATAA |
| | AGAAAAATTCAAAAACCCCTTCTATACTAAAGAAATCAATCGAGTTTTAT |
| | ATCCAGTTGCCAGTATGCGTCACTTGGAACTCTGGGTGAATTACTACATT |
| | AGATGGAACCCCAGGATCAAGCAACAACAGCCGAATCCAGTGGAGCAGCG |
| | TTACATGGAGCTCTTAGCCTTACGCGACGAATACATAAAGCGGCTTGAGG |
| | AACTGCAGCTCGCCAACTCTGCCAAGCTTTCTGATCCCCCAACTTCACCT |
| | TCCAGTCCTTCGCAAATGATGCCCCATGTGCAAACTCACTTTTAATTAAG |
| | ATCTTTTTCCCTCTGCCAAAAATTATGGGGACATCATGAAGCCCCTTGAG |
| | CATCTGACTTCTGGCTAATAAAGGAAATTTATTTTCATTGCAATAGTGTG |
| | TTGGAATTTTTTGTGTCTCTCACTCGAGGCCTAGGAACCCCTAGTGATGG |
| | AGTTGGCCACTCCCTCTCTGCGCGCTCGCTCGCTCACTGAGGCCGGGCGA |
| | CCAAAGGTCGCCCGACGCCCGGGCTTTGCCCGGGCGGCCTCAGTGAGCGA |
| | GCGAGCGCGCAGAGAGGGAGTGGCCAA |
| SEQ ID | TTGGCCACTCCCTCTCTGCGCGCTCGCTCGCTCACTGAGGCCGCCCGGGC |
| NO: | AAAGCCCGGGCGTCGGGCGACCTTTGGTCGCCCGGCCTCAGTGAGCGAGC |
| 185 | GAGCGCGCAGAGAGGGAGTGGCCAACTCCATCACTAGGGGTTCCTTGCGC |
| (ES) | ACAGGTACCCCCCTGCCCCCACAGCTCCTCTCCTGTGCCTTGTTTCCCAG |
| | CCATGCGTTCTCCTCTATAAATACCCGCTCTGGTATTTGGGGTTGGCAGC |
| | TGTTGCTGCCAGGGAGATGGTTGGGTTGACATGCGGCTCCTGACAAAACA |
| | CAAACCCCTGGTGTGTGTGGGCGTGGGTGGTGTGAGTAGGGGGATGAATC |
| | AGGGAGGGGGCGGGGGACCCAGGGGGCAGGAGCCACACAAAGTCTGTGCG |
| | GGGGGGGAGCGCACATAGCAATTGGAAACTGGCTGCAGACATGCTTGCTG |
| | CCTGCCCTGGCGAAGGATTGGTAGGCTTGCCGTCACAGGACCCCCGCTGG |
| | CTGACTCAGGGGCGCAGGCTCTTGCGGGGGAGCTGGCCTCCCGCCCCCAC |
| | GGCCACGGGCCCTTTCCTGGCAGGACAGCGGGATCTTGCAGCTGTCAGGG |
| | GAGGGGAGGCGGGGGCTGATGTCAGGAGGGATACAAATAGTGCCGACGGC |
| | TGGGGGCCCTGTCTCCCCTCGCCGCATCCACTCTCCGGCCGGCCGCCTGC |
| | CCGCCGCCTCCTCCGTGCGCCCGCCAGCCTCGCCCGCGCCGTCACCGATA |
| | TCTCAGATCGCCTGGAGACGCCATCCACGCTGTTTTGACCTCCATAGAAG |
| | ACACCGGGACCGATCCAGCCTCCGCGGATTQGAATCCCGGCCGGGAACGG |
| | TGCATTGGAACGCGGATTCCCCGTGCCAAGAGTGACGTAAGTACCGCCTA |
| | TAGAGTCTATAGGCCCACAAAAAATGCTTTCTTCTTTTAATATACTTTTT |
| | TGTTTATCTTATTTCTAATACTTTCCCTAATCTCTTTCTTTCAGGGCAAT |
| | AATGATACAATGTATCATGCCTCTTTGCACCATTCTAAAGAATAACAGTG |
| | ATAATTTCTGGGTTAAGGCAATAGCAATATTTCTGCATATAAATATTTCT |
| | GCATATAAATTGTAACTGATGTAAGAGGTTTCATATTGCTAATAGCAGCT |
| | ACAATCCAGCTACCATTCTGCTTTTATTTTATGGTTGGGATAAGGCTGGA |
| | TTATTCTGAGTCCAAGCTAGGCCCTTTTGCTAATCATGTTCATACCTCTT |
| | ATCTTCCTCCCACAGCTCCTGGGCAACGTGCTGGTCTGTGTGCTGGCCCA |
| | TCACTTTGGCAAAGAATTTGAGCGGCCGCCACCATGGCCTCTGCCAGCAC |
| | CTCTAAGTACAACAGCCACTCCCTGGAAAATGAATCCATCAAAAGGACCA |
| | GCAGAGATGGAGTGAACAGAGACCTAACTGAAGCTGTGCCAAGACTGCCT |
| | GGAGAGACCCTGATCACAGACAAGGAAGTGATCTACATCTGCCCCTTCAA |
| | TGGCCCTATCAAGGGAAGGGTGTACATCACCAACTACAGGCTTTACCTGA |
| | GATCCCTGGAGACAGACAGCAGCCTGATCCTGGATGTGCCTCTGGGAGTG |
| | ATCAGCAGAATAGAGAAGATGGGGGGTGCCACCAGCAGAGGAGAGAACAG |
| | CTATGGCCTGGACATCACCTGCAAGGACATGAGAAACCTGAGATTTGCCC |
| | TGAAGCAGGAGGGCCACAGCAGAAGAGACATGTTTGAAATCCTGACCAGG |
| | TATGCCTTCCCCCTGGCCCACTCTCTCCCCCTGTTTGCCTTCCTGAATGA |
| | GGAAAAGTTCAATGTTGATGGCTGGACAGTGTACAACCCAGTGGAGGAGT |
| | ACAGAAGACAGGGCCTGCCTAACCACCACTGGAGGATCACCTTCATCAAC |
| | AAGTGCTATGAACTGTGTGACACATACCCTGCCCTGCTGGTGGTGCCTTA |
| | CAGAGCCTCAGATGATGACCTGAGAAGAGTTGCCACCTTCAGAAGCAGGA |
| | ACAGAATCCCTGTACTGAGCTGGATCCACCCTGAGAATAAGACTGTGATT |
| | GTGAGGTGCAGCCAGCCCCTGGTGGGCATGAGTGGCAAGAGAAACAAAGA |
| | TGATGAAAAGTACCTGGATGTGATCAGAGAGACCAACAAACAGATCAGCA |
| | AGCTCACCATCTATGATGCTAGACCCTCTGTTAATGCTGTGGCCAACAAG |
| | GCCACAGGGGGAGGCTATGAATCTGATGATGCTTACCACAATGCTGAGCT |
| | GTTCTTCCTGGACATCCACAACATCCATGTGATGAGAGAATCCCTCAAGA |
| | AAGTGAAGGACATTGTGTACCCTAATGTGGAAGAAAGTCACTGGCTGAGC |
| | AGCTTGGAGTCCACCCACTGGCTGGAGCACATCAAGCTGGTCCTGACAGG |
| | AGCCATCCAGGTGGCTGACAAGGTGAGTTCTGGCAAGTCCTCAGTGCTGG |
| | TCCACTGCTCTGATGGCTGGGACAGAACTGCCCAGCTGACCAGTCTGGCC |
| | ATGCTGATGCTGGACTCCTTCTACAGAAGCATTGAAGGCTTTGAAATCCT |
| | GGTGCAAAAGGAATGGATCTCTTTTGGCCACAAGTTTGCCAGCAGAATTG |
| | GCCATGGTGACAAAAACCACACAGATGCTGACAGAAGCCCTATCTTCCTG |
| | CAGTTCATTGACTGTGTGTGGCAGATGAGCAAGCAGTTCCCCACAGCATT |
| | TGAGTTCAATGAGCAGTTCCTAATAATCATCCTGGACCACCTCTACAGCT |
| | GCAGATTTGGCACCTTCCTGTTCAACTGTGAGTCTGCCAGAGAAAGACAG |
| | AAGGTGACAGAGAGGACAGTGAGCCTGTGGAGCCTGATCAACTCCAACAA |
| | GGAGAAGTTCAAGAACCCCTTCTACACCAAGGAAATCAACAGGGTGCTGT |
| | ACCCTGTGGCTAGCATGAGGCACCTGGAGCTGTGGGTCAACTACTACATC |
| | AGATGGAACCCTAGAATCAAACAGCAACAACCCAACCCTGTGGAGCAGAG |
| | GTACATGGAGTTACTGGCCCTGAGGGATGAGTACATCAAGAGACTGGAGG |
| | AGCTGCAGCTGGCCAACTCTGCCAAACTGTCTGACCCTCCTACCTCCCCC |
| | AGCTCCCCCTCTCAGATGATGCCACATGTGCAGACCCACTTTTAATTAAG |
| | ATCTTTTTCCCTCTGCCAAAAATTATGGGGACATCATGAAGCCCCTTGAG |
| | CATCTGACTTCTGGCTAATAAAGGAAATTTATTTTCATTGCAATAGTGTG |
| | TTGGAATTTTTTGTGTCTCTCACTCGAGGCCTAGGAACCCCTAGTGATGG |
| | AGTTGGCCACTCCCTCTCTGCGCGCTCGCTCGCTCACTGAGGCCGGGCGA |
| | CCAAAGGTCGCCCGACGCCCGGGCTTTGCCCGGGCGGCCTCAGTGAGCGA |
| | GCGAGCGCGCAGAGAGGGAGTGGCCAA |
| SEQ ID | TTGGCCACTCCCTCTCTGCGCGCTCGCTCGCTCACTGAGGCCGCCCGGGC |
| NO: | AAAGCCCGGGCGTCGGGCGACCTTTGGTCGCCCGGCCTCAGTGAGCGAGC |
| 186 | GAGCGCGCAGAGAGGGAGTGGCCAACTCCATCACTAGGGGTTCCTTGCGC |
| (E6) | ACAGGTACCGACATTGATTATTGACTAGTTATTAATAGTAATCAATTACG |
| | GGGTCATTAGTTCATAGCCCATATATGGAGTTCCGCGTTACATAACTTAC |
| | GGTAAATGGCCCGCCTGGCTGACCGCCCAACGACCCCCGCCCATTGACGT |
| | CAATAATGACGTATGTTCCCATAGTAACGCCAATAGGGACTTTCCATTGA |
| | CGTCAATGGGTGGAGTATTTACGGTAAACTGCCCACTTGGCAGTACATCA |
| | AGTGTATCATATGCCAAGTACGCCCCCTATTGACGTCAATGACGGTAAAT |
| | GGCCCGCCTGGCATTATGCCCAGTACATGACCTTATGGGACTTTCCTACT |
| | TGGCAGTACATCTACGTATTAGTCATCGCTATTACCATGGTCGAGGTGAG |
| | CCCCACGTTCTGCTTCACTCTCCCCATCTCCCCCCCCTCCCCACCCCCAA |
| | TTTTGTATTTATTTATTTTTTAATTATTTTGTGCAGCGATGGGGGGGGGG |
| | GGGGGGGGGGGGGGCGCGCCAGGCGGGGCGGGGGGGGGCGAGGGGGGGGG |
| | GGGGCGAGGCGGAGAGGTGCGGCGGCAGCCAATCAGAGCGGCGCGCTCCG |
| | AAAGTTTCCTTTTATGGCGAGGCGGCGGCGGCGGCGGCCCTATAAAAAGC |
| | GAAGCGCGCGGCGGGCGGATATCTCAGATCGCCTGGAGACGCCATCCACG |
| | CTGTTTTGACCTCCATAGAAGACACCGGGACCGATCCAGCCTCCGCGGAT |
| | TCGAATCCCGGCCGGGAACGGTGCATTGGAACGCGGATTCCCCGTGCCAA |
| | GAGTGACGTAAGTACCGCCTATAGAGTCTATAGGCCCACAAAAAATGCTT |
| | TCTTCTTTTAATATACTTTTTTGTTTATCTTATTTCTAATACTTTCCCTA |
| | ATCTCTTTCTTTCAGGGCAATAATGATACAATGTATCATGCCTCTTTGCA |
| | CCATTCTAAAGAATAACAGTGATAATTTCTGGGTTAAGGCAATAGCAATA |
| | TTTCTGCATATAAATATTTCTGCATATAAATTGTAACTGATGTAAGAGGT |
| | TTCATATTGCTAATAGCAGCTACAATCCAGCTACCATTCTGCTTTTATTT |
| | TATGGTTGGGATAAGGCTGGATTATTCTGAGTCCAAGCTAGGCCCTTTTG |
| | CTAATCATGTTCATACCTCTTATCTTCCTCCCACAGCTCCTGGGCAACGT |
| | GCTGGTCTGTGTGCTGGCCCATCACTTTGGCAAAGAATTTGAGCGGCCGC |
| | CACCATGGCATCAGCAAGCACAAGCAAATACAACTCACATAGCCTGGAAA |
| | ACGAGAGCATCAAGAGAACCTCAAGGGACGGGGTCAATAGAGATCTGACA |
| | GAGGCAGTGCCAAGGCTGCCTGGAGAGACACTGATCACAGACAAGGAAGT |
| | GATCTACATCTGCCCTTTCAACGGCCCAATCAAGGGCCGCGTGTATATCA |
| | CCAATTACAGACTGTACCTGCGGAGCCTGGAGACAGATAGCTCCCTGATC |
| | CTGGACGTGCCTCTGGGCGTGATCAGCAGAATCGAGAAGATGGGAGGAGC |
| | CACCTCTAGGGGAGAGAACAGCTACGGCCTGGATATCACCTGTAAGGACA |
| | TGCGCAATCTGCGGTTTGCCCTGAAGCAGGAGGGCCACTCCCGGAGAGAT |
| | ATGTTCGAGATCCTGACCAGATATGCCTTTCCCCTGGCCCACTCTCTGCC |
| | TCTGTTCGCCTTTCTGAACGAGGAGAAGTTCAATGTGGACGGCTGGACAG |
| | TGTACAACCCCGTGGAGGAGTATAGGCGCCAGGGCCTGCCTAACCACCAC |
| | TGGCGGATCACCTTTATCAATAAGTGCTACGAGCTGTGCGATACATATCC |
| | AGCCCTGCTGGTGGTGCCCTACAGAGCCAGCGACGATGACCTGCGGAGAG |
| | TGGCCACCTTCCGGAGCCGGAACAGAATCCCTGTGCTGAGCTGGATCCAC |
| | CCAGAGAATAAGACAGTGATCGTGCGCTGCTCCCAGCCACTGGTGGGAAT |
| | GTCTGGCAAGCGGAACAAGGATGACGAGAAGTACCTGGATGTGATCAGAG |
| | AGACAAATAAGCAGATCAGCAAGCTGACAATCTATGATGCCCGGCCTTCT |
| | GTGAATGCAGTGGCAAATAAGGCAACAGGAGGAGGATATGAGTCTGATGA |
| | CGCCTATCACAACGCCGAGCTGTTCTTTCTGGATATCCACAATATCCACG |
| | TGATGAGAGAGTCCCTGAAGAAGGTGAAGGACATCGTGTACCCAAACGTG |
| | GAGGAGTCCCACTGGCTGTCTAGCCTGGAGTCTACCCACTGGCTGGAGCA |
| | CATCAAGCTGGTGCTGACAGGCGCCATCCAGGTGGCCGATAAGGTGTCCT |
| | CTGGCAAGAGCTCCGTGCTGGTGCACTGTTCCGATGGGTGGGACAGAACA |
| | GCACAGCTGACAAGCCTGGCTATGCTGATGCTGGACTCCTTCTATAGATC |
| | TATCGAGGGCTTTGAGATCCTGGTGCAGAAGGAGTGGATCAGCTTCGGCC |
| | ACAAGTTTGCCTCCAGGATCGGCCACGGCGATAAGAATCACACCGATGCC |
| | GACCGCAGCCCTATCTTCCTGCAGTTTATCGACTGCGTGTGGCAGATGTC |
| | CAAGCAGTTCCCAACCGCCTTCGAGTTTAACGAGCAGTTTCTGATCATCA |
| | TCCTGGACCACCTGTACTCCTGCAGGTTCGGCACATTCCTGTTTAATTGT |
| | GAGTCTGCCAGAGAGAGGCAGAAGGTGACCGAGCGCACAGTGTCTCTGTG |
| | GAGCCTGATCAACAGCAATAAGGAGAAGTTCAAGAACCCCTTCTACACAA |
| | AGGAGATCAATCGCGTGCTGTATCCTGTGGCATCCATGAGACACCTGGAG |
| | CTGTGGGTGAACTACTATATCCGCTGGAATCCCCGGATCAAGCAGCAGCA |
| | GCCCAACCCTGTGGAGCAGCGGTACATGGAGCTGCTGGCCCTGAGAGATG |
| | AGTATATCAAGAGGCTGGAGGAGCTGCAGCTGGCCAATAGCGCCAAGCTG |
| | TCCGACCCACCTACTTCACCAAGCAGCCCCTCACAGATGATGCCCCACGT |
| | CCAGACCCACTTTTAATTAAGATCTTTTTCCCTCTGCCAAAAATTATGGG |
| | GACATCATGAAGCCCCTTGAGCATCTGACTTCTGGCTAATAAAGGAAATT |
| | TATTTTCATTGCAATAGTGTGTTGGAATTTTTTGTGTCTCTCACTCGAGG |
| | CCTAGGAACCCCTAGTGATGGAGTTGGCCACTCCCTCTCTGCGCGCTCGC |
| | TCGCTCACTGAGGCCGGGCGACCAAAGGTCGCCCGACGCCCGGGCTTTGC |
| | CCGGGCGGCCTCAGTGAGCGAGCGAGCGCGCAGAGAGGGAGTGGCCAA |
| SEQ ID | TTGGCCACTCCCTCTCTGCGCGCTCGCTCGCTCACTGAGGCCGCCCGGGC |
| NO: | AAAGCCCGGGCGTCGGGCGACCTTTGGTCGCCCGGCCTCAGTGAGCGAGC |
| 187 | GAGCGCGCAGAGAGGGAGTGGCCAACTCCATCACTAGGGGTTCCTTGCGC |
| (E7) | ACAGGTACCGACATTGATTATTGACTAGTTATTAATAGTAATCAATTACG |
| | GGGTCATTAGTTCATAGCCCATATATGGAGTTCCGCGTTACATAACTTAC |
| | GGTAAATGGCCCGCCTGGCTGACCGCCCAACGACCCCCGCCCATTGACGT |
| | CAATAATGACGTATGTTCCCATAGTAACGCCAATAGGGACTTTCCATTGA |
| | CGTCAATGGGTGGAGTATTTACGGTAAACTGCCCACTTGGCAGTACATCA |
| | AGTGTATCATATGCCAAGTACGCCCCCTATTGACGTCAATGACGGTAAAT |
| | GGCCCGCCTGGCATTATGCCCAGTACATGACCTTATGGGACTTTCCTACT |
| | TGGCAGTACATCTACGTATTAGTCATCGCTATTACCATGGTCGAGGTGAG |
| | CCCCACGTTCTGCTTCACTCTCCCCATCTCCCCCCCCTCCCCACCCCCAA |
| | TTTTGTATTTATTTATTTTTTAATTATTTTGTGCAGCGATGGGGGGGGGG |
| | GGGGGGGGGGGGGGCGCGCCAGGGGGGCGGGGCGGGGCGAGGGGCGGGGG |
| | GGGGCGAGGCGGAGAGGTGCGGCGGCAGCCAATCAGAGCGGCGCGCTCCG |
| | AAAGTTTCCTTTTATGGCGAGGCGGCGGCGGCGGCGGCCCTATAAAAAGC |
| | GAAGCGCGCGGCGGGCGGATATCTCAGATCGCCTGGAGACGCCATCCACG |
| | CTGTTTTGACCTCCATAGAAGACACCGGGACCGATCCAGCCTCCGCGGAT |
| | TCGAATCCCGGCCGGGAACGGTGCATTGGAACGCGGATTCCCCGTGCCAA |
| | GAGTGACGTAAGTACCGCCTATAGAGTCTATAGGCCCACAAAAAATGCTT |
| | TCTTCTTTTAATATACTTTTTTGTTTATCTTATTTCTAATACTTTCCCTA |
| | ATCTCTTTCTTTCAGGGCAATAATGATACAATGTATCATGCCTCTTTGCA |
| | CCATTCTAAAGAATAACAGTGATAATTTCTGGGTTAAGGCAATAGCAATA |
| | TTTCTGCATATAAATATTTCTGCATATAAATTGTAACTGATGTAAGAGGT |
| | TTCATATTGCTAATAGCAGCTACAATCCAGCTACCATTCTGCTTTTATTT |
| | TATGGTTGGGATAAGGCTGGATTATTCTGAGTCCAAGCTAGGCCCTTTTG |
| | CTAATCATGTTCATACCTCTTATCTTCCTCCCACAGCTCCTGGGCAACGT |
| | GCTGGTCTGTGTGCTGGCCCATCACTTTGGCAAAGAATTTGAGCGGCCGC |
| | CACCATGGCTAGCGCCAGCACAAGCAAGTACAACAGCCACAGCCTGGAAA |
| | ACGAGAGCATCAAGCGGACCAGCAGAGATGGCGTGAACAGGGATCTGACA |
| | GAGGCCGTGCCTAGACTGCCTGGCGAGACACTGATCACCGACAAAGAAGT |
| | GATCTACATCTGCCCCTTCAACGGCCCCATCAAGGGCCGCGTGTACATCA |
| | CCAACTACCGGCTGTACCTGCGGTCCCTGGAAACCGATAGCAGCCTGATC |
| | CTGGATGTGCCCCTGGGCGTGATCAGCCGGATTGAGAAAATGGGCGGAGC |
| | CACCTCCAGAGGCGAGAATAGCTACGGCCTGGACATCACATGCAAGGACA |
| | TGCGGAACCTGAGATTCGCCCTGAAGCAAGAGGGCCACAGCAGACGGGAC |
| | ATGTTCGAGATCCTGACCAGATACGCCTTTCCTCTGGCTCACTCCCTGCC |
| | TCTGTTCGCCTTCCTGAACGAAGAGAAGTTCAACGTGGACGGCTGGACCG |
| | TGTACAACCCCGTGGAAGAGTATCGGAGACAGGGCCTGCCTAATCACCAC |
| | TGGQGGATCACCTTCATCAACAAGTGCTACGAGCTGTGCGACACATACCC |
| | CGCACTGCTGGTGGTGCCTTACAGAGCCTCCGACGACGACCTGAGAAGAG |
| | TGGCCACCTTTCGGAGCCGGAACAGAATCCCTGTGCTGAGCTGGATTCAC |
| | CCCGAGAACAAGACCGTGATCGTGCGGTGTTCTCAGCCCCTCGTGGGCAT |
| | GTCTGGCAAGAGAAACAAGGACGACGAGAAGTACCTGGACGTGATCCGCG |
| | AGACAAACAAGCAGATCAGCAAGCTGACCATCTACGACGCCAGACCTAGC |
| | GTGAACGCCGTGGCCAACAAAGCTACAGGCGGCGGATACGAGAGCGACGA |
| | CGCCTATCATAACGCCGAGCTGTTCTTTCTGGACATCCACAACATCCACG |
| | TGATGCGGGAAAGCCTGAAGAAAGTGAAGGACATCGTGTACCCCAATGTG |
| | GAAGAGAGCCACTGGCTGAGCAGTCTGGAAAGCACACACTGGCTGGAACA |
| | CATCAAGCTGGTGCTGACAGGCGCCATCCAGGTGGCCGATAAGGTGTCCT |
| | CTGGCAAGTCTAGCGTGCTGGTGCACTGTAGCGACGGCTGGGATAGAACA |
| | GCCCAGCTGACATCTCTGGCCATGCTGATGCTGGACAGCTTCTACAGATC |
| | CATCGAGGGCTTTGAGATCCTGGTGCAGAAAGAGTGGATCAGCTTCGGCC |
| | ACAAGTTCGCCAGCAGAATCGGACACGGCGACAAGAACCACACCGACGCC |
| | GATAGAAGCCCCATCTTCCTGCAGTTCATCGACTGCGTGTGGCAGATGTC |
| | CAAGCAGTTCCCTACCGCCTTCGAGTTCAACGAGCAGTTCCTGATCATCA |
| | TCCTGGACCACCTGTACAGCTGCAGATTCGGCACCTTCCTGTTCAACTGC |
| | GAGAGCGCCAGAGAACGGCAGAAAGTGACCGAGCGGACCGTGTCTCTGTG |
| | GTCCCTGATCAACAGCAACAAAGAGAAATTCAAGAACCCCTTCTACACCA |
| | AAGAAATCAACCGGGTGCTGTACCCCGTGGCCAGCATGAGACATCTGGAA |
| | CTGTGGGTCAACTACTACATCCGGTGGAACCCCAGAATCAAGCAGCAGCA |
| | GCCCAATCCTGTGGAACAGCGGTACATGGAACTGCTGGCCCTGCGGGACG |
| | AGTACATCAAGAGACTGGAAGAACTGCAGCTGGCCAACAGCGCCAAGCTG |
| | AGCGATCCTCCTACAAGCCCTAGCAGCCCCAGCCAGATGATGCCTCACGT |
| | GCAGACCCACTTTTAATTAAGATCTTTTTCCCTCTGCCAAAAATTATGGG |
| | GACATCATGAAGCCCCTTGAGCATCTGACTTCTGGCTAATAAAGGAAATT |
| | TATTTTCATTGCAATAGTGTGTTGGAATTTTTTGTGTCTCTCACTCGAGG |
| | CCTAGGAACCCCTAGTGATGGAGTTGGCCACTCCCTCTCTGCGCGCTCGC |
| | TCGCTCACTGAGGCCGGGCGACCAAAGGTCGCCCGACGCCCGGGCTTTGC |
| | CCGGGCGGCCTCAGTGAGCGAGCGAGCGCGCAGAGAGGGAGTGGCCAA |
| SEQ ID | TTGGCCACTCCCTCTCTGCGCGCTCGCTCGCTCACTGAGGCCGCCCGGGC |
| NO: | AAAGCCCGGGCGTCGGGCGACCTTTGGTCGCCCGGCCTCAGTGAGCGAGC |
| 188 | GAGCGCGCAGAGAGGGAGTGGCCAACTCCATCACTAGGGGTTCCTTGCGC |
| (E8) | ACAGGTACCGACATTGATTATTGACTAGTTATTAATAGTAATCAATTACG |
| | GGGTCATTAGTTCATAGCCCATATATGGAGTTCCGCGTTACATAACTTAC |
| | GGTAAATGGCCCGCCTGGCTGACCGCCCAACGACCCCCGCCCATTGACGT |
| | CAATAATGACGTATGTTQCCATAGTAACGCCAATAGGGACTTTCCATTGA |
| | CGTCAATGGGTGGAGTATTTACGGTAAACTGCCCACTTGGCAGTACATCA |
| | AGTGTATCATATGCCAAGTACGCCCCCTATTGACGTCAATGACGGTAAAT |
| | GGCCCGCCTGGCATTATGCCCAGTACATGACCTTATGGGACTTTCCTACT |
| | TGGCAGTACATCTACGTATTAGTCATCGCTATTACCATGGTCGAGGTGAG |
| | CCCCACGTTCTGCTTCACTCTCCCCATCTCCCCCCCCTCCCCACCCCCAA |
| | TTTTGTATTTATTTATTTTTTAATTATTTTGTGCAGCGATGGGGGGGGGG |
| | GGGGGGGGGGGGGGCGCGCCAGGQGGGGCGGGGCGGGGCGAGGGGGGGGG |
| | GGGGGCGAGGCGGAGAGGTGCGGGGCAGCCAATCAGAGCGGCGCGCTCCG |
| | AAAGTTTCCTTTTATGGCGAGGCGGCGGCGGCGGCGGCCCTATAAAAAGC |
| | GAAGCGCGCGGCGGGCGGATATCTCAGATCGCCTGGAGACGCCATCCACG |
| | CTGTTTTGACCTCCATAGAAGACACCGGGACCGATCCAGCCTCCGCGGAT |
| | TCGAATCCCGGCCGGGAACGGTGCATTGGAACGCGGATTCCCCGTGCCAA |
| | GAGTGACGTAAGTACCGCCTATAGAGTCTATAGGCCCACAAAAAATGCTT |
| | TCTTCTTTTAATATACTTTTTTGTTTATCTTATTTCTAATACTTTCCCTA |
| | ATCTCTTTCTTTCAGGGCAATAATGATACAATGTATCATGCCTCTTTGCA |
| | CCATTCTAAAGAATAACAGTGATAATTTCTGGGTTAAGGCAATAGCAATA |
| | TTTCTGCATATAAATATTTCTGCATATAAATTGTAACTGATGTAAGAGGT |
| | TTCATATTGCTAATAGCAGCTACAATCCAGCTACCATTCTGCTTTTATTT |
| | TATGGTTGGGATAAGGCTGGATTATTCTGAGTCCAAGCTAGGCCCTTTTG |
| | CTAATCATGTTCATACCTCTTATCTTCCTCCCACAGCTCCTGGGCAACGT |
| | GCTGGTCTGTGTGCTGGCCCATCACTTTGGCAAAGAATTTGAGCGGCCGC |
| | CACCATGGCTTCTGCATCAACTTCTAAATATAATTCACACTCCTTGGAGA |
| | ATGAGTCTATTAAGAGGACGTCTCGAGATGGAGTCAATCGAGATCTCACT |
| | GAGGCTGTTCCTCGACTTCCAGGAGAAACACTAATCACTGACAAAGAAGT |
| | TATTTACATATGTCCTTTCAATGGCCCCATTAAGGGAAGAGTTTACATCA |
| | CAAATTATCGTCTTTATTTAAGAAGTTTGGAAACGGATTCTTCTCTAATA |
| | CTTGATGTTCCTCTGGGTGTGATCTCGAGAATTGAAAAAATGGGAGGCGC |
| | GACAAGTAGAGGAGAAAATTCCTATGGTCTAGATATTACTTGTAAAGACA |
| | TGAGAAACCTGAGGTTCGCTTTGAAACAGGAAGGCCACAGCAGAAGAGAT |
| | ATGTTTGAGATCCTCACGAGATACGCGTTTCCCCTGGCTCACAGTCTGCC |
| | ATTATTTGCATTTTTAAATGAAGAAAAGTTTAACGTGGATGGATGGACAG |
| | TTTACAATCCAGTGGAAGAATACAGGAGGCAGGGCTTGCCCAATCACCAT |
| | TGGAGAATAACTTTTATTAATAAGTGCTATGAGCTCTGTGACACTTACCC |
| | TGCTCTTTTGGTGGTTCCGTATCGTGCCTCAGATGATGACCTCCGGAGAG |
| | TTGCAACTTTTAGGTCCCGAAATCGAATTCCAGTGCTGTCATGGATTCAT |
| | CCAGAAAATAAGACGGTCATTGTGCGTTGCAGTCAGCCTCTTGTCGGTAT |
| | GAGTGGGAAACGAAATAAAGATGATGAGAAATATCTCGATGTTATCAGGG |
| | AGACTAATAAACAAATTTCTAAACTCACCATTTATGATGCAAGACCCAGC |
| | GTAAATGCAGTGGCCAACAAGGCAACAGGAGGAGGATATGAAAGTGATGA |
| | TGCATATCATAACGCCGAACTTTTCTTCTTAGACATTCATAATATTCATG |
| | TTATGCGGGAATCTTTAAAAAAAGTGAAGGACATTGTTTATCCTAATGTA |
| | GAAGAATCTCATTGGTTGTCCAGTTTGGAGTCTACTCATTGGTTAGAACA |
| | TATCAAGCTCGTTTTGACAGGAGCCATTCAAGTAGCAGACAAAGTTTCTT |
| | CAGGGAAGAGTTCAGTGCTTGTGCATTGCAGTGACGGATGGGACAGGACT |
| | GCTCAGCTGACATCCTTGGCCATGCTGATGTTGGATAGCTTCTATAGGAG |
| | CATTGAAGGGTTCGAAATACTGGTACAAAAAGAATGGATAAGTTTTGGAC |
| | ATAAATTTGCATCTCGAATAGGTCATGGTGATAAAAACCACACCGATGCT |
| | GACCGTTCTCCTATTTTTCTCCAGTTTATTGATTGTGTGTGGCAAATGTC |
| | AAAACAGTTCCCTACAGCTTTTGAATTCAATGAACAATTTTTGATTATAA |
| | TTTTGGATCATCTGTATAGTTGCCGATTTGGTACTTTCTTATTCAACTGT |
| | GAATCTGCTCGAGAAAGACAGAAGGTTACAGAAAGGACTGTTTCTTTATG |
| | GTCACTGATAAACAGTAATAAAGAAAAATTCAAAAACCCATTCTATACTA |
| | AAGAAATCAATAGAGTTTTATATCCAGTTGCAAGTATGCGTCACTTGGAA |
| | CTCTGGGTGAATTACTACATTAGATGGAACCCCAGGATCAAACAACAACA |
| | ACCAAATCCAGTGGAACAACGTTACATGGAACTCTTAGCCTTACGAGATG |
| | AATACATAAAACGGCTTGAGGAACTGCAACTAGCAAACTCTGCAAAACTT |
| | TCTGATCCCCCAACTTCACCTTCCAGTCCTTCTCAAATGATGCCACATGT |
| | GCAAACTCACTTTTAATTAAGATCTTTTTCCCTCTGCCAAAAATTATGGG |
| | GACATCATGAAGCCCCTTGAGCATCTGACTTCTGGCTAATAAAGGAAATT |
| | TATTTTCATTGCAATAGTGTGTTGGAATTTTTTGTGTCTCTCACTCGAGG |
| | CCTAGGAACCCCTAGTGATGGAGTTGGCCACTCCCTCTCTGCGCGCTCGC |
| | TCGCTCACTGAGGCCGGGCGACCAAAGGTCGCCCGACGCCCGGGCTTTGC |
| | CCGGGCGGCCTCAGTGAGCGAGCGAGCGCGCAGAGAGGGAGTGGCCAA |
| SEQ ID | TTGGCCACTCCCTCTCTGCGCGCTCGCTCGCTCACTGAGGCCGCCCGGGC |
| NO: | AAAGCCCGGGCGTCGGGCGACCTTTGGTCGCCCGGCCTCAGTGAGCGAGC |
| 189 | GAGCGCGCAGAGAGGGAGTGGCCAACTCCATCACTAGGGGTTCCTTGCGC |
| (E9) | ACAGGTACCGACATTGATTATTGACTAGTTATTAATAGTAATCAATTACG |
| | GGGTCATTAGTTCATAGCCCATATATGGAGTTCCGCGTTACATAACTTAC |
| | GGTAAATGGCCCGCCTGGCTGACCGCCCAACGACCCCCGCCCATTGACGT |
| | CAATAATGACGTATGTTCCCATAGTAACGCCAATAGGGACTTTCCATTGA |
| | CGTCAATGGGTGGAGTATTTACGGTAAACTGCCCACTTGGCAGTACATCA |
| | AGTGTATCATATGCCAAGTACGCCCCCTATTGACGTCAATGACGGTAAAT |
| | GGCCCGCCTGGCATTATGCCCAGTACATGACCTTATGGGACTTTCCTACT |
| | TGGCAGTACATCTACGTATTAGTCATCGCTATTACCATGGTCGAGGTGAG |
| | CCCCACGTTCTGCTTCACTCTCCCCATCTCCCCCCCCTCCCCACCCCCAA |
| | TTTTGTATTTATTTATTTTTTAATTATTTTGTGCAGCGATGGGGGGGGGG |
| | GGGGGGGGGGGGGGCGCGCCAGGCGGGGCGGGGGGGGCGAGGGGCGGGGC |
| | GGGGCGAGGCGGAGAGGTGCGGCGGCAGCCAATCAGAGCGGCGCGCTCCG |
| | AAAGTTTCCTTTTATGGCGAGGCGGCGGCGGCGGCGGCCCTATAAAAAGC |
| | GAAGCGCGCGGGGGGGGATATCTCAGATCGCCTGGAGACGCCATCCACGC |
| | TGTTTTGACCTCCATAGAAGACACCGGGACCGATCCAGCCTCCGCGGATT |
| | CGAATCCCGGCCGGGAACGGTGCATTGGAACGCGGATTCCCCGTGCCAAG |
| | AGTGACGTAAGTACCGCCTATAGAGTCTATAGGCCCACAAAAAATGCTTT |
| | CTTCTTTTAATATACTTTTTTGTTTATCTTATTTCTAATACTTTCCCTAA |
| | TCTCTTTCTTTCAGGGCAATAATGATACAATGTATCATGCCTCTTTGCAC |
| | CATTCTAAAGAATAACAGTGATAATTTCTGGGTTAAGGCAATAGCAATAT |
| | TTCTGCATATAAATATTTCTGCATATAAATTGTAACTGATGTAAGAGGTT |
| | TCATATTGCTAATAGCAGCTACAATCCAGCTACCATTCTGCTTTTATTTT |
| | ATGGTTGGGATAAGGCTGGATTATTCTGAGTCCAAGCTAGGCCCTTTTGC |
| | TAATCATGTTCATACCTCTTATCTTCCTQCCACAGCTCCTGGGCAACGTG |
| | CTGGTCTGTGTGCTGGCCCATCACTTTGGCAAAGAATTTGAGCGGCCGCC |
| | ACCATGGCTTCTGCATCAACTTCTAAATATAATTCACACTCCTTGGAGAA |
| | TGAGTCTATTAAGAGGACGTCTCGAGATGGAGTCAATCGAGATCTCACTG |
| | AGGCTGTTCCTCGACTTCCAGGAGAAACACTAATCACTGACAAAGAAGTT |
| | ATTTACATATGTCCTTTCAATGGCCCCATTAAGGGAAGAGTTTACATCAC |
| | AAATTATCGTCTTTATTTAAGAAGTTTGGAAACGGATTCTTCTCTAATAC |
| | TTGATGTTQCTCTGGGTGTGATCTCGAGAATTGAAAAAATGGGAGGCGCG |
| | ACAAGTAGAGGAGAAAATTCCTATGGTCTAGATATTACTTGTAAAGACAT |
| | GAGAAACCTGAGGTTCGCTTTGAAACAGGAAGGCCACAGCAGAAGAGATA |
| | TGTTTGAGATCCTCACGAGATACGCGTTTCCCCTGGCTCACAGTCTGCCA |
| | TTATTTGCATTTTTAAATGAAGAAAAGTTTAACGTGGATGGATGGACAGT |
| | TTACAATCCAGTGGAAGAATACAGGAGGCAGGGCTTGCCCAATCACCATT |
| | GGAGAATAACTTTTATTAATAAGTGCTATGAGCTCTGTGACACTTACCCT |
| | GCTCTTTTGGTGGTTCCGTATCGTGCCTCAGATGATGACCTCCGGAGAGT |
| | TGCAACTTTTAGGTCCCGAAATCGAATTCCAGTGCTGTCATGGATTCATC |
| | CAGAAAATAAGACGGTCATTGTGCGTTGCAGTCAGCCTCTTGTCGGTATG |
| | AGTGGGAAACGAAATAAAGATGATGAGAAATATCTCGATGTTATCAGGGA |
| | GACTAATAAACAAATTTCTAAACTCACCATTTATGATGCAAGACCCAGCG |
| | TAAATGCAGTGGCCAACAAGGCAACAGGAGGAGGATATGAAAGTGATGAT |
| | GCATATCATAACGCCGAACTTTTCTTCTTAGACATTCATAATATTCATGT |
| | TATGCGGGAATCTTTAAAAAAAGTGAAGGACATTGTTTATCCTAATGTAG |
| | AAGAATCTCATTGGTTGTCCAGTTTGGAGTCTACTCATTGGTTAGAACAT |
| | ATCAAGCTQGTTTTGACAGGAGCCATTCAAGTAGCAGACAAAGTTTCTTC |
| | AGGGAAGAGTTCAGTGCTTGTGCATTGCAGTGACGGATGGGACAGGACTG |
| | CTCAGCTGACATCCTTGGCCATGCTGATGTTGGATAGCTTCTATAGGAGC |
| | ATTGAAGGGTTCGAAATACTGGTACAAAAAGAATGGATAAGTTTTGGACA |
| | TAAATTTGCATCTCGAATAGGTCATGGTGATAAAAACCACACCGATGCTG |
| | ACCGTTCTCCTATTTTTCTCCAGTTTATTGATTGTGTGTGGCAAATGTCA |
| | AAACAGTTCCCTACAGCTTTTGAATTCAATGAACAATTTTTGATTATAAT |
| | TTTGGATCATCTGTATAGTTGCCGATTTGGTACTTTCTTATTCAACTGTG |
| | AATCTGCTCGAGAAAGACAGAAGGTTACAGAAAGGACTGTTTCTTTATGG |
| | TCACTGATAAACAGTAATAAAGAAAAATTCAAAAACCCCTTCTATACTAA |
| | AGAAATCAATCGAGTTTTATATCCAGTTGCCAGTATGCGTCACTTGGAAC |
| | TCTGGGTGAATTACTACATTAGATGGAACCCCAGGATCAAGCAACAACAG |
| | CCGAATCCAGTGGAGCAGCGTTACATGGAGCTCTTAGCCTTACGCGACGA |
| | ATACATAAAGCGGCTTGAGGAACTGCAGCTCGCCAACTCTGCCAAGCTTT |
| | CTGATCCCCCAACTTCACCTTCCAGTCCTTCGCAAATGATGCCCCATGTG |
| | CAAACTCACTTTTAATTAAGATCTTTTTCCCTCTGCCAAAAATTATGGGG |
| | ACATCATGAAGCCCCTTGAGCATCTGACTTCTGGCTAATAAAGGAAATTT |
| | ATTTTCATTGCAATAGTGTGTTGGAATTTTTTGTGTCTCTCACTCGAGGC |
| | CTAGGAACCCCTAGTGATGGAGTTGGCCACTCCCTCTCTGCGCGCTCGCT |
| | CGCTCACTGAGGCCGGGCGACCAAAGGTCGCCCGACGCCCGGGCTTTGCC |
| | CGGGCGGCCTCAGTGAGCGAGCGAGCGCGCAGAGAGGGAGTGGCCAA |
| SEQ ID | TTGTCGACTCGGTTCGCATATTAAGGTGACGCGTGTGGCCTCGAACACCG |
| NO: | AGCGACCCTGCAGCGACCCGCTTAA |
| 190 | |
| (E10A) | |
| SEQ ID | CCACTCCCTCTCTGCGCGCTCGCTCGCTCACTGAGGCCGGGCGACCAAAG |
| NO: | GTCGCCCGACGCCCGGGCTTTGCCCGGGCGGCCTCAGTGAGCGAGCGAGC |
| 191 | GCGCAGAGAGGGAGTGGCCAA |
| (E10B) | |
| SEQ ID | TTTTTTGGTACCTTCGCATATTAAGGTGACGCGTGTGGCCTCGAACACCG |
| NO: | AGCGACCCTGCAGCGACCCGCTTAAGCGGCCGCCACCATGGCATCAGCAA |
| 192 | GCACAAGCAAATACAACTCACATAGCCTGGAAAACG |
| (EIIA) | |
| SEQ ID | AGTGAGCGAGCGAGCGCGCAGAGAGGGAGTGGCCAACTCCATCACTAGGG |
| NO: | GTTCCTTGCGCACAGGTACCTTCGCATATTAAGGTGACGCGTGTGGCCTC |
| 193 | GAACACCGAGCGACCCTGCAGCGACCCGCTTAAGCGGCCGCCACCATGGC |
| (E11B) | TTCTGCATCAACTTCTAAATATAATTCACACTCCTTGGAGAATGAGTCTA |
| | TTAAGAGGACGTCTCGAGATGGAGTCAATCGAGATCTCACTGAGGCTGTT |
| | CCTCGACTTCCAGGAGAAACACTAATCACTGACAAAGAAGTTATTTACAT |
| | ATGTCCTTTCAATGGCCCCATTAAGGGAAGAGTTTACATCACAAATTATC |
| | GTCTTTATTTAAGAAGTTTGGAAACGGATTCTTCTCTAATACTTGATGTT |
| | CCTCTGGGTGTGATCTCGAGAATTGAAAAAATGGGAGGCGCGACAAGTAG |
| | AGGAGAAAATTCCTATGGTCTAGATATTACTTGTAAAGACATGAGAAACC |
| | TGAGGTTCGCTTTGAAACAGGAAGGCCACAGCAGAAGAGATATGTTTGAG |
| | ATCCTCACGAGATACGQGTTTCCCCTGGCTCACAGTCTGCCATTATTTGC |
| | ATTTTTAAATGAAGAAAAGTTTAACGTGGATGGATGGACAGTTTACAATC |
| | CAGTGGAAGAATACAGGAGGCAGGGCTTGCCCAATCACCATTGGAGAATA |
| | ACTTTTATTAATAAGTGCTATGAGCTCTGTGACACTTACCCTGCTCTTTT |
| | GGTGGTTCCGTATCGTGCCTCAGATGATGACCTCCGGAGAGTTGCAACTT |
| | TTAGGTCCCGAAATCGAATTCCAGTGCTGTCATGGATTCATCCAGAAAAT |
| | AAGACGGTCATTGTGCGTTGCAGTCAGCCTCTTGTCGGTATGAGTGGGAA |
| | ACGAAATAAAGATGATGAGAAATATCTCGATGTTATCAGGGAGACTAATA |
| | AACAAATTTCTAAACTCACCATTTATGATGCAAGACCCAGCGTAAATGCA |
| | GTGGCCAACAAGGCAACAGGAGGAGGATATGAAAGTGATGATGCATATCA |
| | TAACGCCGAACTTTTCTTCTTAGACATTCATAATATTCATGTTATGCGGG |
| | AATCTTTAAAAAAAGTGAAGGACATTGTTTATCCTAATGTAGAAGAATCT |
| | CATTGGTTGTCCAGTTTGGAGTCTACTCATTGGTTAGAACATATCAAGCT |
| | CGTTTTGACAGGAGCCATTCAAGTAGCAGACAAAGTTTCTTCAGGGAAGA |
| | GTTCAGTGCTTGTGCATTGCAGTGACGGATGGGACAGGACTGCTCAGCTG |
| | ACATCCTTGGCCATGCTGATGTTGGATAGCTTCTATAGGAGCATTGAAGG |
| | GTTCGAAATACTGGTACAAAAAGAATGGATAAGTTTTGGACATAAATTTG |
| | CATCTCGAATAGGTCATGGTGATAAAAACCACACCGATGCTGACCGTTCT |
| | CCTATTTTTCTCCAGTTTATTGATTGTGTGTGGCAAATGTCAAAACAGTT |
| | CCCTACAGCTTTTGAATTCAATGAACAATTTTTGATTATAATTTTGGATC |
| | ATCTGTATAGTTGCCGATTTGGTACTTTCTTATTCAACTGTGAATCTGCT |
| | CGAGAAAGACAGAAGGTTACAGAAAGGACTGTTTCTTTATGGTCACTGAT |
| | AAACAGTAATAAAGAAAAATTCAAAAACCCCTTCTATACTAAAGAAATCA |
| | ATCGAGTTTTATATCCAGTTGCCAGTATGCGTCACTTGGAACTCTGGGTG |
| | AATTACTACATTAGATGGAACCCCAGGATCAAGCAACAACAGCCGAATCC |
| | AGTGGAGCAGCGTTACATGGAGCTCTTAGCCTTACGCGACGAATACATAA |
| | AGCGGCTTGAGGAACTGCAGCTCGCCAACTCTGCCAAGCTTTCTGATCCC |
| | CCAACTTCACCTTCCAGTCCTTCGCAAATGATGCCCCATGTGCAAACTCA |
| | CTTTTAATTAAGATCTTTTTCCCTCTGCCAAAAATTATGGGGACATCATG |
| | AAGCCCCTTGAGCATCTGACTTCTGGCTAATAAAGGAAATTTATTTTCAT |
| | TGCAATAGTGTGTTGGAATTTTTTGTGTCTCTCACTCGAGGCCTAGGAAC |
| | CCCTAGTGATGGAGTTGGCCACTCCCTCTCTGCGCGCTCGCTCGCTCACT |
| | GAGGCCGGGCGACCAAAGGTCGCCCGACGCCCGGGCTTTGCCCGGGCGGC |
| | CTCAGTGAGCGAGCGAGCGCGCAGAGAGGGAGTGGCCAA |
| SEQ ID | TTTTTGTCGACTTCGCATATTAAGGTGACGCGTGTGGCCTCGAACACCGA |
| NO: | GCGACCCTGCAGCGACCCGCTTAAGCGGCCGCCACCATGGCTTCTGCATC |
| 194 | AACTTCTAAATATAATTCACACTCCTTGGAGAATGAGTCTATTAAGAGGA |
| (E12) | CGTCTCGAGATGGAGTCAATCGAGATCTCACTGAGGCTGTTCCTCGACTT |
| | CCAGGAGAAACACTAATCACTGACAAAGAAGTTATTTACATATGTCCTTT |
| | CAATGGCCCCATTAAGGGAAGAGTTTACATCACAAATTATCGTCTTTATT |
| | TAAGAAGTTTGGAAACGGATTCTTCTCTAATACTTGATGTTCCTCTGGGT |
| | GTGATCTCGAGAATTGAAAAAATGGGAGGCGCGACAAGTAGAGGAGAAAA |
| | TTCCTATGGTCTAGATATTACTTGTAAAGACATGAGAAACCTGAGGTTCG |
| | CTTTGAAACAGGAAGGCCACAGCAGAAGAGATATGTTTGAGATCCTCACG |
| | AGATACGCGTTTCCCCTGGCTCACAGTCTGCCATTATTTGCATTTTTAAA |
| | TGAAGAAAAGTTTAACGTGGATGGATGGACAGTTTACAATCCAGTGGAAG |
| | AATACAGGAGGCAGGGCTTGCCCAATCACCATTGGAGAATAACTTTTATT |
| | AATAAGTGCTATGAGCTCTGTGACACTTACCCTGCTCTTTTGGTGGTTCC |
| | GTATCGTGCCTCAGATGATGACCTCCGGAGAGTTGCAACTTTTAGGTCCC |
| | GAAATCGAATTCCAGTGCTGTCATGGATTCATCCAGAAAATAAGACGGTC |
| | ATTGTGCGTTGCAGTCAGCCTCTTGTQGGTATGAGTGGGAAACGAAATAA |
| | AGATGATGAGAAATATCTCGATGTTATCAGGGAGACTAATAAACAAATTT |
| | CTAAACTCACCATTTATGATGCAAGACCCAGCGTAAATGCAGTGGCCAAC |
| | AAGGCAACAGGAGGAGGATATGAAAGTGATGATGCATATCATAACGCCGA |
| | ACTTTTCTTCTTAGACATTCATAATATTCATGTTATGCGGGAATCTTTAA |
| | AAAAAGTGAAGGACATTGTTTATCCTAATGTAGAAGAATCTCATTGGTTG |
| | TCCAGTTTGGAGTCTACTCATTGGTTAGAACATATCAAGCTCGTTTTGAC |
| | AGGAGCCATTCAAGTAGCAGACAAAGTTTCTTCAGGGAAGAGTTCAGTGC |
| | TTGTGCATTGCAGTGACGGATGGGACAGGACTGCTCAGCTGACATCCTTG |
| | GCCATGCTGATGTTGGATAGCTTCTATAGGAGCATTGAAGGGTTCGAAAT |
| | ACTGGTACAAAAAGAATGGATAAGTTTTGGACATAAATTTGCATCTCGAA |
| | TAGGTCATGGTGATAAAAACCACACCGATGCTGACCGTTCTCCTATTTTT |
| | CTCCAGTTTATTGATTGTGTGTGGCAAATGTCAAAACAGTTCCCTACAGC |
| | TTTTGAATTCAATGAACAATTITTGATTATAATTTTGGATCATCTGTATA |
| | GTTGCCGATTTGGTACTTTCTTATTCAACTGTGAATCTGCTCGAGAAAGA |
| | CAGAAGGTTACAGAAAGGACTGTTTCTTTATGGTCACTGATAAACAGTAA |
| | TAAAGAAAAATTCAAAAACCCCTTCTATACTAAAGAAATCAATCGAGTTT |
| | TATATCCAGTTGCCAGTATGCGTCACTTGGAACTCTGGGTGAATTACTAC |
| | ATTAGATGGAACCCCAGGATCAAGCAACAACAGCCGAATCCAGTGGAGCA |
| | GCGTTACATGGAGCTCTTAGCCTTACGCGACGAATACATAAAGCGGCTTG |
| | AGGAACTGCAGCTCGCCAACTCTGCCAAGCTTTCTGATCCCCCAACTTCA |
| | CCTTCCAGTCCTTCGCAAATGATGCCCCATGTGCAAACTCACTTTTAATT |
| | AAGATCTTTTTCCCTCTGCCAAAAATTATGGGGACATCATGAAGCCCCTT |
| | GAGCATCTGACTTCTGGCTAATAAAGGAAATTTATTTTCATTGCAATAGT |
| | GTGTTGGAATTTTTTGTGTCTCTCACTCCCTAGGAAAAAA |
| SEQ ID | TTTTTGTCGACTTCGCATATTAAGGTGACGCGTGTGGCCTCGAACACCGA |
| NO: | GQGACCCTGCAGCGACCCGCTTAAGCGGCCGCCACCATGGCTTCTGCATC |
| 195 | AACTTCTAAATATAATTCACACTCCTTGGAGAATGAGTCTATTAAGAGGA |
| (E13A) | CGTCTCGAGATGGAGTCAATCGAGATCTCACTGAGGCTGTTCCTCGACTT |
| | CCAGGAGAAACACTAATCACTGACAAAGAAGTTATTTACATATGTCCTTT |
| | CAATGGCCCCATTAAGGGAAGAGTTTACATCACAAATTATCGTCTTTATT |
| | TAAGAAGTTTGGAAACGGATTCTTCTCTAATACTTGATGTTCCTCTGGGT |
| | GTGATCTCGAGAATTGAAAAAATGGGAGGCGCGACAAGTAGAGGAGAAAA |
| | TTCCTATGGTCTAGATATTACTTGTAAAGACATGAGAAACCTGAGGTTCG |
| | CTTTGAAACAGGAAGGCCACAGCAGAAGAGATATGTTTGAGATCCTCACG |
| | AGATACGCGTTTCCCCTGGCTCACAGTCTGCCATTATTTGCATTTTTAAA |
| | TGAAGAAAAGTTTAACGTGGATGGATGGACAGTTTACAATCCAGTGGAAG |
| | AATACAGGAGGCAGGGCTTGCCCAATCACCATTGGAGAATAACTTTTATT |
| | AATAAGTGCTATGAGCTCTGTGACACTTACCCTGCTCTTTTGGTGGTTCC |
| | GTATCGTGCCTCAGATGATGACCTCCGGAGAGTTGCAACTTTTAGGTCCC |
| | GAAATCGAATTCCAGTGCTGTCATGGATTCATCCAGAAAATAAGACGGTC |
| | ATTGTGCGTTGCAGTCAGCCTCTTGTCGGTATGAGTGGGAAACGAAATAA |
| | AGATGATGAGAAATATCTCGATGTTATCAGGGAGACTAATAAACAAATTT |
| | CTAAACTCACCATTTATGATGCAAGACCCAGCGTAAATGCAGTGGCCAAC |
| | AAGGCAACAGGAGGAGGATATGAAAGTGATGATGCATATCATAACGCCGA |
| | ACTTTTCTTCTTAGACATTCATAATATTCATGTTATGCGGGAATCTTTAA |
| | AAAAAGTGAAGGACATTGTTTATCCTAATGTAGAAGAATCTCATTGGTTG |
| | TCCAGTTTGGAGTCTACTCATTGGTTAGAACATATCAAGCTCGTTTTGAC |
| | AGGAGCCATTCAAGTAGCAGACAAAGTTTCTTCAGGGAAGAGTTCAGTGC |
| | TTGTGCATTGCAGTGACGGATGGGACAGGACTGCTCAGCTGACATCCTTG |
| | GCCATGCTGATGTTGGATAGCTTCTATAGGAGCATTGAAGGGTTCGAAAT |
| | ACTGGTACAAAAAGAATGGATAAGTTTTGGACATAAATTTGCATCTCGAA |
| | TAGGTCATGGTGATAAAAACCACACCGATGCTGACCGTTCTCCTATTTTT |
| | CTCCAGTTTATTGATTGTGTGTGGCAAATGTCAAAACAGTTCCCTACAGC |
| | TTTTGAATTCAATGAACAATTTTTGATTATAATTTTGGATCATCTGTATA |
| | GTTGCCGATTTGGTACTTTCTTATTCAACTGTGAATCTGCTCGAGAAAGA |
| | CAGAAGGTTACAGAAAGGACTGITTCTTTATGGTCACTGATAAACAGTAA |
| | TAAAGAAAAATTCAAAAACCCCTTCTATACTAAAGAAATCAATCGAGTTT |
| | TATATCCAGTTGCCAGTATGCGTCACTTGGAACTCTGGGTGAATTACTAC |
| | ATTAGATGGAACCCCAGGATCAAGCAACAACAGCCGAATCCAGTGGAGCA |
| | GCGTTACATGGAGCTCTTAGCCTTACGCGACGAATACATAAAGCGGCTTG |
| | AGGAACTGCAGCTCGCCAACTCTGCCAAGCTTTCTGATCCCCCAACTTCA |
| | CCTTCCAGTCCTTCGCAAATGATGCCCCATGTGCAAACTCACTTTTAATT |
| | AAGATCTTTTTCCCTCTGCCAAAAATTATGGGGACATCATGAAGCCCCTT |
| | GAGCATCTGACTTCTGGCTAATAAAGGAAATTTATTTTCATTGCAATAGT |
| | GTGTTGGAATTTTTTGTGTCTCTCACTCCCTAGGAAAAAA |
| SEQ ID | TTTTTGTCGACCCTCTATAAATACCCGCTCTGGGTTGGCAGCTGTTGCTG |
| NO: | CGGTGTGTGTGGGCGTGGGTGGTGTGAGTAGGGGGATGAATCAGGGAGGG |
| 196 | GGCGGGGGCAGGGGGCAGGAGCCACACAAACCTGCCCTGGCGAAGACCCC |
| (E13B) | CGCTGGCTGACTCAGGGATCTTGCAGCTGTCAGGGGGGAGGGATACAAAT |
| | AGTGCCGACGGCTGGGGGCCCTGTCTCCCCTCGCCGCGGCCGCCACCATG |
| | GCTTCTGCATCAACTTCTAAATATAATTCACACTCCTTGGAGAATGAGTC |
| | TATTAAGAGGACGTCTCGAGATGGAGTCAATCGAGATCTCACTGAGGCTG |
| | TTCCTCGACTTCCAGGAGAAACACTAATCACTGACAAAGAAGTTATTTAC |
| | ATATGTCCTTICAATGGCCCCATTAAGGGAAGAGTTTACATCACAAATTA |
| | TCGTCTTTATTTAAGAAGTTTGGAAACGGATTCTTCTCTAATACTTGATG |
| | TTCCTCTGGGTGTGATCTCGAGAATTGAAAAAATGGGAGGCGCGACAAGT |
| | AGAGGAGAAAATTCCTATGGTCTAGATATTACTTGTAAAGACATGAGAAA |
| | CCTGAGGTTCGCTTTGAAACAGGAAGGCCACAGCAGAAGAGATATGTTTG |
| | AGATCCTCACGAGATACGCGTTTCCCCTGGCTCACAGTCTGCCATTATTT |
| | GCATTTTTAAATGAAGAAAAGTTTAACGTGGATGGATGGACAGTTTACAA |
| | TCCAGTGGAAGAATACAGGAGGCAGGGCTTGCCCAATCACCATTGGAGAA |
| | TAACTTTTATTAATAAGTGCTATGAGCTCTGTGACACTTACCCTGCTCTT |
| | TTGGTGGTTCCGTATCGTGCCTCAGATGATGACCTCCGGAGAGTTGCAAC |
| | TTTTAGGTCCCGAAATCGAATTCCAGTGCTGTCATGGATTCATCCAGAAA |
| | ATAAGACGGTCATTGTGCGTTGCAGTCAGCCTCTTGTCGGTATGAGTGGG |
| | AAACGAAATAAAGATGATGAGAAATATCTCGATGTTATCAGGGAGACTAA |
| | TAAACAAATTTCTAAACTCACCATTTATGATGCAAGACCCAGCGTAAATG |
| | CAGTGGCCAACAAGGCAACAGGAGGAGGATATGAAAGTGATGATGCATAT |
| | CATAACGCCGAACTTTTCTTCTTAGACATTCATAATATTCATGTTATGCG |
| | GGAATCTTTAAAAAAAGTGAAGGACATTGTTTATCCTAATGTAGAAGAAT |
| | CTCATTGGTTGTCCAGTTTGGAGTCTACTCATTGGTTAGAACATATCAAG |
| | CTCGTTTTGACAGGAGCCATTCAAGTAGCAGACAAAGTTTCTTCAGGGAA |
| | GAGTTCAGTGCTTGTGCATTGCAGTGACGGATGGGACAGGACTGCTCAGC |
| | TGACATCCTTGGCCATGCTGATGTTGGATAGCTTCTATAGGAGCATTGAA |
| | GGGTTCGAAATACTGGTACAAAAAGAATGGATAAGTTTTGGACATAAATT |
| | TGCATCTCGAATAGGTCATGGTGATAAAAACCACACCGATGCTGACCGTT |
| | CTCCTATTTTTCTCCAGTTTATTGATTGTGTGTGGCAAATGTCAAAACAG |
| | TTCCCTACAGCTTTTGAATTCAATGAACAATTTTTGATTATAATTTTGGA |
| | TCATCTGTATAGTTGCCGATTTGGTACTTTCTTATTCAACTGTGAATCTG |
| | CTCGAGAAAGACAGAAGGTTACAGAAAGGACTGTTTCTTTATGGTCACTG |
| | ATAAACAGTAATAAAGAAAAATTCAAAAACCCCTTCTATACTAAAGAAAT |
| | CAATCGAGTTTTATATCCAGTTGCCAGTATGCGTCACTTGGAACTCTGGG |
| | TGAATTACTACATTAGATGGAACCCCAGGATCAAGCAACAACAGCCGAAT |
| | CCAGTGGAGCAGCGTTACATGGAGCTCTTAGCCTTACGCGACGAATACAT |
| | AAAGCGGCTTGAGGAACTGCAGCTCGCCAACTCTGCCAAGCTTTCTGATC |
| | CCCCAACTTCACCTTCCAGTCCTTCGCAAATGATGCCCCATGTGCAAACT |
| | CACTTTTAATTAAGATCTTTTTCCCTCTGCCAAAAATTATGGGGACATCA |
| | TGAAGCCCCTTGAGCATCTGACTTCTGGCTAATAAAGGAAATTTATTTTC |
| | ATTGCAATAGTGTGTTGGAATTTTTTGTGTCTCTCACTCCCTAGGAAAAA |
| | A |
| SEQ ID | AGTGAGCGAGCGAGCGCGCAGAGAGGGAGTGGCCAACTCCATCACTAGGG |
| NO: | GTTCCTTGCGCACAGGTACCCCTCTATAAATACCCGCTCTGGGTTGGCAG |
| 197 | CTGTTGCTGCGGTGTGTGTGGGCGTGGGTGGTGTGAGTAGGGGGATGAAT |
| (E13C) | CAGGGAGGGGGCGGGGGCAGGGGGCAGGAGCCACACAAACCTGCCCTGGC |
| | GAAGACCCCCGCTGGCTGACTCAGGGATCTTGCAGCTGTCAGGGGGGAGG |
| | GATACAAATAGTGCCGACGGCTGGGGGCCCTGTCTCCCCTCGCCGCGGCC |
| | GCCACCATGGCTTCTGCATCAACTTCTAAATATAATTCACACTCCTTGGA |
| | GAATGAGTCTATTAAGAGGACGTCTCGAGATGGAGTCAATCGAGATCTCA |
| | CTGAGGCTGTTCCTCGACTTCCAGGAGAAACACTAATCACTGACAAAGAA |
| | GTTATTTACATATGTCCTTTCAATGGCCCCATTAAGGGAAGAGTTTACAT |
| | CACAAATTATCGTCTTTATTTAAGAAGTTTGGAAACGGATTCTTCTCTAA |
| | TACTTGATGTTCCTCTGGGTGTGATCTCGAGAATTGAAAAAATGGGAGGC |
| | GCGACAAGTAGAGGAGAAAATTCCTATGGTCTAGATATTACTTGTAAAGA |
| | CATGAGAAACCTGAGGTTCGCTTTGAAACAGGAAGGCCACAGCAGAAGAG |
| | ATATGTTTGAGATCCTCACGAGATACGCGTTTCCCCTGGCTCACAGTCTG |
| | CCATTATTTGCATTTTTAAATGAAGAAAAGTTTAACGTGGATGGATGGAC |
| | AGTTTACAATCCAGTGGAAGAATACAGGAGGCAGGGCTTGCCCAATCACC |
| | ATTGGAGAATAACTTTTATTAATAAGTGCTATGAGCTCTGTGACACTTAC |
| | CCTGCTCTTTTGGTGGTTCCGTATCGTGCCTCAGATGATGACCTCCGGAG |
| | AGTTGCAACTTTTAGGTCCCGAAATCGAATTCCAGTGCTGTCATGGATTC |
| | ATCCAGAAAATAAGACGGTCATTGTGCGTTGCAGTCAGCCTCTTGTCGGT |
| | ATGAGTGGGAAACGAAATAAAGATGATGAGAAATATCTCGATGTTATCAG |
| | GGAGACTAATAAACAAATTTCTAAACTCACCATTTATGATGCAAGACCCA |
| | GCGTAAATGCAGTGGCCAACAAGGCAACAGGAGGAGGATATGAAAGTGAT |
| | GATGCATATCATAACGCCGAACTTTTCTTCTTAGACATTCATAATATTCA |
| | TGTTATGCGGGAATCTTTAAAAAAAGTGAAGGACATTGTTTATCCTAATG |
| | TAGAAGAATCTCATTGGTTGTCCAGTTTGGAGTCTACTCATTGGTTAGAA |
| | CATATCAAGCTQGTTTTGACAGGAGCCATTCAAGTAGCAGACAAAGTTTC |
| | TTCAGGGAAGAGTTCAGTGCTTGTGCATTGCAGTGACGGATGGGACAGGA |
| | CTGCTCAGCTGACATCCTTGGCCATGCTGATGTTGGATAGCTTCTATAGG |
| | AGCATTGAAGGGTTCGAAATACTGGTACAAAAAGAATGGATAAGTTTTGG |
| | ACATAAATTTGCATCTCGAATAGGTCATGGTGATAAAAACCACACCGATG |
| | CTGACCGTTCTCCTATTTTTCTCCAGTTTATTGATTGTGTGTGGCAAATG |
| | TCAAAACAGTTCCCTACAGCTTTTGAATTCAATGAACAATTTTTGATTAT |
| | AATTTTGGATCATCTGTATAGTTGCCGATTTGGTACTTTCTTATTCAACT |
| | GTGAATCTGCTCGAGAAAGACAGAAGGTTACAGAAAGGACTGITTCTTTA |
| | TGGTCACTGATAAACAGTAATAAAGAAAAATTCAAAAACCCCTTCTATAC |
| | TAAAGAAATCAATCGAGTTTTATATCCAGTTGCCAGTATGCGTCACTTGG |
| | AACTCTGGGTGAATTACTACATTAGATGGAACCCCAGGATCAAGCAACAA |
| | CAGCCGAATCCAGTGGAGCAGCGTTACATGGAGCTCTTAGCCTTACGCGA |
| | CGAATACATAAAGCGGCTTGAGGAACTGCAGCTCGCCAACTCTGCCAAGC |
| | TTTCTGATCCCCCAACTTCACCTTCCAGTCCTTCGCAAATGATGCCCCAT |
| | GTGCAAACTCACTTTTAATTAAGATCTTTTTCCCTCTGCCAAAAATTATG |
| | GGGACATCATGAAGCCCCTTGAGCATCTGACTTCTGGCTAATAAAGGAAA |
| | TTTATTTTCATTGCAATAGTGTGTTGGAATTTTTTGTGTCTCTCACTCGA |
| | GGCCTAGGAACCCCTAGTGATGGAGTTGGCCACTCCCTCTCTGCGCGCTC |
| | GCTCGCTCACTGAGGCCGGGCGACCAAAGGTCGCCCGACGCCCGGGCTTT |
| | GCCCGGGCGGCCTCAGTGAGCGAGCGAGCGCGCAGAGAGGGAGTGGCCAA |
| SEQ ID | TTTTTGTCGACCCTCTATAAATACCCGCTCTGGGTTGGCAGCTGTTGCTG |
| NO: | CGGTGTGTGTGGGCGTGGGTGGTGTGAGTAGGGGGATGAATCAGGGAGGG |
| 198 | GGCGGGGGCAGGGGGCAGGAGCCACACAAACCTGCCCTGGCGAAGACCCC |
| (E14) | CGCTGGCTGACTCAGGGATCTTGCAGCTGTCAGGGGGGAGGGATACAAAT |
| | AGTGCCGACGGCTGGGGGCCCTGTCTCCCCTCGCCGCGGCCGCCACCATG |
| | GCTTCTGCATCAACTTCTAAATATAATTCACACTCCTTGGAGAATGAGTC |
| | TATTAAGAGGACGTCTCGAGATGGAGTCAATCGAGATCTCACTGAGGCTG |
| | TTCCTCGACTTCCAGGAGAAACACTAATCACTGACAAAGAAGTTATTTAC |
| | ATATGTCCTTTCAATGGCCCCATTAAGGGAAGAGTTTACATCACAAATTA |
| | TCGTCTTTATTTAAGAAGTTTGGAAACGGATTCTTCTCTAATACTTGATG |
| | TTCCTCTGGGTGTGATCTCGAGAATTGAAAAAATGGGAGGCGCGACAAGT |
| | AGAGGAGAAAATTCCTATGGTCTAGATATTACTTGTAAAGACATGAGAAA |
| | CCTGAGGTTCGCTTTGAAACAGGAAGGCCACAGCAGAAGAGATATGTTTG |
| | AGATCCTCACGAGATACGCGTTTCCCCTGGCTCACAGTCTGCCATTATTT |
| | GCATTTTTAAATGAAGAAAAGTTTAACGTGGATGGATGGACAGTTTACAA |
| | TCCAGTGGAAGAATACAGGAGGCAGGGCTTGCCCAATCACCATTGGAGAA |
| | TAACTTTTATTAATAAGTGCTATGAGCTCTGTGACACTTACCCTGCTCTT |
| | TTGGTGGTTCCGTATCGTGCCTCAGATGATGACCTCCGGAGAGTTGCAAC |
| | TTTTAGGTCCCGAAATCGAATTCCAGTGCTGTCATGGATTCATCCAGAAA |
| | ATAAGACGGTCATTGTGCGTTGCAGTCAGCCTCTTGTCGGTATGAGTGGG |
| | AAACGAAATAAAGATGATGAGAAATATCTCGATGTTATCAGGGAGACTAA |
| | TAAACAAATTTCTAAACTCACCATTTATGATGCAAGACCCAGCGTAAATG |
| | CAGTGGCCAACAAGGCAACAGGAGGAGGATATGAAAGTGATGATGCATAT |
| | CATAACGCCGAACTTTTCTTCTTAGACATTCATAATATTCATGTTATGCG |
| | GGAATCTTTAAAAAAAGTGAAGGACATTGTTTATCCTAATGTAGAAGAAT |
| | CTCATTGGTTGTCCAGTTTGGAGTCTACTCATTGGTTAGAACATATCAAG |
| | CTCGTTTTGACAGGAGCCATTCAAGTAGCAGACAAAGTTTCTTCAGGGAA |
| | GAGTTCAGTGCTTGTGCATTGCAGTGACGGATGGGACAGGACTGCTCAGC |
| | TGACATCCTTGGCCATGCTGATGTTGGATAGCTTCTATAGGAGCATTGAA |
| | GGGTTCGAAATACTGGTACAAAAAGAATGGATAAGTTTTGGACATAAATT |
| | TGCATCTCGAATAGGTCATGGTGATAAAAACCACACCGATGCTGACCGTT |
| | CTCCTATTTTTCTCCAGTTTATTGATTGTGTGTGGCAAATGTCAAAACAG |
| | TTCCCTACAGCTTTTGAATTCAATGAACAATTTTTGATTATAATTTTGGA |
| | TCATCTGTATAGTTGCCGATTTGGTACTTTCTTATTCAACTGTGAATCTG |
| | CTCGAGAAAGACAGAAGGTTACAGAAAGGACTGTTTCTTTATGGTCACTG |
| | ATAAACAGTAATAAAGAAAAATTCAAAAACCCCTTCTATACTAAAGAAAT |
| | CAATCGAGTTTTATATCCAGTTGCCAGTATGCGTCACTTGGAACTCTGGG |
| | TGAATTACTACATTAGATGGAACCCCAGGATCAAGCAACAACAGCCGAAT |
| | CCAGTGGAGCAGCGTTACATGGAGCTCTTAGCCTTACGCGACGAATACAT |
| | AAAGCGGCTTGAGGAACTGCAGCTCGCCAACTCTGCCAAGCTTTCTGATC |
| | CCCCAACTTCACCTTCCAGTCCTTCGCAAATGATGCCCCATGTGCAAACT |
| | CACTTTTAATTAAGATCTTTTTCCCTCTGCCAAAAATTATGGGGACATCA |
| | TGAAGCCCCTTGAGCATCTGACTTCTGGCTAATAAAGGAAATTTATTTTC |
| | ATTGCAATAGTGTGTTGGAATTTTTTGTGTCTCTCACTCCCTAGGAAAAA |
| | A |
| SEQ ID | TTGGCCACTCCCTCTCTGCGCGCTCGCTCGCTCACTGAGGCCGCCCGGGC |
| NO: | AAAGCCCGGGCGTCGGGCGACCTTTGGTCGCCCGGCCTCAGTGAGCGAGC |
| 199 | GAGCGCGCAGAGAGGGAGTGGCCAACTCCATCACTAGGGGTTCCTTTGTC |
| (15) | GACCCTCTATAAATACCCGCTCTGGGTTGGCAGCTGTTGCTGCGGTGTGT |
| | GTGGGCGTGGGTGGTGTGAGTAGGGGGATGAATCAGGGAGGGGGCGGGGG |
| | CAGGGGGCAGGAGCCACACAAACCTGCCCTGGCGAAGACCCCCGCTGGCT |
| | GACTCAGGGATCTTGCAGCTGTCAGGGGGGAGGGATACAAATAGTGCCGA |
| | CGGCTGGGGGCCCTGTCTCCCCTCGCCGCGGCCGCCACCATGGCTTCTGC |
| | ATCAACTTCTAAATATAATTCACACTCCTTGGAGAATGAGTCTATTAAGA |
| | GGACGTCTCGAGATGGAGTCAATCGAGATCTCACTGAGGCTGTTCCTCGA |
| | CTTCCAGGAGAAACACTAATCACTGACAAAGAAGTTATTTACATATGTCC |
| | TTTCAATGGCCCCATTAAGGGAAGAGTTTACATCACAAATTATCGTCTTT |
| | ATTTAAGAAGTTTGGAAACGGATTCTTCTCTAATACTTGATGTTCCTCTG |
| | GGTGTGATCTCGAGAATTGAAAAAATGGGAGGCGCGACAAGTAGAGGAGA |
| | AAATTCCTATGGTCTAGATATTACTTGTAAAGACATGAGAAACCTGAGGT |
| | TCGCTTTGAAACAGGAAGGCCACAGCAGAAGAGATATGTTTGAGATCCTC |
| | ACGAGATACGCGTTTCCCCTGGCTCACAGTCTGCCATTATTTGCATTTTT |
| | AAATGAAGAAAAGTTTAACGTGGATGGATGGACAGTTTACAATCCAGTGG |
| | AAGAATACAGGAGGCAGGGCTTGCCCAATCACCATTGGAGAATAACTTTT |
| | ATTAATAAGTGCTATGAGCTCTGTGACACTTACCCTGCTCTTTTGGTGGT |
| | TCCGTATCGTGCCTCAGATGATGACCTCCGGAGAGTTGCAACTTTTAGGT |
| | CCCGAAATCGAATTCCAGTGCTGTCATGGATTCATCCAGAAAATAAGACG |
| | GTCATTGTGCGTTGCAGTCAGCCTCTTGTCGGTATGAGTGGGAAACGAAA |
| | TAAAGATGATGAGAAATATCTCGATGTTATCAGGGAGACTAATAAACAAA |
| | TTTCTAAACTCACCATTTATGATGCAAGACCCAGCGTAAATGCAGTGGCC |
| | AACAAGGCAACAGGAGGAGGATATGAAAGTGATGATGCATATCATAACGC |
| | CGAACTTTTCTTCTTAGACATTCATAATATTCATGTTATGCGGGAATCTT |
| | TAAAAAAAGTGAAGGACATTGITTATCCTAATGTAGAAGAATCTCATTGG |
| | TTGTCCAGTTTGGAGTCTACTCATTGGTTAGAACATATCAAGCTCGTTTT |
| | GACAGGAGCCATTCAAGTAGCAGACAAAGTTTCTTCAGGGAAGAGTTCAG |
| | TGCTTGTGCATTGCAGTGACGGATGGGACAGGACTGCTCAGCTGACATCC |
| | TTGGCCATGCTGATGTTGGATAGCTTCTATAGGAGCATTGAAGGGTTCGA |
| | AATACTGGTACAAAAAGAATGGATAAGTTTTGGACATAAATTTGCATCTC |
| | GAATAGGTCATGGTGATAAAAACCACACCGATGCTGACCGTTCTCCTATT |
| | TTTCTCCAGTTTATTGATTGTGTGTGGCAAATGTCAAAACAGTTCCCTAC |
| | AGCTTTTGAATTCAATGAACAATTTTTGATTATAATTTTGGATCATCTGT |
| | ATAGTTGCCGATTTGGTACTTTCTTATTCAACTGTGAATCTGCTCGAGAA |
| | AGACAGAAGGTTACAGAAAGGACTGTTTCTTTATGGTCACTGATAAACAG |
| | TAATAAAGAAAAATTCAAAAACCCCTTCTATACTAAAGAAATCAATCGAG |
| | TTTTATATCCAGTTGCCAGTATGCGTCACTTGGAACTCTGGGTGAATTAC |
| | TACATTAGATGGAACCCCAGGATCAAGCAACAACAGCCGAATCCAGTGGA |
| | GCAGCGTTACATGGAGCTCTTAGCCTTACGCGACGAATACATAAAGCGGC |
| | TTGAGGAACTGCAGCTCGCCAACTCTGCCAAGCTTTCTGATCCCCCAACT |
| | TCACCTTCCAGTCCTTCGCAAATGATGCCCCATGTGCAAACTCACTTTTA |
| | ATTAAGATCTTTTTCCCTCTGCCAAAAATTATGGGGACATCATGAAGCCC |
| | CTTGAGCATCTGACTTCTGGCTAATAAAGGAAATTTATTTTCATTGCAAT |
| | AGTGTGTTGGAATTTTTTGTGTCTCTCACTCGCCTAGGCCACTCCCTCTC |
| | TGCGCGCTCGCTCGCTCACTGAGGCCGGGCGACCAAAGGTCGCCCGACGC |
| | CCGGGCTTTGCCCGGGCGGCCTCAGTGAGCGAGCGAGCGCGCAGAGAGGG |
| | AGTGGCCAA |
| SEQ ID | TTTTGGTACCGACATTGATTATTGACTAGTTATTAATAGTAATCAATTAC |
| NO: | GGGGTCATTAGTTCATAGCCCATATATGGAGTTCCGCGTTACATAACTTA |
| 200 | CGGTAAATGGCCCGCCTGGCTGACCGCCCAACGACCCCCGCCCATTGACG |
| (E16) | TCAATAATGACGTATGTTQCCATAGTAACGCCAATAGGGACTTTCCATTG |
| | ACGTCAATGGGTGGAGTATTTACGGTAAACTGCCCACTTGGCAGTACATC |
| | AAGTGTATCATATGCCAAGTACGCCCCCTATTGACGTCAATGACGGTAAA |
| | TGGCCCGCCTGGCATTATGCCCAGTACATGACCTTATGGGACTTTCCTAC |
| | TTGGCAGTACATCTACGTATTAGTCATCGCTATTACCATGGTCGAGGTGA |
| | GCCCCACGTTCTGCTTCACTCTCCCCATCTCCCCCCCCTCCCCACCCCCA |
| | ATTTTGTATTTATTTATTTTTTAATTATTTTGTGCAGCGATGGGGGGGGG |
| | GGGGGGGGGGGGGGGCGCGCCAGGCGGGGCGGGGCGGGGCGAGGGGGGGG |
| | GGGGGGCGAGGCGGAGAGGTGCGGCGGCAGCCAATCAGAGCGGCGCGCTC |
| | CGAAAGTTTCCTTTTATGGCGAGGCGGCGGCGGCGGCGGCCCTATAAAAA |
| | GCGAAGCGCGCGGCGGGCGGATATCTTTTTT |
| SEQ ID | TTGGCCACTCCCTCTCTGCGCGCTCGCTCGCTCACTGAGGCCGCCCGGGC |
| NO: | AAAGCCCGGGCGTCGGGCGACCTTTGGTCGCCCGGCCTCAGTGAGCGAGC |
| 201 | GAGCGCGCAGAGAGGGAGTGGCCAACTCCATCACTAGGGGTTCCTTTGTC |
| (E17) | GACGACATTGATTATTGACTAGTTATTAATAGTAATCAATTACGGGGTCA |
| | TTAGTTCATAGCCCATATATGGAGTTCCGCGTTACATAACTTACGGTAAA |
| | TGGCCCGCCTGGCTGACCGCCCAACGACCCCCGCCCATTGACGTCAATAA |
| | TGACGTATGTTCCCATAGTAACGCCAATAGGGACTTTCCATTGACGTCAA |
| | TGGGTGGAGTATTTACGGTAAACTGCCCACTTGGCAGTACATCAAGTGTA |
| | TCATATGCCAAGTACGCCCCCTATTGACGTCAATGACGGTAAATGGCCCG |
| | CCTGGCATTATGCCCAGTACATGACCTTATGGGACTTTCCTACTTGGCAG |
| | TACATCTACGTATTAGTCATCGCTATTACCATGGTCGAGGTGAGCCCCAC |
| | GTTCTGCTTCACTCTCCCCATCTCCCCCCCCTCCCCACCCCCAATTTTGT |
| | ATTTATTTATTTTTTAATTATTTTGTGCAGCGATGGGGGCGGGGGGGGGG |
| | GGGGGGCGCGCGCCAGGCGGGGCGGGGCGGGGCGAGGGGGGGGGGGGGCG |
| | AGGCGGAGAGGTGCGGCGGCAGCCAATCAGAGCGGCGCGCTCCGAAAGTT |
| | TCCTTTTATGGCGAGGCGGCGGCGGCGGCGGCCCTATAAAAAGCGAAGCG |
| | CGCGGGGGCGGGAGTGGCTGCGCGCTGCCTTCGCCCCGTGCCCCGCTCCG |
| | CCGCCGCCTCGCGCCGCCCGCCCCGGCTCTGACTGACCGCGTTACTCCCA |
| | CAGGTGAGCGGGCGGGACGGCCCTTCTCCTCCGGGCTGTAATTAGCGCTT |
| | GGTTTAATGACGGCTTGTTTCTTTTCTGTGGCTGCGTGAAAGCCTTGAGG |
| | GGCTCCGGGAGGGCCCTTTGTGCGGGGGGAGCGGCTCGGGGGGTGCGTGC |
| | GTGTGTGTGTGCGTGGGGAGCGCCGCGTGCGGCTCCGCGCTGCCCGGCGG |
| | CTGTGAGCGCTGCGGGCGCGGCGCGGGGCTTTGTGCGCTCCGCAGTGTGC |
| | GCGAGGGGAGCGCGGCCGGGGGCGGTGCCCCGCGGTGCGGGGGGGGCTGC |
| | GAGGGGAACAAAGGCTGCGTGCGGGGTGTGTGCGTGGGGGGGTGAGCAGG |
| | GGGTGTGGGCGCGTCGGTCGGGCTGCAACCCCCCCTGCACCCCCCTCCCC |
| | GAGTTGCTGAGCACGGCCCGGCTTCGGGTGCGGGGCTCCGTACGGGGCGT |
| | GGCGCGGGGCTCGCCGTGCCGGGGGGGGGGTGGCGGCAGGTGGGGGTGCC |
| | GGGGGGGGGGGGCCGCCTCGGGCCGGGGAGGGCTCGGGGGAGGGGCGCGG |
| | CGGCCCCCGGAGCGCCGGCGGCTGTCGAGGCGCGGCGAGCCGCAGCCATT |
| | GCCTTTTATGGTAATCGTGCGAGAGGGCGCAGGGACTTCCTTTGTCCCAA |
| | ATCTGTGCGGAGCCGAAATCTGGGAGGCGCCGCCGCACCCCCTCTAGCGG |
| | GCGCGGGGCGAAGCGGTGCGGCGCCGGCAGGAAGGAAATGGGGGGGGAGG |
| | GCCTTCGTGCGTCGCCGCGCCGCCGTCCCCTTCTCCCTCTCCAGCCTCGG |
| | GGCTGTCCGCGGGGGGACGGCTGCCTTCGGGGGGGACGGGGCAGGGGGGG |
| | GTTCGGCTTCTGGCGTGTGACCGGCGGCTCTAGAGCCTCTGCTAACCATG |
| | TTCATGCCTTCTTCTTTTTCCTACAGCTCCTGGGCAACGTGCTGGTTATT |
| | GTGCTGTCTCATCATTTTGGCAAAAGATCTGCCGCCACCATGGTGAGCAA |
| | GGGCGAGGAGCTGTTCACCGGGGTGGTGCCCATCCTGGTCGAGCTGGACG |
| | GCGACGTAAACGGCCACAAGITCAGCGTGTCCGGCGAGGGCGAGGGCGAT |
| | GCCACCTACGGCAAGCTGACCCTGAAGTTCATCTGCACCACCGGCAAGCT |
| | GCCCGTGCCCTGGCCCACCCTCGTGACCACCCTGACCTACGGCGTGCAGT |
| | GCTTCAGCCGCTACCCCGACCACATGAAGCAGCACGACTTCTTCAAGTCC |
| | GCCATGCCCGAAGGCTACGTCCAGGAGCGCACCATCTTCTTCAAGGACGA |
| | CGGCAACTACAAGACCCGCGCCGAGGTGAAGTTCGAGGGCGACACCCTGG |
| | TGAACCGCATCGAGCTGAAGGGCATCGACTTCAAGGAGGACGGCAACATC |
| | CTGGGGCACAAGCTGGAGTACAACTACAACAGCCACAACGTCTATATCAT |
| | GGCCGACAAGCAGAAGAACGGCATCAAGGTGAACTTCAAGATCCGCCACA |
| | ACATCGAGGACGGCAGCGTGCAGCTCGCCGACCACTACCAGCAGAACACC |
| | CCCATCGGCGACGGCCCCGTGCTGCTGCCCGACAACCACTACCTGAGCAC |
| | CCAGTCCGCCCTGAGCAAAGACCQCAACGAGAAGCGCGATCACATGGTCC |
| | TGCTGGAGTTCGTGACCGCCGCCGGGATCACTCTCGGCATGGACGAGCTG |
| | TACAAGTGAGAGCTCGATCTTTTTCCCTCTGCCAAAAATTATGGGGACAT |
| | CATGAAGCCCCTTGAGCATCTGACTTCTGGCTAATAAAGGAAATTTATTT |
| | TCATTGCAATAGTGTGTTGGAATTTTTTGTGTCTCTCACTCGGAAGCCTA |
| | GGAGGAACCCCTAGTGATGGAGTTGGCCACTCCCTCTCTGCGCGCTCGCT |
| | CGCTCACTGAGGCCGGGCGACCAAAGGTCGCCCGACGCCCGGGCTTTGCC |
| | CGGGGGCCTCAGTGAGCGAGCGAGCGCGCAGAGAGGGAGTGGCCAA |
| SEQ ID | CAAAGAATTTGAGCGGCCGCCACCATGGCTTCTGCATCAACTTCTAAATA |
| NO: | TAATTCACACTCCTTGGAGAATGAGTCTATTAAGAGGACGTCTCGAGATG |
| 202 | GAGTCAATCGAGATCTCACTGAGGCTGTTCCTCGACTTCCAGGAGAAACA |
| (E18) | CTAATCACTGACAAAGAAGTTATTTACATATGTCCTTTCAATGGCCCCAT |
| | TAAGGGAAGAGTTTACATCACAAATTATCGTCTTTATTTAAGAAGTTTGG |
| | AAACGGATTCTTCTCTAATACTTGATGTTCCTCTGGGTGTGATCTCGAGA |
| | ATTGAAAAAATGGGAGGCGCGACAAGTAGAGGAGAAAATTCCTATGGTCT |
| | AGATATTACTTGTAAAGACATGAGAAACCTGAGGTTCGCTTTGAAACAGG |
| | AAGGCCACAGCAGAAGAGATATGTTTGAGATCCTCACGAGATACGCGTTT |
| | CCCCTGGCTCACAGTCTGCCATTATTTGCATTTTTAAATGAAGAAAAGTT |
| | TAACGTGGATGGATGGACAGTTTACAATCCAGTGGAAGAATACAGGAGGC |
| | AGGGCTTGCCCAATCACCATTGGAGAATAACTTTTATTAATAAGTGCTAT |
| | GAGCTCTGTGACACTTACCCTGCTCTTTTGGTGGTTCCGTATCGTGCCTC |
| | AGATGATGACCTCCGGAGAGTTGCAACTTTTAGGTCCCGAAATCGAATTC |
| | CAGTGCTGTCATGGATTCATCCAGAAAATAAGACGGTCATTGTGCGTTGC |
| | AGTCAGCCTCTTGTCGGTATGAGTGGGAAACGAAATAAAGATGATGAGAA |
| | ATATCTCGATGTTATCAGGGAGACTAATAAACAAATTTCTAAACTCACCA |
| | TTTATGATGCAAGACCCAGCGTAAATGCAGTGGCCAACAAGGCAACAGGA |
| | GGAGGATATGAAAGTGATGATGCATATCATAACGCCGAACTTTTCTTCTT |
| | AGACATTCATAATATTCATGTTATGCGGGAATCTTTAAAAAAAGTGAAGG |
| | ACATTGTTTATCCTAATGTAGAAGAATCTCATTGGTTGTCCAGTTTGGAG |
| | TCTACTCATTGGTTAGAACATATCAAGCTCGTTTTGACAGGAGCCATTCA |
| | AGTAGCAGACAAAGTTTCTTCAGGGAAGAGTTCAGTGCTTGTGCATTGCA |
| | GTGACGGATGGGACAGGACTGCTCAGCTGACATCCTTGGCCATGCTGATG |
| | TTGGATAGCTTCTATAGGAGCATTGAAGGGTTCGAAATACTGGTACAAAA |
| | AGAATGGATAAGTTTTGGACATAAATTTGCATCTCGAATAGGTCATGGTG |
| | ATAAAAACCACACCGATGCTGACCGTTCTCCTATTTTTCTCCAGTTTATT |
| | GATTGTGTGTGGCAAATGTCAAAACAGTTCCCTACAGCTTTTGAATTCAA |
| | TGAACAATTTTTGATTATAATTTTGGATCATCTGTATAGITGCCGATTTG |
| | GTACTTTCTTATTCAACTGTGAATCTGCTCGAGAAAGACAGAAGGTTACA |
| | GAAAGGACTGTTTCTTTATGGTCACTGATAAACAGTAATAAAGAAAAATT |
| | CAAAAACCCCTTCTATACTAAAGAAATCAATCGAGTTTTATATCCAGTTG |
| | CCAGTATGCGTCACTTGGAACTCTGGGTGAATTACTACATTAGATGGAAC |
| | CCCAGGATCAAGCAACAACAGCCGAATCCAGTGGAGCAGCGTTACATGGA |
| | GCTCTTAGCCTTACGCGACGAATACATAAAGCGGCTTGAGGAACTGCAGC |
| | TCGCCAACTCTGCCAAGCTTTCTGATCCCCCAACTTCACCTTCCAGTCCT |
| | TCGCAAATGATGCCCCATGTGCAAACTCACTTTTAATTAAGATCTTTTT |
| SEQ ID | TTTGAGCGGCCGCCACCATGGCTTCTGCATCAACTTCTAAATATAATTCA |
| NO: | CACTCCTTGGAGAATGAGTCTATTAAGAGGACGTCTCGAGATGGAGTCAA |
| 203 | TCGAGATCTCACTGAGGCTGTTCCTCGACTTCCAGGAGAAACACTAATCA |
| (E19) | CTGACAAAGAAGTTATTTACATATGTCCTTTCAATGGCCCCATTAAGGGA |
| | AGAGTTTACATCACAAATTATCGTCTTTATTTAAGAAGTTTGGAAACGGA |
| | TTCTTCTCTAATACTTGATGTTCCTCTGGGTGTGATCTCGAGAATTGAAA |
| | AAATGGGAGGCGCGACAAGTAGAGGAGAAAATTCCTATGGTCTAGATATT |
| | ACTTGTAAAGACATGAGAAACCTGAGGTTCGCTTTGAAACAGGAAGGCCA |
| | CAGCAGAAGAGATATGTTTGAGATCCTCACGAGATACGCGTTTCCCCTGG |
| | CTCACAGTCTGCCATTATTTGCATTTTTAAATGAAGAAAAGTTTAACGTG |
| | GATGGATGGACAGTTTACAATCCAGTGGAAGAATACAGGAGGCAGGGCTT |
| | GCCCAATCACCATTGGAGAATAACTTTTATTAATAAGTGCTATGAGCTCT |
| | GTGACACTTACCCTGCTCTTTTGGTGGTTCCGTATCGTGCCTCAGATGAT |
| | GACCTCCGGAGAGTTGCAACTTTTAGGTCCCGAAATCGAATTCCAGTGCT |
| | GTCATGGATTCATCCAGAAAATAAGACGGTCATTGTGCGTTGCAGTCAGC |
| | CTCTTGTQGGTATGAGTGGGAAACGAAATAAAGATGATGAGAAATATCTC |
| | GATGTTATCAGGGAGACTAATAAACAAATTTCTAAACTCACCATTTATGA |
| | TGCAAGACCCAGCGTAAATGCAGTGGCCAACAAGGCAACAGGAGGAGGAT |
| | ATGAAAGTGATGATGCATATCATAACGCCGAACTTTTCTTCTTAGACATT |
| | CATAATATTCATGTTATGCGGGAATCTTTAAAAAAAGTGAAGGACATTGT |
| | TTATCCTAATGTAGAAGAATCTCATTGGITGTCCAGTTTGGAGTCTACTC |
| | ATTGGTTAGAACATATCAAGCTCGTTTTGACAGGAGCCATTCAAGTAGCA |
| | GACAAAGTTTCTTCAGGGAAGAGTTCAGTGCTTGTGCATTGCAGTGACGG |
| | ATGGGACAGGACTGCTCAGCTGACATCCTTGGCCATGCTGATGTTGGATA |
| | GCTTCTATAGGAGCATTGAAGGGTTCGAAATACTGGTACAAAAAGAATGG |
| | ATAAGTTTTGGACATAAATTTGCATCTCGAATAGGTCATGGTGATAAAAA |
| | CCACACCGATGCTGACCGTTCTCCTATTTTTCTCCAGTTTATTGATTGTG |
| | TGTGGCAAATGTCAAAACAGTTCCCTACAGCTTTTGAATTCAATGAACAA |
| | TTTTTGATTATAATTTTGGATCATCTGTATAGTTGCCGATTTGGTACTTT |
| | CTTATTCAACTGTGAATCTGCTCGAGAAAGACAGAAGGTTACAGAAAGGA |
| | CTGTTTCTTTATGGTCACTGATAAACAGTAATAAAGAAAAATTCAAAAAC |
| | CCCTTCTATACTAAAGAAATCAATCGAGTTTTATATCCAGTTGCCAGTAT |
| | GCGTCACTTGGAACTCTGGGTGAATTACTACATTAGATGGAACCCCAGGA |
| | TCAAGCAACAACAGCCGAATCCAGTGGAGCAGCGTTACATGGAGCTCTTA |
| | GCCTTACGCGACGAATACATAAAGCGGCTTGAGGAACTGCAGCTCGCCAA |
| | CTCTGCCAAGCTTTCTGATCCCCCAACTTCACCTTCCAGTCCTTCGCAAA |
| | TGATGCCCCATGTGCAAACTCACTTTTAATTAAGATC |
| SEQ ID | TTGGCCACTCCCTCTCTGCGCGCTCGCTCGCTCACTGAGGCCGCCCGGGC |
| NO: | AAAGCCCGGGCGTCGGGCGACCTTTGGTCGCCCGGCCTCAGTGAGCGAGC |
| 204 | GAGCGCGCAGAGAGGGAGTGGCCAACTCCATCACTAGGGGTTCCTTGCGC |
| (E20A) | ACAGGTACCCCCCTGCCCCCACAGCTCCTCTCCTGTGCCTTGTTTCCCAG |
| | CCATGCGTTCTCCTCTATAAATACCCGCTCTGGTATTTGGGGTTGGCAGC |
| | TGTTGCTGCCAGGGAGATGGTTGGGTTGACATGCGGCTCCTGACAAAACA |
| | CAAACCCCTGGTGTGTGTGGGCGTGGGTGGTGTGAGTAGGGGGATGAATC |
| | AGGGAGGGGGCGGGGGACCCAGGGGGCAGGAGCCACACAAAGTCTGTGCG |
| | GGGGTGGGAGCGCACATAGCAATTGGAAACTGGCTGCAGACATGCTTGCT |
| | GCCTGCCCTGGCGAAGGATTGGTAGGCTTGCCGTCACAGGACCCCCGCTG |
| | GCTGACTCAGGGGCGCAGGCTCTTGCGGGGGAGCTGGCCTCCCGCCCCCA |
| | CGGCCACGGGCCCTTTCCTGGCAGGACAGCGGGATCTTGCAGCTGTCAGG |
| | GGAGGGGAGGCGGGGGCTGATGTCAGGAGGGATACAAATAGTGCCGACGG |
| | CTGGGGGCCCTGTCTCCCCTCGCCGCATCCACTCTCCGGCCGGCCGCCTG |
| | CCCGCCGCCTCCTCCGTGCGCCCGCCAGCCTCGCCCGCGCCGTCACCGAT |
| | ATCTCAGATCGCCTGGAGACGCCATCCACGCTGTTTTGACCTCCATAGAA |
| | GACACCGGGACCGATCCAGCCTCCGCGGATTCGAATCCCGGCCGGGAACG |
| | GTGCATTGGAACGCGGATTCCCCGTGCCAAGAGTGACGTAAGTACCGCCT |
| | ATAGAGTCTATAGGCCCACAAAAAATGCTTTCTTCTTTTAATATACTTTT |
| | TTGTTTATCTTATTTCTAATACTTTCCCTAATCTCTTTCTTTCAGGGCAA |
| | TAATGATACAATGTATCATGCCTCTTTGCACCATTCTAAAGAATAACAGT |
| | GATAATTTCTGGGTTAAGGCAATAGCAATATTTCTGCATATAAATATTTC |
| | TGCATATAAATTGTAACTGATGTAAGAGGTTTCATATTGCTAATAGCAGC |
| | TACAATCCAGCTACCATTCTGCTTTTATTTTATGGTTGGGATAAGGCTGG |
| | ATTATTCTGAGTCCAAGCTAGGCCCTTTTGCTAATCATGTTCATACCTCT |
| | TATCTTCCTCCCACAGCTCCTGGGCAACGTGCTGGTCTGTGTGCTGGCCC |
| | ATCACTTTGGCAAAGAATTGGATCCGCCGCCACC |
| SEQ ID | TAAGTCGACGTAAGTTTTTAAATGTATAAATTGTCTTATTTATAAATTGG |
| NO: | TCTAAAATATATGTAATTGTCTTAAGATCTTTTTCCCTCTGCCAAAAATT |
| 205 | ATGGGGACATCATGAAGCCCCTTGAGCATCTGACTTCTGGCTAATAAAGG |
| (E20B) | AAATTTATTTTCATTGCAATAGTGTGTTGGAATTTTTTGTGTCTCTCACT |
| | CGAGGCCTAGGAACCCCTAGTGATGGAGTTGGCCACTCCCTCTCTGCGCG |
| | CTCGCTCGCTCACTGAGGCCGGGCGACCAAAGGTCGCCCGACGCCCGGGC |
| | TTTGCCCGGGCGGCCTCAGTGAGCGAGCGAGCGCGCAGAGAGGGAGTGGC |
| | CAA |
| SEQ ID | TTGGCCACTCCCTCTCTGCGCGCTCGCTCGCTCACTGAGGCCGCCCGGGC |
| NO: | AAAGCCCGGGCGTCGGGCGACCTTTGGTCGCCCGGCCTCAGTGAGCGAGC |
| 206 | GAGCGCGCAGAGAGGGAGTGGCCAACTCCATCACTAGGGGTTCCTTTGTC |
| (E21A) | GACTCGGTTCGCATATTAAGGTGACGCGTGTGGCCTCGAACACCGAGCGA |
| | CCCTGCAGCGACCCGCTTAA |
| SEQ ID | AATAAAGGAAATTTATTTTCATTGCAATAGTGTGTTGGAATTTTTTGTGT |
| NO: | CTCTCAGAGTCCTAGGCCACTCCCTCTCTGCGCGCTCGCTCGCTCACTGA |
| 207 | GGCCGGGCGACCAAAGGTCGCCCGACGCCCGGGCTTTGCCCGGGCGGCCT |
| (E21B) | CAGTGAGCGAGCGAGCGCGCAGAGAGGGAGTGGCCAA |
| SEQ ID | TTGGCCACTCCCTCTCTGCGCGCTCGCTCGCTCACTGAGGCCGCCCGGGC |
| NO: | AAAGCCCGGGCGTCGGGCGACCTTTGGTCGCCCGGCCTCAGTGAGCGAGC |
| 208 | GAGCGCGCAGAGAGGGAGTGGCCAACTCCATCACTAGGGGTTCCTTTGTC |
| (E22) | GACTTCGCATATTAAGGTGACGCGTGTGGCCTCGAACACCGAGCGACCCT |
| | GCAGCGACCCGCTTAAGCGGCCGCCACCATGGCTTCTGCATCAACTTCTA |
| | AATATAATTCACACTCCTTGGAGAATGAGTCTATTAAGAGGACGTCTCGA |
| | GATGGAGTCAATCGAGATCTCACTGAGGCTGTTCCTCGACTTCCAGGAGA |
| | AACACTAATCACTGACAAAGAAGTTATTTACATATGTCCTTTCAATGGCC |
| | CCATTAAGGGAAGAGTTTACATCACAAATTATCGTCTTTATTTAAGAAGT |
| | TTGGAAACGGATTCTTCTCTAATACTTGATGTTCCTCTGGGTGTGATCTC |
| | GAGAATTGAAAAAATGGGAGGCGCGACAAGTAGAGGAGAAAATTCCTATG |
| | GTCTAGATATTACTTGTAAAGACATGAGAAACCTGAGGTTCGCTTTGAAA |
| | CAGGAAGGCCACAGCAGAAGAGATATGTTTGAGATCCTCACGAGATACGC |
| | GTTTCCCCTGGCTCACAGTCTGCCATTATTTGCATTTTTAAATGAAGAAA |
| | AGTTTAACGTGGATGGATGGACAGTTTACAATCCAGTGGAAGAATACAGG |
| | AGGCAGGGCTTGCCCAATCACCATTGGAGAATAACTTTTATTAATAAGTG |
| | CTATGAGCTCTGTGACACTTACCCTGCTCTTTTGGTGGTTCCGTATCGTG |
| | CCTCAGATGATGACCTCCGGAGAGTTGCAACTTTTAGGTCCCGAAATCGA |
| | ATTCCAGTGCTGTCATGGATTCATCCAGAAAATAAGACGGTCATTGTGCG |
| | TTGCAGTCAGCCTCTTGTCGGTATGAGTGGGAAACGAAATAAAGATGATG |
| | AGAAATATCTCGATGTTATCAGGGAGACTAATAAACAAATTTCTAAACTC |
| | ACCATTTATGATGCAAGACCCAGCGTAAATGCAGTGGCCAACAAGGCAAC |
| | AGGAGGAGGATATGAAAGTGATGATGCATATCATAACGCCGAACTTTTCT |
| | TCTTAGACATTCATAATATTCATGTTATGCGGGAATCTTTAAAAAAAGTG |
| | AAGGACATTGTTTATCCTAATGTAGAAGAATCTCATTGGTTGTCCAGTTT |
| | GGAGTCTACTCATTGGTTAGAACATATCAAGCTCGTTTTGACAGGAGCCA |
| | TTCAAGTAGCAGACAAAGTTTCTTCAGGGAAGAGTTCAGTGCTTGTGCAT |
| | TGCAGTGACGGATGGGACAGGACTGCTCAGCTGACATCCTTGGCCATGCT |
| | GATGTTGGATAGCTTCTATAGGAGCATTGAAGGGTTCGAAATACTGGTAC |
| | AAAAAGAATGGATAAGTTTTGGACATAAATTTGCATCTCGAATAGGTCAT |
| | GGTGATAAAAACCACACCGATGCTGACCGTTCTCCTATTTTTCTCCAGTT |
| | TATTGATTGTGTGTGGCAAATGTCAAAACAGTTCCCTACAGCTTTTGAAT |
| | TCAATGAACAATTTTTGATTATAATTTTGGATCATCTGTATAGTTGCCGA |
| | TTTGGTACTTTCTTATTCAACTGTGAATCTGCTCGAGAAAGACAGAAGGT |
| | TACAGAAAGGACTGTTTCTTTATGGTCACTGATAAACAGTAATAAAGAAA |
| | AATTCAAAAACCCCTTCTATACTAAAGAAATCAATCGAGTTTTATATCCA |
| | GTTGCCAGTATGCGTCACTTGGAACTCTGGGTGAATTACTACATTAGATG |
| | GAACCCCAGGATCAAGCAACAACAGCCGAATCCAGTGGAGCAGCGTTACA |
| | TGGAGCTCTTAGCCTTACGCGACGAATACATAAAGCGGCTTGAGGAACTG |
| | CAGCTCGCCAACTCTGCCAAGCTTTCTGATCCCCCAACTTCACCTTCCAG |
| | TCCTTCGCAAATGATGCCCCATGTGCAAACTCACTTTTAATTAAGATCTT |
| | TTTCCCTCTGCCAAAAATTATGGGGACATCATGAAGCCCCTTGAGCATCT |
| | GACTTCTGGCTAATAAAGGAAATTTATTTTCATTGCAATAGTGTGTTGGA |
| | ATTTTTTGTGTCTCTCACTCCCTAGGCCACTCCCTCTCTGCGCGCTCGCT |
| | CGCTCACTGAGGCCGGGCGACCAAAGGTCGCCCGACGCCCGGGCTTTGCC |
| | CGGGCGGCCTCAGTGAGCGAGCGAGCGCGCAGAGAGGGAGTGGCCAA |
| SEQ ID | ttttGGTACCgacattgattattgactagttatt |
| NO: | |
| 209 | |
| SEQ ID | aaaaaa gatatc cgcocgocgogc |
| NO: | |
| 210 | |
| SEQ ID | TttttGtcGACTTCGCATATTAAGGTGACGCGT |
| NO: | |
| 211 | |
| SEQ ID | tttttt cctagg gagTGAGAGACACAAAAAATTCCAACACAC |
| NO: | |
| 212 | |
| SEQ ID | tttttGtcGACCCTCTATAAATACCCGCTCTGG |
| NO: | |
| 213 | |
| SEQ ID | tttttt cctagg gagTGAGAGACACAAAAAATTCCAACACAC |
| NO: | |
| 214 | |
| Anc80- | MAADGYLPDWLEDNLSEGIREWWDLKPGAPKPKANQQKQDDGRGLVLPGY |
| 55 | KYLGPFNGLDKGEPVNAADAAALEHDKAYDQQLKAGDNPYLRYNHADAEF |
| SEQ ID | QERLQEDTSFGGNLGRAVFQAKKRVLEPLGLVEEGAKTAPGKKRPVEQSP |
| NO: | QEPDSSSGIGKKGQQPAKKRLNFGQTGDSESVPDPQPLGEPPAAPSGVGS |
| 44885 | NTMAAGGGAPMADNNEGADGVGNASGNWHCDSTWLGDRVITTSTRTWALP |
| | TYNNHLYKQISSQSGASTNDNTYFGYSTPWGYFDFNRFHCHFSPRDWQRL |
| | INNNWGFRPKKLNFKLFNIQVKEVTINDGTTTIANNLTSTVQVFTDSEYQ |
| | LPYVLGSAHQGCLPPFPADVFMIPQYGYLTLNNGSQAVGRSSFYCLEYFP |
| | SQMLRTGNNFQFSYTFEDVPFHSSYAHSQSLDRLMNPLIDQYLYYLSRTQ |
| | TTSGTAGNRELQFSQAGPSSMANQAKNWLPGPCYRQQRVSKTANQNNNSN |
| | FAWTGATKYHLNGRDSLVNPGPAMATHKDDEDKFFPMSGVLIFGKQGAGN |
| | SNVDLDNVMITNEEEIKTTNPVATEEYGTVATNLQSSNTAPATGTVNSQG |
| | ALPGMVWQDRDVYLQGPIWAKIPHTDGHFHPSPLMGGFGLKHPPPQILIK |
| | NTPVPANPPTTFSPAKFASFITQYSTGQVSVEIEWELQKENSKRWNPEIQ |
| | YTSNYNKSTNVDFAVDINGVYSEPRPIGTRYLTRNL |
| Anc80- | MAADGYLPDWLEDNLSEGIREWWDLKPGAPKPKANQQKQDDGRGLVLPGY |
| 55 - | KYLGPFNGLDKGEPVNAADAAALEHDKAYDQQLKAGDNPYLRYNHADAEF |
| decol | QERLQEDTSFGGNLGRAVFQAKKRVLEPLGLVEEGAKTAPGKKRPVEQSP |
| SEQ ID | QEPDSSSGIGKKGQQPAKKRLNFGQTGDSESVPDPQPLGEPPAAPSGVGS |
| NO: | NTMAAGGGAPMADNNEGADGVGNASGNWHCDSTWLGDRVITTSTRTWALP |
| 44886 | TYNNHLYKQISSQSGASTNDNTYFGYSTPWGYFDFNRFHCHFSPRDWQRL |
| | INNNWGFRPKKLNFKLFNIQVKEVTINDGTTTIANNLTSTVQVFTDSEYQ |
| | LPYVLGSAHQGCLPPFPADVFMIPQYGYLTLNNGSQAVGRSSFYCLEYFP |
| | SQMLRTGNNFQFSYTFEDVPFHSSYAHSQSLDRLMNPLIDQYLYYLSRTQ |
| | TTSGTAGNRELQFSQAGPSSMANQAKNWLPGPCYRQQRVSKTANQNNNSN |
| | FAWTGATKYHLNGRDSLVNPGPAMATHKDDEDKFFPMSGVLIFGKQGAGN |
| | SNVDLDNVMITNEEEIKTINPVATEEYGTVATNLQSSNRGDLLLSTAPAT |
| | GTVNSQGALPGMVWQDRDVYLQGPIWAKIPHTDGHFHPSPLMGGFGLKHP |
| | PPQILIKNTPVPANPPTTFSPAKFASFITQYSTGQVSVEIEWELQKENSK |
| | RWNPEIQYTSNYNKSTNVDFAVDINGVYSEPRPIGTRYLTRNL |
| Anc80 | MAADGYLPDWLEDNLSEGIREWWDLKPGAPKPKANQQKQDDGRGLVLPGY |
| 129 | KYLGPFNGLDKGEPVNAADAAALEHDKAYDQQLKAGDNPYLRYNHADAEF |
| SEQ ID | QERLQEDTSFGGNLGRAVFQAKKRVLEPLGLVEEGAKTAPGKKRPVEQSP |
| NO: | QEPDSSSGIGKKGQQPAKKRLNFGQTGDSESVPDPQPLGEPPAAPSGVGS |
| 44887 | NTMAAGGGAPMADNNEGADGVGNASGNWHCDSTWLGDRVITTSTRTWALP |
| | TYNNHLYKQISSQSGASTNDNTYFGYSTPWGYFDFNRFHCHFSPRDWQRL |
| | INNNWGFRPKRLNFKLFNIQVKEVTINDGTTTIANNLTSTVQVFTDSEYQ |
| | LPYVLGSAHQGCLPPFPADVFMIPQYGYLTLNNGSQAVGRSSFYCLEYFP |
| | SQMLRTGNNFQFSYTFEDVPFHSSYAHSQSLDRLMNPLIDQYLYYLSRTQ |
| | TTSGTAGNRTLQFSQAGPSSMANQAKNWLPGPCYRQQRVSKTTNQNNNSN |
| | FAWTGATKYHLNGRDSLVNPGPAMATHKDDEDKFFPMSGVLIFGKQGAGN |
| | SNVDLDNVMITNEEEIKTTNPVATEQYGTVATNLQSANTAPATGTVNSQG |
| | ALPGMVWQDRDVYLQGPIWAKIPHTDGHFHPSPLMGGFGLKHPPPQILIK |
| | NTPVPANPPTTFSPAKFASFITQYSTGQVSVEIEWELQKENSKRWNPEIQ |
| | YTSNYNKSTNVDFAVDINGVYSEPRPIGTRYLTRNL |
| Anc80- | MAADGYLPDWLEDNLSEGIREWWDLKPGAPKPKANQQKQDDGRGLVLPGY |
| 129- | KYLGPFNGLDKGEPVNAADAAALEHDKAYDQQLKAGDNPYLRYNHADAEF |
| decol | QERLQEDTSFGGNLGRAVFQAKKRVLEPLGLVEEGAKTAPGKKRPVEQSP |
| SEQ ID | QEPDSSSGIGKKGQQPAKKRLNFGQTGDSESVPDPQPLGEPPAAPSGVGS |
| NQ | NTMAAGGGAPMADNNEGADGVGNASGNWHCDSTWLGDRVITTSTRTWALP |
| 44888 | TYNNHLYKQISSQSGASTNDNTYFGYSTPWGYFDFNRFHCHFSPRDWQRL |
| | INNNWGFRPKRLNFKLFNIQVKEVTINDGTTTIANNLTSTVQVFTDSEYQ |
| | LPYVLGSAHQGCLPPFPADVFMIPQYGYLTLNNGSQAVGRSSFYCLEYFP |
| | SQMLRTGNNFQFSYTFEDVPFHSSYAHSQSLDRLMNPLIDQYLYYLSRTQ |
| | TTSGTAGNRTLQFSQAGPSSMANQAKNWLPGPCYRQQRVSKTTNQNNNSN |
| | FAWTGATKYHLNGRDSLVNPGPAMATHKDDEDKFFPMSGVLIFGKQGAGN |
| | SNVDLDNVMITNEEEIKTINPVATEQYGTVATNLQSANRGDLLLSTAPAT |
| | GTVNSQGALPGMVWQDRDVYLQGPIWAKIPHTDGHFHPSPLMGGFGLKHP |
| | PPQILIKNTPVPANPPTTFSPAKFASFITQYSTGQVSVEIEWELQKENSK |
| | RWNPEIQYTSNYNKSTNVDFAVDINGVYSEPRPIGTRYLTRNL |
| Anc80- | MAADGYLPDWLEDNLSEGIREWWDLKPGAPKPKANQQKQDDGRGLVLPGY |
| 156 | KYLGPFNGLDKGEPVNAADAAALEHDKAYDQQLKAGDNPYLRYNHADAEF |
| SEQ ID | QERLQEDTSFGGNLGRAVFQAKKRVLEPLGLVEEGAKTAPGKKRPVEQSP |
| NO: | QEPDSSSGIGKKGQQPAKKRLNFGQTGDSESVPDPQPLGEPPAAPSGVGS |
| 44889 | NTMAAGGGAPMADNNEGADGVGNASGNWHCDSTWLGDRVITTSTRTWALP |
| | TYNNHLYKQISSQSGASTNDNTYFGYSTPWGYFDFNRFHCHFSPRDWQRL |
| | INNNWGFRPKRLNFKLFNIQVKEVTINDGTTTIANNLTSTVQVFTDSEYQ |
| | LPYVLGSAHQGCLPPFPADVFMIPQYGYLTLNNGSQAVGRSSFYCLEYFP |
| | SQMLRTGNNFQFSYTFEDVPFHSSYAHSQSLDRLMNPLIDQYLYYLSRTQ |
| | TTSGTAGNRTLQFSQAGPSSMANQAKNWLPGPCYRQQRVSKTANQNNNSN |
| | FAWTGATKYHLNGRDSLVNPGPAMATHKDDEDKFFPMSGVLIFGKQGAGN |
| | SNVDLDNVMITSEEEIKTTNPVATEEYGTVATNLQSANTAPATGTVNSQG |
| | ALPGMVWQNRDVYLQGPIWAKIPHTDGHFHPSPLMGGFGLKHPPPQILIK |
| | NTPVPANPPTTFSPAKFASFITQYSTGQVSVEIEWELQKENSKRWNPEIQ |
| | YTSNYNKSTNVDFAVDINGVYSEPRPIGTRYLTRNL |
| Anc80- | MAADGYLPDWLEDNLSEGIREWWDLKPGAPKPKANQQKQDDGRGLVLPGY |
| 156- | KYLGPFNGLDKGEPVNAADAAALEHDKAYDQQLKAGDNPYLRYNHADAEF |
| Decol | QERLQEDTSFGGNLGRAVFQAKKRVLEPLGLVEEGAKTAPGKKRPVEQSP |
| SEQ ID | QEPDSSSGIGKKGQQPAKKRLNFGQTGDSESVPDPQPLGEPPAAPSGVGS |
| NO: | NTMAAGGGAPMADNNEGADGVGNASGNWHCDSTWLGDRVITTSTRTWALP |
| 44890 | TYNNHLYKQISSQSGASTNDNTYFGYSTPWGYFDFNRFHCHFSPRDWQRL |
| | INNNWGFRPKRLNFKLFNIQVKEVTINDGTTTIANNLTSTVQVFTDSEYQ |
| | LPYVLGSAHQGCLPPFPADVFMIPQYGYLTLNNGSQAVGRSSFYCLEYFP |
| | SQMLRTGNNFQFSYTFEDVPFHSSYAHSQSLDRLMNPLIDQYLYYLSRTQ |
| | TTSGTAGNRTLQFSQAGPSSMANQAKNWLPGPCYRQQRVSKTANQNNNSN |
| | FAWTGATKYHLNGRDSLVNPGPAMATHKDDEDKFFPMSGVLIFGKQGAGN |
| | SNVDLDNVMITSEEEIKTTNPVATEEYGTVATNLQSANRGDLLLSTAPAT |
| | GTVNSQGALPGMVWQNRDVYLQGPIWAKIPHTDGHFHPSPLMGGFGLKHP |
| | PPQILIKNTPVPANPPTTFSPAKFASFITQYSTGQVSVEIEWELQKENSK |
| | RWNPEIQYTSNYNKSTNVDFAVDINGVYSEPRPIGTRYLTRNL |
| Anc80- | MAADGYLPDWLEDNLSEGIREWWDLKPGAPKPKANQQKQDDGRGLVLPGY |
| 751- | KYLGPFNGLDKGEPVNAADAAALEHDKAYDQQLKAGDNPYLRYNHADAEF |
| decol | QERLQEDTSFGGNLGRAVFQAKKRVLEPLGLVEEGAKTAPGKKRPVEQSP |
| SEQ ID | QEPDSSSGIGKKGQQPAKKRLNFGQTGDSESVPDPQPLGEPPAAPSGVGS |
| NO: | NTMASGGGAPMADNNEGADGVGNASGNWHCDSTWLGDRVITTSTRTWALP |
| 44891 | TYNNHLYKQISSQSGASTNDNTYFGYSTPWGYFDFNRFHCHFSPRDWQRL |
| | INNNWGFRPKRLNFKLFNIQVKEVTINDGTTTIANNLTSTVQVFTDSEYQ |
| | LPYVLGSAHQGCLPPFPADVFMIPQYGYLTLNNGSQAVGRSSFYCLEYFP |
| | SQMLRTGNNFEFSYTFEDVPFHSSYAHSQSLDRLMNPLIDQYLYYLSRTQ |
| | TTSGTAGNRELQFSQAGPSSMANQAKNWLPGPCYRQQRVSKTTNQNNNSN |
| | FAWTGATKYHLNGRDSLVNPGPAMATHKDDEDKFFPMSGVLIFGKQGAGN |
| | SNVDLDNVMITSEEEIKTTNPVATEEYGTVATNLQSSNRGDLLLSTAPAT |
| | GTVNSQGALPGMVWQDRDVYLQGPIWAKIPHTDGHFHPSPLMGGFGLKHP |
| | PPQILIKNTPVPANPPTTFSPAKFASFITQYSTGQVSVEIEWELQKENSK |
| | RWNPEIQYTSNYNKSTNVDFAVDINGVYSEPRPIGTRYLTRNL |
| Anc80~ | MAADGYLPDWLEDNLSEGIREWWDLKPGAPKPKANQQKQDDGRGLVLPGY |
| 751 | KYLGPFNGLDKGEPVNAADAAALEHDKAYDQQLKAGDNPYLRYNHADAEF |
| SEQ ID | QERLQEDTSFGGNLGRAVFQAKKRVLEPLGLVEEGAKTAPGKKRPVEQSP |
| NO: | QEPDSSSGIGKKGQQPAKKRLNFGQTGDSESVPDPQPLGEPPAAPSGVGS |
| 44916 | NTMASGGGAPMADNNEGADGVGNASGNWHCDSTWLGDRVITTSTRTWALP |
| | TYNNHLYKQISSQSGASTNDNTYFGYSTPWGYFDFNRFHCHFSPRDWQRL |
| | INNNWGFRPKRLNFKLFNIQVKEVTINDGTTTIANNLTSTVQVFTDSEYQ |
| | LPYVLGSAHQGCLPPFPADVFMIPQYGYLTLNNGSQAVGRSSFYCLEYFP |
| | SQMLRTGNNFEFSYTFEDVPFHSSYAHSQSLDRLMNPLIDQYLYYLSRTQ |
| | TTSGTAGNRELQFSQAGPSSMANQAKNWLPGPCYRQQRVSKTTNQNNNSN |
| | FAWTGATKYHLNGRDSLVNPGPAMATHKDDEDKFFPMSGVLIFGKQGAGN |
| | SNVDLDNVMITSEEEIKTTNPVATEEYGTVATNLQSSNTAPATGTVNSQG |
| | ALPGMVWQDRDVYLQGPIWAKIPHTDGHFHPSPLMGGFGLKHPPPQILIK |
| | NTPVPANPPTTFSPAKFASFITQYSTGQVSVEIEWELQKENSKRWNPEIQ |
| | YTSNYNKSTNVDFAVDINGVYSEPRPIGTRYLTRNL |
| Anc80- | MAADGYLPDWLEDNLSEGIREWWDLKPGAPKPKANQQKQDDGRGLVLPGY |
| 1029- | KYLGPFNGLDKGEPVNAADAAALEHDKAYDQQLKAGDNPYLRYNHADAEF |
| decol | QERLQEDTSFGGNLGRAVFQAKKRVLEPLGLVEEGAKTAPGKKRPVEQSP |
| SEQ ID | QEPDSSSGIGKKGQQPARKRLNFGQTGDSESVPDPQPLGEPPAAPSGVGS |
| NO: | NTMAAGGGAPMADNNEGADGVGNASGNWHCDSTWLGDRVITTSTRTWALP |
| 44892 | TYNNHLYKQISSQSGASTNDNTYFGYSTPWGYFDFNRFHCHFSPRDWQRL |
| | INNNWGFRPKKLNFKLFNIQVKEVTINDGTTTIANNLTSTVQVFTDSEYQ |
| | LPYVLGSAHQGCLPPFPADVFMIPQYGYLTLNNGSQAVGRSSFYCLEYFP |
| | SQMLRTGNNFQFSYTFEDVPFHSSYAHSQSLDRLMNPLIDQYLYYLSRTQ |
| | TTSGTAGNRTLQFSQAGPSSMANQAKNWLPGPCYRQQRVSKTTNQNNNSN |
| | FAWTGATKYHLNGRDSLVNPGPAMATHKDDEDKFFPMSGVLIFGKQGAGN |
| | SNVDLDNVMITNEEEIKTTNPVATEEYGTVATNLQSANRGDLLLSTAPAT |
| | GTVNSQGALPGMVWQDRDVYLQGPIWAKIPHTDGHFHPSPLMGGFGLKHP |
| | PPQILIKNTPVPANPPTTFSPAKFASFITQYSTGQVSVEIEWELQKENSK |
| | RWNPEIQYTSNYNKSTNVDFAVDINGVYSEPRPIGTRYLTRNL |
| Anc80- | MAADGYLPDWLEDNLSEGIREWWDLKPGAPKPKANQQKQDDGRGLVLPGY |
| 1029 | KYLGPFNGLDKGEPVNAADAAALEHDKAYDQQLKAGDNPYLRYNHADAEF |
| SEQ ID | QERLQEDTSFGGNLGRAVFQAKKRVLEPLGLVEEGAKTAPGKKRPVEQSP |
| NQ | QEPDSSSGIGKKGQQPARKRLNFGQTGDSESVPDPQPLGEPPAAPSGVGS |
| 44917 | NTMAAGGGAPMADNNEGADGVGNASGNWHCDSTWLGDRVITTSTRTWALP |
| | TYNNHLYKQISSQSGASTNDNTYFGYSTPWGYFDFNRFHCHFSPRDWQRL |
| | INNNWGFRPKKLNFKLFNIQVKEVTTNDGTTTIANNLTSTVQVFTDSEYQ |
| | LPYVLGSAHQGCLPPFPADVFMIPQYGYLTLNNGSQAVGRSSFYCLEYFP |
| | SQMLRTGNNFQFSYTFEDVPFHSSYAHSQSLDRLMNPLIDQYLYYLSRTQ |
| | TTSGTAGNRTLQFSQAGPSSMANQAKNWLPGPCYRQQRVSKTTNQNNNSN |
| | FAWTGATKYHLNGRDSLVNPGPAMATHKDDEDKFFPMSGVLIFGKQGAGN |
| | SNVDLDNVMITNEEEIKTINPVATEEYGTVATNLQSANTAPATGTVNSQG |
| | ALPGMVWQDRDVYLQGPIWAKIPHTDGHFHPSPLMGGFGLKHPPPQILIK |
| | NTPVPANPPTTFSPAKFASFITQYSTGQVSVEIEWELQKENSKRWNPEIQ |
| | YTSNYNKSTNVDFAVDINGVYSEPRPIGTRYLTRNL |
| Anc80- | MAADGYLPDWLEDNLSEGIREWWDLKPGAPKPKANQQKQDDGRGLVLPGY |
| 1712 | KYLGPFNGLDKGEPVNAADAAALEHDKAYDQQLKAGDNPYLRYNHADAEF |
| SEQ ID | QERLQEDTSFGGNLGRAVFQAKKRVLEPLGLVEEGAKTAPGKKRPVEQSP |
| NO: | QEPDSSSGIGKKGQQPARKRLNFGQTGDSESVPDPQPLGEPPAAPSGVGS |
| 44893 | NTMASGGGAPMADNNEGADGVGNASGNWHCDSTWLGDRVITTSTRTWALP |
| | TYNNHLYKQISSQSGASTNDNTYFGYSTPWGYFDFNRFHCHFSPRDWQRL |
| | INNNWGFRPKRLNFKLFNIQVKEVTINDGTTTIANNLTSTVQVFTDSEYQ |
| | LPYVLGSAHQGCLPPFPADVFMIPQYGYLTLNNGSQAVGRSSFYCLEYFP |
| | SQMLRTGNNFQFSYTFEDVPFHSSYAHSQSLDRLMNPLIDQYLYYLSRTQ |
| | TTSGTAGNRELQFSQAGPSSMANQAKNWLPGPCYRQQRVSKTANQNNNSN |
| | FAWTGATKYHLNGRDSLVNPGPAMATHKDDEDKFFPMSGVLIFGKQGAGN |
| | SNVDLDNVMITNEEEIKTTNPVATEQYGTVATNLQSANTAPATGTVNSQG |
| | ALPGMVWQNRDVYLQGPIWAKIPHTDGHFHPSPLMGGFGLKHPPPQILIK |
| | NTPVPANPPTTFSPAKFASFITQYSTGQVSVEIEWELQKENSKRWNPEIQ |
| | YTSNYNKSTNVDFAVDINGVYSEPRPIGTRYLTRNL |
| Anc80- | MAADGYLPDWLEDNLSEGIREWWDLKPGAPKPKANQQKQDDGRGLVLPGY |
| 1712- | KYLGPFNGLDKGEPVNAADAAALEHDKAYDQQLKAGDNPYLRYNHADAEF |
| decol | QERLQEDTSFGGNLGRAVFQAKKRVLEPLGLVEEGAKTAPGKKRPVEQSP |
| SEQ ID | QEPDSSSGIGKKGQQPARKRLNFGQTGDSESVPDPQPLGEPPAAPSGVGS |
| NQ | NTMASGGGAPMADNNEGADGVGNASGNWHCDSTWLGDRVITTSTRTWALP |
| 44894 | TYNNHLYKQISSQSGASTNDNTYFGYSTPWGYFDFNRFHCHFSPRDWQRL |
| | INNNWGFRPKRLNFKLFNIQVKEVTINDGTTTIANNLTSTVQVFTDSEYQ |
| | LPYVLGSAHQGCLPPFPADVFMIPQYGYLTLNNGSQAVGRSSFYCLEYFP |
| | SQMLRTGNNFQFSYTFEDVPFHSSYAHSQSLDRLMNPLIDQYLYYLSRTQ |
| | TTSGTAGNRELQFSQAGPSSMANQAKNWLPGPCYRQQRVSKTANQNNNSN |
| | FAWTGATKYHLNGRDSLVNPGPAMATHKDDEDKFFPMSGVLIFGKQGAGN |
| | SNVDLDNVMITNEEEIKTTNPVATEQYGTVATNLQSANRGDLLLSTAPAT |
| | GTVNSQGALPGMVWQNRDVYLQGPIWAKIPHTDGHFHPSPLMGGFGLKHP |
| | PPQILIKNTPVPANPPTTFSPAKFASFITQYSTGQVSVEIEWELQKENSK |
| | RWNPEIQYTSNYNKSTNVDFAVDINGVYSEPRPIGTRYLTRNL |
| Anc80 | MAADGYLPDWLEDNLSEGIREWWDLKPGAPKPKANQQKQDDGRGLVLPGY |
| L65 | KYLGPFNGLDKGEPVNAADAAALEHDKAYDQQLKAGDNPYLRYNHADAEF |
| SEQ ID | QERLQEDTSFGGNLGRAVFQAKKRVLEPLGLVEEGAKTAPGKKRPVEQSP |
| NO: | QEPDSSSGIGKKGQQPARKRLNFGQTGDSESVPDPQPLGEPPAAPSGVGS |
| 44895 | NTMAAGGGAPMADNNEGADGVGNASGNWHCDSTWLGDRVITTSTRTWALP |
| | TYNNHLYKQISSQSGGSTNDNTYFGYSTPWGYFDFNRFHCHFSPRDWQRL |
| | INNNWGFRPKKLNFKLFNIQVKEVTTNDGTTTIANNLTSTVQVFTDSEYQ |
| | LPYVLGSAHQGCLPPFPADVFMIPQYGYLTLNNGSQAVGRSSFYCLEYFP |
| | SQMLRTGNNFQFSYTFEDVPFHSSYAHSQSLDRLMNPLIDQYLYYLSRTQ |
| | TTSGTAGNRTLQFSQAGPSSMANQAKNWLPGPCYRQQRVSKTTNQNNNSN |
| | FAWTGATKYHLNGRDSLVNPGPAMATHKDDEDKFFPMSGVLIFGKQGAGN |
| | SNVDLDNVMITNEEEIKTINPVATEEYGTVATNLQSANTAPATGTVNSQG |
| | ALPGMVWQDRDVYLQGPIWAKIPHTDGHFHPSPLMGGFGLKHPPPQILIK |
| | NTPVPANPPTTFSPAKFASFITQYSTGQVSVEIEWELQKENSKRWNPEIQ |
| | YTSNYNKSTNVDFAVDINGVYSEPRPIGTRYLTRNL |
| Anc80 | MAADGYLPDWLEDNLSEGIREWWDLKPGAPKPKANQQKQDDGRGLVLPGY |
| L65 | KYLGPFNGLDKGEPVNAADAAALEHDKAYDQQLKAGDNPYLRYNHADAEF |
| liver | QERLQEDTSFGGNLGRAVFQAKKRVLEPLGLVEEGAKTAPGKKRPVEQSP |
| off | QEPDSSSGIGKKGQQPARKRLNFGQTGDSESVPDPQPLGEPPAAPSGVGS |
| SEQ ID | NTMAAGGGAPMADNNEGADGVGNASGNWHCDSTWLGDRVITTSTRTWALP |
| NO: | TYNNHLYKQISSQSGATTNDNTYFGYSTPWGYFDFNRFHCHFSPRDWQRL |
| 44896 | INNNWGFRPKKLNFKLFNIQVKEVTINDGTTTIANNLTSTVQVFTDSEYQ |
| | LPYVLGSAHQGCLPPFPADVFMIPQYGYLTLNNGSQAVGRSSFYCLEYFP |
| | SQMLRTGNNFQFSYTFEDVPFHSSYAHSQSLDRLMNPLIDQYLYYLSRTQ |
| | TTSGTAGNRTLQFSQAGPSSMANQAKNWLPGPCYRQQRVSKTTNQNNNSN |
| | FAWTGATKYHLNGRDSLVNPGPAMATHKDDEDKFFPMSGVLIFGKQGAGN |
| | SNVDLDNVMITNEEEIKTINPVATEEYGTVATNLQSANTAPATGTVNSQG |
| | ALPGMVWQDRDVYLQGPIWAKIPHTDGHFHPSPLMGGFGLKHPPPQILIK |
| | NTPVPANPPTTFSPAKFASFITQYSTGQVSVEIEWELQKENSKRWNPEIQ |
| | YTSNYNKSTNVDFAVDINGVYSEPRPIGTRYLTRNL |
| Anc80 | MAADGYLPDWLEDNLSEGIREWWDLKPGAPKPKANQQKQDDGRGLVLPGY |
| L65 | KYLGPFNGLDKGEPVNAADAAALEHDKAYDQQLKAGDNPYLRYNHADAEF |
| Deco1 | QERLQEDTSFGGNLGRAVFQAKKRVLEPLGLVEEGAKTAPGKKRPVEQSP |
| SEQ ID | QEPDSSSGIGKKGQQPARKRLNFGQTGDSESVPDPQPLGEPPAAPSGVGS |
| NO: | NTMAAGGGAPMADNNEGADGVGNASGNWHCDSTWLGDRVITTSTRTWALP |
| 44897 | TYNNHLYKQISSQSGGSTNDNTYFGYSTPWGYFDFNRFHCHFSPRDWQRL |
| | INNNWGFRPKKLNFKLFNIQVKEVTINDGTTTIANNLTSTVQVFTDSEYQ |
| | LPYVLGSAHQGCLPPFPADVFMIPQYGYLTLNNGSQAVGRSSFYCLEYFP |
| | SQMLRTGNNFQFSYTFEDVPFHSSYAHSQSLDRLMNPLIDQYLYYLSRTQ |
| | TTSGTAGNRTLQFSQAGPSSMANQAKNWLPGPCYRQQRVSKTTNQNNNSN |
| | FAWTGATKYHLNGRDSLVNPGPAMATHKDDEDKFFPMSGVLIFGKQGAGN |
| | SNVDLDNVMITNEEEIKTTNPVATEEYGTVATNLQSANRGDLLLSTAPAT |
| | GTVNSQGALPGMVWQDRDVYLQGPIWAKIPHTDGHFHPSPLMGGFGLKHP |
| | PPQILIKNTPVPANPPTTFSPAKFASFITQYSTGQVSVEIEWELQKENSK |
| | RWNPEIQYTSNYNKSINVDFAVDINGVYSEPRPIGTRYLTRNL |
| Anc80 | MAADGYLPDWLEDNLSEGIREWWDLKPGAPKPKANQQKQDDGRGLVLPGY |
| L65 | KYLGPFNGLDKGEPVNAADAAALEHDKAYDQQLKAGDNPYLRYNHADAEF |
| Liver | QERLQEDTSFGGNLGRAVFQAKKRVLEPLGLVEEGAKTAPGKKRPVEQSP |
| Off | QEPDSSSGIGKKGQQPARKRLNFGQTGDSESVPDPQPLGEPPAAPSGVGS |
| Deco1 | NTMAAGGGAPMADNNEGADGVGNASGNWHCDSTWLGDRVITTSTRTWALP |
| SEQ ID | TYNNHLYKQISSQSGATTNDNTYFGYSTPWGYFDFNRFHCHFSPRDWQRL |
| NO: | INNNWGFRPKKLNFKLFNIQVKEVTTNDGTTTIANNLTSTVQVFTDSEYQ |
| 44898 | LPYVLGSAHQGCLPPFPADVFMIPQYGYLTLNNGSQAVGRSSFYCLEYFP |
| | SQMLRTGNNFQFSYTFEDVPFHSSYAHSQSLDRLMNPLIDQYLYYLSRTQ |
| | TTSGTAGNRTLQFSQAGPSSMANQAKNWLPGPCYRQQRVSKTTNQNNNSN |
| | FAWTGATKYHLNGRDSLVNPGPAMATHKDDEDKFFPMSGVLIFGKQGAGN |
| | SNVDLDNVMITNEEEIKTTNPVATEEYGTVATNLQSANRGDLLLSTAPAT |
| | GTVNSQGALPGMVWQDRDVYLQGPIWAKIPHTDGHFHPSPLMGGFGLKHP |
| | PPQILIKNTPVPANPPTTFSPAKFASFITQYSTGQVSVEIEWELQKENSK |
| | RWNPEIQYTSNYNKSTNVDFAVDINGVYSEPRPIGTRYLTRNL |
| AAV9 | MAADGYLPDWLEDNLSEGIREWWALKPGAPQPKANQQHQDNARGLVLPGY |
| (MUTI- | KYLGPGNGLDKGEPVNAADAAALEHDKAYDQQLKAGDNPYLKYNHADAEF |
| ATLV | QERLKEDTSFGGNLGRAVFQAKKRLLEPLGLVEEAAKTAPGKKRPVEQSP |
| T013X | QEPDSSAGIGKSGAQPAKKRLNFGQTGDTESVPDPQPIGEPPAAPSGVGS |
| X38181) | LTMASGGGAPVADNNEGADGVGSSSGNWHCDSQWLGDRVITTSTRTWALP |
| SEQ ID | TYNNHLYKQISNSTSGASTNDNAYFGYSTPWGYFDFNRFHCHFSPRDWQR |
| NO: | LINNNWGFRPKRLNFKLFNIQVKEVTDNNGVKTIANNLTSTVQVFTDSDY |
| 44900 | QLPYVLGSAHEGCLPPFPADVFMIPQYGYLTLNDGSQAVGRSSFYCLEYF |
| | PSQMLRTGNNFQFSYEFENVPFHSSYAHSQSLDRLMNPLIDQYLYYLSKT |
| | INGSGQNQQTLKFSVAGPSNMAVQGRNYIPGPSYRQQRVSTTVTQNNNSE |
| | FAWPGASSWALNGRNSLMNPGPAMASHKEGEDRFFPLSGSLIFGKQGTGR |
| | DNVDADKVMITNEEEIKTTNPVATESYGQVATNHQSAQRGDRGQIAQAQT |
| | GWVQNQGILPGMVWQDRDVYLQGPIWAKIPHTDGNFHPSPLMGGFGMKHP |
| | PPQILIKNTPVPADPPTAFNKDKLNSFITQYSTGQVSVEIEWELQKENSK |
| | RWNPEIQYTSNYYKSNNVEFAVNTEGVYSEPRPIGTRYLTRNL |
| AAV9 | MAADGYLPDWLEDNLSEGIREWWALKPGAPQPKANQQHQDNARGLVLPGY |
| (MUTI- | KYLGPGNGLDKGEPVNAADAAALEHDKAYDQQLKAGDNPYLKYNHADAEF |
| ATLV | QERLKEDTSFGGNLGRAVFQAKKRLLEPLGLVEEAAKTAPGKKRPVEQSP |
| T013X | QEPDSSAGIGKSGAQPAKKRLNFGQTGDTESVPDPQPIGEPPAAPSGVGS |
| X40049 | LTMASGGGAPVADNNEGADGVGSSSGNWHCDSQWLGDRVITTSTRTWALP |
| SEQ ID | TYNNHLYKQISNSTSGASTNDNAYFGYSTPWGYFDFNRFHCHFSPRDWQR |
| NO: | LINNNWGFRPKRLNFKLFNIQVKEVTDNNGVKTIANNLTSTVQVFTDSDY |
| 44901 | QLPYVLGSAHEGCLPPFPADVFMIPQYGYLTLNDGSQAVGRSSFYCLEYF |
| | PSQMLRTGNNFQFSYEFENVPFHSSYAHSQSLDRLMNPLIDQYLYYLSKT |
| | INGSGQNQQTLKFSVAGPSNMAVQGRNYIPGPSYRQQRVSTTVTQNNNSE |
| | FAWPGASSWALNGRNSLMNPGPAMASHKEGEDRFFPLSGSLIFGKQGTGR |
| | DNVDADKVMITNEBEIKTTNPVATESYGQVATNHQSAQRGDRSVVAQAQT |
| | GWVQNQGILPGMVWQDRDVYLQGPIWAKIPHTDGNFHPSPLMGGFGMKHP |
| | PPQILIKNTPVPADPPTAFNKDKLNSFITQYSTGQVSVEIEWELQKENSK |
| | RWNPEIQYTSNYYKSNNVEFAVNTEGVYSEPRPIGTRYLTRNL |
| AAV9 | MAADGYLPDWLEDNLSEGIREWWALKPGAPQPKANQQHQDNARGLVLPGY |
| (MUTI- | KYLGPGNGLDKGEPVNAADAAALEHDKAYDQQLKAGDNPYLKYNHADAEF |
| ATLV | QERLKEDTSFGGNLGRAVFQAKKRLLEPLGLVEEAAKTAPGKKRPVEQSP |
| T013X | QEPDSSAGIGKSGAQPAKKRLNFGQTGDTESVPDPQPIGEPPAAPSGVGS |
| X38170 | LTMASGGGAPVADNNEGADGVGSSSGNWHCDSQWLGDRVITTSTRTWALP |
| SEQ ID | TYNNHLYKQISNSTSGASTNDNAYFGYSTPWGYFDFNRFHCHFSPRDWQR |
| NO: | LINNNWGFRPKRLNFKLFNIQVKEVTDNNGVKTIANNLTSTVQVFTDSDY |
| 44902 | QLPYVLGSAHEGCLPPFPADVFMIPQYGYLTLNDGSQAVGRSSFYCLEYF |
| | PSQMLRTGNNFQFSYEFENVPFHSSYAHSQSLDRLMNPLIDQYLYYLSKT |
| | INGSGQNQQTLKFSVAGPSNMAVQGRNYIPGPSYRQQRVSTTVTQNNNSE |
| | FAWPGASSWALNGRNSLMNPGPAMASHKEGEDRFFPLSGSLIFGKQGTGR |
| | DNVDADKVMITNEEEIKTTNPVATESYGQVATNHQSAQRGDRGNQAQAQT |
| | GWVQNQGILPGMVWQDRDVYLQGPIWAKIPHTDGNFHPSPLMGGFGMKHP |
| | PPQILIKNTPVPADPPTAFNKDKLNSFITQYSTGQVSVEIEWELQKENSK |
| | RWNPEIQYTSNYYKSNNVEFAVNTEGVYSEPRPIGTRYLTRNL |
| AAV9 | MAADGYLPDWLEDNLSEGIREWWALKPGAPQPKANQQHQDNARGLVLPGY |
| (MUTI- | KYLGPGNGLDKGEPVNAADAAALEHDKAYDQQLKAGDNPYLKYNHADAEF |
| ATLV | QERLKEDTSFGGNLGRAVFQAKKRLLEPLGLVEEAAKTAPGKKRPVEQSP |
| T013X | QEPDSSAGIGKSGAQPAKKRLNFGQTGDTESVPDPQPIGEPPAAPSGVGS |
| X39374 | LTMASGGGAPVADNNEGADGVGSSSGNWHCDSQWLGDRVITTSTRTWALP |
| SEQ ID | TYNNHLYKQISNSTSGASTNDNAYEGYSTPWGYFDFNRFHCHFSPRDWQR |
| NO: | LINNNWGFRPKRLNFKLFNIQVKEVTDNNGVKTIANNLTSTVQVFTDSDY |
| 44903 | QLPYVLGSAHEGCLPPFPADVFMIPQYGYLTLNDGSQAVGRSSFYCLEYF |
| | PSQMLRTGNNFQFSYEFENVPFHSSYAHSQSLDRLMNPLIDQYLYYLSKT |
| | INGSGQNQQTLKFSVAGPSNMAVQGRNYIPGPSYRQQRVSTTVTQNNNSE |
| | FAWPGASSWALNGRNSLMNPGPAMASHKEGEDRFFPLSGSLIFGKQGTGR |
| | DNVDADKVMITNEEEIKTTNPVATESYGQVATNHQSAQRGDRNVVAQAQT |
| | GWVQNQGILPGMVWQDRDVYLQGPIWAKIPHTDGNFHPSPLMGGFGMKHP |
| | PPQILIKNTPVPADPPTAFNKDKLNSFITQYSTGQVSVEIEWELQKENSK |
| | RWNPEIQYTSNYYKSNNVEFAVNTEGVYSEPRPIGTRYLTRNL |
| AAV9 | MAADGYLPDWLEDNLSEGIREWWALKPGAPQPKANQQHQDNARGLVLPGY |
| (MUTI- | KYLGPGNGLDKGEPVNAADAAALEHDKAYDQQLKAGDNPYLKYNHADAEF |
| ATLV | QERLKEDTSFGGNLGRAVFQAKKRLLEPLGLVEEAAKTAPGKKRPVEQSP |
| TQ13X | QEPDSSAGIGKSGAQPAKKRLNFGQTGDTESVPDPQPIGEPPAAPSGVGS |
| X20169 | LTMASGGGAPVADNNEGADGVGSSSGNWHCDSQWLGDRVITTSTRTWALP |
| SEQ ID | TYNNHLYKQISNSTSGASTNDNAYFGYSTPWGYFDFNRFHCHFSPRDWQR |
| NO: | LINNNWGFRPKRLNFKLFNIQVKEVIDNNGVKTIANNLTSTVQVFTDSDY |
| 44904 | QLPYVLGSAHEGCLPPFPADVFMIPQYGYLTLNDGSQAVGRSSFYCLEYF |
| | PSQMLRTGNNFQFSYEFENVPFHSSYAHSQSLDRLMNPLIDQYLYYLSKT |
| | INGSGQNQQTLKFSVAGPSNMAVQGRNYIPGPSYRQQRVSTTVTQNNNSE |
| | FAWPGASSWALNGRNSLMNPGPAMASHKEGEDRFFPLSGSLIFGKQGTGR |
| | DNVDADKVMITNEEEIKTTNPVATESYGQVATNHQSAQRGDHVNLAQAQT |
| | GWVQNQGILPGMVWQDRDVYLQGPIWAKIPHTDGNFHPSPLMGGFGMKHP |
| | PPQILIKNTPVPADPPTAFNKDKLNSFITQYSTGQVSVEIEWELQKENSK |
| | RWNPEIQYTSNYYKSNNVEFAVNTEGVYSEPRPIGTRYLTRNL |
| AAV9 | MAADGYLPDWLEDNLSEGIREWWALKPGAPQPKANQQHQDNARGLVLPGY |
| (MUTI- | KYLGPGNGLDKGEPVNAADAAALEHDKAYDQQLKAGDNPYLKYNHADAEF |
| ATLV | QERLKEDTSFGGNLGRAVFQAKKRLLEPLGLVEEAAKTAPGKKRPVEQSP |
| T013X | QEPDSSAGIGKSGAQPAKKRLNFGQTGDTESVPDPQPIGEPPAAPSGVGS |
| X49911 | LTMASGGGAPVADNNEGADGVGSSSGNWHCDSQWLGDRVITTSTRTWALP |
| SEQ ID | TYNNHLYKQISNSTSGASTNDNAYFGYSTPWGYFDFNRFHCHFSPRDWQR |
| NO: | LINNNWGFRPKRLNFKLFNIQVKEVTDNNGVKTIANNLTSTVQVFTDSDY |
| 44905 | QLPYVLGSAHEGCLPPFPADVFMIPQYGYLTLNDGSQAVGRSSFYCLEYF |
| | PSQMLRTGNNFQFSYEFENVPFHSSYAHSQSLDRLMNPLIDQYLYYLSKT |
| | INGSGQNQQTLKFSVAGPSNMAVQGRNYIPGPSYRQQRVSTTVTQNNNSE |
| | FAWPGASSWALNGRNSLMNPGPAMASHKEGEDRFFPLSGSLIFGKQGTGR |
| | DNVDADKVMITNEEEIKTTNPVATESYGQVATNHQSAQRGDVRSIAQAQT |
| | GWVQNQGILPGMVWQDRDVYLQGPIWAKIPHTDGNFHPSPLMGGFGMKH |
| | PPPQILIKNTPVPADPPTAFNKDKLNSFITQYSTGQVSVEIEWELQKEN |
| | SKRWNPEIQYTSNYYKSNNVEFAVNTEGVYSEPRPIGTRYLTRNL |
| AAV9 | MAADGYLPDWLEDNLSEGIREWWALKPGAPQPKANQQHQDNARGLVLPGY |
| (MUTI- | KYLGPGNGLDKGEPVNAADAAALEHDKAYDQQLKAGDNPYLKYNHADAEF |
| ATLV | QERLKEDTSFGGNLGRAVFQAKKRLLEPLGLVEEAAKTAPGKKRPVEQSP |
| T013X | QEPDSSAGIGKSGAQPAKKRLNFGQTGDTESVPDPQPIGEPPAAPSGVGS |
| X38249 | LTMASGGGAPVADNNEGADGVGSSSGNWHCDSQWLGDRVITTSTRTWALP |
| SEQ ID | TYNNHLYKQISNSTSGASTNDNAYFGYSTPWGYFDFNRFHCHFSPRDWQR |
| NO: | LINNNWGFRPKRLNFKLFNIQVKEVTDNNGVKTIANNLTSTVQVFTDSDY |
| 44906 | QLPYVLGSAHEGCLPPFPADVFMIPQYGYLTLNDGSQAVGRSSFYCLEYF |
| | PSQMLRTGNNFQFSYEFENVPFHSSYAHSQSLDRLMNPLIDQYLYYLSKT |
| | INGSGQNQQTLKFSVAGPSNMAVQGRNYIPGPSYRQQRVSTTVTQNNNSE |
| | FAWPGASSWALNGRNSLMNPGPAMASHKEGEDRFFPLSGSLIFGKQGTGR |
| | DNVDADKVMITNEEEIKTTNPVATESYGQVATNHQSAQRGDRGVVAQAQT |
| | GWVQNQGILPGMVWQDRDVYLQGPIWAKIPHTDGNFHPSPLMGGFGMKHP |
| | PPQILIKNTPVPADPPTAFNKDKLNSFITQYSTGQVSVEIEWELQKENSK |
| | RWNPEIQYTSNYYKSNNVEFAVNTEGVYSEPRPIGTRYLTRNL |
| AAV9 | MAADGYLPDWLEDNLSEGIREWWALKPGAPQPKANQQHQDNARGLVLPGY |
| (MUTI- | KYLGPGNGLDKGEPVNAADAAALEHDKAYDQQLKAGDNPYLKYNHADAEF |
| ATLV | QERLKEDTSFGGNLGRAVFQAKKRLLEPLGLVEEAAKTAPGKKRPVEQSP |
| T013X | QEPDSSAGIGKSGAQPAKKRLNFGQTGDTESVPDPQPIGEPPAAPSGVGS |
| X38219 | LTMASGGGAPVADNNEGADGVGSSSGNWHCDSQWLGDRVITTSTRTWALP |
| SEQ ID | TYNNHLYKQISNSTSGASTNDNAYFGYSTPWGYFDFNRFHCHFSPRDWQR |
| NO: | LINNNWGFRPKRLNFKLFNIQVKEVTDNNGVKTIANNLTSTVQVFTDSDY |
| 44907 | QLPYVLGSAHEGCLPPFPADVFMIPQYGYLTLNDGSQAVGRSSFYCLEYF |
| | PSQMLRTGNNFQFSYEFENVPFHSSYAHSQSLDRLMNPLIDQYLYYLSKT |
| | INGSGQNQQTLKFSVAGPSNMAVQGRNYIPGPSYRQQRVSTTVTQNNNSE |
| | FAWPGASSWALNGRNSLMNPGPAMASHKEGEDRFFPLSGSLIFGKQGTGR |
| | DNVDADKVMITNEEEIKTTNPVATESYGQVATNHQSAQRGDRGSVAQAQT |
| | GWVQNQGILPGMVWQDRDVYLQGPIWAKIPHTDGNFHPSPLMGGFGMKHP |
| | PPQILIKNTPVPADPPTAFNKDKLNSFITQYSTGQVSVEIEWELQKENSK |
| | RWNPEIQYTSNYYKSNNVEFAVNTEGVYSEPRPIGTRYLTRNL |
| AAV9 | MAADGYLPDWLEDNLSEGIREWWALKPGAPQPKANQQHQDNARGLVLPGY |
| (MUTI- | KYLGPGNGLDKGEPVNAADAAALEHDKAYDQQLKAGDNPYLKYNHADAEF |
| ATLV | QERLKEDTSFGGNLGRAVFQAKKRLLEPLGLVEEAAKTAPGKKRPVEQSP |
| T013X | QEPDSSAGIGKSGAQPAKKRLNFGQTGDTESVPDPQPIGEPPAAPSGVGS |
| X26512 | LTMASGGGAPVADNNEGADGVGSSSGNWHCDSQWLGDRVITTSTRTWALP |
| SEQ ID | TYNNHLYKQISNSTSGASTNDNAYFGYSTPWGYFDFNRFHCHFSPRDWQR |
| NO: | LINNNWGFRPKRLNFKLFNIQVKEVTDNNGVKTIANNLTSTVQVFTDSDY |
| 44908 | QLPYVLGSAHEGCLPPFPADVFMIPQYGYLTLNDGSQAVGRSSFYCLEYF |
| | PSQMLRTGNNFQFSYEFENVPFHSSYAHSQSLDRLMNPLIDQYLYYLSKT |
| | INGSGQNQQTLKFSVAGPSNMAVQGRNYIPGPSYRQQRVSTTVTQNNNSE |
| | FAWPGASSWALNGRNSLMNPGPAMASHKEGEDRFFPLSGSLIFGKQGTGR |
| | DNVDADKVMITNEEEIKTTNPVATESYGQVATNHQSAQRGDKSSIAQAQT |
| | GWVQNQGILPGMVWQDRDVYLQGPIWAKIPHTDGNFHPSPLMGGFGMKHP |
| | PPQILIKNTPVPADPPTAFNKDKLNSFITQYSTGQVSVEIEWELQKENSK |
| | RWNPEIQYTSNYYKSNNVEFAVNTEGVYSEPRPIGTRYLTRNL |
| AAV9 | MAADGYLPDWLEDNLSEGIREWWALKPGAPQPKANQQHQDNARGLVLPGY |
| (MUTI- | KYLGPGNGLDKGEPVNAADAAALEHDKAYDQQLKAGDNPYLKYNHADAEF |
| ATLV | QERLKEDTSFGGNLGRAVFQAKKRLLEPLGLVEEAAKTAPGKKRPVEQSP |
| T013X | QEPDSSAGIGKSGAQPAKKRLNFGQTGDTESVPDPQPIGEPPAAPSGVGS |
| X3824 | LTMASGGGAPVADNNEGADGVGSSSGNWHCDSQWLGDRVITTSTRTWALP |
| 7 | TYNNHLYKQISNSTSGASTNDNAYFGYSTPWGYFDFNRFHCHFSPRDWQR |
| SEQ ID | LINNNWGFRPKRLNFKLFNIQVKEVTDNNGVKTIANNLTSTVQVFTDSDY |
| NO: | QLPYVLGSAHEGCLPPFPADVFMIPQYGYLTLNDGSQAVGRSSFYCLEYF |
| 44909 | PSQMLRTGNNFQFSYEFENVPFHSSYAHSQSLDRLMNPLIDQYLYYLSKT |
| | INGSGQNQQTLKFSVAGPSNMAVQGRNYIPGPSYRQQRVSTTVTQNNNSE |
| | FAWPGASSWALNGRNSLMNPGPAMASHKEGEDRFFPLSGSLIFGKQGTGR |
| | DNVDADKVMITNEEEIKTTNPVATESYGQVATNHQSAQRGDRGVSAQAQT |
| | GWVQNQGILPGMVWQDRDVYLQGPIWAKIPHTDGNFHPSPLMGGFGMKHP |
| | PPQILIKNTPVPADPPTAFNKDKLNSFITQYSTGQVSVEIEWELQKENSK |
| | RWNPEIQYTSNYYKSNNVEFAVNTEGVYSEPRPIGTRYLTRNL |
| Library | P₁P₂P₅P₄P₅P₆P₇P₈NDNP₁₂ |
| Consensus | |
| SEQ | P₁P₂P₃P₄GGP₇P₈NDNP₁₂ |
| ID NO: | |
| 44921 | |
| (Top | |
| 28 | |
| Consensus) | |
| SEQ | P₁P₂TP₄GGP₇P₈NDNP₁₂ |
| ID NO: | |
| 44922 | |
| (Peptide | |
| segment 1) | |
| SEQ | P₁P₂QP₄GGP₇P₈NDNP₁₂ |
| ID NO: | |
| 44923 | |
| (Peptide | |
| Segment 2) | |
| SEQ | P₁P₂TP₄GGP₇TNDNP₁₂ |
| ID NO: | |
| 44924 | |
| (Peptide | |
| Segment 3) | |
| SEQ | NP₂TP₄GGP₇P₈NDNP₁₂ |
| ID NO: | |
| 44925 | |
| (Peptid? | |
| Segment 4) | |
| SEQ | SP₂TP₄GGP₇P₈NDNP₁₂ |
| ID NO: | |
| 44926 | |
| (Peptide | |
| Segment 5) | |
| SEQ | NSTSGGP₇P₈NDNH |
| ID NO: | |
| 44927 | |
| (group | |
| 1) | |
| SEQ | NSTTGGP₇P₈NDNH |
| ID NO: | |
| 44928 | |
| (group | |
| 2) | |
| SEQ | SGQTGGP₇P₈NDNH |
| ID NO: | |
| 44929 | |
| (group | |
| 3) | |
| SEQ | SGTAGGP₇P₈NDNT |
| ID NO: | |
| 44930 | |
| (group | |
| 4) | |
| SEQ | SGTSGGP₇P₈NDNA |
| ID NO: | |
| 44931 | |
| (group | |
| 5) | |
| SEQ | SGTTGGP₇P₈NDNT |
| ID NO: | |
| 44932 | |
| (group | |
| 6) | |
| SEQ | SSTAGGP₇P₈NDNA |
| ID NO: | |
| 44933 | |
| (group | |
| 7) | |

### 10. EQUIVALENTS AND INCORPORATION BY REFERENCE

[1197] While the invention has been particularly shown and described with reference to a preferred embodiment and various alternate embodiments, it will be understood by persons skilled in the relevant art that various changes in form and details can be made therein without departing from the spirit and scope of the invention.

[1198] All references, issued patents and patent applications cited within the body of the instant specification are hereby incorporated by reference in their entirety, for all purposes.

### 11. TABLES

[1199] Provided below is Table 27. Abbreviations for Table 27 are as follows: Bicep—Bicep femoris, Diap—Diaphragm, Flex—Flexor Digitorum Profundus, Vent.—Heart VentricleWall Left, Tibia—Tibialis Anterior, and Tricep—Triceps Brachii. Table 27 shows individual tissue enrichment scores for each AAV variant. Data is provided for tissues including Liver, Bicep, Diap., Flex, Vent., Tibia, and Tricep.

Lengthy table referenced here
US20260062450A1-20260305-T00001
Please refer to the end of the specification for access instructions.

[1200] Provided below is Table 28. Table 28 shows individual tissue enrichment scores for each AAV variant. Data is provided for tissues including Liver DNA, Liver RNA, Heart DNA, and Heart RNA.

| | SEQ | | | | | | | SEQ | | | | | |
|---|---|---|---|---|---|---|---|---|---|---|---|---|---|
| M to | ID | | Liver | Liver | Heart | Heart | M to | ID | | Liver | Liver | Heart | Heart |
| variant_id | NO: | Sequence | DNA | RNA | DNA | RNA | variant_id | NO: | Sequence | DNA | RNA | DNA | RNA |
| ATLVT012XX0001 | 44935 | NGAAAAASNDNA | −0.1 | −1.02 | −3.29 | −1.09 | ATLVT012XX0047 | 44981 | NGAAGGSTNDNH | −1.48 | −2 | −0.83 | 0.43 |
| ATLVT012XX0002 | 44936 | NGAAAAASNDNH | −1.1 | −1.11 | −1.48 | −1.39 | ATLVT012XX0048 | 44982 | NGAAGGSTNDNT | 1.18 | 0.18 | 0.18 | 0.07 |
| ATLVT012XX0003 | 44937 | NGAAAAASNDNT | 0 | −1.4 | −2.39 | 0.39 | ATLVT012XX0049 | 44983 | NGASAAASNDNA | −0.75 | −0.72 | −0.12 | −0.36 |
| ATLVT012XX0004 | 44938 | NGAAAAATNDNA | 0.61 | −1.74 | −1.27 | 0.05 | ATLVT012XX0050 | 44984 | NGASAAASNDNH | −1.51 | −0.47 | 0.94 | 0.13 |
| ATLVT012XX0005 | 44939 | NGAAAAATNDNH | 0.22 | −1.43 | −1.17 | 0.13 | ATLVT012XX0051 | 44985 | NGASAAASNDNT | −0.8 | −2.03 | 1.52 | 1.52 |
| ATLVT012XX0006 | 44940 | NGAAAAATNDNT | 0.28 | −0.25 | 0.13 | 0.81 | ATLVT012XX0052 | 44986 | NGASAAATNDNA | −0.91 | −2.41 | −0.43 | −0.46 |
| ATLVT012XX0007 | 44941 | NGAAAASSNDNA | −0.94 | −1.69 | −1.95 | −0.21 | ATLVT012XX0053 | 44987 | NGASAAATNDNH | 0.76 | −1.46 | −0.77 | 2.1 |
| ATLVT012XX0008 | 44942 | NGAAAASSNDNH | −0.58 | −0.74 | −0.8 | 0.55 | ATLVT012XX0054 | 44988 | NGASAAATNDNT | 0.51 | −2.42 | 1.16 | −0.8 |
| ATLVT012XX0009 | 44943 | NGAAAASSNDNT | −1.46 | −1.08 | 0.44 | −0.11 | ATLVT012XX0055 | 44989 | NGASAASSNDNA | −1.86 | −0.46 | 0.95 | −0.11 |
| ATLVT012XX0010 | 44944 | NGAAAASTNDNA | −1.75 | −1.09 | −1.93 | −0.85 | ATLVT012XX0056 | 44990 | NGASAASSNDNH | −0.37 | −2.25 | 0.32 | −0.37 |
| ATLVT012XX0011 | 44945 | NGAAAASTNDNH | −2.33 | −1.99 | −1.46 | −0.75 | ATLVT012XX0057 | 44991 | NGASAASSNDNT | −1.03 | −1.97 | 1.1 | −1.41 |
| ATLVT012XX0012 | 44946 | NGAAAASTNDNT | −0.43 | −1.16 | −0.73 | 0.4 | ATLVT012XX0058 | 44992 | NGASAASTNDNA | −1.8 | −2.3 | 0.16 | −2.63 |
| ATLVT012XX0013 | 44947 | NGAAAGASNDNA | −2.61 | −1.1 | −2.25 | −1.47 | ATLVT012XX0059 | 44993 | NGASAASTNDNH | −1.36 | −1.94 | 0.95 | −1.93 |
| ATLVT012XX0014 | 44948 | NGAAAGASNDNH | 0.11 | −0.98 | −2.33 | −2.09 | ATLVT012XX0060 | 44994 | NGASAASTNDNT | 0.06 | −2.2 | 0.11 | −0.07 |
| ATLVT012XX0015 | 44949 | NGAAAGASNDNT | −0.9 | −0.47 | −2.99 | −2.66 | ATLVT012XX0061 | 44995 | NGASAGASNDNA | −3.61 | 1.79 | 0.21 | 0.82 |
| ATLVT012XX0016 | 44950 | NGAAAGATNDNA | −1.6 | 0.92 | −2.92 | −1.71 | ATLVT012XX0062 | 44996 | NGASAGASNDNH | −3.21 | 1.82 | 0.26 | 0.19 |
| ATLVT012XX0017 | 44951 | NGAAAGATNDNH | −1.24 | 2.7 | −1.91 | −0.66 | ATLVT012XX0063 | 44997 | NGASAGASNDNT | −3.4 | −0.02 | −0.74 | −0.1 |
| ATLVT012XX0018 | 44952 | NGAAAGATNQNT | −2.1 | −0.09 | −1.96 | −2.6 | ATLVT012XX0064 | 44998 | NGASAGATNDNA | −2.86 | −0.06 | 1.15 | 1.5 |
| ATLVT012XX0019 | 44953 | NGAAAGSSNDNA | −1.44 | 2.03 | −2.93 | −1.69 | ATLVT012XX0065 | 44999 | NGASAGATNDNH | −1.48 | −0.37 | 0.29 | 2.01 |
| ATLVT012XX0020 | 44954 | NGAAAGSSNDNH | −2.95 | 2.18 | −2.77 | −3.07 | ATLVT012XX0066 | 45000 | NGASAGATNDNT | −2.44 | 0.06 | 0.52 | 0.71 |
| ATLVT012XX0021 | 44955 | NGAAAGSSNDNT | −0.75 | 1.05 | −1.65 | −3.3 | ATLVT012XX0067 | 45001 | NGASAGSSNDNA | −0.66 | 3.12 | 0.58 | 0.28 |
| ATLVT012XX0022 | 44956 | NGAAAGSTNDNA | 0.01 | 1.63 | −1.29 | −1.96 | ATLVT012XX0068 | 45002 | NGASAGSSNDNH | −1.88 | 0.57 | −0.34 | −0.62 |
| ATLVT012XX0023 | 44957 | NGAAAGSTNDNH | −0.71 | 1.18 | −0.69 | −1.71 | ATLVT012XX0069 | 45003 | NGASAGSSNDNT | −0.88 | 1.03 | −0.64 | −1.29 |
| ATLVT012XX0024 | 44958 | NGAAAGSTNDNT | −0.03 | 2.88 | −2.11 | −3.25 | ATLVT012XX0070 | 45004 | NGASAGSTNDNA | 0.04 | 3.74 | 0.52 | −0.83 |
| ATLVT012XX0025 | 44959 | NGAAGAASNDNA | −3.92 | −2.55 | −2.31 | −2.71 | ATLVT012XX0071 | 45005 | NGASAGSTNDNH | 0.37 | 1.44 | −0.64 | 0.83 |
| ATLVT012XX0026 | 44960 | NGAAGAASNDNH | −3.48 | −4.91 | −3.94 | −4.24 | ATLVT012XX0072 | 45006 | NGASAGSTNDNT | 0.81 | 3.5 | −0.36 | −1.06 |
| ATLVT012XX0027 | 44961 | NGAAGAASNDNT | −3.69 | −3.25 | −2.48 | −1.12 | ATLVT012XX0073 | 45007 | NGASGAASNDNA | −3.79 | −0.63 | −3.52 | −2.2 |
| ATLVT012XX0028 | 44962 | NGAAGAATNDNA | −1.62 | −2.26 | −2.16 | −1.13 | ATLVT012XX0074 | 45008 | NGASGAASNDNH | −2.76 | 2 | −2.83 | −2.21 |
| ATLVT012XX0029 | 44963 | NGAAGAATNDNH | −2.47 | −0.28 | −2.57 | −0.93 | ATLVT012XX0075 | 45009 | NGASGAASNDNT | −2.95 | −0.79 | −2.28 | −0.38 |
| ATLVT012XX0030 | 44964 | NGAAGAATNDNT | −3.53 | | −2.25 | −1.87 | ATLVT012XX0076 | 45010 | NGASGAATNDNA | −3.81 | −1.35 | −1.98 | −1.88 |
| ATLVT012XX0031 | 44965 | NGAAGASSNDNA | −3.72 | −2.86 | −1.4 | −0.96 | ATLVT012XX0077 | 45011 | NGASGAATNDNH | −2.47 | 0.17 | 0.03 | −1.65 |
| ATLVT012XX0032 | 44966 | NGAAGASSNDNH | −3.2 | −5.77 | −1.64 | −1.58 | ATLVT012XX0078 | 45012 | NGASGAATNDNT | −2.26 | 0.35 | −0.53 | −1.59 |
| ATLVT012XX0033 | 44967 | NGAAGASSNDNT | −1.91 | −3.48 | −1.27 | −1.6 | ATLVT012XX0079 | 45013 | NGASGASSNDNA | −1.57 | 0.36 | 1.27 | −2.28 |
| ATLVT012XX0034 | 44968 | NGAAGASTNDNA | −4.11 | −2.09 | −0.53 | −0.48 | ATLVT012XX0080 | 45014 | NGASGASSNDNH | 0.56 | −1.22 | −0.08 | −1.68 |
| ATLVT012XX0035 | 44969 | NGAAGASTNDNH | −2.13 | −0.74 | −1.87 | −0.73 | ATLVT012XX0081 | 45015 | NGASGASSNDNT | −0.19 | 0.07 | 0.81 | −2.09 |
| ATLVT012XX0036 | 44970 | NGAAGASTNDNT | −3.67 | −1.18 | −1.59 | −1.07 | ATLVT012XX0082 | 45016 | NGASGASTNDNA | −1.81 | 0.99 | 0.92 | 0.52 |
| ATLVT012XX0037 | 44971 | NGAAGGASNDNA | −1.79 | −0.61 | −3.31 | −2.02 | ATLVT012XX0083 | 45017 | NGASGASTNDNH | −0.69 | −0.55 | −0.51 | 1.17 |
| ATLVT012XX0038 | 44972 | NGAAGGASNDNH | 1.41 | 1.09 | 1.58 | 0.79 | ATLVT012XX0084 | 45018 | NGASGASTNDNT | 0.29 | −1.18 | 0.05 | 1.22 |
| ATLVT012XX0039 | 44973 | NGAAGGASNDNT | −0.43 | −1.28 | −4.61 | −0.48 | ATLVT012XX0085 | 45019 | NGASGGASNDNA | 1.73 | 0.15 | 0.99 | −0.28 |
| ATLVT012XX0040 | 44974 | NGAAGGATNDNA | 0.46 | −0.27 | −3.4 | −0.17 | ATLVT012XX0086 | 45020 | NGASGGASNDNH | 3.11 | 0.51 | 0.13 | 0.49 |
| ATLVT012XX0041 | 44975 | NGAAGGATNDNH | 0.89 | 1.07 | −2.35 | −0.71 | ATLVT012XX0087 | 45021 | NGASGGASNDNT | 2.42 | 2.32 | 0.37 | −0.02 |
| ATLVT012XX0042 | 44976 | NGAAGGATNQNT | 0.42 | 0.73 | −2.37 | −0.85 | ATLVT012XX0088 | 45022 | NGASGGATNDNA | −1.68 | −0.92 | 0.96 | −0.91 |
| ATLVT012XX0043 | 44977 | NGAAGGSSNDNA | −0.1 | 0.39 | −1.02 | −1.21 | ATLVT012XX0089 | 45023 | NGASGGATNHNH | 1.16 | 2.28 | 0.17 | 1.48 |
| ATLVT012XX0044 | 44978 | NGAAGGSSNDNH | 0.26 | −0.03 | −0.86 | −0.07 | ATLVT012XX0090 | 45024 | NGASGGATNDNT | 0.67 | 0.64 | −0.01 | 0.68 |
| ATLVT012XX0045 | 44979 | NGAAGGSSNDNT | −0.22 | 0.08 | −2.54 | −2.83 | ATLVT012XX0091 | 45025 | NGASGGSSNDNA | 1.06 | 2.53 | 0.27 | 0.03 |
| ATLVT012XX0046 | 44980 | NGAAGGSTNDNA | −1.7 | −0.79 | −1.43 | −1.89 | ATLVT012XX0092 | 45026 | NGASGGSSNDNH | 0.69 | −0.19 | 0.27 | 1.73 |
| ATLVT012XX0093 | 45027 | NGASGGSSNDNT | 2.75 | 0.28 | 0.62 | 0.9 | ATLVT012XX0139 | 45073 | NGATGGSSNDNA | 1.95 | 2.75 | 0.95 | 1.39 |
| ATLVT012XX0094 | 45028 | NGASGGSTNDNA | 2.28 | 2.78 | −0.11 | 1.49 | ATLVT012XX0140 | 45074 | NGATGGSSNDNH | −0.04 | 2.52 | 0.38 | 1.42 |
| ATLVT012XX0095 | 45029 | NGASGGSTNDNH | 3.01 | 1.56 | 0 | 2.37 | ATLVT012XX0141 | 45075 | NGATGGSSNDNT | 1.86 | 3 | 0.42 | −0.47 |
| ATLVT012XX0096 | 45030 | NGASGGSTNDNT | 3.12 | 1.98 | 0.42 | 0.45 | ATLVT012XX0142 | 45076 | NGATGGSTNDNA | 0.21 | 1.92 | 0.82 | 0.14 |
| ATLVT012XX0097 | 45031 | NGATAAASNDNA | 0.46 | −2.76 | −0.53 | 1.02 | ATLVT012XX0143 | 45077 | NGATGGSTNDNH | −0.77 | 2.52 | 0.66 | 2.48 |
| ATLVT012XX0098 | 45032 | NGATAAASNDNH | 3.53 | −1.94 | −0.41 | 1.85 | ATLVT012XX0144 | 45078 | NGATGGSTNDNT | 2.64 | 3.37 | 0.42 | 0.47 |
| ATLVT012XX0099 | 45033 | NGATAAASNDNT | 1.4 | −1.72 | 0.61 | −0.12 | ATLVT012XX0145 | 45079 | NGEAAAASNDNA | −2.54 | −1.83 | 0.61 | 1.44 |
| ATLVT012XX0100 | 45034 | NGATAAATNDNA | −0.48 | −1.03 | −0.78 | 1.75 | ATLVT012XX0146 | 45080 | NGEAAAASNDNH | −2.97 | −1.3 | 0.14 | −1.87 |
| ATLVT012XX0101 | 45035 | NGATAAATNDNH | 0.26 | 0.41 | −0.15 | 3.19 | ATLVT012XX0147 | 45081 | NGEAAAASNDNT | −1.6 | −0.36 | 0.87 | −1.55 |
| ATLVT012XX0102 | 45036 | NGATAAATNDNT | 0.15 | −2.17 | 0.81 | 1.4 | ATLVT012XX0148 | 45082 | NGEAAAATNDNA | −0.06 | 0.26 | −0.38 | −0.1 |
| ATLVT012XX0103 | 45037 | NGATAASSNDNA | −1.79 | 2.07 | −0.76 | −1.86 | ATLVT012XX0149 | 45083 | NGEAAAATNDNH | 1.97 | 0.06 | 1.34 | 0.99 |
| ATLVT012XX0104 | 45038 | NGATAASSNDNH | 0.75 | −1.24 | −0.03 | −0.85 | ATLVT012XX0150 | 45084 | NGEAAAATNDNT | 1.58 | 0.49 | 1.16 | 0.33 |
| ATLVT012XX0105 | 45039 | NGATAASSNDNT | 0.03 | −1.39 | 1.14 | 0.39 | ATLVT012XX0151 | 45085 | NGEAAASSNDNA | 2.32 | 1.53 | 0.32 | −1.73 |
| ATLVT012XX0106 | 45040 | NGATAASTNDNA | 1.56 | −1.08 | 0.26 | −0.36 | ATLVT012XX0152 | 45086 | NGEAAASSNDNH | 1.68 | −0.62 | −0.92 | −2 |
| ATLVT012XX0107 | 45041 | NGATAASTNDNH | −0.04 | −0.31 | 0.11 | −0.08 | ATLVT012XX0153 | 45087 | NGEAAASSNDNT | 4.3 | 0.78 | 0.32 | 0.46 |
| ATLVT012XX0108 | 45042 | NGATAASTNDNT | 2.48 | 1.03 | 0.51 | −1.27 | ATLVT012XX0154 | 45088 | NGEAAASTNDNA | 0.14 | −0.3 | 0.86 | −1.7 |
| ATLVT012XX0109 | 45043 | NGATAGASNDNA | −1.53 | 1.64 | −0.09 | −2.13 | ATLVT012XX0155 | 45089 | NGEAAASTNDNH | −2.4 | −0.7 | −0.09 | −0.77 |
| ATLVT012XX0110 | 45044 | NGATAGASNDNH | 0.09 | −0.16 | −0.73 | −0.15 | ATLVT012XX0156 | 45090 | NGEAAASTNDNT | −1.03 | 3.38 | −0.53 | −0.15 |
| ATLVT012XX0111 | 45045 | NGATAGASNDNT | 2.26 | −0.74 | −0.66 | −0.89 | ATLVT012XX0157 | 45091 | NGEAAGASNDNA | −0.76 | 2.1 | −1.78 | −2.65 |
| ATLVT012XX0112 | 45046 | NGATAGATNDNA | 0.62 | −0.18 | −0.71 | 0.33 | ATLVT012XX0158 | 45092 | NGEAAGASNDNH | −0.22 | −2.02 | −1.21 | −2.43 |
| ATLVT012XX0113 | 45047 | NGATAGATNDNH | 3.31 | 1.97 | 1.21 | 3.92 | ATLVT012XX0159 | 45093 | NGEAAGASNDNT | 2.28 | −1.35 | −2.28 | −3.86 |
| ATLVT012XX0114 | 45048 | NGATAGATNDNT | 2.05 | 1.47 | 0.82 | 1.44 | ATLVT012XX0160 | 45094 | NGEAAGATNDNA | −0.43 | −2.02 | −1.63 | −0.46 |
| ATLVT012XX0115 | 45049 | NGATAGSSNDNA | −0.4 | 1.06 | 0.53 | −1.67 | ATLVT012XX0161 | 45095 | NGEAAGATNDNH | 0.1 | −1.97 | −0.68 | 2.56 |
| ATLVT012XX0116 | 45050 | NGATAGSSNDNH | −1.11 | −1.36 | 0.31 | 1.44 | ATLVT012XX0162 | 45096 | NGEAAGATNDNT | −1.06 | −0.81 | −1.49 | 0.32 |
| ATLVT012XX0117 | 45051 | NGATAGSSNDNT | 0.27 | −0.9 | −0.31 | −0.37 | ATLVT012XX0163 | 45097 | NGEAAGSSNDNA | −1.6 | −2.12 | 0.3 | −2.79 |
| ATLVT012XX0118 | 45052 | NGATAGSTNDNA | 1.5 | −1.66 | 0.64 | 1.22 | ATLVT012XX0164 | 45098 | NGEAAGSSNDNH | −1.09 | −1.54 | 0.43 | −1.68 |
| ATLVT012XX0119 | 45053 | NGATAGSTNDNH | 2.39 | −0.57 | 1.06 | 1.38 | ATLVT012XX0165 | 45099 | NGEAAGSSNDNT | −1.44 | −2.62 | 0.56 | −4.31 |
| ATLVT012XX0120 | 45054 | NGATAGSTNDNT | 0.02 | −1.16 | 1.27 | 0.93 | ATLVT012XX0166 | 45100 | NGEAAGSTNDNA | 0.21 | −1.87 | 0.61 | −2.79 |
| ATLVT012XX0121 | 45055 | NGATGAASNDNA | −1.82 | −1.75 | −1.06 | 1.48 | ATLVT012XX0167 | 45101 | NGEAAGSTNDNH | −0.08 | −2.76 | 0.98 | −0.53 |
| ATLVT012XX0122 | 45056 | NGATGAASNDNH | −0.97 | −0.4 | −0.76 | 0.72 | ATLVT012XX0168 | 45102 | NGEAAGSTNDNT | −1.07 | −2.86 | 0.3 | −1.08 |
| ATLVT012XX0123 | 45057 | NGATGAASNDNT | −0.71 | −0.19 | −1.83 | 1.99 | ATLVT012XX0169 | 45103 | NGEAGAASNDNA | −2.65 | −0.59 | −0.82 | −3.35 |
| ATLVT012XX0124 | 45058 | NGATGAATNDNA | −0.88 | 1.98 | 1.14 | −1.54 | ATLVT012XX0170 | 45104 | NGEAGAASNDNH | −2.31 | −1.83 | 0.79 | −1.61 |
| ATLVT012XX0125 | 45059 | NGATGAATNDNH | −1.96 | 0.66 | 0.3 | 1.43 | ATLVT012XX0171 | 45105 | NGEAGAASNDNT | −3.99 | −2.13 | 0.52 | −2.29 |
| ATLVT012XX0126 | 45060 | NGATGAATNDNT | −1.34 | 2.47 | 0.83 | −1.51 | ATLVT012XX0172 | 45106 | NGEAGAATNDNA | −4.22 | 1.73 | −0.33 | −0.62 |
| ATLVT012XX0127 | 45061 | NGATGASSNDNA | 0.45 | 1.43 | −0.43 | −0.65 | ATLVT012XX0173 | 45107 | NGEAGAATNDNH | −3.39 | 0.11 | 0.68 | 1.31 |
| ATLVT012XX0128 | 45062 | NGATGASSNDNH | −0.76 | −0.82 | 0.54 | 0.81 | ATLVT012XX0174 | 45108 | NGEAGAATNDNT | −3.9 | 1.21 | −0.38 | −0.76 |
| ATLVT012XX0129 | 45063 | NGATGASSNDNT | 0.07 | 0.99 | −0.12 | 0.36 | ATLVT012XX0175 | 45109 | NGEAGASSNDNA | −2.69 | 0.28 | −0.26 | −0.09 |
| ATLVT012XX0130 | 45064 | NGATGASTNDNA | −0.92 | 2.39 | 1.47 | 0.64 | ATLVT012XX0176 | 45110 | NGEAGASSNDNH | −1.5 | 1.19 | 0.4 | −1.49 |
| ATLVT012XX0131 | 45065 | NGATGASTNDNH | 0.23 | 3.01 | 1.2 | 2.25 | ATLVT012XX0177 | 45111 | NGEAGASSNDNT | −3.09 | 0.96 | −0.17 | 1.53 |
| ATLVT012XX0132 | 45066 | NGATGASTNDNT | −1.15 | 0.31 | 1.72 | 1.24 | ATLVT012XX0178 | 45112 | NGEAGASTNDNA | 1.11 | 2.6 | 0.15 | 0.12 |
| ATLVT012XX0133 | 45067 | NGATGGASNDNA | −1.35 | 0.1 | −0.63 | 2.01 | ATLVT012XX0179 | 45113 | NGEAGASTNDNH | −1.17 | 0.55 | −0.01 | −0.06 |
| ATLVT012XX0134 | 45068 | NGATGGASNDNH | −0.99 | 1.2 | 1.2 | 1.09 | ATLVT012XX0180 | 45114 | NGEAGASTNDNT | 1.38 | −0.49 | 0.48 | −0.87 |
| ATLVT012XX0135 | 45069 | NGATGGASNDNT | 0.78 | 2.22 | 0.97 | 1.08 | ATLVT012XX0181 | 45115 | NGEAGGASNDNA | −0.74 | 0.46 | −0.75 | −2.2 |
| ATLVT012XX0136 | 45070 | NGATGGATNDNA | 0.24 | 1.98 | 0.2 | 0.52 | ATLVT012XX0182 | 45116 | NGEAGGASNDNH | −0.99 | 4.12 | 0.72 | 1.22 |
| ATLVT012XX0137 | 45071 | NGATGGATNDNH | 0.56 | 7.03 | 0.23 | 2.69 | ATLVT012XX0183 | 45117 | NGEAGGASNDNT | −0.82 | 0.91 | −1.11 | −1.95 |
| ATLVT012XX0138 | 45072 | NGATGGATNDNT | 0.17 | 6.78 | 0.28 | 0.39 | ATLVT012XX0184 | 45118 | NGEAGGATNDNA | −1.8 | 0.87 | −0.64 | −1.32 |
| ATLVT012XX0185 | 45119 | NGEAGGATNDNH | 0.75 | 3.1 | 1.09 | 1.38 | ATLVT012XX0231 | 45165 | NGESGGASNDNT | 2.46 | −0.02 | 0.11 | −0.62 |
| ATLVT012XX0186 | 45120 | NGEAGGATNDNT | −1.4 | 0.52 | 0.52 | −1.75 | ATLVT012XX0232 | 45166 | NGESGGATNDNA | −1.14 | 0.51 | 0.23 | −0.59 |
| ATLVT012XX0187 | 45121 | NGEAGGSSNDNA | −0.59 | 0.33 | −0.63 | 1.17 | ATLVT012XX0233 | 45167 | NGESGGATNDNH | 0.67 | 1.52 | 0.59 | 3.2 |
| ATLVT012XX0188 | 45122 | NGEAGGSSNDNH | 1.2 | −1.68 | 0.11 | 1.43 | ATLVT012XX0234 | 45168 | NGESGGATNDNT | −1.63 | 0.56 | 1.18 | 1.28 |

| | | | | | | | | | | | | | |
|---|---|---|---|---|---|---|---|---|---|---|---|---|---|
| ATLVT012XX0189 | 45123 | NGEAGGSSNDNT | −0.57 | 0.95 | 0.16 | −0.91 | ATLVT012XX0235 | 45169 | NGESGGSSNDNA | −0.2 | −0.34 | 0.03 | 1.5 |
| ATLVT012XX0190 | 45124 | NGEAGGSTNDNA | 0.59 | 2.2 | −0.46 | 0.63 | ATLVT012XX0236 | 45170 | NGESGGSSNDNH | −0.26 | 0.07 | −0.13 | 0.73 |
| ATLVT012XX0191 | 45125 | NGEAGGSTNDNH | −1.23 | 1.72 | 0.52 | 0.88 | ATLVT012XX0237 | 45171 | NGESGGSSNDNT | 3.23 | 1.17 | 0.73 | 1.24 |
| ATLVT012XX0192 | 45126 | NGEAGGSTNDNT | −0.74 | 3.89 | 0.47 | 2.14 | ATLVT012XX0238 | 45172 | NGESGGSTNDNA | 2.16 | 2.22 | 0.69 | 1.19 |
| ATLVT012XX0193 | 45127 | NGESAAASNDNA | −1.37 | −1.15 | 1.2 | 2.67 | ATLVT012XX0239 | 45173 | NGESGGSTNDNH | 3.41 | 0.43 | 0.47 | 1.18 |
| ATLVT012XX0194 | 45128 | NGESAAASNDNH | −0.42 | 2.12 | 0.15 | 1.08 | ATLVT012XX0240 | 45174 | NGESGGSTNDNT | 2.06 | 3.76 | 1.05 | 0.2 |
| ATLVT012XX0195 | 45129 | NGESAAASNDNT | 0.45 | −0.5 | 0.57 | 0.71 | ATLVT012XX0241 | 45175 | NGETAAASNDNA | −1.35 | −0.12 | −0.38 | −0.03 |
| ATLVT012XX0196 | 45130 | NGESAAATNDNA | 0.26 | 3.34 | 0.45 | 0.95 | ATLVT012XX0242 | 45176 | NGETAAASNDNH | −2.18 | 0.85 | −0.46 | 0.04 |
| ATLVT012XX0197 | 45131 | NGESAAATNDNH | −1.29 | 0.65 | 0.63 | 0.17 | ATLVT012XX0243 | 45177 | NGETAAASNDNT | −0.93 | 1.42 | 0 | −0.15 |
| ATLVT012XX0198 | 45132 | NGESAAATNDNT | −1.14 | 3.25 | 0.52 | 0.69 | ATLVT012XX0244 | 45178 | NGETAAATNDNA | −3.55 | −0.49 | 0.92 | −1.22 |
| ATLVT012XX0199 | 45133 | NGESAASSNDNA | −1.23 | 1.37 | 0.43 | −0.74 | ATLVT012XX0245 | 45179 | NGETAAATNDNH | −2.03 | 3.53 | 0.56 | −0.26 |
| ATLVT012XX0200 | 45134 | NGESAASSNDNH | −1.02 | −1.16 | 0.02 | −1.17 | ATLVT012XX0246 | 45180 | NGETAAATNDNT | −0.87 | −0.23 | 0.53 | 0.31 |
| ATLVT012XX0201 | 45135 | NGESAASSNDNT | −1.71 | −1.48 | −0.01 | −0.09 | ATLVT012XX0247 | 45181 | NGETAASSNDNA | 0.02 | −1.15 | −0.34 | −1.26 |
| ATLVT012XX0202 | 45136 | NGESAASTNDNA | −1.5 | −0.48 | 0.11 | 0.54 | ATLVT012XX0248 | 45182 | NGETAASSNDNH | −0.13 | 1.43 | 0.36 | −0.59 |
| ATLVT012XX0203 | 45137 | NGESAASTNDNH | 1.22 | −0.05 | 0.6 | −0.55 | ATLVT012XX0249 | 45183 | NGETAASSNDNT | 0.54 | −1.59 | −0.49 | −0.27 |
| ATLVT012XX0204 | 45138 | NGESAASTNDNT | 0.4 | 0.47 | 0.05 | 1.09 | ATLVT012XX0250 | 45184 | NGETAASTNDNA | 0.19 | −1.24 | 0.26 | 0.32 |
| ATLVT012XX0205 | 45139 | NGESAGASNDNA | −1.56 | −0.62 | −0.11 | −1.63 | ATLVT012XX0251 | 45185 | NGETAASTNDNH | −2.21 | 0.61 | −0.66 | −0.4 |
| ATLVT012XX0206 | 45140 | NGESAGASNDNH | −0.93 | 1.14 | −0.67 | −1.72 | ATLVT012XX0252 | 45186 | NGETAASTNDNT | −0.87 | −1.87 | 0.7 | 0.74 |
| ATLVT012XX0207 | 45141 | NGESAGASNDNT | −1.75 | −0.54 | −0.29 | −0.3 | ATLVT012XX0253 | 45187 | NGETAGASNDNA | 0.11 | −1.44 | 1.22 | −0.72 |
| ATLVT012XX0208 | 45142 | NGESAGATNDNA | −1.37 | −0.67 | −0.22 | −1.59 | ATLVT012XX0254 | 45188 | NGETAGASNDNH | −1.5 | 1.12 | −0.81 | 1.1 |
| ATLVT012XX0209 | 45143 | NGESAGATNDNH | −0.94 | 2.26 | 1.44 | 0.35 | ATLVT012XX0255 | 45189 | NGETAGASNDNT | −1.67 | −1.3 | 0.23 | −1.65 |
| ATLVT012XX0210 | 45144 | NGESAGATNDNT | −1.21 | −0.66 | −0.62 | −0.46 | ATLVT012XX0256 | 45190 | NGETAGATNDNA | −2.59 | −0.6 | 0.65 | −0.57 |
| ATLVT012XX0211 | 45145 | NGESAGSSNDNA | −0.16 | 1.87 | 0.35 | −0.09 | ATLVT012XX0257 | 45191 | NGETAGATNDNH | −2.26 | −0.26 | 0.72 | 1.34 |
| ATLVT012XX0212 | 45146 | NGESAGSSNDNH | −2.71 | −1 | −0.1 | 0.77 | ATLVT012XX0258 | 45192 | NGETAGATNDNT | −2 | 0.21 | 1.54 | −0.5 |
| ATLVT012XX0213 | 45147 | NGESAGSSNDNT | −0.05 | 0.61 | 0.75 | 1.42 | ATLVT012XX0259 | 45193 | NGETAGSSNDNA | −0.48 | −0.51 | 0.4 | 0.49 |
| ATLVT012XX0214 | 45148 | NGESAGSTNDNA | −1.45 | 0.08 | 0.02 | −0.36 | ATLVT012XX0260 | 45194 | NGETAGSSNDNH | −1.76 | −1.86 | −0.5 | −0.39 |
| ATLVT012XX0215 | 45149 | NGESAGSTNDNH | 0.09 | −1.2 | −0.21 | 0.13 | ATLVT012XX0261 | 45195 | NGETAGSSNDNT | 1.61 | −0.44 | −0.53 | −0.99 |
| ATLVT012XX0216 | 45150 | NGESAGSTNDNT | −0.04 | −0.33 | 0.6 | 0.37 | ATLVT012XX0262 | 45196 | NGETAGSTNDNA | −2.18 | −0.37 | 1.1 | −0.74 |
| ATLVT012XX0217 | 45151 | NGESGAASNDNA | −3.17 | 0.01 | 0.31 | −1.78 | ATLVT012XX0263 | 45197 | NGETAGSTNDNH | −1.89 | −1.97 | 0.18 | 0.99 |
| ATLVT012XX0218 | 45152 | NGESGAASNDNH | −2.39 | 1.26 | 0.44 | −2.58 | ATLVT012XX0264 | 45198 | NGETAGSTNDNT | −1.33 | −1.53 | −0.05 | −1.6 |
| ATLVT012XX0219 | 45153 | NGESGAASNDNT | −2.04 | −1.73 | −0.53 | −1.94 | ATLVT012XX0265 | 45199 | NGETGAASNDNA | −2.57 | −2 | 0.23 | −3.17 |
| ATLVT012XX0220 | 45154 | NGESGAATNDNA | −2.9 | −1.42 | −1.25 | −0.2 | ATLVT012XX0266 | 45200 | NGETGAASNDNH | −2.64 | −0.51 | 0.54 | −3.78 |
| ATLVT012XX0221 | 45155 | NGESGAATNDNH | −0.71 | −1.54 | −0.52 | 0.59 | ATLVT012XX0267 | 45201 | NGETGAASNDNT | −0.34 | −1.58 | −0.26 | −3.94 |
| ATLVT012XX0222 | 45156 | NGESGAATNDNT | −3.33 | −1.39 | −1.16 | −0.95 | ATLVT012XX0268 | 45202 | NGETGAATNDNA | −3.69 | −0.91 | −0.69 | −1.89 |
| ATLVT012XX0223 | 45157 | NGESGASSNDNA | −1.36 | −0.9 | 0.66 | −2.83 | ATLVT012XX0269 | 45203 | NGETGAATNDNH | −2.46 | 2.15 | 0.85 | 0.21 |
| ATLVT012XX0224 | 45158 | NGESGASSNDNH | −1.34 | −2.2 | 0.23 | 1.43 | ATLVT012XX0270 | 45204 | NGETGAATNDNT | −1.76 | 0.1 | 1.15 | −0.67 |
| ATLVT012XX0225 | 45159 | NGESGASSNDNT | −1.08 | −2.74 | 0.5 | −0.76 | ATLVT012XX0271 | 45205 | NGETGASSNDNA | −0.61 | −0.61 | 0.05 | 0.28 |
| ATLVT012XX0226 | 45160 | NGESGASTNDNA | 1.76 | 0.38 | 0.94 | −1.02 | ATLVT012XX0272 | 45206 | NGETGASSNDNH | −2.12 | −0.71 | 0.43 | 0.15 |
| ATLVT012XX0227 | 45161 | NGESGASTNDNH | 1.77 | −0.58 | 0.06 | −0.37 | ATLVT012XX0273 | 45207 | NGETGASSNDNT | −1.94 | 2.93 | −0.25 | −1.16 |
| ATLVT012XX0228 | 45162 | NGESGASTNDNT | 3.84 | 1.97 | 0.57 | −0.96 | ATLVT012XX0274 | 45208 | NGETGASTNDNA | 0.4 | −0.08 | 0.27 | −0.68 |
| ATLVT012XX0229 | 45163 | NGESGGASNDNA | 0.25 | 1.73 | 0.13 | −0.4 | ATLVT012XX0275 | 45209 | NGETGASTNDNH | −0.68 | −1.01 | 0.35 | 0.49 |
| ATLVT012XX0230 | 45164 | NGESGGASNDNH | −0.57 | −1.06 | −0.29 | −0.82 | ATLVT012XX0276 | 45210 | NGETGASTNDNT | −0.77 | −0.83 | 0.99 | 0.6 |
| ATLVT012XX0277 | 45211 | NGETGGASNDNA | −1.26 | −1.73 | −0.1 | 0.69 | ATLVT012XX0323 | 45257 | NGQAGASTNDNH | −2.47 | 1.31 | 0.51 | −0.58 |
| ATLVT012XX0278 | 45212 | NGETGGASNDNH | 3.99 | −1.16 | 0.25 | 0.86 | ATLVT012XX0324 | 45258 | NGQAGASTNDNT | −0.69 | −0.03 | 0.78 | −1.62 |
| ATLVT012XX0279 | 45213 | NGETGGASNDNT | 1.18 | −1.31 | 0.27 | −1 | ATLVT012XX0325 | 45259 | NGQAGGASNDNA | −1.9 | −1.02 | −0.65 | −1.46 |
| ATLVT012XX0280 | 45214 | NGETGGATNDNA | 3.31 | 1.18 | 0.88 | 0.15 | ATLVT012XX0326 | 45260 | NGQAGGASNDNH | 1.62 | 3.29 | −1.62 | −0.08 |
| ATLVT012XX0281 | 45215 | NGETGGATNDNH | 2.76 | 1.85 | 0.05 | 2.69 | ATLVT012XX0327 | 45261 | NGQAGGASNDNT | −1.02 | −1.02 | −0.83 | 0.78 |
| ATLVT012XX0282 | 45216 | NGETGGATNDNT | 1.55 | −0.87 | 0.34 | −0.2 | ATLVT012XX0328 | 45262 | NGQAGGATNDNA | 2.42 | 0.14 | 1.34 | 0.2 |
| ATLVT012XX0283 | 45217 | NGETGGSSNDNA | 0.85 | 2.52 | 0.28 | 0.68 | ATLVT012XX0329 | 45263 | NGQAGGATNDNH | 4.11 | 2.02 | 0.97 | 2.13 |
| ATLVT012XX0284 | 45218 | NGETGGSSNDNH | 1.46 | −0.23 | 0.19 | 0.08 | ATLVT012XX0330 | 45264 | NGQAGGATNDNT | 1.49 | −1.12 | 0.35 | 0.36 |
| ATLVT012XX0285 | 45219 | NGETGGSSNDNT | 2.4 | 1.69 | 0.51 | 1.54 | ATLVT012XX0331 | 45265 | NGQAGGSSNDNA | 0.49 | 2.27 | −0.64 | 2.04 |
| ATLVT012XX0286 | 45220 | NGETGGSTNDNA | 2.01 | 2.62 | 0.17 | 0.9 | ATLVT012XX0332 | 45266 | NGQAGGSSNDNH | −1.41 | −0.74 | 0.27 | 1.74 |
| ATLVT012XX0287 | 45221 | NGETGGSTNDNH | 1.56 | −0.7 | 0.33 | 1.15 | ATLVT012XX0333 | 45267 | NGQAGGSSNDNT | 1.48 | −0.55 | −0.33 | 2.82 |
| ATLVT012XX0288 | 45222 | NGETGGSTNDNT | 1.84 | 1.12 | 0.67 | 0.65 | ATLVT012XX0334 | 45268 | NGQAGGSTNDNA | 0.1 | 1.68 | −0.77 | 2 |
| ATLVT012XX0289 | 45223 | NGQAAAASNDNA | −2.94 | −1.33 | −0.48 | 0.53 | ATLVT012XX0335 | 45269 | NGQAGGSTNDNH | 4.14 | 0.08 | −0.34 | 2.79 |
| ATLVT012XX0290 | 45224 | NGQAAAASNDNH | −2.06 | −2.29 | 0.25 | −1.22 | ATLVT012XX0336 | 45270 | NGQAGGSTNDNT | 0.91 | −0.09 | 0.57 | 2.71 |
| ATLVT012XX0291 | 45225 | NGQAAAASNDNT | −2.11 | −2.29 | 0.8 | 0.84 | ATLVT012XX0337 | 45271 | NGQSAAASNDNA | 0.27 | 0.41 | −0.89 | −1.59 |
| ATLVT012XX0292 | 45226 | NGQAAAATNDNA | −3.46 | 2.05 | −0.23 | 0.18 | ATLVT012XX0338 | 45272 | NGQSAAASNDNH | 0.32 | −1.28 | 0.21 | 0.1 |
| ATLVT012XX0293 | 45227 | NGQAAAATNDNH | −1.49 | 0.36 | 0.77 | 2.3 | ATLVT012XX0339 | 45273 | NGQSAAASNDNT | −0.37 | −2.7 | 0.31 | 0.87 |
| ATLVT012XX0294 | 45228 | NGQAAAATNDNT | −3.04 | 3.24 | 0.63 | 0.29 | ATLVT012XX0340 | 45274 | NGQSAAATNDNA | 0.32 | −0.84 | 1.53 | −0.2 |
| ATLVT012XX0295 | 45229 | NGQAAASSNDNA | 1.6 | −0.59 | 0.9 | 1.04 | ATLVT012XX0341 | 45275 | NGQSAAATNDNH | −0.06 | −0.36 | −0.01 | 1.07 |
| ATLVT012XX0296 | 45230 | NGQAAASSNDNH | 0.07 | 1.01 | −0.89 | −1.17 | ATLVT012XX0342 | 45276 | NGQSAAATNDNT | −0.25 | 0.6 | 0.76 | 2 |
| ATLVT012XX0297 | 45231 | NGQAAASSNDNT | 0.89 | 1.17 | −0.54 | −0.36 | ATLVT012XX0343 | 45277 | NGQSAASSNDNA | −0.32 | −1.54 | 0.22 | −0.52 |
| ATLVT012XX0298 | 45232 | NGQAAASTNDNA | 0.74 | −1.33 | −0.11 | −1.72 | ATLVT012XX0344 | 45278 | NGQSAASSNDNH | −1.06 | −2.57 | 0.01 | −0.9 |
| ATLVT012XX0299 | 45233 | NGQAAASTNDNH | 3.33 | −2.03 | −0.67 | 1.79 | ATLVT012XX0345 | 45279 | NGQSAASSNDNT | −1.82 | −2.7 | 0.25 | 0.42 |
| ATLVT012XX0300 | 45234 | NGQAAASTNDNT | 1.24 | −1.08 | −0.47 | 0.28 | ATLVT012XX0346 | 45280 | NGQSAASTNDNA | −0.11 | 1.69 | −0.25 | 0.34 |
| ATLVT012XX0301 | 45235 | NGQAAGASNDNA | 0.37 | −0.39 | −0.65 | −2.92 | ATLVT012XX0347 | 45281 | NGQSAASTNDNH | −1.26 | 0.16 | 0.27 | −1.72 |
| ATLVT012XX0302 | 45236 | NGQAAGASNDNH | −0.49 | 0.57 | −1.37 | −0.92 | ATLVT012XX0348 | 45282 | NGQSAASTNDNT | −2.28 | −0.07 | −0.71 | 0.12 |
| ATLVT012XX0303 | 45237 | NGQAAGASNDNT | −0.85 | 0.44 | −0.2 | −2.01 | ATLVT012XX0349 | 45283 | NGQSAGASNDNA | −2.11 | −2.59 | −0.02 | −0.83 |
| ATLVT012XX0304 | 45238 | NGQAAGATNDNA | −3.15 | 0.05 | −0.76 | −0.85 | ATLVT012XX0350 | 45284 | NGQSAGASNDNH | −1.08 | −2.42 | −1.14 | 1.85 |
| ATLVT012XX0305 | 45239 | NGQAAGATNDNH | −1.37 | 3.39 | −1.26 | 0.44 | ATLVT012XX0351 | 45285 | NGQSAGASNDNT | −1.5 | −2.23 | −0.71 | 1.01 |
| ATLVT012XX0306 | 45240 | NGQAAGATNDNT | −3.19 | 0.12 | −1.43 | −1.56 | ATLVT012XX0352 | 45286 | NGQSAGATNDNA | −1.65 | −2.87 | −0.73 | 0.19 |
| ATLVT012XX0307 | 45241 | NGQAAGSSNDNA | −1.35 | −0.85 | −3.03 | −0.24 | ATLVT012XX0353 | 45287 | NGQSAGATNDNH | −0.41 | −0.97 | −0.85 | 2.07 |
| ATLVT012XX0308 | 45242 | NGQAAGSSNDNH | −0.78 | −1.53 | −0.15 | 0.72 | ATLVT012XX0354 | 45288 | NGQSAGATNDNT | −0.78 | −1.3 | −1.3 | 0.43 |
| ATLVT012XX0309 | 45243 | NGQAAGSSNDNT | −1.18 | −1.23 | −1.14 | −1.27 | ATLVT012XX0355 | 45289 | NGQSAGSSNDNA | 2.1 | −1.86 | −0.67 | 1 |
| ATLVT012XX0310 | 45244 | NGQAAGSTNDNA | −3.18 | −1.83 | −1.54 | 0.16 | ATLVT012XX0356 | 45290 | NGQSAGSSNDNH | 1.35 | 1.16 | −0.35 | 0.79 |
| ATLVT012XX0311 | 45245 | NGQAAGSTNDNH | −0.59 | −0.65 | −1.03 | −1.33 | ATLVT012XX0357 | 45291 | NGQSAGSSNDNT | 1.79 | −0.47 | −0.13 | 0.28 |
| ATLVT012XX0312 | 45246 | NGQAAGSTNDNT | −1.46 | −0.97 | −1.34 | 0.19 | ATLVT012XX0358 | 45292 | NGQSAGSTNDNA | 0.15 | −1.11 | −0.84 | 1.15 |
| ATLVT012XX0313 | 45247 | NGQAGAASNDNA | −2.54 | −2.56 | 0 | 1.14 | ATLVT012XX0359 | 45293 | NGQSAGSTNDNH | 1.48 | −2.25 | −0.7 | 1.94 |
| ATLVT012XX0314 | 45248 | NGQAGAASNDNH | −1.54 | −2.97 | 0.39 | −0.52 | ATLVT012XX0360 | 45294 | NGQSAGSTNDNT | 0.15 | −2.53 | 0.74 | 0.34 |
| ATLVT012XX0315 | 45249 | NGQAGAASNDNT | −1.19 | −1.95 | 0.26 | 2.23 | ATLVT012XX0361 | 45295 | NGQSGAASNDNA | −2.1 | 0.45 | −0.23 | −1.78 |
| ATLVT012XX0316 | 45250 | NGQAGAATNDNA | −0.79 | −1.4 | −2.8 | −0.67 | ATLVT012XX0362 | 45296 | NGQSGAASNDNH | −1.98 | −0.84 | −1.22 | −1.75 |
| ATLVT012XX0317 | 45251 | NGQAGAATNDNH | −1.41 | −0.91 | −0.48 | 0.65 | ATLVT012XX0363 | 45297 | NGQSGAASNDNT | −0.67 | −1.46 | −0.8 | −2.11 |
| ATLVT012XX0318 | 45252 | NGQAGAATNDNT | −0.91 | 0.89 | −1.44 | 1.44 | ATLVT012XX0364 | 45298 | NGQSGAATNDNA | −2.18 | 1.96 | 0.7 | −2.05 |
| ATLVT012XX0319 | 45253 | NGQAGASSNDNA | −0.94 | −1.35 | 0.91 | 1.06 | ATLVT012XX0365 | 45299 | NGQSGAATNDNH | −1.35 | 0.17 | −0.42 | 0.87 |
| ATLVT012XX0320 | 45254 | NGQAGASSNDNH | −1.28 | −0.47 | 0.88 | −0.6 | ATLVT012XX0366 | 45300 | NGQSGAATNDNT | −0.88 | −0.85 | 0.49 | −1.08 |
| ATLVT012XX0321 | 45255 | NGQAGASSNDNT | −0.03 | 0.86 | 0.86 | 1.87 | ATLVT012XX0367 | 45301 | NGQSGASSNDNA | 1.71 | 1.16 | 0.25 | 2 |
| ATLVT012XX0322 | 45256 | NGQAGASTNDNA | −0.86 | −1.88 | 0.76 | −0.84 | ATLVT012XX0368 | 45302 | NGQSGASSNDNH | 2.49 | 3.47 | 0.97 | 0.5 |
| ATLVT012XX0369 | 45303 | NGQSGASSNDNT | 1.08 | −0.87 | 0.65 | −0.41 | ATLVT012XX0415 | 45349 | NGQTGASSNDNA | 2.11 | 0.71 | 0.49 | 0.02 |
| ATLVT012XX0370 | 45304 | NGQSGASTNDNA | −1.17 | 1.82 | 0.52 | −1.06 | ATLVT012XX0416 | 45350 | NGQTGASSNDNH | 1.53 | 0.37 | 0.97 | 1.16 |
| ATLVT012XX0371 | 45305 | NGQSGASTNDNH | −0.11 | −0.44 | 1.5 | 0.06 | ATLVT012XX0417 | 45351 | NGQTGASSNDNT | −0.04 | 0.3 | −0.05 | 0.45 |
| ATLVT012XX0372 | 45306 | NGQSGASTNDNT | 0.93 | −0.5 | 0.63 | 0.48 | ATLVT012XX0418 | 45352 | NGQTGASTNDNA | −1.22 | −0.31 | 0.66 | 0.16 |
| ATLVT012XX0373 | 45307 | NGQSGGASNDNA | 2.5 | 1.97 | 0.32 | 1.4 | ATLVT012XX0419 | 45353 | NGQTGASTNDNH | 1.42 | 0.04 | 0.84 | 1.91 |
| ATLVT012XX0374 | 45308 | NGQSGGASNDNH | 1.06 | 1.21 | 0.1 | 1.53 | ATLVT012XX0420 | 45354 | NGQTGASTNDNT | 0.47 | −1.27 | 0.01 | 2.02 |
| ATLVT012XX0375 | 45309 | NGQSGGASNDNT | 0.48 | 1.46 | 0.26 | 1.71 | ATLVT012XX0421 | 45355 | NGQTGGASNDNA | 1.66 | 0.35 | 0.39 | 2.45 |
| ATLVT012XX0376 | 45310 | NGQSGGATNDNA | 1.12 | −0.49 | 0.72 | 2.26 | ATLVT012XX0422 | 45356 | NGQTGGASNDNH | 1.78 | 0.51 | 1.09 | 3.38 |
| ATLVT012XX0377 | 45311 | NGQSGGATNDNH | 3.41 | 3.25 | 1.88 | 1.98 | ATLVT012XX0423 | 45357 | NGQTGGASNDNT | 0.5 | 1.01 | 0.7 | 1.98 |
| ATLVT012XX0378 | 45312 | NGQSGGATNDNT | 0.96 | 1.7 | 0.83 | 0.98 | ATLVT012XX0424 | 45358 | NGQTGGATNDNA | 1.22 | 2.2 | 0.97 | 1.91 |
| ATLVT012XX0379 | 45313 | NGQSGGSSNDNA | 1.48 | 0.5 | 1.4 | 1.24 | ATLVT012XX0425 | 45359 | NGQTGGATNDNH | 4.07 | 4.83 | 1.62 | 3.8 |
| ATLVT012XX0380 | 45314 | NGQSGGSSNDNH | 0.87 | −0.54 | 0.53 | 2.13 | ATLVT012XX0426 | 45360 | NGQTGGATNDNT | 1.54 | 1.99 | 1.09 | 1.03 |
| ATLVT012XX0381 | 45315 | NGQSGGSSNDNT | 0.54 | 2.84 | 0.34 | 1.79 | ATLVT012XX0427 | 45361 | NGQTGGSSNDNA | 1.24 | 1.35 | 1.2 | 0 |
| ATLVT012XX0382 | 45316 | NGQSGGSTNDNA | 0.96 | 2.68 | 0.48 | 2.74 | ATLVT012XX0428 | 45362 | NGQTGGSSNDNH | −0.27 | −0.27 | 0.38 | 2.07 |
| ATLVT012XX0383 | 45317 | NGQSGGSTNDNH | 3.33 | 2.37 | 0.47 | 1.36 | ATLVT012XX0429 | 45363 | NGQTGGSSNDNT | 2.44 | 2.05 | 1.46 | 1.79 |
| ATLVT012XX0384 | 45318 | NGQSGGSTNDNT | 2.35 | 3.14 | 0.71 | 2.79 | ATLVT012XX0430 | 45364 | NGQTGGSTNDNA | 0.9 | 1.8 | 0.58 | 1.34 |
| ATLVT012XX0385 | 45319 | NGQTAAASNDNA | 1.28 | 0.23 | 1.3 | 1.63 | ATLVT012XX0431 | 45365 | NGQTGGSTNDNH | 0.55 | 3.32 | 0.29 | 2.81 |
| ATLVT012XX0386 | 45320 | NGQTAAASNDNH | 0.9 | 0.74 | 0.82 | 1.84 | ATLVT012XX0432 | 45366 | NGQTGGSTNDNT | 1.8 | 3.01 | −0.02 | 2.71 |
| ATLVT012XX0387 | 45321 | NGQTAAASNDNT | −0.89 | −0.76 | 0.86 | 1.05 | ATLVT012XX0433 | 45367 | NGTAAAASNDNA | 0.86 | 2.43 | −0.08 | −0.19 |
| ATLVT012XX0388 | 45322 | NGQTAAATNDNA | 0.88 | 1.65 | 0.82 | −0.24 | ATLVT012XX0434 | 45368 | NGTAAAASNDNH | −0.11 | −0.62 | −0.17 | 1.77 |
| ATLVT012XX0389 | 45323 | NGQTAAATNDNH | 1.16 | 1.36 | 0.81 | 0.46 | ATLVT012XX0435 | 45369 | NGTAAAASNDNT | 1.18 | 0.46 | −0.9 | −0.82 |
| ATLVT012XX0390 | 45324 | NGQTAAATNDNT | 1.58 | 0.61 | 0.18 | −1.1 | ATLVT012XX0436 | 45370 | NGTAAAATNDNA | −0.13 | 1.62 | 0.3 | −0.07 |
| ATLVT012XX0391 | 45325 | NGQTAASSNDNA | 0.25 | 0.41 | −0.01 | 1.05 | ATLVT012XX0437 | 45371 | NGTAAAATNDNH | 1.93 | 4.61 | 0.92 | 1.22 |
| ATLVT012XX0392 | 45326 | NGQTAASSNDNH | 2.19 | −0.77 | 0.15 | −0.3 | ATLVT012XX0438 | 45372 | NGTAAAATNDNT | 2.36 | 1.14 | 0.62 | 1.94 |
| ATLVT012XX0393 | 45327 | NGQTAASSNDNT | −0.53 | −0.62 | 1.54 | −2.17 | ATLVT012XX0439 | 45373 | NGTAAASSNDNA | 2.73 | 1 | 0.06 | 0.97 |
| ATLVT012XX0394 | 45328 | NGQTAASTNDNA | 1.38 | 4.24 | −0.45 | 2.43 | ATLVT012XX0440 | 45374 | NGTAAASSNDNH | 0.61 | 1.22 | −0.13 | −0.53 |
| ATLVT012XX0395 | 45329 | NGQTAASTNDNH | 1.58 | 4.48 | 1.29 | −0.11 | ATLVT012XX0441 | 45375 | NGTAAASSNDNT | 0.55 | 1.26 | 1.01 | 0.11 |
| ATLVT012XX0396 | 45330 | NGQTAASTNDNT | 2.35 | 1.01 | 1.06 | 0.31 | ATLVT012XX0442 | 45376 | NGTAAASTNDNA | −1.6 | 0.62 | −0.65 | −0.3 |
| ATLVT012XX0397 | 45331 | NGQTAGASNDNA | 1.47 | 2.48 | 0.31 | 0.84 | ATLVT012XX0443 | 45377 | NGTAAASTNDNH | −1.42 | 1.21 | −1.18 | −0.49 |
| ATLVT012XX0398 | 45332 | NGQTAGASNDNH | −1.88 | 0.93 | 0.23 | −0.16 | ATLVT012XX0444 | 45378 | NGTAAASTNDNT | −1.55 | 2.18 | −0.56 | 1.35 |
| ATLVT012XX0399 | 45333 | NGQTAGASNDNT | −1.51 | 2.45 | −1.16 | 1.27 | ATLVT012XX0445 | 45379 | NGTAAGASNDNA | 0.34 | 1.96 | −2.12 | −0.12 |
| ATLVT012XX0400 | 45334 | NGQTAGATNDNA | −0.85 | 0.13 | 0.08 | 2.19 | ATLVT012XX0446 | 45380 | NGTAAGASNDNH | 0 | 3 | −1.51 | 0.51 |
| ATLVT012XX0401 | 45335 | NGQTAGATNDNH | 0.71 | 1.53 | 0.58 | 1.2 | ATLVT012XX0447 | 45381 | NGTAAGASNDNT | 2.36 | 1.26 | −1.78 | −0.88 |
| ATLVT012XX0402 | 45336 | NGQTAGATNDNT | −0.57 | 1.59 | 0.16 | 1.03 | ATLVT012XX0448 | 45382 | NGTAAGATNDNA | 0.26 | −0.21 | −0.97 | 1.39 |
| ATLVT012XX0403 | 45337 | NGQTAGSSNDNA | 2.05 | 1.53 | 0.2 | −0.23 | ATLVT012XX0449 | 45383 | NGTAAGATNDNH | 1.3 | 2.08 | 0.19 | 1.53 |
| ATLVT012XX0404 | 45338 | NGQTAGSSNDNH | −1.53 | 2.02 | 1.02 | 1.55 | ATLVT012XX0450 | 43384 | NGTAAGATNDNT | 0.33 | 0.13 | −0.86 | 0.91 |
| ATLVT012XX0405 | 45339 | NGQTAGSSNDNT | 0.04 | 2.45 | −0.73 | 0.34 | ATLVT012XX0451 | 45385 | NGTAAGSSNDNA | 1.87 | −0.88 | −0.27 | −1.48 |
| ATLVT012XX0406 | 45340 | NGQTAGSTNDNA | 1.5 | 0.83 | 0.67 | 0.91 | ATTVT012XX0452 | 45386 | NGTAAGSSNDNH | −1.09 | −1.9 | −1.02 | 0.84 |
| ATLVT012XX0407 | 45341 | NGQTAGSTNDNH | 1.33 | 2.07 | −0.29 | −0.04 | ATLVT012XX0453 | 45387 | NGTAAGSSNDNT | 0.56 | 1.54 | −0.49 | 0.93 |
| ATLVT012XX0408 | 45342 | NGQTAGSTNDNT | 2.66 | 0.96 | 1.05 | −0.52 | ATLVT012XX0454 | 45388 | NGTAAGSTNDNA | 0.28 | 0.1 | −0.12 | 1.85 |
| ATLVT012XX0409 | 45343 | NGQTGAASNDNA | −0.8 | −1.47 | −1.28 | −0.8 | ATLVT012XX0455 | 45389 | NGTAAGSTNDNE | 2.02 | 1.98 | −1.41 | −0.01 |
| ATLVT012XX0410 | 45344 | NGQTGAASNDNH | −0.98 | −0.51 | −0.02 | 1.57 | ATLVT012XX0456 | 45390 | NGTAAGSTNDNT | 0.33 | 0.45 | −1.97 | 0.92 |
| ATLVT012XX0411 | 45345 | NGQTGAASNDNT | 2.48 | 2.46 | 0.48 | 0.59 | ATLVT012XX0457 | 45391 | NGTAGAASNDNA | 0.21 | −1.43 | −1.99 | −0.33 |
| ATLVT012XX0412 | 45346 | NGQTGAATNDNA | 0.66 | −0.2 | −0.06 | −0.73 | ATLVT012XX0458 | 45392 | NGTAGAASNDNH | 1.43 | 0.19 | −1.7 | −0.91 |
| ATLVT012XX0413 | 45347 | NGQTGAATNDNH | 3.16 | −1.4 | 0.08 | 1.83 | ATLVT012XX0459 | 45393 | NGTAGAASNDNT | 2.17 | −1.99 | −2.6 | −1.69 |
| ATLVT012XX0414 | 45348 | NGQTGAATNDNT | 1.15 | −0.16 | −0.32 | 0.78 | ATLVT012XX0460 | 45394 | NGTAGAATNDNA | 0.53 | −0.76 | −0.38 | −1.68 |
| ATLVT012XX0461 | 45395 | NGTAGAATNDNH | −0.91 | −0.43 | 1.64 | −0.32 | ATLVT012XX0507 | 45441 | NGTSGAASNDNT | −1.57 | −2.33 | 0.4 | −0.24 |
| ATLVT012XX0462 | 45396 | NGTAGAATNDNT | −0.18 | 0.42 | 0.49 | −1.14 | ATLVT012XX0508 | 45442 | NGTSGAATNDNA | −0.66 | 0.21 | −0.5 | 0.42 |
| ATLVT012XX0463 | 45397 | NGTAGASSNDNA | −0.4 | 2.25 | 0.01 | 1.43 | ATLVT012XX0509 | 45443 | NGTSGAATNDNH | 0.2 | 2.13 | 0.95 | 1.8 |
| ATLVT012XX0464 | 45398 | NGTAGASSNDNH | 0.2 | 0.07 | −0.11 | 0.73 | ATLVT012XX0510 | 45444 | NGTSGAATNDNT | 0.68 | 1.28 | −0.2 | −0.06 |
| ATLVT012XX0465 | 45399 | NGTAGASSNDNT | 1.42 | 0.49 | −0.25 | 0.8 | ATLVT012XX0511 | 45445 | NGTSGASSNDNA | 2.34 | 1.7 | 0.41 | 1.21 |
| ATLVT012XX0466 | 45400 | NGTAGASTNDNA | −0.05 | −0.24 | −0.5 | 3.43 | ATLVT012XX0512 | 45446 | NGTSGASSNDNH | 1.92 | −0.13 | 0.68 | 0.57 |
| ATLVT012XX0467 | 45401 | NGTAGASTNDNH | 0.05 | 0.47 | −1.05 | 2.51 | ATLVT012XX0513 | 45447 | NGTSGASSNDNT | 1.81 | 0.73 | 0.02 | −0.22 |
| ATLVT012XX0468 | 45402 | NGTAGASTNDNT | 0.85 | −0.37 | −0.25 | 1.93 | ATLVT012XX0514 | 45448 | NGTSGASTNDNA | 0.83 | 1.65 | 0.9 | 1.8 |
| ATLVT012XX0469 | 45403 | NGTAGGASNDNA | 4.28 | 4.8 | 0.76 | 2.12 | ATLVT012XX0515 | 45449 | NGTSGASTNDNH | 2.17 | 1 | 0.63 | 1.56 |
| ATLVT012XX0470 | 45404 | NGTAGGASNDNH | 3.45 | 4.99 | 0.46 | 3.6 | ATLVT012XX0516 | 45450 | NGTSGASTNDNT | 2.6 | 2.79 | 1.11 | 1.94 |
| ATLVT012XX0471 | 45405 | NGTAGGASNDNT | 5.37 | 7.19 | 1.25 | 1.82 | ATLVT012XX0517 | 45451 | NGTSGGASNDNA | 3.95 | 3.64 | 1.21 | 3.84 |
| ATLVT012XX0472 | 45406 | NGTAGGATNDNA | 1.76 | 1.99 | −0.68 | 1.79 | ATLVT012XX0518 | 45452 | NGTSGGASNDNH | 4.44 | 5.62 | 0.3 | 2.91 |
| ATLVT012XX0473 | 45407 | NGTAGGATNDNH | 4.54 | 3.92 | 1.14 | 2.75 | ATLVT012XX0519 | 45453 | NGTSGGASNDNT | 6.57 | 7.36 | 1.74 | 4.46 |
| ATLVT012XX0474 | 45408 | NGTAGGATNDNT | 4.67 | 6.16 | −1.6 | 1.88 | ATLVT012XX0520 | 45454 | NGTSGGATNDNA | 3.87 | 3.84 | 0.7 | 3.46 |
| ATLVT012XX0475 | 45409 | NGTAGGSSNDNA | 6.36 | 9.13 | 1.27 | 4.03 | ATLVT012XX0521 | 45455 | NGTSGGATNDNH | 5.52 | 5.35 | 1.58 | 4.14 |
| ATLVT012XX0476 | 45410 | NGTAGGSSNDNH | 5.12 | 3.94 | 0.34 | 3.2 | ATLVT012XX0522 | 45456 | NGTSGGATNDNT | 5.43 | 7.85 | 0.93 | 3.84 |
| ATLVT012XX0477 | 45411 | NGTAGGSSNDNT | 9.18 | 10.72 | 2.23 | 4.69 | ATLVT012XX0523 | 45457 | NGTSGGSSNDNA | 6.62 | 9.58 | 1.28 | 4.6 |
| ATLVT012XX0478 | 45412 | NGTAGGSTNDNA | 6.6 | 8.64 | 0.08 | 5.06 | ATLVT012XX0524 | 45458 | NGTSGGSSNDNH | 5.1 | 5.92 | 1.27 | 2.91 |
| ATLVT012XX0479 | 45413 | NGTAGGSTNDNH | 5.11 | 7.63 | −0.03 | 3.07 | ATLVT012XX0525 | 45459 | NGTSGGSSNDNT | 8.4 | 10.5 | 1.73 | 4.85 |
| ATLVT012XX0480 | 45414 | NGTAGGSTNDNT | 9.3 | 10.09 | 0.43 | 5.26 | ATLVT012XX0526 | 45460 | NGTSGGSTNDNA | 7.25 | 8.83 | 1.85 | 4.2 |
| ATLVT012XX0481 | 45415 | NGTSAAASNDNA | 0.9 | 1.8 | −2.78 | −1.83 | ATLVT012XX0527 | 45461 | NGTSGGSTNDNH | 6.45 | 7.14 | 1.24 | 3.86 |
| ATLVT012XX0482 | 45416 | NGTSAAASNDNH | −0.6 | 1.15 | −1.44 | 0.71 | ATLVT012XX0528 | 45462 | NGTSGGSTNDNT | 9.49 | 11.91 | 1.72 | 5.11 |
| ATLVT012XX0483 | 45417 | NGTSAAASNDNT | −0.04 | 0.08 | −0.15 | 1.58 | ATLVT012XX0529 | 45463 | NGTTAAASNDNA | 1. | 3.03 | 2.15 | 1.56 |
| ATLVT012XX0484 | 45418 | NGTSAAATNDNA | −1.53 | −0.01 | −0.54 | 0.66 | ATLVT012XX0530 | 45464 | NGTTAAASNDNH | −0.26 | 2.95 | 0.97 | 0.68 |
| ATLVT012XX0485 | 45419 | NGTSAAATNDNH | −0.59 | −0.07 | 0.58 | 0.81 | ATLVT012XX0531 | 45465 | NGTTAAASNDNT | −0.17 | 0.06 | 0.79 | 0.19 |
| ATLVT012XX0486 | 45420 | NGTSAAATNDNT | 0.82 | 0.02 | −0.28 | 1.36 | ATLVT012XX0532 | 45466 | NGTTAAATNDNA | 1.75 | 0.54 | 0.46 | 0.7 |
| ATLVT012XX0487 | 45421 | NGTSAASSNDNA | 1.35 | 1.02 | −1.51 | −0.01 | ATLVT012XX0533 | 45467 | NGTTAAATNDNH | 2.51 | 1.08 | 1.32 | 2.27 |
| ATLVT012XX0488 | 45422 | NGTSAASSNDNH | −0.41 | −0.64 | −0.77 | −0.06 | ATLVT012XX0534 | 45468 | NGTTAAATNDNT | 4.07 | 0.75 | 0.24 | 1.78 |
| ATLVT012XX0489 | 45423 | NGTSAASSNDNT | 1.71 | 0.14 | −0.07 | −0.18 | ATLVT012XX0535 | 45469 | NGTTAASSNDNA | −0.54 | −0.95 | 0.58 | −0.84 |
| ATLVT012XX0490 | 45424 | NGTSAASTNDNA | 1.31 | 1.72 | 0.78 | −0.14 | ATTVT012XX0536 | 45470 | NGTTAASSNDNH | 0.59 | 0.36 | 0.92 | 0.39 |
| ATLVT012XX0491 | 45425 | NGTSAASTNDNH | −0.55 | 3.83 | −0.85 | 1.19 | ATLVT012XX0537 | 45471 | NGTTAASSNDNT | 1.84 | 2.43 | 0.97 | 1.02 |
| ATLVT012XX0492 | 45426 | NGTSAASTNDNT | 0.78 | 0.35 | 0.02 | 0.26 | ATLVT012XX0538 | 45472 | NGTTAASTNDNA | −1.03 | 0.58 | −0.27 | 0.68 |
| ATLVT012XX0493 | 45427 | NGTSAGASNDNA | 1.51 | 4.07 | 0.55 | 0.91 | ATLVT012XX0539 | 45473 | NGTTAASTNDNH | −1.15 | 1.68 | 0.7 | 0.54 |
| ATLVT012XX0494 | 45428 | NGTSAGASNDNH | 0.31 | 1.8 | 0.12 | 0.96 | ATLVT012XX0540 | 45474 | NGTTAASTNDNT | 0.05 | 0.82 | 0.86 | 1.2 |
| ATLVT012XX0495 | 45429 | NGTSAGASNDNT | 1.06 | 1.63 | 1.06 | 2.54 | ATLVT012XX0541 | 45475 | NGTTAGASNDNA | 1.18 | 1.47 | 0.5 | 2.89 |
| ATLVT012XX0496 | 45430 | NGTSAGATNDNA | −1.05 | 0.83 | 1.01 | 0.1 | ATLVT012XX0542 | 45476 | NGTTAGASNDNH | 0.83 | 0.99 | 0.91 | 2.79 |
| ATLVT012XX0497 | 45431 | NGTSAGATNDNH | 0.88 | 4.41 | −0.82 | 2.45 | ATLVT012XX0543 | 45477 | NGTTAGASNDNT | 1.46 | 2.16 | 0.99 | 2.19 |
| ATLVT012XX0498 | 45432 | NGTSAGATNDNT | 0.86 | 1.23 | 0.6 | 1.4 | ATLVT012XX0544 | 45478 | NGTTAGATNDNA | −2.1 | 1.4 | 0.77 | 2.04 |
| ATLVT012XX0499 | 45433 | NGTSAGSSNDNA | 0.09 | 0.73 | 0.24 | 1.82 | ATLVT012XX0545 | 45479 | NGTTAGATNDNH | 0.22 | 1.5 | 1.38 | 3.46 |
| ATLVT012XX0500 | 45434 | NGTSAGSSNDNH | −0.58 | 0.14 | 0.55 | −0.51 | ATLVT012XX0546 | 45480 | NGTTAGATNDNT | −0.4 | 0.82 | 0.33 | 3.12 |
| ATLVT012XX0501 | 45435 | NGTSAGSSNDNT | 2.83 | 3.83 | 1.66 | 3.56 | ATLVT012XX0547 | 45481 | NGTTAGSSNDNA | 1.65 | 1.23 | −0.01 | 2.25 |
| ATLVT012XX0502 | 45436 | NGTSAGSTNDNA | 2.69 | 2.06 | 0.73 | 0.87 | ATLVT012XX0548 | 45482 | NGTTAGSSNDNH | 0.1 | −1.12 | 0.21 | 0.06 |
| ATLVT012XX0503 | 45437 | NGTSAGSTNDNH | 2.15 | 2.73 | 0.16 | 1.7 | ATLVT012XX0549 | 45483 | NGTTAGSSNDNT | 1.51 | 1.14 | 0.54 | 2.76 |
| ATLVT012XX0504 | 45438 | NGTSAGSTNDNT | 0.7 | 1.7 | 0.93 | 2.36 | ATLVT012XX0550 | 45484 | NGTTAGSTNDNA | 0.91 | 1.89 | 1.35 | 1.96 |
| ATLVT012XX0505 | 45439 | NGTSGAASNDNA | −0.95 | −1.95 | −1.02 | −0.22 | ATLVT012XX0551 | 45485 | NGTTAGSTNDNH | 1.16 | 1.06 | −0.05 | 2.1 |
| ATLVT012XX0506 | 45440 | NGTSGAASNDNH | 0.06 | −0.27 | 1.06 | −0.5 | ATLVT012XX0552 | 45486 | NGTTAGSTNDNT | 3.38 | 2.98 | 1.39 | 3.38 |
| ATLVT012XX0553 | 45487 | NGTTGAASNDNA | 0.11 | −0.72 | 0.05 | −0.41 | ATTVT012XX0599 | 45533 | NSAAAGSTNDNH | −1.11 | −0.77 | −0.7 | 1.18 |
| ATLVT012XX0554 | 454SS | NGTTGAASNDNH | −1.31 | −0.62 | 1.51 | −0.43 | ATLVT012XX0600 | 45534 | NSAAAGSTNDNT | 1.07 | −0.16 | −1.71 | −0.21 |
| ATLVT012XX0555 | 45489 | NGTTGAASNDNT | −0.99 | 1.45 | −0.54 | −0.89 | ATLVT012XX0601 | 45535 | NSAAGAASNDNA | −3.94 | 1.93 | −2.11 | −3.39 |
| ATLVT012XX0556 | 45490 | NGTTGAATNDNA | −0.95 | 0.09 | −0.09 | 0.36 | ATLVT012XX0602 | 45536 | NSAAGAASNDNH | 0.32 | 4.31 | 0.16 | 0.51 |
| ATLVT012XX0557 | 45491 | NGTTGAATNDNH | −0.16 | 2.12 | −0.59 | 1.8 | ATLVT012XX0603 | 45537 | NSAAGAASNDNT | −3.09 | 1.2 | −2.86 | −1.64 |
| ATLVT012XX0558 | 45492 | NGTTGAATNDNT | −0.01 | 1.91 | −0.12 | 0.53 | ATLVT012XX0604 | 45538 | NSAAGAATNDNA | −1.62 | 3.23 | −1.59 | −0.73 |
| ATLVT012XX0559 | 45493 | NGTTGASSNDNA | 0.51 | 3.92 | 1.86 | 0.27 | ATLVT012XX0605 | 45539 | NSAAGAATNDNH | 1.39 | 5.39 | 0.63 | 2.63 |
| ATLVT012XX0560 | 45494 | NGTTGASSNDNH | 0.85 | 1.65 | 0.48 | 1.46 | ATLVT012XX0606 | 45540 | NSAAGAATNDNT | −4.51 | −0.23 | −1.06 | −1.9 |
| ATLVT012XX0561 | 45495 | NGTTGASSNDNT | 2.2 | 2.44 | 0.11 | 2.28 | ATLVT012XX0607 | 45541 | NSAAGASSNDNA | −4.52 | −0.09 | −1.57 | −1.71 |
| ATLVT012XX0562 | 45496 | NGTTGASTNDNA | 0.03 | 0.76 | 1.22 | 1.79 | ATLVT012XX0608 | 45542 | NSAAGASSNDNH | −2.61 | −1.41 | −2.01 | −1.84 |
| ATLVT012XX0563 | 45497 | NGTTGASTNDNH | 1.35 | 1.1 | 0.16 | 0.77 | ATLVT012XX0609 | 45543 | NSAAGASSNDNT | −3.63 | −0.73 | −1.56 | −1.87 |
| ATLVT012XX0564 | 45498 | NGTTGASTNDNT | 1.34 | −0.5 | 0.54 | 2.01 | ATLVT012XX0610 | 45544 | NSAAGASTNDNA | −0.13 | 0.65 | −1.51 | −0.38 |
| ATLVT012XX0565 | 45499 | NGTTGGASNDNA | 2.04 | 2.98 | 2.07 | 3.78 | ATLVT012XX0611 | 45545 | NSAAGASTNDNH | −1.34 | 0.15 | −1.66 | −1.15 |
| ATLVT012XX0566 | 45500 | NGTTGGASNDNH | 2.68 | 6.21 | 1.31 | 3.59 | ATLVT012XX0612 | 45546 | NSAAGASTNDNT | −0.36 | 0.58 | −1.22 | −1.69 |
| ATLVT012XX0567 | 45501 | NGTTGGASNDNT | 3.83 | 6.47 | 1.36 | 4.46 | ATLVT012XX0613 | 45547 | NSAAGGASNDNA | −1.94 | −0.13 | −2.01 | −1.98 |
| ATLVT012XX0568 | 45502 | NGTTGGATNDNA | 4.38 | 3.99 | 1.34 | 3.44 | ATLVT012XX0614 | 45548 | NSAAGGASNDNH | −0.26 | 1.5 | −1.74 | −0.94 |
| ATLVT012XX0569 | 45503 | NGTTGGATNDNH | 4.93 | 6.02 | 1.39 | 3.69 | ATLVT012XX0615 | 45549 | NSAAGGASNDNT | −0.72 | 1.47 | −1.22 | −0.85 |
| ATLVT012XX0570 | 45504 | NGTTGGATNDNT | 3.62 | 6.59 | 1.16 | 3.95 | ATLVT012XX0616 | 45550 | NSAAGGATNDNA | −3.7 | −0.69 | −2.42 | −0.55 |
| ATLVT012XX0571 | 45505 | NGTTGGSSNDNA | 5.88 | 7.98 | 0.95 | 4.78 | ATLVT012XX0617 | 45551 | NSAAGGATNDNE | 0.71 | 5.32 | −1.45 | 2.03 |
| ATLVT012XX0572 | 45506 | NGTTGGSSNDNH | 3.85 | 4 | 0.15 | 3.35 | ATLVT012XX0618 | 45552 | NSAAGGATNDNT | −0.27 | 4.06 | −1.89 | −0.47 |
| ATLVT012XX0573 | 45507 | NGTTGGSSNDNT | 7.33 | 9.68 | 1.6 | 4.74 | ATLVT012XX0619 | 45553 | NSAAGGSSNDNA | −0.76 | 1 | −0.79 | 0.39 |
| ATLVT012XX0574 | 45508 | NGTTGGSTNDNA | 6.86 | 8.55 | 1.77 | 4.15 | ATLVT012XX0620 | 45554 | NSAAGGSSNDNH | −0.36 | −0.64 | −1.37 | 1.25 |
| ATLVT012XX0575 | 45509 | NGTTGGSTNDNH | 4.83 | 5.76 | 0.69 | 3.65 | ATLVT012XX0621 | 45555 | NSAAGGSSNDNT | 0.96 | 1.93 | −1.25 | 0.09 |
| ATLVT012XX0576 | 45510 | NGTTGGSTNDNT | 8.35 | 9.78 | 1.72 | 5.03 | ATLVT012XX0622 | 45556 | NSAAGGSTNDNA | 0.67 | 3.52 | −0.12 | 0.71 |
| ATLVT012XX0577 | 45511 | NSAAAAASNDNA | −2.46 | −0.44 | 0.32 | 0.65 | ATLVT012XX0623 | 45557 | NSAAGGSTNDNH | −0.73 | 4.31 | 0.29 | 1.22 |
| ATLVT012XX0578 | 45512 | NSAAAAASNDNH | 0.59 | 2.03 | 1.19 | −1.01 | ATLVT012XX0624 | 45558 | NSAAGGSTNDNT | 0.18 | 1.75 | −0.06 | 3.68 |
| ATLVT012XX0579 | 45513 | NSAAAAASNDNT | −2.8 | 2.17 | −0.25 | −1.16 | ATLVT012XX0625 | 45559 | NSASAAASNDNA | −0.35 | 0.99 | −0.25 | −0.11 |
| ATLVT012XX0580 | 45514 | NSAAAAATNDNA | −1.67 | 1.81 | 1.39 | 1.46 | ATLVT012XX0626 | 45560 | NSASAAASNDNH | −1.03 | 0.7 | −0.89 | 0.8 |
| ATLVT012XX0581 | 45515 | NSAAAAATNDNR | −0.38 | 1.42 | 0.38 | 0.22 | ATLVT012XX0627 | 45561 | NSASAAASNDNT | 3.65 | −0.57 | −0.04 | 0.38 |
| ATLVT012XX0582 | 45516 | NSAAAAATNDNT | −1.1 | 2.03 | 0.37 | 0.98 | ATLVT012XX0628 | 45562 | NSASAAATNDNA | 0.09 | 4.89 | 0.45 | 1.82 |
| ATLVT012XX0583 | 45517 | NSAAAASSNDNA | −0.32 | −1.71 | −0.24 | −0.69 | ATLVT012XX0629 | 45563 | NSASAAATNDNH | −0.29 | 3.59 | −0.22 | 0.98 |
| ATLVT012XX0584 | 45518 | NSAAAASSNDNH | 2.65 | 2.38 | 0.4 | −0.86 | ATLVT012XX0630 | 45564 | NSASAAATNDNT | 0.7 | 0.36 | 0.49 | −0.14 |
| ATLVT012XX0585 | 45519 | NSAAAASSNDNT | 2.71 | −1.41 | −0.39 | 0.22 | ATLVT012XX0631 | 45565 | NSASAASSNDNA | −1.65 | −1.5 | 0.78 | −0.45 |
| ATLVT012XX0586 | 45520 | NSAAAASTNDNA | 1.32 | 1.7 | −0.58 | .1.13 | ATLVT012XX0632 | 45566 | NSASAASSNDNH | −1.02 | 0.55 | 1.39 | −1.41 |
| ATLVT012XX0587 | 45521 | NSAAAASTNDNH | 0.14 | 0.54 | 0.19 | −0.23 | ATLVT012XX0633 | 45567 | NSASAASSNDNT | −0.12 | −1.15 | 0.02 | −1.29 |
| ATLVT012XX0588 | 45522 | NSAAAASTNDNT | −0.34 | 1.12 | −0.07 | −1.28 | ATLVT012XX0634 | 45568 | NSASAASTNDNA | 1.63 | 1.06 | 0.83 | −0.52 |
| ATLVT012XX0589 | 45523 | NSAAAGASNDNA | 3.09 | −0.95 | −1.34 | −1.57 | ATLVT012XX0635 | 45569 | NSASAASTNDNH | −0.11 | .1.24 | −0.35 | −0.49 |
| ATLVT012XX0590 | 45524 | NSAAAGASNDNH | −2.38 | −1.94 | −1.04 | −0.32 | ATLVT012XX0636 | 45570 | NSASAASTNDNT | 0.89 | −1.73 | 0.77 | 1.16 |
| ATLVT012XX0591 | 45525 | NSAAAGASNDNT | −2.16 | −0.79 | −0.25 | −2.09 | ATLVT012XX0637 | 45571 | NSASAGASNDNA | −1.57 | −1.54 | 0.22 | −1.11 |
| ATLVT012XX0592 | 45526 | NSAAAGATNDNA | −1.67 | −2.1 | −1.31 | 0.08 | ATLVT012XX0638 | 45572 | NSASAGASNDNH | −0.71 | 1.24 | −1 | 0.42 |
| ATLVT012XX0593 | 45527 | NSAAAGATNDNH | −0.74 | −1.03 | 1.47 | 2.29 | ATLVT012XX0639 | 45573 | NSASAGASNDNT | −0.3 | −1.2 | −0.23 | 1.46 |
| ATLVT012XX0594 | 45528 | NSAAAGATNDNT | −1.39 | −2.45 | −0.18 | 1.8 | ATLVT012XX0640 | 45574 | NSASAGATNDNA | 0.06 | −0.01 | 0.87 | 1.33 |
| ATLVT012XX0595 | 45529 | NSAAAGSSNDNA | −0.7 | −2.96 | −1.7 | −0.78 | ATLVT012XX0641 | 45575 | NSASAGATNDNH | −0.44 | 1.87 | 1.05 | 1.92 |
| ATLVT012XX0596 | 45530 | NSAAAGSSNDNH | −0.24 | −2.38 | −1.44 | 0.88 | ATLVT012XX0642 | 45576 | NSASAGATNDNT | −0.26 | −1.05 | −0.52 | 1.36 |
| ATLVT012XX0597 | 45531 | NSAAAGSSNDNT | −1.44 | −1.59 | −0.16 | −2.24 | ATLVT012XX0643 | 45577 | NSASAGSSNDNA | −0.89 | 0.29 | −1.48 | 0.44 |
| ATLVT012XX0598 | 45532 | NSAAAGSTNDNA | −1.71 | −1.08 | −1.15 | 0.15 | ATLVT012XX0644 | 45578 | NSASAGSSNDNH | −0.61 | 3.2 | 0.01 | −1.12 |
| ATLVT012XX0645 | 45579 | NSASAGSSNDNT | 0.61 | 0.73 | 0.77 | 0.63 | ATLVT012XX0691 | 45625 | NSATAGSSNDNA | 1.34 | 1.38 | −0.4 | −0.18 |
| ATLVT012XX0646 | 45580 | NSASAGSTNDNA | 1.73 | 1.33 | −0.08 | −0.53 | ATLVT012XX0692 | 45626 | NSATAGSSNDNH | −0.23 | 0.5 | 0.26 | 0.29 |
| ATLVT012XX0647 | 45581 | NSASAGSTNDNH | 1.55 | 1.83 | 0.96 | 0.78 | ATLVT012XX0693 | 45627 | NSATAGSSNDNT | 0.19 | 4.99 | 0.31 | −0.12 |
| ATLVT012XX0648 | 45582 | NSASAGSTNDNT | 1.63 | −0.37 | 0.26 | 0.48 | ATLVT012XX0694 | 45628 | NSATAGSTNDNA | 1.81 | 1.5 | 0.37 | 0.38 |
| ATLVT012XX0649 | 45583 | NSASGAASNDNA | −0.6 | 1.53 | −2.28 | 0.02 | ATLVT012XX0695 | 45629 | NSATAGSTNDNH | −0.88 | 2.49 | −0.06 | 1.44 |
| ATLVT012XX0650 | 45584 | NSASGAASNDNH | −1.52 | 0.71 | −0.97 | −0.27 | ATLVT012XX0696 | 45630 | NSATAGSTNDNT | −0.39 | 2.04 | −0.92 | 1.24 |
| ATLVT012XX0651 | 45585 | NSASGAASNDNT | 0.04 | 1.57 | −0.52 | −0.91 | ATLVT012XX0697 | 45631 | NSATGAASNDNA | 0.28 | −2.03 | −0.45 | −0.33 |
| ATLVT012XX0652 | 45586 | NSASGAATNDNA | −2.73 | 1.04 | −0.54 | −2.52 | ATLVT012XX0698 | 45632 | NSATGAASNDNH | 2.72 | −0.2 | 0.95 | 0.5 |
| ATLVT012XX0653 | 45587 | NSASGAATNDNH | −0.7 | 4.05 | 0.1 | 0.2 | ATTVT012XX0699 | 45633 | NSATGAASNDNT | 1.2 | −3.01 | −0.64 | −2.36 |
| ATLVT012XX0654 | 455SS | NSASGAATNDNT | −1.98 | 0.96 | −0.81 | −0.8 | ATLVT012XX0700 | 45634 | NSATGAATNDNA | −0.36 | −1.01 | −1.91 | −0.56 |
| ATLVT012XX0655 | 45589 | NSASGASSNDNA | −0.22 | 0.8 | 1.33 | −1.85 | ATLVT012XX0701 | 45635 | NSATGAATNDNH | 1.4 | 1.99 | 0.02 | 0.56 |
| ATLVT012XX0656 | 45590 | NSASGASSNDNH | 2.46 | 0.28 | 0.48 | −0.88 | ATLVT012XX0702 | 45636 | NSATGAATNDNT | −1.33 | −2.24 | −1.02 | −0.88 |
| ATLVT012XX0657 | 45591 | NSASGASSNDNT | 0.36 | 4.28 | 0.43 | −0.04 | ATLVT012XX0703 | 45637 | NSATGASSNDNA | −0.9 | −1.85 | 0.08 | 0.01 |
| ATLVT012XX0658 | 45592 | NSASGASTNDNA | −0.29 | 1.5 | −0.01 | −1.47 | ATLVT012XX0704 | 45638 | NSATGASSNDNH | 0.98 | −1.42 | 0.84 | 1.15 |
| ATLVT012XX0659 | 45593 | NSASGASTNDNH | 0.38 | 0.58 | 0.61 | −0.22 | ATLVT012XX0705 | 45639 | NSATGASSNDNT | 0.48 | −2.5 | −0.32 | 0.94 |
| ATLVT012XX0660 | 45594 | NSASGASTNDNT | 1.18 | −0.22 | 1.04 | 0.07 | ATLVT012XX0706 | 45640 | NSATGASTNDNA | −0.02 | −0.93 | 0.04 | 1.26 |
| ATLVT012XX0661 | 45595 | NSASGGASNDNA | 0.04 | 0.69 | −0.45 | 0.23 | ATTVT012XX0707 | 45641 | NSATGASTNDNH | −1.29 | 0.86 | 0.08 | 0.83 |
| ATLVT012XX0662 | 45596 | NSASGGASNDNH | 1.48 | −0.6 | −0.39 | 1.57 | ATLVT012XX0708 | 45642 | NSATGASTNDNT | 0.06 | −1.82 | 0.04 | −0.52 |
| ATLVT012XX0663 | 45597 | NSASGGASNDNT | 1.82 | 2.16 | 0.28 | 1.49 | ATLVT012XX0709 | 45643 | NSATGGASNDNA | 0.55 | 0.23 | 0.13 | 0.32 |
| ATLVT012XX0664 | 45598 | NSASGGATNDNA | 0.75 | 2.47 | −0.12 | 2.84 | ATLVT012XX0710 | 45644 | NSATGGASNDNH | 0.08 | 0.3 | 1.51 | 2.69 |
| ATLVT012XX0665 | 45599 | NSASGGATNDNH | 4.45 | 2.87 | 0.77 | 3.06 | ATLVT012XX0711 | 45645 | NSATGGASNDNT | 0.08 | 0.61 | 0.65 | 1.45 |
| ATLVT012XX0666 | 45600 | NSASGGATNDNT | 2.39 | 1.69 | 0.15 | 2.5 | ATTVT012XX0712 | 45646 | NSATGGATNDNA | 1.02 | 1.16 | −0.2 | 2.53 |
| ATLVT012XX0667 | 45601 | NSASGGSSNDNA | 1.1 | 1.95 | 0.4 | 1.65 | ATLVT012XX0713 | 45647 | NSATGGATNDNH | 3.59 | 4.03 | 0.05 | 3.78 |
| ATLVT012XX0668 | 45602 | NSASGGSSNDNH | 1.42 | 1.62 | 0.91 | 1.23 | ATLVT012XX0714 | 45648 | NSATGGATNDNT | 2.11 | 2.98 | −0.14 | 2.02 |
| ATLVT012XX0669 | 45603 | NSASGGSSNDNT | 2.63 | 1.49 | 0.02 | 1.69 | ATLVT012XX0715 | 45649 | NSATGGSSNDNA | 2.21 | 1.23 | 0.72 | 1.3 |
| ATLVT012XX0670 | 45604 | NSASGGSTNDNA | 2.55 | 3.83 | −0.28 | 0.93 | ATLVT012XX0716 | 45650 | NSATGGSSNDNH | 1.89 | −0.01 | 0.09 | −0.07 |
| ATLVT012XX0671 | 45605 | NSASGGSTNDNH | 2.73 | 1.39 | 0.45 | 2.67 | ATLVT012XX0717 | 45651 | NSATGGSSNDNT | 2.18 | 1.31 | 0.99 | 1.42 |
| ATLVT012XX0672 | 45606 | NSASGGSTNDNT | 4.34 | 2.6 | 0.68 | 2.67 | ATLVT012XX0718 | 45652 | NSATGGSTNDNA | 0.86 | 1.5 | 0.45 | 1.98 |
| ATLVT012XX0673 | 45607 | NSATAAASNDNA | −0.98 | −0.47 | −0.27 | −1.27 | ATLVT012XX0719 | 45653 | NSATGGSTNDNH | 1.31 | 3.29 | 0.55 | 1.88 |
| ATLVT012XX0674 | 45608 | NSATAAASNDNH | −0.61 | 0.9 | −0.02 | −0.4 | ATLVT012XX0720 | 45654 | NSATGGSTNDNT | 2.94 | 1.25 | 1.13 | 0.78 |
| ATLVT012XX0675 | 45609 | NSATAAASNDNT | 0.27 | −1.46 | 0.26 | 0.53 | ATLVT012XX0721 | 45655 | NSEAAAASNDNA | −1.1 | −1.33 | 0.6 | −0.21 |
| ATLVT012XX0676 | 45610 | NSATAAATNDNA | −1.99 | 0.43 | −0.51 | −0.95 | ATLVT012XX0722 | 45656 | NSEAAAASNDNH | −3.13 | −1.28 | 0.42 | −1.94 |
| ATLVT012XX0677 | 45611 | NSATAAATNDNH | .1.28 | −1.5 | −0.94 | 2.58 | ATLVT012XX0723 | 45657 | NSEAAAASNDNT | −2.11 | 1.42 | 0.33 | −2.44 |
| ATLVT012XX0678 | 45612 | NSATAAATNDNT | −0.91 | −2.38 | 0.39 | −1.1 | ATLVT012XX0724 | 45658 | NSEAAAATNDNA | −2.39 | −1.11 | −0.31 | −1.49 |
| ATLVT012XX0679 | 45613 | NSATAASSNDNA | −1.49 | 0.31 | −0.23 | −0.27 | ATLVT012XX0725 | 45659 | NSEAAAATNDNH | −0.84 | 1.6 | −0.43 | 1.45 |
| ATLVT012XX0680 | 45614 | NSATAASSNDNH | −1.23 | −1.21 | 0.72 | −1.55 | ATLVT012XX0726 | 45660 | NSEAAAATNDNT | −0.15 | −0.89 | −0.21 | 0.49 |
| ATLVT012XX0681 | 45615 | NSATAASSNDNT | 0.22 | −0.19 | −0.16 | 0.62 | ATLVT012XX0727 | 45661 | NSEAAASSNDNA | 1.47 | 0.84 | −0.12 | −1.84 |
| ATLVT012XX0682 | 45616 | NSATAASTNDNA | 1.63 | 2.16 | 0.1 | −1.32 | ATLVT012XX0728 | 45662 | NSEAAASSNDNH | 2.06 | 1.07 | 1.46 | −3.01 |
| ATLVT012XX0683 | 45617 | NSATAASTNDNH | 1.44 | 1.27 | 0.84 | −0.18 | ATLVT012XX0729 | 45663 | NSEAAASSNDNT | −0.14 | −1.51 | −0.68 | 0.2 |
| ATLVT012XX0684 | 45618 | NSATAASTNDNT | 0.51 | 4.9 | 0.28 | 0.45 | ATLVT012XX0730 | 45664 | NSEAAASTNDNA | −0.57 | 0.79 | 0 | −1.36 |
| ATLVT012XX0685 | 45619 | NSATAGASNDNA | 2.8 | 2.68 | −1.23 | 1.26 | ATLVT012XX0731 | 45665 | NSEAAASTNDNH | −1.51 | −1.49 | 0.94 | −1.78 |
| ATLVT012XX0686 | 45620 | NSATAGASNDNH | 3.83 | 2.2 | 0.24 | 1.92 | ATLVT012XX0732 | 45666 | NSEAAASTNDNT | −0.87 | 1.36 | 0.03 | −1.68 |
| ATLVT012XX0687 | 45621 | NSATAGASNDNT | 1.5 | 1.38 | −1.79 | 0.26 | ATLVT012XX0733 | 45667 | NSEAAGASNDNA | −2.77 | −0.12 | −2.15 | −2.84 |
| ATLVT012XX0688 | 45622 | NSATAGATNDNA | 1.78 | −0.06 | 1.17 | 1.19 | ATLVT012XX0734 | 45668 | NSEAAGASNDNH | −1.07 | −0.51 | −0.6 | −2.56 |
| ATLVT012XX0689 | 45623 | NSATAGATNDNH | 2.75 | 2.91 | 0.75 | 3.35 | ATLVT012XX0735 | 45669 | NSEAAGASNDNT | −2.42 | −1.61 | −3.66 | −2.59 |
| ATLVT012XX0690 | 45624 | NSATAGATNDNT | 1.64 | −0.17 | −0.03 | 2.23 | ATLVT012XX0736 | 45670 | NSEAAGATNDNA | −1.28 | 0.74 | −0.93 | −0.88 |
| ATLVT012XX0737 | 45671 | NSEAAGATNDNH | −0.1 | 2.04 | −0.97 | −0.72 | ATTVT012XX0783 | 45717 | NSESAGASNDNT | −1.23 | −0.61 | −1.37 | −2.26 |
| ATLVT012XX0738 | 45672 | NSEAAGATNDNT | −0.07 | 0.05 | −1.15 | −1.29 | ATLVT012XX0784 | 45718 | NSESAGATNDNA | −1.9 | −2.74 | 0.63 | −0.99 |
| ATLVT012XX0739 | 45673 | NSEAAGSSNDNA | −0.15 | −0.53 | −1.13 | −2.19 | ATLVT012XX0785 | 45719 | NSESAGATNDNH | −0.05 | −0.21 | 0.43 | 2.52 |
| ATLVT012XX0740 | 45674 | NSEAAGSSNDNH | −0.5 | −2.47 | −0.64 | −3.29 | ATLVT012XX0786 | 45720 | NSESAGATNDNT | −1.24 | −3 | −0.31 | −1.34 |
| ATLVT012XX0741 | 45675 | NSEAAGSSNDNT | 1.48 | −2.11 | −1.37 | −0.45 | ATLVT012XX0787 | 45721 | NSESAGSSNDNA | −0.81 | −2.11 | −0.44 | −2.38 |
| ATLVT012XX0742 | 45676 | NSEAAGSTNDNA | 0.54 | 0.33 | −0.16 | −0.18 | ATLVT012XX0788 | 45722 | NSESAGSSNDNH | −0.6 | 0.09 | 0.33 | −0.54 |
| ATLVT012XX0743 | 45677 | NSEAAGSTNDNH | 3.8 | −1.72 | −0.23 | 0.94 | ATLVT012XX0789 | 45723 | NSESAGSSNDNT | 1.72 | −1.7 | −0.8 | −0.36 |
| ATLVT012XX0744 | 45678 | NSEAAGSTNDNT | 1.13 | −1.54 | −0.92 | 0.7 | ATLVT012XX0790 | 45724 | NSESAGSTNDNA | −0.56 | −0.09 | 0.52 | −2.04 |
| ATLVT012XX0745 | 45679 | NSEAGAASNDNA | 0.01 | 1.04 | 1.03 | −3.04 | ATLVT012XX0791 | 45725 | NSESAGSTNDNH | −0.91 | −1.48 | −0.68 | 0.78 |
| ATLVT012XX0746 | 45680 | NSEAGAASNDNH | −0.31 | −1.98 | 1.18 | −2.01 | ATLVT012XX0792 | 45726 | NSESAGSTNDNT | −1.89 | −0.2 | 0.48 | −2.55 |
| ATLVT012XX0747 | 45681 | NSEAGAASNDNT | −1.93 | −2.55 | −0.68 | −0.87 | ATLVT012XX0793 | 45727 | NSESGAASNDNA | −1.82 | −0.29 | −0.3 | −2.47 |
| ATLVT012XX0748 | 45682 | NSEAGAATNDNA | −2.27 | −1.08 | −1.2 | 0.6 | ATLVT012XX0794 | 45728 | NSESGAASNDNH | −0.24 | −2.24 | −2.42 | −2.67 |
| ATLVT012XX0749 | 45683 | NSEAGAATNDNH | −0.67 | 1.58 | −1.07 | 0.82 | ATLVT012XX0795 | 45729 | NSESGAASNDNT | −1.71 | −3.22 | −0.67 | −0.06 |
| ATLVT012XX0750 | 45684 | NSEAGAATNDNT | −0.3 | −0.33 | −1.23 | −1.97 | ATLVT012XX0796 | 45730 | NSESGAATNDNA | −0.55 | −2.35 | −1.64 | −0.19 |
| ATLVT012XX0751 | 45685 | NSEAGASSNDNA | −0.34 | −1.24 | −0.35 | 0.81 | ATLVT012XX0797 | 45731 | NSESGAATNDNH | −1.11 | −1.8 | −1.46 | −0.96 |
| ATLVT012XX0752 | 45686 | NSEAGASSNDNH | −0.58 | −1.58 | −0.68 | −1.66 | ATLVT012XX0798 | 45732 | NSESGAATNDNT | −1.41 | −2.06 | −0.57 | −0.62 |
| ATLVT012XX0753 | 45687 | NSEAGASSNDNT | 0.64 | −1.78 | 0.47 | 0.07 | ATLVT012XX0799 | 45733 | NSESGASSNDNA | −0.67 | −1.08 | −0.03 | −1.61 |
| ATLVT012XX0754 | 45688 | NSEAGASTNDNA | 0.16 | −2.95 | −0.45 | −0.87 | ATLVT012XX0800 | 45734 | NSESGASSNDNH | 0.59 | −2.62 | −0.56 | −1.9 |
| ATLVT012XX0755 | 45689 | NSEAGASTNDNH | 0.7 | −2.47 | −0.05 | −1.36 | ATLVT012XX0801 | 45735 | NSESGASSNDNT | 0.33 | −1.85 | −0.3 | −1.25 |
| ATLVT012XX0756 | 45690 | NSEAGASTNQNT | 0.56 | −3.23 | 0.7 | −1.68 | ATLVT012XX0802 | 45736 | NSESGASTNDNA | 2.25 | 2.55 | 0.15 | −0.66 |
| ATLVT012XX0757 | 45691 | NSEAGGASNDNA | −0.06 | 3.3 | −1.37 | −0.29 | ATLVT012XX0803 | 45737 | NSESGASTNDNH | 0.89 | −0.84 | −0.45 | −0.65 |
| ATLVT012XX0758 | 45692 | NSEAGGASNDNH | −0.26 | 1.2 | 0.72 | −0.24 | ATTVT012XX0804 | 45738 | NSESGASTNDNT | 1.24 | 0.06 | 0.26 | −0.58 |
| ATLVT012XX0759 | 45693 | NSEAGGASNDNT | 0.14 | 0.5 | −2.42 | −1.89 | ATLVT012XX0805 | 45739 | NSESGGASNDNA | 3.33 | 4.52 | 0.42 | 0.28 |
| ATLVT012XX0760 | 45694 | NSEAGGATNDNA | 0.45 | 3.01 | −0.24 | −0.67 | ATLVT012XX0806 | 45740 | NSESGGASNDNH | 1.19 | 0.6 | −0.32 | −0.01 |
| ATLVT012XX0761 | 45695 | NSEAGGATNDNH | 3.82 | 1.81 | 0.26 | 1.42 | ATLVT012XX0807 | 45741 | NSESGGASNDNT | 2.3 | 1.43 | 0.12 | 1.02 |
| ATLVT012XX0762 | 45696 | NSEAGGATNDNT | 3.63 | 1.73 | −1.25 | −0.84 | ATLVT012XX0808 | 45742 | NSESGGATNDNA | −1.15 | 0.28 | 0.38 | −0.55 |
| ATLVT012XX0763 | 45697 | NSEAGGSSNDNA | 1.25 | −1.02 | −0.21 | −1.35 | ATLVT012XX0809 | 45743 | NSESGGATNDNH | 2.4 | 2.19 | −0.12 | 1.57 |
| ATLVT012XX0764 | 45698 | NSEAGGSSNDNH | 3.89 | −1.3 | 0.88 | 0.66 | ATLVT012XX0810 | 45744 | NSESGGATNDNT | 0.4 | 0. | 0.81 | 1.05 |
| ATLVT012XX0765 | 45699 | NSEAGGSSNDNT | 3.16 | −0.7 | −0.34 | 1.58 | ATLVT012XX0811 | 45745 | NSESGGSSNDNA | 0.69 | 1.61 | −0.35 | 2.44 |
| ATLVT012XX0766 | 45700 | NSEAGGSTNDNA | 0.85 | 0.32 | 0.48 | 1.51 | ATLVT012XX0812 | 45746 | NSESGGSSNDNH | −0.63 | 0.26 | 0.22 | 0.26 |
| ATLVT012XX0767 | 45701 | NSEAGGSTNDNH | 1.53 | −0.7 | 0.98 | 1.69 | ATLVT012XX0813 | 45747 | NSESGGSSNDNT | 3.24 | 1.02 | −0.04 | 2.14 |
| ATLVT012XX0768 | 45702 | NSEAGGSTNDNT | 3.12 | 1.27 | 0.11 | 2.38 | ATLVT012XX0814 | 45748 | NSESGGSTNDNA | 1.56 | 2.7 | 1.35 | 1.51 |
| ATLVT012XX0769 | 45703 | NSESAAASNDNA | −1.53 | −0.45 | 0.24 | −2.38 | ATLVT012XX0815 | 45749 | NSESGGSTNDNH | 2.73 | 3.35 | −0.52 | 1.7 |
| ATLVT012XX0770 | 45704 | NSESAAASNDNH | −0.05 | −2.29 | 0.38 | −2.07 | ATLVT012XX0816 | 45750 | NSESGGSTNDNT | 2.97 | 3.62 | 1.08 | 2.49 |
| ATLVT012XX0771 | 45705 | NSESAAASNDNT | −0.72 | −2.37 | 0.18 | −0.03 | ATLVT012XX0817 | 45751 | NSETAAASNDNA | 1.17 | −2.07 | 0.4 | −1.58 |
| ATLVT012XX0772 | 45706 | NSESAAATNDNA | 1.14 | 2.2 | −0.24 | −1.37 | ATLVT012XX0818 | 45752 | NSETAAASNDNH | −0.27 | −0.8 | 0.11 | −0.72 |
| ATLVT012XX0773 | 45707 | NSESAAATNDNH | 1.7 | −1 | −0.35 | 0.59 | ATLVT012XX0819 | 45753 | NSETAAASNDNT | 0.82 | −0.42 | −0.54 | −2.06 |
| ATLVT012XX0774 | 45708 | NSESAAATNDNT | 0.95 | −0.11 | 0.29 | −0.57 | ATLVT012XX0820 | 45754 | NSETAAATNDNA | −1.23 | 1.72 | −0.79 | −0.69 |
| ATLVT012XX0775 | 45709 | NSESAASSNDNA | −1.79 | −2.13 | 0.82 | 0.33 | ATLVT012XX0821 | 45755 | NSETAAATNDNH | 1.37 | −0.54 | 0.16 | −0.75 |
| ATLVT012XX0776 | 45710 | NSESAASSNDNH | −0.98 | −1.76 | 0.45 | −2.11 | ATLVT012XX0822 | 45756 | NSETAAATNDNT | 0.38 | 1.58 | −0.03 | 0.11 |
| ATLVT012XX0777 | 45711 | NSESAASSNDNT | 0.38 | 1.95 | −1.03 | 0.7 | ATLVT012XX0823 | 45757 | NSETAASSNDNA | −1.6 | 0.06 | −0.56 | −1.22 |
| ATLVT012XX0778 | 45712 | NSESAASTNDNA | −2.56 | −2.95 | 0.39 | −1.6 | ATLVT012XX0824 | 45758 | NSETAASSNDNH | 0.97 | −1 | 0.26 | −1.78 |
| ATLVT012XX0779 | 45713 | NSESAASTNDNH | −2.68 | −2.79 | 0.69 | −1.77 | ATLVT012XX0825 | 45759 | NSETAASSNDNT | −0.42 | −0.16 | −0.25 | −3.19 |
| ATLVT012XX0780 | 45714 | NSESAASTNDNT | −0.27 | −2.68 | −1.36 | −0.95 | ATLVT012XX0826 | 45760 | NSETAASTNDNA | −0.47 | 2.1 | 0.02 | −2.96 |
| ATLVT012XX0781 | 45715 | NSESAGASNDNA | −2.38 | −1.56 | −1.29 | −1.33 | ATLVT012XX0827 | 45761 | NSETAASTNDNH | −0.28 | −1.55 | −0.2 | −2.03 |
| ATLVT012XX0782 | 45716 | NSESAGASNDNH | −2.65 | 0.56 | −1.25 | −0.94 | ATLVT012XX0828 | 45762 | NSETAASTNDNT | 1.04 | −1.59 | −1.36 | −2.02 |
| ATLVT012XX0829 | 45763 | NSETAGASNDNA | 0.25 | −0.22 | −0.45 | −2.66 | ATLVT012XX0875 | 45809 | NSQAAASTNDNH | −1.91 | −1.04 | −1.65 | −1.55 |
| ATLVT012XX0830 | 45764 | NSETAGASNDNH | 0.53 | −2.13 | −1.88 | −1.45 | ATLVT012XX0876 | 45810 | NSQAAASTNDNT | −1.48 | −0.9 | −1 | −1.79 |
| ATLVT012XX0831 | 45765 | NSETAGASNDNT | 1.16 | −1.86 | −1.63 | −2.49 | ATLVT012XX0877 | 45811 | NSQAAGASNDNA | 0.55 | −0.82 | −1.46 | −1.83 |
| ATLVT012XX0832 | 45766 | NSETAGATNDNA | 0.16 | −1.28 | 0.18 | −0.71 | ATLVT012XX0878 | 45812 | NSQAAGASNDNH | −1.66 | −2.19 | −1.27 | −3.63 |
| ATLVT012XX0833 | 45767 | NSETAGATNDNH | 0.16 | −1.48 | 0.58 | 0.7 | ATLVT012XX0879 | 45813 | NSQAAGASNDNT | 0.13 | −0.67 | −1.48 | −1.52 |
| ATLVT012XX0834 | 45768 | NSETAGATNDNT | −0.42 | −2.91 | 1.18 | −0.15 | ATLVT012XX0880 | 45814 | NSQAAGATNDNA | −0.19 | −0.03 | −1.15 | −0.35 |
| ATLVT012XX0835 | 45769 | NSETAGSSNDNA | −0.03 | 2.21 | 0.25 | −1.25 | ATLVT012XX0881 | 45815 | NSQAAGATNDNH | 0.35 | −0.21 | −2.38 | −0.78 |
| ATLVT012XX0836 | 45770 | NSETAGSSNDNH | 0.06 | −0.02 | 1.07 | −2.42 | ATLVT012XX0882 | 45816 | NSQAAGATNDNT | −2.13 | −1.82 | −1.03 | −2.86 |
| ATLVT012XX0837 | 45771 | NSETAGSSNDNT | 1.42 | 1.12 | −0.76 | −0.44 | ATLVT012XX0883 | 45817 | NSQAAGSSNDNA | −2.23 | 0.4 | −0.33 | 0.23 |
| ATLVT012XX0838 | 45772 | NSETAGSTNDNA | −2.39 | −1.04 | −0.1 | −1.44 | ATLVT012XX0884 | 45818 | NSQAAGSSNDNH | −4.09 | −2.24 | −1.93 | 0.8 |
| ATLVT012XX0839 | 45773 | NSETAGSTNDNH | −0.46 | 1.11 | 0.02 | −0.01 | ATLVT012XX0885 | 45819 | NSQAAGSSNDNT | −2.76 | −1.19 | −1.99 | 0.43 |
| ATLVT012XX0840 | 45774 | NSETAGSTNDNT | 0.02 | 0.67 | −0.76 | −0.96 | ATLVT012XX0886 | 45820 | NSQAAGSTNDNA | −3.04 | 0.92 | −0.32 | −0.25 |
| ATLVT012XX0841 | 45775 | NSETGAASNDNA | −2.08 | −0.28 | −2.15 | 0.7 | ATLVT012XX0887 | 45821 | NSQAAGSTNDNH | −2.7 | 2.83 | −1.02 | −0.86 |
| ATLVT012XX0842 | 45776 | NSETGAASNDNH | −0.65 | −0.37 | −2.03 | −0.73 | ATLVT012XX0888 | 45822 | NSQAAGSTNDNT | −2.55 | 2.91 | 0.01 | −0.88 |
| ATLVT012XX0843 | 45777 | NSETGAASNDNT | −0.53 | 0.44 | −0.99 | −0.5 | ATLVT012XX0889 | 45823 | NSQAGAASNDNA | −2.51 | 0.47 | −2.15 | −0.81 |
| ATLVT012XX0844 | 45778 | NSETGAATNDNA | −2.44 | 2.37 | −1.48 | −0.04 | ATLVT012XX0890 | 45824 | NSQAGAASNDNH | −4.58 | −2.72 | −1.64 | −1.97 |
| ATLVT012XX0845 | 45779 | NSETGAATNDNH | −0.71 | 0.56 | 0.03 | 2.11 | ATLVT012XX0891 | 45825 | NSQAGAASNDNT | −3.94 | −2.91 | −1.6 | −0.05 |
| ATLVT012XX0846 | 45780 | NSETGAATNDNT | −2.26 | 1.49 | −2.14 | −0.89 | ATLVT012XX0892 | 45826 | NSQAGAATNDNA | −3.23 | −2.78 | 0.9 | −1.29 |
| ATLVT012XX0847 | 45781 | NSETGASSNDNA | 0.11 | 0.71 | −0.1 | −0.34 | ATLVT012XX0893 | 45827 | NSQAGAATNDNH | −3.26 | −2.02 | −0.48 | −0.21 |
| ATLVT012XX0848 | 45782 | NSETGASSNDNH | −1.42 | −0.77 | −0.02 | 0.14 | ATLVT012XX0894 | 45828 | NSQAGAATNDNT | −4.18 | −2.14 | −1.26 | −0.7 |
| ATLVT012XX0849 | 45783 | NSETGASSNDNT | −0.63 | −1.99 | −0.4 | −1.43 | ATLVT012XX0895 | 45829 | NSQAGASSNDNA | −1.28 | 2.04 | −0.39 | −1.98 |
| ATLVT012XX0850 | 45784 | NSETGASTNDNA | −2.01 | −0.73 | 0.34 | −0.93 | ATLVT012XX0896 | 45830 | NSQAGASSNDNH | 2.07 | 2.24 | −0.4 | −1.63 |
| ATLVT012XX0851 | 45785 | NSETGASTNDNH | −2.67 | −1.99 | 0.34 | −0.26 | ATLVT012XX0897 | 45831 | NSQAGASSNDNT | −0.02 | 0.28 | −1.04 | −2.39 |
| ATLVT012XX0852 | 45786 | NSETGASTNDNT | −1.68 | −1.85 | −0.53 | −1.68 | ATLVT012XX0898 | 45832 | NSQAGASTNDNA | −2.52 | −1.9 | −0.3 | −0.48 |
| ATLVT012XX0853 | 45787 | NSETGGASNDNA | −1.59 | 5.32 | −0.77 | 0.96 | ATLVT012XX0899 | 45833 | NSQAGASTNDNH | −1.85 | −0.56 | 0.33 | −1.11 |
| ATLVT012XX0854 | 45788 | NSETGGASNDNH | −1.23 | 2.28 | 0.46 | 2.2 | ATLVT012XX0900 | 45834 | NSQAGASTNDNT | −3.5 | −2.74 | −0.23 | 0.93 |
| ATLVT012XX0855 | 45789 | NSETGGASNDNT | −0.27 | 1.34 | 0.46 | 0.06 | ATLVT012XX0901 | 45835 | NSQAGGASNDNA | −1.02 | −1.59 | −0.3 | 2.11 |
| ATLVT012XX0856 | 45790 | NSETGGATNDNA | 1.48 | 2.65 | −0.51 | 2.43 | ATLVT012XX0902 | 45836 | NSQAGGASNDNH | 0.82 | 1.39 | −0.69 | 1.74 |
| ATLVT012XX0857 | 45791 | NSETGGATNDNH | 2.05 | 2.9 | 0.44 | 1.47 | ATLVT012XX0903 | 45837 | NSQAGGASNDNT | −0.82 | −0.52 | −0.08 | 0.25 |
| ATLVT012XX0858 | 45792 | NSETGGATNDNT | 0.18 | 1.89 | −0.23 | 1.48 | ATLVT012XX0904 | 45838 | NSQAGGATNDNA | −0.74 | −0.05 | −0.32 | 2.11 |
| ATLVT012XX0859 | 45793 | NSETGGSSNDNA | 1.1 | 0.18 | 0.17 | 1.62 | ATLVT012XX0905 | 45839 | NSQAGGATNDNH | 3.34 | 3.97 | 0.72 | 3.67 |
| ATLVT012XX0860 | 45794 | NSETGGSSNDNH | 0.58 | 0.41 | −0.1 | −0.49 | ATLVT012XX0906 | 45840 | NSQAGGATNDNT | 0.49 | 1.57 | 0.02 | 1.94 |
| ATLVT012XX0861 | 45795 | NSETGGSSNDNT | 2.18 | 0.45 | −0.44 | 2.07 | ATLVT012XX0907 | 45841 | NSQAGGSSNDNA | −0.02 | −0.2 | 1.5 | 2.85 |
| ATLVT012XX0862 | 45796 | NSETGGSTNDNA | 2.39 | 0.44 | 0.68 | 1.57 | ATLVT012XX0908 | 45842 | NSQAGGSSNDNH | −0.59 | −1.43 | 1.24 | 0.41 |
| ATLVT012XX0863 | 45797 | NSETGGSTNDNH | 2.75 | 1.13 | 0.29 | 2.82 | ATLVT012XX0909 | 45843 | NSQAGGSSNDNT | 1.27 | 2.13 | 0.47 | 2.13 |
| ATLVT012XX0864 | 45798 | NSETGGSTNDNT | 3.43 | 1.3 | 0.71 | 1.27 | ATLVT012XX0910 | 45844 | NSQAGGSTNDNA | 0.82 | 2.92 | −0.43 | 1.52 |
| ATLVT012XX0865 | 45799 | NSQAAAASNDNA | 0.66 | 0.86 | 0.26 | −0.65 | ATLVT012XX0911 | 45845 | NSQAGGSTNDNH | 1.39 | 0.95 | 0.41 | 4.39 |
| ATLVT012XX0866 | 45800 | NSQAAAASNDNH | −0.63 | −0.26 | 0.12 | −0.59 | ATTVT012XX0912 | 45846 | NSQAGGSTNDNT | 3.6 | 3.04 | 1.22 | 2.81 |
| ATLVT012XX0867 | 45801 | NSQAAAASNDNT | 0 | 1.12 | −0.19 | 1.95 | ATLVT012XX0913 | 45847 | NSQSAAASNDNA | 0.99 | −1.29 | −0.23 | 1.19 |
| ATLVT012XX0868 | 45802 | NSQAAAATNDNA | 2.22 | −1.27 | −0.73 | −0.82 | ATLVT012XX0914 | 45848 | NSQSAAASNDNH | −0.56 | −0.04 | 0.68 | −0.75 |
| ATLVT012XX0869 | 45803 | NSQAAAATNDNH | 0.87 | −0.57 | 0.07 | 1.2 | ATLVT012XX0915 | 45849 | NSQSAAASNDNT | −0.55 | 1.29 | 0.79 | 0.56 |
| ATLVT012XX0870 | 45804 | NSQAAAATNDNT | 0.4 | −0.28 | −0.89 | −0.77 | ATLVT012XX0916 | 45850 | NSQSAAATNDNA | −0.25 | −1.17 | 0.23 | −0.56 |
| ATLVT012XX0871 | 45805 | NSQAAASSNDNA | −0.45 | 0.57 | 0.38 | 0.79 | ATLVT012XX0917 | 45851 | NSQSAAATNDNH | −1.28 | 0.15 | 0.6 | 0.13 |
| ATLVT012XX0872 | 45806 | NSQAAASSNDNH | −2.68 | −1.32 | 0.39 | −0.75 | ATLVT012XX0918 | 45852 | NSQSAAATNDNT | −0.77 | −1.28 | −0.07 | 0.13 |
| ATLVT012XX0873 | 45807 | NSQAAASSNDNT | −0.89 | 0.98 | 0.36 | −1.57 | ATLVT012XX0919 | 45853 | NSQSAASSNDNA | 0.76 | 0.97 | −0.68 | −0.07 |
| ATLVT012XX0874 | 45808 | NSQAAASTNDNA | −3.24 | −1.67 | −1.08 | −1.72 | ATLVT012XX0920 | 45854 | NSQSAASSNDNH | 0.93 | 0.27 | 0.32 | −1.65 |
| ATLVT012XX0921 | 45855 | NSQSAASSNDNT | −0.46 | 0.08 | −0.54 | −2.2 | ATLVT012XX0967 | 45901 | NSQTAASSNDNA | 1.12 | 1.36 | 0.48 | 0 |
| ATLVT012XX0922 | 45856 | NSQSAASTNDNA | 0.52 | −0.01 | 0.91 | −0.88 | ATLVT012XX0968 | 45902 | NSQTAASSNDNH | 0.17 | 3.76 | −1.24 | −0.44 |
| ATLVT012XX0923 | 45857 | NSQSAASTNDNH | −0.35 | 0.4 | 0.49 | −1.76 | ATLVT012XX0969 | 45903 | NSQTAASSNDNT | −0.03 | 1.74 | −0.96 | −0.66 |
| ATLVT012XX0924 | 45858 | NSQSAASTNDNT | −0.44 | 1.22 | 0.33 | −1.2 | ATLVT012XX0970 | 45904 | NSQTAASTNDNA | −0.48 | −0.01 | 0.96 | 0.96 |
| ATLVT012XX0925 | 45859 | NSQSAGASNDNA | 0.05 | −1.52 | −0.47 | 0.44 | ATLVT012XX0971 | 45905 | NSQTAASTNDNH | 0.72 | 2.56 | −0.25 | 0.13 |
| ATLVT012XX0926 | 45860 | NSQSAGASNDNH | −1.02 | −1.93 | 0.09 | −0.26 | ATLVT012XX0972 | 45906 | NSQTAASTNDNT | −0.37 | 1.64 | 0.23 | 0.68 |
| ATLVT012XX0927 | 45861 | NSQSAGASNDNT | −0.07 | −1.63 | −1.95 | −0.43 | ATLVT012XX0973 | 45907 | NSQTAGASNDNA | 0.54 | −0.3 | −1.55 | −0.75 |
| ATLVT012XX0928 | 45862 | NSQSAGATNDNA | 0.1 | −1.53 | −0.35 | −0.24 | ATLVT012XX0974 | 45908 | NSQTAGASNDNH | 0.89 | −0.39 | −0.04 | −0.82 |
| ATLVT012XX0929 | 45863 | NSQSAGATNDNH | 0.47 | −0.81 | 0.01 | 2.25 | ATLVT012XX0975 | 45909 | NSQTAGASNDNT | −0.85 | 0.13 | −0.27 | −1.02 |
| ATLVT012XX0930 | 45864 | NSQSAGATNDNT | −1.02 | −1.32 | −1.1 | −0.02 | ATLVT012XX0976 | 45910 | NSQTAGATNDNA | −0.99 | 1.28 | −0.21 | 0.17 |
| ATLVT012XX0931 | 45865 | NSQSAGSSNDNA | −0.03 | 0.16 | −0.59 | 0.01 | ATLVT012XX0977 | 45911 | NSQTAGATNDNH | −0.1 | 0.02 | −0.64 | 2.74 |
| ATLVT012XX0932 | 45866 | NSQSAGSSNDNH | 0.9 | −1.64 | 1.51 | −0.52 | ATLVT012XX0978 | 45912 | NSQTAGATNDNT | −0.48 | −0.29 | 0.24 | 0.22 |
| ATLVT012XX0933 | 45867 | NSQSAGSSNDNT | −0.09 | −1.21 | 0.5 | 0.19 | ATLVT012XX0979 | 45913 | NSQTAGSSNDNA | −3.39 | 2.11 | −0.95 | 0.55 |
| ATLVT012XX0934 | 45868 | NSQSAGSTNDNA | 0.37 | 1.41 | −0.48 | 1.36 | ATLVT012XX0980 | 45914 | NSQTAGSSNDNH | −3.26 | −0.03 | 0.2 | 0.85 |
| ATLVT012XX0935 | 45869 | NSQSAGSTNDNH | 0.89 | 1.97 | 1.42 | 2.0 | ATLVT012XX0981 | 45915 | NSQTAGSSNDNT | −2.44 | 1.51 | −0.95 | 0.13 |
| ATLVT012XX0936 | 45870 | NSQSAGSTNDNT | 0.65 | −0.44 | −0.86 | 1.45 | ATLVT012XX0982 | 45916 | NSQTAGSTNDNA | −1.81 | 1.18 | −0.41 | 0.46 |
| ATLVT012XX0937 | 45871 | NSQSGAASNDNA | −2.31 | 1.43 | −0.7 | −1.82 | ATLVT012XX0983 | 45917 | NSQTAGSTNDNH | −2.3 | 0.58 | 0.56 | 0.93 |
| ATLVT012XX0938 | 45872 | NSQSGAASNDNH | −2 | 0.98 | −0.65 | 2.16 | ATLVT012XX0984 | 45918 | NSQTAGSTNDNT | −0.78 | 2.58 | 0.09 | −0.02 |
| ATLVT012XX0939 | 45873 | NSQSGAASNDNT | −1.65 | 2.19 | −2.16 | −2.76 | ATLVT012XX0985 | 45919 | NSQTGAASNDNA | −3.5 | −1.72 | −2.15 | −1.28 |
| ATLVT012XX0940 | 45874 | NSQSGAATNDNA | −1.16 | 0.9 | −0.79 | −1.45 | ATLVT012XX0986 | 45920 | NSQTGAASNDNH | −2.64 | −0.6 | −1.12 | −1.38 |
| ATLVT012XX0941 | 45875 | NSQSGAATNDNH | 0.8 | −0.86 | −1.1 | 0.41 | ATLVT012XX0987 | 45921 | NSQTGAASNDNT | −3.52 | 1.33 | −1.75 | −1.54 |
| ATLVT012XX0942 | 45876 | NSQSGAATNDNT | −1.63 | −1.29 | −0.34 | −0.29 | ATLVT012XX0988 | 45922 | NSQTGAATNDNA | 0.01 | −0.78 | −0.78 | −0.3 |
| ATLVT012XX0943 | 45877 | NSQSGASSNDNA | −1.63 | 0.7 | −0.24 | −0.87 | ATLVT012XX0989 | 45923 | NSQTGAATNDNH | 0.28 | −1.06 | −1.29 | 0.51 |
| ATLVT012XX0944 | 45878 | NSQSGASSNDNH | −0.91 | 2.59 | −0.86 | −0.77 | ATLVT012XX0990 | 45924 | NSQTGAATNDNT | −1.78 | −2.73 | −0.53 | −1.03 |
| ATLVT012XX0945 | 45879 | NSQSGASSNDNT | −0.86 | 1.97 | 0.54 | 0 | ATLVT012XX0991 | 45925 | NSQTGASSNDNA | −1.39 | −0.23 | 0.23 | 0.96 |
| ATLVT012XX0946 | 45880 | NSQSGASTNDNA | 0.36 | −0.93 | 0.68 | 0.64 | ATLVT012XX0992 | 45926 | NSQTGASSNDNH | −1.34 | −1.27 | 1.02 | −0.31 |
| ATLVT012XX0947 | 45881 | NSQSGASTNDNH | 2.88 | 0.13 | 0.35 | 0.71 | ATLVT012XX0993 | 45927 | NSQTGASSNDNT | −1.59 | −0.55 | −0.28 | 0.06 |
| ATLVT012XX0948 | 45882 | NSQSGASTNDNT | 3.81 | −0.34 | 1.07 | −1.44 | ATLVT012XX0994 | 45928 | NSQTGASTNDNA | −2.24 | −0.22 | 0.57 | −0.26 |
| ATLVT012XX0949 | 45883 | NSQSGGASNDNA | 1.68 | 1.36 | 0.52 | 0.06 | ATLVT012XX0995 | 45929 | NSQTGASTNDNH | −0.48 | −1.78 | −0.52 | −0.42 |
| ATLVT012XX0950 | 45884 | NSQSGGASNDNH | 3.77 | 2.36 | 0.25 | 1.75 | ATLVT012XX0996 | 45930 | NSQTGASTNDNT | −0.92 | −1.62 | 1.48 | −1.44 |
| ATLVT012XX0951 | 45885 | NSQSGGASNDNT | 2.49 | 5.23 | 0.51 | 2.3 | ATLVT012XX0997 | 45931 | NSQTGGASNDNA | 0 | 4.04 | 0.67 | 1.7 |
| ATLVT012XX0952 | 45886 | NSQSGGATNDNA | 2.05 | 1.85 | 0.91 | 2.61 | ATLVT012XX0998 | 45932 | NSQTGGASNDNH | 2.81 | 4.31 | 0.87 | 0.19 |
| ATLVT012XX0953 | 45887 | NSQSGGATNDNH | 4.87 | 3.77 | 1.1 | 3.34 | ATLVT012XX0999 | 45933 | NSQTGGASNDNT | 2.13 | 2.49 | 0.32 | 1.9 |
| ATLVT012XX0954 | 45888 | NSQSGGATNDNT | 3.06 | 2.41 | 0.74 | 2.63 | ATLVT012XX1000 | 45934 | NSQTGGATNDNA | 2.44 | −0.55 | 0.81 | 3.34 |
| ATLVT012XX0955 | 45889 | NSQSGGSSNDNA | 1.67 | 2.26 | −0.34 | 2.1 | ATLVT012XX1001 | 45935 | NSQTGGATNDNH | 3.84 | 3.69 | 1.27 | 3.8 |
| ATLVT012XX0956 | 45890 | NSQSGGSSNDNH | 0.54 | 1.71 | −0.2 | 2.37 | ATLVT012XX1002 | 45936 | NSQTGGATNDNT | 1.35 | 2.58 | 0.77 | 1.9 |
| ATLVT012XX0957 | 45891 | NSQSGGSSNDNT | 3.27 | 4.37 | 0.29 | 3.23 | ATLVT012XX1003 | 45937 | NSQTGGSSNDNA | 1.29 | 2.6 | −0.11 | 1.44 |
| ATLVT012XX0958 | 45892 | NSQSGGSTNDNA | 2.69 | 4.32 | 0.64 | 2.92 | ATLVT012XX1004 | 45938 | NSQTGGSSNDNH | 0.53 | 2.64 | 1.69 | 0.87 |
| ATLVT012XX0959 | 45893 | NSQSGGSTNDNH | 3.33 | 2.8 | 1.03 | 2.65 | ATLVT012XX1005 | 45939 | NSQTGGSSNDNT | 1.63 | 1.88 | 1.02 | 2.65 |
| ATLVT012XX0960 | 45894 | NSQSGGSTNDNT | 5.76 | 5.19 | 1.53 | 3.49 | ATLVT012XX1006 | 45940 | NSQTGGSTNDNA | 2.39 | 2.33 | 1.26 | 1.34 |
| ATLVT012XX0961 | 45895 | NSQTAAASNDNA | −1.88 | −1.22 | 1.25 | −0.78 | ATLVT012XX1007 | 45941 | NSQTGGSTNDNH | 1.77 | 1.03 | 0.5 | 2.53 |
| ATLVT012XX0962 | 45896 | NSQTAAASNDNH | −2.4 | 1.97 | 0.51 | −0.12 | ATLVT012XX1008 | 45942 | NSQTGGSTNDNT | 4.53 | 3.04 | 1.03 | 3.08 |
| ATLVT012XX0963 | 45897 | NSQTAAASNDNT | −0.77 | 0.43 | −0.3 | −0.05 | ATLVT012XX1009 | 45943 | NSTAAAASNDNA | 0 | 0.55 | 0.6 | 0.31 |
| ATLVT012XX0964 | 45898 | NSQTAAATNDNA | 1.12 | −0.48 | 2.31 | 0.87 | ATLVT012XX1010 | 45944 | NSTAAAASNDNH | 0.95 | −0.17 | 0.43 | 0.15 |
| ATLVT012XX0965 | 45899 | NSQTAAATNDNH | −0.83 | −0.91 | 1.07 | 3.1 | ATLVT012XX1011 | 45945 | NSTAAAASNDNT | 0.84 | 2.15 | 0.11 | −0.08 |
| ATLVT012XX0966 | 45900 | NSQTAAATNDNT | 0.88 | −0.05 | 0.88 | 1.88 | ATLVT012XX1012 | 45946 | NSTAAAATNDNA | 1.68 | 0.13 | −0.04 | 1.33 |
| ATLVT012XX1013 | 45947 | NSTAAAATNDNH | 2.02 | 1.49 | 0.04 | 1.68 | ATLVT012XX1059 | 45993 | NSTSAAASNDNT | 1.68 | 4.51 | 0.17 | −1.03 |
| ATLVT012XX1014 | 45948 | NSTAAAATNDNT | 1.29 | 1.48 | −0.43 | 0.45 | ATLVT012XX1060 | 45994 | NSTSAAATNDNA | 0.87 | 2.03 | 0.2 | 0.45 |
| ATLVT012XX1015 | 45949 | NSTAAASSNDNA | 0.68 | 0.81 | 0.04 | −0.33 | ATLVT012XX1061 | 45995 | NSTSAAATNDNH | 2.37 | 1.68 | −0.12 | 1.34 |
| ATLVT012XX1016 | 45950 | NSTAAASSNDNH | −0.73 | 1.37 | −0.27 | 1.6 | ATLVT012XX1062 | 45996 | NSTSAAATNDNT | 1.95 | 0.73 | 0.53 | 1.34 |
| ATLVT012XX1017 | 45951 | NSTAAASSNQNT | 1.75 | 0.02 | −0.42 | 0.15 | ATLVT012XX1063 | 45997 | NSTSAASSNDNA | 3.97 | 1.12 | −0.64 | −2.7 |
| ATLVT012XX1018 | 45952 | NSTAAASTNDNA | 2.01 | 1.65 | 1.25 | 1.22 | ATLVT012XX1064 | 45998 | NSTSAASSNDNH | 2.34 | 1.37 | −1.38 | 0.13 |
| ATLVT012XX1019 | 45953 | NSTAAASTNDNH | 0.91 | 0.46 | −0.16 | −0.11 | ATLVT012XX1065 | 45999 | NSTSAASSNDNT | 1.37 | 1.44 | 0.42 | −1.78 |
| ATLVT012XX1020 | 45954 | NSTAAASTNDNT | 1.03 | 2.03 | −0.4 | −0.72 | ATLVT012XX1066 | 46000 | NSTSAASTNDNA | 2.05 | 0.65 | −0.06 | 1.36 |
| ATLVT012XX1021 | 45955 | NSTAAGASNDNA | 2.79 | 2.07 | −1.16 | 0.56 | ATLVT012XX1067 | 46001 | NSTSAASTNDNH | 2.07 | 0.76 | 0.58 | −1.21 |
| ATLVT012XX1022 | 45956 | NSTAAGASNDNH | 2.21 | 2.02 | −0.61 | 1.35 | ATLVT012XX1068 | 46002 | NSTSAASTNDNT | 0.86 | 0.87 | −0.01 | 0.13 |
| ATLVT012XX1023 | 45957 | NSTAAGASNDNT | 3.64 | 2.93 | 0.15 | 1.94 | ATLVT012XX1069 | 46003 | NSTSAGASNDNA | 2.2 | 5.41 | 0.14 | 3.65 |
| ATLVT012XX1024 | 45958 | NSTAAGATNDNA | 0.93 | 2.91 | 0.66 | 0.8 | ATLVT012XX1070 | 46004 | NSTSAGASNDNH | 2.34 | 3.93 | 0.95 | 2.03 |
| ATLVT012XX1025 | 45959 | NSTAAGATNDNH | 2.68 | 5.8 | 0.52 | 1.21 | ATLVT012XX1071 | 46005 | NSTSAGASNQNT | 3.68 | 4.43 | 0.63 | 4.22 |
| ATLVT012XX1026 | 45960 | NSTAAGATNDNT | 2.13 | 2.63 | 0.49 | 0.65 | ATLVT012XX1072 | 46006 | NSTSAGATNDNA | 2.62 | 2.76 | −0.47 | 2.03 |
| ATLVT012XX1027 | 45961 | NSTAAGSSNDNA | 3.49 | 0.51 | −0.19 | 0.75 | ATLVT012XX1073 | 46007 | NSTSAGATNDNH | 4.47 | 3.84 | −0.56 | 2.42 |
| ATLVT012XX1028 | 45962 | NSTAAGSSNDNH | 1.92 | 0.35 | −0.88 | −0.19 | ATLVT012XX1074 | 46008 | NSTSAGATNDNT | 5.03 | 4.81 | −0.07 | 3.25 |
| ATLVT012XX1029 | 45963 | NSTAAGSSNDNT | 3.9 | 1.96 | 0.41 | 2.69 | ATLVT012XX1075 | 46009 | NSTSAGSSNDNA | 2.35 | 3.35 | −0.13 | 2.33 |
| ATLVT012XX1030 | 45964 | NSTAAGSTNDNA | 3.24 | 5.19 | 0.1 | 2.09 | ATLVT012XX1076 | 46010 | NSTSAGSSNDNH | 3.06 | 2.94 | −0.32 | 1.49 |
| ATLVT012XX1031 | 45965 | NSTAAGSTNDNH | 2.62 | 2.18 | 0.8 | 0.94 | ATLVT012XX1077 | 46011 | NSTSAGSSNDNT | 5.38 | 6.49 | 1.29 | 3.02 |
| ATLVT012XX1032 | 45966 | NSTAAGSTNDNT | 4.38 | 5.05 | 1.02 | 3.04 | ATLVT012XX1078 | 46012 | NSTSAGSTNDNA | 3.08 | 2.33 | 1.52 | 2.4 |
| ATLVT012XX1033 | 45967 | NSTAGAASNDNA | 1.26 | 2.25 | −0.9 | −0.23 | ATLVT012XX1079 | 46013 | NSTSAGSTNDNH | 2.81 | 3.21 | −0.13 | 2.47 |
| ATLVT012XX1034 | 45968 | NSTAGAASNDNH | 1.69 | 1.03 | −2.58 | −0.58 | ATLVT012XX1080 | 46014 | NSTSAGSTNDNT | 5.67 | 6.94 | 2.01 | 4.29 |
| ATLVT012XX1035 | 45969 | NSTAGAASNDNT | 3.38 | 1.05 | −2.25 | −0.77 | ATLVT012XX1081 | 46015 | NSTSGAASNDNA | 3.18 | 2.94 | −1.78 | 1.6 |
| ATLVT012XX1036 | 45970 | NSTAGAATNDNA | 2.27 | 3.46 | −1.81 | 0 | ATLVT012XX1082 | 46016 | NSTSGAASNDNH | 3.56 | 3.6 | −0.89 | −0.45 |
| ATLVT012XX1037 | 45971 | NSTAGAATNDNH | 1.12 | 3.36 | −3.43 | 1.42 | ATLVT012XX1083 | 46017 | NSTSGAASNDNT | 2.62 | 2.86 | −0.18 | 0.66 |
| ATLVT012XX1038 | 45972 | NSTAGAATNDNT | 0.4 | 4.05 | −2.18 | 0.74 | ATLVT012XX1084 | 46018 | NSTSGAATNDNA | 2.5 | 3.68 | −1.86 | 1.4 |
| ATLVT012XX1039 | 45973 | NSTAGASSNDNA | 1.95 | 4.4 | 0.06 | 1.75 | ATLVT012XX1085 | 46019 | NSTSGAATNDNH | 3.26 | 3.63 | 0.55 | 1.4 |
| ATLVT012XX1040 | 45974 | NSTAGASSNDNH | 2.18 | 2.94 | −0.42 | 0.39 | ATLVT012XX1086 | 46020 | NSTSGAATNDNT | 3.02 | 3.52 | 0.41 | 1.06 |
| ATLVT012XX1041 | 45975 | NSTAGASSNDNT | 2.9 | 3.23 | −0.32 | 1.7 | ATLVT012XX1087 | 46021 | NSTSGASSNDNH | 2.1 | 4.26 | −0.78 | 0 |
| ATLVT012XX1042 | 45976 | NSTAGASTNDNA | 4.3 | 3.61 | 0.9 | 3.47 | ATLVT012XX1088 | 46022 | NSTSGASSNDNT | 3.3 | 3.07 | −0.32 | 1.65 |
| ATLVT012XX1043 | 45977 | NSTAGASTNDNH | 3.03 | 3.39 | 0.1 | 2.5 | ATLVT012XX1089 | 46023 | NSTSGASTNDNH | 3.27 | 3.21 | −0.83 | 1.26 |
| ATLVT012XX1044 | 45978 | NSTAGASTNDNT | 5.63 | 5.23 | −0.09 | 2.95 | ATLVT012XX1090 | 46024 | NSTSGASTNDNT | 5.39 | 5.39 | 0.64 | 2.16 |
| ATLVT012XX1045 | 45979 | NSTAGGASNDNA | 9.46 | 10.07 | 0.8 | 4.69 | ATLVT012XX1091 | 46025 | NSTSGGASNDNA | 9.7 | 12.41 | 1.52 | 5.44 |
| ATLVT012XX1046 | 45980 | NSTAGGASNDNH | 8.12 | 7.8 | 0.84 | 3.51 | ATLVT012XX1092 | 46026 | NSTSGGASNDNH | 7.98 | 9.47 | 1.07 | 3.41 |
| ATLVT012XX1047 | 45981 | NSTAGGASNDNT | 10.86 | 12.93 | 1.72 | 4.49 | ATLVT012XX1093 | 46027 | NSTSGGASNDNT | 11.16 | 13.46 | 1.63 | 3.8 |
| ATLVT012XX1048 | 45982 | NSTAGGATNDNA | 8.53 | 9.79 | 0.52 | 4.79 | ATLVT012XX1094 | 46028 | NSTSGGATNDNA | 8.76 | 11.94 | 1.88 | 5.31 |
| ATLVT012XX1049 | 45983 | NSTAGGATNDNH | 9.34 | 10.59 | 0.73 | 3.34 | ATLVT012XX1095 | 46029 | NSTSGGATNDNH | 8.8 | 10.51 | 1.1 | 4.12 |
| ATLVT012XX1050 | 45984 | NSTAGGATNDNT | 10.38 | 13.68 | 1.19 | 3.1 | ATLVT012XX1096 | 46030 | NSTSGGATNDNT | 11.07 | 13.53 | 1.25 | 4.22 |
| ATLVT012XX1051 | 45985 | NSTAGGSSNDNA | 11.01 | 13.41 | 0.04 | 3.87 | ATLVT012XX1097 | 46031 | NSTSGGSSNDNH | 8.46 | 9.88 | 1.13 | 3.37 |
| ATLVT012XX1052 | 45986 | NSTAGGSSNDNH | 8.87 | 10.24 | 0.31 | 3.37 | ATLVT012XX1098 | 46032 | NSTSGGSSNDNT | 11.01 | 12.21 | 0.03 | 3.25 |
| ATLVT012XX1053 | 45987 | NSTAGGSSNDNT | 11.28 | 12.66 | −0.59 | 2.98 | ATLVT012XX1099 | 46033 | NSTSGGSTNDNA | 11.31 | 13.26 | 1.54 | 4.09 |
| ATLVT012XX1054 | 45988 | NSTAGGSTNDNA | 11.14 | 13.89 | 0.45 | 3.7 | ATLVT012XX1100 | 46034 | NSTSGGSTNDNH | 9.42 | 10.77 | 0.79 | 3.51 |
| ATLVT012XX1055 | 45989 | NSTAGGSTNDNH | 9.45 | 11.15 | −0.11 | 4.56 | ATLVT012XX1101 | 46035 | NSTSGGSTNDNT | 11.18 | 12.48 | 0.3 | 2.68 |
| ATLVT012XX1056 | 45990 | NSTAGGSTNDNT | 11.18 | 11.98 | −0.94 | 2.52 | ATLVT012XX1102 | 46036 | NSTTAAASNDNA | 3.05 | 2.29 | 0.68 | 1.76 |
| ATLVT012XX1057 | 45991 | NSTSAAASNDNA | 0.33 | 1.45 | −0.78 | −0.98 | ATLVT012XX1103 | 46037 | NSTTAAASNDNH | 1.71 | 2.02 | 0.73 | 0.72 |
| ATLVT012XX1058 | 45992 | NSTSAAASNDNH | 1.01 | 1.43 | 0.66 | −0.68 | ATLVT012XX1104 | 46038 | NSTTAAASNDNT | 2.63 | −0.05 | −0.12 | 1.4 |
| ATLVT012XX1105 | 46039 | NSTTAAATNDNA | 2.43 | 6.26 | 0.22 | −0.34 | ATLVT012XX1151 | 46085 | SGAAAAASNDNH | −1.11 | 1.26 | −1.64 | −2.75 |
| ATLVT012XX1106 | 46040 | NSTTAAATNDNH | 2.99 | 3.12 | 0.43 | 0.87 | ATLVT012XX1152 | 46086 | SGAAAAASNDNT | −2.08 | 0.57 | −1.5 | −2.35 |
| ATLVT012XX1107 | 46041 | NSTTAAATNDNT | 1.03 | 3 | 0.68 | 0.22 | ATLVT012XX1153 | 46087 | SGAAAAATNDNA | −0.71 | 2.79 | −1.38 | −0.16 |
| ATLVT012XX1108 | 46042 | NSTTAASSNDNA | 0.59 | −1.24 | −0.11 | 0.58 | ATLVT012XX1154 | 46088 | SGAAAAATNDNH | 0.2 | 1.03 | −1.49 | −0.37 |
| ATLVT012XX1109 | 46043 | NSTTAASSNDNH | 2.05 | 0.49 | 0.89 | −0.15 | ATLVT012XX1155 | 46089 | SGAAAAATNDNT | 1.81 | 0.46 | −0.08 | −1.33 |
| ATLVT012XX1110 | 46044 | NSTTAASSNDNT | 2.43 | −0.66 | 0.25 | 0.45 | ATLVT012XX1156 | 46090 | SGAAAASSNDNA | −3.07 | −0.49 | −0.48 | −1.34 |
| ATLVT012XX1111 | 46045 | NSTTAASTNDNA | 1.96 | 2.4 | −0.65 | −0.15 | ATLVT012XX1157 | 46091 | SGAAAASSNDNH | −2.14 | 2.27 | −0.95 | −1.2 |
| ATLVT012XX1112 | 46046 | NSTTAASTNDNH | 0.5 | 2.09 | 0.52 | −1.17 | ATLVT012XX1158 | 46092 | SGAAAASSNDNT | −1.26 | 0.85 | −0.24 | −1.95 |
| ATLVT012XX1113 | 46047 | NSTTAASTNDNT | 3.02 | 2.37 | −0.57 | 1.05 | ATLVT012XX1159 | 46093 | SGAAAASTNDNA | −2.06 | 0.6 | 0.75 | −1.01 |
| ATLVT012XX1114 | 46048 | NSTTAGASNDNA | 1.26 | 1.89 | 0.96 | 1.47 | ATLVT012XX1160 | 46094 | SGAAAASTNDNH | −2.71 | 1.23 | −0.16 | −1.11 |
| ATLVT012XX1115 | 46049 | NSTTAGASNDNH | 2.68 | 2.38 | 0.18 | 2.67 | ATLVT012XX1161 | 46095 | SGAAAASTNDNT | −1 | 1.42 | −2.27 | −2.42 |
| ATLVT012XX1116 | 46050 | NSTTAGASNDNT | 4.98 | 3 | 1.48 | 3.55 | ATLVT012XX1162 | 46096 | SGAAAGASNDNA | −3.36 | −1.01 | −0.84 | −1.85 |
| ATLVT012XX1117 | 46051 | NSTTAGATNDNA | 0.85 | 2.25 | −0.21 | 1.28 | ATLVT012XX1163 | 46097 | SGAAAGASNDNH | −1 | −0.06 | −0.7 | −1.17 |
| ATLVT012XX1118 | 46052 | NSTTAGATNDNH | 2.13 | 2.85 | 0.65 | 1.88 | ATLVT012XX1164 | 46098 | SGAAAGASNDNT | −2.27 | −1.24 | 0.13 | −2.24 |
| ATLVT012XX1119 | 46053 | NSTTAGANDNT | 1.8 | 2.94 | 0.7 | 2.58 | ATLVT012XX1165 | 46099 | SGAAAGATNDNA | −0.63 | 3.01 | −1.42 | 0.98 |
| ATLVT012XX1120 | 46054 | NSTTAGSSNDNA | 1.37 | 2.42 | 1.18 | 3.41 | ATLVT012XX1166 | 46100 | SGAAAGATNDNH | −0.78 | 1.24 | 1.38 | 1.31 |
| ATLVT012XX1121 | 46055 | NSTTAGSSNDNH | 1.73 | 0.25 | 0.81 | 0.54 | ATLVT012XX1167 | 46101 | SGAAAGATNDNT | 0.09 | 2.08 | −1.46 | 0.94 |
| ATLVT012XX1122 | 46056 | NSTTAGSSNDNT | 3.57 | 2.84 | 0.95 | 2.94 | ATLVT012XX1168 | 46102 | SGAAAGSSNDNA | 0.12 | −2.55 | −0.95 | −1.62 |
| ATLVT012XX1123 | 46057 | NSTTAGSTNDNA | 1.56 | 2.05 | 0.25 | 2.1 | ATLVT012XX1169 | 46103 | SGAAAGSSNDNH | 1.13 | 2.48 | −0.44 | 0.57 |
| ATLVT012XX1124 | 46058 | NSTTAGSTNDNH | 2.06 | 1.76 | −0.09 | 1.58 | ATLVT012XX1170 | 46104 | SGAAAGSSNDNT | −1.73 | −1.09 | −1.49 | −0.66 |
| ATLVT012XX1125 | 46059 | NSTTAGSTNDNT | 3.37 | 5.77 | 1.8 | 3.16 | ATLVT012XX1171 | 46105 | SGAAAGSTNDNA | −1.5 | 2.01 | −0.26 | 0.2 |
| ATLVT012XX1126 | 46060 | NSTTGAASNDNA | 1.78 | 1.21 | −0.03 | −1.35 | ATLVT012XX1172 | 46106 | SGAAAGSTNDNH | −2.56 | 1.11 | 0.16 | 2.44 |
| ATLVT012XX1127 | 46061 | NSTTGAASNDNH | 1.26 | 2.53 | −15 | −1.52 | ATLVT012XX1173 | 46107 | SGAAAGSTNDNT | −1.14 | 0.52 | 0.55 | 1.71 |
| ATLVT012XX1128 | 46062 | NSTTGAASNDNT | 1.48 | 2.92 | −0.98 | −1.79 | ATLVT012XX1174 | 46108 | SGAAGAASNDNA | −1.62 | −0.67 | −2.67 | −2.7 |
| ATLVT012XX1129 | 46063 | NSTTGAATNDNA | 1.5 | 3.25 | −1.77 | 0.14 | ATLVT012XX1175 | 46109 | SGAAGAASNDNH | 1.63 | 1.14 | 2.27 | 0.83 |
| ATLVT012XX1130 | 46064 | NSTTGAATNDNH | 1.69 | 2.64 | −1.74 | 1.91 | ATLVT012XX1176 | 46110 | SGAAGAASNDNT | −1.77 | −2.09 | −2.17 | −1.3 |
| ATLVT012XX1131 | 46065 | NSTTGAATNDNT | 1.62 | 1.25 | 0.13 | −0.27 | ATLVT012XX1177 | 46111 | SGAAGAATNDNA | 0.78 | −0.79 | −4.35 | 0.18 |
| ATLVT012XX1132 | 46066 | NSTTGASSNDNA | 2.38 | 2.82 | 0.2 | 1.17 | ATLVT012XX1178 | 46112 | SGAAGAATNDNH | 1.77 | 2.14 | −1.71 | 0.94 |
| ATLVT012XX1133 | 46067 | NSTTGASSNDNH | 2.93 | 1.86 | −0.34 | 0.05 | ATLVT012XX1179 | 46113 | SGAAGAATNDNT | 1.58 | 1.67 | −2.87 | −0.81 |
| ATLVT012XX1134 | 46068 | NSTTGASSNDNT | 3.45 | 1.89 | 0.66 | −1.11 | ATLVT012XX1180 | 46114 | SGAAGASSNDNA | −1.8 | 2.41 | 0.22 | −3.56 |
| ATLVT012XX1135 | 46069 | NSTTGASTNDNA | 2.79 | 1.07 | 1.16 | 0.68 | ATLVT012XX1181 | 46115 | SGAAGASSNDNH | −0.52 | 0.79 | −1.08 | −2.25 |
| ATLVT012XX1136 | 46070 | NSTTGASTNDNH | 1.84 | 1.92 | −0.32 | 0.63 | ATLVT012XX1182 | 46116 | SGAAGASSNDNT | −0.55 | 0.58 | −1.19 | −2.67 |
| ATLVT012XX1137 | 46071 | NSTTGASTNDNT | 1.7 | 2.7 | 0.82 | 1.53 | ATLVT012XX1183 | 46117 | SGAAGASTNDNA | −0.87 | 0.42 | 0.19 | 1.44 |
| ATLVT012XX1138 | 46072 | NSTTGGASNDNA | 6.72 | 8.93 | 2.3 | 4.29 | ATLVT012XX1184 | 46118 | SGAAGASTNDNH | 0.32 | 1.31 | 0.11 | −0.53 |
| ATLVT012XX1139 | 46073 | NSTTGGASNDNH | 5.29 | 6.39 | 0.68 | 3.29 | ATLVT012XX1185 | 46119 | SGAAGASTNDNT | −0.15 | 0.32 | −1.27 | −0.66 |
| ATLVT012XX1140 | 46074 | NSTTGGASNDNT | 8.98 | 11.19 | 1.74 | 4.65 | ATLVT012XX1186 | 46120 | SGAAGGASNDNA | 3.94 | 3.94 | −0.53 | 2.79 |
| ATLVT012XX1141 | 46075 | NSTTGGATNDNA | 6.76 | 8.12 | 1.6 | 5.37 | ATLVT012XX1187 | 46121 | SGAAGGASNDNH | 7.1 | 4.45 | 0.79 | 3.97 |
| ATLVT012XX1142 | 46076 | NSTTGGATNDNH | 7.26 | 8.16 | 0.93 | 4.25 | ATLVT012XX1188 | 46122 | SGAAGGASNDNT | 4.86 | 4.79 | −0.57 | 0.5 |
| ATLVT012XX1143 | 46077 | NSTTGGATNDNT | 8.78 | 10.8 | 1.66 | 4.75 | ATLVT012XX1189 | 46123 | SGAAGGATNDNA | 5.1 | 7.93 | −1 | 0.88 |
| ATLVT012XX1144 | 46078 | NSTTGGSSNDNA | 9.2 | 10.34 | 2.23 | 4.68 | ATLVT012XX1190 | 46124 | SGAAGGATNDNH | 9.36 | 11.17 | −2.08 | 2.19 |
| ATLVT012XX1145 | 46079 | NSTTGGSSNDNH | 7.06 | 7.38 | 0.79 | 3.51 | ATLVT012XX1191 | 46125 | SGAAGGATNDNT | 5.15 | 6.51 | −0.75 | 0.17 |
| ATLVT012XX1146 | 46080 | NSTTGGSSNDNT | 8.83 | 11.88 | 0.65 | 3.79 | ATLVT012XX1192 | 46126 | SGAAGGSSNDNA | 1.58 | 3.42 | −0.79 | −0.52 |
| ATLVT012XX1147 | 46081 | NSTTGGSTNDNA | 10.05 | 11.99 | 1.82 | 4.71 | ATLVT012XX1193 | 46127 | SGAAGGSSNDNH | 2.11 | 1.9 | −1.07 | 0.54 |
| ATLVT012XX1148 | 46082 | NSTTGGSTNDNH | 8.27 | 8.69 | 0.68 | 3.72 | ATLVT012XX1194 | 46128 | SGAAGGSSNDNT | 2.69 | 2.37 | −0.1 | 0.09 |
| ATLVT012XX1149 | 46083 | NSTTGGSTNDNT | 10.94 | 12.44 | 0.99 | 3.16 | ATLVT012XX1195 | 46129 | SGAAGGSTNDNA | 5.1 | 4.66 | −0.91 | 1.7 |
| ATLVT012XX1150 | 46084 | SGAAAAASNDNA | −2.1 | 4.68 | −1.33 | −1.14 | ATLVT012XX1196 | 46130 | SGAAGGSTNDNH | 3.77 | 6.29 | −0.02 | 1.61 |
| ATLVT012XX1197 | 46131 | SGAAGGSTNDNT | 4.16 | 6.51 | −0.44 | 2.05 | ATLVT012XX1243 | 46177 | SGASGGSTNDNA | 3.76 | 3.46 | 1.32 | 3.19 |
| ATLVT012XX1198 | 46132 | SGASAAASNDNA | −2.76 | 3.82 | −0.7 | 0.49 | ATLVT012XX1244 | 46178 | SGASGGSTNDNH | 5.81 | 4.21 | 1.17 | 4.18 |
| ATLVT012XX1199 | 46133 | SGASAAASNDNH | −1.67 | 0.41 | −0.71 | 0.16 | ATLVT012XX1245 | 46179 | SGASGGSTNDNT | 3.86 | 2.62 | 1.13 | 2.35 |
| ATLVT012XX1200 | 46134 | SGASAAASNDNT | −1.84 | 0.76 | 0.9 | 1.89 | ATLVT012XX1246 | 46180 | SGATAAASNDNA | −0.21 | 0.38 | 0.4 | −0.78 |
| ATLVT012XX1201 | 46135 | SGASAAATNDNA | −0.68 | −0.28 | −0.24 | 0.81 | ATLVT012XX1247 | 46181 | SGATAAASNDNH | −0.01 | 2.12 | 1.59 | 0.64 |
| ATLVT012XX1202 | 46136 | SGASAAATNDNH | −0.69 | 1.91 | 0.84 | 1.97 | ATLVT012XX1248 | 46182 | SGATAAASNDNT | −1.94 | 2.04 | −0.35 | −0.62 |
| ATLVT012XX1203 | 46137 | SGASAAATNDNT | 0.55 | 0.9 | 0.25 | 0.94 | ATLVT012XX1249 | 46183 | SGATAAATNDNA | 2.88 | −0.38 | 0.35 | −0.41 |
| ATLVT012XX1204 | 46138 | SGASAASSNDNA | −0.43 | −0.98 | −0.63 | −0.57 | ATLVT012XX1250 | 46184 | SGATAAATNDNH | 0.63 | 2.4 | −0.13 | 2.16 |
| ATLVT012XX1205 | 46139 | SGASAASSNDNH | −1.81 | −1.95 | −0.14 | −1.71 | ATLVT012XX1251 | 46185 | SGATAAATNDNT | 1.35 | 0.08 | −0.41 | −0.84 |
| ATLVT012XX1206 | 46140 | SGASAASSNDNT | −0.97 | −2.23 | −1.03 | −0.7 | ATLVT012XX1252 | 46186 | SGATAASSNDNA | −0.61 | 0.71 | 1.19 | 0.6 |
| ATLVT012XX1207 | 46141 | SGASAASTNDNA | 1.02 | 1.62 | 1.6 | 0.8 | ATLVT012XX1253 | 46187 | SGATAASSNDNH | −0.69 | 0.8 | 0.01 | 0.64 |
| ATLVT012XX1208 | 46142 | SGASAASTNDNH | 2.76 | 0.77 | 0.46 | 0.07 | ATLVT012XX1254 | 46188 | SGATAASSNDNT | −0.63 | −0.21 | 1.09 | −0.59 |
| ATLVT012XX1209 | 46143 | SGASAASTNQNT | 3.75 | 0.7 | −0.67 | 0.71 | ATLVT012XX1255 | 46189 | SGATAASTNDNA | −0.74 | −0.05 | 1 | 0.25 |
| ATLVT012XX1210 | 46144 | SGASAGASNDNA | −0.26 | 0.84 | −0.89 | 0.37 | ATLVT012XX1256 | 46190 | SGATAASTNDNH | −1.08 | 0.76 | 0.63 | −0.03 |
| ATLVT012XX1211 | 46145 | SGASAGASNDNH | −0.99 | 2.97 | 1.02 | 1.2 | ATLVT012XX1257 | 46191 | SGATAASTNDNT | −1.07 | −0.78 | −0.53 | 0.57 |
| ATLVT012XX1212 | 46146 | SGASAGASNDNT | 0.47 | −0.27 | −0.12 | −0.13 | ATLVT012XX1258 | 46192 | SGATAGASNDNA | −0.82 | 1.3 | −0.14 | −0.22 |
| ATLVT012XX1213 | 46147 | SGASAGATNDNA | −0.16 | 3.73 | 1.22 | 1.04 | ATTVT012XX1259 | 46193 | SGATAGASNDNH | −0.62 | 1.1 | 0.85 | 1.9 |
| ATLVT012XX1214 | 46148 | SGASAGATNDNH | 1.24 | 2.88 | 1.43 | 2.19 | ATLVT012XX1260 | 46194 | SGATAGASNDNT | −0.45 | 2.17 | 0.09 | 1.69 |
| ATLVT012XX1215 | 46149 | SGASAGATNDNT | 2.68 | 3.34 | 0.71 | 0.24 | ATLVT012XX1261 | 46195 | SGATAGATNDNA | −0.75 | 2.02 | −0.44 | 0.46 |
| ATLVT012XX1216 | 46150 | SGASAGSSNDNA | −0.42 | 0.89 | 0.51 | −0.43 | ATLVT012XX1262 | 46196 | SGATAGATNDNH | 1.35 | 1.51 | 0.8 | 3.5 |
| ATLVT012XX1217 | 46151 | SGASAGSSNDNH | 0.57 | 2.84 | 1.09 | 0.64 | ATLVT012XX1263 | 46197 | SGATAGATNDNT | 3.84 | 0.14 | −0.38 | 2.23 |
| ATLVT012XX1218 | 46152 | SGASAGSSNDNT | 0.16 | 3.14 | −0.26 | −1.4 | ATLVT012XX1264 | 46198 | SGATAGSSNDNA | −2.61 | −1.95 | 0.38 | −0.38 |
| ATLVT01XXX1219 | 46153 | SGASAGSTNDNA | −1.54 | 2.02 | 0.38 | 0.31 | ATLVT012XX1265 | 46199 | SGATAGSSNDNH | −2.25 | 0.07 | −0.38 | 1 |
| ATLVT012XX1220 | 46154 | SGASAGSTNDNH | −0.82 | 1.18 | 1.03 | 2.14 | ATLVT012XX1266 | 46200 | SGATAGSSNDNT | −1.45 | 0.38 | 0.59 | −0.75 |
| ATLVT012XX1221 | 46155 | SGASAGSTNDNT | −1.35 | 0.93 | 0.68 | 1.62 | ATLVT012XX1267 | 46201 | SGATAGSTNDNA | 0.34 | −0.04 | −0.36 | 0.31 |
| ATLVT012XX1222 | 46156 | SGASGAASNDNA | 0.21 | −0.68 | −0.39 | −0.93 | ATLVT012XX1268 | 46202 | SGATAGSTNDNH | −0.08 | −1.08 | −0.36 | 0.67 |
| ATLVT012XX1223 | 46157 | SGASGAASNDNH | 0.58 | 1.27 | 0.52 | −0.05 | ATLVT012XX1269 | 46203 | SGATAGSTNDNT | 1.13 | −0.76 | 0.43 | 1.67 |
| ATLVT012XX1224 | 46158 | SGASGAASNDNT | 0.1 | −0.07 | −0.34 | −0.18 | ATLVT012XX1270 | 46204 | SGATGAASNDNA | 1.91 | −1.61 | −0.18 | −1.32 |
| ATLVT012XX1225 | 46159 | SGASGAATNDNA | 1.21 | 2 | 0.08 | 0.05 | ATLVT012XX1271 | 46205 | SGATGAASNDNH | 0.44 | 0.73 | −1 | 2.37 |
| ATLVT012XX1226 | 46160 | SGASGAATNDNH | 1.29 | 3.83 | −0.32 | 3.91 | ATTVT012XX1272 | 46206 | SGATGAASNDNT | −0.44 | −1.43 | −0.25 | 0.1 |
| ATLVT012XX1227 | 46161 | SGASGAATNDNT | 1.12 | 1.15 | 1.14 | −2.01 | ATLVT012XX1273 | 46207 | SGATGAATNDNA | 0.13 | 1.45 | −1.61 | 0.26 |
| ATLVT012XX1228 | 46162 | SGASGASSNDNA | −0.23 | 1.02 | 1.56 | 0.86 | ATLVT012XX1274 | 46208 | SGATGAATNDNH | 2.54 | 5.14 | 1.7 | 2.11 |
| ATLVT012XX1229 | 46163 | SGASGASSNDNH | 0.25 | 0.43 | 1.69 | 1.63 | ATLVT012XX1275 | 46209 | SGATGAATNDNT | 1.09 | 2.36 | 0 | −0.51 |
| ATLVT012XX1230 | 46164 | SGASGASSNDNT | 0.48 | −0.47 | 0.57 | −0.18 | ATLVT012XX1276 | 46210 | SGATGASSNDNA | −0.31 | 1.34 | 1.01 | −0.51 |
| ATLVT012XX1231 | 46165 | SGASGASTNDNA | −0.11 | −0.76 | 0.83 | 1.84 | ATLVT012XX1277 | 46211 | SGATGASSNDNH | 0.23 | 0.1 | 1.33 | −0.27 |
| ATLVT012XX1232 | 46166 | SGASGASTNDNH | 0.24 | 0.28 | −0.33 | 2.35 | ATLVT012XX1278 | 46212 | SGATGASSNDNT | 0.22 | 0.99 | 1.37 | −0.19 |
| ATLVT012XX1233 | 46167 | SGASGASTNDNT | 0.13 | 0.02 | 1.01 | 1.67 | ATLVT012XX1279 | 46213 | SGATGASTNDNA | 2.91 | 3.44 | 0.91 | −0.52 |
| ATLVT012XX1234 | 46168 | SGASGGASNDNA | 2.47 | 3.05 | 0.6 | 1.38 | ATLVT012XX1280 | 46214 | SGATGASTNDNH | 1.58 | 0.87 | 0.22 | 2.06 |
| ATLVT012XX1235 | 46169 | SGASGGASNDNH | 6.92 | 8.34 | 0.88 | 4.23 | ATLVT012XX1281 | 46215 | SGATGASTNDNT | 2.78 | 0.33 | 1.05 | −0.88 |
| ATLVT012XX1236 | 46170 | SGASGGASNDNT | 3.57 | 5.29 | 0.42 | 1.15 | ATLVT012XX1282 | 46216 | SGATGGASNDNA | 1.19 | 1.2 | −0.39 | 1.82 |
| ATLVT012XX1237 | 46171 | SGASGGATNDNA | 4.02 | 3.91 | 0.87 | 2.25 | ATLVT012XX1283 | 46217 | SGATGGASNDNH | 2.49 | 4.54 | 0.11 | 3.28 |
| ATLVT012XX1238 | 46172 | SGASGGATNDNH | 9.39 | 11.76 | 0.9 | 4.76 | ATLVT012XX1284 | 46218 | SGATGGASNDNT | 2.01 | 2.03 | 1.24 | 1.19 |
| ATLVT012XX1239 | 46173 | SGASGGATNDNT | 4.65 | 4.59 | 1.02 | 2.79 | ATLVT012XX1285 | 46219 | SGATGGATNDNA | 3.94 | 2.84 | 1.68 | 2.76 |
| ATLVT012XX1240 | 46174 | SGASGGSSNDNA | 2.85 | 2.39 | −0.56 | 1.43 | ATLVT012XX1286 | 46220 | SGATGGATNDNH | 8.55 | 9.86 | 1.54 | 4.86 |
| ATLVT012XX1241 | 46175 | SGASGGSSNDNH | 2.26 | 2.39 | 0.22 | 2.74 | ATLVT012XX1287 | 46221 | SGATGGATNDNT | 4 | 3.62 | 1.28 | 1.42 |
| ATLVT012XX1242 | 46176 | SGASGGSSNDNT | 4.09 | 3.65 | 0.81 | 2.59 | ATLVT012XX1288 | 46222 | SGATGGSSNDNA | 1.41 | 1.62 | 0.34 | 1.26 |
| ATLVT012XX1289 | 46223 | SGATGGSSNDNH | 1.5 | 2.07 | 0.01 | 0.88 | ATLVT012XX1335 | 46269 | SGEAGGATNDNT | 5.63 | 6.15 | 1.1 | 2.34 |
| ATLVT01XXX1290 | 46224 | SGATGGSSNDNT | 3.78 | 1.22 | 0.09 | 1.26 | ATLVT012XX1336 | 46270 | SGEAGGSSNDNA | 2.17 | 4.62 | −0.35 | 1.95 |
| ATLVT012XX1291 | 46225 | SGATGGSTNDNA | 3.24 | 2.56 | −0.82 | 3.18 | ATLVT012XX1337 | 46271 | SGEAGGSSNDNH | 2 | 1.34 | 0.02 | 1.95 |
| ATLVT012XX1292 | 46226 | SGATGGSTNDNH | 4.21 | 3.85 | 0.14 | 4.24 | ATLVT012XX1338 | 46272 | SGEAGGSSNDNT | 2.24 | 3.16 | −0.03 | 2.72 |
| ATLVT012XX1293 | 46227 | SGATGGSTNDNT | 2.43 | 2.15 | 0.37 | 2.09 | ATLVT012XX1339 | 46273 | SGEAGGSTNDNA | 3.24 | 4.26 | 0.15 | 1.05 |
| ATLVT012XX1294 | 46228 | SGEAAAASNDNA | −1.17 | 0.79 | −0.68 | 0.89 | ATLVT012XX1340 | 46274 | SGEAGGSTNDNH | 5.25 | 6.05 | 1.44 | 3.54 |
| ATLVT012XX1295 | 46229 | SGEAAAASNDNH | −0.16 | 2.46 | 0.28 | 1.53 | ATLVT012XX1341 | 46275 | SGEAGGSTNDNT | 3.66 | 3.48 | 0.56 | 3.16 |
| ATLVT012XX1296 | 46230 | SGEAAAASNDNT | −1.53 | 2.82 | −0.02 | 1.28 | ATLVT012XX1342 | 46276 | SGESAAASNDNA | −1.37 | −1.44 | −1.16 | 0.38 |
| ATLVT012XX1297 | 46231 | SGEAAAATNDNA | 1.78 | 1.32 | −0.34 | 0.76 | ATLVT012XX1343 | 46277 | SGESAAASNDNH | −0.98 | −1.87 | −0.43 | −1.34 |
| ATLVT01XXX1298 | 46232 | SGEAAAATNDNH | −1.16 | 2.66 | −0.3 | 0.29 | ATLVT012XX1344 | 46278 | SGESAAASNDNT | −2.13 | −2.76 | 0.46 | −0.72 |
| ATLVT012XX1299 | 46233 | SGEAAAATNDNT | 0.45 | 4.07 | −0.88 | −2.05 | ATLVT012XX1345 | 46279 | SGESAAATNDNA | −0.44 | −0.89 | 0.21 | −0.84 |
| ATLVT012XX1300 | 46234 | SGEAAASSNDNA | 0.94 | −1.01 | −0.2 | −2.09 | ATLVT012XX1346 | 46280 | SGESAAATNDNH | 0.34 | 0.09 | −1.11 | −0.68 |
| ATLVT012XX1301 | 46235 | SGEAAASSNDNH | 0.9 | −1.15 | 0.28 | −1.14 | ATLVT012XX1347 | 46281 | SGESAAATNDNT | 0 | −1.49 | −0.01 | −0.47 |
| ATLVT012XX1302 | 46236 | SGEAAASSNDNT | 0.25 | 0.06 | 0.67 | −1.91 | ATLVT012XX1348 | 46282 | SGESAASSNDNA | −1.81 | −0.73 | −0.9 | −0.04 |
| ATLVT012XX1303 | 46237 | SGEAAASTNDNA | −1.95 | −1.21 | 0.47 | 1.72 | ATLVT012XX1349 | 46283 | SGESAASSNDNH | 0.36 | 2.16 | 0.47 | −0.07 |
| ATLVT012XX1304 | 46238 | SGEAAASTNDNH | −1.2 | 0.67 | −0.85 | 1.17 | ATLVT012XX1350 | 46284 | SGESAASSNDNT | −0.91 | 0.53 | 0.01 | −2.59 |
| ATLVT012XX1305 | 46239 | SGEAAASTNQNT | −0.13 | −0.87 | −1.47 | −1.79 | ATLVT012XX1351 | 46285 | SGESAASTNDNA | 0.7 | 0.93 | 0.25 | −1.36 |
| ATLVT012XX1306 | 46240 | SGEAAGASNDNA | −2.17 | 1.96 | −0.22 | −2.53 | ATLVT012XX1352 | 46286 | SGESAASTNDNH | −0.48 | 0.56 | 0.27 | −0.95 |
| ATLVT012XX1307 | 46241 | SGEAAGASNDNH | −1.17 | 2.53 | −0.97 | −2.08 | ATLVT012XX1353 | 46287 | SGESAASTNDNT | −0.28 | −1.09 | 0.58 | −1.74 |
| ATLVT012XX1308 | 46242 | SGEAAGASNDNT | −1.66 | 3.35 | −1.19 | −1.94 | ATLVT012XX1354 | 46288 | SGESAGASNDNA | 0.72 | −0.94 | −0.92 | −2.62 |
| ATLVT012XX1309 | 46243 | SGEAAGATNDNA | −2.19 | −0.04 | 0.55 | −0.18 | ATLVT012XX1355 | 46289 | SGESAGASNDNH | 1.43 | 0.44 | −0.53 | −1.88 |
| ATLVT012XX1310 | 46244 | SGEAAGATNDNH | 0.17 | 4.41 | −1.78 | 0.58 | ATLVT012XX1356 | 46290 | SGESAGASNDNT | 3.23 | −0.87 | 0.11 | −2.19 |
| ATLVT012XX1311 | 46245 | SGEAAGATNDNT | 0.14 | 1.67 | −0.27 | 0.67 | ATLVT012XX1357 | 46291 | SGESAGATNDNA | 0.93 | −1.1 | 0.07 | 0.21 |
| ATLVT012XX1312 | 46246 | SGEAAGSSNDNA | −0.35 | −1.21 | −1.49 | −0.56 | ATLVT012XX1358 | 46292 | SGESAGATNDNH | 2.37 | 1.82 | −0.5 | 0.17 |
| ATLVT012XX1313 | 46247 | SGEAAGSSNDNH | −0.79 | −1.1 | −0.13 | −0.13 | ATLVT012XX1359 | 46293 | SGESAGATNDNT | 2.02 | 2.53 | −0.73 | −1.71 |
| ATLVT012XX1314 | 46248 | SGEAAGSENDNT | 1.07 | 1.13 | −0.72 | −0.79 | ATLVT012XX1360 | 46294 | SGESAGSSNDNA | 1.84 | 0.35 | −0.38 | −0.85 |
| ATLVT012XX1315 | 46249 | SGEAAGSTNDNA | 1.32 | 1.4 | −0.34 | 0.68 | ATLVT012XX1361 | 46295 | SGESAGSSNDNH | 0.08 | −1.75 | 0.26 | −0.58 |
| ATLVT012XX1316 | 46250 | SGEAAGSTNDNH | 1.29 | 1.87 | −1.1 | 1.49 | ATLVT012XX1362 | 46296 | SGESAGSSNDNT | 0.56 | −1.41 | 0.56 | −1.14 |
| ATLVT012XX1317 | 46251 | SGEAAGSTNDNT | 1.15 | 0.71 | 1.39 | 0.77 | ATLVT012XX1363 | 46297 | SGESAGSTNDNA | 0.1 | 1.33 | 1.18 | −1.3 |
| ATLVT012XX1318 | 46252 | SGEAGAASNDNA | −0.42 | −0.41 | 0.51 | −1.67 | ATLVT012XX1364 | 46298 | SGESAGSTNDNH | 1.77 | 2 | 0.27 | 0.64 |
| ATLVT012XX1319 | 46253 | SGEAGAASNDNH | −0.93 | 2.62 | −1.22 | −0.97 | ATLVT012XX1365 | 46299 | SGESAGSTNDNT | 1.75 | −0.4 | 0.16 | 1.45 |
| ATLVT012XX1320 | 46254 | SGEAGAASNDNT | −2.17 | −1.21 | −0.74 | −2.7 | ATLVT012XX1366 | 46300 | SGESGAASNDNA | −1.18 | −0.57 | −0.6 | −1.9 |
| ATLVT012XX1321 | 46255 | SGEAGAATNDNA | −1.97 | 2.87 | −0.55 | 1.03 | ATLVT012XX1367 | 46301 | SGESGAASNDNH | 0.94 | 1 | −1.07 | −0.85 |
| ATLVT012XX1322 | 46256 | SGEAGAATNDNH | −1.18 | 1.77 | 0.8 | 1.6 | ATLVT012XX1368 | 46302 | SGESGAASNDNT | −0.96 | −0.85 | 0.43 | −1.01 |
| ATLVT012XX1323 | 46257 | SGEAGAATNDNT | −2.14 | −0.15 | −0.55 | 0.59 | ATLVT012XX1369 | 46303 | SGESGAATNDNA | −0.89 | 0.88 | −0.14 | −1.55 |
| ATLVT012XX1324 | 46258 | SGEAGASSNDNA | 1.63 | 1.66 | 0.73 | 0.06 | ATLVT012XX1370 | 46304 | SGESGAATNDNH | −1.06 | 0.53 | −0.52 | 0.93 |
| ATLVT012XX1325 | 46259 | SGEAGASSNDNH | −0.93 | −1.07 | −0.02 | −0.02 | ATLVT012XX1371 | 46305 | SGESGAATNDNT | −0.8 | 0.06 | 0.34 | 0.19 |
| ATLVT012XX1326 | 46260 | SGEAGASSNDNT | 0.7 | −1.67 | 0.56 | 0.74 | ATLVT012XX1372 | 46306 | SGESGASSNDNA | 0.6 | 0.66 | −0.53 | −0.84 |
| ATLVT012XX1327 | 46261 | SGEAGASTNDNA | −0.44 | 3.51 | −0.99 | −0.77 | ATLVT012XX1373 | 46307 | SGESGASSNDNH | −0.54 | −0.85 | −0.32 | −1.57 |
| ATLVT012XX1328 | 46262 | SGEAGASTNDNH | −0.79 | 1.12 | −0.77 | 1.69 | ATLVT012XX1374 | 46308 | SGESGASSNDNT | 0.16 | −0.46 | −0.28 | −0.91 |
| ATLVT012XX1329 | 46263 | SGEAGASTNDNT | −1 | 0.71 | 0.34 | 0.09 | ATLVT012XX1375 | 46309 | SGESGASTNDNA | −0.48 | 1.47 | −0.3 | −0.81 |
| ATLVT012XX1330 | 46264 | SGEAGGASNDNA | 3.14 | 2.38 | 0.35 | 1.4 | ATLVT012XX1376 | 46310 | SGESGASTNDNH | −1.9 | 0.44 | −0.63 | 1.12 |
| ATLVT012XX1331 | 46265 | SGEAGGASNDNH | 5.34 | 5.54 | 1.11 | 3.28 | ATLVT012XX1377 | 46311 | SGESGASTNDNT | −0.09 | −1.4 | −0.05 | 0.85 |
| ATLVT012XX1332 | 46266 | SGEAGGASNDNT | 2.74 | 5.44 | 0.56 | 1.55 | ATLVT012XX1378 | 46312 | SGESGGASNDNA | 3.04 | 1.99 | 1.24 | 1.66 |
| ATLVT012XX1333 | 46267 | SGEAGGATNDNA | 4.67 | 4.89 | 0.93 | 1.24 | ATLVT012XX1379 | 46313 | SGESGGASNHNH | 3.53 | 4.21 | 1.15 | 3.62 |
| ATLVT012XX1334 | 46268 | SGEAGGATNDNH | 9.25 | 11.42 | 1.08 | 4.43 | ATLVT012XX1380 | 46314 | SGESGGASNDNT | 2.7 | 2.45 | 1.59 | 0.48 |
| ATLVT012XX1381 | 46315 | SGESGGATNDNA | 3.86 | 4.42 | 1.63 | 1.05 | ATLVT012XX1427 | 46361 | SGETGGASNDNH | 3.1 | 4.03 | 0.34 | 2.04 |
| ATLVT012XX1382 | 46316 | SGESGGATNDNH | 8.54 | 9.82 | 1.52 | 4.17 | ATLVT012XX1428 | 46362 | SGETGGASNDNT | 1.7 | 2.85 | 0.52 | 0.67 |
| ATLVT012XX1383 | 46317 | SGESGGATNDNT | 4.43 | 4.03 | 0.74 | 0.88 | ATLVT012XX1429 | 46363 | SGETGGATNDNA | 2.98 | 2.67 | −0.06 | 2.82 |
| ATLVT012XX1384 | 46318 | SGESGGSSNDNA | 1.38 | 3.89 | 0.81 | 0.96 | ATLVT012XX1430 | 46364 | SGETGGATNDNH | 7.39 | 8.19 | 1.77 | 4.17 |
| ATLVT012XX1385 | 46319 | SGESGGSSNDNH | 1.38 | 2.62 | 0.85 | 2.32 | ATLVT012XX1431 | 46365 | SGETGGATNDNT | 3.41 | 2.73 | 0.75 | 2.75 |
| ATLVT012XX1386 | 46320 | SGESGGSSNDNT | 2.82 | 2.4 | 0.03 | 0.78 | ATLVT012XX1432 | 46366 | SGETGGSSNDNA | 0.29 | 2.33 | −0.3 | 1.59 |
| ATLVT012XX1387 | 46321 | SGESGGSTNDNA | 3.09 | 2.78 | 0.29 | 2.05 | ATLVT012XX1433 | 46367 | SGETGGSSNDNH | 2.01 | 1.15 | −0.1 | −0.53 |
| ATLVT012XX1388 | 46322 | SGESGGSTNDNH | 4.34 | 4 | 0.64 | 2.73 | ATLVT012XX1434 | 46368 | SGETGGSSNDNT | 2.15 | 0.63 | 0.54 | −0.49 |
| ATLVT012XX1389 | 46323 | SGESGGSTNDNT | 3.52 | 1.65 | 0.54 | 2.7 | ATLVT012XX1435 | 46369 | SGETGGSTNDNA | 1.65 | 2.25 | 0.78 | 2.27 |
| ATLVT012XX1390 | 46324 | SGETAAASNDNA | 2.45 | −2.56 | 0.66 | 0.11 | ATLVT012XX1436 | 46370 | SGETGGSTNDNH | 1.91 | 2.34 | 0.3 | 2.09 |
| ATLVT012XX1391 | 46325 | SGETAAASNDNH | 0 | −0.13 | −0.31 | −0.73 | ATLVT012XX1437 | 46371 | SGETGGSTNDNT | 2.07 | 1.05 | 0.98 | 1.29 |
| ATLVT012XX1392 | 46326 | SGETAAASNDNT | −0.15 | −1.8 | −0.35 | 0.37 | ATLVT012XX1438 | 46372 | SGQAAAASNDNA | 2.83 | 2.52 | 0.14 | −0.93 |
| ATLVT012XX1393 | 46327 | SGETAAATNDNA | 1.38 | −0.94 | −0.07 | 1.21 | ATLVT012XX1439 | 46373 | SGQAAAASNDNH | 1.57 | 2.87 | −0.53 | −0.24 |
| ATLVT012XX1394 | 46328 | SGETAAATNDNH | −0.74 | −1.31 | 0.14 | −0.22 | ATLVT012XX1440 | 46374 | SGQAAAASNDNT | 0.54 | 1.7 | 0.38 | 2.22 |
| ATLVT012XX1395 | 46329 | SGETAAATNDNT | 0.86 | −1.04 | 0.42 | 0.41 | ATLVT012XX1441 | 46375 | SGQAAAATNDNA | −0.49 | 1.42 | −0.81 | 0.24 |
| ATLVT012XX1396 | 46330 | SGETAASSNDNA | 0.13 | 1 | 1.39 | −0.75 | ATLVT012XX1442 | 46376 | SGQAAAATNDNH | 0.91 | 0.23 | 2.13 | 1.81 |
| ATLVT012XX1397 | 46331 | SGETAASSNDNH | −0.89 | 1.4 | −1.05 | 0.08 | ATTVT012XX1443 | 46377 | SGQAAAATNDNT | 0.64 | 1.15 | 1.52 | 0.33 |
| ATLVT012XX1398 | 46332 | SGETAASSNDNT | 1.7 | 1.61 | −0.44 | 0.43 | ATLVT012XX1444 | 46378 | SGQAAASSNDNA | 1.75 | 2.97 | 0.52 | −1.38 |
| ATLVT012XX1399 | 46333 | SGETAASTNDNA | 1 | 2.59 | 0.31 | 0.09 | ATLVT012XX1445 | 46379 | SGQAAASSNDNH | 1.85 | 3.36 | 0.95 | −0.14 |
| ATLVT012XX1400 | 46334 | SGETAASTNDNH | −0.9 | −0.4 | 0.18 | −0.04 | ATLVT012XX1446 | 46380 | SGQAAASSNDNT | 2.43 | 2.35 | −0.18 | 1.19 |
| ATLVT012XX1401 | 46335 | SGETAASTNDNT | 0.34 | −1.05 | 0.29 | −1.45 | ATLVT012XX1447 | 46381 | SGQAAASTNDNA | 2.41 | 4.06 | 0.86 | 0.69 |
| ATLVT012XX1402 | 46336 | SGETAGASNDNA | −1 | 0.68 | −1 | −0.23 | ATLVT012XX1448 | 46382 | SGQAAASTNDNH | 1.75 | 0.92 | 0.3 | 1.54 |
| ATLVT012XX1403 | 46337 | SGETAGASNDNH | −1.58 | 2.13 | −2.4 | −0.21 | ATLVT012XX1449 | 46383 | SGQAAASTNDNT | 1.74 | −0.02 | −0.37 | 2.36 |
| ATLVT012XX1404 | 46338 | SGETAGASNDNT | −1.59 | 2.35 | −0.96 | 0.02 | ATLVT012XX1450 | 46384 | SGQAAGASNDNA | −0.09 | 0.95 | −1.25 | −2.15 |
| ATLVT012XX1405 | 46339 | SGETAGATNDNA | −1.7 | 1.49 | −0.67 | 0.71 | ATLVT012XX1451 | 46385 | SGQAAGASNDNH | 1.61 | 2.3 | −1.64 | −1.54 |
| ATLVT012XX1406 | 46340 | SGETAGATNDNH | −1.21 | 1.62 | −0.02 | 2.81 | ATLVT012XX1452 | 46386 | SGQAAGASNDNT | 0.47 | 0.88 | −2.6 | −1.91 |
| ATLVT012XX1407 | 46341 | SGETAGATNDNT | −0.32 | −0.56 | −0.04 | 1.03 | ATLVT012XX1453 | 46387 | SGQAAGATNDNA | 2.62 | 0.72 | −1.04 | −0.18 |
| ATLVT012XX1408 | 46342 | SGETAGSSNDNA | −0.22 | 1.09 | −0.28 | −2.49 | ATLVT012XX1454 | 46388 | SGQAAGATNDNH | 5.95 | 3.61 | −0.8 | 3.4 |
| ATLVT012XX1409 | 46343 | SGETAGSSNDNH | −2.15 | 1.25 | 0.3 | −2.31 | ATLVT012XX1455 | 46389 | SGQAAGATNDNT | 3.96 | 2.18 | −1.46 | 0.93 |
| ATLVT012XX1410 | 46344 | SGETAGSSNDNT | −0.16 | −0.33 | −0.1 | −0.93 | ATLVT012XX1456 | 46390 | SGQAAGSSNDNA | −0.99 | 0.32 | 0.12 | 0.32 |
| ATLVT012XX1411 | 46345 | SGETAGSTNDNA | −0.4 | −0.86 | 0.31 | 0.2 | ATLVT012XX1457 | 46391 | SGQAAGSSNDNH | −0.91 | −0.58 | −0.51 | 0.34 |
| ATLVT012XX1412 | 46346 | SGETAGSTNDNH | 0.66 | 1.4 | −0.48 | −0.4 | ATLVT012XX1458 | 46392 | SGQAAGSSNDNT | −0.2 | 0.97 | −0.18 | 1 |
| ATLVT012XX1413 | 46347 | SGETAGSTNDNT | 0.21 | −0.62 | −0.87 | −0.68 | ATLVT012XX1459 | 46393 | SGQAAGSTNDNA | 0.67 | 2.2 | 0.56 | 0.65 |
| ATLVT012XX1414 | 46348 | SGETGAASNDNA | −1.1 | −0.85 | −1.37 | −1.97 | ATLVT012XX1460 | 46394 | SGQAAGSTNDNH | 2.21 | 6.12 | −0.5 | 1.94 |
| ATLVT012XX1415 | 46349 | SGETGAASNDNH | −1.35 | 3.54 | −1.34 | −0.57 | ATLVT012XX1461 | 46395 | SGQAAGSTNDNT | 2.5 | 5.3 | 0.55 | 2.55 |
| ATLVT012XX1416 | 46350 | SGETGAASNDNT | −1.26 | −0.07 | −2.43 | −2.05 | ATLVT012XX1462 | 46396 | SGQAGAASNDNA | 1.52 | 1.27 | −0.4 | −0.94 |
| ATLVT012XX1417 | 46351 | SGETGAATNDNA | −0.16 | 0.99 | −0.17 | 0.32 | ATLVT012XX1463 | 46397 | SGQAGAASNDNH | 0.63 | 1.19 | −0.93 | 0.65 |
| ATLVT012XX1418 | 46352 | SGETGAATNDNH | 1.49 | 0.14 | −1.37 | 2.14 | ATLVT012XX1464 | 46398 | SGQAGAASNDNT | 0.94 | 0.29 | −1.45 | −0.65 |
| ATLVT01XXX1419 | 46353 | SGETGAATNDNT | 1.1 | −0.6 | 0.1 | −1.72 | ATLVT012XX1465 | 46399 | SGQAGAATNDNA | 0.74 | 0.04 | −1.28 | 0.64 |
| ATLVT012XX1420 | 46354 | SGETGASSNDNA | −1.85 | 2.28 | 0.67 | −1.49 | ATLVT012XX1466 | 46400 | SGQAGAATNDNH | 2.42 | 5.53 | −0.29 | 1.82 |
| ATLVT012XX1421 | 46355 | SGETGASSNDNH | −0.49 | 0.25 | −0.65 | −1.26 | ATLVT012XX1467 | 46401 | SGQAGAATNDNT | 0.97 | 0.43 | 0.06 | 1.31 |
| ATLVT012XX1422 | 46356 | SGETGASSNDNT | −2.23 | 2.18 | −0.67 | −1.14 | ATLVT012XX1468 | 46402 | SGQAGASSNDNA | 2.58 | 1.2 | 0.48 | 0.73 |
| ATLVT012XX1423 | 46357 | SGETGASTNDNA | 0.04 | 1.55 | 0.75 | 0.43 | ATLVT012XX1469 | 46403 | SGQAGASSNDNH | 1.38 | 1.25 | −0.21 | 0.21 |
| ATLVT012XX1424 | 46358 | SGETGASTNDNH | −0.19 | 0.67 | 1.04 | 0.65 | ATLVT012XX1470 | 46404 | SGQAGASSNDNT | 3.48 | 1.3 | −0.64 | −0.78 |
| ATLVT012XX1425 | 46359 | SGETGASTNDNT | −0.26 | 0.04 | −0.55 | 0.61 | ATLVT012XX1471 | 46405 | SGQAGASTNDNA | 0.46 | 1.23 | 1.35 | 1.29 |
| ATLVT012XX1426 | 46360 | SGETGGASNDNA | 0.72 | 1.58 | 0.1 | 2.07 | ATLVT012XX1472 | 46406 | SGQAGASTNDNH | 1.79 | 1.38 | 0.78 | 1.86 |
| ATLVT012XX1473 | 46407 | SGQAGASTNDNT | 0.17 | 1.7 | 0.99 | 0.11 | ATLVT012XX1519 | 46453 | SGQSGASTNDNA | 0.58 | 1.94 | 0.29 | 0.6 |
| ATLVT01XXX1474 | 46408 | SGQAGGASNDNA | 4.39 | 6.08 | 0.04 | 2.13 | ATLVT012XX1520 | 46454 | SGQSGASTNDNH | 3.56 | 2.5 | 1.58 | 1.79 |
| ATLVT012XX1475 | 46409 | SGQAGGASNDNH | 9.33 | 11.99 | 1.57 | 5.23 | ATLVT012XX1521 | 46455 | SGQSGASTNDNT | 3.41 | 2.85 | 0.66 | 0.85 |
| ATLVT012XX1476 | 46410 | SGQAGGASNDNT | 6.17 | 6.69 | 0.82 | 3.04 | ATLVT012XX1522 | 46456 | SGQSGGASNDNA | 2.5 | 4.63 | 2.1 | 2.77 |
| ATLVT012XX1477 | 46411 | SGQAGGATNDNA | 4.7 | 5.79 | 1.04 | 3.28 | ATLVT012XX1523 | 46457 | SGQSGGASNDNH | 8.17 | 8.18 | 1.83 | 5 |
| ATLVT012XX1478 | 46412 | SGQAGGATNDNH | 9.92 | 11.89 | −0.11 | 3.72 | ATLVT012XX1524 | 46458 | SGQSGGASNDNT | 4.2 | 5.92 | 0.51 | 3.2 |
| ATLVT012XX1479 | 46413 | SGQAGGATNDNT | 4.96 | 5.93 | 1.41 | 4.5 | ATLVT012XX1525 | 46459 | SGQSGGATNDNA | 5.3 | 7.22 | 1.04 | 3.04 |
| ATLVT012XX1480 | 46414 | SGQAGGSSNDNA | 3.67 | 4.19 | 1.19 | 3.41 | ATLVT012XX1526 | 46460 | SGQSGGATNDNH | 9.86 | 11.99 | −0.06 | 4.21 |
| ATLVT012XX1481 | 46415 | SGQAGGSSNDNH | 5.17 | 5.87 | 0.99 | 3.66 | ATLVT012XX1527 | 46461 | SGQSGGATNDNT | 5.99 | 5.7 | 0.76 | 3.06 |
| ATLVT012XX1482 | 46416 | SGQAGGSSNDNT | 5.66 | 4.25 | 0.82 | 2.21 | ATLVT012XX1528 | 46462 | SGQSGGSSNDNA | 2.31 | 3.89 | 0.3 | 2.06 |
| ATLVT012XX1483 | 46417 | SGQAGGSTNDNA | 5.55 | 7.11 | 0.82 | 4.29 | ATLVT012XX1529 | 46463 | SGQSGGSSNDNH | 3.49 | 3.83 | 0.73 | 3.29 |
| ATLVT012XX1484 | 46418 | SGQAGGSTNDNH | 8.44 | 9.89 | 1.46 | 4.4 | ATLVT012XX1530 | 46464 | SGQSGGSSNDNT | 3.85 | 3.38 | 0.85 | 1.45 |
| ATLVT012XX1485 | 46419 | SGQAGGSTNDNT | 7.08 | 7.73 | 1.73 | 4.18 | ATLVT012XX1531 | 46465 | SGQSGGSTNDNA | 4.66 | 6.66 | 0.63 | 4.19 |
| ATLVT012XX1486 | 46420 | SGQSAAASNDNA | 3.54 | 3.45 | 0.07 | 0.08 | ATLVT012XX1532 | 46466 | SGQSGGSTNDNH | 8.12 | 10.05 | 1.36 | 4.5 |
| ATLVT012XX1487 | 46421 | SGQSAAASNDNH | 3.53 | 2.22 | −0.14 | 1.14 | ATLVT012XX1533 | 46467 | SGQSGGSTNDNT | 5.92 | 6.31 | 0.58 | 4.12 |
| ATLVT012XX1488 | 46422 | SGQSAAASNDNT | 0.72 | 2.05 | 0.56 | 1.59 | ATLVT012XX1534 | 46468 | SGQTAAASNDNA | 1.11 | 0.37 | −0.55 | 1.06 |
| ATLVT012XX1489 | 46423 | SGQSAAATNDNA | −0.34 | 3.61 | −0.08 | −0.59 | ATTVT012XX1535 | 46469 | SGQTAAASNDNH | 1.26 | 2.93 | −0.37 | 1.12 |
| ATLVT012XX1490 | 46424 | SGQSAAATNDNH | 0.97 | 2.55 | 0.24 | 1.68 | ATLVT012XX1536 | 46470 | SGQTAAASNDNT | 0.8 | 0.17 | −0.63 | −0.42 |
| ATLVT012XX1491 | 46425 | SGQSAAATNDNT | 0.29 | 3.39 | 0.75 | 1.2 | ATLVT012XX1537 | 46471 | SGQTAAATNDNA | 0.95 | −0.44 | 1.07 | 1.99 |
| ATLVT012XX1492 | 46426 | SGQSAASSNDNA | 0.44 | 0.57 | −0.81 | 1.52 | ATLVT012XX1538 | 46472 | SGQTAAATNDNH | 1.57 | 1.03 | 1.06 | 0.53 |
| ATLVT012XX1493 | 46427 | SGQSAASSNDNH | 1.17 | −0.84 | 0.67 | −0.76 | ATLVT012XX1539 | 46473 | SGQTAAATNDNT | 2.27 | −0.47 | 0.83 | 0.95 |
| ATLVT012XX1494 | 46428 | SGQSAASSNDNT | 1.37 | −1.32 | 0.56 | 0.67 | ATLVT012XX1$40 | 46474 | SGQTAASSNDNA | 0.45 | 1.7 | 0.53 | 0.77 |
| ATLVT012XX1495 | 46429 | SGQSAASTNDNA | 0.38 | 1.23 | 1.42 | 0.1 | ATLVT012XX1541 | 46475 | SGQTAASSNDNH | −0.19 | 1.82 | 0.89 | 0.46 |
| ATLVT012XX1496 | 46430 | SGQSAASTNDNH | −0.35 | 1.15 | −0.84 | 1.17 | ATLVT012XX1542 | 46476 | SGQTAASSNDNT | 0.82 | 2.53 | 0.32 | 0.07 |
| ATLVT012XX1497 | 46431 | SGQSAASTNDNT | 1.35 | 1.19 | 0.92 | 1.52 | ATLVT012XX1543 | 46477 | SGQTAASTNDNA | −0.82 | −0.68 | 0.48 | 1.83 |
| ATLVT012XX1498 | 46432 | SGQSAGASNDNA | 2.14 | 1.47 | −0.52 | −0.35 | ATLVT012XX1544 | 46478 | SGQTAASTNDNH | −0.02 | 0.98 | −0.15 | 2.75 |
| ATLVT012XX1499 | 46433 | SGQSAGASNDNH | 2.46 | 2.16 | 0.62 | 1.82 | ATLVT012XX1545 | 46479 | SGQTAASTNDNT | 0.7 | 2.26 | 1.35 | 1.3 |
| ATLVT012XX1500 | 46434 | SGQSAGASNDNT | 1.57 | 2.41 | −1.14 | 0.68 | ATLVT012XX1546 | 46480 | SGQTAGASNDNA | −0.37 | 1.8 | 1.11 | −1.08 |
| ATLVT012XX1501 | 46435 | SGQSAGATNDNA | 1.89 | 4.37 | 0.26 | 2.86 | ATLVT012XX1547 | 46481 | SGQTAGASNDNH | 0.58 | 0.43 | 0.69 | 2.66 |
| ATLVT012XX1502 | 46436 | SGQSAGATNDNH | 6.23 | 6.22 | 0.73 | 5.07 | ATLVT012XX1548 | 46482 | SGQTAGASNDNT | 0.35 | 0.24 | 0.87 | 0.9 |
| ATLVT012XX1503 | 46437 | SGQSAGATNDNT | 3.61 | 3.34 | −0.52 | 2.19 | ATLVT012XX1549 | 46483 | SGQTAGATNDNA | −0.65 | 0.55 | −0.45 | 0.11 |
| ATLVT012XX1504 | 46438 | SGQSAGSSNDNA | 1.33 | 4.55 | −1.14 | −1.08 | ATLVT012XX1550 | 46484 | SGQTAGATNDNH | 4.66 | 7.04 | 0.86 | 4.11 |
| ATLVT012XX1505 | 46439 | SGQSAGSSNDNH | 1.9 | 4 | 0.44 | 0.82 | ATLVT012XX1551 | 46485 | SGQTAGATNDNT | 0.04 | −0.02 | 0.6 | 0.81 |
| ATLVT012XX1506 | 46440 | SGQSAGSSNDNT | 1.4 | 2.58 | 0.88 | 1.45 | ATLVT012XX1552 | 46486 | SGQTAGSSNDNA | −1.03 | 1.91 | 0.28 | 0.43 |
| ATLVT012XX1507 | 46441 | SGQSAGSTNDNA | 1.87 | 2.74 | 0.25 | 3.1 | ATLVT012XX1553 | 46487 | SGQTAGSSNDNH | 0.02 | 0.04 | 1.24 | 1.63 |
| ATLVT012XX1508 | 46442 | SGQSAGSTNDNH | 1.55 | 4.49 | −0.23 | 3.61 | ATLVT012XX1554 | 46488 | SGQTAGSSNDNT | −0.87 | 1.36 | 0.7 | −0.25 |
| ATLVT012XX1509 | 46443 | SGQSAGSTNDNT | 2.65 | 3.29 | −0.49 | 2.07 | ATLVT012XX1555 | 46489 | SGQTAGSTNDNA | 0.39 | 2.32 | −1.07 | 1.49 |
| ATLVT012XX1510 | 46444 | SGQSGAASNDNA | 2.63 | −0.37 | −2.18 | −1.35 | ATLVT012XX1556 | 46490 | SGQTAGSTNDNH | 3.01 | 1.88 | 0.85 | 3.65 |
| ATLVT012XX1511 | 46445 | SGQSGAASNDNH | 2.16 | 0.7 | −0.2 | −1.79 | ATLVT012XX1557 | 46491 | SGQTAGSTNDNT | 0.62 | 3.86 | −0.08 | 1.82 |
| ATLVT012XX1512 | 46446 | SGQSGAASNDNT | 3 | −0.69 | −1.92 | 0.41 | ATLVT012XX1558 | 46492 | SGQTGAASNDNA | 0.82 | −1.51 | 0.26 | 2.32 |
| ATLVT012XX1513 | 46447 | SGQSGAATNDNA | 2.65 | 1 | 0.16 | 1.11 | ATLVT012XX1559 | 46493 | SGQTGAASNDNH | 2.14 | −0.83 | 0.95 | 0.61 |
| ATLVT012XX1514 | 46448 | SGQSGAATNDNH | 2.69 | 3.4 | 1.14 | 3.52 | ATLVT012XX1560 | 46494 | SGQTGAASNDNT | 2.73 | 1.11 | 0.44 | 0.5 |
| ATLVT012XX1515 | 46449 | SGQSGAATNDNT | 2.99 | 1.63 | −0.14 | 1.95 | ATLVT012XX1561 | 46495 | SGQTGAATNDNA | 0.1 | 0.16 | −0.38 | −0.2 |
| ATLVT012XX1516 | 46450 | SGQSGASSNDNA | 2.13 | 2.72 | 1.08 | −0.56 | ATLVT012XX1562 | 46496 | SGQTGAATNDNH | 2.8 | 2.74 | −0.79 | 3.63 |
| ATLVT012XX1517 | 46451 | SGQSGASSNDNH | 2.37 | 2.92 | 1.4 | −0.86 | ATLVT012XX1563 | 46497 | SGQTGAATNDNT | 1.21 | 0.41 | −0.44 | 0.08 |
| ATLVT012XX1518 | 46452 | SGQSGASSNDNT | 1.84 | −0.23 | 0.98 | −0.08 | ATLVT012XX1564 | 46498 | SGQTGASSNDNA | 1.06 | 1.5 | 0.29 | 0.11 |
| ATLVT012XX1565 | 46499 | SGQTGASSNDNH | 2.55 | 1.64 | 1.09 | −0.27 | ATTVT012XX1611 | 46545 | SGTAGAATNDNT | −0.8. | 2.13 | 0.04 | 1.15 |
| ATLVT012XX1566 | 46500 | SGQTGASSNDNT | 1.76 | −0.35 | 0.2 | −1.2 | ATLVT012XX1612 | 46546 | SGTAGASSNDNA | −0.08 | 0.47 | −0.36 | 2.21 |
| ATLVT012XX1567 | 46501 | SGQTGASTNDNA | 0.68 | 3.56 | 0.11 | 2.24 | ATLVT012XX1613 | 46547 | SGTAGASSNDNH | 1.28 | 1.92 | 0.6 | 1.53 |
| ATLVT012XX1568 | 46502 | SGQTGASTNDNH | 1.56 | 4.91 | 0.59 | 2.05 | ATLVT012XX1614 | 46548 | SGTAGASSNDNT | 1.38 | −0.2 | 0.58 | −0.29 |
| ATLVT012XX1569 | 46503 | SGQTGASTNDNT | −0.06 | 0.72 | 0.46 | 1.33 | ATLVT012XX1615 | 46549 | SGTAGASTNDNA | 3.15 | 5.01 | 0.77 | 0.73 |
| ATLVT012XX1570 | 46504 | SGQTGGASNDNA | 3.13 | 4.08 | 0.9 | 3.3 | ATLVT012XX1616 | 46550 | SGTAGASTNDNH | 1.23 | 1.48 | −0.35 | 1.63 |
| ATLVT012XX1571 | 46505 | SGQTGGASNDNH | 6.54 | 8.15 | 1.31 | 3.5 | ATLVT012XX1617 | 46551 | SGTAGASTNDNT | 1.49 | 0.59 | 0.69 | 2.08 |
| ATLVT012XX1572 | 46506 | SGQTGGASNDNT | 4.02 | 5.98 | 0.78 | 0.72 | ATLVT012XX1618 | 46552 | SGTAGGASNDNA | 6 | 6.65 | 1.04 | 4.84 |
| ATLVT012XX1573 | 46507 | SGQTGGATNDNA | 3.68 | 4.25 | −0.26 | 3.4 | ATLVT012XX1619 | 46553 | SGTAGGASNDNH | 10.04 | 11.58 | 1.06 | 5.44 |
| ATLVT012XX1574 | 46508 | SGQTGGATNDNH | 9.6 | 12.38 | 0.01 | 4.01 | ATLVT012XX1620 | 46554 | SGTAGGASNDNT | 6.3 | 9.6 | 0.57 | 4.51 |
| ATLVT012XX1575 | 46509 | SGQTGGATNDNT | 3.97 | 6.43 | 1.44 | 2.93 | ATLVT012XX1621 | 46555 | SGTAGGATNDNA | 5.81 | 4.87 | −0.35 | 4.71 |
| ATLVT012XX1576 | 46510 | SGQTGGSSNDNA | 3.25 | 4.21 | 0.63 | 1.88 | ATLVT012XX1622 | 46556 | SGTAGGATNDNH | 9.89 | 10.6 | −0.51 | 3.05 |
| ATLVT012XX1577 | 46511 | SGQTGGSSNDNH | 3.37 | 4.17 | 1.49 | 2.66 | ATLVT012XX1623 | 46557 | SGTAGGATNDNT | 6.86 | 8.41 | 0.4 | 4.13 |
| ATLVT012XX1578 | 46512 | SGQTGGSSNDNT | 3.13 | 2.8 | −0.02 | 2.71 | ATLVT012XX1624 | 46558 | SGTAGGSSNDNA | 6.55 | 5.91 | 1.67 | 4.4 |
| ATLVT012XX1579 | 46513 | SGQTGGSTNDNA | 4.63 | 4.16 | 0.55 | 3.02 | ATLVT012XX1625 | 46559 | SGTAGGSSNDNH | 5.77 | 5.66 | −0.27 | 3.96 |
| ATLVT012XX1580 | 46514 | SGQTGGSTNDNH | 8 | 8.23 | 0.82 | 4.32 | ATLVT012XX1626 | 46560 | SGTAGGSSNDNT | 5.86 | 5.69 | 2.35 | 4.55 |
| ATLVT012XX1581 | 46515 | SGQTGGSTNDNT | 4.91 | 6.26 | 1.36 | 3.13 | ATLVT012XX1627 | 46561 | SGTAGGSTNDNA | 7.39 | 8.73 | 1.73 | 4.66 |
| ATLVT012XX1582 | 46516 | SGTAAAASNDNA | 0.52 | 1.83 | −0.47 | 0.96 | ATLVT012XX1628 | 46562 | SGTAGGSTNDNH | 8.81 | 8.85 | 1.86 | 4.08 |
| ATLVT012XX1583 | 46517 | SGTAAAASNDNH | 2.12 | 2.48 | 0.57 | 2.59 | ATLVT012XX1629 | 46563 | SGTAGGSTNDNT | 7.52 | 9 | 1.22 | 4.71 |
| ATLVT012XX1584 | 46518 | SGTAAAASNDNT | 2.79 | 3.5 | −0.51 | 1.69 | ATLVT012XX1630 | 46564 | SGTSAAASNDNA | 0.99 | −0.93 | −1.94 | −1.23 |
| ATLVT012XX1585 | 46519 | SGTAAAATNDNA | 2.02 | 2.12 | −0.09 | 0.52 | ATLVT012XX1631 | 46565 | SGTSAAASNDNH | 2.51 | 0.17 | −0.46 | 0.4 |
| ATLVT012XX1586 | 46520 | SGTAAAATNDNH | 2.03 | 3.38 | −1.21 | 1.01 | ATLVT012XX1632 | 46566 | SGTSAAASNDNT | 2.1 | −1.27 | −1 | −0.87 |
| ATLVT012XX1587 | 46521 | SGTAAAATNDNT | 0.6 | 2.1 | 0.2 | 0.65 | ATLVT012XX1633 | 46567 | SGTSAAATNDNA | 0.99 | −1.46 | −0.19 | 0 |
| ATLVT012XX1588 | 46522 | SGTAAASSNDNA | 3.98 | −0.89 | −0.75 | −0.18 | ATLVT012XX1634 | 46568 | SGTSAAATNDNH | 0.73 | −0.57 | −0.67 | 0.6 |
| ATLVT012XX1589 | 46523 | SGTAAASSNDNH | 0.57 | −0.34 | 0.36 | 0.18 | ATLVT012XX1635 | 46569 | SGTSAAATNDNT | 2.8 | −1.86 | 0.26 | 0.24 |
| ATLVT012XX1590 | 46524 | SGTAAASSNDNT | 3.5 | −0.14 | −0.31 | 0.22 | ATLVT012XX1636 | 46570 | SGTSAASSNDNA | 2.36 | −2.71 | 0.49 | 0 |
| ATLVT012XX1591 | 46525 | SGTAAASTNDNA | 2.23 | 1.29 | 0.71 | 1.13 | ATLVT012XX1637 | 46571 | SGTSAASSNDNH | 0.4 | −2.53 | −0.29 | −1.32 |
| ATLVT012XX1592 | 46526 | SGTAAASTNDNH | 1.72 | 1.72 | 0.84 | 1.8 | ATLVT012XX1638 | 46572 | SGTSAASSNDNT | 1.82 | −0.67 | −0.06 | −1.15 |
| ATLVT012XX1593 | 46527 | SGTAAASTNDNT | 0.31 | 2.65 | 0.26 | 0.89 | ATLVT012XX1639 | 46573 | SGTSAASTNDNA | 0.15 | 1.92 | 0.18 | −0.61 |
| ATLVT012XX1594 | 46528 | SGTAAGASNDNA | 1.73 | 2.27 | 0.03 | 0.78 | ATLVT012XX1640 | 46574 | SGTSAASTNDNH | −0.14 | 0.42 | 0.26 | 0.36 |
| ATLVT012XX1595 | 46529 | SGTAAGASNDNH | 2.28 | 1.51 | 0.01 | 1.68 | ATLVT012XX1641 | 46575 | SGTSAASTNDNT | 0.68 | −0.76 | 0.25 | 0.35 |
| ATLVT012XX1596 | 46530 | SGTAAGASNDNT | 3 | 3.19 | −0.97 | 3.35 | ATLVT012XX1642 | 46576 | SGTSAGASNDNA | 0.34 | 2.56 | −0.15 | 1.6 |
| ATLVT012XX1597 | 46531 | SGTAAGATNDNA | 3.15 | 1.97 | 0.42 | 0.07 | ATLVT012XX1643 | 46577 | SGTSAGASNDNH | 4.96 | 1.18 | 1.55 | 1.92 |
| ATLVT012XX1598 | 46532 | SGTAAGATNDNH | 6.83 | 7.77 | 0.6 | 4.28 | ATLVT012XX1644 | 46578 | SGTSAGASNDNT | 1.41 | 0.29 | 1.14 | 1.87 |
| ATLVT012XX1599 | 46533 | SGTAAGATNDNT | 2.15 | 2.95 | −0.31 | 1.19 | ATLVT012XX1645 | 46579 | SGTSAGATNDNA | 2.02 | 2.21 | −0.34 | 1.21 |
| ATLVT012XX1600 | 46534 | SGTAAGSSNDNA | 0.66 | 0.15 | 0.05 | 1.75 | ATLVT012XX1646 | 46580 | SGTSAGATNDNH | 6.42 | 9.05 | 0.96 | 4.38 |
| ATLVT012XX1601 | 46535 | SGTAAGSSNDNH | 0.24 | 1.46 | −0.57 | 0.69 | ATLVT012XX1647 | 46581 | SGTSAGATNDNT | 2.9 | 2.7 | 0.95 | 2.97 |
| ATLVT012XX1602 | 46536 | SGTAAGSSNDNT | −0.09 | 2.04 | −0.61 | 1.07 | ATTVT012XX1648 | 46582 | SGTSAGSSNDNA | 2.17 | 0.76 | −1.38 | 0.02 |
| ATLVT01XXX1603 | 46537 | SGTAAGSTNDNA | 0.97 | −0.18 | 0.9 | 1.71 | ATLVT012XX1649 | 46583 | SGTSAGSSNDNH | −0.08 | 0.05 | 0.14 | 1.43 |
| ATLVT012XX1604 | 46538 | SGTAAGSTNDNH | 0.54 | 2.43 | −0.75 | 3.61 | ATLVT012XX1650 | 46584 | SGTSAGSSNDNT | 1.86 | 0.61 | −0.35 | 0.96 |
| ATLVT012XX1605 | 46539 | SGTAAGSTNDNT | 1.04 | −0.29 | −0.08 | 1.69 | ATLVT012XX1651 | 46585 | SGTSAGSTNDNA | 2.56 | −0.2 | 0.79 | 1.8 |
| ATLVT012XX1606 | 46540 | SGTAGAASNDNA | 1.63 | 0.45 | −0.6 | 0.53 | ATLVT012XX1652 | 46586 | SGTSAGSTNDNH | 2.67 | 1.62 | 0.64 | 2.2 |
| ATLVT012XX1607 | 46541 | SGTAGAASNDNH | 0.57 | −0.03 | 0.21 | −1.44 | ATLVT012XX1653 | 46587 | SGTSAGSTNDNT | 2.68 | 1.36 | 1.03 | 2.02 |
| ATLVT012XX1608 | 46542 | SGTAGAASNDNT | 0.4 | −0.28 | −1.07 | −1.77 | ATLVT012XX1654 | 46588 | SGTSGAASNDNA | 0.84 | 0.68 | 1.29 | −1.83 |
| ATLVT012XX1609 | 46543 | SGTAGAATNDNA | 0.23 | 2.61 | −0.51 | −0.21 | ATLVT012XX1655 | 46589 | SGTSGAASNDNH | 1.05 | 0.38 | 0.43 | −0.85 |
| ATLVT012XX1610 | 46544 | SGTAGAATNDNH | 2.42 | 4.95 | −1.55 | 1.45 | ATLVT012XX1656 | 46590 | SGTSGAASNDNT | 1.09 | −0.65 | 0.84 | −2.72 |
| ATLVT012XX1657 | 46591 | SGTSGAATNDNA | 2.13 | 0.61 | −0.51 | 0.86 | ATLVT012XX1703 | 46637 | SGTTGAASNDNH | 0.47 | 2.09 | −1.46 | 0.66 |
| ATLVT012XX1658 | 46592 | SGTSGAATNDNH | 1.5 | 3.09 | −0.52 | 1.36 | ATLVT012XX1704 | 46638 | SGTTGAASNDNT | −0.39 | 1.52 | −0.04 | −1.27 |
| ATLVT012XX1659 | 46593 | SGTSGAATNDNT | −0.14 | −0.08 | 0.16 | −1.04 | ATLVT012XX1705 | 46639 | SGTTGAATNDNA | 3.03 | 1.52 | −0.51 | −1.63 |
| ATLVT012XX1660 | 46594 | SGTSGASSNDNA | 2.06 | 1.74 | 0.76 | −0.24 | ATLVT012XX1706 | 46640 | SGTTGAATNDNH | 4.17 | 4.56 | −0.86 | 1.54 |
| ATLVT012XX1661 | 46595 | SGTSGASSNDNH | 0.05 | 0.74 | 0.39 | −0.13 | ATLVT012XX1707 | 46641 | SGTTGAATNDNT | 1.48 | 0.77 | 1.1 | −2.12 |
| ATLVT012XX1662 | 46596 | SGTSGASSNDNT | 0.72 | 2.95 | −0.67 | 0.15 | ATLVT012XX1708 | 46642 | SGTTGASSNDNA | 1.17 | 1.02 | 0.38 | 0.45 |
| ATLVT012XX1663 | 46597 | SGTSGASTNDNA | −0.08 | 0.33 | 1.35 | 1.65 | ATLVT012XX1709 | 46643 | SGTTGASSNDNH | 2.36 | 1.13 | 1.09 | 1.08 |
| ATLVT012XX1664 | 46598 | SGTSGASTNDNH | 0.9 | 1.11 | 0.29 | 1.77 | ATLVT012XX1710 | 46644 | SGTTGASSNDNT | 1. | −1.17 | −0.32 | −0.09 |
| ATLVT012XX1665 | 46599 | SGTSGASTNDNT | 2.18 | 0.44 | 1.19 | −0.08 | ATLVT012XX1711 | 46645 | SGTTGASTNDNA | 1.26 | 0.84 | 0.74 | 2.46 |
| ATLVT012XX1666 | 46600 | SGTSGGASNDNA | 4.83 | 5.82 | 2.01 | 3.56 | ATLVT012XX1712 | 46646 | SGTTGASTNDNH | 2 | 1.92 | 0.46 | 0.73 |
| ATLVT012XX1667 | 46601 | SGTSGGASNDNH | 8.43 | 9.08 | 1.95 | 4.59 | ATLVT012XX1713 | 46647 | SGTTGASTNDNT | 1.05 | 2.31 | −0.49 | 2.03 |
| ATLVT012XX1668 | 46602 | SGTSGGASNDNT | 5.68 | 6.56 | 1.7 | 3.41 | ATLVT012XX1714 | 46648 | SGTTGGASNDNA | 3.43 | 6.07 | 0.69 | 4.26 |
| ATLVT012XX1669 | 46603 | SGTSGGATNDNA | 4.75 | 6.4 | 1.26 | 3.69 | ATLVT012XX1715 | 46649 | SGTTGGASNDNH | 7.38 | 9.99 | 1.57 | 4.6 |
| ATLVT012XX1670 | 46604 | SGTSGGATNDNH | 10.13 | 12.32 | 1.08 | 4.16 | ATLVT012XX1716 | 46650 | SGTTGGASNDNT | 4.4 | 5.75 | 1.26 | 2.61 |
| ATLVT012XX1671 | 46605 | SGTSGGATNDNT | 6.71 | 6.92 | 1.3 | 3.36 | ATLVT012XX1717 | 46651 | SGTTGGATNDNA | 4.71 | 7.88 | 0.5 | 2.97 |
| ATLVT012XX1672 | 46606 | SGTSGGSSNDNA | 4.17 | 5.83 | 0.54 | 3.47 | ATLVT012XX1718 | 46652 | SGTTGGATNDNH | 9.98 | 12.6 | 0.54 | 3.93 |
| ATLVT012XX1673 | 46607 | SGTSGGSSNDNH | 4.44 | 4.04 | 0.29 | 3.15 | ATLVT012XX1719 | 46653 | SGTTGGATNDNT | 5.54 | 6.78 | 0.98 | 2.47 |
| ATLVT012XX1674 | 46608 | SGTSGGSSNDNT | 4.36 | 4.31 | 0.96 | 2.04 | ATLVT012XX1720 | 46654 | SGTTGGSSNDNA | 2.91 | 3.33 | 0.26 | 3.27 |
| ATLVT012XX1675 | 46609 | SGTSGGSTNDNA | 6.06 | 5.89 | 0.78 | 3.95 | ATLVT012XX1721 | 46655 | SGTTGGSSNDNH | 1.87 | 4.21 | 0.51 | 2.9 |
| ATLVT012XX1676 | 46610 | SGTSGGSTNDNH | 7.19 | 9.17 | 0.76 | 4.1 | ATLVT012XX1722 | 46656 | SGTTGGSSNDNT | 4.01 | 5.43 | 0.54 | 2.99 |
| ATLVT012XX1677 | 46611 | SGTSGGSTNDNT | 6.04 | 6.78 | 0.53 | 3.6 | ATLVT012XX1723 | 46657 | SGTTGGSTNDNA | 5.37 | 6.35 | 1.64 | 3.74 |
| ATLVT012XX1678 | 46612 | SGTTAAASNDNA | 2.96 | 2.96 | 1.08 | 0.24 | ATLVT012XX1724 | 46658 | SGTTGGSTNDNH | 7 | 7.42 | 1.17 | 3.73 |
| ATLVT012XX1679 | 46613 | SGTTAAASNDNH | 1.33 | 0.59 | 0.38 | 0.38 | ATLVT012XX1725 | 46659 | SGTTGGSTNDNT | 5.83 | 5.77 | 1.3 | 3.32 |
| ATLVT012XX1680 | 46614 | SGTTAAASNDNT | 2.68 | 2.26 | 1.1 | 1.47 | ATLVT012XX1726 | 46660 | SSAAAAASNDNA | 1.78 | −2.15 | −0.29 | 1.59 |
| ATLVT012XX1681 | 46615 | SGTTAAANDNA | −0.26 | 1.68 | 0.73 | 0.78 | ATLVT012XX1727 | 46661 | SSAAAAASNDNH | 1.59 | −2.3 | −0.08 | 1.41 |
| ATLVT012XX1682 | 46616 | SGTTAAATNDNH | −0.01 | 1.03 | 1.18 | 1.26 | ATLVT012XX1728 | 46662 | SSAAAAASNDNT | 0.85 | −0.78 | 0.29 | −0.08 |
| ATLVT012XX1683 | 46617 | SGTTAAATNDNT | −0.66 | 0.67 | 0.65 | 1.67 | ATLVT012XX1729 | 46663 | SSAAAAATNDNA | 1.21 | −1.57 | 0.9 | 2.27 |
| ATLVT012XX1684 | 46618 | SGTTAASSNDNA | 0.45 | −1.66 | −0.64 | 0.89 | ATLVT012XX1730 | 46664 | SSAAAAATNDNH | 0.36 | −0.55 | 0.37 | 2.01 |
| ATLVT012XX1685 | 46619 | SGTTAASSNDNH | 0.62 | −2.59 | 0.73 | −1.07 | ATLVT012XX1731 | 46665 | SSAAAAATNDNT | 2.69 | 0.87 | −0.41 | 1.17 |
| ATLVT012XX1686 | 46620 | SGTTAASSNDNT | 0.58 | −0.83 | −0.85 | 0.88 | ATLVT012XX1732 | 46666 | SSAAAASSNDNA | 1.14 | −0.89 | −0.38 | 0.46 |
| ATLVT01XXX1687 | 46621 | SGTTAASTNDNA | 1.61 | 0.94 | 1.26 | −0.4 | ATLVT012XX1733 | 46667 | SSAAAASSNDNH | 1.84 | −1.9 | 0.15 | 0.42 |
| ATLVT012XX1688 | 46622 | SGTTAASTNDNH | 4 | 2.96 | 0.33 | 0.74 | ATLVT012XX1734 | 46668 | SSAAAASSNDNT | 1.87 | −1.59 | 0.79 | 0.66 |
| ATLVT012XX1689 | 46623 | SGTTAASTNDNT | 1.37 | 0.19 | 0.06 | 1 | ATLVT012XX1735 | 46669 | SSAAAASTNDNA | 1.51 | 0.29 | 0.48 | 1.1 |
| ATLVT012XX1690 | 46624 | SGTTAGASNDNA | 0.33 | 1.3 | −1.95 | 2.77 | ATLVT012XX1736 | 46670 | SSAAAASTNQNH | 1.06 | 2.37 | 0.01 | 1.3 |
| ATLVT012XX1691 | 46625 | SGTTAGASNDNH | 0.44 | 1.24 | 0.87 | 2.74 | ATLVT012XX1737 | 46671 | SSAAAASTNDNT | 1.87 | 1.81 | 0.67 | 0.15 |
| ATLVT012XX1692 | 46626 | SGTTAGASNDNT | 2.45 | 2.62 | −1.5 | 0.77 | ATLVT012XX1738 | 46672 | SSAAAGASNDNA | −0.28 | −0.74 | −0.81 | −1 |
| ATLVT012XX1693 | 46627 | SGTTAGATNDNA | 2.31 | 4.18 | −0.06 | 1.98 | ATLVT012XX1739 | 46673 | SSAAAGASNDNH | −1.76 | −2.58 | −1.22 | −0.45 |
| ATLVT012XX1694 | 46628 | SGTTAGATNDNH | 4.29 | 4.79 | 1.84 | 3.52 | ATLVT012XX1740 | 46674 | SSAAAGASNDNT | −1.72 | −2.03 | −0.62 | −1.75 |
| ATLVT01XXX1695 | 46629 | SGTTAGATNDNT | 1.9 | 2.25 | 0.37 | 3.15 | ATLVT012XX1741 | 46675 | SSAAAGATNDNA | 2.13 | −0.05 | −1.97 | −0.37 |
| ATLVT012XX1696 | 46630 | SGTTAGSSNDNA | 0.69 | −0.29 | 0.08 | 1.34 | ATLVT012XX1742 | 46676 | SSAAAGATNDNH | 1.03 | 1.64 | 0.14 | 1.73 |
| ATLVT012XX1697 | 46631 | SGTTAGSSNDNH | −0.04 | −0.75 | 0.13 | 0.34 | ATLVT012XX1743 | 46677 | SSAAAGATNDNT | −0.05 | −0.97 | 0.35 | 1 |
| ATLVT012XX1698 | 46632 | SGTTAGSSNDNT | 1.54 | 1.65 | −0.24 | 0.19 | ATLVT012XX1744 | 46678 | SSAAAGSSNDNA | −2.31 | −2.65 | 0.9 | −1.44 |
| ATLVT012XX1699 | 46633 | SGTTAGSTNDNA | 2.25 | −0.07 | 0.19 | −0.09 | ATLVT012XX1745 | 46679 | SSAAAGSSNDNH | −2.26 | −2.93 | −0.55 | 0.03 |
| ATLVT012XX1700 | 46634 | SGTTAGSTNDNH | 3.98 | 2.79 | 1.07 | 2.65 | ATLVT012XX1746 | 46680 | SSAAAGSSNDNT | −2.82 | −1.56 | −0.3 | −1.75 |
| ATLVT012XX1701 | 46635 | SGTTAGSTNDNT | 3.17 | 2.66 | 0.2 | 3.05 | ATLVT012XX1747 | 46681 | SSAAAGSTNDNA | 1.26 | 1.36 | −1.26 | −1.45 |
| ATLVT012XX1702 | 46636 | SGTTGAASNDNA | 0.69 | 0.4 | −0.97 | −2.21 | ATLVT012XX1748 | 46682 | SSAAAGSTNDNH | −1.02 | −1.38 | −0.79 | −0.36 |
| ATLVT012XX1749 | 46683 | SSAAAGSTNDNT | 1.45 | −0.56 | −2.43 | −2.34 | ATLVT012XX1795 | 46729 | SSASAGSTNDNA | 0.71 | −0.11 | −0.05 | −0.67 |
| ATLVT012XX1750 | 46684 | SSAAGAASNDNA | −2.27 | −1.25 | −1.49 | −3.73 | ATLVT012XX1796 | 46730 | SSASAGSTNDNH | 2.05 | 2.08 | 0.09 | 1.66 |
| ATLVT012XX1751 | 46685 | SSAAGAASNDNH | −2.69 | −3.06 | −3.22 | −3.6 | ATLVT012XX1797 | 46731 | SSASAGSTNDNT | 0.4 | 0.36 | 0.26 | 0.1 |
| ATLVT012XX1752 | 46686 | SSAAGAASNDNT | −2.47 | −1.71 | −0.84 | −3.67 | ATLVT012XX1798 | 46732 | SSASGAASNDNA | −1.74 | −1.84 | −1.9 | 1.14 |
| ATLVT012XX1753 | 46687 | SSAAGAATNDNA | −0.48 | −0.01 | −1.29 | −0.35 | ATLVT012XX1799 | 46733 | SSASGAASNDNH | −0.06 | −0.73 | −0.59 | 1.37 |
| ATLVT012XX1754 | 46688 | SSAAGAATNDNH | 1.48 | 1.83 | −0.63 | −0.15 | ATLVT012XX1800 | 46734 | SSASGAASNDNT | −1.66 | −1.86 | −0.36 | 0.33 |
| ATLVT012XX1755 | 46689 | SSAAGAATNDNT | −2.06 | −1.46 | −3 | −2.52 | ATLVT012XX1801 | 46735 | SSASGAATNDNA | −1.57 | 0.78 | −0.68 | 0.76 |
| ATLVT012XX1756 | 46690 | SSAAGASSNDNA | −1.3 | 0.33 | −2.31 | −1.02 | ATLVT012XX1802 | 46736 | SSASGAATNDNH | −0.19 | 1.55 | 0.14 | −1.65 |
| ATLVT012XX1757 | 46691 | SSAAGASSNDNH | −1.7 | −1.72 | −0.34 | −1.23 | ATLVT012XX1803 | 46737 | SSASGAATNDNT | −1.17 | 2.87 | 0.27 | −2.11 |
| ATLVT012XX1758 | 46692 | SSAAGASSNDNT | −2.1 | −1.71 | 0.36 | −1.4 | ATLVT012XX1804 | 46738 | SSASGASSNDNA | −0.25 | 0.08 | 0.55 | −1.13 |
| ATLVT012XX1759 | 46693 | SSAAGASTNDNA | −1.21 | −1.03 | −2.03 | −1.41 | ATLVT012XX1805 | 46739 | SSASGASSNDNH | 0.38 | −1.93 | −0.74 | −2.05 |
| ATLVT012XX1760 | 46694 | SSAAGASTNDNH | −1.82 | −1.95 | −0.51 | −1.09 | ATLVT012XX1806 | 46740 | SSASGASSNDNT | −0.13 | 0.85 | 0.19 | −1.12 |
| ATLVT012XX1761 | 46695 | SSAAGASTNDNT | 0.87 | −1.41 | −2.52 | −0.52 | ATLVT012XX1807 | 46741 | SSASGASTNDNA | −1.52 | −1.03 | 0.66 | 0.25 |
| ATLVT012XX1762 | 46696 | SSAAGGASNDNA | 0.29 | −0.17 | −2.33 | 0.77 | ATLVT012XX1808 | 46742 | SSASGASTNDNH | 0.12 | 0.18 | 1.4 | 0.18 |
| ATLVT012XX1763 | 46697 | SSAAGGASNDNH | 0.44 | 1.15 | −0.8 | 2.58 | ATLVT012XX1809 | 46743 | SSASGASTNDNT | 0.69 | 1.44 | 0.01 | 0.44 |
| ATLVT012XX1764 | 46698 | SSAAGGASNDNT | 0.01 | 1.04 | −0.44 | 0.94 | ATLVT012XX1810 | 46744 | SSASGGASNDNA | 1.33 | 1.25 | −0.12 | 0.95 |
| ATLVT012XX1765 | 46699 | SSAAGGATNDNA | −0.3 | 2.36 | −0.06 | 0.82 | ATLVT012XX1811 | 46745 | SSASGGASNDNH | 2.06 | 2.75 | 1.23 | 3.48 |
| ATLVT012XX1766 | 46700 | SSAAGGATNDNH | 6.01 | 6.5 | −0.29 | 4.3 | ATLVT012XX1812 | 46746 | SSASGGASNDNT | 1.49 | 2.89 | −0.36 | 0.55 |
| ATLVT012XX1767 | 46701 | SSAAGGATNDNT | 0.7 | 1.17 | 0.47 | 1.44 | ATLVT012XX1813 | 46747 | SSASGGATNDNA | 3.01 | 3.42 | 0.81 | 3.11 |
| ATLVT012XX1768 | 46702 | SSAAGGSSNDNA | 1.65 | 1.39 | −1.77 | −0.97 | ATLVT012XX1814 | 46748 | SSASGGATNDNH | 7.69 | 9.53 | 1.61 | 4.65 |
| ATLVT012XX1769 | 46703 | SSAAGGSSNDNH | −1.94 | −0.23 | −3.52 | −0.6 | ATLVT012XX1815 | 46749 | SSASGGATNDNT | 2.9 | 4.12 | −0.35 | 2.56 |
| ATLVT012XX1770 | 46704 | SSAAGGSSNDNT | 0.21 | 1.02 | −1.29 | 0.5 | ATTVT012XX1816 | 46750 | SSASGGSSNDNA | 2.71 | 2.52 | −0.04 | −0.47 |
| ATLVT012XX1771 | 46705 | SSAAGGSTNDNA | 0.74 | 2.05 | −0.75 | 1.48 | ATLVT012XX1817 | 46751 | SSASGGSSNDNH | 0.8 | 1.63 | 0.28 | 1.04 |
| ATLVT012XX1772 | 46706 | SSAAGGSTNDNH | −0.52 | 3.43 | −2.24 | 2.23 | ATLVT012XX1818 | 46752 | SSASGGSSNDNT | 2.7 | 3.32 | −0.71 | −0.35 |
| ATLVT012XX1773 | 46707 | SSAAGGSTNDNT | 0.5 | 1.21 | 0.06 | 1.24 | ATLVT012XX1819 | 46753 | SSASGGSTNDNA | 3.49 | 2.29 | 1.34 | 0.58 |
| ATLVT012XX1774 | 46708 | SSASAAASNDNA | −1.3 | 2.34 | 0.9 | 0.52 | ATLVT012XX1820 | 46754 | SSASGGSTNDNH | 3.94 | 3.67 | −0.12 | 1.67 |
| ATLVT012XX1775 | 46709 | SSASAAASNDNH | −1.48 | 1.85 | 0.3 | 1.36 | ATLVT012XX1821 | 46755 | SSASGGSTNDNT | 2.71 | 3.7 | 0.22 | 0.49 |
| ATLVT012XX1776 | 46710 | SSASAAASNDNT | −0.81 | 1.1 | 0.13 | 0.18 | ATLVT012XX1822 | 46756 | SSATAAASNDNA | −1.36 | 1.13 | −0.2 | 0.49 |
| ATLVT012XX1777 | 46711 | SSASAAANDNA | 1 | 2.2 | −0.4 | 1.06 | ATLVT012XX1823 | 46757 | SSATAAASNDNH | 0.82 | −1.46 | −0.93 | 0.68 |
| ATLVT012XX1778 | #6712 | SSASAAATNDNH | −1.05 | 4.38 | −0.09 | 1.61 | ATLVT012XX1824 | 46758 | SSATAAASNDNT | 0.85 | −1.09 | −0.54 | 1.67 |
| ATLVT01XXX1779 | 46713 | SSASAAATNDNT | 0.84 | 0.59 | 1.19 | −0.98 | ATLVT012XX1825 | 46759 | SSATAAATNDNA | −0.48 | 2.22 | 0.54 | 2.62 |
| ATLVT012XX1780 | 46714 | SSASAASSNDNA | 1.62 | 2.42 | 0.33 | −0.53 | ATLVT012XX1826 | 46760 | SSATAAATNDNH | 0.26 | 0.07 | 0.3 | 1.92 |
| ATLVT012XX1781 | 46715 | SSASAASSNDNH | 1.96 | 1.78 | 0.55 | 0.35 | ATLVT012XX1827 | 46761 | SSATAAATNDNT | 2.36 | 1.98 | 0.43 | 0.72 |
| ATLVT012XX1782 | 46716 | SSASAASSNDNT | 2.02 | 1.3 | 0.54 | −0.31 | ATLVT012XX1828 | 46762 | SSATAASSNDNA | 1.87 | −1.34 | −0.77 | −1.26 |
| ATLVT012XX1783 | 46717 | SSASAASTNDNA | 3.58 | 1.62 | −0.14 | −0.86 | ATLVT012XX1829 | 46763 | SSATAASSNDNH | 2.47 | −1.46 | 1.09 | −0.62 |
| ATLVT012XX1784 | 46718 | SSASAASTNDNH | 1.47 | 0.98 | −0.71 | −0.53 | ATLVT012XX1830 | 46764 | SSATAASSNDNT | 1.48 | 0.63 | −0.41 | 1.36 |
| ATLVT012XX1785 | 46719 | SSASAASTNDNT | 2.32 | 2.48 | 0.78 | −1.02 | ATLVT012XX1831 | 46765 | SSATAASTNDNA | 1.68 | 2.09 | 1.06 | 0.53 |
| ATLVT012XX1786 | 46720 | SSASAGASNDNA | 2.04 | 1.32 | −1.38 | 0.29 | ATLVT012XX1832 | 46766 | SSATAASTNDNH | 1.46 | 0.77 | 0.42 | 0.64 |
| ATLVT012XX1787 | 46721 | SSASAGASNDNH | 1.09 | 2.55 | −1.6 | −0.04 | ATLVT012XX1833 | 46767 | SSATAASTNDNT | 1.79 | 1.81 | 0.63 | 0.43 |
| ATLVT012XX1788 | 46722 | SSASAGASNDNT | 0.12 | −1.29 | 0.48 | 0.43 | ATLVT012XX1834 | 46768 | SSATAGASNDNA | −0.85 | 1.99 | 1.58 | −0.99 |
| ATLVT012XX1789 | 46723 | SSASAGATNDNA | −0.86 | −1.1 | −0.43 | −0.25 | ATLVT012XX1835 | 46769 | SSATAGASNDNH | 0.81 | 0 | −0.19 | 1.94 |
| ATLVT012XX1790 | 46724 | SSASAGATNDNH | 1.99 | 2.51 | 0.38 | 1.85 | ATLVT012XX1836 | 46770 | SSATAGASNQNT | 1.06 | 2.01 | 0.44 | 0.52 |
| ATLVT012XX1791 | 46725 | SSASAGATNDNT | 1.31 | 1 | −1.35 | 0.87 | ATLVT012XX1837 | 46771 | SSATAGATNDNA | 2.96 | 1.53 | −0.89 | 0.64 |
| ATLVT012XX1792 | 46726 | SSASAGSSNDNA | 1.82 | −1.58 | 0.77 | −0.81 | ATLVT012XX1838 | 46772 | SSATAGATNDNH | 1.68 | 0.48 | −0.03 | 0.85 |
| ATLVT012XX1793 | 46727 | SSASAGSSNDNH | 0.29 | −0.93 | 0.72 | −1.6 | ATLVT012XX1839 | 46773 | SSATAGATNDNT | 3.35 | 0.85 | −1.02 | 1.34 |
| ATLVT012XX1794 | 46728 | SSASAGSSNDNT | 0.05 | −1.13 | 0.74 | 0.01 | ATLVT012XX1840 | 46774 | SSATAGSSNDNA | 0.23 | −1.33 | 0.45 | −0.02 |
| ATLVT012XX1841 | 46775 | SSATAGSSNDNH | −0.56 | −1.34 | −0.47 | −1.54 | ATLVT012XX1887 | 46821 | SSEAAGATNDNT | −0.43 | 0.99 | −1.32 | −0.84 |
| ATLVT012XX1842 | 46776 | SSATAGSSNDNT | 1.25 | 1.65 | −0.1 | 0.86 | ATLVT012XX1888 | 46822 | SSEAAGSSNDNA | −0.18 | −1.89 | −0.21 | −1.92 |
| ATLVT012XX1843 | 46777 | SSATAGSTNDNA | 0.43 | 0.19 | 0.07 | −0.33 | ATLVT012XX1889 | 46823 | SSEAAGSSNDNH | −2.62 | −2.78 | −0.39 | −1.52 |
| ATLVT012XX1844 | 46778 | SSATAGSTNDNH | 1.19 | 1.4 | 0.64 | 0.16 | ATLVT012XX1890 | 46824 | SSEAAGSSNDNT | −1.98 | −2.52 | −0.32 | −3.61 |
| ATLVT012XX1845 | 46779 | SSATAGSTNDNT | 0.74 | 2.44 | −0.12 | 1.69 | ATLVT012XX1891 | 46825 | SSEAAGSTNDNA | −3.49 | −2.17 | −2.76 | −2.51 |
| ATLVT012XX1846 | 46780 | SSATGAASNDNA | 0.03 | −1.83 | −0.15 | −0.75 | ATLVT012XX1892 | 46826 | SSEAAGSTNDNH | −3.68 | −2.32 | −0.36 | −1.88 |
| ATLVT012XX1847 | 46781 | SSATGAASNDNH | 0.32 | −1.51 | 0.3 | 1.13 | ATLVT012XX1893 | 46827 | SSEAAGSTNDNT | −3.06 | −2.81 | −0.84 | −2.91 |
| ATLVT012XX1848 | 46782 | SSATGAASNDNT | 0.46 | −2.04 | 1.23 | 0.52 | ATLVT012XX1894 | 46828 | SSEAGAASNDNA | 0.53 | −0.93 | −0.76 | −1.11 |
| ATLVT012XX1849 | 46783 | SSATGAATNDNA | 0.07 | 0.73 | −1.14 | −0.06 | ATLVT012XX1895 | 46829 | SSEAGAASNDNH | −0.27 | −0.37 | −0.43 | −0.35 |
| ATLVT012XX1850 | 46784 | SSATGAATNDNH | 0.5 | 0.44 | −0.55 | 1.51 | ATLVT012XX1896 | 46830 | SSEAGAASNDNT | 0.08 | −1.35 | 0.38 | −0.77 |
| ATLVT012XX1851 | 46785 | SSATGAATNDNT | −0.7 | −1.43 | −0.08 | −1.7 | ATLVT012XX1897 | 46831 | SSEAGAATNDNA | −2.58 | −0.07 | −1.51 | −0.63 |
| ATLVT012XX1852 | 46786 | SSATGASSNDNA | 3.19 | −0.01 | 0.73 | −0.02 | ATLVT012XX1898 | 46832 | SSEAGAATNDNH | −0.2 | 3.91 | 0.43 | 1.62 |
| ATLVT012XX1853 | 46787 | SSATGASSNDNH | −0.12 | −1.55 | 0.66 | −1.46 | ATLVT012XX1899 | 46833 | SSEAGAATNDNT | −1.36 | 0.71 | 0.11 | 2.34 |
| ATLVT012XX1854 | 46788 | SSATGASSNDNT | 3.85 | −1.49 | −0.22 | 0.07 | ATLVT012XX1900 | 46834 | SSEAGASSNDNA | 0.72 | 1.65 | 0.49 | −1.03 |
| ATLVT012XX1855 | 46789 | SSATGASTNDNA | 4.52 | 2.82 | 0.82 | −0.37 | ATLVT012XX1901 | 46835 | SSEAGASSNDNH | 0.77 | −1.84 | 0.61 | −1.05 |
| ATLVT012XX1856 | 46790 | SSATGASTNDNH | 2.9 | 0.18 | 0.34 | 1.55 | ATLVT012XX1902 | 46836 | SSEAGASSNDNT | 0.41 | −1.3 | −0.03 | −1.47 |
| ATLVT012XX1857 | 46791 | SSATGASTNDNT | 2.3 | 1.37 | 0.99 | −1.06 | ATLVT012XX1903 | 46837 | SSEAGASTNDNA | −0.62 | −0.55 | −0.94 | −0.92 |
| ATLVT012XX1858 | 46792 | SSATGGASNDNA | −1.11 | 1.3 | 1.11 | 1.67 | ATLVT012XX1904 | 46838 | SSEAGASTNDNH | −2.46 | −0.04 | 1.43 | 0.57 |
| ATLVT012XX1859 | 46793 | SSATGGASNDNH | 1.58 | 2.55 | 0.8 | 2.6 | ATLVT012XX1905 | 46839 | SSEAGASTNDNT | −0.57 | 1.4 | −0.58 | 0.53 |
| ATLVT012XX1860 | 46794 | SSATGGASNDNT | 0.35 | 2.5 | 0.84 | 0.47 | ATLVT012XX1906 | 46840 | SSEAGGASNDNA | 2.21 | 2.49 | −0.9 | 2.23 |
| ATLVT012XX1861 | 46795 | SSATGGATNDNA | 3.46 | 2.67 | 0.14 | 1.32 | ATLVT012XX1907 | 46841 | SSEAGGASNDNH | 2.96 | 3.56 | 0.22 | 3.37 |
| ATLVT012XX1862 | 46796 | SSATGGATNDNH | 6.41 | 6.53 | 0.47 | 4.62 | ATLVT012XX1908 | 46842 | SSEAGGASNDNT | 1.9 | 3.04 | −0.15 | 1.55 |
| ATLVT012XX1863 | 46797 | SSATGGATNDNT | 2.07 | 3.64 | 0.87 | 2.07 | ATLVT012XX1909 | 46843 | SSEAGGATNDNA | 2.47 | 4.87 | 1.28 | 1.94 |
| ATLVT012XX1864 | 46798 | SSATGGSSNDNA | 0.97 | 1.97 | −0.06 | 0.87 | ATLVT012XX1910 | 46844 | SSEAGGATNDNH | 7.9 | 10.05 | 1.97 | 4.58 |
| ATLVT012XX1865 | 46799 | SSATGGSSNDNH | −0.45 | 0.69 | 0.83 | 0.66 | ATLVT012XX1911 | 46845 | SSEAGGATNDNT | 3.93 | 4.47 | 0.01 | 2.5 |
| ATLVT012XX1866 | 46800 | SSATGGSSNDNT | 1.26 | 1.75 | 0.18 | −0.42 | ATLVT012XX1912 | 46846 | SSEAGGSSNDNA | 1.17 | 3.02 | 0.01 | −0.04 |
| ATLVT012XX1867 | 46801 | SSATGGSTNDNA | 2.01 | 2.58 | 0.35 | 1.88 | ATLVT012XX1913 | 46847 | SSEAGGSSNDNH | 1.47 | 3.86 | 1.8 | 0.61 |
| ATLVT012XX1868 | 46802 | SSATGGSTNDNH | 3 | 2.89 | 0.04 | 2.15 | ATLVT012XX1914 | 46848 | SSEAGGSSNDNT | 1.92 | 3.33 | 0.18 | 0.7 |
| ATLVT012XX1869 | 46803 | SSATGGSTNDNT | 2.82 | 1.72 | −0.01 | 1.81 | ATLVT012XX1915 | 46849 | SSEAGGSTNDNA | 2.75 | 5.24 | 1.09 | 1.85 |
| ATLVT012XX1870 | 46804 | SSEAAAASNDNA | 2.64 | 0.46 | 0.56 | 0.16 | ATLVT012XX1916 | 46850 | SSEAGGSTNDNH | 0.59 | 2.26 | 0.39 | 2.58 |
| ATLVT012XX1871 | 46805 | SSEAAAASNDNH | 1.68 | 1.11 | −0.02 | −0.37 | ATLVT012XX1917 | 46851 | SSEAGGSTNDNT | 1.95 | 21 | 0.42 | 0.92 |
| ATLVT012XX1872 | 46806 | SSEAAAASNDNT | 0.24 | −0.01 | 0.55 | −0.09 | ATLVT012XX1918 | 46852 | SSESAAASNDNA | 0.94 | −1.56 | −0.33 | −1.6 |
| ATLVT012XX1873 | 46807 | SSEAAAATNDNA | 0.75 | 1.71 | −0.88 | −0.81 | ATLVT012XX1919 | 46853 | SSESAAASNDNH | −0.67 | −0.32 | −0.04 | −0.36 |
| ATLVT012XX1874 | 46808 | SSEAAAATNDNH | 0.34 | 0.8 | 0.08 | 0.1 | ATLVT012XX1920 | 46854 | SSESAAASNDNT | −1.65 | −3.13 | −0.14 | 1.59 |
| ATLVT012XX1875 | 46809 | SSEAAAATNDNT | 1.17 | −1.26 | 0.39 | 0.22 | ATLVT012XX1921 | 46855 | SSESAAATNDNA | −1.11 | 0.49 | 0.55 | −1.02 |
| ATLVT012XX1876 | 46810 | SSEAAASSNDNA | 0.23 | 2.35 | 0.55 | −0.23 | ATLVT012XX1922 | 46856 | SSESAAATNDNH | 2.55 | −0.01 | 0.78 | −1.75 |
| ATLVT012XX1877 | 46811 | SSEAAASSNDNH | 2.65 | 0.34 | −0.49 | −1.12 | ATLVT012XX1923 | 46857 | SSESAAATNDNT | −0.19 | 0.18 | 1.07 | −0.12 |
| ATLVT012XX1878 | 46812 | SSEAAASSNDNT | 2.07 | 2.13 | 1.16 | −1.15 | ATLVT012XX1924 | 46858 | SSESAASSNDNA | 0.67 | −0.9 | 0.97 | 0.11 |
| ATLVT012XX1879 | 46813 | SSEAAASTNDNA | −0.37 | 1.51 | 0.5 | −3.49 | ATLVT012XX1925 | 46859 | SSESAASSNDNH | −0.62 | 1.34 | 0.04 | −0.44 |
| ATLVT012XX1880 | 46814 | SSEAAASTNDNH | −0.19 | −0.57 | −0.28 | −0.55 | ATLVT012XX1926 | 46860 | SSESAASSNDNT | 1.34 | 2.7 | 0.02 | −2.14 |
| ATLVT012XX1881 | 46815 | SSEAAASTNDNT | 1.95 | 0.14 | 0.72 | −2.59 | ATLVT012XX1927 | 46861 | SSESAASTNDNA | 2.55 | −1.23 | −0.54 | −0.53 |
| ATLVT012XX1882 | 46816 | SSEAAGASNDNA | −2.76 | −0.36 | −1.49 | −3.14 | ATLVT012XX1928 | 46862 | SSESAASTNDNH | 1.17 | −1.19 | −1.05 | −1.12 |
| ATLVT012XX1883 | 46817 | SSEAAGASNDNH | −1.13 | −0.38 | −0.3 | −0.74 | ATLVT012XX1929 | 46863 | SSESAASTNDNT | 0.56 | −2.16 | 0.66 | −1.19 |
| ATLVT012XX1884 | 46818 | SSEAAGASNDNT | −2.34 | −0.94 | −1.45 | −1.68 | ATLVT012XX1930 | 46864 | SSESAGASNDNA | 0.66 | −0.16 | −0.92 | 0.79 |
| ATLVT012XX1885 | 46819 | SSEAAGATNDNA | 2.53 | −1.16 | −2.26 | −0.69 | ATLVT012XX1931 | 46865 | SSESAGASNDNH | 0.3 | 1.33 | −0.93 | −1.74 |
| ATLVT012XX1886 | 46820 | SSEAAGATNDNH | −0.99 | 1.14 | −1.41 | −0.03 | ATLVT012XX1932 | 46866 | SSESAGASNDNT | −1.35 | −1.39 | 0.58 | −2.33 |
| ATLVT012XX1933 | 46867 | SSESAGATNDNA | −2.56 | 0.16 | −0.73 | −0.78 | ATLVT012XX1979 | 46913 | SSETAGASNDNH | 0.8 | −1.69 | −0.98 | 0.81 |
| ATLVT012XX1934 | 46868 | SSESAGATNDNH | −1.05 | −0.39 | −0.18 | 0.28 | ATLVT012XX1980 | 46914 | SSETAGASNDNT | −0.26 | 1.12 | −1.29 | 0.36 |
| ATLVT012XX1935 | 46869 | SSESAGATNDNT | −2.53 | −1.16 | −0.98 | −2.42 | ATLVT012XX1981 | 46915 | SSETAGATNDNA | −1.08 | 1.21 | −1.55 | −1.82 |
| ATLVT012XX1936 | 46870 | SSESAGSSNDNA | 0.37 | −1.46 | 0.31 | −2.25 | ATLVT012XX1982 | 46916 | SSETAGATNDNH | 0.31 | 1.69 | −2.17 | 1.1 |
| ATLVT012XX1937 | 46871 | SSESAGSSNDNH | 0.1 | −1.51 | 0.59 | −2.13 | ATLVT012XX1983 | 46917 | SSETAGATNDNT | −1.86 | 0.61 | −0.16 | −1.56 |
| ATLVT012XX1938 | 46872 | SSESAGSSNDNT | 0.56 | −1.54 | 0.58 | −3.08 | ATLVT012XX1984 | 46918 | SSETAGSSNDNA | 3.06 | −1.89 | −0.3 | 1.42 |
| ATLVT012XX1939 | 46873 | SSESAGSTNDNA | 0.33 | 3.62 | −0.49 | −0.54 | ATLVT012XX1985 | 46919 | SSETAGSSNDNH | −0.02 | −0.5 | 1.31 | 1.44 |
| ATLVT012XX1940 | 46874 | SSESAGSTNDNH | 1.76 | 1.99 | 0.14 | −1.8 | ATLVT012XX1986 | 46920 | SSETAGSSNDNT | 1.82 | −2.53 | 0.27 | −0.42 |
| ATLVT012XX1941 | 46875 | SSESAGSTNDNT | −0.58 | 1.18 | −0.1 | −1.19 | ATLVT012XX1987 | 46921 | SSETAGSTNDNA | −0.77 | −1.1 | −0.7 | −0.98 |
| ATLVT012XX1942 | 46876 | SSESGAASNDNA | −2.55 | −2.36 | −1.77 | −1.44 | ATLVT012XX1988 | 46922 | SSETAGSTNDNH | 0.09 | −2.44 | −0.58 | −0.48 |
| ATLVT012XX1943 | 46877 | SSESGAASNDNH | −1.24 | −1.99 | −2.18 | −1.57 | ATLVT012XX1989 | 46923 | SSETAGSTNDNT | −1.17 | −2.03 | −0.49 | −0.05 |
| ATLVT012XX1944 | 46878 | SSESGAASNDNT | −0.84 | −2.66 | −3.32 | −2.32 | ATLVT012XX1990 | 46924 | SSETGAASNDNA | −3.15 | −1.1 | −1.02 | −3.12 |
| ATLVT012XX1945 | 46879 | SSESGAATNDNA | −0.58 | −0.36 | 1.16 | 0.8 | ATLVT012XX1991 | 46925 | SSETGAASNDNH | −3.01 | −1.74 | 1.81 | −0.58 |
| ATLVT012XX1946 | 46880 | SSESGAATNDNH | 0.03 | −0.33 | −1.5 | −0.41 | ATLVT012XX1992 | 46926 | SSETGAASNDNT | −2.61 | −1.31 | −0.4 | −2.87 |
| ATLVT012XX1947 | 46881 | SSESGAATNDNT | −1.9 | −0.99 | −0.5 | 0.34 | ATLVT012XX1993 | 46927 | SSETGAATNDNA | −2.23 | 0.12 | −1.89 | −2.09 |
| ATLVT012XX1948 | 46882 | SSESGASSNDNA | −0.08 | −0.18 | 1.27 | 0.77 | ATLVT012XX1994 | 46928 | SSETGAATNDNH | 0.76 | 1.02 | −0.55 | −2.17 |
| ATLVT012XX1949 | 46883 | SSESGASSNDNH | −2.77 | −2.82 | −0.86 | 0.18 | ATTVT012XX1995 | 46929 | SSETGAATNDNT | −1.66 | −0.49 | 0.23 | −3.72 |
| ATLVT012XX1950 | 46884 | SSESGASSNDNT | −1.73 | −0.41 | −1.07 | −0.52 | ATLVT012XX1996 | 46930 | SSETGASSNDNA | −2.31 | 1.87 | 0.39 | −0.6 |
| ATLVT012XX1951 | 46885 | SSESGASTNDNA | −1.26 | −2.55 | 0.71 | −2.12 | ATLVT012XX1997 | 46931 | SSETGASSNDNH | −1.76 | 0.43 | −0.26 | −0.11 |
| ATLVT012XX1952 | 46886 | SSESGASTNDNH | −1.92 | −2.81 | 0.32 | −1.54 | ATLVT012XX1998 | 46932 | SSETGASSNDNT | −2.81 | −0.21 | −0.26 | 1 |
| ATLVT012XX1953 | 46887 | SSESGASTNDNT | −0.09 | −1.91 | −0.19 | −1.6 | ATLVT012XX1999 | 46933 | SSETGASTNDNA | 0.04 | 0.99 | 1.35 | −2.23 |
| ATLVT012XX1954 | 46888 | SSESGGASNDNA | 2.15 | 3.23 | 0.21 | 1.07 | ATLVT012XX2000 | 46934 | SSETGASTNDNH | −2.13 | −0.32 | 0.21 | 0.17 |
| ATLVT012XX1955 | 46889 | SSESGGASNDNH | 2.63 | 5.06 | 1.27 | 1.65 | ATLVT012XX2001 | 46935 | SSETGASTNDNT | −0.33 | −1.24 | −0.18 | −1.25 |
| ATLVT012XX1956 | 46890 | SSESGGASNDNT | 1.9 | 3.12 | −0.12 | 0.19 | ATLVT012XX2002 | 46936 | SSETGGASNDNA | 2.94 | 2.11 | 0.06 | 0.66 |
| ATLVT012XX1957 | 46891 | SSESGGATNDNA | 2.71 | 2.5 | 0.49 | 1.71 | ATLVT012XX2003 | 46937 | SSETGGASNDNH | 2.21 | 1.44 | 0.75 | 1.5 |
| ATLVT012XX1958 | 46892 | SSESGGATNDNH | 7.18 | 8.78 | 1.5 | 3.92 | ATLVT012XX2004 | 46938 | SSETGGASNDNT | 3.71 | 0.43 | 1.06 | −0.13 |
| ATLVT012XX1959 | 46893 | SSESGGATNDNT | 2.46 | 2.7 | 0.26 | 2.23 | ATLVT012XX2005 | 46939 | SSETGGATNDNA | 3.47 | 1.69 | 0.06 | 2.94 |
| ATLVT012XX1960 | 46894 | SSESGGSSNDNA | 1.02 | 0.46 | 0.15 | −0.17 | ATLVT012XX2006 | 46940 | SSETGGATNDNH | 7.01 | 6.38 | 1.31 | 3.98 |
| ATLVT012XX1961 | 46895 | SSESGGSSNDNH | 0.67 | 1.3 | 0.48 | 0.55 | ATLVT012XX2007 | 46941 | SSETGGATNDNT | 3.42 | 0.27 | 0.13 | 1.24 |
| ATLVT012XX1962 | 46896 | SSESGGSSNDNT | 2.06 | 0.48 | −0.67 | −1.69 | ATLVT012XX2008 | 46942 | SSETGGSSNDNA | 1.17 | −0.05 | 0.36 | 0.16 |
| ATLVT012XX1963 | 46897 | SSESGGSTNDNA | 2.37 | 0.94 | 0.13 | 0.27 | ATLVT012XX2009 | 46943 | SSETGGSSNDNH | 1.35 | −1.77 | 0.67 | 0.82 |
| ATLVT012XX1964 | 46898 | SSESGGSTNDNH | 1.25 | 0.84 | 0.09 | 1.24 | ATLVT012XX2010 | 46944 | SSETGGSSNDNT | 1.91 | −0.64 | 0.3 | 0.57 |
| ATLVT012XX1965 | 46899 | SSESGGSTNDNT | 0.88 | 0.82 | 0.86 | 0.6 | ATLVT012XX2011 | 46945 | SSETGGSTNDNA | 0.96 | 0.53 | 0.7 | 1.26 |
| ATLVT012XX1966 | 46900 | SSETAAASNDNA | −0.85 | −1.51 | 0.36 | −1.62 | ATLVT012XX2012 | 46946 | SSETGGSTNDNH | 1.02 | 0.37 | 0.86 | 2.46 |
| ATLVT012XX1967 | 46901 | SSETAAASNDNH | −2.47 | 2.08 | −0.01 | −2.47 | ATLVT012XX2013 | 46947 | SSETGGSTNDNT | 2.56 | 0.66 | −0.31 | 0.43 |
| ATLVT012XX1968 | 46902 | SSETAAASNDNT | −1.81 | −2.12 | −0.16 | −2.13 | ATLVT012XX2014 | 46948 | SSQAAAASNDNA | −2.19 | −0.45 | −1.58 | −0.18 |
| ATLVT012XX1969 | 46903 | SSETAAATNDNA | 0.18 | −0.57 | −1.47 | 1.71 | ATLVT012XX2015 | 46949 | SSQAAAASNDNH | −0.31 | −0.1 | 0.64 | 0.29 |
| ATLVT012XX1970 | 46904 | SSETAAATNDNH | −0.88 | −1.01 | −1.88 | −0.44 | ATTVT012XX2016 | 46950 | SSQAAAASNDNT | −1.44 | 1.83 | 0.4 | 1 |
| ATLVT012XX1971 | 46905 | SSETAAATNDNT | 2.88 | 0.99 | −1.09 | 0.16 | ATLVT012XX2017 | 46951 | SSQAAAATNDNA | 2 | −0.45 | 1.53 | 2.53 |
| ATLVT012XX1972 | 46906 | SSETAASSNDNA | 1.96 | −1.46 | 0.09 | −1.49 | ATLVT012XX2018 | 46952 | SSQAAAATNDNH | 0.37 | −0.18 | 0.46 | 1.53 |
| ATLVT012XX1973 | 46907 | SSETAASSNDNH | −1.67 | −2.87 | −0.13 | −1.22 | ATLVT012XX2019 | 46953 | SSQAAAATNDNT | 1.03 | 1.63 | −0.42 | 0.99 |
| ATLVT012XX1974 | 46908 | SSETAASSNDNT | 0.3 | −1.99 | −1.36 | −0.69 | ATLVT012XX2020 | 46954 | SSQAAASSNDNA | −0.9 | −1.4 | 0.8 | 0.82 |
| ATLVT012XX1975 | 46909 | SSETAASTNDNA | 0.29 | 1.41 | 0.14 | 0.43 | ATLVT012XX2021 | 46955 | SSQAAASSNDNH | −1.49 | 1.26 | 0.35 | −0.21 |
| ATLVT012XX1976 | 46910 | SSETAASTNDNH | −1.6 | −0.89 | 0.11 | −0.1 | ATLVT012XX2022 | 46956 | SSQAAASSNDNT | 0.39 | −1.09 | 0.59 | −1.36 |
| ATLVT012XX1977 | 46911 | SSETAASTNDNT | −0.04 | −1.82 | 0.36 | −1.93 | ATLVT012XX2023 | 46957 | SSQAAASTNDNA | 1.85 | 1.74 | −0.08 | −0.49 |
| ATLVT012XX1978 | 46912 | SSETAGASNDNA | −0.52 | 1.8 | −0.77 | −0.64 | ATLVT012XX2024 | 46958 | SSQAAASTNDNH | 0.03 | −1.1 | 0.36 | 1.17 |
| ATLVT012XX2025 | 46959 | SSQAAASTNDNT | 1.58 | −0.14 | −0.48 | −1.64 | ATLVT012XX2071 | 47005 | SSQSAASTNDNA | −0.64 | −0.53 | −0.35 | 0.85 |
| ATLVT012XX2026 | 46960 | SSQAAGASNDNA | −0.27 | 1.99 | −2.34 | −1.12 | ATLVT012XX2072 | 47006 | SSQSAASTNDNH | −2.24 | 2.23 | 0.18 | −0.93 |
| ATLVT012XX2027 | 46961 | SSQAAGASNDNH | −0.38 | 0.67 | −0.64 | −0.98 | ATLVT012XX2073 | 47007 | SSQSAASTNDNT | −1.05 | 0.04 | −0.14 | 0.32 |
| ATLVT012XX2028 | 46962 | SSQAAGASNDNT | 1.36 | 1.82 | −0.61 | −0.51 | ATLVT012XX2074 | 47008 | SSQSAGASNDNA | −0.73 | 1.09 | 0.66 | 0.39 |
| ATLVT012XX2029 | 46963 | SSQAAGATNDNA | −1.19 | 1.92 | −0.29 | −0.85 | ATLVT012XX2075 | 47009 | SSQSAGASNDNH | −0.25 | 2.59 | −0.75 | 2.14 |
| ATLVT012XX2030 | 46964 | SSQAAGATNDNH | 1.35 | 2.48 | −1.3 | 3.58 | ATLVT012XX2076 | 47010 | SSQSAGASNDNT | −0.96 | −0.3 | −0.58 | −0.43 |
| ATLVT012XX2031 | 46965 | SSQAAGATNDNT | 0.04 | 0.03 | −2.72 | 0.93 | ATLVT012XX2077 | 47011 | SSQSAGATNDNA | −0.37 | 1.35 | 0.28 | 0.5 |
| ATLVT012XX2032 | 46966 | SSQAAGSSNDNA | −2.2 | 3.4 | −1.17 | −1.38 | ATLVT012XX2078 | 47012 | SSQSAGATNDNH | 1.43 | 3.96 | −0.03 | 2.21 |
| ATLVT012XX2033 | 46967 | SSQAAGSSNDNH | −1.9 | 0.16 | −1.73 | −0.64 | ATLVT012XX2079 | 47013 | SSQSAGATNDNT | 1.35 | 2.65 | −0.33 | 0.54 |
| ATLVT012XX2034 | 46968 | SSQAAGSSNDNT | −0.47 | 1.2 | −0.76 | 0.96 | ATLVT012XX2080 | 47014 | SSQSAGSSNDNA | −1.91 | 0.17 | −0.7 | −0.34 |
| ATLVT012XX2035 | 46969 | SSQAAGSTNDNA | 1.26 | 0.03 | −1.33 | 0.25 | ATLVT012XX2081 | 47015 | SSQSAGSSNDNH | −1.26 | −0.47 | −0.32 | −0.3 |
| ATLVT012XX2036 | 46970 | SSQAAGSTNDNH | 0.72 | 0.71 | −1.79 | 1.72 | ATLVT012XX2082 | 47016 | SSQSAGSSNDNT | −0.32 | 0.3 | −0.96 | −1.3 |
| ATLVT012XX2037 | 46971 | SSQAAGSTNQNT | 1.69 | 0.73 | −0.23 | 0.48 | ATLVT012XX2083 | 47017 | SSQSAGSTNDNA | −1.14 | 3.61 | 0.9 | 0.38 |
| ATLVT012XX2038 | 46972 | SSQAGAASNDNA | 1.73 | −0.17 | −1.96 | −1.52 | ATLVT012XX2084 | 47018 | SSQSAGSTNDNH | 0.2 | 0.92 | 0.09 | 2.05 |
| ATLVT012XX2039 | 46973 | SSQAGAASNDNH | 0.81 | −0.81 | 0.86 | 0.97 | ATLVT012XX2085 | 47019 | SSQSAGSTNDNT | −0.94 | 1.37 | 0.62 | 0.02 |
| ATLVT012XX2040 | 46974 | SSQAGAASNDNT | 1.67 | −2.32 | −0.42 | −0.59 | ATLVT012XX2086 | 47020 | SSQSGAASNDNA | 0.36 | 0.97 | 0.22 | −0.42 |
| ATLVT012XX2041 | 46975 | SSQAGAATNDNA | 1.11 | 2.96 | −0.71 | 2.13 | ATLVT012XX2087 | 47021 | SSQSGAASNDNH | −1.2 | 1.8 | −1.26 | −0.49 |
| ATLVT012XX2042 | 46976 | SSQAGAATNDNH | 0.86 | 2.54 | −1.03 | 1.37 | ATLVT012XX2088 | 47022 | SSQSGAASNDNT | 0.46 | 2.93 | 1.69 | −1.9 |
| ATLVT012XX2043 | 46977 | SSQAGAATNDNT | 0.45 | −0.63 | −0.12 | 1.02 | ATLVT012XX2089 | 47023 | SSQSGAATNDNA | −0.43 | 1.45 | 0.19 | 0.46 |
| ATLVT012XX2044 | 46978 | SSQAGASSNDNA | 2.63 | −0.14 | 0.03 | −0.04 | ATLVT012XX2090 | 47024 | SSQSGAATNDNH | −0.37 | 1.85 | −0.98 | 1.52 |
| ATLVT012XX2045 | 46979 | SSQAGASSNDNH | 1.36 | 0.62 | 1.2 | −0.68 | ATLVT012XX2091 | 47025 | SSQSGAATNDNT | −0.04 | 2.45 | −1.07 | 0.06 |
| ATLVT012XX2046 | 46980 | SSQAGASSNDNT | 0.31 | 0.13 | −0.48 | 0.47 | ATLVT012XX2092 | 47026 | SSQSGASSNDNA | −0.76 | 0.74 | −0.05 | −0.93 |
| ATLVT01XXX2047 | 46981 | SSQAGASTNDNA | 0.21 | 0.39 | 0.77 | 0.77 | ATLVT012XX2093 | 47027 | SSQSGASSNDNH | −0.06 | −1.08 | 0.17 | 0.48 |
| ATLVT012XX2048 | 46982 | SSQAGASTNDNH | 0.78 | 3.76 | 1.05 | 1.82 | ATLVT012XX2094 | 47028 | SSQSGASSNDNT | 1.44 | −0.52 | 0.64 | −1.02 |
| ATLVT012XX2049 | 46983 | SSQAGASTNDNT | 1.93 | 1.59 | 0.02 | −0.03 | ATLVT012XX2095 | 47029 | SSQSGASTNDNA | −0.11 | −0.53 | 0.12 | 1.67 |
| ATLVT012XX2050 | 46984 | SSQAGGASNDNA | 3 | 4.38 | −0.05 | 1.86 | ATLVT012XX2096 | 47030 | SSQSGASTNDNH | 0.5 | 0.06 | 0.7 | 2.44 |
| ATLVT012XX2051 | 46985 | SSQAGGASNDNH | 6.93 | 9.18 | 1.19 | 5.18 | ATLVT012XX2097 | 47031 | SSQSGASTNDNT | 1.24 | −0.34 | −0.1 | 1.16 |
| ATLVT012XX2052 | 46986 | SSQAGGASNDNT | 2.97 | 3.59 | 1.42 | 2.28 | ATLVT012XX2098 | 47032 | SSQSGGASNDNA | 2.71 | 3.44 | 0.16 | 1.45 |
| ATLVT012XX2053 | 46987 | SSQAGGATNDNA | 5.13 | 5.34 | −0.33 | 2.01 | ATLVT012XX2099 | 47033 | SSQSGGASNDNH | 6.62 | 8.06 | 1.73 | 4.09 |
| ATLVT012XX2054 | 46988 | SSQAGGATNDNH | 9.66 | 12.66 | −0.11 | 4.16 | ATTVT012XX2100 | 47034 | SSQSGGASNDNT | 4.3 | 5.75 | 0.08 | 2.1 |
| ATLVT012XX2055 | 46989 | SSQAGGATNDNT | 5.49 | 6.48 | 0.44 | 2.79 | ATLVT012XX2101 | 47035 | SSQSGGATNDNA | 4.56 | 5.51 | 0.97 | 2.28 |
| ATLVT012XX2056 | 46990 | SSQAGGSSNDNA | 2.75 | 4.23 | 0.16 | 1.03 | ATLVT012XX2102 | 47036 | SSQSGGATNDNH | 9.74 | 12.42 | 1.75 | 4.5 |
| ATLVT012XX2057 | 46991 | SSQAGGSSNDNH | 1.25 | 3.22 | 0.91 | 2.46 | ATLVT012XX2103 | 47037 | SSQSGGATNDNT | 5.48 | 5.42 | 0.15 | 2.9 |
| ATLVT012XX2058 | 46992 | SSQAGGSSNDNT | 2.49 | 4.42 | 0.08 | 1.53 | ATLVT012XX2104 | 47038 | SSQSGGSSNDNA | 3 | 2.54 | 0.47 | 2.2 |
| ATLVT012XX2059 | 46993 | SSQAGGSTNDNA | 3.72 | 4.8 | 0.74 | 3.08 | ATLVT012XX2105 | 47039 | SSQSGGSSNDNH | 1.62 | 1.58 | 0.76 | 2.3 |
| ATLVT012XX2060 | 46994 | SSQAGGSTNDNH | 7.65 | 8.13 | 1.37 | 3.86 | ATLVT012XX2106 | 47040 | SSQSGGSSNDNT | 2.88 | 3.03 | 0.51 | 0.39 |
| ATLVT012XX2061 | 46995 | SSQAGGSTNDNT | 3.71 | 4.53 | 0.88 | 2.41 | ATLVT012XX2107 | 47041 | SSQSGGSTNDNA | 5 | 6.16 | 0.95 | 1.56 |
| ATLVT012XX2062 | 46996 | SSQSAAASNDNA | 0.86 | 3 | 1.99 | −0.63 | ATLVT012XX2108 | 47042 | SSQSGGSTNDNH | 6.51 | 8.58 | 1.54 | 3.74 |
| ATLVT012XX2063 | 46997 | SSQSAAASNDNH | −0.98 | 1.53 | −1.1 | 0.06 | ATLVT012XX2109 | 47043 | SSQSGGSTNDNT | 4.49 | 5.72 | 1.51 | 3.29 |
| ATLVT012XX2064 | 46998 | SSQSAAASNDNT | −0.07 | −0.57 | −0.48 | 0.46 | ATLVT012XX2110 | 47044 | SSQTAAASNDNA | −0.69 | −0.85 | 0.23 | 0.33 |
| ATLVT012XX2065 | 46999 | SSQSAAATNDNA | −0.28 | 1.35 | 0.25 | −0.45 | ATLVT012XX2111 | 47045 | SSQTAAASNDNH | −0.07 | 2.89 | 0.26 | −1 |
| ATLVT012XX2066 | 47000 | SSQSAAATNDNH | −1.72 | 2.4 | 0.6 | 0.07 | ATLVT012XX2112 | 47046 | SSQTAAASNDNT | 0.4 | 0.88 | 0.04 | 0.73 |
| ATLVT012XX2067 | 47001 | SSQSAAATNDNT | −0.65 | 1.52 | 0.64 | 1.28 | ATLVT012XX2113 | 47047 | SSQTAAATNDNA | 2.07 | −0.21 | 0.75 | −0.42 |
| ATLVT012XX2068 | 47002 | SSQSAASSNDNA | 2.03 | 1.62 | 0.89 | −1.01 | ATLVT012XX2114 | 47048 | SSQTAAATNDNH | 0.63 | 2.98 | 0.24 | 0.6 |
| ATLVT012XX2069 | 47003 | SSQSAASSNDNH | −1.25 | 1.47 | −0.78 | −1.78 | ATLVT012XX2115 | 47049 | SSQTAAATNDNT | −0.56 | 1.35 | 1.16 | 0.23 |
| ATLVT012XX2070 | 47004 | SSQSAASSNDNT | 1.04 | 1.27 | 0.24 | −0.6 | ATLVT012XX2116 | 47050 | SSQTAASSNDNA | 0.78 | −0.54 | 1.03 | 0.38 |
| ATLVT012XX2117 | 47051 | SSQTAASSNDNH | −0.06 | 1 | −0.57 | −1.22 | ATLVT012XX2163 | 47097 | SSTAAAATNDNT | −0.99 | −1.03 | 0.96 | 0.88 |
| ATLVT01XXX2118 | 47052 | SSQTAASSNDNT | −1.17 | 1.26 | −0.47 | −1.47 | ATLVT012XX2164 | 47098 | SSTAAASSNDNA | −0.67 | 1.44 | 0.02 | −0.08 |
| ATLVT012XX2119 | 47053 | SSQTAASTNDNA | 1.87 | 0.02 | 0.67 | −0.05 | ATLVT012XX2165 | 47099 | SSTAAASSNDNH | −1.31 | 0.2 | 1.05 | 1.16 |
| ATLVT012XX2120 | 47054 | SSQTAASTNDNH | 3.35 | 1.83 | 1.19 | −0.52 | ATLVT012XX2166 | 47100 | SSTAAASSNDNT | 1.42 | 1.25 | 0.37 | 0.23 |
| ATLVT012XX2121 | 47055 | SSQTAASTNDNT | 0.23 | −0.99 | 0.37 | 1.66 | ATLVT012XX2167 | 47101 | SSTAAASTNDNA | 0.84 | 0.58 | −0.87 | −0.54 |
| ATLVT012XX2122 | 47056 | SSQTAGASNDNA | 4.17 | −0.39 | 1.07 | 0.99 | ATLVT012XX2168 | 47102 | SSTAAASTNDNH | 0.4 | 3.8 | −0.02 | −0.8 |
| ATLVT012XX2123 | 47057 | SSQTAGASNDNH | 0.86 | 1.04 | 0.39 | 0.97 | ATLVT012XX2169 | 47103 | SSTAAASTNDNT | 1.81 | −0.8 | −1.01 | 0.37 |
| ATLVT012XX2124 | 47058 | SSQTAGASNDNT | 1.61 | −0.54 | 0.57 | 1.08 | ATLVT012XX2170 | 47104 | SSTAAGASNDNA | −0.15 | 0.28 | −0.28 | −2.21 |
| ATLVT012XX2125 | 47059 | SSQTAGATNDNA | 1.09 | −0.72 | −0.27 | 0.45 | ATLVT012XX2171 | 47105 | SSTAAGASNDNH | 1.56 | 1.53 | −0.81 | 0 |
| ATLVT012XX2126 | 47060 | SSQTAGATNDNH | 2.46 | 1.42 | −0.01 | 4.17 | ATLVT012XX2172 | 47106 | SSTAAGASNDNT | 1.54 | 1.56 | −1.19 | −2.02 |
| ATLVT012XX2127 | 47061 | SSQTAGATNDNT | 0.69 | −1.01 | −0.75 | 1.32 | ATLVT012XX2173 | 47107 | SSTAAGATNDNA | 2.08 | 0.67 | 0.25 | 0.27 |
| ATLVT012XX2128 | 47062 | SSQTAGSSNDNA | −0.77 | −0.87 | −1.22 | 0.3 | ATLVT012XX2174 | 47108 | SSTAAGATNDNH | 2.73 | 1.85 | 0.58 | 3.64 |
| ATLVT012XX2129 | 47063 | SSQTAGSSNDNH | −0.3 | 2.96 | 0.57 | 1.72 | ATLVT012XX2175 | 47109 | SSTAAGATNDNT | 1.76 | 2.34 | −0.1 | −0.4 |
| ATLVT012XX2130 | 47064 | SSQTAGSSNDNT | 2.81 | 0.51 | 0.38 | 1.1 | ATLVT012XX2176 | 47110 | SSTAAGSSNDNA | 3.17 | −0.84 | 0.14 | 0.42 |
| ATLVT012XX2131 | 47065 | SSQTAGSTNDNA | 0.33 | 0.82 | 0.62 | 1.37 | ATLVT012XX2177 | 47111 | SSTAAGSSNDNH | 1.5 | −0.71 | −0.23 | −0.42 |
| ATLVT012XX2132 | 47066 | SSQTAGSTNDNH | 0.07 | −0.54 | 0.87 | 1.17 | ATLVT012XX2178 | 47112 | SSTAAGSSNDNT | 2.21 | 2.62 | −0.43 | 0.43 |
| ATLVT012XX2133 | 47067 | SSQTAGSTNDNT | 0.45 | 1.7 | 0.3 | 0.22 | ATLVT012XX2179 | 47113 | SSTAAGSTNDNA | 0.76 | −0.28 | 0.36 | −0.93 |
| ATLVT012XX2134 | 47068 | SSQTGAASNDNA | 1.61 | −0.4 | −0.99 | −1.67 | ATLVT012XX2180 | 47114 | SSTAAGSTNDNH | 0.21 | 1.31 | 1.13 | 0.26 |
| ATLVT012XX2135 | 47069 | SSQTGAASNDNH | −0.59 | −0.67 | −1.24 | −2.56 | ATLVT012XX2181 | 47115 | SSTAAGSTNDNT | 1.22 | 0.16 | −1.8 | 0.84 |
| ATLVT012XX2136 | 47070 | SSQTGAASNDNT | −0.32 | −1.03 | −0.3 | −3.3 | ATLVT012XX2182 | 47116 | SSTAGAASNDNA | 1.37 | 0.03 | −0.5 | −1.66 |
| ATLVT012XX2137 | 47071 | SSQTGAATNDNA | −0.84 | 2.38 | 0.98 | −2.29 | ATLVT012XX2183 | 47117 | SSTAGAASNDNH | 0.96 | 1.11 | −1.79 | 1.15 |
| ATLVT012XX2138 | 47072 | SSQTGAATNDNH | 3.09 | 1.73 | 1.48 | −1.05 | ATLVT012XX2184 | 47118 | SSTAGAASNDNT | −0.63 | −1.2 | 0.28 | −2.51 |
| ATLVT012XX2139 | 47073 | SSQTGAATNDNT | −0.99 | −0.17 | 0.88 | −1.35 | ATLVT012XX2185 | 47119 | SSTAGAATNDNA | 1.85 | 3.74 | −0.5 | 1.02 |
| ATLVT012XX2140 | 47074 | SSQTGASSNDNA | 2.1 | −0.28 | −0.75 | −1.1 | ATLVT012XX2186 | 47120 | SSTAGAATNDNH | 2.26 | 4 | 0.33 | 3.72 |
| ATLVT012XX2141 | 47075 | SSQTGASSNDNH | 2.67 | 1.86 | 0.26 | 0.09 | ATLVT012XX2187 | 47121 | SSTAGAATNDNT | 0.61 | 2.05 | −1.39 | 2.38 |
| ATLVT012XX2142 | 47076 | SSQTGASSNDNT | 1.88 | 2.12 | −1.01 | −2.1 | ATLVT012XX2188 | 47122 | SSTAGASSNDNA | −0.53 | 3.78 | −0.38 | −0.29 |
| ATLVT012XX2143 | 47077 | SSQTGASTNDNA | 1.81 | 1.56 | 0.15 | 1.26 | ATLVT012XX2189 | 47123 | SSTAGASSNDNH | −0.26 | −0.83 | −0.35 | 0.24 |
| ATLVT012XX2144 | 47078 | SSQTGASTNDNH | 0.93 | 2.38 | −0.28 | 2.31 | ATLVT012XX2190 | 47124 | SSTAGASSNDNT | 0.27 | 1.03 | 0.11 | −0.97 |
| ATLVT012XX2145 | 47079 | SSQTGASTNDNT | −0.18 | −0.03 | 0.57 | −0.45 | ATLVT012XX2191 | 47125 | SSTAGASTNDNA | −0.35 | 1.04 | −0.69 | 1.48 |
| ATLVT012XX2146 | 47080 | SSQTGGASNDNA | 2.82 | 3.36 | 0.67 | 2.89 | ATLVT012XX2192 | 47126 | SSTAGASTNDNH | −0.15 | 2.63 | 0.94 | 1.62 |
| ATLVT012XX2147 | 47081 | SSQTGGASNDNH | 5.66 | 7.47 | 1.57 | 3.99 | ATLVT012XX2193 | 47127 | SSTAGASTNDNT | 0.33 | −0.04 | 0.21 | 1.17 |
| ATLVT012XX2148 | 47082 | SSQTGGASNDNT | 3.13 | 2.58 | 1.31 | 0.88 | ATLVT012XX2194 | 47128 | SSTAGGASNDNA | 6.46 | 7.2 | 0.11 | 3.67 |
| ATLVT012XX2149 | 47083 | SSQTGGATNDNA | 4.06 | 3.93 | 0.11 | 2.66 | ATLVT012XX2195 | 47129 | SSTAGGASNDNH | 10.05 | 11.81 | 1.07 | 2.61 |
| ATLVT012XX2150 | 47084 | SSQTGGATNDNH | 9.52 | 10.46 | 2.18 | 4.82 | ATLVT012XX2196 | 47130 | SSTAGGASNDNT | 6.25 | 9.42 | 0.65 | 4.03 |
| ATLVT012XX2151 | 47085 | SSQTGGATNDNT | 5.49 | 5.41 | 0.37 | 1.4 | ATLVT012XX2197 | 47131 | SSTAGGATNDNA | 7.08 | 9.46 | 1.03 | 3.88 |
| ATLVT012XX2152 | 47086 | SSQTGGSSNDNA | 2.92 | 1.29 | 0.82 | 2.37 | ATLVT012XX2198 | 47132 | SSTAGGATNDNH | 10.47 | 12.47 | 0.98 | 3.49 |
| ATLVT012XX2153 | 47087 | SSQTGGSSNDNH | 3.15 | 0.98 | −0.14 | 2.17 | ATLVT012XX2199 | 47133 | SSTAGGATNDNT | 6.22 | 8.64 | 1.56 | 3.1 |
| ATLVT012XX2154 | 47088 | SSQTGGSSNDNT | 3.25 | 1.63 | 0.09 | 1.65 | ATLVT012XX2200 | 47134 | SSTAGGSSNDNA | 5.42 | 5.4 | 0.59 | 3.84 |
| ATLVT01XXX2155 | 47089 | SSQTGGSTNDNA | 3.87 | 5.78 | 1.17 | 2.84 | ATLVT012XX2201 | 47135 | SSTAGGSSNDNH | 4.48 | 3.35 | 1.6 | 4.26 |
| ATLVT012XX2156 | 47090 | SSQTGGSTNDNH | 6.36 | 6.28 | 1.12 | 4.16 | ATLVT012XX2202 | 47136 | SSTAGGSSNDNT | 4.91 | 5.66 | 1.1 | 3.59 |
| ATLVT012XX2157 | 47091 | SSQTGGSTNDNT | 3.8 | 2.69 | 0.36 | 1.49 | ATLVT012XX2203 | 47137 | SSTAGGSTNDNA | 7.17 | 7.86 | −0.09 | 4.47 |
| ATLVT012XX2158 | 47092 | SSTAAAASNDNA | 0.47 | −0.95 | 0.27 | 1.95 | ATLVT012XX2204 | 47138 | SSTAGGSTNDNH | 7.79 | 8.59 | 1.17 | 5.43 |
| ATLVT012XX2159 | 47093 | SSTAAAASNDNE | 0.11 | 0.63 | −0.7 | 0.92 | ATLVT012XX2205 | 47139 | SSTAGGSTNDNT | 6.66 | 6.91 | 0.14 | 4.2 |
| ATLVT012XX2160 | 47094 | SSTAAAASNDNT | 1.85 | −1.31 | −0.44 | 1.18 | ATLVT012XX2206 | 47140 | SSTSAAASNDNA | 0.07 | −0.92 | 1.15 | 0.18 |
| ATLVT012XX2161 | 47095 | SSTAAAATNDNA | −1.03 | −1.24 | −0.34 | 0.1 | ATLVT012XX2207 | 47141 | SSTSAAASNDNH | 1.15 | −0.77 | −0.17 | −0.81 |
| ATLVT012XX2162 | 47096 | SSTAAAATNDNH | −0.57 | 0.71 | 0 | 0.33 | ATLVT012XX2208 | 47142 | SSTSAAASNDNT | 3.32 | −0.98 | −1.08 | −0.15 |
| ATLVT012XX2209 | 47143 | SSTSAAATNDNA | 1.62 | −0.62 | 0.72 | −0.3 | ATLVT012XX2255 | 47189 | SSTTAAASNDNH | 1.46 | 2.19 | 0.2 | 2.35 |
| ATLVT012XX2210 | 47144 | SSTSAAATNDNH | 1.71 | −0.17 | 0.36 | 1.31 | ATLVT012XX2256 | 47190 | SSTTAAASNDNT | 2.4 | 0.59 | −0.29 | −0.05 |
| ATLVT012XX2211 | 47145 | SSTSAAATNDNT | 0.38 | 0.52 | 0.7 | 0.4 | ATLVT012XX2257 | 47191 | SSTTAAATNDNA | 0.32 | 1.72 | 0.92 | 1.97 |
| ATLVT012XX2212 | 47146 | SSTSAASSNDNA | 1.45 | −0.04 | 0.07 | 0 | ATLVT012XX2258 | 47192 | SSTTAAATNDNH | 0.37 | 0.54 | −0.46 | 1.31 |
| ATLVT012XX2213 | 47147 | SSTSAASSNDNH | 0.05 | −0.88 | 0.22 | 0.02 | ATLVT012XX2259 | 47193 | SSTTAAATNDNT | 0.72 | −0.22 | 0.16 | 0.18 |
| ATLVT012XX2214 | 47148 | SSTSAASSNDNT | 2.02 | 0.47 | 0.99 | 1.94 | ATLVT012XX2260 | 47194 | SSTTAASSNDNA | −0.29 | −1.82 | 0.69 | −1.26 |
| ATLVT012XX2215 | 47149 | SSTSAASTNDNA | 0.12 | −0.3 | −0.51 | −0.82 | ATLVT012XX2261 | 47195 | SSTTAASSNDNH | −0.89 | 0.7 | −0.02 | 0.32 |
| ATLVT012XX2216 | 47150 | SSTSAASTNDNH | −0.38 | 0.92 | −0.2 | 0.12 | ATLVT012XX2262 | 47196 | SSTTAASSNDNT | −0.08 | 0.04 | 0.41 | 0.6 |
| ATLVT012XX2217 | 47151 | SSTSAASTNDNT | 0.3 | −0.09 | 0.07 | −0.66 | ATLVT012XX2263 | 47197 | SSTTAASTNDNA | −0.17 | −0.01 | 0.25 | −0.76 |
| ATLVT012XX2218 | 47152 | SSTSAGASNDNA | 2.36 | 1.53 | 1.15 | 0.7 | ATLVT012XX2264 | 47198 | SSTTAASTNDNH | −1.2 | −0.43 | 0.19 | 1.85 |
| ATLVT012XX2219 | 47153 | SSTSAGASNDNH | 0.22 | 1.66 | −0.97 | 1.57 | ATLVT012XX2265 | 47199 | SSTTAASTNDNT | 1.69 | 1.59 | −0.57 | −0.64 |
| ATLVT012XX2220 | 47154 | SSTSAGASNDNT | 0.16 | 1.02 | 0.93 | 1.31 | ATLVT012XX2266 | 47200 | SSTTAGASNDNA | 0.71 | 0.8 | −0.42 | 2.52 |
| ATLVT012XX2221 | 47155 | SSTSAGATNDNA | −0.18 | 3.36 | 0.76 | −0.06 | ATLVT012XX2267 | 47201 | SSTTAGASNDNH | 0.64 | 2.38 | −0.1 | 2.42 |
| ATLVT012XX2222 | 47156 | SSTSAGATNDNH | 3.08 | 5.55 | 1.09 | 3.77 | ATLVT012XX2268 | 47202 | SSTTAGASNDNT | 1.23 | 1.22 | 0.08 | 1.12 |
| ATLVT012XX2223 | 47157 | SSTSAGATNDNT | 1.34 | 1.78 | −0.13 | 0.79 | ATLVT012XX2269 | 47203 | SSTTAGATNDNA | −0.33 | 2.55 | −0.68 | −0.24 |
| ATLVT012XX2224 | 47158 | SSTSAGSSNDNA | −0.24 | 1.21 | 0.73 | 0.95 | ATLVT012XX2270 | 47204 | SSTTAGATNDNH | 3.25 | 2.23 | 0.42 | 3.42 |
| ATLVT012XX2225 | 47159 | SSTSAGSSNDNH | −1.12 | −0.57 | 0.33 | 1.37 | ATLVT012XX2271 | 47205 | SSTTAGATNDNT | 0.03 | 0.08 | −0.39 | 0.49 |
| ATLVT012XX2226 | 47160 | SSTSAGSSNDNT | 0.86 | 2.31 | 0.78 | 0.39 | ATLVT012XX2272 | 47206 | SSTTAGSSNDNA | 0.72 | 0.42 | 1.01 | −0.13 |
| ATLVT012XX2227 | 47161 | SSTSAGSTNDNA | −0.1 | 0.27 | 0.67 | 0.22 | ATLVT012XX2273 | 47207 | SSTTAGSSNDNH | −0.05 | −0.21 | −0.51 | −1.45 |
| ATLVT012XX2228 | 47162 | SSTSAGSTNDNH | 0.57 | 2.56 | 0.66 | 1.69 | ATLVT012XX2274 | 47208 | SSTTAGSSNDNT | 2.06 | 2.73 | −0.07 | −1.11 |
| ATLVT012XX2229 | 47163 | SSTSAGSTNDNT | 1.76 | 2.33 | 0.8 | 1.49 | ATLVT012XX2275 | 47209 | SSTTAGSTNDNA | 0.32 | −1.5 | −0.25 | 1.44 |
| ATLVT012XX2230 | 47164 | SSTSGAASNDNA | 0.74 | −0.26 | 0.49 | 0.4 | ATLVT012XX2276 | 47210 | SSTTAGSTNDNH | −0.38 | −1.4 | −0.28 | 1.51 |
| ATLVT012XX2231 | 47165 | SSTSGAASNDNH | 1.78 | 0.9 | 0.37 | −0.48 | ATLVT012XX2277 | 47211 | SSTTAGSTNDNT | 0.6 | −0.13 | 0.19 | 0.53 |
| ATLVT012XX2232 | 47166 | SSTSGAASNDNT | 0.33 | −0.44 | −0.72 | −0.51 | ATLVT012XX2278 | 47212 | SSTTGAASNDNA | 1.42 | −0.08 | −0.9 | 0.95 |
| ATLVT012XX2233 | 47167 | SSTSGAATNDNA | 1.34 | 2.29 | 1.43 | 3.29 | ATLVT012XX2279 | 47213 | SSTTGAASNDNH | 1.39 | 0.75 | 0.17 | 1.07 |
| ATLVT012XX2234 | 47168 | SSTSGAATNDNH | 1.93 | 3.46 | 0.53 | 3.82 | ATLVT012XX2280 | 47214 | SSTTGAASNDNT | 0.84 | 4.59 | −0.07 | −0.12 |
| ATLVT012XX2235 | 47169 | SSTSGAATNDNT | 1.08 | 1.99 | −0.72 | 0.39 | ATLVT012XX2281 | 47215 | SSTTGAATNDNA | 2.54 | 0.95 | −1.26 | −0.69 |
| ATLVT012XX2236 | 47170 | SSTSGASSNDNA | 1.51 | 0.52 | 0.39 | 0.02 | ATLVT012XX2282 | 47216 | SSTTGAATNDNH | 1.79 | 1.44 | 0.65 | 2.28 |
| ATLVT012XX2237 | 47171 | SSTSGASSNDNH | 0.47 | 0.55 | 0.51 | 0.63 | ATLVT012XX2283 | 47217 | SSTTGAATNDNT | 3.23 | 0.99 | −0.58 | −2.06 |
| ATLVT012XX2238 | 47172 | SSTSGASSNDNT | 0.4 | 1.02 | 0.16 | −0.56 | ATLVT012XX2284 | 47218 | SSTTGASSNDNA | 1.76 | 2.71 | 0.82 | −0.97 |
| ATLVT012XX2239 | 47173 | SSTSGASTNDNA | 0.43 | −0.44 | 1.06 | 0.28 | ATLVT012XX2285 | 47219 | SSTTGASSNDNH | 1.3 | 0.56 | 0.71 | −0.16 |
| ATLVT012XX2240 | 47174 | SSTSGASTNDNH | 1.47 | 1.23 | 0.45 | 2.48 | ATLVT012XX2286 | 47220 | SSTTGASSNDNT | 2.6 | 1.2 | 0.26 | −0.26 |
| ATLVT012XX2241 | 47175 | SSTSGASTNDNT | 0.71 | 0.79 | 0.9 | 0.26 | ATLVT012XX2287 | 47221 | SSTTGASTNDNA | 0.57 | −0.46 | −0.24 | −0.14 |
| ATLVT012XX2242 | 47176 | SSTSGGASNDNA | 5.97 | 7.63 | 1.49 | 3.04 | ATLVT012XX2288 | 47222 | SSTTGASTNDNH | −0.19 | 1.96 | 0.19 | 0.71 |
| ATLVT012XX2243 | 47177 | SSTSGGASNDNH | 8.73 | 9.31 | 2.04 | 4.85 | ATLVT012XX2289 | 47223 | SSTTGASTNDNT | 1.98 | 0.58 | 0.72 | 0.37 |
| ATLVT012XX2244 | 47178 | SSTSGGASNDNT | 6.29 | 6.02 | 1.48 | 3.48 | ATLVT012XX2290 | 47224 | SSTTGGASNDNA | 3.64 | 5.2 | 1.54 | 3.31 |
| ATLVT012XX2245 | 47179 | SSTSGGATNDNA | 6.57 | 8.2 | 0.91 | 4.28 | ATLVT012XX2291 | 47225 | SSTTGGASNDNH | 7.54 | 9.81 | 1.57 | S.il |
| ATLVT012XX2246 | 47180 | SSTSGGATNDNH | 10.29 | 12.33 | 1.17 | 4.14 | ATTVT012XX2292 | 47226 | SSTTGGASNDNT | 5.14 | 4.91 | 0.1 | 1.94 |
| ATLVT012XX2247 | 47181 | SSTSGGATNDNT | 7.12 | 7.09 | 0.12 | 3.62 | ATLVT012XX2293 | 47227 | SSTTGGATNDNA | 5.26 | 6.72 | 1.25 | 3.83 |
| ATLVT012XX2248 | 47182 | SSTSGGSSNDNA | 5.06 | 5.31 | 0.24 | 3.53 | ATLVT012XX2294 | 47228 | SSTTGGATNDNH | 10.02 | 12.11 | 1.06 | 4.6 |
| ATLVT012XX2249 | 47183 | SSTSGGSSNDNH | 4.03 | 5.7 | 0.8 | 2.3 | ATLVT012XX2295 | 47229 | SSTTGGATNDNT | 5.42 | 5.9 | 0.48 | 2.44 |
| ATLVT012XX2250 | 47184 | SSTSGGSSNDNT | 5.15 | 4.36 | 0.24 | 2.79 | ATLVT012XX2296 | 47230 | SSTTGGSSNDNA | 3.86 | 6.03 | 0.18 | 2.12 |
| ATLVT012XX2251 | 47185 | SSTSGGSTNDNA | 6.05 | 6.07 | 2.12 | 3.89 | ATLVT012XX2297 | 47231 | SSTTGGSSNDNH | 2.81 | 4.13 | 0.49 | 1.76 |
| ATLVT012XX2252 | 47186 | SSTSGGSTNDNH | 7.1 | 6.39 | 1.1 | 3.65 | ATLVT012XX2298 | 47232 | SSTTGGSSNDNT | 3.87 | 3.52 | −0.53 | 0.68 |
| ATLVT012XX2253 | 47187 | SSTSGGSTNDNT | 5.3 | 5.23 | 0.97 | 3.15 | ATLVT012XX2299 | 47233 | SSTTGGSTNDNA | 4.24 | 6.84 | 0.68 | 2.22 |
| ATLVT012XX2254 | 47188 | SSTTAAASNDNA | 0.39 | 2.59 | 0.51 | −0.58 | ATLVT012XX2300 | 47234 | SSTTGGSTNDNH | 5.59 | 5.32 | 0.3 | 3.25 |
| ATLVT012XX2301 | 47235 | SSTTGGSTNDNT | 5.45 | 5.4 | 1.06 | 1.88 | ATLVT012XX2347 | 47281 | TGAAGGSTNDNA | −0.46 | −0.11 | −2.77 | −2.63 |
| ATLVT012XX2302 | 47236 | TGAAAAASNDNA | −2.83 | 2 | −3.42 | 0.28 | ATLVT012XX2348 | 47282 | TGAAGGSTNDNH | 3.8 | 6.3 | 0.14 | 1.9 |
| ATLVT012XX2303 | 47237 | TGAAAAASNDNH | −0.66 | 1.51 | −2.6 | −1.72 | ATLVT012XX2349 | 47283 | TGAAGGSTNDNT | 0.51 | 1.3 | −3.37 | −1.88 |
| ATLVT012XX2304 | 47238 | TGAAAAASNDNT | −2.16 | 0.11 | −3.63 | −0.37 | ATLVT012XX2350 | 47284 | TGASAAASNDNA | 0.44 | −1.47 | −0.5 | 1.32 |
| ATLVT012XX2305 | 47239 | TGAAAAATNDNA | −1.96 | 0.4 | 0.68 | −2.15 | ATLVT012XX2351 | 47285 | TGASAAASNDNH | 0.24 | −0.72 | −1.41 | −1.24 |
| ATLVT012XX2306 | 47240 | TGAAAAATNDNH | −1.14 | 3.15 | −1.59 | −1.39 | ATLVT012XX2352 | 47286 | TGASAAASNDNT | 1.88 | 0.25 | −0.86 | 1.81 |
| ATLVT012XX2307 | 47241 | TGAAAAATNDNT | −1.77 | −0.74 | 0.25 | −2.76 | ATLVT012XX2353 | 47287 | TGASAAATNDNA | 0.44 | −0.73 | −0.69 | 1.16 |
| ATLVT012XX2308 | 47242 | TGAAAASSNDNA | −2.82 | 1.72 | −2.45 | −2.08 | ATLVT012XX2354 | 47288 | TGASAAATNDNH | 0.19 | −0.72 | −1.9 | 0.69 |
| ATLVT012XX2309 | 47243 | TGAAAASSNDNH | −2.32 | −0.07 | −1.06 | −0.1 | ATLVT012XX2355 | 47289 | TGASAAATNDNT | −0.66 | 0.53 | −0.89 | 0.18 |
| ATLVT012XX2310 | 47244 | TGAAAASSNDNT | −1.77 | 1.02 | −1.25 | −0.84 | ATLVT012XX2356 | 47290 | TGASAASSNDNA | 3.05 | −0.26 | −1.48 | −1.15 |
| ATLVT012XX2311 | 47245 | TGAAAASTNDNA | −2.79 | 0.61 | −0.01 | −1.95 | ATLVT012XX2357 | 47291 | TGASAASSNDNH | −0.31 | −1.26 | −0.92 | 0.63 |
| ATLVT012XX2312 | 47246 | TGAAAASTNDNH | −3.14 | −0.96 | −1.43 | −1.7 | ATLVT012XX2358 | 47292 | TGASAASSNDNT | 0.43 | −1.61 | −1.2 | 1.48 |
| ATLVT012XX2313 | 47247 | TGAAAASTNDNT | −3.04 | −1.32 | −0.96 | −2.86 | ATLVT012XX2359 | 47293 | TGASAASTNDNA | −0.23 | −0.43 | 0.14 | 0.6 |
| ATLVT012XX2314 | 47248 | TGAAAGASNDNA | −0.66 | −1.74 | 0 | −2.75 | ATLVT012XX2360 | 47294 | TGASAASTNDNH | −1.42 | 1.75 | −1.27 | −0.95 |
| ATLVT012XX2315 | 47249 | TGAAAGASNDNH | 0.59 | −0.9 | −0.34 | −1.6 | ATLVT012XX2361 | 47295 | TGASAASTNDNT | −0.15 | −1.19 | −0.88 | −0.8 |
| ATLVT012XX2316 | 47250 | TGAAAGASNDNT | 1.35 | −1.1 | −2.02 | 0.17 | ATLVT012XX2362 | 47296 | TGASAGASNDNA | 0.08 | −0.07 | −0.78 | 0.16 |
| ATLVT012XX2317 | 47251 | TGAAAGATNDNA | 0.61 | −0.33 | −2.95 | −2.89 | ATLVT012XX2363 | 47297 | TGASAGASNDNH | −0.16 | 1.81 | −0.73 | −0.27 |
| ATLVT012XX2318 | 47252 | TGAAAGATNDNH | 0.09 | 0.91 | −2.24 | −2.11 | ATLVT012XX2364 | 47298 | TGASAGASNDNT | −1.17 | −0.73 | −0.73 | −0.78 |
| ATLVT012XX2319 | 47253 | TGAAAGATNDNT | −0.42 | −1.8 | −4.15 | −2.19 | ATLVT012XX2365 | 47299 | TGASAGATNDNA | −1.75 | −0.59 | −0.38 | 0.4 |
| ATLVT012XX2320 | 47254 | TGAAAGSSNDNA | −1.5 | −3.29 | −2.2 | −2.58 | ATLVT012XX2366 | 47300 | TGASAGATNDNH | −0.79 | 3.18 | −0.96 | 1.25 |
| ATLVT012XX2321 | 47255 | TGAAAGSSNDNH | −2.81 | −2.6 | −4.49 | −1.79 | ATLVT012XX2367 | 47301 | TGASAGATNDNT | −1.08 | 0.97 | −0.38 | −0.41 |
| ATLVT012XX2322 | 47256 | TGAAAGSSNDNT | −1.58 | −2.01 | −3.69 | −2.23 | ATLVT012XX2368 | 47302 | TGASAGSSNDNA | −0.26 | −0.45 | −0.45 | −1.61 |
| ATLVT012XX2323 | 47257 | TGAAAGSTNDNA | −2.43 | −2.76 | −3.64 | −2.29 | ATLVT012XX2369 | 47303 | TGASAGSSNDNH | 0.69 | 2.23 | 0.31 | −1.28 |
| ATLVT012XX2324 | 47258 | TGAAAGSTNDNH | −2.03 | −1.98 | −2.49 | −1.94 | ATLVT012XX2370 | 47304 | TGASAGSSNDNT | 1.09 | 0.41 | −1.14 | −1.41 |
| ATLVT012XX2325 | 47259 | TGAAAGSTNDNT | −1.84 | −1.67 | −3.14 | −2.85 | ATLVT012XX2371 | 47305 | TGASAGSTNDNA | −2.35 | 3.41 | 0.11 | −1.15 |
| ATLVT012XX2326 | 47260 | TGAAGAASNDNA | −1.43 | 0.07 | −3.26 | −1.66 | ATLVT012XX2372 | 47306 | TGASAGSTNDNH | −1.43 | 1.84 | 1.15 | 0.45 |
| ATLVT012XX2327 | 47261 | TGAAGAASNDNH | −1.32 | −0.33 | −3.98 | −2.36 | ATLVT012XX2373 | 47307 | TGASAGSTNDNT | −1.43 | 0.64 | −0.43 | −1.78 |
| ATLVT012XX2328 | 47262 | TGAAGAASNDNT | −0.74 | −0.96 | −2.81 | −1.61 | ATLVT012XX2374 | 47308 | TGASGAASNDNA | −0.47 | 0.16 | −1.04 | 1.66 |
| ATLVT012XX2329 | 47263 | TGAAGAATNDNA | 1.09 | −0.62 | −2.97 | −0.92 | ATLVT012XX2375 | 47309 | TGASGAASNDNH | −1.11 | −1.48 | 0.34 | 1.15 |
| ATLVT012XX2330 | 47264 | TGAAGAATNDNH | −0.28 | −0.68 | −4.31 | −1.67 | ATLVT012XX2376 | 47310 | TGASGAASNDNT | −2.55 | −2.29 | −3.52 | 1.76 |
| ATLVT012XX2331 | 47265 | TGAAGAATNDNT | −2.95 | 0.41 | −5 | −2.83 | ATLVT012XX2377 | 47311 | TGASGAATNDNA | −0.63 | −1.33 | −2.48 | −2.15 |
| ATLVT012XX2332 | 47266 | TGAAGASSNDNA | −2.73 | −1.39 | −2.45 | −3.91 | ATLVT012XX2378 | 47312 | TGASGAATNDNH | 0.83 | −0.92 | −1.9 | −1.68 |
| ATLVT012XX2333 | 47267 | TGAAGASSNDNH | −2.58 | −1.2 | −3.23 | −4.23 | ATLVT012XX2379 | 47313 | TGASGAATNDNT | −0.12 | −0.36 | −2.17 | −1.5 |
| ATLVT012XX2334 | 47268 | TGAAGASSNDNT | −2.1 | 2.01 | −3.45 | −2.02 | ATLVT012XX2380 | 47314 | TGASGASSNDNA | −1.28 | −0.52 | −1.53 | −0.5 |
| ATLVT012XX2335 | 47269 | TGAAGASTNDNA | 0.55 | 0.49 | 0.28 | −0.07 | ATLVT012XX2381 | 47315 | TGASGASSNDNH | −1.99 | −1.11 | −1.54 | −1.53 |
| ATLVT012XX2336 | 47270 | TGAAGASTNDNH | −1.56 | −0.5 | −1.64 | −1.35 | ATLVT012XX2382 | 47316 | TGASGASSNDNT | −0.85 | 1.54 | −0.03 | −2.12 |
| ATLVT012XX2337 | 47271 | TGAAGASTNDNT | 0.33 | −1.48 | −0.39 | −1.91 | ATLVT012XX2383 | 47317 | TGASGASTNDNA | −1.88 | −0.23 | −0.1 | 0.48 |
| ATLVT012XX2338 | 47272 | TGAAGGASNDNA | 4.25 | 4.95 | −0.78 | 3.18 | ATLVT012XX2384 | 47318 | TGASGASTNDNH | 0.09 | 0.53 | −0.62 | 1.15 |
| ATLVT012XX2339 | 47273 | TGAAGGASNDNH | 4.78 | 4.9 | −0.81 | 1.14 | ATLVT012XX2385 | 47319 | TGASGASTNDNT | 0.52 | −1.19 | −0.56 | −0.12 |
| ATLVT012XX2340 | 47274 | TGAAGGASNDNT | 6.31 | 7.16 | 1.25 | 2.98 | ATLVT012XX2386 | 47320 | TGASGGASNDNA | −0.39 | 0.86 | −0.99 | −0.2 |
| ATLVT012XX2341 | 47275 | TGAAGGATNDNA | 2.4 | 4.15 | −1.77 | 0.46 | ATLVT012XX2387 | 47321 | TGASGGASNDNH | 1.89 | 0.53 | −0.51 | 1.95 |
| ATLVT012XX2342 | 47276 | TGAAGGATNDNH | 2.39 | 4.55 | −3.84 | 0.97 | ATLVT012XX2388 | 47322 | TGASGGASNDNT | 0.99 | 0.59 | −1.2 | 1.32 |
| ATLVT012XX2343 | 47277 | TGAAGGATNDNT | 0.74 | 1.25 | −2.54 | −1.99 | ATLVT012XX2389 | 47323 | TGASGGATNDNA | 2.05 | −0.36 | −2.55 | 0.25 |
| ATLVT012XX2344 | 47278 | TGAAGGSSNDNA | 0.16 | 1.32 | −2.43 | −2.05 | ATLVT012XX2390 | 47324 | TGASGGATNDNH | 3.64 | 5 | 0.18 | 4.28 |
| ATLVT012XX2345 | 47279 | TGAAGGSSNDNH | −2.15 | −0.03 | −3.32 | −3.13 | ATLVT012XX2391 | 47325 | TGASGGATNDNT | 1.49 | 0.88 | −1.4 | 0.07 |
| ATLVT012XX2346 | 47280 | TGAAGGSSNDNT | −0.24 | 0.04 | −2.68 | −3.94 | ATLVT012XX2392 | 47326 | TGASGGSSNDNA | 0.96 | 1.73 | 1.53 | −0.53 |
| ATLVT012XX2393 | 47327 | TGASGGSSNDNH | −0.17 | −0.25 | −1.16 | 1.27 | ATLVT012XX2439 | 47373 | TGATGGATNDNT | 4.18 | 4.23 | −1.4 | 1.75 |
| ATLVT012XX2394 | 47328 | TGASGGSSNDNT | 0.94 | 0.42 | 0.57 | −1.31 | ATLVT012XX2440 | 47374 | TGATGGSSNDNA | −0.54 | 0.59 | 0.27 | −0.35 |
| ATLVT012XX2395 | 47329 | TGASGGSTNDNA | 2.11 | −0.19 | −0.93 | −0.24 | ATLVT012XX2441 | 47375 | TGATGGSSNDNH | −1.25 | 3.98 | 0.74 | −0.68 |
| ATLVT012XX2396 | 47330 | TGASGGSTNDNH | 2.48 | −0.61 | 0.39 | 0.45 | ATLVT012XX2442 | 47376 | TGATGGSSNDNT | 1.82 | 3.29 | −0.8 | 0.24 |
| ATLVT012XX2397 | 47331 | TGASGGSTNDNT | 1.28 | −0.17 | −0.48 | −0.49 | ATLVT012XX2443 | 47377 | TGATGGSTNDNA | 1.68 | 1.28 | −0.29 | −0.03 |
| ATLVT012XX2398 | 47332 | TGATAAASNDNA | −0.26 | −0.77 | 0.82 | 0.79 | ATLVT012XX2444 | 47378 | TGATGGSTNDNH | 2.74 | 1.92 | 0.21 | 2.52 |
| ATLVT012XX2399 | 47333 | TGATAAASNDNH | −0.31 | −0.8 | −1.38 | −0.26 | ATLVT012XX2445 | 47379 | TGATGGSTNDNT | 2.64 | 2.84 | 0.38 | 1.03 |
| ATLVT012XX2400 | 47334 | TGATAAASNDNT | −0.89 | | −1.4 | −0.48 | ATLVT012XX2446 | 47380 | TGEAAAASNDNA | −0.36 | −1.37 | −1.07 | −0.51 |
| ATLVT012XX2401 | 47335 | TGATAAATNDNA | −2.06 | 2.24 | 0.91 | −0.41 | ATLVT012XX2447 | 47381 | TGEAAAASNDNH | 0.14 | −0.14 | −1 | −2.06 |
| ATLVT012XX2402 | 47336 | TGATAAATNDNH | −0.88 | 0.45 | 0.36 | 1.51 | ATLVT012XX2448 | 47382 | TGEAAAASNDNT | −1.72 | 0.06 | −2.46 | −2.93 |
| ATLVT012XX2403 | 47337 | TGATAAATNDNT | −1.74 | −0.99 | −0.45 | 0.27 | ATLVT012XX2449 | 47383 | TGEAAAATNDNA | 2.7 | 1.89 | −1.03 | −0.42 |
| ATLVT012XX2404 | 47338 | TGATAASSNDNA | 0.35 | −1.62 | 0.01 | 0.79 | ATLVT012XX2450 | 47384 | TGEAAAATNDNH | 1.37 | −0.42 | −0.74 | −0.07 |
| ATLVT012XX2405 | 47339 | TGATAASSNDNH | −0.54 | 1.06 | −0.37 | −0.13 | ATLVT012XX2451 | 47385 | TGEAAAATNDNT | 1.19 | −0.94 | −1 | −0.16 |
| ATLVT012XX2406 | 47340 | TGATAASSNDNT | 0.33 | −0.76 | −0.72 | −0.41 | ATLVT012XX2452 | 47386 | TGEAAASSNDNA | 1.79 | −0.52 | −1.26 | −0.2 |
| ATLVT012XX2407 | 47341 | TGATAASTNDNA | 0.28 | −0.09 | −0.49 | 0.6 | ATLVT012XX2453 | 47387 | TGEAAASSNDNH | 0.18 | 0.02 | −1.66 | −1.79 |
| ATLVT012XX2408 | 47342 | TGATAASTNDNH | 1.62 | −0.17 | −0.51 | 0.25 | ATLVT012XX2454 | 47388 | TGEAAASSNDNT | 1.68 | −0.01 | −0.49 | −0.85 |
| ATLVT012XX2409 | 47343 | TGATAASTNDNT | −0.31 | 2.09 | −0.75 | 0.39 | ATLVT012XX2455 | 47389 | TGEAAASTNDNA | −0.84 | 1.3 | −1.45 | 0.17 |
| ATLVT012XX2410 | 47344 | TGATAGASNDNA | 2.14 | 0.5 | −0.12 | −1.03 | ATLVT012XX2456 | 47390 | TGEAAASTNDNH | −1.8 | 0.62 | −0.7 | 1.25 |
| ATLVT012XX2411 | 47345 | TGATAGASNDNH | 1.91 | 4.73 | 0.45 | −1.31 | ATLVT012XX2457 | 47391 | TGEAAASTNDNT | −0.43 | −1.38 | −0.38 | 0.83 |
| ATLVT012XX2412 | 47346 | TGATAGASNDNT | 2.07 | 1.64 | −1.17 | −0.87 | ATLVT012XX2458 | 47392 | TGEAAGASNDNA | −2.06 | 0.63 | −1.46 | 1.7 |
| ATLVT012XX2413 | 47347 | TGATAGATNDNA | −1.1 | 1.48 | −0.5 | 0.41 | ATLVT012XX2459 | 47393 | TGEAAGASNDNH | −2.7 | −1.4 | 0.23 | −0.15 |
| ATLVT012XX2414 | 47348 | TGATAGATNDNH | 1.14 | 5.85 | 0.93 | 0.33 | ATLVT012XX2460 | 47394 | TGEAAGASNDNT | −2.5 | −0.97 | 0.29 | −2.13 |
| ATLVT012XX2415 | 47349 | TGATAGATNDNT | 0.87 | 1.4 | −1.74 | −1.04 | ATLVT012XX2461 | 47395 | TGEAAGATNDNA | −2.64 | −0.92 | −1.04 | −1.83 |
| ATLVT012XX2416 | 47350 | TGATAGSSNDNA | 0.07 | −0.9 | 0.16 | −1.2 | ATLVT012XX2462 | 47396 | TGEAAGATNDNH | −2.49 | −0.74 | −1.97 | −0.2 |
| ATLVT012XX2417 | 47351 | TGATAGSSNDNH | 0.48 | 1.05 | −0.32 | −1.3 | ATLVT012XX2463 | 47397 | TGEAAGATNDNT | −2.23 | −1.38 | 1.45 | −0.68 |
| ATLVT012XX2418 | 47352 | TGATAGSSNDNT | −0.57 | −1.13 | −0.08 | 1.96 | ATLVT012XX2464 | 47398 | TGEAAGSSNDNA | 0.43 | −1.57 | −1.06 | −0.77 |
| ATLVT012XX2419 | 47353 | TGATAGSTNDNA | −1.05 | 2.28 | 0.1 | −0.1 | ATLVT012XX2465 | 47399 | TGEAAGSSNDNH | −2.03 | −1.01 | −1.17 | −2.24 |
| ATLVT012XX2420 | 47354 | TGATAGSTNDNH | −0.63 | 1 | −1.49 | −0.22 | ATLVT012XX2466 | 47400 | TGEAAGSSNDNT | −0.15 | −2.43 | 0.28 | −2.97 |
| ATLVT012XX2421 | 47355 | TGATAGSTNDNT | −0.34 | 0.53 | −1.2 | −0.91 | ATLVT012XX2467 | 47401 | TGEAAGSTNDNA | 0.22 | −1.98 | 0.14 | −1.12 |
| ATLVT012XX2422 | 47356 | TGATGAASNDNA | 0.39 | −0.35 | −0.7 | 0.15 | ATLVT012XX2468 | 47402 | TGEAAGSTNDNH | −0.15 | −1.31 | −0.39 | −0.94 |
| ATLVT012XX2423 | 47357 | TGATGAASNDNH | −1.54 | −1.57 | −1.98 | −0.3 | ATLVT012XX2469 | 47403 | TGEAAGSTNDNT | 0.03 | −1.29 | −1.6 | −2.31 |
| ATLVT012XX2424 | 47358 | TGATGAASNDNT | −1.95 | −2.06 | −3.08 | 0.22 | ATLVT012XX2470 | 47404 | TGEAGAASNDNA | −0.49 | 2.8 | −2.35 | −3.1 |
| ATLVT012XX2425 | 47359 | TGATGAATNDNA | −0.87 | 0.5 | −0.56 | −1.31 | ATLVT012XX2471 | 47405 | TGEAGAASNDNH | −2.07 | 0.28 | −2.43 | 0.64 |
| ATLVT012XX2426 | 47360 | TGATGAATNDNH | 3.5 | 1.68 | −0.64 | 1.7 | ATLVT012XX2472 | 47406 | TGEAGAASNDNT | −2.45 | −1.17 | −2.41 | −1.88 |
| ATLVT012XX2427 | 47361 | TGATGAATNDNT | 1.45 | −0.78 | −1.06 | −0.45 | ATLVT012XX2473 | 47407 | TGEAGAATNDNA | −2.97 | 0.99 | −1.09 | −2.93 |
| ATLVT012XX2428 | 47362 | TGATGASSNDNA | 1.58 | 2.43 | −0.46 | −2.23 | ATLVT012XX2474 | 47408 | TGEAGAATNDNH | −3.56 | 1.55 | −1.32 | −1.25 |
| ATLVT012XX2429 | 47363 | TGATGASSNDNH | −1.27 | 3.11 | 1.25 | −2.37 | ATLVT012XX2475 | 47409 | TGEAGAATNDNT | −2.63 | 4.38 | −1.87 | −1.69 |
| ATLVT012XX2430 | 47364 | TGATGASSNDNT | −0.35 | −0.27 | 0.16 | −1.24 | ATLVT012XX2476 | 47410 | TGEAGASSNDNA | 2.72 | −0.78 | −1.15 | −1.17 |
| ATLVT012XX2431 | 47365 | TGATGASTNDNA | 1 | 2.21 | −1.63 | −0.88 | ATLVT012XX2477 | 47411 | TGEAGASSNDNH | 0.84 | −0.15 | −0.14 | −3.17 |
| ATLVT012XX2432 | 47366 | TGATGASTNDNH | 1.92 | 2.24 | −0.15 | 0.22 | ATLVT012XX2478 | 47412 | TGEAGASSNDNT | 5.18 | −1.75 | −0.44 | −1.94 |
| ATLVT012XX2433 | 47367 | TGATGASTNDNT | 3.11 | 1.02 | −2.4 | −0.21 | ATLVT012XX2479 | 47413 | TGEAGASTNDNA | −0.7 | −0.47 | 0.67 | −3.1 |
| ATLVT012XX2434 | 47368 | TGATGGASNDNA | 0.03 | 0.64 | −1.21 | 0.75 | ATLVT012XX2480 | 47414 | TGEAGASTNDNH | −1.16 | −0.04 | 0.08 | −0.1 |
| ATLVT012XX2435 | 47369 | TGATGGASNDNH | 1.02 | 3.66 | −0.43 | 2.76 | ATLVT012XX2481 | 47415 | TGEAGASTNDNT | −1.77 | 1.53 | −0.94 | −0.7 |
| ATLVT012XX2436 | 47370 | TGATGGASNDNT | 1.54 | 1 | −0.03 | 1.51 | ATLVT012XX2482 | 47416 | TGEAGGASNDNA | 1.13 | 0.89 | −2.03 | −1.61 |
| ATLVT012XX2437 | 47371 | TGATGGATNDNA | 3.65 | 1.22 | 0.04 | −0.01 | ATLVT012XX2483 | 47417 | TGEAGGASNDNH | 1.52 | −0.35 | −2.62 | −0.65 |
| ATLVT012XX2438 | 47372 | TGATGGATNDNH | 6.36 | 4.93 | 0.04 | 2.21 | ATLVT012XX2484 | 47418 | TGEAGGASNDNT | 0.61 | 1.1 | −2.2 | −2.33 |
| ATLVT012XX2485 | 47419 | TGEAGGATNDNA | 0.29 | 1.6 | −0.94 | 0.61 | ATLVT012XX2531 | 47465 | TGESGGASNDNH | 1.91 | 3.93 | 0.07 | 0.41 |
| ATLVT012XX2486 | 47420 | TGEAGGATNDNH | 2.8 | 5.4 | 0.06 | 2.42 | ATLVT012XX2532 | 47466 | TGESGGASNDNT | 1.98 | 1.15 | −1.09 | −0.5 |
| ATLVT012XX2487 | 47421 | TGEAGGATNDNT | 1.43 | 3.88 | −1.66 | −0.68 | ATLVT012XX2533 | 47467 | TGESGGATNDNA | 1.42 | 3.35 | 0.33 | 0.17 |
| ATLVT012XX2488 | 47422 | TGEAGGSSNDNA | 3.19 | 0.65 | −0.52 | −0.47 | ATLVT012XX2534 | 47468 | TGESGGATNDNH | 6.49 | 2.84 | 0.39 | 2.12 |
| ATLVT012XX2489 | 47423 | TGEAGGSSNDNH | 0 | −0.44 | 0.13 | −1.74 | ATLVT012XX2535 | 47469 | TGESGGATNDNT | 2.7 | 3.13 | 0.68 | −0.55 |
| ATLVT012XX2490 | 47424 | TGEAGGSSNDNT | 0.89 | −0.07 | −0.6 | −1.75 | ATLVT012XX2536 | 47470 | TGESGGSSNDNA | 1.47 | 1.23 | −0.2 | −0.56 |
| ATLVT012XX2491 | 47425 | TGEAGGSTNDNA | 1.27 | 0.41 | −0.26 | 1.27 | ATLVT012XX2537 | 47471 | TGESGGSSNDNH | −0.18 | −0.97 | 0 | −0.1 |
| ATLVT012XX2492 | 47426 | TGEAGGSTNDNH | 0.76 | 1.01 | −0.51 | 0.49 | ATLVT012XX2538 | 47472 | TGESGGSSNDNT | 0.78 | 2.12 | −1.71 | −0.74 |
| ATLVT012XX2493 | 47427 | TGEAGGSTNDNT | 0.35 | −0.12 | −1.51 | −1.89 | ATLVT012XX2539 | 47473 | TGESGGSTNDNA | 1.79 | 2.44 | −0.27 | 0.02 |
| ATLVT012XX2494 | 47428 | TGESAAASNDNA | −0.2 | −0.86 | −0.83 | −1.61 | ATLVT012XX2540 | 47474 | TGESGGSTNDNH | 0.84 | −0.18 | 0.07 | 0.97 |
| ATLVT012XX2495 | 47429 | TGESAAASNDNH | −0.08 | −1.65 | −1.4 | 0.7 | ATLVT012XX2541 | 47475 | TGESGGSTNDNT | 1.82 | 0.39 | 0.31 | 0.86 |
| ATLVT012XX2496 | 47430 | TGESAAASNDNT | 0.36 | −1.17 | −1.51 | −1.72 | ATLVT012XX2542 | 47476 | TGETAAASNDNA | 2.13 | 0.69 | −0.13 | −1.75 |
| ATLVT012XX2497 | 47431 | TGESAAATNDNA | 1.97 | −0.71 | −0.52 | −0.08 | ATLVT012XX2543 | 47477 | TGETAAASNDNH | 1.86 | 2.44 | 0.13 | 0.37 |
| ATLVT012XX2498 | 47432 | TGESAAATNDNH | 2.63 | −0.71 | 0.23 | −0.16 | ATLVT012XX2544 | 47478 | TGETAAASNDNT | 1.04 | 0.31 | −1.06 | −2.12 |
| ATLVT012XX2499 | 47433 | TGESAAATNDNT | 1.8 | −1.68 | 0 | −1.93 | ATLVT012XX2545 | 47479 | TGETAAATNDNA | 1.02 | 0.49 | 0.6 | 0.48 |
| ATLVT012XX2500 | 47434 | TGESAASSNDNA | −0.42 | −2.43 | −0.92 | −2.43 | ATLVT012XX2546 | 47480 | TGETAAATNDNH | 1.62 | 1.27 | −1.02 | 0.92 |
| ATLVT012XX2501 | 47435 | TGESAASSNDNH | 2.28 | −2.17 | −1.23 | −0.77 | ATTVT012XX2547 | 47481 | TGETAAATNQNT | 3.33 | 2.45 | −0.98 | 0.3 |
| ATLVT012XX2502 | 47436 | TGESAASSNDNT | 0.52 | −2.19 | −1.26 | −1.78 | ATLVT012XX2548 | 47482 | TGETAASSNDNA | 0.17 | 0.12 | 0.68 | −3.11 |
| ATLVT012XX2503 | 47437 | TGESAASTNDNA | 0.65 | 0.94 | −0.22 | −1.81 | ATLVT012XX2549 | 47483 | TGETAASSNDNH | −1.37 | −0.91 | −0.29 | −2.58 |
| ATLVT012XX2504 | 47438 | TGESAASTNDNH | 2.75 | −0.65 | −0.69 | −2.36 | ATLVT012XX2550 | 47484 | TGETAASSNDNT | 1.19 | −1.4 | −0.43 | −2.45 |
| ATLVT012XX2505 | 47439 | TGESAASTNQNT | 2.31 | 1.44 | −0.68 | −0.67 | ATLVT012XX2551 | 47485 | TGETAASTNDNA | −2.53 | 1.01 | 0.88 | −0.28 |
| ATLVT012XX2506 | 47440 | TGESAGASNDNA | −1.28 | 1.86 | −0.18 | −2.27 | ATLVT012XX2552 | 47486 | TGETAASTNDNH | −2.93 | 2.52 | 0.56 | −1.34 |
| ATLVT012XX2507 | 47441 | TGESAGASNDNH | −0.57 | −0.62 | −1.56 | −0.31 | ATLVT012XX2553 | 47487 | TGETAASTNDNT | −1.01 | 2.56 | −0.49 | −1.98 |
| ATLVT012XX2508 | 47442 | TGESAGASNDNT | −0.28 | 0.69 | −2.53 | −2.59 | ATLVT012XX2554 | 47488 | TGETAGASNDNA | −1.3 | 1.35 | −0.23 | −0.42 |
| ATLVT012XX2509 | 47443 | TGESAGATNDNA | −2.26 | 0.17 | −2.11 | −1.75 | ATLVT012XX2555 | 47489 | TGETAGASNDNH | −1.85 | −0.77 | −1.07 | −1.63 |
| ATLVT012XX2510 | 47444 | TGESAGATNDNH | −0.85 | 0.7 | −0.92 | 0.49 | ATLVT012XX2556 | 47490 | TGETAGASNDNT | −1.5 | −0.78 | −0.24 | −0.24 |
| ATLVT012XX2511 | 47445 | TGESAGATNDNT | −1.62 | 1.9 | −2.02 | −1.45 | ATLVT012XX2557 | 47491 | TGETAGATNDNA | 0.08 | 2.47 | −0.02 | −1.89 |
| ATLVT012XX2512 | 47446 | TGESAGSSNDNA | −0.52 | −1.72 | −0.87 | −2.63 | ATLVT012XX2558 | 47492 | TGETAGATNDNH | −0.1 | −0.36 | 1.88 | 1.13 |
| ATLVT012XX2513 | 47447 | TGESAGSSNDNH | 1.01 | −1.95 | −1.29 | −0.95 | ATLVT012XX2559 | 47493 | TGETAGATNDNT | 1.02 | −0.56 | −0.87 | −0.73 |
| ATLVT012XX2514 | 47448 | TGESAGSSNDNT | 1.24 | −0.85 | −0.57 | −3.09 | ATLVT012XX2560 | 47494 | TGETAGSSNDNA | −0.28 | −1.51 | −0.16 | 0.2 |
| ATLVT012XX2515 | 47449 | TGESAGSTNDNA | 0.3 | −0.24 | −0.83 | −0.82 | ATLVT012XX2561 | 47495 | TGETAGSSNDNH | −1.13 | −1.82 | −0.29 | −0.95 |
| ATLVT012XX2516 | 47450 | TGESAGSTNDNH | 0.15 | 1.67 | −0.32 | 0.22 | ATLVT012XX2562 | 47496 | TGETAGSSNDNT | 1.96 | 0.34 | 0.18 | −1.26 |
| ATLVT012XX2517 | 47451 | TGESAGSTNDNT | −1.09 | 1.17 | −0.58 | −1.93 | ATLVT012XX2563 | 47497 | TGETAGSTNDNA | −2.34 | 1.11 | −1.16 | −1.71 |
| ATLVT012XX2518 | 47452 | TGESGAASNDNA | −1.41 | −0.82 | 1.33 | −3.59 | ATLVT012XX2564 | 47498 | TGETAGSTNDNH | −0.48 | 1.63 | 0.44 | −1.46 |
| ATLVT012XX2519 | 47453 | TGESGAASNDNH | −0.78 | −1.09 | −0.68 | −2.46 | ATLVT012XX2565 | 47499 | TGETAGSTNDNT | −0.81 | 2.41 | −1.18 | −0.51 |
| ATLVT012XX2520 | 47454 | TGESGAASNDNT | −0.54 | −2.25 | 0.8 | −3.55 | ATLVT012XX2566 | 47500 | TGETGAASNDNA | −3.06 | −1.63 | −1.98 | −0.64 |
| ATLVT012XX2521 | 47455 | TGESGAATNDNA | −2.65 | 0.29 | −1.79 | −1.64 | ATLVT012XX2567 | 47501 | TGETGAASNDNH | −2.26 | −1.4 | 0.03 | −1.68 |
| ATLVT012XX2522 | 47456 | TGESGAATNDNH | −2.5 | 1.77 | −1.93 | −1.78 | ATLVT012XX2568 | 47502 | TGETGAASNDNT | −2.33 | −1.72 | −3.18 | −2.49 |
| ATLVT012XX2523 | 47457 | TGESGAATNDNT | −2.01 | −0.16 | −2.13 | −2.68 | ATLVT012XX2569 | 47503 | TGETGAATNDNA | −2.62 | 2.32 | −2.17 | −1.81 |
| ATLVT012XX2524 | 47458 | TGESGASSNDNA | −0.13 | 0.89 | 0.34 | −0.5 | ATLVT012XX2570 | 47504 | TGETGAATNDNH | −3.5 | 1.31 | −0.1 | −1.38 |
| ATLVT012XX2525 | 47459 | TGESGASSNDNH | 0.23 | −0.91 | 0.55 | 0.01 | ATLVT012XX2571 | 47505 | TGETGAATNDNT | −2.68 | 1.88 | 0.14 | −2.72 |
| ATLVT012XX2526 | 47460 | TGESGASSNDNT | 0.15 | 0.75 | 0.1 | −2.02 | ATLVT012XX2572 | 47506 | TGETGASSNDNA | −1.38 | −1.09 | −1.76 | −2.55 |
| ATLVT012XX2527 | 47461 | TGESGASTNDNA | 0.98 | 0.62 | 0.94 | 0.93 | ATLVT012XX2573 | 47507 | TGETGASSNDNH | 1.82 | −1.72 | −1.87 | 0.4 |
| ATLVT012XX2528 | 47462 | TGESGASTNDNH | −1.08 | −0.7 | −1.67 | −1.19 | ATLVT012XX2574 | 47508 | TGETGASSNDNT | −0.37 | −1.03 | −1.77 | −3.1 |
| ATLVT012XX2529 | 47463 | TGESGASTNDNT | 0.45 | −1.23 | 0.21 | −1.97 | ATLVT012XX2575 | 47509 | TGETGASTNDNA | 0.6 | 1.62 | −0.6 | −2.15 |
| ATLVT012XX2530 | 47464 | TGESGGASNDNA | 2.39 | 2.97 | 0.76 | −2.24 | ATLVT012XX2576 | 47510 | TGETGASTNDNH | −1.67 | 4.08 | −0.06 | −0.54 |
| ATLVT012XX2577 | 47511 | TGETGASTNDNT | −2.38 | −0.42 | −1.74 | −2 | ATLVT012XX2623 | 47557 | TGQAGASTNDNA | 1.65 | 1.81 | 0.08 | −1.49 |
| ATLVT012XX2578 | 47512 | TGETGGASNDNA | −0.68 | 2.2 | −1.58 | 0.24 | ATLVT012XX2624 | 47558 | TGQAGASTNDNH | 1.32 | 1.09 | 0.22 | 1.09 |
| ATLVT012XX2579 | 47513 | TGETGGASNDNH | 2.44 | 2.25 | −0.98 | 1.39 | ATLVT012XX2625 | 47559 | TGQAGASTNDNT | 0.17 | 4.59 | −1.37 | −0.55 |
| ATLVT012XX2580 | 47514 | TGETGGASNDNT | 1.75 | 2.09 | −0.2 | −1.92 | ATLVT012XX2626 | 47560 | TGQAGGASNDNA | 0.47 | 0.36 | −0.35 | 1.39 |
| ATLVT012XX2581 | 47515 | TGETGGATNDNA | −1.3 | 1.34 | −0.66 | 0.79 | ATLVT012XX2627 | 47561 | TGQAGGASNDNH | 1.82 | 2 | 0.13 | 2.31 |
| ATLVT012XX2582 | 47516 | TGETGGATNDNH | 2.86 | 4.64 | 0.8 | 3.22 | ATLVT012XX2628 | 47562 | TGQAGGASNDNT | 2.39 | 0.53 | −1.2 | 0.22 |
| ATLVT012XX2583 | 47517 | TGETGGATNDNT | −0.08 | 1.44 | −0.01 | −1.03 | ATLVT012XX2629 | 47563 | TGQAGGATNDNA | 1.56 | 0.8 | −1.3 | 3.08 |
| ATLVT012XX2584 | 47518 | TGETGGSSNDNA | 1.4 | 3.92 | −0.4 | −1.07 | ATLVT012XX2630 | 47564 | TGQAGGATNDNH | 6.35 | 6.36 | −0.95 | 5.18 |
| ATLVT012XX2585 | 47519 | TGETGGSSNDNH | 1.29 | 0.81 | 0.43 | −1.14 | ATLVT012XX2631 | 47565 | TGQAGGATNDNT | 2.03 | 0.26 | −0.14 | 2.2 |
| ATLVT012XX2586 | 47520 | TGETGGSSNDNT | −0.21 | 1.99 | −0.14 | −1.16 | ATLVT012XX2632 | 47566 | TGQAGGSSNDNA | 1.73 | 1.5 | 0.65 | −1.21 |
| ATLVT012XX2587 | 47521 | TGETGGSTNDNA | −0.22 | 2.73 | −0.08 | 0.84 | ATLVT012XX2633 | 47567 | TGQAGGSSNDNH | −0.1 | −0.49 | −1.42 | 0.53 |
| ATLVT012XX2588 | 47522 | TGETGGSTNDNH | −0.02 | 0.66 | −1.16 | 0.55 | ATLVT012XX2634 | 47568 | TGQAGGSSNDNT | 0.9 | 0.02 | −1.56 | −1.54 |
| ATLVT012XX2589 | 47523 | TGETGGSTNDNT | 0.92 | 1.85 | −0.43 | −1.02 | ATLVT012XX2635 | 47569 | TGQAGGSTNDNA | 2.4 | 1.98 | −1.35 | 0.4 |
| ATLVT012XX2590 | 47524 | TGQAAAASNDNA | −2.51 | −1.77 | −0.23 | 1.25 | ATLVT012XX2636 | 47570 | TGQAGGSTNDNH | 2.83 | 4.9 | 0.03 | 1.1 |
| ATLVT012XX2591 | 47525 | TGQAAAASNDNH | −2.37 | −0.86 | 0.88 | 0.81 | ATLVT012XX2637 | 47571 | TGQAGGSTNDNT | 2.23 | 1.39 | −1.83 | −0.4 |
| ATLVT012XX2592 | 47526 | TGQAAAASNDNT | −2.93 | −2.05 | −1.22 | 2.74 | ATLVT012XX2638 | 47572 | TGQSAAASNDNA | −0.12 | 0.98 | −0.45 | 1.16 |
| ATLVT012XX2593 | 47527 | TGQAAAATNDNA | −0.93 | −0.29 | −1.1 | 0.12 | ATLVT012XX2639 | 47573 | TGQSAAASNDNH | −1.53 | −1.17 | 0.03 | 0.01 |
| ATLVT012XX2594 | 47528 | TGQAAAATNDNH | −1.67 | 1.59 | −1.01 | 1.52 | ATLVT012XX2640 | 47574 | TGQSAAASNDNT | −1.17 | 0.35 | 0.78 | 0.91 |
| ATLVT012XX2595 | 47529 | TGQAAAATNDNT | −1.91 | −0.75 | −0.48 | −1.66 | ATLVT012XX2641 | 47575 | TGQSAAATNDNA | −1.9 | 1.89 | 0.73 | −1.28 |
| ATLVT012XX2596 | 47530 | TGQAAASSNDNA | −2.79 | −2.46 | 0.18 | 0.19 | ATLVT012XX2642 | 47576 | TGQSAAATNDNH | −1.06 | −0.66 | −0.63 | −0.26 |
| ATLVT012XX2597 | 47531 | TGQAAASSNDNH | −1.54 | −1.96 | 0.37 | −3 | ATLVT012XX2643 | 47577 | TGQSAAATNDNT | −1.45 | −0.53 | −1.25 | −1.64 |
| ATLVT012XX2598 | 47532 | TGQAAASSNDNT | −1.65 | −2.13 | −0.5 | −1.44 | ATLVT012XX2644 | 47578 | TGQSAASSNDNA | −0.97 | 4.17 | 0.76 | −1.47 |
| ATLVT012XX2599 | 47533 | TGQAAASTNDNA | −0.12 | −1.37 | −1.17 | 0.66 | ATLVT012XX2645 | 47579 | TGQSAASSNDNH | −1.99 | 0.27 | 0.51 | −0.93 |
| ATLVT012XX2600 | 47534 | TGQAAASTNDNH | −0.59 | −1.75 | −1.97 | −0.09 | ATLVT012XX2646 | 47580 | TGQSAASSNDNT | −0.72 | 1.66 | −0.94 | 0.14 |
| ATLVT012XX2601 | 47535 | TGQAAASTNDNT | −0.35 | −2.49 | −1.14 | −0.73 | ATLVT012XX2647 | 47581 | TGQSAASTNDNA | −1.5 | 2.06 | −0.43 | −0.28 |
| ATLVT012XX2602 | 47536 | TGQAAGASNDNA | −2.27 | −2.62 | −2.5 | −2.44 | ATLVT012XX2648 | 47582 | TGQSAASTNDNH | −0.26 | 2.98 | −1.87 | 0.11 |
| ATLVT012XX2603 | 47537 | TGQAAGASNDNH | 0.06 | −0.42 | −1.77 | −0.43 | ATLVT012XX2649 | 47583 | TGQSAASTNDNT | −1.81 | 4.16 | −1.75 | 0.57 |
| ATLVT012XX2604 | 47538 | TGQAAGASNDNT | −2.62 | −1.99 | −1.94 | −0.65 | ATLVT012XX2650 | 47584 | TGQSAGASNDNA | −1.47 | 0.45 | −1.12 | −1.49 |
| ATLVT012XX2605 | 47539 | TGQAAGATNDNA | −2.8 | −2.24 | −3.16 | −2.8 | ATLVT012XX2651 | 47585 | TGQSAGASNDNH | 0.62 | 0.31 | 0.14 | −0.2 |
| ATLVT012XX2606 | 47540 | TGQAAGATNQNH | 3.35 | 2.98 | −0.57 | 2.14 | ATLVT012XX2652 | 47586 | TGQSAGASNDNT | 0.58 | −0.09 | −0.77 | −2.22 |
| ATLVT012XX2607 | 47541 | TGQAAGATNDNT | −1.09 | −0.93 | −2.69 | −1.68 | ATLVT012XX2653 | 47587 | TGQSAGATNDNA | −1.6 | 0.72 | −0.58 | −0.31 |
| ATLVT012XX2608 | 47542 | TGQAAGSSNDNA | −3.2 | −2.62 | −2.92 | −1.75 | ATLVT012XX2654 | 47588 | TGQSAGATNDNH | 1.14 | 2.25 | −1.01 | 2.82 |
| ATLVT012XX2609 | 47543 | TGQAAGSSNDNH | −1.9 | −2.59 | −1.31 | −0.6 | ATLVT012XX2655 | 47589 | TGQSAGATNDNT | −1.53 | 3.14 | −0.63 | −0.85 |
| ATLVT012XX2610 | 47544 | TGQAAGSSNDNT | −2.05 | −2.36 | −2.14 | −2.82 | ATLVT012XX2656 | 47590 | TGQSAGSSNDNA | 0.68 | 1.32 | −0.79 | −2.25 |
| ATLVT012XX2611 | 47545 | TGQAAGSTNDNA | −0.79 | −2.47 | −2.32 | −2.6 | ATLVT012XX2657 | 47591 | TGQSAGSSNDNH | 1.54 | 4.52 | −1.64 | 0.89 |
| ATLVT012XX2612 | 47546 | TGQAAGSTNDNH | −1.96 | 0.21 | −1.21 | −2.16 | ATLVT012XX2658 | 47592 | TGQSAGSSNDNT | 4.06 | 2.79 | −0.84 | −1.55 |
| ATLVT012XX2613 | 47547 | TGQAAGSTNDNT | −0.3 | −0.6 | −0.03 | −1.22 | ATLVT012XX2659 | 47593 | TGQSAGSTNDNA | −0.41 | 3.48 | 1.3 | −1.28 |
| ATLVT012XX2614 | 47548 | TGQAGAASNDNA | −0.93 | 2.46 | −0.54 | 2.22 | ATLVT012XX2660 | 47594 | TGQSAGSTNDNH | 0.32 | 2.91 | −1.39 | −1.92 |
| ATLVT012XX2615 | 47549 | TGQAGAASNDNH | 0.06 | 2.12 | −0.37 | 0.21 | ATLVT012XX2661 | 47595 | TGQSAGSTNDNT | −0.4 | 2.15 | −0.79 | −2.39 |
| ATLVT012XX2616 | 47550 | TGQAGAASNDNT | −0.1 | −1.34 | −2.39 | −0.66 | ATLVT012XX2662 | 47596 | TGQSGAASNDNA | −0.76 | 1.71 | −1.45 | 0.29 |
| ATLVT012XX2617 | 47551 | TGQAGAATNDNA | 0.99 | −0.38 | −2.6 | −1.29 | ATLVT012XX2663 | 47597 | TGQSGAASNDNH | −1.16 | 2.39 | −2.42 | −0.63 |
| ATLVT012XX2618 | 47552 | TGQAGAATNDNH | 0.38 | 2.38 | −3.44 | −1.39 | ATLVT012XX2664 | 47598 | TGQSGAASNDNT | 0.06 | 0.93 | −1.28 | −0.79 |
| ATLVT012XX2619 | 47553 | TGQAGAATNDNT | 0.51 | −0.08 | −2.45 | −0.61 | ATLVT012XX2665 | 47599 | TGQSGAATNDNA | −1.63 | 5.11 | −1.28 | −1.55 |
| ATLVT012XX2620 | 47554 | TGQAGASSNDNA | 0.93 | −0.95 | −1.4 | −2.58 | ATLVT012XX2666 | 47600 | TGQSGAATNDNH | −1.18 | 2.34 | −1.97 | −0.16 |
| ATLVT012XX2621 | 47555 | TGQAGASSNDNH | 2.65 | −1.18 | −0.44 | −2.29 | ATLVT012XX2667 | 47601 | TGQSGAATNDNT | −1.54 | 0.88 | −1.73 | −1.84 |
| ATLVT012XX2622 | 47556 | TGQAGASSNDNT | 3.2 | 0.41 | −0.6 | −1.99 | ATLVT012XX2668 | 47602 | TQSGASSNDNA | −0.22 | 2.49 | −0.36 | −0.12 |
| ATLVT012XX2669 | 47603 | TGQSGASSNDNH | 1.12 | −0.94 | 0.82 | 1.07 | ATLVT012XX2715 | 47649 | TGQTGAATNDNT | 3.85 | 3.32 | −2.6 | 1.56 |
| ATLVT01XXX2670 | 47604 | TGQSGASSNDNT | 1.66 | 0.31 | 0.76 | 0.96 | ATLVT012XX2716 | 47650 | TGQTGASSNDNA | 1.2 | −0.69 | 0.45 | −0.54 |
| ATLVT012XX2671 | 47605 | TGQSGASTNDNA | 0.58 | 2.92 | −0.24 | −0.23 | ATLVT012XX2717 | 47651 | TGQTGASSNDNH | −1.3 | 1.11 | 1.29 | −0.71 |
| ATLVT012XX2672 | 47606 | TGQSGASTNDNH | 0.34 | 3.02 | −0.8 | 1.5 | ATLVT012XX2718 | 47652 | TGQTGASSNDNT | −0.12 | −0.56 | 0.19 | 0.56 |
| ATLVT012XX2673 | 47607 | TGQSGASTNDNT | 2.59 | 1.74 | −0.17 | 0.86 | ATLVT012XX2719 | 47653 | TGQTGASTNDNA | 1.94 | 3.3 | 0.38 | 0.72 |
| ATLVT012XX2674 | 47608 | TGQSGGASNDNA | 2.27 | 4.73 | 0.76 | 0.71 | ATLVT012XX2720 | 47654 | TGQTGASTNDNH | 4.25 | 0.08 | −0.74 | −0.12 |
| ATLVT012XX2675 | 47609 | TGQSGGASNDNH | 2.83 | 3.19 | 0.64 | 2.99 | ATLVT012XX2721 | 47655 | TGQTGASTNDNT | 2.32 | 3.19 | −0.66 | −0.16 |
| ATLVT012XX2676 | 47610 | TGQSGGASNDNT | 2.05 | 3.29 | −0.64 | −0.59 | ATLVT012XX2722 | 47656 | TGQTGGASNDNA | 0.48 | 3.85 | 2.38 | 0.13 |
| ATLVT012XX2677 | 47611 | TGQSGGATNDNA | 1.79 | 3.24 | 1.28 | 1.81 | ATTVT012XX2723 | 47657 | TGQTGGASNDNH | 3.91 | 3.13 | 1.34 | 2.36 |
| ATLVT012XX2678 | 47612 | TGQSGGATNDNH | 6.13 | 6.98 | 0.66 | 3.84 | ATLVT012XX2724 | 47658 | TGQTGGASNDNT | 3.39 | 2.04 | 1.34 | 0.26 |
| ATLVT012XX2679 | 47613 | TGQSGGATNDNT | 2.86 | 5.22 | 0.17 | 0.9 | ATLVT012XX2725 | 47659 | TGQTGGATNDNA | 3 | 1.45 | −0.5 | 3.59 |
| ATLVT012XX2680 | 47614 | TGQSGGSSNDNA | 2.3 | 2.69 | −0.62 | −0.25 | ATLVT012XX2726 | 47660 | TGQTGGATNDNH | 7.35 | 7.38 | 1.16 | 4.18 |
| ATLVT012XX2681 | 47615 | TGQSGGSSNDNH | 2.31 | 0.6 | −0.74 | 0.81 | ATLVT012XX2727 | 47661 | TGQTGGATNDNT | 3.45 | 2.38 | −0.25 | 1.87 |
| ATLVT012XX2682 | 47616 | TGQSGGSSNDNT | 2.36 | 2.37 | −1.39 | −0.04 | ATLVT012XX2728 | 47662 | TGQTGGSSNDNA | 1.1 | 2.58 | 0.25 | 2.15 |
| ATLVT012XX2683 | 47617 | TGQSGGSTNDNA | 2.4 | 2.28 | 0.41 | 0.5 | ATLVT012XX2729 | 47663 | TGQTGGSSNDNH | 2.7 | 3.67 | 0.08 | 0.81 |
| ATLVT012XX2684 | 47618 | TGQSGGSTNDNH | 4.96 | 2.97 | 0.8 | 3.38 | ATLVT012XX2730 | 47664 | TGQTGGSSNDNT | 2.85 | 2.45 | 0.05 | 0.35 |
| ATLVT012XX2685 | 47619 | TGQSGGSTNDNT | 2.43 | 1.96 | −0.49 | −0.26 | ATLVT012XX2731 | 47665 | TGQTGGSTNDNA | 2.5 | 3.05 | 0.35 | 1.54 |
| ATLVT012XX2686 | 47620 | TGQTAAASNDNA | −0.56 | −1.72 | 0.59 | 1.91 | ATLVT012XX2732 | 47666 | TGQTGGSTNDNH | 2.78 | 4.11 | −0.23 | 3.37 |
| ATLVT012XX2687 | 47621 | TGQTAAASNDNH | 0.92 | −0.86 | −0.06 | −0.82 | ATLVT012XX2733 | 47667 | TGQTGGSTNDNT | 2.74 | 2.43 | 0.36 | 0.58 |
| ATLVT012XX2688 | 47622 | TGQTAAASNDNT | −0.37 | 0.37 | −1.16 | 1.43 | ATLVT012XX2734 | 47668 | TGTAAAASNDNA | 1.46 | 1.86 | −1.21 | −0.86 |
| ATLVT012XX2689 | 47623 | TGQTAAATNDNA | 0.59 | 1.06 | −0.84 | 2.18 | ATLVT012XX2735 | 47669 | TGTAAAASNDNH | 3.45 | 1.94 | −0.95 | −0.06 |
| ATLVT012XX2690 | 47624 | TGQTAAATNDNH | −0.34 | 3.66 | 0.28 | 2.42 | ATLVT012XX2736 | 47670 | TGTAAAASNDNT | 1.77 | 2.14 | −2.73 | 0.59 |
| ATLVT012XX2691 | 47625 | TGQTAAATNDNT | 0.4 | 0.74 | −0.19 | 0.99 | ATLVT012XX2737 | 47671 | TGTAAAATNDNA | 1.69 | 0.06 | −0.02 | 0.04 |
| ATLVT012XX2692 | 47626 | TGQTAASSNDNA | 2.21 | −1.3 | 0.59 | 0.92 | ATLVT012XX2738 | 47672 | TGTAAAATNDNH | 2.07 | 0.4 | −1.06 | −0.1 |
| ATLVT012XX2693 | 47627 | TGQTAASSNDNH | 0.8 | −1.38 | −1.35 | 0.28 | ATLVT012XX2739 | 47673 | TGTAAAATNDNT | 0.1 | −0.56 | −0.7 | −1.05 |
| ATLVT012XX2694 | 47628 | TGQTAASSNDNT | 3.83 | 0.03 | −0.18 | 0.71 | ATLVT012XX2740 | 47674 | TGTAAASSNDNA | 1.37 | 2.59 | −0.21 | −2.2 |
| ATLVT012XX2695 | 47629 | TGQTAASTNDNA | −1.54 | −0.12 | −0.36 | −0.59 | ATLVT012XX2741 | 47675 | TGTAAASSNDNH | 1.33 | 4.66 | 1.09 | −0.96 |
| ATLVT012XX2696 | 47630 | TGQTAASTNDNH | −1.22 | 1.99 | −0.49 | 1.3 | ATLVT012XX2742 | 47676 | TGTAAASSNDNT | 1.12 | 3.21 | 1.57 | −0.82 |
| ATLVT012XX2697 | 47631 | TGQTAASTNQNT | −1.57 | 2.89 | 0.78 | 0.77 | ATLVT012XX2743 | 47677 | TGTAAASTNDNA | −0.45 | 6.33 | 0.28 | −0.88 |
| ATLVT012XX2698 | 47632 | TGQTAGASNDNA | 0.32 | −0.63 | −1.91 | −0.22 | ATLVT012XX2744 | 47678 | TGTAAASTNDNH | 2.82 | 3.72 | 0.21 | 0.83 |
| ATLVT012XX2699 | 47633 | TGQTAGASNDNH | −0.11 | −0.79 | −2.03 | 3.12 | ATLVT012XX2745 | 47679 | TGTAAASTNDNT | 2.19 | 2.64 | −0.58 | −1.25 |
| ATLVT012XX2700 | 47634 | TGQTAGASNDNT | −0.93 | 2.21 | −0.15 | 0.21 | ATLVT012XX2746 | 47680 | TGTAAGASNDNA | 2.24 | 2.08 | −0.73 | −1.65 |
| ATLVT012XX2701 | 47635 | TGQTAGATNDNA | −2.67 | −1.24 | −1.26 | 0.5 | ATLVT012XX2747 | 47681 | TGTAAGASNDNH | 0.84 | 3.3 | 0.84 | 0.84 |
| ATLVT012XX2702 | 47636 | TGQTAGATNDNH | 0.48 | 1.68 | 0.02 | 1.56 | ATLVT012XX2748 | 47682 | TGTAAGASNDNT | 0.72 | 3.08 | −0.14 | −0.17 |
| ATLVT012XX2703 | 47637 | TGQTAGATNDNT | −1.04 | −0.17 | −0.47 | −0.44 | ATLVT012XX2749 | 47683 | TGTAAGATNDNA | 1.29 | 3.87 | −1.99 | −0.71 |
| ATLVT012XX2704 | 47638 | TGQTAGSSNDNA | −0.92 | 0.52 | −0.84 | −0.09 | ATLVT012XX2750 | 47684 | TGTAAGATNDNH | 5.59 | 5.58 | −0.44 | 3.12 |
| ATLVT012XX2705 | 47639 | TGQTAGSSNDNH | −1.84 | −1.33 | −1.84 | −1.5 | ATLVT012XX2751 | 47685 | TGTAAGATNDNT | 4.07 | 2.64 | −1.19 | 0.44 |
| ATLVT012XX2706 | 47640 | TGQTAGSSNDNT | −1.69 | 0.57 | −0.76 | −1.55 | ATLVT012XX2752 | 47686 | TGTAAGSSNDNA | 1.48 | 1.51 | 0.48 | −1.57 |
| ATLVT012XX2707 | 47641 | TGQTAGSTNDNA | −1.81 | −1.12 | −1.22 | −1.37 | ATLVT012XX2753 | 47687 | TGTAAGSSNDNH | −1.82 | −0.9 | −0.74 | −1.23 |
| ATLVT012XX2708 | 47642 | TGQTAGSTNDNH | 0.12 | 0.4 | −1.73 | −0.73 | ATLVT012XX2754 | 47688 | TGTAAGSSNDNT | −1.33 | 2.22 | −0.61 | −2.5 |
| ATLVT012XX2709 | 47643 | TGQTAGSTNDNT | −0.32 | 1.45 | −1.2 | 0.28 | ATLVT012XX2755 | 47689 | TGTAAGSTNDNA | −1.08 | 0.64 | −0.29 | −1.49 |
| ATLVT012XX2710 | 47644 | TGQTGAASNDNA | −1.07 | 0.41 | −0.98 | 0.02 | ATLVT012XX2756 | 47690 | TGTAAGSTNDNH | 0.4 | −0.02 | −1.57 | −0.46 |
| ATLVT012XX2711 | 47645 | TGQTGAASNDNH | −0.12 | 2.54 | 0.19 | −0.35 | ATLVT012XX2757 | 47691 | TGTAAGSTNDNT | −0.56 | 0.16 | −1.82 | −2.57 |
| ATLVT012XX2712 | 47646 | TGQTGAASNDNT | 0.28 | −0.54 | −0.18 | 1.31 | ATLVT012XX2758 | 47692 | TGTAGAASNDNA | −1.42 | −1.72 | −0.5 | −1.49 |
| ATLVT012XX2713 | 47647 | TGQTGAATNDNA | 1.46 | 1.7 | −2.21 | 0.73 | ATLVT012XX2759 | 47693 | TGTAGAASNDNG | 0.1 | −0.82 | −1.93 | −1.91 |
| ATLVT012XX2714 | 47648 | TGQTGAATNDNH | 1.25 | 0.58 | −1.41 | −1.37 | ATLVT012XX2760 | 47694 | TGTAGAASNDNT | −0.91 | −1.73 | −0.93 | −2.32 |
| ATLVT012XX2761 | 47695 | TGTAGAATNDNA | −2.07 | 0.14 | −2.73 | −2.03 | ATLVT012XX2807 | 47741 | TGTSGAASNDNH | −0.38 | 1.48 | −0.27 | −2.68 |
| ATLVT012XX2762 | 47696 | TGTAGAATNDNH | −1.03 | 1.57 | −2.27 | −0.61 | ATLVT012XX2808 | 47742 | TGTSGAASNDNT | −2.25 | −0.97 | −1.24 | −3.46 |
| ATLVT012XX2763 | 47697 | TGTAGAATNDNT | −2.94 | 0.23 | −3.59 | −3 | ATLVT012XX2809 | 47743 | TGTSGAATNDNA | −0.66 | 0.89 | −1.19 | −0.19 |
| ATLVT012XX2764 | 47698 | TGTAGASSNDNA | −2.62 | 0.11 | −1.61 | −1.23 | ATLVT012XX2810 | 47744 | TGTSGAATNDNH | −0.56 | 3.43 | 0 | 1.24 |
| ATLVT012XX2765 | 47699 | TGTAGASSNDNH | −2.49 | −0.91 | −1.94 | −1.41 | ATLVT012XX2811 | 47745 | TGTSGAATNDNT | −0.85 | 1.48 | −1.45 | −0.96 |
| ATLVT012XX2766 | 47700 | TGTAGASSNDNT | −0.99 | 0.77 | −1.2 | −2.36 | ATLVT012XX2812 | 47746 | TGTSGASSNDNA | 3.13 | −2.49 | 0.22 | −0.64 |
| ATLVT012XX2767 | 47701 | TGTAGASTNDNA | −1.57 | 0.92 | −1.08 | −0.06 | ATLVT012XX2813 | 47747 | TGTSGASSNDNH | 0.54 | −1.8 | 0.55 | 2.04 |
| ATLVT012XX2768 | 47702 | TGTAGASTNDNH | −3 | 0.39 | −0.69 | −0.86 | ATLVT012XX2814 | 47748 | TGTSGASSNDNT | 1.89 | −0.16 | 0.07 | −0.83 |
| ATLVT012XX2769 | 47703 | TGTAGASTNDNT | −2.15 | −1.38 | −1.39 | −0.32 | ATLVT012XX2815 | 47749 | TGTSGASTNDNA | −0.18 | −1.75 | 0.82 | 1.26 |
| ATLVT012XX2770 | 47704 | TGTAGGASNDNA | 2.96 | 2.91 | −1.6 | 0.16 | ATLVT012XX2816 | 47750 | TGTSGASTNDNH | −0.32 | −0.82 | −0.04 | −0.81 |
| ATLVT012XX2771 | 47705 | TGTAGGASNDNH | 2.99 | 3.84 | −0.9 | 0.46 | ATLVT012XX2817 | 47751 | TGTSGASTNDNT | −0.79 | −0.91 | 0.28 | 0.73 |
| ATLVT012XX2772 | 47706 | TGTAGGASNDNT | 2.18 | 3.58 | −1.87 | 0.16 | ATLVT012XX2818 | 47752 | TGTSGGASNDNA | 2.87 | 3.74 | −1.04 | −0.21 |
| ATLVT012XX2773 | 47707 | TGTAGGATNDNA | 0.93 | 2.09 | −0.51 | 1.2 | ATLVT012XX2819 | 47753 | TGTSGGASNDNH | 5.57 | 4.38 | 0.73 | 2.94 |
| ATLVT012XX2774 | 47708 | TGTAGGATNDNH | 5.89 | 7.95 | −0.6 | 3.67 | ATLVT012XX2820 | 47754 | TGTSGGASNDNT | 2.82 | 3.57 | −0.15 | −0.2 |
| ATLVT012XX2775 | 47709 | TGTAGGATNDNT | 2.5 | 4.79 | −1.69 | 0.33 | ATLVT012XX2821 | 47755 | TGTSGGATNDNA | 2.81 | 3.54 | 1.05 | 1.52 |
| ATLVT012XX2776 | 47710 | TGTAGGSSNDNA | 2.05 | 2.95 | −0.62 | 1.57 | ATLVT012XX2822 | 47756 | TGTSGGATNDNH | 7.78 | 9.35 | 1.64 | 4.16 |
| ATLVT012XX2777 | 47711 | TGTAGGSSNDNH | 2.15 | 1.71 | 1.02 | 1.14 | ATLVT012XX2823 | 47757 | TGTSGGATNDNT | 4.43 | 4.85 | 0.27 | 0.2 |
| ATLVT012XX2778 | 47712 | TGTAGGSSNDNT | 2.07 | 2.82 | −0.75 | 0.94 | ATLVT012XX2824 | 47758 | TGTSGGSSNDNA | 4.58 | 3.61 | 0.4 | 0.76 |
| ATLVT012XX2779 | 47713 | TGTAGGSTNDNA | 3.69 | 4.86 | −1.18 | 1.68 | ATLVT012XX2825 | 47759 | TGTSGGSSNDNH | 2.14 | 3.83 | −0.45 | 0.2 |
| ATLVT012XX2780 | 47714 | TGTAGGSTNDNH | 3.82 | 5.77 | −1.5 | 2.67 | ATLVT012XX2826 | 47760 | TGTSGGSSNDNT | 3.19 | 4.28 | −0.39 | −0.01 |
| ATLVT012XX2781 | 47715 | TGTAGGSTNDNT | 2.91 | 3.4 | −1.93 | 1.27 | ATLVT012XX2827 | 47761 | TGTSGGSTNDNA | 3.33 | 2.9 | 0.3 | 2.22 |
| ATLVT012XX2782 | 47716 | TGTSAAASNDNA | 0.5 | −0.84 | −0.06 | −1.98 | ATTVT012XX2828 | 47762 | TGTSGGSTNDNH | 2.05 | 4.57 | −0.35 | 3.1 |
| ATLVT012XX2783 | 47717 | TGTSAAASNDNH | 0.42 | 0.62 | −1.17 | −1.36 | ATLVT012XX2829 | 47763 | TGTSGGSTNDNT | 3.49 | 2.73 | 1.02 | 0.69 |
| ATLVT012XX2784 | 47718 | TGTSAAASNDNT | 2.68 | 0.94 | −0.21 | −2.09 | ATLVT012XX2830 | 47764 | TGTTAAASNDNA | −0.4 | 3.22 | 0.92 | 0.27 |
| ATLVT012XX2785 | 47719 | TGTSAAATNDNA | 0.85 | 0.72 | −0.35 | 0.62 | ATLVT012XX2831 | 47765 | TGTTAAASNDNH | 0.2 | −0.1 | 0.24 | −0.11 |
| ATLVT012XX2786 | 47720 | TGTSAAATNDNH | 0.53 | 1.94 | 0.25 | −0.11 | ATLVT012XX2832 | 47766 | TGTTAAASNDNT | −0.94 | 0.86 | −0.5 | 0.12 |
| ATLVT012XX2787 | 47721 | TGTSAAATNDNT | 1.89 | 0.07 | −0.19 | 0.37 | ATLVT012XX2833 | 47767 | TGTTAAATNDNA | 1.27 | 0.54 | −0.67 | −0.74 |
| ATLVT012XX2788 | 47722 | TGTSAASSNDNA | 0.03 | −0.19 | 0.22 | 1.92 | ATLVT012XX2834 | 47768 | TGTTAAATNDNH | 1.24 | −0.99 | −1.03 | 1.55 |
| ATLVT012XX2789 | 47723 | TGTSAASSNDNH | 1.23 | 0.47 | −0.13 | −0.14 | ATLVT012XX2835 | 47769 | TGTTAAATNDNT | 1.92 | 2.61 | 0.58 | −0.78 |
| ATLVT012XX2790 | 47724 | TGTSAASSNDNT | 1.33 | −0.32 | −0.65 | −2.04 | ATLVT012XX2836 | 47770 | TGTTAASSNDNA | 0.25 | −0.89 | −0.96 | 0.02 |
| ATLVT012XX2791 | 47725 | TGTSAASTNDNA | −0.35 | 4.99 | −0.91 | 0.59 | ATLVT012XX2837 | 47771 | TGTTAASSNDNH | −1.05 | 1.05 | −1.76 | −0.02 |
| ATLVT012XX2792 | 47726 | TGTSAASTNDNH | −0.55 | 3.82 | −0.88 | −0.72 | ATLVT012XX2838 | 47772 | TGTTAASSNDNT | 0.54 | 2.24 | −0.27 | −0.91 |
| ATLVT012XX2793 | 47727 | TGTSAASTNDNT | 1.12 | 4.81 | −1.48 | −0.53 | ATLVT012XX2839 | 47773 | TGTTAASTNDNA | 0.34 | −0.27 | −0.72 | 0.29 |
| ATLVT012XX2794 | 47728 | TGTSAGASNDNA | −0.51 | 0.2 | −0.59 | 0.49 | ATLVT012XX2840 | 47774 | TGTTAASTNDNH | 0.87 | 3.56 | −0.91 | 0.15 |
| ATLVT012XX2795 | 47729 | TGTSAGASNDNH | 0.52 | −0.77 | 0.35 | 1.78 | ATLVT012XX2841 | 47775 | TGTTAASTNDNT | 4.08 | 0.68 | −0.4 | −1.28 |
| ATLVT012XX2796 | 47730 | TGTSAGASNDNT | 0.46 | −0.91 | 0 | −0.37 | ATLVT012XX2842 | 47776 | TGTTAGASNDNA | −2.29 | 0.43 | 0.47 | −0.5 |
| ATLVT012XX2797 | 47731 | TGTSAGATNDNA | 1.52 | −0.18 | −0.37 | 1 | ATLVT012XX2843 | 47777 | TGTTAGASNDNH | −0.33 | 0.78 | −0.03 | 2.34 |
| ATLVT012XX2798 | 47732 | TGTSAGATNDNH | 6.23 | 3.39 | −0.23 | 3.74 | ATLVT012XX2844 | 47778 | TGTTAGASNDNT | 0.57 | 0.55 | −1.39 | 1 |
| ATLVT01XXX2799 | 47733 | TGTSAGATNDNT | 3.22 | 0.27 | 0.56 | 0.3 | ATLVT012XX2845 | 47779 | TGTTAGATNDNA | −1.65 | 1.26 | −1.46 | 1.88 |
| ATLVT012XX2800 | 47734 | TGTSAGSSNDNA | 0.21 | 2.2 | −0.41 | −0.48 | ATLVT012XX2846 | 47780 | TGTTAGATNDNH | 1.54 | 3.77 | −0.57 | 3.2 |
| ATLVT012XX2801 | 47735 | TGTSAGSSNDNH | −0.96 | −1 | −0.33 | −2.26 | ATLVT012XX2847 | 47781 | TGTTAGATNDNT | 0.51 | 1.62 | 0.38 | 1.23 |
| ATLVT012XX2802 | 47736 | TGTSAGSSNDNT | 0.77 | 1.57 | −0.42 | −2.11 | ATLVT012XX2848 | 47782 | TGTTAGSSNDNA | −1.88 | −0.77 | −1.29 | −1.49 |
| ATLVT012XX2803 | 47737 | TGTSAGSTNDNA | 0.22 | 2.32 | 0.16 | 0.4 | ATLVT012XX2849 | 47783 | TGTTAGSSNDNH | −0.37 | 1.02 | −1.77 | 0.37 |
| ATLVT012XX2804 | 47738 | TGTSAGSTNDNH | 2.29 | 1.53 | −0.46 | 1.99 | ATLVT012XX2850 | 47784 | TGTTAGSSNDNT | 1.05 | 0.3 | −0.51 | −0.39 |
| ATLVT012XX2805 | 47739 | TGTSAGSTNDNT | 2.12 | 1.1 | −0.76 | −0.32 | ATLVT012XX2851 | 47785 | TGTTAGSTNDNA | 0.02 | −0.78 | −1.12 | 0.75 |
| ATLVT012XX2806 | 47740 | TGTSGAASNDNA | −1.37 | −0.23 | −1.52 | −1.3 | ATLVT012XX2852 | 47786 | TGTTAGSTNDNH | −1.1 | −0.24 | −0.44 | 1.26 |
| ATLVT012XX2853 | 47787 | TGTTAGSTNDNT | 0.3 | 0.27 | −0.69 | 0.72 | ATTVT012XX2899 | 47833 | TSAAAGSTNDNA | 2.3 | −1.97 | −0.69 | −2.14 |
| ATLVT012XX2854 | 47788 | TGTTGAASNDNA | −1.83 | −1.85 | 1.21 | −1.53 | ATLVT012XX2900 | 47834 | TSAAAGSTNDNH | 0.42 | −3.26 | −0.34 | −0.63 |
| ATLVT012XX2855 | 47789 | TGTTGAASNDNH | −1.59 | −1.15 | −0.43 | −0.15 | ATLVT012XX2901 | 47835 | TSAAAGSTNDNT | 1.3 | −1.71 | −0.11 | −2.21 |
| ATLVT012XX2856 | 47790 | TGTTGAASNDNT | −2.94 | −2.48 | 0.32 | −1.59 | ATLVT012XX2902 | 47836 | TSAAGAASNDNA | −3.41 | −4.04 | −2.88 | −1.95 |
| ATLVT012XX2857 | 47791 | TGTTGAATNDNA | −0.18 | 1.8 | −0.94 | −1.48 | ATLVT012XX2903 | 47837 | TSAAGAASNDNH | −1.95 | −4.8 | −2.91 | −1.52 |
| ATLVT012XX2858 | 47792 | TGTTGAATNDNH | 1.37 | 0.16 | −1.39 | 0.21 | ATLVT012XX2904 | 47838 | TSAAGAASNDNT | −3.09 | −1.88 | −3.52 | −0.45 |
| ATLVT012XX2859 | 47793 | TGTTGAATNDNT | 0.63 | −0.88 | −0.67 | −0.86 | ATLVT012XX2905 | 47839 | TSAAGAATNDNA | −1.7 | | −2.65 | 0.11 |
| ATLVT012XX2860 | 47794 | TGTTGASSNDNA | −1.59 | −0.5 | 0.32 | −0.6 | ATLVT012XX2906 | 47840 | TSAAGAATNDNH | −1.08 | 0.85 | −2.57 | 0.12 |
| ATLVT012XX2861 | 47795 | TGTTGASSNDNH | 1.2 | 1 | −0.42 | −0.71 | ATLVT012XX2907 | 47841 | TSAAGAATNDNT | −2.34 | −1.91 | −2.69 | −2.85 |
| ATLVT012XX2862 | 47796 | TGTTGASSNDNT | −0.81 | −0.47 | −1.19 | −0.7 | ATLVT012XX2908 | 47842 | TSAAGASSNDNA | −2.37 | −0.98 | −1.12 | −2.23 |
| ATLVT012XX2863 | 47797 | TGTTGASTNDNA | −0.35 | −1.82 | −0.07 | −1.35 | ATLVT012XX2909 | 17843 | TSAAGASSNDNH | 1.37 | −5.49 | −1.59 | −1.89 |
| ATLVT012XX2864 | 47798 | TGTTGASTNDNH | −0.83 | −1.38 | 0.47 | 2.07 | ATLVT012XX2910 | 47844 | TSAAGASSNDNT | −3.12 | −4.55 | −1.02 | −1.38 |
| ATLVT012XX2865 | 47799 | TGTTGASTNDNT | 0.92 | −1.9 | −0.81 | −1.35 | ATLVT012XX2911 | 47845 | TSAAGASTNDNA | −1.87 | −4.21 | 0.21 | −0.74 |
| ATLVT012XX2866 | 47800 | TGTTGGASNDNA | 5.41 | 1.64 | 1.27 | 0.24 | ATLVT012XX2912 | 47846 | TSAAGASTNDNH | −2.95 | −4.66 | −1.6 | −2.74 |
| ATLVT012XX2867 | 47801 | TGTTGGASNDNH | 2.83 | 2.57 | −0.38 | 3.19 | ATLVT012XX2913 | 47847 | TSAAGASTNDNT | −0.45 | −4.11 | −0.34 | −2.47 |
| ATLVT012XX2868 | 47802 | TGTTGGASNDNT | 4.39 | 2.17 | 1.27 | −0.54 | ATLVT012XX2914 | 47848 | TSAAGGASNDNA | −0.43 | −0.83 | −3.05 | −1.72 |
| ATLVT012XX2869 | 47803 | TGTTGGATNDNA | 3.59 | 3.34 | 0.18 | 1.16 | ATTVT012XX2915 | 47849 | TSAAGGASNDNH | 0.32 | −1.92 | −0.86 | −1.24 |
| ATLVT012XX2870 | 47804 | TGTTGGATNDNH | 7.74 | 8.75 | 1.19 | 4.68 | ATLVT012XX2916 | 47850 | TSAAGGASNDNT | −0.71 | −0.43 | −4 | −2.07 |
| ATLVT012XX2871 | 47805 | TGTTGGATNDNT | 3.48 | 3.22 | −0.18 | 1.23 | ATLVT012XX2917 | 47851 | TSAAGGATNDNA | −1.32 | −1.46 | −1.76 | −0.51 |
| ATLVT012XX2872 | 47806 | TGTTGGSSNDNA | 1.33 | 2.75 | −0.13 | −0.23 | ATLVT012XX2918 | 47852 | TSAAGGATNDNH | 1.22 | −0.06 | −2.34 | 3.08 |
| ATLVT012XX2873 | 47807 | TGTTGGSSNDNH | 0.58 | 1.56 | 0.81 | −0.73 | ATLVT012XX2919 | 47853 | TSAAGGATNDNT | −1.26 | −2.63 | −1.87 | −1.02 |
| ATLVT012XX2874 | 47808 | TGTTGGSSNDNT | 2.47 | 3.32 | 0.07 | −0.02 | ATLVT012XX2920 | 47854 | TSAAGGSSNDNA | 0.9 | 0.05 | −1.65 | −1.48 |
| ATLVT012XX2875 | 47809 | TGTTGGSTNDNA | 2.76 | 2.97 | −0.48 | 1.45 | ATLVT012XX2921 | 47855 | TSAAGGSSNDNH | −2.6 | −2.94 | −0.77 | −2.04 |
| ATLVT012XX2876 | 47810 | TGTTGGSTNDNH | 3.73 | 2.41 | 0.93 | 1.96 | ATLVT012XX2922 | 47856 | TSAAGGSSNDNT | 0.06 | −2.99 | −2.9 | −2.94 |
| ATLVT012XX2877 | 47811 | TGTTGGSTNDNT | 2.68 | 3.18 | −0.05 | 1.17 | ATLVT012XX2923 | 47857 | TSAAGGSTNDNA | 0.96 | −1.89 | −2.24 | −2.16 |
| ATLVT012XX2878 | 47812 | TSAAAAASNDNA | 0.56 | −2.25 | −2.62 | −1.62 | ATLVT012XX2924 | 47858 | TSAAGGSTNDNH | 1.27 | −0.89 | −2.43 | −0.58 |
| ATLVT012XX2879 | 47813 | TSAAAAASNDNH | 0.33 | −2.78 | −1.68 | −3.46 | ATLVT012XX2925 | 47859 | TSAAGGSTNDNT | 1.88 | −1.52 | −2.19 | −0.96 |
| ATLVT012XX2880 | 47814 | TSAAAAASNDNT | 1.42 | 0.79 | −1.98 | −1.99 | ATLVT012XX2926 | 47860 | TSASAAASNDNA | 0.06 | 4.68 | −1.89 | 0.76 |
| ATLVT012XX2881 | 47815 | TSAAAAATNDNA | −0.83 | −0.02 | 0.9 | −0.91 | ATLVT012XX2927 | 47861 | TSASAAASNDNH | −1.01 | 2.99 | 1.15 | 0.14 |
| ATLVT012XX2882 | 47816 | TSAAAAATNDNH | −0.12 | −2.63 | 0.13 | −0.88 | ATTVT012XX2928 | 47862 | TSASAAASNDNT | −1.22 | 4.1 | −0.81 | −2.48 |
| ATLVT012XX2883 | 47817 | TSAAAAATNDNT | 0.42 | −2.09 | −0.55 | −1.54 | ATLVT012XX2929 | 47863 | TSASAAATNDNA | −1.27 | −0.22 | 1.89 | −0.79 |
| ATLVT012XX2884 | 47818 | TSAAAASSNDNA | −1.13 | −0.83 | −0.99 | −1.3 | ATLVT012XX2930 | 47864 | TSASAAATNDNH | −0.35 | 1.02 | 0.54 | 0.09 |
| ATLVT012XX2885 | 47819 | TSAAAASSNDNH | −1.11 | −0.28 | −1.43 | −1.35 | ATLVT012XX2931 | 47865 | TSASAAATNDNT | 1.73 | 1.57 | −0.05 | −0.94 |
| ATLVT012XX2886 | 47820 | TSAAAASSNDNT | 0.15 | 0.64 | 1.03 | −0.65 | ATLVT012XX2932 | 47866 | TSASAASSNDNA | 0.89 | 2.26 | −1.21 | −1.25 |
| ATLVT012XX2887 | 47821 | TSAAAASTNDNA | −2 | −2.21 | −0.76 | 1.16 | ATLVT012XX2933 | 47867 | TSASAASSNDNH | 1.41 | 1.62 | −0.62 | −1.43 |
| ATLVT012XX2888 | 47822 | TSAAAASTNDNH | −1.62 | −0.9 | −1.39 | −0.6 | ATLVT012XX2934 | 47868 | TSASAASSNDNT | 2.99 | 1.13 | −1.13 | −1.59 |
| ATLVT012XX2889 | 47823 | TSAAAASTNDNT | −2.2 | 0.92 | −0.73 | 1.2 | ATLVT012XX2935 | 47869 | TSASAASTNDNA | 2 | 2.56 | −0.36 | −0.08 |
| ATLVT012XX2890 | 47824 | TSAAAGASNDNA | −0.94 | 0.06 | −2.46 | −2.28 | ATTVT012XX2936 | 47870 | TSASAASTNDNH | 0.25 | 1.07 | 1.49 | −0.65 |
| ATLVT012XX2891 | 47825 | TSAAAGASNDNH | 0.88 | −0.59 | −2.65 | −2.41 | ATLVT012XX2937 | 47871 | TSASAASTNDNT | 1.08 | 2.23 | −0.1 | −2.41 |
| ATLVT012XX2892 | 47826 | TSAAAGASNDNT | 0.77 | −0.79 | −2 | −2.08 | ATLVT012XX2938 | 47872 | TSASAGASNDNA | −0.82 | 1.58 | −0.97 | 0.33 |
| ATLVT012XX2893 | 47827 | TSAAAGATNDNA | −0.35 | −0.39 | −1.59 | −0.33 | ATLVT012XX2939 | 47873 | TSASAGASNDNH | 0.21 | 3.86 | 0.56 | −1.58 |
| ATLVT012XX2894 | 47828 | TSAAAGATNDNH | 1.59 | 1.65 | −0.42 | 1.95 | ATLVT012XX2940 | 47874 | TSASAGASNDNT | 0.38 | 2.11 | −1.7 | −0.15 |
| ATLVT012XX2895 | 47829 | TSAAAGATNDNT | 1.27 | −1.16 | −0.81 | −0.95 | ATLVT012XX2941 | 47875 | TSASAGATNDNA | 1.31 | 0.68 | −1.22 | 0.98 |
| ATLVT012XX2896 | 47830 | TSAAAGSSNDNA | −1.37 | −3.23 | −0.55 | −2.85 | ATLVT012XX2942 | 47876 | TSASAGATNDNH | 0.28 | 3.33 | −0.82 | 0.33 |
| ATLVT012XX2897 | 47831 | TSAAAGSSNDNH | 1.11 | −2.02 | −2.11 | −2.06 | ATLVT012XX2943 | 47877 | TSASAGATNDNT | −0.23 | 0.14 | −1.53 | −0.69 |
| ATLVT012XX2898 | 47832 | TSAAAGSSNDNT | −0.13 | −2.27 | −1.31 | −2.67 | ATLVT012XX2944 | 47878 | TSASAGSSNDNA | −0.13 | 0.82 | −0.69 | −1.65 |
| ATLVT012XX2945 | 47879 | TSASAGSSNDNH | −1.29 | 2.03 | −0.05 | −1.56 | ATLVT012XX2991 | 47925 | TSATAGATNDNT | −0.03 | 1.64 | −0.98 | 0.23 |
| ATLVT012XX2946 | 47880 | TSASAGSSNDNT | 0.44 | 3.16 | −1.11 | −1.16 | ATLVT012XX2992 | 47926 | TSATAGSSNDNA | 0.38 | 0.73 | −0.18 | −3.22 |
| ATLVT012XX2947 | 47881 | TSASAGSTNDNA | −1.01 | 2.82 | −1.43 | 0.3 | ATLVT012XX2993 | 47927 | TSATAGSSNDNH | −0.56 | −2.08 | −0.44 | −0.91 |
| ATLVT012XX2948 | 47882 | TSASAGSTNDNH | −0.09 | 0.36 | −0.34 | −1.75 | ATLVT012XX2994 | 47928 | TSATAGSSNDNT | 0.35 | 1.01 | 0.09 | −1.33 |
| ATLVT012XX2949 | 47883 | TSASAGSTNDNT | 0.62 | 2.41 | −1.67 | −1.19 | ATLVT012XX2995 | 47929 | TSATAGSTNDNA | −2.21 | −1.27 | −1.02 | 0.07 |
| ATLVT012XX2950 | 47884 | TSASGAASNDNA | 0 | 0.1 | −1.49 | −0.44 | ATLVT012XX2996 | 47930 | TSATAGSTNDNH | −2.21 | 0.65 | −1.18 | −0.34 |
| ATLVT012XX2951 | 47885 | TSASGAASNDNH | −1.65 | −2.21 | −0.43 | −0.01 | ATLVT012XX2997 | 47931 | TSATAGSTNDNT | −1.61 | 0.34 | −0.1 | 0.17 |
| ATLVT012XX2952 | 47886 | TSASGAASNDNT | −0.63 | −1.47 | −1.54 | −2.14 | ATLVT012XX2998 | 47932 | TSATGAASNDNA | −1.21 | −2.64 | −1.54 | −0.86 |
| ATLVT012XX2953 | 47887 | TSASGAATNDNA | −2.21 | 5.25 | −2.05 | −1.77 | ATLVT012XX2999 | 47933 | TSATGAASNDNH | 0.4 | −1.79 | 0.28 | −1.35 |
| ATLVT012XX2954 | 47888 | TSASGAATNDNH | −2.37 | 1.91 | 0.66 | −1.1 | ATLVT012XX3000 | 47934 | TSATGAASNDNT | −1.31 | −2.68 | −1.44 | −2.71 |
| ATLVT012XX2955 | 47889 | TSASGAATNDNT | −1.7 | 2.2 | −0.2 | −2.09 | ATLVT012XX3001 | 47935 | TSATGAATNDNA | −1.25 | −1.08 | −0.96 | −1.79 |
| ATLVT012XX2956 | 47890 | TSASGASSNDNA | 1.41 | −2.84 | −0.23 | −0.73 | ATLVT012XX3002 | 47936 | TSATGAATNDNH | 0.06 | −1.14 | 0.37 | 1.13 |
| ATLVT012XX2957 | 47891 | TSASGASSNDNH | 1.42 | −3.39 | −2.1 | −3.85 | ATLVT012XX3003 | 47937 | TSATGAATNDNT | 1.48 | −0.75 | −1.33 | −0.98 |
| ATLVT012XX2958 | 47892 | TSASGASSNDNT | 1.4 | −2.24 | −1.64 | −1.17 | ATLVT012XX3004 | 47938 | TSATGASSNDNA | −2.14 | −1.64 | −1.12 | −0.21 |
| ATLVT012XX2959 | 47893 | TSASGASTNDNA | −1.29 | −0.83 | 0.61 | −1.66 | ATLVT012XX3005 | 47939 | TSATGASSNDNH | −2.62 | −0.17 | 0.13 | −0.75 |
| ATLVT012XX2960 | 47894 | TSASGASTNDNH | −1.4 | −2.98 | 0.46 | 0.29 | ATLVT012XX3006 | 47940 | TSATGASSNDNT | −0.28 | −1.61 | 0.09 | −1.02 |
| ATLVT012XX2961 | 47895 | TSASGASTNDNT | 1.74 | −2.08 | −1.11 | −1.25 | ATLVT012XX3007 | 47941 | TSATGASTNDNA | −0.97 | −1 | −0.43 | 0.43 |
| ATLVT012XX2962 | 47896 | TSASGGASNDNA | 1.32 | 2.19 | −1.44 | −0.14 | ATLVT012XX3008 | 47942 | TSATGASTNDNH | −0.69 | −1.6 | −1.62 | 0.51 |
| ATLVT012XX2963 | 47897 | TSASGGASNDNH | 2.4 | −0.33 | −1.1 | 0.85 | ATLVT012XX3009 | 47943 | TSATGASTNDNT | −0.6 | 0.64 | −0.27 | −1.11 |
| ATLVT012XX2964 | 47898 | TSASGGASNDNT | 3.45 | 0.61 | −0.98 | −1.14 | ATLVT012XX3010 | 47944 | TSATGGASNDNA | 1.08 | −0.01 | −1.41 | 0.43 |
| ATLVT012XX2965 | 47899 | TSASGGATNDNA | 0.64 | 1.18 | 0.5 | 2.21 | ATLVT012XX3011 | 47945 | TSATGGASNDNH | 1.24 | 0.98 | 0 | 0.87 |
| ATLVT012XX2966 | 47900 | TSASGGATNDNH | 4.02 | 4 | 1.52 | 2.86 | ATLVT012XX3012 | 47946 | TSATGGASNDNT | 2.25 | 2.34 | −0.48 | 2.88 |
| ATLVT012XX2967 | 47901 | TSASGGATNDNT | 3.37 | 1.15 | −0.89 | 0.35 | ATLVT012XX3013 | 47947 | TSATGGATNDNA | 1.52 | 0.14 | −0.85 | −0.41 |
| ATLVT012XX2968 | 47902 | TSASGGSSNDNA | 1.59 | 0.23 | −1.17 | −1.61 | ATLVT012XX3014 | 47948 | TSATGGATNDNH | 4.02 | 1.85 | 0.09 | 2.31 |
| ATLVT012XX2969 | 47903 | TSASGGSSNDNH | 0.15 | −2.02 | −0.24 | −0.88 | ATLVT012XX3015 | 47949 | TSATGGATNDNT | 2.85 | 1.9 | −0.8 | −1.14 |
| ATLVT012XX2970 | 47904 | TSASGGSSNDNT | 2.2 | −1.01 | 0.65 | −0.95 | ATLVT012XX3016 | 47950 | TSATGGSSNDNA | −0.2 | 3.15 | 0.3 | 0.77 |
| ATLVT012XX2971 | 47905 | TSASGGSTNDNA | 1.56 | 0.07 | 0.44 | 0.43 | ATLVT012XX3017 | 47951 | TSATGGSSNDNH | 2.26 | 1.03 | −0.23 | −0.21 |
| ATLVT012XX2972 | 47906 | TSASGGSTNDNH | 0.95 | 0.77 | −0.74 | 1.6 | ATLVT012XX3018 | 47952 | TSATGGSSNDNT | 1.34 | 1.53 | 0.78 | 0.45 |
| ATLVT012XX2973 | 47907 | TSASGGSTNDNT | 2.78 | 0.62 | 1.3 | −0.46 | ATLVT012XX3019 | 47953 | TSATGGSTNDNA | 2.21 | 0.9 | 0.83 | 0.86 |
| ATLVT012XX2974 | 47908 | TSATAAASNDNA | 0.64 | −1.21 | 0.58 | 0.01 | ATLVT012XX3020 | 47954 | TSATGGSTNQNH | 2.83 | −0.08 | 0.96 | 1.19 |
| ATLVT012XX2975 | 47909 | TSATAAASNDNH | 1.87 | 0.61 | −0.64 | −0.93 | ATLVT012XX3021 | 47955 | TSATGGSTNDNT | 2.89 | 1.5 | 0.05 | −1.21 |
| ATLVT012XX2976 | 47910 | TSATAAASNDNT | 3.72 | −1.73 | 1.24 | −1.12 | ATLVT012XX3022 | 47956 | TSEAAAASNDNA | −0.25 | 0.81 | 0 | 0.91 |
| ATLVT012XX2977 | 47911 | TSATAAATNDNA | 0.11 | −1.39 | −2.1 | −0.78 | ATLVT012XX3023 | 47957 | TSEAAAASNDNH | 1.27 | −0.38 | −0.15 | −1.18 |
| ATLVT012XX2978 | 47912 | TSATAAATNDNH | 0.48 | −0.29 | −0.38 | −0.4 | ATLVT012XX3024 | 47958 | TSEAAAASNDNT | −0.98 | 1.6 | −0.72 | −1.37 |
| ATLVT012XX2979 | 47913 | TSATAAATNDNT | 0.99 | −0.81 | −1.49 | −2.77 | ATLVT012XX3025 | 47959 | TSEAAAATNDNA | −1.08 | 6.76 | −0.32 | 1 |
| ATLVT012XX2980 | 47914 | TSATAASSNDNA | −0.9 | −2.77 | −0.76 | 0 | ATLVT012XX3026 | 47960 | TSEAAAATNDNH | 0.47 | 2.95 | −0.42 | 0.58 |
| ATLVT012XX2981 | 47915 | TSATAASSNDNH | −0.03 | −2.58 | −1.57 | −0.15 | ATLVT012XX3027 | 47961 | TSEAAAATNDNT | −1.98 | 0.92 | −0.01 | −0.52 |
| ATLVT012XX2982 | 47916 | TSATAASSNDNT | −0.67 | −2.13 | −1.14 | −1.78 | ATLVT012XX3028 | 47962 | TSEAAASSNDNA | −1.01 | −1 | −2.01 | −1.09 |
| ATLVT012XX2983 | 47917 | TSATAASTNDNA | −2.03 | −1.83 | −0.1 | −0.5 | ATLVT012XX3029 | 47963 | TSEAAASSNDNH | −2.42 | −1.72 | −1.28 | −4 |
| ATLVT012XX2984 | 47918 | TSATAASTNDNH | −2.72 | 0.21 | −0.51 | −2.02 | ATLVT012XX3030 | 47964 | TSEAAASSNDNT | 1.4 | −0.91 | −0.75 | −1.95 |
| ATLVT012XX2985 | 47919 | TSATAASTNDNT | −1.54 | −0.81 | 0.21 | −1.04 | ATLVT012XX3031 | 47965 | TSEAAASTNDNA | −2.04 | −0.01 | 0.1 | −1.38 |
| ATLVT012XX2986 | 47920 | TSATAGASNDNA | −2.09 | −0.11 | −1.82 | −0.92 | ATLVT012XX3032 | 47966 | TSEAAASTNDNH | −3.39 | −1.7 | −2.36 | −1.37 |
| ATLVT012XX2987 | 47921 | TSATAGASNDNH | −2.24 | 0.47 | −2.53 | −2.22 | ATLVT012XX3033 | 47967 | TSEAAASTNDNT | −1.65 | −0.31 | 0.18 | −1.67 |
| ATLVT012XX2988 | 47922 | TSATAGASNDNT | −1.18 | 0.44 | −0.94 | −1.08 | ATLVT012XX3034 | 47968 | TSEAAGASNDNA | −1.65 | 3.83 | −2.27 | −3.26 |
| ATLVT012XX2989 | 47923 | TSATAGATNDNA | −2.47 | 1.8 | −1.26 | 0.14 | ATLVT012XX3035 | 47969 | TSEAAGASNDNH | −2.5 | 0.15 | −2.38 | −2.93 |
| ATLVT012XX2990 | 47924 | TSATAGATNDNH | −0.55 | 1.09 | −1.42 | −0.19 | ATLVT012XX3036 | 47970 | TSEAAGASNDNT | −1.82 | −0.27 | −2.777 | −3.36 |
| ATLVT012XX3037 | 47971 | TSEAAGATNDNA | −0.74 | −0.3 | −2.9 | −0.41 | ATLVT012XX3083 | 48017 | TSESAGASNDNH | 0.61 | 1.31 | −1.39 | −1.95 |
| ATLVT012XX3038 | 47972 | TSEAAGATNDNH | −0.48 | 1.48 | −3.15 | −2.34 | ATLVT012XX3084 | 48018 | TSESAGASNDNT | 1.17 | −1.49 | −1.06 | −1.3 |
| ATLVT012XX3039 | 47973 | TSEAAGATNDNT | 0.01 | −0.68 | −0.71 | −2.89 | ATLVT012XX3085 | 48019 | TSESAGATNDNA | −2.22 | −0.66 | −0.83 | −1.54 |
| ATLVT012XX3040 | 47974 | TSEAAGSSNDNA | −3.14 | −1.37 | −1.97 | −2.52 | ATLVT012XX3086 | 48020 | TSESAGATNDNH | 0.74 | 4.13 | −1.25 | −0.83 |
| ATLVT012XX3041 | 47975 | TSEAAGSSNDNH | −3.68 | −2.03 | −2.43 | −2.49 | ATLVT012XX3087 | 48021 | TSESAGATNDNT | −1.21 | −0.4 | −2.15 | −2.88 |
| ATLVT012XX3042 | 47976 | TSEAAGSSNDNT | −3.17 | −1.76 | −1.87 | 0.32 | ATLVT012XX3088 | 48022 | TSESAGSSNDNA | 1.12 | 1.02 | −1.74 | 0.92 |
| ATLVT012XX3043 | 47977 | TSEAAGSTNDNA | −3.28 | 0.76 | −1.02 | −3.6 | ATLVT012XX3089 | 48023 | TSESAGSSNDNH | 1.46 | 3.9 | −0.76 | −0.37 |
| ATLVT012XX3044 | 47978 | TSEAAGSTNDNH | −2.92 | 1.86 | −2.24 | −3.66 | ATLVT012XX3090 | 48024 | TSESAGSSNDNT | 1.86 | −0.45 | −1.58 | −1.29 |
| ATLVT012XX3045 | 47979 | TSEAAGSTNDNT | −2.47 | −0.53 | −1.65 | −3.62 | ATLVT012XX3091 | 48025 | TSESAGSTNDNA | 1.8 | −0.83 | 0.01 | −2.23 |
| ATLVT012XX3046 | 47980 | TSEAGAASNDNA | −0.62 | −1.27 | −2.77 | −2.32 | ATLVT012XX3092 | 48026 | TSESAGSTNDNH | 0.64 | −1.2 | −0.78 | −0.72 |
| ATLVT012XX3047 | 47981 | TSEAGAASNDNH | −0.98 | −1.69 | −1.84 | −2.72 | ATLVT012XX3093 | 48027 | TSESAGSTNDNT | 0.64 | −1.07 | −0.71 | −1.57 |
| ATLVT012XX3048 | 47982 | TSEAGAASNDNT | −3.24 | −2.23 | −0.95 | −1.64 | ATLVT012XX3094 | 48028 | TSESGAASNDNA | 0.2 | −1.91 | −0.72 | −1.76 |
| ATLVT012XX3049 | 47983 | TSEAGAATNDNA | −3.18 | −0.16 | −2.66 | −2.77 | ATLVT012XX3095 | 48029 | TSESGAASNDNH | 1.47 | 0.88 | −1.78 | −0.77 |
| ATLVT012XX3050 | 47984 | TSEAGAATNDNH | 0.02 | 3.48 | −2.99 | −0.18 | ATLVT012XX3096 | 48030 | TSESGAASNDNT | 0.91 | −1.78 | −0.85 | −2.21 |
| ATLVT012XX3051 | 47985 | TSEAGAATNDNT | −2.08 | 0.95 | −3.23 | −1.61 | ATLVT012XX3097 | 48031 | TSESGAATNDNA | −0.93 | −1.44 | −0.26 | −0.87 |
| ATLVT012XX3052 | 47986 | TSEAGASSNDNA | −2.34 | −1.02 | −0.62 | −1.4 | ATLVT012XX3098 | 48032 | TSESGAATNDNH | 1.14 | −1.61 | −1.58 | −1.2 |
| ATLVT012XX3053 | 47987 | TSEAGASSNDNH | −3.52 | −1.4 | −1.08 | −2.48 | ATLVT012XX3099 | 48033 | TSESGAATNDNT | −0.41 | −2.19 | −0.46 | −0.56 |
| ATLVT012XX3054 | 47988 | TSEAGASSNDNT | −2.35 | −2.34 | −0.35 | −3.17 | ATLVT012XX3100 | 48034 | TSESGASSNDNA | −1.02 | 2.64 | −0.22 | −2.5 |
| ATLVT012XX3055 | 47989 | TSEAGASTNDNA | −3.8 | −1.1 | −0.53 | −1.83 | ATLVT012XX3101 | 48035 | TSESGASSNDNH | −1.76 | −0.19 | −0.08 | −3.67 |
| ATLVT012XX3056 | 47990 | TSEAGASTNDNH | −3.92 | 3.02 | −0.77 | −2.18 | ATLVT012XX3102 | 48036 | TSESGASSNDNT | −1.62 | 2.17 | 0.01 | −2.12 |
| ATLVT012XX3057 | 47991 | TSEAGASTNDNT | −2.69 | −0.58 | −1.44 | −0.75 | ATLVT012XX3103 | 48037 | TSESGASTNDNA | 0.81 | −2.19 | −0.74 | 0.7 |
| ATLVT012XX3058 | 47992 | TSEAGGASNDNA | 0.42 | 0.59 | 0.84 | 0.01 | ATLVT012XX3104 | 48038 | TSESGASTNDNH | −1.47 | −0.78 | 0.13 | −0.92 |
| ATLVT01XXX3059 | 47993 | TSEAGGASNDNH | 2.16 | 4.1 | −0.88 | −0.89 | ATLVT012XX3105 | 48039 | TSESGASTNDNT | 1.38 | −0.26 | 0.52 | −1.44 |
| ATLVT012XX3060 | 47994 | TSEAGGASNDNT | 1.21 | 0.26 | −0.89 | −0.3 | ATLVT012XX3106 | 48040 | TSESGGASNDNA | 0.58 | −0.89 | −0.45 | −0.93 |
| ATLVT012XX3061 | 47995 | TSEAGGATNDNA | −0.24 | −0.41 | 2.19 | 0.29 | ATLVT012XX3107 | 48041 | TSESGGASNDNH | 0.83 | 1.81 | 0.84 | 0.4 |
| ATLVT012XX3062 | 47996 | TSEAGGATNDNH | 3.94 | 2.5 | 1.17 | 2.63 | ATLVT012XX3108 | 48042 | TSESGGASNDNT | 1.26 | 1.7 | 0.49 | −1.82 |
| ATLVT012XX3063 | 47997 | TSEAGGATNDNT | 0.84 | 1.01 | 1.01 | 0.4 | ATLVT012XX3109 | 48043 | TSESGGATNDNA | 0.36 | 2.3 | −0.87 | −0.16 |
| ATLVT012XX3064 | 47998 | TSEAGGSSNDNA | 0.55 | 0.95 | −2.04 | −0.42 | ATLVT012XX3110 | 48044 | TSESGGATNDNH | 2.79 | 1.18 | 0.21 | 1.01 |
| ATLVT012XX3065 | 47999 | TSEAGGSSNDNH | 0.28 | −0.42 | 0.24 | −1.66 | ATLVT012XX3111 | 48045 | TSESGGATNDNT | 3.07 | −0.82 | −0.81 | 0.18 |
| ATLVT012XX3066 | 48000 | TSEAGGSSNDNT | 0.89 | −0.19 | −0.48 | 0 | ATLVT012XX3112 | 48046 | TSESGGSSNDNA | 2.41 | 0.85 | −0.68 | −0.25 |
| ATLVT012XX3067 | 48001 | TSEAGGSTNDNA | 2.57 | 2.02 | 0.27 | 0.05 | ATLVT012XX3113 | 48047 | TSESGGSSNDNH | 0.73 | −1.19 | 0.9 | −1.59 |
| ATLVT012XX3068 | 48002 | TSEAGGSTNDNH | 0.68 | −0.39 | −0.67 | −0.55 | ATLVT012XX3114 | 48048 | TSESGGSSNDNT | 2.13 | 1.55 | 0.33 | 0.26 |
| ATLVT012XX3069 | 48003 | TSEAGGSTNDNT | 2.69 | 0.83 | −0.61 | −0.71 | ATLVT012XX3115 | 48049 | TSESGGSTNDNA | 2.89 | 0.28 | −0.48 | −0.34 |
| ATLVT012XX3070 | 48004 | TSESAAASNDNA | 1 | −1.03 | −1.76 | −2.16 | ATLVT012XX3116 | 48050 | TSESGGSTNDNH | 1.37 | 0.92 | −0.29 | 0.51 |
| ATLVT012XX3071 | 48005 | TSESAAASNDNH | 1.09 | 2.45 | −1.93 | −3.85 | ATLVT012XX3117 | 48051 | TSESGGSTNDNT | 1.56 | 1.93 | −0.27 | −1.65 |
| ATLVT012XX3072 | 48006 | TSESAAASNDNT | 3.14 | −0.51 | −0.94 | −2.79 | ATLVT012XX3118 | 48052 | TSETAAASNDNA | −0.54 | −0.93 | −1.2 | −1.28 |
| ATLVT012XX3073 | 48007 | TSESAAATNDNA | 0.1 | 0.5 | −0.53 | −2.51 | ATLVT012XX3119 | 48053 | TSETAAASNDNH | −0.72 | 0.56 | −1.42 | −2.67 |
| ATLVT012XX3074 | 48008 | TSESAAATNDNH | −1.29 | −0.36 | −1.14 | 0.26 | ATLVT012XX3120 | 48054 | TSETAAASNDNT | −0.5 | 1.08 | −1.57 | −0.3 |
| ATLVT012XX3075 | 48009 | TSESAAATNDNT | −1.71 | 0.55 | −1.73 | −3.97 | ATLVT012XX3121 | 48055 | TSETAAATNDNA | 0.75 | 2.84 | −0.22 | 0.6 |
| ATLVT012XX3076 | 48010 | TSESAASSNDNA | −0.46 | −0.87 | −0.9 | −0.66 | ATLVT012XX3122 | 48056 | TSETAAATNDNH | 1.59 | 0.9 | −0.99 | 0.39 |
| ATLVT012XX3077 | 48011 | TSESAASSNDNH | 1.4 | 1.44 | −0.26 | −2.67 | ATLVT012XX3123 | 48057 | TSETAAATNDNT | 1.48 | 3 | −1.53 | −1.74 |
| ATLVT012XX3078 | 48012 | TSESAASSNDNT | 1.06 | 0.16 | −1.09 | −3.3 | ATLVT012XX3124 | 48058 | TSETAASSNDNA | −1.5 | 1.69 | −0.21 | 0.24 |
| ATLVT012XX3079 | 48013 | TSESAASTNDNA | −0.17 | −0.72 | −1.89 | −2.09 | ATLVT012XX3125 | 48059 | TSETAASSNDNH | −2.72 | 1.49 | −1.04 | −0.1 |
| ATLVT012XX3080 | 48014 | TSESAASTNDNH | −2.37 | 0.53 | −1.59 | −2.55 | ATLVT012XX3126 | 48060 | TSETAASSNDNT | −2.83 | −1.12 | −1.14 | −0.11 |
| ATLVT012XX3081 | 48015 | TSESAASTNDNT | −0.13 | −0.63 | 0.3 | −1.96 | ATLVT012XX3127 | 48061 | TSETAASTNDNA | 1.06 | −1.56 | 0.9 | −0.93 |
| ATLVT012XX3082 | 48016 | TSESAGASNDNA | 0.8 | 0.08 | −2.42 | −1.51 | ATLVT012XX3128 | 48062 | TSETAASTNDNH | −0.34 | −1.41 | −0.38 | −1.91 |
| ATLVT012XX3129 | 48063 | TSETAASTNDNT | 0.76 | −2.05 | −0.71 | 0.15 | ATLVT012XX3175 | 48109 | TSQAAASTNDNA | −1.3 | −1.46 | −1.32 | −1.45 |
| ATLVT01XXX3130 | 48064 | TSETAGASNDNA | −0.47 | 1.28 | −1.44 | −0.57 | ATLVT012XX3176 | 48110 | TSQAAASTNDNH | −0.2 | −1.5 | −0.33 | −0.77 |
| ATLVT012XX3131 | 48065 | TSETAGASNDNH | −0.08 | 0.32 | −1.7 | 1.08 | ATLVT012XX3177 | 48111 | TSQAAASTNDNT | −0.81 | −1.16 | −1.49 | −2.34 |
| ATLVT012XX3132 | 48066 | TSETAGASNDNT | 0.09 | 0.98 | −0.65 | −1.32 | ATLVT012XX3178 | 48112 | TSQAAGASNDNA | 1.95 | 2.69 | −1.88 | −1.04 |
| ATLVT012XX3133 | 48067 | TSETAGATNDNA | −0.37 | 3.8 | −1.29 | 0.48 | ATLVT012XX3179 | 48113 | TSQAAGASNDNH | 1.45 | −0.82 | −1.26 | −3.52 |
| ATLVT012XX3134 | 48068 | TSETAGATNDNH | −0.22 | 0.44 | 0.03 | −0.22 | ATLVT012XX3180 | 48114 | TSQAAGASNDNT | 1.07 | 2 | −3.1 | −3.27 |
| ATLVT012XX3135 | 48069 | TSETAGATNDNT | −0.53 | 2.3 | 0.3 | −1.74 | ATLVT012XX3181 | 48115 | TSQAAGATNDNA | −0.25 | 3.29 | −3.15 | −2.42 |
| ATLVT012XX3136 | 48070 | TSETAGSSNDNA | −0.32 | −0.42 | 0.62 | −2.7 | ATLVT012XX3182 | 48116 | TSQAAGATNDNH | 1.07 | 3.37 | −3.28 | −1.72 |
| ATLVT012XX3137 | 48071 | TSETAGSSNDNH | −1.14 | 2.59 | −0.63 | −1.41 | ATLVT012XX3183 | 48117 | TSQAAGATNDNT | 1.19 | 1.45 | −3.57 | −1.89 |
| ATLVT012XX3138 | 48072 | TSETAGSSNDNT | −0.96 | −0.79 | −0.01 | −2.25 | ATLVT012XX3184 | 48118 | TSQAAGSSNDNA | −3.18 | −1.12 | −1.21 | −2.1 |
| ATLVT012XX3139 | 48073 | TSETAGSTNDNA | 0.99 | 0.99 | −0.32 | −2.05 | ATLVT012XX3185 | 48119 | TSQAAGSSNDNH | −2.94 | −1.67 | −3.15 | −3.45 |
| ATLVT012XX3140 | 48074 | TSETAGSTNDNH | 0.35 | −1.78 | −1.03 | −1.35 | ATLVT012XX3186 | 48120 | TSQAAGSSNDNT | −1.28 | −0.65 | −2.94 | −2.91 |
| ATLVT012XX3141 | 48075 | TSETAGSTNDNT | 0.42 | −0.67 | −0.7 | −1.06 | ATLVT012XX3187 | 48121 | TSQAAGSTNDNA | −1.14 | −1.02 | −3.59 | −3.86 |
| ATLVT012XX3142 | 48076 | TSETGAASNDNA | −2.62 | 0.77 | −2.94 | −4.64 | ATLVT012XX3188 | 48122 | TSQAAGSTNDNH | 0.38 | 0.87 | −2.64 | −1.22 |
| ATLVT012XX3143 | 48077 | TSETGAASNDNH | −1.97 | 5.32 | −0.66 | −3.82 | ATLVT012XX3189 | 48123 | TSQAAGSTNDNT | 1.65 | 0.89 | −1.79 | −1.77 |
| ATLVT012XX3144 | 48078 | TSETGAASNDNT | −1.05 | −0.76 | 0.34 | −4 | ATLVT012XX3190 | 48124 | TSQAGAASNDNA | −2.09 | −1.83 | −2.92 | −2.82 |
| ATLVT012XX3145 | 48079 | TSETGAATNDNA | −2.64 | −1.09 | −1.55 | −1.65 | ATLVT012XX3191 | 48125 | TSQAGAASNDNH | −2.77 | −2.55 | −1.97 | −2.9 |
| ATLVT012XX3146 | 48080 | TSETGAATNDNH | −1.6 | −1.39 | −2.52 | −0.85 | ATLVT012XX3192 | 48126 | TSQAGAASNDNT | −2.76 | −0.01 | −3.39 | −4.11 |
| ATLVT012XX3147 | 48081 | TSETGAATNDNT | −1.18 | −1.99 | −2.35 | −1.89 | ATLVT012XX3193 | 48127 | TSQAGAATNDNA | −1.71 | 0.45 | −2.84 | −2.6 |
| ATLVT012XX3148 | 48082 | TSETGASSNDNA | −2.48 | −0.4 | −0.84 | −1.92 | ATLVT012XX3194 | 48128 | TSQAGAATNDNH | 2.38 | −0.78 | −1.38 | −3.33 |
| ATLVT012XX3149 | 48083 | TSETGASSNDNH | −0.33 | −2.78 | −0.7 | −2.21 | ATLVT012XX3195 | 48129 | TSQAGAATNDNT | −1.21 | −0.29 | −1.27 | −2.27 |
| ATLVT012XX3150 | 48084 | TSETGASSNDNT | −2.56 | −2.3 | −0.33 | −0.74 | ATLVT012XX3196 | 48130 | TSQAGASSNDNA | 1.25 | −1.06 | −1.25 | −1.75 |
| ATLVT012XX3151 | 48085 | TSETGASTNDNA | −2.22 | −1.69 | 0.36 | −3.12 | ATLVT012XX3197 | 48131 | TSQAGASSNDNH | 1.44 | −1.11 | 0.41 | −2.05 |
| ATLVT012XX3152 | 48086 | TSETGASTNDNH | −0.94 | 2.9 | −0.39 | −1.54 | ATLVT012XX3198 | 48132 | TSQAGASSNDNT | −0.91 | 0.19 | 0.95 | −2.29 |
| ATLVT012XX3153 | 48087 | TSETGASTNDNT | 0.16 | −2.05 | −0.98 | −2.45 | ATLVT012XX3199 | 48133 | TSQAGASTNDNA | −0.15 | 0.62 | 0 | 3.3 |
| ATLVT012XX3154 | 48088 | TSETGGASNDNA | 0.23 | 1.52 | −0.07 | 1.54 | ATLVT012XX3200 | 48134 | TSQAGASTNDNH | −0.72 | −1.53 | −0.28 | −1.64 |
| ATLVT012XX3155 | 48089 | TSETGGASNDNH | 1.09 | −0.08 | 0.65 | 1.44 | ATLVT012XX3201 | 48135 | TSQAGASTNDNT | −0.94 | 0.13 | −0.33 | −0.03 |
| ATLVT012XX3156 | 48090 | TSETGGASNDNT | 1.39 | 1.1 | 0.45 | −1.19 | ATLVT012XX3202 | 48136 | TSQAGGASNDNA | 1.29 | 0.94 | −0.94 | 0.81 |
| ATLVT012XX3157 | 48091 | TSETGGATNDNA | −0.92 | −1.14 | −0.12 | 0.58 | ATLVT012XX3203 | 48137 | TSQAGGASNDNH | 2.63 | 2.07 | −1.94 | 1.68 |
| ATLVT012XX3158 | 48092 | TSETGGATNDNH | 1.78 | 2.46 | 0.25 | 2.94 | ATLVT012XX3204 | 48138 | TSQAGGASNDNT | 2.32 | 0.44 | −0.31 | −0.34 |
| ATLVT012XX3159 | 48093 | TSETGGATNDNT | 0.73 | 0.83 | 0.16 | −0.28 | ATLVT012XX3205 | 48139 | TSQAGGATNDNA | 1.43 | 1.83 | −2.08 | 0.98 |
| ATLVT012XX3160 | 48094 | TSETGGSSNDNA | −1.18 | −0.48 | 0.61 | 0.17 | ATLVT012XX3206 | 48140 | TSQAGGATNDNH | 7.06 | 4.19 | −0.27 | 2.54 |
| ATLVT012XX3161 | 48095 | TSETGGSSNDNH | −1.93 | 3.58 | −0.82 | −2.09 | ATLVT012XX3207 | 48141 | TSQAGGATNDNT | 4.17 | 0.79 | −1.45 | 0.25 |
| ATLVT012XX3162 | 48096 | TSETGGSSNDNT | −1.02 | −0.55 | −0.86 | −2.39 | ATLVT012XX3208 | 48142 | TSQAGGSSNDNA | 0.17 | −1.11 | −0.65 | −0.18 |
| ATLVT012XX3163 | 48097 | TSETGGSTNDNA | −0.56 | 0.58 | −0.56 | −1.05 | ATLVT012XX3209 | 48143 | TSQAGGSSNDNH | −2.01 | −0.59 | 0.39 | 1.48 |
| ATLVT012XX3164 | 48098 | TSETGGSTNDNH | −0.11 | 2.6 | −0.56 | 1.01 | ATLVT012XX3210 | 48144 | TSQAGGSSNDNT | −0.17 | −1.27 | −0.33 | −1.37 |
| ATLVT012XX3165 | 48099 | TSETGGSTNDNT | 0.44 | 1.25 | −0.09 | −0.91 | ATLVT012XX3211 | 48145 | TSQAGGSTNDNA | 1.01 | 0.81 | −1.47 | 0.83 |
| ATLVT012XX3166 | 48100 | TSQAAAASNDNA | 0.76 | 3.59 | 0.31 | −0.16 | ATLVT012XX3212 | 48146 | TSQAGGSTNDNH | 0.86 | 0.78 | −0.07 | 1.67 |
| ATLVT012XX3167 | 48101 | TSQAAAASNDNH | 3.43 | 1.62 | 0.19 | −1.87 | ATLVT012XX3213 | 48147 | TSQAGGSTNDNT | 0.6 | 1.27 | 1.62 | −0.58 |
| ATLVT012XX3168 | 48102 | TSQAAAASNDNT | 2.44 | 2.15 | −0.74 | −0.8 | ATLVT012XX3214 | 48148 | TSQSAAASNDNA | −0.5 | −0.12 | 0.05 | −1.3 |
| ATLVT012XX3169 | 48103 | TSQAAAATNDNA | 0.12 | −0.16 | 0.25 | 0.11 | ATLVT012XX3215 | 48149 | TSQSAAASNDNH | −0.21 | 2.85 | −0.59 | −0.89 |
| ATLVT012XX3170 | 48104 | TSQAAAATNDNH | 3.78 | −0.2 | −0.61 | 0.85 | ATLVT012XX3216 | 48150 | TSQSAAASNDNT | −1.73 | 3.76 | −1.04 | −1.54 |
| ATLVT012XX3171 | 48105 | TSQAAAATNDNT | 1.34 | 2.25 | −0.11 | 0.13 | ATLVT012XX3217 | 48151 | TSQSAAATNDNA | −1.21 | −0.12 | −0.83 | −1.33 |
| ATLVT012XX3172 | 48106 | TSQAAASSNDNA | −1.38 | −0.22 | −0.57 | −1.53 | ATLVT012XX3218 | 48152 | TSQSAAATNDNH | 0.16 | 1.45 | −0.34 | −1.87 |
| ATLVT012XX3173 | 48107 | TSQAAASSNDNH | 1.82 | −2.14 | −0.03 | −3.45 | ATLVT012XX3219 | 48153 | TSQSAAATNDNT | −1.93 | 0.86 | −2.11 | −1.27 |
| ATLVT012XX3174 | 48108 | TSQAAASSNDNT | 0.71 | −2.21 | −0.67 | −0.89 | ATLVT012XX3220 | 48154 | TSQSAASSNDNA | −0.85 | −1.28 | −1.08 | −0.2 |
| ATLVT012XX3221 | 48155 | TSQSAASSNDNH | −1.72 | −2.21 | 0.41 | −2.21 | ATLVT012XX3267 | 48201 | TSQTAAATNDNT | 0.81 | −1.15 | 0.4 | 1.33 |
| ATLVT01XXX3222 | 48156 | TSQSAASSNDNT | 1.18 | −2.13 | 0.8 | −1.66 | ATLVT012XX3268 | 48202 | TSQTAASSNDNA | −1.55 | 0.25 | −0.46 | 0.73 |
| ATLVT012XX3223 | 48157 | TSQSAASTNDNA | −0.05 | 0.4 | −1.19 | 0.57 | ATLVT012XX3269 | 48203 | TSQTAASSNDNH | −1.55 | 0.46 | 0 | −1.89 |
| ATLVT012XX3224 | 48158 | TSQSAASTNDNH | −2.45 | 1.03 | 0.59 | 1.91 | ATLVT012XX3270 | 48204 | TSQTAASSNDNT | −1.85 | 0.76 | −1.76 | −0.22 |
| ATLVT012XX3225 | 48159 | TSQSAASTNDNT | −1.26 | 0.67 | 0.16 | 1.24 | ATLVT012XX3271 | 48205 | TSQTAASTNDNA | 1.55 | −1.57 | −0.64 | 0.03 |
| ATLVT012XX3226 | 48160 | TSQSAGASNDNA | −1.89 | −0.37 | −0.75 | −1.76 | ATLVT012XX3272 | 48206 | TSQTAASTNDNH | 1.63 | −1.69 | −1.23 | −0.09 |
| ATLVT012XX3227 | 48161 | TSQSAGASNDNH | −0.99 | 1.59 | −1.6 | −0.66 | ATLVT012XX3273 | 48207 | TSQTAASTNDNT | 0.84 | −1.43 | −0.53 | 1.71 |
| ATLVT012XX3228 | 48162 | TSQSAGASNDNT | 1.26 | 0.89 | −0.89 | −1.55 | ATLVT012XX3274 | 48208 | TSQTAGASNDNA | 2.93 | 3.33 | −2.81 | −2.04 |
| ATLVT012XX3229 | 48163 | TSQSAGATNDNA | 3.34 | −0.96 | 0.12 | 0.25 | ATLVT012XX3275 | 48209 | TSQTAGASNDNH | 1.61 | 0.63 | −0.31 | −1.42 |
| ATLVT01ZXX3230 | 48164 | TSQSAGATNDNH | 3.83 | −0.32 | 0.07 | 2.23 | ATLVT012XX3276 | 48210 | TSQTAGASNDNT | 2.36 | 2.62 | −2.15 | −1.59 |
| ATLVT012XX3231 | 48165 | TSQSAGATNDNT | 2.06 | 3.42 | −2.05 | 1.05 | ATLVT012XX3277 | 48211 | TSQTAGATNDNA | −1.53 | −0.77 | −0.31 | −0.67 |
| ATLVT012XX3232 | 48166 | TSQSAGSSNDNA | −1.57 | −1.3 | −1.21 | 1.28 | ATLVT012XX3278 | 48212 | TSQTAGATNDNH | 2.66 | 2.7 | 0.28 | 1.11 |
| ATLVT012XX3233 | 48167 | TSQSAGSSNDNH | −1.04 | 1.4 | 0.1 | 0.52 | ATLVT012XX3279 | 48213 | TSQTAGATNDNT | −0.36 | −0.5 | −1.39 | −2.04 |
| ATLVT012XX3234 | 48168 | TSQSAGSSNDNT | −0.17 | −0.97 | −0.57 | −1.87 | ATLVT012XX3280 | 48214 | TSQTAGSSNDNA | −0.55 | −0.83 | −1.21 | −2.31 |
| ATLVT012XX3235 | 48169 | TSQSAGSTNDNA | 0.7 | −0.69 | 0.46 | −1.28 | ATLVT012XX3281 | 48215 | TSQTAGSSNDNH | 0 | −1.47 | −0.89 | 1.97 |
| ATLVT012XX3236 | 48170 | TSQSAGSTNDNH | 0.81 | 0.32 | −0.77 | −1.53 | ATLVT012XX3282 | 48216 | TSQTAGSSNDNT | 0.47 | 0.28 | −1.29 | −0.95 |
| ATLVT012XX3237 | 48171 | TSQSAGSTNDNT | −0.25 | −0.81 | 0.09 | −0.6 | ATLVT012XX3283 | 48217 | TSQTAGSTNDNA | 0.01 | −1.48 | −0.68 | 0.49 |
| ATLVT012XX3238 | 48172 | TSQSGAASNDNA | −0.49 | −1.41 | −0.62 | −0.22 | ATLVT012XX3284 | 48218 | TSQTAGSTNDNH | −0.07 | −1.56 | −0.8 | 0.7 |
| ATLVT012XX3239 | 48173 | TSQSGAASNDNH | −1.52 | −1.12 | −0.33 | −0.86 | ATLVT012XX3285 | 48219 | TSQTAGSTNDNT | 1.18 | −1.81 | −0.07 | −0.2 |
| ATLVT012XX3240 | 48174 | TSQSGAASNDNT | −1.12 | 1.1 | −0.08 | −1.98 | ATLVT012XX3286 | 48220 | TSQTGAASNDNA | −0.88 | −0.72 | −2.28 | −1.63 |
| ATLVT012XX3241 | 48175 | TSQSGAATNDNA | −0.81 | −0.14 | −0.17 | −1.91 | ATLVT012XX3287 | 48221 | TSQTGAASNDNH | −0.87 | 0.64 | −1.74 | −0.53 |
| ATLVT012XX3242 | 48176 | TSQSGAATNDNH | −0.72 | −0.9 | −0.71 | 0.57 | ATLVT012XX3288 | 48222 | TSQTGAASNDNT | 0.57 | 1 | −2.3 | −2.03 |
| ATLVT01XXX3243 | 48177 | TSQSGAATNDNT | −0.09 | −0.74 | −1.45 | 0.18 | ATLVT012XX3289 | 48223 | TSQTGAATNDNA | −0.82 | −0.3 | −1.47 | −1.57 |
| ATLVT012XX3244 | 48178 | TSQSGASSNDNA | 0.48 | −1.84 | −2.11 | 0.08 | ATLVT012XX3290 | 48224 | TSQTGAATNDNH | 0.19 | −0.59 | −1.2 | −2.21 |
| ATLVT012XX3245 | 48179 | TSQSGASSNDNH | −0.74 | −2.01 | −0.9 | −0.63 | ATLVT012XX3291 | 48225 | TSQTGAATNDNT | 0.22 | −0.88 | −1.88 | −1.53 |
| ATLVT012XX3246 | 48180 | TSQSGASSNDNT | 1.54 | −2.57 | −1.86 | 0.11 | ATLVT012XX3292 | 48226 | TSQTGASSNDNA | −1.42 | −1.65 | −1.25 | 0.05 |
| ATLVT012XX3247 | 48181 | TSQSGASTNDNA | −1.66 | −0.73 | 1.01 | −1.52 | ATLVT012XX3293 | 48227 | TSQTGASSNDNH | −1.16 | −1.25 | −0.64 | −1.5 |
| ATLVT012XX3248 | 48182 | TSQSGASTNDNH | −1.02 | −1.89 | 1.12 | −0.04 | ATLVT012XX3294 | 48228 | TSQTGASSNDNT | −1.19 | −2.23 | −1.71 | −1.18 |
| ATLVT012XX3249 | 48183 | TSQSGASTNDNT | 1.56 | 0.21 | −0.68 | −1.04 | ATLVT012XX3295 | 48229 | TSQTGASTNDNA | −1.78 | 0.33 | 1.59 | −1.05 |
| ATLVT012XX3250 | 48184 | TSQSGGASNDNA | 2.19 | 3.05 | −0.14 | −1.13 | ATLVT012XX3296 | 48230 | TSQTGASTNDNH | −1.88 | 1.4 | −0.51 | 0.43 |
| ATLVT012XX3251 | 48185 | TSQSGGASNDNH | 3.45 | 5.8 | 1.09 | 2.97 | ATLVT012XX3297 | 48231 | TSQTGASTNDNT | −1.06 | 2.52 | −0.01 | −1.3 |
| ATLVT012XX3252 | 48186 | TSQSGGASNDNT | 2.23 | 2.09 | −0.27 | 0.04 | ATLVT012XX3298 | 48232 | TSQTGGASNDNA | 2.44 | 4.93 | 0.7 | 2.86 |
| ATLVT012XX3253 | 48187 | TSQSGGATNDNA | 2.88 | 4.06 | 0.67 | 1.19 | ATLVT012XX3299 | 48233 | TSQTGGASNDNH | 2.1 | 2.18 | −0.45 | 2.14 |
| ATLVT012XX3254 | 48188 | TSQSGGATNDNH | 7 | 7.59 | 0.64 | 4.47 | ATLVT012XX3300 | 48234 | TSQTGGASNDNT | 2.3 | 2.42 | −0.49 | 0.78 |
| ATLVT012XX3255 | 48189 | TSQSGGATNDNT | 2.66 | 2.47 | 0.81 | 0.6 | ATLVT012XX3301 | 48235 | TSQTGGATNDNA | 4.03 | 2.06 | −0.34 | 1.53 |
| ATLVT012XX3256 | 48190 | TSQSGGSSNDNA | 0.42 | 0.91 | 0.89 | 0.15 | ATLVT012XX3302 | 48236 | TSQTGGATNDNH | 7.75 | 8.54 | 0.7 | 4.36 |
| ATLVT012XX3257 | 48191 | TSQSGGSSNDNH | 1.18 | 0.55 | 0.07 | 1.33 | ATLVT012XX3303 | 48237 | TSQTGGATNDNT | 4.25 | 2.93 | 0.18 | 0.67 |
| ATLVT012XX3258 | 48192 | TSQSGGSSNDNT | 1.08 | 0.36 | 1.46 | −1.27 | ATLVT012XX3304 | 48238 | TSQTGGSSNDNA | 0.13 | −0.39 | −1.21 | −1.67 |
| ATLVT01XXX3259 | 48193 | TSQSGGSTNDNA | 1.58 | 0.97 | 0.19 | 0.76 | ATLVT012XX3305 | 48239 | TSQTGGSSNDNH | 1.43 | −0.18 | −1.33 | −0.23 |
| ATLVT012XX3260 | 48194 | TSQSGGSTNDNH | 1.06 | 3.08 | −0.97 | 1.36 | ATLVT012XX3306 | 48240 | TSQTGGSSNDNT | 0.94 | 0.06 | −1.31 | 0.36 |
| ATLVT012XX3261 | 48195 | TSQSGGSTNDNT | 1.36 | 2.18 | −0.52 | 1 | ATLVT012XX3307 | 48241 | TSQTGGSTNDNA | 3.95 | 1.51 | 0.17 | 2.61 |
| ATLVT012XX3262 | 48196 | TSQTAAASNDNA | −1.92 | 0.81 | −0.07 | −1.8 | ATLVT012XX3308 | 48242 | TSQTGGSTNDNH | 2.77 | 2.54 | −0.28 | 3.16 |
| ATLVT012XX3263 | 48197 | TSQTAAASNDNH | −0.7 | −0.42 | −0.49 | −3.56 | ATLVT012XX3309 | 48243 | TSQTGGSTNDNT | 3.46 | 3.02 | −0.3 | −0.26 |
| ATLVT012XX3264 | 48198 | TSQTAAASNDNT | −0.44 | −0.6 | −0.92 | −1.65 | ATLVT012XX3310 | 48244 | TSTAAAASNDNA | 0.73 | −1.12 | −1.32 | 1.5 |
| ATLVT012XX3265 | 48199 | TSQTAAATNDNA | −1.15 | −0.71 | −1.14 | 0.75 | ATLVT012XX3311 | 48245 | TSTAAAASNDNH | 0.74 | −0.89 | −0.61 | −0.55 |
| ATLVT012XX3266 | 48200 | TSQTAAATNDNH | 0.84 | 2.72 | −1.11 | −0.77 | ATLVT012XX3312 | 48246 | TSTAAAASNDNT | 1.92 | −0.22 | −1.53 | 0.12 |
| ATLVT012XX3313 | 48247 | TSTAAAATNDNA | 1.58 | −1.22 | −1.08 | 0.31 | ATLVT012XX3359 | 48293 | TSTSAAASNDNH | 2.11 | −0.44 | −0.71 | −0.64 |
| ATLVT012XX3314 | 48248 | TSTAAAATNDNH | 2.76 | −0.07 | −0.01 | −0.69 | ATLVT012XX3360 | 48294 | TSTSAAASNDNT | 2.1 | 1.62 | −0.72 | −1.29 |
| ATLVT012XX3315 | 48249 | TSTAAAATNDNT | 3.73 | 1.01 | 0.08 | −0.9 | ATLVT012XX3361 | 48295 | TSTSAAATNDNA | 2.3 | −0.19 | −0.95 | −0.14 |
| ATLVT012XX3316 | 48250 | TSTAAASSNDNA | 0.93 | 1.15 | −1.08 | 0.55 | ATLVT012XX3362 | 48296 | TSTSAAATNDNH | 0.85 | 1.98 | −0.81 | −0.59 |
| ATLVT012XX3317 | 48251 | TSTAAASSNDNH | −1.85 | −1.37 | −0.83 | −0.14 | ATLVT012XX3363 | 48297 | TSTSAAATNDNT | 1.57 | −0.12 | −0.63 | −1.96 |
| ATLVT012XX3318 | 48252 | TSTAAASSNDNT | 0.49 | 0.49 | −0.18 | 1.5 | ATLVT012XX3364 | 48298 | TSTSAASSNDNA | −0.14 | −0.36 | −0.65 | −1.61 |
| ATLVT012XX3319 | 48253 | TSTAAASTNDNA | 1.53 | −1.25 | −0.32 | −1.07 | ATLVT012XX3365 | 48299 | TSTSAASSNDNH | −1.84 | −1.22 | 0.72 | −0.12 |
| ATLVT012XX3320 | 48254 | TSTAAASTNDNH | 0.34 | −1.49 | −0.17 | −0.1 | ATLVT012XX3366 | 48300 | TSTSAASSNDNT | −0.5 | 0.24 | −0.92 | −1.5 |
| ATLVT012XX3321 | 48255 | TSTAAASTNDNT | 3.29 | −2.11 | −0.99 | −0.22 | ATLVT012XX3367 | 48301 | TSTSAASTNDNA | −1.5 | 2.73 | 0.08 | −0.21 |
| ATLVT012XX3322 | 48256 | TSTAAGASNDNA | −1.22 | −0.66 | 0.02 | −0.8 | ATLVT012XX3368 | 48302 | TSTSAASTNDNH | −1.79 | 2.84 | −0.83 | −0.83 |
| ATLVT012XX3323 | 48257 | TSTAAGASNDNH | −0.68 | −0.04 | −0.31 | −0.29 | ATLVT012XX3369 | 48303 | TSTSAASTNDNT | −2.11 | 1.99 | −0.4 | −1.13 |
| ATLVT012XX3324 | 48258 | TSTAAGASNDNT | −0.08 | 0.02 | −0.55 | −1.8 | ATLVT012XX3370 | 48304 | TSTSAGASNDNA | −0.55 | 5.11 | −1.15 | 2.38 |
| ATLVT012XX3325 | 48259 | TSTAAGATNDNA | −1.33 | 0.53 | 0 | 1.29 | ATLVT012XX3371 | 48305 | TSTSAGASNDNH | −1.33 | 1.37 | 0.18 | 1.05 |
| ATLVT012XX3326 | 48260 | TSTAAGATNDNH | 1.75 | 2.19 | −0.18 | 3.68 | ATLVT012XX3372 | 48306 | TSTSAGASNDNT | −0.36 | 1.5 | −0.04 | 1.8 |
| ATLVT012XX3327 | 48261 | TSTAAGATNDNT | 0.25 | 1.02 | −0.65 | −0.11 | ATLVT012XX3373 | 48307 | TSTSAGATNDNA | −3.03 | 3.25 | 1.03 | 1.73 |
| ATLVT012XX3328 | 48262 | TSTAAGSSNDNA | 0.24 | −2.33 | −1.07 | 0.61 | ATLVT012XX3374 | 48308 | TSTSAGATNDNH | −0.65 | 4.86 | −0.31 | 3.05 |
| ATLVT012XX3329 | 48263 | TSTAAGSSNDNH | −2.32 | −2.27 | −0.07 | 2.17 | ATLVT012XX3375 | 48309 | TSTSAGATNDNT | −0.81 | 1.24 | −0.03 | 1.07 |
| ATLVT012XX3330 | 48264 | TSTAAGSSNDNT | 1.26 | −2.05 | −1.21 | 0.15 | ATLVT012XX3376 | 48310 | TSTSAGSSNDNA | 2.18 | 0.2 | −2.76 | −1.19 |
| ATLVT012XX3331 | 48265 | TSTAAGSTNDNA | 0.41 | −0.04 | −0.67 | −0.45 | ATLVT012XX3377 | 48311 | TSTSAGSSNDNH | −0.91 | −0.71 | −1.56 | −2.26 |
| ATLVT012XX3332 | 48266 | TSTAAGSTNDNH | −1.01 | −1.6 | −1.11 | −0.26 | ATLVT012XX3378 | 48312 | TSTSAGSSNDNT | 1.69 | 2.14 | −1.55 | −1.59 |
| ATLVT012XX3333 | 48267 | TSTAAGSTNDNT | 0.98 | −0.51 | −2.53 | −0.73 | ATLVT012XX3379 | 48313 | TSTSAGSTNDNA | 0.71 | 2.53 | −0.92 | 0.25 |
| ATLVT012XX3334 | 48268 | TSTAGAASNDNA | 1.06 | −1.08 | −3.26 | −0.47 | ATLVT012XX3380 | 48314 | TSTSAGSTNDNH | −1.82 | 1.11 | 0.91 | 0.99 |
| ATLVT012XX3335 | 48269 | TSTAGAASNDNH | 1.04 | 0.95 | −1.88 | −1.91 | ATLVT012XX3381 | 48315 | TSTSAGSTNDNT | 0.81 | 3.15 | −0.68 | −0.25 |
| ATLVT012XX3336 | 48270 | TSTAGAASNDNT | 0.41 | −1.42 | −2.01 | −0.41 | ATLVT012XX3382 | 48316 | TSTSGAASNDNA | −0.81 | 1.36 | −1.83 | −1.78 |
| ATLVT012XX3337 | 48271 | TSTAGAATNDNA | 1.31 | −0.08 | −1.9 | −0.29 | ATLVT012XX3383 | 48317 | TSTSGAASNDNH | −0.48 | 3.64 | −1.24 | −1.31 |
| ATLVT012XX3338 | 48272 | TSTAGAATNDNH | 0.84 | 0.14 | −0.94 | −0.29 | ATLVT012XX3384 | 48318 | TSTSGAASNDNT | −1.45 | 1.09 | −1.44 | −0.54 |
| ATLVT012XX3339 | 48273 | TSTAGAATNDNT | −0.21 | 1.02 | −1.65 | 0.99 | ATLVT012XX3385 | 48319 | TSTSGAATNDNA | −2.85 | 1.97 | −0.14 | −1.33 |
| ATLVT012XX3340 | 48274 | TSTAGASSNDNA | 0.73 | −1.34 | −1.27 | −1.42 | ATLVT012XX3386 | 48320 | TSTSGAATNDNH | −2.18 | 0.78 | 0.2 | 1.56 |
| ATLVT012XX3341 | 48275 | TSTAGASSNDNH | 1.26 | −1.72 | −0.56 | −0.06 | ATLVT012XX3387 | 48321 | TSTSGAATNDNT | −1.67 | 3.39 | −0.1 | −1.3 |
| ATLVT012XX3342 | 48276 | TSTAGASSNDNT | 2.7 | 0.65 | −2.49 | −0.98 | ATLVT012XX3388 | 48322 | TSTSGASSNDNA | 0.02 | −1.66 | −0.68 | −2.34 |
| ATLVT012XX3343 | 48277 | TSTAGASTNDNA | 1.22 | 1.6 | −0.04 | 0.18 | ATLVT012XX3389 | 48323 | TSTSGASSNDNH | −1.09 | −1.92 | 0.83 | −1.32 |
| ATLVT012XX3344 | 48278 | TSTAGASTNDNH | 0.31 | 0.96 | −1.15 | −1.36 | ATLVT012XX3390 | 48324 | TSTSGASSNDNT | 0.12 | −1.12 | −1.2 | −1.68 |
| ATLVT012XX3345 | 48279 | TSTAGASTNDNT | 2.21 | 1.94 | −1.7 | −0.77 | ATLVT012XX3391 | 48325 | TSTSGASTNDNA | −1.33 | −0.21 | −0.27 | −1.1 |
| ATLVT012XX3346 | 48280 | TSTAGGASNDNA | 3.16 | 4.54 | −0.72 | 2.31 | ATLVT012XX3392 | 48326 | TSTSGASTNDNH | −2.71 | 2.06 | 0.58 | 0.82 |
| ATLVT012XX3347 | 48281 | TSTAGGASNDNH | 4.42 | 5.08 | 0.09 | 2.36 | ATLVT012XX3393 | 48327 | TSTSGASTNDNT | 0.08 | 0.17 | 0.95 | −1.57 |
| ATLVT012XX3348 | 48282 | TSTAGGASNDNT | 3.14 | 3.37 | 0.78 | 0.29 | ATLVT012XX3394 | 48328 | TSTSGGASNDNA | 3.36 | 3.99 | −1.09 | 2.32 |
| ATLVT012XX3349 | 48283 | TSTAGGATNDNA | 4.91 | 4.51 | 0.94 | 3.7 | ATLVT012XX3395 | 48329 | TSTSGGASNDNH | 4.71 | 5.12 | 0.46 | 2.41 |
| ATLVT012XX3350 | 48284 | TSTAGGATNDNH | 6.94 | 9.87 | −0.46 | 3.79 | ATLVT012XX3396 | 48330 | TSTSGGASNDNT | 4.05 | 4.39 | 0.69 | 1.27 |
| ATLVT012XX3351 | 48285 | TSTAGGATNDNT | 4.14 | 5.21 | −0.81 | 0.98 | ATLVT012XX3397 | 48331 | TSTSGGATNDNA | 3.23 | 4.7 | 0.26 | 2.39 |
| ATLVT012XX3352 | 48286 | TSTAGGSSNDNA | 2.05 | 2.75 | 0.36 | 2.44 | ATLVT012XX3398 | 48332 | TSTSGGATNDNH | 6.61 | 8.41 | 2.1 | 4.5 |
| ATLVT012XX3353 | 48287 | TSTAGGSSNDNH | 1.84 | 0.23 | −1 | −0.36 | ATLVT012XX3399 | 48333 | TSTSGGATNDNT | 3.61 | 4 | 0.28 | 0.85 |
| ATLVT012XX3354 | 48288 | TSTAGGSSNDNT | 4.17 | 2.37 | −0.4 | 1.29 | ATLVT012XX3400 | 48334 | TSTSGGSSNDNA | 3.08 | 2.74 | −0.54 | 1.86 |
| ATLVT012XX3355 | 48289 | TSTAGGSTNDNA | 4.52 | 5.06 | −0.43 | 2.2 | ATLVT012XX3401 | 48335 | TSTSGGSSNDNH | 0.71 | 1.03 | −0.38 | 0.45 |
| ATLVT012XX3356 | 48290 | TSTAGGSTNDNH | 5.32 | 3.15 | −0.37 | 3.49 | ATLVT012XX3402 | 48336 | TSTSGGSSNDNT | 2.92 | 3.19 | 0.36 | 0.94 |
| ATLVT012XX3357 | 48291 | TSTAGGSTNDNT | 3.51 | 5.13 | −0.28 | −0.48 | ATLVT012XX3403 | 48337 | TSTSGGSTNDNA | 3.58 | 5.96 | 1.23 | 2.33 |
| ATLVT012XX3358 | 48292 | TSTSAAASNDNA | 0.03 | 1.38 | −2.25 | 0.49 | ATLVT012XX3404 | 48338 | TSTSGGSTNDNH | 4.99 | 3.15 | 1.04 | 1.01 |
| ATLVT012XX3405 | 48339 | TSTSGGSTNDNT | 4.3 | 3.99 | 0.43 | −0.11 | ATLVT012XX3451 | 48385 | TSTTGGSTNDNA | 1.72 | 5.01 | 0.55 | 0.39 |
| ATLVT012XX3406 | 48340 | TSTTAAASNDNA | −0.03 | −0.28 | −1.02 | −2.32 | ATLVT012XX3452 | 48386 | TSTTGGSTNDNH | 1.28 | 2.64 | 1.49 | 2.31 |
| ATLVT012XX3407 | 48341 | TSTTAAASNDNH | 0.79 | 3.39 | −1.13 | −2.28 | ATLVT012XX3453 | 48387 | TSTTGGSTNDNT | 4 | 2.02 | −0.68 | −0.13 |
| ATLVT012XX3408 | 48342 | TSTTAAASNDNT | 0.64 | −0.88 | −1.18 | −1.44 | ATLVT012XXAAV9 | 48388 | NSTSGGSSNDNA | 10.85 | 13.11 | 1.65 | 3.83 |
| ATLVT012XX3409 | 48343 | TSTTAAATNDNA | 0.48 | 0 | 0.1 | −2.59 | ATLVT012XXAAV9 | 48389 | NSTSGASSNDNA | 3.35 | 3.29 | 1.18 | 1.56 |
| | | | | | | | L10 | | | | | | |
| ATLVT012XX3410 | 48344 | TSTTAAATNDNH | 0.85 | −1.13 | −0.78 | 0.46 | ATLVT012XXMUT | 48390 | NSTSGASTNDNA | 3.84 | 2.84 | 0.6 | 0 |
| ATLVT012XX3411 | 48345 | TSTTAAATNDNT | 2.01 | −0.7 | −0.7 | −2.67 | | | | | | | |
| ATLVT012XX3412 | 48346 | TSTTAASSNDNA | 0.6 | 0.48 | −0.9 | −1.73 | | | | | | | |
| ATLVT012XX3413 | 48347 | TSTTAASSNDNH | −0.63 | 2.81 | −1.27 | −1.16 | | | | | | | |
| ATLVT012XX3414 | 48348 | TSTTAASSNDNT | −0.69 | 0.38 | −1.34 | −1.46 | | | | | | | |

| | | | | | | |
|---|---|---|---|---|---|---|
| ATLVT012XX3415 | 48349 | TSTTAASTNDNA | −1.53 | 2.58 | 0.71 | 1.68 |
| ATLVT012XX3416 | 48350 | TSTTAASTNDNH | −1.84 | 0.35 | 1.57 | −1.8 |
| ATLVT012XX3417 | 48351 | TSTTAASTNDNT | −0.62 | 2.08 | −1.29 | 0.67 |
| ATLVT012XX3418 | 48352 | TSTTAGASNDNA | −1.07 | 0.27 | −1.74 | 1.52 |
| ATLVT012XX3419 | 48353 | TSTTAGASNDNH | 1.59 | 1.41 | −2.01 | 2.34 |
| ATLVT012XX3420 | 48354 | TSTTAGASNDNT | −0.03 | −0.15 | −1.07 | 0.24 |
| ATLVT012XX3421 | 48355 | TSTTAGATNDNA | 0.07 | 2.43 | −2.02 | 0.08 |
| ATLVT012XX3422 | 48356 | TSTTAGATNDNH | 0.84 | 3.02 | 0.75 | 3.26 |
| ATLVT012XX3423 | 48357 | TSTTAGATNDNT | 0.4 | −0.22 | 0.22 | −0.02 |
| ATLVT012XX3424 | 48358 | TSTTAGSSNDNA | 0.44 | 0.53 | −1.42 | 0.07 |
| ATLVT012XX3425 | 48359 | TSTTAGSSNDNH | −1.39 | −0.02 | −0.93 | −1.77 |
| ATLVT012XX3426 | 48360 | TSTTAGSSNDNT | 2.06 | −0.6 | −2.02 | −0.81 |
| ATLVT012XX3427 | 48361 | TSTTAGSTNDNA | 1 | 0.15 | 0.74 | 0.37 |
| ATLVT012XX3428 | 48362 | TSTTAGSTNDNH | 0.53 | 2.24 | −0.46 | 0.53 |
| ATLVT012XX3429 | 48363 | TSTTAGSTNDNT | 4.42 | 1.9 | −0.79 | 1.15 |
| ATLVT012XX3430 | 48364 | TSTTGAASNDNA | −0.07 | −1.67 | −2.66 | −2.07 |
| ATLVT012XX3431 | 48365 | TSTTGAASNDNH | −1.39 | 0.27 | −1.78 | −2.13 |
| ATLVT012XX3432 | 48366 | TSTTGAASNDNT | −0.79 | −0.15 | −2.77 | −1.77 |
| ATLVT012XX3433 | 48367 | TSTTGAATNDNA | 0.53 | −0.29 | −0.18 | −1.87 |
| ATLVT012XX3434 | 48368 | TSTTGAATNDNH | 1.24 | 0.54 | −1.39 | −0.32 |
| ATLVT012XX3435 | 48369 | TSTTGAATNDNT | 3.07 | 1.76 | −0.39 | −1.55 |
| ATLVT012XX3436 | 48370 | TSTTGASSNDNA | −1.34 | −1.52 | −2.06 | −1.36 |
| ATLVT012XX3437 | 48371 | TSTTGASSNDNH | −0.18 | .1.29 | −1.45 | 1.58 |
| ATLVT012XX3438 | 48372 | TSTTGASSNDNT | 1.62 | 0.99 | −0.37 | −0.64 |
| ATLVT012XX3439 | 48373 | TSTTGASTNDNA | 1.91 | −0.93 | 0.91 | −0.6 |
| ATLVT012XX3440 | 48374 | TSTTGASTNDNH | 0.59 | 0.3 | −0.73 | −1.36 |
| ATLVT012XX3441 | 48375 | TSTTGASTNDNT | 2.7 | 1.7 | −0.24 | −1.65 |
| ATLVT012XX3442 | 48376 | TSTTGGASNDNA | 1.69 | 1.28 | −0.34 | 0.96 |
| ATLVT012XX3443 | 48377 | TSTTGGASNDNH | 3.73 | 3.97 | 0.17 | 2.42 |
| ATLVT012XX3444 | 48378 | TSTTGGASNDNT | 1.71 | 2.11 | −0.39 | 1.28 |
| ATLVT012XX3445 | 48379 | TSTTGGATNDNA | 1.81 | 2.32 | 0.95 | 1.68 |
| ATLVT012XX3446 | 48380 | TSTTGGATNDNH | 5.6 | 5.73 | 1.1 | 4.5 |
| ATLVT012XX3447 | 48381 | TSTTGGATNDNT | 2.65 | 3.46 | −0.21 | 2.45 |
| ATLVT012XX3448 | 48382 | TSTTGGSSNDNA | 3.4 | 2.76 | 0.14 | 0.03 |
| ATLVT012XX3449 | 48383 | TSTTGGSSNDNH | 3.08 | 0.08 | 0.37 | 2.44 |
| ATLVT012XX3450 | 48384 | TSTTGGSSNDNT | 4.31 | 1.1 | −0.82 | 1.08 |

[1201] Provided below is Table 29. Abbreviations for Table 29 are as follows: Bicep—Biceps femoris, Quad—Quadriceps, Diap.—Diaphragm, Atria—Heart—Atria, Vent.—Heart—Ventricle Wall, and Liver—Liver lobe. Table 29 shows individual tissue enrichment scores for RNA for each AAV variant. Data is provided for tissues including Bicep, Quad, Diaph. Atria, Vent., and Liver.

Lengthy table referenced here
US20260062450A1-20260305-T00002
Please refer to the end of the specification for access instructions.

[1202] Provided below is Table 30. Abbreviations for Table 30 are as follows: Diaph.—Diapgrahm. Table 30 shows individual tissues enrichment scores for DNA for each AAV. Data is provided for tissues including Diaph., Heart, and Liver.

| | | SEQ ID | | | | |
|---|---|---|---|---|---|---|
| Rank | variant_id | NO: | Sequence | Diaph. | Heart | Liver |
| 1 | ATLVT012XXAAV9 | 48388 | NSTSGGSSNDNA | 11.26 | 21.08 | 19.61 |
| 2 | ATLVT012XX1099 | 46033 | NSTSGGSTNDNA | 8.69 | 11.7 | 18.88 |
| 3 | ATLVT012XX1094 | 46028 | NSTSGGAINDNA | 9.77 | 11.36 | 16.69 |
| 4 | ATLVT012XX1100 | 46034 | NSTSGGSINDNH | 8.96 | 12.75 | 16.17 |
| 5 | ATLVT012XX1097 | 46031 | NSTSGGSSNDNH | 8.93 | 11.1 | 17.04 |
| 6 | ATLVT012XX1098 | 46032 | NSTSGGSSNDNT | 7.1 | 12.65 | 17.96 |
| 7 | ATLVT012XX1054 | 45988 | NSTAGGSTNDNA | 9.44 | 8.55 | 18.55 |
| 8 | ATLVT012XX1718 | 46652 | SGTTGGAINDNH | 9.02 | 11.49 | 14.24 |
| 9 | ATLVT012XX1147 | 46081 | NSTTGGSINDNA | 7.39 | 10.36 | 18.33 |
| 10 | ATLVT012XX1101 | 46035 | NSTSGGSTNDNT | 7.29 | 10.97 | 17.33 |
| 11 | ATLVT012XX1144 | 46078 | NSTTGGSSNDNA | 6.52 | 12.04 | 17.21 |
| 12 | ATLVT012XX1091 | 46025 | NSTSGGASNDNA | 6.47 | 11.28 | 17.71 |
| 13 | ATLVT012XX1051 | 45985 | NSTAGGSSNDNA | 6.16 | 11.23 | 18.3 |
| 14 | ATLVT012XX2246 | 47180 | SSTSGGATNDNH | 7.85 | 10.16 | 16.7 |
| 15 | ATLVT012XX1093 | 46027 | NSTSGGASNDNT | 6.54 | 9.78 | 18.77 |
| 16 | ATLVT012XX1149 | 46083 | NSTTGGSTNDNT | 6.24 | 10.29 | 18.46 |
| 17 | ATLVT012XX523 | 45457 | NGTSGGSSNDNA | 7.82 | 10.99 | 14.84 |
| 18 | ATLVT012XX1053 | 45987 | NSTAGGSSNDNT | 6.11 | 10.03 | 18.82 |
| 19 | ATLVT012XX2243 | 47177 | SSTSGGASNDNH | 7.76 | 10.44 | 15.33 |
| 20 | ATLVT012XX1096 | 46030 | NSTSGGATNDNT | 5.83 | 10.7 | 18.3 |
| 21 | ATLVT012XX1670 | 46604 | SGTSGGATNDNH | 7.4 | 10.6 | 14.42 |
| 22 | ATLVT012XX1484 | 46418 | SGQAGGSINDNH | 6.56 | 11.83 | 13.35 |
| 23 | ATLVT012XX2245 | 47179 | SSTSGGATNDNA | 7.25 | 11.27 | 12.73 |
| 24 | ATLVT012XX1142 | 46076 | NSTTGGAINDNH | 8.32 | 9.91 | 12.26 |
| 25 | ATLVT012XX1667 | 46601 | SGTSGGASNDNH | 8.08 | 9.25 | 13.33 |
| 26 | ATLVT012XX1056 | 45990 | NSTAGGSINDNT | 6.42 | 9 | 16.44 |
| 27 | ATLVT012XX1095 | 46029 | NSTSGGAINDNH | 7.35 | 9.55 | 13.74 |
| 28 | ATLVT012XX1146 | 46080 | NSTTGGSSNDNT | 4.38 | 9.72 | 18.52 |
| 29 | ATLVT012XX2294 | 47228 | SSTTGGATNDNH | 8.07 | 8.33 | 13.8 |
| 30 | ATLVT012XX1055 | 45989 | NSTAGGSTNDNH | 7.57 | 9.8 | 12.76 |
| 31 | ATLVT012XX1047 | 45981 | NSTAGGASNDNT | 7.32 | 6.43 | 17.28 |
| 32 | ATLVT012XX1045 | 45979 | NSTAGGASNDNA | 5.47 | 10.24 | 14.81 |
| 33 | ATLVT012XX1141 | 46075 | NSTIGGATNDNA | 8.09 | 9.81 | 10.79 |
| 34 | ATLVT012XX1092 | 46026 | NSTSGGASNDNH | 7.04 | 7.89 | 14.34 |
| 35 | ATLVT012XX528 | 45462 | NGTSGGSINDNT | 6.23 | 7.79 | 15.85 |
| 36 | ATLVT012XX1675 | 46609 | SGTSGGSINDNA | 8.34 | 7.56 | 12.42 |
| 37 | ATLVT012XX1148 | 46082 | NSTTGGSTNDNH | 7.59 | 7.87 | 13.09 |
| 38 | ATLVT012XX1676 | 46610 | SGTSGGSINDNH | 7.35 | 8.76 | 12.31 |
| 39 | ATLVT012XX571 | 45505 | NGTTGGSSNDNA | 7.68 | 8.14 | 12.16 |
| 40 | ATLVT012XX1052 | 45986 | NSTAGGSSNDNH | 6.03 | 8.92 | 13.8 |
| 41 | ATLVT012XX1140 | 46074 | NSTTGGASNDNT | 4.62 | 9.31 | 15.6 |
| 42 | ATLVT012XX1529 | 46463 | SGQSGGSSNDNH | 10.13 | 6.32 | 9.6 |
| 43 | ATLVT012XX1666 | 46600 | SGTSGGASNDNA | 8.04 | 8.48 | 10.31 |
| 44 | ATLVT012XX1143 | 46077 | NSTTGGAINDNT | 6.1 | 7.87 | 14.37 |
| 45 | ATLVT012XX1580 | 46514 | SGQTGGSINDNH | 7.4 | 9.22 | 10.25 |
| 46 | ATLVT012XX1574 | 46508 | SGQTGGATNDNH | 6.97 | 7.32 | 13.42 |
| 47 | ATLVT012XX2054 | 46988 | SSQAGGATNDNH | 5.35 | 9.86 | 12.93 |
| 48 | ATLVT012XX2251 | 47185 | SSTSGGSTNDNA | 5.82 | 10.22 | 11.43 |
| 49 | ATLVT012XX2248 | 47182 | SSTSGGSSNDNA | 7.39 | 9.43 | 9.71 |
| 50 | ATLVT012XX1532 | 46466 | SGQSGGSINDNH | 5.25 | 9.97 | 12.2 |
| 51 | ATLVT012XX2242 | 47176 | SSTSGGASNDNA | 5.92 | 8.57 | 12.68 |
| 52 | ATLVT012XX526 | 45460 | NGTSGGSINDNA | 6.74 | 7.48 | 12.57 |
| 53 | ATLVT012XX1244 | 46178 | SGASGGSINDNH | 7.97 | 9.41 | 7.95 |
| 54 | ATLVT012XX1579 | 46513 | SGQTGGSINDNA | 5.34 | 10.71 | 10.65 |
| 55 | ATLVT012XX1720 | 46654 | SGTTGGSSNDNA | 6.16 | 9.07 | 10.95 |
| 56 | ATLVT012XX2102 | 47036 | SSQSGGATNDNH | 5.66 | 9.05 | 11.81 |
| 57 | ATLVT012XX525 | 45459 | NGTSGGSSNDNT | 5.23 | 6.43 | 15.89 |
| 58 | ATLVT012XX2108 | 47042 | SSQSGGSINDNH | 8.25 | 9.5 | 6.64 |
| 59 | ATLVT012XX1719 | 46653 | SGTTGGATNDNT | 6.96 | 8.91 | 9.59 |
| 60 | ATLVT012XX2252 | 47186 | SSTSGGSINDNH | 7.08 | 9.42 | 8.72 |
| 61 | ATLVT012XX1715 | 46649 | SGTTGGASNDNH | 5.11 | 9.59 | 11.78 |
| 62 | ATLVT012XX1145 | 46079 | NSTTGGSSNDNH | 4.26 | 9.95 | 12.54 |
| 63 | ATLVT012XX1526 | 46460 | SGQSGGATNDNH | 5.71 | 7.86 | 12.68 |
| 64 | ATLVT012XX1668 | 46602 | SGTSGGASNDNI | 7.37 | 7.46 | 10.34 |
| 65 | ATLVT012XX527 | 45461 | NGTSGGSINDNH | 6.47 | 8.51 | 10.52 |
| 66 | ATLVT012XX2244 | 47178 | SSTSGGASNDNT | 5.83 | 7.69 | 12.28 |
| 67 | ATLVT012XX1046 | 45980 | NSTAGGASNDNH | 6.06 | 6.08 | 13.61 |
| 68 | ATLVT012XX1049 | 45983 | NSTAGGATNDNH | 6.07 | 6.27 | 13.11 |
| 69 | ATLVT012XX1531 | 46465 | SGQSGGSINDNA | 5.24 | 9.4 | 10.5 |
| 70 | ATLVT012XX3446 | 48380 | TSTTGGATNDNH | 6.59 | 9.29 | 8.31 |
| 71 | ATLVT012XX1671 | 46605 | SGTSGGATNDNT | 4.9 | 9.38 | 10.77 |
| 72 | ATLVT012XX2250 | 47184 | SSTSGGSSNDNT | 7.72 | 6.67 | 9.37 |
| 73 | ATLVT012XX2203 | 47137 | SSTAGGSTNDNA | 5.49 | 9.59 | 9.37 |
| 74 | ATLVT012XX1814 | 46748 | SSASGGATNDNH | 6.43 | 10.77 | 6.23 |
| 75 | ATLVT012XX2291 | 47225 | SSTTGGASNDNH | 5.52 | 11.37 | 6.81 |
| 76 | ATLVT012XX1138 | 46072 | NSTTGGASNDNA | 4.8 | 6.48 | 14.2 |
| 77 | ATLVT012XX1139 | 46073 | NSTTGGASNDNH | 5.25 | 8.78 | 10.45 |
| 78 | ATLVT012XX1050 | 45984 | NSTAGGATNDNT | 5.09 | 6.01 | 14.28 |
| 79 | ATLVT012XX576 | 45510 | NGTTGGSINDNT | 6.45 | 6.36 | 11.49 |
| 80 | ATLVT012XX2249 | 47183 | SSTSGGSSNDNH | 7.34 | 7.88 | 7.98 |
| 81 | ATLVT012XX524 | 45458 | NGTSGGSSNDNH | 6.4 | 6.89 | 10.8 |
| 82 | ATLVT012XX1533 | 46467 | SGQSGGSINDNT | 3.5 | 11.85 | 9.36 |
| 83 | ATLVT012XX1528 | 46462 | SGQSGGSSNDNA | 7.93 | 6.53 | 8.46 |
| 84 | ATLVT012XX1382 | 46316 | SGESGGATNDNH | 8.11 | 6.14 | 8.62 |
| 85 | ATLVT012XX3395 | 48329 | TSTSGGASNDNH | 4.27 | 10.33 | 9.68 |
| 86 | ATLVT012XX1523 | 46457 | SGQSGGASNDNH | 5.7 | 7.33 | 10.93 |
| 87 | ATLVT012XX960 | 45894 | NSQSGGSTNDNT | 8.43 | 5.47 | 8.52 |
| 88 | ATLVT012XX1238 | 46172 | SGASGGATNDNH | 5.37 | 7.89 | 10.65 |
| 89 | ATLVT012XX2300 | 47234 | SSTTGGSINDNH | 7.18 | 8.2 | 7.07 |
| 90 | ATLVT012XX1714 | 46648 | SGTTGGASNDNA | 6.11 | 8.36 | 8.66 |
| 91 | ATLVT012XX521 | 45455 | NGTSGGATNDNH | 7.45 | 5.79 | 9.66 |
| 92 | ATLVT012XX1717 | 46651 | SGTTGGATNDNA | 5.45 | 9.22 | 8.67 |
| 93 | ATLVT012XX1475 | 46409 | SGQAGGASNDNH | 4.94 | 7.89 | 11.24 |
| 94 | ATLVT012XX574 | 45508 | NGTTGGSTNDNA | 6.54 | 7.27 | 9.29 |
| 95 | ATLVT012XX1723 | 46657 | SGTTGGSINDNA | 6.19 | 7.07 | 9.96 |
| 96 | ATLVT012XX1724 | 46658 | SGTTGGSTNDNH | 5.42 | 8.09 | 9.92 |
| 97 | ATLVT012XX1722 | 46656 | SGTTGGSSNDNT | 5.89 | 7.3 | 10.09 |
| 98 | ATLVT012XX1672 | 46606 | SGTSGGSSNDNA | 5.82 | 6.96 | 10.63 |
| 99 | ATLVT012XXMUT1 | 48390 | NSTSGASTNDNA | 3.73 | 10.26 | 9.82 |
| 100 | ATLVT012XX517 | 45451 | NGTSGGASNDNA | 5.54 | 8.57 | 8.74 |
| 101 | ATLVT012XX575 | 45509 | NGTTGGSTNDNH | 6.44 | 6.48 | 9.76 |
| 102 | ATLVT012XX3400 | 48334 | TSTSGGSSNDNA | 3.09 | 11.22 | 9.38 |
| 103 | ATLVT012XX2150 | 47084 | SSQTGGATNDNH | 4.32 | 6.83 | 12.91 |
| 104 | ATLVT012XX519 | 45453 | NGTSGGASNDNT | 6.54 | 5.74 | 10.47 |
| 105 | ATLVT012XX1485 | 46419 | SGQAGGSINDNT | 6.45 | 6.19 | 10.03 |
| 106 | ATLVT012XX1483 | 46417 | SGQAGGSTNDNA | 6.14 | 6.75 | 9.82 |
| 107 | ATLVT012XX518 | 45452 | NGTSGGASNDNH | 8.18 | 4.75 | 8.86 |
| 108 | ATLVT012XX1622 | 46556 | SGTAGGATNDNH | 3.96 | 8 | 11.85 |
| 109 | ATLVT012XX1478 | 46412 | SGQAGGATNDNH | 3.81 | 9.14 | 10.57 |
| 110 | ATLVT012XX3398 | 48332 | ISTSGGATNDNH | 4.01 | 9.02 | 10.32 |
| 111 | ATLVT012XX1669 | 46603 | SGTSGGATNDNA | 6.42 | 6.39 | 9.37 |
| 112 | ATLVT012XX520 | 45454 | NGTSGGATNDNA | 7.24 | 6.05 | 8.2 |
| 113 | ATLVT012XX2253 | 47187 | SSTSGGSINDNT | 5.41 | 7.59 | 9.25 |
| 114 | ATLVT012XX2299 | 47233 | SSTIGGSTNDNA | 7.26 | 5.95 | 8.2 |
| 115 | ATLVT012XX2870 | 47804 | TGTTGGATNDNH | 5.09 | 6.66 | 10.78 |
| 116 | ATLVT012XX2099 | 47033 | SSQSGGASNDNH | 6.03 | 6.58 | 9.21 |
| 117 | ATLVT012XX1628 | 46562 | SGTAGGSINDNH | 3.87 | 9.58 | 8.95 |
| 118 | ATLVT012XX522 | 45456 | NGTSGGATNDNT | 4.75 | 6.91 | 10.8 |
| 119 | ATLVT012XX3403 | 48337 | TSTSGGSTNDNA | 4.34 | 8.42 | 9.53 |
| 120 | ATLVT012XX1048 | 45982 | NSTAGGATNDNA | 4.45 | 6.29 | 11.92 |
| 121 | ATLVT012XX1530 | 46464 | SGQSGGSSNDNT | 6.93 | 6.32 | 7.59 |
| 122 | ATLVT012XX477 | 45411 | NGTAGGSSNDNT | 3.86 | 7.4 | 11.31 |
| 123 | ATLVT012XX1436 | 46370 | SGETGGSINDNH | 7.84 | 6.48 | 5.47 |
| 124 | ATLVT012XX573 | 45507 | NGTTGGSSNDNT | 4.16 | 7.38 | 10.63 |
| 125 | ATLVT012XX1430 | 46364 | SGETGGATNDNH | 4.68 | 7.69 | 9.3 |
| 126 | ATLVT012XX2247 | 47181 | SSTSGGATNDNT | 3.72 | 6.99 | 11.63 |
| 127 | ATLVT012XX1627 | 46561 | SGTAGGSINDNA | 4.84 | 5.43 | 11.7 |
| 128 | ATLVT012XX1725 | 46659 | SGTTGGSINDNT | 3.93 | 7.56 | 10.49 |
| 129 | ATLVT012XX2293 | 47227 | SSTTGGATNDNA | 4.5 | 9.42 | 6.94 |
| 130 | ATLVT012XX3302 | 48236 | TSQTGGAINDNH | 3.59 | 6.48 | 12.1 |
| 131 | ATLVT012XX1721 | 46655 | SGTTGGSSNDNH | 6.18 | 5.93 | 8.38 |
| 132 | ATLVT012XX3404 | 48338 | TSTSGGSINDNH | 5.74 | 7.42 | 7.14 |
| 133 | ATLVT012XX3397 | 48331 | TSTSGGATNDNA | 5.77 | 6.41 | 8.22 |
| 134 | ATLVT012XX1623 | 46557 | SGTAGGAINDNT | 2.9 | 9.91 | 8.42 |
| 135 | ATLVT012XX2774 | 47708 | TGTAGGATNDNH | 7.08 | 2.26 | 11.07 |
| 136 | ATLVT012XX1626 | 46560 | SGTAGGSSNDNT | 2.66 | 9.25 | 9.64 |
| 137 | ATLVT012XX1958 | 46892 | SSESGGATNDNH | 7.1 | 7.32 | 4.5 |
| 138 | ATLVT012XX1527 | 46461 | SGQSGGAINDNT | 3.51 | 8.49 | 9.03 |
| 139 | ATLVT012XX2198 | 47132 | SSTAGGATNDNH | 4.15 | 3.92 | 13.77 |
| 140 | ATLVT012XX1677 | 46611 | SGTSGGSINDNT | 4.49 | 5.49 | 11.15 |
| 141 | ATLVT012XX2290 | 47224 | SSTTGGASNDNA | 5.14 | 8.62 | 5.88 |
| 142 | ATLVT012XX2197 | 47131 | SSTAGGATNDNA | 3.98 | 6.27 | 10.88 |
| 143 | ATLVT012XX3299 | 48233 | TSQTGGASNDNH | 4.31 | 8.29 | 7.7 |
| 144 | ATLVT012XX3394 | 48328 | TSTSGGASNDNA | 2.55 | 9.48 | 9.14 |
| 145 | ATLVT012XX1916 | 46850 | SSEAGGSTNDNH | 8.85 | 5.76 | 3.08 |
| 146 | ATLVT012XX1243 | 46177 | SGASGGSINDNA | 6.82 | 6.59 | 5.49 |
| 147 | ATLVT012XX1674 | 46608 | SGTSGGSSNDNI | 5.84 | 4.7 | 9.59 |
| 148 | ATLVT012XX2061 | 46995 | SSQAGGSINDNT | 4.8 | 6.96 | 8.42 |
| 149 | ATLVT012XX1474 | 46408 | SGQAGGASNDNA | 3.52 | 8.55 | 8.39 |
| 150 | ATLVT012XX959 | 45893 | NSQSGGSINDNH | 8.66 | 5.18 | 3.92 |
| 151 | ATLVT012XX1716 | 46650 | SGTTGGASNDNT | 4.75 | 4.39 | 11.62 |
| 152 | ATLVT012XXAAV9L10 | 48389 | NSTSGASSNDNA | 4.36 | 8.76 | 6.67 |
| 153 | ATLVT012XX1673 | 46607 | SGTSGGSSNDNH | 5.57 | 5.83 | 8.32 |
| 154 | ATLVT012XX2107 | 47041 | SSQSGGSINDNA | 6.01 | 6.96 | 6.09 |
| 155 | ATLVT012XX1571 | 46505 | SGQTGGASNDNH | 3.83 | 6.45 | 10.38 |
| 156 | ATLVT012XX2819 | 47753 | TGTSGGASNDNH | 7.29 | 4.28 | 7.16 |
| 157 | ATLVT012XX2205 | 47139 | SSTAGGSINDNT | 4.93 | 5.74 | 9.34 |
| 158 | ATLVT012XX471 | 45405 | NGTAGGASNDNT | 6.34 | 4.98 | 7.6 |
| 159 | ATLVT012XX2301 | 47235 | SSTTGGSTNDNT | 5.68 | 5.01 | 8.67 |
| 160 | ATLVT012XX1581 | 46515 | SGQTGGSINDNT | 3.22 | 7.96 | 9.04 |
| 161 | ATLVT012XX2201 | 47135 | SSTAGGSSNDNH | 4.61 | 7.83 | 6.73 |
| 162 | ATLVT012XX2295 | 47229 | SSTTGGATNDNT | 3.68 | 7.97 | 8.00 |
| 163 | ATLVT012XX1577 | 46511 | SGQTGGSSNDNH | 5.49 | 6.96 | 6.22 |
| 164 | ATLVT012XX1624 | 46558 | SGTAGGSSNDNA | 2.93 | 6.5 | 11.21 |
| 165 | ATLVT012XX1196 | 46130 | SGAAGGSINDNH | 2.79 | 7.46 | 10.12 |
| 166 | ATLVT012XX1573 | 46507 | SGQTGGATNDNA | 7.22 | 3.74 | 7.2 |
| 167 | ATLVT012XX2296 | 47230 | SSTTGGSSNDNA | 6.39 | 5.03 | 6.97 |
| 168 | ATLVT012XX569 | 45503 | NGTTGGATNDNH | 5.06 | 5.79 | 8.16 |
| 169 | ATLVT012XX1235 | 46169 | SGASGGASNDNH | 6.83 | 6.1 | 4.67 |
| 170 | ATLVT012XX958 | 45892 | NSQSGGSTNDNA | 7.97 | 5.14 | 3.95 |
| 171 | ATLVT012XX2109 | 47043 | SSQSGGSTNDNT | 6.08 | 6.47 | 5.47 |
| 172 | ATLVT012XX567 | 45501 | NGTTGGASNDNT | 3.12 | 7.07 | 9.59 |
| 173 | ATLVT012XX1570 | 46504 | SGQTGGASNDNA | 3.57 | 7.03 | 8.77 |
| 174 | ATLVT012XX2105 | 47039 | SSQSGGSSNDNH | 6.35 | 6.17 | 5.03 |
| 175 | ATLVT012XX2195 | 47129 | SSTAGGASNDNH | 4.6 | 4 | 10.75 |
| 176 | ATLVT012XX480 | 45414 | NGTAGGSINDNT | 4.07 | 4.75 | 10.69 |
| 177 | ATLVT012XX3448 | 48382 | TSTTGGSSNDNA | 6.03 | 5.42 | 6.42 |
| 178 | ATLVT012XX1598 | 46532 | SGTAAGATNDNH | 5.76 | 8.56 | 2.75 |
| 179 | ATLVT012XX3444 | 48378 | TSTTGGASNDNT | 6.54 | 4.36 | 6.7 |
| 180 | ATLVT012XX572 | 45506 | NGTTGGSSNDNH | 4.56 | 5.62 | 8.31 |
| 181 | ATLVT012XX3401 | 48335 | TSTSGGSSNDNH | 5.01 | 5.79 | 7.29 |
| 182 | ATLVT012XX2200 | 47134 | SSTAGGSSNDNA | 3.92 | 5.57 | 9.37 |
| 183 | ATLVT012XX1090 | 46024 | NSTSGASTNDNT | 4.67 | 5.99 | 7.49 |
| 184 | ATLVT012XX2147 | 47081 | SSQTGGASNDNH | 4.03 | 6.06 | 8.45 |
| 185 | ATLVT012XX1077 | 46011 | NSTSAGSSNDNT | 1.63 | 9.84 | 7.69 |
| 186 | ATLVT012XX1629 | 46563 | SGTAGGSINDNT | 3.09 | 7.28 | 8.43 |
| 187 | ATLVT012XX3451 | 48385 | TSTTGGSTNDNA | 4.37 | 6.17 | 7.66 |
| 188 | ATLVT012XX1388 | 46322 | SGESGGSINDNH | 4.65 | 5.66 | 7.75 |
| 189 | ATLVT012XX2156 | 47090 | SSQTGGSTNDNH | 5.57 | 6.34 | 5.22 |
| 190 | ATLVT012XX1819 | 46753 | SSASGGSTNDNA | 5.4 | 7.14 | 4.49 |
| 191 | ATLVT012XX1524 | 46458 | SGQSGGASNDNT | 4.45 | 4.74 | 9.19 |
| 192 | ATLVT012XX1130 | 46064 | NSTTGAATNDNH | 5.66 | 4.61 | 7.25 |
| 193 | ATLVT012XX3308 | 48242 | TSQTGGSTNDNH | 3.3 | 9.43 | 5.04 |
| 194 | ATLVT012XX2822 | 47756 | TGTSGGATNDNH | 4.48 | 6.38 | 6.95 |
| 195 | ATLVT012XX3396 | 48330 | TSTSGGASNDNT | 3.02 | 6.68 | 9.03 |
| 196 | ATLVT012XX570 | 45504 | NGTTGGAINDNT | 3.15 | 8 | 7.12 |
| 197 | ATLVT012XX478 | 45412 | NGTAGGSINDNA | 3.12 | 5.21 | 10.46 |
| 198 | ATLVT012XX1480 | 46414 | SGQAGGSSNDNA | 4.38 | 5.92 | 7.29 |
| 199 | ATLVT012XX1084 | 46018 | NSTSGAATNDNA | 5.48 | 5.24 | 6.28 |
| 200 | ATLVT012XX2060 | 46994 | SSQAGGSINDNH | 5 | 4.44 | 8.01 |
| 201 | ATLVT012XX2726 | 47660 | TGQTGGATNDNH | 4.8 | 2 | 11.47 |
| 202 | ATLVT012XX3402 | 48336 | ISTSGGSSNDNT | 4.19 | 4.96 | 8.51 |
| 203 | ATLVT012XX1706 | 46640 | SGTTGAATNDNH | 8.69 | 2.73 | 3.59 |
| 204 | ATLVT012XX2828 | 47762 | TGTSGGSTNDNH | 4.34 | 7.08 | 5.31 |
| 205 | ATLVT012XX2292 | 47226 | SSTTGGASNDNT | 4.37 | 5.84 | 6.83 |
| 206 | ATLVT012XX1525 | 46459 | SGQSGGATNDNA | 5.15 | 4.08 | 7.65 |
| 207 | ATLVT012XX1125 | 46059 | NSTTAGSTNDNT | 2.44 | 8.41 | 6.71 |
| 208 | ATLVT012XX1190 | 46124 | SGAAGGATNDNH | 1.97 | 5.3 | 11.45 |
| 209 | ATLVT012XX2876 | 47810 | TGTTGGSTNDNH | 3.17 | 8.64 | 5.09 |
| 210 | ATLVT012XX1820 | 46754 | SSASGGSINDNH | 6.95 | 6.21 | 1.74 |
| 211 | ATLVT012XX2204 | 47138 | SSTAGGSINDNH | 3.77 | 6.82 | 6.38 |
| 212 | ATLVT012XX3350 | 48284 | TSTAGGATNDNH | 4.1 | 4.9 | 8.26 |
| 213 | ATLVT012XX2146 | 47080 | SSQTGGASNDNA | 4.22 | 5.46 | 7.32 |
| 214 | ATLVT012XX475 | 45409 | NGTAGGSSNDNA | 3.71 | 4.58 | 9 |
| 215 | ATLVT012XX2827 | 47761 | TGTSGGSINDNA | 5.29 | 4.57 | 6.29 |
| 216 | ATLVT012XX1481 | 46415 | SGQAGGSSNDNH | 4.78 | 5.58 | 5.73 |
| 217 | ATLVT012XX2053 | 46987 | SSQAGGATNDNA | 6.13 | 2.88 | 6.88 |
| 218 | ATLVT012XX3260 | 48194 | TSQSGGSINDNH | 3.13 | 6.43 | 7.45 |
| 219 | ATLVT012XX3254 | 48188 | TSQSGGATNDNH | 4.55 | 3.99 | 8.08 |
| 220 | ATLVT012XX1576 | 46510 | SGQTGGSSNDNA | 4.7 | 4.61 | 6.94 |
| 221 | ATLVT012XX1241 | 46175 | SGASGGSSNDNH | 4.81 | 6.37 | 4.49 |
| 222 | ATLVT012XX1479 | 46413 | SGQAGGAINDNT | 3.63 | 6.1 | 6.86 |
| 223 | ATLVT012XX1085 | 46019 | NSTSGAATNDNH | 3.57 | 7.47 | 5.17 |
| 224 | ATLVT012XX2194 | 47128 | SSTAGGASNDNA | 3.57 | 4.92 | 8.39 |
| 225 | ATLVT012XX1910 | 46844 | SSEAGGATNDNH | 4.6 | 6.39 | 4.61 |
| 226 | ATLVT012XX3452 | 48386 | TSTTGGSINDNH | 4.17 | 4.94 | 7.16 |
| 227 | ATLVT012XX2202 | 47136 | SSTAGGSSNDNT | 2.81 | 4.51 | 10.02 |
| 228 | ATLVT012XX2006 | 46940 | SSETGGATNDNH | 5.6 | 4.18 | 5.64 |
| 229 | ATLVT012XX955 | 45889 | NSQSGGSSNDNA | 5.79 | 6.21 | 2.66 |
| 230 | ATLVT012XX665 | 45599 | NSASGGAINDNH | 4.89 | 5.63 | 4.94 |
| 231 | ATLVT012XX2090 | 47024 | SSQSGAATNDNH | 7.52 | 3.94 | 2.58 |
| 232 | ATLVT012XX1240 | 46174 | SGASGGSSNDNA | 6.38 | 3.42 | 5.07 |
| 233 | ATLVT012XX1476 | 46410 | SGQAGGASNDNT | 2.01 | 6.96 | 8.01 |
| 234 | ATLVT012XX1075 | 46009 | NSTSAGSSNDNA | 1.74 | 8.58 | 6.34 |
| 235 | ATLVT012XX2222 | 47156 | SSTSAGATNDNH | 3.93 | 5.98 | 5.91 |
| 236 | ATLVT012XX912 | 45846 | NSQAGGSINDNT | 5.31 | 3.65 | 6.53 |
| 237 | ATLVT012XX3450 | 48384 | TSTTGGSSNDNT | 3.77 | 4.63 | 7.89 |
| 238 | ATLVT012XX2057 | 46991 | SSQAGGSSNDNH | 4.6 | 5.35 | 5.51 |
| 239 | ATLVT012XX1955 | 46889 | SSESGGASNDNH | 3.69 | 8.35 | 3.19 |
| 240 | ATLVT012XX1073 | 46007 | NSTSAGAINDNH | 3.05 | 7.3 | 5.54 |
| 241 | ATLVT012XX565 | 45499 | NGTTGGASNDNA | 4.13 | 4.97 | 6.65 |
| 242 | ATLVT012XX667 | 45601 | NSASGGSSNDNA | 1.52 | 8.52 | 6.55 |
| 243 | ATLVT012XX1245 | 46179 | SGASGGSINDNT | 5.36 | 3.45 | 6.41 |
| 244 | ATLVT012XX2100 | 47034 | SSQSGGASNDNT | 4.85 | 4.68 | 5.67 |
| 245 | ATLVT012XX3355 | 48289 | TSTAGGSINDNA | 3.05 | 4.18 | 9.39 |
| 246 | ATLVT012XX1620 | 46554 | SGTAGGASNDNT | 1.2 | 7.89 | 7.78 |
| 247 | ATLVT012XX3443 | 48377 | TSTTGGASNDNH | 4.94 | 5.09 | 4.87 |
| 248 | ATLVT012XX951 | 45885 | NSQSGGASNDNT | 5.62 | 4.29 | 4.72 |
| 249 | ATLVT012XX3453 | 48387 | TSTTGGSTNDNT | 2.87 | 4.8 | 8.73 |
| 250 | ATLVT012XX1625 | 46559 | SGTAGGSSNDNH | 2.13 | 6.75 | 7.49 |
| 251 | ATLVT012XX1435 | 46369 | SGETGGSINDNA | 5.86 | 4.32 | 4.2 |
| 252 | ATLVT012XX1477 | 46411 | SGQAGGATNDNA | 3.8 | 5.41 | 6.33 |
| 253 | ATLVT012XX1383 | 46317 | SGESGGATNDNT | 5.14 | 5.31 | 4.15 |
| 254 | ATLVT012XX1766 | 46700 | SSAAGGATNDNH | 5.66 | 3.88 | 5.1 |
| 255 | ATLVT012XX2339 | 47273 | TGAAGGASNDNH | 4.43 | 4.81 | 6 |
| 256 | ATLVT012XX1187 | 46121 | SGAAGGASNDNH | 5.38 | 3.72 | 5.75 |
| 257 | ATLVT012XX2101 | 47035 | SSQSGGATNDNA | 4.02 | 5.21 | 6.14 |
| 258 | ATLVT012XX810 | 45744 | NSESGGATNDNT | 2.85 | 7.18 | 5.6 |
| 259 | ATLVT012XX1007 | 45941 | NSQTGGSTNDNH | 6.67 | 5.51 | 1.19 |
| 260 | ATLVT012XX3447 | 48381 | TSTTGGATNDNT | 4.9 | 3.76 | 6.47 |
| 261 | ATLVT012XX1236 | 46170 | SGASGGASNDNT | 3.89 | 6.21 | 4.99 |
| 262 | ATLVT012XX1862 | 46796 | SSATGGATNDNH | 4.95 | 5.64 | 3.88 |
| 263 | ATLVT012XX1117 | 46051 | NSTTAGATNDNA | 3.62 | 6.71 | 4.77 |
| 264 | ATLVT012XX2875 | 47809 | TGTTGGSINDNA | 4.46 | 4.67 | 5.96 |
| 265 | ATLVT012XX811 | 45745 | NSESGGSSNDNA | 7.63 | 3.45 | 2.05 |
| 266 | ATLVT012XX1619 | 46553 | SGTAGGASNDNH | 2.68 | 5.72 | 7.61 |
| 267 | ATLVT012XX1575 | 46509 | SGQTGGAINDNT | 3.06 | 4.83 | 8.1 |
| 268 | ATLVT012XX1912 | 46846 | SSEAGGSSNDNA | 6.88 | 4.26 | 2.05 |
| 269 | ATLVT01XXX1618 | 46552 | SGTAGGASNDNA | 1.28 | 6.96 | 8.08 |
| 270 | ATLVT012XX1197 | 46131 | SGAAGGSINDNT | 4.23 | 4.16 | 6.6 |
| 271 | ATLVT012XX809 | 45743 | NSESGGATNDNH | 6.81 | 3.47 | 3.06 |
| 272 | ATLVT012XX3405 | 48339 | TSTSGGSINDNT | 2.63 | 4.84 | 8.44 |
| 273 | ATLVT012XX1001 | 45935 | NSQTGGATNDNH | 4.66 | 3.42 | 6.76 |
| 274 | ATLVT012XX2196 | 47130 | SSTAGGASNDNT | 2.49 | 2.96 | 11.08 |
| 275 | ATLVT012XX1700 | 46634 | SGTTAGSTNDNH | 4.5 | 4.97 | 5.03 |
| 276 | ATLVT012XX3442 | 48376 | TSTTGGASNDNA | 3.99 | 5.56 | 5.14 |
| 277 | ATLVT012XX720 | 45654 | NSATGGSTNDNT | 3.91 | 4.93 | 5.92 |
| 278 | ATLVT012XX2148 | 47082 | SSQTGGASNDNT | 3.35 | 3.84 | 8.28 |
| 279 | ATLVT012XX2340 | 47274 | TGAAGGASNDNT | 4.15 | 4.41 | 6.16 |
| 280 | ATLVT012XX854 | 45788 | NSETGGASNDNH | 5.87 | 6.66 | 0.3 |
| 281 | ATLVT012XX1578 | 46512 | SGQTGGSSNDNT | 4.35 | 3.34 | 7.13 |
| 282 | ATLVT012XX1646 | 46580 | SGTSAGATNDNH | 4.25 | 4.95 | 5.18 |
| 283 | ATLVT012XX2059 | 46993 | SSQAGGSINDNA | 4.27 | 3.06 | 7.54 |
| 284 | ATLVT012XX2155 | 47089 | SSQTGGSTNDNA | 3.38 | 4.73 | 6.91 |
| 285 | ATLVT012XX2390 | 47324 | TGASGGATNDNH | 4.44 | 5.2 | 4.49 |
| 286 | ATLVT012XX664 | 45598 | NSASGGATNDNA | 3.81 | 6.39 | 3.79 |
| 287 | ATLVT012XX2104 | 47038 | SSQSGGSSNDNA | 3.93 | 5.83 | 4.2 |
| 288 | ATLVT012XX1080 | 46014 | NSTSAGSTNDNT | 3.19 | 4.35 | 7.37 |
| 289 | ATLVT012XX1621 | 46555 | SGTAGGATNDNA | 0.76 | 5.84 | 9.56 |
| 290 | ATLVT012XX3301 | 48235 | TSQTGGATNDNA | 4.83 | 3.27 | 5.9 |
| 291 | ATLVT012XX1286 | 46220 | SGATGGATNDNH | 4.12 | 3.14 | 7.21 |
| 292 | ATLVT012XX953 | 45887 | NSQSGGATNDNH | 6.14 | 3.19 | 3.67 |
| 293 | ATLVT012XX1379 | 46313 | SGESGGASNDNH | 3.5 | 5.29 | 5.42 |
| 294 | ATLVT012XX2240 | 47174 | SSTSGASTNDNH | 6.19 | 2.56 | 4.31 |
| 295 | ATLVT012XX1118 | 46052 | NSTTAGATNDNH | 3.29 | 7.37 | 3.1 |
| 296 | ATLVT012XX89 | 45023 | NGASGGATNDNH | 4.36 | 5.67 | 3.44 |
| 297 | ATLVT012XX1124 | 46058 | NSTTAGSTNDNH | 2.69 | 5.91 | 5.96 |
| 298 | ATLVT012XX3250 | 48184 | TSQSGGASNDNA | 2.22 | 6 | 6.62 |
| 299 | ATLVT012XX1089 | 46023 | NSTSGASTNDNH | 2.37 | 6.15 | 6.12 |
| 300 | ATLVT012XX2098 | 47032 | SSQSGGASNDNA | 3.46 | 5.01 | 5.71 |
| 301 | ATLVT012XX469 | 45403 | NGTAGGASNDNA | 3.43 | 4.5 | 6.4 |
| 302 | ATLVT012XX2051 | 46985 | SSQAGGASNDNH | 4.3 | 3.47 | 6.21 |
| 303 | ATLVT012XX2824 | 47758 | TGTSGGSSNDNA | 4.39 | 3.77 | 5.65 |
| 304 | ATLVT012XX668 | 45602 | NSASGGSSNDNH | 3.13 | 6.01 | 4.92 |
| 305 | ATLVT012XX1334 | 46268 | SGEAGGATNDNH | 2.35 | 5.26 | 6.95 |
| 306 | ATLVT012XX1522 | 46456 | SGQSGGASNDNA | 3.24 | 3.41 | 7.75 |
| 307 | ATLVT012XX3251 | 48185 | TSQSGGASNDNH | 4.8 | 3.78 | 4.53 |
| 308 | ATLVT012XX1114 | 46048 | NSTTAGASNDNA | 4.66 | 5.02 | 3.17 |
| 309 | ATLVT012XX3305 | 48239 | TSQTGGSSNDNH | 3.87 | 5.52 | 3.86 |
| 310 | ATLVT012XX806 | 45740 | NSESGGASNDNH | 6.83 | 2.99 | 2.05 |
| 311 | ATLVT012XX1432 | 46366 | SGETGGSSNDNA | 5.27 | 2.83 | 4.91 |
| 312 | ATLVT012XX1509 | 46443 | SGQSAGSTNDNT | 5.12 | 5.68 | 1.5 |
| 313 | ATLVT012XX143 | 45077 | NGATGGSTNDNH | 6.14 | 3.26 | 2.85 |
| 314 | ATLVT012XX3354 | 48288 | TSTAGGSSNDNT | 1.33 | 6.53 | 6.88 |
| 315 | ATLVT012XX3259 | 48193 | TSQSGGSTNDNA | 5.12 | 4.38 | 3.15 |
| 316 | ATLVT012XX1811 | 46745 | SSASGGASNDNH | 3.72 | 6.12 | 3.27 |
| 317 | ATLVT012XX479 | 45413 | NGTAGGSTNDNH | 3.08 | 4.14 | 6.88 |
| 318 | ATLVT012XX1082 | 46016 | NSTSGAASNDNH | 4.64 | 3.25 | 5.33 |
| 319 | ATLVT012XX1550 | 46484 | SGQTAGATNDNH | 5.34 | 4.48 | 2.56 |
| 320 | ATLVT012XX1115 | 46049 | NSTTAGASNDNH | 4.09 | 4.65 | 4.46 |
| 321 | ATLVT012XX903 | 45837 | NSQAGGASNDNT | 6.75 | 3.74 | 1.06 |
| 322 | ATLVT012XX3352 | 48286 | TSTAGGSSNDNA | 1.64 | 7.01 | 5.59 |
| 323 | ATLVT012XX1234 | 46168 | SGASGGASNDNA | 4.37 | 4.57 | 4.04 |
| 324 | ATLVT012XX473 | 45407 | NGTAGGATNDNH | 4.11 | 2.53 | 7.1 |
| 325 | ATLVT012XX3307 | 48241 | TSQTGGSTNDNA | 3.2 | 4.87 | 5.63 |
| 326 | ATLVT012XX671 | 45605 | NSASGGSTNDNH | 5.23 | 4.1 | 3.11 |
| 327 | ATLVT012XX2818 | 47752 | TGTSGGASNDNA | 4.35 | 3.83 | 4.93 |
| 328 | ATLVT012XX1044 | 45978 | NSTAGASTNDNT | 3.51 | 5.13 | 4.68 |
| 329 | ATLVT012XX1239 | 46173 | SGASGGAINDNT | 4.13 | 3.31 | 5.94 |
| 330 | ATLVT012XX2873 | 47807 | TGTTGGSSNDNH | 5.97 | 2.5 | 3.83 |
| 331 | ATLVT012XX470 | 45404 | NGTAGGASNDNH | 3.86 | 4.57 | 4.74 |
| 332 | ATLVT012XX2298 | 47232 | SSTTGGSSNDNT | 3.07 | 3.2 | 7.77 |
| 333 | ATLVT012XX2338 | 47272 | TGAAGGASNDNA | 3.35 | 4.64 | 5.42 |
| 334 | ATLVT012XX3449 | 48383 | TSTTGGSSNDNH | 5.12 | 2.92 | 4.56 |
| 335 | ATLVT012XX713 | 45647 | NSATGGATNDNH | 3.99 | 3.94 | 5.19 |
| 336 | ATLVT012XX1193 | 46127 | SGAAGGSSNDNH | 2.63 | 3.29 | 8.32 |
| 337 | ATLVT012XX1387 | 46321 | SGESGGSINDNA | 2.99 | 5.73 | 4.56 |
| 338 | ATLVT012XX2820 | 47754 | TGTSGGASNDNT | 4.44 | 3.15 | 5.38 |
| 339 | ATLVT012XX1431 | 46365 | SGETGGATNDNT | 4.95 | 1.7 | 6.35 |
| 340 | ATLVT012XX1005 | 45939 | NSQTGGSSNDNT | 7.55 | 2.9 | 0.21 |
| 341 | ATLVT012XX566 | 45500 | NGTTGGASNDNH | 3.26 | 3.55 | 6.74 |
| 342 | ATLVT012XX2348 | 47282 | TGAAGGSINDNH | 3.03 | 4.7 | 5.62 |
| 343 | ATLVT012XX2872 | 47806 | TGTTGGSSNDNA | 3.47 | 3.99 | 5.78 |
| 344 | ATLVT012XX2375 | 47309 | TGASGAASNDNH | 7.54 | 1.9 | 1.36 |
| 345 | ATLVT012XX1079 | 46013 | NSTSAGSTNDNH | 2.78 | 4.88 | 5.66 |
| 346 | ATLVT012XX2732 | 47666 | TGQTGGSTNDNH | 1.84 | 7.04 | 4.49 |
| 347 | ATLVT012XX2052 | 46986 | SSQAGGASNDNT | 5.18 | 2.02 | 5.13 |
| 348 | ATLVT012XX1772 | 46706 | SSAAGGSINDNH | 5.89 | 3.03 | 2.61 |
| 349 | ATLVT012XX2149 | 47083 | SSQTGGATNDNA | 4.33 | 2.64 | 5.76 |
| 350 | ATLVT012XX336 | 45270 | NGQAGGSTNDNT | 4.7 | 1.49 | 6.58 |
| 351 | ATLVT012XX1817 | 46751 | SSASGGSSNDNH | 4.7 | 5.77 | 1.03 |
| 352 | ATLVT012XX672 | 45606 | NSASGGSINDNT | 2.52 | 6.76 | 3.45 |
| 353 | ATLVT012XX956 | 45890 | NSQSGGSSNDNH | 4.57 | 5.54 | 1.48 |
| 354 | ATLVT012XX1237 | 46171 | SGASGGATNDNA | 4.36 | 3.26 | 4.77 |
| 355 | ATLVT012XX1427 | 46361 | SGETGGASNDNH | 3.96 | 4.56 | 3.72 |
| 356 | ATLVT012XX474 | 45408 | NGTAGGATNDNT | 2.4 | 5.26 | 5.48 |
| 357 | ATLVT012XX2775 | 47709 | TGTAGGATNDNT | 2.22 | 3.32 | 8.27 |
| 358 | ATLVT012XX1694 | 46628 | SGTTAGATNDNH | 4.23 | 3.87 | 4.09 |
| 359 | ATLVT012XX952 | 45886 | NSQSGGATNDNA | 3.69 | 4.79 | 3.84 |
| 360 | ATLVT012XX719 | 45653 | NSATGGSINDNH | 5.06 | 4.58 | 1.72 |
| 361 | ATLVT012XX718 | 45652 | NSATGGSINDNA | 3.7 | 3.98 | 4.81 |
| 362 | ATLVT012XX2973 | 47907 | TSASGGSINDNT | 4.46 | 3.76 | 3.75 |
| 363 | ATLVT012XX1913 | 46847 | SSEAGGSSNDNH | 6.99 | 2.25 | 1.34 |
| 364 | ATLVT012XX2055 | 46989 | SSQAGGATNDNT | 3.16 | 3.26 | 6.6 |
| 365 | ATLVT012XX476 | 45410 | NGTAGGSSNDNH | 2.66 | 4.62 | 5.72 |
| 366 | ATLVT012XX3399 | 48333 | TSTSGGATNDNT | 0.74 | 5.36 | 8.05 |
| 367 | ATLVT012XX2050 | 46984 | SSQAGGASNDNA | 2.84 | 4.65 | 5.35 |
| 368 | ATLVT012XX2199 | 47133 | SSTAGGATNDNT | 1.61 | 3.46 | 8.97 |
| 369 | ATLVT012XX425 | 45359 | NGQTGGATNDNH | 3 | 5.81 | 3.55 |
| 370 | ATLVT012XX568 | 45502 | NGTTGGATNDNA | 2.71 | 4.59 | 5.58 |
| 371 | ATLVT012XX2825 | 47759 | TGTSGGSSNDNH | 5.36 | 2.34 | 3.87 |
| 372 | ATLVT012XX2829 | 47763 | TGTSGGSINDNT | 2.44 | 4.68 | 5.87 |
| 373 | ATLVT012XX2186 | 47120 | SSTAGAATNDNH | 5.5 | 2.4 | 3.54 |
| 374 | ATLVT012XX807 | 45741 | NSESGGASNDNT | 5.24 | 1.23 | 5.47 |
| 375 | ATLVT012XX1087 | 46021 | NSTSGASSNDNH | 1.98 | 5.19 | 5.95 |
| 376 | ATLVT012XX2103 | 47037 | SSQSGGATNDNT | 2.24 | 3.91 | 7.12 |
| 377 | ATLVT012XX957 | 45891 | NSQSGGSSNDNT | 3.71 | 5.26 | 2.83 |
| 378 | ATLVT012XX1502 | 46436 | SGQSAGATNDNH | 5.87 | 3.73 | 1.08 |
| 379 | ATLVT012XX1175 | 46109 | SGAAGAASNDNH | 3 | 3.83 | 5.86 |
| 380 | ATLVT012XX3445 | 48379 | TSTTGGATNDNA | 4.32 | 3.64 | 3.83 |
| 381 | ATLVT012XX1195 | 46129 | SGAAGGSTNDNA | 2.6 | 2.84 | 7.8 |
| 382 | ATLVT012XX816 | 45750 | NSESGGSINDNT | 5.51 | 3.16 | 2.39 |
| 383 | ATLVT012XX2780 | 47714 | IGTAGGSTNDNH | 2.89 | 5.45 | 3.93 |
| 384 | ATLVT012XX1041 | 45975 | NSTAGASSNDNT | 1.23 | 6.65 | 5.23 |
| 385 | ATLVT012XX1120 | 46054 | NSTTAGSSNDNA | 5.39 | 2.75 | 3.07 |
| 386 | ATLVT012XX1083 | 46017 | NSTSGAASNDNT | 3.74 | 2.81 | 5.82 |
| 387 | ATLVT012XX2191 | 47125 | SSTAGASTNDNA | 4.24 | 1.57 | 6.56 |
| 388 | ATLVT012XX2153 | 47087 | SSQTGGSSNDNH | 4.25 | 2.65 | 5.1 |
| 389 | ATLVT012XX621 | 45555 | NSAAGGSSNDNT | 0.92 | 5.84 | 6.7 |
| 390 | ATLVT012XX1031 | 45965 | NSTAAGSINDNH | 4.8 | 2.93 | 3.75 |
| 391 | ATLVT012XX663 | 45597 | NSASGGASNDNT | 3.42 | 3.58 | 5.28 |
| 392 | ATLVT012XX1816 | 46750 | SSASGGSSNDNA | 5.12 | 3.51 | 2.42 |
| 393 | ATLVT012XX622 | 45556 | NSAAGGSINDNA | 3.05 | 3.65 | 5.78 |
| 394 | ATLVT012XX911 | 45845 | NSQAGGSTNDNH | 4.59 | 3.51 | 3.32 |
| 395 | ATLVT012XX1599 | 46533 | SGTAAGATNDNT | 6.49 | 3.34 | 0.25 |
| 396 | ATLVT012XX1072 | 46006 | NSTSAGATNDNA | 3.95 | 3.73 | 4.09 |
| 397 | ATLVT012XX1078 | 46012 | NSTSAGSTNDNA | 2.4 | 4.59 | 5.61 |
| 398 | ATLVT012XX949 | 45883 | NSQSGGASNDNA | 4.97 | 2.68 | 3.66 |
| 399 | ATLVT012XX2867 | 47801 | TGTTGGASNDNH | 1.73 | 4.3 | 7.12 |
| 400 | ATLVT012XX3300 | 48234 | TSQTGGASNDNT | 3.45 | 3.04 | 5.79 |
| 401 | ATLVT012XX670 | 45604 | NSASGGSINDNA | 3.42 | 3.57 | 5.14 |
| 402 | ATLVT012XX1086 | 46020 | NSTSGAATNDNT | 3.13 | 2.77 | 6.67 |
| 403 | ATLVT012XX950 | 45884 | NSQSGGASNDNH | 3.95 | 4.71 | 2.75 |
| 404 | ATLVT012XX1821 | 46755 | SSASGGSTNDNT | 4.73 | 4.32 | 1.87 |
| 405 | ATLVT012XX2966 | 47900 | TSASGGATNDNH | 2.46 | 4.4 | 5.66 |
| 406 | ATLVT012XX1555 | 46489 | SGQTAGSINDNA | 1.9 | 7.57 | 2.48 |
| 407 | ATLVT012XX1186 | 46120 | SGAAGGASNDNA | 2.51 | 3.7 | 6.4 |
| 408 | ATLVT012XX1034 | 45968 | NSTAGAASNDNH | 5.33 | 2.64 | 2.92 |
| 409 | ATLVT012XX862 | 45796 | NSETGGSINDNA | 5.08 | 5.36 | −0.15 |
| 410 | ATLVT012XX2846 | 47780 | TGTTAGATNDNH | 5.67 | 2.05 | 3.06 |
| 411 | ATLVT012XX3386 | 48320 | ISTSGAATNDNH | 1.28 | 5.63 | 5.98 |
| 412 | ATLVT01XXX2798 | 47732 | TGTSAGATNDNH | 4.53 | 2.03 | 5 |
| 413 | ATLVT012XX864 | 45798 | NSETGGSINDNT | 3.56 | 7.35 | −0.18 |
| 414 | ATLVT012XX1859 | 46793 | SSATGGASNDNH | 2.32 | 6.02 | 3.58 |
| 415 | ATLVT012XX1568 | 46502 | SGQTGASINDNH | 3.48 | 4.51 | 3.53 |
| 416 | ATLVT012XX2804 | 47738 | TGTSAGSTNDNH | 6.48 | 1.73 | 1.95 |
| 417 | ATLVT012XX1283 | 46217 | SGATGGASNDNH | 4.37 | 3.19 | 3.68 |
| 418 | ATLVT012XX1433 | 46367 | SGETGGSSNDNH | 4.97 | 2.01 | 4.14 |
| 419 | ATLVT012XX516 | 45450 | NGTSGASTNDNT | 4.61 | 1.7 | 5.16 |
| 420 | ATLVT012XX2003 | 46937 | SSETGGASNDNH | 4.11 | 4.12 | 2.86 |
| 421 | ATLVT012XX95 | 45029 | NGASGGSINDNH | 5.58 | 2.6 | 2.22 |
| 422 | ATLVT012XX1597 | 46531 | SGTAAGATNDNA | 3.99 | 6.13 | 0.37 |
| 423 | ATLVT012XX1508 | 46442 | SGQSAGSTNDNH | 3.4 | 5.34 | 2.39 |
| 424 | ATLVT012XX1572 | 46506 | SGQTGGASNDNT | 2.62 | 2.46 | 7.4 |
| 425 | ATLVT012XX1025 | 45959 | NSTAAGATNDNH | 2.33 | 5.58 | 3.87 |
| 426 | ATLVT012XX1038 | 45972 | NSTAGAATNDNT | 1.99 | 4.43 | 5.92 |
| 427 | ATLVT012XX1030 | 45964 | NSTAAGSINDNA | 5.66 | 1.01 | 4.01 |
| 428 | ATLVT012XX335 | 45269 | NGQAGGSINDNH | 2.58 | 5.95 | 2.92 |
| 429 | ATLVT012XX1964 | 46898 | SSESGGSINDNH | 4.73 | 4.65 | 0.89 |
| 430 | ATLVT012XX2864 | 47798 | TGTIGASINDNH | 3.67 | 3.54 | 4.09 |
| 431 | ATLVT012XX1810 | 46744 | SSASGGASNDNA | 4.55 | 3.88 | 2.14 |
| 432 | ATLVT012XX1004 | 45938 | NSQTGGSSNDNH | 4.97 | 5.15 | −0.22 |
| 433 | ATLVT012XX383 | 45317 | NGQSGGSTNDNH | 1.83 | 6.48 | 3.41 |
| 434 | ATLVT012XX2005 | 46939 | SSETGGATNDNA | 4.72 | 4.35 | 1.16 |
| 435 | ATLVT012XX2779 | 47713 | TGTAGGSTNDNA | 2.62 | 2.51 | 7.13 |
| 436 | ATLVT012XX1242 | 46176 | SGASGGSSNDNT | 3.56 | 2.87 | 5.03 |
| 437 | ATLVT012XX1116 | 46050 | NSTTAGASNDNT | 5.24 | 2.85 | 2.18 |
| 438 | ATLVT012XX968 | 45902 | NSQTAASSNDNH | 2.97 | 1.57 | 7.69 |
| 439 | ATLVT012XX2776 | 47710 | TGTAGGSSNDNA | 2.54 | 3.49 | 5.93 |
| 440 | ATLVT012XX483 | 45417 | NGTSAAASNDNT | 2.18 | 3.47 | 6.56 |
| 441 | ATLVT012XX377 | 45311 | NGQSGGATNDNH | 3.99 | 2.7 | 4.42 |
| 442 | ATLVT012XX3212 | 48146 | TSQAGGSTNDNH | 3.47 | 1.3 | 7.1 |
| 443 | ATLVT012XX1434 | 46368 | SGETGGSSNDNT | 3.7 | 3.13 | 4.34 |
| 444 | ATLVT012XX1813 | 46747 | SSASGGATNDNA | 3.05 | 5.62 | 2.21 |
| 445 | ATLVT012XX2821 | 47755 | TGTSGGATNDNA | 4.19 | 3.19 | 3.37 |
| 446 | ATLVT012XX1039 | 45973 | NSTAGASSNDNA | 2.51 | 4.98 | 3.94 |
| 447 | ATLVT012XX1482 | 46416 | SGQAGGSSNDNT | 2.16 | 2.59 | 7.58 |
| 448 | ATLVT012XX1287 | 46221 | SGATGGATNDNT | 4.22 | 1.52 | 5.43 |
| 449 | ATLVT012XX3306 | 48240 | TSQTGGSSNDNT | 4.59 | 2.43 | 3.62 |
| 450 | ATLVT012XX1029 | 45963 | NSTAAGSSNDNT | 4.73 | 1.53 | 4.5 |
| 451 | ATLVT012XX2154 | 47088 | SSQTGGSSNDNT | 3.22 | 2.93 | 5.29 |
| 452 | ATLVT012XX1412 | 46346 | SGETAGSINDNH | 2.36 | 4.62 | 4.55 |
| 453 | ATLVT012XX2289 | 47223 | SSTTGASTNDNT | 4.93 | 2.1 | 3.39 |
| 454 | ATLVT012XX2392 | 47326 | TGASGGSSNDNA | 2.89 | 1.96 | 7.01 |
| 455 | ATLVT012XX2877 | 47811 | TGTTGGSTNDNT | 2.16 | 3.68 | 6.03 |
| 456 | ATLVT012XX905 | 45839 | NSQAGGAINDNH | 3.74 | 3.72 | 3.25 |
| 457 | ATLVT012XX139 | 45073 | NGATGGSSNDNA | 5.12 | 1.53 | 3.71 |
| 458 | ATLVT012XX1812 | 46746 | SSASGGASNDNT | 3.73 | 4.83 | 1.83 |
| 459 | ATLVT012XX814 | 45748 | NSESGGSINDNA | 6.24 | 1.55 | 1.73 |
| 460 | ATLVT012XX2923 | 47857 | TSAAGGSTNDNA | 1.85 | 6.43 | 2.97 |
| 461 | ATLVT012XX1658 | 46592 | SGTSGAATNDNH | 3.57 | 3.3 | 4.03 |
| 462 | ATLVT012XX239 | 45173 | NGESGGSTNDNH | 2.87 | 7.07 | 0.38 |
| 463 | ATLVT012XX1429 | 46363 | SGETGGAINDNA | 2.79 | 4.56 | 3.74 |
| 464 | ATLVT012XX1189 | 46123 | SGAAGGATNDNA | 1.82 | 3.44 | 6.84 |
| 465 | ATLVT012XX1754 | 46688 | SSAAGAATNDNH | 2.9 | 4.47 | 3.62 |
| 466 | ATLVT012XX2342 | 47276 | TGAAGGATNDNH | 2.32 | 3.18 | 6.25 |
| 467 | ATLVT012XX908 | 45842 | NSQAGGSSNDNH | 4.98 | 3.99 | 0.65 |
| 468 | ATLVT012XX2731 | 47665 | TGQTGGSTNDNA | 1.49 | 3.8 | 6.87 |
| 469 | ATLVT012XX716 | 45650 | NSATGGSSNDNH | 3.6] | 5.12 | 1.5 |
| 470 | ATLVT012XX1965 | 46899 | SSESGGSINDNT | 4.89 | 4.55 | 0 |
| 471 | ATLVT012XX2297 | 47231 | SSTTGGSSNDNH | 3.35 | 3.92 | 3.42 |
| 472 | ATLVT012XX1071 | 46005 | NSTSAGASNDNI | 2.57 | 3.86 | 4.83 |
| 473 | ATLVT012XX662 | 45596 | NSASGGASNDNH | 4.56 | 4.01 | 1.18 |
| 474 | ATLVT012XX2969 | 47903 | TSASGGSSNDNH | 5.15 | 2.25 | 2.43 |
| 475 | ATLVT012XX813 | 45747 | NSESGGSSNDNT | 4.82 | 2.81 | 2.24 |
| 476 | ATLVT012XX2287 | 47221 | SSTTGASTNDNA | 3.52 | 5.39 | 1.15 |
| 477 | ATLVT012XX2056 | 46990 | SSQAGGSSNDNA | 2.84 | 1.87 | 6.83 |
| 478 | ATLVT012XX1661 | 46595 | SGTSGASSNDNH | 3.2 | 1.26 | 6.94 |
| 479 | ATLVT012XX602 | 45536 | NSAAGAASNDNH | 3.35 | 3.56 | 3.73 |
| 480 | ATLVT012XX515 | 45449 | NGTSGASTNDNH | 2.45 | 3.02 | 5.96 |
| 481 | ATLVT012XX2968 | 47902 | TSASGGSSNDNA | 4.25 | 0.88 | 5.62 |
| 482 | ATLVT012XX545 | 45479 | NGTTAGATNDNH | 5.73 | 1.16 | 2.73 |
| 483 | ATLVT012XX1340 | 46274 | SGEAGGSTNDNH | 4.51 | 2.49 | 3.09 |
| 484 | ATLVT012XX2678 | 47612 | TGQSGGATNDNH | 3.15 | 2.84 | 4.95 |
| 485 | ATLVT012XX2777 | 47711 | TGTAGGSSNDNH | 3.51 | 2.69 | 4.52 |
| 486 | ATLVT012XX1381 | 46315 | SGESGGATNDNA | 3.87 | 1.62 | 5.27 |
| 487 | ATLVT012XX2282 | 47216 | SSTTGAATNDNH | 4.89 | 2.68 | 2.16 |
| 488 | ATLVT012XX2239 | 47173 | SSTSGASINDNA | 3.61 | 3.87 | 2.82 |
| 489 | ATLVT012XX2924 | 47858 | TSAAGGSTNDNH | 2.57 | 4.56 | 3.71 |
| 490 | ATLVT012XX1188 | 46122 | SGAAGGASNDNT | 1.87 | 3.58 | 6.16 |
| 491 | ATLVT012XX2729 | 47663 | TGQTGGSSNDNH | 3.83 | 3.71 | 2.62 |
| 492 | ATLVT012XX2971 | 47905 | TSASGGSTNDNA | 3.88 | 3.15 | 3.27 |
| 493 | ATLVT012XX2157 | 47091 | SSQTGGSTNDNT | 2.32 | 3.63 | 5.28 |
| 494 | ATLVT012XX2630 | 47564 | TGQAGGATNDNH | 2.92 | 3.57 | 4.33 |
| 495 | ATLVT012XX1037 | 45971 | NSTAGAATNDNH | 3.88 | 3.18 | 3.17 |
| 496 | ATLVT012XX2007 | 46941 | SSETGGATNDNT | 4.08 | 2.97 | 3.09 |
| 497 | ATLVT012XX1194 | 46128 | SGAAGGSSNDNT | 1.11 | 3.79 | 7.11 |
| 498 | ATLVT012XX2234 | 47168 | SSTSGAATNDNH | 3.6 | 2.84 | 4.06 |
| 499 | ATLVT012XX1069 | 46003 | NSTSAGASNDNA | 1.53 | 6.11 | 3.37 |
| 500 | ATLVT012XX1288 | 46222 | SGATGGSSNDNA | 4.45 | 2.4 | 3.13 |
| 501 | ATLVT012XX815 | 45749 | NSESGGSINDNH | 4.46 | 4.04 | 1 |
| 502 | ATLVT012XX1214 | 46148 | SGASAGATNDNH | 4.35 | 2.72 | 2.87 |
| 503 | ATLVT012XX1184 | 46118 | SGAAGASINDNH | 2.9 | 4.22 | 3.39 |
| 504 | ATLVT012XX1496 | 46430 | SGQSAASINDNH | 3.71 | 4.54 | 1.58 |
| 505 | ATLVT012XX2606 | 47540 | TGQAAGATNDNH | 2.52 | 4.01 | 4.27 |
| 506 | ATLVT012XX2233 | 47167 | SSTSGAATNDNA | 3.15 | 3.3 | 4.08 |
| 507 | ATLVT012XX1074 | 46008 | NSTSAGAINDNT | 3.38 | 2.79 | 4.35 |
| 508 | ATLVT012XX2957 | 47891 | TSASGASSNDNH | 6.29 | 0.43 | 2.33 |
| 509 | ATLVT012XX860 | 45794 | NSETGGSSNDNH | 4.99 | 3.45 | 0.64 |
| 510 | ATLVT012XX1289 | 46223 | SGATGGSSNDNH | 5.61 | 1.59 | 1.97 |
| 511 | ATLVT012XX669 | 45603 | NSASGGSSNDNT | 2.14 | 3.73 | 5.17 |
| 512 | ATLVT012XX605 | 45539 | NSAAGAATNDNH | 3.07 | 3.52 | 3.84 |
| 513 | ATLVT012XX812 | 45746 | NSESGGSSNDNH | 4.41 | 3.63 | 1.35 |
| 514 | ATLVT012XX3298 | 48232 | TSQTGGASNDNA | 1.55 | 5.16 | 4.27 |
| 515 | ATLVT012XX2582 | 47516 | TGETGGATNDNH | 4.03 | 3.13 | 2.63 |
| 516 | ATLVT012XX551 | 45485 | NGTTAGSTNDNH | 2.57 | 2.91 | 5.38 |
| 517 | ATLVT012XX557 | 45491 | NGTTGAATNDNH | 4.51 | 2.53 | 2.55 |
| 518 | ATLVT012XX2106 | 47040 | SSQSGGSSNDNT | 3.21 | 2.84 | 4.36 |
| 519 | ATLVT012XX1556 | 46490 | SGQTAGSTNDNH | 2.41 | 4.09 | 4.13 |
| 520 | ATLVT012XX3304 | 48238 | TSQTGGSSNDNA | 3.24 | 3.2 | 3.84 |
| 521 | ATLVT012XX2778 | 47712 | TGTAGGSSNDNT | 1.77 | 3.61 | 5.82 |
| 522 | ATLVT012XX1437 | 46371 | SGETGGSTNDNT | 4.5 | 1.2 | 4.23 |
| 523 | ATLVT012XX2587 | 47521 | TGETGGSINDNA | 4.8 | 3.03 | 1.3 |
| 524 | ATLVT012XX391 | 45325 | NGQTAASSNDNA | 4.86 | −0.25 | 5.41 |
| 525 | ATLVT012XX1520 | 46454 | SGQSGASTNDNH | 1.15 | 7.24 | 2.13 |
| 526 | ATLVT012XX2138 | 47072 | SSQTGAATNDNH | 2.36 | 0.76 | 8.38 |
| 527 | ATLVT012XX1907 | 46841 | SSEAGGASNDNH | 2.89 | 5.29 | 1.52 |
| 528 | ATLVT012XX3356 | 48290 | TSTAGGSINDNH | 2.39 | 3.51 | 4.67 |
| 529 | ATLVT012XX1132 | 46066 | NSTTGASSNDNA | 1.24 | 5.02 | 4.7 |
| 530 | ATLVT012XX1644 | 46578 | SGTSAGASNDNT | 4.95 | 0.48 | 4.16 |
| 531 | ATLVT012XX853 | 45787 | NSETGGASNDNA | 1.47 | 6.62 | 2.19 |
| 532 | ATLVT012XX3206 | 48140 | TSQAGGATNDNH | 1.74 | 3.64 | 5.54 |
| 533 | ATLVT012XX1428 | 46362 | SGETGGASNDNT | 4.7 | 0.95 | 3.89 |
| 534 | ATLVT012XX1081 | 46015 | NSTSGAASNDNA | 3.74 | 1.34 | 5.04 |
| 535 | ATLVT012XX1076 | 46010 | NSTSAGSSNDNH | 1.67 | 4.46 | 4.55 |
| 536 | ATLVT012XX2030 | 46964 | SSQAAGATNDNH | 2.24 | 4.25 | 3.85 |
| 537 | ATLVT012XX1915 | 46849 | SSEAGGSINDNA | 4.76 | 2.6 | 1.64 |
| 538 | ATLVT012XX1610 | 46544 | SGTAGAATNDNH | 2.57 | 3.55 | 4.17 |
| 539 | ATLVT012XX2826 | 47760 | TGTSGGSSNDNT | 3.17 | 1.26 | 6.06 |
| 540 | ATLVT012XX2284 | 47218 | SSTTGASSNDNA | 2.41 | 6.71 | 0.36 |
| 541 | ATLVT012XX1119 | 46053 | NSTTAGATNDNT | 1.47 | 4.61 | 4.67 |
| 542 | ATLVT012XX1123 | 46057 | NSTTAGSINDNA | 1.29 | 3.69 | 6.15 |
| 543 | ATLVT012XX1131 | 46065 | NSTTGAATNDNT | 1.82 | 3.53 | 5.43 |
| 544 | ATLVT012XX1211 | 46145 | SGASAGASNDNH | 5.03 | 2.83 | 0.82 |
| 545 | ATLVT012XX1521 | 46455 | SGQSGASTNDNT | 3.76 | 2.56 | 3.35 |
| 546 | ATLVT012XX378 | 45312 | NGQSGGATNDNT | 3.81 | 1.68 | 4.36 |
| 547 | ATLVT012XX119 | 45053 | NGATAGSINDNH | 6.79 | 0.72 | 0.46 |
| 548 | ATLVT012XX1708 | 46642 | SGTTGASSNDNA | 4.91 | 1.72 | 2.39 |
| 549 | ATLVT012XX2438 | 47372 | TGATGGATNDNH | 2.66 | 2.83 | 4.8 |
| 550 | ATLVT012XX1963 | 46897 | SSESGGSINDNA | 4.88 | 3.21 | 0.5 |
| 551 | ATLVT012XX2772 | 47706 | TGTAGGASNDNT | 2.61 | 2.43 | 5.36 |
| 552 | ATLVT012XX1122 | 46056 | NSTTAGSSNDNT | 1.92 | 3.38 | 5.32 |
| 553 | ATLVT012XX1389 | 46323 | SGESGGSINDNT | 3.33 | 3.08 | 3.25 |
| 554 | ATLVT012XX1032 | 45966 | NSTAAGSINDNT | 3.62 | 2 | 4.13 |
| 555 | ATLVT012XX2750 | 47684 | TGTAAGATNDNH | 2.32 | 5.21 | 2.16 |
| 556 | ATLVT012XX137 | 45071 | NGATGGATNDNH | 3.23 | 2.11 | 4.56 |
| 557 | ATLVT012XX1665 | 46599 | SGTSGASTNDNT | 4.67 | 1.62 | 2.73 |
| 558 | ATLVT012XX509 | 45443 | NGTSGAATNDNH | 5.09 | 1.61 | 1.98 |
| 559 | ATLVT012XX954 | 45888 | NSQSGGATNDNT | 4.05 | 2.41 | 2.72 |
| 560 | ATLVT012XX1514 | 46448 | SGQSGAATNDNH | 3.13 | 3.65 | 2.71 |
| 561 | ATLVT012XX879 | 45813 | NSQAAGASNDNT | 2.66 | 3.5 | 3.7 |
| 562 | ATLVT012XX251 | 45185 | NGETAASTNDNH | 4.09 | 5.38 | −1.18 |
| 563 | ATLVT012XX3353 | 48287 | TSTAGGSENDNH | 3.2 | 3.31 | 2.99 |
| 564 | ATLVT012XX2843 | 47777 | TGTTAGASNDNH | 4.56 | 1.7 | 2.72 |
| 565 | ATLVT012XX805 | 45739 | NSESGGASNDNA | 5.53 | 0.79 | 2.22 |
| 566 | ATLVT012XX2868 | 47802 | TGTTGGASNDNT | 2.26 | 2.21 | 5.99 |
| 567 | ATLVT012XX1042 | 45976 | NSTAGASTNDNA | 2.06 | 2.81 | 5.53 |
| 568 | ATLVT012XX2871 | 47805 | TGTTGGATNDNT | 1.56 | 3.6 | 5.34 |
| 569 | ATLVT012XX2627 | 47561 | TGQAGGASNDNH | 4.14 | 0.94 | 4.32 |
| 570 | ATLVT012XX1914 | 46848 | SSEAGGSSNDNT | 4.93 | 1.29 | 2.53 |
| 571 | ATLVT012XX1370 | 46304 | SGESGAATNDNH | 0.69 | 7.59 | 1.67 |
| 572 | ATLVT012XX1384 | 46318 | SGESGGSSNDNA | 4.08 | 2.22 | 2.68 |
| 573 | ATLVT012XX3357 | 48291 | TSTAGGSINDNT | 1.39 | 2.46 | 6.94 |
| 574 | ATLVT012XX2636 | 47570 | TGQAGGSINDNH | 1.72 | 3.06 | 5.57 |
| 575 | ATLVT012XX1103 | 46037 | NSTTAAASNDNH | 2.77 | 4.39 | 2.06 |
| 576 | ATLVT012XX1129 | 46063 | NSTTGAATNDNA | 1.31 | 4.17 | 4.82 |
| 577 | ATLVT012XX3326 | 48260 | TSTAAGAINDNH | 0.15 | 8.74 | 0.93 |
| 578 | ATLVT012XX1643 | 46577 | SGTSAGASNDNH | 4.16 | 1.39 | 3.52 |
| 579 | ATLVT012XX2042 | 46976 | SSQAGAATNDNH | 2.74 | 2.49 | 4.5 |
| 580 | ATLVT012XX1215 | 46149 | SGASAGATNDNT | 3.43 | 1.52 | 4.53 |
| 581 | ATLVT012XX1192 | 46126 | SGAAGGSSNDNA | 1.62 | 1.95 | 7.07 |
| 582 | ATLVT012XX1906 | 46840 | SSEAGGASNDNA | 4.1 | 2.19 | 2.5 |
| 583 | ATLVT012XX2095 | 47029 | SSQSGASTNDNA | 4.15 | 0.41 | 4.7 |
| 584 | ATLVT012XX2152 | 47086 | SSQTGGSSNDNA | 2.39 | 1.3 | 6.57 |
| 585 | ATLVT012XX1008 | 45942 | NSQTGGSTNDNT | 2.86 | 5.16 | 0.79 |
| 586 | ATLVT012XX1336 | 46270 | SGEAGGSSNDNA | 3.59 | 4.35 | 0.58 |
| 587 | ATLVT012XX2393 | 47327 | TGASGGSSNDNH | 1.6 | 1.69 | 7.37 |
| 588 | ATLVT012XX3347 | 48281 | TSTAGGASNDNH | 2.13 | 3.47 | 4.17 |
| 589 | ATLVT012XX2823 | 47757 | TGTSGGATNDNT | 1.47 | 2.91 | 6.01 |
| 590 | ATLVT012XX1088 | 46022 | NSTSGASSNDNT | 1.39 | 3.34 | 5.59 |
| 591 | ATLVT012XX1134 | 46068 | NSTTGASSNDNT | 0.4 | 3.92 | 6.53 |
| 592 | ATLVT012XX2139 | 47073 | SSQTGAATNDNT | 2.74 | −1.39 | 9.35 |
| 593 | ATLVT012XX2874 | 47808 | TGTTGGSSNDNT | 1.87 | 2.74 | 5.5 |
| 594 | ATLVT012XX1003 | 45937 | NSQTGGSSNDNA | 4.78 | 2.23 | 1.13 |
| 595 | ATLVT012XX1035 | 45969 | NSTAGAASNDNT | 3.06 | 1.96 | 4.43 |
| 596 | ATLVT012XX1183 | 46117 | SGAAGASINDNA | 1.27 | 5.11 | 3.43 |
| 597 | ATLVT012XX661 | 45595 | NSASGGASNDNA | 2.82 | 1.92 | 4.86 |
| 598 | ATLVT012XX2894 | 47828 | TSAAAGAINDNH | 4.38 | 2.3 | 1.69 |
| 599 | ATLVT012XX2728 | 47662 | TGQTGGSSNDNA | 1.72 | 4.75 | 3.07 |
| 600 | ATLVT012XX2852 | 47786 | TGTTAGSINDNH | 2.16 | 1.24 | 6.83 |
| 601 | ATLVT012XX2723 | 47657 | TGQTGGASNDNH | 2.04 | 1.58 | 6.58 |
| 602 | ATLVT012XX1712 | 46646 | SGTTGASTNDNH | 5.33 | 0.8 | 1.95 |
| 603 | ATLVT012XX1909 | 46843 | SSEAGGATNDNA | 3.44 | 1.9 | 3.75 |
| 604 | ATLVT012XX2315 | 47249 | TGAAAGASNDNH | 5.08 | 1.23 | 1.79 |
| 605 | ATLVT012XX941 | 45875 | NSQSGAATNDNH | 4.54 | 2.59 | 0.96 |
| 606 | ATLVT012XX1701 | 46635 | SGTTAGSINDNT | 0.04 | 4.83 | 5.78 |
| 607 | ATLVT012XX2330 | 47264 | TGAAGAATNDNH | 2.04 | 3.48 | 4.09 |
| 608 | ATLVT012XX3348 | 48282 | TSTAGGASNDNT | 1.12 | 3.3 | 5.88 |
| 609 | ATLVT012XX233 | 45167 | NGESGGATNDNH | 4.23 | 3.07 | 0.84 |
| 610 | ATLVT012XX863 | 45797 | NSETGGSINDNH | 2.37 | 6.53 | −0.42 |
| 611 | ATLVT012XX321 | 45255 | NGQAGASSNDNT | 4.99 | −1.11 | 4.88 |
| 612 | ATLVT012XX2096 | 47030 | SSQSGASTNDNH | 3.8 | 2.84 | 1.82 |
| 613 | ATLVT012XX1231 | 46165 | SGASGASINDNA | 5.17 | 0.62 | 2.31 |
| 614 | ATLVT012XX1070 | 46004 | NSTSAGASNDNH | 1.09 | 4.42 | 4.4 |
| 615 | ATLVT012XX2725 | 47659 | TGQTGGATNDNA | 3.88 | −0.09 | 5.4 |
| 616 | ATLVT012XX1385 | 46319 | SGESGGSSNDNH | 3.59 | 2.73 | 2.26 |
| 617 | ATLVT012XX1982 | 46916 | SSETAGAINDNH | 3.42 | 4.18 | 0.67 |
| 618 | ATLVT012XX2396 | 47330 | TGASGGSINDNH | 3.18 | 2.25 | 3.55 |
| 619 | ATLVT012XX2008 | 46942 | SSETGGSSNDNA | 4.09 | 2.17 | 2.07 |
| 620 | ATLVT012XX3284 | 48218 | TSQTAGSINDNH | 1.49 | 5.58 | 2.12 |
| 621 | ATLVT012XX1284 | 46218 | SGATGGASNDNT | 2.18 | 2.86 | 4.42 |
| 622 | ATLVT012XX1137 | 46071 | NSTTGASINDNT | 1.66 | 2.46 | 5.81 |
| 623 | ATLVT012XX2241 | 47175 | SSTSGASINDNT | 4.28 | 1.29 | 2.82 |
| 624 | ATLVT012XX623 | 45557 | NSAAGGSTNDNH | 1.28 | 6.44 | 1.32 |
| 625 | ATLVT012XX2639 | 47573 | TGQSAAASNDNH | 4.08 | −0.11 | 4.91 |
| 626 | ATLVT012XX2326 | 47260 | TGAAGAASNDNA | 1.96 | 3.36 | 4.09 |
| 627 | ATLVT012XX543 | 45477 | NGTTAGASNDNT | 2.73 | 4.29 | 1.55 |
| 628 | ATLVT012XX947 | 45881 | NSQSGASTNDNH | 2.89 | 5.68 | −0.52 |
| 629 | ATLVT012XX939 | 45873 | NSQSGAASNDNT | 2.2 | 4.57 | 2.1 |
| 630 | ATLVT012XX1406 | 46340 | SGETAGATNDNH | 2.09 | 5.89 | 0.56 |
| 631 | ATLVT012XX3434 | 48368 | TSTTGAATNDNH | 3.66 | 2.15 | 2.64 |
| 632 | ATLVT012XX861 | 45795 | NSETGGSSNDNT | 2.99 | 2.22 | 3.69 |
| 633 | ATLVT012XX857 | 45791 | NSETGGATNDNH | 3.29 | 3.67 | 1.28 |
| 634 | ATLVT012XX332 | 45266 | NGQAGGSSNDNH | 4.69 | 1.93 | 1.11 |
| 635 | ATLVT012XX2288 | 47222 | SSTTGASTNDNH | 4.45 | 2.54 | 0.73 |
| 636 | ATLVT012XX1426 | 46360 | SGETGGASNDNA | 2.63 | 2.36 | 4.04 |
| 637 | ATLVT012XX2869 | 47803 | TGTTGGATNDNA | 0.8 | 3.75 | 5.39 |
| 638 | ATLVT012XX938 | 45872 | NSQSGAASNDNH | 2.69 | 4.2 | 1.55 |
| 639 | ATLVT012XX3245 | 48179 | TSQSGASSNDNH | 2 | 4.92 | 1.81 |
| 640 | ATLVT012XX2684 | 47618 | TGQSGGSINDNH | 1.06 | 4.95 | 3.38 |
| 641 | ATLVT012XX619 | 45553 | NSAAGGSSNDNA | 1.03 | 3.8 | 4.9 |
| 642 | ATLVT012XX2329 | 47263 | TGAAGAATNDNA | 1.9 | 3.25 | 4.08 |
| 643 | ATLVT012XX701 | 45635 | NSATGAATNDNH | 5 | 1.28 | 1.29 |
| 644 | ATLVT012XX1006 | 45940 | NSQTGGSTNDNA | 4.38 | 2.44 | 0.87 |
| 645 | ATLVT012XX2534 | 47468 | TGESGGATNDNH | 2.32 | 3.33 | 3.19 |
| 646 | ATLVT012XX899 | 45833 | NSQAGASTNDNH | 2.3 | 5.01 | 1.06 |
| 647 | ATLVT012XX1967 | 46901 | SSETAAASNDNH | −0.44 | 4.33 | 6.63 |
| 648 | ATLVT012XX711 | 45645 | NSATGGASNDNT | 2.21 | 3.24 | 3.48 |
| 649 | ATLVT012XX717 | 45651 | NSATGGSSNDNT | 2.89 | 1.21 | 4.92 |
| 650 | ATLVT012XX3253 | 48187 | TSQSGGATNDNA | 2.96 | 2.57 | 3.04 |
| 651 | ATLVT012XX1495 | 46429 | SGQSAASTNDNA | 1.8 | 6.72 | −0.31 |
| 652 | ATLVT012XX1191 | 46125 | SGAAGGATNDNT | 0.81 | 3.4 | 5.65 |
| 653 | ATLVT012XX1868 | 46802 | SSATGGSINDNH | 5.56 | 0.85 | 0.78 |
| 654 | ATLVT012XX44 | 44978 | NGAAGGSSNDNH | 1.91 | 3.19 | 4.02 |
| 655 | ATLVT012XX1898 | 46832 | SSEAGAATNDNH | 2.19 | 4.45 | 1.91 |
| 656 | ATLVT012XX910 | 45844 | NSQAGGSTNDNA | 2.87 | 3.57 | 1.87 |
| 657 | ATLVT012XX998 | 45932 | NSQTGGASNDNH | 2.97 | 2.85 | 2.64 |
| 658 | ATLVT012XX2794 | 47728 | TGTSAGASNDNA | 4.87 | 0.85 | 1.95 |
| 659 | ATLVT012XX1858 | 46792 | SSATGGASNDNA | 5.07 | 1.58 | 0.65 |
| 660 | ATLVT012XX3303 | 48237 | TSQTGGATNDNT | 0.93 | 2.69 | 6.3 |
| 661 | ATLVT012XX2231 | 47165 | SSTSGAASNDNH | 2.92 | 2.11 | 3.62 |
| 662 | ATLVT012XX2228 | 47162 | SSTSAGSINDNH | 3.11 | 2.7 | 2.53 |
| 663 | ATLVT012XX909 | 45843 | NSQAGGSSNDNT | 3.24 | 2.36 | 2.72 |
| 664 | ATLVT012XX2236 | 47170 | SSTSGASSNDNA | 4.44 | 1.33 | 1.98 |
| 665 | ATLVT012XX2918 | 47852 | TSAAGGATNDNH | 2.89 | 2.96 | 2.53 |
| 666 | ATLVT012XX1519 | 46453 | SGQSGASTNDNA | 2.65 | 2.91 | 3 |
| 667 | ATLVT012XX1043 | 45977 | NSTAGASINDNH | 2.02 | 3.58 | 3.21 |
| 668 | ATLVT012XX384 | 45318 | NGQSGGSINDNT | 1.66 | 4.18 | 3.05 |
| 669 | ATLVT012XX333 | 45267 | NGQAGGSSNDNT | 1.72 | 3.96 | 3.16 |
| 670 | ATLVT012XX902 | 45836 | NSQAGGASNDNH | 4.13 | 1.98 | 1.59 |
| 671 | ATLVT012XX1285 | 46219 | SGATGGATNDNA | 1.65 | 2.13 | 5.6 |
| 672 | ATLVT012XX1917 | 46851 | SSEAGGSINDNT | 3.65 | 2.39 | 1.83 |
| 673 | ATLVT012XX2866 | 47800 | TGTTGGASNDNA | 1.56 | 2.73 | 4.97 |
| 674 | ATLVT012XX715 | 45649 | NSATGGSSNDNA | 2.53 | 2.34 | 3.79 |
| 675 | ATLVT012XX2237 | 47171 | SSTSGASSNDNH | 2.3 | 3.92 | 2.15 |
| 676 | ATLVT012XX642 | 45576 | NSASAGAINDNT | 2.65 | 5.09 | 0.04 |
| 677 | ATLVT012XX2752 | 47686 | TGTAAGSSNDNA | 4.94 | 1.12 | 1.22 |
| 678 | ATLVT012XX3309 | 48243 | TSQTGGSINDNT | 1.43 | 3.8 | 3.77 |
| 679 | ATLVT012XX91 | 45025 | NGASGGSSNDNA | 2.52 | 1.76 | 4.48 |
| 680 | ATLVT012XX808 | 45742 | NSESGGATNDNA | 3.12 | 2.7 | 2.23 |
| 681 | ATLVT012XX2905 | 47839 | TSAAGAATNDNA | 1.97 | 3.11 | 3.67 |
| 682 | ATLVT012XX2453 | 47387 | TGEAAASSNDNH | 4.37 | 2.42 | 0.44 |
| 683 | ATLVT012XX1867 | 46801 | SSATGGSINDNA | 4.01 | 2.3 | 1.21 |
| 684 | ATLVT012XX1066 | 46000 | NSTSAASTNDNA | 2.15 | 3.11 | 3.37 |
| 685 | ATLVT012XX113 | 45047 | NGATAGATNDNH | 3.78 | 3.44 | 0.14 |
| 686 | ATLVT012XX1133 | 46067 | NSTTGASSNDNH | 1.14 | 2.59 | 5.75 |
| 687 | ATLVT012XX1790 | 46724 | SSASAGAINDNH | 2.86 | 5.12 | −0.47 |
| 688 | ATLVT012XX643 | 45577 | NSASAGSSNDNA | 0.04 | 4.83 | 4.74 |
| 689 | ATLVT012XX2387 | 47321 | TGASGGASNDNH | 3.09 | 1.9 | 3.27 |
| 690 | ATLVT012XX1291 | 46225 | SGATGGSINDNA | 3.07 | 2.41 | 2.65 |
| 691 | ATLVT012XX1135 | 46069 | NSTTGASTNDNA | 0.21 | 4.05 | 5.39 |
| 692 | ATLVT012XX1601 | 46535 | SGTAAGSSNDNH | 2.96 | 4.64 | −0.08 |
| 693 | ATLVT012XX1565 | 46499 | SGQTGASSNDNH | 2.75 | 3.61 | 1.6 |
| 694 | ATLVT012XX1110 | 46044 | NSTTAASSNDNT | 4.61 | −0.26 | 3.37 |
| 695 | ATLVT012XX2220 | 47154 | SSTSAGASNDNT | 3.21 | 0.55 | 4.7 |
| 696 | ATLVT012XX318 | 45252 | NGQAGAATNDNT | 6 | −0.44 | 1.16 |
| 697 | ATLVT012XX3441 | 48375 | TSTTGASINDNI | 1.27 | 2.66 | 5.29 |
| 698 | ATLVT012XX2184 | 47118 | SSTAGAASNDNT | 3.72 | 1.82 | 2.15 |
| 699 | ATLVT012XX497 | 45431 | NGTSAGATNDNH | 2.81 | 2.75 | 2.49 |
| 700 | ATLVT012XX314 | 45448 | NGTSGASINDNA | 1.3 | 1.86 | 6.2 |
| 701 | ATLVT012XX2771 | 47705 | TGTAGGASNDNH | 2.02 | 1.92 | 4.87 |
| 702 | ATLVT012XX2906 | 47840 | TSAAGAATNDNH | 2.1 | 2.96 | 3.37 |
| 703 | ATLVT01XXX1166 | 46100 | SGAAAGAINDNH | 1.81 | 2.85 | 4 |
| 704 | ATLVT012XX765 | 45699 | NSEAGGSSNDNT | 2.25 | 1.02 | 5.59 |
| 705 | ATLVT012XX932 | 45866 | NSQSAGSSNDNH | 3.47 | 4.62 | −1.13 |
| 706 | ATLVT012XX2817 | 47751 | TGTSGASTNDNT | 0.4 | 7.81 | 0.03 |
| 707 | ATLVT012XX472 | 45406 | NGTAGGAINDNA | 1.98 | 1.69 | 5.15 |
| 708 | ATLVT012XX2588 | 47522 | TGETGGSINDNH | 4.45 | 1.6 | 1.02 |
| 709 | ATLVT012XX2185 | 47119 | SSTAGAATNDNA | 2.43 | 2.38 | 3.47 |
| 710 | ATLVT012XX1660 | 46594 | SGTSGASSNDNA | 3.09 | 0.69 | 4.5 |
| 711 | ATLVT012XX3374 | 48308 | TSTSAGAINDNH | 0.26 | 5.28 | 3.45 |
| 712 | ATLVT012XX1290 | 46224 | SGATGGSSNDNT | 3.71 | 0.98 | 3.06 |
| 713 | ATLVT012XX375 | 45309 | NGQSGGASNDNT | 2.43 | 3.76 | 1.65 |
| 714 | ATLVT012XX656 | 45590 | NSASGASSNDNH | 3.92 | 3.02 | 0.04 |
| 715 | ATLVT012XX1504 | 46438 | SGQSAGSSNDNA | 4.11 | 2.3 | 0.64 |
| 716 | ATLVT012XX1925 | 46859 | SSESAASSNDNH | 5.37 | 0.28 | 1.06 |
| 717 | ATLVT012XX2792 | 47726 | TGTSAASINDNH | 2.71 | 4.99 | −0.44 |
| 718 | ATLVT012XX2637 | 47571 | TGQAGGSINDNT | 3.06 | 0.9 | 4.2 |
| 719 | ATLVT012XX3256 | 48190 | TSQSGGSSNDNA | 2.31 | 2.59 | 3.29 |
| 720 | ATLVT012XX2235 | 47169 | SSTSGAATNDNT | 2.6 | 1.3 | 4.46 |
| 721 | ATLVT012XX459 | 45393 | NGTAGAASNDNT | 4.46 | 0.98 | 1.67 |
| 722 | ATLVT012XX1460 | 46394 | SGQAAGSTNDNH | 2.01 | 3.04 | 3.23 |
| 723 | ATLVT012XX1604 | 46538 | SGTAAGSINDNH | 2.67 | 3.28 | 1.75 |
| 724 | ATLVT012XX292 | 45226 | NGQAAAATNDNA | 5.64 | −2.38 | 3.93 |
| 725 | ATLVT012XX1170 | 46104 | SGAAAGSSNDNT | 4.28 | 0.97 | 1.95 |
| 726 | ATLVT012XX3346 | 48280 | TSTAGGASNDNA | 0.99 | 3.37 | 4.49 |
| 727 | ATLVT012XX1220 | 46154 | SGASAGSTNDNH | 3.62 | 1.55 | 2.31 |
| 728 | ATLVT012XX1739 | 46673 | SSAAAGASNDNH | 0.03 | 7.11 | 1.32 |
| 729 | ATLVT012XX2031 | 46965 | SSQAAGAINDNT | 3.48 | 1.86 | 2.13 |
| 730 | ATLVT012XX3203 | 48137 | TSQAGGASNDNH | 3.38 | 1.52 | 2.73 |
| 731 | ATLVT012XX2963 | 47897 | TSASGGASNDNH | 1.74 | 4 | 2.37 |
| 732 | ATLVT012XX2187 | 47121 | SSTAGAATNDNT | 1.53 | 2.86 | 4.17 |
| 733 | ATLVT012XX608 | 45542 | NSAAGASSNDNH | 0.17 | 7.35 | 0.7 |
| 734 | ATLVT012XX3385 | 48319 | TSTSGAATNDNA | −0.46 | 4.36 | 5.62 |
| 735 | ATLVT012XX1185 | 46119 | SGAAGASINDNT | 1.68 | 2.83 | 3.89 |
| 736 | ATLVT012XX87 | 45021 | NGASGGASNDNT | 4.09 | 0.61 | 2.6 |
| 737 | ATLVT012XX3163 | 48097 | TSETGGSTNDNA | 5.44 | 1.51 | −0.88 |
| 738 | ATLVT012XX2770 | 47704 | TGTAGGASNDNA | 0.68 | 3.59 | 4.58 |
| 739 | ATLVT012XX1040 | 45974 | NSTAGASSNDNH | 1.01 | 3.13 | 4.61 |
| 740 | ATLVT012XX3283 | 48217 | TSQTAGSINDNA | 4.39 | 0.77 | 1.85 |
| 741 | ATLVT012XX1818 | 46752 | SSASGGSSNDNT | 3.1 | 2.54 | 1.77 |
| 742 | ATLVT012XX2151 | 47085 | SSQTGGATNDNT | 1.25 | 1.23 | 6.61 |
| 743 | ATLVT012XX2058 | 46992 | SSQAGGSSNDNT | 1.63 | 1.54 | 5.57 |
| 744 | ATLVT012XX1036 | 45970 | NSTAGAATNDNA | 1.93 | 2.01 | 4.45 |
| 745 | ATLVT012XX2327 | 47261 | TGAAGAASNDNH | 1.82 | 2.83 | 3.55 |
| 746 | ATLVT012XX92 | 45026 | NGASGGSSNDNH | 2.63 | 1.6 | 3.75 |
| 747 | ATLVT012XX1127 | 46061 | NSTTGAASNDNH | 2.51 | 2.37 | 2.94 |
| 748 | ATLVT012XX29 | 44963 | NGAAGAATNDNH | 1.44 | 3.37 | 3.48 |
| 749 | ATLVT012XX1959 | 46893 | SSESGGATNDNT | 3.39 | 2.26 | 1.53 |
| 750 | ATLVT012XX379 | 45313 | NGQSGGSSNDNA | 1.96 | 3.7 | 2.14 |
| 751 | ATLVT012XX579 | 45513 | NSAAAAASNDNT | 6.7 | −2.03 | 1.37 |
| 752 | ATLVT012XX2914 | 47848 | TSAAGGASNDNA | 1.5 | 2.72 | 4.15 |
| 753 | ATLVT012XX503 | 45437 | NGTSAGSTNDNH | 2.58 | 2.44 | 2.67 |
| 754 | ATLVT012XX2964 | 47898 | TSASGGASNDNT | 3.44 | 1.48 | 2.4 |
| 755 | ATLVT012XX2802 | 47736 | TGTSAGSSNDNT | 2.28 | 2.99 | 2.47 |
| 756 | ATLVT012XX1454 | 46388 | SGQAAGATNDNH | 1.68 | 3.31 | 3.06 |
| 757 | ATLVT012XX1682 | 46616 | SGTTAAATNDNH | 4.49 | 2.63 | −0.89 |
| 758 | ATLVT012XX2773 | 47707 | TGTAGGATNDNA | 1.58 | 0.84 | 6.41 |
| 759 | ATLVT012XX2192 | 47126 | SSTAGASTNDNH | 2.24 | 1.88 | 3.92 |
| 760 | ATLVT012XX1472 | 46406 | SGQAGASTNDNH | 0.75 | 4.49 | 3.12 |
| 761 | ATLVT012XX144 | 45078 | NGATGGSINDNT | 1.86 | 2.63 | 3.59 |
| 762 | ATLVT012XX1136 | 46070 | NSTTGASTNDNH | 1.27 | 3.09 | 4.01 |
| 763 | ATLVT012XX305 | 45239 | NGQAAGATNDNH | 1.39 | 4.64 | 1.81 |
| 764 | ATLVT012XX2221 | 47155 | SSTSAGAINDNA | 3.07 | 1.88 | 2.47 |
| 765 | ATLVT012XX2675 | 47609 | TGQSGGASNDNH | 2.13 | 3.03 | 2.58 |
| 766 | ATLVT012XX1333 | 46267 | SGEAGGATNDNA | 4.29 | 0.52 | 2.1 |
| 767 | ATLVT012XX431 | 45365 | NGQTGGSINDNH | 1.34 | 5.33 | 0.97 |
| 768 | ATLVT012XX1505 | 46439 | SGQSAGSSNDNH | 4.4 | 2 | −0.01 |
| 769 | ATLVT012XX2965 | 47899 | TSASGGATNDNA | 3.61 | 0.82 | 2.86 |
| 770 | ATLVT012XX1128 | 46062 | NSTTGAASNDNT | 2.08 | 2.32 | 3.53 |
| 771 | ATLVT012XX3188 | 48122 | TSQAAGSTNDNH | 1.71 | 2.88 | 3.42 |
| 772 | ATLVT012XX2229 | 47163 | SSTSAGSTNDNT | 2.69 | 19 | 3.01 |
| 773 | ATLVT012XX2724 | 47658 | TGQTGGASNDNT | 1.79 | 1.64 | 4.88 |
| 774 | ATLVT012XX2232 | 47166 | SSTSGAASNDNT | 2.71 | 1.78 | 3.12 |
| 775 | ATLVT012XX1709 | 46643 | SGTTGASSNDNH | 3.62 | 1.21 | 2.27 |
| 776 | ATLVT012XX1247 | 46181 | SGATAAASNDNH | 6.15 | 0.18 | −0.75 |
| 777 | ATLVT012XX1466 | 46400 | SGQAGAATNDNH | 3.29 | 2.08 | 1.68 |
| 778 | ATLVT012XX432 | 45366 | NGQTGGSINDNT | 1.82 | 4.29 | 1.36 |
| 779 | ATLVT012XX2836 | 47770 | TGTTAASSNDNA | 0.77 | 5.55 | 1.54 |
| 780 | ATLVT012XX1217 | 46151 | SGASAGSSNDNH | 4.38 | 1.24 | 0.88 |
| 781 | ATLVT012XX1378 | 46312 | SGESGGASNDNA | 3.38 | 1.26 | 2.57 |
| 782 | ATLVT012XX167 | 45101 | NGEAAGSTNDNH | 2.4 | 0.76 | 4.87 |
| 783 | ATLVT012XX531 | 45465 | NGTTAAASNDNT | 3.38 | −0.03 | 4.19 |
| 784 | ATLVT012XX1292 | 46226 | SGATGGSTNDNH | 3.15 | 1.79 | 2.24 |
| 785 | ATLVT012XX1109 | 46043 | NSTTAASSNDNH | 1.53 | 2.31 | 4.34 |
| 786 | ATLVT012XX2374 | 47308 | TGASGAASNDNA | 3.24 | 1.67 | 2.22 |
| 787 | ATLVT012XX2341 | 47275 | TGAAGGATNDNA | 1.57 | 2.72 | 3.72 |
| 788 | ATLVT012XX382 | 45316 | NGQSGGSINDNA | 2.29 | 2.73 | 2.46 |
| 789 | ATLVT012XX1664 | 46598 | SGTSGASINDNH | 3.01 | 1.42 | 2.9 |
| 790 | ATLVT012XX1371 | 46305 | SGESGAATNDNT | 0.86 | 1.6 | 6.32 |
| 791 | ATLVT012XX3261 | 48195 | TSQSGGSINDNT | 2.14 | 1.87 | 3.77 |
| 792 | ATLVT012XX641 | 45575 | NSASAGAINDNH | 1.43 | 5.31 | 0.56 |
| 793 | ATLVT012XX2435 | 47369 | TGATGGASNDNH | 0.86 | 1.97 | 5.82 |
| 794 | ATLVT012XX1557 | 46491 | SGQTAGSTNDNT | 1.71 | 3.22 | 2.76 |
| 795 | ATLVT012XX607 | 45541 | NSAAGASSNDNA | 3.63 | 2.31 | 0.61 |
| 796 | ATLVT012XX3252 | 48186 | TSQSGGASNDNT | 2.28 | 1.45 | 4.02 |
| 797 | ATLVT012XX1863 | 46797 | SSATGGATNDNT | 2.37 | 2.23 | 2.87 |
| 798 | ATLVT012XX1065 | 45999 | NSTSAASSNDNI | −0.05 | 3.92 | 4.83 |
| 799 | ATLVT012XX458 | 45392 | NGTAGAASNDNH | 3.06 | 1.79 | 2.24 |
| 800 | ATLVT012XX501 | 45435 | NGTSAGSSNDNT | 1.22 | 3.21 | 3.57 |
| 801 | ATLVT012XX362 | 45296 | NGQSGAASNDNH | 5.63 | −0.02 | 0.14 |
| 802 | ATLVT012XX1111 | 46045 | NSTTAASINDNA | −0.51 | 1.18 | 9.12 |
| 803 | ATLVT012XX2891 | 47825 | TSAAAGASNDNH | 1.08 | 4.67 | 1.9 |
| 804 | ATLVT012XX3158 | 48092 | TSETGGAINDNH | 1.14 | 4.27 | 2.29 |
| 805 | ATLVT012XX1106 | 46040 | NSTTAAATNDNH | 0.86 | 6.69 | −0.37 |
| 806 | ATLVT012XX3182 | 48116 | TSQAAGATNDNH | 1.54 | 2.66 | 3.65 |
| 807 | ATLVT012XX3422 | 48356 | TSTTAGATNDNH | 2.38 | 3.2 | 1.5 |
| 808 | ATLVT012XX907 | 45841 | NSQAGGSSNDNA | 2.12 | 3.63 | 1.39 |
| 809 | ATLVT012XX1753 | 46687 | SSAAGAATNDNA | 2.11 | 2.32 | 3.09 |
| 810 | ATLVT012XX2207 | 47141 | SSTSAAASNDNH | 0.62 | 4.32 | 3.06 |
| 811 | ATLVT012XX2002 | 46936 | SSETGGASNDNA | 1.25 | 2.03 | 4.91 |
| 812 | ATLVT012XX38 | 44972 | NGAAGGASNDNH | 1.7 | 2.73 | 3.22 |
| 813 | ATLVT012XX1771 | 46705 | SSAAGGSINDNA | 2.2 | 3.25 | 1.68 |
| 814 | ATLVT012XX1018 | 45952 | NSTAAASTNDNA | 1.72 | 3.27 | 2.47 |
| 815 | ATLVT012XX2801 | 47735 | TGTSAGSSNDNH | 3.86 | 2.29 | 0.02 |
| 816 | ATLVT012XX1707 | 46641 | SGTTGAATNDNT | 3.97 | 0.24 | 2.46 |
| 817 | ATLVT012XX1566 | 46500 | SGQTGASSNDNT | 0.54 | 3.71 | 3.88 |
| 818 | ATLVT012XX3110 | 48044 | TSESGGATNDNH | 2.01 | 1.02 | 4.81 |
| 819 | ATLVT012XX1021 | 45955 | NSTAAGASNDNA | 2.08 | 3.31 | 1.74 |
| 820 | ATLVT012XX41 | 44975 | NGAAGGATNDNH | 2.3 | 2.19 | 2.81 |
| 821 | ATLVT012XX1057 | 45991 | NSTSAAASNDNA | 4.15 | 1.26 | 0.81 |
| 822 | ATLVT012XX1652 | 46586 | SGTSAGSTNDNH | 3.41 | 0.93 | 2.51 |
| 823 | ATLVT012XX1167 | 46101 | SGAAAGAINDNT | 2.46 | 2 | 2.76 |
| 824 | ATLVT012XX2011 | 46945 | SSETGGSINDNA | 4.04 | 1.06 | 1.24 |
| 825 | ATLVT012XX2091 | 47025 | SSQSGAATNDNT | 3.06 | 0.77 | 3.3 |
| 826 | ATLVT012XX2388 | 47322 | TGASGGASNDNT | 1.18 | 3.18 | 3.41 |
| 827 | ATLVT012XX714 | 45648 | NSATGGATNDNT | 0.28 | 2.7 | 5.55 |
| 828 | ATLVT012XX3107 | 48041 | TSESGGASNDNH | 3.5 | 1.58 | 1.47 |
| 829 | ATLVT012XX1768 | 46702 | SSAAGGSSNDNA | 3.16 | 1.65 | 1.93 |
| 830 | ATLVT012XX859 | 45793 | NSETGGSSNDNA | 3.73 | 1.78 | 0.78 |
| 831 | ATLVT012XX2579 | 47513 | TGETGGASNDNH | 2.92 | 3 | 0.58 |
| 832 | ATLVT012XX617 | 45551 | NSAAGGATNDNH | 1.9 | 3.02 | 2.29 |
| 833 | ATLVT012XX2328 | 47262 | TGAAGAASNDNT | 1.37 | 2.75 | 3.54 |
| 834 | ATLVT012XX140 | 45074 | NGATGGSSNDNH | 2.74 | 0.47 | 4.1 |
| 835 | ATLVT012XX138 | 45072 | NGATGGATNDNT | 0.74 | 5.25 | 1.38 |
| 836 | ATLVT012XX86 | 45020 | NGASGGASNDNH | 3.37 | 1.33 | 1.87 |
| 837 | ATLVT012XX1165 | 46099 | SGAAAGAINDNA | 1.7 | 2.63 | 3.05 |
| 838 | ATLVT012XX1864 | 46798 | SSATGGSSNDNA | 4.29 | 0.7 | 1.1 |
| 839 | ATLVT012XX1562 | 46496 | SGQTGAATNDNH | 1.58 | 2.55 | 3.37 |
| 840 | ATLVT012XX1455 | 46389 | SGQAAGATNDNT | 1.96 | 2.42 | 2.87 |
| 841 | ATLVT012XX3296 | 48230 | TSQTGASTNDNH | 0.43 | 6.62 | 0.08 |
| 842 | ATLVT012XX1815 | 46749 | SSASGGATNDNT | 1.54 | 3.94 | 1.63 |
| 843 | ATLVT012XX2279 | 47213 | SSTTGAASNDNH | 2.72 | 2.62 | 1.26 |
| 844 | ATLVT012XX1695 | 46629 | SGTTAGAINDNT | 1.07 | 3.29 | 3.21 |
| 845 | ATLVT012XX638 | 45572 | NSASAGASNDNH | 3.9 | 2.5 | −0.64 |
| 846 | ATLVT012XX1181 | 46115 | SGAAGASSNDNH | 1.7 | 3.06 | 2.4 |
| 847 | ATLVT012XX1809 | 46743 | SSASGASINDNT | 2.41 | 0.5 | 4.47 |
| 848 | ATLVT012XX1330 | 46264 | SGEAGGASNDNA | 3.23 | 1.39 | 1.9 |
| 849 | ATLVT012XX2344 | 47278 | TGAAGGSSNDNA | 1.03 | 2.78 | 3.88 |
| 850 | ATLVT012XX2781 | 47715 | TGTAGGSINDNT | 0.99 | 1.61 | 5.44 |
| 851 | ATLVT012XX2858 | 47792 | TGTTGAATNDNH | 2.58 | 1.93 | 2.29 |
| 852 | ATLVT012XX1549 | 46483 | SGQTAGAINDNA | 1 | 5.87 | −0.06 |
| 853 | ATLVT012XX3380 | 48314 | TSTSAGSTNDNH | 0.5 | 2.69 | 4.88 |
| 854 | ATLVT012XX2436 | 47370 | TGATGGASNDNT | 0.38 | 1.16 | 7.04 |
| 855 | ATLVT012XX1498 | 46432 | SGQSAGASNDNA | 1.9 | 4.14 | 0.61 |
| 856 | ATLVT012XX452 | 45386 | NGTAAGSSNDNH | 4.28 | 1.44 | 0 |
| 857 | ATLVT012XX999 | 45933 | NSQTGGASNDNT | 4.32 | 0.62 | 0.98 |
| 858 | ATLVT012XX2028 | 46962 | SSQAAGASNDNT | 1.95 | 2.37 | 2.79 |
| 859 | ATLVT012XX1335 | 46269 | SGEAGGATNDNT | 1.48 | 3.16 | 2.55 |
| 860 | ATLVT012XX2789 | 47723 | TGTSAASSNDNH | 3 | 1.9 | 1.54 |
| 861 | ATLVT012XX1126 | 46060 | NSTTGAASNDNA | 0.27 | 4.11 | 3.36 |
| 862 | ATLVT012XX2920 | 47854 | TSAAGGSSNDNA | 1.23 | 3.23 | 2.86 |
| 863 | ATLVT012XX3297 | 48231 | TSQTGASTNDNT | 3.27 | 1.79 | 1.19 |
| 864 | ATLVT012XX3278 | 48212 | ISQTAGAINDNH | 2.46 | 2.01 | 2.3 |
| 865 | ATLVT012XX1642 | 46576 | SGTSAGASNDNA | 1.94 | 2.32 | 2.79 |
| 866 | ATLVT012XX449 | 45383 | NGTAAGAINDNH | 2.29 | 2.54 | 1.91 |
| 867 | ATLVT012XX339 | 45273 | NGQSAAASNDNT | 0.84 | 6.08 | −0.18 |
| 868 | ATLVT012XX3416 | 48350 | TSTTAASINDNH | 0.57 | 5.21 | 1.38 |
| 869 | ATLVT012XX2722 | 47656 | TGQTGGASNDNA | 1.51 | 2.25 | 3.56 |
| 870 | ATLVT012XX637 | 45571 | NSASAGASNDNA | 3.05 | 2.77 | 0.26 |
| 871 | ATLVT012XX3335 | 48269 | TSTAGAASNDNH | 4.14 | 0.6 | 1.17 |
| 872 | ATLVT012XX2064 | 46998 | SSQSAAASNDNT | 2.39 | −1.01 | 6.24 |
| 873 | ATLVT012XX1506 | 46440 | SGQSAGSSNDNT | 1.55 | 4.67 | 0.34 |
| 874 | ATLVT012XX2137 | 47071 | SSQTGAATNDNA | 2.94 | −0.47 | 4.58 |
| 875 | ATLVT012XX2492 | 47426 | TGEAGGSINDNH | 4.67 | 0.46 | 0.4 |
| 876 | ATLVT012XX1543 | 46477 | SGQTAASTNDNA | 2.7 | 2.75 | 0.83 |
| 877 | ATLVT012XX1744 | 46678 | SSAAAGSSNDNA | 3.59 | 1.28 | 1.19 |
| 878 | ATLVT012XX85 | 45019 | NGASGGASNDNA | 2.59 | 1.8 | 2.22 |
| 879 | ATLVT012XX2336 | 47270 | TGAAGASTNDNH | 1.93 | 2.16 | 2.9 |
| 880 | ATLVT012XX380 | 45314 | NGQSGGSSNDNH | 1.67 | 3.58 | 1.51 |
| 881 | ATLVT012XX424 | 45358 | NGQTGGATNDNA | 2.96 | 2.79 | 0.31 |
| 882 | ATLVT012XX2081 | 47015 | SSQSAGSSNDNH | 1.4 | 4.6 | 0.63 |
| 883 | ATLVT012XX1064 | 45998 | NSTSAASSNDNH | −0.03 | 2.88 | 5.3 |
| 884 | ATLVT012XX1603 | 46537 | SGTAAGSTNDNA | 3.27 | 1.65 | 1.23 |
| 885 | ATLVT012XX1511 | 46445 | SGQSGAASNDNH | 3.47 | 1.41 | 1.19 |
| 886 | ATLVT012XX1805 | 46739 | SSASGASSNDNH | 1.48 | 4.08 | 1.17 |
| 887 | ATLVT012XX1711 | 46645 | SGTTGASTNDNA | 3.94 | 0.6 | 1.42 |
| 888 | ATLVT012XX2386 | 47320 | TGASGGASNDNA | 2.13 | 2.33 | 2.3 |
| 889 | ATLVT012XX2012 | 46946 | SSETGGSINDNH | 3.67 | 1.37 | 0.89 |
| 890 | ATLVT012XX129 | 45063 | NGATGASSNDNT | 0.56 | 2.7 | 4.5 |
| 891 | ATLVT01XXX142 | 45076 | NGATGGSINDNA | 2.85 | 1 | 2.76 |
| 892 | ATLVT012XX1169 | 46103 | SGAAAGSSNDNH | 1.97 | 2.66 | 2.15 |
| 893 | ATLVT012XX457 | 45391 | NGTAGAASNDNA | 4.73 | −0.32 | 1.23 |
| 894 | ATLVT012XX1650 | 46584 | SGTSAGSSNDNT | 1.29 | 3.16 | 2.65 |
| 895 | ATLVT012XX1113 | 46047 | NSTTAASINDNT | 0.02 | 1.07 | 7.49 |
| 896 | ATLVT012XX3351 | 48285 | TSTAGGATNDNT | 0.93 | 1.41 | 5.46 |
| 897 | ATLVT012XX2218 | 47152 | SSTSAGASNDNA | 2.75 | 1 | 2.86 |
| 898 | ATLVT012XX3257 | 48191 | TSQSGGSSNDNH | 2.05 | 2.36 | 2.3 |
| 899 | ATLVT012XX666 | 45600 | NSASGGATNDNT | 1.1 | 1.69 | 4.81 |
| 900 | ATLVT012XX1869 | 46803 | SSATGGSINDNT | 2.9 | 1.48 | 1.96 |
| 901 | ATLVT012XX1178 | 46112 | SGAAGAATNDNH | 1.52 | 2.43 | 3.06 |
| 902 | ATLVT012XX93 | 45027 | NGASGGSSNDNT | 0.13 | 1.22 | 6.98 |
| 903 | ATLVT012XX2911 | 47845 | TSAAGASINDNA | 2.71 | 1.99 | 1.56 |
| 904 | ATLVT012XX311 | 45245 | NGQAAGSTNDNH | 2.44 | 1.97 | 2.04 |
| 905 | ATLVT012XX3014 | 47948 | TSATGGAINDNH | 2.65 | 3.39 | −0.14 |
| 906 | ATLVT012XX887 | 45821 | NSQAAGSTNDNH | 1.44 | 3.11 | 2.29 |
| 907 | ATLVT012XX2612 | 47546 | TGQAAGSINDNH | 0.69 | 1.26 | 5.93 |
| 908 | ATLVT012XX125 | 45059 | NGATGAATNDNH | 1.66 | 4.39 | 0.23 |
| 909 | ATLVT012XX1112 | 46046 | NSTTAASINDNH | −0.1 | 3.22 | 4.75 |
| 910 | ATLVT012XX3367 | 48301 | TSTSAASTNDNA | 2.02 | 0.26 | 4.9 |
| 911 | ATLVT012XX381 | 45315 | NGQSGGSSNDNT | −0.19 | 5.4 | 2.09 |
| 912 | ATLVT012XX3387 | 48321 | TSTSGAATNDNT | 0.67 | 2.74 | 4.03 |
| 913 | ATLVT012XX2708 | 47642 | TGQTAGSINDNH | 1.8 | 3 | 1.76 |
| 914 | ATLVT012XX1223 | 46157 | SGASGAASNDNH | 3.18 | 1.5 | 1.31 |
| 915 | ATLVT012XX454 | 45388 | NGTAAGSINDNA | 3.53 | 0.83 | 1.56 |
| 916 | ATLVT012XX3019 | 47953 | TSATGGSINDNA | 1.76 | 4.92 | −0.68 |
| 917 | ATLVT012XX2681 | 47615 | TGQSGGSSNDNH | 2.26 | 2.65 | 1.37 |
| 918 | ATLVT012XX94 | 45028 | NGASGGSINDNA | 1.91 | 1.8 | 3.05 |
| 919 | ATLVT012XX2193 | 47127 | SSTAGASTNDNT | 1.73 | 0.12 | 5.52 |
| 920 | ATLVT012XX1992 | 46926 | SSETGAASNDNT | 5.65 | −0.64 | −0.24 |
| 921 | ATLVT012XX1763 | 46697 | SSAAGGASNDNH | 1.6 | 2.8 | 2.29 |
| 922 | ATLVT012XX1678 | 46612 | SGTTAAASNDNA | 2.61 | 4.5 | −1.64 |
| 923 | ATLVT012XX3116 | 48050 | TSESGGSINDNH | 1.74 | 3.01 | 1.76 |
| 924 | ATLVT012XX2903 | 47837 | TSAAGAASNDNH | 1.47 | 2.32 | 3.1 |
| 925 | ATLVT012XX2223 | 47157 | SSTSAGATNDNT | 2.17 | 1.35 | 3.15 |
| 926 | ATLVT012XX3068 | 48002 | TSEAGGSTNDNH | 3.41 | 0.72 | 1.83 |
| 927 | ATLVT012XX3178 | 48112 | TSQAAGASNDNA | 1.16 | 2.54 | 3.34 |
| 928 | ATLVT012XX2946 | 47880 | TSASAGSSNDNT | 4.37 | 0.93 | −0.09 |
| 929 | ATLVT012XX2349 | 47283 | TGAAGGSTNDNT | 1.23 | 2.28 | 3.55 |
| 930 | ATLVT012XX1954 | 46888 | SSESGGASNDNA | 2.68 | 2.55 | 0.71 |
| 931 | ATLVT012XX2972 | 47906 | TSASGGSINDNH | 3.67 | 0.76 | 1.31 |
| 932 | ATLVT012XX135 | 45069 | NGATGGASNDNT | 1.49 | 2.67 | 2.58 |
| 933 | ATLVT012XX3389 | 48323 | ISTSGASSNDNH | −0.57 | 6.16 | 1.63 |
| 934 | ATLVT012XX1253 | 46187 | SGATAASSNDNH | 3.76 | 1.51 | 0.18 |
| 935 | ATLVT012XX1221 | 46155 | SGASAGSTNDNT | 0.9 | 0.2 | 6.76 |
| 936 | ATLVT012XX1632 | 46566 | SGTSAAASNDNT | 1.94 | −0.27 | 5.58 |
| 937 | ATLVT012XX507 | 45441 | NGTSGAASNDNT | 1.67 | 3.99 | 0.56 |
| 938 | ATLVT012XX3382 | 48316 | TSTSGAASNDNA | 1.01 | 2.5 | 3.59 |
| 939 | ATLVT012XX3248 | 48182 | TSQSGASTNDNH | 1.55 | 3.7 | 1.11 |
| 940 | ATLVT012XX533 | 45467 | NGTTAAATNDNH | 2.67 | 2.9 | 0.19 |
| 941 | ATLVT012XX2633 | 47567 | TGQAGGSSNDNH | 4.32 | 0.46 | 0.51 |
| 942 | ATLVT012XX3388 | 48322 | TSTSGASSNDNA | 1.2 | 3.61 | 1.8 |
| 943 | ATLVT012XX1908 | 46842 | SSEAGGASNDNT | 2.05 | 2.76 | 1.42 |
| 944 | ATLVT012XX712 | 45646 | NSATGGATNDNA | 1.23 | 1.74 | 4.12 |
| 945 | ATLVT012XX2807 | 47741 | TGTSGAASNDNH | 2.51 | 1.68 | 2 |
| 946 | ATLVT012XX1957 | 46891 | SSESGGATNDNA | 3.43 | 1.58 | 0.51 |
| 947 | ATLVT012XX1865 | 46799 | SSATGGSSNDNH | 4.31 | 1.12 | −0.4 |
| 948 | ATLVT012XX329 | 45263 | NGQAGGATNDNH | 2.56 | 1.66 | 1.89 |
| 949 | ATLVT012XX610 | 45544 | NSAAGASINDNA | 1.49 | 2.61 | 2.5 |
| 950 | ATLVT012XX1587 | 46521 | SGTAAAAINDNT | 2.35 | 1.7 | 2.19 |
| 951 | ATLVT012XX1163 | 46097 | SGAAAGASNDNH | 1.62 | 2.2 | 2.8 |
| 952 | ATLVT012XX1369 | 46303 | SGESGAATNDNA | 2.19 | 1.47 | 2.73 |
| 953 | ATLVT012XX2907 | 47841 | TSAAGAATNDNT | 1.49 | 2.38 | 2.76 |
| 954 | ATLVT012XX1703 | 46637 | SGTTGAASNDNH | 3.67 | 0.66 | 1.21 |
| 955 | ATLVT012XX673 | 45607 | NSATAAASNDNA | 4.46 | −0.79 | 1.71 |
| 956 | ATLVT012XX2783 | 47717 | TGTSAAASNDNH | 1.13 | 0.03 | 6.38 |
| 957 | ATLVT012XX510 | 45444 | NGTSGAATNDNT | 1.98 | 0.69 | 4.06 |
| 958 | ATLVT012XX3002 | 47936 | TSATGAATNDNH | 3.82 | 0.97 | 0.53 |
| 959 | ATLVT012XX2603 | 47537 | TGQAAGASNDNH | 1.16 | 2.17 | 3.54 |
| 960 | ATLVT012XX611 | 45545 | NSAAGASTNDNH | 0.65 | 4.08 | 1.94 |
| 961 | ATLVT012XX1697 | 46631 | SGTTAGSSNDNH | 0.38 | 5.08 | 1.11 |
| 962 | ATLVT012XX613 | 45547 | NSAAGGASNDNA | 0.83 | 3.31 | 2.6 |
| 963 | ATLVT012XX88 | 45022 | NGASGGATNDNA | 1.5 | 0.49 | 5.07 |
| 964 | ATLVT012XX2093 | 47027 | SSQSGASSNDNH | 1.6 | 1.02 | 4.22 |
| 965 | ATLVT012XX603 | 45537 | NSAAGAASNDNT | 2.49 | 1.5 | 2.08 |
| 966 | ATLVT012XX766 | 45700 | NSEAGGSTNDNA | 1.13 | 4.38 | 0.69 |
| 967 | ATLVT012XX530 | 45464 | NGTTAAASNDNH | 2.22 | 3.19 | 0.36 |
| 968 | ATLVT012XX2420 | 47354 | TGATAGSINDNH | 2.64 | 0.61 | 2.95 |
| 969 | ATLVT012XX1121 | 46055 | NSTTAGSSNDNH | 2.71 | 1.96 | 1.09 |
| 970 | ATLVT012XX2078 | 47012 | SSQSAGAINDNH | 1.69 | 3.11 | 1.35 |
| 971 | ATLVT012XX374 | 45308 | NGQSGGASNDNH | 1.46 | 1.83 | 3.4 |
| 972 | ATLVT012XX1512 | 46446 | SGQSGAASNDNT | 3.83 | 0.58 | 0.91 |
| 973 | ATLVT012XX1507 | 46441 | SGQSAGSINDNA | 1.94 | 3.39 | 0.53 |
| 974 | ATLVT012XX1937 | 46871 | SSESAGSSNDNH | −1.02 | 4.02 | 4.77 |
| 975 | ATLVT012XX3383 | 48317 | TSTSGAASNDNH | 1.02 | 3.02 | 2.57 |
| 976 | ATLVT012XX2321 | 47255 | TGAAAGSSNDNH | 1.55 | 2.31 | 2.57 |
| 977 | ATLVT012XX2440 | 47374 | TGATGGSSNDNA | 0.39 | 4.19 | 2.12 |
| 978 | ATLVT012XX3381 | 48315 | TSTSAGSINDNT | −0.35 | 1.4 | 6.98 |
| 979 | ATLVT012XX3164 | 48098 | TSETGGSINDNH | 2.86 | 2.98 | −0.56 |
| 980 | ATLVT012XX1943 | 46877 | SSESGAASNDNH | 1.42 | 1.22 | 4.13 |
| 981 | ATLVT012XX1293 | 46227 | SGATGGSINDNT | 1.93 | 1.49 | 2.92 |
| 982 | ATLVT012XX1282 | 46216 | SGATGGASNDNA | 3.62 | 0.64 | 1.11 |
| 983 | ATLVT012XX216 | 45150 | NGESAGSTNDNT | 2.91 | 2.05 | 0.5 |
| 984 | ATLVT012XX624 | 45558 | NSAAGGSINDNT | 0.54 | 2.84 | 3.55 |
| 985 | ATLVT012XX1271 | 46205 | SGATGAASNDNH | 1.48 | 4.64 | −0.39 |
| 986 | ATLVT012XX2441 | 47375 | TGATGGSSNDNH | 3.27 | 0.52 | 1.83 |
| 987 | ATLVT012XX1611 | 46545 | SGTAGAATNDNI | −0.05 | 1.41 | 6.38 |
| 988 | ATLVT012XX512 | 45446 | NGTSGASSNDNH | 1.01 | 1.87 | 3.97 |
| 989 | ATLVT012XX2660 | 47594 | TGQSAGSINDNH | 1.94 | 3.59 | 0.15 |
| 990 | ATLVT012XX3349 | 48283 | TSTAGGATNDNA | 0.68 | 1.72 | 4.73 |
| 991 | ATLVT012XX2335 | 47269 | TGAAGASTNDNA | 0.97 | 2.75 | 2.91 |
| 992 | ATLVT012XX3323 | 48257 | TSTAAGASNDNH | 1.06 | 3.43 | 1.86 |
| 993 | ATLVT012XX1690 | 46624 | SGTTAGASNDNA | −0.09 | 1.54 | 6.26 |
| 994 | ATLVT012XX929 | 45863 | NSQSAGATNDNH | 3.93 | 1.28 | −0.29 |
| 995 | ATLVT012XX376 | 45310 | NGQSGGATNDNA | 3.88 | 0.38 | 0.93 |
| 996 | ATLVT012XX1337 | 46271 | SGEAGGSENDNH | 2.33 | 2.74 | 0.55 |
| 997 | ATLVT012XX904 | 45838 | NSQAGGATNDNA | 3.79 | 1 | 0.27 |
| 998 | ATLVT012XX2036 | 46970 | SSQAAGSINDNH | 1.42 | 2.18 | 2.81 |
| 999 | ATLVT012XX2343 | 47277 | TGAAGGATNDNT | 1.07 | 2.54 | 2.93 |
| 1000 | ATLVT012XX1061 | 45995 | NSTSAAATNDNH | 2.99 | 2.5 | −0.31 |
| 1001 | ATLVT012XX618 | 45552 | NSAAGGATNDNT | 1.41 | 1.82 | 3.27 |
| 1002 | ATLVT012XX881 | 45815 | NSQAAGATNDNH | 1.56 | 2.5 | 2.13 |
| 1003 | ATLVT012XX3238 | 48172 | TSQSGAASNDNA | −0.22 | 1 | 7.1 |
| 1004 | ATLVT012XX3155 | 48089 | TSETGGASNDNH | 2.93 | 2.15 | 0.22 |
| 1005 | ATLVT012XX1961 | 46895 | SSESGGSSNDNH | 3.36 | 1.85 | −0.12 |
| 1006 | ATLVT012XX2892 | 47826 | TSAAAGASNDNT | 1.13 | 2.87 | 2.37 |
| 1007 | ATLVT012XX495 | 45429 | NGTSAGASNDNT | 2.98 | 1.63 | 0.8 |
| 1008 | ATLVT012XX3242 | 48176 | TSQSGAATNDNH | 1.96 | 2.11 | 1.92 |
| 1009 | ATLVT012XX1341 | 46275 | SGEAGGSINDNT | 1.72 | 3.02 | 1.17 |
| 1010 | ATLVT012XX764 | 45698 | NSEAGGSSNDNH | 1.96 | 0.83 | 3.56 |
| 1011 | ATLVT012XX3290 | 48224 | TSQTGAATNDNH | 1.16 | 2.05 | 3.34 |
| 1012 | ATLVT012XX2618 | 47552 | TGQAGAATNDNH | 1.94 | 1.44 | 2.75 |
| 1013 | ATLVT012XX90 | 45024 | NGASGGATNDNT | 2.08 | 1.43 | 2.51 |
| 1014 | ATLVT012XX2088 | 47022 | SSQSGAASNDNT | 2.71 | 0.89 | 2.13 |
| 1015 | ATLVT012XX74 | 45008 | NGASGAASNDNH | 2.14 | 1.69 | 2.08 |
| 1016 | ATLVT012XX1386 | 46320 | SGESGGSSNDNT | 1.87 | 1.43 | 2.86 |
| 1017 | ATLVT012XX3205 | 48139 | TSQAGGATNDNA | 2.31 | 1.75 | 1.68 |
| 1018 | ATLVT012XX429 | 45363 | NG?TGGSSNDNT | 2 | 2.54 | 1.19 |
| 1019 | ATLVT012XX1713 | 46647 | SGTTGASTNDNI | 3.15 | 0.64 | 1.63 |
| 1020 | ATLVT012XX2379 | 47313 | TGASGAATNDNT | 3.2 | 0.97 | 1.13 |
| 1021 | ATLVT012XX689 | 45623 | NSATAGAINDNH | 1.85 | 1.55 | 2.7 |
| 1022 | ATLVT012XX3393 | 48327 | TSTSGASTNDNT | 0.87 | 2.59 | 3.04 |
| 1023 | ATLVT012XX3180 | 48114 | TSQAAGASNDNT | 1.05 | 2.31 | 3.09 |
| 1024 | ATLVT012XX2359 | 47293 | TGASAASTNDNA | −0.14 | 6.61 | −0.42 |
| 1025 | ATLVT012XX1364 | 46298 | SGESAGSTNDNH | 2.4 | 3.77 | −1.13 |
| 1026 | ATLVT012XX331 | 45265 | NGQAGGSSNDNA | 1.73 | 1.8 | 2.55 |
| 1027 | ATLVT012XX639 | 45573 | NSASAGASNDNT | 2.35 | 2.87 | 0.11 |
| 1028 | ATLVT012XX3338 | 48272 | TSTAGAATNDNH | 2.87 | 1.44 | 1.04 |
| 1029 | ATLVT012XX2069 | 47003 | SSQSAASSNDNH | 0.84 | −0.32 | 6.78 |
| 1030 | ATLVT012XX690 | 45624 | NSATAGATNDNT | −0.14 | 2.71 | 4.56 |
| 1031 | ATLVT012XX83 | 45017 | NGASGASTNDNH | 0.86 | 3.92 | 1.27 |
| 1032 | ATLVT012XX1461 | 46395 | SGQAAGSINDNT | 2.63 | 1.1 | 1.84 |
| 1033 | ATLVT012XX1487 | 46421 | SGQSAAASNDNH | 4.2 | −0.58 | 1.31 |
| 1034 | ATLVT012XX1376 | 46310 | SGESGASTNDNH | −0.06 | 6.41 | −0.39 |
| 1035 | ATLVT012XX77 | 45011 | NGASGAATNDNH | 1.52 | 2.48 | 1.94 |
| 1036 | ATLVT012XX2322 | 47256 | TGAAAGSSNDNT | 1.62 | 1.76 | 2.7 |
| 1037 | ATLVT012XX3217 | 48151 | TSQSAAATNDNA | 1.61 | 3.53 | 0.41 |
| 1038 | ATLVT012XX120 | 45054 | NGATAGSINDNT | 1.96 | 0.28 | 3.99 |
| 1039 | ATLVT012XX649 | 45583 | NSASGAASNDNA | 3.89 | 0.07 | 0.94 |
| 1040 | ATLVT012XX1262 | 46196 | SGATAGAINDNH | 3.94 | 0.34 | 0.51 |
| 1041 | ATLVT012XX2087 | 47021 | SSQSGAASNDNH | 3.23 | 0.65 | 1.31 |
| 1042 | ATLVT012XX614 | 45548 | NSAAGGASNDNH | 1.42 | 2.2 | 2.41 |
| 1043 | ATLVT012XX2230 | 47164 | SSTSGAASNDNA | 2.49 | 1.23 | 1.82 |
| 1044 | ATLVT012XX1409 | 46343 | SGETAGSSNDNH | 0.39 | 5.09 | 0.45 |
| 1045 | ATLVT012XX1563 | 46497 | SGQTGAATNDNT | 0.53 | 0.75 | 5.77 |
| 1046 | ATLVT012XX1850 | 46784 | SSATGAATNDNH | 1.8 | 4.06 | −0.66 |
| 1047 | ATLVT012XX3109 | 48043 | TSESGGATNDNA | 3.56 | 0.45 | 0.95 |
| 1048 | ATLVT012XX1616 | 46550 | SGTAGASTNDNH | 1.8 | 1.96 | 2.02 |
| 1049 | ATLVT012XX3330 | 48264 | TSTAAGSSNDNT | 2.53 | 1.23 | 1.71 |
| 1050 | ATLVT01XXX1663 | 46597 | SGTSGASTNDNA | 2.37 | 0.24 | 3.25 |
| 1051 | ATLVT012XX231 | 45165 | NGESGGASNDNT | 3.86 | 0.82 | −0.06 |
| 1052 | ATLVT012XX1802 | 46736 | SSASGAATNDNH | 1.57 | 3.55 | 0.35 |
| 1053 | ATLVT012XX2183 | 47117 | SSTAGAASNDNH | 1.88 | 1.38 | 2.59 |
| 1054 | ATLVT012XX983 | 45917 | NSQTAGSTNDNH | 4.03 | 0.98 | −0.59 |
| 1055 | ATLVT012XX317 | 45251 | NGQAGAATNDNH | 3.91 | 0.21 | 0.59 |
| 1056 | ATLVT012XX3069 | 48003 | TSEAGGSINDNT | 3.38 | 0.27 | 1.43 |
| 1057 | ATLVT012XX122 | 45056 | NGATGAASNDNH | 3.22 | 1.23 | 0.46 |
| 1058 | ATLVT012XX1823 | 46757 | SSATAAASNDNH | 1.2 | 4.15 | 0.33 |
| 1059 | ATLVT012XX2117 | 47051 | SSQTAASSNDNH | 0.29 | −0.06 | 7.12 |
| 1060 | ATLVT012XX218 | 45152 | NGESGAASNDNH | 5.39 | −1.06 | −0.32 |
| 1061 | ATLVT012XX2727 | 47661 | TGQTGGATNDNT | 1 | 0.42 | 5.3 |
| 1062 | ATLVT012XX2702 | 47636 | TGQTAGATNDNH | 3.6 | −0.33 | 1.78 |
| 1063 | ATLVT012XX455 | 45389 | NGTAAGSINDNH | 2.87 | 0.78 | 1.59 |
| 1064 | ATLVT012XX2849 | 47783 | IGTTAGSSNDNH | 1.57 | 2.71 | 1.35 |
| 1065 | ATLVT012XX1960 | 46894 | SSESGGSSNDNA | 2.62 | 1.76 | 0.77 |
| 1066 | ATLVT012XX695 | 45629 | NSATAGSINDNH | 0.89 | 0.17 | 5.77 |
| 1067 | ATLVT012XX845 | 45779 | NSETGAATNDNH | 3.41 | 0.67 | 0.8 |
| 1068 | ATLVT012XX338 | 45272 | NGQSAAASNDNH | 3.48 | 0.65 | 0.68 |
| 1069 | ATLVT012XX2452 | 47386 | TGEAAASSNDNA | 0.89 | 5.5 | −1.12 |
| 1070 | ATLVT012XX1499 | 46433 | SGQSAGASNDNH | 2.22 | 1.29 | 2.01 |
| 1071 | ATLVT012XX96 | 45030 | NGASGGSINDNT | 1.37 | 0.82 | 4.06 |
| 1072 | ATLVT012XX1308 | 46242 | SGEAAGASNDNT | 1.02 | 4.38 | 0.06 |
| 1073 | ATLVT012XX3020 | 47954 | TSATGGSINDNH | 4.19 | 0.74 | −0.69 |
| 1074 | ATLVT012XX2345 | 47279 | TGAAGGSSNDNH | 1.17 | 1.88 | 3.01 |
| 1075 | ATLVT012XX3017 | 47951 | TSATGGSSNDNH | 4.27 | 0.65 | −0.71 |
| 1076 | ATLVT012XX3384 | 48318 | TSTSGAASNDNT | 1.2 | 2.32 | 2.38 |
| 1077 | ATLVT012XX1180 | 46114 | SGAAGASSNDNA | 1.09 | 1.96 | 3.04 |
| 1078 | ATLVT012XX615 | 45549 | NSAAGGASNDNT | 0.74 | 1.53 | 4.18 |
| 1079 | ATLVT012XX2320 | 47254 | TGAAAGSSNDNA | 1.75 | 1.86 | 2.02 |
| 1080 | ATLVT012XX3436 | 48370 | TSTTGASSNDNA | 3.15 | 1.4 | 0.18 |
| 1081 | ATLVT012XX883 | 45817 | NSQAAGSSNDNA | 1.47 | 2.19 | 2.04 |
| 1082 | ATLVT012XX134 | 45068 | NGATGGASNDNH | 2.18 | 0.79 | 2.62 |
| 1083 | ATLVT012XX237 | 45171 | NGESGGSSNDNT | 2.4 | 2.34 | 0.24 |
| 1084 | ATLVT012XX1000 | 45934 | NSQTGGATNDNA | 2.42 | 1.24 | 1.62 |
| 1085 | ATLVT012XX948 | 45882 | NSQSGASTNDNT | 2.19 | 1.48 | 1.69 |
| 1086 | ATLVT012XX3165 | 48099 | TSETGGSINDNT | 3.9 | 1.03 | −0.65 |
| 1087 | ATLVT012XX1316 | 46250 | SGEAAGSINDNH | 3.02 | 0.86 | 1.07 |
| 1088 | ATLVT012XX2089 | 47023 | SSQSGAATNDNA | 2.1 | 1.31 | 2.04 |
| 1089 | ATLVT012XX2227 | 47161 | SSTSAGSINDNA | 1.83 | 1.62 | 2.11 |
| 1090 | ATLVT012XX3285 | 48219 | TSQTAGSINDNT | 1.73 | 0.73 | 3.4 |
| 1091 | ATLVT012XX1331 | 46265 | SGEAGGASNDNH | 1.21 | 1.21 | 3.66 |
| 1092 | ATLVT012XX1762 | 46696 | SSAAGGASNDNA | 2.32 | 1.51 | 1.36 |
| 1093 | ATLVT012XX1232 | 46166 | SGASGASTNDNH | 1.97 | 2.2 | 1.06 |
| 1094 | ATLVT012XX2048 | 46982 | SSQAGASTNDNH | 2.41 | 1.92 | 0.67 |
| 1095 | ATLVT012XX286 | 45220 | NGETGGSINDNA | −0.34 | 4.88 | 1.57 |
| 1096 | ATLVT012XX3011 | 47945 | TSATGGASNDNH | 2.02 | 2.13 | 1.06 |
| 1097 | ATLVT012XX2683 | 47617 | TGQSGGSINDNA | −0.39 | 4.47 | 2.17 |
| 1098 | ATLVT012XX1182 | 46116 | SGAAGASSNDNT | 1.01 | 2.06 | 2.88 |
| 1099 | ATLVT012XX504 | 45438 | NGTSAGSINDNT | 1.56 | 1.07 | 3.2 |
| 1100 | ATLVT012XX3392 | 48326 | TSTSGASTNDNH | 1.1 | 2.57 | 2.05 |
| 1101 | ATLVT012XX997 | 45931 | NSQTGGASNDNA | 2.12 | 2.19 | 0.79 |
| 1102 | ATLVT012XX2982 | 47916 | TSATAASSNDNT | 2.45 | 1.98 | 0.49 |
| 1103 | ATLVT012XX767 | 45701 | NSEAGGSTNDNH | 2.11 | 1.97 | 1.07 |
| 1104 | ATLVT012XX2394 | 47328 | TGASGGSSNDNT | 1.44 | 0.71 | 3.84 |
| 1105 | ATLVT012XX2219 | 47153 | SSTSAGASNDNH | 1.11 | 1.18 | 3.79 |
| 1106 | ATLVT012XX404 | 45338 | NGQTAGSSNDNH | 0.5 | 5.25 | −0.41 |
| 1107 | ATLVT012XX1277 | 46211 | SGATGASSNDNH | −0.09 | 6.48 | −0.98 |
| 1108 | ATLVT012XX1691 | 46625 | SGTTAGASNDNH | 0.21 | 1.56 | 4.84 |
| 1109 | ATLVT012XX1838 | 46772 | SSATAGATNDNH | 3.49 | 1.21 | −0.35 |
| 1110 | ATLVT012XX3329 | 48263 | TSTAAGSSNDNH | 3.51 | 0.69 | 0.28 |
| 1111 | ATLVT012XX1861 | 46795 | SSATGGATNDNA | 1.96 | 2.34 | 0.82 |
| 1112 | ATLVT012XX399 | 45333 | NGQTAGASNDNT | 4.04 | 1.09 | −1.14 |
| 1113 | ATLVT012XX785 | 45719 | NSESAGATNDNH | 1.51 | 3.08 | 0.64 |
| 1114 | ATLVT012XX3439 | 48373 | TSTTGASINDNA | 0.81 | 2.57 | 2.48 |
| 1115 | ATLVT012XX1755 | 46689 | SSAAGAATNDNT | 1.74 | 1.67 | 2.04 |
| 1116 | ATLVT012XX1851 | 46785 | SSATGAATNDNT | 3.41 | −0.13 | 1.49 |
| 1117 | ATLVT012XX3010 | 47944 | TSATGGASNDNA | 4.42 | 0.43 | −0.96 |
| 1118 | ATLVT012XX3189 | 48123 | TSQAAGSINDNT | 1.28 | 1.63 | 2.86 |
| 1119 | ATLVT012XX2853 | 47787 | TGTTAGSINDNT | 0.19 | 2.17 | 4.05 |
| 1120 | ATLVT012XX511 | 45445 | NGTSGASSNDNA | 1.68 | 0.42 | 3.74 |
| 1121 | ATLVT012XX2730 | 47664 | TGQTGGSSNDNT | 1.61 | 0.99 | 3.11 |
| 1122 | ATLVT012XX2004 | 46938 | SSETGGASNDNT | 1.48 | 2.23 | 1.74 |
| 1123 | ATLVT012XX3003 | 47937 | TSATGAATNDNT | 3.34 | 0.54 | 0.73 |
| 1124 | ATLVT012XX508 | 45442 | NGTSGAATNDNA | 1.45 | 1.22 | 3.07 |
| 1125 | ATLVT012XX283 | 45217 | NGETGGSSNDNA | −1.18 | 3.68 | 4.41 |
| 1126 | ATLVT012XX2939 | 47873 | TSASAGASNDNH | 2.73 | 1.5 | 0.5 |
| 1127 | ATLVT012XX3209 | 48143 | TSQAGGSSNDNH | 1.6 | 1.77 | 2.07 |
| 1128 | ATLVT012XX1033 | 45967 | NSTAGAASNDNA | 1.38 | 1.44 | 2.86 |
| 1129 | ATLVT012XX3058 | 47992 | TSEAGGASNDNA | 0.1 | 0.42 | 6.37 |
| 1130 | ATLVT012XX1956 | 46890 | SSESGGASNDNT | 1.8 | 2.36 | 0.96 |
| 1131 | ATLVT012XX98 | 45032 | NGATAAASNDNH | 3.48 | 1.17 | −0.4 |
| 1132 | ATLVT012XX1911 | 46845 | SSEAGGAINDNT | 1.76 | 1.47 | 2.18 |
| 1133 | ATLVT012XX3211 | 48145 | TSQAGGSTNDNA | 3.01 | −0.67 | 2.77 |
| 1134 | ATLVT012XX1022 | 45956 | NSTAAGASNDNH | 1.48 | 1.18 | 3 |
| 1135 | ATLVT012XX1358 | 46292 | SGESAGAINDNH | 1.99 | 2.36 | 0.6 |
| 1136 | ATLVT012XX3266 | 48200 | TSQTAAATNDNH | 2.18 | 1.52 | 1.37 |
| 1137 | ATLVT012XX1058 | 45992 | NSTSAAASNDNH | 0.9 | 1.39 | 3.71 |
| 1138 | ATLVT012XX3183 | 48117 | TSQAAGAINDNT | 1.3 | 1.77 | 2.53 |
| 1139 | ATLVT012XX2607 | 47541 | TGQAAGAINDNT | 0.74 | 2.05 | 3.13 |
| 1140 | ATLVT012XX550 | 45484 | NGTTAGSINDNA | 2.06 | 0.52 | 2.83 |
| 1141 | ATLVT012XX3314 | 48248 | TSTAAAATNDNH | −0.89 | 6.3 | 0.44 |
| 1142 | ATLVT012XX708 | 45642 | NSATGASINDNT | 0.88 | 4.71 | −0.55 |
| 1143 | ATLVT012XX768 | 45702 | NSEAGGSINDNT | 1.9 | 2.68 | 0.31 |
| 1144 | ATLVT012XX710 | 45644 | NSATGGASNDNH | 1.98 | 1.72 | 1.42 |
| 1145 | ATLVT012XX2922 | 47856 | TSAAGGSSNDNT | 0.55 | 2.74 | 2.55 |
| 1146 | ATLVT012XX856 | 45790 | NSETGGATNDNA | 0.6 | 5.3 | −0.85 |
| 1147 | ATLVT012XX1924 | 46858 | SSESAASSNDNA | 2.88 | 0.94 | 0.82 |
| 1148 | ATLVT012XX2285 | 47219 | SSTTGASSNDNH | 2.35 | 2.35 | −0.09 |
| 1149 | ATLVT012XX1463 | 46397 | SGQAGAASNDNH | 3.21 | 0.39 | 0.95 |
| 1150 | ATLVT012XX2312 | 47246 | TGAAAASINDNH | 0.77 | 2.62 | 2.26 |
| 1151 | ATLVT012XX1023 | 45957 | NSTAAGASNDNT | 2.36 | 0.45 | 2.33 |
| 1152 | ATLVT012XX2276 | 47210 | SSTTAGSTNDNH | 2.05 | 1.82 | 1.08 |
| 1153 | ATLVT012XX506 | 45440 | NGTSGAASNDNH | 2.7 | 1.22 | 0.74 |
| 1154 | ATLVT012XX2584 | 47518 | TGETGGSSNDNA | 1.88 | 1.55 | 1.71 |
| 1155 | ATLVT012XX2391 | 47325 | TGASGGATNDNT | 0.91 | 2.03 | 2.76 |
| 1156 | ATLVT012XX1339 | 46273 | SGEAGGSINDNA | 2.04 | 1.75 | 1.16 |
| 1157 | ATLVT012XX2762 | 47696 | TGTAGAATNDNH | 1.56 | 1.05 | 2.89 |
| 1158 | ATLVT012XX1016 | 45950 | NSTAAASSNDNH | 0.29 | 4.28 | 0.91 |
| 1159 | ATLVT012XX2585 | 47519 | TGETGGSSNDNH | 2.74 | 0.46 | 1.62 |
| 1160 | ATLVT012XX1567 | 46501 | SGQTGASTNDNA | 1.93 | 0.98 | 2.32 |
| 1161 | ATLVT012XX407 | 45341 | NGQTAGSINDNH | 3.36 | 0.76 | 0.15 |
| 1162 | ATLVT012XX3428 | 48362 | TSTTAGSINDNH | 0.65 | 1.88 | 3.35 |
| 1163 | ATLVT012XX1063 | 45997 | NSTSAASSNDNA | −0.2 | 2.94 | 3.45 |
| 1164 | ATLVT012XX906 | 45840 | NSQAGGATNDNT | 2.99 | 1.2 | 0.21 |
| 1165 | ATLVT012XX3157 | 48091 | TSETGGATNDNA | 1.35 | 4.44 | −1.13 |
| 1166 | ATLVT012XX3038 | 47972 | TSEAAGATNDNH | −0.37 | 1.46 | 5.64 |
| 1167 | ATLVT012XX880 | 45814 | NSQAAGATNDNA | 0.93 | 2.29 | 2.33 |
| 1168 | ATLVT012XX462 | 45396 | NGTAGAATNDNT | 1.1 | 0.97 | 3.75 |
| 1169 | ATLVT01XXX123 | 45057 | NGATGAASNDNT | 3.94 | 0.05 | 0.05 |
| 1170 | ATLVT012XX1274 | 46208 | SGATGAATNDNH | 2.38 | 2 | 0.22 |
| 1171 | ATLVT012XX2810 | 47744 | TGTSGAATNDNH | 1.78 | 2.47 | 0.65 |
| 1172 | ATLVT012XX2515 | 47449 | TGESAGSTNDNA | 2.49 | 1.04 | 1.23 |
| 1173 | ATLVT012XX2609 | 47543 | TGQAAGSSNDNH | 0.95 | 1.77 | 2.93 |
| 1174 | ATLVT012XX1946 | 46880 | SSESGAATNDNH | 1.97 | 2.11 | 0.75 |
| 1175 | ATLVT012XX1656 | 46590 | SGTSGAASNDNT | 2.16 | 1.1 | 1.71 |
| 1176 | ATLVT012XX1307 | 46241 | SGEAAGASNDNH | 2.69 | 0.96 | 0.98 |
| 1177 | ATLVT012XX1647 | 46581 | SGTSAGATNDNT | 2.15 | 0.9 | 1.98 |
| 1178 | ATLVT012XX1380 | 46314 | SGESGGASNDNT | 1.34 | 1.08 | 3.12 |
| 1179 | ATLVT012XX1705 | 46639 | SGTTGAATNDNA | 2.59 | 0.54 | 1.65 |
| 1180 | ATLVT012XX215 | 45149 | NGESAGSTNDNH | −0.28 | 5.53 | 0.17 |
| 1181 | ATLVT012XX3037 | 47971 | TSEAAGAINDNA | −0.3 | 3.65 | 2.59 |
| 1182 | ATLVT012XX2816 | 47750 | TGTSGASTNDNH | 0.8 | 3.48 | 0.91 |
| 1183 | ATLVT012XX552 | 45486 | NGTTAGSINDNT | −0.11 | 1.1 | 5.54 |
| 1184 | ATLVT012XX2904 | 47838 | TSAAGAASNDNT | 1.2 | 1.87 | 2.3 |
| 1185 | ATLVT012XX2334 | 47268 | TGAAGASSNDNT | 0.69 | 2.07 | 2.88 |
| 1186 | ATLVT012XX2426 | 47360 | TGATGAATNDNH | 1.01 | 2 | 2.4 |
| 1187 | ATLVT012XX1517 | 46451 | SGQSGASSNDNH | 0.96 | 2.56 | 1.78 |
| 1188 | ATLVT012XX1659 | 46593 | SGTSGAATNDNT | 1.62 | 0.37 | 3.45 |
| 1189 | ATLVT012XX2837 | 47771 | TGTTAASSNDNH | 2.12 | 1.63 | 0.98 |
| 1190 | ATLVT012XX1026 | 45960 | NSTAAGAINDNT | 1.32 | 1.2 | 2.86 |
| 1191 | ATLVT012XX1699 | 46633 | SGTTAGSINDNA | 0.21 | 2.88 | 2.6 |
| 1192 | ATLVT012XX2917 | 47851 | TSAAGGATNDNA | 0.62 | 2.47 | 2.41 |
| 1193 | ATLVT012XX2797 | 47731 | TGTSAGATNDNA | 2.66 | 0.64 | 1.27 |
| 1194 | ATLVT012XX1160 | 46094 | SGAAAASINDNH | 0.09 | 4.47 | 0.74 |
| 1195 | ATLVT012XX2942 | 47876 | TSASAGATNDNH | 1.25 | 2.86 | 0.83 |
| 1196 | ATLVT012XX3342 | 48276 | TSTAGASSNDNT | 3.29 | 0.72 | 0.08 |
| 1197 | ATLVT012XX2188 | 47122 | SSTAGASSNDNA | 1.22 | 1.38 | 2.77 |
| 1198 | ATLVT012XX161 | 45095 | NGEAAGATNDNH | 0.41 | −0.02 | 5.95 |
| 1199 | ATLVT012XX238 | 45172 | NGESGGSINDNA | 2.35 | 2.55 | −0.67 |
| 1200 | ATLVT012XX421 | 45355 | NGQTGGASNDNA | −0.52 | 3.52 | 2.99 |
| 1201 | ATLVT012XX1696 | 46630 | SGTTAGSSNDNA | 0.28 | 2.77 | 2.59 |
| 1202 | ATLVT012XX2733 | 47667 | TGQTGGSINDNT | −0.01 | 1.79 | 4.33 |
| 1203 | ATLVT012XX2409 | 47343 | TGATAASTNDNT | −0.34 | 5.2 | 0.51 |
| 1204 | ATLVT012XX3440 | 48374 | TSTTGASINDNH | 1.63 | 1.78 | 1.52 |
| 1205 | ATLVT012XX872 | 45806 | NSQAAASSNDNH | −1.15 | 6.42 | 0.31 |
| 1206 | ATLVT012XX848 | 45782 | NSETGASSNDNH | 0.96 | 4.76 | −1.19 |
| 1207 | ATLVT012XX302 | 45236 | NGQAAGASNDNH | 0.59 | 2.17 | 2.76 |
| 1208 | ATLVT012XX547 | 45481 | NGTTAGSSNDNA | 1.08 | 0.22 | 4.42 |
| 1209 | ATLVT012XX1451 | 46385 | SGQAAGASNDNH | 0.58 | 2.49 | 2.36 |
| 1210 | ATLVT012XX542 | 45476 | NGTTAGASNDNH | 0.55 | 0.66 | 4.77 |
| 1211 | ATLVT012XX1226 | 46160 | SGASGAATNDNH | 1.65 | 2.2 | 0.87 |
| 1212 | ATLVT012XX1685 | 46619 | SGTTAASSNDNH | 1.18 | 2.77 | 0.94 |
| 1213 | ATLVT012XX2759 | 47693 | TGTAGAASNDNH | 1.02 | 2.17 | 2 |
| 1214 | ATLVT012XX1860 | 46794 | SSATGGASNDNT | 2.72 | 0.99 | 0.56 |
| 1215 | ATLVT012XX43 | 44977 | NGAAGGSSNDNA | 1.23 | 1.4 | 2.6 |
| 1216 | ATLVT012XX839 | 45773 | NSETAGSINDNH | 2.04 | 0.06 | 2.92 |
| 1217 | ATLVT012XX707 | 45641 | NSATGASTNDNH | 0.4 | 5.12 | −0.78 |
| 1218 | ATLVT012XX365 | 45299 | NGQSGAATNDNH | 2.43 | 1.08 | 0.94 |
| 1219 | ATLVT012XX901 | 45835 | NSQAGGASNDNA | 2.4 | 1.12 | 0.93 |
| 1220 | ATLVT012XX2909 | 47843 | TSAAGASSNDNH | 0.54 | 2.87 | 1.87 |
| 1221 | ATLVT012XX2009 | 46943 | SSETGGSSNDNH | 3.03 | 0.73 | 0.35 |
| 1222 | ATLVT012XX2489 | 47423 | TGEAGGSSNDNH | 4.4 | −0.32 | −0.66 |
| 1223 | ATLVT012XX604 | 45538 | NSAAGAATNDNA | 0.78 | 2.02 | 2.53 |
| 1224 | ATLVT012XX2501 | 47435 | TGESAASSNDNH | −0.51 | 5.8 | −0.13 |
| 1225 | ATLVT012XX320 | 45254 | NGQAGASSNDNH | 1.86 | 2.06 | 0.61 |
| 1226 | ATLVT012XX2395 | 47329 | TGASGGSTNDNA | 1.47 | 0.76 | 2.94 |
| 1227 | ATLVT012XX1473 | 16407 | SGQAGASTNDNT | 0.42 | 1.85 | 3.32 |
| 1228 | ATLVT012XX1552 | 46486 | SGQTAGSSNDNA | 3.01 | 1.08 | −0.13 |
| 1229 | ATLVT012XX1735 | 46669 | SSAAAASTNDNA | −0.64 | 2.03 | 4.91 |
| 1230 | ATLVT012XX2444 | 47378 | TGATGGSTNDNH | 1.25 | 1.79 | 1.98 |
| 1231 | ATLVT012XX2799 | 47733 | TGTSAGAINDNT | 2.72 | 0.26 | 1.42 |
| 1232 | ATLVT012XX3091 | 48025 | TSESAGSINDNA | −2.29 | 5.3 | 3.54 |
| 1233 | ATLVT012XX3208 | 48142 | TSQAGGSSNDNA | 0.13 | 0.57 | 5.44 |
| 1234 | ATLVT012XX3181 | 48115 | TSQAAGATNDNA | 0.61 | 2.21 | 2.52 |
| 1235 | ATLVT012XX984 | 45918 | NSQTAGSINDNT | 3.12 | −0.01 | 1.06 |
| 1236 | ATLVT012XX674 | 45608 | NSATAAASNDNH | 0.98 | 0.4 | 4.18 |
| 1237 | ATLVT012XX1361 | 46295 | SGESAGSSNDNH | 0.24 | 4.92 | −0.37 |
| 1238 | ATLVT012XX1836 | 46770 | SSATAGASNDNT | 0.09 | 4.9 | −0.07 |
| 1239 | ATLVT012XX651 | 45585 | NSASGAASNDNT | 2.18 | 1.08 | 1.25 |
| 1240 | ATLVT012XX620 | 45554 | NSAAGGSSNDNH | −0.08 | 3.69 | 1.77 |
| 1241 | ATLVT012XX2414 | 47348 | TGATAGATNDNH | 2.29 | 0.57 | 1.7 |
| 1242 | ATLVT012XX2838 | 47772 | TGTTAASSNDNT | −0.31 | 2.94 | 3.11 |
| 1243 | ATLVT01XXX1019 | 45953 | NSTAAASINDNH | 3.27 | 0.77 | −0.25 |
| 1244 | ATLVT012XX2366 | 47300 | IGASAGAINDNH | 0.88 | 2.1 | 2.14 |
| 1245 | ATLVT012XX2360 | 47294 | TGASAASINDNH | −0.76 | 5.95 | −0.01 |
| 1246 | ATLVT012XX1059 | 45993 | NSTSAAASNDNT | 0.96 | 0.38 | 4.17 |
| 1247 | ATLVT012XX536 | 45470 | NGTTAASSNDNH | 1.71 | 1.95 | 0.87 |
| 1248 | ATLVT012XX1657 | 46591 | SGTSGAATNDNA | 1.42 | 0.86 | 2.77 |
| 1249 | ATLVT012XX2921 | 47855 | TSAAGGSSNDNH | 1.17 | 2 | 1.72 |
| 1250 | ATLVT012XX1899 | 46833 | SSEAGAATNDNT | 1.66 | 1.08 | 2.06 |
| 1251 | ATLVT012XX2439 | 47373 | TGATGGAINDNT | −0.19 | 2.96 | 2.82 |
| 1252 | ATLVT012XX2955 | 47889 | TSASGAATNDNT | 1.22 | 1.26 | 2.57 |
| 1253 | ATLVT012XX2531 | 47465 | TGESGGASNDNH | −0.5 | 4.01 | 1.98 |
| 1254 | ATLVT012XX2189 | 47123 | SSTAGASSNDNH | 2.21 | 1.01 | 1.2 |
| 1255 | ATLVT012XX2751 | 47685 | TGTAAGAINDNT | 1.72 | 1.3 | 1.65 |
| 1256 | ATLVT012XX28 | 44962 | NGAAGAATNDNA | 0.74 | 1.83 | 2.64 |
| 1257 | ATLVT012XX650 | 45584 | NSASGAASNDNH | 2.41 | 0.94 | 0.91 |
| 1258 | ATLVT012XX118 | 45052 | NGATAGSINDNA | 3.96 | −0.66 | 0.3 |
| 1259 | ATLVT012XX888 | 45822 | NSQAAGSINDNT | 0.74 | 2.53 | 1.73 |
| 1260 | ATLVT012XX1742 | 46676 | SSAAAGAINDNH | 1.34 | 1.93 | 1.47 |
| 1261 | ATLVT012XX2434 | 47368 | TGATGGASNDNA | 1.35 | 0.94 | 2.72 |
| 1262 | ATLVT012XX2136 | 47070 | SSQTGAASNDNT | 2.51 | −0.55 | 2.64 |
| 1263 | ATLVT012XX1902 | 46836 | SSEAGASSNDNT | 0.44 | −0.63 | 6.29 |
| 1264 | ATLVT012XX709 | 45643 | NSATGGASNDNA | 1.24 | 1.07 | 2.73 |
| 1265 | ATLVT012XX1934 | 46868 | SSESAGAINDNH | −0.32 | 5.02 | 0.31 |
| 1266 | ATLVT012XX884 | 45818 | NSQAAGSSNDNH | 0.86 | 2.29 | 1.8 |
| 1267 | ATLVT012XX2834 | 47768 | TGTTAAATNDNH | 0.44 | 4.79 | −0.71 |
| 1268 | ATLVT012XX1602 | 46536 | SGTAAGSSNDNT | 1.7 | 2.17 | 0.5 |
| 1269 | ATLVT012XX2915 | 47849 | TSAAGGASNDNH | 0.71 | 2.13 | 2.25 |
| 1270 | ATLVT012XX595 | 45529 | NSAAAGSSNDNA | −0.71 | 5.94 | −0.22 |
| 1271 | ATLVT012XX3195 | 48129 | TSQAGAATNDNT | 0.6 | 2.32 | 2.18 |
| 1272 | ATLVT012XX1501 | 46435 | SGQSAGATNDNA | 2.98 | 1.33 | −0.63 |
| 1273 | ATLVT012XX1897 | 46831 | SSEAGAATNDNA | 2.75 | 0.23 | 1.16 |
| 1274 | ATLVT012XX2035 | 46969 | SSQAAGSTNDNA | 1.35 | 1.86 | 1.47 |
| 1275 | ATLVT012XX2113 | 47047 | SSQTAAATNDNA | 0.93 | 0.34 | 4.11 |
| 1276 | ATLVT012XX2118 | 47052 | SSQTAASSNDNT | 1.31 | −1.2 | 5.45 |
| 1277 | ATLVT012XX1017 | 45951 | NSTAAASSNDNT | 1.72 | 0.7 | 2.3 |
| 1278 | ATLVT012XX3065 | 47999 | TSEAGGSSNDNH | 3.43 | −0.27 | 0.61 |
| 1279 | ATLVT012XX2097 | 47031 | SSQSGASTNDNT | 2.2 | −0.32 | 2.77 |
| 1280 | ATLVT012XX1655 | 46589 | SGTSGAASNDNH | 1.95 | 0.84 | 1.69 |
| 1281 | ATLVT012XX84 | 45018 | NGASGASTNDNT | 2.79 | 0.31 | 0.91 |
| 1282 | ATLVT012XX945 | 45879 | NSQSGASSNDNT | 0.59 | 1.49 | 3.17 |
| 1283 | ATLVT012XX1692 | 46626 | SGTTAGASNDNT | 0.57 | 0.99 | 3.84 |
| 1284 | ATLVT012XX496 | 45430 | NGTSAGATNDNA | 1.11 | 3.35 | −0.11 |
| 1285 | ATLVT012XX1605 | 46539 | SGTAAGSINDNT | 1.18 | 2.2 | 1.23 |
| 1286 | ATLVT012XX2758 | 47692 | TGTAGAASNDNA | 1.49 | 0.69 | 2.64 |
| 1287 | ATLVT012XX2800 | 47734 | TGTSAGSSNDNA | 2.87 | 0.56 | 0.43 |
| 1288 | ATLVT012XX1224 | 46158 | SGASGAASNDNT | 1.94 | 1.04 | 1.41 |
| 1289 | ATLVT012XX141 | 45075 | NGATGGSSNDNT | 1.34 | 0.63 | 2.97 |
| 1290 | ATLVT012XX2666 | 47600 | TGQSGAATNDNH | 0.62 | 2.83 | 1.37 |
| 1291 | ATLVT012XX2760 | 47694 | TGTAGAASNDNT | 1.73 | 1.28 | 1.45 |
| 1292 | ATLVT012XX2270 | 47204 | SSTTAGATNDNH | 0.78 | 1.97 | 2.19 |
| 1293 | ATLVT012XX2893 | 47827 | TSAAAGAINDNA | 0.39 | 3.47 | 0.94 |
| 1294 | ATLVT012XX3062 | 47996 | TSEAGGAINDNH | 0.52 | 3.27 | 0.96 |
| 1295 | ATLVT012XX1738 | 46672 | SSAAAGASNDNA | 0.59 | 2.41 | 1.95 |
| 1296 | ATLVT012XX2346 | 47280 | TGAAGGSSNDNT | 0.17 | 1.98 | 3.22 |
| 1297 | ATLVT012XX1024 | 45958 | NSTAAGATNDNA | 1.25 | 1.45 | 2.04 |
| 1298 | ATLVT012XX468 | 45402 | NGTAGASINDNT | 3.26 | −0.56 | 1.17 |
| 1299 | ATLVT012XX578 | 45512 | NSAAAAASNDNH | 3.48 | −0.59 | 0.83 |
| 1300 | ATLVT012XX2999 | 47933 | TSATGAASNDNH | 1.86 | 1.29 | 1.19 |
| 1301 | ATLVT012XX3391 | 48325 | TSTSGASTNDNA | 0.11 | 2.53 | 2.58 |
| 1302 | ATLVT012XX2281 | 47215 | SSTTGAATNDNA | 1.23 | 2.08 | 1.25 |
| 1303 | ATLVT012XX2756 | 47690 | TGTAAGSINDNH | 1.65 | 0.81 | 2.15 |
| 1304 | ATLVT012XX891 | 45825 | NSQAGAASNDNT | 3.12 | 0.41 | 0.13 |
| 1305 | ATLVT012XX2126 | 47060 | SSQTAGATNDNH | 1.32 | 1.18 | 2.23 |
| 1306 | ATLVT012XX482 | 45416 | NGTSAAASNDNH | 0.76 | 0.99 | 3.42 |
| 1307 | ATLVT012XX2811 | 47745 | TGTSGAATNDNT | 1.02 | 1.71 | 2.05 |
| 1308 | ATLVT012XX3161 | 48095 | TSETGGSSNDNH | 3.3 | 0.52 | −0.33 |
| 1309 | ATLVT012XX427 | 45361 | NGQTGGSSNDNA | 0.81 | 3.01 | 0.74 |
| 1310 | ATLVT012XX3359 | 48293 | TSTSAAASNDNH | −1.57 | 5.33 | 1.82 |
| 1311 | ATLVT012XX1882 | 46816 | SSEAAGASNDNA | 0.33 | 0.57 | 4.68 |
| 1312 | ATLVT012XX924 | 45858 | NSQSAASINDNT | 2.16 | −1.23 | 3.86 |
| 1313 | ATLVT012XX803 | 45737 | NSESGASTNDNH | 3.34 | 0.71 | −0.66 |
| 1314 | ATLVT012XX2037 | 46971 | SSQAAGSINDNT | 0.47 | 1.74 | 2.93 |
| 1315 | ATLVT012XX2763 | 47697 | TGTAGAATNDNT | 0.8 | 1.03 | 3.28 |
| 1316 | ATLVT012XX1607 | 46541 | SGTAGAASNDNH | 2.12 | 1.31 | 0.65 |
| 1317 | ATLVT012XX3265 | 48199 | TSQTAAATNDNA | 2.43 | −0.48 | 2.4 |
| 1318 | ATLVT012XX3322 | 48256 | TSTAAGASNDNA | 0.49 | 2.62 | 1.73 |
| 1319 | ATLVT012XX1547 | 4648] | SGQTAGASNDNH | 0.23 | 2.85 | 1.86 |
| 1320 | ATLVT012XX1613 | 46547 | SGTAGASSNDNH | 1.68 | 0.89 | 1.89 |
| 1321 | ATLVT012XX3187 | 48121 | TSQAAGSTNDNA | 0.81 | 1.34 | 2.8 |
| 1322 | ATLVT012XX45 | 44979 | NGAAGGSSNDNT | 0.56 | 1.84 | 2.58 |
| 1323 | ATLVT012XX1704 | 46638 | SGTTGAASNDNT | 2.34 | 0.14 | 1.71 |
| 1324 | ATLVT012XX1615 | 46549 | SGTAGASTNDNA | 1.75 | 0.4 | 2.38 |
| 1325 | ATLVT012XX2278 | 47212 | SSTTGAASNDNA | 3.05 | 0.77 | −0.34 |
| 1326 | ATLVT012XX1229 | 46163 | SGASGASSNDNH | 1.26 | 1.68 | 1.56 |
| 1327 | ATLVT012XX786 | 45720 | NSESAGAINDNT | 0.51 | 3.77 | 0.16 |
| 1328 | ATLVT012XX319 | 45253 | NGQAGASSNDNA | 3.71 | −0.69 | 0.4 |
| 1329 | ATLVT012XX2510 | 47444 | TGESAGATNDNH | −0.93 | 4.77 | 1.33 |
| 1330 | ATLVT012XX980 | 45914 | NSQTAGSSNDNH | 1.65 | 1.28 | 1.38 |
| 1331 | ATLVT012XX1027 | 45961 | NSTAAGSSNDNA | 1.87 | 0.98 | 1.39 |
| 1332 | ATLVT012XX1513 | 46447 | SGQSGAATNDNA | 2.56 | 0 | 1.46 |
| 1333 | ATLVT012XX3064 | 47998 | TSEAGGSSNDNA | 2.22 | 0.52 | 1.38 |
| 1334 | ATLVT012XX2887 | 47821 | TSAAAASTNDNA | −1.7 | 5.51 | 1.68 |
| 1335 | ATLVT012XX946 | 45880 | NSQSGASINDNA | 1.69 | 1.49 | 1.03 |
| 1336 | ATLVT012XX3345 | 48279 | TSTAGASTNQNT | 1.05 | 0.11 | 3.9 |
| 1337 | ATLVT012XX1310 | 46244 | SGEAAGATNDNH | 0.34 | 1.79 | 2.96 |
| 1338 | ATLVT012XX2950 | 47884 | TSASGAASNDNA | 1.48 | 0.71 | 2.39 |
| 1339 | ATLVT012XX2442 | 47376 | TGATGGSSNDNT | 1.12 | 0.69 | 3 |
| 1340 | ATLVT012XX2013 | 46947 | SSETGGSINDNT | 1.98 | 0.99 | 1.14 |
| 1341 | ATLVT012XX1516 | 46450 | SGQSGASSNDNA | 1.41 | 1.16 | 1.9 |
| 1342 | ATLVT012XX2071 | 47005 | SSQSAASINDNA | 2.68 | −0.04 | 1.26 |
| 1343 | ATLVT012XX3375 | 48309 | TSTSAGATNDNT | −0.48 | 4.03 | 1.45 |
| 1344 | ATLVT012XX3056 | 47990 | TSEAGASTNDNH | 3.2 | 0.21 | 0.03 |
| 1345 | ATLVT012XX1173 | 46107 | SGAAAGSINDNT | 0.77 | 1.35 | 2.72 |
| 1346 | ATLVT012XX3001 | 47935 | TSATGAATNDNA | 3.25 | 0.1 | 0.07 |
| 1347 | ATLVT012XX1796 | 46730 | SSASAGSTNDNH | 2.59 | 2.18 | −1.49 |
| 1348 | ATLVT012XX1791 | 46725 | SSASAGATNDNT | 3.11 | 0.94 | −0.8 |
| 1349 | ATLVT012XX443 | 45377 | NGTAAASTNDNH | 1.53 | 1.49 | 1.2 |
| 1350 | ATLVT012XX2685 | 47619 | TGQSGGSTNDNT | −0.17 | 3.5 | 1.53 |
| 1351 | ATLVT012XX303 | 45237 | NGQAAGASNDNT | 1.14 | 1.26 | 2.14 |
| 1352 | ATLVT012XX500 | 45434 | NGTSAGSSNDNH | 1.8 | 1.87 | 0.23 |
| 1353 | ATLVT012XX2092 | 47026 | SSQSGASSNDNA | 2.13 | 0.49 | 1.44 |
| 1354 | ATLVT012XX886 | 45820 | NSQAAGSTNDNA | 0.58 | 2.22 | 1.87 |
| 1355 | ATLVT012XX851 | 45785 | NSETGASTNDNH | 2.88 | 1 | −0.5 |
| 1356 | ATLVT012XX513 | 45447 | NGTSGASSNDNT | 0.34 | 0.77 | 4.14 |
| 1357 | ATLVT012XX3213 | 48147 | TSQAGGSINDNT | 0.97 | 0.55 | 3.33 |
| 1358 | ATLVT012XX797 | 45731 | NSESGAATNDNH | 2.31 | 0.22 | 1.46 |
| 1359 | ATLVT012XX1684 | 46618 | SGTTAASSNDNA | 1.44 | 1.35 | 1.5 |
| 1360 | ATLVT012XX2803 | 47737 | TGTSAGSTNDNA | 2.55 | 0.08 | 1.22 |
| 1361 | ATLVT012XX2661 | 47595 | TGQSAGSINDNT | 1.67 | 2.48 | −0.36 |
| 1362 | ATLVT012XX1268 | 46202 | SGATAGSTNDNH | 1.99 | 1.64 | 0.17 |
| 1363 | ATLVT012XX1947 | 46881 | SSESGAATNDNT | 3.23 | −0.38 | 0.62 |
| 1364 | ATLVT012XX2840 | 47774 | TGTTAASTNDNH | 0.25 | 3.91 | 0.2 |
| 1365 | ATLVT012XX2977 | 47911 | TSATAAATNDNA | 0.18 | 4.56 | −0.54 |
| 1366 | ATLVT012XX2456 | 47390 | TGEAAASTNDNH | 1.77 | 2.21 | −0.25 |
| 1367 | ATLVT012XX2174 | 47108 | SSTAAGATNDNH | −0.22 | 2.98 | 2.17 |
| 1368 | ATLVT012XX2954 | 47888 | TSASGAATNDNH | 1.46 | 0.86 | 2.02 |
| 1369 | ATLVT012XX2123 | 47057 | SSQTAGASNDNH | 0.03 | −0.05 | 5.62 |
| 1370 | ATLVT012XX2970 | 47904 | TSASGGSSNDNT | 2.01 | 0.08 | 2.07 |
| 1371 | ATLVT012XX2468 | 47402 | TGEAAGSINDNH | 1.36 | 1.18 | 1.75 |
| 1372 | ATLVT012XX1894 | 46828 | SSEAGAASNDNA | 0.28 | −0.52 | 5.79 |
| 1373 | ATLVT012XX1179 | 46113 | SGAAGAATNDNT | 0.61 | 1.28 | 2.91 |
| 1374 | ATLVT012XX2850 | 47784 | TGTTAGSSNDNT | −0.7 | 4.32 | 1.24 |
| 1375 | ATLVT012XX80 | 45014 | NGASGASSNDNH | −0.45 | 0.27 | 6.01 |
| 1376 | ATLVT012XX2010 | 46944 | SSETGGSSNDNT | 2.3 | 0.34 | 1.21 |
| 1377 | ATLVT012XX1631 | 46565 | SGTSAAASNDNH | 0.93 | 0.08 | 3.87 |
| 1378 | ATLVT012XX3255 | 48189 | TSQSGGATNDNT | 0.58 | 0.6 | 3.81 |
| 1379 | ATLVT012XX1808 | 46742 | SSASGASINDNH | 1.23 | 1.37 | 1.71 |
| 1380 | ATLVT012XX3239 | 48173 | TSQSGAASNDNH | 1.09 | 0.88 | 2.56 |
| 1381 | ATLVT012XX2629 | 47563 | IGQAGGATNDNA | 0.81 | −0.27 | 4.51 |
| 1382 | ATLVT012XX1395 | 46329 | SGETAAATNDNT | 1.96 | 1.6 | 0.15 |
| 1383 | ATLVT012XX1488 | 46422 | SGQSAAASNDNT | 2.64 | 0.06 | 0.95 |
| 1384 | ATLVT012XX3275 | 48209 | TSQTAGASNDNH | 0.38 | 2.09 | 2.2 |
| 1385 | ATLVT012XX2941 | 47875 | TSASAGAINDNA | −0.1 | 3.81 | 0.76 |
| 1386 | ATLVT012XX235 | 45169 | NGESGGSSNDNA | 0.57 | 2.9 | 0.78 |
| 1387 | ATLVT012XX2480 | 47414 | TGEAGASINDNH | 3.95 | −0.3 | −0.91 |
| 1388 | ATLVT012XX2178 | 47112 | SSTAAGSSNDNT | 0.2 | 0.24 | 4.84 |
| 1389 | ATLVT012XX2663 | 47597 | TGQSGAASNDNH | 1.24 | 1.71 | 1.15 |
| 1390 | ATLVT012XX2635 | 47569 | TGQAGGSTNDNA | 0.51 | 0.22 | 4.29 |
| 1391 | ATLVT012XX2749 | 47683 | TGTAAGATNDNA | 0.67 | 2.56 | 1.01 |
| 1392 | ATLVT012XX798 | 45732 | NSESGAATNDNT | 0.88 | 0.72 | 3.02 |
| 1393 | ATLVT012XX1844 | 46778 | SSATAGSTNDNH | 1.76 | 1.9 | −0.01 |
| 1394 | ATLVT012XX1060 | 45994 | NSTSAAATNDNA | −0.35 | 3.34 | 1.76 |
| 1395 | ATLVT012XX3339 | 48273 | ISTAGAATNDNT | 1.04 | 1.04 | 2.33 |
| 1396 | ATLVT012XX3333 | 48267 | TSTAAGSINDNT | 0.91 | 2.57 | 0.54 |
| 1397 | ATLVT012XX3204 | 48138 | TSQAGGASNDNT | 1.77 | 0.31 | 1.97 |
| 1398 | ATLVT012XX1263 | 46197 | SGATAGATNDNT | 2.98 | −0.42 | 0.84 |
| 1399 | ATLVT012XX940 | 45874 | NSQSGAATNDNA | 1.36 | 1.33 | 1.36 |
| 1400 | ATLVT012XX989 | 45923 | NSQTGAATNDNH | 1.42 | 0.89 | 1.83 |
| 1401 | ATLVT012XX1767 | 46701 | SSAAGGAINDNT | 1 | 1.43 | 1.85 |
| 1402 | ATLVT012XX2491 | 47425 | TGEAGGSINDNA | 1.58 | 2.3 | −0.27 |
| 1403 | ATLVT012XX3340 | 48274 | TSTAGASSNDNA | 0.99 | 2.64 | 0.31 |
| 1404 | ATLVT012XX422 | 45356 | NGQTGGASNDNH | −0.26 | 3.1 | 1.85 |
| 1405 | ATLVT012XX1400 | 46334 | SGETAASTNQNH | 3.01 | 1.07 | −1.16 |
| 1406 | ATLVT012XX2216 | 47150 | SSTSAASTNDNH | 0.84 | 3.34 | −0.37 |
| 1407 | ATLVT012XX2033 | 46967 | SSQAAGSSNDNH | 1.14 | 1.68 | 1.26 |
| 1408 | ATLVT012XX2572 | 47506 | TGETGASSNDNA | 3 | −0.45 | 0.8 |
| 1409 | ATLVT012XX2540 | 47474 | TGESGGSTNDNH | −0.69 | 1.87 | 4.15 |
| 1410 | ATLVT012XX2066 | 47000 | SSQSAAATNDNH | 3.62 | −0.95 | 0.38 |
| 1411 | ATLVT012XX2597 | 47531 | TGQAAASSNDNH | 2.96 | −0.48 | 0.87 |
| 1412 | ATLVT012XX2586 | 47520 | TGETGGSSNDNT | 0.4 | 1.21 | 3.1 |
| 1413 | ATLVT012XX3243 | 48177 | TSQSGAATNDNT | −0.05 | 1.95 | 2.92 |
| 1414 | ATLVT012XX349 | 45283 | NGQSAGASNDNA | −0.43 | −0.48 | 6.68 |
| 1415 | ATLVT012XX1793 | 46727 | SSASAGSSNDNH | 2.88 | 0.39 | −0.11 |
| 1416 | ATLVT012XX2897 | 47831 | TSAAAGSSNDNH | 0.52 | 2.28 | 1.5 |
| 1417 | ATLVT012XX1254 | 46188 | SGATAASSNQNT | 0.75 | 3.01 | 0.17 |
| 1418 | ATLVT012XX234 | 45168 | NGESGGATNDNT | 2.54 | 1.07 | −0.42 |
| 1419 | ATLVT012XX2809 | 47743 | TGTSGAATNDNA | 0.89 | 1.24 | 2.2 |
| 1420 | ATLVT012XX2619 | 47553 | TGQAGAATNDNT | 0.71 | 1.17 | 2.6 |
| 1421 | ATLVT012XX2333 | 47267 | TGAAGASSNDNH | 0.37 | 1.81 | 2.34 |
| 1422 | ATLVT012XX398 | 45332 | NGQTAGASNDNH | 0.17 | 3.96 | −0.08 |
| 1423 | ATLVT012XX3241 | 48175 | TSQSGAATNDNA | 0.46 | 1.58 | 2.48 |
| 1424 | ATLVT012XX2908 | 47842 | TSAAGASSNDNA | 0.94 | 1.56 | 1.67 |
| 1425 | ATLVT012XX3324 | 48258 | TSTAAGASNDNT | 0.68 | 2.15 | 1.36 |
| 1426 | ATLVT012XX3112 | 48046 | TSESGGSSNDNA | −0.55 | 3.68 | 1.49 |
| 1427 | ATLVT012XX2238 | 47172 | SSTSGASSNDNT | 1.26 | 0.77 | 2.13 |
| 1428 | ATLVT012XX1158 | 46092 | SGAAAASSNDNT | 0.8 | 1.67 | 1.78 |
| 1429 | ATLVT012XX323 | 45257 | NGQAGASINDNH | 2.48 | 0.4 | 0.52 |
| 1430 | ATLVT012XX2672 | 47606 | TGQSGASTNDNH | −0.27 | 4.17 | 0.38 |
| 1431 | ATLVT012XX1275 | 46209 | SGATGAATNDNT | 2.24 | 0.5 | 0.79 |
| 1432 | ATLVT012XX3050 | 47984 | TSEAGAATNDNH | 0.65 | 1.74 | 1.93 |
| 1433 | ATLVT012XX3373 | 48307 | TSTSAGATNDNA | 0.5 | 2.04 | 1.79 |
| 1434 | ATLVT012XX2046 | 46980 | SSQAGASSNDNT | 3.19 | −0.96 | 1.04 |
| 1435 | ATLVT012XX794 | 45728 | NSESGAASNDNH | 1.8 | −0.03 | 2.22 |
| 1436 | ATLVT012XX423 | 45357 | NGQTGGASNDNT | 0.75 | 3.22 | −0.17 |
| 1437 | ATLVT012XX2082 | 47016 | SSQSAGSSNDNT | 0.77 | 1.71 | 1.74 |
| 1438 | ATLVT012XX2768 | 47702 | TGTAGASTNDNH | 2.97 | −0.51 | 0.83 |
| 1439 | ATLVT012XX174 | 45108 | NGEAGAATNDNT | 3.47 | −0.88 | 0.43 |
| 1440 | ATLVT012XX2063 | 46997 | SSQSAAASNDNH | 2.48 | −0.99 | 2.27 |
| 1441 | ATLVT012XX1775 | 46709 | SSASAAASNDNH | 2.4 | 0.62 | 0.32 |
| 1442 | ATLVT012XX3435 | 48369 | TSTTGAATNDNT | 2.07 | 0.19 | 1.44 |
| 1443 | ATLVT012XX2116 | 47050 | SSQTAASSNDNA | 1.15 | −0.02 | 3.28 |
| 1444 | ATLVT012XX679 | 45613 | NSATAASSNDNA | 3.74 | −0.76 | −0.2 |
| 1445 | ATLVT012XX558 | 45492 | NGTTGAATNDNT | 1.45 | 1.06 | 1.38 |
| 1446 | ATLVT012XX2408 | 47342 | TGATAASTNDNH | −0.53 | 4.33 | 0.57 |
| 1447 | ATLVT012XX1394 | 46328 | SGETAAAINDNH | 1.54 | 3.03 | −1.33 |
| 1448 | ATLVT012XX1737 | 46671 | SSAAAASTNDNT | 1.42 | 0.22 | 2.5 |
| 1449 | ATLVT012XX35 | 44969 | NGAAGASTNDNH | 1.03 | 1.16 | 1.95 |
| 1450 | ATLVT012XX2624 | 47558 | TGQAGASINDNH | −0.3 | 2.91 | 1.97 |
| 1451 | ATLVT012XX2389 | 47323 | TGASGGATNDNA | 1.15 | 0.65 | 2.4 |
| 1452 | ATLVT012XX1595 | 46529 | SGTAAGASNDNH | 1.12 | 1.89 | 0.85 |
| 1453 | ATLVT012XX230 | 45164 | NGESGGASNDNH | 1.19 | 2.7 | −0.32 |
| 1454 | ATLVT012XX430 | 45364 | NGQTGGSTNDNA | 0.42 | 2.61 | 1.12 |
| 1455 | ATLVT012XX1464 | 46398 | SGQAGAASNDNT | 0.95 | 1.24 | 1.97 |
| 1456 | ATLVT012XX2796 | 47730 | TGTSAGASNDNT | 1.89 | 0.25 | 1.61 |
| 1457 | ATLVT012XX1317 | 46251 | SGEAAGSTNDNT | 3.16 | −0.62 | 0.54 |
| 1458 | ATLVT012XX688 | 45622 | NSATAGAINDNA | −0.1 | 0.31 | 4.94 |
| 1459 | ATLVT012XX2654 | 47588 | TGQSAGATNDNH | 1.54 | 1.61 | 0.44 |
| 1460 | ATLVT012XX2311 | 47245 | TGAAAASTNDNA | 0.59 | 1.41 | 2.32 |
| 1461 | ATLVT012XX308 | 45242 | NGQAAGSSNDNH | 1.1 | 1.39 | 1.47 |
| 1462 | ATLVT012XX1020 | 45954 | NSTAAASTNDNT | 1.07 | 0.47 | 2.71 |
| 1463 | ATLVT012XX1108 | 46042 | NSTTAASSNDNA | 0.82 | −0.07 | 3.82 |
| 1464 | ATLVT012XX494 | 45428 | NGTSAGASNDNH | 1.45 | 0.95 | 1.41 |
| 1465 | ATLVT012XX2318 | 47252 | TGAAAGATNDNH | 0.52 | 1.64 | 2.12 |
| 1466 | ATLVT012XX2269 | 47203 | SSTTAGATNDNA | −0.56 | 1.54 | 4.09 |
| 1467 | ATLVT012XX1102 | 46036 | NSTTAAASNDNA | 1.45 | 2.55 | −0.66 |
| 1468 | ATLVT012XX2795 | 47729 | TGTSAGASNDNH | 2.01 | 0.25 | 1.33 |
| 1469 | ATLVT012XX465 | 45399 | NGTAGASSNDNT | −0.62 | 1.21 | 4.61 |
| 1470 | ATLVT012XX937 | 45871 | NSQSGAASNDNA | 0.3 | 2.07 | 1.92 |
| 1471 | ATLVT012XX1176 | 46110 | SGAAGAASNDNT | 0.37 | 1.36 | 2.69 |
| 1472 | ATLVT012XX1028 | 45962 | NSTAAGSSNDNH | 1.8 | 1.18 | 0.46 |
| 1473 | ATLVT012XX2831 | 47765 | TGTTAAASNDNH | 1.38 | 1.22 | 1.14 |
| 1474 | ATLVT012XX2895 | 47829 | TSAAAGATNDNT | 0.92 | 1.66 | 1.36 |
| 1475 | ATLVT012XX27 | 44961 | NGAAGAASNDNT | 0.92 | 1.19 | 1.95 |
| 1476 | ATLVT012XX2720 | 47654 | TGQTGASTNDNH | 1.78 | 0.87 | 0.89 |
| 1477 | ATLVT012XX1653 | 46587 | SGTSAGSTNDNT | 0.89 | 0.88 | 2.4 |
| 1478 | ATLVT012XX1177 | 46111 | SGAAGAATNDNA | 0.48 | 1.56 | 2.22 |
| 1479 | ATLVT012XX677 | 45611 | NSATAAATNDNH | 2.11 | 1.22 | −0.13 |
| 1480 | ATLVT012XX502 | 45436 | NGTSAGSTNDNA | 1.16 | 0.74 | 2.1 |
| 1481 | ATLVT012XX499 | 45433 | NGTSAGSSNDNA | 0.93 | 1.4 | 1.65 |
| 1482 | ATLVT012XX133 | 45067 | NGATGGASNDNA | 2.44 | 0.31 | 0.47 |
| 1483 | ATLVT012XX795 | 45729 | NSESGAASNDNT | −0.13 | −0.43 | 5.81 |
| 1484 | ATLVT012XX2029 | 46963 | SSQAAGAINDNA | 0.44 | 1.71 | 2.07 |
| 1485 | ATLVT012XX2144 | 47078 | SSQTGASTNDNH | 0.29 | 2.39 | 1.45 |
| 1486 | ATLVT012XX3240 | 48174 | ISQSGAASNDNT | 0.48 | 1.43 | 2.35 |
| 1487 | ATLVT012XX1891 | 46825 | SSEAAGSTNDNA | 0.8 | 3.63 | −1.03 |
| 1488 | ATLVT012XX101 | 45035 | NGATAAAINDNH | −0.1 | 4.69 | −0.86 |
| 1489 | ATLVT012XX1866 | 46800 | SSATGGSSNDNT | 2.04 | 0.04 | 1.44 |
| 1490 | ATLVT012XX612 | 45546 | NSAAGASINDNT | 0.06 | 2.94 | 1.11 |
| 1491 | ATLVT012XX2805 | 47739 | TGTSAGSTNDNT | 2.46 | −0.02 | 0.81 |
| 1492 | ATLVT01XXX1218 | 46152 | SGASAGSSNDNT | 1.05 | 0.47 | 2.58 |
| 1493 | ATLVT012XX675 | 45609 | NSATAAASNDNT | 1.67 | −2.07 | 4.78 |
| 1494 | ATLVT012XX395 | 45329 | NGQTAASTNDNH | −0.53 | 4.01 | 0.72 |
| 1495 | ATLVT012XX2351 | 47285 | TGASAAASNDNH | 1.93 | −0.18 | 1.89 |
| 1496 | ATLVT012XX2145 | 47079 | SSQTGASTNDNT | 0.27 | 1.55 | 2.48 |
| 1497 | ATLVT012XX2988 | 47922 | TSATAGASNDNT | −0.01 | 1.28 | 3.32 |
| 1498 | ATLVT012XX2214 | 47148 | SSTSAASSNDNT | −1.31 | 3.33 | 2.91 |
| 1499 | ATLVT012XX2605 | 47539 | TGQAAGAINDNA | 0.28 | 1.61 | 2.39 |
| 1500 | ATLVT012XX1332 | 46266 | SGEAGGASNDNT | 1.84 | 0.29 | 1.41 |
| 1501 | ATLVT012XX25 | 44959 | NGAAGAASNDNA | 0.67 | 1.33 | 2.07 |
| 1502 | ATLVT012XX877 | 45811 | NSQAAGASNDNA | 0.42 | 1.7 | 2.02 |
| 1503 | ATLVT012XX1938 | 46872 | SSESAGSSNDNT | −1.63 | 1.42 | 5.89 |
| 1504 | ATLVT012XX1904 | 46838 | SSEAGASINDNH | 2.11 | 1.6 | −0.78 |
| 1505 | ATLVT012XX555 | 45489 | NGTTGAASNDNT | 2.05 | 0.59 | 0.63 |
| 1506 | ATLVT012XX2190 | 47124 | SSTAGASSNDNT | 0.76 | 0.69 | 2.69 |
| 1507 | ATLVT012XX2815 | 47749 | TGTSGASTNDNA | 0.05 | 3.51 | 0.28 |
| 1508 | ATLVT012XX2890 | 47824 | TSAAAGASNDNA | 0.28 | 2.18 | 1.59 |
| 1509 | ATLVT012XX761 | 45695 | NSEAGGATNDNH | −0.15 | 3.69 | 0.4 |
| 1510 | ATLVT012XX882 | 45816 | NSQAAGAINDNT | 1.24 | 1.13 | 1.3 |
| 1511 | ATLVT012XX2885 | 47819 | TSAAAASSNDNH | −1.7 | 5.44 | 0.78 |
| 1512 | ATLVT012XX1172 | 46106 | SGAAAGSINDNH | 0.69 | 1.4 | 1.87 |
| 1513 | ATLVT012XX2182 | 47116 | SSTAGAASNDNA | 1.71 | 0.53 | 1.24 |
| 1514 | ATLVT012XX2372 | 47306 | TGASAGSTNDNH | 0.52 | 1.64 | 1.85 |
| 1515 | ATLVT012XX3295 | 48229 | ISQTGASTNDNA | 0.18 | 3.96 | −0.55 |
| 1516 | ATLVT012XX2962 | 47896 | TSASGGASNDNA | 1.05 | 0.93 | 1.85 |
| 1517 | ATLVT012XX334 | 45268 | NGQAGGSINDNA | 1.48 | 0.89 | 1.16 |
| 1518 | ATLVT012XX1750 | 46684 | SSAAGAASNDNA | 0.29 | 1.12 | 2.9 |
| 1519 | ATLVT012XX236 | 45170 | NGESGGSSNDNH | 0.98 | 2.13 | 0.41 |
| 1520 | ATLVT012XX40 | 44974 | NGAAGGATNDNA | 0.24 | 1.51 | 2.47 |
| 1521 | ATLVT012XX2936 | 47870 | TSASAASTNDNH | −0.61 | 4.11 | 0.58 |
| 1522 | ATLVT012XX1693 | 46627 | SGTTAGATNDNA | 0.86 | 1.17 | 1.84 |
| 1523 | ATLVT012XX2422 | 47356 | TGATGAASNDNA | 0.75 | 1.37 | 1.77 |
| 1524 | ATLVT012XX736 | 45670 | NSEAAGAINDNA | 1.17 | 1.66 | 0.66 |
| 1525 | ATLVT012XX2135 | 47069 | SSQTGAASNDNH | 1.1 | −0.63 | 3.72 |
| 1526 | ATLVT012XX2405 | 47339 | TGATAASSNDNH | 0.57 | 1.5 | 1.89 |
| 1527 | ATLVT012XX3193 | 48127 | TSQAGAATNDNA | 0.53 | 1.59 | 1.84 |
| 1528 | ATLVT012XX1600 | 46534 | SGTAAGSSNDNA | 2.36 | 0.29 | 0.37 |
| 1529 | ATLVT012XX1503 | 46437 | SGQSAGATNDNT | 2.07 | 0.59 | 0.48 |
| 1530 | ATLVT012XX893 | 45827 | NSQAGAATNDNH | 1.32 | 1.21 | 0.96 |
| 1531 | ATLVT012XX2680 | 47614 | TGQSGGSSNDNA | 1.24 | 1.61 | 0.56 |
| 1532 | ATLVT012XX802 | 45736 | NSESGASTNDNA | 2.61 | 0.45 | −0.27 |
| 1533 | ATLVT012XX2280 | 47214 | SSTTGAASNDNT | 1.73 | 1.31 | 0.1 |
| 1534 | ATLVT012XX489 | 45423 | NGTSAASSNDNT | −0.69 | 0.59 | 5.19 |
| 1535 | ATLVT012XX2397 | 47331 | TGASGGSINDNT | 0.84 | 0.34 | 2.87 |
| 1536 | ATLVT012XX889 | 45823 | NSQAGAASNDNA | 0.99 | 1.18 | 1.54 |
| 1537 | ATLVT012XX26 | 44960 | NGAAGAASNDNH | 0.61 | 1.31 | 2.03 |
| 1538 | ATLVT012XX1518 | 46452 | SGQSGASSNDNT | 0.64 | 1.11 | 2.22 |
| 1539 | ATLVT012XX2283 | 47217 | SSTTGAATNDNT | 1.96 | 0.56 | 0.66 |
| 1540 | ATLVT012XX2951 | 47885 | TSASGAASNDNH | 1.06 | 0.8 | 1.89 |
| 1541 | ATLVT012XX2961 | 47895 | TSASGASTNDNT | 1.2 | −0.16 | 2.87 |
| 1542 | ATLVT012XX933 | 45867 | NSQSAGSSNDNT | 2.87 | 0.45 | −0.78 |
| 1543 | ATLVT012XX1939 | 46873 | SSESAGSTNDNA | −1.16 | 4.67 | 0.7 |
| 1544 | ATLVT012XX453 | 45387 | NGTAAGSSNDNT | 1.35 | 1.03 | 1.08 |
| 1545 | ATLVT012XX1787 | 46721 | SSASAGASNDNH | 0.78 | 2.14 | 0.62 |
| 1546 | ATLVT012XX2943 | 47877 | TSASAGATNDNT | −0.28 | 3.86 | 0.23 |
| 1547 | ATLVT012XX1662 | 46596 | SGTSGASSNDNT | 0.65 | 0.15 | 3.4 |
| 1548 | ATLVT012XX240 | 45174 | NGESGGSTNDNT | 2.05 | 1.68 | −0.99 |
| 1549 | ATLVT012XX1151 | 46085 | SGAAAAASNDNH | 0.92 | 1.08 | 1.71 |
| 1550 | ATLVT012XX1752 | 46686 | SSAAGAASNDNT | 0.92 | 1.18 | 1.58 |
| 1551 | ATLVT012XX2084 | 47018 | SSQSAGSTNDNH | 0.69 | 2.74 | −0.05 |
| 1552 | ATLVT012XX419 | 45353 | NGQTGASTNDNH | 0.38 | 0.23 | 3.71 |
| 1553 | ATLVT012XX1413 | 46347 | SGETAGSINDNT | 1.68 | 1.23 | 0.2 |
| 1554 | ATLVT012XX3371 | 48305 | TSTSAGASNDNH | −0.67 | 2.56 | 2.51 |
| 1555 | ATLVT012XX97 | 45031 | NGATAAASNDNA | 1.09 | 3.46 | −1.67 |
| 1556 | ATLVT012XX535 | 45469 | NGTTAASSNDNA | −0.44 | 3.28 | 1.18 |
| 1557 | ATLVT012XX1002 | 45936 | NSQTGGATNDNT | 1.03 | 1.07 | 1.49 |
| 1558 | ATLVT012XX51 | 44985 | NGASAAASNDNT | 0.26 | 0.83 | 3.13 |
| 1559 | ATLVT012XX534 | 45468 | NGTTAAATNDNT | 0.08 | 2.97 | 0.68 |
| 1560 | ATLVT012XX1976 | 46910 | SSETAASTNDNH | 0.15 | 0.6 | 3.61 |
| 1561 | ATLVT012XX159 | 45093 | NGEAAGASNDNT | 2.06 | 0.25 | 0.78 |
| 1562 | ATLVT012XX2956 | 47890 | TSASGASSNDNA | 0.21 | −0.62 | 5.06 |
| 1563 | ATLVT012XX2530 | 47464 | TGESGGASNDNA | −1.3 | 4.27 | 1.37 |
| 1564 | ATLVT012XX1765 | 46699 | SSAAGGATNDNA | 1.01 | 0.59 | 2.11 |
| 1565 | ATLVT012XX3341 | 48275 | TSTAGASSNDNH | 2.44 | 0.23 | 0.13 |
| 1566 | ATLVT012XX2217 | 47151 | SSTSAASINDNT | 1.7 | 1.72 | −0.51 |
| 1567 | ATLVT012XX3179 | 48113 | TSQAAGASNDNH | 0.41 | 1.41 | 2.09 |
| 1568 | ATLVT012XX3236 | 48170 | TSQSAGSTNDNH | −0.35 | 1.86 | 2.79 |
| 1569 | ATLVT012XX2034 | 46968 | SSQAAGSSNDNT | 0.53 | 1.06 | 2.31 |
| 1570 | ATLVT012XX3327 | 48261 | TSTAAGAINDNT | 0.03 | 2.87 | 0.85 |
| 1571 | ATLVT012XX3343 | 48277 | TSTAGASINDNA | 1.07 | 0.13 | 2.58 |
| 1572 | ATLVT012XX3185 | 48119 | TSQAAGSSNDNH | 0.62 | 1.32 | 1.8 |
| 1573 | ATLVT012XX3013 | 47947 | TSATGGATNDNA | 0.66 | 3.51 | −1.09 |
| 1574 | ATLVT012XX1608 | 46542 | SGTAGAASNDNT | 0.62 | 1.17 | 1.98 |
| 1575 | ATLVT012XX2319 | 47253 | TGAAAGAINDNT | 0.57 | 1.09 | 2.18 |
| 1576 | ATLVT012XX284 | 45218 | NGETGGSSNDNH | 2.01 | −0.56 | 1.82 |
| 1577 | ATLVT012XX492 | 45426 | NGTSAASINDNT | 3.53 | −1.32 | 0.19 |
| 1578 | ATLVT012XX326 | 45260 | NGQAGGASNDNH | 1.05 | 0.47 | 2.15 |
| 1579 | ATLVT012XX548 | 45482 | NGTTAGSSNDNH | 1.21 | 1.06 | 1.1 |
| 1580 | ATLVT012XX2721 | 47655 | TGQTGASTNDNT | 0.84 | 0.97 | 1.84 |
| 1581 | ATLVT012XX737 | 45671 | NSEAAGATNDNH | 0.53 | 1.25 | 2.02 |
| 1582 | ATLVT012XX3431 | 48365 | TSTTGAASNDNH | 1.42 | 0.65 | 1.25 |
| 1583 | ATLVT012XX1983 | 46917 | SSETAGAINDNT | −0.25 | 3.61 | 0.29 |
| 1584 | ATLVT012XX2949 | 47883 | TSASAGSTNDNT | 0.11 | 2.45 | 1.15 |
| 1585 | ATLVT012XX2912 | 47846 | TSAAGASINDNH | 0.55 | 1.73 | 1.32 |
| 1586 | ATLVT012XX2960 | 47894 | TSASGASINDNH | 0.19 | −0.1 | 4.28 |
| 1587 | ATLVT012XX2377 | 47311 | TGASGAATNDNA | 1.41 | 0.75 | 1.09 |
| 1588 | ATLVT012XX2171 | 47105 | SSTAAGASNDNH | −0.23 | 1.77 | 2.58 |
| 1589 | ATLVT012XX763 | 45697 | NSEAGGSSNDNA | 0.69 | 1.3 | 1.61 |
| 1590 | ATLVT012XX546 | 45480 | NGTTAGATNDNT | 1.06 | 0.77 | 1.64 |
| 1591 | ATLVT012XX1467 | 46401 | SGQAGAATNDNT | 0.32 | 0.34 | 3.47 |
| 1592 | ATLVT012XX2132 | 47066 | SSQTAGSTNDNH | 0.55 | 0.64 | 2.69 |
| 1593 | ATLVT012XX1411 | 46345 | SGETAGSTNDNA | 0.77 | 3.04 | −0.78 |
| 1594 | ATLVT012XX2602 | 47536 | TGQAAGASNDNA | 0.13 | 1.49 | 2.32 |
| 1595 | ATLVT012XX1365 | 46299 | SGESAGSTNDNT | 2 | 1.54 | −0.97 |
| 1596 | ATLVT012XX2844 | 47778 | TGTTAGASNDNT | 1.11 | 1.43 | 0.7 |
| 1597 | ATLVT012XX1405 | 46339 | SGETAGATNDNA | 2.19 | 1.12 | −0.75 |
| 1598 | ATLVT012XX2260 | 47194 | SSTTAASSNDNA | −0.25 | 4.18 | −0.5 |
| 1599 | ATLVT012XX3420 | 48354 | TSTTAGASNDNT | 1.41 | 0.89 | 0.86 |
| 1600 | ATLVT012XX1783 | 46717 | SSASAASTNDNA | 0.64 | 1.98 | 0.79 |
| 1601 | ATLVT012XX2309 | 47243 | TGAAAASSNDNH | 0.29 | 1.74 | 1.69 |
| 1602 | ATLVT012XX691 | 45625 | NSATAGSSNDNA | 1.09 | −0.02 | 2.58 |
| 1603 | ATLVT012XX1593 | 46527 | SGTAAASINDNT | 1.77 | −0.73 | 2.33 |
| 1604 | ATLVT012XX855 | 45789 | NSETGGASNDNT | 0.97 | 1.83 | 0.42 |
| 1605 | ATLVT012XX2443 | 47377 | TGATGGSTNDNA | −0.19 | 1.23 | 3.17 |
| 1606 | ATLVT012XX2310 | 47244 | TGAAAASSNDNT | −0.05 | 1.47 | 2.61 |
| 1607 | ATLVT012XX684 | 45618 | NSATAASTNDNT | 2.7 | −0.39 | 0.27 |
| 1608 | ATLVT012XX1994 | 46928 | SSETGAATNDNH | 1.68 | 0.29 | 1.15 |
| 1609 | ATLVT012XX563 | 45497 | NGTIGASINDNH | 0.57 | 1.44 | 1.57 |
| 1610 | ATLVT012XX2406 | 47340 | TGATAASSNDNT | −1.19 | 1.08 | 5.03 |
| 1611 | ATLVT012XX645 | 45579 | NSASAGSSNDNT | −0.03 | 2.22 | 1.59 |
| 1612 | ATLVT012XX1966 | 46900 | SSETAAASNDNA | 1.65 | −0.07 | 1.64 |
| 1613 | ATLVT012XX3262 | 48196 | TSQTAAASNDNA | 2.83 | −0.48 | 0.15 |
| 1614 | ATLVT012XX363 | 45297 | NGQSGAASNDNT | 1.62 | 0.88 | 0.47 |
| 1615 | ATLVT012XX2317 | 47251 | TGAAAGAINDNA | 0.44 | 1.46 | 1.73 |
| 1616 | ATLVT012XX2847 | 47781 | TGTTAGATNDNT | 1.33 | 0.59 | 1.32 |
| 1617 | ATLVT012XX3344 | 48278 | TSTAGASINDNH | 1.3 | 0.85 | 1.05 |
| 1618 | ATLVT012XX75 | 45009 | NGASGAASNDNT | 0.71 | 1.68 | 0.98 |
| 1619 | ATLVT012XX3282 | 48216 | TSQTAGSSNDNT | 1.22 | 0.6 | 1.49 |
| 1620 | ATLVT012XX221 | 45155 | NGESGAATNDNH | 1.04 | 0.95 | 1.37 |
| 1621 | ATLVT012XX2755 | 47689 | TGTAAGSINDNA | 2.4 | −0.29 | 0.62 |
| 1622 | ATLVT012XX1745 | 46679 | SSAAAGSSNDNH | 0.03 | 2.13 | 1.56 |
| 1623 | ATLVT012XX2736 | 47670 | TGTAAAASNDNT | −1.53 | 4.97 | 0.58 |
| 1624 | ATLVT012XX493 | 45427 | NGTSAGASNDNA | 0.89 | 1.77 | 0.53 |
| 1625 | ATLVT012XX1770 | 46704 | SSAAGGSSNDNT | 0.48 | 1.85 | 1.12 |
| 1626 | ATLVT012XX1551 | 46485 | SGQTAGATNDNT | 0.35 | 2.61 | 0.37 |
| 1627 | ATLVT012XX3372 | 48306 | TSTSAGASNDNT | 0.42 | 1.21 | 2.03 |
| 1628 | ATLVT012XX2141 | 47075 | SSQTGASSNDNH | −1.06 | 2.3 | 3.17 |
| 1629 | ATLVT012XX1689 | 46623 | SGTTAASINDNT | 0.73 | 0.11 | 2.89 |
| 1630 | ATLVT012XX467 | 45401 | NGTAGASINDNH | 1.5 | 0.36 | 1.26 |
| 1631 | ATLVT012XX42 | 44976 | NGAAGGATNDNT | −0.18 | 1.95 | 2.09 |
| 1632 | ATLVT012XX491 | 45425 | NGTSAASTNDNH | 1.03 | 1.79 | 0.22 |
| 1633 | ATLVT012XX1806 | 46740 | SSASGASSNDNT | −1 | 2.21 | 3.15 |
| 1634 | ATLVT012XX406 | 45340 | NGQTAGSTNDNA | 2.59 | 0.44 | −0.74 |
| 1635 | ATLVT012XX487 | 45421 | NGTSAASSNDNA | −0.58 | 2.21 | 2.42 |
| 1636 | ATLVT012XX1651 | 46585 | SGTSAGSTNDNA | 1.6 | 0.15 | 1.32 |
| 1637 | ATLVT012XX1936 | 46870 | SSESAGSSNDNA | −1.13 | 3.1 | 2.2 |
| 1638 | ATLVT012XX1569 | 46503 | SGQTGASTNDNT | 1.49 | 0.26 | 1.36 |
| 1639 | ATLVT012XX173 | 45107 | NGEAGAATNDNH | 0.16 | 2.99 | 0.12 |
| 1640 | ATLVT012XX687 | 45621 | NSATAGASNDNT | 0.85 | 0.3 | 2.4 |
| 1641 | ATLVT012XX2413 | 47347 | TGATAGATNDNA | 1.67 | −0.19 | 1.63 |
| 1642 | ATLVT012XX1171 | 46105 | SGAAAGSINDNA | 0.58 | 1.66 | 1.11 |
| 1643 | ATLVT012XX2140 | 47074 | SSQTGASSNDNA | −0.1 | −0.09 | 4.51 |
| 1644 | ATLVT012XX1068 | 46002 | NSTSAASINDNT | 1.13 | 0.37 | 1.82 |
| 1645 | ATLVT012XX2753 | 47687 | TGTAAGSSNDNH | 1.46 | 1.1 | 0.31 |
| 1646 | ATLVT012XX2347 | 47281 | TGAAGGSTNDNA | 0.17 | 1.73 | 2.3 |
| 1647 | ATLVT012XX373 | 45307 | NGQSGGASNDNA | 0.34 | 1.32 | 1.93 |
| 1648 | ATLVT012XX428 | 45362 | NGQTGGSSNDNH | 1.03 | 1.97 | −0.11 |
| 1649 | ATLVT012XX71 | 45005 | NGASAGSTNDNH | 1.6 | 0.43 | 0.9 |
| 1650 | ATLVT012XX858 | 45792 | NSETGGATNDNT | 0.46 | 2.08 | 0.72 |
| 1651 | ATLVT012XX2952 | 47886 | TSASGAASNDNT | 0.99 | 0.96 | 1.24 |
| 1652 | ATLVT012XX116 | 45050 | NGATAGSSNDNH | 1.91 | 0.74 | −0.04 |
| 1653 | ATLVT012XX3325 | 48259 | TSTAAGAINDNA | −0.81 | 4 | 0.43 |
| 1654 | ATLVT012XX1453 | 46387 | SGQAAGAINDNA | 0.02 | 1.57 | 2.12 |
| 1655 | ATLVT012XX2913 | 47847 | TSAAGASTNDNT | 0.23 | 1.58 | 1.74 |
| 1656 | ATLVT012XX19 | 44953 | NGAAAGSSNDNA | 0.13 | 2 | 1.37 |
| 1657 | ATLVT012XX1875 | 46809 | SSEAAAATNDNT | −1.6 | 2.45 | 3.75 |
| 1658 | ATLVT012XX1951 | 46885 | SSESGASINDNA | −0.78 | 4.44 | −0.2 |
| 1659 | ATLVT012XX2593 | 47527 | TGQAAAATNDNA | 0.68 | −0.69 | 3.86 |
| 1660 | ATLVT012XX353 | 45287 | NGQSAGAINDNH | 0.84 | 1.35 | 0.97 |
| 1661 | ATLVT012XX464 | 45398 | NGTAGASSNDNH | 0.32 | 1.41 | 1.78 |
| 1662 | ATLVT012XX3258 | 48192 | TSQSGGSSNDNT | 0.08 | 1.1 | 2.58 |
| 1663 | ATLVT012XX699 | 45633 | NSATGAASNDNT | −0.7 | 1.63 | 3.23 |
| 1664 | ATLVT012XX2070 | 47004 | SSQSAASSNDNT | 1.55 | −1.26 | 3.09 |
| 1665 | ATLVT012XX2842 | 47776 | TGTTAGASNDNA | 0.37 | 1.92 | 1.03 |
| 1666 | ATLVT012XX1804 | 46738 | SSASGASSNDNA | 0.92 | 1.07 | 1.17 |
| 1667 | ATLVT012XX2164 | 47098 | SSTAAASSNDNA | 3.1 | −0.34 | −0.77 |
| 1668 | ATLVT012XX2265 | 47199 | SSTTAASTNDNT | −0.53 | 3.3 | 0.79 |
| 1669 | ATLVT012XX2517 | 47451 | TGESAGSTNDNT | 0.42 | 0.64 | 2.55 |
| 1670 | ATLVT012XX1952 | 46886 | SSESGASTNDNH | −0.02 | 1.33 | 2.42 |
| 1671 | ATLVT012XX1799 | 46733 | SSASGAASNDNH | 1.48 | 0.89 | 0.41 |
| 1672 | ATLVT012XX593 | 45527 | NSAAAGATNDNH | 1.05 | 1.21 | 0.74 |
| 1673 | ATLVT012XX1710 | 46644 | SGTTGASSNDNT | 1.69 | −0.71 | 2.09 |
| 1674 | ATLVT012XX1490 | 46424 | SGQSAAATNDNH | 2.18 | 1.06 | −1.04 |
| 1675 | ATLVT012XX2225 | 47159 | SSTSAGSSNDNH | 0.98 | 1.51 | 0.43 |
| 1676 | ATLVT012XX2975 | 47909 | TSATAAASNDNH | 0.22 | 3.04 | −0.25 |
| 1677 | ATLVT012XX3186 | 48120 | TSQAAGSSNDNT | 0.08 | 0.98 | 2.65 |
| 1678 | ATLVT012XX1471 | 46405 | SGQAGASINDNA | −1.02 | 1.53 | 3.82 |
| 1679 | ATLVT012XX3012 | 47946 | TSATGGASNDNT | 1.99 | 0.62 | −0.16 |
| 1680 | ATLVT012XX2026 | 46960 | SSQAAGASNDNA | 0.23 | 1.76 | 1.38 |
| 1681 | ATLVT012XX892 | 45826 | NSQAGAATNDNA | −0.72 | 3.52 | 0.74 |
| 1682 | ATLVT012XX328 | 45262 | NGQAGGATNDNA | 1.57 | −0.21 | 1.61 |
| 1683 | ATLVT012XX2376 | 47310 | TGASGAASNDNT | 1.59 | 0.6 | 0.53 |
| 1684 | ATLVT012XX2332 | 47266 | TGAAGASSNDNA | 0.03 | 1.4 | 2.17 |
| 1685 | ATLVT012XX1769 | 46703 | SSAAGGSSNDNH | 1.36 | 0.66 | 0.84 |
| 1686 | ATLVT012XX3202 | 48136 | TSQAGGASNDNA | 0.27 | 0.65 | 2.7 |
| 1687 | ATLVT012XX3433 | 48367 | TSTTGAATNDNA | 0.77 | 0.62 | 1.88 |
| 1688 | ATLVT012XX2504 | 47438 | TGESAASTNDNH | 0.36 | 1.96 | 0.85 |
| 1689 | ATLVT012XX1612 | 46546 | SGTAGASSNDNA | 0.24 | 0.94 | 2.36 |
| 1690 | ATLVT012XX2578 | 47512 | TGETGGASNDNA | 1.79 | 0.73 | −0.02 |
| 1691 | ATLVT012XX3328 | 48262 | TSTAAGSSNDNA | 1.18 | 1.26 | 0.33 |
| 1692 | ATLVT012XX3039 | 47973 | TSEAAGAINDNT | 0.34 | 0.89 | 2.25 |
| 1693 | ATLVT012XX2935 | 47869 | TSASAASTNDNA | 0.12 | 2.38 | 0.71 |
| 1694 | ATLVT012XX1803 | 46737 | SSASGAATNDNT | 1.09 | 0.43 | 1.54 |
| 1695 | ATLVT012XX1107 | 46041 | NSTTAAATNDNI | −0.41 | 1.84 | 2.29 |
| 1696 | ATLVT012XX2378 | 47312 | TGASGAATNDNH | 1.66 | 0.44 | 0.55 |
| 1697 | ATLVT012XX2990 | 47924 | TSATAGAINDNH | 1.06 | 1.08 | 0.76 |
| 1698 | ATLVT012XX460 | 45394 | NGTAGAATNDNA | 0.72 | 0.62 | 1.93 |
| 1699 | ATLVT012XX900 | 45834 | NSQAGASINDNT | −0.38 | 0.52 | 3.95 |
| 1700 | ATLVT012XX79 | 45013 | NGASGASSNDNA | 2.31 | −0.66 | 0.84 |
| 1701 | ATLVT012XX3378 | 48312 | TSTSAGSSNDNT | −1.15 | 2.2 | 3.09 |
| 1702 | ATLVT012XX2902 | 47836 | TSAAGAASNDNA | 0.17 | 1.28 | 2.02 |
| 1703 | ATLVT012XX39 | 44973 | NGAAGGASNDNT | 0.31 | 1.07 | 2.05 |
| 1704 | ATLVT012XX986 | 45920 | NSQTGAASNDNH | 1.18 | 0.35 | 1.48 |
| 1705 | ATLVT012XX1208 | 46142 | SGASAASTNDNH | 0.95 | 1.82 | −0.01 |
| 1706 | ATLVT012XX1807 | 46741 | SSASGASTNDNA | 0.95 | 0.99 | 1.03 |
| 1707 | ATLVT012XX2041 | 46975 | SSQAGAATNDNA | 0.22 | 0.89 | 2.41 |
| 1708 | ATLVT012XX2306 | 47240 | TGAAAAATNDNH | 0.65 | 0.98 | 1.56 |
| 1709 | ATLVT012XX461 | 45395 | NGTAGAATNDNH | 1.14 | 0.41 | 1.44 |
| 1710 | ATLVT012XX560 | 45494 | NGTTGASSNDNH | −0.22 | 2.03 | 1.68 |
| 1711 | ATLVT012XX1880 | 46814 | SSEAAASINDNH | 2.54 | 0.29 | −0.8 |
| 1712 | ATLVT012XX3331 | 48265 | TSTAAGSINDNA | 0.77 | 1.5 | 0.67 |
| 1713 | ATLVT012XX2539 | 47473 | TGESGGSTNDNA | −0.82 | 1.78 | 3.03 |
| 1714 | ATLVT012XX3036 | 47970 | TSEAAGASNDNT | 0.13 | 1.15 | 2.2 |
| 1715 | ATLVT012XX1645 | 46579 | SGTSAGATNDNA | 1.32 | 0.48 | 1.01 |
| 1716 | ATLVT012XX2356 | 47290 | TGASAASSNDNA | −1.1 | 4.25 | 0.32 |
| 1717 | ATLVT012XX2916 | 47850 | ISAAGGASNDNT | −0.38 | 1.82 | 2.19 |
| 1718 | ATLVT012XX833 | 45767 | NSETAGAINDNH | 1.26 | 0.89 | 0.58 |
| 1719 | ATLVT012XX2925 | 47859 | TSAAGGSINDNT | 0.15 | 1.87 | 1.21 |
| 1720 | ATLVT012XX188 | 45122 | NGEAGGSSNDNH | 3.3 | −0.23 | −1.47 |
| 1721 | ATLVT012XX48 | 44982 | NGAAGGSINDNT | −0.06 | 1.66 | 1.85 |
| 1722 | ATLVT012XX2967 | 47901 | TSASGGATNDNT | 0.27 | 0.75 | 2.45 |
| 1723 | ATLVT012XX564 | 45498 | NGTTGASINDNT | 1.42 | 0.64 | 0.61 |
| 1724 | ATLVT012XX1500 | 46434 | SGQSAGASNDNT | 1.83 | 1.01 | −0.58 |
| 1725 | ATLVT012XX1265 | 46199 | SGATAGSSNDNH | 2.84 | −0.25 | −0.7 |
| 1726 | ATLVT012XX2316 | 47250 | TGAAAGASNDNT | 0.51 | 0.98 | 1.72 |
| 1727 | ATLVT012XX842 | 45776 | NSETGAASNDNH | 0.15 | −0.09 | 3.7 |
| 1728 | ATLVT012XX136 | 45070 | NGATGGATNDNA | 1.05 | 0.27 | 1.7 |
| 1729 | ATLVT012XX539 | 45473 | NGTTAASINDNH | −0.65 | 4.49 | −0.82 |
| 1730 | ATLVT012XX644 | 45578 | NSASAGSSNDNH | 1.06 | 0.84 | 0.91 |
| 1731 | ATLVT012XX2516 | 47450 | TGESAGSTNDNH | 0.59 | 2.03 | 0.19 |
| 1732 | ATLVT012XX1649 | 46583 | SGTSAGSSNDNH | 1.92 | 1.27 | −1.13 |
| 1733 | ATLVT012XX2264 | 47198 | SSTTAASTNDNH | 0.25 | 3.04 | −0.54 |
| 1734 | ATLVT012XX1896 | 46830 | SSEAGAASNDNT | 1.18 | 0.14 | 1.58 |
| 1735 | ATLVT012XX3438 | 48372 | TSTTGASSNDNI | 0.64 | 0.73 | 1.74 |
| 1736 | ATLVT012XX3377 | 48311 | TSTSAGSSNDNH | −0.07 | 1.44 | 2.03 |
| 1737 | ATLVT012XX1606 | 46540 | SGTAGAASNDNA | 0.42 | 0.1 | 2.91 |
| 1738 | ATLVT012XX561 | 45495 | NGTTGASSNDNT | 1.03 | 0.69 | 1.12 |
| 1739 | ATLVT012XX2865 | 47799 | TGTTGASTNDNT | 0.43 | 1.76 | 0.76 |
| 1740 | ATLVT012XX2761 | 47695 | TGTAGAATNDNA | −0.08 | 0.92 | 2.72 |
| 1741 | ATLVT012XX2094 | 47028 | SSQSGASSNDNT | 1.12 | −0.19 | 2.08 |
| 1742 | ATLVT012XX1104 | 46038 | NSTTAAASNDNT | 0.95 | 0.61 | 1.35 |
| 1743 | ATLVT012XX1648 | 46582 | SGTSAGSSNDNA | 0.69 | 0.76 | 1.59 |
| 1744 | ATLVT012XX2791 | 47725 | TGTSAASTNDNA | 0.59 | 1.96 | 0.22 |
| 1745 | ATLVT012XX2806 | 47740 | TGTSGAASNDNA | 0.97 | 0.94 | 0.86 |
| 1746 | ATLVT012XX1152 | 46086 | SGAAAAASNDNT | 0.66 | 0.67 | 1.76 |
| 1747 | ATLVT012XX3106 | 48040 | TSESGGASNDNA | 0.68 | −0.06 | 2.65 |
| 1748 | ATLVT012XX3287 | 48221 | TSQTGAASNDNH | 0.33 | 1.48 | 1.27 |
| 1749 | ATLVT012XX878 | 45812 | NSQAAGASNDNH | 0.43 | 1.05 | 1.65 |
| 1750 | ATLVT012XX1459 | 46393 | SGQAAGSINDNA | 0.45 | 1.7 | 0.77 |
| 1751 | ATLVT012XX885 | 45819 | NSQAAGSSNDNT | 0.16 | 1.44 | 1.6 |
| 1752 | ATLVT012XX3437 | 48371 | TSTTGASSNDNH | 1.35 | 0.44 | 0.84 |
| 1753 | ATLVT012XX1585 | 46519 | SGTAAAATNDNA | −1.39 | −0.54 | 6.78 |
| 1754 | ATLVT012XX36 | 44970 | NGAAGASTNDNT | 1.76 | −0.04 | 0.74 |
| 1755 | ATLVT012XX498 | 45432 | NGTSAGATNDNT | 0.45 | 1.16 | 1.46 |
| 1756 | ATLVT012XX3413 | 48347 | TSTTAASSNDNH | −0.55 | 0.54 | 3.96 |
| 1757 | ATLVT012XX316 | 45250 | NGQAGAATNDNA | 1.62 | 0.11 | 0.78 |
| 1758 | ATLVT012XX1246 | 46180 | SGATAAASNDNA | 2.11 | 0.78 | −0.92 |
| 1759 | ATLVT012XX2682 | 47616 | TGQSGGSSNDNT | 1.04 | 1.24 | 0.31 |
| 1760 | ATLVT012XX1679 | 46613 | SGTTAAASNDNH | 1.11 | 0.91 | 0.63 |
| 1761 | ATLVT012XX2958 | 47892 | TSASGASSNDNT | 0.55 | 0.11 | 2.59 |
| 1762 | ATLVT012XX2613 | 47547 | TGQAAGSINDNT | 0.22 | 0.57 | 2.57 |
| 1763 | ATLVT012XX281 | 45215 | NGETGGATNDNH | −1.04 | 3.4 | 1.07 |
| 1764 | ATLVT012XX1441 | 46375 | SGQAAAATNDNA | −0.65 | −0.7 | 5.67 |
| 1765 | ATLVT012XX3332 | 48266 | TSTAAGSTNDNH | 0.37 | 1.98 | 0.47 |
| 1766 | ATLVT012XX3149 | 48083 | TSETGASSNDNH | 2.94 | −0.54 | −0.7 |
| 1767 | ATLVT012XX324 | 45258 | NGQAGASINDNT | 2.21 | −1.01 | 1.16 |
| 1768 | ATLVT012XX1544 | 46478 | SGQTAASTNDNH | 1.21 | 1.77 | −0.71 |
| 1769 | ATLVT012XX2337 | 47271 | TGAAGASTNDNT | 0.23 | 1.1 | 1.83 |
| 1770 | ATLVT012XX2043 | 46977 | SSQAGAATNDNT | 0.65 | −0.12 | 2.66 |
| 1771 | ATLVT012XX640 | 45574 | NSASAGAINDNA | 0.66 | 1.8 | 0.18 |
| 1772 | ATLVT012XX1404 | 46338 | SGETAGASNDNT | 0.45 | 2.3 | −0.12 |
| 1773 | ATLVT012XX1801 | 46735 | SSASGAATNDNA | 1.21 | 0.55 | 0.83 |
| 1774 | ATLVT012XX3276 | 48210 | TSQTAGASNDNT | 0.87 | 0.61 | 1.33 |
| 1775 | ATLVT012XX647 | 45581 | NSASAGSINDNH | 0.81 | 1.24 | 0.63 |
| 1776 | ATLVT012XX295 | 45229 | NGQAAASSNDNA | 3.23 | −1.3 | −0.25 |
| 1777 | ATLVT012XX3067 | 48001 | TSEAGGSINDNA | 1.38 | −0.18 | 1.48 |
| 1778 | ATLVT012XX3421 | 48355 | TSTTAGAINDNA | 1.24 | 0.64 | 0.66 |
| 1779 | ATLVT012XX2615 | 47549 | TGQAGAASNDNH | −0.09 | 1.55 | 1.76 |
| 1780 | ATLVT012XX1886 | 46820 | SSEAAGAINDNH | −0.21 | 1.78 | 1.68 |
| 1781 | ATLVT012XX703 | 45637 | NSATGASSNDNA | 1.96 | 0.88 | −0.9 |
| 1782 | ATLVT012XX2075 | 47009 | SSQSAGASNDNH | 0.18 | 1.13 | 1.82 |
| 1783 | ATLVT01XXX78 | 45012 | NGASGAATNDNT | 0.7 | 0.5 | 1.75 |
| 1784 | ATLVT012XX1554 | 46488 | SGQTAGSSNDNT | 0.11 | 2.36 | 0.37 |
| 1785 | ATLVT012XX442 | 45376 | NGTAAASTNDNA | −1.4 | 4.06 | 0.74 |
| 1786 | ATLVT012XX304 | 45238 | NGQAAGATNDNA | 0.89 | 0.78 | 1.04 |
| 1787 | ATLVT012XX1840 | 46774 | SSATAGSSNDNA | 3.7 | −1.29 | −1.12 |
| 1788 | ATLVT012XX1702 | 46636 | SGTTGAASNDNA | 1.69 | 0.19 | 0.43 |
| 1789 | ATLVT012XX3115 | 48049 | TSESGGSINDNA | 1.06 | 0.33 | 1.32 |
| 1790 | ATLVT012XX3424 | 48358 | TSTTAGSSNDNA | 1.28 | 0.34 | 0.92 |
| 1791 | ATLVT012XX1013 | 45947 | NSTAAAATNDNH | 1.72 | 0.93 | −0.61 |
| 1792 | ATLVT012XX176 | 45110 | NGEAGASSNDNH | −0.98 | 5.03 | −1.25 |
| 1793 | ATLVT012XX1757 | 46691 | SSAAGASSNDNH | −0.2 | 2.13 | 1.15 |
| 1794 | ATLVT012XX1458 | 46392 | SGQAAGSSNDNT | 0.05 | 0.93 | 2.25 |
| 1795 | ATLVT012XX132 | 45066 | NGATGASTNDNT | 1.19 | 1.04 | 0.14 |
| 1796 | ATLVT012XX3016 | 47950 | TSATGGSSNDNA | 1.99 | 0.38 | −0.38 |
| 1797 | ATLVT012XX1105 | 46039 | NSTTAAATNDNA | 0.08 | 2.28 | 0.46 |
| 1798 | ATLVT012XX232 | 45166 | NGESGGATNDNA | 1.55 | 1.16 | −0.63 |
| 1799 | ATLVT012XX247 | 45181 | NGETAASSNDNA | −0.09 | 2.99 | −0.17 |
| 1800 | ATLVT012XX2580 | 47514 | TGETGGASNDNT | 1.55 | 0.73 | −0.07 |
| 1801 | ATLVT012XX3379 | 48313 | TSTSAGSTNDNA | −0.6 | 0.84 | 3.46 |
| 1802 | ATLVT012XX367 | 45301 | NGQSGASSNDNA | 1.99 | −0.35 | 0.54 |
| 1803 | ATLVT012XX849 | 45783 | NSETGASSNDNT | 2.54 | −0.05 | −0.79 |
| 1804 | ATLVT012XX3390 | 48324 | TSTSGASSNDNT | −0.75 | 2.78 | 1.21 |
| 1805 | ATLVT012XX2083 | 47017 | SSQSAGSINDNA | −1.18 | 5 | −0.91 |
| 1806 | ATLVT012XX2945 | 47879 | TSASAGSSNDNH | 1.69 | 0.64 | −0.22 |
| 1807 | ATLVT012XX1895 | 46829 | SSEAGAASNDNH | 1.19 | −0.29 | 1.81 |
| 1808 | ATLVT012XX307 | 45241 | NGQAAGSSNDNA | 1.28 | 0.28 | 0.93 |
| 1809 | ATLVT012XX2180 | 47114 | SSTAAGSINDNH | 0.7 | 0.8 | 1.25 |
| 1810 | ATLVT012XX2953 | 47887 | ISASGAATNDNA | 0.41 | 0.93 | 1.57 |
| 1811 | ATLVT012XX890 | 45824 | NSQAGAASNDNH | 1.16 | 0.59 | 0.73 |
| 1812 | ATLVT012XX23 | 44957 | NGAAAGSTNDNH | 1.08 | 0.37 | 1.13 |
| 1813 | ATLVT012XX2367 | 47301 | TGASAGAINDNT | −0.95 | 2.93 | 1.34 |
| 1814 | ATLVT012XX210 | 45144 | NGESAGATNDNT | −1.46 | −0.43 | 6.52 |
| 1815 | ATLVT012XX3051 | 47985 | TSEAGAATNDNT | 0.52 | 0.77 | 1.58 |
| 1816 | ATLVT012XX3334 | 48268 | TSTAGAASNDNA | 0.99 | 0.52 | 1.09 |
| 1817 | ATLVT012XX1210 | 46144 | SGASAGASNDNA | 0.84 | 1.31 | 0.33 |
| 1818 | ATLVT012XX1407 | 46341 | SGETAGAINDNT | 0.99 | 1.12 | 0.31 |
| 1819 | ATLVT012XX1515 | 46449 | SGQSGAATNDNT | 0.27 | 0.43 | 2.42 |
| 1820 | ATLVT012XX1831 | 46765 | SSATAASTNDNA | 2.91 | −1.14 | −0.07 |
| 1821 | ATLVT012XX350 | 45284 | NGQSAGASNDNH | 0.65 | 0.22 | 2.04 |
| 1822 | ATLVT012XX2313 | 47247 | TGAAAASINDNT | −0.2 | 1.57 | 1.76 |
| 1823 | ATLVT012XX369 | 45303 | NGQSGASSNDNT | 0.19 | −0.98 | 4.37 |
| 1824 | ATLVT012XX1962 | 46896 | SSESGGSSNDNT | 0.86 | 0.87 | 0.82 |
| 1825 | ATLVT012XX3277 | 48211 | TSQTAGATNDNA | 1.41 | 0.12 | 0.83 |
| 1826 | ATLVT012XX2665 | 47599 | TGQSGAATNDNA | −0.13 | 1.58 | 1.61 |
| 1827 | ATLVT012XX1609 | 46543 | SGTAGAATNDNA | −1.05 | 0.62 | 4.42 |
| 1828 | ATLVT012XX2324 | 47258 | TGAAAGSINDNH | 0.14 | 1.14 | 1.7 |
| 1829 | ATLVT012XX1824 | 46758 | SSATAAASNDNT | 2.41 | −0.44 | −0.17 |
| 1830 | ATLVT012XX2383 | 47317 | TGASGASINDNA | −0.2 | 2.83 | 0.11 |
| 1831 | ATLVT012XX1781 | 46715 | SSASAASSNDNH | −0.64 | 0.62 | 3.68 |
| 1832 | ATLVT012XX1561 | 46495 | SGQTGAATNDNA | 0.15 | 0.49 | 2.5 |
| 1833 | ATLVT012XX1995 | 46929 | SSETGAATNDNT | 1.18 | −0.27 | 1.71 |
| 1834 | ATLVT012XX192 | 45126 | NGEAGGSINDNT | 1.42 | 1.52 | −1 |
| 1835 | ATLVT012XX1346 | 46280 | SGESAAATNDNH | 1.82 | 0.51 | −0.4 |
| 1836 | ATLVT012XX3057 | 47991 | TSEAGASINDNT | 0.68 | 1.53 | 0.24 |
| 1837 | ATLVT012XX2747 | 47681 | TGTAAGASNDNH | 0.05 | 1.65 | 1.16 |
| 1838 | ATLVT012XX1449 | 46383 | SGQAAASINDNT | 2.08 | −0.19 | 0.04 |
| 1839 | ATLVT012XX3207 | 48141 | TSQAGGAINDNT | 0.24 | 0.61 | 2.16 |
| 1840 | ATLVT012XX1564 | 46498 | SGQTGASSNDNA | 0.53 | 1.11 | 1.02 |
| 1841 | ATLVT012XX3337 | 48271 | TSTAGAATNDNA | 0.69 | 0.73 | 1.23 |
| 1842 | ATLVT012XX1751 | 46685 | SSAAGAASNDNH | 0.18 | 0.89 | 1.9 |
| 1843 | ATLVT012XX3429 | 48363 | TSTTAGSINDNT | −0.62 | 1.54 | 2.43 |
| 1844 | ATLVT012XX2625 | 47559 | TGQAGASINDNT | −1.26 | −0.5 | 6.16 |
| 1845 | ATLVT012XX1746 | 46680 | SSAAAGSSNDNT | −0.77 | −0.35 | 5.12 |
| 1846 | ATLVT012XX1421 | 46355 | SGETGASSNDNH | −0.53 | 3.58 | −0.36 |
| 1847 | ATLVT012XX490 | 45424 | NGTSAASINDNA | 0.83 | 0.63 | 1.11 |
| 1848 | ATLVT012XX981 | 45915 | NSQTAGSSNDNI | 1.91 | −0.13 | 0.23 |
| 1849 | ATLVT012XX2454 | 47388 | TGEAAASSNDNT | 1.46 | 0.92 | −0.36 |
| 1850 | ATLVT012XX3175 | 48109 | TSQAAASTNDNA | 2.05 | −0.45 | 0.41 |
| 1851 | ATLVT012XX3281 | 48215 | TSQTAGSSNDNH | 0.3 | 1.63 | 0.71 |
| 1852 | ATLVT012XX1586 | 46520 | SGTAAAATNDNH | 0.27 | 0.91 | 1.68 |
| 1853 | ATLVT012XX658 | 45592 | NSASGASINDNA | 1 | 0.94 | 0.39 |
| 1854 | ATLVT012XX310 | 45244 | NGQAAGSINDNA | 2.14 | −0.27 | −0.02 |
| 1855 | ATLVT012XX2628 | 47562 | TGQAGGASNDNT | 0.33 | 0.98 | 1.49 |
| 1856 | ATLVT012XX1764 | 46698 | SSAAGGASNDNT | 0.27 | 0.34 | 2.4 |
| 1857 | ATLVT012XX2331 | 47265 | TGAAGAATNDNT | 0 | 1.13 | 1.86 |
| 1858 | ATLVT012XX3336 | 48270 | TSTAGAASNDNT | 0.85 | 0.74 | 0.89 |
| 1859 | ATLVT012XX944 | 45878 | NSQSGASSNDNH | 0.56 | 1.78 | 0.05 |
| 1860 | ATLVT012XX2437 | 47371 | TGATGGATNDNA | −0.13 | 0.5 | 2.86 |
| 1861 | ATLVT012XX1010 | 45944 | NSTAAAASNDNH | −0.46 | 2.63 | 0.7 |
| 1862 | ATLVT012XX505 | 45439 | NGTSGAASNDNA | 0.37 | 1 | 1.37 |
| 1863 | ATLVT012XX1457 | 46391 | SGQAAGSSNDNH | 0.55 | 1.78 | 0.06 |
| 1864 | ATLVT012XX2589 | 47523 | TGETGGSINDNI | 2.02 | −0.13 | −0.01 |
| 1865 | ATLVT012XX481 | 45415 | NGTSAAASNDNA | 1.21 | 0.15 | 1.02 |
| 1866 | ATLVT012XX2369 | 47303 | TGASAGSSNDNH | 0.24 | 1.33 | 1.16 |
| 1867 | ATLVT012XX596 | 45530 | NSAAAGSSNDNH | 0.84 | 1.28 | 0.19 |
| 1868 | ATLVT012XX2664 | 47598 | TGQSGAASNDNT | 0.2 | 1.73 | 0.7 |
| 1869 | ATLVT012XX262 | 45196 | NGETAGSTNDNA | −1.14 | 5.04 | −1.27 |
| 1870 | ATLVT012XX1424 | 16358 | SGETGASTNDNH | 0.89 | 0.69 | 0.84 |
| 1871 | ATLVT012XX3111 | 48045 | TSESGGAINDNT | 0.46 | 0.53 | 1.77 |
| 1872 | ATLVT012XX1219 | 46153 | SGASAGSTNDNA | 0.75 | −0.55 | 2.66 |
| 1873 | ATLVT012XX1347 | 46281 | SGESAAATNDNT | 3.47 | −1.38 | −0.94 |
| 1874 | ATLVT012XX2632 | 47566 | TGQAGGSSNDNA | 0.37 | 0.57 | 1.87 |
| 1875 | ATLVT012XX2027 | 46961 | SSQAAGASNDNH | −0.29 | 1.32 | 2.01 |
| 1876 | ATLVT012XX2411 | 47345 | TGATAGASNQNH | 2.17 | −0.83 | 0.56 |
| 1877 | ATLVT012XX3060 | 47994 | TSEAGGASNDNT | −0.45 | 1.68 | 1.81 |
| 1878 | ATLVT012XX287 | 45221 | NGETGGSINDNH | 0.28 | 1.6 | 0.66 |
| 1879 | ATLVT012XX2546 | 47480 | TGETAAATNDNH | 2.73 | −0.62 | −0.69 |
| 1880 | ATLVT012XX683 | 45617 | NSATAASTNDNH | −0.26 | 3.32 | −0.64 |
| 1881 | ATLVT012XX1688 | 46622 | SGTTAASINDNH | 0.71 | 1.38 | 0.2 |
| 1882 | ATLVT012XX2210 | 47144 | SSTSAAATNDNH | 2.12 | 0.54 | −1.16 |
| 1883 | ATLVT012XX2121 | 47055 | SSQTAASTNDNT | −0.37 | −1.42 | 5.64 |
| 1884 | ATLVT012XX776 | 45710 | NSESAASSNDNH | 0.28 | 2.27 | −0.23 |
| 1885 | ATLVT012XX2049 | 46983 | SSQAGASTNDNT | 0.41 | 0.4 | 1.94 |
| 1886 | ATLVT012XX2226 | 47160 | SSTSAGSSNDNT | −0.49 | 2.07 | 1.33 |
| 1887 | ATLVT012XX2303 | 47237 | TGAAAAASNDNH | −0.08 | 1.31 | 1.6 |
| 1888 | ATLVT012XX206 | 45140 | NGESAGASNDNH | −1.61 | −0.81 | 6.94 |
| 1889 | ATLVT012XX193 | 45127 | NGESAAASNDNA | 1.07 | −2.33 | 4.3 |
| 1890 | ATLVT012XX1157 | 46091 | SGAAAASSNDNH | −0.22 | 1.53 | 1.54 |
| 1891 | ATLVT012XX126 | 45060 | NGATGAATNDNT | 0.77 | 1.25 | 0.2 |
| 1892 | ATLVT012XX2767 | 47701 | TGTAGASTNDNA | 1.09 | 0.02 | 1.24 |
| 1893 | ATLVT012XX3361 | 48295 | TSTSAAATNDNA | −1.42 | 3.39 | 1.21 |
| 1894 | ATLVT012XX1635 | 46569 | SGTSAAATNDNT | 0.2 | 1.35 | 1.04 |
| 1895 | ATLVT012XX1418 | 46352 | SGETGAATNDNH | 0.25 | 1.01 | 1.39 |
| 1896 | ATLVT012XX2415 | 47349 | TGATAGAINDNT | −0.04 | −0.51 | 3.84 |
| 1897 | ATLVT012XX1596 | 46530 | SGTAAGASNDNT | 0.74 | 1.48 | −0.07 |
| 1898 | ATLVT012XX1168 | 46102 | SGAAAGSSNDNA | 0.77 | 0.98 | 0.53 |
| 1899 | ATLVT012XX2919 | 47853 | TSAAGGAINDNT | 0.13 | 1.1 | 1.45 |
| 1900 | ATLVT012XX2119 | 47053 | SSQTAASINDNA | 1.03 | −1.25 | 2.92 |
| 1901 | ATLVT012XX1269 | 46203 | SGATAGSINDNT | −1.04 | 3.1 | 0.88 |
| 1902 | ATLVT012XX2423 | 47357 | TGATGAASNDNH | 0.65 | 0.59 | 1.22 |
| 1903 | ATLVT012XX529 | 45463 | NGTTAAASNDNA | 2.13 | 0.05 | −0.65 |
| 1904 | ATLVT012XX2616 | 47550 | TGQAGAASNDNT | −1.54 | 3.74 | 0.9 |
| 1905 | ATLVT012XX2380 | 47314 | TGASGASSNDNA | 0.44 | 0.33 | 1.89 |
| 1906 | ATLVT012XX928 | 45862 | NSQSAGATNDNA | 1.54 | 0.35 | −0.04 |
| 1907 | ATLVT012XX3160 | 48094 | TSETGGSSNDNA | 1.94 | 0.77 | −1.26 |
| 1908 | ATLVT012XX2626 | 47560 | TGQAGGASNDNA | 0.07 | 0.62 | 2.13 |
| 1909 | ATLVT012XX3426 | 48360 | TSTTAGSSNDNT | −0.22 | 1.07 | 2.06 |
| 1910 | ATLVT012XX2716 | 47650 | IGQTGASSNDNA | 1.9 | −0.43 | 0.34 |
| 1911 | ATLVT012XX2851 | 47785 | TGTTAGSTNDNA | −0.14 | 1.01 | 1.98 |
| 1912 | ATLVT012XX47 | 44981 | NGAAGGSINDNH | 0.48 | 0.74 | 1.27 |
| 1913 | ATLVT012XX2583 | 47517 | TGETGGATNDNT | 1.11 | 0.18 | 0.9 |
| 1914 | ATLVT012XX2213 | 47147 | SSTSAASSNDNH | −0.51 | 1.57 | 1.89 |
| 1915 | ATLVT012XX685 | 45619 | NSATAGASNDNA | 1.52 | −0.61 | 1.21 |
| 1916 | ATLVT012XX2130 | 47064 | SSQTAGSSNDNT | 2.05 | −0.37 | −0.01 |
| 1917 | ATLVT012XX2889 | 47823 | TSAAAASTNDNT | −1.49 | 1.09 | 4.19 |
| 1918 | ATLVT012XX2363 | 47297 | TGASAGASNDNH | 0.64 | 0.51 | 1.27 |
| 1919 | ATLVT012XX2224 | 47158 | SSTSAGSSNDNA | 0.63 | 0.45 | 1.38 |
| 1920 | ATLVT012XX1826 | 46760 | SSATAAATNDNH | 2.37 | 0.18 | −1.27 |
| 1921 | ATLVT012XX1780 | 46714 | SSASAASSNDNA | 2.34 | −0.93 | 0.2 |
| 1922 | ATLVT012XX2039 | 46973 | SSQAGAASNDNH | 1.77 | −0.43 | 0.51 |
| 1923 | ATLVT012XX315 | 45249 | NGQAGAASNDNT | 0.9 | 0.45 | 0.88 |
| 1924 | ATLVT012XX3376 | 48310 | TSTSAGSSNDNA | −0.97 | 1.35 | 2.93 |
| 1925 | ATLVT012XX2793 | 47727 | TGTSAASTNQNT | 1.39 | 1.06 | −0.77 |
| 1926 | ATLVT012XX3034 | 47968 | TSEAAGASNDNA | −0.27 | 0.97 | 2.18 |
| 1927 | ATLVT012XX2592 | 47526 | TGQAAAASNDNT | −0.66 | −0.78 | 5.1 |
| 1928 | ATLVT012XX2407 | 47341 | TGATAASTNDNA | −0.69 | 2.66 | 0.73 |
| 1929 | ATLVT012XX1397 | 46331 | SGETAASSNDNH | 2.47 | −0.43 | −0.71 |
| 1930 | ATLVT012XX2676 | 47610 | TGQSGGASNDNT | 0.96 | 1.09 | −0.09 |
| 1931 | ATLVT012XX249 | 45183 | NGETAASSNDNT | 1.26 | 1.48 | −1.11 |
| 1932 | ATLVT012XX554 | 45488 | NGTTGAASNDNH | 1.16 | 0.43 | 0.43 |
| 1933 | ATLVT012XX2651 | 47585 | TGQSAGASNDNH | 0.46 | 0.46 | 1.57 |
| 1934 | ATLVT012XX2735 | 47669 | TGTAAAASNDNH | −1.13 | 3.26 | 0.69 |
| 1935 | ATLVT012XX1773 | 46707 | SSAAGGSINDNT | 0.97 | −0.05 | 1.34 |
| 1936 | ATLVT012XX971 | 45905 | NSQTAASINDNH | 1.25 | 0.65 | −0.05 |
| 1937 | ATLVT012XX1497 | 46431 | SGQSAASTNDNT | 1.09 | 1.41 | −0.74 |
| 1938 | ATLVT012XX488 | 45422 | NGTSAASSNDNH | 0.32 | 0.06 | 2.3 |
| 1939 | ATLVT012XX3090 | 48024 | TSESAGSSNDNT | −2.35 | 4.09 | 1.69 |
| 1940 | ATLVT012XX925 | 45859 | NSQSAGASNDNA | 0.36 | 1.36 | 0.55 |
| 1941 | ATLVT012XX2679 | 47613 | TGQSGGATNDNT | −0.36 | 1.38 | 1.75 |
| 1942 | ATLVT012XX1415 | 46349 | SGETGAASNDNH | 0.62 | 0.32 | 1.44 |
| 1943 | ATLVT012XX559 | 45493 | NGTTGASSNDNA | 0.32 | 0.77 | 1.35 |
| 1944 | ATLVT012XX441 | 45375 | NGTAAASSNDNT | −2.36 | 2.82 | 3.31 |
| 1945 | ATLVT012XX1553 | 46487 | SGQTAGSSNDNH | 0.68 | 1.81 | −0.61 |
| 1946 | ATLVT012XX3015 | 47949 | TSATGGATNDNT | 0.68 | 1.23 | 0.14 |
| 1947 | ATLVT012XX3292 | 48226 | TSQTGASSNDNA | −0.2 | 1.79 | 0.93 |
| 1948 | ATLVT012XX2813 | 47747 | TGTSGASSNDNH | 0.61 | 0.95 | 0.61 |
| 1949 | ATLVT012XX17 | 44951 | NGAAAGATNDNH | 0.04 | 0.79 | 1.79 |
| 1950 | ATLVT012XX3230 | 48164 | TSQSAGATNDNH | −0.17 | 1.87 | 0.76 |
| 1951 | ATLVT012XX2677 | 47611 | TGQSGGATNDNA | 1.66 | −0.25 | 0.33 |
| 1952 | ATLVT012XX408 | 45342 | NGQTAGSINDNT | 0.65 | 1.16 | 0.26 |
| 1953 | ATLVT012XX2984 | 47918 | TSATAASTNDNH | 0.87 | 1.24 | −0.23 |
| 1954 | ATLVT012XX847 | 45781 | NSETGASSNDNA | 2.41 | −0.15 | −1.08 |
| 1955 | ATLVT012XX3366 | 48300 | TSTSAASSNDNT | −2.19 | 1.46 | 4.73 |
| 1956 | ATLVT012XX1740 | 46674 | SSAAAGASNDNT | −0.32 | 1.64 | 1.28 |
| 1957 | ATLVT012XX2898 | 47832 | TSAAAGSSNDNT | −0.38 | 1.19 | 1.95 |
| 1958 | ATLVT012XX1900 | 46834 | SSEAGASSNDNA | 1.15 | 0.1 | 0.74 |
| 1959 | ATLVT012XX591 | 45525 | NSAAAGASNDNI | 0.35 | 0.82 | 1.16 |
| 1960 | ATLVT012XX655 | 45589 | NSASGASSNDNA | 1.4 | 0.21 | 0.14 |
| 1961 | ATLVT012XX2808 | 47742 | TGTSGAASNDNT | 0.48 | 1.01 | 0.69 |
| 1962 | ATLVT012XX2286 | 47220 | SSTTGASSNDNT | 0.62 | 1.58 | −0.3 |
| 1963 | ATLVT012XX2948 | 47882 | TSASAGSTNDNH | 0.43 | 1.39 | 0.26 |
| 1964 | ATLVT012XX1216 | 46150 | SGASAGSSNDNA | 1.12 | −0.22 | 1.15 |
| 1965 | ATLVT012XX3289 | 48223 | TSQTGAATNDNA | 0.37 | 0.83 | 1.08 |
| 1966 | ATLVT012XX2714 | 47648 | TGQTGAATNDNH | 0.17 | 0.41 | 1.95 |
| 1967 | ATLVT012XX1403 | 46337 | SGETAGASNDNH | −0.02 | 1.68 | 0.63 |
| 1968 | ATLVT012XX2416 | 47350 | TGATAGSSNDNA | 1.85 | −0.5 | 0.24 |
| 1969 | ATLVT012XX734 | 45668 | NSEAAGASNDNH | 0.19 | 1.1 | 1.01 |
| 1970 | ATLVT012XX401 | 45335 | NGQTAGAINDNH | 1.28 | 1.25 | −1.05 |
| 1971 | ATLVT012XX2490 | 47424 | TGEAGGSSNDNT | 0.31 | 1.69 | 0.03 |
| 1972 | ATLVT012XX337 | 45271 | NGQSAAASNDNA | 0.22 | 0.6 | 1.59 |
| 1973 | ATLVT012XX2754 | 47688 | TGTAAGSSNDNT | 0.78 | 0.89 | 0.26 |
| 1974 | ATLVT012XX588 | 45522 | NSAAAASINDNT | −1.9 | −0.48 | 6.6 |
| 1975 | ATLVT012XX3370 | 48304 | TSTSAGASNDNA | −0.67 | 1.84 | 1.5 |
| 1976 | ATLVT012XX2524 | 47458 | TGESGASSNDNA | −1.02 | −0.97 | 5.71 |
| 1977 | ATLVT012XX3368 | 48302 | TSTSAASTNDNH | −0.83 | 1.55 | 2.14 |
| 1978 | ATLVT012XX2486 | 47420 | TGEAGGATNDNH | 0.44 | 1.05 | 0.61 |
| 1979 | ATLVT012XX2215 | 47149 | SSTSAASINDNA | 0.45 | 0.86 | 0.83 |
| 1980 | ATLVT012XX2617 | 47551 | TGQAGAATNDNA | −0.29 | 1.19 | 1.68 |
| 1981 | ATLVT012XX2859 | 47793 | TGTTGAATNDNT | 0.59 | 0.23 | 1.39 |
| 1982 | ATLVT012XX291 | 45225 | NGQAAAASNDNT | 1.12 | −1.95 | 3.28 |
| 1983 | ATLVT012XX3023 | 47957 | TSEAAAASNDNH | 2.03 | −0.49 | −0.13 |
| 1984 | ATLVT012XX1546 | 46480 | SGQTAGASNDNA | 0.04 | 1.59 | 0.58 |
| 1985 | ATLVT012XX1741 | 46675 | SSAAAGATNDNA | −0.25 | 1.64 | 1.02 |
| 1986 | ATLVT012XX1849 | 46783 | SSATGAATNDNA | 0.92 | 0.79 | 0.09 |
| 1987 | ATLVT012XX1825 | 46759 | SSATAAATNDNA | 2.64 | −0.28 | −1.48 |
| 1988 | ATLVT012XX931 | 45865 | NSQSAGSSNDNA | 2.21 | 0.14 | −1.29 |
| 1989 | ATLVT012XX3268 | 48202 | TSQTAASSNDNA | 0.12 | −1.4 | 4.27 |
| 1990 | ATLVT012XX2556 | 47490 | TGETAGASNDNT | −1.26 | 3.94 | −0.24 |
| 1991 | ATLVT012XX2786 | 47720 | TGTSAAATNDNH | 0.7 | 0.47 | 0.87 |
| 1992 | ATLVT012XX1592 | 46526 | SGTAAASTNDNH | −0.35 | 0.13 | 3.1 |
| 1993 | ATLVT012XX700 | 45634 | NSATGAATNDNA | 0.12 | 0.07 | 2.37 |
| 1994 | ATLVT012XX1212 | 46146 | SGASAGASNDNT | 0.83 | 0.23 | 0.94 |
| 1995 | ATLVT012XX1847 | 46781 | SSATGAASNDNH | 0.45 | 1.77 | −0.38 |
| 1996 | ATLVT012XX2371 | 47305 | TGASAGSINDNA | −2.06 | 0.67 | 5.33 |
| 1997 | ATLVT012XX1259 | 46193 | SGATAGASNDNH | 1.09 | 0.52 | 0.12 |
| 1998 | ATLVT012XX648 | 45582 | NSASAGSTNDNT | 1.31 | 0 | 0.39 |
| 1999 | ATLVT012XX1797 | 46731 | SSASAGSINDNT | −0.34 | 3.19 | −0.88 |
| 2000 | ATLVT012XX3425 | 48359 | TSTTAGSSNDNH | 0.82 | 0.49 | 0.61 |
| 2001 | ATLVT012XX1267 | 46201 | SGATAGSINDNA | 0.18 | 2.46 | −0.87 |
| 2002 | ATLVT012XX2181 | 47115 | SSTAAGSINDNT | −0.8 | 1.69 | 1.8 |
| 2003 | ATLVT012XX202 | 45136 | NGESAASTNDNA | 0.24 | −0.43 | 2.72 |
| 2004 | ATLVT012XX55 | 44989 | NGASAASSNDNA | 1.69 | −0.23 | −0.03 |
| 2005 | ATLVT012XX104 | 45038 | NGATAASSNDNH | 0.8 | 1.24 | −0.39 |
| 2006 | ATLVT012XX426 | 45360 | NGQTGGAINDNT | −0.92 | 0.92 | 2.95 |
| 2007 | ATLVT012XX1233 | 46167 | SGASGASTNDNT | 1.58 | −0.73 | 0.79 |
| 2008 | ATLVT012XX438 | 45372 | NGTAAAATNDNT | −1.54 | −0.39 | 5.7 |
| 2009 | ATLVT012XX2373 | 47307 | TGASAGSINDNT | −0.67 | 0.37 | 3.22 |
| 2010 | ATLVT012XX1200 | 46134 | SGASAAASNDNT | 1.67 | −0.93 | 0.88 |
| 2011 | ATLVT012XX34 | 44968 | NGAAGASTNDNA | 0.13 | 0.87 | 1.2 |
| 2012 | ATLVT012XX3144 | 48078 | TSETGAASNDNT | 1.2 | −0.11 | 0.63 |
| 2013 | ATLVT012XX2045 | 46979 | SSQAGASSNDNH | 1.9 | −0.36 | −0.25 |
| 2014 | ATLVT012XX1276 | 46210 | SGATGASSNDNA | 1.25 | 0.66 | −0.47 |
| 2015 | ATLVT012XX327 | 45261 | NGQAGGASNDNT | 0.71 | 0.18 | 1.08 |
| 2016 | ATLVT012XX2896 | 47830 | TSAAAGSSNDNA | 0.15 | 1.52 | 0.31 |
| 2017 | ATLVT012XX3096 | 48030 | TSESGAASNDNI | −0.22 | 0.52 | 2.23 |
| 2018 | ATLVT012XX1213 | 46147 | SGASAGATNDNA | 0.82 | −0.05 | 1.17 |
| 2019 | ATLVT012XX189 | 45123 | NGEAGGSSNDNT | 2.09 | −0.46 | −0.47 |
| 2020 | ATLVT012XX229 | 45163 | NGESGGASNDNA | 0.86 | 1.53 | −0.93 |
| 2021 | ATLVT012XX128 | 45062 | NGATGASSNDNH | 0.6 | 0.54 | 0.76 |
| 2022 | ATLVT012XX30 | 44964 | NGAAGAATNDNT | −0.07 | 0.89 | 1.47 |
| 2023 | ATLVT012XX3363 | 48297 | TSTSAAATNDNT | −1.88 | 3.18 | 1.59 |
| 2024 | ATLVT012XX540 | 45474 | NGTTAASINDNT | 0.33 | 0.2 | 1.62 |
| 2025 | ATLVT012XX843 | 45777 | NSETGAASNDNT | 0.86 | −0.22 | 1.25 |
| 2026 | ATLVT012XX37 | 44971 | NGAAGGASNDNA | 0.06 | 0.69 | 1.45 |
| 2027 | ATLVT012XX894 | 45828 | NSQAGAATNDNT | 0.82 | 0.59 | 0.29 |
| 2028 | ATLVT012XX1541 | 46475 | SGQTAASSNDNH | 0.49 | 0.43 | 1.06 |
| 2029 | ATLVT012XX943 | 45877 | NSQSGASSNDNA | 0.88 | 0.98 | −0.34 |
| 2030 | ATLVT012XX209 | 45143 | NGESAGAINDNH | −1.05 | 1.04 | 2.87 |
| 2031 | ATLVT012XX2888 | 47822 | TSAAAASTNDNH | −1.93 | 3.85 | 0.77 |
| 2032 | ATLVT012XX2581 | 47515 | TGETGGATNDNA | 0.9 | 0.94 | −0.34 |
| 2033 | ATLVT012XX927 | 45861 | NSQSAGASNDNT | 1.02 | 0.39 | 0.15 |
| 2034 | ATLVT012XX191 | 45125 | NGEAGGSINDNH | 0.53 | 2.24 | −1.4 |
| 2035 | ATLVT012XX2790 | 47724 | TGTSAASSNDNT | 0.58 | 0.41 | 0.87 |
| 2036 | ATLVT012XX1280 | 46214 | SGATGASTNDNH | 2.13 | −0.17 | −1.05 |
| 2037 | ATLVT012XX2402 | 47336 | TGATAAATNDNH | 1.25 | 0.26 | −0.1 |
| 2038 | ATLVT012XX549 | 45483 | NGTTAGSSNDNT | −0.89 | 1.53 | 1.93 |
| 2039 | ATLVT012XX836 | 45770 | NSETAGSSNDNH | 0.64 | 0.68 | 0.39 |
| 2040 | ATLVT012XX3035 | 47969 | TSEAAGASNDNH | −0.58 | 0.92 | 2.18 |
| 2041 | ATLVT012XX1393 | 46327 | SGETAAATNDNA | 1.87 | −0.16 | −0.65 |
| 2042 | ATLVT012XX3021 | 47955 | TSATGGSINDNT | 0.92 | 0.87 | −0.34 |
| 2043 | ATLVT012XX2552 | 47486 | TGETAASTNDNH | 1.19 | −0.28 | 0.68 |
| 2044 | ATLVT012XX1367 | 46301 | SGESGAASNDNH | 0.39 | 1.34 | −0.04 |
| 2045 | ATLVT012XX1174 | 46108 | SGAAGAASNDNA | −0.08 | 0.66 | 1.64 |
| 2046 | ATLVT012XX392 | 45326 | NGQTAASSNDNH | 0.54 | −0.4 | 1.93 |
| 2047 | ATLVT012XX2861 | 47795 | TGTTGASSNDNH | 0.73 | 0.61 | 0.3 |
| 2048 | ATLVT012XX2947 | 47881 | TSASAGSTNDNA | −0.29 | 1.94 | 0.35 |
| 2049 | ATLVT012XX1228 | 46162 | SGASGASSNDNA | 1.86 | −0.46 | −0.25 |
| 2050 | ATLVT012XX3108 | 48042 | TSESGGASNDNT | 0.16 | 1.07 | 0.68 |
| 2051 | ATLVT012XX3231 | 48165 | TSQSAGATNDNT | −0.11 | 0.93 | 1.33 |
| 2052 | ATLVT012XX1591 | 46525 | SGTAAASTNDNA | −0.6 | 0.39 | 2.84 |
| 2053 | ATLVT012XX725 | 45659 | NSEAAAATNDNH | 1.97 | 0.26 | −1.4 |
| 2054 | ATLVT012XX2165 | 47099 | SSTAAASSNDNH | −1.13 | 3.16 | 0.19 |
| 2055 | ATLVT012XX962 | 45896 | NSQTAAASNDNH | −0.26 | −1.23 | 4.36 |
| 2056 | ATLVT012XX1881 | 46815 | SSEAAASTNQNT | 1.01 | 0.42 | 0.04 |
| 2057 | ATLVT012XX562 | 45496 | NGTTGASTNDNA | −0.66 | 2.14 | 0.69 |
| 2058 | ATLVT012XX3249 | 48183 | TSQSGASTNDNT | −0.61 | 0.2 | 3.09 |
| 2059 | ATLVT012XX2748 | 47682 | TGTAAGASNDNT | 0 | 1.19 | 0.77 |
| 2060 | ATLVT012XX1420 | 46354 | SGETGASSNDNA | 0.09 | 1.5 | 0.21 |
| 2061 | ATLVT01XXX1800 | 46734 | SSASGAASNDNT | 0.27 | 0.82 | 0.78 |
| 2062 | ATLVT012XX2125 | 47059 | SSQTAGATNDNA | 0.73 | −0.05 | 1.1 |
| 2063 | ATLVT012XX1901 | 46835 | SSEAGASSNDNH | 0.9 | −0.29 | 1.13 |
| 2064 | ATLVT012XX117 | 45051 | NGATAGSSNDNT | 1.01 | −0.15 | 0.74 |
| 2065 | ATLVT012XX1161 | 46095 | SGAAAASINDNT | −0.69 | 1.36 | 1.71 |
| 2066 | ATLVT012XX1883 | 46817 | SSEAAGASNDNH | 0 | 1.3 | 0.6 |
| 2067 | ATLVT012XX2361 | 47295 | TGASAASTNDNT | −0.06 | 2.36 | −0.69 |
| 2068 | ATLVT012XX3018 | 47952 | TSATGGSSNDNT | 1.22 | 0.35 | −0.29 |
| 2069 | ATLVT012XX2131 | 47065 | SSQTAGSTNDNA | 0.37 | 0.63 | 0.79 |
| 2070 | ATLVT012XX1630 | 46564 | SGTSAAASNDNA | 0.56 | −0.05 | 1.34 |
| 2071 | ATLVT012XX309 | 45243 | NGQAAGSSNDNT | 0.21 | 0.47 | 1.26 |
| 2072 | ATLVT012XX2855 | 47789 | TGTTGAASNDNH | 0.47 | 0.7 | 0.52 |
| 2073 | ATLVT012XX1338 | 46272 | SGEAGGSSNDNT | 0.9 | −0.39 | 1.19 |
| 2074 | ATLVT012XX214 | 45148 | NGESAGSTNDNA | −0.65 | 1.76 | 1.07 |
| 2075 | ATLVT012XX2040 | 46974 | SSQAGAASNDNT | 0.65 | 0.59 | 0.36 |
| 2076 | ATLVT012XX2830 | 47764 | TGTTAAASNDNA | 2.36 | −0.2 | −1.57 |
| 2077 | ATLVT012XX759 | 45693 | NSEAGGASNDNT | −0.15 | 0.62 | 1.66 |
| 2078 | ATLVT012XX1014 | 45948 | NSTAAAATNDNT | 0.3 | −0.69 | 2.58 |
| 2079 | ATLVT012XX3154 | 48088 | TSETGGASNDNA | 0.73 | 0.56 | 0.24 |
| 2080 | ATLVT012XX1973 | 46907 | SSETAASSNDNH | 0.14 | −0.03 | 2.01 |
| 2081 | ATLVT012XX3291 | 48225 | TSQTGAATNDNT | 0.17 | −0.42 | 2.46 |
| 2082 | ATLVT012XX1835 | 46769 | SSATAGASNDNH | −0.14 | 2.05 | −0.2 |
| 2083 | ATLVT012XX301 | 45235 | NGQAAGASNDNA | −0.3 | 0.91 | 1.54 |
| 2084 | ATLVT012XX32 | 44966 | NGAAGASSNDNH | −0.3 | 1.09 | 1.31 |
| 2085 | ATLVT012XX2384 | 47318 | IGASGASTNDNH | −0.34 | 1.7 | 0.59 |
| 2086 | ATLVT012XX841 | 45775 | NSETGAASNDNA | 1.3 | −0.43 | 0.51 |
| 2087 | ATLVT012XX361 | 45295 | NGQSGAASNDNA | 1.18 | −0.45 | 0.74 |
| 2088 | ATLVT012XX2111 | 47045 | SSQTAAASNDNH | −0.78 | 0.15 | 3.33 |
| 2089 | ATLVT012XX2267 | 47201 | SSTTAGASNDNH | 0.17 | 0.76 | 0.91 |
| 2090 | ATLVT012XX2304 | 47238 | TGAAAAASNDNT | −0.18 | 0.85 | 1.4 |
| 2091 | ATLVT012XX1788 | 46722 | SSASAGASNDNT | 0.55 | 0.95 | 0.01 |
| 2092 | ATLVT012XX2127 | 47061 | SSQTAGATNDNT | 1.77 | −0.81 | 0.17 |
| 2093 | ATLVT012XX987 | 45921 | NSQTGAASNDNT | 1.17 | 0.27 | −0.19 |
| 2094 | ATLVT012XX3119 | 48053 | TSETAAASNDNH | −0.4 | 1.01 | 1.55 |
| 2095 | ATLVT012XX1225 | 46159 | SGASGAATNDNA | 0.22 | 0.22 | 1.49 |
| 2096 | ATLVT012XX1991 | 46925 | SSETGAASNDNH | 0.75 | −0.01 | 0.86 |
| 2097 | ATLVT012XX2707 | 47641 | TGQTAGSTNDNA | 0.43 | 1.1 | −0.01 |
| 2098 | ATLVT012XX2569 | 47503 | TGETGAATNDNA | −1.16 | 1.96 | 1.61 |
| 2099 | ATLVT012XX3279 | 48213 | TSQTAGAINDNT | 0.53 | 0.1 | 1.1 |
| 2100 | ATLVT012XX2812 | 47746 | TGTSGASSNDNA | 1.91 | 0.25 | −1.47 |
| 2101 | ATLVT012XX2314 | 47248 | TGAAAGASNDNA | −0.03 | 0.74 | 1.22 |
| 2102 | ATLVT012XX456 | 45390 | NGTAAGSTNDNT | 0.64 | 0.15 | 0.82 |
| 2103 | ATLVT012XX2032 | 46966 | SSQAAGSSNDNA | 0.3 | 0.64 | 0.77 |
| 2104 | ATLVT012XX2368 | 47302 | TGASAGSSNDNA | −0.62 | 0.92 | 2 |
| 2105 | ATLVT012XX3095 | 48029 | TSESGAASNDNH | −0.2 | 0.44 | 1.89 |
| 2106 | ATLVT012XX996 | 45930 | NSQTGASINDNT | 0.84 | 0.87 | −0.46 |
| 2107 | ATLVT012XX2657 | 47591 | TGQSAGSSNDNH | 0.36 | 0.89 | 0.34 |
| 2108 | ATLVT012XX2998 | 47932 | TSATGAASNDNA | 0.89 | −0.08 | 0.66 |
| 2109 | ATLVT012XX1698 | 46632 | SGTTAGSSNDNT | −1.25 | 1.92 | 1.75 |
| 2110 | ATLVT012XX544 | 45478 | NGTTAGAINDNA | 0.3 | −0.3 | 1.94 |
| 2111 | ATLVT012XX995 | 45929 | NSQTGASTNDNH | 0.74 | 1.11 | −0.63 |
| 2112 | ATLVT012XX1281 | 46215 | SGATGASTNDNT | 2.56 | −0.72 | −1.39 |
| 2113 | ATLVT012XX2325 | 47259 | TGAAAGSTNDNT | −0.17 | 0.69 | 1.46 |
| 2114 | ATLVT012XX2848 | 47782 | TGTTAGSSNDNA | 0 | 0.92 | 0.87 |
| 2115 | ATLVT012XX2273 | 47207 | SSTTAGSSNDNH | 1.3 | 0.72 | −1.09 |
| 2116 | ATLVT012XX300 | 45234 | NGQAAASINDNT | 1.51 | −0.42 | 0 |
| 2117 | ATLVT012XX65 | 44999 | NGASAGATNDNH | 0.07 | 2.21 | −0.91 |
| 2118 | ATLVT012XX1970 | 46904 | SSETAAATNDNH | 0.38 | −0.16 | 1.59 |
| 2119 | ATLVT012XX646 | 45580 | NSASAGSINDNA | 0.49 | 0.63 | 0.38 |
| 2120 | ATLVT012XX963 | 45897 | NSQTAAASNDNT | 1.82 | −1.87 | 1.32 |
| 2121 | ATLVT012XX405 | 45339 | NGQTAGSSNDNT | −0.25 | 1.48 | 0.56 |
| 2122 | ATLVT012XX2567 | 47501 | TGETGAASNDNH | 0.27 | 0.26 | 1.23 |
| 2123 | ATLVT012XX3369 | 48303 | TSTSAASTNDNT | −0.42 | 0.36 | 2.26 |
| 2124 | ATLVT012XX2713 | 47647 | TGQTGAATNDNA | −0.61 | 0.49 | 2.43 |
| 2125 | ATLVT012XX2985 | 47919 | TSATAASTNDNT | 0.61 | 0.5 | 0.32 |
| 2126 | ATLVT012XX1795 | 46729 | SSASAGSTNDNA | −0.09 | 1.66 | 0.03 |
| 2127 | ATLVT012XX1979 | 46913 | SSETAGASNDNH | 0.6 | 0.23 | 0.68 |
| 2128 | ATLVT012XX2143 | 47077 | SSQTGASINDNA | −0.35 | 0.29 | 2.24 |
| 2129 | ATLVT012XX1548 | 46482 | SGQTAGASNDNT | 0.52 | 0.73 | 0.16 |
| 2130 | ATLVT012XX653 | 45587 | NSASGAATNDNH | 0.6 | 0.66 | 0.12 |
| 2131 | ATLVT012XX2787 | 47721 | TGTSAAATNDNT | −0.28 | 1.32 | 0.78 |
| 2132 | ATLVT012XX371 | 45305 | NGQSGASTNDNH | −0.5 | 1.12 | 1.41 |
| 2133 | ATLVT012XX1743 | 46677 | SSAAAGAINDNT | −0.14 | 1.23 | 0.64 |
| 2134 | ATLVT012XX1833 | 46767 | SSATAASINDNT | 1.96 | −0.75 | −0.41 |
| 2135 | ATLVT012XX3066 | 48000 | TSEAGGSSNDNT | 0.28 | 0.11 | 1.37 |
| 2136 | ATLVT012XX444 | 45378 | NGTAAASTNDNT | 0.77 | 0.15 | 0.48 |
| 2137 | ATLVT012XX920 | 45854 | NSQSAASSNDNH | 0.05 | 1.11 | 0.47 |
| 2138 | ATLVT012XX2047 | 46981 | SSQAGASINDNA | 1.07 | −0.49 | 0.78 |
| 2139 | ATLVT012XX2700 | 47634 | TGQTAGASNDNT | 0.25 | 0.54 | 0.85 |
| 2140 | ATLVT012XX873 | 45807 | NSQAAASSNDNT | 0.87 | 0.59 | −0.29 |
| 2141 | ATLVT012XX1940 | 46874 | SSESAGSTNDNH | −0.4 | 1.91 | 0.2 |
| 2142 | ATLVT012XX1654 | 46588 | SGTSGAASNDNA | 0.37 | 0.26 | 1 |
| 2143 | ATLVT012XX2308 | 47242 | TGAAAASSNDNA | −0.71 | 1.43 | 1.34 |
| 2144 | ATLVT012XX3184 | 48118 | TSQAAGSSNDNA | 0.17 | 0.41 | 1.14 |
| 2145 | ATLVT012XX127 | 45061 | NGATGASSNDNA | 1.37 | −0.13 | −0.22 |
| 2146 | ATLVT012XX2900 | 47834 | TSAAAGSINDNH | −0.1 | 1.2 | 0.57 |
| 2147 | ATLVT012XX3417 | 48351 | ISTTAASINDNT | −0.76 | 0.23 | 2.96 |
| 2148 | ATLVT012XX2706 | 47640 | TGQTAGSSNDNT | −1.3 | 3.26 | −0.02 |
| 2149 | ATLVT012XX3145 | 48079 | TSETGAATNDNA | −0.3 | 0.97 | 1.19 |
| 2150 | ATLVT012XX3320 | 48254 | TSTAAASTNDNH | −1.11 | 2.05 | 1.18 |
| 2151 | ATLVT012XX2076 | 47010 | SSQSAGASNDNT | 1.22 | −0.36 | 0.3 |
| 2152 | ATLVT012XX2944 | 47878 | TSASAGSSNDNA | 0.54 | 0.4 | 0.48 |
| 2153 | ATLVT012XX2072 | 47006 | SSQSAASINDNH | 0.72 | 0.29 | 0.31 |
| 2154 | ATLVT012XX2488 | 47422 | TGEAGGSSNDNA | 1.34 | 0.02 | −0.42 |
| 2155 | ATLVT012XX775 | 45709 | NSESAASSNDNA | 2.03 | −0.59 | −0.84 |
| 2156 | ATLVT012XX2080 | 47014 | SSQSAGSSNDNA | 0.55 | 1.11 | −0.49 |
| 2157 | ATLVT012XX2845 | 47779 | TGTTAGAINDNA | 0.5 | 0.52 | 0.35 |
| 2158 | ATLVT012XX150 | 45084 | NGEAAAATNDNT | 3.01 | −1.58 | −1.25 |
| 2159 | ATLVT012XX2769 | 47703 | TGTAGASTNDNT | 0.69 | −0.05 | 0.75 |
| 2160 | ATLVT012XX2457 | 47391 | TGEAAASTNDNT | 0.6 | 0.99 | −0.44 |
| 2161 | ATLVT012XX394 | 45328 | NGQTAASTNDNA | −1.23 | −0.01 | 3.98 |
| 2162 | ATLVT012XX1492 | 46426 | SGQSAASSNDNA | 0.75 | 0.64 | −0.26 |
| 2163 | ATLVT012XX3041 | 47975 | TSEAAGSSNDNH | 0.09 | 0.65 | 0.86 |
| 2164 | ATLVT012XX589 | 45523 | NSAAAGASNDNA | −0.06 | 0.84 | 0.88 |
| 2165 | ATLVT012XX1589 | 46523 | SGTAAASSNDNH | −1.04 | −0.36 | 4.09 |
| 2166 | ATLVT012XX3362 | 48296 | TSTSAAATNDNH | −1.18 | 3.13 | −0.16 |
| 2167 | ATLVT012XX590 | 45524 | NSAAAGASNDNH | −0.51 | 1.6 | 0.65 |
| 2168 | ATLVT012XX824 | 45758 | NSETAASSNDNH | −1.87 | 4.24 | −0.41 |
| 2169 | ATLVT012XX2038 | 46972 | SSQAGAASNDNA | 0.17 | 0.14 | 1.37 |
| 2170 | ATLVT012XX2650 | 47584 | TGQSAGASNDNA | 0.88 | −0.43 | 0.87 |
| 2171 | ATLVT012XX2134 | 47068 | SSQTGAASNDNA | −0.08 | −0.18 | 2.2 |
| 2172 | ATLVT012XX2120 | 47054 | SSQTAASINDNH | −0.07 | −0.03 | 2 |
| 2173 | ATLVT012XX1634 | 46568 | SGTSAAATNDNH | 0.76 | 0.43 | −0.03 |
| 2174 | ATLVT012XX81 | 45015 | NGASGASSNDNT | −1.14 | 1.52 | 1.83 |
| 2175 | ATLVT012XX2746 | 47680 | TGTAAGASNDNA | −0.78 | 2.38 | 0.11 |
| 2176 | ATLVT012XX1987 | 46921 | SSETAGSINDNA | 1.46 | −1.3 | 0.98 |
| 2177 | ATLVT012XX1489 | 46423 | SGQSAAATNDNA | 0.37 | 1.2 | −0.36 |
| 2178 | ATLVT012XX914 | 45848 | NSQSAAASNDNH | 0.89 | −0.52 | 0.95 |
| 2179 | ATLVT012XX1759 | 46693 | SSAAGASINDNA | 0.1 | 0.17 | 1.41 |
| 2180 | ATLVT012XX680 | 45614 | NSATAASSNDNH | 1.47 | −0.85 | 0.37 |
| 2181 | ATLVT012XX3101 | 48035 | TSESGASSNDNH | −0.51 | 0.66 | 1.83 |
| 2182 | ATLVT012XX2450 | 47384 | TGEAAAATNDNH | 0.98 | 0.74 | −0.84 |
| 2183 | ATLVT012XX1363 | 46297 | SGESAGSINDNA | −0.14 | 1.32 | 0.33 |
| 2184 | ATLVT012XX3152 | 48086 | TSETGASTNDNH | 1.18 | 0.19 | −0.48 |
| 2185 | ATLVT012XX322 | 45256 | NGQAGASTNDNA | 1.04 | −0.35 | 0.45 |
| 2186 | ATLVT012XX2992 | 47926 | TSATAGSSNDNA | 1.15 | −0.29 | 0.17 |
| 2187 | ATLVT012XX3092 | 48026 | TSESAGSTNDNH | −1.82 | 1.26 | 3.29 |
| 2188 | ATLVT012XX930 | 45864 | NSQSAGAINDNT | 0.62 | 0.37 | 0.25 |
| 2189 | ATLVT012XX1450 | 46384 | SGQAAGASNDNA | −1.05 | 1.98 | 1.04 |
| 2190 | ATLVT012XX2483 | 47417 | TGEAGGASNDNH | 1.01 | 0.09 | −0.07 |
| 2191 | ATLVT012XX2857 | 47791 | TGTTGAATNDNA | −0.45 | 0.51 | 1.88 |
| 2192 | ATLVT012XX2168 | 47102 | SSTAAASTNDNH | −0.82 | 2.45 | 0.01 |
| 2193 | ATLVT012XX1841 | 46775 | SSATAGSSNDNH | 2.31 | −0.71 | −1.29 |
| 2194 | ATLVT012XX609 | 45543 | NSAAGASSNDNT | −0.66 | 1.95 | 0.36 |
| 2195 | ATLVT012XX3365 | 48299 | TSTSAASSNDNH | −1.82 | 1.55 | 2.86 |
| 2196 | ATLVT012XX3432 | 48366 | TSTTGAASNDNT | 0.62 | 0.16 | 0.46 |
| 2197 | ATLVT012XX966 | 45900 | NSQTAAATNDNT | 1.75 | −1.8 | 1.04 |
| 2198 | ATLVT012XX1944 | 46878 | SSESGAASNDNT | 0.35 | 0.2 | 0.88 |
| 2199 | ATLVT012XX2507 | 47441 | TGESAGASNDNH | −1.8 | −0.25 | 5.14 |
| 2200 | ATLVT012XX2519 | 47453 | TGESGAASNDNH | 0.4 | −0.04 | 1.1 |
| 2201 | ATLVT012XX2424 | 47358 | TGATGAASNDNT | 0.18 | 0.54 | 0.73 |
| 2202 | ATLVT012XX222 | 45156 | NGESGAATNDNT | 0.76 | −1.23 | 2 |
| 2203 | ATLVT012XX935 | 45869 | NSQSAGSTNDNH | 1.83 | 0.02 | −1.45 |
| 2204 | ATLVT012XX110 | 45044 | NGATAGASNDNH | 0.43 | 0.3 | 0.57 |
| 2205 | ATLVT012XX2537 | 47471 | TGESGGSSNDNH | −0.44 | −0.15 | 2.64 |
| 2206 | ATLVT012XX758 | 45692 | NSEAGGASNDNH | −0.58 | 1.22 | 1.12 |
| 2207 | ATLVT012XX1538 | 46472 | SGQTAAATNDNH | 0.45 | 1.84 | −1.46 |
| 2208 | ATLVT012XX1209 | 46143 | SGASAASTNDNT | 1.58 | −1.02 | 0.29 |
| 2209 | ATLVT012XX447 | 45381 | NGTAAGASNDNT | 0.1 | 0.71 | 0.6 |
| 2210 | ATLVT012XX2266 | 47200 | SSTTAGASNDNA | 1.16 | 2.44 | 0.53 |
| 2211 | ATLVT012XX1918 | 46852 | SSESAAASNDNA | 1.3 | −0.24 | −0.25 |
| 2212 | ATLVT012XX3146 | 48080 | TSETGAATNDNH | 0.08 | 0.75 | 0.59 |
| 2213 | ATLVT012XX3274 | 48208 | TSQTAGASNDNA | 0.09 | 0.59 | 0.78 |
| 2214 | ATLVT012XX3410 | 48344 | TSTTAAATNDNH | −0.68 | 2.64 | −0.56 |
| 2215 | ATLVT012XX3100 | 48034 | TSESGASSNDNA | −1.77 | −0.71 | 5.62 |
| 2216 | ATLVT012XX1617 | 46551 | SGTAGASTNDNT | 0.53 | −0.45 | 1.34 |
| 2217 | ATLVT012XX2937 | 47871 | TSASAASTNDNT | −0.31 | 1.01 | 0.9 |
| 2218 | ATLVT012XX3269 | 48203 | TSQTAASSNDNH | −0.33 | −0.05 | 2.29 |
| 2219 | ATLVT012XX1306 | 46240 | SGEAAGASNDNA | −0.33 | 1.04 | 0.89 |
| 2220 | ATLVT012XX760 | 45694 | NSEAGGATNDNA | −0.96 | 2.18 | 0.5 |
| 2221 | ATLVT012XX1748 | 46682 | SSAAAGSINDNH | 0.12 | 0.59 | 0.7 |
| 2222 | ATLVT012XX702 | 45636 | NSATGAATNDNT | 1.05 | −0.18 | 0.07 |
| 2223 | ATLVT012XX82 | 45016 | NGASGASTNDNA | 0.13 | 0.44 | 0.84 |
| 2224 | ATLVT012XX3086 | 48020 | TSESAGATNDNH | −1.2 | 1.69 | 1.51 |
| 2225 | ATLVT012XX2074 | 47008 | SSQSAGASNDNA | −0.11 | 0.88 | 0.68 |
| 2226 | ATLVT012XX592 | 45526 | NSAAAGATNDNA | −0.61 | 1.25 | 1.06 |
| 2227 | ATLVT012XX2604 | 47538 | TGQAAGASNDNT | −0.66 | 0.63 | 1.93 |
| 2228 | ATLVT012XX2610 | 47544 | TGQAAGSSNDNT | −0.62 | 0.74 | 1.72 |
| 2229 | ATLVT012XX838 | 45772 | NSETAGSINDNA | 1.8 | −0.77 | −0.5 |
| 2230 | ATLVT012XX1417 | 46351 | SGETGAATNDNA | −1.78 | −1.01 | 5.94 |
| 2231 | ATLVT012XX988 | 45922 | NSQTGAATNDNA | −1.01 | 2.1 | 0.61 |
| 2232 | ATLVT012XX2261 | 47195 | SSTTAASSNDNH | 0.13 | 0.62 | 0.56 |
| 2233 | ATLVT012XX936 | 45870 | NSQSAGSINDNT | 1.27 | 0.19 | −0.84 |
| 2234 | ATLVT012XX1971 | 46905 | SSETAAATNDNT | −1.47 | −0.84 | 5.18 |
| 2235 | ATLVT012XX2784 | 47718 | TGTSAAASNDNT | −0.02 | −0.2 | 1.87 |
| 2236 | ATLVT012XX631 | 45565 | NSASAASSNDNA | −0.75 | 1.3 | 1.2 |
| 2237 | ATLVT012XX1368 | 46302 | SGESGAASNDNT | −0.12 | 0.58 | 1.04 |
| 2238 | ATLVT012XX2987 | 47921 | TSATAGASNDNH | −0.77 | 1.12 | 1.46 |
| 2239 | ATLVT012XX1830 | 46764 | SSATAASSNDNT | −0.7 | −0.51 | 3.44 |
| 2240 | ATLVT012XX1761 | 46695 | SSAAGASTNDNI | −0.01 | 0.26 | 1.27 |
| 2241 | ATLVT01XXX1928 | 46862 | SSESAASTNDNH | 0.28 | 0.77 | 0.12 |
| 2242 | ATLVT012XX2427 | 47361 | TGATGAATNDNT | −0.33 | 0.39 | 1.64 |
| 2243 | ATLVT012XX2365 | 47299 | TGASAGATNDNA | 0.41 | 0.07 | 0.79 |
| 2244 | ATLVT012XX1261 | 46195 | SGATAGAINDNA | 2.08 | −1.25 | −0.4 |
| 2245 | ATLVT012XX2978 | 47912 | TSATAAATNDNH | 0.56 | 0.94 | −0.6 |
| 2246 | ATLVT012XX1309 | 46243 | SGEAAGATNDNA | −0.98 | −0.58 | 3.99 |
| 2247 | ATLVT012XX2697 | 47631 | TGQTAASTNDNT | 0.49 | −0.28 | 1.07 |
| 2248 | ATLVT012XX466 | 45400 | NGTAGASTNDNA | 0.12 | 0.39 | 0.83 |
| 2249 | ATLVT012XX185 | 45119 | NGEAGGATNDNH | 0.45 | 0.83 | −0.29 |
| 2250 | ATLVT012XX681 | 45615 | NSATAASSNDNT | 0.67 | −0.68 | 1.27 |
| 2251 | ATLVT012XX3210 | 48144 | TSQAGGSSNDNT | −0.22 | −0.47 | 2.52 |
| 2252 | ATLVT012XX791 | 45725 | NSESAGSTNDNH | 0.1 | 1.12 | −0.08 |
| 2253 | ATLVT012XX793 | 45727 | NSESGAASNDNA | 0.14 | −0.33 | 1.71 |
| 2254 | ATLVT012XX3000 | 47934 | TSATGAASNDNI | 0.48 | 0.2 | 0.44 |
| 2255 | ATLVT012XX389 | 45323 | NGQTAAATNDNH | 0.08 | −0.05 | 1.44 |
| 2256 | ATLVT012XX272 | 45206 | NGETGASSNDNH | −0.61 | 0.67 | 1.69 |
| 2257 | ATLVT012XX255 | 45189 | NGETAGASNDNT | −1.18 | 3.38 | −0.8 |
| 2258 | ATLVT012XX1588 | 46522 | SGTAAASSNDNA | 0.73 | −1.09 | 1.66 |
| 2259 | ATLVT012XX2595 | 47529 | TGQAAAATNDNT | −1.07 | −0.78 | 4.34 |
| 2260 | ATLVT012XX306 | 45240 | NGQAAGAINDNT | 0.06 | 0.33 | 0.98 |
| 2261 | ATLVT012XX846 | 45780 | NSETGAATNDNT | 0.81 | −0.48 | 0.73 |
| 2262 | ATLVT012XX1922 | 46856 | SSESAAATNDNH | 1.37 | 0.17 | −1.08 |
| 2263 | ATLVT012XX2959 | 47893 | TSASGASTNDNA | 0.19 | −0.22 | 1.45 |
| 2264 | ATLVT012XX2841 | 47775 | TGTTAASTNQNT | 0.31 | 0.39 | 0.44 |
| 2265 | ATLVT012XX2642 | 47576 | TGQSAAATNDNH | −0.48 | 1.82 | −0.02 |
| 2266 | ATLVT012XX3044 | 47978 | TSEAAGSTNDNH | −0.51 | 0.83 | 1.28 |
| 2267 | ATLVT012XX3194 | 48128 | TSQAGAATNDNH | −0.44 | 0.78 | 1.23 |
| 2268 | ATLVT012XX2445 | 47379 | TGATGGSINDNT | −1.34 | 1.21 | 2.22 |
| 2269 | ATLVT012XX3061 | 47995 | TSEAGGATNDNA | −0.25 | 0.56 | 1.18 |
| 2270 | ATLVT012XX187 | 45121 | NGEAGGSSNDNA | 0.17 | 0.95 | −0.07 |
| 2271 | ATLVT012XX2474 | 47408 | TGEAGAATNDNH | −0.36 | 1.29 | 0.42 |
| 2272 | ATLVT012XX1313 | 46247 | SGEAAGSSNDNH | −0.2 | 0.75 | 0.83 |
| 2273 | ATLVT012XX3272 | 48206 | ISQTAASTNDNH | −0.05 | 0.91 | 0.37 |
| 2274 | ATLVT012XX445 | 45379 | NGTAAGASNDNA | −0.27 | 0.39 | 1.4 |
| 2275 | ATLVT012XX448 | 45382 | NGTAAGATNDNA | 0.48 | 0.46 | 0.03 |
| 2276 | ATLVT012XX60 | 44994 | NGASAASINDNT | 2.63 | −1.68 | −0.91 |
| 2277 | ATLVT012XX2305 | 47239 | TGAAAAATNDNA | −0.51 | 0.64 | 1.48 |
| 2278 | ATLVT012XX2177 | 47111 | SSTAAGSSNDNH | −0.3 | 0.66 | 1.09 |
| 2279 | ATLVT012XX2741 | 47675 | TGTAAASSNDNH | −0.66 | 1.16 | 1.06 |
| 2280 | ATLVT012XX832 | 45766 | NSETAGAINDNA | −0.33 | 1.54 | 0.01 |
| 2281 | ATLVT012XX586 | 45520 | NSAAAASTNDNA | −1.68 | 1.59 | 2.24 |
| 2282 | ATLVT012XX1067 | 46001 | NSTSAASTNDNH | −0.08 | 1.54 | −0.43 |
| 2283 | ATLVT012XX1062 | 45996 | NSTSAAATNDNT | −0.64 | −0.02 | 2.53 |
| 2284 | ATLVT012XX2538 | 47472 | TGESGGSSNDNT | −1.36 | 0.14 | 3.55 |
| 2285 | ATLVT012XX2703 | 47637 | TGQTAGAINDNT | 0.25 | −0.22 | 1.25 |
| 2286 | ATLVT012XX76 | 45010 | NGASGAATNDNA | 0.46 | 0.12 | 0.45 |
| 2287 | ATLVT012XX1981 | 46915 | SSETAGATNDNA | −0.19 | 1.05 | 0.37 |
| 2288 | ATLVT012XX757 | 45691 | NSEAGGASNDNA | −1.21 | 1.27 | 1.82 |
| 2289 | ATLVT012XX437 | 45371 | NGTAAAATNDNH | −1.54 | 0.36 | 3.56 |
| 2290 | ATLVT012XX450 | 45384 | NGTAAGAINDNT | 0.58 | −0.26 | 0.72 |
| 2291 | ATLVT012XX2421 | 47355 | TGATAGSINDNT | −0.71 | 0.37 | 2.12 |
| 2292 | ATLVT012XX277 | 45211 | NGETGGASNDNA | 1 | −0.43 | 0.22 |
| 2293 | ATLVT012XX2385 | 47319 | TGASGASTNDNT | −0.15 | 1.03 | 0.29 |
| 2294 | ATLVT012XX756 | 45690 | NSEAGASINDNT | 0.67 | −0.47 | 0.82 |
| 2295 | ATLVT012XX3199 | 48133 | TSQAGASINDNA | −1.14 | 2.52 | 0.07 |
| 2296 | ATLVT012XX1199 | 46133 | SGASAAASNDNH | 0.65 | −0.09 | 0.37 |
| 2297 | ATLVT012XX463 | 45397 | NGTAGASSNDNA | 0.46 | −0.13 | 0.74 |
| 2298 | ATLVT012XX2370 | 47304 | TGASAGSSNDNT | −0.72 | 1.09 | 1.19 |
| 2299 | ATLVT012XX2212 | 47146 | SSTSAASSNDNA | 0.25 | 0.57 | 0.2 |
| 2300 | ATLVT012XX2173 | 47107 | SSTAAGATNDNA | −0.31 | 0.44 | 1.31 |
| 2301 | ATLVT012XX2465 | 47399 | TGEAAGSSNDNH | −0.4 | 1.44 | 0.17 |
| 2302 | ATLVT012XX2085 | 47019 | SSQSAGSTNDNT | −0.36 | 1.65 | −0.18 |
| 2303 | ATLVT012XX3263 | 48197 | TSQTAAASNDNH | 0.75 | −1 | 1.33 |
| 2304 | ATLVT012XX2832 | 47766 | TGTTAAASNDNT | 0.74 | −0.03 | 0.09 |
| 2305 | ATLVT012XX2462 | 47396 | TGEAAGAINDNH | −0.4 | 0.42 | 1.46 |
| 2306 | ATLVT012XX2017 | 46951 | SSQAAAATNDNA | −2.35 | −1.21 | 6.89 |
| 2307 | ATLVT012XX678 | 45612 | NSATAAATNDNT | 1.14 | −0.92 | 0.53 |
| 2308 | ATLVT012XX2884 | 47818 | TSAAAASSNDNA | −0.88 | 1.54 | 0.83 |
| 2309 | ATLVT012XX2364 | 47298 | TGASAGASNDNT | 0.46 | 0 | 0.51 |
| 2310 | ATLVT012XX3063 | 47997 | TSEAGGATNDNT | 0.27 | −0.01 | 0.86 |
| 2311 | ATLVT012XX351 | 45285 | NGQSAGASNDNT | −0.27 | 0.02 | 1.73 |
| 2312 | ATLVT012XX1328 | 46262 | SGEAGASTNDNH | 1.25 | 0.04 | −0.91 |
| 2313 | ATLVT012XX366 | 45300 | NGQSGAATNDNT | 0.72 | −0.54 | 0.76 |
| 2314 | ATLVT012XX1366 | 46300 | SGESGAASNDNA | −0.63 | 1.63 | 0.28 |
| 2315 | ATLVT012XX1322 | 46256 | SGEAGAATNDNH | 0.05 | 0.61 | 0.42 |
| 2316 | ATLVT012XX3288 | 48222 | TSQTGAASNDNT | 0.26 | 0.15 | 0.65 |
| 2317 | ATLVT012XX3215 | 48149 | TSQSAAASNDNH | −0.04 | −0.07 | 1.44 |
| 2318 | ATLVT012XX1639 | 46573 | SGTSAASTNDNA | 0.04 | 0.17 | 1 |
| 2319 | ATLVT012XX1756 | 46690 | SSAAGASSNDNA | 0.14 | 0.24 | 0.74 |
| 2320 | ATLVT012XX2662 | 47596 | TGQSGAASNDNA | −0.41 | 0.61 | 1.19 |
| 2321 | ATLVT012XX3190 | 48124 | TSQAGAASNDNA | −0.75 | 1.26 | 0.94 |
| 2322 | ATLVT012XX628 | 45562 | NSASAAATNDNA | 1.93 | −0.57 | −1.31 |
| 2323 | ATLVT012XX1839 | 46773 | SSATAGATNDNT | −0.11 | 0.96 | 0.23 |
| 2324 | ATLVT012XX177 | 45111 | NGEAGASSNDNT | 0.37 | 1.26 | −0.98 |
| 2325 | ATLVT012XX124 | 45058 | NGATGAATNDNA | −0.1 | 0.67 | 0.56 |
| 2326 | ATLVT012XX107 | 45041 | NGATAASTNDNH | 0.13 | 1.49 | −0.89 |
| 2327 | ATLVT012XX1853 | 46787 | SSATGASSNDNH | −0.51 | 2.85 | −1.55 |
| 2328 | ATLVT012XX693 | 45627 | NSATAGSSNDNT | −0.35 | 0.39 | 1.33 |
| 2329 | ATLVT012XX1510 | 46444 | SGQSGAASNDNA | −0.08 | −0.19 | 1.61 |
| 2330 | ATLVT012XX1159 | 46093 | SGAAAASINDNA | −1.09 | 1.19 | 1.58 |
| 2331 | ATLVT012XX1594 | 46528 | SGTAAGASNDNA | −0.26 | 1.02 | 0.35 |
| 2332 | ATLVT012XX1749 | 46683 | SSAAAGSINDNT | −0.38 | 0.42 | 1.32 |
| 2333 | ATLVT012XX1343 | 46277 | SGESAAASNDNH | 1.71 | −1.48 | 0.18 |
| 2334 | ATLVT012XX1997 | 46931 | SSETGASSNDNH | 1.38 | −0.32 | −0.75 |
| 2335 | ATLVT012XX1349 | 46283 | SGESAASSNDNH | −0.23 | 0.8 | 0.53 |
| 2336 | ATLVT012XX1402 | 46336 | SGETAGASNDNA | 0.13 | 0.65 | 0.14 |
| 2337 | ATLVT012XX3414 | 48348 | TSTTAASSNDNT | −0.44 | 0.14 | 1.77 |
| 2338 | ATLVT012XX260 | 45194 | NGETAGSSNDNH | 0.73 | 0.82 | −1.1 |
| 2339 | ATLVT012XX1452 | 46386 | SGQAAGASNDNT | −0.72 | 1.22 | 0.86 |
| 2340 | ATLVT012XX49 | 44983 | NGASAAASNDNA | 0.39 | 0.34 | 0.08 |
| 2341 | ATLVT012XX1760 | 46694 | SSAAGASINDNH | 0.1 | 0.23 | 0.72 |
| 2342 | ATLVT012XX537 | 45471 | NGTTAASSNDNT | −0.82 | 0.92 | 1.39 |
| 2343 | ATLVT012XX2669 | 47603 | TGQSGASSNDNH | −0.94 | 1.46 | 0.9 |
| 2344 | ATLVT012XX2940 | 47874 | TSASAGASNDNT | −0.46 | 0.55 | 1.24 |
| 2345 | ATLVT012XX977 | 45911 | NSQTAGATNDNH | 0.92 | −0.4 | 0.08 |
| 2346 | ATLVT012XX1539 | 46473 | SGQTAAATNDNT | 0.89 | −1.08 | 1 |
| 2347 | ATLVT012XX1926 | 46860 | SSESAASSNDNT | −0.3 | −1.2 | 3.2 |
| 2348 | ATLVT012XX2263 | 47197 | SSTTAASTNDNA | −0.69 | 0.84 | 1.25 |
| 2349 | ATLVT012XX212 | 45146 | NGESAGSSNDNH | 0.74 | −0.13 | 0.02 |
| 2350 | ATLVT012XX584 | 45518 | NSAAAASSNDNH | −0.37 | 1.16 | 0.27 |
| 2351 | ATLVT012XX2608 | 47542 | TGQAAGSSNDNA | −0.65 | 0.35 | 1.79 |
| 2352 | ATLVT012XX3247 | 48181 | TSQSGASTNDNA | −0.7 | 0.67 | 1.45 |
| 2353 | ATLVT012XX3220 | 48154 | TSQSAASSNDNA | 1.45 | −0.68 | 0.5 |
| 2354 | ATLVT012XX629 | 45563 | NSASAAATNDNH | 1.24 | −0.47 | −0.4 |
| 2355 | ATLVT012XX197 | 45131 | NGESAAATNDNH | −1.42 | 0.76 | 2.58 |
| 2356 | ATLVT012XX31 | 44965 | NGAAGASSNDNA | −0.26 | 0.35 | 1.1 |
| 2357 | ATLVT012XX2133 | 47067 | SSQTAGSINDNT | 0.08 | −0.4 | 1.49 |
| 2358 | ATLVT012XX2398 | 47332 | TGATAAASNDNA | −1.22 | 2.58 | −0.12 |
| 2359 | ATLVT012XX2503 | 47437 | TGESAASTNDNA | −1.15 | 2.58 | −0.27 |
| 2360 | ATLVT012XX2570 | 47504 | TGETGAATNDNH | −0.1 | 0.23 | 0.97 |
| 2361 | ATLVT012XX616 | 45550 | NSAAGGATNDNA | −0.69 | 1.13 | 0.82 |
| 2362 | ATLVT012XX3104 | 48038 | TSESGASTNDNH | 0.42 | 0.04 | 0.32 |
| 2363 | ATLVT012XX1298 | 46232 | SGEAAAATNDNH | −0.94 | −0.47 | 3.29 |
| 2364 | ATLVT012XX3415 | 48349 | TSTTAASINDNA | −0.7 | −0.04 | 2.33 |
| 2365 | ATLVT012XX1164 | 46098 | SGAAAGASNDNT | −0.32 | 0.45 | 1.05 |
| 2366 | ATLVT012XX2086 | 47020 | SSQSGAASNDNA | 0 | −0.08 | 1.19 |
| 2367 | ATLVT012XX1357 | 46291 | SGESAGAINDNA | 2.05 | −1.43 | −0.61 |
| 2368 | ATLVT012XX2471 | 47405 | TGEAGAASNDNH | −0.36 | 0.83 | 0.61 |
| 2369 | ATLVT012XX898 | 45832 | NSQAGASTNDNA | −0.54 | 0.93 | 0.8 |
| 2370 | ATLVT012XX22 | 44956 | NGAAAGSINDNA | −0.14 | 0.24 | 0.99 |
| 2371 | ATLVT012XX2399 | 47333 | TGATAAASNDNH | −0.02 | 0.33 | 0.67 |
| 2372 | ATLVT012XX1614 | 46548 | SGTAGASSNDNT | −1.12 | 0.72 | 2.04 |
| 2373 | ATLVT012XX62 | 44996 | NGASAGASNDNH | 0.26 | 0.15 | 0.42 |
| 2374 | ATLVT012XX1545 | 46479 | SGQTAASTNDNT | 0.67 | −0.63 | 0.71 |
| 2375 | ATLVT012XX3271 | 48205 | TSQTAASTNDNA | −0.1 | −0.01 | 1.22 |
| 2376 | ATLVT012XX2044 | 46978 | SSQAGASSNDNA | 0.74 | −0.69 | 0.66 |
| 2377 | ATLVT012XX2172 | 47106 | SSTAAGASNDNT | −0.64 | 0.27 | 1.78 |
| 2378 | ATLVT012XX2659 | 47593 | TGQSAGSTNDNA | 0.04 | 1.11 | −0.45 |
| 2379 | ATLVT012XX1786 | 46720 | SSASAGASNDNA | 0.63 | 0.3 | −0.42 |
| 2380 | ATLVT012XX2469 | 47403 | TGEAAGSINDNT | −0.25 | 0.72 | 0.54 |
| 2381 | ATLVT012XX3052 | 47986 | TSEAGASSNDNA | 0.2 | 0.23 | 0.38 |
| 2382 | ATLVT012XX2693 | 47627 | TGQTAASSNDNH | 0.24 | −0.38 | 1.11 |
| 2383 | ATLVT012XX1303 | 46237 | SGEAAASTNDNA | 2.69 | −2.01 | −1 |
| 2384 | ATLVT012XX2938 | 47872 | TSASAGASNDNA | 0.28 | 0.44 | −0.01 |
| 2385 | ATLVT012XX2277 | 47211 | SSTTAGSTNDNT | −0.49 | 1.26 | 0.26 |
| 2386 | ATLVT012XX3024 | 47958 | TSEAAAASNDNT | 1.8 | −1.23 | −0.47 |
| 2387 | ATLVT012XX285 | 45219 | NGETGGSSNDNT | −1.74 | −0.44 | 4.57 |
| 2388 | ATLVT012XX3059 | 47993 | TSEAGGASNDNH | −0.57 | 0.35 | 1.55 |
| 2389 | ATLVT012XX3244 | 48178 | TSQSGASSNDNA | −0.81 | 1.42 | 0.57 |
| 2390 | ATLVT012XX3 | 44937 | NGAAAAASNDNT | −0.12 | 0.2 | 0.97 |
| 2391 | ATLVT012XX1258 | 46192 | SGATAGASNDNA | 0.62 | −0.2 | 0.2 |
| 2392 | ATLVT012XX967 | 45901 | NSQTAASSNDNA | 0.34 | −1.06 | 1.77 |
| 2393 | ATLVT012XX541 | 45475 | NGTTAGASNDNA | −0.47 | 0.36 | 1.34 |
| 2394 | ATLVT012XX743 | 45677 | NSEAAGSINDNH | −1.24 | 2.58 | −0.21 |
| 2395 | ATLVT012XX1905 | 46839 | SSEAGASTNQNT | 1.1 | −0.86 | 0.22 |
| 2396 | ATLVT012XX298 | 45232 | NGQAAASTNDNA | 0.64 | −0.87 | 1 |
| 2397 | ATLVT012XX2323 | 47257 | TGAAAGSINDNA | −0.38 | 0.38 | 1.14 |
| 2398 | ATLVT012XX99 | 45033 | NGATAAASNDNT | 0.56 | 0.42 | −0.51 |
| 2399 | ATLVT012XX2274 | 47208 | SSTTAGSSNDNT | −1.3 | 2.3 | 0.25 |
| 2400 | ATLVT012XX1408 | 46342 | SGETAGSSNDNA | −0.15 | 1.6 | −0.83 |
| 2401 | ATLVT012XX451 | 45385 | NGTAAGSSNDNA | 0.61 | −0.06 | 0.01 |
| 2402 | ATLVT012XX2129 | 47063 | SSQTAGSSNDNH | 0.18 | 0.17 | 0.44 |
| 2403 | ATLVT012XX599 | 45533 | NSAAAGSINDNH | −0.73 | 0.89 | 1.08 |
| 2404 | ATLVT012XX2692 | 47626 | TGQTAASSNDNA | 0.07 | −0.24 | 1.15 |
| 2405 | ATLVT012XX2268 | 47202 | SSTTAGASNDNT | −0.17 | 0.84 | 0.17 |
| 2406 | ATLVT012XX2835 | 47769 | TGTTAAATNDNT | −0.53 | 0.63 | 1.04 |
| 2407 | ATLVT012XX2545 | 47479 | TGETAAATNDNA | 1.2 | −0.52 | −0.44 |
| 2408 | ATLVT012XX1198 | 46132 | SGASAAASNDNA | −0.31 | 1.73 | −0.74 |
| 2409 | ATLVT012XX1416 | 46350 | SGETGAASNDNT | 0.16 | −0.07 | 0.75 |
| 2410 | ATLVT012XX2573 | 47507 | TGETGASSNDNH | 0.64 | −0.2 | 0.08 |
| 2411 | ATLVT012XX1257 | 46191 | SGATAASTNDNT | 0.82 | 0.38 | −0.99 |
| 2412 | ATLVT012XX1272 | 46206 | SGATGAASNDNT | 0.39 | 0.28 | −0.14 |
| 2413 | ATLVT012XX3143 | 48077 | TSETGAASNDNH | −0.38 | 0.34 | 1.1 |
| 2414 | ATLVT012XX2 | 44936 | NGAAAAASNDNH | −0.49 | 0.5 | 1.08 |
| 2415 | ATLVT012XX2404 | 47338 | TGATAASSNDNA | −0.16 | 0.33 | 0.73 |
| 2416 | ATLVT012XX1683 | 46617 | SGTTAAATNDNT | 0.26 | −0.23 | 0.74 |
| 2417 | ATLVT012XX654 | 45588 | NSASGAATNDNT | 0.2 | −0.13 | 0.7 |
| 2418 | ATLVT012XX1686 | 46620 | SGTTAASSNDNT | −0.72 | 0.11 | 1.96 |
| 2419 | ATLVT012XX1927 | 46861 | SSESAASTNDNA | 0.15 | 1.14 | −0.85 |
| 2420 | ATLVT012XX2079 | 47013 | SSQSAGATNDNT | 0.22 | 0.02 | 0.48 |
| 2421 | ATLVT012XX2862 | 47796 | TGTTGASSNDNT | −0.18 | 0.36 | 0.7 |
| 2422 | ATLVT012XX1273 | 46207 | SGATGAATNDNA | 0.4 | 0.02 | 0.14 |
| 2423 | ATLVT012XX2611 | 47545 | TGQAAGSINDNA | −0.81 | 0.08 | 2.13 |
| 2424 | ATLVT012XX1977 | 46911 | SSETAASINDNT | 0.58 | −1.61 | 1.93 |
| 2425 | ATLVT012XX2668 | 47602 | TGQSGASSNDNA | −0.55 | 0.42 | 1.25 |
| 2426 | ATLVT012XX2594 | 47528 | TGQAAAATNDNH | −0.95 | 0.01 | 2.46 |
| 2427 | ATLVT012XX3427 | 48361 | TSTTAGSINDNA | −0.51 | 0.33 | 1.29 |
| 2428 | ATLVT012XX1986 | 46920 | SSETAGSSNDNT | 1.44 | −0.82 | −0.57 |
| 2429 | ATLVT012XX660 | 45594 | NSASGASINDNT | 0.17 | 0.31 | 0.14 |
| 2430 | ATLVT012XX2986 | 47920 | TSATAGASNDNA | −0.79 | 0.5 | 1.53 |
| 2431 | ATLVT012XX33 | 44967 | NGAAGASSNDNI | −0.77 | 0.51 | 1.48 |
| 2432 | ATLVT012XX2709 | 47643 | TGQTAGSINDNT | −0.43 | 0.41 | 1.01 |
| 2433 | ATLVT012XX2536 | 47470 | TGESGGSSNDNA | −0.85 | −0.04 | 2.3 |
| 2434 | ATLVT012XX553 | 45487 | NGTTGAASNDNA | −0.07 | −0.19 | 1.16 |
| 2435 | ATLVT012XX585 | 45519 | NSAAAASSNDN'T | −0.59 | 0.72 | 0.89 |
| 2436 | ATLVT012XX2860 | 47794 | TGTTGASSNDNA | −0.73 | 1.59 | 0.01 |
| 2437 | ATLVT012XX267 | 47605 | TGQSGASTNDNA | −1.32 | 1.19 | 1.51 |
| 2438 | ATLVT012XX3088 | 48022 | TSESAGSSNDNA | −2.89 | 0.71 | 4.84 |
| 2439 | ATLVT012XX3273 | 48207 | TSQTAASINDNT | 0.07 | −0.48 | 1.29 |
| 2440 | ATLVT012XX1969 | 46903 | SSETAAATNDNA | −0.73 | 0.35 | 1.58 |
| 2441 | ATLVT012XX3159 | 48093 | TSETGGATNDNT | 0.07 | 0.79 | −0.34 |
| 2442 | ATLVT012XX2142 | 47076 | SSQTGASSNDNT | −0.89 | −0.41 | 2.84 |
| 2443 | ATLVT012XX1845 | 46779 | SSATAGSINDNT | 0.03 | 0.49 | 0.09 |
| 2444 | ATLVT012XX1828 | 46762 | SSATAASSNDNA | 0.58 | −0.77 | 0.76 |
| 2445 | ATLVT012XX368 | 45302 | NGQSGASSNDNH | −0.14 | 0.44 | 0.46 |
| 2446 | ATLVT012XX1227 | 46161 | SGASGAATNDNT | 0.59 | −0.9 | 0.92 |
| 2447 | ATLVT012XX2381 | 47315 | TGASGASSNDNH | −0.38 | 0.05 | 1.36 |
| 2448 | ATLVT012XX2179 | 47113 | SSTAAGSINDNA | −0.55 | 0.83 | 0.63 |
| 2449 | ATLVT012XX2558 | 47492 | TGETAGATNDNH | 0.63 | 0.28 | −0.69 |
| 2450 | ATLVT012XX659 | 45593 | NSASGASTNDNH | −0.13 | 1.05 | −0.37 |
| 2451 | ATLVT012XX1633 | 46567 | SGTSAAATNDNA | −0.34 | −0.03 | 1.37 |
| 2452 | ATLVT012XX789 | 45723 | NSESAGSSNDNT | −0.26 | 0.16 | 0.99 |
| 2453 | ATLVT012XX2667 | 47601 | TGQSGAATNDNT | −0.81 | 0.94 | 0.92 |
| 2454 | ATLVT012XX3419 | 48353 | TSTTAGASNDNH | −0.32 | 0.1 | 1.15 |
| 2455 | ATLVT012XX1758 | 46692 | SSAAGASSNDNT | −0.52 | −0.06 | 1.71 |
| 2456 | ATLVT012XX440 | 45374 | NGTAAASSNDNH | −1.49 | 1.96 | 0.76 |
| 2457 | ATLVT012XX2513 | 47447 | TGESAGSSNDNH | −0.64 | 1.26 | 0.2 |
| 2458 | ATLVT012XX372 | 45306 | NGQSGASINDNT | 0.15 | −0.57 | 1.2 |
| 2459 | ATLVT012XX66 | 45000 | NGASAGATNDNT | −0.44 | 0.21 | 1.21 |
| 2460 | ATLVT012XX934 | 45868 | NSQSAGSINDNA | 0.59 | 0.28 | −0.66 |
| 2461 | ATLVT012XX1205 | 46139 | SGASAASSNDNH | −0.03 | −0.21 | 1.03 |
| 2462 | ATLVT012XX3192 | 48126 | TSQAGAASNDNT | −0.64 | 0.65 | 0.97 |
| 2463 | ATLVT012XX111 | 45045 | NGATAGASNDNT | 0.49 | 0.04 | −0.19 |
| 2464 | ATLVT012XX2470 | 47404 | TGEAGAASNDNA | −1.15 | 1.73 | 0.45 |
| 2465 | ATLVT012XX1582 | 46516 | SGTAAAASNDNA | −0.29 | 0.35 | 0.75 |
| 2466 | ATLVT012XX3430 | 48364 | TSTTGAASNDNA | 0.3 | −0.34 | 0.63 |
| 2467 | ATLVT012XX779 | 45713 | NSESAASTNDNH | 0.04 | 1.66 | −1.51 |
| 2468 | ATLVT012XX733 | 45667 | NSEAAGASNDNA | −0.64 | 0.68 | 0.9 |
| 2469 | ATLVT012XX269 | 45203 | NGETGAATNDNH | −1.6 | −0.21 | 3.69 |
| 2470 | ATLVT012XX293 | 45227 | NGQAAAATNDNH | 0.98 | −1.56 | 1 |
| 2471 | ATLVT012XX1798 | 46732 | SSASGAASNDNA | 0.31 | −0.15 | 0.33 |
| 2472 | ATLVT012XX2656 | 47590 | TGQSAGSSNDNA | 0.67 | −0.06 | −0.41 |
| 2473 | ATLVT012XX1494 | 46428 | SGQSAASSNDNT | −0.37 | 0.32 | 0.9 |
| 2474 | ATLVT012XX1935 | 46869 | SSESAGAINDNT | −0.66 | 1.56 | −0.2 |
| 2475 | ATLVT012XX2062 | 46996 | SSQSAAASNDNA | 0.23 | −0.91 | 1.46 |
| 2476 | ATLVT012XX1256 | 46190 | SGATAASTNDNH | 0.33 | 0.74 | −0.85 |
| 2477 | ATLVT012XX1375 | 46309 | SGESGASTNDNA | −0.15 | 0.86 | −0.2 |
| 2478 | ATLVT012XX1493 | 46427 | SGQSAASSNDNH | −0.25 | 0.51 | 0.43 |
| 2479 | ATLVT012XX1391 | 46325 | SGETAAASNDNH | 0.05 | 0.49 | −0.07 |
| 2480 | ATLVT012XX969 | 45903 | NSQTAASSNDNT | −0.29 | −0.93 | 2.33 |
| 2481 | ATLVT012XX2275 | 47209 | SSTTAGSTNDNA | 0.05 | −0.14 | 0.74 |
| 2482 | ATLVT012XX926 | 45860 | NSQSAGASNDNH | −0.04 | 0.21 | 0.43 |
| 2483 | ATLVT012XX876 | 45810 | NSQAAASINDNT | −0.05 | 0.4 | 0.2 |
| 2484 | ATLVT012XX2541 | 47475 | TGESGGSTNDNT | −1.16 | −0.14 | 2.79 |
| 2485 | ATLVT012XX314 | 45248 | NGQAGAASNDNH | 1.02 | −1.01 | 0.17 |
| 2486 | ATLVT012XX1011 | 45945 | NSTAAAASNDNT | −0.33 | −0.42 | 1.71 |
| 2487 | ATLVT012XX359 | 45293 | NGQSAGSTNDNH | −0.61 | 1.6 | −0.43 |
| 2488 | ATLVT012XX790 | 45724 | NSESAGSINDNA | −0.47 | 0.42 | 0.85 |
| 2489 | ATLVT012XX1207 | 46141 | SGASAASTNDNA | 0.15 | 0.9 | −0.84 |
| 2490 | ATLVT012XX16 | 44950 | NGAAAGAINDNA | −0.73 | 0.47 | 1.22 |
| 2491 | ATLVT012XX312 | 45246 | NGQAAGSINDNT | 0.03 | 0.01 | 0.51 |
| 2492 | ATLVT012XX3173 | 48107 | TSQAAASSNDNH | −1.1 | 0.04 | 2.4 |
| 2493 | ATLVT012XX2631 | 47565 | TGQAGGATNDNT | −0.5 | −0.31 | 1.82 |
| 2494 | ATLVT012XX626 | 45560 | NSASAAASNDNH | 0.55 | −1.05 | 0.97 |
| 2495 | ATLVT012XX1462 | 46396 | SGQAGAASNDNA | −0.39 | 0.03 | 1.19 |
| 2496 | ATLVT012XX3360 | 48294 | TSTSAAASNDNT | −1.61 | 0.95 | 2.08 |
| 2497 | ATLVT012XX2498 | 47432 | TGESAAATNDNH | −0.6 | 1.03 | 0.26 |
| 2498 | ATLVT012XX2622 | 47556 | TGQAGASSNDNT | −0.18 | −0.49 | 1.49 |
| 2499 | ATLVT012XX1784 | 46718 | SSASAASTNDNH | −0.34 | 1.11 | −0.31 |
| 2500 | ATLVT012XX3117 | 48051 | TSESGGSINDNT | −0.13 | 0.12 | 0.6 |
| 2501 | ATLVT012XX53 | 44987 | NGASAAATNDNH | −0.55 | 1.05 | 0.12 |
| 2502 | ATLVT012XX1401 | 46335 | SGETAASTNDNT | 0.76 | −0.59 | 0 |
| 2503 | ATLVT012XX1315 | 46249 | SGEAAGSINDNA | −0.36 | −0.74 | 2.09 |
| 2504 | ATLVT012XX2512 | 47446 | TGESAGSSNDNA | −0.98 | 1.61 | 0.12 |
| 2505 | ATLVT012XX2647 | 47581 | TGQSAASTNDNA | −0.82 | 0.93 | 0.73 |
| 2506 | ATLVT012XX3148 | 48082 | TSETGASSNDNA | 1.19 | −1.26 | 0 |
| 2507 | ATLVT012XX1993 | 46927 | SSETGAATNDNA | −0.01 | −0.08 | 0.62 |
| 2508 | ATLVT012XX601 | 45535 | NSAAGAASNDNA | −0.45 | 0.31 | 0.88 |
| 2509 | ATLVT012XX3053 | 47987 | TSEAGASSNDNH | −0.02 | 0.14 | 0.35 |
| 2510 | ATLVT012XX827 | 45761 | NSETAASTNDNH | 0.3 | 0.64 | −0.83 |
| 2511 | ATLVT012XX1590 | 46524 | SGTAAASSNDNT | −0.92 | −0.83 | 3.15 |
| 2512 | ATLVT012XX1359 | 46293 | SGESAGATNDNT | −0.02 | 0.22 | 0.25 |
| 2513 | ATLVT012XX2362 | 47296 | TGASAGASNDNA | −0.6 | 0.4 | 1.01 |
| 2514 | ATLVT012XX2484 | 47418 | TGEAGGASNQNT | 0.09 | 0.23 | 0.05 |
| 2515 | ATLVT012XX818 | 45752 | NSETAAASNDNH | −1.72 | 1.21 | 1.87 |
| 2516 | ATLVT012XX412 | 45346 | NGQTGAATNDNA | −1.05 | −0.08 | 2.38 |
| 2517 | ATLVT012XX3407 | 48341 | TSTTAAASNDNH | −0.62 | 0.88 | 0.4 |
| 2518 | ATLVT012XX2734 | 47668 | TGTAAAASNDNA | −1.02 | 1.13 | 0.77 |
| 2519 | ATLVT012XX982 | 45916 | NSQTAGSINDNA | 1.37 | −1.12 | −0.46 |
| 2520 | ATLVT012XX696 | 45630 | NSATAGSTNDNT | −1.46 | 0.02 | 2.93 |
| 2521 | ATLVT012XX1933 | 46867 | SSESAGATNDNA | −0.85 | 1.23 | 0.31 |
| 2522 | ATLVT012XX1204 | 46138 | SGASAASSNDNA | 0.04 | 0.16 | 0.17 |
| 2523 | ATLVT012XX2599 | 47533 | TGQAAASTNDNA | −1.14 | 1.43 | 0.56 |
| 2524 | ATLVT012XX1202 | 46136 | SGASAAATNDNH | 0.11 | 0.45 | −0.32 |
| 2525 | ATLVT012XX279 | 45213 | NGETGGASNDNT | −1.68 | 1.99 | 0.74 |
| 2526 | ATLVT012XX2021 | 46955 | SSQAAASSNDNH | −1.39 | 0.9 | 1.64 |
| 2527 | ATLVT012XX2110 | 47044 | SSQTAAASNDNA | −1.52 | 2.05 | 0.39 |
| 2528 | ATLVT012XX1456 | 46390 | SGQAAGSSNDNA | −0.27 | 0.56 | 0.14 |
| 2529 | ATLVT012XX2718 | 47652 | TGQTGASSNDNT | −0.47 | −0.1 | 1.33 |
| 2530 | ATLVT012XX278 | 45212 | NGETGGASNDNH | −0.39 | 0.59 | 0.32 |
| 2531 | ATLVT012XX627 | 45561 | NSASAAASNDNT | 0.82 | −0.87 | 0.12 |
| 2532 | ATLVT012XX2910 | 47844 | TSAAGASSNDNT | −0.57 | 0.42 | 0.84 |
| 2533 | ATLVT012XX2495 | 47429 | TGESAAASNDNH | −1.18 | 1.14 | 0.96 |
| 2534 | ATLVT012XX2931 | 47865 | TSASAAATNDNT | −1.37 | −0.47 | 3.34 |
| 2535 | ATLVT012XX1680 | 46614 | SGTTAAASNDNI | 0.55 | −0.79 | 0.47 |
| 2536 | ATLVT012XX2901 | 47835 | TSAAAGSINDNT | −1.18 | 1.34 | 0.69 |
| 2537 | ATLVT012XX2711 | 47645 | TGQTGAASNDNH | −0.45 | 0.06 | 1.08 |
| 2538 | ATLVT012XX21 | 44955 | NGAAAGSSNDNT | −0.4 | 0.04 | 1.02 |
| 2539 | ATLVT012XX224 | 45158 | NGESGASSNDNH | 0.37 | 0.22 | −0.53 |
| 2540 | ATLVT012XX1248 | 46182 | SGATAAASNDNT | 1.4 | −0.74 | −1.06 |
| 2541 | ATLVT012XX2833 | 47767 | TGTTAAATNDNA | −0.76 | 0.87 | 0.56 |
| 2542 | ATLVT012XX2020 | 46954 | SSQAAASSNDNA | −1.55 | 3.23 | −1.12 |
| 2543 | ATLVT012XX942 | 45876 | NSQSGAATNDNT | 0.57 | −0.48 | 0.01 |
| 2544 | ATLVT012XX2640 | 47574 | TGQSAAASNDNT | −0.48 | −0.16 | 1.39 |
| 2545 | ATLVT012XX3216 | 48150 | TSQSAAASNDNT | 0.3 | −0.65 | 0.68 |
| 2546 | ATLVT012XX1425 | 46359 | SGETGASTNDNT | 0.96 | −1.51 | 0.64 |
| 2547 | ATLVT012XX3225 | 48159 | TSQSAASTNDNT | 0.34 | −0.35 | 0.2 |
| 2548 | ATLVT012XX3008 | 47942 | TSATGASINDNH | 0.06 | 0.47 | −0.37 |
| 2549 | ATLVT012XX439 | 45373 | NGTAAASSNDNA | −1.63 | 1.85 | 0.74 |
| 2550 | ATLVT012XX799 | 45733 | NSESGASSNDNA | 0.98 | −1.15 | 0.14 |
| 2551 | ATLVT012XX1352 | 46286 | SGESAASTNDNH | −0.47 | 0.9 | −0.04 |
| 2552 | ATLVT012XX15 | 44949 | NGAAAGASNDNT | −0.86 | 0.21 | 1.53 |
| 2553 | ATLVT012XX289 | 45223 | NGQAAAASNDNA | 0.77 | −1.54 | 0.99 |
| 2554 | ATLVT012XX2899 | 47833 | TSAAAGSINDNA | −0.94 | 0.8 | 0.9 |
| 2555 | ATLVT012XX895 | 45829 | NSQAGASSNDNA | −0.15 | 0.24 | 0.26 |
| 2556 | ATLVT012XX1311 | 46245 | SGEAAGAINDNT | −0.79 | 0.23 | 1.37 |
| 2557 | ATLVT012XX3079 | 48013 | TSESAASTNDNA | −2.24 | 3.09 | 0.18 |
| 2558 | ATLVT012XX2025 | 46959 | SSQAAASINDNT | 0.37 | −0.76 | 0.64 |
| 2559 | ATLVT012XX2535 | 47469 | TGESGGATNDNT | −1.15 | 0.95 | 1.05 |
| 2560 | ATLVT012XX3089 | 48023 | TSESAGSSNDNH | −1.46 | 0.93 | 1.6 |
| 2561 | ATLVT012XX3077 | 48011 | TSESAASSNDNH | −0.96 | 1.33 | 0.23 |
| 2562 | ATLVT012XX2564 | 47498 | TGETAGSINDNH | −0.08 | 0.68 | −0.44 |
| 2563 | ATLVT012XX1953 | 46887 | SSESGASTNDNT | −0.24 | 0.36 | 0.24 |
| 2564 | ATLVT012XX217 | 45151 | NGESGAASNDNA | 0.69 | −0.71 | 0.02 |
| 2565 | ATLVT012XX2568 | 47502 | TGETGAASNDNT | 0.11 | −0.27 | 0.44 |
| 2566 | ATLVT012XX1945 | 46879 | SSESGAATNDNA | 0.26 | 0.09 | −0.28 |
| 2567 | ATLVT012XX1789 | 46723 | SSASAGAINDNA | 0.6 | 0.27 | −1.09 |
| 2568 | ATLVT012XX1470 | 46404 | SGQAGASSNDNT | −0.48 | −0.35 | 1.54 |
| 2569 | ATLVT012XX3093 | 48027 | TSESAGSTNDNT | −1.52 | 1.19 | 1.36 |
| 2570 | ATLVT012XX3294 | 48228 | TSQTGASSNDNT | −0.48 | 0.73 | 0.15 |
| 2571 | ATLVT012XX705 | 45639 | NSATGASSNDNT | −0.51 | 1.2 | −0.38 |
| 2572 | ATLVT012XX1201 | 46135 | SGASAAATNDNA | −1.1 | −0.73 | 3.1 |
| 2573 | ATLVT012XX1250 | 46184 | SGATAAATNDNH | 0.66 | 0.12 | −1.02 |
| 2574 | ATLVT012XX2981 | 47915 | TSATAASSNDNH | −0.88 | 1.21 | 0.23 |
| 2575 | ATLVT012XX837 | 45771 | NSETAGSSNDNT | −0.63 | 0.23 | 1.05 |
| 2576 | ATLVT012XX3176 | 48110 | TSQAAASTNDNH | −0.08 | −0.25 | 0.72 |
| 2577 | ATLVT012XX3098 | 48032 | TSESGAATNDNH | −0.57 | 0.46 | 0.65 |
| 2578 | ATLVT012XX3418 | 48352 | TSTTAGASNDNA | −0.1 | 0.08 | 0.32 |
| 2579 | ATLVT012XX2652 | 47586 | TGQSAGASNDNT | −0.11 | 0 | 0.43 |
| 2580 | ATLVT012XX3142 | 48076 | TSETGAASNDNA | −0.46 | 0.28 | 0.68 |
| 2581 | ATLVT012XX213 | 45147 | NGESAGSSNDNT | 0.35 | −0.67 | 0.51 |
| 2582 | ATLVT012XX3055 | 47989 | TSEAGASTNDNA | −0.69 | 1.18 | −0.08 |
| 2583 | ATLVT012XX820 | 45754 | NSETAAATNDNA | 1.63 | −1.19 | −1.03 |
| 2584 | ATLVT012XX446 | 45380 | NGTAAGASNDNH | −0.31 | −0.18 | 1.02 |
| 2585 | ATLVT012XX2485 | 47419 | TGEAGGATNDNA | 0.41 | −0.39 | 0.05 |
| 2586 | ATLVT012XX158 | 45092 | NGEAAGASNDNH | −0.4 | −0.3 | 1.31 |
| 2587 | ATLVT012XX112 | 45046 | NGATAGAINDNA | 0.89 | −0.49 | −0.66 |
| 2588 | ATLVT012XX2638 | 47572 | TGQSAAASNDNA | 0.01 | −0.5 | 0.85 |
| 2589 | ATLVT012XX2432 | 47366 | TGATGASTNDNH | 0.03 | 0.04 | 0.11 |
| 2590 | ATLVT012XX2175 | 47109 | SSTAAGAINDNT | −0.16 | 0.07 | 0.41 |
| 2591 | ATLVT012XX3083 | 48017 | TSESAGASNDNH | −1.44 | 0.22 | 2.4 |
| 2592 | ATLVT012XX2509 | 47443 | TGESAGATNDNA | −0.94 | 0.73 | 0.89 |
| 2593 | ATLVT012XX762 | 45696 | NSEAGGATNDNT | −0.85 | 0.93 | 0.48 |
| 2594 | ATLVT012XX2461 | 47395 | TGEAAGATNDNA | −0.82 | 0.29 | 1.24 |
| 2595 | ATLVT012XX915 | 45849 | NSQSAAASNDNT | 0.01 | −0.26 | 0.51 |
| 2596 | ATLVT012XX2357 | 47291 | TGASAASSNDNH | −1.36 | 1.54 | 0.55 |
| 2597 | ATLVT012XX2739 | 47673 | TGTAAAATNDNT | 0.38 | −1.22 | 1.11 |
| 2598 | ATLVT012XX3200 | 48134 | TSQAGASINDNH | −0.75 | 0.95 | 0.23 |
| 2599 | ATLVT012XX2719 | 47653 | TGQTGASTNDNA | −0.08 | −0.13 | 0.47 |
| 2600 | ATLVT012XX1015 | 45949 | NSTAAASSNDNA | 0.42 | −0.39 | −0.05 |
| 2601 | ATLVT012XX2974 | 47908 | TSATAAASNDNA | −0.58 | 1.14 | −0.32 |
| 2602 | ATLVT012XX1469 | 46403 | SGQAGASSNDNH | −1.12 | 0.76 | 1.09 |
| 2603 | ATLVT012XX692 | 45626 | NSATAGSSNDNH | 0.55 | −0.57 | −0.06 |
| 2604 | ATLVT012XX3237 | 48171 | TSQSAGSTNQNT | −0.42 | 0.17 | 0.64 |
| 2605 | ATLVT012XX11 | 44945 | NGAAAASTNINH | −0.51 | 0.41 | 0.48 |
| 2606 | ATLVT012XX219 | 45153 | NGESGAASNDNT | 0.91 | −1.03 | −0.09 |
| 2607 | ATLVT012XX896 | 45830 | NSQAGASSNDNH | −0.44 | 0.71 | −0.02 |
| 2608 | ATLVT012XX1903 | 46837 | SSEAGASTNDNA | 0.43 | −0.46 | 0 |
| 2609 | ATLVT012XX1153 | 46087 | SGAAAAATNDNA | −1.2 | 0.45 | 1.6 |
| 2610 | ATLVT012XX1230 | 46164 | SGASGASSNDNT | −0.58 | 0.77 | 0.13 |
| 2611 | ATLVT012XX68 | 45002 | NGASAGSSNDNH | 1.36 | −0.89 | −1.06 |
| 2612 | ATLVT012XX2863 | 47797 | TGTTGASTNDNA | −0.79 | 0.52 | 0.81 |
| 2613 | ATLVT012XX414 | 45348 | NGQTGAATNDNT | −0.43 | −0.62 | 1.65 |
| 2614 | ATLVT012XX1468 | 46402 | SGQAGASSNDNA | −0.43 | 0.05 | 0.79 |
| 2615 | ATLVT012XX1150 | 46084 | SGAAAAASNDNA | −0.79 | 0.38 | 0.97 |
| 2616 | ATLVT012XX606 | 45540 | NSAAGAATNDNT | −0.64 | 0.5 | 0.56 |
| 2617 | ATLVT012XX1443 | 46377 | SGQAAAATNDNT | −1.1 | −1.42 | 3.82 |
| 2618 | ATLVT012XX704 | 45638 | NSATGASSNDNH | −0.41 | 1.48 | −1.1 |
| 2619 | ATLVT012XX1345 | 46279 | SGESAAATNDNA | 2.05 | −1.39 | −1.63 |
| 2620 | ATLVT012XX1638 | 46572 | SGTSAASSNDNT | −1.14 | −0.51 | 2.72 |
| 2621 | ATLVT012XX2068 | 47002 | SSQSAASSNDNA | −0.39 | −0.46 | 1.35 |
| 2622 | ATLVT012XX2000 | 46934 | SSETGASTNDNH | −0.14 | 0.73 | −0.61 |
| 2623 | ATLVT012XX3358 | 48292 | TSTSAAASNDNA | −0.92 | 1.25 | 0.07 |
| 2624 | ATLVT012XX1681 | 46615 | SGTTAAATNDNA | −0.15 | −0.1 | 0.47 |
| 2625 | ATLVT012XX3280 | 48214 | TSQTAGSSNDNA | 0 | −0.38 | 0.56 |
| 2626 | ATLVT012XX3234 | 48168 | TSQSAGSSNDNT | −0.81 | 1.24 | −0.14 |
| 2627 | ATLVT012XX2933 | 47867 | TSASAASSNDNH | −0.2 | 0.5 | −0.24 |
| 2628 | ATLVT012XX1889 | 46823 | SSEAAGSSNDNH | −0.11 | 0.46 | −0.34 |
| 2629 | ATLVT012XX1377 | 46311 | SGESGASTNDNT | −0.52 | 0.79 | −0.08 |
| 2630 | ATLVT012XX294 | 45228 | NGQAAAATNDNT | 0.85 | −2.14 | 1.35 |
| 2631 | ATLVT012XX2634 | 47568 | TGQAGGSSNDNT | −0.73 | −0.47 | 1.91 |
| 2632 | ATLVT012XX2553 | 47487 | TGETAASTNDNI | −0.78 | −1.1 | 2.8 |
| 2633 | ATLVT012XX1410 | 46344 | SGETAGSSNDNT | −1.05 | 1.58 | −0.18 |
| 2634 | ATLVT012XX1792 | 46726 | SSASAGSSNDNA | 1.1 | −0.61 | −1.06 |
| 2635 | ATLVT012XX2929 | 47863 | TSASAAATNDNA | 0.93 | −1.06 | −0.18 |
| 2636 | ATLVT012XX897 | 45831 | NSQAGASSNDNT | −0.13 | −0.39 | 0.77 |
| 2637 | ATLVT012XX2433 | 47367 | TGATGASTNDNT | −0.4 | 0.28 | 0.35 |
| 2638 | ATLVT012XX2401 | 47335 | TGATAAATNDNA | 0.05 | −0.24 | 0.25 |
| 2639 | ATLVT012XX2473 | 47407 | TGEAGAATNDNA | −0.85 | 0.87 | 0.35 |
| 2640 | ATLVT012XX1857 | 46791 | SSATGASTNDNT | 1.67 | 1.26 | −1.23 |
| 2641 | ATLVT012XX2482 | 47416 | TGEAGGASNDNA | 0 | 0.06 | −0.07 |
| 2642 | ATLVT012XX3286 | 48220 | TSQTGAASNDNA | −0.4 | −0.16 | 0.89 |
| 2643 | ATLVT012XX2764 | 47698 | TGTAGASSNDNA | 0.06 | −0.1 | 0.02 |
| 2644 | ATLVT012XX1440 | 46374 | SGQAAAASNDNT | −0.7 | −0.77 | 2.18 |
| 2645 | ATLVT012XX1968 | 46902 | SSETAAASNDNT | −0.46 | −0.78 | 1.78 |
| 2646 | ATLVT012XX1560 | 46494 | SGQTGAASNDNT | 0.23 | −0.62 | 0.4 |
| 2647 | ATLVT012XX2112 | 47046 | SSQTAAASNDNT | −0.89 | −0.67 | 2.37 |
| 2648 | ATLVT012XX556 | 45490 | NGTTGAATNDNA | −0.18 | −0.37 | 0.74 |
| 2649 | ATLVT012XX2523 | 47457 | TGESGAATNDNT | −1.02 | −0.21 | 1.99 |
| 2650 | ATLVT012XX796 | 45730 | NSESGAATNDNA | −0.17 | −0.55 | 0.95 |
| 2651 | ATLVT012XX63 | 44997 | NGASAGASNDNI | 0.24 | −0.46 | 0.15 |
| 2652 | ATLVT012XX2674 | 47608 | TGQSGGASNDNA | −0.69 | 1.18 | 0.37 |
| 2653 | ATLVT012XX3293 | 48227 | TSQTGASSNDNH | −0.76 | 0.84 | 0.18 |
| 2654 | ATLVT012XX2645 | 47579 | TGQSAASSNDNH | −0.97 | 0.56 | 0.89 |
| 2655 | ATLVT012XX115 | 45049 | NGATAGSSNDNA | 1.09 | −1.02 | −0.61 |
| 2656 | ATLVT012XX2715 | 47649 | TGQTGAATNDNT | −0.5 | −0.65 | 1.64 |
| 2657 | ATLVT012XX2673 | 47607 | TGQSGASTNDNT | −0.9 | 0.54 | 0.78 |
| 2658 | ATLVT012XX1155 | 46089 | SGAAAAAINDNT | −1.09 | 0.15 | 1.62 |
| 2659 | ATLVT012XX3049 | 47983 | TSEAGAATNDNA | −0.7 | 0.01 | 1.13 |
| 2660 | ATLVT012XX413 | 45347 | NGQTGAATNDNH | −1.03 | 0.24 | 1.4 |
| 2661 | ATLVT012XX870 | 45804 | NSQAAAATNDNT | 0.27 | −0.24 | −0.22 |
| 2662 | ATLVT012XX3139 | 48073 | TSETAGSTNDNA | 1 | −0.99 | −0.53 |
| 2663 | ATLVT012XX370 | 45304 | NGQSGASINDNA | −1.45 | −1.09 | 3.8 |
| 2664 | ATLVT012XX3177 | 48111 | TSQAAASINDNT | −0.23 | −0.76 | 1.29 |
| 2665 | ATLVT012XX3162 | 48096 | TSETGGSSNDNT | 0.23 | −0.25 | −0.16 |
| 2666 | ATLVT012XX1730 | 46664 | SSAAAAAINDNH | 0.95 | −0.85 | −0.62 |
| 2667 | ATLVT012XX2528 | 47462 | TGESGASTNDNH | −0.9 | 0.71 | 0.53 |
| 2668 | ATLVT012XX1776 | 46710 | SSASAAASNDNT | 0.44 | −0.69 | 0.04 |
| 2669 | ATLVT012XX2932 | 47866 | TSASAASSNDNA | 0.46 | −0.45 | −0.31 |
| 2670 | ATLVT012XX3321 | 48255 | TSTAAASTNDNT | −0.65 | 0.18 | 0.79 |
| 2671 | ATLVT012XX1305 | 46239 | SGEAAASTNDNT | −0.02 | −0.06 | 0 |
| 2672 | ATLVT012XX2930 | 47864 | TSASAAATNDNH | 0.24 | −0.72 | 0.39 |
| 2673 | ATLVT012XX1558 | 46492 | SGQTGAASNDNA | −0.43 | −1.02 | 1.92 |
| 2674 | ATLVT012XX3128 | 48062 | TSETAASINDNH | 0.13 | −0.6 | 0.43 |
| 2675 | ATLVT012XX190 | 45124 | NGEAGGSINDNA | −0.18 | 0.98 | −1.08 |
| 2676 | ATLVT012XX2418 | 47352 | TGATAGSSNDNT | 0.01 | −0.12 | 0 |
| 2677 | ATLVT012XX744 | 45678 | NSEAAGSINDNT | −1.46 | 1.96 | −0.15 |
| 2678 | ATLVT012XX2765 | 47699 | TGTAGASSNDNH | −0.41 | −0.08 | 0.67 |
| 2679 | ATLVT012XX3113 | 48047 | TSESGGSSNDNH | −0.32 | 0.16 | 0.2 |
| 2680 | ATLVT012XX3094 | 48028 | TSESGAASNDNA | −0.99 | 0.06 | 1.47 |
| 2681 | ATLVT012XX199 | 45133 | NGESAASSNDNA | −2.01 | −1.57 | 5.32 |
| 2682 | ATLVT012XX3270 | 48204 | TSQTAASSNDNT | −0.37 | −1.06 | 1.86 |
| 2683 | ATLVT012XX131 | 45065 | NGATGASTNDNH | 0.47 | −0.23 | −0.67 |
| 2684 | ATLVT012XX20 | 44954 | NGAAAGSSNDNH | −0.55 | 0.02 | 0.75 |
| 2685 | ATLVT012XX2717 | 47651 | TGQTGASSNDNH | −0.44 | 0.02 | 0.55 |
| 2686 | ATLVT012XX3423 | 48357 | TSTTAGAINDNT | −0.63 | 0.62 | 0.11 |
| 2687 | ATLVT012XX1351 | 46285 | SGESAASINDNA | −0.57 | 0.11 | 0.66 |
| 2688 | ATLVT012XX3191 | 48125 | TSQAGAASNDNH | −0.59 | 0.05 | 0.77 |
| 2689 | ATLVT012XX3313 | 48247 | TSTAAAATNDNA | −0.87 | 0.81 | 0.26 |
| 2690 | ATLVT012XX3267 | 48201 | TSQTAAATNDNT | 0.21 | −0.89 | 0.59 |
| 2691 | ATLVT012XX3070 | 48004 | TSESAAASNDNA | −1.42 | 1.71 | 0.02 |
| 2692 | ATLVT012XX1355 | 46289 | SGESAGASNDNH | −0.74 | −0.08 | 1.17 |
| 2693 | ATLVT012XX257 | 45191 | NGETAGATNDNH | −0.06 | 0.54 | −0.8 |
| 2694 | ATLVT012XX2544 | 47478 | TGETAAASNDNT | 2.29 | −1.94 | −1.63 |
| 2695 | ATLVT012XX343 | 45277 | NGQSAASSNDNA | −0.43 | −0.02 | 0.54 |
| 2696 | ATLVT012XX356 | 45290 | NGQSAGSSNDNH | −0.71 | 0.62 | 0.21 |
| 2697 | ATLVT012XX2600 | 47534 | TGQAAASINDNH | −0.53 | 0.15 | 0.49 |
| 2698 | ATLVT012XX752 | 45686 | NSEAGASSNDNH | −0.61 | 0.49 | 0.17 |
| 2699 | ATLVT012XX1373 | 46307 | SGESGASSNDNH | −0.89 | 1.23 | −0.31 |
| 2700 | ATLVT012XX1834 | 46768 | SSATAGASNDNA | −0.41 | 0.89 | −0.71 |
| 2701 | ATLVT012XX3048 | 47982 | TSEAGAASNDNT | −0.33 | −0.08 | 0.41 |
| 2702 | ATLVT012XX1162 | 46096 | SGAAAGASNDNA | −0.76 | 0.08 | 0.93 |
| 2703 | ATLVT012XX182 | 45116 | NGEAGGASNDNH | 0.31 | −0.56 | −0.08 |
| 2704 | ATLVT012XX121 | 45055 | NGATGAASNDNA | 0.08 | 0.04 | −0.46 |
| 2705 | ATLVT012XX3120 | 48054 | TSETAAASNDNT | 0.48 | −0.86 | 0 |
| 2706 | ATLVT012XX735 | 45669 | NSEAAGASNDNT | −0.64 | 0.39 | 0.3 |
| 2707 | ATLVT012XX871 | 45805 | NSQAAASSNDNA | −0.72 | 1.08 | −0.44 |
| 2708 | ATLVT012XX2417 | 47351 | TGATAGSSNDNH | 0 | 0.05 | −0.36 |
| 2709 | ATLVT012XX1985 | 46919 | SSETAGSSNDNH | −0.52 | 1.22 | −0.98 |
| 2710 | ATLVT012XX1972 | 46906 | SSETAASSNDNA | −1.64 | −1.32 | 4.2 |
| 2711 | ATLVT012XX3025 | 47959 | TSEAAAATNDNA | −0.21 | −0.05 | 0.12 |
| 2712 | ATLVT012XX3223 | 48157 | TSQSAASTNDNA | −0.38 | 0.57 | −0.4 |
| 2713 | ATLVT012XX2124 | 47058 | SSQTAGASNDNT | −1.01 | −0.2 | 1.67 |
| 2714 | ATLVT012XX184 | 45118 | NGEAGGATNDNA | 1.22 | −1.01 | −1.11 |
| 2715 | ATLVT012XX3040 | 47974 | TSEAAGSSNDNA | −0.86 | 0.49 | 0.51 |
| 2716 | ATLVT012XX2475 | 47409 | TGEAGAATNDNT | −0.21 | 0.01 | 0.02 |
| 2717 | ATLVT012XX2994 | 47928 | TSATAGSSNDNT | −0.72 | 0.29 | 0.53 |
| 2718 | ATLVT012XX1279 | 46213 | SGATGASTNDNA | 0.57 | 0.14 | −1.14 |
| 2719 | ATLVT012XX3319 | 48253 | TSTAAASTNDNA | −1.15 | 0.57 | 0.88 |
| 2720 | ATLVT012XX3046 | 47980 | TSEAGAASNDNA | −1.24 | −0.16 | 1.97 |
| 2721 | ATLVT012XX1252 | 46186 | SGATAASSNDNA | 0.31 | −0.18 | −0.66 |
| 2722 | ATLVT012XX1892 | 46826 | SSEAAGSINDNH | 0.09 | 0.19 | −0.76 |
| 2723 | ATLVT012XX1888 | 46822 | SSEAAGSSNDNA | 0.9 | −0.68 | −1.03 |
| 2724 | ATLVT012XX3264 | 48198 | TSQTAAASNDNT | 0.13 | −1.22 | 0.98 |
| 2725 | ATLVT012XX207 | 45141 | NGESAGASNDNT | −1.08 | −0.58 | 2.23 |
| 2726 | ATLVT012XX2699 | 47633 | TGQTAGASNDNH | −0.77 | 0.08 | 0.84 |
| 2727 | ATLVT012XX2077 | 47011 | SSQSAGATNDNA | −0.45 | 0.08 | 0.27 |
| 2728 | ATLVT012XX364 | 45298 | NGQSGAATNDNA | 0.29 | −0.96 | 0.36 |
| 2729 | ATLVT012XX1879 | 46813 | SSEAAASINDNA | 0.66 | −0.88 | −0.39 |
| 2730 | ATLVT012XX242 | 45176 | NGETAAASNDNH | −0.06 | −0.43 | 0.26 |
| 2731 | ATLVT012XX2449 | 47383 | TGEAAAATNDNA | −1.97 | 3.62 | −1.67 |
| 2732 | ATLVT012XX2511 | 47445 | TGESAGAINDNT | −1.75 | 0.4 | 2.09 |
| 2733 | ATLVT012XX160 | 45094 | NGEAAGATNDNA | −1.03 | −0.78 | 2.36 |
| 2734 | ATLVT012XX1832 | 46766 | SSATAASINDNH | 0.37 | −0.29 | −0.66 |
| 2735 | ATLVT012XX2496 | 47430 | TGESAAASNDNT | −1.44 | 1.05 | 0.71 |
| 2736 | ATLVT012XX2705 | 47639 | IGQTAGSSNDNH | −0.69 | 0.76 | −0.21 |
| 2737 | ATLVT012XX972 | 45906 | NSQTAASINDNT | 0.18 | −1.18 | 0.79 |
| 2738 | ATLVT012XX1559 | 46493 | SGQTGAASNDNH | −0.14 | −0.68 | 0.71 |
| 2739 | ATLVT012XX163 | 45097 | NGEAAGSSNDNA | −1.48 | 1.43 | 0.28 |
| 2740 | ATLVT012XX259 | 45193 | NGETAGSSNDNA | −1.81 | 3.14 | −1.36 |
| 2741 | ATLVT012XX1747 | 46681 | SSAAAGSINDNA | −0.93 | 0.56 | 0.46 |
| 2742 | ATLVT012XX8 | 44942 | NGAAAASSNDNH | −1.14 | 0.6 | 0.74 |
| 2743 | ATLVT012XX581 | 45515 | NSAAAAATNDNH | 1.04 | −1.31 | −0.55 |
| 2744 | ATLVT012XX1829 | 46763 | SSATAASSNDNH | −0.85 | 0.18 | 0.78 |
| 2745 | ATLVT012XX1996 | 46930 | SSETGASSNDNA | 1.51 | −2.07 | −0.39 |
| 2746 | ATLVT012XX3235 | 48169 | TSQSAGSTNDNA | −0.96 | 0.79 | 0.17 |
| 2747 | ATLVT012XX597 | 45531 | NSAAAGSSNDNT | −1.33 | 1.06 | 0.46 |
| 2748 | ATLVT012XX686 | 45620 | NSATAGASNDNH | −0.67 | −0.92 | 1.85 |
| 2749 | ATLVT012XX1156 | 46090 | SGAAAASSNDNA | −0.81 | 0.48 | 0.29 |
| 2750 | ATLVT012XX2459 | 47393 | TGEAAGASNDNH | −0.53 | −0.03 | 0.49 |
| 2751 | ATLVT012XX12 | 44946 | NGAAAASTNDNT | −0.74 | 0.09 | 0.69 |
| 2752 | ATLVT012XX3073 | 48007 | TSESAAATNDNA | −1.06 | 0.82 | 0.29 |
| 2753 | ATLVT012XX1640 | 46574 | SGTSAASINDNH | −0.53 | 0.85 | −0.67 |
| 2754 | ATLVT012XX288 | 45222 | NGETGGSTNDNT | −1.36 | 0.73 | 0.91 |
| 2755 | ATLVT012XX2271 | 47205 | SSTTAGATNDNT | −0.82 | 0.72 | 0 |
| 2756 | ATLVT012XX2464 | 47398 | TGEAAGSSNDNA | −0.59 | 0.47 | −0.09 |
| 2757 | ATLVT012XX990 | 45924 | NSQTGAATNDNT | −0.2 | −0.73 | 0.78 |
| 2758 | ATLVT012XX393 | 45327 | NGQTAASSNDNT | −0.5 | −0.57 | 1.09 |
| 2759 | ATLVT012XX2549 | 47483 | TGETAASSNDNH | 0.27 | −0.46 | −0.37 |
| 2760 | ATLVT012XX974 | 45908 | NSQTAGASNDNH | −0.75 | −0.03 | 0.81 |
| 2761 | ATLVT012XX162 | 45096 | NGEAAGAINDNT | −0.54 | −1.11 | 1.81 |
| 2762 | ATLVT012XX1884 | 46818 | SSEAAGASNDNT | −0.95 | 0.21 | 0.81 |
| 2763 | ATLVT012XX2757 | 47691 | TGTAAGSINDNT | −0.58 | 0.09 | 0.33 |
| 2764 | ATLVT012XX738 | 45672 | NSEAAGATNDNT | −0.63 | 0.19 | 0.29 |
| 2765 | ATLVT012XX166 | 45100 | NGEAAGSINDNA | −0.9 | −0.39 | 1.5 |
| 2766 | ATLVT012XX2463 | 47397 | TGEAAGATNDNT | −0.99 | 0.29 | 0.77 |
| 2767 | ATLVT012XX2521 | 47455 | TGESGAATNDNA | −1.05 | 0.4 | 0.73 |
| 2768 | ATLVT012XX3009 | 47943 | TSATGASTNQNT | 0 | −0.44 | 0 |
| 2769 | ATLVT012XX1372 | 46306 | SGESGASSNDNA | −0.74 | 0.01 | 0.69 |
| 2770 | ATLVT012XX342 | 45276 | NGQSAAATNDNT | −0.71 | 1.32 | −1.04 |
| 2771 | ATLVT012XX24 | 44958 | NGAAAGSINDNT | −1.2 | 0.19 | 1.26 |
| 2772 | ATLVT012XX594 | 45528 | NSAAAGATNDNT | −0.83 | 0.23 | 0.55 |
| 2773 | ATLVT012XX2695 | 47629 | TGQTAASTNDNA | −1.23 | 0.02 | 1.5 |
| 2774 | ATLVT012XX1299 | 46233 | SGEAAAATNDNT | 0.04 | −0.59 | 0.1 |
| 2775 | ATLVT012XX3153 | 48087 | TSETGASTNDNT | 0.25 | −0.63 | −0.2 |
| 2776 | ATLVT012XX2497 | 47431 | TGESAAATNDNA | −2.07 | 3.16 | −1.1 |
| 2777 | ATLVT012XX3232 | 48166 | TSQSAGSSNDNA | −0.22 | −0.38 | 0.26 |
| 2778 | ATLVT012XX2551 | 47485 | TGETAASTNDNA | 0.58 | −1 | −0.3 |
| 2779 | ATLVT012XX2493 | 47427 | TGEAGGSINDNT | 0.61 | −0.63 | −0.85 |
| 2780 | ATLVT012XX250 | 45184 | NGETAASTNDNA | 0.56 | −0.36 | −1.12 |
| 2781 | ATLVT012XX2065 | 46999 | SSQSAAAINDNA | −0.46 | −0.84 | 1.25 |
| 2782 | ATLVT012XX3317 | 48251 | TSTAAASSNDNH | −1.07 | 1.15 | −0.31 |
| 2783 | ATLVT012XX652 | 45586 | NSASGAATNDNA | −0.29 | −0.22 | 0.12 |
| 2784 | ATLVT012XX923 | 45857 | NSQSAASINDNH | −0.25 | 0.31 | −0.65 |
| 2785 | ATLVT012XX1842 | 46776 | SSATAGSSNDNT | −0.02 | 0.11 | −0.79 |
| 2786 | ATLVT012XX600 | 45534 | NSAAAGSINDNT | −1.32 | 0.62 | 0.79 |
| 2787 | ATLVT012XX694 | 45628 | NSATAGSTNDNA | −1.56 | −1.08 | 3.37 |
| 2788 | ATLVT012XX2788 | 47722 | IGTSAASSNDNA | −0.19 | 0.11 | −0.5 |
| 2789 | ATLVT012XX1540 | 46474 | SGQTAASSNDNA | 0.34 | −1.26 | 0.36 |
| 2790 | ATLVT012XX360 | 45294 | NGQSAGSINDNT | −0.91 | 0.59 | 0.11 |
| 2791 | ATLVT012XX2208 | 47142 | SSTSAAASNDNT | −0.55 | −1 | 1.55 |
| 2792 | ATLVT012XX792 | 45726 | NSESAGSTNDNT | −0.5 | 0.78 | −0.84 |
| 2793 | ATLVT012XX3172 | 48106 | TSQAAASSNDNA | −0.28 | −0.44 | 0.34 |
| 2794 | ATLVT012XX801 | 45735 | NSESGASSNDNT | 0.01 | −1.13 | 0.72 |
| 2795 | ATLVT012XX56 | 44990 | NGASAASSNDNH | −0.29 | −0.7 | 0.69 |
| 2796 | ATLVT012XX3076 | 48010 | TSESAASSNDNA | −1.15 | 0.53 | 0.56 |
| 2797 | ATLVT012XX109 | 45043 | NGATAGASNDNA | 0.35 | −0.08 | −1.24 |
| 2798 | ATLVT012XX1154 | 46088 | SGAAAAATNDNH | −0.76 | 0.14 | 0.38 |
| 2799 | ATLVT012XX169 | 45103 | NGEAGAASNDNA | −0.47 | −0.37 | 0.53 |
| 2800 | ATLVT012XX2621 | 47555 | TGQAGASSNDNH | −0.98 | 0.31 | 0.52 |
| 2801 | ATLVT012XX400 | 45334 | NGQTAGATNDNA | −0.3 | 0.41 | −0.78 |
| 2802 | ATLVT012XX403 | 45337 | NGQTAGSSNDNA | −0.77 | 0.56 | −0.17 |
| 2803 | ATLVT012XX1941 | 46875 | SSESAGSTNDNT | −1.25 | 0.61 | 0.59 |
| 2804 | ATLVT012XX1353 | 46287 | SGESAASTNDNT | −1.34 | −1.59 | 3.57 |
| 2805 | ATLVT012XX3134 | 48068 | TSETAGATNDNH | −0.42 | 0.06 | −0.14 |
| 2806 | ATLVT012XX2532 | 47466 | TGESGGASNDNT | −1.98 | 0.71 | 1.7 |
| 2807 | ATLVT012XX3228 | 48162 | TSQSAGASNDNT | −0.65 | 0.16 | 0.13 |
| 2808 | ATLVT012XX3201 | 48135 | TSQAGASTNDNT | −1.13 | −0.25 | 1.47 |
| 2809 | ATLVT012XX2543 | 47477 | TGETAAASNDNH | 0.32 | −0.62 | −0.54 |
| 2810 | ATLVT012XX1318 | 46252 | SGEAGAASNDNA | −1.42 | −0.34 | 2.07 |
| 2811 | ATLVT012XX2743 | 47677 | TGTAAASINDNA | −2.78 | −0.66 | 4.81 |
| 2812 | ATLVT012XX2514 | 47448 | TGESAGSSNDNT | −1.53 | 0.54 | 1.12 |
| 2813 | ATLVT012XX3227 | 48161 | TSQSAGASNDNH | −0.83 | 0.26 | 0.28 |
| 2814 | ATLVT012XX783 | 45717 | NSESAGASNDNT | −0.59 | 0.1 | 0.06 |
| 2815 | ATLVT012XX3147 | 48081 | TSETGAATNDNT | −0.25 | −0.5 | 0.25 |
| 2816 | ATLVT012XX3004 | 47938 | TSATGASSNDNA | −1.04 | −1.34 | 2.67 |
| 2817 | ATLVT012XX3218 | 48152 | TSQSAAATNDNH | −0.17 | 0.02 | −0.57 |
| 2818 | ATLVT012XX1948 | 46882 | SSESGASSNDNA | 0.06 | −1.03 | 0.38 |
| 2819 | ATLVT012XX3081 | 48015 | TSESAASTNDNT | −0.32 | −0.03 | −0.26 |
| 2820 | ATLVT012XX263 | 45197 | NGETAGSINDNH | −0.35 | 1.05 | −1.59 |
| 2821 | ATLVT012XX330 | 45264 | NGQAGGATNDNT | −0.05 | −0.81 | 0.26 |
| 2822 | ATLVT012XX1848 | 46782 | SSATGAASNDNT | 0.27 | −0.61 | −0.55 |
| 2823 | ATLVT012XX2522 | 47456 | TGESGAATNDNH | −1.72 | 1.59 | 0.03 |
| 2824 | ATLVT012XX1270 | 46204 | SGATGAASNDNA | −0.63 | 0.44 | −0.36 |
| 2825 | ATLVT012XX3221 | 48155 | TSQSAASSNDNH | −1.34 | 0.39 | 0.91 |
| 2826 | ATLVT012XX1319 | 46253 | SGEAGAASNDNH | −0.22 | −0.66 | 0.33 |
| 2827 | ATLVT012XX3042 | 47976 | TSEAAGSSNDNI | −1.18 | 0.13 | 0.97 |
| 2828 | ATLVT012XX1278 | 46212 | SGATGASSNDNT | −1.05 | 1.22 | −0.66 |
| 2829 | ATLVT012XX2698 | 47632 | TGQTAGASNDNA | −0.61 | −0.18 | 0.38 |
| 2830 | ATLVT012XX108 | 45042 | NGATAASTNDNT | 0.02 | −0.37 | −0.47 |
| 2831 | ATLVT012XX2307 | 47241 | TGAAAAATNDNT | −1.33 | 0.37 | 0.9 |
| 2832 | ATLVT012XX2880 | 47814 | TSAAAAASNDNT | −0.05 | −0.62 | −0.03 |
| 2833 | ATLVT012XX297 | 45231 | NGQAAASSNQNT | 0.76 | −1.73 | 0.01 |
| 2834 | ATLVT012XX2576 | 47510 | TGETGASTNDNH | −0.14 | −1.04 | 0.67 |
| 2835 | ATLVT012XX73 | 45007 | NGASGAASNDNA | −0.18 | −0.6 | 0.17 |
| 2836 | ATLVT012XX2016 | 46950 | SSQAAAASNDNT | −0.32 | −1.54 | 1.61 |
| 2837 | ATLVT012XX1637 | 46571 | SGTSAASSNDNH | −1.03 | −0.36 | 1.3 |
| 2838 | ATLVT012XX3246 | 48180 | TSQSGASSNDNT | −1.52 | 0.6 | 0.91 |
| 2839 | ATLVT012XX1584 | 46518 | SGTAAAASNDNT | −0.78 | −0.93 | 1.62 |
| 2840 | ATLVT012XX2782 | 47716 | TGTSAAASNDNA | 0.04 | −1.54 | 1 |
| 2841 | ATLVT012XX3411 | 48345 | TSTTAAATNDNT | −0.12 | −0.43 | −0.16 |
| 2842 | ATLVT012XX992 | 45926 | NSQTGASSNDNH | −0.55 | 0.09 | −0.1 |
| 2843 | ATLVT012XX788 | 45722 | NSESAGSSNDNH | −0.22 | 0.39 | −1.06 |
| 2844 | ATLVT012XX3005 | 47939 | TSATGASSNDNH | −0.38 | 0.28 | −0.64 |
| 2845 | ATLVT012XX2704 | 47638 | TGQTAGSSNDNA | −0.83 | 0.77 | −0.51 |
| 2846 | ATLVT012XX2211 | 47145 | SSTSAAATNDNT | −0.92 | −0.53 | 1.31 |
| 2847 | ATLVT012XX2487 | 47421 | TGEAGGAINDNT | −0.53 | 0.09 | −0.16 |
| 2848 | ATLVT012XX1419 | 46353 | SGETGAATNDNT | −0.51 | −1.57 | 1.94 |
| 2849 | ATLVT012XX3364 | 48298 | TSTSAASSNDNA | −1.96 | −0.09 | 2.51 |
| 2850 | ATLVT01XXX3214 | 48148 | TSQSAAASNDNA | −0.97 | −0.04 | 0.75 |
| 2851 | ATLVT012XX2979 | 47913 | TSATAAATNDNT | −1.22 | 0.83 | 0.05 |
| 2852 | ATLVT012XX1321 | 46255 | SGEAGAATNDNA | −0.51 | −0.89 | 1.03 |
| 2853 | ATLVT012XX1942 | 46876 | SSESGAASNDNA | −0.68 | −0.33 | 0.62 |
| 2854 | ATLVT012XX2712 | 47646 | TGQTGAASNDNT | −0.56 | −0.35 | 0.44 |
| 2855 | ATLVT012XX354 | 45288 | NGQSAGAINDNT | −1.18 | −0.02 | 1.06 |
| 2856 | ATLVT012XX2412 | 47346 | TGATAGASNDNT | −0.78 | −0.24 | 0.65 |
| 2857 | ATLVT012XX2577 | 47511 | TGETGASINDNT | −0.92 | 1.8 | 2.9 |
| 2858 | ATLVT012XX3140 | 48074 | TSETAGSINDNH | −0.61 | −0.04 | 0.11 |
| 2859 | ATLVT012XX325 | 45259 | NGQAGGASNDNA | −0.9 | 0.08 | 0.45 |
| 2860 | ATLVT012XX1998 | 46932 | SSETGASSNDNT | 0.62 | −1.38 | −0.29 |
| 2861 | ATLVT012XX205 | 45139 | NGESAGASNDNA | −1.95 | −0.69 | 3.23 |
| 2862 | ATLVT012XX13 | 44947 | NGAAAGASNDNA | −1.23 | 0.16 | 0.9 |
| 2863 | ATLVT012XX2024 | 46958 | SSQAAASINDNH | −0.62 | −0.22 | 0.32 |
| 2864 | ATLVT012XX114 | 45048 | NGATAGAINDNT | −0.68 | 0.05 | 0.09 |
| 2865 | ATLVT012XX2350 | 47284 | TGASAAASNDNA | −0.74 | 0.4 | −0.26 |
| 2866 | ATLVT012XX746 | 45680 | NSEAGAASNDNH | −0.89 | −0.25 | 0.82 |
| 2867 | ATLVT012XX3045 | 47979 | TSEAAGSINDNT | −1.26 | 0.24 | 0.83 |
| 2868 | ATLVT012XX1978 | 46912 | SSETAGASNDNA | −0.6 | −0.12 | 0.14 |
| 2869 | ATLVT012XX2566 | 47500 | TGETGAASNDNA | −0.61 | −0.32 | 0.4 |
| 2870 | ATLVT012XX800 | 45734 | NSESGASSNDNH | −0.27 | −0.33 | −0.17 |
| 2871 | ATLVT012XX46 | 44980 | NGAAGGSINDNA | −1.23 | −0.17 | 1.27 |
| 2872 | ATLVT012XX778 | 45712 | NSESAASINDNA | −0.8 | 1.06 | −1.05 |
| 2873 | ATLVT012XX2114 | 47048 | SSQTAAAINDNH | −0.53 | −0.3 | 0.23 |
| 2874 | ATLVT012XX149 | 45083 | NGEAAAATNDNH | −0.17 | 0.75 | −1.74 |
| 2875 | ATLVT012XX755 | 45689 | NSEAGASTNDNH | −0.47 | −0.37 | 0.21 |
| 2876 | ATLVT012XX2555 | 47489 | TGETAGASNDNH | −1.18 | 0.5 | 0.31 |
| 2877 | ATLVT012XX2563 | 47497 | TGETAGSINDNA | −0.63 | 0.84 | −1.08 |
| 2878 | ATLVT012XX2854 | 47788 | TGTTGAASNDNA | −0.93 | −0.28 | 0.87 |
| 2879 | ATLVT012XX1687 | 46621 | SGTTAASTNDNA | −1.06 | −0.84 | 1.79 |
| 2880 | ATLVT012XX3136 | 48070 | TSETAGSSNDNA | −0.43 | −0.49 | 0.25 |
| 2881 | ATLVT012XX1264 | 46198 | SGATAGSSNDNA | 0.65 | −0.46 | −1.66 |
| 2882 | ATLVT012XX2745 | 47679 | TGTAAASTNDNT | −0.55 | −1.13 | 1.27 |
| 2883 | ATLVT012XX1396 | 46330 | SGETAASSNDNA | 0.01 | −0.43 | −0.6 |
| 2884 | ATLVT012XX3408 | 48342 | TSTTAAASNDNT | −0.54 | −0.82 | 0.84 |
| 2885 | ATLVT012XX3047 | 47981 | TSEAGAASNDNH | −0.79 | −0.37 | 0.69 |
| 2886 | ATLVT012XX3029 | 47963 | TSEAAASSNDNH | −0.4 | −0.53 | 0.21 |
| 2887 | ATLVT012XX3082 | 48016 | TSESAGASNDNA | −1.56 | 0.39 | 1.03 |
| 2888 | ATLVT012XX1736 | 46670 | SSAAAASINDNH | −1.47 | 0.34 | 0.92 |
| 2889 | ATLVT012XX2571 | 47505 | TGETGAATNDNT | −0.47 | −0.43 | 0.2 |
| 2890 | ATLVT012XX1931 | 46865 | SSESAGASNDNH | −1.94 | 1.1 | 0.73 |
| 2891 | ATLVT012XX2740 | 47674 | TGTAAASSNDNA | −1.03 | 0.17 | 0.37 |
| 2892 | ATLVT012XX50 | 44984 | NGASAAASNDNH | −0.43 | −0.94 | 0.78 |
| 2893 | ATLVT012XX1856 | 46790 | SSATGASTNDNH | 0.39 | −0.09 | −1.73 |
| 2894 | ATLVT012XX965 | 45899 | NSQTAAATNDNH | −0.27 | −0.72 | 0.21 |
| 2895 | ATLVT012XX1344 | 46278 | SGESAAASNDNT | 0.2 | −1.36 | 0.22 |
| 2896 | ATLVT012XX2403 | 47337 | TGATAAATNDNT | −1.98 | −0.41 | 2.74 |
| 2897 | ATLVT012XX151 | 45085 | NGEAAASSNDNA | −0.63 | 0.88 | −1.24 |
| 2898 | ATLVT012XX3022 | 47956 | TSEAAAASNDNA | 1.15 | −1.59 | −1.12 |
| 2899 | ATLVT012XX200 | 45134 | NGESAASSNDNH | −1.56 | −0.08 | 1.58 |
| 2900 | ATLVT012XX416 | 45350 | NGQTGASSNDNH | −2.1 | −0.29 | 2.76 |
| 2901 | ATLVT012XX1885 | 46819 | SSEAAGAINDNA | −1.13 | 0.45 | 0.12 |
| 2902 | ATLVT012XX2472 | 47406 | TGEAGAASNDNT | −1.05 | 0.53 | −0.11 |
| 2903 | ATLVT012XX1314 | 46248 | SGEAAGSSNDNT | −0.39 | −0.61 | 0.22 |
| 2904 | ATLVT012XX979 | 45913 | NSQTAGSSNDNA | 0.2 | −1.23 | 0 |
| 2905 | ATLVT012XX3099 | 48033 | TSESGAATNDNT | −0.75 | −0.12 | 0.2 |
| 2906 | ATLVT012XX3229 | 48163 | TSQSAGAINDNA | −1.03 | 0.46 | −0.07 |
| 2907 | ATLVT012XX164 | 45098 | NGEAAGSSNDNH | −1.12 | 0.01 | 0.66 |
| 2908 | ATLVT012XX2209 | 47143 | SSTSAAATNDNA | −0.47 | −0.44 | 0.11 |
| 2909 | ATLVT012XX657 | 45591 | NSASGASSNDNT | −0.21 | −0.35 | −0.46 |
| 2910 | ATLVT012XX252 | 45186 | NGETAASTNDNT | −0.27 | 0.07 | −0.89 |
| 2911 | ATLVT012XX3030 | 47964 | TSEAAASSNDNT | −0.43 | −0.55 | 0.17 |
| 2912 | ATLVT012XX964 | 45898 | NSQTAAATNDNA | −0.2 | −1.31 | 0.75 |
| 2913 | ATLVT012XX2620 | 47554 | TGQAGASSNDNA | −1.28 | 0.59 | 0.15 |
| 2914 | ATLVT012XX2648 | 47582 | TGQSAASINDNH | −1.05 | 0.54 | −0.17 |
| 2915 | ATLVT012XX781 | 45715 | NSESAGASNDNA | −0.35 | −0.15 | −0.51 |
| 2916 | ATLVT012XX2169 | 47103 | SSTAAASINDNT | −0.04 | −0.48 | −0.59 |
| 2917 | ATLVT012XX1782 | 46716 | SSASAASSNDNT | −1.05 | −0.26 | 0.85 |
| 2918 | ATLVT012XX2598 | 47532 | TGQAAASSNDNT | −0.79 | −0.66 | 0.88 |
| 2919 | ATLVT012XX1422 | 46356 | SGETGASSNDNT | −1.42 | 0.6 | 0.35 |
| 2920 | ATLVT012XX485 | 45419 | NGTSAAATNDNH | −0.34 | −0.47 | −0.13 |
| 2921 | ATLVT012XX1583 | 46517 | SGTAAAASNDNH | −1.43 | 0.41 | 0.61 |
| 2922 | ATLVT012XX58 | 44992 | NGASAASTNDNA | −0.43 | −0.08 | −0.49 |
| 2923 | ATLVT012XX1846 | 46780 | SSATGAASNDNA | −0.15 | −0.32 | −0.66 |
| 2924 | ATLVT012XX1222 | 46156 | SGASGAASNDNA | −0.04 | −0.8 | −0.24 |
| 2925 | ATLVT012XX3103 | 48037 | TSESGASTNDNA | −2.03 | 1.95 | −0.4 |
| 2926 | ATLVT012XX1794 | 46728 | SSASAGSSNDNT | −0.17 | −0.93 | 0.12 |
| 2927 | ATLVT012XX2689 | 47623 | TGQTAAATNDNA | −0.81 | −0.11 | 0.15 |
| 2928 | ATLVT012XX2996 | 47930 | TSATAGSINDNH | −0.44 | −0.51 | 0.02 |
| 2929 | ATLVT012XX3233 | 48167 | TSQSAGSSNDNH | −0.83 | 0.26 | −0.31 |
| 2930 | ATLVT012XX402 | 45336 | NGQTAGAINDNT | 0.18 | −0.76 | −0.73 |
| 2931 | ATLVT012XX2574 | 47508 | TGETGASSNDNT | −0.71 | −0.98 | 1.07 |
| 2932 | ATLVT012XX2533 | 47467 | TGESGGATNDNA | −1.82 | 0.33 | 1.29 |
| 2933 | ATLVT012XX10 | 44944 | NGAAAASTNDNA | −1.88 | 0.9 | 0.66 |
| 2934 | ATLVT012XX751 | 45685 | NSEAGASSNDNA | −0.93 | −0.04 | 0.24 |
| 2935 | ATLVT012XX290 | 45224 | NGQAAAASNDNH | 0.14 | −1.83 | 0.71 |
| 2936 | ATLVT012XX3151 | 48085 | TSETGASINDNA | −0.59 | 0.02 | −0.44 |
| 2937 | ATLVT012XX2505 | 47439 | TGESAASTNDNT | −1.65 | 0.53 | 0.73 |
| 2938 | ATLVT012XX2302 | 47236 | TGAAAAASNDNA | −1.42 | 0.22 | 0.73 |
| 2939 | ATLVT012XX2451 | 47385 | TGEAAAATNDNT | −0.27 | −0.3 | −0.58 |
| 2940 | ATLVT012XX175 | 45109 | NGEAGASSNDNA | −0.39 | 0.67 | −1.63 |
| 2941 | ATLVT012XX724 | 45658 | NSEAAAATNDNA | −2.26 | 3.14 | −1.6 |
| 2942 | ATLVT012XX3133 | 48067 | TSETAGAINDNA | −1.07 | 0.44 | −0.17 |
| 2943 | ATLVT012XX156 | 45090 | NGEAAASTNDNT | −2.04 | 2.83 | −1.59 |
| 2944 | ATLVT012XX698 | 45632 | NSATGAASNDNH | −0.2 | −0.84 | −0.03 |
| 2945 | ATLVT012XX2170 | 47104 | SSTAAGASNDNA | −1.56 | 0.24 | 0.9 |
| 2946 | ATLVT012XX168 | 45102 | NGEAAGSINDNT | −0.82 | −0.95 | 1.16 |
| 2947 | ATLVT012XX2354 | 47288 | TGASAAATNDNH | −0.88 | 0.21 | −0.24 |
| 2948 | ATLVT012XX2477 | 47411 | TGEAGASSNDNH | −0.73 | 0.26 | −0.56 |
| 2949 | ATLVT012XX417 | 45351 | NGQTGASSNDNT | −1.45 | −0.68 | 1.88 |
| 2950 | ATLVT012XX844 | 45778 | NSETGAATNDNA | −0.79 | −0.42 | 0.42 |
| 2951 | ATLVT012XX1878 | 46812 | SSEAAASSNDNT | −0.38 | −0.72 | 0.08 |
| 2952 | ATLVT012XX1312 | 46246 | SGEAAGSSNDNA | −0.41 | −0.57 | −0.04 |
| 2953 | ATLVT012XX1980 | 46914 | SSETAGASNDNT | −0.67 | −0.09 | −0.22 |
| 2954 | ATLVT012XX2927 | 47861 | TSASAAASNDNH | −0.81 | −0.5 | 0.54 |
| 2955 | ATLVT012XX2658 | 47592 | TGQSAGSSNDNT | −0.84 | 0.63 | −0.86 |
| 2956 | ATLVT012XX3226 | 48160 | TSQSAGASNDNA | −0.98 | −0.26 | 0.51 |
| 2957 | ATLVT012XX59 | 44993 | NGASAASINDNH | −0.86 | 0.5 | −0.68 |
| 2958 | ATLVT012XX67 | 45001 | NGASAGSSNDNA | 0.68 | −1.31 | −0.99 |
| 2959 | ATLVT012XX3196 | 48130 | TSQAGASSNDNA | −1.01 | −0.25 | 0.53 |
| 2960 | ATLVT012XX2255 | 47189 | SSTTAAASNDNH | −1.71 | 1.54 | −0.55 |
| 2961 | ATLVT012XX3097 | 48031 | TSESGAATNDNA | −0.93 | −0.28 | 0.45 |
| 2962 | ATLVT012XX2455 | 47389 | TGEAAASTNDNA | −0.53 | 0.23 | −0.9 |
| 2963 | ATLVT012XX1929 | 46863 | SSESAASINDNT | −0.22 | −0.47 | −0.56 |
| 2964 | ATLVT012XX2641 | 47575 | TGQSAAATNDNA | −1.32 | 0.38 | 0.24 |
| 2965 | ATLVT012XX2995 | 47929 | TSATAGSINDNA | −1.15 | 0.48 | −0.18 |
| 2966 | ATLVT012XX1399 | 46333 | SGETAASTNDNA | −0.09 | −0.76 | −0.41 |
| 2967 | ATLVT012XX2500 | 47434 | TGESAASSNDNA | −1.84 | 1.02 | 0.29 |
| 2968 | ATLVT012XX1732 | 46666 | SSAAAASSNDNA | −0.19 | −0.83 | −0.15 |
| 2969 | ATLVT012XX3219 | 48153 | TSQSAAATNDNT | −1.36 | 0.05 | 0.72 |
| 2970 | ATLVT012XX1988 | 46922 | SSETAGSTNDNH | −0.68 | −0.24 | −0.08 |
| 2971 | ATLVT012XX1893 | 46827 | SSEAAGSINDNT | −0.8 | 0.6 | −0.97 |
| 2972 | ATLVT012XX2262 | 47196 | SSTTAASSNDNT | −1.24 | 0.89 | −0.6 |
| 2973 | ATLVT012XX2591 | 47525 | TGQAAAASNDNH | −1.81 | −0.36 | 1.99 |
| 2974 | ATLVT012XX577 | 45511 | NSAAAAASNDNA | 0.54 | −1.68 | −0.33 |
| 2975 | ATLVT012XX157 | 45091 | NGEAAGASNDNA | −0.9 | −0.83 | 1.03 |
| 2976 | ATLVT012XX922 | 45856 | NSQSAASTNDNA | −0.24 | −0.4 | −0.66 |
| 2977 | ATLVT012XX784 | 45718 | NSESAGATNDNA | −0.67 | 0.27 | −0.77 |
| 2978 | ATLVT012XX2548 | 47482 | TGETAASSNDNA | −1.03 | 0.16 | −0.03 |
| 2979 | ATLVT012XX2258 | 47192 | SSTTAAATNDNH | −0.83 | 1.1 | −1.6 |
| 2980 | ATLVT012XX61 | 44995 | NGASAGASNDNA | −0.66 | −0.15 | −0.28 |
| 2981 | ATLVT012XX1777 | 46711 | SSASAAATNDNA | 0.03 | −0.69 | −0.78 |
| 2982 | ATLVT012XX875 | 45809 | NSQAAASTNDNH | −1.19 | 0.73 | −0.53 |
| 2983 | ATLVT012XX2460 | 47394 | TGEAAGASNDNT | −1.47 | 0.64 | 0.08 |
| 2984 | ATLVT012XX787 | 45721 | NSESAGSSNDNA | −0.74 | −0.76 | 0.61 |
| 2985 | ATLVT012XX1843 | 46777 | SSATAGSINDNA | 0.06 | −0.52 | −1.06 |
| 2986 | ATLVT012XX2983 | 47917 | TSATAASTNDNA | −0.69 | 0.14 | −0.65 |
| 2987 | ATLVT012XX1535 | 46469 | SGQTAAASNDNH | −0.65 | −1.05 | 0.82 |
| 2988 | ATLVT012XX1266 | 46200 | SGATAGSSNDNT | −0.41 | −0.08 | −0.84 |
| 2989 | ATLVT012XX183 | 45117 | NGEAGGASNDNT | 0.26 | −0.92 | −0.93 |
| 2990 | ATLVT012XX1445 | 46379 | SGQAAASSNDNH | −0.6 | −0.59 | 0.14 |
| 2991 | ATLVT012XX2410 | 47344 | TGATAGASNDNA | −1.01 | −0.16 | 0.28 |
| 2992 | ATLVT012XX2425 | 47359 | TGATGAATNDNA | −1.27 | 0.17 | 0.3 |
| 2993 | ATLVT012XX1774 | 46708 | SSASAAASNDNA | 0.24 | −0.88 | −0.94 |
| 2994 | ATLVT012XX2073 | 47007 | SSQSAASINDNT | −0.13 | −1.39 | 0.35 |
| 2995 | ATLVT012XX345 | 45279 | NGQSAASSNDNT | −2.51 | 2.68 | −0.84 |
| 2996 | ATLVT012XX985 | 45919 | NSQTGAASNDNA | −0.86 | −0.36 | 0.24 |
| 2997 | ATLVT012XX2018 | 46952 | SSQAAAATNDNH | −1.47 | −0.78 | 1.83 |
| 2998 | ATLVT012XX2742 | 47676 | TGTAAASSNDNT | −1.36 | −0.5 | 1.27 |
| 2999 | ATLVT012XX740 | 45674 | NSEAAGSSNDNH | −1.27 | 0.5 | −0.18 |
| 3000 | ATLVT012XX2122 | 47056 | SSQTAGASNDNA | −1.37 | −0.22 | 0.92 |
| 3001 | ATLVT012XX1442 | 46376 | SGQAAAATNDNH | −1.65 | −0.31 | 1.52 |
| 3002 | ATLVT012XX1324 | 46258 | SGEAGASSNDNA | 0.91 | −1.23 | −1.71 |
| 3003 | ATLVT012XX1990 | 46924 | SSETGAASNDNA | −0.18 | −1.34 | 0.29 |
| 3004 | ATLVT012XX742 | 45676 | NSEAAGSINDNA | −1.2 | 0.73 | −0.61 |
| 3005 | ATLVT012XX532 | 45466 | NGTTAAATNDNA | −1.11 | −0.14 | 0.36 |
| 3006 | ATLVT012XX2882 | 47816 | TSAAAAATNDNH | −1.24 | 0.46 | −0.2 |
| 3007 | ATLVT012XX821 | 45755 | NSETAAATNDNH | −0.56 | 0.02 | −0.81 |
| 3008 | ATLVT012XX2167 | 47101 | SSTAAASINDNA | −1 | −0.51 | 0.63 |
| 3009 | ATLVT012XX1636 | 46570 | SGTSAASSNDNA | −0.98 | 0 | −0.07 |
| 3010 | ATLVT012XX358 | 45292 | NGQSAGSTNDNA | −1 | 0.02 | −0.07 |
| 3011 | ATLVT012XX254 | 45188 | NGETAGASNDNH | −1.4 | 0.59 | −0.12 |
| 3012 | ATLVT012XX3197 | 48131 | TSQAGASSNDNH | −0.92 | −0.26 | 0.13 |
| 3013 | ATLVT012XX1301 | 46235 | SGEAAASSNDNH | −0.57 | −0.62 | −0.01 |
| 3014 | ATLVT012XX635 | 45569 | NSASAASTNDNH | −1.19 | 0.96 | −0.95 |
| 3015 | ATLVT012XX3169 | 48103 | TSQAAAATNDNA | −1.3 | −0.99 | 1.71 |
| 3016 | ATLVT012XX3224 | 48158 | TSQSAASINDNH | −0.84 | −0.1 | −0.21 |
| 3017 | ATLVT012XX14 | 44948 | NGAAAGASNDNH | −1.06 | −0.23 | 0.33 |
| 3018 | ATLVT012XX3406 | 48340 | TSTTAAASNDNA | −0.39 | −0.58 | −0.39 |
| 3019 | ATLVT012XX1491 | 46425 | SGQSAAATNDNT | −0.12 | −1.07 | −0.22 |
| 3020 | ATLVT012XX152 | 45086 | NGEAAASSNDNH | −0.88 | 0.22 | −0.57 |
| 3021 | ATLVT012XX2502 | 47436 | TGESAASSNDNT | −1.54 | 0.7 | −0.06 |
| 3022 | ATLVT012XX280 | 45214 | NGETGGATNDNA | −1.33 | 0.28 | 0.1 |
| 3023 | ATLVT012XX777 | 45711 | NSESAASSNDNT | −0.39 | −0.16 | −0.96 |
| 3024 | ATLVT012XX2738 | 47672 | TGTAAAATNDNH | −1.48 | −0.18 | 0.93 |
| 3025 | ATLVT012XX3074 | 48008 | TSESAAATNDNH | −1.01 | 0 | −0.09 |
| 3026 | ATLVT012XX2166 | 47100 | SSTAAASSNDNT | −0.74 | −0.42 | −0.02 |
| 3027 | ATLVT012XX994 | 45928 | NSQTGASINDNA | −0.62 | 0.61 | −1.55 |
| 3028 | ATLVT012XX587 | 45521 | NSAAAASINDNH | −2.13 | 0.56 | 1.09 |
| 3029 | ATLVT012XX3043 | 47977 | TSEAAGSINDNA | −1.63 | 0.26 | 0.62 |
| 3030 | ATLVT012XX2670 | 47604 | TGQSGASSNDNT | −1.81 | −0.42 | 1.8 |
| 3031 | ATLVT012XX1414 | 46348 | SGETGAASNDNA | −1.46 | −0.08 | 0.76 |
| 3032 | ATLVT012XX2934 | 47868 | TSASAASSNDNT | −0.58 | −0.87 | 0.26 |
| 3033 | ATLVT012XX102 | 45036 | NGATAAATNDNT | −1.3 | 0.6 | −0.41 |
| 3034 | ATLVT012XX2508 | 47442 | TGESAGASNDNT | −2.28 | 0.1 | 1.91 |
| 3035 | ATLVT012XX1448 | 46382 | SGQAAASTNDNH | 0.64 | −1.28 | −1.34 |
| 3036 | ATLVT012XX296 | 45230 | NGQAAASSNDNH | −0.46 | −0.4 | −0.6 |
| 3037 | ATLVT012XX961 | 45895 | NSQTAAASNDNA | −0.39 | −0.98 | 0.03 |
| 3038 | ATLVT012XX2688 | 47622 | TGQTAAASNDNT | −0.66 | −1.31 | 0.92 |
| 3039 | ATLVT012XX2272 | 47206 | SSTTAGSSNDNA | −0.17 | −0.43 | −1.06 |
| 3040 | ATLVT012XX2643 | 47577 | TGQSAAATNDNT | −1.88 | 0.08 | 1.22 |
| 3041 | ATLVT012XX3026 | 47960 | TSEAAAATNDNH | −0.38 | −0.95 | −0.04 |
| 3042 | ATLVT012XX753 | 45687 | NSEAGASSNDNT | −1.65 | 0.44 | 0.34 |
| 3043 | ATLVT012XX2494 | 47428 | TGESAAASNDNA | -2.28 | 1.33 | 0.28 |
| 3044 | ATLVT012XX227 | 45161 | NGESGASTNDNH | −0.94 | 0.58 | −1.06 |
| 3045 | ATLVT012XX1362 | 46296 | SGESAGSSNDNT | −1.8 | 0.9 | −0.02 |
| 3046 | ATLVT012XX2590 | 47524 | TGQAAAASNDNA | −1.22 | −0.77 | 1.11 |
| 3047 | ATLVT012XX2601 | 47535 | TGQAAASTNDNT | −0.98 | −0.78 | 0.71 |
| 3048 | ATLVT012XX1012 | 45946 | NSTAAAATNDNA | −1.3 | −1.13 | 1.71 |
| 3049 | ATLVT012XX1251 | 46185 | SGATAAATNDNT | 0 | −1.19 | −0.46 |
| 3050 | ATLVT012XX829 | 45763 | NSETAGASNDNA | −1.52 | 0.46 | 0.02 |
| 3051 | ATLVT012XX1837 | 46771 | SSATAGATNDNA | 0.15 | −0.6 | −1.47 |
| 3052 | ATLVT012XX2766 | 47700 | IGTAGASSNDNT | −1.25 | −0.44 | 0.73 |
| 3053 | ATLVT012XX3311 | 48245 | TSTAAAASNDNH | −1.53 | 0.77 | −0.35 |
| 3054 | ATLVT012XX2614 | 47548 | TGQAGAASNDNA | −1.66 | 0.56 | 0.15 |
| 3055 | ATLVT012XX2019 | 46953 | SSQAAAAINDNT | −1.5 | −1.33 | 2.28 |
| 3056 | ATLVT012XX2839 | 47773 | TGTTAASINDNA | -1.94 | 0.62 | 0.52 |
| 3057 | ATLVT012XX2353 | 47287 | TGASAAATNDNA | −1.25 | 0.05 | 0.07 |
| 3058 | ATLVT012XX3080 | 48014 | TSESAASTNDNH | −1.84 | 0.9 | −0.02 |
| 3059 | ATLVT012XX2358 | 47292 | TGASAASSNDNT | −2.42 | 1.19 | 0.59 |
| 3060 | ATLVT012XX220 | 45154 | NGESGAATNDNA | −0.51 | −1.21 | 0.4 |
| 3061 | ATLVT012XX2547 | 47481 | TGETAAATNDNT | 0.34 | −1.35 | −0.88 |
| 3062 | ATLVT012XX2448 | 47382 | TGEAAAASNDNT | −0.48 | −0.83 | −0.14 |
| 3063 | ATLVT012XX195 | 45129 | NGESAAASNDNT | −1.42 | −1.23 | 1.97 |
| 3064 | ATLVT012XX1486 | 46420 | SGQSAAASNDNA | 0.61 | −1.49 | −1.17 |
| 3065 | ATLVT012XX2701 | 47635 | TGQTAGAINDNA | −0.79 | −0.61 | 0.07 |
| 3066 | ATLVT012XX3132 | 48066 | TSETAGASNDNT | −1.44 | 0.3 | 0 |
| 3067 | ATLVT012XX831 | 45765 | NSETAGASNDNT | −0.6 | −0.17 | −0.83 |
| 3068 | ATLVT012XX2879 | 47813 | TSAAAAASNDNH | −1.09 | −0.08 | −0.1 |
| 3069 | ATLVT012XX2467 | 47401 | TGEAAGSTNDNA | −1.09 | 0.1 | −0.34 |
| 3070 | ATLVT012XX2785 | 47719 | TGTSAAATNDNA | −0.77 | −0.47 | −0.19 |
| 3071 | ATLVT012XX993 | 45927 | NSQTGASSNDNT | 0.06 | −0.94 | −1.02 |
| 3072 | ATLVT012XX2476 | 47410 | TGEAGASSNDNA | −0.49 | −0.12 | −1.13 |
| 3073 | ATLVT012XX3412 | 48346 | TSTTAASSNDNA | −1.94 | 0.11 | 1.07 |
| 3074 | ATLVT012XX2176 | 47110 | SSTAAGSSNDNA | −1.15 | −0.64 | 0.66 |
| 3075 | ATLVT012XX153 | 45087 | NGEAAASSNDNT | 0.09 | −0.83 | −1.24 |
| 3076 | ATLVT012XX804 | 45738 | NSESGASTNDNT | 0.92 | −2.12 | −0.99 |
| 3077 | ATLVT012XX3032 | 47966 | TSEAAASINDNH | −1.12 | −0.18 | 0.01 |
| 3078 | ATLVT012XX3072 | 48006 | TSESAAASNDNT | −1.71 | −0.1 | 0.9 |
| 3079 | ATLVT012XX1323 | 46257 | SGEAGAATNDNT | 1.1 | −1.12 | 1.16 |
| 3080 | ATLVT012XX1447 | 46381 | SGQAAASTNDNA | −0.47 | −1.3 | 0.29 |
| 3081 | ATLVT012XX105 | 45039 | NGATAASSNDNT | −1.38 | 0.1 | 0.06 |
| 3082 | ATLVT012XX823 | 45757 | NSETAASSNDNA | −1.35 | 1.18 | −1.39 |
| 3083 | ATLVT012XX2997 | 47931 | TSATAGSINDNT | −1.22 | −0.38 | 0.38 |
| 3084 | ATLVT012XX2206 | 47140 | SSTSAAASNDNA | −0.61 | −0.39 | −0.66 |
| 3085 | ATLVT012XX2744 | 47678 | TGTAAASTNDNH | −1.36 | −0.87 | 1.26 |
| 3086 | ATLVT012XX172 | 45106 | NGEAGAATNDNA | −0.36 | −0.73 | −0.64 |
| 3087 | ATLVT012XX486 | 45420 | NGTSAAATNDNT | −1 | −0.86 | 0.62 |
| 3088 | ATLVT012XX1887 | 46821 | SSEAAGATNDNT | −1.3 | 0.04 | −0.03 |
| 3089 | ATLVT012XX1206 | 46140 | SGASAASSNDNT | −0.85 | −0.7 | 0.14 |
| 3090 | ATLVT012XX2022 | 46956 | SSQAAASSNDNT | −1.71 | −0.25 | 1.03 |
| 3091 | ATLVT012XX1930 | 46864 | SSESAGASNDNA | −1.57 | 0.16 | 0.25 |
| 3092 | ATLVT012XX2159 | 47093 | SSTAAAASNDNH | −2.25 | 1.16 | 0.12 |
| 3093 | ATLVT012XX633 | 45567 | NSASAASSNDNT | −1.58 | −0.11 | 0.59 |
| 3094 | ATLVT012XX1950 | 46884 | SSESGASSNDNT | −1.2 | −0.43 | 0.36 |
| 3095 | ATLVT012XX203 | 45137 | NGESAASINDNH | −1.2 | 0.38 | −0.69 |
| 3096 | ATLVT012XX2623 | 47557 | TGQAGASINDNA | −1.83 | −0.24 | 1.16 |
| 3097 | ATLVT012XX3006 | 47940 | TSATGASSNDNT | −1.05 | −0.27 | −0.15 |
| 3098 | ATLVT012XX357 | 45291 | NGQSAGSSNDNT | −1.62 | 0.4 | 0.03 |
| 3099 | ATLVT012XX2710 | 47644 | TGQTGAASNDNA | −1.42 | −0.53 | 0.82 |
| 3100 | ATLVT012XX313 | 45247 | NGQAGAASNDNA | −0.22 | −1.1 | −0.51 |
| 3101 | ATLVT012XX1785 | 46719 | SSASAASTNDNT | −0.48 | −0.32 | −1.07 |
| 3102 | ATLVT012XX3310 | 48244 | TSTAAAASNDNA | −1.11 | −0.13 | −0.23 |
| 3103 | ATLVT012XX732 | 45666 | NSEAAASTNDNT | −2.86 | 3.02 | −1.29 |
| 3104 | ATLVT012XX991 | 45925 | NSQTGASSNDNA | −0.19 | −0.8 | −0.96 |
| 3105 | ATLVT012XX3028 | 47962 | TSEAAASSNDNA | −0.99 | −0.23 | −0.32 |
| 3106 | ATLVT012XX103 | 45037 | NGATAASSNDNA | −0.39 | −0.14 | −1.48 |
| 3107 | ATLVT012XX3054 | 47988 | TSEAGASSNDNT | −1.3 | −0.68 | 0.77 |
| 3108 | ATLVT012XX2565 | 47499 | TGETAGSINDNT | −0.29 | −0.53 | −1.16 |
| 3109 | ATLVT012XX782 | 45716 | NSESAGASNDNH | −1.11 | −0.01 | −0.41 |
| 3110 | ATLVT012XX1877 | 46811 | SSEAAASSNDNH | −0.89 | −0.4 | −0.31 |
| 3111 | ATLVT012XX3156 | 48090 | TSETGGASNDNT | −0.88 | 0.11 | −0.98 |
| 3112 | ATLVT01XXX1920 | 46854 | SSESAAASNDNT | −1.05 | −0.33 | −0.13 |
| 3113 | ATLVT012XX64 | 44998 | NGASAGATNDNA | −0.99 | −0.06 | −0.58 |
| 3114 | ATLVT012XX583 | 45517 | NSAAAASSNDNA | −0.98 | −0.37 | −0.21 |
| 3115 | ATLVT012XX921 | 45855 | NSQSAASSNDNT | −0.64 | −0.75 | −0.31 |
| 3116 | ATLVT012XX852 | 45786 | NSETGASTNDNT | −0.39 | −0.01 | −1.71 |
| 3117 | ATLVT012XX919 | 45853 | NSQSAASSNDNA | 0.16 | −1.06 | −1.27 |
| 3118 | ATLVT012XX223 | 45157 | NGESGASSNDNA | −0.5 | −0.97 | −0.27 |
| 3119 | ATLVT012XX2696 | 47630 | TGQTAASTNDNH | −1.11 | −0.04 | −0.43 |
| 3120 | ATLVT012XX2419 | 47353 | TGATAGSINDNA | −1.08 | −0.61 | 0.24 |
| 3121 | ATLVT012XX538 | 45472 | NGTTAASTNDNA | −1.93 | 0.21 | 0.64 |
| 3122 | ATLVT012XX1734 | 46668 | SSAAAASSNDNT | −1.51 | 0.06 | 0.11 |
| 3123 | ATLVT012XX1855 | 46789 | SSATGASTNDNA | −0.02 | −0.86 | −1.27 |
| 3124 | ATLVT012XX170 | 45104 | NGEAGAASNDNH | −0.49 | −0.77 | −0.59 |
| 3125 | ATLVT012XX2067 | 47001 | SSQSAAATNDNT | −0.73 | −1.51 | 0.75 |
| 3126 | ATLVT012XX271 | 45205 | NGETGASSNDNA | −1.2 | 0.21 | −0.65 |
| 3127 | ATLVT012XX1778 | 46712 | SSASAAATNDNH | −0.4 | −0.12 | −1.6 |
| 3128 | ATLVT012XX1949 | 46883 | SSESGASSNDNH | −0.83 | −0.36 | −0.56 |
| 3129 | ATLVT012XX676 | 45610 | NSATAAATNDNA | −0.8 | −0.84 | −0.01 |
| 3130 | ATLVT012XX352 | 45286 | NGQSAGATNDNA | −1.88 | 0.81 | −0.27 |
| 3131 | ATLVT012XX2686 | 47620 | TGQTAAASNDNA | −0.82 | −0.87 | 0.07 |
| 3132 | ATLVT012XX726 | 45660 | NSEAAAATNDNT | −2.06 | 1.72 | −1.16 |
| 3133 | ATLVT012XX2575 | 47509 | TGETGASINDNA | −1.1 | −0.88 | 0.54 |
| 3134 | ATLVT012XX2352 | 47286 | TGASAAASNDNT | −1.39 | −0.7 | 0.8 |
| 3135 | ATLVT012XX828 | 45762 | NSETAASTNDNT | −0.6 | −0.49 | −0.81 |
| 3136 | ATLVT012XX2886 | 47820 | TSAAAASSNDNT | −1.63 | 0.35 | −0.15 |
| 3137 | ATLVT012XX264 | 45198 | NGETAGSINDNT | −1.85 | 1.49 | −1.24 |
| 3138 | ATLVT012XX179 | 45113 | NGEAGASTNDNH | −0.29 | −0.49 | −1.38 |
| 3139 | ATLVT012XX344 | 45278 | NGQSAASSNDNH | −1.71 | 0.2 | 0.16 |
| 3140 | ATLVT012XX3315 | 48249 | TSTAAAATNDNT | −1.69 | 0.34 | −0.05 |
| 3141 | ATLVT012XX634 | 45568 | NSASAASINDNA | −1.37 | 0.81 | −1.2 |
| 3142 | ATLVT012XX835 | 45769 | NSETAGSSNDNA | −0.71 | −0.86 | −0.2 |
| 3143 | ATLVT012XX1446 | 46380 | SGQAAASSNDNI | −0.21 | 1.73 | 0.06 |
| 3144 | ATLVT012XX5 | 44939 | NGAAAAATNDNH | −1.66 | 0.08 | 0.2 |
| 3145 | ATLVT012XX1873 | 46807 | SSEAAAATNDNA | −2.1 | −0.02 | 1.07 |
| 3146 | ATLVT012XX2687 | 47621 | TGQTAAASNDNH | −0.96 | −1.13 | 0.54 |
| 3147 | ATLVT012XX18 | 44952 | NGAAAGAINDNT | −1.63 | −0.22 | 0.53 |
| 3148 | ATLVT012XX245 | 45179 | NGETAAATNDNH | −0.43 | −0.2 | −1.57 |
| 3149 | ATLVT012XX397 | 45331 | NGQTAGASNDNA | −1.15 | 0.11 | −0.73 |
| 3150 | ATLVT012XX2554 | 47488 | TGETAGASNDNA | −1.34 | 0.15 | −0.47 |
| 3151 | ATLVT012XX1297 | 46231 | SGEAAAATNDNA | −1.42 | −0.05 | −0.08 |
| 3152 | ATLVT012XX1984 | 46918 | SSETAGSSNDNA | −0.7 | −0.52 | −0.7 |
| 3153 | ATLVT012XX1537 | 46471 | SGQTAAATNDNA | −0.81 | −1.21 | 0.36 |
| 3154 | ATLVT012XX435 | 45369 | NGTAAAASNDNT | −1.4 | −1.03 | 1.13 |
| 3155 | ATLVT012XX208 | 45142 | NGESAGATNDNA | −1.67 | −1.22 | 1.83 |
| 3156 | ATLVT012XX1255 | 46189 | SGATAASTNDNA | −0.74 | −0.43 | −0.78 |
| 3157 | ATLVT012XX396 | 45330 | NGQTAASINDNT | −1.51 | −0.74 | 0.94 |
| 3158 | ATLVT012XX1 | 44935 | NGAAAAASNDNA | −1.57 | −0.07 | 0.16 |
| 3159 | ATLVT012XX1260 | 46194 | SGATAGASNDNT | −0.43 | −0.84 | −0.8 |
| 3160 | ATLVT012XX1871 | 46805 | SSEAAAASNDNH | −1.46 | −0.54 | 0.58 |
| 3161 | ATLVT012XX749 | 45683 | NSEAGAATNDNH | −1.39 | −0.01 | −0.23 |
| 3162 | ATLVT012XX346 | 45280 | NGQSAASINDNA | −1.95 | 0.82 | −0.35 |
| 3163 | ATLVT012XX830 | 45764 | NSETAGASNDNH | −1 | −0.49 | −0.28 |
| 3164 | ATLVT012XX3033 | 47967 | TSEAAASTNQNT | −1.36 | −0.21 | −0.04 |
| 3165 | ATLVT012XX248 | 45182 | NGETAASSNDNH | −0.64 | 0.08 | −1.65 |
| 3166 | ATLVT012XX420 | 45354 | NG?TGASTNDNT | −1.79 | −0.12 | 0.58 |
| 3167 | ATLVT012XX2561 | 47495 | TGETAGSSNDNH | −1.15 | −0.05 | −0.64 |
| 3168 | ATLVT012XX1822 | 46756 | SSATAAASNDNA | −0.63 | −0.39 | −1.1 |
| 3169 | ATLVT012XX2655 | 47589 | TGQSAGATNDNT | −1.04 | −0.36 | −0.44 |
| 3170 | ATLVT012XX3137 | 48071 | TSETAGSSNDNH | −1.16 | −0.3 | −0.32 |
| 3171 | ATLVT012XX2256 | 47190 | SSTTAAASNDNT | −0.92 | −0.83 | −0.06 |
| 3172 | ATLVT012XX3129 | 48063 | TSETAASTNDNT | −0.11 | −1.45 | −0.67 |
| 3173 | ATLVT012XX728 | 45662 | NSEAAASSNDNH | −1.66 | 0.84 | −0.95 |
| 3174 | ATLVT012XX3316 | 48250 | TSTAAASSNDNA | −0.82 | −0.52 | −0.67 |
| 3175 | ATLVT012XX3087 | 48021 | TSESAGAINDNT | −1.76 | −0.16 | 0.46 |
| 3176 | ATLVT012XX70 | 45004 | NGASAGSTNDNA | 0.93 | −0.92 | 0.01 |
| 3177 | ATLVT012XX1542 | 46476 | SGQTAASSNQNT | −1.39 | −0.74 | 0.57 |
| 3178 | ATLVT012XX1536 | 46470 | SGQTAAASNDNT | −0.83 | −1.25 | 0.26 |
| 3179 | ATLVT012XX2447 | 47381 | TGEAAAASNDNH | −0.83 | −0.63 | −0.56 |
| 3180 | ATLVT012XX975 | 45909 | NSQTAGASNDNT | −0.31 | −1.15 | −0.77 |
| 3181 | ATLVT012XX3409 | 48343 | TSTTAAATNDNA | −1.35 | 0.13 | −0.65 |
| 3182 | ATLVT012XX3027 | 47961 | TSEAAAATNDNT | −1.58 | −0.62 | 0.7 |
| 3183 | ATLVT012XX273 | 45207 | NGETGASSNDNT | 0.2 | −1.72 | −0.95 |
| 3184 | ATLVT012XX748 | 45682 | NSEAGAATNDNA | −1.89 | 0.31 | 0.02 |
| 3185 | ATLVT012XX2400 | 47334 | TGATAAASNDNT | −1.91 | −0.2 | 0.71 |
| 3186 | ATLVT012XX2458 | 47392 | TGEAAGASNDNA | −2.23 | −0.54 | 1.69 |
| 3187 | ATLVT012XX2023 | 46957 | SSQAAASTNDNA | −1.67 | −0.36 | 0.5 |
| 3188 | ATLVT012XX2991 | 47925 | TSATAGAINDNT | −1.46 | −0.38 | 0.15 |
| 3189 | ATLVT012XX3122 | 48056 | TSETAAATNDNH | −0.8 | −0.86 | −0.37 |
| 3190 | ATLVT012XX2989 | 47923 | TSATAGAINDNA | −1.48 | −0.45 | 0.26 |
| 3191 | ATLVT012XX825 | 45759 | NSETAASSNDNT | −0.75 | −0.16 | −1.39 |
| 3192 | ATLVT012XX2856 | 47790 | TGTTGAASNDNT | 1.27 | −0.18 | −0.48 |
| 3193 | ATLVT012XX256 | 45190 | NGETAGAINDNA | −1.51 | 0.35 | −0.74 |
| 3194 | ATLVT012XX3078 | 48012 | TSESAASSNDNT | −1.91 | −0.24 | 0.68 |
| 3195 | ATLVT012XX3071 | 48005 | TSESAAASNDNH | −2.07 | −0.02 | 0.67 |
| 3196 | ATLVT012XX1989 | 46923 | SSETAGSINDNT | −1.25 | −0.63 | 0.05 |
| 3197 | ATLVT012XX769 | 45703 | NSESAAASNDNA | −0.99 | −0.53 | −0.53 |
| 3198 | ATLVT012XX868 | 45802 | NSQAAAATNDNA | −1.44 | −0.67 | 0.4 |
| 3199 | ATLVT012XX1325 | 46259 | SGEAGASSNDNH | −0.68 | −0.48 | −1.15 |
| 3200 | ATLVT012XX1398 | 46332 | SGETAASSNQNT | −1.16 | −0.55 | −0.23 |
| 3201 | ATLVT012XX1854 | 46788 | SSATGASSNDNT | −0.8 | −0.56 | −0.84 |
| 3202 | ATLVT012XX181 | 45115 | NGEAGGASNDNA | −0.53 | −0.64 | −1.21 |
| 3203 | ATLVT012XX194 | 45128 | NGESAAASNDNH | −1.31 | −1.34 | 1.02 |
| 3204 | ATLVT012XX2646 | 47580 | TGQSAASSNDNT | −1.84 | −0.04 | 0.25 |
| 3205 | ATLVT012XX130 | 45064 | NGATGASTNDNA | −1.36 | −0.03 | −0.59 |
| 3206 | ATLVT012XX1360 | 46294 | SGESAGSSNDNA | −0.82 | −0.38 | −1.07 |
| 3207 | ATLVT012XX2976 | 47910 | TSATAAASNDNT | −1.22 | −0.26 | −0.55 |
| 3208 | ATLVT012XX1641 | 46575 | SGTSAASINDNT | −0.24 | −1.56 | −0.56 |
| 3209 | ATLVT012XX1852 | 46786 | SSATGASSNDNA | −0.34 | −0.9 | −1.24 |
| 3210 | ATLVT012XX2428 | 47362 | TGATGASSNDNA | −1.87 | −0.06 | 0.29 |
| 3211 | ATLVT012XX2814 | 47748 | TGTSGASSNDNT | −1.78 | 0.59 | −0.69 |
| 3212 | ATLVT012XX747 | 45681 | NSEAGAASNDNT | −0.97 | −0.76 | −0.37 |
| 3213 | ATLVT012XX3198 | 48132 | TSQAGASSNDNT | −1.12 | −0.88 | 0.05 |
| 3214 | ATLVT012XX1356 | 46290 | SGESAGASNDNT | −0.99 | −0.71 | −0.4 |
| 3215 | ATLVT012XX780 | 45714 | NSESAASTNDNT | −1.2 | 0.41 | −1.48 |
| 3216 | ATLVT012XX1890 | 46824 | SSEAAGSSNDNT | −1.09 | −0.68 | −0.29 |
| 3217 | ATLVT012XX2993 | 47927 | TSATAGSSNDNH | −1.07 | −0.5 | −0.57 |
| 3218 | ATLVT012XX52 | 44986 | NGASAAATNDNA | −1.24 | −0.55 | −0.21 |
| 3219 | ATLVT012XX2499 | 47433 | TGESAAATNDNT | −1.47 | −0.24 | −0.23 |
| 3220 | ATLVT012XX970 | 45904 | NSQTAASINDNA | −0.8 | −1.46 | 0.17 |
| 3221 | ATLVT012XX2928 | 47862 | TSASAAASNDNT | −1.11 | −0.94 | 0.03 |
| 3222 | ATLVT012XX1999 | 46933 | SSETGASTNDNA | −0.39 | −0.66 | −1.56 |
| 3223 | ATLVT012XX917 | 45851 | NSQSAAATNDNH | −0.4 | −0.9 | −1.24 |
| 3224 | ATLVT012XX874 | 45808 | NSQAAASINDNA | −1.44 | −0.36 | −0.16 |
| 3225 | ATLVT012XX2518 | 47452 | TGESGAASNDNA | −1.92 | 0.09 | 0.09 |
| 3226 | ATLVT012XX155 | 45089 | NGEAAASTNDNH | −1.08 | 0.1 | −1.39 |
| 3227 | ATLVT012XX299 | 45233 | NGQAAASINDNH | −0.06 | −1.31 | −1.31 |
| 3228 | ATLVT012XX2525 | 47459 | TGESGASSNDNH | −2.37 | −0.08 | 1.04 |
| 3229 | ATLVT012XX2980 | 47914 | TSATAASSNDNA | −0.76 | −0.6 | −1.05 |
| 3230 | ATLVT012XX1320 | 46254 | SGEAGAASNDNT | −0.64 | −1.34 | −0.3 |
| 3231 | ATLVT012XX817 | 45751 | NSETAAASNDNA | −1.48 | 0.02 | −0.62 |
| 3232 | ATLVT012XX347 | 45281 | NGQSAASINDNH | −1.45 | 0.18 | −0.87 |
| 3233 | ATLVT012XX270 | 45204 | NGETGAATNDNT | −1.68 | −1.21 | 1.3 |
| 3234 | ATLVT012XX2596 | 47530 | TGQAAASSNDNA | −1.2. | −0.66 | −0.21 |
| 3235 | ATLVT012XX1919 | 46853 | SSESAAASNDNH | −0.88 | −1.31 | 0.04 |
| 3236 | ATLVT012XX1932 | 46866 | SSESAGASNDNT | −1.82 | −0.07 | 0.04 |
| 3237 | ATLVT012XX2649 | 47583 | TGQSAASTNDNT | −1.66 | −0.21 | −0.07 |
| 3238 | ATLVT012XX409 | 45343 | NGQTGAASNDNA | −0.82 | −1.04 | −0.45 |
| 3239 | ATLVT012XX1327 | 46261 | SGEAGASINDNA | 0.57 | −2.04 | −1.56 |
| 3240 | ATLVT012XX3318 | 48252 | TSTAAASSNDNT | −0.98 | −1.01 | −0.22 |
| 3241 | ATLVT012XX1876 | 46810 | SSEAAASSNDNA | −0.66 | −0.84 | −0.99 |
| 3242 | ATLVT012XX1390 | 46324 | SGETAAASNDNA | −0.42 | −1.03 | −1.17 |
| 3243 | ATLVT012XX682 | 45616 | NSATAASINDNA | −0.91 | −1.2 | −0.1 |
| 3244 | ATLVT012XX750 | 45684 | NSEAGAATNDNT | −1.34 | −0.71 | −0.02 |
| 3245 | ATLVT012XX1733 | 46667 | SSAAAASSNDNH | −1.97 | 0.64 | −0.67 |
| 3246 | ATLVT012XX697 | 45631 | NSATGAASNDNA | −0.65 | −1.7 | 0.06 |
| 3247 | ATLVT012XX1302 | 46236 | SGEAAASSNDNT | −1.94 | −2.06 | 2.73 |
| 3248 | ATLVT012XX2128 | 47062 | SSQTAGSSNDNA | −0.57 | −1.5 | −0.34 |
| 3249 | ATLVT012XX1975 | 46909 | SSETAASTNDNA | −1.85 | −1.44 | 1.78 |
| 3250 | ATLVT012XX741 | 45675 | NSEAAGSSNDNT | −2.42 | 1.13 | −0.57 |
| 3251 | ATLVT012XX196 | 45130 | NGESAAATNDNA | −2.11 | −0.74 | 1.31 |
| 3252 | ATLVT012XX2430 | 47364 | TGATGASSNDNT | −2.53 | 0.32 | 0.64 |
| 3253 | ATLVT012XX2481 | 47415 | TGEAGASINDNT | −0.71 | −1.41 | −0.26 |
| 3254 | ATLVT012XX57 | 44991 | NGASAASSNDNT | −1.14 | −0.96 | −0.1 |
| 3255 | ATLVT012XX3105 | 48039 | TSESGASTNDNT | −1.95 | −0.36 | 0.51 |
| 3256 | ATLVT012XX598 | 45532 | NSAAAGSTNDNA | −1.59 | −0.13 | −0.42 |
| 3257 | ATLVT012XX632 | 45566 | NSASAASSNDNH | −1.43 | −0.69 | 0.03 |
| 3258 | ATLVT012XX1304 | 46238 | SGEAAASTNQNH | −0.48 | −1.06 | −1.12 |
| 3259 | ATLVT012XX3168 | 48102 | TSQAAAASNDNT | −1.43 | −1.16 | 0.6 |
| 3260 | ATLVT012XX3131 | 48065 | TSETAGASNDNH | −1.48 | −0.47 | −0.21 |
| 3261 | ATLVT012XX2466 | 47400 | TGEAAGSSNDNT | −2 | 0.14 | −0.14 |
| 3262 | ATLVT012XX3085 | 48019 | TSESAGATNDNA | −2.36 | 0.3 | 0.28 |
| 3263 | ATLVT012XX625 | 45559 | NSASAAASNDNA | −0.08 | −1.58 | 1.24 |
| 3264 | ATLVT012XX1354 | 46288 | SGESAGASNDNA | −1 | −0.81 | −0.72 |
| 3265 | ATLVT012XX266 | 45200 | NGETGAASNDNH | −1.51 | −0.87 | 0.22 |
| 3266 | ATLVT012XX2115 | 47049 | SSQTAAATNDNT | −2.32 | −1.01 | 1.8 |
| 3267 | ATLVT012XX2691 | 47625 | TGQTAAATNDNT | −0.96 | −1.2 | −0.32 |
| 3268 | ATLVT012XX3222 | 48156 | TSQSAASSNDNT | −0.99 | −1.2 | −0.31 |
| 3269 | ATLVT012XX3141 | 48075 | TSETAGSINDNT | −1.02 | −1.17 | −0.28 |
| 3270 | ATLVT012XX201 | 45135 | NGESAASSNDNT | −2.35 | −1.58 | 2.51 |
| 3271 | ATLVT012XX978 | 45912 | NSQTAGAINDNT | −0.69 | −1.11 | −0.94 |
| 3272 | ATLVT012XX2429 | 47363 | TGATGASSNDNH | −2.25 | 0.27 | −0.06 |
| 3273 | ATLVT012XX211 | 45145 | NGESAGSSNDNA | −1.86 | −0.21 | −0.12 |
| 3274 | ATLVT012XX1348 | 46282 | SGESAASSNDNA | −1.2 | −1.46 | 0.34 |
| 3275 | ATLVT012XX204 | 45138 | NGESAASTNDNT | −1.45 | −1.29 | 0.55 |
| 3276 | ATLVT012XX706 | 45640 | NSATGASTNDNA | −1.49 | 0.55 | −1.78 |
| 3277 | ATLVT012XX3084 | 48018 | TSESAGASNDNT | −2.16 | −0.32 | 0.5 |
| 3278 | ATLVT012XX165 | 45099 | NGEAAGSSNDNT | −1.82 | −0.34 | −0.07 |
| 3279 | ATLVT012XX2001 | 46935 | SSETGASTNDNT | −0.51 | −1.29 | −1.09 |
| 3280 | ATLVT012XX1465 | 46399 | SGQAGAATNDNA | −1.77 | −0.9 | 0.55 |
| 3281 | ATLVT012XX282 | 45216 | NGETGGATNDNT | −2.11 | −0.72 | 0.9 |
| 3282 | ATLVT012XX100 | 45034 | NGATAAATNDNA | −1.08 | −0.34 | −1.38 |
| 3283 | ATLVT012XX2520 | 47454 | TGESGAASNDNT | −1.99 | −0.34 | 0.15 |
| 3284 | ATLVT012XX415 | 45349 | NGQTGASSNDNA | −1.89 | −0.76 | 0.54 |
| 3285 | ATLVT012XX2478 | 47412 | TGEAGASSNDNT | −1.38 | −0.65 | −0.49 |
| 3286 | ATLVT012XX754 | 45688 | NSEAGASINDNA | −1.68 | −0.46 | −0.27 |
| 3287 | ATLVT012XX6 | 44940 | NGAAAAATNDNT | −2.07 | −0.38 | 0.29 |
| 3288 | ATLVT012XX3174 | 48108 | TSQAAASSNDNI | −1.29 | −1.58 | 0.49 |
| 3289 | ATLVT012XX261 | 45195 | NGETAGSSNDNT | −2.05 | 1.34 | −1.98 |
| 3290 | ATLVT012XX387 | 45321 | NGQTAAASNDNT | −0.74 | −1.6 | −0.44 |
| 3291 | ATLVT012XX2653 | 47587 | TGQSAGATNDNA | −1.36 | −0.73 | −0.51 |
| 3292 | ATLVT01XXX1329 | 46263 | SGEAGASINDNT | −0.32 | −1.71 | −1.04 |
| 3293 | ATLVT012XX72 | 45006 | NGASAGSINDNT | −2.11 | −0.87 | 0.95 |
| 3294 | ATLVT012XX1295 | 46229 | SGEAAAASNDNH | −2.29 | −1.35 | 1.87 |
| 3295 | ATLVT012XX171 | 45105 | NGEAGAASNDNT | −1.3 | −0.82 | −0.51 |
| 3296 | ATLVT012XX411 | 45345 | NGQTGAASNDNT | −1.25 | −0.78 | −0.66 |
| 3297 | ATLVT012XX636 | 45570 | NSASAASINDNT | −1.16 | −1.05 | −0.46 |
| 3298 | ATLVT012XX3121 | 48055 | TSETAAATNDNA | −1.28 | −1.09 | −0.26 |
| 3299 | ATLVT012XX3123 | 48057 | TSETAAATNDNT | −2.1 | −0.62 | 0.52 |
| 3300 | ATLVT012XX253 | 45187 | NGETAGASNDNA | −1.93 | 0.33 | −0.98 |
| 3301 | ATLVT012XX3150 | 48084 | TSETGASSNDNT | −0.72 | −1.48 | −0.73 |
| 3302 | ATLVT012XX2883 | 47817 | TSAAAAATNDNT | −2 | −0.44 | 0.12 |
| 3303 | ATLVT012XX3166 | 48100 | TSQAAAASNDNA | −1.46 | −0.94 | −0.17 |
| 3304 | ATLVT012XX1874 | 46808 | SSEAAAATNDNH | −1.94 | −0.14 | −0.37 |
| 3305 | ATLVT012XX386 | 45320 | NGQTAAASNDNH | −0.9 | −1.32 | −0.66 |
| 3306 | ATLVT012XX341 | 45275 | NGQSAAATNDNH | −1.33 | −0.21 | −1.36 |
| 3307 | ATLVT012XX2527 | 47461 | TGESGASTNDNA | −2.26 | −0.24 | 0.26 |
| 3308 | ATLVT012XX850 | 45784 | NSETGASTNDNA | −1.39 | −0.16 | −1.35 |
| 3309 | ATLVT012XX388 | 45322 | NGQTAAAINDNA | −1.56 | −0.55 | −0.56 |
| 3310 | ATLVT012XX186 | 45120 | NGEAGGATNDNT | −0.89 | −0.7 | −1.54 |
| 3311 | ATLVT012XX1423 | 46357 | SGETGASTNDNA | −1.17 | −0.95 | −0.72 |
| 3312 | ATLVT012XX826 | 45760 | NSETAASTNDNA | −1.03 | −1.01 | −0.91 |
| 3313 | ATLVT012XX3170 | 48104 | TSQAAAATNDNH | −1.56 | −0.89 | −0.17 |
| 3314 | ATLVT012XX840 | 45774 | NSETAGSTNDNT | −0.92 | −1.22 | −0.85 |
| 3315 | ATLVT012XX348 | 45282 | NGQSAASINDNT | −1.99 | 0.78 | −1.6 |
| 3316 | ATLVT012XX2355 | 47289 | TGASAAATNDNT | −2.1 | −0.47 | 0.16 |
| 3317 | ATLVT012XX773 | 45707 | NSESAAATNDNH | −1.37 | −0.31 | −1.29 |
| 3318 | ATLVT012XX3118 | 48052 | TSETAAASNDNA | −0.98 | −1.39 | −0.58 |
| 3319 | ATLVT012XX1249 | 46183 | SGATAAATNDNA | −0.7 | −1.09 | −1.46 |
| 3320 | ATLVT012XX730 | 45664 | NSEAAASTNDNA | −2.63 | 0.17 | 0.21 |
| 3321 | ATLVT012XX1827 | 46761 | SSATAAATNDNT | −1.08 | −1.25 | −0.64 |
| 3322 | ATLVT012XX3102 | 48036 | TSESGASSNDNT | −2.3 | −1.02 | 1.1 |
| 3323 | ATLVT012XX340 | 45274 | NGQSAAATNDNA | −0.79 | −1.07 | 1.43 |
| 3324 | ATLVT012XX630 | 45564 | NSASAAATNDNT | −1.04 | −1.26 | −0.77 |
| 3325 | ATLVT012XX976 | 45910 | NSQTAGATNDNA | −1.2 | −1.13 | −0.68 |
| 3326 | ATLVT012XX198 | 45132 | NGESAAATNDNT | −1.66 | −1.73 | 0.88 |
| 3327 | ATLVT012XX1439 | 46373 | SGQAAAASNDNH | −2.37 | −0.83 | 0.92 |
| 3328 | ATLVT012XX2254 | 47188 | SSTTAAASNDNA | −1.86 | 0.57 | −1.79 |
| 3329 | ATLVT012XX2162 | 47096 | SSTAAAAINDNH | −2.04 | −0.2 | −0.5 |
| 3330 | ATLVT012XX916 | 45850 | NSQSAAATNDNA | −1.47 | −0.23 | −1.45 |
| 3331 | ATLVT012XX2015 | 46949 | SSQAAAASNDNH | −1.88 | −1.32 | 0.67 |
| 3332 | ATLVT012XX869 | 45803 | NSQAAAATNDNH | −1.57 | −0.63 | −0.75 |
| 3333 | ATLVT012XX3171 | 48105 | TSQAAAATNDNT | −1.44 | −1.52 | 0.17 |
| 3334 | ATLVT012XX2690 | 47624 | TGQTAAATNDNH | −1.29 | −0.8 | −1.03 |
| 3335 | ATLVT012XX2737 | 47671 | TGTAAAATNDNA | −2.27 | −1.19 | 1.14 |
| 3336 | ATLVT012XX1392 | 46326 | SGETAAASNDNT | −0.75 | −1.34 | −1.27 |
| 3337 | ATLVT012XX2881 | 47815 | TSAAAAATNDNA | −2.15 | −0.1 | −0.46 |
| 3338 | ATLVT012XX2161 | 47095 | SSTAAAATNDNA | −2 | −1.45 | 1.02 |
| 3339 | ATLVT012XX1350 | 46284 | SGESAASSNDNT | −1.52 | −1.32 | 0 |
| 3340 | ATLVT012XX3138 | 48072 | TSETAGSSNDNT | −1.54 | −0.82 | −0.72 |
| 3341 | ATLVT012XX2431 | 47365 | TGATGASTNDNA | −1.75 | −0.38 | −0.95 |
| 3342 | ATLVT012XX355 | 45289 | NGQSAGSSNDNA | −2.02 | −0.84 | 0.09 |
| 3343 | ATLVT012XX1009 | 45943 | NSTAAAASNDNA | −1.35 | −1.03 | −0.81 |
| 3344 | ATLVT012XX771 | 45705 | NSESAAASNDNT | −0.91 | −1.83 | −0.54 |
| 3345 | ATLVT012XX148 | 45082 | NGEAAAATNDNA | −0.96 | −0.94 | −1.63 |
| 3346 | ATLVT012XX1203 | 46137 | SGASAAATNDNT | −1.39 | −1.29 | −0.44 |
| 3347 | ATLVT012XX3130 | 48064 | TSETAGASNDNA | −1.8 | −0.94 | −0.2 |
| 3348 | ATLVT012XX1374 | 46308 | SGESGASSNDNT | −1.54 | −1.02 | −0.57 |
| 3349 | ATLVT012XX819 | 45753 | NSETAAASNDNT | −0.23 | −2.46 | −0.97 |
| 3350 | ATLVT012XX2878 | 47812 | ISAAAAASNDNA | −2.01 | −0.68 | −0.24 |
| 3351 | ATLVT012XX1444 | 46378 | SGQAAASSNDNA | −0.84 | −1.66 | −1.01 |
| 3352 | ATLVT012XX1974 | 46908 | SSETAASSNDNT | −2.45 | −1.31 | 1.3 |
| 3353 | ATLVT012XX484 | 45418 | NGTSAAATNDNA | −1.83 | −0.98 | −0.21 |
| 3354 | ATLVT012XX2479 | 47413 | TGEAGASINDNA | −1.22 | −1.08 | −1.18 |
| 3355 | ATLVT012XX3114 | 48048 | TSESGGSSNDNT | −2.07 | −1.2 | 0.44 |
| 3356 | ATLVT012XX3007 | 47941 | ISATGASTNDNA | −1.67 | −0.42 | 1.28 |
| 3357 | ATLVT012XX3031 | 47965 | TSEAAASTNDNA | −1.79 | −1.17 | −0.1 |
| 3358 | ATLVT012XX2506 | 47440 | TGESAGASNDNA | −2.72 | −0.61 | 0.77 |
| 3359 | ATLVT012XX106 | 45040 | NGATAASTNDNA | −1.65 | −0.83 | −0.81 |
| 3360 | ATLVT012XX2382 | 47316 | TGASGASSNDNT | −2.24 | −0.24 | −0.55 |
| 3361 | ATLVT012XX731 | 45665 | NSEAAASTNDNH | −2.45 | 0.42 | −1.08 |
| 3362 | ATLVT012XX267 | 45201 | NGETGAASNDNT | −2.04 | −0.84 | −0.18 |
| 3363 | ATLVT012XX1438 | 46372 | SGQAAAASNDNA | −2.73 | 0.13 | −0.23 |
| 3364 | ATLVT012XX2644 | 47578 | TGQSAASSNDNA | −2.03 | −0.73 | −0.35 |
| 3365 | ATLVT012XX3125 | 48059 | TSETAASSNDNH | −1.56 | −1.12 | −0.64 |
| 3366 | ATLVT012XX2014 | 46948 | SSQAAAASNDNA | −2.31 | −1.04 | 0.55 |
| 3367 | ATLVT012XX7 | 44941 | NGAAAASSNDNA | −1.9 | −0.84 | −0.44 |
| 3368 | ATLVT012XX866 | 45800 | NSQAAAASNDNH | −1.89 | −0.92 | −0.38 |
| 3369 | ATLVT012XX973 | 45907 | NSQTAGASNDNA | −1.55 | −1.37 | −0.38 |
| 3370 | ATLVT012XX1923 | 46857 | SSESAAATNDNT | −1.88 | −1.16 | −0.1 |
| 3371 | ATLVT012XX867 | 45801 | NSQAAAASNDNT | −1.49 | −1.31 | −0.58 |
| 3372 | ATLVT012XX265 | 45199 | NGETGAASNDNA | −2.04 | −0.98 | −0.08 |
| 3373 | ATLVT012XX225 | 45159 | NGESGASSNDNT | −1.43 | −1.42 | −0.57 |
| 3374 | ATLVT012XX2542 | 47476 | TGETAAASNDNA | −1.1 | −1.41 | −1.16 |
| 3375 | ATLVT012XX178 | 45112 | NGEAGASTNDNA | −1.5 | −0.54 | −1.59 |
| 3376 | ATLVT012XX2446 | 47380 | TGEAAAASNDNA | −1.81 | −0.45 | −1.19 |
| 3377 | ATLVT012XX418 | 45352 | NGQTGASTNDNA | −2.52 | −1.12 | 0.89 |
| 3378 | ATLVT012XX3167 | 48101 | TSQAAAASNDNH | −2.09 | −0.88 | −0.14 |
| 3379 | ATLVT012XX1300 | 46234 | SGEAAASSNDNA | −1.45 | −1.26 | −0.77 |
| 3380 | ATLVT012XX268 | 45202 | NGETGAATNDNA | −2.69 | −0.87 | 0.83 |
| 3381 | ATLVT012XX834 | 45768 | NSETAGATNDNT | −1.89 | −0.89 | −0.52 |
| 3382 | ATLVT012XX2926 | 47860 | TSASAAASNDNA | −1.53 | −1.4 | −0.5 |
| 3383 | ATLVT012XX390 | 45324 | NGQTAAATNDNT | −1.67 | −0.9 | −0.95 |
| 3384 | ATLVT012XX2550 | 47484 | TGETAASSNQNT | −1.31 | −1.6 | −0.67 |
| 3385 | ATLVT012XX3127 | 48061 | TSETAASTNDNA | −1.2 | −1.61 | −0.85 |
| 3386 | ATLVT012XX1727 | 46661 | SSAAAAASNDNH | −2.0] | −0.5 | −0.91 |
| 3387 | ATLVT012XX2560 | 47494 | TGETAGSSNDNA | −1.41 | −0.96 | −1.41 |
| 3388 | ATLVT012XX745 | 45679 | NSEAGAASNDNA | −1.73 | −1.35 | −0.38 |
| 3389 | ATLVT012XX154 | 45088 | NGEAAASTNDNA | −1.93 | −0.47 | −1.18 |
| 3390 | ATLVT012XX1342 | 46276 | SGESAAASNDNA | −1.11 | −1.49 | −1.29 |
| 3391 | ATLVT012XX147 | 45081 | NGEAAAASNDNT | −1.36 | −1.61 | −0.71 |
| 3392 | ATLVT012XX2529 | 47463 | TGESGASTNDNT | −2.54 | −1.52 | 1.18 |
| 3393 | ATLVT012XX1779 | 46713 | SSASAAATNDNT | −1.88 | −1.26 | −0.31 |
| 3394 | ATLVT012XX2526 | 47460 | TGESGASSNDNT | −2.9 | −1.45 | 1.67 |
| 3395 | ATLVT012XX433 | 45367 | NGTAAAASNDNA | −1.41 | −2.11 | −0.03 |
| 3396 | ATLVT012XX1534 | 46468 | SGQTAAASNDNA | −1.18 | −1.3 | −1.49 |
| 3397 | ATLVT012XX822 | 45756 | NSETAAATNDNT | −1.14 | −1.9 | −0.8 |
| 3398 | ATLVT012XX913 | 45847 | NSQSAAASNDNA | −1.43 | −1.4 | −1 |
| 3399 | ATLVT012XX434 | 45368 | NGTAAAASNDNH | −3.01 | −0.33 | 0.33 |
| 3400 | ATLVT012XX1872 | 46806 | SSEAAAASNDNT | −1.71 | −1.7 | −0.17 |
| 3401 | ATLVT012XX275 | 45209 | NGETGASTNDNH | 2.11 | −0.75 | −0.73 |
| 3402 | ATLVT012XX1870 | 46804 | SSEAAAASNDNA | −1.73 | −1.44 | −0.51 |
| 3403 | ATLVT01XXX1326 | 46260 | SGEAGASSNDNT | −1.21 | −1.87 | −0.9 |
| 3404 | ATLVT012XX258 | 45192 | NGETAGATNDNT | −1.99 | −0.81 | −0.91 |
| 3405 | ATLVT012XX580 | 45514 | NSAAAAATNDNA | −1.74 | −1.24 | −0.81 |
| 3406 | ATLVT012XX1921 | 46855 | SSESAAATNDNA | −1.45 | −0.91 | −1.75 |
| 3407 | ATLVT012XX721 | 45655 | NSEAAAASNDNA | −2.21 | −0.49 | −0.99 |
| 3408 | ATLVT012XX2163 | 47097 | SSTAAAATNDNT | −2.42 | −1.18 | 0.23 |
| 3409 | ATLVT012XX2559 | 47493 | TGETAGAINDNT | −1.65 | −1.1 | −1.2 |
| 3410 | ATLVT012XX2257 | 47191 | SSTTAAATNDNA | −1.74 | −0.65 | −1.65 |
| 3411 | ATLVT012XX2557 | 47491 | TGETAGATNDNA | −1.74 | −1.11 | −1.08 |
| 3412 | ATLVT012XX3124 | 48058 | TSETAASSNDNA | −2.04 | −1.74 | 0.25 |
| 3413 | ATLVT012XX918 | 45852 | NSQSAAATNDNT | −2.13 | −1.15 | −0.42 |
| 3414 | ATLVT012XX54 | 44988 | NGASAAATNDNT | 2.05 | −1.17 | −0.55 |
| 3415 | ATLVT012XX722 | 45656 | NSEAAAASNDNH | −1.95 | −0.91 | −1.07 |
| 3416 | ATLVT012XX69 | 45003 | NGASAGSSNDNT | −1.73 | −1.15 | −1.14 |
| 3417 | ATLVT012XX770 | 45704 | NSESAAASNDNH | −1.6 | 1.56 | −0.84 |
| 3418 | ATLVT012XX2694 | 47628 | TGQTAASSNDNT | −2.07 | −1.21 | −0.51 |
| 3419 | ATLVT012XX436 | 45370 | NGTAAAATNDNA | −3.27 | −1.99 | 2.49 |
| 3420 | ATLVT012XX2562 | 47496 | TGETAGSSNDNT | −2.35 | −0.27 | −1.37 |
| 3421 | ATLVT012XX410 | 45344 | NGQTGAASNDNH | −2.35 | −1.31 | −0.04 |
| 3422 | ATLVT012XX4 | 44938 | NGAAAAATNDNA | −2.35 | −1.1 | −0.34 |
| 3423 | ATLVT012XX727 | 45661 | NSEAAASSNDNA | −2.37 | −0.36 | −1.27 |
| 3424 | ATLVT012XX3312 | 48246 | ISTAAAASNDNT | −2.28 | −0.94 | −0.69 |
| 3425 | ATLVT012XX582 | 45516 | NSAAAAATNDNT | −1.58 | −2.08 | −0.44 |
| 3426 | ATLVT012XX274 | 45208 | NGETGASTNDNA | −3.19 | 0.61 | −1.24 |
| 3427 | ATLVT012XX226 | 45160 | NGESGASTNDNA | −1.9 | −1.22 | 11.4 |
| 3428 | ATLVT012XX739 | 45673 | NSEAAGSSNDNA | −2.14 | −0.93 | −1.42 |
| 3429 | ATLVT012XX3135 | 48069 | TSETAGAINDNT | −2.34 | −1.15 | −0.8 |
| 3430 | ATLVT012XX243 | 45177 | NGETAAASNDNT | −1.42 | −1.81 | −1.55 |
| 3431 | ATLVT012XX3126 | 48060 | TSETAASSNDNT | −1.79 | −1.69 | −1.12 |
| 3432 | ATLVT012XX723 | 45657 | NSEAAAASNDNT | −2.29 | −0.44 | −1.87 |
| 3433 | ATLVT012XX772 | 45706 | NSESAAATNDNA | −1.94 | −1 | −1.77 |
| 3434 | ATLVT012XX1728 | 46662 | SSAAAAASNDNT | −1.48 | −2.22 | −1.15 |
| 3435 | ATLVT012XX2158 | 47092 | SSTAAAASNDNA | −2.24 | −1.06 | −1.34 |
| 3436 | ATLVT012XX2259 | 47193 | SSTTAAATNDNT | −2.6 | −0.83 | −1.18 |
| 3437 | ATLVT012XX180 | 45114 | NGEAGASINDNT | −2.14 | −0.86 | −1.95 |
| 3438 | ATLVT012XX3075 | 48009 | TSESAAATNDNT | −2.7 | −0.99 | −0.83 |
| 3439 | ATLVT012XX1296 | 46230 | SGEAAAASNDNT | −2.07 | −1.64 | −1.J |
| 3440 | ATLVT012XX246 | 45180 | NGETAAATNDNT | −2.07 | −1.6 | −1.23 |
| 3441 | ATLVT012XX9 | 44943 | NGAAAASSNDNT | −2.67 | −1.3 | −0.65 |
| 3442 | ATLVT012XX729 | 45663 | NSEAAASSNDNT | −1.9 | −1.67 | −1.58 |
| 3443 | ATLVT012XX228 | 45162 | NGESGASTNDNT | −1.96 | −1.64 | −1.83 |
| 3444 | ATLVT012XX2160 | 47094 | SSTAAAASNDNT | −2.35 | −1.83 | −0.95 |
| 3445 | ATLVT012XX1294 | 46228 | SGEAAAASNDNA | −2.69 | −1.12 | −1.38 |
| 3446 | ATLVT012XX241 | 45175 | NGETAAASNDNA | −2.1 | −2.14 | −1.24 |
| 3447 | ATLVT012XX1731 | 46665 | SSAAAAATNDNT | −3.05 | −1.66 | −0.32 |
| 3448 | ATLVT012XX145 | 45079 | NGEAAAASNDNA | −1.94 | −2.05 | −1.73 |
| 3449 | ATLVT012XX774 | 45708 | NSESAAATNDNT | −2.48 | −1.63 | −1.39 |
| 3450 | ATLVT012XX1729 | 46663 | SSAAAAATNDNA | −2.72 | −1.69 | −1.22 |
| 3451 | ATLVT012XX146 | 45080 | NGEAAAASNDNH | −2.29 | −2.2 | −1.71 |
| 3452 | ATLVT012XX276 | 45210 | NGETGASTNDNT | −2.78 | −2.23 | −1.02 |
| 3453 | ATLVT012XX244 | 45178 | NGETAAATNDNA | −2.4 | −1.95 | −2.26 |
| 3454 | ATLVT012XX1726 | 46660 | SSAAAAASNDNA | −2.73 | −2.2 | −1.45 |
| 3455 | ATLVT012XX385 | 45319 | NGQTAAASNDNA | −2.8 | −2.03 | −1.58 |
| 3456 | ATLVT012XX865 | 45799 | NSQAAAASNDNA | −2.98 | −2.28 | 1.48 |

LENGTHY TABLES
The patent application contains a lengthy table section. A copy of the table is available in electronic form from the USPTO web site (https://seqdata.uspto.gov/docdetail?docId=US20260062450A1). An electronic copy of the table will also be available from the USPTO upon request and payment of the fee set forth in 37 CFR 1.19(b)(3).

The application's sequence listing, which the Patent Office published only in electronic form, follows.

SEQUENCE LISTING (157083 sequences)

SEQ ID NO: 1 - protein, 7 aa, synthetic construct
RGDLLLS

SEQ ID NO: 2 - protein, 11 aa, synthetic construct
AQTLAWPFKAQ

SEQ ID NO: 3 - protein, 11 aa, synthetic construct
AQSWSKPFLAQ

SEQ ID NO: 4 - protein, 11 aa, synthetic construct
DGTLAVPFKAQ

SEQ ID NO: 5 - protein, 11 aa, synthetic construct
ESTLAVPFKAQ

SEQ ID NO: 6 - protein, 11 aa, synthetic construct
ESTLAVPFKAQ

SEQ ID NO: 7 - protein, 11 aa, synthetic construct
GGTLAVPFKAQ

SEQ ID NO: 8 - protein, 11 aa, synthetic construct
AQTLATPFKAQ

SEQ ID NO: 9 - protein, 11 aa, synthetic construct
ATTLATPFKAQ

SEQ ID NO: 10 - protein, 11 aa, synthetic construct
DGTLATPFKAQ

SEQ ID NO: 11 - protein, 11 aa, synthetic construct
GGTLATPFKAQ

SEQ ID NO: 12 - protein, 11 aa, synthetic construct
SGSLAWPFKAQ

SEQ ID NO: 13 - protein, 11 aa, synthetic construct
AQTLAQPFKAQ

SEQ ID NO: 14 - protein, 11 aa, synthetic construct
AQTLQQPFKAQ

SEQ ID NO: 15 - protein, 11 aa, synthetic construct
AQTLSNPFKAQ

SEQ ID NO: 16 - protein, 11 aa, synthetic construct
AQTLAVPFSNP

SEQ ID NO: 17 - protein, 11 aa, synthetic construct
QGTLAVPFKAQ

SEQ ID NO: 18 - protein, 11 aa, synthetic construct
NQTLAVPFKAQ

SEQ ID NO: 19 - protein, 11 aa, synthetic construct
EGSLAVPFKAQ

SEQ ID NO: 20 - protein, 11 aa, synthetic construct
SGNLAVPFKAQ

SEQ ID NO: 21 - protein, 11 aa, synthetic construct
EGTLAVPFKAQ

SEQ ID NO: 22 - protein, 11 aa, synthetic construct
DSTLAVPFKAQ

SEQ ID NO: 23 - protein, 11 aa, synthetic construct
AVTLAVPFKAQ

SEQ ID NO: 24 - protein, 11 aa, synthetic construct
AQTLSTPFKAQ

SEQ ID NO: 25 - protein, 11 aa, synthetic construct
AQTLPQPFKAQ

SEQ ID NO: 26 - protein, 11 aa, synthetic construct
AQTLSQPFKAQ

SEQ ID NO: 27 - protein, 11 aa, synthetic construct
AQTLQLPFKAQ

SEQ ID NO: 28 - protein, 11 aa, synthetic construct
AQTLTMPFKAQ

SEQ ID NO: 29 - protein, 11 aa, synthetic construct
AQTLTTPFKAQ

SEQ ID NO: 30 - protein, 11 aa, synthetic construct
AQYTLSQGWAQ

SEQ ID NO: 31 - protein, 11 aa, synthetic construct
AQMNATKNVAQ

SEQ ID NO: 32 - protein, 11 aa, synthetic construct
AQVSGGHHSAQ

SEQ ID NO: 33 - protein, 11 aa, synthetic construct
AQTLPQPFKAQ

SEQ ID NO: 34 - protein, 11 aa, synthetic construct
AQTLATPFKAQ

SEQ ID NO: 35 - protein, 11 aa, synthetic construct
AQTLTMPFKAQ

SEQ ID NO: 36 - protein, 11 aa, synthetic construct
AQTLTAPFKAQ

SEQ ID NO: 37 - protein, 11 aa, synthetic construct
AQTLSKPFKAQ

SEQ ID NO: 38 - protein, 7 aa, synthetic construct
QAVRTSL

SEQ ID NO: 39 - protein, 7 aa, synthetic construct
YTLSQGW

SEQ ID NO: 40 - protein, 7 aa, synthetic construct
LAKERLS

SEQ ID NO: 41 - protein, 7 aa, synthetic construct
LAKERLS

SEQ ID NO: 42 - protein, 7 aa, synthetic construct
SVSKPFL

SEQ ID NO: 43 - protein, 7 aa, synthetic construct
FTLTTPK

SEQ ID NO: 44 - protein, 7 aa, synthetic construct
MNSTKNV

SEQ ID NO: 45 - protein, 7 aa, synthetic construct
VSGGHHS

SEQ ID NO: 46 - protein, 14 aa, synthetic construct
SAQTLAVPFKAQAQ

SEQ ID NO: 47 - protein, 14 aa, synthetic construct
  VARIANT 2: note = Any amino acid
  VARIANT 3: note = Any amino acid
  VARIANT 4: note = Any amino acid
SXXXLAVPFKAQAQ

SEQ ID NO: 48 - protein, 14 aa, synthetic construct
  VARIANT 4: note = Any amino acid
  VARIANT 5: note = Any amino acid
  VARIANT 6: note = Any amino acid
SAQXXXVPFKAQAQ

SEQ ID NO: 49 - protein, 14 aa, synthetic construct
  VARIANT 6: note = Any amino acid
  VARIANT 7: note = Any amino acid
  VARIANT 8: note = Any amino acid
SAQTLXXXFKAQAQ

SEQ ID NO: 50 - protein, 14 aa, synthetic construct
  VARIANT 8: note = Any amino acid
  VARIANT 9: note = Any amino acid
  VARIANT 10: note = Any amino acid
SAQTLAVXXXAQAQ

SEQ ID NO: 51 - protein, 14 aa, synthetic construct
  VARIANT 10: note = Any amino acid
  VARIANT 11: note = Any amino acid
  VARIANT 12: note = Any amino acid
SAQTLAVPFXXXAQ

SEQ ID NO: 52 - skipped

SEQ ID NO: 53 - protein, 7 aa, synthetic construct
TLAVPFK

SEQ ID NO: 54 - protein, 736 aa, Adeno-associated virus 1
MAADGYLPDWLEDNLSEGIREWWDLKPGAPKPKANQQKQDDGRGLVLPGYKYLGPFNGLDKGEPVNAADAAALEHDKAYDQQLKAGDNPYLRYNHADAEFQERLQEDTSFGGNLGRAVFQAKKRVLEPLGLVEEGAKTAPGKKRPVEQSPQEPDSSSGIGKTGQQPAKKRLNFGQTGDSESVPDPQPLGEPPATPAAVGPTTMASGGGAPMADNNEGADGVGNASGNWHCDSTWLGDRVITTSTRTWALPTYNNHLYKQISSASTGASNDNHYFGYSTPWGYFDFNRFHCHFSPRDWQRLINNNWGFRPKRLNFKLFNIQVKEVTTNDGVTTIANNLTSTVQVFSDSEYQLPYVLGSAHQGCLPPFPADVFMIPQYGYLTLNNGSQAVGRSSFYCLEYFPSQMLRTGNNFTFSYTFEEVPFHSSYAHSQSLDRLMNPLIDQYLYYLNRTQNQSGSAQNKDLLFSRGSPAGMSVQPKNWLPGPCYRQQRVSKTKTDNNNSNFTWTGASKYNLNGRESIINPGTAMASHKDDEDKFFPMSGVMIFGKESAGASNTALDNVMITDEEEIKATNPVATERFGTVAVNFQSSSTDPATGDVHAMGALPGMVWQDRDVYLQGPIWAKIPHTDGHFHPSPLMGGFGLKNPPPQILIKNTPVPANPPAEFSATKFASFITQYSTGQVSVEIEWELQKENSKRWNPEVQYTSNYAKSANVDFTVDNNGLYTEPRPIGTRYLTRPL

SEQ ID NO: 55 - protein, 735 aa, Adeno-associated virus 2 [sequence omitted]

SEQ ID NO: 56 - protein, 736 aa, Adeno-associated virus 3
MAADGYLPDWLEDNLSEGIREWWALKPGVPQPKANQQHQDNRRGLVLPGYKYLGPGNGLDKGEPVNEADAAALEHDKAYDQQLKAGDNPYLKYNHADAEFQERLQEDTSFGGNLGRAVFQAKKRILEPLGLVEEAAKTAPGKKGAVDQSPQEPDSSSGVGKSGKQPARKRLNFGQTGDSESVPDPQPLGEPPAAPTSLGSNTMASGGGAPMADNNEGADGVGNSSGNWHCDSQWLGDRVITTSTRTWALPTYNNHLYKQISSQSGASNDNHYFGYSTPWGYFDFNRFHCHFSPRDWQRLINNNWGFRPKKLSFKLFNIQVRGVTQNDGTTTIANNLTSTVQVFTDSEYQLPYVLGSAHQGCLPPFPADVFMVPQYGYLTLNNGSQAVGRSSFYCLEYFPSQMLRTGNNFQFSYTFEDVPFHSSYAHSQSLDRLMNPLIDQYLYYLNRTQGTTSGTTNQSRLLFSQAGPQSMSLQARNWLPGPCYRQQRLSKTANDNNNSNFPWTAASKYHLNGRDSLVNPGPAMASHKDDEEKFFPMHGNLIFGKEGTTASNAELDNVMITDEEEIRTTNPVATEQYGTVANNLQSSNTAPTTGTVNHQGALPGMVWQDRDVYLQGPIWAKIPHTDGHFHPSPLMGGFGLKHPPPQIMIKNTPVPANPPTTFSPAKFASFITQYSTGQVSVEIEWELQKENSKRWNPEIQYTSNYNKSVNVDFTVDTNGVYSEPRPIGTRYLTRNL

SEQ ID NO: 57 - protein, 724 aa, Adeno-associated virus 5
MSFVDHPPDWLEEVGEGLREFLGLEAGPPKPKPNQQHQDQARGLVLPGYNYLGPGNGLDRGEPVNRADEVAREHDISYNEQLEAGDNPYLKYNHADAEFQEKLADDTSFGGNLGKAVFQAKKRVLEPFGLVEEGAKTAPTGKRIDDHFPKRKKARTEEDSKPSTSSDAEAGPSGSQQLQIPAQPASSLGADTMSAGGGGPLGDNNQGADGVGNASGDWHCDSTWMGDRVVTKSTRTWVLPSYNNHQYREIKSGSVDGSNANAYFGYSTPWGYFDFNRFHSHWSPRDWQRLINNYWGFRPRSLRVKIFNIQVKEVTVQDSTTTIANNLTSTVQVFTDDDYQLPYVVGNGTEGCLPAFPPQVFTLPQYGYATLNRDNTENPTERSSFFCLEYFPSKMLRTGNNFEFTYNFEEVPFHSSFAPSQNLFKLANPLVDQYLYRFVSTNNTGGVQFNKNLAGRYANTYKNWFPGPMGRTQGWNLGSGVNRASVSAFATTNRMELEGASYQVPPQPNGMTNNLQGSNTYALENTMIFNSQPANPGTTATYLEGNMLITSESETQPVNRVAYNVGGQMATNNQSSTTAPATGTYNLQEIVPGSVWMERDVYLQGPIWAKIPETGAHFHPSPAMGGFGLKHPPPMMLIKNTPVPGNITSFSDVPVSSFITQYSTGQVTVEMEWELKKENSKRWNPEIQYTNNYNDPQFVDFAPDSTGEYRTTRPIGTRYLTRPL

SEQ ID NO: 58 - protein, 736 aa, Adeno-associated virus 6
MAADGYLPDWLEDNLSEGIREWWDLKPGAPKPKANQQKQDDGRGLVLPGYKYLGPFNGLDKGEPVNAADAAALEHDKAYDQQLKAGDNPYLRYNHADAEFQERLQEDTSFGGNLGRAVFQAKKRVLEPFGLVEEGAKTAPGKKRPVEQSPQEPDSSSGIGKTGQQPAKKRLNFGQTGDSESVPDPQPLGEPPATPAAVGPTTMASGGGAPMADNNEGADGVGNASGNWHCDSTWLGDRVITTSTRTWALPTYNNHLYKQISSASTGASNDNHYFGYSTPWGYFDFNRFHCHFSPRDWQRLINNNWGFRPKRLNFKLFNIQVKEVTTNDGVTTIANNLTSTVQVFSDSEYQLPYVLGSAHQGCLPPFPADVFMIPQYGYLTLNNGSQAVGRSSFYCLEYFPSQMLRTGNNFTFSYTFEDVPFHSSYAHSQSLDRLMNPLIDQYLYYLNRTQNQSGSAQNKDLLFSRGSPAGMSVQPKNWLPGPCYRQQRVSKTKTDNNNSNFTWTGASKYNLNGRESIINPGTAMASHKDDKDKFFPMSGVMIFGKESAGASNTALDNVMITDEEEIKATNPVATERFGTVAVNLQSSSTDPATGDVHVMGALPGMVWQDRDVYLQGPIWAKIPHTDGHFHPSPLMGGFGLKHPPPQILIKNTPVPANPPAEFSATKFASFITQYSTGQVSVEIEWELQKENSKRWNPEVQYTSNYAKSANVDFTVDNNGLYTEPRPIGTRYLTRPL

SEQ ID NO: 59 - protein, 737 aa, Adeno-associated virus 7
MAADGYLPDWLEDNLSEGIREWWDLKPGAPKPKANQQKQDNGRGLVLPGYKYLGPFNGLDKGEPVNAADAAALEHDKAYDQQLKAGDNPYLRYNHADAEFQERLQEDTSFGGNLGRAVFQAKKRVLEPLGLVEEGAKTAPAKKRPVEPSPQRSPDSSTGIGKKGQQPARKRLNFGQTGDSESVPDPQPLGEPPAAPSSVGSGTVAAGGGAPMADNNEGADGVGNASGNWHCDSTWLGDRVITTSTRTWALPTYNNHLYKQISSETAGSTNDNTYFGYSTPWGYFDFNRFHCHFSPRDWQRLINNNWGFRPKKLRFKLFNIQVKEVTTNDGVTTIANNLTSTIQVFSDSEYQLPYVLGSAHQGCLPPFPADVFMIPQYGYLTLNNGSQSVGRSSFYCLEYFPSQMLRTGNNFEFSYSFEDVPFHSSYAHSQSLDRLMNPLIDQYLYYLARTQSNPGGTAGNRELQFYQGGPSTMAEQAKNWLPGPCFRQQRVSKTLDQNNNSNFAWTGATKYHLNGRNSLVNPGVAMATHKDDEDRFFPSSGVLIFGKTGATNKTTLENVLMTNEEEIRPTNPVATEEYGIVSSNLQAANTAAQTQVVNNQGALPGMVWQNRDVYLQGPIWAKIPHTDGNFHPSPLMGGFGLKHPPPQILIKNTPVPANPPEVFTPAKFASFITQYSTGQVSVEIEWELQKENSKRWNPEIQYTSNFEKQTGVDFAVDSQGVYSEPRPIGTRYLTRNL

SEQ ID NO: 60 - protein, 738 aa, Adeno-associated virus 8
MAADGYLPDWLEDNLSEGIREWWALKPGAPKPKANQQKQDDGRGLVLPGYKYLGPFNGLDKGEPVNAADAAALEHDKAYDQQLQAGDNPYLRYNHADAEFQERLQEDTSFGGNLGRAVFQAKKRVLEPLGLVEEGAKTAPGKKRPVEPSPQRSPDSSTGIGKKGQQPARKRLNFGQTGDSESVPDPQPLGEPPAAPSGVGPNTMAAGGGAPMADNNEGADGVGSSSGNWHCDSTWLGDRVITTSTRTWALPTYNNHLYKQISNGTSGGATNDNTYFGYSTPWGYFDFNRFHCHFSPRDWQRLINNNWGFRPKRLSFKLFNIQVKEVTQNEGTKTIANNLTSTIQVFTDSEYQLPYVLGSAHQGCLPPFPADVFMIPQYGYLTLNNGSQAVGRSSFYCLEYFPSQMLRTGNNFQFTYTFEDVPFHSSYAHSQSLDRLMNPLIDQYLYYLSRTQTTGGTANTQTLGFSQGGPNTMANQAKNWLPGPCYRQQRVSTTTGQNNNSNFAWTAGTKYHLNGRNSLANPGIAMATHKDDEERFFPSNGILIFGKQNAARDNADYSDVMLTSEEEIKTTNPVATEEYGIVADNLQQQNTAPQIGTVNSQGALPGMVWQNRDVYLQGPIWAKIPHTDGNFHPSPLMGGFGLKHPPPQILIKNTPVPADPPTTFNQSKLNSFITQYSTGQVSVEIEWELQKENSKRWNPEIQYTSNYYKSTSVDFAVNTEGVYSEPRPIGTRYLTRNL

SEQ ID NO: 61 - protein, 736 aa, Adeno-associated virus 9
MAADGYLPDWLEDNLSEGIREWWALKPGAPQPKANQQHQDNARGLVLPGYKYLGPGNGLDKGEPVNAADAAALEHDKAYDQQLKAGDNPYLKYNHADAEFQERLKEDTSFGGNLGRAVFQAKKRLLEPLGLVEEAAKTAPGKKRPVEQSPQEPDSSAGIGKSGAQPAKKRLNFGQTGDTESVPDPQPIGEPPAAPSGVGSLTMASGGGAPVADNNEGADGVGSSSGNWHCDSQWLGDRVITTSTRTWALPTYNNHLYKQISNSTSGGSSNDNAYFGYSTPWGYFDFNRFHCHFSPRDWQRLINNNWGFRPKRLNFKLFNIQVKEVTDNNGVKTIANNLTSTVQVFTDSDYQLPYVLGSAHEGCLPPFPADVFMIPQYGYLTLNDGSQAVGRSSFYCLEYFPSQMLRTGNNFQFSYEFENVPFHSSYAHSQSLDRLMNPLIDQYLYYLSKTINGSGQNQQTLKFSVAGPSNMAVQGRNYIPGPSYRQQRVSTTVTQNNNSEFAWPGASSWALNGRNSLMNPGPAMASHKEGEDRFFPLSGSLIFGKQGTGRDNVDADKVMITNEEEIKTTNPVATESYGQVATNHQSAQAQAQTGWVQNQGILPGMVWQDRDVYLQGPIWAKIPHTDGNFHPSPLMGGFGMKHPPPQILIKNTPVPADPPTAFNKDKLNSFITQYSTGQVSVEIEWELQKENSKRWNPEIQYTSNYYKSNNVEFAVNTEGVYSEPRPIGTRYLTRNL

SEQ ID NO: 62 - protein, 738 aa, Adeno-associated virus 10
MAADGYLPDWLEDNLSEGIREWWDLKPGAPKPKANQQKQDDGRGLVLPGYKYLGPFNGLDKGEPVNAADAAALEHDKAYDQQLKAGDNPYLRYNHADAEFQERLQEDTSFGGNLGRAVFQAKKRVLEPLGLVEEAAKTAPGKKRPVEPSPQRSPDSSTGIGKKGQQPAKKRLNFGQTGESESVPDPQPIGEPPAGPSGLGSGTMAAGGGAPMADNNEGADGVGSSSGNWHCDSTWLGDRVITTSTRTWALPTYNNHLYKQISNGTSGGSTNDNTYFGYSTPWGYFDFNRFHCHFSPRDWQRLINNNWGFRPKRLSFKLFNIQVKEVTQNEGTKTIANNLTSTIQVFTDSEYQLPYVLGSAHQGCLPPFPADVFMIPQYGYLTLNNGSQAVGRSSFYCLEYFPSQMLRTGNNFEFSYTFEDVPFHSSYAHSQSLDRLMNPLIDQYLYYLSRTQSTGGTQGTQQLLFSQAGPANMSAQAKNWLPGPCYRQQRVSTTLSQNNNSNFAWTGATKYHLNGRDSLVNPGVAMATHKDDEERFFPSSGVLMFGKQGAGRDNVDYSSVMLTSEEEIKTTNPVATEQYGVVADNLQQANTGPIVGNVNSQGALPGMVWQNRDVYLQGPIWAKIPHTDGNFHPSPLMGGFGLKHPPPQILIKNTPVPADPPTTFSQAKLASFITQYSTGQVSVEIEWELQKENSKRWNPEIQYTSNYYKSTNVDFAVNTEGTYSEPRPIGTRYLTRNL

SEQ ID NO: 63 - protein, 736 aa, Adeno-associated virus
MAADGYLPDWLEDNLSEGIREWWALKPGAPQPKANQQHQDNARGLVLPGYKYLGPGNGLDKGEPVNEADAAALEHDKAYDQQLKAGDNPYLKYNHADAEFQERLKEDTSFGGNLGRAVFQAKKRLLEPLGLVEEAAKTAPGKKRPVEQSPQEPDSSVGIGKSGAQPAKKRLNFGQTGDTESVPDPQPIGEPPAAPSGVGSLTMASGGGAPVADNNEGADGVGSSSGNWHCDSQWLGDRVITTSTRTWALPTYNNHLYKQISNSTSGGSSNDNAYFGYSTPWGYFDFNRFHCHFSPRDWQRLINNNWGFRPKRLNFKLFNIQVKEVTDNNGVKTIANNLTSTVQVFTDSDYQLPYVLGSAHEGCLPPFPADVFMIPQYGYLTLNDGSQAVGRSSFYCLEYFPSQMLRTGNNFQFSYEFENVPFHSSYAHSQSLDRLMNPLIDQYLYYLSKTINGSGQNQQTLKFSVAGPSNMAVQGRNYIPGPSYRQQRVSTTVTQNNNSEFAWPGASSWALNGRNSLMNPGPAMASHKEGEDRFFPLSGSLIFGKQGTGRDNVDADKVMITNEEEIKTTNPVATESYGQVATNHQSAQAQAQTGWVQNQGILPGMVWQDRDVYLQGPIWAKIPHTDGNFHPSPLMGGFGMKHPPPQILIKNTPVPADPPTAFNKDKLNSFITQYSTGQVSVEIEWELQKENSKRWNPEIQYTSNYYKSNNVEFAVNTEGVYSEPRPIGTRYLTRNL

SEQ ID NO: 64 - protein, 736 aa, Adeno-associated virus
MAADGYLPDWLEDNLSEGIREWWALQPGAPKPKANQQHQDNARGLVLPGYKYLGPGNGLDKGEPVNAADAAALEHDKAYDQQLKAGDNPYLKYNHADAEFQERLKEDTSFGGNLGRAVFQAKKRLLEPLGLVEEAAKTAPGKKRPVDQSPQEPDSSSGVGKSGKQPARKRLNFGQTGDSESVPDPQPLGEPPAAPTSLGSNTMASGGGAPMADNNEGADGVGNSSGNWHCDSQWLGDRVITTSTRTWALPTYNNHLYKQISSQSGASNDNHYFGYSTPWGYFDFNRFHCHFSPRDWQRLINNNWGFRPKKLSFKLFNIQVKEVTQNDGTTTIANNLTSTVQVFTDSEYQLPYVLGSAHQGCLPPFPADVFMVPQYGYLTLNNGSQAVGRSSFYCLEYFPSQMLRTGNNFQFSYTFEDVPFHSSYAHSQSLDRLMNPLIDQYLYYLNRTQGTTSGTTNQSRLLFSQAGPQSMSLQARNWLPGPCYRQQRLSKTANDNNNSNFPWTAASKYHLNGRDSLVNPGPAMASHKDDEEKFFPMHGNLIFGKEGTTASNAELDNVMITDEEEIRTTNPVATEQYGTVANNLQSSNTAPTTRTVNDQGALPGMVWQDRDVYLQGPIWAKIPHTDGHFHPSPLMGGFGLKHPPPQIMIKNTPVPANPPTTFSPAKFASFITQYSTGQVSVEIEWELQKENSKRWNPEIQYTSNYNKSVNVDFTVDTNGVYSEPRPIGTRYLTRPL

SEQ ID NO: 65 - protein, 735 aa, Adeno-associated virus
MAADGYLPDWLEDTLSEGIRQWWKLKPGPPPPKPAERHKDDSRGLVLPGYKYLGPFNGLDKGEPVNEADAAALEHDKAYDRQLDSGDNPYLKYNHADAEFQERLKEDTSFGGNLGRAVFQAKKRVLEPLGLVEEPVKTAPGKKRPVEHSPVEPDSSSGTGKAGQQPARKRLNFGQTGDADSVPDPQPLGQPPAAPSGLGSTTMATGSGAPMADNNEGADGVGNSSGNWHCDSQWLGDRVITTSTRTWALPTYNNHLYKQISSQSGASNDNHYFGYSTPWGYFDFNRFHCHFSPRDWQRLINNNWGFRPKRLNFKLFNIQVKEVTQNGGTTTIANNLTSTVQVFTDSEYQLPYVLGSAHQGCLPPFPADVFMVPQYGYLTLNNGSQAVGRSSFYCLEYFPSQMLRTGNNFQFSYTFEDVPFHSSYAHSQSLDRLMNPLIDQYLYYLNKTQTNSGTLQQSRLLFSQAGPTNMSLQAKNWLPGPCYRQQRLSKQANGNNNSNFPWTAATKYHLNGRDSLVNPGPAMASHKDDEEKFFPMHGTLIFGKQGTNANDADLENVMITDEEEIRATNPVATEQYGTVSNNLQNSNTGPTTGTVNHQGALPGMVWQDRDVYLQGPIWAKIPHTDGHFHPSPLTGGFGLKHPPPQIMIKNTPVPANPPTNFSSAKFASFITQYSTGQVSVEIEWELQKENSKRWNPEIQYTSNYNKSVNVDFTVDTNGVYSEPRPIGTRYLTRNL

SEQ ID NO: 66 - protein, 735 aa, Adeno-associated virus
MAADGYPPDWLEDTLSEGIRQWWKLKPGPPPPKPAERHKDDSRGLVLPGYKYLGPFNGLDKGEPVNEADAAALEHDKAYDRQLDSGDNPYLKYNHADAEFQERLKEDTSFGGNLGRAVFQAKKRVLEPLGLVEEPVKTAPGKKRPVEHSPVEPDSSSGTGKAGQRPARKRLNFGQTGDADSVPDPQPLGQPPAAPSGLGSTTMATGSGAPMADNNEGADGVGNSSGNWHCDSQWLGDRVITTSTRTWALPTYNNHLYKQISSQSGASNDNHYFGYSTPWGYFDFNRFHCHFSPRDWQRLINNNWGFRPKRLNFKLFNIQVKEVTQNDGTTTIANNLTSTVQVFTDSEYQLPYVLGSAHQGCLPPFPADVFMVPQYGYLTLNNGSQAVGRSSFYCLEYFPSQMLRTGNNFQFSYTFEDVPFHSSYAHSQSLDRLMNPLIDQYLYYLNKTQTNSGTLQQSRLLFSQAGPTNMSLQAKNWLPGPCYRQQRLSKQANDNNNSNFPWTAATKYHLNGRDSLVNPGPAMASHKDDEEKFFPMHGTLIFGKQGTNANDADLENVMITDEEEIRATNPVATEQYGTVSNNLQNSNTGPTTGTVNRQGALPGMVWQDRDVYLQGPIWAKIPHTDGHFHPSPLMGGFGLKHPPPQIMIKNTPVPANPPTNFSSAKFASFITQYSTGQVSVEIEWELQKENSKRWNPEIQYTSNYNKSVNVDFTVDTNGVYSEPRPIGTRYLTRNL

SEQ ID NO: 67 - protein, 736 aa, Adeno-associated virus
MAADGYLPDWLEDTLSEGIRQWWKLKPGPPPPKPAERHKDDSRGLVLPGYKYLGPFNGLDKGEPVNEADAAALEHDKAYDRQLDSGDNPYLKYNHADAEFQERLKEDTSFGGNLGRAVFQAKKRVLEPLRPGLRKPVKTAPGKKRPVEHSPVEPDSSSGTGKAGQQPARKRLNFGQTGDADSVPDPQPLGQPPAAPSGLGSTTMATGSGAPMADNNEGADGVGNSSGNWHCDSQWLDDRVIATSTRTWALPTYNNHLYKQISSQSGACNDNHYFGYSTPWGYFDFNRFHCHFSPRDWQRLINSNWGFRPKRLNFKLFNIQVKEVTQNDGTTTIANNLTSTVQVFTDSEYQLPYVPGSAHQGCLPPFPADVFMVPQYGYLTLNNGSQAVGRSSFYCLEYFPSQMLRTGNNFQFSYTFEDVPFHSSYAHCQSLDRLMNPLIDQYLYYLNKTQTNSGTLQQSRLLFSQAGPTNMSLQAKNWLPGPCYRQQRLSKQANDNNNCNFPWTAATKYHLNGRDSLVNPGPAMASHKDDEEKFFPMHGTLIFGKQGTNANDADLENVMITDEEEIRPTNPVATEQYGTVSNNLQNSNTGPTTGTVNHQGALPGMVWQDRDVYLQGPIWAKIPHTDGHFHPSPLMGGFGLKHPPPQIMIKSTPVPANPPTNFSSAKFASSITQYSTGQVSVEIEWELQKENSKRWNPEIQYTSNYNKSVNVDFTVDTNGVYSEPRPIGTRYLTRNL

SEQ ID NO: 68 - protein, 735 aa, Adeno-associated virus
MAADGYLPDWLEDTLSEGIRQWWKLKPGPPPPKPAERHKDDSRGLVLPGYKYLGPFNGLDKGEPVNEADAAALEHDKAYDRQLDSGDNPYLKYNHADAEFQERLKEDTSFGGNLGRAVFQAKKRVLEPLGLVEEPVKTAPGKKRPVEHSPVEPDSSSGTGKAGQQPARKRLNFGQTGDADSVPDPQPLGQPPAAPSGLGSTTMATGSGAPMADNNEGADGVGNSSGNWHCDSQWLGDRVITTSTRTWALPTYNNHLYKQISSQSGASNDNHYFGYSTPWGYFDFNRFHCHFSPRDWQRLVNNNRGFRPKRLNFKLFNIQVKEVTQNDGTTTIANNLTSTVQVFTDSEYQLPYVLGSAHQGCLPPFPADVFMVPQYGYLTLNNGSQAVGRSSFYCLEYFPSQMLRTGNNFQFSYTFEDVPFHSSYAHSQSLDRLMNPLIDQYLYYLNKTQTNSGTLQQSRLLFSQAGPTNMSLQAKNWLPGPCYRQQRLSKQANDNNNSNFPWTAATKYHLNGRDSLVNPGPAMASHKDDEEKFFPMHGTLIFGKQGTNANDADLENVMITDEEEIRATNPVATEQYGTVSNNLQNSNTGPTTGTVNHQGALPGMVWQDRDVYLQGPIWAKIPHTDGHFHPSPLMGGFGLKHPPPQIMIKNTPVPANPPTNFSSAKFASFITQYSTGQVSVEIEWELQKENSKRWNPEIQYTSNYNKSVNVDFTVDTNGVYSEPRPIGTRYLTRNL

SEQ ID NO: 69 - protein, 738 aa, Adeno-associated virus
MAADGYLPDWLEDNLSEGIREWWDLKPGAPKPKANQQKQDDGRGLVLPGYKYLGPFNGLDKGEPVNAADAAALEHDKAYDQQLKAGDNPYLRYNHADAEFQERLQEDTSFGGNLGRAVFQAKKRVLEPLGLVEEGAKTAPGKKRPVEPSPQRSPDSSTGIGKTGQQPAKKRLNFGQTGDSESVPDPQPIGEPPAGPSGLGSGTMAAGGGAPMADNNEGADGVGSSSGNWHCDSAWLGDRVITTSTRPWALPTYNNHLYKQISNGTSGGSTNDNTYFGYSTPWGYFDFNRFHCHFSPRDWQRLINNNWGFRPKRLNFKLFNIQVKEVTQNEGTKTIANNLTSTIQVFTDSEYQLPYVLGSAHQGCPPPFPADVFMIPQYGYLTLNNGSQAVGRSSFYCLEYFPSQMRRTGNNFEFSYQFEDVPFHSSYAHSQSLDRLMNPLIDQYLYYLSRTQSTGGTAGTQQLLFSQAGPNNMSAQAKNWLPGPCYRQQRVSTTLSQNNNSNFAWTGATKYHLNGRDSLVNPGVAMATHKDDEERFFPSSGVLMFGKQGAGKDNVDYSSVMLTSEEEIKTTNPVATEQYGVVADNLQQQNAAPIVGAVNSQGALPGMVWQNRDVYLQGPIWAKIPHTDGNFHPSPLMGGFGLKHPPPQILIKNTPVPADPPTTFSQAKLASFITQYSTGQVSVEIEWELQKENSKRWNPEIQYTSNYYKSTNVDFAVNTEGTYSEPRPIGTRYLTRNL

SEQ ID NO: 70 - protein, 735 aa, Adeno-associated virus
MAADGYLPDWLEDTLSEGIRQWWKLKPGPPPPKPAERHKDDSRGLVLPGYKYLGPFNGLDKGEPVNEADAAALEHDKAYDRQLDSGDNPYLKYNHADAEFQERLKEDTSFGGNLGRAVFQAKKRVLEPLGLVEGPVKTAPGKKRPVEHSPAEPDSSSGTGKAGQQPARKRLNFGQTGDADSVPDPQPLGQPPAAPSGLGSTTMATGSGAPMADNNEGADGVGNSSGNWHCDSQWLGDRVITTSTRTWALPTYNNHLYKQISSQSGASNDNHYFGYSTPWGYFDFNRFHCHFSPRDWQRLINNNWGFRPKRLNFKLFNIQVKEVTQNDGTTTIANNLTSTVQVFTDSEYQLPYVLGSAHQGCLPPFPADVFMVPQYGYLTLNNGSQAVGRSSFYCLEYFPSQMLRTGNNFQFSYTFEDVPFHSSYAHSQSLDRLMNPLIDQYLYYLNKTQSNSGTLQQSRLLFSQAGPTSMSLQAKNWLPGPCYRQQRLSKQANDNNNSNFPWTAATKYHLNGRDSLVNPGPAMASHKDDEEKFFPMHGTLIFGKQGTNANDADLDNVMITDEEEIRTTNPVATEQYGYVSNNLQNSNTGPTTGTVNHQGALPGMVWQDRDVYLQGPIWAKIPHTDGHFHPSPLMGGFGLKHPPPQIMIKNTPVPANPPTNFSSAKFASFITQYSTGQVSVEIEWELQKENSKRWNPEIQYTSNYNKSVNVDFTVDTNGVYSEPRPIGTRYLTRNL

SEQ ID NO: 71 - protein, 735 aa, Adeno-associated virus
MAADGYLPDWLEDTLSEGIRQWWKLKPGPPPPKPAERHQDNSRGLVLPGYKYLGPSNGLDKGEPVNEADAAALEHDKAYDRQLDSGDNPYLKYNHADAEFQERLKEDTSFGGNLGRAVFQAKKRVLEPLGLVEEPVKTAPGKKRPVEHSPVEPDSSSGTGKAGHQPARKRLNFGQTGDADSVPDPQPLGQPPAAPTSLGSTTMATGSGAPMADNNEGADGVGNSSGNWHCDSQWLGDRVITTSTRTWALPTYNNHLYKQISSQSGASNDNHYFGCSTPWGYFDFNRFHCHFSPRDWQRLINNNWGFRPKRLNFKLFNIQVKEVTQNDGTTTIANNLTSTVQVFTDSEYPLPYVLGSAHQGCLPPFPADVFMVPQYGYLTLNNGSQAVGRSSFYCLEYFPSQMLRTGNNFTFSYTFEDVPFHSSYAHSQSLDRLMNPLIDQYLYYLNRTQSNSGTLQQSRLLFSQAGPTSMSLQAKNWLPGPCYRQQRLSKQANDNNNSNFPWTAATKYHLNGRDSLVNPGPAMASHKDDEEKFFPMHGTLIFGKQGTNANDADLEHVMITDEEEIRTTNPVATEQYGNVSNNLQNSNTGPTTENVNHQGALPGMVWQDRDVYLQGPIWAKIPHTDGHFHPSPLMGGFGLKHPPPQIMIKNTPVPANPPTNFSSAKFASFITQYSTGQVSVEIEWELQKENSKRWNPEIQYTSNYNKSVNVDFTVDTNGVYSEPCPIGTRYLTRNL

SEQ ID NO: 72 - protein, 735 aa, Adeno-associated virus
MAADGYLPDWLEDTLSEGIRQWWKLKPGPPPPKLAERHQDDSRGLVLPGYKYLGPFNGLDKGEPVNEADAAALEHDKAYDRQLDSGDNPYLKYNHADAEFQERLKEDTSFGGNLGRAVFQAKKRVLEPLGLVEEPVKTAPGKKRPVEHSPVEPDSSSGTGKAGHQPARKRLNFGQTGDADSVPDPQPLGQPPAAPTSLGSTTMATGSGAPMADNNEGADGVGNSSGNWHCDSQWLGDRVITTSTRTWALPTYNNHLYKQISSQSGASNDNHYFGYSTPWGYFDFNRFHCHFSPRDWQRLINNNWGFRPKRLNFKLFNIQVKEVTQNDGTTTIANNLTSTVQVFTDSEYQLPYVLGSAHQGCLPPFPADVFTVPQYGYLTLNNGSQAVGRSSFYCLEYFPSQMLRTGNNLTFSYTFEDVPFHSSYAHSQSLDRLMNPLIDQYLYYLNRTQSNSGTLQQSRLLFSQAGPTSMSLQAKNWLPGPCYRQQRLSKQANDNNNSNFPWTAATKYHLNGRDSLVNPGPAMASHKDDEEKFFPMHGTLIFGKQGTNANDADLEHVMITDEEEIRTTNPVATEQYGNVSNNLQNSNTGPTTENVNHQGALPGMVWQDRDVYLQGPIWAKIPHTDGHFHPSPLMGGFGLKHPPPQIMIKNTPVPANPPTNYSSAKFASFITQYSTGQVSVEIEWELRKENSKRWNPEIQYTSNYNKSVNVDFTVDTNGVYSEPRPIGTRYLTRNL

SEQ ID NO: 73 - protein, 735 aa, Adeno-associated virus
MAADGYLPDWLEDTLSEGIRQWWKLKPGPPPPKPAERHQDDSRGLVLPGYKYLGPFNGLDKGEPVNEADAAALEHDKAYDRQLDSGDNPYLKYNHADAEFQERLKEDTSFGGNLGRAVFQAKKRVLEPLGLVEEPVKTAPGKKRPVEHSPVEPDSSSGTGKAGHQPARKRLNFGQTGDADSVPDPQPLGQPPAAPTSLGSTTMATGSGAPMADNNEGADGVGNSSGNWHCDSQWLGDRVITTSTRTWALPTYNNHLYKQISSQSGASNDNHYFGYSTPWGYFDFNRFHCHFSPRDWQRLINNNWGFRPKRLNFKLFNIQVKEVTQNDGTTTIANNLTSTVQVFTDSEYQLPYVLGSAHQGCLPPFPADVFMVPQYGYLTLNNGSQAVGRSSFYCLEYFPSQMLRTGNNFTFSYTFEDVPFHSSYAHSQSLDRLMNPLIDQYLYYLNRTQSNSGTLQQSRLLFSQAGPTSMSLQAKNWLPGPCYRQQRLSKQANDNNNSNFPWTAATKYRLNGRDSLVNPGPAMASHKDDEEKFFPMHGTLIFGKQGTNANDADLEHVMITDEEEIRTTNPVATEQYGNVSNNLQNSNTGPTTENVNHQGALPGMVWQDRDVYLQGPIWAKIPHTDGHFHPSPLMGGFGLKHPPPQIMIKNTPVPANPPTNFSSAKFASFITQYSTGQVSVEIEWELQKENSKRWNPEIQYTSNYNKSVNVDFTVDTNGVYSEPRPIGTRYLTRNL

SEQ ID NO: 74 - protein, 735 aa, Adeno-associated virus
MAADGYLPDWLEDTLSEGIRQWWKLKPGPPPPKPAERHKDDSRGLVLPGYKYLGPFNGLYKGEPVDEADAAALEHDKAYDRQLDSGDNPYLKYNHADAEFQERLKEDTSFGGNLGRAVFQAKKRVLEPLGLVGEPVKTAPGKKRPVEHSPVEPDSSSGTGKAGNQPARKRLNFGQTGDADSVPDPQPLGQPPAAPSGLGSTTMATGSGAPVADNNEGADGVGNSSGNWHCDSQWLGDRVITTSTRTWALPTYNNHLYKQISSQSGASNDNHYFGYSTPWGYFDFNRFHCHFSPRDRQRLINNNWGFRPKRLNFKLFNIQVKEVTQNDGTTTIANNLTSTVQVFTDSGYQLPYVLGLAHQGCLPPFPADVFMVPQYGYLTLNNGSQAVGRSSFYCLEYFPSQMLRTGNNFQFSYTFEDVPFHSSYAHSQSLDRLMNPLIDQYLYYLNKTQSNSGTLQQSRLLFSQAGPTSMSLQAKNWLPGPCYRQQRLSKQANDNNNSNFPWTAATKYHLNGRDSLVNPGPAMASHKDDEEKFFPMHGTLIFGKQGTNANDADLDNVMITDEEEIRTTNPVATEQYGYVSNNLQNSNTGPTTGTVNHQGALPGMVWQDRDVYLQGPIWAKIPHTDGHFHPSPLMGGFGLKHPPPQIMIKNTPVPANPPTNFSSAKFASFITQYSTGQVSVEIEWELQKEDSKRWNPEIQYTSNYNKPVNVDFTVDTNGVYSEPRPIGTRYLTRNL

SEQ ID NO: 75 - protein, 735 aa, Adeno-associated virus
MAADGYLPDWLEDTLSEGIRQWWKLKPGPPPPKPAERHKDDSRGLVLPGYKYLGPFNGLYKGEPVNEADAAALEHDKAYDRQLDSGDNPYLKYNHAGAEFQERLKEDTSFGGNLGRAVFQAKKRVLEPLGLVEEPVKTAPGKKRPVEHSPVEPDSSSGTGKAGNQPARKRLNFGQTGDADSVPDPQPLGQPPAAPSGLGSTTMATGSGAPVADNNEGADGVGNSSGNWHCDSQWLGDRVITTSTRTWALPTYNNHLYKQISSQSGASNDNHYFGYSTPWGYFDFNRFHCHFSPRDWQRLINNNWGFRPKRLNFKLFNIQVKEVTQNDGTTTIANNLTSTVQVFTDSEYQLPYVLGSAHQGCLPPFPADVFMVPQYGYLTLNNGSQAVGRSSFYCLEYFPSQMLRTGNNFQFSYTFEDVPFHSSYAHSQSLDRLMNPLIDQYLYYLNKTQSNSGTLQQSRLLFSQAGPTSMSLQAKNWLPGPCYRQQRLSKQANDNNNSNFPWTAATKYHLNGRDSLVNPGPAMASHKDDEEKFFPMHGTLIFGKQGTNANDADLDNVMITDEEEIRTTNPVATEQYGYVSNNLQDSNTGPTTGTVNHQGALPGMVWQDRDVYLQGPIWAKIPHTDGHFHPSPLMGGFGLKHPPPQIMIKNTPVPANPPTNFSSAKFASFITQYSTGQVSVEIEWELQKENSKRWNPEIQYTSNYNKSVNVDFTVDTNGVYSEPRPIGTRYLTRNL

SEQ ID NO: 76 - protein, 738 aa, Adeno-associated virus
MAADGYLPDWLEDNLSEGIREWWDLKPGAPKPKANQQKQDDGRGLVLPGCKYLGPFNGLDKGEPVNAADAAALEHDKAYDQQLKAGDNPYLRYNHADAEFQERLQEDTSFGGNLGRAVFQAKKRVLEPLGLVEEGAKTAPGKKRPVEPSPQRSPDSSTGIGKTGQQPAKKRLNFGQTGDSESVPDPQPIGEPPAGPSGLGSGTMAAGGGAPMADNNEGADGVGSSSGNWHCDSTWLGDRVITTSTRTWALPTYNNHLYKQISNGTSGGSTNDNTYFGYSTPWGYFDFNRFHCHFSPRDWQRLINNNWGFRPKRLNFKLFNIQVKEVTQNEGTKTIANNLTSTIQVFTDSEYQLPYVLGSAHQGCPPPFPADVFMIPQYGYLTLNNGSQAVGRSSFYCLEYFPSQMRRTGNNFEFSYQFEDVPFHSSYAHSQSLDRLMNPLIDQYLYYLSRTQSTGGTAGTQQLLFSQAGPNNMSAQAKNWLPGPCYRQQRVSTTLSQNNNSNFAWTGATKYHLNGRDSLVNPGVAMATHKDDEERFFPSSGVLMFGKQGAGKDNVDYSSVMLTSEEEIKTTNPVATEQYGVVADNLQQQNAAPIVGAVNSQGALPGMVWQNRDVYLQGPIWAKIPHTDGNFHPSPLMGGFGLKHPPPQILIKNTPVPADPPTTFSQAKLASFITQYSTGQVSVEIEWELQKENSKRWNPEIQYTSNYNKSVNVDFTVDTNGVYSEPRPIGTRYLTRNL

SEQ ID NO: 77 - protein, 735 aa, Adeno-associated virus
MAADGYLPDWLEDTLSEGIRQWWKLKPGPPPPKPAERHKDDSRGLVLPGYKYLGPFNGLDKGEPVNEADAAALEHDKAYDRQLESGDNPYLKYNHADAEFQERLKEDTSFGGNLGRAVFQAKKRVLEPLGLVEEPVKTAPGKKRPVEHSPVEPDSSSGTGKAGQQPARKRLNFGQTGDADSVPDPQPLGQPPAAPSGLGSTTMASGSGAPVADNNEGADGVGNSSGNWHCDSQWLGDRVITTSTRTWALPTYNNHLYKQISSQSGASNDNHYFGYSTPWGYFDFNRFHCHFSPRDWQRLINNSWGFRPKRLNFKLFNIQVKEVTQNDGTTTIANNLTSTVQVFTDSEYQLPYVLGSAHQGCLPPFPADVFMVPQYGYLTLNNGSQAVGRSSFYCLEYFPSQMLRTGNNFQFSYTFEDVPFHSSYAHSQSLDRLLNPLIDQYLYYLNKTQSNSGTLQQSRLLFSQAGPTSMSLQAKNWLPGPCYRQQRLSKQANDNNNSNFPWTAATKYHLNGRDSLVNPGPAMASHKDDEEKFFPMHGTLIFGKQGTNANDADLDNVMITDEEEIRTTNPVATEQYGYVSNNLQNSNTGPTTGTVNHQGALPGMVWQDRDVYLQGPIWAKIPHTDGHFHPSPLMGGFGLKHPPPQIMIKNTPVPANPPTNFSSSKFASFITQYSTGQVSVEIEWELQKENSKRWNPEIQYTSNYNKSVNVDFTVDTNGVYSEPRPIGTRYPTRNL

SEQ ID NO: 78 - protein, 735 aa, Adeno-associated virus
MAADGYLPDWLEDTLSEGIRQWWKLKPGPPPPKPAERHKDDSRGLVLPGYRYLGPFNGLDKGEPVNEADAAALEHDKAYDRQLDSGDNPYLKYNHVDAEFQERLKEDTSFGGNLGRAVFQAKKRILEPLGLVEEPVKAAPGEKRPVEHSPAEPDSSSGTGKAGQQPARKRLNFGQTGDADSVPDPQPLGQPPAAPSGLGTNTMASGSGAPMADNNEGADGVGNSSGNWHCDSTWMGDRVITTSTRTWALPTYNNHLYKQISSQSGASNDNHYFGYSTPWGHFDFNRFHCHFSPRDWQRLINNNWGFRPKRLSFKLFNIQVKEVTQNDGTTTIANNLTSTVQVFTDSEYQLPYVLGSAHQGCLPPFPADVFMVPQYGYLTLNNGSQAVGRSSFYCLEYFPSQMLRTGNNFTFSYTFEDVPFHSSYAHSQSLDRLMNPLIDQYLYYLSRTNTPSGTTTMSRLQFSQAGASDIRDQSRNWLPGPCYRQQRVSKTAADNNNSDYSWTGATKYHLNGRDSLVNPGPAMASHKDDEEKYFPQSGVLIFGKQDSGKTNVDIEKVMITDEEEIRTTNPVATEQYGSVSTNLQSGNTQAATSDVNTQGVLPGMVWQDRDVYLQGPIWAKIPHTDGHFHPSPPMGGFGLKHPPPQILIKNTPVPANPSTTFSAAKFASFITQYSTGQVSVEIEWELQKENSKRWNPEIQYTSNYNKSVNVDFTVDTNGVYSEPRPIGARYLTRNL

SEQ ID NO: 79 - protein, 735 aa, Adeno-associated virus
MAADGYLPDWLEDTLSEGIRQWWKLKPGPPPPKPAERHKDDSRGLVLPGYKYLGPFNGLDKGEPVNEADAAALEHDKAYDRQLDSGDNPYLKYNHADAEFQERLKEDTSFGGNLGRAVFQAKKRILEPLGLVEEPVKTAPGKKRPVEHSPAEPDSSSGTGKAGQQPARKRLNFGQTGDADSVPDPRPLGQPPAAPSGLGTNTMASGSGAPMADNNEGADGVGNSSGNWHCDSTWMGDRVITTSTRTWALPTYNNHLYKQISSQSGASNDNHYFGYSTPWGYFDFNRFHCHFSPRDWQRLINNNWGFRPKRLSFKLFNIQVKEVTQNDGTTTIANNLTSTVQVFTDSEYQLPYVLGSAHQGCLPPFPADVFMVPQYGYLTLNNGSQAVGRSSFYCLEYFPSQMLRTGNNFTFSYTFEDVPFHSSYAHSQSLDRLMNPLIDQYLYYLSRTNTPSGTTTMSRLQFSQAGASDIRDQSRNWLPGPCYRQQRVSKTAADNNNSDYSWTGATKYHLNGRDSLVNPGPAMASHKDDEEKYFPQSGVLIFGKQDSGKTNVDIEKVMITDEEEIRTTNPVATEQYGSVSTNLQSGNTQAATSDVNTQGVLPGMVWQDRDVYLQGPIWAKIPHTDGHFHPSPLMGGFGLKHPPPQILIKNTPVPANPSTTFSAAKFASFITQYSTGQVSVEIEWELQKENSKRWNPEIQYTSNYNKSVNVDFTVDTNGVYSEPRPIGTRYLTRNL

SEQ ID NO: 80 - protein, 735 aa, Adeno-associated virus
MAADGYLPDWLEDTLSEGIRQWWKLKPGPPPPKPAERHKDDSRGLVLPGYKYLGPFNGLDKGEPVNEADAAALEHDKAYDRQLDSGDNPYLKYNHADAEFQERLKGDTSFGGNLGRAVFQAKKRILEPLGLVEEPVKTAPGKKRPVEHSPAEPDSSSGTGKAGQQPARKRLNFGQTGDADSVPDPQPLGQPPAAPSGLGTNTMASGSGAPMADNNEGADGVGNSSGNWHCDSTWMGGRVITTSTRTWALPTYNNHLYKQISSQSGASNDNHYFGYSTPWGYFDFNRFHCHFSPRDWQRLINNNWGFRPKRLSFKLFNIQVKEVTQNDGTTTIANNLTSTVQVFTDSEYQLPYVLGSAHQGCLPPFPADVFMVPQYGYLTLNNGSQAVGRSSFYCLEYFPSQTLRTGNNFTFSYTFEDVPFHSSYAHSQSLDRLMNPLIDQYLYYLSRTNTPSGTTTMSRLQFSQAGASDIRDQSRNWLPGPCYRQQRVSKTAADNNNSDYSWTGATKYHLNGRDSLVNPGPAMASHKDDEEKYFPQSGVLIFGKQDSGKTNVDIEKVMITDEEEIRTTNPVATEQYGSVSTNLQSGNTQAATSDVNTQGVLPGMVWQDRDVYLQGPIWAKIPHTDGHFHPSPLMGGFGLKHPPPQILIKNTPVPANPSTTFSAAKFASFITQYSTGQVSVEIEWELQKENSKRWNPEIQYTSNYNKSVNVDFTVDTNGVYSEPRPIGTRYLTRNL

SEQ ID NO: 81 - protein, 735 aa, Adeno-associated virus
MAADGYLPDWLEDTLSEGIRQWWKLKPGPPPPKPAERHKDDSRGLVLPGYKYLGPFNGLDKGEPVNEADAAALEHDKAYDRQLDSGDNPYLKYNHADAEFQERLKEDTSFGGNLGRAVFQAKKRILEPLGLVEEPVKTAPGKKRPVEHSPAEPDSSSGTGKAGQQPARKRLNFGQTGDADSVPDPQPLGQPPAAPSGLGTNTMASGSGAPMADNNEGADGVGNSSGNWHCDSTWMGDRVITTSTRTWALPTCNNHLYKQISSQSGASNDNHYFGYSTPWGYFDFNRFHCHFSPRDWQRLINNNWGFRPKRLSFKLFNIQVKEVTQNDGTTTIANNLTSTVQVFTDSEYQLPYVLGSAHQGCLPPFPADVFMVPQYGYLTLNNGSQAVGRSSFYCLEYFPSQMLRTGNNFTFSYTFEDVPFHSSYAHSQSLDRLMNPLIDQYLYYLSRTNTPSGTTTMSRLQFSQAGASDIRDQSRNWLPGPCYRQQRVSKTAADNNNSDYSWTGATKYHLNGRDSLVNPGPAMASHKDDEEKYFPQSGVLIFGKQDSGKTNVDIEKVMITDEEEIRTTNPVATEQYGSVSTYLQSGNTQAATSDVNTQGVLPGMVWQDRDVYLRGPIWAKIPHTDGHFHPSPLMGGFGLKHPPPQILIKNTPVPANPSTTFSAAKFASFITQYSTGQVSVEIEWELQKENSKRWNPEIQYTSNYNKSVNVDFTVDTNGVYSEPRPIGTRYLTRNL

SEQ ID NO: 82 - protein, 735 aa, Adeno-associated virus
MAADGYLPDWLEDTLSEGIRQWWKLKPGPPPPKPAERHKDGSRGLVLPGYKYLGPFNGLDKGEPVNEADAAALEHDKAYDRQLNSGDNPYLKYNHADAEFQERLKEDTSFGGNLGRAVFQAKKRVLEPLGLVEEPVKTAPGKKRPVEHSPAEPDSSSGTGKAGQQPARKRLNFGQTGDADSVPDPQPLGQPPAAPSGLGSTTMATGSGAPMADNNEGADGVGNSSGNWHCDSQWLGDRVITTSTRTWALPTYNNHLYKQISSQSGASNDNHYFGYSTPWGYFDFNRFHCHFSPRDWQRLINNNWGFRPKRLNFKLFNIQVKEVTQNDGTTTIANNLTSTVQVFTDSEYQLPYVLGSAHQGCLPPFPADVFMVPQYGYLTLNNGSQAVGRSPFYCLEYFPSQMLRTGNNFQFSYTFEDVPFHSSYAHSQSLDRLMNPLIDQYLYYLNKTQTNSGTLQQSRLLFSQAGPTNMSLQAKNWLPGPCYRQQRLSKQANDNNNSNFPWTAATKYHLNGRDSLVNPGPAMASHKDDEEKFFPMHGTLIFGKQGTNANDADLENVMITDEEEIRTTNPVATEQYGTVSNNLQNSNTGPTTGTVNHQGALPGMVWQDRDVYLQGPIWAKIPHTDGHFHPSPLMGGFGLKHPPPQIMIKNTPVPANPPTNFSSAKFASFITQYSTGQVSVEIEWELQKENSKRWNPEIQYTSNYNKSVNVDFTVDNNGVYSEPRPIGTRYLTRNL

SEQ ID NO: 83 - protein, 735 aa, Adeno-associated virus
MAADGYLPDWLEDTLSEGIRQWWKLKPGPPPPKPAERHKDDSRGLVLPGYKYLGPFNGLDKGEPVNEADAAALEHDKAYDRQLDSGDNPYLKYNHADAEFQERLKEDTSFGGNLGRAVFQAKKRILEPLGLVEEPVKTAPGKKRPVEHSPAEPDSSSGTGKAGQQPARKRLNFGQTGDADSVPDPQPLGQPPAAPSGLGTNTMASGSGAPMADNNEGADGVGNSSGNWHCDSTWMGDRVITTSTRTWALPTYNNHLYKQISSQSGASNDNHYFGYSTPWGYFDFNRFHCHFSPRDWQRLINNNWGFRPKRLSFKLFNIQVKEVTQNDGTTTIANNLTSTVQVFTDSGYQLPYVLGSAHQGCLPPFPADVFMVPQYGYLTLNNGSQAVGRSSFYCLEYFPSQMLRTGNNFTFSYTFEDVPFHSSYAHGQSLDRLMNPLIDQYLYYLSRTNTPSGTTTMSRLQFSQAGASDVRDQSRNWLPGPCYRQQRVSKTAADNNNSDYSWTGATKYHLNGRDSLVNPGPAMASHKDDEEKYFPQSGVLVFGKQDSGKTNVDIEKVMITDEEEIRTTNPAATEQYGSVSTNLQSGNTQAATSDVNTQGVLPGMVWQDRDVYLQGPIWAKIPHTDGHFHPSPLMGGFGLKHPPPQILIKNTPVPANPSTTFSAAKFVSFITQYSTGQVSVEIEWELQKENSKRWNPEIQYTSNYNKSVNVDFTVDTNGVYSEPRPIGTRYLTRNL

SEQ ID NO: 84 - protein, 735 aa, Adeno-associated virus
MAADGYLPDWLEDTLSEGIRQWWKLKPGPPPPKPAERHKDDSRGLVLPGYKYLGPFNGLDKGEPVNEADAAALEHDKAYDRQLDSGDNPYLKYNHADAEFQERLKEDTSFGGNLGRAVFQAKKRVLEPLSLVEEPVKTAPGKKRPVEHSPAEPDSSSGTGKSGNQPARKRLNFGQTGDSDSVPDPQPLGQPPAAPSGLGTNTMATGSGAPMADNNEGADGVGNSSGNWHCDSTWMGDRVITTSTRTWALPTYNNHLYKQISSQSGASNDNHYFGYSTPWGYFDFNRFHCHFSPRDWQRLINNNWGFRPKRLNFKLFNIQVKEVTQNDGTTTIANNLTSTVQVFTDSEYQLPYVLGSAHQGCLPPFPADVFMVPQYGYLTLNNGSQAVGRSSFYCLEYFPSQMLRTGNNFTFSYTFEDVPFHSSYAHSQSLDRLMNPLIDQYLYYLSRTNTPSGTTTQSRLQFSQAGASDIQDQSRNWLPGPCYRQQRVSKTSADNNNSEYSWTGATKYHLNGRDSLVNPGPAMASHKDDEEKFFPQSGVLIFGKQGSEKTNVDIEKVMITDEEEIRTTNPVATEQYGSVSTNLQSGNTQAATADVNTQGVLPGMVGQDRDVYLQGPTWAKIPHTDGHFHPSPLMGGFGLKHPPPQILIKNTPVPANPSTTFSAAKFASFITQYSTGQVSVEIEWELQKENSKRWNPEIQYTSNYNKSVNVDFTVDTNGVYSEPRPIGTRYLTRNL

SEQ ID NO: 85 - protein, 735 aa, Adeno-associated virus
MAADGYLPDWLEDTLSEGIRQWWKLKPGPPPPKPAERHKDDSRGLVLPGYKYLGPFNGLDKGEPVNEADAAALEHDKAYDRQLDSGDNPYLKYNHADAEFQERLKEDTSFGGNLGRAVFQAKKRVLEPLGLVEEPVKTAPGKKRPVEHSPAEPDSSSGTGKSGNQPARKRLNFGQTGDSDSVPDPQPLGQPPAAPSGLGTNTMATGSGAPMADNNEGADGVGNSSGNWHCDSTWMGDRVITTSTRTWALPTYNNHLYKQISSQSGASNDNHYFGYSTPWGYFDFNRFHCHFSPRDWQRLINNNWGFRPKRLNFKLFNIQVKEVTQNDGTTTIANNLTSTVQVFTDSEYQLPYVLGSAHQGCLPPFPADVFMVPQYGYLTLNNGSQAVGRSSFYCLGYFPSQMLRTGNNFTFSYTFEDVPFHSSYAHSQSLDRLMNPLIDQYLYYLSRTNTPSGTTTQSRLQFSQAGASDIRDQSRNWLPGPCYRQQRVSKTSADNNNSEYSWTGATKYHLNGRDSLVNPGPAMASHKDDEEKFFPQSGVLIFGKQGPEKTNVDIEKVMITDEEEIRTTNPVATEQYGSVSTNLQSGNTQAATADVNTQGVLPGMVWQDRDVYLQGPIWAKIPHTDGHFHPSPLMGGFGLKHPPPQILIKNTPVPANPSTTFSAAKFASFITQYSTGQVSVEIEWELQKENSKRWNPEIQYTSNYNKSVNVDFTVDTNGVYSEPRPIGTRYLTRNL

SEQ ID NO: 86 - protein, 736 aa, Adeno-associated virus
MAADGYLPDWLEDTLSEGIRQWWKLKPGPPPPKPAERHKDDSRGLVLPGYKYLGPGNGLDKGEPVNAADAAALEHDKAYDQQLKAGDNPYLKYNHADAEFQERLKEDTSFGGNLGRAVFQAKKRLLEPLGLVEEAAKTAPGKKRPVEQSPQEPDSSAGIGKSGSQPAKKKLNFGQTGDTESVPDPQPIGEPPAAPSGVGSLTMASGGGAPVADNNEGADGVGSSSGNWHCDSQWLGDRVITTSTRTWALPTYNNHLYKQISNSTSGGSSNDNAYFGYSTPWGYFDFNRFHCHFSPRDWQRLINNNWGFRPKRLNFKLFNIQVKEVTDNNGVKTIANNLTSTVQVFTDSDYQLPYVLGSAHEGCLPPFPADVFMIPQYGYLTLNDGGQAVGRSSFYCLEYFPSQMLRTGNNFQFSYEFENVPFHSSYAHSQSLDRLMNPLIDQYLYYLSKTINGSGQNQQTLKFSVAGPSNMAVQGRNYIPGPSYRQQRVSTTVTQNNNSEFAWPGASSWALNGRNSLMNPGPAMASHKEGEDRFFPLSGSLIFGKQGTGRDNVDADKVMITNEEEIKTTNPVATESYGQVATNHQSAQAQAQTGWVQNQGILPGMVWQDRDVYLQGPIWAKIPHTDGNFHPSPLMGGFGMKHPPPQILIKNTPVPADPPTAFNKDKLNSFITQYSTGQVSVEIEWELQKENSKRWNPEIQYTSNYYKSNNVEFAVSTEGVYSEPRPIGTRYLTRNL

SEQ ID NO: 87 - protein, 736 aa, Adeno-associated virus
MAADGYLPDWLEDTLSEGIRQWWKLKPGPPPPKPAERHKDDSRGLVLPGYKYLGPGNGLDKGEPVNAADAAALEHDKAYDQQLKAGDNPYLKYNHADAEFQERLKEDTSFGGNLGRAVFQAKKRLLEPLGLVEEAAKTAPGKKRPVEQSPQEPDSSAGIGKSGSQPAKKKLNFGQTGDTESVPDPQPIGEPPAAPSGVGSLTMASGGGAPVADNNEGADGVGSSSGNWHCDSQWLGDRVITTSTRTWALPTYNNHLYKQISNSTSGGSSNDNAYFGYSTPWGYFDFNRFHCHFSPRDWQRLINNNWGFRPKRLNFKLFNIQVKEVTDNNGVKTIANNLTSTVQVFTDSDYQLPYVLGSAHEGCLPPFPADVFMIPQYGYLTLNDGSQAVGRSSFYCLEYFPSQMLRTGNNFQFSYEFENVPFHSSYAHSQSLDRLMNPLIDQYLYYLSKTINGSGQNQQTLKFSVAGPSNMAVQGRNYIPGPSYRQQRVSTTVTQNNNSEFAWPGASSWALNGRNSLMNPGPAMASHKEGEDRFFPLSGSLIFGKQGTGRDNVDADKVMITNEEEIKTTNPVATESYGQVATNHQSAQAQAQTGWVQNQGILPGMVWQDRDVYLQGPIWAKIPHTDGNFHPSPLMGGFGMKHPPPQILIKNTPVPADPPTAFNKDKLNSFITQYSTGQVSVEIEWELQKENSKRWNPEIQYTSNYYKSNNVEFAVNTEGVYSEPRPIGTRYLTRNL

SEQ ID NO: 88 - protein, 735 aa, Adeno-associated virus
MAADGYLPDWLEDTLSEGIRQRWKLKPGPPPPEPAERHKDDSRGLVLPGYKYLGPFNGLDKGEPVNEADAAALEHDKAYDRQLDSGDNPYLKYNHADAEFQERLKEDTSFGGNLGRAVFQAKKRVLEPLGLVEEPVKTAPGKKRPVEHSPVEPDSSSGTGKAGQQPARKRLNFGQTGDADSVPDPQPLGQPPAAPSGLGTNTMATGSGAPMADNNEGADGVGNSSGNWHCDSTWMGDRVITTSTRTWALPTYNNHLYKQISSQSGASNDNHYFGYSTPWGYFDFNRFHCHFSPRDWQRLINNNWGFRPKRLNFKLFNIQVKEVTQNDGTTTIANNLTSTVQVFTDSEYQLPYVLGSAHQGCLPPFPADVFMVPQYGYLTLNNESQAVGRSSFYCLEYFPSQMLRTGNNFTFSYTFEDVPFHSSYAHSQSLGRLMNPLIDQYLYYLSRTNTPSGTTTQSRLQFSQAGASDIRDQSRNWLPGPCYRQQRVSKTSADNNNSEYSWTGATKYHLNGRDSLVNPGPAMASHKDDEEKFFPQSGVLIFGKQGSEKTNVDIEKVMITDEEEIRTTNPVATEQYGSVSTNLQRGNRQAATADVNTQGVLPGMVWQDRDVYLQGPIWAKIPHTDGHFHPSPLMGGFGLKHPPPQILIKNTPVPANPSTTFSAAKFASFITQYSTGQVSVEIEWELQKENSKRWNPEIQYTSNYNKSVNVDFTVDTNGVYSEPRPIGTRYLTRNL

SEQ ID NO: 89 - protein, 738 aa, Adeno-associated virus
MAADGYLPDWLEDNLSEGIREWWDLKPGAPKPKANQQKQDDGRGLVLPGYKYLGPFNGLDKGEPVNAADAAALEHDKAYDQQLKAGDNPYLRYNHADAEFQERLQEDTSFGGNLGRAVFQAKKRVLEPLGLVEEAAKTAPGKKRPVEPSPQRSPDSSTGIGKKGQQPAKKRLNFGQTGDSESVPDPQPIGEPPAGPSGLGSGTMAAGGGAPMADNNEGADGVGSSSGNWHCDSTWLGDRVITTSTRTWALPTYNNHLYKQISNGTSGGSTNDNTYFGYSTPWGYFDFNRFHCHFSPRDWQRLINNNWGFRPKRLSFKLFNIQVKEVTQNEGTKTIANNLTSTIQVFTDSEYQLPYVLGSAHQGCLPPFPADVFMIPQYGYLTLNNGSQAVGRSSFYCLEYFPSQMLRTGNNFEFSYTFEDVPFHSSYAHSQSLDRLMNPLIDQYLYYLSRTQSTGGTQGTQQLLFSQAGPANMSAQAKNWLPGPCYRQQRVSTTLSQNNNSNFAWTGATKYHLNGRDSLVNPGVAMATHKDDEERFFPSSGVLMFGKQGAGRDNVDYSSVMLTSEEEIKTTNPVATEQYGVVADNLQQTNTGPIVGNVNSQGALPGMVWQNRDVYLQGPIWAKIPHTDGNFHPSPLMGGFGLKHPPPQILIKNTPVPADPPTTFSQAKLASFITQYSTGQVSVEIEWELQKENSKRWNPEIQYTSNYYKSTNVDFAVNTEGTYSEPRPIGTRYLTRNL

SEQ ID NO: 90 - protein, 738 aa, Adeno-associated virus
MAADGYLPDWLEDNLSEGIREWWDLKPGAPKPKANQQKQDDGRGLVLPGYKYLGPFNGLDKGEPVNAADAAALEHDKAYDQQLKAGDNPYLRYNHADAEFQERLQEDTSFGGNLGRAVFQAKKRVLEPLGLVEEGAKTAPGKKRPVEPSPQRSPDSSTGIGKKGQQPARKRLNFGRTGDSESVPDPQPIGEPPAAPSSVGSGTMAAGGGAPMADNNEGADGVGSSSGNWHCDSTWLGDRVITTSTRTWALPTYNNHLYKQISNGTSGGSTNDNTYFGYSTPWGYLDFNRFHCHFSPRDWQRLINNNWGFRPKRLSFKLFNIQVKEVTQNEGTKTIANNLASTIQVFTDSEYQPPYVLGSAHQGCLPPFPADVFMIPQYGYLTLNNGSQAVGRSSFYCLEYFPSQMLRTGNNFSFSYTFEDVPFHSSYAHSQSLDRLMNPLIDQYLYYLSRTQSTGGTAGTQQLLFSRAGPSNMSAQARNWLPGPCYRQQRVSTTLSQNNNSNFAWTGATKYHLNGRDSLVNPGVAMATNKDDEDRFFPSSGILMFGKQGAGKDNVDYSNVMLTSEEEIKTTNPVATEQYGVVADNLQQQNTAPTVGAVNSQGALPGMVWQNRDVYLQGPIWAKIPHTDGNFHPSPLMGGFGLKHPPPQILIKNTPVPADPPTAFNQAKLNSFIAQYSTGQVSVEIEWELQKENSKRWNPEIQYTSNYYKSTNADFAVNTEGVYSEPRPIGTRYLTRNL

SEQ ID NO: 91 - protein, 738 aa, Adeno-associated virus
MAADGYLPDWLEDNLSEGIREWWDLKPGAPKPKANQQKQDDGRGLVLPGYKYLGPFNGLDKGEPVNAADAAALEHDKAYDQQLKAGDNPYLRYNHADAEFQERLQEDTSFGGNLGRAVFQAKKRVLEPLGPVEEAAKTAPGKKRPVEPPPQRSPDSSTGIGKKGQQPAKKRLNFGQTGDSESVPDPQPIGEPPAGPSGLGSGTMAAGGGAPMADNNEGADGVGSSSGNWHCDSTWLGDRVITTSTRTWALPTYNNHLYKQISNGTSGGSTNDNTYFGYSTPWGYFDFNRFHCHFSPRDWQRLINNNWGFRPKRLSFKLFNIQVKEVTQNEGTKTVANNLTSTIQVFTDSEYQLPYVLGSAHQGCLPPFPADVFMIPQYGYLTLNNGSQAVGRSSFYCLEYFPSQMLRTGNNFEFSYTFEDVPFHSSYAHSQSLDRLMNPLIDQYLYYLSRTQSTGGTQGTQQLLFSQAGPANMSAQAKNWLPGPCYRQQRVSTTLSQNNNSNFAWTGATKYHLNGRDSLVNPGVAMATHKDDEERFFPSSGVLMFGKQGAGRDNVDYSSVMLTSEEEIKTTNPVATEQYGVVADNLQQTNTGPIVGNVNSQGALPGMVWQNRDVYLQGPIWAKIPHTDGNFHPSPLMGGFGLKHPPPQILIKNTPVPADPPTTFSQAKLASFITQYSTGQVSVEIEWELQKENSKRWNPEIQYTSNYYKSTNVDFAVNTEGTYSEPRPIGTRYLTRNL

SEQ ID NO: 92 - protein, 738 aa, Adeno-associated virus
MAADGYLPDWLEDNLSEGIREWWDLKPGAPKPKANQQKQDDGRGLVLPGYKYLGPFNGLDKGEPVNAADAAALEHDKAYDQQLKAGDNPYLRYNHADAEFQERLQEDTSFGGNLGRAVFQAKKRVLEPLGLVEEAAKTAPGKKRPVEPSPQRSPDSSTGIGKKGQQPAKKRLNFGQTGDSESVPDPQPIGEPPAGPSGLGSGTMAAGGGAPMADNNEGADGVGSSSGNWHCDSTWLGDRVITTSTRTWALPTYNNHLYKQISNGTSGGSTNDNTYFGYSTPWGYFDFNRFHCHFSPRDWQRLINNNWGFRPKRLSFKLFNIQVKEVTQNEGTKTIANNLTSTIQVFTDSEYQLPYVLGSAHQGCLPPFPADVFMIPQYGYLTLNNGSQAVGRSSFYCLEYFPSQMLRTGNNFEFSYTFEDVPFHSSYAHSQSLDRLMNPLIDQYLYYLSRTQSTGGTQGTQQLLFSQAGPANMSAQAKNWLPGPCYRQQRVSTTLSQSNNSNFAWTGATKYHLNGRDSLVNPGVAMATHKDDEERFFPSSGVLMFGKQGAGRDNVDYSSVMLTSEEEIKTTNPVATEQYGVVADNLQQTNTGPIVGNVNSQGALPGMVWQNRDVYLQGPIWAKIPHTDGNFHPSPLMGGLGLKHPPPQILIKNTPVPADPPTTFSQAKLASFITQYSTGQVSVEIEWELQKENSKRWNPEIQYTSNYYKSTNVDFAVNTEGTYSEPRPIGTRYLTRNL

SEQ ID NO: 93 - protein, 737 aa, Adeno-associated virus
MAADGYLPDWLEDNLSEGIREWWDLKPGAPKPKANQQKQDDGRGLVLPGYKYLGPFNGLDKGEPVNAADAAALEHDKAYDQQLKAGDNPYPRYNHADAEFQERLQEDTPFGGNLGRAVFQAKKRVLEPLGLVEEAAKTAPGKKRPVEPSPQRSPDSSTGIGKKGQQPAKKRLNFGQTGDSESVPDPQPIGEPPAGPSGLGSGTMAAGGGAPMADNNEGADGVGNASGNWHCDSTWLGDRVITTSTRTWALPTYNNHLYKQISSASTGASNDNHYFGYSTPWGYFDFNRFHCHFSPRDWQRLINNNWGFRPKRLNFKLFNIQVKEVTTNDGVTTIANNLTSTVQVFSDSEYQLPYVLGSAHQGCLPPFPADVFMIPQYGYLTLNNGSQAVGRSSFYCLEYFPSQMLRTGNNFTFSYTFEEVPLHSSYAHSQSLDRLMNPLIVQYLYYLNRTQNQSGSAQNKDLLFSRGSPAGMSVQPKNWLPGPCYRQQRVSKTKTDNNNSNFTWTGASKYNLNGRESIINPGTAMASHKDDEDKFFPMSGVMIFGKESAGASNTALDNVMITDEEEIKATNPVATERFGTVAVNFQSSSTDPATGDVHAMGALPGMVWQDRDVYLQGPIWAKIPHTDGHFHPSPLMGGFGLKNPPPQILIKNTPVPANPPAEFSATKFASFITQYSTGQVSVEIEWELQKENSKRWNPEVQYTSNYAKSASVDFTVDNNGLYTEPRPIGTRYLTRPL

SEQ ID NO: 94 - protein, 736 aa, Adeno-associated virus
MAADGYLPDWLEDTLSEGIRQWWKLRPGPPPPKPAERHKDDSRGLVLPGYKYLGPFNGLDKGEPVNEADAAALEHDKAYDRQLDSGDNPYLKYNHADAEFQERLKEDTSFGGNLGRAVFQAKKRVLEPLGLVEEGAETAPGKKRPVEQSPQGPDSSSGIGKTGQQPAKKRLNFGQTGDSESVPDPQPLGEPPATPAAVGPTTMASGGGAPMADNNEGADGVGNASGNWHCDSTWLGDRVITTSTRTWALPTYNNHLYKQISSASTGASNDNHYFGYSTPWGYFDFNRFHCHFSPRDWQRLINNNWGFRPKRLNFKLFNIQVKEVTTNDGVTTIANNLTSTVQVFSDSEYQLPYVLGSAHQGCLPPFPADVFMIPQYGYLTLNNGSQAVGRSSFYCLEYFPSQMLRTGNNFTFSYTFEEVPFHSSYAHSQSLDRLMNPLIDQYLYYPNRTQNQSGSAQNKDLLFSRGSPAGMSVQPKNWLPGPCYRQQRVSKTKTDNNNSNFTWTGASKYNLNGRESIINPGTAMASHKDDEDKFFPMSGVMIFGKESAGASNTALDNVMITDEEEIKATNPVATERFGTVAVNFQSSSTDPATGDVHAMGALPGMVWQGRDVYLQGPIWAKIPHTDGHFHPSPLMGGFGLKNPPPQILIKNTPVPANPPAEFSATKFASFITQYSTGQVSVEIEWELQKENSKRWNPEVQYTSNYAKSANVDFTVDNNGLYTEPRPIGTRYLTRPL

SEQ ID NO: 95 - protein, 735 aa, Adeno-associated virus
MAADGYLPDWLEDTLSEGIRQWWKLKPGPPPPKPAERHRDDSRGLVLPGYKYLGPFNGLDKGEPVNEADAAALEHDKAYDRQLDSGDNPYLKYNHADAEFQERLKEDTSFGGNLGRAVFQAKKRVLEPLGLVEEPVKTAPGKKRPVEHSPVEPDSSSGTGKAGQQPARKRLNFGQTGDADSVPDPQPLGQPPAAPSGLGTNTMATGSGAPMADNNEGADGVGNSSGNWHCDSTWMGDRVITTSTRTWALPTYNNHLYKQISSQSGASNDNHYFGYSTPWGYFDFNRFHCHFSPRDWQRLINNNWGFRPKRLNFKLFNIQVKEVTQNDGTTTIANNLTSTVQVFTDSGYQLPYVLGSAHQGCLPPFPADVFMVPQYGYPTLNNGSQAVGRSSFYCLEYFPSQMLRTGNNFTFSYTFEDVPFHSSYAHSQSLDRLMNPLIDQYLYYLSTTNTPSGTTTQSRLQFSQAGASDIRDQSRNWLPGPCYRQQRVSKTSADNNNSEYSWTGATKYHLNGRDSLVNPGPAVASHKDDEEKFFPQSGVLIFGKQGSEKTNVDIEKVMITDEEEIRTTNPVATEQYGSVSTNLQRGNRQAATADVNTQGVLPGMVWQDRDVYLQGPIWAKIPHTDGHFHPSPLMGGFGLKHPPPQILIKNTPVPANPSTTFSAAKFASFITQYSTGQVSVEIEWELQKENSKRWNPEIQYTSNYNKSVNVDFTVDTNGVYSEPRPIGTRYLTRNL

SEQ ID NO: 96 - protein, 736 aa, Adeno-associated virus
MAADGYLPDWLEDTLSEGIRQWWKLKPGPPPPKPAERHKDDSRGLVLPGYKYLGPFNGLDKGEPVNEADAAALEHDKAYDRQLDSGDNPYLKYNHADAEFQERLKEDTSFGGNLGRAVFQAKKRVLEPLGLVEEGAKTAPGKKRPVEQSPQEPDSPSGIGKTGQQPAKKRLNFGQTGDSESVPDPQPLGEPPATPAAVGPTTMASGGGAPMADNNEGADGVGNASGNWHCDSTWLGDRVITTSTRTWALPTYNNHLYKQISSASTGASNDNHYFGYSTPWGYFDFNRFHCHFSPRDWQRLINNNWGFRPKRLNFKLFNIQVKEVTTNDGVTTIANNLTSTVQVFSDSEYQLPYVLGSAHQGRLPPFPADVFMIPQYGYLTLNNGSQAVGRSSSYCLEYFPSQMLRTGNNFTFSYTFEEVPLHSSCAHSQSLDRLMNPLIDQYLYYLNRTQNQSGSAQNRDLLFSRGSPAGMSVQPKNWLPGPCYRQQRVSKTKTDNNNSNFTWTGASKYNLNGRESIINPGTAMASHKDDEDKFFPMSGVMIFGKESAGASNTALDNVMITDEEEIKATNPVATERFGTVAVNFQSSSTDPATGDVHAMGALPGMVWQDRDVYLQGPIWAKIPHTDGHFHPSPLMGGFGLKNPPPQILIKNTPVPANPPAEFSATKFASFITQYSAGQVSVEIEWELQKENSKRWNPEVQYTSNYAKSANVDFTVDNNGLYTEPRPIGTRYLTRPL

SEQ ID NO: 97 - protein, 735 aa, Adeno-associated virus
MAADGYLPDWLEDTLSEGIRQWWKLKPGPPPPKPAERHRDDSRGLVLPGYKYLGPFNGLDKGEPVNEADAAALEHDKAYDRQLDSGDNPYLKYNHADAEFQERLKEDTSFGGNLGRAVFQAKKRVLEPLGLVGEPVKTAPGKKRPVEHSPVEPDSSSGTGKAGQQPARKRLNFGQTGDADSVPDPQPLGQPPAAPSGLGTNTMATGSGAPMADNNEGADGVGNSSGNWHCDSTWMGDRVITTSTRTWALPTYNNHLYKQISSQSGASNDSHYFGYSTPWGYFDFNRFHCHFSPRDWQRLINNNWGFRPKRLNFKLFNIQVKEVTQNDGTTTIANNLTSTVQVFTDSEYQLPYVLGSAHQGCLPPFPADVFMVPQYGYLTLNNGSQAVGRSSFYCLEYFPSQMLRTGNNFTFSYTFEDVPFHSSYAHSQSLDRLMNPLIDQYLYYLSTTNTPSGTTTQSRLQFSQAGASDIRDQSRNWLPGPCYRQQRVSKTSADNNNSEYSWTGATKYHLNGRDSLVNPGPAMASHKDNEEKFFPQSGVLIFGKQGSEKTNVDIEKVMITDEEEIRTTNPVATEQYGSVSTNLQRGNRQAATADVNTQGVLPGMVWQDRDVYLQGPIWAKIPHTDGHFHPSPLMGGFGLKHPPPQILIKNTPVPANPSTTFSAAKFASFITQYSTGQVSVEIEWELQKENSKRWNPEIQYTSNYNKSVNVDFTVDTNGVYSEPRPIGTRYLTRNL

SEQ ID NO: 98 - protein, 736 aa, Adeno-associated virus
MAADGYLPDWLEDNLSEGIREWWDLKPGAPKPKANQQKQDDGRGLVLPGYKYLGPFNGLDKGEPVNAADAAALEHDKAYDQQLKAGDNPYLRYNHADAEFQERLQEDTSFGGNLGRAVFQAKKRVLEPLGLVEEGAKTAPGKKRPVEQSPQEPDSSSGIGKTGQQPAKKRLNFGQTGDSESVPDPQPLGEPPATPAAVGPTTMASGGGAPMADNNEGADGVGNASGNWHCDSTWLGDRVITTSTRTWALPTYNNHLYKQISSTSTGASNDNHYFGYGTPWGYFDFNRFHCHFSPRDWQRLINNNWGFRPKRLNFKLFNIQVEEVTTNDGVTTIANNLTSTVQVFSDSEYQLPYVLGSAHQGCLPPFPADVFMIPQYGYLTLNNGSQAVGRSSFYCLEYFPSQMLRTGNNFTFSYTFEEVPFHSSYAHSQSLDRLMNPLIDQYLYYLNRTQNQSGSAQNKDLLFSRGSPAGMSVQPKNWLPGPCYRQQRVSKTKTDNNNSNFTWTGASKYNLNGRESIINPGTAVASHKDDEDKFFPMSGVMIFGKESAGASSTALDNVMITDEEEIKATNPVATERFGTVAVNFQSSSTDPATGDVHAMGALPGMVWQDRDVYLQGPIWAKIPHTDGHFHPSPLMGGFGLKNPPPQILIKNTPVPANPPAEFSATKFASFITQYSTGQVSVEIEWELQKENSKRWNPEVQYTSNYAKSANVDFTVDNNGLYTEPRPIGTRYLTRPL

SEQ ID NO: 99 - protein, 735 aa, Adeno-associated virus
MAADGYLPDWLEDTLSEGIRQWWKLKPGPPPPKPAERHKDDSRGLVLPGYKYLGPFNGLDKGEPVNEADAAALEHDKAYDRQLDSGDNPYLKYNHADAEFQERLKEDTSFGGNLGRAVFQAKKRVLEPLGLVGEPVKTAPGKKRPVEHSPVEPDSSSGTGKAGQQPARKRLNFGQTGDADSVPDPQPLGQPPAAPSGLGTNTMATGSGAPMADNNEGADGVGNSSGNWHCDSTWMGDRVITTSTRTWALPTYNNHLYKQISSQSGASNDNHYFGYSTPWGYFDFNRFHCHFSPRDWQRLINNNWGFRPKRLNFKLFNIQVKEVTQNDGTTTIANNLTSTVQVFTDSEYQLPYVLGSAHQGCLPPFPADVFMVPQYGYLTLNNGSQAVGRSSFYCLEYFPSQMLRTGNNFTFSYTFEDVPFHSGYAHSQSLDRLMNPLIDQYLYYLSTTNTPSGTTTQSRLQFSQAGASDIRDQSRNWLPGPCYRQQRVSKTSADNNNSEYSWTGATKYHLNGRDSLVNPGPAMASHKDNEEKFFPQSGVLIFGKQGSEKTNVDIEKVMITDEEEIRTTNPVATEQYGSVSTNLQRGNRQAATADVNTQGVLPGMVWQDRDVYLQGPIWAKIPHTDGHFHPSPLMGGFGLKHPPPQILIKNTPVPANPSTTFSAAKFASFITQYSTGQVSVEIEWELQKENSKRWNPEIQYTSNYNKSVNVDFTVDTNGVYSEPRPIGTRYLTRNL

SEQ ID NO: 100 - protein, 735 aa, Adeno-associated virus
MAADGYLPDWLEDTLSEGIRQWWKLKPGPPPPKPAERHKDDSRGLVLPGYKYLGPFNGLDKGEPVNEADAAALEHDKAYDRQLDSGDNPYLKYNHADAEFQERLKEDTSFGGNLGRAVFQAKKRVLEPLGLVGEPVKTAPGKKRPVEHSPVEPDSSSGTGKAGQQPARKRLNFGQTGDADSVPDPQPLGQPPAAPSGLGTNTMATGSGAPMADNNEGADGVGNSSGNRHCDSTWMGDRVITTSTRTWALPTYNNHLYRQISSQSGASNDNHYFGYSTPWGYFDFNRFHCHFSPRDWQRLINNNWGFRPKRLNFKLFNIQVKEVTQNDGTTTIANNLTSTVQVFTDSEYQLPYVLGSAHQGCLPPFPADVFMVPQYGYLTLSNGSQAVGRSSFYCPEYFPSQMLRTGNNFTFSYTFEDVPFHSSYAHSQSLDRLMNPLIDQYLYYLSTTNTPSGTTTQSRLQFSQAGASDIRDQSRNWLPGPCYRQQRVSKTSADNNNSEYSWTGATKYHLNGRDSLVNPGPAMASHKDNEEKFFPQSGVLIFGKQGSEKTNVDIEKVMITDEEEIRTTNPVATEQYGSVSTNLQRGNRQAATADVNTQGVLPGMVWQDRDVYLQGPIWAKIPHTDGHFHPSPLMGGFGPKHPPPQILIKNTPVPANPSTTFSAAKFASFITQYSTGQVSVEIEWELQKENSKRWNPEIQYTSNYNKSVNVDFTVDTNGVYSEPRPIGTRYLTRNL

SEQ ID NO: 101 - protein, 734 aa, Adeno-associated virus
MAADGYLPDWLEDTLSEGIRQWWKLKPGPPPPKPAERHKDDSRGLVLPGYKYLGPFNGLDKGEPVNEADAAALEHDKAYDRQLDSGDNPYLKYNHADAEFQERLKEDTSFGGNLGRAVFQAKKRVLEPLGLVEEPVKTAPGKKRPVEHSPAEPDSSSGTGKAGQQPARKRLNFGQTGDADSVPDPQPLRQPPAAPTSLGSTTMATGSGAPMADNNEGADGVGNSSGNWHCDSQWLGDRVITTSTRTWALPTYNNHLYKQISSQSGASNDNHYFGYSTPWGYFDFNRFHCHFSPRDWQRLINNNWGFRPKRLNFKLFNIQVKEVTQNDGTTTIANNLTSTVQVFTDSEYQLPYVLGSAHQGCLPPFPADVFMVPQYGYLTLNNGSQAVGRSSFYCLEYFPSQMLRTGNNFQFSYTFEDVPFHSSYAHSQSLDRLMNPLIDQYLYYLNRTQTASGTQQSRLLFSQAGPTSMSLQAKNWLPGPCYRQQRLSKQANDNNNSNFPWTGATKYYLNGRDSLVNPGPAMASHKDDEEKFFPMHGTLIFGKEGTNATNAELENVMITDEEEIRTTNPVATEQYGYVSNNLQNSNTAASTETVNHQGALPGMVWQDRDVYLQGPIWAKIPHTDGHFHPSPLMGGFGLKHPPPQIMIKNTPVPANPPTNFSSAKFASFITQYSTGQVSVEIEWELQKENSKRWNPEIQYTSNYNKSVNVDFTVDTNGVYSEPRPIGTRYLTRNL

SEQ ID NO: 102 - protein, 734 aa, Adeno-associated virus
MAADGYLPDWLEDTLSEGIRQWWKLKPGPPPPKPAERHKDDSRGLVLPGYKYLGPFNGLDKGEPVNEADAAALEHDKAYDRQLDSGDNPYLKYNHADAEFQERLKEDTSFGGNLGRAVFQAKKRVLEPLGLVEEPVKTAPGKKRPVEHSPAEPDSSSGTGKAGQQPARKRLNFGQTGDADSVPDPQPLGQPPAAPTSLGSTTMATGSGAPMADNNEGADGVGNSSGNWHCDSQWLGDRVITTSTRTWALPTYNNHLYKQISSQSGASNDNHYFGYSTPWGYFDFNRFHCRFSPRDWQRLINNNWGFRPKRLNFKLFNIQVKEVTQNDGTTTIANNLTSTVQVFTDSEYQLPYVLGSAHQGCLPPFPADVFMVPQYGYLTLNNGSQAVGRSSFYCLEYFPSQMLRTGNNFQFSYTFEDVPFHSSYAHSQGLDRLMNPLIDQYLYYLNRTQTASGTQQSRLLFSQAGPTSMSLQAKNWLPGPCYRQQRLSKQANDNNNSNFPWTGATKYHLNGGDSLVNPGPAMASHKDDEEKFFPMHGTLIFGKEGTNATNAELENVMITDEEEIRTTNPVATEQYGYVSNNLQNSNTAASTETVNHQGALPGMVWQDRDVYLRGPIWAKIPHADGHFHPSPLMGGFGLKHPPPQIMIKNTPVPANPPTNFSSAKFASFITQYSTGQVSVEIEWELQKENSKRWNPEIQYTSNYNKSVNVDFTVDTNGVYSEPRPIGTRYLTRNL

SEQ ID NO: 103 - protein, 734 aa, Adeno-associated virus
MAADGYLPDWLEDTLSEGIRQWWKLKPGPPPPKPAERHKDDSRGLVLPGYKYLGPFNGLDKGEPVNEADAAALEHDKAYDRQLDSGDNPYLKYNHADAEFQERLKEDTSFGGNLGRAVFQAKKRVLEPLGLVEEPVKTAPGKKRPVEHSPAEPDSSSGTGKAGQQPARKRLNFGQTGDADSVPDPQPLGQPPAAPTSLGSTTMATGSGAPMADNNEGADGVGNSSGNWHCDSQWLGDRVITTSTRTWALPTYNNHLYKQISSQSGASNDNHYFGYSTPWGYFDFNRFHCHFSPRDWQRLINNNWGFRPKRLNFKLFNIQVKEVTQNDGTTTIANNLTSTVQVFTDSEYQLPYVLGSAHQGCLPPFPADVFMVPQYGYLTLNNGSQAVGRSSFYCLECFPSQMLRTGNNFQFSYTFEDVPFHSSYAHSQSLDRLMNPLIDQYLYYLNRTQTASGTQQSRLLFSQAGPTSMSLQAKNWLPGPCYRQQRLSKQANDNNNSNFPWTGATKYHLNGRDSLVNPGPAMASHKDDEEKFFPMHGTLIFGKEGTNATNAELENVMITDEEEIRTTNPVATEQYGYVSNNLQNSNTAASTETVNHQGALPGMVWQDRDVYLQGPIWAKIPHTDGHFHPSPLMGGFGLKHPPPQIMIKNTPVPANPPTNFSSAKFASFITQYSTGQVSVEIEWELQKENSKRWNPEIQYTSNYNKSVNVDFTVDTNGVYSEPRPIGTRYLTRNL

SEQ ID NO: 104 - protein, 735 aa, Adeno-associated virus
MAADGYLPDWLEDTLSEGIRQWWKLKPGPPPPKPAERHKDDSRGLVLPGYKYLGPFNGLDKGEPVNEADAAALEHDKAYDRQLDSGDNPYLKYNHADAEFQERLKEDTSFGGNLGRAVFQAKKRVLEPLGLVEEPVKTAPGKKRPVEHSPVEPDSSSGTGKAGNQPARKRLNFGQTGDADSVPDPQPLGQPPASPSGLGTNTMATGSGAPMADNNEGADGVGNSSGNWHCDSTWMGDRVVTTSTRTWALPTYNNHLYKQISSQSGASNDNHYFGYSTPWGYFDFNRFHCHFSPRDWQRLINNNWGFRPKRLNFKLFNIQVKEVTQNDGTTTIANNLTSTVQVFTDLEYQLPYVLGSAHQGCLPPFPADVFMVPQYGYLTLNNGSQAVGRSSFYCLEYFPSQMLRTGNNFTFSYTFEDVPFHSSYAHSQSLDRLMNPLIDQYLYYLSRTNTPSGTTTQSRLQFSQAGASDIRDQSRNWLPGPCYRQQRVSKTAADNNNSEYSWTGATKYHLNGRDSLVNPGPAMASHKDDEEKFFPQSGVLIFGKQGSEKTNVDIEKVMITDEEEIRTTNPVATEQYGSVSTNLQSGNTQAATSDVNTQGVLPGMVWQDRDVYLQGPIWAKIPHTDGHFHPSPLMGGFGLKHPPPQILIKNTPVPANPSTTFSAAKFASFITQYSTGQVSVEIEWELQKENSKRWNPEIQYTSNYNKSVNVDFTVDTNGVYSEPRPIGTRYLTRNL

SEQ ID NO: 105 - protein, 734 aa, Adeno-associated virus
MAADGYLPDWLEDTLSEGIRQWWKLKPGPPPKPAERHKDDSRGLVLPGYKYLGPFNGLDKGEPVNEADAAALEHDKAYDRQLDSGDNPYLKYNHADAEFQERLKEDTSFGGNLGRAVFQAKKRVLEPLGLVEEPVKTAPGKKRPVEHSPVEPDSSSGTGKAGNQPARKRLNFGQTGDADSVPDPQPLGQPPAAPSGLGTNTMATGSGAPMADNNEGADGVGNSSGDWHCDSTWMGDRVITTSTRTWALPTYNNHLYKQISSQSGASNDNHYFGYSTPWGYFDFNRFHCHFSPRDWQRLINNNWGFRPKRLNLKLFNIQVKEVTQNDGTTTIANNLTSTVQVFTDLEYQLPYVLGSAHQGCLPPFPADVFMVPQYGYLTLNNGSQAVGRSSFYCLEYFPSQMLRTGNNFTFSYTFEDVPFHSSYAHSQSLDRLMNPLIDQYLYYLSRTNTPSGTTTQSRLQFSQAGASDIRDQSRNWLPGPCYRQQRVSKTAADNNNGEYSWTGATKYHLNGRDSLVNPGPAMASHKDDEEKFFPQSGVLIFGKQGSEKTNVDIEKVMITDEEEIRTTNPVATEQYGSVSTNLQSGNTRAATSDVNTQGVLPGMVWQDRDVYLQGPIWAKIPHTDGHFHPSPLMGGFGLKHPPPQILIKNTPVPANPSTTFSAAKFASFITQYSTGQVSVEIEWELQKENSKRWNPEIQYTSNYNKSVNVDFTVDTNGVYSEPRPIGTRYLTRNL

SEQ ID NO: 106 - protein, 735 aa, Adeno-associated virus
MAADGYLPDWLEDTLSEGIRQWWKLKPGPPPPKPAERHKDDSRGLVLPGYKYLGPFNGLDKGEPVNEADAAALEHDKAYDRQLDSGDNPYLKYNHADAEFQERLKEDTSFGGNLGRAVFQAKKRVLEPLGLVEEPVKTAPGKKRPVEHSPVEPDSSSGTGKAGQQPARKRLNFGQTGDADSVPDPQPLGQPPAAPSGLGSTTMATGSGAPMADNNEGADGVGNSSGNWHCDSQWLGDRVITTSTRTWALPTYNNHLYKQISSQSGASNDNHYFGYSTPWGYFDFNRFHCHFSPRDWQRLINNNWGFRPKRLNFKLFNIQVKEVTQNDGTTTIANNLTSTVQVFTDSEYQLPYVLGSAHQGCLPPFPADVFMVPQYGYLTLNNGSQAVGRSSFYCLEYFPSQMLRTGNNFQFSYTFEDVPFHSSYAHSQSLDRLMNPLVDQYLYYLNKTQTNSGTLQQSRLLFSQAGPTNMSLQAKNWLPGPCYRQQRLSKQANDNNNSNFPWTAATKYHLNGRDSLVNPGPAMASHKDDEEKFFPMHGTLIFGKQGTNANDADLENVMITDEEEIRTTNPVATEQYGTVSNNLQNSNTGPTTGTVNHQGALPGMVWQDRDVYLQGPIWAKIPHTDGHFHPSPLMGGFGLKHPPPQIMIKNTPVPANPPTNFSSAKFASFITQYSTGQVSVEIEWELQKENSKRWNPEIQYTSNYNKSVNVDFTVDTNGVYSEPRPIGTRYLTRNL

SEQ ID NO: 107 - protein, 735 aa, Adeno-associated virus
MAADGYLPDWLEDTLSEGIRQWWKLKPGPPPPKPAERHKDDSRGLVLPGYKYLGPFNGLDKGEPVNEADAAALEHDKAYDRQLDSGDNPYLKYNHADAEFQERLKEDTSFGGNLGRAVFQAKKRVLEPLGLVEEPVKTAPGKKRPVEHPPVEPDSSSGTGKAGQQPARKRLNFGQTGDADSVPDPQPLGQPPAAPSGLGSTTMATGSGAPMADNNEGADGVGNSSGNWHCDSQWLGDRVITTSTRTWALPTYNNHLYKQISSQSGASNDNHYFGYSTPWGYFDFNRFHCHFSPRDWQRLINNNWGFRPKRLNFKLFNIQVKEVTQNDGTTTIANNLTSTVQVFTDSEYQLPYVLGSAHQGCLPPFPADVFMVPQYGYLTLNNGSQAVGRSSFYCLEYFPSQMLRTGNNFQFSYTFEDVPFHSSYAHSQSLDRLMNPLIDQYLYYLNKTQTNSGTLQQSRLLFSQAGPTNMSLQAKNRLPGPCYRQQRLSKQANDNNNSNFPWTAATKYHLNGRDSLVNPGPAMASHKDDEEKFFPMHGTLIFGKQGTNANDADLENVMITDEEEIRTTNPVATEQYGTVSNNLQNSNTGPTTGTVNHQGALPGMVWQDRDVYLQGPIWAKIPHTDGHFHPSPLVGGFGLKHPPPQIMIKNTPVPANPPTNFSSAKFASFITQYSTGQVSVEIEWELQKENSKRWNPEIQYTSNYNKSVNVDFTVDTNGVYSEPRPIGTRYLTRNL

SEQ ID NO: 108 - protein, 735 aa, Adeno-associated virus
MAADGYLPDWLEDTLSEGIRQWWKLKPGPPPPKPAERHKDDSRGLVLPGYKYLGPFNGLDKGEPVNEADAAALEHDKAYDRQLDSGDNPYPKYNHADAEFQERLKEDTSFGGNLGRAVFQAKKRVLEPLGLVEEPVKTAPGKKRPVEHSPAEPDSSSGTGKAGQQPARKRLNFGQTGDADSVPDPQPLGQPPAAPSGLGTNTMATGSGAPMADNNEGADGVGNSSGNWHCDSTWMGDRVITTSTRTWALPTYNNHLYKQISSQSGASNDNHYFGYSTPWGYFDFNRFHCHFSPRDWQRLINNNWGFRPKRLNFKLFNIQVKEVTQNDGTTTIANNLTSTVQVFTDSEYQLPYVLGSAHQGCLPPFPADVFMVPQYGYLTLNNGSQAVGRSSFYCLEYFPSQMLRTGNNFTFSYTFEDVPFHSSYAHSQSLDRLMNPLIDQYLYYLSRTNTPSGTTTQSRLQFSQAGASDIRDQSRNWLPGPCYRQQRVSKTSADNNNSEYSWTGATKYHLNGRDSLVNPGPAMASHKDDEEKFFPQSGVLIFGKQDSGKTNVDIEKVMITDEEEIRTTNPVATEQYGSVSTNLQSGNTQAATSDVNTQGVLPGMVWQDRDVYLQGPIWAKIPHTDGHFHPSPLMGGFGLKHPPPQILIKNTPVPANPSTTFSAAKFASFITQYSTGQVSVEIEWELQKENSKRWNPEIQYTSNYNKSVNVDFTVDTNGVYSEPRPIGTRYLTRNL

SEQ ID NO: 109 - protein, 738 aa, Adeno-associated virus
MAADGYLPDWLEDNLSEGIREWWDLKPGAPKPKANQQKQDDGRGLVLPGYKYLGPFNGLDKGEPVNAADAAALEHDKAYDQQLKAGDNPYLRYNHADAEFQERLQEDTSFGGNLGRAVFQAKKRVLEPLGLVEEAAKTAPGKKRPVEPSPQRSPDSSAGIGKKGQQPAKKRLNFGQTGDSESVPDPQPIGEPPAGPSGLGSGTMAAGGGAPMADNNEGADGVGSSSGNWHCDSTWLGDRVITTSTRTWALPTYNNHLYKQISNGTSGGSTNDNTYFGYSTPWGYFDFNRFHCHFSPRDWQRLINNNWGFRPKRLSFKLFNIQVKEVTQNEGTETIANNLTSTIQVFTDSEYQLPYVLGSAHQGCLPPFPADVFMIPQYGYLTLNNGSQAVGRSSFYCLEYFPSQMLRTGNNFEFSYTFEDVPFHSSCAHSQSSDRLMNPLIDQYLYYLSRTRSTGGTQGTQQLLFSQAGPANMSAQAKNWLPGPCYRQQRVSTTLSQNNNSNFAWTGATKYHLNGRDSLVNPGVAMATHKDDEERFFPSSGVLMFGKQGAGRDNVDYSSVMLTSEEEIKTTNPVATEQYGVVADNLQQTNTGPIVGNVNSQGALPGMVWQNRDVYLQGPIWAKIPHTDGNFHPSPLMGGFGLKHPPPQILIKNTPVPADPPTTFSQAKLASFITQYSTGQVSVEIEWELQKENSKRWNPEIQYTSNYYKSTNVDFAVNTEGTYSEPRPIGTRYLTRNL

SEQ ID NO: 110 - protein, 738 aa, Adeno-associated virus
MAADGYLPDWLEDNLSEGIREWWDLKPGAPKPKANQQKQDDGRGLVLLGYKYLGPFNGLDKGEPVNAADAAALEHDKAYDQQLKAGDNPYLRYNHADAEFQERLQEDTSFGGNLGRAVFQAKKRVLEPLGLVEEAAKTAPGKKRPVEPSPQRSPDSSTGIGKKGQQPAKKRLNFGQTGDSESVPDPQPIGEPPAGPSGLGSGTMAAGGGAPMADNNEGADGVGSSSGNWHCDSTWLGDRVITTSTRTWALPTYNNHLYKQISNGTSGGSTNDNTYFGYSTPWGYFDFNRFHCHFSPRDWQRLINNNWGFRPKRLSFKLFNIQVKEVTQNEGTKTIANNLTSTIQVFTDSEYQLPYVLGSAHQGCLPPFPADVFMIPQYGYLTLNNGSQAVGRSSFYCLEYFPSQMLRTGNNFEFSYTFEDVPFHSGYAHSQSLDRLMNPLIDQYLYYLSRTQSTGGTQGTQQLLFSQAGPANMSAQAKNWLPGPCYRQQRVSTTLSQNNNSNFAWTGATKYHLNGRDSLVNPGVAMATHKDDEERFFPSSGVLMFGKQGAGRDNVDYSSVMLTSEEEIKTTNPVATEQYGVVADNLQQTNTGPIVGNVNSQGALPGMVWQNRDVYLQGPIWAKIPHTDGNFHPSPLMGGFGLKHPPPQILIKNTPVPADPPTTFSQAKLASFITQYSTGQVSVEIEWELQKENSKRWNPEIQYTSNYYKSTNVDFAVNTEGTYSEPRPIGTRYLTRNL

SEQ ID NO: 111 - protein, 738 aa, Adeno-associated virus
MAADGYLPDWLEDNLSEGIREWWDLKPGAPKPKANQQKQDDGRGLVLPGYKYLGPFNGLDKGEPVNAADAAALEHDKAYDQQLKAGDNPYLRYNHADAEFQERLQEDTSFGGNLGRAVFQAKKRVLEPLGLVEEGAKTAPGKKRPVEPSPQRSPDSSTGIGKKGQQPAKKRLNFGQTGDSESVPDPQPIGEPPAGPSGLGSGTMAAGGGAPMADNNEGADGVGSSSGNWHCDSTWLGDRVITTSTRTWALPTYNNHLYKQISNGTSGGSTNDNTYFGYSTPWGYFDFNRFHCHFSPRDWQRLINNNWGFRPKRLNFKLFNIQVKEVTQNEGTKTIANNLTSTIQVFTDSEYQLPYVLGSAHQGCLPPFPADVFMIPQYGYLTLNNGSQAVGRSSFYCLEYFPSQMLRTGNNFEFSYQFEDVPFHSSYAHSQSLDRLMNPLIDQYLYYLSRTQSTGGTAGTQQLLFSQAGPNNMSAQAKNWLPGPCYRQQRVSTTLSQNNNSNFAWTGATKYHLNGRDSLVNPGVAMATHKDDEERFFPSSGVLMFGKQGAGKDNVDYSSVMLTSEEEIKTTNPVATEQYGVVADNLQQQNAAPIVGAVNSQGALPGMVWQNRDVYLQGPIWAKIPHTDGNFHPSPLMGGFGLKHPPPQILIKNTPVPADPPTTFSQAKLASFITQYSTGQVSVEIEWELQKENSKRWNPEIQYTSNYYKSTNVDFAVNTDGTYSEPRPIGTRYLTRNL

SEQ ID NO: 112 - protein, 728 aa, Adeno-associated virus
MAADGYLPDWLEDNLSEGIREWWDLKPGAPKPKANQQKQDDGRGLVLPGYKYLGPFNGLDKGEPVNEADAAALEHDKAYDKQLEQGDNPYLKYNHADAEFQERLQEDTSFGGNLGRAVFQAKKRVLEPLGLVEEGAKTAPGKKRPIESPDSSTGIGKKGQQPAKKKLNFGQTGDSESVPDPQPLGEPPAAPSGLGSGTMAAGGGAPMADNNEGADGVGNASGNWHCDSTWLGDRVITTSTRTWALPTYNNHLYKQISSQSGATNDNHFFGYSTPWGYFDFNRFHCHFSPRDWQRLINNNWGFRPRKLRFKLFNIQVKEVTTNDGVTTIANNLTSTIQVFSDSEYQLPYVLGSAHQGCLPPFPADVFMIPQYGYLTLNNGSQSVGRSSFYCLEYFPSQMLRTGNNFEFSYTFEEVPFHSSYAHSQSLDRLMNPLIDQYLYYLARTQSTTGSTRELQFHQAGPNTMAEQSKNWLPGPCYRQQRLSKNIDSNNNSNFAWTGATKYHLNGRNSLTNPGVAMATNKDDEDQFFPINGVLVFGETGAANKTTLENVLMTSEEEIKTTNPVATEEYGVVSSNLQSSTAGPQTQTVNSQGALPGMVWQNRDVYLQGPIWAKIPHTDGNFHPSPLMGGFGLKHPPPQILIKNTPVPANPPEVFTPAKFASFITQYSTGQVSVEIEWELQKENSKRWNPEIQYTSNYAKSNNVEFAVNNEGVYTEPRPIGTRYLTRNL

SEQ ID NO: 113 - protein, 735 aa, Adeno-associated virus
MAADGYLPDWLEDNLSEGIREWWDLKPGAPKPKANQQKQDDGRGLVLPGYKYLGPFNGLDKGEPVNEADAAALEHDKAYDKQLEQGDNPYLKYNHADAEFQERLQEDTSFGGNLGRAVFQAKKRVLEPLGLVEEGAKTAPGKKRPVEPSPQRSPDSSTGIGKTGQQPAKKRLNFGQTGDSESVPDPQPIGEPPAGPSGLGSGTMAAGGGAPMADNNEGADGVGSSSGNWHCDSTWLGDRVITTSTRTWALPTYNNHLYKQISNGTSGGSTNDNTYFGYSTPWGYFDFNRFHCHFSPRDWQRLINNNWGFRPRKLRFKLFNIQVKEVTTDDGVTTIANNLTSTIQVFSDSEYQLPYVLGSAHQGCLPPFPADVFMIPQYGYLTLNNGSQSVGRSSFYCLEYFPSQMLRTGNNFEFSYTFEEVPFHSSYAHSQSLDRLMNPLIDQYLYYLARTQSTTGSTRELQFHQAGPNTMAEQSKNWLPGPCYRQQRLSKNIDSNNNSNFAWTGATKYHLNGRNSLTNPGVAMATNKDDEDQFFPINGVLVFGKTGAANKTTLENVLMTSEEEIKTTNPVATEEYGVVSSNLQSSTAGPQTQTVNSQGALPGMVWQNRDVYLQGPIWAKIPHTDGNFHPSPLMDGFGLKHPPPQILIKNTPVPANPPEVFTPAKFASFITQYSTGQVSVEIEWELQKENSKRWNPEIQYTSNYAKSNNVEFAVNNEGVYTEPRPIGTRYLTRNL

SEQ ID NO: 114 - protein, 728 aa, Adeno-associated virus
MAADGYLPDWLEDNLSEGIREWWDLKPGAPKPKANQQKQDDGRGLVLPGYKYLGPFNGLDKGEPVNAADAAALEHDKAYDQQLKAGDNPYLRYNHADAEFQERLQEDTSFGGNLGRAVFQAKKRVLEPLGLVEEGAKTAPGKKRPIESPDSSTGIGKKGQQPAKKKLNFGQTGDSESVPDPQPIGEPPAGPSGLGSGTMAAGGGAPMADNNEGADGVGNASGNWHCDSTWLGDRVITTSTRTWALPTYNNHLYKQISSQSGATNDNHFFGYSTPWGYFDFNRFHCHFSPRDWQRLINNNWGFRPRKLRFKLFNIQVKEVTTNDGVTTIANNLTSTIQVFSDSEYQLPYVLGSAHQGCLPPFPADVFMIPQYGYLTLNNGSQSVGRSSFYCLEYFPSQMLRTGNNFEFSYTFEEVPFHSSYAHSQSLDRLMNPLIDQYLYYLARTQSTTGSTRELQFHQAGPNTMAEQSKNWLPGPCYRRQRLSKDIDSNNNSNFAWTGATKYHLNGRNSLTNPGVAMATNKDDEDQFFPINGVLVFGKTGAANKTTLENVLMTSEEEIKTTNPVATEEYGVVSSNLQSSTAGPQTQTVNSQGALPGMVWQNRDVYLQGPIWAKIPHTDGNFHPSPLMGGFGLKHPPPQILIKNTPVPANPPEVFTPAKFASFITQYSTGQVSVEIEWELQKENSKRWNPEIQYTSNYAKSNNVEFAVNNEGVYTEPRPIGTRYLTRNL

SEQ ID NO: 115 - protein, 685 aa, Adeno-associated virus
MAADGYLPDWLEDNLSEGIREWWDLKPGAPKPKANQQKQDDGRGLVLPGYKYLGPFNGLDKGEPVNEADAAALEHDKAYDKQLEQGDNPYLKYNHADAEFQERLQEDTSFGGNLGRAVFQAKKRVLEPLGLVEEGAKTAPGKKRPVEPSPQRSPDSSTGIGKTGQQPAKKRLNFGQTGDSESVPDPQPIGEPPAGPSGLGSGTMAAGGGAPMADNNEGADGVGSSSGNWHCDSTWLGDRVITTSTRTWALPTYNNHLYKQISNGTSGGSTNDNTYFGYSTPWGYFDFNRFHCHFSPRDWQRLINNNWGFRPKRLNFKLFNIQVKEVTQNEGTKTIANNLTSTIQVFTDSEYQLPYVLGSAHQGCLPPFPADVFMIPQYGYLTLNNGSQAVGRSSFYCLEYFPSQMLRTGNNFEFSYQFEDVPFHSSYAHSQSLDRLTNPLIDQYLYYLARTQSTTGSTRGLQFHQAGPNTMAEQSKNWLPGPCYRQQRLSKNIDSNNNSNFAWTGATKYHLNGRNSLTNPGVAMATNKDDEDQFFPINGVLVFGKTGAANKTTLENVLMTSEEEIKTTNPVATEEYGVVSSNLQSSTAGPQTQTVNSQGALPGMVWQNRDVYLQGPIWAKIPHTDGNFHPSPLMGGFGLKHPPPQILIKYTSNYYKSTNVDFAVNTEGTYSEPRPIGTRYLTRNL

SEQ ID NO: 116 - protein, 733 aa, Adeno-associated virus
MAADGYLPDWLEDNLSEGIREWWDLKPGAPKPKANQQKQDDGRGLVLPGYKYLGPFNGLDKGEPVNAADAAALEHDKAYDQQLKAGDNPYLRYNHADAEFQERLQEDTSFGGNLGRAVFQAKKRVLEPLGLVEEGAKTAPGKKRPIESPDSSTGIGKKGQQPAKKKLNFGQTGDSESVPDPQPIGEPPAGPSGLGSGTMAAGGGAPMADNNEGADGVGSSSGNWHCDSTWLGDRVITTSTRTWALPTYNNHLYKQISNGTSGGSTNDNTYFGYSTPWGYFDFNRFHCHFSPRDWQRLINNNWGFRPKRLNFKLFNIQVKEVTQNEGTKTIANNLTSTIQVFTDSEYQLPYVLGSAHQGCLPPFPADVFMIPQYGYLTLNNGSQAVGRSSFYCLEYFPSQMLRTGNNFEFSYQFEDVPFHSSYAHSQSLDRLMNPLIDQYLYYLSRTQSTGGTAGTQQLLFSQAGPNNMSAQAKNWLPGPCYRQQRVSTTVSQNNNSNFAWTGATKYHLNGRDSLVNPGVAMATHKGDEERFFPSSGVLMFGKQGAGKDNVDYSSVMLTSEEEIKTTNPVATEQYGVVADNLQQQNAAPIVGAVNSQGALPGMVWQNRDVYLQGPIWAKIPHTDGNFHPSPLMGGFGLKHPPPQILIKNTPVPADPPTTFSQAKLASFITQYSTGQVSVEIEWELQKENSKRWNPEIQYTSNYYKSTNVDFAVNTEGTYSEPRPIGTRYLTRSL

SEQ ID NO: 117 - protein, 729 aa, Adeno-associated virus
MAADGYLPDWLEDNLSEGIREWWDLKPGAPKPKANQQKQDDGRGLVLPGYKYLGPFNGLDKGEPVNAADAAALEHDKAYDQQLKAGDNPYLRYNHADAEFQERLQEDTSFGGNLGRAVFQAKKRVLEPLGLVEEGAKTAPGKKRPIDSPDSSTGIGKKGQQPAKKKLNFGQTGDSESVPDPQPLGEPPAAPSSVGSGTMAAGGGAPMADNNEGADGVGNASGNWHCDSTWLGDRVITTSTRTWALPTYNNHLYKQISSSSSGATNDNHYFGYSTPWGYFDFNRFHCHFSPRDWQRLINNNWGFRPKKLRFKLFNIQVKEVTTNDGVTTIANNLTSTVQVFSDSEYQLPYVLGSAHQGCLPPFPADVFMIPQYGYLTLNNGSQSVGRSSFYCLEYFPSQMLRTGNNFEFSYSFEDVPFHSSYAHSQSLDRLMNPLIDQYLYYLARTQSTTGSTRELQFHQAGPNTMAEQSKNWLPGPCYRQQGLSKNLDFNNNSNFAWTAATKYHLNGRNSLTNPGIPMATNKDDEDQFFPINGVLVFGKTGAANKTTLENVLMTSEEEIKTTNPVATEEYGVVSSNLQPSTAGPQSQTINSQGALPGMVWQNRDVYLQGPIWAKIPHTDGNFHPSPLMGGFGLKHPPPQILIKNTPVPANPPEVFTPAKFASFITQYSTGQVSVEIEWELQKENSKRWNPEIQYTSNYAKSNNVEFAVNPDGVYTEPRPIGTRYLPRNL

SEQ ID NO: 118 - protein, 736 aa, Adeno-associated virus
MAADGYLPDWLEDNLSEGIREWWDLKPGAPKPKANQQKQDDGRGLVLPGYKYLGPFNGLDKGEPVNAADAAALEHDKAYDQQLEAGDNPYLRYNHADAEFQERLQEDTSFGGNLGRAVFQAKKRVLEPLGLVEEGAKTAPGKKRPVEQSPQEPDSSSGIGKKGQQPARKRLNFGQTGDSESVPDPQPLGEPPAAPSGVGPNTMAAGGGAPMADNNEGADGVGSSSGNWHCDSTWLGDRVITTSTRTWALPTYNNHLYKQISNGTSGGATNDNTYFGYSTPWGYFDFNRFHCHFSPRDWQRLINNNWGFRPKRLSFKLFNIQVKEVTQNEGTKTIANNLTSTIQVFTDSEYQLPYVLGSAHQGCLPPFPADVFMIPQYGYLTLNNGSQAVGRSSFYCLEYFPSQMLRTGNNFQFTYTFEDVPFHSSYAHSQSLDRLMNPLIDQYLYYLSRTQTTGGTANTQTLGFSQGGPNTMANQAKNWLPGPCYRQQRVSTTTGQNNNSNFAWTAGTKYHLNGRNSLANPGIAMATHKDDEERFFPVTGSCFWQQNAARDNADYSDVMLTSEEEIKTTNPVATEEYGIVADNLQQQNTAPQIGTVNSQGALPGMVWQNRDVYLQGPIWAKIPHTDGNFHPSPLMGGFGLKHPPPQILIKNTPVPADPPTTFNQSKLNSFITQYSTGQVSVEIEWELQKENSKRWNPEIQYTSNYYKSTSVDFAVNTEGVYSEPRPIGTRYLTRNL

SEQ ID NO: 119 - protein, 737 aa, Adeno-associated virus
MAADGYLPDWLEDNLSEGIREWWDLKPGAPKPKANQQKQDDGRGLVLPGYKYLGPFNGLDKGEPVNAADAAALEHDKAYDQQLKAGDNPYLRYNHADAEFQERLQEDTSFGGNLGRAVFQAKKRVLEPLGLVEEAAKTAPGKKRPVEPSPQRSPDSSTGIGKKGQQPARKRLNFGQTGDSESVPDPQPIGEPPAGPSGLGSGTMAAGGGAPMADNNKGADGVGNASGNWHCDSTWLGDRVITTSTRTWALPTYNNHLYKQISSQSAGSTNDNVYFGYSTPWGYFDFNRFHCHFSPRDWQRLINSNWGFRPKKLNFKLFNIQVKEVTTNDGVTTIANNLTSTVQVFSDSEYQLPYVLGSAHQGCLPPFPADVFMIPQYGYLTLNNGSQSVGRSSFYCLEYFPSQMLRTGNNFTFSYTFEDVPFHSSYAHSQSLDRLMNPLIDQYLYYLARTQSNAGGTAGNRELQFYQGGPTTMAEQAKNWLPGPCFRQQRVSKTLDQNNNSNFAWTGATKYHLNGRNSLVNPGVAMATHKDDEERFFPSSGVLIFGKTGAANKTTLENVLMTNEEEIRPTNPVATEEYGTVSSNLQAANTAAQTQVVNNQGALPGMVWQNRDVYLQGPIWAKIPHTDGNFHPSPLMGGFGLKHPPPQILIKNTPVPANPPEVFTPAKFASFITQYSTGQVSVEIEWELQKENSKRWNPEIQYTSNFDKQTGVDFAVDSQGVYSEPRPIGTRYLTRNL

SEQ ID NO: 120 - protein, 738 aa, Adeno-associated virus
MAADGYLPDWLEDNLSEGIREWWDLKPGAPKPKANQQKQDDGRGLVLPGYKYLGPFNGLDKGEPVNAADAAALEHDKAYDQQLKAGDNPHLRYNHADAEFQERLQEDTSFGGNLGRAVFQAKKRVLEPLGLVEEGAKTAPGKKRPVEPSPQRSPDSSTGIGKKGQQPARKRLNFGQTGDSESVPDPQLIGEPPAAPSSVGSGTMAAGGGAPMADNNEGADGVGSSSGNWHCDSTWLGDRVITTSTRTWALPTYNNHLYKQISNGTSGGSTNDNTYFGYSTPWGYFDFNRFHCHFSPRDWQRLINNNWGFRPKRLSFKLFNIQVKEVTQNEGTKTIANNLTSTIQVFTDSEYQLPYVLGSAHQGCLPPFPADVFMIPQYGNLTLNNGSQAVGRSSFYCLEYFPSQMLRTGNNFSFSYTFEDVPFHSSYAHSQSLDRLMNPLIDQYLYYLSRTQSTGGTAGTQQLLFSQAGPSNMSAQARNWLPGPCYRQQRVSTTLSQNNNSNFAWTGATKYHLNGRDSLVNPGVAMATNKDDEDRFFPSSGILMFGKQGAGKDNMGYSNVMLTSEEEIKTTNPVATEQYGVVADNLQQQNTAPIVGAVNSQGALPGMVWQNRDVYLQGPIWAKIPHTDGNFHPSPLMGGFGLKHPPPQILIKNTPVPADPPTAFNQAKLNSFITQYGTGQVSVEIEWELQKENSKRWNPEIQYTSNYYKSTNVDFAVNTEGVYSEPRPIGTRYLTRNL

SEQ ID NO: 121 - protein, 738 aa, Adeno-associated virus
MAADGYLPDWLEDNLSEGIREWWDLKPGAPKPKANQQKQDDGRGLVLPGYKYLGPFNGLDKGEPVNAADAAALEHDKAYDQQLKAGDNPYLRYNHADAEFQERLQEDTSFGGNLGRAVFQAKKRVLEPLGLVEEGAKTAPGKKRPVEPSPQRSPDSSTGIGKKGQQPAGKRLNFGQTGDSESVPDPQPIGEPPAAPSSVGSGTMAAGGGAPMADNNEGADGVGSSSGNWHCDSTWLGDRVITTSTRTWALPTYNNHLYKQISNGTSGGSTNDNTYFGYSTPWGYFDFNRFHCHFSPRDWQRLINNNWGFRPKRLSFKLFNIQVKEVTQNEGTKTIANNLTSTIQVFTDSEYQLPYVLGSAHQGCLPPFPADVFMIPQYGYLTLNNGSQAVGRSSFYCLEYFPSQMLRTGNNFSFSYTFEDVPFHSSYAHSQSLDRLMNPLVDQYLYYLSRTQSTGGTAGTQQLLFSQAGPSNMSAQARNWLPGPCYRQQRVSTTLSQNNNSNFAWTGATKYHLNGRDSLVNPGVAMATNKDDEDRFFPSSGILMFGKQGAGKDNVDYSNVMLTSEEEIKTTNPVATEQYGVVADNLQQQNTAPIVGAVNSQGALPGMVWQNRDVYLQGPIWAKIPHTDGNFHPSPLMGGFGLKHPPPQILIKNTPVPADPPTAFNQAKLNSFITQYSTGQVSVEIEWELQKENSKRWSPEIQYTSNYYKSTNVDFAVNTEGVYSEPRPIGTRYLTRNL

SEQ ID NO: 122 - protein, 738 aa, Adeno-associated virus
MVADGYLPDWLEDNLSEGIREWWDLKPGAPKPKANQQKQGDGRGLVLPGYKYLGPFNGLDKGEPVNAADAAALEHDKAYDQQLKAGDNPYLRYNHADAELQERLQEDTSFGGNLGRAVFQAKKRVLEPLGLVEEGAKTAPGKKRPVEPSPQRSPDSSTGIGKKGQQPARKRLNFGQTGDSESVPDPQPIGEPPAAPSSVGSGTMAAGGGAPMADNNEGADGVGSSSGNWHCDSTWLGDRVITTSTRTWALPTYNNHLYKQISNGTSGGSTNDNTYFGYSTPWGYFDFNRFHCHFSPRDWQRLINNNWGFRPKRLSFKLFNIQVKEVTQNEGTKTIANNLTSTIQVFTDSEYQLPYVLGSAHQGCQPPFPADVFMIPQYGYLTLNNGSQAVGRSSFYCLEYFPSQMLRTGNNFSFSYTFEDVPFHSSYAHSQSLDRLMNPLIDQYLYYLSRTQSTGGTAGTQQLLFSQAGPSNMSAQARNWLPGPCYRQQRVSTTLSQNNNSNFAWTGATKYHLNGRDSLVNPGVAMATNKDDEDRFFPSSGILMFGKQGAGKDNVDYSNVMLTSEEEIKTTNPVATEQYGVVADNLQQQNTAPIVGAVNSQGALPGMVWQNRDVYLQGPIWAKIPHTDGNFHPSPLMGGFGLKHPPPQILIKNTPVPADPPTAFNQAKLNSFITQYSTGQVSVEIEWEPQKENSKRWNPEIQYTSNYYKSTNVDFAVNTEGVYSEPRPIGTRYLTRNL

SEQ ID NO: 123 - protein, 738 aa, Adeno-associated virus
MAADGYLPDWLEDNLSEGIREWWDLKPGAPKPKANQQKQDDGRGLVLPGYKYLGPFNGLDKGEPVNAADAAALEHDKAYDQQLKAGDNPYLRYNHADAEFQERLQEDTSFGGNLGRAVFQAKKRVLEPLGLVEEGAKTAPGKKRPVEPSPQRSPDSSTGIGKKGQQPARKRLNFGQTGDSESVPDPQPIGEPPAAPSSVGSGTMAAGGGAPMADNNEGADGVGSSSGNWHCDSTWLGDRVITTSTRTWALPTYNNHLYKQISNGTSGGSTNDNTYFGYSTPWGYFDFNRFHCHFSPRDWQRLINNNWGFRPKRLSFKLFNIQVKEVTQNEGTKTIANSLTSTIQVFTDSEYQLPYVLGSAHQGCLPPFPADVFMIPQYGYLTPNNGSQAVGRSSFYCLEYFPSQMLRTGNNFSFSYTFEDVPFHSSYAHSQSLDRLMNPLIDQYLYYLSRTQSTGGTAGTQQLLSSQAGPSNMSAQARNWLPGPCYRQQRVSTTLSQNNNSNFAWTGATKYHLNGRDSLVNPGVAMATNKDDEDRFFPSSGILMFGKQGAGKDNVDYSNVMLTSEEEIKTTNPVATEQYGVVADNLQQQNTAPIVGAVNSQGALPGMVWQNRDVYLQGPIWAKIPHTDGNFHPSPLMGGFGLKHPPPQILIKNTPVPADPPTAFNQAKLNSFITQYSTGQVSVEIEWELQKENSKRWNPEIQYTSNYYKSTNVDFAVNTEGVYSEPRPIGTRYLTRNL

SEQ ID NO: 124 - protein, 738 aa, Adeno-associated virus
MAADGYLPDWLEDNLSEGIREWWDLKPGAPKPKANQQKQDDGRGLVLPGYKYLGPFNGLDKGEPVNAADAAALEHDKAYDQQLKAGDNPYLRYNHADAEFQERLQEDTSFGGNLGRAVFQAKKRVLEPLGLVEEGAKTAPGKKRPVEPSPQRSPDSSTGIGKKGQQPARKRLNFGQTGDSESVPDPQPIGEPPAAPSSVGSGTMAAGGGAPMADNNEGADGVGSSSGNWHCDSTWLGDRVITTSTRTWALPTYNNHLYKQISNGTSGGSTNDNTYFGYSTPWGYFDFNRFHCHFSPRDWQRLINNNWGFRPKRLSFKLFNIQVKEVTQNEGTKTIANNLTSTIQVFTDSEYQLPYVLGSAHQGCLPPFPADVFMIPQYGYLTLNNGSQAVGRSSFYCLEYFPSQMLRTGNNFSFSYTFEDVPFHSSYVHSQSLDRLMNPLIDQYLYYLSRTQSTGGTAGTQQLLFSQAGPSNMSAQARNWLPGPCYRQQRVSTTLSQNNNSNFAWTGATKYHLNGRDSLVNSGVAMATNKDDEDRFFPSSGILMFGKQGAGKDNVDYSNVMLTSEEEIKTTNPVATEQYGVVADNLQQQNTAPIVGAVNSQGALPGMVWQNRDVYLQGPIWAKIPHTDGNFHPSPLMGGFGLKHPPPQILIKNTPVPADPPTAFNQAKLNSFITQYSTGQVSVEIEWELQKENSKRWNPEIQYTSNYYKSTNVDFAVNTEGVYSEPRPIGTRYPTRNL

SEQ ID NO: 125 - protein, 737 aa, Adeno-associated virus
MAADGYLPDWLEDNLSEGIREWWDLKPGAPKPKANQQKQDDGRGLVLPGYKYLGPFNGLDKGEPVNAADAAALEHDKAYDQQLKAGDNPYLRYNHADAEFQERLQEDTSFGGNLGRAVFQAKKRVLEPLGLVEEAAKTAPGKKRPVEPSPQRSPDSSTGIGKKGQQPARKRLNFGQTGDSESVPDPQPLGEPPAGPSGLGSGTMAAGGGAPMADNNEGADGVGNASGNWHCDSTWLGDRVITTSTRTWALPTYNNHLYKQISSQSAGSTNDNVYFGYSTPWGYFDFNRFHCHFSPRDWQRLINNNWGFRPKKLNFKLFNIQVKEVTTNDGVTTIANNLTSTVQVFSDSEYQLPYVLGSAHQGCLPPFPADVFMIPQYGYLTLNNGSQSVGRSSFYCLEYFPSQVLRTGNNFTFSYTFEDVPFHSSYAHSQSLDRLMNPLIDQYLYYLARTQSNPGGTSGNRELQFYQGGPSTMAEQAKNWLPGPCFRQQRVSKTLDQNNNSNFAWTGATKYHLNGRNSLVNPGVAMATHKDDEDRFFPSSGVLIFGKTGATNKTTLENVLMTNEEEIRPTNPVATEEYGIVSSNLQAANTAAQTQVVNNQGALPGMVWQNRDVYLQGPIWAKIPHTDGNFHPSPLMGGFGLKHPPPQILIKNTPVPANPPEVFTPAKFASFITQYSTGQVSVEIEWELQKENSKRWNPEIQYTSNFDKQTGVDFAVDSQGVYSEPRPIGTRYLTRNL

SEQ ID NO: 126 - protein, 737 aa, Adeno-associated virus
MAADGYLPDWLEDNLSEGIREWWDLKPGAPKPKANQQKQDDGRGLVLPGYKYLGPFNGLDKGEPVNAADAAALEHDKAYDQQLKAGDNPYLRYNHADAEFQERLQEDTSFGGNLGRAVFQAKKRVLEPLGLVEEGAKTAPGKKRPVEPSPQRSPDSSTGIGKKGQQPARKRLNFGQTGDSESVPDPQPIGEPPAAPSSVGSGTMAAGGGAPMADNNEGADGVGSSSGNWHCDSTRLGDRVITTSTRTWALPTYNNHLYKQISSQSAGSTNDNVYFGYSTPWGYFDFNRFHCHFSPRDWQRLINNNWGFRPKKLNFKLFNIQVKEVTTNDGVTTIANNLTSTVQVFSDSEYQLPYVLGSAHQGCLPPFPADVFMIPQYGYLTLNNGSQSVGRSSFYCLEYFPSQMLRTGNNFTFSYTFEDVPFHSSYAHSQSLDRLMNPLIDQYLYYLARTQSNAGGTAGNRELQFYQGGPTTMAEQAKNWLPGPCFRQRRVSKTLDQNNNSNFAWTGATKYHLNGRNSLVNPGVAMATHKDDEERFFPSSGVLIFGKTGAANKTTLENVLMTNEEEIRPTNPVATEEYGTVSSNLQAANTAAQTQVVNNQGALPGMVWQNRDVYLQGPIWAKIPHTDGNFHPSPLMGGFGLKHPPPQILIKNTPVPANPPEVFTPAKFASFITQYSTGQVSVEIEWELQKENSKRWNPEIQYTSNFDKQTGVDFAVDSQGVYSEPRPIGTRYLTRNL

SEQ ID NO: 127 - protein, 738 aa, Adeno-associated virus
MAADGYLPDWLEDNLSEGIREWWALKPGAPKPKANQQKQDDGRGLVLPGYKYLGPFNGLDKGEPVNAADAAALEHDKAYDQQLQAGDNPYLRYNHADAEFQERLQEDTSFGGNLGRAVFQAKKRVLEPLGLVEEGAKTAPGKKRPVEPSPQRSPDSSTGIGKKGQQPARKRLNFGQTGDSESVPDPQPIGEPPAAPSSVGSGTMAAGGGAPMADNNEGADGVGSSSGNWHCDSTWLGDRVITTSTRTWALPTYNNHLYKQTSNGTSGGSTNDNTYFGYSTPWGYFDFNRFHCHFSPRDWQRLINNNWGFRPKRLSFKLFNIQVKEVTQNEGTKTIANNLTSTIQVFTDSEYQLPYVLGSAHQGCLPPFPADVFMIPQYGYLTLNNGSQAVGRSSFYCLEYFPSQMLRTGNNFSFSYTFEDVPFHSSYAHSQSLDRLMNPLIDQYLYYLSRTQSTGGTAGTQQLLFSQAGPSNMSAQARNWLPGPCYRQQRVSTTLSQNNNSNFAWTGATKYHLNGRDSLVNPGVAMATNKDDEDRFFPSSGILMFGKQGAGKDNVDYSNVMLTSEEEIKTTNPVATEQYGVVADNLQQQNTAPIVGAVNSQGALPGMVWQNRDVYLQGPIWAKIPHTDGNFHPSPLMGGFGLKHPPPQILIKNTPVPADPPTAFNQAKLNSFITQYSTGQVSAEIEWELQKENSKRWNPEIQYTSNYYKSTNVDFAVNTEGVYSEPRPIGTRYLTRNL

SEQ ID NO: 128 - protein, 738 aa, Adeno-associated virus
MAADGYLPDWLEDNLSEGIREWWDLKPGAPKPKANQQKQDDGRGLVLPGYKYLGPFNGLDKGEPVNAADAAALEHDKAYDQQLKAGDNPYLRYNHADAEFQERLQEDTSFGGNLGRAVFQAKKRVLEPLGLVEEAAKTAPGKKRPVEPSPQRSPDSSTGIGKKGQQPARKRLNFGQTGDSESVPDPQPIGEPPAAPSSVGSGTMAAGGGAPMADNNEGADGVGSSSGNWHCDSTWLGDRVITTSTRTWALPTYNNHLYKQISNGTSGGSTNDNTYFGYSTPWGYFDFNRFHCHFSPRDWQRLINNNWGFRPKRLSFKLFNIQVKEVTQNEGTKTIANNLTSTIQVFTDSEYQLPYVLGSAHQGCLPPFPADVFMIPQYGYLTLNNGSQAVGRSSFYCLEYFPSQMLRTGNNFSFSYTFEDVPFHSSYAHSQSLDRLMNPLIDQYLYYLSRTQSTGGTAGTQQLLFSQAGPSNMSAQARNWLPGPCYRQQRVSTTLSQNNNSNFAWTGATKYHLNGRDSLVNPGVAMATNKDDEDRFFPSSGILMFGKQGAGKDNVDYSNVMLTSEEEIKTTNPVATEQYGVVADNLQQQNTAPIVGAVNSQGALPGMVWQNRDVYLQGPIWAKIPHTDGNFHPSPLMGGFGLKHPPPQILIKSTPVPADPPTAFNQAKLNSFITQYSTGQVSVEIEWELQKENSKCWNPEIQYTSNYYKSTNVDFAVNTEGVYSEPRPIGTRYLTRNL

SEQ ID NO: 129 - protein, 737 aa, Adeno-associated virus
MAADGYLPDWLEDNLSEGIREWWDLKPGAPKPKANQQKQDDGRGLVLPGYKYLGPFNGLDKGEPVNAADAAALEHDKAYDQQLKAGDNPYLRYNHADAEFQERLQEDTSFGGNLGRAVFQAKKRVLEPLGLAEEAAKTAPGKKRPVEPSPQRSPDSSTGIGKKGQQPARKRLNFGQTGDSESVPDPQPIGEPPAGPSGLGSGTMAAGGGAPMADNNKGADGVGNASGNWHCDSTWLGDRVITTSTRTWALPTYNNHLYKQISSQSAGSTNDNVYFGYSTPWGYFDFNRFHCHFSPRDWQRLINNNWGFRPKKLNFKLFNIQVKEVTTGDGVTTIANNLTSTVQVFSDSEYQLPYVLGSAHQGCLPPFPADVFMIPQYGYLTLNNDSQSVGRSSFYCLEYFPSQMLRTGNNFTFSYTFEDVPFHSSYAHSQSLDRLMNPLIDQYLYYLARTQSNAGGTAGNRELQFYQGGPTTMAEQAKNWLPGPCFRQQRVSKTLDQNNNSNFAWTGATKYHLNGRNSLVNPGVAMATHKDDEERFFPSSGVLIFGKTGAANKTTLENVLMTNEEEIRPTNPVATEEYGTVSSNLQAANTAAQTQVVNNQGALPGMVWQNRDVYLQGPIWAKIPHTDGNFHPSPLMGGFGLKHPPPQILIKNTPVPANPPEVFTPAKFASFITQYSTGQVSVEIEWELQKENSKRWNPEIQYTSNFDKQTGVDFAVDSQGVYSEPRPIGTRYLTRNL

SEQ ID NO: 130 - protein, 738 aa, Adeno-associated virus
MAADGYLPDWLEDNLSEGIREWWDLKPGAPKPKANQQKQDDGRGLVLPGYKYLGPFNGLDKGEPVNAADAAALEHDKAYDQQLKAGDNPYLRYNHADAEFQERLQEDTSFGGNLGRAVFQAKKRVLEPLGLVEEGAKTAPGKKRPVEPSPQRSPDSSTGIGKKGQQPARKRLNFGQTGDSESVPDPQPIGEPPAAPSSVGSGTMAAGGGAPMADNNEGADGVGSSSGNWHCDSTWLGDRVITTSTRTWALPTYNNHLYKQISNGTSGGSTNDNTYFGYSTPWGYFDFNRFHCHFSPRDWQRLINNNWGFRPKRLSFKLFNIQVKEVTQNEGTKTIANNLTSTIQVFTDSEYQLPYVLGSAHQGCLPPFPADVFMIPQYGYLTLNNGSQAVGRSSFYCLEYFPSQMLRTGNNFSFSYTFEDVPFHSSYAHSQSLDRLMNPLIDQYLYYLSRTQSTGGTAGTQQLLFSQAGPSNMSAQARNWLPGPCYRQQRVSTTLSQNNNSNFAWTGATKYHLNGRDSLVNPGVAMATNKDDEDRFFPSSGILMFGKQGAGKDNVDYSNVMLTSEEEIKTTNPVATEQYGVVADNLQQQNTAPIVGAVNSQGALPGMVWQNRDVYLQGPIWAKIPHTDGNFHPSPLMGGFGLKHPPPQILIKNTPVPADPPTAFNQAKLNSFITQYSTGQVSVEIVWELQKENSKRRNPEIQYTSNYYKSTNVDFAVNTEGVYSEPRPIGTRYLTRNL

SEQ ID NO: 131 - protein, 735 aa, Adeno-associated virus
MAADGYLPDWLEDTLSEGIRQWWKLKPGPPPPKPAERHKDDSRGLVLPGYKYLGPFNGLDKGEPVNEADAAALEHDKAYDRQLDSGDNPYLKYNHADAEFQERLKEDTSFGGNLGRAVFQAKKRVLEPLGLVEEPVKTAPGKKRPVEHSPAEPDSSSGTGKAGQQPARKRLNFGQTGDADSVPDPQPLGQPPAAPSGLGSTTMATGSGAPMADNNEGADGVGNSSGNWHCDSQWLGDRVITTSTRTWAQPTYNNHLYKQISSQSGASNDNHYFGYSTPWGYFDFNRFHCHFSPRDWQRLINNNWGFRPKRLNFKLFNIQVKEVTQNDGTTTIANNLTSTVQVFTDSEYQLPYVLGSAHQGCLPPFPADVFMVPQYGYLTLNNGSQAVGRSSFYCLEYFPSQMLRTGNNFQFSYTFEDVPFHSSYAHSQSLDRLMNPLIDQYLYYLNKTQSNSGALQQSRLLFSQAGPTSMSLQAKNWLPGPCYRQQRLSKQANDNNNSNFPWTAATKYHLNGRDSLVNPGPAMASHKDDEEKFFPMHGTLIFGKQGTNANDADLDNVMITDEEEIRTTNPVATEQYGYVSNNLQNSNTGPTTGTVNHRGALPGMVWQDRDVYLQGPIWAKIPHTDGHFHPSPLMGGFGLKHPPPQIMIKNTPVPANPPTNFSSAKFASFITQYSTGQVSVEIEWELQKENSKRWNPEIQYTSNYNKSVNVDFTVDTNGVYSEPRPIGTRYLTRNL

SEQ ID NO: 132 - protein, 736 aa, Adeno-associated virus
  VARIANT 168: note = Lys or Arg
  VARIANT 205: note = Ala or Ser
  VARIANT 266: note = Ala or Gly
  VARIANT 311: note = Arg or Lys
  VARIANT 411: note = Glu or Gln
  VARIANT 460: note = Thr or Glu
  VARIANT 493: note = Ala or Thr
  VARIANT 562: note = Ser or Asn
  VARIANT 576: note = Gln or Glu
  VARIANT 587: note = Ser or Ala
  VARIANT 609: note = Asn or Asp
MAADGYLPDWLEDNLSEGIREWWDLKPGAPKPKANQQKQDDGRGLVLPGYKYLGPFNGLDKGEPVNAADAAALEHDKAYDQQLKAGDNPYLRYNHADAEFQERLQEDTSFGGNLGRAVFQAKKRVLEPLGLVEEGAKTAPGKKRPVEQSPQEPDSSSGIGKKGQQPAXKRLNFGQTGDSESVPDPQPLGEPPAAPSGVGSNTMAXGGGAPMADNNEGADGVGNASGNWHCDSTWLGDRVITTSTRTWALPTYNNHLYKQISSQSGXSTNDNTYFGYSTPWGYFDFNRFHCHFSPRDWQRLINNNWGFRPKXLNFKLFNIQVKEVTTNDGTTTIANNLTSTVQVFTDSEYQLPYVLGSAHQGCLPPFPADVFMIPQYGYLTLNNGSQAVGRSSFYCLEYFPSQMLRTGNNFXFSYTFEDVPFHSSYAHSQSLDRLMNPLIDQYLYYLSRTQTTSGTAGNRXLQFSQAGPSSMANQAKNWLPGPCYRQQRVSKTXNQNNNSNFAWTGATKYHLNGRDSLVNPGPAMATHKDDEDKFFPMSGVLIFGKQGAGNSNVDLDNVMITXEEEIKTTNPVATEXYGTVATNLQSXNTAPATGTVNSQGALPGMVWQXRDVYLQGPIWAKIPHTDGHFHPSPLMGGFGLKHPPPQILIKNTPVPANPPTTFSPAKFASFITQYSTGQVSVEIEWELQKENSKRWNPEIQYTSNYNKSTNVDFAVDTNGVYSEPRPIGTRYLTRNL

SEQ ID NO: 133 - protein, 737 aa, Adeno-associated virus
  VARIANT 157: note = Thr or Ser
  VARIANT 168: note = Lys or Arg
  VARIANT 262: note = Asn or Ser
  VARIANT 263: note = Ser or His
  VARIANT 312: note = Arg or Lys
  VARIANT 412: note = Glu or Gln
  VARIANT 460: note = Arg or Gln
  VARIANT 461: note = Thr or Glu
  VARIANT 552: note = Asp or Ser
  VARIANT 556: note = Leu or Tyr
  VARIANT 557: note = Asp or Ser
  VARIANT 563: note = Ser or Asn
  VARIANT 580: note = Val or Ile
  VARIANT 588: note = Asn or Ser
  VARIANT 664: note = Ser or Thr
MAADGYLPDWLEDNLSEGIREWWDLKPGAPKPKANQQKQDDGRGLVLPGYKYLGPFNGLDKGEPVNAADAAALEHDKAYDQQLKAGDNPYLRYNHADAEFQERLQEDTSFGGNLGRAVFQAKKRVLEPLGLVEEGAKTAPGKKRPVEQSPQEPDSSXGIGKKGQQPAXKRLNFGQTGDSESVPDPQPLGEPPAAPSGVGSNTMAAGGGAPMADNNEGADGVGNASGNWHCDSTWLGDRVITTSTRTWALPTYNNHLYKQISXXQSGGSTNDNTYFGYSTPWGYFDFNRFHCHFSPRDWQRLINNNWGFRPKXLNFKLFNIQVKEVTTNDGTTTIANNLTSTVQVFTDSEYQLPYVLGSAHQGCLPPFPADVFMIPQYGYLTLNNGSQAVGRSSFYCLEYFPSQMLRTGNNFXFSYTFEDVPFHSSYAHSQSLDRLMNPLIDQYLYYLSRTQTTGGTAGNXXLQFSQAGPSSMANQAKNWLPGPCYRQQRVSKTTNQNNNSNFAWTGATKYHLNGRDSLVNPGVAMATHKDDEDRFFPSSGVLIFGKQGAGNXNVDXXNVMITXEEEIKTTNPVATEEYGXVATNLQSXNTAPQTGTVNSQGALPGMVWQNRDVYLQGPIWAKIPHTDGNFHPSPLMGGFGLKHPPPQILIKNTPVPANPPTTFXPAKFASFITQYSTGQVSVEIEWELQKENSKRWNPEIQYTSNYNKSTNVDFAVDTEGVYSEPRPIGTRYLTRNL

SEQ ID NO: 134 - protein, 738 aa, Adeno-associated virus
  VARIANT 158: note = Thr or Ser
  VARIANT 169: note = Lys or Arg
  VARIANT 564: note = Ser or Asn
MAADGYLPDWLEDNLSEGIREWWDLKPGAPKPKANQQKQDDGRGLVLPGYKYLGPFNGLDKGEPVNAADAAALEHDKAYDQQLKAGDNPYLRYNHADAEFQERLQEDTSFGGNLGRAVFQAKKRVLEPLGLVEEGAKTAPGKKRPVEQSPQREPDSSXGIGKKGQQPAXKRLNFGQTGDSESVPDPQPLGEPPAAPSGVGSNTMAAGGGAPMADNNEGADGVGNSSGNWHCDSTWLGDRVITTSTRTWALPTYNNHLYKQISNGTSGGSTNDNTYFGYSTPWGYFDFNRFHCHFSPRDWQRLINNNWGFRPKRLNFKLFNIQVKEVTTNEGTKTIANNLTSTVQVFTDSEYQLPYVLGSAHQGCLPPFPADVFMIPQYGYLTLNNGSQAVGRSSFYCLEYFPSQMLRTGNNFQFSYTFEDVPFHSSYAHSQSLDRLMNPLIDQYLYYLSRTQTTGGTAGTQTLQFSQAGPSSMANQAKNWLPGPCYRQQRVSTTTNQNNNSNFAWTGATKYHLNGRDSLVNPGVAMATHKDDEDRFFPSSGVLIFGKQGAGNDNVDYSNVMITXEEEIKTTNPVATEEYGVVATNLQSANTAPQTGTVNSQGALPGMVWQNRDVYLQGPIWAKIPHTDGNFHPSPLMGGFGLKHPPPQILIKNTPVPADPPTTFNQAKLNSFITQYSTGQVSVEIEWELQKENSKRWNPEIQYTSNYYKSTNVDFAVNTEGVYSEPRPIGTRYLTRNL

SEQ ID NO: 135 - protein, 738 aa, Adeno-associated virus
  VARIANT 158: note = Thr or Ser
  VARIANT 169: note = Arg or Lys
  VARIANT 315: note = Asn or Ser
  VARIANT 413: note = Gln or Glu
  VARIANT 472: note = Asn, Thr or Ser
  VARIANT 534: note = Asp or Glu
  VARIANT 542: note = Ile or Val
  VARIANT 595: note = Ile or Val
MAADGYLPDWLEDNLSEGIREWWDLKPGAPKPKANQQKQDDGRGLVLPGYKYLGPFNGLDKGEPVNAADAAALEHDKAYDQQLKAGDNPYLRYNHADAEFQERLQEDTSFGGNLGRAVFQAKKRVLEPLGLVEEGAKTAPGKKRPVEQSPQREPDSSXGIGKKGQQPAXKRLNFGQTGDSESVPDPQPLGEPPAAPSGVGSNTMAAGGGAPMADNNEGADGVGSSSGNWHCDSTWLGDRVITTSTRTWALPTYNNHLYKQISNGTSGGSTNDNTYFGYSTPWGYFDFNRFHCHFSPRDWQRLINNNWGFRPKRLXFKLFNIQVKEVTQNEGTKTIANNLTSTIQVFTDSEYQLPYVLGSAHQGCLPPFPADVFMIPQYGYLTLNNGSQAVGRSSFYCLEYFPSQMLRTGNNFXFSYTFEDVPFHSSYAHSQSLDRLMNPLIDQYLYYLSRTQTTGGTAGTQTLQFSQAGPSXMANQAKNWLPGPCYRQQRVSTTTSQNNNSNFAWTGATKYHLNGRDSLVNPGVAMATHKDDEXRFFPSSGXLIFGKQGAGKDNVDYSNVMLTSEEEIKTTNPVATEEYGVVADNLQQQNTAPQXGTVNSQGALPGMVWQNRDVYLQGPIWAKIPHTDGNFHPSPLMGGFGLKHPPPQILIKNTPVPADPPTTFNQAKLNSFITQYSTGQVSVEIEWELQKENSKRWNPEIQYTSNYYKSTNVDFAVNTEGVYSEPRPIGTRYLTRNL

SEQ ID NO: 136 - protein, 738 aa, Adeno-associated virus
  VARIANT 169: note = Arg or Lys
  VARIANT 315: note = Asn or Ser
  VARIANT 534: note = Asp or Glu
  VARIANT 542: note = Ile or Val
MAADGYLPDWLEDNLSEGIREWWDLKPGAPKPKANQQKQDDGRGLVLPGYKYLGPFNGLDKGEPVNAADAAALEHDKAYDQQLKAGDNPYLRYNHADAEFQERLQEDTSFGGNLGRAVFQAKKRVLEPLGLVEEGAKTAPGKKRPVEPSPQRSPDSSTGIGKKGQQPAXKRLNFGQTGDSESVPDPQPIGEPPAAPSGVGSGTMAAGGGAPMADNNEGADGVGSSSGNWHCDSTWLGDRVITTSTRTWALPTYNNHLYKQISNGTSGGSTNDNTYFGYSTPWGYFDFNRFHCHFSPRDWQRLINNNWGFRPKRLXFKLFNIQVKEVTQNEGTKTIANNLTSTIQVFTDSEYQLPYVLGSAHQGCLPPFPADVFMIPQYGYLTLNNGSQAVGRSSFYCLEYFPSQMLRTGNNFEFSYTFEDVPFHSSYAHSQSLDRLMNPLIDQYLYYLSRTQSTGGTAGTQQLLFSQAGPSNMSAQAKNWLPGPCYRQQRVSTTLSQNNNSNFAWTGATKYHLNGRDSLVNPGVAMATHKDDEXRFFPSSGXLMFGKQGAGKDNVDYSNVMLTSEEEIKTTNPVATEQYGVVADNLQQQNTAPIVGAVNSQGALPGMVWQNRDVYLQGPIWAKIPHTDGNFHPSPLMGGFGLKHPPPQILIKNTPVPADPPTTFNQAKLNSFITQYSTGQVSVEIEWELQKENSKRWNPEIQYTSNYYKSTNVDFAVNTEGVYSEPRPIGTRYLTRNL

SEQ ID NO: 137 - protein, 738 aa, Adeno-associated virus
  VARIANT 471: note = Ser or Asn
MAADGYLPDWLEDNLSEGIREWWDLKPGAPKPKANQQKQDDGRGLVLPGYKYLGPFNGLDKGEPVNAADAAALEHDKAYDQQLKAGDNPYLRYNHADAEFQERLQEDTSFGGNLGRAVFQAKKRVLEPLGLVEEGAKTAPGKKRPVEPSPQRSPDSSTGIGKKGQQPAKKRLNFGQTGDSESVPDPQPIGEPPAGPSGLGSGTMAAGGGAPMADNNEGADGVGSSSGNWHCDSTWLGDRVITTSTRTWALPTYNNHLYKQISNGTSGGSTNDNTYFGYSTPWGYFDFNRFHCHFSPRDWQRLINNNWGFRPKRLNFKLFNIQVKEVTQNEGTKTIANNLTSTIQVFTDSEYQLPYVLGSAHQGCLPPFPADVFMIPQYGYLTLNNGSQAVGRSSFYCLEYFPSQMLRTGNNFEFSYTFEDVPFHSSYAHSQSLDRLMNPLIDQYLYYLSRTQSTGGTAGTQQLLFSQAGPXNMSAQAKNWLPGPCYRQQRVSTTLSQNNNSNFAWTGATKYHLNGRDSLVNPGVAMATHKDDEERFFPSSGVLMFGKQGAGKDNVDYSSVMLTSEEEIKTTNPVATEQYGVVADNLQQQNTAPIVGAVNSQGALPGMVWQNRDVYLQGPIWAKIPHTDGNFHPSPLMGGFGLKHPPPQILIKNTPVPADPPTTFSQAKLASFITQYSTGQVSVEIEWELQKENSKRWNPEIQYTSNYYKSTNVDFAVNTEGTYSEPRPIGTRYLTRNL

SEQ ID NO: 138 - protein, 738 aa, Adeno-associated virus
  VARIANT 157: note = Ser or Thr
  VARIANT 169: note = Lys or Arg
  VARIANT 457: note = Ala or Gly
  VARIANT 463: note = Gln or Ala
  VARIANT 508: note = Thr or Ala
  VARIANT 510: note = Tyr or Phe
  VARIANT 511: note = His or Lys
  VARIANT 558: note = Gln or Asn
  VARIANT 585: note = Asn or His
  VARIANT 587: note = Ser or Ala
MAADGYLPDWLEDNLSEGIREWWDLKPGAPKPKANQQKQDDGRGLVLPGYKYLGPFNGLDKGEPVNAADAAALEHDKAYDQQLKAGDNPYLRYNHADAEFQERLQEDTSFGGNLGRAVFQAKKRVLEPLGLVEEGAKTAPGKKRPVEQSPQEPDSSXLGIGKTGQQPAXKRLNFGQTGDSESVPDPQPLGEPPAAPSGVGSNTMASGGGAPMADNNEGADGVGNSSGNWHCDSTWLGDRVITTSTRTWALPTYNNHLYKQISNGTSGGSTNDNTYFGYSTPWGYFDFNRFHCHFSPRDWQRLINNNWGFRPKRLNFKLFNIQVKEVTTNEGTKTIANNLTSTVQVFTDSEYQLPYVLGSAHQGCLPPFPADVFMIPQYGYLTLNNGSQAVGRSSFYCLEYFPSQMLRTGNNFQFSYTFEDVPFHSSYAHSQSLDRLMNPLIDQYLYYLSRTQTTGTXGTQTLXFSQAGPSSMANQARNWVPGPCYRQQRVSTTTNQNNNSNFAWTGAXKXXLNGRDSLMNPGVAMASHKDDEDRFFPSSGVLIFGKQGAGNDNVDYSXVMITNEEEIKTTNPVATEEYGAVATNXQXLANTQAQTGLVHNQGVLPGMVWQNRDVYLQGPIWAKIPHTDGNFHPSPLMGGFGLKHPPPQILIKNTPVPADPPTTFNQAKLNSFITQYSTGQVSVEIEWELQKENSKRWNPEIQYTSNYYKSTNVDFAVNTEGVYSEPRPIGTRYLTRNL

SEQ ID NO: 139 - protein, 737 aa, Adeno-associated virus
  VARIANT 148: note = Pro or Gln
  VARIANT 169: note = Lys or Arg
  VARIANT 314: note = Arg or Asn
  VARIANT 466: note = Tyr or His
  VARIANT 563: note = Asn or Ser
  VARIANT 580: note = Val or Ile
  VARIANT 588: note = Ala or Ser
MAADGYLPDWLEDNLSEGIREWWDLKPGAPKPKANQQKQDDGRGLVLPGYKYLGPFNGLDKGEPVNAADAAALEHDKAYDQQLKAGDNPYLRYNHADAEFQERLQEDTSFGGNLGRAVFQAKKRVLEPLGLVEEGAKTAPGKKRPVEXSPQRSPDSSTGIGKKGQQPAXKRLNFGQTGDSESVPDPQPLGEPPAAPSGVGSGTMAAGGGAPMADNNEGADGVGNASGNWHCDSTWLGDRVITTSTRTWALPTYNNHLYKQISSQSAGSTNDNTYFGYSTPWGYFDFNRFHCHFSPRDWQRLINNNWGFRPKKLXFKLFNIQVKEVTTNDGVTTIANNLTSTVQVFSDSEYQLPYVLGSAHQGCLPPFPADVFMIPQYGYLTLNNGSQSVGRSSFYCLEYFPSQMLRTGNNFEFSYTFEDVPFHSSYAHSQSLDRLMNPLIDQYLYYLARTQSTTGGTAGNRELQFXQAGPSTMAEQAKNWLPGPCYRQQRVSKTLDQNNNSNFAWTGATKYHLNGRNSLVNPGVAMATHKDDEDRFFPSSGVLIFGKTGAANKTTLENVLMTXEEEIKTTNPVATEEYGXVSSNLQSXNTAPQTQTVNSQGALPGMVWQNRDVYLQGPIWAKIPHTDGNFHPSPLMGGFGLKHPPPQILIKNTPVPANPPEVFTPAKFASFITQYSTGQVSVEIEWELQKENSKRWNPEIQYTSNYDKSTNVDFAVDSEGVYSEPRPIGTRYLTRNL

SEQ ID NO: 140 - protein, 735 aa, Adeno-associated virus
  VARIANT 162: note = Ser or Thr
  VARIANT 168: note = Lys or Arg
  VARIANT 224: note = Ala or Ser
  VARIANT 310: note = Arg or Lys
  VARIANT 410: note = Thr or Gln
  VARIANT 446: note = Ser or Asn
  VARIANT 461: note = Gln or Leu
  VARIANT 471: note = Ala or Ser
  VARIANT 708: note = Ala or Thr
MAADGYLPDWLEDNLSEGIREWWDLKPGAPKPKANQQKQDDGRGLVLPGYKYLGPFNGLDKGEPVNAADAAALEHDKAYDQQLKAGDNPYLRYNHADAEFQERLQEDTSFGGNLGRAVFQAKKRVLEPLGLVEEGAKTAPGKKRPVEQSPQEPDSSSGIGKXGQQPAXKRLNFGQTGDSESVPDPQPLGEPPAAPSGVGSNTMASGGGAPMADNNEGADGVGNXSGNWHCDSTWLGDRVITTSTRTWALPTYNNHLYKQISSQSGASNDNHYFGYSTPWGYFDFNRFHCHFSPRDWQRLINNNWGFRPKXLNFKLFNIQVKEVTTNDGTTTIANNLTSTVQVFTDSEYQLPYVLGSAHQGCLPPFPADVFMIPQYGYLTLNNGSQAVGRSSFYCLEYFPSQMLRTGNNFXFSYTFEDVPFHSSYAHSQSLDRLMNPLIDQYLYYLXRTQTTSGTAQNRELXFSQAGPSSMXNQAKNWLPGPCYRQQRVSKTANDNNNSNFAWTGATKYHLNGRDSLVNPGPAMASHKDDEDKFFPMSGVLIFGKQGAGASNVDLDNVMITDEEEIKTTNPVATEQYGTVATNLQSSNTAPATGTVNSQGALPGMVWQDRDVYLQGPIWAKIPHTDGHFHPSPLMGGFGLKHPPPQILIKNTPVPANPPTTFSPAKFASFITQYSTGQVSVEIEWELQKENSKRWNPEIQYTSNYNKSXNVDFTVDTNGVYSEPRPIGTRYLTRNL

SEQ ID NO: 141 - protein, 735 aa, Adeno-associated virus
  VARIANT 42: note = Gly or Ser
  VARIANT 168: note = Arg or Lys
  VARIANT 310: note = Lys or Arg
  VARIANT 410: note = Thr or Gln
  VARIANT 446: note = Ser or Arg
  VARIANT 461: note = Gln or Leu
  VARIANT 471: note = Ala or Ser
  VARIANT 475: note = Lys or Arg
  VARIANT 504: note = Gly or Ala
  VARIANT 539: note = Val or Asn
MAADGYLPDWLEDNLSEGIREWWDLKPGAPQPKANQQHQDDXRGLVLPGYKYLGPFNGLDKGEPVNEADAAALEHDKAYDQQLKAGDNPYLKYNHADAEFQERLQEDTSFGGNLGRAVFQAKKRVLEPLGLVEEAAKTAPGKKRPVEQSPQEPDSSSGIGKSGQQPAXKRLNFGQTGDSESVPDPQPLGEPPAAPSGVGSNTMASGGGAPMADNNEGADGVGNSSGNWHCDSTWLGDRVITTSTRTWALPTYNNHLYKQISSQSGASNDNHYFGYSTPWGYFDFNRFHCHFSPRDWQRLINNNWGFRPKXLNFKLFNIQVKEVTQNDGTTTIANNLTSTVQVFTDSEYQLPYVLGSAHQGCLPPFPADVFMIPQYGYLTLNNGSQAVGRSSFYCLEYFPSQMLRTGNNFXFSYTFEDVPFHSSYAHSQSLDRLMNPLIDQYLYYLXRTQTTSGTTQQSRLXFSQAGPSSMXQQAXNWLPGPCYRQQRVSKTANDNNNSNFAWTXATKYHLNGRDSLVNPGPAMASHKDDEEKFFPMHGXLIFGKQGTGASNVDLDNVMITDEEEIRTTNPVATEQYGTVATNLQSSNTAPATGTVNSQGALPGMVWQDRDVYLQGPIWAKIPHTDGHFHPSPLMGGFGLKHPPPQILIKNTPVPANPPTTFSPAKFASFITQYSTGQVSVEIEWELQKENSKRWNPEIQYTSNYNKSVNVDFTVDTNGVYSEPRPIGTRYLTRNL

SEQ ID NO: 142 - protein, 736 aa, Adeno-associated virus
MAADGYLPDWLEDNLSEGIREWWDLKPGAPKPKANQQKQDDGRGLVLPGYKYLGPFNGLDKGEPVNAADAAALEHDKAYDQQLKAGDNPYLRYNHADAEFQERLQEDTSFGGNLGRAVFQAKKRVLEPLGLVEEGAKTAPGKKRPVEQSPQEPDSSSGIGKKGQQPARKRLNFGQTGDSESVPDPQPLGEPPAAPSGVGSNTMAAGGGAPMADNNEGADGVGNASGNWHCDSTWLGDRVITTSTRTWALPTYNNHLYKQISSQSGGSTNDNTYFGYSTPWGYFDFNRFHCHFSPRDWQRLINNNWGFRPKKLNFKLFNIQVKEVTTNDGTTTIANNLTSTVQVFTDSEYQLPYVLGSAHQGCLPPFPADVFMIPQYGYLTLNNGSQAVGRSSFYCLEYFPSQMLRTGNNFQFSYTFEDVPFHSSYAHSQSLDRLMNPLIDQYLYYLSRTQTTSGTAGNRTLQFSQAGPSSMANQAKNWLPGPCYRQQRVSKTTNQNNNSNFAWTGATKYHLNGRDSLVNPGPAMATHKDDEDKFFPMSGVLIFGKQGAGNSNVDLDNVMITNEEEIKTTNPVATEEYGTVATNLQSANTAPATGTVNSQGALPGMVWQDRDVYLQGPIWAKIPHTDGHFHPSPLMGGFGLKHPPPQILIKNTPVPANPPTTFSPAKFASFITQYSTGQVSVEIEWELQKENSKRWNPEIQYTSNYNKSTNVDFAVDTNGVYSEPRPIGTRYLTRNL

SEQ ID NO: 143 - protein, 736 aa, Adeno-associated virus
MAADGYLPDWLEDNLSEGIREWWDLKPGAPKPKANQQKQDDGRGLVLPGYKYLGPFNGLDKGEPVNAADAAALEHDKAYDQQLKAGDNPYLRYNHADAEFQERLQEDTSFGGNLGRAVFQAKKRVLEPLGLVEEGAKTAPGKKRPVEQSPQEPDSSSGIGKKGQQPAKKRLNFGQTGDSESVPDPQPLGEPPAAPSGVGSNTMAAGGGAPMADNNEGADGVGNASGNWHCDSTWLGDRVITTSTRTWALPTYNNHLYKQISSQSGASTNDNTYFGYSTPWGYFDFNRFHCHFSPRDWQRLINNNWGFRPKRLNFKLFNIQVKEVTTNDGTTTIANNLTSTVQVFTDSEYQLPYVLGSAHQGCLPPFPADVFMIPQYGYLTLNNGSQAVGRSSFYCLEYFPSQMLRTGNNFEFSYTFEDVPFHSSYAHSQSLDRLMNPLIDQYLYYLSRTQTTSGTAGNRTLQFSQAGPSSMANQAKNWLPGPCYRQQRVSKTANQNNNSNFAWTGATKYHLNGRDSLVNPGPAMATHKDDEDKFFPMSGVLIFGKQGAGNSNVDLDNVMITSEEEIKTTNPVATEQYGTVATNLQSSNTAPATGTVNSQGALPGMVWQNRDVYLQGPIWAKIPHTDGHFHPSPLMGGFGLKHPPPQILIKNTPVPANPPTTFSPAKFASFITQYSTGQVSVEIEWELQKENSKRWNPEIQYTSNYNKSTNVDFAVDTNGVYSEPRPIGTRYLTRNL

SEQ ID NO: 144 - protein, 736 aa, Adeno-associated virus
MAADGYLPDWLEDNLSEGIREWWDLKPGAPKPKANQQKQDDGRGLVLPGYKYLGPFNGLDKGEPVNAADAAALEHDKAYDQQLKAGDNPYLRYNHADAEFQERLQEDTSFGGNLGRAVFQAKKRVLEPLGLVEEGAKTAPGKKRPVEQSPQEPDSSSGIGKKGQQPARKRLNFGQTGDSESVPDPQPLGEPPAAPSGVGSNTMAAGGGAPMADNNEGADGVGNASGNWHCDSTWLGDRVITTSTRTWALPTYNNHLYKQISSQSGGSTNDNTYFGYSTPWGYFDFNRFHCHFSPRDWQRLINNNWGFRPKRLNFKLFNIQVKEVTTNDGTTTIANNLTSTVQVFTDSEYQLPYVLGSAHQGCLPPFPADVFMIPQYGYLTLNNGSQAVGRSSFYCLEYFPSQMLRTGNNFEFSYTFEDVPFHSSYAHSQSLDRLMNPLIDQYLYYLSRTQTTSGTAGNRTLQFSQAGPSSMANQAKNWLPGPCYRQQRVSKTANQNNNSNFAWTGATKYHLNGRDSLVNPGPAMATHKDDEDKFFPMSGVLIFGKQGAGNSNVDLDNVMITNEEEIKTTNPVATEQYGTVATNLQSANTAPATGTVNSQGALPGMVWQDRDVYLQGPIWAKIPHTDGHFHPSPLMGGFGLKHPPPQILIKNTPVPANPPTTFSPAKFASFITQYSTGQVSVEIEWELQKENSKRWNPEIQYTSNYNKSTNVDFAVDTNGVYSEPRPIGTRYLTRNL

SEQ ID NO: 145 - protein, 736 aa, Adeno-associated virus
MAADGYLPDWLEDNLSEGIREWWDLKPGAPKPKANQQKQDDGRGLVLPGYKYLGPFNGLDKGEPVNAADAAALEHDKAYDQQLKAGDNPYLRYNHADAEFQERLQEDTSFGGNLGRAVFQAKKRVLEPLGLVEEGAKTAPGKKRPVEQSPQEPDSSSGIGKKGQQPAKKRLNFGQTGDSESVPDPQPLGEPPAAPSGVGSNTMAAGGGAPMADNNEGADGVGNASGNWHCDSTWLGDRVITTSTRTWALPTYNNHLYKQISSQSGGSTNDNTYFGYSTPWGYFDFNRFHCHFSPRDWQRLINNNWGFRPKKLNFKLFNIQVKEVTTNDGTTTIANNLTSTVQVFTDSEYQLPYVLGSAHQGCLPPFPADVFMIPQYGYLTLNNGSQAVGRSSFYCLEYFPSQMLRTGNNFEFSYTFEDVPFHSSYAHSQSLDRLMNPLIDQYLYYLSRTQTTSGTAGNRTLQFSQAGPSSMANQAKNWLPGPCYRQQRVSKTANQNNNSNFAWTGATKYHLNGRDSLVNPGPAMATHKDDEDKFFPMSGVLIFGKQGAGNSNVDLDNVMITSEEEIKTTNPVATEQYGTVATNLQSSNTAPATGTVNSQGALPGMVWQNRDVYLQGPIWAKIPHTDGHFHPSPLMGGFGLKHPPPQILIKNTPVPANPPTTFSPAKFASFITQYSTGQVSVEIEWELQKENSKRWNPEIQYTSNYNKSTNVDFAVDTNGVYSEPRPIGTRYLTRNL

SEQ ID NO: 146 - protein, 736 aa, Adeno-associated virus
MAADGYLPDWLEDNLSEGIREWWDLKPGAPKPKANQQKQDDGRGLVLPGYKYLGPFNGLDKGEPVNAADAAALEHDKAYDQQLKAGDNPYLRYNHADAEFQERLQEDTSFGGNLGRAVFQAKKRVLEPLGLVEEGAKTAPGKKRPVEQSPQEPDSSSGIGKKGQQPAKKRLNFGQTGDSESVPDPQPLGEPPAAPSGVGSNTMASGGGAPMADNNEGADGVGNASGNWHCDSTWLGDRVITTSTRTWALPTYNNHLYKQISSQSGGSTNDNTYFGYSTPWGYFDFNRFHCHFSPRDWQRLINNNWGFRPKKLNFKLFNIQVKEVTTNDGTTTIANNLTSTVQVFTDSEYQLPYVLGSAHQGCLPPFPADVFMIPQYGYLTLNNGSQAVGRSSFYCLEYFPSQMLRTGNNFEFSYTFEDVPFHSSYAHSQSLDRLMNPLIDQYLYYLSRTQTTSGTAGNRTLQFSQAGPSSMANQAKNWLPGPCYRQQRVSKTANQNNNSNFAWTGATKYHLNGRDSLVNPGPAMATHKDDEDKFFPMSGVLIFGKQGAGNSNVDLDNVMITSEEEIKTTNPVATEEYGTVATNLQSSNTAPATGTVNSQGALPGMVWQNRDVYLQGPIWAKIPHTDGHFHPSPLMGGFGLKHPPPQILIKNTPVPANPPTTFSPAKFASFITQYSTGQVSVEIEWELQKENSKRWNPEIQYTSNYNKSTNVDFAVDTNGVYSEPRPIGTRYLTRNL

SEQ ID NO: 147 - protein, 736 aa, Adeno-associated virus
MAADGYLPDWLEDNLSEGIREWWDLKPGAPKPKANQQKQDDGRGLVLPGYKYLGPFNGLDKGEPVNAADAAALEHDKAYDQQLKAGDNPYLRYNHADAEFQERLQEDTSFGGNLGRAVFQAKKRVLEPLGLVEEGAKTAPGKKRPVEQSPQEPDSSSGIGKKGQQPAKKRLNFGQTGDSESVPDPQPLGEPPAAPSGVGSNTMASGGGAPMADNNEGADGVGNASGNWHCDSTWLGDRVITTSTRTWALPTYNNHLYKQISSQSGGSTNDNTYFGYSTPWGYFDFNRFHCHFSPRDWQRLINNNWGFRPKKLNFKLFNIQVKEVTTNDGTTTIANNLTSTVQVFTDSEYQLPYVLGSAHQGCLPPFPADVFMIPQYGYLTLNNGSQAVGRSSFYCLEYFPSQMLRTGNNFQFSYTFEDVPFHSSYAHSQSLDRLMNPLIDQYLYYLSRTQTTSGTAGNRELQFSQAGPSSMANQAKNWLPGPCYRQQRVSKTTNQNNNSNFAWTGATKYHLNGRDSLVNPGPAMATHKDDEDKFFPMSGVLIFGKQGAGNSNVDLDNVMITNEEEIKTTNPVATEQYGTVATNLQSANTAPATGTVNSQGALPGMVWQDRDVYLQGPIWAKIPHTDGHFHPSPLMGGFGLKHPPPQILIKNTPVPANPPTTFSPAKFASFITQYSTGQVSVEIEWELQKENSKRWNPEIQYTSNYNKSTNVDFAVDTNGVYSEPRPIGTRYLTRNL

SEQ ID NO: 148 - protein, 736 aa, Adeno-associated virus
MAADGYLPDWLEDNLSEGIREWWDLKPGAPKPKANQQKQDDGRGLVLPGYKYLGPFNGLDKGEPVNAADAAALEHDKAYDQQLKAGDNPYLRYNHADAEFQERLQEDTSFGGNLGRAVFQAKKRVLEPLGLVEEGAKTAPGKKRPVEQSPQEPDSSSGIGKKGQQPAKKRLNFGQTGDSESVPDPQPLGEPPAAPSGVGSNTMASGGGAPMADNNEGADGVGNASGNWHCDSTWLGDRVITTSTRTWALPTYNNHLYKQISSQSGASTNDNTYFGYSTPWGYFDFNRFHCHFSPRDWQRLINNNWGFRPKRLNFKLFNIQVKEVTTNDGTTTIANNLTSTVQVFTDSEYQLPYVLGSAHQGCLPPFPADVFMIPQYGYLTLNNGSQAVGRSSFYCLEYFPSQMLRTGNNFQFSYTFEDVPFHSSYAHSQSLDRLMNPLIDQYLYYLSRTQTTSGTAGNRELQFSQAGPSSMANQAKNWLPGPCYRQQRVSKTTNQNNNSNFAWTGATKYHLNGRDSLVNPGPAMATHKDDEDKFFPMSGVLIFGKQGAGNSNVDLDNVMITNEEEIKTTNPVATEEYGTVATNLQSANTAPATGTVNSQGALPGMVWQNRDVYLQGPIWAKIPHTDGHFHPSPLMGGFGLKHPPPQILIKNTPVPANPPTTFSPAKFASFITQYSTGQVSVEIEWELQKENSKRWNPEIQYTSNYNKSTNVDFAVDTNGVYSEPRPIGTRYLTRNL

SEQ ID NO: 149 - protein, 736 aa, Adeno-associated virus
MAADGYLPDWLEDNLSEGIREWWDLKPGAPKPKANQQKQDDGRGLVLPGYKYLGPFNGLDKGEPVNAADAAALEHDKAYDQQLKAGDNPYLRYNHADAEFQERLQEDTSFGGNLGRAVFQAKKRVLEPLGLVEEGAKTAPGKKRPVEQSPQEPDSSSGIGKKGQQPARKRLNFGQTGDSESVPDPQPLGEPPAAPSGVGSNTMAAGGGAPMADNNEGADGVGNASGNWHCDSTWLGDRVITTSTRTWALPTYNNHLYKQISSQSGGSTNDNTYFGYSTPWGYFDFNRFHCHFSPRDWQRLINNNWGFRPKRLNFKLFNIQVKEVTTNDGTTTIANNLTSTVQVFTDSEYQLPYVLGSAHQGCLPPFPADVFMIPQYGYLTLNNGSQAVGRSSFYCLEYFPSQMLRTGNNFEFSYTFEDVPFHSSYAHSQSLDRLMNPLIDQYLYYLSRTQTTSGTAGNRELQFSQAGPSSMANQAKNWLPGPCYRQQRVSKTTNQNNNSNFAWTGATKYHLNGRDSLVNPGPAMATHKDDEDKFFPMSGVLIFGKQGAGNSNVDLDNVMITSEEEIKTTNPVATEEYGTVATNLQSSNTAPATGTVNSQGALPGMVWQERDVYLQGPIWAKIPHTDGHFHPSPLMGGFGLKHPPPQILIKNTPVPANPPTTFSPAKFASFITQYSTGQVSVEIEWELQKENSKRWNPEIQYTSNYNKSTNVDFAVDTNGVYSEPRPIGTRYLTRNL

SEQ ID NO: 150 - protein, 736 aa, Adeno-associated virus
MAADGYLPDWLEDNLSEGIREWWDLKPGAPKPKANQQKQDDGRGLVLPGYKYLGPFNGLDKGEPVNAADAAALEHDKAYDQQLKAGDNPYLRYNHADAEFQERLQEDTSFGGNLGRAVFQAKKRVLEPLGLVEEGAKTAPGKKRPVEQSPQEPDSSSGIGKKGQQPARKRLNFGQTGDSESVPDPQPLGEPPAAPSGVGSNTMASGGGAPMADNNEGADGVGNASGNWHCDSTWLGDRVITTSTRTWALPTYNNHLYKQISSQSGGSTNDNTYFGYSTPWGYFDFNRFHCHFSPRDWQRLINNNWGFRPKKLNFKLFNIQVKEVTTNDGTTTIANNLTSTVQVFTDSEYQLPYVLGSAHQGCLPPFPADVFMIPQYGYLTLNNGSQAVGRSSFYCLEYFPSQMLRTGNNFEFSYTFEDVPFHSSYAHSQSLDRLMNPLIDQYLYYLSRTQTTSGTAGNRELQFSQAGPSSMANQAKNWLPGPCYRQQRVSKTTNQNNNSNFAWTGATKYHLNGRDSLVNPGPAMATHKDDEDKFFPMSGVLIFGKQGAGNSNVDLDNVMITSEEEIKTTNPVATEEYGTVATNLQSANTAPATGTVNSQGALPGMVWQDRDVYLQGPIWAKIPHTDGHFHPSPLMGGFGLKHPPPQILIKNTPVPANPPTTFSPAKFASFITQYSTGQVSVEIEWELQKENSKRWNPEIQYTSNYNKSTNVDFAVDTNGVYSEPRPIGTRYLTRNL

SEQ ID NO: 151 - protein, 738 aa, Adeno-associated virus
MAADGYLPDWLEDNLSEGIREWWDLKPGAPKPKANQQKQDDGRGLVLPGYKYLGPFNGLDKGEPVNAADAAALEHDKAYDQQLKAGDNPYLRYNHADAEFQERLQEDTSFGGNLGRAVFQAKKRVLEPLGLVEEGAKTAPGKKRPVEQSPQREPDSSTGIGKSGQQPAKKRLNFGQTGDSESVPDPQPLGEPPAAPSGVGSNTMASGGGAPMADNNEGADGVGNSSGNWHCDSTWLGDRVITTSTRTWALPTYNNHLYKQISNGTSGGSTNDNTYFGYSTPWGYFDFNRFHCHFSPRDWQRLINNNWGFRPKRLNFKLFNIQVKEVTTNEGTKTIANNLTSTVQVFTDSEYQLPYVLGSAHQGCLPPFPADVFMIPQYGYLTLNNGSQAVGRSSFYCLEYFPSQMLRTGNNFQFSYTFEDVPFHSSYAHSQSLDRLMNPLIDQYLYYLSRTQTTGGTAGTQTLQFSQAGPSSMANQARNWVPGPCYRQQRVSTTTNQNNNSNFAWTGATKYHLNGRDSLMNPGVAMASHKDDEDRFFPSSGVLIFGKQGAGNDNVDYSNVMITSEEEIKTTNPVATEEYGVVATNHQSANTQAQTGTVQNQGILPGMVWQNRDVYLQGPIWAKIPHTDGNFHPSPLMGGFGLKHPPPQILIKNTPVPADPPTTFNQAKLNSFITQYSTGQVSVEIEWELQKENSKRWNPEIQYTSNYYKSTNVDFAVNTEGVYSEPRPIGTRYLTRNL

SEQ ID NO: 152 - protein, 738 aa, Adeno-associated virus
MAADGYLPDWLEDNLSEGIREWWDLKPGAPKPKANQQKQDNGRGLVLPGYKYLGPFNGLDKGEPVNAADAAALEHDKAYDQQLQAGDNPYLRYNHADAEFQERLQEDTSFGGNLGRAVFQAKKRVLEPLGLVESPVKTAPGKKRPVEPSPQRSPDSSTGIGKKGQQPAKKRLNFGQTGDSESVPDPQPIGEPPAGPSGLGSGTMAAGGGAPMADNNEGADGVGSSSGNWHCDSTWLGDRVITTSTRTWALPTYNNHLYKQISNGTSGGSTNDNTYFGYSTPWGYFDFNRFHCHFSPRDWQRLINNNWGFRPKRLNFKLFNIQVKEVTQNEGTKTIANNLTSTIQVFTDSEYQLPYVLGSAHQGCLPPFPADVFMIPQYGYLTLNNGSQAVGRSSFYCLEYFPSQMLRTGNNFEFSYNFEDVPFHSSYAHSQSLDRLMNPLIDQYLYYLSRTQSTGGTAGTQQLLFSQAGPNNMSAQAKNWLPGPCYRQQRVSTTLSQNNNSNFAWTGATKYHLNGRDSLVNPGVAMATHKDDEERFFPSSGVLMFGKQGAGKDNVDYSSVMLTSEEEIKTTNPVATEQYGVVADNLQQQNAAPIVGAVNSQGALPGMVWQNRDVYLQGPIWAKIPHTDGNFHPSPLMGGFGLKHPPPQLLIKNTPVPADPPTTFNQAKLASFLTQYSTGQVSVEIEWELQKENSKRWNPEIQYTSNYYKSTNVDFAVNTEGTYSEPRPIGTRYLTRNL

SEQ ID NO: 153 - protein, 7 aa, synthetic construct
RGDLRVS

SEQ ID NO: 154 - protein, 7 aa, synthetic construct
RGDAVGV

SEQ ID NO: 155 - protein, 8 aa, synthetic construct
RGDFTPTS

SEQ ID NO: 156 - protein, 7 aa, synthetic construct
RGDLGLS

SEQ ID NO: 157 - protein, 7 aa, synthetic construct
RGDMSRE

SEQ ID NO: 158 - protein, 743 aa, synthetic construct
MAADGYLPDWLEDNLSEGIREWWALKPGAPQPKANQQHQDNARGLVLPGYKYLGPGNGLDKGEPVNAADAAALEHDKAYDQQLKAGDNPYLKYNHADAEFQERLKEDTSFGGNLGRAVFQAKKRLLEPLGLVEEAAKTAPGKKRPVEQSPQEPDSSAGIGKSGAQPAKKRLNFGQTGDTESVPDPQPIGEPPAAPSGVGSLTMASGGGAPVADNNEGADGVGSSSGNWHCDSQWLGDRVITTSTRTWALPTYNNHLYKQISNSTSGGSSNDNAYFGYSTPWGYFDFNRFHCHFSPRDWQRLINNNWGFRPKRLNFKLFNIQVKEVTDNNGVKTIANNLTSTVQVFTDSDYQLPYVLGSAHEGCLPPFPADVFMIPQYGYLTLNDGSQAVGRSSFYCLEYFPSQMLRTGNNFQFSYEFENVPFHSSYAHSQSLDRLMNPLIDQYLYYLSKTINGSGQNQQTLKFSVAGPSNMAVQGRNYIPGPSYRQQRVSTTVTQNNNSEFAWPGASSWALNGRNSLMNPGPAMASHKEGEDRFFPLSGSLIFGKQGTGRDNVDADKVMITNEEEIKTTNPVATESYGQVATNHQSAQRGDLLLSAQAQTGWVQNQGILPGMVWQDRDVYLQGPIWAKIPHTDGNFHPSPLMGGFGMKHPPPQILIKNTPVPADPPTAFNKDKLNSFITQYSTGQVSVEIEWELQKENSKRWNPEIQYTSNYYKSNNVEFAVNTEGVYSEPRPIGTRYLTRNL

SEQ ID NO: 159 - protein, 743 aa, synthetic construct
MAADGYLPDWLEDNLSEGIREWWALKPGAPQPKANQQHQDNARGLVLPGYKYLGPGNGLDKGEPVNAADAAALEHDKAYDQQLKAGDNPYLKYNHADAEFQERLKEDTSFGGNLGRAVFQAKKRLLEPLGLVEEAAKTAPGKKRPVEQSPQEPDSSAGIGKSGAQPAKKRLNFGQTGDTESVPDPQPIGEPPAAPSGVGSLTMASGGGAPVADNNEGADGVGSSSGNWHCDSQWLGDRVITTSTRTWALPTYNNHLYKQISNSTSGASTNDNAYFGYSTPWGYFDFNRFHCHFSPRDWQRLINNNWGFRPKRLNFKLFNIQVKEVTDNNGVKTIANNLTSTVQVFTDSDYQLPYVLGSAHEGCLPPFPADVFMIPQYGYLTLNDGSQAVGRSSFYCLEYFPSQMLRTGNNFQFSYEFENVPFHSSYAHSQSLDRLMNPLIDQYLYYLSKTINGSGQNQQTLKFSVAGPSNMAVQGRNYIPGPSYRQQRVSTTVTQNNNSEFAWPGASSWALNGRNSLMNPGPAMASHKEGEDRFFPLSGSLIFGKQGTGRDNVDADKVMITNEEEIKTTNPVATESYGQVATNHQSAQRGDLLLSAQAQTGWVQNQGILPGMVWQDRDVYLQGPIWAKIPHTDGNFHPSPLMGGFGMKHPPPQILIKNTPVPADPPTAFNKDKLNSFITQYSTGQVSVEIEWELQKENSKRWNPEIQYTSNYYKSNNVEFAVNTEGVYSEPRPIGTRYLTRNL

SEQ ID NO: 160 - protein, 8 aa, synthetic construct
NSTSGASS

SEQ ID NO: 161 - protein, 8 aa, synthetic construct
NSTSGGST

SEQ ID NO: 162 - protein, 8 aa, synthetic construct
NSTSGAST

SEQ ID NO: 163 - protein, 736 aa, synthetic construct
MAADGYLPDWLEDNLSEGIREWWALKPGAPQPKANQQHQDNARGLVLPGYKYLGPGNGLDKGEPVNAADAAALEHDKAYDQQLKAGDNPYLKYNHADAEFQERLKEDTSFGGNLGRAVFQAKKRLLEPLGLVEEAAKTAPGKKRPVEQSPQEPDSSAGIGKSGAQPAKKRLNFGQTGDTESVPDPQPIGEPPAAPSGVGSLTMASGGGAPVADNNEGADGVGSSSGNWHCDSQWLGDRVITTSTRTWALPTYNNHLYKQISNSTSGASTNDNAYFGYSTPWGYFDFNRFHCHFSPRDWQRLINNNWGFRPKRLNFKLFNIQVKEVTDNNGVKTIANNLTSTVQVFTDSDYQLPYVLGSAHEGCLPPFPADVFMIPQYGYLTLNDGSQAVGRSSFYCLEYFPSQMLRTGNNFQFSYEFENVPFHSSYAHSQSLDRLMNPLIDQYLYYLSKTINGSGQNQQTLKFSVAGPSNMAVQGRNYIPGPSYRQQRVSTTVTQNNNSEFAWPGASSWALNGRNSLMNPGPAMASHKEGEDRFFPLSGSLIFGKQGTGRDNVDADKVMITNEEEIKTTNPVATESYGQVATNHQSAQAQAQTGWVQNQGILPGMVWQDRDVYLQGPIWAKIPHTDGNFHPSPLMGGFGMKHPPPQILIKNTPVPADPPTAFNKDKLNSFITQYSTGQVSVEIEWELQKENSKRWNPEIQYTSNYYKSNNVEFAVNTEGVYSEPRPIGTRYLTRNL

SEQ ID NO: 164 - protein, 458 aa, synthetic construct
RDLTEAVPRLPGETLITDKEVIYICPFNGPIKGRVYITNYRLYLRSLETDSSLILDVPLGVISRIEKMGGATSRGENSYGLDITCKDMRNLRFALKQEGHSRRDMFEILTRYAFPLAHSLPLFAFLNEEKFNVDGWTVYNPVEEYRRQGLPNHHWRITFINKCYELCDTYPALLVVPYRASDDDLRRVATFRSRNRIPVLSWIHPENKTVIVRCSQPLVGMSGKRNKDDEKYLDVIRETNKQISKLTIYDARPSVNAVANKATGGGYESDDAYHNAELFFLDIHNIHVMRESLKKVKDIVYPNVEESHWLSSLESTHWLEHIKLVLTGAIQVADKVSSGKSSVLVHCSDGWDRTAQLTSLAMLMLDSFYRSIEGFEILVQKEWISFGHKFASRIGHGDKNHTDADRSPIFLQFIDCVWQMSKQFPTAFEFNEQFLIIILDHLYSCRFGTFLFNCESAR

SEQ ID NO: 165 - protein, 603 aa, synthetic construct
MASASTSKYNSHSLENESIKRTSRDGVNRDLTEAVPRLPGETLITDKEVIYICPFNGPIKGRVYITNYRLYLRSLETDSSLILDVPLGVISRIEKMGGATSRGENSYGLDITCKDMRNLRFALKQEGHSRRDMFEILTRYAFPLAHSLPLFAFLNEEKFNVDGWTVYNPVEEYRRQGLPNHHWRITFINKCYELCDTYPALLVVPYRASDDDLRRVATFRSRNRIPVLSWIHPENKTVIVRCSQPLVGMSGKRNKDDEKYLDVIRETNKQISKLTIYDARPSVNAVANKATGGGYESDDAYHNAELFFLDIHNIHVMRESLKKVKDIVYPNVEESHWLSSLESTHWLEHIKLVLTGAIQVADKVSSGKSSVLVHCSDGWDRTAQLTSLAMLMLDSFYRSIEGFEILVQKEWISFGHKFASRIGHGDKNHTDADRSPIFLQFIDCVWQMSKQFPTAFEFNEQFLIIILDHLYSCRFGTFLFNCESARERQKVTERTVSLWSLINSNKEKFKNPFYTKEINRVLYPVASMRHLELWVNYYIRWNPRIKQQQPNPVEQRYMELLALRDEYIKRLEELQLANSAKLSDPPTSPSSPSQMMPHVQTHF

SEQ ID NO: 166 - DNA, 1812 bp, synthetic construct
  source 1..1812: mol_type = other DNA
atggcttctgcatcaacttctaaatataattcacactccttggagaatgagtctattaagaggacgtctcgagatggagtcaatcgagatctcactgaggctgttcctcgacttccaggagaaacactaatcactgacaaagaagttatttacatatgtcctttcaatggccccattaagggaagagtttacatcacaaattatcgtctttatttaagaagtttggaaacggattcttctctaatacttgatgttcctctgggtgtgatctcgagaattgaaaaaatgggaggcgcgacaagtagaggagaaaattcctatggtctagatattacttgtaaagacatgagaaacctgaggttcgctttgaaacaggaaggccacagcagaagagatatgtttgagatcctcacgagatacgcgtttcccctggctcacagtctgccattatttgcatttttaaatgaagaaaagtttaacgtggatggatggacagtttacaatccagtggaagaatacaggaggcagggcttgcccaatcaccattggagaataacttttattaataagtgctatgagctctgtgacacttaccctgctcttttggtggttccgtatcgtgcctcagatgatgacctccggagagttgcaacttttaggtcccgaaatcgaattccagtgctgtcatggattcatccagaaaataagacggtcattgtgcgttgcagtcagcctcttgtcggtatgagtgggaaacgaaataaagatgatgagaaatatctcgatgttatcagggagactaataaacaaatttctaaactcaccatttatgatgcaagacccagcgtaaatgcagtggccaacaaggcaacaggaggaggatatgaaagtgatgatgcatatcataacgccgaacttttcttcttagacattcataatattcatgttatgcgggaatctttaaaaaaagtgaaggacattgtttatcctaatgtagaagaatctcattggttgtccagtttggagtctactcattggttagaacatatcaagctcgttttgacaggagccattcaagtagcagacaaagtttcttcagggaagagttcagtgcttgtgcattgcagtgacggatgggacaggactgctcagctgacatccttggccatgctgatgttggatagcttctataggagcattgaagggttcgaaatactggtacaaaaagaatggataagttttggacataaatttgcatctcgaataggtcatggtgataaaaaccacaccgatgctgaccgttctcctatttttctccagtttattgattgtgtgtggcaaatgtcaaaacagttccctacagcttttgaattcaatgaacaatttttgattataattttggatcatctgtatagttgccgatttggtactttcttattcaactgtgaatctgctcgagaaagacagaaggttacagaaaggactgtttctttatggtcactgataaacagtaataaagaaaaattcaaaaaccccttctatactaaagaaatcaatcgagttttatatccagttgccagtatgcgtcacttggaactctgggtgaattactacattagatggaaccccaggatcaagcaacaacagccgaatccagtggagcagcgttacatggagctcttagccttacgcgacgaatacataaagcggcttgaggaactgcagctcgccaactctgccaagctttctgatcccccaacttcaccttccagtccttcgcaaatgatgccccatgtgcaaactcacttttaa

SEQ ID NO: 167 - DNA, 1812 bp, synthetic construct
  source 1..1812: mol_type = other DNA
ttaaaagtgggtctggacgtggggcatcatctgtgaggggctgcttggtgaagtaggtgggtcggacagcttggcgctattggccagctgcagctcctccagcctcttgatatactcatctctcagggccagcagctccatgtaccgctgctccacagggttgggctgctgctgcttgatccggggattccagcggatatagtagttcacccacagctccaggtgtctcatggatgccacaggatacagcacgcgattgatctcctttgtgtagaaggggttcttgaacttctccttattgctgttgatcaggctccacagagacactgtgcgctcggtcaccttctgcctctctctggcagactcacaattaaacaggaatgtgccgaacctgcaggagtacaggtggtccaggatgatgatcagaaactgctcgttaaactcgaaggcggttgggaactgcttggacatctgccacacgcagtcgataaactgcaggaagatagggctgcggtcggcatcggtgtgattcttatcgccgtggccgatcctggaggcaaacttgtggccgaagctgatccactccttctgcaccaggatctcaaagccctcgatagatctatagaaggagtccagcatcagcatagccaggcttgtcagctgtgctgttctgtcccacccatcggaacagtgcaccagcacggagctcttgccagaggacaccttatcggccacctggatggcgcctgtcagcaccagcttgatgtgctccagccagtgggtagactccaggctagacagccagtgggactcctccacgtttgggtacacgatgtccttcaccttcttcagggactctctcatcacgtggatattgtggatatccagaaagaacagctcggcgttgtgataggcgtcatcagactcatatcctcctcctgttgccttatttgccactgcattcacagaaggccgggcatcatagattgtcagcttgctgatctgcttatttgtctctctgatcacatccaggtacttctcgtcatccttgttccgcttgccagacattcccaccagtggctgggagcagcgcacgatcactgtcttattctctgggtggatccagctcagcacagggattctgttccggctccggaaggtggccactctccgcaggtcatcgtcgctggctctgtagggcaccaccagcagggctggatatgtatcgcacagctcgtagcacttattgataaaggtgatccgccagtggtggttaggcaggccctggcgcctatactcctccacggggttgtacactgtccagccgtccacattgaacttctcctcgttcagaaaggcgaacagaggcagagagtgggccaggggaaaggcatatctggtcaggatctcgaacatatctctccgggagtggccctcctgcttcagggcaaaccgcagattgcgcatgtccttacaggtgatatccaggccgtagctgttctctcccctagaggtggctcctcccatcttctcgattctgctgatcacgcccagaggcacgtccaggatcagggagctatctgtctccaggctccgcaggtacagtctgtaattggtgatatacacgcggcccttgattgggccgttgaaagggcagatgtagatcacttccttgtctgtgatcagtgtctctccaggcagccttggcactgcctctgtcagatctctattgaccccgtcccttgaggttctcttgatgctctcgttttccaggctatgtgagttgtatttgcttgtgcttgctgatgccat

SEQ ID NO: 168 - DNA, 1812 bp, synthetic construct
  source 1..1812: mol_type = other DNA
atggcttctgcatcaacttctaaatataattcacactccttggagaatgagtctattaagaggacgtctcgagatggagtcaatcgagatctcactgaggctgttcctcgacttccaggagaaacactaatcactgacaaagaagttatttacatatgtcctttcaatggccccattaagggaagagtttacatcacaaattatcgtctttatttaagaagtttggaaacggattcttctctaatacttgatgttcctctgggtgtgatctcgagaattgaaaaaatgggaggcgcgacaagtagaggagaaaattcctatggtctagatattacttgtaaagacatgagaaacctgaggttcgctttgaaacaggaaggccacagcagaagagatatgtttgagatcctcacgagatacgcgtttcccctggctcacagtctgccattatttgcatttttaaatgaagaaaagtttaacgtggatggatggacagtttacaatccagtggaagaatacaggaggcagggcttgcccaatcaccattggagaataacttttattaataagtgctatgagctctgtgacacttaccctgctcttttggtggttccgtatcgtgcctcagatgatgacctccggagagttgcaacttttaggtcccgaaatcgaattccagtgctgtcatggattcatccagaaaataagacggtcattgtgcgttgcagtcagcctcttgtcggtatgagtgggaaacgaaataaagatgatgagaaatatctcgatgttatcagggagactaataaacaaatttctaaactcaccatttatgatgcaagacccagcgtaaatgcagtggccaacaaggcaacaggaggaggatatgaaagtgatgatgcatatcataacgccgaacttttcttcttagacattcataatattcatgttatgcgggaatctttaaaaaaagtgaaggacattgtttatcctaatgtagaagaatctcattggttgtccagtttggagtctactcattggttagaacatatcaagctcgttttgacaggagccattcaagtagcagacaaagtttcttcagggaagagttcagtgcttgtgcattgcagtgacggatgggacaggactgctcagctgacatccttggccatgctgatgttggatagcttctataggagcattgaagggttcgaaatactggtacaaaaagaatggataagttttggacataaatttgcatctcgaataggtcatggtgataaaaaccacaccgatgctgaccgttctcctatttttctccagtttattgattgtgtgtggcaaatgtcaaaacagttccctacagcttttgaattcaatgaacaatttttgattataattttggatcatctgtatagttgccgatttggtactttcttattcaactgtgaatctgctcgagaaagacagaaggttacagaaaggactgtttctttatggtcactgataaacagtaataaagaaaaattcaaaaacccattctatactaaagaaatcaatagagttttatatccagttgcaagtatgcgtcacttggaactctgggtgaattactacattagatggaaccccaggatcaaacaacaacaaccaaatccagtggaacaacgttacatggaactcttagccttacgagatgaatacataaaacggcttgaggaactgcaactagcaaactctgcaaaactttctgatcccccaacttcaccttccagtccttctcaaatgatgccacatgtgcaaactcacttttaa

SEQ ID NO: 169 - DNA, 1812 bp, synthetic construct
  source 1..1812: mol_type = other DNA
atggcctctgccagcacctctaagtacaacagccactccctggaaaatgaatccatcaaaaggaccagcagagatggagtgaacagagacctaactgaagctgtgccaagactgcctggagagaccctgatcacagacaaggaagtgatctacatctgccccttcaatggccctatcaagggaagggtgtacatcaccaactacaggctttacctgagatccctggagacagacagcagcctgatcctggatgtgcctctgggagtgatcagcagaatagagaagatggggggtgccaccagcagaggagagaacagctatggcctggacatcacctgcaaggacatgagaaacctgagatttgccctgaagcaggagggccacagcagaagagacatgtttgaaatcctgaccaggtatgccttccccctggcccactctctccccctgtttgccttcctgaatgaggaaaagttcaatgttgatggctggacagtgtacaacccagtggaggagtacagaagacagggcctgcctaaccaccactggaggatcaccttcatcaacaagtgctatgaactgtgtgacacataccctgccctgctggtggtgccttacagagcctcagatgatgacctgagaagagttgccaccttcagaagcaggaacagaatccctgtactgagctggatccaccctgagaataagactgtgattgtgaggtgcagccagcccctggtgggcatgagtggcaagagaaacaaagatgatgaaaagtacctggatgtgatcagagagaccaacaaacagatcagcaagctcaccatctatgatgctagaccctctgttaatgctgtggccaacaaggccacagggggaggctatgaatctgatgatgcttaccacaatgctgagctgttcttcctggacatccacaacatccatgtgatgagagaatccctcaagaaagtgaaggacattgtgtaccctaatgtggaagaaagtcactggctgagcagcttggagtccacccactggctggagcacatcaagctggtcctgacaggagccatccaggtggctgacaaggtgagttctggcaagtcctcagtgctggtccactgctctgatggctgggacagaactgcccagctgaccagtctggccatgctgatgctggactccttctacagaagcattgaaggctttgaaatcctggtgcaaaaggaatggatctcttttggccacaagtttgccagcagaattggccatggtgacaaaaaccacacagatgctgacagaagccctatcttcctgcagttcattgactgtgtgtggcagatgagcaagcagttccccacagcatttgagttcaatgagcagttcctaataatcatcctggaccacctctacagctgcagatttggcaccttcctgttcaactgtgagtctgccagagaaagacagaaggtgacagagaggacagtgagcctgtggagcctgatcaactccaacaaggagaagttcaagaaccccttctacaccaaggaaatcaacagggtgctgtaccctgtggctagcatgaggcacctggagctgtgggtcaactactacatcagatggaaccctagaatcaaacagcaacaacccaaccctgtggagcagaggtacatggagttactggccctgagggatgagtacatcaagagactggaggagctgcagctggccaactctgccaaactgtctgaccctcctacctcccccagctccccctctcagatgatgccacatgtgcagacccacttttaa

SEQ ID NO: 170 - DNA, 1812 bp, synthetic construct
  source 1..1812: mol_type = other DNA
ttaaaagtgggtctgcacgtgaggcatcatctggctggggctgctagggcttgtaggaggatcgctcagcttggcgctgttggccagctgcagttcttccagtctcttgatgtactcgtcccgcagggccagcagttccatgtaccgctgttccacaggattgggctgctgctgcttgattctggggttccaccggatgtagtagttgacccacagttccagatgtctcatgctggccacggggtacagcacccggttgatttctttggtgtagaaggggttcttgaatttctctttgttgctgttgatcagggaccacagagacacggtccgctcggtcactttctgccgttctctggcgctctcgcagttgaacaggaaggtgccgaatctgcagctgtacaggtggtccaggatgatgatcaggaactgctcgttgaactcgaaggcggtagggaactgcttggacatctgccacacgcagtcgatgaactgcaggaagatggggcttctatcggcgtcggtgtggttcttgtcgccgtgtccgattctgctggcgaacttgtggccgaagctgatccactctttctgcaccaggatctcaaagccctcgatggatctgtagaagctgtccagcatcagcatggccagagatgtcagctgggctgttctatcccagccgtcgctacagtgcaccagcacgctagacttgccagaggacaccttatcggccacctggatggcgcctgtcagcaccagcttgatgtgttccagccagtgtgtgctttccagactgctcagccagtggctctcttccacattggggtacacgatgtccttcactttcttcaggctttcccgcatcacgtggatgttgtggatgtccagaaagaacagctcggcgttatgataggcgtcgtcgctctcgtatccgccgcctgtagctttgttggccacggcgttcacgctaggtctggcgtcgtagatggtcagcttgctgatctgcttgtttgtctcgcggatcacgtccaggtacttctcgtcgtccttgtttctcttgccagacatgcccacgaggggctgagaacaccgcacgatcacggtcttgttctcggggtgaatccagctcagcacagggattctgttccggctccgaaaggtggccactcttctcaggtcgtcgtcggaggctctgtaaggcaccaccagcagtgcggggtatgtgtcgcacagctcgtagcacttgttgatgaaggtgatccgccagtggtgattaggcaggccctgtctccgatactcttccacggggttgtacacggtccagccgtccacgttgaacttctcttcgttcaggaaggcgaacagaggcagggagtgagccagaggaaaggcgtatctggtcaggatctcgaacatgtcccgtctgctgtggccctcttgcttcagggcgaatctcaggttccgcatgtccttgcatgtgatgtccaggccgtagctattctcgcctctggaggtggctccgcccattttctcaatccggctgatcacgcccaggggcacatccaggatcaggctgctatcggtttccagggaccgcaggtacagccggtagttggtgatgtacacgcggcccttgatggggccgttgaaggggcagatgtagatcacttctttgtcggtgatcagtgtctcgccaggcagtctaggcacggcctctgtcagatccctgttcacgccatctctgctggtccgcttgatgctctcgttttccaggctgtggctgttgtacttgcttgtgctggcgctagccat

SEQ ID NO: 171 - DNA, 382 bp, synthetic construct
  source 1..382: mol_type = other DNA
gacattgattattgactagttattaatagtaatcaattacggggtcattagttcatagcccatatatggagttccgcgttacataacttacggtaaatggcccgcctggctgaccgcccaacgacccccgcccattgacgtcaataatgacgtatgttcccatagtaacgccaatagggactttccattgacgtcaatgggtggagtatttacggtaaactgcccacttggcagtacatcaagtgtatcatatgccaagtacgccccctattgacgtcaatgacggtaaatggcccgcctggcattatgcccagtacatgaccttatgggactttcctacttggcagtacatctacgtattagtcatcgctattaccatggt

SEQ ID NO: 172 - DNA, 278 bp, synthetic construct
  source 1..278: mol_type = other DNA
tcgaggtgagccccacgttctgcttcactctccccatctcccccccctccccacccccaattttgtatttatttattttttaattattttgtgcagcgatgggggcggggggggggggggggcgcgcgccaggcggggcggggcggggcgaggggcggggcggggcgaggcggagaggtgcggcggcagccaatcagagcggcgcgctccgaaagtttccttttatggcgaggcggcggcggcggcggccctataaaaagcgaagcgcgcggcgggcg

SEQ ID NO: 173 - DNA, 660 bp, synthetic construct
  source 1..660: mol_type = other DNA
gacattgattattgactagttattaatagtaatcaattacggggtcattagttcatagcccatatatggagttccgcgttacataacttacggtaaatggcccgcctggctgaccgcccaacgacccccgcccattgacgtcaataatgacgtatgttcccatagtaacgccaatagggactttccattgacgtcaatgggtggagtatttacggtaaactgcccacttggcagtacatcaagtgtatcatatgccaagtacgccccctattgacgtcaatgacggtaaatggcccgcctggcattatgcccagtacatgaccttatgggactttcctacttggcagtacatctacgtattagtcatcgctattaccatggttcgaggtgagccccacgttctgcttcactctccccatctcccccccctccccacccccaattttgtatttatttattttttaattattttgtgcagcgatgggggcggggggggggggggggcgcgcgccaggcggggcggggcggggcgaggggcggggcggggcgaggcggagaggtgcggcggcagccaatcagagcggcgcgctccgaaagtttccttttatggcgaggcggcggcggcggcggccctataaaaagcgaagcgcgcggcgggcg

SEQ ID NO: 174 - DNA, 347 bp, synthetic construct
  source 1..347: mol_type = other DNA
aaaaaatgctttcttcttttaatatacttttttgtttatcttatttctaatactttccctaatctctttctttcagggcaataatgatacaatgtatcatgcctctttgcaccattctaaagaataacagtgataatttctgggttaaggcaatagcaatatttctgcatataaatatttctgcatataaattgtaactgatgtaagaggtttcatattgctaatagcagctacaatccagctaccattctgcttttattttatggttgggataaggctggattattctgagtccaagctaggcccttttgctaatcatgttcatacctcttatcttcctcccacag

SEQ ID NO: 175 - DNA, 69 bp, synthetic construct
  source 1..69: mol_type = other DNA
gtgcattggaacgcggattccccgtgccaagagtgacgtaagtaccgcctatagagtctataggcccac

SEQ ID NO: 176 - DNA, 416 bp, synthetic construct
  source 1..416: mol_type = other DNA
gtgcattggaacgcggattccccgtgccaagagtgacgtaagtaccgcctatagagtctataggcccacaaaaaatgctttcttcttttaatatacttttttgtttatcttatttctaatactttccctaatctctttctttcagggcaataatgatacaatgtatcatgcctctttgcaccattctaaagaataacagtgataatttctgggttaaggcaatagcaatatttctgcatataaatatttctgcatataaattgtaactgatgtaagaggtttcatattgctaatagcagctacaatccagctaccattctgcttttattttatggttgggataaggctggattattctgagtccaagctaggcccttttgctaatcatgttcatacctcttatcttcctcccacag

SEQ ID NO: 177 - DNA, 123 bp, synthetic construct
  source 1..123: mol_type = other DNA
gatctttttccctctgccaaaaattatggggacatcatgaagccccttgagcatctgacttctggctaataaaggaaatttattttcattgcaatagtgtgttggaattttttgtgtctctca

SEQ ID NO: 178 - DNA, 145 bp, synthetic construct
  source 1..145: mol_type = other DNA
ttggccactccctctctgcgcgctcgctcgctcactgaggccgcccgggcaaagcccgggcgtcgggcgacctttggtcgcccggcctcagtgagcgagcgagcgcgcagagagggagtggccaactccatcactaggggttcct

SEQ ID NO: 179 - DNA, 145 bp, synthetic construct
  source 1..145: mol_type = other DNA
aggaacccctagtgatggagttggccactccctctctgcgcgctcgctcgctcactgaggccgggcgaccaaaggtcgcccgacgcccgggctttgcccgggcggcctcagtgagcgagcgagcgcgcagagagggagtggccaa

SEQ ID NO: 180 - DNA, 53 bp, synthetic construct
  source 1..53: mol_type = other DNA
ctcctgggcaacgtgctggtctgtgtgctggcccatcactttggcaaagaatt

SEQ ID NO: 181 - DNA, 3428 bp, synthetic construct
  source 1..3428: mol_type = other DNA
ttggccactccctctctgcgcgctcgctcgctcactgaggccgcccgggcaaagcccgggcgtcgggcgacctttggtcgcccggcctcagtgagcgagcgagcgcgcagagagggagtggccaactccatcactaggggttccttgcgcacaggtacccccctgcccccacagctcctctcctgtgccttgtttcccagccatgcgttctcctctataaatacccgctctggtatttggggttggcagctgttgctgccagggagatggttgggttgacatgcggctcctgacaaaacacaaacccctggtgtgtgtgggcgtgggtggtgtgagtagggggatgaatcagggagggggcgggggacccagggggcaggagccacacaaagtctgtgcgggggtgggagcgcacatagcaattggaaactggctgcagacatgcttgctgcctgccctggcgaaggattggtaggcttgccgtcacaggacccccgctggctgactcaggggcgcaggctcttgcgggggagctggcctcccgcccccacggccacgggccctttcctggcaggacagcgggatcttgcagctgtcaggggaggggaggcgggggctgatgtcaggagggatacaaatagtgccgacggctgggggccctgtctcccctcgccgcatccactctccggccggccgcctgcccgccgcctcctccgtgcgcccgccagcctcgcccgcgccgtcaccgatatctcagatcgcctggagacgccatccacgctgttttgacctccatagaagacaccgggaccgatccagcctccgcggattcgaatcccggccgggaacggtgcattggaacgcggattccccgtgccaagagtgacgtaagtaccgcctatagagtctataggcccacaaaaaatgctttcttcttttaatatacttttttgtttatcttatttctaatactttccctaatctctttctttcagggcaataatgatacaatgtatcatgcctctttgcaccattctaaagaataacagtgataatttctgggttaaggcaatagcaatatttctgcatataaatatttctgcatataaattgtaactgatgtaagaggtttcatattgctaatagcagctacaatccagctaccattctgcttttattttatggttgggataaggctggattattctgagtccaagctaggcccttttgctaatcatgttcatacctcttatcttcctcccacagctcctgggcaacgtgctggtctgtgtgctggcccatcactttggcaaagaatttgagcggccgccaccatggcatcagcaagcacaagcaaatacaactcacatagcctggaaaacgagagcatcaagagaacctcaagggacggggtcaatagagatctgacagaggcagtgccaaggctgcctggagagacactgatcacagacaaggaagtgatctacatctgccctttcaacggcccaatcaagggccgcgtgtatatcaccaattacagactgtacctgcggagcctggagacagatagctccctgatcctggacgtgcctctgggcgtgatcagcagaatcgagaagatgggaggagccacctctaggggagagaacagctacggcctggatatcacctgtaaggacatgcgcaatctgcggtttgccctgaagcaggagggccactcccggagagatatgttcgagatcctgaccagatatgcctttcccctggcccactctctgcctctgttcgcctttctgaacgaggagaagttcaatgtggacggctggacagtgtacaaccccgtggaggagtataggcgccagggcctgcctaaccaccactggcggatcacctttatcaataagtgctacgagctgtgcgatacatatccagccctgctggtggtgccctacagagccagcgacgatgacctgcggagagtggccaccttccggagccggaacagaatccctgtgctgagctggatccacccagagaataagacagtgatcgtgcgctgctcccagccactggtgggaatgtctggcaagcggaacaaggatgacgagaagtacctggatgtgatcagagagacaaataagcagatcagcaagctgacaatctatgatgcccggccttctgtgaatgcagtggcaaataaggcaacaggaggaggatatgagtctgatgacgcctatcacaacgccgagctgttctttctggatatccacaatatccacgtgatgagagagtccctgaagaaggtgaaggacatcgtgtacccaaacgtggaggagtcccactggctgtctagcctggagtctacccactggctggagcacatcaagctggtgctgacaggcgccatccaggtggccgataaggtgtcctctggcaagagctccgtgctggtgcactgttccgatgggtgggacagaacagcacagctgacaagcctggctatgctgatgctggactccttctatagatctatcgagggctttgagatcctggtgcagaaggagtggatcagcttcggccacaagtttgcctccaggatcggccacggcgataagaatcacaccgatgccgaccgcagccctatcttcctgcagtttatcgactgcgtgtggcagatgtccaagcagttcccaaccgccttcgagtttaacgagcagtttctgatcatcatcctggaccacctgtactcctgcaggttcggcacattcctgtttaattgtgagtctgccagagagaggcagaaggtgaccgagcgcacagtgtctctgtggagcctgatcaacagcaataaggagaagttcaagaaccccttctacacaaaggagatcaatcgcgtgctgtatcctgtggcatccatgagacacctggagctgtgggtgaactactatatccgctggaatccccggatcaagcagcagcagcccaaccctgtggagcagcggtacatggagctgctggccctgagagatgagtatatcaagaggctggaggagctgcagctggccaatagcgccaagctgtccgacccacctacttcaccaagcagcccctcacagatgatgccccacgtccagacccacttttaattaagatctttttccctctgccaaaaattatggggacatcatgaagccccttgagcatctgacttctggctaataaaggaaatttattttcattgcaatagtgtgttggaattttttgtgtctctcactcgaggcctaggaacccctagtgatggagttggccactccctctctgcgcgctcgctcgctcactgaggccgggcgaccaaaggtcgcccgacgcccgggctttgcccgggcggcctcagtgagcgagcgagcgcgcagagagggagtggccaa

SEQ ID NO: 182 - DNA, 3499 bp, synthetic construct
  source 1..3499: mol_type = other DNA
ttggccactccctctctgcgcgctcgctcgctcactgaggccgcccgggcaaagcccgggcgtcgggcgacctttggtcgcccggcctcagtgagcgagcgagcgcgcagagagggagtggccaactccatcactaggggttccttgcgcacaggtaccgacattgattattgactagttattaatagtaatcaattacggggtcattagttcatagcccatatatggagttccgcgttacataacttacggtaaatggcccgcctggctgaccgcccaacgacccccgcccattgacgtcaataatgacgtatgttcccatagtaacgccaatagggactttccattgacgtcaatgggtggagtatttacggtaaactgcccacttggcagtacatcaagtgtatcatatgccaagtacgccccctattgacgtcaatgacggtaaatggcccgcctggcattatgcccagtacatgaccttatgggactttcctacttggcagtacatctacgtattagtcatcgctattaccatggtcgaggtgagccccacgttctgcttcactctccccatctcccccccctccccacccccaattttgtatttatttattttttaattattttgtgcagcgatgggggcggggggggggggggggcgcgcgccaggcggggcggggcggggcgaggggcggggcggggcgaggcggagaggtgcggcggcagccaatcagagcggcgcgctccgaaagtttccttttatggcgaggcggcggcggcggcggccctataaaaagcgaagcgcgcggcgggcggatatctcagatcgcctggagacgccatccacgctgttttgacctccatagaagacaccgggaccgatccagcctccgcggattcgaatcccggccgggaacggtgcattggaacgcggattccccgtgccaagagtgacgtaagtaccgcctatagagtctataggcccacaaaaaatgctttcttcttttaatatacttttttgtttatcttatttctaatactttccctaatctctttctttcagggcaataatgatacaatgtatcatgcctctttgcaccattctaaagaataacagtgataatttctgggttaaggcaatagcaatatttctgcatataaatatttctgcatataaattgtaactgatgtaagaggtttcatattgctaatagcagctacaatccagctaccattctgcttttattttatggttgggataaggctggattattctgagtccaagctaggcccttttgctaatcatgttcatacctcttatcttcctcccacagctcctgggcaacgtgctggtctgtgtgctggcccatcactttggcaaagaatttgagcggccgccaccatggctagcgccagcacaagcaagtacaacagccacagcctggaaaacgagagcatcaagcggaccagcagagatggcgtgaacagggatctgacagaggccgtgcctagactgcctggcgagacactgatcaccgacaaagaagtgatctacatctgccccttcaacggccccatcaagggccgcgtgtacatcaccaactaccggctgtacctgcggtccctggaaaccgatagcagcctgatcctggatgtgcccctgggcgtgatcagccggattgagaaaatgggcggagccacctccagaggcgagaatagctacggcctggacatcacatgcaaggacatgcggaacctgagattcgccctgaagcaagagggccacagcagacgggacatgttcgagatcctgaccagatacgcctttcctctggctcactccctgcctctgttcgccttcctgaacgaagagaagttcaacgtggacggctggaccgtgtacaaccccgtggaagagtatcggagacagggcctgcctaatcaccactggcggatcaccttcatcaacaagtgctacgagctgtgcgacacataccccgcactgctggtggtgccttacagagcctccgacgacgacctgagaagagtggccacctttcggagccggaacagaatccctgtgctgagctggattcaccccgagaacaagaccgtgatcgtgcggtgttctcagcccctcgtgggcatgtctggcaagagaaacaaggacgacgagaagtacctggacgtgatccgcgagacaaacaagcagatcagcaagctgaccatctacgacgccagacctagcgtgaacgccgtggccaacaaagctacaggcggcggatacgagagcgacgacgcctatcataacgccgagctgttctttctggacatccacaacatccacgtgatgcgggaaagcctgaagaaagtgaaggacatcgtgtaccccaatgtggaagagagccactggctgagcagtctggaaagcacacactggctggaacacatcaagctggtgctgacaggcgccatccaggtggccgataaggtgtcctctggcaagtctagcgtgctggtgcactgtagcgacggctgggatagaacagcccagctgacatctctggccatgctgatgctggacagcttctacagatccatcgagggctttgagatcctggtgcagaaagagtggatcagcttcggccacaagttcgccagcagaatcggacacggcgacaagaaccacaccgacgccgatagaagccccatcttcctgcagttcatcgactgcgtgtggcagatgtccaagcagttccctaccgccttcgagttcaacgagcagttcctgatcatcatcctggaccacctgtacagctgcagattcggcaccttcctgttcaactgcgagagcgccagagaacggcagaaagtgaccgagcggaccgtgtctctgtggtccctgatcaacagcaacaaagagaaattcaagaaccccttctacaccaaagaaatcaaccgggtgctgtaccccgtggccagcatgagacatctggaactgtgggtcaactactacatccggtggaaccccagaatcaagcagcagcagcccaatcctgtggaacagcggtacatggaactgctggccctgcgggacgagtacatcaagagactggaagaactgcagctggccaacagcgccaagctgagcgatcctcctacaagccctagcagccccagccagatgatgcctcacgtgcagacccacttttaattaagatctttttccctctgccaaaaattatggggacatcatgaagccccttgagcatctgacttctggctaataaaggaaatttattttcattgcaatagtgtgttggaattttttgtgtctctcactcgaggcctaggaacccctagtgatggagttggccactccctctctgcgcgctcgctcgctcactgaggccgggcgaccaaaggtcgcccgacgcccgggctttgcccgggcggcctcagtgagcgagcgagcgcgcagagagggagtggccaa

SEQ ID NO: 183 - DNA, 3428 bp, synthetic construct
  source 1..3428: mol_type = other DNA
ttggccactccctctctgcgcgctcgctcgctcactgaggccgcccgggcaaagcccgggcgtcgggcgacctttggtcgcccggcctcagtgagcgagcgagcgcgcagagagggagtggccaactccatcactaggggttccttgcgcacaggtacccccctgcccccacagctcctctcctgtgccttgtttcccagccatgcgttctcctctataaatacccgctctggtatttggggttggcagctgttgctgccagggagatggttgggttgacatgcggctcctgacaaaacacaaacccctggtgtgtgtgggcgtgggtggtgtgagtagggggatgaatcagggagggggcgggggacccagggggcaggagccacacaaagtctgtgcgggggtgggagcgcacatagcaattggaaactggctgcagacatgcttgctgcctgccctggcgaaggattggtaggcttgccgtcacaggacccccgctggctgactcaggggcgcaggctcttgcgggggagctggcctcccgcccccacggccacgggccctttcctggcaggacagcgggatcttgcagctgtcaggggaggggaggcgggggctgatgtcaggagggatacaaatagtgccgacggctgggggccctgtctcccctcgccgcatccactctccggccggccgcctgcccgccgcctcctccgtgcgcccgccagcctcgcccgcgccgtcaccgatatctcagatcgcctggagacgccatccacgctgttttgacctccatagaagacaccgggaccgatccagcctccgcggattcgaatcccggccgggaacggtgcattggaacgcggattccccgtgccaagagtgacgtaagtaccgcctatagagtctataggcccacaaaaaatgctttcttcttttaatatacttttttgtttatcttatttctaatactttccctaatctctttctttcagggcaataatgatacaatgtatcatgcctctttgcaccattctaaagaataacagtgataatttctgggttaaggcaatagcaatatttctgcatataaatatttctgcatataaattgtaactgatgtaagaggtttcatattgctaatagcagctacaatccagctaccattctgcttttattttatggttgggataaggctggattattctgagtccaagctaggcccttttgctaatcatgttcatacctcttatcttcctcccacagctcctgggcaacgtgctggtctgtgtgctggcccatcactttggcaaagaatttgagcggccgccaccatggcttctgcatcaacttctaaatataattcacactccttggagaatgagtctattaagaggacgtctcgagatggagtcaatcgagatctcactgaggctgttcctcgacttccaggagaaacactaatcactgacaaagaagttatttacatatgtcctttcaatggccccattaagggaagagtttacatcacaaattatcgtctttatttaagaagtttggaaacggattcttctctaatacttgatgttcctctgggtgtgatctcgagaattgaaaaaatgggaggcgcgacaagtagaggagaaaattcctatggtctagatattacttgtaaagacatgagaaacctgaggttcgctttgaaacaggaaggccacagcagaagagatatgtttgagatcctcacgagatacgcgtttcccctggctcacagtctgccattatttgcatttttaaatgaagaaaagtttaacgtggatggatggacagtttacaatccagtggaagaatacaggaggcagggcttgcccaatcaccattggagaataacttttattaataagtgctatgagctctgtgacacttaccctgctcttttggtggttccgtatcgtgcctcagatgatgacctccggagagttgcaacttttaggtcccgaaatcgaattccagtgctgtcatggattcatccagaaaataagacggtcattgtgcgttgcagtcagcctcttgtcggtatgagtgggaaacgaaataaagatgatgagaaatatctcgatgttatcagggagactaataaacaaatttctaaactcaccatttatgatgcaagacccagcgtaaatgcagtggccaacaaggcaacaggaggaggatatgaaagtgatgatgcatatcataacgccgaacttttcttcttagacattcataatattcatgttatgcgggaatctttaaaaaaagtgaaggacattgtttatcctaatgtagaagaatctcattggttgtccagtttggagtctactcattggttagaacatatcaagctcgttttgacaggagccattcaagtagcagacaaagtttcttcagggaagagttcagtgcttgtgcattgcagtgacggatgggacaggactgctcagctgacatccttggccatgctgatgttggatagcttctataggagcattgaagggttcgaaatactggtacaaaaagaatggataagttttggacataaatttgcatctcgaataggtcatggtgataaaaaccacaccgatgctgaccgttctcctatttttctccagtttattgattgtgtgtggcaaatgtcaaaacagttccctacagcttttgaattcaatgaacaatttttgattataattttggatcatctgtatagttgccgatttggtactttcttattcaactgtgaatctgctcgagaaagacagaaggttacagaaaggactgtttctttatggtcactgataaacagtaataaagaaaaattcaaaaacccattctatactaaagaaatcaatagagttttatatccagttgcaagtatgcgtcacttggaactctgggtgaattactacattagatggaaccccaggatcaaacaacaacaaccaaatccagtggaacaacgttacatggaactcttagccttacgagatgaatacataaaacggcttgaggaactgcaactagcaaactctgcaaaactttctgatcccccaacttcaccttccagtccttctcaaatgatgccacatgtgcaaactcacttttaattaagatctttttccctctgccaaaaattatggggacatcatgaagccccttgagcatctgacttctggctaataaaggaaatttattttcattgcaatagtgtgttggaattttttgtgtctctcactcgaggcctaggaacccctagtgatggagttggccactccctctctgcgcgctcgctcgctcactgaggccgggcgaccaaaggtcgcccgacgcccgggctttgcccgggcggcctcagtgagcgagcgagcgcgcagagagggagtggccaa

SEQ ID NO: 184 - DNA, 3428 bp, synthetic construct
  source 1..3428: mol_type = other DNA
ttggccactccctctctgcgcgctcgctcgctcactgaggccgcccgggcaaagcccgggcgtcgggcgacctttggtcgcccggcctcagtgagcgagcgagcgcgcagagagggagtggccaactccatcactaggggttccttgcgcacaggtacccccctgcccccacagctcctctcctgtgccttgtttcccagccatgcgttctcctctataaatacccgctctggtatttggggttggcagctgttgctgccagggagatggttgggttgacatgcggctcctgacaaaacacaaacccctggtgtgtgtgggcgtgggtggtgtgagtagggggatgaatcagggagggggcgggggacccagggggcaggagccacacaaagtctgtgcgggggtgggagcgcacatagcaattggaaactggctgcagacatgcttgctgcctgccctggcgaaggattggtaggcttgccgtcacaggacccccgctggctgactcaggggcgcaggctcttgcgggggagctggcctcccgcccccacggccacgggccctttcctggcaggacagcgggatcttgcagctgtcaggggaggggaggcgggggctgatgtcaggagggatacaaatagtgccgacggctgggggccctgtctcccctcgccgcatccactctccggccggccgcctgcccgccgcctcctccgtgcgcccgccagcctcgcccgcgccgtcaccgatatctcagatcgcctggagacgccatccacgctgttttgacctccatagaagacaccgggaccgatccagcctccgcggattcgaatcccggccgggaacggtgcattggaacgcggattccccgtgccaagagtgacgtaagtaccgcctatagagtctataggcccacaaaaaatgctttcttcttttaatatacttttttgtttatcttatttctaatactttccctaatctctttctttcagggcaataatgatacaatgtatcatgcctctttgcaccattctaaagaataacagtgataatttctgggttaaggcaatagcaatatttctgcatataaatatttctgcatataaattgtaactgatgtaagaggtttcatattgctaatagcagctacaatccagctaccattctgcttttattttatggttgggataaggctggattattctgagtccaagctaggcccttttgctaatcatgttcatacctcttatcttcctcccacagctcctgggcaacgtgctggtctgtgtgctggcccatcactttggcaaagaatttgagcggccgccaccatggcttctgcatcaacttctaaatataattcacactccttggagaatgagtctattaagaggacgtctcgagatggagtcaatcgagatctcactgaggctgttcctcgacttccaggagaaacactaatcactgacaaagaagttatttacatatgtcctttcaatggccccattaagggaagagtttacatcacaaattatcgtctttatttaagaagtttggaaacggattcttctctaatacttgatgttcctctgggtgtgatctcgagaattgaaaaaatgggaggcgcgacaagtagaggagaaaattcctatggtctagatattacttgtaaagacatgagaaacctgaggttcgctttgaaacaggaaggccacagcagaagagatatgtttgagatcctcacgagatacgcgtttcccctggctcacagtctgccattatttgcatttttaaatgaagaaaagtttaacgtggatggatggacagtttacaatccagtggaagaatacaggaggcagggcttgcccaatcaccattggagaataacttttattaataagtgctatgagctctgtgacacttaccctgctcttttggtggttccgtatcgtgcctcagatgatgacctccggagagttgcaacttttaggtcccgaaatcgaattccagtgctgtcatggattcatccagaaaataagacggtcattgtgcgttgcagtcagcctcttgtcggtatgagtgggaaacgaaataaagatgatgagaaatatctcgatgttatcagggagactaataaacaaatttctaaactcaccatttatgatgcaagacccagcgtaaatgcagtggccaacaaggcaacaggaggaggatatgaaagtgatgatgcatatcataacgccgaacttttcttcttagacattcataatattcatgttatgcgggaatctttaaaaaaagtgaaggacattgtttatcctaatgtagaagaatctcattggttgtccagtttggagtctactcattggttagaacatatcaagctcgttttgacaggagccattcaagtagcagacaaagtttcttcagggaagagttcagtgcttgtgcattgcagtgacggatgggacaggactgctcagctgacatccttggccatgctgatgttggatagcttctataggagcattgaagggttcgaaatactggtacaaaaagaatggataagttttggacataaatttgcatctcgaataggtcatggtgataaaaaccacaccgatgctgaccgttctcctatttttctccagtttattgattgtgtgtggcaaatgtcaaaacagttccctacagcttttgaattcaatgaacaatttttgattataattttggatcatctgtatagttgccgatttggtactttcttattcaactgtgaatctgctcgagaaagacagaaggttacagaaaggactgtttctttatggtcactgataaacagtaataaagaaaaattcaaaaaccccttctatactaaagaaatcaatcgagttttatatccagttgccagtatgcgtcacttggaactctgggtgaattactacattagatggaaccccaggatcaagcaacaacagccgaatccagtggagcagcgttacatggagctcttagccttacgcgacgaatacataaagcggcttgaggaactgcagctcgccaactctgccaagctttctgatcccccaacttcaccttccagtccttcgcaaatgatgccccatgtgcaaactcacttttaattaagatctttttccctctgccaaaaattatggggacatcatgaagccccttgagcatctgacttctggctaataaaggaaatttattttcattgcaatagtgtgttggaattttttgtgtctctcactcgaggcctaggaacccctagtgatggagttggccactccctctctgcgcgctcgctcgctcactgaggccgggcgaccaaaggtcgcccgacgcccgggctttgcccgggcggcctcagtgagcgagcgagcgcgcagagagggagtggccaa

SEQ ID NO: 185 - DNA, 3428 bp, synthetic construct
  source 1..3428: mol_type = other DNA
ttggccactccctctctgcgcgctcgctcgctcactgaggccgcccgggcaaagcccgggcgtcgggcgacctttggtcgcccggcctcagtgagcgagcgagcgcgcagagagggagtggccaactccatcactaggggttccttgcgcacaggtacccccctgcccccacagctcctctcctgtgccttgtttcccagccatgcgttctcctctataaatacccgctctggtatttggggttggcagctgttgctgccagggagatggttgggttgacatgcggctcctgacaaaacacaaacccctggtgtgtgtgggcgtgggtggtgtgagtagggggatgaatcagggagggggcgggggacccagggggcaggagccacacaaagtctgtgcgggggtgggagcgcacatagcaattggaaactggctgcagacatgcttgctgcctgccctggcgaaggattggtaggcttgccgtcacaggacccccgctggctgactcaggggcgcaggctcttgcgggggagctggcctcccgcccccacggccacgggccctttcctggcaggacagcgggatcttgcagctgtcaggggaggggaggcgggggctgatgtcaggagggatacaaatagtgccgacggctgggggccctgtctcccctcgccgcatccactctccggccggccgcctgcccgccgcctcctccgtgcgcccgccagcctcgcccgcgccgtcaccgatatctcagatcgcctggagacgccatccacgctgttttgacctccatagaagacaccgggaccgatccagcctccgcggattcgaatcccggccgggaacggtgcattggaacgcggattccccgtgccaagagtgacgtaagtaccgcctatagagtctataggcccacaaaaaatgctttcttcttttaatatacttttttgtttatcttatttctaatactttccctaatctctttctttcagggcaataatgatacaatgtatcatgcctctttgcaccattctaaagaataacagtgataatttctgggttaaggcaatagcaatatttctgcatataaatatttctgcatataaattgtaactgatgtaagaggtttcatattgctaatagcagctacaatccagctaccattctgcttttattttatggttgggataaggctggattattctgagtccaagctaggcccttttgctaatcatgttcatacctcttatcttcctcccacagctcctgggcaacgtgctggtctgtgtgctggcccatcactttggcaaagaatttgagcggccgccaccatggcctctgccagcacctctaagtacaacagccactccctggaaaatgaatccatcaaaaggaccagcagagatggagtgaacagagacctaactgaagctgtgccaagactgcctggagagaccctgatcacagacaaggaagtgatctacatctgccccttcaatggccctatcaagggaagggtgtacatcaccaactacaggctttacctgagatccctggagacagacagcagcctgatcctggatgtgcctctgggagtgatcagcagaatagagaagatggggggtgccaccagcagaggagagaacagctatggcctggacatcacctgcaaggacatgagaaacctgagatttgccctgaagcaggagggccacagcagaagagacatgtttgaaatcctgaccaggtatgccttccccctggcccactctctccccctgtttgccttcctgaatgaggaaaagttcaatgttgatggctggacagtgtacaacccagtggaggagtacagaagacagggcctgcctaaccaccactggaggatcaccttcatcaacaagtgctatgaactgtgtgacacataccctgccctgctggtggtgccttacagagcctcagatgatgacctgagaagagttgccaccttcagaagcaggaacagaatccctgtactgagctggatccaccctgagaataagactgtgattgtgaggtgcagccagcccctggtgggcatgagtggcaagagaaacaaagatgatgaaaagtacctggatgtgatcagagagaccaacaaacagatcagcaagctcaccatctatgatgctagaccctctgttaatgctgtggccaacaaggccacagggggaggctatgaatctgatgatgcttaccacaatgctgagctgttcttcctggacatccacaacatccatgtgatgagagaatccctcaagaaagtgaaggacattgtgtaccctaatgtggaagaaagtcactggctgagcagcttggagtccacccactggctggagcacatcaagctggtcctgacaggagccatccaggtggctgacaaggtgagttctggcaagtcctcagtgctggtccactgctctgatggctgggacagaactgcccagctgaccagtctggccatgctgatgctggactccttctacagaagcattgaaggctttgaaatcctggtgcaaaaggaatggatctcttttggccacaagtttgccagcagaattggccatggtgacaaaaaccacacagatgctgacagaagccctatcttcctgcagttcattgactgtgtgtggcagatgagcaagcagttccccacagcatttgagttcaatgagcagttcctaataatcatcctggaccacctctacagctgcagatttggcaccttcctgttcaactgtgagtctgccagagaaagacagaaggtgacagagaggacagtgagcctgtggagcctgatcaactccaacaaggagaagttcaagaaccccttctacaccaaggaaatcaacagggtgctgtaccctgtggctagcatgaggcacctggagctgtgggtcaactactacatcagatggaaccctagaatcaaacagcaacaacccaaccctgtggagcagaggtacatggagttactggccctgagggatgagtacatcaagagactggaggagctgcagctggccaactctgccaaactgtctgaccctcctacctcccccagctccccctctcagatgatgccacatgtgcagacccacttttaattaagatctttttccctctgccaaaaattatggggacatcatgaagccccttgagcatctgacttctggctaataaaggaaatttattttcattgcaatagtgtgttggaattttttgtgtctctcactcgaggcctaggaacccctagtgatggagttggccactccctctctgcgcgctcgctcgctcactgaggccgggcgaccaaaggtcgcccgacgcccgggctttgcccgggcggcctcagtgagcgagcgagcgcgcagagagggagtggccaa

SEQ ID NO: 186 - DNA, 3499 bp, synthetic construct
  source 1..3499: mol_type = other DNA
ttggccactccctctctgcgcgctcgctcgctcactgaggccgcccgggcaaagcccgggcgtcgggcgacctttggtcgcccggcctcagtgagcgagcgagcgcgcagagagggagtggccaactccatcactaggggttccttgcgcacaggtaccgacattgattattgactagttattaatagtaatcaattacggggtcattagttcatagcccatatatggagttccgcgttacataacttacggtaaatggcccgcctggctgaccgcccaacgacccccgcccattgacgtcaataatgacgtatgttcccatagtaacgccaatagggactttccattgacgtcaatgggtggagtatttacggtaaactgcccacttggcagtacatcaagtgtatcatatgccaagtacgccccctattgacgtcaatgacggtaaatggcccgcctggcattatgcccagtacatgaccttatgggactttcctacttggcagtacatctacgtattagtcatcgctattaccatggtcgaggtgagccccacgttctgcttcactctccccatctcccccccctccccacccccaattttgtatttatttattttttaattattttgtgcagcgatgggggcggggggggggggggggcgcgcgccaggcggggcggggcggggcgaggggcggggcggggcgaggcggagaggtgcggcggcagccaatcagagcggcgcgctccgaaagtttccttttatggcgaggcggcggcggcggcggccctataaaaagcgaagcgcgcggcgggcggatatctcagatcgcctggagacgccatccacgctgttttgacctccatagaagacaccgggaccgatccagcctccgcggattcgaatcccggccgggaacggtgcattggaacgcggattccccgtgccaagagtgacgtaagtaccgcctatagagtctataggcccacaaaaaatgctttcttcttttaatatacttttttgtttatcttatttctaatactttccctaatctctttctttcagggcaataatgatacaatgtatcatgcctctttgcaccattctaaagaataacagtgataatttctgggttaaggcaatagcaatatttctgcatataaatatttctgcatataaattgtaactgatgtaagaggtttcatattgctaatagcagctacaatccagctaccattctgcttttattttatggttgggataaggctggattattctgagtccaagctaggcccttttgctaatcatgttcatacctcttatcttcctcccacagctcctgggcaacgtgctggtctgtgtgctggcccatcactttggcaaagaatttgagcggccgccaccatggcatcagcaagcacaagcaaatacaactcacatagcctggaaaacgagagcatcaagagaacctcaagggacggggtcaatagagatctgacagaggcagtgccaaggctgcctggagagacactgatcacagacaaggaagtgatctacatctgccctttcaacggcccaatcaagggccgcgtgtatatcaccaattacagactgtacctgcggagcctggagacagatagctccctgatcctggacgtgcctctgggcgtgatcagcagaatcgagaagatgggaggagccacctctaggggagagaacagctacggcctggatatcacctgtaaggacatgcgcaatctgcggtttgccctgaagcaggagggccactcccggagagatatgttcgagatcctgaccagatatgcctttcccctggcccactctctgcctctgttcgcctttctgaacgaggagaagttcaatgtggacggctggacagtgtacaaccccgtggaggagtataggcgccagggcctgcctaaccaccactggcggatcacctttatcaataagtgctacgagctgtgcgatacatatccagccctgctggtggtgccctacagagccagcgacgatgacctgcggagagtggccaccttccggagccggaacagaatccctgtgctgagctggatccacccagagaataagacagtgatcgtgcgctgctcccagccactggtgggaatgtctggcaagcggaacaaggatgacgagaagtacctggatgtgatcagagagacaaataagcagatcagcaagctgacaatctatgatgcccggccttctgtgaatgcagtggcaaataaggcaacaggaggaggatatgagtctgatgacgcctatcacaacgccgagctgttctttctggatatccacaatatccacgtgatgagagagtccctgaagaaggtgaaggacatcgtgtacccaaacgtggaggagtcccactggctgtctagcctggagtctacccactggctggagcacatcaagctggtgctgacaggcgccatccaggtggccgataaggtgtcctctggcaagagctccgtgctggtgcactgttccgatgggtgggacagaacagcacagctgacaagcctggctatgctgatgctggactccttctatagatctatcgagggctttgagatcctggtgcagaaggagtggatcagcttcggccacaagtttgcctccaggatcggccacggcgataagaatcacaccgatgccgaccgcagccctatcttcctgcagtttatcgactgcgtgtggcagatgtccaagcagttcccaaccgccttcgagtttaacgagcagtttctgatcatcatcctggaccacctgtactcctgcaggttcggcacattcctgtttaattgtgagtctgccagagagaggcagaaggtgaccgagcgcacagtgtctctgtggagcctgatcaacagcaataaggagaagttcaagaaccccttctacacaaaggagatcaatcgcgtgctgtatcctgtggcatccatgagacacctggagctgtgggtgaactactatatccgctggaatccccggatcaagcagcagcagcccaaccctgtggagcagcggtacatggagctgctggccctgagagatgagtatatcaagaggctggaggagctgcagctggccaatagcgccaagctgtccgacccacctacttcaccaagcagcccctcacagatgatgccccacgtccagacccacttttaattaagatctttttccctctgccaaaaattatggggacatcatgaagccccttgagcatctgacttctggctaataaaggaaatttattttcattgcaatagtgtgttggaattttttgtgtctctcactcgaggcctaggaacccctagtgatggagttggccactccctctctgcgcgctcgctcgctcactgaggccgggcgaccaaaggtcgcccgacgcccgggctttgcccgggcggcctcagtgagcgagcgagcgcgcagagagggagtggccaa

SEQ ID NO: 187 - DNA, 3499 bp, synthetic construct; identical to SEQ ID NO: 182
  source 1..3499: mol_type = other DNA

SEQ ID NO: 188 - DNA, 3499 bp, synthetic construct
  source 1..3499: mol_type = other DNA
ttggccactccctctctgcgcgctcgctcgctcactgaggccgcccgggcaaagcccgggcgtcgggcgacctttggtcgcccggcctcagtgagcgagcgagcgcgcagagagggagtggccaactccatcactaggggttccttgcgcacaggtaccgacattgattattgactagttattaatagtaatcaattacggggtcattagttcatagcccatatatggagttccgcgttacataacttacggtaaatggcccgcctggctgaccgcccaacgacccccgcccattgacgtcaataatgacgtatgttcccatagtaacgccaatagggactttccattgacgtcaatgggtggagtatttacggtaaactgcccacttggcagtacatcaagtgtatcatatgccaagtacgccccctattgacgtcaatgacggtaaatggcccgcctggcattatgcccagtacatgaccttatgggactttcctacttggcagtacatctacgtattagtcatcgctattaccatggtcgaggtgagccccacgttctgcttcactctccccatctcccccccctccccacccccaattttgtatttatttattttttaattattttgtgcagcgatgggggcggggggggggggggggcgcgcgccaggcggggcggggcggggcgaggggcggggcggggcgaggcggagaggtgcggcggcagccaatcagagcggcgcgctccgaaagtttccttttatggcgaggcggcggcggcggcggccctataaaaagcgaagcgcgcggcgggcggatatctcagatcgcctggagacgccatccacgctgttttgacctccatagaagacaccgggaccgatccagcctccgcggattcgaatcccggccgggaacggtgcattggaacgcggattccccgtgccaagagtgacgtaagtaccgcctatagagtctataggcccacaaaaaatgctttcttcttttaatatacttttttgtttatcttatttctaatactttccctaatctctttctttcagggcaataatgatacaatgtatcatgcctctttgcaccattctaaagaataacagtgataatttctgggttaaggcaatagcaatatttctgcatataaatatttctgcatataaattgtaactgatgtaagaggtttcatattgctaatagcagctacaatccagctaccattctgcttttattttatggttgggataaggctggattattctgagtccaagctaggcccttttgctaatcatgttcatacctcttatcttcctcccacagctcctgggcaacgtgctggtctgtgtgctggcccatcactttggcaaagaatttgagcggccgccaccatggcttctgcatcaacttctaaatataattcacactccttggagaatgagtctattaagaggacgtctcgagatggagtcaatcgagatctcactgaggctgttcctcgacttccaggagaaacactaatcactgacaaagaagttatttacatatgtcctttcaatggccccattaagggaagagtttacatcacaaattatcgtctttatttaagaagtttggaaacggattcttctctaatacttgatgttcctctgggtgtgatctcgagaattgaaaaaatgggaggcgcgacaagtagaggagaaaattcctatggtctagatattacttgtaaagacatgagaaacctgaggttcgctttgaaacaggaaggccacagcagaagagatatgtttgagatcctcacgagatacgcgtttcccctggctcacagtctgccattatttgcatttttaaatgaagaaaagtttaacgtggatggatggacagtttacaatccagtggaagaatacaggaggcagggcttgcccaatcaccattggagaataacttttattaataagtgctatgagctctgtgacacttaccctgctcttttggtggttccgtatcgtgcctcagatgatgacctccggagagttgcaacttttaggtcccgaaatcgaattccagtgctgtcatggattcatccagaaaataagacggtcattgtgcgttgcagtcagcctcttgtcggtatgagtgggaaacgaaataaagatgatgagaaatatctcgatgttatcagggagactaataaacaaatttctaaactcaccatttatgatgcaagacccagcgtaaatgcagtggccaacaaggcaacaggaggaggatatgaaagtgatgatgcatatcataacgccgaacttttcttcttagacattcataatattcatgttatgcgggaatctttaaaaaaagtgaaggacattgtttatcctaatgtagaagaatctcattggttgtccagtttggagtctactcattggttagaacatatcaagctcgttttgacaggagccattcaagtagcagacaaagtttcttcagggaagagttcagtgcttgtgcattgcagtgacggatgggacaggactgctcagctgacatccttggccatgctgatgttggatagcttctataggagcattgaagggttcgaaatactggtacaaaaagaatggataagttttggacataaatttgcatctcgaataggtcatggtgataaaaaccacaccgatgctgaccgttctcctatttttctccagtttattgattgtgtgtggcaaatgtcaaaacagttccctacagcttttgaattcaatgaacaatttttgattataattttggatcatctgtatagttgccgatttggtactttcttattcaactgtgaatctgctcgagaaagacagaaggttacagaaaggactgtttctttatggtcactgataaacagtaataaagaaaaattcaaaaacccattctatactaaagaaatcaatagagttttatatccagttgcaagtatgcgtcacttggaactctgggtgaattactacattagatggaaccccaggatcaaacaacaacaaccaaatccagtggaacaacgttacatggaactcttagccttacgagatgaatacataaaacggcttgaggaactgcaactagcaaactctgcaaaactttctgatcccccaacttcaccttccagtccttctcaaatgatgccacatgtgcaaactcacttttaattaagatctttttccctctgccaaaaattatggggacatcatgaagccccttgagcatctgacttctggctaataaaggaaatttattttcattgcaatagtgtgttggaattttttgtgtctctcactcgaggcctaggaacccctagtgatggagttggccactccctctctgcgcgctcgctcgctcactgaggccgggcgaccaaaggtcgcccgacgcccgggctttgcccgggcggcctcagtgagcgagcgagcgcgcagagagggagtggccaa

SEQ ID NO: 189 - DNA, 3499 bp, synthetic construct
  source 1..3499: mol_type = other DNA
ttggccactccctctctgcgcgctcgctcgctcactgaggccgcccgggcaaagcccgggcgtcgggcgacctttggtcgcccggcctcagtgagcgagcgagcgcgcagagagggagtggccaactccatcactaggggttccttgcgcacaggtaccgacattgattattgactagttattaatagtaatcaattacggggtcattagttcatagcccatatatggagttccgcgttacataacttacggtaaatggcccgcctggctgaccgcccaacgacccccgcccattgacgtcaataatgacgtatgttcccatagtaacgccaatagggactttccattgacgtcaatgggtggagtatttacggtaaactgcccacttggcagtacatcaagtgtatcatatgccaagtacgccccctattgacgtcaatgacggtaaatggcccgcctggcattatgcccagtacatgaccttatgggactttcctacttggcagtacatctacgtattagtcatcgctattaccatggtcgaggtgagccccacgttctgcttcactctccccatctcccccccctccccacccccaattttgtatttatttattttttaattattttgtgcagcgatgggggcggggggggggggggggcgcgcgccaggcggggcggggcggggcgaggggcggggcggggcgaggcggagaggtgcggcggcagccaatcagagcggcgcgctccgaaagtttccttttatggcgaggcggcggcggcggcggccctataaaaagcgaagcgcgcggcgggcggatatctcagatcgcctggagacgccatccacgctgttttgacctccatagaagacaccgggaccgatccagcctccgcggattcgaatcccggccgggaacggtgcattggaacgcggattccccgtgccaagagtgacgtaagtaccgcctatagagtctataggcccacaaaaaatgctttcttcttttaatatacttttttgtttatcttatttctaatactttccctaatctctttctttcagggcaataatgatacaatgtatcatgcctctttgcaccattctaaagaataacagtgataatttctgggttaaggcaatagcaatatttctgcatataaatatttctgcatataaattgtaactgatgtaagaggtttcatattgctaatagcagctacaatccagctaccattctgcttttattttatggttgggataaggctggattattctgagtccaagctaggcccttttgctaatcatgttcatacctcttatcttcctcccacagctcctgggcaacgtgctggtctgtgtgctggcccatcactttggcaaagaatttgagcggccgccaccatggcttctgcatcaacttctaaatataattcacactccttggagaatgagtctattaagaggacgtctcgagatggagtcaatcgagatctcactgaggctgttcctcgacttccaggagaaacactaatcactgacaaagaagttatttacatatgtcctttcaatggccccattaagggaagagtttacatcacaaattatcgtctttatttaagaagtttggaaacggattcttctctaatacttgatgttcctctgggtgtgatctcgagaattgaaaaaatgggaggcgcgacaagtagaggagaaaattcctatggtctagatattacttgtaaagacatgagaaacctgaggttcgctttgaaacaggaaggccacagcagaagagatatgtttgagatcctcacgagatacgcgtttcccctggctcacagtctgccattatttgcatttttaaatgaagaaaagtttaacgtggatggatggacagtttacaatccagtggaagaatacaggaggcagggcttgcccaatcaccattggagaataacttttattaataagtgctatgagctctgtgacacttaccctgctcttttggtggttccgtatcgtgcctcagatgatgacctccggagagttgcaacttttaggtcccgaaatcgaattccagtgctgtcatggattcatccagaaaataagacggtcattgtgcgttgcagtcagcctcttgtcggtatgagtgggaaacgaaataaagatgatgagaaatatctcgatgttatcagggagactaataaacaaatttctaaactcaccatttatgatgcaagacccagcgtaaatgcagtggccaacaaggcaacaggaggaggatatgaaagtgatgatgcatatcataacgccgaacttttcttcttagacattcataatattcatgttatgcgggaatctttaaaaaaagtgaaggacattgtttatcctaatgtagaagaatctcattggttgtccagtttggagtctactcattggttagaacatatcaagctcgttttgacaggagccattcaagtagcagacaaagtttcttcagggaagagttcagtgcttgtgcattgcagtgacggatgggacaggactgctcagctgacatccttggccatgctgatgttggatagcttctataggagcattgaagggttcgaaatactggtacaaaaagaatggataagttttggacataaatttgcatctcgaataggtcatggtgataaaaaccacaccgatgctgaccgttctcctatttttctccagtttattgattgtgtgtggcaaatgtcaaaacagttccctacagcttttgaattcaatgaacaatttttgattataattttggatcatctgtatagttgccgatttggtactttcttattcaactgtgaatctgctcgagaaagacagaaggttacagaaaggactgtttctttatggtcactgataaacagtaataaagaaaaattcaaaaaccccttctatactaaagaaatcaatcgagttttatatccagttgccagtatgcgtcacttggaactctgggtgaattactacattagatggaaccccaggatcaagcaacaacagccgaatccagtggagcagcgttacatggagctcttagccttacgcgacgaatacataaagcggcttgaggaactgcagctcgccaactctgccaagctttctgatcccccaacttcaccttccagtccttcgcaaatgatgccccatgtgcaaactcacttttaattaagatctttttccctctgccaaaaattatggggacatcatgaagccccttgagcatctgacttctggctaataaaggaaatttattttcattgcaatagtgtgttggaattttttgtgtctctcactcgaggcctaggaacccctagtgatggagttggccactccctctctgcgcgctcgctcgctcactgaggccgggcgaccaaaggtcgcccgacgcccgggctttgcccgggcggcctcagtgagcgagcgagcgcgcagagagggagtggccaa

SEQ ID NO: 190 - DNA, 75 bp, synthetic construct
  source 1..75: mol_type = other DNA
ttgtcgactcggttcgcatattaaggtgacgcgtgtggcctcgaacaccgagcgaccctgcagcgacccgcttaa

SEQ ID NO: 191 - DNA, 121 bp, synthetic construct
  source 1..121: mol_type = other DNA
ccactccctctctgcgcgctcgctcgctcactgaggccgggcgaccaaaggtcgcccgacgcccgggctttgcccgggcggcctcagtgagcgagcgagcgcgcagagagggagtggccaa

SEQ ID NO: 192 - DNA, 136 bp, synthetic construct
  source 1..136: mol_type = other DNA
ttttttggtaccttcgcatattaaggtgacgcgtgtggcctcgaacaccgagcgaccctgcagcgacccgcttaagcggccgccaccatggcatcagcaagcacaagcaaatacaactcacatagcctggaaaacg

SEQ ID NO: 193 - DNA, 2239 bp, synthetic construct
  source 1..2239: mol_type = other DNA
agtgagcgagcgagcgcgcagagagggagtggccaactccatcactaggggttccttgcgcacaggtaccttcgcatattaaggtgacgcgtgtggcctcgaacaccgagcgaccctgcagcgacccgcttaagcggccgccaccatggcttctgcatcaacttctaaatataattcacactccttggagaatgagtctattaagaggacgtctcgagatggagtcaatcgagatctcactgaggctgttcctcgacttccaggagaaacactaatcactgacaaagaagttatttacatatgtcctttcaatggccccattaagggaagagtttacatcacaaattatcgtctttatttaagaagtttggaaacggattcttctctaatacttgatgttcctctgggtgtgatctcgagaattgaaaaaatgggaggcgcgacaagtagaggagaaaattcctatggtctagatattacttgtaaagacatgagaaacctgaggttcgctttgaaacaggaaggccacagcagaagagatatgtttgagatcctcacgagatacgcgtttcccctggctcacagtctgccattatttgcatttttaaatgaagaaaagtttaacgtggatggatggacagtttacaatccagtggaagaatacaggaggcagggcttgcccaatcaccattggagaataacttttattaataagtgctatgagctctgtgacacttaccctgctcttttggtggttccgtatcgtgcctcagatgatgacctccggagagttgcaacttttaggtcccgaaatcgaattccagtgctgtcatggattcatccagaaaataagacggtcattgtgcgttgcagtcagcctcttgtcggtatgagtgggaaacgaaataaagatgatgagaaatatctcgatgttatcagggagactaataaacaaatttctaaactcaccatttatgatgcaagacccagcgtaaatgcagtggccaacaaggcaacaggaggaggatatgaaagtgatgatgcatatcataacgccgaacttttcttcttagacattcataatattcatgttatgcgggaatctttaaaaaaagtgaaggacattgtttatcctaatgtagaagaatctcattggttgtccagtttggagtctactcattggttagaacatatcaagctcgttttgacaggagccattcaagtagcagacaaagtttcttcagggaagagttcagtgcttgtgcattgcagtgacggatgggacaggactgctcagctgacatccttggccatgctgatgttggatagcttctataggagcattgaagggttcgaaatactggtacaaaaagaatggataagttttggacataaatttgcatctcgaataggtcatggtgataaaaaccacaccgatgctgaccgttctcctatttttctccagtttattgattgtgtgtggcaaatgtcaaaacagttccctacagcttttgaattcaatgaacaatttttgattataattttggatcatctgtatagttgccgatttggtactttcttattcaactgtgaatctgctcgagaaagacagaaggttacagaaaggactgtttctttatggtcactgataaacagtaataaagaaaaattcaaaaaccccttctatactaaagaaatcaatcgagttttatatccagttgccagtatgcgtcacttggaactctgggtgaattactacattagatggaaccccaggatcaagcaacaacagccgaatccagtggagcagcgttacatggagctcttagccttacgcgacgaatacataaagcggcttgaggaactgcagctcgccaactctgccaagctttctgatcccccaacttcaccttccagtccttcgcaaatgatgccccatgtgcaaactcacttttaattaagatctttttccctctgccaaaaattatggggacatcatgaagccccttgagcatctgacttctggctaataaaggaaatttattttcattgcaatagtgtgttggaattttttgtgtctctcactcgaggcctaggaacccctagtgatggagttggccactccctctctgcgcgctcgctcgctcactgaggccgggcgaccaaaggtcgcccgacgcccgggctttgcccgggcggcctcagtgagcgagcgagcgcgcagagagggagtggccaa

SEQ ID NO: 194 - DNA, 2040 bp, synthetic construct
  source 1..2040: mol_type = other DNA
tttttgtcgacttcgcatattaaggtgacgcgtgtggcctcgaacaccgagcgaccctgcagcgacccgcttaagcggccgccaccatggcttctgcatcaacttctaaatataattcacactccttggagaatgagtctattaagaggacgtctcgagatggagtcaatcgagatctcactgaggctgttcctcgacttccaggagaaacactaatcactgacaaagaagttatttacatatgtcctttcaatggccccattaagggaagagtttacatcacaaattatcgtctttatttaagaagtttggaaacggattcttctctaatacttgatgttcctctgggtgtgatctcgagaattgaaaaaatgggaggcgcgacaagtagaggagaaaattcctatggtctagatattacttgtaaagacatgagaaacctgaggttcgctttgaaacaggaaggccacagcagaagagatatgtttgagatcctcacgagatacgcgtttcccctggctcacagtctgccattatttgcatttttaaatgaagaaaagtttaacgtggatggatggacagtttacaatccagtggaagaatacaggaggcagggcttgcccaatcaccattggagaataacttttattaataagtgctatgagctctgtgacacttaccctgctcttttggtggttccgtatcgtgcctcagatgatgacctccggagagttgcaacttttaggtcccgaaatcgaattccagtgctgtcatggattcatccagaaaataagacggtcattgtgcgttgcagtcagcctcttgtcggtatgagtgggaaacgaaataaagatgatgagaaatatctcgatgttatcagggagactaataaacaaatttctaaactcaccatttatgatgcaagacccagcgtaaatgcagtggccaacaaggcaacaggaggaggatatgaaagtgatgatgcatatcataacgccgaacttttcttcttagacattcataatattcatgttatgcgggaatctttaaaaaaagtgaaggacattgtttatcctaatgtagaagaatctcattggttgtccagtttggagtctactcattggttagaacatatcaagctcgttttgacaggagccattcaagtagcagacaaagtttcttcagggaagagttcagtgcttgtgcattgcagtgacggatgggacaggactgctcagctgacatccttggccatgctgatgttggatagcttctataggagcattgaagggttcgaaatactggtacaaaaagaatggataagttttggacataaatttgcatctcgaataggtcatggtgataaaaaccacaccgatgctgaccgttctcctatttttctccagtttattgattgtgtgtggcaaatgtcaaaacagttccctacagcttttgaattcaatgaacaatttttgattataattttggatcatctgtatagttgccgatttggtactttcttattcaactgtgaatctgctcgagaaagacagaaggttacagaaaggactgtttctttatggtcactgataaacagtaataaagaaaaattcaaaaaccccttctatactaaagaaatcaatcgagttttatatccagttgccagtatgcgtcacttggaactctgggtgaattactacattagatggaaccccaggatcaagcaacaacagccgaatccagtggagcagcgttacatggagctcttagccttacgcgacgaatacataaagcggcttgaggaactgcagctcgccaactctgccaagctttctgatcccccaacttcaccttccagtccttcgcaaatgatgccccatgtgcaaactcacttttaattaagatctttttccctctgccaaaaattatggggacatcatgaagccccttgagcatctgacttctggctaataaaggaaatttattttcattgcaatagtgtgttggaattttttgtgtctctcactccctaggaaaaaa

SEQ ID NO: 195 - DNA, 2040 bp, synthetic construct; identical to SEQ ID NO: 194
  source 1..2040: mol_type = other DNA

SEQ ID NO: 196 - DNA, 2201 bp, synthetic construct
  source 1..2201: mol_type = other DNA
tttttgtcgaccctctataaatacccgctctgggttggcagctgttgctgcggtgtgtgtgggcgtgggtggtgtgagtagggggatgaatcagggagggggcgggggcagggggcaggagccacacaaacctgccctggcgaagacccccgctggctgactcagggatcttgcagctgtcaggggggagggatacaaatagtgccgacggctgggggccctgtctcccctcgccgcggccgccaccatggcttctgcatcaacttctaaatataattcacactccttggagaatgagtctattaagaggacgtctcgagatggagtcaatcgagatctcactgaggctgttcctcgacttccaggagaaacactaatcactgacaaagaagttatttacatatgtcctttcaatggccccattaagggaagagtttacatcacaaattatcgtctttatttaagaagtttggaaacggattcttctctaatacttgatgttcctctgggtgtgatctcgagaattgaaaaaatgggaggcgcgacaagtagaggagaaaattcctatggtctagatattacttgtaaagacatgagaaacctgaggttcgctttgaaacaggaaggccacagcagaagagatatgtttgagatcctcacgagatacgcgtttcccctggctcacagtctgccattatttgcatttttaaatgaagaaaagtttaacgtggatggatggacagtttacaatccagtggaagaatacaggaggcagggcttgcccaatcaccattggagaataacttttattaataagtgctatgagctctgtgacacttaccctgctcttttggtggttccgtatcgtgcctcagatgatgacctccggagagttgcaacttttaggtcccgaaatcgaattccagtgctgtcatggattcatccagaaaataagacggtcattgtgcgttgcagtcagcctcttgtcggtatgagtgggaaacgaaataaagatgatgagaaatatctcgatgttatcagggagactaataaacaaatttctaaactcaccatttatgatgcaagacccagcgtaaatgcagtggccaacaaggcaacaggaggaggatatgaaagtgatgatgcatatcataacgccgaacttttcttcttagacattcataatattcatgttatgcgggaatctttaaaaaaagtgaaggacattgtttatcctaatgtagaagaatctcattggttgtccagtttggagtctactcattggttagaacatatcaagctcgttttgacaggagccattcaagtagcagacaaagtttcttcagggaagagttcagtgcttgtgcattgcagtgacggatgggacaggactgctcagctgacatccttggccatgctgatgttggatagcttctataggagcattgaagggttcgaaatactggtacaaaaagaatggataagttttggacataaatttgcatctcgaataggtcatggtgataaaaaccacaccgatgctgaccgttctcctatttttctccagtttattgattgtgtgtggcaaatgtcaaaacagttccctacagcttttgaattcaatgaacaatttttgattataattttggatcatctgtatagttgccgatttggtactttcttattcaactgtgaatctgctcgagaaagacagaaggttacagaaaggactgtttctttatggtcactgataaacagtaataaagaaaaattcaaaaaccccttctatactaaagaaatcaatcgagttttatatccagttgccagtatgcgtcacttggaactctgggtgaattactacattagatggaaccccaggatcaagcaacaacagccgaatccagtggagcagcgttacatggagctcttagccttacgcgacgaatacataaagcggcttgaggaactgcagctcgccaactctgccaagctttctgatcccccaacttcaccttccagtccttcgcaaatgatgccccatgtgcaaactcacttttaattaagatctttttccctctgccaaaaattatggggacatcatgaagccccttgagcatctgacttctggctaataaaggaaatttattttcattgcaatagtgtgttggaattttttgtgtctctcactccctaggaaaaaa

SEQ ID NO: 197 - DNA, 2400 bp, synthetic construct
  source 1..2400: mol_type = other DNA
agtgagcgagcgagcgcgcagagagggagtggccaactccatcactaggggttccttgcgcacaggtacccctctataaatacccgctctgggttggcagctgttgctgcggtgtgtgtgggcgtgggtggtgtgagtagggggatgaatcagggagggggcgggggcagggggcaggagccacacaaacctgccctggcgaagacccccgctggctgactcagggatcttgcagctgtcaggggggagggatacaaatagtgccgacggctgggggccctgtctcccctcgccgcggccgccaccatggcttctgcatcaacttctaaatataattcacactccttggagaatgagtctattaagaggacgtctcgagatggagtcaatcgagatctcactgaggctgttcctcgacttccaggagaaacactaatcactgacaaagaagttatttacatatgtcctttcaatggccccattaagggaagagtttacatcacaaattatcgtctttatttaagaagtttggaaacggattcttctctaatacttgatgttcctctgggtgtgatctcgagaattgaaaaaatgggaggcgcgacaagtagaggagaaaattcctatggtctagatattacttgtaaagacatgagaaacctgaggttcgctttgaaacaggaaggccacagcagaagagatatgtttgagatcctcacgagatacgcgtttcccctggctcacagtctgccattatttgcatttttaaatgaagaaaagtttaacgtggatggatggacagtttacaatccagtggaagaatacaggaggcagggcttgcccaatcaccattggagaataacttttattaataagtgctatgagctctgtgacacttaccctgctcttttggtggttccgtatcgtgcctcagatgatgacctccggagagttgcaacttttaggtcccgaaatcgaattccagtgctgtcatggattcatccagaaaataagacggtcattgtgcgttgcagtcagcctcttgtcggtatgagtgggaaacgaaataaagatgatgagaaatatctcgatgttatcagggagactaataaacaaatttctaaactcaccatttatgatgcaagacccagcgtaaatgcagtggccaacaaggcaacaggaggaggatatgaaagtgatgatgcatatcataacgccgaacttttcttcttagacattcataatattcatgttatgcgggaatctttaaaaaaagtgaaggacattgtttatcctaatgtagaagaatctcattggttgtccagtttggagtctactcattggttagaacatatcaagctcgttttgacaggagccattcaagtagcagacaaagtttcttcagggaagagttcagtgcttgtgcattgcagtgacggatgggacaggactgctcagctgacatccttggccatgctgatgttggatagcttctataggagcattgaagggttcgaaatactggtacaaaaagaatggataagttttggacataaatttgcatctcgaataggtcatggtgataaaaaccacaccgatgctgaccgttctcctatttttctccagtttattgattgtgtgtggcaaatgtcaaaacagttccctacagcttttgaattcaatgaacaatttttgattataattttggatcatctgtatagttgccgatttggtactttcttattcaactgtgaatctgctcgagaaagacagaaggttacagaaaggactgtttctttatggtcactgataaacagtaataaagaaaaattcaaaaaccccttctatactaaagaaatcaatcgagttttatatccagttgccagtatgcgtcacttggaactctgggtgaattactacattagatggaaccccaggatcaagcaacaacagccgaatccagtggagcagcgttacatggagctcttagccttacgcgacgaatacataaagcggcttgaggaactgcagctcgccaactctgccaagctttctgatcccccaacttcaccttccagtccttcgcaaatgatgccccatgtgcaaactcacttttaattaagatctttttccctctgccaaaaattatggggacatcatgaagccccttgagcatctgacttctggctaataaaggaaatttattttcattgcaatagtgtgttggaattttttgtgtctctcactcgaggcctaggaacccctagtgatggagttggccactccctctctgcgcgctcgctcgctcactgaggccgggcgaccaaaggtcgcccgacgcccgggctttgcccgggcggcctcagtgagcgagcgagcgcgcagagagggagtggccaa

SEQ ID NO: 198 - DNA, 2201 bp, synthetic construct; identical to SEQ ID NO: 196
  source 1..2201: mol_type = other DNA

SEQ ID NO: 199 - DNA, 2459 bp, synthetic construct
  source 1..2459: mol_type = other DNA
ttggccactccctctctgcgcgctcgctcgctcactgaggccgcccgggcaaagcccgggcgtcgggcgacctttggtcgcccggcctcagtgagcgagcgagcgcgcagagagggagtggccaactccatcactaggggttcctttgtcgaccctctataaatacccgctctgggttggcagctgttgctgcggtgtgtgtgggcgtgggtggtgtgagtagggggatgaatcagggagggggcgggggcagggggcaggagccacacaaacctgccctggcgaagacccccgctggctgactcagggatcttgcagctgtcaggggggagggatacaaatagtgccgacggctgggggccctgtctcccctcgccgcggccgccaccatggcttctgcatcaacttctaaatataattcacactccttggagaatgagtctattaagaggacgtctcgagatggagtcaatcgagatctcactgaggctgttcctcgacttccaggagaaacactaatcactgacaaagaagttatttacatatgtcctttcaatggccccattaagggaagagtttacatcacaaattatcgtctttatttaagaagtttggaaacggattcttctctaatacttgatgttcctctgggtgtgatctcgagaattgaaaaaatgggaggcgcgacaagtagaggagaaaattcctatggtctagatattacttgtaaagacatgagaaacctgaggttcgctttgaaacaggaaggccacagcagaagagatatgtttgagatcctcacgagatacgcgtttcccctggctcacagtctgccattatttgcatttttaaatgaagaaaagtttaacgtggatggatggacagtttacaatccagtggaagaatacaggaggcagggcttgcccaatcaccattggagaataacttttattaataagtgctatgagctctgtgacacttaccctgctcttttggtggttccgtatcgtgcctcagatgatgacctccggagagttgcaacttttaggtcccgaaatcgaattccagtgctgtcatggattcatccagaaaataagacggtcattgtgcgttgcagtcagcctcttgtcggtatgagtgggaaacgaaataaagatgatgagaaatatctcgatgttatcagggagactaataaacaaatttctaaactcaccatttatgatgcaagacccagcgtaaatgcagtggccaacaaggcaacaggaggaggatatgaaagtgatgatgcatatcataacgccgaacttttcttcttagacattcataatattcatgttatgcgggaatctttaaaaaaagtgaaggacattgtttatcctaatgtagaagaatctcattggttgtccagtttggagtctactcattggttagaacatatcaagctcgttttgacaggagccattcaagtagcagacaaagtttcttcagggaagagttcagtgcttgtgcattgcagtgacggatgggacaggactgctcagctgacatccttggccatgctgatgttggatagcttctataggagcattgaagggttcgaaatactggtacaaaaagaatggataagttttggacataaatttgcatctcgaataggtcatggtgataaaaaccacaccgatgctgaccgttctcctatttttctccagtttattgattgtgtgtggcaaatgtcaaaacagttccctacagcttttgaattcaatgaacaatttttgattataattttggatcatctgtatagttgccgatttggtactttcttattcaactgtgaatctgctcgagaaagacagaaggttacagaaaggactgtttctttatggtcactgataaacagtaataaagaaaaattcaaaaaccccttctatactaaagaaatcaatcgagttttatatccagttgccagtatgcgtcacttggaactctgggtgaattactacattagatggaaccccaggatcaagcaacaacagccgaatccagtggagcagcgttacatggagctcttagccttacgcgacgaatacataaagcggcttgaggaactgcagctcgccaactctgccaagctttctgatcccccaacttcaccttccagtccttcgcaaatgatgccccatgtgcaaactcacttttaattaagatctttttccctctgccaaaaattatggggacatcatgaagccccttgagcatctgacttctggctaataaaggaaatttattttcattgcaatagtgtgttggaattttttgtgtctctcactcgcctaggccactccctctctgcgcgctcgctcgctcactgaggccgggcgaccaaaggtcgcccgacgcccgggctttgcccgggcggcctcagtgagcgagcgagcgcgcagagagggagtggccaa

SEQ ID NO: 200 - DNA, 681 bp, synthetic construct
  source 1..681: mol_type = other DNA
ttttggtaccgacattgattattgactagttattaatagtaatcaattacggggtcattagttcatagcccatatatggagttccgcgttacataacttacggtaaatggcccgcctggctgaccgcccaacgacccccgcccattgacgtcaataatgacgtatgttcccatagtaacgccaatagggactttccattgacgtcaatgggtggagtatttacggtaaactgcccacttggcagtacatcaagtgtatcatatgccaagtacgccccctattgacgtcaatgacggtaaatggcccgcctggcattatgcccagtacatgaccttatgggactttcctacttggcagtacatctacgtattagtcatcgctattaccatggtcgaggtgagccccacgttctgcttcactctccccatctcccccccctccccacccccaattttgtatttatttattttttaattattttgtgcagcgatgggggcggggggggggggggggcgcgcgccaggcggggcggggcggggcgaggggcggggcggggcgaggcggagaggtgcggcggcagccaatcagagcggcgcgctccgaaagtttccttttatggcgaggcggcggcggcggcggccctataaaaagcgaagcgcgcggcgggcggatatctttttt

SEQ ID NO: 201 - DNA, 2900 bp, synthetic construct
  source 1..2900: mol_type = other DNA
ttggccactccctctctgcgcgctcgctcgctcactgaggccgcccgggcaaagcccgggcgtcgggcgacctttggtcgcccggcctcagtgagcgagcgagcgcgcagagagggagtggccaactccatcactaggggttcctttgtcgacgacattgattattgactagttattaatagtaatcaattacggggtcattagttcatagcccatatatggagttccgcgttacataacttacggtaaatggcccgcctggctgaccgcccaacgacccccgcccattgacgtcaataatgacgtatgttcccatagtaacgccaatagggactttccattgacgtcaatgggtggagtatttacggtaaactgcccacttggcagtacatcaagtgtatcatatgccaagtacgccccctattgacgtcaatgacggtaaatggcccgcctggcattatgcccagtacatgaccttatgggactttcctacttggcagtacatctacgtattagtcatcgctattaccatggtcgaggtgagccccacgttctgcttcactctccccatctcccccccctccccacccccaattttgtatttatttattttttaattattttgtgcagcgatgggggcggggggggggggggggcgcgcgccaggcggggcggggcggggcgaggggcggggcggggcgaggcggagaggtgcggcggcagccaatcagagcggcgcgctccgaaagtttccttttatggcgaggcggcggcggcggcggccctataaaaagcgaagcgcgcggcgggcgggagtggctgcgcgctgccttcgccccgtgccccgctccgccgccgcctcgcgccgcccgccccggctctgactgaccgcgttactcccacaggtgagcgggcgggacggcccttctcctccgggctgtaattagcgcttggtttaatgacggcttgtttcttttctgtggctgcgtgaaagccttgaggggctccgggagggccctttgtgcggggggagcggctcggggggtgcgtgcgtgtgtgtgtgcgtggggagcgccgcgtgcggctccgcgctgcccggcggctgtgagcgctgcgggcgcggcgcggggctttgtgcgctccgcagtgtgcgcgaggggagcgcggccgggggcggtgccccgcggtgcggggggggctgcgaggggaacaaaggctgcgtgcggggtgtgtgcgtgggggggtgagcagggggtgtgggcgcgtcggtcgggctgcaaccccccctgcacccccctccccgagttgctgagcacggcccggcttcgggtgcggggctccgtacggggcgtggcgcggggctcgccgtgccgggcggggggtggcggcaggtgggggtgccgggcggggcggggccgcctcgggccggggagggctcgggggaggggcgcggcggcccccggagcgccggcggctgtcgaggcgcggcgagccgcagccattgccttttatggtaatcgtgcgagagggcgcagggacttcctttgtcccaaatctgtgcggagccgaaatctgggaggcgccgccgcaccccctctagcgggcgcggggcgaagcggtgcggcgccggcaggaaggaaatgggcggggagggccttcgtgcgtcgccgcgccgccgtccccttctccctctccagcctcggggctgtccgcggggggacggctgccttcgggggggacggggcagggcggggttcggcttctggcgtgtgaccggcggctctagagcctctgctaaccatgttcatgccttcttctttttcctacagctcctgggcaacgtgctggttattgtgctgtctcatcattttggcaaaagatctgccgccaccatggtgagcaagggcgaggagctgttcaccggggtggtgcccatcctggtcgagctggacggcgacgtaaacggccacaagttcagcgtgtccggcgagggcgagggcgatgccacctacggcaagctgaccctgaagttcatctgcaccaccggcaagctgcccgtgccctggcccaccctcgtgaccaccctgacctacggcgtgcagtgcttcagccgctaccccgaccacatgaagcagcacgacttcttcaagtccgccatgcccgaaggctacgtccaggagcgcaccatcttcttcaaggacgacggcaactacaagacccgcgccgaggtgaagttcgagggcgacaccctggtgaaccgcatcgagctgaagggcatcgacttcaaggaggacggcaacatcctggggcacaagctggagtacaactacaacagccacaacgtctatatcatggccgacaagcagaagaacggcatcaaggtgaacttcaagatccgccacaacatcgaggacggcagcgtgcagctcgccgaccactaccagcagaacacccccatcggcgacggccccgtgctgctgcccgacaaccactacctgagcacccagtccgccctgagcaaagaccccaacgagaagcgcgatcacatggtcctgctggagttcgtgaccgccgccgggatcactctcggcatggacgagctgtacaagtgagagctcgatctttttccctctgccaaaaattatggggacatcatgaagccccttgagcatctgacttctggctaataaaggaaatttattttcattgcaatagtgtgttggaattttttgtgtctctcactcggaagcctaggaggaacccctagtgatggagttggccactccctctctgcgcgctcgctcgctcactgaggccgggcgaccaaaggtcgcccgacgcccgggctttgcccgggcggcctcagtgagcgagcgagcgcgcagagagggagtggccaa

SEQ ID NO: 202 - DNA, 1849 bp, synthetic construct
  source 1..1849: mol_type = other DNA
caaagaatttgagcggccgccaccatggcttctgcatcaacttctaaatataattcacactccttggagaatgagtctattaagaggacgtctcgagatggagtcaatcgagatctcactgaggctgttcctcgacttccaggagaaacactaatcactgacaaagaagttatttacatatgtcctttcaatggccccattaagggaagagtttacatcacaaattatcgtctttatttaagaagtttggaaacggattcttctctaatacttgatgttcctctgggtgtgatctcgagaattgaaaaaatgggaggcgcgacaagtagaggagaaaattcctatggtctagatattacttgtaaagacatgagaaacctgaggttcgctttgaaacaggaaggccacagcagaagagatatgtttgagatcctcacgagatacgcgtttcccctggctcacagtctgccattatttgcatttttaaatgaagaaaagtttaacgtggatggatggacagtttacaatccagtggaagaatacaggaggcagggcttgcccaatcaccattggagaataacttttattaataagtgctatgagctctgtgacacttaccctgctcttttggtggttccgtatcgtgcctcagatgatgacctccggagagttgcaacttttaggtcccgaaatcgaattccagtgctgtcatggattcatccagaaaataagacggtcattgtgcgttgcagtcagcctcttgtcggtatgagtgggaaacgaaataaagatgatgagaaatatctcgatgttatcagggagactaataaacaaatttctaaactcaccatttatgatgcaagacccagcgtaaatgcagtggccaacaaggcaacaggaggaggatatgaaagtgatgatgcatatcataacgccgaacttttcttcttagacattcataatattcatgttatgcgggaatctttaaaaaaagtgaaggacattgtttatcctaatgtagaagaatctcattggttgtccagtttggagtctactcattggttagaacatatcaagctcgttttgacaggagccattcaagtagcagacaaagtttcttcagggaagagttcagtgcttgtgcattgcagtgacggatgggacaggactgctcagctgacatccttggccatgctgatgttggatagcttctataggagcattgaagggttcgaaatactggtacaaaaagaatggataagttttggacataaatttgcatctcgaataggtcatggtgataaaaaccacaccgatgctgaccgttctcctatttttctccagtttattgattgtgtgtggcaaatgtcaaaacagttccctacagcttttgaattcaatgaacaatttttgattataattttggatcatctgtatagttgccgatttggtactttcttattcaactgtgaatctgctcgagaaagacagaaggttacagaaaggactgtttctttatggtcactgataaacagtaataaagaaaaattcaaaaaccccttctatactaaagaaatcaatcgagttttatatccagttgccagtatgcgtcacttggaactctgggtgaattactacattagatggaaccccaggatcaagcaacaacagccgaatccagtggagcagcgttacatggagctcttagccttacgcgacgaatacataaagcggcttgaggaactgcagctcgccaactctgccaagctttctgatcccccaacttcaccttccagtccttcgcaaatgatgccccatgtgcaaactcacttttaattaagatcttttt

SEQ ID NO: 203 - DNA, 1837 bp, synthetic construct
  source 1..1837: mol_type = other DNA
tttgagcggccgccaccatggcttctgcatcaacttctaaatataattcacactccttggagaatgagtctattaagaggacgtctcgagatggagtcaatcgagatctcactgaggctgttcctcgacttccaggagaaacactaatcactgacaaagaagttatttacatatgtcctttcaatggccccattaagggaagagtttacatcacaaattatcgtctttatttaagaagtttggaaacggattcttctctaatacttgatgttcctctgggtgtgatctcgagaattgaaaaaatgggaggcgcgacaagtagaggagaaaattcctatggtctagatattacttgtaaagacatgagaaacctgaggttcgctttgaaacaggaaggccacagcagaagagatatgtttgagatcctcacgagatacgcgtttcccctggctcacagtctgccattatttgcatttttaaatgaagaaaagtttaacgtggatggatggacagtttacaatccagtggaagaatacaggaggcagggcttgcccaatcaccattggagaataacttttattaataagtgctatgagctctgtgacacttaccctgctcttttggtggttccgtatcgtgcctcagatgatgacctccggagagttgcaacttttaggtcccgaaatcgaattccagtgctgtcatggattcatccagaaaataagacggtcattgtgcgttgcagtcagcctcttgtcggtatgagtgggaaacgaaataaagatgatgagaaatatctcgatgttatcagggagactaataaacaaatttctaaactcaccatttatgatgcaagacccagcgtaaatgcagtggccaacaaggcaacaggaggaggatatgaaagtgatgatgcatatcataacgccgaacttttcttcttagacattcataatattcatgttatgcgggaatctttaaaaaaagtgaaggacattgtttatcctaatgtagaagaatctcattggttgtccagtttggagtctactcattggttagaacatatcaagctcgttttgacaggagccattcaagtagcagacaaagtttcttcagggaagagttcagtgcttgtgcattgcagtgacggatgggacaggactgctcagctgacatccttggccatgctgatgttggatagcttctataggagcattgaagggttcgaaatactggtacaaaaagaatggataagttttggacataaatttgcatctcgaataggtcatggtgataaaaaccacaccgatgctgaccgttctcctatttttctccagtttattgattgtgtgtggcaaatgtcaaaacagttccctacagcttttgaattcaatgaacaatttttgattataattttggatcatctgtatagttgccgatttggtactttcttattcaactgtgaatctgctcgagaaagacagaaggttacagaaaggactgtttctttatggtcactgataaacagtaataaagaaaaattcaaaaaccccttctatactaaagaaatcaatcgagttttatatccagttgccagtatgcgtcacttggaactctgggtgaattactacattagatggaaccccaggatcaagcaacaacagccgaatccagtggagcagcgttacatggagctcttagccttacgcgacgaatacataaagcggcttgaggaactgcagctcgccaactctgccaagctttctgatcccccaacttcaccttccagtccttcgcaaatgatgccccatgtgcaaactcacttttaattaagatc

SEQ ID NO: 204 - DNA, 1334 bp, synthetic construct
  source 1..1334: mol_type = other DNA
ttggccactccctctctgcgcgctcgctcgctcactgaggccgcccgggcaaagcccgggcgtcgggcgacctttggtcgcccggcctcagtgagcgagcgagcgcgcagagagggagtggccaactccatcactaggggttccttgcgcacaggtacccccctgcccccacagctcctctcctgtgccttgtttcccagccatgcgttctcctctataaatacccgctctggtatttggggttggcagctgttgctgccagggagatggttgggttgacatgcggctcctgacaaaacacaaacccctggtgtgtgtgggcgtgggtggtgtgagtagggggatgaatcagggagggggcgggggacccagggggcaggagccacacaaagtctgtgcgggggtgggagcgcacatagcaattggaaactggctgcagacatgcttgctgcctgccctggcgaaggattggtaggcttgccgtcacaggacccccgctggctgactcaggggcgcaggctcttgcgggggagctggcctcccgcccccacggccacgggccctttcctggcaggacagcgggatcttgcagctgtcaggggaggggaggcgggggctgatgtcaggagggatacaaatagtgccgacggctgggggccctgtctcccctcgccgcatccactctccggccggccgcctgcccgccgcctcctccgtgcgcccgccagcctcgcccgcgccgtcaccgatatctcagatcgcctggagacgccatccacgctgttttgacctccatagaagacaccgggaccgatccagcctccgcggattcgaatcccggccgggaacggtgcattggaacgcggattccccgtgccaagagtgacgtaagtaccgcctatagagtctataggcccacaaaaaatgctttcttcttttaatatacttttttgtttatcttatttctaatactttccctaatctctttctttcagggcaataatgatacaatgtatcatgcctctttgcaccattctaaagaataacagtgataatttctgggttaaggcaatagcaatatttctgcatataaatatttctgcatataaattgtaactgatgtaagaggtttcatattgctaatagcagctacaatccagctaccattctgcttttattttatggttgggataaggctggattattctgagtccaagctaggcccttttgctaatcatgttcatacctcttatcttcctcccacagctcctgggcaacgtgctggtctgtgtgctggcccatcactttggcaaagaattggatccgccgccacc

SEQ ID NO: 205 - DNA, 353 bp, synthetic construct
  source 1..353: mol_type = other DNA
taagtcgacgtaagtttttaaatgtataaattgtcttatttataaattggtctaaaatatatgtaattgtcttaagatctttttccctctgccaaaaattatggggacatcatgaagccccttgagcatctgacttctggctaataaaggaaatttattttcattgcaatagtgtgttggaattttttgtgtctctcactcgaggcctaggaacccctagtgatggagttggccactccctctctgcgcgctcgctcgctcactgaggccgggcgaccaaaggtcgcccgacgcccgggctttgcccgggcggcctcagtgagcgagcgagcgcgcagagagggagtggccaa

SEQ ID NO: 206 - DNA, 220 bp, synthetic construct
  source 1..220: mol_type = other DNA
ttggccactccctctctgcgcgctcgctcgctcactgaggccgcccgggcaaagcccgggcgtcgggcgacctttggtcgcccggcctcagtgagcgagcgagcgcgcagagagggagtggccaactccatcactaggggttcctttgtcgactcggttcgcatattaaggtgacgcgtgtggcctcgaacaccgagcgaccctgcagcgacccgcttaa

SEQ ID NO: 207 - DNA, 187 bp, synthetic construct
  source 1..187: mol_type = other DNA
aataaaggaaatttattttcattgcaatagtgtgttggaattttttgtgtctctcagagtcctaggccactccctctctgcgcgctcgctcgctcactgaggccgggcgaccaaaggtcgcccgacgcccgggctttgcccgggcggcctcagtgagcgagcgagcgcgcagagagggagtggccaa

SEQ ID NO: 208 - DNA, 2297 bp, synthetic construct
  source 1..2297: mol_type = other DNA
ttggccactccctctctgcgcgctcgctcgctcactgaggccgcccgggcaaagcccgggcgtcgggcgacctttggtcgcccggcctcagtgagcgagcgagcgcgcagagagggagtggccaactccatcactaggggttcctttgtcgacttcgcatattaaggtgacgcgtgtggcctcgaacaccgagcgaccctgcagcgacccgcttaagcggccgccaccatggcttctgcatcaacttctaaatataattcacactccttggagaatgagtctattaagaggacgtctcgagatggagtcaatcgagatctcactgaggctgttcctcgacttccaggagaaacactaatcactgacaaagaagttatttacatatgtcctttcaatggccccattaagggaagagtttacatcacaaattatcgtctttatttaagaagtttggaaacggattcttctctaatacttgatgttcctctgggtgtgatctcgagaattgaaaaaatgggaggcgcgacaagtagaggagaaaattcctatggtctagatattacttgtaaagacatgagaaacctgaggttcgctttgaaacaggaaggccacagcagaagagatatgtttgagatcctcacgagatacgcgtttcccctggctcacagtctgccattatttgcatttttaaatgaagaaaagtttaacgtggatggatggacagtttacaatccagtggaagaatacaggaggcagggcttgcccaatcaccattggagaataacttttattaataagtgctatgagctctgtgacacttaccctgctcttttggtggttccgtatcgtgcctcagatgatgacctccggagagttgcaacttttaggtcccgaaatcgaattccagtgctgtcatggattcatccagaaaataagacggtcattgtgcgttgcagtcagcctcttgtcggtatgagtgggaaacgaaataaagatgatgagaaatatctcgatgttatcagggagactaataaacaaatttctaaactcaccatttatgatgcaagacccagcgtaaatgcagtggccaacaaggcaacaggaggaggatatgaaagtgatgatgcatatcataacgccgaacttttcttcttagacattcataatattcatgttatgcgggaatctttaaaaaaagtgaaggacattgtttatcctaatgtagaagaatctcattggttgtccagtttggagtctactcattggttagaacatatcaagctcgttttgacaggagccattcaagtagcagacaaagtttcttcagggaagagttcagtgcttgtgcattgcagtgacggatgggacaggactgctcagctgacatccttggccatgctgatgttggatagcttctataggagcattgaagggttcgaaatactggtacaaaaagaatggataagttttggacataaatttgcatctcgaataggtcatggtgataaaaaccacaccgatgctgaccgttctcctatttttctccagtttattgattgtgtgtggcaaatgtcaaaacagttccctacagcttttgaattcaatgaacaatttttgattataattttggatcatctgtatagttgccgatttggtactttcttattcaactgtgaatctgctcgagaaagacagaaggttacagaaaggactgtttctttatggtcactgataaacagtaataaagaaaaattcaaaaaccccttctatactaaagaaatcaatcgagttttatatccagttgccagtatgcgtcacttggaactctgggtgaattactacattagatggaaccccaggatcaagcaacaacagccgaatccagtggagcagcgttacatggagctcttagccttacgcgacgaatacataaagcggcttgaggaactgcagctcgccaactctgccaagctttctgatcccccaacttcaccttccagtccttcgcaaatgatgccccatgtgcaaactcacttttaattaagatctttttccctctgccaaaaattatggggacatcatgaagccccttgagcatctgacttctggctaataaaggaaatttattttcattgcaatagtgtgttggaattttttgtgtctctcactccctaggccactccctctctgcgcgctcgctcgctcactgaggccgggcgaccaaaggtcgcccgacgcccgggctttgcccgggcggcctcagtgagcgagcgagcgcgcagagagggagtggccaa

SEQ ID NO: 209 - DNA, 34 bp, synthetic construct
  source 1..34: mol_type = other DNA
ttttggtaccgacattgattattgactagttatt

SEQ ID NO: 210 - DNA, 24 bp, synthetic construct
  source 1..24: mol_type = other DNA
aaaaaagatatccgcccgccgcgc

SEQ ID NO: 211 - DNA, 33 bp, synthetic construct
  source 1..33: mol_type = other DNA
tttttgtcgacttcgcatattaaggtgacgcgt

SEQ ID NO: 212 - DNA, 42 bp, synthetic construct
  source 1..42: mol_type = other DNA
ttttttcctagggagtgagagacacaaaaaattccaacacac

SEQ ID NO: 213 - DNA, 33 bp, synthetic construct
  source 1..33: mol_type = other DNA
tttttgtcgaccctctataaatacccgctctgg

SEQ ID NO: 214 - DNA, 42 bp, synthetic construct; identical to SEQ ID NO: 212
  source 1..42: mol_type = other DNA

SEQ ID NO: 215 - DNA, 15 bp, synthetic construct
  source 1..15: mol_type = other DNA
tttgagcggccgcca

SEQ ID NO: 216 - DNA, 31 bp, synthetic construct
  source 1..31: mol_type = other DNA
gatcttaattaaaagtgagtttgcacatggg

SEQ ID NO: 217 - protein, 735 aa, Adeno-associated virus 2 [sequence omitted]

SEQ ID NO: 218 - protein, 736 aa, Adeno-associated virus
MAADGYLPDWLEDNLSEGIREWWDLKPGAPKPKANQQKQDDGRGLVLPGYKYLGPFNGLDKGEPVNAADAAALEHDKAYDQQLKAGDNPYLRYNHADAEFQERLQEDTSFGGNLGRAVFQAKKRVLEPLGLVEEGAKTAPGKKRPVEQSPQEPDSSSGIGKKGQQPAKKRLNFGQTGDSESVPDPQPLGEPPAAPSGVGSNTMASGGGAPMADNNEGADGVGNASGNWHCDSTWLGDRVITTSTRTWALPTYNNHLYKQISSQSGASTNDNTYFGYSTPWGYFDFNRFHCHFSPRDWQRLINNNWGFRPKRLNFKLFNIQVKEVTTNDGTTTIANNLTSTVQVFTDSEYQLPYVLGSAHQGCLPPFPADVFMIPQYGYLTLNNGSQAVGRSSFYCLEYFPSQMLRTGNNFQFSYTFEDVPFHSSYAHSQSLDRLMNPLIDQYLYYLSRTQTTSGTAGNRELQFSQAGPSSMANQAKNWLPGPCYRQQRVSKTTNQNNNSNFAWTGATKYHLNGRDSLVNPGPAMATHKDDEDKFFPMSGVLIFGKQGAGNSNVDLDNVMITSEEEIKTTNPVATEEYGTVATNLQSSNTAPATGTVNSQGALPGMVWQDRDVYLQGPIWAKIPHTDGHFHPSPLMGGFGLKHPPPQILIKNTPVPANPPTTFSPAKFASFITQYSTGQVSVEIEWELQKENSKRWNPEIQYTSNYNKSTNVDFAVDTNGVYSEPRPIGTRYLTRNL

SEQ ID NO: 219 - protein, 736 aa, Adeno-associated virus; identical to SEQ ID NO: 143

SEQ ID NO: 220 - protein, 736 aa, Adeno-associated virus; identical to SEQ ID NO: 147

SEQ ID NO: 221 - protein, 736 aa, Adeno-associated virus; identical to SEQ ID NO: 144

SEQ ID NO: 222 - protein, 736 aa, Adeno-associated virus; identical to SEQ ID NO: 146

SEQ ID NO: 223 - protein, 736 aa, Adeno-associated virus; identical to SEQ ID NO: 145

SEQ ID NO: 224 - protein, 736 aa, Adeno-associated virus; identical to SEQ ID NO: 148

SEQ ID NO: 225 - protein, 736 aa, Adeno-associated virus; identical to SEQ ID NO: 149

SEQ ID NO: 226 - protein, 736 aa, Adeno-associated virus; identical to SEQ ID NO: 150

SEQ ID NO: 227 - protein, 736 aa, Adeno-associated virus; identical to SEQ ID NO: 142

SEQ ID NO: 228 - protein, 737 aa, Adeno-associated virus
MAADGYLPDWLEDNLSEGIREWWDLKPGAPKPKANQQKQDDGRGLVLPGYKYLGPFNGLDKGEPVNAADAAALEHDKAYDQQLKAGDNPYLRYNHADAEFQERLQEDTSFGGNLGRAVFQAKKRVLEPLGLVEEGAKTAPGKKRPVEQSPQEPDSSTGIGKKGQQPAKKRLNFGQTGDSESVPDPQPLGEPPAAPSGVGSNTMAAGGGAPMADNNEGADGVGNASGNWHCDSTWLGDRVITTSTRTWALPTYNNHLYKQISNSQSGGSTNDNTYFGYSTPWGYFDFNRFHCHFSPRDWQRLINNNWGFRPKRLNFKLFNIQVKEVTTNDGTTTIANNLTSTVQVFTDSEYQLPYVLGSAHQGCLPPFPADVFMIPQYGYLTLNNGSQAVGRSSFYCLEYFPSQMLRTGNNFEFSYTFEDVPFHSSYAHSQSLDRLMNPLIDQYLYYLSRTQTTGGTAGNRTLQFSQAGPSSMANQAKNWLPGPCYRQQRVSKTTNQNNNSNFAWTGATKYHLNGRDSLVNPGVAMATHKDDEDRFFPSSGVLIFGKQGAGNDNVDLDNVMITSEEEIKTTNPVATEEYGVVATNLQSANTAPQTGTVNSQGALPGMVWQNRDVYLQGPIWAKIPHTDGNFHPSPLMGGFGLKHPPPQILIKNTPVPANPPTTFSPAKFASFITQYSTGQVSVEIEWELQKENSKRWNPEIQYTSNYNKSTNVDFAVDTEGVYSEPRPIGTRYLTRNL

SEQ ID NO: 229 - protein, 738 aa, Adeno-associated virus
MAADGYLPDWLEDNLSEGIREWWDLKPGAPKPKANQQKQDDGRGLVLPGYKYLGPFNGLDKGEPVNAADAAALEHDKAYDQQLKAGDNPYLRYNHADAEFQERLQEDTSFGGNLGRAVFQAKKRVLEPLGLVEEGAKTAPGKKRPVEQSPQREPDSSTGIGKKGQQPAKKRLNFGQTGDSESVPDPQPLGEPPAAPSGVGSNTMAAGGGAPMADNNEGADGVGNSSGNWHCDSTWLGDRVITTSTRTWALPTYNNHLYKQISNGTSGGSTNDNTYFGYSTPWGYFDFNRFHCHFSPRDWQRLINNNWGFRPKRLNFKLFNIQVKEVTTNEGTKTIANNLTSTVQVFTDSEYQLPYVLGSAHQGCLPPFPADVFMIPQYGYLTLNNGSQAVGRSSFYCLEYFPSQMLRTGNNFQFSYTFEDVPFHSSYAHSQSLDRLMNPLIDQYLYYLSRTQTTGGTAGTQTLQFSQAGPSSMANQAKNWLPGPCYRQQRVSTTTNQNNNSNFAWTGATKYHLNGRDSLVNPGVAMATHKDDEDRFFPSSGVLIFGKQGAGNDNVDYSNVMITSEEEIKTTNPVATEEYGVVATNLQSANTAPQTGTVNSQGALPGMVWQNRDVYLQGPIWAKIPHTDGNFHPSPLMGGFGLKHPPPQILIKNTPVPADPPTTFNQAKLNSFITQYSTGQVSVEIEWELQKENSKRWNPEIQYTSNYYKSTNVDFAVNTEGVYSEPRPIGTRYLTRNL

SEQ ID NO: 230 - protein, 738 aa, Adeno-associated virus; identical to SEQ ID NO: 151

SEQ ID NO: 231 - protein, 738 aa, Adeno-associated virus
MAADGYLPDWLEDNLSEGIREWWDLKPGAPKPKANQQKQDDGRGLVLPGYKYLGPFNGLDKGEPVNAADAAALEHDKAYDQQLKAGDNPYLRYNHADAEFQERLQEDTSFGGNLGRAVFQAKKRVLEPLGLVEEGAKTAPGKKRPVEQSPQREPDSSTGIGKKGQQPARKRLNFGQTGDSESVPDPQPLGEPPAAPSGVGSNTMAAGGGAPMADNNEGADGVGSSSGNWHCDSTWLGDRVITTSTRTWALPTYNNHLYKQISNGTSGGSTNDNTYFGYSTPWGYFDFNRFHCHFSPRDWQRLINNNWGFRPKRLNFKLFNIQVKEVTQNEGTKTIANNLTSTIQVFTDSEYQLPYVLGSAHQGCLPPFPADVFMIPQYGYLTLNNGSQAVGRSSFYCLEYFPSQMLRTGNNFQFSYTFEDVPFHSSYAHSQSLDRLMNPLIDQYLYYLSRTQTTGGTAGTQTLQFSQAGPSNMANQAKNWLPGPCYRQQRVSTTTSQNNNSNFAWTGATKYHLNGRDSLVNPGVAMATHKDDEDRFFPSSGILIFGKQGAGKDNVDYSNVMLTSEEEIKTTNPVATEEYGVVADNLQQQNTAPQIGTVNSQGALPGMVWQNRDVYLQGPIWAKIPHTDGNFHPSPLMGGFGLKHPPPQILIKNTPVPADPPTTFNQAKLNSFITQYSTGQVSVEIEWELQKENSKRWNPEIQYTSNYYKSTNVDFAVNTEGVYSEPRPIGTRYLTRNL

SEQ ID NO: 232 - protein, 738 aa, Adeno-associated virus
MAADGYLPDWLEDNLSEGIREWWDLKPGAPKPKANQQKQDDGRGLVLPGYKYLGPFNGLDKGEPVNAADAAALEHDKAYDQQLKAGDNPYLRYNHADAEFQERLQEDTSFGGNLGRAVFQAKKRVLEPLGLVEEGAKTAPGKKRPVEPSPQRSPDSSTGIGKKGQQPARKRLNFGQTGDSESVPDPQPIGEPPAAPSGVGSGTMAAGGGAPMADNNEGADGVGSSSGNWHCDSTWLGDRVITTSTRTWALPTYNNHLYKQISNGTSGGSTNDNTYFGYSTPWGYFDFNRFHCHFSPRDWQRLINNNWGFRPKRLNFKLFNIQVKEVTQNEGTKTIANNLTSTIQVFTDSEYQLPYVLGSAHQGCLPPFPADVFMIPQYGYLTLNNGSQAVGRSSFYCLEYFPSQMLRTGNNFEFSYTFEDVPFHSSYAHSQSLDRLMNPLIDQYLYYLSRTQSTGGTAGTQQLLFSQAGPSNMSAQAKNWLPGPCYRQQRVSTTLSQNNNSNFAWTGATKYHLNGRDSLVNPGVAMATHKDDEDRFFPSSGILMFGKQGAGKDNVDYSNVMLTSEEEIKTTNPVATEQYGVVADNLQQQNTAPIVGAVNSQGALPGMVWQNRDVYLQGPIWAKIPHTDGNFHPSPLMGGFGLKHPPPQILIKNTPVPADPPTTFNQAKLNSFITQYSTGQVSVEIEWELQKENSKRWNPEIQYTSNYYKSTNVDFAVNTEGVYSEPRPIGTRYLTRNL

SEQ ID NO: 233 - protein, 738 aa, Adeno-associated virus
MAADGYLPDWLEDNLSEGIREWWDLKPGAPKPKANQQKQDDGRGLVLPGYKYLGPFNGLDKGEPVNAADAAALEHDKAYDQQLKAGDNPYLRYNHADAEFQERLQEDTSFGGNLGRAVFQAKKRVLEPLGLVEEGAKTAPGKKRPVEPSPQRSPDSSTGIGKKGQQPAKKRLNFGQTGDSESVPDPQPIGEPPAGPSGLGSGTMAAGGGAPMADNNEGADGVGSSSGNWHCDSTWLGDRVITTSTRTWALPTYNNHLYKQISNGTSGGSTNDNTYFGYSTPWGYFDFNRFHCHFSPRDWQRLINNNWGFRPKRLNFKLFNIQVKEVTQNEGTKTIANNLTSTIQVFTDSEYQLPYVLGSAHQGCLPPFPADVFMIPQYGYLTLNNGSQAVGRSSFYCLEYFPSQMLRTGNNFEFSYTFEDVPFHSSYAHSQSLDRLMNPLIDQYLYYLSRTQSTGGTAGTQQLLFSQAGPSNMSAQAKNWLPGPCYRQQRVSTTLSQNNNSNFAWTGATKYHLNGRDSLVNPGVAMATHKDDEERFFPSSGVLMFGKQGAGKDNVDYSSVMLTSEEEIKTTNPVATEQYGVVADNLQQQNTAPIVGAVNSQGALPGMVWQNRDVYLQGPIWAKIPHTDGNFHPSPLMGGFGLKHPPPQILIKNTPVPADPPTTFSQAKLASFITQYSTGQVSVEIEWELQKENSKRWNPEIQYTSNYYKSTNVDFAVNTEGTYSEPRPIGTRYLTRNL

SEQ ID NO: 234 - protein, 736 aa, Adeno-associated virus
MAADGYLPDWLEDNLSEGIREWWDLKPGAPKPKANQQKQDDGRGLVLPGYKYLGPFNGLDKGEPVNAADAAALEHDKAYDQQLKAGDNPYLRYNHADAEFQERLQEDTSFGGNLGRAVFQAKKRVLEPLGLVEEGAKTAPGKKRPVEQSPQEPDSSSGIGKTGQQPAKKRLNFGQTGDSESVPDPQPLGEPPAAPSGVGSNTMASGGGAPMADNNEGADGVGNSSGNWHCDSTWLGDRVITTSTRTWALPTYNNHLYKQISNGTSGGSTNDNTYFGYSTPWGYFDFNRFHCHFSPRDWQRLINNNWGFRPKRLNFKLFNIQVKEVTTNEGTKTIANNLTSTVQVFTDSEYQLPYVLGSAHQGCLPPFPADVFMIPQYGYLTLNNGSQAVGRSSFYCLEYFPSQMLRTGNNFQFSYTFEDVPFHSSYAHSQSLDRLMNPLIDQYLYYLSRTQTTGTAGTQTLQFSQAGPSSMANQARNWVPGPCYRQQRVSTTTNQNNNSNFAWTGATKYHLNGRDSLMNPGVAMASHKDDEDRFFPSSGVLIFGKQGAGNDNVDYSQVMITNEEEIKTTNPVATEEYGAVATNNQSANTQAQTGLVHNQGVLPGMVWQNRDVYLQGPIWAKIPHTDGNFHPSPLMGGFGLKHPPPQILIKNTPVPADPPTTFNQAKLNSFITQYSTGQVSVEIEWELQKENSKRWNPEIQYTSNYYKSTNVDFAVNTEGVYSEPRPIGTRYLTRNL

SEQ ID NO: 235 - protein, 737 aa, Adeno-associated virus
MAADGYLPDWLEDNLSEGIREWWDLKPGAPKPKANQQKQDDGRGLVLPGYKYLGPFNGLDKGEPVNAADAAALEHDKAYDQQLKAGDNPYLRYNHADAEFQERLQEDTSFGGNLGRAVFQAKKRVLEPLGLVEEGAKTAPGKKRPVEPSPQRSPDSSTGIGKKGQQPAKKRLNFGQTGDSESVPDPQPLGEPPAAPSGVGSGTMAAGGGAPMADNNEGADGVGNASGNWHCDSTWLGDRVITTSTRTWALPTYNNHLYKQISSQSAGSTNDNTYFGYSTPWGYFDFNRFHCHFSPRDWQRLINNNWGFRPKKLRFKLFNIQVKEVTTNDGVTTIANNLTSTVQVFSDSEYQLPYVLGSAHQGCLPPFPADVFMIPQYGYLTLNNGSQSVGRSSFYCLEYFPSQMLRTGNNFEFSYTFEDVPFHSSYAHSQSLDRLMNPLIDQYLYYLARTQSTTGGTAGNRELQFYQAGPSTMAEQAKNWLPGPCYRQQRVSKTLDQNNNSNFAWTGATKYHLNGRNSLVNPGVAMATHKDDEDRFFPSSGVLIFGKTGAANKTTLENVLMTNEEEIKTTNPVATEEYGVVSSNLQSANTAPQTQTVNSQGALPGMVWQNRDVYLQGPIWAKIPHTDGNFHPSPLMGGFGLKHPPPQILIKNTPVPANPPEVFTPAKFASFITQYSTGQVSVEIEWELQKENSKRWNPEIQYTSNYDKSTNVDFAVDSEGVYSEPRPIGTRYLTRNL

SEQ ID NO: 236 - protein, 735 aa, Adeno-associated virus
MAADGYLPDWLEDNLSEGIREWWDLKPGAPKPKANQQKQDDGRGLVLPGYKYLGPFNGLDKGEPVNAADAAALEHDKAYDQQLKAGDNPYLRYNHADAEFQERLQEDTSFGGNLGRAVFQAKKRVLEPLGLVEEGAKTAPGKKRPVEQSPQEPDSSSGIGKSGQQPAKKRLNFGQTGDSESVPDPQPLGEPPAAPSGVGSNTMASGGGAPMADNNEGADGVGNASGNWHCDSTWLGDRVITTSTRTWALPTYNNHLYKQISSQSGASNDNHYFGYSTPWGYFDFNRFHCHFSPRDWQRLINNNWGFRPKRLNFKLFNIQVKEVTTNDGTTTIANNLTSTVQVFTDSEYQLPYVLGSAHQGCLPPFPADVFMIPQYGYLTLNNGSQAVGRSSFYCLEYFPSQMLRTGNNFTFSYTFEDVPFHSSYAHSQSLDRLMNPLIDQYLYYLSRTQTTSGTAQNRELQFSQAGPSSMANQAKNWLPGPCYRQQRVSKTANDNNNSNFAWTGATKYHLNGRDSLVNPGPAMASHKDDEDKFFPMSGVLIFGKQGAGASNVDLDNVMITDEEEIKTTNPVATEQYGTVATNLQSSNTAPATGTVNSQGALPGMVWQDRDVYLQGPIWAKIPHTDGHFHPSPLMGGFGLKHPPPQILIKNTPVPANPPTTFSPAKFASFITQYSTGQVSVEIEWELQKENSKRWNPEIQYTSNYNKSANVDFTVDTNGVYSEPRPIGTRYLTRNL

SEQ ID NO: 237 - protein, 735 aa, Adeno-associated virus
MAADGYLPDWLEDNLSEGIREWWDLKPGAPQPKANQQHQDDGRGLVLPGYKYLGPFNGLDKGEPVNEADAAALEHDKAYDQQLKAGDNPYLKYNHADAEFQERLQEDTSFGGNLGRAVFQAKKRVLEPLGLVEEAAKTAPGKKRPVEQSPQEPDSSSGIGKSGQQPARKRLNFGQTGDSESVPDPQPLGEPPAAPSGVGSNTMASGGGAPMADNNEGADGVGNSSGNWHCDSTWLGDRVITTSTRTWALPTYNNHLYKQISSQSGASNDNHYFGYSTPWGYFDFNRFHCHFSPRDWQRLINNNWGFRPKKLNFKLFNIQVKEVTQNDGTTTIANNLTSTVQVFTDSEYQLPYVLGSAHQGCLPPFPADVFMIPQYGYLTLNNGSQAVGRSSFYCLEYFPSQMLRTGNNFTFSYTFEDVPFHSSYAHSQSLDRLMNPLIDQYLYYLSRTQTTSGTTQQSRLQFSQAGPSSMAQQAKNWLPGPCYRQQRVSKTANDNNNSNFAWTGATKYHLNGRDSLVNPGPAMASHKDDEEKFFPMHGVLIFGKQGTGASNVDLDNVMITDEEEIRTTNPVATEQYGTVATNLQSSNTAPATGTVNSQGALPGMVWQDRDVYLQGPIWAKIPHTDGHFHPSPLMGGFGLKHPPPQILIKNTPVPANPPTTFSPAKFASFITQYSTGQVSVEIEWELQKENSKRWNPEIQYTSNYNKSVNVDFTVDTNGVYSEPRPIGTRYLTRNL

SEQ ID NO: 238 - protein, 7 aa, synthetic construct
RGDRGQI

SEQ ID NO: 239 - protein, 7 aa, synthetic construct
RGDRSVV

SEQ ID NO: 240 - protein, 7 aa, synthetic construct
RGDRGNQ

SEQ ID NO: 241 - protein, 7 aa, synthetic construct
RGDRNVV

SEQ ID NO: 242 - protein, 7 aa, synthetic construct
RGDHVNL

SEQ ID NO: 243 - protein, 7 aa, synthetic construct
RGDVRSI

SEQ ID NO: 244 - protein, 7 aa, synthetic construct
RGDRGVV

SEQ ID NO: 245 - protein, 7 aa, synthetic construct
RGDRGSV

SEQ ID NO: 246 - protein, 7 aa, synthetic construct
RGDKSSI

SEQ ID NO: 247 - protein, 7 aa, synthetic construct
RGDRGVS

SEQ ID NO: 248 - protein, 7 aa, synthetic construct
RGDRQGI

SEQ ID NO: 249 - protein, 7 aa, synthetic construct
RGDHQNL

SEQ ID NO: 250 - protein, 7 aa, synthetic construct
RGDRGTI

SEQ ID NO: 251 - protein, 7 aa, synthetic construct
RGDRSQT

SEQ ID NO: 252 - protein, 7 aa, synthetic construct
RGDRTVV

SEQ ID NO: 253 - protein, 7 aa, synthetic construct
RGDVKGI

SEQ ID NO: 254 - protein, 7 aa, synthetic construct
RGDRQTI

SEQ ID NO: 255 - protein, 7 aa, synthetic construct
RGDTRVI

SEQ ID NO: 256 - protein, 7 aa, synthetic construct
RGDREHI

SEQ ID NO: 257 - protein, 7 aa, synthetic construct
RGDIRVI

SEQ ID NO: 258 - protein, 7 aa, synthetic construct
RGDQVKL

SEQ ID NO: 259 - protein, 7 aa, synthetic construct
RGDRGFV

SEQ ID NO: 260 - protein, 7 aa, synthetic construct
RGDRNAV

SEQ ID NO: 261 - protein, 7 aa, synthetic construct
RGDHNQL

SEQ ID NO: 262 - protein, 7 aa, synthetic construct
RGDQVRI

SEQ ID NO: 263 - protein, 7 aa, synthetic construct
RGDISRT

SEQ ID NO: 264 - protein, 7 aa, synthetic construct
RGDAQNL

SEQ ID NO: 265 - protein, 7 aa, synthetic construct
RGDKLTV

SEQ ID NO: 266 - protein, 7 aa, synthetic construct
RGDQSHV

SEQ ID NO: 267 - protein, 7 aa, synthetic construct
RGDQTRN

SEQ ID NO: 268 - protein, 7 aa, synthetic construct
RGDQIRI

SEQ ID NO: 269 - protein, 7 aa, synthetic construct
RGDGTKL

SEQ ID NO: 270 - protein, 7 aa, synthetic construct
RGDTRNI

SEQ ID NO: 271 - protein, 7 aa, synthetic construct
RGDFSTA

SEQ ID NO: 272 - protein, 7 aa, synthetic construct
RGDFTRN

SEQ ID NO: 273 - protein, 7 aa, synthetic construct
RGDRSQQ

SEQ ID NO: 274 - protein, 7 aa, synthetic construct
RGDHTQV

SEQ ID NO: 275 - protein, 7 aa, synthetic construct
RGDISVV

SEQ ID NO: 276 - protein, 7 aa, synthetic construct
RGDRSTQ

SEQ ID NO: 277 - protein, 7 aa, synthetic construct
RGDRTAV

SEQ ID NO: 278 - protein, 7 aa, synthetic construct
RGDIGGV

SEQ ID NO: 279 - protein, 7 aa, synthetic construct
RGDVRFI

SEQ ID NO: 280 - protein, 7 aa, synthetic construct
RGDITHI

SEQ ID NO: 281 - protein, 7 aa, synthetic construct
RGDKGFI

SEQ ID NO: 282 - protein, 7 aa, synthetic construct
RGDKSGI

SEQ ID NO: 283 - protein, 7 aa, synthetic construct
RGDRNSF

SEQ ID NO: 284 - protein, 7 aa, synthetic construct
RGDVRNV

SEQ ID NO: 285 - protein, 7 aa, synthetic construct
RGDHEQL

SEQ ID NO: 286 - protein, 7 aa, synthetic construct
RGDAVRI

SEQ ID NO: 287 - protein, 7 aa, synthetic construct
RGDERFI

SEQ ID NO: 288 - protein, 7 aa, synthetic construct
RGDLKGA

SEQ ID NO: 289 - protein, 7 aa, synthetic construct
RGDQHFN

SEQ ID NO: 290 - protein, 7 aa, synthetic construct
RGDRGIA

SEQ ID NO: 291 - protein, 7 aa, synthetic construct
RGDTLTS

SEQ ID NO: 292 - protein, 7 aa, synthetic construct
RGDRSFV

SEQ ID NO: 293 - protein, 7 aa, synthetic construct
RGDRVTI

SEQ ID NO: 294 - protein, 7 aa, synthetic construct
RGDHHGF

SEQ ID NO: 295 - protein, 7 aa, synthetic construct
RGDARNL

SEQ ID NO: 296 - protein, 7 aa, synthetic construct
RGDKLSV

SEQ ID NO: 297 - protein, 7 aa, synthetic construct
RGDGVKF

SEQ ID NO: 298 - protein, 7 aa, synthetic construct
RGDRSAI

SEQ ID NO: 299 - protein, 7 aa, synthetic construct
RGDQTKQ

SEQ ID NO: 300 - protein, 7 aa, synthetic construct
RGDRLVV

SEQ ID NO: 301 - protein, 7 aa, synthetic construct
RGDRNLV

SEQ ID NO: 302 - protein, 7 aa, synthetic construct
RGDRSLV

SEQ ID NO: 303 - protein, 7 aa, synthetic construct
RGDVRVI

SEQ ID NO: 304 - protein, 7 aa, synthetic construct
RGDQRFV

SEQ ID NO: 305 - protein, 7 aa, synthetic construct
RGDSRNI

SEQ ID NO: 306 - protein, 7 aa, synthetic construct
RGDGLKF

SEQ ID NO: 307 - protein, 7 aa, synthetic construct
RGDTRGK

SEQ ID NO: 308 - protein, 7 aa, synthetic construct
RGDAATK

SEQ ID NO: 309 - protein, 7 aa, synthetic construct
RGDIHTI

SEQ ID NO: 310 - protein, 7 aa, synthetic construct
RGDQFRV

SEQ ID NO: 311 - protein, 7 aa, synthetic construct
RGDRGGS

SEQ ID NO: 312 - protein, 7 aa, synthetic construct
RGDSIKV

SEQ ID NO: 313 - protein, 7 aa, synthetic construct
RGDVRSV

SEQ ID NO: 314 - protein, 7 aa, synthetic construct
RGDQGFK

SEQ ID NO: 315 - protein, 7 aa, synthetic construct
RGDVRTF

SEQ ID NO: 316 - protein, 7 aa, synthetic construct
RGDIEHR

SEQ ID NO: 317 - protein, 7 aa, synthetic construct
RGDRLIV

SEQ ID NO: 318 - protein, 7 aa, synthetic construct
RGDKGIT

SEQ ID NO: 319 - protein, 7 aa, synthetic construct
RGDQSHI

SEQ ID NO: 320 - protein, 7 aa, synthetic construct
RGDQTKF

SEQ ID NO: 321 - protein, 7 aa, synthetic construct
RGDRGGG

SEQ ID NO: 322 - protein, 7 aa, synthetic construct
RGDRGLI

SEQ ID NO: 323 - protein, 7 aa, synthetic construct
RGDRIVV

SEQ ID NO: 324 - protein, 7 aa, synthetic construct
RGDRNSL

SEQ ID NO: 325 - protein, 7 aa, synthetic construct
RGDRVFI

SEQ ID NO: 326 - protein, 7 aa, synthetic construct
RGDSRKL

SEQ ID NO: 327 - protein, 7 aa, synthetic construct
RGDSRNL

SEQ ID NO: 328 - protein, 7 aa, synthetic construct
RGDTRNV

SEQ ID NO: 329 - protein, 7 aa, synthetic construct
RGDIKGN

SEQ ID NO: 330 - protein, 7 aa, synthetic construct
RGDRTFV

SEQ ID NO: 331 - protein, 7 aa, synthetic construct
RGDARTI

SEQ ID NO: 332 - protein, 7 aa, synthetic construct
RGDSNQV

SEQ ID NO: 333 - protein, 7 aa, synthetic construct
RGDSRTL

SEQ ID NO: 334 - protein, 7 aa, synthetic construct
RGDTRII

SEQ ID NO: 335 - protein, 7 aa, synthetic construct
RGDRGVQ

SEQ ID NO: 336 - protein, 7 aa, synthetic construct
RGDSFKV

SEQ ID NO: 337 - protein, 7 aa, synthetic construct
RGDVKGL

SEQ ID NO: 338 - protein, 7 aa, synthetic construct
RGDIARV

SEQ ID NO: 339 - protein, 7 aa, synthetic construct
RGDQARN

SEQ ID NO: 340 - protein, 7 aa, synthetic construct
RGDQIKI

SEQ ID NO: 341 - protein, 7 aa, synthetic construct
RGDQRTV

SEQ ID NO: 342 - protein, 7 aa, synthetic construct
RGDSQHL

SEQ ID NO: 343 - protein, 7 aa, synthetic construct
RGDTRTI

SEQ ID NO: 344 - protein, 7 aa, synthetic construct
RGDVRNT

SEQ ID NO: 345 - protein, 7 aa, synthetic construct
RGDGRNE

SEQ ID NO: 346 - protein, 7 aa, synthetic construct
RGDKNFI

SEQ ID NO: 347 - protein, 7 aa, synthetic construct
RGDLSTQ

SEQ ID NO: 348 - protein, 7 aa, synthetic construct
RGDTRVS

SEQ ID NO: 349 - protein, 7 aa, synthetic construct
RGDVRLI

SEQ ID NO: 350 - protein, 7 aa, synthetic construct
RGDVRNI

SEQ ID NO: 351 - protein, 7 aa, synthetic construct
RGDVSHI

SEQ ID NO: 352 - protein, 7 aa, synthetic construct
RGDGKSL

SEQ ID NO: 353 - protein, 7 aa, synthetic construct
RGDLRGS

SEQ ID NO: 354 - protein, 7 aa, synthetic construct
RGDRLGI

SEQ ID NO: 355 - protein, 7 aa, synthetic construct
RGDRVGI

SEQ ID NO: 356 - protein, 7 aa, synthetic construct
RGDHVNF

SEQ ID NO: 357 - protein, 7 aa, synthetic construct
RGDIHHQ

SEQ ID NO: 358 - protein, 7 aa, synthetic construct
RGDRGIQ

SEQ ID NO: 359 - protein, 7 aa, synthetic construct
RGDVRLV

SEQ ID NO: 360 - protein, 7 aa, synthetic construct
RGDQGRI

SEQ ID NO: 361 - protein, 7 aa, synthetic construct
RGDQRQT

SEQ ID NO: 362 - protein, 7 aa, synthetic construct
RGDQRTI

SEQ ID NO: 363 - protein, 7 aa, synthetic construct
RGDRLGT

SEQ ID NO: 364 - protein, 7 aa, synthetic construct
RGDRSVQ

SEQ ID NO: 365 - protein, 7 aa, synthetic construct
RGDSVRI

SEQ ID NO: 366 - protein, 7 aa, synthetic construct
RGDVRVV

SEQ ID NO: 367 - protein, 7 aa, synthetic construct
RGDGRGF

SEQ ID NO: 368 - protein, 7 aa, synthetic construct
RGDHGLV

SEQ ID NO: 369 - protein, 7 aa, synthetic construct
RGDIRVV

SEQ ID NO: 370 - protein, 7 aa, synthetic construct
RGDRSFS

SEQ ID NO: 371 - protein, 7 aa, synthetic construct
RGDRSLI

SEQ ID NO: 372 - protein, 7 aa, synthetic construct
RGDHSSI

SEQ ID NO: 373 - protein, 7 aa, synthetic construct
RGDIAHV

SEQ ID NO: 374 - protein, 7 aa, synthetic construct
RGDISGK

SEQ ID NO: 375 - protein, 7 aa, synthetic construct
RGDQGTK

SEQ ID NO: 376 - protein, 7 aa, synthetic construct
RGDQKQQ

SEQ ID NO: 377 - protein, 7 aa, synthetic construct
RGDQSRQ

SEQ ID NO: 378 - protein, 7 aa, synthetic construct
RGDRGFS

SEQ ID NO: 379 - protein, 7 aa, synthetic construct
RGDRTFI

SEQ ID NO: 380 - protein, 7 aa, synthetic construct
RGDHGAQ

SEQ ID NO: 381 - protein, 7 aa, synthetic construct
RGDASKV

SEQ ID NO: 382 - protein, 7 aa, synthetic construct
RGDRGGV

SEQ ID NO: 383 - protein, 7 aa, synthetic construct
RGDRSHI

SEQ ID NO: 384 - protein, 7 aa, synthetic construct
RGDRSLQ

SEQ ID NO: 385 - protein, 7 aa, synthetic construct
RGDVKHI

SEQ ID NO: 386 - protein, 7 aa, synthetic construct
RGDHGQL

SEQ ID NO: 387 - protein, 7 aa, synthetic construct
RGDIHIR

SEQ ID NO: 388 - protein, 7 aa, synthetic construct
RGDIKTI

SEQ ID NO: 389 - protein, 7 aa, synthetic construct
RGDRSFI

SEQ ID NO: 390 - protein, 7 aa, synthetic construct
RGDRTSF

SEQ ID NO: 391 - protein, 7 aa, synthetic construct
RGDVEVR

SEQ ID NO: 392 - protein, 7 aa, synthetic construct
RGDVKGN

SEQ ID NO: 393 - protein, 7 aa, synthetic construct
RGDFGVI

SEQ ID NO: 394 - protein, 7 aa, synthetic construct
RGDISKT

SEQ ID NO: 395 - protein, 7 aa, synthetic construct
RGDKGVI

SEQ ID NO: 396 - protein, 7 aa, synthetic construct
RGDKNFV

SEQ ID NO: 397 - protein, 7 aa, synthetic construct
RGDLTHA

SEQ ID NO: 398 - protein, 7 aa, synthetic construct
RGDRISI

SEQ ID NO: 399 - protein, 7 aa, synthetic construct
RGDRLFQ

SEQ ID NO: 400 - protein, 7 aa, synthetic construct
RGDRLSL

SEQ ID NO: 401 - protein, 7 aa, synthetic construct
RGDRSSI

SEQ ID NO: 402 - protein, 7 aa, synthetic construct
RGDTRFV

SEQ ID NO: 403 - protein, 7 aa, synthetic construct
RGDAAKQ

SEQ ID NO: 404 - protein, 7 aa, synthetic construct
RGDHSFV

SEQ ID NO: 405 - protein, 7 aa, synthetic construct
RGDRGVT

SEQ ID NO: 406 - protein, 7 aa, synthetic construct
RGDAHNK

SEQ ID NO: 407 - protein, 7 aa, synthetic construct
RGDGIKV

SEQ ID NO: 408 - protein, 7 aa, synthetic construct
RGDKLGH

SEQ ID NO: 409 - protein, 7 aa, synthetic construct
RGDREGF

SEQ ID NO: 410 - protein, 7 aa, synthetic construct
RGDFDTK

SEQ ID NO: 411 - protein, 7 aa, synthetic construct
RGDFSNQ

SEQ ID NO: 412 - protein, 7 aa, synthetic construct
RGDHGTL

SEQ ID NO: 413 - protein, 7 aa, synthetic construct
RGDKSEI

SEQ ID NO: 414 - protein, 7 aa, synthetic construct
RGDASTK

SEQ ID NO: 415 - protein, 7 aa, synthetic construct
RGDRGSI

SEQ ID NO: 416 - protein, 7 aa, synthetic construct
RGDSRTF

SEQ ID NO: 417 - protein, 7 aa, synthetic construct
RGDFRHK

SEQ ID NO: 418 - protein, 7 aa, synthetic construct
RGDRGNL

SEQ ID NO: 419 - protein, 7 aa, synthetic construct
RGDRSTV

SEQ ID NO: 420 - protein, 7 aa, synthetic construct
RGDRVSI

SEQ ID NO: 421 - protein, 7 aa, synthetic construct
RGDFRVI

SEQ ID NO: 422 - protein, 7 aa, synthetic construct
RGDGAKN

SEQ ID NO: 423 - protein, 7 aa, synthetic construct
RGDHTGK

SEQ ID NO: 424 - protein, 7 aa, synthetic construct
RGDIHLI

SEQ ID NO: 425 - protein, 7 aa, synthetic construct
RGDQKKT

SEQ ID NO: 426 - protein, 7 aa, synthetic construct
RGDRGNV

SEQ ID NO: 427 - protein, 7 aa, synthetic construct
RGDRKTI

SEQ ID NO: 428 - protein, 7 aa, synthetic construct
RGDRSSV

SEQ ID NO: 429 - protein, 7 aa, synthetic construct
RGDVKFN

SEQ ID NO: 430 - protein, 7 aa, synthetic construct
RGDVRFV

SEQ ID NO: 431 - protein, 7 aa, synthetic construct
RGDFGFV

SEQ ID NO: 432 - protein, 7 aa, synthetic construct
RGDHGVI

SEQ ID NO: 433 - protein, 7 aa, synthetic construct
RGDIRIV

SEQ ID NO: 434 - protein, 7 aa, synthetic construct
RGDRSQI

SEQ ID NO: 435 - protein, 7 aa, synthetic construct
RGDRSVI

SEQ ID NO: 436 - protein, 7 aa, synthetic construct
RGDSRAI

SEQ ID NO: 437 - protein, 7 aa, synthetic construct
RGDVLHI

SEQ ID NO: 438 - protein, 7 aa, synthetic construct
RGDVRVQ

SEQ ID NO: 439 - protein, 7 aa, synthetic construct
RGDFGVK

SEQ ID NO: 440 - protein, 7 aa, synthetic construct
RGDHGVT

SEQ ID NO: 441 - protein, 7 aa, synthetic construct
RGDHSQL

SEQ ID NO: 442 - protein, 7 aa, synthetic construct
RGDHSSF

SEQ ID NO: 443 - protein, 7 aa, synthetic construct
RGDIGKN

SEQ ID NO: 444 - protein, 7 aa, synthetic construct
RGDLVGR

SEQ ID NO: 445 - protein, 7 aa, synthetic construct
RGDQREI

SEQ ID NO: 446 - protein, 7 aa, synthetic construct
RGDQTRI

SEQ ID NO: 447 - protein, 7 aa, synthetic construct
RGDVSQR

SEQ ID NO: 448 - protein, 7 aa, synthetic construct
RGDIHAI

SEQ ID NO: 449 - protein, 7 aa, synthetic construct
RGDATKI

SEQ ID NO: 450 - protein, 7 aa, synthetic construct
RGDRGTN

SEQ ID NO: 451 - protein, 7 aa, synthetic construct
RGDRLGS

SEQ ID NO: 452 - protein, 7 aa, synthetic construct
RGDRSSQ

SEQ ID NO: 453 - protein, 7 aa, synthetic construct
RGDSVRV

SEQ ID NO: 454 - protein, 7 aa, synthetic construct
RGDGIRV

SEQ ID NO: 455 - protein, 7 aa, synthetic construct
RGDHGFI

SEQ ID NO: 456 - protein, 7 aa, synthetic construct
RGDIAKV

SEQ ID NO: 457 - protein, 7 aa, synthetic construct
RGDIHKV

SEQ ID NO: 458 - protein, 7 aa, synthetic construct
RGDISKK

SEQ ID NO: 459 - protein, 7 aa, synthetic construct
RGDISQR

SEQ ID NO: 460 - protein, 7 aa, synthetic construct
RGDKNIL

SEQ ID NO: 461 - protein, 7 aa, synthetic construct
RGDQFKV

SEQ ID NO: 462 - protein, 7 aa, synthetic construct
RGDQGKV

SEQ ID NO: 463 - protein, 7 aa, synthetic construct
RGDRGAI

SEQ ID NO: 464 - protein, 7 aa, synthetic construct
RGDRGGF

SEQ ID NO: 465 - protein, 7 aa, synthetic construct
RGDTHSI

SEQ ID NO: 466 - protein, 7 aa, synthetic construct
RGDIRNV

SEQ ID NO: 467 - protein, 7 aa, synthetic construct
RGDKSTI

SEQ ID NO: 468 - protein, 7 aa, synthetic construct
RGDLVIT

SEQ ID NO: 469 - protein, 7 aa, synthetic construct
RGDNRGF

SEQ ID NO: 470 - protein, 7 aa, synthetic construct
RGDQQRV

SEQ ID NO: 471 - protein, 7 aa, synthetic construct
RGDQVNI

SEQ ID NO: 472 - protein, 7 aa, synthetic construct
RGDRNSI

SEQ ID NO: 473 - protein, 7 aa, synthetic construct
RGDFFQK

SEQ ID NO: 474 - protein, 7 aa, synthetic construct
RGDISSI

SEQ ID NO: 475 - protein, 7 aa, synthetic construct
RGDLVLT

SEQ ID NO: 476 - protein, 7 aa, synthetic construct
RGDRALT

SEQ ID NO: 477 - protein, 7 aa, synthetic construct
RGDRANN

SEQ ID NO: 478 - protein, 7 aa, synthetic construct
RGDRATV

SEQ ID NO: 479 - protein, 7 aa, synthetic construct
RGDTSFH

SEQ ID NO: 480 - protein, 7 aa, synthetic construct
RGDVSTK

SEQ ID NO: 481 - protein, 7 aa, synthetic construct
RGDGRVI

SEQ ID NO: 482 - protein, 7 aa, synthetic construct
RGDHAGK

SEQ ID NO: 483 - protein, 7 aa, synthetic construct
RGDARGF

SEQ ID NO: 484 - protein, 7 aa, synthetic construct
RGDKLSI

SEQ ID NO: 485 - protein, 7 aa, synthetic construct
RGDQKTA

SEQ ID NO: 486 - protein, 7 aa, synthetic construct
RGDRVVI

SEQ ID NO: 487 - protein, 7 aa, synthetic construct
RGDVKII

SEQ ID NO: 488 - protein, 7 aa, synthetic construct
RGDVKNF

SEQ ID NO: 489 - protein, 7 aa, synthetic construct
RGDFGQN

SEQ ID NO: 490 - protein, 7 aa, synthetic construct
RGDGHQL

SEQ ID NO: 491 - protein, 7 aa, synthetic construct
RGDGVKT

SEQ ID NO: 492 - protein, 7 aa, synthetic construct
RGDHSTF

SEQ ID NO: 493 - protein, 7 aa, synthetic construct
RGDIHQI

SEQ ID NO: 494 - protein, 7 aa, synthetic construct
RGDQNKL

SEQ ID NO: 495 - protein, 7 aa, synthetic construct
RGDRHFV

SEQ ID NO: 496 - protein, 7 aa, synthetic construct
RGDRTDK

SEQ ID NO: 497 - protein, 7 aa, synthetic construct
RGDSQKL

SEQ ID NO: 498 - protein, 7 aa, synthetic construct
RGDSVRF

SEQ ID NO: 499 - protein, 7 aa, synthetic construct
RGDTRSL

SEQ ID NO: 500 - protein, 7 aa, synthetic construct
RGDVGSR

SEQ ID NO: 501 - protein, 7 aa, synthetic construct
RGDVRNF

SEQ ID NO: 502 - protein, 7 aa, synthetic construct
RGDAHKL

SEQ ID NO: 503 - protein, 7 aa, synthetic construct
RGDGKSF

SEQ ID NO: 504 - protein, 7 aa, synthetic construct
RGDHTFQ

SEQ ID NO: 505 - protein, 7 aa, synthetic construct
RGDQSKV

SEQ ID NO: 506 - protein, 7 aa, synthetic construct
RGDRSEF

SEQ ID NO: 507 - protein, 7 aa, synthetic construct
RGDRSGV

SEQ ID NO: 508 - protein, 7 aa, synthetic construct
RGDSRSL

SEQ ID NO: 509 - protein, 7 aa, synthetic construct
RGDFSHA

SEQ ID NO: 510 - protein, 7 aa, synthetic construct
RGDGRGI

SEQ ID NO: 511 - protein, 7 aa, synthetic construct
RGDHEKL

SEQ ID NO: 512 - protein, 7 aa, synthetic construct
RGDHHNL

SEQ ID NO: 513 - protein, 7 aa, synthetic construct
RGDHTNL

SEQ ID NO: 514 - protein, 7 aa, synthetic construct
RGDIGTK

SEQ ID NO: 515 - protein, 7 aa, synthetic construct
RGDIRLV

SEQ ID NO: 516 - protein, 7 aa, synthetic construct
RGDNAHV

SEQ ID NO: 517 - protein, 7 aa, synthetic construct
RGDRNFF

SEQ ID NO: 518 - protein, 7 aa, synthetic construct
RGDRNSH

SEQ ID NO: 519 - protein, 7 aa, synthetic construct
RGDRSTI

SEQ ID NO: 520 - protein, 7 aa, synthetic construct
RGDVHGI

SEQ ID NO: 521 - protein, 7 aa, synthetic construct
RGDVSGR

SEQ ID NO: 522 - protein, 7 aa, synthetic construct
RGDFSHK

SEQ ID NO: 523 - protein, 7 aa, synthetic construct
RGDGGKV

SEQ ID NO: 524 - protein, 7 aa, synthetic construct
RGDHQFI

SEQ ID NO: 525 - protein, 7 aa, synthetic construct
RGDHVKL

SEQ ID NO: 526 - protein, 7 aa, synthetic construct
RGDKNHI

SEQ ID NO: 527 - protein, 7 aa, synthetic construct
RGDRVFV

SEQ ID NO: 528 - protein, 7 aa, synthetic construct
RGDDVNF

SEQ ID NO: 529 - protein, 7 aa, synthetic construct
RGDAAKL

SEQ ID NO: 530 - protein, 7 aa, synthetic construct
RGDHHDG

SEQ ID NO: 531 - protein, 7 aa, synthetic construct
RGDAASF

SEQ ID NO: 532 - protein, 7 aa, synthetic construct
RGDHSTI

SEQ ID NO: 533 - protein, 7 aa, synthetic construct
RGDITRI

SEQ ID NO: 534 - protein, 7 aa, synthetic construct
RGDQTKI

SEQ ID NO: 535 - protein, 7 aa, synthetic construct
RGDRGGT

SEQ ID NO: 536 - protein, 7 aa, synthetic construct
RGDRGIR

SEQ ID NO: 537 - protein, 7 aa, synthetic construct
RGDRLTF

SEQ ID NO: 538 - protein, 7 aa, synthetic construct
RGDTKIV

SEQ ID NO: 539 - protein, 7 aa, synthetic construct
RGDVLKL

SEQ ID NO: 540 - protein, 7 aa, synthetic construct
RGDHSQF

SEQ ID NO: 541 - protein, 7 aa, synthetic construct
RGDKGTK

SEQ ID NO: 542 - protein, 7 aa, synthetic construct
RGDQVRL

SEQ ID NO: 543 - protein, 7 aa, synthetic construct
RGDRAFQ

SEQ ID NO: 544 - protein, 7 aa, synthetic construct
RGDRLTV

SEQ ID NO: 545 - protein, 7 aa, synthetic construct
RGDRVQI

SEQ ID NO: 546 - protein, 7 aa, synthetic construct
RGDTRVT

SEQ ID NO: 547 - protein, 7 aa, synthetic construct
RGDVRNL

SEQ ID NO: 548 - protein, 7 aa, synthetic construct
RGDFGQV

SEQ ID NO: 549 - protein, 7 aa, synthetic construct
RGDFIHN

SEQ ID NO: 550 - protein, 7 aa, synthetic construct
RGDFQNR

SEQ ID NO: 551 - protein, 7 aa, synthetic construct
RGDILVV

SEQ ID NO: 552 - protein, 7 aa, synthetic construct
RGDIRGV

SEQ ID NO: 553 - protein, 7 aa, synthetic construct
RGDKGTI

SEQ ID NO: 554 - protein, 7 aa, synthetic construct
RGDASNK

SEQ ID NO: 555 - protein, 7 aa, synthetic construct
RGDLKLV

SEQ ID NO: 556 - protein, 7 aa, synthetic construct
RGDLTRT

SEQ ID NO: 557 - protein, 7 aa, synthetic construct
RGDNAHI

SEQ ID NO: 558 - protein, 7 aa, synthetic construct
RGDQRQI

SEQ ID NO: 559 - protein, 7 aa, synthetic construct
RGDQSKS

SEQ ID NO: 560 - protein, 7 aa, synthetic construct
RGDRLFV

SEQ ID NO: 561 - protein, 7 aa, synthetic construct
RGDTRTK

SEQ ID NO: 562 - protein, 7 aa, synthetic construct
RGDVHHI

SEQ ID NO: 563 - protein, 7 aa, synthetic construct
RGDHGFV

SEQ ID NO: 564 - protein, 7 aa, synthetic construct
RGDISGI

SEQ ID NO: 565 - protein, 7 aa, synthetic construct
RGDLQHN

SEQ ID NO: 566 - protein, 7 aa, synthetic construct
RGDLVSR

SEQ ID NO: 567 - protein, 7 aa, synthetic construct
RGDATRV

SEQ ID NO: 568 - protein, 7 aa, synthetic construct
RGDRASV

SEQ ID NO: 569 - protein, 7 aa, synthetic construct
RGDRGNI

SEQ ID NO: 570 - protein, 7 aa, synthetic construct
RGDRNLI

SEQ ID NO: 571 - protein, 7 aa, synthetic construct
RGDRQII

SEQ ID NO: 572 - protein, 7 aa, synthetic construct
RGDRTVK

SEQ ID NO: 573 - protein, 7 aa, synthetic construct
RGDSIKL

SEQ ID NO: 574 - protein, 7 aa, synthetic construct
RGDVKVF

SEQ ID NO: 575 - protein, 7 aa, synthetic construct
RGDVRII

SEQ ID NO: 576 - protein, 7 aa, synthetic construct
RGDGGKI

SEQ ID NO: 577 - protein, 7 aa, synthetic construct
RGDARNI

SEQ ID NO: 578 - protein, 7 aa, synthetic construct
RGDLGGK

SEQ ID NO: 579 - protein, 7 aa, synthetic construct
RGDASRK

SEQ ID NO: 580 - protein, 7 aa, synthetic construct
RGDQGSK

SEQ ID NO: 581 - protein, 7 aa, synthetic construct
RGDQSRI

SEQ ID NO: 582 - protein, 7 aa, synthetic construct
RGDRSVT

SEQ ID NO: 583 - protein, 7 aa, synthetic construct
RGDRTLV

SEQ ID NO: 584 - protein, 7 aa, synthetic construct
RGDTKSL

SEQ ID NO: 585 - protein, 7 aa, synthetic construct
RGDVAGI

SEQ ID NO: 586 - protein, 7 aa, synthetic construct
RGDHGGT

SEQ ID NO: 587 - protein, 7 aa, synthetic construct
RGDALRI

SEQ ID NO: 588 - protein, 7 aa, synthetic construct
RGDHSVL

SEQ ID NO: 589 - protein, 7 aa, synthetic construct
RGDIHNK

SEQ ID NO: 590 - protein, 7 aa, synthetic construct
RGDKGIV

SEQ ID NO: 591 - protein, 7 aa, synthetic construct
RGDRDGE

SEQ ID NO: 592 - protein, 7 aa, synthetic construct
RGDRGHI

SEQ ID NO: 593 - protein, 7 aa, synthetic construct
RGDRGKL

SEQ ID NO: 594 - protein, 7 aa, synthetic construct
RGDVKTF

SEQ ID NO: 595 - protein, 7 aa, synthetic construct
RGDFRVQ

SEQ ID NO: 596 - protein, 7 aa, synthetic construct
RGDGVKI

SEQ ID NO: 597 - protein, 7 aa, synthetic construct
RGDHQDR

SEQ ID NO: 598 - protein, 7 aa, synthetic construct
RGDHSVF

SEQ ID NO: 599 - protein, 7 aa, synthetic construct
RGDIAGK

SEQ ID NO: 600 - protein, 7 aa, synthetic construct
RGDKNGI

SEQ ID NO: 601 - protein, 7 aa, synthetic construct
RGDLFGI

SEQ ID NO: 602 - protein, 7 aa, synthetic construct
RGDLTTS

SEQ ID NO: 603 - protein, 7 aa, synthetic construct
RGDAVNL

SEQ ID NO: 604 - protein, 7 aa, synthetic construct
RGDQRFI

SEQ ID NO: 605 - protein, 7 aa, synthetic construct
RGDQTQV

SEQ ID NO: 606 - protein, 7 aa, synthetic construct
RGDRKLI

SEQ ID NO: 607 - protein, 7 aa, synthetic construct
RGDRLSI

SEQ ID NO: 608 - protein, 7 aa, synthetic construct
RGDRSLK

SEQ ID NO: 609 - protein, 7 aa, synthetic construct
RGDRTGF

SEQ ID NO: 610 - protein, 7 aa, synthetic construct
RGDVSRI

SEQ ID NO: 611 - protein, 7 aa, synthetic construct
RGDVSSR

SEQ ID NO: 612 - protein, 7 aa, synthetic construct
RGDGSHE

SEQ ID NO: 613 - protein, 7 aa, synthetic construct
RGDISQV

SEQ ID NO: 614 - protein, 7 aa, synthetic construct
RGDKKNL

SEQ ID NO: 615 - protein, 7 aa, synthetic construct
RGDKNLI

SEQ ID NO: 616 - protein, 7 aa, synthetic construct
RGDKNSQ

SEQ ID NO: 617 - protein, 7 aa, synthetic construct
RGDKTHV

SEQ ID NO: 618 - protein, 7 aa, synthetic construct
RGDLKAV

SEQ ID NO: 619 - protein, 7 aa, synthetic construct
RGDNGFK

SEQ ID NO: 620 - protein, 7 aa, synthetic construct
RGDRDVF

SEQ ID NO: 621 - protein, 7 aa, synthetic construct
RGDRNLE

SEQ ID NO: 622 - protein, 7 aa, synthetic construct
RGDRQFV

SEQ ID NO: 623 - protein, 7 aa, synthetic construct
RGDSSKV

SEQ ID NO: 624 - protein, 7 aa, synthetic construct
RGDVRGF

SEQ ID NO: 625 - protein, 7 aa, synthetic construct
RGDVRHF

SEQ ID NO: 626 - protein, 7 aa, synthetic construct
RGDGQTI

SEQ ID NO: 627 - protein, 7 aa, synthetic construct
RGDGRGL

SEQ ID NO: 628 - protein, 7 aa, synthetic construct
RGDHGGV

SEQ ID NO: 629 - protein, 7 aa, synthetic construct
RGDIANR

SEQ ID NO: 630 - protein, 7 aa, synthetic construct
RGDIRFK

SEQ ID NO: 631 - protein, 7 aa, synthetic construct
RGDISHK

SEQ ID NO: 632 - protein, 7 aa, synthetic construct
RGDKGQT

SEQ ID NO: 633 - protein, 7 aa, synthetic construct
RGDLGHS

SEQ ID NO: 634 - protein, 7 aa, synthetic construct
RGDLRST

SEQ ID NO: 635 - protein, 7 aa, synthetic construct
RGDQHRI

SEQ ID NO: 636 - protein, 7 aa, synthetic construct
RGDQLSI

SEQ ID NO: 637 - protein, 7 aa, synthetic construct
RGDRGIN

SEQ ID NO: 638 - protein, 7 aa, synthetic construct
RGDRITL

SEQ ID NO: 639 - protein, 7 aa, synthetic construct
RGDRTGG

SEQ ID NO: 640 - protein, 7 aa, synthetic construct
RGDRVNL

SEQ ID NO: 641 - protein, 7 aa, synthetic construct
RGDSLHF

SEQ ID NO: 642 - protein, 7 aa, synthetic construct
RGDFEHS

SEQ ID NO: 643 - protein, 7 aa, synthetic construct
RGDFRGN

SEQ ID NO: 644 - protein, 7 aa, synthetic construct
RGDFSKQ

SEQ ID NO: 645 - protein, 7 aa, synthetic construct
RGDFSST

SEQ ID NO: 646 - protein, 7 aa, synthetic construct
RGDHQTI

SEQ ID NO: 647 - protein, 7 aa, synthetic construct
RGDIHKI

SEQ ID NO: 648 - protein, 7 aa, synthetic construct
RGDITHV

SEQ ID NO: 649 - protein, 7 aa, synthetic construct
RGDKHGT

SEQ ID NO: 650 - protein, 7 aa, synthetic construct
RGDKTTI

SEQ ID NO: 651 - protein, 7 aa, synthetic construct
RGDLKKV

SEQ ID NO: 652 - protein, 7 aa, synthetic construct
RGDNLRI

SEQ ID NO: 653 - protein, 7 aa, synthetic construct
RGDNVKF

SEQ ID NO: 654 - protein, 7 aa, synthetic construct
RGDRELI

SEQ ID NO: 655 - protein, 7 aa, synthetic construct
RGDRFSI

SEQ ID NO: 656 - protein, 7 aa, synthetic construct
RGDRQDT

SEQ ID NO: 657 - protein, 7 aa, synthetic construct
RGDRSNI

SEQ ID NO: 658 - protein, 7 aa, synthetic construct
RGDRSNV

SEQ ID NO: 659 - protein, 7 aa, synthetic construct
RGDSNKL

SEQ ID NO: 660 - protein, 7 aa, synthetic construct
RGDTLVS

SEQ ID NO: 661 - protein, 7 aa, synthetic construct
RGDVHTE

SEQ ID NO: 662 - protein, 7 aa, synthetic construct
RGDVRQV

SEQ ID NO: 663 - protein, 7 aa, synthetic construct
RGDVSGI

SEQ ID NO: 664 - protein, 7 aa, synthetic construct
RGDVVHI

SEQ ID NO: 665 - protein, 7 aa, synthetic construct
RGDFTKK

SEQ ID NO: 666 - protein, 7 aa, synthetic construct
RGDGIKL

SEQ ID NO: 667 - protein, 7 aa, synthetic construct
RGDHGLI

SEQ ID NO: 668 - protein, 7 aa, synthetic construct
RGDHSQI

SEQ ID NO: 669 - protein, 7 aa, synthetic construct
RGDKFHI

SEQ ID NO: 670 - protein, 7 aa, synthetic construct
RGDARVI

SEQ ID NO: 671 - protein, 7 aa, synthetic construct
RGDNSSR

SEQ ID NO: 672 - protein, 7 aa, synthetic construct
RGDRESI

SEQ ID NO: 673 - protein, 7 aa, synthetic construct
RGDRNSS

SEQ ID NO: 674 - protein, 7 aa, synthetic construct
RGDRTQL

SEQ ID NO: 675 - protein, 7 aa, synthetic construct
RGDRVNV

SEQ ID NO: 676 - protein, 7 aa, synthetic construct
RGDSSSI

SEQ ID NO: 677 - protein, 7 aa, synthetic construct
RGDTRIQ

SEQ ID NO: 678 - protein, 7 aa, synthetic construct
RGDVHTI

SEQ ID NO: 679 - protein, 7 aa, synthetic construct
RGDVKHF

SEQ ID NO: 680 - protein, 7 aa, synthetic construct
RGDERRR

SEQ ID NO: 681 - protein, 7 aa, synthetic construct
RGDFRHD

SEQ ID NO: 682 - protein, 7 aa, synthetic construct
RGDFSFQ

SEQ ID NO: 683 - protein, 7 aa, synthetic construct
RGDGIKT

SEQ ID NO: 684 - protein, 7 aa, synthetic construct
RGDGRNT

SEQ ID NO: 685 - protein, 7 aa, synthetic construct
RGDHTSL

SEQ ID NO: 686 - protein, 7 aa, synthetic construct
RGDIRGI

SEQ ID NO: 687 - protein, 7 aa, synthetic construct
RGDISHV

SEQ ID NO: 688 - protein, 7 aa, synthetic construct
RGDISSN

SEQ ID NO: 689 - protein, 7 aa, synthetic construct
RGDKKSV

SEQ ID NO: 690 - protein, 7 aa, synthetic construct
RGDQRIT

SEQ ID NO: 691 - protein, 7 aa, synthetic construct
RGDRFGI

SEQ ID NO: 692 - protein, 7 aa, synthetic construct
RGDRGKI

SEQ ID NO: 693 - protein, 7 aa, synthetic construct
RGDRGLK

SEQ ID NO: 694 - protein, 7 aa, synthetic construct
RGDRTFQ

SEQ ID NO: 695 - protein, 7 aa, synthetic construct
RGDRTGK

SEQ ID NO: 696 - protein, 7 aa, synthetic construct
RGDVRGI

SEQ ID NO: 697 - protein, 7 aa, synthetic construct
RGDVRNN

SEQ ID NO: 698 - protein, 7 aa, synthetic construct
RGDFFKK

SEQ ID NO: 699 - protein, 7 aa, synthetic construct
RGDFRTR

SEQ ID NO: 700 - protein, 7 aa, synthetic construct
RGDHNSF

SEQ ID NO: 701 - protein, 7 aa, synthetic construct
RGDHQGF

SEQ ID NO: 702 - protein, 7 aa, synthetic construct
RGDHRDL

SEQ ID NO: 703 - protein, 7 aa, synthetic construct
RGDHRQH

SEQ ID NO: 704 - protein, 7 aa, synthetic construct
RGDHSQV

SEQ ID NO: 705 - protein, 7 aa, synthetic construct
RGDKGGT

SEQ ID NO: 706 - protein, 7 aa, synthetic construct
RGDKKGI

SEQ ID NO: 707 - protein, 7 aa, synthetic construct
RGDLVRQ

SEQ ID NO: 708 - protein, 7 aa, synthetic construct
RGDQGVK

SEQ ID NO: 709 - protein, 7 aa, synthetic construct
RGDRTFF

SEQ ID NO: 710 - protein, 7 aa, synthetic construct
RGDRVLI

SEQ ID NO: 711 - protein, 7 aa, synthetic construct
RGDVHQR

SEQ ID NO: 712 - protein, 7 aa, synthetic construct
RGDVKLT

SEQ ID NO: 713 - protein, 7 aa, synthetic construct
RGDFRII

SEQ ID NO: 714 - protein, 7 aa, synthetic construct
RGDFRVV

SEQ ID NO: 715 - protein, 7 aa, synthetic construct
RGDFSSA

SEQ ID NO: 716 - protein, 7 aa, synthetic construct
RGDGAGI

SEQ ID NO: 717 - protein, 7 aa, synthetic construct
RGDGFKI

SEQ ID NO: 718 - protein, 7 aa, synthetic construct
RGDGGKF

SEQ ID NO: 719 - protein, 7 aa, synthetic construct
RGDGKFE

SEQ ID NO: 720 - protein, 7 aa, synthetic construct
RGDHHQV

SEQ ID NO: 721 - protein, 7 aa, synthetic construct
RGDIHNI

SEQ ID NO: 722 - protein, 7 aa, synthetic construct
RGDIIRI

SEQ ID NO: 723 - protein, 7 aa, synthetic construct
RGDKAVV

SEQ ID NO: 724 - protein, 7 aa, synthetic construct
RGDLKGH

SEQ ID NO: 725 - protein, 7 aa, synthetic construct
RGDQGKI

SEQ ID NO: 726 - protein, 7 aa, synthetic construct
RGDQGKN

SEQ ID NO: 727 - protein, 7 aa, synthetic construct
RGDQSKQ

SEQ ID NO: 728 - protein, 7 aa, synthetic construct
RGDREGL

SEQ ID NO: 729 - protein, 7 aa, synthetic construct
RGDRQGS

SEQ ID NO: 730 - protein, 7 aa, synthetic construct
RGDRQVI

SEQ ID NO: 731 - protein, 7 aa, synthetic construct
RGDSRNT

SEQ ID NO: 732 - protein, 7 aa, synthetic construct
RGDVIIK

SEQ ID NO: 733 - protein, 7 aa, synthetic construct
RGDVRIV

SEQ ID NO: 734 - protein, 7 aa, synthetic construct
RGDVRKV

SEQ ID NO: 735 - protein, 7 aa, synthetic construct
RGDVSSK

SEQ ID NO: 736 - protein, 7 aa, synthetic construct
RGDFGHT

SEQ ID NO: 737 - protein, 7 aa, synthetic construct
RGDFQIT

SEQ ID NO: 738 - protein, 7 aa, synthetic construct
RGDFSNN

SEQ ID NO: 739 - protein, 7 aa, synthetic construct
RGDFSSQ

SEQ ID NO: 740 - protein, 7 aa, synthetic construct
RGDGFVL

SEQ ID NO: 741 - protein, 7 aa, synthetic construct
RGDLIHS

SEQ ID NO: 742 - protein, 7 aa, synthetic construct
RGDLLKV

SEQ ID NO: 743 - protein, 7 aa, synthetic construct
RGDLVVR

SEQ ID NO: 744 - protein, 7 aa, synthetic construct
RGDRQEI

SEQ ID NO: 745 - protein, 7 aa, synthetic construct
RGDRQVT

SEQ ID NO: 746 - protein, 7 aa, synthetic construct
RGDRSTF

SEQ ID NO: 747 - protein, 7 aa, synthetic construct
RGDSLHI

SEQ ID NO: 748 - protein, 7 aa, synthetic construct
RGDVKIT

SEQ ID NO: 749 - protein, 7 aa, synthetic construct
RGDVKNV

SEQ ID NO: 750 - protein, 7 aa, synthetic construct
RGDVKST

SEQ ID NO: 751 - protein, 7 aa, synthetic construct
RGDVVKL

SEQ ID NO: 752 - protein, 7 aa, synthetic construct
RGDHTKL

SEQ ID NO: 753 - protein, 7 aa, synthetic construct
RGDIIRR

SEQ ID NO: 754 - protein, 7 aa, synthetic construct
RGDIKVK

SEQ ID NO: 755 - protein, 7 aa, synthetic construct
RGDISAV

SEQ ID NO: 756 - protein, 7 aa, synthetic construct
RGDKGKT

SEQ ID NO: 757 - protein, 7 aa, synthetic construct
RGDKVFV

SEQ ID NO: 758 - protein, 7 aa, synthetic construct
RGDASSF

SEQ ID NO: 759 - protein, 7 aa, synthetic construct
RGDLLTV

SEQ ID NO: 760 - protein, 7 aa, synthetic construct
RGDLTRN

SEQ ID NO: 761 - protein, 7 aa, synthetic construct
RGDNRGV

SEQ ID NO: 762 - protein, 7 aa, synthetic construct
RGDRGGI

SEQ ID NO: 763 - protein, 7 aa, synthetic construct
RGDRSFQ

SEQ ID NO: 764 - protein, 7 aa, synthetic construct
RGDSRGF

SEQ ID NO: 765 - protein, 7 aa, synthetic construct
RGDTGSK

SEQ ID NO: 766 - protein, 7 aa, synthetic construct
RGDTKTI

SEQ ID NO: 767 - protein, 7 aa, synthetic construct
RGDTRIV

SEQ ID NO: 768 - protein, 7 aa, synthetic construct
RGDVHSI

SEQ ID NO: 769 - protein, 7 aa, synthetic construct
RGDDSGR

SEQ ID NO: 770 - protein, 7 aa, synthetic construct
RGDFNQL

SEQ ID NO: 771 - protein, 7 aa, synthetic construct
RGDFTSN

SEQ ID NO: 772 - protein, 7 aa, synthetic construct
RGDFVNK

SEQ ID NO: 773 - protein, 7 aa, synthetic construct
RGDGDRN

SEQ ID NO: 774 - protein, 7 aa, synthetic construct
RGDHARQ

SEQ ID NO: 775 - protein, 7 aa, synthetic construct
RGDASSI

SEQ ID NO: 776 - protein, 7 aa, synthetic construct
RGDLRTS

SEQ ID NO: 777 - protein, 7 aa, synthetic construct
RGDLVHI

SEQ ID NO: 778 - protein, 7 aa, synthetic construct
RGDQKFR

SEQ ID NO: 779 - protein, 7 aa, synthetic construct
RGDQKQK

SEQ ID NO: 780 - protein, 7 aa, synthetic construct
RGDQRVT

SEQ ID NO: 781 - protein, 7 aa, synthetic construct
RGDREKF

SEQ ID NO: 782 - protein, 7 aa, synthetic construct
RGDRGFA

SEQ ID NO: 783 - protein, 7 aa, synthetic construct
RGDSGQI

SEQ ID NO: 784 - protein, 7 aa, synthetic construct
RGDTDRF

SEQ ID NO: 785 - protein, 7 aa, synthetic construct
RGDTKVI

SEQ ID NO: 786 - protein, 7 aa, synthetic construct
RGDVRIK

SEQ ID NO: 787 - protein, 7 aa, synthetic construct
RGDVSGT

SEQ ID NO: 788 - protein, 7 aa, synthetic construct
RGDGFKV

SEQ ID NO: 789 - protein, 7 aa, synthetic construct
RGDGHQF

SEQ ID NO: 790 - protein, 7 aa, synthetic construct
RGDHNSV

SEQ ID NO: 791 - protein, 7 aa, synthetic construct
RGDHVNV

SEQ ID NO: 792 - protein, 7 aa, synthetic construct
RGDILSI

SEQ ID NO: 793 - protein, 7 aa, synthetic construct
RGDISTR

SEQ ID NO: 794 - protein, 7 aa, synthetic construct
RGDKGVV

SEQ ID NO: 795 - protein, 7 aa, synthetic construct
RGDLRTV

SEQ ID NO: 796 - protein, 7 aa, synthetic construct
RGDLSGR

SEQ ID NO: 797 - protein, 7 aa, synthetic construct
RGDQAHV

SEQ ID NO: 798 - protein, 7 aa, synthetic construct
RGDQASR

SEQ ID NO: 799 - protein, 7 aa, synthetic construct
RGDQHGQ

SEQ ID NO: 800 - protein, 7 aa, synthetic construct
RGDQLHI

SEQ ID NO: 801 - protein, 7 aa, synthetic construct
RGDQRNV

SEQ ID NO: 802 - protein, 7 aa, synthetic construct
RGDQVKF

SEQ ID NO: 803 - protein, 7 aa, synthetic construct
RGDRFNH

SEQ ID NO: 804 - protein, 7 aa, synthetic construct
RGDRGAQ

SEQ ID NO: 805 - protein, 7 aa, synthetic construct
RGDRGSQ

SEQ ID NO: 806 - protein, 7 aa, synthetic construct
RGDRHVV

SEQ ID NO: 807 - protein, 7 aa, synthetic construct
RGDRIGF

SEQ ID NO: 808 - protein, 7 aa, synthetic construct
RGDRNGT

SEQ ID NO: 809 - protein, 7 aa, synthetic construct
RGDRQTT

SEQ ID NO: 810 - protein, 7 aa, synthetic construct
RGDRSAV

SEQ ID NO: 811 - protein, 7 aa, synthetic construct
RGDRTQV

SEQ ID NO: 812 - protein, 7 aa, synthetic construct
RGDRTTQ

SEQ ID NO: 813 - protein, 7 aa, synthetic construct
RGDVGNK

SEQ ID NO: 814 - protein, 7 aa, synthetic construct
RGDVRDV

SEQ ID NO: 815 - protein, 7 aa, synthetic construct
RGDFGTT

SEQ ID NO: 816 - protein, 7 aa, synthetic construct
RGDGSRL

SEQ ID NO: 817 - protein, 7 aa, synthetic construct
RGDHSHT

SEQ ID NO: 818 - protein, 7 aa, synthetic construct
RGDHTQL

SEQ ID NO: 819 - protein, 7 aa, synthetic construct
RGDIKSI

SEQ ID NO: 820 - protein, 7 aa, synthetic construct
RGDISRI

SEQ ID NO: 821 - protein, 7 aa, synthetic construct
RGDKHQV

SEQ ID NO: 822 - protein, 7 aa, synthetic construct
RGDLGVN

SEQ ID NO: 823 - protein, 7 aa, synthetic construct
RGDLRAI

SEQ ID NO: 824 - protein, 7 aa, synthetic construct
RGDATKV

SEQ ID NO: 825 - protein, 7 aa, synthetic construct
RGDQGLK

SEQ ID NO: 826 - protein, 7 aa, synthetic construct
RGDQQKT

SEQ ID NO: 827 - protein, 7 aa, synthetic construct
RGDRGAS

SEQ ID NO: 828 - protein, 7 aa, synthetic construct
RGDRQSI

SEQ ID NO: 829 - protein, 7 aa, synthetic construct
RGDRREI

SEQ ID NO: 830 - protein, 7 aa, synthetic construct
RGDRVVV

SEQ ID NO: 831 - protein, 7 aa, synthetic construct
RGDTTKV

SEQ ID NO: 832 - protein, 7 aa, synthetic construct
RGDVRGR

SEQ ID NO: 833 - protein, 7 aa, synthetic construct
RGDVRHV

SEQ ID NO: 834 - protein, 7 aa, synthetic construct
RGDVVIR

SEQ ID NO: 835 - protein, 7 aa, synthetic construct
RGDEGRI

SEQ ID NO: 836 - protein, 7 aa, synthetic construct
RGDFKFA

SEQ ID NO: 837 - protein, 7 aa, synthetic construct
RGDFRET

SEQ ID NO: 838 - protein, 7 aa, synthetic construct
RGDGSQH

SEQ ID NO: 839 - protein, 7 aa, synthetic construct
RGDGSRI

SEQ ID NO: 840 - protein, 7 aa, synthetic construct
RGDHATF

SEQ ID NO: 841 - protein, 7 aa, synthetic construct
RGDHSAL

SEQ ID NO: 842 - protein, 7 aa, synthetic construct
RGDITSN

SEQ ID NO: 843 - protein, 7 aa, synthetic construct
RGDKSAV

SEQ ID NO: 844 - protein, 7 aa, synthetic construct
RGDARSL

SEQ ID NO: 845 - protein, 7 aa, synthetic construct
RGDARTF

SEQ ID NO: 846 - protein, 7 aa, synthetic construct
RGDARVL

SEQ ID NO: 847 - protein, 7 aa, synthetic construct
RGDLVRT

SEQ ID NO: 848 - protein, 7 aa, synthetic construct
RGDQRNT

SEQ ID NO: 849 - protein, 7 aa, synthetic construct
RGDQSRV

SEQ ID NO: 850 - protein, 7 aa, synthetic construct
RGDRAQT

SEQ ID NO: 851 - protein, 7 aa, synthetic construct
RGDRDNF

SEQ ID NO: 852 - protein, 7 aa, synthetic construct
RGDRNFV

SEQ ID NO: 853 - protein, 7 aa, synthetic construct
RGDSRII

SEQ ID NO: 854 - protein, 7 aa, synthetic construct
RGDSRIV

SEQ ID NO: 855 - protein, 7 aa, synthetic construct
RGDSRTI

SEQ ID NO: 856 - protein, 7 aa, synthetic construct
RGDTGIK

SEQ ID NO: 857 - protein, 7 aa, synthetic construct
RGDTRGI

SEQ ID NO: 858 - protein, 7 aa, synthetic construct
RGDVKNI

SEQ ID NO: 859 - protein, 7 aa, synthetic construct
RGDVRGL

SEQ ID NO: 860 - protein, 7 aa, synthetic construct
RGDVTFI

SEQ ID NO: 861 - protein, 7 aa, synthetic construct
RGDFKGS

SEQ ID NO: 862 - protein, 7 aa, synthetic construct
RGDFLQN

SEQ ID NO: 863 - protein, 7 aa, synthetic construct
RGDGRGS

SEQ ID NO: 864 - protein, 7 aa, synthetic construct
RGDGSHF

SEQ ID NO: 865 - protein, 7 aa, synthetic construct
RGDHKGV

SEQ ID NO: 866 - protein, 7 aa, synthetic construct
RGDISHI

SEQ ID NO: 867 - protein, 7 aa, synthetic construct
RGDISHQ

SEQ ID NO: 868 - protein, 7 aa, synthetic construct
RGDISSV

SEQ ID NO: 869 - protein, 7 aa, synthetic construct
RGDITGI

SEQ ID NO: 870 - protein, 7 aa, synthetic construct
RGDKAFI

SEQ ID NO: 871 - protein, 7 aa, synthetic construct
RGDKQTI

SEQ ID NO: 872 - protein, 7 aa, synthetic construct
RGDLLKK

SEQ ID NO: 873 - protein, 7 aa, synthetic construct
RGDQHNQ

SEQ ID NO: 874 - protein, 7 aa, synthetic construct
RGDRGKV

SEQ ID NO: 875 - protein, 7 aa, synthetic construct
RGDRILV

SEQ ID NO: 876 - protein, 7 aa, synthetic construct
RGDRSEV

SEQ ID NO: 877 - protein, 7 aa, synthetic construct
RGDRSFE

SEQ ID NO: 878 - protein, 7 aa, synthetic construct
RGDRSLT

SEQ ID NO: 879 - protein, 7 aa, synthetic construct
RGDRTGI

SEQ ID NO: 880 - protein, 7 aa, synthetic construct
RGDTATS

SEQ ID NO: 881 - protein, 7 aa, synthetic construct
RGDTKNV

SEQ ID NO: 882 - protein, 7 aa, synthetic construct
RGDTRNL

SEQ ID NO: 883 - protein, 7 aa, synthetic construct
RGDVVFK

SEQ ID NO: 884 - protein, 7 aa, synthetic construct
RGDHGVL

SEQ ID NO: 885 - protein, 7 aa, synthetic construct
RGDFRGT

SEQ ID NO: 886 - protein, 7 aa, synthetic construct
RGDFTHI

SEQ ID NO: 887 - protein, 7 aa, synthetic construct
RGDGKVL

SEQ ID NO: 888 - protein, 7 aa, synthetic construct
RGDGSHV

SEQ ID NO: 889 - protein, 7 aa, synthetic construct
RGDHLNF

SEQ ID NO: 890 - protein, 7 aa, synthetic construct
RGDHQHN

SEQ ID NO: 891 - protein, 7 aa, synthetic construct
RGDHQSF

SEQ ID NO: 892 - protein, 7 aa, synthetic construct
RGDIRII

SEQ ID NO: 893 - protein, 7 aa, synthetic construct
RGDISFQ

SEQ ID NO: 894 - protein, 7 aa, synthetic construct
RGDARER

SEQ ID NO: 895 - protein, 7 aa, synthetic construct
RGDLLGN

SEQ ID NO: 896 - protein, 7 aa, synthetic construct
RGDQGKT

SEQ ID NO: 897 - protein, 7 aa, synthetic construct
RGDQVVL

SEQ ID NO: 898 - protein, 7 aa, synthetic construct
RGDRGIK

SEQ ID NO: 899 - protein, 7 aa, synthetic construct
RGDRLNN

SEQ ID NO: 900 - protein, 7 aa, synthetic construct
RGDSLRN

SEQ ID NO: 901 - protein, 7 aa, synthetic construct
RGDVVFR

SEQ ID NO: 902 - protein, 7 aa, synthetic construct
RGDFSSN

SEQ ID NO: 903 - protein, 7 aa, synthetic construct
RGDHKGL

SEQ ID NO: 904 - protein, 7 aa, synthetic construct
RGDIKFI

SEQ ID NO: 905 - protein, 7 aa, synthetic construct
RGDIRTV

SEQ ID NO: 906 - protein, 7 aa, synthetic construct
RGDKSQI

SEQ ID NO: 907 - protein, 7 aa, synthetic construct
RGDLISS

SEQ ID NO: 908 - protein, 7 aa, synthetic construct
RGDLVRN

SEQ ID NO: 909 - protein, 7 aa, synthetic construct
RGDRGTV

SEQ ID NO: 910 - protein, 7 aa, synthetic construct
RGDRGVK

SEQ ID NO: 911 - protein, 7 aa, synthetic construct
RGDRIET

SEQ ID NO: 912 - protein, 7 aa, synthetic construct
RGDRLVT

SEQ ID NO: 913 - protein, 7 aa, synthetic construct
RGDRSGA

SEQ ID NO: 914 - protein, 7 aa, synthetic construct
RGDTASI

SEQ ID NO: 915 - protein, 7 aa, synthetic construct
RGDTRIS

SEQ ID NO: 916 - protein, 7 aa, synthetic construct
RGDTRVV

SEQ ID NO: 917 - protein, 7 aa, synthetic construct
RGDVGNR

SEQ ID NO: 918 - protein, 7 aa, synthetic construct
RGDVKGF

SEQ ID NO: 919 - protein, 7 aa, synthetic construct
RGDVRTI

SEQ ID NO: 920 - protein, 7 aa, synthetic construct
RGDVSVI

SEQ ID NO: 921 - protein, 7 aa, synthetic construct
RGDFAKK

SEQ ID NO: 922 - protein, 7 aa, synthetic construct
RGDFFFV

SEQ ID NO: 923 - protein, 7 aa, synthetic construct
RGDFFRF

SEQ ID NO: 924 - protein, 7 aa, synthetic construct
RGDFGHS

SEQ ID NO: 925 - protein, 7 aa, synthetic construct
RGDFGKN

SEQ ID NO: 926 - protein, 7 aa, synthetic construct
RGDFGKR

SEQ ID NO: 927 - protein, 7 aa, synthetic construct
RGDFSHN

SEQ ID NO: 928 - protein, 7 aa, synthetic construct
RGDGKTA

SEQ ID NO: 929 - protein, 7 aa, synthetic construct
RGDHESQ

SEQ ID NO: 930 - protein, 7 aa, synthetic construct
RGDIRSN

SEQ ID NO: 931 - protein, 7 aa, synthetic construct
RGDISVQ

SEQ ID NO: 932 - protein, 7 aa, synthetic construct
RGDQFHI

SEQ ID NO: 933 - protein, 7 aa, synthetic construct
RGDQGVV

SEQ ID NO: 934 - protein, 7 aa, synthetic construct
RGDQSKL

SEQ ID NO: 935 - protein, 7 aa, synthetic construct
RGDRLGF

SEQ ID NO: 936 - protein, 7 aa, synthetic construct
RGDRSNS

SEQ ID NO: 937 - protein, 7 aa, synthetic construct
RGDSHET

SEQ ID NO: 938 - protein, 7 aa, synthetic construct
RGDSRTQ

SEQ ID NO: 939 - protein, 7 aa, synthetic construct
RGDTKFI

SEQ ID NO: 940 - protein, 7 aa, synthetic construct
RGDVKFE

SEQ ID NO: 941 - protein, 7 aa, synthetic construct
RGDVSFI

SEQ ID NO: 942 - protein, 7 aa, synthetic construct
RGDVSTQ

SEQ ID NO: 943 - protein, 7 aa, synthetic construct
RGDVSTR

SEQ ID NO: 944 - protein, 7 aa, synthetic construct
RGDFRSV

SEQ ID NO: 945 - protein, 7 aa, synthetic construct
RGDGKTL

SEQ ID NO: 946 - protein, 7 aa, synthetic construct
RGDHQKI

SEQ ID NO: 947 - protein, 7 aa, synthetic construct
RGDHSGV

SEQ ID NO: 948 - protein, 7 aa, synthetic construct
RGDISTQ

SEQ ID NO: 949 - protein, 7 aa, synthetic construct
RGDITKQ

SEQ ID NO: 950 - protein, 7 aa, synthetic construct
RGDKGFT

SEQ ID NO: 951 - protein, 7 aa, synthetic construct
RGDARTL

SEQ ID NO: 952 - protein, 7 aa, synthetic construct
RGDKVQI

SEQ ID NO: 953 - protein, 7 aa, synthetic construct
RGDLKFD

SEQ ID NO: 954 - protein, 7 aa, synthetic construct
RGDLNTS

SEQ ID NO: 955 - protein, 7 aa, synthetic construct
RGDNRGI

SEQ ID NO: 956 - protein, 7 aa, synthetic construct
RGDNSRV

SEQ ID NO: 957 - protein, 7 aa, synthetic construct
RGDQRNS

SEQ ID NO: 958 - protein, 7 aa, synthetic construct
RGDQSFN

SEQ ID NO: 959 - protein, 7 aa, synthetic construct
RGDQSRN

SEQ ID NO: 960 - protein, 7 aa, synthetic construct
RGDRGQL

SEQ ID NO: 961 - protein, 7 aa, synthetic construct
RGDRHQI

SEQ ID NO: 962 - protein, 7 aa, synthetic construct
RGDRQGF

SEQ ID NO: 963 - protein, 7 aa, synthetic construct
RGDRSTR

SEQ ID NO: 964 - protein, 7 aa, synthetic construct
RGDVHRI

SEQ ID NO: 965 - protein, 7 aa, synthetic construct
RGDVRGG

SEQ ID NO: 966 - protein, 7 aa, synthetic construct
RGDVSRV

SEQ ID NO: 967 - protein, 7 aa, synthetic construct
RGDEGRV

SEQ ID NO: 968 - protein, 7 aa, synthetic construct
RGDFSSI

SEQ ID NO: 969 - protein, 7 aa, synthetic construct
RGDHGFQ

SEQ ID NO: 970 - protein, 7 aa, synthetic construct
RGDALKL

SEQ ID NO: 971 - protein, 7 aa, synthetic construct
RGDILKV

SEQ ID NO: 972 - protein, 7 aa, synthetic construct
RGDILRN

SEQ ID NO: 973 - protein, 7 aa, synthetic construct
RGDIQGT

SEQ ID NO: 974 - protein, 7 aa, synthetic construct
RGDKHNS

SEQ ID NO: 975 - protein, 7 aa, synthetic construct
RGDARGG

SEQ ID NO: 976 - protein, 7 aa, synthetic construct
RGDKNVI

SEQ ID NO: 977 - protein, 7 aa, synthetic construct
RGDKSQT

SEQ ID NO: 978 - protein, 7 aa, synthetic construct
RGDLLGH

SEQ ID NO: 979 - protein, 7 aa, synthetic construct
RGDNKKN

SEQ ID NO: 980 - protein, 7 aa, synthetic construct
RGDAVRE

SEQ ID NO: 981 - protein, 7 aa, synthetic construct
RGDQAGH

SEQ ID NO: 982 - protein, 7 aa, synthetic construct
RGDQQRI

SEQ ID NO: 983 - protein, 7 aa, synthetic construct
RGDQRLT

SEQ ID NO: 984 - protein, 7 aa, synthetic construct
RGDQSRK

SEQ ID NO: 985 - protein, 7 aa, synthetic construct
RGDQSRT

SEQ ID NO: 986 - protein, 7 aa, synthetic construct
RGDRENF

SEQ ID NO: 987 - protein, 7 aa, synthetic construct
RGDRTFG

SEQ ID NO: 988 - protein, 7 aa, synthetic construct
RGDRTHV

SEQ ID NO: 989 - protein, 7 aa, synthetic construct
RGDSRGL

SEQ ID NO: 990 - protein, 7 aa, synthetic construct
RGDAGKL

SEQ ID NO: 991 - protein, 7 aa, synthetic construct
RGDFQGT

SEQ ID NO: 992 - protein, 7 aa, synthetic construct
RGDGRVF

SEQ ID NO: 993 - protein, 7 aa, synthetic construct
RGDGVRF

SEQ ID NO: 994 - protein, 7 aa, synthetic construct
RGDHGLK

SEQ ID NO: 995 - protein, 7 aa, synthetic construct
RGDITRQ

SEQ ID NO: 996 - protein, 7 aa, synthetic construct
RGDKGVK

SEQ ID NO: 997 - protein, 7 aa, synthetic construct
RGDKKSI

SEQ ID NO: 998 - protein, 7 aa, synthetic construct
RGDLRGA

SEQ ID NO: 999 - protein, 7 aa, synthetic construct
RGDLSGA

SEQ ID NO: 1000 - protein, 7 aa, synthetic construct
RGDQAKI

SEQ ID NO: 1001 - protein, 7 aa, synthetic construct
RGDQHQV

SEQ ID NO: 1002 - protein, 7 aa, synthetic construct
RGDQHVI

SEQ ID NO: 1003 - protein, 7 aa, synthetic construct
RGDQRRI

SEQ ID NO: 1004 - protein, 7 aa, synthetic construct
RGDRGIS

SEQ ID NO: 1005 - protein, 7 aa, synthetic construct
RGDRNSV

SEQ ID NO: 1006 - protein, 7 aa, synthetic construct
RGDRQTQ

SEQ ID NO: 1007 - protein, 7 aa, synthetic construct
RGDRSGF

SEQ ID NO: 1008 - protein, 7 aa, synthetic construct
RGDRSGN

SEQ ID NO: 1009 - protein, 7 aa, synthetic construct
RGDRTNL

SEQ ID NO: 1010 - protein, 7 aa, synthetic construct
RGDTHSL

SEQ ID NO: 1011 - protein, 7 aa, synthetic construct
RGDVKTI

SEQ ID NO: 1012 - protein, 7 aa, synthetic construct
RGDVQHI

SEQ ID NO: 1013 - protein, 7 aa, synthetic construct
RGDVRTN

SEQ ID NO: 1014 - protein, 7 aa, synthetic construct
RGDVSRT

SEQ ID NO: 1015 - protein, 7 aa, synthetic construct
RGDAAKI

SEQ ID NO: 1016 - protein, 7 aa, synthetic construct
RGDFNRI

SEQ ID NO: 1017 - protein, 7 aa, synthetic construct
RGDFSKK

SEQ ID NO: 1018 - protein, 7 aa, synthetic construct
RGDFVVQ

SEQ ID NO: 1019 - protein, 7 aa, synthetic construct
RGDGAKK

SEQ ID NO: 1020 - protein, 7 aa, synthetic construct
RGDHSGI

SEQ ID NO: 1021 - protein, 7 aa, synthetic construct
RGDIAGV

SEQ ID NO: 1022 - protein, 7 aa, synthetic construct
RGDIKIG

SEQ ID NO: 1023 - protein, 7 aa, synthetic construct
RGDISVI

SEQ ID NO: 1024 - protein, 7 aa, synthetic construct
RGDITKI

SEQ ID NO: 1025 - protein, 7 aa, synthetic construct
RGDKKNN

SEQ ID NO: 1026 - protein, 7 aa, synthetic construct
RGDKSTK

SEQ ID NO: 1027 - protein, 7 aa, synthetic construct
RGDASHI

SEQ ID NO: 1028 - protein, 7 aa, synthetic construct
RGDLSSV

SEQ ID NO: 1029 - protein, 7 aa, synthetic construct
RGDNQRF

SEQ ID NO: 1030 - protein, 7 aa, synthetic construct
RGDNVKK

SEQ ID NO: 1031 - protein, 7 aa, synthetic construct
RGDQSTV

SEQ ID NO: 1032 - protein, 7 aa, synthetic construct
RGDRAVV

SEQ ID NO: 1033 - protein, 7 aa, synthetic construct
RGDRGGA

SEQ ID NO: 1034 - protein, 7 aa, synthetic construct
RGDRGTQ

SEQ ID NO: 1035 - protein, 7 aa, synthetic construct
RGDRHDT

SEQ ID NO: 1036 - protein, 7 aa, synthetic construct
RGDRIFV

SEQ ID NO: 1037 - protein, 7 aa, synthetic construct
RGDRNTQ

SEQ ID NO: 1038 - protein, 7 aa, synthetic construct
RGDRSEI

SEQ ID NO: 1039 - protein, 7 aa, synthetic construct
RGDDGQG

SEQ ID NO: 1040 - protein, 7 aa, synthetic construct
RGDVRAR

SEQ ID NO: 1041 - protein, 7 aa, synthetic construct
RGDFRKT

SEQ ID NO: 1042 - protein, 7 aa, synthetic construct
RGDFRSN

SEQ ID NO: 1043 - protein, 7 aa, synthetic construct
RGDGREL

SEQ ID NO: 1044 - protein, 7 aa, synthetic construct
RGDGRKT

SEQ ID NO: 1045 - protein, 7 aa, synthetic construct
RGDGRNV

SEQ ID NO: 1046 - protein, 7 aa, synthetic construct
RGDGSVI

SEQ ID NO: 1047 - protein, 7 aa, synthetic construct
RGDHGAL

SEQ ID NO: 1048 - protein, 7 aa, synthetic construct
RGDHKGK

SEQ ID NO: 1049 - protein, 7 aa, synthetic construct
RGDHREI

SEQ ID NO: 1050 - protein, 7 aa, synthetic construct
RGDALNI

SEQ ID NO: 1051 - protein, 7 aa, synthetic construct
RGDHVGK

SEQ ID NO: 1052 - protein, 7 aa, synthetic construct
RGDIRHF

SEQ ID NO: 1053 - protein, 7 aa, synthetic construct
RGDITKV

SEQ ID NO: 1054 - protein, 7 aa, synthetic construct
RGDLIHN

SEQ ID NO: 1055 - protein, 7 aa, synthetic construct
RGDLQKN

SEQ ID NO: 1056 - protein, 7 aa, synthetic construct
RGDAVKV

SEQ ID NO: 1057 - protein, 7 aa, synthetic construct
RGDQHNI

SEQ ID NO: 1058 - protein, 7 aa, synthetic construct
RGDQHSI

SEQ ID NO: 1059 - protein, 7 aa, synthetic construct
RGDREDL

SEQ ID NO: 1060 - protein, 7 aa, synthetic construct
RGDRGSA

SEQ ID NO: 1061 - protein, 7 aa, synthetic construct
RGDRGTG

SEQ ID NO: 1062 - protein, 7 aa, synthetic construct
RGDRLST

SEQ ID NO: 1063 - protein, 7 aa, synthetic construct
RGDRQFI

SEQ ID NO: 1064 - protein, 7 aa, synthetic construct
RGDRSKK

SEQ ID NO: 1065 - protein, 7 aa, synthetic construct
RGDSLKI

SEQ ID NO: 1066 - protein, 7 aa, synthetic construct
RGDVKKL

SEQ ID NO: 1067 - protein, 7 aa, synthetic construct
RGDVRQF

SEQ ID NO: 1068 - protein, 7 aa, synthetic construct
RGDVRVS

SEQ ID NO: 1069 - protein, 7 aa, synthetic construct
RGDFAGK

SEQ ID NO: 1070 - protein, 7 aa, synthetic construct
RGDAGRK

SEQ ID NO: 1071 - protein, 7 aa, synthetic construct
RGDFGVN

SEQ ID NO: 1072 - protein, 7 aa, synthetic construct
RGDFNKI

SEQ ID NO: 1073 - protein, 7 aa, synthetic construct
RGDGQEL

SEQ ID NO: 1074 - protein, 7 aa, synthetic construct
RGDHGNK

SEQ ID NO: 1075 - protein, 7 aa, synthetic construct
RGDHLNL

SEQ ID NO: 1076 - protein, 7 aa, synthetic construct
RGDHTAI

SEQ ID NO: 1077 - protein, 7 aa, synthetic construct
RGDINKK

SEQ ID NO: 1078 - protein, 7 aa, synthetic construct
RGDISSK

SEQ ID NO: 1079 - protein, 7 aa, synthetic construct
RGDISSR

SEQ ID NO: 1080 - protein, 7 aa, synthetic construct
RGDAQKL

SEQ ID NO: 1081 - protein, 7 aa, synthetic construct
RGDKLFK

SEQ ID NO: 1082 - protein, 7 aa, synthetic construct
RGDKSGV

SEQ ID NO: 1083 - protein, 7 aa, synthetic construct
RGDKSVT

SEQ ID NO: 1084 - protein, 7 aa, synthetic construct
RGDKVRI

SEQ ID NO: 1085 - protein, 7 aa, synthetic construct
RGDLKSN

SEQ ID NO: 1086 - protein, 7 aa, synthetic construct
RGDLQTI

SEQ ID NO: 1087 - protein, 7 aa, synthetic construct
RGDLRNV

SEQ ID NO: 1088 - protein, 7 aa, synthetic construct
RGDLSQD

SEQ ID NO: 1089 - protein, 7 aa, synthetic construct
RGDQNRI

SEQ ID NO: 1090 - protein, 7 aa, synthetic construct
RGDQRFF

SEQ ID NO: 1091 - protein, 7 aa, synthetic construct
RGDQVKI

SEQ ID NO: 1092 - protein, 7 aa, synthetic construct
RGDRFHR

SEQ ID NO: 1093 - protein, 7 aa, synthetic construct
RGDRGVG

SEQ ID NO: 1094 - protein, 7 aa, synthetic construct
RGDRKLV

SEQ ID NO: 1095 - protein, 7 aa, synthetic construct
RGDRLFH

SEQ ID NO: 1096 - protein, 7 aa, synthetic construct
RGDRNVF

SEQ ID NO: 1097 - protein, 7 aa, synthetic construct
RGDRRNQ

SEQ ID NO: 1098 - protein, 7 aa, synthetic construct
RGDRSHQ

SEQ ID NO: 1099 - protein, 7 aa, synthetic construct
RGDRSSS

SEQ ID NO: 1100 - protein, 7 aa, synthetic construct
RGDRTGN

SEQ ID NO: 1101 - protein, 7 aa, synthetic construct
RGDSHTL

SEQ ID NO: 1102 - protein, 7 aa, synthetic construct
RGDSSRI

SEQ ID NO: 1103 - protein, 7 aa, synthetic construct
RGDTRTF

SEQ ID NO: 1104 - protein, 7 aa, synthetic construct
RGDTSSG

SEQ ID NO: 1105 - protein, 7 aa, synthetic construct
RGDVHAI

SEQ ID NO: 1106 - protein, 7 aa, synthetic construct
RGDVRGN

SEQ ID NO: 1107 - protein, 7 aa, synthetic construct
RGDGSQF

SEQ ID NO: 1108 - protein, 7 aa, synthetic construct
RGDAKHL

SEQ ID NO: 1109 - protein, 7 aa, synthetic construct
RGDHGII

SEQ ID NO: 1110 - protein, 7 aa, synthetic construct
RGDHSHV

SEQ ID NO: 1111 - protein, 7 aa, synthetic construct
RGDIHGI

SEQ ID NO: 1112 - protein, 7 aa, synthetic construct
RGDIKLI

SEQ ID NO: 1113 - protein, 7 aa, synthetic construct
RGDIQGR

SEQ ID NO: 1114 - protein, 7 aa, synthetic construct
RGDIRFV

SEQ ID NO: 1115 - protein, 7 aa, synthetic construct
RGDKGII

SEQ ID NO: 1116 - protein, 7 aa, synthetic construct
RGDLKFE

SEQ ID NO: 1117 - protein, 7 aa, synthetic construct
RGDASSR

SEQ ID NO: 1118 - protein, 7 aa, synthetic construct
RGDLNKV

SEQ ID NO: 1119 - protein, 7 aa, synthetic construct
RGDRDKT

SEQ ID NO: 1120 - protein, 7 aa, synthetic construct
RGDRKAK

SEQ ID NO: 1121 - protein, 7 aa, synthetic construct
RGDRQIV

SEQ ID NO: 1122 - protein, 7 aa, synthetic construct
RGDRVET

SEQ ID NO: 1123 - protein, 7 aa, synthetic construct
RGDSKTF

SEQ ID NO: 1124 - protein, 7 aa, synthetic construct
RGDSNHL

SEQ ID NO: 1125 - protein, 7 aa, synthetic construct
RGDTKQK

SEQ ID NO: 1126 - protein, 7 aa, synthetic construct
RGDTVFF

SEQ ID NO: 1127 - protein, 7 aa, synthetic construct
RGDVGGK

SEQ ID NO: 1128 - protein, 7 aa, synthetic construct
RGDFGNT

SEQ ID NO: 1129 - protein, 7 aa, synthetic construct
RGDFNHT

SEQ ID NO: 1130 - protein, 7 aa, synthetic construct
RGDGVKL

SEQ ID NO: 1131 - protein, 7 aa, synthetic construct
RGDHAVI

SEQ ID NO: 1132 - protein, 7 aa, synthetic construct
RGDHGVV

SEQ ID NO: 1133 - protein, 7 aa, synthetic construct
RGDHVTI

SEQ ID NO: 1134 - protein, 7 aa, synthetic construct
RGDIKNI

SEQ ID NO: 1135 - protein, 7 aa, synthetic construct
RGDIRSV

SEQ ID NO: 1136 - protein, 7 aa, synthetic construct
RGDITRT

SEQ ID NO: 1137 - protein, 7 aa, synthetic construct
RGDKARI

SEQ ID NO: 1138 - protein, 7 aa, synthetic construct
RGDKFFI

SEQ ID NO: 1139 - protein, 7 aa, synthetic construct
RGDKGSK

SEQ ID NO: 1140 - protein, 7 aa, synthetic construct
RGDKGVQ

SEQ ID NO: 1141 - protein, 7 aa, synthetic construct
RGDKKFQ

SEQ ID NO: 1142 - protein, 7 aa, synthetic construct
RGDKNNI

SEQ ID NO: 1143 - protein, 7 aa, synthetic construct
RGDLATV

SEQ ID NO: 1144 - protein, 7 aa, synthetic construct
RGDLFNK

SEQ ID NO: 1145 - protein, 7 aa, synthetic construct
RGDLGKV

SEQ ID NO: 1146 - protein, 7 aa, synthetic construct
RGDASRI

SEQ ID NO: 1147 - protein, 7 aa, synthetic construct
RGDNHSL

SEQ ID NO: 1148 - protein, 7 aa, synthetic construct
RGDQAKN

SEQ ID NO: 1149 - protein, 7 aa, synthetic construct
RGDQQKF

SEQ ID NO: 1150 - protein, 7 aa, synthetic construct
RGDQVSI

SEQ ID NO: 1151 - protein, 7 aa, synthetic construct
RGDRAAS

SEQ ID NO: 1152 - protein, 7 aa, synthetic construct
RGDRGQV

SEQ ID NO: 1153 - protein, 7 aa, synthetic construct
RGDRGVN

SEQ ID NO: 1154 - protein, 7 aa, synthetic construct
RGDRSAN

SEQ ID NO: 1155 - protein, 7 aa, synthetic construct
RGDRSEH

SEQ ID NO: 1156 - protein, 7 aa, synthetic construct
RGDRSNN

SEQ ID NO: 1157 - protein, 7 aa, synthetic construct
RGDRTLT

SEQ ID NO: 1158 - protein, 7 aa, synthetic construct
RGDRVTV

SEQ ID NO: 1159 - protein, 7 aa, synthetic construct
RGDSNLF

SEQ ID NO: 1160 - protein, 7 aa, synthetic construct
RGDSSKN

SEQ ID NO: 1161 - protein, 7 aa, synthetic construct
RGDVAHQ

SEQ ID NO: 1162 - protein, 7 aa, synthetic construct
RGDVHNR

SEQ ID NO: 1163 - protein, 7 aa, synthetic construct
RGDVNKS

SEQ ID NO: 1164 - protein, 7 aa, synthetic construct
RGDVSFR

SEQ ID NO: 1165 - protein, 7 aa, synthetic construct
RGDFRRN

SEQ ID NO: 1166 - protein, 7 aa, synthetic construct
RGDFSHV

SEQ ID NO: 1167 - protein, 7 aa, synthetic construct
RGDHGAN

SEQ ID NO: 1168 - protein, 7 aa, synthetic construct
RGDHKQL

SEQ ID NO: 1169 - protein, 7 aa, synthetic construct
RGDHNKL

SEQ ID NO: 1170 - protein, 7 aa, synthetic construct
RGDIGHT

SEQ ID NO: 1171 - protein, 7 aa, synthetic construct
RGDIHRL

SEQ ID NO: 1172 - protein, 7 aa, synthetic construct
RGDIKGF

SEQ ID NO: 1173 - protein, 7 aa, synthetic construct
RGDIKGI

SEQ ID NO: 1174 - protein, 7 aa, synthetic construct
RGDARTQ

SEQ ID NO: 1175 - protein, 7 aa, synthetic construct
RGDLIGV

SEQ ID NO: 1176 - protein, 7 aa, synthetic construct
RGDADKQ

SEQ ID NO: 1177 - protein, 7 aa, synthetic construct
RGDQKKI

SEQ ID NO: 1178 - protein, 7 aa, synthetic construct
RGDQKSI

SEQ ID NO: 1179 - protein, 7 aa, synthetic construct
RGDRGIG

SEQ ID NO: 1180 - protein, 7 aa, synthetic construct
RGDRKEN

SEQ ID NO: 1181 - protein, 7 aa, synthetic construct
RGDRSGS

SEQ ID NO: 1182 - protein, 7 aa, synthetic construct
RGDRVKV

SEQ ID NO: 1183 - protein, 7 aa, synthetic construct
RGDSSVI

SEQ ID NO: 1184 - protein, 7 aa, synthetic construct
RGDTRQL

SEQ ID NO: 1185 - protein, 7 aa, synthetic construct
RGDTRTQ

SEQ ID NO: 1186 - protein, 7 aa, synthetic construct
RGDVGSK

SEQ ID NO: 1187 - protein, 7 aa, synthetic construct
RGDVKIH

SEQ ID NO: 1188 - protein, 7 aa, synthetic construct
RGDVQKL

SEQ ID NO: 1189 - protein, 7 aa, synthetic construct
RGDVQNR

SEQ ID NO: 1190 - protein, 7 aa, synthetic construct
RGDVRSQ

SEQ ID NO: 1191 - protein, 7 aa, synthetic construct
RGDVRTK

SEQ ID NO: 1192 - protein, 7 aa, synthetic construct
RGDVTRT

SEQ ID NO: 1193 - protein, 7 aa, synthetic construct
RGDERQF

SEQ ID NO: 1194 - protein, 7 aa, synthetic construct
RGDFGKQ

SEQ ID NO: 1195 - protein, 7 aa, synthetic construct
RGDFNAQ

SEQ ID NO: 1196 - protein, 7 aa, synthetic construct
RGDHEHF

SEQ ID NO: 1197 - protein, 7 aa, synthetic construct
RGDHGFS

SEQ ID NO: 1198 - protein, 7 aa, synthetic construct
RGDIKGT

SEQ ID NO: 1199 - protein, 7 aa, synthetic construct
RGDIQNR

SEQ ID NO: 1200 - protein, 7 aa, synthetic construct
RGDISNK

SEQ ID NO: 1201 - protein, 7 aa, synthetic construct
RGDARAI

SEQ ID NO: 1202 - protein, 7 aa, synthetic construct
RGDKKLI

SEQ ID NO: 1203 - protein, 7 aa, synthetic construct
RGDKNSF

SEQ ID NO: 1204 - protein, 7 aa, synthetic construct
RGDKREK

SEQ ID NO: 1205 - protein, 7 aa, synthetic construct
RGDKVRL

SEQ ID NO: 1206 - protein, 7 aa, synthetic construct
RGDLKGV

SEQ ID NO: 1207 - protein, 7 aa, synthetic construct
RGDLSNT

SEQ ID NO: 1208 - protein, 7 aa, synthetic construct
RGDNKFI

SEQ ID NO: 1209 - protein, 7 aa, synthetic construct
RGDQKNT

SEQ ID NO: 1210 - protein, 7 aa, synthetic construct
RGDQLHV

SEQ ID NO: 1211 - protein, 7 aa, synthetic construct
RGDQRNQ

SEQ ID NO: 1212 - protein, 7 aa, synthetic construct
RGDQSHS

SEQ ID NO: 1213 - protein, 7 aa, synthetic construct
RGDRAFH

SEQ ID NO: 1214 - protein, 7 aa, synthetic construct
RGDRFGV

SEQ ID NO: 1215 - protein, 7 aa, synthetic construct
RGDRHDN

SEQ ID NO: 1216 - protein, 7 aa, synthetic construct
RGDRKND

SEQ ID NO: 1217 - protein, 7 aa, synthetic construct
RGDRNFN

SEQ ID NO: 1218 - protein, 7 aa, synthetic construct
RGDTQNL

SEQ ID NO: 1219 - protein, 7 aa, synthetic construct
RGDVHTK

SEQ ID NO: 1220 - protein, 7 aa, synthetic construct
RGDVRLL

SEQ ID NO: 1221 - protein, 7 aa, synthetic construct
RGDVSLV

SEQ ID NO: 1222 - protein, 7 aa, synthetic construct
RGDFASA

SEQ ID NO: 1223 - protein, 7 aa, synthetic construct
RGDFATN

SEQ ID NO: 1224 - protein, 7 aa, synthetic construct
RGDFLNI

SEQ ID NO: 1225 - protein, 7 aa, synthetic construct
RGDFNTL

SEQ ID NO: 1226 - protein, 7 aa, synthetic construct
RGDFRQD

SEQ ID NO: 1227 - protein, 7 aa, synthetic construct
RGDFSRI

SEQ ID NO: 1228 - protein, 7 aa, synthetic construct
RGDFTHQ

SEQ ID NO: 1229 - protein, 7 aa, synthetic construct
RGDFVQS

SEQ ID NO: 1230 - protein, 7 aa, synthetic construct
RGDGGQR

SEQ ID NO: 1231 - protein, 7 aa, synthetic construct
RGDGSSA

SEQ ID NO: 1232 - protein, 7 aa, synthetic construct
RGDGTHR

SEQ ID NO: 1233 - protein, 7 aa, synthetic construct
RGDGVKN

SEQ ID NO: 1234 - protein, 7 aa, synthetic construct
RGDHAQV

SEQ ID NO: 1235 - protein, 7 aa, synthetic construct
RGDHGAI

SEQ ID NO: 1236 - protein, 7 aa, synthetic construct
RGDHGGN

SEQ ID NO: 1237 - protein, 7 aa, synthetic construct
RGDHGNV

SEQ ID NO: 1238 - protein, 7 aa, synthetic construct
RGDHVQF

SEQ ID NO: 1239 - protein, 7 aa, synthetic construct
RGDIHQV

SEQ ID NO: 1240 - protein, 7 aa, synthetic construct
RGDKHQQ

SEQ ID NO: 1241 - protein, 7 aa, synthetic construct
RGDKNSI

SEQ ID NO: 1242 - protein, 7 aa, synthetic construct
RGDKVRT

SEQ ID NO: 1243 - protein, 7 aa, synthetic construct
RGDLVKV

SEQ ID NO: 1244 - protein, 7 aa, synthetic construct
RGDNFKF

SEQ ID NO: 1245 - protein, 7 aa, synthetic construct
RGDNNKI

SEQ ID NO: 1246 - protein, 7 aa, synthetic construct
RGDQATV

SEQ ID NO: 1247 - protein, 7 aa, synthetic construct
RGDRDKI

SEQ ID NO: 1248 - protein, 7 aa, synthetic construct
RGDRGFQ

SEQ ID NO: 1249 - protein, 7 aa, synthetic construct
RGDRGQA

SEQ ID NO: 1250 - protein, 7 aa, synthetic construct
RGDRIIV

SEQ ID NO: 1251 - protein, 7 aa, synthetic construct
RGDRLTS

SEQ ID NO: 1252 - protein, 7 aa, synthetic construct
RGDRSGE

SEQ ID NO: 1253 - protein, 7 aa, synthetic construct
RGDTRFI

SEQ ID NO: 1254 - protein, 7 aa, synthetic construct
RGDTVVF

SEQ ID NO: 1255 - protein, 7 aa, synthetic construct
RGDVGFV

SEQ ID NO: 1256 - protein, 7 aa, synthetic construct
RGDVKFK

SEQ ID NO: 1257 - protein, 7 aa, synthetic construct
RGDAGKV

SEQ ID NO: 1258 - protein, 7 aa, synthetic construct
RGDAGRN

SEQ ID NO: 1259 - protein, 7 aa, synthetic construct
RGDFNKT

SEQ ID NO: 1260 - protein, 7 aa, synthetic construct
RGDFVGT

SEQ ID NO: 1261 - protein, 7 aa, synthetic construct
RGDGAGK

SEQ ID NO: 1262 - protein, 7 aa, synthetic construct
RGDGSHN

SEQ ID NO: 1263 - protein, 7 aa, synthetic construct
RGDHGHA

SEQ ID NO: 1264 - protein, 7 aa, synthetic construct
RGDHSAV

SEQ ID NO: 1265 - protein, 7 aa, synthetic construct
RGDIATR

SEQ ID NO: 1266 - protein, 7 aa, synthetic construct
RGDIQKL

SEQ ID NO: 1267 - protein, 7 aa, synthetic construct
RGDKGNR

SEQ ID NO: 1268 - protein, 7 aa, synthetic construct
RGDKNSA

SEQ ID NO: 1269 - protein, 7 aa, synthetic construct
RGDKRGE

SEQ ID NO: 1270 - protein, 7 aa, synthetic construct
RGDKSKV

SEQ ID NO: 1271 - protein, 7 aa, synthetic construct
RGDLHSN

SEQ ID NO: 1272 - protein, 7 aa, synthetic construct
RGDLLHT

SEQ ID NO: 1273 - protein, 7 aa, synthetic construct
RGDLVGV

SEQ ID NO: 1274 - protein, 7 aa, synthetic construct
RGDLVNK

SEQ ID NO: 1275 - protein, 7 aa, synthetic construct
RGDNLHF

SEQ ID NO: 1276 - protein, 7 aa, synthetic construct
RGDNRFV

SEQ ID NO: 1277 - protein, 7 aa, synthetic construct
RGDQLNI

SEQ ID NO: 1278 - protein, 7 aa, synthetic construct
RGDRFVI

SEQ ID NO: 1279 - protein, 7 aa, synthetic construct
RGDRGDT

SEQ ID NO: 1280 - protein, 7 aa, synthetic construct
RGDRGTS

SEQ ID NO: 1281 - protein, 7 aa, synthetic construct
RGDRNKN

SEQ ID NO: 1282 - protein, 7 aa, synthetic construct
RGDRQAI

SEQ ID NO: 1283 - protein, 7 aa, synthetic construct
RGDRQIT

SEQ ID NO: 1284 - protein, 7 aa, synthetic construct
RGDRTSV

SEQ ID NO: 1285 - protein, 7 aa, synthetic construct
RGDRVGG

SEQ ID NO: 1286 - protein, 7 aa, synthetic construct
RGDSHQL

SEQ ID NO: 1287 - protein, 7 aa, synthetic construct
RGDSRAV

SEQ ID NO: 1288 - protein, 7 aa, synthetic construct
RGDTNSL

SEQ ID NO: 1289 - protein, 7 aa, synthetic construct
RGDTRAI

SEQ ID NO: 1290 - protein, 7 aa, synthetic construct
RGDVKFI

SEQ ID NO: 1291 - protein, 7 aa, synthetic construct
RGDVKTT

SEQ ID NO: 1292 - protein, 7 aa, synthetic construct
RGDFGNN

SEQ ID NO: 1293 - protein, 7 aa, synthetic construct
RGDFSRQ

SEQ ID NO: 1294 - protein, 7 aa, synthetic construct
RGDFSRT

SEQ ID NO: 1295 - protein, 7 aa, synthetic construct
RGDAHSL

SEQ ID NO: 1296 - protein, 7 aa, synthetic construct
RGDFTRQ

SEQ ID NO: 1297 - protein, 7 aa, synthetic construct
RGDGIRL

SEQ ID NO: 1298 - protein, 7 aa, synthetic construct
RGDGRSG

SEQ ID NO: 1299 - protein, 7 aa, synthetic construct
RGDGVKV

SEQ ID NO: 1300 - protein, 7 aa, synthetic construct
RGDHINL

SEQ ID NO: 1301 - protein, 7 aa, synthetic construct
RGDHKSI

SEQ ID NO: 1302 - protein, 7 aa, synthetic construct
RGDHNNL

SEQ ID NO: 1303 - protein, 7 aa, synthetic construct
RGDHSEF

SEQ ID NO: 1304 - protein, 7 aa, synthetic construct
RGDHSLV

SEQ ID NO: 1305 - protein, 7 aa, synthetic construct
RGDHTGI

SEQ ID NO: 1306 - protein, 7 aa, synthetic construct
RGDIDRV

SEQ ID NO: 1307 - protein, 7 aa, synthetic construct
RGDINTI

SEQ ID NO: 1308 - protein, 7 aa, synthetic construct
RGDKAIT

SEQ ID NO: 1309 - protein, 7 aa, synthetic construct
RGDKASV

SEQ ID NO: 1310 - protein, 7 aa, synthetic construct
RGDKGRI

SEQ ID NO: 1311 - protein, 7 aa, synthetic construct
RGDKGSI

SEQ ID NO: 1312 - protein, 7 aa, synthetic construct
RGDKIVI

SEQ ID NO: 1313 - protein, 7 aa, synthetic construct
RGDKRVT

SEQ ID NO: 1314 - protein, 7 aa, synthetic construct
RGDNIHI

SEQ ID NO: 1315 - protein, 7 aa, synthetic construct
RGDNNES

SEQ ID NO: 1316 - protein, 7 aa, synthetic construct
RGDQQRF

SEQ ID NO: 1317 - protein, 7 aa, synthetic construct
RGDQRAV

SEQ ID NO: 1318 - protein, 7 aa, synthetic construct
RGDQRVI

SEQ ID NO: 1319 - protein, 7 aa, synthetic construct
RGDRANV

SEQ ID NO: 1320 - protein, 7 aa, synthetic construct
RGDRHDL

SEQ ID NO: 1321 - protein, 7 aa, synthetic construct
RGDRNDS

SEQ ID NO: 1322 - protein, 7 aa, synthetic construct
RGDRNGK

SEQ ID NO: 1323 - protein, 7 aa, synthetic construct
RGDRQVN

SEQ ID NO: 1324 - protein, 7 aa, synthetic construct
RGDRSTH

SEQ ID NO: 1325 - protein, 7 aa, synthetic construct
RGDSKGI

SEQ ID NO: 1326 - protein, 7 aa, synthetic construct
RGDSSKL

SEQ ID NO: 1327 - protein, 7 aa, synthetic construct
RGDFKHT

SEQ ID NO: 1328 - protein, 7 aa, synthetic construct
RGDFKST

SEQ ID NO: 1329 - protein, 7 aa, synthetic construct
RGDFLTS

SEQ ID NO: 1330 - protein, 7 aa, synthetic construct
RGDFSVK

SEQ ID NO: 1331 - protein, 7 aa, synthetic construct
RGDFTVT

SEQ ID NO: 1332 - protein, 7 aa, synthetic construct
RGDFVVK

SEQ ID NO: 1333 - protein, 7 aa, synthetic construct
RGDGANI

SEQ ID NO: 1334 - protein, 7 aa, synthetic construct
RGDGFVH

SEQ ID NO: 1335 - protein, 7 aa, synthetic construct
RGDGGFL

SEQ ID NO: 1336 - protein, 7 aa, synthetic construct
RGDHRAL

SEQ ID NO: 1337 - protein, 7 aa, synthetic construct
RGDHVKF

SEQ ID NO: 1338 - protein, 7 aa, synthetic construct
RGDHVSF

SEQ ID NO: 1339 - protein, 7 aa, synthetic construct
RGDIHHI

SEQ ID NO: 1340 - protein, 7 aa, synthetic construct
RGDILGI

SEQ ID NO: 1341 - protein, 7 aa, synthetic construct
RGDIQGK

SEQ ID NO: 1342 - protein, 7 aa, synthetic construct
RGDIVRF

SEQ ID NO: 1343 - protein, 7 aa, synthetic construct
RGDIVRI

SEQ ID NO: 1344 - protein, 7 aa, synthetic construct
RGDKHFL

SEQ ID NO: 1345 - protein, 7 aa, synthetic construct
RGDARGS

SEQ ID NO: 1346 - protein, 7 aa, synthetic construct
RGDKNFL

SEQ ID NO: 1347 - protein, 7 aa, synthetic construct
RGDKNII

SEQ ID NO: 1348 - protein, 7 aa, synthetic construct
RGDKNNL

SEQ ID NO: 1349 - protein, 7 aa, synthetic construct
RGDKVTV

SEQ ID NO: 1350 - protein, 7 aa, synthetic construct
RGDAVTL

SEQ ID NO: 1351 - protein, 7 aa, synthetic construct
RGDQGHV

SEQ ID NO: 1352 - protein, 7 aa, synthetic construct
RGDQGKS

SEQ ID NO: 1353 - protein, 7 aa, synthetic construct
RGDQQKN

SEQ ID NO: 1354 - protein, 7 aa, synthetic construct
RGDQRDV

SEQ ID NO: 1355 - protein, 7 aa, synthetic construct
RGDQTQQ

SEQ ID NO: 1356 - protein, 7 aa, synthetic construct
RGDRASN

SEQ ID NO: 1357 - protein, 7 aa, synthetic construct
RGDRGFI

SEQ ID NO: 1358 - protein, 7 aa, synthetic construct
RGDRGIV

SEQ ID NO: 1359 - protein, 7 aa, synthetic construct
RGDRGNS

SEQ ID NO: 1360 - protein, 7 aa, synthetic construct
RGDRHTI

SEQ ID NO: 1361 - protein, 7 aa, synthetic construct
RGDRLFI

SEQ ID NO: 1362 - protein, 7 aa, synthetic construct
RGDDESR

SEQ ID NO: 1363 - protein, 7 aa, synthetic construct
RGDRVGL

SEQ ID NO: 1364 - protein, 7 aa, synthetic construct
RGDSNLQ

SEQ ID NO: 1365 - protein, 7 aa, synthetic construct
RGDSSLI

SEQ ID NO: 1366 - protein, 7 aa, synthetic construct
RGDVTGK

SEQ ID NO: 1367 - protein, 7 aa, synthetic construct
RGDVVHN

SEQ ID NO: 1368 - protein, 7 aa, synthetic construct
RGDVVRF

SEQ ID NO: 1369 - protein, 7 aa, synthetic construct
RGDFDNH

SEQ ID NO: 1370 - protein, 7 aa, synthetic construct
RGDFGFQ

SEQ ID NO: 1371 - protein, 7 aa, synthetic construct
RGDFGRN

SEQ ID NO: 1372 - protein, 7 aa, synthetic construct
RGDFHST

SEQ ID NO: 1373 - protein, 7 aa, synthetic construct
RGDFIRN

SEQ ID NO: 1374 - protein, 7 aa, synthetic construct
RGDFKGQ

SEQ ID NO: 1375 - protein, 7 aa, synthetic construct
RGDFNRH

SEQ ID NO: 1376 - protein, 7 aa, synthetic construct
RGDFRKH

SEQ ID NO: 1377 - protein, 7 aa, synthetic construct
RGDFVAK

SEQ ID NO: 1378 - protein, 7 aa, synthetic construct
RGDFVQR

SEQ ID NO: 1379 - protein, 7 aa, synthetic construct
RGDGTRL

SEQ ID NO: 1380 - protein, 7 aa, synthetic construct
RGDGVVL

SEQ ID NO: 1381 - protein, 7 aa, synthetic construct
RGDHEAL

SEQ ID NO: 1382 - protein, 7 aa, synthetic construct
RGDHGFL

SEQ ID NO: 1383 - protein, 7 aa, synthetic construct
RGDHRNA

SEQ ID NO: 1384 - protein, 7 aa, synthetic construct
RGDHRTI

SEQ ID NO: 1385 - protein, 7 aa, synthetic construct
RGDHSVV

SEQ ID NO: 1386 - protein, 7 aa, synthetic construct
RGDKTTT

SEQ ID NO: 1387 - protein, 7 aa, synthetic construct
RGDLHGR

SEQ ID NO: 1388 - protein, 7 aa, synthetic construct
RGDLHKN

SEQ ID NO: 1389 - protein, 7 aa, synthetic construct
RGDASTI

SEQ ID NO: 1390 - protein, 7 aa, synthetic construct
RGDLRFE

SEQ ID NO: 1391 - protein, 7 aa, synthetic construct
RGDNAQV

SEQ ID NO: 1392 - protein, 7 aa, synthetic construct
RGDATQL

SEQ ID NO: 1393 - protein, 7 aa, synthetic construct
RGDNHTF

SEQ ID NO: 1394 - protein, 7 aa, synthetic construct
RGDQRNN

SEQ ID NO: 1395 - protein, 7 aa, synthetic construct
RGDQRSI

SEQ ID NO: 1396 - protein, 7 aa, synthetic construct
RGDRAGN

SEQ ID NO: 1397 - protein, 7 aa, synthetic construct
RGDRLLV

SEQ ID NO: 1398 - protein, 7 aa, synthetic construct
RGDRRII

SEQ ID NO: 1399 - protein, 7 aa, synthetic construct
RGDRSIV

SEQ ID NO: 1400 - protein, 7 aa, synthetic construct
RGDRSTS

SEQ ID NO: 1401 - protein, 7 aa, synthetic construct
RGDSHKV

SEQ ID NO: 1402 - protein, 7 aa, synthetic construct
RGDSHNL

SEQ ID NO: 1403 - protein, 7 aa, synthetic construct
RGDSNKT

SEQ ID NO: 1404 - protein, 7 aa, synthetic construct
RGDTAVI

SEQ ID NO: 1405 - protein, 7 aa, synthetic construct
RGDVFQR

SEQ ID NO: 1406 - protein, 7 aa, synthetic construct
RGDVQTI

SEQ ID NO: 1407 - protein, 7 aa, synthetic construct
RGDDRSK

SEQ ID NO: 1408 - protein, 7 aa, synthetic construct
RGDAFRI

SEQ ID NO: 1409 - protein, 7 aa, synthetic construct
RGDFAAS

SEQ ID NO: 1410 - protein, 7 aa, synthetic construct
RGDFRVR

SEQ ID NO: 1411 - protein, 7 aa, synthetic construct
RGDFSHQ

SEQ ID NO: 1412 - protein, 7 aa, synthetic construct
RGDFSKN

SEQ ID NO: 1413 - protein, 7 aa, synthetic construct
RGDGHVL

SEQ ID NO: 1414 - protein, 7 aa, synthetic construct
RGDGIRT

SEQ ID NO: 1415 - protein, 7 aa, synthetic construct
RGDISHN

SEQ ID NO: 1416 - protein, 7 aa, synthetic construct
RGDKIFL

SEQ ID NO: 1417 - protein, 7 aa, synthetic construct
RGDKKNS

SEQ ID NO: 1418 - protein, 7 aa, synthetic construct
RGDARGN

SEQ ID NO: 1419 - protein, 7 aa, synthetic construct
RGDKQAI

SEQ ID NO: 1420 - protein, 7 aa, synthetic construct
RGDASGR

SEQ ID NO: 1421 - protein, 7 aa, synthetic construct
RGDLGVK

SEQ ID NO: 1422 - protein, 7 aa, synthetic construct
RGDLIGR

SEQ ID NO: 1423 - protein, 7 aa, synthetic construct
RGDLNRI

SEQ ID NO: 1424 - protein, 7 aa, synthetic construct
RGDLQGT

SEQ ID NO: 1425 - protein, 7 aa, synthetic construct
RGDLRTA

SEQ ID NO: 1426 - protein, 7 aa, synthetic construct
RGDNGVL

SEQ ID NO: 1427 - protein, 7 aa, synthetic construct
RGDNLKQ

SEQ ID NO: 1428 - protein, 7 aa, synthetic construct
RGDQHSV

SEQ ID NO: 1429 - protein, 7 aa, synthetic construct
RGDQRIE

SEQ ID NO: 1430 - protein, 7 aa, synthetic construct
RGDQSKI

SEQ ID NO: 1431 - protein, 7 aa, synthetic construct
RGDRENL

SEQ ID NO: 1432 - protein, 7 aa, synthetic construct
RGDRFNQ

SEQ ID NO: 1433 - protein, 7 aa, synthetic construct
RGDRGNN

SEQ ID NO: 1434 - protein, 7 aa, synthetic construct
RGDRGVI

SEQ ID NO: 1435 - protein, 7 aa, synthetic construct
RGDRLGL

SEQ ID NO: 1436 - protein, 7 aa, synthetic construct
RGDRQNS

SEQ ID NO: 1437 - protein, 7 aa, synthetic construct
RGDRRDI

SEQ ID NO: 1438 - protein, 7 aa, synthetic construct
RGDRSKQ

SEQ ID NO: 1439 - protein, 7 aa, synthetic construct
RGDRTVF

SEQ ID NO: 1440 - protein, 7 aa, synthetic construct
RGDSASI

SEQ ID NO: 1441 - protein, 7 aa, synthetic construct
RGDSHII

SEQ ID NO: 1442 - protein, 7 aa, synthetic construct
RGDSNKN

SEQ ID NO: 1443 - protein, 7 aa, synthetic construct
RGDSRNQ

SEQ ID NO: 1444 - protein, 7 aa, synthetic construct
RGDTKNI

SEQ ID NO: 1445 - protein, 7 aa, synthetic construct
RGDTRHI

SEQ ID NO: 1446 - protein, 7 aa, synthetic construct
RGDTSNK

SEQ ID NO: 1447 - protein, 7 aa, synthetic construct
RGDVHQI

SEQ ID NO: 1448 - protein, 7 aa, synthetic construct
RGDVKHN

SEQ ID NO: 1449 - protein, 7 aa, synthetic construct
RGDVRTE

SEQ ID NO: 1450 - protein, 7 aa, synthetic construct
RGDFKGF

SEQ ID NO: 1451 - protein, 7 aa, synthetic construct
RGDFKHS

SEQ ID NO: 1452 - protein, 7 aa, synthetic construct
RGDFRRE

SEQ ID NO: 1453 - protein, 7 aa, synthetic construct
RGDFRRS

SEQ ID NO: 1454 - protein, 7 aa, synthetic construct
RGDFSQN

SEQ ID NO: 1455 - protein, 7 aa, synthetic construct
RGDFVTR

SEQ ID NO: 1456 - protein, 7 aa, synthetic construct
RGDGSRF

SEQ ID NO: 1457 - protein, 7 aa, synthetic construct
RGDHATV

SEQ ID NO: 1458 - protein, 7 aa, synthetic construct
RGDHGHG

SEQ ID NO: 1459 - protein, 7 aa, synthetic construct
RGDHKAI

SEQ ID NO: 1460 - protein, 7 aa, synthetic construct
RGDHKSF

SEQ ID NO: 1461 - protein, 7 aa, synthetic construct
RGDHTSI

SEQ ID NO: 1462 - protein, 7 aa, synthetic construct
RGDAATI

SEQ ID NO: 1463 - protein, 7 aa, synthetic construct
RGDHVTL

SEQ ID NO: 1464 - protein, 7 aa, synthetic construct
RGDIAIK

SEQ ID NO: 1465 - protein, 7 aa, synthetic construct
RGDIGNK

SEQ ID NO: 1466 - protein, 7 aa, synthetic construct
RGDINVR

SEQ ID NO: 1467 - protein, 7 aa, synthetic construct
RGDKIFI

SEQ ID NO: 1468 - protein, 7 aa, synthetic construct
RGDKLEN

SEQ ID NO: 1469 - protein, 7 aa, synthetic construct
RGDKLNV

SEQ ID NO: 1470 - protein, 7 aa, synthetic construct
RGDKNSL

SEQ ID NO: 1471 - protein, 7 aa, synthetic construct
RGDKSQN

SEQ ID NO: 1472 - protein, 7 aa, synthetic construct
RGDASKQ

SEQ ID NO: 1473 - protein, 7 aa, synthetic construct
RGDLTHV

SEQ ID NO: 1474 - protein, 7 aa, synthetic construct
RGDNGRK

SEQ ID NO: 1475 - protein, 7 aa, synthetic construct
RGDAVKL

SEQ ID NO: 1476 - protein, 7 aa, synthetic construct
RGDNSHL

SEQ ID NO: 1477 - protein, 7 aa, synthetic construct
RGDNTHV

SEQ ID NO: 1478 - protein, 7 aa, synthetic construct
RGDQRNA

SEQ ID NO: 1479 - protein, 7 aa, synthetic construct
RGDREKL

SEQ ID NO: 1480 - protein, 7 aa, synthetic construct
RGDREKV

SEQ ID NO: 1481 - protein, 7 aa, synthetic construct
RGDRFNV

SEQ ID NO: 1482 - protein, 7 aa, synthetic construct
RGDRFQI

SEQ ID NO: 1483 - protein, 7 aa, synthetic construct
RGDRLFK

SEQ ID NO: 1484 - protein, 7 aa, synthetic construct
RGDRSSL

SEQ ID NO: 1485 - protein, 7 aa, synthetic construct
RGDRSVF

SEQ ID NO: 1486 - protein, 7 aa, synthetic construct
RGDRTLI

SEQ ID NO: 1487 - protein, 7 aa, synthetic construct
RGDRVRF

SEQ ID NO: 1488 - protein, 7 aa, synthetic construct
RGDTKTV

SEQ ID NO: 1489 - protein, 7 aa, synthetic construct
RGDTRTT

SEQ ID NO: 1490 - protein, 7 aa, synthetic construct
RGDVNKQ

SEQ ID NO: 1491 - protein, 7 aa, synthetic construct
RGDVRSL

SEQ ID NO: 1492 - protein, 7 aa, synthetic construct
RGDVRVT

SEQ ID NO: 1493 - protein, 7 aa, synthetic construct
RGDVTRV

SEQ ID NO: 1494 - protein, 7 aa, synthetic construct
RGDFARN

SEQ ID NO: 1495 - protein, 7 aa, synthetic construct
RGDFEVT

SEQ ID NO: 1496 - protein, 7 aa, synthetic construct
RGDFKEK

SEQ ID NO: 1497 - protein, 7 aa, synthetic construct
RGDFLKN

SEQ ID NO: 1498 - protein, 7 aa, synthetic construct
RGDFRKV

SEQ ID NO: 1499 - protein, 7 aa, synthetic construct
RGDGHAK

SEQ ID NO: 1500 - protein, 7 aa, synthetic construct
RGDGNRS

SEQ ID NO: 1501 - protein, 7 aa, synthetic construct
RGDGTKF

SEQ ID NO: 1502 - protein, 7 aa, synthetic construct
RGDHAAQ

SEQ ID NO: 1503 - protein, 7 aa, synthetic construct
RGDHDKI

SEQ ID NO: 1504 - protein, 7 aa, synthetic construct
RGDHLGF

SEQ ID NO: 1505 - protein, 7 aa, synthetic construct
RGDIKVT

SEQ ID NO: 1506 - protein, 7 aa, synthetic construct
RGDILVI

SEQ ID NO: 1507 - protein, 7 aa, synthetic construct
RGDIRFI

SEQ ID NO: 1508 - protein, 7 aa, synthetic construct
RGDKHSS

SEQ ID NO: 1509 - protein, 7 aa, synthetic construct
RGDARGI

SEQ ID NO: 1510 - protein, 7 aa, synthetic construct
RGDKSTV

SEQ ID NO: 1511 - protein, 7 aa, synthetic construct
RGDASKH

SEQ ID NO: 1512 - protein, 7 aa, synthetic construct
RGDLRQT

SEQ ID NO: 1513 - protein, 7 aa, synthetic construct
RGDLVGS

SEQ ID NO: 1514 - protein, 7 aa, synthetic construct
RGDNGGR

SEQ ID NO: 1515 - protein, 7 aa, synthetic construct
RGDNSRN

SEQ ID NO: 1516 - protein, 7 aa, synthetic construct
RGDQFKF

SEQ ID NO: 1517 - protein, 7 aa, synthetic construct
RGDDAKF

SEQ ID NO: 1518 - protein, 7 aa, synthetic construct
RGDQLNV

SEQ ID NO: 1519 - protein, 7 aa, synthetic construct
RGDQNRR

SEQ ID NO: 1520 - protein, 7 aa, synthetic construct
RGDQNRV

SEQ ID NO: 1521 - protein, 7 aa, synthetic construct
RGDQQRN

SEQ ID NO: 1522 - protein, 7 aa, synthetic construct
RGDQVKN

SEQ ID NO: 1523 - protein, 7 aa, synthetic construct
RGDRESL

SEQ ID NO: 1524 - protein, 7 aa, synthetic construct
RGDRLGQ

SEQ ID NO: 1525 - protein, 7 aa, synthetic construct
RGDRLGV

SEQ ID NO: 1526 - protein, 7 aa, synthetic construct
RGDRNNT

SEQ ID NO: 1527 - protein, 7 aa, synthetic construct
RGDRRAF

SEQ ID NO: 1528 - protein, 7 aa, synthetic construct
RGDRSIK

SEQ ID NO: 1529 - protein, 7 aa, synthetic construct
RGDRSSN

SEQ ID NO: 1530 - protein, 7 aa, synthetic construct
RGDRVFN

SEQ ID NO: 1531 - protein, 7 aa, synthetic construct
RGDRVSV

SEQ ID NO: 1532 - protein, 7 aa, synthetic construct
RGDSGTI

SEQ ID NO: 1533 - protein, 7 aa, synthetic construct
RGDSQRL

SEQ ID NO: 1534 - protein, 7 aa, synthetic construct
RGDSSRF

SEQ ID NO: 1535 - protein, 7 aa, synthetic construct
RGDTLSI

SEQ ID NO: 1536 - protein, 7 aa, synthetic construct
RGDVRVL

SEQ ID NO: 1537 - protein, 7 aa, synthetic construct
RGDFGQK

SEQ ID NO: 1538 - protein, 7 aa, synthetic construct
RGDFHTV

SEQ ID NO: 1539 - protein, 7 aa, synthetic construct
RGDFKGN

SEQ ID NO: 1540 - protein, 7 aa, synthetic construct
RGDFRQN

SEQ ID NO: 1541 - protein, 7 aa, synthetic construct
RGDFSTR

SEQ ID NO: 1542 - protein, 7 aa, synthetic construct
RGDFTHN

SEQ ID NO: 1543 - protein, 7 aa, synthetic construct
RGDGASF

SEQ ID NO: 1544 - protein, 7 aa, synthetic construct
RGDGRTI

SEQ ID NO: 1545 - protein, 7 aa, synthetic construct
RGDGSST

SEQ ID NO: 1546 - protein, 7 aa, synthetic construct
RGDHAKV

SEQ ID NO: 1547 - protein, 7 aa, synthetic construct
RGDHGFN

SEQ ID NO: 1548 - protein, 7 aa, synthetic construct
RGDHGST

SEQ ID NO: 1549 - protein, 7 aa, synthetic construct
RGDHHEL

SEQ ID NO: 1550 - protein, 7 aa, synthetic construct
RGDHQSL

SEQ ID NO: 1551 - protein, 7 aa, synthetic construct
RGDHRFN

SEQ ID NO: 1552 - protein, 7 aa, synthetic construct
RGDHTRN

SEQ ID NO: 1553 - protein, 7 aa, synthetic construct
RGDIGGK

SEQ ID NO: 1554 - protein, 7 aa, synthetic construct
RGDIHTT

SEQ ID NO: 1555 - protein, 7 aa, synthetic construct
RGDIKIV

SEQ ID NO: 1556 - protein, 7 aa, synthetic construct
RGDIRNI

SEQ ID NO: 1557 - protein, 7 aa, synthetic construct
RGDITKF

SEQ ID NO: 1558 - protein, 7 aa, synthetic construct
RGDARQI

SEQ ID NO: 1559 - protein, 7 aa, synthetic construct
RGDLQTN

SEQ ID NO: 1560 - protein, 7 aa, synthetic construct
RGDLVKT

SEQ ID NO: 1561 - protein, 7 aa, synthetic construct
RGDNRNI

SEQ ID NO: 1562 - protein, 7 aa, synthetic construct
RGDNVTL

SEQ ID NO: 1563 - protein, 7 aa, synthetic construct
RGDQEVR

SEQ ID NO: 1564 - protein, 7 aa, synthetic construct
RGDQRFQ

SEQ ID NO: 1565 - protein, 7 aa, synthetic construct
RGDRATI

SEQ ID NO: 1566 - protein, 7 aa, synthetic construct
RGDRGSN

SEQ ID NO: 1567 - protein, 7 aa, synthetic construct
RGDRHDF

SEQ ID NO: 1568 - protein, 7 aa, synthetic construct
RGDRKVV

SEQ ID NO: 1569 - protein, 7 aa, synthetic construct
RGDRSST

SEQ ID NO: 1570 - protein, 7 aa, synthetic construct
RGDSQNR

SEQ ID NO: 1571 - protein, 7 aa, synthetic construct
RGDTKNL

SEQ ID NO: 1572 - protein, 7 aa, synthetic construct
RGDTSKK

SEQ ID NO: 1573 - protein, 7 aa, synthetic construct
RGDTVLK

SEQ ID NO: 1574 - protein, 7 aa, synthetic construct
RGDVHTQ

SEQ ID NO: 1575 - protein, 7 aa, synthetic construct
RGDVQKI

SEQ ID NO: 1576 - protein, 7 aa, synthetic construct
RGDVRVH

SEQ ID NO: 1577 - protein, 7 aa, synthetic construct
RGDVVLK

SEQ ID NO: 1578 - protein, 7 aa, synthetic construct
RGDFGNK

SEQ ID NO: 1579 - protein, 7 aa, synthetic construct
RGDFHHT

SEQ ID NO: 1580 - protein, 7 aa, synthetic construct
RGDFKVR

SEQ ID NO: 1581 - protein, 7 aa, synthetic construct
RGDFRIT

SEQ ID NO: 1582 - protein, 7 aa, synthetic construct
RGDFTKI

SEQ ID NO: 1583 - protein, 7 aa, synthetic construct
RGDGDIF

SEQ ID NO: 1584 - protein, 7 aa, synthetic construct
RGDGSHK

SEQ ID NO: 1585 - protein, 7 aa, synthetic construct
RGDGSKL

SEQ ID NO: 1586 - protein, 7 aa, synthetic construct
RGDHSGF

SEQ ID NO: 1587 - protein, 7 aa, synthetic construct
RGDIENR

SEQ ID NO: 1588 - protein, 7 aa, synthetic construct
RGDIGVK

SEQ ID NO: 1589 - protein, 7 aa, synthetic construct
RGDIKSH

SEQ ID NO: 1590 - protein, 7 aa, synthetic construct
RGDITKS

SEQ ID NO: 1591 - protein, 7 aa, synthetic construct
RGDKENK

SEQ ID NO: 1592 - protein, 7 aa, synthetic construct
RGDKGFQ

SEQ ID NO: 1593 - protein, 7 aa, synthetic construct
RGDKHGF

SEQ ID NO: 1594 - protein, 7 aa, synthetic construct
RGDKLHF

SEQ ID NO: 1595 - protein, 7 aa, synthetic construct
RGDKNVV

SEQ ID NO: 1596 - protein, 7 aa, synthetic construct
RGDLAGK

SEQ ID NO: 1597 - protein, 7 aa, synthetic construct
RGDLHVT

SEQ ID NO: 1598 - protein, 7 aa, synthetic construct
RGDLRGN

SEQ ID NO: 1599 - protein, 7 aa, synthetic construct
RGDLSTT

SEQ ID NO: 1600 - protein, 7 aa, synthetic construct
RGDLTKV

SEQ ID NO: 1601 - protein, 7 aa, synthetic construct
RGDNFKV

SEQ ID NO: 1602 - protein, 7 aa, synthetic construct
RGDDAGK

SEQ ID NO: 1603 - protein, 7 aa, synthetic construct
RGDQRAF

SEQ ID NO: 1604 - protein, 7 aa, synthetic construct
RGDRKFI

SEQ ID NO: 1605 - protein, 7 aa, synthetic construct
RGDRNTA

SEQ ID NO: 1606 - protein, 7 aa, synthetic construct
RGDRNVL

SEQ ID NO: 1607 - protein, 7 aa, synthetic construct
RGDRSIQ

SEQ ID NO: 1608 - protein, 7 aa, synthetic construct
RGDSRIL

SEQ ID NO: 1609 - protein, 7 aa, synthetic construct
RGDTRFQ

SEQ ID NO: 1610 - protein, 7 aa, synthetic construct
RGDVETF

SEQ ID NO: 1611 - protein, 7 aa, synthetic construct
RGDVHQL

SEQ ID NO: 1612 - protein, 7 aa, synthetic construct
RGDVKFH

SEQ ID NO: 1613 - protein, 7 aa, synthetic construct
RGDVKVV

SEQ ID NO: 1614 - protein, 7 aa, synthetic construct
RGDVSKV

SEQ ID NO: 1615 - protein, 7 aa, synthetic construct
RGDVVHL

SEQ ID NO: 1616 - protein, 7 aa, synthetic construct
RGDFGGA

SEQ ID NO: 1617 - protein, 7 aa, synthetic construct
RGDAAKV

SEQ ID NO: 1618 - protein, 7 aa, synthetic construct
RGDFTRT

SEQ ID NO: 1619 - protein, 7 aa, synthetic construct
RGDFVNQ

SEQ ID NO: 1620 - protein, 7 aa, synthetic construct
RGDFVSS

SEQ ID NO: 1621 - protein, 7 aa, synthetic construct
RGDGHKT

SEQ ID NO: 1622 - protein, 7 aa, synthetic construct
RGDGSKV

SEQ ID NO: 1623 - protein, 7 aa, synthetic construct
RGDGTRN

SEQ ID NO: 1624 - protein, 7 aa, synthetic construct
RGDHSSV

SEQ ID NO: 1625 - protein, 7 aa, synthetic construct
RGDIKGR

SEQ ID NO: 1626 - protein, 7 aa, synthetic construct
RGDIQHR

SEQ ID NO: 1627 - protein, 7 aa, synthetic construct
RGDKKHD

SEQ ID NO: 1628 - protein, 7 aa, synthetic construct
RGDARHV

SEQ ID NO: 1629 - protein, 7 aa, synthetic construct
RGDKNTI

SEQ ID NO: 1630 - protein, 7 aa, synthetic construct
RGDKRQV

SEQ ID NO: 1631 - protein, 7 aa, synthetic construct
RGDKSDR

SEQ ID NO: 1632 - protein, 7 aa, synthetic construct
RGDLAHT

SEQ ID NO: 1633 - protein, 7 aa, synthetic construct
RGDASGI

SEQ ID NO: 1634 - protein, 7 aa, synthetic construct
RGDASHV

SEQ ID NO: 1635 - protein, 7 aa, synthetic construct
RGDLGGG

SEQ ID NO: 1636 - protein, 7 aa, synthetic construct
RGDLIIV

SEQ ID NO: 1637 - protein, 7 aa, synthetic construct
RGDLIQR

SEQ ID NO: 1638 - protein, 7 aa, synthetic construct
RGDLKHN

SEQ ID NO: 1639 - protein, 7 aa, synthetic construct
RGDLKIT

SEQ ID NO: 1640 - protein, 7 aa, synthetic construct
RGDLRTT

SEQ ID NO: 1641 - protein, 7 aa, synthetic construct
RGDNGRV

SEQ ID NO: 1642 - protein, 7 aa, synthetic construct
RGDNVRI

SEQ ID NO: 1643 - protein, 7 aa, synthetic construct
RGDQLHT

SEQ ID NO: 1644 - protein, 7 aa, synthetic construct
RGDQLVI

SEQ ID NO: 1645 - protein, 7 aa, synthetic construct
RGDRDGF

SEQ ID NO: 1646 - protein, 7 aa, synthetic construct
RGDREGR

SEQ ID NO: 1647 - protein, 7 aa, synthetic construct
RGDRGSF

SEQ ID NO: 1648 - protein, 7 aa, synthetic construct
RGDRNIV

SEQ ID NO: 1649 - protein, 7 aa, synthetic construct
RGDRQTF

SEQ ID NO: 1650 - protein, 7 aa, synthetic construct
RGDRSSK

SEQ ID NO: 1651 - protein, 7 aa, synthetic construct
RGDSANR

SEQ ID NO: 1652 - protein, 7 aa, synthetic construct
RGDSLKL

SEQ ID NO: 1653 - protein, 7 aa, synthetic construct
RGDSNRI

SEQ ID NO: 1654 - protein, 7 aa, synthetic construct
RGDSTGR

SEQ ID NO: 1655 - protein, 7 aa, synthetic construct
RGDSVKI

SEQ ID NO: 1656 - protein, 7 aa, synthetic construct
RGDTAHV

SEQ ID NO: 1657 - protein, 7 aa, synthetic construct
RGDTIVL

SEQ ID NO: 1658 - protein, 7 aa, synthetic construct
RGDTKSI

SEQ ID NO: 1659 - protein, 7 aa, synthetic construct
RGDVGEK

SEQ ID NO: 1660 - protein, 7 aa, synthetic construct
RGDVILK

SEQ ID NO: 1661 - protein, 7 aa, synthetic construct
RGDVKSL

SEQ ID NO: 1662 - protein, 7 aa, synthetic construct
RGDVKTA

SEQ ID NO: 1663 - protein, 7 aa, synthetic construct
RGDVTKK

SEQ ID NO: 1664 - protein, 7 aa, synthetic construct
RGDFAKQ

SEQ ID NO: 1665 - protein, 7 aa, synthetic construct
RGDFDGR

SEQ ID NO: 1666 - protein, 7 aa, synthetic construct
RGDFGHD

SEQ ID NO: 1667 - protein, 7 aa, synthetic construct
RGDFNRL

SEQ ID NO: 1668 - protein, 7 aa, synthetic construct
RGDFQHK

SEQ ID NO: 1669 - protein, 7 aa, synthetic construct
RGDFRGA

SEQ ID NO: 1670 - protein, 7 aa, synthetic construct
RGDFSFK

SEQ ID NO: 1671 - protein, 7 aa, synthetic construct
RGDFTLR

SEQ ID NO: 1672 - protein, 7 aa, synthetic construct
RGDFTVV

SEQ ID NO: 1673 - protein, 7 aa, synthetic construct
RGDGGKL

SEQ ID NO: 1674 - protein, 7 aa, synthetic construct
RGDGIKF

SEQ ID NO: 1675 - protein, 7 aa, synthetic construct
RGDGNKV

SEQ ID NO: 1676 - protein, 7 aa, synthetic construct
RGDGRLI

SEQ ID NO: 1677 - protein, 7 aa, synthetic construct
RGDGSRQ

SEQ ID NO: 1678 - protein, 7 aa, synthetic construct
RGDGSSF

SEQ ID NO: 1679 - protein, 7 aa, synthetic construct
RGDHGNT

SEQ ID NO: 1680 - protein, 7 aa, synthetic construct
RGDIHVI

SEQ ID NO: 1681 - protein, 7 aa, synthetic construct
RGDIKAI

SEQ ID NO: 1682 - protein, 7 aa, synthetic construct
RGDIKFK

SEQ ID NO: 1683 - protein, 7 aa, synthetic construct
RGDKFVV

SEQ ID NO: 1684 - protein, 7 aa, synthetic construct
RGDKHNI

SEQ ID NO: 1685 - protein, 7 aa, synthetic construct
RGDKIFT

SEQ ID NO: 1686 - protein, 7 aa, synthetic construct
RGDKKHS

SEQ ID NO: 1687 - protein, 7 aa, synthetic construct
RGDLIFN

SEQ ID NO: 1688 - protein, 7 aa, synthetic construct
RGDLKGN

SEQ ID NO: 1689 - protein, 7 aa, synthetic construct
RGDLRTN

SEQ ID NO: 1690 - protein, 7 aa, synthetic construct
RGDLTTT

SEQ ID NO: 1691 - protein, 7 aa, synthetic construct
RGDNKKV

SEQ ID NO: 1692 - protein, 7 aa, synthetic construct
RGDNKTL

SEQ ID NO: 1693 - protein, 7 aa, synthetic construct
RGDQHKL

SEQ ID NO: 1694 - protein, 7 aa, synthetic construct
RGDQNKV

SEQ ID NO: 1695 - protein, 7 aa, synthetic construct
RGDQRSF

SEQ ID NO: 1696 - protein, 7 aa, synthetic construct
RGDQSSV

SEQ ID NO: 1697 - protein, 7 aa, synthetic construct
RGDQVRV

SEQ ID NO: 1698 - protein, 7 aa, synthetic construct
RGDRGAN

SEQ ID NO: 1699 - protein, 7 aa, synthetic construct
RGDRGGK

SEQ ID NO: 1700 - protein, 7 aa, synthetic construct
RGDRHNI

SEQ ID NO: 1701 - protein, 7 aa, synthetic construct
RGDRITI

SEQ ID NO: 1702 - protein, 7 aa, synthetic construct
RGDRNQF

SEQ ID NO: 1703 - protein, 7 aa, synthetic construct
RGDRNSQ

SEQ ID NO: 1704 - protein, 7 aa, synthetic construct
RGDRSTA

SEQ ID NO: 1705 - protein, 7 aa, synthetic construct
RGDRTSS

SEQ ID NO: 1706 - protein, 7 aa, synthetic construct
RGDRVQV

SEQ ID NO: 1707 - protein, 7 aa, synthetic construct
RGDTLVR

SEQ ID NO: 1708 - protein, 7 aa, synthetic construct
RGDVRNG

SEQ ID NO: 1709 - protein, 7 aa, synthetic construct
RGDAGKI

SEQ ID NO: 1710 - protein, 7 aa, synthetic construct
RGDFFSQ

SEQ ID NO: 1711 - protein, 7 aa, synthetic construct
RGDFNSV

SEQ ID NO: 1712 - protein, 7 aa, synthetic construct
RGDFRLT

SEQ ID NO: 1713 - protein, 7 aa, synthetic construct
RGDGGSL

SEQ ID NO: 1714 - protein, 7 aa, synthetic construct
RGDHFKV

SEQ ID NO: 1715 - protein, 7 aa, synthetic construct
RGDHGNR

SEQ ID NO: 1716 - protein, 7 aa, synthetic construct
RGDIGVR

SEQ ID NO: 1717 - protein, 7 aa, synthetic construct
RGDIKLT

SEQ ID NO: 1718 - protein, 7 aa, synthetic construct
RGDAAVR

SEQ ID NO: 1719 - protein, 7 aa, synthetic construct
RGDIRSK

SEQ ID NO: 1720 - protein, 7 aa, synthetic construct
RGDKDVN

SEQ ID NO: 1721 - protein, 7 aa, synthetic construct
RGDKGVR

SEQ ID NO: 1722 - protein, 7 aa, synthetic construct
RGDKLVR

SEQ ID NO: 1723 - protein, 7 aa, synthetic construct
RGDKNRI

SEQ ID NO: 1724 - protein, 7 aa, synthetic construct
RGDKSSS

SEQ ID NO: 1725 - protein, 7 aa, synthetic construct
RGDKVGI

SEQ ID NO: 1726 - protein, 7 aa, synthetic construct
RGDLFST

SEQ ID NO: 1727 - protein, 7 aa, synthetic construct
RGDLVQT

SEQ ID NO: 1728 - protein, 7 aa, synthetic construct
RGDQHKV

SEQ ID NO: 1729 - protein, 7 aa, synthetic construct
RGDRDNN

SEQ ID NO: 1730 - protein, 7 aa, synthetic construct
RGDRGLG

SEQ ID NO: 1731 - protein, 7 aa, synthetic construct
RGDRHGV

SEQ ID NO: 1732 - protein, 7 aa, synthetic construct
RGDRISL

SEQ ID NO: 1733 - protein, 7 aa, synthetic construct
RGDRIVF

SEQ ID NO: 1734 - protein, 7 aa, synthetic construct
RGDRLAL

SEQ ID NO: 1735 - protein, 7 aa, synthetic construct
RGDRLEV

SEQ ID NO: 1736 - protein, 7 aa, synthetic construct
RGDRLNV

SEQ ID NO: 1737 - protein, 7 aa, synthetic construct
RGDRQDV

SEQ ID NO: 1738 - protein, 7 aa, synthetic construct
RGDRRES

SEQ ID NO: 1739 - protein, 7 aa, synthetic construct
RGDRVDI

SEQ ID NO: 1740 - protein, 7 aa, synthetic construct
RGDSDFF

SEQ ID NO: 1741 - protein, 7 aa, synthetic construct
RGDSIRI

SEQ ID NO: 1742 - protein, 7 aa, synthetic construct
RGDSLTI

SEQ ID NO: 1743 - protein, 7 aa, synthetic construct
RGDSNKK

SEQ ID NO: 1744 - protein, 7 aa, synthetic construct
RGDSRGI

SEQ ID NO: 1745 - protein, 7 aa, synthetic construct
RGDSVRT

SEQ ID NO: 1746 - protein, 7 aa, synthetic construct
RGDSVVV

SEQ ID NO: 1747 - protein, 7 aa, synthetic construct
RGDTNKL

SEQ ID NO: 1748 - protein, 7 aa, synthetic construct
RGDTSGT

SEQ ID NO: 1749 - protein, 7 aa, synthetic construct
RGDVHKK

SEQ ID NO: 1750 - protein, 7 aa, synthetic construct
RGDVIHN

SEQ ID NO: 1751 - protein, 7 aa, synthetic construct
RGDVKAK

SEQ ID NO: 1752 - protein, 7 aa, synthetic construct
RGDVKHS

SEQ ID NO: 1753 - protein, 7 aa, synthetic construct
RGDVRAN

SEQ ID NO: 1754 - protein, 7 aa, synthetic construct
RGDVRIT

SEQ ID NO: 1755 - protein, 7 aa, synthetic construct
RGDVSHV

SEQ ID NO: 1756 - protein, 7 aa, synthetic construct
RGDVSQI

SEQ ID NO: 1757 - protein, 7 aa, synthetic construct
RGDFENH

SEQ ID NO: 1758 - protein, 7 aa, synthetic construct
RGDFFRS

SEQ ID NO: 1759 - protein, 7 aa, synthetic construct
RGDFHHV

SEQ ID NO: 1760 - protein, 7 aa, synthetic construct
RGDFKGI

SEQ ID NO: 1761 - protein, 7 aa, synthetic construct
RGDFKGT

SEQ ID NO: 1762 - protein, 7 aa, synthetic construct
RGDFKVV

SEQ ID NO: 1763 - protein, 7 aa, synthetic construct
RGDFLRH

SEQ ID NO: 1764 - protein, 7 aa, synthetic construct
RGDFSGT

SEQ ID NO: 1765 - protein, 7 aa, synthetic construct
RGDFSVV

SEQ ID NO: 1766 - protein, 7 aa, synthetic construct
RGDFTHA

SEQ ID NO: 1767 - protein, 7 aa, synthetic construct
RGDGHKK

SEQ ID NO: 1768 - protein, 7 aa, synthetic construct
RGDGNKN

SEQ ID NO: 1769 - protein, 7 aa, synthetic construct
RGDGSNG

SEQ ID NO: 1770 - protein, 7 aa, synthetic construct
RGDHNEL

SEQ ID NO: 1771 - protein, 7 aa, synthetic construct
RGDHRNI

SEQ ID NO: 1772 - protein, 7 aa, synthetic construct
RGDHVKK

SEQ ID NO: 1773 - protein, 7 aa, synthetic construct
RGDHVKV

SEQ ID NO: 1774 - protein, 7 aa, synthetic construct
RGDKFTT

SEQ ID NO: 1775 - protein, 7 aa, synthetic construct
RGDARHL

SEQ ID NO: 1776 - protein, 7 aa, synthetic construct
RGDLHNQ

SEQ ID NO: 1777 - protein, 7 aa, synthetic construct
RGDLKKT

SEQ ID NO: 1778 - protein, 7 aa, synthetic construct
RGDLQRK

SEQ ID NO: 1779 - protein, 7 aa, synthetic construct
RGDLSNQ

SEQ ID NO: 1780 - protein, 7 aa, synthetic construct
RGDLVKK

SEQ ID NO: 1781 - protein, 7 aa, synthetic construct
RGDNGKK

SEQ ID NO: 1782 - protein, 7 aa, synthetic construct
RGDNGNK

SEQ ID NO: 1783 - protein, 7 aa, synthetic construct
RGDNGRF

SEQ ID NO: 1784 - protein, 7 aa, synthetic construct
RGDNKGT

SEQ ID NO: 1785 - protein, 7 aa, synthetic construct
RGDNKSV

SEQ ID NO: 1786 - protein, 7 aa, synthetic construct
RGDNRHL

SEQ ID NO: 1787 - protein, 7 aa, synthetic construct
RGDQGGT

SEQ ID NO: 1788 - protein, 7 aa, synthetic construct
RGDQKGV

SEQ ID NO: 1789 - protein, 7 aa, synthetic construct
RGDQLKF

SEQ ID NO: 1790 - protein, 7 aa, synthetic construct
RGDQQKK

SEQ ID NO: 1791 - protein, 7 aa, synthetic construct
RGDRGFG

SEQ ID NO: 1792 - protein, 7 aa, synthetic construct
RGDRIGV

SEQ ID NO: 1793 - protein, 7 aa, synthetic construct
RGDRLSK

SEQ ID NO: 1794 - protein, 7 aa, synthetic construct
RGDRQTH

SEQ ID NO: 1795 - protein, 7 aa, synthetic construct
RGDRRDQ

SEQ ID NO: 1796 - protein, 7 aa, synthetic construct
RGDRSKN

SEQ ID NO: 1797 - protein, 7 aa, synthetic construct
RGDSHTF

SEQ ID NO: 1798 - protein, 7 aa, synthetic construct
RGDSLNI

SEQ ID NO: 1799 - protein, 7 aa, synthetic construct
RGDSLTN

SEQ ID NO: 1800 - protein, 7 aa, synthetic construct
RGDSRQL

SEQ ID NO: 1801 - protein, 7 aa, synthetic construct
RGDVHVI

SEQ ID NO: 1802 - protein, 7 aa, synthetic construct
RGDVLRS

SEQ ID NO: 1803 - protein, 7 aa, synthetic construct
RGDVQGK

SEQ ID NO: 1804 - protein, 7 aa, synthetic construct
RGDVSGH

SEQ ID NO: 1805 - protein, 7 aa, synthetic construct
RGDVSVR

SEQ ID NO: 1806 - protein, 7 aa, synthetic construct
RGDFFSL

SEQ ID NO: 1807 - protein, 7 aa, synthetic construct
RGDFLSI

SEQ ID NO: 1808 - protein, 7 aa, synthetic construct
RGDFQEK

SEQ ID NO: 1809 - protein, 7 aa, synthetic construct
RGDFSTS

SEQ ID NO: 1810 - protein, 7 aa, synthetic construct
RGDFVRN

SEQ ID NO: 1811 - protein, 7 aa, synthetic construct
RGDGIVV

SEQ ID NO: 1812 - protein, 7 aa, synthetic construct
RGDGNRL

SEQ ID NO: 1813 - protein, 7 aa, synthetic construct
RGDHQKL

SEQ ID NO: 1814 - protein, 7 aa, synthetic construct
RGDIKNE

SEQ ID NO: 1815 - protein, 7 aa, synthetic construct
RGDISNR

SEQ ID NO: 1816 - protein, 7 aa, synthetic construct
RGDKAFH

SEQ ID NO: 1817 - protein, 7 aa, synthetic construct
RGDKHRK

SEQ ID NO: 1818 - protein, 7 aa, synthetic construct
RGDKKTD

SEQ ID NO: 1819 - protein, 7 aa, synthetic construct
RGDKLNF

SEQ ID NO: 1820 - protein, 7 aa, synthetic construct
RGDARVQ

SEQ ID NO: 1821 - protein, 7 aa, synthetic construct
RGDLEVT

SEQ ID NO: 1822 - protein, 7 aa, synthetic construct
RGDLNDR

SEQ ID NO: 1823 - protein, 7 aa, synthetic construct
RGDASVK

SEQ ID NO: 1824 - protein, 7 aa, synthetic construct
RGDLRFQ

SEQ ID NO: 1825 - protein, 7 aa, synthetic construct
RGDLVLI

SEQ ID NO: 1826 - protein, 7 aa, synthetic construct
RGDNDRV

SEQ ID NO: 1827 - protein, 7 aa, synthetic construct
RGDQGGQ

SEQ ID NO: 1828 - protein, 7 aa, synthetic construct
RGDQGHN

SEQ ID NO: 1829 - protein, 7 aa, synthetic construct
RGDQHKI

SEQ ID NO: 1830 - protein, 7 aa, synthetic construct
RGDQLRV

SEQ ID NO: 1831 - protein, 7 aa, synthetic construct
RGDQRHI

SEQ ID NO: 1832 - protein, 7 aa, synthetic construct
RGDRIFQ

SEQ ID NO: 1833 - protein, 7 aa, synthetic construct
RGDRIKT

SEQ ID NO: 1834 - protein, 7 aa, synthetic construct
RGDRNQI

SEQ ID NO: 1835 - protein, 7 aa, synthetic construct
RGDRRQE

SEQ ID NO: 1836 - protein, 7 aa, synthetic construct
RGDRSNG

SEQ ID NO: 1837 - protein, 7 aa, synthetic construct
RGDRSSG

SEQ ID NO: 1838 - protein, 7 aa, synthetic construct
RGDTVTF

SEQ ID NO: 1839 - protein, 7 aa, synthetic construct
RGDVLKT

SEQ ID NO: 1840 - protein, 7 aa, synthetic construct
RGDVRRV

SEQ ID NO: 1841 - protein, 7 aa, synthetic construct
RGDVTRS

SEQ ID NO: 1842 - protein, 7 aa, synthetic construct
RGDAAFR

SEQ ID NO: 1843 - protein, 7 aa, synthetic construct
RGDEHGE

SEQ ID NO: 1844 - protein, 7 aa, synthetic construct
RGDFDRK

SEQ ID NO: 1845 - protein, 7 aa, synthetic construct
RGDFGHG

SEQ ID NO: 1846 - protein, 7 aa, synthetic construct
RGDFGVT

SEQ ID NO: 1847 - protein, 7 aa, synthetic construct
RGDFLHS

SEQ ID NO: 1848 - protein, 7 aa, synthetic construct
RGDFNRS

SEQ ID NO: 1849 - protein, 7 aa, synthetic construct
RGDGSHI

SEQ ID NO: 1850 - protein, 7 aa, synthetic construct
RGDGVKQ

SEQ ID NO: 1851 - protein, 7 aa, synthetic construct
RGDHATR

SEQ ID NO: 1852 - protein, 7 aa, synthetic construct
RGDHRNF

SEQ ID NO: 1853 - protein, 7 aa, synthetic construct
RGDIHSI

SEQ ID NO: 1854 - protein, 7 aa, synthetic construct
RGDIHSR

SEQ ID NO: 1855 - protein, 7 aa, synthetic construct
RGDKAHV

SEQ ID NO: 1856 - protein, 7 aa, synthetic construct
RGDAQRF

SEQ ID NO: 1857 - protein, 7 aa, synthetic construct
RGDKGFV

SEQ ID NO: 1858 - protein, 7 aa, synthetic construct
RGDKKFI

SEQ ID NO: 1859 - protein, 7 aa, synthetic construct
RGDKRGQ

SEQ ID NO: 1860 - protein, 7 aa, synthetic construct
RGDKSFN

SEQ ID NO: 1861 - protein, 7 aa, synthetic construct
RGDKSKH

SEQ ID NO: 1862 - protein, 7 aa, synthetic construct
RGDASIR

SEQ ID NO: 1863 - protein, 7 aa, synthetic construct
RGDLHTS

SEQ ID NO: 1864 - protein, 7 aa, synthetic construct
RGDLQAI

SEQ ID NO: 1865 - protein, 7 aa, synthetic construct
RGDAVKI

SEQ ID NO: 1866 - protein, 7 aa, synthetic construct
RGDNRKV

SEQ ID NO: 1867 - protein, 7 aa, synthetic construct
RGDNVDH

SEQ ID NO: 1868 - protein, 7 aa, synthetic construct
RGDNVGV

SEQ ID NO: 1869 - protein, 7 aa, synthetic construct
RGDQEKN

SEQ ID NO: 1870 - protein, 7 aa, synthetic construct
RGDQHDK

SEQ ID NO: 1871 - protein, 7 aa, synthetic construct
RGDQHTV

SEQ ID NO: 1872 - protein, 7 aa, synthetic construct
RGDQLRI

SEQ ID NO: 1873 - protein, 7 aa, synthetic construct
RGDQSEK

SEQ ID NO: 1874 - protein, 7 aa, synthetic construct
RGDQTHT

SEQ ID NO: 1875 - protein, 7 aa, synthetic construct
RGDREGT

SEQ ID NO: 1876 - protein, 7 aa, synthetic construct
RGDRESR

SEQ ID NO: 1877 - protein, 7 aa, synthetic construct
RGDRIEI

SEQ ID NO: 1878 - protein, 7 aa, synthetic construct
RGDRQAT

SEQ ID NO: 1879 - protein, 7 aa, synthetic construct
RGDRQDK

SEQ ID NO: 1880 - protein, 7 aa, synthetic construct
RGDRQFL

SEQ ID NO: 1881 - protein, 7 aa, synthetic construct
RGDRRGQ

SEQ ID NO: 1882 - protein, 7 aa, synthetic construct
RGDRSNQ

SEQ ID NO: 1883 - protein, 7 aa, synthetic construct
RGDRVGQ

SEQ ID NO: 1884 - protein, 7 aa, synthetic construct
RGDRVIV

SEQ ID NO: 1885 - protein, 7 aa, synthetic construct
RGDSALT

SEQ ID NO: 1886 - protein, 7 aa, synthetic construct
RGDSRKI

SEQ ID NO: 1887 - protein, 7 aa, synthetic construct
RGDSSQI

SEQ ID NO: 1888 - protein, 7 aa, synthetic construct
RGDTKGR

SEQ ID NO: 1889 - protein, 7 aa, synthetic construct
RGDTLRN

SEQ ID NO: 1890 - protein, 7 aa, synthetic construct
RGDTLVT

SEQ ID NO: 1891 - protein, 7 aa, synthetic construct
RGDVELD

SEQ ID NO: 1892 - protein, 7 aa, synthetic construct
RGDVGQA

SEQ ID NO: 1893 - protein, 7 aa, synthetic construct
RGDVHAV

SEQ ID NO: 1894 - protein, 7 aa, synthetic construct
RGDVKFL

SEQ ID NO: 1895 - protein, 7 aa, synthetic construct
RGDVKTN

SEQ ID NO: 1896 - protein, 7 aa, synthetic construct
RGDVSTL

SEQ ID NO: 1897 - protein, 7 aa, synthetic construct
RGDVTKI

SEQ ID NO: 1898 - protein, 7 aa, synthetic construct
RGDFHLI

SEQ ID NO: 1899 - protein, 7 aa, synthetic construct
RGDFKKQ

SEQ ID NO: 1900 - protein, 7 aa, synthetic construct
RGDFRNN

SEQ ID NO: 1901 - protein, 7 aa, synthetic construct
RGDFVKK

SEQ ID NO: 1902 - protein, 7 aa, synthetic construct
RGDGKNK

SEQ ID NO: 1903 - protein, 7 aa, synthetic construct
RGDGKNN

SEQ ID NO: 1904 - protein, 7 aa, synthetic construct
RGDGRNF

SEQ ID NO: 1905 - protein, 7 aa, synthetic construct
RGDGSKQ

SEQ ID NO: 1906 - protein, 7 aa, synthetic construct
RGDGSQV

SEQ ID NO: 1907 - protein, 7 aa, synthetic construct
RGDHGVN

SEQ ID NO: 1908 - protein, 7 aa, synthetic construct
RGDHSRV

SEQ ID NO: 1909 - protein, 7 aa, synthetic construct
RGDIAVT

SEQ ID NO: 1910 - protein, 7 aa, synthetic construct
RGDIEVK

SEQ ID NO: 1911 - protein, 7 aa, synthetic construct
RGDAQHT

SEQ ID NO: 1912 - protein, 7 aa, synthetic construct
RGDKHFT

SEQ ID NO: 1913 - protein, 7 aa, synthetic construct
RGDARKI

SEQ ID NO: 1914 - protein, 7 aa, synthetic construct
RGDKRNG

SEQ ID NO: 1915 - protein, 7 aa, synthetic construct
RGDARQV

SEQ ID NO: 1916 - protein, 7 aa, synthetic construct
RGDKTSI

SEQ ID NO: 1917 - protein, 7 aa, synthetic construct
RGDLGSK

SEQ ID NO: 1918 - protein, 7 aa, synthetic construct
RGDASKI

SEQ ID NO: 1919 - protein, 7 aa, synthetic construct
RGDLIGH

SEQ ID NO: 1920 - protein, 7 aa, synthetic construct
RGDASNN

SEQ ID NO: 1921 - protein, 7 aa, synthetic construct
RGDLISQ

SEQ ID NO: 1922 - protein, 7 aa, synthetic construct
RGDLKDQ

SEQ ID NO: 1923 - protein, 7 aa, synthetic construct
RGDLKGT

SEQ ID NO: 1924 - protein, 7 aa, synthetic construct
RGDLLHS

SEQ ID NO: 1925 - protein, 7 aa, synthetic construct
RGDLTGN

SEQ ID NO: 1926 - protein, 7 aa, synthetic construct
RGDATHT

SEQ ID NO: 1927 - protein, 7 aa, synthetic construct
RGDQARQ

SEQ ID NO: 1928 - protein, 7 aa, synthetic construct
RGDQFKN

SEQ ID NO: 1929 - protein, 7 aa, synthetic construct
RGDQKTI

SEQ ID NO: 1930 - protein, 7 aa, synthetic construct
RGDQRQA

SEQ ID NO: 1931 - protein, 7 aa, synthetic construct
RGDRGLA

SEQ ID NO: 1932 - protein, 7 aa, synthetic construct
RGDRQEV

SEQ ID NO: 1933 - protein, 7 aa, synthetic construct
RGDRSAT

SEQ ID NO: 1934 - protein, 7 aa, synthetic construct
RGDSRFI

SEQ ID NO: 1935 - protein, 7 aa, synthetic construct
RGDSSKI

SEQ ID NO: 1936 - protein, 7 aa, synthetic construct
RGDSVVL

SEQ ID NO: 1937 - protein, 7 aa, synthetic construct
RGDTSIR

SEQ ID NO: 1938 - protein, 7 aa, synthetic construct
RGDVGFK

SEQ ID NO: 1939 - protein, 7 aa, synthetic construct
RGDVLHF

SEQ ID NO: 1940 - protein, 7 aa, synthetic construct
RGDVLRT

SEQ ID NO: 1941 - protein, 7 aa, synthetic construct
RGDVQGI

SEQ ID NO: 1942 - protein, 7 aa, synthetic construct
RGDVVIS

SEQ ID NO: 1943 - protein, 7 aa, synthetic construct
RGDAAKF

SEQ ID NO: 1944 - protein, 7 aa, synthetic construct
RGDFHQV

SEQ ID NO: 1945 - protein, 7 aa, synthetic construct
RGDFNHN

SEQ ID NO: 1946 - protein, 7 aa, synthetic construct
RGDFRGQ

SEQ ID NO: 1947 - protein, 7 aa, synthetic construct
RGDFSGG

SEQ ID NO: 1948 - protein, 7 aa, synthetic construct
RGDFSKV

SEQ ID NO: 1949 - protein, 7 aa, synthetic construct
RGDAHRI

SEQ ID NO: 1950 - protein, 7 aa, synthetic construct
RGDAANK

SEQ ID NO: 1951 - protein, 7 aa, synthetic construct
RGDGINR

SEQ ID NO: 1952 - protein, 7 aa, synthetic construct
RGDGRQV

SEQ ID NO: 1953 - protein, 7 aa, synthetic construct
RGDALRV

SEQ ID NO: 1954 - protein, 7 aa, synthetic construct
RGDIKTT

SEQ ID NO: 1955 - protein, 7 aa, synthetic construct
RGDKESI

SEQ ID NO: 1956 - protein, 7 aa, synthetic construct
RGDKKSS

SEQ ID NO: 1957 - protein, 7 aa, synthetic construct
RGDKLEH

SEQ ID NO: 1958 - protein, 7 aa, synthetic construct
RGDKLGL

SEQ ID NO: 1959 - protein, 7 aa, synthetic construct
RGDKLSD

SEQ ID NO: 1960 - protein, 7 aa, synthetic construct
RGDARTR

SEQ ID NO: 1961 - protein, 7 aa, synthetic construct
RGDLVNS

SEQ ID NO: 1962 - protein, 7 aa, synthetic construct
RGDNRST

SEQ ID NO: 1963 - protein, 7 aa, synthetic construct
RGDNVHN

SEQ ID NO: 1964 - protein, 7 aa, synthetic construct
RGDQAGR

SEQ ID NO: 1965 - protein, 7 aa, synthetic construct
RGDQHGF

SEQ ID NO: 1966 - protein, 7 aa, synthetic construct
RGDQKNA

SEQ ID NO: 1967 - protein, 7 aa, synthetic construct
RGDQSQQ

SEQ ID NO: 1968 - protein, 7 aa, synthetic construct
RGDQVRN

SEQ ID NO: 1969 - protein, 7 aa, synthetic construct
RGDRAGK

SEQ ID NO: 1970 - protein, 7 aa, synthetic construct
RGDRANQ

SEQ ID NO: 1971 - protein, 7 aa, synthetic construct
RGDRGDS

SEQ ID NO: 1972 - protein, 7 aa, synthetic construct
RGDRGTT

SEQ ID NO: 1973 - protein, 7 aa, synthetic construct
RGDRIAT

SEQ ID NO: 1974 - protein, 7 aa, synthetic construct
RGDRIGS

SEQ ID NO: 1975 - protein, 7 aa, synthetic construct
RGDRISV

SEQ ID NO: 1976 - protein, 7 aa, synthetic construct
RGDRKEK

SEQ ID NO: 1977 - protein, 7 aa, synthetic construct
RGDRKGV

SEQ ID NO: 1978 - protein, 7 aa, synthetic construct
RGDRLVS

SEQ ID NO: 1979 - protein, 7 aa, synthetic construct
RGDRSQL

SEQ ID NO: 1980 - protein, 7 aa, synthetic construct
RGDRSQN

SEQ ID NO: 1981 - protein, 7 aa, synthetic construct
RGDRSQV

SEQ ID NO: 1982 - protein, 7 aa, synthetic construct
RGDRVQF

SEQ ID NO: 1983 - protein, 7 aa, synthetic construct
RGDSFRQ

SEQ ID NO: 1984 - protein, 7 aa, synthetic construct
RGDTRTV

SEQ ID NO: 1985 - protein, 7 aa, synthetic construct
RGDTVTI

SEQ ID NO: 1986 - protein, 7 aa, synthetic construct
RGDVKLI

SEQ ID NO: 1987 - protein, 7 aa, synthetic construct
RGDDNHV

SEQ ID NO: 1988 - protein, 7 aa, synthetic construct
RGDFFSS

SEQ ID NO: 1989 - protein, 7 aa, synthetic construct
RGDFHHI

SEQ ID NO: 1990 - protein, 7 aa, synthetic construct
RGDFLTV

SEQ ID NO: 1991 - protein, 7 aa, synthetic construct
RGDFRFI

SEQ ID NO: 1992 - protein, 7 aa, synthetic construct
RGDFSKH

SEQ ID NO: 1993 - protein, 7 aa, synthetic construct
RGDFTAS

SEQ ID NO: 1994 - protein, 7 aa, synthetic construct
RGDGITL

SEQ ID NO: 1995 - protein, 7 aa, synthetic construct
RGDGKGK

SEQ ID NO: 1996 - protein, 7 aa, synthetic construct
RGDGSSI

SEQ ID NO: 1997 - protein, 7 aa, synthetic construct
RGDAKKL

SEQ ID NO: 1998 - protein, 7 aa, synthetic construct
RGDHGVK

SEQ ID NO: 1999 - protein, 7 aa, synthetic construct
RGDHKSR

SEQ ID NO: 2000 - protein, 7 aa, synthetic construct
RGDIGKR

SEQ ID NO: 2001 - protein, 7 aa, synthetic construct
RGDIKHI

SEQ ID NO: 2002 - protein, 7 aa, synthetic construct
RGDILIT

SEQ ID NO: 2003 - protein, 7 aa, synthetic construct
RGDISGQ

SEQ ID NO: 2004 - protein, 7 aa, synthetic construct
RGDKHTV

SEQ ID NO: 2005 - protein, 7 aa, synthetic construct
RGDKLGN

SEQ ID NO: 2006 - protein, 7 aa, synthetic construct
RGDKQGI

SEQ ID NO: 2007 - protein, 7 aa, synthetic construct
RGDKSSQ

SEQ ID NO: 2008 - protein, 7 aa, synthetic construct
RGDKSTN

SEQ ID NO: 2009 - protein, 7 aa, synthetic construct
RGDKSVV

SEQ ID NO: 2010 - protein, 7 aa, synthetic construct
RGDLGFN

SEQ ID NO: 2011 - protein, 7 aa, synthetic construct
RGDLGQI

SEQ ID NO: 2012 - protein, 7 aa, synthetic construct
RGDLIGK

SEQ ID NO: 2013 - protein, 7 aa, synthetic construct
RGDLQVT

SEQ ID NO: 2014 - protein, 7 aa, synthetic construct
RGDLTNS

SEQ ID NO: 2015 - protein, 7 aa, synthetic construct
RGDNNQL

SEQ ID NO: 2016 - protein, 7 aa, synthetic construct
RGDAVRL

SEQ ID NO: 2017 - protein, 7 aa, synthetic construct
RGDNVGF

SEQ ID NO: 2018 - protein, 7 aa, synthetic construct
RGDQFRI

SEQ ID NO: 2019 - protein, 7 aa, synthetic construct
RGDQQHN

SEQ ID NO: 2020 - protein, 7 aa, synthetic construct
RGDQSLV

SEQ ID NO: 2021 - protein, 7 aa, synthetic construct
RGDQSVV

SEQ ID NO: 2022 - protein, 7 aa, synthetic construct
RGDRASI

SEQ ID NO: 2023 - protein, 7 aa, synthetic construct
RGDRDNI

SEQ ID NO: 2024 - protein, 7 aa, synthetic construct
RGDREIV

SEQ ID NO: 2025 - protein, 7 aa, synthetic construct
RGDRHKQ

SEQ ID NO: 2026 - protein, 7 aa, synthetic construct
RGDRKIT

SEQ ID NO: 2027 - protein, 7 aa, synthetic construct
RGDRLVH

SEQ ID NO: 2028 - protein, 7 aa, synthetic construct
RGDRNAF

SEQ ID NO: 2029 - protein, 7 aa, synthetic construct
RGDRNKV

SEQ ID NO: 2030 - protein, 7 aa, synthetic construct
RGDRQNI

SEQ ID NO: 2031 - protein, 7 aa, synthetic construct
RGDRREQ

SEQ ID NO: 2032 - protein, 7 aa, synthetic construct
RGDRRGT

SEQ ID NO: 2033 - protein, 7 aa, synthetic construct
RGDRSGI

SEQ ID NO: 2034 - protein, 7 aa, synthetic construct
RGDRVTL

SEQ ID NO: 2035 - protein, 7 aa, synthetic construct
RGDSHTI

SEQ ID NO: 2036 - protein, 7 aa, synthetic construct
RGDSKSV

SEQ ID NO: 2037 - protein, 7 aa, synthetic construct
RGDSSKT

SEQ ID NO: 2038 - protein, 7 aa, synthetic construct
RGDTKVT

SEQ ID NO: 2039 - protein, 7 aa, synthetic construct
RGDVQFL

SEQ ID NO: 2040 - protein, 7 aa, synthetic construct
RGDVSKT

SEQ ID NO: 2041 - protein, 7 aa, synthetic construct
RGDFKES

SEQ ID NO: 2042 - protein, 7 aa, synthetic construct
RGDFKSA

SEQ ID NO: 2043 - protein, 7 aa, synthetic construct
RGDFNKV

SEQ ID NO: 2044 - protein, 7 aa, synthetic construct
RGDGFGS

SEQ ID NO: 2045 - protein, 7 aa, synthetic construct
RGDGNRV

SEQ ID NO: 2046 - protein, 7 aa, synthetic construct
RGDGRGT

SEQ ID NO: 2047 - protein, 7 aa, synthetic construct
RGDGRKF

SEQ ID NO: 2048 - protein, 7 aa, synthetic construct
RGDGVRT

SEQ ID NO: 2049 - protein, 7 aa, synthetic construct
RGDHAVL

SEQ ID NO: 2050 - protein, 7 aa, synthetic construct
RGDHGQI

SEQ ID NO: 2051 - protein, 7 aa, synthetic construct
RGDHHSF

SEQ ID NO: 2052 - protein, 7 aa, synthetic construct
RGDHIEL

SEQ ID NO: 2053 - protein, 7 aa, synthetic construct
RGDHNFL

SEQ ID NO: 2054 - protein, 7 aa, synthetic construct
RGDHQNK

SEQ ID NO: 2055 - protein, 7 aa, synthetic construct
RGDHQRN

SEQ ID NO: 2056 - protein, 7 aa, synthetic construct
RGDHQVF

SEQ ID NO: 2057 - protein, 7 aa, synthetic construct
RGDHSHI

SEQ ID NO: 2058 - protein, 7 aa, synthetic construct
RGDHTTI

SEQ ID NO: 2059 - protein, 7 aa, synthetic construct
RGDHVTV

SEQ ID NO: 2060 - protein, 7 aa, synthetic construct
RGDIHII

SEQ ID NO: 2061 - protein, 7 aa, synthetic construct
RGDIQSI

SEQ ID NO: 2062 - protein, 7 aa, synthetic construct
RGDKFNV

SEQ ID NO: 2063 - protein, 7 aa, synthetic construct
RGDKHGV

SEQ ID NO: 2064 - protein, 7 aa, synthetic construct
RGDKKEK

SEQ ID NO: 2065 - protein, 7 aa, synthetic construct
RGDKKQQ

SEQ ID NO: 2066 - protein, 7 aa, synthetic construct
RGDKSFK

SEQ ID NO: 2067 - protein, 7 aa, synthetic construct
RGDKSGN

SEQ ID NO: 2068 - protein, 7 aa, synthetic construct
RGDKSNV

SEQ ID NO: 2069 - protein, 7 aa, synthetic construct
RGDKSST

SEQ ID NO: 2070 - protein, 7 aa, synthetic construct
RGDKSVI

SEQ ID NO: 2071 - protein, 7 aa, synthetic construct
RGDLEKQ

SEQ ID NO: 2072 - protein, 7 aa, synthetic construct
RGDLFGR

SEQ ID NO: 2073 - protein, 7 aa, synthetic construct
RGDASQK

SEQ ID NO: 2074 - protein, 7 aa, synthetic construct
RGDLLHG

SEQ ID NO: 2075 - protein, 7 aa, synthetic construct
RGDLLKT

SEQ ID NO: 2076 - protein, 7 aa, synthetic construct
RGDLSGS

SEQ ID NO: 2077 - protein, 7 aa, synthetic construct
RGDATKL

SEQ ID NO: 2078 - protein, 7 aa, synthetic construct
RGDATRT

SEQ ID NO: 2079 - protein, 7 aa, synthetic construct
RGDNVHV

SEQ ID NO: 2080 - protein, 7 aa, synthetic construct
RGDNVRF

SEQ ID NO: 2081 - protein, 7 aa, synthetic construct
RGDQEFT

SEQ ID NO: 2082 - protein, 7 aa, synthetic construct
RGDQKHN

SEQ ID NO: 2083 - protein, 7 aa, synthetic construct
RGDQRFA

SEQ ID NO: 2084 - protein, 7 aa, synthetic construct
RGDQRQV

SEQ ID NO: 2085 - protein, 7 aa, synthetic construct
RGDQRVS

SEQ ID NO: 2086 - protein, 7 aa, synthetic construct
RGDQSKA

SEQ ID NO: 2087 - protein, 7 aa, synthetic construct
RGDRAGQ

SEQ ID NO: 2088 - protein, 7 aa, synthetic construct
RGDRDTK

SEQ ID NO: 2089 - protein, 7 aa, synthetic construct
RGDRGAF

SEQ ID NO: 2090 - protein, 7 aa, synthetic construct
RGDRGHQ

SEQ ID NO: 2091 - protein, 7 aa, synthetic construct
RGDRLTI

SEQ ID NO: 2092 - protein, 7 aa, synthetic construct
RGDRRDV

SEQ ID NO: 2093 - protein, 7 aa, synthetic construct
RGDRRFK

SEQ ID NO: 2094 - protein, 7 aa, synthetic construct
RGDRSER

SEQ ID NO: 2095 - protein, 7 aa, synthetic construct
RGDRTAK

SEQ ID NO: 2096 - protein, 7 aa, synthetic construct
RGDRTGV

SEQ ID NO: 2097 - protein, 7 aa, synthetic construct
RGDRTVT

SEQ ID NO: 2098 - protein, 7 aa, synthetic construct
RGDSHSL

SEQ ID NO: 2099 - protein, 7 aa, synthetic construct
RGDTHHF

SEQ ID NO: 2100 - protein, 7 aa, synthetic construct
RGDVHSR

SEQ ID NO: 2101 - protein, 7 aa, synthetic construct
RGDVRTV

SEQ ID NO: 2102 - protein, 7 aa, synthetic construct
RGDFDFT

SEQ ID NO: 2103 - protein, 7 aa, synthetic construct
RGDFHAR

SEQ ID NO: 2104 - protein, 7 aa, synthetic construct
RGDFKHF

SEQ ID NO: 2105 - protein, 7 aa, synthetic construct
RGDFRAI

SEQ ID NO: 2106 - protein, 7 aa, synthetic construct
RGDFSKT

SEQ ID NO: 2107 - protein, 7 aa, synthetic construct
RGDGSKN

SEQ ID NO: 2108 - protein, 7 aa, synthetic construct
RGDGTHK

SEQ ID NO: 2109 - protein, 7 aa, synthetic construct
RGDHNHL

SEQ ID NO: 2110 - protein, 7 aa, synthetic construct
RGDHREV

SEQ ID NO: 2111 - protein, 7 aa, synthetic construct
RGDIAAH

SEQ ID NO: 2112 - protein, 7 aa, synthetic construct
RGDIGSK

SEQ ID NO: 2113 - protein, 7 aa, synthetic construct
RGDIHFN

SEQ ID NO: 2114 - protein, 7 aa, synthetic construct
RGDIQKH

SEQ ID NO: 2115 - protein, 7 aa, synthetic construct
RGDIRNS

SEQ ID NO: 2116 - protein, 7 aa, synthetic construct
RGDIRQN

SEQ ID NO: 2117 - protein, 7 aa, synthetic construct
RGDKGGI

SEQ ID NO: 2118 - protein, 7 aa, synthetic construct
RGDKHEV

SEQ ID NO: 2119 - protein, 7 aa, synthetic construct
RGDKKSA

SEQ ID NO: 2120 - protein, 7 aa, synthetic construct
RGDKKVK

SEQ ID NO: 2121 - protein, 7 aa, synthetic construct
RGDKLTL

SEQ ID NO: 2122 - protein, 7 aa, synthetic construct
RGDKNEI

SEQ ID NO: 2123 - protein, 7 aa, synthetic construct
RGDKQII

SEQ ID NO: 2124 - protein, 7 aa, synthetic construct
RGDKTRN

SEQ ID NO: 2125 - protein, 7 aa, synthetic construct
RGDASKF

SEQ ID NO: 2126 - protein, 7 aa, synthetic construct
RGDASKL

SEQ ID NO: 2127 - protein, 7 aa, synthetic construct
RGDLKTT

SEQ ID NO: 2128 - protein, 7 aa, synthetic construct
RGDASRV

SEQ ID NO: 2129 - protein, 7 aa, synthetic construct
RGDLRNA

SEQ ID NO: 2130 - protein, 7 aa, synthetic construct
RGDLVHN

SEQ ID NO: 2131 - protein, 7 aa, synthetic construct
RGDNGFI

SEQ ID NO: 2132 - protein, 7 aa, synthetic construct
RGDNRQV

SEQ ID NO: 2133 - protein, 7 aa, synthetic construct
RGDNSHI

SEQ ID NO: 2134 - protein, 7 aa, synthetic construct
RGDNVGI

SEQ ID NO: 2135 - protein, 7 aa, synthetic construct
RGDQHEK

SEQ ID NO: 2136 - protein, 7 aa, synthetic construct
RGDRANS

SEQ ID NO: 2137 - protein, 7 aa, synthetic construct
RGDRKGH

SEQ ID NO: 2138 - protein, 7 aa, synthetic construct
RGDRLSR

SEQ ID NO: 2139 - protein, 7 aa, synthetic construct
RGDRSIL

SEQ ID NO: 2140 - protein, 7 aa, synthetic construct
RGDSSHA

SEQ ID NO: 2141 - protein, 7 aa, synthetic construct
RGDTKEI

SEQ ID NO: 2142 - protein, 7 aa, synthetic construct
RGDTKKL

SEQ ID NO: 2143 - protein, 7 aa, synthetic construct
RGDVASR

SEQ ID NO: 2144 - protein, 7 aa, synthetic construct
RGDVKIQ

SEQ ID NO: 2145 - protein, 7 aa, synthetic construct
RGDVLHT

SEQ ID NO: 2146 - protein, 7 aa, synthetic construct
RGDVNKK

SEQ ID NO: 2147 - protein, 7 aa, synthetic construct
RGDVRGV

SEQ ID NO: 2148 - protein, 7 aa, synthetic construct
RGDVRIN

SEQ ID NO: 2149 - protein, 7 aa, synthetic construct
RGDVSGV

SEQ ID NO: 2150 - protein, 7 aa, synthetic construct
RGDVTIH

SEQ ID NO: 2151 - protein, 7 aa, synthetic construct
RGDVVSR

SEQ ID NO: 2152 - protein, 7 aa, synthetic construct
RGDFARK

SEQ ID NO: 2153 - protein, 7 aa, synthetic construct
RGDFENL

SEQ ID NO: 2154 - protein, 7 aa, synthetic construct
RGDAGSR

SEQ ID NO: 2155 - protein, 7 aa, synthetic construct
RGDFGFI

SEQ ID NO: 2156 - protein, 7 aa, synthetic construct
RGDFRHE

SEQ ID NO: 2157 - protein, 7 aa, synthetic construct
RGDFSFA

SEQ ID NO: 2158 - protein, 7 aa, synthetic construct
RGDFSGR

SEQ ID NO: 2159 - protein, 7 aa, synthetic construct
RGDFSKA

SEQ ID NO: 2160 - protein, 7 aa, synthetic construct
RGDAHSF

SEQ ID NO: 2161 - protein, 7 aa, synthetic construct
RGDFVVV

SEQ ID NO: 2162 - protein, 7 aa, synthetic construct
RGDAANR

SEQ ID NO: 2163 - protein, 7 aa, synthetic construct
RGDAKEI

SEQ ID NO: 2164 - protein, 7 aa, synthetic construct
RGDGSHT

SEQ ID NO: 2165 - protein, 7 aa, synthetic construct
RGDHAVV

SEQ ID NO: 2166 - protein, 7 aa, synthetic construct
RGDHHSI

SEQ ID NO: 2167 - protein, 7 aa, synthetic construct
RGDHSKI

SEQ ID NO: 2168 - protein, 7 aa, synthetic construct
RGDHSQQ

SEQ ID NO: 2169 - protein, 7 aa, synthetic construct
RGDIAQR

SEQ ID NO: 2170 - protein, 7 aa, synthetic construct
RGDANHF

SEQ ID NO: 2171 - protein, 7 aa, synthetic construct
RGDIQKR

SEQ ID NO: 2172 - protein, 7 aa, synthetic construct
RGDISFA

SEQ ID NO: 2173 - protein, 7 aa, synthetic construct
RGDISNQ

SEQ ID NO: 2174 - protein, 7 aa, synthetic construct
RGDKAFV

SEQ ID NO: 2175 - protein, 7 aa, synthetic construct
RGDKLVV

SEQ ID NO: 2176 - protein, 7 aa, synthetic construct
RGDKSEV

SEQ ID NO: 2177 - protein, 7 aa, synthetic construct
RGDKSRV

SEQ ID NO: 2178 - protein, 7 aa, synthetic construct
RGDLENQ

SEQ ID NO: 2179 - protein, 7 aa, synthetic construct
RGDLHGT

SEQ ID NO: 2180 - protein, 7 aa, synthetic construct
RGDLKTN

SEQ ID NO: 2181 - protein, 7 aa, synthetic construct
RGDLLRT

SEQ ID NO: 2182 - protein, 7 aa, synthetic construct
RGDLSHS

SEQ ID NO: 2183 - protein, 7 aa, synthetic construct
RGDLSRT

SEQ ID NO: 2184 - protein, 7 aa, synthetic construct
RGDATHI

SEQ ID NO: 2185 - protein, 7 aa, synthetic construct
RGDLVFN

SEQ ID NO: 2186 - protein, 7 aa, synthetic construct
RGDNASK

SEQ ID NO: 2187 - protein, 7 aa, synthetic construct
RGDNHKV

SEQ ID NO: 2188 - protein, 7 aa, synthetic construct
RGDQGKL

SEQ ID NO: 2189 - protein, 7 aa, synthetic construct
RGDQHFV

SEQ ID NO: 2190 - protein, 7 aa, synthetic construct
RGDQLKQ

SEQ ID NO: 2191 - protein, 7 aa, synthetic construct
RGDQRTS

SEQ ID NO: 2192 - protein, 7 aa, synthetic construct
RGDRGLV

SEQ ID NO: 2193 - protein, 7 aa, synthetic construct
RGDRNFL

SEQ ID NO: 2194 - protein, 7 aa, synthetic construct
RGDRQEK

SEQ ID NO: 2195 - protein, 7 aa, synthetic construct
RGDSRSI

SEQ ID NO: 2196 - protein, 7 aa, synthetic construct
RGDSSVV

SEQ ID NO: 2197 - protein, 7 aa, synthetic construct
RGDSVNL

SEQ ID NO: 2198 - protein, 7 aa, synthetic construct
RGDTHQL

SEQ ID NO: 2199 - protein, 7 aa, synthetic construct
RGDTHVL

SEQ ID NO: 2200 - protein, 7 aa, synthetic construct
RGDTKAL

SEQ ID NO: 2201 - protein, 7 aa, synthetic construct
RGDVIKL

SEQ ID NO: 2202 - protein, 7 aa, synthetic construct
RGDVKSF

SEQ ID NO: 2203 - protein, 7 aa, synthetic construct
RGDVQHL

SEQ ID NO: 2204 - protein, 7 aa, synthetic construct
RGDVSVQ

SEQ ID NO: 2205 - protein, 7 aa, synthetic construct
RGDVTKV

SEQ ID NO: 2206 - protein, 7 aa, synthetic construct
RGDERHV

SEQ ID NO: 2207 - protein, 7 aa, synthetic construct
RGDFAKV

SEQ ID NO: 2208 - protein, 7 aa, synthetic construct
RGDFENK

SEQ ID NO: 2209 - protein, 7 aa, synthetic construct
RGDFKQV

SEQ ID NO: 2210 - protein, 7 aa, synthetic construct
RGDFKTT

SEQ ID NO: 2211 - protein, 7 aa, synthetic construct
RGDFSFI

SEQ ID NO: 2212 - protein, 7 aa, synthetic construct
RGDFSGF

SEQ ID NO: 2213 - protein, 7 aa, synthetic construct
RGDFSHS

SEQ ID NO: 2214 - protein, 7 aa, synthetic construct
RGDFSQR

SEQ ID NO: 2215 - protein, 7 aa, synthetic construct
RGDFVNS

SEQ ID NO: 2216 - protein, 7 aa, synthetic construct
RGDGGIR

SEQ ID NO: 2217 - protein, 7 aa, synthetic construct
RGDGSQL

SEQ ID NO: 2218 - protein, 7 aa, synthetic construct
RGDHAFQ

SEQ ID NO: 2219 - protein, 7 aa, synthetic construct
RGDHAKS

SEQ ID NO: 2220 - protein, 7 aa, synthetic construct
RGDIGHN

SEQ ID NO: 2221 - protein, 7 aa, synthetic construct
RGDIRIN

SEQ ID NO: 2222 - protein, 7 aa, synthetic construct
RGDKAAV

SEQ ID NO: 2223 - protein, 7 aa, synthetic construct
RGDKFSF

SEQ ID NO: 2224 - protein, 7 aa, synthetic construct
RGDKGTV

SEQ ID NO: 2225 - protein, 7 aa, synthetic construct
RGDKSHV

SEQ ID NO: 2226 - protein, 7 aa, synthetic construct
RGDKTHI

SEQ ID NO: 2227 - protein, 7 aa, synthetic construct
RGDLAGG

SEQ ID NO: 2228 - protein, 7 aa, synthetic construct
RGDLARN

SEQ ID NO: 2229 - protein, 7 aa, synthetic construct
RGDLEIR

SEQ ID NO: 2230 - protein, 7 aa, synthetic construct
RGDLIFV

SEQ ID NO: 2231 - protein, 7 aa, synthetic construct
RGDLRHE

SEQ ID NO: 2232 - protein, 7 aa, synthetic construct
RGDLSGV

SEQ ID NO: 2233 - protein, 7 aa, synthetic construct
RGDNEST

SEQ ID NO: 2234 - protein, 7 aa, synthetic construct
RGDNGRN

SEQ ID NO: 2235 - protein, 7 aa, synthetic construct
RGDNHKS

SEQ ID NO: 2236 - protein, 7 aa, synthetic construct
RGDQARG

SEQ ID NO: 2237 - protein, 7 aa, synthetic construct
RGDQKKN

SEQ ID NO: 2238 - protein, 7 aa, synthetic construct
RGDQKNS

SEQ ID NO: 2239 - protein, 7 aa, synthetic construct
RGDQSII

SEQ ID NO: 2240 - protein, 7 aa, synthetic construct
RGDRAVT

SEQ ID NO: 2241 - protein, 7 aa, synthetic construct
RGDRKER

SEQ ID NO: 2242 - protein, 7 aa, synthetic construct
RGDRKGA

SEQ ID NO: 2243 - protein, 7 aa, synthetic construct
RGDRLSQ

SEQ ID NO: 2244 - protein, 7 aa, synthetic construct
RGDRNAL

SEQ ID NO: 2245 - protein, 7 aa, synthetic construct
RGDRQAH

SEQ ID NO: 2246 - protein, 7 aa, synthetic construct
RGDRQGL

SEQ ID NO: 2247 - protein, 7 aa, synthetic construct
RGDRRIS

SEQ ID NO: 2248 - protein, 7 aa, synthetic construct
RGDRTNF

SEQ ID NO: 2249 - protein, 7 aa, synthetic construct
RGDSARV

SEQ ID NO: 2250 - protein, 7 aa, synthetic construct
RGDSGRQ

SEQ ID NO: 2251 - protein, 7 aa, synthetic construct
RGDSHNI

SEQ ID NO: 2252 - protein, 7 aa, synthetic construct
RGDSHSQ

SEQ ID NO: 2253 - protein, 7 aa, synthetic construct
RGDSSTI

SEQ ID NO: 2254 - protein, 7 aa, synthetic construct
RGDTKND

SEQ ID NO: 2255 - protein, 7 aa, synthetic construct
RGDVAHV

SEQ ID NO: 2256 - protein, 7 aa, synthetic construct
RGDVKGK

SEQ ID NO: 2257 - protein, 7 aa, synthetic construct
RGDVSGS

SEQ ID NO: 2258 - protein, 7 aa, synthetic construct
RGDEKKK

SEQ ID NO: 2259 - protein, 7 aa, synthetic construct
RGDFANS

SEQ ID NO: 2260 - protein, 7 aa, synthetic construct
RGDFGAA

SEQ ID NO: 2261 - protein, 7 aa, synthetic construct
RGDFGGV

SEQ ID NO: 2262 - protein, 7 aa, synthetic construct
RGDFHKI

SEQ ID NO: 2263 - protein, 7 aa, synthetic construct
RGDFHQT

SEQ ID NO: 2264 - protein, 7 aa, synthetic construct
RGDFKKL

SEQ ID NO: 2265 - protein, 7 aa, synthetic construct
RGDFSSK

SEQ ID NO: 2266 - protein, 7 aa, synthetic construct
RGDFTKV

SEQ ID NO: 2267 - protein, 7 aa, synthetic construct
RGDFVAQ

SEQ ID NO: 2268 - protein, 7 aa, synthetic construct
RGDGKKN

SEQ ID NO: 2269 - protein, 7 aa, synthetic construct
RGDGQAS

SEQ ID NO: 2270 - protein, 7 aa, synthetic construct
RGDGSSR

SEQ ID NO: 2271 - protein, 7 aa, synthetic construct
RGDGVKS

SEQ ID NO: 2272 - protein, 7 aa, synthetic construct
RGDGVRV

SEQ ID NO: 2273 - protein, 7 aa, synthetic construct
RGDHAGT

SEQ ID NO: 2274 - protein, 7 aa, synthetic construct
RGDHGAS

SEQ ID NO: 2275 - protein, 7 aa, synthetic construct
RGDHGAV

SEQ ID NO: 2276 - protein, 7 aa, synthetic construct
RGDHGGQ

SEQ ID NO: 2277 - protein, 7 aa, synthetic construct
RGDHSNV

SEQ ID NO: 2278 - protein, 7 aa, synthetic construct
RGDHVSI

SEQ ID NO: 2279 - protein, 7 aa, synthetic construct
RGDIAKR

SEQ ID NO: 2280 - protein, 7 aa, synthetic construct
RGDIANV

SEQ ID NO: 2281 - protein, 7 aa, synthetic construct
RGDIRTT

SEQ ID NO: 2282 - protein, 7 aa, synthetic construct
RGDISGR

SEQ ID NO: 2283 - protein, 7 aa, synthetic construct
RGDISII

SEQ ID NO: 2284 - protein, 7 aa, synthetic construct
RGDKGLQ

SEQ ID NO: 2285 - protein, 7 aa, synthetic construct
RGDKHII

SEQ ID NO: 2286 - protein, 7 aa, synthetic construct
RGDKLHK

SEQ ID NO: 2287 - protein, 7 aa, synthetic construct
RGDKNHF

SEQ ID NO: 2288 - protein, 7 aa, synthetic construct
RGDKQHG

SEQ ID NO: 2289 - protein, 7 aa, synthetic construct
RGDKSSK

SEQ ID NO: 2290 - protein, 7 aa, synthetic construct
RGDKVHI

SEQ ID NO: 2291 - protein, 7 aa, synthetic construct
RGDLGAA

SEQ ID NO: 2292 - protein, 7 aa, synthetic construct
RGDLRVQ

SEQ ID NO: 2293 - protein, 7 aa, synthetic construct
RGDLSHV

SEQ ID NO: 2294 - protein, 7 aa, synthetic construct
RGDLVGK

SEQ ID NO: 2295 - protein, 7 aa, synthetic construct
RGDLVRH

SEQ ID NO: 2296 - protein, 7 aa, synthetic construct
RGDNHTI

SEQ ID NO: 2297 - protein, 7 aa, synthetic construct
RGDQFAV

SEQ ID NO: 2298 - protein, 7 aa, synthetic construct
RGDQHHQ

SEQ ID NO: 2299 - protein, 7 aa, synthetic construct
RGDQHVV

SEQ ID NO: 2300 - protein, 7 aa, synthetic construct
RGDQLDI

SEQ ID NO: 2301 - protein, 7 aa, synthetic construct
RGDQQFK

SEQ ID NO: 2302 - protein, 7 aa, synthetic construct
RGDREFQ

SEQ ID NO: 2303 - protein, 7 aa, synthetic construct
RGDREKH

SEQ ID NO: 2304 - protein, 7 aa, synthetic construct
RGDRGIF

SEQ ID NO: 2305 - protein, 7 aa, synthetic construct
RGDRIII

SEQ ID NO: 2306 - protein, 7 aa, synthetic construct
RGDRNTI

SEQ ID NO: 2307 - protein, 7 aa, synthetic construct
RGDRQAV

SEQ ID NO: 2308 - protein, 7 aa, synthetic construct
RGDRQEL

SEQ ID NO: 2309 - protein, 7 aa, synthetic construct
RGDRSDQ

SEQ ID NO: 2310 - protein, 7 aa, synthetic construct
RGDRVDQ

SEQ ID NO: 2311 - protein, 7 aa, synthetic construct
RGDSRFL

SEQ ID NO: 2312 - protein, 7 aa, synthetic construct
RGDSRNF

SEQ ID NO: 2313 - protein, 7 aa, synthetic construct
RGDSRRT

SEQ ID NO: 2314 - protein, 7 aa, synthetic construct
RGDSSFI

SEQ ID NO: 2315 - protein, 7 aa, synthetic construct
RGDSSTQ

SEQ ID NO: 2316 - protein, 7 aa, synthetic construct
RGDTQKL

SEQ ID NO: 2317 - protein, 7 aa, synthetic construct
RGDVARK

SEQ ID NO: 2318 - protein, 7 aa, synthetic construct
RGDVKSG

SEQ ID NO: 2319 - protein, 7 aa, synthetic construct
RGDVKSI

SEQ ID NO: 2320 - protein, 7 aa, synthetic construct
RGDVSHS

SEQ ID NO: 2321 - protein, 7 aa, synthetic construct
RGDFAHS

SEQ ID NO: 2322 - protein, 7 aa, synthetic construct
RGDFETL

SEQ ID NO: 2323 - protein, 7 aa, synthetic construct
RGDFIRT

SEQ ID NO: 2324 - protein, 7 aa, synthetic construct
RGDFKTS

SEQ ID NO: 2325 - protein, 7 aa, synthetic construct
RGDFLGN

SEQ ID NO: 2326 - protein, 7 aa, synthetic construct
RGDAHKK

SEQ ID NO: 2327 - protein, 7 aa, synthetic construct
RGDFVST

SEQ ID NO: 2328 - protein, 7 aa, synthetic construct
RGDFVTH

SEQ ID NO: 2329 - protein, 7 aa, synthetic construct
RGDGAKQ

SEQ ID NO: 2330 - protein, 7 aa, synthetic construct
RGDGEGD

SEQ ID NO: 2331 - protein, 7 aa, synthetic construct
RGDGNKS

SEQ ID NO: 2332 - protein, 7 aa, synthetic construct
RGDHEHL

SEQ ID NO: 2333 - protein, 7 aa, synthetic construct
RGDHFKL

SEQ ID NO: 2334 - protein, 7 aa, synthetic construct
RGDHFKT

SEQ ID NO: 2335 - protein, 7 aa, synthetic construct
RGDHGGK

SEQ ID NO: 2336 - protein, 7 aa, synthetic construct
RGDHGSI

SEQ ID NO: 2337 - protein, 7 aa, synthetic construct
RGDHRDR

SEQ ID NO: 2338 - protein, 7 aa, synthetic construct
RGDHRNQ

SEQ ID NO: 2339 - protein, 7 aa, synthetic construct
RGDHSAR

SEQ ID NO: 2340 - protein, 7 aa, synthetic construct
RGDHTTL

SEQ ID NO: 2341 - protein, 7 aa, synthetic construct
RGDIRNT

SEQ ID NO: 2342 - protein, 7 aa, synthetic construct
RGDKGFS

SEQ ID NO: 2343 - protein, 7 aa, synthetic construct
RGDKLHV

SEQ ID NO: 2344 - protein, 7 aa, synthetic construct
RGDKNAF

SEQ ID NO: 2345 - protein, 7 aa, synthetic construct
RGDARNF

SEQ ID NO: 2346 - protein, 7 aa, synthetic construct
RGDLAGA

SEQ ID NO: 2347 - protein, 7 aa, synthetic construct
RGDLDVK

SEQ ID NO: 2348 - protein, 7 aa, synthetic construct
RGDLNRV

SEQ ID NO: 2349 - protein, 7 aa, synthetic construct
RGDLSVV

SEQ ID NO: 2350 - protein, 7 aa, synthetic construct
RGDNLQL

SEQ ID NO: 2351 - protein, 7 aa, synthetic construct
RGDNRNV

SEQ ID NO: 2352 - protein, 7 aa, synthetic construct
RGDQGGK

SEQ ID NO: 2353 - protein, 7 aa, synthetic construct
RGDQKTS

SEQ ID NO: 2354 - protein, 7 aa, synthetic construct
RGDRGFN

SEQ ID NO: 2355 - protein, 7 aa, synthetic construct
RGDRGVF

SEQ ID NO: 2356 - protein, 7 aa, synthetic construct
RGDRHNT

SEQ ID NO: 2357 - protein, 7 aa, synthetic construct
RGDRLQV

SEQ ID NO: 2358 - protein, 7 aa, synthetic construct
RGDRNHL

SEQ ID NO: 2359 - protein, 7 aa, synthetic construct
RGDRQGN

SEQ ID NO: 2360 - protein, 7 aa, synthetic construct
RGDRSFA

SEQ ID NO: 2361 - protein, 7 aa, synthetic construct
RGDRTVQ

SEQ ID NO: 2362 - protein, 7 aa, synthetic construct
RGDRVNI

SEQ ID NO: 2363 - protein, 7 aa, synthetic construct
RGDSHNK

SEQ ID NO: 2364 - protein, 7 aa, synthetic construct
RGDSHSI

SEQ ID NO: 2365 - protein, 7 aa, synthetic construct
RGDSNHV

SEQ ID NO: 2366 - protein, 7 aa, synthetic construct
RGDSRVV

SEQ ID NO: 2367 - protein, 7 aa, synthetic construct
RGDDGFK

SEQ ID NO: 2368 - protein, 7 aa, synthetic construct
RGDSVRQ

SEQ ID NO: 2369 - protein, 7 aa, synthetic construct
RGDTKNN

SEQ ID NO: 2370 - protein, 7 aa, synthetic construct
RGDTRQT

SEQ ID NO: 2371 - protein, 7 aa, synthetic construct
RGDVGVR

SEQ ID NO: 2372 - protein, 7 aa, synthetic construct
RGDVHQF

SEQ ID NO: 2373 - protein, 7 aa, synthetic construct
RGDVHSK

SEQ ID NO: 2374 - protein, 7 aa, synthetic construct
RGDVHSV

SEQ ID NO: 2375 - protein, 7 aa, synthetic construct
RGDVHTR

SEQ ID NO: 2376 - protein, 7 aa, synthetic construct
RGDVIRV

SEQ ID NO: 2377 - protein, 7 aa, synthetic construct
RGDVKLV

SEQ ID NO: 2378 - protein, 7 aa, synthetic construct
RGDVKVQ

SEQ ID NO: 2379 - protein, 7 aa, synthetic construct
RGDVLGK

SEQ ID NO: 2380 - protein, 7 aa, synthetic construct
RGDVLSG

SEQ ID NO: 2381 - protein, 7 aa, synthetic construct
RGDVNRG

SEQ ID NO: 2382 - protein, 7 aa, synthetic construct
RGDVSQK

SEQ ID NO: 2383 - protein, 7 aa, synthetic construct
RGDVVNK

SEQ ID NO: 2384 - protein, 7 aa, synthetic construct
RGDEGFR

SEQ ID NO: 2385 - protein, 7 aa, synthetic construct
RGDFAHK

SEQ ID NO: 2386 - protein, 7 aa, synthetic construct
RGDFFNL

SEQ ID NO: 2387 - protein, 7 aa, synthetic construct
RGDFGHN

SEQ ID NO: 2388 - protein, 7 aa, synthetic construct
RGDFGTK

SEQ ID NO: 2389 - protein, 7 aa, synthetic construct
RGDFHAK

SEQ ID NO: 2390 - protein, 7 aa, synthetic construct
RGDFHTT

SEQ ID NO: 2391 - protein, 7 aa, synthetic construct
RGDFLKR

SEQ ID NO: 2392 - protein, 7 aa, synthetic construct
RGDAHNR

SEQ ID NO: 2393 - protein, 7 aa, synthetic construct
RGDFSVI

SEQ ID NO: 2394 - protein, 7 aa, synthetic construct
RGDGIKK

SEQ ID NO: 2395 - protein, 7 aa, synthetic construct
RGDGKKL

SEQ ID NO: 2396 - protein, 7 aa, synthetic construct
RGDGKTQ

SEQ ID NO: 2397 - protein, 7 aa, synthetic construct
RGDGQKL

SEQ ID NO: 2398 - protein, 7 aa, synthetic construct
RGDGSAK

SEQ ID NO: 2399 - protein, 7 aa, synthetic construct
RGDGSHG

SEQ ID NO: 2400 - protein, 7 aa, synthetic construct
RGDHAKH

SEQ ID NO: 2401 - protein, 7 aa, synthetic construct
RGDHLSL

SEQ ID NO: 2402 - protein, 7 aa, synthetic construct
RGDHSRL

SEQ ID NO: 2403 - protein, 7 aa, synthetic construct
RGDHTKV

SEQ ID NO: 2404 - protein, 7 aa, synthetic construct
RGDAATR

SEQ ID NO: 2405 - protein, 7 aa, synthetic construct
RGDIHGT

SEQ ID NO: 2406 - protein, 7 aa, synthetic construct
RGDIRSQ

SEQ ID NO: 2407 - protein, 7 aa, synthetic construct
RGDISRA

SEQ ID NO: 2408 - protein, 7 aa, synthetic construct
RGDKASR

SEQ ID NO: 2409 - protein, 7 aa, synthetic construct
RGDKDTH

SEQ ID NO: 2410 - protein, 7 aa, synthetic construct
RGDKGSF

SEQ ID NO: 2411 - protein, 7 aa, synthetic construct
RGDKHDI

SEQ ID NO: 2412 - protein, 7 aa, synthetic construct
RGDKHFQ

SEQ ID NO: 2413 - protein, 7 aa, synthetic construct
RGDKNHL

SEQ ID NO: 2414 - protein, 7 aa, synthetic construct
RGDKQFQ

SEQ ID NO: 2415 - protein, 7 aa, synthetic construct
RGDKSKN

SEQ ID NO: 2416 - protein, 7 aa, synthetic construct
RGDLIVV

SEQ ID NO: 2417 - protein, 7 aa, synthetic construct
RGDLKFG

SEQ ID NO: 2418 - protein, 7 aa, synthetic construct
RGDLLSN

SEQ ID NO: 2419 - protein, 7 aa, synthetic construct
RGDLNQQ

SEQ ID NO: 2420 - protein, 7 aa, synthetic construct
RGDLRQE

SEQ ID NO: 2421 - protein, 7 aa, synthetic construct
RGDLRVV

SEQ ID NO: 2422 - protein, 7 aa, synthetic construct
RGDLSSN

SEQ ID NO: 2423 - protein, 7 aa, synthetic construct
RGDNHFQ

SEQ ID NO: 2424 - protein, 7 aa, synthetic construct
RGDNHLS

SEQ ID NO: 2425 - protein, 7 aa, synthetic construct
RGDNHQL

SEQ ID NO: 2426 - protein, 7 aa, synthetic construct
RGDNNRA

SEQ ID NO: 2427 - protein, 7 aa, synthetic construct
RGDQHST

SEQ ID NO: 2428 - protein, 7 aa, synthetic construct
RGDQKGF

SEQ ID NO: 2429 - protein, 7 aa, synthetic construct
RGDQKGK

SEQ ID NO: 2430 - protein, 7 aa, synthetic construct
RGDQKNI

SEQ ID NO: 2431 - protein, 7 aa, synthetic construct
RGDQKRN

SEQ ID NO: 2432 - protein, 7 aa, synthetic construct
RGDQLRS

SEQ ID NO: 2433 - protein, 7 aa, synthetic construct
RGDQRRE

SEQ ID NO: 2434 - protein, 7 aa, synthetic construct
RGDQRVK

SEQ ID NO: 2435 - protein, 7 aa, synthetic construct
RGDQTKK

SEQ ID NO: 2436 - protein, 7 aa, synthetic construct
RGDREFV

SEQ ID NO: 2437 - protein, 7 aa, synthetic construct
RGDRFAT

SEQ ID NO: 2438 - protein, 7 aa, synthetic construct
RGDRFKH

SEQ ID NO: 2439 - protein, 7 aa, synthetic construct
RGDRFTV

SEQ ID NO: 2440 - protein, 7 aa, synthetic construct
RGDRIGI

SEQ ID NO: 2441 - protein, 7 aa, synthetic construct
RGDRKTQ

SEQ ID NO: 2442 - protein, 7 aa, synthetic construct
RGDRLEI

SEQ ID NO: 2443 - protein, 7 aa, synthetic construct
RGDRLHV

SEQ ID NO: 2444 - protein, 7 aa, synthetic construct
RGDRRFE

SEQ ID NO: 2445 - protein, 7 aa, synthetic construct
RGDRRLV

SEQ ID NO: 2446 - protein, 7 aa, synthetic construct
RGDRTFN

SEQ ID NO: 2447 - protein, 7 aa, synthetic construct
RGDSAKA

SEQ ID NO: 2448 - protein, 7 aa, synthetic construct
RGDSFKT

SEQ ID NO: 2449 - protein, 7 aa, synthetic construct
RGDSKKL

SEQ ID NO: 2450 - protein, 7 aa, synthetic construct
RGDSLFV

SEQ ID NO: 2451 - protein, 7 aa, synthetic construct
RGDSRVI

SEQ ID NO: 2452 - protein, 7 aa, synthetic construct
RGDSSFF

SEQ ID NO: 2453 - protein, 7 aa, synthetic construct
RGDTQGK

SEQ ID NO: 2454 - protein, 7 aa, synthetic construct
RGDVKNT

SEQ ID NO: 2455 - protein, 7 aa, synthetic construct
RGDVKVK

SEQ ID NO: 2456 - protein, 7 aa, synthetic construct
RGDVRIQ

SEQ ID NO: 2457 - protein, 7 aa, synthetic construct
RGDVRNS

SEQ ID NO: 2458 - protein, 7 aa, synthetic construct
RGDVSEK

SEQ ID NO: 2459 - protein, 7 aa, synthetic construct
RGDVTGI

SEQ ID NO: 2460 - protein, 7 aa, synthetic construct
RGDVVLF

SEQ ID NO: 2461 - protein, 7 aa, synthetic construct
RGDEVVR

SEQ ID NO: 2462 - protein, 7 aa, synthetic construct
RGDFAKH

SEQ ID NO: 2463 - protein, 7 aa, synthetic construct
RGDFDVK

SEQ ID NO: 2464 - protein, 7 aa, synthetic construct
RGDFGVV

SEQ ID NO: 2465 - protein, 7 aa, synthetic construct
RGDFNDR

SEQ ID NO: 2466 - protein, 7 aa, synthetic construct
RGDFNKQ

SEQ ID NO: 2467 - protein, 7 aa, synthetic construct
RGDFRSI

SEQ ID NO: 2468 - protein, 7 aa, synthetic construct
RGDFSGQ

SEQ ID NO: 2469 - protein, 7 aa, synthetic construct
RGDFSNH

SEQ ID NO: 2470 - protein, 7 aa, synthetic construct
RGDFTGS

SEQ ID NO: 2471 - protein, 7 aa, synthetic construct
RGDFVQN

SEQ ID NO: 2472 - protein, 7 aa, synthetic construct
RGDGKHI

SEQ ID NO: 2473 - protein, 7 aa, synthetic construct
RGDAIRI

SEQ ID NO: 2474 - protein, 7 aa, synthetic construct
RGDGRSV

SEQ ID NO: 2475 - protein, 7 aa, synthetic construct
RGDGSLV

SEQ ID NO: 2476 - protein, 7 aa, synthetic construct
RGDAKGK

SEQ ID NO: 2477 - protein, 7 aa, synthetic construct
RGDHAFN

SEQ ID NO: 2478 - protein, 7 aa, synthetic construct
RGDHAHV

SEQ ID NO: 2479 - protein, 7 aa, synthetic construct
RGDHGKV

SEQ ID NO: 2480 - protein, 7 aa, synthetic construct
RGDHGTK

SEQ ID NO: 2481 - protein, 7 aa, synthetic construct
RGDHNQH

SEQ ID NO: 2482 - protein, 7 aa, synthetic construct
RGDHQAV

SEQ ID NO: 2483 - protein, 7 aa, synthetic construct
RGDHSRF

SEQ ID NO: 2484 - protein, 7 aa, synthetic construct
RGDIARI

SEQ ID NO: 2485 - protein, 7 aa, synthetic construct
RGDIQGI

SEQ ID NO: 2486 - protein, 7 aa, synthetic construct
RGDIQKI

SEQ ID NO: 2487 - protein, 7 aa, synthetic construct
RGDISQK

SEQ ID NO: 2488 - protein, 7 aa, synthetic construct
RGDAQRV

SEQ ID NO: 2489 - protein, 7 aa, synthetic construct
RGDKIVN

SEQ ID NO: 2490 - protein, 7 aa, synthetic construct
RGDKSVH

SEQ ID NO: 2491 - protein, 7 aa, synthetic construct
RGDLHHQ

SEQ ID NO: 2492 - protein, 7 aa, synthetic construct
RGDLHRT

SEQ ID NO: 2493 - protein, 7 aa, synthetic construct
RGDNLFV

SEQ ID NO: 2494 - protein, 7 aa, synthetic construct
RGDQGFR

SEQ ID NO: 2495 - protein, 7 aa, synthetic construct
RGDQGNS

SEQ ID NO: 2496 - protein, 7 aa, synthetic construct
RGDQHNK

SEQ ID NO: 2497 - protein, 7 aa, synthetic construct
RGDQIDS

SEQ ID NO: 2498 - protein, 7 aa, synthetic construct
RGDQNKF

SEQ ID NO: 2499 - protein, 7 aa, synthetic construct
RGDQREN

SEQ ID NO: 2500 - protein, 7 aa, synthetic construct
RGDQRSN

SEQ ID NO: 2501 - protein, 7 aa, synthetic construct
RGDQTKV

SEQ ID NO: 2502 - protein, 7 aa, synthetic construct
RGDRAVI

SEQ ID NO: 2503 - protein, 7 aa, synthetic construct
RGDRETI

SEQ ID NO: 2504 - protein, 7 aa, synthetic construct
RGDRFQK

SEQ ID NO: 2505 - protein, 7 aa, synthetic construct
RGDRLVI

SEQ ID NO: 2506 - protein, 7 aa, synthetic construct
RGDRNAN

SEQ ID NO: 2507 - protein, 7 aa, synthetic construct
RGDRREF

SEQ ID NO: 2508 - protein, 7 aa, synthetic construct
RGDRRVI

SEQ ID NO: 2509 - protein, 7 aa, synthetic construct
RGDRSNT

SEQ ID NO: 2510 - protein, 7 aa, synthetic construct
RGDSISV

SEQ ID NO: 2511 - protein, 7 aa, synthetic construct
RGDSIVK

SEQ ID NO: 2512 - protein, 7 aa, synthetic construct
RGDSQFL

SEQ ID NO: 2513 - protein, 7 aa, synthetic construct
RGDSVRL

SEQ ID NO: 2514 - protein, 7 aa, synthetic construct
RGDTQHI

SEQ ID NO: 2515 - protein, 7 aa, synthetic construct
RGDVIKI

SEQ ID NO: 2516 - protein, 7 aa, synthetic construct
RGDVKFQ

SEQ ID NO: 2517 - protein, 7 aa, synthetic construct
RGDVRNE

SEQ ID NO: 2518 - protein, 7 aa, synthetic construct
RGDVRTL

SEQ ID NO: 2519 - protein, 7 aa, synthetic construct
RGDVVNR

SEQ ID NO: 2520 - protein, 7 aa, synthetic construct
RGDESRS

SEQ ID NO: 2521 - protein, 7 aa, synthetic construct
RGDFARH

SEQ ID NO: 2522 - protein, 7 aa, synthetic construct
RGDFGGK

SEQ ID NO: 2523 - protein, 7 aa, synthetic construct
RGDFKKN

SEQ ID NO: 2524 - protein, 7 aa, synthetic construct
RGDFSIV

SEQ ID NO: 2525 - protein, 7 aa, synthetic construct
RGDFVHE

SEQ ID NO: 2526 - protein, 7 aa, synthetic construct
RGDGAHL

SEQ ID NO: 2527 - protein, 7 aa, synthetic construct
RGDGKGF

SEQ ID NO: 2528 - protein, 7 aa, synthetic construct
RGDGRIV

SEQ ID NO: 2529 - protein, 7 aa, synthetic construct
RGDGRSL

SEQ ID NO: 2530 - protein, 7 aa, synthetic construct
RGDGSGF

SEQ ID NO: 2531 - protein, 7 aa, synthetic construct
RGDGSKF

SEQ ID NO: 2532 - protein, 7 aa, synthetic construct
RGDGSVF

SEQ ID NO: 2533 - protein, 7 aa, synthetic construct
RGDGVRL

SEQ ID NO: 2534 - protein, 7 aa, synthetic construct
RGDHATI

SEQ ID NO: 2535 - protein, 7 aa, synthetic construct
RGDHHGL

SEQ ID NO: 2536 - protein, 7 aa, synthetic construct
RGDHQKT

SEQ ID NO: 2537 - protein, 7 aa, synthetic construct
RGDHSFN

SEQ ID NO: 2538 - protein, 7 aa, synthetic construct
RGDHSTT

SEQ ID NO: 2539 - protein, 7 aa, synthetic construct
RGDHVVL

SEQ ID NO: 2540 - protein, 7 aa, synthetic construct
RGDANHV

SEQ ID NO: 2541 - protein, 7 aa, synthetic construct
RGDIGFR

SEQ ID NO: 2542 - protein, 7 aa, synthetic construct
RGDIRTS

SEQ ID NO: 2543 - protein, 7 aa, synthetic construct
RGDISTV

SEQ ID NO: 2544 - protein, 7 aa, synthetic construct
RGDKANN

SEQ ID NO: 2545 - protein, 7 aa, synthetic construct
RGDKESV

SEQ ID NO: 2546 - protein, 7 aa, synthetic construct
RGDKGRF

SEQ ID NO: 2547 - protein, 7 aa, synthetic construct
RGDKSFV

SEQ ID NO: 2548 - protein, 7 aa, synthetic construct
RGDKSNS

SEQ ID NO: 2549 - protein, 7 aa, synthetic construct
RGDARSQ

SEQ ID NO: 2550 - protein, 7 aa, synthetic construct
RGDLKNN

SEQ ID NO: 2551 - protein, 7 aa, synthetic construct
RGDLKVS

SEQ ID NO: 2552 - protein, 7 aa, synthetic construct
RGDLLGT

SEQ ID NO: 2553 - protein, 7 aa, synthetic construct
RGDLTHI

SEQ ID NO: 2554 - protein, 7 aa, synthetic construct
RGDNKKL

SEQ ID NO: 2555 - protein, 7 aa, synthetic construct
RGDNRAK

SEQ ID NO: 2556 - protein, 7 aa, synthetic construct
RGDNSHT

SEQ ID NO: 2557 - protein, 7 aa, synthetic construct
RGDQGNK

SEQ ID NO: 2558 - protein, 7 aa, synthetic construct
RGDQHLI

SEQ ID NO: 2559 - protein, 7 aa, synthetic construct
RGDQRDI

SEQ ID NO: 2560 - protein, 7 aa, synthetic construct
RGDQSFK

SEQ ID NO: 2561 - protein, 7 aa, synthetic construct
RGDQSSI

SEQ ID NO: 2562 - protein, 7 aa, synthetic construct
RGDRAHV

SEQ ID NO: 2563 - protein, 7 aa, synthetic construct
RGDREGH

SEQ ID NO: 2564 - protein, 7 aa, synthetic construct
RGDRFTI

SEQ ID NO: 2565 - protein, 7 aa, synthetic construct
RGDRGIH

SEQ ID NO: 2566 - protein, 7 aa, synthetic construct
RGDRHAV

SEQ ID NO: 2567 - protein, 7 aa, synthetic construct
RGDRIQI

SEQ ID NO: 2568 - protein, 7 aa, synthetic construct
RGDRKFL

SEQ ID NO: 2569 - protein, 7 aa, synthetic construct
RGDRLKI

SEQ ID NO: 2570 - protein, 7 aa, synthetic construct
RGDRSAQ

SEQ ID NO: 2571 - protein, 7 aa, synthetic construct
RGDRSFG

SEQ ID NO: 2572 - protein, 7 aa, synthetic construct
RGDRSHV

SEQ ID NO: 2573 - protein, 7 aa, synthetic construct
RGDRVDA

SEQ ID NO: 2574 - protein, 7 aa, synthetic construct
RGDSAKI

SEQ ID NO: 2575 - protein, 7 aa, synthetic construct
RGDSASR

SEQ ID NO: 2576 - protein, 7 aa, synthetic construct
RGDSHNV

SEQ ID NO: 2577 - protein, 7 aa, synthetic construct
RGDSKGV

SEQ ID NO: 2578 - protein, 7 aa, synthetic construct
RGDSLVV

SEQ ID NO: 2579 - protein, 7 aa, synthetic construct
RGDSNFL

SEQ ID NO: 2580 - protein, 7 aa, synthetic construct
RGDSQTI

SEQ ID NO: 2581 - protein, 7 aa, synthetic construct
RGDSRFR

SEQ ID NO: 2582 - protein, 7 aa, synthetic construct
RGDSRTK

SEQ ID NO: 2583 - protein, 7 aa, synthetic construct
RGDSRVF

SEQ ID NO: 2584 - protein, 7 aa, synthetic construct
RGDTAIR

SEQ ID NO: 2585 - protein, 7 aa, synthetic construct
RGDTHHL

SEQ ID NO: 2586 - protein, 7 aa, synthetic construct
RGDTKGS

SEQ ID NO: 2587 - protein, 7 aa, synthetic construct
RGDTKHL

SEQ ID NO: 2588 - protein, 7 aa, synthetic construct
RGDTRSS

SEQ ID NO: 2589 - protein, 7 aa, synthetic construct
RGDTVFV

SEQ ID NO: 2590 - protein, 7 aa, synthetic construct
RGDTVIR

SEQ ID NO: 2591 - protein, 7 aa, synthetic construct
RGDVEGR

SEQ ID NO: 2592 - protein, 7 aa, synthetic construct
RGDVGHV

SEQ ID NO: 2593 - protein, 7 aa, synthetic construct
RGDVNFK

SEQ ID NO: 2594 - protein, 7 aa, synthetic construct
RGDVQAR

SEQ ID NO: 2595 - protein, 7 aa, synthetic construct
RGDVVRI

SEQ ID NO: 2596 - protein, 7 aa, synthetic construct
RGDDVRT

SEQ ID NO: 2597 - protein, 7 aa, synthetic construct
RGDEQNL

SEQ ID NO: 2598 - protein, 7 aa, synthetic construct
RGDFGKV

SEQ ID NO: 2599 - protein, 7 aa, synthetic construct
RGDFGNV

SEQ ID NO: 2600 - protein, 7 aa, synthetic construct
RGDFGSN

SEQ ID NO: 2601 - protein, 7 aa, synthetic construct
RGDFINQ

SEQ ID NO: 2602 - protein, 7 aa, synthetic construct
RGDFKHV

SEQ ID NO: 2603 - protein, 7 aa, synthetic construct
RGDFLGQ

SEQ ID NO: 2604 - protein, 7 aa, synthetic construct
RGDFRTN

SEQ ID NO: 2605 - protein, 7 aa, synthetic construct
RGDGAKV

SEQ ID NO: 2606 - protein, 7 aa, synthetic construct
RGDGGKG

SEQ ID NO: 2607 - protein, 7 aa, synthetic construct
RGDGHRN

SEQ ID NO: 2608 - protein, 7 aa, synthetic construct
RGDGKAF

SEQ ID NO: 2609 - protein, 7 aa, synthetic construct
RGDGNRK

SEQ ID NO: 2610 - protein, 7 aa, synthetic construct
RGDGRDG

SEQ ID NO: 2611 - protein, 7 aa, synthetic construct
RGDGRNI

SEQ ID NO: 2612 - protein, 7 aa, synthetic construct
RGDGRNL

SEQ ID NO: 2613 - protein, 7 aa, synthetic construct
RGDGRNQ

SEQ ID NO: 2614 - protein, 7 aa, synthetic construct
RGDGSFI

SEQ ID NO: 2615 - protein, 7 aa, synthetic construct
RGDGSQR

SEQ ID NO: 2616 - protein, 7 aa, synthetic construct
RGDHHFN

SEQ ID NO: 2617 - protein, 7 aa, synthetic construct
RGDHHRI

SEQ ID NO: 2618 - protein, 7 aa, synthetic construct
RGDHKTR

SEQ ID NO: 2619 - protein, 7 aa, synthetic construct
RGDHQAL

SEQ ID NO: 2620 - protein, 7 aa, synthetic construct
RGDHSGQ

SEQ ID NO: 2621 - protein, 7 aa, synthetic construct
RGDIAVV

SEQ ID NO: 2622 - protein, 7 aa, synthetic construct
RGDILFH

SEQ ID NO: 2623 - protein, 7 aa, synthetic construct
RGDIRFN

SEQ ID NO: 2624 - protein, 7 aa, synthetic construct
RGDIRLI

SEQ ID NO: 2625 - protein, 7 aa, synthetic construct
RGDISLQ

SEQ ID NO: 2626 - protein, 7 aa, synthetic construct
RGDKGGR

SEQ ID NO: 2627 - protein, 7 aa, synthetic construct
RGDKLRS

SEQ ID NO: 2628 - protein, 7 aa, synthetic construct
RGDKSSV

SEQ ID NO: 2629 - protein, 7 aa, synthetic construct
RGDKVII

SEQ ID NO: 2630 - protein, 7 aa, synthetic construct
RGDLHFT

SEQ ID NO: 2631 - protein, 7 aa, synthetic construct
RGDLHHL

SEQ ID NO: 2632 - protein, 7 aa, synthetic construct
RGDLLFV

SEQ ID NO: 2633 - protein, 7 aa, synthetic construct
RGDLVRI

SEQ ID NO: 2634 - protein, 7 aa, synthetic construct
RGDATNV

SEQ ID NO: 2635 - protein, 7 aa, synthetic construct
RGDNQHF

SEQ ID NO: 2636 - protein, 7 aa, synthetic construct
RGDQFKK

SEQ ID NO: 2637 - protein, 7 aa, synthetic construct
RGDQGFQ

SEQ ID NO: 2638 - protein, 7 aa, synthetic construct
RGDQKVR

SEQ ID NO: 2639 - protein, 7 aa, synthetic construct
RGDQNRF

SEQ ID NO: 2640 - protein, 7 aa, synthetic construct
RGDQRSS

SEQ ID NO: 2641 - protein, 7 aa, synthetic construct
RGDQSHA

SEQ ID NO: 2642 - protein, 7 aa, synthetic construct
RGDQSKH

SEQ ID NO: 2643 - protein, 7 aa, synthetic construct
RGDQSRH

SEQ ID NO: 2644 - protein, 7 aa, synthetic construct
RGDREVI

SEQ ID NO: 2645 - protein, 7 aa, synthetic construct
RGDRGEH

SEQ ID NO: 2646 - protein, 7 aa, synthetic construct
RGDRHQL

SEQ ID NO: 2647 - protein, 7 aa, synthetic construct
RGDRKHI

SEQ ID NO: 2648 - protein, 7 aa, synthetic construct
RGDRKLF

SEQ ID NO: 2649 - protein, 7 aa, synthetic construct
RGDRLIR

SEQ ID NO: 2650 - protein, 7 aa, synthetic construct
RGDRQEF

SEQ ID NO: 2651 - protein, 7 aa, synthetic construct
RGDRQLV

SEQ ID NO: 2652 - protein, 7 aa, synthetic construct
RGDRSGT

SEQ ID NO: 2653 - protein, 7 aa, synthetic construct
RGDSGGI

SEQ ID NO: 2654 - protein, 7 aa, synthetic construct
RGDSHKI

SEQ ID NO: 2655 - protein, 7 aa, synthetic construct
RGDSKSI

SEQ ID NO: 2656 - protein, 7 aa, synthetic construct
RGDSLKN

SEQ ID NO: 2657 - protein, 7 aa, synthetic construct
RGDSLRV

SEQ ID NO: 2658 - protein, 7 aa, synthetic construct
RGDSNHR

SEQ ID NO: 2659 - protein, 7 aa, synthetic construct
RGDSVDR

SEQ ID NO: 2660 - protein, 7 aa, synthetic construct
RGDTKKA

SEQ ID NO: 2661 - protein, 7 aa, synthetic construct
RGDTLFF

SEQ ID NO: 2662 - protein, 7 aa, synthetic construct
RGDTRNT

SEQ ID NO: 2663 - protein, 7 aa, synthetic construct
RGDTVTR

SEQ ID NO: 2664 - protein, 7 aa, synthetic construct
RGDVHFI

SEQ ID NO: 2665 - protein, 7 aa, synthetic construct
RGDVHKV

SEQ ID NO: 2666 - protein, 7 aa, synthetic construct
RGDVKAF

SEQ ID NO: 2667 - protein, 7 aa, synthetic construct
RGDVKHR

SEQ ID NO: 2668 - protein, 7 aa, synthetic construct
RGDVLVN

SEQ ID NO: 2669 - protein, 7 aa, synthetic construct
RGDVRLH

SEQ ID NO: 2670 - protein, 7 aa, synthetic construct
RGDVTHI

SEQ ID NO: 2671 - protein, 7 aa, synthetic construct
RGDVTRQ

SEQ ID NO: 2672 - protein, 7 aa, synthetic construct
RGDAEKL

SEQ ID NO: 2673 - protein, 7 aa, synthetic construct
RGDEGVQ

SEQ ID NO: 2674 - protein, 7 aa, synthetic construct
RGDFFRE

SEQ ID NO: 2675 - protein, 7 aa, synthetic construct
RGDFHTR

SEQ ID NO: 2676 - protein, 7 aa, synthetic construct
RGDFSHI

SEQ ID NO: 2677 - protein, 7 aa, synthetic construct
RGDFSNV

SEQ ID NO: 2678 - protein, 7 aa, synthetic construct
RGDFTKT

SEQ ID NO: 2679 - protein, 7 aa, synthetic construct
RGDFVSR

SEQ ID NO: 2680 - protein, 7 aa, synthetic construct
RGDGSKI

SEQ ID NO: 2681 - protein, 7 aa, synthetic construct
RGDGTHT

SEQ ID NO: 2682 - protein, 7 aa, synthetic construct
RGDHAAV

SEQ ID NO: 2683 - protein, 7 aa, synthetic construct
RGDHGAR

SEQ ID NO: 2684 - protein, 7 aa, synthetic construct
RGDHGLE

SEQ ID NO: 2685 - protein, 7 aa, synthetic construct
RGDHGVF

SEQ ID NO: 2686 - protein, 7 aa, synthetic construct
RGDHGVQ

SEQ ID NO: 2687 - protein, 7 aa, synthetic construct
RGDHKER

SEQ ID NO: 2688 - protein, 7 aa, synthetic construct
RGDHQHV

SEQ ID NO: 2689 - protein, 7 aa, synthetic construct
RGDHQTL

SEQ ID NO: 2690 - protein, 7 aa, synthetic construct
RGDHRLI

SEQ ID NO: 2691 - protein, 7 aa, synthetic construct
RGDHSKL

SEQ ID NO: 2692 - protein, 7 aa, synthetic construct
RGDHTHS

SEQ ID NO: 2693 - protein, 7 aa, synthetic construct
RGDHTNI

SEQ ID NO: 2694 - protein, 7 aa, synthetic construct
RGDIAHK

SEQ ID NO: 2695 - protein, 7 aa, synthetic construct
RGDIGRK

SEQ ID NO: 2696 - protein, 7 aa, synthetic construct
RGDILTV

SEQ ID NO: 2697 - protein, 7 aa, synthetic construct
RGDIRSR

SEQ ID NO: 2698 - protein, 7 aa, synthetic construct
RGDISQH

SEQ ID NO: 2699 - protein, 7 aa, synthetic construct
RGDKGAK

SEQ ID NO: 2700 - protein, 7 aa, synthetic construct
RGDKHKV

SEQ ID NO: 2701 - protein, 7 aa, synthetic construct
RGDKLNS

SEQ ID NO: 2702 - protein, 7 aa, synthetic construct
RGDKRDT

SEQ ID NO: 2703 - protein, 7 aa, synthetic construct
RGDKREI

SEQ ID NO: 2704 - protein, 7 aa, synthetic construct
RGDKREV

SEQ ID NO: 2705 - protein, 7 aa, synthetic construct
RGDKRLK

SEQ ID NO: 2706 - protein, 7 aa, synthetic construct
RGDKVNI

SEQ ID NO: 2707 - protein, 7 aa, synthetic construct
RGDLAFN

SEQ ID NO: 2708 - protein, 7 aa, synthetic construct
RGDLFNI

SEQ ID NO: 2709 - protein, 7 aa, synthetic construct
RGDLKDV

SEQ ID NO: 2710 - protein, 7 aa, synthetic construct
RGDLLFQ

SEQ ID NO: 2711 - protein, 7 aa, synthetic construct
RGDLRGQ

SEQ ID NO: 2712 - protein, 7 aa, synthetic construct
RGDLVIQ

SEQ ID NO: 2713 - protein, 7 aa, synthetic construct
RGDLVTT

SEQ ID NO: 2714 - protein, 7 aa, synthetic construct
RGDNLKT

SEQ ID NO: 2715 - protein, 7 aa, synthetic construct
RGDNRSL

SEQ ID NO: 2716 - protein, 7 aa, synthetic construct
RGDQAHT

SEQ ID NO: 2717 - protein, 7 aa, synthetic construct
RGDQAKV

SEQ ID NO: 2718 - protein, 7 aa, synthetic construct
RGDQDFF

SEQ ID NO: 2719 - protein, 7 aa, synthetic construct
RGDQGFI

SEQ ID NO: 2720 - protein, 7 aa, synthetic construct
RGDQGRN

SEQ ID NO: 2721 - protein, 7 aa, synthetic construct
RGDQHRA

SEQ ID NO: 2722 - protein, 7 aa, synthetic construct
RGDQKKQ

SEQ ID NO: 2723 - protein, 7 aa, synthetic construct
RGDQRLI

SEQ ID NO: 2724 - protein, 7 aa, synthetic construct
RGDQSTG

SEQ ID NO: 2725 - protein, 7 aa, synthetic construct
RGDQTHV

SEQ ID NO: 2726 - protein, 7 aa, synthetic construct
RGDQVIL

SEQ ID NO: 2727 - protein, 7 aa, synthetic construct
RGDRATA

SEQ ID NO: 2728 - protein, 7 aa, synthetic construct
RGDRESK

SEQ ID NO: 2729 - protein, 7 aa, synthetic construct
RGDRFVV

SEQ ID NO: 2730 - protein, 7 aa, synthetic construct
RGDRRGV

SEQ ID NO: 2731 - protein, 7 aa, synthetic construct
RGDRSGQ

SEQ ID NO: 2732 - protein, 7 aa, synthetic construct
RGDRTTS

SEQ ID NO: 2733 - protein, 7 aa, synthetic construct
RGDRVDL

SEQ ID NO: 2734 - protein, 7 aa, synthetic construct
RGDRVVF

SEQ ID NO: 2735 - protein, 7 aa, synthetic construct
RGDSGNL

SEQ ID NO: 2736 - protein, 7 aa, synthetic construct
RGDSIFQ

SEQ ID NO: 2737 - protein, 7 aa, synthetic construct
RGDSKQV

SEQ ID NO: 2738 - protein, 7 aa, synthetic construct
RGDSRRV

SEQ ID NO: 2739 - protein, 7 aa, synthetic construct
RGDSRVQ

SEQ ID NO: 2740 - protein, 7 aa, synthetic construct
RGDTRFN

SEQ ID NO: 2741 - protein, 7 aa, synthetic construct
RGDTRNF

SEQ ID NO: 2742 - protein, 7 aa, synthetic construct
RGDTRQI

SEQ ID NO: 2743 - protein, 7 aa, synthetic construct
RGDTRSQ

SEQ ID NO: 2744 - protein, 7 aa, synthetic construct
RGDVKAR

SEQ ID NO: 2745 - protein, 7 aa, synthetic construct
RGDVKHK

SEQ ID NO: 2746 - protein, 7 aa, synthetic construct
RGDVQHF

SEQ ID NO: 2747 - protein, 7 aa, synthetic construct
RGDVRIS

SEQ ID NO: 2748 - protein, 7 aa, synthetic construct
RGDVRNQ

SEQ ID NO: 2749 - protein, 7 aa, synthetic construct
RGDVRSF

SEQ ID NO: 2750 - protein, 7 aa, synthetic construct
RGDVRSG

SEQ ID NO: 2751 - protein, 7 aa, synthetic construct
RGDVSKK

SEQ ID NO: 2752 - protein, 7 aa, synthetic construct
RGDEGFT

SEQ ID NO: 2753 - protein, 7 aa, synthetic construct
RGDETKN

SEQ ID NO: 2754 - protein, 7 aa, synthetic construct
RGDFDNK

SEQ ID NO: 2755 - protein, 7 aa, synthetic construct
RGDFHHD

SEQ ID NO: 2756 - protein, 7 aa, synthetic construct
RGDFSVQ

SEQ ID NO: 2757 - protein, 7 aa, synthetic construct
RGDFTRK

SEQ ID NO: 2758 - protein, 7 aa, synthetic construct
RGDFVQK

SEQ ID NO: 2759 - protein, 7 aa, synthetic construct
RGDAIKV

SEQ ID NO: 2760 - protein, 7 aa, synthetic construct
RGDGHTL

SEQ ID NO: 2761 - protein, 7 aa, synthetic construct
RGDGRET

SEQ ID NO: 2762 - protein, 7 aa, synthetic construct
RGDHASQ

SEQ ID NO: 2763 - protein, 7 aa, synthetic construct
RGDHDLR

SEQ ID NO: 2764 - protein, 7 aa, synthetic construct
RGDHNVL

SEQ ID NO: 2765 - protein, 7 aa, synthetic construct
RGDHRHF

SEQ ID NO: 2766 - protein, 7 aa, synthetic construct
RGDHSFQ

SEQ ID NO: 2767 - protein, 7 aa, synthetic construct
RGDHSKN

SEQ ID NO: 2768 - protein, 7 aa, synthetic construct
RGDHTHV

SEQ ID NO: 2769 - protein, 7 aa, synthetic construct
RGDHTKF

SEQ ID NO: 2770 - protein, 7 aa, synthetic construct
RGDHTSK

SEQ ID NO: 2771 - protein, 7 aa, synthetic construct
RGDHVEQ

SEQ ID NO: 2772 - protein, 7 aa, synthetic construct
RGDHVSV

SEQ ID NO: 2773 - protein, 7 aa, synthetic construct
RGDIDRR

SEQ ID NO: 2774 - protein, 7 aa, synthetic construct
RGDILNT

SEQ ID NO: 2775 - protein, 7 aa, synthetic construct
RGDIRGF

SEQ ID NO: 2776 - protein, 7 aa, synthetic construct
RGDIRSI

SEQ ID NO: 2777 - protein, 7 aa, synthetic construct
RGDISGF

SEQ ID NO: 2778 - protein, 7 aa, synthetic construct
RGDISLR

SEQ ID NO: 2779 - protein, 7 aa, synthetic construct
RGDISST

SEQ ID NO: 2780 - protein, 7 aa, synthetic construct
RGDAQRN

SEQ ID NO: 2781 - protein, 7 aa, synthetic construct
RGDKGGK

SEQ ID NO: 2782 - protein, 7 aa, synthetic construct
RGDKLEV

SEQ ID NO: 2783 - protein, 7 aa, synthetic construct
RGDKLKL

SEQ ID NO: 2784 - protein, 7 aa, synthetic construct
RGDKLSK

SEQ ID NO: 2785 - protein, 7 aa, synthetic construct
RGDKLTT

SEQ ID NO: 2786 - protein, 7 aa, synthetic construct
RGDARIV

SEQ ID NO: 2787 - protein, 7 aa, synthetic construct
RGDKRQT

SEQ ID NO: 2788 - protein, 7 aa, synthetic construct
RGDKSRQ

SEQ ID NO: 2789 - protein, 7 aa, synthetic construct
RGDKVFK

SEQ ID NO: 2790 - protein, 7 aa, synthetic construct
RGDKVSI

SEQ ID NO: 2791 - protein, 7 aa, synthetic construct
RGDLFSV

SEQ ID NO: 2792 - protein, 7 aa, synthetic construct
RGDLHHT

SEQ ID NO: 2793 - protein, 7 aa, synthetic construct
RGDLKIR

SEQ ID NO: 2794 - protein, 7 aa, synthetic construct
RGDLSRK

SEQ ID NO: 2795 - protein, 7 aa, synthetic construct
RGDLVQN

SEQ ID NO: 2796 - protein, 7 aa, synthetic construct
RGDNHGT

SEQ ID NO: 2797 - protein, 7 aa, synthetic construct
RGDQAKD

SEQ ID NO: 2798 - protein, 7 aa, synthetic construct
RGDQGKK

SEQ ID NO: 2799 - protein, 7 aa, synthetic construct
RGDQKFL

SEQ ID NO: 2800 - protein, 7 aa, synthetic construct
RGDQKNQ

SEQ ID NO: 2801 - protein, 7 aa, synthetic construct
RGDQSGL

SEQ ID NO: 2802 - protein, 7 aa, synthetic construct
RGDRALV

SEQ ID NO: 2803 - protein, 7 aa, synthetic construct
RGDREHV

SEQ ID NO: 2804 - protein, 7 aa, synthetic construct
RGDRFNL

SEQ ID NO: 2805 - protein, 7 aa, synthetic construct
RGDRIVA

SEQ ID NO: 2806 - protein, 7 aa, synthetic construct
RGDRKRD

SEQ ID NO: 2807 - protein, 7 aa, synthetic construct
RGDRLDR

SEQ ID NO: 2808 - protein, 7 aa, synthetic construct
RGDRQST

SEQ ID NO: 2809 - protein, 7 aa, synthetic construct
RGDRSKV

SEQ ID NO: 2810 - protein, 7 aa, synthetic construct
RGDRTSI

SEQ ID NO: 2811 - protein, 7 aa, synthetic construct
RGDSARI

SEQ ID NO: 2812 - protein, 7 aa, synthetic construct
RGDSSNN

SEQ ID NO: 2813 - protein, 7 aa, synthetic construct
RGDTKFK

SEQ ID NO: 2814 - protein, 7 aa, synthetic construct
RGDTLSV

SEQ ID NO: 2815 - protein, 7 aa, synthetic construct
RGDVEDR

SEQ ID NO: 2816 - protein, 7 aa, synthetic construct
RGDVEVL

SEQ ID NO: 2817 - protein, 7 aa, synthetic construct
RGDVHII

SEQ ID NO: 2818 - protein, 7 aa, synthetic construct
RGDVHLI

SEQ ID NO: 2819 - protein, 7 aa, synthetic construct
RGDVIRL

SEQ ID NO: 2820 - protein, 7 aa, synthetic construct
RGDVKGS

SEQ ID NO: 2821 - protein, 7 aa, synthetic construct
RGDVKKI

SEQ ID NO: 2822 - protein, 7 aa, synthetic construct
RGDVKTK

SEQ ID NO: 2823 - protein, 7 aa, synthetic construct
RGDVLRQ

SEQ ID NO: 2824 - protein, 7 aa, synthetic construct
RGDVRAL

SEQ ID NO: 2825 - protein, 7 aa, synthetic construct
RGDVSEV

SEQ ID NO: 2826 - protein, 7 aa, synthetic construct
RGDDSRV

SEQ ID NO: 2827 - protein, 7 aa, synthetic construct
RGDFESK

SEQ ID NO: 2828 - protein, 7 aa, synthetic construct
RGDFESR

SEQ ID NO: 2829 - protein, 7 aa, synthetic construct
RGDFHSN

SEQ ID NO: 2830 - protein, 7 aa, synthetic construct
RGDFIGG

SEQ ID NO: 2831 - protein, 7 aa, synthetic construct
RGDFIRR

SEQ ID NO: 2832 - protein, 7 aa, synthetic construct
RGDFLNK

SEQ ID NO: 2833 - protein, 7 aa, synthetic construct
RGDFSGI

SEQ ID NO: 2834 - protein, 7 aa, synthetic construct
RGDGFKT

SEQ ID NO: 2835 - protein, 7 aa, synthetic construct
RGDGNKQ

SEQ ID NO: 2836 - protein, 7 aa, synthetic construct
RGDGREV

SEQ ID NO: 2837 - protein, 7 aa, synthetic construct
RGDGRKS

SEQ ID NO: 2838 - protein, 7 aa, synthetic construct
RGDGSGA

SEQ ID NO: 2839 - protein, 7 aa, synthetic construct
RGDAKFR

SEQ ID NO: 2840 - protein, 7 aa, synthetic construct
RGDHAQN

SEQ ID NO: 2841 - protein, 7 aa, synthetic construct
RGDHFNL

SEQ ID NO: 2842 - protein, 7 aa, synthetic construct
RGDHGGL

SEQ ID NO: 2843 - protein, 7 aa, synthetic construct
RGDHNGK

SEQ ID NO: 2844 - protein, 7 aa, synthetic construct
RGDIHEI

SEQ ID NO: 2845 - protein, 7 aa, synthetic construct
RGDIHVT

SEQ ID NO: 2846 - protein, 7 aa, synthetic construct
RGDIKIS

SEQ ID NO: 2847 - protein, 7 aa, synthetic construct
RGDIRHI

SEQ ID NO: 2848 - protein, 7 aa, synthetic construct
RGDISTT

SEQ ID NO: 2849 - protein, 7 aa, synthetic construct
RGDKAGK

SEQ ID NO: 2850 - protein, 7 aa, synthetic construct
RGDKAHQ

SEQ ID NO: 2851 - protein, 7 aa, synthetic construct
RGDKFFV

SEQ ID NO: 2852 - protein, 7 aa, synthetic construct
RGDKGSV

SEQ ID NO: 2853 - protein, 7 aa, synthetic construct
RGDKHTQ

SEQ ID NO: 2854 - protein, 7 aa, synthetic construct
RGDKKKI

SEQ ID NO: 2855 - protein, 7 aa, synthetic construct
RGDARGR

SEQ ID NO: 2856 - protein, 7 aa, synthetic construct
RGDKNFF

SEQ ID NO: 2857 - protein, 7 aa, synthetic construct
RGDKQNV

SEQ ID NO: 2858 - protein, 7 aa, synthetic construct
RGDKRDS

SEQ ID NO: 2859 - protein, 7 aa, synthetic construct
RGDKRTV

SEQ ID NO: 2860 - protein, 7 aa, synthetic construct
RGDKSEK

SEQ ID NO: 2861 - protein, 7 aa, synthetic construct
RGDKSIV

SEQ ID NO: 2862 - protein, 7 aa, synthetic construct
RGDKSNK

SEQ ID NO: 2863 - protein, 7 aa, synthetic construct
RGDKVFI

SEQ ID NO: 2864 - protein, 7 aa, synthetic construct
RGDARVV

SEQ ID NO: 2865 - protein, 7 aa, synthetic construct
RGDLHGS

SEQ ID NO: 2866 - protein, 7 aa, synthetic construct
RGDLIQH

SEQ ID NO: 2867 - protein, 7 aa, synthetic construct
RGDLKNS

SEQ ID NO: 2868 - protein, 7 aa, synthetic construct
RGDLKVE

SEQ ID NO: 2869 - protein, 7 aa, synthetic construct
RGDLRSS

SEQ ID NO: 2870 - protein, 7 aa, synthetic construct
RGDLSST

SEQ ID NO: 2871 - protein, 7 aa, synthetic construct
RGDLTGT

SEQ ID NO: 2872 - protein, 7 aa, synthetic construct
RGDLTSK

SEQ ID NO: 2873 - protein, 7 aa, synthetic construct
RGDLVNG

SEQ ID NO: 2874 - protein, 7 aa, synthetic construct
RGDLVQH

SEQ ID NO: 2875 - protein, 7 aa, synthetic construct
RGDNFKI

SEQ ID NO: 2876 - protein, 7 aa, synthetic construct
RGDNFNI

SEQ ID NO: 2877 - protein, 7 aa, synthetic construct
RGDNHHH

SEQ ID NO: 2878 - protein, 7 aa, synthetic construct
RGDQARI

SEQ ID NO: 2879 - protein, 7 aa, synthetic construct
RGDQHEQ

SEQ ID NO: 2880 - protein, 7 aa, synthetic construct
RGDQHHL

SEQ ID NO: 2881 - protein, 7 aa, synthetic construct
RGDQHNV

SEQ ID NO: 2882 - protein, 7 aa, synthetic construct
RGDQQNV

SEQ ID NO: 2883 - protein, 7 aa, synthetic construct
RGDQSKK

SEQ ID NO: 2884 - protein, 7 aa, synthetic construct
RGDQSVI

SEQ ID NO: 2885 - protein, 7 aa, synthetic construct
RGDRAAT

SEQ ID NO: 2886 - protein, 7 aa, synthetic construct
RGDREHR

SEQ ID NO: 2887 - protein, 7 aa, synthetic construct
RGDRGAK

SEQ ID NO: 2888 - protein, 7 aa, synthetic construct
RGDRHDI

SEQ ID NO: 2889 - protein, 7 aa, synthetic construct
RGDRKAL

SEQ ID NO: 2890 - protein, 7 aa, synthetic construct
RGDRNQQ

SEQ ID NO: 2891 - protein, 7 aa, synthetic construct
RGDRQGH

SEQ ID NO: 2892 - protein, 7 aa, synthetic construct
RGDRRFD

SEQ ID NO: 2893 - protein, 7 aa, synthetic construct
RGDRSGG

SEQ ID NO: 2894 - protein, 7 aa, synthetic construct
RGDRTKN

SEQ ID NO: 2895 - protein, 7 aa, synthetic construct
RGDRTSL

SEQ ID NO: 2896 - protein, 7 aa, synthetic construct
RGDSQFV

SEQ ID NO: 2897 - protein, 7 aa, synthetic construct
RGDTHVI

SEQ ID NO: 2898 - protein, 7 aa, synthetic construct
RGDTLIT

SEQ ID NO: 2899 - protein, 7 aa, synthetic construct
RGDVHFR

SEQ ID NO: 2900 - protein, 7 aa, synthetic construct
RGDVLKA

SEQ ID NO: 2901 - protein, 7 aa, synthetic construct
RGDVRRA

SEQ ID NO: 2902 - protein, 7 aa, synthetic construct
RGDAFKI

SEQ ID NO: 2903 - protein, 7 aa, synthetic construct
RGDFAGR

SEQ ID NO: 2904 - protein, 7 aa, synthetic construct
RGDFAII

SEQ ID NO: 2905 - protein, 7 aa, synthetic construct
RGDFGFN

SEQ ID NO: 2906 - protein, 7 aa, synthetic construct
RGDFGGN

SEQ ID NO: 2907 - protein, 7 aa, synthetic construct
RGDFHKV

SEQ ID NO: 2908 - protein, 7 aa, synthetic construct
RGDFKFK

SEQ ID NO: 2909 - protein, 7 aa, synthetic construct
RGDFQKK

SEQ ID NO: 2910 - protein, 7 aa, synthetic construct
RGDFRNT

SEQ ID NO: 2911 - protein, 7 aa, synthetic construct
RGDFSGN

SEQ ID NO: 2912 - protein, 7 aa, synthetic construct
RGDFSNK

SEQ ID NO: 2913 - protein, 7 aa, synthetic construct
RGDFVNL

SEQ ID NO: 2914 - protein, 7 aa, synthetic construct
RGDFVQV

SEQ ID NO: 2915 - protein, 7 aa, synthetic construct
RGDGFKE

SEQ ID NO: 2916 - protein, 7 aa, synthetic construct
RGDGKFL

SEQ ID NO: 2917 - protein, 7 aa, synthetic construct
RGDGKIK

SEQ ID NO: 2918 - protein, 7 aa, synthetic construct
RGDGTKT

SEQ ID NO: 2919 - protein, 7 aa, synthetic construct
RGDHAQI

SEQ ID NO: 2920 - protein, 7 aa, synthetic construct
RGDHDVK

SEQ ID NO: 2921 - protein, 7 aa, synthetic construct
RGDHEGL

SEQ ID NO: 2922 - protein, 7 aa, synthetic construct
RGDHEGN

SEQ ID NO: 2923 - protein, 7 aa, synthetic construct
RGDHESI

SEQ ID NO: 2924 - protein, 7 aa, synthetic construct
RGDHGFT

SEQ ID NO: 2925 - protein, 7 aa, synthetic construct
RGDHKNI

SEQ ID NO: 2926 - protein, 7 aa, synthetic construct
RGDHNQV

SEQ ID NO: 2927 - protein, 7 aa, synthetic construct
RGDHVGT

SEQ ID NO: 2928 - protein, 7 aa, synthetic construct
RGDIGAV

SEQ ID NO: 2929 - protein, 7 aa, synthetic construct
RGDIKGG

SEQ ID NO: 2930 - protein, 7 aa, synthetic construct
RGDIRVH

SEQ ID NO: 2931 - protein, 7 aa, synthetic construct
RGDISKV

SEQ ID NO: 2932 - protein, 7 aa, synthetic construct
RGDISQS

SEQ ID NO: 2933 - protein, 7 aa, synthetic construct
RGDKDNR

SEQ ID NO: 2934 - protein, 7 aa, synthetic construct
RGDKFHK

SEQ ID NO: 2935 - protein, 7 aa, synthetic construct
RGDKKQR

SEQ ID NO: 2936 - protein, 7 aa, synthetic construct
RGDKLDH

SEQ ID NO: 2937 - protein, 7 aa, synthetic construct
RGDKLFV

SEQ ID NO: 2938 - protein, 7 aa, synthetic construct
RGDKLTI

SEQ ID NO: 2939 - protein, 7 aa, synthetic construct
RGDKNLL

SEQ ID NO: 2940 - protein, 7 aa, synthetic construct
RGDKNTL

SEQ ID NO: 2941 - protein, 7 aa, synthetic construct
RGDKRFV

SEQ ID NO: 2942 - protein, 7 aa, synthetic construct
RGDKSFQ

SEQ ID NO: 2943 - protein, 7 aa, synthetic construct
RGDKSGR

SEQ ID NO: 2944 - protein, 7 aa, synthetic construct
RGDKSSN

SEQ ID NO: 2945 - protein, 7 aa, synthetic construct
RGDKVSK

SEQ ID NO: 2946 - protein, 7 aa, synthetic construct
RGDLAHS

SEQ ID NO: 2947 - protein, 7 aa, synthetic construct
RGDLFSA

SEQ ID NO: 2948 - protein, 7 aa, synthetic construct
RGDLGGN

SEQ ID NO: 2949 - protein, 7 aa, synthetic construct
RGDLKFN

SEQ ID NO: 2950 - protein, 7 aa, synthetic construct
RGDLTHT

SEQ ID NO: 2951 - protein, 7 aa, synthetic construct
RGDLVFV

SEQ ID NO: 2952 - protein, 7 aa, synthetic construct
RGDNAKE

SEQ ID NO: 2953 - protein, 7 aa, synthetic construct
RGDNIGS

SEQ ID NO: 2954 - protein, 7 aa, synthetic construct
RGDNSDG

SEQ ID NO: 2955 - protein, 7 aa, synthetic construct
RGDNSSF

SEQ ID NO: 2956 - protein, 7 aa, synthetic construct
RGDNTSI

SEQ ID NO: 2957 - protein, 7 aa, synthetic construct
RGDNVFK

SEQ ID NO: 2958 - protein, 7 aa, synthetic construct
RGDQFKH

SEQ ID NO: 2959 - protein, 7 aa, synthetic construct
RGDQNTA

SEQ ID NO: 2960 - protein, 7 aa, synthetic construct
RGDQRKI

SEQ ID NO: 2961 - protein, 7 aa, synthetic construct
RGDQSLI

SEQ ID NO: 2962 - protein, 7 aa, synthetic construct
RGDRDGK

SEQ ID NO: 2963 - protein, 7 aa, synthetic construct
RGDREAK

SEQ ID NO: 2964 - protein, 7 aa, synthetic construct
RGDRGDH

SEQ ID NO: 2965 - protein, 7 aa, synthetic construct
RGDRGSS

SEQ ID NO: 2966 - protein, 7 aa, synthetic construct
RGDRGTL

SEQ ID NO: 2967 - protein, 7 aa, synthetic construct
RGDRHLI

SEQ ID NO: 2968 - protein, 7 aa, synthetic construct
RGDRKEL

SEQ ID NO: 2969 - protein, 7 aa, synthetic construct
RGDRKVI

SEQ ID NO: 2970 - protein, 7 aa, synthetic construct
RGDRKVQ

SEQ ID NO: 2971 - protein, 7 aa, synthetic construct
RGDRNQA

SEQ ID NO: 2972 - protein, 7 aa, synthetic construct
RGDRREV

SEQ ID NO: 2973 - protein, 7 aa, synthetic construct
RGDRSKS

SEQ ID NO: 2974 - protein, 7 aa, synthetic construct
RGDSLKT

SEQ ID NO: 2975 - protein, 7 aa, synthetic construct
RGDSNKA

SEQ ID NO: 2976 - protein, 7 aa, synthetic construct
RGDSQHR

SEQ ID NO: 2977 - protein, 7 aa, synthetic construct
RGDSRVL

SEQ ID NO: 2978 - protein, 7 aa, synthetic construct
RGDSSLR

SEQ ID NO: 2979 - protein, 7 aa, synthetic construct
RGDSTKL

SEQ ID NO: 2980 - protein, 7 aa, synthetic construct
RGDSTRQ

SEQ ID NO: 2981 - protein, 7 aa, synthetic construct
RGDSVDQ

SEQ ID NO: 2982 - protein, 7 aa, synthetic construct
RGDSVST

SEQ ID NO: 2983 - protein, 7 aa, synthetic construct
RGDTKRS

SEQ ID NO: 2984 - protein, 7 aa, synthetic construct
RGDTLTV

SEQ ID NO: 2985 - protein, 7 aa, synthetic construct
RGDTQDK

SEQ ID NO: 2986 - protein, 7 aa, synthetic construct
RGDTRKN

SEQ ID NO: 2987 - protein, 7 aa, synthetic construct
RGDTRLL

SEQ ID NO: 2988 - protein, 7 aa, synthetic construct
RGDTVKK

SEQ ID NO: 2989 - protein, 7 aa, synthetic construct
RGDVKSQ

SEQ ID NO: 2990 - protein, 7 aa, synthetic construct
RGDVLFR

SEQ ID NO: 2991 - protein, 7 aa, synthetic construct
RGDVQLK

SEQ ID NO: 2992 - protein, 7 aa, synthetic construct
RGDVQVK

SEQ ID NO: 2993 - protein, 7 aa, synthetic construct
RGDAENV

SEQ ID NO: 2994 - protein, 7 aa, synthetic construct
RGDAAGK

SEQ ID NO: 2995 - protein, 7 aa, synthetic construct
RGDFGDI

SEQ ID NO: 2996 - protein, 7 aa, synthetic construct
RGDFHAN

SEQ ID NO: 2997 - protein, 7 aa, synthetic construct
RGDFHKL

SEQ ID NO: 2998 - protein, 7 aa, synthetic construct
RGDAHAV

SEQ ID NO: 2999 - protein, 7 aa, synthetic construct
RGDFLTN

SEQ ID NO: 3000 - protein, 7 aa, synthetic construct
RGDFNNT

SEQ ID NO: 3001 - protein, 7 aa, synthetic construct
RGDAHNI

SEQ ID NO: 3002 - protein, 7 aa, synthetic construct
RGDFRNV

SEQ ID NO: 3003 - protein, 7 aa, synthetic construct
RGDFSSR

SEQ ID NO: 3004 - protein, 7 aa, synthetic construct
RGDFTSK

SEQ ID NO: 3005 - protein, 7 aa, synthetic construct
RGDGAKD

SEQ ID NO: 3006 - protein, 7 aa, synthetic construct
RGDGEDK

SEQ ID NO: 3007 - protein, 7 aa, synthetic construct
RGDGFFV

SEQ ID NO: 3008 - protein, 7 aa, synthetic construct
RGDGFTL

SEQ ID NO: 3009 - protein, 7 aa, synthetic construct
RGDGHDR

SEQ ID NO: 3010 - protein, 7 aa, synthetic construct
RGDGKGN

SEQ ID NO: 3011 - protein, 7 aa, synthetic construct
RGDGNAF

SEQ ID NO: 3012 - protein, 7 aa, synthetic construct
RGDGQKS

SEQ ID NO: 3013 - protein, 7 aa, synthetic construct
RGDGSFK

SEQ ID NO: 3014 - protein, 7 aa, synthetic construct
RGDGTQL

SEQ ID NO: 3015 - protein, 7 aa, synthetic construct
RGDHAVF

SEQ ID NO: 3016 - protein, 7 aa, synthetic construct
RGDAKSL

SEQ ID NO: 3017 - protein, 7 aa, synthetic construct
RGDAKTV

SEQ ID NO: 3018 - protein, 7 aa, synthetic construct
RGDHHNF

SEQ ID NO: 3019 - protein, 7 aa, synthetic construct
RGDHLDL

SEQ ID NO: 3020 - protein, 7 aa, synthetic construct
RGDHLNN

SEQ ID NO: 3021 - protein, 7 aa, synthetic construct
RGDHQNQ

SEQ ID NO: 3022 - protein, 7 aa, synthetic construct
RGDHRDH

SEQ ID NO: 3023 - protein, 7 aa, synthetic construct
RGDHRVI

SEQ ID NO: 3024 - protein, 7 aa, synthetic construct
RGDHSQK

SEQ ID NO: 3025 - protein, 7 aa, synthetic construct
RGDHVNQ

SEQ ID NO: 3026 - protein, 7 aa, synthetic construct
RGDIKAT

SEQ ID NO: 3027 - protein, 7 aa, synthetic construct
RGDIKVI

SEQ ID NO: 3028 - protein, 7 aa, synthetic construct
RGDIQFH

SEQ ID NO: 3029 - protein, 7 aa, synthetic construct
RGDIRDV

SEQ ID NO: 3030 - protein, 7 aa, synthetic construct
RGDKDTV

SEQ ID NO: 3031 - protein, 7 aa, synthetic construct
RGDKHSF

SEQ ID NO: 3032 - protein, 7 aa, synthetic construct
RGDKKTV

SEQ ID NO: 3033 - protein, 7 aa, synthetic construct
RGDKLQR

SEQ ID NO: 3034 - protein, 7 aa, synthetic construct
RGDKNAI

SEQ ID NO: 3035 - protein, 7 aa, synthetic construct
RGDKNAK

SEQ ID NO: 3036 - protein, 7 aa, synthetic construct
RGDKNRF

SEQ ID NO: 3037 - protein, 7 aa, synthetic construct
RGDKRGG

SEQ ID NO: 3038 - protein, 7 aa, synthetic construct
RGDKRKA

SEQ ID NO: 3039 - protein, 7 aa, synthetic construct
RGDLFHT

SEQ ID NO: 3040 - protein, 7 aa, synthetic construct
RGDLRHK

SEQ ID NO: 3041 - protein, 7 aa, synthetic construct
RGDATGK

SEQ ID NO: 3042 - protein, 7 aa, synthetic construct
RGDLVKI

SEQ ID NO: 3043 - protein, 7 aa, synthetic construct
RGDNGKL

SEQ ID NO: 3044 - protein, 7 aa, synthetic construct
RGDNKSL

SEQ ID NO: 3045 - protein, 7 aa, synthetic construct
RGDNLNI

SEQ ID NO: 3046 - protein, 7 aa, synthetic construct
RGDAVRF

SEQ ID NO: 3047 - protein, 7 aa, synthetic construct
RGDAVSL

SEQ ID NO: 3048 - protein, 7 aa, synthetic construct
RGDNVFI

SEQ ID NO: 3049 - protein, 7 aa, synthetic construct
RGDQKRG

SEQ ID NO: 3050 - protein, 7 aa, synthetic construct
RGDDASN

SEQ ID NO: 3051 - protein, 7 aa, synthetic construct
RGDQREK

SEQ ID NO: 3052 - protein, 7 aa, synthetic construct
RGDQSTL

SEQ ID NO: 3053 - protein, 7 aa, synthetic construct
RGDQTQK

SEQ ID NO: 3054 - protein, 7 aa, synthetic construct
RGDQTSQ

SEQ ID NO: 3055 - protein, 7 aa, synthetic construct
RGDRADS

SEQ ID NO: 3056 - protein, 7 aa, synthetic construct
RGDRATN

SEQ ID NO: 3057 - protein, 7 aa, synthetic construct
RGDRDSL

SEQ ID NO: 3058 - protein, 7 aa, synthetic construct
RGDREEI

SEQ ID NO: 3059 - protein, 7 aa, synthetic construct
RGDRGQN

SEQ ID NO: 3060 - protein, 7 aa, synthetic construct
RGDRIFI

SEQ ID NO: 3061 - protein, 7 aa, synthetic construct
RGDRLNQ

SEQ ID NO: 3062 - protein, 7 aa, synthetic construct
RGDRLTN

SEQ ID NO: 3063 - protein, 7 aa, synthetic construct
RGDRQSV

SEQ ID NO: 3064 - protein, 7 aa, synthetic construct
RGDRSSR

SEQ ID NO: 3065 - protein, 7 aa, synthetic construct
RGDRTTR

SEQ ID NO: 3066 - protein, 7 aa, synthetic construct
RGDRTTV

SEQ ID NO: 3067 - protein, 7 aa, synthetic construct
RGDSFKL

SEQ ID NO: 3068 - protein, 7 aa, synthetic construct
RGDSKNS

SEQ ID NO: 3069 - protein, 7 aa, synthetic construct
RGDSKVI

SEQ ID NO: 3070 - protein, 7 aa, synthetic construct
RGDSSAG

SEQ ID NO: 3071 - protein, 7 aa, synthetic construct
RGDTHII

SEQ ID NO: 3072 - protein, 7 aa, synthetic construct
RGDTHNL

SEQ ID NO: 3073 - protein, 7 aa, synthetic construct
RGDTIRI

SEQ ID NO: 3074 - protein, 7 aa, synthetic construct
RGDTRLV

SEQ ID NO: 3075 - protein, 7 aa, synthetic construct
RGDTRSN

SEQ ID NO: 3076 - protein, 7 aa, synthetic construct
RGDTSVR

SEQ ID NO: 3077 - protein, 7 aa, synthetic construct
RGDVHAF

SEQ ID NO: 3078 - protein, 7 aa, synthetic construct
RGDVHFV

SEQ ID NO: 3079 - protein, 7 aa, synthetic construct
RGDVIHF

SEQ ID NO: 3080 - protein, 7 aa, synthetic construct
RGDVKKV

SEQ ID NO: 3081 - protein, 7 aa, synthetic construct
RGDVKNS

SEQ ID NO: 3082 - protein, 7 aa, synthetic construct
RGDVQGV

SEQ ID NO: 3083 - protein, 7 aa, synthetic construct
RGDVRAV

SEQ ID NO: 3084 - protein, 7 aa, synthetic construct
RGDVRHL

SEQ ID NO: 3085 - protein, 7 aa, synthetic construct
RGDVRTG

SEQ ID NO: 3086 - protein, 7 aa, synthetic construct
RGDVTKF

SEQ ID NO: 3087 - protein, 7 aa, synthetic construct
RGDERAS

SEQ ID NO: 3088 - protein, 7 aa, synthetic construct
RGDERLF

SEQ ID NO: 3089 - protein, 7 aa, synthetic construct
RGDAGKS

SEQ ID NO: 3090 - protein, 7 aa, synthetic construct
RGDFGAK

SEQ ID NO: 3091 - protein, 7 aa, synthetic construct
RGDFGAV

SEQ ID NO: 3092 - protein, 7 aa, synthetic construct
RGDAHRL

SEQ ID NO: 3093 - protein, 7 aa, synthetic construct
RGDGDTF

SEQ ID NO: 3094 - protein, 7 aa, synthetic construct
RGDGGRI

SEQ ID NO: 3095 - protein, 7 aa, synthetic construct
RGDGGVL

SEQ ID NO: 3096 - protein, 7 aa, synthetic construct
RGDGHSV

SEQ ID NO: 3097 - protein, 7 aa, synthetic construct
RGDGINV

SEQ ID NO: 3098 - protein, 7 aa, synthetic construct
RGDGVGI

SEQ ID NO: 3099 - protein, 7 aa, synthetic construct
RGDHDGK

SEQ ID NO: 3100 - protein, 7 aa, synthetic construct
RGDAART

SEQ ID NO: 3101 - protein, 7 aa, synthetic construct
RGDHHKF

SEQ ID NO: 3102 - protein, 7 aa, synthetic construct
RGDHKEK

SEQ ID NO: 3103 - protein, 7 aa, synthetic construct
RGDAASI

SEQ ID NO: 3104 - protein, 7 aa, synthetic construct
RGDHQNV

SEQ ID NO: 3105 - protein, 7 aa, synthetic construct
RGDHRNR

SEQ ID NO: 3106 - protein, 7 aa, synthetic construct
RGDHSKF

SEQ ID NO: 3107 - protein, 7 aa, synthetic construct
RGDHVNK

SEQ ID NO: 3108 - protein, 7 aa, synthetic construct
RGDIAST

SEQ ID NO: 3109 - protein, 7 aa, synthetic construct
RGDIKTV

SEQ ID NO: 3110 - protein, 7 aa, synthetic construct
RGDINRK

SEQ ID NO: 3111 - protein, 7 aa, synthetic construct
RGDISKN

SEQ ID NO: 3112 - protein, 7 aa, synthetic construct
RGDITLI

SEQ ID NO: 3113 - protein, 7 aa, synthetic construct
RGDIVKI

SEQ ID NO: 3114 - protein, 7 aa, synthetic construct
RGDKADQ

SEQ ID NO: 3115 - protein, 7 aa, synthetic construct
RGDKASI

SEQ ID NO: 3116 - protein, 7 aa, synthetic construct
RGDKATV

SEQ ID NO: 3117 - protein, 7 aa, synthetic construct
RGDKAVR

SEQ ID NO: 3118 - protein, 7 aa, synthetic construct
RGDAQTL

SEQ ID NO: 3119 - protein, 7 aa, synthetic construct
RGDKGKQ

SEQ ID NO: 3120 - protein, 7 aa, synthetic construct
RGDKHVI

SEQ ID NO: 3121 - protein, 7 aa, synthetic construct
RGDKKDT

SEQ ID NO: 3122 - protein, 7 aa, synthetic construct
RGDKLHI

SEQ ID NO: 3123 - protein, 7 aa, synthetic construct
RGDKNDV

SEQ ID NO: 3124 - protein, 7 aa, synthetic construct
RGDKSQV

SEQ ID NO: 3125 - protein, 7 aa, synthetic construct
RGDKVFL

SEQ ID NO: 3126 - protein, 7 aa, synthetic construct
RGDLFRV

SEQ ID NO: 3127 - protein, 7 aa, synthetic construct
RGDLHHS

SEQ ID NO: 3128 - protein, 7 aa, synthetic construct
RGDLHQE

SEQ ID NO: 3129 - protein, 7 aa, synthetic construct
RGDLKHK

SEQ ID NO: 3130 - protein, 7 aa, synthetic construct
RGDLRNN

SEQ ID NO: 3131 - protein, 7 aa, synthetic construct
RGDLTNG

SEQ ID NO: 3132 - protein, 7 aa, synthetic construct
RGDLVQK

SEQ ID NO: 3133 - protein, 7 aa, synthetic construct
RGDLVVT

SEQ ID NO: 3134 - protein, 7 aa, synthetic construct
RGDNHHF

SEQ ID NO: 3135 - protein, 7 aa, synthetic construct
RGDNHSI

SEQ ID NO: 3136 - protein, 7 aa, synthetic construct
RGDNKSF

SEQ ID NO: 3137 - protein, 7 aa, synthetic construct
RGDNLHI

SEQ ID NO: 3138 - protein, 7 aa, synthetic construct
RGDNQKE

SEQ ID NO: 3139 - protein, 7 aa, synthetic construct
RGDQGTI

SEQ ID NO: 3140 - protein, 7 aa, synthetic construct
RGDQHFK

SEQ ID NO: 3141 - protein, 7 aa, synthetic construct
RGDQVAL

SEQ ID NO: 3142 - protein, 7 aa, synthetic construct
RGDQVHF

SEQ ID NO: 3143 - protein, 7 aa, synthetic construct
RGDRATG

SEQ ID NO: 3144 - protein, 7 aa, synthetic construct
RGDREVF

SEQ ID NO: 3145 - protein, 7 aa, synthetic construct
RGDRGAA

SEQ ID NO: 3146 - protein, 7 aa, synthetic construct
RGDRGDL

SEQ ID NO: 3147 - protein, 7 aa, synthetic construct
RGDRGFF

SEQ ID NO: 3148 - protein, 7 aa, synthetic construct
RGDRGHL

SEQ ID NO: 3149 - protein, 7 aa, synthetic construct
RGDRKAT

SEQ ID NO: 3150 - protein, 7 aa, synthetic construct
RGDRKKE

SEQ ID NO: 3151 - protein, 7 aa, synthetic construct
RGDRKKQ

SEQ ID NO: 3152 - protein, 7 aa, synthetic construct
RGDRKLE

SEQ ID NO: 3153 - protein, 7 aa, synthetic construct
RGDRNDN

SEQ ID NO: 3154 - protein, 7 aa, synthetic construct
RGDRNFQ

SEQ ID NO: 3155 - protein, 7 aa, synthetic construct
RGDRQKF

SEQ ID NO: 3156 - protein, 7 aa, synthetic construct
RGDRREK

SEQ ID NO: 3157 - protein, 7 aa, synthetic construct
RGDRRTE

SEQ ID NO: 3158 - protein, 7 aa, synthetic construct
RGDRRVG

SEQ ID NO: 3159 - protein, 7 aa, synthetic construct
RGDRTAF

SEQ ID NO: 3160 - protein, 7 aa, synthetic construct
RGDRTKV

SEQ ID NO: 3161 - protein, 7 aa, synthetic construct
RGDRTNI

SEQ ID NO: 3162 - protein, 7 aa, synthetic construct
RGDRTTK

SEQ ID NO: 3163 - protein, 7 aa, synthetic construct
RGDRVNT

SEQ ID NO: 3164 - protein, 7 aa, synthetic construct
RGDSEFR

SEQ ID NO: 3165 - protein, 7 aa, synthetic construct
RGDSHKN

SEQ ID NO: 3166 - protein, 7 aa, synthetic construct
RGDSHRV

SEQ ID NO: 3167 - protein, 7 aa, synthetic construct
RGDSLGL

SEQ ID NO: 3168 - protein, 7 aa, synthetic construct
RGDSQTQ

SEQ ID NO: 3169 - protein, 7 aa, synthetic construct
RGDSRNV

SEQ ID NO: 3170 - protein, 7 aa, synthetic construct
RGDSTKV

SEQ ID NO: 3171 - protein, 7 aa, synthetic construct
RGDSTRV

SEQ ID NO: 3172 - protein, 7 aa, synthetic construct
RGDTRAL

SEQ ID NO: 3173 - protein, 7 aa, synthetic construct
RGDTRFA

SEQ ID NO: 3174 - protein, 7 aa, synthetic construct
RGDTRVL

SEQ ID NO: 3175 - protein, 7 aa, synthetic construct
RGDVHSL

SEQ ID NO: 3176 - protein, 7 aa, synthetic construct
RGDVTGR

SEQ ID NO: 3177 - protein, 7 aa, synthetic construct
RGDVVHH

SEQ ID NO: 3178 - protein, 7 aa, synthetic construct
RGDEFHL

SEQ ID NO: 3179 - protein, 7 aa, synthetic construct
RGDEHGQ

SEQ ID NO: 3180 - protein, 7 aa, synthetic construct
RGDEQNK

SEQ ID NO: 3181 - protein, 7 aa, synthetic construct
RGDFFNK

SEQ ID NO: 3182 - protein, 7 aa, synthetic construct
RGDFLAI

SEQ ID NO: 3183 - protein, 7 aa, synthetic construct
RGDFNTR

SEQ ID NO: 3184 - protein, 7 aa, synthetic construct
RGDFQIK

SEQ ID NO: 3185 - protein, 7 aa, synthetic construct
RGDFRNF

SEQ ID NO: 3186 - protein, 7 aa, synthetic construct
RGDFRSQ

SEQ ID NO: 3187 - protein, 7 aa, synthetic construct
RGDFSAK

SEQ ID NO: 3188 - protein, 7 aa, synthetic construct
RGDFSNR

SEQ ID NO: 3189 - protein, 7 aa, synthetic construct
RGDFSNT

SEQ ID NO: 3190 - protein, 7 aa, synthetic construct
RGDFTHT

SEQ ID NO: 3191 - protein, 7 aa, synthetic construct
RGDFVKN

SEQ ID NO: 3192 - protein, 7 aa, synthetic construct
RGDFVSN

SEQ ID NO: 3193 - protein, 7 aa, synthetic construct
RGDGFKS

SEQ ID NO: 3194 - protein, 7 aa, synthetic construct
RGDGHSI

SEQ ID NO: 3195 - protein, 7 aa, synthetic construct
RGDHAAL

SEQ ID NO: 3196 - protein, 7 aa, synthetic construct
RGDHAFV

SEQ ID NO: 3197 - protein, 7 aa, synthetic construct
RGDHAQH

SEQ ID NO: 3198 - protein, 7 aa, synthetic construct
RGDHDAL

SEQ ID NO: 3199 - protein, 7 aa, synthetic construct
RGDAARI

SEQ ID NO: 3200 - protein, 7 aa, synthetic construct
RGDAKSR

SEQ ID NO: 3201 - protein, 7 aa, synthetic construct
RGDHGNN

SEQ ID NO: 3202 - protein, 7 aa, synthetic construct
RGDHGQN

SEQ ID NO: 3203 - protein, 7 aa, synthetic construct
RGDHGSQ

SEQ ID NO: 3204 - protein, 7 aa, synthetic construct
RGDHHRQ

SEQ ID NO: 3205 - protein, 7 aa, synthetic construct
RGDHKNL

SEQ ID NO: 3206 - protein, 7 aa, synthetic construct
RGDHLQL

SEQ ID NO: 3207 - protein, 7 aa, synthetic construct
RGDHRTT

SEQ ID NO: 3208 - protein, 7 aa, synthetic construct
RGDHSAI

SEQ ID NO: 3209 - protein, 7 aa, synthetic construct
RGDHSNF

SEQ ID NO: 3210 - protein, 7 aa, synthetic construct
RGDIHHV

SEQ ID NO: 3211 - protein, 7 aa, synthetic construct
RGDIHIL

SEQ ID NO: 3212 - protein, 7 aa, synthetic construct
RGDIKVG

SEQ ID NO: 3213 - protein, 7 aa, synthetic construct
RGDIRKV

SEQ ID NO: 3214 - protein, 7 aa, synthetic construct
RGDISRS

SEQ ID NO: 3215 - protein, 7 aa, synthetic construct
RGDIVKV

SEQ ID NO: 3216 - protein, 7 aa, synthetic construct
RGDKFQK

SEQ ID NO: 3217 - protein, 7 aa, synthetic construct
RGDKGDR

SEQ ID NO: 3218 - protein, 7 aa, synthetic construct
RGDKGKI

SEQ ID NO: 3219 - protein, 7 aa, synthetic construct
RGDKINR

SEQ ID NO: 3220 - protein, 7 aa, synthetic construct
RGDKKST

SEQ ID NO: 3221 - protein, 7 aa, synthetic construct
RGDARII

SEQ ID NO: 3222 - protein, 7 aa, synthetic construct
RGDARVT

SEQ ID NO: 3223 - protein, 7 aa, synthetic construct
RGDLAFQ

SEQ ID NO: 3224 - protein, 7 aa, synthetic construct
RGDLIGS

SEQ ID NO: 3225 - protein, 7 aa, synthetic construct
RGDLKFV

SEQ ID NO: 3226 - protein, 7 aa, synthetic construct
RGDLKRH

SEQ ID NO: 3227 - protein, 7 aa, synthetic construct
RGDLSKN

SEQ ID NO: 3228 - protein, 7 aa, synthetic construct
RGDLTFN

SEQ ID NO: 3229 - protein, 7 aa, synthetic construct
RGDLTHN

SEQ ID NO: 3230 - protein, 7 aa, synthetic construct
RGDATKF

SEQ ID NO: 3231 - protein, 7 aa, synthetic construct
RGDNGVQ

SEQ ID NO: 3232 - protein, 7 aa, synthetic construct
RGDNKFL

SEQ ID NO: 3233 - protein, 7 aa, synthetic construct
RGDQAGV

SEQ ID NO: 3234 - protein, 7 aa, synthetic construct
RGDQDQK

SEQ ID NO: 3235 - protein, 7 aa, synthetic construct
RGDQGHK

SEQ ID NO: 3236 - protein, 7 aa, synthetic construct
RGDQKTN

SEQ ID NO: 3237 - protein, 7 aa, synthetic construct
RGDQKVQ

SEQ ID NO: 3238 - protein, 7 aa, synthetic construct
RGDQRTN

SEQ ID NO: 3239 - protein, 7 aa, synthetic construct
RGDQSNQ

SEQ ID NO: 3240 - protein, 7 aa, synthetic construct
RGDQVGS

SEQ ID NO: 3241 - protein, 7 aa, synthetic construct
RGDRHFN

SEQ ID NO: 3242 - protein, 7 aa, synthetic construct
RGDRKGN

SEQ ID NO: 3243 - protein, 7 aa, synthetic construct
RGDRKQA

SEQ ID NO: 3244 - protein, 7 aa, synthetic construct
RGDRNAQ

SEQ ID NO: 3245 - protein, 7 aa, synthetic construct
RGDRNQT

SEQ ID NO: 3246 - protein, 7 aa, synthetic construct
RGDRQKV

SEQ ID NO: 3247 - protein, 7 aa, synthetic construct
RGDRVAI

SEQ ID NO: 3248 - protein, 7 aa, synthetic construct
RGDRVHI

SEQ ID NO: 3249 - protein, 7 aa, synthetic construct
RGDRVVL

SEQ ID NO: 3250 - protein, 7 aa, synthetic construct
RGDSAKQ

SEQ ID NO: 3251 - protein, 7 aa, synthetic construct
RGDSFRL

SEQ ID NO: 3252 - protein, 7 aa, synthetic construct
RGDSGSK

SEQ ID NO: 3253 - protein, 7 aa, synthetic construct
RGDTDNL

SEQ ID NO: 3254 - protein, 7 aa, synthetic construct
RGDTGGK

SEQ ID NO: 3255 - protein, 7 aa, synthetic construct
RGDTKHI

SEQ ID NO: 3256 - protein, 7 aa, synthetic construct
RGDTQTK

SEQ ID NO: 3257 - protein, 7 aa, synthetic construct
RGDVHVT

SEQ ID NO: 3258 - protein, 7 aa, synthetic construct
RGDVIRI

SEQ ID NO: 3259 - protein, 7 aa, synthetic construct
RGDVKFS

SEQ ID NO: 3260 - protein, 7 aa, synthetic construct
RGDVLRE

SEQ ID NO: 3261 - protein, 7 aa, synthetic construct
RGDVRQL

SEQ ID NO: 3262 - protein, 7 aa, synthetic construct
RGDVSAR

SEQ ID NO: 3263 - protein, 7 aa, synthetic construct
RGDVSQV

SEQ ID NO: 3264 - protein, 7 aa, synthetic construct
RGDVTKS

SEQ ID NO: 3265 - protein, 7 aa, synthetic construct
RGDAFHR

SEQ ID NO: 3266 - protein, 7 aa, synthetic construct
RGDFDGV

SEQ ID NO: 3267 - protein, 7 aa, synthetic construct
RGDFFRV

SEQ ID NO: 3268 - protein, 7 aa, synthetic construct
RGDFHAI

SEQ ID NO: 3269 - protein, 7 aa, synthetic construct
RGDFHHQ

SEQ ID NO: 3270 - protein, 7 aa, synthetic construct
RGDFHQQ

SEQ ID NO: 3271 - protein, 7 aa, synthetic construct
RGDFKEN

SEQ ID NO: 3272 - protein, 7 aa, synthetic construct
RGDFKLK

SEQ ID NO: 3273 - protein, 7 aa, synthetic construct
RGDFRSK

SEQ ID NO: 3274 - protein, 7 aa, synthetic construct
RGDFSFR

SEQ ID NO: 3275 - protein, 7 aa, synthetic construct
RGDFSRN

SEQ ID NO: 3276 - protein, 7 aa, synthetic construct
RGDFVFR

SEQ ID NO: 3277 - protein, 7 aa, synthetic construct
RGDGAKR

SEQ ID NO: 3278 - protein, 7 aa, synthetic construct
RGDGAQK

SEQ ID NO: 3279 - protein, 7 aa, synthetic construct
RGDGNKT

SEQ ID NO: 3280 - protein, 7 aa, synthetic construct
RGDGRQF

SEQ ID NO: 3281 - protein, 7 aa, synthetic construct
RGDGRVL

SEQ ID NO: 3282 - protein, 7 aa, synthetic construct
RGDGTSF

SEQ ID NO: 3283 - protein, 7 aa, synthetic construct
RGDHASR

SEQ ID NO: 3284 - protein, 7 aa, synthetic construct
RGDHDTN

SEQ ID NO: 3285 - protein, 7 aa, synthetic construct
RGDHGQF

SEQ ID NO: 3286 - protein, 7 aa, synthetic construct
RGDHGTI

SEQ ID NO: 3287 - protein, 7 aa, synthetic construct
RGDHISI

SEQ ID NO: 3288 - protein, 7 aa, synthetic construct
RGDHKKT

SEQ ID NO: 3289 - protein, 7 aa, synthetic construct
RGDHKRL

SEQ ID NO: 3290 - protein, 7 aa, synthetic construct
RGDHNAI

SEQ ID NO: 3291 - protein, 7 aa, synthetic construct
RGDHNQF

SEQ ID NO: 3292 - protein, 7 aa, synthetic construct
RGDIAAK

SEQ ID NO: 3293 - protein, 7 aa, synthetic construct
RGDIIHT

SEQ ID NO: 3294 - protein, 7 aa, synthetic construct
RGDILHT

SEQ ID NO: 3295 - protein, 7 aa, synthetic construct
RGDAQAL

SEQ ID NO: 3296 - protein, 7 aa, synthetic construct
RGDIRTF

SEQ ID NO: 3297 - protein, 7 aa, synthetic construct
RGDISHH

SEQ ID NO: 3298 - protein, 7 aa, synthetic construct
RGDKASH

SEQ ID NO: 3299 - protein, 7 aa, synthetic construct
RGDKEQH

SEQ ID NO: 3300 - protein, 7 aa, synthetic construct
RGDKHSI

SEQ ID NO: 3301 - protein, 7 aa, synthetic construct
RGDKKEH

SEQ ID NO: 3302 - protein, 7 aa, synthetic construct
RGDKLHQ

SEQ ID NO: 3303 - protein, 7 aa, synthetic construct
RGDKNDI

SEQ ID NO: 3304 - protein, 7 aa, synthetic construct
RGDKNFQ

SEQ ID NO: 3305 - protein, 7 aa, synthetic construct
RGDKNHV

SEQ ID NO: 3306 - protein, 7 aa, synthetic construct
RGDKNSK

SEQ ID NO: 3307 - protein, 7 aa, synthetic construct
RGDKQTR

SEQ ID NO: 3308 - protein, 7 aa, synthetic construct
RGDARNS

SEQ ID NO: 3309 - protein, 7 aa, synthetic construct
RGDKRQA

SEQ ID NO: 3310 - protein, 7 aa, synthetic construct
RGDARSI

SEQ ID NO: 3311 - protein, 7 aa, synthetic construct
RGDKVSH

SEQ ID NO: 3312 - protein, 7 aa, synthetic construct
RGDLIGQ

SEQ ID NO: 3313 - protein, 7 aa, synthetic construct
RGDASTR

SEQ ID NO: 3314 - protein, 7 aa, synthetic construct
RGDLVAR

SEQ ID NO: 3315 - protein, 7 aa, synthetic construct
RGDLVQE

SEQ ID NO: 3316 - protein, 7 aa, synthetic construct
RGDNAAI

SEQ ID NO: 3317 - protein, 7 aa, synthetic construct
RGDNSTF

SEQ ID NO: 3318 - protein, 7 aa, synthetic construct
RGDAVRT

SEQ ID NO: 3319 - protein, 7 aa, synthetic construct
RGDQERK

SEQ ID NO: 3320 - protein, 7 aa, synthetic construct
RGDQKRD

SEQ ID NO: 3321 - protein, 7 aa, synthetic construct
RGDQKVT

SEQ ID NO: 3322 - protein, 7 aa, synthetic construct
RGDQNKE

SEQ ID NO: 3323 - protein, 7 aa, synthetic construct
RGDQNNS

SEQ ID NO: 3324 - protein, 7 aa, synthetic construct
RGDQSFT

SEQ ID NO: 3325 - protein, 7 aa, synthetic construct
RGDQSKN

SEQ ID NO: 3326 - protein, 7 aa, synthetic construct
RGDQVQN

SEQ ID NO: 3327 - protein, 7 aa, synthetic construct
RGDRGKS

SEQ ID NO: 3328 - protein, 7 aa, synthetic construct
RGDRGNG

SEQ ID NO: 3329 - protein, 7 aa, synthetic construct
RGDRIDL

SEQ ID NO: 3330 - protein, 7 aa, synthetic construct
RGDRLEN

SEQ ID NO: 3331 - protein, 7 aa, synthetic construct
RGDRQDI

SEQ ID NO: 3332 - protein, 7 aa, synthetic construct
RGDRRSH

SEQ ID NO: 3333 - protein, 7 aa, synthetic construct
RGDRSTD

SEQ ID NO: 3334 - protein, 7 aa, synthetic construct
RGDRSVK

SEQ ID NO: 3335 - protein, 7 aa, synthetic construct
RGDSGIG

SEQ ID NO: 3336 - protein, 7 aa, synthetic construct
RGDSGTG

SEQ ID NO: 3337 - protein, 7 aa, synthetic construct
RGDSKKQ

SEQ ID NO: 3338 - protein, 7 aa, synthetic construct
RGDSNFQ

SEQ ID NO: 3339 - protein, 7 aa, synthetic construct
RGDSSFG

SEQ ID NO: 3340 - protein, 7 aa, synthetic construct
RGDSTGL

SEQ ID NO: 3341 - protein, 7 aa, synthetic construct
RGDTATV

SEQ ID NO: 3342 - protein, 7 aa, synthetic construct
RGDTGNK

SEQ ID NO: 3343 - protein, 7 aa, synthetic construct
RGDTGRI

SEQ ID NO: 3344 - protein, 7 aa, synthetic construct
RGDTKGI

SEQ ID NO: 3345 - protein, 7 aa, synthetic construct
RGDTLFI

SEQ ID NO: 3346 - protein, 7 aa, synthetic construct
RGDTRSF

SEQ ID NO: 3347 - protein, 7 aa, synthetic construct
RGDVHRK

SEQ ID NO: 3348 - protein, 7 aa, synthetic construct
RGDVKTS

SEQ ID NO: 3349 - protein, 7 aa, synthetic construct
RGDVNKH

SEQ ID NO: 3350 - protein, 7 aa, synthetic construct
RGDVQAH

SEQ ID NO: 3351 - protein, 7 aa, synthetic construct
RGDVRVF

SEQ ID NO: 3352 - protein, 7 aa, synthetic construct
RGDVTRI

SEQ ID NO: 3353 - protein, 7 aa, synthetic construct
RGDVVNL

SEQ ID NO: 3354 - protein, 7 aa, synthetic construct
RGDVVNV

SEQ ID NO: 3355 - protein, 7 aa, synthetic construct
RGDVVVR

SEQ ID NO: 3356 - protein, 7 aa, synthetic construct
RGDDLGA

SEQ ID NO: 3357 - protein, 7 aa, synthetic construct
RGDEDFK

SEQ ID NO: 3358 - protein, 7 aa, synthetic construct
RGDERFK

SEQ ID NO: 3359 - protein, 7 aa, synthetic construct
RGDERGK

SEQ ID NO: 3360 - protein, 7 aa, synthetic construct
RGDFFTK

SEQ ID NO: 3361 - protein, 7 aa, synthetic construct
RGDFGKT

SEQ ID NO: 3362 - protein, 7 aa, synthetic construct
RGDFGTS

SEQ ID NO: 3363 - protein, 7 aa, synthetic construct
RGDFINV

SEQ ID NO: 3364 - protein, 7 aa, synthetic construct
RGDFKLT

SEQ ID NO: 3365 - protein, 7 aa, synthetic construct
RGDFLHK

SEQ ID NO: 3366 - protein, 7 aa, synthetic construct
RGDFNEV

SEQ ID NO: 3367 - protein, 7 aa, synthetic construct
RGDFRNQ

SEQ ID NO: 3368 - protein, 7 aa, synthetic construct
RGDAHQL

SEQ ID NO: 3369 - protein, 7 aa, synthetic construct
RGDFSNI

SEQ ID NO: 3370 - protein, 7 aa, synthetic construct
RGDGFRL

SEQ ID NO: 3371 - protein, 7 aa, synthetic construct
RGDGGGS

SEQ ID NO: 3372 - protein, 7 aa, synthetic construct
RGDGGGV

SEQ ID NO: 3373 - protein, 7 aa, synthetic construct
RGDGHTV

SEQ ID NO: 3374 - protein, 7 aa, synthetic construct
RGDGKEL

SEQ ID NO: 3375 - protein, 7 aa, synthetic construct
RGDGRNK

SEQ ID NO: 3376 - protein, 7 aa, synthetic construct
RGDGSHL

SEQ ID NO: 3377 - protein, 7 aa, synthetic construct
RGDAKKF

SEQ ID NO: 3378 - protein, 7 aa, synthetic construct
RGDHAGV

SEQ ID NO: 3379 - protein, 7 aa, synthetic construct
RGDHDGN

SEQ ID NO: 3380 - protein, 7 aa, synthetic construct
RGDAKST

SEQ ID NO: 3381 - protein, 7 aa, synthetic construct
RGDHRRD

SEQ ID NO: 3382 - protein, 7 aa, synthetic construct
RGDHRTF

SEQ ID NO: 3383 - protein, 7 aa, synthetic construct
RGDHSGL

SEQ ID NO: 3384 - protein, 7 aa, synthetic construct
RGDHTRI

SEQ ID NO: 3385 - protein, 7 aa, synthetic construct
RGDIEAK

SEQ ID NO: 3386 - protein, 7 aa, synthetic construct
RGDIFNF

SEQ ID NO: 3387 - protein, 7 aa, synthetic construct
RGDIHNL

SEQ ID NO: 3388 - protein, 7 aa, synthetic construct
RGDIKST

SEQ ID NO: 3389 - protein, 7 aa, synthetic construct
RGDIKVS

SEQ ID NO: 3390 - protein, 7 aa, synthetic construct
RGDIRFS

SEQ ID NO: 3391 - protein, 7 aa, synthetic construct
RGDISLT

SEQ ID NO: 3392 - protein, 7 aa, synthetic construct
RGDISSQ

SEQ ID NO: 3393 - protein, 7 aa, synthetic construct
RGDKDKL

SEQ ID NO: 3394 - protein, 7 aa, synthetic construct
RGDAQTF

SEQ ID NO: 3395 - protein, 7 aa, synthetic construct
RGDKGLI

SEQ ID NO: 3396 - protein, 7 aa, synthetic construct
RGDKGVH

SEQ ID NO: 3397 - protein, 7 aa, synthetic construct
RGDKHSK

SEQ ID NO: 3398 - protein, 7 aa, synthetic construct
RGDKITF

SEQ ID NO: 3399 - protein, 7 aa, synthetic construct
RGDKKNH

SEQ ID NO: 3400 - protein, 7 aa, synthetic construct
RGDARGQ

SEQ ID NO: 3401 - protein, 7 aa, synthetic construct
RGDKLFN

SEQ ID NO: 3402 - protein, 7 aa, synthetic construct
RGDKNSS

SEQ ID NO: 3403 - protein, 7 aa, synthetic construct
RGDARQL

SEQ ID NO: 3404 - protein, 7 aa, synthetic construct
RGDKSVK

SEQ ID NO: 3405 - protein, 7 aa, synthetic construct
RGDKTFI

SEQ ID NO: 3406 - protein, 7 aa, synthetic construct
RGDLHTT

SEQ ID NO: 3407 - protein, 7 aa, synthetic construct
RGDLRIK

SEQ ID NO: 3408 - protein, 7 aa, synthetic construct
RGDLVHS

SEQ ID NO: 3409 - protein, 7 aa, synthetic construct
RGDNFKL

SEQ ID NO: 3410 - protein, 7 aa, synthetic construct
RGDNIFI

SEQ ID NO: 3411 - protein, 7 aa, synthetic construct
RGDNKNL

SEQ ID NO: 3412 - protein, 7 aa, synthetic construct
RGDNQKR

SEQ ID NO: 3413 - protein, 7 aa, synthetic construct
RGDAVNF

SEQ ID NO: 3414 - protein, 7 aa, synthetic construct
RGDQFKL

SEQ ID NO: 3415 - protein, 7 aa, synthetic construct
RGDQGHA

SEQ ID NO: 3416 - protein, 7 aa, synthetic construct
RGDQGKE

SEQ ID NO: 3417 - protein, 7 aa, synthetic construct
RGDQGKR

SEQ ID NO: 3418 - protein, 7 aa, synthetic construct
RGDQKGT

SEQ ID NO: 3419 - protein, 7 aa, synthetic construct
RGDQKNV

SEQ ID NO: 3420 - protein, 7 aa, synthetic construct
RGDQLKL

SEQ ID NO: 3421 - protein, 7 aa, synthetic construct
RGDQNNF

SEQ ID NO: 3422 - protein, 7 aa, synthetic construct
RGDQRNI

SEQ ID NO: 3423 - protein, 7 aa, synthetic construct
RGDRKFV

SEQ ID NO: 3424 - protein, 7 aa, synthetic construct
RGDRKGT

SEQ ID NO: 3425 - protein, 7 aa, synthetic construct
RGDRLNK

SEQ ID NO: 3426 - protein, 7 aa, synthetic construct
RGDRNVT

SEQ ID NO: 3427 - protein, 7 aa, synthetic construct
RGDRSEL

SEQ ID NO: 3428 - protein, 7 aa, synthetic construct
RGDRSNF

SEQ ID NO: 3429 - protein, 7 aa, synthetic construct
RGDRSTT

SEQ ID NO: 3430 - protein, 7 aa, synthetic construct
RGDRVTR

SEQ ID NO: 3431 - protein, 7 aa, synthetic construct
RGDSARF

SEQ ID NO: 3432 - protein, 7 aa, synthetic construct
RGDSESR

SEQ ID NO: 3433 - protein, 7 aa, synthetic construct
RGDSKHQ

SEQ ID NO: 3434 - protein, 7 aa, synthetic construct
RGDSLAK

SEQ ID NO: 3435 - protein, 7 aa, synthetic construct
RGDSNKV

SEQ ID NO: 3436 - protein, 7 aa, synthetic construct
RGDSNNL

SEQ ID NO: 3437 - protein, 7 aa, synthetic construct
RGDTGVK

SEQ ID NO: 3438 - protein, 7 aa, synthetic construct
RGDTHSF

SEQ ID NO: 3439 - protein, 7 aa, synthetic construct
RGDTIKL

SEQ ID NO: 3440 - protein, 7 aa, synthetic construct
RGDTRHS

SEQ ID NO: 3441 - protein, 7 aa, synthetic construct
RGDTSLK

SEQ ID NO: 3442 - protein, 7 aa, synthetic construct
RGDTSSK

SEQ ID NO: 3443 - protein, 7 aa, synthetic construct
RGDVAKL

SEQ ID NO: 3444 - protein, 7 aa, synthetic construct
RGDVDTR

SEQ ID NO: 3445 - protein, 7 aa, synthetic construct
RGDVHKN

SEQ ID NO: 3446 - protein, 7 aa, synthetic construct
RGDVIHK

SEQ ID NO: 3447 - protein, 7 aa, synthetic construct
RGDVSVV

SEQ ID NO: 3448 - protein, 7 aa, synthetic construct
RGDEHFT

SEQ ID NO: 3449 - protein, 7 aa, synthetic construct
RGDAGGN

SEQ ID NO: 3450 - protein, 7 aa, synthetic construct
RGDFAHG

SEQ ID NO: 3451 - protein, 7 aa, synthetic construct
RGDFAHN

SEQ ID NO: 3452 - protein, 7 aa, synthetic construct
RGDFDFS

SEQ ID NO: 3453 - protein, 7 aa, synthetic construct
RGDFGAQ

SEQ ID NO: 3454 - protein, 7 aa, synthetic construct
RGDFGGH

SEQ ID NO: 3455 - protein, 7 aa, synthetic construct
RGDFGQQ

SEQ ID NO: 3456 - protein, 7 aa, synthetic construct
RGDFKIH

SEQ ID NO: 3457 - protein, 7 aa, synthetic construct
RGDAAKT

SEQ ID NO: 3458 - protein, 7 aa, synthetic construct
RGDFLIV

SEQ ID NO: 3459 - protein, 7 aa, synthetic construct
RGDFLKI

SEQ ID NO: 3460 - protein, 7 aa, synthetic construct
RGDFLKT

SEQ ID NO: 3461 - protein, 7 aa, synthetic construct
RGDFRDK

SEQ ID NO: 3462 - protein, 7 aa, synthetic construct
RGDFRHI

SEQ ID NO: 3463 - protein, 7 aa, synthetic construct
RGDFRLV

SEQ ID NO: 3464 - protein, 7 aa, synthetic construct
RGDFRQV

SEQ ID NO: 3465 - protein, 7 aa, synthetic construct
RGDFRTS

SEQ ID NO: 3466 - protein, 7 aa, synthetic construct
RGDFSQH

SEQ ID NO: 3467 - protein, 7 aa, synthetic construct
RGDFVQH

SEQ ID NO: 3468 - protein, 7 aa, synthetic construct
RGDGIKQ

SEQ ID NO: 3469 - protein, 7 aa, synthetic construct
RGDGKQF

SEQ ID NO: 3470 - protein, 7 aa, synthetic construct
RGDGQRF

SEQ ID NO: 3471 - protein, 7 aa, synthetic construct
RGDGSKR

SEQ ID NO: 3472 - protein, 7 aa, synthetic construct
RGDGSNV

SEQ ID NO: 3473 - protein, 7 aa, synthetic construct
RGDGSSS

SEQ ID NO: 3474 - protein, 7 aa, synthetic construct
RGDGTNT

SEQ ID NO: 3475 - protein, 7 aa, synthetic construct
RGDHDGV

SEQ ID NO: 3476 - protein, 7 aa, synthetic construct
RGDHGVG

SEQ ID NO: 3477 - protein, 7 aa, synthetic construct
RGDHKDQ

SEQ ID NO: 3478 - protein, 7 aa, synthetic construct
RGDHKGN

SEQ ID NO: 3479 - protein, 7 aa, synthetic construct
RGDALKV

SEQ ID NO: 3480 - protein, 7 aa, synthetic construct
RGDIDSL

SEQ ID NO: 3481 - protein, 7 aa, synthetic construct
RGDIHHK

SEQ ID NO: 3482 - protein, 7 aa, synthetic construct
RGDISKQ

SEQ ID NO: 3483 - protein, 7 aa, synthetic construct
RGDISVR

SEQ ID NO: 3484 - protein, 7 aa, synthetic construct
RGDKGAQ

SEQ ID NO: 3485 - protein, 7 aa, synthetic construct
RGDKKAL

SEQ ID NO: 3486 - protein, 7 aa, synthetic construct
RGDKLKR

SEQ ID NO: 3487 - protein, 7 aa, synthetic construct
RGDKNQL

SEQ ID NO: 3488 - protein, 7 aa, synthetic construct
RGDKQST

SEQ ID NO: 3489 - protein, 7 aa, synthetic construct
RGDARNE

SEQ ID NO: 3490 - protein, 7 aa, synthetic construct
RGDKRDV

SEQ ID NO: 3491 - protein, 7 aa, synthetic construct
RGDLHGV

SEQ ID NO: 3492 - protein, 7 aa, synthetic construct
RGDLIKK

SEQ ID NO: 3493 - protein, 7 aa, synthetic construct
RGDLIKV

SEQ ID NO: 3494 - protein, 7 aa, synthetic construct
RGDLNIT

SEQ ID NO: 3495 - protein, 7 aa, synthetic construct
RGDLRSA

SEQ ID NO: 3496 - protein, 7 aa, synthetic construct
RGDLSKK

SEQ ID NO: 3497 - protein, 7 aa, synthetic construct
RGDLTVI

SEQ ID NO: 3498 - protein, 7 aa, synthetic construct
RGDLVAQ

SEQ ID NO: 3499 - protein, 7 aa, synthetic construct
RGDATSF

SEQ ID NO: 3500 - protein, 7 aa, synthetic construct
RGDNKEV

SEQ ID NO: 3501 - protein, 7 aa, synthetic construct
RGDNKQL

SEQ ID NO: 3502 - protein, 7 aa, synthetic construct
RGDNLSF

SEQ ID NO: 3503 - protein, 7 aa, synthetic construct
RGDNRFI

SEQ ID NO: 3504 - protein, 7 aa, synthetic construct
RGDNTER

SEQ ID NO: 3505 - protein, 7 aa, synthetic construct
RGDQERQ

SEQ ID NO: 3506 - protein, 7 aa, synthetic construct
RGDQIRS

SEQ ID NO: 3507 - protein, 7 aa, synthetic construct
RGDQKTK

SEQ ID NO: 3508 - protein, 7 aa, synthetic construct
RGDQRGS

SEQ ID NO: 3509 - protein, 7 aa, synthetic construct
RGDQRHA

SEQ ID NO: 3510 - protein, 7 aa, synthetic construct
RGDQRTT

SEQ ID NO: 3511 - protein, 7 aa, synthetic construct
RGDQSSH

SEQ ID NO: 3512 - protein, 7 aa, synthetic construct
RGDQSST

SEQ ID NO: 3513 - protein, 7 aa, synthetic construct
RGDREFR

SEQ ID NO: 3514 - protein, 7 aa, synthetic construct
RGDREQV

SEQ ID NO: 3515 - protein, 7 aa, synthetic construct
RGDRGGR

SEQ ID NO: 3516 - protein, 7 aa, synthetic construct
RGDRGNR

SEQ ID NO: 3517 - protein, 7 aa, synthetic construct
RGDRHEF

SEQ ID NO: 3518 - protein, 7 aa, synthetic construct
RGDRHEV

SEQ ID NO: 3519 - protein, 7 aa, synthetic construct
RGDRHIT

SEQ ID NO: 3520 - protein, 7 aa, synthetic construct
RGDRIHF

SEQ ID NO: 3521 - protein, 7 aa, synthetic construct
RGDRIVI

SEQ ID NO: 3522 - protein, 7 aa, synthetic construct
RGDRKFN

SEQ ID NO: 3523 - protein, 7 aa, synthetic construct
RGDRLDK

SEQ ID NO: 3524 - protein, 7 aa, synthetic construct
RGDRNGF

SEQ ID NO: 3525 - protein, 7 aa, synthetic construct
RGDRNSD

SEQ ID NO: 3526 - protein, 7 aa, synthetic construct
RGDRQSQ

SEQ ID NO: 3527 - protein, 7 aa, synthetic construct
RGDRRFV

SEQ ID NO: 3528 - protein, 7 aa, synthetic construct
RGDRVFF

SEQ ID NO: 3529 - protein, 7 aa, synthetic construct
RGDSGAA

SEQ ID NO: 3530 - protein, 7 aa, synthetic construct
RGDSKAA

SEQ ID NO: 3531 - protein, 7 aa, synthetic construct
RGDSKNL

SEQ ID NO: 3532 - protein, 7 aa, synthetic construct
RGDSNAL

SEQ ID NO: 3533 - protein, 7 aa, synthetic construct
RGDSRQQ

SEQ ID NO: 3534 - protein, 7 aa, synthetic construct
RGDSRTR

SEQ ID NO: 3535 - protein, 7 aa, synthetic construct
RGDSSHS

SEQ ID NO: 3536 - protein, 7 aa, synthetic construct
RGDSTQL

SEQ ID NO: 3537 - protein, 7 aa, synthetic construct
RGDTAQV

SEQ ID NO: 3538 - protein, 7 aa, synthetic construct
RGDTGVI

SEQ ID NO: 3539 - protein, 7 aa, synthetic construct
RGDTHFI

SEQ ID NO: 3540 - protein, 7 aa, synthetic construct
RGDTHTI

SEQ ID NO: 3541 - protein, 7 aa, synthetic construct
RGDTKGK

SEQ ID NO: 3542 - protein, 7 aa, synthetic construct
RGDTQRK

SEQ ID NO: 3543 - protein, 7 aa, synthetic construct
RGDTRAN

SEQ ID NO: 3544 - protein, 7 aa, synthetic construct
RGDTVVI

SEQ ID NO: 3545 - protein, 7 aa, synthetic construct
RGDVASK

SEQ ID NO: 3546 - protein, 7 aa, synthetic construct
RGDVEFK

SEQ ID NO: 3547 - protein, 7 aa, synthetic construct
RGDVEFR

SEQ ID NO: 3548 - protein, 7 aa, synthetic construct
RGDVELK

SEQ ID NO: 3549 - protein, 7 aa, synthetic construct
RGDVFRH

SEQ ID NO: 3550 - protein, 7 aa, synthetic construct
RGDVGFI

SEQ ID NO: 3551 - protein, 7 aa, synthetic construct
RGDVGRV

SEQ ID NO: 3552 - protein, 7 aa, synthetic construct
RGDVIHI

SEQ ID NO: 3553 - protein, 7 aa, synthetic construct
RGDVNRT

SEQ ID NO: 3554 - protein, 7 aa, synthetic construct
RGDVQGF

SEQ ID NO: 3555 - protein, 7 aa, synthetic construct
RGDVQLL

SEQ ID NO: 3556 - protein, 7 aa, synthetic construct
RGDVRKL

SEQ ID NO: 3557 - protein, 7 aa, synthetic construct
RGDEVRV

SEQ ID NO: 3558 - protein, 7 aa, synthetic construct
RGDAGKF

SEQ ID NO: 3559 - protein, 7 aa, synthetic construct
RGDFARS

SEQ ID NO: 3560 - protein, 7 aa, synthetic construct
RGDFEGK

SEQ ID NO: 3561 - protein, 7 aa, synthetic construct
RGDFFVK

SEQ ID NO: 3562 - protein, 7 aa, synthetic construct
RGDFHAQ

SEQ ID NO: 3563 - protein, 7 aa, synthetic construct
RGDFKED

SEQ ID NO: 3564 - protein, 7 aa, synthetic construct
RGDFKFN

SEQ ID NO: 3565 - protein, 7 aa, synthetic construct
RGDFNTG

SEQ ID NO: 3566 - protein, 7 aa, synthetic construct
RGDFQRN

SEQ ID NO: 3567 - protein, 7 aa, synthetic construct
RGDFSGA

SEQ ID NO: 3568 - protein, 7 aa, synthetic construct
RGDFVRQ

SEQ ID NO: 3569 - protein, 7 aa, synthetic construct
RGDGEKL

SEQ ID NO: 3570 - protein, 7 aa, synthetic construct
RGDGHKS

SEQ ID NO: 3571 - protein, 7 aa, synthetic construct
RGDGLLV

SEQ ID NO: 3572 - protein, 7 aa, synthetic construct
RGDGRGV

SEQ ID NO: 3573 - protein, 7 aa, synthetic construct
RGDGRNN

SEQ ID NO: 3574 - protein, 7 aa, synthetic construct
RGDGRQL

SEQ ID NO: 3575 - protein, 7 aa, synthetic construct
RGDGRQT

SEQ ID NO: 3576 - protein, 7 aa, synthetic construct
RGDHAKR

SEQ ID NO: 3577 - protein, 7 aa, synthetic construct
RGDHANL

SEQ ID NO: 3578 - protein, 7 aa, synthetic construct
RGDHAQL

SEQ ID NO: 3579 - protein, 7 aa, synthetic construct
RGDHENF

SEQ ID NO: 3580 - protein, 7 aa, synthetic construct
RGDHGDS

SEQ ID NO: 3581 - protein, 7 aa, synthetic construct
RGDHHHI

SEQ ID NO: 3582 - protein, 7 aa, synthetic construct
RGDHNRE

SEQ ID NO: 3583 - protein, 7 aa, synthetic construct
RGDHRHQ

SEQ ID NO: 3584 - protein, 7 aa, synthetic construct
RGDANGR

SEQ ID NO: 3585 - protein, 7 aa, synthetic construct
RGDIHFT

SEQ ID NO: 3586 - protein, 7 aa, synthetic construct
RGDANQL

SEQ ID NO: 3587 - protein, 7 aa, synthetic construct
RGDIKRN

SEQ ID NO: 3588 - protein, 7 aa, synthetic construct
RGDISHT

SEQ ID NO: 3589 - protein, 7 aa, synthetic construct
RGDITGK

SEQ ID NO: 3590 - protein, 7 aa, synthetic construct
RGDAQNK

SEQ ID NO: 3591 - protein, 7 aa, synthetic construct
RGDKDTA

SEQ ID NO: 3592 - protein, 7 aa, synthetic construct
RGDKDTE

SEQ ID NO: 3593 - protein, 7 aa, synthetic construct
RGDKEKI

SEQ ID NO: 3594 - protein, 7 aa, synthetic construct
RGDAQSK

SEQ ID NO: 3595 - protein, 7 aa, synthetic construct
RGDKGRS

SEQ ID NO: 3596 - protein, 7 aa, synthetic construct
RGDKHFI

SEQ ID NO: 3597 - protein, 7 aa, synthetic construct
RGDKKEQ

SEQ ID NO: 3598 - protein, 7 aa, synthetic construct
RGDKKFV

SEQ ID NO: 3599 - protein, 7 aa, synthetic construct
RGDKLKK

SEQ ID NO: 3600 - protein, 7 aa, synthetic construct
RGDKQRS

SEQ ID NO: 3601 - protein, 7 aa, synthetic construct
RGDKRDK

SEQ ID NO: 3602 - protein, 7 aa, synthetic construct
RGDKRET

SEQ ID NO: 3603 - protein, 7 aa, synthetic construct
RGDARNT

SEQ ID NO: 3604 - protein, 7 aa, synthetic construct
RGDKTIK

SEQ ID NO: 3605 - protein, 7 aa, synthetic construct
RGDLINS

SEQ ID NO: 3606 - protein, 7 aa, synthetic construct
RGDLISI

SEQ ID NO: 3607 - protein, 7 aa, synthetic construct
RGDLKNT

SEQ ID NO: 3608 - protein, 7 aa, synthetic construct
RGDLLNQ

SEQ ID NO: 3609 - protein, 7 aa, synthetic construct
RGDLLVK

SEQ ID NO: 3610 - protein, 7 aa, synthetic construct
RGDLQGS

SEQ ID NO: 3611 - protein, 7 aa, synthetic construct
RGDLRGH

SEQ ID NO: 3612 - protein, 7 aa, synthetic construct
RGDLRIV

SEQ ID NO: 3613 - protein, 7 aa, synthetic construct
RGDLSNN

SEQ ID NO: 3614 - protein, 7 aa, synthetic construct
RGDNHFL

SEQ ID NO: 3615 - protein, 7 aa, synthetic construct
RGDNLVV

SEQ ID NO: 3616 - protein, 7 aa, synthetic construct
RGDQEKV

SEQ ID NO: 3617 - protein, 7 aa, synthetic construct
RGDQHGL

SEQ ID NO: 3618 - protein, 7 aa, synthetic construct
RGDQKHT

SEQ ID NO: 3619 - protein, 7 aa, synthetic construct
RGDQKSH

SEQ ID NO: 3620 - protein, 7 aa, synthetic construct
RGDQKTV

SEQ ID NO: 3621 - protein, 7 aa, synthetic construct
RGDQNKQ

SEQ ID NO: 3622 - protein, 7 aa, synthetic construct
RGDQRVV

SEQ ID NO: 3623 - protein, 7 aa, synthetic construct
RGDQVAI

SEQ ID NO: 3624 - protein, 7 aa, synthetic construct
RGDQVQK

SEQ ID NO: 3625 - protein, 7 aa, synthetic construct
RGDRAKI

SEQ ID NO: 3626 - protein, 7 aa, synthetic construct
RGDRAQV

SEQ ID NO: 3627 - protein, 7 aa, synthetic construct
RGDRDKF

SEQ ID NO: 3628 - protein, 7 aa, synthetic construct
RGDRDSK

SEQ ID NO: 3629 - protein, 7 aa, synthetic construct
RGDRHFL

SEQ ID NO: 3630 - protein, 7 aa, synthetic construct
RGDRIDI

SEQ ID NO: 3631 - protein, 7 aa, synthetic construct
RGDRKAV

SEQ ID NO: 3632 - protein, 7 aa, synthetic construct
RGDRKDF

SEQ ID NO: 3633 - protein, 7 aa, synthetic construct
RGDRLER

SEQ ID NO: 3634 - protein, 7 aa, synthetic construct
RGDRLFN

SEQ ID NO: 3635 - protein, 7 aa, synthetic construct
RGDRRLI

SEQ ID NO: 3636 - protein, 7 aa, synthetic construct
RGDSGNV

SEQ ID NO: 3637 - protein, 7 aa, synthetic construct
RGDSGRT

SEQ ID NO: 3638 - protein, 7 aa, synthetic construct
RGDSGTN

SEQ ID NO: 3639 - protein, 7 aa, synthetic construct
RGDSKKA

SEQ ID NO: 3640 - protein, 7 aa, synthetic construct
RGDSKTL

SEQ ID NO: 3641 - protein, 7 aa, synthetic construct
RGDSRAG

SEQ ID NO: 3642 - protein, 7 aa, synthetic construct
RGDSRFQ

SEQ ID NO: 3643 - protein, 7 aa, synthetic construct
RGDSSAV

SEQ ID NO: 3644 - protein, 7 aa, synthetic construct
RGDTAAK

SEQ ID NO: 3645 - protein, 7 aa, synthetic construct
RGDTHKL

SEQ ID NO: 3646 - protein, 7 aa, synthetic construct
RGDTLKF

SEQ ID NO: 3647 - protein, 7 aa, synthetic construct
RGDTQTI

SEQ ID NO: 3648 - protein, 7 aa, synthetic construct
RGDVGQK

SEQ ID NO: 3649 - protein, 7 aa, synthetic construct
RGDVGRK

SEQ ID NO: 3650 - protein, 7 aa, synthetic construct
RGDVIIL

SEQ ID NO: 3651 - protein, 7 aa, synthetic construct
RGDVLLI

SEQ ID NO: 3652 - protein, 7 aa, synthetic construct
RGDVLTL

SEQ ID NO: 3653 - protein, 7 aa, synthetic construct
RGDVQKN

SEQ ID NO: 3654 - protein, 7 aa, synthetic construct
RGDVRLF

SEQ ID NO: 3655 - protein, 7 aa, synthetic construct
RGDVSHA

SEQ ID NO: 3656 - protein, 7 aa, synthetic construct
RGDAEKF

SEQ ID NO: 3657 - protein, 7 aa, synthetic construct
RGDEDFR

SEQ ID NO: 3658 - protein, 7 aa, synthetic construct
RGDFFRQ

SEQ ID NO: 3659 - protein, 7 aa, synthetic construct
RGDFKII

SEQ ID NO: 3660 - protein, 7 aa, synthetic construct
RGDFRFV

SEQ ID NO: 3661 - protein, 7 aa, synthetic construct
RGDGDRH

SEQ ID NO: 3662 - protein, 7 aa, synthetic construct
RGDGHKV

SEQ ID NO: 3663 - protein, 7 aa, synthetic construct
RGDGQKF

SEQ ID NO: 3664 - protein, 7 aa, synthetic construct
RGDGQTV

SEQ ID NO: 3665 - protein, 7 aa, synthetic construct
RGDGRLF

SEQ ID NO: 3666 - protein, 7 aa, synthetic construct
RGDGSFR

SEQ ID NO: 3667 - protein, 7 aa, synthetic construct
RGDGTKI

SEQ ID NO: 3668 - protein, 7 aa, synthetic construct
RGDHAAK

SEQ ID NO: 3669 - protein, 7 aa, synthetic construct
RGDHDFR

SEQ ID NO: 3670 - protein, 7 aa, synthetic construct
RGDHENL

SEQ ID NO: 3671 - protein, 7 aa, synthetic construct
RGDHGLS

SEQ ID NO: 3672 - protein, 7 aa, synthetic construct
RGDHQGT

SEQ ID NO: 3673 - protein, 7 aa, synthetic construct
RGDHRNH

SEQ ID NO: 3674 - protein, 7 aa, synthetic construct
RGDHVNI

SEQ ID NO: 3675 - protein, 7 aa, synthetic construct
RGDIGNR

SEQ ID NO: 3676 - protein, 7 aa, synthetic construct
RGDIHQR

SEQ ID NO: 3677 - protein, 7 aa, synthetic construct
RGDIKGK

SEQ ID NO: 3678 - protein, 7 aa, synthetic construct
RGDIKHK

SEQ ID NO: 3679 - protein, 7 aa, synthetic construct
RGDIKSR

SEQ ID NO: 3680 - protein, 7 aa, synthetic construct
RGDISFS

SEQ ID NO: 3681 - protein, 7 aa, synthetic construct
RGDISGH

SEQ ID NO: 3682 - protein, 7 aa, synthetic construct
RGDITSI

SEQ ID NO: 3683 - protein, 7 aa, synthetic construct
RGDKAGV

SEQ ID NO: 3684 - protein, 7 aa, synthetic construct
RGDKGIS

SEQ ID NO: 3685 - protein, 7 aa, synthetic construct
RGDKGSQ

SEQ ID NO: 3686 - protein, 7 aa, synthetic construct
RGDKIKS

SEQ ID NO: 3687 - protein, 7 aa, synthetic construct
RGDKKFT

SEQ ID NO: 3688 - protein, 7 aa, synthetic construct
RGDKKHG

SEQ ID NO: 3689 - protein, 7 aa, synthetic construct
RGDKKQE

SEQ ID NO: 3690 - protein, 7 aa, synthetic construct
RGDKLDT

SEQ ID NO: 3691 - protein, 7 aa, synthetic construct
RGDKLIV

SEQ ID NO: 3692 - protein, 7 aa, synthetic construct
RGDKLLK

SEQ ID NO: 3693 - protein, 7 aa, synthetic construct
RGDKQNL

SEQ ID NO: 3694 - protein, 7 aa, synthetic construct
RGDKQVI

SEQ ID NO: 3695 - protein, 7 aa, synthetic construct
RGDKRNS

SEQ ID NO: 3696 - protein, 7 aa, synthetic construct
RGDKTKQ

SEQ ID NO: 3697 - protein, 7 aa, synthetic construct
RGDKVHV

SEQ ID NO: 3698 - protein, 7 aa, synthetic construct
RGDKVKF

SEQ ID NO: 3699 - protein, 7 aa, synthetic construct
RGDLGGR

SEQ ID NO: 3700 - protein, 7 aa, synthetic construct
RGDLGHQ

SEQ ID NO: 3701 - protein, 7 aa, synthetic construct
RGDLKHR

SEQ ID NO: 3702 - protein, 7 aa, synthetic construct
RGDASSN

SEQ ID NO: 3703 - protein, 7 aa, synthetic construct
RGDLLKN

SEQ ID NO: 3704 - protein, 7 aa, synthetic construct
RGDLSIL

SEQ ID NO: 3705 - protein, 7 aa, synthetic construct
RGDLSTS

SEQ ID NO: 3706 - protein, 7 aa, synthetic construct
RGDLVRS

SEQ ID NO: 3707 - protein, 7 aa, synthetic construct
RGDNGGL

SEQ ID NO: 3708 - protein, 7 aa, synthetic construct
RGDNHVL

SEQ ID NO: 3709 - protein, 7 aa, synthetic construct
RGDNNFL

SEQ ID NO: 3710 - protein, 7 aa, synthetic construct
RGDNSRF

SEQ ID NO: 3711 - protein, 7 aa, synthetic construct
RGDNSRI

SEQ ID NO: 3712 - protein, 7 aa, synthetic construct
RGDNTHL

SEQ ID NO: 3713 - protein, 7 aa, synthetic construct
RGDQFQR

SEQ ID NO: 3714 - protein, 7 aa, synthetic construct
RGDQFRQ

SEQ ID NO: 3715 - protein, 7 aa, synthetic construct
RGDQKSV

SEQ ID NO: 3716 - protein, 7 aa, synthetic construct
RGDQLHH

SEQ ID NO: 3717 - protein, 7 aa, synthetic construct
RGDQLQV

SEQ ID NO: 3718 - protein, 7 aa, synthetic construct
RGDQNVV

SEQ ID NO: 3719 - protein, 7 aa, synthetic construct
RGDQRAQ

SEQ ID NO: 3720 - protein, 7 aa, synthetic construct
RGDQSSL

SEQ ID NO: 3721 - protein, 7 aa, synthetic construct
RGDQTVV

SEQ ID NO: 3722 - protein, 7 aa, synthetic construct
RGDRAHQ

SEQ ID NO: 3723 - protein, 7 aa, synthetic construct
RGDRDRQ

SEQ ID NO: 3724 - protein, 7 aa, synthetic construct
RGDRDVI

SEQ ID NO: 3725 - protein, 7 aa, synthetic construct
RGDADQA

SEQ ID NO: 3726 - protein, 7 aa, synthetic construct
RGDRENE

SEQ ID NO: 3727 - protein, 7 aa, synthetic construct
RGDRGDR

SEQ ID NO: 3728 - protein, 7 aa, synthetic construct
RGDRGFR

SEQ ID NO: 3729 - protein, 7 aa, synthetic construct
RGDRHNL

SEQ ID NO: 3730 - protein, 7 aa, synthetic construct
RGDRINL

SEQ ID NO: 3731 - protein, 7 aa, synthetic construct
RGDRKQQ

SEQ ID NO: 3732 - protein, 7 aa, synthetic construct
RGDRNIQ

SEQ ID NO: 3733 - protein, 7 aa, synthetic construct
RGDRNNV

SEQ ID NO: 3734 - protein, 7 aa, synthetic construct
RGDRSQE

SEQ ID NO: 3735 - protein, 7 aa, synthetic construct
RGDRSVH

SEQ ID NO: 3736 - protein, 7 aa, synthetic construct
RGDRTGQ

SEQ ID NO: 3737 - protein, 7 aa, synthetic construct
RGDRTKQ

SEQ ID NO: 3738 - protein, 7 aa, synthetic construct
RGDSAHQ

SEQ ID NO: 3739 - protein, 7 aa, synthetic construct
RGDSEHL

SEQ ID NO: 3740 - protein, 7 aa, synthetic construct
RGDSGFR

SEQ ID NO: 3741 - protein, 7 aa, synthetic construct
RGDSLTF

SEQ ID NO: 3742 - protein, 7 aa, synthetic construct
RGDSNTL

SEQ ID NO: 3743 - protein, 7 aa, synthetic construct
RGDSQQF

SEQ ID NO: 3744 - protein, 7 aa, synthetic construct
RGDSSHI

SEQ ID NO: 3745 - protein, 7 aa, synthetic construct
RGDDGHT

SEQ ID NO: 3746 - protein, 7 aa, synthetic construct
RGDSVET

SEQ ID NO: 3747 - protein, 7 aa, synthetic construct
RGDSVSN

SEQ ID NO: 3748 - protein, 7 aa, synthetic construct
RGDTKNF

SEQ ID NO: 3749 - protein, 7 aa, synthetic construct
RGDTSFR

SEQ ID NO: 3750 - protein, 7 aa, synthetic construct
RGDTSSI

SEQ ID NO: 3751 - protein, 7 aa, synthetic construct
RGDVHFK

SEQ ID NO: 3752 - protein, 7 aa, synthetic construct
RGDVHSQ

SEQ ID NO: 3753 - protein, 7 aa, synthetic construct
RGDVKQL

SEQ ID NO: 3754 - protein, 7 aa, synthetic construct
RGDVLFL

SEQ ID NO: 3755 - protein, 7 aa, synthetic construct
RGDVQGR

SEQ ID NO: 3756 - protein, 7 aa, synthetic construct
RGDVSLQ

SEQ ID NO: 3757 - protein, 7 aa, synthetic construct
RGDDTRL

SEQ ID NO: 3758 - protein, 7 aa, synthetic construct
RGDAAHK

SEQ ID NO: 3759 - protein, 7 aa, synthetic construct
RGDFFFA

SEQ ID NO: 3760 - protein, 7 aa, synthetic construct
RGDFGIH

SEQ ID NO: 3761 - protein, 7 aa, synthetic construct
RGDFGSQ

SEQ ID NO: 3762 - protein, 7 aa, synthetic construct
RGDFGSR

SEQ ID NO: 3763 - protein, 7 aa, synthetic construct
RGDFHNK

SEQ ID NO: 3764 - protein, 7 aa, synthetic construct
RGDFHQL

SEQ ID NO: 3765 - protein, 7 aa, synthetic construct
RGDFHRK

SEQ ID NO: 3766 - protein, 7 aa, synthetic construct
RGDFHVV

SEQ ID NO: 3767 - protein, 7 aa, synthetic construct
RGDFKAN

SEQ ID NO: 3768 - protein, 7 aa, synthetic construct
RGDFKSR

SEQ ID NO: 3769 - protein, 7 aa, synthetic construct
RGDFNQH

SEQ ID NO: 3770 - protein, 7 aa, synthetic construct
RGDFQDV

SEQ ID NO: 3771 - protein, 7 aa, synthetic construct
RGDFRFQ

SEQ ID NO: 3772 - protein, 7 aa, synthetic construct
RGDFRNS

SEQ ID NO: 3773 - protein, 7 aa, synthetic construct
RGDFVGG

SEQ ID NO: 3774 - protein, 7 aa, synthetic construct
RGDFVSK

SEQ ID NO: 3775 - protein, 7 aa, synthetic construct
RGDGFVR

SEQ ID NO: 3776 - protein, 7 aa, synthetic construct
RGDGGHF

SEQ ID NO: 3777 - protein, 7 aa, synthetic construct
RGDGQDK

SEQ ID NO: 3778 - protein, 7 aa, synthetic construct
RGDGQHL

SEQ ID NO: 3779 - protein, 7 aa, synthetic construct
RGDGRKQ

SEQ ID NO: 3780 - protein, 7 aa, synthetic construct
RGDGTRI

SEQ ID NO: 3781 - protein, 7 aa, synthetic construct
RGDGVFR

SEQ ID NO: 3782 - protein, 7 aa, synthetic construct
RGDGVHI

SEQ ID NO: 3783 - protein, 7 aa, synthetic construct
RGDHAAS

SEQ ID NO: 3784 - protein, 7 aa, synthetic construct
RGDAKNL

SEQ ID NO: 3785 - protein, 7 aa, synthetic construct
RGDHGSK

SEQ ID NO: 3786 - protein, 7 aa, synthetic construct
RGDHGTQ

SEQ ID NO: 3787 - protein, 7 aa, synthetic construct
RGDHKDR

SEQ ID NO: 3788 - protein, 7 aa, synthetic construct
RGDALHI

SEQ ID NO: 3789 - protein, 7 aa, synthetic construct
RGDHQNN

SEQ ID NO: 3790 - protein, 7 aa, synthetic construct
RGDHQQL

SEQ ID NO: 3791 - protein, 7 aa, synthetic construct
RGDHQTF

SEQ ID NO: 3792 - protein, 7 aa, synthetic construct
RGDHQTV

SEQ ID NO: 3793 - protein, 7 aa, synthetic construct
RGDHSSK

SEQ ID NO: 3794 - protein, 7 aa, synthetic construct
RGDHTSF

SEQ ID NO: 3795 - protein, 7 aa, synthetic construct
RGDANHL

SEQ ID NO: 3796 - protein, 7 aa, synthetic construct
RGDIGVV

SEQ ID NO: 3797 - protein, 7 aa, synthetic construct
RGDIQDF

SEQ ID NO: 3798 - protein, 7 aa, synthetic construct
RGDIRAT

SEQ ID NO: 3799 - protein, 7 aa, synthetic construct
RGDISAK

SEQ ID NO: 3800 - protein, 7 aa, synthetic construct
RGDISFK

SEQ ID NO: 3801 - protein, 7 aa, synthetic construct
RGDISFT

SEQ ID NO: 3802 - protein, 7 aa, synthetic construct
RGDISKH

SEQ ID NO: 3803 - protein, 7 aa, synthetic construct
RGDISLV

SEQ ID NO: 3804 - protein, 7 aa, synthetic construct
RGDISRV

SEQ ID NO: 3805 - protein, 7 aa, synthetic construct
RGDKFKL

SEQ ID NO: 3806 - protein, 7 aa, synthetic construct
RGDKHEK

SEQ ID NO: 3807 - protein, 7 aa, synthetic construct
RGDKKIL

SEQ ID NO: 3808 - protein, 7 aa, synthetic construct
RGDKKVH

SEQ ID NO: 3809 - protein, 7 aa, synthetic construct
RGDKLET

SEQ ID NO: 3810 - protein, 7 aa, synthetic construct
RGDKNEL

SEQ ID NO: 3811 - protein, 7 aa, synthetic construct
RGDKNTV

SEQ ID NO: 3812 - protein, 7 aa, synthetic construct
RGDKQSI

SEQ ID NO: 3813 - protein, 7 aa, synthetic construct
RGDKQTV

SEQ ID NO: 3814 - protein, 7 aa, synthetic construct
RGDARNN

SEQ ID NO: 3815 - protein, 7 aa, synthetic construct
RGDKTFQ

SEQ ID NO: 3816 - protein, 7 aa, synthetic construct
RGDKTGK

SEQ ID NO: 3817 - protein, 7 aa, synthetic construct
RGDARTN

SEQ ID NO: 3818 - protein, 7 aa, synthetic construct
RGDARVK

SEQ ID NO: 3819 - protein, 7 aa, synthetic construct
RGDKVQK

SEQ ID NO: 3820 - protein, 7 aa, synthetic construct
RGDLESF

SEQ ID NO: 3821 - protein, 7 aa, synthetic construct
RGDLHVV

SEQ ID NO: 3822 - protein, 7 aa, synthetic construct
RGDLKGS

SEQ ID NO: 3823 - protein, 7 aa, synthetic construct
RGDASSK

SEQ ID NO: 3824 - protein, 7 aa, synthetic construct
RGDLSTN

SEQ ID NO: 3825 - protein, 7 aa, synthetic construct
RGDLTRI

SEQ ID NO: 3826 - protein, 7 aa, synthetic construct
RGDLVSF

SEQ ID NO: 3827 - protein, 7 aa, synthetic construct
RGDNARF

SEQ ID NO: 3828 - protein, 7 aa, synthetic construct
RGDNARV

SEQ ID NO: 3829 - protein, 7 aa, synthetic construct
RGDNHTV

SEQ ID NO: 3830 - protein, 7 aa, synthetic construct
RGDQDLK

SEQ ID NO: 3831 - protein, 7 aa, synthetic construct
RGDQFRS

SEQ ID NO: 3832 - protein, 7 aa, synthetic construct
RGDQGDK

SEQ ID NO: 3833 - protein, 7 aa, synthetic construct
RGDQHRV

SEQ ID NO: 3834 - protein, 7 aa, synthetic construct
RGDQIIV

SEQ ID NO: 3835 - protein, 7 aa, synthetic construct
RGDQRIV

SEQ ID NO: 3836 - protein, 7 aa, synthetic construct
RGDQSGF

SEQ ID NO: 3837 - protein, 7 aa, synthetic construct
RGDQSVR

SEQ ID NO: 3838 - protein, 7 aa, synthetic construct
RGDQTSN

SEQ ID NO: 3839 - protein, 7 aa, synthetic construct
RGDQVHS

SEQ ID NO: 3840 - protein, 7 aa, synthetic construct
RGDRDTN

SEQ ID NO: 3841 - protein, 7 aa, synthetic construct
RGDRFET

SEQ ID NO: 3842 - protein, 7 aa, synthetic construct
RGDRGGN

SEQ ID NO: 3843 - protein, 7 aa, synthetic construct
RGDRHEI

SEQ ID NO: 3844 - protein, 7 aa, synthetic construct
RGDRHES

SEQ ID NO: 3845 - protein, 7 aa, synthetic construct
RGDRIKI

SEQ ID NO: 3846 - protein, 7 aa, synthetic construct
RGDRSQK

SEQ ID NO: 3847 - protein, 7 aa, synthetic construct
RGDRTAI

SEQ ID NO: 3848 - protein, 7 aa, synthetic construct
RGDRTKI

SEQ ID NO: 3849 - protein, 7 aa, synthetic construct
RGDRTNS

SEQ ID NO: 3850 - protein, 7 aa, synthetic construct
RGDSGKI

SEQ ID NO: 3851 - protein, 7 aa, synthetic construct
RGDSGVI

SEQ ID NO: 3852 - protein, 7 aa, synthetic construct
RGDSKGF

SEQ ID NO: 3853 - protein, 7 aa, synthetic construct
RGDSKKD

SEQ ID NO: 3854 - protein, 7 aa, synthetic construct
RGDSLQF

SEQ ID NO: 3855 - protein, 7 aa, synthetic construct
RGDSQHI

SEQ ID NO: 3856 - protein, 7 aa, synthetic construct
RGDSRFH

SEQ ID NO: 3857 - protein, 7 aa, synthetic construct
RGDDGHQ

SEQ ID NO: 3858 - protein, 7 aa, synthetic construct
RGDSVTI

SEQ ID NO: 3859 - protein, 7 aa, synthetic construct
RGDSVVF

SEQ ID NO: 3860 - protein, 7 aa, synthetic construct
RGDTKQL

SEQ ID NO: 3861 - protein, 7 aa, synthetic construct
RGDTNKN

SEQ ID NO: 3862 - protein, 7 aa, synthetic construct
RGDTRVA

SEQ ID NO: 3863 - protein, 7 aa, synthetic construct
RGDTTHS

SEQ ID NO: 3864 - protein, 7 aa, synthetic construct
RGDVEFV

SEQ ID NO: 3865 - protein, 7 aa, synthetic construct
RGDVFQV

SEQ ID NO: 3866 - protein, 7 aa, synthetic construct
RGDVHDV

SEQ ID NO: 3867 - protein, 7 aa, synthetic construct
RGDVHKI

SEQ ID NO: 3868 - protein, 7 aa, synthetic construct
RGDVIKS

SEQ ID NO: 3869 - protein, 7 aa, synthetic construct
RGDVKIG

SEQ ID NO: 3870 - protein, 7 aa, synthetic construct
RGDVKQF

SEQ ID NO: 3871 - protein, 7 aa, synthetic construct
RGDVKVT

SEQ ID NO: 3872 - protein, 7 aa, synthetic construct
RGDVRFS

SEQ ID NO: 3873 - protein, 7 aa, synthetic construct
RGDVTSR

SEQ ID NO: 3874 - protein, 7 aa, synthetic construct
RGDDSKV

SEQ ID NO: 3875 - protein, 7 aa, synthetic construct
RGDEHKL

SEQ ID NO: 3876 - protein, 7 aa, synthetic construct
RGDAFRL

SEQ ID NO: 3877 - protein, 7 aa, synthetic construct
RGDFENS

SEQ ID NO: 3878 - protein, 7 aa, synthetic construct
RGDAGTI

SEQ ID NO: 3879 - protein, 7 aa, synthetic construct
RGDFGHQ

SEQ ID NO: 3880 - protein, 7 aa, synthetic construct
RGDFKRI

SEQ ID NO: 3881 - protein, 7 aa, synthetic construct
RGDFNNL

SEQ ID NO: 3882 - protein, 7 aa, synthetic construct
RGDFQFV

SEQ ID NO: 3883 - protein, 7 aa, synthetic construct
RGDGGNK

SEQ ID NO: 3884 - protein, 7 aa, synthetic construct
RGDGHDH

SEQ ID NO: 3885 - protein, 7 aa, synthetic construct
RGDGHNT

SEQ ID NO: 3886 - protein, 7 aa, synthetic construct
RGDGIKE

SEQ ID NO: 3887 - protein, 7 aa, synthetic construct
RGDGIRI

SEQ ID NO: 3888 - protein, 7 aa, synthetic construct
RGDGRGA

SEQ ID NO: 3889 - protein, 7 aa, synthetic construct
RGDGSKT

SEQ ID NO: 3890 - protein, 7 aa, synthetic construct
RGDHERF

SEQ ID NO: 3891 - protein, 7 aa, synthetic construct
RGDHGFA

SEQ ID NO: 3892 - protein, 7 aa, synthetic construct
RGDHNRN

SEQ ID NO: 3893 - protein, 7 aa, synthetic construct
RGDHQAK

SEQ ID NO: 3894 - protein, 7 aa, synthetic construct
RGDALVI

SEQ ID NO: 3895 - protein, 7 aa, synthetic construct
RGDIATS

SEQ ID NO: 3896 - protein, 7 aa, synthetic construct
RGDIFDF

SEQ ID NO: 3897 - protein, 7 aa, synthetic construct
RGDIHKT

SEQ ID NO: 3898 - protein, 7 aa, synthetic construct
RGDIHVK

SEQ ID NO: 3899 - protein, 7 aa, synthetic construct
RGDANRL

SEQ ID NO: 3900 - protein, 7 aa, synthetic construct
RGDILKT

SEQ ID NO: 3901 - protein, 7 aa, synthetic construct
RGDIQGH

SEQ ID NO: 3902 - protein, 7 aa, synthetic construct
RGDIQRI

SEQ ID NO: 3903 - protein, 7 aa, synthetic construct
RGDIRAK

SEQ ID NO: 3904 - protein, 7 aa, synthetic construct
RGDAQKK

SEQ ID NO: 3905 - protein, 7 aa, synthetic construct
RGDKAVK

SEQ ID NO: 3906 - protein, 7 aa, synthetic construct
RGDKGVT

SEQ ID NO: 3907 - protein, 7 aa, synthetic construct
RGDKHGI

SEQ ID NO: 3908 - protein, 7 aa, synthetic construct
RGDKIDH

SEQ ID NO: 3909 - protein, 7 aa, synthetic construct
RGDKKTQ

SEQ ID NO: 3910 - protein, 7 aa, synthetic construct
RGDKLFD

SEQ ID NO: 3911 - protein, 7 aa, synthetic construct
RGDKLNL

SEQ ID NO: 3912 - protein, 7 aa, synthetic construct
RGDKNQQ

SEQ ID NO: 3913 - protein, 7 aa, synthetic construct
RGDKRSN

SEQ ID NO: 3914 - protein, 7 aa, synthetic construct
RGDKSLT

SEQ ID NO: 3915 - protein, 7 aa, synthetic construct
RGDARTV

SEQ ID NO: 3916 - protein, 7 aa, synthetic construct
RGDKVIV

SEQ ID NO: 3917 - protein, 7 aa, synthetic construct
RGDLAND

SEQ ID NO: 3918 - protein, 7 aa, synthetic construct
RGDLGIG

SEQ ID NO: 3919 - protein, 7 aa, synthetic construct
RGDLTSS

SEQ ID NO: 3920 - protein, 7 aa, synthetic construct
RGDLVQI

SEQ ID NO: 3921 - protein, 7 aa, synthetic construct
RGDLVSH

SEQ ID NO: 3922 - protein, 7 aa, synthetic construct
RGDNASF

SEQ ID NO: 3923 - protein, 7 aa, synthetic construct
RGDNAVK

SEQ ID NO: 3924 - protein, 7 aa, synthetic construct
RGDNRFL

SEQ ID NO: 3925 - protein, 7 aa, synthetic construct
RGDQHRK

SEQ ID NO: 3926 - protein, 7 aa, synthetic construct
RGDQIFV

SEQ ID NO: 3927 - protein, 7 aa, synthetic construct
RGDQKSK

SEQ ID NO: 3928 - protein, 7 aa, synthetic construct
RGDQQKL

SEQ ID NO: 3929 - protein, 7 aa, synthetic construct
RGDQTQF

SEQ ID NO: 3930 - protein, 7 aa, synthetic construct
RGDQVQR

SEQ ID NO: 3931 - protein, 7 aa, synthetic construct
RGDRAAQ

SEQ ID NO: 3932 - protein, 7 aa, synthetic construct
RGDRAQS

SEQ ID NO: 3933 - protein, 7 aa, synthetic construct
RGDRDKV

SEQ ID NO: 3934 - protein, 7 aa, synthetic construct
RGDRDRI

SEQ ID NO: 3935 - protein, 7 aa, synthetic construct
RGDRFHH

SEQ ID NO: 3936 - protein, 7 aa, synthetic construct
RGDRGNF

SEQ ID NO: 3937 - protein, 7 aa, synthetic construct
RGDRIAV

SEQ ID NO: 3938 - protein, 7 aa, synthetic construct
RGDRILI

SEQ ID NO: 3939 - protein, 7 aa, synthetic construct
RGDRLNI

SEQ ID NO: 3940 - protein, 7 aa, synthetic construct
RGDRNGN

SEQ ID NO: 3941 - protein, 7 aa, synthetic construct
RGDRNNL

SEQ ID NO: 3942 - protein, 7 aa, synthetic construct
RGDRQHL

SEQ ID NO: 3943 - protein, 7 aa, synthetic construct
RGDRVHL

SEQ ID NO: 3944 - protein, 7 aa, synthetic construct
RGDRVSR

SEQ ID NO: 3945 - protein, 7 aa, synthetic construct
RGDSIEI

SEQ ID NO: 3946 - protein, 7 aa, synthetic construct
RGDSKAI

SEQ ID NO: 3947 - protein, 7 aa, synthetic construct
RGDSKGS

SEQ ID NO: 3948 - protein, 7 aa, synthetic construct
RGDSKIL

SEQ ID NO: 3949 - protein, 7 aa, synthetic construct
RGDSNAS

SEQ ID NO: 3950 - protein, 7 aa, synthetic construct
RGDSTHT

SEQ ID NO: 3951 - protein, 7 aa, synthetic construct
RGDSVKL

SEQ ID NO: 3952 - protein, 7 aa, synthetic construct
RGDTKSH

SEQ ID NO: 3953 - protein, 7 aa, synthetic construct
RGDTLAR

SEQ ID NO: 3954 - protein, 7 aa, synthetic construct
RGDTVVV

SEQ ID NO: 3955 - protein, 7 aa, synthetic construct
RGDVAAK

SEQ ID NO: 3956 - protein, 7 aa, synthetic construct
RGDVASI

SEQ ID NO: 3957 - protein, 7 aa, synthetic construct
RGDVGFA

SEQ ID NO: 3958 - protein, 7 aa, synthetic construct
RGDVHFQ

SEQ ID NO: 3959 - protein, 7 aa, synthetic construct
RGDVHGF

SEQ ID NO: 3960 - protein, 7 aa, synthetic construct
RGDVINN

SEQ ID NO: 3961 - protein, 7 aa, synthetic construct
RGDVKVI

SEQ ID NO: 3962 - protein, 7 aa, synthetic construct
RGDVRFN

SEQ ID NO: 3963 - protein, 7 aa, synthetic construct
RGDVSLI

SEQ ID NO: 3964 - protein, 7 aa, synthetic construct
RGDFKKT

SEQ ID NO: 3965 - protein, 7 aa, synthetic construct
RGDFLRL

SEQ ID NO: 3966 - protein, 7 aa, synthetic construct
RGDFNFK

SEQ ID NO: 3967 - protein, 7 aa, synthetic construct
RGDFSIK

SEQ ID NO: 3968 - protein, 7 aa, synthetic construct
RGDFTRR

SEQ ID NO: 3969 - protein, 7 aa, synthetic construct
RGDGARQ

SEQ ID NO: 3970 - protein, 7 aa, synthetic construct
RGDGARV

SEQ ID NO: 3971 - protein, 7 aa, synthetic construct
RGDGFRI

SEQ ID NO: 3972 - protein, 7 aa, synthetic construct
RGDGHSL

SEQ ID NO: 3973 - protein, 7 aa, synthetic construct
RGDGHVV

SEQ ID NO: 3974 - protein, 7 aa, synthetic construct
RGDGIKI

SEQ ID NO: 3975 - protein, 7 aa, synthetic construct
RGDGKGT

SEQ ID NO: 3976 - protein, 7 aa, synthetic construct
RGDGRLV

SEQ ID NO: 3977 - protein, 7 aa, synthetic construct
RGDGSHR

SEQ ID NO: 3978 - protein, 7 aa, synthetic construct
RGDHAGQ

SEQ ID NO: 3979 - protein, 7 aa, synthetic construct
RGDAKQL

SEQ ID NO: 3980 - protein, 7 aa, synthetic construct
RGDAKSI

SEQ ID NO: 3981 - protein, 7 aa, synthetic construct
RGDAKTF

SEQ ID NO: 3982 - protein, 7 aa, synthetic construct
RGDHGGR

SEQ ID NO: 3983 - protein, 7 aa, synthetic construct
RGDHHKS

SEQ ID NO: 3984 - protein, 7 aa, synthetic construct
RGDHHST

SEQ ID NO: 3985 - protein, 7 aa, synthetic construct
RGDHNGR

SEQ ID NO: 3986 - protein, 7 aa, synthetic construct
RGDHSSQ

SEQ ID NO: 3987 - protein, 7 aa, synthetic construct
RGDALTI

SEQ ID NO: 3988 - protein, 7 aa, synthetic construct
RGDIHSL

SEQ ID NO: 3989 - protein, 7 aa, synthetic construct
RGDIKHF

SEQ ID NO: 3990 - protein, 7 aa, synthetic construct
RGDIKLN

SEQ ID NO: 3991 - protein, 7 aa, synthetic construct
RGDIKNL

SEQ ID NO: 3992 - protein, 7 aa, synthetic construct
RGDANRI

SEQ ID NO: 3993 - protein, 7 aa, synthetic construct
RGDIQHT

SEQ ID NO: 3994 - protein, 7 aa, synthetic construct
RGDITHS

SEQ ID NO: 3995 - protein, 7 aa, synthetic construct
RGDITKH

SEQ ID NO: 3996 - protein, 7 aa, synthetic construct
RGDITKN

SEQ ID NO: 3997 - protein, 7 aa, synthetic construct
RGDITLF

SEQ ID NO: 3998 - protein, 7 aa, synthetic construct
RGDAQHL

SEQ ID NO: 3999 - protein, 7 aa, synthetic construct
RGDAQKV

SEQ ID NO: 4000 - protein, 7 aa, synthetic construct
RGDKAIQ

SEQ ID NO: 4001 - protein, 7 aa, synthetic construct
RGDKGKH

SEQ ID NO: 4002 - protein, 7 aa, synthetic construct
RGDKKSF

SEQ ID NO: 4003 - protein, 7 aa, synthetic construct
RGDARNQ

SEQ ID NO: 4004 - protein, 7 aa, synthetic construct
RGDKSAS

SEQ ID NO: 4005 - protein, 7 aa, synthetic construct
RGDLIDR

SEQ ID NO: 4006 - protein, 7 aa, synthetic construct
RGDLKLQ

SEQ ID NO: 4007 - protein, 7 aa, synthetic construct
RGDLLFK

SEQ ID NO: 4008 - protein, 7 aa, synthetic construct
RGDLRHA

SEQ ID NO: 4009 - protein, 7 aa, synthetic construct
RGDLSFD

SEQ ID NO: 4010 - protein, 7 aa, synthetic construct
RGDATHV

SEQ ID NO: 4011 - protein, 7 aa, synthetic construct
RGDNQSQ

SEQ ID NO: 4012 - protein, 7 aa, synthetic construct
RGDNRDL

SEQ ID NO: 4013 - protein, 7 aa, synthetic construct
RGDNRHI

SEQ ID NO: 4014 - protein, 7 aa, synthetic construct
RGDNSGR

SEQ ID NO: 4015 - protein, 7 aa, synthetic construct
RGDNTRF

SEQ ID NO: 4016 - protein, 7 aa, synthetic construct
RGDNVGE

SEQ ID NO: 4017 - protein, 7 aa, synthetic construct
RGDQFFR

SEQ ID NO: 4018 - protein, 7 aa, synthetic construct
RGDQKGH

SEQ ID NO: 4019 - protein, 7 aa, synthetic construct
RGDQKVV

SEQ ID NO: 4020 - protein, 7 aa, synthetic construct
RGDQQKI

SEQ ID NO: 4021 - protein, 7 aa, synthetic construct
RGDQRNH

SEQ ID NO: 4022 - protein, 7 aa, synthetic construct
RGDQSQT

SEQ ID NO: 4023 - protein, 7 aa, synthetic construct
RGDQSTT

SEQ ID NO: 4024 - protein, 7 aa, synthetic construct
RGDQTKL

SEQ ID NO: 4025 - protein, 7 aa, synthetic construct
RGDQTVQ

SEQ ID NO: 4026 - protein, 7 aa, synthetic construct
RGDRFAI

SEQ ID NO: 4027 - protein, 7 aa, synthetic construct
RGDRGGL

SEQ ID NO: 4028 - protein, 7 aa, synthetic construct
RGDRGKQ

SEQ ID NO: 4029 - protein, 7 aa, synthetic construct
RGDRKFG

SEQ ID NO: 4030 - protein, 7 aa, synthetic construct
RGDRKQE

SEQ ID NO: 4031 - protein, 7 aa, synthetic construct
RGDRKVN

SEQ ID NO: 4032 - protein, 7 aa, synthetic construct
RGDRNEL

SEQ ID NO: 4033 - protein, 7 aa, synthetic construct
RGDRSES

SEQ ID NO: 4034 - protein, 7 aa, synthetic construct
RGDRTSN

SEQ ID NO: 4035 - protein, 7 aa, synthetic construct
RGDRVFT

SEQ ID NO: 4036 - protein, 7 aa, synthetic construct
RGDRVKK

SEQ ID NO: 4037 - protein, 7 aa, synthetic construct
RGDSGKQ

SEQ ID NO: 4038 - protein, 7 aa, synthetic construct
RGDSHRF

SEQ ID NO: 4039 - protein, 7 aa, synthetic construct
RGDSIKF

SEQ ID NO: 4040 - protein, 7 aa, synthetic construct
RGDSNFR

SEQ ID NO: 4041 - protein, 7 aa, synthetic construct
RGDSRVT

SEQ ID NO: 4042 - protein, 7 aa, synthetic construct
RGDSTHV

SEQ ID NO: 4043 - protein, 7 aa, synthetic construct
RGDSVHE

SEQ ID NO: 4044 - protein, 7 aa, synthetic construct
RGDSVHT

SEQ ID NO: 4045 - protein, 7 aa, synthetic construct
RGDTGSR

SEQ ID NO: 4046 - protein, 7 aa, synthetic construct
RGDTKHK

SEQ ID NO: 4047 - protein, 7 aa, synthetic construct
RGDTKST

SEQ ID NO: 4048 - protein, 7 aa, synthetic construct
RGDTQNR

SEQ ID NO: 4049 - protein, 7 aa, synthetic construct
RGDVATR

SEQ ID NO: 4050 - protein, 7 aa, synthetic construct
RGDVEFQ

SEQ ID NO: 4051 - protein, 7 aa, synthetic construct
RGDVEGK

SEQ ID NO: 4052 - protein, 7 aa, synthetic construct
RGDVKSV

SEQ ID NO: 4053 - protein, 7 aa, synthetic construct
RGDVLKN

SEQ ID NO: 4054 - protein, 7 aa, synthetic construct
RGDVNFL

SEQ ID NO: 4055 - protein, 7 aa, synthetic construct
RGDVSFA

SEQ ID NO: 4056 - protein, 7 aa, synthetic construct
RGDVSKS

SEQ ID NO: 4057 - protein, 7 aa, synthetic construct
RGDVSLS

SEQ ID NO: 4058 - protein, 7 aa, synthetic construct
RGDVVKI

SEQ ID NO: 4059 - protein, 7 aa, synthetic construct
RGDEHGN

SEQ ID NO: 4060 - protein, 7 aa, synthetic construct
RGDESAS

SEQ ID NO: 4061 - protein, 7 aa, synthetic construct
RGDFDHI

SEQ ID NO: 4062 - protein, 7 aa, synthetic construct
RGDFFHT

SEQ ID NO: 4063 - protein, 7 aa, synthetic construct
RGDFFRT

SEQ ID NO: 4064 - protein, 7 aa, synthetic construct
RGDFLGS

SEQ ID NO: 4065 - protein, 7 aa, synthetic construct
RGDFRND

SEQ ID NO: 4066 - protein, 7 aa, synthetic construct
RGDFVGH

SEQ ID NO: 4067 - protein, 7 aa, synthetic construct
RGDGGRV

SEQ ID NO: 4068 - protein, 7 aa, synthetic construct
RGDGITI

SEQ ID NO: 4069 - protein, 7 aa, synthetic construct
RGDGKFF

SEQ ID NO: 4070 - protein, 7 aa, synthetic construct
RGDGLQL

SEQ ID NO: 4071 - protein, 7 aa, synthetic construct
RGDGRSI

SEQ ID NO: 4072 - protein, 7 aa, synthetic construct
RGDAKGL

SEQ ID NO: 4073 - protein, 7 aa, synthetic construct
RGDGTTG

SEQ ID NO: 4074 - protein, 7 aa, synthetic construct
RGDGVNV

SEQ ID NO: 4075 - protein, 7 aa, synthetic construct
RGDHFQF

SEQ ID NO: 4076 - protein, 7 aa, synthetic construct
RGDHGIR

SEQ ID NO: 4077 - protein, 7 aa, synthetic construct
RGDHKFL

SEQ ID NO: 4078 - protein, 7 aa, synthetic construct
RGDHSFR

SEQ ID NO: 4079 - protein, 7 aa, synthetic construct
RGDALRT

SEQ ID NO: 4080 - protein, 7 aa, synthetic construct
RGDHTGQ

SEQ ID NO: 4081 - protein, 7 aa, synthetic construct
RGDHVER

SEQ ID NO: 4082 - protein, 7 aa, synthetic construct
RGDIAKQ

SEQ ID NO: 4083 - protein, 7 aa, synthetic construct
RGDIAVK

SEQ ID NO: 4084 - protein, 7 aa, synthetic construct
RGDIGNV

SEQ ID NO: 4085 - protein, 7 aa, synthetic construct
RGDIKFR

SEQ ID NO: 4086 - protein, 7 aa, synthetic construct
RGDIKFV

SEQ ID NO: 4087 - protein, 7 aa, synthetic construct
RGDILFI

SEQ ID NO: 4088 - protein, 7 aa, synthetic construct
RGDINAN

SEQ ID NO: 4089 - protein, 7 aa, synthetic construct
RGDISFV

SEQ ID NO: 4090 - protein, 7 aa, synthetic construct
RGDISTK

SEQ ID NO: 4091 - protein, 7 aa, synthetic construct
RGDIVFK

SEQ ID NO: 4092 - protein, 7 aa, synthetic construct
RGDIVLF

SEQ ID NO: 4093 - protein, 7 aa, synthetic construct
RGDIVSI

SEQ ID NO: 4094 - protein, 7 aa, synthetic construct
RGDKAGR

SEQ ID NO: 4095 - protein, 7 aa, synthetic construct
RGDKKKH

SEQ ID NO: 4096 - protein, 7 aa, synthetic construct
RGDKKQL

SEQ ID NO: 4097 - protein, 7 aa, synthetic construct
RGDKNKF

SEQ ID NO: 4098 - protein, 7 aa, synthetic construct
RGDKNSV

SEQ ID NO: 4099 - protein, 7 aa, synthetic construct
RGDKQAK

SEQ ID NO: 4100 - protein, 7 aa, synthetic construct
RGDKREQ

SEQ ID NO: 4101 - protein, 7 aa, synthetic construct
RGDKSTR

SEQ ID NO: 4102 - protein, 7 aa, synthetic construct
RGDKSTT

SEQ ID NO: 4103 - protein, 7 aa, synthetic construct
RGDASHQ

SEQ ID NO: 4104 - protein, 7 aa, synthetic construct
RGDLGFK

SEQ ID NO: 4105 - protein, 7 aa, synthetic construct
RGDLGVV

SEQ ID NO: 4106 - protein, 7 aa, synthetic construct
RGDLHGI

SEQ ID NO: 4107 - protein, 7 aa, synthetic construct
RGDLIHD

SEQ ID NO: 4108 - protein, 7 aa, synthetic construct
RGDASRT

SEQ ID NO: 4109 - protein, 7 aa, synthetic construct
RGDLNRN

SEQ ID NO: 4110 - protein, 7 aa, synthetic construct
RGDLQNN

SEQ ID NO: 4111 - protein, 7 aa, synthetic construct
RGDLRHD

SEQ ID NO: 4112 - protein, 7 aa, synthetic construct
RGDLTFI

SEQ ID NO: 4113 - protein, 7 aa, synthetic construct
RGDLTIV

SEQ ID NO: 4114 - protein, 7 aa, synthetic construct
RGDLVHR

SEQ ID NO: 4115 - protein, 7 aa, synthetic construct
RGDLVSS

SEQ ID NO: 4116 - protein, 7 aa, synthetic construct
RGDLVVN

SEQ ID NO: 4117 - protein, 7 aa, synthetic construct
RGDNAKH

SEQ ID NO: 4118 - protein, 7 aa, synthetic construct
RGDATNI

SEQ ID NO: 4119 - protein, 7 aa, synthetic construct
RGDNESL

SEQ ID NO: 4120 - protein, 7 aa, synthetic construct
RGDNLRF

SEQ ID NO: 4121 - protein, 7 aa, synthetic construct
RGDNNNH

SEQ ID NO: 4122 - protein, 7 aa, synthetic construct
RGDNQII

SEQ ID NO: 4123 - protein, 7 aa, synthetic construct
RGDNSRK

SEQ ID NO: 4124 - protein, 7 aa, synthetic construct
RGDNTSF

SEQ ID NO: 4125 - protein, 7 aa, synthetic construct
RGDNVDR

SEQ ID NO: 4126 - protein, 7 aa, synthetic construct
RGDNVDS

SEQ ID NO: 4127 - protein, 7 aa, synthetic construct
RGDAVVV

SEQ ID NO: 4128 - protein, 7 aa, synthetic construct
RGDQARH

SEQ ID NO: 4129 - protein, 7 aa, synthetic construct
RGDDAHI

SEQ ID NO: 4130 - protein, 7 aa, synthetic construct
RGDQGKQ

SEQ ID NO: 4131 - protein, 7 aa, synthetic construct
RGDQHNL

SEQ ID NO: 4132 - protein, 7 aa, synthetic construct
RGDQHVQ

SEQ ID NO: 4133 - protein, 7 aa, synthetic construct
RGDQKFT

SEQ ID NO: 4134 - protein, 7 aa, synthetic construct
RGDQKGN

SEQ ID NO: 4135 - protein, 7 aa, synthetic construct
RGDQKLT

SEQ ID NO: 4136 - protein, 7 aa, synthetic construct
RGDQLNH

SEQ ID NO: 4137 - protein, 7 aa, synthetic construct
RGDQQVR

SEQ ID NO: 4138 - protein, 7 aa, synthetic construct
RGDQVKV

SEQ ID NO: 4139 - protein, 7 aa, synthetic construct
RGDQVQG

SEQ ID NO: 4140 - protein, 7 aa, synthetic construct
RGDRAIV

SEQ ID NO: 4141 - protein, 7 aa, synthetic construct
RGDRDNV

SEQ ID NO: 4142 - protein, 7 aa, synthetic construct
RGDRDSI

SEQ ID NO: 4143 - protein, 7 aa, synthetic construct
RGDREAL

SEQ ID NO: 4144 - protein, 7 aa, synthetic construct
RGDREQQ

SEQ ID NO: 4145 - protein, 7 aa, synthetic construct
RGDRFHT

SEQ ID NO: 4146 - protein, 7 aa, synthetic construct
RGDRGNA

SEQ ID NO: 4147 - protein, 7 aa, synthetic construct
RGDRGSG

SEQ ID NO: 4148 - protein, 7 aa, synthetic construct
RGDRHII

SEQ ID NO: 4149 - protein, 7 aa, synthetic construct
RGDRKDH

SEQ ID NO: 4150 - protein, 7 aa, synthetic construct
RGDRKIG

SEQ ID NO: 4151 - protein, 7 aa, synthetic construct
RGDRNFI

SEQ ID NO: 4152 - protein, 7 aa, synthetic construct
RGDRQHN

SEQ ID NO: 4153 - protein, 7 aa, synthetic construct
RGDRQTV

SEQ ID NO: 4154 - protein, 7 aa, synthetic construct
RGDRSDI

SEQ ID NO: 4155 - protein, 7 aa, synthetic construct
RGDRTGH

SEQ ID NO: 4156 - protein, 7 aa, synthetic construct
RGDRVEK

SEQ ID NO: 4157 - protein, 7 aa, synthetic construct
RGDSGKV

SEQ ID NO: 4158 - protein, 7 aa, synthetic construct
RGDADSR

SEQ ID NO: 4159 - protein, 7 aa, synthetic construct
RGDSHQI

SEQ ID NO: 4160 - protein, 7 aa, synthetic construct
RGDSKGA

SEQ ID NO: 4161 - protein, 7 aa, synthetic construct
RGDSQEL

SEQ ID NO: 4162 - protein, 7 aa, synthetic construct
RGDSRGK

SEQ ID NO: 4163 - protein, 7 aa, synthetic construct
RGDSRKF

SEQ ID NO: 4164 - protein, 7 aa, synthetic construct
RGDSRQI

SEQ ID NO: 4165 - protein, 7 aa, synthetic construct
RGDSRQT

SEQ ID NO: 4166 - protein, 7 aa, synthetic construct
RGDSSSV

SEQ ID NO: 4167 - protein, 7 aa, synthetic construct
RGDTAQQ

SEQ ID NO: 4168 - protein, 7 aa, synthetic construct
RGDTHLL

SEQ ID NO: 4169 - protein, 7 aa, synthetic construct
RGDTHVV

SEQ ID NO: 4170 - protein, 7 aa, synthetic construct
RGDDHGR

SEQ ID NO: 4171 - protein, 7 aa, synthetic construct
RGDTLHF

SEQ ID NO: 4172 - protein, 7 aa, synthetic construct
RGDTLKV

SEQ ID NO: 4173 - protein, 7 aa, synthetic construct
RGDTRQH

SEQ ID NO: 4174 - protein, 7 aa, synthetic construct
RGDTSIK

SEQ ID NO: 4175 - protein, 7 aa, synthetic construct
RGDVAGR

SEQ ID NO: 4176 - protein, 7 aa, synthetic construct
RGDVAVR

SEQ ID NO: 4177 - protein, 7 aa, synthetic construct
RGDVKFV

SEQ ID NO: 4178 - protein, 7 aa, synthetic construct
RGDVKIR

SEQ ID NO: 4179 - protein, 7 aa, synthetic construct
RGDVKTQ

SEQ ID NO: 4180 - protein, 7 aa, synthetic construct
RGDVRTQ

SEQ ID NO: 4181 - protein, 7 aa, synthetic construct
RGDVTKL

SEQ ID NO: 4182 - protein, 7 aa, synthetic construct
RGDDLGK

SEQ ID NO: 4183 - protein, 7 aa, synthetic construct
RGDAEHL

SEQ ID NO: 4184 - protein, 7 aa, synthetic construct
RGDEHRL

SEQ ID NO: 4185 - protein, 7 aa, synthetic construct
RGDAGHS

SEQ ID NO: 4186 - protein, 7 aa, synthetic construct
RGDFAHT

SEQ ID NO: 4187 - protein, 7 aa, synthetic construct
RGDFDGK

SEQ ID NO: 4188 - protein, 7 aa, synthetic construct
RGDFERS

SEQ ID NO: 4189 - protein, 7 aa, synthetic construct
RGDFFDV

SEQ ID NO: 4190 - protein, 7 aa, synthetic construct
RGDFFHL

SEQ ID NO: 4191 - protein, 7 aa, synthetic construct
RGDFFQR

SEQ ID NO: 4192 - protein, 7 aa, synthetic construct
RGDFIHS

SEQ ID NO: 4193 - protein, 7 aa, synthetic construct
RGDFKVI

SEQ ID NO: 4194 - protein, 7 aa, synthetic construct
RGDFNAI

SEQ ID NO: 4195 - protein, 7 aa, synthetic construct
RGDFVGS

SEQ ID NO: 4196 - protein, 7 aa, synthetic construct
RGDFVGV

SEQ ID NO: 4197 - protein, 7 aa, synthetic construct
RGDFVKQ

SEQ ID NO: 4198 - protein, 7 aa, synthetic construct
RGDGAAL

SEQ ID NO: 4199 - protein, 7 aa, synthetic construct
RGDGAHQ

SEQ ID NO: 4200 - protein, 7 aa, synthetic construct
RGDGANQ

SEQ ID NO: 4201 - protein, 7 aa, synthetic construct
RGDGDSA

SEQ ID NO: 4202 - protein, 7 aa, synthetic construct
RGDGHGT

SEQ ID NO: 4203 - protein, 7 aa, synthetic construct
RGDGHKL

SEQ ID NO: 4204 - protein, 7 aa, synthetic construct
RGDGHNF

SEQ ID NO: 4205 - protein, 7 aa, synthetic construct
RGDGNKA

SEQ ID NO: 4206 - protein, 7 aa, synthetic construct
RGDGNRF

SEQ ID NO: 4207 - protein, 7 aa, synthetic construct
RGDGQTS

SEQ ID NO: 4208 - protein, 7 aa, synthetic construct
RGDGRRF

SEQ ID NO: 4209 - protein, 7 aa, synthetic construct
RGDGTSK

SEQ ID NO: 4210 - protein, 7 aa, synthetic construct
RGDHAFT

SEQ ID NO: 4211 - protein, 7 aa, synthetic construct
RGDHAHT

SEQ ID NO: 4212 - protein, 7 aa, synthetic construct
RGDHENK

SEQ ID NO: 4213 - protein, 7 aa, synthetic construct
RGDHGER

SEQ ID NO: 4214 - protein, 7 aa, synthetic construct
RGDHGGS

SEQ ID NO: 4215 - protein, 7 aa, synthetic construct
RGDHGHE

SEQ ID NO: 4216 - protein, 7 aa, synthetic construct
RGDHGNS

SEQ ID NO: 4217 - protein, 7 aa, synthetic construct
RGDHGTN

SEQ ID NO: 4218 - protein, 7 aa, synthetic construct
RGDHKTN

SEQ ID NO: 4219 - protein, 7 aa, synthetic construct
RGDHLGT

SEQ ID NO: 4220 - protein, 7 aa, synthetic construct
RGDHRDK

SEQ ID NO: 4221 - protein, 7 aa, synthetic construct
RGDHRGL

SEQ ID NO: 4222 - protein, 7 aa, synthetic construct
RGDHVQL

SEQ ID NO: 4223 - protein, 7 aa, synthetic construct
RGDIAFV

SEQ ID NO: 4224 - protein, 7 aa, synthetic construct
RGDIFHL

SEQ ID NO: 4225 - protein, 7 aa, synthetic construct
RGDIFRL

SEQ ID NO: 4226 - protein, 7 aa, synthetic construct
RGDIGKV

SEQ ID NO: 4227 - protein, 7 aa, synthetic construct
RGDIGLK

SEQ ID NO: 4228 - protein, 7 aa, synthetic construct
RGDANKI

SEQ ID NO: 4229 - protein, 7 aa, synthetic construct
RGDANKV

SEQ ID NO: 4230 - protein, 7 aa, synthetic construct
RGDIHSK

SEQ ID NO: 4231 - protein, 7 aa, synthetic construct
RGDIHST

SEQ ID NO: 4232 - protein, 7 aa, synthetic construct
RGDIKEK

SEQ ID NO: 4233 - protein, 7 aa, synthetic construct
RGDILHH

SEQ ID NO: 4234 - protein, 7 aa, synthetic construct
RGDILRI

SEQ ID NO: 4235 - protein, 7 aa, synthetic construct
RGDILVT

SEQ ID NO: 4236 - protein, 7 aa, synthetic construct
RGDIRGT

SEQ ID NO: 4237 - protein, 7 aa, synthetic construct
RGDIRNF

SEQ ID NO: 4238 - protein, 7 aa, synthetic construct
RGDIRNK

SEQ ID NO: 4239 - protein, 7 aa, synthetic construct
RGDISRH

SEQ ID NO: 4240 - protein, 7 aa, synthetic construct
RGDITGF

SEQ ID NO: 4241 - protein, 7 aa, synthetic construct
RGDITKR

SEQ ID NO: 4242 - protein, 7 aa, synthetic construct
RGDKAFQ

SEQ ID NO: 4243 - protein, 7 aa, synthetic construct
RGDKAHT

SEQ ID NO: 4244 - protein, 7 aa, synthetic construct
RGDKESL

SEQ ID NO: 4245 - protein, 7 aa, synthetic construct
RGDKGDG

SEQ ID NO: 4246 - protein, 7 aa, synthetic construct
RGDKHRR

SEQ ID NO: 4247 - protein, 7 aa, synthetic construct
RGDKHSQ

SEQ ID NO: 4248 - protein, 7 aa, synthetic construct
RGDKKGK

SEQ ID NO: 4249 - protein, 7 aa, synthetic construct
RGDKKVQ

SEQ ID NO: 4250 - protein, 7 aa, synthetic construct
RGDKNKV

SEQ ID NO: 4251 - protein, 7 aa, synthetic construct
RGDKQNI

SEQ ID NO: 4252 - protein, 7 aa, synthetic construct
RGDKRSE

SEQ ID NO: 4253 - protein, 7 aa, synthetic construct
RGDKVFR

SEQ ID NO: 4254 - protein, 7 aa, synthetic construct
RGDLDHI

SEQ ID NO: 4255 - protein, 7 aa, synthetic construct
RGDLFHV

SEQ ID NO: 4256 - protein, 7 aa, synthetic construct
RGDLGTQ

SEQ ID NO: 4257 - protein, 7 aa, synthetic construct
RGDLHNI

SEQ ID NO: 4258 - protein, 7 aa, synthetic construct
RGDLHRE

SEQ ID NO: 4259 - protein, 7 aa, synthetic construct
RGDASNR

SEQ ID NO: 4260 - protein, 7 aa, synthetic construct
RGDLKQS

SEQ ID NO: 4261 - protein, 7 aa, synthetic construct
RGDATGR

SEQ ID NO: 4262 - protein, 7 aa, synthetic construct
RGDNRFN

SEQ ID NO: 4263 - protein, 7 aa, synthetic construct
RGDNRGL

SEQ ID NO: 4264 - protein, 7 aa, synthetic construct
RGDNRQL

SEQ ID NO: 4265 - protein, 7 aa, synthetic construct
RGDQAAI

SEQ ID NO: 4266 - protein, 7 aa, synthetic construct
RGDQAFR

SEQ ID NO: 4267 - protein, 7 aa, synthetic construct
RGDQGNN

SEQ ID NO: 4268 - protein, 7 aa, synthetic construct
RGDQHAI

SEQ ID NO: 4269 - protein, 7 aa, synthetic construct
RGDQHGV

SEQ ID NO: 4270 - protein, 7 aa, synthetic construct
RGDQIGR

SEQ ID NO: 4271 - protein, 7 aa, synthetic construct
RGDQKSS

SEQ ID NO: 4272 - protein, 7 aa, synthetic construct
RGDQLKV

SEQ ID NO: 4273 - protein, 7 aa, synthetic construct
RGDQLRN

SEQ ID NO: 4274 - protein, 7 aa, synthetic construct
RGDQVNL

SEQ ID NO: 4275 - protein, 7 aa, synthetic construct
RGDRAGS

SEQ ID NO: 4276 - protein, 7 aa, synthetic construct
RGDRGEI

SEQ ID NO: 4277 - protein, 7 aa, synthetic construct
RGDRGFT

SEQ ID NO: 4278 - protein, 7 aa, synthetic construct
RGDRGHV

SEQ ID NO: 4279 - protein, 7 aa, synthetic construct
RGDRGKG

SEQ ID NO: 4280 - protein, 7 aa, synthetic construct
RGDRINK

SEQ ID NO: 4281 - protein, 7 aa, synthetic construct
RGDRKAF

SEQ ID NO: 4282 - protein, 7 aa, synthetic construct
RGDRKEV

SEQ ID NO: 4283 - protein, 7 aa, synthetic construct
RGDRKHL

SEQ ID NO: 4284 - protein, 7 aa, synthetic construct
RGDRKII

SEQ ID NO: 4285 - protein, 7 aa, synthetic construct
RGDRKIV

SEQ ID NO: 4286 - protein, 7 aa, synthetic construct
RGDRLKL

SEQ ID NO: 4287 - protein, 7 aa, synthetic construct
RGDRNDI

SEQ ID NO: 4288 - protein, 7 aa, synthetic construct
RGDRQAQ

SEQ ID NO: 4289 - protein, 7 aa, synthetic construct
RGDRQTS

SEQ ID NO: 4290 - protein, 7 aa, synthetic construct
RGDRRNE

SEQ ID NO: 4291 - protein, 7 aa, synthetic construct
RGDRRTL

SEQ ID NO: 4292 - protein, 7 aa, synthetic construct
RGDRSGD

SEQ ID NO: 4293 - protein, 7 aa, synthetic construct
RGDRTEI

SEQ ID NO: 4294 - protein, 7 aa, synthetic construct
RGDRVHT

SEQ ID NO: 4295 - protein, 7 aa, synthetic construct
RGDSDKL

SEQ ID NO: 4296 - protein, 7 aa, synthetic construct
RGDSGIN

SEQ ID NO: 4297 - protein, 7 aa, synthetic construct
RGDSHKT

SEQ ID NO: 4298 - protein, 7 aa, synthetic construct
RGDSKFF

SEQ ID NO: 4299 - protein, 7 aa, synthetic construct
RGDSKSL

SEQ ID NO: 4300 - protein, 7 aa, synthetic construct
RGDSQNF

SEQ ID NO: 4301 - protein, 7 aa, synthetic construct
RGDSREK

SEQ ID NO: 4302 - protein, 7 aa, synthetic construct
RGDSRSF

SEQ ID NO: 4303 - protein, 7 aa, synthetic construct
RGDTHFL

SEQ ID NO: 4304 - protein, 7 aa, synthetic construct
RGDTLHI

SEQ ID NO: 4305 - protein, 7 aa, synthetic construct
RGDTLVI

SEQ ID NO: 4306 - protein, 7 aa, synthetic construct
RGDTSTR

SEQ ID NO: 4307 - protein, 7 aa, synthetic construct
RGDVFKL

SEQ ID NO: 4308 - protein, 7 aa, synthetic construct
RGDVKSA

SEQ ID NO: 4309 - protein, 7 aa, synthetic construct
RGDVLVI

SEQ ID NO: 4310 - protein, 7 aa, synthetic construct
RGDVQFH

SEQ ID NO: 4311 - protein, 7 aa, synthetic construct
RGDVQHT

SEQ ID NO: 4312 - protein, 7 aa, synthetic construct
RGDVRHI

SEQ ID NO: 4313 - protein, 7 aa, synthetic construct
RGDVSQH

SEQ ID NO: 4314 - protein, 7 aa, synthetic construct
RGDEGFV

SEQ ID NO: 4315 - protein, 7 aa, synthetic construct
RGDFFHQ

SEQ ID NO: 4316 - protein, 7 aa, synthetic construct
RGDFFRL

SEQ ID NO: 4317 - protein, 7 aa, synthetic construct
RGDFFVN

SEQ ID NO: 4318 - protein, 7 aa, synthetic construct
RGDFGFR

SEQ ID NO: 4319 - protein, 7 aa, synthetic construct
RGDFHNE

SEQ ID NO: 4320 - protein, 7 aa, synthetic construct
RGDAAAR

SEQ ID NO: 4321 - protein, 7 aa, synthetic construct
RGDFLKL

SEQ ID NO: 4322 - protein, 7 aa, synthetic construct
RGDFQRV

SEQ ID NO: 4323 - protein, 7 aa, synthetic construct
RGDFRHF

SEQ ID NO: 4324 - protein, 7 aa, synthetic construct
RGDAHNN

SEQ ID NO: 4325 - protein, 7 aa, synthetic construct
RGDFTHV

SEQ ID NO: 4326 - protein, 7 aa, synthetic construct
RGDFTKQ

SEQ ID NO: 4327 - protein, 7 aa, synthetic construct
RGDFVSQ

SEQ ID NO: 4328 - protein, 7 aa, synthetic construct
RGDGIIR

SEQ ID NO: 4329 - protein, 7 aa, synthetic construct
RGDGKKS

SEQ ID NO: 4330 - protein, 7 aa, synthetic construct
RGDGNKD

SEQ ID NO: 4331 - protein, 7 aa, synthetic construct
RGDGQKI

SEQ ID NO: 4332 - protein, 7 aa, synthetic construct
RGDGQNV

SEQ ID NO: 4333 - protein, 7 aa, synthetic construct
RGDAKDR

SEQ ID NO: 4334 - protein, 7 aa, synthetic construct
RGDGRFI

SEQ ID NO: 4335 - protein, 7 aa, synthetic construct
RGDGRSF

SEQ ID NO: 4336 - protein, 7 aa, synthetic construct
RGDGRVV

SEQ ID NO: 4337 - protein, 7 aa, synthetic construct
RGDGSVL

SEQ ID NO: 4338 - protein, 7 aa, synthetic construct
RGDAARF

SEQ ID NO: 4339 - protein, 7 aa, synthetic construct
RGDHAQK

SEQ ID NO: 4340 - protein, 7 aa, synthetic construct
RGDAKRF

SEQ ID NO: 4341 - protein, 7 aa, synthetic construct
RGDHGRF

SEQ ID NO: 4342 - protein, 7 aa, synthetic construct
RGDHGSV

SEQ ID NO: 4343 - protein, 7 aa, synthetic construct
RGDHIHK

SEQ ID NO: 4344 - protein, 7 aa, synthetic construct
RGDHISL

SEQ ID NO: 4345 - protein, 7 aa, synthetic construct
RGDHNER

SEQ ID NO: 4346 - protein, 7 aa, synthetic construct
RGDHQFF

SEQ ID NO: 4347 - protein, 7 aa, synthetic construct
RGDHSFI

SEQ ID NO: 4348 - protein, 7 aa, synthetic construct
RGDHSNI

SEQ ID NO: 4349 - protein, 7 aa, synthetic construct
RGDHTKQ

SEQ ID NO: 4350 - protein, 7 aa, synthetic construct
RGDHVRK

SEQ ID NO: 4351 - protein, 7 aa, synthetic construct
RGDHVRV

SEQ ID NO: 4352 - protein, 7 aa, synthetic construct
RGDIASR

SEQ ID NO: 4353 - protein, 7 aa, synthetic construct
RGDIGGN

SEQ ID NO: 4354 - protein, 7 aa, synthetic construct
RGDIKKF

SEQ ID NO: 4355 - protein, 7 aa, synthetic construct
RGDILTG

SEQ ID NO: 4356 - protein, 7 aa, synthetic construct
RGDIREI

SEQ ID NO: 4357 - protein, 7 aa, synthetic construct
RGDIRTN

SEQ ID NO: 4358 - protein, 7 aa, synthetic construct
RGDISAR

SEQ ID NO: 4359 - protein, 7 aa, synthetic construct
RGDKEGQ

SEQ ID NO: 4360 - protein, 7 aa, synthetic construct
RGDKEGR

SEQ ID NO: 4361 - protein, 7 aa, synthetic construct
RGDKFNI

SEQ ID NO: 4362 - protein, 7 aa, synthetic construct
RGDKGGN

SEQ ID NO: 4363 - protein, 7 aa, synthetic construct
RGDKLKQ

SEQ ID NO: 4364 - protein, 7 aa, synthetic construct
RGDKVKL

SEQ ID NO: 4365 - protein, 7 aa, synthetic construct
RGDASGK

SEQ ID NO: 4366 - protein, 7 aa, synthetic construct
RGDLGNA

SEQ ID NO: 4367 - protein, 7 aa, synthetic construct
RGDLHQQ

SEQ ID NO: 4368 - protein, 7 aa, synthetic construct
RGDLKEE

SEQ ID NO: 4369 - protein, 7 aa, synthetic construct
RGDLNRR

SEQ ID NO: 4370 - protein, 7 aa, synthetic construct
RGDLQRN

SEQ ID NO: 4371 - protein, 7 aa, synthetic construct
RGDLRFD

SEQ ID NO: 4372 - protein, 7 aa, synthetic construct
RGDLRGT

SEQ ID NO: 4373 - protein, 7 aa, synthetic construct
RGDNEFK

SEQ ID NO: 4374 - protein, 7 aa, synthetic construct
RGDATRF

SEQ ID NO: 4375 - protein, 7 aa, synthetic construct
RGDNRRV

SEQ ID NO: 4376 - protein, 7 aa, synthetic construct
RGDNRVI

SEQ ID NO: 4377 - protein, 7 aa, synthetic construct
RGDNSGK

SEQ ID NO: 4378 - protein, 7 aa, synthetic construct
RGDNTGF

SEQ ID NO: 4379 - protein, 7 aa, synthetic construct
RGDNTHI

SEQ ID NO: 4380 - protein, 7 aa, synthetic construct
RGDQGRS

SEQ ID NO: 4381 - protein, 7 aa, synthetic construct
RGDQKND

SEQ ID NO: 4382 - protein, 7 aa, synthetic construct
RGDQLAV

SEQ ID NO: 4383 - protein, 7 aa, synthetic construct
RGDQLTS

SEQ ID NO: 4384 - protein, 7 aa, synthetic construct
RGDQQGR

SEQ ID NO: 4385 - protein, 7 aa, synthetic construct
RGDQSAH

SEQ ID NO: 4386 - protein, 7 aa, synthetic construct
RGDQSRA

SEQ ID NO: 4387 - protein, 7 aa, synthetic construct
RGDRDIR

SEQ ID NO: 4388 - protein, 7 aa, synthetic construct
RGDRFQV

SEQ ID NO: 4389 - protein, 7 aa, synthetic construct
RGDRIAL

SEQ ID NO: 4390 - protein, 7 aa, synthetic construct
RGDRKDV

SEQ ID NO: 4391 - protein, 7 aa, synthetic construct
RGDRQDG

SEQ ID NO: 4392 - protein, 7 aa, synthetic construct
RGDRQVL

SEQ ID NO: 4393 - protein, 7 aa, synthetic construct
RGDRRNI

SEQ ID NO: 4394 - protein, 7 aa, synthetic construct
RGDRRSN

SEQ ID NO: 4395 - protein, 7 aa, synthetic construct
RGDRVHF

SEQ ID NO: 4396 - protein, 7 aa, synthetic construct
RGDRVSF

SEQ ID NO: 4397 - protein, 7 aa, synthetic construct
RGDSGNQ

SEQ ID NO: 4398 - protein, 7 aa, synthetic construct
RGDSKHL

SEQ ID NO: 4399 - protein, 7 aa, synthetic construct
RGDSLTV

SEQ ID NO: 4400 - protein, 7 aa, synthetic construct
RGDSQTL

SEQ ID NO: 4401 - protein, 7 aa, synthetic construct
RGDSRHQ

SEQ ID NO: 4402 - protein, 7 aa, synthetic construct
RGDSSRN

SEQ ID NO: 4403 - protein, 7 aa, synthetic construct
RGDSVDI

SEQ ID NO: 4404 - protein, 7 aa, synthetic construct
RGDTGKR

SEQ ID NO: 4405 - protein, 7 aa, synthetic construct
RGDTHHI

SEQ ID NO: 4406 - protein, 7 aa, synthetic construct
RGDTKFS

SEQ ID NO: 4407 - protein, 7 aa, synthetic construct
RGDTRDI

SEQ ID NO: 4408 - protein, 7 aa, synthetic construct
RGDTVSS

SEQ ID NO: 4409 - protein, 7 aa, synthetic construct
RGDVAQK

SEQ ID NO: 4410 - protein, 7 aa, synthetic construct
RGDVFRL

SEQ ID NO: 4411 - protein, 7 aa, synthetic construct
RGDVHQQ

SEQ ID NO: 4412 - protein, 7 aa, synthetic construct
RGDVRVR

SEQ ID NO: 4413 - protein, 7 aa, synthetic construct
RGDVSNI

SEQ ID NO: 4414 - protein, 7 aa, synthetic construct
RGDAGHT

SEQ ID NO: 4415 - protein, 7 aa, synthetic construct
RGDFGRQ

SEQ ID NO: 4416 - protein, 7 aa, synthetic construct
RGDFHEN

SEQ ID NO: 4417 - protein, 7 aa, synthetic construct
RGDFHFS

SEQ ID NO: 4418 - protein, 7 aa, synthetic construct
RGDFHKT

SEQ ID NO: 4419 - protein, 7 aa, synthetic construct
RGDFHTN

SEQ ID NO: 4420 - protein, 7 aa, synthetic construct
RGDFIRV

SEQ ID NO: 4421 - protein, 7 aa, synthetic construct
RGDFLGL

SEQ ID NO: 4422 - protein, 7 aa, synthetic construct
RGDFSVR

SEQ ID NO: 4423 - protein, 7 aa, synthetic construct
RGDFSVT

SEQ ID NO: 4424 - protein, 7 aa, synthetic construct
RGDFVNI

SEQ ID NO: 4425 - protein, 7 aa, synthetic construct
RGDGARN

SEQ ID NO: 4426 - protein, 7 aa, synthetic construct
RGDGDKL

SEQ ID NO: 4427 - protein, 7 aa, synthetic construct
RGDGFKL

SEQ ID NO: 4428 - protein, 7 aa, synthetic construct
RGDGFVV

SEQ ID NO: 4429 - protein, 7 aa, synthetic construct
RGDGIEH

SEQ ID NO: 4430 - protein, 7 aa, synthetic construct
RGDGIGV

SEQ ID NO: 4431 - protein, 7 aa, synthetic construct
RGDGLVV

SEQ ID NO: 4432 - protein, 7 aa, synthetic construct
RGDGQFV

SEQ ID NO: 4433 - protein, 7 aa, synthetic construct
RGDGRAV

SEQ ID NO: 4434 - protein, 7 aa, synthetic construct
RGDGRFV

SEQ ID NO: 4435 - protein, 7 aa, synthetic construct
RGDGSIF

SEQ ID NO: 4436 - protein, 7 aa, synthetic construct
RGDHGGI

SEQ ID NO: 4437 - protein, 7 aa, synthetic construct
RGDHKRV

SEQ ID NO: 4438 - protein, 7 aa, synthetic construct
RGDHLKL

SEQ ID NO: 4439 - protein, 7 aa, synthetic construct
RGDHNKK

SEQ ID NO: 4440 - protein, 7 aa, synthetic construct
RGDHQFV

SEQ ID NO: 4441 - protein, 7 aa, synthetic construct
RGDAAST

SEQ ID NO: 4442 - protein, 7 aa, synthetic construct
RGDHRKI

SEQ ID NO: 4443 - protein, 7 aa, synthetic construct
RGDHRSQ

SEQ ID NO: 4444 - protein, 7 aa, synthetic construct
RGDHSRI

SEQ ID NO: 4445 - protein, 7 aa, synthetic construct
RGDIAKF

SEQ ID NO: 4446 - protein, 7 aa, synthetic construct
RGDIAVI

SEQ ID NO: 4447 - protein, 7 aa, synthetic construct
RGDIDVK

SEQ ID NO: 4448 - protein, 7 aa, synthetic construct
RGDIHIV

SEQ ID NO: 4449 - protein, 7 aa, synthetic construct
RGDIKVR

SEQ ID NO: 4450 - protein, 7 aa, synthetic construct
RGDIQGF

SEQ ID NO: 4451 - protein, 7 aa, synthetic construct
RGDIRST

SEQ ID NO: 4452 - protein, 7 aa, synthetic construct
RGDISQA

SEQ ID NO: 4453 - protein, 7 aa, synthetic construct
RGDITSR

SEQ ID NO: 4454 - protein, 7 aa, synthetic construct
RGDKAHI

SEQ ID NO: 4455 - protein, 7 aa, synthetic construct
RGDKFIK

SEQ ID NO: 4456 - protein, 7 aa, synthetic construct
RGDKGTQ

SEQ ID NO: 4457 - protein, 7 aa, synthetic construct
RGDKIFN

SEQ ID NO: 4458 - protein, 7 aa, synthetic construct
RGDKKTR

SEQ ID NO: 4459 - protein, 7 aa, synthetic construct
RGDKNAL

SEQ ID NO: 4460 - protein, 7 aa, synthetic construct
RGDKNEF

SEQ ID NO: 4461 - protein, 7 aa, synthetic construct
RGDKNFS

SEQ ID NO: 4462 - protein, 7 aa, synthetic construct
RGDKQSR

SEQ ID NO: 4463 - protein, 7 aa, synthetic construct
RGDKRGH

SEQ ID NO: 4464 - protein, 7 aa, synthetic construct
RGDKSTQ

SEQ ID NO: 4465 - protein, 7 aa, synthetic construct
RGDKTRL

SEQ ID NO: 4466 - protein, 7 aa, synthetic construct
RGDKVKI

SEQ ID NO: 4467 - protein, 7 aa, synthetic construct
RGDKVLI

SEQ ID NO: 4468 - protein, 7 aa, synthetic construct
RGDKVSR

SEQ ID NO: 4469 - protein, 7 aa, synthetic construct
RGDLEKD

SEQ ID NO: 4470 - protein, 7 aa, synthetic construct
RGDLGFV

SEQ ID NO: 4471 - protein, 7 aa, synthetic construct
RGDLIAT

SEQ ID NO: 4472 - protein, 7 aa, synthetic construct
RGDLITS

SEQ ID NO: 4473 - protein, 7 aa, synthetic construct
RGDASRN

SEQ ID NO: 4474 - protein, 7 aa, synthetic construct
RGDLLTS

SEQ ID NO: 4475 - protein, 7 aa, synthetic construct
RGDLQGR

SEQ ID NO: 4476 - protein, 7 aa, synthetic construct
RGDLSLL

SEQ ID NO: 4477 - protein, 7 aa, synthetic construct
RGDLTGR

SEQ ID NO: 4478 - protein, 7 aa, synthetic construct
RGDLVQQ

SEQ ID NO: 4479 - protein, 7 aa, synthetic construct
RGDAVHT

SEQ ID NO: 4480 - protein, 7 aa, synthetic construct
RGDQAHS

SEQ ID NO: 4481 - protein, 7 aa, synthetic construct
RGDQGRV

SEQ ID NO: 4482 - protein, 7 aa, synthetic construct
RGDQGTS

SEQ ID NO: 4483 - protein, 7 aa, synthetic construct
RGDQHGI

SEQ ID NO: 4484 - protein, 7 aa, synthetic construct
RGDQKNN

SEQ ID NO: 4485 - protein, 7 aa, synthetic construct
RGDQKRF

SEQ ID NO: 4486 - protein, 7 aa, synthetic construct
RGDQKVI

SEQ ID NO: 4487 - protein, 7 aa, synthetic construct
RGDQLFV

SEQ ID NO: 4488 - protein, 7 aa, synthetic construct
RGDQQHV

SEQ ID NO: 4489 - protein, 7 aa, synthetic construct
RGDQTVR

SEQ ID NO: 4490 - protein, 7 aa, synthetic construct
RGDQVAQ

SEQ ID NO: 4491 - protein, 7 aa, synthetic construct
RGDQVFK

SEQ ID NO: 4492 - protein, 7 aa, synthetic construct
RGDRDHQ

SEQ ID NO: 4493 - protein, 7 aa, synthetic construct
RGDRDVK

SEQ ID NO: 4494 - protein, 7 aa, synthetic construct
RGDREFL

SEQ ID NO: 4495 - protein, 7 aa, synthetic construct
RGDREKN

SEQ ID NO: 4496 - protein, 7 aa, synthetic construct
RGDRFFF

SEQ ID NO: 4497 - protein, 7 aa, synthetic construct
RGDRGFL

SEQ ID NO: 4498 - protein, 7 aa, synthetic construct
RGDRGLT

SEQ ID NO: 4499 - protein, 7 aa, synthetic construct
RGDRGSK

SEQ ID NO: 4500 - protein, 7 aa, synthetic construct
RGDRKTA

SEQ ID NO: 4501 - protein, 7 aa, synthetic construct
RGDRLGH

SEQ ID NO: 4502 - protein, 7 aa, synthetic construct
RGDRLTT

SEQ ID NO: 4503 - protein, 7 aa, synthetic construct
RGDRNDF

SEQ ID NO: 4504 - protein, 7 aa, synthetic construct
RGDRNHE

SEQ ID NO: 4505 - protein, 7 aa, synthetic construct
RGDRNLN

SEQ ID NO: 4506 - protein, 7 aa, synthetic construct
RGDRQGG

SEQ ID NO: 4507 - protein, 7 aa, synthetic construct
RGDRQTL

SEQ ID NO: 4508 - protein, 7 aa, synthetic construct
RGDRRNS

SEQ ID NO: 4509 - protein, 7 aa, synthetic construct
RGDRSDS

SEQ ID NO: 4510 - protein, 7 aa, synthetic construct
RGDRSTE

SEQ ID NO: 4511 - protein, 7 aa, synthetic construct
RGDSAKF

SEQ ID NO: 4512 - protein, 7 aa, synthetic construct
RGDSFKA

SEQ ID NO: 4513 - protein, 7 aa, synthetic construct
RGDSFKF

SEQ ID NO: 4514 - protein, 7 aa, synthetic construct
RGDSGFA

SEQ ID NO: 4515 - protein, 7 aa, synthetic construct
RGDSHNF

SEQ ID NO: 4516 - protein, 7 aa, synthetic construct
RGDSIAV

SEQ ID NO: 4517 - protein, 7 aa, synthetic construct
RGDSIRV

SEQ ID NO: 4518 - protein, 7 aa, synthetic construct
RGDSKAV

SEQ ID NO: 4519 - protein, 7 aa, synthetic construct
RGDSNQI

SEQ ID NO: 4520 - protein, 7 aa, synthetic construct
RGDSQKS

SEQ ID NO: 4521 - protein, 7 aa, synthetic construct
RGDSRRS

SEQ ID NO: 4522 - protein, 7 aa, synthetic construct
RGDSSAI

SEQ ID NO: 4523 - protein, 7 aa, synthetic construct
RGDSTRL

SEQ ID NO: 4524 - protein, 7 aa, synthetic construct
RGDSVFH

SEQ ID NO: 4525 - protein, 7 aa, synthetic construct
RGDTSSR

SEQ ID NO: 4526 - protein, 7 aa, synthetic construct
RGDTTNF

SEQ ID NO: 4527 - protein, 7 aa, synthetic construct
RGDVGLK

SEQ ID NO: 4528 - protein, 7 aa, synthetic construct
RGDVHRV

SEQ ID NO: 4529 - protein, 7 aa, synthetic construct
RGDVKVN

SEQ ID NO: 4530 - protein, 7 aa, synthetic construct
RGDVLKH

SEQ ID NO: 4531 - protein, 7 aa, synthetic construct
RGDVQAS

SEQ ID NO: 4532 - protein, 7 aa, synthetic construct
RGDVQGH

SEQ ID NO: 4533 - protein, 7 aa, synthetic construct
RGDVRIL

SEQ ID NO: 4534 - protein, 7 aa, synthetic construct
RGDVRQQ

SEQ ID NO: 4535 - protein, 7 aa, synthetic construct
RGDVRRE

SEQ ID NO: 4536 - protein, 7 aa, synthetic construct
RGDVSSS

SEQ ID NO: 4537 - protein, 7 aa, synthetic construct
RGDVTSQ

SEQ ID NO: 4538 - protein, 7 aa, synthetic construct
RGDVVVL

SEQ ID NO: 4539 - protein, 7 aa, synthetic construct
RGDEVVH

SEQ ID NO: 4540 - protein, 7 aa, synthetic construct
RGDFAKL

SEQ ID NO: 4541 - protein, 7 aa, synthetic construct
RGDFAVT

SEQ ID NO: 4542 - protein, 7 aa, synthetic construct
RGDFING

SEQ ID NO: 4543 - protein, 7 aa, synthetic construct
RGDFISI

SEQ ID NO: 4544 - protein, 7 aa, synthetic construct
RGDFISR

SEQ ID NO: 4545 - protein, 7 aa, synthetic construct
RGDFKNN

SEQ ID NO: 4546 - protein, 7 aa, synthetic construct
RGDFLSR

SEQ ID NO: 4547 - protein, 7 aa, synthetic construct
RGDFNVF

SEQ ID NO: 4548 - protein, 7 aa, synthetic construct
RGDFRHS

SEQ ID NO: 4549 - protein, 7 aa, synthetic construct
RGDFSAQ

SEQ ID NO: 4550 - protein, 7 aa, synthetic construct
RGDFVFG

SEQ ID NO: 4551 - protein, 7 aa, synthetic construct
RGDGDSF

SEQ ID NO: 4552 - protein, 7 aa, synthetic construct
RGDGEDR

SEQ ID NO: 4553 - protein, 7 aa, synthetic construct
RGDGGFQ

SEQ ID NO: 4554 - protein, 7 aa, synthetic construct
RGDGGHV

SEQ ID NO: 4555 - protein, 7 aa, synthetic construct
RGDGGKK

SEQ ID NO: 4556 - protein, 7 aa, synthetic construct
RGDGHAF

SEQ ID NO: 4557 - protein, 7 aa, synthetic construct
RGDGKHV

SEQ ID NO: 4558 - protein, 7 aa, synthetic construct
RGDGRTV

SEQ ID NO: 4559 - protein, 7 aa, synthetic construct
RGDGSFN

SEQ ID NO: 4560 - protein, 7 aa, synthetic construct
RGDGSQK

SEQ ID NO: 4561 - protein, 7 aa, synthetic construct
RGDHAFR

SEQ ID NO: 4562 - protein, 7 aa, synthetic construct
RGDHINF

SEQ ID NO: 4563 - protein, 7 aa, synthetic construct
RGDHKDL

SEQ ID NO: 4564 - protein, 7 aa, synthetic construct
RGDHREL

SEQ ID NO: 4565 - protein, 7 aa, synthetic construct
RGDHRFK

SEQ ID NO: 4566 - protein, 7 aa, synthetic construct
RGDHTGF

SEQ ID NO: 4567 - protein, 7 aa, synthetic construct
RGDIHNT

SEQ ID NO: 4568 - protein, 7 aa, synthetic construct
RGDIHQQ

SEQ ID NO: 4569 - protein, 7 aa, synthetic construct
RGDIKSV

SEQ ID NO: 4570 - protein, 7 aa, synthetic construct
RGDISLI

SEQ ID NO: 4571 - protein, 7 aa, synthetic construct
RGDITFK

SEQ ID NO: 4572 - protein, 7 aa, synthetic construct
RGDITRR

SEQ ID NO: 4573 - protein, 7 aa, synthetic construct
RGDITVI

SEQ ID NO: 4574 - protein, 7 aa, synthetic construct
RGDKAKG

SEQ ID NO: 4575 - protein, 7 aa, synthetic construct
RGDKDGQ

SEQ ID NO: 4576 - protein, 7 aa, synthetic construct
RGDKHQK

SEQ ID NO: 4577 - protein, 7 aa, synthetic construct
RGDKKSN

SEQ ID NO: 4578 - protein, 7 aa, synthetic construct
RGDKLAL

SEQ ID NO: 4579 - protein, 7 aa, synthetic construct
RGDKLRH

SEQ ID NO: 4580 - protein, 7 aa, synthetic construct
RGDKNQI

SEQ ID NO: 4581 - protein, 7 aa, synthetic construct
RGDKNTT

SEQ ID NO: 4582 - protein, 7 aa, synthetic construct
RGDKQNK

SEQ ID NO: 4583 - protein, 7 aa, synthetic construct
RGDKRFN

SEQ ID NO: 4584 - protein, 7 aa, synthetic construct
RGDKRNA

SEQ ID NO: 4585 - protein, 7 aa, synthetic construct
RGDKSFI

SEQ ID NO: 4586 - protein, 7 aa, synthetic construct
RGDKSHA

SEQ ID NO: 4587 - protein, 7 aa, synthetic construct
RGDKVQR

SEQ ID NO: 4588 - protein, 7 aa, synthetic construct
RGDASGL

SEQ ID NO: 4589 - protein, 7 aa, synthetic construct
RGDLGGT

SEQ ID NO: 4590 - protein, 7 aa, synthetic construct
RGDLHHK

SEQ ID NO: 4591 - protein, 7 aa, synthetic construct
RGDLHHV

SEQ ID NO: 4592 - protein, 7 aa, synthetic construct
RGDLIKR

SEQ ID NO: 4593 - protein, 7 aa, synthetic construct
RGDLNNR

SEQ ID NO: 4594 - protein, 7 aa, synthetic construct
RGDLRGI

SEQ ID NO: 4595 - protein, 7 aa, synthetic construct
RGDLSHT

SEQ ID NO: 4596 - protein, 7 aa, synthetic construct
RGDLVHT

SEQ ID NO: 4597 - protein, 7 aa, synthetic construct
RGDLVNQ

SEQ ID NO: 4598 - protein, 7 aa, synthetic construct
RGDNAKV

SEQ ID NO: 4599 - protein, 7 aa, synthetic construct
RGDNKGA

SEQ ID NO: 4600 - protein, 7 aa, synthetic construct
RGDNLRV

SEQ ID NO: 4601 - protein, 7 aa, synthetic construct
RGDNNRN

SEQ ID NO: 4602 - protein, 7 aa, synthetic construct
RGDNSHF

SEQ ID NO: 4603 - protein, 7 aa, synthetic construct
RGDNSRT

SEQ ID NO: 4604 - protein, 7 aa, synthetic construct
RGDQGHI

SEQ ID NO: 4605 - protein, 7 aa, synthetic construct
RGDQHAV

SEQ ID NO: 4606 - protein, 7 aa, synthetic construct
RGDQHTI

SEQ ID NO: 4607 - protein, 7 aa, synthetic construct
RGDDAQQ

SEQ ID NO: 4608 - protein, 7 aa, synthetic construct
RGDQKIQ

SEQ ID NO: 4609 - protein, 7 aa, synthetic construct
RGDQRRK

SEQ ID NO: 4610 - protein, 7 aa, synthetic construct
RGDRAFI

SEQ ID NO: 4611 - protein, 7 aa, synthetic construct
RGDREHL

SEQ ID NO: 4612 - protein, 7 aa, synthetic construct
RGDRGEK

SEQ ID NO: 4613 - protein, 7 aa, synthetic construct
RGDRGLN

SEQ ID NO: 4614 - protein, 7 aa, synthetic construct
RGDRGLS

SEQ ID NO: 4615 - protein, 7 aa, synthetic construct
RGDRHIR

SEQ ID NO: 4616 - protein, 7 aa, synthetic construct
RGDRIEF

SEQ ID NO: 4617 - protein, 7 aa, synthetic construct
RGDRIKE

SEQ ID NO: 4618 - protein, 7 aa, synthetic construct
RGDRKGL

SEQ ID NO: 4619 - protein, 7 aa, synthetic construct
RGDRKNF

SEQ ID NO: 4620 - protein, 7 aa, synthetic construct
RGDRLAQ

SEQ ID NO: 4621 - protein, 7 aa, synthetic construct
RGDRLGN

SEQ ID NO: 4622 - protein, 7 aa, synthetic construct
RGDRLHQ

SEQ ID NO: 4623 - protein, 7 aa, synthetic construct
RGDRLTK

SEQ ID NO: 4624 - protein, 7 aa, synthetic construct
RGDRQAF

SEQ ID NO: 4625 - protein, 7 aa, synthetic construct
RGDRQAL

SEQ ID NO: 4626 - protein, 7 aa, synthetic construct
RGDRREL

SEQ ID NO: 4627 - protein, 7 aa, synthetic construct
RGDRRIE

SEQ ID NO: 4628 - protein, 7 aa, synthetic construct
RGDRRVT

SEQ ID NO: 4629 - protein, 7 aa, synthetic construct
RGDRSAH

SEQ ID NO: 4630 - protein, 7 aa, synthetic construct
RGDRSEN

SEQ ID NO: 4631 - protein, 7 aa, synthetic construct
RGDRSIT

SEQ ID NO: 4632 - protein, 7 aa, synthetic construct
RGDRTEK

SEQ ID NO: 4633 - protein, 7 aa, synthetic construct
RGDRVEI

SEQ ID NO: 4634 - protein, 7 aa, synthetic construct
RGDRVNQ

SEQ ID NO: 4635 - protein, 7 aa, synthetic construct
RGDSHKF

SEQ ID NO: 4636 - protein, 7 aa, synthetic construct
RGDSHKK

SEQ ID NO: 4637 - protein, 7 aa, synthetic construct
RGDSHQF

SEQ ID NO: 4638 - protein, 7 aa, synthetic construct
RGDSKHV

SEQ ID NO: 4639 - protein, 7 aa, synthetic construct
RGDSVKF

SEQ ID NO: 4640 - protein, 7 aa, synthetic construct
RGDSVKV

SEQ ID NO: 4641 - protein, 7 aa, synthetic construct
RGDDGLS

SEQ ID NO: 4642 - protein, 7 aa, synthetic construct
RGDDGRK

SEQ ID NO: 4643 - protein, 7 aa, synthetic construct
RGDTKKV

SEQ ID NO: 4644 - protein, 7 aa, synthetic construct
RGDTLFV

SEQ ID NO: 4645 - protein, 7 aa, synthetic construct
RGDVGKK

SEQ ID NO: 4646 - protein, 7 aa, synthetic construct
RGDVHGK

SEQ ID NO: 4647 - protein, 7 aa, synthetic construct
RGDVKHL

SEQ ID NO: 4648 - protein, 7 aa, synthetic construct
RGDVLFN

SEQ ID NO: 4649 - protein, 7 aa, synthetic construct
RGDVLRI

SEQ ID NO: 4650 - protein, 7 aa, synthetic construct
RGDVNKF

SEQ ID NO: 4651 - protein, 7 aa, synthetic construct
RGDVNLK

SEQ ID NO: 4652 - protein, 7 aa, synthetic construct
RGDVQLQ

SEQ ID NO: 4653 - protein, 7 aa, synthetic construct
RGDVRGK

SEQ ID NO: 4654 - protein, 7 aa, synthetic construct
RGDVRKI

SEQ ID NO: 4655 - protein, 7 aa, synthetic construct
RGDDLIK

SEQ ID NO: 4656 - protein, 7 aa, synthetic construct
RGDFDHF

SEQ ID NO: 4657 - protein, 7 aa, synthetic construct
RGDFGGS

SEQ ID NO: 4658 - protein, 7 aa, synthetic construct
RGDFHRT

SEQ ID NO: 4659 - protein, 7 aa, synthetic construct
RGDFIGV

SEQ ID NO: 4660 - protein, 7 aa, synthetic construct
RGDFKFS

SEQ ID NO: 4661 - protein, 7 aa, synthetic construct
RGDFKTF

SEQ ID NO: 4662 - protein, 7 aa, synthetic construct
RGDFRRK

SEQ ID NO: 4663 - protein, 7 aa, synthetic construct
RGDFRTT

SEQ ID NO: 4664 - protein, 7 aa, synthetic construct
RGDFSLI

SEQ ID NO: 4665 - protein, 7 aa, synthetic construct
RGDFSSS

SEQ ID NO: 4666 - protein, 7 aa, synthetic construct
RGDFSTV

SEQ ID NO: 4667 - protein, 7 aa, synthetic construct
RGDFTFQ

SEQ ID NO: 4668 - protein, 7 aa, synthetic construct
RGDFVHS

SEQ ID NO: 4669 - protein, 7 aa, synthetic construct
RGDGAKL

SEQ ID NO: 4670 - protein, 7 aa, synthetic construct
RGDGFQK

SEQ ID NO: 4671 - protein, 7 aa, synthetic construct
RGDGKKA

SEQ ID NO: 4672 - protein, 7 aa, synthetic construct
RGDGQRI

SEQ ID NO: 4673 - protein, 7 aa, synthetic construct
RGDGQSI

SEQ ID NO: 4674 - protein, 7 aa, synthetic construct
RGDGRFF

SEQ ID NO: 4675 - protein, 7 aa, synthetic construct
RGDGSNS

SEQ ID NO: 4676 - protein, 7 aa, synthetic construct
RGDAKTI

SEQ ID NO: 4677 - protein, 7 aa, synthetic construct
RGDHHRN

SEQ ID NO: 4678 - protein, 7 aa, synthetic construct
RGDHKNT

SEQ ID NO: 4679 - protein, 7 aa, synthetic construct
RGDHKTL

SEQ ID NO: 4680 - protein, 7 aa, synthetic construct
RGDHQSV

SEQ ID NO: 4681 - protein, 7 aa, synthetic construct
RGDHSVI

SEQ ID NO: 4682 - protein, 7 aa, synthetic construct
RGDHTHA

SEQ ID NO: 4683 - protein, 7 aa, synthetic construct
RGDHTRV

SEQ ID NO: 4684 - protein, 7 aa, synthetic construct
RGDIGKK

SEQ ID NO: 4685 - protein, 7 aa, synthetic construct
RGDIGLN

SEQ ID NO: 4686 - protein, 7 aa, synthetic construct
RGDIHSH

SEQ ID NO: 4687 - protein, 7 aa, synthetic construct
RGDILNR

SEQ ID NO: 4688 - protein, 7 aa, synthetic construct
RGDILSG

SEQ ID NO: 4689 - protein, 7 aa, synthetic construct
RGDANTR

SEQ ID NO: 4690 - protein, 7 aa, synthetic construct
RGDIRDA

SEQ ID NO: 4691 - protein, 7 aa, synthetic construct
RGDISAH

SEQ ID NO: 4692 - protein, 7 aa, synthetic construct
RGDISKI

SEQ ID NO: 4693 - protein, 7 aa, synthetic construct
RGDKADK

SEQ ID NO: 4694 - protein, 7 aa, synthetic construct
RGDKETR

SEQ ID NO: 4695 - protein, 7 aa, synthetic construct
RGDKEVR

SEQ ID NO: 4696 - protein, 7 aa, synthetic construct
RGDKFRI

SEQ ID NO: 4697 - protein, 7 aa, synthetic construct
RGDKKIV

SEQ ID NO: 4698 - protein, 7 aa, synthetic construct
RGDKKRI

SEQ ID NO: 4699 - protein, 7 aa, synthetic construct
RGDKLGD

SEQ ID NO: 4700 - protein, 7 aa, synthetic construct
RGDKNKI

SEQ ID NO: 4701 - protein, 7 aa, synthetic construct
RGDKQFV

SEQ ID NO: 4702 - protein, 7 aa, synthetic construct
RGDKSSF

SEQ ID NO: 4703 - protein, 7 aa, synthetic construct
RGDLAGQ

SEQ ID NO: 4704 - protein, 7 aa, synthetic construct
RGDLALT

SEQ ID NO: 4705 - protein, 7 aa, synthetic construct
RGDLANG

SEQ ID NO: 4706 - protein, 7 aa, synthetic construct
RGDLDHQ

SEQ ID NO: 4707 - protein, 7 aa, synthetic construct
RGDLEHS

SEQ ID NO: 4708 - protein, 7 aa, synthetic construct
RGDLKHT

SEQ ID NO: 4709 - protein, 7 aa, synthetic construct
RGDLKTQ

SEQ ID NO: 4710 - protein, 7 aa, synthetic construct
RGDLRQV

SEQ ID NO: 4711 - protein, 7 aa, synthetic construct
RGDLSHN

SEQ ID NO: 4712 - protein, 7 aa, synthetic construct
RGDNANR

SEQ ID NO: 4713 - protein, 7 aa, synthetic construct
RGDNARL

SEQ ID NO: 4714 - protein, 7 aa, synthetic construct
RGDNDLQ

SEQ ID NO: 4715 - protein, 7 aa, synthetic construct
RGDNKTV

SEQ ID NO: 4716 - protein, 7 aa, synthetic construct
RGDNSRL

SEQ ID NO: 4717 - protein, 7 aa, synthetic construct
RGDNSSV

SEQ ID NO: 4718 - protein, 7 aa, synthetic construct
RGDNTFL

SEQ ID NO: 4719 - protein, 7 aa, synthetic construct
RGDNVHI

SEQ ID NO: 4720 - protein, 7 aa, synthetic construct
RGDQAKF

SEQ ID NO: 4721 - protein, 7 aa, synthetic construct
RGDQART

SEQ ID NO: 4722 - protein, 7 aa, synthetic construct
RGDQDHV

SEQ ID NO: 4723 - protein, 7 aa, synthetic construct
RGDQERV

SEQ ID NO: 4724 - protein, 7 aa, synthetic construct
RGDQIKF

SEQ ID NO: 4725 - protein, 7 aa, synthetic construct
RGDQKKE

SEQ ID NO: 4726 - protein, 7 aa, synthetic construct
RGDQLEH

SEQ ID NO: 4727 - protein, 7 aa, synthetic construct
RGDQQHG

SEQ ID NO: 4728 - protein, 7 aa, synthetic construct
RGDQRSQ

SEQ ID NO: 4729 - protein, 7 aa, synthetic construct
RGDRAET

SEQ ID NO: 4730 - protein, 7 aa, synthetic construct
RGDRAGV

SEQ ID NO: 4731 - protein, 7 aa, synthetic construct
RGDRDQL

SEQ ID NO: 4732 - protein, 7 aa, synthetic construct
RGDREHF

SEQ ID NO: 4733 - protein, 7 aa, synthetic construct
RGDRETH

SEQ ID NO: 4734 - protein, 7 aa, synthetic construct
RGDRHFI

SEQ ID NO: 4735 - protein, 7 aa, synthetic construct
RGDRHGF

SEQ ID NO: 4736 - protein, 7 aa, synthetic construct
RGDRILT

SEQ ID NO: 4737 - protein, 7 aa, synthetic construct
RGDRKKH

SEQ ID NO: 4738 - protein, 7 aa, synthetic construct
RGDRLTR

SEQ ID NO: 4739 - protein, 7 aa, synthetic construct
RGDRNTS

SEQ ID NO: 4740 - protein, 7 aa, synthetic construct
RGDRQGK

SEQ ID NO: 4741 - protein, 7 aa, synthetic construct
RGDRRDN

SEQ ID NO: 4742 - protein, 7 aa, synthetic construct
RGDRSHT

SEQ ID NO: 4743 - protein, 7 aa, synthetic construct
RGDRSQH

SEQ ID NO: 4744 - protein, 7 aa, synthetic construct
RGDSDRI

SEQ ID NO: 4745 - protein, 7 aa, synthetic construct
RGDSKDK

SEQ ID NO: 4746 - protein, 7 aa, synthetic construct
RGDSKTS

SEQ ID NO: 4747 - protein, 7 aa, synthetic construct
RGDSRHI

SEQ ID NO: 4748 - protein, 7 aa, synthetic construct
RGDSTTF

SEQ ID NO: 4749 - protein, 7 aa, synthetic construct
RGDSVRN

SEQ ID NO: 4750 - protein, 7 aa, synthetic construct
RGDTARN

SEQ ID NO: 4751 - protein, 7 aa, synthetic construct
RGDTKTT

SEQ ID NO: 4752 - protein, 7 aa, synthetic construct
RGDTRNN

SEQ ID NO: 4753 - protein, 7 aa, synthetic construct
RGDTSLV

SEQ ID NO: 4754 - protein, 7 aa, synthetic construct
RGDTTGG

SEQ ID NO: 4755 - protein, 7 aa, synthetic construct
RGDTVKS

SEQ ID NO: 4756 - protein, 7 aa, synthetic construct
RGDVGQI

SEQ ID NO: 4757 - protein, 7 aa, synthetic construct
RGDVQNF

SEQ ID NO: 4758 - protein, 7 aa, synthetic construct
RGDVTRG

SEQ ID NO: 4759 - protein, 7 aa, synthetic construct
RGDDTHT

SEQ ID NO: 4760 - protein, 7 aa, synthetic construct
RGDEHFK

SEQ ID NO: 4761 - protein, 7 aa, synthetic construct
RGDFAAN

SEQ ID NO: 4762 - protein, 7 aa, synthetic construct
RGDFETV

SEQ ID NO: 4763 - protein, 7 aa, synthetic construct
RGDFFFR

SEQ ID NO: 4764 - protein, 7 aa, synthetic construct
RGDFFKN

SEQ ID NO: 4765 - protein, 7 aa, synthetic construct
RGDFHIF

SEQ ID NO: 4766 - protein, 7 aa, synthetic construct
RGDFLGA

SEQ ID NO: 4767 - protein, 7 aa, synthetic construct
RGDFNNH

SEQ ID NO: 4768 - protein, 7 aa, synthetic construct
RGDFRQE

SEQ ID NO: 4769 - protein, 7 aa, synthetic construct
RGDFVHG

SEQ ID NO: 4770 - protein, 7 aa, synthetic construct
RGDFVKV

SEQ ID NO: 4771 - protein, 7 aa, synthetic construct
RGDGFSG

SEQ ID NO: 4772 - protein, 7 aa, synthetic construct
RGDGGRF

SEQ ID NO: 4773 - protein, 7 aa, synthetic construct
RGDGNHS

SEQ ID NO: 4774 - protein, 7 aa, synthetic construct
RGDGNRE

SEQ ID NO: 4775 - protein, 7 aa, synthetic construct
RGDGRDN

SEQ ID NO: 4776 - protein, 7 aa, synthetic construct
RGDGRSQ

SEQ ID NO: 4777 - protein, 7 aa, synthetic construct
RGDGSSV

SEQ ID NO: 4778 - protein, 7 aa, synthetic construct
RGDHHKV

SEQ ID NO: 4779 - protein, 7 aa, synthetic construct
RGDHKNN

SEQ ID NO: 4780 - protein, 7 aa, synthetic construct
RGDHKTI

SEQ ID NO: 4781 - protein, 7 aa, synthetic construct
RGDHLET

SEQ ID NO: 4782 - protein, 7 aa, synthetic construct
RGDHNKA

SEQ ID NO: 4783 - protein, 7 aa, synthetic construct
RGDHSFT

SEQ ID NO: 4784 - protein, 7 aa, synthetic construct
RGDHVQR

SEQ ID NO: 4785 - protein, 7 aa, synthetic construct
RGDIFSL

SEQ ID NO: 4786 - protein, 7 aa, synthetic construct
RGDANKS

SEQ ID NO: 4787 - protein, 7 aa, synthetic construct
RGDIHGK

SEQ ID NO: 4788 - protein, 7 aa, synthetic construct
RGDIKGV

SEQ ID NO: 4789 - protein, 7 aa, synthetic construct
RGDIKIN

SEQ ID NO: 4790 - protein, 7 aa, synthetic construct
RGDILKI

SEQ ID NO: 4791 - protein, 7 aa, synthetic construct
RGDILVN

SEQ ID NO: 4792 - protein, 7 aa, synthetic construct
RGDIQKV

SEQ ID NO: 4793 - protein, 7 aa, synthetic construct
RGDIRIT

SEQ ID NO: 4794 - protein, 7 aa, synthetic construct
RGDAQEL

SEQ ID NO: 4795 - protein, 7 aa, synthetic construct
RGDISTA

SEQ ID NO: 4796 - protein, 7 aa, synthetic construct
RGDIVAL

SEQ ID NO: 4797 - protein, 7 aa, synthetic construct
RGDKGKV

SEQ ID NO: 4798 - protein, 7 aa, synthetic construct
RGDKHQF

SEQ ID NO: 4799 - protein, 7 aa, synthetic construct
RGDKKSL

SEQ ID NO: 4800 - protein, 7 aa, synthetic construct
RGDKNRK

SEQ ID NO: 4801 - protein, 7 aa, synthetic construct
RGDKQVT

SEQ ID NO: 4802 - protein, 7 aa, synthetic construct
RGDKRNQ

SEQ ID NO: 4803 - protein, 7 aa, synthetic construct
RGDKSFT

SEQ ID NO: 4804 - protein, 7 aa, synthetic construct
RGDKVVR

SEQ ID NO: 4805 - protein, 7 aa, synthetic construct
RGDLAKQ

SEQ ID NO: 4806 - protein, 7 aa, synthetic construct
RGDLANT

SEQ ID NO: 4807 - protein, 7 aa, synthetic construct
RGDLFLV

SEQ ID NO: 4808 - protein, 7 aa, synthetic construct
RGDLFQV

SEQ ID NO: 4809 - protein, 7 aa, synthetic construct
RGDLRKV

SEQ ID NO: 4810 - protein, 7 aa, synthetic construct
RGDLRLV

SEQ ID NO: 4811 - protein, 7 aa, synthetic construct
RGDLVNR

SEQ ID NO: 4812 - protein, 7 aa, synthetic construct
RGDNGRT

SEQ ID NO: 4813 - protein, 7 aa, synthetic construct
RGDNKFR

SEQ ID NO: 4814 - protein, 7 aa, synthetic construct
RGDNSNK

SEQ ID NO: 4815 - protein, 7 aa, synthetic construct
RGDNTNV

SEQ ID NO: 4816 - protein, 7 aa, synthetic construct
RGDQARS

SEQ ID NO: 4817 - protein, 7 aa, synthetic construct
RGDQKDV

SEQ ID NO: 4818 - protein, 7 aa, synthetic construct
RGDQKHA

SEQ ID NO: 4819 - protein, 7 aa, synthetic construct
RGDQLKI

SEQ ID NO: 4820 - protein, 7 aa, synthetic construct
RGDQNKA

SEQ ID NO: 4821 - protein, 7 aa, synthetic construct
RGDQNRQ

SEQ ID NO: 4822 - protein, 7 aa, synthetic construct
RGDQRGR

SEQ ID NO: 4823 - protein, 7 aa, synthetic construct
RGDQRRD

SEQ ID NO: 4824 - protein, 7 aa, synthetic construct
RGDQRSK

SEQ ID NO: 4825 - protein, 7 aa, synthetic construct
RGDQRTA

SEQ ID NO: 4826 - protein, 7 aa, synthetic construct
RGDQSKT

SEQ ID NO: 4827 - protein, 7 aa, synthetic construct
RGDQSQV

SEQ ID NO: 4828 - protein, 7 aa, synthetic construct
RGDQVTL

SEQ ID NO: 4829 - protein, 7 aa, synthetic construct
RGDQVTV

SEQ ID NO: 4830 - protein, 7 aa, synthetic construct
RGDRAGT

SEQ ID NO: 4831 - protein, 7 aa, synthetic construct
RGDRIAF

SEQ ID NO: 4832 - protein, 7 aa, synthetic construct
RGDRIAQ

SEQ ID NO: 4833 - protein, 7 aa, synthetic construct
RGDRIKV

SEQ ID NO: 4834 - protein, 7 aa, synthetic construct
RGDRKAI

SEQ ID NO: 4835 - protein, 7 aa, synthetic construct
RGDRLAE

SEQ ID NO: 4836 - protein, 7 aa, synthetic construct
RGDRLNL

SEQ ID NO: 4837 - protein, 7 aa, synthetic construct
RGDRTSE

SEQ ID NO: 4838 - protein, 7 aa, synthetic construct
RGDRVEH

SEQ ID NO: 4839 - protein, 7 aa, synthetic construct
RGDRVHV

SEQ ID NO: 4840 - protein, 7 aa, synthetic construct
RGDSANS

SEQ ID NO: 4841 - protein, 7 aa, synthetic construct
RGDSEGF

SEQ ID NO: 4842 - protein, 7 aa, synthetic construct
RGDSGGS

SEQ ID NO: 4843 - protein, 7 aa, synthetic construct
RGDSGHI

SEQ ID NO: 4844 - protein, 7 aa, synthetic construct
RGDSQII

SEQ ID NO: 4845 - protein, 7 aa, synthetic construct
RGDTKTK

SEQ ID NO: 4846 - protein, 7 aa, synthetic construct
RGDTNKH

SEQ ID NO: 4847 - protein, 7 aa, synthetic construct
RGDTQRL

SEQ ID NO: 4848 - protein, 7 aa, synthetic construct
RGDTRIL

SEQ ID NO: 4849 - protein, 7 aa, synthetic construct
RGDTVHI

SEQ ID NO: 4850 - protein, 7 aa, synthetic construct
RGDTVVH

SEQ ID NO: 4851 - protein, 7 aa, synthetic construct
RGDVAAF

SEQ ID NO: 4852 - protein, 7 aa, synthetic construct
RGDVAGK

SEQ ID NO: 4853 - protein, 7 aa, synthetic construct
RGDVHSF

SEQ ID NO: 4854 - protein, 7 aa, synthetic construct
RGDDINS

SEQ ID NO: 4855 - protein, 7 aa, synthetic construct
RGDVRGT

SEQ ID NO: 4856 - protein, 7 aa, synthetic construct
RGDVRIF

SEQ ID NO: 4857 - protein, 7 aa, synthetic construct
RGDVSGF

SEQ ID NO: 4858 - protein, 7 aa, synthetic construct
RGDVSKL

SEQ ID NO: 4859 - protein, 7 aa, synthetic construct
RGDVSSQ

SEQ ID NO: 4860 - protein, 7 aa, synthetic construct
RGDDVKF

SEQ ID NO: 4861 - protein, 7 aa, synthetic construct
RGDEGQS

SEQ ID NO: 4862 - protein, 7 aa, synthetic construct
RGDAAHV

SEQ ID NO: 4863 - protein, 7 aa, synthetic construct
RGDFEEK

SEQ ID NO: 4864 - protein, 7 aa, synthetic construct
RGDFFTS

SEQ ID NO: 4865 - protein, 7 aa, synthetic construct
RGDFGDN

SEQ ID NO: 4866 - protein, 7 aa, synthetic construct
RGDFGFK

SEQ ID NO: 4867 - protein, 7 aa, synthetic construct
RGDFHHR

SEQ ID NO: 4868 - protein, 7 aa, synthetic construct
RGDFHIL

SEQ ID NO: 4869 - protein, 7 aa, synthetic construct
RGDFHSR

SEQ ID NO: 4870 - protein, 7 aa, synthetic construct
RGDFLSV

SEQ ID NO: 4871 - protein, 7 aa, synthetic construct
RGDFNRR

SEQ ID NO: 4872 - protein, 7 aa, synthetic construct
RGDFQGK

SEQ ID NO: 4873 - protein, 7 aa, synthetic construct
RGDFRTK

SEQ ID NO: 4874 - protein, 7 aa, synthetic construct
RGDFSHD

SEQ ID NO: 4875 - protein, 7 aa, synthetic construct
RGDFSTT

SEQ ID NO: 4876 - protein, 7 aa, synthetic construct
RGDFTRS

SEQ ID NO: 4877 - protein, 7 aa, synthetic construct
RGDFVAT

SEQ ID NO: 4878 - protein, 7 aa, synthetic construct
RGDGASS

SEQ ID NO: 4879 - protein, 7 aa, synthetic construct
RGDGFRN

SEQ ID NO: 4880 - protein, 7 aa, synthetic construct
RGDGGGL

SEQ ID NO: 4881 - protein, 7 aa, synthetic construct
RGDGHDN

SEQ ID NO: 4882 - protein, 7 aa, synthetic construct
RGDGKVI

SEQ ID NO: 4883 - protein, 7 aa, synthetic construct
RGDGKVV

SEQ ID NO: 4884 - protein, 7 aa, synthetic construct
RGDGNAL

SEQ ID NO: 4885 - protein, 7 aa, Adeno-associated virus
RGDGQKN

SEQ ID NO: 4886 - protein, 7 aa, synthetic construct
RGDGRFR

SEQ ID NO: 4887 - protein, 7 aa, synthetic construct
RGDGRQI

SEQ ID NO: 4888 - protein, 7 aa, synthetic construct
RGDHAQF

SEQ ID NO: 4889 - protein, 7 aa, synthetic construct
RGDHARF

SEQ ID NO: 4890 - protein, 7 aa, synthetic construct
RGDHERV

SEQ ID NO: 4891 - protein, 7 aa, synthetic construct
RGDAKTL

SEQ ID NO: 4892 - protein, 7 aa, synthetic construct
RGDHGQV

SEQ ID NO: 4893 - protein, 7 aa, synthetic construct
RGDHNNT

SEQ ID NO: 4894 - protein, 7 aa, synthetic construct
RGDHQSI

SEQ ID NO: 4895 - protein, 7 aa, synthetic construct
RGDHRFT

SEQ ID NO: 4896 - protein, 7 aa, synthetic construct
RGDHSRG

SEQ ID NO: 4897 - protein, 7 aa, synthetic construct
RGDHVEL

SEQ ID NO: 4898 - protein, 7 aa, synthetic construct
RGDHVKE

SEQ ID NO: 4899 - protein, 7 aa, synthetic construct
RGDIEQR

SEQ ID NO: 4900 - protein, 7 aa, synthetic construct
RGDIFAV

SEQ ID NO: 4901 - protein, 7 aa, synthetic construct
RGDIHKF

SEQ ID NO: 4902 - protein, 7 aa, synthetic construct
RGDIQVI

SEQ ID NO: 4903 - protein, 7 aa, synthetic construct
RGDIRDS

SEQ ID NO: 4904 - protein, 7 aa, synthetic construct
RGDIRGK

SEQ ID NO: 4905 - protein, 7 aa, synthetic construct
RGDIRNH

SEQ ID NO: 4906 - protein, 7 aa, synthetic construct
RGDISHS

SEQ ID NO: 4907 - protein, 7 aa, synthetic construct
RGDISTF

SEQ ID NO: 4908 - protein, 7 aa, synthetic construct
RGDKFTI

SEQ ID NO: 4909 - protein, 7 aa, synthetic construct
RGDKGIR

SEQ ID NO: 4910 - protein, 7 aa, synthetic construct
RGDKHHI

SEQ ID NO: 4911 - protein, 7 aa, synthetic construct
RGDKIKK

SEQ ID NO: 4912 - protein, 7 aa, synthetic construct
RGDKKFA

SEQ ID NO: 4913 - protein, 7 aa, synthetic construct
RGDKKGH

SEQ ID NO: 4914 - protein, 7 aa, synthetic construct
RGDKKGN

SEQ ID NO: 4915 - protein, 7 aa, synthetic construct
RGDARFN

SEQ ID NO: 4916 - protein, 7 aa, synthetic construct
RGDKKVR

SEQ ID NO: 4917 - protein, 7 aa, synthetic construct
RGDKLST

SEQ ID NO: 4918 - protein, 7 aa, synthetic construct
RGDKNGL

SEQ ID NO: 4919 - protein, 7 aa, synthetic construct
RGDKNQV

SEQ ID NO: 4920 - protein, 7 aa, synthetic construct
RGDKRFI

SEQ ID NO: 4921 - protein, 7 aa, synthetic construct
RGDKRGI

SEQ ID NO: 4922 - protein, 7 aa, synthetic construct
RGDKRHI

SEQ ID NO: 4923 - protein, 7 aa, synthetic construct
RGDKRVK

SEQ ID NO: 4924 - protein, 7 aa, synthetic construct
RGDKSEQ

SEQ ID NO: 4925 - protein, 7 aa, synthetic construct
RGDKSGF

SEQ ID NO: 4926 - protein, 7 aa, synthetic construct
RGDKSSG

SEQ ID NO: 4927 - protein, 7 aa, synthetic construct
RGDKTKN

SEQ ID NO: 4928 - protein, 7 aa, synthetic construct
RGDKTVR

SEQ ID NO: 4929 - protein, 7 aa, synthetic construct
RGDLDVV

SEQ ID NO: 4930 - protein, 7 aa, synthetic construct
RGDLGIV

SEQ ID NO: 4931 - protein, 7 aa, synthetic construct
RGDLGRK

SEQ ID NO: 4932 - protein, 7 aa, synthetic construct
RGDLKGR

SEQ ID NO: 4933 - protein, 7 aa, synthetic construct
RGDLKTS

SEQ ID NO: 4934 - protein, 7 aa, synthetic construct
RGDLLGS

SEQ ID NO: 4935 - protein, 7 aa, synthetic construct
RGDLLSS

SEQ ID NO: 4936 - protein, 7 aa, synthetic construct
RGDLSAI

SEQ ID NO: 4937 - protein, 7 aa, synthetic construct
RGDLSSI

SEQ ID NO: 4938 - protein, 7 aa, synthetic construct
RGDLVKN

SEQ ID NO: 4939 - protein, 7 aa, synthetic construct
RGDNAQQ

SEQ ID NO: 4940 - protein, 7 aa, synthetic construct
RGDATSH

SEQ ID NO: 4941 - protein, 7 aa, synthetic construct
RGDNKHI

SEQ ID NO: 4942 - protein, 7 aa, synthetic construct
RGDNLKF

SEQ ID NO: 4943 - protein, 7 aa, synthetic construct
RGDNLNF

SEQ ID NO: 4944 - protein, 7 aa, synthetic construct
RGDNNKK

SEQ ID NO: 4945 - protein, 7 aa, synthetic construct
RGDNRHS

SEQ ID NO: 4946 - protein, 7 aa, synthetic construct
RGDNRNQ

SEQ ID NO: 4947 - protein, 7 aa, synthetic construct
RGDNRQH

SEQ ID NO: 4948 - protein, 7 aa, synthetic construct
RGDNTGR

SEQ ID NO: 4949 - protein, 7 aa, synthetic construct
RGDNTNR

SEQ ID NO: 4950 - protein, 7 aa, synthetic construct
RGDNTRQ

SEQ ID NO: 4951 - protein, 7 aa, synthetic construct
RGDQEAR

SEQ ID NO: 4952 - protein, 7 aa, synthetic construct
RGDQHKQ

SEQ ID NO: 4953 - protein, 7 aa, synthetic construct
RGDQKSF

SEQ ID NO: 4954 - protein, 7 aa, synthetic construct
RGDQQGH

SEQ ID NO: 4955 - protein, 7 aa, synthetic construct
RGDQTSH

SEQ ID NO: 4956 - protein, 7 aa, synthetic construct
RGDQVRF

SEQ ID NO: 4957 - protein, 7 aa, synthetic construct
RGDRANI

SEQ ID NO: 4958 - protein, 7 aa, synthetic construct
RGDRANT

SEQ ID NO: 4959 - protein, 7 aa, synthetic construct
RGDRAQF

SEQ ID NO: 4960 - protein, 7 aa, synthetic construct
RGDRFFT

SEQ ID NO: 4961 - protein, 7 aa, synthetic construct
RGDRHSS

SEQ ID NO: 4962 - protein, 7 aa, synthetic construct
RGDRISG

SEQ ID NO: 4963 - protein, 7 aa, synthetic construct
RGDRLSV

SEQ ID NO: 4964 - protein, 7 aa, synthetic construct
RGDRNQE

SEQ ID NO: 4965 - protein, 7 aa, synthetic construct
RGDRNVK

SEQ ID NO: 4966 - protein, 7 aa, synthetic construct
RGDRQQT

SEQ ID NO: 4967 - protein, 7 aa, synthetic construct
RGDRSSF

SEQ ID NO: 4968 - protein, 7 aa, synthetic construct
RGDRTDR

SEQ ID NO: 4969 - protein, 7 aa, synthetic construct
RGDSAVR

SEQ ID NO: 4970 - protein, 7 aa, synthetic construct
RGDSGNR

SEQ ID NO: 4971 - protein, 7 aa, synthetic construct
RGDSHKL

SEQ ID NO: 4972 - protein, 7 aa, synthetic construct
RGDSHQT

SEQ ID NO: 4973 - protein, 7 aa, synthetic construct
RGDSILR

SEQ ID NO: 4974 - protein, 7 aa, synthetic construct
RGDSLFS

SEQ ID NO: 4975 - protein, 7 aa, synthetic construct
RGDSLHN

SEQ ID NO: 4976 - protein, 7 aa, synthetic construct
RGDSNRL

SEQ ID NO: 4977 - protein, 7 aa, synthetic construct
RGDSQKF

SEQ ID NO: 4978 - protein, 7 aa, synthetic construct
RGDSRIF

SEQ ID NO: 4979 - protein, 7 aa, synthetic construct
RGDSSKF

SEQ ID NO: 4980 - protein, 7 aa, synthetic construct
RGDSSKH

SEQ ID NO: 4981 - protein, 7 aa, synthetic construct
RGDSTFT

SEQ ID NO: 4982 - protein, 7 aa, synthetic construct
RGDSVVH

SEQ ID NO: 4983 - protein, 7 aa, synthetic construct
RGDTGFN

SEQ ID NO: 4984 - protein, 7 aa, synthetic construct
RGDTLQF

SEQ ID NO: 4985 - protein, 7 aa, synthetic construct
RGDTLQS

SEQ ID NO: 4986 - protein, 7 aa, synthetic construct
RGDTSAL

SEQ ID NO: 4987 - protein, 7 aa, synthetic construct
RGDTSGG

SEQ ID NO: 4988 - protein, 7 aa, synthetic construct
RGDVHNQ

SEQ ID NO: 4989 - protein, 7 aa, synthetic construct
RGDDIQI

SEQ ID NO: 4990 - protein, 7 aa, synthetic construct
RGDVKSS

SEQ ID NO: 4991 - protein, 7 aa, synthetic construct
RGDVKTV

SEQ ID NO: 4992 - protein, 7 aa, synthetic construct
RGDVSGK

SEQ ID NO: 4993 - protein, 7 aa, synthetic construct
RGDVTHV

SEQ ID NO: 4994 - protein, 7 aa, synthetic construct
RGDDQNK

SEQ ID NO: 4995 - protein, 7 aa, synthetic construct
RGDFGRE

SEQ ID NO: 4996 - protein, 7 aa, synthetic construct
RGDFKDV

SEQ ID NO: 4997 - protein, 7 aa, synthetic construct
RGDAHGK

SEQ ID NO: 4998 - protein, 7 aa, synthetic construct
RGDFLGT

SEQ ID NO: 4999 - protein, 7 aa, synthetic construct
RGDFLHN

SEQ ID NO: 5000 - protein, 7 aa, synthetic construct
RGDFLRN

SEQ ID NO: 5001 - protein, 7 aa, synthetic construct
RGDFNFL

SEQ ID NO: 5002 - protein, 7 aa, synthetic construct
RGDFRIL

SEQ ID NO: 5003 - protein, 7 aa, synthetic construct
RGDFVIR

SEQ ID NO: 5004 - protein, 7 aa, synthetic construct
RGDGAKT

SEQ ID NO: 5005 - protein, 7 aa, synthetic construct
RGDGFRK

SEQ ID NO: 5006 - protein, 7 aa, synthetic construct
RGDGIKS

SEQ ID NO: 5007 - protein, 7 aa, synthetic construct
RGDGIRQ

SEQ ID NO: 5008 - protein, 7 aa, synthetic construct
RGDGVRR

SEQ ID NO: 5009 - protein, 7 aa, synthetic construct
RGDHAKN

SEQ ID NO: 5010 - protein, 7 aa, synthetic construct
RGDHDKR

SEQ ID NO: 5011 - protein, 7 aa, synthetic construct
RGDHGDG

SEQ ID NO: 5012 - protein, 7 aa, synthetic construct
RGDHGIL

SEQ ID NO: 5013 - protein, 7 aa, synthetic construct
RGDAARV

SEQ ID NO: 5014 - protein, 7 aa, synthetic construct
RGDHHQE

SEQ ID NO: 5015 - protein, 7 aa, synthetic construct
RGDHLGL

SEQ ID NO: 5016 - protein, 7 aa, synthetic construct
RGDHNKN

SEQ ID NO: 5017 - protein, 7 aa, synthetic construct
RGDHQHK

SEQ ID NO: 5018 - protein, 7 aa, synthetic construct
RGDHRST

SEQ ID NO: 5019 - protein, 7 aa, synthetic construct
RGDHSGG

SEQ ID NO: 5020 - protein, 7 aa, synthetic construct
RGDHSTV

SEQ ID NO: 5021 - protein, 7 aa, synthetic construct
RGDHTTR

SEQ ID NO: 5022 - protein, 7 aa, synthetic construct
RGDHVKR

SEQ ID NO: 5023 - protein, 7 aa, synthetic construct
RGDHVVI

SEQ ID NO: 5024 - protein, 7 aa, synthetic construct
RGDIAQT

SEQ ID NO: 5025 - protein, 7 aa, synthetic construct
RGDIATV

SEQ ID NO: 5026 - protein, 7 aa, synthetic construct
RGDIHGL

SEQ ID NO: 5027 - protein, 7 aa, synthetic construct
RGDIHHR

SEQ ID NO: 5028 - protein, 7 aa, synthetic construct
RGDIIRN

SEQ ID NO: 5029 - protein, 7 aa, synthetic construct
RGDIKFH

SEQ ID NO: 5030 - protein, 7 aa, synthetic construct
RGDIQHI

SEQ ID NO: 5031 - protein, 7 aa, synthetic construct
RGDIRHS

SEQ ID NO: 5032 - protein, 7 aa, synthetic construct
RGDISLH

SEQ ID NO: 5033 - protein, 7 aa, synthetic construct
RGDKGRT

SEQ ID NO: 5034 - protein, 7 aa, synthetic construct
RGDARKN

SEQ ID NO: 5035 - protein, 7 aa, synthetic construct
RGDKRGK

SEQ ID NO: 5036 - protein, 7 aa, synthetic construct
RGDKRTT

SEQ ID NO: 5037 - protein, 7 aa, synthetic construct
RGDKSTL

SEQ ID NO: 5038 - protein, 7 aa, synthetic construct
RGDKTGI

SEQ ID NO: 5039 - protein, 7 aa, synthetic construct
RGDKVFH

SEQ ID NO: 5040 - protein, 7 aa, synthetic construct
RGDLEGK

SEQ ID NO: 5041 - protein, 7 aa, synthetic construct
RGDASGV

SEQ ID NO: 5042 - protein, 7 aa, synthetic construct
RGDLIQT

SEQ ID NO: 5043 - protein, 7 aa, synthetic construct
RGDLIVF

SEQ ID NO: 5044 - protein, 7 aa, synthetic construct
RGDLKLI

SEQ ID NO: 5045 - protein, 7 aa, synthetic construct
RGDLKST

SEQ ID NO: 5046 - protein, 7 aa, synthetic construct
RGDLQRF

SEQ ID NO: 5047 - protein, 7 aa, synthetic construct
RGDLSIH

SEQ ID NO: 5048 - protein, 7 aa, synthetic construct
RGDLSLQ

SEQ ID NO: 5049 - protein, 7 aa, synthetic construct
RGDLSVQ

SEQ ID NO: 5050 - protein, 7 aa, synthetic construct
RGDNAGL

SEQ ID NO: 5051 - protein, 7 aa, synthetic construct
RGDNFKE

SEQ ID NO: 5052 - protein, 7 aa, synthetic construct
RGDNGNT

SEQ ID NO: 5053 - protein, 7 aa, synthetic construct
RGDNRHV

SEQ ID NO: 5054 - protein, 7 aa, synthetic construct
RGDQFHT

SEQ ID NO: 5055 - protein, 7 aa, synthetic construct
RGDQHDT

SEQ ID NO: 5056 - protein, 7 aa, synthetic construct
RGDQKES

SEQ ID NO: 5057 - protein, 7 aa, synthetic construct
RGDQKTQ

SEQ ID NO: 5058 - protein, 7 aa, synthetic construct
RGDQSSG

SEQ ID NO: 5059 - protein, 7 aa, synthetic construct
RGDQVSL

SEQ ID NO: 5060 - protein, 7 aa, synthetic construct
RGDRAGI

SEQ ID NO: 5061 - protein, 7 aa, synthetic construct
RGDRDHA

SEQ ID NO: 5062 - protein, 7 aa, synthetic construct
RGDRDKS

SEQ ID NO: 5063 - protein, 7 aa, synthetic construct
RGDRDTF

SEQ ID NO: 5064 - protein, 7 aa, synthetic construct
RGDREAT

SEQ ID NO: 5065 - protein, 7 aa, synthetic construct
RGDREGN

SEQ ID NO: 5066 - protein, 7 aa, synthetic construct
RGDRFFQ

SEQ ID NO: 5067 - protein, 7 aa, synthetic construct
RGDRFSL

SEQ ID NO: 5068 - protein, 7 aa, synthetic construct
RGDRGET

SEQ ID NO: 5069 - protein, 7 aa, synthetic construct
RGDRGKA

SEQ ID NO: 5070 - protein, 7 aa, synthetic construct
RGDRHDK

SEQ ID NO: 5071 - protein, 7 aa, synthetic construct
RGDRHVI

SEQ ID NO: 5072 - protein, 7 aa, synthetic construct
RGDRIRV

SEQ ID NO: 5073 - protein, 7 aa, synthetic construct
RGDRISF

SEQ ID NO: 5074 - protein, 7 aa, synthetic construct
RGDRITT

SEQ ID NO: 5075 - protein, 7 aa, synthetic construct
RGDRLTD

SEQ ID NO: 5076 - protein, 7 aa, synthetic construct
RGDRLVL

SEQ ID NO: 5077 - protein, 7 aa, synthetic construct
RGDRNLF

SEQ ID NO: 5078 - protein, 7 aa, synthetic construct
RGDRNNI

SEQ ID NO: 5079 - protein, 7 aa, synthetic construct
RGDRNQH

SEQ ID NO: 5080 - protein, 7 aa, synthetic construct
RGDRQAR

SEQ ID NO: 5081 - protein, 7 aa, synthetic construct
RGDRSHE

SEQ ID NO: 5082 - protein, 7 aa, synthetic construct
RGDRSKE

SEQ ID NO: 5083 - protein, 7 aa, synthetic construct
RGDRSRI

SEQ ID NO: 5084 - protein, 7 aa, synthetic construct
RGDRSSH

SEQ ID NO: 5085 - protein, 7 aa, synthetic construct
RGDRTVN

SEQ ID NO: 5086 - protein, 7 aa, synthetic construct
RGDSERK

SEQ ID NO: 5087 - protein, 7 aa, synthetic construct
RGDSGSN

SEQ ID NO: 5088 - protein, 7 aa, synthetic construct
RGDSKKG

SEQ ID NO: 5089 - protein, 7 aa, synthetic construct
RGDSSRL

SEQ ID NO: 5090 - protein, 7 aa, synthetic construct
RGDSSTN

SEQ ID NO: 5091 - protein, 7 aa, synthetic construct
RGDSTKI

SEQ ID NO: 5092 - protein, 7 aa, synthetic construct
RGDSVQV

SEQ ID NO: 5093 - protein, 7 aa, synthetic construct
RGDTIIR

SEQ ID NO: 5094 - protein, 7 aa, synthetic construct
RGDTKAN

SEQ ID NO: 5095 - protein, 7 aa, synthetic construct
RGDTKFH

SEQ ID NO: 5096 - protein, 7 aa, synthetic construct
RGDTKFT

SEQ ID NO: 5097 - protein, 7 aa, synthetic construct
RGDTKGL

SEQ ID NO: 5098 - protein, 7 aa, synthetic construct
RGDTRGN

SEQ ID NO: 5099 - protein, 7 aa, synthetic construct
RGDTRLI

SEQ ID NO: 5100 - protein, 7 aa, synthetic construct
RGDTSVV

SEQ ID NO: 5101 - protein, 7 aa, synthetic construct
RGDTVLI

SEQ ID NO: 5102 - protein, 7 aa, synthetic construct
RGDVEGF

SEQ ID NO: 5103 - protein, 7 aa, synthetic construct
RGDVHFT

SEQ ID NO: 5104 - protein, 7 aa, synthetic construct
RGDVHHL

SEQ ID NO: 5105 - protein, 7 aa, synthetic construct
RGDVKHQ

SEQ ID NO: 5106 - protein, 7 aa, synthetic construct
RGDVKIK

SEQ ID NO: 5107 - protein, 7 aa, synthetic construct
RGDVKVR

SEQ ID NO: 5108 - protein, 7 aa, synthetic construct
RGDVLRF

SEQ ID NO: 5109 - protein, 7 aa, synthetic construct
RGDVQHR

SEQ ID NO: 5110 - protein, 7 aa, synthetic construct
RGDVQRI

SEQ ID NO: 5111 - protein, 7 aa, synthetic construct
RGDVRFT

SEQ ID NO: 5112 - protein, 7 aa, synthetic construct
RGDVRKH

SEQ ID NO: 5113 - protein, 7 aa, synthetic construct
RGDVRSE

SEQ ID NO: 5114 - protein, 7 aa, synthetic construct
RGDVSHQ

SEQ ID NO: 5115 - protein, 7 aa, synthetic construct
RGDVSSI

SEQ ID NO: 5116 - protein, 7 aa, synthetic construct
RGDVSVT

SEQ ID NO: 5117 - protein, 7 aa, synthetic construct
RGDVTGS

SEQ ID NO: 5118 - protein, 7 aa, synthetic construct
RGDVVGK

SEQ ID NO: 5119 - protein, 7 aa, synthetic construct
RGDDTGE

SEQ ID NO: 5120 - protein, 7 aa, synthetic construct
RGDEAQI

SEQ ID NO: 5121 - protein, 7 aa, synthetic construct
RGDEGFK

SEQ ID NO: 5122 - protein, 7 aa, synthetic construct
RGDFAIK

SEQ ID NO: 5123 - protein, 7 aa, synthetic construct
RGDFARI

SEQ ID NO: 5124 - protein, 7 aa, synthetic construct
RGDFASG

SEQ ID NO: 5125 - protein, 7 aa, synthetic construct
RGDFEKV

SEQ ID NO: 5126 - protein, 7 aa, synthetic construct
RGDAGSK

SEQ ID NO: 5127 - protein, 7 aa, synthetic construct
RGDFFVG

SEQ ID NO: 5128 - protein, 7 aa, synthetic construct
RGDAAKH

SEQ ID NO: 5129 - protein, 7 aa, synthetic construct
RGDFGNR

SEQ ID NO: 5130 - protein, 7 aa, synthetic construct
RGDFIVT

SEQ ID NO: 5131 - protein, 7 aa, synthetic construct
RGDFKSI

SEQ ID NO: 5132 - protein, 7 aa, synthetic construct
RGDFLVV

SEQ ID NO: 5133 - protein, 7 aa, synthetic construct
RGDFQQK

SEQ ID NO: 5134 - protein, 7 aa, synthetic construct
RGDFRGK

SEQ ID NO: 5135 - protein, 7 aa, synthetic construct
RGDFSDK

SEQ ID NO: 5136 - protein, 7 aa, synthetic construct
RGDFSHT

SEQ ID NO: 5137 - protein, 7 aa, synthetic construct
RGDFSRE

SEQ ID NO: 5138 - protein, 7 aa, synthetic construct
RGDAHSQ

SEQ ID NO: 5139 - protein, 7 aa, synthetic construct
RGDFTRI

SEQ ID NO: 5140 - protein, 7 aa, synthetic construct
RGDGARF

SEQ ID NO: 5141 - protein, 7 aa, synthetic construct
RGDGETT

SEQ ID NO: 5142 - protein, 7 aa, synthetic construct
RGDGFHE

SEQ ID NO: 5143 - protein, 7 aa, synthetic construct
RGDGGIK

SEQ ID NO: 5144 - protein, 7 aa, synthetic construct
RGDGHRI

SEQ ID NO: 5145 - protein, 7 aa, synthetic construct
RGDGKHS

SEQ ID NO: 5146 - protein, 7 aa, synthetic construct
RGDGNTL

SEQ ID NO: 5147 - protein, 7 aa, synthetic construct
RGDGQEI

SEQ ID NO: 5148 - protein, 7 aa, synthetic construct
RGDGQTL

SEQ ID NO: 5149 - protein, 7 aa, synthetic construct
RGDGSQG

SEQ ID NO: 5150 - protein, 7 aa, synthetic construct
RGDHEKN

SEQ ID NO: 5151 - protein, 7 aa, synthetic construct
RGDHGKN

SEQ ID NO: 5152 - protein, 7 aa, synthetic construct
RGDHGSL

SEQ ID NO: 5153 - protein, 7 aa, synthetic construct
RGDALEN

SEQ ID NO: 5154 - protein, 7 aa, synthetic construct
RGDHTGG

SEQ ID NO: 5155 - protein, 7 aa, synthetic construct
RGDHTHQ

SEQ ID NO: 5156 - protein, 7 aa, synthetic construct
RGDIEFR

SEQ ID NO: 5157 - protein, 7 aa, synthetic construct
RGDAAVQ

SEQ ID NO: 5158 - protein, 7 aa, synthetic construct
RGDILGR

SEQ ID NO: 5159 - protein, 7 aa, synthetic construct
RGDIRGD

SEQ ID NO: 5160 - protein, 7 aa, synthetic construct
RGDIRNN

SEQ ID NO: 5161 - protein, 7 aa, synthetic construct
RGDISAQ

SEQ ID NO: 5162 - protein, 7 aa, synthetic construct
RGDAQGK

SEQ ID NO: 5163 - protein, 7 aa, synthetic construct
RGDKDGE

SEQ ID NO: 5164 - protein, 7 aa, synthetic construct
RGDKENR

SEQ ID NO: 5165 - protein, 7 aa, synthetic construct
RGDKESR

SEQ ID NO: 5166 - protein, 7 aa, synthetic construct
RGDKFIV

SEQ ID NO: 5167 - protein, 7 aa, synthetic construct
RGDKFKV

SEQ ID NO: 5168 - protein, 7 aa, synthetic construct
RGDKFQI

SEQ ID NO: 5169 - protein, 7 aa, synthetic construct
RGDKFQV

SEQ ID NO: 5170 - protein, 7 aa, synthetic construct
RGDKFRH

SEQ ID NO: 5171 - protein, 7 aa, synthetic construct
RGDKGQA

SEQ ID NO: 5172 - protein, 7 aa, synthetic construct
RGDKKHA

SEQ ID NO: 5173 - protein, 7 aa, synthetic construct
RGDKKTN

SEQ ID NO: 5174 - protein, 7 aa, synthetic construct
RGDKNQH

SEQ ID NO: 5175 - protein, 7 aa, synthetic construct
RGDKRDI

SEQ ID NO: 5176 - protein, 7 aa, synthetic construct
RGDKREN

SEQ ID NO: 5177 - protein, 7 aa, synthetic construct
RGDARQT

SEQ ID NO: 5178 - protein, 7 aa, synthetic construct
RGDKSLR

SEQ ID NO: 5179 - protein, 7 aa, synthetic construct
RGDKVLH

SEQ ID NO: 5180 - protein, 7 aa, synthetic construct
RGDLHNL

SEQ ID NO: 5181 - protein, 7 aa, synthetic construct
RGDASNI

SEQ ID NO: 5182 - protein, 7 aa, synthetic construct
RGDLIVT

SEQ ID NO: 5183 - protein, 7 aa, synthetic construct
RGDLKKH

SEQ ID NO: 5184 - protein, 7 aa, synthetic construct
RGDLKQR

SEQ ID NO: 5185 - protein, 7 aa, synthetic construct
RGDLLTT

SEQ ID NO: 5186 - protein, 7 aa, synthetic construct
RGDLRAV

SEQ ID NO: 5187 - protein, 7 aa, synthetic construct
RGDLRKA

SEQ ID NO: 5188 - protein, 7 aa, synthetic construct
RGDLSRN

SEQ ID NO: 5189 - protein, 7 aa, synthetic construct
RGDLVAT

SEQ ID NO: 5190 - protein, 7 aa, synthetic construct
RGDLVGG

SEQ ID NO: 5191 - protein, 7 aa, synthetic construct
RGDLVSI

SEQ ID NO: 5192 - protein, 7 aa, synthetic construct
RGDLVTS

SEQ ID NO: 5193 - protein, 7 aa, synthetic construct
RGDNDVH

SEQ ID NO: 5194 - protein, 7 aa, synthetic construct
RGDNGII

SEQ ID NO: 5195 - protein, 7 aa, synthetic construct
RGDNIRN

SEQ ID NO: 5196 - protein, 7 aa, synthetic construct
RGDNKNT

SEQ ID NO: 5197 - protein, 7 aa, synthetic construct
RGDNQNK

SEQ ID NO: 5198 - protein, 7 aa, synthetic construct
RGDNRSF

SEQ ID NO: 5199 - protein, 7 aa, synthetic construct
RGDNSGQ

SEQ ID NO: 5200 - protein, 7 aa, synthetic construct
RGDNVQK

SEQ ID NO: 5201 - protein, 7 aa, synthetic construct
RGDQIKK

SEQ ID NO: 5202 - protein, 7 aa, synthetic construct
RGDQKRV

SEQ ID NO: 5203 - protein, 7 aa, synthetic construct
RGDQLTV

SEQ ID NO: 5204 - protein, 7 aa, synthetic construct
RGDQRHV

SEQ ID NO: 5205 - protein, 7 aa, synthetic construct
RGDQRKT

SEQ ID NO: 5206 - protein, 7 aa, synthetic construct
RGDQSKF

SEQ ID NO: 5207 - protein, 7 aa, synthetic construct
RGDRAAN

SEQ ID NO: 5208 - protein, 7 aa, synthetic construct
RGDRDVV

SEQ ID NO: 5209 - protein, 7 aa, synthetic construct
RGDREGD

SEQ ID NO: 5210 - protein, 7 aa, synthetic construct
RGDRFSH

SEQ ID NO: 5211 - protein, 7 aa, synthetic construct
RGDRFSV

SEQ ID NO: 5212 - protein, 7 aa, synthetic construct
RGDRGDN

SEQ ID NO: 5213 - protein, 7 aa, synthetic construct
RGDRGKH

SEQ ID NO: 5214 - protein, 7 aa, synthetic construct
RGDRGTF

SEQ ID NO: 5215 - protein, 7 aa, synthetic construct
RGDRHVR

SEQ ID NO: 5216 - protein, 7 aa, synthetic construct
RGDRIHL

SEQ ID NO: 5217 - protein, 7 aa, synthetic construct
RGDRIVL

SEQ ID NO: 5218 - protein, 7 aa, synthetic construct
RGDRIVS

SEQ ID NO: 5219 - protein, 7 aa, synthetic construct
RGDRNTK

SEQ ID NO: 5220 - protein, 7 aa, synthetic construct
RGDRQGV

SEQ ID NO: 5221 - protein, 7 aa, synthetic construct
RGDRRHH

SEQ ID NO: 5222 - protein, 7 aa, synthetic construct
RGDRTGS

SEQ ID NO: 5223 - protein, 7 aa, synthetic construct
RGDRVAT

SEQ ID NO: 5224 - protein, 7 aa, synthetic construct
RGDRVGA

SEQ ID NO: 5225 - protein, 7 aa, synthetic construct
RGDSAFK

SEQ ID NO: 5226 - protein, 7 aa, synthetic construct
RGDSAKL

SEQ ID NO: 5227 - protein, 7 aa, synthetic construct
RGDSGKK

SEQ ID NO: 5228 - protein, 7 aa, synthetic construct
RGDSHFR

SEQ ID NO: 5229 - protein, 7 aa, synthetic construct
RGDSKDS

SEQ ID NO: 5230 - protein, 7 aa, synthetic construct
RGDSKNV

SEQ ID NO: 5231 - protein, 7 aa, synthetic construct
RGDSNQF

SEQ ID NO: 5232 - protein, 7 aa, synthetic construct
RGDSSGT

SEQ ID NO: 5233 - protein, 7 aa, synthetic construct
RGDSSHQ

SEQ ID NO: 5234 - protein, 7 aa, synthetic construct
RGDSVIL

SEQ ID NO: 5235 - protein, 7 aa, synthetic construct
RGDSVNH

SEQ ID NO: 5236 - protein, 7 aa, synthetic construct
RGDSVTS

SEQ ID NO: 5237 - protein, 7 aa, synthetic construct
RGDTGKL

SEQ ID NO: 5238 - protein, 7 aa, synthetic construct
RGDTHRS

SEQ ID NO: 5239 - protein, 7 aa, synthetic construct
RGDTIKI

SEQ ID NO: 5240 - protein, 7 aa, synthetic construct
RGDTKAG

SEQ ID NO: 5241 - protein, 7 aa, synthetic construct
RGDTKAK

SEQ ID NO: 5242 - protein, 7 aa, synthetic construct
RGDTRKT

SEQ ID NO: 5243 - protein, 7 aa, synthetic construct
RGDTVQK

SEQ ID NO: 5244 - protein, 7 aa, synthetic construct
RGDVDHK

SEQ ID NO: 5245 - protein, 7 aa, synthetic construct
RGDVESK

SEQ ID NO: 5246 - protein, 7 aa, synthetic construct
RGDVHLK

SEQ ID NO: 5247 - protein, 7 aa, synthetic construct
RGDVKEF

SEQ ID NO: 5248 - protein, 7 aa, synthetic construct
RGDVKNN

SEQ ID NO: 5249 - protein, 7 aa, synthetic construct
RGDVLSK

SEQ ID NO: 5250 - protein, 7 aa, synthetic construct
RGDVRFF

SEQ ID NO: 5251 - protein, 7 aa, synthetic construct
RGDVRFQ

SEQ ID NO: 5252 - protein, 7 aa, synthetic construct
RGDVSNV

SEQ ID NO: 5253 - protein, 7 aa, synthetic construct
RGDVVFQ

SEQ ID NO: 5254 - protein, 7 aa, synthetic construct
RGDVVGR

SEQ ID NO: 5255 - protein, 7 aa, synthetic construct
RGDVVSI

SEQ ID NO: 5256 - protein, 7 aa, synthetic construct
RGDAEKN

SEQ ID NO: 5257 - protein, 7 aa, synthetic construct
RGDENKI

SEQ ID NO: 5258 - protein, 7 aa, synthetic construct
RGDAAIR

SEQ ID NO: 5259 - protein, 7 aa, synthetic construct
RGDFAIT

SEQ ID NO: 5260 - protein, 7 aa, synthetic construct
RGDFANQ

SEQ ID NO: 5261 - protein, 7 aa, synthetic construct
RGDFATS

SEQ ID NO: 5262 - protein, 7 aa, synthetic construct
RGDFESH

SEQ ID NO: 5263 - protein, 7 aa, synthetic construct
RGDAGRV

SEQ ID NO: 5264 - protein, 7 aa, synthetic construct
RGDFFAQ

SEQ ID NO: 5265 - protein, 7 aa, synthetic construct
RGDFFHF

SEQ ID NO: 5266 - protein, 7 aa, synthetic construct
RGDFFVQ

SEQ ID NO: 5267 - protein, 7 aa, synthetic construct
RGDFGNQ

SEQ ID NO: 5268 - protein, 7 aa, synthetic construct
RGDFGVF

SEQ ID NO: 5269 - protein, 7 aa, synthetic construct
RGDFHNL

SEQ ID NO: 5270 - protein, 7 aa, synthetic construct
RGDFISN

SEQ ID NO: 5271 - protein, 7 aa, synthetic construct
RGDFKHI

SEQ ID NO: 5272 - protein, 7 aa, synthetic construct
RGDFNRV

SEQ ID NO: 5273 - protein, 7 aa, synthetic construct
RGDFRGV

SEQ ID NO: 5274 - protein, 7 aa, synthetic construct
RGDFRHV

SEQ ID NO: 5275 - protein, 7 aa, synthetic construct
RGDFSVH

SEQ ID NO: 5276 - protein, 7 aa, synthetic construct
RGDFTSG

SEQ ID NO: 5277 - protein, 7 aa, synthetic construct
RGDFTTH

SEQ ID NO: 5278 - protein, 7 aa, synthetic construct
RGDFVSV

SEQ ID NO: 5279 - protein, 7 aa, synthetic construct
RGDGASI

SEQ ID NO: 5280 - protein, 7 aa, synthetic construct
RGDGDHQ

SEQ ID NO: 5281 - protein, 7 aa, synthetic construct
RGDGGGF

SEQ ID NO: 5282 - protein, 7 aa, synthetic construct
RGDGHST

SEQ ID NO: 5283 - protein, 7 aa, synthetic construct
RGDGKEQ

SEQ ID NO: 5284 - protein, 7 aa, synthetic construct
RGDGKSH

SEQ ID NO: 5285 - protein, 7 aa, synthetic construct
RGDGNFI

SEQ ID NO: 5286 - protein, 7 aa, synthetic construct
RGDGNHL

SEQ ID NO: 5287 - protein, 7 aa, synthetic construct
RGDGNRN

SEQ ID NO: 5288 - protein, 7 aa, synthetic construct
RGDGNTS

SEQ ID NO: 5289 - protein, 7 aa, synthetic construct
RGDGQGA

SEQ ID NO: 5290 - protein, 7 aa, synthetic construct
RGDGQNI

SEQ ID NO: 5291 - protein, 7 aa, synthetic construct
RGDGRQQ

SEQ ID NO: 5292 - protein, 7 aa, synthetic construct
RGDGSSN

SEQ ID NO: 5293 - protein, 7 aa, synthetic construct
RGDGTDK

SEQ ID NO: 5294 - protein, 7 aa, synthetic construct
RGDHAAI

SEQ ID NO: 5295 - protein, 7 aa, synthetic construct
RGDHASI

SEQ ID NO: 5296 - protein, 7 aa, synthetic construct
RGDHDSK

SEQ ID NO: 5297 - protein, 7 aa, synthetic construct
RGDHEQR

SEQ ID NO: 5298 - protein, 7 aa, synthetic construct
RGDHERS

SEQ ID NO: 5299 - protein, 7 aa, synthetic construct
RGDHFQI

SEQ ID NO: 5300 - protein, 7 aa, synthetic construct
RGDHGQR

SEQ ID NO: 5301 - protein, 7 aa, synthetic construct
RGDHGVS

SEQ ID NO: 5302 - protein, 7 aa, synthetic construct
RGDHHKL

SEQ ID NO: 5303 - protein, 7 aa, synthetic construct
RGDAASK

SEQ ID NO: 5304 - protein, 7 aa, synthetic construct
RGDHRNT

SEQ ID NO: 5305 - protein, 7 aa, synthetic construct
RGDHSKD

SEQ ID NO: 5306 - protein, 7 aa, synthetic construct
RGDIART

SEQ ID NO: 5307 - protein, 7 aa, synthetic construct
RGDANKD

SEQ ID NO: 5308 - protein, 7 aa, synthetic construct
RGDIHNQ

SEQ ID NO: 5309 - protein, 7 aa, synthetic construct
RGDIHVS

SEQ ID NO: 5310 - protein, 7 aa, synthetic construct
RGDIKGS

SEQ ID NO: 5311 - protein, 7 aa, synthetic construct
RGDIKRV

SEQ ID NO: 5312 - protein, 7 aa, synthetic construct
RGDINKQ

SEQ ID NO: 5313 - protein, 7 aa, synthetic construct
RGDINNN

SEQ ID NO: 5314 - protein, 7 aa, synthetic construct
RGDIQGL

SEQ ID NO: 5315 - protein, 7 aa, synthetic construct
RGDISVK

SEQ ID NO: 5316 - protein, 7 aa, synthetic construct
RGDITTR

SEQ ID NO: 5317 - protein, 7 aa, synthetic construct
RGDAQNR

SEQ ID NO: 5318 - protein, 7 aa, synthetic construct
RGDKDNH

SEQ ID NO: 5319 - protein, 7 aa, synthetic construct
RGDKENQ

SEQ ID NO: 5320 - protein, 7 aa, synthetic construct
RGDARAL

SEQ ID NO: 5321 - protein, 7 aa, synthetic construct
RGDKIGF

SEQ ID NO: 5322 - protein, 7 aa, synthetic construct
RGDKIHI

SEQ ID NO: 5323 - protein, 7 aa, synthetic construct
RGDKINI

SEQ ID NO: 5324 - protein, 7 aa, synthetic construct
RGDKKSR

SEQ ID NO: 5325 - protein, 7 aa, synthetic construct
RGDKRGS

SEQ ID NO: 5326 - protein, 7 aa, synthetic construct
RGDARNV

SEQ ID NO: 5327 - protein, 7 aa, synthetic construct
RGDKSLV

SEQ ID NO: 5328 - protein, 7 aa, synthetic construct
RGDLGKD

SEQ ID NO: 5329 - protein, 7 aa, synthetic construct
RGDLHHN

SEQ ID NO: 5330 - protein, 7 aa, synthetic construct
RGDLHVS

SEQ ID NO: 5331 - protein, 7 aa, synthetic construct
RGDLKKA

SEQ ID NO: 5332 - protein, 7 aa, synthetic construct
RGDLLDG

SEQ ID NO: 5333 - protein, 7 aa, synthetic construct
RGDLLHR

SEQ ID NO: 5334 - protein, 7 aa, synthetic construct
RGDASVH

SEQ ID NO: 5335 - protein, 7 aa, synthetic construct
RGDLRRS

SEQ ID NO: 5336 - protein, 7 aa, synthetic construct
RGDLRVS

SEQ ID NO: 5337 - protein, 7 aa, synthetic construct
RGDADGR

SEQ ID NO: 5338 - protein, 7 aa, synthetic construct
RGDLTKN

SEQ ID NO: 5339 - protein, 7 aa, synthetic construct
RGDLVSE

SEQ ID NO: 5340 - protein, 7 aa, synthetic construct
RGDATNK

SEQ ID NO: 5341 - protein, 7 aa, synthetic construct
RGDNFGF

SEQ ID NO: 5342 - protein, 7 aa, synthetic construct
RGDNGIR

SEQ ID NO: 5343 - protein, 7 aa, synthetic construct
RGDNKGS

SEQ ID NO: 5344 - protein, 7 aa, synthetic construct
RGDNQER

SEQ ID NO: 5345 - protein, 7 aa, synthetic construct
RGDAVNV

SEQ ID NO: 5346 - protein, 7 aa, synthetic construct
RGDQAFH

SEQ ID NO: 5347 - protein, 7 aa, synthetic construct
RGDQAHH

SEQ ID NO: 5348 - protein, 7 aa, synthetic construct
RGDQHFR

SEQ ID NO: 5349 - protein, 7 aa, synthetic construct
RGDQHLQ

SEQ ID NO: 5350 - protein, 7 aa, synthetic construct
RGDQKFQ

SEQ ID NO: 5351 - protein, 7 aa, synthetic construct
RGDQKQH

SEQ ID NO: 5352 - protein, 7 aa, synthetic construct
RGDQVSS

SEQ ID NO: 5353 - protein, 7 aa, synthetic construct
RGDRADR

SEQ ID NO: 5354 - protein, 7 aa, synthetic construct
RGDRALI

SEQ ID NO: 5355 - protein, 7 aa, synthetic construct
RGDRGGQ

SEQ ID NO: 5356 - protein, 7 aa, synthetic construct
RGDRGVL

SEQ ID NO: 5357 - protein, 7 aa, synthetic construct
RGDRHFK

SEQ ID NO: 5358 - protein, 7 aa, synthetic construct
RGDRIGK

SEQ ID NO: 5359 - protein, 7 aa, synthetic construct
RGDRKFF

SEQ ID NO: 5360 - protein, 7 aa, synthetic construct
RGDRLKF

SEQ ID NO: 5361 - protein, 7 aa, synthetic construct
RGDRLKQ

SEQ ID NO: 5362 - protein, 7 aa, synthetic construct
RGDRLRI

SEQ ID NO: 5363 - protein, 7 aa, synthetic construct
RGDRRSL

SEQ ID NO: 5364 - protein, 7 aa, synthetic construct
RGDRSLF

SEQ ID NO: 5365 - protein, 7 aa, synthetic construct
RGDRSRL

SEQ ID NO: 5366 - protein, 7 aa, synthetic construct
RGDRTGE

SEQ ID NO: 5367 - protein, 7 aa, synthetic construct
RGDRVAQ

SEQ ID NO: 5368 - protein, 7 aa, synthetic construct
RGDRVRI

SEQ ID NO: 5369 - protein, 7 aa, synthetic construct
RGDRVSG

SEQ ID NO: 5370 - protein, 7 aa, synthetic construct
RGDSAQQ

SEQ ID NO: 5371 - protein, 7 aa, synthetic construct
RGDSDIR

SEQ ID NO: 5372 - protein, 7 aa, synthetic construct
RGDSGNI

SEQ ID NO: 5373 - protein, 7 aa, synthetic construct
RGDSHAK

SEQ ID NO: 5374 - protein, 7 aa, synthetic construct
RGDSKAL

SEQ ID NO: 5375 - protein, 7 aa, synthetic construct
RGDSVHV

SEQ ID NO: 5376 - protein, 7 aa, synthetic construct
RGDDGLN

SEQ ID NO: 5377 - protein, 7 aa, synthetic construct
RGDTGAQ

SEQ ID NO: 5378 - protein, 7 aa, synthetic construct
RGDTGLV

SEQ ID NO: 5379 - protein, 7 aa, synthetic construct
RGDTKFQ

SEQ ID NO: 5380 - protein, 7 aa, synthetic construct
RGDTKIL

SEQ ID NO: 5381 - protein, 7 aa, synthetic construct
RGDTLVV

SEQ ID NO: 5382 - protein, 7 aa, synthetic construct
RGDTSHI

SEQ ID NO: 5383 - protein, 7 aa, synthetic construct
RGDTTHL

SEQ ID NO: 5384 - protein, 7 aa, synthetic construct
RGDVAFK

SEQ ID NO: 5385 - protein, 7 aa, synthetic construct
RGDVASV

SEQ ID NO: 5386 - protein, 7 aa, synthetic construct
RGDVDTN

SEQ ID NO: 5387 - protein, 7 aa, synthetic construct
RGDVHKL

SEQ ID NO: 5388 - protein, 7 aa, synthetic construct
RGDVITH

SEQ ID NO: 5389 - protein, 7 aa, synthetic construct
RGDVKRH

SEQ ID NO: 5390 - protein, 7 aa, synthetic construct
RGDVNKL

SEQ ID NO: 5391 - protein, 7 aa, synthetic construct
RGDDIVK

SEQ ID NO: 5392 - protein, 7 aa, synthetic construct
RGDVQSR

SEQ ID NO: 5393 - protein, 7 aa, synthetic construct
RGDVSAH

SEQ ID NO: 5394 - protein, 7 aa, synthetic construct
RGDVSKN

SEQ ID NO: 5395 - protein, 7 aa, synthetic construct
RGDVVKT

SEQ ID NO: 5396 - protein, 7 aa, synthetic construct
RGDVVTL

SEQ ID NO: 5397 - protein, 7 aa, synthetic construct
RGDDSHS

SEQ ID NO: 5398 - protein, 7 aa, synthetic construct
RGDEHGR

SEQ ID NO: 5399 - protein, 7 aa, synthetic construct
RGDERFR

SEQ ID NO: 5400 - protein, 7 aa, synthetic construct
RGDFDAK

SEQ ID NO: 5401 - protein, 7 aa, synthetic construct
RGDFEKK

SEQ ID NO: 5402 - protein, 7 aa, synthetic construct
RGDFENQ

SEQ ID NO: 5403 - protein, 7 aa, synthetic construct
RGDFFKV

SEQ ID NO: 5404 - protein, 7 aa, synthetic construct
RGDFFRN

SEQ ID NO: 5405 - protein, 7 aa, synthetic construct
RGDFGHH

SEQ ID NO: 5406 - protein, 7 aa, synthetic construct
RGDAGVR

SEQ ID NO: 5407 - protein, 7 aa, synthetic construct
RGDFGVR

SEQ ID NO: 5408 - protein, 7 aa, synthetic construct
RGDFHNI

SEQ ID NO: 5409 - protein, 7 aa, synthetic construct
RGDFISK

SEQ ID NO: 5410 - protein, 7 aa, synthetic construct
RGDFIVV

SEQ ID NO: 5411 - protein, 7 aa, synthetic construct
RGDFKTL

SEQ ID NO: 5412 - protein, 7 aa, synthetic construct
RGDFRHL

SEQ ID NO: 5413 - protein, 7 aa, synthetic construct
RGDFRTH

SEQ ID NO: 5414 - protein, 7 aa, synthetic construct
RGDAHRV

SEQ ID NO: 5415 - protein, 7 aa, synthetic construct
RGDFTNI

SEQ ID NO: 5416 - protein, 7 aa, synthetic construct
RGDFTQR

SEQ ID NO: 5417 - protein, 7 aa, synthetic construct
RGDGGAA

SEQ ID NO: 5418 - protein, 7 aa, synthetic construct
RGDGHDV

SEQ ID NO: 5419 - protein, 7 aa, synthetic construct
RGDGKEK

SEQ ID NO: 5420 - protein, 7 aa, synthetic construct
RGDAKAI

SEQ ID NO: 5421 - protein, 7 aa, synthetic construct
RGDGQSQ

SEQ ID NO: 5422 - protein, 7 aa, synthetic construct
RGDGRKL

SEQ ID NO: 5423 - protein, 7 aa, synthetic construct
RGDGSAI

SEQ ID NO: 5424 - protein, 7 aa, synthetic construct
RGDGVVV

SEQ ID NO: 5425 - protein, 7 aa, synthetic construct
RGDHALL

SEQ ID NO: 5426 - protein, 7 aa, synthetic construct
RGDAARN

SEQ ID NO: 5427 - protein, 7 aa, synthetic construct
RGDHKHS

SEQ ID NO: 5428 - protein, 7 aa, synthetic construct
RGDHKRR

SEQ ID NO: 5429 - protein, 7 aa, synthetic construct
RGDALNL

SEQ ID NO: 5430 - protein, 7 aa, synthetic construct
RGDHRNS

SEQ ID NO: 5431 - protein, 7 aa, synthetic construct
RGDHRTN

SEQ ID NO: 5432 - protein, 7 aa, synthetic construct
RGDHTQK

SEQ ID NO: 5433 - protein, 7 aa, synthetic construct
RGDHVGQ

SEQ ID NO: 5434 - protein, 7 aa, synthetic construct
RGDIFRV

SEQ ID NO: 5435 - protein, 7 aa, synthetic construct
RGDANRV

SEQ ID NO: 5436 - protein, 7 aa, synthetic construct
RGDITVK

SEQ ID NO: 5437 - protein, 7 aa, synthetic construct
RGDKAGH

SEQ ID NO: 5438 - protein, 7 aa, synthetic construct
RGDKALV

SEQ ID NO: 5439 - protein, 7 aa, synthetic construct
RGDKANR

SEQ ID NO: 5440 - protein, 7 aa, synthetic construct
RGDKAQA

SEQ ID NO: 5441 - protein, 7 aa, synthetic construct
RGDKDQL

SEQ ID NO: 5442 - protein, 7 aa, synthetic construct
RGDKEHS

SEQ ID NO: 5443 - protein, 7 aa, synthetic construct
RGDKGNT

SEQ ID NO: 5444 - protein, 7 aa, synthetic construct
RGDKGRG

SEQ ID NO: 5445 - protein, 7 aa, synthetic construct
RGDKIQI

SEQ ID NO: 5446 - protein, 7 aa, synthetic construct
RGDKKTH

SEQ ID NO: 5447 - protein, 7 aa, synthetic construct
RGDKLFI

SEQ ID NO: 5448 - protein, 7 aa, synthetic construct
RGDKLGS

SEQ ID NO: 5449 - protein, 7 aa, synthetic construct
RGDKQLT

SEQ ID NO: 5450 - protein, 7 aa, synthetic construct
RGDKQVR

SEQ ID NO: 5451 - protein, 7 aa, synthetic construct
RGDKRDN

SEQ ID NO: 5452 - protein, 7 aa, synthetic construct
RGDKRRH

SEQ ID NO: 5453 - protein, 7 aa, synthetic construct
RGDKRST

SEQ ID NO: 5454 - protein, 7 aa, synthetic construct
RGDKRTI

SEQ ID NO: 5455 - protein, 7 aa, synthetic construct
RGDKSAH

SEQ ID NO: 5456 - protein, 7 aa, synthetic construct
RGDKTTL

SEQ ID NO: 5457 - protein, 7 aa, synthetic construct
RGDLANN

SEQ ID NO: 5458 - protein, 7 aa, synthetic construct
RGDLDRV

SEQ ID NO: 5459 - protein, 7 aa, synthetic construct
RGDLFRK

SEQ ID NO: 5460 - protein, 7 aa, synthetic construct
RGDLGAN

SEQ ID NO: 5461 - protein, 7 aa, synthetic construct
RGDLHHH

SEQ ID NO: 5462 - protein, 7 aa, synthetic construct
RGDLITK

SEQ ID NO: 5463 - protein, 7 aa, synthetic construct
RGDLKKN

SEQ ID NO: 5464 - protein, 7 aa, synthetic construct
RGDLLVS

SEQ ID NO: 5465 - protein, 7 aa, synthetic construct
RGDLRIQ

SEQ ID NO: 5466 - protein, 7 aa, synthetic construct
RGDLRKN

SEQ ID NO: 5467 - protein, 7 aa, synthetic construct
RGDLSGI

SEQ ID NO: 5468 - protein, 7 aa, synthetic construct
RGDLSTA

SEQ ID NO: 5469 - protein, 7 aa, synthetic construct
RGDLTVV

SEQ ID NO: 5470 - protein, 7 aa, synthetic construct
RGDLVEH

SEQ ID NO: 5471 - protein, 7 aa, synthetic construct
RGDNAHN

SEQ ID NO: 5472 - protein, 7 aa, synthetic construct
RGDNDGG

SEQ ID NO: 5473 - protein, 7 aa, synthetic construct
RGDNNHQ

SEQ ID NO: 5474 - protein, 7 aa, synthetic construct
RGDNRHF

SEQ ID NO: 5475 - protein, 7 aa, synthetic construct
RGDNSFQ

SEQ ID NO: 5476 - protein, 7 aa, synthetic construct
RGDNVGR

SEQ ID NO: 5477 - protein, 7 aa, synthetic construct
RGDNVHT

SEQ ID NO: 5478 - protein, 7 aa, synthetic construct
RGDQDNL

SEQ ID NO: 5479 - protein, 7 aa, synthetic construct
RGDQKEV

SEQ ID NO: 5480 - protein, 7 aa, synthetic construct
RGDRAFV

SEQ ID NO: 5481 - protein, 7 aa, synthetic construct
RGDRDGR

SEQ ID NO: 5482 - protein, 7 aa, synthetic construct
RGDREFK

SEQ ID NO: 5483 - protein, 7 aa, synthetic construct
RGDRERS

SEQ ID NO: 5484 - protein, 7 aa, synthetic construct
RGDRFFI

SEQ ID NO: 5485 - protein, 7 aa, synthetic construct
RGDRFGT

SEQ ID NO: 5486 - protein, 7 aa, synthetic construct
RGDRGAH

SEQ ID NO: 5487 - protein, 7 aa, synthetic construct
RGDRHSK

SEQ ID NO: 5488 - protein, 7 aa, synthetic construct
RGDRHTF

SEQ ID NO: 5489 - protein, 7 aa, synthetic construct
RGDRHTT

SEQ ID NO: 5490 - protein, 7 aa, synthetic construct
RGDRIFK

SEQ ID NO: 5491 - protein, 7 aa, synthetic construct
RGDRIGQ

SEQ ID NO: 5492 - protein, 7 aa, synthetic construct
RGDRKNE

SEQ ID NO: 5493 - protein, 7 aa, synthetic construct
RGDRKVS

SEQ ID NO: 5494 - protein, 7 aa, synthetic construct
RGDRNAT

SEQ ID NO: 5495 - protein, 7 aa, synthetic construct
RGDRNNN

SEQ ID NO: 5496 - protein, 7 aa, synthetic construct
RGDRNTV

SEQ ID NO: 5497 - protein, 7 aa, synthetic construct
RGDRQHQ

SEQ ID NO: 5498 - protein, 7 aa, synthetic construct
RGDRSDR

SEQ ID NO: 5499 - protein, 7 aa, synthetic construct
RGDRSFN

SEQ ID NO: 5500 - protein, 7 aa, synthetic construct
RGDRSVN

SEQ ID NO: 5501 - protein, 7 aa, synthetic construct
RGDRTIV

SEQ ID NO: 5502 - protein, 7 aa, synthetic construct
RGDRTRI

SEQ ID NO: 5503 - protein, 7 aa, synthetic construct
RGDRTRV

SEQ ID NO: 5504 - protein, 7 aa, synthetic construct
RGDRVKL

SEQ ID NO: 5505 - protein, 7 aa, synthetic construct
RGDRVKT

SEQ ID NO: 5506 - protein, 7 aa, synthetic construct
RGDSAGK

SEQ ID NO: 5507 - protein, 7 aa, synthetic construct
RGDSHFV

SEQ ID NO: 5508 - protein, 7 aa, synthetic construct
RGDSHRI

SEQ ID NO: 5509 - protein, 7 aa, synthetic construct
RGDSISQ

SEQ ID NO: 5510 - protein, 7 aa, synthetic construct
RGDSIVV

SEQ ID NO: 5511 - protein, 7 aa, synthetic construct
RGDSKAF

SEQ ID NO: 5512 - protein, 7 aa, synthetic construct
RGDSKIV

SEQ ID NO: 5513 - protein, 7 aa, synthetic construct
RGDSRKT

SEQ ID NO: 5514 - protein, 7 aa, synthetic construct
RGDDGRN

SEQ ID NO: 5515 - protein, 7 aa, synthetic construct
RGDTHRF

SEQ ID NO: 5516 - protein, 7 aa, synthetic construct
RGDTHTK

SEQ ID NO: 5517 - protein, 7 aa, synthetic construct
RGDTKVK

SEQ ID NO: 5518 - protein, 7 aa, synthetic construct
RGDTKVN

SEQ ID NO: 5519 - protein, 7 aa, synthetic construct
RGDTNKD

SEQ ID NO: 5520 - protein, 7 aa, synthetic construct
RGDTSRK

SEQ ID NO: 5521 - protein, 7 aa, synthetic construct
RGDTVHH

SEQ ID NO: 5522 - protein, 7 aa, synthetic construct
RGDVATI

SEQ ID NO: 5523 - protein, 7 aa, synthetic construct
RGDVEQQ

SEQ ID NO: 5524 - protein, 7 aa, synthetic construct
RGDVIFQ

SEQ ID NO: 5525 - protein, 7 aa, synthetic construct
RGDVILQ

SEQ ID NO: 5526 - protein, 7 aa, synthetic construct
RGDVKKA

SEQ ID NO: 5527 - protein, 7 aa, synthetic construct
RGDVKLQ

SEQ ID NO: 5528 - protein, 7 aa, synthetic construct
RGDVKSR

SEQ ID NO: 5529 - protein, 7 aa, synthetic construct
RGDVNRS

SEQ ID NO: 5530 - protein, 7 aa, synthetic construct
RGDVQKK

SEQ ID NO: 5531 - protein, 7 aa, synthetic construct
RGDVQLV

SEQ ID NO: 5532 - protein, 7 aa, synthetic construct
RGDVSGL

SEQ ID NO: 5533 - protein, 7 aa, synthetic construct
RGDVSKI

SEQ ID NO: 5534 - protein, 7 aa, synthetic construct
RGDVSNT

SEQ ID NO: 5535 - protein, 7 aa, synthetic construct
RGDFKSK

SEQ ID NO: 5536 - protein, 7 aa, synthetic construct
RGDFNKN

SEQ ID NO: 5537 - protein, 7 aa, synthetic construct
RGDFQRK

SEQ ID NO: 5538 - protein, 7 aa, synthetic construct
RGDFSEV

SEQ ID NO: 5539 - protein, 7 aa, synthetic construct
RGDFSNA

SEQ ID NO: 5540 - protein, 7 aa, synthetic construct
RGDFVAN

SEQ ID NO: 5541 - protein, 7 aa, synthetic construct
RGDFVHF

SEQ ID NO: 5542 - protein, 7 aa, synthetic construct
RGDFVRT

SEQ ID NO: 5543 - protein, 7 aa, synthetic construct
RGDGKSI

SEQ ID NO: 5544 - protein, 7 aa, synthetic construct
RGDGSVK

SEQ ID NO: 5545 - protein, 7 aa, synthetic construct
RGDHARG

SEQ ID NO: 5546 - protein, 7 aa, synthetic construct
RGDHARI

SEQ ID NO: 5547 - protein, 7 aa, synthetic construct
RGDAKQQ

SEQ ID NO: 5548 - protein, 7 aa, synthetic construct
RGDHKES

SEQ ID NO: 5549 - protein, 7 aa, synthetic construct
RGDHKNV

SEQ ID NO: 5550 - protein, 7 aa, synthetic construct
RGDHLGA

SEQ ID NO: 5551 - protein, 7 aa, synthetic construct
RGDHRSK

SEQ ID NO: 5552 - protein, 7 aa, synthetic construct
RGDHTNV

SEQ ID NO: 5553 - protein, 7 aa, synthetic construct
RGDHVRF

SEQ ID NO: 5554 - protein, 7 aa, synthetic construct
RGDANKL

SEQ ID NO: 5555 - protein, 7 aa, synthetic construct
RGDIKFQ

SEQ ID NO: 5556 - protein, 7 aa, synthetic construct
RGDIKFT

SEQ ID NO: 5557 - protein, 7 aa, synthetic construct
RGDANRF

SEQ ID NO: 5558 - protein, 7 aa, synthetic construct
RGDILDK

SEQ ID NO: 5559 - protein, 7 aa, synthetic construct
RGDIRVN

SEQ ID NO: 5560 - protein, 7 aa, synthetic construct
RGDISHR

SEQ ID NO: 5561 - protein, 7 aa, synthetic construct
RGDKAQI

SEQ ID NO: 5562 - protein, 7 aa, synthetic construct
RGDKGVL

SEQ ID NO: 5563 - protein, 7 aa, synthetic construct
RGDKIFQ

SEQ ID NO: 5564 - protein, 7 aa, synthetic construct
RGDKIHG

SEQ ID NO: 5565 - protein, 7 aa, synthetic construct
RGDKKDI

SEQ ID NO: 5566 - protein, 7 aa, synthetic construct
RGDKKGF

SEQ ID NO: 5567 - protein, 7 aa, synthetic construct
RGDKKTA

SEQ ID NO: 5568 - protein, 7 aa, synthetic construct
RGDKQKI

SEQ ID NO: 5569 - protein, 7 aa, synthetic construct
RGDKVKN

SEQ ID NO: 5570 - protein, 7 aa, synthetic construct
RGDARVH

SEQ ID NO: 5571 - protein, 7 aa, synthetic construct
RGDLARS

SEQ ID NO: 5572 - protein, 7 aa, synthetic construct
RGDLEGA

SEQ ID NO: 5573 - protein, 7 aa, synthetic construct
RGDASFR

SEQ ID NO: 5574 - protein, 7 aa, synthetic construct
RGDLRTR

SEQ ID NO: 5575 - protein, 7 aa, synthetic construct
RGDLTAQ

SEQ ID NO: 5576 - protein, 7 aa, synthetic construct
RGDLTSN

SEQ ID NO: 5577 - protein, 7 aa, synthetic construct
RGDNHGN

SEQ ID NO: 5578 - protein, 7 aa, synthetic construct
RGDNQKI

SEQ ID NO: 5579 - protein, 7 aa, synthetic construct
RGDNSAL

SEQ ID NO: 5580 - protein, 7 aa, synthetic construct
RGDNVKL

SEQ ID NO: 5581 - protein, 7 aa, synthetic construct
RGDNVNF

SEQ ID NO: 5582 - protein, 7 aa, synthetic construct
RGDNVSS

SEQ ID NO: 5583 - protein, 7 aa, synthetic construct
RGDQASH

SEQ ID NO: 5584 - protein, 7 aa, synthetic construct
RGDQFKS

SEQ ID NO: 5585 - protein, 7 aa, synthetic construct
RGDQIKL

SEQ ID NO: 5586 - protein, 7 aa, synthetic construct
RGDQKSL

SEQ ID NO: 5587 - protein, 7 aa, synthetic construct
RGDQNDR

SEQ ID NO: 5588 - protein, 7 aa, synthetic construct
RGDQQVI

SEQ ID NO: 5589 - protein, 7 aa, synthetic construct
RGDQRHL

SEQ ID NO: 5590 - protein, 7 aa, synthetic construct
RGDQSEI

SEQ ID NO: 5591 - protein, 7 aa, synthetic construct
RGDQTHA

SEQ ID NO: 5592 - protein, 7 aa, synthetic construct
RGDQTHI

SEQ ID NO: 5593 - protein, 7 aa, synthetic construct
RGDQTRH

SEQ ID NO: 5594 - protein, 7 aa, synthetic construct
RGDQVHQ

SEQ ID NO: 5595 - protein, 7 aa, synthetic construct
RGDQVNF

SEQ ID NO: 5596 - protein, 7 aa, synthetic construct
RGDQVQI

SEQ ID NO: 5597 - protein, 7 aa, synthetic construct
RGDQVQV

SEQ ID NO: 5598 - protein, 7 aa, synthetic construct
RGDQVSR

SEQ ID NO: 5599 - protein, 7 aa, synthetic construct
RGDRAKG

SEQ ID NO: 5600 - protein, 7 aa, synthetic construct
RGDRDHS

SEQ ID NO: 5601 - protein, 7 aa, synthetic construct
RGDRENS

SEQ ID NO: 5602 - protein, 7 aa, synthetic construct
RGDRERK

SEQ ID NO: 5603 - protein, 7 aa, synthetic construct
RGDRGQQ

SEQ ID NO: 5604 - protein, 7 aa, synthetic construct
RGDRKKD

SEQ ID NO: 5605 - protein, 7 aa, synthetic construct
RGDRLET

SEQ ID NO: 5606 - protein, 7 aa, synthetic construct
RGDRLFF

SEQ ID NO: 5607 - protein, 7 aa, synthetic construct
RGDRNSN

SEQ ID NO: 5608 - protein, 7 aa, synthetic construct
RGDRQAN

SEQ ID NO: 5609 - protein, 7 aa, synthetic construct
RGDRQNL

SEQ ID NO: 5610 - protein, 7 aa, synthetic construct
RGDRRET

SEQ ID NO: 5611 - protein, 7 aa, synthetic construct
RGDRRSE

SEQ ID NO: 5612 - protein, 7 aa, synthetic construct
RGDRSKG

SEQ ID NO: 5613 - protein, 7 aa, synthetic construct
RGDRTAN

SEQ ID NO: 5614 - protein, 7 aa, synthetic construct
RGDSASF

SEQ ID NO: 5615 - protein, 7 aa, synthetic construct
RGDSEHI

SEQ ID NO: 5616 - protein, 7 aa, synthetic construct
RGDSKNE

SEQ ID NO: 5617 - protein, 7 aa, synthetic construct
RGDSRFV

SEQ ID NO: 5618 - protein, 7 aa, synthetic construct
RGDDGFL

SEQ ID NO: 5619 - protein, 7 aa, synthetic construct
RGDSSSK

SEQ ID NO: 5620 - protein, 7 aa, synthetic construct
RGDSTQG

SEQ ID NO: 5621 - protein, 7 aa, synthetic construct
RGDSVAQ

SEQ ID NO: 5622 - protein, 7 aa, synthetic construct
RGDTGSI

SEQ ID NO: 5623 - protein, 7 aa, synthetic construct
RGDTKGV

SEQ ID NO: 5624 - protein, 7 aa, synthetic construct
RGDTKLG

SEQ ID NO: 5625 - protein, 7 aa, synthetic construct
RGDTKVH

SEQ ID NO: 5626 - protein, 7 aa, synthetic construct
RGDTKVQ

SEQ ID NO: 5627 - protein, 7 aa, synthetic construct
RGDTLIR

SEQ ID NO: 5628 - protein, 7 aa, synthetic construct
RGDVFGG

SEQ ID NO: 5629 - protein, 7 aa, synthetic construct
RGDVKER

SEQ ID NO: 5630 - protein, 7 aa, synthetic construct
RGDVKHT

SEQ ID NO: 5631 - protein, 7 aa, synthetic construct
RGDVSIK

SEQ ID NO: 5632 - protein, 7 aa, synthetic construct
RGDVSSV

SEQ ID NO: 5633 - protein, 7 aa, synthetic construct
RGDVSTS

SEQ ID NO: 5634 - protein, 7 aa, synthetic construct
RGDVVGF

SEQ ID NO: 5635 - protein, 7 aa, synthetic construct
RGDDSKT

SEQ ID NO: 5636 - protein, 7 aa, synthetic construct
RGDEDFL

SEQ ID NO: 5637 - protein, 7 aa, synthetic construct
RGDEQAK

SEQ ID NO: 5638 - protein, 7 aa, synthetic construct
RGDFARF

SEQ ID NO: 5639 - protein, 7 aa, synthetic construct
RGDFDSK

SEQ ID NO: 5640 - protein, 7 aa, synthetic construct
RGDFGSV

SEQ ID NO: 5641 - protein, 7 aa, synthetic construct
RGDFHHA

SEQ ID NO: 5642 - protein, 7 aa, synthetic construct
RGDFHHS

SEQ ID NO: 5643 - protein, 7 aa, synthetic construct
RGDFKAV

SEQ ID NO: 5644 - protein, 7 aa, synthetic construct
RGDFLFR

SEQ ID NO: 5645 - protein, 7 aa, synthetic construct
RGDFNHF

SEQ ID NO: 5646 - protein, 7 aa, synthetic construct
RGDFNNF

SEQ ID NO: 5647 - protein, 7 aa, synthetic construct
RGDFREI

SEQ ID NO: 5648 - protein, 7 aa, synthetic construct
RGDFSRH

SEQ ID NO: 5649 - protein, 7 aa, synthetic construct
RGDFVFV

SEQ ID NO: 5650 - protein, 7 aa, synthetic construct
RGDFVRF

SEQ ID NO: 5651 - protein, 7 aa, synthetic construct
RGDGFTT

SEQ ID NO: 5652 - protein, 7 aa, synthetic construct
RGDGGEG

SEQ ID NO: 5653 - protein, 7 aa, synthetic construct
RGDGGLN

SEQ ID NO: 5654 - protein, 7 aa, synthetic construct
RGDGGQI

SEQ ID NO: 5655 - protein, 7 aa, synthetic construct
RGDGGVI

SEQ ID NO: 5656 - protein, 7 aa, synthetic construct
RGDGKND

SEQ ID NO: 5657 - protein, 7 aa, synthetic construct
RGDGNRI

SEQ ID NO: 5658 - protein, 7 aa, synthetic construct
RGDGQFL

SEQ ID NO: 5659 - protein, 7 aa, synthetic construct
RGDAKDS

SEQ ID NO: 5660 - protein, 7 aa, synthetic construct
RGDGSGR

SEQ ID NO: 5661 - protein, 7 aa, synthetic construct
RGDHAEH

SEQ ID NO: 5662 - protein, 7 aa, synthetic construct
RGDHDGE

SEQ ID NO: 5663 - protein, 7 aa, synthetic construct
RGDHGET

SEQ ID NO: 5664 - protein, 7 aa, synthetic construct
RGDHGNI

SEQ ID NO: 5665 - protein, 7 aa, synthetic construct
RGDHLGH

SEQ ID NO: 5666 - protein, 7 aa, synthetic construct
RGDALKT

SEQ ID NO: 5667 - protein, 7 aa, synthetic construct
RGDAASR

SEQ ID NO: 5668 - protein, 7 aa, synthetic construct
RGDHRGE

SEQ ID NO: 5669 - protein, 7 aa, synthetic construct
RGDHRTV

SEQ ID NO: 5670 - protein, 7 aa, synthetic construct
RGDHSNS

SEQ ID NO: 5671 - protein, 7 aa, synthetic construct
RGDHSRN

SEQ ID NO: 5672 - protein, 7 aa, synthetic construct
RGDHSSS

SEQ ID NO: 5673 - protein, 7 aa, synthetic construct
RGDHTQI

SEQ ID NO: 5674 - protein, 7 aa, synthetic construct
RGDHVST

SEQ ID NO: 5675 - protein, 7 aa, synthetic construct
RGDIAFK

SEQ ID NO: 5676 - protein, 7 aa, synthetic construct
RGDIFRK

SEQ ID NO: 5677 - protein, 7 aa, synthetic construct
RGDIKID

SEQ ID NO: 5678 - protein, 7 aa, synthetic construct
RGDIKSS

SEQ ID NO: 5679 - protein, 7 aa, synthetic construct
RGDILGH

SEQ ID NO: 5680 - protein, 7 aa, synthetic construct
RGDILIL

SEQ ID NO: 5681 - protein, 7 aa, synthetic construct
RGDIQRV

SEQ ID NO: 5682 - protein, 7 aa, synthetic construct
RGDISNV

SEQ ID NO: 5683 - protein, 7 aa, synthetic construct
RGDISRQ

SEQ ID NO: 5684 - protein, 7 aa, synthetic construct
RGDKARQ

SEQ ID NO: 5685 - protein, 7 aa, synthetic construct
RGDKFGI

SEQ ID NO: 5686 - protein, 7 aa, synthetic construct
RGDKFLK

SEQ ID NO: 5687 - protein, 7 aa, synthetic construct
RGDKGDL

SEQ ID NO: 5688 - protein, 7 aa, synthetic construct
RGDKKHF

SEQ ID NO: 5689 - protein, 7 aa, synthetic construct
RGDKKHV

SEQ ID NO: 5690 - protein, 7 aa, synthetic construct
RGDKKNF

SEQ ID NO: 5691 - protein, 7 aa, synthetic construct
RGDKKSQ

SEQ ID NO: 5692 - protein, 7 aa, synthetic construct
RGDKQSL

SEQ ID NO: 5693 - protein, 7 aa, synthetic construct
RGDARSV

SEQ ID NO: 5694 - protein, 7 aa, synthetic construct
RGDLEGR

SEQ ID NO: 5695 - protein, 7 aa, synthetic construct
RGDLFTA

SEQ ID NO: 5696 - protein, 7 aa, synthetic construct
RGDLFVR

SEQ ID NO: 5697 - protein, 7 aa, synthetic construct
RGDLKSV

SEQ ID NO: 5698 - protein, 7 aa, synthetic construct
RGDLLVT

SEQ ID NO: 5699 - protein, 7 aa, synthetic construct
RGDLQNS

SEQ ID NO: 5700 - protein, 7 aa, synthetic construct
RGDLRHN

SEQ ID NO: 5701 - protein, 7 aa, synthetic construct
RGDLRTD

SEQ ID NO: 5702 - protein, 7 aa, synthetic construct
RGDLVQR

SEQ ID NO: 5703 - protein, 7 aa, synthetic construct
RGDLVVV

SEQ ID NO: 5704 - protein, 7 aa, synthetic construct
RGDNFKD

SEQ ID NO: 5705 - protein, 7 aa, synthetic construct
RGDNFRH

SEQ ID NO: 5706 - protein, 7 aa, synthetic construct
RGDNHSS

SEQ ID NO: 5707 - protein, 7 aa, synthetic construct
RGDNKET

SEQ ID NO: 5708 - protein, 7 aa, synthetic construct
RGDAVHI

SEQ ID NO: 5709 - protein, 7 aa, synthetic construct
RGDNLSI

SEQ ID NO: 5710 - protein, 7 aa, synthetic construct
RGDNQRK

SEQ ID NO: 5711 - protein, 7 aa, synthetic construct
RGDNQSR

SEQ ID NO: 5712 - protein, 7 aa, synthetic construct
RGDNRVV

SEQ ID NO: 5713 - protein, 7 aa, synthetic construct
RGDNSRG

SEQ ID NO: 5714 - protein, 7 aa, synthetic construct
RGDNSRH

SEQ ID NO: 5715 - protein, 7 aa, synthetic construct
RGDNTGG

SEQ ID NO: 5716 - protein, 7 aa, synthetic construct
RGDNVLL

SEQ ID NO: 5717 - protein, 7 aa, synthetic construct
RGDQEKT

SEQ ID NO: 5718 - protein, 7 aa, synthetic construct
RGDQFRT

SEQ ID NO: 5719 - protein, 7 aa, synthetic construct
RGDQGFV

SEQ ID NO: 5720 - protein, 7 aa, synthetic construct
RGDQHGN

SEQ ID NO: 5721 - protein, 7 aa, synthetic construct
RGDQHSQ

SEQ ID NO: 5722 - protein, 7 aa, synthetic construct
RGDQIAI

SEQ ID NO: 5723 - protein, 7 aa, synthetic construct
RGDQKQV

SEQ ID NO: 5724 - protein, 7 aa, synthetic construct
RGDQKSR

SEQ ID NO: 5725 - protein, 7 aa, synthetic construct
RGDQLQI

SEQ ID NO: 5726 - protein, 7 aa, synthetic construct
RGDQNHT

SEQ ID NO: 5727 - protein, 7 aa, synthetic construct
RGDQQNI

SEQ ID NO: 5728 - protein, 7 aa, synthetic construct
RGDQSQI

SEQ ID NO: 5729 - protein, 7 aa, synthetic construct
RGDQVGI

SEQ ID NO: 5730 - protein, 7 aa, synthetic construct
RGDQVGR

SEQ ID NO: 5731 - protein, 7 aa, synthetic construct
RGDRATT

SEQ ID NO: 5732 - protein, 7 aa, synthetic construct
RGDRDAH

SEQ ID NO: 5733 - protein, 7 aa, synthetic construct
RGDRDSF

SEQ ID NO: 5734 - protein, 7 aa, synthetic construct
RGDRENT

SEQ ID NO: 5735 - protein, 7 aa, synthetic construct
RGDRHNQ

SEQ ID NO: 5736 - protein, 7 aa, synthetic construct
RGDRING

SEQ ID NO: 5737 - protein, 7 aa, synthetic construct
RGDRKEQ

SEQ ID NO: 5738 - protein, 7 aa, synthetic construct
RGDRKVT

SEQ ID NO: 5739 - protein, 7 aa, synthetic construct
RGDRLNT

SEQ ID NO: 5740 - protein, 7 aa, synthetic construct
RGDRQGT

SEQ ID NO: 5741 - protein, 7 aa, synthetic construct
RGDRTLG

SEQ ID NO: 5742 - protein, 7 aa, synthetic construct
RGDRTQS

SEQ ID NO: 5743 - protein, 7 aa, synthetic construct
RGDRVGF

SEQ ID NO: 5744 - protein, 7 aa, synthetic construct
RGDRVTS

SEQ ID NO: 5745 - protein, 7 aa, synthetic construct
RGDSASV

SEQ ID NO: 5746 - protein, 7 aa, synthetic construct
RGDSGHR

SEQ ID NO: 5747 - protein, 7 aa, synthetic construct
RGDSHSV

SEQ ID NO: 5748 - protein, 7 aa, synthetic construct
RGDSKSF

SEQ ID NO: 5749 - protein, 7 aa, synthetic construct
RGDSLKF

SEQ ID NO: 5750 - protein, 7 aa, synthetic construct
RGDSLKK

SEQ ID NO: 5751 - protein, 7 aa, synthetic construct
RGDSSEH

SEQ ID NO: 5752 - protein, 7 aa, synthetic construct
RGDTKFN

SEQ ID NO: 5753 - protein, 7 aa, synthetic construct
RGDTLAV

SEQ ID NO: 5754 - protein, 7 aa, synthetic construct
RGDTLTI

SEQ ID NO: 5755 - protein, 7 aa, synthetic construct
RGDTQIL

SEQ ID NO: 5756 - protein, 7 aa, synthetic construct
RGDTRHF

SEQ ID NO: 5757 - protein, 7 aa, synthetic construct
RGDDIDN

SEQ ID NO: 5758 - protein, 7 aa, synthetic construct
RGDVFVR

SEQ ID NO: 5759 - protein, 7 aa, synthetic construct
RGDVGGV

SEQ ID NO: 5760 - protein, 7 aa, synthetic construct
RGDVHFL

SEQ ID NO: 5761 - protein, 7 aa, synthetic construct
RGDVKIL

SEQ ID NO: 5762 - protein, 7 aa, synthetic construct
RGDVNRV

SEQ ID NO: 5763 - protein, 7 aa, synthetic construct
RGDVRDH

SEQ ID NO: 5764 - protein, 7 aa, synthetic construct
RGDVRST

SEQ ID NO: 5765 - protein, 7 aa, synthetic construct
RGDVVTK

SEQ ID NO: 5766 - protein, 7 aa, synthetic construct
RGDDNSI

SEQ ID NO: 5767 - protein, 7 aa, synthetic construct
RGDESRR

SEQ ID NO: 5768 - protein, 7 aa, synthetic construct
RGDFALT

SEQ ID NO: 5769 - protein, 7 aa, synthetic construct
RGDFDSE

SEQ ID NO: 5770 - protein, 7 aa, synthetic construct
RGDFGGR

SEQ ID NO: 5771 - protein, 7 aa, synthetic construct
RGDFGQI

SEQ ID NO: 5772 - protein, 7 aa, synthetic construct
RGDFIAV

SEQ ID NO: 5773 - protein, 7 aa, synthetic construct
RGDFKAL

SEQ ID NO: 5774 - protein, 7 aa, synthetic construct
RGDFKFL

SEQ ID NO: 5775 - protein, 7 aa, synthetic construct
RGDFLEN

SEQ ID NO: 5776 - protein, 7 aa, synthetic construct
RGDAHHR

SEQ ID NO: 5777 - protein, 7 aa, synthetic construct
RGDFLTF

SEQ ID NO: 5778 - protein, 7 aa, synthetic construct
RGDFSEI

SEQ ID NO: 5779 - protein, 7 aa, synthetic construct
RGDFTSS

SEQ ID NO: 5780 - protein, 7 aa, synthetic construct
RGDGFAR

SEQ ID NO: 5781 - protein, 7 aa, synthetic construct
RGDGGIN

SEQ ID NO: 5782 - protein, 7 aa, synthetic construct
RGDGKAL

SEQ ID NO: 5783 - protein, 7 aa, synthetic construct
RGDGKNL

SEQ ID NO: 5784 - protein, 7 aa, synthetic construct
RGDGRGQ

SEQ ID NO: 5785 - protein, 7 aa, synthetic construct
RGDGSNT

SEQ ID NO: 5786 - protein, 7 aa, synthetic construct
RGDAKGF

SEQ ID NO: 5787 - protein, 7 aa, synthetic construct
RGDGSTV

SEQ ID NO: 5788 - protein, 7 aa, synthetic construct
RGDHAKQ

SEQ ID NO: 5789 - protein, 7 aa, synthetic construct
RGDHFSV

SEQ ID NO: 5790 - protein, 7 aa, synthetic construct
RGDHHKH

SEQ ID NO: 5791 - protein, 7 aa, synthetic construct
RGDHHQH

SEQ ID NO: 5792 - protein, 7 aa, synthetic construct
RGDHIKL

SEQ ID NO: 5793 - protein, 7 aa, synthetic construct
RGDHLSK

SEQ ID NO: 5794 - protein, 7 aa, synthetic construct
RGDHNKT

SEQ ID NO: 5795 - protein, 7 aa, synthetic construct
RGDHRHL

SEQ ID NO: 5796 - protein, 7 aa, synthetic construct
RGDHSLK

SEQ ID NO: 5797 - protein, 7 aa, synthetic construct
RGDALTN

SEQ ID NO: 5798 - protein, 7 aa, synthetic construct
RGDIASS

SEQ ID NO: 5799 - protein, 7 aa, synthetic construct
RGDIEKF

SEQ ID NO: 5800 - protein, 7 aa, synthetic construct
RGDIIVV

SEQ ID NO: 5801 - protein, 7 aa, synthetic construct
RGDIKFN

SEQ ID NO: 5802 - protein, 7 aa, synthetic construct
RGDILVL

SEQ ID NO: 5803 - protein, 7 aa, synthetic construct
RGDIQSK

SEQ ID NO: 5804 - protein, 7 aa, synthetic construct
RGDIQTR

SEQ ID NO: 5805 - protein, 7 aa, synthetic construct
RGDITHL

SEQ ID NO: 5806 - protein, 7 aa, synthetic construct
RGDIVFR

SEQ ID NO: 5807 - protein, 7 aa, synthetic construct
RGDKADI

SEQ ID NO: 5808 - protein, 7 aa, synthetic construct
RGDKANQ

SEQ ID NO: 5809 - protein, 7 aa, synthetic construct
RGDKDQI

SEQ ID NO: 5810 - protein, 7 aa, synthetic construct
RGDKEEF

SEQ ID NO: 5811 - protein, 7 aa, synthetic construct
RGDKFFT

SEQ ID NO: 5812 - protein, 7 aa, synthetic construct
RGDAQTK

SEQ ID NO: 5813 - protein, 7 aa, synthetic construct
RGDKGLK

SEQ ID NO: 5814 - protein, 7 aa, synthetic construct
RGDKHEQ

SEQ ID NO: 5815 - protein, 7 aa, synthetic construct
RGDKIFV

SEQ ID NO: 5816 - protein, 7 aa, synthetic construct
RGDKIHF

SEQ ID NO: 5817 - protein, 7 aa, synthetic construct
RGDKILI

SEQ ID NO: 5818 - protein, 7 aa, synthetic construct
RGDKKAI

SEQ ID NO: 5819 - protein, 7 aa, synthetic construct
RGDKLHN

SEQ ID NO: 5820 - protein, 7 aa, synthetic construct
RGDKLHR

SEQ ID NO: 5821 - protein, 7 aa, synthetic construct
RGDKLSF

SEQ ID NO: 5822 - protein, 7 aa, synthetic construct
RGDKLTK

SEQ ID NO: 5823 - protein, 7 aa, synthetic construct
RGDKNQF

SEQ ID NO: 5824 - protein, 7 aa, synthetic construct
RGDKNTK

SEQ ID NO: 5825 - protein, 7 aa, synthetic construct
RGDKRGF

SEQ ID NO: 5826 - protein, 7 aa, synthetic construct
RGDKRIK

SEQ ID NO: 5827 - protein, 7 aa, synthetic construct
RGDKVTL

SEQ ID NO: 5828 - protein, 7 aa, synthetic construct
RGDLEGQ

SEQ ID NO: 5829 - protein, 7 aa, synthetic construct
RGDLFGF

SEQ ID NO: 5830 - protein, 7 aa, synthetic construct
RGDLHGK

SEQ ID NO: 5831 - protein, 7 aa, synthetic construct
RGDLIVI

SEQ ID NO: 5832 - protein, 7 aa, synthetic construct
RGDLKVQ

SEQ ID NO: 5833 - protein, 7 aa, synthetic construct
RGDLLHV

SEQ ID NO: 5834 - protein, 7 aa, synthetic construct
RGDLLNT

SEQ ID NO: 5835 - protein, 7 aa, synthetic construct
RGDASTV

SEQ ID NO: 5836 - protein, 7 aa, synthetic construct
RGDLRVF

SEQ ID NO: 5837 - protein, 7 aa, synthetic construct
RGDLTNR

SEQ ID NO: 5838 - protein, 7 aa, synthetic construct
RGDLTST

SEQ ID NO: 5839 - protein, 7 aa, synthetic construct
RGDNFLR

SEQ ID NO: 5840 - protein, 7 aa, synthetic construct
RGDNGKT

SEQ ID NO: 5841 - protein, 7 aa, synthetic construct
RGDNGNR

SEQ ID NO: 5842 - protein, 7 aa, synthetic construct
RGDNHGK

SEQ ID NO: 5843 - protein, 7 aa, synthetic construct
RGDNKFK

SEQ ID NO: 5844 - protein, 7 aa, synthetic construct
RGDNKFV

SEQ ID NO: 5845 - protein, 7 aa, synthetic construct
RGDNQGF

SEQ ID NO: 5846 - protein, 7 aa, synthetic construct
RGDNQRN

SEQ ID NO: 5847 - protein, 7 aa, synthetic construct
RGDNRAQ

SEQ ID NO: 5848 - protein, 7 aa, synthetic construct
RGDNRNK

SEQ ID NO: 5849 - protein, 7 aa, synthetic construct
RGDNRTI

SEQ ID NO: 5850 - protein, 7 aa, synthetic construct
RGDNSFR

SEQ ID NO: 5851 - protein, 7 aa, synthetic construct
RGDNSGI

SEQ ID NO: 5852 - protein, 7 aa, synthetic construct
RGDQAHI

SEQ ID NO: 5853 - protein, 7 aa, synthetic construct
RGDQGAI

SEQ ID NO: 5854 - protein, 7 aa, synthetic construct
RGDQKEK

SEQ ID NO: 5855 - protein, 7 aa, synthetic construct
RGDQKTL

SEQ ID NO: 5856 - protein, 7 aa, synthetic construct
RGDQLTT

SEQ ID NO: 5857 - protein, 7 aa, synthetic construct
RGDQRKA

SEQ ID NO: 5858 - protein, 7 aa, synthetic construct
RGDQRKL

SEQ ID NO: 5859 - protein, 7 aa, synthetic construct
RGDQRRS

SEQ ID NO: 5860 - protein, 7 aa, synthetic construct
RGDQSHF

SEQ ID NO: 5861 - protein, 7 aa, synthetic construct
RGDQTFR

SEQ ID NO: 5862 - protein, 7 aa, synthetic construct
RGDRAKQ

SEQ ID NO: 5863 - protein, 7 aa, synthetic construct
RGDRAQI

SEQ ID NO: 5864 - protein, 7 aa, synthetic construct
RGDREII

SEQ ID NO: 5865 - protein, 7 aa, synthetic construct
RGDREVL

SEQ ID NO: 5866 - protein, 7 aa, synthetic construct
RGDRGIT

SEQ ID NO: 5867 - protein, 7 aa, synthetic construct
RGDRGQF

SEQ ID NO: 5868 - protein, 7 aa, synthetic construct
RGDRHVK

SEQ ID NO: 5869 - protein, 7 aa, synthetic construct
RGDRIST

SEQ ID NO: 5870 - protein, 7 aa, synthetic construct
RGDRKGR

SEQ ID NO: 5871 - protein, 7 aa, synthetic construct
RGDRKKV

SEQ ID NO: 5872 - protein, 7 aa, synthetic construct
RGDRKQH

SEQ ID NO: 5873 - protein, 7 aa, synthetic construct
RGDRLFS

SEQ ID NO: 5874 - protein, 7 aa, synthetic construct
RGDRNFH

SEQ ID NO: 5875 - protein, 7 aa, synthetic construct
RGDRNLL

SEQ ID NO: 5876 - protein, 7 aa, synthetic construct
RGDRNLT

SEQ ID NO: 5877 - protein, 7 aa, synthetic construct
RGDRQHG

SEQ ID NO: 5878 - protein, 7 aa, synthetic construct
RGDRRRF

SEQ ID NO: 5879 - protein, 7 aa, synthetic construct
RGDRSTG

SEQ ID NO: 5880 - protein, 7 aa, synthetic construct
RGDSEKL

SEQ ID NO: 5881 - protein, 7 aa, synthetic construct
RGDSFKE

SEQ ID NO: 5882 - protein, 7 aa, synthetic construct
RGDSHHL

SEQ ID NO: 5883 - protein, 7 aa, synthetic construct
RGDSING

SEQ ID NO: 5884 - protein, 7 aa, synthetic construct
RGDSIRS

SEQ ID NO: 5885 - protein, 7 aa, synthetic construct
RGDSITL

SEQ ID NO: 5886 - protein, 7 aa, synthetic construct
RGDSNRV

SEQ ID NO: 5887 - protein, 7 aa, synthetic construct
RGDSQKT

SEQ ID NO: 5888 - protein, 7 aa, synthetic construct
RGDSRTS

SEQ ID NO: 5889 - protein, 7 aa, synthetic construct
RGDTFRQ

SEQ ID NO: 5890 - protein, 7 aa, synthetic construct
RGDTKVL

SEQ ID NO: 5891 - protein, 7 aa, synthetic construct
RGDTRFF

SEQ ID NO: 5892 - protein, 7 aa, synthetic construct
RGDVHKT

SEQ ID NO: 5893 - protein, 7 aa, synthetic construct
RGDVHLV

SEQ ID NO: 5894 - protein, 7 aa, synthetic construct
RGDVIIN

SEQ ID NO: 5895 - protein, 7 aa, synthetic construct
RGDVINQ

SEQ ID NO: 5896 - protein, 7 aa, synthetic construct
RGDVITL

SEQ ID NO: 5897 - protein, 7 aa, synthetic construct
RGDVKRA

SEQ ID NO: 5898 - protein, 7 aa, synthetic construct
RGDVLAV

SEQ ID NO: 5899 - protein, 7 aa, synthetic construct
RGDVNLQ

SEQ ID NO: 5900 - protein, 7 aa, synthetic construct
RGDVNRH

SEQ ID NO: 5901 - protein, 7 aa, synthetic construct
RGDVRKT

SEQ ID NO: 5902 - protein, 7 aa, synthetic construct
RGDVRSR

SEQ ID NO: 5903 - protein, 7 aa, synthetic construct
RGDVSIV

SEQ ID NO: 5904 - protein, 7 aa, synthetic construct
RGDDNHI

SEQ ID NO: 5905 - protein, 7 aa, synthetic construct
RGDEKGF

SEQ ID NO: 5906 - protein, 7 aa, synthetic construct
RGDENDH

SEQ ID NO: 5907 - protein, 7 aa, synthetic construct
RGDFANT

SEQ ID NO: 5908 - protein, 7 aa, synthetic construct
RGDFDQV

SEQ ID NO: 5909 - protein, 7 aa, synthetic construct
RGDFGLI

SEQ ID NO: 5910 - protein, 7 aa, synthetic construct
RGDAGVK

SEQ ID NO: 5911 - protein, 7 aa, synthetic construct
RGDFIDG

SEQ ID NO: 5912 - protein, 7 aa, synthetic construct
RGDFINS

SEQ ID NO: 5913 - protein, 7 aa, synthetic construct
RGDFLDN

SEQ ID NO: 5914 - protein, 7 aa, synthetic construct
RGDFQAK

SEQ ID NO: 5915 - protein, 7 aa, synthetic construct
RGDFQQL

SEQ ID NO: 5916 - protein, 7 aa, synthetic construct
RGDFRGF

SEQ ID NO: 5917 - protein, 7 aa, synthetic construct
RGDFRHT

SEQ ID NO: 5918 - protein, 7 aa, synthetic construct
RGDFRQA

SEQ ID NO: 5919 - protein, 7 aa, synthetic construct
RGDFSAS

SEQ ID NO: 5920 - protein, 7 aa, synthetic construct
RGDFSAT

SEQ ID NO: 5921 - protein, 7 aa, synthetic construct
RGDFSEG

SEQ ID NO: 5922 - protein, 7 aa, synthetic construct
RGDFSHH

SEQ ID NO: 5923 - protein, 7 aa, synthetic construct
RGDFSKL

SEQ ID NO: 5924 - protein, 7 aa, synthetic construct
RGDFVDQ

SEQ ID NO: 5925 - protein, 7 aa, synthetic construct
RGDFVNH

SEQ ID NO: 5926 - protein, 7 aa, synthetic construct
RGDFVVL

SEQ ID NO: 5927 - protein, 7 aa, synthetic construct
RGDGFFR

SEQ ID NO: 5928 - protein, 7 aa, synthetic construct
RGDGFKN

SEQ ID NO: 5929 - protein, 7 aa, synthetic construct
RGDGKHF

SEQ ID NO: 5930 - protein, 7 aa, synthetic construct
RGDGLFV

SEQ ID NO: 5931 - protein, 7 aa, synthetic construct
RGDAIVI

SEQ ID NO: 5932 - protein, 7 aa, synthetic construct
RGDGTRQ

SEQ ID NO: 5933 - protein, 7 aa, synthetic construct
RGDGVRI

SEQ ID NO: 5934 - protein, 7 aa, synthetic construct
RGDHDVL

SEQ ID NO: 5935 - protein, 7 aa, synthetic construct
RGDAKVR

SEQ ID NO: 5936 - protein, 7 aa, synthetic construct
RGDHKHV

SEQ ID NO: 5937 - protein, 7 aa, synthetic construct
RGDHRRE

SEQ ID NO: 5938 - protein, 7 aa, synthetic construct
RGDHSNT

SEQ ID NO: 5939 - protein, 7 aa, synthetic construct
RGDHTQH

SEQ ID NO: 5940 - protein, 7 aa, synthetic construct
RGDIEFV

SEQ ID NO: 5941 - protein, 7 aa, synthetic construct
RGDIFKK

SEQ ID NO: 5942 - protein, 7 aa, synthetic construct
RGDIGAR

SEQ ID NO: 5943 - protein, 7 aa, synthetic construct
RGDIGGT

SEQ ID NO: 5944 - protein, 7 aa, synthetic construct
RGDIGVI

SEQ ID NO: 5945 - protein, 7 aa, synthetic construct
RGDIIHN

SEQ ID NO: 5946 - protein, 7 aa, synthetic construct
RGDANQF

SEQ ID NO: 5947 - protein, 7 aa, synthetic construct
RGDANRR

SEQ ID NO: 5948 - protein, 7 aa, synthetic construct
RGDIKTS

SEQ ID NO: 5949 - protein, 7 aa, synthetic construct
RGDIRKQ

SEQ ID NO: 5950 - protein, 7 aa, synthetic construct
RGDISGT

SEQ ID NO: 5951 - protein, 7 aa, synthetic construct
RGDIVHN

SEQ ID NO: 5952 - protein, 7 aa, synthetic construct
RGDKDVL

SEQ ID NO: 5953 - protein, 7 aa, synthetic construct
RGDKFVT

SEQ ID NO: 5954 - protein, 7 aa, synthetic construct
RGDKIGR

SEQ ID NO: 5955 - protein, 7 aa, synthetic construct
RGDKISK

SEQ ID NO: 5956 - protein, 7 aa, synthetic construct
RGDKLHT

SEQ ID NO: 5957 - protein, 7 aa, synthetic construct
RGDARIL

SEQ ID NO: 5958 - protein, 7 aa, synthetic construct
RGDKNIT

SEQ ID NO: 5959 - protein, 7 aa, synthetic construct
RGDKNKK

SEQ ID NO: 5960 - protein, 7 aa, synthetic construct
RGDKNKN

SEQ ID NO: 5961 - protein, 7 aa, synthetic construct
RGDKNQK

SEQ ID NO: 5962 - protein, 7 aa, synthetic construct
RGDKNRV

SEQ ID NO: 5963 - protein, 7 aa, synthetic construct
RGDKNTQ

SEQ ID NO: 5964 - protein, 7 aa, synthetic construct
RGDLAGN

SEQ ID NO: 5965 - protein, 7 aa, synthetic construct
RGDLGIA

SEQ ID NO: 5966 - protein, 7 aa, synthetic construct
RGDLGSN

SEQ ID NO: 5967 - protein, 7 aa, synthetic construct
RGDLHHR

SEQ ID NO: 5968 - protein, 7 aa, synthetic construct
RGDNEQL

SEQ ID NO: 5969 - protein, 7 aa, synthetic construct
RGDNGRE

SEQ ID NO: 5970 - protein, 7 aa, synthetic construct
RGDNHEL

SEQ ID NO: 5971 - protein, 7 aa, synthetic construct
RGDNKVK

SEQ ID NO: 5972 - protein, 7 aa, synthetic construct
RGDNLAV

SEQ ID NO: 5973 - protein, 7 aa, synthetic construct
RGDNRKS

SEQ ID NO: 5974 - protein, 7 aa, synthetic construct
RGDNRNH

SEQ ID NO: 5975 - protein, 7 aa, synthetic construct
RGDNRTF

SEQ ID NO: 5976 - protein, 7 aa, synthetic construct
RGDNSGL

SEQ ID NO: 5977 - protein, 7 aa, synthetic construct
RGDNSKD

SEQ ID NO: 5978 - protein, 7 aa, synthetic construct
RGDAVTF

SEQ ID NO: 5979 - protein, 7 aa, synthetic construct
RGDNVSK

SEQ ID NO: 5980 - protein, 7 aa, synthetic construct
RGDQGQI

SEQ ID NO: 5981 - protein, 7 aa, synthetic construct
RGDQIGI

SEQ ID NO: 5982 - protein, 7 aa, synthetic construct
RGDQIQK

SEQ ID NO: 5983 - protein, 7 aa, synthetic construct
RGDQKGA

SEQ ID NO: 5984 - protein, 7 aa, synthetic construct
RGDQKKH

SEQ ID NO: 5985 - protein, 7 aa, synthetic construct
RGDQLNG

SEQ ID NO: 5986 - protein, 7 aa, synthetic construct
RGDQNFL

SEQ ID NO: 5987 - protein, 7 aa, synthetic construct
RGDQRAN

SEQ ID NO: 5988 - protein, 7 aa, synthetic construct
RGDQRAT

SEQ ID NO: 5989 - protein, 7 aa, synthetic construct
RGDQRGV

SEQ ID NO: 5990 - protein, 7 aa, synthetic construct
RGDQRLV

SEQ ID NO: 5991 - protein, 7 aa, synthetic construct
RGDQSKD

SEQ ID NO: 5992 - protein, 7 aa, synthetic construct
RGDQSNR

SEQ ID NO: 5993 - protein, 7 aa, synthetic construct
RGDQVAH

SEQ ID NO: 5994 - protein, 7 aa, synthetic construct
RGDRDFK

SEQ ID NO: 5995 - protein, 7 aa, synthetic construct
RGDRDHF

SEQ ID NO: 5996 - protein, 7 aa, synthetic construct
RGDRDNQ

SEQ ID NO: 5997 - protein, 7 aa, synthetic construct
RGDREEH

SEQ ID NO: 5998 - protein, 7 aa, synthetic construct
RGDREFI

SEQ ID NO: 5999 - protein, 7 aa, synthetic construct
RGDRFFV

SEQ ID NO: 6000 - protein, 7 aa, synthetic construct
RGDRFGK

SEQ ID NO: 6001 - protein, 7 aa, synthetic construct
RGDRFNN

SEQ ID NO: 6002 - protein, 7 aa, synthetic construct
RGDRGRI

SEQ ID NO: 6003 - protein, 7 aa, synthetic construct
RGDRHER

SEQ ID NO: 6004 - protein, 7 aa, synthetic construct
RGDRHET

SEQ ID NO: 6005 - protein, 7 aa, synthetic construct
RGDRIDH

SEQ ID NO: 6006 - protein, 7 aa, synthetic construct
RGDRIRN

SEQ ID NO: 6007 - protein, 7 aa, synthetic construct
RGDRKFD

SEQ ID NO: 6008 - protein, 7 aa, synthetic construct
RGDRKGI

SEQ ID NO: 6009 - protein, 7 aa, synthetic construct
RGDRLEL

SEQ ID NO: 6010 - protein, 7 aa, synthetic construct
RGDRLVQ

SEQ ID NO: 6011 - protein, 7 aa, synthetic construct
RGDRNFK

SEQ ID NO: 6012 - protein, 7 aa, synthetic construct
RGDRNGI

SEQ ID NO: 6013 - protein, 7 aa, synthetic construct
RGDRNSR

SEQ ID NO: 6014 - protein, 7 aa, synthetic construct
RGDRQDQ

SEQ ID NO: 6015 - protein, 7 aa, synthetic construct
RGDRRGF

SEQ ID NO: 6016 - protein, 7 aa, synthetic construct
RGDRRHS

SEQ ID NO: 6017 - protein, 7 aa, synthetic construct
RGDRSEK

SEQ ID NO: 6018 - protein, 7 aa, synthetic construct
RGDRSKI

SEQ ID NO: 6019 - protein, 7 aa, synthetic construct
RGDRSNA

SEQ ID NO: 6020 - protein, 7 aa, synthetic construct
RGDRVGV

SEQ ID NO: 6021 - protein, 7 aa, synthetic construct
RGDSGNT

SEQ ID NO: 6022 - protein, 7 aa, synthetic construct
RGDSGRI

SEQ ID NO: 6023 - protein, 7 aa, synthetic construct
RGDSIRN

SEQ ID NO: 6024 - protein, 7 aa, synthetic construct
RGDSNSI

SEQ ID NO: 6025 - protein, 7 aa, synthetic construct
RGDSTKQ

SEQ ID NO: 6026 - protein, 7 aa, synthetic construct
RGDTKAV

SEQ ID NO: 6027 - protein, 7 aa, synthetic construct
RGDTKFR

SEQ ID NO: 6028 - protein, 7 aa, synthetic construct
RGDTKTL

SEQ ID NO: 6029 - protein, 7 aa, synthetic construct
RGDTLQR

SEQ ID NO: 6030 - protein, 7 aa, synthetic construct
RGDTRSR

SEQ ID NO: 6031 - protein, 7 aa, synthetic construct
RGDTRVK

SEQ ID NO: 6032 - protein, 7 aa, synthetic construct
RGDTSFV

SEQ ID NO: 6033 - protein, 7 aa, synthetic construct
RGDVENR

SEQ ID NO: 6034 - protein, 7 aa, synthetic construct
RGDVESF

SEQ ID NO: 6035 - protein, 7 aa, synthetic construct
RGDVIQH

SEQ ID NO: 6036 - protein, 7 aa, synthetic construct
RGDVKNA

SEQ ID NO: 6037 - protein, 7 aa, synthetic construct
RGDVKNE

SEQ ID NO: 6038 - protein, 7 aa, synthetic construct
RGDVLHL

SEQ ID NO: 6039 - protein, 7 aa, synthetic construct
RGDVLTH

SEQ ID NO: 6040 - protein, 7 aa, synthetic construct
RGDVLTI

SEQ ID NO: 6041 - protein, 7 aa, synthetic construct
RGDVNGI

SEQ ID NO: 6042 - protein, 7 aa, synthetic construct
RGDAEEV

SEQ ID NO: 6043 - protein, 7 aa, synthetic construct
RGDVQRF

SEQ ID NO: 6044 - protein, 7 aa, synthetic construct
RGDVQRV

SEQ ID NO: 6045 - protein, 7 aa, synthetic construct
RGDVRAT

SEQ ID NO: 6046 - protein, 7 aa, synthetic construct
RGDVRRI

SEQ ID NO: 6047 - protein, 7 aa, synthetic construct
RGDVVRL

SEQ ID NO: 6048 - protein, 7 aa, synthetic construct
RGDERHG

SEQ ID NO: 6049 - protein, 7 aa, synthetic construct
RGDESSI

SEQ ID NO: 6050 - protein, 7 aa, synthetic construct
RGDAGGF

SEQ ID NO: 6051 - protein, 7 aa, synthetic construct
RGDFDVT

SEQ ID NO: 6052 - protein, 7 aa, synthetic construct
RGDFFHH

SEQ ID NO: 6053 - protein, 7 aa, synthetic construct
RGDFFHV

SEQ ID NO: 6054 - protein, 7 aa, synthetic construct
RGDFFTQ

SEQ ID NO: 6055 - protein, 7 aa, synthetic construct
RGDFGIK

SEQ ID NO: 6056 - protein, 7 aa, synthetic construct
RGDFHDN

SEQ ID NO: 6057 - protein, 7 aa, synthetic construct
RGDFLRR

SEQ ID NO: 6058 - protein, 7 aa, synthetic construct
RGDFNAR

SEQ ID NO: 6059 - protein, 7 aa, synthetic construct
RGDFNSI

SEQ ID NO: 6060 - protein, 7 aa, synthetic construct
RGDFQKF

SEQ ID NO: 6061 - protein, 7 aa, synthetic construct
RGDFSGS

SEQ ID NO: 6062 - protein, 7 aa, synthetic construct
RGDFSHG

SEQ ID NO: 6063 - protein, 7 aa, synthetic construct
RGDFSRR

SEQ ID NO: 6064 - protein, 7 aa, synthetic construct
RGDFVHK

SEQ ID NO: 6065 - protein, 7 aa, synthetic construct
RGDFVKL

SEQ ID NO: 6066 - protein, 7 aa, synthetic construct
RGDFVVR

SEQ ID NO: 6067 - protein, 7 aa, synthetic construct
RGDGAKF

SEQ ID NO: 6068 - protein, 7 aa, synthetic construct
RGDGFKQ

SEQ ID NO: 6069 - protein, 7 aa, synthetic construct
RGDGHFT

SEQ ID NO: 6070 - protein, 7 aa, synthetic construct
RGDGQKE

SEQ ID NO: 6071 - protein, 7 aa, synthetic construct
RGDGQNN

SEQ ID NO: 6072 - protein, 7 aa, synthetic construct
RGDGSRV

SEQ ID NO: 6073 - protein, 7 aa, synthetic construct
RGDGVKA

SEQ ID NO: 6074 - protein, 7 aa, synthetic construct
RGDGVVQ

SEQ ID NO: 6075 - protein, 7 aa, synthetic construct
RGDHFRN

SEQ ID NO: 6076 - protein, 7 aa, synthetic construct
RGDHGQT

SEQ ID NO: 6077 - protein, 7 aa, synthetic construct
RGDHHHF

SEQ ID NO: 6078 - protein, 7 aa, synthetic construct
RGDHLKQ

SEQ ID NO: 6079 - protein, 7 aa, synthetic construct
RGDHRQI

SEQ ID NO: 6080 - protein, 7 aa, synthetic construct
RGDHRTR

SEQ ID NO: 6081 - protein, 7 aa, synthetic construct
RGDHVGL

SEQ ID NO: 6082 - protein, 7 aa, synthetic construct
RGDIALV

SEQ ID NO: 6083 - protein, 7 aa, synthetic construct
RGDIDTK

SEQ ID NO: 6084 - protein, 7 aa, synthetic construct
RGDIGER

SEQ ID NO: 6085 - protein, 7 aa, synthetic construct
RGDIHRK

SEQ ID NO: 6086 - protein, 7 aa, synthetic construct
RGDILRK

SEQ ID NO: 6087 - protein, 7 aa, synthetic construct
RGDILVR

SEQ ID NO: 6088 - protein, 7 aa, synthetic construct
RGDIQRK

SEQ ID NO: 6089 - protein, 7 aa, synthetic construct
RGDIVHI

SEQ ID NO: 6090 - protein, 7 aa, synthetic construct
RGDKAQH

SEQ ID NO: 6091 - protein, 7 aa, synthetic construct
RGDKDLL

SEQ ID NO: 6092 - protein, 7 aa, synthetic construct
RGDKERK

SEQ ID NO: 6093 - protein, 7 aa, synthetic construct
RGDKERL

SEQ ID NO: 6094 - protein, 7 aa, synthetic construct
RGDKGNL

SEQ ID NO: 6095 - protein, 7 aa, synthetic construct
RGDKGST

SEQ ID NO: 6096 - protein, 7 aa, synthetic construct
RGDKHGN

SEQ ID NO: 6097 - protein, 7 aa, synthetic construct
RGDKHNL

SEQ ID NO: 6098 - protein, 7 aa, synthetic construct
RGDKKRF

SEQ ID NO: 6099 - protein, 7 aa, synthetic construct
RGDKNGV

SEQ ID NO: 6100 - protein, 7 aa, synthetic construct
RGDKNQN

SEQ ID NO: 6101 - protein, 7 aa, synthetic construct
RGDKRTF

SEQ ID NO: 6102 - protein, 7 aa, synthetic construct
RGDKSQA

SEQ ID NO: 6103 - protein, 7 aa, synthetic construct
RGDKSVQ

SEQ ID NO: 6104 - protein, 7 aa, synthetic construct
RGDKTSK

SEQ ID NO: 6105 - protein, 7 aa, synthetic construct
RGDARVR

SEQ ID NO: 6106 - protein, 7 aa, synthetic construct
RGDLFKI

SEQ ID NO: 6107 - protein, 7 aa, synthetic construct
RGDLGVT

SEQ ID NO: 6108 - protein, 7 aa, synthetic construct
RGDLHTN

SEQ ID NO: 6109 - protein, 7 aa, synthetic construct
RGDLITQ

SEQ ID NO: 6110 - protein, 7 aa, synthetic construct
RGDLLGI

SEQ ID NO: 6111 - protein, 7 aa, synthetic construct
RGDLLNG

SEQ ID NO: 6112 - protein, 7 aa, synthetic construct
RGDLNLI

SEQ ID NO: 6113 - protein, 7 aa, synthetic construct
RGDLQHT

SEQ ID NO: 6114 - protein, 7 aa, synthetic construct
RGDLRTE

SEQ ID NO: 6115 - protein, 7 aa, synthetic construct
RGDLRVA

SEQ ID NO: 6116 - protein, 7 aa, synthetic construct
RGDNGRQ

SEQ ID NO: 6117 - protein, 7 aa, synthetic construct
RGDAVAL

SEQ ID NO: 6118 - protein, 7 aa, synthetic construct
RGDNKHL

SEQ ID NO: 6119 - protein, 7 aa, synthetic construct
RGDNKQQ

SEQ ID NO: 6120 - protein, 7 aa, synthetic construct
RGDNLKV

SEQ ID NO: 6121 - protein, 7 aa, synthetic construct
RGDNTKS

SEQ ID NO: 6122 - protein, 7 aa, synthetic construct
RGDNVSR

SEQ ID NO: 6123 - protein, 7 aa, synthetic construct
RGDQGQG

SEQ ID NO: 6124 - protein, 7 aa, synthetic construct
RGDQLGI

SEQ ID NO: 6125 - protein, 7 aa, synthetic construct
RGDQLQE

SEQ ID NO: 6126 - protein, 7 aa, synthetic construct
RGDQLQH

SEQ ID NO: 6127 - protein, 7 aa, synthetic construct
RGDQQFV

SEQ ID NO: 6128 - protein, 7 aa, synthetic construct
RGDQQHT

SEQ ID NO: 6129 - protein, 7 aa, synthetic construct
RGDQSEN

SEQ ID NO: 6130 - protein, 7 aa, synthetic construct
RGDQTGQ

SEQ ID NO: 6131 - protein, 7 aa, synthetic construct
RGDQVKQ

SEQ ID NO: 6132 - protein, 7 aa, synthetic construct
RGDRANA

SEQ ID NO: 6133 - protein, 7 aa, synthetic construct
RGDRFGS

SEQ ID NO: 6134 - protein, 7 aa, synthetic construct
RGDRGAG

SEQ ID NO: 6135 - protein, 7 aa, synthetic construct
RGDRGAT

SEQ ID NO: 6136 - protein, 7 aa, synthetic construct
RGDRHDS

SEQ ID NO: 6137 - protein, 7 aa, synthetic construct
RGDRHKE

SEQ ID NO: 6138 - protein, 7 aa, synthetic construct
RGDRHKI

SEQ ID NO: 6139 - protein, 7 aa, synthetic construct
RGDRIEL

SEQ ID NO: 6140 - protein, 7 aa, synthetic construct
RGDRITS

SEQ ID NO: 6141 - protein, 7 aa, synthetic construct
RGDRKGS

SEQ ID NO: 6142 - protein, 7 aa, synthetic construct
RGDRLIL

SEQ ID NO: 6143 - protein, 7 aa, synthetic construct
RGDRNHI

SEQ ID NO: 6144 - protein, 7 aa, synthetic construct
RGDRNRF

SEQ ID NO: 6145 - protein, 7 aa, synthetic construct
RGDRQDL

SEQ ID NO: 6146 - protein, 7 aa, synthetic construct
RGDRQEH

SEQ ID NO: 6147 - protein, 7 aa, synthetic construct
RGDRRDT

SEQ ID NO: 6148 - protein, 7 aa, synthetic construct
RGDRRQQ

SEQ ID NO: 6149 - protein, 7 aa, synthetic construct
RGDRRQS

SEQ ID NO: 6150 - protein, 7 aa, synthetic construct
RGDRSGK

SEQ ID NO: 6151 - protein, 7 aa, synthetic construct
RGDRTFK

SEQ ID NO: 6152 - protein, 7 aa, synthetic construct
RGDRTHQ

SEQ ID NO: 6153 - protein, 7 aa, synthetic construct
RGDRTRD

SEQ ID NO: 6154 - protein, 7 aa, synthetic construct
RGDRVII

SEQ ID NO: 6155 - protein, 7 aa, synthetic construct
RGDSGHD

SEQ ID NO: 6156 - protein, 7 aa, synthetic construct
RGDSGSA

SEQ ID NO: 6157 - protein, 7 aa, synthetic construct
RGDSKHS

SEQ ID NO: 6158 - protein, 7 aa, synthetic construct
RGDDFRS

SEQ ID NO: 6159 - protein, 7 aa, synthetic construct
RGDSQKI

SEQ ID NO: 6160 - protein, 7 aa, synthetic construct
RGDSTSF

SEQ ID NO: 6161 - protein, 7 aa, synthetic construct
RGDTAHS

SEQ ID NO: 6162 - protein, 7 aa, synthetic construct
RGDTANR

SEQ ID NO: 6163 - protein, 7 aa, synthetic construct
RGDTANS

SEQ ID NO: 6164 - protein, 7 aa, synthetic construct
RGDVATK

SEQ ID NO: 6165 - protein, 7 aa, synthetic construct
RGDVDTK

SEQ ID NO: 6166 - protein, 7 aa, synthetic construct
RGDVTHT

SEQ ID NO: 6167 - protein, 7 aa, synthetic construct
RGDVVTF

SEQ ID NO: 6168 - protein, 7 aa, synthetic construct
RGDDLFR

SEQ ID NO: 6169 - protein, 7 aa, synthetic construct
RGDDNDG

SEQ ID NO: 6170 - protein, 7 aa, synthetic construct
RGDEFSF

SEQ ID NO: 6171 - protein, 7 aa, synthetic construct
RGDAFRS

SEQ ID NO: 6172 - protein, 7 aa, synthetic construct
RGDAGFV

SEQ ID NO: 6173 - protein, 7 aa, synthetic construct
RGDFGKI

SEQ ID NO: 6174 - protein, 7 aa, synthetic construct
RGDFHGR

SEQ ID NO: 6175 - protein, 7 aa, synthetic construct
RGDFLKV

SEQ ID NO: 6176 - protein, 7 aa, synthetic construct
RGDFNQQ

SEQ ID NO: 6177 - protein, 7 aa, synthetic construct
RGDFNRE

SEQ ID NO: 6178 - protein, 7 aa, synthetic construct
RGDFQRI

SEQ ID NO: 6179 - protein, 7 aa, synthetic construct
RGDFRIK

SEQ ID NO: 6180 - protein, 7 aa, synthetic construct
RGDFTSR

SEQ ID NO: 6181 - protein, 7 aa, synthetic construct
RGDGASR

SEQ ID NO: 6182 - protein, 7 aa, synthetic construct
RGDGFIQ

SEQ ID NO: 6183 - protein, 7 aa, synthetic construct
RGDGGAK

SEQ ID NO: 6184 - protein, 7 aa, synthetic construct
RGDGSAL

SEQ ID NO: 6185 - protein, 7 aa, synthetic construct
RGDGSKK

SEQ ID NO: 6186 - protein, 7 aa, synthetic construct
RGDGTKV

SEQ ID NO: 6187 - protein, 7 aa, synthetic construct
RGDHAII

SEQ ID NO: 6188 - protein, 7 aa, synthetic construct
RGDHARN

SEQ ID NO: 6189 - protein, 7 aa, synthetic construct
RGDHAVK

SEQ ID NO: 6190 - protein, 7 aa, synthetic construct
RGDHDDR

SEQ ID NO: 6191 - protein, 7 aa, synthetic construct
RGDHENN

SEQ ID NO: 6192 - protein, 7 aa, synthetic construct
RGDHESR

SEQ ID NO: 6193 - protein, 7 aa, synthetic construct
RGDHHEI

SEQ ID NO: 6194 - protein, 7 aa, synthetic construct
RGDHHFT

SEQ ID NO: 6195 - protein, 7 aa, synthetic construct
RGDHSAF

SEQ ID NO: 6196 - protein, 7 aa, synthetic construct
RGDHSKA

SEQ ID NO: 6197 - protein, 7 aa, synthetic construct
RGDHTKT

SEQ ID NO: 6198 - protein, 7 aa, synthetic construct
RGDIAAR

SEQ ID NO: 6199 - protein, 7 aa, synthetic construct
RGDIKGL

SEQ ID NO: 6200 - protein, 7 aa, synthetic construct
RGDILTQ

SEQ ID NO: 6201 - protein, 7 aa, synthetic construct
RGDIRGN

SEQ ID NO: 6202 - protein, 7 aa, synthetic construct
RGDIRRN

SEQ ID NO: 6203 - protein, 7 aa, synthetic construct
RGDISRK

SEQ ID NO: 6204 - protein, 7 aa, synthetic construct
RGDKDFI

SEQ ID NO: 6205 - protein, 7 aa, synthetic construct
RGDKDNL

SEQ ID NO: 6206 - protein, 7 aa, synthetic construct
RGDKGHI

SEQ ID NO: 6207 - protein, 7 aa, synthetic construct
RGDKITV

SEQ ID NO: 6208 - protein, 7 aa, synthetic construct
RGDKKGT

SEQ ID NO: 6209 - protein, 7 aa, synthetic construct
RGDKKLQ

SEQ ID NO: 6210 - protein, 7 aa, synthetic construct
RGDKNIV

SEQ ID NO: 6211 - protein, 7 aa, synthetic construct
RGDKNRQ

SEQ ID NO: 6212 - protein, 7 aa, synthetic construct
RGDKQVV

SEQ ID NO: 6213 - protein, 7 aa, synthetic construct
RGDKRTE

SEQ ID NO: 6214 - protein, 7 aa, synthetic construct
RGDKSQQ

SEQ ID NO: 6215 - protein, 7 aa, synthetic construct
RGDKTKF

SEQ ID NO: 6216 - protein, 7 aa, synthetic construct
RGDKVHT

SEQ ID NO: 6217 - protein, 7 aa, synthetic construct
RGDLEHG

SEQ ID NO: 6218 - protein, 7 aa, synthetic construct
RGDLERT

SEQ ID NO: 6219 - protein, 7 aa, synthetic construct
RGDLGSS

SEQ ID NO: 6220 - protein, 7 aa, synthetic construct
RGDLGVA

SEQ ID NO: 6221 - protein, 7 aa, synthetic construct
RGDLGVS

SEQ ID NO: 6222 - protein, 7 aa, synthetic construct
RGDLHTE

SEQ ID NO: 6223 - protein, 7 aa, synthetic construct
RGDLIRS

SEQ ID NO: 6224 - protein, 7 aa, synthetic construct
RGDLKKS

SEQ ID NO: 6225 - protein, 7 aa, synthetic construct
RGDASRL

SEQ ID NO: 6226 - protein, 7 aa, synthetic construct
RGDLLTK

SEQ ID NO: 6227 - protein, 7 aa, synthetic construct
RGDLNVA

SEQ ID NO: 6228 - protein, 7 aa, synthetic construct
RGDLRHQ

SEQ ID NO: 6229 - protein, 7 aa, synthetic construct
RGDLRSQ

SEQ ID NO: 6230 - protein, 7 aa, synthetic construct
RGDLSGT

SEQ ID NO: 6231 - protein, 7 aa, synthetic construct
RGDLSKV

SEQ ID NO: 6232 - protein, 7 aa, synthetic construct
RGDLTTH

SEQ ID NO: 6233 - protein, 7 aa, synthetic construct
RGDLTVS

SEQ ID NO: 6234 - protein, 7 aa, synthetic construct
RGDLVEV

SEQ ID NO: 6235 - protein, 7 aa, synthetic construct
RGDATKK

SEQ ID NO: 6236 - protein, 7 aa, synthetic construct
RGDNAKF

SEQ ID NO: 6237 - protein, 7 aa, synthetic construct
RGDNEIR

SEQ ID NO: 6238 - protein, 7 aa, synthetic construct
RGDNINK

SEQ ID NO: 6239 - protein, 7 aa, synthetic construct
RGDNKAI

SEQ ID NO: 6240 - protein, 7 aa, synthetic construct
RGDNKGR

SEQ ID NO: 6241 - protein, 7 aa, synthetic construct
RGDNKRF

SEQ ID NO: 6242 - protein, 7 aa, synthetic construct
RGDNQHI

SEQ ID NO: 6243 - protein, 7 aa, synthetic construct
RGDNRRI

SEQ ID NO: 6244 - protein, 7 aa, synthetic construct
RGDNSFK

SEQ ID NO: 6245 - protein, 7 aa, synthetic construct
RGDNSRQ

SEQ ID NO: 6246 - protein, 7 aa, synthetic construct
RGDNVTI

SEQ ID NO: 6247 - protein, 7 aa, synthetic construct
RGDQAVH

SEQ ID NO: 6248 - protein, 7 aa, synthetic construct
RGDQFKT

SEQ ID NO: 6249 - protein, 7 aa, synthetic construct
RGDQGSI

SEQ ID NO: 6250 - protein, 7 aa, synthetic construct
RGDQGSQ

SEQ ID NO: 6251 - protein, 7 aa, synthetic construct
RGDQHNS

SEQ ID NO: 6252 - protein, 7 aa, synthetic construct
RGDQIKQ

SEQ ID NO: 6253 - protein, 7 aa, synthetic construct
RGDQIKV

SEQ ID NO: 6254 - protein, 7 aa, synthetic construct
RGDQIQR

SEQ ID NO: 6255 - protein, 7 aa, synthetic construct
RGDQKKF

SEQ ID NO: 6256 - protein, 7 aa, synthetic construct
RGDQRVA

SEQ ID NO: 6257 - protein, 7 aa, synthetic construct
RGDQTKN

SEQ ID NO: 6258 - protein, 7 aa, synthetic construct
RGDREHQ

SEQ ID NO: 6259 - protein, 7 aa, synthetic construct
RGDRENV

SEQ ID NO: 6260 - protein, 7 aa, synthetic construct
RGDRFLF

SEQ ID NO: 6261 - protein, 7 aa, synthetic construct
RGDRHQF

SEQ ID NO: 6262 - protein, 7 aa, synthetic construct
RGDRHTV

SEQ ID NO: 6263 - protein, 7 aa, synthetic construct
RGDRNVQ

SEQ ID NO: 6264 - protein, 7 aa, synthetic construct
RGDRQKA

SEQ ID NO: 6265 - protein, 7 aa, synthetic construct
RGDRQNN

SEQ ID NO: 6266 - protein, 7 aa, synthetic construct
RGDRRVF

SEQ ID NO: 6267 - protein, 7 aa, synthetic construct
RGDRSHA

SEQ ID NO: 6268 - protein, 7 aa, synthetic construct
RGDRSHG

SEQ ID NO: 6269 - protein, 7 aa, synthetic construct
RGDRSNL

SEQ ID NO: 6270 - protein, 7 aa, synthetic construct
RGDRTVL

SEQ ID NO: 6271 - protein, 7 aa, synthetic construct
RGDRVNF

SEQ ID NO: 6272 - protein, 7 aa, synthetic construct
RGDRVNK

SEQ ID NO: 6273 - protein, 7 aa, synthetic construct
RGDRVVK

SEQ ID NO: 6274 - protein, 7 aa, synthetic construct
RGDSGIR

SEQ ID NO: 6275 - protein, 7 aa, synthetic construct
RGDSGVG

SEQ ID NO: 6276 - protein, 7 aa, synthetic construct
RGDSKQL

SEQ ID NO: 6277 - protein, 7 aa, synthetic construct
RGDSNRE

SEQ ID NO: 6278 - protein, 7 aa, synthetic construct
RGDSNRR

SEQ ID NO: 6279 - protein, 7 aa, synthetic construct
RGDSRSD

SEQ ID NO: 6280 - protein, 7 aa, synthetic construct
RGDSSQK

SEQ ID NO: 6281 - protein, 7 aa, synthetic construct
RGDTAHT

SEQ ID NO: 6282 - protein, 7 aa, synthetic construct
RGDTGAR

SEQ ID NO: 6283 - protein, 7 aa, synthetic construct
RGDTGIR

SEQ ID NO: 6284 - protein, 7 aa, synthetic construct
RGDTHSR

SEQ ID NO: 6285 - protein, 7 aa, synthetic construct
RGDTKAQ

SEQ ID NO: 6286 - protein, 7 aa, synthetic construct
RGDTKLV

SEQ ID NO: 6287 - protein, 7 aa, synthetic construct
RGDTSGK

SEQ ID NO: 6288 - protein, 7 aa, synthetic construct
RGDVDNR

SEQ ID NO: 6289 - protein, 7 aa, synthetic construct
RGDVEQR

SEQ ID NO: 6290 - protein, 7 aa, synthetic construct
RGDVGTS

SEQ ID NO: 6291 - protein, 7 aa, synthetic construct
RGDVINK

SEQ ID NO: 6292 - protein, 7 aa, synthetic construct
RGDVKNQ

SEQ ID NO: 6293 - protein, 7 aa, synthetic construct
RGDVKQQ

SEQ ID NO: 6294 - protein, 7 aa, synthetic construct
RGDVKQV

SEQ ID NO: 6295 - protein, 7 aa, synthetic construct
RGDVNNK

SEQ ID NO: 6296 - protein, 7 aa, synthetic construct
RGDVQKV

SEQ ID NO: 6297 - protein, 7 aa, synthetic construct
RGDVQSH

SEQ ID NO: 6298 - protein, 7 aa, synthetic construct
RGDVRSH

SEQ ID NO: 6299 - protein, 7 aa, synthetic construct
RGDVSKR

SEQ ID NO: 6300 - protein, 7 aa, synthetic construct
RGDVTKH

SEQ ID NO: 6301 - protein, 7 aa, synthetic construct
RGDVVLL

SEQ ID NO: 6302 - protein, 7 aa, synthetic construct
RGDDRRT

SEQ ID NO: 6303 - protein, 7 aa, synthetic construct
RGDAAGI

SEQ ID NO: 6304 - protein, 7 aa, synthetic construct
RGDEGRK

SEQ ID NO: 6305 - protein, 7 aa, synthetic construct
RGDEVHN

SEQ ID NO: 6306 - protein, 7 aa, synthetic construct
RGDAGIR

SEQ ID NO: 6307 - protein, 7 aa, synthetic construct
RGDFAFK

SEQ ID NO: 6308 - protein, 7 aa, synthetic construct
RGDFALS

SEQ ID NO: 6309 - protein, 7 aa, synthetic construct
RGDFEGT

SEQ ID NO: 6310 - protein, 7 aa, synthetic construct
RGDFFNV

SEQ ID NO: 6311 - protein, 7 aa, synthetic construct
RGDFGVS

SEQ ID NO: 6312 - protein, 7 aa, synthetic construct
RGDFHNQ

SEQ ID NO: 6313 - protein, 7 aa, synthetic construct
RGDFHNR

SEQ ID NO: 6314 - protein, 7 aa, synthetic construct
RGDFKFR

SEQ ID NO: 6315 - protein, 7 aa, synthetic construct
RGDFKGR

SEQ ID NO: 6316 - protein, 7 aa, synthetic construct
RGDFLGF

SEQ ID NO: 6317 - protein, 7 aa, synthetic construct
RGDFQTG

SEQ ID NO: 6318 - protein, 7 aa, synthetic construct
RGDFQTR

SEQ ID NO: 6319 - protein, 7 aa, synthetic construct
RGDFRGR

SEQ ID NO: 6320 - protein, 7 aa, synthetic construct
RGDFSQK

SEQ ID NO: 6321 - protein, 7 aa, synthetic construct
RGDFTFT

SEQ ID NO: 6322 - protein, 7 aa, synthetic construct
RGDFVHN

SEQ ID NO: 6323 - protein, 7 aa, synthetic construct
RGDFVKR

SEQ ID NO: 6324 - protein, 7 aa, synthetic construct
RGDFVNV

SEQ ID NO: 6325 - protein, 7 aa, synthetic construct
RGDGESL

SEQ ID NO: 6326 - protein, 7 aa, synthetic construct
RGDAIRL

SEQ ID NO: 6327 - protein, 7 aa, synthetic construct
RGDGLSI

SEQ ID NO: 6328 - protein, 7 aa, synthetic construct
RGDGRIL

SEQ ID NO: 6329 - protein, 7 aa, synthetic construct
RGDGRST

SEQ ID NO: 6330 - protein, 7 aa, synthetic construct
RGDGSNN

SEQ ID NO: 6331 - protein, 7 aa, synthetic construct
RGDGSRN

SEQ ID NO: 6332 - protein, 7 aa, synthetic construct
RGDGSSL

SEQ ID NO: 6333 - protein, 7 aa, synthetic construct
RGDGTKN

SEQ ID NO: 6334 - protein, 7 aa, synthetic construct
RGDGVVT

SEQ ID NO: 6335 - protein, 7 aa, synthetic construct
RGDHAGL

SEQ ID NO: 6336 - protein, 7 aa, synthetic construct
RGDHEAH

SEQ ID NO: 6337 - protein, 7 aa, synthetic construct
RGDHGHQ

SEQ ID NO: 6338 - protein, 7 aa, synthetic construct
RGDHIHL

SEQ ID NO: 6339 - protein, 7 aa, synthetic construct
RGDHLDT

SEQ ID NO: 6340 - protein, 7 aa, synthetic construct
RGDHNFK

SEQ ID NO: 6341 - protein, 7 aa, synthetic construct
RGDHQRV

SEQ ID NO: 6342 - protein, 7 aa, synthetic construct
RGDHSLN

SEQ ID NO: 6343 - protein, 7 aa, synthetic construct
RGDHTSQ

SEQ ID NO: 6344 - protein, 7 aa, synthetic construct
RGDHVTF

SEQ ID NO: 6345 - protein, 7 aa, synthetic construct
RGDIEHS

SEQ ID NO: 6346 - protein, 7 aa, synthetic construct
RGDIFGQ

SEQ ID NO: 6347 - protein, 7 aa, synthetic construct
RGDIHQL

SEQ ID NO: 6348 - protein, 7 aa, synthetic construct
RGDIHTV

SEQ ID NO: 6349 - protein, 7 aa, synthetic construct
RGDIKAF

SEQ ID NO: 6350 - protein, 7 aa, synthetic construct
RGDILRT

SEQ ID NO: 6351 - protein, 7 aa, synthetic construct
RGDKAGQ

SEQ ID NO: 6352 - protein, 7 aa, synthetic construct
RGDKAVH

SEQ ID NO: 6353 - protein, 7 aa, synthetic construct
RGDKDKK

SEQ ID NO: 6354 - protein, 7 aa, synthetic construct
RGDKEQR

SEQ ID NO: 6355 - protein, 7 aa, synthetic construct
RGDAQRL

SEQ ID NO: 6356 - protein, 7 aa, synthetic construct
RGDKFNS

SEQ ID NO: 6357 - protein, 7 aa, synthetic construct
RGDKHTT

SEQ ID NO: 6358 - protein, 7 aa, synthetic construct
RGDKIDI

SEQ ID NO: 6359 - protein, 7 aa, synthetic construct
RGDKKAF

SEQ ID NO: 6360 - protein, 7 aa, synthetic construct
RGDKKLF

SEQ ID NO: 6361 - protein, 7 aa, synthetic construct
RGDKLDK

SEQ ID NO: 6362 - protein, 7 aa, synthetic construct
RGDKRLV

SEQ ID NO: 6363 - protein, 7 aa, synthetic construct
RGDKTSH

SEQ ID NO: 6364 - protein, 7 aa, synthetic construct
RGDARTH

SEQ ID NO: 6365 - protein, 7 aa, synthetic construct
RGDLGGV

SEQ ID NO: 6366 - protein, 7 aa, synthetic construct
RGDLHQI

SEQ ID NO: 6367 - protein, 7 aa, synthetic construct
RGDLISH

SEQ ID NO: 6368 - protein, 7 aa, synthetic construct
RGDLKIQ

SEQ ID NO: 6369 - protein, 7 aa, synthetic construct
RGDLKQT

SEQ ID NO: 6370 - protein, 7 aa, synthetic construct
RGDLREN

SEQ ID NO: 6371 - protein, 7 aa, synthetic construct
RGDLRSG

SEQ ID NO: 6372 - protein, 7 aa, synthetic construct
RGDLVVQ

SEQ ID NO: 6373 - protein, 7 aa, synthetic construct
RGDNFFR

SEQ ID NO: 6374 - protein, 7 aa, synthetic construct
RGDATTR

SEQ ID NO: 6375 - protein, 7 aa, synthetic construct
RGDNHGF

SEQ ID NO: 6376 - protein, 7 aa, synthetic construct
RGDNHVI

SEQ ID NO: 6377 - protein, 7 aa, synthetic construct
RGDNKAK

SEQ ID NO: 6378 - protein, 7 aa, synthetic construct
RGDNKFQ

SEQ ID NO: 6379 - protein, 7 aa, synthetic construct
RGDNKRN

SEQ ID NO: 6380 - protein, 7 aa, synthetic construct
RGDNLVK

SEQ ID NO: 6381 - protein, 7 aa, synthetic construct
RGDNQKL

SEQ ID NO: 6382 - protein, 7 aa, synthetic construct
RGDNQKV

SEQ ID NO: 6383 - protein, 7 aa, synthetic construct
RGDNRTG

SEQ ID NO: 6384 - protein, 7 aa, synthetic construct
RGDQASV

SEQ ID NO: 6385 - protein, 7 aa, synthetic construct
RGDQGGR

SEQ ID NO: 6386 - protein, 7 aa, synthetic construct
RGDQGSN

SEQ ID NO: 6387 - protein, 7 aa, synthetic construct
RGDQGTV

SEQ ID NO: 6388 - protein, 7 aa, synthetic construct
RGDQHII

SEQ ID NO: 6389 - protein, 7 aa, synthetic construct
RGDQISL

SEQ ID NO: 6390 - protein, 7 aa, synthetic construct
RGDQLKK

SEQ ID NO: 6391 - protein, 7 aa, synthetic construct
RGDQLRF

SEQ ID NO: 6392 - protein, 7 aa, synthetic construct
RGDQQHD

SEQ ID NO: 6393 - protein, 7 aa, synthetic construct
RGDQRGH

SEQ ID NO: 6394 - protein, 7 aa, synthetic construct
RGDQSQA

SEQ ID NO: 6395 - protein, 7 aa, synthetic construct
RGDQTTR

SEQ ID NO: 6396 - protein, 7 aa, synthetic construct
RGDQVRT

SEQ ID NO: 6397 - protein, 7 aa, synthetic construct
RGDRAKT

SEQ ID NO: 6398 - protein, 7 aa, synthetic construct
RGDRANH

SEQ ID NO: 6399 - protein, 7 aa, synthetic construct
RGDRDHI

SEQ ID NO: 6400 - protein, 7 aa, synthetic construct
RGDREFF

SEQ ID NO: 6401 - protein, 7 aa, synthetic construct
RGDREVT

SEQ ID NO: 6402 - protein, 7 aa, synthetic construct
RGDRFLV

SEQ ID NO: 6403 - protein, 7 aa, synthetic construct
RGDRKEF

SEQ ID NO: 6404 - protein, 7 aa, synthetic construct
RGDRKSN

SEQ ID NO: 6405 - protein, 7 aa, synthetic construct
RGDRLII

SEQ ID NO: 6406 - protein, 7 aa, synthetic construct
RGDRLKT

SEQ ID NO: 6407 - protein, 7 aa, synthetic construct
RGDRLSF

SEQ ID NO: 6408 - protein, 7 aa, synthetic construct
RGDRNGV

SEQ ID NO: 6409 - protein, 7 aa, synthetic construct
RGDRNKE

SEQ ID NO: 6410 - protein, 7 aa, synthetic construct
RGDRQHV

SEQ ID NO: 6411 - protein, 7 aa, synthetic construct
RGDRQLT

SEQ ID NO: 6412 - protein, 7 aa, synthetic construct
RGDRRID

SEQ ID NO: 6413 - protein, 7 aa, synthetic construct
RGDRSKT

SEQ ID NO: 6414 - protein, 7 aa, synthetic construct
RGDSANH

SEQ ID NO: 6415 - protein, 7 aa, synthetic construct
RGDSDNI

SEQ ID NO: 6416 - protein, 7 aa, synthetic construct
RGDSEGG

SEQ ID NO: 6417 - protein, 7 aa, synthetic construct
RGDSKFL

SEQ ID NO: 6418 - protein, 7 aa, synthetic construct
RGDSNHI

SEQ ID NO: 6419 - protein, 7 aa, synthetic construct
RGDSNKQ

SEQ ID NO: 6420 - protein, 7 aa, synthetic construct
RGDSQRH

SEQ ID NO: 6421 - protein, 7 aa, synthetic construct
RGDSRGS

SEQ ID NO: 6422 - protein, 7 aa, synthetic construct
RGDSRKN

SEQ ID NO: 6423 - protein, 7 aa, synthetic construct
RGDSRSV

SEQ ID NO: 6424 - protein, 7 aa, synthetic construct
RGDTGII

SEQ ID NO: 6425 - protein, 7 aa, synthetic construct
RGDTGNV

SEQ ID NO: 6426 - protein, 7 aa, synthetic construct
RGDTKVR

SEQ ID NO: 6427 - protein, 7 aa, synthetic construct
RGDTLNF

SEQ ID NO: 6428 - protein, 7 aa, synthetic construct
RGDTLTK

SEQ ID NO: 6429 - protein, 7 aa, synthetic construct
RGDTQDR

SEQ ID NO: 6430 - protein, 7 aa, synthetic construct
RGDTRLS

SEQ ID NO: 6431 - protein, 7 aa, synthetic construct
RGDTVQT

SEQ ID NO: 6432 - protein, 7 aa, synthetic construct
RGDVART

SEQ ID NO: 6433 - protein, 7 aa, synthetic construct
RGDVDQK

SEQ ID NO: 6434 - protein, 7 aa, synthetic construct
RGDVFGV

SEQ ID NO: 6435 - protein, 7 aa, synthetic construct
RGDVFNR

SEQ ID NO: 6436 - protein, 7 aa, synthetic construct
RGDVRLK

SEQ ID NO: 6437 - protein, 7 aa, synthetic construct
RGDVRSK

SEQ ID NO: 6438 - protein, 7 aa, synthetic construct
RGDDRKL

SEQ ID NO: 6439 - protein, 7 aa, synthetic construct
RGDDSGH

SEQ ID NO: 6440 - protein, 7 aa, synthetic construct
RGDEGIA

SEQ ID NO: 6441 - protein, 7 aa, synthetic construct
RGDEINV

SEQ ID NO: 6442 - protein, 7 aa, synthetic construct
RGDERHI

SEQ ID NO: 6443 - protein, 7 aa, synthetic construct
RGDFGRA

SEQ ID NO: 6444 - protein, 7 aa, synthetic construct
RGDFIFK

SEQ ID NO: 6445 - protein, 7 aa, synthetic construct
RGDFKHR

SEQ ID NO: 6446 - protein, 7 aa, synthetic construct
RGDFKQA

SEQ ID NO: 6447 - protein, 7 aa, synthetic construct
RGDFLFS

SEQ ID NO: 6448 - protein, 7 aa, synthetic construct
RGDAHHL

SEQ ID NO: 6449 - protein, 7 aa, synthetic construct
RGDFNHR

SEQ ID NO: 6450 - protein, 7 aa, synthetic construct
RGDFNVV

SEQ ID NO: 6451 - protein, 7 aa, synthetic construct
RGDFRNH

SEQ ID NO: 6452 - protein, 7 aa, synthetic construct
RGDFRRG

SEQ ID NO: 6453 - protein, 7 aa, synthetic construct
RGDFSEQ

SEQ ID NO: 6454 - protein, 7 aa, synthetic construct
RGDFSQQ

SEQ ID NO: 6455 - protein, 7 aa, synthetic construct
RGDFSSE

SEQ ID NO: 6456 - protein, 7 aa, synthetic construct
RGDFVNE

SEQ ID NO: 6457 - protein, 7 aa, synthetic construct
RGDGAKH

SEQ ID NO: 6458 - protein, 7 aa, synthetic construct
RGDGGSH

SEQ ID NO: 6459 - protein, 7 aa, synthetic construct
RGDGRII

SEQ ID NO: 6460 - protein, 7 aa, synthetic construct
RGDGRNH

SEQ ID NO: 6461 - protein, 7 aa, synthetic construct
RGDGRTT

SEQ ID NO: 6462 - protein, 7 aa, synthetic construct
RGDGTHQ

SEQ ID NO: 6463 - protein, 7 aa, synthetic construct
RGDGTKQ

SEQ ID NO: 6464 - protein, 7 aa, synthetic construct
RGDGTQK

SEQ ID NO: 6465 - protein, 7 aa, synthetic construct
RGDGVRS

SEQ ID NO: 6466 - protein, 7 aa, synthetic construct
RGDHDTK

SEQ ID NO: 6467 - protein, 7 aa, synthetic construct
RGDHENQ

SEQ ID NO: 6468 - protein, 7 aa, synthetic construct
RGDHFKN

SEQ ID NO: 6469 - protein, 7 aa, synthetic construct
RGDHFVL

SEQ ID NO: 6470 - protein, 7 aa, synthetic construct
RGDHGIN

SEQ ID NO: 6471 - protein, 7 aa, synthetic construct
RGDHHNH

SEQ ID NO: 6472 - protein, 7 aa, synthetic construct
RGDHHTL

SEQ ID NO: 6473 - protein, 7 aa, synthetic construct
RGDHIQR

SEQ ID NO: 6474 - protein, 7 aa, synthetic construct
RGDHISR

SEQ ID NO: 6475 - protein, 7 aa, synthetic construct
RGDHKSV

SEQ ID NO: 6476 - protein, 7 aa, synthetic construct
RGDALGV

SEQ ID NO: 6477 - protein, 7 aa, synthetic construct
RGDHSEL

SEQ ID NO: 6478 - protein, 7 aa, synthetic construct
RGDHSTQ

SEQ ID NO: 6479 - protein, 7 aa, synthetic construct
RGDHTVK

SEQ ID NO: 6480 - protein, 7 aa, synthetic construct
RGDHVDR

SEQ ID NO: 6481 - protein, 7 aa, synthetic construct
RGDIFRR

SEQ ID NO: 6482 - protein, 7 aa, synthetic construct
RGDIHFQ

SEQ ID NO: 6483 - protein, 7 aa, synthetic construct
RGDILSK

SEQ ID NO: 6484 - protein, 7 aa, synthetic construct
RGDINKI

SEQ ID NO: 6485 - protein, 7 aa, synthetic construct
RGDINKV

SEQ ID NO: 6486 - protein, 7 aa, synthetic construct
RGDIRIK

SEQ ID NO: 6487 - protein, 7 aa, synthetic construct
RGDISFR

SEQ ID NO: 6488 - protein, 7 aa, synthetic construct
RGDISKL

SEQ ID NO: 6489 - protein, 7 aa, synthetic construct
RGDISNI

SEQ ID NO: 6490 - protein, 7 aa, synthetic construct
RGDITFI

SEQ ID NO: 6491 - protein, 7 aa, synthetic construct
RGDIVSR

SEQ ID NO: 6492 - protein, 7 aa, synthetic construct
RGDIVTR

SEQ ID NO: 6493 - protein, 7 aa, synthetic construct
RGDKGHV

SEQ ID NO: 6494 - protein, 7 aa, synthetic construct
RGDKGKL

SEQ ID NO: 6495 - protein, 7 aa, synthetic construct
RGDKHQR

SEQ ID NO: 6496 - protein, 7 aa, synthetic construct
RGDKHSL

SEQ ID NO: 6497 - protein, 7 aa, synthetic construct
RGDKITI

SEQ ID NO: 6498 - protein, 7 aa, synthetic construct
RGDKKDS

SEQ ID NO: 6499 - protein, 7 aa, synthetic construct
RGDKKKE

SEQ ID NO: 6500 - protein, 7 aa, synthetic construct
RGDKLAF

SEQ ID NO: 6501 - protein, 7 aa, synthetic construct
RGDKLVI

SEQ ID NO: 6502 - protein, 7 aa, synthetic construct
RGDARIQ

SEQ ID NO: 6503 - protein, 7 aa, synthetic construct
RGDKRIN

SEQ ID NO: 6504 - protein, 7 aa, synthetic construct
RGDKTDI

SEQ ID NO: 6505 - protein, 7 aa, synthetic construct
RGDARSS

SEQ ID NO: 6506 - protein, 7 aa, synthetic construct
RGDKVST

SEQ ID NO: 6507 - protein, 7 aa, synthetic construct
RGDLDGR

SEQ ID NO: 6508 - protein, 7 aa, synthetic construct
RGDLFHQ

SEQ ID NO: 6509 - protein, 7 aa, synthetic construct
RGDLFQK

SEQ ID NO: 6510 - protein, 7 aa, synthetic construct
RGDASHS

SEQ ID NO: 6511 - protein, 7 aa, synthetic construct
RGDLHKV

SEQ ID NO: 6512 - protein, 7 aa, synthetic construct
RGDLHVK

SEQ ID NO: 6513 - protein, 7 aa, synthetic construct
RGDLLFS

SEQ ID NO: 6514 - protein, 7 aa, synthetic construct
RGDLNVV

SEQ ID NO: 6515 - protein, 7 aa, synthetic construct
RGDLSGL

SEQ ID NO: 6516 - protein, 7 aa, synthetic construct
RGDLSVE

SEQ ID NO: 6517 - protein, 7 aa, synthetic construct
RGDLTAI

SEQ ID NO: 6518 - protein, 7 aa, synthetic construct
RGDLVNA

SEQ ID NO: 6519 - protein, 7 aa, synthetic construct
RGDATSL

SEQ ID NO: 6520 - protein, 7 aa, synthetic construct
RGDNFRL

SEQ ID NO: 6521 - protein, 7 aa, synthetic construct
RGDNGRI

SEQ ID NO: 6522 - protein, 7 aa, synthetic construct
RGDNKTK

SEQ ID NO: 6523 - protein, 7 aa, synthetic construct
RGDNTGA

SEQ ID NO: 6524 - protein, 7 aa, synthetic construct
RGDQGDR

SEQ ID NO: 6525 - protein, 7 aa, synthetic construct
RGDQGFN

SEQ ID NO: 6526 - protein, 7 aa, synthetic construct
RGDQHRE

SEQ ID NO: 6527 - protein, 7 aa, synthetic construct
RGDQKFV

SEQ ID NO: 6528 - protein, 7 aa, synthetic construct
RGDQKKD

SEQ ID NO: 6529 - protein, 7 aa, synthetic construct
RGDQKVK

SEQ ID NO: 6530 - protein, 7 aa, synthetic construct
RGDQNRA

SEQ ID NO: 6531 - protein, 7 aa, synthetic construct
RGDQQKQ

SEQ ID NO: 6532 - protein, 7 aa, synthetic construct
RGDQRGG

SEQ ID NO: 6533 - protein, 7 aa, synthetic construct
RGDQRSV

SEQ ID NO: 6534 - protein, 7 aa, synthetic construct
RGDQSLT

SEQ ID NO: 6535 - protein, 7 aa, synthetic construct
RGDQVVH

SEQ ID NO: 6536 - protein, 7 aa, synthetic construct
RGDREKG

SEQ ID NO: 6537 - protein, 7 aa, synthetic construct
RGDRFIT

SEQ ID NO: 6538 - protein, 7 aa, synthetic construct
RGDRGER

SEQ ID NO: 6539 - protein, 7 aa, synthetic construct
RGDRGQK

SEQ ID NO: 6540 - protein, 7 aa, synthetic construct
RGDRGVA

SEQ ID NO: 6541 - protein, 7 aa, synthetic construct
RGDRINV

SEQ ID NO: 6542 - protein, 7 aa, synthetic construct
RGDRITK

SEQ ID NO: 6543 - protein, 7 aa, synthetic construct
RGDRKLL

SEQ ID NO: 6544 - protein, 7 aa, synthetic construct
RGDRKSF

SEQ ID NO: 6545 - protein, 7 aa, synthetic construct
RGDRLEH

SEQ ID NO: 6546 - protein, 7 aa, synthetic construct
RGDRNKL

SEQ ID NO: 6547 - protein, 7 aa, synthetic construct
RGDRQLI

SEQ ID NO: 6548 - protein, 7 aa, synthetic construct
RGDRQSL

SEQ ID NO: 6549 - protein, 7 aa, synthetic construct
RGDRRVE

SEQ ID NO: 6550 - protein, 7 aa, synthetic construct
RGDRSRQ

SEQ ID NO: 6551 - protein, 7 aa, synthetic construct
RGDRTNQ

SEQ ID NO: 6552 - protein, 7 aa, synthetic construct
RGDRTTE

SEQ ID NO: 6553 - protein, 7 aa, synthetic construct
RGDRTTI

SEQ ID NO: 6554 - protein, 7 aa, synthetic construct
RGDRVHQ

SEQ ID NO: 6555 - protein, 7 aa, synthetic construct
RGDSASS

SEQ ID NO: 6556 - protein, 7 aa, synthetic construct
RGDSDKE

SEQ ID NO: 6557 - protein, 7 aa, synthetic construct
RGDSDNR

SEQ ID NO: 6558 - protein, 7 aa, synthetic construct
RGDSESF

SEQ ID NO: 6559 - protein, 7 aa, synthetic construct
RGDSEST

SEQ ID NO: 6560 - protein, 7 aa, synthetic construct
RGDSHVI

SEQ ID NO: 6561 - protein, 7 aa, synthetic construct
RGDSIQI

SEQ ID NO: 6562 - protein, 7 aa, synthetic construct
RGDSKNR

SEQ ID NO: 6563 - protein, 7 aa, synthetic construct
RGDSTGA

SEQ ID NO: 6564 - protein, 7 aa, synthetic construct
RGDTAFR

SEQ ID NO: 6565 - protein, 7 aa, synthetic construct
RGDTKER

SEQ ID NO: 6566 - protein, 7 aa, synthetic construct
RGDTLKI

SEQ ID NO: 6567 - protein, 7 aa, synthetic construct
RGDTLRI

SEQ ID NO: 6568 - protein, 7 aa, synthetic construct
RGDDHHT

SEQ ID NO: 6569 - protein, 7 aa, synthetic construct
RGDTRQV

SEQ ID NO: 6570 - protein, 7 aa, synthetic construct
RGDTSTL

SEQ ID NO: 6571 - protein, 7 aa, synthetic construct
RGDVEGN

SEQ ID NO: 6572 - protein, 7 aa, synthetic construct
RGDVEQE

SEQ ID NO: 6573 - protein, 7 aa, synthetic construct
RGDVESR

SEQ ID NO: 6574 - protein, 7 aa, synthetic construct
RGDVHAK

SEQ ID NO: 6575 - protein, 7 aa, synthetic construct
RGDDIKV

SEQ ID NO: 6576 - protein, 7 aa, synthetic construct
RGDVIKF

SEQ ID NO: 6577 - protein, 7 aa, synthetic construct
RGDVKVS

SEQ ID NO: 6578 - protein, 7 aa, synthetic construct
RGDVTRR

SEQ ID NO: 6579 - protein, 7 aa, synthetic construct
RGDDKTI

SEQ ID NO: 6580 - protein, 7 aa, synthetic construct
RGDAFKR

SEQ ID NO: 6581 - protein, 7 aa, synthetic construct
RGDEKVL

SEQ ID NO: 6582 - protein, 7 aa, synthetic construct
RGDAGIK

SEQ ID NO: 6583 - protein, 7 aa, synthetic construct
RGDFATT

SEQ ID NO: 6584 - protein, 7 aa, synthetic construct
RGDFGGD

SEQ ID NO: 6585 - protein, 7 aa, synthetic construct
RGDFGKK

SEQ ID NO: 6586 - protein, 7 aa, synthetic construct
RGDFGSH

SEQ ID NO: 6587 - protein, 7 aa, synthetic construct
RGDFHEH

SEQ ID NO: 6588 - protein, 7 aa, synthetic construct
RGDFIDR

SEQ ID NO: 6589 - protein, 7 aa, synthetic construct
RGDFKKH

SEQ ID NO: 6590 - protein, 7 aa, synthetic construct
RGDFKTD

SEQ ID NO: 6591 - protein, 7 aa, synthetic construct
RGDFQQA

SEQ ID NO: 6592 - protein, 7 aa, synthetic construct
RGDFRDS

SEQ ID NO: 6593 - protein, 7 aa, synthetic construct
RGDFRLH

SEQ ID NO: 6594 - protein, 7 aa, synthetic construct
RGDFSQT

SEQ ID NO: 6595 - protein, 7 aa, synthetic construct
RGDFVFK

SEQ ID NO: 6596 - protein, 7 aa, synthetic construct
RGDFVIN

SEQ ID NO: 6597 - protein, 7 aa, synthetic construct
RGDGGKT

SEQ ID NO: 6598 - protein, 7 aa, synthetic construct
RGDGIKN

SEQ ID NO: 6599 - protein, 7 aa, synthetic construct
RGDGKDT

SEQ ID NO: 6600 - protein, 7 aa, synthetic construct
RGDGKSN

SEQ ID NO: 6601 - protein, 7 aa, synthetic construct
RGDGLGV

SEQ ID NO: 6602 - protein, 7 aa, synthetic construct
RGDGNII

SEQ ID NO: 6603 - protein, 7 aa, synthetic construct
RGDGRSH

SEQ ID NO: 6604 - protein, 7 aa, synthetic construct
RGDHDFQ

SEQ ID NO: 6605 - protein, 7 aa, synthetic construct
RGDHERE

SEQ ID NO: 6606 - protein, 7 aa, synthetic construct
RGDHFKF

SEQ ID NO: 6607 - protein, 7 aa, synthetic construct
RGDHLER

SEQ ID NO: 6608 - protein, 7 aa, synthetic construct
RGDHLNR

SEQ ID NO: 6609 - protein, 7 aa, synthetic construct
RGDHNSI

SEQ ID NO: 6610 - protein, 7 aa, synthetic construct
RGDHQGG

SEQ ID NO: 6611 - protein, 7 aa, synthetic construct
RGDHQRF

SEQ ID NO: 6612 - protein, 7 aa, synthetic construct
RGDHRNL

SEQ ID NO: 6613 - protein, 7 aa, synthetic construct
RGDHTQQ

SEQ ID NO: 6614 - protein, 7 aa, synthetic construct
RGDHTSR

SEQ ID NO: 6615 - protein, 7 aa, synthetic construct
RGDIAKT

SEQ ID NO: 6616 - protein, 7 aa, synthetic construct
RGDIGID

SEQ ID NO: 6617 - protein, 7 aa, synthetic construct
RGDIHGN

SEQ ID NO: 6618 - protein, 7 aa, synthetic construct
RGDIKFS

SEQ ID NO: 6619 - protein, 7 aa, synthetic construct
RGDIKNG

SEQ ID NO: 6620 - protein, 7 aa, synthetic construct
RGDILRV

SEQ ID NO: 6621 - protein, 7 aa, synthetic construct
RGDINAI

SEQ ID NO: 6622 - protein, 7 aa, synthetic construct
RGDIQKN

SEQ ID NO: 6623 - protein, 7 aa, synthetic construct
RGDIRAI

SEQ ID NO: 6624 - protein, 7 aa, synthetic construct
RGDIRIA

SEQ ID NO: 6625 - protein, 7 aa, synthetic construct
RGDIRKS

SEQ ID NO: 6626 - protein, 7 aa, synthetic construct
RGDISGV

SEQ ID NO: 6627 - protein, 7 aa, synthetic construct
RGDITRN

SEQ ID NO: 6628 - protein, 7 aa, synthetic construct
RGDITTI

SEQ ID NO: 6629 - protein, 7 aa, synthetic construct
RGDIVVV

SEQ ID NO: 6630 - protein, 7 aa, synthetic construct
RGDAQNF

SEQ ID NO: 6631 - protein, 7 aa, synthetic construct
RGDAQSL

SEQ ID NO: 6632 - protein, 7 aa, synthetic construct
RGDKGFL

SEQ ID NO: 6633 - protein, 7 aa, synthetic construct
RGDKGNK

SEQ ID NO: 6634 - protein, 7 aa, synthetic construct
RGDKGTN

SEQ ID NO: 6635 - protein, 7 aa, synthetic construct
RGDKIEI

SEQ ID NO: 6636 - protein, 7 aa, synthetic construct
RGDKKLK

SEQ ID NO: 6637 - protein, 7 aa, synthetic construct
RGDKKVN

SEQ ID NO: 6638 - protein, 7 aa, synthetic construct
RGDKLTQ

SEQ ID NO: 6639 - protein, 7 aa, synthetic construct
RGDKNAH

SEQ ID NO: 6640 - protein, 7 aa, synthetic construct
RGDKQRF

SEQ ID NO: 6641 - protein, 7 aa, synthetic construct
RGDKRAS

SEQ ID NO: 6642 - protein, 7 aa, synthetic construct
RGDKRDR

SEQ ID NO: 6643 - protein, 7 aa, synthetic construct
RGDKRQQ

SEQ ID NO: 6644 - protein, 7 aa, synthetic construct
RGDKRVA

SEQ ID NO: 6645 - protein, 7 aa, synthetic construct
RGDKSKL

SEQ ID NO: 6646 - protein, 7 aa, synthetic construct
RGDKSKT

SEQ ID NO: 6647 - protein, 7 aa, synthetic construct
RGDKSRK

SEQ ID NO: 6648 - protein, 7 aa, synthetic construct
RGDKVKR

SEQ ID NO: 6649 - protein, 7 aa, synthetic construct
RGDKVTI

SEQ ID NO: 6650 - protein, 7 aa, synthetic construct
RGDLARH

SEQ ID NO: 6651 - protein, 7 aa, synthetic construct
RGDLDGK

SEQ ID NO: 6652 - protein, 7 aa, synthetic construct
RGDLDHR

SEQ ID NO: 6653 - protein, 7 aa, synthetic construct
RGDASGQ

SEQ ID NO: 6654 - protein, 7 aa, synthetic construct
RGDLLKA

SEQ ID NO: 6655 - protein, 7 aa, synthetic construct
RGDLRAS

SEQ ID NO: 6656 - protein, 7 aa, synthetic construct
RGDLRTI

SEQ ID NO: 6657 - protein, 7 aa, synthetic construct
RGDLSAS

SEQ ID NO: 6658 - protein, 7 aa, synthetic construct
RGDLSDR

SEQ ID NO: 6659 - protein, 7 aa, synthetic construct
RGDLSFA

SEQ ID NO: 6660 - protein, 7 aa, synthetic construct
RGDLTGF

SEQ ID NO: 6661 - protein, 7 aa, synthetic construct
RGDLVAL

SEQ ID NO: 6662 - protein, 7 aa, synthetic construct
RGDLVGL

SEQ ID NO: 6663 - protein, 7 aa, synthetic construct
RGDLVHK

SEQ ID NO: 6664 - protein, 7 aa, synthetic construct
RGDATKQ

SEQ ID NO: 6665 - protein, 7 aa, synthetic construct
RGDNAKQ

SEQ ID NO: 6666 - protein, 7 aa, synthetic construct
RGDNKEK

SEQ ID NO: 6667 - protein, 7 aa, synthetic construct
RGDNQQL

SEQ ID NO: 6668 - protein, 7 aa, synthetic construct
RGDAVNK

SEQ ID NO: 6669 - protein, 7 aa, synthetic construct
RGDNRHH

SEQ ID NO: 6670 - protein, 7 aa, synthetic construct
RGDNSNR

SEQ ID NO: 6671 - protein, 7 aa, synthetic construct
RGDNVTV

SEQ ID NO: 6672 - protein, 7 aa, synthetic construct
RGDDAAL

SEQ ID NO: 6673 - protein, 7 aa, synthetic construct
RGDQEQL

SEQ ID NO: 6674 - protein, 7 aa, synthetic construct
RGDQHNH

SEQ ID NO: 6675 - protein, 7 aa, synthetic construct
RGDQKGI

SEQ ID NO: 6676 - protein, 7 aa, synthetic construct
RGDQLTF

SEQ ID NO: 6677 - protein, 7 aa, synthetic construct
RGDQRGQ

SEQ ID NO: 6678 - protein, 7 aa, synthetic construct
RGDQRTR

SEQ ID NO: 6679 - protein, 7 aa, synthetic construct
RGDQSTH

SEQ ID NO: 6680 - protein, 7 aa, synthetic construct
RGDQSTR

SEQ ID NO: 6681 - protein, 7 aa, synthetic construct
RGDQTRG

SEQ ID NO: 6682 - protein, 7 aa, synthetic construct
RGDRAFG

SEQ ID NO: 6683 - protein, 7 aa, synthetic construct
RGDRERI

SEQ ID NO: 6684 - protein, 7 aa, synthetic construct
RGDRFNI

SEQ ID NO: 6685 - protein, 7 aa, synthetic construct
RGDRGDQ

SEQ ID NO: 6686 - protein, 7 aa, synthetic construct
RGDRGEL

SEQ ID NO: 6687 - protein, 7 aa, synthetic construct
RGDRGFH

SEQ ID NO: 6688 - protein, 7 aa, synthetic construct
RGDRGFK

SEQ ID NO: 6689 - protein, 7 aa, synthetic construct
RGDRHVT

SEQ ID NO: 6690 - protein, 7 aa, synthetic construct
RGDRITN

SEQ ID NO: 6691 - protein, 7 aa, synthetic construct
RGDRKFE

SEQ ID NO: 6692 - protein, 7 aa, synthetic construct
RGDRKRG

SEQ ID NO: 6693 - protein, 7 aa, synthetic construct
RGDRLQL

SEQ ID NO: 6694 - protein, 7 aa, synthetic construct
RGDRLSN

SEQ ID NO: 6695 - protein, 7 aa, synthetic construct
RGDRNHT

SEQ ID NO: 6696 - protein, 7 aa, synthetic construct
RGDRNKD

SEQ ID NO: 6697 - protein, 7 aa, synthetic construct
RGDRQDR

SEQ ID NO: 6698 - protein, 7 aa, synthetic construct
RGDRRGI

SEQ ID NO: 6699 - protein, 7 aa, synthetic construct
RGDRTRT

SEQ ID NO: 6700 - protein, 7 aa, synthetic construct
RGDRVFL

SEQ ID NO: 6701 - protein, 7 aa, synthetic construct
RGDRVVQ

SEQ ID NO: 6702 - protein, 7 aa, synthetic construct
RGDSDQT

SEQ ID NO: 6703 - protein, 7 aa, synthetic construct
RGDSGAV

SEQ ID NO: 6704 - protein, 7 aa, synthetic construct
RGDSGGN

SEQ ID NO: 6705 - protein, 7 aa, synthetic construct
RGDSGGT

SEQ ID NO: 6706 - protein, 7 aa, synthetic construct
RGDSHSE

SEQ ID NO: 6707 - protein, 7 aa, synthetic construct
RGDSKEK

SEQ ID NO: 6708 - protein, 7 aa, synthetic construct
RGDSKQF

SEQ ID NO: 6709 - protein, 7 aa, synthetic construct
RGDSLGS

SEQ ID NO: 6710 - protein, 7 aa, synthetic construct
RGDSLHV

SEQ ID NO: 6711 - protein, 7 aa, synthetic construct
RGDSNHS

SEQ ID NO: 6712 - protein, 7 aa, synthetic construct
RGDTALT

SEQ ID NO: 6713 - protein, 7 aa, synthetic construct
RGDTHGN

SEQ ID NO: 6714 - protein, 7 aa, synthetic construct
RGDTHHR

SEQ ID NO: 6715 - protein, 7 aa, synthetic construct
RGDTLGI

SEQ ID NO: 6716 - protein, 7 aa, synthetic construct
RGDTRKL

SEQ ID NO: 6717 - protein, 7 aa, synthetic construct
RGDTVLT

SEQ ID NO: 6718 - protein, 7 aa, synthetic construct
RGDVEKL

SEQ ID NO: 6719 - protein, 7 aa, synthetic construct
RGDVGNQ

SEQ ID NO: 6720 - protein, 7 aa, synthetic construct
RGDVIVI

SEQ ID NO: 6721 - protein, 7 aa, synthetic construct
RGDVKGV

SEQ ID NO: 6722 - protein, 7 aa, synthetic construct
RGDVKNH

SEQ ID NO: 6723 - protein, 7 aa, synthetic construct
RGDVQTR

SEQ ID NO: 6724 - protein, 7 aa, synthetic construct
RGDVRVK

SEQ ID NO: 6725 - protein, 7 aa, synthetic construct
RGDVVHK

SEQ ID NO: 6726 - protein, 7 aa, synthetic construct
RGDVVQQ

SEQ ID NO: 6727 - protein, 7 aa, synthetic construct
RGDDLHI

SEQ ID NO: 6728 - protein, 7 aa, synthetic construct
RGDDNRF

SEQ ID NO: 6729 - protein, 7 aa, synthetic construct
RGDDSAS

SEQ ID NO: 6730 - protein, 7 aa, synthetic construct
RGDDSER

SEQ ID NO: 6731 - protein, 7 aa, synthetic construct
RGDDTHS

SEQ ID NO: 6732 - protein, 7 aa, synthetic construct
RGDEHTI

SEQ ID NO: 6733 - protein, 7 aa, synthetic construct
RGDFAKE

SEQ ID NO: 6734 - protein, 7 aa, synthetic construct
RGDFEFF

SEQ ID NO: 6735 - protein, 7 aa, synthetic construct
RGDAGSL

SEQ ID NO: 6736 - protein, 7 aa, synthetic construct
RGDFFIA

SEQ ID NO: 6737 - protein, 7 aa, synthetic construct
RGDFFIK

SEQ ID NO: 6738 - protein, 7 aa, synthetic construct
RGDFHKQ

SEQ ID NO: 6739 - protein, 7 aa, synthetic construct
RGDFHSK

SEQ ID NO: 6740 - protein, 7 aa, synthetic construct
RGDFIIN

SEQ ID NO: 6741 - protein, 7 aa, synthetic construct
RGDFKLS

SEQ ID NO: 6742 - protein, 7 aa, synthetic construct
RGDFLGI

SEQ ID NO: 6743 - protein, 7 aa, synthetic construct
RGDAHKV

SEQ ID NO: 6744 - protein, 7 aa, synthetic construct
RGDFQTA

SEQ ID NO: 6745 - protein, 7 aa, synthetic construct
RGDFRQL

SEQ ID NO: 6746 - protein, 7 aa, synthetic construct
RGDFSGK

SEQ ID NO: 6747 - protein, 7 aa, synthetic construct
RGDFTIA

SEQ ID NO: 6748 - protein, 7 aa, synthetic construct
RGDGFHA

SEQ ID NO: 6749 - protein, 7 aa, synthetic construct
RGDGKVF

SEQ ID NO: 6750 - protein, 7 aa, synthetic construct
RGDGLET

SEQ ID NO: 6751 - protein, 7 aa, synthetic construct
RGDGRTF

SEQ ID NO: 6752 - protein, 7 aa, synthetic construct
RGDAKGI

SEQ ID NO: 6753 - protein, 7 aa, synthetic construct
RGDAKHI

SEQ ID NO: 6754 - protein, 7 aa, synthetic construct
RGDGVSR

SEQ ID NO: 6755 - protein, 7 aa, synthetic construct
RGDHAER

SEQ ID NO: 6756 - protein, 7 aa, synthetic construct
RGDHGAE

SEQ ID NO: 6757 - protein, 7 aa, synthetic construct
RGDAKTR

SEQ ID NO: 6758 - protein, 7 aa, synthetic construct
RGDHGNL

SEQ ID NO: 6759 - protein, 7 aa, synthetic construct
RGDALER

SEQ ID NO: 6760 - protein, 7 aa, synthetic construct
RGDHNKV

SEQ ID NO: 6761 - protein, 7 aa, synthetic construct
RGDHNTI

SEQ ID NO: 6762 - protein, 7 aa, synthetic construct
RGDHQQF

SEQ ID NO: 6763 - protein, 7 aa, synthetic construct
RGDHSEI

SEQ ID NO: 6764 - protein, 7 aa, synthetic construct
RGDHSNQ

SEQ ID NO: 6765 - protein, 7 aa, synthetic construct
RGDHTGA

SEQ ID NO: 6766 - protein, 7 aa, synthetic construct
RGDHVRG

SEQ ID NO: 6767 - protein, 7 aa, synthetic construct
RGDIFRT

SEQ ID NO: 6768 - protein, 7 aa, synthetic construct
RGDIGHS

SEQ ID NO: 6769 - protein, 7 aa, synthetic construct
RGDIHNN

SEQ ID NO: 6770 - protein, 7 aa, synthetic construct
RGDIILF

SEQ ID NO: 6771 - protein, 7 aa, synthetic construct
RGDIIST

SEQ ID NO: 6772 - protein, 7 aa, synthetic construct
RGDILGV

SEQ ID NO: 6773 - protein, 7 aa, synthetic construct
RGDILKQ

SEQ ID NO: 6774 - protein, 7 aa, synthetic construct
RGDIQFR

SEQ ID NO: 6775 - protein, 7 aa, synthetic construct
RGDIRKF

SEQ ID NO: 6776 - protein, 7 aa, synthetic construct
RGDISRR

SEQ ID NO: 6777 - protein, 7 aa, synthetic construct
RGDITSK

SEQ ID NO: 6778 - protein, 7 aa, synthetic construct
RGDIVNV

SEQ ID NO: 6779 - protein, 7 aa, synthetic construct
RGDAQKT

SEQ ID NO: 6780 - protein, 7 aa, synthetic construct
RGDKANV

SEQ ID NO: 6781 - protein, 7 aa, synthetic construct
RGDKAQR

SEQ ID NO: 6782 - protein, 7 aa, synthetic construct
RGDKDKV

SEQ ID NO: 6783 - protein, 7 aa, synthetic construct
RGDKFVF

SEQ ID NO: 6784 - protein, 7 aa, synthetic construct
RGDKGGV

SEQ ID NO: 6785 - protein, 7 aa, synthetic construct
RGDKIVR

SEQ ID NO: 6786 - protein, 7 aa, synthetic construct
RGDKKER

SEQ ID NO: 6787 - protein, 7 aa, synthetic construct
RGDKKHK

SEQ ID NO: 6788 - protein, 7 aa, synthetic construct
RGDKLHL

SEQ ID NO: 6789 - protein, 7 aa, synthetic construct
RGDKLSR

SEQ ID NO: 6790 - protein, 7 aa, synthetic construct
RGDKNVK

SEQ ID NO: 6791 - protein, 7 aa, synthetic construct
RGDKQDT

SEQ ID NO: 6792 - protein, 7 aa, synthetic construct
RGDKQKL

SEQ ID NO: 6793 - protein, 7 aa, synthetic construct
RGDKRSF

SEQ ID NO: 6794 - protein, 7 aa, synthetic construct
RGDKSHI

SEQ ID NO: 6795 - protein, 7 aa, synthetic construct
RGDKSKS

SEQ ID NO: 6796 - protein, 7 aa, synthetic construct
RGDKTHL

SEQ ID NO: 6797 - protein, 7 aa, synthetic construct
RGDKTHT

SEQ ID NO: 6798 - protein, 7 aa, synthetic construct
RGDLDFK

SEQ ID NO: 6799 - protein, 7 aa, synthetic construct
RGDASGT

SEQ ID NO: 6800 - protein, 7 aa, synthetic construct
RGDLGQN

SEQ ID NO: 6801 - protein, 7 aa, synthetic construct
RGDLHGQ

SEQ ID NO: 6802 - protein, 7 aa, synthetic construct
RGDLHVQ

SEQ ID NO: 6803 - protein, 7 aa, synthetic construct
RGDLNFS

SEQ ID NO: 6804 - protein, 7 aa, synthetic construct
RGDLNGV

SEQ ID NO: 6805 - protein, 7 aa, synthetic construct
RGDLNRK

SEQ ID NO: 6806 - protein, 7 aa, synthetic construct
RGDLRGG

SEQ ID NO: 6807 - protein, 7 aa, synthetic construct
RGDLRIS

SEQ ID NO: 6808 - protein, 7 aa, synthetic construct
RGDNAQF

SEQ ID NO: 6809 - protein, 7 aa, synthetic construct
RGDNLQT

SEQ ID NO: 6810 - protein, 7 aa, synthetic construct
RGDNRFE

SEQ ID NO: 6811 - protein, 7 aa, synthetic construct
RGDNSSI

SEQ ID NO: 6812 - protein, 7 aa, synthetic construct
RGDNTKI

SEQ ID NO: 6813 - protein, 7 aa, synthetic construct
RGDNTQI

SEQ ID NO: 6814 - protein, 7 aa, synthetic construct
RGDNVKI

SEQ ID NO: 6815 - protein, 7 aa, synthetic construct
RGDQAQQ

SEQ ID NO: 6816 - protein, 7 aa, synthetic construct
RGDQFSK

SEQ ID NO: 6817 - protein, 7 aa, synthetic construct
RGDQHAL

SEQ ID NO: 6818 - protein, 7 aa, synthetic construct
RGDQHNT

SEQ ID NO: 6819 - protein, 7 aa, synthetic construct
RGDQHRF

SEQ ID NO: 6820 - protein, 7 aa, synthetic construct
RGDQKSN

SEQ ID NO: 6821 - protein, 7 aa, synthetic construct
RGDQQFR

SEQ ID NO: 6822 - protein, 7 aa, synthetic construct
RGDQRHT

SEQ ID NO: 6823 - protein, 7 aa, synthetic construct
RGDQSFQ

SEQ ID NO: 6824 - protein, 7 aa, synthetic construct
RGDQSHQ

SEQ ID NO: 6825 - protein, 7 aa, synthetic construct
RGDQSNS

SEQ ID NO: 6826 - protein, 7 aa, synthetic construct
RGDQTFV

SEQ ID NO: 6827 - protein, 7 aa, synthetic construct
RGDQVKE

SEQ ID NO: 6828 - protein, 7 aa, synthetic construct
RGDQVKS

SEQ ID NO: 6829 - protein, 7 aa, synthetic construct
RGDREAH

SEQ ID NO: 6830 - protein, 7 aa, synthetic construct
RGDREDR

SEQ ID NO: 6831 - protein, 7 aa, synthetic construct
RGDREVV

SEQ ID NO: 6832 - protein, 7 aa, synthetic construct
RGDRFKT

SEQ ID NO: 6833 - protein, 7 aa, synthetic construct
RGDRHFE

SEQ ID NO: 6834 - protein, 7 aa, synthetic construct
RGDRHGI

SEQ ID NO: 6835 - protein, 7 aa, synthetic construct
RGDRHHI

SEQ ID NO: 6836 - protein, 7 aa, synthetic construct
RGDRHHV

SEQ ID NO: 6837 - protein, 7 aa, synthetic construct
RGDRIIT

SEQ ID NO: 6838 - protein, 7 aa, synthetic construct
RGDRKKN

SEQ ID NO: 6839 - protein, 7 aa, synthetic construct
RGDRLDT

SEQ ID NO: 6840 - protein, 7 aa, synthetic construct
RGDRLNH

SEQ ID NO: 6841 - protein, 7 aa, synthetic construct
RGDRNEK

SEQ ID NO: 6842 - protein, 7 aa, synthetic construct
RGDRNHV

SEQ ID NO: 6843 - protein, 7 aa, synthetic construct
RGDRQSH

SEQ ID NO: 6844 - protein, 7 aa, synthetic construct
RGDRSEA

SEQ ID NO: 6845 - protein, 7 aa, synthetic construct
RGDRTAQ

SEQ ID NO: 6846 - protein, 7 aa, synthetic construct
RGDRTFD

SEQ ID NO: 6847 - protein, 7 aa, synthetic construct
RGDRTIQ

SEQ ID NO: 6848 - protein, 7 aa, synthetic construct
RGDSARH

SEQ ID NO: 6849 - protein, 7 aa, synthetic construct
RGDSARL

SEQ ID NO: 6850 - protein, 7 aa, synthetic construct
RGDSGHL

SEQ ID NO: 6851 - protein, 7 aa, synthetic construct
RGDSGRF

SEQ ID NO: 6852 - protein, 7 aa, synthetic construct
RGDSLGI

SEQ ID NO: 6853 - protein, 7 aa, synthetic construct
RGDSNHG

SEQ ID NO: 6854 - protein, 7 aa, synthetic construct
RGDSNSV

SEQ ID NO: 6855 - protein, 7 aa, synthetic construct
RGDSRET

SEQ ID NO: 6856 - protein, 7 aa, synthetic construct
RGDSRQG

SEQ ID NO: 6857 - protein, 7 aa, synthetic construct
RGDSVVI

SEQ ID NO: 6858 - protein, 7 aa, synthetic construct
RGDTALK

SEQ ID NO: 6859 - protein, 7 aa, synthetic construct
RGDTGVV

SEQ ID NO: 6860 - protein, 7 aa, synthetic construct
RGDTHAV

SEQ ID NO: 6861 - protein, 7 aa, synthetic construct
RGDTHSQ

SEQ ID NO: 6862 - protein, 7 aa, synthetic construct
RGDTKNH

SEQ ID NO: 6863 - protein, 7 aa, synthetic construct
RGDTLVF

SEQ ID NO: 6864 - protein, 7 aa, synthetic construct
RGDDHKL

SEQ ID NO: 6865 - protein, 7 aa, synthetic construct
RGDTQVL

SEQ ID NO: 6866 - protein, 7 aa, synthetic construct
RGDTRLF

SEQ ID NO: 6867 - protein, 7 aa, synthetic construct
RGDDHQL

SEQ ID NO: 6868 - protein, 7 aa, synthetic construct
RGDTTHI

SEQ ID NO: 6869 - protein, 7 aa, synthetic construct
RGDTVRF

SEQ ID NO: 6870 - protein, 7 aa, synthetic construct
RGDVAQH

SEQ ID NO: 6871 - protein, 7 aa, synthetic construct
RGDVEGL

SEQ ID NO: 6872 - protein, 7 aa, synthetic construct
RGDVFFH

SEQ ID NO: 6873 - protein, 7 aa, synthetic construct
RGDVIRT

SEQ ID NO: 6874 - protein, 7 aa, synthetic construct
RGDVKEI

SEQ ID NO: 6875 - protein, 7 aa, synthetic construct
RGDVKSN

SEQ ID NO: 6876 - protein, 7 aa, synthetic construct
RGDVLNI

SEQ ID NO: 6877 - protein, 7 aa, synthetic construct
RGDVLVK

SEQ ID NO: 6878 - protein, 7 aa, synthetic construct
RGDVRKN

SEQ ID NO: 6879 - protein, 7 aa, synthetic construct
RGDVSFQ

SEQ ID NO: 6880 - protein, 7 aa, synthetic construct
RGDDSGN

SEQ ID NO: 6881 - protein, 7 aa, synthetic construct
RGDDTQN

SEQ ID NO: 6882 - protein, 7 aa, synthetic construct
RGDEESK

SEQ ID NO: 6883 - protein, 7 aa, synthetic construct
RGDEGKQ

SEQ ID NO: 6884 - protein, 7 aa, synthetic construct
RGDFAFR

SEQ ID NO: 6885 - protein, 7 aa, synthetic construct
RGDFEIG

SEQ ID NO: 6886 - protein, 7 aa, synthetic construct
RGDFEKS

SEQ ID NO: 6887 - protein, 7 aa, synthetic construct
RGDFFQV

SEQ ID NO: 6888 - protein, 7 aa, synthetic construct
RGDFGAR

SEQ ID NO: 6889 - protein, 7 aa, synthetic construct
RGDFHSQ

SEQ ID NO: 6890 - protein, 7 aa, synthetic construct
RGDFIER

SEQ ID NO: 6891 - protein, 7 aa, synthetic construct
RGDFLHD

SEQ ID NO: 6892 - protein, 7 aa, synthetic construct
RGDFNQI

SEQ ID NO: 6893 - protein, 7 aa, synthetic construct
RGDFQDK

SEQ ID NO: 6894 - protein, 7 aa, synthetic construct
RGDFRKN

SEQ ID NO: 6895 - protein, 7 aa, synthetic construct
RGDFTER

SEQ ID NO: 6896 - protein, 7 aa, synthetic construct
RGDFVAH

SEQ ID NO: 6897 - protein, 7 aa, synthetic construct
RGDGDGH

SEQ ID NO: 6898 - protein, 7 aa, synthetic construct
RGDGDQT

SEQ ID NO: 6899 - protein, 7 aa, synthetic construct
RGDGFTQ

SEQ ID NO: 6900 - protein, 7 aa, synthetic construct
RGDGGNV

SEQ ID NO: 6901 - protein, 7 aa, synthetic construct
RGDGHKN

SEQ ID NO: 6902 - protein, 7 aa, synthetic construct
RGDHAFI

SEQ ID NO: 6903 - protein, 7 aa, synthetic construct
RGDHERI

SEQ ID NO: 6904 - protein, 7 aa, synthetic construct
RGDAKSV

SEQ ID NO: 6905 - protein, 7 aa, synthetic construct
RGDHGRL

SEQ ID NO: 6906 - protein, 7 aa, synthetic construct
RGDHGRN

SEQ ID NO: 6907 - protein, 7 aa, synthetic construct
RGDHHHV

SEQ ID NO: 6908 - protein, 7 aa, synthetic construct
RGDHKKL

SEQ ID NO: 6909 - protein, 7 aa, synthetic construct
RGDHNKQ

SEQ ID NO: 6910 - protein, 7 aa, synthetic construct
RGDHRQT

SEQ ID NO: 6911 - protein, 7 aa, synthetic construct
RGDHSGK

SEQ ID NO: 6912 - protein, 7 aa, synthetic construct
RGDHVGF

SEQ ID NO: 6913 - protein, 7 aa, synthetic construct
RGDIAFN

SEQ ID NO: 6914 - protein, 7 aa, synthetic construct
RGDIANK

SEQ ID NO: 6915 - protein, 7 aa, synthetic construct
RGDIARR

SEQ ID NO: 6916 - protein, 7 aa, synthetic construct
RGDIKVV

SEQ ID NO: 6917 - protein, 7 aa, synthetic construct
RGDILHS

SEQ ID NO: 6918 - protein, 7 aa, synthetic construct
RGDILKF

SEQ ID NO: 6919 - protein, 7 aa, synthetic construct
RGDILRQ

SEQ ID NO: 6920 - protein, 7 aa, synthetic construct
RGDILVK

SEQ ID NO: 6921 - protein, 7 aa, synthetic construct
RGDINDR

SEQ ID NO: 6922 - protein, 7 aa, synthetic construct
RGDIQLI

SEQ ID NO: 6923 - protein, 7 aa, synthetic construct
RGDIRKT

SEQ ID NO: 6924 - protein, 7 aa, synthetic construct
RGDIRNQ

SEQ ID NO: 6925 - protein, 7 aa, synthetic construct
RGDISKR

SEQ ID NO: 6926 - protein, 7 aa, synthetic construct
RGDIVVR

SEQ ID NO: 6927 - protein, 7 aa, synthetic construct
RGDKDNK

SEQ ID NO: 6928 - protein, 7 aa, synthetic construct
RGDKETL

SEQ ID NO: 6929 - protein, 7 aa, synthetic construct
RGDKGLL

SEQ ID NO: 6930 - protein, 7 aa, synthetic construct
RGDKHGL

SEQ ID NO: 6931 - protein, 7 aa, synthetic construct
RGDKHHL

SEQ ID NO: 6932 - protein, 7 aa, synthetic construct
RGDKHVL

SEQ ID NO: 6933 - protein, 7 aa, synthetic construct
RGDKKEI

SEQ ID NO: 6934 - protein, 7 aa, synthetic construct
RGDKLKF

SEQ ID NO: 6935 - protein, 7 aa, synthetic construct
RGDKNLT

SEQ ID NO: 6936 - protein, 7 aa, synthetic construct
RGDKQVK

SEQ ID NO: 6937 - protein, 7 aa, synthetic construct
RGDKRFE

SEQ ID NO: 6938 - protein, 7 aa, synthetic construct
RGDKRFK

SEQ ID NO: 6939 - protein, 7 aa, synthetic construct
RGDKSKA

SEQ ID NO: 6940 - protein, 7 aa, synthetic construct
RGDARSF

SEQ ID NO: 6941 - protein, 7 aa, synthetic construct
RGDKTQH

SEQ ID NO: 6942 - protein, 7 aa, synthetic construct
RGDKVRF

SEQ ID NO: 6943 - protein, 7 aa, synthetic construct
RGDLGKS

SEQ ID NO: 6944 - protein, 7 aa, synthetic construct
RGDLGNS

SEQ ID NO: 6945 - protein, 7 aa, synthetic construct
RGDLHTA

SEQ ID NO: 6946 - protein, 7 aa, synthetic construct
RGDLKLD

SEQ ID NO: 6947 - protein, 7 aa, synthetic construct
RGDLKNK

SEQ ID NO: 6948 - protein, 7 aa, synthetic construct
RGDLKTD

SEQ ID NO: 6949 - protein, 7 aa, synthetic construct
RGDLNVT

SEQ ID NO: 6950 - protein, 7 aa, synthetic construct
RGDATDR

SEQ ID NO: 6951 - protein, 7 aa, synthetic construct
RGDLRKG

SEQ ID NO: 6952 - protein, 7 aa, synthetic construct
RGDLRNS

SEQ ID NO: 6953 - protein, 7 aa, synthetic construct
RGDLSFQ

SEQ ID NO: 6954 - protein, 7 aa, synthetic construct
RGDLSNI

SEQ ID NO: 6955 - protein, 7 aa, synthetic construct
RGDLVRV

SEQ ID NO: 6956 - protein, 7 aa, synthetic construct
RGDNAKN

SEQ ID NO: 6957 - protein, 7 aa, synthetic construct
RGDNFEL

SEQ ID NO: 6958 - protein, 7 aa, synthetic construct
RGDATSR

SEQ ID NO: 6959 - protein, 7 aa, synthetic construct
RGDNHHQ

SEQ ID NO: 6960 - protein, 7 aa, synthetic construct
RGDNKKI

SEQ ID NO: 6961 - protein, 7 aa, synthetic construct
RGDNLQF

SEQ ID NO: 6962 - protein, 7 aa, synthetic construct
RGDNQRI

SEQ ID NO: 6963 - protein, 7 aa, synthetic construct
RGDNSER

SEQ ID NO: 6964 - protein, 7 aa, synthetic construct
RGDNTHF

SEQ ID NO: 6965 - protein, 7 aa, synthetic construct
RGDAVVI

SEQ ID NO: 6966 - protein, 7 aa, synthetic construct
RGDQFRF

SEQ ID NO: 6967 - protein, 7 aa, synthetic construct
RGDQIAF

SEQ ID NO: 6968 - protein, 7 aa, synthetic construct
RGDQLEN

SEQ ID NO: 6969 - protein, 7 aa, synthetic construct
RGDDASI

SEQ ID NO: 6970 - protein, 7 aa, synthetic construct
RGDQNTV

SEQ ID NO: 6971 - protein, 7 aa, synthetic construct
RGDQTHL

SEQ ID NO: 6972 - protein, 7 aa, synthetic construct
RGDQTRD

SEQ ID NO: 6973 - protein, 7 aa, synthetic construct
RGDQVSF

SEQ ID NO: 6974 - protein, 7 aa, synthetic construct
RGDRAKN

SEQ ID NO: 6975 - protein, 7 aa, synthetic construct
RGDRALS

SEQ ID NO: 6976 - protein, 7 aa, synthetic construct
RGDRDAK

SEQ ID NO: 6977 - protein, 7 aa, synthetic construct
RGDREDF

SEQ ID NO: 6978 - protein, 7 aa, synthetic construct
RGDREHT

SEQ ID NO: 6979 - protein, 7 aa, synthetic construct
RGDRENH

SEQ ID NO: 6980 - protein, 7 aa, synthetic construct
RGDRENK

SEQ ID NO: 6981 - protein, 7 aa, synthetic construct
RGDRGSR

SEQ ID NO: 6982 - protein, 7 aa, synthetic construct
RGDRHIV

SEQ ID NO: 6983 - protein, 7 aa, synthetic construct
RGDRHRT

SEQ ID NO: 6984 - protein, 7 aa, synthetic construct
RGDRIRI

SEQ ID NO: 6985 - protein, 7 aa, synthetic construct
RGDRLFR

SEQ ID NO: 6986 - protein, 7 aa, synthetic construct
RGDRNDL

SEQ ID NO: 6987 - protein, 7 aa, synthetic construct
RGDRQSN

SEQ ID NO: 6988 - protein, 7 aa, synthetic construct
RGDRQTN

SEQ ID NO: 6989 - protein, 7 aa, synthetic construct
RGDRRAD

SEQ ID NO: 6990 - protein, 7 aa, synthetic construct
RGDRSII

SEQ ID NO: 6991 - protein, 7 aa, synthetic construct
RGDRSVS

SEQ ID NO: 6992 - protein, 7 aa, synthetic construct
RGDRTLQ

SEQ ID NO: 6993 - protein, 7 aa, synthetic construct
RGDRVIL

SEQ ID NO: 6994 - protein, 7 aa, synthetic construct
RGDRVTF

SEQ ID NO: 6995 - protein, 7 aa, synthetic construct
RGDSEKR

SEQ ID NO: 6996 - protein, 7 aa, synthetic construct
RGDSGKN

SEQ ID NO: 6997 - protein, 7 aa, synthetic construct
RGDSKTR

SEQ ID NO: 6998 - protein, 7 aa, synthetic construct
RGDSSNK

SEQ ID NO: 6999 - protein, 7 aa, synthetic construct
RGDSSTA

SEQ ID NO: 7000 - protein, 7 aa, synthetic construct
RGDSVAV

SEQ ID NO: 7001 - protein, 7 aa, synthetic construct
RGDSVHL

SEQ ID NO: 7002 - protein, 7 aa, synthetic construct
RGDTATK

SEQ ID NO: 7003 - protein, 7 aa, synthetic construct
RGDTHNT

SEQ ID NO: 7004 - protein, 7 aa, synthetic construct
RGDTHSS

SEQ ID NO: 7005 - protein, 7 aa, synthetic construct
RGDTIHL

SEQ ID NO: 7006 - protein, 7 aa, synthetic construct
RGDTKFV

SEQ ID NO: 7007 - protein, 7 aa, synthetic construct
RGDTLSL

SEQ ID NO: 7008 - protein, 7 aa, synthetic construct
RGDTSHL

SEQ ID NO: 7009 - protein, 7 aa, synthetic construct
RGDTSVH

SEQ ID NO: 7010 - protein, 7 aa, synthetic construct
RGDVAHS

SEQ ID NO: 7011 - protein, 7 aa, synthetic construct
RGDVHTL

SEQ ID NO: 7012 - protein, 7 aa, synthetic construct
RGDVKGH

SEQ ID NO: 7013 - protein, 7 aa, synthetic construct
RGDVKKS

SEQ ID NO: 7014 - protein, 7 aa, synthetic construct
RGDVLGH

SEQ ID NO: 7015 - protein, 7 aa, synthetic construct
RGDVLKV

SEQ ID NO: 7016 - protein, 7 aa, synthetic construct
RGDVLNT

SEQ ID NO: 7017 - protein, 7 aa, synthetic construct
RGDVLTQ

SEQ ID NO: 7018 - protein, 7 aa, synthetic construct
RGDVQGT

SEQ ID NO: 7019 - protein, 7 aa, synthetic construct
RGDVRLQ

SEQ ID NO: 7020 - protein, 7 aa, synthetic construct
RGDVRVN

SEQ ID NO: 7021 - protein, 7 aa, synthetic construct
RGDVVQT

SEQ ID NO: 7022 - protein, 7 aa, synthetic construct
RGDDNNK

SEQ ID NO: 7023 - protein, 7 aa, synthetic construct
RGDDQGK

SEQ ID NO: 7024 - protein, 7 aa, synthetic construct
RGDEDVH

SEQ ID NO: 7025 - protein, 7 aa, synthetic construct
RGDFASD

SEQ ID NO: 7026 - protein, 7 aa, synthetic construct
RGDFFSF

SEQ ID NO: 7027 - protein, 7 aa, synthetic construct
RGDFFTR

SEQ ID NO: 7028 - protein, 7 aa, synthetic construct
RGDFHHF

SEQ ID NO: 7029 - protein, 7 aa, synthetic construct
RGDFHHH

SEQ ID NO: 7030 - protein, 7 aa, synthetic construct
RGDFIKV

SEQ ID NO: 7031 - protein, 7 aa, synthetic construct
RGDFKNT

SEQ ID NO: 7032 - protein, 7 aa, synthetic construct
RGDFKVD

SEQ ID NO: 7033 - protein, 7 aa, synthetic construct
RGDFLSS

SEQ ID NO: 7034 - protein, 7 aa, synthetic construct
RGDFQFL

SEQ ID NO: 7035 - protein, 7 aa, synthetic construct
RGDAHNL

SEQ ID NO: 7036 - protein, 7 aa, synthetic construct
RGDFRVT

SEQ ID NO: 7037 - protein, 7 aa, synthetic construct
RGDFSDR

SEQ ID NO: 7038 - protein, 7 aa, synthetic construct
RGDFSRS

SEQ ID NO: 7039 - protein, 7 aa, synthetic construct
RGDGAAR

SEQ ID NO: 7040 - protein, 7 aa, synthetic construct
RGDGQKH

SEQ ID NO: 7041 - protein, 7 aa, synthetic construct
RGDGQRE

SEQ ID NO: 7042 - protein, 7 aa, synthetic construct
RGDGQRN

SEQ ID NO: 7043 - protein, 7 aa, synthetic construct
RGDGQSL

SEQ ID NO: 7044 - protein, 7 aa, synthetic construct
RGDGRQE

SEQ ID NO: 7045 - protein, 7 aa, synthetic construct
RGDGRSS

SEQ ID NO: 7046 - protein, 7 aa, synthetic construct
RGDGSDR

SEQ ID NO: 7047 - protein, 7 aa, synthetic construct
RGDGVGS

SEQ ID NO: 7048 - protein, 7 aa, synthetic construct
RGDHAFF

SEQ ID NO: 7049 - protein, 7 aa, synthetic construct
RGDHETT

SEQ ID NO: 7050 - protein, 7 aa, synthetic construct
RGDHGAF

SEQ ID NO: 7051 - protein, 7 aa, synthetic construct
RGDHGLN

SEQ ID NO: 7052 - protein, 7 aa, synthetic construct
RGDHGTG

SEQ ID NO: 7053 - protein, 7 aa, synthetic construct
RGDHHNV

SEQ ID NO: 7054 - protein, 7 aa, synthetic construct
RGDHKKI

SEQ ID NO: 7055 - protein, 7 aa, synthetic construct
RGDHNRH

SEQ ID NO: 7056 - protein, 7 aa, synthetic construct
RGDHRFQ

SEQ ID NO: 7057 - protein, 7 aa, synthetic construct
RGDHRNV

SEQ ID NO: 7058 - protein, 7 aa, synthetic construct
RGDHSNL

SEQ ID NO: 7059 - protein, 7 aa, synthetic construct
RGDHTHI

SEQ ID NO: 7060 - protein, 7 aa, synthetic construct
RGDHTSS

SEQ ID NO: 7061 - protein, 7 aa, synthetic construct
RGDIAVN

SEQ ID NO: 7062 - protein, 7 aa, synthetic construct
RGDIGHA

SEQ ID NO: 7063 - protein, 7 aa, synthetic construct
RGDIIAK

SEQ ID NO: 7064 - protein, 7 aa, synthetic construct
RGDIKHR

SEQ ID NO: 7065 - protein, 7 aa, synthetic construct
RGDANRE

SEQ ID NO: 7066 - protein, 7 aa, synthetic construct
RGDIKKH

SEQ ID NO: 7067 - protein, 7 aa, synthetic construct
RGDINKR

SEQ ID NO: 7068 - protein, 7 aa, synthetic construct
RGDIRQI

SEQ ID NO: 7069 - protein, 7 aa, synthetic construct
RGDIRRR

SEQ ID NO: 7070 - protein, 7 aa, synthetic construct
RGDISTS

SEQ ID NO: 7071 - protein, 7 aa, synthetic construct
RGDAQHI

SEQ ID NO: 7072 - protein, 7 aa, synthetic construct
RGDITVQ

SEQ ID NO: 7073 - protein, 7 aa, synthetic construct
RGDAQKF

SEQ ID NO: 7074 - protein, 7 aa, synthetic construct
RGDKAFL

SEQ ID NO: 7075 - protein, 7 aa, synthetic construct
RGDKEVH

SEQ ID NO: 7076 - protein, 7 aa, synthetic construct
RGDKFHV

SEQ ID NO: 7077 - protein, 7 aa, synthetic construct
RGDKFQF

SEQ ID NO: 7078 - protein, 7 aa, synthetic construct
RGDKFSI

SEQ ID NO: 7079 - protein, 7 aa, synthetic construct
RGDKFSR

SEQ ID NO: 7080 - protein, 7 aa, synthetic construct
RGDKGEK

SEQ ID NO: 7081 - protein, 7 aa, synthetic construct
RGDKHQI

SEQ ID NO: 7082 - protein, 7 aa, synthetic construct
RGDARFI

SEQ ID NO: 7083 - protein, 7 aa, synthetic construct
RGDKLKG

SEQ ID NO: 7084 - protein, 7 aa, synthetic construct
RGDKNFR

SEQ ID NO: 7085 - protein, 7 aa, synthetic construct
RGDKNKH

SEQ ID NO: 7086 - protein, 7 aa, synthetic construct
RGDARLI

SEQ ID NO: 7087 - protein, 7 aa, synthetic construct
RGDKQRN

SEQ ID NO: 7088 - protein, 7 aa, synthetic construct
RGDKRHE

SEQ ID NO: 7089 - protein, 7 aa, synthetic construct
RGDKSAR

SEQ ID NO: 7090 - protein, 7 aa, synthetic construct
RGDKSSA

SEQ ID NO: 7091 - protein, 7 aa, synthetic construct
RGDKTLQ

SEQ ID NO: 7092 - protein, 7 aa, synthetic construct
RGDKVNR

SEQ ID NO: 7093 - protein, 7 aa, synthetic construct
RGDLERV

SEQ ID NO: 7094 - protein, 7 aa, synthetic construct
RGDLFSF

SEQ ID NO: 7095 - protein, 7 aa, synthetic construct
RGDLHDT

SEQ ID NO: 7096 - protein, 7 aa, synthetic construct
RGDLKLS

SEQ ID NO: 7097 - protein, 7 aa, synthetic construct
RGDLLHD

SEQ ID NO: 7098 - protein, 7 aa, synthetic construct
RGDLNTT

SEQ ID NO: 7099 - protein, 7 aa, synthetic construct
RGDLQST

SEQ ID NO: 7100 - protein, 7 aa, synthetic construct
RGDLRQN

SEQ ID NO: 7101 - protein, 7 aa, synthetic construct
RGDLRTK

SEQ ID NO: 7102 - protein, 7 aa, synthetic construct
RGDLTTR

SEQ ID NO: 7103 - protein, 7 aa, synthetic construct
RGDLVAH

SEQ ID NO: 7104 - protein, 7 aa, synthetic construct
RGDLVKA

SEQ ID NO: 7105 - protein, 7 aa, synthetic construct
RGDNAAQ

SEQ ID NO: 7106 - protein, 7 aa, synthetic construct
RGDNEFF

SEQ ID NO: 7107 - protein, 7 aa, synthetic construct
RGDNFKS

SEQ ID NO: 7108 - protein, 7 aa, synthetic construct
RGDNGIV

SEQ ID NO: 7109 - protein, 7 aa, synthetic construct
RGDNKGN

SEQ ID NO: 7110 - protein, 7 aa, synthetic construct
RGDAVKQ

SEQ ID NO: 7111 - protein, 7 aa, synthetic construct
RGDAVKR

SEQ ID NO: 7112 - protein, 7 aa, synthetic construct
RGDNSQG

SEQ ID NO: 7113 - protein, 7 aa, synthetic construct
RGDNTFR

SEQ ID NO: 7114 - protein, 7 aa, synthetic construct
RGDNVQQ

SEQ ID NO: 7115 - protein, 7 aa, synthetic construct
RGDNVSF

SEQ ID NO: 7116 - protein, 7 aa, synthetic construct
RGDQAKH

SEQ ID NO: 7117 - protein, 7 aa, synthetic construct
RGDQFHV

SEQ ID NO: 7118 - protein, 7 aa, synthetic construct
RGDQFSI

SEQ ID NO: 7119 - protein, 7 aa, synthetic construct
RGDQHFS

SEQ ID NO: 7120 - protein, 7 aa, synthetic construct
RGDQHHV

SEQ ID NO: 7121 - protein, 7 aa, synthetic construct
RGDQLFI

SEQ ID NO: 7122 - protein, 7 aa, synthetic construct
RGDQLSQ

SEQ ID NO: 7123 - protein, 7 aa, synthetic construct
RGDQNGG

SEQ ID NO: 7124 - protein, 7 aa, synthetic construct
RGDDAVK

SEQ ID NO: 7125 - protein, 7 aa, synthetic construct
RGDQRGK

SEQ ID NO: 7126 - protein, 7 aa, synthetic construct
RGDQTGH

SEQ ID NO: 7127 - protein, 7 aa, synthetic construct
RGDQTQH

SEQ ID NO: 7128 - protein, 7 aa, synthetic construct
RGDQTTQ

SEQ ID NO: 7129 - protein, 7 aa, synthetic construct
RGDQVEV

SEQ ID NO: 7130 - protein, 7 aa, synthetic construct
RGDQVKR

SEQ ID NO: 7131 - protein, 7 aa, synthetic construct
RGDRAVR

SEQ ID NO: 7132 - protein, 7 aa, synthetic construct
RGDREIK

SEQ ID NO: 7133 - protein, 7 aa, synthetic construct
RGDRFVL

SEQ ID NO: 7134 - protein, 7 aa, synthetic construct
RGDRHAS

SEQ ID NO: 7135 - protein, 7 aa, synthetic construct
RGDRHQE

SEQ ID NO: 7136 - protein, 7 aa, synthetic construct
RGDRIGT

SEQ ID NO: 7137 - protein, 7 aa, synthetic construct
RGDRIHT

SEQ ID NO: 7138 - protein, 7 aa, synthetic construct
RGDRKKG

SEQ ID NO: 7139 - protein, 7 aa, synthetic construct
RGDRNAH

SEQ ID NO: 7140 - protein, 7 aa, synthetic construct
RGDRQFF

SEQ ID NO: 7141 - protein, 7 aa, synthetic construct
RGDRQLH

SEQ ID NO: 7142 - protein, 7 aa, synthetic construct
RGDRQNV

SEQ ID NO: 7143 - protein, 7 aa, synthetic construct
RGDRQVR

SEQ ID NO: 7144 - protein, 7 aa, synthetic construct
RGDRRDH

SEQ ID NO: 7145 - protein, 7 aa, synthetic construct
RGDRRGD

SEQ ID NO: 7146 - protein, 7 aa, synthetic construct
RGDRSVG

SEQ ID NO: 7147 - protein, 7 aa, synthetic construct
RGDRTSH

SEQ ID NO: 7148 - protein, 7 aa, synthetic construct
RGDRVKN

SEQ ID NO: 7149 - protein, 7 aa, synthetic construct
RGDRVVS

SEQ ID NO: 7150 - protein, 7 aa, synthetic construct
RGDSGFI

SEQ ID NO: 7151 - protein, 7 aa, synthetic construct
RGDSGHV

SEQ ID NO: 7152 - protein, 7 aa, synthetic construct
RGDSGRN

SEQ ID NO: 7153 - protein, 7 aa, synthetic construct
RGDSHVL

SEQ ID NO: 7154 - protein, 7 aa, synthetic construct
RGDSHVV

SEQ ID NO: 7155 - protein, 7 aa, synthetic construct
RGDSKGT

SEQ ID NO: 7156 - protein, 7 aa, synthetic construct
RGDSLGR

SEQ ID NO: 7157 - protein, 7 aa, synthetic construct
RGDSRGN

SEQ ID NO: 7158 - protein, 7 aa, synthetic construct
RGDSRHL

SEQ ID NO: 7159 - protein, 7 aa, synthetic construct
RGDSRQV

SEQ ID NO: 7160 - protein, 7 aa, synthetic construct
RGDSSNR

SEQ ID NO: 7161 - protein, 7 aa, synthetic construct
RGDSSVT

SEQ ID NO: 7162 - protein, 7 aa, synthetic construct
RGDSTKH

SEQ ID NO: 7163 - protein, 7 aa, synthetic construct
RGDSVRR

SEQ ID NO: 7164 - protein, 7 aa, synthetic construct
RGDSVVR

SEQ ID NO: 7165 - protein, 7 aa, synthetic construct
RGDDGVF

SEQ ID NO: 7166 - protein, 7 aa, synthetic construct
RGDTHKV

SEQ ID NO: 7167 - protein, 7 aa, synthetic construct
RGDTKEL

SEQ ID NO: 7168 - protein, 7 aa, synthetic construct
RGDTKNQ

SEQ ID NO: 7169 - protein, 7 aa, synthetic construct
RGDTKSF

SEQ ID NO: 7170 - protein, 7 aa, synthetic construct
RGDTKSV

SEQ ID NO: 7171 - protein, 7 aa, synthetic construct
RGDTLTF

SEQ ID NO: 7172 - protein, 7 aa, synthetic construct
RGDTNFS

SEQ ID NO: 7173 - protein, 7 aa, synthetic construct
RGDTNKV

SEQ ID NO: 7174 - protein, 7 aa, synthetic construct
RGDTVAI

SEQ ID NO: 7175 - protein, 7 aa, synthetic construct
RGDVARN

SEQ ID NO: 7176 - protein, 7 aa, synthetic construct
RGDVESL

SEQ ID NO: 7177 - protein, 7 aa, synthetic construct
RGDVEVA

SEQ ID NO: 7178 - protein, 7 aa, synthetic construct
RGDVFHT

SEQ ID NO: 7179 - protein, 7 aa, synthetic construct
RGDVGQQ

SEQ ID NO: 7180 - protein, 7 aa, synthetic construct
RGDVHHF

SEQ ID NO: 7181 - protein, 7 aa, synthetic construct
RGDVHIH

SEQ ID NO: 7182 - protein, 7 aa, synthetic construct
RGDVIFK

SEQ ID NO: 7183 - protein, 7 aa, synthetic construct
RGDVIQR

SEQ ID NO: 7184 - protein, 7 aa, synthetic construct
RGDVKGR

SEQ ID NO: 7185 - protein, 7 aa, synthetic construct
RGDVKLL

SEQ ID NO: 7186 - protein, 7 aa, synthetic construct
RGDVKNL

SEQ ID NO: 7187 - protein, 7 aa, synthetic construct
RGDVLTR

SEQ ID NO: 7188 - protein, 7 aa, synthetic construct
RGDVQFQ

SEQ ID NO: 7189 - protein, 7 aa, synthetic construct
RGDVQSV

SEQ ID NO: 7190 - protein, 7 aa, synthetic construct
RGDVRIH

SEQ ID NO: 7191 - protein, 7 aa, synthetic construct
RGDVVFF

SEQ ID NO: 7192 - protein, 7 aa, synthetic construct
RGDVVGG

SEQ ID NO: 7193 - protein, 7 aa, synthetic construct
RGDVVIT

SEQ ID NO: 7194 - protein, 7 aa, synthetic construct
RGDAEHV

SEQ ID NO: 7195 - protein, 7 aa, synthetic construct
RGDDNHH

SEQ ID NO: 7196 - protein, 7 aa, synthetic construct
RGDDVHL

SEQ ID NO: 7197 - protein, 7 aa, synthetic construct
RGDAFNI

SEQ ID NO: 7198 - protein, 7 aa, synthetic construct
RGDFAFL

SEQ ID NO: 7199 - protein, 7 aa, synthetic construct
RGDFEGR

SEQ ID NO: 7200 - protein, 7 aa, synthetic construct
RGDAAKE

SEQ ID NO: 7201 - protein, 7 aa, synthetic construct
RGDFGAH

SEQ ID NO: 7202 - protein, 7 aa, synthetic construct
RGDFGNI

SEQ ID NO: 7203 - protein, 7 aa, synthetic construct
RGDFLIT

SEQ ID NO: 7204 - protein, 7 aa, synthetic construct
RGDFNQS

SEQ ID NO: 7205 - protein, 7 aa, synthetic construct
RGDFQAR

SEQ ID NO: 7206 - protein, 7 aa, synthetic construct
RGDFSET

SEQ ID NO: 7207 - protein, 7 aa, synthetic construct
RGDFVEF

SEQ ID NO: 7208 - protein, 7 aa, synthetic construct
RGDFVHI

SEQ ID NO: 7209 - protein, 7 aa, synthetic construct
RGDFVRH

SEQ ID NO: 7210 - protein, 7 aa, synthetic construct
RGDFVRR

SEQ ID NO: 7211 - protein, 7 aa, synthetic construct
RGDGELI

SEQ ID NO: 7212 - protein, 7 aa, synthetic construct
RGDGHFV

SEQ ID NO: 7213 - protein, 7 aa, synthetic construct
RGDGIGK

SEQ ID NO: 7214 - protein, 7 aa, synthetic construct
RGDAINR

SEQ ID NO: 7215 - protein, 7 aa, synthetic construct
RGDGKNR

SEQ ID NO: 7216 - protein, 7 aa, synthetic construct
RGDGKNS

SEQ ID NO: 7217 - protein, 7 aa, synthetic construct
RGDGKTS

SEQ ID NO: 7218 - protein, 7 aa, synthetic construct
RGDGNFR

SEQ ID NO: 7219 - protein, 7 aa, synthetic construct
RGDGNVV

SEQ ID NO: 7220 - protein, 7 aa, synthetic construct
RGDGSVR

SEQ ID NO: 7221 - protein, 7 aa, synthetic construct
RGDGTEK

SEQ ID NO: 7222 - protein, 7 aa, synthetic construct
RGDGTRT

SEQ ID NO: 7223 - protein, 7 aa, synthetic construct
RGDHASH

SEQ ID NO: 7224 - protein, 7 aa, synthetic construct
RGDAKTK

SEQ ID NO: 7225 - protein, 7 aa, synthetic construct
RGDHGFK

SEQ ID NO: 7226 - protein, 7 aa, synthetic construct
RGDHGRH

SEQ ID NO: 7227 - protein, 7 aa, synthetic construct
RGDHKGF

SEQ ID NO: 7228 - protein, 7 aa, synthetic construct
RGDHNKI

SEQ ID NO: 7229 - protein, 7 aa, synthetic construct
RGDHNSR

SEQ ID NO: 7230 - protein, 7 aa, synthetic construct
RGDALKK

SEQ ID NO: 7231 - protein, 7 aa, synthetic construct
RGDHQGN

SEQ ID NO: 7232 - protein, 7 aa, synthetic construct
RGDHRHI

SEQ ID NO: 7233 - protein, 7 aa, synthetic construct
RGDHRQL

SEQ ID NO: 7234 - protein, 7 aa, synthetic construct
RGDHTHK

SEQ ID NO: 7235 - protein, 7 aa, synthetic construct
RGDIAHQ

SEQ ID NO: 7236 - protein, 7 aa, synthetic construct
RGDIAQS

SEQ ID NO: 7237 - protein, 7 aa, synthetic construct
RGDIDSK

SEQ ID NO: 7238 - protein, 7 aa, synthetic construct
RGDIEQL

SEQ ID NO: 7239 - protein, 7 aa, synthetic construct
RGDIHGF

SEQ ID NO: 7240 - protein, 7 aa, synthetic construct
RGDIHVV

SEQ ID NO: 7241 - protein, 7 aa, synthetic construct
RGDILSV

SEQ ID NO: 7242 - protein, 7 aa, synthetic construct
RGDINTK

SEQ ID NO: 7243 - protein, 7 aa, synthetic construct
RGDIQKK

SEQ ID NO: 7244 - protein, 7 aa, synthetic construct
RGDIQLH

SEQ ID NO: 7245 - protein, 7 aa, synthetic construct
RGDISSS

SEQ ID NO: 7246 - protein, 7 aa, synthetic construct
RGDIVKK

SEQ ID NO: 7247 - protein, 7 aa, synthetic construct
RGDIVSF

SEQ ID NO: 7248 - protein, 7 aa, synthetic construct
RGDKAHK

SEQ ID NO: 7249 - protein, 7 aa, synthetic construct
RGDKAKH

SEQ ID NO: 7250 - protein, 7 aa, synthetic construct
RGDKAQV

SEQ ID NO: 7251 - protein, 7 aa, synthetic construct
RGDKARN

SEQ ID NO: 7252 - protein, 7 aa, synthetic construct
RGDKASS

SEQ ID NO: 7253 - protein, 7 aa, synthetic construct
RGDAQRT

SEQ ID NO: 7254 - protein, 7 aa, synthetic construct
RGDKFSH

SEQ ID NO: 7255 - protein, 7 aa, synthetic construct
RGDKGHL

SEQ ID NO: 7256 - protein, 7 aa, synthetic construct
RGDKGIF

SEQ ID NO: 7257 - protein, 7 aa, synthetic construct
RGDKHKQ

SEQ ID NO: 7258 - protein, 7 aa, synthetic construct
RGDKIVL

SEQ ID NO: 7259 - protein, 7 aa, synthetic construct
RGDKKFL

SEQ ID NO: 7260 - protein, 7 aa, synthetic construct
RGDKKGV

SEQ ID NO: 7261 - protein, 7 aa, synthetic construct
RGDKLHH

SEQ ID NO: 7262 - protein, 7 aa, synthetic construct
RGDKLIT

SEQ ID NO: 7263 - protein, 7 aa, synthetic construct
RGDKQGH

SEQ ID NO: 7264 - protein, 7 aa, synthetic construct
RGDKRFS

SEQ ID NO: 7265 - protein, 7 aa, synthetic construct
RGDKSTA

SEQ ID NO: 7266 - protein, 7 aa, synthetic construct
RGDKSVR

SEQ ID NO: 7267 - protein, 7 aa, synthetic construct
RGDKTVK

SEQ ID NO: 7268 - protein, 7 aa, synthetic construct
RGDLAET

SEQ ID NO: 7269 - protein, 7 aa, synthetic construct
RGDLFGV

SEQ ID NO: 7270 - protein, 7 aa, synthetic construct
RGDLGNN

SEQ ID NO: 7271 - protein, 7 aa, synthetic construct
RGDLGNV

SEQ ID NO: 7272 - protein, 7 aa, synthetic construct
RGDLHQV

SEQ ID NO: 7273 - protein, 7 aa, synthetic construct
RGDLHRR

SEQ ID NO: 7274 - protein, 7 aa, synthetic construct
RGDASTF

SEQ ID NO: 7275 - protein, 7 aa, synthetic construct
RGDASVI

SEQ ID NO: 7276 - protein, 7 aa, synthetic construct
RGDLNVF

SEQ ID NO: 7277 - protein, 7 aa, synthetic construct
RGDLSIT

SEQ ID NO: 7278 - protein, 7 aa, synthetic construct
RGDLVFR

SEQ ID NO: 7279 - protein, 7 aa, synthetic construct
RGDLVTA

SEQ ID NO: 7280 - protein, 7 aa, synthetic construct
RGDLVVS

SEQ ID NO: 7281 - protein, 7 aa, synthetic construct
RGDNFRT

SEQ ID NO: 7282 - protein, 7 aa, synthetic construct
RGDNGGQ

SEQ ID NO: 7283 - protein, 7 aa, synthetic construct
RGDNHQV

SEQ ID NO: 7284 - protein, 7 aa, synthetic construct
RGDNKRA

SEQ ID NO: 7285 - protein, 7 aa, synthetic construct
RGDNKSR

SEQ ID NO: 7286 - protein, 7 aa, synthetic construct
RGDNRRT

SEQ ID NO: 7287 - protein, 7 aa, synthetic construct
RGDNVGG

SEQ ID NO: 7288 - protein, 7 aa, synthetic construct
RGDNVHK

SEQ ID NO: 7289 - protein, 7 aa, synthetic construct
RGDQAHQ

SEQ ID NO: 7290 - protein, 7 aa, synthetic construct
RGDQASS

SEQ ID NO: 7291 - protein, 7 aa, synthetic construct
RGDQATF

SEQ ID NO: 7292 - protein, 7 aa, synthetic construct
RGDQESK

SEQ ID NO: 7293 - protein, 7 aa, synthetic construct
RGDQGER

SEQ ID NO: 7294 - protein, 7 aa, synthetic construct
RGDQHIV

SEQ ID NO: 7295 - protein, 7 aa, synthetic construct
RGDQHLV

SEQ ID NO: 7296 - protein, 7 aa, synthetic construct
RGDQIRN

SEQ ID NO: 7297 - protein, 7 aa, synthetic construct
RGDQKVH

SEQ ID NO: 7298 - protein, 7 aa, synthetic construct
RGDQNFN

SEQ ID NO: 7299 - protein, 7 aa, synthetic construct
RGDQNKN

SEQ ID NO: 7300 - protein, 7 aa, synthetic construct
RGDRDFL

SEQ ID NO: 7301 - protein, 7 aa, synthetic construct
RGDRELV

SEQ ID NO: 7302 - protein, 7 aa, synthetic construct
RGDRESN

SEQ ID NO: 7303 - protein, 7 aa, synthetic construct
RGDRFGN

SEQ ID NO: 7304 - protein, 7 aa, synthetic construct
RGDRLFL

SEQ ID NO: 7305 - protein, 7 aa, synthetic construct
RGDRLIT

SEQ ID NO: 7306 - protein, 7 aa, synthetic construct
RGDRLSH

SEQ ID NO: 7307 - protein, 7 aa, synthetic construct
RGDDEKF

SEQ ID NO: 7308 - protein, 7 aa, synthetic construct
RGDRQQL

SEQ ID NO: 7309 - protein, 7 aa, synthetic construct
RGDRQTA

SEQ ID NO: 7310 - protein, 7 aa, synthetic construct
RGDRRDK

SEQ ID NO: 7311 - protein, 7 aa, synthetic construct
RGDRRDS

SEQ ID NO: 7312 - protein, 7 aa, synthetic construct
RGDRRFT

SEQ ID NO: 7313 - protein, 7 aa, synthetic construct
RGDRRSS

SEQ ID NO: 7314 - protein, 7 aa, synthetic construct
RGDRSAF

SEQ ID NO: 7315 - protein, 7 aa, synthetic construct
RGDSDVF

SEQ ID NO: 7316 - protein, 7 aa, synthetic construct
RGDSFFK

SEQ ID NO: 7317 - protein, 7 aa, synthetic construct
RGDSFRK

SEQ ID NO: 7318 - protein, 7 aa, synthetic construct
RGDSGVV

SEQ ID NO: 7319 - protein, 7 aa, synthetic construct
RGDSHGT

SEQ ID NO: 7320 - protein, 7 aa, synthetic construct
RGDSHGV

SEQ ID NO: 7321 - protein, 7 aa, synthetic construct
RGDSNKS

SEQ ID NO: 7322 - protein, 7 aa, synthetic construct
RGDSSSG

SEQ ID NO: 7323 - protein, 7 aa, synthetic construct
RGDSVHQ

SEQ ID NO: 7324 - protein, 7 aa, synthetic construct
RGDTDLL

SEQ ID NO: 7325 - protein, 7 aa, synthetic construct
RGDTGRN

SEQ ID NO: 7326 - protein, 7 aa, synthetic construct
RGDTHNV

SEQ ID NO: 7327 - protein, 7 aa, synthetic construct
RGDTKKE

SEQ ID NO: 7328 - protein, 7 aa, synthetic construct
RGDTQKT

SEQ ID NO: 7329 - protein, 7 aa, synthetic construct
RGDTVHS

SEQ ID NO: 7330 - protein, 7 aa, synthetic construct
RGDTVNT

SEQ ID NO: 7331 - protein, 7 aa, synthetic construct
RGDTVNV

SEQ ID NO: 7332 - protein, 7 aa, synthetic construct
RGDVERL

SEQ ID NO: 7333 - protein, 7 aa, synthetic construct
RGDVHHQ

SEQ ID NO: 7334 - protein, 7 aa, synthetic construct
RGDVHVL

SEQ ID NO: 7335 - protein, 7 aa, synthetic construct
RGDVIKN

SEQ ID NO: 7336 - protein, 7 aa, synthetic construct
RGDVKIV

SEQ ID NO: 7337 - protein, 7 aa, synthetic construct
RGDVLRG

SEQ ID NO: 7338 - protein, 7 aa, synthetic construct
RGDVNTR

SEQ ID NO: 7339 - protein, 7 aa, synthetic construct
RGDVSHT

SEQ ID NO: 7340 - protein, 7 aa, synthetic construct
RGDVVNS

SEQ ID NO: 7341 - protein, 7 aa, synthetic construct
RGDVVVQ

SEQ ID NO: 7342 - protein, 7 aa, synthetic construct
RGDAERF

SEQ ID NO: 7343 - protein, 7 aa, synthetic construct
RGDDVER

SEQ ID NO: 7344 - protein, 7 aa, synthetic construct
RGDDVSR

SEQ ID NO: 7345 - protein, 7 aa, synthetic construct
RGDEGFI

SEQ ID NO: 7346 - protein, 7 aa, synthetic construct
RGDEKFD

SEQ ID NO: 7347 - protein, 7 aa, synthetic construct
RGDEKHK

SEQ ID NO: 7348 - protein, 7 aa, synthetic construct
RGDEQHS

SEQ ID NO: 7349 - protein, 7 aa, synthetic construct
RGDERRG

SEQ ID NO: 7350 - protein, 7 aa, synthetic construct
RGDESHL

SEQ ID NO: 7351 - protein, 7 aa, synthetic construct
RGDESVV

SEQ ID NO: 7352 - protein, 7 aa, synthetic construct
RGDFAEE

SEQ ID NO: 7353 - protein, 7 aa, synthetic construct
RGDFAGN

SEQ ID NO: 7354 - protein, 7 aa, synthetic construct
RGDAGLV

SEQ ID NO: 7355 - protein, 7 aa, synthetic construct
RGDFELQ

SEQ ID NO: 7356 - protein, 7 aa, synthetic construct
RGDFEVQ

SEQ ID NO: 7357 - protein, 7 aa, synthetic construct
RGDFFFN

SEQ ID NO: 7358 - protein, 7 aa, synthetic construct
RGDFFLI

SEQ ID NO: 7359 - protein, 7 aa, synthetic construct
RGDFHTI

SEQ ID NO: 7360 - protein, 7 aa, synthetic construct
RGDFHVQ

SEQ ID NO: 7361 - protein, 7 aa, synthetic construct
RGDFIQQ

SEQ ID NO: 7362 - protein, 7 aa, synthetic construct
RGDFKQT

SEQ ID NO: 7363 - protein, 7 aa, synthetic construct
RGDFLEI

SEQ ID NO: 7364 - protein, 7 aa, synthetic construct
RGDFLGK

SEQ ID NO: 7365 - protein, 7 aa, synthetic construct
RGDFLRI

SEQ ID NO: 7366 - protein, 7 aa, synthetic construct
RGDFNRQ

SEQ ID NO: 7367 - protein, 7 aa, synthetic construct
RGDFQFI

SEQ ID NO: 7368 - protein, 7 aa, synthetic construct
RGDFSES

SEQ ID NO: 7369 - protein, 7 aa, synthetic construct
RGDFSGH

SEQ ID NO: 7370 - protein, 7 aa, synthetic construct
RGDFSLV

SEQ ID NO: 7371 - protein, 7 aa, synthetic construct
RGDFSRD

SEQ ID NO: 7372 - protein, 7 aa, synthetic construct
RGDFTGQ

SEQ ID NO: 7373 - protein, 7 aa, synthetic construct
RGDFTVI

SEQ ID NO: 7374 - protein, 7 aa, synthetic construct
RGDFVGL

SEQ ID NO: 7375 - protein, 7 aa, synthetic construct
RGDFVGR

SEQ ID NO: 7376 - protein, 7 aa, synthetic construct
RGDFVHL

SEQ ID NO: 7377 - protein, 7 aa, synthetic construct
RGDFVKF

SEQ ID NO: 7378 - protein, 7 aa, synthetic construct
RGDFVTA

SEQ ID NO: 7379 - protein, 7 aa, synthetic construct
RGDGGFI

SEQ ID NO: 7380 - protein, 7 aa, synthetic construct
RGDAIRV

SEQ ID NO: 7381 - protein, 7 aa, synthetic construct
RGDGSFS

SEQ ID NO: 7382 - protein, 7 aa, synthetic construct
RGDAKGA

SEQ ID NO: 7383 - protein, 7 aa, synthetic construct
RGDAKNK

SEQ ID NO: 7384 - protein, 7 aa, synthetic construct
RGDHGGF

SEQ ID NO: 7385 - protein, 7 aa, synthetic construct
RGDHGSG

SEQ ID NO: 7386 - protein, 7 aa, synthetic construct
RGDHGTS

SEQ ID NO: 7387 - protein, 7 aa, synthetic construct
RGDHGVE

SEQ ID NO: 7388 - protein, 7 aa, synthetic construct
RGDHKTT

SEQ ID NO: 7389 - protein, 7 aa, synthetic construct
RGDHRET

SEQ ID NO: 7390 - protein, 7 aa, synthetic construct
RGDHRFI

SEQ ID NO: 7391 - protein, 7 aa, synthetic construct
RGDHRHH

SEQ ID NO: 7392 - protein, 7 aa, synthetic construct
RGDHSAE

SEQ ID NO: 7393 - protein, 7 aa, synthetic construct
RGDHSFF

SEQ ID NO: 7394 - protein, 7 aa, synthetic construct
RGDHSFK

SEQ ID NO: 7395 - protein, 7 aa, synthetic construct
RGDHSKV

SEQ ID NO: 7396 - protein, 7 aa, synthetic construct
RGDHSSL

SEQ ID NO: 7397 - protein, 7 aa, synthetic construct
RGDIAHE

SEQ ID NO: 7398 - protein, 7 aa, synthetic construct
RGDIAHI

SEQ ID NO: 7399 - protein, 7 aa, synthetic construct
RGDIEFS

SEQ ID NO: 7400 - protein, 7 aa, synthetic construct
RGDIHFS

SEQ ID NO: 7401 - protein, 7 aa, synthetic construct
RGDIHIK

SEQ ID NO: 7402 - protein, 7 aa, synthetic construct
RGDIHVQ

SEQ ID NO: 7403 - protein, 7 aa, synthetic construct
RGDIIGG

SEQ ID NO: 7404 - protein, 7 aa, synthetic construct
RGDIITG

SEQ ID NO: 7405 - protein, 7 aa, synthetic construct
RGDIKHT

SEQ ID NO: 7406 - protein, 7 aa, synthetic construct
RGDANRQ

SEQ ID NO: 7407 - protein, 7 aa, synthetic construct
RGDILFV

SEQ ID NO: 7408 - protein, 7 aa, synthetic construct
RGDILKS

SEQ ID NO: 7409 - protein, 7 aa, synthetic construct
RGDINRQ

SEQ ID NO: 7410 - protein, 7 aa, synthetic construct
RGDAQAV

SEQ ID NO: 7411 - protein, 7 aa, synthetic construct
RGDIRTI

SEQ ID NO: 7412 - protein, 7 aa, synthetic construct
RGDKALI

SEQ ID NO: 7413 - protein, 7 aa, synthetic construct
RGDKDNE

SEQ ID NO: 7414 - protein, 7 aa, synthetic construct
RGDKGKK

SEQ ID NO: 7415 - protein, 7 aa, synthetic construct
RGDARAQ

SEQ ID NO: 7416 - protein, 7 aa, synthetic construct
RGDKHLV

SEQ ID NO: 7417 - protein, 7 aa, synthetic construct
RGDKHRI

SEQ ID NO: 7418 - protein, 7 aa, synthetic construct
RGDKHRQ

SEQ ID NO: 7419 - protein, 7 aa, synthetic construct
RGDKHVR

SEQ ID NO: 7420 - protein, 7 aa, synthetic construct
RGDKKGS

SEQ ID NO: 7421 - protein, 7 aa, synthetic construct
RGDKKQS

SEQ ID NO: 7422 - protein, 7 aa, synthetic construct
RGDKLLH

SEQ ID NO: 7423 - protein, 7 aa, synthetic construct
RGDKNLV

SEQ ID NO: 7424 - protein, 7 aa, synthetic construct
RGDKREH

SEQ ID NO: 7425 - protein, 7 aa, synthetic construct
RGDKRVR

SEQ ID NO: 7426 - protein, 7 aa, synthetic construct
RGDKTSF

SEQ ID NO: 7427 - protein, 7 aa, synthetic construct
RGDARVG

SEQ ID NO: 7428 - protein, 7 aa, synthetic construct
RGDKVVI

SEQ ID NO: 7429 - protein, 7 aa, synthetic construct
RGDLFGQ

SEQ ID NO: 7430 - protein, 7 aa, synthetic construct
RGDLFGS

SEQ ID NO: 7431 - protein, 7 aa, synthetic construct
RGDLFNQ

SEQ ID NO: 7432 - protein, 7 aa, synthetic construct
RGDLGRR

SEQ ID NO: 7433 - protein, 7 aa, synthetic construct
RGDLGTD

SEQ ID NO: 7434 - protein, 7 aa, synthetic construct
RGDASNH

SEQ ID NO: 7435 - protein, 7 aa, synthetic construct
RGDLIGT

SEQ ID NO: 7436 - protein, 7 aa, synthetic construct
RGDLIRV

SEQ ID NO: 7437 - protein, 7 aa, synthetic construct
RGDLITA

SEQ ID NO: 7438 - protein, 7 aa, synthetic construct
RGDLKVA

SEQ ID NO: 7439 - protein, 7 aa, synthetic construct
RGDLLTN

SEQ ID NO: 7440 - protein, 7 aa, synthetic construct
RGDLQEI

SEQ ID NO: 7441 - protein, 7 aa, synthetic construct
RGDLQNL

SEQ ID NO: 7442 - protein, 7 aa, synthetic construct
RGDLSHA

SEQ ID NO: 7443 - protein, 7 aa, synthetic construct
RGDLVHA

SEQ ID NO: 7444 - protein, 7 aa, synthetic construct
RGDLVTV

SEQ ID NO: 7445 - protein, 7 aa, synthetic construct
RGDNENR

SEQ ID NO: 7446 - protein, 7 aa, synthetic construct
RGDNETV

SEQ ID NO: 7447 - protein, 7 aa, synthetic construct
RGDNHQN

SEQ ID NO: 7448 - protein, 7 aa, synthetic construct
RGDNHRL

SEQ ID NO: 7449 - protein, 7 aa, synthetic construct
RGDNKTI

SEQ ID NO: 7450 - protein, 7 aa, synthetic construct
RGDNNRD

SEQ ID NO: 7451 - protein, 7 aa, synthetic construct
RGDNQAQ

SEQ ID NO: 7452 - protein, 7 aa, synthetic construct
RGDAVRN

SEQ ID NO: 7453 - protein, 7 aa, synthetic construct
RGDAVSI

SEQ ID NO: 7454 - protein, 7 aa, synthetic construct
RGDNVRV

SEQ ID NO: 7455 - protein, 7 aa, synthetic construct
RGDQGNV

SEQ ID NO: 7456 - protein, 7 aa, synthetic construct
RGDQKFA

SEQ ID NO: 7457 - protein, 7 aa, synthetic construct
RGDQKKS

SEQ ID NO: 7458 - protein, 7 aa, synthetic construct
RGDQNFT

SEQ ID NO: 7459 - protein, 7 aa, synthetic construct
RGDQNFV

SEQ ID NO: 7460 - protein, 7 aa, synthetic construct
RGDQNRL

SEQ ID NO: 7461 - protein, 7 aa, synthetic construct
RGDQQNN

SEQ ID NO: 7462 - protein, 7 aa, synthetic construct
RGDQRDN

SEQ ID NO: 7463 - protein, 7 aa, synthetic construct
RGDQRET

SEQ ID NO: 7464 - protein, 7 aa, synthetic construct
RGDQRQG

SEQ ID NO: 7465 - protein, 7 aa, synthetic construct
RGDQTFT

SEQ ID NO: 7466 - protein, 7 aa, synthetic construct
RGDQTSL

SEQ ID NO: 7467 - protein, 7 aa, synthetic construct
RGDQTTL

SEQ ID NO: 7468 - protein, 7 aa, synthetic construct
RGDQVHL

SEQ ID NO: 7469 - protein, 7 aa, synthetic construct
RGDQVTH

SEQ ID NO: 7470 - protein, 7 aa, synthetic construct
RGDRELK

SEQ ID NO: 7471 - protein, 7 aa, synthetic construct
RGDRHAF

SEQ ID NO: 7472 - protein, 7 aa, synthetic construct
RGDRHNK

SEQ ID NO: 7473 - protein, 7 aa, synthetic construct
RGDRITR

SEQ ID NO: 7474 - protein, 7 aa, synthetic construct
RGDRQVF

SEQ ID NO: 7475 - protein, 7 aa, synthetic construct
RGDRQVH

SEQ ID NO: 7476 - protein, 7 aa, synthetic construct
RGDRVFH

SEQ ID NO: 7477 - protein, 7 aa, synthetic construct
RGDRVLK

SEQ ID NO: 7478 - protein, 7 aa, synthetic construct
RGDSDVV

SEQ ID NO: 7479 - protein, 7 aa, synthetic construct
RGDSGAQ

SEQ ID NO: 7480 - protein, 7 aa, synthetic construct
RGDSKFT

SEQ ID NO: 7481 - protein, 7 aa, synthetic construct
RGDSKHR

SEQ ID NO: 7482 - protein, 7 aa, synthetic construct
RGDSLRT

SEQ ID NO: 7483 - protein, 7 aa, synthetic construct
RGDSNDR

SEQ ID NO: 7484 - protein, 7 aa, synthetic construct
RGDSQSR

SEQ ID NO: 7485 - protein, 7 aa, synthetic construct
RGDSRGG

SEQ ID NO: 7486 - protein, 7 aa, synthetic construct
RGDSRND

SEQ ID NO: 7487 - protein, 7 aa, synthetic construct
RGDSRSS

SEQ ID NO: 7488 - protein, 7 aa, synthetic construct
RGDSSQS

SEQ ID NO: 7489 - protein, 7 aa, synthetic construct
RGDDGHG

SEQ ID NO: 7490 - protein, 7 aa, synthetic construct
RGDSTNH

SEQ ID NO: 7491 - protein, 7 aa, synthetic construct
RGDSTNK

SEQ ID NO: 7492 - protein, 7 aa, synthetic construct
RGDSVHK

SEQ ID NO: 7493 - protein, 7 aa, synthetic construct
RGDSVQS

SEQ ID NO: 7494 - protein, 7 aa, synthetic construct
RGDSVSF

SEQ ID NO: 7495 - protein, 7 aa, synthetic construct
RGDDGLK

SEQ ID NO: 7496 - protein, 7 aa, synthetic construct
RGDTEVR

SEQ ID NO: 7497 - protein, 7 aa, synthetic construct
RGDTINT

SEQ ID NO: 7498 - protein, 7 aa, synthetic construct
RGDTKGD

SEQ ID NO: 7499 - protein, 7 aa, synthetic construct
RGDTLFN

SEQ ID NO: 7500 - protein, 7 aa, synthetic construct
RGDTRNQ

SEQ ID NO: 7501 - protein, 7 aa, synthetic construct
RGDTRQN

SEQ ID NO: 7502 - protein, 7 aa, synthetic construct
RGDTRTN

SEQ ID NO: 7503 - protein, 7 aa, synthetic construct
RGDTVNL

SEQ ID NO: 7504 - protein, 7 aa, synthetic construct
RGDVAKF

SEQ ID NO: 7505 - protein, 7 aa, synthetic construct
RGDVAST

SEQ ID NO: 7506 - protein, 7 aa, synthetic construct
RGDVGKR

SEQ ID NO: 7507 - protein, 7 aa, synthetic construct
RGDVISR

SEQ ID NO: 7508 - protein, 7 aa, synthetic construct
RGDVKNK

SEQ ID NO: 7509 - protein, 7 aa, synthetic construct
RGDVLFI

SEQ ID NO: 7510 - protein, 7 aa, synthetic construct
RGDVQNL

SEQ ID NO: 7511 - protein, 7 aa, synthetic construct
RGDVRQI

SEQ ID NO: 7512 - protein, 7 aa, synthetic construct
RGDDRFT

SEQ ID NO: 7513 - protein, 7 aa, synthetic construct
RGDEHST

SEQ ID NO: 7514 - protein, 7 aa, synthetic construct
RGDAAHQ

SEQ ID NO: 7515 - protein, 7 aa, synthetic construct
RGDELRN

SEQ ID NO: 7516 - protein, 7 aa, synthetic construct
RGDFFDR

SEQ ID NO: 7517 - protein, 7 aa, synthetic construct
RGDFFGV

SEQ ID NO: 7518 - protein, 7 aa, synthetic construct
RGDFGHA

SEQ ID NO: 7519 - protein, 7 aa, synthetic construct
RGDFGTV

SEQ ID NO: 7520 - protein, 7 aa, synthetic construct
RGDFHRV

SEQ ID NO: 7521 - protein, 7 aa, synthetic construct
RGDFIAT

SEQ ID NO: 7522 - protein, 7 aa, synthetic construct
RGDFKHL

SEQ ID NO: 7523 - protein, 7 aa, synthetic construct
RGDFKTK

SEQ ID NO: 7524 - protein, 7 aa, synthetic construct
RGDFLSG

SEQ ID NO: 7525 - protein, 7 aa, synthetic construct
RGDFQRE

SEQ ID NO: 7526 - protein, 7 aa, synthetic construct
RGDFRVK

SEQ ID NO: 7527 - protein, 7 aa, synthetic construct
RGDFSKS

SEQ ID NO: 7528 - protein, 7 aa, synthetic construct
RGDAHTK

SEQ ID NO: 7529 - protein, 7 aa, synthetic construct
RGDFVIS

SEQ ID NO: 7530 - protein, 7 aa, synthetic construct
RGDFVVH

SEQ ID NO: 7531 - protein, 7 aa, synthetic construct
RGDGFKK

SEQ ID NO: 7532 - protein, 7 aa, synthetic construct
RGDGGGR

SEQ ID NO: 7533 - protein, 7 aa, synthetic construct
RGDGGQV

SEQ ID NO: 7534 - protein, 7 aa, synthetic construct
RGDGGSV

SEQ ID NO: 7535 - protein, 7 aa, synthetic construct
RGDGHFK

SEQ ID NO: 7536 - protein, 7 aa, synthetic construct
RGDGKFN

SEQ ID NO: 7537 - protein, 7 aa, synthetic construct
RGDGKTT

SEQ ID NO: 7538 - protein, 7 aa, synthetic construct
RGDGRDR

SEQ ID NO: 7539 - protein, 7 aa, synthetic construct
RGDGRNA

SEQ ID NO: 7540 - protein, 7 aa, synthetic construct
RGDGTKH

SEQ ID NO: 7541 - protein, 7 aa, synthetic construct
RGDHHTI

SEQ ID NO: 7542 - protein, 7 aa, synthetic construct
RGDHKST

SEQ ID NO: 7543 - protein, 7 aa, synthetic construct
RGDHRDQ

SEQ ID NO: 7544 - protein, 7 aa, synthetic construct
RGDHSQT

SEQ ID NO: 7545 - protein, 7 aa, synthetic construct
RGDHVAI

SEQ ID NO: 7546 - protein, 7 aa, synthetic construct
RGDHVSL

SEQ ID NO: 7547 - protein, 7 aa, synthetic construct
RGDIAGI

SEQ ID NO: 7548 - protein, 7 aa, synthetic construct
RGDIARN

SEQ ID NO: 7549 - protein, 7 aa, synthetic construct
RGDIEFF

SEQ ID NO: 7550 - protein, 7 aa, synthetic construct
RGDANFQ

SEQ ID NO: 7551 - protein, 7 aa, synthetic construct
RGDIEVV

SEQ ID NO: 7552 - protein, 7 aa, synthetic construct
RGDIHTL

SEQ ID NO: 7553 - protein, 7 aa, synthetic construct
RGDAAVK

SEQ ID NO: 7554 - protein, 7 aa, synthetic construct
RGDIKNT

SEQ ID NO: 7555 - protein, 7 aa, synthetic construct
RGDIKRS

SEQ ID NO: 7556 - protein, 7 aa, synthetic construct
RGDILGT

SEQ ID NO: 7557 - protein, 7 aa, synthetic construct
RGDIQFI

SEQ ID NO: 7558 - protein, 7 aa, synthetic construct
RGDITRE

SEQ ID NO: 7559 - protein, 7 aa, synthetic construct
RGDIVIK

SEQ ID NO: 7560 - protein, 7 aa, synthetic construct
RGDKADR

SEQ ID NO: 7561 - protein, 7 aa, synthetic construct
RGDKARG

SEQ ID NO: 7562 - protein, 7 aa, synthetic construct
RGDKDVR

SEQ ID NO: 7563 - protein, 7 aa, synthetic construct
RGDKFSQ

SEQ ID NO: 7564 - protein, 7 aa, synthetic construct
RGDKGFK

SEQ ID NO: 7565 - protein, 7 aa, synthetic construct
RGDKHQT

SEQ ID NO: 7566 - protein, 7 aa, synthetic construct
RGDKKEV

SEQ ID NO: 7567 - protein, 7 aa, synthetic construct
RGDKKSD

SEQ ID NO: 7568 - protein, 7 aa, synthetic construct
RGDKLGF

SEQ ID NO: 7569 - protein, 7 aa, synthetic construct
RGDKLGI

SEQ ID NO: 7570 - protein, 7 aa, synthetic construct
RGDARKV

SEQ ID NO: 7571 - protein, 7 aa, synthetic construct
RGDKQGV

SEQ ID NO: 7572 - protein, 7 aa, synthetic construct
RGDKQLQ

SEQ ID NO: 7573 - protein, 7 aa, synthetic construct
RGDKQRK

SEQ ID NO: 7574 - protein, 7 aa, synthetic construct
RGDKQSV

SEQ ID NO: 7575 - protein, 7 aa, synthetic construct
RGDARNK

SEQ ID NO: 7576 - protein, 7 aa, synthetic construct
RGDKRSQ

SEQ ID NO: 7577 - protein, 7 aa, synthetic construct
RGDKSRI

SEQ ID NO: 7578 - protein, 7 aa, synthetic construct
RGDKSTH

SEQ ID NO: 7579 - protein, 7 aa, synthetic construct
RGDKTQN

SEQ ID NO: 7580 - protein, 7 aa, synthetic construct
RGDLDSI

SEQ ID NO: 7581 - protein, 7 aa, synthetic construct
RGDLDVN

SEQ ID NO: 7582 - protein, 7 aa, synthetic construct
RGDASFI

SEQ ID NO: 7583 - protein, 7 aa, synthetic construct
RGDLHFN

SEQ ID NO: 7584 - protein, 7 aa, synthetic construct
RGDLHHE

SEQ ID NO: 7585 - protein, 7 aa, synthetic construct
RGDLNFD

SEQ ID NO: 7586 - protein, 7 aa, synthetic construct
RGDLQGN

SEQ ID NO: 7587 - protein, 7 aa, synthetic construct
RGDLQKT

SEQ ID NO: 7588 - protein, 7 aa, synthetic construct
RGDLRRE

SEQ ID NO: 7589 - protein, 7 aa, synthetic construct
RGDLTFG

SEQ ID NO: 7590 - protein, 7 aa, synthetic construct
RGDLVFK

SEQ ID NO: 7591 - protein, 7 aa, synthetic construct
RGDNAFI

SEQ ID NO: 7592 - protein, 7 aa, synthetic construct
RGDNALT

SEQ ID NO: 7593 - protein, 7 aa, synthetic construct
RGDNHNI

SEQ ID NO: 7594 - protein, 7 aa, synthetic construct
RGDNIDD

SEQ ID NO: 7595 - protein, 7 aa, synthetic construct
RGDNIDT

SEQ ID NO: 7596 - protein, 7 aa, synthetic construct
RGDNKQT

SEQ ID NO: 7597 - protein, 7 aa, synthetic construct
RGDADII

SEQ ID NO: 7598 - protein, 7 aa, synthetic construct
RGDNLQV

SEQ ID NO: 7599 - protein, 7 aa, synthetic construct
RGDNNSL

SEQ ID NO: 7600 - protein, 7 aa, synthetic construct
RGDNQNE

SEQ ID NO: 7601 - protein, 7 aa, synthetic construct
RGDNRNS

SEQ ID NO: 7602 - protein, 7 aa, synthetic construct
RGDNSFT

SEQ ID NO: 7603 - protein, 7 aa, synthetic construct
RGDNSGT

SEQ ID NO: 7604 - protein, 7 aa, synthetic construct
RGDNSSS

SEQ ID NO: 7605 - protein, 7 aa, synthetic construct
RGDNTQN

SEQ ID NO: 7606 - protein, 7 aa, synthetic construct
RGDNVFR

SEQ ID NO: 7607 - protein, 7 aa, synthetic construct
RGDNVKR

SEQ ID NO: 7608 - protein, 7 aa, synthetic construct
RGDQHKA

SEQ ID NO: 7609 - protein, 7 aa, synthetic construct
RGDQIHI

SEQ ID NO: 7610 - protein, 7 aa, synthetic construct
RGDQLKT

SEQ ID NO: 7611 - protein, 7 aa, synthetic construct
RGDQLVV

SEQ ID NO: 7612 - protein, 7 aa, synthetic construct
RGDQSIV

SEQ ID NO: 7613 - protein, 7 aa, synthetic construct
RGDQSNV

SEQ ID NO: 7614 - protein, 7 aa, synthetic construct
RGDQSTI

SEQ ID NO: 7615 - protein, 7 aa, synthetic construct
RGDQTHS

SEQ ID NO: 7616 - protein, 7 aa, synthetic construct
RGDQTIV

SEQ ID NO: 7617 - protein, 7 aa, synthetic construct
RGDRDHD

SEQ ID NO: 7618 - protein, 7 aa, synthetic construct
RGDRETS

SEQ ID NO: 7619 - protein, 7 aa, synthetic construct
RGDRGRN

SEQ ID NO: 7620 - protein, 7 aa, synthetic construct
RGDRIHR

SEQ ID NO: 7621 - protein, 7 aa, synthetic construct
RGDRKFQ

SEQ ID NO: 7622 - protein, 7 aa, synthetic construct
RGDRKIN

SEQ ID NO: 7623 - protein, 7 aa, synthetic construct
RGDRNGQ

SEQ ID NO: 7624 - protein, 7 aa, synthetic construct
RGDRNTT

SEQ ID NO: 7625 - protein, 7 aa, synthetic construct
RGDRRFQ

SEQ ID NO: 7626 - protein, 7 aa, synthetic construct
RGDRRLF

SEQ ID NO: 7627 - protein, 7 aa, synthetic construct
RGDRRVQ

SEQ ID NO: 7628 - protein, 7 aa, synthetic construct
RGDRSTL

SEQ ID NO: 7629 - protein, 7 aa, synthetic construct
RGDRSVA

SEQ ID NO: 7630 - protein, 7 aa, synthetic construct
RGDRTTF

SEQ ID NO: 7631 - protein, 7 aa, synthetic construct
RGDRTVA

SEQ ID NO: 7632 - protein, 7 aa, synthetic construct
RGDSAII

SEQ ID NO: 7633 - protein, 7 aa, synthetic construct
RGDSALR

SEQ ID NO: 7634 - protein, 7 aa, synthetic construct
RGDSAST

SEQ ID NO: 7635 - protein, 7 aa, synthetic construct
RGDSKLV

SEQ ID NO: 7636 - protein, 7 aa, synthetic construct
RGDSKQS

SEQ ID NO: 7637 - protein, 7 aa, synthetic construct
RGDSLFI

SEQ ID NO: 7638 - protein, 7 aa, synthetic construct
RGDSLHT

SEQ ID NO: 7639 - protein, 7 aa, synthetic construct
RGDSLTR

SEQ ID NO: 7640 - protein, 7 aa, synthetic construct
RGDSRHT

SEQ ID NO: 7641 - protein, 7 aa, synthetic construct
RGDSSGI

SEQ ID NO: 7642 - protein, 7 aa, synthetic construct
RGDDGGA

SEQ ID NO: 7643 - protein, 7 aa, synthetic construct
RGDSSSA

SEQ ID NO: 7644 - protein, 7 aa, synthetic construct
RGDSVSV

SEQ ID NO: 7645 - protein, 7 aa, synthetic construct
RGDTEQL

SEQ ID NO: 7646 - protein, 7 aa, synthetic construct
RGDTGFK

SEQ ID NO: 7647 - protein, 7 aa, synthetic construct
RGDTLLI

SEQ ID NO: 7648 - protein, 7 aa, synthetic construct
RGDTLQK

SEQ ID NO: 7649 - protein, 7 aa, synthetic construct
RGDTQIQ

SEQ ID NO: 7650 - protein, 7 aa, synthetic construct
RGDTRND

SEQ ID NO: 7651 - protein, 7 aa, synthetic construct
RGDVAKA

SEQ ID NO: 7652 - protein, 7 aa, synthetic construct
RGDVEKF

SEQ ID NO: 7653 - protein, 7 aa, synthetic construct
RGDVGQV

SEQ ID NO: 7654 - protein, 7 aa, synthetic construct
RGDVHGE

SEQ ID NO: 7655 - protein, 7 aa, synthetic construct
RGDVHGL

SEQ ID NO: 7656 - protein, 7 aa, synthetic construct
RGDVKAV

SEQ ID NO: 7657 - protein, 7 aa, synthetic construct
RGDVKRL

SEQ ID NO: 7658 - protein, 7 aa, synthetic construct
RGDVLQN

SEQ ID NO: 7659 - protein, 7 aa, synthetic construct
RGDVNKN

SEQ ID NO: 7660 - protein, 7 aa, synthetic construct
RGDVQVG

SEQ ID NO: 7661 - protein, 7 aa, synthetic construct
RGDVSTI

SEQ ID NO: 7662 - protein, 7 aa, synthetic construct
RGDVSVL

SEQ ID NO: 7663 - protein, 7 aa, synthetic construct
RGDVVVV

SEQ ID NO: 7664 - protein, 7 aa, synthetic construct
RGDDKKK

SEQ ID NO: 7665 - protein, 7 aa, synthetic construct
RGDDNHF

SEQ ID NO: 7666 - protein, 7 aa, synthetic construct
RGDEART

SEQ ID NO: 7667 - protein, 7 aa, synthetic construct
RGDEQKE

SEQ ID NO: 7668 - protein, 7 aa, synthetic construct
RGDERFE

SEQ ID NO: 7669 - protein, 7 aa, synthetic construct
RGDAGFK

SEQ ID NO: 7670 - protein, 7 aa, synthetic construct
RGDFAQL

SEQ ID NO: 7671 - protein, 7 aa, synthetic construct
RGDFART

SEQ ID NO: 7672 - protein, 7 aa, synthetic construct
RGDFASS

SEQ ID NO: 7673 - protein, 7 aa, synthetic construct
RGDFFKH

SEQ ID NO: 7674 - protein, 7 aa, synthetic construct
RGDFGIN

SEQ ID NO: 7675 - protein, 7 aa, synthetic construct
RGDFGRT

SEQ ID NO: 7676 - protein, 7 aa, synthetic construct
RGDFHHK

SEQ ID NO: 7677 - protein, 7 aa, synthetic construct
RGDFHTS

SEQ ID NO: 7678 - protein, 7 aa, synthetic construct
RGDFIHT

SEQ ID NO: 7679 - protein, 7 aa, synthetic construct
RGDFKSD

SEQ ID NO: 7680 - protein, 7 aa, synthetic construct
RGDFLFL

SEQ ID NO: 7681 - protein, 7 aa, synthetic construct
RGDFRFK

SEQ ID NO: 7682 - protein, 7 aa, synthetic construct
RGDAHNS

SEQ ID NO: 7683 - protein, 7 aa, synthetic construct
RGDFRSF

SEQ ID NO: 7684 - protein, 7 aa, synthetic construct
RGDAHRF

SEQ ID NO: 7685 - protein, 7 aa, synthetic construct
RGDFSQV

SEQ ID NO: 7686 - protein, 7 aa, synthetic construct
RGDAHSV

SEQ ID NO: 7687 - protein, 7 aa, synthetic construct
RGDFTRV

SEQ ID NO: 7688 - protein, 7 aa, synthetic construct
RGDGDDR

SEQ ID NO: 7689 - protein, 7 aa, synthetic construct
RGDAANH

SEQ ID NO: 7690 - protein, 7 aa, synthetic construct
RGDGETR

SEQ ID NO: 7691 - protein, 7 aa, synthetic construct
RGDGFHG

SEQ ID NO: 7692 - protein, 7 aa, synthetic construct
RGDGFSF

SEQ ID NO: 7693 - protein, 7 aa, synthetic construct
RGDGGSA

SEQ ID NO: 7694 - protein, 7 aa, synthetic construct
RGDAIKI

SEQ ID NO: 7695 - protein, 7 aa, synthetic construct
RGDGHDL

SEQ ID NO: 7696 - protein, 7 aa, synthetic construct
RGDGHNI

SEQ ID NO: 7697 - protein, 7 aa, synthetic construct
RGDGIST

SEQ ID NO: 7698 - protein, 7 aa, synthetic construct
RGDGITV

SEQ ID NO: 7699 - protein, 7 aa, synthetic construct
RGDGLKI

SEQ ID NO: 7700 - protein, 7 aa, synthetic construct
RGDGQFF

SEQ ID NO: 7701 - protein, 7 aa, synthetic construct
RGDGQSF

SEQ ID NO: 7702 - protein, 7 aa, synthetic construct
RGDGREI

SEQ ID NO: 7703 - protein, 7 aa, synthetic construct
RGDGRHF

SEQ ID NO: 7704 - protein, 7 aa, synthetic construct
RGDGSHS

SEQ ID NO: 7705 - protein, 7 aa, synthetic construct
RGDGVTR

SEQ ID NO: 7706 - protein, 7 aa, synthetic construct
RGDHASK

SEQ ID NO: 7707 - protein, 7 aa, synthetic construct
RGDHDGQ

SEQ ID NO: 7708 - protein, 7 aa, synthetic construct
RGDAKRI

SEQ ID NO: 7709 - protein, 7 aa, synthetic construct
RGDAKTT

SEQ ID NO: 7710 - protein, 7 aa, synthetic construct
RGDHGHK

SEQ ID NO: 7711 - protein, 7 aa, synthetic construct
RGDHHDF

SEQ ID NO: 7712 - protein, 7 aa, synthetic construct
RGDALAV

SEQ ID NO: 7713 - protein, 7 aa, synthetic construct
RGDHHQL

SEQ ID NO: 7714 - protein, 7 aa, synthetic construct
RGDHKEQ

SEQ ID NO: 7715 - protein, 7 aa, synthetic construct
RGDHKRQ

SEQ ID NO: 7716 - protein, 7 aa, synthetic construct
RGDHLTL

SEQ ID NO: 7717 - protein, 7 aa, synthetic construct
RGDHNAF

SEQ ID NO: 7718 - protein, 7 aa, synthetic construct
RGDHQGI

SEQ ID NO: 7719 - protein, 7 aa, synthetic construct
RGDHQHF

SEQ ID NO: 7720 - protein, 7 aa, synthetic construct
RGDHRSV

SEQ ID NO: 7721 - protein, 7 aa, synthetic construct
RGDHSFL

SEQ ID NO: 7722 - protein, 7 aa, synthetic construct
RGDHSGE

SEQ ID NO: 7723 - protein, 7 aa, synthetic construct
RGDALRN

SEQ ID NO: 7724 - protein, 7 aa, synthetic construct
RGDHTEL

SEQ ID NO: 7725 - protein, 7 aa, synthetic construct
RGDHTRK

SEQ ID NO: 7726 - protein, 7 aa, synthetic construct
RGDHTSE

SEQ ID NO: 7727 - protein, 7 aa, synthetic construct
RGDHVFK

SEQ ID NO: 7728 - protein, 7 aa, synthetic construct
RGDIAIN

SEQ ID NO: 7729 - protein, 7 aa, synthetic construct
RGDIESH

SEQ ID NO: 7730 - protein, 7 aa, synthetic construct
RGDIFRF

SEQ ID NO: 7731 - protein, 7 aa, synthetic construct
RGDIHAL

SEQ ID NO: 7732 - protein, 7 aa, synthetic construct
RGDIISR

SEQ ID NO: 7733 - protein, 7 aa, synthetic construct
RGDIKNF

SEQ ID NO: 7734 - protein, 7 aa, synthetic construct
RGDIKSF

SEQ ID NO: 7735 - protein, 7 aa, synthetic construct
RGDILGQ

SEQ ID NO: 7736 - protein, 7 aa, synthetic construct
RGDILNI

SEQ ID NO: 7737 - protein, 7 aa, synthetic construct
RGDINNR

SEQ ID NO: 7738 - protein, 7 aa, synthetic construct
RGDIRIH

SEQ ID NO: 7739 - protein, 7 aa, synthetic construct
RGDISAI

SEQ ID NO: 7740 - protein, 7 aa, synthetic construct
RGDITLT

SEQ ID NO: 7741 - protein, 7 aa, synthetic construct
RGDAQHV

SEQ ID NO: 7742 - protein, 7 aa, synthetic construct
RGDKATT

SEQ ID NO: 7743 - protein, 7 aa, synthetic construct
RGDKDAF

SEQ ID NO: 7744 - protein, 7 aa, synthetic construct
RGDKEGL

SEQ ID NO: 7745 - protein, 7 aa, synthetic construct
RGDKEKL

SEQ ID NO: 7746 - protein, 7 aa, synthetic construct
RGDKFKI

SEQ ID NO: 7747 - protein, 7 aa, synthetic construct
RGDKFTV

SEQ ID NO: 7748 - protein, 7 aa, synthetic construct
RGDKGAN

SEQ ID NO: 7749 - protein, 7 aa, synthetic construct
RGDKGHF

SEQ ID NO: 7750 - protein, 7 aa, synthetic construct
RGDKGHR

SEQ ID NO: 7751 - protein, 7 aa, synthetic construct
RGDKKQA

SEQ ID NO: 7752 - protein, 7 aa, synthetic construct
RGDKLDF

SEQ ID NO: 7753 - protein, 7 aa, synthetic construct
RGDKLNQ

SEQ ID NO: 7754 - protein, 7 aa, synthetic construct
RGDKNER

SEQ ID NO: 7755 - protein, 7 aa, synthetic construct
RGDKNFA

SEQ ID NO: 7756 - protein, 7 aa, synthetic construct
RGDKRRF

SEQ ID NO: 7757 - protein, 7 aa, synthetic construct
RGDKRSD

SEQ ID NO: 7758 - protein, 7 aa, synthetic construct
RGDKRVQ

SEQ ID NO: 7759 - protein, 7 aa, synthetic construct
RGDARTK

SEQ ID NO: 7760 - protein, 7 aa, synthetic construct
RGDKVRQ

SEQ ID NO: 7761 - protein, 7 aa, synthetic construct
RGDLART

SEQ ID NO: 7762 - protein, 7 aa, synthetic construct
RGDLEHR

SEQ ID NO: 7763 - protein, 7 aa, synthetic construct
RGDASFV

SEQ ID NO: 7764 - protein, 7 aa, synthetic construct
RGDLGFR

SEQ ID NO: 7765 - protein, 7 aa, synthetic construct
RGDLGHK

SEQ ID NO: 7766 - protein, 7 aa, synthetic construct
RGDASKK

SEQ ID NO: 7767 - protein, 7 aa, synthetic construct
RGDLHEV

SEQ ID NO: 7768 - protein, 7 aa, synthetic construct
RGDLHKT

SEQ ID NO: 7769 - protein, 7 aa, synthetic construct
RGDLIVQ

SEQ ID NO: 7770 - protein, 7 aa, synthetic construct
RGDASRQ

SEQ ID NO: 7771 - protein, 7 aa, synthetic construct
RGDLRSE

SEQ ID NO: 7772 - protein, 7 aa, synthetic construct
RGDLRVK

SEQ ID NO: 7773 - protein, 7 aa, synthetic construct
RGDLRVT

SEQ ID NO: 7774 - protein, 7 aa, synthetic construct
RGDLTHS

SEQ ID NO: 7775 - protein, 7 aa, synthetic construct
RGDLTTQ

SEQ ID NO: 7776 - protein, 7 aa, synthetic construct
RGDLVFD

SEQ ID NO: 7777 - protein, 7 aa, synthetic construct
RGDLVGQ

SEQ ID NO: 7778 - protein, 7 aa, synthetic construct
RGDLVRK

SEQ ID NO: 7779 - protein, 7 aa, synthetic construct
RGDLVST

SEQ ID NO: 7780 - protein, 7 aa, synthetic construct
RGDNDLE

SEQ ID NO: 7781 - protein, 7 aa, synthetic construct
RGDNFSL

SEQ ID NO: 7782 - protein, 7 aa, synthetic construct
RGDNHVT

SEQ ID NO: 7783 - protein, 7 aa, synthetic construct
RGDNIKV

SEQ ID NO: 7784 - protein, 7 aa, synthetic construct
RGDAVHV

SEQ ID NO: 7785 - protein, 7 aa, synthetic construct
RGDNNFV

SEQ ID NO: 7786 - protein, 7 aa, synthetic construct
RGDAVKF

SEQ ID NO: 7787 - protein, 7 aa, synthetic construct
RGDNRAN

SEQ ID NO: 7788 - protein, 7 aa, synthetic construct
RGDNRNN

SEQ ID NO: 7789 - protein, 7 aa, synthetic construct
RGDNSGS

SEQ ID NO: 7790 - protein, 7 aa, synthetic construct
RGDNSLT

SEQ ID NO: 7791 - protein, 7 aa, synthetic construct
RGDNSSG

SEQ ID NO: 7792 - protein, 7 aa, synthetic construct
RGDNVSI

SEQ ID NO: 7793 - protein, 7 aa, synthetic construct
RGDQGVA

SEQ ID NO: 7794 - protein, 7 aa, synthetic construct
RGDQHTL

SEQ ID NO: 7795 - protein, 7 aa, synthetic construct
RGDQINF

SEQ ID NO: 7796 - protein, 7 aa, synthetic construct
RGDQKGQ

SEQ ID NO: 7797 - protein, 7 aa, synthetic construct
RGDQKHI

SEQ ID NO: 7798 - protein, 7 aa, synthetic construct
RGDQLKE

SEQ ID NO: 7799 - protein, 7 aa, synthetic construct
RGDQLRA

SEQ ID NO: 7800 - protein, 7 aa, synthetic construct
RGDQLVT

SEQ ID NO: 7801 - protein, 7 aa, synthetic construct
RGDQNRG

SEQ ID NO: 7802 - protein, 7 aa, synthetic construct
RGDQSSN

SEQ ID NO: 7803 - protein, 7 aa, synthetic construct
RGDQSSQ

SEQ ID NO: 7804 - protein, 7 aa, synthetic construct
RGDQVGA

SEQ ID NO: 7805 - protein, 7 aa, synthetic construct
RGDQVSK

SEQ ID NO: 7806 - protein, 7 aa, synthetic construct
RGDRAHF

SEQ ID NO: 7807 - protein, 7 aa, synthetic construct
RGDRDIK

SEQ ID NO: 7808 - protein, 7 aa, synthetic construct
RGDREAR

SEQ ID NO: 7809 - protein, 7 aa, synthetic construct
RGDRESQ

SEQ ID NO: 7810 - protein, 7 aa, synthetic construct
RGDRFFE

SEQ ID NO: 7811 - protein, 7 aa, synthetic construct
RGDRFGG

SEQ ID NO: 7812 - protein, 7 aa, synthetic construct
RGDRIHQ

SEQ ID NO: 7813 - protein, 7 aa, synthetic construct
RGDRKFA

SEQ ID NO: 7814 - protein, 7 aa, synthetic construct
RGDRKVF

SEQ ID NO: 7815 - protein, 7 aa, synthetic construct
RGDRLDN

SEQ ID NO: 7816 - protein, 7 aa, synthetic construct
RGDRLNS

SEQ ID NO: 7817 - protein, 7 aa, synthetic construct
RGDRLVE

SEQ ID NO: 7818 - protein, 7 aa, synthetic construct
RGDRQQF

SEQ ID NO: 7819 - protein, 7 aa, synthetic construct
RGDRSEQ

SEQ ID NO: 7820 - protein, 7 aa, synthetic construct
RGDRSKF

SEQ ID NO: 7821 - protein, 7 aa, synthetic construct
RGDRSKL

SEQ ID NO: 7822 - protein, 7 aa, synthetic construct
RGDRSQF

SEQ ID NO: 7823 - protein, 7 aa, synthetic construct
RGDRTHK

SEQ ID NO: 7824 - protein, 7 aa, synthetic construct
RGDRVNS

SEQ ID NO: 7825 - protein, 7 aa, synthetic construct
RGDSGGG

SEQ ID NO: 7826 - protein, 7 aa, synthetic construct
RGDSHFI

SEQ ID NO: 7827 - protein, 7 aa, synthetic construct
RGDSIEK

SEQ ID NO: 7828 - protein, 7 aa, synthetic construct
RGDSQKV

SEQ ID NO: 7829 - protein, 7 aa, synthetic construct
RGDSSHL

SEQ ID NO: 7830 - protein, 7 aa, synthetic construct
RGDSSSR

SEQ ID NO: 7831 - protein, 7 aa, synthetic construct
RGDSSTL

SEQ ID NO: 7832 - protein, 7 aa, synthetic construct
RGDTIVN

SEQ ID NO: 7833 - protein, 7 aa, synthetic construct
RGDTKAT

SEQ ID NO: 7834 - protein, 7 aa, synthetic construct
RGDTKDK

SEQ ID NO: 7835 - protein, 7 aa, synthetic construct
RGDTKLT

SEQ ID NO: 7836 - protein, 7 aa, synthetic construct
RGDTSKA

SEQ ID NO: 7837 - protein, 7 aa, synthetic construct
RGDVAFI

SEQ ID NO: 7838 - protein, 7 aa, synthetic construct
RGDVGDK

SEQ ID NO: 7839 - protein, 7 aa, synthetic construct
RGDVHIK

SEQ ID NO: 7840 - protein, 7 aa, synthetic construct
RGDVHNI

SEQ ID NO: 7841 - protein, 7 aa, synthetic construct
RGDVLKS

SEQ ID NO: 7842 - protein, 7 aa, synthetic construct
RGDVLSA

SEQ ID NO: 7843 - protein, 7 aa, synthetic construct
RGDVNKV

SEQ ID NO: 7844 - protein, 7 aa, synthetic construct
RGDVNSK

SEQ ID NO: 7845 - protein, 7 aa, synthetic construct
RGDVREI

SEQ ID NO: 7846 - protein, 7 aa, synthetic construct
RGDVRIR

SEQ ID NO: 7847 - protein, 7 aa, synthetic construct
RGDVTAH

SEQ ID NO: 7848 - protein, 7 aa, synthetic construct
RGDVTNV

SEQ ID NO: 7849 - protein, 7 aa, synthetic construct
RGDDLKT

SEQ ID NO: 7850 - protein, 7 aa, synthetic construct
RGDDRNQ

SEQ ID NO: 7851 - protein, 7 aa, synthetic construct
RGDDSSH

SEQ ID NO: 7852 - protein, 7 aa, synthetic construct
RGDEAFT

SEQ ID NO: 7853 - protein, 7 aa, synthetic construct
RGDAFKT

SEQ ID NO: 7854 - protein, 7 aa, synthetic construct
RGDFAQK

SEQ ID NO: 7855 - protein, 7 aa, synthetic construct
RGDFDGN

SEQ ID NO: 7856 - protein, 7 aa, synthetic construct
RGDFDRV

SEQ ID NO: 7857 - protein, 7 aa, synthetic construct
RGDFFHN

SEQ ID NO: 7858 - protein, 7 aa, synthetic construct
RGDFFNQ

SEQ ID NO: 7859 - protein, 7 aa, synthetic construct
RGDFGFT

SEQ ID NO: 7860 - protein, 7 aa, synthetic construct
RGDFHGL

SEQ ID NO: 7861 - protein, 7 aa, synthetic construct
RGDFKFH

SEQ ID NO: 7862 - protein, 7 aa, synthetic construct
RGDFKSS

SEQ ID NO: 7863 - protein, 7 aa, synthetic construct
RGDFLHQ

SEQ ID NO: 7864 - protein, 7 aa, synthetic construct
RGDFLNT

SEQ ID NO: 7865 - protein, 7 aa, synthetic construct
RGDFQKN

SEQ ID NO: 7866 - protein, 7 aa, synthetic construct
RGDFQKR

SEQ ID NO: 7867 - protein, 7 aa, synthetic construct
RGDFRVL

SEQ ID NO: 7868 - protein, 7 aa, synthetic construct
RGDAHSK

SEQ ID NO: 7869 - protein, 7 aa, synthetic construct
RGDFVDL

SEQ ID NO: 7870 - protein, 7 aa, synthetic construct
RGDFVLR

SEQ ID NO: 7871 - protein, 7 aa, synthetic construct
RGDFVTS

SEQ ID NO: 7872 - protein, 7 aa, synthetic construct
RGDFVVT

SEQ ID NO: 7873 - protein, 7 aa, synthetic construct
RGDGAFQ

SEQ ID NO: 7874 - protein, 7 aa, synthetic construct
RGDGETQ

SEQ ID NO: 7875 - protein, 7 aa, synthetic construct
RGDGGFR

SEQ ID NO: 7876 - protein, 7 aa, synthetic construct
RGDGHAE

SEQ ID NO: 7877 - protein, 7 aa, synthetic construct
RGDGHFR

SEQ ID NO: 7878 - protein, 7 aa, synthetic construct
RGDGIGT

SEQ ID NO: 7879 - protein, 7 aa, synthetic construct
RGDGKGI

SEQ ID NO: 7880 - protein, 7 aa, synthetic construct
RGDGKTN

SEQ ID NO: 7881 - protein, 7 aa, synthetic construct
RGDGLHE

SEQ ID NO: 7882 - protein, 7 aa, synthetic construct
RGDGNKI

SEQ ID NO: 7883 - protein, 7 aa, synthetic construct
RGDHEAI

SEQ ID NO: 7884 - protein, 7 aa, synthetic construct
RGDHFKR

SEQ ID NO: 7885 - protein, 7 aa, synthetic construct
RGDHGTF

SEQ ID NO: 7886 - protein, 7 aa, synthetic construct
RGDHIKK

SEQ ID NO: 7887 - protein, 7 aa, synthetic construct
RGDHKGH

SEQ ID NO: 7888 - protein, 7 aa, synthetic construct
RGDHKGT

SEQ ID NO: 7889 - protein, 7 aa, synthetic construct
RGDHLKN

SEQ ID NO: 7890 - protein, 7 aa, synthetic construct
RGDHLSH

SEQ ID NO: 7891 - protein, 7 aa, synthetic construct
RGDALKE

SEQ ID NO: 7892 - protein, 7 aa, synthetic construct
RGDHNSQ

SEQ ID NO: 7893 - protein, 7 aa, synthetic construct
RGDHNTV

SEQ ID NO: 7894 - protein, 7 aa, synthetic construct
RGDHRDT

SEQ ID NO: 7895 - protein, 7 aa, synthetic construct
RGDHRFV

SEQ ID NO: 7896 - protein, 7 aa, synthetic construct
RGDHRTK

SEQ ID NO: 7897 - protein, 7 aa, synthetic construct
RGDHTVL

SEQ ID NO: 7898 - protein, 7 aa, synthetic construct
RGDANAL

SEQ ID NO: 7899 - protein, 7 aa, synthetic construct
RGDAATQ

SEQ ID NO: 7900 - protein, 7 aa, synthetic construct
RGDIFHT

SEQ ID NO: 7901 - protein, 7 aa, synthetic construct
RGDIFIV

SEQ ID NO: 7902 - protein, 7 aa, synthetic construct
RGDIFRI

SEQ ID NO: 7903 - protein, 7 aa, synthetic construct
RGDIFRN

SEQ ID NO: 7904 - protein, 7 aa, synthetic construct
RGDIGEK

SEQ ID NO: 7905 - protein, 7 aa, synthetic construct
RGDIGGH

SEQ ID NO: 7906 - protein, 7 aa, synthetic construct
RGDIHFK

SEQ ID NO: 7907 - protein, 7 aa, synthetic construct
RGDIHFL

SEQ ID NO: 7908 - protein, 7 aa, synthetic construct
RGDIHHH

SEQ ID NO: 7909 - protein, 7 aa, synthetic construct
RGDIIVR

SEQ ID NO: 7910 - protein, 7 aa, synthetic construct
RGDIKGE

SEQ ID NO: 7911 - protein, 7 aa, synthetic construct
RGDILII

SEQ ID NO: 7912 - protein, 7 aa, synthetic construct
RGDIQNI

SEQ ID NO: 7913 - protein, 7 aa, synthetic construct
RGDITKK

SEQ ID NO: 7914 - protein, 7 aa, synthetic construct
RGDIVKN

SEQ ID NO: 7915 - protein, 7 aa, synthetic construct
RGDIVTH

SEQ ID NO: 7916 - protein, 7 aa, synthetic construct
RGDKEFI

SEQ ID NO: 7917 - protein, 7 aa, synthetic construct
RGDKFRF

SEQ ID NO: 7918 - protein, 7 aa, synthetic construct
RGDKGGH

SEQ ID NO: 7919 - protein, 7 aa, synthetic construct
RGDKGHH

SEQ ID NO: 7920 - protein, 7 aa, synthetic construct
RGDKHSN

SEQ ID NO: 7921 - protein, 7 aa, synthetic construct
RGDKHVV

SEQ ID NO: 7922 - protein, 7 aa, synthetic construct
RGDARFS

SEQ ID NO: 7923 - protein, 7 aa, synthetic construct
RGDKNDF

SEQ ID NO: 7924 - protein, 7 aa, synthetic construct
RGDKNEH

SEQ ID NO: 7925 - protein, 7 aa, synthetic construct
RGDKQRI

SEQ ID NO: 7926 - protein, 7 aa, synthetic construct
RGDKRTQ

SEQ ID NO: 7927 - protein, 7 aa, synthetic construct
RGDKSGQ

SEQ ID NO: 7928 - protein, 7 aa, synthetic construct
RGDARRE

SEQ ID NO: 7929 - protein, 7 aa, synthetic construct
RGDLAIK

SEQ ID NO: 7930 - protein, 7 aa, synthetic construct
RGDLAKN

SEQ ID NO: 7931 - protein, 7 aa, synthetic construct
RGDLEHH

SEQ ID NO: 7932 - protein, 7 aa, synthetic construct
RGDLFGH

SEQ ID NO: 7933 - protein, 7 aa, synthetic construct
RGDLFVI

SEQ ID NO: 7934 - protein, 7 aa, synthetic construct
RGDLGKR

SEQ ID NO: 7935 - protein, 7 aa, synthetic construct
RGDLGQK

SEQ ID NO: 7936 - protein, 7 aa, synthetic construct
RGDLHRD

SEQ ID NO: 7937 - protein, 7 aa, synthetic construct
RGDLIVN

SEQ ID NO: 7938 - protein, 7 aa, synthetic construct
RGDASRH

SEQ ID NO: 7939 - protein, 7 aa, synthetic construct
RGDASTA

SEQ ID NO: 7940 - protein, 7 aa, synthetic construct
RGDLNHQ

SEQ ID NO: 7941 - protein, 7 aa, synthetic construct
RGDLNKI

SEQ ID NO: 7942 - protein, 7 aa, synthetic construct
RGDLNSN

SEQ ID NO: 7943 - protein, 7 aa, synthetic construct
RGDLRAQ

SEQ ID NO: 7944 - protein, 7 aa, synthetic construct
RGDLSFN

SEQ ID NO: 7945 - protein, 7 aa, synthetic construct
RGDLSFS

SEQ ID NO: 7946 - protein, 7 aa, synthetic construct
RGDLSSA

SEQ ID NO: 7947 - protein, 7 aa, synthetic construct
RGDLTGI

SEQ ID NO: 7948 - protein, 7 aa, synthetic construct
RGDLTKQ

SEQ ID NO: 7949 - protein, 7 aa, synthetic construct
RGDLTSV

SEQ ID NO: 7950 - protein, 7 aa, synthetic construct
RGDNAFR

SEQ ID NO: 7951 - protein, 7 aa, synthetic construct
RGDNAKL

SEQ ID NO: 7952 - protein, 7 aa, synthetic construct
RGDNINR

SEQ ID NO: 7953 - protein, 7 aa, synthetic construct
RGDNKGI

SEQ ID NO: 7954 - protein, 7 aa, synthetic construct
RGDNLKN

SEQ ID NO: 7955 - protein, 7 aa, synthetic construct
RGDNRVK

SEQ ID NO: 7956 - protein, 7 aa, synthetic construct
RGDNTKR

SEQ ID NO: 7957 - protein, 7 aa, synthetic construct
RGDNTQQ

SEQ ID NO: 7958 - protein, 7 aa, synthetic construct
RGDNVNV

SEQ ID NO: 7959 - protein, 7 aa, synthetic construct
RGDQKKV

SEQ ID NO: 7960 - protein, 7 aa, synthetic construct
RGDQNSQ

SEQ ID NO: 7961 - protein, 7 aa, synthetic construct
RGDQNTQ

SEQ ID NO: 7962 - protein, 7 aa, synthetic construct
RGDQQEH

SEQ ID NO: 7963 - protein, 7 aa, synthetic construct
RGDQRKE

SEQ ID NO: 7964 - protein, 7 aa, synthetic construct
RGDQRQS

SEQ ID NO: 7965 - protein, 7 aa, synthetic construct
RGDQSFR

SEQ ID NO: 7966 - protein, 7 aa, synthetic construct
RGDQSRF

SEQ ID NO: 7967 - protein, 7 aa, synthetic construct
RGDQTRT

SEQ ID NO: 7968 - protein, 7 aa, synthetic construct
RGDQVHV

SEQ ID NO: 7969 - protein, 7 aa, synthetic construct
RGDRAGH

SEQ ID NO: 7970 - protein, 7 aa, synthetic construct
RGDRALQ

SEQ ID NO: 7971 - protein, 7 aa, synthetic construct
RGDRDVN

SEQ ID NO: 7972 - protein, 7 aa, synthetic construct
RGDRFGF

SEQ ID NO: 7973 - protein, 7 aa, synthetic construct
RGDRFTT

SEQ ID NO: 7974 - protein, 7 aa, synthetic construct
RGDRHHG

SEQ ID NO: 7975 - protein, 7 aa, synthetic construct
RGDRHNR

SEQ ID NO: 7976 - protein, 7 aa, synthetic construct
RGDRIDR

SEQ ID NO: 7977 - protein, 7 aa, synthetic construct
RGDRKGF

SEQ ID NO: 7978 - protein, 7 aa, synthetic construct
RGDRKLT

SEQ ID NO: 7979 - protein, 7 aa, synthetic construct
RGDRLDQ

SEQ ID NO: 7980 - protein, 7 aa, synthetic construct
RGDRLEF

SEQ ID NO: 7981 - protein, 7 aa, synthetic construct
RGDRQQQ

SEQ ID NO: 7982 - protein, 7 aa, synthetic construct
RGDRQVV

SEQ ID NO: 7983 - protein, 7 aa, synthetic construct
RGDRRFI

SEQ ID NO: 7984 - protein, 7 aa, synthetic construct
RGDRRHL

SEQ ID NO: 7985 - protein, 7 aa, synthetic construct
RGDRRIG

SEQ ID NO: 7986 - protein, 7 aa, synthetic construct
RGDRRKH

SEQ ID NO: 7987 - protein, 7 aa, synthetic construct
RGDRRTV

SEQ ID NO: 7988 - protein, 7 aa, synthetic construct
RGDRSLN

SEQ ID NO: 7989 - protein, 7 aa, synthetic construct
RGDRSRV

SEQ ID NO: 7990 - protein, 7 aa, synthetic construct
RGDRTNV

SEQ ID NO: 7991 - protein, 7 aa, synthetic construct
RGDRTSQ

SEQ ID NO: 7992 - protein, 7 aa, synthetic construct
RGDRTVI

SEQ ID NO: 7993 - protein, 7 aa, synthetic construct
RGDRVAH

SEQ ID NO: 7994 - protein, 7 aa, synthetic construct
RGDSARN

SEQ ID NO: 7995 - protein, 7 aa, synthetic construct
RGDSDRV

SEQ ID NO: 7996 - protein, 7 aa, synthetic construct
RGDSEGD

SEQ ID NO: 7997 - protein, 7 aa, synthetic construct
RGDSGGH

SEQ ID NO: 7998 - protein, 7 aa, synthetic construct
RGDSGGR

SEQ ID NO: 7999 - protein, 7 aa, synthetic construct
RGDSKLI

SEQ ID NO: 8000 - protein, 7 aa, synthetic construct
RGDSKTT

SEQ ID NO: 8001 - protein, 7 aa, synthetic construct
RGDDFRT

SEQ ID NO: 8002 - protein, 7 aa, synthetic construct
RGDSLAV

SEQ ID NO: 8003 - protein, 7 aa, synthetic construct
RGDSQER

SEQ ID NO: 8004 - protein, 7 aa, synthetic construct
RGDSQKR

SEQ ID NO: 8005 - protein, 7 aa, synthetic construct
RGDSSAN

SEQ ID NO: 8006 - protein, 7 aa, synthetic construct
RGDSSGR

SEQ ID NO: 8007 - protein, 7 aa, synthetic construct
RGDSSRV

SEQ ID NO: 8008 - protein, 7 aa, synthetic construct
RGDSSVQ

SEQ ID NO: 8009 - protein, 7 aa, synthetic construct
RGDSTGG

SEQ ID NO: 8010 - protein, 7 aa, synthetic construct
RGDSVVQ

SEQ ID NO: 8011 - protein, 7 aa, synthetic construct
RGDTALL

SEQ ID NO: 8012 - protein, 7 aa, synthetic construct
RGDTEKL

SEQ ID NO: 8013 - protein, 7 aa, synthetic construct
RGDTGFF

SEQ ID NO: 8014 - protein, 7 aa, synthetic construct
RGDTKQQ

SEQ ID NO: 8015 - protein, 7 aa, synthetic construct
RGDTKQT

SEQ ID NO: 8016 - protein, 7 aa, synthetic construct
RGDTKSR

SEQ ID NO: 8017 - protein, 7 aa, synthetic construct
RGDDHKA

SEQ ID NO: 8018 - protein, 7 aa, synthetic construct
RGDTRVF

SEQ ID NO: 8019 - protein, 7 aa, synthetic construct
RGDTSAV

SEQ ID NO: 8020 - protein, 7 aa, synthetic construct
RGDTSSL

SEQ ID NO: 8021 - protein, 7 aa, synthetic construct
RGDTVVR

SEQ ID NO: 8022 - protein, 7 aa, synthetic construct
RGDVDSK

SEQ ID NO: 8023 - protein, 7 aa, synthetic construct
RGDVHAH

SEQ ID NO: 8024 - protein, 7 aa, synthetic construct
RGDVHHT

SEQ ID NO: 8025 - protein, 7 aa, synthetic construct
RGDVHRT

SEQ ID NO: 8026 - protein, 7 aa, synthetic construct
RGDVHTV

SEQ ID NO: 8027 - protein, 7 aa, synthetic construct
RGDVKSH

SEQ ID NO: 8028 - protein, 7 aa, synthetic construct
RGDVLKF

SEQ ID NO: 8029 - protein, 7 aa, synthetic construct
RGDVNKA

SEQ ID NO: 8030 - protein, 7 aa, synthetic construct
RGDVQNK

SEQ ID NO: 8031 - protein, 7 aa, synthetic construct
RGDVQSL

SEQ ID NO: 8032 - protein, 7 aa, synthetic construct
RGDVRRG

SEQ ID NO: 8033 - protein, 7 aa, synthetic construct
RGDVRSN

SEQ ID NO: 8034 - protein, 7 aa, synthetic construct
RGDVSVD

SEQ ID NO: 8035 - protein, 7 aa, synthetic construct
RGDVTHE

SEQ ID NO: 8036 - protein, 7 aa, synthetic construct
RGDVVVI

SEQ ID NO: 8037 - protein, 7 aa, synthetic construct
RGDDSTI

SEQ ID NO: 8038 - protein, 7 aa, synthetic construct
RGDDVNL

SEQ ID NO: 8039 - protein, 7 aa, synthetic construct
RGDDVSF

SEQ ID NO: 8040 - protein, 7 aa, synthetic construct
RGDEGSI

SEQ ID NO: 8041 - protein, 7 aa, synthetic construct
RGDAFKV

SEQ ID NO: 8042 - protein, 7 aa, synthetic construct
RGDEHRK

SEQ ID NO: 8043 - protein, 7 aa, synthetic construct
RGDELFK

SEQ ID NO: 8044 - protein, 7 aa, synthetic construct
RGDERNG

SEQ ID NO: 8045 - protein, 7 aa, synthetic construct
RGDAGKN

SEQ ID NO: 8046 - protein, 7 aa, synthetic construct
RGDFDDI

SEQ ID NO: 8047 - protein, 7 aa, synthetic construct
RGDAGNH

SEQ ID NO: 8048 - protein, 7 aa, synthetic construct
RGDFFKQ

SEQ ID NO: 8049 - protein, 7 aa, synthetic construct
RGDFGRV

SEQ ID NO: 8050 - protein, 7 aa, synthetic construct
RGDFHAV

SEQ ID NO: 8051 - protein, 7 aa, synthetic construct
RGDFITH

SEQ ID NO: 8052 - protein, 7 aa, synthetic construct
RGDFITR

SEQ ID NO: 8053 - protein, 7 aa, synthetic construct
RGDFKDQ

SEQ ID NO: 8054 - protein, 7 aa, synthetic construct
RGDFKEL

SEQ ID NO: 8055 - protein, 7 aa, synthetic construct
RGDFKKF

SEQ ID NO: 8056 - protein, 7 aa, synthetic construct
RGDFKKS

SEQ ID NO: 8057 - protein, 7 aa, synthetic construct
RGDFKTH

SEQ ID NO: 8058 - protein, 7 aa, synthetic construct
RGDFLFK

SEQ ID NO: 8059 - protein, 7 aa, synthetic construct
RGDFLKS

SEQ ID NO: 8060 - protein, 7 aa, synthetic construct
RGDFLQV

SEQ ID NO: 8061 - protein, 7 aa, synthetic construct
RGDFNSS

SEQ ID NO: 8062 - protein, 7 aa, synthetic construct
RGDFQKI

SEQ ID NO: 8063 - protein, 7 aa, synthetic construct
RGDFRGS

SEQ ID NO: 8064 - protein, 7 aa, synthetic construct
RGDFRRH

SEQ ID NO: 8065 - protein, 7 aa, synthetic construct
RGDFSHR

SEQ ID NO: 8066 - protein, 7 aa, synthetic construct
RGDFVGI

SEQ ID NO: 8067 - protein, 7 aa, synthetic construct
RGDGARI

SEQ ID NO: 8068 - protein, 7 aa, synthetic construct
RGDGDRI

SEQ ID NO: 8069 - protein, 7 aa, synthetic construct
RGDGGSI

SEQ ID NO: 8070 - protein, 7 aa, synthetic construct
RGDGHAQ

SEQ ID NO: 8071 - protein, 7 aa, synthetic construct
RGDGHHL

SEQ ID NO: 8072 - protein, 7 aa, synthetic construct
RGDGHQV

SEQ ID NO: 8073 - protein, 7 aa, synthetic construct
RGDGKEF

SEQ ID NO: 8074 - protein, 7 aa, synthetic construct
RGDGLKQ

SEQ ID NO: 8075 - protein, 7 aa, synthetic construct
RGDGNFQ

SEQ ID NO: 8076 - protein, 7 aa, synthetic construct
RGDGQHN

SEQ ID NO: 8077 - protein, 7 aa, synthetic construct
RGDGRQN

SEQ ID NO: 8078 - protein, 7 aa, synthetic construct
RGDHAFL

SEQ ID NO: 8079 - protein, 7 aa, synthetic construct
RGDHDFK

SEQ ID NO: 8080 - protein, 7 aa, synthetic construct
RGDAKTS

SEQ ID NO: 8081 - protein, 7 aa, synthetic construct
RGDHGIK

SEQ ID NO: 8082 - protein, 7 aa, synthetic construct
RGDHHKE

SEQ ID NO: 8083 - protein, 7 aa, synthetic construct
RGDHHNI

SEQ ID NO: 8084 - protein, 7 aa, synthetic construct
RGDHLNV

SEQ ID NO: 8085 - protein, 7 aa, synthetic construct
RGDHNAH

SEQ ID NO: 8086 - protein, 7 aa, synthetic construct
RGDHNSK

SEQ ID NO: 8087 - protein, 7 aa, synthetic construct
RGDHRFL

SEQ ID NO: 8088 - protein, 7 aa, synthetic construct
RGDHSRT

SEQ ID NO: 8089 - protein, 7 aa, synthetic construct
RGDHTHL

SEQ ID NO: 8090 - protein, 7 aa, synthetic construct
RGDIAKI

SEQ ID NO: 8091 - protein, 7 aa, synthetic construct
RGDIANS

SEQ ID NO: 8092 - protein, 7 aa, synthetic construct
RGDIAQN

SEQ ID NO: 8093 - protein, 7 aa, synthetic construct
RGDIGIN

SEQ ID NO: 8094 - protein, 7 aa, synthetic construct
RGDIKAN

SEQ ID NO: 8095 - protein, 7 aa, synthetic construct
RGDIKGQ

SEQ ID NO: 8096 - protein, 7 aa, synthetic construct
RGDILGN

SEQ ID NO: 8097 - protein, 7 aa, synthetic construct
RGDIQNL

SEQ ID NO: 8098 - protein, 7 aa, synthetic construct
RGDIRVQ

SEQ ID NO: 8099 - protein, 7 aa, synthetic construct
RGDKEQV

SEQ ID NO: 8100 - protein, 7 aa, synthetic construct
RGDKFHT

SEQ ID NO: 8101 - protein, 7 aa, synthetic construct
RGDKFVK

SEQ ID NO: 8102 - protein, 7 aa, synthetic construct
RGDKGET

SEQ ID NO: 8103 - protein, 7 aa, synthetic construct
RGDAREH

SEQ ID NO: 8104 - protein, 7 aa, synthetic construct
RGDKKII

SEQ ID NO: 8105 - protein, 7 aa, synthetic construct
RGDKKIN

SEQ ID NO: 8106 - protein, 7 aa, synthetic construct
RGDKKKA

SEQ ID NO: 8107 - protein, 7 aa, synthetic construct
RGDKKRE

SEQ ID NO: 8108 - protein, 7 aa, synthetic construct
RGDKLFS

SEQ ID NO: 8109 - protein, 7 aa, synthetic construct
RGDKLSL

SEQ ID NO: 8110 - protein, 7 aa, synthetic construct
RGDKLTN

SEQ ID NO: 8111 - protein, 7 aa, synthetic construct
RGDKNGF

SEQ ID NO: 8112 - protein, 7 aa, synthetic construct
RGDKNKT

SEQ ID NO: 8113 - protein, 7 aa, synthetic construct
RGDKQGF

SEQ ID NO: 8114 - protein, 7 aa, synthetic construct
RGDKSHK

SEQ ID NO: 8115 - protein, 7 aa, synthetic construct
RGDKSRA

SEQ ID NO: 8116 - protein, 7 aa, synthetic construct
RGDKTAI

SEQ ID NO: 8117 - protein, 7 aa, synthetic construct
RGDKTHF

SEQ ID NO: 8118 - protein, 7 aa, synthetic construct
RGDKTST

SEQ ID NO: 8119 - protein, 7 aa, synthetic construct
RGDKTTH

SEQ ID NO: 8120 - protein, 7 aa, synthetic construct
RGDKTTV

SEQ ID NO: 8121 - protein, 7 aa, synthetic construct
RGDKVQN

SEQ ID NO: 8122 - protein, 7 aa, synthetic construct
RGDLEDL

SEQ ID NO: 8123 - protein, 7 aa, synthetic construct
RGDASHT

SEQ ID NO: 8124 - protein, 7 aa, synthetic construct
RGDLGQD

SEQ ID NO: 8125 - protein, 7 aa, synthetic construct
RGDLIGI

SEQ ID NO: 8126 - protein, 7 aa, synthetic construct
RGDLKDN

SEQ ID NO: 8127 - protein, 7 aa, synthetic construct
RGDLKTA

SEQ ID NO: 8128 - protein, 7 aa, synthetic construct
RGDLLFT

SEQ ID NO: 8129 - protein, 7 aa, synthetic construct
RGDLLLT

SEQ ID NO: 8130 - protein, 7 aa, synthetic construct
RGDLQNH

SEQ ID NO: 8131 - protein, 7 aa, synthetic construct
RGDLREV

SEQ ID NO: 8132 - protein, 7 aa, synthetic construct
RGDLSGD

SEQ ID NO: 8133 - protein, 7 aa, synthetic construct
RGDLSTK

SEQ ID NO: 8134 - protein, 7 aa, synthetic construct
RGDLTNV

SEQ ID NO: 8135 - protein, 7 aa, synthetic construct
RGDLVFF

SEQ ID NO: 8136 - protein, 7 aa, synthetic construct
RGDNANS

SEQ ID NO: 8137 - protein, 7 aa, synthetic construct
RGDNDHT

SEQ ID NO: 8138 - protein, 7 aa, synthetic construct
RGDNESH

SEQ ID NO: 8139 - protein, 7 aa, synthetic construct
RGDNETT

SEQ ID NO: 8140 - protein, 7 aa, synthetic construct
RGDATTK

SEQ ID NO: 8141 - protein, 7 aa, synthetic construct
RGDNKQV

SEQ ID NO: 8142 - protein, 7 aa, synthetic construct
RGDNLGK

SEQ ID NO: 8143 - protein, 7 aa, synthetic construct
RGDNRFS

SEQ ID NO: 8144 - protein, 7 aa, synthetic construct
RGDAVNR

SEQ ID NO: 8145 - protein, 7 aa, synthetic construct
RGDNSDA

SEQ ID NO: 8146 - protein, 7 aa, synthetic construct
RGDNVVF

SEQ ID NO: 8147 - protein, 7 aa, synthetic construct
RGDNVVH

SEQ ID NO: 8148 - protein, 7 aa, synthetic construct
RGDQEAK

SEQ ID NO: 8149 - protein, 7 aa, synthetic construct
RGDQFQI

SEQ ID NO: 8150 - protein, 7 aa, synthetic construct
RGDQGDI

SEQ ID NO: 8151 - protein, 7 aa, synthetic construct
RGDQGQL

SEQ ID NO: 8152 - protein, 7 aa, synthetic construct
RGDQHTF

SEQ ID NO: 8153 - protein, 7 aa, synthetic construct
RGDQIKA

SEQ ID NO: 8154 - protein, 7 aa, synthetic construct
RGDQKRI

SEQ ID NO: 8155 - protein, 7 aa, synthetic construct
RGDQLGS

SEQ ID NO: 8156 - protein, 7 aa, synthetic construct
RGDQRFH

SEQ ID NO: 8157 - protein, 7 aa, synthetic construct
RGDQRGN

SEQ ID NO: 8158 - protein, 7 aa, synthetic construct
RGDQRTK

SEQ ID NO: 8159 - protein, 7 aa, synthetic construct
RGDQSGN

SEQ ID NO: 8160 - protein, 7 aa, synthetic construct
RGDQSGV

SEQ ID NO: 8161 - protein, 7 aa, synthetic construct
RGDQSRR

SEQ ID NO: 8162 - protein, 7 aa, synthetic construct
RGDQVFN

SEQ ID NO: 8163 - protein, 7 aa, synthetic construct
RGDRDIV

SEQ ID NO: 8164 - protein, 7 aa, synthetic construct
RGDRDTL

SEQ ID NO: 8165 - protein, 7 aa, synthetic construct
RGDRGEQ

SEQ ID NO: 8166 - protein, 7 aa, synthetic construct
RGDRGKD

SEQ ID NO: 8167 - protein, 7 aa, synthetic construct
RGDRGSL

SEQ ID NO: 8168 - protein, 7 aa, synthetic construct
RGDRHEL

SEQ ID NO: 8169 - protein, 7 aa, synthetic construct
RGDRIIF

SEQ ID NO: 8170 - protein, 7 aa, synthetic construct
RGDRKES

SEQ ID NO: 8171 - protein, 7 aa, synthetic construct
RGDRKHN

SEQ ID NO: 8172 - protein, 7 aa, synthetic construct
RGDRNNS

SEQ ID NO: 8173 - protein, 7 aa, synthetic construct
RGDRNTG

SEQ ID NO: 8174 - protein, 7 aa, synthetic construct
RGDRREH

SEQ ID NO: 8175 - protein, 7 aa, synthetic construct
RGDRRTQ

SEQ ID NO: 8176 - protein, 7 aa, synthetic construct
RGDRSDT

SEQ ID NO: 8177 - protein, 7 aa, synthetic construct
RGDRVAL

SEQ ID NO: 8178 - protein, 7 aa, synthetic construct
RGDRVKI

SEQ ID NO: 8179 - protein, 7 aa, synthetic construct
RGDSATI

SEQ ID NO: 8180 - protein, 7 aa, synthetic construct
RGDSHTQ

SEQ ID NO: 8181 - protein, 7 aa, synthetic construct
RGDSHTV

SEQ ID NO: 8182 - protein, 7 aa, synthetic construct
RGDSIVI

SEQ ID NO: 8183 - protein, 7 aa, synthetic construct
RGDSKDR

SEQ ID NO: 8184 - protein, 7 aa, synthetic construct
RGDSKES

SEQ ID NO: 8185 - protein, 7 aa, synthetic construct
RGDSKTE

SEQ ID NO: 8186 - protein, 7 aa, synthetic construct
RGDSKVV

SEQ ID NO: 8187 - protein, 7 aa, synthetic construct
RGDSLTH

SEQ ID NO: 8188 - protein, 7 aa, synthetic construct
RGDSQIH

SEQ ID NO: 8189 - protein, 7 aa, synthetic construct
RGDSRKQ

SEQ ID NO: 8190 - protein, 7 aa, synthetic construct
RGDSRQF

SEQ ID NO: 8191 - protein, 7 aa, synthetic construct
RGDSSKK

SEQ ID NO: 8192 - protein, 7 aa, synthetic construct
RGDSSKS

SEQ ID NO: 8193 - protein, 7 aa, synthetic construct
RGDSSRT

SEQ ID NO: 8194 - protein, 7 aa, synthetic construct
RGDSVFV

SEQ ID NO: 8195 - protein, 7 aa, synthetic construct
RGDSVGR

SEQ ID NO: 8196 - protein, 7 aa, synthetic construct
RGDTENQ

SEQ ID NO: 8197 - protein, 7 aa, synthetic construct
RGDDGVK

SEQ ID NO: 8198 - protein, 7 aa, synthetic construct
RGDTKGT

SEQ ID NO: 8199 - protein, 7 aa, synthetic construct
RGDTKLH

SEQ ID NO: 8200 - protein, 7 aa, synthetic construct
RGDTQKR

SEQ ID NO: 8201 - protein, 7 aa, synthetic construct
RGDTRHT

SEQ ID NO: 8202 - protein, 7 aa, synthetic construct
RGDVDRK

SEQ ID NO: 8203 - protein, 7 aa, synthetic construct
RGDVENK

SEQ ID NO: 8204 - protein, 7 aa, synthetic construct
RGDVFTL

SEQ ID NO: 8205 - protein, 7 aa, synthetic construct
RGDVGAK

SEQ ID NO: 8206 - protein, 7 aa, synthetic construct
RGDVHVF

SEQ ID NO: 8207 - protein, 7 aa, synthetic construct
RGDVKHV

SEQ ID NO: 8208 - protein, 7 aa, synthetic construct
RGDVKQD

SEQ ID NO: 8209 - protein, 7 aa, synthetic construct
RGDVLVS

SEQ ID NO: 8210 - protein, 7 aa, synthetic construct
RGDVQFN

SEQ ID NO: 8211 - protein, 7 aa, synthetic construct
RGDVQLT

SEQ ID NO: 8212 - protein, 7 aa, synthetic construct
RGDVRDS

SEQ ID NO: 8213 - protein, 7 aa, synthetic construct
RGDVRIE

SEQ ID NO: 8214 - protein, 7 aa, synthetic construct
RGDVSFK

SEQ ID NO: 8215 - protein, 7 aa, synthetic construct
RGDAEIQ

SEQ ID NO: 8216 - protein, 7 aa, synthetic construct
RGDDNNN

SEQ ID NO: 8217 - protein, 7 aa, synthetic construct
RGDAEKS

SEQ ID NO: 8218 - protein, 7 aa, synthetic construct
RGDEGIV

SEQ ID NO: 8219 - protein, 7 aa, synthetic construct
RGDEHHI

SEQ ID NO: 8220 - protein, 7 aa, synthetic construct
RGDEKNH

SEQ ID NO: 8221 - protein, 7 aa, synthetic construct
RGDELGQ

SEQ ID NO: 8222 - protein, 7 aa, synthetic construct
RGDERGN

SEQ ID NO: 8223 - protein, 7 aa, synthetic construct
RGDAGHI

SEQ ID NO: 8224 - protein, 7 aa, synthetic construct
RGDFEVH

SEQ ID NO: 8225 - protein, 7 aa, synthetic construct
RGDFFSR

SEQ ID NO: 8226 - protein, 7 aa, synthetic construct
RGDFGGL

SEQ ID NO: 8227 - protein, 7 aa, synthetic construct
RGDFGNS

SEQ ID NO: 8228 - protein, 7 aa, synthetic construct
RGDFKQK

SEQ ID NO: 8229 - protein, 7 aa, synthetic construct
RGDFLQT

SEQ ID NO: 8230 - protein, 7 aa, synthetic construct
RGDFNRK

SEQ ID NO: 8231 - protein, 7 aa, synthetic construct
RGDAHKE

SEQ ID NO: 8232 - protein, 7 aa, synthetic construct
RGDFQNH

SEQ ID NO: 8233 - protein, 7 aa, synthetic construct
RGDFQRT

SEQ ID NO: 8234 - protein, 7 aa, synthetic construct
RGDFQSK

SEQ ID NO: 8235 - protein, 7 aa, synthetic construct
RGDFRQS

SEQ ID NO: 8236 - protein, 7 aa, synthetic construct
RGDFRSE

SEQ ID NO: 8237 - protein, 7 aa, synthetic construct
RGDFSEK

SEQ ID NO: 8238 - protein, 7 aa, synthetic construct
RGDFSLQ

SEQ ID NO: 8239 - protein, 7 aa, synthetic construct
RGDFSTQ

SEQ ID NO: 8240 - protein, 7 aa, synthetic construct
RGDFTQN

SEQ ID NO: 8241 - protein, 7 aa, synthetic construct
RGDFVEL

SEQ ID NO: 8242 - protein, 7 aa, synthetic construct
RGDFVFT

SEQ ID NO: 8243 - protein, 7 aa, synthetic construct
RGDFVHQ

SEQ ID NO: 8244 - protein, 7 aa, synthetic construct
RGDFVQL

SEQ ID NO: 8245 - protein, 7 aa, synthetic construct
RGDGERV

SEQ ID NO: 8246 - protein, 7 aa, synthetic construct
RGDGGSR

SEQ ID NO: 8247 - protein, 7 aa, synthetic construct
RGDGHGK

SEQ ID NO: 8248 - protein, 7 aa, synthetic construct
RGDGHGR

SEQ ID NO: 8249 - protein, 7 aa, synthetic construct
RGDGIHV

SEQ ID NO: 8250 - protein, 7 aa, synthetic construct
RGDGKHL

SEQ ID NO: 8251 - protein, 7 aa, synthetic construct
RGDGKKG

SEQ ID NO: 8252 - protein, 7 aa, synthetic construct
RGDGKNI

SEQ ID NO: 8253 - protein, 7 aa, synthetic construct
RGDGQNL

SEQ ID NO: 8254 - protein, 7 aa, synthetic construct
RGDGRIF

SEQ ID NO: 8255 - protein, 7 aa, synthetic construct
RGDGSQQ

SEQ ID NO: 8256 - protein, 7 aa, synthetic construct
RGDGTNV

SEQ ID NO: 8257 - protein, 7 aa, synthetic construct
RGDHASF

SEQ ID NO: 8258 - protein, 7 aa, synthetic construct
RGDAARH

SEQ ID NO: 8259 - protein, 7 aa, synthetic construct
RGDHEGK

SEQ ID NO: 8260 - protein, 7 aa, synthetic construct
RGDHGKT

SEQ ID NO: 8261 - protein, 7 aa, synthetic construct
RGDHKSQ

SEQ ID NO: 8262 - protein, 7 aa, synthetic construct
RGDHLFL

SEQ ID NO: 8263 - protein, 7 aa, synthetic construct
RGDHLQV

SEQ ID NO: 8264 - protein, 7 aa, synthetic construct
RGDHSTL

SEQ ID NO: 8265 - protein, 7 aa, synthetic construct
RGDHTKK

SEQ ID NO: 8266 - protein, 7 aa, synthetic construct
RGDHVQT

SEQ ID NO: 8267 - protein, 7 aa, synthetic construct
RGDIHKD

SEQ ID NO: 8268 - protein, 7 aa, synthetic construct
RGDIIHI

SEQ ID NO: 8269 - protein, 7 aa, synthetic construct
RGDIKHN

SEQ ID NO: 8270 - protein, 7 aa, synthetic construct
RGDANRH

SEQ ID NO: 8271 - protein, 7 aa, synthetic construct
RGDIKND

SEQ ID NO: 8272 - protein, 7 aa, synthetic construct
RGDANRT

SEQ ID NO: 8273 - protein, 7 aa, synthetic construct
RGDINRN

SEQ ID NO: 8274 - protein, 7 aa, synthetic construct
RGDIQTS

SEQ ID NO: 8275 - protein, 7 aa, synthetic construct
RGDITAH

SEQ ID NO: 8276 - protein, 7 aa, synthetic construct
RGDKAGN

SEQ ID NO: 8277 - protein, 7 aa, synthetic construct
RGDADAR

SEQ ID NO: 8278 - protein, 7 aa, synthetic construct
RGDKASN

SEQ ID NO: 8279 - protein, 7 aa, synthetic construct
RGDKDKI

SEQ ID NO: 8280 - protein, 7 aa, synthetic construct
RGDAQRH

SEQ ID NO: 8281 - protein, 7 aa, synthetic construct
RGDKGTF

SEQ ID NO: 8282 - protein, 7 aa, synthetic construct
RGDKHFV

SEQ ID NO: 8283 - protein, 7 aa, synthetic construct
RGDKHGR

SEQ ID NO: 8284 - protein, 7 aa, synthetic construct
RGDARFD

SEQ ID NO: 8285 - protein, 7 aa, synthetic construct
RGDKKIS

SEQ ID NO: 8286 - protein, 7 aa, synthetic construct
RGDKLSH

SEQ ID NO: 8287 - protein, 7 aa, synthetic construct
RGDKNVQ

SEQ ID NO: 8288 - protein, 7 aa, synthetic construct
RGDKRII

SEQ ID NO: 8289 - protein, 7 aa, synthetic construct
RGDKRNV

SEQ ID NO: 8290 - protein, 7 aa, synthetic construct
RGDKRRK

SEQ ID NO: 8291 - protein, 7 aa, synthetic construct
RGDKSHT

SEQ ID NO: 8292 - protein, 7 aa, synthetic construct
RGDKSRF

SEQ ID NO: 8293 - protein, 7 aa, synthetic construct
RGDKTER

SEQ ID NO: 8294 - protein, 7 aa, synthetic construct
RGDLGAQ

SEQ ID NO: 8295 - protein, 7 aa, synthetic construct
RGDLHIK

SEQ ID NO: 8296 - protein, 7 aa, synthetic construct
RGDLINF

SEQ ID NO: 8297 - protein, 7 aa, synthetic construct
RGDLKSA

SEQ ID NO: 8298 - protein, 7 aa, synthetic construct
RGDLKTH

SEQ ID NO: 8299 - protein, 7 aa, synthetic construct
RGDLLHQ

SEQ ID NO: 8300 - protein, 7 aa, synthetic construct
RGDLSET

SEQ ID NO: 8301 - protein, 7 aa, synthetic construct
RGDLVTH

SEQ ID NO: 8302 - protein, 7 aa, synthetic construct
RGDNFTI

SEQ ID NO: 8303 - protein, 7 aa, synthetic construct
RGDNHHG

SEQ ID NO: 8304 - protein, 7 aa, synthetic construct
RGDNHQH

SEQ ID NO: 8305 - protein, 7 aa, synthetic construct
RGDNHSV

SEQ ID NO: 8306 - protein, 7 aa, synthetic construct
RGDNIRK

SEQ ID NO: 8307 - protein, 7 aa, synthetic construct
RGDNITL

SEQ ID NO: 8308 - protein, 7 aa, synthetic construct
RGDNKES

SEQ ID NO: 8309 - protein, 7 aa, synthetic construct
RGDNKHQ

SEQ ID NO: 8310 - protein, 7 aa, synthetic construct
RGDNLHL

SEQ ID NO: 8311 - protein, 7 aa, synthetic construct
RGDNNQK

SEQ ID NO: 8312 - protein, 7 aa, synthetic construct
RGDNQQF

SEQ ID NO: 8313 - protein, 7 aa, synthetic construct
RGDNQQQ

SEQ ID NO: 8314 - protein, 7 aa, synthetic construct
RGDNSQN

SEQ ID NO: 8315 - protein, 7 aa, synthetic construct
RGDNTFI

SEQ ID NO: 8316 - protein, 7 aa, synthetic construct
RGDAVTK

SEQ ID NO: 8317 - protein, 7 aa, synthetic construct
RGDAVTR

SEQ ID NO: 8318 - protein, 7 aa, synthetic construct
RGDQARR

SEQ ID NO: 8319 - protein, 7 aa, synthetic construct
RGDQDFK

SEQ ID NO: 8320 - protein, 7 aa, synthetic construct
RGDQENK

SEQ ID NO: 8321 - protein, 7 aa, synthetic construct
RGDQGAV

SEQ ID NO: 8322 - protein, 7 aa, synthetic construct
RGDQGFF

SEQ ID NO: 8323 - protein, 7 aa, synthetic construct
RGDQGGV

SEQ ID NO: 8324 - protein, 7 aa, synthetic construct
RGDQGLV

SEQ ID NO: 8325 - protein, 7 aa, synthetic construct
RGDQGRL

SEQ ID NO: 8326 - protein, 7 aa, synthetic construct
RGDQHFA

SEQ ID NO: 8327 - protein, 7 aa, synthetic construct
RGDQHFT

SEQ ID NO: 8328 - protein, 7 aa, synthetic construct
RGDQHRN

SEQ ID NO: 8329 - protein, 7 aa, synthetic construct
RGDQKRK

SEQ ID NO: 8330 - protein, 7 aa, synthetic construct
RGDQLND

SEQ ID NO: 8331 - protein, 7 aa, synthetic construct
RGDQLQN

SEQ ID NO: 8332 - protein, 7 aa, synthetic construct
RGDQNQQ

SEQ ID NO: 8333 - protein, 7 aa, synthetic construct
RGDQQHI

SEQ ID NO: 8334 - protein, 7 aa, synthetic construct
RGDQRII

SEQ ID NO: 8335 - protein, 7 aa, synthetic construct
RGDQSNH

SEQ ID NO: 8336 - protein, 7 aa, synthetic construct
RGDQTFQ

SEQ ID NO: 8337 - protein, 7 aa, synthetic construct
RGDQVVQ

SEQ ID NO: 8338 - protein, 7 aa, synthetic construct
RGDRGDI

SEQ ID NO: 8339 - protein, 7 aa, synthetic construct
RGDRHFQ

SEQ ID NO: 8340 - protein, 7 aa, synthetic construct
RGDRHLK

SEQ ID NO: 8341 - protein, 7 aa, synthetic construct
RGDRHSQ

SEQ ID NO: 8342 - protein, 7 aa, synthetic construct
RGDRIEV

SEQ ID NO: 8343 - protein, 7 aa, synthetic construct
RGDRKDS

SEQ ID NO: 8344 - protein, 7 aa, synthetic construct
RGDRKVH

SEQ ID NO: 8345 - protein, 7 aa, synthetic construct
RGDRLFT

SEQ ID NO: 8346 - protein, 7 aa, synthetic construct
RGDRQFD

SEQ ID NO: 8347 - protein, 7 aa, synthetic construct
RGDRQSS

SEQ ID NO: 8348 - protein, 7 aa, synthetic construct
RGDRRED

SEQ ID NO: 8349 - protein, 7 aa, synthetic construct
RGDRRHN

SEQ ID NO: 8350 - protein, 7 aa, synthetic construct
RGDRRHQ

SEQ ID NO: 8351 - protein, 7 aa, synthetic construct
RGDRRLD

SEQ ID NO: 8352 - protein, 7 aa, synthetic construct
RGDRSFH

SEQ ID NO: 8353 - protein, 7 aa, synthetic construct
RGDRTFS

SEQ ID NO: 8354 - protein, 7 aa, synthetic construct
RGDSDAG

SEQ ID NO: 8355 - protein, 7 aa, synthetic construct
RGDSGTV

SEQ ID NO: 8356 - protein, 7 aa, synthetic construct
RGDSIKA

SEQ ID NO: 8357 - protein, 7 aa, synthetic construct
RGDSISR

SEQ ID NO: 8358 - protein, 7 aa, synthetic construct
RGDSKKV

SEQ ID NO: 8359 - protein, 7 aa, synthetic construct
RGDSLKR

SEQ ID NO: 8360 - protein, 7 aa, synthetic construct
RGDSRRI

SEQ ID NO: 8361 - protein, 7 aa, synthetic construct
RGDSSVR

SEQ ID NO: 8362 - protein, 7 aa, synthetic construct
RGDSVLT

SEQ ID NO: 8363 - protein, 7 aa, synthetic construct
RGDTAGK

SEQ ID NO: 8364 - protein, 7 aa, synthetic construct
RGDTGFR

SEQ ID NO: 8365 - protein, 7 aa, synthetic construct
RGDTKEK

SEQ ID NO: 8366 - protein, 7 aa, synthetic construct
RGDTKQV

SEQ ID NO: 8367 - protein, 7 aa, synthetic construct
RGDTVFG

SEQ ID NO: 8368 - protein, 7 aa, synthetic construct
RGDVDAG

SEQ ID NO: 8369 - protein, 7 aa, synthetic construct
RGDVENG

SEQ ID NO: 8370 - protein, 7 aa, synthetic construct
RGDVIHL

SEQ ID NO: 8371 - protein, 7 aa, synthetic construct
RGDVNFQ

SEQ ID NO: 8372 - protein, 7 aa, synthetic construct
RGDVQHG

SEQ ID NO: 8373 - protein, 7 aa, synthetic construct
RGDVQNS

SEQ ID NO: 8374 - protein, 7 aa, synthetic construct
RGDVQTF

SEQ ID NO: 8375 - protein, 7 aa, synthetic construct
RGDVRFL

SEQ ID NO: 8376 - protein, 7 aa, synthetic construct
RGDVRTA

SEQ ID NO: 8377 - protein, 7 aa, synthetic construct
RGDVSIG

SEQ ID NO: 8378 - protein, 7 aa, synthetic construct
RGDVTHQ

SEQ ID NO: 8379 - protein, 7 aa, synthetic construct
RGDVVKF

SEQ ID NO: 8380 - protein, 7 aa, synthetic construct
RGDVVNQ

SEQ ID NO: 8381 - protein, 7 aa, synthetic construct
RGDDSAD

SEQ ID NO: 8382 - protein, 7 aa, synthetic construct
RGDEIHI

SEQ ID NO: 8383 - protein, 7 aa, synthetic construct
RGDEQFF

SEQ ID NO: 8384 - protein, 7 aa, synthetic construct
RGDETKH

SEQ ID NO: 8385 - protein, 7 aa, synthetic construct
RGDFAQR

SEQ ID NO: 8386 - protein, 7 aa, synthetic construct
RGDFETF

SEQ ID NO: 8387 - protein, 7 aa, synthetic construct
RGDFFIG

SEQ ID NO: 8388 - protein, 7 aa, synthetic construct
RGDFFTG

SEQ ID NO: 8389 - protein, 7 aa, synthetic construct
RGDFGFA

SEQ ID NO: 8390 - protein, 7 aa, synthetic construct
RGDFGHK

SEQ ID NO: 8391 - protein, 7 aa, synthetic construct
RGDFGKF

SEQ ID NO: 8392 - protein, 7 aa, synthetic construct
RGDAGVI

SEQ ID NO: 8393 - protein, 7 aa, synthetic construct
RGDFHAS

SEQ ID NO: 8394 - protein, 7 aa, synthetic construct
RGDFHTL

SEQ ID NO: 8395 - protein, 7 aa, synthetic construct
RGDFIDS

SEQ ID NO: 8396 - protein, 7 aa, synthetic construct
RGDFIFR

SEQ ID NO: 8397 - protein, 7 aa, synthetic construct
RGDFIKF

SEQ ID NO: 8398 - protein, 7 aa, synthetic construct
RGDFISQ

SEQ ID NO: 8399 - protein, 7 aa, synthetic construct
RGDFKAI

SEQ ID NO: 8400 - protein, 7 aa, synthetic construct
RGDFKGK

SEQ ID NO: 8401 - protein, 7 aa, synthetic construct
RGDFKTQ

SEQ ID NO: 8402 - protein, 7 aa, synthetic construct
RGDFLNF

SEQ ID NO: 8403 - protein, 7 aa, synthetic construct
RGDFLSN

SEQ ID NO: 8404 - protein, 7 aa, synthetic construct
RGDAHHT

SEQ ID NO: 8405 - protein, 7 aa, synthetic construct
RGDFNKH

SEQ ID NO: 8406 - protein, 7 aa, synthetic construct
RGDFQKL

SEQ ID NO: 8407 - protein, 7 aa, synthetic construct
RGDFQLF

SEQ ID NO: 8408 - protein, 7 aa, synthetic construct
RGDFRHH

SEQ ID NO: 8409 - protein, 7 aa, synthetic construct
RGDFRQH

SEQ ID NO: 8410 - protein, 7 aa, synthetic construct
RGDFSDN

SEQ ID NO: 8411 - protein, 7 aa, synthetic construct
RGDFTVQ

SEQ ID NO: 8412 - protein, 7 aa, synthetic construct
RGDFVNR

SEQ ID NO: 8413 - protein, 7 aa, synthetic construct
RGDFVQQ

SEQ ID NO: 8414 - protein, 7 aa, synthetic construct
RGDFVTE

SEQ ID NO: 8415 - protein, 7 aa, synthetic construct
RGDGDLN

SEQ ID NO: 8416 - protein, 7 aa, synthetic construct
RGDGDSV

SEQ ID NO: 8417 - protein, 7 aa, synthetic construct
RGDGETH

SEQ ID NO: 8418 - protein, 7 aa, synthetic construct
RGDGFFL

SEQ ID NO: 8419 - protein, 7 aa, synthetic construct
RGDGGQL

SEQ ID NO: 8420 - protein, 7 aa, synthetic construct
RGDGGST

SEQ ID NO: 8421 - protein, 7 aa, synthetic construct
RGDGGVN

SEQ ID NO: 8422 - protein, 7 aa, synthetic construct
RGDGGVV

SEQ ID NO: 8423 - protein, 7 aa, synthetic construct
RGDGHQE

SEQ ID NO: 8424 - protein, 7 aa, synthetic construct
RGDGHSA

SEQ ID NO: 8425 - protein, 7 aa, synthetic construct
RGDGIHS

SEQ ID NO: 8426 - protein, 7 aa, synthetic construct
RGDGKDL

SEQ ID NO: 8427 - protein, 7 aa, synthetic construct
RGDGKRI

SEQ ID NO: 8428 - protein, 7 aa, synthetic construct
RGDGKSS

SEQ ID NO: 8429 - protein, 7 aa, synthetic construct
RGDGKTI

SEQ ID NO: 8430 - protein, 7 aa, synthetic construct
RGDGQAQ

SEQ ID NO: 8431 - protein, 7 aa, synthetic construct
RGDGRGK

SEQ ID NO: 8432 - protein, 7 aa, synthetic construct
RGDGRNR

SEQ ID NO: 8433 - protein, 7 aa, synthetic construct
RGDGSRT

SEQ ID NO: 8434 - protein, 7 aa, synthetic construct
RGDGTAK

SEQ ID NO: 8435 - protein, 7 aa, synthetic construct
RGDGTGS

SEQ ID NO: 8436 - protein, 7 aa, synthetic construct
RGDGTKE

SEQ ID NO: 8437 - protein, 7 aa, synthetic construct
RGDGVHK

SEQ ID NO: 8438 - protein, 7 aa, synthetic construct
RGDHAAF

SEQ ID NO: 8439 - protein, 7 aa, synthetic construct
RGDHAKI

SEQ ID NO: 8440 - protein, 7 aa, synthetic construct
RGDHDQL

SEQ ID NO: 8441 - protein, 7 aa, synthetic construct
RGDHEAV

SEQ ID NO: 8442 - protein, 7 aa, synthetic construct
RGDHEKQ

SEQ ID NO: 8443 - protein, 7 aa, synthetic construct
RGDHESK

SEQ ID NO: 8444 - protein, 7 aa, synthetic construct
RGDAKVT

SEQ ID NO: 8445 - protein, 7 aa, synthetic construct
RGDHIQV

SEQ ID NO: 8446 - protein, 7 aa, synthetic construct
RGDHKHA

SEQ ID NO: 8447 - protein, 7 aa, synthetic construct
RGDHRGV

SEQ ID NO: 8448 - protein, 7 aa, synthetic construct
RGDHSIV

SEQ ID NO: 8449 - protein, 7 aa, synthetic construct
RGDHVNS

SEQ ID NO: 8450 - protein, 7 aa, synthetic construct
RGDIAIR

SEQ ID NO: 8451 - protein, 7 aa, synthetic construct
RGDIAKS

SEQ ID NO: 8452 - protein, 7 aa, synthetic construct
RGDANKH

SEQ ID NO: 8453 - protein, 7 aa, synthetic construct
RGDIHAH

SEQ ID NO: 8454 - protein, 7 aa, synthetic construct
RGDIHAR

SEQ ID NO: 8455 - protein, 7 aa, synthetic construct
RGDIHKL

SEQ ID NO: 8456 - protein, 7 aa, synthetic construct
RGDIHSV

SEQ ID NO: 8457 - protein, 7 aa, synthetic construct
RGDIINV

SEQ ID NO: 8458 - protein, 7 aa, synthetic construct
RGDILKL

SEQ ID NO: 8459 - protein, 7 aa, synthetic construct
RGDILNK

SEQ ID NO: 8460 - protein, 7 aa, synthetic construct
RGDINSR

SEQ ID NO: 8461 - protein, 7 aa, synthetic construct
RGDIQRT

SEQ ID NO: 8462 - protein, 7 aa, synthetic construct
RGDISDL

SEQ ID NO: 8463 - protein, 7 aa, synthetic construct
RGDISKS

SEQ ID NO: 8464 - protein, 7 aa, synthetic construct
RGDITHQ

SEQ ID NO: 8465 - protein, 7 aa, synthetic construct
RGDITNK

SEQ ID NO: 8466 - protein, 7 aa, synthetic construct
RGDITRK

SEQ ID NO: 8467 - protein, 7 aa, synthetic construct
RGDKAKL

SEQ ID NO: 8468 - protein, 7 aa, synthetic construct
RGDKEHL

SEQ ID NO: 8469 - protein, 7 aa, synthetic construct
RGDKFAH

SEQ ID NO: 8470 - protein, 7 aa, synthetic construct
RGDKFHR

SEQ ID NO: 8471 - protein, 7 aa, synthetic construct
RGDKHEI

SEQ ID NO: 8472 - protein, 7 aa, synthetic construct
RGDKHFK

SEQ ID NO: 8473 - protein, 7 aa, synthetic construct
RGDKHRL

SEQ ID NO: 8474 - protein, 7 aa, synthetic construct
RGDKIHV

SEQ ID NO: 8475 - protein, 7 aa, synthetic construct
RGDKIRQ

SEQ ID NO: 8476 - protein, 7 aa, synthetic construct
RGDKQHN

SEQ ID NO: 8477 - protein, 7 aa, synthetic construct
RGDKQKT

SEQ ID NO: 8478 - protein, 7 aa, synthetic construct
RGDKQQQ

SEQ ID NO: 8479 - protein, 7 aa, synthetic construct
RGDKRGV

SEQ ID NO: 8480 - protein, 7 aa, synthetic construct
RGDKRRL

SEQ ID NO: 8481 - protein, 7 aa, synthetic construct
RGDKSEN

SEQ ID NO: 8482 - protein, 7 aa, synthetic construct
RGDKSGK

SEQ ID NO: 8483 - protein, 7 aa, synthetic construct
RGDKVGF

SEQ ID NO: 8484 - protein, 7 aa, synthetic construct
RGDASAR

SEQ ID NO: 8485 - protein, 7 aa, synthetic construct
RGDLAVN

SEQ ID NO: 8486 - protein, 7 aa, synthetic construct
RGDLEQN

SEQ ID NO: 8487 - protein, 7 aa, synthetic construct
RGDLETI

SEQ ID NO: 8488 - protein, 7 aa, synthetic construct
RGDLFKT

SEQ ID NO: 8489 - protein, 7 aa, synthetic construct
RGDASIK

SEQ ID NO: 8490 - protein, 7 aa, synthetic construct
RGDLHDG

SEQ ID NO: 8491 - protein, 7 aa, synthetic construct
RGDLHDV

SEQ ID NO: 8492 - protein, 7 aa, synthetic construct
RGDLHSS

SEQ ID NO: 8493 - protein, 7 aa, synthetic construct
RGDLIHT

SEQ ID NO: 8494 - protein, 7 aa, synthetic construct
RGDLIVA

SEQ ID NO: 8495 - protein, 7 aa, synthetic construct
RGDLKII

SEQ ID NO: 8496 - protein, 7 aa, synthetic construct
RGDLLGK

SEQ ID NO: 8497 - protein, 7 aa, synthetic construct
RGDLQDV

SEQ ID NO: 8498 - protein, 7 aa, synthetic construct
RGDLQGH

SEQ ID NO: 8499 - protein, 7 aa, synthetic construct
RGDLQND

SEQ ID NO: 8500 - protein, 7 aa, synthetic construct
RGDLRKH

SEQ ID NO: 8501 - protein, 7 aa, synthetic construct
RGDLSDS

SEQ ID NO: 8502 - protein, 7 aa, synthetic construct
RGDATGF

SEQ ID NO: 8503 - protein, 7 aa, synthetic construct
RGDLTGS

SEQ ID NO: 8504 - protein, 7 aa, synthetic construct
RGDLVIK

SEQ ID NO: 8505 - protein, 7 aa, synthetic construct
RGDNALK

SEQ ID NO: 8506 - protein, 7 aa, synthetic construct
RGDATLT

SEQ ID NO: 8507 - protein, 7 aa, synthetic construct
RGDNGKH

SEQ ID NO: 8508 - protein, 7 aa, synthetic construct
RGDNLFL

SEQ ID NO: 8509 - protein, 7 aa, synthetic construct
RGDNLNV

SEQ ID NO: 8510 - protein, 7 aa, synthetic construct
RGDNNVV

SEQ ID NO: 8511 - protein, 7 aa, synthetic construct
RGDAVKK

SEQ ID NO: 8512 - protein, 7 aa, synthetic construct
RGDNQNR

SEQ ID NO: 8513 - protein, 7 aa, synthetic construct
RGDNQTI

SEQ ID NO: 8514 - protein, 7 aa, synthetic construct
RGDAVNT

SEQ ID NO: 8515 - protein, 7 aa, synthetic construct
RGDNSNQ

SEQ ID NO: 8516 - protein, 7 aa, synthetic construct
RGDNSQR

SEQ ID NO: 8517 - protein, 7 aa, synthetic construct
RGDNTQL

SEQ ID NO: 8518 - protein, 7 aa, synthetic construct
RGDNVKS

SEQ ID NO: 8519 - protein, 7 aa, synthetic construct
RGDQGIV

SEQ ID NO: 8520 - protein, 7 aa, synthetic construct
RGDQINQ

SEQ ID NO: 8521 - protein, 7 aa, synthetic construct
RGDQKEL

SEQ ID NO: 8522 - protein, 7 aa, synthetic construct
RGDQQNG

SEQ ID NO: 8523 - protein, 7 aa, synthetic construct
RGDQRES

SEQ ID NO: 8524 - protein, 7 aa, synthetic construct
RGDQRFK

SEQ ID NO: 8525 - protein, 7 aa, synthetic construct
RGDQRNK

SEQ ID NO: 8526 - protein, 7 aa, synthetic construct
RGDRDFG

SEQ ID NO: 8527 - protein, 7 aa, synthetic construct
RGDRDKN

SEQ ID NO: 8528 - protein, 7 aa, synthetic construct
RGDRDVR

SEQ ID NO: 8529 - protein, 7 aa, synthetic construct
RGDRFAV

SEQ ID NO: 8530 - protein, 7 aa, synthetic construct
RGDRFGH

SEQ ID NO: 8531 - protein, 7 aa, synthetic construct
RGDRFRH

SEQ ID NO: 8532 - protein, 7 aa, synthetic construct
RGDAAEK

SEQ ID NO: 8533 - protein, 7 aa, synthetic construct
RGDRHLL

SEQ ID NO: 8534 - protein, 7 aa, synthetic construct
RGDRIFL

SEQ ID NO: 8535 - protein, 7 aa, synthetic construct
RGDRKTV

SEQ ID NO: 8536 - protein, 7 aa, synthetic construct
RGDRNDA

SEQ ID NO: 8537 - protein, 7 aa, synthetic construct
RGDRQIN

SEQ ID NO: 8538 - protein, 7 aa, synthetic construct
RGDRSRT

SEQ ID NO: 8539 - protein, 7 aa, synthetic construct
RGDRTGD

SEQ ID NO: 8540 - protein, 7 aa, synthetic construct
RGDRVEQ

SEQ ID NO: 8541 - protein, 7 aa, synthetic construct
RGDRVKS

SEQ ID NO: 8542 - protein, 7 aa, synthetic construct
RGDRVST

SEQ ID NO: 8543 - protein, 7 aa, synthetic construct
RGDSFRF

SEQ ID NO: 8544 - protein, 7 aa, synthetic construct
RGDSFRV

SEQ ID NO: 8545 - protein, 7 aa, synthetic construct
RGDSHSF

SEQ ID NO: 8546 - protein, 7 aa, synthetic construct
RGDSIII

SEQ ID NO: 8547 - protein, 7 aa, synthetic construct
RGDDFRD

SEQ ID NO: 8548 - protein, 7 aa, synthetic construct
RGDSKSR

SEQ ID NO: 8549 - protein, 7 aa, synthetic construct
RGDSLHS

SEQ ID NO: 8550 - protein, 7 aa, synthetic construct
RGDSNRT

SEQ ID NO: 8551 - protein, 7 aa, synthetic construct
RGDSQNK

SEQ ID NO: 8552 - protein, 7 aa, synthetic construct
RGDSQRN

SEQ ID NO: 8553 - protein, 7 aa, synthetic construct
RGDSSAR

SEQ ID NO: 8554 - protein, 7 aa, synthetic construct
RGDSSGF

SEQ ID NO: 8555 - protein, 7 aa, synthetic construct
RGDSSKQ

SEQ ID NO: 8556 - protein, 7 aa, synthetic construct
RGDSSNS

SEQ ID NO: 8557 - protein, 7 aa, synthetic construct
RGDSTHH

SEQ ID NO: 8558 - protein, 7 aa, synthetic construct
RGDSTKE

SEQ ID NO: 8559 - protein, 7 aa, synthetic construct
RGDTDEE

SEQ ID NO: 8560 - protein, 7 aa, synthetic construct
RGDTDRL

SEQ ID NO: 8561 - protein, 7 aa, synthetic construct
RGDTHRL

SEQ ID NO: 8562 - protein, 7 aa, synthetic construct
RGDTKGH

SEQ ID NO: 8563 - protein, 7 aa, synthetic construct
RGDTKGQ

SEQ ID NO: 8564 - protein, 7 aa, synthetic construct
RGDTLTR

SEQ ID NO: 8565 - protein, 7 aa, synthetic construct
RGDTVSV

SEQ ID NO: 8566 - protein, 7 aa, synthetic construct
RGDVAIR

SEQ ID NO: 8567 - protein, 7 aa, synthetic construct
RGDVALQ

SEQ ID NO: 8568 - protein, 7 aa, synthetic construct
RGDVANV

SEQ ID NO: 8569 - protein, 7 aa, synthetic construct
RGDVHTT

SEQ ID NO: 8570 - protein, 7 aa, synthetic construct
RGDVKFT

SEQ ID NO: 8571 - protein, 7 aa, synthetic construct
RGDVLKR

SEQ ID NO: 8572 - protein, 7 aa, synthetic construct
RGDVLSR

SEQ ID NO: 8573 - protein, 7 aa, synthetic construct
RGDVLTF

SEQ ID NO: 8574 - protein, 7 aa, synthetic construct
RGDVNQE

SEQ ID NO: 8575 - protein, 7 aa, synthetic construct
RGDVNRF

SEQ ID NO: 8576 - protein, 7 aa, synthetic construct
RGDVRHE

SEQ ID NO: 8577 - protein, 7 aa, synthetic construct
RGDVRKF

SEQ ID NO: 8578 - protein, 7 aa, synthetic construct
RGDVSLK

SEQ ID NO: 8579 - protein, 7 aa, synthetic construct
RGDVSRN

SEQ ID NO: 8580 - protein, 7 aa, synthetic construct
RGDVSSF

SEQ ID NO: 8581 - protein, 7 aa, synthetic construct
RGDVVFI

SEQ ID NO: 8582 - protein, 7 aa, synthetic construct
RGDDKNK

SEQ ID NO: 8583 - protein, 7 aa, synthetic construct
RGDEGSR

SEQ ID NO: 8584 - protein, 7 aa, synthetic construct
RGDEGVV

SEQ ID NO: 8585 - protein, 7 aa, synthetic construct
RGDEHTS

SEQ ID NO: 8586 - protein, 7 aa, synthetic construct
RGDERSI

SEQ ID NO: 8587 - protein, 7 aa, synthetic construct
RGDFARG

SEQ ID NO: 8588 - protein, 7 aa, synthetic construct
RGDFASR

SEQ ID NO: 8589 - protein, 7 aa, synthetic construct
RGDFEFK

SEQ ID NO: 8590 - protein, 7 aa, synthetic construct
RGDFEQK

SEQ ID NO: 8591 - protein, 7 aa, synthetic construct
RGDFFLR

SEQ ID NO: 8592 - protein, 7 aa, synthetic construct
RGDFFTF

SEQ ID NO: 8593 - protein, 7 aa, synthetic construct
RGDFGST

SEQ ID NO: 8594 - protein, 7 aa, synthetic construct
RGDFGVA

SEQ ID NO: 8595 - protein, 7 aa, synthetic construct
RGDFHQF

SEQ ID NO: 8596 - protein, 7 aa, synthetic construct
RGDFIEN

SEQ ID NO: 8597 - protein, 7 aa, synthetic construct
RGDFIHF

SEQ ID NO: 8598 - protein, 7 aa, synthetic construct
RGDFKAQ

SEQ ID NO: 8599 - protein, 7 aa, synthetic construct
RGDFKRG

SEQ ID NO: 8600 - protein, 7 aa, synthetic construct
RGDAHII

SEQ ID NO: 8601 - protein, 7 aa, synthetic construct
RGDFNHL

SEQ ID NO: 8602 - protein, 7 aa, synthetic construct
RGDFNKK

SEQ ID NO: 8603 - protein, 7 aa, synthetic construct
RGDFQTQ

SEQ ID NO: 8604 - protein, 7 aa, synthetic construct
RGDFRQK

SEQ ID NO: 8605 - protein, 7 aa, synthetic construct
RGDAHTL

SEQ ID NO: 8606 - protein, 7 aa, synthetic construct
RGDGAFK

SEQ ID NO: 8607 - protein, 7 aa, synthetic construct
RGDGFSK

SEQ ID NO: 8608 - protein, 7 aa, synthetic construct
RGDGGGK

SEQ ID NO: 8609 - protein, 7 aa, synthetic construct
RGDGGGT

SEQ ID NO: 8610 - protein, 7 aa, synthetic construct
RGDGGHL

SEQ ID NO: 8611 - protein, 7 aa, synthetic construct
RGDGHKQ

SEQ ID NO: 8612 - protein, 7 aa, synthetic construct
RGDGHLL

SEQ ID NO: 8613 - protein, 7 aa, synthetic construct
RGDGHSF

SEQ ID NO: 8614 - protein, 7 aa, synthetic construct
RGDGNFL

SEQ ID NO: 8615 - protein, 7 aa, synthetic construct
RGDGNQF

SEQ ID NO: 8616 - protein, 7 aa, synthetic construct
RGDGRDI

SEQ ID NO: 8617 - protein, 7 aa, synthetic construct
RGDGRSN

SEQ ID NO: 8618 - protein, 7 aa, synthetic construct
RGDGSHA

SEQ ID NO: 8619 - protein, 7 aa, synthetic construct
RGDAKFT

SEQ ID NO: 8620 - protein, 7 aa, synthetic construct
RGDGSRK

SEQ ID NO: 8621 - protein, 7 aa, synthetic construct
RGDAAQV

SEQ ID NO: 8622 - protein, 7 aa, synthetic construct
RGDGTHI

SEQ ID NO: 8623 - protein, 7 aa, synthetic construct
RGDGTRF

SEQ ID NO: 8624 - protein, 7 aa, synthetic construct
RGDHDLE

SEQ ID NO: 8625 - protein, 7 aa, synthetic construct
RGDHEFT

SEQ ID NO: 8626 - protein, 7 aa, synthetic construct
RGDHGGH

SEQ ID NO: 8627 - protein, 7 aa, synthetic construct
RGDHHAL

SEQ ID NO: 8628 - protein, 7 aa, synthetic construct
RGDALET

SEQ ID NO: 8629 - protein, 7 aa, synthetic construct
RGDHLSI

SEQ ID NO: 8630 - protein, 7 aa, synthetic construct
RGDHNGN

SEQ ID NO: 8631 - protein, 7 aa, synthetic construct
RGDHQHL

SEQ ID NO: 8632 - protein, 7 aa, synthetic construct
RGDHQKV

SEQ ID NO: 8633 - protein, 7 aa, synthetic construct
RGDHREH

SEQ ID NO: 8634 - protein, 7 aa, synthetic construct
RGDHSGA

SEQ ID NO: 8635 - protein, 7 aa, synthetic construct
RGDHTRG

SEQ ID NO: 8636 - protein, 7 aa, synthetic construct
RGDHTTH

SEQ ID NO: 8637 - protein, 7 aa, synthetic construct
RGDHVET

SEQ ID NO: 8638 - protein, 7 aa, synthetic construct
RGDIAHS

SEQ ID NO: 8639 - protein, 7 aa, synthetic construct
RGDIDTH

SEQ ID NO: 8640 - protein, 7 aa, synthetic construct
RGDIGIK

SEQ ID NO: 8641 - protein, 7 aa, synthetic construct
RGDIIRH

SEQ ID NO: 8642 - protein, 7 aa, synthetic construct
RGDIKRK

SEQ ID NO: 8643 - protein, 7 aa, synthetic construct
RGDIKTN

SEQ ID NO: 8644 - protein, 7 aa, synthetic construct
RGDIKVN

SEQ ID NO: 8645 - protein, 7 aa, synthetic construct
RGDIQNK

SEQ ID NO: 8646 - protein, 7 aa, synthetic construct
RGDISRN

SEQ ID NO: 8647 - protein, 7 aa, synthetic construct
RGDITHF

SEQ ID NO: 8648 - protein, 7 aa, synthetic construct
RGDKART

SEQ ID NO: 8649 - protein, 7 aa, synthetic construct
RGDKAVF

SEQ ID NO: 8650 - protein, 7 aa, synthetic construct
RGDKDVV

SEQ ID NO: 8651 - protein, 7 aa, synthetic construct
RGDKFFH

SEQ ID NO: 8652 - protein, 7 aa, synthetic construct
RGDKFSV

SEQ ID NO: 8653 - protein, 7 aa, synthetic construct
RGDKFVI

SEQ ID NO: 8654 - protein, 7 aa, synthetic construct
RGDAQTI

SEQ ID NO: 8655 - protein, 7 aa, synthetic construct
RGDKGDH

SEQ ID NO: 8656 - protein, 7 aa, synthetic construct
RGDARAF

SEQ ID NO: 8657 - protein, 7 aa, synthetic construct
RGDARFQ

SEQ ID NO: 8658 - protein, 7 aa, synthetic construct
RGDKKSH

SEQ ID NO: 8659 - protein, 7 aa, synthetic construct
RGDKLGK

SEQ ID NO: 8660 - protein, 7 aa, synthetic construct
RGDKLSA

SEQ ID NO: 8661 - protein, 7 aa, synthetic construct
RGDKNTS

SEQ ID NO: 8662 - protein, 7 aa, synthetic construct
RGDARLG

SEQ ID NO: 8663 - protein, 7 aa, synthetic construct
RGDKRVF

SEQ ID NO: 8664 - protein, 7 aa, synthetic construct
RGDKSRN

SEQ ID NO: 8665 - protein, 7 aa, synthetic construct
RGDLDSV

SEQ ID NO: 8666 - protein, 7 aa, synthetic construct
RGDLENS

SEQ ID NO: 8667 - protein, 7 aa, synthetic construct
RGDLESA

SEQ ID NO: 8668 - protein, 7 aa, synthetic construct
RGDLGFA

SEQ ID NO: 8669 - protein, 7 aa, synthetic construct
RGDLGRI

SEQ ID NO: 8670 - protein, 7 aa, synthetic construct
RGDLHGL

SEQ ID NO: 8671 - protein, 7 aa, synthetic construct
RGDLIHQ

SEQ ID NO: 8672 - protein, 7 aa, synthetic construct
RGDLKFK

SEQ ID NO: 8673 - protein, 7 aa, synthetic construct
RGDLNSR

SEQ ID NO: 8674 - protein, 7 aa, synthetic construct
RGDASVV

SEQ ID NO: 8675 - protein, 7 aa, synthetic construct
RGDATDK

SEQ ID NO: 8676 - protein, 7 aa, synthetic construct
RGDLVIV

SEQ ID NO: 8677 - protein, 7 aa, synthetic construct
RGDLVKS

SEQ ID NO: 8678 - protein, 7 aa, synthetic construct
RGDNATF

SEQ ID NO: 8679 - protein, 7 aa, synthetic construct
RGDNAVV

SEQ ID NO: 8680 - protein, 7 aa, synthetic construct
RGDATNA

SEQ ID NO: 8681 - protein, 7 aa, synthetic construct
RGDNGVT

SEQ ID NO: 8682 - protein, 7 aa, synthetic construct
RGDNHKF

SEQ ID NO: 8683 - protein, 7 aa, synthetic construct
RGDNLRK

SEQ ID NO: 8684 - protein, 7 aa, synthetic construct
RGDNNTV

SEQ ID NO: 8685 - protein, 7 aa, synthetic construct
RGDNRAS

SEQ ID NO: 8686 - protein, 7 aa, synthetic construct
RGDNSVF

SEQ ID NO: 8687 - protein, 7 aa, synthetic construct
RGDNTSR

SEQ ID NO: 8688 - protein, 7 aa, synthetic construct
RGDNVSH

SEQ ID NO: 8689 - protein, 7 aa, synthetic construct
RGDQAGN

SEQ ID NO: 8690 - protein, 7 aa, synthetic construct
RGDQENR

SEQ ID NO: 8691 - protein, 7 aa, synthetic construct
RGDQHFI

SEQ ID NO: 8692 - protein, 7 aa, synthetic construct
RGDQIRV

SEQ ID NO: 8693 - protein, 7 aa, synthetic construct
RGDQLFQ

SEQ ID NO: 8694 - protein, 7 aa, synthetic construct
RGDQQVL

SEQ ID NO: 8695 - protein, 7 aa, synthetic construct
RGDQRIK

SEQ ID NO: 8696 - protein, 7 aa, synthetic construct
RGDQTHQ

SEQ ID NO: 8697 - protein, 7 aa, synthetic construct
RGDQTKS

SEQ ID NO: 8698 - protein, 7 aa, synthetic construct
RGDRAGF

SEQ ID NO: 8699 - protein, 7 aa, synthetic construct
RGDREQI

SEQ ID NO: 8700 - protein, 7 aa, synthetic construct
RGDRERL

SEQ ID NO: 8701 - protein, 7 aa, synthetic construct
RGDRGRV

SEQ ID NO: 8702 - protein, 7 aa, synthetic construct
RGDRHDV

SEQ ID NO: 8703 - protein, 7 aa, synthetic construct
RGDRHGL

SEQ ID NO: 8704 - protein, 7 aa, synthetic construct
RGDRHQN

SEQ ID NO: 8705 - protein, 7 aa, synthetic construct
RGDRIDT

SEQ ID NO: 8706 - protein, 7 aa, synthetic construct
RGDRIKG

SEQ ID NO: 8707 - protein, 7 aa, synthetic construct
RGDRITV

SEQ ID NO: 8708 - protein, 7 aa, synthetic construct
RGDRKLH

SEQ ID NO: 8709 - protein, 7 aa, synthetic construct
RGDRNLK

SEQ ID NO: 8710 - protein, 7 aa, synthetic construct
RGDRNLQ

SEQ ID NO: 8711 - protein, 7 aa, synthetic construct
RGDRNRN

SEQ ID NO: 8712 - protein, 7 aa, synthetic construct
RGDRNSG

SEQ ID NO: 8713 - protein, 7 aa, synthetic construct
RGDRRTT

SEQ ID NO: 8714 - protein, 7 aa, synthetic construct
RGDSDKS

SEQ ID NO: 8715 - protein, 7 aa, synthetic construct
RGDSFFI

SEQ ID NO: 8716 - protein, 7 aa, synthetic construct
RGDSGDS

SEQ ID NO: 8717 - protein, 7 aa, synthetic construct
RGDSGFT

SEQ ID NO: 8718 - protein, 7 aa, synthetic construct
RGDSGKL

SEQ ID NO: 8719 - protein, 7 aa, synthetic construct
RGDDFKL

SEQ ID NO: 8720 - protein, 7 aa, synthetic construct
RGDSIHI

SEQ ID NO: 8721 - protein, 7 aa, synthetic construct
RGDSKGQ

SEQ ID NO: 8722 - protein, 7 aa, synthetic construct
RGDSKLL

SEQ ID NO: 8723 - protein, 7 aa, synthetic construct
RGDSKQD

SEQ ID NO: 8724 - protein, 7 aa, synthetic construct
RGDSKVF

SEQ ID NO: 8725 - protein, 7 aa, synthetic construct
RGDSKVT

SEQ ID NO: 8726 - protein, 7 aa, synthetic construct
RGDSLVN

SEQ ID NO: 8727 - protein, 7 aa, synthetic construct
RGDSQKH

SEQ ID NO: 8728 - protein, 7 aa, synthetic construct
RGDSQTT

SEQ ID NO: 8729 - protein, 7 aa, synthetic construct
RGDSRLV

SEQ ID NO: 8730 - protein, 7 aa, synthetic construct
RGDSTFV

SEQ ID NO: 8731 - protein, 7 aa, synthetic construct
RGDSTNV

SEQ ID NO: 8732 - protein, 7 aa, synthetic construct
RGDSVFT

SEQ ID NO: 8733 - protein, 7 aa, synthetic construct
RGDSVRE

SEQ ID NO: 8734 - protein, 7 aa, synthetic construct
RGDTDLI

SEQ ID NO: 8735 - protein, 7 aa, synthetic construct
RGDDGSL

SEQ ID NO: 8736 - protein, 7 aa, synthetic construct
RGDDGVT

SEQ ID NO: 8737 - protein, 7 aa, synthetic construct
RGDTHFS

SEQ ID NO: 8738 - protein, 7 aa, synthetic construct
RGDTLFS

SEQ ID NO: 8739 - protein, 7 aa, synthetic construct
RGDTLKQ

SEQ ID NO: 8740 - protein, 7 aa, synthetic construct
RGDTLRT

SEQ ID NO: 8741 - protein, 7 aa, synthetic construct
RGDTNIR

SEQ ID NO: 8742 - protein, 7 aa, synthetic construct
RGDTQNK

SEQ ID NO: 8743 - protein, 7 aa, synthetic construct
RGDTSQK

SEQ ID NO: 8744 - protein, 7 aa, synthetic construct
RGDTSQR

SEQ ID NO: 8745 - protein, 7 aa, synthetic construct
RGDTVLL

SEQ ID NO: 8746 - protein, 7 aa, synthetic construct
RGDTVLV

SEQ ID NO: 8747 - protein, 7 aa, synthetic construct
RGDVGNV

SEQ ID NO: 8748 - protein, 7 aa, synthetic construct
RGDVHNV

SEQ ID NO: 8749 - protein, 7 aa, synthetic construct
RGDVHSS

SEQ ID NO: 8750 - protein, 7 aa, synthetic construct
RGDVIGG

SEQ ID NO: 8751 - protein, 7 aa, synthetic construct
RGDVIQT

SEQ ID NO: 8752 - protein, 7 aa, synthetic construct
RGDVITR

SEQ ID NO: 8753 - protein, 7 aa, synthetic construct
RGDVLIQ

SEQ ID NO: 8754 - protein, 7 aa, synthetic construct
RGDVQAK

SEQ ID NO: 8755 - protein, 7 aa, synthetic construct
RGDVQKQ

SEQ ID NO: 8756 - protein, 7 aa, synthetic construct
RGDVQSI

SEQ ID NO: 8757 - protein, 7 aa, synthetic construct
RGDVQSK

SEQ ID NO: 8758 - protein, 7 aa, synthetic construct
RGDVRAS

SEQ ID NO: 8759 - protein, 7 aa, synthetic construct
RGDVRDI

SEQ ID NO: 8760 - protein, 7 aa, synthetic construct
RGDVRFD

SEQ ID NO: 8761 - protein, 7 aa, synthetic construct
RGDDKHV

SEQ ID NO: 8762 - protein, 7 aa, synthetic construct
RGDDRKR

SEQ ID NO: 8763 - protein, 7 aa, synthetic construct
RGDDSSI

SEQ ID NO: 8764 - protein, 7 aa, synthetic construct
RGDDTKV

SEQ ID NO: 8765 - protein, 7 aa, synthetic construct
RGDEAFH

SEQ ID NO: 8766 - protein, 7 aa, synthetic construct
RGDEFVK

SEQ ID NO: 8767 - protein, 7 aa, synthetic construct
RGDEGAV

SEQ ID NO: 8768 - protein, 7 aa, synthetic construct
RGDEGGR

SEQ ID NO: 8769 - protein, 7 aa, synthetic construct
RGDEGST

SEQ ID NO: 8770 - protein, 7 aa, synthetic construct
RGDELST

SEQ ID NO: 8771 - protein, 7 aa, synthetic construct
RGDERQL

SEQ ID NO: 8772 - protein, 7 aa, synthetic construct
RGDFAAH

SEQ ID NO: 8773 - protein, 7 aa, synthetic construct
RGDFFES

SEQ ID NO: 8774 - protein, 7 aa, synthetic construct
RGDFGAI

SEQ ID NO: 8775 - protein, 7 aa, synthetic construct
RGDFGRK

SEQ ID NO: 8776 - protein, 7 aa, synthetic construct
RGDFIHV

SEQ ID NO: 8777 - protein, 7 aa, synthetic construct
RGDFIKE

SEQ ID NO: 8778 - protein, 7 aa, synthetic construct
RGDAHFR

SEQ ID NO: 8779 - protein, 7 aa, synthetic construct
RGDFKNS

SEQ ID NO: 8780 - protein, 7 aa, synthetic construct
RGDFLRQ

SEQ ID NO: 8781 - protein, 7 aa, synthetic construct
RGDFLVI

SEQ ID NO: 8782 - protein, 7 aa, synthetic construct
RGDFQEN

SEQ ID NO: 8783 - protein, 7 aa, synthetic construct
RGDFQLV

SEQ ID NO: 8784 - protein, 7 aa, synthetic construct
RGDFVFN

SEQ ID NO: 8785 - protein, 7 aa, synthetic construct
RGDGART

SEQ ID NO: 8786 - protein, 7 aa, synthetic construct
RGDGDKQ

SEQ ID NO: 8787 - protein, 7 aa, synthetic construct
RGDGEHN

SEQ ID NO: 8788 - protein, 7 aa, synthetic construct
RGDGFDG

SEQ ID NO: 8789 - protein, 7 aa, synthetic construct
RGDGFRV

SEQ ID NO: 8790 - protein, 7 aa, synthetic construct
RGDGHKI

SEQ ID NO: 8791 - protein, 7 aa, synthetic construct
RGDGHTF

SEQ ID NO: 8792 - protein, 7 aa, synthetic construct
RGDGIQR

SEQ ID NO: 8793 - protein, 7 aa, synthetic construct
RGDGKNQ

SEQ ID NO: 8794 - protein, 7 aa, synthetic construct
RGDAIRT

SEQ ID NO: 8795 - protein, 7 aa, synthetic construct
RGDGRDT

SEQ ID NO: 8796 - protein, 7 aa, synthetic construct
RGDGRFQ

SEQ ID NO: 8797 - protein, 7 aa, synthetic construct
RGDGRNG

SEQ ID NO: 8798 - protein, 7 aa, synthetic construct
RGDGVKH

SEQ ID NO: 8799 - protein, 7 aa, synthetic construct
RGDGVNF

SEQ ID NO: 8800 - protein, 7 aa, synthetic construct
RGDHAEN

SEQ ID NO: 8801 - protein, 7 aa, synthetic construct
RGDAKND

SEQ ID NO: 8802 - protein, 7 aa, synthetic construct
RGDHERL

SEQ ID NO: 8803 - protein, 7 aa, synthetic construct
RGDAKRQ

SEQ ID NO: 8804 - protein, 7 aa, synthetic construct
RGDHGHV

SEQ ID NO: 8805 - protein, 7 aa, synthetic construct
RGDHHFK

SEQ ID NO: 8806 - protein, 7 aa, synthetic construct
RGDHHQR

SEQ ID NO: 8807 - protein, 7 aa, synthetic construct
RGDHIKR

SEQ ID NO: 8808 - protein, 7 aa, synthetic construct
RGDHKHN

SEQ ID NO: 8809 - protein, 7 aa, synthetic construct
RGDHKKF

SEQ ID NO: 8810 - protein, 7 aa, synthetic construct
RGDHNTL

SEQ ID NO: 8811 - protein, 7 aa, synthetic construct
RGDHQFK

SEQ ID NO: 8812 - protein, 7 aa, synthetic construct
RGDHQNF

SEQ ID NO: 8813 - protein, 7 aa, synthetic construct
RGDHQSG

SEQ ID NO: 8814 - protein, 7 aa, synthetic construct
RGDHSGH

SEQ ID NO: 8815 - protein, 7 aa, synthetic construct
RGDHSQR

SEQ ID NO: 8816 - protein, 7 aa, synthetic construct
RGDIARS

SEQ ID NO: 8817 - protein, 7 aa, synthetic construct
RGDIDQR

SEQ ID NO: 8818 - protein, 7 aa, synthetic construct
RGDIHVL

SEQ ID NO: 8819 - protein, 7 aa, synthetic construct
RGDIKTQ

SEQ ID NO: 8820 - protein, 7 aa, synthetic construct
RGDINRI

SEQ ID NO: 8821 - protein, 7 aa, synthetic construct
RGDIQKF

SEQ ID NO: 8822 - protein, 7 aa, synthetic construct
RGDIQRN

SEQ ID NO: 8823 - protein, 7 aa, synthetic construct
RGDIRVF

SEQ ID NO: 8824 - protein, 7 aa, synthetic construct
RGDITSQ

SEQ ID NO: 8825 - protein, 7 aa, synthetic construct
RGDAQKR

SEQ ID NO: 8826 - protein, 7 aa, synthetic construct
RGDKAFR

SEQ ID NO: 8827 - protein, 7 aa, synthetic construct
RGDKERR

SEQ ID NO: 8828 - protein, 7 aa, synthetic construct
RGDKFKT

SEQ ID NO: 8829 - protein, 7 aa, synthetic construct
RGDKHDT

SEQ ID NO: 8830 - protein, 7 aa, synthetic construct
RGDKHHV

SEQ ID NO: 8831 - protein, 7 aa, synthetic construct
RGDKKHT

SEQ ID NO: 8832 - protein, 7 aa, synthetic construct
RGDKKTL

SEQ ID NO: 8833 - protein, 7 aa, synthetic construct
RGDKLEE

SEQ ID NO: 8834 - protein, 7 aa, synthetic construct
RGDKNFT

SEQ ID NO: 8835 - protein, 7 aa, synthetic construct
RGDKQFK

SEQ ID NO: 8836 - protein, 7 aa, synthetic construct
RGDKRGT

SEQ ID NO: 8837 - protein, 7 aa, synthetic construct
RGDKRHS

SEQ ID NO: 8838 - protein, 7 aa, synthetic construct
RGDKRHV

SEQ ID NO: 8839 - protein, 7 aa, synthetic construct
RGDKSFR

SEQ ID NO: 8840 - protein, 7 aa, synthetic construct
RGDKSIR

SEQ ID NO: 8841 - protein, 7 aa, synthetic construct
RGDKVGQ

SEQ ID NO: 8842 - protein, 7 aa, synthetic construct
RGDLFHI

SEQ ID NO: 8843 - protein, 7 aa, synthetic construct
RGDASKR

SEQ ID NO: 8844 - protein, 7 aa, synthetic construct
RGDASKT

SEQ ID NO: 8845 - protein, 7 aa, synthetic construct
RGDLHQN

SEQ ID NO: 8846 - protein, 7 aa, synthetic construct
RGDLKTI

SEQ ID NO: 8847 - protein, 7 aa, synthetic construct
RGDASSG

SEQ ID NO: 8848 - protein, 7 aa, synthetic construct
RGDLLKF

SEQ ID NO: 8849 - protein, 7 aa, synthetic construct
RGDLRFT

SEQ ID NO: 8850 - protein, 7 aa, synthetic construct
RGDLRSK

SEQ ID NO: 8851 - protein, 7 aa, synthetic construct
RGDLSTE

SEQ ID NO: 8852 - protein, 7 aa, synthetic construct
RGDLSTV

SEQ ID NO: 8853 - protein, 7 aa, synthetic construct
RGDLTGQ

SEQ ID NO: 8854 - protein, 7 aa, synthetic construct
RGDLTHD

SEQ ID NO: 8855 - protein, 7 aa, synthetic construct
RGDLVID

SEQ ID NO: 8856 - protein, 7 aa, synthetic construct
RGDNDKK

SEQ ID NO: 8857 - protein, 7 aa, synthetic construct
RGDNFTQ

SEQ ID NO: 8858 - protein, 7 aa, synthetic construct
RGDNKFT

SEQ ID NO: 8859 - protein, 7 aa, synthetic construct
RGDNQNN

SEQ ID NO: 8860 - protein, 7 aa, synthetic construct
RGDNVHL

SEQ ID NO: 8861 - protein, 7 aa, synthetic construct
RGDNVNQ

SEQ ID NO: 8862 - protein, 7 aa, synthetic construct
RGDQAKE

SEQ ID NO: 8863 - protein, 7 aa, synthetic construct
RGDQIRL

SEQ ID NO: 8864 - protein, 7 aa, synthetic construct
RGDQKQI

SEQ ID NO: 8865 - protein, 7 aa, synthetic construct
RGDQNHF

SEQ ID NO: 8866 - protein, 7 aa, synthetic construct
RGDQQQK

SEQ ID NO: 8867 - protein, 7 aa, synthetic construct
RGDQQQL

SEQ ID NO: 8868 - protein, 7 aa, synthetic construct
RGDQRGI

SEQ ID NO: 8869 - protein, 7 aa, synthetic construct
RGDQRRN

SEQ ID NO: 8870 - protein, 7 aa, synthetic construct
RGDQRSL

SEQ ID NO: 8871 - protein, 7 aa, synthetic construct
RGDQSIT

SEQ ID NO: 8872 - protein, 7 aa, synthetic construct
RGDQVKK

SEQ ID NO: 8873 - protein, 7 aa, synthetic construct
RGDRAEV

SEQ ID NO: 8874 - protein, 7 aa, synthetic construct
RGDREQK

SEQ ID NO: 8875 - protein, 7 aa, synthetic construct
RGDRESF

SEQ ID NO: 8876 - protein, 7 aa, synthetic construct
RGDRFLI

SEQ ID NO: 8877 - protein, 7 aa, synthetic construct
RGDRFSF

SEQ ID NO: 8878 - protein, 7 aa, synthetic construct
RGDRGHR

SEQ ID NO: 8879 - protein, 7 aa, synthetic construct
RGDRIGG

SEQ ID NO: 8880 - protein, 7 aa, synthetic construct
RGDRIHK

SEQ ID NO: 8881 - protein, 7 aa, synthetic construct
RGDRIRL

SEQ ID NO: 8882 - protein, 7 aa, synthetic construct
RGDRITF

SEQ ID NO: 8883 - protein, 7 aa, synthetic construct
RGDRIVE

SEQ ID NO: 8884 - protein, 7 aa, synthetic construct
RGDRNFS

SEQ ID NO: 8885 - protein, 7 aa, synthetic construct
RGDRNFT

SEQ ID NO: 8886 - protein, 7 aa, synthetic construct
RGDRRNK

SEQ ID NO: 8887 - protein, 7 aa, synthetic construct
RGDRSFF

SEQ ID NO: 8888 - protein, 7 aa, synthetic construct
RGDRSKH

SEQ ID NO: 8889 - protein, 7 aa, synthetic construct
RGDRTLF

SEQ ID NO: 8890 - protein, 7 aa, synthetic construct
RGDRTQI

SEQ ID NO: 8891 - protein, 7 aa, synthetic construct
RGDRTRF

SEQ ID NO: 8892 - protein, 7 aa, synthetic construct
RGDRTSK

SEQ ID NO: 8893 - protein, 7 aa, synthetic construct
RGDRVGN

SEQ ID NO: 8894 - protein, 7 aa, synthetic construct
RGDSAFR

SEQ ID NO: 8895 - protein, 7 aa, synthetic construct
RGDSGIL

SEQ ID NO: 8896 - protein, 7 aa, synthetic construct
RGDSGNK

SEQ ID NO: 8897 - protein, 7 aa, synthetic construct
RGDSHKQ

SEQ ID NO: 8898 - protein, 7 aa, synthetic construct
RGDSISL

SEQ ID NO: 8899 - protein, 7 aa, synthetic construct
RGDDFRI

SEQ ID NO: 8900 - protein, 7 aa, synthetic construct
RGDSKSE

SEQ ID NO: 8901 - protein, 7 aa, synthetic construct
RGDSLTQ

SEQ ID NO: 8902 - protein, 7 aa, synthetic construct
RGDSRDV

SEQ ID NO: 8903 - protein, 7 aa, synthetic construct
RGDSRFE

SEQ ID NO: 8904 - protein, 7 aa, synthetic construct
RGDSRLF

SEQ ID NO: 8905 - protein, 7 aa, synthetic construct
RGDSSGN

SEQ ID NO: 8906 - protein, 7 aa, synthetic construct
RGDSTNQ

SEQ ID NO: 8907 - protein, 7 aa, synthetic construct
RGDSVKE

SEQ ID NO: 8908 - protein, 7 aa, synthetic construct
RGDDGRT

SEQ ID NO: 8909 - protein, 7 aa, synthetic construct
RGDTFFT

SEQ ID NO: 8910 - protein, 7 aa, synthetic construct
RGDTGQI

SEQ ID NO: 8911 - protein, 7 aa, synthetic construct
RGDTKHD

SEQ ID NO: 8912 - protein, 7 aa, synthetic construct
RGDTKII

SEQ ID NO: 8913 - protein, 7 aa, synthetic construct
RGDTKLI

SEQ ID NO: 8914 - protein, 7 aa, synthetic construct
RGDDHGT

SEQ ID NO: 8915 - protein, 7 aa, synthetic construct
RGDTLIF

SEQ ID NO: 8916 - protein, 7 aa, synthetic construct
RGDTNRT

SEQ ID NO: 8917 - protein, 7 aa, synthetic construct
RGDTQIH

SEQ ID NO: 8918 - protein, 7 aa, synthetic construct
RGDVAEI

SEQ ID NO: 8919 - protein, 7 aa, synthetic construct
RGDVEAH

SEQ ID NO: 8920 - protein, 7 aa, synthetic construct
RGDVHKF

SEQ ID NO: 8921 - protein, 7 aa, synthetic construct
RGDVHRN

SEQ ID NO: 8922 - protein, 7 aa, synthetic construct
RGDVKAI

SEQ ID NO: 8923 - protein, 7 aa, synthetic construct
RGDVKGT

SEQ ID NO: 8924 - protein, 7 aa, synthetic construct
RGDVKKQ

SEQ ID NO: 8925 - protein, 7 aa, synthetic construct
RGDVLNK

SEQ ID NO: 8926 - protein, 7 aa, synthetic construct
RGDVLNR

SEQ ID NO: 8927 - protein, 7 aa, synthetic construct
RGDVSHN

SEQ ID NO: 8928 - protein, 7 aa, synthetic construct
RGDVSLT

SEQ ID NO: 8929 - protein, 7 aa, synthetic construct
RGDVSQS

SEQ ID NO: 8930 - protein, 7 aa, synthetic construct
RGDVSRQ

SEQ ID NO: 8931 - protein, 7 aa, synthetic construct
RGDVVVT

SEQ ID NO: 8932 - protein, 7 aa, synthetic construct
RGDAELI

SEQ ID NO: 8933 - protein, 7 aa, synthetic construct
RGDEELK

SEQ ID NO: 8934 - protein, 7 aa, synthetic construct
RGDEHRG

SEQ ID NO: 8935 - protein, 7 aa, synthetic construct
RGDENQS

SEQ ID NO: 8936 - protein, 7 aa, synthetic construct
RGDERFN

SEQ ID NO: 8937 - protein, 7 aa, synthetic construct
RGDERHQ

SEQ ID NO: 8938 - protein, 7 aa, synthetic construct
RGDERLR

SEQ ID NO: 8939 - protein, 7 aa, synthetic construct
RGDESEV

SEQ ID NO: 8940 - protein, 7 aa, synthetic construct
RGDAGGS

SEQ ID NO: 8941 - protein, 7 aa, synthetic construct
RGDFAHV

SEQ ID NO: 8942 - protein, 7 aa, synthetic construct
RGDAGLN

SEQ ID NO: 8943 - protein, 7 aa, synthetic construct
RGDFDFR

SEQ ID NO: 8944 - protein, 7 aa, synthetic construct
RGDFENN

SEQ ID NO: 8945 - protein, 7 aa, synthetic construct
RGDAGRT

SEQ ID NO: 8946 - protein, 7 aa, synthetic construct
RGDFHER

SEQ ID NO: 8947 - protein, 7 aa, synthetic construct
RGDFHSI

SEQ ID NO: 8948 - protein, 7 aa, synthetic construct
RGDFIDT

SEQ ID NO: 8949 - protein, 7 aa, synthetic construct
RGDFIKH

SEQ ID NO: 8950 - protein, 7 aa, synthetic construct
RGDFIRE

SEQ ID NO: 8951 - protein, 7 aa, synthetic construct
RGDFLFD

SEQ ID NO: 8952 - protein, 7 aa, synthetic construct
RGDFLKK

SEQ ID NO: 8953 - protein, 7 aa, synthetic construct
RGDFLLL

SEQ ID NO: 8954 - protein, 7 aa, synthetic construct
RGDFLTQ

SEQ ID NO: 8955 - protein, 7 aa, synthetic construct
RGDFNSQ

SEQ ID NO: 8956 - protein, 7 aa, synthetic construct
RGDFNTK

SEQ ID NO: 8957 - protein, 7 aa, synthetic construct
RGDFQFK

SEQ ID NO: 8958 - protein, 7 aa, synthetic construct
RGDFQSR

SEQ ID NO: 8959 - protein, 7 aa, synthetic construct
RGDFRGD

SEQ ID NO: 8960 - protein, 7 aa, synthetic construct
RGDFRQT

SEQ ID NO: 8961 - protein, 7 aa, synthetic construct
RGDFSNL

SEQ ID NO: 8962 - protein, 7 aa, synthetic construct
RGDFSQS

SEQ ID NO: 8963 - protein, 7 aa, synthetic construct
RGDFVKH

SEQ ID NO: 8964 - protein, 7 aa, synthetic construct
RGDGDSQ

SEQ ID NO: 8965 - protein, 7 aa, synthetic construct
RGDGFKF

SEQ ID NO: 8966 - protein, 7 aa, synthetic construct
RGDGFQS

SEQ ID NO: 8967 - protein, 7 aa, synthetic construct
RGDGGNA

SEQ ID NO: 8968 - protein, 7 aa, synthetic construct
RGDGHVF

SEQ ID NO: 8969 - protein, 7 aa, synthetic construct
RGDGIRE

SEQ ID NO: 8970 - protein, 7 aa, synthetic construct
RGDGKGL

SEQ ID NO: 8971 - protein, 7 aa, synthetic construct
RGDGKSA

SEQ ID NO: 8972 - protein, 7 aa, synthetic construct
RGDGKSV

SEQ ID NO: 8973 - protein, 7 aa, synthetic construct
RGDGLEV

SEQ ID NO: 8974 - protein, 7 aa, synthetic construct
RGDGNLQ

SEQ ID NO: 8975 - protein, 7 aa, synthetic construct
RGDGQSR

SEQ ID NO: 8976 - protein, 7 aa, synthetic construct
RGDGRKV

SEQ ID NO: 8977 - protein, 7 aa, synthetic construct
RGDGSGL

SEQ ID NO: 8978 - protein, 7 aa, synthetic construct
RGDGTAL

SEQ ID NO: 8979 - protein, 7 aa, synthetic construct
RGDGVAR

SEQ ID NO: 8980 - protein, 7 aa, synthetic construct
RGDHLAF

SEQ ID NO: 8981 - protein, 7 aa, synthetic construct
RGDHLNK

SEQ ID NO: 8982 - protein, 7 aa, synthetic construct
RGDHNDG

SEQ ID NO: 8983 - protein, 7 aa, synthetic construct
RGDHQRK

SEQ ID NO: 8984 - protein, 7 aa, synthetic construct
RGDHSAQ

SEQ ID NO: 8985 - protein, 7 aa, synthetic construct
RGDHSIT

SEQ ID NO: 8986 - protein, 7 aa, synthetic construct
RGDHSTR

SEQ ID NO: 8987 - protein, 7 aa, synthetic construct
RGDIANH

SEQ ID NO: 8988 - protein, 7 aa, synthetic construct
RGDIAQH

SEQ ID NO: 8989 - protein, 7 aa, synthetic construct
RGDIASK

SEQ ID NO: 8990 - protein, 7 aa, synthetic construct
RGDIEGG

SEQ ID NO: 8991 - protein, 7 aa, synthetic construct
RGDIHSQ

SEQ ID NO: 8992 - protein, 7 aa, synthetic construct
RGDIILL

SEQ ID NO: 8993 - protein, 7 aa, synthetic construct
RGDIITR

SEQ ID NO: 8994 - protein, 7 aa, synthetic construct
RGDIKHA

SEQ ID NO: 8995 - protein, 7 aa, synthetic construct
RGDIKHQ

SEQ ID NO: 8996 - protein, 7 aa, synthetic construct
RGDIKNK

SEQ ID NO: 8997 - protein, 7 aa, synthetic construct
RGDILNL

SEQ ID NO: 8998 - protein, 7 aa, synthetic construct
RGDINRS

SEQ ID NO: 8999 - protein, 7 aa, synthetic construct
RGDIQNT

SEQ ID NO: 9000 - protein, 7 aa, synthetic construct
RGDAQFL

SEQ ID NO: 9001 - protein, 7 aa, synthetic construct
RGDIVRN

SEQ ID NO: 9002 - protein, 7 aa, synthetic construct
RGDKEDI

SEQ ID NO: 9003 - protein, 7 aa, synthetic construct
RGDKEGK

SEQ ID NO: 9004 - protein, 7 aa, synthetic construct
RGDKEHV

SEQ ID NO: 9005 - protein, 7 aa, synthetic construct
RGDAQRI

SEQ ID NO: 9006 - protein, 7 aa, synthetic construct
RGDKFKF

SEQ ID NO: 9007 - protein, 7 aa, synthetic construct
RGDKGIL

SEQ ID NO: 9008 - protein, 7 aa, synthetic construct
RGDKHDK

SEQ ID NO: 9009 - protein, 7 aa, synthetic construct
RGDKIGT

SEQ ID NO: 9010 - protein, 7 aa, synthetic construct
RGDKIKV

SEQ ID NO: 9011 - protein, 7 aa, synthetic construct
RGDKKGG

SEQ ID NO: 9012 - protein, 7 aa, synthetic construct
RGDARFT

SEQ ID NO: 9013 - protein, 7 aa, synthetic construct
RGDKLAI

SEQ ID NO: 9014 - protein, 7 aa, synthetic construct
RGDKLGR

SEQ ID NO: 9015 - protein, 7 aa, synthetic construct
RGDARGV

SEQ ID NO: 9016 - protein, 7 aa, synthetic construct
RGDKQNQ

SEQ ID NO: 9017 - protein, 7 aa, synthetic construct
RGDKRVH

SEQ ID NO: 9018 - protein, 7 aa, synthetic construct
RGDKSAI

SEQ ID NO: 9019 - protein, 7 aa, synthetic construct
RGDKSDV

SEQ ID NO: 9020 - protein, 7 aa, synthetic construct
RGDKSEH

SEQ ID NO: 9021 - protein, 7 aa, synthetic construct
RGDKSNN

SEQ ID NO: 9022 - protein, 7 aa, synthetic construct
RGDKVVV

SEQ ID NO: 9023 - protein, 7 aa, synthetic construct
RGDLARG

SEQ ID NO: 9024 - protein, 7 aa, synthetic construct
RGDLEIK

SEQ ID NO: 9025 - protein, 7 aa, synthetic construct
RGDLFSH

SEQ ID NO: 9026 - protein, 7 aa, synthetic construct
RGDLGIQ

SEQ ID NO: 9027 - protein, 7 aa, synthetic construct
RGDLHNS

SEQ ID NO: 9028 - protein, 7 aa, synthetic construct
RGDLLKS

SEQ ID NO: 9029 - protein, 7 aa, synthetic construct
RGDLQHI

SEQ ID NO: 9030 - protein, 7 aa, synthetic construct
RGDLRHH

SEQ ID NO: 9031 - protein, 7 aa, synthetic construct
RGDLTIG

SEQ ID NO: 9032 - protein, 7 aa, synthetic construct
RGDLVGI

SEQ ID NO: 9033 - protein, 7 aa, synthetic construct
RGDLVKF

SEQ ID NO: 9034 - protein, 7 aa, synthetic construct
RGDNDRF

SEQ ID NO: 9035 - protein, 7 aa, synthetic construct
RGDNGGH

SEQ ID NO: 9036 - protein, 7 aa, synthetic construct
RGDNHAL

SEQ ID NO: 9037 - protein, 7 aa, synthetic construct
RGDNHSK

SEQ ID NO: 9038 - protein, 7 aa, synthetic construct
RGDNINF

SEQ ID NO: 9039 - protein, 7 aa, synthetic construct
RGDNKQF

SEQ ID NO: 9040 - protein, 7 aa, synthetic construct
RGDNREL

SEQ ID NO: 9041 - protein, 7 aa, synthetic construct
RGDNRHQ

SEQ ID NO: 9042 - protein, 7 aa, synthetic construct
RGDNRKF

SEQ ID NO: 9043 - protein, 7 aa, synthetic construct
RGDNRSK

SEQ ID NO: 9044 - protein, 7 aa, synthetic construct
RGDNSSL

SEQ ID NO: 9045 - protein, 7 aa, synthetic construct
RGDNTLI

SEQ ID NO: 9046 - protein, 7 aa, synthetic construct
RGDNVKV

SEQ ID NO: 9047 - protein, 7 aa, synthetic construct
RGDQANK

SEQ ID NO: 9048 - protein, 7 aa, synthetic construct
RGDQDGI

SEQ ID NO: 9049 - protein, 7 aa, synthetic construct
RGDDAFH

SEQ ID NO: 9050 - protein, 7 aa, synthetic construct
RGDQESI

SEQ ID NO: 9051 - protein, 7 aa, synthetic construct
RGDQFRN

SEQ ID NO: 9052 - protein, 7 aa, synthetic construct
RGDQGRR

SEQ ID NO: 9053 - protein, 7 aa, synthetic construct
RGDQHQT

SEQ ID NO: 9054 - protein, 7 aa, synthetic construct
RGDQIKS

SEQ ID NO: 9055 - protein, 7 aa, synthetic construct
RGDQKHK

SEQ ID NO: 9056 - protein, 7 aa, synthetic construct
RGDQLKS

SEQ ID NO: 9057 - protein, 7 aa, synthetic construct
RGDQLVF

SEQ ID NO: 9058 - protein, 7 aa, synthetic construct
RGDQNFH

SEQ ID NO: 9059 - protein, 7 aa, synthetic construct
RGDQNKS

SEQ ID NO: 9060 - protein, 7 aa, synthetic construct
RGDQQST

SEQ ID NO: 9061 - protein, 7 aa, synthetic construct
RGDQSAV

SEQ ID NO: 9062 - protein, 7 aa, synthetic construct
RGDQSFV

SEQ ID NO: 9063 - protein, 7 aa, synthetic construct
RGDQVFQ

SEQ ID NO: 9064 - protein, 7 aa, synthetic construct
RGDRDNL

SEQ ID NO: 9065 - protein, 7 aa, synthetic construct
RGDREEL

SEQ ID NO: 9066 - protein, 7 aa, synthetic construct
RGDREEN

SEQ ID NO: 9067 - protein, 7 aa, synthetic construct
RGDRENQ

SEQ ID NO: 9068 - protein, 7 aa, synthetic construct
RGDRESV

SEQ ID NO: 9069 - protein, 7 aa, synthetic construct
RGDRFSK

SEQ ID NO: 9070 - protein, 7 aa, synthetic construct
RGDRHAI

SEQ ID NO: 9071 - protein, 7 aa, synthetic construct
RGDRHQV

SEQ ID NO: 9072 - protein, 7 aa, synthetic construct
RGDRIAI

SEQ ID NO: 9073 - protein, 7 aa, synthetic construct
RGDRIFD

SEQ ID NO: 9074 - protein, 7 aa, synthetic construct
RGDRINT

SEQ ID NO: 9075 - protein, 7 aa, synthetic construct
RGDRIVH

SEQ ID NO: 9076 - protein, 7 aa, synthetic construct
RGDRKLQ

SEQ ID NO: 9077 - protein, 7 aa, synthetic construct
RGDRKTN

SEQ ID NO: 9078 - protein, 7 aa, synthetic construct
RGDRSET

SEQ ID NO: 9079 - protein, 7 aa, synthetic construct
RGDRTFA

SEQ ID NO: 9080 - protein, 7 aa, synthetic construct
RGDRVLV

SEQ ID NO: 9081 - protein, 7 aa, synthetic construct
RGDSATS

SEQ ID NO: 9082 - protein, 7 aa, synthetic construct
RGDSGKS

SEQ ID NO: 9083 - protein, 7 aa, synthetic construct
RGDSKFS

SEQ ID NO: 9084 - protein, 7 aa, synthetic construct
RGDSLVI

SEQ ID NO: 9085 - protein, 7 aa, synthetic construct
RGDSQGT

SEQ ID NO: 9086 - protein, 7 aa, synthetic construct
RGDSQTK

SEQ ID NO: 9087 - protein, 7 aa, synthetic construct
RGDSRDI

SEQ ID NO: 9088 - protein, 7 aa, synthetic construct
RGDSRTN

SEQ ID NO: 9089 - protein, 7 aa, synthetic construct
RGDSTHS

SEQ ID NO: 9090 - protein, 7 aa, synthetic construct
RGDTDFD

SEQ ID NO: 9091 - protein, 7 aa, synthetic construct
RGDTGNH

SEQ ID NO: 9092 - protein, 7 aa, synthetic construct
RGDTILR

SEQ ID NO: 9093 - protein, 7 aa, synthetic construct
RGDTISL

SEQ ID NO: 9094 - protein, 7 aa, synthetic construct
RGDTKNS

SEQ ID NO: 9095 - protein, 7 aa, synthetic construct
RGDTKQN

SEQ ID NO: 9096 - protein, 7 aa, synthetic construct
RGDTLFH

SEQ ID NO: 9097 - protein, 7 aa, synthetic construct
RGDTLNR

SEQ ID NO: 9098 - protein, 7 aa, synthetic construct
RGDTLVQ

SEQ ID NO: 9099 - protein, 7 aa, synthetic construct
RGDTQRN

SEQ ID NO: 9100 - protein, 7 aa, synthetic construct
RGDTRNS

SEQ ID NO: 9101 - protein, 7 aa, synthetic construct
RGDTVFT

SEQ ID NO: 9102 - protein, 7 aa, synthetic construct
RGDVGHK

SEQ ID NO: 9103 - protein, 7 aa, synthetic construct
RGDVHGG

SEQ ID NO: 9104 - protein, 7 aa, synthetic construct
RGDVHKH

SEQ ID NO: 9105 - protein, 7 aa, synthetic construct
RGDVHQV

SEQ ID NO: 9106 - protein, 7 aa, synthetic construct
RGDVITI

SEQ ID NO: 9107 - protein, 7 aa, synthetic construct
RGDVKEK

SEQ ID NO: 9108 - protein, 7 aa, synthetic construct
RGDVLKQ

SEQ ID NO: 9109 - protein, 7 aa, synthetic construct
RGDVTIR

SEQ ID NO: 9110 - protein, 7 aa, synthetic construct
RGDAEKR

SEQ ID NO: 9111 - protein, 7 aa, synthetic construct
RGDDRKN

SEQ ID NO: 9112 - protein, 7 aa, synthetic construct
RGDDSGI

SEQ ID NO: 9113 - protein, 7 aa, synthetic construct
RGDEAFR

SEQ ID NO: 9114 - protein, 7 aa, synthetic construct
RGDEGSG

SEQ ID NO: 9115 - protein, 7 aa, synthetic construct
RGDESGR

SEQ ID NO: 9116 - protein, 7 aa, synthetic construct
RGDESKE

SEQ ID NO: 9117 - protein, 7 aa, synthetic construct
RGDEVKL

SEQ ID NO: 9118 - protein, 7 aa, synthetic construct
RGDEVVK

SEQ ID NO: 9119 - protein, 7 aa, synthetic construct
RGDFAGS

SEQ ID NO: 9120 - protein, 7 aa, synthetic construct
RGDFAVK

SEQ ID NO: 9121 - protein, 7 aa, synthetic construct
RGDFDAI

SEQ ID NO: 9122 - protein, 7 aa, synthetic construct
RGDFFKT

SEQ ID NO: 9123 - protein, 7 aa, synthetic construct
RGDFGQA

SEQ ID NO: 9124 - protein, 7 aa, synthetic construct
RGDFHVL

SEQ ID NO: 9125 - protein, 7 aa, synthetic construct
RGDFIHL

SEQ ID NO: 9126 - protein, 7 aa, synthetic construct
RGDFKAT

SEQ ID NO: 9127 - protein, 7 aa, synthetic construct
RGDFLFI

SEQ ID NO: 9128 - protein, 7 aa, synthetic construct
RGDFLRS

SEQ ID NO: 9129 - protein, 7 aa, synthetic construct
RGDFNTT

SEQ ID NO: 9130 - protein, 7 aa, synthetic construct
RGDFQHT

SEQ ID NO: 9131 - protein, 7 aa, synthetic construct
RGDFREN

SEQ ID NO: 9132 - protein, 7 aa, synthetic construct
RGDFRVF

SEQ ID NO: 9133 - protein, 7 aa, synthetic construct
RGDFSAN

SEQ ID NO: 9134 - protein, 7 aa, synthetic construct
RGDAHSI

SEQ ID NO: 9135 - protein, 7 aa, synthetic construct
RGDFTHS

SEQ ID NO: 9136 - protein, 7 aa, synthetic construct
RGDFVDI

SEQ ID NO: 9137 - protein, 7 aa, synthetic construct
RGDFVSG

SEQ ID NO: 9138 - protein, 7 aa, synthetic construct
RGDFVVN

SEQ ID NO: 9139 - protein, 7 aa, synthetic construct
RGDGGGA

SEQ ID NO: 9140 - protein, 7 aa, synthetic construct
RGDGKHR

SEQ ID NO: 9141 - protein, 7 aa, synthetic construct
RGDGNRA

SEQ ID NO: 9142 - protein, 7 aa, synthetic construct
RGDAAQL

SEQ ID NO: 9143 - protein, 7 aa, synthetic construct
RGDGRKK

SEQ ID NO: 9144 - protein, 7 aa, synthetic construct
RGDAKEV

SEQ ID NO: 9145 - protein, 7 aa, synthetic construct
RGDGSEF

SEQ ID NO: 9146 - protein, 7 aa, synthetic construct
RGDGSLI

SEQ ID NO: 9147 - protein, 7 aa, synthetic construct
RGDGSLL

SEQ ID NO: 9148 - protein, 7 aa, synthetic construct
RGDGSSK

SEQ ID NO: 9149 - protein, 7 aa, synthetic construct
RGDAKHR

SEQ ID NO: 9150 - protein, 7 aa, synthetic construct
RGDGVTL

SEQ ID NO: 9151 - protein, 7 aa, synthetic construct
RGDHDNI

SEQ ID NO: 9152 - protein, 7 aa, synthetic construct
RGDHEKR

SEQ ID NO: 9153 - protein, 7 aa, synthetic construct
RGDHHQF

SEQ ID NO: 9154 - protein, 7 aa, synthetic construct
RGDHHRT

SEQ ID NO: 9155 - protein, 7 aa, synthetic construct
RGDHITH

SEQ ID NO: 9156 - protein, 7 aa, synthetic construct
RGDALFA

SEQ ID NO: 9157 - protein, 7 aa, synthetic construct
RGDHKGI

SEQ ID NO: 9158 - protein, 7 aa, synthetic construct
RGDHNDL

SEQ ID NO: 9159 - protein, 7 aa, synthetic construct
RGDHRDI

SEQ ID NO: 9160 - protein, 7 aa, synthetic construct
RGDHRQF

SEQ ID NO: 9161 - protein, 7 aa, synthetic construct
RGDHSTS

SEQ ID NO: 9162 - protein, 7 aa, synthetic construct
RGDALVV

SEQ ID NO: 9163 - protein, 7 aa, synthetic construct
RGDIAKH

SEQ ID NO: 9164 - protein, 7 aa, synthetic construct
RGDIEKR

SEQ ID NO: 9165 - protein, 7 aa, synthetic construct
RGDIETN

SEQ ID NO: 9166 - protein, 7 aa, synthetic construct
RGDIGFK

SEQ ID NO: 9167 - protein, 7 aa, synthetic construct
RGDIHSS

SEQ ID NO: 9168 - protein, 7 aa, synthetic construct
RGDIIFN

SEQ ID NO: 9169 - protein, 7 aa, synthetic construct
RGDIITI

SEQ ID NO: 9170 - protein, 7 aa, synthetic construct
RGDIKAL

SEQ ID NO: 9171 - protein, 7 aa, synthetic construct
RGDIKQV

SEQ ID NO: 9172 - protein, 7 aa, synthetic construct
RGDIRSF

SEQ ID NO: 9173 - protein, 7 aa, synthetic construct
RGDISNG

SEQ ID NO: 9174 - protein, 7 aa, synthetic construct
RGDITRS

SEQ ID NO: 9175 - protein, 7 aa, synthetic construct
RGDITTF

SEQ ID NO: 9176 - protein, 7 aa, synthetic construct
RGDIVQK

SEQ ID NO: 9177 - protein, 7 aa, synthetic construct
RGDIVSL

SEQ ID NO: 9178 - protein, 7 aa, synthetic construct
RGDKAAF

SEQ ID NO: 9179 - protein, 7 aa, synthetic construct
RGDKAHH

SEQ ID NO: 9180 - protein, 7 aa, synthetic construct
RGDKDSN

SEQ ID NO: 9181 - protein, 7 aa, synthetic construct
RGDKETV

SEQ ID NO: 9182 - protein, 7 aa, synthetic construct
RGDKFLF

SEQ ID NO: 9183 - protein, 7 aa, synthetic construct
RGDKGTG

SEQ ID NO: 9184 - protein, 7 aa, synthetic construct
RGDKHST

SEQ ID NO: 9185 - protein, 7 aa, synthetic construct
RGDKINF

SEQ ID NO: 9186 - protein, 7 aa, synthetic construct
RGDKLKT

SEQ ID NO: 9187 - protein, 7 aa, synthetic construct
RGDKNIF

SEQ ID NO: 9188 - protein, 7 aa, synthetic construct
RGDKNSH

SEQ ID NO: 9189 - protein, 7 aa, synthetic construct
RGDKQFR

SEQ ID NO: 9190 - protein, 7 aa, synthetic construct
RGDKRFH

SEQ ID NO: 9191 - protein, 7 aa, synthetic construct
RGDKRHA

SEQ ID NO: 9192 - protein, 7 aa, synthetic construct
RGDKSLI

SEQ ID NO: 9193 - protein, 7 aa, synthetic construct
RGDKTKH

SEQ ID NO: 9194 - protein, 7 aa, synthetic construct
RGDKTKK

SEQ ID NO: 9195 - protein, 7 aa, synthetic construct
RGDKVKT

SEQ ID NO: 9196 - protein, 7 aa, synthetic construct
RGDKVNF

SEQ ID NO: 9197 - protein, 7 aa, synthetic construct
RGDLEFF

SEQ ID NO: 9198 - protein, 7 aa, synthetic construct
RGDLFFN

SEQ ID NO: 9199 - protein, 7 aa, synthetic construct
RGDLFRN

SEQ ID NO: 9200 - protein, 7 aa, synthetic construct
RGDLGHE

SEQ ID NO: 9201 - protein, 7 aa, synthetic construct
RGDLIQS

SEQ ID NO: 9202 - protein, 7 aa, synthetic construct
RGDLIQV

SEQ ID NO: 9203 - protein, 7 aa, synthetic construct
RGDLKRV

SEQ ID NO: 9204 - protein, 7 aa, synthetic construct
RGDLLKR

SEQ ID NO: 9205 - protein, 7 aa, synthetic construct
RGDLLND

SEQ ID NO: 9206 - protein, 7 aa, synthetic construct
RGDLLNK

SEQ ID NO: 9207 - protein, 7 aa, synthetic construct
RGDLNKD

SEQ ID NO: 9208 - protein, 7 aa, synthetic construct
RGDLNVS

SEQ ID NO: 9209 - protein, 7 aa, synthetic construct
RGDLRDN

SEQ ID NO: 9210 - protein, 7 aa, synthetic construct
RGDLSRE

SEQ ID NO: 9211 - protein, 7 aa, synthetic construct
RGDLTKT

SEQ ID NO: 9212 - protein, 7 aa, synthetic construct
RGDNAFQ

SEQ ID NO: 9213 - protein, 7 aa, synthetic construct
RGDNAGK

SEQ ID NO: 9214 - protein, 7 aa, synthetic construct
RGDNAGV

SEQ ID NO: 9215 - protein, 7 aa, synthetic construct
RGDNDRK

SEQ ID NO: 9216 - protein, 7 aa, synthetic construct
RGDNFLI

SEQ ID NO: 9217 - protein, 7 aa, synthetic construct
RGDNGER

SEQ ID NO: 9218 - protein, 7 aa, synthetic construct
RGDNGSK

SEQ ID NO: 9219 - protein, 7 aa, synthetic construct
RGDNLKL

SEQ ID NO: 9220 - protein, 7 aa, synthetic construct
RGDNNET

SEQ ID NO: 9221 - protein, 7 aa, synthetic construct
RGDNQDQ

SEQ ID NO: 9222 - protein, 7 aa, synthetic construct
RGDNSFL

SEQ ID NO: 9223 - protein, 7 aa, synthetic construct
RGDNTGT

SEQ ID NO: 9224 - protein, 7 aa, synthetic construct
RGDNTTI

SEQ ID NO: 9225 - protein, 7 aa, synthetic construct
RGDNTTS

SEQ ID NO: 9226 - protein, 7 aa, synthetic construct
RGDNVEH

SEQ ID NO: 9227 - protein, 7 aa, synthetic construct
RGDNVRL

SEQ ID NO: 9228 - protein, 7 aa, synthetic construct
RGDQDRK

SEQ ID NO: 9229 - protein, 7 aa, synthetic construct
RGDADKT

SEQ ID NO: 9230 - protein, 7 aa, synthetic construct
RGDQGAN

SEQ ID NO: 9231 - protein, 7 aa, synthetic construct
RGDQGAR

SEQ ID NO: 9232 - protein, 7 aa, synthetic construct
RGDQGFL

SEQ ID NO: 9233 - protein, 7 aa, synthetic construct
RGDQHNF

SEQ ID NO: 9234 - protein, 7 aa, synthetic construct
RGDQKHV

SEQ ID NO: 9235 - protein, 7 aa, synthetic construct
RGDQKNR

SEQ ID NO: 9236 - protein, 7 aa, synthetic construct
RGDQLNQ

SEQ ID NO: 9237 - protein, 7 aa, synthetic construct
RGDDDAE

SEQ ID NO: 9238 - protein, 7 aa, synthetic construct
RGDQRDR

SEQ ID NO: 9239 - protein, 7 aa, synthetic construct
RGDQRDT

SEQ ID NO: 9240 - protein, 7 aa, synthetic construct
RGDQSNT

SEQ ID NO: 9241 - protein, 7 aa, synthetic construct
RGDQVKH

SEQ ID NO: 9242 - protein, 7 aa, synthetic construct
RGDRATH

SEQ ID NO: 9243 - protein, 7 aa, synthetic construct
RGDRDNS

SEQ ID NO: 9244 - protein, 7 aa, synthetic construct
RGDRDSH

SEQ ID NO: 9245 - protein, 7 aa, synthetic construct
RGDRDTG

SEQ ID NO: 9246 - protein, 7 aa, synthetic construct
RGDRFHF

SEQ ID NO: 9247 - protein, 7 aa, synthetic construct
RGDRFII

SEQ ID NO: 9248 - protein, 7 aa, synthetic construct
RGDRFVS

SEQ ID NO: 9249 - protein, 7 aa, synthetic construct
RGDRGRS

SEQ ID NO: 9250 - protein, 7 aa, synthetic construct
RGDRHHQ

SEQ ID NO: 9251 - protein, 7 aa, synthetic construct
RGDRHNH

SEQ ID NO: 9252 - protein, 7 aa, synthetic construct
RGDRIFR

SEQ ID NO: 9253 - protein, 7 aa, synthetic construct
RGDRIIL

SEQ ID NO: 9254 - protein, 7 aa, synthetic construct
RGDRLHH

SEQ ID NO: 9255 - protein, 7 aa, synthetic construct
RGDRLHI

SEQ ID NO: 9256 - protein, 7 aa, synthetic construct
RGDRLKN

SEQ ID NO: 9257 - protein, 7 aa, synthetic construct
RGDRLTH

SEQ ID NO: 9258 - protein, 7 aa, synthetic construct
RGDRNHF

SEQ ID NO: 9259 - protein, 7 aa, synthetic construct
RGDRNIF

SEQ ID NO: 9260 - protein, 7 aa, synthetic construct
RGDRNVH

SEQ ID NO: 9261 - protein, 7 aa, synthetic construct
RGDRQRV

SEQ ID NO: 9262 - protein, 7 aa, synthetic construct
RGDRRLE

SEQ ID NO: 9263 - protein, 7 aa, synthetic construct
RGDRRQI

SEQ ID NO: 9264 - protein, 7 aa, synthetic construct
RGDRVIT

SEQ ID NO: 9265 - protein, 7 aa, synthetic construct
RGDRVLH

SEQ ID NO: 9266 - protein, 7 aa, synthetic construct
RGDSERS

SEQ ID NO: 9267 - protein, 7 aa, synthetic construct
RGDSGAL

SEQ ID NO: 9268 - protein, 7 aa, synthetic construct
RGDSIHK

SEQ ID NO: 9269 - protein, 7 aa, synthetic construct
RGDDFQA

SEQ ID NO: 9270 - protein, 7 aa, synthetic construct
RGDSKFH

SEQ ID NO: 9271 - protein, 7 aa, synthetic construct
RGDSLKV

SEQ ID NO: 9272 - protein, 7 aa, synthetic construct
RGDSNRN

SEQ ID NO: 9273 - protein, 7 aa, synthetic construct
RGDSRGT

SEQ ID NO: 9274 - protein, 7 aa, synthetic construct
RGDSTEI

SEQ ID NO: 9275 - protein, 7 aa, synthetic construct
RGDDGGT

SEQ ID NO: 9276 - protein, 7 aa, synthetic construct
RGDSVEA

SEQ ID NO: 9277 - protein, 7 aa, synthetic construct
RGDSVNQ

SEQ ID NO: 9278 - protein, 7 aa, synthetic construct
RGDTAKV

SEQ ID NO: 9279 - protein, 7 aa, synthetic construct
RGDTARI

SEQ ID NO: 9280 - protein, 7 aa, synthetic construct
RGDTEDL

SEQ ID NO: 9281 - protein, 7 aa, synthetic construct
RGDTGFI

SEQ ID NO: 9282 - protein, 7 aa, synthetic construct
RGDTKLQ

SEQ ID NO: 9283 - protein, 7 aa, synthetic construct
RGDTQGN

SEQ ID NO: 9284 - protein, 7 aa, synthetic construct
RGDTQKN

SEQ ID NO: 9285 - protein, 7 aa, synthetic construct
RGDTQRS

SEQ ID NO: 9286 - protein, 7 aa, synthetic construct
RGDTRFT

SEQ ID NO: 9287 - protein, 7 aa, synthetic construct
RGDTRSV

SEQ ID NO: 9288 - protein, 7 aa, synthetic construct
RGDTTFQ

SEQ ID NO: 9289 - protein, 7 aa, synthetic construct
RGDVEVQ

SEQ ID NO: 9290 - protein, 7 aa, synthetic construct
RGDVFGK

SEQ ID NO: 9291 - protein, 7 aa, synthetic construct
RGDVHAQ

SEQ ID NO: 9292 - protein, 7 aa, synthetic construct
RGDVHIL

SEQ ID NO: 9293 - protein, 7 aa, synthetic construct
RGDVIDS

SEQ ID NO: 9294 - protein, 7 aa, synthetic construct
RGDVINL

SEQ ID NO: 9295 - protein, 7 aa, synthetic construct
RGDVKVA

SEQ ID NO: 9296 - protein, 7 aa, synthetic construct
RGDVLQR

SEQ ID NO: 9297 - protein, 7 aa, synthetic construct
RGDVNQT

SEQ ID NO: 9298 - protein, 7 aa, synthetic construct
RGDVQNT

SEQ ID NO: 9299 - protein, 7 aa, synthetic construct
RGDVQRK

SEQ ID NO: 9300 - protein, 7 aa, synthetic construct
RGDVSAK

SEQ ID NO: 9301 - protein, 7 aa, synthetic construct
RGDVSAQ

SEQ ID NO: 9302 - protein, 7 aa, synthetic construct
RGDVTAL

SEQ ID NO: 9303 - protein, 7 aa, synthetic construct
RGDVTQK

SEQ ID NO: 9304 - protein, 7 aa, synthetic construct
RGDVTQV

SEQ ID NO: 9305 - protein, 7 aa, synthetic construct
RGDVTSF

SEQ ID NO: 9306 - protein, 7 aa, synthetic construct
RGDVTSL

SEQ ID NO: 9307 - protein, 7 aa, synthetic construct
RGDVVHR

SEQ ID NO: 9308 - protein, 7 aa, synthetic construct
RGDAAFK

SEQ ID NO: 9309 - protein, 7 aa, synthetic construct
RGDDTFE

SEQ ID NO: 9310 - protein, 7 aa, synthetic construct
RGDDTHV

SEQ ID NO: 9311 - protein, 7 aa, synthetic construct
RGDDVDF

SEQ ID NO: 9312 - protein, 7 aa, synthetic construct
RGDDVRL

SEQ ID NO: 9313 - protein, 7 aa, synthetic construct
RGDEFKA

SEQ ID NO: 9314 - protein, 7 aa, synthetic construct
RGDEFRL

SEQ ID NO: 9315 - protein, 7 aa, synthetic construct
RGDEGNR

SEQ ID NO: 9316 - protein, 7 aa, synthetic construct
RGDELTK

SEQ ID NO: 9317 - protein, 7 aa, synthetic construct
RGDETKQ

SEQ ID NO: 9318 - protein, 7 aa, synthetic construct
RGDAGHG

SEQ ID NO: 9319 - protein, 7 aa, synthetic construct
RGDEVHS

SEQ ID NO: 9320 - protein, 7 aa, synthetic construct
RGDEVSG

SEQ ID NO: 9321 - protein, 7 aa, synthetic construct
RGDFDDK

SEQ ID NO: 9322 - protein, 7 aa, synthetic construct
RGDFDGG

SEQ ID NO: 9323 - protein, 7 aa, synthetic construct
RGDFEFR

SEQ ID NO: 9324 - protein, 7 aa, synthetic construct
RGDFFKF

SEQ ID NO: 9325 - protein, 7 aa, synthetic construct
RGDFGER

SEQ ID NO: 9326 - protein, 7 aa, synthetic construct
RGDFGRD

SEQ ID NO: 9327 - protein, 7 aa, synthetic construct
RGDFHGI

SEQ ID NO: 9328 - protein, 7 aa, synthetic construct
RGDFHNA

SEQ ID NO: 9329 - protein, 7 aa, synthetic construct
RGDFIGR

SEQ ID NO: 9330 - protein, 7 aa, synthetic construct
RGDFIHI

SEQ ID NO: 9331 - protein, 7 aa, synthetic construct
RGDFISF

SEQ ID NO: 9332 - protein, 7 aa, synthetic construct
RGDFKDD

SEQ ID NO: 9333 - protein, 7 aa, synthetic construct
RGDAHFI

SEQ ID NO: 9334 - protein, 7 aa, synthetic construct
RGDFKNA

SEQ ID NO: 9335 - protein, 7 aa, synthetic construct
RGDFKNV

SEQ ID NO: 9336 - protein, 7 aa, synthetic construct
RGDFKSF

SEQ ID NO: 9337 - protein, 7 aa, synthetic construct
RGDFKTN

SEQ ID NO: 9338 - protein, 7 aa, synthetic construct
RGDFNHA

SEQ ID NO: 9339 - protein, 7 aa, synthetic construct
RGDFNRN

SEQ ID NO: 9340 - protein, 7 aa, synthetic construct
RGDFQNK

SEQ ID NO: 9341 - protein, 7 aa, synthetic construct
RGDFQTN

SEQ ID NO: 9342 - protein, 7 aa, synthetic construct
RGDFRDN

SEQ ID NO: 9343 - protein, 7 aa, synthetic construct
RGDFRFT

SEQ ID NO: 9344 - protein, 7 aa, synthetic construct
RGDFRNG

SEQ ID NO: 9345 - protein, 7 aa, synthetic construct
RGDAHQK

SEQ ID NO: 9346 - protein, 7 aa, synthetic construct
RGDFSER

SEQ ID NO: 9347 - protein, 7 aa, synthetic construct
RGDFSGV

SEQ ID NO: 9348 - protein, 7 aa, synthetic construct
RGDFSKR

SEQ ID NO: 9349 - protein, 7 aa, synthetic construct
RGDFSSL

SEQ ID NO: 9350 - protein, 7 aa, synthetic construct
RGDFTST

SEQ ID NO: 9351 - protein, 7 aa, synthetic construct
RGDFVTK

SEQ ID NO: 9352 - protein, 7 aa, synthetic construct
RGDGFRQ

SEQ ID NO: 9353 - protein, 7 aa, synthetic construct
RGDGGTK

SEQ ID NO: 9354 - protein, 7 aa, synthetic construct
RGDAIKR

SEQ ID NO: 9355 - protein, 7 aa, synthetic construct
RGDGISV

SEQ ID NO: 9356 - protein, 7 aa, synthetic construct
RGDGNDK

SEQ ID NO: 9357 - protein, 7 aa, synthetic construct
RGDGNFT

SEQ ID NO: 9358 - protein, 7 aa, synthetic construct
RGDGNNV

SEQ ID NO: 9359 - protein, 7 aa, synthetic construct
RGDGRKE

SEQ ID NO: 9360 - protein, 7 aa, synthetic construct
RGDGRVQ

SEQ ID NO: 9361 - protein, 7 aa, synthetic construct
RGDGRVS

SEQ ID NO: 9362 - protein, 7 aa, synthetic construct
RGDGSQT

SEQ ID NO: 9363 - protein, 7 aa, synthetic construct
RGDGVTG

SEQ ID NO: 9364 - protein, 7 aa, synthetic construct
RGDAKNS

SEQ ID NO: 9365 - protein, 7 aa, synthetic construct
RGDHDRF

SEQ ID NO: 9366 - protein, 7 aa, synthetic construct
RGDHERR

SEQ ID NO: 9367 - protein, 7 aa, synthetic construct
RGDHGHL

SEQ ID NO: 9368 - protein, 7 aa, synthetic construct
RGDHKDS

SEQ ID NO: 9369 - protein, 7 aa, synthetic construct
RGDHKGA

SEQ ID NO: 9370 - protein, 7 aa, synthetic construct
RGDHKTF

SEQ ID NO: 9371 - protein, 7 aa, synthetic construct
RGDHLEL

SEQ ID NO: 9372 - protein, 7 aa, synthetic construct
RGDHLTV

SEQ ID NO: 9373 - protein, 7 aa, synthetic construct
RGDHRQQ

SEQ ID NO: 9374 - protein, 7 aa, synthetic construct
RGDHRVL

SEQ ID NO: 9375 - protein, 7 aa, synthetic construct
RGDHSNN

SEQ ID NO: 9376 - protein, 7 aa, synthetic construct
RGDALSK

SEQ ID NO: 9377 - protein, 7 aa, synthetic construct
RGDHVSR

SEQ ID NO: 9378 - protein, 7 aa, synthetic construct
RGDIDGR

SEQ ID NO: 9379 - protein, 7 aa, synthetic construct
RGDIENN

SEQ ID NO: 9380 - protein, 7 aa, synthetic construct
RGDIFKL

SEQ ID NO: 9381 - protein, 7 aa, synthetic construct
RGDIGAK

SEQ ID NO: 9382 - protein, 7 aa, synthetic construct
RGDIGRR

SEQ ID NO: 9383 - protein, 7 aa, synthetic construct
RGDIGVN

SEQ ID NO: 9384 - protein, 7 aa, synthetic construct
RGDANKT

SEQ ID NO: 9385 - protein, 7 aa, synthetic construct
RGDIHLS

SEQ ID NO: 9386 - protein, 7 aa, synthetic construct
RGDIHQT

SEQ ID NO: 9387 - protein, 7 aa, synthetic construct
RGDIIKN

SEQ ID NO: 9388 - protein, 7 aa, synthetic construct
RGDILKH

SEQ ID NO: 9389 - protein, 7 aa, synthetic construct
RGDIQAK

SEQ ID NO: 9390 - protein, 7 aa, synthetic construct
RGDIQTK

SEQ ID NO: 9391 - protein, 7 aa, synthetic construct
RGDIRHH

SEQ ID NO: 9392 - protein, 7 aa, synthetic construct
RGDIRTK

SEQ ID NO: 9393 - protein, 7 aa, synthetic construct
RGDISGS

SEQ ID NO: 9394 - protein, 7 aa, synthetic construct
RGDISVH

SEQ ID NO: 9395 - protein, 7 aa, synthetic construct
RGDITKT

SEQ ID NO: 9396 - protein, 7 aa, synthetic construct
RGDIVGF

SEQ ID NO: 9397 - protein, 7 aa, synthetic construct
RGDKAHN

SEQ ID NO: 9398 - protein, 7 aa, synthetic construct
RGDKAHS

SEQ ID NO: 9399 - protein, 7 aa, synthetic construct
RGDKAST

SEQ ID NO: 9400 - protein, 7 aa, synthetic construct
RGDKAVT

SEQ ID NO: 9401 - protein, 7 aa, synthetic construct
RGDKGTL

SEQ ID NO: 9402 - protein, 7 aa, synthetic construct
RGDKHAI

SEQ ID NO: 9403 - protein, 7 aa, synthetic construct
RGDKKDH

SEQ ID NO: 9404 - protein, 7 aa, synthetic construct
RGDKKGD

SEQ ID NO: 9405 - protein, 7 aa, synthetic construct
RGDKKGL

SEQ ID NO: 9406 - protein, 7 aa, synthetic construct
RGDKKNI

SEQ ID NO: 9407 - protein, 7 aa, synthetic construct
RGDKNSR

SEQ ID NO: 9408 - protein, 7 aa, synthetic construct
RGDKQDI

SEQ ID NO: 9409 - protein, 7 aa, synthetic construct
RGDKRNN

SEQ ID NO: 9410 - protein, 7 aa, synthetic construct
RGDKSNF

SEQ ID NO: 9411 - protein, 7 aa, synthetic construct
RGDLANV

SEQ ID NO: 9412 - protein, 7 aa, synthetic construct
RGDLAVT

SEQ ID NO: 9413 - protein, 7 aa, synthetic construct
RGDLDTN

SEQ ID NO: 9414 - protein, 7 aa, synthetic construct
RGDLIHV

SEQ ID NO: 9415 - protein, 7 aa, synthetic construct
RGDLKHI

SEQ ID NO: 9416 - protein, 7 aa, synthetic construct
RGDLKLT

SEQ ID NO: 9417 - protein, 7 aa, synthetic construct
RGDLKSH

SEQ ID NO: 9418 - protein, 7 aa, synthetic construct
RGDLKVR

SEQ ID NO: 9419 - protein, 7 aa, synthetic construct
RGDLLSH

SEQ ID NO: 9420 - protein, 7 aa, synthetic construct
RGDLNHG

SEQ ID NO: 9421 - protein, 7 aa, synthetic construct
RGDLQHV

SEQ ID NO: 9422 - protein, 7 aa, synthetic construct
RGDLRKS

SEQ ID NO: 9423 - protein, 7 aa, synthetic construct
RGDNAKR

SEQ ID NO: 9424 - protein, 7 aa, synthetic construct
RGDATRI

SEQ ID NO: 9425 - protein, 7 aa, synthetic construct
RGDNERT

SEQ ID NO: 9426 - protein, 7 aa, synthetic construct
RGDNGHG

SEQ ID NO: 9427 - protein, 7 aa, synthetic construct
RGDNHGL

SEQ ID NO: 9428 - protein, 7 aa, synthetic construct
RGDNHRQ

SEQ ID NO: 9429 - protein, 7 aa, synthetic construct
RGDNHST

SEQ ID NO: 9430 - protein, 7 aa, synthetic construct
RGDNLTF

SEQ ID NO: 9431 - protein, 7 aa, synthetic construct
RGDNSRA

SEQ ID NO: 9432 - protein, 7 aa, synthetic construct
RGDNTRK

SEQ ID NO: 9433 - protein, 7 aa, synthetic construct
RGDQAHK

SEQ ID NO: 9434 - protein, 7 aa, synthetic construct
RGDQAVR

SEQ ID NO: 9435 - protein, 7 aa, synthetic construct
RGDDAGG

SEQ ID NO: 9436 - protein, 7 aa, synthetic construct
RGDQHHR

SEQ ID NO: 9437 - protein, 7 aa, synthetic construct
RGDQHRR

SEQ ID NO: 9438 - protein, 7 aa, synthetic construct
RGDQKAL

SEQ ID NO: 9439 - protein, 7 aa, synthetic construct
RGDQLKN

SEQ ID NO: 9440 - protein, 7 aa, synthetic construct
RGDQLQT

SEQ ID NO: 9441 - protein, 7 aa, synthetic construct
RGDQRFN

SEQ ID NO: 9442 - protein, 7 aa, synthetic construct
RGDQRNG

SEQ ID NO: 9443 - protein, 7 aa, synthetic construct
RGDQSGA

SEQ ID NO: 9444 - protein, 7 aa, synthetic construct
RGDQTGV

SEQ ID NO: 9445 - protein, 7 aa, synthetic construct
RGDQVRQ

SEQ ID NO: 9446 - protein, 7 aa, synthetic construct
RGDREED

SEQ ID NO: 9447 - protein, 7 aa, synthetic construct
RGDREER

SEQ ID NO: 9448 - protein, 7 aa, synthetic construct
RGDREHG

SEQ ID NO: 9449 - protein, 7 aa, synthetic construct
RGDRFHV

SEQ ID NO: 9450 - protein, 7 aa, synthetic construct
RGDDDTV

SEQ ID NO: 9451 - protein, 7 aa, synthetic construct
RGDRGHS

SEQ ID NO: 9452 - protein, 7 aa, synthetic construct
RGDRISH

SEQ ID NO: 9453 - protein, 7 aa, synthetic construct
RGDRKHF

SEQ ID NO: 9454 - protein, 7 aa, synthetic construct
RGDRLGR

SEQ ID NO: 9455 - protein, 7 aa, synthetic construct
RGDRNVN

SEQ ID NO: 9456 - protein, 7 aa, synthetic construct
RGDRQDF

SEQ ID NO: 9457 - protein, 7 aa, synthetic construct
RGDRTAS

SEQ ID NO: 9458 - protein, 7 aa, synthetic construct
RGDDESF

SEQ ID NO: 9459 - protein, 7 aa, synthetic construct
RGDDESL

SEQ ID NO: 9460 - protein, 7 aa, synthetic construct
RGDRTKF

SEQ ID NO: 9461 - protein, 7 aa, synthetic construct
RGDRTNG

SEQ ID NO: 9462 - protein, 7 aa, synthetic construct
RGDRVTT

SEQ ID NO: 9463 - protein, 7 aa, synthetic construct
RGDRVVH

SEQ ID NO: 9464 - protein, 7 aa, synthetic construct
RGDSAVQ

SEQ ID NO: 9465 - protein, 7 aa, synthetic construct
RGDSDGR

SEQ ID NO: 9466 - protein, 7 aa, synthetic construct
RGDSFRI

SEQ ID NO: 9467 - protein, 7 aa, synthetic construct
RGDSGII

SEQ ID NO: 9468 - protein, 7 aa, synthetic construct
RGDSHHI

SEQ ID NO: 9469 - protein, 7 aa, synthetic construct
RGDSIFR

SEQ ID NO: 9470 - protein, 7 aa, synthetic construct
RGDSIKT

SEQ ID NO: 9471 - protein, 7 aa, synthetic construct
RGDSKTV

SEQ ID NO: 9472 - protein, 7 aa, synthetic construct
RGDSNEG

SEQ ID NO: 9473 - protein, 7 aa, synthetic construct
RGDSQRF

SEQ ID NO: 9474 - protein, 7 aa, synthetic construct
RGDSTKN

SEQ ID NO: 9475 - protein, 7 aa, synthetic construct
RGDTENT

SEQ ID NO: 9476 - protein, 7 aa, synthetic construct
RGDTESL

SEQ ID NO: 9477 - protein, 7 aa, synthetic construct
RGDTGKK

SEQ ID NO: 9478 - protein, 7 aa, synthetic construct
RGDTHFQ

SEQ ID NO: 9479 - protein, 7 aa, synthetic construct
RGDTKKT

SEQ ID NO: 9480 - protein, 7 aa, synthetic construct
RGDTKLN

SEQ ID NO: 9481 - protein, 7 aa, synthetic construct
RGDTKNT

SEQ ID NO: 9482 - protein, 7 aa, synthetic construct
RGDTLFK

SEQ ID NO: 9483 - protein, 7 aa, synthetic construct
RGDTSFL

SEQ ID NO: 9484 - protein, 7 aa, synthetic construct
RGDTSHV

SEQ ID NO: 9485 - protein, 7 aa, synthetic construct
RGDTSQF

SEQ ID NO: 9486 - protein, 7 aa, synthetic construct
RGDVEHR

SEQ ID NO: 9487 - protein, 7 aa, synthetic construct
RGDVFVG

SEQ ID NO: 9488 - protein, 7 aa, synthetic construct
RGDDIKF

SEQ ID NO: 9489 - protein, 7 aa, synthetic construct
RGDVGVK

SEQ ID NO: 9490 - protein, 7 aa, synthetic construct
RGDVIKV

SEQ ID NO: 9491 - protein, 7 aa, synthetic construct
RGDVKDR

SEQ ID NO: 9492 - protein, 7 aa, synthetic construct
RGDVLGL

SEQ ID NO: 9493 - protein, 7 aa, synthetic construct
RGDVLSI

SEQ ID NO: 9494 - protein, 7 aa, synthetic construct
RGDVLVT

SEQ ID NO: 9495 - protein, 7 aa, synthetic construct
RGDVNFI

SEQ ID NO: 9496 - protein, 7 aa, synthetic construct
RGDVNIK

SEQ ID NO: 9497 - protein, 7 aa, synthetic construct
RGDVTHF

SEQ ID NO: 9498 - protein, 7 aa, synthetic construct
RGDVTKT

SEQ ID NO: 9499 - protein, 7 aa, synthetic construct
RGDVTRH

SEQ ID NO: 9500 - protein, 7 aa, synthetic construct
RGDVVTH

SEQ ID NO: 9501 - protein, 7 aa, synthetic construct
RGDDLRN

SEQ ID NO: 9502 - protein, 7 aa, synthetic construct
RGDDSDN

SEQ ID NO: 9503 - protein, 7 aa, synthetic construct
RGDAEQR

SEQ ID NO: 9504 - protein, 7 aa, synthetic construct
RGDDVHF

SEQ ID NO: 9505 - protein, 7 aa, synthetic construct
RGDEKHR

SEQ ID NO: 9506 - protein, 7 aa, synthetic construct
RGDAGGK

SEQ ID NO: 9507 - protein, 7 aa, synthetic construct
RGDFAVA

SEQ ID NO: 9508 - protein, 7 aa, synthetic construct
RGDFDRH

SEQ ID NO: 9509 - protein, 7 aa, synthetic construct
RGDFEAK

SEQ ID NO: 9510 - protein, 7 aa, synthetic construct
RGDFEVV

SEQ ID NO: 9511 - protein, 7 aa, synthetic construct
RGDFFET

SEQ ID NO: 9512 - protein, 7 aa, synthetic construct
RGDFFKL

SEQ ID NO: 9513 - protein, 7 aa, synthetic construct
RGDFFVV

SEQ ID NO: 9514 - protein, 7 aa, synthetic construct
RGDFGDK

SEQ ID NO: 9515 - protein, 7 aa, synthetic construct
RGDFGDT

SEQ ID NO: 9516 - protein, 7 aa, synthetic construct
RGDFGFL

SEQ ID NO: 9517 - protein, 7 aa, synthetic construct
RGDFGGI

SEQ ID NO: 9518 - protein, 7 aa, synthetic construct
RGDFGQS

SEQ ID NO: 9519 - protein, 7 aa, synthetic construct
RGDFKFT

SEQ ID NO: 9520 - protein, 7 aa, synthetic construct
RGDFNHQ

SEQ ID NO: 9521 - protein, 7 aa, synthetic construct
RGDFQGS

SEQ ID NO: 9522 - protein, 7 aa, synthetic construct
RGDFRSL

SEQ ID NO: 9523 - protein, 7 aa, synthetic construct
RGDFRST

SEQ ID NO: 9524 - protein, 7 aa, synthetic construct
RGDFRTI

SEQ ID NO: 9525 - protein, 7 aa, synthetic construct
RGDFSSG

SEQ ID NO: 9526 - protein, 7 aa, synthetic construct
RGDFTKR

SEQ ID NO: 9527 - protein, 7 aa, synthetic construct
RGDAHSR

SEQ ID NO: 9528 - protein, 7 aa, synthetic construct
RGDFVRI

SEQ ID NO: 9529 - protein, 7 aa, synthetic construct
RGDGFTF

SEQ ID NO: 9530 - protein, 7 aa, synthetic construct
RGDGGGI

SEQ ID NO: 9531 - protein, 7 aa, synthetic construct
RGDGGSS

SEQ ID NO: 9532 - protein, 7 aa, synthetic construct
RGDGHKF

SEQ ID NO: 9533 - protein, 7 aa, synthetic construct
RGDGHNV

SEQ ID NO: 9534 - protein, 7 aa, synthetic construct
RGDGKNE

SEQ ID NO: 9535 - protein, 7 aa, synthetic construct
RGDGKRF

SEQ ID NO: 9536 - protein, 7 aa, synthetic construct
RGDGLEF

SEQ ID NO: 9537 - protein, 7 aa, synthetic construct
RGDGNHV

SEQ ID NO: 9538 - protein, 7 aa, synthetic construct
RGDGNKL

SEQ ID NO: 9539 - protein, 7 aa, synthetic construct
RGDGQRV

SEQ ID NO: 9540 - protein, 7 aa, synthetic construct
RGDGREF

SEQ ID NO: 9541 - protein, 7 aa, synthetic construct
RGDGRRH

SEQ ID NO: 9542 - protein, 7 aa, synthetic construct
RGDGSGI

SEQ ID NO: 9543 - protein, 7 aa, synthetic construct
RGDGSGS

SEQ ID NO: 9544 - protein, 7 aa, synthetic construct
RGDAKFL

SEQ ID NO: 9545 - protein, 7 aa, synthetic construct
RGDAKHK

SEQ ID NO: 9546 - protein, 7 aa, synthetic construct
RGDGTQI

SEQ ID NO: 9547 - protein, 7 aa, synthetic construct
RGDGVAL

SEQ ID NO: 9548 - protein, 7 aa, synthetic construct
RGDGVKK

SEQ ID NO: 9549 - protein, 7 aa, synthetic construct
RGDGVRN

SEQ ID NO: 9550 - protein, 7 aa, synthetic construct
RGDHATH

SEQ ID NO: 9551 - protein, 7 aa, synthetic construct
RGDHDLG

SEQ ID NO: 9552 - protein, 7 aa, synthetic construct
RGDHDNL

SEQ ID NO: 9553 - protein, 7 aa, synthetic construct
RGDHGAH

SEQ ID NO: 9554 - protein, 7 aa, synthetic construct
RGDHGIT

SEQ ID NO: 9555 - protein, 7 aa, synthetic construct
RGDHGKL

SEQ ID NO: 9556 - protein, 7 aa, synthetic construct
RGDHIDL

SEQ ID NO: 9557 - protein, 7 aa, synthetic construct
RGDHISK

SEQ ID NO: 9558 - protein, 7 aa, synthetic construct
RGDHNHF

SEQ ID NO: 9559 - protein, 7 aa, synthetic construct
RGDHSKH

SEQ ID NO: 9560 - protein, 7 aa, synthetic construct
RGDHVAH

SEQ ID NO: 9561 - protein, 7 aa, synthetic construct
RGDHVRL

SEQ ID NO: 9562 - protein, 7 aa, synthetic construct
RGDIHLK

SEQ ID NO: 9563 - protein, 7 aa, synthetic construct
RGDIHQN

SEQ ID NO: 9564 - protein, 7 aa, synthetic construct
RGDILAH

SEQ ID NO: 9565 - protein, 7 aa, synthetic construct
RGDILTS

SEQ ID NO: 9566 - protein, 7 aa, synthetic construct
RGDIQSN

SEQ ID NO: 9567 - protein, 7 aa, synthetic construct
RGDIRHT

SEQ ID NO: 9568 - protein, 7 aa, synthetic construct
RGDIRIL

SEQ ID NO: 9569 - protein, 7 aa, synthetic construct
RGDISDK

SEQ ID NO: 9570 - protein, 7 aa, synthetic construct
RGDISLK

SEQ ID NO: 9571 - protein, 7 aa, synthetic construct
RGDISSH

SEQ ID NO: 9572 - protein, 7 aa, synthetic construct
RGDAQHE

SEQ ID NO: 9573 - protein, 7 aa, synthetic construct
RGDKAFF

SEQ ID NO: 9574 - protein, 7 aa, synthetic construct
RGDKDIK

SEQ ID NO: 9575 - protein, 7 aa, synthetic construct
RGDKDKA

SEQ ID NO: 9576 - protein, 7 aa, synthetic construct
RGDKEGH

SEQ ID NO: 9577 - protein, 7 aa, synthetic construct
RGDKFFL

SEQ ID NO: 9578 - protein, 7 aa, synthetic construct
RGDKGEG

SEQ ID NO: 9579 - protein, 7 aa, synthetic construct
RGDKGHN

SEQ ID NO: 9580 - protein, 7 aa, synthetic construct
RGDKGVN

SEQ ID NO: 9581 - protein, 7 aa, synthetic construct
RGDKHLI

SEQ ID NO: 9582 - protein, 7 aa, synthetic construct
RGDKIKL

SEQ ID NO: 9583 - protein, 7 aa, synthetic construct
RGDKLKE

SEQ ID NO: 9584 - protein, 7 aa, synthetic construct
RGDKNNF

SEQ ID NO: 9585 - protein, 7 aa, synthetic construct
RGDKQAL

SEQ ID NO: 9586 - protein, 7 aa, synthetic construct
RGDKQDL

SEQ ID NO: 9587 - protein, 7 aa, synthetic construct
RGDKQQR

SEQ ID NO: 9588 - protein, 7 aa, synthetic construct
RGDKRAV

SEQ ID NO: 9589 - protein, 7 aa, synthetic construct
RGDASAV

SEQ ID NO: 9590 - protein, 7 aa, synthetic construct
RGDLATG

SEQ ID NO: 9591 - protein, 7 aa, synthetic construct
RGDLEQA

SEQ ID NO: 9592 - protein, 7 aa, synthetic construct
RGDASGN

SEQ ID NO: 9593 - protein, 7 aa, synthetic construct
RGDLGGA

SEQ ID NO: 9594 - protein, 7 aa, synthetic construct
RGDLGRL

SEQ ID NO: 9595 - protein, 7 aa, synthetic construct
RGDLIVK

SEQ ID NO: 9596 - protein, 7 aa, synthetic construct
RGDLKID

SEQ ID NO: 9597 - protein, 7 aa, synthetic construct
RGDLKQV

SEQ ID NO: 9598 - protein, 7 aa, synthetic construct
RGDLLLE

SEQ ID NO: 9599 - protein, 7 aa, synthetic construct
RGDASVQ

SEQ ID NO: 9600 - protein, 7 aa, synthetic construct
RGDLRET

SEQ ID NO: 9601 - protein, 7 aa, synthetic construct
RGDLRHS

SEQ ID NO: 9602 - protein, 7 aa, synthetic construct
RGDLRSN

SEQ ID NO: 9603 - protein, 7 aa, synthetic construct
RGDLRVN

SEQ ID NO: 9604 - protein, 7 aa, synthetic construct
RGDLVHG

SEQ ID NO: 9605 - protein, 7 aa, synthetic construct
RGDLVNT

SEQ ID NO: 9606 - protein, 7 aa, synthetic construct
RGDLVSV

SEQ ID NO: 9607 - protein, 7 aa, synthetic construct
RGDNDVR

SEQ ID NO: 9608 - protein, 7 aa, synthetic construct
RGDNGVR

SEQ ID NO: 9609 - protein, 7 aa, synthetic construct
RGDNHKL

SEQ ID NO: 9610 - protein, 7 aa, synthetic construct
RGDNHQQ

SEQ ID NO: 9611 - protein, 7 aa, synthetic construct
RGDNKKT

SEQ ID NO: 9612 - protein, 7 aa, synthetic construct
RGDNNRK

SEQ ID NO: 9613 - protein, 7 aa, synthetic construct
RGDNQFQ

SEQ ID NO: 9614 - protein, 7 aa, synthetic construct
RGDNQHV

SEQ ID NO: 9615 - protein, 7 aa, synthetic construct
RGDNRDQ

SEQ ID NO: 9616 - protein, 7 aa, synthetic construct
RGDAVNI

SEQ ID NO: 9617 - protein, 7 aa, synthetic construct
RGDNTRI

SEQ ID NO: 9618 - protein, 7 aa, synthetic construct
RGDQAVK

SEQ ID NO: 9619 - protein, 7 aa, synthetic construct
RGDQEHF

SEQ ID NO: 9620 - protein, 7 aa, synthetic construct
RGDQFKR

SEQ ID NO: 9621 - protein, 7 aa, synthetic construct
RGDQFSH

SEQ ID NO: 9622 - protein, 7 aa, synthetic construct
RGDQGSR

SEQ ID NO: 9623 - protein, 7 aa, synthetic construct
RGDQHEV

SEQ ID NO: 9624 - protein, 7 aa, synthetic construct
RGDQHHI

SEQ ID NO: 9625 - protein, 7 aa, synthetic construct
RGDQHNN

SEQ ID NO: 9626 - protein, 7 aa, synthetic construct
RGDQNHI

SEQ ID NO: 9627 - protein, 7 aa, synthetic construct
RGDQNTR

SEQ ID NO: 9628 - protein, 7 aa, synthetic construct
RGDQQKV

SEQ ID NO: 9629 - protein, 7 aa, synthetic construct
RGDQQRK

SEQ ID NO: 9630 - protein, 7 aa, synthetic construct
RGDQRVF

SEQ ID NO: 9631 - protein, 7 aa, synthetic construct
RGDQTAV

SEQ ID NO: 9632 - protein, 7 aa, synthetic construct
RGDQTEH

SEQ ID NO: 9633 - protein, 7 aa, synthetic construct
RGDQVLK

SEQ ID NO: 9634 - protein, 7 aa, synthetic construct
RGDQVVI

SEQ ID NO: 9635 - protein, 7 aa, synthetic construct
RGDRDFV

SEQ ID NO: 9636 - protein, 7 aa, synthetic construct
RGDRDTI

SEQ ID NO: 9637 - protein, 7 aa, synthetic construct
RGDREIQ

SEQ ID NO: 9638 - protein, 7 aa, synthetic construct
RGDRETQ

SEQ ID NO: 9639 - protein, 7 aa, synthetic construct
RGDREVK

SEQ ID NO: 9640 - protein, 7 aa, synthetic construct
RGDRFGR

SEQ ID NO: 9641 - protein, 7 aa, synthetic construct
RGDRFKK

SEQ ID NO: 9642 - protein, 7 aa, synthetic construct
RGDRFNG

SEQ ID NO: 9643 - protein, 7 aa, synthetic construct
RGDRGEV

SEQ ID NO: 9644 - protein, 7 aa, synthetic construct
RGDRGKT

SEQ ID NO: 9645 - protein, 7 aa, synthetic construct
RGDRHGT

SEQ ID NO: 9646 - protein, 7 aa, synthetic construct
RGDRHTL

SEQ ID NO: 9647 - protein, 7 aa, synthetic construct
RGDRHTS

SEQ ID NO: 9648 - protein, 7 aa, synthetic construct
RGDRHVE

SEQ ID NO: 9649 - protein, 7 aa, synthetic construct
RGDRIEA

SEQ ID NO: 9650 - protein, 7 aa, synthetic construct
RGDRKHQ

SEQ ID NO: 9651 - protein, 7 aa, synthetic construct
RGDRKRH

SEQ ID NO: 9652 - protein, 7 aa, synthetic construct
RGDRNIA

SEQ ID NO: 9653 - protein, 7 aa, synthetic construct
RGDRNQV

SEQ ID NO: 9654 - protein, 7 aa, synthetic construct
RGDRNRI

SEQ ID NO: 9655 - protein, 7 aa, synthetic construct
RGDRNTN

SEQ ID NO: 9656 - protein, 7 aa, synthetic construct
RGDRREE

SEQ ID NO: 9657 - protein, 7 aa, synthetic construct
RGDRRTG

SEQ ID NO: 9658 - protein, 7 aa, synthetic construct
RGDRTHI

SEQ ID NO: 9659 - protein, 7 aa, synthetic construct
RGDRTRL

SEQ ID NO: 9660 - protein, 7 aa, synthetic construct
RGDRTTH

SEQ ID NO: 9661 - protein, 7 aa, synthetic construct
RGDRVQN

SEQ ID NO: 9662 - protein, 7 aa, synthetic construct
RGDRVSQ

SEQ ID NO: 9663 - protein, 7 aa, synthetic construct
RGDSDFR

SEQ ID NO: 9664 - protein, 7 aa, synthetic construct
RGDSDSG

SEQ ID NO: 9665 - protein, 7 aa, synthetic construct
RGDSESL

SEQ ID NO: 9666 - protein, 7 aa, synthetic construct
RGDSEVF

SEQ ID NO: 9667 - protein, 7 aa, synthetic construct
RGDSHGL

SEQ ID NO: 9668 - protein, 7 aa, synthetic construct
RGDSHHT

SEQ ID NO: 9669 - protein, 7 aa, synthetic construct
RGDSHRA

SEQ ID NO: 9670 - protein, 7 aa, synthetic construct
RGDSHSK

SEQ ID NO: 9671 - protein, 7 aa, synthetic construct
RGDSLKQ

SEQ ID NO: 9672 - protein, 7 aa, synthetic construct
RGDSNSL

SEQ ID NO: 9673 - protein, 7 aa, synthetic construct
RGDSQEK

SEQ ID NO: 9674 - protein, 7 aa, synthetic construct
RGDSRFN

SEQ ID NO: 9675 - protein, 7 aa, synthetic construct
RGDSRGV

SEQ ID NO: 9676 - protein, 7 aa, synthetic construct
RGDSRVH

SEQ ID NO: 9677 - protein, 7 aa, synthetic construct
RGDSSEV

SEQ ID NO: 9678 - protein, 7 aa, synthetic construct
RGDSTAS

SEQ ID NO: 9679 - protein, 7 aa, synthetic construct
RGDSTVV

SEQ ID NO: 9680 - protein, 7 aa, synthetic construct
RGDSVAI

SEQ ID NO: 9681 - protein, 7 aa, synthetic construct
RGDSVQK

SEQ ID NO: 9682 - protein, 7 aa, synthetic construct
RGDSVTR

SEQ ID NO: 9683 - protein, 7 aa, synthetic construct
RGDTAFL

SEQ ID NO: 9684 - protein, 7 aa, synthetic construct
RGDTHTL

SEQ ID NO: 9685 - protein, 7 aa, synthetic construct
RGDTHTV

SEQ ID NO: 9686 - protein, 7 aa, synthetic construct
RGDTIVV

SEQ ID NO: 9687 - protein, 7 aa, synthetic construct
RGDTKLR

SEQ ID NO: 9688 - protein, 7 aa, synthetic construct
RGDTKTQ

SEQ ID NO: 9689 - protein, 7 aa, synthetic construct
RGDTLDN

SEQ ID NO: 9690 - protein, 7 aa, synthetic construct
RGDTRTH

SEQ ID NO: 9691 - protein, 7 aa, synthetic construct
RGDTSFG

SEQ ID NO: 9692 - protein, 7 aa, synthetic construct
RGDTVHK

SEQ ID NO: 9693 - protein, 7 aa, synthetic construct
RGDTVQH

SEQ ID NO: 9694 - protein, 7 aa, synthetic construct
RGDVAHN

SEQ ID NO: 9695 - protein, 7 aa, synthetic construct
RGDVHLT

SEQ ID NO: 9696 - protein, 7 aa, synthetic construct
RGDVHVK

SEQ ID NO: 9697 - protein, 7 aa, synthetic construct
RGDVHVQ

SEQ ID NO: 9698 - protein, 7 aa, synthetic construct
RGDVKLH

SEQ ID NO: 9699 - protein, 7 aa, synthetic construct
RGDVLAQ

SEQ ID NO: 9700 - protein, 7 aa, synthetic construct
RGDVLSD

SEQ ID NO: 9701 - protein, 7 aa, synthetic construct
RGDVLTK

SEQ ID NO: 9702 - protein, 7 aa, synthetic construct
RGDVNKI

SEQ ID NO: 9703 - protein, 7 aa, synthetic construct
RGDVRGA

SEQ ID NO: 9704 - protein, 7 aa, synthetic construct
RGDVRHK

SEQ ID NO: 9705 - protein, 7 aa, synthetic construct
RGDVRNR

SEQ ID NO: 9706 - protein, 7 aa, synthetic construct
RGDVRQE

SEQ ID NO: 9707 - protein, 7 aa, synthetic construct
RGDVRSS

SEQ ID NO: 9708 - protein, 7 aa, synthetic construct
RGDVRTR

SEQ ID NO: 9709 - protein, 7 aa, synthetic construct
RGDVRTT

SEQ ID NO: 9710 - protein, 7 aa, synthetic construct
RGDVSFS

SEQ ID NO: 9711 - protein, 7 aa, synthetic construct
RGDVSGG

SEQ ID NO: 9712 - protein, 7 aa, synthetic construct
RGDVSHK

SEQ ID NO: 9713 - protein, 7 aa, synthetic construct
RGDVTLV

SEQ ID NO: 9714 - protein, 7 aa, synthetic construct
RGDVVFV

SEQ ID NO: 9715 - protein, 7 aa, synthetic construct
RGDVVSG

SEQ ID NO: 9716 - protein, 7 aa, synthetic construct
RGDDLKN

SEQ ID NO: 9717 - protein, 7 aa, synthetic construct
RGDDLNK

SEQ ID NO: 9718 - protein, 7 aa, synthetic construct
RGDDLRT

SEQ ID NO: 9719 - protein, 7 aa, synthetic construct
RGDDNQF

SEQ ID NO: 9720 - protein, 7 aa, synthetic construct
RGDDSIQ

SEQ ID NO: 9721 - protein, 7 aa, synthetic construct
RGDEEEL

SEQ ID NO: 9722 - protein, 7 aa, synthetic construct
RGDAFFL

SEQ ID NO: 9723 - protein, 7 aa, synthetic construct
RGDEGRD

SEQ ID NO: 9724 - protein, 7 aa, synthetic construct
RGDEGSK

SEQ ID NO: 9725 - protein, 7 aa, synthetic construct
RGDEHHG

SEQ ID NO: 9726 - protein, 7 aa, synthetic construct
RGDEIHN

SEQ ID NO: 9727 - protein, 7 aa, synthetic construct
RGDENKG

SEQ ID NO: 9728 - protein, 7 aa, synthetic construct
RGDENNL

SEQ ID NO: 9729 - protein, 7 aa, synthetic construct
RGDFAHA

SEQ ID NO: 9730 - protein, 7 aa, synthetic construct
RGDFARV

SEQ ID NO: 9731 - protein, 7 aa, synthetic construct
RGDFATR

SEQ ID NO: 9732 - protein, 7 aa, synthetic construct
RGDFEFQ

SEQ ID NO: 9733 - protein, 7 aa, synthetic construct
RGDFFIH

SEQ ID NO: 9734 - protein, 7 aa, synthetic construct
RGDFFQG

SEQ ID NO: 9735 - protein, 7 aa, synthetic construct
RGDFGIS

SEQ ID NO: 9736 - protein, 7 aa, synthetic construct
RGDAGVV

SEQ ID NO: 9737 - protein, 7 aa, synthetic construct
RGDFHQS

SEQ ID NO: 9738 - protein, 7 aa, synthetic construct
RGDFIKK

SEQ ID NO: 9739 - protein, 7 aa, synthetic construct
RGDFQGR

SEQ ID NO: 9740 - protein, 7 aa, synthetic construct
RGDFQKT

SEQ ID NO: 9741 - protein, 7 aa, synthetic construct
RGDFQTK

SEQ ID NO: 9742 - protein, 7 aa, synthetic construct
RGDFRLK

SEQ ID NO: 9743 - protein, 7 aa, synthetic construct
RGDFRTF

SEQ ID NO: 9744 - protein, 7 aa, synthetic construct
RGDFSFV

SEQ ID NO: 9745 - protein, 7 aa, synthetic construct
RGDFTTQ

SEQ ID NO: 9746 - protein, 7 aa, synthetic construct
RGDFVIK

SEQ ID NO: 9747 - protein, 7 aa, synthetic construct
RGDFVTT

SEQ ID NO: 9748 - protein, 7 aa, synthetic construct
RGDGAII

SEQ ID NO: 9749 - protein, 7 aa, synthetic construct
RGDGDIL

SEQ ID NO: 9750 - protein, 7 aa, synthetic construct
RGDAIFV

SEQ ID NO: 9751 - protein, 7 aa, synthetic construct
RGDGFER

SEQ ID NO: 9752 - protein, 7 aa, synthetic construct
RGDGFNI

SEQ ID NO: 9753 - protein, 7 aa, synthetic construct
RGDGHTQ

SEQ ID NO: 9754 - protein, 7 aa, synthetic construct
RGDGIHT

SEQ ID NO: 9755 - protein, 7 aa, synthetic construct
RGDGKAI

SEQ ID NO: 9756 - protein, 7 aa, synthetic construct
RGDGKFK

SEQ ID NO: 9757 - protein, 7 aa, synthetic construct
RGDAITL

SEQ ID NO: 9758 - protein, 7 aa, synthetic construct
RGDGNHI

SEQ ID NO: 9759 - protein, 7 aa, synthetic construct
RGDGQGG

SEQ ID NO: 9760 - protein, 7 aa, synthetic construct
RGDHANF

SEQ ID NO: 9761 - protein, 7 aa, synthetic construct
RGDHDKV

SEQ ID NO: 9762 - protein, 7 aa, synthetic construct
RGDHDQN

SEQ ID NO: 9763 - protein, 7 aa, synthetic construct
RGDHEAK

SEQ ID NO: 9764 - protein, 7 aa, synthetic construct
RGDHEFR

SEQ ID NO: 9765 - protein, 7 aa, synthetic construct
RGDHERQ

SEQ ID NO: 9766 - protein, 7 aa, synthetic construct
RGDHFSL

SEQ ID NO: 9767 - protein, 7 aa, synthetic construct
RGDHGHS

SEQ ID NO: 9768 - protein, 7 aa, synthetic construct
RGDHGLA

SEQ ID NO: 9769 - protein, 7 aa, synthetic construct
RGDHHDS

SEQ ID NO: 9770 - protein, 7 aa, synthetic construct
RGDHHSK

SEQ ID NO: 9771 - protein, 7 aa, synthetic construct
RGDHIDR

SEQ ID NO: 9772 - protein, 7 aa, synthetic construct
RGDHIGV

SEQ ID NO: 9773 - protein, 7 aa, synthetic construct
RGDHKNS

SEQ ID NO: 9774 - protein, 7 aa, synthetic construct
RGDHLDR

SEQ ID NO: 9775 - protein, 7 aa, synthetic construct
RGDHLQQ

SEQ ID NO: 9776 - protein, 7 aa, synthetic construct
RGDHNEQ

SEQ ID NO: 9777 - protein, 7 aa, synthetic construct
RGDHNTT

SEQ ID NO: 9778 - protein, 7 aa, synthetic construct
RGDALKI

SEQ ID NO: 9779 - protein, 7 aa, synthetic construct
RGDHSKQ

SEQ ID NO: 9780 - protein, 7 aa, synthetic construct
RGDHSVQ

SEQ ID NO: 9781 - protein, 7 aa, synthetic construct
RGDHTEK

SEQ ID NO: 9782 - protein, 7 aa, synthetic construct
RGDHTHT

SEQ ID NO: 9783 - protein, 7 aa, synthetic construct
RGDHTKI

SEQ ID NO: 9784 - protein, 7 aa, synthetic construct
RGDHVDL

SEQ ID NO: 9785 - protein, 7 aa, synthetic construct
RGDHVVV

SEQ ID NO: 9786 - protein, 7 aa, synthetic construct
RGDIATK

SEQ ID NO: 9787 - protein, 7 aa, synthetic construct
RGDIFNL

SEQ ID NO: 9788 - protein, 7 aa, synthetic construct
RGDIHHE

SEQ ID NO: 9789 - protein, 7 aa, synthetic construct
RGDIHQK

SEQ ID NO: 9790 - protein, 7 aa, synthetic construct
RGDIKIT

SEQ ID NO: 9791 - protein, 7 aa, synthetic construct
RGDIKLQ

SEQ ID NO: 9792 - protein, 7 aa, synthetic construct
RGDILAI

SEQ ID NO: 9793 - protein, 7 aa, synthetic construct
RGDILHI

SEQ ID NO: 9794 - protein, 7 aa, synthetic construct
RGDISFH

SEQ ID NO: 9795 - protein, 7 aa, synthetic construct
RGDISFN

SEQ ID NO: 9796 - protein, 7 aa, synthetic construct
RGDISIR

SEQ ID NO: 9797 - protein, 7 aa, synthetic construct
RGDITKL

SEQ ID NO: 9798 - protein, 7 aa, synthetic construct
RGDIVIL

SEQ ID NO: 9799 - protein, 7 aa, synthetic construct
RGDIVVK

SEQ ID NO: 9800 - protein, 7 aa, synthetic construct
RGDKALQ

SEQ ID NO: 9801 - protein, 7 aa, synthetic construct
RGDKDTL

SEQ ID NO: 9802 - protein, 7 aa, synthetic construct
RGDKGDN

SEQ ID NO: 9803 - protein, 7 aa, synthetic construct
RGDKGNS

SEQ ID NO: 9804 - protein, 7 aa, synthetic construct
RGDKGSS

SEQ ID NO: 9805 - protein, 7 aa, synthetic construct
RGDKHGK

SEQ ID NO: 9806 - protein, 7 aa, synthetic construct
RGDKKES

SEQ ID NO: 9807 - protein, 7 aa, synthetic construct
RGDKKFS

SEQ ID NO: 9808 - protein, 7 aa, synthetic construct
RGDKLVH

SEQ ID NO: 9809 - protein, 7 aa, synthetic construct
RGDKNEQ

SEQ ID NO: 9810 - protein, 7 aa, synthetic construct
RGDARKA

SEQ ID NO: 9811 - protein, 7 aa, synthetic construct
RGDKRDF

SEQ ID NO: 9812 - protein, 7 aa, synthetic construct
RGDKRDQ

SEQ ID NO: 9813 - protein, 7 aa, synthetic construct
RGDKRFA

SEQ ID NO: 9814 - protein, 7 aa, synthetic construct
RGDKRIT

SEQ ID NO: 9815 - protein, 7 aa, synthetic construct
RGDKRIV

SEQ ID NO: 9816 - protein, 7 aa, synthetic construct
RGDKSAQ

SEQ ID NO: 9817 - protein, 7 aa, synthetic construct
RGDARQQ

SEQ ID NO: 9818 - protein, 7 aa, synthetic construct
RGDARRV

SEQ ID NO: 9819 - protein, 7 aa, synthetic construct
RGDKTFT

SEQ ID NO: 9820 - protein, 7 aa, synthetic construct
RGDKTQI

SEQ ID NO: 9821 - protein, 7 aa, synthetic construct
RGDLEAT

SEQ ID NO: 9822 - protein, 7 aa, synthetic construct
RGDLFNS

SEQ ID NO: 9823 - protein, 7 aa, synthetic construct
RGDLGTS

SEQ ID NO: 9824 - protein, 7 aa, synthetic construct
RGDLGVR

SEQ ID NO: 9825 - protein, 7 aa, synthetic construct
RGDLISR

SEQ ID NO: 9826 - protein, 7 aa, synthetic construct
RGDLLEH

SEQ ID NO: 9827 - protein, 7 aa, synthetic construct
RGDLNKA

SEQ ID NO: 9828 - protein, 7 aa, synthetic construct
RGDLQLV

SEQ ID NO: 9829 - protein, 7 aa, synthetic construct
RGDLQNG

SEQ ID NO: 9830 - protein, 7 aa, synthetic construct
RGDLSHI

SEQ ID NO: 9831 - protein, 7 aa, synthetic construct
RGDLVTQ

SEQ ID NO: 9832 - protein, 7 aa, synthetic construct
RGDNATI

SEQ ID NO: 9833 - protein, 7 aa, synthetic construct
RGDNEGR

SEQ ID NO: 9834 - protein, 7 aa, synthetic construct
RGDNERI

SEQ ID NO: 9835 - protein, 7 aa, synthetic construct
RGDNFSR

SEQ ID NO: 9836 - protein, 7 aa, synthetic construct
RGDNGKS

SEQ ID NO: 9837 - protein, 7 aa, synthetic construct
RGDNGRH

SEQ ID NO: 9838 - protein, 7 aa, synthetic construct
RGDNHHI

SEQ ID NO: 9839 - protein, 7 aa, synthetic construct
RGDNNKA

SEQ ID NO: 9840 - protein, 7 aa, synthetic construct
RGDNSHN

SEQ ID NO: 9841 - protein, 7 aa, synthetic construct
RGDNTGI

SEQ ID NO: 9842 - protein, 7 aa, synthetic construct
RGDNTQV

SEQ ID NO: 9843 - protein, 7 aa, synthetic construct
RGDNVKA

SEQ ID NO: 9844 - protein, 7 aa, synthetic construct
RGDQDTK

SEQ ID NO: 9845 - protein, 7 aa, synthetic construct
RGDQFVV

SEQ ID NO: 9846 - protein, 7 aa, synthetic construct
RGDQGHG

SEQ ID NO: 9847 - protein, 7 aa, synthetic construct
RGDQGIR

SEQ ID NO: 9848 - protein, 7 aa, synthetic construct
RGDQKFK

SEQ ID NO: 9849 - protein, 7 aa, synthetic construct
RGDQKGG

SEQ ID NO: 9850 - protein, 7 aa, synthetic construct
RGDQLLF

SEQ ID NO: 9851 - protein, 7 aa, synthetic construct
RGDQNKR

SEQ ID NO: 9852 - protein, 7 aa, synthetic construct
RGDQRDQ

SEQ ID NO: 9853 - protein, 7 aa, synthetic construct
RGDQSDG

SEQ ID NO: 9854 - protein, 7 aa, synthetic construct
RGDDDIR

SEQ ID NO: 9855 - protein, 7 aa, synthetic construct
RGDRDFD

SEQ ID NO: 9856 - protein, 7 aa, synthetic construct
RGDREAI

SEQ ID NO: 9857 - protein, 7 aa, synthetic construct
RGDRFRF

SEQ ID NO: 9858 - protein, 7 aa, synthetic construct
RGDRFST

SEQ ID NO: 9859 - protein, 7 aa, synthetic construct
RGDRGTA

SEQ ID NO: 9860 - protein, 7 aa, synthetic construct
RGDRHFS

SEQ ID NO: 9861 - protein, 7 aa, synthetic construct
RGDRKDR

SEQ ID NO: 9862 - protein, 7 aa, synthetic construct
RGDRKLA

SEQ ID NO: 9863 - protein, 7 aa, synthetic construct
RGDRLFE

SEQ ID NO: 9864 - protein, 7 aa, synthetic construct
RGDRNRR

SEQ ID NO: 9865 - protein, 7 aa, synthetic construct
RGDRQHS

SEQ ID NO: 9866 - protein, 7 aa, synthetic construct
RGDRQLN

SEQ ID NO: 9867 - protein, 7 aa, synthetic construct
RGDRSRH

SEQ ID NO: 9868 - protein, 7 aa, synthetic construct
RGDRVFQ

SEQ ID NO: 9869 - protein, 7 aa, synthetic construct
RGDRVTN

SEQ ID NO: 9870 - protein, 7 aa, synthetic construct
RGDRVVT

SEQ ID NO: 9871 - protein, 7 aa, synthetic construct
RGDSAAH

SEQ ID NO: 9872 - protein, 7 aa, synthetic construct
RGDSDHQ

SEQ ID NO: 9873 - protein, 7 aa, synthetic construct
RGDSFRT

SEQ ID NO: 9874 - protein, 7 aa, synthetic construct
RGDSHQQ

SEQ ID NO: 9875 - protein, 7 aa, synthetic construct
RGDSKEL

SEQ ID NO: 9876 - protein, 7 aa, synthetic construct
RGDSKII

SEQ ID NO: 9877 - protein, 7 aa, synthetic construct
RGDSKNH

SEQ ID NO: 9878 - protein, 7 aa, synthetic construct
RGDSLND

SEQ ID NO: 9879 - protein, 7 aa, synthetic construct
RGDSNRA

SEQ ID NO: 9880 - protein, 7 aa, synthetic construct
RGDSRAE

SEQ ID NO: 9881 - protein, 7 aa, synthetic construct
RGDSSAK

SEQ ID NO: 9882 - protein, 7 aa, synthetic construct
RGDSSTV

SEQ ID NO: 9883 - protein, 7 aa, synthetic construct
RGDDGGK

SEQ ID NO: 9884 - protein, 7 aa, synthetic construct
RGDSTRT

SEQ ID NO: 9885 - protein, 7 aa, synthetic construct
RGDTAFI

SEQ ID NO: 9886 - protein, 7 aa, synthetic construct
RGDTEFV

SEQ ID NO: 9887 - protein, 7 aa, synthetic construct
RGDTGVA

SEQ ID NO: 9888 - protein, 7 aa, synthetic construct
RGDTKTS

SEQ ID NO: 9889 - protein, 7 aa, synthetic construct
RGDTLTN

SEQ ID NO: 9890 - protein, 7 aa, synthetic construct
RGDTNRF

SEQ ID NO: 9891 - protein, 7 aa, synthetic construct
RGDTQFH

SEQ ID NO: 9892 - protein, 7 aa, synthetic construct
RGDTRFE

SEQ ID NO: 9893 - protein, 7 aa, synthetic construct
RGDTSRI

SEQ ID NO: 9894 - protein, 7 aa, synthetic construct
RGDVGHI

SEQ ID NO: 9895 - protein, 7 aa, synthetic construct
RGDVIDT

SEQ ID NO: 9896 - protein, 7 aa, synthetic construct
RGDVIHH

SEQ ID NO: 9897 - protein, 7 aa, synthetic construct
RGDVKND

SEQ ID NO: 9898 - protein, 7 aa, synthetic construct
RGDVLFV

SEQ ID NO: 9899 - protein, 7 aa, synthetic construct
RGDVNRR

SEQ ID NO: 9900 - protein, 7 aa, synthetic construct
RGDVQKT

SEQ ID NO: 9901 - protein, 7 aa, synthetic construct
RGDVRFK

SEQ ID NO: 9902 - protein, 7 aa, synthetic construct
RGDVSHH

SEQ ID NO: 9903 - protein, 7 aa, synthetic construct
RGDVVFE

SEQ ID NO: 9904 - protein, 7 aa, synthetic construct
RGDVVFN

SEQ ID NO: 9905 - protein, 7 aa, synthetic construct
RGDVVHV

SEQ ID NO: 9906 - protein, 7 aa, synthetic construct
RGDVVNT

SEQ ID NO: 9907 - protein, 7 aa, synthetic construct
RGDDREN

SEQ ID NO: 9908 - protein, 7 aa, synthetic construct
RGDDRGI

SEQ ID NO: 9909 - protein, 7 aa, synthetic construct
RGDEHHV

SEQ ID NO: 9910 - protein, 7 aa, synthetic construct
RGDELQF

SEQ ID NO: 9911 - protein, 7 aa, synthetic construct
RGDERRK

SEQ ID NO: 9912 - protein, 7 aa, synthetic construct
RGDERRS

SEQ ID NO: 9913 - protein, 7 aa, synthetic construct
RGDAGFN

SEQ ID NO: 9914 - protein, 7 aa, synthetic construct
RGDESTL

SEQ ID NO: 9915 - protein, 7 aa, synthetic construct
RGDETKT

SEQ ID NO: 9916 - protein, 7 aa, synthetic construct
RGDEVQK

SEQ ID NO: 9917 - protein, 7 aa, synthetic construct
RGDFANL

SEQ ID NO: 9918 - protein, 7 aa, synthetic construct
RGDFARQ

SEQ ID NO: 9919 - protein, 7 aa, synthetic construct
RGDAGNT

SEQ ID NO: 9920 - protein, 7 aa, synthetic construct
RGDFDTQ

SEQ ID NO: 9921 - protein, 7 aa, synthetic construct
RGDFDVV

SEQ ID NO: 9922 - protein, 7 aa, synthetic construct
RGDFFFH

SEQ ID NO: 9923 - protein, 7 aa, synthetic construct
RGDFFGH

SEQ ID NO: 9924 - protein, 7 aa, synthetic construct
RGDFGDR

SEQ ID NO: 9925 - protein, 7 aa, synthetic construct
RGDFGTI

SEQ ID NO: 9926 - protein, 7 aa, synthetic construct
RGDFHDR

SEQ ID NO: 9927 - protein, 7 aa, synthetic construct
RGDFILI

SEQ ID NO: 9928 - protein, 7 aa, synthetic construct
RGDFKEH

SEQ ID NO: 9929 - protein, 7 aa, synthetic construct
RGDFKFE

SEQ ID NO: 9930 - protein, 7 aa, synthetic construct
RGDFKND

SEQ ID NO: 9931 - protein, 7 aa, synthetic construct
RGDFKSN

SEQ ID NO: 9932 - protein, 7 aa, synthetic construct
RGDFKTR

SEQ ID NO: 9933 - protein, 7 aa, synthetic construct
RGDFQAL

SEQ ID NO: 9934 - protein, 7 aa, synthetic construct
RGDFQFH

SEQ ID NO: 9935 - protein, 7 aa, synthetic construct
RGDFQFR

SEQ ID NO: 9936 - protein, 7 aa, synthetic construct
RGDFQGI

SEQ ID NO: 9937 - protein, 7 aa, synthetic construct
RGDFQHS

SEQ ID NO: 9938 - protein, 7 aa, synthetic construct
RGDFRTG

SEQ ID NO: 9939 - protein, 7 aa, synthetic construct
RGDFSAI

SEQ ID NO: 9940 - protein, 7 aa, synthetic construct
RGDFSFH

SEQ ID NO: 9941 - protein, 7 aa, synthetic construct
RGDFTRG

SEQ ID NO: 9942 - protein, 7 aa, synthetic construct
RGDFTVL

SEQ ID NO: 9943 - protein, 7 aa, synthetic construct
RGDFVFQ

SEQ ID NO: 9944 - protein, 7 aa, synthetic construct
RGDFVGN

SEQ ID NO: 9945 - protein, 7 aa, synthetic construct
RGDGAHV

SEQ ID NO: 9946 - protein, 7 aa, synthetic construct
RGDGASG

SEQ ID NO: 9947 - protein, 7 aa, synthetic construct
RGDGDQF

SEQ ID NO: 9948 - protein, 7 aa, synthetic construct
RGDGEGF

SEQ ID NO: 9949 - protein, 7 aa, synthetic construct
RGDGFAI

SEQ ID NO: 9950 - protein, 7 aa, synthetic construct
RGDGFRT

SEQ ID NO: 9951 - protein, 7 aa, synthetic construct
RGDGFST

SEQ ID NO: 9952 - protein, 7 aa, synthetic construct
RGDGGNL

SEQ ID NO: 9953 - protein, 7 aa, synthetic construct
RGDAIKL

SEQ ID NO: 9954 - protein, 7 aa, synthetic construct
RGDGHEK

SEQ ID NO: 9955 - protein, 7 aa, synthetic construct
RGDGHTS

SEQ ID NO: 9956 - protein, 7 aa, synthetic construct
RGDGINT

SEQ ID NO: 9957 - protein, 7 aa, synthetic construct
RGDGKKT

SEQ ID NO: 9958 - protein, 7 aa, synthetic construct
RGDAISH

SEQ ID NO: 9959 - protein, 7 aa, synthetic construct
RGDGLTH

SEQ ID NO: 9960 - protein, 7 aa, synthetic construct
RGDGNHK

SEQ ID NO: 9961 - protein, 7 aa, synthetic construct
RGDGQRD

SEQ ID NO: 9962 - protein, 7 aa, synthetic construct
RGDGRNS

SEQ ID NO: 9963 - protein, 7 aa, synthetic construct
RGDAKGS

SEQ ID NO: 9964 - protein, 7 aa, synthetic construct
RGDAKHV

SEQ ID NO: 9965 - protein, 7 aa, synthetic construct
RGDGVGG

SEQ ID NO: 9966 - protein, 7 aa, synthetic construct
RGDGVIG

SEQ ID NO: 9967 - protein, 7 aa, synthetic construct
RGDAKKV

SEQ ID NO: 9968 - protein, 7 aa, synthetic construct
RGDHALR

SEQ ID NO: 9969 - protein, 7 aa, synthetic construct
RGDHEVF

SEQ ID NO: 9970 - protein, 7 aa, synthetic construct
RGDHFQA

SEQ ID NO: 9971 - protein, 7 aa, synthetic construct
RGDHGFD

SEQ ID NO: 9972 - protein, 7 aa, synthetic construct
RGDHGFE

SEQ ID NO: 9973 - protein, 7 aa, synthetic construct
RGDHGFF

SEQ ID NO: 9974 - protein, 7 aa, synthetic construct
RGDHHDK

SEQ ID NO: 9975 - protein, 7 aa, synthetic construct
RGDHINV

SEQ ID NO: 9976 - protein, 7 aa, synthetic construct
RGDHIQI

SEQ ID NO: 9977 - protein, 7 aa, synthetic construct
RGDHKFF

SEQ ID NO: 9978 - protein, 7 aa, synthetic construct
RGDHKQD

SEQ ID NO: 9979 - protein, 7 aa, synthetic construct
RGDHQKH

SEQ ID NO: 9980 - protein, 7 aa, synthetic construct
RGDHRGA

SEQ ID NO: 9981 - protein, 7 aa, synthetic construct
RGDHSKT

SEQ ID NO: 9982 - protein, 7 aa, synthetic construct
RGDHVHF

SEQ ID NO: 9983 - protein, 7 aa, synthetic construct
RGDHVHK

SEQ ID NO: 9984 - protein, 7 aa, synthetic construct
RGDHVNT

SEQ ID NO: 9985 - protein, 7 aa, synthetic construct
RGDIDIK

SEQ ID NO: 9986 - protein, 7 aa, synthetic construct
RGDIDRS

SEQ ID NO: 9987 - protein, 7 aa, synthetic construct
RGDIEKQ

SEQ ID NO: 9988 - protein, 7 aa, synthetic construct
RGDIFFR

SEQ ID NO: 9989 - protein, 7 aa, synthetic construct
RGDIFSV

SEQ ID NO: 9990 - protein, 7 aa, synthetic construct
RGDIHAV

SEQ ID NO: 9991 - protein, 7 aa, synthetic construct
RGDIHQH

SEQ ID NO: 9992 - protein, 7 aa, synthetic construct
RGDIIQG

SEQ ID NO: 9993 - protein, 7 aa, synthetic construct
RGDIKHS

SEQ ID NO: 9994 - protein, 7 aa, synthetic construct
RGDIRFA

SEQ ID NO: 9995 - protein, 7 aa, synthetic construct
RGDIRLK

SEQ ID NO: 9996 - protein, 7 aa, synthetic construct
RGDISGN

SEQ ID NO: 9997 - protein, 7 aa, synthetic construct
RGDITNI

SEQ ID NO: 9998 - protein, 7 aa, synthetic construct
RGDITRH

SEQ ID NO: 9999 - protein, 7 aa, synthetic construct
RGDIVGH

SEQ ID NO: 10000 - protein, 7 aa, synthetic construct
RGDIVQI

SEQ ID NO: 10001 - protein, 7 aa, synthetic construct
RGDAQKN

SEQ ID NO: 10002 - protein, 7 aa, synthetic construct
RGDKDEF

SEQ ID NO: 10003 - protein, 7 aa, synthetic construct
RGDKDTR

SEQ ID NO: 10004 - protein, 7 aa, synthetic construct
RGDKETK

SEQ ID NO: 10005 - protein, 7 aa, synthetic construct
RGDKFIR

SEQ ID NO: 10006 - protein, 7 aa, synthetic construct
RGDKGGF

SEQ ID NO: 10007 - protein, 7 aa, synthetic construct
RGDKGNG

SEQ ID NO: 10008 - protein, 7 aa, synthetic construct
RGDKGRH

SEQ ID NO: 10009 - protein, 7 aa, synthetic construct
RGDKHNH

SEQ ID NO: 10010 - protein, 7 aa, synthetic construct
RGDKIGN

SEQ ID NO: 10011 - protein, 7 aa, synthetic construct
RGDKISV

SEQ ID NO: 10012 - protein, 7 aa, synthetic construct
RGDKKQI

SEQ ID NO: 10013 - protein, 7 aa, synthetic construct
RGDKNGR

SEQ ID NO: 10014 - protein, 7 aa, synthetic construct
RGDKQGK

SEQ ID NO: 10015 - protein, 7 aa, synthetic construct
RGDKSKQ

SEQ ID NO: 10016 - protein, 7 aa, synthetic construct
RGDKSNR

SEQ ID NO: 10017 - protein, 7 aa, synthetic construct
RGDKTGD

SEQ ID NO: 10018 - protein, 7 aa, synthetic construct
RGDKTHS

SEQ ID NO: 10019 - protein, 7 aa, synthetic construct
RGDKTSL

SEQ ID NO: 10020 - protein, 7 aa, synthetic construct
RGDKTTR

SEQ ID NO: 10021 - protein, 7 aa, synthetic construct
RGDLFAH

SEQ ID NO: 10022 - protein, 7 aa, synthetic construct
RGDLGAK

SEQ ID NO: 10023 - protein, 7 aa, synthetic construct
RGDLGDR

SEQ ID NO: 10024 - protein, 7 aa, synthetic construct
RGDLGKQ

SEQ ID NO: 10025 - protein, 7 aa, synthetic construct
RGDLGNR

SEQ ID NO: 10026 - protein, 7 aa, synthetic construct
RGDLGRE

SEQ ID NO: 10027 - protein, 7 aa, synthetic construct
RGDLHQH

SEQ ID NO: 10028 - protein, 7 aa, synthetic construct
RGDLHTV

SEQ ID NO: 10029 - protein, 7 aa, synthetic construct
RGDLISV

SEQ ID NO: 10030 - protein, 7 aa, synthetic construct
RGDLKEN

SEQ ID NO: 10031 - protein, 7 aa, synthetic construct
RGDLKRT

SEQ ID NO: 10032 - protein, 7 aa, synthetic construct
RGDASTQ

SEQ ID NO: 10033 - protein, 7 aa, synthetic construct
RGDLSAV

SEQ ID NO: 10034 - protein, 7 aa, synthetic construct
RGDLSKA

SEQ ID NO: 10035 - protein, 7 aa, synthetic construct
RGDLSKQ

SEQ ID NO: 10036 - protein, 7 aa, synthetic construct
RGDLSRG

SEQ ID NO: 10037 - protein, 7 aa, synthetic construct
RGDLVVH

SEQ ID NO: 10038 - protein, 7 aa, synthetic construct
RGDNAAS

SEQ ID NO: 10039 - protein, 7 aa, synthetic construct
RGDNARK

SEQ ID NO: 10040 - protein, 7 aa, synthetic construct
RGDNDEK

SEQ ID NO: 10041 - protein, 7 aa, synthetic construct
RGDNEHR

SEQ ID NO: 10042 - protein, 7 aa, synthetic construct
RGDNHRE

SEQ ID NO: 10043 - protein, 7 aa, synthetic construct
RGDNINV

SEQ ID NO: 10044 - protein, 7 aa, synthetic construct
RGDNKRG

SEQ ID NO: 10045 - protein, 7 aa, synthetic construct
RGDNLGI

SEQ ID NO: 10046 - protein, 7 aa, synthetic construct
RGDNLLI

SEQ ID NO: 10047 - protein, 7 aa, synthetic construct
RGDNQKK

SEQ ID NO: 10048 - protein, 7 aa, synthetic construct
RGDNSLL

SEQ ID NO: 10049 - protein, 7 aa, synthetic construct
RGDNTFQ

SEQ ID NO: 10050 - protein, 7 aa, synthetic construct
RGDNVQI

SEQ ID NO: 10051 - protein, 7 aa, synthetic construct
RGDNVTK

SEQ ID NO: 10052 - protein, 7 aa, synthetic construct
RGDQAQK

SEQ ID NO: 10053 - protein, 7 aa, synthetic construct
RGDQAVV

SEQ ID NO: 10054 - protein, 7 aa, synthetic construct
RGDQFHA

SEQ ID NO: 10055 - protein, 7 aa, synthetic construct
RGDQFRK

SEQ ID NO: 10056 - protein, 7 aa, synthetic construct
RGDQGAQ

SEQ ID NO: 10057 - protein, 7 aa, synthetic construct
RGDQGEQ

SEQ ID NO: 10058 - protein, 7 aa, synthetic construct
RGDQGIS

SEQ ID NO: 10059 - protein, 7 aa, synthetic construct
RGDQGRK

SEQ ID NO: 10060 - protein, 7 aa, synthetic construct
RGDQGVT

SEQ ID NO: 10061 - protein, 7 aa, synthetic construct
RGDQKHF

SEQ ID NO: 10062 - protein, 7 aa, synthetic construct
RGDQLRR

SEQ ID NO: 10063 - protein, 7 aa, synthetic construct
RGDQQFN

SEQ ID NO: 10064 - protein, 7 aa, synthetic construct
RGDQRNL

SEQ ID NO: 10065 - protein, 7 aa, synthetic construct
RGDQRQN

SEQ ID NO: 10066 - protein, 7 aa, synthetic construct
RGDQRST

SEQ ID NO: 10067 - protein, 7 aa, synthetic construct
RGDQSEV

SEQ ID NO: 10068 - protein, 7 aa, synthetic construct
RGDQSGT

SEQ ID NO: 10069 - protein, 7 aa, synthetic construct
RGDQSVS

SEQ ID NO: 10070 - protein, 7 aa, synthetic construct
RGDQTGR

SEQ ID NO: 10071 - protein, 7 aa, synthetic construct
RGDQTVH

SEQ ID NO: 10072 - protein, 7 aa, synthetic construct
RGDQTVL

SEQ ID NO: 10073 - protein, 7 aa, synthetic construct
RGDQVKT

SEQ ID NO: 10074 - protein, 7 aa, synthetic construct
RGDQVRR

SEQ ID NO: 10075 - protein, 7 aa, synthetic construct
RGDRAAH

SEQ ID NO: 10076 - protein, 7 aa, synthetic construct
RGDRDFF

SEQ ID NO: 10077 - protein, 7 aa, synthetic construct
RGDRDGI

SEQ ID NO: 10078 - protein, 7 aa, synthetic construct
RGDRDKG

SEQ ID NO: 10079 - protein, 7 aa, synthetic construct
RGDRELT

SEQ ID NO: 10080 - protein, 7 aa, synthetic construct
RGDRFEF

SEQ ID NO: 10081 - protein, 7 aa, synthetic construct
RGDRFGQ

SEQ ID NO: 10082 - protein, 7 aa, synthetic construct
RGDRFNR

SEQ ID NO: 10083 - protein, 7 aa, synthetic construct
RGDRHIH

SEQ ID NO: 10084 - protein, 7 aa, synthetic construct
RGDRIQQ

SEQ ID NO: 10085 - protein, 7 aa, synthetic construct
RGDRISQ

SEQ ID NO: 10086 - protein, 7 aa, synthetic construct
RGDRRVD

SEQ ID NO: 10087 - protein, 7 aa, synthetic construct
RGDRSGR

SEQ ID NO: 10088 - protein, 7 aa, synthetic construct
RGDRSRG

SEQ ID NO: 10089 - protein, 7 aa, synthetic construct
RGDRTHH

SEQ ID NO: 10090 - protein, 7 aa, synthetic construct
RGDRVGT

SEQ ID NO: 10091 - protein, 7 aa, synthetic construct
RGDRVKF

SEQ ID NO: 10092 - protein, 7 aa, synthetic construct
RGDSAFG

SEQ ID NO: 10093 - protein, 7 aa, synthetic construct
RGDSAHV

SEQ ID NO: 10094 - protein, 7 aa, synthetic construct
RGDSAIK

SEQ ID NO: 10095 - protein, 7 aa, synthetic construct
RGDSFKK

SEQ ID NO: 10096 - protein, 7 aa, synthetic construct
RGDSGNS

SEQ ID NO: 10097 - protein, 7 aa, synthetic construct
RGDSGVL

SEQ ID NO: 10098 - protein, 7 aa, synthetic construct
RGDSHEV

SEQ ID NO: 10099 - protein, 7 aa, synthetic construct
RGDSHTS

SEQ ID NO: 10100 - protein, 7 aa, synthetic construct
RGDSKGG

SEQ ID NO: 10101 - protein, 7 aa, synthetic construct
RGDSLNN

SEQ ID NO: 10102 - protein, 7 aa, synthetic construct
RGDSNEI

SEQ ID NO: 10103 - protein, 7 aa, synthetic construct
RGDSNER

SEQ ID NO: 10104 - protein, 7 aa, synthetic construct
RGDSNKH

SEQ ID NO: 10105 - protein, 7 aa, synthetic construct
RGDSQAF

SEQ ID NO: 10106 - protein, 7 aa, synthetic construct
RGDSQDF

SEQ ID NO: 10107 - protein, 7 aa, synthetic construct
RGDSQRT

SEQ ID NO: 10108 - protein, 7 aa, synthetic construct
RGDSRHS

SEQ ID NO: 10109 - protein, 7 aa, synthetic construct
RGDSRQK

SEQ ID NO: 10110 - protein, 7 aa, synthetic construct
RGDSSFQ

SEQ ID NO: 10111 - protein, 7 aa, synthetic construct
RGDSSTR

SEQ ID NO: 10112 - protein, 7 aa, synthetic construct
RGDSSTS

SEQ ID NO: 10113 - protein, 7 aa, synthetic construct
RGDSTRD

SEQ ID NO: 10114 - protein, 7 aa, synthetic construct
RGDTALN

SEQ ID NO: 10115 - protein, 7 aa, synthetic construct
RGDTETI

SEQ ID NO: 10116 - protein, 7 aa, synthetic construct
RGDDGRS

SEQ ID NO: 10117 - protein, 7 aa, synthetic construct
RGDTHGK

SEQ ID NO: 10118 - protein, 7 aa, synthetic construct
RGDTHHT

SEQ ID NO: 10119 - protein, 7 aa, synthetic construct
RGDTKFL

SEQ ID NO: 10120 - protein, 7 aa, synthetic construct
RGDTKQI

SEQ ID NO: 10121 - protein, 7 aa, synthetic construct
RGDTLSR

SEQ ID NO: 10122 - protein, 7 aa, synthetic construct
RGDTNRG

SEQ ID NO: 10123 - protein, 7 aa, synthetic construct
RGDTQTR

SEQ ID NO: 10124 - protein, 7 aa, synthetic construct
RGDTRFS

SEQ ID NO: 10125 - protein, 7 aa, synthetic construct
RGDTVKL

SEQ ID NO: 10126 - protein, 7 aa, synthetic construct
RGDTVRV

SEQ ID NO: 10127 - protein, 7 aa, synthetic construct
RGDVAHT

SEQ ID NO: 10128 - protein, 7 aa, synthetic construct
RGDVFRN

SEQ ID NO: 10129 - protein, 7 aa, synthetic construct
RGDVGSN

SEQ ID NO: 10130 - protein, 7 aa, synthetic construct
RGDVHTD

SEQ ID NO: 10131 - protein, 7 aa, synthetic construct
RGDVIAI

SEQ ID NO: 10132 - protein, 7 aa, synthetic construct
RGDAEEI

SEQ ID NO: 10133 - protein, 7 aa, synthetic construct
RGDVINI

SEQ ID NO: 10134 - protein, 7 aa, synthetic construct
RGDVISI

SEQ ID NO: 10135 - protein, 7 aa, synthetic construct
RGDVIVR

SEQ ID NO: 10136 - protein, 7 aa, synthetic construct
RGDVKRQ

SEQ ID NO: 10137 - protein, 7 aa, synthetic construct
RGDVLGF

SEQ ID NO: 10138 - protein, 7 aa, synthetic construct
RGDVNRI

SEQ ID NO: 10139 - protein, 7 aa, synthetic construct
RGDVNVI

SEQ ID NO: 10140 - protein, 7 aa, synthetic construct
RGDVQFV

SEQ ID NO: 10141 - protein, 7 aa, synthetic construct
RGDVQHV

SEQ ID NO: 10142 - protein, 7 aa, synthetic construct
RGDVQNH

SEQ ID NO: 10143 - protein, 7 aa, synthetic construct
RGDVRKE

SEQ ID NO: 10144 - protein, 7 aa, synthetic construct
RGDVRQR

SEQ ID NO: 10145 - protein, 7 aa, synthetic construct
RGDVSIR

SEQ ID NO: 10146 - protein, 7 aa, synthetic construct
RGDVVGH

SEQ ID NO: 10147 - protein, 7 aa, synthetic construct
RGDVVLI

SEQ ID NO: 10148 - protein, 7 aa, synthetic construct
RGDDRNN

SEQ ID NO: 10149 - protein, 7 aa, synthetic construct
RGDDSRK

SEQ ID NO: 10150 - protein, 7 aa, synthetic construct
RGDEALK

SEQ ID NO: 10151 - protein, 7 aa, synthetic construct
RGDEERD

SEQ ID NO: 10152 - protein, 7 aa, synthetic construct
RGDEESH

SEQ ID NO: 10153 - protein, 7 aa, synthetic construct
RGDEGVA

SEQ ID NO: 10154 - protein, 7 aa, synthetic construct
RGDEHLI

SEQ ID NO: 10155 - protein, 7 aa, synthetic construct
RGDAAHR

SEQ ID NO: 10156 - protein, 7 aa, synthetic construct
RGDEQRV

SEQ ID NO: 10157 - protein, 7 aa, synthetic construct
RGDERNL

SEQ ID NO: 10158 - protein, 7 aa, synthetic construct
RGDESFS

SEQ ID NO: 10159 - protein, 7 aa, synthetic construct
RGDAGFR

SEQ ID NO: 10160 - protein, 7 aa, synthetic construct
RGDAGQK

SEQ ID NO: 10161 - protein, 7 aa, synthetic construct
RGDFFFL

SEQ ID NO: 10162 - protein, 7 aa, synthetic construct
RGDFFKE

SEQ ID NO: 10163 - protein, 7 aa, synthetic construct
RGDFGAN

SEQ ID NO: 10164 - protein, 7 aa, synthetic construct
RGDFGNL

SEQ ID NO: 10165 - protein, 7 aa, synthetic construct
RGDFHNN

SEQ ID NO: 10166 - protein, 7 aa, synthetic construct
RGDFINT

SEQ ID NO: 10167 - protein, 7 aa, synthetic construct
RGDFLGV

SEQ ID NO: 10168 - protein, 7 aa, synthetic construct
RGDFLTR

SEQ ID NO: 10169 - protein, 7 aa, synthetic construct
RGDFNFR

SEQ ID NO: 10170 - protein, 7 aa, synthetic construct
RGDFNFS

SEQ ID NO: 10171 - protein, 7 aa, synthetic construct
RGDFNTQ

SEQ ID NO: 10172 - protein, 7 aa, synthetic construct
RGDFRAV

SEQ ID NO: 10173 - protein, 7 aa, synthetic construct
RGDFSDG

SEQ ID NO: 10174 - protein, 7 aa, synthetic construct
RGDFSLF

SEQ ID NO: 10175 - protein, 7 aa, synthetic construct
RGDFVEK

SEQ ID NO: 10176 - protein, 7 aa, synthetic construct
RGDFVES

SEQ ID NO: 10177 - protein, 7 aa, synthetic construct
RGDGAHR

SEQ ID NO: 10178 - protein, 7 aa, synthetic construct
RGDGAIF

SEQ ID NO: 10179 - protein, 7 aa, synthetic construct
RGDGGIE

SEQ ID NO: 10180 - protein, 7 aa, synthetic construct
RGDGHSK

SEQ ID NO: 10181 - protein, 7 aa, synthetic construct
RGDGKFV

SEQ ID NO: 10182 - protein, 7 aa, synthetic construct
RGDGQAF

SEQ ID NO: 10183 - protein, 7 aa, synthetic construct
RGDGQHI

SEQ ID NO: 10184 - protein, 7 aa, synthetic construct
RGDAKAV

SEQ ID NO: 10185 - protein, 7 aa, synthetic construct
RGDGQTF

SEQ ID NO: 10186 - protein, 7 aa, synthetic construct
RGDGRGN

SEQ ID NO: 10187 - protein, 7 aa, synthetic construct
RGDGRRG

SEQ ID NO: 10188 - protein, 7 aa, synthetic construct
RGDAKHF

SEQ ID NO: 10189 - protein, 7 aa, synthetic construct
RGDGVTV

SEQ ID NO: 10190 - protein, 7 aa, synthetic construct
RGDGVVR

SEQ ID NO: 10191 - protein, 7 aa, synthetic construct
RGDHATK

SEQ ID NO: 10192 - protein, 7 aa, synthetic construct
RGDAARL

SEQ ID NO: 10193 - protein, 7 aa, synthetic construct
RGDHEKS

SEQ ID NO: 10194 - protein, 7 aa, synthetic construct
RGDHGFG

SEQ ID NO: 10195 - protein, 7 aa, synthetic construct
RGDHGHN

SEQ ID NO: 10196 - protein, 7 aa, synthetic construct
RGDAKVI

SEQ ID NO: 10197 - protein, 7 aa, synthetic construct
RGDHGQD

SEQ ID NO: 10198 - protein, 7 aa, synthetic construct
RGDHGRS

SEQ ID NO: 10199 - protein, 7 aa, synthetic construct
RGDHGTH

SEQ ID NO: 10200 - protein, 7 aa, synthetic construct
RGDHIAF

SEQ ID NO: 10201 - protein, 7 aa, synthetic construct
RGDHIER

SEQ ID NO: 10202 - protein, 7 aa, synthetic construct
RGDHKDF

SEQ ID NO: 10203 - protein, 7 aa, synthetic construct
RGDHKKV

SEQ ID NO: 10204 - protein, 7 aa, synthetic construct
RGDHLGI

SEQ ID NO: 10205 - protein, 7 aa, synthetic construct
RGDHLTI

SEQ ID NO: 10206 - protein, 7 aa, synthetic construct
RGDHSGT

SEQ ID NO: 10207 - protein, 7 aa, synthetic construct
RGDHTTT

SEQ ID NO: 10208 - protein, 7 aa, synthetic construct
RGDHVEF

SEQ ID NO: 10209 - protein, 7 aa, synthetic construct
RGDHVEK

SEQ ID NO: 10210 - protein, 7 aa, synthetic construct
RGDALTR

SEQ ID NO: 10211 - protein, 7 aa, synthetic construct
RGDIDAI

SEQ ID NO: 10212 - protein, 7 aa, synthetic construct
RGDIDFK

SEQ ID NO: 10213 - protein, 7 aa, synthetic construct
RGDIEQQ

SEQ ID NO: 10214 - protein, 7 aa, synthetic construct
RGDAATT

SEQ ID NO: 10215 - protein, 7 aa, synthetic construct
RGDIHAT

SEQ ID NO: 10216 - protein, 7 aa, synthetic construct
RGDIHTR

SEQ ID NO: 10217 - protein, 7 aa, synthetic construct
RGDIIRK

SEQ ID NO: 10218 - protein, 7 aa, synthetic construct
RGDIKKS

SEQ ID NO: 10219 - protein, 7 aa, synthetic construct
RGDIKNV

SEQ ID NO: 10220 - protein, 7 aa, synthetic construct
RGDIKSE

SEQ ID NO: 10221 - protein, 7 aa, synthetic construct
RGDILHV

SEQ ID NO: 10222 - protein, 7 aa, synthetic construct
RGDIQIL

SEQ ID NO: 10223 - protein, 7 aa, synthetic construct
RGDIQVV

SEQ ID NO: 10224 - protein, 7 aa, synthetic construct
RGDIRHN

SEQ ID NO: 10225 - protein, 7 aa, synthetic construct
RGDIVHE

SEQ ID NO: 10226 - protein, 7 aa, synthetic construct
RGDIVKR

SEQ ID NO: 10227 - protein, 7 aa, synthetic construct
RGDKANI

SEQ ID NO: 10228 - protein, 7 aa, synthetic construct
RGDKDHL

SEQ ID NO: 10229 - protein, 7 aa, synthetic construct
RGDKDSV

SEQ ID NO: 10230 - protein, 7 aa, synthetic construct
RGDKEEQ

SEQ ID NO: 10231 - protein, 7 aa, synthetic construct
RGDKEER

SEQ ID NO: 10232 - protein, 7 aa, synthetic construct
RGDAQRD

SEQ ID NO: 10233 - protein, 7 aa, synthetic construct
RGDKEQL

SEQ ID NO: 10234 - protein, 7 aa, synthetic construct
RGDKGNE

SEQ ID NO: 10235 - protein, 7 aa, synthetic construct
RGDKGQS

SEQ ID NO: 10236 - protein, 7 aa, synthetic construct
RGDKGRV

SEQ ID NO: 10237 - protein, 7 aa, synthetic construct
RGDARAV

SEQ ID NO: 10238 - protein, 7 aa, synthetic construct
RGDKHTL

SEQ ID NO: 10239 - protein, 7 aa, synthetic construct
RGDKIHH

SEQ ID NO: 10240 - protein, 7 aa, synthetic construct
RGDKISF

SEQ ID NO: 10241 - protein, 7 aa, synthetic construct
RGDKISI

SEQ ID NO: 10242 - protein, 7 aa, synthetic construct
RGDKIVV

SEQ ID NO: 10243 - protein, 7 aa, synthetic construct
RGDKKVT

SEQ ID NO: 10244 - protein, 7 aa, synthetic construct
RGDKLFQ

SEQ ID NO: 10245 - protein, 7 aa, synthetic construct
RGDARHH

SEQ ID NO: 10246 - protein, 7 aa, synthetic construct
RGDKLNH

SEQ ID NO: 10247 - protein, 7 aa, synthetic construct
RGDARHN

SEQ ID NO: 10248 - protein, 7 aa, synthetic construct
RGDKQEV

SEQ ID NO: 10249 - protein, 7 aa, synthetic construct
RGDKQFH

SEQ ID NO: 10250 - protein, 7 aa, synthetic construct
RGDARRG

SEQ ID NO: 10251 - protein, 7 aa, synthetic construct
RGDKSLQ

SEQ ID NO: 10252 - protein, 7 aa, synthetic construct
RGDKTRT

SEQ ID NO: 10253 - protein, 7 aa, synthetic construct
RGDKTVT

SEQ ID NO: 10254 - protein, 7 aa, synthetic construct
RGDLALV

SEQ ID NO: 10255 - protein, 7 aa, synthetic construct
RGDLASS

SEQ ID NO: 10256 - protein, 7 aa, synthetic construct
RGDLDHK

SEQ ID NO: 10257 - protein, 7 aa, synthetic construct
RGDLENL

SEQ ID NO: 10258 - protein, 7 aa, synthetic construct
RGDLFFT

SEQ ID NO: 10259 - protein, 7 aa, synthetic construct
RGDLFGG

SEQ ID NO: 10260 - protein, 7 aa, synthetic construct
RGDASHR

SEQ ID NO: 10261 - protein, 7 aa, synthetic construct
RGDLGIN

SEQ ID NO: 10262 - protein, 7 aa, synthetic construct
RGDLHAQ

SEQ ID NO: 10263 - protein, 7 aa, synthetic construct
RGDLKDH

SEQ ID NO: 10264 - protein, 7 aa, synthetic construct
RGDLKKF

SEQ ID NO: 10265 - protein, 7 aa, synthetic construct
RGDLKLG

SEQ ID NO: 10266 - protein, 7 aa, synthetic construct
RGDLLQV

SEQ ID NO: 10267 - protein, 7 aa, synthetic construct
RGDLNFN

SEQ ID NO: 10268 - protein, 7 aa, synthetic construct
RGDLRQG

SEQ ID NO: 10269 - protein, 7 aa, synthetic construct
RGDLRVH

SEQ ID NO: 10270 - protein, 7 aa, synthetic construct
RGDLSRD

SEQ ID NO: 10271 - protein, 7 aa, synthetic construct
RGDLVLV

SEQ ID NO: 10272 - protein, 7 aa, synthetic construct
RGDLVNL

SEQ ID NO: 10273 - protein, 7 aa, synthetic construct
RGDNEIT

SEQ ID NO: 10274 - protein, 7 aa, synthetic construct
RGDNFFI

SEQ ID NO: 10275 - protein, 7 aa, synthetic construct
RGDNGSH

SEQ ID NO: 10276 - protein, 7 aa, synthetic construct
RGDNGTK

SEQ ID NO: 10277 - protein, 7 aa, synthetic construct
RGDNGTR

SEQ ID NO: 10278 - protein, 7 aa, synthetic construct
RGDNIHQ

SEQ ID NO: 10279 - protein, 7 aa, synthetic construct
RGDNKRI

SEQ ID NO: 10280 - protein, 7 aa, synthetic construct
RGDAVGN

SEQ ID NO: 10281 - protein, 7 aa, synthetic construct
RGDNNQQ

SEQ ID NO: 10282 - protein, 7 aa, synthetic construct
RGDAVKT

SEQ ID NO: 10283 - protein, 7 aa, synthetic construct
RGDNQGH

SEQ ID NO: 10284 - protein, 7 aa, synthetic construct
RGDNQNL

SEQ ID NO: 10285 - protein, 7 aa, synthetic construct
RGDNSIR

SEQ ID NO: 10286 - protein, 7 aa, synthetic construct
RGDNSTI

SEQ ID NO: 10287 - protein, 7 aa, synthetic construct
RGDNTFE

SEQ ID NO: 10288 - protein, 7 aa, synthetic construct
RGDNTHE

SEQ ID NO: 10289 - protein, 7 aa, synthetic construct
RGDAVSK

SEQ ID NO: 10290 - protein, 7 aa, synthetic construct
RGDNTTR

SEQ ID NO: 10291 - protein, 7 aa, synthetic construct
RGDNVNI

SEQ ID NO: 10292 - protein, 7 aa, synthetic construct
RGDNVRK

SEQ ID NO: 10293 - protein, 7 aa, synthetic construct
RGDQAKS

SEQ ID NO: 10294 - protein, 7 aa, synthetic construct
RGDQALI

SEQ ID NO: 10295 - protein, 7 aa, synthetic construct
RGDQALV

SEQ ID NO: 10296 - protein, 7 aa, synthetic construct
RGDQFKQ

SEQ ID NO: 10297 - protein, 7 aa, synthetic construct
RGDQGNR

SEQ ID NO: 10298 - protein, 7 aa, synthetic construct
RGDQHAE

SEQ ID NO: 10299 - protein, 7 aa, synthetic construct
RGDQHDR

SEQ ID NO: 10300 - protein, 7 aa, synthetic construct
RGDQIII

SEQ ID NO: 10301 - protein, 7 aa, synthetic construct
RGDQQSR

SEQ ID NO: 10302 - protein, 7 aa, synthetic construct
RGDQRFR

SEQ ID NO: 10303 - protein, 7 aa, synthetic construct
RGDQRKV

SEQ ID NO: 10304 - protein, 7 aa, synthetic construct
RGDQSHN

SEQ ID NO: 10305 - protein, 7 aa, synthetic construct
RGDQSHT

SEQ ID NO: 10306 - protein, 7 aa, synthetic construct
RGDQSNN

SEQ ID NO: 10307 - protein, 7 aa, synthetic construct
RGDQSTN

SEQ ID NO: 10308 - protein, 7 aa, synthetic construct
RGDQTHF

SEQ ID NO: 10309 - protein, 7 aa, synthetic construct
RGDQTLN

SEQ ID NO: 10310 - protein, 7 aa, synthetic construct
RGDQVRA

SEQ ID NO: 10311 - protein, 7 aa, synthetic construct
RGDQVSV

SEQ ID NO: 10312 - protein, 7 aa, synthetic construct
RGDQVVD

SEQ ID NO: 10313 - protein, 7 aa, synthetic construct
RGDRAFL

SEQ ID NO: 10314 - protein, 7 aa, synthetic construct
RGDRDHK

SEQ ID NO: 10315 - protein, 7 aa, synthetic construct
RGDRDKL

SEQ ID NO: 10316 - protein, 7 aa, synthetic construct
RGDREKE

SEQ ID NO: 10317 - protein, 7 aa, synthetic construct
RGDRETT

SEQ ID NO: 10318 - protein, 7 aa, synthetic construct
RGDRFIK

SEQ ID NO: 10319 - protein, 7 aa, synthetic construct
RGDRFKS

SEQ ID NO: 10320 - protein, 7 aa, synthetic construct
RGDRFNF

SEQ ID NO: 10321 - protein, 7 aa, synthetic construct
RGDRGID

SEQ ID NO: 10322 - protein, 7 aa, synthetic construct
RGDRHSN

SEQ ID NO: 10323 - protein, 7 aa, synthetic construct
RGDRHST

SEQ ID NO: 10324 - protein, 7 aa, synthetic construct
RGDRIFT

SEQ ID NO: 10325 - protein, 7 aa, synthetic construct
RGDRKNL

SEQ ID NO: 10326 - protein, 7 aa, synthetic construct
RGDRLIH

SEQ ID NO: 10327 - protein, 7 aa, synthetic construct
RGDRQDH

SEQ ID NO: 10328 - protein, 7 aa, synthetic construct
RGDRQFQ

SEQ ID NO: 10329 - protein, 7 aa, synthetic construct
RGDRTNE

SEQ ID NO: 10330 - protein, 7 aa, synthetic construct
RGDRVGR

SEQ ID NO: 10331 - protein, 7 aa, synthetic construct
RGDSAFF

SEQ ID NO: 10332 - protein, 7 aa, synthetic construct
RGDSAGQ

SEQ ID NO: 10333 - protein, 7 aa, synthetic construct
RGDSANN

SEQ ID NO: 10334 - protein, 7 aa, synthetic construct
RGDSDRF

SEQ ID NO: 10335 - protein, 7 aa, synthetic construct
RGDSDSI

SEQ ID NO: 10336 - protein, 7 aa, synthetic construct
RGDSDVE

SEQ ID NO: 10337 - protein, 7 aa, synthetic construct
RGDSHER

SEQ ID NO: 10338 - protein, 7 aa, synthetic construct
RGDSIHF

SEQ ID NO: 10339 - protein, 7 aa, synthetic construct
RGDSKEH

SEQ ID NO: 10340 - protein, 7 aa, synthetic construct
RGDSKGH

SEQ ID NO: 10341 - protein, 7 aa, synthetic construct
RGDSKQG

SEQ ID NO: 10342 - protein, 7 aa, synthetic construct
RGDSKTI

SEQ ID NO: 10343 - protein, 7 aa, synthetic construct
RGDSLNR

SEQ ID NO: 10344 - protein, 7 aa, synthetic construct
RGDSNAV

SEQ ID NO: 10345 - protein, 7 aa, synthetic construct
RGDSNEE

SEQ ID NO: 10346 - protein, 7 aa, synthetic construct
RGDSNHF

SEQ ID NO: 10347 - protein, 7 aa, synthetic construct
RGDSQTF

SEQ ID NO: 10348 - protein, 7 aa, synthetic construct
RGDSVEQ

SEQ ID NO: 10349 - protein, 7 aa, synthetic construct
RGDSVSG

SEQ ID NO: 10350 - protein, 7 aa, synthetic construct
RGDTDIR

SEQ ID NO: 10351 - protein, 7 aa, synthetic construct
RGDTGQR

SEQ ID NO: 10352 - protein, 7 aa, synthetic construct
RGDTHRH

SEQ ID NO: 10353 - protein, 7 aa, synthetic construct
RGDTISR

SEQ ID NO: 10354 - protein, 7 aa, synthetic construct
RGDTITF

SEQ ID NO: 10355 - protein, 7 aa, synthetic construct
RGDTKAH

SEQ ID NO: 10356 - protein, 7 aa, synthetic construct
RGDTKGN

SEQ ID NO: 10357 - protein, 7 aa, synthetic construct
RGDTKHR

SEQ ID NO: 10358 - protein, 7 aa, synthetic construct
RGDTKSN

SEQ ID NO: 10359 - protein, 7 aa, synthetic construct
RGDDHHL

SEQ ID NO: 10360 - protein, 7 aa, synthetic construct
RGDTNDR

SEQ ID NO: 10361 - protein, 7 aa, synthetic construct
RGDTQFL

SEQ ID NO: 10362 - protein, 7 aa, synthetic construct
RGDTQHV

SEQ ID NO: 10363 - protein, 7 aa, synthetic construct
RGDDHNA

SEQ ID NO: 10364 - protein, 7 aa, synthetic construct
RGDTVHT

SEQ ID NO: 10365 - protein, 7 aa, synthetic construct
RGDVAKV

SEQ ID NO: 10366 - protein, 7 aa, synthetic construct
RGDVALN

SEQ ID NO: 10367 - protein, 7 aa, synthetic construct
RGDVDGV

SEQ ID NO: 10368 - protein, 7 aa, synthetic construct
RGDVFRS

SEQ ID NO: 10369 - protein, 7 aa, synthetic construct
RGDVGGR

SEQ ID NO: 10370 - protein, 7 aa, synthetic construct
RGDVGIA

SEQ ID NO: 10371 - protein, 7 aa, synthetic construct
RGDVGRI

SEQ ID NO: 10372 - protein, 7 aa, synthetic construct
RGDVHVV

SEQ ID NO: 10373 - protein, 7 aa, synthetic construct
RGDVIGQ

SEQ ID NO: 10374 - protein, 7 aa, synthetic construct
RGDVKFD

SEQ ID NO: 10375 - protein, 7 aa, synthetic construct
RGDVKFF

SEQ ID NO: 10376 - protein, 7 aa, synthetic construct
RGDVKFR

SEQ ID NO: 10377 - protein, 7 aa, synthetic construct
RGDVKLN

SEQ ID NO: 10378 - protein, 7 aa, synthetic construct
RGDVRFR

SEQ ID NO: 10379 - protein, 7 aa, synthetic construct
RGDVRTS

SEQ ID NO: 10380 - protein, 7 aa, synthetic construct
RGDVRVG

SEQ ID NO: 10381 - protein, 7 aa, synthetic construct
RGDVSGN

SEQ ID NO: 10382 - protein, 7 aa, synthetic construct
RGDVSKH

SEQ ID NO: 10383 - protein, 7 aa, synthetic construct
RGDVSLR

SEQ ID NO: 10384 - protein, 7 aa, synthetic construct
RGDVVRR

SEQ ID NO: 10385 - protein, 7 aa, synthetic construct
RGDDNSG

SEQ ID NO: 10386 - protein, 7 aa, synthetic construct
RGDDSET

SEQ ID NO: 10387 - protein, 7 aa, synthetic construct
RGDDVGR

SEQ ID NO: 10388 - protein, 7 aa, synthetic construct
RGDEGIK

SEQ ID NO: 10389 - protein, 7 aa, synthetic construct
RGDEGRR

SEQ ID NO: 10390 - protein, 7 aa, synthetic construct
RGDEHGF

SEQ ID NO: 10391 - protein, 7 aa, synthetic construct
RGDAAHG

SEQ ID NO: 10392 - protein, 7 aa, synthetic construct
RGDEKNL

SEQ ID NO: 10393 - protein, 7 aa, synthetic construct
RGDEVGR

SEQ ID NO: 10394 - protein, 7 aa, synthetic construct
RGDEVSQ

SEQ ID NO: 10395 - protein, 7 aa, synthetic construct
RGDFAKI

SEQ ID NO: 10396 - protein, 7 aa, synthetic construct
RGDFDVQ

SEQ ID NO: 10397 - protein, 7 aa, synthetic construct
RGDFFEQ

SEQ ID NO: 10398 - protein, 7 aa, synthetic construct
RGDFFFS

SEQ ID NO: 10399 - protein, 7 aa, synthetic construct
RGDFGLK

SEQ ID NO: 10400 - protein, 7 aa, synthetic construct
RGDFHSS

SEQ ID NO: 10401 - protein, 7 aa, synthetic construct
RGDFNEI

SEQ ID NO: 10402 - protein, 7 aa, synthetic construct
RGDFNIG

SEQ ID NO: 10403 - protein, 7 aa, synthetic construct
RGDAHKI

SEQ ID NO: 10404 - protein, 7 aa, synthetic construct
RGDFQEV

SEQ ID NO: 10405 - protein, 7 aa, synthetic construct
RGDFQHR

SEQ ID NO: 10406 - protein, 7 aa, synthetic construct
RGDFQNN

SEQ ID NO: 10407 - protein, 7 aa, synthetic construct
RGDFRES

SEQ ID NO: 10408 - protein, 7 aa, synthetic construct
RGDFTRH

SEQ ID NO: 10409 - protein, 7 aa, synthetic construct
RGDFTSA

SEQ ID NO: 10410 - protein, 7 aa, synthetic construct
RGDFVAI

SEQ ID NO: 10411 - protein, 7 aa, synthetic construct
RGDFVFS

SEQ ID NO: 10412 - protein, 7 aa, synthetic construct
RGDAHVI

SEQ ID NO: 10413 - protein, 7 aa, synthetic construct
RGDFVTV

SEQ ID NO: 10414 - protein, 7 aa, synthetic construct
RGDGAFN

SEQ ID NO: 10415 - protein, 7 aa, synthetic construct
RGDGAKI

SEQ ID NO: 10416 - protein, 7 aa, synthetic construct
RGDGEKR

SEQ ID NO: 10417 - protein, 7 aa, synthetic construct
RGDAANI

SEQ ID NO: 10418 - protein, 7 aa, synthetic construct
RGDGFRE

SEQ ID NO: 10419 - protein, 7 aa, synthetic construct
RGDGIHI

SEQ ID NO: 10420 - protein, 7 aa, synthetic construct
RGDGKFD

SEQ ID NO: 10421 - protein, 7 aa, synthetic construct
RGDGNKH

SEQ ID NO: 10422 - protein, 7 aa, synthetic construct
RGDGNSL

SEQ ID NO: 10423 - protein, 7 aa, synthetic construct
RGDGRKR

SEQ ID NO: 10424 - protein, 7 aa, synthetic construct
RGDAAQQ

SEQ ID NO: 10425 - protein, 7 aa, synthetic construct
RGDGSAT

SEQ ID NO: 10426 - protein, 7 aa, synthetic construct
RGDGSGK

SEQ ID NO: 10427 - protein, 7 aa, synthetic construct
RGDGVRD

SEQ ID NO: 10428 - protein, 7 aa, synthetic construct
RGDHAHQ

SEQ ID NO: 10429 - protein, 7 aa, synthetic construct
RGDHASV

SEQ ID NO: 10430 - protein, 7 aa, synthetic construct
RGDHEKV

SEQ ID NO: 10431 - protein, 7 aa, synthetic construct
RGDHEVR

SEQ ID NO: 10432 - protein, 7 aa, synthetic construct
RGDHGKI

SEQ ID NO: 10433 - protein, 7 aa, synthetic construct
RGDHHGS

SEQ ID NO: 10434 - protein, 7 aa, synthetic construct
RGDALFF

SEQ ID NO: 10435 - protein, 7 aa, synthetic construct
RGDHKFQ

SEQ ID NO: 10436 - protein, 7 aa, synthetic construct
RGDHKHI

SEQ ID NO: 10437 - protein, 7 aa, synthetic construct
RGDHLNS

SEQ ID NO: 10438 - protein, 7 aa, synthetic construct
RGDHNES

SEQ ID NO: 10439 - protein, 7 aa, synthetic construct
RGDHQEF

SEQ ID NO: 10440 - protein, 7 aa, synthetic construct
RGDHQNI

SEQ ID NO: 10441 - protein, 7 aa, synthetic construct
RGDHQQV

SEQ ID NO: 10442 - protein, 7 aa, synthetic construct
RGDHQSR

SEQ ID NO: 10443 - protein, 7 aa, synthetic construct
RGDHRFS

SEQ ID NO: 10444 - protein, 7 aa, synthetic construct
RGDHRGF

SEQ ID NO: 10445 - protein, 7 aa, synthetic construct
RGDHRTL

SEQ ID NO: 10446 - protein, 7 aa, synthetic construct
RGDHSGR

SEQ ID NO: 10447 - protein, 7 aa, synthetic construct
RGDHSHS

SEQ ID NO: 10448 - protein, 7 aa, synthetic construct
RGDALRF

SEQ ID NO: 10449 - protein, 7 aa, synthetic construct
RGDHSQN

SEQ ID NO: 10450 - protein, 7 aa, synthetic construct
RGDHTFK

SEQ ID NO: 10451 - protein, 7 aa, synthetic construct
RGDIDRK

SEQ ID NO: 10452 - protein, 7 aa, synthetic construct
RGDIERR

SEQ ID NO: 10453 - protein, 7 aa, synthetic construct
RGDANKN

SEQ ID NO: 10454 - protein, 7 aa, synthetic construct
RGDIKFA

SEQ ID NO: 10455 - protein, 7 aa, synthetic construct
RGDIKLA

SEQ ID NO: 10456 - protein, 7 aa, synthetic construct
RGDILSN

SEQ ID NO: 10457 - protein, 7 aa, synthetic construct
RGDINSL

SEQ ID NO: 10458 - protein, 7 aa, synthetic construct
RGDIRAF

SEQ ID NO: 10459 - protein, 7 aa, synthetic construct
RGDITIQ

SEQ ID NO: 10460 - protein, 7 aa, synthetic construct
RGDITLL

SEQ ID NO: 10461 - protein, 7 aa, synthetic construct
RGDITLR

SEQ ID NO: 10462 - protein, 7 aa, synthetic construct
RGDITRV

SEQ ID NO: 10463 - protein, 7 aa, synthetic construct
RGDIVGV

SEQ ID NO: 10464 - protein, 7 aa, synthetic construct
RGDIVVL

SEQ ID NO: 10465 - protein, 7 aa, synthetic construct
RGDKAFK

SEQ ID NO: 10466 - protein, 7 aa, synthetic construct
RGDKALK

SEQ ID NO: 10467 - protein, 7 aa, synthetic construct
RGDKARH

SEQ ID NO: 10468 - protein, 7 aa, synthetic construct
RGDKDAV

SEQ ID NO: 10469 - protein, 7 aa, synthetic construct
RGDKEHI

SEQ ID NO: 10470 - protein, 7 aa, synthetic construct
RGDKEQQ

SEQ ID NO: 10471 - protein, 7 aa, synthetic construct
RGDKETI

SEQ ID NO: 10472 - protein, 7 aa, synthetic construct
RGDKFEK

SEQ ID NO: 10473 - protein, 7 aa, synthetic construct
RGDKFFF

SEQ ID NO: 10474 - protein, 7 aa, synthetic construct
RGDKFFQ

SEQ ID NO: 10475 - protein, 7 aa, synthetic construct
RGDKFFS

SEQ ID NO: 10476 - protein, 7 aa, synthetic construct
RGDKGNN

SEQ ID NO: 10477 - protein, 7 aa, synthetic construct
RGDKHHK

SEQ ID NO: 10478 - protein, 7 aa, synthetic construct
RGDKKHI

SEQ ID NO: 10479 - protein, 7 aa, synthetic construct
RGDKLFF

SEQ ID NO: 10480 - protein, 7 aa, synthetic construct
RGDARHI

SEQ ID NO: 10481 - protein, 7 aa, synthetic construct
RGDKLSN

SEQ ID NO: 10482 - protein, 7 aa, synthetic construct
RGDKQNS

SEQ ID NO: 10483 - protein, 7 aa, synthetic construct
RGDKRSI

SEQ ID NO: 10484 - protein, 7 aa, synthetic construct
RGDKTHQ

SEQ ID NO: 10485 - protein, 7 aa, synthetic construct
RGDLAGS

SEQ ID NO: 10486 - protein, 7 aa, synthetic construct
RGDLFGN

SEQ ID NO: 10487 - protein, 7 aa, synthetic construct
RGDLGHI

SEQ ID NO: 10488 - protein, 7 aa, synthetic construct
RGDLGHT

SEQ ID NO: 10489 - protein, 7 aa, synthetic construct
RGDLGNQ

SEQ ID NO: 10490 - protein, 7 aa, synthetic construct
RGDLHNT

SEQ ID NO: 10491 - protein, 7 aa, synthetic construct
RGDLIHG

SEQ ID NO: 10492 - protein, 7 aa, synthetic construct
RGDLIRN

SEQ ID NO: 10493 - protein, 7 aa, synthetic construct
RGDLKRN

SEQ ID NO: 10494 - protein, 7 aa, synthetic construct
RGDLKTV

SEQ ID NO: 10495 - protein, 7 aa, synthetic construct
RGDLLDT

SEQ ID NO: 10496 - protein, 7 aa, synthetic construct
RGDLLGQ

SEQ ID NO: 10497 - protein, 7 aa, synthetic construct
RGDASSV

SEQ ID NO: 10498 - protein, 7 aa, synthetic construct
RGDLSDV

SEQ ID NO: 10499 - protein, 7 aa, synthetic construct
RGDLSSS

SEQ ID NO: 10500 - protein, 7 aa, synthetic construct
RGDLSTG

SEQ ID NO: 10501 - protein, 7 aa, synthetic construct
RGDLVEK

SEQ ID NO: 10502 - protein, 7 aa, synthetic construct
RGDLVGN

SEQ ID NO: 10503 - protein, 7 aa, synthetic construct
RGDNATA

SEQ ID NO: 10504 - protein, 7 aa, synthetic construct
RGDATQR

SEQ ID NO: 10505 - protein, 7 aa, synthetic construct
RGDNEVV

SEQ ID NO: 10506 - protein, 7 aa, synthetic construct
RGDNFGI

SEQ ID NO: 10507 - protein, 7 aa, synthetic construct
RGDNGFL

SEQ ID NO: 10508 - protein, 7 aa, synthetic construct
RGDNGFR

SEQ ID NO: 10509 - protein, 7 aa, synthetic construct
RGDNHQR

SEQ ID NO: 10510 - protein, 7 aa, synthetic construct
RGDNIGI

SEQ ID NO: 10511 - protein, 7 aa, synthetic construct
RGDNLHR

SEQ ID NO: 10512 - protein, 7 aa, synthetic construct
RGDNQTK

SEQ ID NO: 10513 - protein, 7 aa, synthetic construct
RGDNRFQ

SEQ ID NO: 10514 - protein, 7 aa, synthetic construct
RGDNRTR

SEQ ID NO: 10515 - protein, 7 aa, synthetic construct
RGDAVQR

SEQ ID NO: 10516 - protein, 7 aa, synthetic construct
RGDNSQE

SEQ ID NO: 10517 - protein, 7 aa, synthetic construct
RGDQAAS

SEQ ID NO: 10518 - protein, 7 aa, synthetic construct
RGDQAFN

SEQ ID NO: 10519 - protein, 7 aa, synthetic construct
RGDQAGG

SEQ ID NO: 10520 - protein, 7 aa, synthetic construct
RGDQAHF

SEQ ID NO: 10521 - protein, 7 aa, synthetic construct
RGDQATR

SEQ ID NO: 10522 - protein, 7 aa, synthetic construct
RGDDAGQ

SEQ ID NO: 10523 - protein, 7 aa, synthetic construct
RGDQGGN

SEQ ID NO: 10524 - protein, 7 aa, synthetic construct
RGDQHHT

SEQ ID NO: 10525 - protein, 7 aa, synthetic construct
RGDQHTS

SEQ ID NO: 10526 - protein, 7 aa, synthetic construct
RGDQIHT

SEQ ID NO: 10527 - protein, 7 aa, synthetic construct
RGDQKQL

SEQ ID NO: 10528 - protein, 7 aa, synthetic construct
RGDQKQR

SEQ ID NO: 10529 - protein, 7 aa, synthetic construct
RGDQLAL

SEQ ID NO: 10530 - protein, 7 aa, synthetic construct
RGDQNKD

SEQ ID NO: 10531 - protein, 7 aa, synthetic construct
RGDQQEK

SEQ ID NO: 10532 - protein, 7 aa, synthetic construct
RGDQQEV

SEQ ID NO: 10533 - protein, 7 aa, synthetic construct
RGDQRLK

SEQ ID NO: 10534 - protein, 7 aa, synthetic construct
RGDDDFE

SEQ ID NO: 10535 - protein, 7 aa, synthetic construct
RGDQVTI

SEQ ID NO: 10536 - protein, 7 aa, synthetic construct
RGDRAFF

SEQ ID NO: 10537 - protein, 7 aa, synthetic construct
RGDRFFL

SEQ ID NO: 10538 - protein, 7 aa, synthetic construct
RGDRFVQ

SEQ ID NO: 10539 - protein, 7 aa, synthetic construct
RGDRGHN

SEQ ID NO: 10540 - protein, 7 aa, synthetic construct
RGDRGHT

SEQ ID NO: 10541 - protein, 7 aa, synthetic construct
RGDRGSH

SEQ ID NO: 10542 - protein, 7 aa, synthetic construct
RGDRHFT

SEQ ID NO: 10543 - protein, 7 aa, synthetic construct
RGDRHQQ

SEQ ID NO: 10544 - protein, 7 aa, synthetic construct
RGDRIKL

SEQ ID NO: 10545 - protein, 7 aa, synthetic construct
RGDRINI

SEQ ID NO: 10546 - protein, 7 aa, synthetic construct
RGDRITQ

SEQ ID NO: 10547 - protein, 7 aa, synthetic construct
RGDRIVT

SEQ ID NO: 10548 - protein, 7 aa, synthetic construct
RGDRKNH

SEQ ID NO: 10549 - protein, 7 aa, synthetic construct
RGDRLAS

SEQ ID NO: 10550 - protein, 7 aa, synthetic construct
RGDRNAA

SEQ ID NO: 10551 - protein, 7 aa, synthetic construct
RGDRNAS

SEQ ID NO: 10552 - protein, 7 aa, synthetic construct
RGDRNIT

SEQ ID NO: 10553 - protein, 7 aa, synthetic construct
RGDRNVS

SEQ ID NO: 10554 - protein, 7 aa, synthetic construct
RGDRQER

SEQ ID NO: 10555 - protein, 7 aa, synthetic construct
RGDRQKD

SEQ ID NO: 10556 - protein, 7 aa, synthetic construct
RGDRSFT

SEQ ID NO: 10557 - protein, 7 aa, synthetic construct
RGDRSQS

SEQ ID NO: 10558 - protein, 7 aa, synthetic construct
RGDRTRN

SEQ ID NO: 10559 - protein, 7 aa, synthetic construct
RGDRVGH

SEQ ID NO: 10560 - protein, 7 aa, synthetic construct
RGDRVGK

SEQ ID NO: 10561 - protein, 7 aa, synthetic construct
RGDSAHS

SEQ ID NO: 10562 - protein, 7 aa, synthetic construct
RGDSFVF

SEQ ID NO: 10563 - protein, 7 aa, synthetic construct
RGDSGFS

SEQ ID NO: 10564 - protein, 7 aa, synthetic construct
RGDSHLV

SEQ ID NO: 10565 - protein, 7 aa, synthetic construct
RGDSHQR

SEQ ID NO: 10566 - protein, 7 aa, synthetic construct
RGDSIHQ

SEQ ID NO: 10567 - protein, 7 aa, synthetic construct
RGDSIQK

SEQ ID NO: 10568 - protein, 7 aa, synthetic construct
RGDSNRQ

SEQ ID NO: 10569 - protein, 7 aa, synthetic construct
RGDSSFV

SEQ ID NO: 10570 - protein, 7 aa, synthetic construct
RGDSTKF

SEQ ID NO: 10571 - protein, 7 aa, synthetic construct
RGDSVGF

SEQ ID NO: 10572 - protein, 7 aa, synthetic construct
RGDSVLI

SEQ ID NO: 10573 - protein, 7 aa, synthetic construct
RGDSVTA

SEQ ID NO: 10574 - protein, 7 aa, synthetic construct
RGDTHAI

SEQ ID NO: 10575 - protein, 7 aa, synthetic construct
RGDTKLK

SEQ ID NO: 10576 - protein, 7 aa, synthetic construct
RGDDHHN

SEQ ID NO: 10577 - protein, 7 aa, synthetic construct
RGDTNAQ

SEQ ID NO: 10578 - protein, 7 aa, synthetic construct
RGDTNTR

SEQ ID NO: 10579 - protein, 7 aa, synthetic construct
RGDTRFL

SEQ ID NO: 10580 - protein, 7 aa, synthetic construct
RGDTRQF

SEQ ID NO: 10581 - protein, 7 aa, synthetic construct
RGDTRVQ

SEQ ID NO: 10582 - protein, 7 aa, synthetic construct
RGDTVHL

SEQ ID NO: 10583 - protein, 7 aa, synthetic construct
RGDTVLF

SEQ ID NO: 10584 - protein, 7 aa, synthetic construct
RGDVDNK

SEQ ID NO: 10585 - protein, 7 aa, synthetic construct
RGDVFFA

SEQ ID NO: 10586 - protein, 7 aa, synthetic construct
RGDVGGN

SEQ ID NO: 10587 - protein, 7 aa, synthetic construct
RGDVHKE

SEQ ID NO: 10588 - protein, 7 aa, synthetic construct
RGDVHLR

SEQ ID NO: 10589 - protein, 7 aa, synthetic construct
RGDVILT

SEQ ID NO: 10590 - protein, 7 aa, synthetic construct
RGDVKVL

SEQ ID NO: 10591 - protein, 7 aa, synthetic construct
RGDDISH

SEQ ID NO: 10592 - protein, 7 aa, synthetic construct
RGDDISI

SEQ ID NO: 10593 - protein, 7 aa, synthetic construct
RGDVNVK

SEQ ID NO: 10594 - protein, 7 aa, synthetic construct
RGDVQGL

SEQ ID NO: 10595 - protein, 7 aa, synthetic construct
RGDVRLN

SEQ ID NO: 10596 - protein, 7 aa, synthetic construct
RGDVRVA

SEQ ID NO: 10597 - protein, 7 aa, synthetic construct
RGDVSHR

SEQ ID NO: 10598 - protein, 7 aa, synthetic construct
RGDVTHA

SEQ ID NO: 10599 - protein, 7 aa, synthetic construct
RGDVVQL

SEQ ID NO: 10600 - protein, 7 aa, synthetic construct
RGDDLNN

SEQ ID NO: 10601 - protein, 7 aa, synthetic construct
RGDEDVK

SEQ ID NO: 10602 - protein, 7 aa, synthetic construct
RGDAFFI

SEQ ID NO: 10603 - protein, 7 aa, synthetic construct
RGDEGKN

SEQ ID NO: 10604 - protein, 7 aa, synthetic construct
RGDEGQR

SEQ ID NO: 10605 - protein, 7 aa, synthetic construct
RGDEHNR

SEQ ID NO: 10606 - protein, 7 aa, synthetic construct
RGDEHSR

SEQ ID NO: 10607 - protein, 7 aa, synthetic construct
RGDEHVV

SEQ ID NO: 10608 - protein, 7 aa, synthetic construct
RGDELGK

SEQ ID NO: 10609 - protein, 7 aa, synthetic construct
RGDEQFT

SEQ ID NO: 10610 - protein, 7 aa, synthetic construct
RGDAGAI

SEQ ID NO: 10611 - protein, 7 aa, synthetic construct
RGDAGAK

SEQ ID NO: 10612 - protein, 7 aa, synthetic construct
RGDFDLK

SEQ ID NO: 10613 - protein, 7 aa, synthetic construct
RGDFFHS

SEQ ID NO: 10614 - protein, 7 aa, synthetic construct
RGDFFSA

SEQ ID NO: 10615 - protein, 7 aa, synthetic construct
RGDFFTA

SEQ ID NO: 10616 - protein, 7 aa, synthetic construct
RGDFGSK

SEQ ID NO: 10617 - protein, 7 aa, synthetic construct
RGDFHSF

SEQ ID NO: 10618 - protein, 7 aa, synthetic construct
RGDFHTF

SEQ ID NO: 10619 - protein, 7 aa, synthetic construct
RGDFKDK

SEQ ID NO: 10620 - protein, 7 aa, synthetic construct
RGDFKKI

SEQ ID NO: 10621 - protein, 7 aa, synthetic construct
RGDAHFT

SEQ ID NO: 10622 - protein, 7 aa, synthetic construct
RGDFKNQ

SEQ ID NO: 10623 - protein, 7 aa, synthetic construct
RGDFKSV

SEQ ID NO: 10624 - protein, 7 aa, synthetic construct
RGDFKTA

SEQ ID NO: 10625 - protein, 7 aa, synthetic construct
RGDFLGH

SEQ ID NO: 10626 - protein, 7 aa, synthetic construct
RGDFNHV

SEQ ID NO: 10627 - protein, 7 aa, synthetic construct
RGDFNVT

SEQ ID NO: 10628 - protein, 7 aa, synthetic construct
RGDFQGG

SEQ ID NO: 10629 - protein, 7 aa, synthetic construct
RGDFQLH

SEQ ID NO: 10630 - protein, 7 aa, synthetic construct
RGDFRGG

SEQ ID NO: 10631 - protein, 7 aa, synthetic construct
RGDFTAT

SEQ ID NO: 10632 - protein, 7 aa, synthetic construct
RGDFTKF

SEQ ID NO: 10633 - protein, 7 aa, synthetic construct
RGDFTKH

SEQ ID NO: 10634 - protein, 7 aa, synthetic construct
RGDFTNT

SEQ ID NO: 10635 - protein, 7 aa, synthetic construct
RGDFTSV

SEQ ID NO: 10636 - protein, 7 aa, synthetic construct
RGDFVRV

SEQ ID NO: 10637 - protein, 7 aa, synthetic construct
RGDGAHI

SEQ ID NO: 10638 - protein, 7 aa, synthetic construct
RGDGFIV

SEQ ID NO: 10639 - protein, 7 aa, synthetic construct
RGDGFTR

SEQ ID NO: 10640 - protein, 7 aa, synthetic construct
RGDGGNN

SEQ ID NO: 10641 - protein, 7 aa, synthetic construct
RGDGGNQ

SEQ ID NO: 10642 - protein, 7 aa, synthetic construct
RGDGHKE

SEQ ID NO: 10643 - protein, 7 aa, synthetic construct
RGDAINL

SEQ ID NO: 10644 - protein, 7 aa, synthetic construct
RGDAIQK

SEQ ID NO: 10645 - protein, 7 aa, synthetic construct
RGDGNAN

SEQ ID NO: 10646 - protein, 7 aa, synthetic construct
RGDGNQI

SEQ ID NO: 10647 - protein, 7 aa, synthetic construct
RGDGQFQ

SEQ ID NO: 10648 - protein, 7 aa, synthetic construct
RGDGQNE

SEQ ID NO: 10649 - protein, 7 aa, synthetic construct
RGDGRFL

SEQ ID NO: 10650 - protein, 7 aa, synthetic construct
RGDGSSG

SEQ ID NO: 10651 - protein, 7 aa, synthetic construct
RGDGSTK

SEQ ID NO: 10652 - protein, 7 aa, synthetic construct
RGDAKGR

SEQ ID NO: 10653 - protein, 7 aa, synthetic construct
RGDGTRA

SEQ ID NO: 10654 - protein, 7 aa, synthetic construct
RGDGVNK

SEQ ID NO: 10655 - protein, 7 aa, synthetic construct
RGDGVVI

SEQ ID NO: 10656 - protein, 7 aa, synthetic construct
RGDHADR

SEQ ID NO: 10657 - protein, 7 aa, synthetic construct
RGDHAKT

SEQ ID NO: 10658 - protein, 7 aa, synthetic construct
RGDHASN

SEQ ID NO: 10659 - protein, 7 aa, synthetic construct
RGDAKNQ

SEQ ID NO: 10660 - protein, 7 aa, synthetic construct
RGDHDVE

SEQ ID NO: 10661 - protein, 7 aa, synthetic construct
RGDHGTV

SEQ ID NO: 10662 - protein, 7 aa, synthetic construct
RGDHHGQ

SEQ ID NO: 10663 - protein, 7 aa, synthetic construct
RGDHHTQ

SEQ ID NO: 10664 - protein, 7 aa, synthetic construct
RGDHITL

SEQ ID NO: 10665 - protein, 7 aa, synthetic construct
RGDHLTR

SEQ ID NO: 10666 - protein, 7 aa, synthetic construct
RGDHQSH

SEQ ID NO: 10667 - protein, 7 aa, synthetic construct
RGDHRKE

SEQ ID NO: 10668 - protein, 7 aa, synthetic construct
RGDHRNN

SEQ ID NO: 10669 - protein, 7 aa, synthetic construct
RGDHRQE

SEQ ID NO: 10670 - protein, 7 aa, synthetic construct
RGDHSRS

SEQ ID NO: 10671 - protein, 7 aa, synthetic construct
RGDHTNS

SEQ ID NO: 10672 - protein, 7 aa, synthetic construct
RGDHVKS

SEQ ID NO: 10673 - protein, 7 aa, synthetic construct
RGDIAGR

SEQ ID NO: 10674 - protein, 7 aa, synthetic construct
RGDIAHT

SEQ ID NO: 10675 - protein, 7 aa, synthetic construct
RGDIAKN

SEQ ID NO: 10676 - protein, 7 aa, synthetic construct
RGDIEVI

SEQ ID NO: 10677 - protein, 7 aa, synthetic construct
RGDIFAR

SEQ ID NO: 10678 - protein, 7 aa, synthetic construct
RGDIGGR

SEQ ID NO: 10679 - protein, 7 aa, synthetic construct
RGDIHGR

SEQ ID NO: 10680 - protein, 7 aa, synthetic construct
RGDIHHT

SEQ ID NO: 10681 - protein, 7 aa, synthetic construct
RGDIIKK

SEQ ID NO: 10682 - protein, 7 aa, synthetic construct
RGDIINK

SEQ ID NO: 10683 - protein, 7 aa, synthetic construct
RGDIKLR

SEQ ID NO: 10684 - protein, 7 aa, synthetic construct
RGDINKN

SEQ ID NO: 10685 - protein, 7 aa, synthetic construct
RGDISHA

SEQ ID NO: 10686 - protein, 7 aa, synthetic construct
RGDISRF

SEQ ID NO: 10687 - protein, 7 aa, synthetic construct
RGDIVKL

SEQ ID NO: 10688 - protein, 7 aa, synthetic construct
RGDKAKR

SEQ ID NO: 10689 - protein, 7 aa, synthetic construct
RGDKDGH

SEQ ID NO: 10690 - protein, 7 aa, synthetic construct
RGDKDLQ

SEQ ID NO: 10691 - protein, 7 aa, synthetic construct
RGDKDQF

SEQ ID NO: 10692 - protein, 7 aa, synthetic construct
RGDKDSI

SEQ ID NO: 10693 - protein, 7 aa, synthetic construct
RGDKEVT

SEQ ID NO: 10694 - protein, 7 aa, synthetic construct
RGDKFKS

SEQ ID NO: 10695 - protein, 7 aa, synthetic construct
RGDKFQR

SEQ ID NO: 10696 - protein, 7 aa, synthetic construct
RGDKGGS

SEQ ID NO: 10697 - protein, 7 aa, synthetic construct
RGDKGTA

SEQ ID NO: 10698 - protein, 7 aa, synthetic construct
RGDKIII

SEQ ID NO: 10699 - protein, 7 aa, synthetic construct
RGDKIKT

SEQ ID NO: 10700 - protein, 7 aa, synthetic construct
RGDKKLH

SEQ ID NO: 10701 - protein, 7 aa, synthetic construct
RGDKLKS

SEQ ID NO: 10702 - protein, 7 aa, synthetic construct
RGDKLQN

SEQ ID NO: 10703 - protein, 7 aa, synthetic construct
RGDKSDA

SEQ ID NO: 10704 - protein, 7 aa, synthetic construct
RGDKSES

SEQ ID NO: 10705 - protein, 7 aa, synthetic construct
RGDKSQH

SEQ ID NO: 10706 - protein, 7 aa, synthetic construct
RGDKTNI

SEQ ID NO: 10707 - protein, 7 aa, synthetic construct
RGDKVDL

SEQ ID NO: 10708 - protein, 7 aa, synthetic construct
RGDKVTR

SEQ ID NO: 10709 - protein, 7 aa, synthetic construct
RGDLAIT

SEQ ID NO: 10710 - protein, 7 aa, synthetic construct
RGDLASV

SEQ ID NO: 10711 - protein, 7 aa, synthetic construct
RGDLDLK

SEQ ID NO: 10712 - protein, 7 aa, synthetic construct
RGDLDTS

SEQ ID NO: 10713 - protein, 7 aa, synthetic construct
RGDLEAA

SEQ ID NO: 10714 - protein, 7 aa, synthetic construct
RGDLESS

SEQ ID NO: 10715 - protein, 7 aa, synthetic construct
RGDLFQA

SEQ ID NO: 10716 - protein, 7 aa, synthetic construct
RGDLGGE

SEQ ID NO: 10717 - protein, 7 aa, synthetic construct
RGDLGLH

SEQ ID NO: 10718 - protein, 7 aa, synthetic construct
RGDLGSG

SEQ ID NO: 10719 - protein, 7 aa, synthetic construct
RGDLHTI

SEQ ID NO: 10720 - protein, 7 aa, synthetic construct
RGDLIST

SEQ ID NO: 10721 - protein, 7 aa, synthetic construct
RGDLITN

SEQ ID NO: 10722 - protein, 7 aa, synthetic construct
RGDLIVR

SEQ ID NO: 10723 - protein, 7 aa, synthetic construct
RGDLKLN

SEQ ID NO: 10724 - protein, 7 aa, synthetic construct
RGDASTL

SEQ ID NO: 10725 - protein, 7 aa, synthetic construct
RGDLQVA

SEQ ID NO: 10726 - protein, 7 aa, synthetic construct
RGDLSSF

SEQ ID NO: 10727 - protein, 7 aa, synthetic construct
RGDLTDR

SEQ ID NO: 10728 - protein, 7 aa, synthetic construct
RGDLTER

SEQ ID NO: 10729 - protein, 7 aa, synthetic construct
RGDLTTK

SEQ ID NO: 10730 - protein, 7 aa, synthetic construct
RGDLVLH

SEQ ID NO: 10731 - protein, 7 aa, synthetic construct
RGDNAGQ

SEQ ID NO: 10732 - protein, 7 aa, synthetic construct
RGDNALV

SEQ ID NO: 10733 - protein, 7 aa, synthetic construct
RGDNFAI

SEQ ID NO: 10734 - protein, 7 aa, synthetic construct
RGDNFSV

SEQ ID NO: 10735 - protein, 7 aa, synthetic construct
RGDNHNL

SEQ ID NO: 10736 - protein, 7 aa, synthetic construct
RGDNLNR

SEQ ID NO: 10737 - protein, 7 aa, synthetic construct
RGDNNNI

SEQ ID NO: 10738 - protein, 7 aa, synthetic construct
RGDNQFT

SEQ ID NO: 10739 - protein, 7 aa, synthetic construct
RGDNRKH

SEQ ID NO: 10740 - protein, 7 aa, synthetic construct
RGDNRSN

SEQ ID NO: 10741 - protein, 7 aa, synthetic construct
RGDAVQI

SEQ ID NO: 10742 - protein, 7 aa, synthetic construct
RGDNSQV

SEQ ID NO: 10743 - protein, 7 aa, synthetic construct
RGDNVKQ

SEQ ID NO: 10744 - protein, 7 aa, synthetic construct
RGDQANH

SEQ ID NO: 10745 - protein, 7 aa, synthetic construct
RGDQATS

SEQ ID NO: 10746 - protein, 7 aa, synthetic construct
RGDADKR

SEQ ID NO: 10747 - protein, 7 aa, synthetic construct
RGDQGAL

SEQ ID NO: 10748 - protein, 7 aa, synthetic construct
RGDQGEK

SEQ ID NO: 10749 - protein, 7 aa, synthetic construct
RGDQIRQ

SEQ ID NO: 10750 - protein, 7 aa, synthetic construct
RGDQKDG

SEQ ID NO: 10751 - protein, 7 aa, synthetic construct
RGDQNFI

SEQ ID NO: 10752 - protein, 7 aa, synthetic construct
RGDQNHA

SEQ ID NO: 10753 - protein, 7 aa, synthetic construct
RGDQNHS

SEQ ID NO: 10754 - protein, 7 aa, synthetic construct
RGDQRTD

SEQ ID NO: 10755 - protein, 7 aa, synthetic construct
RGDQSGR

SEQ ID NO: 10756 - protein, 7 aa, synthetic construct
RGDQSSK

SEQ ID NO: 10757 - protein, 7 aa, synthetic construct
RGDRAHI

SEQ ID NO: 10758 - protein, 7 aa, synthetic construct
RGDRDHN

SEQ ID NO: 10759 - protein, 7 aa, synthetic construct
RGDRDHV

SEQ ID NO: 10760 - protein, 7 aa, synthetic construct
RGDREVR

SEQ ID NO: 10761 - protein, 7 aa, synthetic construct
RGDRFVF

SEQ ID NO: 10762 - protein, 7 aa, synthetic construct
RGDRFVT

SEQ ID NO: 10763 - protein, 7 aa, synthetic construct
RGDRHSV

SEQ ID NO: 10764 - protein, 7 aa, synthetic construct
RGDRISR

SEQ ID NO: 10765 - protein, 7 aa, synthetic construct
RGDRKGE

SEQ ID NO: 10766 - protein, 7 aa, synthetic construct
RGDRKVE

SEQ ID NO: 10767 - protein, 7 aa, synthetic construct
RGDRLGG

SEQ ID NO: 10768 - protein, 7 aa, synthetic construct
RGDRNHK

SEQ ID NO: 10769 - protein, 7 aa, synthetic construct
RGDRNRG

SEQ ID NO: 10770 - protein, 7 aa, synthetic construct
RGDRNRV

SEQ ID NO: 10771 - protein, 7 aa, synthetic construct
RGDRQKN

SEQ ID NO: 10772 - protein, 7 aa, synthetic construct
RGDRSFK

SEQ ID NO: 10773 - protein, 7 aa, synthetic construct
RGDRSIH

SEQ ID NO: 10774 - protein, 7 aa, synthetic construct
RGDRTAL

SEQ ID NO: 10775 - protein, 7 aa, synthetic construct
RGDRTFE

SEQ ID NO: 10776 - protein, 7 aa, synthetic construct
RGDSENQ

SEQ ID NO: 10777 - protein, 7 aa, synthetic construct
RGDSENR

SEQ ID NO: 10778 - protein, 7 aa, synthetic construct
RGDSGIA

SEQ ID NO: 10779 - protein, 7 aa, synthetic construct
RGDSHAF

SEQ ID NO: 10780 - protein, 7 aa, synthetic construct
RGDSKFA

SEQ ID NO: 10781 - protein, 7 aa, synthetic construct
RGDSNAA

SEQ ID NO: 10782 - protein, 7 aa, synthetic construct
RGDSRNK

SEQ ID NO: 10783 - protein, 7 aa, synthetic construct
RGDSSGK

SEQ ID NO: 10784 - protein, 7 aa, synthetic construct
RGDSVFL

SEQ ID NO: 10785 - protein, 7 aa, synthetic construct
RGDSVQA

SEQ ID NO: 10786 - protein, 7 aa, synthetic construct
RGDTANH

SEQ ID NO: 10787 - protein, 7 aa, synthetic construct
RGDTEGH

SEQ ID NO: 10788 - protein, 7 aa, synthetic construct
RGDTENL

SEQ ID NO: 10789 - protein, 7 aa, synthetic construct
RGDTGGI

SEQ ID NO: 10790 - protein, 7 aa, synthetic construct
RGDTGKV

SEQ ID NO: 10791 - protein, 7 aa, synthetic construct
RGDTGLI

SEQ ID NO: 10792 - protein, 7 aa, synthetic construct
RGDTGVQ

SEQ ID NO: 10793 - protein, 7 aa, synthetic construct
RGDDHDR

SEQ ID NO: 10794 - protein, 7 aa, synthetic construct
RGDTIFT

SEQ ID NO: 10795 - protein, 7 aa, synthetic construct
RGDTIVS

SEQ ID NO: 10796 - protein, 7 aa, synthetic construct
RGDDHHA

SEQ ID NO: 10797 - protein, 7 aa, synthetic construct
RGDTLKE

SEQ ID NO: 10798 - protein, 7 aa, synthetic construct
RGDTRFG

SEQ ID NO: 10799 - protein, 7 aa, synthetic construct
RGDTRHV

SEQ ID NO: 10800 - protein, 7 aa, synthetic construct
RGDTTHT

SEQ ID NO: 10801 - protein, 7 aa, synthetic construct
RGDTTSL

SEQ ID NO: 10802 - protein, 7 aa, synthetic construct
RGDTVKR

SEQ ID NO: 10803 - protein, 7 aa, synthetic construct
RGDTVVL

SEQ ID NO: 10804 - protein, 7 aa, synthetic construct
RGDVAAL

SEQ ID NO: 10805 - protein, 7 aa, synthetic construct
RGDVAQI

SEQ ID NO: 10806 - protein, 7 aa, synthetic construct
RGDVEAL

SEQ ID NO: 10807 - protein, 7 aa, synthetic construct
RGDVEDG

SEQ ID NO: 10808 - protein, 7 aa, synthetic construct
RGDVEGI

SEQ ID NO: 10809 - protein, 7 aa, synthetic construct
RGDVFNV

SEQ ID NO: 10810 - protein, 7 aa, synthetic construct
RGDVGFN

SEQ ID NO: 10811 - protein, 7 aa, synthetic construct
RGDVGTA

SEQ ID NO: 10812 - protein, 7 aa, synthetic construct
RGDVGVN

SEQ ID NO: 10813 - protein, 7 aa, synthetic construct
RGDVHHN

SEQ ID NO: 10814 - protein, 7 aa, synthetic construct
RGDVIKD

SEQ ID NO: 10815 - protein, 7 aa, synthetic construct
RGDVKKF

SEQ ID NO: 10816 - protein, 7 aa, synthetic construct
RGDVKQN

SEQ ID NO: 10817 - protein, 7 aa, synthetic construct
RGDVKRV

SEQ ID NO: 10818 - protein, 7 aa, synthetic construct
RGDVQLF

SEQ ID NO: 10819 - protein, 7 aa, synthetic construct
RGDVRGH

SEQ ID NO: 10820 - protein, 7 aa, synthetic construct
RGDVRTH

SEQ ID NO: 10821 - protein, 7 aa, synthetic construct
RGDVSAL

SEQ ID NO: 10822 - protein, 7 aa, synthetic construct
RGDVTNH

SEQ ID NO: 10823 - protein, 7 aa, synthetic construct
RGDVVST

SEQ ID NO: 10824 - protein, 7 aa, synthetic construct
RGDDLNF

SEQ ID NO: 10825 - protein, 7 aa, synthetic construct
RGDDRRA

SEQ ID NO: 10826 - protein, 7 aa, synthetic construct
RGDDVGT

SEQ ID NO: 10827 - protein, 7 aa, synthetic construct
RGDEAVL

SEQ ID NO: 10828 - protein, 7 aa, synthetic construct
RGDEFLI

SEQ ID NO: 10829 - protein, 7 aa, synthetic construct
RGDEKHT

SEQ ID NO: 10830 - protein, 7 aa, synthetic construct
RGDENKD

SEQ ID NO: 10831 - protein, 7 aa, synthetic construct
RGDENNR

SEQ ID NO: 10832 - protein, 7 aa, synthetic construct
RGDERFF

SEQ ID NO: 10833 - protein, 7 aa, synthetic construct
RGDESRG

SEQ ID NO: 10834 - protein, 7 aa, synthetic construct
RGDFFAR

SEQ ID NO: 10835 - protein, 7 aa, synthetic construct
RGDFHEI

SEQ ID NO: 10836 - protein, 7 aa, synthetic construct
RGDFHEL

SEQ ID NO: 10837 - protein, 7 aa, synthetic construct
RGDFHTK

SEQ ID NO: 10838 - protein, 7 aa, synthetic construct
RGDFKHQ

SEQ ID NO: 10839 - protein, 7 aa, synthetic construct
RGDFLSQ

SEQ ID NO: 10840 - protein, 7 aa, synthetic construct
RGDFNSH

SEQ ID NO: 10841 - protein, 7 aa, synthetic construct
RGDFQKH

SEQ ID NO: 10842 - protein, 7 aa, synthetic construct
RGDFVER

SEQ ID NO: 10843 - protein, 7 aa, synthetic construct
RGDAHTR

SEQ ID NO: 10844 - protein, 7 aa, synthetic construct
RGDGAVI

SEQ ID NO: 10845 - protein, 7 aa, synthetic construct
RGDGEKI

SEQ ID NO: 10846 - protein, 7 aa, synthetic construct
RGDGHQQ

SEQ ID NO: 10847 - protein, 7 aa, synthetic construct
RGDGIHN

SEQ ID NO: 10848 - protein, 7 aa, synthetic construct
RGDGKFQ

SEQ ID NO: 10849 - protein, 7 aa, synthetic construct
RGDGKHH

SEQ ID NO: 10850 - protein, 7 aa, synthetic construct
RGDGNGA

SEQ ID NO: 10851 - protein, 7 aa, synthetic construct
RGDGNSH

SEQ ID NO: 10852 - protein, 7 aa, synthetic construct
RGDGQGE

SEQ ID NO: 10853 - protein, 7 aa, synthetic construct
RGDAKFA

SEQ ID NO: 10854 - protein, 7 aa, synthetic construct
RGDGTER

SEQ ID NO: 10855 - protein, 7 aa, synthetic construct
RGDGTNK

SEQ ID NO: 10856 - protein, 7 aa, synthetic construct
RGDHAKL

SEQ ID NO: 10857 - protein, 7 aa, synthetic construct
RGDHAST

SEQ ID NO: 10858 - protein, 7 aa, synthetic construct
RGDHFTL

SEQ ID NO: 10859 - protein, 7 aa, synthetic construct
RGDHGQA

SEQ ID NO: 10860 - protein, 7 aa, synthetic construct
RGDHIQL

SEQ ID NO: 10861 - protein, 7 aa, synthetic construct
RGDHITK

SEQ ID NO: 10862 - protein, 7 aa, synthetic construct
RGDHLRK

SEQ ID NO: 10863 - protein, 7 aa, synthetic construct
RGDHNAK

SEQ ID NO: 10864 - protein, 7 aa, synthetic construct
RGDHNKE

SEQ ID NO: 10865 - protein, 7 aa, synthetic construct
RGDHQAH

SEQ ID NO: 10866 - protein, 7 aa, synthetic construct
RGDHRSF

SEQ ID NO: 10867 - protein, 7 aa, synthetic construct
RGDHSEK

SEQ ID NO: 10868 - protein, 7 aa, synthetic construct
RGDHTAT

SEQ ID NO: 10869 - protein, 7 aa, synthetic construct
RGDHTER

SEQ ID NO: 10870 - protein, 7 aa, synthetic construct
RGDHVKN

SEQ ID NO: 10871 - protein, 7 aa, synthetic construct
RGDHVKT

SEQ ID NO: 10872 - protein, 7 aa, synthetic construct
RGDIASV

SEQ ID NO: 10873 - protein, 7 aa, synthetic construct
RGDIEDI

SEQ ID NO: 10874 - protein, 7 aa, synthetic construct
RGDIENQ

SEQ ID NO: 10875 - protein, 7 aa, synthetic construct
RGDIFFQ

SEQ ID NO: 10876 - protein, 7 aa, synthetic construct
RGDIHAF

SEQ ID NO: 10877 - protein, 7 aa, synthetic construct
RGDIHGV

SEQ ID NO: 10878 - protein, 7 aa, synthetic construct
RGDIHVN

SEQ ID NO: 10879 - protein, 7 aa, synthetic construct
RGDIITV

SEQ ID NO: 10880 - protein, 7 aa, synthetic construct
RGDIKKQ

SEQ ID NO: 10881 - protein, 7 aa, synthetic construct
RGDIKSN

SEQ ID NO: 10882 - protein, 7 aa, synthetic construct
RGDIQKQ

SEQ ID NO: 10883 - protein, 7 aa, synthetic construct
RGDIQTI

SEQ ID NO: 10884 - protein, 7 aa, synthetic construct
RGDIRFH

SEQ ID NO: 10885 - protein, 7 aa, synthetic construct
RGDISNH

SEQ ID NO: 10886 - protein, 7 aa, synthetic construct
RGDIVIF

SEQ ID NO: 10887 - protein, 7 aa, synthetic construct
RGDIVTL

SEQ ID NO: 10888 - protein, 7 aa, synthetic construct
RGDKEKV

SEQ ID NO: 10889 - protein, 7 aa, synthetic construct
RGDKGGQ

SEQ ID NO: 10890 - protein, 7 aa, synthetic construct
RGDKHSV

SEQ ID NO: 10891 - protein, 7 aa, synthetic construct
RGDKIHT

SEQ ID NO: 10892 - protein, 7 aa, synthetic construct
RGDKIRR

SEQ ID NO: 10893 - protein, 7 aa, synthetic construct
RGDKKFK

SEQ ID NO: 10894 - protein, 7 aa, synthetic construct
RGDKKGA

SEQ ID NO: 10895 - protein, 7 aa, synthetic construct
RGDKLGQ

SEQ ID NO: 10896 - protein, 7 aa, synthetic construct
RGDKNKQ

SEQ ID NO: 10897 - protein, 7 aa, synthetic construct
RGDKNTH

SEQ ID NO: 10898 - protein, 7 aa, synthetic construct
RGDKQQL

SEQ ID NO: 10899 - protein, 7 aa, synthetic construct
RGDKSNT

SEQ ID NO: 10900 - protein, 7 aa, synthetic construct
RGDKTRS

SEQ ID NO: 10901 - protein, 7 aa, synthetic construct
RGDKVGR

SEQ ID NO: 10902 - protein, 7 aa, synthetic construct
RGDKVSQ

SEQ ID NO: 10903 - protein, 7 aa, synthetic construct
RGDLEQK

SEQ ID NO: 10904 - protein, 7 aa, synthetic construct
RGDLFFA

SEQ ID NO: 10905 - protein, 7 aa, synthetic construct
RGDLFIT

SEQ ID NO: 10906 - protein, 7 aa, synthetic construct
RGDLGIK

SEQ ID NO: 10907 - protein, 7 aa, synthetic construct
RGDLGKK

SEQ ID NO: 10908 - protein, 7 aa, synthetic construct
RGDLIAQ

SEQ ID NO: 10909 - protein, 7 aa, synthetic construct
RGDLIFK

SEQ ID NO: 10910 - protein, 7 aa, synthetic construct
RGDLING

SEQ ID NO: 10911 - protein, 7 aa, synthetic construct
RGDLKFQ

SEQ ID NO: 10912 - protein, 7 aa, synthetic construct
RGDLKFR

SEQ ID NO: 10913 - protein, 7 aa, synthetic construct
RGDLLVN

SEQ ID NO: 10914 - protein, 7 aa, synthetic construct
RGDLNHT

SEQ ID NO: 10915 - protein, 7 aa, synthetic construct
RGDLRFR

SEQ ID NO: 10916 - protein, 7 aa, synthetic construct
RGDLRHI

SEQ ID NO: 10917 - protein, 7 aa, synthetic construct
RGDLRIF

SEQ ID NO: 10918 - protein, 7 aa, synthetic construct
RGDLVNI

SEQ ID NO: 10919 - protein, 7 aa, synthetic construct
RGDNANV

SEQ ID NO: 10920 - protein, 7 aa, synthetic construct
RGDNDHN

SEQ ID NO: 10921 - protein, 7 aa, synthetic construct
RGDNDQT

SEQ ID NO: 10922 - protein, 7 aa, synthetic construct
RGDNDRT

SEQ ID NO: 10923 - protein, 7 aa, synthetic construct
RGDNFSK

SEQ ID NO: 10924 - protein, 7 aa, synthetic construct
RGDNGIL

SEQ ID NO: 10925 - protein, 7 aa, synthetic construct
RGDNKHN

SEQ ID NO: 10926 - protein, 7 aa, synthetic construct
RGDNKVR

SEQ ID NO: 10927 - protein, 7 aa, synthetic construct
RGDNNRF

SEQ ID NO: 10928 - protein, 7 aa, synthetic construct
RGDNQTV

SEQ ID NO: 10929 - protein, 7 aa, synthetic construct
RGDNRKT

SEQ ID NO: 10930 - protein, 7 aa, synthetic construct
RGDNRTV

SEQ ID NO: 10931 - protein, 7 aa, synthetic construct
RGDQEES

SEQ ID NO: 10932 - protein, 7 aa, synthetic construct
RGDQFVI

SEQ ID NO: 10933 - protein, 7 aa, synthetic construct
RGDQHHF

SEQ ID NO: 10934 - protein, 7 aa, synthetic construct
RGDQIHS

SEQ ID NO: 10935 - protein, 7 aa, synthetic construct
RGDQIKR

SEQ ID NO: 10936 - protein, 7 aa, synthetic construct
RGDQLES

SEQ ID NO: 10937 - protein, 7 aa, synthetic construct
RGDDAVE

SEQ ID NO: 10938 - protein, 7 aa, synthetic construct
RGDQQRA

SEQ ID NO: 10939 - protein, 7 aa, synthetic construct
RGDQQSN

SEQ ID NO: 10940 - protein, 7 aa, synthetic construct
RGDQRQF

SEQ ID NO: 10941 - protein, 7 aa, synthetic construct
RGDQSSR

SEQ ID NO: 10942 - protein, 7 aa, synthetic construct
RGDQSTF

SEQ ID NO: 10943 - protein, 7 aa, synthetic construct
RGDQTEV

SEQ ID NO: 10944 - protein, 7 aa, synthetic construct
RGDQVVS

SEQ ID NO: 10945 - protein, 7 aa, synthetic construct
RGDRAHL

SEQ ID NO: 10946 - protein, 7 aa, synthetic construct
RGDRAKS

SEQ ID NO: 10947 - protein, 7 aa, synthetic construct
RGDRDFS

SEQ ID NO: 10948 - protein, 7 aa, synthetic construct
RGDRDVE

SEQ ID NO: 10949 - protein, 7 aa, synthetic construct
RGDREEK

SEQ ID NO: 10950 - protein, 7 aa, synthetic construct
RGDRGES

SEQ ID NO: 10951 - protein, 7 aa, synthetic construct
RGDRGNH

SEQ ID NO: 10952 - protein, 7 aa, synthetic construct
RGDRGNT

SEQ ID NO: 10953 - protein, 7 aa, synthetic construct
RGDRKGQ

SEQ ID NO: 10954 - protein, 7 aa, synthetic construct
RGDRNFG

SEQ ID NO: 10955 - protein, 7 aa, synthetic construct
RGDRQEQ

SEQ ID NO: 10956 - protein, 7 aa, synthetic construct
RGDRRAN

SEQ ID NO: 10957 - protein, 7 aa, synthetic construct
RGDRTHE

SEQ ID NO: 10958 - protein, 7 aa, synthetic construct
RGDRVFR

SEQ ID NO: 10959 - protein, 7 aa, synthetic construct
RGDRVRV

SEQ ID NO: 10960 - protein, 7 aa, synthetic construct
RGDRVVG

SEQ ID NO: 10961 - protein, 7 aa, synthetic construct
RGDSAVI

SEQ ID NO: 10962 - protein, 7 aa, synthetic construct
RGDSGDK

SEQ ID NO: 10963 - protein, 7 aa, synthetic construct
RGDSIVL

SEQ ID NO: 10964 - protein, 7 aa, synthetic construct
RGDSNVV

SEQ ID NO: 10965 - protein, 7 aa, synthetic construct
RGDSQDV

SEQ ID NO: 10966 - protein, 7 aa, synthetic construct
RGDSQRK

SEQ ID NO: 10967 - protein, 7 aa, synthetic construct
RGDSQTR

SEQ ID NO: 10968 - protein, 7 aa, synthetic construct
RGDSRFS

SEQ ID NO: 10969 - protein, 7 aa, synthetic construct
RGDSRQH

SEQ ID NO: 10970 - protein, 7 aa, synthetic construct
RGDSSHD

SEQ ID NO: 10971 - protein, 7 aa, synthetic construct
RGDSSTT

SEQ ID NO: 10972 - protein, 7 aa, synthetic construct
RGDTAQH

SEQ ID NO: 10973 - protein, 7 aa, synthetic construct
RGDTEFH

SEQ ID NO: 10974 - protein, 7 aa, synthetic construct
RGDTGHV

SEQ ID NO: 10975 - protein, 7 aa, synthetic construct
RGDTGKI

SEQ ID NO: 10976 - protein, 7 aa, synthetic construct
RGDTIFV

SEQ ID NO: 10977 - protein, 7 aa, synthetic construct
RGDTINR

SEQ ID NO: 10978 - protein, 7 aa, synthetic construct
RGDTIVQ

SEQ ID NO: 10979 - protein, 7 aa, synthetic construct
RGDTIVR

SEQ ID NO: 10980 - protein, 7 aa, synthetic construct
RGDTKKS

SEQ ID NO: 10981 - protein, 7 aa, synthetic construct
RGDTRGF

SEQ ID NO: 10982 - protein, 7 aa, synthetic construct
RGDTTKI

SEQ ID NO: 10983 - protein, 7 aa, synthetic construct
RGDDHTI

SEQ ID NO: 10984 - protein, 7 aa, synthetic construct
RGDVALV

SEQ ID NO: 10985 - protein, 7 aa, synthetic construct
RGDDIDT

SEQ ID NO: 10986 - protein, 7 aa, synthetic construct
RGDVFSI

SEQ ID NO: 10987 - protein, 7 aa, synthetic construct
RGDVIGI

SEQ ID NO: 10988 - protein, 7 aa, synthetic construct
RGDVIHS

SEQ ID NO: 10989 - protein, 7 aa, synthetic construct
RGDVKAN

SEQ ID NO: 10990 - protein, 7 aa, synthetic construct
RGDVLFQ

SEQ ID NO: 10991 - protein, 7 aa, synthetic construct
RGDVQKH

SEQ ID NO: 10992 - protein, 7 aa, synthetic construct
RGDVQSF

SEQ ID NO: 10993 - protein, 7 aa, synthetic construct
RGDVSDR

SEQ ID NO: 10994 - protein, 7 aa, synthetic construct
RGDVSRK

SEQ ID NO: 10995 - protein, 7 aa, synthetic construct
RGDVSRL

SEQ ID NO: 10996 - protein, 7 aa, synthetic construct
RGDVSSN

SEQ ID NO: 10997 - protein, 7 aa, synthetic construct
RGDVTSK

SEQ ID NO: 10998 - protein, 7 aa, synthetic construct
RGDVVGI

SEQ ID NO: 10999 - protein, 7 aa, synthetic construct
RGDDSGV

SEQ ID NO: 11000 - protein, 7 aa, synthetic construct
RGDDSLV

SEQ ID NO: 11001 - protein, 7 aa, synthetic construct
RGDDSNQ

SEQ ID NO: 11002 - protein, 7 aa, synthetic construct
RGDAERR

SEQ ID NO: 11003 - protein, 7 aa, synthetic construct
RGDDVHI

SEQ ID NO: 11004 - protein, 7 aa, synthetic construct
RGDEAKL

SEQ ID NO: 11005 - protein, 7 aa, synthetic construct
RGDEFKV

SEQ ID NO: 11006 - protein, 7 aa, synthetic construct
RGDEGVN

SEQ ID NO: 11007 - protein, 7 aa, synthetic construct
RGDEHKI

SEQ ID NO: 11008 - protein, 7 aa, synthetic construct
RGDEHSQ

SEQ ID NO: 11009 - protein, 7 aa, synthetic construct
RGDEIHS

SEQ ID NO: 11010 - protein, 7 aa, synthetic construct
RGDENNS

SEQ ID NO: 11011 - protein, 7 aa, synthetic construct
RGDERFD

SEQ ID NO: 11012 - protein, 7 aa, synthetic construct
RGDERSR

SEQ ID NO: 11013 - protein, 7 aa, synthetic construct
RGDETKV

SEQ ID NO: 11014 - protein, 7 aa, synthetic construct
RGDFANN

SEQ ID NO: 11015 - protein, 7 aa, synthetic construct
RGDFARA

SEQ ID NO: 11016 - protein, 7 aa, synthetic construct
RGDFENE

SEQ ID NO: 11017 - protein, 7 aa, synthetic construct
RGDAGRL

SEQ ID NO: 11018 - protein, 7 aa, synthetic construct
RGDFESL

SEQ ID NO: 11019 - protein, 7 aa, synthetic construct
RGDFFRR

SEQ ID NO: 11020 - protein, 7 aa, synthetic construct
RGDFHHN

SEQ ID NO: 11021 - protein, 7 aa, synthetic construct
RGDFHKN

SEQ ID NO: 11022 - protein, 7 aa, synthetic construct
RGDFIDN

SEQ ID NO: 11023 - protein, 7 aa, synthetic construct
RGDFILK

SEQ ID NO: 11024 - protein, 7 aa, synthetic construct
RGDFKEA

SEQ ID NO: 11025 - protein, 7 aa, synthetic construct
RGDFKGG

SEQ ID NO: 11026 - protein, 7 aa, synthetic construct
RGDFKLI

SEQ ID NO: 11027 - protein, 7 aa, synthetic construct
RGDFKVT

SEQ ID NO: 11028 - protein, 7 aa, synthetic construct
RGDFNKS

SEQ ID NO: 11029 - protein, 7 aa, synthetic construct
RGDFQEH

SEQ ID NO: 11030 - protein, 7 aa, synthetic construct
RGDFQFF

SEQ ID NO: 11031 - protein, 7 aa, synthetic construct
RGDFQST

SEQ ID NO: 11032 - protein, 7 aa, synthetic construct
RGDFSHE

SEQ ID NO: 11033 - protein, 7 aa, synthetic construct
RGDFSSV

SEQ ID NO: 11034 - protein, 7 aa, synthetic construct
RGDFSVF

SEQ ID NO: 11035 - protein, 7 aa, synthetic construct
RGDFTRF

SEQ ID NO: 11036 - protein, 7 aa, synthetic construct
RGDAHTT

SEQ ID NO: 11037 - protein, 7 aa, synthetic construct
RGDFVQT

SEQ ID NO: 11038 - protein, 7 aa, synthetic construct
RGDGANV

SEQ ID NO: 11039 - protein, 7 aa, synthetic construct
RGDGASN

SEQ ID NO: 11040 - protein, 7 aa, synthetic construct
RGDGATK

SEQ ID NO: 11041 - protein, 7 aa, synthetic construct
RGDGEVV

SEQ ID NO: 11042 - protein, 7 aa, synthetic construct
RGDGFNK

SEQ ID NO: 11043 - protein, 7 aa, synthetic construct
RGDGFQL

SEQ ID NO: 11044 - protein, 7 aa, synthetic construct
RGDGHDK

SEQ ID NO: 11045 - protein, 7 aa, synthetic construct
RGDGHHA

SEQ ID NO: 11046 - protein, 7 aa, synthetic construct
RGDAIRH

SEQ ID NO: 11047 - protein, 7 aa, synthetic construct
RGDGKQQ

SEQ ID NO: 11048 - protein, 7 aa, synthetic construct
RGDGREQ

SEQ ID NO: 11049 - protein, 7 aa, synthetic construct
RGDGSGQ

SEQ ID NO: 11050 - protein, 7 aa, synthetic construct
RGDGSNH

SEQ ID NO: 11051 - protein, 7 aa, synthetic construct
RGDGSQD

SEQ ID NO: 11052 - protein, 7 aa, synthetic construct
RGDGSTL

SEQ ID NO: 11053 - protein, 7 aa, synthetic construct
RGDAKGN

SEQ ID NO: 11054 - protein, 7 aa, synthetic construct
RGDAKLI

SEQ ID NO: 11055 - protein, 7 aa, synthetic construct
RGDHEAR

SEQ ID NO: 11056 - protein, 7 aa, synthetic construct
RGDHESE

SEQ ID NO: 11057 - protein, 7 aa, synthetic construct
RGDHESS

SEQ ID NO: 11058 - protein, 7 aa, synthetic construct
RGDHFKQ

SEQ ID NO: 11059 - protein, 7 aa, synthetic construct
RGDHHVV

SEQ ID NO: 11060 - protein, 7 aa, synthetic construct
RGDHIRI

SEQ ID NO: 11061 - protein, 7 aa, synthetic construct
RGDHKAG

SEQ ID NO: 11062 - protein, 7 aa, synthetic construct
RGDHKFK

SEQ ID NO: 11063 - protein, 7 aa, synthetic construct
RGDHLEI

SEQ ID NO: 11064 - protein, 7 aa, synthetic construct
RGDHRHN

SEQ ID NO: 11065 - protein, 7 aa, synthetic construct
RGDHRKQ

SEQ ID NO: 11066 - protein, 7 aa, synthetic construct
RGDHSDF

SEQ ID NO: 11067 - protein, 7 aa, synthetic construct
RGDHSER

SEQ ID NO: 11068 - protein, 7 aa, synthetic construct
RGDHSVT

SEQ ID NO: 11069 - protein, 7 aa, synthetic construct
RGDHVGN

SEQ ID NO: 11070 - protein, 7 aa, synthetic construct
RGDIAII

SEQ ID NO: 11071 - protein, 7 aa, synthetic construct
RGDIASA

SEQ ID NO: 11072 - protein, 7 aa, synthetic construct
RGDIFKQ

SEQ ID NO: 11073 - protein, 7 aa, synthetic construct
RGDIFNQ

SEQ ID NO: 11074 - protein, 7 aa, synthetic construct
RGDIGNN

SEQ ID NO: 11075 - protein, 7 aa, synthetic construct
RGDIHKN

SEQ ID NO: 11076 - protein, 7 aa, synthetic construct
RGDIIFV

SEQ ID NO: 11077 - protein, 7 aa, synthetic construct
RGDIKFF

SEQ ID NO: 11078 - protein, 7 aa, synthetic construct
RGDILGK

SEQ ID NO: 11079 - protein, 7 aa, synthetic construct
RGDILQN

SEQ ID NO: 11080 - protein, 7 aa, synthetic construct
RGDINNI

SEQ ID NO: 11081 - protein, 7 aa, synthetic construct
RGDINRR

SEQ ID NO: 11082 - protein, 7 aa, synthetic construct
RGDIQTL

SEQ ID NO: 11083 - protein, 7 aa, synthetic construct
RGDIQTT

SEQ ID NO: 11084 - protein, 7 aa, synthetic construct
RGDISQN

SEQ ID NO: 11085 - protein, 7 aa, synthetic construct
RGDITGQ

SEQ ID NO: 11086 - protein, 7 aa, synthetic construct
RGDITRF

SEQ ID NO: 11087 - protein, 7 aa, synthetic construct
RGDIVFQ

SEQ ID NO: 11088 - protein, 7 aa, synthetic construct
RGDIVGL

SEQ ID NO: 11089 - protein, 7 aa, synthetic construct
RGDKAKA

SEQ ID NO: 11090 - protein, 7 aa, synthetic construct
RGDKANE

SEQ ID NO: 11091 - protein, 7 aa, synthetic construct
RGDKEAH

SEQ ID NO: 11092 - protein, 7 aa, synthetic construct
RGDKFGR

SEQ ID NO: 11093 - protein, 7 aa, synthetic construct
RGDKFST

SEQ ID NO: 11094 - protein, 7 aa, synthetic construct
RGDKFTH

SEQ ID NO: 11095 - protein, 7 aa, synthetic construct
RGDKHHG

SEQ ID NO: 11096 - protein, 7 aa, synthetic construct
RGDKHKF

SEQ ID NO: 11097 - protein, 7 aa, synthetic construct
RGDKHTI

SEQ ID NO: 11098 - protein, 7 aa, synthetic construct
RGDKINV

SEQ ID NO: 11099 - protein, 7 aa, synthetic construct
RGDKIRI

SEQ ID NO: 11100 - protein, 7 aa, synthetic construct
RGDKNDE

SEQ ID NO: 11101 - protein, 7 aa, synthetic construct
RGDKNDN

SEQ ID NO: 11102 - protein, 7 aa, synthetic construct
RGDKNHD

SEQ ID NO: 11103 - protein, 7 aa, synthetic construct
RGDKNVF

SEQ ID NO: 11104 - protein, 7 aa, synthetic construct
RGDKNVT

SEQ ID NO: 11105 - protein, 7 aa, synthetic construct
RGDKRVI

SEQ ID NO: 11106 - protein, 7 aa, synthetic construct
RGDKSFL

SEQ ID NO: 11107 - protein, 7 aa, synthetic construct
RGDARTE

SEQ ID NO: 11108 - protein, 7 aa, synthetic construct
RGDARTT

SEQ ID NO: 11109 - protein, 7 aa, synthetic construct
RGDLDFN

SEQ ID NO: 11110 - protein, 7 aa, synthetic construct
RGDLFIV

SEQ ID NO: 11111 - protein, 7 aa, synthetic construct
RGDLGDH

SEQ ID NO: 11112 - protein, 7 aa, synthetic construct
RGDLHEQ

SEQ ID NO: 11113 - protein, 7 aa, synthetic construct
RGDLHQT

SEQ ID NO: 11114 - protein, 7 aa, synthetic construct
RGDLIHH

SEQ ID NO: 11115 - protein, 7 aa, synthetic construct
RGDLKET

SEQ ID NO: 11116 - protein, 7 aa, synthetic construct
RGDLKVK

SEQ ID NO: 11117 - protein, 7 aa, synthetic construct
RGDASSL

SEQ ID NO: 11118 - protein, 7 aa, synthetic construct
RGDLLST

SEQ ID NO: 11119 - protein, 7 aa, synthetic construct
RGDLNKK

SEQ ID NO: 11120 - protein, 7 aa, synthetic construct
RGDASVL

SEQ ID NO: 11121 - protein, 7 aa, synthetic construct
RGDASVT

SEQ ID NO: 11122 - protein, 7 aa, synthetic construct
RGDLQSN

SEQ ID NO: 11123 - protein, 7 aa, synthetic construct
RGDLRQS

SEQ ID NO: 11124 - protein, 7 aa, synthetic construct
RGDLRSI

SEQ ID NO: 11125 - protein, 7 aa, synthetic construct
RGDLRTQ

SEQ ID NO: 11126 - protein, 7 aa, synthetic construct
RGDLSAN

SEQ ID NO: 11127 - protein, 7 aa, synthetic construct
RGDLSIV

SEQ ID NO: 11128 - protein, 7 aa, synthetic construct
RGDLSSQ

SEQ ID NO: 11129 - protein, 7 aa, synthetic construct
RGDLSSR

SEQ ID NO: 11130 - protein, 7 aa, synthetic construct
RGDLVIR

SEQ ID NO: 11131 - protein, 7 aa, synthetic construct
RGDNAQN

SEQ ID NO: 11132 - protein, 7 aa, synthetic construct
RGDNASR

SEQ ID NO: 11133 - protein, 7 aa, synthetic construct
RGDNHGS

SEQ ID NO: 11134 - protein, 7 aa, synthetic construct
RGDNHTK

SEQ ID NO: 11135 - protein, 7 aa, synthetic construct
RGDNIFV

SEQ ID NO: 11136 - protein, 7 aa, synthetic construct
RGDNLTG

SEQ ID NO: 11137 - protein, 7 aa, synthetic construct
RGDNQKN

SEQ ID NO: 11138 - protein, 7 aa, synthetic construct
RGDAVNH

SEQ ID NO: 11139 - protein, 7 aa, synthetic construct
RGDNSKT

SEQ ID NO: 11140 - protein, 7 aa, synthetic construct
RGDNSQK

SEQ ID NO: 11141 - protein, 7 aa, synthetic construct
RGDNTFA

SEQ ID NO: 11142 - protein, 7 aa, synthetic construct
RGDNTFV

SEQ ID NO: 11143 - protein, 7 aa, synthetic construct
RGDAVTD

SEQ ID NO: 11144 - protein, 7 aa, synthetic construct
RGDNVFQ

SEQ ID NO: 11145 - protein, 7 aa, synthetic construct
RGDQDRS

SEQ ID NO: 11146 - protein, 7 aa, synthetic construct
RGDQHQS

SEQ ID NO: 11147 - protein, 7 aa, synthetic construct
RGDQIKH

SEQ ID NO: 11148 - protein, 7 aa, synthetic construct
RGDQIRF

SEQ ID NO: 11149 - protein, 7 aa, synthetic construct
RGDQISF

SEQ ID NO: 11150 - protein, 7 aa, synthetic construct
RGDQKGE

SEQ ID NO: 11151 - protein, 7 aa, synthetic construct
RGDQNFS

SEQ ID NO: 11152 - protein, 7 aa, synthetic construct
RGDQNIL

SEQ ID NO: 11153 - protein, 7 aa, synthetic construct
RGDQQRQ

SEQ ID NO: 11154 - protein, 7 aa, synthetic construct
RGDQRDK

SEQ ID NO: 11155 - protein, 7 aa, synthetic construct
RGDQRKH

SEQ ID NO: 11156 - protein, 7 aa, synthetic construct
RGDQSKE

SEQ ID NO: 11157 - protein, 7 aa, synthetic construct
RGDDDFR

SEQ ID NO: 11158 - protein, 7 aa, synthetic construct
RGDQVVK

SEQ ID NO: 11159 - protein, 7 aa, synthetic construct
RGDRAQQ

SEQ ID NO: 11160 - protein, 7 aa, synthetic construct
RGDRATQ

SEQ ID NO: 11161 - protein, 7 aa, synthetic construct
RGDRAVQ

SEQ ID NO: 11162 - protein, 7 aa, synthetic construct
RGDDDNA

SEQ ID NO: 11163 - protein, 7 aa, synthetic construct
RGDRFEI

SEQ ID NO: 11164 - protein, 7 aa, synthetic construct
RGDRFEV

SEQ ID NO: 11165 - protein, 7 aa, synthetic construct
RGDRGDV

SEQ ID NO: 11166 - protein, 7 aa, synthetic construct
RGDRHSI

SEQ ID NO: 11167 - protein, 7 aa, synthetic construct
RGDRHVN

SEQ ID NO: 11168 - protein, 7 aa, synthetic construct
RGDRIFA

SEQ ID NO: 11169 - protein, 7 aa, synthetic construct
RGDRIFN

SEQ ID NO: 11170 - protein, 7 aa, synthetic construct
RGDRQFT

SEQ ID NO: 11171 - protein, 7 aa, synthetic construct
RGDRQGR

SEQ ID NO: 11172 - protein, 7 aa, synthetic construct
RGDRRDF

SEQ ID NO: 11173 - protein, 7 aa, synthetic construct
RGDRVSL

SEQ ID NO: 11174 - protein, 7 aa, synthetic construct
RGDSATV

SEQ ID NO: 11175 - protein, 7 aa, synthetic construct
RGDSGAG

SEQ ID NO: 11176 - protein, 7 aa, synthetic construct
RGDSGGF

SEQ ID NO: 11177 - protein, 7 aa, synthetic construct
RGDSGNH

SEQ ID NO: 11178 - protein, 7 aa, synthetic construct
RGDSHAV

SEQ ID NO: 11179 - protein, 7 aa, synthetic construct
RGDSHNN

SEQ ID NO: 11180 - protein, 7 aa, synthetic construct
RGDSIKI

SEQ ID NO: 11181 - protein, 7 aa, synthetic construct
RGDSINK

SEQ ID NO: 11182 - protein, 7 aa, synthetic construct
RGDSIVQ

SEQ ID NO: 11183 - protein, 7 aa, synthetic construct
RGDSKFI

SEQ ID NO: 11184 - protein, 7 aa, synthetic construct
RGDDFRA

SEQ ID NO: 11185 - protein, 7 aa, synthetic construct
RGDSKNQ

SEQ ID NO: 11186 - protein, 7 aa, synthetic construct
RGDSLRS

SEQ ID NO: 11187 - protein, 7 aa, synthetic construct
RGDSNDG

SEQ ID NO: 11188 - protein, 7 aa, synthetic construct
RGDSQLL

SEQ ID NO: 11189 - protein, 7 aa, synthetic construct
RGDSRNN

SEQ ID NO: 11190 - protein, 7 aa, synthetic construct
RGDSTGT

SEQ ID NO: 11191 - protein, 7 aa, synthetic construct
RGDSTTT

SEQ ID NO: 11192 - protein, 7 aa, synthetic construct
RGDTDDG

SEQ ID NO: 11193 - protein, 7 aa, synthetic construct
RGDDGRQ

SEQ ID NO: 11194 - protein, 7 aa, synthetic construct
RGDTGTV

SEQ ID NO: 11195 - protein, 7 aa, synthetic construct
RGDTHQV

SEQ ID NO: 11196 - protein, 7 aa, synthetic construct
RGDTIHF

SEQ ID NO: 11197 - protein, 7 aa, synthetic construct
RGDTKTF

SEQ ID NO: 11198 - protein, 7 aa, synthetic construct
RGDTKVG

SEQ ID NO: 11199 - protein, 7 aa, synthetic construct
RGDTLVA

SEQ ID NO: 11200 - protein, 7 aa, synthetic construct
RGDTRQS

SEQ ID NO: 11201 - protein, 7 aa, synthetic construct
RGDTSKI

SEQ ID NO: 11202 - protein, 7 aa, synthetic construct
RGDTTSI

SEQ ID NO: 11203 - protein, 7 aa, synthetic construct
RGDVAHH

SEQ ID NO: 11204 - protein, 7 aa, synthetic construct
RGDVALI

SEQ ID NO: 11205 - protein, 7 aa, synthetic construct
RGDVARI

SEQ ID NO: 11206 - protein, 7 aa, synthetic construct
RGDVHGH

SEQ ID NO: 11207 - protein, 7 aa, synthetic construct
RGDVHHR

SEQ ID NO: 11208 - protein, 7 aa, synthetic construct
RGDVHNA

SEQ ID NO: 11209 - protein, 7 aa, synthetic construct
RGDVIRF

SEQ ID NO: 11210 - protein, 7 aa, synthetic construct
RGDVKQK

SEQ ID NO: 11211 - protein, 7 aa, synthetic construct
RGDVLIF

SEQ ID NO: 11212 - protein, 7 aa, synthetic construct
RGDVNFR

SEQ ID NO: 11213 - protein, 7 aa, synthetic construct
RGDVQVT

SEQ ID NO: 11214 - protein, 7 aa, synthetic construct
RGDVRKQ

SEQ ID NO: 11215 - protein, 7 aa, synthetic construct
RGDVSQN

SEQ ID NO: 11216 - protein, 7 aa, synthetic construct
RGDVSST

SEQ ID NO: 11217 - protein, 7 aa, synthetic construct
RGDDNSF

SEQ ID NO: 11218 - protein, 7 aa, synthetic construct
RGDEFTV

SEQ ID NO: 11219 - protein, 7 aa, synthetic construct
RGDELHT

SEQ ID NO: 11220 - protein, 7 aa, synthetic construct
RGDAGFI

SEQ ID NO: 11221 - protein, 7 aa, synthetic construct
RGDESHV

SEQ ID NO: 11222 - protein, 7 aa, synthetic construct
RGDFAEN

SEQ ID NO: 11223 - protein, 7 aa, synthetic construct
RGDFAFT

SEQ ID NO: 11224 - protein, 7 aa, synthetic construct
RGDFDVN

SEQ ID NO: 11225 - protein, 7 aa, synthetic construct
RGDFEKQ

SEQ ID NO: 11226 - protein, 7 aa, synthetic construct
RGDFENR

SEQ ID NO: 11227 - protein, 7 aa, synthetic construct
RGDFERR

SEQ ID NO: 11228 - protein, 7 aa, synthetic construct
RGDFFTI

SEQ ID NO: 11229 - protein, 7 aa, synthetic construct
RGDFGIA

SEQ ID NO: 11230 - protein, 7 aa, synthetic construct
RGDFHND

SEQ ID NO: 11231 - protein, 7 aa, synthetic construct
RGDFHTD

SEQ ID NO: 11232 - protein, 7 aa, synthetic construct
RGDFITG

SEQ ID NO: 11233 - protein, 7 aa, synthetic construct
RGDFLFN

SEQ ID NO: 11234 - protein, 7 aa, synthetic construct
RGDFNHG

SEQ ID NO: 11235 - protein, 7 aa, synthetic construct
RGDFSTF

SEQ ID NO: 11236 - protein, 7 aa, synthetic construct
RGDFSTI

SEQ ID NO: 11237 - protein, 7 aa, synthetic construct
RGDFTGR

SEQ ID NO: 11238 - protein, 7 aa, synthetic construct
RGDFTQS

SEQ ID NO: 11239 - protein, 7 aa, synthetic construct
RGDAHTI

SEQ ID NO: 11240 - protein, 7 aa, synthetic construct
RGDFVHR

SEQ ID NO: 11241 - protein, 7 aa, synthetic construct
RGDFVLK

SEQ ID NO: 11242 - protein, 7 aa, synthetic construct
RGDFVTQ

SEQ ID NO: 11243 - protein, 7 aa, synthetic construct
RGDGDFR

SEQ ID NO: 11244 - protein, 7 aa, synthetic construct
RGDGDGR

SEQ ID NO: 11245 - protein, 7 aa, synthetic construct
RGDGDLH

SEQ ID NO: 11246 - protein, 7 aa, synthetic construct
RGDGESR

SEQ ID NO: 11247 - protein, 7 aa, synthetic construct
RGDGGIQ

SEQ ID NO: 11248 - protein, 7 aa, synthetic construct
RGDGGTT

SEQ ID NO: 11249 - protein, 7 aa, synthetic construct
RGDAIKT

SEQ ID NO: 11250 - protein, 7 aa, synthetic construct
RGDGHRV

SEQ ID NO: 11251 - protein, 7 aa, synthetic construct
RGDGIGF

SEQ ID NO: 11252 - protein, 7 aa, synthetic construct
RGDGKFG

SEQ ID NO: 11253 - protein, 7 aa, synthetic construct
RGDGKFR

SEQ ID NO: 11254 - protein, 7 aa, synthetic construct
RGDGKKV

SEQ ID NO: 11255 - protein, 7 aa, synthetic construct
RGDGKRN

SEQ ID NO: 11256 - protein, 7 aa, synthetic construct
RGDAITI

SEQ ID NO: 11257 - protein, 7 aa, synthetic construct
RGDGNSK

SEQ ID NO: 11258 - protein, 7 aa, synthetic construct
RGDGQKV

SEQ ID NO: 11259 - protein, 7 aa, synthetic construct
RGDGRHV

SEQ ID NO: 11260 - protein, 7 aa, synthetic construct
RGDGTVR

SEQ ID NO: 11261 - protein, 7 aa, synthetic construct
RGDGVHG

SEQ ID NO: 11262 - protein, 7 aa, synthetic construct
RGDGVNL

SEQ ID NO: 11263 - protein, 7 aa, synthetic construct
RGDHATL

SEQ ID NO: 11264 - protein, 7 aa, synthetic construct
RGDHDDL

SEQ ID NO: 11265 - protein, 7 aa, synthetic construct
RGDHDFF

SEQ ID NO: 11266 - protein, 7 aa, synthetic construct
RGDHDVV

SEQ ID NO: 11267 - protein, 7 aa, synthetic construct
RGDHEVV

SEQ ID NO: 11268 - protein, 7 aa, synthetic construct
RGDAKSS

SEQ ID NO: 11269 - protein, 7 aa, synthetic construct
RGDHFRL

SEQ ID NO: 11270 - protein, 7 aa, synthetic construct
RGDHGQE

SEQ ID NO: 11271 - protein, 7 aa, synthetic construct
RGDHHDV

SEQ ID NO: 11272 - protein, 7 aa, synthetic construct
RGDHKSK

SEQ ID NO: 11273 - protein, 7 aa, synthetic construct
RGDHQTR

SEQ ID NO: 11274 - protein, 7 aa, synthetic construct
RGDHRKK

SEQ ID NO: 11275 - protein, 7 aa, synthetic construct
RGDHRQR

SEQ ID NO: 11276 - protein, 7 aa, synthetic construct
RGDHSKR

SEQ ID NO: 11277 - protein, 7 aa, synthetic construct
RGDHTHH

SEQ ID NO: 11278 - protein, 7 aa, synthetic construct
RGDAATF

SEQ ID NO: 11279 - protein, 7 aa, synthetic construct
RGDIAGL

SEQ ID NO: 11280 - protein, 7 aa, synthetic construct
RGDIAHL

SEQ ID NO: 11281 - protein, 7 aa, synthetic construct
RGDANFL

SEQ ID NO: 11282 - protein, 7 aa, synthetic construct
RGDIEKL

SEQ ID NO: 11283 - protein, 7 aa, synthetic construct
RGDIGQK

SEQ ID NO: 11284 - protein, 7 aa, synthetic construct
RGDIHNS

SEQ ID NO: 11285 - protein, 7 aa, synthetic construct
RGDIHRS

SEQ ID NO: 11286 - protein, 7 aa, synthetic construct
RGDIIRL

SEQ ID NO: 11287 - protein, 7 aa, synthetic construct
RGDIISL

SEQ ID NO: 11288 - protein, 7 aa, synthetic construct
RGDIKGH

SEQ ID NO: 11289 - protein, 7 aa, synthetic construct
RGDIKVH

SEQ ID NO: 11290 - protein, 7 aa, synthetic construct
RGDILKR

SEQ ID NO: 11291 - protein, 7 aa, synthetic construct
RGDILLV

SEQ ID NO: 11292 - protein, 7 aa, synthetic construct
RGDILRH

SEQ ID NO: 11293 - protein, 7 aa, synthetic construct
RGDINGN

SEQ ID NO: 11294 - protein, 7 aa, synthetic construct
RGDIQAT

SEQ ID NO: 11295 - protein, 7 aa, synthetic construct
RGDIQNN

SEQ ID NO: 11296 - protein, 7 aa, synthetic construct
RGDISIV

SEQ ID NO: 11297 - protein, 7 aa, synthetic construct
RGDITTK

SEQ ID NO: 11298 - protein, 7 aa, synthetic construct
RGDIVGR

SEQ ID NO: 11299 - protein, 7 aa, synthetic construct
RGDKAHA

SEQ ID NO: 11300 - protein, 7 aa, synthetic construct
RGDKFHL

SEQ ID NO: 11301 - protein, 7 aa, synthetic construct
RGDKFHS

SEQ ID NO: 11302 - protein, 7 aa, synthetic construct
RGDKGVS

SEQ ID NO: 11303 - protein, 7 aa, synthetic construct
RGDKHFN

SEQ ID NO: 11304 - protein, 7 aa, synthetic construct
RGDKHQL

SEQ ID NO: 11305 - protein, 7 aa, synthetic construct
RGDKHRN

SEQ ID NO: 11306 - protein, 7 aa, synthetic construct
RGDKILR

SEQ ID NO: 11307 - protein, 7 aa, synthetic construct
RGDKITR

SEQ ID NO: 11308 - protein, 7 aa, synthetic construct
RGDKKEL

SEQ ID NO: 11309 - protein, 7 aa, synthetic construct
RGDKKFF

SEQ ID NO: 11310 - protein, 7 aa, synthetic construct
RGDKKHR

SEQ ID NO: 11311 - protein, 7 aa, synthetic construct
RGDKKLA

SEQ ID NO: 11312 - protein, 7 aa, synthetic construct
RGDKKRN

SEQ ID NO: 11313 - protein, 7 aa, synthetic construct
RGDKLER

SEQ ID NO: 11314 - protein, 7 aa, synthetic construct
RGDARKL

SEQ ID NO: 11315 - protein, 7 aa, synthetic construct
RGDKRHK

SEQ ID NO: 11316 - protein, 7 aa, synthetic construct
RGDKRRE

SEQ ID NO: 11317 - protein, 7 aa, synthetic construct
RGDKTQV

SEQ ID NO: 11318 - protein, 7 aa, synthetic construct
RGDKVAK

SEQ ID NO: 11319 - protein, 7 aa, synthetic construct
RGDKVND

SEQ ID NO: 11320 - protein, 7 aa, synthetic construct
RGDLDHE

SEQ ID NO: 11321 - protein, 7 aa, synthetic construct
RGDLGIR

SEQ ID NO: 11322 - protein, 7 aa, synthetic construct
RGDLGKE

SEQ ID NO: 11323 - protein, 7 aa, synthetic construct
RGDLKNH

SEQ ID NO: 11324 - protein, 7 aa, synthetic construct
RGDLKSI

SEQ ID NO: 11325 - protein, 7 aa, synthetic construct
RGDLLKQ

SEQ ID NO: 11326 - protein, 7 aa, synthetic construct
RGDLLNI

SEQ ID NO: 11327 - protein, 7 aa, synthetic construct
RGDLRFN

SEQ ID NO: 11328 - protein, 7 aa, synthetic construct
RGDLSGN

SEQ ID NO: 11329 - protein, 7 aa, synthetic construct
RGDLVKR

SEQ ID NO: 11330 - protein, 7 aa, synthetic construct
RGDLVNN

SEQ ID NO: 11331 - protein, 7 aa, synthetic construct
RGDNAHF

SEQ ID NO: 11332 - protein, 7 aa, synthetic construct
RGDNEKN

SEQ ID NO: 11333 - protein, 7 aa, synthetic construct
RGDNERN

SEQ ID NO: 11334 - protein, 7 aa, synthetic construct
RGDATRR

SEQ ID NO: 11335 - protein, 7 aa, synthetic construct
RGDNKDI

SEQ ID NO: 11336 - protein, 7 aa, synthetic construct
RGDNLGR

SEQ ID NO: 11337 - protein, 7 aa, synthetic construct
RGDNLKE

SEQ ID NO: 11338 - protein, 7 aa, synthetic construct
RGDNLKK

SEQ ID NO: 11339 - protein, 7 aa, synthetic construct
RGDNNNK

SEQ ID NO: 11340 - protein, 7 aa, synthetic construct
RGDNRFT

SEQ ID NO: 11341 - protein, 7 aa, synthetic construct
RGDNRTQ

SEQ ID NO: 11342 - protein, 7 aa, synthetic construct
RGDNRVT

SEQ ID NO: 11343 - protein, 7 aa, synthetic construct
RGDNSGA

SEQ ID NO: 11344 - protein, 7 aa, synthetic construct
RGDNTHS

SEQ ID NO: 11345 - protein, 7 aa, synthetic construct
RGDNVEN

SEQ ID NO: 11346 - protein, 7 aa, synthetic construct
RGDNVRN

SEQ ID NO: 11347 - protein, 7 aa, synthetic construct
RGDQAEQ

SEQ ID NO: 11348 - protein, 7 aa, synthetic construct
RGDQALT

SEQ ID NO: 11349 - protein, 7 aa, synthetic construct
RGDQDGH

SEQ ID NO: 11350 - protein, 7 aa, synthetic construct
RGDQHRD

SEQ ID NO: 11351 - protein, 7 aa, synthetic construct
RGDQHSK

SEQ ID NO: 11352 - protein, 7 aa, synthetic construct
RGDQLHD

SEQ ID NO: 11353 - protein, 7 aa, synthetic construct
RGDQLQQ

SEQ ID NO: 11354 - protein, 7 aa, synthetic construct
RGDQNLI

SEQ ID NO: 11355 - protein, 7 aa, synthetic construct
RGDQQGN

SEQ ID NO: 11356 - protein, 7 aa, synthetic construct
RGDQRHQ

SEQ ID NO: 11357 - protein, 7 aa, synthetic construct
RGDQSFI

SEQ ID NO: 11358 - protein, 7 aa, synthetic construct
RGDQSQH

SEQ ID NO: 11359 - protein, 7 aa, synthetic construct
RGDQTKE

SEQ ID NO: 11360 - protein, 7 aa, synthetic construct
RGDQTRK

SEQ ID NO: 11361 - protein, 7 aa, synthetic construct
RGDQVLN

SEQ ID NO: 11362 - protein, 7 aa, synthetic construct
RGDRAFN

SEQ ID NO: 11363 - protein, 7 aa, synthetic construct
RGDRAKV

SEQ ID NO: 11364 - protein, 7 aa, synthetic construct
RGDRDLV

SEQ ID NO: 11365 - protein, 7 aa, synthetic construct
RGDRDST

SEQ ID NO: 11366 - protein, 7 aa, synthetic construct
RGDREHN

SEQ ID NO: 11367 - protein, 7 aa, synthetic construct
RGDREIT

SEQ ID NO: 11368 - protein, 7 aa, synthetic construct
RGDRELL

SEQ ID NO: 11369 - protein, 7 aa, synthetic construct
RGDREQL

SEQ ID NO: 11370 - protein, 7 aa, synthetic construct
RGDRETL

SEQ ID NO: 11371 - protein, 7 aa, synthetic construct
RGDRFLH

SEQ ID NO: 11372 - protein, 7 aa, synthetic construct
RGDRFTQ

SEQ ID NO: 11373 - protein, 7 aa, synthetic construct
RGDRGIL

SEQ ID NO: 11374 - protein, 7 aa, synthetic construct
RGDRHEN

SEQ ID NO: 11375 - protein, 7 aa, synthetic construct
RGDRHTK

SEQ ID NO: 11376 - protein, 7 aa, synthetic construct
RGDRHTQ

SEQ ID NO: 11377 - protein, 7 aa, synthetic construct
RGDRHVS

SEQ ID NO: 11378 - protein, 7 aa, synthetic construct
RGDRRDL

SEQ ID NO: 11379 - protein, 7 aa, synthetic construct
RGDRRHV

SEQ ID NO: 11380 - protein, 7 aa, synthetic construct
RGDRSNH

SEQ ID NO: 11381 - protein, 7 aa, synthetic construct
RGDRTTN

SEQ ID NO: 11382 - protein, 7 aa, synthetic construct
RGDSAER

SEQ ID NO: 11383 - protein, 7 aa, synthetic construct
RGDSDKG

SEQ ID NO: 11384 - protein, 7 aa, synthetic construct
RGDSDKK

SEQ ID NO: 11385 - protein, 7 aa, synthetic construct
RGDSESK

SEQ ID NO: 11386 - protein, 7 aa, synthetic construct
RGDSGIK

SEQ ID NO: 11387 - protein, 7 aa, synthetic construct
RGDSGTK

SEQ ID NO: 11388 - protein, 7 aa, synthetic construct
RGDSHIV

SEQ ID NO: 11389 - protein, 7 aa, synthetic construct
RGDSIHL

SEQ ID NO: 11390 - protein, 7 aa, synthetic construct
RGDSIIV

SEQ ID NO: 11391 - protein, 7 aa, synthetic construct
RGDSKNG

SEQ ID NO: 11392 - protein, 7 aa, synthetic construct
RGDSNQD

SEQ ID NO: 11393 - protein, 7 aa, synthetic construct
RGDSNRF

SEQ ID NO: 11394 - protein, 7 aa, synthetic construct
RGDSNTS

SEQ ID NO: 11395 - protein, 7 aa, synthetic construct
RGDSNVI

SEQ ID NO: 11396 - protein, 7 aa, synthetic construct
RGDSQDR

SEQ ID NO: 11397 - protein, 7 aa, synthetic construct
RGDSQQV

SEQ ID NO: 11398 - protein, 7 aa, synthetic construct
RGDSRTG

SEQ ID NO: 11399 - protein, 7 aa, synthetic construct
RGDSSDK

SEQ ID NO: 11400 - protein, 7 aa, synthetic construct
RGDSSFT

SEQ ID NO: 11401 - protein, 7 aa, synthetic construct
RGDSSNF

SEQ ID NO: 11402 - protein, 7 aa, synthetic construct
RGDSTFG

SEQ ID NO: 11403 - protein, 7 aa, synthetic construct
RGDSTIV

SEQ ID NO: 11404 - protein, 7 aa, synthetic construct
RGDTASN

SEQ ID NO: 11405 - protein, 7 aa, synthetic construct
RGDTDFK

SEQ ID NO: 11406 - protein, 7 aa, synthetic construct
RGDDGRH

SEQ ID NO: 11407 - protein, 7 aa, synthetic construct
RGDTGHS

SEQ ID NO: 11408 - protein, 7 aa, synthetic construct
RGDTILL

SEQ ID NO: 11409 - protein, 7 aa, synthetic construct
RGDTKGA

SEQ ID NO: 11410 - protein, 7 aa, synthetic construct
RGDTKTR

SEQ ID NO: 11411 - protein, 7 aa, synthetic construct
RGDTLET

SEQ ID NO: 11412 - protein, 7 aa, synthetic construct
RGDTLHT

SEQ ID NO: 11413 - protein, 7 aa, synthetic construct
RGDTNKA

SEQ ID NO: 11414 - protein, 7 aa, synthetic construct
RGDTNRI

SEQ ID NO: 11415 - protein, 7 aa, synthetic construct
RGDTRNG

SEQ ID NO: 11416 - protein, 7 aa, synthetic construct
RGDTRVN

SEQ ID NO: 11417 - protein, 7 aa, synthetic construct
RGDTTNK

SEQ ID NO: 11418 - protein, 7 aa, synthetic construct
RGDTTNR

SEQ ID NO: 11419 - protein, 7 aa, synthetic construct
RGDVFGR

SEQ ID NO: 11420 - protein, 7 aa, synthetic construct
RGDVFHL

SEQ ID NO: 11421 - protein, 7 aa, synthetic construct
RGDVHNK

SEQ ID NO: 11422 - protein, 7 aa, synthetic construct
RGDVISH

SEQ ID NO: 11423 - protein, 7 aa, synthetic construct
RGDVKDG

SEQ ID NO: 11424 - protein, 7 aa, synthetic construct
RGDVLGI

SEQ ID NO: 11425 - protein, 7 aa, synthetic construct
RGDVLKK

SEQ ID NO: 11426 - protein, 7 aa, synthetic construct
RGDVLVV

SEQ ID NO: 11427 - protein, 7 aa, synthetic construct
RGDVQEF

SEQ ID NO: 11428 - protein, 7 aa, synthetic construct
RGDVQQR

SEQ ID NO: 11429 - protein, 7 aa, synthetic construct
RGDVSKF

SEQ ID NO: 11430 - protein, 7 aa, synthetic construct
RGDVSKQ

SEQ ID NO: 11431 - protein, 7 aa, synthetic construct
RGDVSRF

SEQ ID NO: 11432 - protein, 7 aa, synthetic construct
RGDVTRD

SEQ ID NO: 11433 - protein, 7 aa, synthetic construct
RGDAEHI

SEQ ID NO: 11434 - protein, 7 aa, synthetic construct
RGDDSKL

SEQ ID NO: 11435 - protein, 7 aa, synthetic construct
RGDDVKH

SEQ ID NO: 11436 - protein, 7 aa, synthetic construct
RGDDVNN

SEQ ID NO: 11437 - protein, 7 aa, synthetic construct
RGDEAKD

SEQ ID NO: 11438 - protein, 7 aa, synthetic construct
RGDEAKH

SEQ ID NO: 11439 - protein, 7 aa, synthetic construct
RGDEDHT

SEQ ID NO: 11440 - protein, 7 aa, synthetic construct
RGDEGTF

SEQ ID NO: 11441 - protein, 7 aa, synthetic construct
RGDEHQK

SEQ ID NO: 11442 - protein, 7 aa, synthetic construct
RGDEKEN

SEQ ID NO: 11443 - protein, 7 aa, synthetic construct
RGDAFSV

SEQ ID NO: 11444 - protein, 7 aa, synthetic construct
RGDEQKL

SEQ ID NO: 11445 - protein, 7 aa, synthetic construct
RGDERII

SEQ ID NO: 11446 - protein, 7 aa, synthetic construct
RGDERNK

SEQ ID NO: 11447 - protein, 7 aa, synthetic construct
RGDERVN

SEQ ID NO: 11448 - protein, 7 aa, synthetic construct
RGDESRN

SEQ ID NO: 11449 - protein, 7 aa, synthetic construct
RGDFAAK

SEQ ID NO: 11450 - protein, 7 aa, synthetic construct
RGDFDEV

SEQ ID NO: 11451 - protein, 7 aa, synthetic construct
RGDFDQI

SEQ ID NO: 11452 - protein, 7 aa, synthetic construct
RGDFGKH

SEQ ID NO: 11453 - protein, 7 aa, synthetic construct
RGDFHEK

SEQ ID NO: 11454 - protein, 7 aa, synthetic construct
RGDFHGG

SEQ ID NO: 11455 - protein, 7 aa, synthetic construct
RGDAAKN

SEQ ID NO: 11456 - protein, 7 aa, synthetic construct
RGDFIGT

SEQ ID NO: 11457 - protein, 7 aa, synthetic construct
RGDFIQL

SEQ ID NO: 11458 - protein, 7 aa, synthetic construct
RGDFISS

SEQ ID NO: 11459 - protein, 7 aa, synthetic construct
RGDFKFI

SEQ ID NO: 11460 - protein, 7 aa, synthetic construct
RGDFLET

SEQ ID NO: 11461 - protein, 7 aa, synthetic construct
RGDFLHI

SEQ ID NO: 11462 - protein, 7 aa, synthetic construct
RGDFLNN

SEQ ID NO: 11463 - protein, 7 aa, synthetic construct
RGDFNEK

SEQ ID NO: 11464 - protein, 7 aa, synthetic construct
RGDFNHI

SEQ ID NO: 11465 - protein, 7 aa, synthetic construct
RGDFNQV

SEQ ID NO: 11466 - protein, 7 aa, synthetic construct
RGDFREK

SEQ ID NO: 11467 - protein, 7 aa, synthetic construct
RGDFSNG

SEQ ID NO: 11468 - protein, 7 aa, synthetic construct
RGDFSNS

SEQ ID NO: 11469 - protein, 7 aa, synthetic construct
RGDFTKA

SEQ ID NO: 11470 - protein, 7 aa, synthetic construct
RGDFVNT

SEQ ID NO: 11471 - protein, 7 aa, synthetic construct
RGDGAIK

SEQ ID NO: 11472 - protein, 7 aa, synthetic construct
RGDGGAL

SEQ ID NO: 11473 - protein, 7 aa, synthetic construct
RGDGGQF

SEQ ID NO: 11474 - protein, 7 aa, synthetic construct
RGDGGTR

SEQ ID NO: 11475 - protein, 7 aa, synthetic construct
RGDGHGN

SEQ ID NO: 11476 - protein, 7 aa, synthetic construct
RGDGHHR

SEQ ID NO: 11477 - protein, 7 aa, synthetic construct
RGDGIRF

SEQ ID NO: 11478 - protein, 7 aa, synthetic construct
RGDGLGF

SEQ ID NO: 11479 - protein, 7 aa, synthetic construct
RGDGLIF

SEQ ID NO: 11480 - protein, 7 aa, synthetic construct
RGDAITN

SEQ ID NO: 11481 - protein, 7 aa, synthetic construct
RGDGQER

SEQ ID NO: 11482 - protein, 7 aa, synthetic construct
RGDGSHQ

SEQ ID NO: 11483 - protein, 7 aa, synthetic construct
RGDGTEH

SEQ ID NO: 11484 - protein, 7 aa, synthetic construct
RGDGTGG

SEQ ID NO: 11485 - protein, 7 aa, synthetic construct
RGDGTRS

SEQ ID NO: 11486 - protein, 7 aa, synthetic construct
RGDGVEA

SEQ ID NO: 11487 - protein, 7 aa, synthetic construct
RGDGVVF

SEQ ID NO: 11488 - protein, 7 aa, synthetic construct
RGDHDIK

SEQ ID NO: 11489 - protein, 7 aa, synthetic construct
RGDHDSL

SEQ ID NO: 11490 - protein, 7 aa, synthetic construct
RGDHESH

SEQ ID NO: 11491 - protein, 7 aa, synthetic construct
RGDHFGL

SEQ ID NO: 11492 - protein, 7 aa, synthetic construct
RGDHFSI

SEQ ID NO: 11493 - protein, 7 aa, synthetic construct
RGDHGLG

SEQ ID NO: 11494 - protein, 7 aa, synthetic construct
RGDHKFI

SEQ ID NO: 11495 - protein, 7 aa, synthetic construct
RGDHLAL

SEQ ID NO: 11496 - protein, 7 aa, synthetic construct
RGDHNGF

SEQ ID NO: 11497 - protein, 7 aa, synthetic construct
RGDHNTQ

SEQ ID NO: 11498 - protein, 7 aa, synthetic construct
RGDHRGK

SEQ ID NO: 11499 - protein, 7 aa, synthetic construct
RGDHTRD

SEQ ID NO: 11500 - protein, 7 aa, synthetic construct
RGDHVHV

SEQ ID NO: 11501 - protein, 7 aa, synthetic construct
RGDIEEK

SEQ ID NO: 11502 - protein, 7 aa, synthetic construct
RGDIESK

SEQ ID NO: 11503 - protein, 7 aa, synthetic construct
RGDIGFQ

SEQ ID NO: 11504 - protein, 7 aa, synthetic construct
RGDIHHD

SEQ ID NO: 11505 - protein, 7 aa, synthetic construct
RGDIIHF

SEQ ID NO: 11506 - protein, 7 aa, synthetic construct
RGDIIHS

SEQ ID NO: 11507 - protein, 7 aa, synthetic construct
RGDIINQ

SEQ ID NO: 11508 - protein, 7 aa, synthetic construct
RGDIKTL

SEQ ID NO: 11509 - protein, 7 aa, synthetic construct
RGDILAR

SEQ ID NO: 11510 - protein, 7 aa, synthetic construct
RGDINFL

SEQ ID NO: 11511 - protein, 7 aa, synthetic construct
RGDAQAK

SEQ ID NO: 11512 - protein, 7 aa, synthetic construct
RGDIRLD

SEQ ID NO: 11513 - protein, 7 aa, synthetic construct
RGDIRQF

SEQ ID NO: 11514 - protein, 7 aa, synthetic construct
RGDAQFH

SEQ ID NO: 11515 - protein, 7 aa, synthetic construct
RGDISGL

SEQ ID NO: 11516 - protein, 7 aa, synthetic construct
RGDISQL

SEQ ID NO: 11517 - protein, 7 aa, synthetic construct
RGDISTI

SEQ ID NO: 11518 - protein, 7 aa, synthetic construct
RGDITQV

SEQ ID NO: 11519 - protein, 7 aa, synthetic construct
RGDIVQV

SEQ ID NO: 11520 - protein, 7 aa, synthetic construct
RGDKDTI

SEQ ID NO: 11521 - protein, 7 aa, synthetic construct
RGDKESK

SEQ ID NO: 11522 - protein, 7 aa, synthetic construct
RGDKEVL

SEQ ID NO: 11523 - protein, 7 aa, synthetic construct
RGDKGNH

SEQ ID NO: 11524 - protein, 7 aa, synthetic construct
RGDKGQN

SEQ ID NO: 11525 - protein, 7 aa, synthetic construct
RGDKGVD

SEQ ID NO: 11526 - protein, 7 aa, synthetic construct
RGDKKDE

SEQ ID NO: 11527 - protein, 7 aa, synthetic construct
RGDARGT

SEQ ID NO: 11528 - protein, 7 aa, synthetic construct
RGDKQFI

SEQ ID NO: 11529 - protein, 7 aa, synthetic construct
RGDKRHF

SEQ ID NO: 11530 - protein, 7 aa, synthetic construct
RGDKSSH

SEQ ID NO: 11531 - protein, 7 aa, synthetic construct
RGDLAKG

SEQ ID NO: 11532 - protein, 7 aa, synthetic construct
RGDASDR

SEQ ID NO: 11533 - protein, 7 aa, synthetic construct
RGDASFT

SEQ ID NO: 11534 - protein, 7 aa, synthetic construct
RGDLEVK

SEQ ID NO: 11535 - protein, 7 aa, synthetic construct
RGDLFHN

SEQ ID NO: 11536 - protein, 7 aa, synthetic construct
RGDLGFG

SEQ ID NO: 11537 - protein, 7 aa, synthetic construct
RGDLGNK

SEQ ID NO: 11538 - protein, 7 aa, synthetic construct
RGDLHET

SEQ ID NO: 11539 - protein, 7 aa, synthetic construct
RGDLHKE

SEQ ID NO: 11540 - protein, 7 aa, synthetic construct
RGDLIFT

SEQ ID NO: 11541 - protein, 7 aa, synthetic construct
RGDLIGG

SEQ ID NO: 11542 - protein, 7 aa, synthetic construct
RGDLILL

SEQ ID NO: 11543 - protein, 7 aa, synthetic construct
RGDLKDF

SEQ ID NO: 11544 - protein, 7 aa, synthetic construct
RGDLKTR

SEQ ID NO: 11545 - protein, 7 aa, synthetic construct
RGDASTG

SEQ ID NO: 11546 - protein, 7 aa, synthetic construct
RGDADGK

SEQ ID NO: 11547 - protein, 7 aa, synthetic construct
RGDLQKK

SEQ ID NO: 11548 - protein, 7 aa, synthetic construct
RGDLRTF

SEQ ID NO: 11549 - protein, 7 aa, synthetic construct
RGDLSEF

SEQ ID NO: 11550 - protein, 7 aa, synthetic construct
RGDADGS

SEQ ID NO: 11551 - protein, 7 aa, synthetic construct
RGDLVGH

SEQ ID NO: 11552 - protein, 7 aa, synthetic construct
RGDLVHQ

SEQ ID NO: 11553 - protein, 7 aa, synthetic construct
RGDNDRG

SEQ ID NO: 11554 - protein, 7 aa, synthetic construct
RGDNDTF

SEQ ID NO: 11555 - protein, 7 aa, synthetic construct
RGDNEHV

SEQ ID NO: 11556 - protein, 7 aa, synthetic construct
RGDATRL

SEQ ID NO: 11557 - protein, 7 aa, synthetic construct
RGDNGKQ

SEQ ID NO: 11558 - protein, 7 aa, synthetic construct
RGDNGRS

SEQ ID NO: 11559 - protein, 7 aa, synthetic construct
RGDNHLQ

SEQ ID NO: 11560 - protein, 7 aa, synthetic construct
RGDNIRH

SEQ ID NO: 11561 - protein, 7 aa, synthetic construct
RGDNISF

SEQ ID NO: 11562 - protein, 7 aa, synthetic construct
RGDNKRS

SEQ ID NO: 11563 - protein, 7 aa, synthetic construct
RGDNLKH

SEQ ID NO: 11564 - protein, 7 aa, synthetic construct
RGDAVHL

SEQ ID NO: 11565 - protein, 7 aa, synthetic construct
RGDNQRS

SEQ ID NO: 11566 - protein, 7 aa, synthetic construct
RGDNRAF

SEQ ID NO: 11567 - protein, 7 aa, synthetic construct
RGDNRNG

SEQ ID NO: 11568 - protein, 7 aa, synthetic construct
RGDNRVN

SEQ ID NO: 11569 - protein, 7 aa, synthetic construct
RGDNSRS

SEQ ID NO: 11570 - protein, 7 aa, synthetic construct
RGDNTGS

SEQ ID NO: 11571 - protein, 7 aa, synthetic construct
RGDNVFL

SEQ ID NO: 11572 - protein, 7 aa, synthetic construct
RGDNVSL

SEQ ID NO: 11573 - protein, 7 aa, synthetic construct
RGDNVVI

SEQ ID NO: 11574 - protein, 7 aa, synthetic construct
RGDQDNV

SEQ ID NO: 11575 - protein, 7 aa, synthetic construct
RGDQDSN

SEQ ID NO: 11576 - protein, 7 aa, synthetic construct
RGDQFTI

SEQ ID NO: 11577 - protein, 7 aa, synthetic construct
RGDQGFS

SEQ ID NO: 11578 - protein, 7 aa, synthetic construct
RGDQGHQ

SEQ ID NO: 11579 - protein, 7 aa, synthetic construct
RGDQGHS

SEQ ID NO: 11580 - protein, 7 aa, synthetic construct
RGDQGKA

SEQ ID NO: 11581 - protein, 7 aa, synthetic construct
RGDQGVD

SEQ ID NO: 11582 - protein, 7 aa, synthetic construct
RGDQKGS

SEQ ID NO: 11583 - protein, 7 aa, synthetic construct
RGDQLFT

SEQ ID NO: 11584 - protein, 7 aa, synthetic construct
RGDDATK

SEQ ID NO: 11585 - protein, 7 aa, synthetic construct
RGDQNDL

SEQ ID NO: 11586 - protein, 7 aa, synthetic construct
RGDQNLV

SEQ ID NO: 11587 - protein, 7 aa, synthetic construct
RGDQNTI

SEQ ID NO: 11588 - protein, 7 aa, synthetic construct
RGDDDGE

SEQ ID NO: 11589 - protein, 7 aa, synthetic construct
RGDDDHR

SEQ ID NO: 11590 - protein, 7 aa, synthetic construct
RGDRAKD

SEQ ID NO: 11591 - protein, 7 aa, synthetic construct
RGDRDDI

SEQ ID NO: 11592 - protein, 7 aa, synthetic construct
RGDRDGH

SEQ ID NO: 11593 - protein, 7 aa, synthetic construct
RGDREHA

SEQ ID NO: 11594 - protein, 7 aa, synthetic construct
RGDRFKV

SEQ ID NO: 11595 - protein, 7 aa, synthetic construct
RGDRFLT

SEQ ID NO: 11596 - protein, 7 aa, synthetic construct
RGDRHGS

SEQ ID NO: 11597 - protein, 7 aa, synthetic construct
RGDRIHV

SEQ ID NO: 11598 - protein, 7 aa, synthetic construct
RGDRKAS

SEQ ID NO: 11599 - protein, 7 aa, synthetic construct
RGDRKSL

SEQ ID NO: 11600 - protein, 7 aa, synthetic construct
RGDRNSE

SEQ ID NO: 11601 - protein, 7 aa, synthetic construct
RGDRRGS

SEQ ID NO: 11602 - protein, 7 aa, synthetic construct
RGDSAGI

SEQ ID NO: 11603 - protein, 7 aa, synthetic construct
RGDSAIV

SEQ ID NO: 11604 - protein, 7 aa, synthetic construct
RGDSASH

SEQ ID NO: 11605 - protein, 7 aa, synthetic construct
RGDSENK

SEQ ID NO: 11606 - protein, 7 aa, synthetic construct
RGDSFHR

SEQ ID NO: 11607 - protein, 7 aa, synthetic construct
RGDSGFL

SEQ ID NO: 11608 - protein, 7 aa, synthetic construct
RGDSGHE

SEQ ID NO: 11609 - protein, 7 aa, synthetic construct
RGDSHFK

SEQ ID NO: 11610 - protein, 7 aa, synthetic construct
RGDSHTT

SEQ ID NO: 11611 - protein, 7 aa, synthetic construct
RGDSKHF

SEQ ID NO: 11612 - protein, 7 aa, synthetic construct
RGDSKKF

SEQ ID NO: 11613 - protein, 7 aa, synthetic construct
RGDSKSS

SEQ ID NO: 11614 - protein, 7 aa, synthetic construct
RGDSNQL

SEQ ID NO: 11615 - protein, 7 aa, synthetic construct
RGDSQRI

SEQ ID NO: 11616 - protein, 7 aa, synthetic construct
RGDSRKV

SEQ ID NO: 11617 - protein, 7 aa, synthetic construct
RGDSVKQ

SEQ ID NO: 11618 - protein, 7 aa, synthetic construct
RGDSVTH

SEQ ID NO: 11619 - protein, 7 aa, synthetic construct
RGDTAHK

SEQ ID NO: 11620 - protein, 7 aa, synthetic construct
RGDTGGQ

SEQ ID NO: 11621 - protein, 7 aa, synthetic construct
RGDTIKR

SEQ ID NO: 11622 - protein, 7 aa, synthetic construct
RGDTKIE

SEQ ID NO: 11623 - protein, 7 aa, synthetic construct
RGDTKSQ

SEQ ID NO: 11624 - protein, 7 aa, synthetic construct
RGDTNLI

SEQ ID NO: 11625 - protein, 7 aa, synthetic construct
RGDTNNK

SEQ ID NO: 11626 - protein, 7 aa, synthetic construct
RGDTNRL

SEQ ID NO: 11627 - protein, 7 aa, synthetic construct
RGDTRIH

SEQ ID NO: 11628 - protein, 7 aa, synthetic construct
RGDTSTV

SEQ ID NO: 11629 - protein, 7 aa, synthetic construct
RGDTSVI

SEQ ID NO: 11630 - protein, 7 aa, synthetic construct
RGDVAFR

SEQ ID NO: 11631 - protein, 7 aa, synthetic construct
RGDVAQV

SEQ ID NO: 11632 - protein, 7 aa, synthetic construct
RGDVENF

SEQ ID NO: 11633 - protein, 7 aa, synthetic construct
RGDVFHV

SEQ ID NO: 11634 - protein, 7 aa, synthetic construct
RGDVGQD

SEQ ID NO: 11635 - protein, 7 aa, synthetic construct
RGDVGVS

SEQ ID NO: 11636 - protein, 7 aa, synthetic construct
RGDVHIQ

SEQ ID NO: 11637 - protein, 7 aa, synthetic construct
RGDVIKR

SEQ ID NO: 11638 - protein, 7 aa, synthetic construct
RGDVLHG

SEQ ID NO: 11639 - protein, 7 aa, synthetic construct
RGDVQER

SEQ ID NO: 11640 - protein, 7 aa, synthetic construct
RGDVQFK

SEQ ID NO: 11641 - protein, 7 aa, synthetic construct
RGDVQHN

SEQ ID NO: 11642 - protein, 7 aa, synthetic construct
RGDVRNA

SEQ ID NO: 11643 - protein, 7 aa, synthetic construct
RGDVRNK

SEQ ID NO: 11644 - protein, 7 aa, synthetic construct
RGDVSQE

SEQ ID NO: 11645 - protein, 7 aa, synthetic construct
RGDVSRA

SEQ ID NO: 11646 - protein, 7 aa, synthetic construct
RGDVTAF

SEQ ID NO: 11647 - protein, 7 aa, synthetic construct
RGDVTHR

SEQ ID NO: 11648 - protein, 7 aa, synthetic construct
RGDDKHI

SEQ ID NO: 11649 - protein, 7 aa, synthetic construct
RGDVTQS

SEQ ID NO: 11650 - protein, 7 aa, synthetic construct
RGDVVKK

SEQ ID NO: 11651 - protein, 7 aa, synthetic construct
RGDVVRN

SEQ ID NO: 11652 - protein, 7 aa, synthetic construct
RGDDRFK

SEQ ID NO: 11653 - protein, 7 aa, synthetic construct
RGDDRHT

SEQ ID NO: 11654 - protein, 7 aa, synthetic construct
RGDDSSN

SEQ ID NO: 11655 - protein, 7 aa, synthetic construct
RGDDSTQ

SEQ ID NO: 11656 - protein, 7 aa, synthetic construct
RGDEARG

SEQ ID NO: 11657 - protein, 7 aa, synthetic construct
RGDEGQA

SEQ ID NO: 11658 - protein, 7 aa, synthetic construct
RGDAFKL

SEQ ID NO: 11659 - protein, 7 aa, synthetic construct
RGDEHVF

SEQ ID NO: 11660 - protein, 7 aa, synthetic construct
RGDELAI

SEQ ID NO: 11661 - protein, 7 aa, synthetic construct
RGDERRE

SEQ ID NO: 11662 - protein, 7 aa, synthetic construct
RGDFAST

SEQ ID NO: 11663 - protein, 7 aa, synthetic construct
RGDFFHG

SEQ ID NO: 11664 - protein, 7 aa, synthetic construct
RGDFFHI

SEQ ID NO: 11665 - protein, 7 aa, synthetic construct
RGDFHFK

SEQ ID NO: 11666 - protein, 7 aa, synthetic construct
RGDFHGD

SEQ ID NO: 11667 - protein, 7 aa, synthetic construct
RGDFHGK

SEQ ID NO: 11668 - protein, 7 aa, synthetic construct
RGDFHSV

SEQ ID NO: 11669 - protein, 7 aa, synthetic construct
RGDFIRL

SEQ ID NO: 11670 - protein, 7 aa, synthetic construct
RGDFIVR

SEQ ID NO: 11671 - protein, 7 aa, synthetic construct
RGDFKGA

SEQ ID NO: 11672 - protein, 7 aa, synthetic construct
RGDFKRS

SEQ ID NO: 11673 - protein, 7 aa, synthetic construct
RGDFKVS

SEQ ID NO: 11674 - protein, 7 aa, synthetic construct
RGDFNSF

SEQ ID NO: 11675 - protein, 7 aa, synthetic construct
RGDFQAH

SEQ ID NO: 11676 - protein, 7 aa, synthetic construct
RGDFRKA

SEQ ID NO: 11677 - protein, 7 aa, synthetic construct
RGDFSAV

SEQ ID NO: 11678 - protein, 7 aa, synthetic construct
RGDFTGK

SEQ ID NO: 11679 - protein, 7 aa, synthetic construct
RGDFTHK

SEQ ID NO: 11680 - protein, 7 aa, synthetic construct
RGDFTKS

SEQ ID NO: 11681 - protein, 7 aa, synthetic construct
RGDFVEA

SEQ ID NO: 11682 - protein, 7 aa, synthetic construct
RGDFVSI

SEQ ID NO: 11683 - protein, 7 aa, synthetic construct
RGDGDFF

SEQ ID NO: 11684 - protein, 7 aa, synthetic construct
RGDGDSG

SEQ ID NO: 11685 - protein, 7 aa, synthetic construct
RGDGFNV

SEQ ID NO: 11686 - protein, 7 aa, synthetic construct
RGDGGHA

SEQ ID NO: 11687 - protein, 7 aa, synthetic construct
RGDGGVT

SEQ ID NO: 11688 - protein, 7 aa, synthetic construct
RGDGHNK

SEQ ID NO: 11689 - protein, 7 aa, synthetic construct
RGDGNHE

SEQ ID NO: 11690 - protein, 7 aa, synthetic construct
RGDGNQQ

SEQ ID NO: 11691 - protein, 7 aa, synthetic construct
RGDGRRA

SEQ ID NO: 11692 - protein, 7 aa, synthetic construct
RGDGTHV

SEQ ID NO: 11693 - protein, 7 aa, synthetic construct
RGDHAKE

SEQ ID NO: 11694 - protein, 7 aa, synthetic construct
RGDHDEQ

SEQ ID NO: 11695 - protein, 7 aa, synthetic construct
RGDHDQT

SEQ ID NO: 11696 - protein, 7 aa, synthetic construct
RGDHEKT

SEQ ID NO: 11697 - protein, 7 aa, synthetic construct
RGDHETQ

SEQ ID NO: 11698 - protein, 7 aa, synthetic construct
RGDAKSK

SEQ ID NO: 11699 - protein, 7 aa, synthetic construct
RGDHGSF

SEQ ID NO: 11700 - protein, 7 aa, synthetic construct
RGDHKGS

SEQ ID NO: 11701 - protein, 7 aa, synthetic construct
RGDHNFT

SEQ ID NO: 11702 - protein, 7 aa, synthetic construct
RGDHNKF

SEQ ID NO: 11703 - protein, 7 aa, synthetic construct
RGDHNNS

SEQ ID NO: 11704 - protein, 7 aa, synthetic construct
RGDHQEL

SEQ ID NO: 11705 - protein, 7 aa, synthetic construct
RGDHQRA

SEQ ID NO: 11706 - protein, 7 aa, synthetic construct
RGDHQRI

SEQ ID NO: 11707 - protein, 7 aa, synthetic construct
RGDHQRQ

SEQ ID NO: 11708 - protein, 7 aa, synthetic construct
RGDHRER

SEQ ID NO: 11709 - protein, 7 aa, synthetic construct
RGDHTHF

SEQ ID NO: 11710 - protein, 7 aa, synthetic construct
RGDHTKS

SEQ ID NO: 11711 - protein, 7 aa, synthetic construct
RGDHTRQ

SEQ ID NO: 11712 - protein, 7 aa, synthetic construct
RGDHVIL

SEQ ID NO: 11713 - protein, 7 aa, synthetic construct
RGDIEGH

SEQ ID NO: 11714 - protein, 7 aa, synthetic construct
RGDIFGH

SEQ ID NO: 11715 - protein, 7 aa, synthetic construct
RGDIFVQ

SEQ ID NO: 11716 - protein, 7 aa, synthetic construct
RGDIHHN

SEQ ID NO: 11717 - protein, 7 aa, synthetic construct
RGDIKIK

SEQ ID NO: 11718 - protein, 7 aa, synthetic construct
RGDIKKV

SEQ ID NO: 11719 - protein, 7 aa, synthetic construct
RGDIKQQ

SEQ ID NO: 11720 - protein, 7 aa, synthetic construct
RGDILIA

SEQ ID NO: 11721 - protein, 7 aa, synthetic construct
RGDINAF

SEQ ID NO: 11722 - protein, 7 aa, synthetic construct
RGDAAVV

SEQ ID NO: 11723 - protein, 7 aa, synthetic construct
RGDIRDN

SEQ ID NO: 11724 - protein, 7 aa, synthetic construct
RGDIVFH

SEQ ID NO: 11725 - protein, 7 aa, synthetic construct
RGDKDSF

SEQ ID NO: 11726 - protein, 7 aa, synthetic construct
RGDKDSH

SEQ ID NO: 11727 - protein, 7 aa, synthetic construct
RGDKEVQ

SEQ ID NO: 11728 - protein, 7 aa, synthetic construct
RGDKFFR

SEQ ID NO: 11729 - protein, 7 aa, synthetic construct
RGDKFNT

SEQ ID NO: 11730 - protein, 7 aa, synthetic construct
RGDKGAT

SEQ ID NO: 11731 - protein, 7 aa, synthetic construct
RGDKGEN

SEQ ID NO: 11732 - protein, 7 aa, synthetic construct
RGDAQVI

SEQ ID NO: 11733 - protein, 7 aa, synthetic construct
RGDKIVK

SEQ ID NO: 11734 - protein, 7 aa, synthetic construct
RGDKKIK

SEQ ID NO: 11735 - protein, 7 aa, synthetic construct
RGDKKIQ

SEQ ID NO: 11736 - protein, 7 aa, synthetic construct
RGDKKTG

SEQ ID NO: 11737 - protein, 7 aa, synthetic construct
RGDKNHT

SEQ ID NO: 11738 - protein, 7 aa, synthetic construct
RGDKQTQ

SEQ ID NO: 11739 - protein, 7 aa, synthetic construct
RGDKRSS

SEQ ID NO: 11740 - protein, 7 aa, synthetic construct
RGDKSDS

SEQ ID NO: 11741 - protein, 7 aa, synthetic construct
RGDKTSR

SEQ ID NO: 11742 - protein, 7 aa, synthetic construct
RGDKTSV

SEQ ID NO: 11743 - protein, 7 aa, synthetic construct
RGDKVSL

SEQ ID NO: 11744 - protein, 7 aa, synthetic construct
RGDARVS

SEQ ID NO: 11745 - protein, 7 aa, synthetic construct
RGDLAKR

SEQ ID NO: 11746 - protein, 7 aa, synthetic construct
RGDLERS

SEQ ID NO: 11747 - protein, 7 aa, synthetic construct
RGDLFFI

SEQ ID NO: 11748 - protein, 7 aa, synthetic construct
RGDLFHR

SEQ ID NO: 11749 - protein, 7 aa, synthetic construct
RGDLGHN

SEQ ID NO: 11750 - protein, 7 aa, synthetic construct
RGDLIQN

SEQ ID NO: 11751 - protein, 7 aa, synthetic construct
RGDLKGK

SEQ ID NO: 11752 - protein, 7 aa, synthetic construct
RGDLKLE

SEQ ID NO: 11753 - protein, 7 aa, synthetic construct
RGDLKQQ

SEQ ID NO: 11754 - protein, 7 aa, synthetic construct
RGDLNHV

SEQ ID NO: 11755 - protein, 7 aa, synthetic construct
RGDLRIG

SEQ ID NO: 11756 - protein, 7 aa, synthetic construct
RGDLRII

SEQ ID NO: 11757 - protein, 7 aa, synthetic construct
RGDLSLI

SEQ ID NO: 11758 - protein, 7 aa, synthetic construct
RGDLSLT

SEQ ID NO: 11759 - protein, 7 aa, synthetic construct
RGDATGH

SEQ ID NO: 11760 - protein, 7 aa, synthetic construct
RGDLTKS

SEQ ID NO: 11761 - protein, 7 aa, synthetic construct
RGDLTRD

SEQ ID NO: 11762 - protein, 7 aa, synthetic construct
RGDLTSQ

SEQ ID NO: 11763 - protein, 7 aa, synthetic construct
RGDLVHV

SEQ ID NO: 11764 - protein, 7 aa, synthetic construct
RGDNANL

SEQ ID NO: 11765 - protein, 7 aa, synthetic construct
RGDNARI

SEQ ID NO: 11766 - protein, 7 aa, synthetic construct
RGDNASI

SEQ ID NO: 11767 - protein, 7 aa, synthetic construct
RGDNESV

SEQ ID NO: 11768 - protein, 7 aa, synthetic construct
RGDNFHI

SEQ ID NO: 11769 - protein, 7 aa, synthetic construct
RGDNFKK

SEQ ID NO: 11770 - protein, 7 aa, synthetic construct
RGDNHFT

SEQ ID NO: 11771 - protein, 7 aa, synthetic construct
RGDNILR

SEQ ID NO: 11772 - protein, 7 aa, synthetic construct
RGDNKKA

SEQ ID NO: 11773 - protein, 7 aa, synthetic construct
RGDNKTT

SEQ ID NO: 11774 - protein, 7 aa, synthetic construct
RGDNLFI

SEQ ID NO: 11775 - protein, 7 aa, synthetic construct
RGDAVKA

SEQ ID NO: 11776 - protein, 7 aa, synthetic construct
RGDNQNG

SEQ ID NO: 11777 - protein, 7 aa, synthetic construct
RGDNRII

SEQ ID NO: 11778 - protein, 7 aa, synthetic construct
RGDNSEV

SEQ ID NO: 11779 - protein, 7 aa, synthetic construct
RGDNSGF

SEQ ID NO: 11780 - protein, 7 aa, synthetic construct
RGDNSVR

SEQ ID NO: 11781 - protein, 7 aa, synthetic construct
RGDNVKH

SEQ ID NO: 11782 - protein, 7 aa, synthetic construct
RGDQAAK

SEQ ID NO: 11783 - protein, 7 aa, synthetic construct
RGDQFNI

SEQ ID NO: 11784 - protein, 7 aa, synthetic construct
RGDQGGI

SEQ ID NO: 11785 - protein, 7 aa, synthetic construct
RGDQGQV

SEQ ID NO: 11786 - protein, 7 aa, synthetic construct
RGDQIGF

SEQ ID NO: 11787 - protein, 7 aa, synthetic construct
RGDQKIV

SEQ ID NO: 11788 - protein, 7 aa, synthetic construct
RGDQKKA

SEQ ID NO: 11789 - protein, 7 aa, synthetic construct
RGDQKQT

SEQ ID NO: 11790 - protein, 7 aa, synthetic construct
RGDQQLV

SEQ ID NO: 11791 - protein, 7 aa, synthetic construct
RGDQQQQ

SEQ ID NO: 11792 - protein, 7 aa, synthetic construct
RGDQSTQ

SEQ ID NO: 11793 - protein, 7 aa, synthetic construct
RGDQSVL

SEQ ID NO: 11794 - protein, 7 aa, synthetic construct
RGDQVLI

SEQ ID NO: 11795 - protein, 7 aa, synthetic construct
RGDQVLV

SEQ ID NO: 11796 - protein, 7 aa, synthetic construct
RGDQVQL

SEQ ID NO: 11797 - protein, 7 aa, synthetic construct
RGDQVRE

SEQ ID NO: 11798 - protein, 7 aa, synthetic construct
RGDRAFS

SEQ ID NO: 11799 - protein, 7 aa, synthetic construct
RGDRALH

SEQ ID NO: 11800 - protein, 7 aa, synthetic construct
RGDRATF

SEQ ID NO: 11801 - protein, 7 aa, synthetic construct
RGDREKA

SEQ ID NO: 11802 - protein, 7 aa, synthetic construct
RGDREQH

SEQ ID NO: 11803 - protein, 7 aa, synthetic construct
RGDRETF

SEQ ID NO: 11804 - protein, 7 aa, synthetic construct
RGDRFDR

SEQ ID NO: 11805 - protein, 7 aa, synthetic construct
RGDRGFD

SEQ ID NO: 11806 - protein, 7 aa, synthetic construct
RGDRGRG

SEQ ID NO: 11807 - protein, 7 aa, synthetic construct
RGDRGST

SEQ ID NO: 11808 - protein, 7 aa, synthetic construct
RGDRHHF

SEQ ID NO: 11809 - protein, 7 aa, synthetic construct
RGDRHRI

SEQ ID NO: 11810 - protein, 7 aa, synthetic construct
RGDRHSL

SEQ ID NO: 11811 - protein, 7 aa, synthetic construct
RGDRIHA

SEQ ID NO: 11812 - protein, 7 aa, synthetic construct
RGDRINS

SEQ ID NO: 11813 - protein, 7 aa, synthetic construct
RGDRKID

SEQ ID NO: 11814 - protein, 7 aa, synthetic construct
RGDRKIE

SEQ ID NO: 11815 - protein, 7 aa, synthetic construct
RGDRKIF

SEQ ID NO: 11816 - protein, 7 aa, synthetic construct
RGDRNDH

SEQ ID NO: 11817 - protein, 7 aa, synthetic construct
RGDRQIF

SEQ ID NO: 11818 - protein, 7 aa, synthetic construct
RGDRQIQ

SEQ ID NO: 11819 - protein, 7 aa, synthetic construct
RGDRQNT

SEQ ID NO: 11820 - protein, 7 aa, synthetic construct
RGDRRNH

SEQ ID NO: 11821 - protein, 7 aa, synthetic construct
RGDRRNV

SEQ ID NO: 11822 - protein, 7 aa, synthetic construct
RGDRSHL

SEQ ID NO: 11823 - protein, 7 aa, synthetic construct
RGDRTRK

SEQ ID NO: 11824 - protein, 7 aa, synthetic construct
RGDRVDR

SEQ ID NO: 11825 - protein, 7 aa, synthetic construct
RGDRVQL

SEQ ID NO: 11826 - protein, 7 aa, synthetic construct
RGDSDHI

SEQ ID NO: 11827 - protein, 7 aa, synthetic construct
RGDSDVI

SEQ ID NO: 11828 - protein, 7 aa, synthetic construct
RGDSGNN

SEQ ID NO: 11829 - protein, 7 aa, synthetic construct
RGDSHGQ

SEQ ID NO: 11830 - protein, 7 aa, synthetic construct
RGDSIHR

SEQ ID NO: 11831 - protein, 7 aa, synthetic construct
RGDSKTK

SEQ ID NO: 11832 - protein, 7 aa, synthetic construct
RGDSNGQ

SEQ ID NO: 11833 - protein, 7 aa, synthetic construct
RGDSQAS

SEQ ID NO: 11834 - protein, 7 aa, synthetic construct
RGDSSER

SEQ ID NO: 11835 - protein, 7 aa, synthetic construct
RGDADTS

SEQ ID NO: 11836 - protein, 7 aa, synthetic construct
RGDSTTI

SEQ ID NO: 11837 - protein, 7 aa, synthetic construct
RGDTFHI

SEQ ID NO: 11838 - protein, 7 aa, synthetic construct
RGDTGAK

SEQ ID NO: 11839 - protein, 7 aa, synthetic construct
RGDTGSL

SEQ ID NO: 11840 - protein, 7 aa, synthetic construct
RGDDGVV

SEQ ID NO: 11841 - protein, 7 aa, synthetic construct
RGDTHFH

SEQ ID NO: 11842 - protein, 7 aa, synthetic construct
RGDTHFR

SEQ ID NO: 11843 - protein, 7 aa, synthetic construct
RGDTHQQ

SEQ ID NO: 11844 - protein, 7 aa, synthetic construct
RGDTITR

SEQ ID NO: 11845 - protein, 7 aa, synthetic construct
RGDTKNR

SEQ ID NO: 11846 - protein, 7 aa, synthetic construct
RGDTKVV

SEQ ID NO: 11847 - protein, 7 aa, synthetic construct
RGDTLHL

SEQ ID NO: 11848 - protein, 7 aa, synthetic construct
RGDTLSN

SEQ ID NO: 11849 - protein, 7 aa, synthetic construct
RGDTNKR

SEQ ID NO: 11850 - protein, 7 aa, synthetic construct
RGDTQHT

SEQ ID NO: 11851 - protein, 7 aa, synthetic construct
RGDTRHN

SEQ ID NO: 11852 - protein, 7 aa, synthetic construct
RGDTSLI

SEQ ID NO: 11853 - protein, 7 aa, synthetic construct
RGDTSQI

SEQ ID NO: 11854 - protein, 7 aa, synthetic construct
RGDTTFL

SEQ ID NO: 11855 - protein, 7 aa, synthetic construct
RGDTTKS

SEQ ID NO: 11856 - protein, 7 aa, synthetic construct
RGDVDGK

SEQ ID NO: 11857 - protein, 7 aa, synthetic construct
RGDVGAN

SEQ ID NO: 11858 - protein, 7 aa, synthetic construct
RGDVHHV

SEQ ID NO: 11859 - protein, 7 aa, synthetic construct
RGDDINF

SEQ ID NO: 11860 - protein, 7 aa, synthetic construct
RGDVINT

SEQ ID NO: 11861 - protein, 7 aa, synthetic construct
RGDVIVV

SEQ ID NO: 11862 - protein, 7 aa, synthetic construct
RGDVKAQ

SEQ ID NO: 11863 - protein, 7 aa, synthetic construct
RGDVKLE

SEQ ID NO: 11864 - protein, 7 aa, synthetic construct
RGDVNGK

SEQ ID NO: 11865 - protein, 7 aa, synthetic construct
RGDVQTS

SEQ ID NO: 11866 - protein, 7 aa, synthetic construct
RGDVREF

SEQ ID NO: 11867 - protein, 7 aa, synthetic construct
RGDVRGS

SEQ ID NO: 11868 - protein, 7 aa, synthetic construct
RGDVRVD

SEQ ID NO: 11869 - protein, 7 aa, synthetic construct
RGDVSGA

SEQ ID NO: 11870 - protein, 7 aa, synthetic construct
RGDVSHF

SEQ ID NO: 11871 - protein, 7 aa, synthetic construct
RGDVSII

SEQ ID NO: 11872 - protein, 7 aa, synthetic construct
RGDVSSL

SEQ ID NO: 11873 - protein, 7 aa, synthetic construct
RGDVVTR

SEQ ID NO: 11874 - protein, 7 aa, synthetic construct
RGDDSKH

SEQ ID NO: 11875 - protein, 7 aa, synthetic construct
RGDEAIA

SEQ ID NO: 11876 - protein, 7 aa, synthetic construct
RGDEINE

SEQ ID NO: 11877 - protein, 7 aa, synthetic construct
RGDEKGE

SEQ ID NO: 11878 - protein, 7 aa, synthetic construct
RGDEKSR

SEQ ID NO: 11879 - protein, 7 aa, synthetic construct
RGDENHL

SEQ ID NO: 11880 - protein, 7 aa, synthetic construct
RGDENKL

SEQ ID NO: 11881 - protein, 7 aa, synthetic construct
RGDENLR

SEQ ID NO: 11882 - protein, 7 aa, synthetic construct
RGDFAHR

SEQ ID NO: 11883 - protein, 7 aa, synthetic construct
RGDFFSK

SEQ ID NO: 11884 - protein, 7 aa, synthetic construct
RGDFHGQ

SEQ ID NO: 11885 - protein, 7 aa, synthetic construct
RGDFIAN

SEQ ID NO: 11886 - protein, 7 aa, synthetic construct
RGDAHEK

SEQ ID NO: 11887 - protein, 7 aa, synthetic construct
RGDFIRI

SEQ ID NO: 11888 - protein, 7 aa, synthetic construct
RGDFLNQ

SEQ ID NO: 11889 - protein, 7 aa, synthetic construct
RGDFLQK

SEQ ID NO: 11890 - protein, 7 aa, synthetic construct
RGDFLRT

SEQ ID NO: 11891 - protein, 7 aa, synthetic construct
RGDFNNR

SEQ ID NO: 11892 - protein, 7 aa, synthetic construct
RGDFNTF

SEQ ID NO: 11893 - protein, 7 aa, synthetic construct
RGDFSLA

SEQ ID NO: 11894 - protein, 7 aa, synthetic construct
RGDFTNQ

SEQ ID NO: 11895 - protein, 7 aa, synthetic construct
RGDFTSH

SEQ ID NO: 11896 - protein, 7 aa, synthetic construct
RGDFVLS

SEQ ID NO: 11897 - protein, 7 aa, synthetic construct
RGDGALV

SEQ ID NO: 11898 - protein, 7 aa, synthetic construct
RGDGAQI

SEQ ID NO: 11899 - protein, 7 aa, synthetic construct
RGDGFQR

SEQ ID NO: 11900 - protein, 7 aa, synthetic construct
RGDGFSS

SEQ ID NO: 11901 - protein, 7 aa, synthetic construct
RGDGGDK

SEQ ID NO: 11902 - protein, 7 aa, synthetic construct
RGDGGDS

SEQ ID NO: 11903 - protein, 7 aa, synthetic construct
RGDGHGV

SEQ ID NO: 11904 - protein, 7 aa, synthetic construct
RGDGKQI

SEQ ID NO: 11905 - protein, 7 aa, synthetic construct
RGDGNHT

SEQ ID NO: 11906 - protein, 7 aa, synthetic construct
RGDGTFR

SEQ ID NO: 11907 - protein, 7 aa, synthetic construct
RGDGTFV

SEQ ID NO: 11908 - protein, 7 aa, synthetic construct
RGDGTKR

SEQ ID NO: 11909 - protein, 7 aa, synthetic construct
RGDGTNA

SEQ ID NO: 11910 - protein, 7 aa, synthetic construct
RGDGTNG

SEQ ID NO: 11911 - protein, 7 aa, synthetic construct
RGDGTRV

SEQ ID NO: 11912 - protein, 7 aa, synthetic construct
RGDGTSI

SEQ ID NO: 11913 - protein, 7 aa, synthetic construct
RGDGVHL

SEQ ID NO: 11914 - protein, 7 aa, synthetic construct
RGDGVSF

SEQ ID NO: 11915 - protein, 7 aa, synthetic construct
RGDHALV

SEQ ID NO: 11916 - protein, 7 aa, synthetic construct
RGDAKNV

SEQ ID NO: 11917 - protein, 7 aa, synthetic construct
RGDHEKF

SEQ ID NO: 11918 - protein, 7 aa, synthetic construct
RGDAARQ

SEQ ID NO: 11919 - protein, 7 aa, synthetic construct
RGDHFHK

SEQ ID NO: 11920 - protein, 7 aa, synthetic construct
RGDHFRK

SEQ ID NO: 11921 - protein, 7 aa, synthetic construct
RGDHGAT

SEQ ID NO: 11922 - protein, 7 aa, synthetic construct
RGDHGGG

SEQ ID NO: 11923 - protein, 7 aa, synthetic construct
RGDHKDH

SEQ ID NO: 11924 - protein, 7 aa, synthetic construct
RGDHKKG

SEQ ID NO: 11925 - protein, 7 aa, synthetic construct
RGDHLKI

SEQ ID NO: 11926 - protein, 7 aa, synthetic construct
RGDHNGI

SEQ ID NO: 11927 - protein, 7 aa, synthetic construct
RGDHQVV

SEQ ID NO: 11928 - protein, 7 aa, synthetic construct
RGDHSHA

SEQ ID NO: 11929 - protein, 7 aa, synthetic construct
RGDALTK

SEQ ID NO: 11930 - protein, 7 aa, synthetic construct
RGDIAGE

SEQ ID NO: 11931 - protein, 7 aa, synthetic construct
RGDIAHD

SEQ ID NO: 11932 - protein, 7 aa, synthetic construct
RGDIARL

SEQ ID NO: 11933 - protein, 7 aa, synthetic construct
RGDIARQ

SEQ ID NO: 11934 - protein, 7 aa, synthetic construct
RGDIAVR

SEQ ID NO: 11935 - protein, 7 aa, synthetic construct
RGDIFFV

SEQ ID NO: 11936 - protein, 7 aa, synthetic construct
RGDIFIQ

SEQ ID NO: 11937 - protein, 7 aa, synthetic construct
RGDIGNT

SEQ ID NO: 11938 - protein, 7 aa, synthetic construct
RGDIGTR

SEQ ID NO: 11939 - protein, 7 aa, synthetic construct
RGDIHLH

SEQ ID NO: 11940 - protein, 7 aa, synthetic construct
RGDIHNV

SEQ ID NO: 11941 - protein, 7 aa, synthetic construct
RGDIKRI

SEQ ID NO: 11942 - protein, 7 aa, synthetic construct
RGDILTL

SEQ ID NO: 11943 - protein, 7 aa, synthetic construct
RGDILVQ

SEQ ID NO: 11944 - protein, 7 aa, synthetic construct
RGDINSN

SEQ ID NO: 11945 - protein, 7 aa, synthetic construct
RGDINSS

SEQ ID NO: 11946 - protein, 7 aa, synthetic construct
RGDIRGQ

SEQ ID NO: 11947 - protein, 7 aa, synthetic construct
RGDIVNK

SEQ ID NO: 11948 - protein, 7 aa, synthetic construct
RGDIVTK

SEQ ID NO: 11949 - protein, 7 aa, synthetic construct
RGDKEHK

SEQ ID NO: 11950 - protein, 7 aa, synthetic construct
RGDKFLI

SEQ ID NO: 11951 - protein, 7 aa, synthetic construct
RGDKGHQ

SEQ ID NO: 11952 - protein, 7 aa, synthetic construct
RGDKIGK

SEQ ID NO: 11953 - protein, 7 aa, synthetic construct
RGDKIKF

SEQ ID NO: 11954 - protein, 7 aa, synthetic construct
RGDKIRH

SEQ ID NO: 11955 - protein, 7 aa, synthetic construct
RGDKKHL

SEQ ID NO: 11956 - protein, 7 aa, synthetic construct
RGDKNRT

SEQ ID NO: 11957 - protein, 7 aa, synthetic construct
RGDARLV

SEQ ID NO: 11958 - protein, 7 aa, synthetic construct
RGDKRHG

SEQ ID NO: 11959 - protein, 7 aa, synthetic construct
RGDKSEF

SEQ ID NO: 11960 - protein, 7 aa, synthetic construct
RGDKSNA

SEQ ID NO: 11961 - protein, 7 aa, synthetic construct
RGDKTKV

SEQ ID NO: 11962 - protein, 7 aa, synthetic construct
RGDKTLV

SEQ ID NO: 11963 - protein, 7 aa, synthetic construct
RGDKVHR

SEQ ID NO: 11964 - protein, 7 aa, synthetic construct
RGDKVVL

SEQ ID NO: 11965 - protein, 7 aa, synthetic construct
RGDLAQK

SEQ ID NO: 11966 - protein, 7 aa, synthetic construct
RGDLESV

SEQ ID NO: 11967 - protein, 7 aa, synthetic construct
RGDASGH

SEQ ID NO: 11968 - protein, 7 aa, synthetic construct
RGDLETV

SEQ ID NO: 11969 - protein, 7 aa, synthetic construct
RGDASKA

SEQ ID NO: 11970 - protein, 7 aa, synthetic construct
RGDLHDS

SEQ ID NO: 11971 - protein, 7 aa, synthetic construct
RGDLIAF

SEQ ID NO: 11972 - protein, 7 aa, synthetic construct
RGDLNDH

SEQ ID NO: 11973 - protein, 7 aa, synthetic construct
RGDLNGR

SEQ ID NO: 11974 - protein, 7 aa, synthetic construct
RGDLVLN

SEQ ID NO: 11975 - protein, 7 aa, synthetic construct
RGDLVRE

SEQ ID NO: 11976 - protein, 7 aa, synthetic construct
RGDNDQN

SEQ ID NO: 11977 - protein, 7 aa, synthetic construct
RGDNEHT

SEQ ID NO: 11978 - protein, 7 aa, synthetic construct
RGDNFRV

SEQ ID NO: 11979 - protein, 7 aa, synthetic construct
RGDNKNF

SEQ ID NO: 11980 - protein, 7 aa, synthetic construct
RGDNLFF

SEQ ID NO: 11981 - protein, 7 aa, synthetic construct
RGDNLSS

SEQ ID NO: 11982 - protein, 7 aa, synthetic construct
RGDNRAI

SEQ ID NO: 11983 - protein, 7 aa, synthetic construct
RGDNREV

SEQ ID NO: 11984 - protein, 7 aa, synthetic construct
RGDNRSI

SEQ ID NO: 11985 - protein, 7 aa, synthetic construct
RGDNSFH

SEQ ID NO: 11986 - protein, 7 aa, synthetic construct
RGDNSII

SEQ ID NO: 11987 - protein, 7 aa, synthetic construct
RGDAVST

SEQ ID NO: 11988 - protein, 7 aa, synthetic construct
RGDNVSN

SEQ ID NO: 11989 - protein, 7 aa, synthetic construct
RGDQDLR

SEQ ID NO: 11990 - protein, 7 aa, synthetic construct
RGDQETR

SEQ ID NO: 11991 - protein, 7 aa, synthetic construct
RGDQGRE

SEQ ID NO: 11992 - protein, 7 aa, synthetic construct
RGDQIHK

SEQ ID NO: 11993 - protein, 7 aa, synthetic construct
RGDQKEI

SEQ ID NO: 11994 - protein, 7 aa, synthetic construct
RGDQLHF

SEQ ID NO: 11995 - protein, 7 aa, synthetic construct
RGDQLHS

SEQ ID NO: 11996 - protein, 7 aa, synthetic construct
RGDQNRT

SEQ ID NO: 11997 - protein, 7 aa, synthetic construct
RGDRDNR

SEQ ID NO: 11998 - protein, 7 aa, synthetic construct
RGDRDRK

SEQ ID NO: 11999 - protein, 7 aa, synthetic construct
RGDREKD

SEQ ID NO: 12000 - protein, 7 aa, synthetic construct
RGDRERT

SEQ ID NO: 12001 - protein, 7 aa, synthetic construct
RGDRFFD

SEQ ID NO: 12002 - protein, 7 aa, synthetic construct
RGDRHAE

SEQ ID NO: 12003 - protein, 7 aa, synthetic construct
RGDRHFD

SEQ ID NO: 12004 - protein, 7 aa, synthetic construct
RGDRHVF

SEQ ID NO: 12005 - protein, 7 aa, synthetic construct
RGDRIHS

SEQ ID NO: 12006 - protein, 7 aa, synthetic construct
RGDRKEH

SEQ ID NO: 12007 - protein, 7 aa, synthetic construct
RGDRLIK

SEQ ID NO: 12008 - protein, 7 aa, synthetic construct
RGDRLLE

SEQ ID NO: 12009 - protein, 7 aa, synthetic construct
RGDRNLR

SEQ ID NO: 12010 - protein, 7 aa, synthetic construct
RGDRRVV

SEQ ID NO: 12011 - protein, 7 aa, synthetic construct
RGDRSHH

SEQ ID NO: 12012 - protein, 7 aa, synthetic construct
RGDRSHN

SEQ ID NO: 12013 - protein, 7 aa, synthetic construct
RGDRSLE

SEQ ID NO: 12014 - protein, 7 aa, synthetic construct
RGDRSVR

SEQ ID NO: 12015 - protein, 7 aa, synthetic construct
RGDRTVH

SEQ ID NO: 12016 - protein, 7 aa, synthetic construct
RGDSDTT

SEQ ID NO: 12017 - protein, 7 aa, synthetic construct
RGDSEHV

SEQ ID NO: 12018 - protein, 7 aa, synthetic construct
RGDDFHL

SEQ ID NO: 12019 - protein, 7 aa, synthetic construct
RGDSGVS

SEQ ID NO: 12020 - protein, 7 aa, synthetic construct
RGDSHGF

SEQ ID NO: 12021 - protein, 7 aa, synthetic construct
RGDDFLK

SEQ ID NO: 12022 - protein, 7 aa, synthetic construct
RGDSIKS

SEQ ID NO: 12023 - protein, 7 aa, synthetic construct
RGDSITQ

SEQ ID NO: 12024 - protein, 7 aa, synthetic construct
RGDSKFV

SEQ ID NO: 12025 - protein, 7 aa, synthetic construct
RGDDFQT

SEQ ID NO: 12026 - protein, 7 aa, synthetic construct
RGDSKRI

SEQ ID NO: 12027 - protein, 7 aa, synthetic construct
RGDSRFT

SEQ ID NO: 12028 - protein, 7 aa, synthetic construct
RGDSSEQ

SEQ ID NO: 12029 - protein, 7 aa, synthetic construct
RGDSSFR

SEQ ID NO: 12030 - protein, 7 aa, synthetic construct
RGDSSHV

SEQ ID NO: 12031 - protein, 7 aa, synthetic construct
RGDSVAL

SEQ ID NO: 12032 - protein, 7 aa, synthetic construct
RGDSVGI

SEQ ID NO: 12033 - protein, 7 aa, synthetic construct
RGDTAKI

SEQ ID NO: 12034 - protein, 7 aa, synthetic construct
RGDDGLV

SEQ ID NO: 12035 - protein, 7 aa, synthetic construct
RGDTERL

SEQ ID NO: 12036 - protein, 7 aa, synthetic construct
RGDTGTS

SEQ ID NO: 12037 - protein, 7 aa, synthetic construct
RGDTHIV

SEQ ID NO: 12038 - protein, 7 aa, synthetic construct
RGDTHNI

SEQ ID NO: 12039 - protein, 7 aa, synthetic construct
RGDTIVI

SEQ ID NO: 12040 - protein, 7 aa, synthetic construct
RGDTKGF

SEQ ID NO: 12041 - protein, 7 aa, synthetic construct
RGDTLIK

SEQ ID NO: 12042 - protein, 7 aa, synthetic construct
RGDTNTS

SEQ ID NO: 12043 - protein, 7 aa, synthetic construct
RGDTQVT

SEQ ID NO: 12044 - protein, 7 aa, synthetic construct
RGDTSNT

SEQ ID NO: 12045 - protein, 7 aa, synthetic construct
RGDVEFL

SEQ ID NO: 12046 - protein, 7 aa, synthetic construct
RGDVEHF

SEQ ID NO: 12047 - protein, 7 aa, synthetic construct
RGDVESV

SEQ ID NO: 12048 - protein, 7 aa, synthetic construct
RGDVGKN

SEQ ID NO: 12049 - protein, 7 aa, synthetic construct
RGDVGSV

SEQ ID NO: 12050 - protein, 7 aa, synthetic construct
RGDVHFN

SEQ ID NO: 12051 - protein, 7 aa, synthetic construct
RGDVIHG

SEQ ID NO: 12052 - protein, 7 aa, synthetic construct
RGDVIHV

SEQ ID NO: 12053 - protein, 7 aa, synthetic construct
RGDVILF

SEQ ID NO: 12054 - protein, 7 aa, synthetic construct
RGDVLHK

SEQ ID NO: 12055 - protein, 7 aa, synthetic construct
RGDVNKT

SEQ ID NO: 12056 - protein, 7 aa, synthetic construct
RGDVNSQ

SEQ ID NO: 12057 - protein, 7 aa, synthetic construct
RGDVRRH

SEQ ID NO: 12058 - protein, 7 aa, synthetic construct
RGDDQII

SEQ ID NO: 12059 - protein, 7 aa, synthetic construct
RGDDSHK

SEQ ID NO: 12060 - protein, 7 aa, synthetic construct
RGDAESF

SEQ ID NO: 12061 - protein, 7 aa, synthetic construct
RGDAESR

SEQ ID NO: 12062 - protein, 7 aa, synthetic construct
RGDDVQT

SEQ ID NO: 12063 - protein, 7 aa, synthetic construct
RGDEEVG

SEQ ID NO: 12064 - protein, 7 aa, synthetic construct
RGDAFKF

SEQ ID NO: 12065 - protein, 7 aa, synthetic construct
RGDEHKR

SEQ ID NO: 12066 - protein, 7 aa, synthetic construct
RGDEHSK

SEQ ID NO: 12067 - protein, 7 aa, synthetic construct
RGDEKSV

SEQ ID NO: 12068 - protein, 7 aa, synthetic construct
RGDELHI

SEQ ID NO: 12069 - protein, 7 aa, synthetic construct
RGDETRL

SEQ ID NO: 12070 - protein, 7 aa, synthetic construct
RGDEVHI

SEQ ID NO: 12071 - protein, 7 aa, synthetic construct
RGDFAKT

SEQ ID NO: 12072 - protein, 7 aa, synthetic construct
RGDFDAN

SEQ ID NO: 12073 - protein, 7 aa, synthetic construct
RGDFDHT

SEQ ID NO: 12074 - protein, 7 aa, synthetic construct
RGDFDKN

SEQ ID NO: 12075 - protein, 7 aa, synthetic construct
RGDFDLV

SEQ ID NO: 12076 - protein, 7 aa, synthetic construct
RGDFFKS

SEQ ID NO: 12077 - protein, 7 aa, synthetic construct
RGDFFSN

SEQ ID NO: 12078 - protein, 7 aa, synthetic construct
RGDFGGQ

SEQ ID NO: 12079 - protein, 7 aa, synthetic construct
RGDFGTQ

SEQ ID NO: 12080 - protein, 7 aa, synthetic construct
RGDFHIR

SEQ ID NO: 12081 - protein, 7 aa, synthetic construct
RGDFHNT

SEQ ID NO: 12082 - protein, 7 aa, synthetic construct
RGDFHVR

SEQ ID NO: 12083 - protein, 7 aa, synthetic construct
RGDFIHG

SEQ ID NO: 12084 - protein, 7 aa, synthetic construct
RGDFIHH

SEQ ID NO: 12085 - protein, 7 aa, synthetic construct
RGDFKKV

SEQ ID NO: 12086 - protein, 7 aa, synthetic construct
RGDFKLF

SEQ ID NO: 12087 - protein, 7 aa, synthetic construct
RGDFKLV

SEQ ID NO: 12088 - protein, 7 aa, synthetic construct
RGDFKNL

SEQ ID NO: 12089 - protein, 7 aa, synthetic construct
RGDFLAV

SEQ ID NO: 12090 - protein, 7 aa, synthetic construct
RGDFLDV

SEQ ID NO: 12091 - protein, 7 aa, synthetic construct
RGDAHGR

SEQ ID NO: 12092 - protein, 7 aa, synthetic construct
RGDFQNT

SEQ ID NO: 12093 - protein, 7 aa, synthetic construct
RGDFQTI

SEQ ID NO: 12094 - protein, 7 aa, synthetic construct
RGDFRAK

SEQ ID NO: 12095 - protein, 7 aa, synthetic construct
RGDFSKI

SEQ ID NO: 12096 - protein, 7 aa, synthetic construct
RGDFSLR

SEQ ID NO: 12097 - protein, 7 aa, synthetic construct
RGDFTGN

SEQ ID NO: 12098 - protein, 7 aa, synthetic construct
RGDFTQG

SEQ ID NO: 12099 - protein, 7 aa, synthetic construct
RGDAHTE

SEQ ID NO: 12100 - protein, 7 aa, synthetic construct
RGDGARL

SEQ ID NO: 12101 - protein, 7 aa, synthetic construct
RGDGASA

SEQ ID NO: 12102 - protein, 7 aa, synthetic construct
RGDAIER

SEQ ID NO: 12103 - protein, 7 aa, synthetic construct
RGDGFNN

SEQ ID NO: 12104 - protein, 7 aa, synthetic construct
RGDGGIF

SEQ ID NO: 12105 - protein, 7 aa, synthetic construct
RGDGHQR

SEQ ID NO: 12106 - protein, 7 aa, synthetic construct
RGDAINK

SEQ ID NO: 12107 - protein, 7 aa, synthetic construct
RGDGISI

SEQ ID NO: 12108 - protein, 7 aa, synthetic construct
RGDGKII

SEQ ID NO: 12109 - protein, 7 aa, synthetic construct
RGDGKRT

SEQ ID NO: 12110 - protein, 7 aa, synthetic construct
RGDGKSK

SEQ ID NO: 12111 - protein, 7 aa, synthetic construct
RGDGLIT

SEQ ID NO: 12112 - protein, 7 aa, synthetic construct
RGDAITR

SEQ ID NO: 12113 - protein, 7 aa, synthetic construct
RGDGNND

SEQ ID NO: 12114 - protein, 7 aa, synthetic construct
RGDGQQD

SEQ ID NO: 12115 - protein, 7 aa, synthetic construct
RGDGRRQ

SEQ ID NO: 12116 - protein, 7 aa, synthetic construct
RGDAKFK

SEQ ID NO: 12117 - protein, 7 aa, synthetic construct
RGDGTHL

SEQ ID NO: 12118 - protein, 7 aa, synthetic construct
RGDGVES

SEQ ID NO: 12119 - protein, 7 aa, synthetic construct
RGDHAGI

SEQ ID NO: 12120 - protein, 7 aa, synthetic construct
RGDHDFL

SEQ ID NO: 12121 - protein, 7 aa, synthetic construct
RGDAKNT

SEQ ID NO: 12122 - protein, 7 aa, synthetic construct
RGDHFRI

SEQ ID NO: 12123 - protein, 7 aa, synthetic construct
RGDHGIS

SEQ ID NO: 12124 - protein, 7 aa, synthetic construct
RGDHHDN

SEQ ID NO: 12125 - protein, 7 aa, synthetic construct
RGDHHNE

SEQ ID NO: 12126 - protein, 7 aa, synthetic construct
RGDHIGI

SEQ ID NO: 12127 - protein, 7 aa, synthetic construct
RGDHKEF

SEQ ID NO: 12128 - protein, 7 aa, synthetic construct
RGDHKQG

SEQ ID NO: 12129 - protein, 7 aa, synthetic construct
RGDHNEK

SEQ ID NO: 12130 - protein, 7 aa, synthetic construct
RGDHNRG

SEQ ID NO: 12131 - protein, 7 aa, synthetic construct
RGDALLI

SEQ ID NO: 12132 - protein, 7 aa, synthetic construct
RGDHRSL

SEQ ID NO: 12133 - protein, 7 aa, synthetic construct
RGDHRVT

SEQ ID NO: 12134 - protein, 7 aa, synthetic construct
RGDHSDI

SEQ ID NO: 12135 - protein, 7 aa, synthetic construct
RGDHSKK

SEQ ID NO: 12136 - protein, 7 aa, synthetic construct
RGDHSTH

SEQ ID NO: 12137 - protein, 7 aa, synthetic construct
RGDHTGR

SEQ ID NO: 12138 - protein, 7 aa, synthetic construct
RGDALTF

SEQ ID NO: 12139 - protein, 7 aa, synthetic construct
RGDHVFL

SEQ ID NO: 12140 - protein, 7 aa, synthetic construct
RGDIASI

SEQ ID NO: 12141 - protein, 7 aa, synthetic construct
RGDIDNR

SEQ ID NO: 12142 - protein, 7 aa, synthetic construct
RGDIEII

SEQ ID NO: 12143 - protein, 7 aa, synthetic construct
RGDIELR

SEQ ID NO: 12144 - protein, 7 aa, synthetic construct
RGDIFKI

SEQ ID NO: 12145 - protein, 7 aa, synthetic construct
RGDIGNI

SEQ ID NO: 12146 - protein, 7 aa, synthetic construct
RGDIGNS

SEQ ID NO: 12147 - protein, 7 aa, synthetic construct
RGDIHFH

SEQ ID NO: 12148 - protein, 7 aa, synthetic construct
RGDIHFV

SEQ ID NO: 12149 - protein, 7 aa, synthetic construct
RGDIHHS

SEQ ID NO: 12150 - protein, 7 aa, synthetic construct
RGDIHQF

SEQ ID NO: 12151 - protein, 7 aa, synthetic construct
RGDIIVL

SEQ ID NO: 12152 - protein, 7 aa, synthetic construct
RGDIKAR

SEQ ID NO: 12153 - protein, 7 aa, synthetic construct
RGDILGL

SEQ ID NO: 12154 - protein, 7 aa, synthetic construct
RGDIQHN

SEQ ID NO: 12155 - protein, 7 aa, synthetic construct
RGDIQVK

SEQ ID NO: 12156 - protein, 7 aa, synthetic construct
RGDIRKI

SEQ ID NO: 12157 - protein, 7 aa, synthetic construct
RGDISNS

SEQ ID NO: 12158 - protein, 7 aa, synthetic construct
RGDAQFV

SEQ ID NO: 12159 - protein, 7 aa, synthetic construct
RGDISVS

SEQ ID NO: 12160 - protein, 7 aa, synthetic construct
RGDITSD

SEQ ID NO: 12161 - protein, 7 aa, synthetic construct
RGDIVHL

SEQ ID NO: 12162 - protein, 7 aa, synthetic construct
RGDIVQR

SEQ ID NO: 12163 - protein, 7 aa, synthetic construct
RGDAQKS

SEQ ID NO: 12164 - protein, 7 aa, synthetic construct
RGDKAVQ

SEQ ID NO: 12165 - protein, 7 aa, synthetic construct
RGDKDNF

SEQ ID NO: 12166 - protein, 7 aa, synthetic construct
RGDKFGT

SEQ ID NO: 12167 - protein, 7 aa, synthetic construct
RGDKGAV

SEQ ID NO: 12168 - protein, 7 aa, synthetic construct
RGDKGQK

SEQ ID NO: 12169 - protein, 7 aa, synthetic construct
RGDKKQG

SEQ ID NO: 12170 - protein, 7 aa, synthetic construct
RGDKKTE

SEQ ID NO: 12171 - protein, 7 aa, synthetic construct
RGDKKVF

SEQ ID NO: 12172 - protein, 7 aa, synthetic construct
RGDKLQK

SEQ ID NO: 12173 - protein, 7 aa, synthetic construct
RGDKSET

SEQ ID NO: 12174 - protein, 7 aa, synthetic construct
RGDKSIK

SEQ ID NO: 12175 - protein, 7 aa, synthetic construct
RGDKSNQ

SEQ ID NO: 12176 - protein, 7 aa, synthetic construct
RGDKSSR

SEQ ID NO: 12177 - protein, 7 aa, synthetic construct
RGDKTTK

SEQ ID NO: 12178 - protein, 7 aa, synthetic construct
RGDKTVH

SEQ ID NO: 12179 - protein, 7 aa, synthetic construct
RGDKVIF

SEQ ID NO: 12180 - protein, 7 aa, synthetic construct
RGDLDFE

SEQ ID NO: 12181 - protein, 7 aa, synthetic construct
RGDASER

SEQ ID NO: 12182 - protein, 7 aa, synthetic construct
RGDLFKS

SEQ ID NO: 12183 - protein, 7 aa, synthetic construct
RGDLFSQ

SEQ ID NO: 12184 - protein, 7 aa, synthetic construct
RGDLHVI

SEQ ID NO: 12185 - protein, 7 aa, synthetic construct
RGDLIRT

SEQ ID NO: 12186 - protein, 7 aa, synthetic construct
RGDLLNV

SEQ ID NO: 12187 - protein, 7 aa, synthetic construct
RGDLNSV

SEQ ID NO: 12188 - protein, 7 aa, synthetic construct
RGDLREE

SEQ ID NO: 12189 - protein, 7 aa, synthetic construct
RGDLRRT

SEQ ID NO: 12190 - protein, 7 aa, synthetic construct
RGDLSRI

SEQ ID NO: 12191 - protein, 7 aa, synthetic construct
RGDLSSE

SEQ ID NO: 12192 - protein, 7 aa, synthetic construct
RGDATHL

SEQ ID NO: 12193 - protein, 7 aa, synthetic construct
RGDLVKD

SEQ ID NO: 12194 - protein, 7 aa, synthetic construct
RGDLVVK

SEQ ID NO: 12195 - protein, 7 aa, synthetic construct
RGDNATH

SEQ ID NO: 12196 - protein, 7 aa, synthetic construct
RGDNERF

SEQ ID NO: 12197 - protein, 7 aa, synthetic construct
RGDATTF

SEQ ID NO: 12198 - protein, 7 aa, synthetic construct
RGDNGFS

SEQ ID NO: 12199 - protein, 7 aa, synthetic construct
RGDNHFV

SEQ ID NO: 12200 - protein, 7 aa, synthetic construct
RGDNIKR

SEQ ID NO: 12201 - protein, 7 aa, synthetic construct
RGDNKAQ

SEQ ID NO: 12202 - protein, 7 aa, synthetic construct
RGDAVFR

SEQ ID NO: 12203 - protein, 7 aa, synthetic construct
RGDNLRE

SEQ ID NO: 12204 - protein, 7 aa, synthetic construct
RGDNNFR

SEQ ID NO: 12205 - protein, 7 aa, synthetic construct
RGDNNKN

SEQ ID NO: 12206 - protein, 7 aa, synthetic construct
RGDNQGT

SEQ ID NO: 12207 - protein, 7 aa, synthetic construct
RGDNRVF

SEQ ID NO: 12208 - protein, 7 aa, synthetic construct
RGDNSDL

SEQ ID NO: 12209 - protein, 7 aa, synthetic construct
RGDNSKR

SEQ ID NO: 12210 - protein, 7 aa, synthetic construct
RGDNVHR

SEQ ID NO: 12211 - protein, 7 aa, synthetic construct
RGDQFQV

SEQ ID NO: 12212 - protein, 7 aa, synthetic construct
RGDQFSV

SEQ ID NO: 12213 - protein, 7 aa, synthetic construct
RGDDAKD

SEQ ID NO: 12214 - protein, 7 aa, synthetic construct
RGDQGTN

SEQ ID NO: 12215 - protein, 7 aa, synthetic construct
RGDQIDR

SEQ ID NO: 12216 - protein, 7 aa, synthetic construct
RGDQIER

SEQ ID NO: 12217 - protein, 7 aa, synthetic construct
RGDQIKE

SEQ ID NO: 12218 - protein, 7 aa, synthetic construct
RGDQLRG

SEQ ID NO: 12219 - protein, 7 aa, synthetic construct
RGDQRRT

SEQ ID NO: 12220 - protein, 7 aa, synthetic construct
RGDQSHD

SEQ ID NO: 12221 - protein, 7 aa, synthetic construct
RGDQSNA

SEQ ID NO: 12222 - protein, 7 aa, synthetic construct
RGDQSQF

SEQ ID NO: 12223 - protein, 7 aa, synthetic construct
RGDQSSF

SEQ ID NO: 12224 - protein, 7 aa, synthetic construct
RGDQTHN

SEQ ID NO: 12225 - protein, 7 aa, synthetic construct
RGDQTRS

SEQ ID NO: 12226 - protein, 7 aa, synthetic construct
RGDQTSK

SEQ ID NO: 12227 - protein, 7 aa, synthetic construct
RGDRDIF

SEQ ID NO: 12228 - protein, 7 aa, synthetic construct
RGDRDKQ

SEQ ID NO: 12229 - protein, 7 aa, synthetic construct
RGDREGV

SEQ ID NO: 12230 - protein, 7 aa, synthetic construct
RGDREST

SEQ ID NO: 12231 - protein, 7 aa, synthetic construct
RGDRFQT

SEQ ID NO: 12232 - protein, 7 aa, synthetic construct
RGDRHKN

SEQ ID NO: 12233 - protein, 7 aa, synthetic construct
RGDRIIH

SEQ ID NO: 12234 - protein, 7 aa, synthetic construct
RGDRIVQ

SEQ ID NO: 12235 - protein, 7 aa, synthetic construct
RGDRKGG

SEQ ID NO: 12236 - protein, 7 aa, synthetic construct
RGDRLGK

SEQ ID NO: 12237 - protein, 7 aa, synthetic construct
RGDRLIQ

SEQ ID NO: 12238 - protein, 7 aa, synthetic construct
RGDRLLQ

SEQ ID NO: 12239 - protein, 7 aa, synthetic construct
RGDRRAL

SEQ ID NO: 12240 - protein, 7 aa, synthetic construct
RGDRRFL

SEQ ID NO: 12241 - protein, 7 aa, synthetic construct
RGDRRGG

SEQ ID NO: 12242 - protein, 7 aa, synthetic construct
RGDRRSF

SEQ ID NO: 12243 - protein, 7 aa, synthetic construct
RGDRSAA

SEQ ID NO: 12244 - protein, 7 aa, synthetic construct
RGDRTEL

SEQ ID NO: 12245 - protein, 7 aa, synthetic construct
RGDDETF

SEQ ID NO: 12246 - protein, 7 aa, synthetic construct
RGDRVHN

SEQ ID NO: 12247 - protein, 7 aa, synthetic construct
RGDSEKH

SEQ ID NO: 12248 - protein, 7 aa, synthetic construct
RGDSIHN

SEQ ID NO: 12249 - protein, 7 aa, synthetic construct
RGDSIVT

SEQ ID NO: 12250 - protein, 7 aa, synthetic construct
RGDSKFK

SEQ ID NO: 12251 - protein, 7 aa, synthetic construct
RGDSQKN

SEQ ID NO: 12252 - protein, 7 aa, synthetic construct
RGDSQSK

SEQ ID NO: 12253 - protein, 7 aa, synthetic construct
RGDSQSV

SEQ ID NO: 12254 - protein, 7 aa, synthetic construct
RGDSRNS

SEQ ID NO: 12255 - protein, 7 aa, synthetic construct
RGDSRRG

SEQ ID NO: 12256 - protein, 7 aa, synthetic construct
RGDSSRQ

SEQ ID NO: 12257 - protein, 7 aa, synthetic construct
RGDSSTF

SEQ ID NO: 12258 - protein, 7 aa, synthetic construct
RGDSTGD

SEQ ID NO: 12259 - protein, 7 aa, synthetic construct
RGDSVSI

SEQ ID NO: 12260 - protein, 7 aa, synthetic construct
RGDTARV

SEQ ID NO: 12261 - protein, 7 aa, synthetic construct
RGDTFKR

SEQ ID NO: 12262 - protein, 7 aa, synthetic construct
RGDTHNH

SEQ ID NO: 12263 - protein, 7 aa, synthetic construct
RGDTKIS

SEQ ID NO: 12264 - protein, 7 aa, synthetic construct
RGDTLER

SEQ ID NO: 12265 - protein, 7 aa, synthetic construct
RGDTLKS

SEQ ID NO: 12266 - protein, 7 aa, synthetic construct
RGDTNHR

SEQ ID NO: 12267 - protein, 7 aa, synthetic construct
RGDTVGR

SEQ ID NO: 12268 - protein, 7 aa, synthetic construct
RGDVAKE

SEQ ID NO: 12269 - protein, 7 aa, synthetic construct
RGDVAKI

SEQ ID NO: 12270 - protein, 7 aa, synthetic construct
RGDVFFF

SEQ ID NO: 12271 - protein, 7 aa, synthetic construct
RGDVFSA

SEQ ID NO: 12272 - protein, 7 aa, synthetic construct
RGDVIFL

SEQ ID NO: 12273 - protein, 7 aa, synthetic construct
RGDVINH

SEQ ID NO: 12274 - protein, 7 aa, synthetic construct
RGDVITQ

SEQ ID NO: 12275 - protein, 7 aa, synthetic construct
RGDVLIV

SEQ ID NO: 12276 - protein, 7 aa, synthetic construct
RGDVQNI

SEQ ID NO: 12277 - protein, 7 aa, synthetic construct
RGDVRHQ

SEQ ID NO: 12278 - protein, 7 aa, synthetic construct
RGDVSNS

SEQ ID NO: 12279 - protein, 7 aa, synthetic construct
RGDVSTV

SEQ ID NO: 12280 - protein, 7 aa, synthetic construct
RGDVVHG

SEQ ID NO: 12281 - protein, 7 aa, synthetic construct
RGDVVKH

SEQ ID NO: 12282 - protein, 7 aa, synthetic construct
RGDVVTT

SEQ ID NO: 12283 - protein, 7 aa, synthetic construct
RGDDNEF

SEQ ID NO: 12284 - protein, 7 aa, synthetic construct
RGDDNHL

SEQ ID NO: 12285 - protein, 7 aa, synthetic construct
RGDDNHS

SEQ ID NO: 12286 - protein, 7 aa, synthetic construct
RGDDSRL

SEQ ID NO: 12287 - protein, 7 aa, synthetic construct
RGDDSSL

SEQ ID NO: 12288 - protein, 7 aa, synthetic construct
RGDDTGK

SEQ ID NO: 12289 - protein, 7 aa, synthetic construct
RGDEAHT

SEQ ID NO: 12290 - protein, 7 aa, synthetic construct
RGDEARN

SEQ ID NO: 12291 - protein, 7 aa, synthetic construct
RGDEAVT

SEQ ID NO: 12292 - protein, 7 aa, synthetic construct
RGDEGTS

SEQ ID NO: 12293 - protein, 7 aa, synthetic construct
RGDEHSL

SEQ ID NO: 12294 - protein, 7 aa, synthetic construct
RGDEKQN

SEQ ID NO: 12295 - protein, 7 aa, synthetic construct
RGDAFTL

SEQ ID NO: 12296 - protein, 7 aa, synthetic construct
RGDENKH

SEQ ID NO: 12297 - protein, 7 aa, synthetic construct
RGDERFH

SEQ ID NO: 12298 - protein, 7 aa, synthetic construct
RGDERHL

SEQ ID NO: 12299 - protein, 7 aa, synthetic construct
RGDESKA

SEQ ID NO: 12300 - protein, 7 aa, synthetic construct
RGDEVQS

SEQ ID NO: 12301 - protein, 7 aa, synthetic construct
RGDFASK

SEQ ID NO: 12302 - protein, 7 aa, synthetic construct
RGDFDAQ

SEQ ID NO: 12303 - protein, 7 aa, synthetic construct
RGDFESV

SEQ ID NO: 12304 - protein, 7 aa, synthetic construct
RGDFFHK

SEQ ID NO: 12305 - protein, 7 aa, synthetic construct
RGDAGVA

SEQ ID NO: 12306 - protein, 7 aa, synthetic construct
RGDFGSI

SEQ ID NO: 12307 - protein, 7 aa, synthetic construct
RGDFHKS

SEQ ID NO: 12308 - protein, 7 aa, synthetic construct
RGDAHGT

SEQ ID NO: 12309 - protein, 7 aa, synthetic construct
RGDFLSL

SEQ ID NO: 12310 - protein, 7 aa, synthetic construct
RGDFNFT

SEQ ID NO: 12311 - protein, 7 aa, synthetic construct
RGDFNVI

SEQ ID NO: 12312 - protein, 7 aa, synthetic construct
RGDFQGA

SEQ ID NO: 12313 - protein, 7 aa, synthetic construct
RGDFQGH

SEQ ID NO: 12314 - protein, 7 aa, synthetic construct
RGDFQHA

SEQ ID NO: 12315 - protein, 7 aa, synthetic construct
RGDFREH

SEQ ID NO: 12316 - protein, 7 aa, synthetic construct
RGDFRQI

SEQ ID NO: 12317 - protein, 7 aa, synthetic construct
RGDFRVN

SEQ ID NO: 12318 - protein, 7 aa, synthetic construct
RGDFSRL

SEQ ID NO: 12319 - protein, 7 aa, synthetic construct
RGDGAHF

SEQ ID NO: 12320 - protein, 7 aa, synthetic construct
RGDGEHI

SEQ ID NO: 12321 - protein, 7 aa, synthetic construct
RGDGENN

SEQ ID NO: 12322 - protein, 7 aa, synthetic construct
RGDGGKD

SEQ ID NO: 12323 - protein, 7 aa, synthetic construct
RGDGGNS

SEQ ID NO: 12324 - protein, 7 aa, synthetic construct
RGDGHAV

SEQ ID NO: 12325 - protein, 7 aa, synthetic construct
RGDGHDF

SEQ ID NO: 12326 - protein, 7 aa, synthetic construct
RGDGHRL

SEQ ID NO: 12327 - protein, 7 aa, synthetic construct
RGDGISE

SEQ ID NO: 12328 - protein, 7 aa, synthetic construct
RGDGKQL

SEQ ID NO: 12329 - protein, 7 aa, synthetic construct
RGDGLKR

SEQ ID NO: 12330 - protein, 7 aa, synthetic construct
RGDGLKV

SEQ ID NO: 12331 - protein, 7 aa, synthetic construct
RGDAKAT

SEQ ID NO: 12332 - protein, 7 aa, synthetic construct
RGDGSKS

SEQ ID NO: 12333 - protein, 7 aa, synthetic construct
RGDGSNI

SEQ ID NO: 12334 - protein, 7 aa, synthetic construct
RGDGSQS

SEQ ID NO: 12335 - protein, 7 aa, synthetic construct
RGDGSRG

SEQ ID NO: 12336 - protein, 7 aa, synthetic construct
RGDGVIL

SEQ ID NO: 12337 - protein, 7 aa, synthetic construct
RGDGVST

SEQ ID NO: 12338 - protein, 7 aa, synthetic construct
RGDAKKT

SEQ ID NO: 12339 - protein, 7 aa, synthetic construct
RGDHASG

SEQ ID NO: 12340 - protein, 7 aa, synthetic construct
RGDHEGR

SEQ ID NO: 12341 - protein, 7 aa, synthetic construct
RGDHEHS

SEQ ID NO: 12342 - protein, 7 aa, synthetic construct
RGDAKRD

SEQ ID NO: 12343 - protein, 7 aa, synthetic construct
RGDHGDK

SEQ ID NO: 12344 - protein, 7 aa, synthetic construct
RGDHGEK

SEQ ID NO: 12345 - protein, 7 aa, synthetic construct
RGDHHND

SEQ ID NO: 12346 - protein, 7 aa, synthetic construct
RGDHHRV

SEQ ID NO: 12347 - protein, 7 aa, synthetic construct
RGDHHSA

SEQ ID NO: 12348 - protein, 7 aa, synthetic construct
RGDHHVF

SEQ ID NO: 12349 - protein, 7 aa, synthetic construct
RGDHISV

SEQ ID NO: 12350 - protein, 7 aa, synthetic construct
RGDHIVI

SEQ ID NO: 12351 - protein, 7 aa, synthetic construct
RGDHKSN

SEQ ID NO: 12352 - protein, 7 aa, synthetic construct
RGDHKVR

SEQ ID NO: 12353 - protein, 7 aa, synthetic construct
RGDHLHL

SEQ ID NO: 12354 - protein, 7 aa, synthetic construct
RGDALHV

SEQ ID NO: 12355 - protein, 7 aa, synthetic construct
RGDHNSS

SEQ ID NO: 12356 - protein, 7 aa, synthetic construct
RGDAASQ

SEQ ID NO: 12357 - protein, 7 aa, synthetic construct
RGDHQER

SEQ ID NO: 12358 - protein, 7 aa, synthetic construct
RGDHREF

SEQ ID NO: 12359 - protein, 7 aa, synthetic construct
RGDHSAN

SEQ ID NO: 12360 - protein, 7 aa, synthetic construct
RGDHSSN

SEQ ID NO: 12361 - protein, 7 aa, synthetic construct
RGDHVKQ

SEQ ID NO: 12362 - protein, 7 aa, synthetic construct
RGDIETI

SEQ ID NO: 12363 - protein, 7 aa, synthetic construct
RGDIGTT

SEQ ID NO: 12364 - protein, 7 aa, synthetic construct
RGDIHGQ

SEQ ID NO: 12365 - protein, 7 aa, synthetic construct
RGDIKHL

SEQ ID NO: 12366 - protein, 7 aa, synthetic construct
RGDIKNN

SEQ ID NO: 12367 - protein, 7 aa, synthetic construct
RGDIKSD

SEQ ID NO: 12368 - protein, 7 aa, synthetic construct
RGDILHN

SEQ ID NO: 12369 - protein, 7 aa, synthetic construct
RGDILRG

SEQ ID NO: 12370 - protein, 7 aa, synthetic construct
RGDILSF

SEQ ID NO: 12371 - protein, 7 aa, synthetic construct
RGDINIL

SEQ ID NO: 12372 - protein, 7 aa, synthetic construct
RGDIQLT

SEQ ID NO: 12373 - protein, 7 aa, synthetic construct
RGDISIK

SEQ ID NO: 12374 - protein, 7 aa, synthetic construct
RGDISNL

SEQ ID NO: 12375 - protein, 7 aa, synthetic construct
RGDISVL

SEQ ID NO: 12376 - protein, 7 aa, synthetic construct
RGDAQHR

SEQ ID NO: 12377 - protein, 7 aa, synthetic construct
RGDIVSG

SEQ ID NO: 12378 - protein, 7 aa, synthetic construct
RGDKATI

SEQ ID NO: 12379 - protein, 7 aa, synthetic construct
RGDKDGK

SEQ ID NO: 12380 - protein, 7 aa, synthetic construct
RGDKDQK

SEQ ID NO: 12381 - protein, 7 aa, synthetic construct
RGDKEFR

SEQ ID NO: 12382 - protein, 7 aa, synthetic construct
RGDKFTK

SEQ ID NO: 12383 - protein, 7 aa, synthetic construct
RGDKGTR

SEQ ID NO: 12384 - protein, 7 aa, synthetic construct
RGDKHSD

SEQ ID NO: 12385 - protein, 7 aa, synthetic construct
RGDKKAQ

SEQ ID NO: 12386 - protein, 7 aa, synthetic construct
RGDKKHN

SEQ ID NO: 12387 - protein, 7 aa, synthetic construct
RGDKKVV

SEQ ID NO: 12388 - protein, 7 aa, synthetic construct
RGDKLNT

SEQ ID NO: 12389 - protein, 7 aa, synthetic construct
RGDKLRI

SEQ ID NO: 12390 - protein, 7 aa, synthetic construct
RGDKNHS

SEQ ID NO: 12391 - protein, 7 aa, synthetic construct
RGDKNLK

SEQ ID NO: 12392 - protein, 7 aa, synthetic construct
RGDARKF

SEQ ID NO: 12393 - protein, 7 aa, synthetic construct
RGDKQSN

SEQ ID NO: 12394 - protein, 7 aa, synthetic construct
RGDKRQL

SEQ ID NO: 12395 - protein, 7 aa, synthetic construct
RGDKSRS

SEQ ID NO: 12396 - protein, 7 aa, synthetic construct
RGDKTTF

SEQ ID NO: 12397 - protein, 7 aa, synthetic construct
RGDARTS

SEQ ID NO: 12398 - protein, 7 aa, synthetic construct
RGDKVHF

SEQ ID NO: 12399 - protein, 7 aa, synthetic construct
RGDLGEK

SEQ ID NO: 12400 - protein, 7 aa, synthetic construct
RGDLGFH

SEQ ID NO: 12401 - protein, 7 aa, synthetic construct
RGDLIKL

SEQ ID NO: 12402 - protein, 7 aa, synthetic construct
RGDLKSS

SEQ ID NO: 12403 - protein, 7 aa, synthetic construct
RGDLNFR

SEQ ID NO: 12404 - protein, 7 aa, synthetic construct
RGDLQDT

SEQ ID NO: 12405 - protein, 7 aa, synthetic construct
RGDLQNT

SEQ ID NO: 12406 - protein, 7 aa, synthetic construct
RGDLRQF

SEQ ID NO: 12407 - protein, 7 aa, synthetic construct
RGDLSGK

SEQ ID NO: 12408 - protein, 7 aa, synthetic construct
RGDLSKI

SEQ ID NO: 12409 - protein, 7 aa, synthetic construct
RGDLSLR

SEQ ID NO: 12410 - protein, 7 aa, synthetic construct
RGDATGI

SEQ ID NO: 12411 - protein, 7 aa, synthetic construct
RGDLTDS

SEQ ID NO: 12412 - protein, 7 aa, synthetic construct
RGDLTFV

SEQ ID NO: 12413 - protein, 7 aa, synthetic construct
RGDLTHK

SEQ ID NO: 12414 - protein, 7 aa, synthetic construct
RGDLTRK

SEQ ID NO: 12415 - protein, 7 aa, synthetic construct
RGDLVIN

SEQ ID NO: 12416 - protein, 7 aa, synthetic construct
RGDNAQR

SEQ ID NO: 12417 - protein, 7 aa, synthetic construct
RGDNASH

SEQ ID NO: 12418 - protein, 7 aa, synthetic construct
RGDNATT

SEQ ID NO: 12419 - protein, 7 aa, synthetic construct
RGDNDFL

SEQ ID NO: 12420 - protein, 7 aa, synthetic construct
RGDNDSS

SEQ ID NO: 12421 - protein, 7 aa, synthetic construct
RGDNFRF

SEQ ID NO: 12422 - protein, 7 aa, synthetic construct
RGDNHSQ

SEQ ID NO: 12423 - protein, 7 aa, synthetic construct
RGDNIVL

SEQ ID NO: 12424 - protein, 7 aa, synthetic construct
RGDNKGL

SEQ ID NO: 12425 - protein, 7 aa, synthetic construct
RGDNKNA

SEQ ID NO: 12426 - protein, 7 aa, synthetic construct
RGDNKNN

SEQ ID NO: 12427 - protein, 7 aa, synthetic construct
RGDNKSI

SEQ ID NO: 12428 - protein, 7 aa, synthetic construct
RGDAVGK

SEQ ID NO: 12429 - protein, 7 aa, synthetic construct
RGDNQRV

SEQ ID NO: 12430 - protein, 7 aa, synthetic construct
RGDNSLV

SEQ ID NO: 12431 - protein, 7 aa, synthetic construct
RGDAVRH

SEQ ID NO: 12432 - protein, 7 aa, synthetic construct
RGDNSTA

SEQ ID NO: 12433 - protein, 7 aa, synthetic construct
RGDNVKE

SEQ ID NO: 12434 - protein, 7 aa, synthetic construct
RGDAVVF

SEQ ID NO: 12435 - protein, 7 aa, synthetic construct
RGDQANT

SEQ ID NO: 12436 - protein, 7 aa, synthetic construct
RGDQEGR

SEQ ID NO: 12437 - protein, 7 aa, synthetic construct
RGDDAGR

SEQ ID NO: 12438 - protein, 7 aa, synthetic construct
RGDQFSR

SEQ ID NO: 12439 - protein, 7 aa, synthetic construct
RGDQGEN

SEQ ID NO: 12440 - protein, 7 aa, synthetic construct
RGDQGNA

SEQ ID NO: 12441 - protein, 7 aa, synthetic construct
RGDQHEH

SEQ ID NO: 12442 - protein, 7 aa, synthetic construct
RGDQIFK

SEQ ID NO: 12443 - protein, 7 aa, synthetic construct
RGDQKIT

SEQ ID NO: 12444 - protein, 7 aa, synthetic construct
RGDQNVL

SEQ ID NO: 12445 - protein, 7 aa, synthetic construct
RGDQRVR

SEQ ID NO: 12446 - protein, 7 aa, synthetic construct
RGDQTEQ

SEQ ID NO: 12447 - protein, 7 aa, synthetic construct
RGDQTKT

SEQ ID NO: 12448 - protein, 7 aa, synthetic construct
RGDDDHV

SEQ ID NO: 12449 - protein, 7 aa, synthetic construct
RGDQVAK

SEQ ID NO: 12450 - protein, 7 aa, synthetic construct
RGDQVTS

SEQ ID NO: 12451 - protein, 7 aa, synthetic construct
RGDRAII

SEQ ID NO: 12452 - protein, 7 aa, synthetic construct
RGDRAQE

SEQ ID NO: 12453 - protein, 7 aa, synthetic construct
RGDREEQ

SEQ ID NO: 12454 - protein, 7 aa, synthetic construct
RGDREKT

SEQ ID NO: 12455 - protein, 7 aa, synthetic construct
RGDRFSQ

SEQ ID NO: 12456 - protein, 7 aa, synthetic construct
RGDRGRT

SEQ ID NO: 12457 - protein, 7 aa, synthetic construct
RGDRIHE

SEQ ID NO: 12458 - protein, 7 aa, synthetic construct
RGDRKDI

SEQ ID NO: 12459 - protein, 7 aa, synthetic construct
RGDRKNT

SEQ ID NO: 12460 - protein, 7 aa, synthetic construct
RGDRKTT

SEQ ID NO: 12461 - protein, 7 aa, synthetic construct
RGDRLDH

SEQ ID NO: 12462 - protein, 7 aa, synthetic construct
RGDRQFK

SEQ ID NO: 12463 - protein, 7 aa, synthetic construct
RGDRQGA

SEQ ID NO: 12464 - protein, 7 aa, synthetic construct
RGDRQIL

SEQ ID NO: 12465 - protein, 7 aa, synthetic construct
RGDRVRK

SEQ ID NO: 12466 - protein, 7 aa, synthetic construct
RGDRVTQ

SEQ ID NO: 12467 - protein, 7 aa, synthetic construct
RGDSEVR

SEQ ID NO: 12468 - protein, 7 aa, synthetic construct
RGDSFAR

SEQ ID NO: 12469 - protein, 7 aa, synthetic construct
RGDSFRH

SEQ ID NO: 12470 - protein, 7 aa, synthetic construct
RGDSGHQ

SEQ ID NO: 12471 - protein, 7 aa, synthetic construct
RGDSKDA

SEQ ID NO: 12472 - protein, 7 aa, synthetic construct
RGDSKEN

SEQ ID NO: 12473 - protein, 7 aa, synthetic construct
RGDSKGN

SEQ ID NO: 12474 - protein, 7 aa, synthetic construct
RGDSKIK

SEQ ID NO: 12475 - protein, 7 aa, synthetic construct
RGDSKST

SEQ ID NO: 12476 - protein, 7 aa, synthetic construct
RGDSKVQ

SEQ ID NO: 12477 - protein, 7 aa, synthetic construct
RGDSLSI

SEQ ID NO: 12478 - protein, 7 aa, synthetic construct
RGDSNED

SEQ ID NO: 12479 - protein, 7 aa, synthetic construct
RGDSRER

SEQ ID NO: 12480 - protein, 7 aa, synthetic construct
RGDSRLI

SEQ ID NO: 12481 - protein, 7 aa, synthetic construct
RGDSSSS

SEQ ID NO: 12482 - protein, 7 aa, synthetic construct
RGDSVHR

SEQ ID NO: 12483 - protein, 7 aa, synthetic construct
RGDSVKK

SEQ ID NO: 12484 - protein, 7 aa, synthetic construct
RGDTGVR

SEQ ID NO: 12485 - protein, 7 aa, synthetic construct
RGDTLIS

SEQ ID NO: 12486 - protein, 7 aa, synthetic construct
RGDTSFQ

SEQ ID NO: 12487 - protein, 7 aa, synthetic construct
RGDTSGL

SEQ ID NO: 12488 - protein, 7 aa, synthetic construct
RGDTTNA

SEQ ID NO: 12489 - protein, 7 aa, synthetic construct
RGDVANS

SEQ ID NO: 12490 - protein, 7 aa, synthetic construct
RGDVDAK

SEQ ID NO: 12491 - protein, 7 aa, synthetic construct
RGDDIGE

SEQ ID NO: 12492 - protein, 7 aa, synthetic construct
RGDVESQ

SEQ ID NO: 12493 - protein, 7 aa, synthetic construct
RGDVGSG

SEQ ID NO: 12494 - protein, 7 aa, synthetic construct
RGDVHGS

SEQ ID NO: 12495 - protein, 7 aa, synthetic construct
RGDVIIQ

SEQ ID NO: 12496 - protein, 7 aa, synthetic construct
RGDVIIR

SEQ ID NO: 12497 - protein, 7 aa, synthetic construct
RGDVKAT

SEQ ID NO: 12498 - protein, 7 aa, synthetic construct
RGDVKEN

SEQ ID NO: 12499 - protein, 7 aa, synthetic construct
RGDVKHH

SEQ ID NO: 12500 - protein, 7 aa, synthetic construct
RGDVRAQ

SEQ ID NO: 12501 - protein, 7 aa, synthetic construct
RGDVRKS

SEQ ID NO: 12502 - protein, 7 aa, synthetic construct
RGDVSAT

SEQ ID NO: 12503 - protein, 7 aa, synthetic construct
RGDVSVK

SEQ ID NO: 12504 - protein, 7 aa, synthetic construct
RGDVSVN

SEQ ID NO: 12505 - protein, 7 aa, synthetic construct
RGDVVAR

SEQ ID NO: 12506 - protein, 7 aa, synthetic construct
RGDVVGL

SEQ ID NO: 12507 - protein, 7 aa, synthetic construct
RGDDKKF

SEQ ID NO: 12508 - protein, 7 aa, synthetic construct
RGDDKST

SEQ ID NO: 12509 - protein, 7 aa, synthetic construct
RGDDLHF

SEQ ID NO: 12510 - protein, 7 aa, synthetic construct
RGDDNRR

SEQ ID NO: 12511 - protein, 7 aa, synthetic construct
RGDDRGK

SEQ ID NO: 12512 - protein, 7 aa, synthetic construct
RGDDRHK

SEQ ID NO: 12513 - protein, 7 aa, synthetic construct
RGDDRRS

SEQ ID NO: 12514 - protein, 7 aa, synthetic construct
RGDAEQL

SEQ ID NO: 12515 - protein, 7 aa, synthetic construct
RGDDSNF

SEQ ID NO: 12516 - protein, 7 aa, synthetic construct
RGDEDFI

SEQ ID NO: 12517 - protein, 7 aa, synthetic construct
RGDEEVT

SEQ ID NO: 12518 - protein, 7 aa, synthetic construct
RGDEFEE

SEQ ID NO: 12519 - protein, 7 aa, synthetic construct
RGDEGFS

SEQ ID NO: 12520 - protein, 7 aa, synthetic construct
RGDEGHR

SEQ ID NO: 12521 - protein, 7 aa, synthetic construct
RGDEHSE

SEQ ID NO: 12522 - protein, 7 aa, synthetic construct
RGDELHL

SEQ ID NO: 12523 - protein, 7 aa, synthetic construct
RGDEQRK

SEQ ID NO: 12524 - protein, 7 aa, synthetic construct
RGDAGDN

SEQ ID NO: 12525 - protein, 7 aa, synthetic construct
RGDERFL

SEQ ID NO: 12526 - protein, 7 aa, synthetic construct
RGDAGGV

SEQ ID NO: 12527 - protein, 7 aa, synthetic construct
RGDAAIK

SEQ ID NO: 12528 - protein, 7 aa, synthetic construct
RGDEVTK

SEQ ID NO: 12529 - protein, 7 aa, synthetic construct
RGDFAEI

SEQ ID NO: 12530 - protein, 7 aa, synthetic construct
RGDFDAR

SEQ ID NO: 12531 - protein, 7 aa, synthetic construct
RGDFEHK

SEQ ID NO: 12532 - protein, 7 aa, synthetic construct
RGDFETK

SEQ ID NO: 12533 - protein, 7 aa, synthetic construct
RGDFFIV

SEQ ID NO: 12534 - protein, 7 aa, synthetic construct
RGDFHES

SEQ ID NO: 12535 - protein, 7 aa, synthetic construct
RGDFHGT

SEQ ID NO: 12536 - protein, 7 aa, synthetic construct
RGDFIHK

SEQ ID NO: 12537 - protein, 7 aa, synthetic construct
RGDFKAR

SEQ ID NO: 12538 - protein, 7 aa, synthetic construct
RGDFKQQ

SEQ ID NO: 12539 - protein, 7 aa, synthetic construct
RGDFLNS

SEQ ID NO: 12540 - protein, 7 aa, synthetic construct
RGDFNIR

SEQ ID NO: 12541 - protein, 7 aa, synthetic construct
RGDFNNV

SEQ ID NO: 12542 - protein, 7 aa, synthetic construct
RGDFNTH

SEQ ID NO: 12543 - protein, 7 aa, synthetic construct
RGDFTFN

SEQ ID NO: 12544 - protein, 7 aa, synthetic construct
RGDFTLT

SEQ ID NO: 12545 - protein, 7 aa, synthetic construct
RGDAALS

SEQ ID NO: 12546 - protein, 7 aa, synthetic construct
RGDFVGK

SEQ ID NO: 12547 - protein, 7 aa, synthetic construct
RGDAIAL

SEQ ID NO: 12548 - protein, 7 aa, synthetic construct
RGDGDDS

SEQ ID NO: 12549 - protein, 7 aa, synthetic construct
RGDGFAT

SEQ ID NO: 12550 - protein, 7 aa, synthetic construct
RGDGFSV

SEQ ID NO: 12551 - protein, 7 aa, synthetic construct
RGDGHGI

SEQ ID NO: 12552 - protein, 7 aa, synthetic construct
RGDGHSH

SEQ ID NO: 12553 - protein, 7 aa, synthetic construct
RGDGKHN

SEQ ID NO: 12554 - protein, 7 aa, synthetic construct
RGDGKSR

SEQ ID NO: 12555 - protein, 7 aa, synthetic construct
RGDGLKE

SEQ ID NO: 12556 - protein, 7 aa, synthetic construct
RGDGNLV

SEQ ID NO: 12557 - protein, 7 aa, synthetic construct
RGDGRGE

SEQ ID NO: 12558 - protein, 7 aa, synthetic construct
RGDGSKG

SEQ ID NO: 12559 - protein, 7 aa, synthetic construct
RGDAKIL

SEQ ID NO: 12560 - protein, 7 aa, synthetic construct
RGDGVNH

SEQ ID NO: 12561 - protein, 7 aa, synthetic construct
RGDHARL

SEQ ID NO: 12562 - protein, 7 aa, synthetic construct
RGDHDFH

SEQ ID NO: 12563 - protein, 7 aa, synthetic construct
RGDHDIR

SEQ ID NO: 12564 - protein, 7 aa, synthetic construct
RGDHDVR

SEQ ID NO: 12565 - protein, 7 aa, synthetic construct
RGDHEQF

SEQ ID NO: 12566 - protein, 7 aa, synthetic construct
RGDHKTS

SEQ ID NO: 12567 - protein, 7 aa, synthetic construct
RGDHLGN

SEQ ID NO: 12568 - protein, 7 aa, synthetic construct
RGDHSGN

SEQ ID NO: 12569 - protein, 7 aa, synthetic construct
RGDIAFI

SEQ ID NO: 12570 - protein, 7 aa, synthetic construct
RGDIEHT

SEQ ID NO: 12571 - protein, 7 aa, synthetic construct
RGDIGTS

SEQ ID NO: 12572 - protein, 7 aa, synthetic construct
RGDIHHF

SEQ ID NO: 12573 - protein, 7 aa, synthetic construct
RGDIISK

SEQ ID NO: 12574 - protein, 7 aa, synthetic construct
RGDIIVF

SEQ ID NO: 12575 - protein, 7 aa, synthetic construct
RGDIKKA

SEQ ID NO: 12576 - protein, 7 aa, synthetic construct
RGDILRR

SEQ ID NO: 12577 - protein, 7 aa, synthetic construct
RGDILTH

SEQ ID NO: 12578 - protein, 7 aa, synthetic construct
RGDILVH

SEQ ID NO: 12579 - protein, 7 aa, synthetic construct
RGDINGR

SEQ ID NO: 12580 - protein, 7 aa, synthetic construct
RGDIQIK

SEQ ID NO: 12581 - protein, 7 aa, synthetic construct
RGDIQTF

SEQ ID NO: 12582 - protein, 7 aa, synthetic construct
RGDIRLF

SEQ ID NO: 12583 - protein, 7 aa, synthetic construct
RGDIRLR

SEQ ID NO: 12584 - protein, 7 aa, synthetic construct
RGDIRRG

SEQ ID NO: 12585 - protein, 7 aa, synthetic construct
RGDITHR

SEQ ID NO: 12586 - protein, 7 aa, synthetic construct
RGDITVV

SEQ ID NO: 12587 - protein, 7 aa, synthetic construct
RGDIVQQ

SEQ ID NO: 12588 - protein, 7 aa, synthetic construct
RGDKAFS

SEQ ID NO: 12589 - protein, 7 aa, synthetic construct
RGDKDTF

SEQ ID NO: 12590 - protein, 7 aa, synthetic construct
RGDAQQN

SEQ ID NO: 12591 - protein, 7 aa, synthetic construct
RGDKFAV

SEQ ID NO: 12592 - protein, 7 aa, synthetic construct
RGDAQSI

SEQ ID NO: 12593 - protein, 7 aa, synthetic construct
RGDKFII

SEQ ID NO: 12594 - protein, 7 aa, synthetic construct
RGDKGLV

SEQ ID NO: 12595 - protein, 7 aa, synthetic construct
RGDKKLV

SEQ ID NO: 12596 - protein, 7 aa, synthetic construct
RGDKKQN

SEQ ID NO: 12597 - protein, 7 aa, synthetic construct
RGDKKVS

SEQ ID NO: 12598 - protein, 7 aa, synthetic construct
RGDKLVQ

SEQ ID NO: 12599 - protein, 7 aa, synthetic construct
RGDKNNT

SEQ ID NO: 12600 - protein, 7 aa, synthetic construct
RGDKQGQ

SEQ ID NO: 12601 - protein, 7 aa, synthetic construct
RGDKTFF

SEQ ID NO: 12602 - protein, 7 aa, synthetic construct
RGDKVEI

SEQ ID NO: 12603 - protein, 7 aa, synthetic construct
RGDKVVF

SEQ ID NO: 12604 - protein, 7 aa, synthetic construct
RGDLEQV

SEQ ID NO: 12605 - protein, 7 aa, synthetic construct
RGDASLI

SEQ ID NO: 12606 - protein, 7 aa, synthetic construct
RGDLHST

SEQ ID NO: 12607 - protein, 7 aa, synthetic construct
RGDASNV

SEQ ID NO: 12608 - protein, 7 aa, synthetic construct
RGDASSQ

SEQ ID NO: 12609 - protein, 7 aa, synthetic construct
RGDLQGA

SEQ ID NO: 12610 - protein, 7 aa, synthetic construct
RGDLQRE

SEQ ID NO: 12611 - protein, 7 aa, synthetic construct
RGDLRGK

SEQ ID NO: 12612 - protein, 7 aa, synthetic construct
RGDLRHF

SEQ ID NO: 12613 - protein, 7 aa, synthetic construct
RGDLSNH

SEQ ID NO: 12614 - protein, 7 aa, synthetic construct
RGDATHF

SEQ ID NO: 12615 - protein, 7 aa, synthetic construct
RGDLTQT

SEQ ID NO: 12616 - protein, 7 aa, synthetic construct
RGDLTTV

SEQ ID NO: 12617 - protein, 7 aa, synthetic construct
RGDLVFI

SEQ ID NO: 12618 - protein, 7 aa, synthetic construct
RGDLVTI

SEQ ID NO: 12619 - protein, 7 aa, synthetic construct
RGDNAGS

SEQ ID NO: 12620 - protein, 7 aa, synthetic construct
RGDNDNR

SEQ ID NO: 12621 - protein, 7 aa, synthetic construct
RGDNFQR

SEQ ID NO: 12622 - protein, 7 aa, synthetic construct
RGDNGVF

SEQ ID NO: 12623 - protein, 7 aa, synthetic construct
RGDNHDQ

SEQ ID NO: 12624 - protein, 7 aa, synthetic construct
RGDNHNF

SEQ ID NO: 12625 - protein, 7 aa, synthetic construct
RGDNKDG

SEQ ID NO: 12626 - protein, 7 aa, synthetic construct
RGDNKDS

SEQ ID NO: 12627 - protein, 7 aa, synthetic construct
RGDNKIV

SEQ ID NO: 12628 - protein, 7 aa, synthetic construct
RGDNKTS

SEQ ID NO: 12629 - protein, 7 aa, synthetic construct
RGDNQKT

SEQ ID NO: 12630 - protein, 7 aa, synthetic construct
RGDNRDS

SEQ ID NO: 12631 - protein, 7 aa, synthetic construct
RGDNRET

SEQ ID NO: 12632 - protein, 7 aa, synthetic construct
RGDNSKN

SEQ ID NO: 12633 - protein, 7 aa, synthetic construct
RGDNTFF

SEQ ID NO: 12634 - protein, 7 aa, synthetic construct
RGDNTSK

SEQ ID NO: 12635 - protein, 7 aa, synthetic construct
RGDQDNR

SEQ ID NO: 12636 - protein, 7 aa, synthetic construct
RGDQFGV

SEQ ID NO: 12637 - protein, 7 aa, synthetic construct
RGDDAHN

SEQ ID NO: 12638 - protein, 7 aa, synthetic construct
RGDQGIK

SEQ ID NO: 12639 - protein, 7 aa, synthetic construct
RGDQHEL

SEQ ID NO: 12640 - protein, 7 aa, synthetic construct
RGDQIGV

SEQ ID NO: 12641 - protein, 7 aa, synthetic construct
RGDQINR

SEQ ID NO: 12642 - protein, 7 aa, synthetic construct
RGDQLKH

SEQ ID NO: 12643 - protein, 7 aa, synthetic construct
RGDQLRD

SEQ ID NO: 12644 - protein, 7 aa, synthetic construct
RGDQLTN

SEQ ID NO: 12645 - protein, 7 aa, synthetic construct
RGDQQTL

SEQ ID NO: 12646 - protein, 7 aa, synthetic construct
RGDQRSR

SEQ ID NO: 12647 - protein, 7 aa, synthetic construct
RGDQSNG

SEQ ID NO: 12648 - protein, 7 aa, synthetic construct
RGDQTKR

SEQ ID NO: 12649 - protein, 7 aa, synthetic construct
RGDQTQL

SEQ ID NO: 12650 - protein, 7 aa, synthetic construct
RGDQTTH

SEQ ID NO: 12651 - protein, 7 aa, synthetic construct
RGDQTTI

SEQ ID NO: 12652 - protein, 7 aa, synthetic construct
RGDQTVT

SEQ ID NO: 12653 - protein, 7 aa, synthetic construct
RGDQVFV

SEQ ID NO: 12654 - protein, 7 aa, synthetic construct
RGDQVQD

SEQ ID NO: 12655 - protein, 7 aa, synthetic construct
RGDRAHT

SEQ ID NO: 12656 - protein, 7 aa, synthetic construct
RGDREAQ

SEQ ID NO: 12657 - protein, 7 aa, synthetic construct
RGDREGG

SEQ ID NO: 12658 - protein, 7 aa, synthetic construct
RGDREGQ

SEQ ID NO: 12659 - protein, 7 aa, synthetic construct
RGDREHH

SEQ ID NO: 12660 - protein, 7 aa, synthetic construct
RGDRFFH

SEQ ID NO: 12661 - protein, 7 aa, synthetic construct
RGDRFFK

SEQ ID NO: 12662 - protein, 7 aa, synthetic construct
RGDRFTK

SEQ ID NO: 12663 - protein, 7 aa, synthetic construct
RGDRHIE

SEQ ID NO: 12664 - protein, 7 aa, synthetic construct
RGDRKRF

SEQ ID NO: 12665 - protein, 7 aa, synthetic construct
RGDRLHT

SEQ ID NO: 12666 - protein, 7 aa, synthetic construct
RGDRNEN

SEQ ID NO: 12667 - protein, 7 aa, synthetic construct
RGDRNFR

SEQ ID NO: 12668 - protein, 7 aa, synthetic construct
RGDRQTR

SEQ ID NO: 12669 - protein, 7 aa, synthetic construct
RGDRRFN

SEQ ID NO: 12670 - protein, 7 aa, synthetic construct
RGDRRGN

SEQ ID NO: 12671 - protein, 7 aa, synthetic construct
RGDRRSV

SEQ ID NO: 12672 - protein, 7 aa, synthetic construct
RGDRSIR

SEQ ID NO: 12673 - protein, 7 aa, synthetic construct
RGDRSSE

SEQ ID NO: 12674 - protein, 7 aa, synthetic construct
RGDRSVL

SEQ ID NO: 12675 - protein, 7 aa, synthetic construct
RGDRVIK

SEQ ID NO: 12676 - protein, 7 aa, synthetic construct
RGDSEKK

SEQ ID NO: 12677 - protein, 7 aa, synthetic construct
RGDSFHT

SEQ ID NO: 12678 - protein, 7 aa, synthetic construct
RGDADSL

SEQ ID NO: 12679 - protein, 7 aa, synthetic construct
RGDSGEI

SEQ ID NO: 12680 - protein, 7 aa, synthetic construct
RGDSGGV

SEQ ID NO: 12681 - protein, 7 aa, synthetic construct
RGDSKGK

SEQ ID NO: 12682 - protein, 7 aa, synthetic construct
RGDSKHK

SEQ ID NO: 12683 - protein, 7 aa, synthetic construct
RGDSKIH

SEQ ID NO: 12684 - protein, 7 aa, synthetic construct
RGDSKRF

SEQ ID NO: 12685 - protein, 7 aa, synthetic construct
RGDSLRF

SEQ ID NO: 12686 - protein, 7 aa, synthetic construct
RGDSRLT

SEQ ID NO: 12687 - protein, 7 aa, synthetic construct
RGDSSVE

SEQ ID NO: 12688 - protein, 7 aa, synthetic construct
RGDSVHI

SEQ ID NO: 12689 - protein, 7 aa, synthetic construct
RGDSVNA

SEQ ID NO: 12690 - protein, 7 aa, synthetic construct
RGDADVF

SEQ ID NO: 12691 - protein, 7 aa, synthetic construct
RGDTATT

SEQ ID NO: 12692 - protein, 7 aa, synthetic construct
RGDTDFF

SEQ ID NO: 12693 - protein, 7 aa, synthetic construct
RGDTENI

SEQ ID NO: 12694 - protein, 7 aa, synthetic construct
RGDTGAH

SEQ ID NO: 12695 - protein, 7 aa, synthetic construct
RGDTGHD

SEQ ID NO: 12696 - protein, 7 aa, synthetic construct
RGDTGNN

SEQ ID NO: 12697 - protein, 7 aa, synthetic construct
RGDTGNR

SEQ ID NO: 12698 - protein, 7 aa, synthetic construct
RGDTGVF

SEQ ID NO: 12699 - protein, 7 aa, synthetic construct
RGDTHGT

SEQ ID NO: 12700 - protein, 7 aa, synthetic construct
RGDTIFL

SEQ ID NO: 12701 - protein, 7 aa, synthetic construct
RGDTILF

SEQ ID NO: 12702 - protein, 7 aa, synthetic construct
RGDTLIV

SEQ ID NO: 12703 - protein, 7 aa, synthetic construct
RGDTQHN

SEQ ID NO: 12704 - protein, 7 aa, synthetic construct
RGDTQSN

SEQ ID NO: 12705 - protein, 7 aa, synthetic construct
RGDTQSS

SEQ ID NO: 12706 - protein, 7 aa, synthetic construct
RGDTRHE

SEQ ID NO: 12707 - protein, 7 aa, synthetic construct
RGDTSFF

SEQ ID NO: 12708 - protein, 7 aa, synthetic construct
RGDTVVS

SEQ ID NO: 12709 - protein, 7 aa, synthetic construct
RGDVADQ

SEQ ID NO: 12710 - protein, 7 aa, synthetic construct
RGDVARH

SEQ ID NO: 12711 - protein, 7 aa, synthetic construct
RGDVFFV

SEQ ID NO: 12712 - protein, 7 aa, synthetic construct
RGDVFKR

SEQ ID NO: 12713 - protein, 7 aa, synthetic construct
RGDVFRK

SEQ ID NO: 12714 - protein, 7 aa, synthetic construct
RGDVHGT

SEQ ID NO: 12715 - protein, 7 aa, synthetic construct
RGDVHIN

SEQ ID NO: 12716 - protein, 7 aa, synthetic construct
RGDVHNE

SEQ ID NO: 12717 - protein, 7 aa, synthetic construct
RGDVIFI

SEQ ID NO: 12718 - protein, 7 aa, synthetic construct
RGDVKQS

SEQ ID NO: 12719 - protein, 7 aa, synthetic construct
RGDVKQT

SEQ ID NO: 12720 - protein, 7 aa, synthetic construct
RGDVKTD

SEQ ID NO: 12721 - protein, 7 aa, synthetic construct
RGDVLHV

SEQ ID NO: 12722 - protein, 7 aa, synthetic construct
RGDVLLL

SEQ ID NO: 12723 - protein, 7 aa, synthetic construct
RGDVNQL

SEQ ID NO: 12724 - protein, 7 aa, synthetic construct
RGDVQLN

SEQ ID NO: 12725 - protein, 7 aa, synthetic construct
RGDVQTH

SEQ ID NO: 12726 - protein, 7 aa, synthetic construct
RGDVRAG

SEQ ID NO: 12727 - protein, 7 aa, synthetic construct
RGDVRFH

SEQ ID NO: 12728 - protein, 7 aa, synthetic construct
RGDVRHN

SEQ ID NO: 12729 - protein, 7 aa, synthetic construct
RGDVRNH

SEQ ID NO: 12730 - protein, 7 aa, synthetic construct
RGDVSNF

SEQ ID NO: 12731 - protein, 7 aa, synthetic construct
RGDVSTT

SEQ ID NO: 12732 - protein, 7 aa, synthetic construct
RGDVVAQ

SEQ ID NO: 12733 - protein, 7 aa, synthetic construct
RGDVVHF

SEQ ID NO: 12734 - protein, 7 aa, synthetic construct
RGDDLKK

SEQ ID NO: 12735 - protein, 7 aa, synthetic construct
RGDDQNL

SEQ ID NO: 12736 - protein, 7 aa, synthetic construct
RGDDRKT

SEQ ID NO: 12737 - protein, 7 aa, synthetic construct
RGDDSHF

SEQ ID NO: 12738 - protein, 7 aa, synthetic construct
RGDDVKV

SEQ ID NO: 12739 - protein, 7 aa, synthetic construct
RGDAFFK

SEQ ID NO: 12740 - protein, 7 aa, synthetic construct
RGDEGVE

SEQ ID NO: 12741 - protein, 7 aa, synthetic construct
RGDEKRK

SEQ ID NO: 12742 - protein, 7 aa, synthetic construct
RGDAFRV

SEQ ID NO: 12743 - protein, 7 aa, synthetic construct
RGDEQGF

SEQ ID NO: 12744 - protein, 7 aa, synthetic construct
RGDEQHV

SEQ ID NO: 12745 - protein, 7 aa, synthetic construct
RGDAGHF

SEQ ID NO: 12746 - protein, 7 aa, synthetic construct
RGDEVVT

SEQ ID NO: 12747 - protein, 7 aa, synthetic construct
RGDFAKS

SEQ ID NO: 12748 - protein, 7 aa, synthetic construct
RGDFASQ

SEQ ID NO: 12749 - protein, 7 aa, synthetic construct
RGDFDDG

SEQ ID NO: 12750 - protein, 7 aa, synthetic construct
RGDFDRR

SEQ ID NO: 12751 - protein, 7 aa, synthetic construct
RGDFDSL

SEQ ID NO: 12752 - protein, 7 aa, synthetic construct
RGDFEAN

SEQ ID NO: 12753 - protein, 7 aa, synthetic construct
RGDFEAT

SEQ ID NO: 12754 - protein, 7 aa, synthetic construct
RGDFEGQ

SEQ ID NO: 12755 - protein, 7 aa, synthetic construct
RGDFERL

SEQ ID NO: 12756 - protein, 7 aa, synthetic construct
RGDFFSG

SEQ ID NO: 12757 - protein, 7 aa, synthetic construct
RGDFGRH

SEQ ID NO: 12758 - protein, 7 aa, synthetic construct
RGDFIGE

SEQ ID NO: 12759 - protein, 7 aa, synthetic construct
RGDFIRS

SEQ ID NO: 12760 - protein, 7 aa, synthetic construct
RGDFISH

SEQ ID NO: 12761 - protein, 7 aa, synthetic construct
RGDFLQS

SEQ ID NO: 12762 - protein, 7 aa, synthetic construct
RGDFNAF

SEQ ID NO: 12763 - protein, 7 aa, synthetic construct
RGDFRGI

SEQ ID NO: 12764 - protein, 7 aa, synthetic construct
RGDFSRG

SEQ ID NO: 12765 - protein, 7 aa, synthetic construct
RGDFSRK

SEQ ID NO: 12766 - protein, 7 aa, synthetic construct
RGDFTHH

SEQ ID NO: 12767 - protein, 7 aa, synthetic construct
RGDFTQE

SEQ ID NO: 12768 - protein, 7 aa, synthetic construct
RGDFTVG

SEQ ID NO: 12769 - protein, 7 aa, synthetic construct
RGDFVVS

SEQ ID NO: 12770 - protein, 7 aa, synthetic construct
RGDGAHE

SEQ ID NO: 12771 - protein, 7 aa, synthetic construct
RGDGDNT

SEQ ID NO: 12772 - protein, 7 aa, synthetic construct
RGDGEHD

SEQ ID NO: 12773 - protein, 7 aa, synthetic construct
RGDGFHS

SEQ ID NO: 12774 - protein, 7 aa, synthetic construct
RGDGHSS

SEQ ID NO: 12775 - protein, 7 aa, synthetic construct
RGDGIEV

SEQ ID NO: 12776 - protein, 7 aa, synthetic construct
RGDGINL

SEQ ID NO: 12777 - protein, 7 aa, synthetic construct
RGDGKAQ

SEQ ID NO: 12778 - protein, 7 aa, synthetic construct
RGDGKHK

SEQ ID NO: 12779 - protein, 7 aa, synthetic construct
RGDGKKD

SEQ ID NO: 12780 - protein, 7 aa, synthetic construct
RGDGKLT

SEQ ID NO: 12781 - protein, 7 aa, synthetic construct
RGDGKQT

SEQ ID NO: 12782 - protein, 7 aa, synthetic construct
RGDGKRH

SEQ ID NO: 12783 - protein, 7 aa, synthetic construct
RGDGNHR

SEQ ID NO: 12784 - protein, 7 aa, synthetic construct
RGDAKAL

SEQ ID NO: 12785 - protein, 7 aa, synthetic construct
RGDGQKQ

SEQ ID NO: 12786 - protein, 7 aa, synthetic construct
RGDGQRS

SEQ ID NO: 12787 - protein, 7 aa, synthetic construct
RGDGRFT

SEQ ID NO: 12788 - protein, 7 aa, synthetic construct
RGDAKGT

SEQ ID NO: 12789 - protein, 7 aa, synthetic construct
RGDHDTL

SEQ ID NO: 12790 - protein, 7 aa, synthetic construct
RGDHEFF

SEQ ID NO: 12791 - protein, 7 aa, synthetic construct
RGDHEHI

SEQ ID NO: 12792 - protein, 7 aa, synthetic construct
RGDHESF

SEQ ID NO: 12793 - protein, 7 aa, synthetic construct
RGDHFVV

SEQ ID NO: 12794 - protein, 7 aa, synthetic construct
RGDHITR

SEQ ID NO: 12795 - protein, 7 aa, synthetic construct
RGDHNDR

SEQ ID NO: 12796 - protein, 7 aa, synthetic construct
RGDHNFF

SEQ ID NO: 12797 - protein, 7 aa, synthetic construct
RGDHNVG

SEQ ID NO: 12798 - protein, 7 aa, synthetic construct
RGDALQL

SEQ ID NO: 12799 - protein, 7 aa, synthetic construct
RGDHSTG

SEQ ID NO: 12800 - protein, 7 aa, synthetic construct
RGDHTAV

SEQ ID NO: 12801 - protein, 7 aa, synthetic construct
RGDIAAN

SEQ ID NO: 12802 - protein, 7 aa, synthetic construct
RGDIDLK

SEQ ID NO: 12803 - protein, 7 aa, synthetic construct
RGDIEHI

SEQ ID NO: 12804 - protein, 7 aa, synthetic construct
RGDIFAL

SEQ ID NO: 12805 - protein, 7 aa, synthetic construct
RGDIHLV

SEQ ID NO: 12806 - protein, 7 aa, synthetic construct
RGDIKII

SEQ ID NO: 12807 - protein, 7 aa, synthetic construct
RGDIKLK

SEQ ID NO: 12808 - protein, 7 aa, synthetic construct
RGDANSH

SEQ ID NO: 12809 - protein, 7 aa, synthetic construct
RGDILHL

SEQ ID NO: 12810 - protein, 7 aa, synthetic construct
RGDAQAI

SEQ ID NO: 12811 - protein, 7 aa, synthetic construct
RGDISVN

SEQ ID NO: 12812 - protein, 7 aa, synthetic construct
RGDITNH

SEQ ID NO: 12813 - protein, 7 aa, synthetic construct
RGDIVGG

SEQ ID NO: 12814 - protein, 7 aa, synthetic construct
RGDIVHT

SEQ ID NO: 12815 - protein, 7 aa, synthetic construct
RGDIVRL

SEQ ID NO: 12816 - protein, 7 aa, synthetic construct
RGDKAAI

SEQ ID NO: 12817 - protein, 7 aa, synthetic construct
RGDKAET

SEQ ID NO: 12818 - protein, 7 aa, synthetic construct
RGDKAGT

SEQ ID NO: 12819 - protein, 7 aa, synthetic construct
RGDKANT

SEQ ID NO: 12820 - protein, 7 aa, synthetic construct
RGDKEFH

SEQ ID NO: 12821 - protein, 7 aa, synthetic construct
RGDKELI

SEQ ID NO: 12822 - protein, 7 aa, synthetic construct
RGDKFGV

SEQ ID NO: 12823 - protein, 7 aa, synthetic construct
RGDKGEQ

SEQ ID NO: 12824 - protein, 7 aa, synthetic construct
RGDAQTV

SEQ ID NO: 12825 - protein, 7 aa, synthetic construct
RGDKKIT

SEQ ID NO: 12826 - protein, 7 aa, synthetic construct
RGDKKQV

SEQ ID NO: 12827 - protein, 7 aa, synthetic construct
RGDKKVI

SEQ ID NO: 12828 - protein, 7 aa, synthetic construct
RGDKLAV

SEQ ID NO: 12829 - protein, 7 aa, synthetic construct
RGDARHE

SEQ ID NO: 12830 - protein, 7 aa, synthetic construct
RGDKNKS

SEQ ID NO: 12831 - protein, 7 aa, synthetic construct
RGDKNNH

SEQ ID NO: 12832 - protein, 7 aa, synthetic construct
RGDARKE

SEQ ID NO: 12833 - protein, 7 aa, synthetic construct
RGDKRVL

SEQ ID NO: 12834 - protein, 7 aa, synthetic construct
RGDKRVS

SEQ ID NO: 12835 - protein, 7 aa, synthetic construct
RGDKRVV

SEQ ID NO: 12836 - protein, 7 aa, synthetic construct
RGDKTQD

SEQ ID NO: 12837 - protein, 7 aa, synthetic construct
RGDARVA

SEQ ID NO: 12838 - protein, 7 aa, synthetic construct
RGDKVNL

SEQ ID NO: 12839 - protein, 7 aa, synthetic construct
RGDLDRK

SEQ ID NO: 12840 - protein, 7 aa, synthetic construct
RGDLDTK

SEQ ID NO: 12841 - protein, 7 aa, synthetic construct
RGDLEDF

SEQ ID NO: 12842 - protein, 7 aa, synthetic construct
RGDLEHN

SEQ ID NO: 12843 - protein, 7 aa, synthetic construct
RGDLEIQ

SEQ ID NO: 12844 - protein, 7 aa, synthetic construct
RGDLELH

SEQ ID NO: 12845 - protein, 7 aa, synthetic construct
RGDLFFK

SEQ ID NO: 12846 - protein, 7 aa, synthetic construct
RGDLFQT

SEQ ID NO: 12847 - protein, 7 aa, synthetic construct
RGDLGAV

SEQ ID NO: 12848 - protein, 7 aa, synthetic construct
RGDLGGS

SEQ ID NO: 12849 - protein, 7 aa, synthetic construct
RGDLHEI

SEQ ID NO: 12850 - protein, 7 aa, synthetic construct
RGDLHNN

SEQ ID NO: 12851 - protein, 7 aa, synthetic construct
RGDLIIQ

SEQ ID NO: 12852 - protein, 7 aa, synthetic construct
RGDLKGD

SEQ ID NO: 12853 - protein, 7 aa, synthetic construct
RGDLKHE

SEQ ID NO: 12854 - protein, 7 aa, synthetic construct
RGDLKQA

SEQ ID NO: 12855 - protein, 7 aa, synthetic construct
RGDLNSH

SEQ ID NO: 12856 - protein, 7 aa, synthetic construct
RGDLQAR

SEQ ID NO: 12857 - protein, 7 aa, synthetic construct
RGDLQKQ

SEQ ID NO: 12858 - protein, 7 aa, synthetic construct
RGDATGL

SEQ ID NO: 12859 - protein, 7 aa, synthetic construct
RGDLTSR

SEQ ID NO: 12860 - protein, 7 aa, synthetic construct
RGDLTVA

SEQ ID NO: 12861 - protein, 7 aa, synthetic construct
RGDLTVQ

SEQ ID NO: 12862 - protein, 7 aa, synthetic construct
RGDNAIK

SEQ ID NO: 12863 - protein, 7 aa, synthetic construct
RGDNAVL

SEQ ID NO: 12864 - protein, 7 aa, synthetic construct
RGDNEKL

SEQ ID NO: 12865 - protein, 7 aa, synthetic construct
RGDNELL

SEQ ID NO: 12866 - protein, 7 aa, synthetic construct
RGDNHGI

SEQ ID NO: 12867 - protein, 7 aa, synthetic construct
RGDNHSN

SEQ ID NO: 12868 - protein, 7 aa, synthetic construct
RGDNHTL

SEQ ID NO: 12869 - protein, 7 aa, synthetic construct
RGDNKDL

SEQ ID NO: 12870 - protein, 7 aa, synthetic construct
RGDNKEQ

SEQ ID NO: 12871 - protein, 7 aa, synthetic construct
RGDNKTA

SEQ ID NO: 12872 - protein, 7 aa, synthetic construct
RGDNLSV

SEQ ID NO: 12873 - protein, 7 aa, synthetic construct
RGDNRNL

SEQ ID NO: 12874 - protein, 7 aa, synthetic construct
RGDNRQK

SEQ ID NO: 12875 - protein, 7 aa, synthetic construct
RGDNSDK

SEQ ID NO: 12876 - protein, 7 aa, synthetic construct
RGDNTTF

SEQ ID NO: 12877 - protein, 7 aa, synthetic construct
RGDQERI

SEQ ID NO: 12878 - protein, 7 aa, synthetic construct
RGDQFHS

SEQ ID NO: 12879 - protein, 7 aa, synthetic construct
RGDQHAF

SEQ ID NO: 12880 - protein, 7 aa, synthetic construct
RGDQHRL

SEQ ID NO: 12881 - protein, 7 aa, synthetic construct
RGDQKFF

SEQ ID NO: 12882 - protein, 7 aa, synthetic construct
RGDQNGH

SEQ ID NO: 12883 - protein, 7 aa, synthetic construct
RGDQRIQ

SEQ ID NO: 12884 - protein, 7 aa, synthetic construct
RGDQSGG

SEQ ID NO: 12885 - protein, 7 aa, synthetic construct
RGDQSTK

SEQ ID NO: 12886 - protein, 7 aa, synthetic construct
RGDQTGG

SEQ ID NO: 12887 - protein, 7 aa, synthetic construct
RGDQVVV

SEQ ID NO: 12888 - protein, 7 aa, synthetic construct
RGDRAIE

SEQ ID NO: 12889 - protein, 7 aa, synthetic construct
RGDRAVS

SEQ ID NO: 12890 - protein, 7 aa, synthetic construct
RGDRFQQ

SEQ ID NO: 12891 - protein, 7 aa, synthetic construct
RGDRGDG

SEQ ID NO: 12892 - protein, 7 aa, synthetic construct
RGDRGGH

SEQ ID NO: 12893 - protein, 7 aa, synthetic construct
RGDRGVH

SEQ ID NO: 12894 - protein, 7 aa, synthetic construct
RGDRHTG

SEQ ID NO: 12895 - protein, 7 aa, synthetic construct
RGDRINN

SEQ ID NO: 12896 - protein, 7 aa, synthetic construct
RGDRKIQ

SEQ ID NO: 12897 - protein, 7 aa, synthetic construct
RGDRQIK

SEQ ID NO: 12898 - protein, 7 aa, synthetic construct
RGDRRKN

SEQ ID NO: 12899 - protein, 7 aa, synthetic construct
RGDRRTA

SEQ ID NO: 12900 - protein, 7 aa, synthetic construct
RGDRRTN

SEQ ID NO: 12901 - protein, 7 aa, synthetic construct
RGDRSFR

SEQ ID NO: 12902 - protein, 7 aa, synthetic construct
RGDRVAV

SEQ ID NO: 12903 - protein, 7 aa, synthetic construct
RGDRVSH

SEQ ID NO: 12904 - protein, 7 aa, synthetic construct
RGDRVVA

SEQ ID NO: 12905 - protein, 7 aa, synthetic construct
RGDSDSS

SEQ ID NO: 12906 - protein, 7 aa, synthetic construct
RGDSENE

SEQ ID NO: 12907 - protein, 7 aa, synthetic construct
RGDSGKG

SEQ ID NO: 12908 - protein, 7 aa, synthetic construct
RGDSHEK

SEQ ID NO: 12909 - protein, 7 aa, synthetic construct
RGDSHGA

SEQ ID NO: 12910 - protein, 7 aa, synthetic construct
RGDSHKG

SEQ ID NO: 12911 - protein, 7 aa, synthetic construct
RGDSILT

SEQ ID NO: 12912 - protein, 7 aa, synthetic construct
RGDSKLS

SEQ ID NO: 12913 - protein, 7 aa, synthetic construct
RGDSKNT

SEQ ID NO: 12914 - protein, 7 aa, synthetic construct
RGDDFSL

SEQ ID NO: 12915 - protein, 7 aa, synthetic construct
RGDSLVS

SEQ ID NO: 12916 - protein, 7 aa, synthetic construct
RGDSQAV

SEQ ID NO: 12917 - protein, 7 aa, synthetic construct
RGDSRAN

SEQ ID NO: 12918 - protein, 7 aa, synthetic construct
RGDSSAE

SEQ ID NO: 12919 - protein, 7 aa, synthetic construct
RGDSTSL

SEQ ID NO: 12920 - protein, 7 aa, synthetic construct
RGDSVHF

SEQ ID NO: 12921 - protein, 7 aa, synthetic construct
RGDTAHI

SEQ ID NO: 12922 - protein, 7 aa, synthetic construct
RGDTAIQ

SEQ ID NO: 12923 - protein, 7 aa, synthetic construct
RGDTKVF

SEQ ID NO: 12924 - protein, 7 aa, synthetic construct
RGDTLKL

SEQ ID NO: 12925 - protein, 7 aa, synthetic construct
RGDTNKS

SEQ ID NO: 12926 - protein, 7 aa, synthetic construct
RGDTQHK

SEQ ID NO: 12927 - protein, 7 aa, synthetic construct
RGDTSLQ

SEQ ID NO: 12928 - protein, 7 aa, synthetic construct
RGDTVQI

SEQ ID NO: 12929 - protein, 7 aa, synthetic construct
RGDVANH

SEQ ID NO: 12930 - protein, 7 aa, synthetic construct
RGDVEAV

SEQ ID NO: 12931 - protein, 7 aa, synthetic construct
RGDVEQK

SEQ ID NO: 12932 - protein, 7 aa, synthetic construct
RGDVFKF

SEQ ID NO: 12933 - protein, 7 aa, synthetic construct
RGDVHNH

SEQ ID NO: 12934 - protein, 7 aa, synthetic construct
RGDVIFT

SEQ ID NO: 12935 - protein, 7 aa, synthetic construct
RGDVIGV

SEQ ID NO: 12936 - protein, 7 aa, synthetic construct
RGDVKHE

SEQ ID NO: 12937 - protein, 7 aa, synthetic construct
RGDVKTR

SEQ ID NO: 12938 - protein, 7 aa, synthetic construct
RGDVLHD

SEQ ID NO: 12939 - protein, 7 aa, synthetic construct
RGDVLVG

SEQ ID NO: 12940 - protein, 7 aa, synthetic construct
RGDVQRL

SEQ ID NO: 12941 - protein, 7 aa, synthetic construct
RGDVSNR

SEQ ID NO: 12942 - protein, 7 aa, synthetic construct
RGDVSSA

SEQ ID NO: 12943 - protein, 7 aa, synthetic construct
RGDVTLQ

SEQ ID NO: 12944 - protein, 7 aa, synthetic construct
RGDVVRT

SEQ ID NO: 12945 - protein, 7 aa, synthetic construct
RGDVVTI

SEQ ID NO: 12946 - protein, 7 aa, synthetic construct
RGDDKTS

SEQ ID NO: 12947 - protein, 7 aa, synthetic construct
RGDDKVF

SEQ ID NO: 12948 - protein, 7 aa, synthetic construct
RGDDLIN

SEQ ID NO: 12949 - protein, 7 aa, synthetic construct
RGDDNKV

SEQ ID NO: 12950 - protein, 7 aa, synthetic construct
RGDDSGF

SEQ ID NO: 12951 - protein, 7 aa, synthetic construct
RGDDSHQ

SEQ ID NO: 12952 - protein, 7 aa, synthetic construct
RGDEGFN

SEQ ID NO: 12953 - protein, 7 aa, synthetic construct
RGDEHHL

SEQ ID NO: 12954 - protein, 7 aa, synthetic construct
RGDELQH

SEQ ID NO: 12955 - protein, 7 aa, synthetic construct
RGDELRF

SEQ ID NO: 12956 - protein, 7 aa, synthetic construct
RGDEQKT

SEQ ID NO: 12957 - protein, 7 aa, synthetic construct
RGDEREA

SEQ ID NO: 12958 - protein, 7 aa, synthetic construct
RGDERKL

SEQ ID NO: 12959 - protein, 7 aa, synthetic construct
RGDESSR

SEQ ID NO: 12960 - protein, 7 aa, synthetic construct
RGDAGII

SEQ ID NO: 12961 - protein, 7 aa, synthetic construct
RGDFEFA

SEQ ID NO: 12962 - protein, 7 aa, synthetic construct
RGDFFKD

SEQ ID NO: 12963 - protein, 7 aa, synthetic construct
RGDFFKG

SEQ ID NO: 12964 - protein, 7 aa, synthetic construct
RGDFFLT

SEQ ID NO: 12965 - protein, 7 aa, synthetic construct
RGDFFSH

SEQ ID NO: 12966 - protein, 7 aa, synthetic construct
RGDFGFH

SEQ ID NO: 12967 - protein, 7 aa, synthetic construct
RGDFIQF

SEQ ID NO: 12968 - protein, 7 aa, synthetic construct
RGDFKQR

SEQ ID NO: 12969 - protein, 7 aa, synthetic construct
RGDFLHE

SEQ ID NO: 12970 - protein, 7 aa, synthetic construct
RGDFNKF

SEQ ID NO: 12971 - protein, 7 aa, synthetic construct
RGDFNSR

SEQ ID NO: 12972 - protein, 7 aa, synthetic construct
RGDFQTL

SEQ ID NO: 12973 - protein, 7 aa, synthetic construct
RGDFRAL

SEQ ID NO: 12974 - protein, 7 aa, synthetic construct
RGDFREL

SEQ ID NO: 12975 - protein, 7 aa, synthetic construct
RGDFSHF

SEQ ID NO: 12976 - protein, 7 aa, synthetic construct
RGDFSIT

SEQ ID NO: 12977 - protein, 7 aa, synthetic construct
RGDAHSS

SEQ ID NO: 12978 - protein, 7 aa, synthetic construct
RGDFTLV

SEQ ID NO: 12979 - protein, 7 aa, synthetic construct
RGDFTSI

SEQ ID NO: 12980 - protein, 7 aa, synthetic construct
RGDFVAV

SEQ ID NO: 12981 - protein, 7 aa, synthetic construct
RGDFVIG

SEQ ID NO: 12982 - protein, 7 aa, synthetic construct
RGDFVLF

SEQ ID NO: 12983 - protein, 7 aa, synthetic construct
RGDFVRK

SEQ ID NO: 12984 - protein, 7 aa, synthetic construct
RGDGAHS

SEQ ID NO: 12985 - protein, 7 aa, synthetic construct
RGDGDVV

SEQ ID NO: 12986 - protein, 7 aa, synthetic construct
RGDGEHL

SEQ ID NO: 12987 - protein, 7 aa, synthetic construct
RGDGFGT

SEQ ID NO: 12988 - protein, 7 aa, synthetic construct
RGDGFNF

SEQ ID NO: 12989 - protein, 7 aa, synthetic construct
RGDAIHT

SEQ ID NO: 12990 - protein, 7 aa, synthetic construct
RGDGGHR

SEQ ID NO: 12991 - protein, 7 aa, synthetic construct
RGDGHNE

SEQ ID NO: 12992 - protein, 7 aa, synthetic construct
RGDGIVK

SEQ ID NO: 12993 - protein, 7 aa, synthetic construct
RGDGIVT

SEQ ID NO: 12994 - protein, 7 aa, synthetic construct
RGDGKQS

SEQ ID NO: 12995 - protein, 7 aa, synthetic construct
RGDGKTH

SEQ ID NO: 12996 - protein, 7 aa, synthetic construct
RGDGLEL

SEQ ID NO: 12997 - protein, 7 aa, synthetic construct
RGDAITF

SEQ ID NO: 12998 - protein, 7 aa, synthetic construct
RGDGRVK

SEQ ID NO: 12999 - protein, 7 aa, synthetic construct
RGDGSAN

SEQ ID NO: 13000 - protein, 7 aa, synthetic construct
RGDAKGE

SEQ ID NO: 13001 - protein, 7 aa, synthetic construct
RGDAKHH

SEQ ID NO: 13002 - protein, 7 aa, synthetic construct
RGDGVEV

SEQ ID NO: 13003 - protein, 7 aa, synthetic construct
RGDAKNI

SEQ ID NO: 13004 - protein, 7 aa, synthetic construct
RGDHERA

SEQ ID NO: 13005 - protein, 7 aa, synthetic construct
RGDHFRV

SEQ ID NO: 13006 - protein, 7 aa, synthetic construct
RGDHIDH

SEQ ID NO: 13007 - protein, 7 aa, synthetic construct
RGDHIHI

SEQ ID NO: 13008 - protein, 7 aa, synthetic construct
RGDALES

SEQ ID NO: 13009 - protein, 7 aa, synthetic construct
RGDHLNG

SEQ ID NO: 13010 - protein, 7 aa, synthetic construct
RGDHLSF

SEQ ID NO: 13011 - protein, 7 aa, synthetic construct
RGDHLTF

SEQ ID NO: 13012 - protein, 7 aa, synthetic construct
RGDHQGH

SEQ ID NO: 13013 - protein, 7 aa, synthetic construct
RGDHQSN

SEQ ID NO: 13014 - protein, 7 aa, synthetic construct
RGDHSGS

SEQ ID NO: 13015 - protein, 7 aa, synthetic construct
RGDHSRQ

SEQ ID NO: 13016 - protein, 7 aa, synthetic construct
RGDHTFR

SEQ ID NO: 13017 - protein, 7 aa, synthetic construct
RGDHTGE

SEQ ID NO: 13018 - protein, 7 aa, synthetic construct
RGDHTSA

SEQ ID NO: 13019 - protein, 7 aa, synthetic construct
RGDHVTT

SEQ ID NO: 13020 - protein, 7 aa, synthetic construct
RGDIAHN

SEQ ID NO: 13021 - protein, 7 aa, synthetic construct
RGDIANN

SEQ ID NO: 13022 - protein, 7 aa, synthetic construct
RGDIATI

SEQ ID NO: 13023 - protein, 7 aa, synthetic construct
RGDIDNS

SEQ ID NO: 13024 - protein, 7 aa, synthetic construct
RGDIEKK

SEQ ID NO: 13025 - protein, 7 aa, synthetic construct
RGDIGEH

SEQ ID NO: 13026 - protein, 7 aa, synthetic construct
RGDINHQ

SEQ ID NO: 13027 - protein, 7 aa, synthetic construct
RGDINVK

SEQ ID NO: 13028 - protein, 7 aa, synthetic construct
RGDIQGQ

SEQ ID NO: 13029 - protein, 7 aa, synthetic construct
RGDIRQV

SEQ ID NO: 13030 - protein, 7 aa, synthetic construct
RGDISKE

SEQ ID NO: 13031 - protein, 7 aa, synthetic construct
RGDISLF

SEQ ID NO: 13032 - protein, 7 aa, synthetic construct
RGDITHT

SEQ ID NO: 13033 - protein, 7 aa, synthetic construct
RGDIVRK

SEQ ID NO: 13034 - protein, 7 aa, synthetic construct
RGDKDHH

SEQ ID NO: 13035 - protein, 7 aa, synthetic construct
RGDKDHQ

SEQ ID NO: 13036 - protein, 7 aa, synthetic construct
RGDKEHQ

SEQ ID NO: 13037 - protein, 7 aa, synthetic construct
RGDKEHR

SEQ ID NO: 13038 - protein, 7 aa, synthetic construct
RGDKFNH

SEQ ID NO: 13039 - protein, 7 aa, synthetic construct
RGDKFRQ

SEQ ID NO: 13040 - protein, 7 aa, synthetic construct
RGDKGDT

SEQ ID NO: 13041 - protein, 7 aa, synthetic construct
RGDKGSR

SEQ ID NO: 13042 - protein, 7 aa, synthetic construct
RGDKHGH

SEQ ID NO: 13043 - protein, 7 aa, synthetic construct
RGDKHNV

SEQ ID NO: 13044 - protein, 7 aa, synthetic construct
RGDKIAF

SEQ ID NO: 13045 - protein, 7 aa, synthetic construct
RGDKLLI

SEQ ID NO: 13046 - protein, 7 aa, synthetic construct
RGDARHS

SEQ ID NO: 13047 - protein, 7 aa, synthetic construct
RGDKNRE

SEQ ID NO: 13048 - protein, 7 aa, synthetic construct
RGDKQHR

SEQ ID NO: 13049 - protein, 7 aa, synthetic construct
RGDKQHV

SEQ ID NO: 13050 - protein, 7 aa, synthetic construct
RGDKQNG

SEQ ID NO: 13051 - protein, 7 aa, synthetic construct
RGDKQTH

SEQ ID NO: 13052 - protein, 7 aa, synthetic construct
RGDKRGD

SEQ ID NO: 13053 - protein, 7 aa, synthetic construct
RGDKRHN

SEQ ID NO: 13054 - protein, 7 aa, synthetic construct
RGDKSHR

SEQ ID NO: 13055 - protein, 7 aa, synthetic construct
RGDARSK

SEQ ID NO: 13056 - protein, 7 aa, synthetic construct
RGDKVHN

SEQ ID NO: 13057 - protein, 7 aa, synthetic construct
RGDLASG

SEQ ID NO: 13058 - protein, 7 aa, synthetic construct
RGDLDSK

SEQ ID NO: 13059 - protein, 7 aa, synthetic construct
RGDASLT

SEQ ID NO: 13060 - protein, 7 aa, synthetic construct
RGDLIHI

SEQ ID NO: 13061 - protein, 7 aa, synthetic construct
RGDLKIK

SEQ ID NO: 13062 - protein, 7 aa, synthetic construct
RGDLLNS

SEQ ID NO: 13063 - protein, 7 aa, synthetic construct
RGDLQDK

SEQ ID NO: 13064 - protein, 7 aa, synthetic construct
RGDLQII

SEQ ID NO: 13065 - protein, 7 aa, synthetic construct
RGDLQRT

SEQ ID NO: 13066 - protein, 7 aa, synthetic construct
RGDLRND

SEQ ID NO: 13067 - protein, 7 aa, synthetic construct
RGDLRNT

SEQ ID NO: 13068 - protein, 7 aa, synthetic construct
RGDLSEV

SEQ ID NO: 13069 - protein, 7 aa, synthetic construct
RGDLSKS

SEQ ID NO: 13070 - protein, 7 aa, synthetic construct
RGDLTHR

SEQ ID NO: 13071 - protein, 7 aa, synthetic construct
RGDNGGI

SEQ ID NO: 13072 - protein, 7 aa, synthetic construct
RGDNKGH

SEQ ID NO: 13073 - protein, 7 aa, synthetic construct
RGDNLNK

SEQ ID NO: 13074 - protein, 7 aa, synthetic construct
RGDNQDR

SEQ ID NO: 13075 - protein, 7 aa, synthetic construct
RGDNQDS

SEQ ID NO: 13076 - protein, 7 aa, synthetic construct
RGDNQFL

SEQ ID NO: 13077 - protein, 7 aa, synthetic construct
RGDNQHL

SEQ ID NO: 13078 - protein, 7 aa, synthetic construct
RGDAVNG

SEQ ID NO: 13079 - protein, 7 aa, synthetic construct
RGDAVNQ

SEQ ID NO: 13080 - protein, 7 aa, synthetic construct
RGDAVRS

SEQ ID NO: 13081 - protein, 7 aa, synthetic construct
RGDNTSG

SEQ ID NO: 13082 - protein, 7 aa, synthetic construct
RGDAVTS

SEQ ID NO: 13083 - protein, 7 aa, synthetic construct
RGDQDKI

SEQ ID NO: 13084 - protein, 7 aa, synthetic construct
RGDQDRQ

SEQ ID NO: 13085 - protein, 7 aa, synthetic construct
RGDQGRG

SEQ ID NO: 13086 - protein, 7 aa, synthetic construct
RGDQHNR

SEQ ID NO: 13087 - protein, 7 aa, synthetic construct
RGDQIVK

SEQ ID NO: 13088 - protein, 7 aa, synthetic construct
RGDQKQN

SEQ ID NO: 13089 - protein, 7 aa, synthetic construct
RGDQLHG

SEQ ID NO: 13090 - protein, 7 aa, synthetic construct
RGDDASK

SEQ ID NO: 13091 - protein, 7 aa, synthetic construct
RGDQLHN

SEQ ID NO: 13092 - protein, 7 aa, synthetic construct
RGDQNGK

SEQ ID NO: 13093 - protein, 7 aa, synthetic construct
RGDQNSR

SEQ ID NO: 13094 - protein, 7 aa, synthetic construct
RGDQNSV

SEQ ID NO: 13095 - protein, 7 aa, synthetic construct
RGDQNTK

SEQ ID NO: 13096 - protein, 7 aa, synthetic construct
RGDQNTN

SEQ ID NO: 13097 - protein, 7 aa, synthetic construct
RGDQNVI

SEQ ID NO: 13098 - protein, 7 aa, synthetic construct
RGDQQGV

SEQ ID NO: 13099 - protein, 7 aa, synthetic construct
RGDQQHK

SEQ ID NO: 13100 - protein, 7 aa, synthetic construct
RGDQRDS

SEQ ID NO: 13101 - protein, 7 aa, synthetic construct
RGDQRFD

SEQ ID NO: 13102 - protein, 7 aa, synthetic construct
RGDQRGA

SEQ ID NO: 13103 - protein, 7 aa, synthetic construct
RGDRASD

SEQ ID NO: 13104 - protein, 7 aa, synthetic construct
RGDRDQF

SEQ ID NO: 13105 - protein, 7 aa, synthetic construct
RGDRDTV

SEQ ID NO: 13106 - protein, 7 aa, synthetic construct
RGDRDVL

SEQ ID NO: 13107 - protein, 7 aa, synthetic construct
RGDREHS

SEQ ID NO: 13108 - protein, 7 aa, synthetic construct
RGDRFFN

SEQ ID NO: 13109 - protein, 7 aa, synthetic construct
RGDDDVA

SEQ ID NO: 13110 - protein, 7 aa, synthetic construct
RGDRIAS

SEQ ID NO: 13111 - protein, 7 aa, synthetic construct
RGDRIEK

SEQ ID NO: 13112 - protein, 7 aa, synthetic construct
RGDRKAN

SEQ ID NO: 13113 - protein, 7 aa, synthetic construct
RGDRKSI

SEQ ID NO: 13114 - protein, 7 aa, synthetic construct
RGDRKSQ

SEQ ID NO: 13115 - protein, 7 aa, synthetic construct
RGDRLFD

SEQ ID NO: 13116 - protein, 7 aa, synthetic construct
RGDRLFG

SEQ ID NO: 13117 - protein, 7 aa, synthetic construct
RGDRLGE

SEQ ID NO: 13118 - protein, 7 aa, synthetic construct
RGDRLTL

SEQ ID NO: 13119 - protein, 7 aa, synthetic construct
RGDRQVS

SEQ ID NO: 13120 - protein, 7 aa, synthetic construct
RGDRRIQ

SEQ ID NO: 13121 - protein, 7 aa, synthetic construct
RGDRRKI

SEQ ID NO: 13122 - protein, 7 aa, synthetic construct
RGDRRVL

SEQ ID NO: 13123 - protein, 7 aa, synthetic construct
RGDRSHK

SEQ ID NO: 13124 - protein, 7 aa, synthetic construct
RGDRSQD

SEQ ID NO: 13125 - protein, 7 aa, synthetic construct
RGDRTDV

SEQ ID NO: 13126 - protein, 7 aa, synthetic construct
RGDRTST

SEQ ID NO: 13127 - protein, 7 aa, synthetic construct
RGDRVKQ

SEQ ID NO: 13128 - protein, 7 aa, synthetic construct
RGDSGSS

SEQ ID NO: 13129 - protein, 7 aa, synthetic construct
RGDSHAQ

SEQ ID NO: 13130 - protein, 7 aa, synthetic construct
RGDSIFL

SEQ ID NO: 13131 - protein, 7 aa, synthetic construct
RGDSIFS

SEQ ID NO: 13132 - protein, 7 aa, synthetic construct
RGDSKRE

SEQ ID NO: 13133 - protein, 7 aa, synthetic construct
RGDSKVS

SEQ ID NO: 13134 - protein, 7 aa, synthetic construct
RGDSNGR

SEQ ID NO: 13135 - protein, 7 aa, synthetic construct
RGDSNHT

SEQ ID NO: 13136 - protein, 7 aa, synthetic construct
RGDSNSR

SEQ ID NO: 13137 - protein, 7 aa, synthetic construct
RGDSRDN

SEQ ID NO: 13138 - protein, 7 aa, synthetic construct
RGDSRSN

SEQ ID NO: 13139 - protein, 7 aa, synthetic construct
RGDSSKE

SEQ ID NO: 13140 - protein, 7 aa, synthetic construct
RGDSSNQ

SEQ ID NO: 13141 - protein, 7 aa, synthetic construct
RGDSSSQ

SEQ ID NO: 13142 - protein, 7 aa, synthetic construct
RGDSVHN

SEQ ID NO: 13143 - protein, 7 aa, synthetic construct
RGDSVLF

SEQ ID NO: 13144 - protein, 7 aa, synthetic construct
RGDTAAQ

SEQ ID NO: 13145 - protein, 7 aa, synthetic construct
RGDTAKQ

SEQ ID NO: 13146 - protein, 7 aa, synthetic construct
RGDTGTR

SEQ ID NO: 13147 - protein, 7 aa, synthetic construct
RGDTHAH

SEQ ID NO: 13148 - protein, 7 aa, synthetic construct
RGDTIQF

SEQ ID NO: 13149 - protein, 7 aa, synthetic construct
RGDTKKQ

SEQ ID NO: 13150 - protein, 7 aa, synthetic construct
RGDTLFD

SEQ ID NO: 13151 - protein, 7 aa, synthetic construct
RGDTRTG

SEQ ID NO: 13152 - protein, 7 aa, synthetic construct
RGDTSHR

SEQ ID NO: 13153 - protein, 7 aa, synthetic construct
RGDTTQV

SEQ ID NO: 13154 - protein, 7 aa, synthetic construct
RGDTVEK

SEQ ID NO: 13155 - protein, 7 aa, synthetic construct
RGDTVIF

SEQ ID NO: 13156 - protein, 7 aa, synthetic construct
RGDTVTS

SEQ ID NO: 13157 - protein, 7 aa, synthetic construct
RGDVATS

SEQ ID NO: 13158 - protein, 7 aa, synthetic construct
RGDVELF

SEQ ID NO: 13159 - protein, 7 aa, synthetic construct
RGDVFQK

SEQ ID NO: 13160 - protein, 7 aa, synthetic construct
RGDVFRV

SEQ ID NO: 13161 - protein, 7 aa, synthetic construct
RGDVGDI

SEQ ID NO: 13162 - protein, 7 aa, synthetic construct
RGDVGFQ

SEQ ID NO: 13163 - protein, 7 aa, synthetic construct
RGDVHDN

SEQ ID NO: 13164 - protein, 7 aa, synthetic construct
RGDVHGR

SEQ ID NO: 13165 - protein, 7 aa, synthetic construct
RGDVKQI

SEQ ID NO: 13166 - protein, 7 aa, synthetic construct
RGDVLGG

SEQ ID NO: 13167 - protein, 7 aa, synthetic construct
RGDVLGN

SEQ ID NO: 13168 - protein, 7 aa, synthetic construct
RGDVLLF

SEQ ID NO: 13169 - protein, 7 aa, synthetic construct
RGDVLLT

SEQ ID NO: 13170 - protein, 7 aa, synthetic construct
RGDVLNQ

SEQ ID NO: 13171 - protein, 7 aa, synthetic construct
RGDVNLS

SEQ ID NO: 13172 - protein, 7 aa, synthetic construct
RGDVNNR

SEQ ID NO: 13173 - protein, 7 aa, synthetic construct
RGDVNRA

SEQ ID NO: 13174 - protein, 7 aa, synthetic construct
RGDVNRN

SEQ ID NO: 13175 - protein, 7 aa, synthetic construct
RGDVQAV

SEQ ID NO: 13176 - protein, 7 aa, synthetic construct
RGDVQDH

SEQ ID NO: 13177 - protein, 7 aa, synthetic construct
RGDVQQK

SEQ ID NO: 13178 - protein, 7 aa, synthetic construct
RGDVVAL

SEQ ID NO: 13179 - protein, 7 aa, synthetic construct
RGDVVFL

SEQ ID NO: 13180 - protein, 7 aa, synthetic construct
RGDVVIK

SEQ ID NO: 13181 - protein, 7 aa, synthetic construct
RGDVVNI

SEQ ID NO: 13182 - protein, 7 aa, synthetic construct
RGDVVSL

SEQ ID NO: 13183 - protein, 7 aa, synthetic construct
RGDDNSD

SEQ ID NO: 13184 - protein, 7 aa, synthetic construct
RGDAAFS

SEQ ID NO: 13185 - protein, 7 aa, synthetic construct
RGDAESK

SEQ ID NO: 13186 - protein, 7 aa, synthetic construct
RGDDTTK

SEQ ID NO: 13187 - protein, 7 aa, synthetic construct
RGDDVKL

SEQ ID NO: 13188 - protein, 7 aa, synthetic construct
RGDDVTT

SEQ ID NO: 13189 - protein, 7 aa, synthetic construct
RGDEAGR

SEQ ID NO: 13190 - protein, 7 aa, synthetic construct
RGDEASV

SEQ ID NO: 13191 - protein, 7 aa, synthetic construct
RGDEGVK

SEQ ID NO: 13192 - protein, 7 aa, synthetic construct
RGDEHKK

SEQ ID NO: 13193 - protein, 7 aa, synthetic construct
RGDEKAL

SEQ ID NO: 13194 - protein, 7 aa, synthetic construct
RGDERNV

SEQ ID NO: 13195 - protein, 7 aa, synthetic construct
RGDFAQV

SEQ ID NO: 13196 - protein, 7 aa, synthetic construct
RGDFAVV

SEQ ID NO: 13197 - protein, 7 aa, synthetic construct
RGDFGFG

SEQ ID NO: 13198 - protein, 7 aa, synthetic construct
RGDFGTG

SEQ ID NO: 13199 - protein, 7 aa, synthetic construct
RGDFKGV

SEQ ID NO: 13200 - protein, 7 aa, synthetic construct
RGDFKHN

SEQ ID NO: 13201 - protein, 7 aa, synthetic construct
RGDFLAF

SEQ ID NO: 13202 - protein, 7 aa, synthetic construct
RGDFLGR

SEQ ID NO: 13203 - protein, 7 aa, synthetic construct
RGDAHHF

SEQ ID NO: 13204 - protein, 7 aa, synthetic construct
RGDFLVQ

SEQ ID NO: 13205 - protein, 7 aa, synthetic construct
RGDFNQT

SEQ ID NO: 13206 - protein, 7 aa, synthetic construct
RGDFQER

SEQ ID NO: 13207 - protein, 7 aa, synthetic construct
RGDFRFF

SEQ ID NO: 13208 - protein, 7 aa, synthetic construct
RGDFTKN

SEQ ID NO: 13209 - protein, 7 aa, synthetic construct
RGDFVIL

SEQ ID NO: 13210 - protein, 7 aa, synthetic construct
RGDFVKT

SEQ ID NO: 13211 - protein, 7 aa, synthetic construct
RGDFVLV

SEQ ID NO: 13212 - protein, 7 aa, synthetic construct
RGDFVNN

SEQ ID NO: 13213 - protein, 7 aa, synthetic construct
RGDGAGA

SEQ ID NO: 13214 - protein, 7 aa, synthetic construct
RGDGFDL

SEQ ID NO: 13215 - protein, 7 aa, synthetic construct
RGDAIKN

SEQ ID NO: 13216 - protein, 7 aa, synthetic construct
RGDGHRT

SEQ ID NO: 13217 - protein, 7 aa, synthetic construct
RGDGIAV

SEQ ID NO: 13218 - protein, 7 aa, synthetic construct
RGDGKGH

SEQ ID NO: 13219 - protein, 7 aa, synthetic construct
RGDGQFR

SEQ ID NO: 13220 - protein, 7 aa, synthetic construct
RGDGSLT

SEQ ID NO: 13221 - protein, 7 aa, synthetic construct
RGDGSVQ

SEQ ID NO: 13222 - protein, 7 aa, synthetic construct
RGDGTEL

SEQ ID NO: 13223 - protein, 7 aa, synthetic construct
RGDGTTI

SEQ ID NO: 13224 - protein, 7 aa, synthetic construct
RGDGVGK

SEQ ID NO: 13225 - protein, 7 aa, synthetic construct
RGDHDRK

SEQ ID NO: 13226 - protein, 7 aa, synthetic construct
RGDHEVK

SEQ ID NO: 13227 - protein, 7 aa, synthetic construct
RGDHGDI

SEQ ID NO: 13228 - protein, 7 aa, synthetic construct
RGDHGGA

SEQ ID NO: 13229 - protein, 7 aa, synthetic construct
RGDHGKS

SEQ ID NO: 13230 - protein, 7 aa, synthetic construct
RGDHGRK

SEQ ID NO: 13231 - protein, 7 aa, synthetic construct
RGDHGSA

SEQ ID NO: 13232 - protein, 7 aa, synthetic construct
RGDHGSR

SEQ ID NO: 13233 - protein, 7 aa, synthetic construct
RGDHHTR

SEQ ID NO: 13234 - protein, 7 aa, synthetic construct
RGDHKEV

SEQ ID NO: 13235 - protein, 7 aa, synthetic construct
RGDHKHT

SEQ ID NO: 13236 - protein, 7 aa, synthetic construct
RGDHKQH

SEQ ID NO: 13237 - protein, 7 aa, synthetic construct
RGDHKSS

SEQ ID NO: 13238 - protein, 7 aa, synthetic construct
RGDHQET

SEQ ID NO: 13239 - protein, 7 aa, synthetic construct
RGDHQHR

SEQ ID NO: 13240 - protein, 7 aa, synthetic construct
RGDHRIF

SEQ ID NO: 13241 - protein, 7 aa, synthetic construct
RGDHRKH

SEQ ID NO: 13242 - protein, 7 aa, synthetic construct
RGDHSFA

SEQ ID NO: 13243 - protein, 7 aa, synthetic construct
RGDHSIL

SEQ ID NO: 13244 - protein, 7 aa, synthetic construct
RGDHSKS

SEQ ID NO: 13245 - protein, 7 aa, synthetic construct
RGDHTHE

SEQ ID NO: 13246 - protein, 7 aa, synthetic construct
RGDHTLK

SEQ ID NO: 13247 - protein, 7 aa, synthetic construct
RGDHVAK

SEQ ID NO: 13248 - protein, 7 aa, synthetic construct
RGDHVAL

SEQ ID NO: 13249 - protein, 7 aa, synthetic construct
RGDHVDD

SEQ ID NO: 13250 - protein, 7 aa, synthetic construct
RGDHVGG

SEQ ID NO: 13251 - protein, 7 aa, synthetic construct
RGDIAFR

SEQ ID NO: 13252 - protein, 7 aa, synthetic construct
RGDIEHF

SEQ ID NO: 13253 - protein, 7 aa, synthetic construct
RGDIFSI

SEQ ID NO: 13254 - protein, 7 aa, synthetic construct
RGDIGVQ

SEQ ID NO: 13255 - protein, 7 aa, synthetic construct
RGDIIFF

SEQ ID NO: 13256 - protein, 7 aa, synthetic construct
RGDIIQK

SEQ ID NO: 13257 - protein, 7 aa, synthetic construct
RGDANQI

SEQ ID NO: 13258 - protein, 7 aa, synthetic construct
RGDIKTH

SEQ ID NO: 13259 - protein, 7 aa, synthetic construct
RGDANSA

SEQ ID NO: 13260 - protein, 7 aa, synthetic construct
RGDILLH

SEQ ID NO: 13261 - protein, 7 aa, synthetic construct
RGDILQT

SEQ ID NO: 13262 - protein, 7 aa, synthetic construct
RGDANTF

SEQ ID NO: 13263 - protein, 7 aa, synthetic construct
RGDINFK

SEQ ID NO: 13264 - protein, 7 aa, synthetic construct
RGDIQQL

SEQ ID NO: 13265 - protein, 7 aa, synthetic construct
RGDIQRR

SEQ ID NO: 13266 - protein, 7 aa, synthetic construct
RGDIRDL

SEQ ID NO: 13267 - protein, 7 aa, synthetic construct
RGDIRFT

SEQ ID NO: 13268 - protein, 7 aa, synthetic construct
RGDIRRI

SEQ ID NO: 13269 - protein, 7 aa, synthetic construct
RGDITLV

SEQ ID NO: 13270 - protein, 7 aa, synthetic construct
RGDITTQ

SEQ ID NO: 13271 - protein, 7 aa, synthetic construct
RGDIVGK

SEQ ID NO: 13272 - protein, 7 aa, synthetic construct
RGDIVHD

SEQ ID NO: 13273 - protein, 7 aa, synthetic construct
RGDIVRT

SEQ ID NO: 13274 - protein, 7 aa, synthetic construct
RGDKDHK

SEQ ID NO: 13275 - protein, 7 aa, synthetic construct
RGDKENL

SEQ ID NO: 13276 - protein, 7 aa, synthetic construct
RGDKFEI

SEQ ID NO: 13277 - protein, 7 aa, synthetic construct
RGDKFGQ

SEQ ID NO: 13278 - protein, 7 aa, synthetic construct
RGDKFGS

SEQ ID NO: 13279 - protein, 7 aa, synthetic construct
RGDKFVH

SEQ ID NO: 13280 - protein, 7 aa, synthetic construct
RGDKGHA

SEQ ID NO: 13281 - protein, 7 aa, synthetic construct
RGDKHGQ

SEQ ID NO: 13282 - protein, 7 aa, synthetic construct
RGDARFK

SEQ ID NO: 13283 - protein, 7 aa, synthetic construct
RGDKLDQ

SEQ ID NO: 13284 - protein, 7 aa, synthetic construct
RGDKLGT

SEQ ID NO: 13285 - protein, 7 aa, synthetic construct
RGDKLRV

SEQ ID NO: 13286 - protein, 7 aa, synthetic construct
RGDKNGK

SEQ ID NO: 13287 - protein, 7 aa, synthetic construct
RGDKQLI

SEQ ID NO: 13288 - protein, 7 aa, synthetic construct
RGDKRGR

SEQ ID NO: 13289 - protein, 7 aa, synthetic construct
RGDKSSL

SEQ ID NO: 13290 - protein, 7 aa, synthetic construct
RGDKTNH

SEQ ID NO: 13291 - protein, 7 aa, synthetic construct
RGDKVRV

SEQ ID NO: 13292 - protein, 7 aa, synthetic construct
RGDKVSV

SEQ ID NO: 13293 - protein, 7 aa, synthetic construct
RGDLAGH

SEQ ID NO: 13294 - protein, 7 aa, synthetic construct
RGDLAVA

SEQ ID NO: 13295 - protein, 7 aa, synthetic construct
RGDLDLG

SEQ ID NO: 13296 - protein, 7 aa, synthetic construct
RGDLEFV

SEQ ID NO: 13297 - protein, 7 aa, synthetic construct
RGDLEQR

SEQ ID NO: 13298 - protein, 7 aa, synthetic construct
RGDLGER

SEQ ID NO: 13299 - protein, 7 aa, synthetic construct
RGDLIGF

SEQ ID NO: 13300 - protein, 7 aa, synthetic construct
RGDLKIS

SEQ ID NO: 13301 - protein, 7 aa, synthetic construct
RGDLKSR

SEQ ID NO: 13302 - protein, 7 aa, synthetic construct
RGDLLRE

SEQ ID NO: 13303 - protein, 7 aa, synthetic construct
RGDLNQI

SEQ ID NO: 13304 - protein, 7 aa, synthetic construct
RGDLQAV

SEQ ID NO: 13305 - protein, 7 aa, synthetic construct
RGDLQGF

SEQ ID NO: 13306 - protein, 7 aa, synthetic construct
RGDLQNV

SEQ ID NO: 13307 - protein, 7 aa, synthetic construct
RGDLRQA

SEQ ID NO: 13308 - protein, 7 aa, synthetic construct
RGDLTFK

SEQ ID NO: 13309 - protein, 7 aa, synthetic construct
RGDLTFS

SEQ ID NO: 13310 - protein, 7 aa, synthetic construct
RGDLTTN

SEQ ID NO: 13311 - protein, 7 aa, synthetic construct
RGDNAFL

SEQ ID NO: 13312 - protein, 7 aa, synthetic construct
RGDATNF

SEQ ID NO: 13313 - protein, 7 aa, synthetic construct
RGDNDSL

SEQ ID NO: 13314 - protein, 7 aa, synthetic construct
RGDNHHT

SEQ ID NO: 13315 - protein, 7 aa, synthetic construct
RGDNHNA

SEQ ID NO: 13316 - protein, 7 aa, synthetic construct
RGDNIKN

SEQ ID NO: 13317 - protein, 7 aa, synthetic construct
RGDNINN

SEQ ID NO: 13318 - protein, 7 aa, synthetic construct
RGDNKHS

SEQ ID NO: 13319 - protein, 7 aa, synthetic construct
RGDNQGQ

SEQ ID NO: 13320 - protein, 7 aa, synthetic construct
RGDNQSF

SEQ ID NO: 13321 - protein, 7 aa, synthetic construct
RGDNSLF

SEQ ID NO: 13322 - protein, 7 aa, synthetic construct
RGDNTDQ

SEQ ID NO: 13323 - protein, 7 aa, synthetic construct
RGDNTQE

SEQ ID NO: 13324 - protein, 7 aa, synthetic construct
RGDNTSA

SEQ ID NO: 13325 - protein, 7 aa, synthetic construct
RGDNTSQ

SEQ ID NO: 13326 - protein, 7 aa, synthetic construct
RGDNVDT

SEQ ID NO: 13327 - protein, 7 aa, synthetic construct
RGDAVVL

SEQ ID NO: 13328 - protein, 7 aa, synthetic construct
RGDQDHS

SEQ ID NO: 13329 - protein, 7 aa, synthetic construct
RGDQFGK

SEQ ID NO: 13330 - protein, 7 aa, synthetic construct
RGDQGAA

SEQ ID NO: 13331 - protein, 7 aa, synthetic construct
RGDQGVQ

SEQ ID NO: 13332 - protein, 7 aa, synthetic construct
RGDQIEK

SEQ ID NO: 13333 - protein, 7 aa, synthetic construct
RGDQIIL

SEQ ID NO: 13334 - protein, 7 aa, synthetic construct
RGDQITQ

SEQ ID NO: 13335 - protein, 7 aa, synthetic construct
RGDQLGQ

SEQ ID NO: 13336 - protein, 7 aa, synthetic construct
RGDQNGQ

SEQ ID NO: 13337 - protein, 7 aa, synthetic construct
RGDQNHL

SEQ ID NO: 13338 - protein, 7 aa, synthetic construct
RGDQNNT

SEQ ID NO: 13339 - protein, 7 aa, synthetic construct
RGDQNQR

SEQ ID NO: 13340 - protein, 7 aa, synthetic construct
RGDQNSH

SEQ ID NO: 13341 - protein, 7 aa, synthetic construct
RGDQNSN

SEQ ID NO: 13342 - protein, 7 aa, synthetic construct
RGDQNTH

SEQ ID NO: 13343 - protein, 7 aa, synthetic construct
RGDQQAK

SEQ ID NO: 13344 - protein, 7 aa, synthetic construct
RGDQQVT

SEQ ID NO: 13345 - protein, 7 aa, synthetic construct
RGDQRAA

SEQ ID NO: 13346 - protein, 7 aa, synthetic construct
RGDQRAH

SEQ ID NO: 13347 - protein, 7 aa, synthetic construct
RGDQTAH

SEQ ID NO: 13348 - protein, 7 aa, synthetic construct
RGDQTRE

SEQ ID NO: 13349 - protein, 7 aa, synthetic construct
RGDQTSA

SEQ ID NO: 13350 - protein, 7 aa, synthetic construct
RGDQVIV

SEQ ID NO: 13351 - protein, 7 aa, synthetic construct
RGDQVNS

SEQ ID NO: 13352 - protein, 7 aa, synthetic construct
RGDQVQA

SEQ ID NO: 13353 - protein, 7 aa, synthetic construct
RGDQVTN

SEQ ID NO: 13354 - protein, 7 aa, synthetic construct
RGDRDII

SEQ ID NO: 13355 - protein, 7 aa, synthetic construct
RGDRDIL

SEQ ID NO: 13356 - protein, 7 aa, synthetic construct
RGDRETN

SEQ ID NO: 13357 - protein, 7 aa, synthetic construct
RGDRFTF

SEQ ID NO: 13358 - protein, 7 aa, synthetic construct
RGDRHRN

SEQ ID NO: 13359 - protein, 7 aa, synthetic construct
RGDRIRQ

SEQ ID NO: 13360 - protein, 7 aa, synthetic construct
RGDRITG

SEQ ID NO: 13361 - protein, 7 aa, synthetic construct
RGDRKGK

SEQ ID NO: 13362 - protein, 7 aa, synthetic construct
RGDRLQN

SEQ ID NO: 13363 - protein, 7 aa, synthetic construct
RGDRLQT

SEQ ID NO: 13364 - protein, 7 aa, synthetic construct
RGDRNLG

SEQ ID NO: 13365 - protein, 7 aa, synthetic construct
RGDRNVA

SEQ ID NO: 13366 - protein, 7 aa, synthetic construct
RGDRSGH

SEQ ID NO: 13367 - protein, 7 aa, synthetic construct
RGDRTTG

SEQ ID NO: 13368 - protein, 7 aa, synthetic construct
RGDSAKN

SEQ ID NO: 13369 - protein, 7 aa, synthetic construct
RGDSANL

SEQ ID NO: 13370 - protein, 7 aa, synthetic construct
RGDSETK

SEQ ID NO: 13371 - protein, 7 aa, synthetic construct
RGDSGAI

SEQ ID NO: 13372 - protein, 7 aa, synthetic construct
RGDSGKH

SEQ ID NO: 13373 - protein, 7 aa, synthetic construct
RGDSGLG

SEQ ID NO: 13374 - protein, 7 aa, synthetic construct
RGDSKNF

SEQ ID NO: 13375 - protein, 7 aa, synthetic construct
RGDSKRN

SEQ ID NO: 13376 - protein, 7 aa, synthetic construct
RGDSLFN

SEQ ID NO: 13377 - protein, 7 aa, synthetic construct
RGDSLII

SEQ ID NO: 13378 - protein, 7 aa, synthetic construct
RGDSQHF

SEQ ID NO: 13379 - protein, 7 aa, synthetic construct
RGDSRIK

SEQ ID NO: 13380 - protein, 7 aa, synthetic construct
RGDSSGH

SEQ ID NO: 13381 - protein, 7 aa, synthetic construct
RGDTGVS

SEQ ID NO: 13382 - protein, 7 aa, synthetic construct
RGDTHKN

SEQ ID NO: 13383 - protein, 7 aa, synthetic construct
RGDTHRV

SEQ ID NO: 13384 - protein, 7 aa, synthetic construct
RGDTILK

SEQ ID NO: 13385 - protein, 7 aa, synthetic construct
RGDTKKF

SEQ ID NO: 13386 - protein, 7 aa, synthetic construct
RGDTKLL

SEQ ID NO: 13387 - protein, 7 aa, synthetic construct
RGDTLGK

SEQ ID NO: 13388 - protein, 7 aa, synthetic construct
RGDTNVT

SEQ ID NO: 13389 - protein, 7 aa, synthetic construct
RGDTQHG

SEQ ID NO: 13390 - protein, 7 aa, synthetic construct
RGDTQSF

SEQ ID NO: 13391 - protein, 7 aa, synthetic construct
RGDTRIF

SEQ ID NO: 13392 - protein, 7 aa, synthetic construct
RGDTRLE

SEQ ID NO: 13393 - protein, 7 aa, synthetic construct
RGDVASA

SEQ ID NO: 13394 - protein, 7 aa, synthetic construct
RGDVDNA

SEQ ID NO: 13395 - protein, 7 aa, synthetic construct
RGDVFLV

SEQ ID NO: 13396 - protein, 7 aa, synthetic construct
RGDVFRI

SEQ ID NO: 13397 - protein, 7 aa, synthetic construct
RGDVFSK

SEQ ID NO: 13398 - protein, 7 aa, synthetic construct
RGDVGGG

SEQ ID NO: 13399 - protein, 7 aa, synthetic construct
RGDVGST

SEQ ID NO: 13400 - protein, 7 aa, synthetic construct
RGDVHDK

SEQ ID NO: 13401 - protein, 7 aa, synthetic construct
RGDVHQN

SEQ ID NO: 13402 - protein, 7 aa, synthetic construct
RGDVKFG

SEQ ID NO: 13403 - protein, 7 aa, synthetic construct
RGDVKIN

SEQ ID NO: 13404 - protein, 7 aa, synthetic construct
RGDVLIE

SEQ ID NO: 13405 - protein, 7 aa, synthetic construct
RGDVLSH

SEQ ID NO: 13406 - protein, 7 aa, synthetic construct
RGDVNHK

SEQ ID NO: 13407 - protein, 7 aa, synthetic construct
RGDDKAK

SEQ ID NO: 13408 - protein, 7 aa, synthetic construct
RGDVQRN

SEQ ID NO: 13409 - protein, 7 aa, synthetic construct
RGDVRKA

SEQ ID NO: 13410 - protein, 7 aa, synthetic construct
RGDVRSD

SEQ ID NO: 13411 - protein, 7 aa, synthetic construct
RGDVSQL

SEQ ID NO: 13412 - protein, 7 aa, synthetic construct
RGDVTRN

SEQ ID NO: 13413 - protein, 7 aa, synthetic construct
RGDDKNV

SEQ ID NO: 13414 - protein, 7 aa, synthetic construct
RGDDKTV

SEQ ID NO: 13415 - protein, 7 aa, synthetic construct
RGDAEGR

SEQ ID NO: 13416 - protein, 7 aa, synthetic construct
RGDDRGR

SEQ ID NO: 13417 - protein, 7 aa, synthetic construct
RGDDRHR

SEQ ID NO: 13418 - protein, 7 aa, synthetic construct
RGDDRLI

SEQ ID NO: 13419 - protein, 7 aa, synthetic construct
RGDDSKN

SEQ ID NO: 13420 - protein, 7 aa, synthetic construct
RGDEASK

SEQ ID NO: 13421 - protein, 7 aa, synthetic construct
RGDEFQS

SEQ ID NO: 13422 - protein, 7 aa, synthetic construct
RGDEGFL

SEQ ID NO: 13423 - protein, 7 aa, synthetic construct
RGDEHKS

SEQ ID NO: 13424 - protein, 7 aa, synthetic construct
RGDEKFR

SEQ ID NO: 13425 - protein, 7 aa, synthetic construct
RGDEKNG

SEQ ID NO: 13426 - protein, 7 aa, synthetic construct
RGDELKN

SEQ ID NO: 13427 - protein, 7 aa, synthetic construct
RGDETNG

SEQ ID NO: 13428 - protein, 7 aa, synthetic construct
RGDFDFI

SEQ ID NO: 13429 - protein, 7 aa, synthetic construct
RGDFFFK

SEQ ID NO: 13430 - protein, 7 aa, synthetic construct
RGDFFNF

SEQ ID NO: 13431 - protein, 7 aa, synthetic construct
RGDFGFF

SEQ ID NO: 13432 - protein, 7 aa, synthetic construct
RGDFGIT

SEQ ID NO: 13433 - protein, 7 aa, synthetic construct
RGDFHDV

SEQ ID NO: 13434 - protein, 7 aa, synthetic construct
RGDFHVI

SEQ ID NO: 13435 - protein, 7 aa, synthetic construct
RGDFIET

SEQ ID NO: 13436 - protein, 7 aa, synthetic construct
RGDFKEQ

SEQ ID NO: 13437 - protein, 7 aa, synthetic construct
RGDAAKS

SEQ ID NO: 13438 - protein, 7 aa, synthetic construct
RGDFQAV

SEQ ID NO: 13439 - protein, 7 aa, synthetic construct
RGDFQGV

SEQ ID NO: 13440 - protein, 7 aa, synthetic construct
RGDFQLK

SEQ ID NO: 13441 - protein, 7 aa, synthetic construct
RGDFSFD

SEQ ID NO: 13442 - protein, 7 aa, synthetic construct
RGDFTGA

SEQ ID NO: 13443 - protein, 7 aa, synthetic construct
RGDFVGQ

SEQ ID NO: 13444 - protein, 7 aa, synthetic construct
RGDFVQI

SEQ ID NO: 13445 - protein, 7 aa, synthetic construct
RGDFVSE

SEQ ID NO: 13446 - protein, 7 aa, synthetic construct
RGDGEAL

SEQ ID NO: 13447 - protein, 7 aa, synthetic construct
RGDGFQV

SEQ ID NO: 13448 - protein, 7 aa, synthetic construct
RGDGGHE

SEQ ID NO: 13449 - protein, 7 aa, synthetic construct
RGDGGNE

SEQ ID NO: 13450 - protein, 7 aa, synthetic construct
RGDGHNR

SEQ ID NO: 13451 - protein, 7 aa, synthetic construct
RGDGKGR

SEQ ID NO: 13452 - protein, 7 aa, synthetic construct
RGDGKNF

SEQ ID NO: 13453 - protein, 7 aa, synthetic construct
RGDGKRD

SEQ ID NO: 13454 - protein, 7 aa, synthetic construct
RGDGQNR

SEQ ID NO: 13455 - protein, 7 aa, synthetic construct
RGDGRFK

SEQ ID NO: 13456 - protein, 7 aa, synthetic construct
RGDGTGK

SEQ ID NO: 13457 - protein, 7 aa, synthetic construct
RGDGTGN

SEQ ID NO: 13458 - protein, 7 aa, synthetic construct
RGDGTRD

SEQ ID NO: 13459 - protein, 7 aa, synthetic construct
RGDGVGF

SEQ ID NO: 13460 - protein, 7 aa, synthetic construct
RGDHAGG

SEQ ID NO: 13461 - protein, 7 aa, synthetic construct
RGDHAIV

SEQ ID NO: 13462 - protein, 7 aa, synthetic construct
RGDHDAT

SEQ ID NO: 13463 - protein, 7 aa, synthetic construct
RGDHFKA

SEQ ID NO: 13464 - protein, 7 aa, synthetic construct
RGDHFQL

SEQ ID NO: 13465 - protein, 7 aa, synthetic construct
RGDHFQR

SEQ ID NO: 13466 - protein, 7 aa, synthetic construct
RGDHHQT

SEQ ID NO: 13467 - protein, 7 aa, synthetic construct
RGDHHSV

SEQ ID NO: 13468 - protein, 7 aa, synthetic construct
RGDHHVI

SEQ ID NO: 13469 - protein, 7 aa, synthetic construct
RGDHIDS

SEQ ID NO: 13470 - protein, 7 aa, synthetic construct
RGDHIGF

SEQ ID NO: 13471 - protein, 7 aa, synthetic construct
RGDHKGR

SEQ ID NO: 13472 - protein, 7 aa, synthetic construct
RGDHKSL

SEQ ID NO: 13473 - protein, 7 aa, synthetic construct
RGDHLSQ

SEQ ID NO: 13474 - protein, 7 aa, synthetic construct
RGDHLVV

SEQ ID NO: 13475 - protein, 7 aa, synthetic construct
RGDHNRD

SEQ ID NO: 13476 - protein, 7 aa, synthetic construct
RGDHNRL

SEQ ID NO: 13477 - protein, 7 aa, synthetic construct
RGDHNTG

SEQ ID NO: 13478 - protein, 7 aa, synthetic construct
RGDHQGR

SEQ ID NO: 13479 - protein, 7 aa, synthetic construct
RGDAASS

SEQ ID NO: 13480 - protein, 7 aa, synthetic construct
RGDHRKL

SEQ ID NO: 13481 - protein, 7 aa, synthetic construct
RGDHRQG

SEQ ID NO: 13482 - protein, 7 aa, synthetic construct
RGDHSII

SEQ ID NO: 13483 - protein, 7 aa, synthetic construct
RGDHSRK

SEQ ID NO: 13484 - protein, 7 aa, synthetic construct
RGDHTGS

SEQ ID NO: 13485 - protein, 7 aa, synthetic construct
RGDHVRI

SEQ ID NO: 13486 - protein, 7 aa, synthetic construct
RGDHVRN

SEQ ID NO: 13487 - protein, 7 aa, synthetic construct
RGDHVTR

SEQ ID NO: 13488 - protein, 7 aa, synthetic construct
RGDIARK

SEQ ID NO: 13489 - protein, 7 aa, synthetic construct
RGDIASN

SEQ ID NO: 13490 - protein, 7 aa, synthetic construct
RGDIHGA

SEQ ID NO: 13491 - protein, 7 aa, synthetic construct
RGDIHKR

SEQ ID NO: 13492 - protein, 7 aa, synthetic construct
RGDIHNR

SEQ ID NO: 13493 - protein, 7 aa, synthetic construct
RGDIHRI

SEQ ID NO: 13494 - protein, 7 aa, synthetic construct
RGDIIAI

SEQ ID NO: 13495 - protein, 7 aa, synthetic construct
RGDIKHE

SEQ ID NO: 13496 - protein, 7 aa, synthetic construct
RGDIKIH

SEQ ID NO: 13497 - protein, 7 aa, synthetic construct
RGDIKKL

SEQ ID NO: 13498 - protein, 7 aa, synthetic construct
RGDILFK

SEQ ID NO: 13499 - protein, 7 aa, synthetic construct
RGDILKN

SEQ ID NO: 13500 - protein, 7 aa, synthetic construct
RGDILVE

SEQ ID NO: 13501 - protein, 7 aa, synthetic construct
RGDIQFN

SEQ ID NO: 13502 - protein, 7 aa, synthetic construct
RGDIQII

SEQ ID NO: 13503 - protein, 7 aa, synthetic construct
RGDIRGG

SEQ ID NO: 13504 - protein, 7 aa, synthetic construct
RGDIRTE

SEQ ID NO: 13505 - protein, 7 aa, synthetic construct
RGDISEN

SEQ ID NO: 13506 - protein, 7 aa, synthetic construct
RGDITIL

SEQ ID NO: 13507 - protein, 7 aa, synthetic construct
RGDITQF

SEQ ID NO: 13508 - protein, 7 aa, synthetic construct
RGDIVHR

SEQ ID NO: 13509 - protein, 7 aa, synthetic construct
RGDKADH

SEQ ID NO: 13510 - protein, 7 aa, synthetic construct
RGDKDTN

SEQ ID NO: 13511 - protein, 7 aa, synthetic construct
RGDKDTQ

SEQ ID NO: 13512 - protein, 7 aa, synthetic construct
RGDKEQI

SEQ ID NO: 13513 - protein, 7 aa, synthetic construct
RGDKFRV

SEQ ID NO: 13514 - protein, 7 aa, synthetic construct
RGDKGAI

SEQ ID NO: 13515 - protein, 7 aa, synthetic construct
RGDKGFN

SEQ ID NO: 13516 - protein, 7 aa, synthetic construct
RGDKGHK

SEQ ID NO: 13517 - protein, 7 aa, synthetic construct
RGDKGSN

SEQ ID NO: 13518 - protein, 7 aa, synthetic construct
RGDKHDS

SEQ ID NO: 13519 - protein, 7 aa, synthetic construct
RGDARDF

SEQ ID NO: 13520 - protein, 7 aa, synthetic construct
RGDKIIV

SEQ ID NO: 13521 - protein, 7 aa, synthetic construct
RGDKIKH

SEQ ID NO: 13522 - protein, 7 aa, synthetic construct
RGDKIST

SEQ ID NO: 13523 - protein, 7 aa, synthetic construct
RGDKLFH

SEQ ID NO: 13524 - protein, 7 aa, synthetic construct
RGDKLRK

SEQ ID NO: 13525 - protein, 7 aa, synthetic construct
RGDKNAQ

SEQ ID NO: 13526 - protein, 7 aa, synthetic construct
RGDKNFK

SEQ ID NO: 13527 - protein, 7 aa, synthetic construct
RGDKQHI

SEQ ID NO: 13528 - protein, 7 aa, synthetic construct
RGDKQIF

SEQ ID NO: 13529 - protein, 7 aa, synthetic construct
RGDKRVE

SEQ ID NO: 13530 - protein, 7 aa, synthetic construct
RGDKVKH

SEQ ID NO: 13531 - protein, 7 aa, synthetic construct
RGDLEFQ

SEQ ID NO: 13532 - protein, 7 aa, synthetic construct
RGDLEKA

SEQ ID NO: 13533 - protein, 7 aa, synthetic construct
RGDASGF

SEQ ID NO: 13534 - protein, 7 aa, synthetic construct
RGDLFFS

SEQ ID NO: 13535 - protein, 7 aa, synthetic construct
RGDLGIT

SEQ ID NO: 13536 - protein, 7 aa, synthetic construct
RGDLGLN

SEQ ID NO: 13537 - protein, 7 aa, synthetic construct
RGDLHAV

SEQ ID NO: 13538 - protein, 7 aa, synthetic construct
RGDLHKK

SEQ ID NO: 13539 - protein, 7 aa, synthetic construct
RGDLHQS

SEQ ID NO: 13540 - protein, 7 aa, synthetic construct
RGDASLV

SEQ ID NO: 13541 - protein, 7 aa, synthetic construct
RGDLIIN

SEQ ID NO: 13542 - protein, 7 aa, synthetic construct
RGDLKNA

SEQ ID NO: 13543 - protein, 7 aa, synthetic construct
RGDASTD

SEQ ID NO: 13544 - protein, 7 aa, synthetic construct
RGDLLSV

SEQ ID NO: 13545 - protein, 7 aa, synthetic construct
RGDLLVQ

SEQ ID NO: 13546 - protein, 7 aa, synthetic construct
RGDLNFF

SEQ ID NO: 13547 - protein, 7 aa, synthetic construct
RGDLNGH

SEQ ID NO: 13548 - protein, 7 aa, synthetic construct
RGDLNHR

SEQ ID NO: 13549 - protein, 7 aa, synthetic construct
RGDLQTE

SEQ ID NO: 13550 - protein, 7 aa, synthetic construct
RGDLSHQ

SEQ ID NO: 13551 - protein, 7 aa, synthetic construct
RGDLSQQ

SEQ ID NO: 13552 - protein, 7 aa, synthetic construct
RGDLTGG

SEQ ID NO: 13553 - protein, 7 aa, synthetic construct
RGDATGT

SEQ ID NO: 13554 - protein, 7 aa, synthetic construct
RGDLVSQ

SEQ ID NO: 13555 - protein, 7 aa, synthetic construct
RGDNAHR

SEQ ID NO: 13556 - protein, 7 aa, synthetic construct
RGDNAHT

SEQ ID NO: 13557 - protein, 7 aa, synthetic construct
RGDNATK

SEQ ID NO: 13558 - protein, 7 aa, synthetic construct
RGDNGFN

SEQ ID NO: 13559 - protein, 7 aa, synthetic construct
RGDNGSL

SEQ ID NO: 13560 - protein, 7 aa, synthetic construct
RGDNGVI

SEQ ID NO: 13561 - protein, 7 aa, synthetic construct
RGDNHRS

SEQ ID NO: 13562 - protein, 7 aa, synthetic construct
RGDNIHV

SEQ ID NO: 13563 - protein, 7 aa, synthetic construct
RGDNKNQ

SEQ ID NO: 13564 - protein, 7 aa, synthetic construct
RGDNLHV

SEQ ID NO: 13565 - protein, 7 aa, synthetic construct
RGDNNAS

SEQ ID NO: 13566 - protein, 7 aa, synthetic construct
RGDNRQG

SEQ ID NO: 13567 - protein, 7 aa, synthetic construct
RGDNRSS

SEQ ID NO: 13568 - protein, 7 aa, synthetic construct
RGDNVNL

SEQ ID NO: 13569 - protein, 7 aa, synthetic construct
RGDQAQH

SEQ ID NO: 13570 - protein, 7 aa, synthetic construct
RGDQDFQ

SEQ ID NO: 13571 - protein, 7 aa, synthetic construct
RGDQDRI

SEQ ID NO: 13572 - protein, 7 aa, synthetic construct
RGDQERR

SEQ ID NO: 13573 - protein, 7 aa, synthetic construct
RGDDAIE

SEQ ID NO: 13574 - protein, 7 aa, synthetic construct
RGDQGSV

SEQ ID NO: 13575 - protein, 7 aa, synthetic construct
RGDQHKR

SEQ ID NO: 13576 - protein, 7 aa, synthetic construct
RGDQHVL

SEQ ID NO: 13577 - protein, 7 aa, synthetic construct
RGDQIAL

SEQ ID NO: 13578 - protein, 7 aa, synthetic construct
RGDQKTD

SEQ ID NO: 13579 - protein, 7 aa, synthetic construct
RGDDASV

SEQ ID NO: 13580 - protein, 7 aa, synthetic construct
RGDQLTL

SEQ ID NO: 13581 - protein, 7 aa, synthetic construct
RGDQNAI

SEQ ID NO: 13582 - protein, 7 aa, synthetic construct
RGDQNQH

SEQ ID NO: 13583 - protein, 7 aa, synthetic construct
RGDQNVT

SEQ ID NO: 13584 - protein, 7 aa, synthetic construct
RGDQQVH

SEQ ID NO: 13585 - protein, 7 aa, synthetic construct
RGDQREH

SEQ ID NO: 13586 - protein, 7 aa, synthetic construct
RGDQRVQ

SEQ ID NO: 13587 - protein, 7 aa, synthetic construct
RGDQSHL

SEQ ID NO: 13588 - protein, 7 aa, synthetic construct
RGDQTAQ

SEQ ID NO: 13589 - protein, 7 aa, synthetic construct
RGDQVGK

SEQ ID NO: 13590 - protein, 7 aa, synthetic construct
RGDQVHG

SEQ ID NO: 13591 - protein, 7 aa, synthetic construct
RGDRDRV

SEQ ID NO: 13592 - protein, 7 aa, synthetic construct
RGDDDQH

SEQ ID NO: 13593 - protein, 7 aa, synthetic construct
RGDRGSD

SEQ ID NO: 13594 - protein, 7 aa, synthetic construct
RGDRHFH

SEQ ID NO: 13595 - protein, 7 aa, synthetic construct
RGDRIER

SEQ ID NO: 13596 - protein, 7 aa, synthetic construct
RGDRKVA

SEQ ID NO: 13597 - protein, 7 aa, synthetic construct
RGDRKVL

SEQ ID NO: 13598 - protein, 7 aa, synthetic construct
RGDRNEQ

SEQ ID NO: 13599 - protein, 7 aa, synthetic construct
RGDRNHQ

SEQ ID NO: 13600 - protein, 7 aa, synthetic construct
RGDRQKI

SEQ ID NO: 13601 - protein, 7 aa, synthetic construct
RGDRRIA

SEQ ID NO: 13602 - protein, 7 aa, synthetic construct
RGDRRIV

SEQ ID NO: 13603 - protein, 7 aa, synthetic construct
RGDRSQG

SEQ ID NO: 13604 - protein, 7 aa, synthetic construct
RGDRTKG

SEQ ID NO: 13605 - protein, 7 aa, synthetic construct
RGDRTRG

SEQ ID NO: 13606 - protein, 7 aa, synthetic construct
RGDRTRQ

SEQ ID NO: 13607 - protein, 7 aa, synthetic construct
RGDRVHR

SEQ ID NO: 13608 - protein, 7 aa, synthetic construct
RGDRVLE

SEQ ID NO: 13609 - protein, 7 aa, synthetic construct
RGDRVRQ

SEQ ID NO: 13610 - protein, 7 aa, synthetic construct
RGDSETN

SEQ ID NO: 13611 - protein, 7 aa, synthetic construct
RGDSGIV

SEQ ID NO: 13612 - protein, 7 aa, synthetic construct
RGDSGSV

SEQ ID NO: 13613 - protein, 7 aa, synthetic construct
RGDSHHN

SEQ ID NO: 13614 - protein, 7 aa, synthetic construct
RGDSISF

SEQ ID NO: 13615 - protein, 7 aa, synthetic construct
RGDSLVF

SEQ ID NO: 13616 - protein, 7 aa, synthetic construct
RGDSQRG

SEQ ID NO: 13617 - protein, 7 aa, synthetic construct
RGDSRHN

SEQ ID NO: 13618 - protein, 7 aa, synthetic construct
RGDSRRE

SEQ ID NO: 13619 - protein, 7 aa, synthetic construct
RGDSSQL

SEQ ID NO: 13620 - protein, 7 aa, synthetic construct
RGDSSRS

SEQ ID NO: 13621 - protein, 7 aa, synthetic construct
RGDSSST

SEQ ID NO: 13622 - protein, 7 aa, synthetic construct
RGDSVQT

SEQ ID NO: 13623 - protein, 7 aa, synthetic construct
RGDTHSV

SEQ ID NO: 13624 - protein, 7 aa, synthetic construct
RGDTKAS

SEQ ID NO: 13625 - protein, 7 aa, synthetic construct
RGDTLGR

SEQ ID NO: 13626 - protein, 7 aa, synthetic construct
RGDTLSS

SEQ ID NO: 13627 - protein, 7 aa, synthetic construct
RGDDHKD

SEQ ID NO: 13628 - protein, 7 aa, synthetic construct
RGDTRFH

SEQ ID NO: 13629 - protein, 7 aa, synthetic construct
RGDTRFR

SEQ ID NO: 13630 - protein, 7 aa, synthetic construct
RGDTRIR

SEQ ID NO: 13631 - protein, 7 aa, synthetic construct
RGDTSKL

SEQ ID NO: 13632 - protein, 7 aa, synthetic construct
RGDTSTI

SEQ ID NO: 13633 - protein, 7 aa, synthetic construct
RGDTSVL

SEQ ID NO: 13634 - protein, 7 aa, synthetic construct
RGDTVNI

SEQ ID NO: 13635 - protein, 7 aa, synthetic construct
RGDTVQV

SEQ ID NO: 13636 - protein, 7 aa, synthetic construct
RGDVANK

SEQ ID NO: 13637 - protein, 7 aa, synthetic construct
RGDVEHI

SEQ ID NO: 13638 - protein, 7 aa, synthetic construct
RGDVGER

SEQ ID NO: 13639 - protein, 7 aa, synthetic construct
RGDVGLN

SEQ ID NO: 13640 - protein, 7 aa, synthetic construct
RGDVHQK

SEQ ID NO: 13641 - protein, 7 aa, synthetic construct
RGDVIGA

SEQ ID NO: 13642 - protein, 7 aa, synthetic construct
RGDVKAL

SEQ ID NO: 13643 - protein, 7 aa, synthetic construct
RGDVLIT

SEQ ID NO: 13644 - protein, 7 aa, synthetic construct
RGDVLLR

SEQ ID NO: 13645 - protein, 7 aa, synthetic construct
RGDVLQV

SEQ ID NO: 13646 - protein, 7 aa, synthetic construct
RGDVLSF

SEQ ID NO: 13647 - protein, 7 aa, synthetic construct
RGDVNNT

SEQ ID NO: 13648 - protein, 7 aa, synthetic construct
RGDVNSI

SEQ ID NO: 13649 - protein, 7 aa, synthetic construct
RGDVNTL

SEQ ID NO: 13650 - protein, 7 aa, synthetic construct
RGDVQSS

SEQ ID NO: 13651 - protein, 7 aa, synthetic construct
RGDVRAH

SEQ ID NO: 13652 - protein, 7 aa, synthetic construct
RGDVRQN

SEQ ID NO: 13653 - protein, 7 aa, synthetic construct
RGDVSLL

SEQ ID NO: 13654 - protein, 7 aa, synthetic construct
RGDVSNK

SEQ ID NO: 13655 - protein, 7 aa, synthetic construct
RGDVVEN

SEQ ID NO: 13656 - protein, 7 aa, synthetic construct
RGDVVRV

SEQ ID NO: 13657 - protein, 7 aa, synthetic construct
RGDDKKN

SEQ ID NO: 13658 - protein, 7 aa, synthetic construct
RGDDNKT

SEQ ID NO: 13659 - protein, 7 aa, synthetic construct
RGDDVHR

SEQ ID NO: 13660 - protein, 7 aa, synthetic construct
RGDEELN

SEQ ID NO: 13661 - protein, 7 aa, synthetic construct
RGDAFKH

SEQ ID NO: 13662 - protein, 7 aa, synthetic construct
RGDEKRN

SEQ ID NO: 13663 - protein, 7 aa, synthetic construct
RGDELFI

SEQ ID NO: 13664 - protein, 7 aa, synthetic construct
RGDELHE

SEQ ID NO: 13665 - protein, 7 aa, synthetic construct
RGDELNR

SEQ ID NO: 13666 - protein, 7 aa, synthetic construct
RGDELVR

SEQ ID NO: 13667 - protein, 7 aa, synthetic construct
RGDESKQ

SEQ ID NO: 13668 - protein, 7 aa, synthetic construct
RGDESNN

SEQ ID NO: 13669 - protein, 7 aa, synthetic construct
RGDAGGT

SEQ ID NO: 13670 - protein, 7 aa, synthetic construct
RGDETQR

SEQ ID NO: 13671 - protein, 7 aa, synthetic construct
RGDEVFK

SEQ ID NO: 13672 - protein, 7 aa, synthetic construct
RGDFAFF

SEQ ID NO: 13673 - protein, 7 aa, synthetic construct
RGDFDKK

SEQ ID NO: 13674 - protein, 7 aa, synthetic construct
RGDFEEV

SEQ ID NO: 13675 - protein, 7 aa, synthetic construct
RGDFEKF

SEQ ID NO: 13676 - protein, 7 aa, synthetic construct
RGDFEST

SEQ ID NO: 13677 - protein, 7 aa, synthetic construct
RGDFEVR

SEQ ID NO: 13678 - protein, 7 aa, synthetic construct
RGDFFVT

SEQ ID NO: 13679 - protein, 7 aa, synthetic construct
RGDFGEK

SEQ ID NO: 13680 - protein, 7 aa, synthetic construct
RGDFGET

SEQ ID NO: 13681 - protein, 7 aa, synthetic construct
RGDFGIE

SEQ ID NO: 13682 - protein, 7 aa, synthetic construct
RGDFHFR

SEQ ID NO: 13683 - protein, 7 aa, synthetic construct
RGDFHLK

SEQ ID NO: 13684 - protein, 7 aa, synthetic construct
RGDFIVF

SEQ ID NO: 13685 - protein, 7 aa, synthetic construct
RGDFKDL

SEQ ID NO: 13686 - protein, 7 aa, synthetic construct
RGDFKLH

SEQ ID NO: 13687 - protein, 7 aa, synthetic construct
RGDFKLQ

SEQ ID NO: 13688 - protein, 7 aa, synthetic construct
RGDFQKE

SEQ ID NO: 13689 - protein, 7 aa, synthetic construct
RGDFRAQ

SEQ ID NO: 13690 - protein, 7 aa, synthetic construct
RGDFSEL

SEQ ID NO: 13691 - protein, 7 aa, synthetic construct
RGDAHQV

SEQ ID NO: 13692 - protein, 7 aa, synthetic construct
RGDFSRF

SEQ ID NO: 13693 - protein, 7 aa, synthetic construct
RGDFSSH

SEQ ID NO: 13694 - protein, 7 aa, synthetic construct
RGDFTQH

SEQ ID NO: 13695 - protein, 7 aa, synthetic construct
RGDGAQQ

SEQ ID NO: 13696 - protein, 7 aa, synthetic construct
RGDGDLT

SEQ ID NO: 13697 - protein, 7 aa, synthetic construct
RGDAIEL

SEQ ID NO: 13698 - protein, 7 aa, synthetic construct
RGDGFLL

SEQ ID NO: 13699 - protein, 7 aa, synthetic construct
RGDGHRF

SEQ ID NO: 13700 - protein, 7 aa, synthetic construct
RGDGHTI

SEQ ID NO: 13701 - protein, 7 aa, synthetic construct
RGDGHVI

SEQ ID NO: 13702 - protein, 7 aa, synthetic construct
RGDGIRH

SEQ ID NO: 13703 - protein, 7 aa, synthetic construct
RGDGKET

SEQ ID NO: 13704 - protein, 7 aa, synthetic construct
RGDGKGD

SEQ ID NO: 13705 - protein, 7 aa, synthetic construct
RGDGQSS

SEQ ID NO: 13706 - protein, 7 aa, synthetic construct
RGDGRGH

SEQ ID NO: 13707 - protein, 7 aa, synthetic construct
RGDGSFT

SEQ ID NO: 13708 - protein, 7 aa, synthetic construct
RGDGSIK

SEQ ID NO: 13709 - protein, 7 aa, synthetic construct
RGDGVFT

SEQ ID NO: 13710 - protein, 7 aa, synthetic construct
RGDHDTD

SEQ ID NO: 13711 - protein, 7 aa, synthetic construct
RGDHGLT

SEQ ID NO: 13712 - protein, 7 aa, synthetic construct
RGDHISF

SEQ ID NO: 13713 - protein, 7 aa, synthetic construct
RGDHKQF

SEQ ID NO: 13714 - protein, 7 aa, synthetic construct
RGDHLAQ

SEQ ID NO: 13715 - protein, 7 aa, synthetic construct
RGDHNSL

SEQ ID NO: 13716 - protein, 7 aa, synthetic construct
RGDHQDQ

SEQ ID NO: 13717 - protein, 7 aa, synthetic construct
RGDHQSK

SEQ ID NO: 13718 - protein, 7 aa, synthetic construct
RGDHRKT

SEQ ID NO: 13719 - protein, 7 aa, synthetic construct
RGDALNT

SEQ ID NO: 13720 - protein, 7 aa, synthetic construct
RGDHSDK

SEQ ID NO: 13721 - protein, 7 aa, synthetic construct
RGDHSIR

SEQ ID NO: 13722 - protein, 7 aa, synthetic construct
RGDHTTS

SEQ ID NO: 13723 - protein, 7 aa, synthetic construct
RGDHVAQ

SEQ ID NO: 13724 - protein, 7 aa, synthetic construct
RGDHVII

SEQ ID NO: 13725 - protein, 7 aa, synthetic construct
RGDHVKH

SEQ ID NO: 13726 - protein, 7 aa, synthetic construct
RGDHVQK

SEQ ID NO: 13727 - protein, 7 aa, synthetic construct
RGDIDKK

SEQ ID NO: 13728 - protein, 7 aa, synthetic construct
RGDANER

SEQ ID NO: 13729 - protein, 7 aa, synthetic construct
RGDIEFT

SEQ ID NO: 13730 - protein, 7 aa, synthetic construct
RGDIFVG

SEQ ID NO: 13731 - protein, 7 aa, synthetic construct
RGDIFVV

SEQ ID NO: 13732 - protein, 7 aa, synthetic construct
RGDIGGQ

SEQ ID NO: 13733 - protein, 7 aa, synthetic construct
RGDIILN

SEQ ID NO: 13734 - protein, 7 aa, synthetic construct
RGDIIVH

SEQ ID NO: 13735 - protein, 7 aa, synthetic construct
RGDIIVI

SEQ ID NO: 13736 - protein, 7 aa, synthetic construct
RGDILEI

SEQ ID NO: 13737 - protein, 7 aa, synthetic construct
RGDINQQ

SEQ ID NO: 13738 - protein, 7 aa, synthetic construct
RGDIREV

SEQ ID NO: 13739 - protein, 7 aa, synthetic construct
RGDISDR

SEQ ID NO: 13740 - protein, 7 aa, synthetic construct
RGDISDV

SEQ ID NO: 13741 - protein, 7 aa, synthetic construct
RGDKAKI

SEQ ID NO: 13742 - protein, 7 aa, synthetic construct
RGDKFTQ

SEQ ID NO: 13743 - protein, 7 aa, synthetic construct
RGDKGIK

SEQ ID NO: 13744 - protein, 7 aa, synthetic construct
RGDKGQQ

SEQ ID NO: 13745 - protein, 7 aa, synthetic construct
RGDKGTT

SEQ ID NO: 13746 - protein, 7 aa, synthetic construct
RGDKHVT

SEQ ID NO: 13747 - protein, 7 aa, synthetic construct
RGDKIEF

SEQ ID NO: 13748 - protein, 7 aa, synthetic construct
RGDKIHQ

SEQ ID NO: 13749 - protein, 7 aa, synthetic construct
RGDKLKN

SEQ ID NO: 13750 - protein, 7 aa, synthetic construct
RGDARIF

SEQ ID NO: 13751 - protein, 7 aa, synthetic construct
RGDKNQE

SEQ ID NO: 13752 - protein, 7 aa, synthetic construct
RGDKNST

SEQ ID NO: 13753 - protein, 7 aa, synthetic construct
RGDKNTN

SEQ ID NO: 13754 - protein, 7 aa, synthetic construct
RGDKQDV

SEQ ID NO: 13755 - protein, 7 aa, synthetic construct
RGDKRAF

SEQ ID NO: 13756 - protein, 7 aa, synthetic construct
RGDKSHQ

SEQ ID NO: 13757 - protein, 7 aa, synthetic construct
RGDKTTG

SEQ ID NO: 13758 - protein, 7 aa, synthetic construct
RGDKTVV

SEQ ID NO: 13759 - protein, 7 aa, synthetic construct
RGDKVVK

SEQ ID NO: 13760 - protein, 7 aa, synthetic construct
RGDLEGH

SEQ ID NO: 13761 - protein, 7 aa, synthetic construct
RGDLFRQ

SEQ ID NO: 13762 - protein, 7 aa, synthetic construct
RGDLGKN

SEQ ID NO: 13763 - protein, 7 aa, synthetic construct
RGDLGTA

SEQ ID NO: 13764 - protein, 7 aa, synthetic construct
RGDLHAR

SEQ ID NO: 13765 - protein, 7 aa, synthetic construct
RGDLIKF

SEQ ID NO: 13766 - protein, 7 aa, synthetic construct
RGDLKFA

SEQ ID NO: 13767 - protein, 7 aa, synthetic construct
RGDLKHF

SEQ ID NO: 13768 - protein, 7 aa, synthetic construct
RGDLKIV

SEQ ID NO: 13769 - protein, 7 aa, synthetic construct
RGDASRS

SEQ ID NO: 13770 - protein, 7 aa, synthetic construct
RGDLNHA

SEQ ID NO: 13771 - protein, 7 aa, synthetic construct
RGDLRFK

SEQ ID NO: 13772 - protein, 7 aa, synthetic construct
RGDLSGG

SEQ ID NO: 13773 - protein, 7 aa, synthetic construct
RGDLSVT

SEQ ID NO: 13774 - protein, 7 aa, synthetic construct
RGDLTGH

SEQ ID NO: 13775 - protein, 7 aa, synthetic construct
RGDNANN

SEQ ID NO: 13776 - protein, 7 aa, synthetic construct
RGDNDGH

SEQ ID NO: 13777 - protein, 7 aa, synthetic construct
RGDNESR

SEQ ID NO: 13778 - protein, 7 aa, synthetic construct
RGDNHIR

SEQ ID NO: 13779 - protein, 7 aa, synthetic construct
RGDNHNQ

SEQ ID NO: 13780 - protein, 7 aa, synthetic construct
RGDNKER

SEQ ID NO: 13781 - protein, 7 aa, synthetic construct
RGDNKSQ

SEQ ID NO: 13782 - protein, 7 aa, synthetic construct
RGDNLGV

SEQ ID NO: 13783 - protein, 7 aa, synthetic construct
RGDAVHR

SEQ ID NO: 13784 - protein, 7 aa, synthetic construct
RGDNQFR

SEQ ID NO: 13785 - protein, 7 aa, synthetic construct
RGDNQRA

SEQ ID NO: 13786 - protein, 7 aa, synthetic construct
RGDNQRR

SEQ ID NO: 13787 - protein, 7 aa, synthetic construct
RGDNRTK

SEQ ID NO: 13788 - protein, 7 aa, synthetic construct
RGDNRTL

SEQ ID NO: 13789 - protein, 7 aa, synthetic construct
RGDNSEL

SEQ ID NO: 13790 - protein, 7 aa, synthetic construct
RGDNVDI

SEQ ID NO: 13791 - protein, 7 aa, synthetic construct
RGDNVGL

SEQ ID NO: 13792 - protein, 7 aa, synthetic construct
RGDNVTR

SEQ ID NO: 13793 - protein, 7 aa, synthetic construct
RGDAAEF

SEQ ID NO: 13794 - protein, 7 aa, synthetic construct
RGDQDRG

SEQ ID NO: 13795 - protein, 7 aa, synthetic construct
RGDQFGF

SEQ ID NO: 13796 - protein, 7 aa, synthetic construct
RGDQGVI

SEQ ID NO: 13797 - protein, 7 aa, synthetic construct
RGDQHQE

SEQ ID NO: 13798 - protein, 7 aa, synthetic construct
RGDQHSF

SEQ ID NO: 13799 - protein, 7 aa, synthetic construct
RGDDAQT

SEQ ID NO: 13800 - protein, 7 aa, synthetic construct
RGDQKVS

SEQ ID NO: 13801 - protein, 7 aa, synthetic construct
RGDQQTR

SEQ ID NO: 13802 - protein, 7 aa, synthetic construct
RGDQSQK

SEQ ID NO: 13803 - protein, 7 aa, synthetic construct
RGDQTTN

SEQ ID NO: 13804 - protein, 7 aa, synthetic construct
RGDQVIK

SEQ ID NO: 13805 - protein, 7 aa, synthetic construct
RGDRDQD

SEQ ID NO: 13806 - protein, 7 aa, synthetic construct
RGDRDRN

SEQ ID NO: 13807 - protein, 7 aa, synthetic construct
RGDRFKL

SEQ ID NO: 13808 - protein, 7 aa, synthetic construct
RGDRFQH

SEQ ID NO: 13809 - protein, 7 aa, synthetic construct
RGDRGDK

SEQ ID NO: 13810 - protein, 7 aa, synthetic construct
RGDRHLT

SEQ ID NO: 13811 - protein, 7 aa, synthetic construct
RGDRIGE

SEQ ID NO: 13812 - protein, 7 aa, synthetic construct
RGDRKDG

SEQ ID NO: 13813 - protein, 7 aa, synthetic construct
RGDRLDS

SEQ ID NO: 13814 - protein, 7 aa, synthetic construct
RGDRLTQ

SEQ ID NO: 13815 - protein, 7 aa, synthetic construct
RGDRNSA

SEQ ID NO: 13816 - protein, 7 aa, synthetic construct
RGDRSRF

SEQ ID NO: 13817 - protein, 7 aa, synthetic construct
RGDRTQN

SEQ ID NO: 13818 - protein, 7 aa, synthetic construct
RGDRTTT

SEQ ID NO: 13819 - protein, 7 aa, synthetic construct
RGDSANK

SEQ ID NO: 13820 - protein, 7 aa, synthetic construct
RGDSATR

SEQ ID NO: 13821 - protein, 7 aa, synthetic construct
RGDSDIA

SEQ ID NO: 13822 - protein, 7 aa, synthetic construct
RGDSDKN

SEQ ID NO: 13823 - protein, 7 aa, synthetic construct
RGDSDNL

SEQ ID NO: 13824 - protein, 7 aa, synthetic construct
RGDSEEV

SEQ ID NO: 13825 - protein, 7 aa, synthetic construct
RGDSERN

SEQ ID NO: 13826 - protein, 7 aa, synthetic construct
RGDSHAI

SEQ ID NO: 13827 - protein, 7 aa, synthetic construct
RGDSHHK

SEQ ID NO: 13828 - protein, 7 aa, synthetic construct
RGDSIQD

SEQ ID NO: 13829 - protein, 7 aa, synthetic construct
RGDSITS

SEQ ID NO: 13830 - protein, 7 aa, synthetic construct
RGDSITT

SEQ ID NO: 13831 - protein, 7 aa, synthetic construct
RGDSKVK

SEQ ID NO: 13832 - protein, 7 aa, synthetic construct
RGDSLGT

SEQ ID NO: 13833 - protein, 7 aa, synthetic construct
RGDSLIV

SEQ ID NO: 13834 - protein, 7 aa, synthetic construct
RGDSLKA

SEQ ID NO: 13835 - protein, 7 aa, synthetic construct
RGDSLQS

SEQ ID NO: 13836 - protein, 7 aa, synthetic construct
RGDSLTS

SEQ ID NO: 13837 - protein, 7 aa, synthetic construct
RGDSQQQ

SEQ ID NO: 13838 - protein, 7 aa, synthetic construct
RGDSQTV

SEQ ID NO: 13839 - protein, 7 aa, synthetic construct
RGDSRAQ

SEQ ID NO: 13840 - protein, 7 aa, synthetic construct
RGDSRFF

SEQ ID NO: 13841 - protein, 7 aa, synthetic construct
RGDSRKE

SEQ ID NO: 13842 - protein, 7 aa, synthetic construct
RGDSTGK

SEQ ID NO: 13843 - protein, 7 aa, synthetic construct
RGDSTHL

SEQ ID NO: 13844 - protein, 7 aa, synthetic construct
RGDSTHQ

SEQ ID NO: 13845 - protein, 7 aa, synthetic construct
RGDSVKN

SEQ ID NO: 13846 - protein, 7 aa, synthetic construct
RGDTAIH

SEQ ID NO: 13847 - protein, 7 aa, synthetic construct
RGDTATI

SEQ ID NO: 13848 - protein, 7 aa, synthetic construct
RGDTEVQ

SEQ ID NO: 13849 - protein, 7 aa, synthetic construct
RGDADVR

SEQ ID NO: 13850 - protein, 7 aa, synthetic construct
RGDTFRI

SEQ ID NO: 13851 - protein, 7 aa, synthetic construct
RGDTFRV

SEQ ID NO: 13852 - protein, 7 aa, synthetic construct
RGDTGQV

SEQ ID NO: 13853 - protein, 7 aa, synthetic construct
RGDTGTI

SEQ ID NO: 13854 - protein, 7 aa, synthetic construct
RGDDHAR

SEQ ID NO: 13855 - protein, 7 aa, synthetic construct
RGDTIGR

SEQ ID NO: 13856 - protein, 7 aa, synthetic construct
RGDTINK

SEQ ID NO: 13857 - protein, 7 aa, synthetic construct
RGDTKFE

SEQ ID NO: 13858 - protein, 7 aa, synthetic construct
RGDTNVF

SEQ ID NO: 13859 - protein, 7 aa, synthetic construct
RGDTSSS

SEQ ID NO: 13860 - protein, 7 aa, synthetic construct
RGDTTNL

SEQ ID NO: 13861 - protein, 7 aa, synthetic construct
RGDTTQR

SEQ ID NO: 13862 - protein, 7 aa, synthetic construct
RGDVAIG

SEQ ID NO: 13863 - protein, 7 aa, synthetic construct
RGDVARF

SEQ ID NO: 13864 - protein, 7 aa, synthetic construct
RGDVARS

SEQ ID NO: 13865 - protein, 7 aa, synthetic construct
RGDVEER

SEQ ID NO: 13866 - protein, 7 aa, synthetic construct
RGDVEKR

SEQ ID NO: 13867 - protein, 7 aa, synthetic construct
RGDVGTK

SEQ ID NO: 13868 - protein, 7 aa, synthetic construct
RGDVIHR

SEQ ID NO: 13869 - protein, 7 aa, synthetic construct
RGDVISV

SEQ ID NO: 13870 - protein, 7 aa, synthetic construct
RGDDIRL

SEQ ID NO: 13871 - protein, 7 aa, synthetic construct
RGDVKSK

SEQ ID NO: 13872 - protein, 7 aa, synthetic construct
RGDVLLV

SEQ ID NO: 13873 - protein, 7 aa, synthetic construct
RGDVLNF

SEQ ID NO: 13874 - protein, 7 aa, synthetic construct
RGDVNLF

SEQ ID NO: 13875 - protein, 7 aa, synthetic construct
RGDVNQR

SEQ ID NO: 13876 - protein, 7 aa, synthetic construct
RGDVQEI

SEQ ID NO: 13877 - protein, 7 aa, synthetic construct
RGDVQEV

SEQ ID NO: 13878 - protein, 7 aa, synthetic construct
RGDVVRH

SEQ ID NO: 13879 - protein, 7 aa, synthetic construct
RGDDSQH

SEQ ID NO: 13880 - protein, 7 aa, synthetic construct
RGDDSRN

SEQ ID NO: 13881 - protein, 7 aa, synthetic construct
RGDDSVR

SEQ ID NO: 13882 - protein, 7 aa, synthetic construct
RGDEFAK

SEQ ID NO: 13883 - protein, 7 aa, synthetic construct
RGDEGGA

SEQ ID NO: 13884 - protein, 7 aa, synthetic construct
RGDEGVL

SEQ ID NO: 13885 - protein, 7 aa, synthetic construct
RGDELHV

SEQ ID NO: 13886 - protein, 7 aa, synthetic construct
RGDESIR

SEQ ID NO: 13887 - protein, 7 aa, synthetic construct
RGDFAGT

SEQ ID NO: 13888 - protein, 7 aa, synthetic construct
RGDFAKD

SEQ ID NO: 13889 - protein, 7 aa, synthetic construct
RGDFAVN

SEQ ID NO: 13890 - protein, 7 aa, synthetic construct
RGDFAVR

SEQ ID NO: 13891 - protein, 7 aa, synthetic construct
RGDFESF

SEQ ID NO: 13892 - protein, 7 aa, synthetic construct
RGDFFTE

SEQ ID NO: 13893 - protein, 7 aa, synthetic construct
RGDAGTK

SEQ ID NO: 13894 - protein, 7 aa, synthetic construct
RGDFGIV

SEQ ID NO: 13895 - protein, 7 aa, synthetic construct
RGDFGVD

SEQ ID NO: 13896 - protein, 7 aa, synthetic construct
RGDFGVH

SEQ ID NO: 13897 - protein, 7 aa, synthetic construct
RGDFHIQ

SEQ ID NO: 13898 - protein, 7 aa, synthetic construct
RGDFIDI

SEQ ID NO: 13899 - protein, 7 aa, synthetic construct
RGDFISV

SEQ ID NO: 13900 - protein, 7 aa, synthetic construct
RGDFKET

SEQ ID NO: 13901 - protein, 7 aa, synthetic construct
RGDFKGL

SEQ ID NO: 13902 - protein, 7 aa, synthetic construct
RGDFKIQ

SEQ ID NO: 13903 - protein, 7 aa, synthetic construct
RGDFLNE

SEQ ID NO: 13904 - protein, 7 aa, synthetic construct
RGDFNQR

SEQ ID NO: 13905 - protein, 7 aa, synthetic construct
RGDFNRT

SEQ ID NO: 13906 - protein, 7 aa, synthetic construct
RGDFRHG

SEQ ID NO: 13907 - protein, 7 aa, synthetic construct
RGDFSEA

SEQ ID NO: 13908 - protein, 7 aa, synthetic construct
RGDAHQQ

SEQ ID NO: 13909 - protein, 7 aa, synthetic construct
RGDFSQL

SEQ ID NO: 13910 - protein, 7 aa, synthetic construct
RGDFTVK

SEQ ID NO: 13911 - protein, 7 aa, synthetic construct
RGDFVAS

SEQ ID NO: 13912 - protein, 7 aa, synthetic construct
RGDFVEV

SEQ ID NO: 13913 - protein, 7 aa, synthetic construct
RGDAHTS

SEQ ID NO: 13914 - protein, 7 aa, synthetic construct
RGDFVIH

SEQ ID NO: 13915 - protein, 7 aa, synthetic construct
RGDGERL

SEQ ID NO: 13916 - protein, 7 aa, synthetic construct
RGDGGKE

SEQ ID NO: 13917 - protein, 7 aa, synthetic construct
RGDGGSF

SEQ ID NO: 13918 - protein, 7 aa, synthetic construct
RGDGIAT

SEQ ID NO: 13919 - protein, 7 aa, synthetic construct
RGDGINK

SEQ ID NO: 13920 - protein, 7 aa, synthetic construct
RGDGKRS

SEQ ID NO: 13921 - protein, 7 aa, synthetic construct
RGDGNHA

SEQ ID NO: 13922 - protein, 7 aa, synthetic construct
RGDGNHG

SEQ ID NO: 13923 - protein, 7 aa, synthetic construct
RGDGNNS

SEQ ID NO: 13924 - protein, 7 aa, synthetic construct
RGDAAQI

SEQ ID NO: 13925 - protein, 7 aa, synthetic construct
RGDGQRA

SEQ ID NO: 13926 - protein, 7 aa, synthetic construct
RGDGSDH

SEQ ID NO: 13927 - protein, 7 aa, synthetic construct
RGDGTGI

SEQ ID NO: 13928 - protein, 7 aa, synthetic construct
RGDGVGR

SEQ ID NO: 13929 - protein, 7 aa, synthetic construct
RGDHDGF

SEQ ID NO: 13930 - protein, 7 aa, synthetic construct
RGDHEHN

SEQ ID NO: 13931 - protein, 7 aa, synthetic construct
RGDHFGV

SEQ ID NO: 13932 - protein, 7 aa, synthetic construct
RGDHFHQ

SEQ ID NO: 13933 - protein, 7 aa, synthetic construct
RGDHGLQ

SEQ ID NO: 13934 - protein, 7 aa, synthetic construct
RGDHHSL

SEQ ID NO: 13935 - protein, 7 aa, synthetic construct
RGDHKQA

SEQ ID NO: 13936 - protein, 7 aa, synthetic construct
RGDHKRK

SEQ ID NO: 13937 - protein, 7 aa, synthetic construct
RGDHLHI

SEQ ID NO: 13938 - protein, 7 aa, synthetic construct
RGDHNKS

SEQ ID NO: 13939 - protein, 7 aa, synthetic construct
RGDHNNN

SEQ ID NO: 13940 - protein, 7 aa, synthetic construct
RGDHNSH

SEQ ID NO: 13941 - protein, 7 aa, synthetic construct
RGDALQE

SEQ ID NO: 13942 - protein, 7 aa, synthetic construct
RGDHSEQ

SEQ ID NO: 13943 - protein, 7 aa, synthetic construct
RGDHSRD

SEQ ID NO: 13944 - protein, 7 aa, synthetic construct
RGDHSSH

SEQ ID NO: 13945 - protein, 7 aa, synthetic construct
RGDHSTK

SEQ ID NO: 13946 - protein, 7 aa, synthetic construct
RGDHSVR

SEQ ID NO: 13947 - protein, 7 aa, synthetic construct
RGDHVSQ

SEQ ID NO: 13948 - protein, 7 aa, synthetic construct
RGDIDHK

SEQ ID NO: 13949 - protein, 7 aa, synthetic construct
RGDIDLG

SEQ ID NO: 13950 - protein, 7 aa, synthetic construct
RGDIEHH

SEQ ID NO: 13951 - protein, 7 aa, synthetic construct
RGDIEVR

SEQ ID NO: 13952 - protein, 7 aa, synthetic construct
RGDIIIH

SEQ ID NO: 13953 - protein, 7 aa, synthetic construct
RGDIIII

SEQ ID NO: 13954 - protein, 7 aa, synthetic construct
RGDILNH

SEQ ID NO: 13955 - protein, 7 aa, synthetic construct
RGDANTL

SEQ ID NO: 13956 - protein, 7 aa, synthetic construct
RGDIQSR

SEQ ID NO: 13957 - protein, 7 aa, synthetic construct
RGDIREF

SEQ ID NO: 13958 - protein, 7 aa, synthetic construct
RGDIRIS

SEQ ID NO: 13959 - protein, 7 aa, synthetic construct
RGDIRQG

SEQ ID NO: 13960 - protein, 7 aa, synthetic construct
RGDISNN

SEQ ID NO: 13961 - protein, 7 aa, synthetic construct
RGDISVA

SEQ ID NO: 13962 - protein, 7 aa, synthetic construct
RGDAQGL

SEQ ID NO: 13963 - protein, 7 aa, synthetic construct
RGDITNQ

SEQ ID NO: 13964 - protein, 7 aa, synthetic construct
RGDITNR

SEQ ID NO: 13965 - protein, 7 aa, synthetic construct
RGDIVVH

SEQ ID NO: 13966 - protein, 7 aa, synthetic construct
RGDKASL

SEQ ID NO: 13967 - protein, 7 aa, synthetic construct
RGDKDDT

SEQ ID NO: 13968 - protein, 7 aa, synthetic construct
RGDKEST

SEQ ID NO: 13969 - protein, 7 aa, synthetic construct
RGDKFNF

SEQ ID NO: 13970 - protein, 7 aa, synthetic construct
RGDKGVF

SEQ ID NO: 13971 - protein, 7 aa, synthetic construct
RGDKHVQ

SEQ ID NO: 13972 - protein, 7 aa, synthetic construct
RGDKITT

SEQ ID NO: 13973 - protein, 7 aa, synthetic construct
RGDKKFD

SEQ ID NO: 13974 - protein, 7 aa, synthetic construct
RGDKKFH

SEQ ID NO: 13975 - protein, 7 aa, synthetic construct
RGDKKQH

SEQ ID NO: 13976 - protein, 7 aa, synthetic construct
RGDKLII

SEQ ID NO: 13977 - protein, 7 aa, synthetic construct
RGDKNRG

SEQ ID NO: 13978 - protein, 7 aa, synthetic construct
RGDKREE

SEQ ID NO: 13979 - protein, 7 aa, synthetic construct
RGDKRGN

SEQ ID NO: 13980 - protein, 7 aa, synthetic construct
RGDKRSG

SEQ ID NO: 13981 - protein, 7 aa, synthetic construct
RGDKSER

SEQ ID NO: 13982 - protein, 7 aa, synthetic construct
RGDKSNG

SEQ ID NO: 13983 - protein, 7 aa, synthetic construct
RGDKSQF

SEQ ID NO: 13984 - protein, 7 aa, synthetic construct
RGDKTFK

SEQ ID NO: 13985 - protein, 7 aa, synthetic construct
RGDKTGT

SEQ ID NO: 13986 - protein, 7 aa, synthetic construct
RGDKVDQ

SEQ ID NO: 13987 - protein, 7 aa, synthetic construct
RGDKVFN

SEQ ID NO: 13988 - protein, 7 aa, synthetic construct
RGDAADR

SEQ ID NO: 13989 - protein, 7 aa, synthetic construct
RGDLENR

SEQ ID NO: 13990 - protein, 7 aa, synthetic construct
RGDLGAI

SEQ ID NO: 13991 - protein, 7 aa, synthetic construct
RGDLHIV

SEQ ID NO: 13992 - protein, 7 aa, synthetic construct
RGDLIIR

SEQ ID NO: 13993 - protein, 7 aa, synthetic construct
RGDLIRR

SEQ ID NO: 13994 - protein, 7 aa, synthetic construct
RGDLITR

SEQ ID NO: 13995 - protein, 7 aa, synthetic construct
RGDLKKE

SEQ ID NO: 13996 - protein, 7 aa, synthetic construct
RGDLKTK

SEQ ID NO: 13997 - protein, 7 aa, synthetic construct
RGDLLKH

SEQ ID NO: 13998 - protein, 7 aa, synthetic construct
RGDLNRD

SEQ ID NO: 13999 - protein, 7 aa, synthetic construct
RGDLQKV

SEQ ID NO: 14000 - protein, 7 aa, synthetic construct
RGDLTGV

SEQ ID NO: 14001 - protein, 7 aa, synthetic construct
RGDLVVI

SEQ ID NO: 14002 - protein, 7 aa, synthetic construct
RGDNDGR

SEQ ID NO: 14003 - protein, 7 aa, synthetic construct
RGDNHKN

SEQ ID NO: 14004 - protein, 7 aa, synthetic construct
RGDNHRI

SEQ ID NO: 14005 - protein, 7 aa, synthetic construct
RGDNLHE

SEQ ID NO: 14006 - protein, 7 aa, synthetic construct
RGDNNRG

SEQ ID NO: 14007 - protein, 7 aa, synthetic construct
RGDNQHG

SEQ ID NO: 14008 - protein, 7 aa, synthetic construct
RGDNRAV

SEQ ID NO: 14009 - protein, 7 aa, synthetic construct
RGDNRRS

SEQ ID NO: 14010 - protein, 7 aa, synthetic construct
RGDNRVL

SEQ ID NO: 14011 - protein, 7 aa, synthetic construct
RGDNSGG

SEQ ID NO: 14012 - protein, 7 aa, synthetic construct
RGDNSGV

SEQ ID NO: 14013 - protein, 7 aa, synthetic construct
RGDNTNK

SEQ ID NO: 14014 - protein, 7 aa, synthetic construct
RGDNVKT

SEQ ID NO: 14015 - protein, 7 aa, synthetic construct
RGDQDKL

SEQ ID NO: 14016 - protein, 7 aa, synthetic construct
RGDQERH

SEQ ID NO: 14017 - protein, 7 aa, synthetic construct
RGDQFFK

SEQ ID NO: 14018 - protein, 7 aa, synthetic construct
RGDQGQT

SEQ ID NO: 14019 - protein, 7 aa, synthetic construct
RGDQHKS

SEQ ID NO: 14020 - protein, 7 aa, synthetic construct
RGDQISK

SEQ ID NO: 14021 - protein, 7 aa, synthetic construct
RGDQIVL

SEQ ID NO: 14022 - protein, 7 aa, synthetic construct
RGDQKET

SEQ ID NO: 14023 - protein, 7 aa, synthetic construct
RGDQLQK

SEQ ID NO: 14024 - protein, 7 aa, synthetic construct
RGDQLSN

SEQ ID NO: 14025 - protein, 7 aa, synthetic construct
RGDQLVL

SEQ ID NO: 14026 - protein, 7 aa, synthetic construct
RGDQNQN

SEQ ID NO: 14027 - protein, 7 aa, synthetic construct
RGDQQDR

SEQ ID NO: 14028 - protein, 7 aa, synthetic construct
RGDQQFL

SEQ ID NO: 14029 - protein, 7 aa, synthetic construct
RGDQQNK

SEQ ID NO: 14030 - protein, 7 aa, synthetic construct
RGDQRDH

SEQ ID NO: 14031 - protein, 7 aa, synthetic construct
RGDQRVH

SEQ ID NO: 14032 - protein, 7 aa, synthetic construct
RGDQSRE

SEQ ID NO: 14033 - protein, 7 aa, synthetic construct
RGDQTEN

SEQ ID NO: 14034 - protein, 7 aa, synthetic construct
RGDQTQR

SEQ ID NO: 14035 - protein, 7 aa, synthetic construct
RGDQTRF

SEQ ID NO: 14036 - protein, 7 aa, synthetic construct
RGDQVGL

SEQ ID NO: 14037 - protein, 7 aa, synthetic construct
RGDQVII

SEQ ID NO: 14038 - protein, 7 aa, synthetic construct
RGDRAHG

SEQ ID NO: 14039 - protein, 7 aa, synthetic construct
RGDRDAA

SEQ ID NO: 14040 - protein, 7 aa, synthetic construct
RGDRDKA

SEQ ID NO: 14041 - protein, 7 aa, synthetic construct
RGDDDQA

SEQ ID NO: 14042 - protein, 7 aa, synthetic construct
RGDRDSV

SEQ ID NO: 14043 - protein, 7 aa, synthetic construct
RGDREES

SEQ ID NO: 14044 - protein, 7 aa, synthetic construct
RGDRESS

SEQ ID NO: 14045 - protein, 7 aa, synthetic construct
RGDRFHN

SEQ ID NO: 14046 - protein, 7 aa, synthetic construct
RGDRFHQ

SEQ ID NO: 14047 - protein, 7 aa, synthetic construct
RGDRHFR

SEQ ID NO: 14048 - protein, 7 aa, synthetic construct
RGDRIEH

SEQ ID NO: 14049 - protein, 7 aa, synthetic construct
RGDRIKQ

SEQ ID NO: 14050 - protein, 7 aa, synthetic construct
RGDRIVR

SEQ ID NO: 14051 - protein, 7 aa, synthetic construct
RGDRLES

SEQ ID NO: 14052 - protein, 7 aa, synthetic construct
RGDRNGL

SEQ ID NO: 14053 - protein, 7 aa, synthetic construct
RGDRQRT

SEQ ID NO: 14054 - protein, 7 aa, synthetic construct
RGDRSHD

SEQ ID NO: 14055 - protein, 7 aa, synthetic construct
RGDRTGT

SEQ ID NO: 14056 - protein, 7 aa, synthetic construct
RGDRVNG

SEQ ID NO: 14057 - protein, 7 aa, synthetic construct
RGDSAHR

SEQ ID NO: 14058 - protein, 7 aa, synthetic construct
RGDSAKV

SEQ ID NO: 14059 - protein, 7 aa, synthetic construct
RGDSDRG

SEQ ID NO: 14060 - protein, 7 aa, synthetic construct
RGDSESN

SEQ ID NO: 14061 - protein, 7 aa, synthetic construct
RGDSFRS

SEQ ID NO: 14062 - protein, 7 aa, synthetic construct
RGDSHHV

SEQ ID NO: 14063 - protein, 7 aa, synthetic construct
RGDSRHE

SEQ ID NO: 14064 - protein, 7 aa, synthetic construct
RGDSSQF

SEQ ID NO: 14065 - protein, 7 aa, synthetic construct
RGDSTSH

SEQ ID NO: 14066 - protein, 7 aa, synthetic construct
RGDTALQ

SEQ ID NO: 14067 - protein, 7 aa, synthetic construct
RGDTGHK

SEQ ID NO: 14068 - protein, 7 aa, synthetic construct
RGDTHAN

SEQ ID NO: 14069 - protein, 7 aa, synthetic construct
RGDTHFK

SEQ ID NO: 14070 - protein, 7 aa, synthetic construct
RGDTKEV

SEQ ID NO: 14071 - protein, 7 aa, synthetic construct
RGDTKHV

SEQ ID NO: 14072 - protein, 7 aa, synthetic construct
RGDTLFT

SEQ ID NO: 14073 - protein, 7 aa, synthetic construct
RGDTSRL

SEQ ID NO: 14074 - protein, 7 aa, synthetic construct
RGDTVRK

SEQ ID NO: 14075 - protein, 7 aa, synthetic construct
RGDVAGV

SEQ ID NO: 14076 - protein, 7 aa, synthetic construct
RGDVARV

SEQ ID NO: 14077 - protein, 7 aa, synthetic construct
RGDVDFK

SEQ ID NO: 14078 - protein, 7 aa, synthetic construct
RGDVDIN

SEQ ID NO: 14079 - protein, 7 aa, synthetic construct
RGDVDLT

SEQ ID NO: 14080 - protein, 7 aa, synthetic construct
RGDVDSR

SEQ ID NO: 14081 - protein, 7 aa, synthetic construct
RGDVGGT

SEQ ID NO: 14082 - protein, 7 aa, synthetic construct
RGDVHIV

SEQ ID NO: 14083 - protein, 7 aa, synthetic construct
RGDVHNT

SEQ ID NO: 14084 - protein, 7 aa, synthetic construct
RGDVIFR

SEQ ID NO: 14085 - protein, 7 aa, synthetic construct
RGDVKQE

SEQ ID NO: 14086 - protein, 7 aa, synthetic construct
RGDVLAT

SEQ ID NO: 14087 - protein, 7 aa, synthetic construct
RGDVLQQ

SEQ ID NO: 14088 - protein, 7 aa, synthetic construct
RGDVNTK

SEQ ID NO: 14089 - protein, 7 aa, synthetic construct
RGDVQEQ

SEQ ID NO: 14090 - protein, 7 aa, synthetic construct
RGDVRLE

SEQ ID NO: 14091 - protein, 7 aa, synthetic construct
RGDVSQF

SEQ ID NO: 14092 - protein, 7 aa, synthetic construct
RGDVSTN

SEQ ID NO: 14093 - protein, 7 aa, synthetic construct
RGDVTHG

SEQ ID NO: 14094 - protein, 7 aa, synthetic construct
RGDVTIV

SEQ ID NO: 14095 - protein, 7 aa, synthetic construct
RGDVTKQ

SEQ ID NO: 14096 - protein, 7 aa, synthetic construct
RGDVVIH

SEQ ID NO: 14097 - protein, 7 aa, synthetic construct
RGDDKTF

SEQ ID NO: 14098 - protein, 7 aa, synthetic construct
RGDDNDN

SEQ ID NO: 14099 - protein, 7 aa, synthetic construct
RGDDRRI

SEQ ID NO: 14100 - protein, 7 aa, synthetic construct
RGDDSKF

SEQ ID NO: 14101 - protein, 7 aa, synthetic construct
RGDDSRF

SEQ ID NO: 14102 - protein, 7 aa, synthetic construct
RGDDSTR

SEQ ID NO: 14103 - protein, 7 aa, synthetic construct
RGDDTKQ

SEQ ID NO: 14104 - protein, 7 aa, synthetic construct
RGDDVFK

SEQ ID NO: 14105 - protein, 7 aa, synthetic construct
RGDEASR

SEQ ID NO: 14106 - protein, 7 aa, synthetic construct
RGDEAVH

SEQ ID NO: 14107 - protein, 7 aa, synthetic construct
RGDEGHH

SEQ ID NO: 14108 - protein, 7 aa, synthetic construct
RGDEHQQ

SEQ ID NO: 14109 - protein, 7 aa, synthetic construct
RGDEKLK

SEQ ID NO: 14110 - protein, 7 aa, synthetic construct
RGDELSL

SEQ ID NO: 14111 - protein, 7 aa, synthetic construct
RGDEQFE

SEQ ID NO: 14112 - protein, 7 aa, synthetic construct
RGDEQHF

SEQ ID NO: 14113 - protein, 7 aa, synthetic construct
RGDERRV

SEQ ID NO: 14114 - protein, 7 aa, synthetic construct
RGDERTI

SEQ ID NO: 14115 - protein, 7 aa, synthetic construct
RGDESAI

SEQ ID NO: 14116 - protein, 7 aa, synthetic construct
RGDESNK

SEQ ID NO: 14117 - protein, 7 aa, synthetic construct
RGDETLR

SEQ ID NO: 14118 - protein, 7 aa, synthetic construct
RGDETSA

SEQ ID NO: 14119 - protein, 7 aa, synthetic construct
RGDEVVQ

SEQ ID NO: 14120 - protein, 7 aa, synthetic construct
RGDFAEQ

SEQ ID NO: 14121 - protein, 7 aa, synthetic construct
RGDFEKT

SEQ ID NO: 14122 - protein, 7 aa, synthetic construct
RGDFELS

SEQ ID NO: 14123 - protein, 7 aa, synthetic construct
RGDFFSV

SEQ ID NO: 14124 - protein, 7 aa, synthetic construct
RGDFGTR

SEQ ID NO: 14125 - protein, 7 aa, synthetic construct
RGDFHHE

SEQ ID NO: 14126 - protein, 7 aa, synthetic construct
RGDFILF

SEQ ID NO: 14127 - protein, 7 aa, synthetic construct
RGDFLAS

SEQ ID NO: 14128 - protein, 7 aa, synthetic construct
RGDFNAS

SEQ ID NO: 14129 - protein, 7 aa, synthetic construct
RGDFNKD

SEQ ID NO: 14130 - protein, 7 aa, synthetic construct
RGDFQAT

SEQ ID NO: 14131 - protein, 7 aa, synthetic construct
RGDFQKQ

SEQ ID NO: 14132 - protein, 7 aa, synthetic construct
RGDFQQN

SEQ ID NO: 14133 - protein, 7 aa, synthetic construct
RGDFRGH

SEQ ID NO: 14134 - protein, 7 aa, synthetic construct
RGDFSFN

SEQ ID NO: 14135 - protein, 7 aa, synthetic construct
RGDFSFT

SEQ ID NO: 14136 - protein, 7 aa, synthetic construct
RGDFTGG

SEQ ID NO: 14137 - protein, 7 aa, synthetic construct
RGDFTNN

SEQ ID NO: 14138 - protein, 7 aa, synthetic construct
RGDFTRD

SEQ ID NO: 14139 - protein, 7 aa, synthetic construct
RGDFTTN

SEQ ID NO: 14140 - protein, 7 aa, synthetic construct
RGDFVIV

SEQ ID NO: 14141 - protein, 7 aa, synthetic construct
RGDGAIR

SEQ ID NO: 14142 - protein, 7 aa, synthetic construct
RGDGAKS

SEQ ID NO: 14143 - protein, 7 aa, synthetic construct
RGDGEHQ

SEQ ID NO: 14144 - protein, 7 aa, synthetic construct
RGDGFFI

SEQ ID NO: 14145 - protein, 7 aa, synthetic construct
RGDGFGG

SEQ ID NO: 14146 - protein, 7 aa, synthetic construct
RGDGFHI

SEQ ID NO: 14147 - protein, 7 aa, synthetic construct
RGDGGHK

SEQ ID NO: 14148 - protein, 7 aa, synthetic construct
RGDGHGE

SEQ ID NO: 14149 - protein, 7 aa, synthetic construct
RGDGIQD

SEQ ID NO: 14150 - protein, 7 aa, synthetic construct
RGDGITR

SEQ ID NO: 14151 - protein, 7 aa, synthetic construct
RGDGKGQ

SEQ ID NO: 14152 - protein, 7 aa, synthetic construct
RGDGKST

SEQ ID NO: 14153 - protein, 7 aa, synthetic construct
RGDGLNV

SEQ ID NO: 14154 - protein, 7 aa, synthetic construct
RGDGLTR

SEQ ID NO: 14155 - protein, 7 aa, synthetic construct
RGDGNKG

SEQ ID NO: 14156 - protein, 7 aa, synthetic construct
RGDGNRG

SEQ ID NO: 14157 - protein, 7 aa, synthetic construct
RGDGQHF

SEQ ID NO: 14158 - protein, 7 aa, synthetic construct
RGDGRGR

SEQ ID NO: 14159 - protein, 7 aa, synthetic construct
RGDGSAQ

SEQ ID NO: 14160 - protein, 7 aa, synthetic construct
RGDGSNL

SEQ ID NO: 14161 - protein, 7 aa, synthetic construct
RGDGTGV

SEQ ID NO: 14162 - protein, 7 aa, synthetic construct
RGDGVET

SEQ ID NO: 14163 - protein, 7 aa, synthetic construct
RGDGVTI

SEQ ID NO: 14164 - protein, 7 aa, synthetic construct
RGDHDLV

SEQ ID NO: 14165 - protein, 7 aa, synthetic construct
RGDHDNE

SEQ ID NO: 14166 - protein, 7 aa, synthetic construct
RGDHDQI

SEQ ID NO: 14167 - protein, 7 aa, synthetic construct
RGDHDQS

SEQ ID NO: 14168 - protein, 7 aa, synthetic construct
RGDHDTF

SEQ ID NO: 14169 - protein, 7 aa, synthetic construct
RGDHFKG

SEQ ID NO: 14170 - protein, 7 aa, synthetic construct
RGDHGNE

SEQ ID NO: 14171 - protein, 7 aa, synthetic construct
RGDHGVR

SEQ ID NO: 14172 - protein, 7 aa, synthetic construct
RGDHKRN

SEQ ID NO: 14173 - protein, 7 aa, synthetic construct
RGDHLRS

SEQ ID NO: 14174 - protein, 7 aa, synthetic construct
RGDHNSG

SEQ ID NO: 14175 - protein, 7 aa, synthetic construct
RGDHREQ

SEQ ID NO: 14176 - protein, 7 aa, synthetic construct
RGDHRGT

SEQ ID NO: 14177 - protein, 7 aa, synthetic construct
RGDHRNE

SEQ ID NO: 14178 - protein, 7 aa, synthetic construct
RGDHSHF

SEQ ID NO: 14179 - protein, 7 aa, synthetic construct
RGDHTFT

SEQ ID NO: 14180 - protein, 7 aa, synthetic construct
RGDHVGV

SEQ ID NO: 14181 - protein, 7 aa, synthetic construct
RGDIAHA

SEQ ID NO: 14182 - protein, 7 aa, synthetic construct
RGDIDHV

SEQ ID NO: 14183 - protein, 7 aa, synthetic construct
RGDIEFK

SEQ ID NO: 14184 - protein, 7 aa, synthetic construct
RGDIESR

SEQ ID NO: 14185 - protein, 7 aa, synthetic construct
RGDIFHF

SEQ ID NO: 14186 - protein, 7 aa, synthetic construct
RGDIGAQ

SEQ ID NO: 14187 - protein, 7 aa, synthetic construct
RGDIGST

SEQ ID NO: 14188 - protein, 7 aa, synthetic construct
RGDIKLS

SEQ ID NO: 14189 - protein, 7 aa, synthetic construct
RGDINQG

SEQ ID NO: 14190 - protein, 7 aa, synthetic construct
RGDINTR

SEQ ID NO: 14191 - protein, 7 aa, synthetic construct
RGDIQST

SEQ ID NO: 14192 - protein, 7 aa, synthetic construct
RGDIRKH

SEQ ID NO: 14193 - protein, 7 aa, synthetic construct
RGDIRLS

SEQ ID NO: 14194 - protein, 7 aa, synthetic construct
RGDIVII

SEQ ID NO: 14195 - protein, 7 aa, synthetic construct
RGDKAAK

SEQ ID NO: 14196 - protein, 7 aa, synthetic construct
RGDKDKF

SEQ ID NO: 14197 - protein, 7 aa, synthetic construct
RGDKGER

SEQ ID NO: 14198 - protein, 7 aa, synthetic construct
RGDKGRD

SEQ ID NO: 14199 - protein, 7 aa, synthetic construct
RGDKGSL

SEQ ID NO: 14200 - protein, 7 aa, synthetic construct
RGDKHNF

SEQ ID NO: 14201 - protein, 7 aa, synthetic construct
RGDKIDT

SEQ ID NO: 14202 - protein, 7 aa, synthetic construct
RGDKISH

SEQ ID NO: 14203 - protein, 7 aa, synthetic construct
RGDKISN

SEQ ID NO: 14204 - protein, 7 aa, synthetic construct
RGDKQER

SEQ ID NO: 14205 - protein, 7 aa, synthetic construct
RGDKQFT

SEQ ID NO: 14206 - protein, 7 aa, synthetic construct
RGDKQGS

SEQ ID NO: 14207 - protein, 7 aa, synthetic construct
RGDKSHF

SEQ ID NO: 14208 - protein, 7 aa, synthetic construct
RGDKSIT

SEQ ID NO: 14209 - protein, 7 aa, synthetic construct
RGDKSNI

SEQ ID NO: 14210 - protein, 7 aa, synthetic construct
RGDKTIQ

SEQ ID NO: 14211 - protein, 7 aa, synthetic construct
RGDKVDF

SEQ ID NO: 14212 - protein, 7 aa, synthetic construct
RGDKVRK

SEQ ID NO: 14213 - protein, 7 aa, synthetic construct
RGDLADR

SEQ ID NO: 14214 - protein, 7 aa, synthetic construct
RGDLDVS

SEQ ID NO: 14215 - protein, 7 aa, synthetic construct
RGDASFK

SEQ ID NO: 14216 - protein, 7 aa, synthetic construct
RGDLEIH

SEQ ID NO: 14217 - protein, 7 aa, synthetic construct
RGDLFHA

SEQ ID NO: 14218 - protein, 7 aa, synthetic construct
RGDLFVK

SEQ ID NO: 14219 - protein, 7 aa, synthetic construct
RGDLINL

SEQ ID NO: 14220 - protein, 7 aa, synthetic construct
RGDLLQN

SEQ ID NO: 14221 - protein, 7 aa, synthetic construct
RGDLQFI

SEQ ID NO: 14222 - protein, 7 aa, synthetic construct
RGDLVFT

SEQ ID NO: 14223 - protein, 7 aa, synthetic construct
RGDLVKE

SEQ ID NO: 14224 - protein, 7 aa, synthetic construct
RGDNAHK

SEQ ID NO: 14225 - protein, 7 aa, synthetic construct
RGDATQT

SEQ ID NO: 14226 - protein, 7 aa, synthetic construct
RGDATRQ

SEQ ID NO: 14227 - protein, 7 aa, synthetic construct
RGDNEVT

SEQ ID NO: 14228 - protein, 7 aa, synthetic construct
RGDNFIV

SEQ ID NO: 14229 - protein, 7 aa, synthetic construct
RGDNGLE

SEQ ID NO: 14230 - protein, 7 aa, synthetic construct
RGDNHDV

SEQ ID NO: 14231 - protein, 7 aa, synthetic construct
RGDNIAR

SEQ ID NO: 14232 - protein, 7 aa, synthetic construct
RGDNKDT

SEQ ID NO: 14233 - protein, 7 aa, synthetic construct
RGDNKHV

SEQ ID NO: 14234 - protein, 7 aa, synthetic construct
RGDADIK

SEQ ID NO: 14235 - protein, 7 aa, synthetic construct
RGDNNRT

SEQ ID NO: 14236 - protein, 7 aa, synthetic construct
RGDNRSG

SEQ ID NO: 14237 - protein, 7 aa, synthetic construct
RGDNSVL

SEQ ID NO: 14238 - protein, 7 aa, synthetic construct
RGDNTEK

SEQ ID NO: 14239 - protein, 7 aa, synthetic construct
RGDNTHG

SEQ ID NO: 14240 - protein, 7 aa, synthetic construct
RGDNTSN

SEQ ID NO: 14241 - protein, 7 aa, synthetic construct
RGDNVVV

SEQ ID NO: 14242 - protein, 7 aa, synthetic construct
RGDQAAV

SEQ ID NO: 14243 - protein, 7 aa, synthetic construct
RGDQAVT

SEQ ID NO: 14244 - protein, 7 aa, synthetic construct
RGDQDVF

SEQ ID NO: 14245 - protein, 7 aa, synthetic construct
RGDDAGL

SEQ ID NO: 14246 - protein, 7 aa, synthetic construct
RGDQGHL

SEQ ID NO: 14247 - protein, 7 aa, synthetic construct
RGDQGII

SEQ ID NO: 14248 - protein, 7 aa, synthetic construct
RGDQNSI

SEQ ID NO: 14249 - protein, 7 aa, synthetic construct
RGDQNTS

SEQ ID NO: 14250 - protein, 7 aa, synthetic construct
RGDQQAL

SEQ ID NO: 14251 - protein, 7 aa, synthetic construct
RGDQQSI

SEQ ID NO: 14252 - protein, 7 aa, synthetic construct
RGDQRVG

SEQ ID NO: 14253 - protein, 7 aa, synthetic construct
RGDQSGI

SEQ ID NO: 14254 - protein, 7 aa, synthetic construct
RGDQSGK

SEQ ID NO: 14255 - protein, 7 aa, synthetic construct
RGDRADT

SEQ ID NO: 14256 - protein, 7 aa, synthetic construct
RGDRALA

SEQ ID NO: 14257 - protein, 7 aa, synthetic construct
RGDRDFE

SEQ ID NO: 14258 - protein, 7 aa, synthetic construct
RGDDDNT

SEQ ID NO: 14259 - protein, 7 aa, synthetic construct
RGDREFH

SEQ ID NO: 14260 - protein, 7 aa, synthetic construct
RGDRFTL

SEQ ID NO: 14261 - protein, 7 aa, synthetic construct
RGDRGLL

SEQ ID NO: 14262 - protein, 7 aa, synthetic construct
RGDRHFA

SEQ ID NO: 14263 - protein, 7 aa, synthetic construct
RGDRHND

SEQ ID NO: 14264 - protein, 7 aa, synthetic construct
RGDRIDQ

SEQ ID NO: 14265 - protein, 7 aa, synthetic construct
RGDRKVG

SEQ ID NO: 14266 - protein, 7 aa, synthetic construct
RGDRNHN

SEQ ID NO: 14267 - protein, 7 aa, synthetic construct
RGDRNLS

SEQ ID NO: 14268 - protein, 7 aa, synthetic construct
RGDRNRT

SEQ ID NO: 14269 - protein, 7 aa, synthetic construct
RGDRNST

SEQ ID NO: 14270 - protein, 7 aa, synthetic construct
RGDRNTF

SEQ ID NO: 14271 - protein, 7 aa, synthetic construct
RGDDEKK

SEQ ID NO: 14272 - protein, 7 aa, synthetic construct
RGDRRLT

SEQ ID NO: 14273 - protein, 7 aa, synthetic construct
RGDRRRN

SEQ ID NO: 14274 - protein, 7 aa, synthetic construct
RGDRRTD

SEQ ID NO: 14275 - protein, 7 aa, synthetic construct
RGDDERF

SEQ ID NO: 14276 - protein, 7 aa, synthetic construct
RGDRTGA

SEQ ID NO: 14277 - protein, 7 aa, synthetic construct
RGDRTSD

SEQ ID NO: 14278 - protein, 7 aa, synthetic construct
RGDRVEV

SEQ ID NO: 14279 - protein, 7 aa, synthetic construct
RGDRVKH

SEQ ID NO: 14280 - protein, 7 aa, synthetic construct
RGDSAHH

SEQ ID NO: 14281 - protein, 7 aa, synthetic construct
RGDSANV

SEQ ID NO: 14282 - protein, 7 aa, synthetic construct
RGDSAVF

SEQ ID NO: 14283 - protein, 7 aa, synthetic construct
RGDADSF

SEQ ID NO: 14284 - protein, 7 aa, synthetic construct
RGDSDVL

SEQ ID NO: 14285 - protein, 7 aa, synthetic construct
RGDSFVT

SEQ ID NO: 14286 - protein, 7 aa, synthetic construct
RGDSGAH

SEQ ID NO: 14287 - protein, 7 aa, synthetic construct
RGDSGSG

SEQ ID NO: 14288 - protein, 7 aa, synthetic construct
RGDSHDV

SEQ ID NO: 14289 - protein, 7 aa, synthetic construct
RGDSHQV

SEQ ID NO: 14290 - protein, 7 aa, synthetic construct
RGDDFLR

SEQ ID NO: 14291 - protein, 7 aa, synthetic construct
RGDSINF

SEQ ID NO: 14292 - protein, 7 aa, synthetic construct
RGDSISI

SEQ ID NO: 14293 - protein, 7 aa, synthetic construct
RGDSKRA

SEQ ID NO: 14294 - protein, 7 aa, synthetic construct
RGDSKVR

SEQ ID NO: 14295 - protein, 7 aa, synthetic construct
RGDSQKE

SEQ ID NO: 14296 - protein, 7 aa, synthetic construct
RGDSQSS

SEQ ID NO: 14297 - protein, 7 aa, synthetic construct
RGDSRFA

SEQ ID NO: 14298 - protein, 7 aa, synthetic construct
RGDSRQN

SEQ ID NO: 14299 - protein, 7 aa, synthetic construct
RGDSSAF

SEQ ID NO: 14300 - protein, 7 aa, synthetic construct
RGDSSVS

SEQ ID NO: 14301 - protein, 7 aa, synthetic construct
RGDSTNI

SEQ ID NO: 14302 - protein, 7 aa, synthetic construct
RGDSTQE

SEQ ID NO: 14303 - protein, 7 aa, synthetic construct
RGDSTRF

SEQ ID NO: 14304 - protein, 7 aa, synthetic construct
RGDSTRS

SEQ ID NO: 14305 - protein, 7 aa, synthetic construct
RGDSTTQ

SEQ ID NO: 14306 - protein, 7 aa, synthetic construct
RGDSVNT

SEQ ID NO: 14307 - protein, 7 aa, synthetic construct
RGDSVRS

SEQ ID NO: 14308 - protein, 7 aa, synthetic construct
RGDTAAV

SEQ ID NO: 14309 - protein, 7 aa, synthetic construct
RGDDGKL

SEQ ID NO: 14310 - protein, 7 aa, synthetic construct
RGDTGFV

SEQ ID NO: 14311 - protein, 7 aa, synthetic construct
RGDTHRQ

SEQ ID NO: 14312 - protein, 7 aa, synthetic construct
RGDTIEH

SEQ ID NO: 14313 - protein, 7 aa, synthetic construct
RGDTKEF

SEQ ID NO: 14314 - protein, 7 aa, synthetic construct
RGDTREK

SEQ ID NO: 14315 - protein, 7 aa, synthetic construct
RGDTSNQ

SEQ ID NO: 14316 - protein, 7 aa, synthetic construct
RGDDHSL

SEQ ID NO: 14317 - protein, 7 aa, synthetic construct
RGDVDQI

SEQ ID NO: 14318 - protein, 7 aa, synthetic construct
RGDVDRE

SEQ ID NO: 14319 - protein, 7 aa, synthetic construct
RGDVERR

SEQ ID NO: 14320 - protein, 7 aa, synthetic construct
RGDVGHS

SEQ ID NO: 14321 - protein, 7 aa, synthetic construct
RGDVGSQ

SEQ ID NO: 14322 - protein, 7 aa, synthetic construct
RGDVHHG

SEQ ID NO: 14323 - protein, 7 aa, synthetic construct
RGDVHIR

SEQ ID NO: 14324 - protein, 7 aa, synthetic construct
RGDVIFE

SEQ ID NO: 14325 - protein, 7 aa, synthetic construct
RGDVIFN

SEQ ID NO: 14326 - protein, 7 aa, synthetic construct
RGDVIHT

SEQ ID NO: 14327 - protein, 7 aa, synthetic construct
RGDVISK

SEQ ID NO: 14328 - protein, 7 aa, synthetic construct
RGDVKDT

SEQ ID NO: 14329 - protein, 7 aa, synthetic construct
RGDVKTL

SEQ ID NO: 14330 - protein, 7 aa, synthetic construct
RGDVLVH

SEQ ID NO: 14331 - protein, 7 aa, synthetic construct
RGDVQGA

SEQ ID NO: 14332 - protein, 7 aa, synthetic construct
RGDVQTN

SEQ ID NO: 14333 - protein, 7 aa, synthetic construct
RGDVQTV

SEQ ID NO: 14334 - protein, 7 aa, synthetic construct
RGDVRDT

SEQ ID NO: 14335 - protein, 7 aa, synthetic construct
RGDVRRR

SEQ ID NO: 14336 - protein, 7 aa, synthetic construct
RGDVSNH

SEQ ID NO: 14337 - protein, 7 aa, synthetic construct
RGDVTGN

SEQ ID NO: 14338 - protein, 7 aa, synthetic construct
RGDDNKF

SEQ ID NO: 14339 - protein, 7 aa, synthetic construct
RGDDNVD

SEQ ID NO: 14340 - protein, 7 aa, synthetic construct
RGDDREI

SEQ ID NO: 14341 - protein, 7 aa, synthetic construct
RGDDRHN

SEQ ID NO: 14342 - protein, 7 aa, synthetic construct
RGDDSAE

SEQ ID NO: 14343 - protein, 7 aa, synthetic construct
RGDDTSD

SEQ ID NO: 14344 - protein, 7 aa, synthetic construct
RGDEFNV

SEQ ID NO: 14345 - protein, 7 aa, synthetic construct
RGDEGHA

SEQ ID NO: 14346 - protein, 7 aa, synthetic construct
RGDEGKK

SEQ ID NO: 14347 - protein, 7 aa, synthetic construct
RGDEHVI

SEQ ID NO: 14348 - protein, 7 aa, synthetic construct
RGDELFT

SEQ ID NO: 14349 - protein, 7 aa, synthetic construct
RGDENVF

SEQ ID NO: 14350 - protein, 7 aa, synthetic construct
RGDERFQ

SEQ ID NO: 14351 - protein, 7 aa, synthetic construct
RGDERRH

SEQ ID NO: 14352 - protein, 7 aa, synthetic construct
RGDESFI

SEQ ID NO: 14353 - protein, 7 aa, synthetic construct
RGDESGS

SEQ ID NO: 14354 - protein, 7 aa, synthetic construct
RGDAGKQ

SEQ ID NO: 14355 - protein, 7 aa, synthetic construct
RGDFDEL

SEQ ID NO: 14356 - protein, 7 aa, synthetic construct
RGDFDFK

SEQ ID NO: 14357 - protein, 7 aa, synthetic construct
RGDFDNL

SEQ ID NO: 14358 - protein, 7 aa, synthetic construct
RGDFGTN

SEQ ID NO: 14359 - protein, 7 aa, synthetic construct
RGDFGVG

SEQ ID NO: 14360 - protein, 7 aa, synthetic construct
RGDFHAH

SEQ ID NO: 14361 - protein, 7 aa, synthetic construct
RGDFHHL

SEQ ID NO: 14362 - protein, 7 aa, synthetic construct
RGDFIEL

SEQ ID NO: 14363 - protein, 7 aa, synthetic construct
RGDFIFL

SEQ ID NO: 14364 - protein, 7 aa, synthetic construct
RGDFIHQ

SEQ ID NO: 14365 - protein, 7 aa, synthetic construct
RGDFIHR

SEQ ID NO: 14366 - protein, 7 aa, synthetic construct
RGDAHFK

SEQ ID NO: 14367 - protein, 7 aa, synthetic construct
RGDFKRA

SEQ ID NO: 14368 - protein, 7 aa, synthetic construct
RGDFLNV

SEQ ID NO: 14369 - protein, 7 aa, synthetic construct
RGDFRDV

SEQ ID NO: 14370 - protein, 7 aa, synthetic construct
RGDFRTQ

SEQ ID NO: 14371 - protein, 7 aa, synthetic construct
RGDFRVH

SEQ ID NO: 14372 - protein, 7 aa, synthetic construct
RGDFSQF

SEQ ID NO: 14373 - protein, 7 aa, synthetic construct
RGDFSVL

SEQ ID NO: 14374 - protein, 7 aa, synthetic construct
RGDFTTI

SEQ ID NO: 14375 - protein, 7 aa, synthetic construct
RGDFVIQ

SEQ ID NO: 14376 - protein, 7 aa, synthetic construct
RGDGAET

SEQ ID NO: 14377 - protein, 7 aa, synthetic construct
RGDGAVK

SEQ ID NO: 14378 - protein, 7 aa, synthetic construct
RGDGERH

SEQ ID NO: 14379 - protein, 7 aa, synthetic construct
RGDGFGV

SEQ ID NO: 14380 - protein, 7 aa, synthetic construct
RGDGGNI

SEQ ID NO: 14381 - protein, 7 aa, synthetic construct
RGDGIDR

SEQ ID NO: 14382 - protein, 7 aa, synthetic construct
RGDGISD

SEQ ID NO: 14383 - protein, 7 aa, synthetic construct
RGDAIQR

SEQ ID NO: 14384 - protein, 7 aa, synthetic construct
RGDGKEV

SEQ ID NO: 14385 - protein, 7 aa, synthetic construct
RGDGNFV

SEQ ID NO: 14386 - protein, 7 aa, synthetic construct
RGDGNKF

SEQ ID NO: 14387 - protein, 7 aa, synthetic construct
RGDGQII

SEQ ID NO: 14388 - protein, 7 aa, synthetic construct
RGDAKDH

SEQ ID NO: 14389 - protein, 7 aa, synthetic construct
RGDAKEH

SEQ ID NO: 14390 - protein, 7 aa, synthetic construct
RGDGTFK

SEQ ID NO: 14391 - protein, 7 aa, synthetic construct
RGDGVAS

SEQ ID NO: 14392 - protein, 7 aa, synthetic construct
RGDHAHF

SEQ ID NO: 14393 - protein, 7 aa, synthetic construct
RGDHDGD

SEQ ID NO: 14394 - protein, 7 aa, synthetic construct
RGDHDVT

SEQ ID NO: 14395 - protein, 7 aa, synthetic construct
RGDAKTA

SEQ ID NO: 14396 - protein, 7 aa, synthetic construct
RGDHFTV

SEQ ID NO: 14397 - protein, 7 aa, synthetic construct
RGDHGFR

SEQ ID NO: 14398 - protein, 7 aa, synthetic construct
RGDHGNQ

SEQ ID NO: 14399 - protein, 7 aa, synthetic construct
RGDHKQQ

SEQ ID NO: 14400 - protein, 7 aa, synthetic construct
RGDHKQV

SEQ ID NO: 14401 - protein, 7 aa, synthetic construct
RGDHLNT

SEQ ID NO: 14402 - protein, 7 aa, synthetic construct
RGDALHT

SEQ ID NO: 14403 - protein, 7 aa, synthetic construct
RGDHQHD

SEQ ID NO: 14404 - protein, 7 aa, synthetic construct
RGDHQST

SEQ ID NO: 14405 - protein, 7 aa, synthetic construct
RGDHRDF

SEQ ID NO: 14406 - protein, 7 aa, synthetic construct
RGDHRKN

SEQ ID NO: 14407 - protein, 7 aa, synthetic construct
RGDHTQG

SEQ ID NO: 14408 - protein, 7 aa, synthetic construct
RGDHVDF

SEQ ID NO: 14409 - protein, 7 aa, synthetic construct
RGDHVDT

SEQ ID NO: 14410 - protein, 7 aa, synthetic construct
RGDHVHS

SEQ ID NO: 14411 - protein, 7 aa, synthetic construct
RGDIATT

SEQ ID NO: 14412 - protein, 7 aa, synthetic construct
RGDIEKH

SEQ ID NO: 14413 - protein, 7 aa, synthetic construct
RGDIENK

SEQ ID NO: 14414 - protein, 7 aa, synthetic construct
RGDIFGR

SEQ ID NO: 14415 - protein, 7 aa, synthetic construct
RGDIFHE

SEQ ID NO: 14416 - protein, 7 aa, synthetic construct
RGDIFHQ

SEQ ID NO: 14417 - protein, 7 aa, synthetic construct
RGDIGIT

SEQ ID NO: 14418 - protein, 7 aa, synthetic construct
RGDIILK

SEQ ID NO: 14419 - protein, 7 aa, synthetic construct
RGDIIQN

SEQ ID NO: 14420 - protein, 7 aa, synthetic construct
RGDIKVQ

SEQ ID NO: 14421 - protein, 7 aa, synthetic construct
RGDILFF

SEQ ID NO: 14422 - protein, 7 aa, synthetic construct
RGDILIV

SEQ ID NO: 14423 - protein, 7 aa, synthetic construct
RGDILNF

SEQ ID NO: 14424 - protein, 7 aa, synthetic construct
RGDINKT

SEQ ID NO: 14425 - protein, 7 aa, synthetic construct
RGDINRT

SEQ ID NO: 14426 - protein, 7 aa, synthetic construct
RGDISFI

SEQ ID NO: 14427 - protein, 7 aa, synthetic construct
RGDITGH

SEQ ID NO: 14428 - protein, 7 aa, synthetic construct
RGDITGV

SEQ ID NO: 14429 - protein, 7 aa, synthetic construct
RGDITSF

SEQ ID NO: 14430 - protein, 7 aa, synthetic construct
RGDIVIH

SEQ ID NO: 14431 - protein, 7 aa, synthetic construct
RGDKDFR

SEQ ID NO: 14432 - protein, 7 aa, synthetic construct
RGDAQNI

SEQ ID NO: 14433 - protein, 7 aa, synthetic construct
RGDKEFQ

SEQ ID NO: 14434 - protein, 7 aa, synthetic construct
RGDKFLL

SEQ ID NO: 14435 - protein, 7 aa, synthetic construct
RGDKGNQ

SEQ ID NO: 14436 - protein, 7 aa, synthetic construct
RGDKHEL

SEQ ID NO: 14437 - protein, 7 aa, synthetic construct
RGDARDR

SEQ ID NO: 14438 - protein, 7 aa, synthetic construct
RGDKISL

SEQ ID NO: 14439 - protein, 7 aa, synthetic construct
RGDARFR

SEQ ID NO: 14440 - protein, 7 aa, synthetic construct
RGDKLDV

SEQ ID NO: 14441 - protein, 7 aa, synthetic construct
RGDKNFN

SEQ ID NO: 14442 - protein, 7 aa, synthetic construct
RGDKQGT

SEQ ID NO: 14443 - protein, 7 aa, synthetic construct
RGDKSHH

SEQ ID NO: 14444 - protein, 7 aa, synthetic construct
RGDKVGG

SEQ ID NO: 14445 - protein, 7 aa, synthetic construct
RGDKVGV

SEQ ID NO: 14446 - protein, 7 aa, synthetic construct
RGDKVHK

SEQ ID NO: 14447 - protein, 7 aa, synthetic construct
RGDKVQT

SEQ ID NO: 14448 - protein, 7 aa, synthetic construct
RGDKVVT

SEQ ID NO: 14449 - protein, 7 aa, synthetic construct
RGDLAEE

SEQ ID NO: 14450 - protein, 7 aa, synthetic construct
RGDLDEL

SEQ ID NO: 14451 - protein, 7 aa, synthetic construct
RGDLDEN

SEQ ID NO: 14452 - protein, 7 aa, synthetic construct
RGDLDKR

SEQ ID NO: 14453 - protein, 7 aa, synthetic construct
RGDLFKK

SEQ ID NO: 14454 - protein, 7 aa, synthetic construct
RGDLGTT

SEQ ID NO: 14455 - protein, 7 aa, synthetic construct
RGDLHES

SEQ ID NO: 14456 - protein, 7 aa, synthetic construct
RGDLIDS

SEQ ID NO: 14457 - protein, 7 aa, synthetic construct
RGDASNS

SEQ ID NO: 14458 - protein, 7 aa, synthetic construct
RGDLKES

SEQ ID NO: 14459 - protein, 7 aa, synthetic construct
RGDLKNI

SEQ ID NO: 14460 - protein, 7 aa, synthetic construct
RGDLQGQ

SEQ ID NO: 14461 - protein, 7 aa, synthetic construct
RGDLVLK

SEQ ID NO: 14462 - protein, 7 aa, synthetic construct
RGDNAQH

SEQ ID NO: 14463 - protein, 7 aa, synthetic construct
RGDNDLG

SEQ ID NO: 14464 - protein, 7 aa, synthetic construct
RGDATRH

SEQ ID NO: 14465 - protein, 7 aa, synthetic construct
RGDNFNQ

SEQ ID NO: 14466 - protein, 7 aa, synthetic construct
RGDNFRG

SEQ ID NO: 14467 - protein, 7 aa, synthetic construct
RGDNGFV

SEQ ID NO: 14468 - protein, 7 aa, synthetic construct
RGDNGGV

SEQ ID NO: 14469 - protein, 7 aa, synthetic construct
RGDNGHA

SEQ ID NO: 14470 - protein, 7 aa, synthetic construct
RGDATVR

SEQ ID NO: 14471 - protein, 7 aa, synthetic construct
RGDNHGA

SEQ ID NO: 14472 - protein, 7 aa, synthetic construct
RGDNHHK

SEQ ID NO: 14473 - protein, 7 aa, synthetic construct
RGDNHQI

SEQ ID NO: 14474 - protein, 7 aa, synthetic construct
RGDNIKA

SEQ ID NO: 14475 - protein, 7 aa, synthetic construct
RGDNINT

SEQ ID NO: 14476 - protein, 7 aa, synthetic construct
RGDNISI

SEQ ID NO: 14477 - protein, 7 aa, synthetic construct
RGDNKFA

SEQ ID NO: 14478 - protein, 7 aa, synthetic construct
RGDNKNI

SEQ ID NO: 14479 - protein, 7 aa, synthetic construct
RGDNKQI

SEQ ID NO: 14480 - protein, 7 aa, synthetic construct
RGDNKVI

SEQ ID NO: 14481 - protein, 7 aa, synthetic construct
RGDNLFK

SEQ ID NO: 14482 - protein, 7 aa, synthetic construct
RGDAVHF

SEQ ID NO: 14483 - protein, 7 aa, synthetic construct
RGDNLSK

SEQ ID NO: 14484 - protein, 7 aa, synthetic construct
RGDNLST

SEQ ID NO: 14485 - protein, 7 aa, synthetic construct
RGDNQRH

SEQ ID NO: 14486 - protein, 7 aa, synthetic construct
RGDNRHK

SEQ ID NO: 14487 - protein, 7 aa, synthetic construct
RGDNSDR

SEQ ID NO: 14488 - protein, 7 aa, synthetic construct
RGDNSQQ

SEQ ID NO: 14489 - protein, 7 aa, synthetic construct
RGDQAEG

SEQ ID NO: 14490 - protein, 7 aa, synthetic construct
RGDQAKQ

SEQ ID NO: 14491 - protein, 7 aa, synthetic construct
RGDQDAF

SEQ ID NO: 14492 - protein, 7 aa, synthetic construct
RGDQDGT

SEQ ID NO: 14493 - protein, 7 aa, synthetic construct
RGDQDKR

SEQ ID NO: 14494 - protein, 7 aa, synthetic construct
RGDQDLF

SEQ ID NO: 14495 - protein, 7 aa, synthetic construct
RGDQFVR

SEQ ID NO: 14496 - protein, 7 aa, synthetic construct
RGDQGIH

SEQ ID NO: 14497 - protein, 7 aa, synthetic construct
RGDQGKF

SEQ ID NO: 14498 - protein, 7 aa, synthetic construct
RGDQGNI

SEQ ID NO: 14499 - protein, 7 aa, synthetic construct
RGDQHKH

SEQ ID NO: 14500 - protein, 7 aa, synthetic construct
RGDQHQR

SEQ ID NO: 14501 - protein, 7 aa, synthetic construct
RGDQKQA

SEQ ID NO: 14502 - protein, 7 aa, synthetic construct
RGDQQSV

SEQ ID NO: 14503 - protein, 7 aa, synthetic construct
RGDQRSA

SEQ ID NO: 14504 - protein, 7 aa, synthetic construct
RGDQSRG

SEQ ID NO: 14505 - protein, 7 aa, synthetic construct
RGDQSTD

SEQ ID NO: 14506 - protein, 7 aa, synthetic construct
RGDQTAG

SEQ ID NO: 14507 - protein, 7 aa, synthetic construct
RGDQTLV

SEQ ID NO: 14508 - protein, 7 aa, synthetic construct
RGDQTQS

SEQ ID NO: 14509 - protein, 7 aa, synthetic construct
RGDQTVG

SEQ ID NO: 14510 - protein, 7 aa, synthetic construct
RGDQVTQ

SEQ ID NO: 14511 - protein, 7 aa, synthetic construct
RGDRAES

SEQ ID NO: 14512 - protein, 7 aa, synthetic construct
RGDRAFD

SEQ ID NO: 14513 - protein, 7 aa, synthetic construct
RGDDDLH

SEQ ID NO: 14514 - protein, 7 aa, synthetic construct
RGDRDAG

SEQ ID NO: 14515 - protein, 7 aa, synthetic construct
RGDDDND

SEQ ID NO: 14516 - protein, 7 aa, synthetic construct
RGDRDTS

SEQ ID NO: 14517 - protein, 7 aa, synthetic construct
RGDRHGN

SEQ ID NO: 14518 - protein, 7 aa, synthetic construct
RGDRHLV

SEQ ID NO: 14519 - protein, 7 aa, synthetic construct
RGDRLGA

SEQ ID NO: 14520 - protein, 7 aa, synthetic construct
RGDRLGD

SEQ ID NO: 14521 - protein, 7 aa, synthetic construct
RGDRLKV

SEQ ID NO: 14522 - protein, 7 aa, synthetic construct
RGDDEHH

SEQ ID NO: 14523 - protein, 7 aa, synthetic construct
RGDRNIG

SEQ ID NO: 14524 - protein, 7 aa, synthetic construct
RGDRNNQ

SEQ ID NO: 14525 - protein, 7 aa, synthetic construct
RGDRQFA

SEQ ID NO: 14526 - protein, 7 aa, synthetic construct
RGDADRR

SEQ ID NO: 14527 - protein, 7 aa, synthetic construct
RGDRVDH

SEQ ID NO: 14528 - protein, 7 aa, synthetic construct
RGDRVDT

SEQ ID NO: 14529 - protein, 7 aa, synthetic construct
RGDRVEL

SEQ ID NO: 14530 - protein, 7 aa, synthetic construct
RGDRVHG

SEQ ID NO: 14531 - protein, 7 aa, synthetic construct
RGDSATF

SEQ ID NO: 14532 - protein, 7 aa, synthetic construct
RGDSGKF

SEQ ID NO: 14533 - protein, 7 aa, synthetic construct
RGDSGTT

SEQ ID NO: 14534 - protein, 7 aa, synthetic construct
RGDSHEL

SEQ ID NO: 14535 - protein, 7 aa, synthetic construct
RGDSHFS

SEQ ID NO: 14536 - protein, 7 aa, synthetic construct
RGDSKHI

SEQ ID NO: 14537 - protein, 7 aa, synthetic construct
RGDSLAF

SEQ ID NO: 14538 - protein, 7 aa, synthetic construct
RGDSLGN

SEQ ID NO: 14539 - protein, 7 aa, synthetic construct
RGDSNVH

SEQ ID NO: 14540 - protein, 7 aa, synthetic construct
RGDSREQ

SEQ ID NO: 14541 - protein, 7 aa, synthetic construct
RGDSRGR

SEQ ID NO: 14542 - protein, 7 aa, synthetic construct
RGDSSVK

SEQ ID NO: 14543 - protein, 7 aa, synthetic construct
RGDSTGQ

SEQ ID NO: 14544 - protein, 7 aa, synthetic construct
RGDSTSR

SEQ ID NO: 14545 - protein, 7 aa, synthetic construct
RGDSVII

SEQ ID NO: 14546 - protein, 7 aa, synthetic construct
RGDSVNS

SEQ ID NO: 14547 - protein, 7 aa, synthetic construct
RGDSVSS

SEQ ID NO: 14548 - protein, 7 aa, synthetic construct
RGDTDVE

SEQ ID NO: 14549 - protein, 7 aa, synthetic construct
RGDTGER

SEQ ID NO: 14550 - protein, 7 aa, synthetic construct
RGDTHNQ

SEQ ID NO: 14551 - protein, 7 aa, synthetic construct
RGDTIRE

SEQ ID NO: 14552 - protein, 7 aa, synthetic construct
RGDDHGL

SEQ ID NO: 14553 - protein, 7 aa, synthetic construct
RGDTLKA

SEQ ID NO: 14554 - protein, 7 aa, synthetic construct
RGDTLKR

SEQ ID NO: 14555 - protein, 7 aa, synthetic construct
RGDTRVD

SEQ ID NO: 14556 - protein, 7 aa, synthetic construct
RGDTSTA

SEQ ID NO: 14557 - protein, 7 aa, synthetic construct
RGDTTFR

SEQ ID NO: 14558 - protein, 7 aa, synthetic construct
RGDVAFV

SEQ ID NO: 14559 - protein, 7 aa, synthetic construct
RGDVANG

SEQ ID NO: 14560 - protein, 7 aa, synthetic construct
RGDVEAR

SEQ ID NO: 14561 - protein, 7 aa, synthetic construct
RGDVEVH

SEQ ID NO: 14562 - protein, 7 aa, synthetic construct
RGDVFRR

SEQ ID NO: 14563 - protein, 7 aa, synthetic construct
RGDVFTS

SEQ ID NO: 14564 - protein, 7 aa, synthetic construct
RGDVIKQ

SEQ ID NO: 14565 - protein, 7 aa, synthetic construct
RGDVKDF

SEQ ID NO: 14566 - protein, 7 aa, synthetic construct
RGDVKLF

SEQ ID NO: 14567 - protein, 7 aa, synthetic construct
RGDVKRE

SEQ ID NO: 14568 - protein, 7 aa, synthetic construct
RGDVLST

SEQ ID NO: 14569 - protein, 7 aa, synthetic construct
RGDVLTN

SEQ ID NO: 14570 - protein, 7 aa, synthetic construct
RGDVNGA

SEQ ID NO: 14571 - protein, 7 aa, synthetic construct
RGDVNQH

SEQ ID NO: 14572 - protein, 7 aa, synthetic construct
RGDVRDF

SEQ ID NO: 14573 - protein, 7 aa, synthetic construct
RGDVSAV

SEQ ID NO: 14574 - protein, 7 aa, synthetic construct
RGDVVKN

SEQ ID NO: 14575 - protein, 7 aa, synthetic construct
RGDVVQN

SEQ ID NO: 14576 - protein, 7 aa, synthetic construct
RGDDLET

SEQ ID NO: 14577 - protein, 7 aa, synthetic construct
RGDDQAF

SEQ ID NO: 14578 - protein, 7 aa, synthetic construct
RGDAENL

SEQ ID NO: 14579 - protein, 7 aa, synthetic construct
RGDAETL

SEQ ID NO: 14580 - protein, 7 aa, synthetic construct
RGDDVVR

SEQ ID NO: 14581 - protein, 7 aa, synthetic construct
RGDAFDE

SEQ ID NO: 14582 - protein, 7 aa, synthetic construct
RGDEATK

SEQ ID NO: 14583 - protein, 7 aa, synthetic construct
RGDEGKL

SEQ ID NO: 14584 - protein, 7 aa, synthetic construct
RGDEHNK

SEQ ID NO: 14585 - protein, 7 aa, synthetic construct
RGDAFNF

SEQ ID NO: 14586 - protein, 7 aa, synthetic construct
RGDELSF

SEQ ID NO: 14587 - protein, 7 aa, synthetic construct
RGDESLH

SEQ ID NO: 14588 - protein, 7 aa, synthetic construct
RGDETTR

SEQ ID NO: 14589 - protein, 7 aa, synthetic construct
RGDFAFI

SEQ ID NO: 14590 - protein, 7 aa, synthetic construct
RGDFAFV

SEQ ID NO: 14591 - protein, 7 aa, synthetic construct
RGDFAVS

SEQ ID NO: 14592 - protein, 7 aa, synthetic construct
RGDFDTN

SEQ ID NO: 14593 - protein, 7 aa, synthetic construct
RGDFERK

SEQ ID NO: 14594 - protein, 7 aa, synthetic construct
RGDFFRK

SEQ ID NO: 14595 - protein, 7 aa, synthetic construct
RGDFGRS

SEQ ID NO: 14596 - protein, 7 aa, synthetic construct
RGDFHGS

SEQ ID NO: 14597 - protein, 7 aa, synthetic construct
RGDFIQN

SEQ ID NO: 14598 - protein, 7 aa, synthetic construct
RGDFKVA

SEQ ID NO: 14599 - protein, 7 aa, synthetic construct
RGDFNFQ

SEQ ID NO: 14600 - protein, 7 aa, synthetic construct
RGDFNKA

SEQ ID NO: 14601 - protein, 7 aa, synthetic construct
RGDFNSL

SEQ ID NO: 14602 - protein, 7 aa, synthetic construct
RGDFQNQ

SEQ ID NO: 14603 - protein, 7 aa, synthetic construct
RGDFREV

SEQ ID NO: 14604 - protein, 7 aa, synthetic construct
RGDFSAR

SEQ ID NO: 14605 - protein, 7 aa, synthetic construct
RGDFSTG

SEQ ID NO: 14606 - protein, 7 aa, synthetic construct
RGDFSTL

SEQ ID NO: 14607 - protein, 7 aa, synthetic construct
RGDFTNV

SEQ ID NO: 14608 - protein, 7 aa, synthetic construct
RGDFVHD

SEQ ID NO: 14609 - protein, 7 aa, synthetic construct
RGDGASV

SEQ ID NO: 14610 - protein, 7 aa, synthetic construct
RGDGDFK

SEQ ID NO: 14611 - protein, 7 aa, synthetic construct
RGDGESS

SEQ ID NO: 14612 - protein, 7 aa, synthetic construct
RGDGESV

SEQ ID NO: 14613 - protein, 7 aa, synthetic construct
RGDGGGQ

SEQ ID NO: 14614 - protein, 7 aa, synthetic construct
RGDGHGF

SEQ ID NO: 14615 - protein, 7 aa, synthetic construct
RGDGINS

SEQ ID NO: 14616 - protein, 7 aa, synthetic construct
RGDGKAE

SEQ ID NO: 14617 - protein, 7 aa, synthetic construct
RGDAITK

SEQ ID NO: 14618 - protein, 7 aa, synthetic construct
RGDGNFA

SEQ ID NO: 14619 - protein, 7 aa, synthetic construct
RGDAKAE

SEQ ID NO: 14620 - protein, 7 aa, synthetic construct
RGDGQFI

SEQ ID NO: 14621 - protein, 7 aa, synthetic construct
RGDGRND

SEQ ID NO: 14622 - protein, 7 aa, synthetic construct
RGDGTVF

SEQ ID NO: 14623 - protein, 7 aa, synthetic construct
RGDHAHE

SEQ ID NO: 14624 - protein, 7 aa, synthetic construct
RGDHEHQ

SEQ ID NO: 14625 - protein, 7 aa, synthetic construct
RGDAKSH

SEQ ID NO: 14626 - protein, 7 aa, synthetic construct
RGDHHHT

SEQ ID NO: 14627 - protein, 7 aa, synthetic construct
RGDHIKQ

SEQ ID NO: 14628 - protein, 7 aa, synthetic construct
RGDHINK

SEQ ID NO: 14629 - protein, 7 aa, synthetic construct
RGDHLHA

SEQ ID NO: 14630 - protein, 7 aa, synthetic construct
RGDHLKF

SEQ ID NO: 14631 - protein, 7 aa, synthetic construct
RGDHNAS

SEQ ID NO: 14632 - protein, 7 aa, synthetic construct
RGDHNRI

SEQ ID NO: 14633 - protein, 7 aa, synthetic construct
RGDHSSR

SEQ ID NO: 14634 - protein, 7 aa, synthetic construct
RGDHVHL

SEQ ID NO: 14635 - protein, 7 aa, synthetic construct
RGDHVQI

SEQ ID NO: 14636 - protein, 7 aa, synthetic construct
RGDIDAS

SEQ ID NO: 14637 - protein, 7 aa, synthetic construct
RGDIDNK

SEQ ID NO: 14638 - protein, 7 aa, synthetic construct
RGDIDST

SEQ ID NO: 14639 - protein, 7 aa, synthetic construct
RGDIENS

SEQ ID NO: 14640 - protein, 7 aa, synthetic construct
RGDIFFS

SEQ ID NO: 14641 - protein, 7 aa, synthetic construct
RGDIHFR

SEQ ID NO: 14642 - protein, 7 aa, synthetic construct
RGDAAVI

SEQ ID NO: 14643 - protein, 7 aa, synthetic construct
RGDIKHH

SEQ ID NO: 14644 - protein, 7 aa, synthetic construct
RGDIKNQ

SEQ ID NO: 14645 - protein, 7 aa, synthetic construct
RGDIKQK

SEQ ID NO: 14646 - protein, 7 aa, synthetic construct
RGDIKSK

SEQ ID NO: 14647 - protein, 7 aa, synthetic construct
RGDINAL

SEQ ID NO: 14648 - protein, 7 aa, synthetic construct
RGDINKH

SEQ ID NO: 14649 - protein, 7 aa, synthetic construct
RGDIQDT

SEQ ID NO: 14650 - protein, 7 aa, synthetic construct
RGDIQGN

SEQ ID NO: 14651 - protein, 7 aa, synthetic construct
RGDIQVH

SEQ ID NO: 14652 - protein, 7 aa, synthetic construct
RGDIRTL

SEQ ID NO: 14653 - protein, 7 aa, synthetic construct
RGDITIR

SEQ ID NO: 14654 - protein, 7 aa, synthetic construct
RGDITLK

SEQ ID NO: 14655 - protein, 7 aa, synthetic construct
RGDIVND

SEQ ID NO: 14656 - protein, 7 aa, synthetic construct
RGDIVRR

SEQ ID NO: 14657 - protein, 7 aa, synthetic construct
RGDKASE

SEQ ID NO: 14658 - protein, 7 aa, synthetic construct
RGDKDAL

SEQ ID NO: 14659 - protein, 7 aa, synthetic construct
RGDKENI

SEQ ID NO: 14660 - protein, 7 aa, synthetic construct
RGDKETH

SEQ ID NO: 14661 - protein, 7 aa, synthetic construct
RGDKEVV

SEQ ID NO: 14662 - protein, 7 aa, synthetic construct
RGDKFGK

SEQ ID NO: 14663 - protein, 7 aa, synthetic construct
RGDKFRT

SEQ ID NO: 14664 - protein, 7 aa, synthetic construct
RGDKGAH

SEQ ID NO: 14665 - protein, 7 aa, synthetic construct
RGDKGVG

SEQ ID NO: 14666 - protein, 7 aa, synthetic construct
RGDKIFR

SEQ ID NO: 14667 - protein, 7 aa, synthetic construct
RGDKKAS

SEQ ID NO: 14668 - protein, 7 aa, synthetic construct
RGDKLAR

SEQ ID NO: 14669 - protein, 7 aa, synthetic construct
RGDKLKV

SEQ ID NO: 14670 - protein, 7 aa, synthetic construct
RGDKLQV

SEQ ID NO: 14671 - protein, 7 aa, synthetic construct
RGDKNGH

SEQ ID NO: 14672 - protein, 7 aa, synthetic construct
RGDKTIL

SEQ ID NO: 14673 - protein, 7 aa, synthetic construct
RGDKVEH

SEQ ID NO: 14674 - protein, 7 aa, synthetic construct
RGDKVRN

SEQ ID NO: 14675 - protein, 7 aa, synthetic construct
RGDLAHE

SEQ ID NO: 14676 - protein, 7 aa, synthetic construct
RGDLATQ

SEQ ID NO: 14677 - protein, 7 aa, synthetic construct
RGDLDIT

SEQ ID NO: 14678 - protein, 7 aa, synthetic construct
RGDLFFH

SEQ ID NO: 14679 - protein, 7 aa, synthetic construct
RGDLGHA

SEQ ID NO: 14680 - protein, 7 aa, synthetic construct
RGDLGKT

SEQ ID NO: 14681 - protein, 7 aa, synthetic construct
RGDLHAS

SEQ ID NO: 14682 - protein, 7 aa, synthetic construct
RGDLHNV

SEQ ID NO: 14683 - protein, 7 aa, synthetic construct
RGDLIEK

SEQ ID NO: 14684 - protein, 7 aa, synthetic construct
RGDLILI

SEQ ID NO: 14685 - protein, 7 aa, synthetic construct
RGDLINA

SEQ ID NO: 14686 - protein, 7 aa, synthetic construct
RGDASQI

SEQ ID NO: 14687 - protein, 7 aa, synthetic construct
RGDLLKI

SEQ ID NO: 14688 - protein, 7 aa, synthetic construct
RGDLLLI

SEQ ID NO: 14689 - protein, 7 aa, synthetic construct
RGDLSNK

SEQ ID NO: 14690 - protein, 7 aa, synthetic construct
RGDLTAR

SEQ ID NO: 14691 - protein, 7 aa, synthetic construct
RGDLVAI

SEQ ID NO: 14692 - protein, 7 aa, synthetic construct
RGDLVIH

SEQ ID NO: 14693 - protein, 7 aa, synthetic construct
RGDLVVG

SEQ ID NO: 14694 - protein, 7 aa, synthetic construct
RGDNAAK

SEQ ID NO: 14695 - protein, 7 aa, synthetic construct
RGDNAHA

SEQ ID NO: 14696 - protein, 7 aa, synthetic construct
RGDNDFV

SEQ ID NO: 14697 - protein, 7 aa, synthetic construct
RGDNDKG

SEQ ID NO: 14698 - protein, 7 aa, synthetic construct
RGDNDLR

SEQ ID NO: 14699 - protein, 7 aa, synthetic construct
RGDNDTV

SEQ ID NO: 14700 - protein, 7 aa, synthetic construct
RGDNFFK

SEQ ID NO: 14701 - protein, 7 aa, synthetic construct
RGDNGKN

SEQ ID NO: 14702 - protein, 7 aa, synthetic construct
RGDNGSR

SEQ ID NO: 14703 - protein, 7 aa, synthetic construct
RGDNHFI

SEQ ID NO: 14704 - protein, 7 aa, synthetic construct
RGDNIKE

SEQ ID NO: 14705 - protein, 7 aa, synthetic construct
RGDNISL

SEQ ID NO: 14706 - protein, 7 aa, synthetic construct
RGDNKHT

SEQ ID NO: 14707 - protein, 7 aa, synthetic construct
RGDNLFQ

SEQ ID NO: 14708 - protein, 7 aa, synthetic construct
RGDNNNA

SEQ ID NO: 14709 - protein, 7 aa, synthetic construct
RGDNQFI

SEQ ID NO: 14710 - protein, 7 aa, synthetic construct
RGDNQGS

SEQ ID NO: 14711 - protein, 7 aa, synthetic construct
RGDAAEE

SEQ ID NO: 14712 - protein, 7 aa, synthetic construct
RGDNSHK

SEQ ID NO: 14713 - protein, 7 aa, synthetic construct
RGDNSKF

SEQ ID NO: 14714 - protein, 7 aa, synthetic construct
RGDNSNF

SEQ ID NO: 14715 - protein, 7 aa, synthetic construct
RGDNSVQ

SEQ ID NO: 14716 - protein, 7 aa, synthetic construct
RGDNTHQ

SEQ ID NO: 14717 - protein, 7 aa, synthetic construct
RGDQAHA

SEQ ID NO: 14718 - protein, 7 aa, synthetic construct
RGDQDSI

SEQ ID NO: 14719 - protein, 7 aa, synthetic construct
RGDQDSL

SEQ ID NO: 14720 - protein, 7 aa, synthetic construct
RGDQGHR

SEQ ID NO: 14721 - protein, 7 aa, synthetic construct
RGDQHRH

SEQ ID NO: 14722 - protein, 7 aa, synthetic construct
RGDQIGS

SEQ ID NO: 14723 - protein, 7 aa, synthetic construct
RGDQIQH

SEQ ID NO: 14724 - protein, 7 aa, synthetic construct
RGDQKFD

SEQ ID NO: 14725 - protein, 7 aa, synthetic construct
RGDQKIF

SEQ ID NO: 14726 - protein, 7 aa, synthetic construct
RGDQKRQ

SEQ ID NO: 14727 - protein, 7 aa, synthetic construct
RGDQQRD

SEQ ID NO: 14728 - protein, 7 aa, synthetic construct
RGDQQSK

SEQ ID NO: 14729 - protein, 7 aa, synthetic construct
RGDQTVF

SEQ ID NO: 14730 - protein, 7 aa, synthetic construct
RGDQVTT

SEQ ID NO: 14731 - protein, 7 aa, synthetic construct
RGDRAGE

SEQ ID NO: 14732 - protein, 7 aa, synthetic construct
RGDRFKN

SEQ ID NO: 14733 - protein, 7 aa, synthetic construct
RGDRFQF

SEQ ID NO: 14734 - protein, 7 aa, synthetic construct
RGDRFVR

SEQ ID NO: 14735 - protein, 7 aa, synthetic construct
RGDRHIQ

SEQ ID NO: 14736 - protein, 7 aa, synthetic construct
RGDRNAD

SEQ ID NO: 14737 - protein, 7 aa, synthetic construct
RGDRNEH

SEQ ID NO: 14738 - protein, 7 aa, synthetic construct
RGDRNRD

SEQ ID NO: 14739 - protein, 7 aa, synthetic construct
RGDRRLN

SEQ ID NO: 14740 - protein, 7 aa, synthetic construct
RGDRRNN

SEQ ID NO: 14741 - protein, 7 aa, synthetic construct
RGDRVEN

SEQ ID NO: 14742 - protein, 7 aa, synthetic construct
RGDSDQV

SEQ ID NO: 14743 - protein, 7 aa, synthetic construct
RGDSDST

SEQ ID NO: 14744 - protein, 7 aa, synthetic construct
RGDSFFF

SEQ ID NO: 14745 - protein, 7 aa, synthetic construct
RGDSFFR

SEQ ID NO: 14746 - protein, 7 aa, synthetic construct
RGDSFGV

SEQ ID NO: 14747 - protein, 7 aa, synthetic construct
RGDSFQK

SEQ ID NO: 14748 - protein, 7 aa, synthetic construct
RGDSFVI

SEQ ID NO: 14749 - protein, 7 aa, synthetic construct
RGDSFVV

SEQ ID NO: 14750 - protein, 7 aa, synthetic construct
RGDSGKR

SEQ ID NO: 14751 - protein, 7 aa, synthetic construct
RGDSGSR

SEQ ID NO: 14752 - protein, 7 aa, synthetic construct
RGDSIET

SEQ ID NO: 14753 - protein, 7 aa, synthetic construct
RGDSKAT

SEQ ID NO: 14754 - protein, 7 aa, synthetic construct
RGDSLQT

SEQ ID NO: 14755 - protein, 7 aa, synthetic construct
RGDSNFH

SEQ ID NO: 14756 - protein, 7 aa, synthetic construct
RGDDGER

SEQ ID NO: 14757 - protein, 7 aa, synthetic construct
RGDSTFF

SEQ ID NO: 14758 - protein, 7 aa, synthetic construct
RGDSTTG

SEQ ID NO: 14759 - protein, 7 aa, synthetic construct
RGDTAVR

SEQ ID NO: 14760 - protein, 7 aa, synthetic construct
RGDTDII

SEQ ID NO: 14761 - protein, 7 aa, synthetic construct
RGDTHFV

SEQ ID NO: 14762 - protein, 7 aa, synthetic construct
RGDTHGF

SEQ ID NO: 14763 - protein, 7 aa, synthetic construct
RGDTHHA

SEQ ID NO: 14764 - protein, 7 aa, synthetic construct
RGDTHIL

SEQ ID NO: 14765 - protein, 7 aa, synthetic construct
RGDTIIE

SEQ ID NO: 14766 - protein, 7 aa, synthetic construct
RGDTIKK

SEQ ID NO: 14767 - protein, 7 aa, synthetic construct
RGDDHFA

SEQ ID NO: 14768 - protein, 7 aa, synthetic construct
RGDTKDR

SEQ ID NO: 14769 - protein, 7 aa, synthetic construct
RGDDHGS

SEQ ID NO: 14770 - protein, 7 aa, synthetic construct
RGDTLVK

SEQ ID NO: 14771 - protein, 7 aa, synthetic construct
RGDTQHR

SEQ ID NO: 14772 - protein, 7 aa, synthetic construct
RGDTQTL

SEQ ID NO: 14773 - protein, 7 aa, synthetic construct
RGDTRDS

SEQ ID NO: 14774 - protein, 7 aa, synthetic construct
RGDDHNN

SEQ ID NO: 14775 - protein, 7 aa, synthetic construct
RGDDHSQ

SEQ ID NO: 14776 - protein, 7 aa, synthetic construct
RGDTVTH

SEQ ID NO: 14777 - protein, 7 aa, synthetic construct
RGDVDLV

SEQ ID NO: 14778 - protein, 7 aa, synthetic construct
RGDVEIG

SEQ ID NO: 14779 - protein, 7 aa, synthetic construct
RGDVELT

SEQ ID NO: 14780 - protein, 7 aa, synthetic construct
RGDVFST

SEQ ID NO: 14781 - protein, 7 aa, synthetic construct
RGDVFVI

SEQ ID NO: 14782 - protein, 7 aa, synthetic construct
RGDVFVL

SEQ ID NO: 14783 - protein, 7 aa, synthetic construct
RGDVKLK

SEQ ID NO: 14784 - protein, 7 aa, synthetic construct
RGDVLAL

SEQ ID NO: 14785 - protein, 7 aa, synthetic construct
RGDVLIL

SEQ ID NO: 14786 - protein, 7 aa, synthetic construct
RGDVLNV

SEQ ID NO: 14787 - protein, 7 aa, synthetic construct
RGDVLTS

SEQ ID NO: 14788 - protein, 7 aa, synthetic construct
RGDVRGE

SEQ ID NO: 14789 - protein, 7 aa, synthetic construct
RGDVRRF

SEQ ID NO: 14790 - protein, 7 aa, synthetic construct
RGDVSFV

SEQ ID NO: 14791 - protein, 7 aa, synthetic construct
RGDVSVF

SEQ ID NO: 14792 - protein, 7 aa, synthetic construct
RGDVTNT

SEQ ID NO: 14793 - protein, 7 aa, synthetic construct
RGDVTSH

SEQ ID NO: 14794 - protein, 7 aa, synthetic construct
RGDVVVK

SEQ ID NO: 14795 - protein, 7 aa, synthetic construct
RGDAEFR

SEQ ID NO: 14796 - protein, 7 aa, synthetic construct
RGDDRFQ

SEQ ID NO: 14797 - protein, 7 aa, synthetic construct
RGDDRKH

SEQ ID NO: 14798 - protein, 7 aa, synthetic construct
RGDDSFF

SEQ ID NO: 14799 - protein, 7 aa, synthetic construct
RGDDSGA

SEQ ID NO: 14800 - protein, 7 aa, synthetic construct
RGDDTRR

SEQ ID NO: 14801 - protein, 7 aa, synthetic construct
RGDDVRI

SEQ ID NO: 14802 - protein, 7 aa, synthetic construct
RGDDVSL

SEQ ID NO: 14803 - protein, 7 aa, synthetic construct
RGDEGVS

SEQ ID NO: 14804 - protein, 7 aa, synthetic construct
RGDEIRQ

SEQ ID NO: 14805 - protein, 7 aa, synthetic construct
RGDENNT

SEQ ID NO: 14806 - protein, 7 aa, synthetic construct
RGDERAF

SEQ ID NO: 14807 - protein, 7 aa, synthetic construct
RGDERHK

SEQ ID NO: 14808 - protein, 7 aa, synthetic construct
RGDESTA

SEQ ID NO: 14809 - skipped

SEQ ID NO: 14810 - protein, 7 aa, synthetic construct
RGDFAAF

SEQ ID NO: 14811 - protein, 7 aa, synthetic construct
RGDFANK

SEQ ID NO: 14812 - protein, 7 aa, synthetic construct
RGDFANV

SEQ ID NO: 14813 - protein, 7 aa, synthetic construct
RGDFEFV

SEQ ID NO: 14814 - protein, 7 aa, synthetic construct
RGDFFFD

SEQ ID NO: 14815 - protein, 7 aa, synthetic construct
RGDFFKI

SEQ ID NO: 14816 - protein, 7 aa, synthetic construct
RGDFFLL

SEQ ID NO: 14817 - protein, 7 aa, synthetic construct
RGDFFVD

SEQ ID NO: 14818 - protein, 7 aa, synthetic construct
RGDFGFS

SEQ ID NO: 14819 - protein, 7 aa, synthetic construct
RGDFGNG

SEQ ID NO: 14820 - protein, 7 aa, synthetic construct
RGDAGVS

SEQ ID NO: 14821 - protein, 7 aa, synthetic construct
RGDFHLV

SEQ ID NO: 14822 - protein, 7 aa, synthetic construct
RGDFHQI

SEQ ID NO: 14823 - protein, 7 aa, synthetic construct
RGDFIEH

SEQ ID NO: 14824 - protein, 7 aa, synthetic construct
RGDFIFQ

SEQ ID NO: 14825 - protein, 7 aa, synthetic construct
RGDFIIV

SEQ ID NO: 14826 - protein, 7 aa, synthetic construct
RGDFKAS

SEQ ID NO: 14827 - protein, 7 aa, synthetic construct
RGDFKTE

SEQ ID NO: 14828 - protein, 7 aa, synthetic construct
RGDFNGL

SEQ ID NO: 14829 - protein, 7 aa, synthetic construct
RGDFQQR

SEQ ID NO: 14830 - protein, 7 aa, synthetic construct
RGDFRDL

SEQ ID NO: 14831 - protein, 7 aa, synthetic construct
RGDFRKF

SEQ ID NO: 14832 - protein, 7 aa, synthetic construct
RGDFSAA

SEQ ID NO: 14833 - protein, 7 aa, synthetic construct
RGDFSFL

SEQ ID NO: 14834 - protein, 7 aa, synthetic construct
RGDFSIL

SEQ ID NO: 14835 - protein, 7 aa, synthetic construct
RGDFVFH

SEQ ID NO: 14836 - protein, 7 aa, synthetic construct
RGDGDQS

SEQ ID NO: 14837 - protein, 7 aa, synthetic construct
RGDGFHF

SEQ ID NO: 14838 - protein, 7 aa, synthetic construct
RGDGFHV

SEQ ID NO: 14839 - protein, 7 aa, synthetic construct
RGDAIHI

SEQ ID NO: 14840 - protein, 7 aa, synthetic construct
RGDGGKS

SEQ ID NO: 14841 - protein, 7 aa, synthetic construct
RGDGKEN

SEQ ID NO: 14842 - protein, 7 aa, synthetic construct
RGDGKGS

SEQ ID NO: 14843 - protein, 7 aa, synthetic construct
RGDGKTF

SEQ ID NO: 14844 - protein, 7 aa, synthetic construct
RGDGLNI

SEQ ID NO: 14845 - protein, 7 aa, synthetic construct
RGDGNSE

SEQ ID NO: 14846 - protein, 7 aa, synthetic construct
RGDGSER

SEQ ID NO: 14847 - protein, 7 aa, synthetic construct
RGDAKFH

SEQ ID NO: 14848 - protein, 7 aa, synthetic construct
RGDGSFV

SEQ ID NO: 14849 - protein, 7 aa, synthetic construct
RGDGTDL

SEQ ID NO: 14850 - protein, 7 aa, synthetic construct
RGDGVNN

SEQ ID NO: 14851 - protein, 7 aa, synthetic construct
RGDHDGT

SEQ ID NO: 14852 - protein, 7 aa, synthetic construct
RGDHDIH

SEQ ID NO: 14853 - protein, 7 aa, synthetic construct
RGDHEKK

SEQ ID NO: 14854 - protein, 7 aa, synthetic construct
RGDHGHH

SEQ ID NO: 14855 - protein, 7 aa, synthetic construct
RGDHGHR

SEQ ID NO: 14856 - protein, 7 aa, synthetic construct
RGDHGRE

SEQ ID NO: 14857 - protein, 7 aa, synthetic construct
RGDHGRG

SEQ ID NO: 14858 - protein, 7 aa, synthetic construct
RGDAASE

SEQ ID NO: 14859 - protein, 7 aa, synthetic construct
RGDHKFE

SEQ ID NO: 14860 - protein, 7 aa, synthetic construct
RGDHLFV

SEQ ID NO: 14861 - protein, 7 aa, synthetic construct
RGDHNNV

SEQ ID NO: 14862 - protein, 7 aa, synthetic construct
RGDHQQK

SEQ ID NO: 14863 - protein, 7 aa, synthetic construct
RGDHQTQ

SEQ ID NO: 14864 - protein, 7 aa, synthetic construct
RGDHRLV

SEQ ID NO: 14865 - protein, 7 aa, synthetic construct
RGDALRK

SEQ ID NO: 14866 - protein, 7 aa, synthetic construct
RGDHSQS

SEQ ID NO: 14867 - protein, 7 aa, synthetic construct
RGDHTNF

SEQ ID NO: 14868 - protein, 7 aa, synthetic construct
RGDHVTQ

SEQ ID NO: 14869 - protein, 7 aa, synthetic construct
RGDANAI

SEQ ID NO: 14870 - protein, 7 aa, synthetic construct
RGDIAKA

SEQ ID NO: 14871 - protein, 7 aa, synthetic construct
RGDIARF

SEQ ID NO: 14872 - protein, 7 aa, synthetic construct
RGDIEFH

SEQ ID NO: 14873 - protein, 7 aa, synthetic construct
RGDIEHK

SEQ ID NO: 14874 - protein, 7 aa, synthetic construct
RGDIEQH

SEQ ID NO: 14875 - protein, 7 aa, synthetic construct
RGDIETQ

SEQ ID NO: 14876 - protein, 7 aa, synthetic construct
RGDIGGS

SEQ ID NO: 14877 - protein, 7 aa, synthetic construct
RGDIHGH

SEQ ID NO: 14878 - protein, 7 aa, synthetic construct
RGDIIER

SEQ ID NO: 14879 - protein, 7 aa, synthetic construct
RGDIINI

SEQ ID NO: 14880 - protein, 7 aa, synthetic construct
RGDIITL

SEQ ID NO: 14881 - protein, 7 aa, synthetic construct
RGDIIVK

SEQ ID NO: 14882 - protein, 7 aa, synthetic construct
RGDIKHV

SEQ ID NO: 14883 - protein, 7 aa, synthetic construct
RGDIKKT

SEQ ID NO: 14884 - protein, 7 aa, synthetic construct
RGDILFS

SEQ ID NO: 14885 - protein, 7 aa, synthetic construct
RGDILSQ

SEQ ID NO: 14886 - protein, 7 aa, synthetic construct
RGDIQIR

SEQ ID NO: 14887 - protein, 7 aa, synthetic construct
RGDIQKT

SEQ ID NO: 14888 - protein, 7 aa, synthetic construct
RGDIQSQ

SEQ ID NO: 14889 - protein, 7 aa, synthetic construct
RGDAQHK

SEQ ID NO: 14890 - protein, 7 aa, synthetic construct
RGDIVNH

SEQ ID NO: 14891 - protein, 7 aa, synthetic construct
RGDIVTV

SEQ ID NO: 14892 - protein, 7 aa, synthetic construct
RGDIVVN

SEQ ID NO: 14893 - protein, 7 aa, synthetic construct
RGDKAAH

SEQ ID NO: 14894 - protein, 7 aa, synthetic construct
RGDKAKS

SEQ ID NO: 14895 - protein, 7 aa, synthetic construct
RGDKARR

SEQ ID NO: 14896 - protein, 7 aa, synthetic construct
RGDKASQ

SEQ ID NO: 14897 - protein, 7 aa, synthetic construct
RGDKDVI

SEQ ID NO: 14898 - protein, 7 aa, synthetic construct
RGDKERF

SEQ ID NO: 14899 - protein, 7 aa, synthetic construct
RGDKFRN

SEQ ID NO: 14900 - protein, 7 aa, synthetic construct
RGDKGFH

SEQ ID NO: 14901 - protein, 7 aa, synthetic construct
RGDKGGL

SEQ ID NO: 14902 - protein, 7 aa, synthetic construct
RGDKGHG

SEQ ID NO: 14903 - protein, 7 aa, synthetic construct
RGDKGKA

SEQ ID NO: 14904 - protein, 7 aa, synthetic construct
RGDKHER

SEQ ID NO: 14905 - protein, 7 aa, synthetic construct
RGDKIIK

SEQ ID NO: 14906 - protein, 7 aa, synthetic construct
RGDKKFE

SEQ ID NO: 14907 - protein, 7 aa, synthetic construct
RGDKLDI

SEQ ID NO: 14908 - protein, 7 aa, synthetic construct
RGDKLES

SEQ ID NO: 14909 - protein, 7 aa, synthetic construct
RGDKLFL

SEQ ID NO: 14910 - protein, 7 aa, synthetic construct
RGDKNGN

SEQ ID NO: 14911 - protein, 7 aa, synthetic construct
RGDARKD

SEQ ID NO: 14912 - protein, 7 aa, synthetic construct
RGDKQLV

SEQ ID NO: 14913 - protein, 7 aa, synthetic construct
RGDKQRL

SEQ ID NO: 14914 - protein, 7 aa, synthetic construct
RGDKSNH

SEQ ID NO: 14915 - protein, 7 aa, synthetic construct
RGDKSRL

SEQ ID NO: 14916 - protein, 7 aa, synthetic construct
RGDKSTS

SEQ ID NO: 14917 - protein, 7 aa, synthetic construct
RGDKVHS

SEQ ID NO: 14918 - protein, 7 aa, synthetic construct
RGDKVVN

SEQ ID NO: 14919 - protein, 7 aa, synthetic construct
RGDLASK

SEQ ID NO: 14920 - protein, 7 aa, synthetic construct
RGDLEEN

SEQ ID NO: 14921 - protein, 7 aa, synthetic construct
RGDLFLT

SEQ ID NO: 14922 - protein, 7 aa, synthetic construct
RGDASHK

SEQ ID NO: 14923 - protein, 7 aa, synthetic construct
RGDLGDK

SEQ ID NO: 14924 - protein, 7 aa, synthetic construct
RGDLGQV

SEQ ID NO: 14925 - protein, 7 aa, synthetic construct
RGDLHAH

SEQ ID NO: 14926 - protein, 7 aa, synthetic construct
RGDLIAV

SEQ ID NO: 14927 - protein, 7 aa, synthetic construct
RGDLIDK

SEQ ID NO: 14928 - protein, 7 aa, synthetic construct
RGDLKGE

SEQ ID NO: 14929 - protein, 7 aa, synthetic construct
RGDLLFF

SEQ ID NO: 14930 - protein, 7 aa, synthetic construct
RGDLLVV

SEQ ID NO: 14931 - protein, 7 aa, synthetic construct
RGDLNHL

SEQ ID NO: 14932 - protein, 7 aa, synthetic construct
RGDLQAQ

SEQ ID NO: 14933 - protein, 7 aa, synthetic construct
RGDLQEF

SEQ ID NO: 14934 - protein, 7 aa, synthetic construct
RGDLQEV

SEQ ID NO: 14935 - protein, 7 aa, synthetic construct
RGDLQKI

SEQ ID NO: 14936 - protein, 7 aa, synthetic construct
RGDLQTK

SEQ ID NO: 14937 - protein, 7 aa, synthetic construct
RGDLREF

SEQ ID NO: 14938 - protein, 7 aa, synthetic construct
RGDLRFS

SEQ ID NO: 14939 - protein, 7 aa, synthetic construct
RGDLRSF

SEQ ID NO: 14940 - protein, 7 aa, synthetic construct
RGDLTQV

SEQ ID NO: 14941 - protein, 7 aa, synthetic construct
RGDATHS

SEQ ID NO: 14942 - protein, 7 aa, synthetic construct
RGDLVSN

SEQ ID NO: 14943 - protein, 7 aa, synthetic construct
RGDNADI

SEQ ID NO: 14944 - protein, 7 aa, synthetic construct
RGDNANH

SEQ ID NO: 14945 - protein, 7 aa, synthetic construct
RGDNDFK

SEQ ID NO: 14946 - protein, 7 aa, synthetic construct
RGDNDVK

SEQ ID NO: 14947 - protein, 7 aa, synthetic construct
RGDATTI

SEQ ID NO: 14948 - protein, 7 aa, synthetic construct
RGDNGVK

SEQ ID NO: 14949 - protein, 7 aa, synthetic construct
RGDNKGV

SEQ ID NO: 14950 - protein, 7 aa, synthetic construct
RGDNKHF

SEQ ID NO: 14951 - protein, 7 aa, synthetic construct
RGDNLGF

SEQ ID NO: 14952 - protein, 7 aa, synthetic construct
RGDNLHK

SEQ ID NO: 14953 - protein, 7 aa, synthetic construct
RGDNLHQ

SEQ ID NO: 14954 - protein, 7 aa, synthetic construct
RGDNLRQ

SEQ ID NO: 14955 - protein, 7 aa, synthetic construct
RGDNNRH

SEQ ID NO: 14956 - protein, 7 aa, synthetic construct
RGDNQAK

SEQ ID NO: 14957 - protein, 7 aa, synthetic construct
RGDNRSR

SEQ ID NO: 14958 - protein, 7 aa, synthetic construct
RGDNSFN

SEQ ID NO: 14959 - protein, 7 aa, synthetic construct
RGDNSFV

SEQ ID NO: 14960 - protein, 7 aa, synthetic construct
RGDNSRE

SEQ ID NO: 14961 - protein, 7 aa, synthetic construct
RGDNSVV

SEQ ID NO: 14962 - protein, 7 aa, synthetic construct
RGDNTEL

SEQ ID NO: 14963 - protein, 7 aa, synthetic construct
RGDNVAK

SEQ ID NO: 14964 - protein, 7 aa, synthetic construct
RGDNVEF

SEQ ID NO: 14965 - protein, 7 aa, synthetic construct
RGDNVFD

SEQ ID NO: 14966 - protein, 7 aa, synthetic construct
RGDNVHF

SEQ ID NO: 14967 - protein, 7 aa, synthetic construct
RGDQADA

SEQ ID NO: 14968 - protein, 7 aa, synthetic construct
RGDQAGS

SEQ ID NO: 14969 - protein, 7 aa, synthetic construct
RGDQDRV

SEQ ID NO: 14970 - protein, 7 aa, synthetic construct
RGDQEQA

SEQ ID NO: 14971 - protein, 7 aa, synthetic construct
RGDDAGE

SEQ ID NO: 14972 - protein, 7 aa, synthetic construct
RGDQETI

SEQ ID NO: 14973 - protein, 7 aa, synthetic construct
RGDQFKA

SEQ ID NO: 14974 - protein, 7 aa, synthetic construct
RGDQFNH

SEQ ID NO: 14975 - protein, 7 aa, synthetic construct
RGDQGTQ

SEQ ID NO: 14976 - protein, 7 aa, synthetic construct
RGDQLFA

SEQ ID NO: 14977 - protein, 7 aa, synthetic construct
RGDDAVQ

SEQ ID NO: 14978 - protein, 7 aa, synthetic construct
RGDDDAS

SEQ ID NO: 14979 - protein, 7 aa, synthetic construct
RGDQQQR

SEQ ID NO: 14980 - protein, 7 aa, synthetic construct
RGDQREV

SEQ ID NO: 14981 - protein, 7 aa, synthetic construct
RGDQRLL

SEQ ID NO: 14982 - protein, 7 aa, synthetic construct
RGDQSAR

SEQ ID NO: 14983 - protein, 7 aa, synthetic construct
RGDQTQI

SEQ ID NO: 14984 - protein, 7 aa, synthetic construct
RGDQTSD

SEQ ID NO: 14985 - protein, 7 aa, synthetic construct
RGDQVKA

SEQ ID NO: 14986 - protein, 7 aa, synthetic construct
RGDQVRS

SEQ ID NO: 14987 - protein, 7 aa, synthetic construct
RGDRART

SEQ ID NO: 14988 - protein, 7 aa, synthetic construct
RGDRDFI

SEQ ID NO: 14989 - protein, 7 aa, synthetic construct
RGDRDIA

SEQ ID NO: 14990 - protein, 7 aa, synthetic construct
RGDREGI

SEQ ID NO: 14991 - protein, 7 aa, synthetic construct
RGDRGLF

SEQ ID NO: 14992 - protein, 7 aa, synthetic construct
RGDRHNE

SEQ ID NO: 14993 - protein, 7 aa, synthetic construct
RGDRIHI

SEQ ID NO: 14994 - protein, 7 aa, synthetic construct
RGDDEHN

SEQ ID NO: 14995 - protein, 7 aa, synthetic construct
RGDDENN

SEQ ID NO: 14996 - protein, 7 aa, synthetic construct
RGDRRVS

SEQ ID NO: 14997 - protein, 7 aa, synthetic construct
RGDDERK

SEQ ID NO: 14998 - protein, 7 aa, synthetic construct
RGDRVTA

SEQ ID NO: 14999 - protein, 7 aa, synthetic construct
RGDSAEH

SEQ ID NO: 15000 - protein, 7 aa, synthetic construct
RGDSAQH

SEQ ID NO: 15001 - protein, 7 aa, synthetic construct
RGDSEAN

SEQ ID NO: 15002 - protein, 7 aa, synthetic construct
RGDSGHS

SEQ ID NO: 15003 - protein, 7 aa, synthetic construct
RGDSHKD

SEQ ID NO: 15004 - protein, 7 aa, synthetic construct
RGDSIND

SEQ ID NO: 15005 - protein, 7 aa, synthetic construct
RGDSKRS

SEQ ID NO: 15006 - protein, 7 aa, synthetic construct
RGDSLKE

SEQ ID NO: 15007 - protein, 7 aa, synthetic construct
RGDSNFV

SEQ ID NO: 15008 - protein, 7 aa, synthetic construct
RGDSNSE

SEQ ID NO: 15009 - protein, 7 aa, synthetic construct
RGDSNTR

SEQ ID NO: 15010 - protein, 7 aa, synthetic construct
RGDSQGI

SEQ ID NO: 15011 - protein, 7 aa, synthetic construct
RGDSQHT

SEQ ID NO: 15012 - protein, 7 aa, synthetic construct
RGDSREI

SEQ ID NO: 15013 - protein, 7 aa, synthetic construct
RGDSSFK

SEQ ID NO: 15014 - protein, 7 aa, synthetic construct
RGDSSFS

SEQ ID NO: 15015 - protein, 7 aa, synthetic construct
RGDSSIL

SEQ ID NO: 15016 - protein, 7 aa, synthetic construct
RGDSTEG

SEQ ID NO: 15017 - protein, 7 aa, synthetic construct
RGDSVAF

SEQ ID NO: 15018 - protein, 7 aa, synthetic construct
RGDSVEV

SEQ ID NO: 15019 - protein, 7 aa, synthetic construct
RGDTANT

SEQ ID NO: 15020 - protein, 7 aa, synthetic construct
RGDTEHE

SEQ ID NO: 15021 - protein, 7 aa, synthetic construct
RGDTGIN

SEQ ID NO: 15022 - protein, 7 aa, synthetic construct
RGDTGRF

SEQ ID NO: 15023 - protein, 7 aa, synthetic construct
RGDTHHN

SEQ ID NO: 15024 - protein, 7 aa, synthetic construct
RGDTKAI

SEQ ID NO: 15025 - protein, 7 aa, synthetic construct
RGDTKDL

SEQ ID NO: 15026 - protein, 7 aa, synthetic construct
RGDTQLV

SEQ ID NO: 15027 - protein, 7 aa, synthetic construct
RGDTQTQ

SEQ ID NO: 15028 - protein, 7 aa, synthetic construct
RGDTRGG

SEQ ID NO: 15029 - protein, 7 aa, synthetic construct
RGDTSGV

SEQ ID NO: 15030 - protein, 7 aa, synthetic construct
RGDTTVV

SEQ ID NO: 15031 - protein, 7 aa, synthetic construct
RGDTVEI

SEQ ID NO: 15032 - protein, 7 aa, synthetic construct
RGDTVHF

SEQ ID NO: 15033 - protein, 7 aa, synthetic construct
RGDVATF

SEQ ID NO: 15034 - protein, 7 aa, synthetic construct
RGDVFLL

SEQ ID NO: 15035 - protein, 7 aa, synthetic construct
RGDDIKE

SEQ ID NO: 15036 - protein, 7 aa, synthetic construct
RGDVHGN

SEQ ID NO: 15037 - protein, 7 aa, synthetic construct
RGDVHRS

SEQ ID NO: 15038 - protein, 7 aa, synthetic construct
RGDVKDN

SEQ ID NO: 15039 - protein, 7 aa, synthetic construct
RGDVKKN

SEQ ID NO: 15040 - protein, 7 aa, synthetic construct
RGDVKVH

SEQ ID NO: 15041 - protein, 7 aa, synthetic construct
RGDVLFD

SEQ ID NO: 15042 - protein, 7 aa, synthetic construct
RGDVNLT

SEQ ID NO: 15043 - protein, 7 aa, synthetic construct
RGDVRDN

SEQ ID NO: 15044 - protein, 7 aa, synthetic construct
RGDVRIG

SEQ ID NO: 15045 - protein, 7 aa, synthetic construct
RGDVRQK

SEQ ID NO: 15046 - protein, 7 aa, synthetic construct
RGDDKII

SEQ ID NO: 15047 - protein, 7 aa, synthetic construct
RGDVVGS

SEQ ID NO: 15048 - protein, 7 aa, synthetic construct
RGDDLST

SEQ ID NO: 15049 - protein, 7 aa, synthetic construct
RGDDNEV

SEQ ID NO: 15050 - protein, 7 aa, synthetic construct
RGDDQGF

SEQ ID NO: 15051 - protein, 7 aa, synthetic construct
RGDDQKL

SEQ ID NO: 15052 - protein, 7 aa, synthetic construct
RGDDQVI

SEQ ID NO: 15053 - protein, 7 aa, synthetic construct
RGDDRVI

SEQ ID NO: 15054 - protein, 7 aa, synthetic construct
RGDDSKQ

SEQ ID NO: 15055 - protein, 7 aa, synthetic construct
RGDDSQK

SEQ ID NO: 15056 - protein, 7 aa, synthetic construct
RGDDSVF

SEQ ID NO: 15057 - protein, 7 aa, synthetic construct
RGDEASL

SEQ ID NO: 15058 - protein, 7 aa, synthetic construct
RGDEDSD

SEQ ID NO: 15059 - protein, 7 aa, synthetic construct
RGDAFKQ

SEQ ID NO: 15060 - protein, 7 aa, synthetic construct
RGDAFNR

SEQ ID NO: 15061 - protein, 7 aa, synthetic construct
RGDEITK

SEQ ID NO: 15062 - protein, 7 aa, synthetic construct
RGDEKGQ

SEQ ID NO: 15063 - protein, 7 aa, synthetic construct
RGDELGT

SEQ ID NO: 15064 - protein, 7 aa, synthetic construct
RGDELTV

SEQ ID NO: 15065 - protein, 7 aa, synthetic construct
RGDERFS

SEQ ID NO: 15066 - protein, 7 aa, synthetic construct
RGDESKV

SEQ ID NO: 15067 - protein, 7 aa, synthetic construct
RGDESNV

SEQ ID NO: 15068 - protein, 7 aa, synthetic construct
RGDESSS

SEQ ID NO: 15069 - protein, 7 aa, synthetic construct
RGDEVHR

SEQ ID NO: 15070 - protein, 7 aa, synthetic construct
RGDFAET

SEQ ID NO: 15071 - protein, 7 aa, synthetic construct
RGDFFAV

SEQ ID NO: 15072 - protein, 7 aa, synthetic construct
RGDFFFQ

SEQ ID NO: 15073 - protein, 7 aa, synthetic construct
RGDFFHR

SEQ ID NO: 15074 - protein, 7 aa, synthetic construct
RGDFGEI

SEQ ID NO: 15075 - protein, 7 aa, synthetic construct
RGDAGTV

SEQ ID NO: 15076 - protein, 7 aa, synthetic construct
RGDFHGE

SEQ ID NO: 15077 - protein, 7 aa, synthetic construct
RGDFHTE

SEQ ID NO: 15078 - protein, 7 aa, synthetic construct
RGDAHER

SEQ ID NO: 15079 - protein, 7 aa, synthetic construct
RGDFLVT

SEQ ID NO: 15080 - protein, 7 aa, synthetic construct
RGDFQSF

SEQ ID NO: 15081 - protein, 7 aa, synthetic construct
RGDFQVI

SEQ ID NO: 15082 - protein, 7 aa, synthetic construct
RGDFRFE

SEQ ID NO: 15083 - protein, 7 aa, synthetic construct
RGDFRKS

SEQ ID NO: 15084 - protein, 7 aa, synthetic construct
RGDFSQI

SEQ ID NO: 15085 - protein, 7 aa, synthetic construct
RGDGDGN

SEQ ID NO: 15086 - protein, 7 aa, synthetic construct
RGDGEEN

SEQ ID NO: 15087 - protein, 7 aa, synthetic construct
RGDGEGN

SEQ ID NO: 15088 - protein, 7 aa, synthetic construct
RGDGFVF

SEQ ID NO: 15089 - protein, 7 aa, synthetic construct
RGDGGDR

SEQ ID NO: 15090 - protein, 7 aa, synthetic construct
RGDGGFV

SEQ ID NO: 15091 - protein, 7 aa, synthetic construct
RGDGGGG

SEQ ID NO: 15092 - protein, 7 aa, synthetic construct
RGDGGRQ

SEQ ID NO: 15093 - protein, 7 aa, synthetic construct
RGDGGSK

SEQ ID NO: 15094 - protein, 7 aa, synthetic construct
RGDGHHE

SEQ ID NO: 15095 - protein, 7 aa, synthetic construct
RGDGIQL

SEQ ID NO: 15096 - protein, 7 aa, synthetic construct
RGDGKIL

SEQ ID NO: 15097 - protein, 7 aa, synthetic construct
RGDGKRG

SEQ ID NO: 15098 - protein, 7 aa, synthetic construct
RGDGKSD

SEQ ID NO: 15099 - protein, 7 aa, synthetic construct
RGDGLHH

SEQ ID NO: 15100 - protein, 7 aa, synthetic construct
RGDGNLI

SEQ ID NO: 15101 - protein, 7 aa, synthetic construct
RGDGNSR

SEQ ID NO: 15102 - protein, 7 aa, synthetic construct
RGDGRAQ

SEQ ID NO: 15103 - protein, 7 aa, synthetic construct
RGDGTES

SEQ ID NO: 15104 - protein, 7 aa, synthetic construct
RGDGVFK

SEQ ID NO: 15105 - protein, 7 aa, synthetic construct
RGDGVGV

SEQ ID NO: 15106 - protein, 7 aa, synthetic construct
RGDGVKD

SEQ ID NO: 15107 - protein, 7 aa, synthetic construct
RGDHARH

SEQ ID NO: 15108 - protein, 7 aa, synthetic construct
RGDHEFQ

SEQ ID NO: 15109 - protein, 7 aa, synthetic construct
RGDAKQV

SEQ ID NO: 15110 - protein, 7 aa, synthetic construct
RGDHEHR

SEQ ID NO: 15111 - protein, 7 aa, synthetic construct
RGDHGRV

SEQ ID NO: 15112 - protein, 7 aa, synthetic construct
RGDHHGR

SEQ ID NO: 15113 - protein, 7 aa, synthetic construct
RGDHHHK

SEQ ID NO: 15114 - protein, 7 aa, synthetic construct
RGDHIRL

SEQ ID NO: 15115 - protein, 7 aa, synthetic construct
RGDHITV

SEQ ID NO: 15116 - protein, 7 aa, synthetic construct
RGDHLKA

SEQ ID NO: 15117 - protein, 7 aa, synthetic construct
RGDHQRT

SEQ ID NO: 15118 - protein, 7 aa, synthetic construct
RGDHRGH

SEQ ID NO: 15119 - protein, 7 aa, synthetic construct
RGDHRQN

SEQ ID NO: 15120 - protein, 7 aa, synthetic construct
RGDHSHQ

SEQ ID NO: 15121 - protein, 7 aa, synthetic construct
RGDHSVK

SEQ ID NO: 15122 - protein, 7 aa, synthetic construct
RGDHTAQ

SEQ ID NO: 15123 - protein, 7 aa, synthetic construct
RGDHTNT

SEQ ID NO: 15124 - protein, 7 aa, synthetic construct
RGDHVHE

SEQ ID NO: 15125 - protein, 7 aa, synthetic construct
RGDIATA

SEQ ID NO: 15126 - protein, 7 aa, synthetic construct
RGDIAVA

SEQ ID NO: 15127 - protein, 7 aa, synthetic construct
RGDIEGK

SEQ ID NO: 15128 - protein, 7 aa, synthetic construct
RGDIESI

SEQ ID NO: 15129 - protein, 7 aa, synthetic construct
RGDANGK

SEQ ID NO: 15130 - protein, 7 aa, synthetic construct
RGDIFFH

SEQ ID NO: 15131 - protein, 7 aa, synthetic construct
RGDAATV

SEQ ID NO: 15132 - protein, 7 aa, synthetic construct
RGDIFGV

SEQ ID NO: 15133 - protein, 7 aa, synthetic construct
RGDIGSV

SEQ ID NO: 15134 - protein, 7 aa, synthetic construct
RGDIHSF

SEQ ID NO: 15135 - protein, 7 aa, synthetic construct
RGDIIKD

SEQ ID NO: 15136 - protein, 7 aa, synthetic construct
RGDIKSQ

SEQ ID NO: 15137 - protein, 7 aa, synthetic construct
RGDILFL

SEQ ID NO: 15138 - protein, 7 aa, synthetic construct
RGDILLE

SEQ ID NO: 15139 - protein, 7 aa, synthetic construct
RGDILNV

SEQ ID NO: 15140 - protein, 7 aa, synthetic construct
RGDILSL

SEQ ID NO: 15141 - protein, 7 aa, synthetic construct
RGDINGK

SEQ ID NO: 15142 - protein, 7 aa, synthetic construct
RGDIQHV

SEQ ID NO: 15143 - protein, 7 aa, synthetic construct
RGDIQSV

SEQ ID NO: 15144 - protein, 7 aa, synthetic construct
RGDIRTA

SEQ ID NO: 15145 - protein, 7 aa, synthetic construct
RGDAQFK

SEQ ID NO: 15146 - protein, 7 aa, synthetic construct
RGDISIQ

SEQ ID NO: 15147 - protein, 7 aa, synthetic construct
RGDISSG

SEQ ID NO: 15148 - protein, 7 aa, synthetic construct
RGDISVF

SEQ ID NO: 15149 - protein, 7 aa, synthetic construct
RGDITIT

SEQ ID NO: 15150 - protein, 7 aa, synthetic construct
RGDKDHS

SEQ ID NO: 15151 - protein, 7 aa, synthetic construct
RGDKEEH

SEQ ID NO: 15152 - protein, 7 aa, synthetic construct
RGDKEIF

SEQ ID NO: 15153 - protein, 7 aa, synthetic construct
RGDKENV

SEQ ID NO: 15154 - protein, 7 aa, synthetic construct
RGDKGQL

SEQ ID NO: 15155 - protein, 7 aa, synthetic construct
RGDKGSE

SEQ ID NO: 15156 - protein, 7 aa, synthetic construct
RGDARAA

SEQ ID NO: 15157 - protein, 7 aa, synthetic construct
RGDKIRL

SEQ ID NO: 15158 - protein, 7 aa, synthetic construct
RGDKKDN

SEQ ID NO: 15159 - protein, 7 aa, synthetic construct
RGDKLAD

SEQ ID NO: 15160 - protein, 7 aa, synthetic construct
RGDKQKE

SEQ ID NO: 15161 - protein, 7 aa, synthetic construct
RGDKQRH

SEQ ID NO: 15162 - protein, 7 aa, synthetic construct
RGDKRSV

SEQ ID NO: 15163 - protein, 7 aa, synthetic construct
RGDKRTS

SEQ ID NO: 15164 - protein, 7 aa, synthetic construct
RGDARQH

SEQ ID NO: 15165 - protein, 7 aa, synthetic construct
RGDKVFQ

SEQ ID NO: 15166 - protein, 7 aa, synthetic construct
RGDKVTQ

SEQ ID NO: 15167 - protein, 7 aa, synthetic construct
RGDLEFN

SEQ ID NO: 15168 - protein, 7 aa, synthetic construct
RGDLERA

SEQ ID NO: 15169 - protein, 7 aa, synthetic construct
RGDLEVH

SEQ ID NO: 15170 - protein, 7 aa, synthetic construct
RGDLFAR

SEQ ID NO: 15171 - protein, 7 aa, synthetic construct
RGDLFDR

SEQ ID NO: 15172 - protein, 7 aa, synthetic construct
RGDLFHH

SEQ ID NO: 15173 - protein, 7 aa, synthetic construct
RGDLFSI

SEQ ID NO: 15174 - protein, 7 aa, synthetic construct
RGDASNA

SEQ ID NO: 15175 - protein, 7 aa, synthetic construct
RGDLKAT

SEQ ID NO: 15176 - protein, 7 aa, synthetic construct
RGDLKEH

SEQ ID NO: 15177 - protein, 7 aa, synthetic construct
RGDASRF

SEQ ID NO: 15178 - protein, 7 aa, synthetic construct
RGDLKLK

SEQ ID NO: 15179 - protein, 7 aa, synthetic construct
RGDLKVH

SEQ ID NO: 15180 - protein, 7 aa, synthetic construct
RGDLLEN

SEQ ID NO: 15181 - protein, 7 aa, synthetic construct
RGDLLNN

SEQ ID NO: 15182 - protein, 7 aa, synthetic construct
RGDLNRA

SEQ ID NO: 15183 - protein, 7 aa, synthetic construct
RGDLRGF

SEQ ID NO: 15184 - protein, 7 aa, synthetic construct
RGDLRIH

SEQ ID NO: 15185 - protein, 7 aa, synthetic construct
RGDLSSH

SEQ ID NO: 15186 - protein, 7 aa, synthetic construct
RGDNDDQ

SEQ ID NO: 15187 - protein, 7 aa, synthetic construct
RGDNENT

SEQ ID NO: 15188 - protein, 7 aa, synthetic construct
RGDNFRI

SEQ ID NO: 15189 - protein, 7 aa, synthetic construct
RGDNGID

SEQ ID NO: 15190 - protein, 7 aa, synthetic construct
RGDNHDG

SEQ ID NO: 15191 - protein, 7 aa, synthetic construct
RGDNHFR

SEQ ID NO: 15192 - protein, 7 aa, synthetic construct
RGDNKFD

SEQ ID NO: 15193 - protein, 7 aa, synthetic construct
RGDNKKH

SEQ ID NO: 15194 - protein, 7 aa, synthetic construct
RGDNKVT

SEQ ID NO: 15195 - protein, 7 aa, synthetic construct
RGDNLRT

SEQ ID NO: 15196 - protein, 7 aa, synthetic construct
RGDNNHI

SEQ ID NO: 15197 - protein, 7 aa, synthetic construct
RGDNNRL

SEQ ID NO: 15198 - protein, 7 aa, synthetic construct
RGDNRIL

SEQ ID NO: 15199 - protein, 7 aa, synthetic construct
RGDNRTA

SEQ ID NO: 15200 - protein, 7 aa, synthetic construct
RGDNSFG

SEQ ID NO: 15201 - protein, 7 aa, synthetic construct
RGDNSST

SEQ ID NO: 15202 - protein, 7 aa, synthetic construct
RGDNTAS

SEQ ID NO: 15203 - protein, 7 aa, synthetic construct
RGDNTSL

SEQ ID NO: 15204 - protein, 7 aa, synthetic construct
RGDNVFV

SEQ ID NO: 15205 - protein, 7 aa, synthetic construct
RGDADKI

SEQ ID NO: 15206 - protein, 7 aa, synthetic construct
RGDNVTE

SEQ ID NO: 15207 - protein, 7 aa, synthetic construct
RGDQDEL

SEQ ID NO: 15208 - protein, 7 aa, synthetic construct
RGDQDHR

SEQ ID NO: 15209 - protein, 7 aa, synthetic construct
RGDQDRN

SEQ ID NO: 15210 - protein, 7 aa, synthetic construct
RGDQEEL

SEQ ID NO: 15211 - protein, 7 aa, synthetic construct
RGDQEKI

SEQ ID NO: 15212 - protein, 7 aa, synthetic construct
RGDQFLR

SEQ ID NO: 15213 - protein, 7 aa, synthetic construct
RGDQFNF

SEQ ID NO: 15214 - protein, 7 aa, synthetic construct
RGDQGDV

SEQ ID NO: 15215 - protein, 7 aa, synthetic construct
RGDQGGH

SEQ ID NO: 15216 - protein, 7 aa, synthetic construct
RGDQGIQ

SEQ ID NO: 15217 - protein, 7 aa, synthetic construct
RGDQGKG

SEQ ID NO: 15218 - protein, 7 aa, synthetic construct
RGDQHSN

SEQ ID NO: 15219 - protein, 7 aa, synthetic construct
RGDDAQD

SEQ ID NO: 15220 - protein, 7 aa, synthetic construct
RGDQKAH

SEQ ID NO: 15221 - protein, 7 aa, synthetic construct
RGDQNTF

SEQ ID NO: 15222 - protein, 7 aa, synthetic construct
RGDQQHL

SEQ ID NO: 15223 - protein, 7 aa, synthetic construct
RGDQRGT

SEQ ID NO: 15224 - protein, 7 aa, synthetic construct
RGDQRKS

SEQ ID NO: 15225 - protein, 7 aa, synthetic construct
RGDQRRG

SEQ ID NO: 15226 - protein, 7 aa, synthetic construct
RGDQTGD

SEQ ID NO: 15227 - protein, 7 aa, synthetic construct
RGDQTGI

SEQ ID NO: 15228 - protein, 7 aa, synthetic construct
RGDQVDK

SEQ ID NO: 15229 - protein, 7 aa, synthetic construct
RGDQVHK

SEQ ID NO: 15230 - protein, 7 aa, synthetic construct
RGDRDHL

SEQ ID NO: 15231 - protein, 7 aa, synthetic construct
RGDREAG

SEQ ID NO: 15232 - protein, 7 aa, synthetic construct
RGDREKQ

SEQ ID NO: 15233 - protein, 7 aa, synthetic construct
RGDRELF

SEQ ID NO: 15234 - protein, 7 aa, synthetic construct
RGDRHTE

SEQ ID NO: 15235 - protein, 7 aa, synthetic construct
RGDRIHD

SEQ ID NO: 15236 - protein, 7 aa, synthetic construct
RGDRKIA

SEQ ID NO: 15237 - protein, 7 aa, synthetic construct
RGDRKTF

SEQ ID NO: 15238 - protein, 7 aa, synthetic construct
RGDRLVR

SEQ ID NO: 15239 - protein, 7 aa, synthetic construct
RGDRNEI

SEQ ID NO: 15240 - protein, 7 aa, synthetic construct
RGDADRL

SEQ ID NO: 15241 - protein, 7 aa, synthetic construct
RGDRSIG

SEQ ID NO: 15242 - protein, 7 aa, synthetic construct
RGDRTQH

SEQ ID NO: 15243 - protein, 7 aa, synthetic construct
RGDRVEF

SEQ ID NO: 15244 - protein, 7 aa, synthetic construct
RGDRVLF

SEQ ID NO: 15245 - protein, 7 aa, synthetic construct
RGDRVSK

SEQ ID NO: 15246 - protein, 7 aa, synthetic construct
RGDSAAK

SEQ ID NO: 15247 - protein, 7 aa, synthetic construct
RGDSAKT

SEQ ID NO: 15248 - protein, 7 aa, synthetic construct
RGDSEAL

SEQ ID NO: 15249 - protein, 7 aa, synthetic construct
RGDSFRE

SEQ ID NO: 15250 - protein, 7 aa, synthetic construct
RGDSGNE

SEQ ID NO: 15251 - protein, 7 aa, synthetic construct
RGDSHEF

SEQ ID NO: 15252 - protein, 7 aa, synthetic construct
RGDSHQK

SEQ ID NO: 15253 - protein, 7 aa, synthetic construct
RGDSKGR

SEQ ID NO: 15254 - protein, 7 aa, synthetic construct
RGDSKNN

SEQ ID NO: 15255 - protein, 7 aa, synthetic construct
RGDSKTN

SEQ ID NO: 15256 - protein, 7 aa, synthetic construct
RGDSLGK

SEQ ID NO: 15257 - protein, 7 aa, synthetic construct
RGDSNFT

SEQ ID NO: 15258 - protein, 7 aa, synthetic construct
RGDSNNR

SEQ ID NO: 15259 - protein, 7 aa, synthetic construct
RGDSQHK

SEQ ID NO: 15260 - protein, 7 aa, synthetic construct
RGDSRDL

SEQ ID NO: 15261 - protein, 7 aa, synthetic construct
RGDSRGE

SEQ ID NO: 15262 - protein, 7 aa, synthetic construct
RGDSRHV

SEQ ID NO: 15263 - protein, 7 aa, synthetic construct
RGDSSHK

SEQ ID NO: 15264 - protein, 7 aa, synthetic construct
RGDSSQT

SEQ ID NO: 15265 - protein, 7 aa, synthetic construct
RGDSTLF

SEQ ID NO: 15266 - protein, 7 aa, synthetic construct
RGDDGHV

SEQ ID NO: 15267 - protein, 7 aa, synthetic construct
RGDSVFR

SEQ ID NO: 15268 - protein, 7 aa, synthetic construct
RGDSVTL

SEQ ID NO: 15269 - protein, 7 aa, synthetic construct
RGDTAGN

SEQ ID NO: 15270 - protein, 7 aa, synthetic construct
RGDTALV

SEQ ID NO: 15271 - protein, 7 aa, synthetic construct
RGDTGDR

SEQ ID NO: 15272 - protein, 7 aa, synthetic construct
RGDTHTQ

SEQ ID NO: 15273 - protein, 7 aa, synthetic construct
RGDTIDS

SEQ ID NO: 15274 - protein, 7 aa, synthetic construct
RGDTKHE

SEQ ID NO: 15275 - protein, 7 aa, synthetic construct
RGDDHHI

SEQ ID NO: 15276 - protein, 7 aa, synthetic construct
RGDTLQT

SEQ ID NO: 15277 - protein, 7 aa, synthetic construct
RGDTNGT

SEQ ID NO: 15278 - protein, 7 aa, synthetic construct
RGDTNIV

SEQ ID NO: 15279 - protein, 7 aa, synthetic construct
RGDTNQQ

SEQ ID NO: 15280 - protein, 7 aa, synthetic construct
RGDTQKG

SEQ ID NO: 15281 - protein, 7 aa, synthetic construct
RGDTQVI

SEQ ID NO: 15282 - protein, 7 aa, synthetic construct
RGDTQVN

SEQ ID NO: 15283 - protein, 7 aa, synthetic construct
RGDTSFT

SEQ ID NO: 15284 - protein, 7 aa, synthetic construct
RGDTVGK

SEQ ID NO: 15285 - protein, 7 aa, synthetic construct
RGDVAKQ

SEQ ID NO: 15286 - protein, 7 aa, synthetic construct
RGDVDAH

SEQ ID NO: 15287 - protein, 7 aa, synthetic construct
RGDVDVR

SEQ ID NO: 15288 - protein, 7 aa, synthetic construct
RGDVEFI

SEQ ID NO: 15289 - protein, 7 aa, synthetic construct
RGDVFGF

SEQ ID NO: 15290 - protein, 7 aa, synthetic construct
RGDVHGV

SEQ ID NO: 15291 - protein, 7 aa, synthetic construct
RGDVHTS

SEQ ID NO: 15292 - protein, 7 aa, synthetic construct
RGDDIRI

SEQ ID NO: 15293 - protein, 7 aa, synthetic construct
RGDVLVF

SEQ ID NO: 15294 - protein, 7 aa, synthetic construct
RGDVNKE

SEQ ID NO: 15295 - protein, 7 aa, synthetic construct
RGDVNLI

SEQ ID NO: 15296 - protein, 7 aa, synthetic construct
RGDVNQK

SEQ ID NO: 15297 - protein, 7 aa, synthetic construct
RGDAEFA

SEQ ID NO: 15298 - protein, 7 aa, synthetic construct
RGDVQKR

SEQ ID NO: 15299 - protein, 7 aa, synthetic construct
RGDVTFK

SEQ ID NO: 15300 - protein, 7 aa, synthetic construct
RGDVTII

SEQ ID NO: 15301 - protein, 7 aa, synthetic construct
RGDVTKN

SEQ ID NO: 15302 - protein, 7 aa, synthetic construct
RGDVTQI

SEQ ID NO: 15303 - protein, 7 aa, synthetic construct
RGDVVKV

SEQ ID NO: 15304 - protein, 7 aa, synthetic construct
RGDDRET

SEQ ID NO: 15305 - protein, 7 aa, synthetic construct
RGDDRHE

SEQ ID NO: 15306 - protein, 7 aa, synthetic construct
RGDDSKA

SEQ ID NO: 15307 - protein, 7 aa, synthetic construct
RGDDSSA

SEQ ID NO: 15308 - protein, 7 aa, synthetic construct
RGDEANQ

SEQ ID NO: 15309 - protein, 7 aa, synthetic construct
RGDEHQI

SEQ ID NO: 15310 - protein, 7 aa, synthetic construct
RGDEINF

SEQ ID NO: 15311 - protein, 7 aa, synthetic construct
RGDEKKF

SEQ ID NO: 15312 - protein, 7 aa, synthetic construct
RGDEKSF

SEQ ID NO: 15313 - protein, 7 aa, synthetic construct
RGDELSV

SEQ ID NO: 15314 - protein, 7 aa, synthetic construct
RGDERET

SEQ ID NO: 15315 - protein, 7 aa, synthetic construct
RGDAGER

SEQ ID NO: 15316 - protein, 7 aa, synthetic construct
RGDLLLS

SEQ ID NO: 15317 - protein, 7 aa, synthetic construct
RGDEVRQ

SEQ ID NO: 15318 - protein, 7 aa, synthetic construct
RGDFAHI

SEQ ID NO: 15319 - protein, 7 aa, synthetic construct
RGDFAHQ

SEQ ID NO: 15320 - protein, 7 aa, synthetic construct
RGDFALE

SEQ ID NO: 15321 - protein, 7 aa, synthetic construct
RGDFAQN

SEQ ID NO: 15322 - protein, 7 aa, synthetic construct
RGDFARE

SEQ ID NO: 15323 - protein, 7 aa, synthetic construct
RGDFDRT

SEQ ID NO: 15324 - protein, 7 aa, synthetic construct
RGDFEDS

SEQ ID NO: 15325 - protein, 7 aa, synthetic construct
RGDAGRQ

SEQ ID NO: 15326 - protein, 7 aa, synthetic construct
RGDFEVL

SEQ ID NO: 15327 - protein, 7 aa, synthetic construct
RGDFFLF

SEQ ID NO: 15328 - protein, 7 aa, synthetic construct
RGDFGRF

SEQ ID NO: 15329 - protein, 7 aa, synthetic construct
RGDFHEV

SEQ ID NO: 15330 - protein, 7 aa, synthetic construct
RGDFHKD

SEQ ID NO: 15331 - protein, 7 aa, synthetic construct
RGDFIAQ

SEQ ID NO: 15332 - protein, 7 aa, synthetic construct
RGDFIFN

SEQ ID NO: 15333 - protein, 7 aa, synthetic construct
RGDFIQE

SEQ ID NO: 15334 - protein, 7 aa, synthetic construct
RGDFIVE

SEQ ID NO: 15335 - protein, 7 aa, synthetic construct
RGDFKGH

SEQ ID NO: 15336 - protein, 7 aa, synthetic construct
RGDFKHG

SEQ ID NO: 15337 - protein, 7 aa, synthetic construct
RGDFKQN

SEQ ID NO: 15338 - protein, 7 aa, synthetic construct
RGDFLST

SEQ ID NO: 15339 - protein, 7 aa, synthetic construct
RGDFNES

SEQ ID NO: 15340 - protein, 7 aa, synthetic construct
RGDFNFI

SEQ ID NO: 15341 - protein, 7 aa, synthetic construct
RGDFNHK

SEQ ID NO: 15342 - protein, 7 aa, synthetic construct
RGDFNST

SEQ ID NO: 15343 - protein, 7 aa, synthetic construct
RGDFQHQ

SEQ ID NO: 15344 - protein, 7 aa, synthetic construct
RGDAHNF

SEQ ID NO: 15345 - protein, 7 aa, synthetic construct
RGDFRFH

SEQ ID NO: 15346 - protein, 7 aa, synthetic construct
RGDAALI

SEQ ID NO: 15347 - protein, 7 aa, synthetic construct
RGDAHNV

SEQ ID NO: 15348 - protein, 7 aa, synthetic construct
RGDFRTD

SEQ ID NO: 15349 - protein, 7 aa, synthetic construct
RGDFSAL

SEQ ID NO: 15350 - protein, 7 aa, synthetic construct
RGDFSLE

SEQ ID NO: 15351 - protein, 7 aa, synthetic construct
RGDFSSD

SEQ ID NO: 15352 - protein, 7 aa, synthetic construct
RGDFVFL

SEQ ID NO: 15353 - protein, 7 aa, synthetic construct
RGDFVGF

SEQ ID NO: 15354 - protein, 7 aa, synthetic construct
RGDFVHA

SEQ ID NO: 15355 - protein, 7 aa, synthetic construct
RGDFVVI

SEQ ID NO: 15356 - protein, 7 aa, synthetic construct
RGDGAST

SEQ ID NO: 15357 - protein, 7 aa, synthetic construct
RGDGDDN

SEQ ID NO: 15358 - protein, 7 aa, synthetic construct
RGDAIEH

SEQ ID NO: 15359 - protein, 7 aa, synthetic construct
RGDGFNR

SEQ ID NO: 15360 - protein, 7 aa, synthetic construct
RGDGGFK

SEQ ID NO: 15361 - protein, 7 aa, synthetic construct
RGDGGTS

SEQ ID NO: 15362 - protein, 7 aa, synthetic construct
RGDGHDS

SEQ ID NO: 15363 - protein, 7 aa, synthetic construct
RGDAINF

SEQ ID NO: 15364 - protein, 7 aa, synthetic construct
RGDAINI

SEQ ID NO: 15365 - protein, 7 aa, synthetic construct
RGDGIHD

SEQ ID NO: 15366 - protein, 7 aa, synthetic construct
RGDGKFA

SEQ ID NO: 15367 - protein, 7 aa, synthetic construct
RGDGNQK

SEQ ID NO: 15368 - protein, 7 aa, synthetic construct
RGDGRKI

SEQ ID NO: 15369 - protein, 7 aa, synthetic construct
RGDAKFN

SEQ ID NO: 15370 - protein, 7 aa, synthetic construct
RGDGTGF

SEQ ID NO: 15371 - protein, 7 aa, synthetic construct
RGDGTQV

SEQ ID NO: 15372 - protein, 7 aa, synthetic construct
RGDGVAH

SEQ ID NO: 15373 - protein, 7 aa, synthetic construct
RGDGVTQ

SEQ ID NO: 15374 - protein, 7 aa, synthetic construct
RGDAKKH

SEQ ID NO: 15375 - protein, 7 aa, synthetic construct
RGDHADT

SEQ ID NO: 15376 - protein, 7 aa, synthetic construct
RGDHDHT

SEQ ID NO: 15377 - protein, 7 aa, synthetic construct
RGDHDVN

SEQ ID NO: 15378 - protein, 7 aa, synthetic construct
RGDHEGF

SEQ ID NO: 15379 - protein, 7 aa, synthetic construct
RGDHGKF

SEQ ID NO: 15380 - protein, 7 aa, synthetic construct
RGDHGNF

SEQ ID NO: 15381 - protein, 7 aa, synthetic construct
RGDAKVL

SEQ ID NO: 15382 - protein, 7 aa, synthetic construct
RGDHGSN

SEQ ID NO: 15383 - protein, 7 aa, synthetic construct
RGDHKDV

SEQ ID NO: 15384 - protein, 7 aa, synthetic construct
RGDHQGD

SEQ ID NO: 15385 - protein, 7 aa, synthetic construct
RGDHQHI

SEQ ID NO: 15386 - protein, 7 aa, synthetic construct
RGDHQNH

SEQ ID NO: 15387 - protein, 7 aa, synthetic construct
RGDHRGQ

SEQ ID NO: 15388 - protein, 7 aa, synthetic construct
RGDALNK

SEQ ID NO: 15389 - protein, 7 aa, synthetic construct
RGDHRRI

SEQ ID NO: 15390 - protein, 7 aa, synthetic construct
RGDHRSI

SEQ ID NO: 15391 - protein, 7 aa, synthetic construct
RGDHRTA

SEQ ID NO: 15392 - protein, 7 aa, synthetic construct
RGDHTGV

SEQ ID NO: 15393 - protein, 7 aa, synthetic construct
RGDHTKN

SEQ ID NO: 15394 - protein, 7 aa, synthetic construct
RGDHVLI

SEQ ID NO: 15395 - protein, 7 aa, synthetic construct
RGDIANT

SEQ ID NO: 15396 - protein, 7 aa, synthetic construct
RGDIAQI

SEQ ID NO: 15397 - protein, 7 aa, synthetic construct
RGDIDDK

SEQ ID NO: 15398 - protein, 7 aa, synthetic construct
RGDANFI

SEQ ID NO: 15399 - protein, 7 aa, synthetic construct
RGDIELK

SEQ ID NO: 15400 - protein, 7 aa, synthetic construct
RGDIGKT

SEQ ID NO: 15401 - protein, 7 aa, synthetic construct
RGDIHRN

SEQ ID NO: 15402 - protein, 7 aa, synthetic construct
RGDIKAV

SEQ ID NO: 15403 - protein, 7 aa, synthetic construct
RGDIKHG

SEQ ID NO: 15404 - protein, 7 aa, synthetic construct
RGDILFT

SEQ ID NO: 15405 - protein, 7 aa, synthetic construct
RGDINLN

SEQ ID NO: 15406 - protein, 7 aa, synthetic construct
RGDIQNH

SEQ ID NO: 15407 - protein, 7 aa, synthetic construct
RGDIRFQ

SEQ ID NO: 15408 - protein, 7 aa, synthetic construct
RGDIRSH

SEQ ID NO: 15409 - protein, 7 aa, synthetic construct
RGDIRVT

SEQ ID NO: 15410 - protein, 7 aa, synthetic construct
RGDISTG

SEQ ID NO: 15411 - protein, 7 aa, synthetic construct
RGDITTL

SEQ ID NO: 15412 - protein, 7 aa, synthetic construct
RGDITVS

SEQ ID NO: 15413 - protein, 7 aa, synthetic construct
RGDIVNR

SEQ ID NO: 15414 - protein, 7 aa, synthetic construct
RGDKAFA

SEQ ID NO: 15415 - protein, 7 aa, synthetic construct
RGDKDNQ

SEQ ID NO: 15416 - protein, 7 aa, synthetic construct
RGDKEDF

SEQ ID NO: 15417 - protein, 7 aa, synthetic construct
RGDKETQ

SEQ ID NO: 15418 - protein, 7 aa, synthetic construct
RGDKGIQ

SEQ ID NO: 15419 - protein, 7 aa, synthetic construct
RGDKGQV

SEQ ID NO: 15420 - protein, 7 aa, synthetic construct
RGDKHFA

SEQ ID NO: 15421 - protein, 7 aa, synthetic construct
RGDKHTK

SEQ ID NO: 15422 - protein, 7 aa, synthetic construct
RGDKLFT

SEQ ID NO: 15423 - protein, 7 aa, synthetic construct
RGDKLIK

SEQ ID NO: 15424 - protein, 7 aa, synthetic construct
RGDKLKI

SEQ ID NO: 15425 - protein, 7 aa, synthetic construct
RGDKLNA

SEQ ID NO: 15426 - protein, 7 aa, synthetic construct
RGDKLVT

SEQ ID NO: 15427 - protein, 7 aa, synthetic construct
RGDKNLF

SEQ ID NO: 15428 - protein, 7 aa, synthetic construct
RGDKQIH

SEQ ID NO: 15429 - protein, 7 aa, synthetic construct
RGDKQNF

SEQ ID NO: 15430 - protein, 7 aa, synthetic construct
RGDKRIF

SEQ ID NO: 15431 - protein, 7 aa, synthetic construct
RGDKRQE

SEQ ID NO: 15432 - protein, 7 aa, synthetic construct
RGDKRRG

SEQ ID NO: 15433 - protein, 7 aa, synthetic construct
RGDKSRH

SEQ ID NO: 15434 - protein, 7 aa, synthetic construct
RGDKSTG

SEQ ID NO: 15435 - protein, 7 aa, synthetic construct
RGDKVDH

SEQ ID NO: 15436 - protein, 7 aa, synthetic construct
RGDKVHH

SEQ ID NO: 15437 - protein, 7 aa, synthetic construct
RGDLAEF

SEQ ID NO: 15438 - protein, 7 aa, synthetic construct
RGDLAFV

SEQ ID NO: 15439 - protein, 7 aa, synthetic construct
RGDLDNF

SEQ ID NO: 15440 - protein, 7 aa, synthetic construct
RGDLDVG

SEQ ID NO: 15441 - protein, 7 aa, synthetic construct
RGDLFRD

SEQ ID NO: 15442 - protein, 7 aa, synthetic construct
RGDLGKH

SEQ ID NO: 15443 - protein, 7 aa, synthetic construct
RGDLGNE

SEQ ID NO: 15444 - protein, 7 aa, synthetic construct
RGDLGVE

SEQ ID NO: 15445 - protein, 7 aa, synthetic construct
RGDLHRN

SEQ ID NO: 15446 - protein, 7 aa, synthetic construct
RGDLIEV

SEQ ID NO: 15447 - protein, 7 aa, synthetic construct
RGDLLSL

SEQ ID NO: 15448 - protein, 7 aa, synthetic construct
RGDLQGI

SEQ ID NO: 15449 - protein, 7 aa, synthetic construct
RGDLQTT

SEQ ID NO: 15450 - protein, 7 aa, synthetic construct
RGDLRFI

SEQ ID NO: 15451 - protein, 7 aa, synthetic construct
RGDLRKD

SEQ ID NO: 15452 - protein, 7 aa, synthetic construct
RGDLVET

SEQ ID NO: 15453 - protein, 7 aa, synthetic construct
RGDLVFG

SEQ ID NO: 15454 - protein, 7 aa, synthetic construct
RGDLVIS

SEQ ID NO: 15455 - protein, 7 aa, synthetic construct
RGDLVVA

SEQ ID NO: 15456 - protein, 7 aa, synthetic construct
RGDNAGR

SEQ ID NO: 15457 - protein, 7 aa, synthetic construct
RGDATNT

SEQ ID NO: 15458 - protein, 7 aa, synthetic construct
RGDNEAA

SEQ ID NO: 15459 - protein, 7 aa, synthetic construct
RGDNEEG

SEQ ID NO: 15460 - protein, 7 aa, synthetic construct
RGDNEHN

SEQ ID NO: 15461 - protein, 7 aa, synthetic construct
RGDNFKR

SEQ ID NO: 15462 - protein, 7 aa, synthetic construct
RGDNGHN

SEQ ID NO: 15463 - protein, 7 aa, synthetic construct
RGDNGIA

SEQ ID NO: 15464 - protein, 7 aa, synthetic construct
RGDNGQL

SEQ ID NO: 15465 - protein, 7 aa, synthetic construct
RGDNIHK

SEQ ID NO: 15466 - protein, 7 aa, synthetic construct
RGDNLKI

SEQ ID NO: 15467 - protein, 7 aa, synthetic construct
RGDNLVQ

SEQ ID NO: 15468 - protein, 7 aa, synthetic construct
RGDNQTF

SEQ ID NO: 15469 - protein, 7 aa, synthetic construct
RGDNRHT

SEQ ID NO: 15470 - protein, 7 aa, synthetic construct
RGDNRLV

SEQ ID NO: 15471 - protein, 7 aa, synthetic construct
RGDNSTL

SEQ ID NO: 15472 - protein, 7 aa, synthetic construct
RGDNSTQ

SEQ ID NO: 15473 - protein, 7 aa, synthetic construct
RGDNTKL

SEQ ID NO: 15474 - protein, 7 aa, synthetic construct
RGDNVRT

SEQ ID NO: 15475 - protein, 7 aa, synthetic construct
RGDNVVK

SEQ ID NO: 15476 - protein, 7 aa, synthetic construct
RGDQAFK

SEQ ID NO: 15477 - protein, 7 aa, synthetic construct
RGDQASK

SEQ ID NO: 15478 - protein, 7 aa, synthetic construct
RGDDAER

SEQ ID NO: 15479 - protein, 7 aa, synthetic construct
RGDQELK

SEQ ID NO: 15480 - protein, 7 aa, synthetic construct
RGDQERF

SEQ ID NO: 15481 - protein, 7 aa, synthetic construct
RGDQFDH

SEQ ID NO: 15482 - protein, 7 aa, synthetic construct
RGDQGAS

SEQ ID NO: 15483 - protein, 7 aa, synthetic construct
RGDQGHT

SEQ ID NO: 15484 - protein, 7 aa, synthetic construct
RGDQGLN

SEQ ID NO: 15485 - protein, 7 aa, synthetic construct
RGDDAKN

SEQ ID NO: 15486 - protein, 7 aa, synthetic construct
RGDQIHE

SEQ ID NO: 15487 - protein, 7 aa, synthetic construct
RGDQINS

SEQ ID NO: 15488 - protein, 7 aa, synthetic construct
RGDQITI

SEQ ID NO: 15489 - protein, 7 aa, synthetic construct
RGDQITL

SEQ ID NO: 15490 - protein, 7 aa, synthetic construct
RGDQLLI

SEQ ID NO: 15491 - protein, 7 aa, synthetic construct
RGDQLNK

SEQ ID NO: 15492 - protein, 7 aa, synthetic construct
RGDDAVG

SEQ ID NO: 15493 - protein, 7 aa, synthetic construct
RGDQSNI

SEQ ID NO: 15494 - protein, 7 aa, synthetic construct
RGDQTQN

SEQ ID NO: 15495 - protein, 7 aa, synthetic construct
RGDQVHI

SEQ ID NO: 15496 - protein, 7 aa, synthetic construct
RGDRASF

SEQ ID NO: 15497 - protein, 7 aa, synthetic construct
RGDRDAS

SEQ ID NO: 15498 - protein, 7 aa, synthetic construct
RGDRDGN

SEQ ID NO: 15499 - protein, 7 aa, synthetic construct
RGDRDLE

SEQ ID NO: 15500 - protein, 7 aa, synthetic construct
RGDRDNG

SEQ ID NO: 15501 - protein, 7 aa, synthetic construct
RGDREFS

SEQ ID NO: 15502 - protein, 7 aa, synthetic construct
RGDRHDH

SEQ ID NO: 15503 - protein, 7 aa, synthetic construct
RGDRHHT

SEQ ID NO: 15504 - protein, 7 aa, synthetic construct
RGDRHTA

SEQ ID NO: 15505 - protein, 7 aa, synthetic construct
RGDRIAN

SEQ ID NO: 15506 - protein, 7 aa, synthetic construct
RGDRKIS

SEQ ID NO: 15507 - protein, 7 aa, synthetic construct
RGDRKLN

SEQ ID NO: 15508 - protein, 7 aa, synthetic construct
RGDRKQG

SEQ ID NO: 15509 - protein, 7 aa, synthetic construct
RGDRNHD

SEQ ID NO: 15510 - protein, 7 aa, synthetic construct
RGDDERN

SEQ ID NO: 15511 - protein, 7 aa, synthetic construct
RGDRTDL

SEQ ID NO: 15512 - protein, 7 aa, synthetic construct
RGDRTHS

SEQ ID NO: 15513 - protein, 7 aa, synthetic construct
RGDRVGS

SEQ ID NO: 15514 - protein, 7 aa, synthetic construct
RGDRVHS

SEQ ID NO: 15515 - protein, 7 aa, synthetic construct
RGDRVIQ

SEQ ID NO: 15516 - protein, 7 aa, synthetic construct
RGDRVIR

SEQ ID NO: 15517 - protein, 7 aa, synthetic construct
RGDSAFV

SEQ ID NO: 15518 - protein, 7 aa, synthetic construct
RGDSAKS

SEQ ID NO: 15519 - protein, 7 aa, synthetic construct
RGDSFFQ

SEQ ID NO: 15520 - protein, 7 aa, synthetic construct
RGDSFKQ

SEQ ID NO: 15521 - protein, 7 aa, synthetic construct
RGDSFLL

SEQ ID NO: 15522 - protein, 7 aa, synthetic construct
RGDSFTT

SEQ ID NO: 15523 - protein, 7 aa, synthetic construct
RGDSGQR

SEQ ID NO: 15524 - protein, 7 aa, synthetic construct
RGDSGRG

SEQ ID NO: 15525 - protein, 7 aa, synthetic construct
RGDSHDL

SEQ ID NO: 15526 - protein, 7 aa, synthetic construct
RGDSHGR

SEQ ID NO: 15527 - protein, 7 aa, synthetic construct
RGDSINR

SEQ ID NO: 15528 - protein, 7 aa, synthetic construct
RGDSKGL

SEQ ID NO: 15529 - protein, 7 aa, synthetic construct
RGDSKRD

SEQ ID NO: 15530 - protein, 7 aa, synthetic construct
RGDSLEI

SEQ ID NO: 15531 - protein, 7 aa, synthetic construct
RGDSNKF

SEQ ID NO: 15532 - protein, 7 aa, synthetic construct
RGDSNKI

SEQ ID NO: 15533 - protein, 7 aa, synthetic construct
RGDDFVS

SEQ ID NO: 15534 - protein, 7 aa, synthetic construct
RGDSQNI

SEQ ID NO: 15535 - protein, 7 aa, synthetic construct
RGDSSSN

SEQ ID NO: 15536 - protein, 7 aa, synthetic construct
RGDSTII

SEQ ID NO: 15537 - protein, 7 aa, synthetic construct
RGDTDGR

SEQ ID NO: 15538 - protein, 7 aa, synthetic construct
RGDDGNK

SEQ ID NO: 15539 - protein, 7 aa, synthetic construct
RGDTHAQ

SEQ ID NO: 15540 - protein, 7 aa, synthetic construct
RGDTHQS

SEQ ID NO: 15541 - protein, 7 aa, synthetic construct
RGDTHRT

SEQ ID NO: 15542 - protein, 7 aa, synthetic construct
RGDTKID

SEQ ID NO: 15543 - protein, 7 aa, synthetic construct
RGDTKNG

SEQ ID NO: 15544 - protein, 7 aa, synthetic construct
RGDTKVA

SEQ ID NO: 15545 - protein, 7 aa, synthetic construct
RGDTLFR

SEQ ID NO: 15546 - protein, 7 aa, synthetic construct
RGDTLST

SEQ ID NO: 15547 - protein, 7 aa, synthetic construct
RGDTNVI

SEQ ID NO: 15548 - protein, 7 aa, synthetic construct
RGDTQQL

SEQ ID NO: 15549 - protein, 7 aa, synthetic construct
RGDTRDV

SEQ ID NO: 15550 - protein, 7 aa, synthetic construct
RGDTSEQ

SEQ ID NO: 15551 - protein, 7 aa, synthetic construct
RGDTVNS

SEQ ID NO: 15552 - protein, 7 aa, synthetic construct
RGDTVSF

SEQ ID NO: 15553 - protein, 7 aa, synthetic construct
RGDDHVT

SEQ ID NO: 15554 - protein, 7 aa, synthetic construct
RGDVAAH

SEQ ID NO: 15555 - protein, 7 aa, synthetic construct
RGDVFKV

SEQ ID NO: 15556 - protein, 7 aa, synthetic construct
RGDVHIF

SEQ ID NO: 15557 - protein, 7 aa, synthetic construct
RGDVIIF

SEQ ID NO: 15558 - protein, 7 aa, synthetic construct
RGDVIND

SEQ ID NO: 15559 - protein, 7 aa, synthetic construct
RGDVINV

SEQ ID NO: 15560 - protein, 7 aa, synthetic construct
RGDVISL

SEQ ID NO: 15561 - protein, 7 aa, synthetic construct
RGDVIVH

SEQ ID NO: 15562 - protein, 7 aa, synthetic construct
RGDDIRQ

SEQ ID NO: 15563 - protein, 7 aa, synthetic construct
RGDVLKG

SEQ ID NO: 15564 - protein, 7 aa, synthetic construct
RGDVNGD

SEQ ID NO: 15565 - protein, 7 aa, synthetic construct
RGDVNKD

SEQ ID NO: 15566 - protein, 7 aa, synthetic construct
RGDVQVI

SEQ ID NO: 15567 - protein, 7 aa, synthetic construct
RGDVSEH

SEQ ID NO: 15568 - protein, 7 aa, synthetic construct
RGDVSFG

SEQ ID NO: 15569 - protein, 7 aa, synthetic construct
RGDVSNN

SEQ ID NO: 15570 - protein, 7 aa, synthetic construct
RGDVSSG

SEQ ID NO: 15571 - protein, 7 aa, synthetic construct
RGDVSTA

SEQ ID NO: 15572 - protein, 7 aa, synthetic construct
RGDVTQR

SEQ ID NO: 15573 - protein, 7 aa, synthetic construct
RGDDRRN

SEQ ID NO: 15574 - protein, 7 aa, synthetic construct
RGDDSFV

SEQ ID NO: 15575 - protein, 7 aa, synthetic construct
RGDDSKD

SEQ ID NO: 15576 - protein, 7 aa, synthetic construct
RGDDSKE

SEQ ID NO: 15577 - protein, 7 aa, synthetic construct
RGDDSNI

SEQ ID NO: 15578 - protein, 7 aa, synthetic construct
RGDDSRD

SEQ ID NO: 15579 - protein, 7 aa, synthetic construct
RGDDSSR

SEQ ID NO: 15580 - protein, 7 aa, synthetic construct
RGDAETQ

SEQ ID NO: 15581 - protein, 7 aa, synthetic construct
RGDEALV

SEQ ID NO: 15582 - protein, 7 aa, synthetic construct
RGDEEDR

SEQ ID NO: 15583 - protein, 7 aa, synthetic construct
RGDEGFA

SEQ ID NO: 15584 - protein, 7 aa, synthetic construct
RGDEGNQ

SEQ ID NO: 15585 - protein, 7 aa, synthetic construct
RGDEGTT

SEQ ID NO: 15586 - protein, 7 aa, synthetic construct
RGDEHHR

SEQ ID NO: 15587 - protein, 7 aa, synthetic construct
RGDEQST

SEQ ID NO: 15588 - protein, 7 aa, synthetic construct
RGDERQA

SEQ ID NO: 15589 - protein, 7 aa, synthetic construct
RGDESEH

SEQ ID NO: 15590 - protein, 7 aa, synthetic construct
RGDAGFG

SEQ ID NO: 15591 - protein, 7 aa, synthetic construct
RGDESNS

SEQ ID NO: 15592 - protein, 7 aa, synthetic construct
RGDESSH

SEQ ID NO: 15593 - protein, 7 aa, synthetic construct
RGDAGGG

SEQ ID NO: 15594 - protein, 7 aa, synthetic construct
RGDFAFD

SEQ ID NO: 15595 - protein, 7 aa, synthetic construct
RGDFATE

SEQ ID NO: 15596 - protein, 7 aa, synthetic construct
RGDFDFA

SEQ ID NO: 15597 - protein, 7 aa, synthetic construct
RGDFDHS

SEQ ID NO: 15598 - protein, 7 aa, synthetic construct
RGDFEQI

SEQ ID NO: 15599 - protein, 7 aa, synthetic construct
RGDAGSN

SEQ ID NO: 15600 - protein, 7 aa, synthetic construct
RGDFFTV

SEQ ID NO: 15601 - protein, 7 aa, synthetic construct
RGDFGQH

SEQ ID NO: 15602 - protein, 7 aa, synthetic construct
RGDAGVL

SEQ ID NO: 15603 - protein, 7 aa, synthetic construct
RGDFGRR

SEQ ID NO: 15604 - protein, 7 aa, synthetic construct
RGDFGVQ

SEQ ID NO: 15605 - protein, 7 aa, synthetic construct
RGDFHET

SEQ ID NO: 15606 - protein, 7 aa, synthetic construct
RGDFHQA

SEQ ID NO: 15607 - protein, 7 aa, synthetic construct
RGDFHSL

SEQ ID NO: 15608 - protein, 7 aa, synthetic construct
RGDFHVT

SEQ ID NO: 15609 - protein, 7 aa, synthetic construct
RGDFIFT

SEQ ID NO: 15610 - protein, 7 aa, synthetic construct
RGDFIVI

SEQ ID NO: 15611 - protein, 7 aa, synthetic construct
RGDFKFD

SEQ ID NO: 15612 - protein, 7 aa, synthetic construct
RGDFKIT

SEQ ID NO: 15613 - protein, 7 aa, synthetic construct
RGDFKLE

SEQ ID NO: 15614 - protein, 7 aa, synthetic construct
RGDFKSE

SEQ ID NO: 15615 - protein, 7 aa, synthetic construct
RGDFKTV

SEQ ID NO: 15616 - protein, 7 aa, synthetic construct
RGDFLEV

SEQ ID NO: 15617 - protein, 7 aa, synthetic construct
RGDAHGV

SEQ ID NO: 15618 - protein, 7 aa, synthetic construct
RGDFLTA

SEQ ID NO: 15619 - protein, 7 aa, synthetic construct
RGDFNLR

SEQ ID NO: 15620 - protein, 7 aa, synthetic construct
RGDAHKQ

SEQ ID NO: 15621 - protein, 7 aa, synthetic construct
RGDFQGL

SEQ ID NO: 15622 - protein, 7 aa, synthetic construct
RGDFQQT

SEQ ID NO: 15623 - protein, 7 aa, synthetic construct
RGDFQVR

SEQ ID NO: 15624 - protein, 7 aa, synthetic construct
RGDFSFG

SEQ ID NO: 15625 - protein, 7 aa, synthetic construct
RGDFSFS

SEQ ID NO: 15626 - protein, 7 aa, synthetic construct
RGDFSIG

SEQ ID NO: 15627 - protein, 7 aa, synthetic construct
RGDFTFK

SEQ ID NO: 15628 - protein, 7 aa, synthetic construct
RGDFTGF

SEQ ID NO: 15629 - protein, 7 aa, synthetic construct
RGDFTNH

SEQ ID NO: 15630 - protein, 7 aa, synthetic construct
RGDFVHT

SEQ ID NO: 15631 - protein, 7 aa, synthetic construct
RGDGFRA

SEQ ID NO: 15632 - protein, 7 aa, synthetic construct
RGDGGKN

SEQ ID NO: 15633 - protein, 7 aa, synthetic construct
RGDGHNL

SEQ ID NO: 15634 - protein, 7 aa, synthetic construct
RGDGIFK

SEQ ID NO: 15635 - protein, 7 aa, synthetic construct
RGDGIHQ

SEQ ID NO: 15636 - protein, 7 aa, synthetic construct
RGDGIKH

SEQ ID NO: 15637 - protein, 7 aa, synthetic construct
RGDGINF

SEQ ID NO: 15638 - protein, 7 aa, synthetic construct
RGDGKGE

SEQ ID NO: 15639 - protein, 7 aa, synthetic construct
RGDGNRT

SEQ ID NO: 15640 - protein, 7 aa, synthetic construct
RGDGNSN

SEQ ID NO: 15641 - protein, 7 aa, synthetic construct
RGDGNVF

SEQ ID NO: 15642 - protein, 7 aa, synthetic construct
RGDGNVR

SEQ ID NO: 15643 - protein, 7 aa, synthetic construct
RGDGSEK

SEQ ID NO: 15644 - protein, 7 aa, synthetic construct
RGDGSRH

SEQ ID NO: 15645 - protein, 7 aa, synthetic construct
RGDGSSQ

SEQ ID NO: 15646 - protein, 7 aa, synthetic construct
RGDGSVV

SEQ ID NO: 15647 - protein, 7 aa, synthetic construct
RGDGTSR

SEQ ID NO: 15648 - protein, 7 aa, synthetic construct
RGDHAEK

SEQ ID NO: 15649 - protein, 7 aa, synthetic construct
RGDHANN

SEQ ID NO: 15650 - protein, 7 aa, synthetic construct
RGDHDAQ

SEQ ID NO: 15651 - protein, 7 aa, synthetic construct
RGDHDHE

SEQ ID NO: 15652 - protein, 7 aa, synthetic construct
RGDHDVQ

SEQ ID NO: 15653 - protein, 7 aa, synthetic construct
RGDHEDE

SEQ ID NO: 15654 - protein, 7 aa, synthetic construct
RGDHFHF

SEQ ID NO: 15655 - protein, 7 aa, synthetic construct
RGDHGIF

SEQ ID NO: 15656 - protein, 7 aa, synthetic construct
RGDHINT

SEQ ID NO: 15657 - protein, 7 aa, synthetic construct
RGDHIVK

SEQ ID NO: 15658 - protein, 7 aa, synthetic construct
RGDHNAL

SEQ ID NO: 15659 - protein, 7 aa, synthetic construct
RGDHNVV

SEQ ID NO: 15660 - protein, 7 aa, synthetic construct
RGDHRAV

SEQ ID NO: 15661 - protein, 7 aa, synthetic construct
RGDHTDK

SEQ ID NO: 15662 - protein, 7 aa, synthetic construct
RGDALSL

SEQ ID NO: 15663 - protein, 7 aa, synthetic construct
RGDIAQV

SEQ ID NO: 15664 - protein, 7 aa, synthetic construct
RGDIERH

SEQ ID NO: 15665 - protein, 7 aa, synthetic construct
RGDIFNT

SEQ ID NO: 15666 - protein, 7 aa, synthetic construct
RGDIFRQ

SEQ ID NO: 15667 - protein, 7 aa, synthetic construct
RGDIFRS

SEQ ID NO: 15668 - protein, 7 aa, synthetic construct
RGDIGRT

SEQ ID NO: 15669 - protein, 7 aa, synthetic construct
RGDIHHL

SEQ ID NO: 15670 - protein, 7 aa, synthetic construct
RGDIINT

SEQ ID NO: 15671 - protein, 7 aa, synthetic construct
RGDIKIQ

SEQ ID NO: 15672 - protein, 7 aa, synthetic construct
RGDIKLE

SEQ ID NO: 15673 - protein, 7 aa, synthetic construct
RGDANSL

SEQ ID NO: 15674 - protein, 7 aa, synthetic construct
RGDINKF

SEQ ID NO: 15675 - protein, 7 aa, synthetic construct
RGDIRAN

SEQ ID NO: 15676 - protein, 7 aa, synthetic construct
RGDIRHE

SEQ ID NO: 15677 - protein, 7 aa, synthetic construct
RGDITFQ

SEQ ID NO: 15678 - protein, 7 aa, synthetic construct
RGDITHH

SEQ ID NO: 15679 - protein, 7 aa, synthetic construct
RGDITLS

SEQ ID NO: 15680 - protein, 7 aa, synthetic construct
RGDIVFV

SEQ ID NO: 15681 - protein, 7 aa, synthetic construct
RGDIVLI

SEQ ID NO: 15682 - protein, 7 aa, synthetic construct
RGDKAFE

SEQ ID NO: 15683 - protein, 7 aa, synthetic construct
RGDKDFQ

SEQ ID NO: 15684 - protein, 7 aa, synthetic construct
RGDKETF

SEQ ID NO: 15685 - protein, 7 aa, synthetic construct
RGDKGRN

SEQ ID NO: 15686 - protein, 7 aa, synthetic construct
RGDKHIK

SEQ ID NO: 15687 - protein, 7 aa, synthetic construct
RGDARAT

SEQ ID NO: 15688 - protein, 7 aa, synthetic construct
RGDKHQN

SEQ ID NO: 15689 - protein, 7 aa, synthetic construct
RGDKLSS

SEQ ID NO: 15690 - protein, 7 aa, synthetic construct
RGDKQHS

SEQ ID NO: 15691 - protein, 7 aa, synthetic construct
RGDKQIV

SEQ ID NO: 15692 - protein, 7 aa, synthetic construct
RGDKQVL

SEQ ID NO: 15693 - protein, 7 aa, synthetic construct
RGDARNA

SEQ ID NO: 15694 - protein, 7 aa, synthetic construct
RGDKRGL

SEQ ID NO: 15695 - protein, 7 aa, synthetic construct
RGDKSFF

SEQ ID NO: 15696 - protein, 7 aa, synthetic construct
RGDKSFH

SEQ ID NO: 15697 - protein, 7 aa, synthetic construct
RGDKSGH

SEQ ID NO: 15698 - protein, 7 aa, synthetic construct
RGDKSKI

SEQ ID NO: 15699 - protein, 7 aa, synthetic construct
RGDKSKK

SEQ ID NO: 15700 - protein, 7 aa, synthetic construct
RGDKSSD

SEQ ID NO: 15701 - protein, 7 aa, synthetic construct
RGDKSVF

SEQ ID NO: 15702 - protein, 7 aa, synthetic construct
RGDKTEG

SEQ ID NO: 15703 - protein, 7 aa, synthetic construct
RGDARVF

SEQ ID NO: 15704 - protein, 7 aa, synthetic construct
RGDKVQQ

SEQ ID NO: 15705 - protein, 7 aa, synthetic construct
RGDKVSF

SEQ ID NO: 15706 - protein, 7 aa, synthetic construct
RGDLDNL

SEQ ID NO: 15707 - protein, 7 aa, synthetic construct
RGDLHQR

SEQ ID NO: 15708 - protein, 7 aa, synthetic construct
RGDLIGE

SEQ ID NO: 15709 - protein, 7 aa, synthetic construct
RGDLIGN

SEQ ID NO: 15710 - protein, 7 aa, synthetic construct
RGDLIHA

SEQ ID NO: 15711 - protein, 7 aa, synthetic construct
RGDLIIL

SEQ ID NO: 15712 - protein, 7 aa, synthetic construct
RGDASNQ

SEQ ID NO: 15713 - protein, 7 aa, synthetic construct
RGDLINK

SEQ ID NO: 15714 - protein, 7 aa, synthetic construct
RGDLLGF

SEQ ID NO: 15715 - protein, 7 aa, synthetic construct
RGDLLIT

SEQ ID NO: 15716 - protein, 7 aa, synthetic construct
RGDLLQQ

SEQ ID NO: 15717 - protein, 7 aa, synthetic construct
RGDLNII

SEQ ID NO: 15718 - protein, 7 aa, synthetic construct
RGDLQSL

SEQ ID NO: 15719 - protein, 7 aa, synthetic construct
RGDLRGR

SEQ ID NO: 15720 - protein, 7 aa, synthetic construct
RGDLVIE

SEQ ID NO: 15721 - protein, 7 aa, synthetic construct
RGDLVIL

SEQ ID NO: 15722 - protein, 7 aa, synthetic construct
RGDLVTN

SEQ ID NO: 15723 - protein, 7 aa, synthetic construct
RGDNASL

SEQ ID NO: 15724 - protein, 7 aa, synthetic construct
RGDNDIK

SEQ ID NO: 15725 - protein, 7 aa, synthetic construct
RGDNERL

SEQ ID NO: 15726 - protein, 7 aa, synthetic construct
RGDNFKQ

SEQ ID NO: 15727 - protein, 7 aa, synthetic construct
RGDNGKV

SEQ ID NO: 15728 - protein, 7 aa, synthetic construct
RGDNGNV

SEQ ID NO: 15729 - protein, 7 aa, synthetic construct
RGDNKGQ

SEQ ID NO: 15730 - protein, 7 aa, synthetic construct
RGDNLRS

SEQ ID NO: 15731 - protein, 7 aa, synthetic construct
RGDNQQR

SEQ ID NO: 15732 - protein, 7 aa, synthetic construct
RGDNSDS

SEQ ID NO: 15733 - protein, 7 aa, synthetic construct
RGDNSHV

SEQ ID NO: 15734 - protein, 7 aa, synthetic construct
RGDNSKL

SEQ ID NO: 15735 - protein, 7 aa, synthetic construct
RGDAVTI

SEQ ID NO: 15736 - protein, 7 aa, synthetic construct
RGDNVNK

SEQ ID NO: 15737 - protein, 7 aa, synthetic construct
RGDNVQV

SEQ ID NO: 15738 - protein, 7 aa, synthetic construct
RGDQDED

SEQ ID NO: 15739 - protein, 7 aa, synthetic construct
RGDQFNR

SEQ ID NO: 15740 - protein, 7 aa, synthetic construct
RGDQHGA

SEQ ID NO: 15741 - protein, 7 aa, synthetic construct
RGDQHGE

SEQ ID NO: 15742 - protein, 7 aa, synthetic construct
RGDQHGH

SEQ ID NO: 15743 - protein, 7 aa, synthetic construct
RGDQKED

SEQ ID NO: 15744 - protein, 7 aa, synthetic construct
RGDQKRT

SEQ ID NO: 15745 - protein, 7 aa, synthetic construct
RGDQLVQ

SEQ ID NO: 15746 - protein, 7 aa, synthetic construct
RGDQNQI

SEQ ID NO: 15747 - protein, 7 aa, synthetic construct
RGDQRFG

SEQ ID NO: 15748 - protein, 7 aa, synthetic construct
RGDQTNS

SEQ ID NO: 15749 - protein, 7 aa, synthetic construct
RGDDDHT

SEQ ID NO: 15750 - protein, 7 aa, synthetic construct
RGDQVSA

SEQ ID NO: 15751 - protein, 7 aa, synthetic construct
RGDQVST

SEQ ID NO: 15752 - protein, 7 aa, synthetic construct
RGDRAVF

SEQ ID NO: 15753 - protein, 7 aa, synthetic construct
RGDRDLK

SEQ ID NO: 15754 - protein, 7 aa, synthetic construct
RGDRDRF

SEQ ID NO: 15755 - protein, 7 aa, synthetic construct
RGDRDSN

SEQ ID NO: 15756 - protein, 7 aa, synthetic construct
RGDDDSK

SEQ ID NO: 15757 - protein, 7 aa, synthetic construct
RGDRHSE

SEQ ID NO: 15758 - protein, 7 aa, synthetic construct
RGDRILK

SEQ ID NO: 15759 - protein, 7 aa, synthetic construct
RGDRIQL

SEQ ID NO: 15760 - protein, 7 aa, synthetic construct
RGDRLAN

SEQ ID NO: 15761 - protein, 7 aa, synthetic construct
RGDRLNF

SEQ ID NO: 15762 - protein, 7 aa, synthetic construct
RGDRLNG

SEQ ID NO: 15763 - protein, 7 aa, synthetic construct
RGDRNLH

SEQ ID NO: 15764 - protein, 7 aa, synthetic construct
RGDRSHR

SEQ ID NO: 15765 - protein, 7 aa, synthetic construct
RGDRTHN

SEQ ID NO: 15766 - protein, 7 aa, synthetic construct
RGDRVAN

SEQ ID NO: 15767 - protein, 7 aa, synthetic construct
RGDRVLT

SEQ ID NO: 15768 - protein, 7 aa, synthetic construct
RGDSARS

SEQ ID NO: 15769 - protein, 7 aa, synthetic construct
RGDSEFH

SEQ ID NO: 15770 - protein, 7 aa, synthetic construct
RGDSEHG

SEQ ID NO: 15771 - protein, 7 aa, synthetic construct
RGDSFHE

SEQ ID NO: 15772 - protein, 7 aa, synthetic construct
RGDSFQA

SEQ ID NO: 15773 - protein, 7 aa, synthetic construct
RGDSGAN

SEQ ID NO: 15774 - protein, 7 aa, synthetic construct
RGDSGND

SEQ ID NO: 15775 - protein, 7 aa, synthetic construct
RGDSHHS

SEQ ID NO: 15776 - protein, 7 aa, synthetic construct
RGDSIDK

SEQ ID NO: 15777 - protein, 7 aa, synthetic construct
RGDSIER

SEQ ID NO: 15778 - protein, 7 aa, synthetic construct
RGDSIGL

SEQ ID NO: 15779 - protein, 7 aa, synthetic construct
RGDSKIQ

SEQ ID NO: 15780 - protein, 7 aa, synthetic construct
RGDSKVL

SEQ ID NO: 15781 - protein, 7 aa, synthetic construct
RGDSLNT

SEQ ID NO: 15782 - protein, 7 aa, synthetic construct
RGDSNAI

SEQ ID NO: 15783 - protein, 7 aa, synthetic construct
RGDSNAT

SEQ ID NO: 15784 - protein, 7 aa, synthetic construct
RGDSTFN

SEQ ID NO: 15785 - protein, 7 aa, synthetic construct
RGDSTGV

SEQ ID NO: 15786 - protein, 7 aa, synthetic construct
RGDSVQH

SEQ ID NO: 15787 - protein, 7 aa, synthetic construct
RGDSVRK

SEQ ID NO: 15788 - protein, 7 aa, synthetic construct
RGDTALI

SEQ ID NO: 15789 - protein, 7 aa, synthetic construct
RGDTAVA

SEQ ID NO: 15790 - protein, 7 aa, synthetic construct
RGDTELK

SEQ ID NO: 15791 - protein, 7 aa, synthetic construct
RGDTEVF

SEQ ID NO: 15792 - protein, 7 aa, synthetic construct
RGDTHKF

SEQ ID NO: 15793 - protein, 7 aa, synthetic construct
RGDTKET

SEQ ID NO: 15794 - protein, 7 aa, synthetic construct
RGDTKHH

SEQ ID NO: 15795 - protein, 7 aa, synthetic construct
RGDTKRR

SEQ ID NO: 15796 - protein, 7 aa, synthetic construct
RGDTLGQ

SEQ ID NO: 15797 - protein, 7 aa, synthetic construct
RGDTLTQ

SEQ ID NO: 15798 - protein, 7 aa, synthetic construct
RGDDHII

SEQ ID NO: 15799 - protein, 7 aa, synthetic construct
RGDTNSN

SEQ ID NO: 15800 - protein, 7 aa, synthetic construct
RGDTQEK

SEQ ID NO: 15801 - protein, 7 aa, synthetic construct
RGDTREE

SEQ ID NO: 15802 - protein, 7 aa, synthetic construct
RGDTRHL

SEQ ID NO: 15803 - protein, 7 aa, synthetic construct
RGDTSAR

SEQ ID NO: 15804 - protein, 7 aa, synthetic construct
RGDTSNR

SEQ ID NO: 15805 - protein, 7 aa, synthetic construct
RGDTVGF

SEQ ID NO: 15806 - protein, 7 aa, synthetic construct
RGDTVSL

SEQ ID NO: 15807 - protein, 7 aa, synthetic construct
RGDTVST

SEQ ID NO: 15808 - protein, 7 aa, synthetic construct
RGDVAKN

SEQ ID NO: 15809 - protein, 7 aa, synthetic construct
RGDVDIA

SEQ ID NO: 15810 - protein, 7 aa, synthetic construct
RGDVETR

SEQ ID NO: 15811 - protein, 7 aa, synthetic construct
RGDVGKV

SEQ ID NO: 15812 - protein, 7 aa, synthetic construct
RGDVGRH

SEQ ID NO: 15813 - protein, 7 aa, synthetic construct
RGDVHLF

SEQ ID NO: 15814 - protein, 7 aa, synthetic construct
RGDVHSN

SEQ ID NO: 15815 - protein, 7 aa, synthetic construct
RGDVIEH

SEQ ID NO: 15816 - protein, 7 aa, synthetic construct
RGDVIQI

SEQ ID NO: 15817 - protein, 7 aa, synthetic construct
RGDVIQL

SEQ ID NO: 15818 - protein, 7 aa, synthetic construct
RGDVKIA

SEQ ID NO: 15819 - protein, 7 aa, synthetic construct
RGDVLAH

SEQ ID NO: 15820 - protein, 7 aa, synthetic construct
RGDVLIK

SEQ ID NO: 15821 - protein, 7 aa, synthetic construct
RGDVLNL

SEQ ID NO: 15822 - protein, 7 aa, synthetic construct
RGDVQIH

SEQ ID NO: 15823 - protein, 7 aa, synthetic construct
RGDVRDK

SEQ ID NO: 15824 - protein, 7 aa, synthetic construct
RGDVREK

SEQ ID NO: 15825 - protein, 7 aa, synthetic construct
RGDVRQH

SEQ ID NO: 15826 - protein, 7 aa, synthetic construct
RGDVSGD

SEQ ID NO: 15827 - protein, 7 aa, synthetic construct
RGDVSNQ

SEQ ID NO: 15828 - protein, 7 aa, synthetic construct
RGDVTDI

SEQ ID NO: 15829 - protein, 7 aa, synthetic construct
RGDVTGF

SEQ ID NO: 15830 - protein, 7 aa, synthetic construct
RGDVTLD

SEQ ID NO: 15831 - protein, 7 aa, synthetic construct
RGDVTLT

SEQ ID NO: 15832 - protein, 7 aa, synthetic construct
RGDVTRK

SEQ ID NO: 15833 - protein, 7 aa, synthetic construct
RGDDKKT

SEQ ID NO: 15834 - protein, 7 aa, synthetic construct
RGDDNFI

SEQ ID NO: 15835 - protein, 7 aa, synthetic construct
RGDAENK

SEQ ID NO: 15836 - protein, 7 aa, synthetic construct
RGDDSVK

SEQ ID NO: 15837 - protein, 7 aa, synthetic construct
RGDAAGH

SEQ ID NO: 15838 - protein, 7 aa, synthetic construct
RGDDVHT

SEQ ID NO: 15839 - protein, 7 aa, synthetic construct
RGDEESQ

SEQ ID NO: 15840 - protein, 7 aa, synthetic construct
RGDEGET

SEQ ID NO: 15841 - protein, 7 aa, synthetic construct
RGDEHGL

SEQ ID NO: 15842 - protein, 7 aa, synthetic construct
RGDEIHG

SEQ ID NO: 15843 - protein, 7 aa, synthetic construct
RGDAFQH

SEQ ID NO: 15844 - protein, 7 aa, synthetic construct
RGDEKKL

SEQ ID NO: 15845 - protein, 7 aa, synthetic construct
RGDENES

SEQ ID NO: 15846 - protein, 7 aa, synthetic construct
RGDENRA

SEQ ID NO: 15847 - protein, 7 aa, synthetic construct
RGDEQHL

SEQ ID NO: 15848 - protein, 7 aa, synthetic construct
RGDAAIE

SEQ ID NO: 15849 - protein, 7 aa, synthetic construct
RGDERNT

SEQ ID NO: 15850 - protein, 7 aa, synthetic construct
RGDESFV

SEQ ID NO: 15851 - protein, 7 aa, synthetic construct
RGDAGKH

SEQ ID NO: 15852 - protein, 7 aa, synthetic construct
RGDAGNI

SEQ ID NO: 15853 - protein, 7 aa, synthetic construct
RGDFDKD

SEQ ID NO: 15854 - protein, 7 aa, synthetic construct
RGDFDQF

SEQ ID NO: 15855 - protein, 7 aa, synthetic construct
RGDAGSQ

SEQ ID NO: 15856 - protein, 7 aa, synthetic construct
RGDFHFT

SEQ ID NO: 15857 - protein, 7 aa, synthetic construct
RGDFIQR

SEQ ID NO: 15858 - protein, 7 aa, synthetic construct
RGDFKHH

SEQ ID NO: 15859 - protein, 7 aa, synthetic construct
RGDFKIG

SEQ ID NO: 15860 - protein, 7 aa, synthetic construct
RGDFLTG

SEQ ID NO: 15861 - protein, 7 aa, synthetic construct
RGDFNEQ

SEQ ID NO: 15862 - protein, 7 aa, synthetic construct
RGDFRKE

SEQ ID NO: 15863 - protein, 7 aa, synthetic construct
RGDFRRT

SEQ ID NO: 15864 - protein, 7 aa, synthetic construct
RGDFSKF

SEQ ID NO: 15865 - protein, 7 aa, synthetic construct
RGDFSNF

SEQ ID NO: 15866 - protein, 7 aa, synthetic construct
RGDFSQD

SEQ ID NO: 15867 - protein, 7 aa, synthetic construct
RGDFTTT

SEQ ID NO: 15868 - protein, 7 aa, synthetic construct
RGDFTVA

SEQ ID NO: 15869 - protein, 7 aa, synthetic construct
RGDFVLL

SEQ ID NO: 15870 - protein, 7 aa, synthetic construct
RGDFVTG

SEQ ID NO: 15871 - protein, 7 aa, synthetic construct
RGDGDTR

SEQ ID NO: 15872 - protein, 7 aa, synthetic construct
RGDGEKT

SEQ ID NO: 15873 - protein, 7 aa, synthetic construct
RGDGENQ

SEQ ID NO: 15874 - protein, 7 aa, synthetic construct
RGDGERN

SEQ ID NO: 15875 - protein, 7 aa, synthetic construct
RGDGFSL

SEQ ID NO: 15876 - protein, 7 aa, synthetic construct
RGDGGIH

SEQ ID NO: 15877 - protein, 7 aa, synthetic construct
RGDGLKL

SEQ ID NO: 15878 - protein, 7 aa, synthetic construct
RGDGLST

SEQ ID NO: 15879 - protein, 7 aa, synthetic construct
RGDGQGV

SEQ ID NO: 15880 - protein, 7 aa, synthetic construct
RGDGQTT

SEQ ID NO: 15881 - protein, 7 aa, synthetic construct
RGDGRHR

SEQ ID NO: 15882 - protein, 7 aa, synthetic construct
RGDGSFF

SEQ ID NO: 15883 - protein, 7 aa, synthetic construct
RGDGSFQ

SEQ ID NO: 15884 - protein, 7 aa, synthetic construct
RGDGSSH

SEQ ID NO: 15885 - protein, 7 aa, synthetic construct
RGDGTHA

SEQ ID NO: 15886 - protein, 7 aa, synthetic construct
RGDGVGT

SEQ ID NO: 15887 - protein, 7 aa, synthetic construct
RGDGVHT

SEQ ID NO: 15888 - protein, 7 aa, synthetic construct
RGDGVSV

SEQ ID NO: 15889 - protein, 7 aa, synthetic construct
RGDAKNF

SEQ ID NO: 15890 - protein, 7 aa, synthetic construct
RGDHDQV

SEQ ID NO: 15891 - protein, 7 aa, synthetic construct
RGDHEEH

SEQ ID NO: 15892 - protein, 7 aa, synthetic construct
RGDHEFA

SEQ ID NO: 15893 - protein, 7 aa, synthetic construct
RGDHENV

SEQ ID NO: 15894 - protein, 7 aa, synthetic construct
RGDHGSE

SEQ ID NO: 15895 - protein, 7 aa, synthetic construct
RGDHHEV

SEQ ID NO: 15896 - protein, 7 aa, synthetic construct
RGDHHTF

SEQ ID NO: 15897 - protein, 7 aa, synthetic construct
RGDHKAV

SEQ ID NO: 15898 - protein, 7 aa, synthetic construct
RGDHLFK

SEQ ID NO: 15899 - protein, 7 aa, synthetic construct
RGDHLNI

SEQ ID NO: 15900 - protein, 7 aa, synthetic construct
RGDALHR

SEQ ID NO: 15901 - protein, 7 aa, synthetic construct
RGDHNDN

SEQ ID NO: 15902 - protein, 7 aa, synthetic construct
RGDHNGT

SEQ ID NO: 15903 - protein, 7 aa, synthetic construct
RGDHNQI

SEQ ID NO: 15904 - protein, 7 aa, synthetic construct
RGDHQII

SEQ ID NO: 15905 - protein, 7 aa, synthetic construct
RGDHQRG

SEQ ID NO: 15906 - protein, 7 aa, synthetic construct
RGDHRAQ

SEQ ID NO: 15907 - protein, 7 aa, synthetic construct
RGDHTGH

SEQ ID NO: 15908 - protein, 7 aa, synthetic construct
RGDHTLN

SEQ ID NO: 15909 - protein, 7 aa, synthetic construct
RGDHTTK

SEQ ID NO: 15910 - protein, 7 aa, synthetic construct
RGDHVGI

SEQ ID NO: 15911 - protein, 7 aa, synthetic construct
RGDHVQA

SEQ ID NO: 15912 - protein, 7 aa, synthetic construct
RGDHVRQ

SEQ ID NO: 15913 - protein, 7 aa, synthetic construct
RGDIDDG

SEQ ID NO: 15914 - protein, 7 aa, synthetic construct
RGDIDVI

SEQ ID NO: 15915 - protein, 7 aa, synthetic construct
RGDIFNV

SEQ ID NO: 15916 - protein, 7 aa, synthetic construct
RGDIGHK

SEQ ID NO: 15917 - protein, 7 aa, synthetic construct
RGDIGIG

SEQ ID NO: 15918 - protein, 7 aa, synthetic construct
RGDIGRE

SEQ ID NO: 15919 - protein, 7 aa, synthetic construct
RGDIHDR

SEQ ID NO: 15920 - protein, 7 aa, synthetic construct
RGDIIKF

SEQ ID NO: 15921 - protein, 7 aa, synthetic construct
RGDIIKI

SEQ ID NO: 15922 - protein, 7 aa, synthetic construct
RGDIIKQ

SEQ ID NO: 15923 - protein, 7 aa, synthetic construct
RGDIISN

SEQ ID NO: 15924 - protein, 7 aa, synthetic construct
RGDANRG

SEQ ID NO: 15925 - protein, 7 aa, synthetic construct
RGDINHV

SEQ ID NO: 15926 - protein, 7 aa, synthetic construct
RGDINST

SEQ ID NO: 15927 - protein, 7 aa, synthetic construct
RGDAQER

SEQ ID NO: 15928 - protein, 7 aa, synthetic construct
RGDITHK

SEQ ID NO: 15929 - protein, 7 aa, synthetic construct
RGDAQHA

SEQ ID NO: 15930 - protein, 7 aa, synthetic construct
RGDIVFL

SEQ ID NO: 15931 - protein, 7 aa, synthetic construct
RGDKDFK

SEQ ID NO: 15932 - protein, 7 aa, synthetic construct
RGDKDRL

SEQ ID NO: 15933 - protein, 7 aa, synthetic construct
RGDKESD

SEQ ID NO: 15934 - protein, 7 aa, synthetic construct
RGDKFGH

SEQ ID NO: 15935 - protein, 7 aa, synthetic construct
RGDKFTL

SEQ ID NO: 15936 - protein, 7 aa, synthetic construct
RGDKHTS

SEQ ID NO: 15937 - protein, 7 aa, synthetic construct
RGDKKGE

SEQ ID NO: 15938 - protein, 7 aa, synthetic construct
RGDKLSE

SEQ ID NO: 15939 - protein, 7 aa, synthetic construct
RGDKNET

SEQ ID NO: 15940 - protein, 7 aa, synthetic construct
RGDKNHA

SEQ ID NO: 15941 - protein, 7 aa, synthetic construct
RGDKNVL

SEQ ID NO: 15942 - protein, 7 aa, synthetic construct
RGDKRER

SEQ ID NO: 15943 - protein, 7 aa, synthetic construct
RGDKRLE

SEQ ID NO: 15944 - protein, 7 aa, synthetic construct
RGDKRLQ

SEQ ID NO: 15945 - protein, 7 aa, synthetic construct
RGDKRSA

SEQ ID NO: 15946 - protein, 7 aa, synthetic construct
RGDKSGG

SEQ ID NO: 15947 - protein, 7 aa, synthetic construct
RGDKSTE

SEQ ID NO: 15948 - protein, 7 aa, synthetic construct
RGDKTAF

SEQ ID NO: 15949 - protein, 7 aa, synthetic construct
RGDKTKI

SEQ ID NO: 15950 - protein, 7 aa, synthetic construct
RGDKTSQ

SEQ ID NO: 15951 - protein, 7 aa, synthetic construct
RGDKTTN

SEQ ID NO: 15952 - protein, 7 aa, synthetic construct
RGDKVGL

SEQ ID NO: 15953 - protein, 7 aa, synthetic construct
RGDADFA

SEQ ID NO: 15954 - protein, 7 aa, synthetic construct
RGDLFHG

SEQ ID NO: 15955 - protein, 7 aa, synthetic construct
RGDLGIS

SEQ ID NO: 15956 - protein, 7 aa, synthetic construct
RGDLGRS

SEQ ID NO: 15957 - protein, 7 aa, synthetic construct
RGDASKN

SEQ ID NO: 15958 - protein, 7 aa, synthetic construct
RGDLIKI

SEQ ID NO: 15959 - protein, 7 aa, synthetic construct
RGDLILV

SEQ ID NO: 15960 - protein, 7 aa, synthetic construct
RGDLIRI

SEQ ID NO: 15961 - protein, 7 aa, synthetic construct
RGDLITL

SEQ ID NO: 15962 - protein, 7 aa, synthetic construct
RGDASSA

SEQ ID NO: 15963 - protein, 7 aa, synthetic construct
RGDADGF

SEQ ID NO: 15964 - protein, 7 aa, synthetic construct
RGDLNEV

SEQ ID NO: 15965 - protein, 7 aa, synthetic construct
RGDLNHS

SEQ ID NO: 15966 - protein, 7 aa, synthetic construct
RGDLQGV

SEQ ID NO: 15967 - protein, 7 aa, synthetic construct
RGDLRIT

SEQ ID NO: 15968 - protein, 7 aa, synthetic construct
RGDLRKE

SEQ ID NO: 15969 - protein, 7 aa, synthetic construct
RGDLRNQ

SEQ ID NO: 15970 - protein, 7 aa, synthetic construct
RGDLRQD

SEQ ID NO: 15971 - protein, 7 aa, synthetic construct
RGDLSED

SEQ ID NO: 15972 - protein, 7 aa, synthetic construct
RGDLSQG

SEQ ID NO: 15973 - protein, 7 aa, synthetic construct
RGDNAHE

SEQ ID NO: 15974 - protein, 7 aa, synthetic construct
RGDNDHR

SEQ ID NO: 15975 - protein, 7 aa, synthetic construct
RGDNDII

SEQ ID NO: 15976 - protein, 7 aa, synthetic construct
RGDNFHK

SEQ ID NO: 15977 - protein, 7 aa, synthetic construct
RGDATTQ

SEQ ID NO: 15978 - protein, 7 aa, synthetic construct
RGDNGIS

SEQ ID NO: 15979 - protein, 7 aa, synthetic construct
RGDNHHV

SEQ ID NO: 15980 - protein, 7 aa, synthetic construct
RGDNHSR

SEQ ID NO: 15981 - protein, 7 aa, synthetic construct
RGDNKGF

SEQ ID NO: 15982 - protein, 7 aa, synthetic construct
RGDNKRH

SEQ ID NO: 15983 - protein, 7 aa, synthetic construct
RGDNKST

SEQ ID NO: 15984 - protein, 7 aa, synthetic construct
RGDNLFD

SEQ ID NO: 15985 - protein, 7 aa, synthetic construct
RGDNNHK

SEQ ID NO: 15986 - protein, 7 aa, synthetic construct
RGDNNQH

SEQ ID NO: 15987 - protein, 7 aa, synthetic construct
RGDNQDK

SEQ ID NO: 15988 - protein, 7 aa, synthetic construct
RGDNQIV

SEQ ID NO: 15989 - protein, 7 aa, synthetic construct
RGDNQTH

SEQ ID NO: 15990 - protein, 7 aa, synthetic construct
RGDNSTV

SEQ ID NO: 15991 - protein, 7 aa, synthetic construct
RGDNTHT

SEQ ID NO: 15992 - protein, 7 aa, synthetic construct
RGDNTNL

SEQ ID NO: 15993 - protein, 7 aa, synthetic construct
RGDNTRD

SEQ ID NO: 15994 - protein, 7 aa, synthetic construct
RGDNTRS

SEQ ID NO: 15995 - protein, 7 aa, synthetic construct
RGDNVNH

SEQ ID NO: 15996 - protein, 7 aa, synthetic construct
RGDDAAF

SEQ ID NO: 15997 - protein, 7 aa, synthetic construct
RGDQAGI

SEQ ID NO: 15998 - protein, 7 aa, synthetic construct
RGDQDRR

SEQ ID NO: 15999 - protein, 7 aa, synthetic construct
RGDQDVK

SEQ ID NO: 16000 - protein, 7 aa, synthetic construct
RGDQEFR

SEQ ID NO: 16001 - protein, 7 aa, synthetic construct
RGDQEHR

SEQ ID NO: 16002 - protein, 7 aa, synthetic construct
RGDQGDS

SEQ ID NO: 16003 - protein, 7 aa, synthetic construct
RGDQGGS

SEQ ID NO: 16004 - protein, 7 aa, synthetic construct
RGDQGQS

SEQ ID NO: 16005 - protein, 7 aa, synthetic construct
RGDQIAV

SEQ ID NO: 16006 - protein, 7 aa, synthetic construct
RGDQKHD

SEQ ID NO: 16007 - protein, 7 aa, synthetic construct
RGDQKTR

SEQ ID NO: 16008 - protein, 7 aa, synthetic construct
RGDQLRE

SEQ ID NO: 16009 - protein, 7 aa, synthetic construct
RGDQLTI

SEQ ID NO: 16010 - protein, 7 aa, synthetic construct
RGDQLTR

SEQ ID NO: 16011 - protein, 7 aa, synthetic construct
RGDQNAL

SEQ ID NO: 16012 - protein, 7 aa, synthetic construct
RGDQQNF

SEQ ID NO: 16013 - protein, 7 aa, synthetic construct
RGDQRFS

SEQ ID NO: 16014 - protein, 7 aa, synthetic construct
RGDQRHE

SEQ ID NO: 16015 - protein, 7 aa, synthetic construct
RGDQRTL

SEQ ID NO: 16016 - protein, 7 aa, synthetic construct
RGDQVSD

SEQ ID NO: 16017 - protein, 7 aa, synthetic construct
RGDRADI

SEQ ID NO: 16018 - protein, 7 aa, synthetic construct
RGDRDLQ

SEQ ID NO: 16019 - protein, 7 aa, synthetic construct
RGDREAV

SEQ ID NO: 16020 - protein, 7 aa, synthetic construct
RGDRENA

SEQ ID NO: 16021 - protein, 7 aa, synthetic construct
RGDRFNT

SEQ ID NO: 16022 - protein, 7 aa, synthetic construct
RGDRFQL

SEQ ID NO: 16023 - protein, 7 aa, synthetic construct
RGDRFRG

SEQ ID NO: 16024 - protein, 7 aa, synthetic construct
RGDRHRV

SEQ ID NO: 16025 - protein, 7 aa, synthetic construct
RGDRISS

SEQ ID NO: 16026 - protein, 7 aa, synthetic construct
RGDRKDN

SEQ ID NO: 16027 - protein, 7 aa, synthetic construct
RGDRLAH

SEQ ID NO: 16028 - protein, 7 aa, synthetic construct
RGDRLDE

SEQ ID NO: 16029 - protein, 7 aa, synthetic construct
RGDRLIN

SEQ ID NO: 16030 - protein, 7 aa, synthetic construct
RGDDEHQ

SEQ ID NO: 16031 - protein, 7 aa, synthetic construct
RGDRNTR

SEQ ID NO: 16032 - protein, 7 aa, synthetic construct
RGDRQFN

SEQ ID NO: 16033 - protein, 7 aa, synthetic construct
RGDRRHF

SEQ ID NO: 16034 - protein, 7 aa, synthetic construct
RGDRSDK

SEQ ID NO: 16035 - protein, 7 aa, synthetic construct
RGDRTQQ

SEQ ID NO: 16036 - protein, 7 aa, synthetic construct
RGDRVLQ

SEQ ID NO: 16037 - protein, 7 aa, synthetic construct
RGDRVTH

SEQ ID NO: 16038 - protein, 7 aa, synthetic construct
RGDSAQV

SEQ ID NO: 16039 - protein, 7 aa, synthetic construct
RGDSEQK

SEQ ID NO: 16040 - protein, 7 aa, synthetic construct
RGDSFFT

SEQ ID NO: 16041 - protein, 7 aa, synthetic construct
RGDSGKA

SEQ ID NO: 16042 - protein, 7 aa, synthetic construct
RGDSHDK

SEQ ID NO: 16043 - protein, 7 aa, synthetic construct
RGDSIHS

SEQ ID NO: 16044 - protein, 7 aa, synthetic construct
RGDSQTS

SEQ ID NO: 16045 - protein, 7 aa, synthetic construct
RGDSQVL

SEQ ID NO: 16046 - protein, 7 aa, synthetic construct
RGDSSFL

SEQ ID NO: 16047 - protein, 7 aa, synthetic construct
RGDSSSF

SEQ ID NO: 16048 - protein, 7 aa, synthetic construct
RGDSTRI

SEQ ID NO: 16049 - protein, 7 aa, synthetic construct
RGDSVQL

SEQ ID NO: 16050 - protein, 7 aa, synthetic construct
RGDTAHQ

SEQ ID NO: 16051 - protein, 7 aa, synthetic construct
RGDTEHH

SEQ ID NO: 16052 - protein, 7 aa, synthetic construct
RGDTESR

SEQ ID NO: 16053 - protein, 7 aa, synthetic construct
RGDTGDK

SEQ ID NO: 16054 - protein, 7 aa, synthetic construct
RGDTGSQ

SEQ ID NO: 16055 - protein, 7 aa, synthetic construct
RGDTHEL

SEQ ID NO: 16056 - protein, 7 aa, synthetic construct
RGDTHNS

SEQ ID NO: 16057 - protein, 7 aa, synthetic construct
RGDTKIA

SEQ ID NO: 16058 - protein, 7 aa, synthetic construct
RGDTQNF

SEQ ID NO: 16059 - protein, 7 aa, synthetic construct
RGDTRLN

SEQ ID NO: 16060 - protein, 7 aa, synthetic construct
RGDTSFK

SEQ ID NO: 16061 - protein, 7 aa, synthetic construct
RGDTSKN

SEQ ID NO: 16062 - protein, 7 aa, synthetic construct
RGDTSRE

SEQ ID NO: 16063 - protein, 7 aa, synthetic construct
RGDTSTK

SEQ ID NO: 16064 - protein, 7 aa, synthetic construct
RGDTVVQ

SEQ ID NO: 16065 - protein, 7 aa, synthetic construct
RGDVAEK

SEQ ID NO: 16066 - protein, 7 aa, synthetic construct
RGDVDKI

SEQ ID NO: 16067 - protein, 7 aa, synthetic construct
RGDVEHK

SEQ ID NO: 16068 - protein, 7 aa, synthetic construct
RGDVEQI

SEQ ID NO: 16069 - protein, 7 aa, synthetic construct
RGDVEVS

SEQ ID NO: 16070 - protein, 7 aa, synthetic construct
RGDVFFS

SEQ ID NO: 16071 - protein, 7 aa, synthetic construct
RGDVIAS

SEQ ID NO: 16072 - protein, 7 aa, synthetic construct
RGDVKGG

SEQ ID NO: 16073 - protein, 7 aa, synthetic construct
RGDVLIN

SEQ ID NO: 16074 - protein, 7 aa, synthetic construct
RGDVLTG

SEQ ID NO: 16075 - protein, 7 aa, synthetic construct
RGDVQDK

SEQ ID NO: 16076 - protein, 7 aa, synthetic construct
RGDVQEN

SEQ ID NO: 16077 - protein, 7 aa, synthetic construct
RGDDKED

SEQ ID NO: 16078 - protein, 7 aa, synthetic construct
RGDVSRH

SEQ ID NO: 16079 - protein, 7 aa, synthetic construct
RGDVTFV

SEQ ID NO: 16080 - protein, 7 aa, synthetic construct
RGDVTHK

SEQ ID NO: 16081 - protein, 7 aa, synthetic construct
RGDVTHS

SEQ ID NO: 16082 - protein, 7 aa, synthetic construct
RGDVTNK

SEQ ID NO: 16083 - protein, 7 aa, synthetic construct
RGDVVNH

SEQ ID NO: 16084 - protein, 7 aa, synthetic construct
RGDDKKH

SEQ ID NO: 16085 - protein, 7 aa, synthetic construct
RGDVVVS

SEQ ID NO: 16086 - protein, 7 aa, synthetic construct
RGDAAFH

SEQ ID NO: 16087 - protein, 7 aa, synthetic construct
RGDDLGH

SEQ ID NO: 16088 - protein, 7 aa, synthetic construct
RGDDLNI

SEQ ID NO: 16089 - protein, 7 aa, synthetic construct
RGDDNAQ

SEQ ID NO: 16090 - protein, 7 aa, synthetic construct
RGDDQRR

SEQ ID NO: 16091 - protein, 7 aa, synthetic construct
RGDDRKQ

SEQ ID NO: 16092 - protein, 7 aa, synthetic construct
RGDDSGE

SEQ ID NO: 16093 - protein, 7 aa, synthetic construct
RGDDTNE

SEQ ID NO: 16094 - protein, 7 aa, synthetic construct
RGDDVRQ

SEQ ID NO: 16095 - protein, 7 aa, synthetic construct
RGDEASA

SEQ ID NO: 16096 - protein, 7 aa, synthetic construct
RGDEDGE

SEQ ID NO: 16097 - protein, 7 aa, synthetic construct
RGDEGKS

SEQ ID NO: 16098 - protein, 7 aa, synthetic construct
RGDELGN

SEQ ID NO: 16099 - protein, 7 aa, synthetic construct
RGDEREK

SEQ ID NO: 16100 - protein, 7 aa, synthetic construct
RGDESQI

SEQ ID NO: 16101 - protein, 7 aa, synthetic construct
RGDETSF

SEQ ID NO: 16102 - protein, 7 aa, synthetic construct
RGDFAEV

SEQ ID NO: 16103 - protein, 7 aa, synthetic construct
RGDFDHR

SEQ ID NO: 16104 - protein, 7 aa, synthetic construct
RGDFDQT

SEQ ID NO: 16105 - protein, 7 aa, synthetic construct
RGDFEDK

SEQ ID NO: 16106 - protein, 7 aa, synthetic construct
RGDFETG

SEQ ID NO: 16107 - protein, 7 aa, synthetic construct
RGDFFLK

SEQ ID NO: 16108 - protein, 7 aa, synthetic construct
RGDFFNR

SEQ ID NO: 16109 - protein, 7 aa, synthetic construct
RGDFFTT

SEQ ID NO: 16110 - protein, 7 aa, synthetic construct
RGDFIEV

SEQ ID NO: 16111 - protein, 7 aa, synthetic construct
RGDFIKN

SEQ ID NO: 16112 - protein, 7 aa, synthetic construct
RGDFKRF

SEQ ID NO: 16113 - protein, 7 aa, synthetic construct
RGDFLKH

SEQ ID NO: 16114 - protein, 7 aa, synthetic construct
RGDFQKD

SEQ ID NO: 16115 - protein, 7 aa, synthetic construct
RGDFRFD

SEQ ID NO: 16116 - protein, 7 aa, synthetic construct
RGDFSAH

SEQ ID NO: 16117 - protein, 7 aa, synthetic construct
RGDGAAA

SEQ ID NO: 16118 - protein, 7 aa, synthetic construct
RGDGDIV

SEQ ID NO: 16119 - protein, 7 aa, synthetic construct
RGDGDRV

SEQ ID NO: 16120 - protein, 7 aa, synthetic construct
RGDGFTI

SEQ ID NO: 16121 - protein, 7 aa, synthetic construct
RGDGFVI

SEQ ID NO: 16122 - protein, 7 aa, synthetic construct
RGDGGNF

SEQ ID NO: 16123 - protein, 7 aa, synthetic construct
RGDGGTF

SEQ ID NO: 16124 - protein, 7 aa, synthetic construct
RGDGHAR

SEQ ID NO: 16125 - protein, 7 aa, synthetic construct
RGDGHED

SEQ ID NO: 16126 - protein, 7 aa, synthetic construct
RGDGHTR

SEQ ID NO: 16127 - protein, 7 aa, synthetic construct
RGDGINI

SEQ ID NO: 16128 - protein, 7 aa, synthetic construct
RGDGIVI

SEQ ID NO: 16129 - protein, 7 aa, synthetic construct
RGDGKGV

SEQ ID NO: 16130 - protein, 7 aa, synthetic construct
RGDGKSQ

SEQ ID NO: 16131 - protein, 7 aa, synthetic construct
RGDGKVS

SEQ ID NO: 16132 - protein, 7 aa, synthetic construct
RGDGLIV

SEQ ID NO: 16133 - protein, 7 aa, synthetic construct
RGDGQHK

SEQ ID NO: 16134 - protein, 7 aa, synthetic construct
RGDGTHN

SEQ ID NO: 16135 - protein, 7 aa, synthetic construct
RGDGVNA

SEQ ID NO: 16136 - protein, 7 aa, synthetic construct
RGDGVQT

SEQ ID NO: 16137 - protein, 7 aa, synthetic construct
RGDHAGN

SEQ ID NO: 16138 - protein, 7 aa, synthetic construct
RGDHDKK

SEQ ID NO: 16139 - protein, 7 aa, synthetic construct
RGDHEEN

SEQ ID NO: 16140 - protein, 7 aa, synthetic construct
RGDAKRG

SEQ ID NO: 16141 - protein, 7 aa, synthetic construct
RGDHFSF

SEQ ID NO: 16142 - protein, 7 aa, synthetic construct
RGDHGFH

SEQ ID NO: 16143 - protein, 7 aa, synthetic construct
RGDHGKE

SEQ ID NO: 16144 - protein, 7 aa, synthetic construct
RGDHHER

SEQ ID NO: 16145 - protein, 7 aa, synthetic construct
RGDALKR

SEQ ID NO: 16146 - protein, 7 aa, synthetic construct
RGDHQGS

SEQ ID NO: 16147 - protein, 7 aa, synthetic construct
RGDHQQQ

SEQ ID NO: 16148 - protein, 7 aa, synthetic construct
RGDHSAK

SEQ ID NO: 16149 - protein, 7 aa, synthetic construct
RGDHSSE

SEQ ID NO: 16150 - protein, 7 aa, synthetic construct
RGDHTTQ

SEQ ID NO: 16151 - protein, 7 aa, synthetic construct
RGDHTVR

SEQ ID NO: 16152 - protein, 7 aa, synthetic construct
RGDALTS

SEQ ID NO: 16153 - protein, 7 aa, synthetic construct
RGDHVTH

SEQ ID NO: 16154 - protein, 7 aa, synthetic construct
RGDIARA

SEQ ID NO: 16155 - protein, 7 aa, synthetic construct
RGDIDQK

SEQ ID NO: 16156 - protein, 7 aa, synthetic construct
RGDIERN

SEQ ID NO: 16157 - protein, 7 aa, synthetic construct
RGDIFKT

SEQ ID NO: 16158 - protein, 7 aa, synthetic construct
RGDIFKV

SEQ ID NO: 16159 - protein, 7 aa, synthetic construct
RGDANHT

SEQ ID NO: 16160 - protein, 7 aa, synthetic construct
RGDIHIF

SEQ ID NO: 16161 - protein, 7 aa, synthetic construct
RGDIIIF

SEQ ID NO: 16162 - protein, 7 aa, synthetic construct
RGDIIKT

SEQ ID NO: 16163 - protein, 7 aa, synthetic construct
RGDIILQ

SEQ ID NO: 16164 - protein, 7 aa, synthetic construct
RGDIKFL

SEQ ID NO: 16165 - protein, 7 aa, synthetic construct
RGDINEI

SEQ ID NO: 16166 - protein, 7 aa, synthetic construct
RGDIRLQ

SEQ ID NO: 16167 - protein, 7 aa, synthetic construct
RGDKAQT

SEQ ID NO: 16168 - protein, 7 aa, synthetic construct
RGDKDEV

SEQ ID NO: 16169 - protein, 7 aa, synthetic construct
RGDAQRE

SEQ ID NO: 16170 - protein, 7 aa, synthetic construct
RGDKELK

SEQ ID NO: 16171 - protein, 7 aa, synthetic construct
RGDAQRQ

SEQ ID NO: 16172 - protein, 7 aa, synthetic construct
RGDKESH

SEQ ID NO: 16173 - protein, 7 aa, synthetic construct
RGDKGDS

SEQ ID NO: 16174 - protein, 7 aa, synthetic construct
RGDKHDR

SEQ ID NO: 16175 - protein, 7 aa, synthetic construct
RGDARDG

SEQ ID NO: 16176 - protein, 7 aa, synthetic construct
RGDKLQQ

SEQ ID NO: 16177 - protein, 7 aa, synthetic construct
RGDKLVL

SEQ ID NO: 16178 - protein, 7 aa, synthetic construct
RGDKNND

SEQ ID NO: 16179 - protein, 7 aa, synthetic construct
RGDKQAF

SEQ ID NO: 16180 - protein, 7 aa, synthetic construct
RGDKQGR

SEQ ID NO: 16181 - protein, 7 aa, synthetic construct
RGDKQSF

SEQ ID NO: 16182 - protein, 7 aa, synthetic construct
RGDKTFV

SEQ ID NO: 16183 - protein, 7 aa, synthetic construct
RGDKVFF

SEQ ID NO: 16184 - protein, 7 aa, synthetic construct
RGDKVTK

SEQ ID NO: 16185 - protein, 7 aa, synthetic construct
RGDKVVQ

SEQ ID NO: 16186 - protein, 7 aa, synthetic construct
RGDLAAK

SEQ ID NO: 16187 - protein, 7 aa, synthetic construct
RGDLADK

SEQ ID NO: 16188 - protein, 7 aa, synthetic construct
RGDLAHN

SEQ ID NO: 16189 - protein, 7 aa, synthetic construct
RGDLEFG

SEQ ID NO: 16190 - protein, 7 aa, synthetic construct
RGDLENK

SEQ ID NO: 16191 - protein, 7 aa, synthetic construct
RGDLGVG

SEQ ID NO: 16192 - protein, 7 aa, synthetic construct
RGDLHFA

SEQ ID NO: 16193 - protein, 7 aa, synthetic construct
RGDLKKQ

SEQ ID NO: 16194 - protein, 7 aa, synthetic construct
RGDLKVT

SEQ ID NO: 16195 - protein, 7 aa, synthetic construct
RGDLLIS

SEQ ID NO: 16196 - protein, 7 aa, synthetic construct
RGDLNKS

SEQ ID NO: 16197 - protein, 7 aa, synthetic construct
RGDLNRS

SEQ ID NO: 16198 - protein, 7 aa, synthetic construct
RGDLQGK

SEQ ID NO: 16199 - protein, 7 aa, synthetic construct
RGDLQTF

SEQ ID NO: 16200 - protein, 7 aa, synthetic construct
RGDLVEI

SEQ ID NO: 16201 - protein, 7 aa, synthetic construct
RGDLVGD

SEQ ID NO: 16202 - protein, 7 aa, synthetic construct
RGDLVII

SEQ ID NO: 16203 - protein, 7 aa, synthetic construct
RGDNDEI

SEQ ID NO: 16204 - protein, 7 aa, synthetic construct
RGDNFQI

SEQ ID NO: 16205 - protein, 7 aa, synthetic construct
RGDNFTT

SEQ ID NO: 16206 - protein, 7 aa, synthetic construct
RGDNHAH

SEQ ID NO: 16207 - protein, 7 aa, synthetic construct
RGDNHGV

SEQ ID NO: 16208 - protein, 7 aa, synthetic construct
RGDNHNV

SEQ ID NO: 16209 - protein, 7 aa, synthetic construct
RGDNINQ

SEQ ID NO: 16210 - protein, 7 aa, synthetic construct
RGDNIRI

SEQ ID NO: 16211 - protein, 7 aa, synthetic construct
RGDNKAF

SEQ ID NO: 16212 - protein, 7 aa, synthetic construct
RGDNNFQ

SEQ ID NO: 16213 - protein, 7 aa, synthetic construct
RGDNQLF

SEQ ID NO: 16214 - protein, 7 aa, synthetic construct
RGDNQNI

SEQ ID NO: 16215 - protein, 7 aa, synthetic construct
RGDNQSL

SEQ ID NO: 16216 - protein, 7 aa, synthetic construct
RGDNRDN

SEQ ID NO: 16217 - protein, 7 aa, synthetic construct
RGDNRFK

SEQ ID NO: 16218 - protein, 7 aa, synthetic construct
RGDNRNA

SEQ ID NO: 16219 - protein, 7 aa, synthetic construct
RGDNRQT

SEQ ID NO: 16220 - protein, 7 aa, synthetic construct
RGDAVRD

SEQ ID NO: 16221 - protein, 7 aa, synthetic construct
RGDNSNV

SEQ ID NO: 16222 - protein, 7 aa, synthetic construct
RGDNSQT

SEQ ID NO: 16223 - protein, 7 aa, synthetic construct
RGDNSSH

SEQ ID NO: 16224 - protein, 7 aa, synthetic construct
RGDNSTR

SEQ ID NO: 16225 - protein, 7 aa, synthetic construct
RGDNTRL

SEQ ID NO: 16226 - protein, 7 aa, synthetic construct
RGDNVKN

SEQ ID NO: 16227 - protein, 7 aa, synthetic construct
RGDQDVR

SEQ ID NO: 16228 - protein, 7 aa, synthetic construct
RGDQEER

SEQ ID NO: 16229 - protein, 7 aa, synthetic construct
RGDQERS

SEQ ID NO: 16230 - protein, 7 aa, synthetic construct
RGDQFFI

SEQ ID NO: 16231 - protein, 7 aa, synthetic construct
RGDQGEG

SEQ ID NO: 16232 - protein, 7 aa, synthetic construct
RGDQGTR

SEQ ID NO: 16233 - protein, 7 aa, synthetic construct
RGDQGVF

SEQ ID NO: 16234 - protein, 7 aa, synthetic construct
RGDQHRS

SEQ ID NO: 16235 - protein, 7 aa, synthetic construct
RGDQISR

SEQ ID NO: 16236 - protein, 7 aa, synthetic construct
RGDDARL

SEQ ID NO: 16237 - protein, 7 aa, synthetic construct
RGDQNGV

SEQ ID NO: 16238 - protein, 7 aa, synthetic construct
RGDQNHH

SEQ ID NO: 16239 - protein, 7 aa, synthetic construct
RGDQQFH

SEQ ID NO: 16240 - protein, 7 aa, synthetic construct
RGDQQSF

SEQ ID NO: 16241 - protein, 7 aa, synthetic construct
RGDQQVV

SEQ ID NO: 16242 - protein, 7 aa, synthetic construct
RGDQREA

SEQ ID NO: 16243 - protein, 7 aa, synthetic construct
RGDQRVN

SEQ ID NO: 16244 - protein, 7 aa, synthetic construct
RGDQTDR

SEQ ID NO: 16245 - protein, 7 aa, synthetic construct
RGDQTLI

SEQ ID NO: 16246 - protein, 7 aa, synthetic construct
RGDQVNK

SEQ ID NO: 16247 - protein, 7 aa, synthetic construct
RGDQVNN

SEQ ID NO: 16248 - protein, 7 aa, synthetic construct
RGDQVTK

SEQ ID NO: 16249 - protein, 7 aa, synthetic construct
RGDRADN

SEQ ID NO: 16250 - protein, 7 aa, synthetic construct
RGDRDRS

SEQ ID NO: 16251 - protein, 7 aa, synthetic construct
RGDRFKR

SEQ ID NO: 16252 - protein, 7 aa, synthetic construct
RGDRHDG

SEQ ID NO: 16253 - protein, 7 aa, synthetic construct
RGDRHHS

SEQ ID NO: 16254 - protein, 7 aa, synthetic construct
RGDRHVL

SEQ ID NO: 16255 - protein, 7 aa, synthetic construct
RGDRHVQ

SEQ ID NO: 16256 - protein, 7 aa, synthetic construct
RGDRINH

SEQ ID NO: 16257 - protein, 7 aa, synthetic construct
RGDRKST

SEQ ID NO: 16258 - protein, 7 aa, synthetic construct
RGDRLLK

SEQ ID NO: 16259 - protein, 7 aa, synthetic construct
RGDRLNE

SEQ ID NO: 16260 - protein, 7 aa, synthetic construct
RGDRLSS

SEQ ID NO: 16261 - protein, 7 aa, synthetic construct
RGDRQFR

SEQ ID NO: 16262 - protein, 7 aa, synthetic construct
RGDRRER

SEQ ID NO: 16263 - protein, 7 aa, synthetic construct
RGDDERS

SEQ ID NO: 16264 - protein, 7 aa, synthetic construct
RGDRVFG

SEQ ID NO: 16265 - protein, 7 aa, synthetic construct
RGDSEKE

SEQ ID NO: 16266 - protein, 7 aa, synthetic construct
RGDSGGQ

SEQ ID NO: 16267 - protein, 7 aa, synthetic construct
RGDDFKQ

SEQ ID NO: 16268 - protein, 7 aa, synthetic construct
RGDSHEI

SEQ ID NO: 16269 - protein, 7 aa, synthetic construct
RGDSKED

SEQ ID NO: 16270 - protein, 7 aa, synthetic construct
RGDSKHN

SEQ ID NO: 16271 - protein, 7 aa, synthetic construct
RGDSKRH

SEQ ID NO: 16272 - protein, 7 aa, synthetic construct
RGDSLAN

SEQ ID NO: 16273 - protein, 7 aa, synthetic construct
RGDSLFK

SEQ ID NO: 16274 - protein, 7 aa, synthetic construct
RGDSNNV

SEQ ID NO: 16275 - protein, 7 aa, synthetic construct
RGDSRSH

SEQ ID NO: 16276 - protein, 7 aa, synthetic construct
RGDSSGS

SEQ ID NO: 16277 - protein, 7 aa, synthetic construct
RGDSSLK

SEQ ID NO: 16278 - protein, 7 aa, synthetic construct
RGDSSNI

SEQ ID NO: 16279 - protein, 7 aa, synthetic construct
RGDSTTS

SEQ ID NO: 16280 - protein, 7 aa, synthetic construct
RGDSVEN

SEQ ID NO: 16281 - protein, 7 aa, synthetic construct
RGDSVER

SEQ ID NO: 16282 - protein, 7 aa, synthetic construct
RGDSVGQ

SEQ ID NO: 16283 - protein, 7 aa, synthetic construct
RGDSVIK

SEQ ID NO: 16284 - protein, 7 aa, synthetic construct
RGDDGKE

SEQ ID NO: 16285 - protein, 7 aa, synthetic construct
RGDTAIK

SEQ ID NO: 16286 - protein, 7 aa, synthetic construct
RGDTARK

SEQ ID NO: 16287 - protein, 7 aa, synthetic construct
RGDTASV

SEQ ID NO: 16288 - protein, 7 aa, synthetic construct
RGDTEDH

SEQ ID NO: 16289 - protein, 7 aa, synthetic construct
RGDDGQT

SEQ ID NO: 16290 - protein, 7 aa, synthetic construct
RGDTESH

SEQ ID NO: 16291 - protein, 7 aa, synthetic construct
RGDTGNS

SEQ ID NO: 16292 - protein, 7 aa, synthetic construct
RGDTHAF

SEQ ID NO: 16293 - protein, 7 aa, synthetic construct
RGDTHKR

SEQ ID NO: 16294 - protein, 7 aa, synthetic construct
RGDTHRA

SEQ ID NO: 16295 - protein, 7 aa, synthetic construct
RGDTKHF

SEQ ID NO: 16296 - protein, 7 aa, synthetic construct
RGDTKHT

SEQ ID NO: 16297 - protein, 7 aa, synthetic construct
RGDTLIL

SEQ ID NO: 16298 - protein, 7 aa, synthetic construct
RGDTLVN

SEQ ID NO: 16299 - protein, 7 aa, synthetic construct
RGDTNGR

SEQ ID NO: 16300 - protein, 7 aa, synthetic construct
RGDTQEH

SEQ ID NO: 16301 - protein, 7 aa, synthetic construct
RGDTRID

SEQ ID NO: 16302 - protein, 7 aa, synthetic construct
RGDTRSG

SEQ ID NO: 16303 - protein, 7 aa, synthetic construct
RGDTSLH

SEQ ID NO: 16304 - protein, 7 aa, synthetic construct
RGDTSRQ

SEQ ID NO: 16305 - protein, 7 aa, synthetic construct
RGDTTQF

SEQ ID NO: 16306 - protein, 7 aa, synthetic construct
RGDTVGE

SEQ ID NO: 16307 - protein, 7 aa, synthetic construct
RGDTVQF

SEQ ID NO: 16308 - protein, 7 aa, synthetic construct
RGDTVVT

SEQ ID NO: 16309 - protein, 7 aa, synthetic construct
RGDVENH

SEQ ID NO: 16310 - protein, 7 aa, synthetic construct
RGDVFAD

SEQ ID NO: 16311 - protein, 7 aa, synthetic construct
RGDVFRG

SEQ ID NO: 16312 - protein, 7 aa, synthetic construct
RGDVGIK

SEQ ID NO: 16313 - protein, 7 aa, synthetic construct
RGDVHEK

SEQ ID NO: 16314 - protein, 7 aa, synthetic construct
RGDVHLL

SEQ ID NO: 16315 - protein, 7 aa, synthetic construct
RGDVHNF

SEQ ID NO: 16316 - protein, 7 aa, synthetic construct
RGDVHNS

SEQ ID NO: 16317 - protein, 7 aa, synthetic construct
RGDVHQH

SEQ ID NO: 16318 - protein, 7 aa, synthetic construct
RGDVILE

SEQ ID NO: 16319 - protein, 7 aa, synthetic construct
RGDVIVK

SEQ ID NO: 16320 - protein, 7 aa, synthetic construct
RGDVLHQ

SEQ ID NO: 16321 - protein, 7 aa, synthetic construct
RGDVLRH

SEQ ID NO: 16322 - protein, 7 aa, synthetic construct
RGDVNHI

SEQ ID NO: 16323 - protein, 7 aa, synthetic construct
RGDVQSN

SEQ ID NO: 16324 - protein, 7 aa, synthetic construct
RGDVRHT

SEQ ID NO: 16325 - protein, 7 aa, synthetic construct
RGDVTRF

SEQ ID NO: 16326 - protein, 7 aa, synthetic construct
RGDVVHT

SEQ ID NO: 16327 - protein, 7 aa, synthetic construct
RGDDLQR

SEQ ID NO: 16328 - protein, 7 aa, synthetic construct
RGDDLRI

SEQ ID NO: 16329 - protein, 7 aa, synthetic construct
RGDDNRL

SEQ ID NO: 16330 - protein, 7 aa, synthetic construct
RGDDRNL

SEQ ID NO: 16331 - protein, 7 aa, synthetic construct
RGDDTAR

SEQ ID NO: 16332 - protein, 7 aa, synthetic construct
RGDDVHV

SEQ ID NO: 16333 - protein, 7 aa, synthetic construct
RGDEAFI

SEQ ID NO: 16334 - protein, 7 aa, synthetic construct
RGDEANS

SEQ ID NO: 16335 - protein, 7 aa, synthetic construct
RGDEDNE

SEQ ID NO: 16336 - protein, 7 aa, synthetic construct
RGDEENR

SEQ ID NO: 16337 - protein, 7 aa, synthetic construct
RGDEENV

SEQ ID NO: 16338 - protein, 7 aa, synthetic construct
RGDEGGL

SEQ ID NO: 16339 - protein, 7 aa, synthetic construct
RGDEGKT

SEQ ID NO: 16340 - protein, 7 aa, synthetic construct
RGDEGRN

SEQ ID NO: 16341 - protein, 7 aa, synthetic construct
RGDEHRR

SEQ ID NO: 16342 - protein, 7 aa, synthetic construct
RGDAFRF

SEQ ID NO: 16343 - protein, 7 aa, synthetic construct
RGDELFN

SEQ ID NO: 16344 - protein, 7 aa, synthetic construct
RGDAAHS

SEQ ID NO: 16345 - protein, 7 aa, synthetic construct
RGDEQKK

SEQ ID NO: 16346 - protein, 7 aa, synthetic construct
RGDERDN

SEQ ID NO: 16347 - protein, 7 aa, synthetic construct
RGDERKE

SEQ ID NO: 16348 - protein, 7 aa, synthetic construct
RGDERQV

SEQ ID NO: 16349 - protein, 7 aa, synthetic construct
RGDESGK

SEQ ID NO: 16350 - protein, 7 aa, synthetic construct
RGDESKL

SEQ ID NO: 16351 - protein, 7 aa, synthetic construct
RGDETGH

SEQ ID NO: 16352 - protein, 7 aa, synthetic construct
RGDETKG

SEQ ID NO: 16353 - protein, 7 aa, synthetic construct
RGDEVHL

SEQ ID NO: 16354 - protein, 7 aa, synthetic construct
RGDFDIS

SEQ ID NO: 16355 - protein, 7 aa, synthetic construct
RGDFDSH

SEQ ID NO: 16356 - protein, 7 aa, synthetic construct
RGDAGRS

SEQ ID NO: 16357 - protein, 7 aa, synthetic construct
RGDFFAK

SEQ ID NO: 16358 - protein, 7 aa, synthetic construct
RGDFFRA

SEQ ID NO: 16359 - protein, 7 aa, synthetic construct
RGDFIEG

SEQ ID NO: 16360 - protein, 7 aa, synthetic construct
RGDFIII

SEQ ID NO: 16361 - protein, 7 aa, synthetic construct
RGDFILL

SEQ ID NO: 16362 - protein, 7 aa, synthetic construct
RGDFKAK

SEQ ID NO: 16363 - protein, 7 aa, synthetic construct
RGDFKFQ

SEQ ID NO: 16364 - protein, 7 aa, synthetic construct
RGDFLHT

SEQ ID NO: 16365 - protein, 7 aa, synthetic construct
RGDFQDT

SEQ ID NO: 16366 - protein, 7 aa, synthetic construct
RGDFQTH

SEQ ID NO: 16367 - protein, 7 aa, synthetic construct
RGDFRDT

SEQ ID NO: 16368 - protein, 7 aa, synthetic construct
RGDFSAG

SEQ ID NO: 16369 - protein, 7 aa, synthetic construct
RGDFSFF

SEQ ID NO: 16370 - protein, 7 aa, synthetic construct
RGDFVAL

SEQ ID NO: 16371 - protein, 7 aa, synthetic construct
RGDFVGA

SEQ ID NO: 16372 - protein, 7 aa, synthetic construct
RGDGDGK

SEQ ID NO: 16373 - protein, 7 aa, synthetic construct
RGDGDHI

SEQ ID NO: 16374 - protein, 7 aa, synthetic construct
RGDGFLH

SEQ ID NO: 16375 - protein, 7 aa, synthetic construct
RGDGHEL

SEQ ID NO: 16376 - protein, 7 aa, synthetic construct
RGDGIEI

SEQ ID NO: 16377 - protein, 7 aa, synthetic construct
RGDGNGK

SEQ ID NO: 16378 - protein, 7 aa, synthetic construct
RGDGNTR

SEQ ID NO: 16379 - protein, 7 aa, synthetic construct
RGDGQFE

SEQ ID NO: 16380 - protein, 7 aa, synthetic construct
RGDGQHS

SEQ ID NO: 16381 - protein, 7 aa, synthetic construct
RGDGRSA

SEQ ID NO: 16382 - protein, 7 aa, synthetic construct
RGDGTGR

SEQ ID NO: 16383 - protein, 7 aa, synthetic construct
RGDGVIV

SEQ ID NO: 16384 - protein, 7 aa, synthetic construct
RGDGVNG

SEQ ID NO: 16385 - protein, 7 aa, synthetic construct
RGDGVSN

SEQ ID NO: 16386 - protein, 7 aa, synthetic construct
RGDHDFV

SEQ ID NO: 16387 - protein, 7 aa, synthetic construct
RGDHDLT

SEQ ID NO: 16388 - protein, 7 aa, synthetic construct
RGDHDQE

SEQ ID NO: 16389 - protein, 7 aa, synthetic construct
RGDHEFI

SEQ ID NO: 16390 - protein, 7 aa, synthetic construct
RGDHELL

SEQ ID NO: 16391 - protein, 7 aa, synthetic construct
RGDHEQQ

SEQ ID NO: 16392 - protein, 7 aa, synthetic construct
RGDHHTV

SEQ ID NO: 16393 - protein, 7 aa, synthetic construct
RGDHKKQ

SEQ ID NO: 16394 - protein, 7 aa, synthetic construct
RGDALGN

SEQ ID NO: 16395 - protein, 7 aa, synthetic construct
RGDHLSV

SEQ ID NO: 16396 - protein, 7 aa, synthetic construct
RGDHNTR

SEQ ID NO: 16397 - protein, 7 aa, synthetic construct
RGDHQDL

SEQ ID NO: 16398 - protein, 7 aa, synthetic construct
RGDHQTK

SEQ ID NO: 16399 - protein, 7 aa, synthetic construct
RGDHRGN

SEQ ID NO: 16400 - protein, 7 aa, synthetic construct
RGDHSHG

SEQ ID NO: 16401 - protein, 7 aa, synthetic construct
RGDALVF

SEQ ID NO: 16402 - protein, 7 aa, synthetic construct
RGDIAAF

SEQ ID NO: 16403 - protein, 7 aa, synthetic construct
RGDIAKK

SEQ ID NO: 16404 - protein, 7 aa, synthetic construct
RGDIALT

SEQ ID NO: 16405 - protein, 7 aa, synthetic construct
RGDIAVQ

SEQ ID NO: 16406 - protein, 7 aa, synthetic construct
RGDIEGV

SEQ ID NO: 16407 - protein, 7 aa, synthetic construct
RGDIFIH

SEQ ID NO: 16408 - protein, 7 aa, synthetic construct
RGDIGNG

SEQ ID NO: 16409 - protein, 7 aa, synthetic construct
RGDIGTG

SEQ ID NO: 16410 - protein, 7 aa, synthetic construct
RGDIHKQ

SEQ ID NO: 16411 - protein, 7 aa, synthetic construct
RGDIHTF

SEQ ID NO: 16412 - protein, 7 aa, synthetic construct
RGDIIHH

SEQ ID NO: 16413 - protein, 7 aa, synthetic construct
RGDIIQL

SEQ ID NO: 16414 - protein, 7 aa, synthetic construct
RGDIKIE

SEQ ID NO: 16415 - protein, 7 aa, synthetic construct
RGDIKVF

SEQ ID NO: 16416 - protein, 7 aa, synthetic construct
RGDILIR

SEQ ID NO: 16417 - protein, 7 aa, synthetic construct
RGDILNN

SEQ ID NO: 16418 - protein, 7 aa, synthetic construct
RGDILTA

SEQ ID NO: 16419 - protein, 7 aa, synthetic construct
RGDIQFV

SEQ ID NO: 16420 - protein, 7 aa, synthetic construct
RGDIQQI

SEQ ID NO: 16421 - protein, 7 aa, synthetic construct
RGDIQSL

SEQ ID NO: 16422 - protein, 7 aa, synthetic construct
RGDIRFE

SEQ ID NO: 16423 - protein, 7 aa, synthetic construct
RGDIRGR

SEQ ID NO: 16424 - protein, 7 aa, synthetic construct
RGDIRHV

SEQ ID NO: 16425 - protein, 7 aa, synthetic construct
RGDIRNA

SEQ ID NO: 16426 - protein, 7 aa, synthetic construct
RGDKAII

SEQ ID NO: 16427 - protein, 7 aa, synthetic construct
RGDKASF

SEQ ID NO: 16428 - protein, 7 aa, synthetic construct
RGDKEDT

SEQ ID NO: 16429 - protein, 7 aa, synthetic construct
RGDKEEI

SEQ ID NO: 16430 - protein, 7 aa, synthetic construct
RGDKEII

SEQ ID NO: 16431 - protein, 7 aa, synthetic construct
RGDKFKH

SEQ ID NO: 16432 - protein, 7 aa, synthetic construct
RGDKHHA

SEQ ID NO: 16433 - protein, 7 aa, synthetic construct
RGDKHIL

SEQ ID NO: 16434 - protein, 7 aa, synthetic construct
RGDARGK

SEQ ID NO: 16435 - protein, 7 aa, synthetic construct
RGDKLHE

SEQ ID NO: 16436 - protein, 7 aa, synthetic construct
RGDKLVK

SEQ ID NO: 16437 - protein, 7 aa, synthetic construct
RGDKNIR

SEQ ID NO: 16438 - protein, 7 aa, synthetic construct
RGDKNKE

SEQ ID NO: 16439 - protein, 7 aa, synthetic construct
RGDKQQH

SEQ ID NO: 16440 - protein, 7 aa, synthetic construct
RGDKRAI

SEQ ID NO: 16441 - protein, 7 aa, synthetic construct
RGDKRAQ

SEQ ID NO: 16442 - protein, 7 aa, synthetic construct
RGDKRFT

SEQ ID NO: 16443 - protein, 7 aa, synthetic construct
RGDKRNL

SEQ ID NO: 16444 - protein, 7 aa, synthetic construct
RGDARQD

SEQ ID NO: 16445 - protein, 7 aa, synthetic construct
RGDKSDQ

SEQ ID NO: 16446 - protein, 7 aa, synthetic construct
RGDKSNE

SEQ ID NO: 16447 - protein, 7 aa, synthetic construct
RGDKTNV

SEQ ID NO: 16448 - protein, 7 aa, synthetic construct
RGDKTRI

SEQ ID NO: 16449 - protein, 7 aa, synthetic construct
RGDKVVH

SEQ ID NO: 16450 - protein, 7 aa, synthetic construct
RGDLALS

SEQ ID NO: 16451 - protein, 7 aa, synthetic construct
RGDLAQV

SEQ ID NO: 16452 - protein, 7 aa, synthetic construct
RGDLDIR

SEQ ID NO: 16453 - protein, 7 aa, synthetic construct
RGDLDTT

SEQ ID NO: 16454 - protein, 7 aa, synthetic construct
RGDLESI

SEQ ID NO: 16455 - protein, 7 aa, synthetic construct
RGDLGVI

SEQ ID NO: 16456 - protein, 7 aa, synthetic construct
RGDLGVQ

SEQ ID NO: 16457 - protein, 7 aa, synthetic construct
RGDLIIK

SEQ ID NO: 16458 - protein, 7 aa, synthetic construct
RGDLIRF

SEQ ID NO: 16459 - protein, 7 aa, synthetic construct
RGDLKAK

SEQ ID NO: 16460 - protein, 7 aa, synthetic construct
RGDLKDD

SEQ ID NO: 16461 - protein, 7 aa, synthetic construct
RGDLKRI

SEQ ID NO: 16462 - protein, 7 aa, synthetic construct
RGDLLAI

SEQ ID NO: 16463 - protein, 7 aa, synthetic construct
RGDLLSF

SEQ ID NO: 16464 - protein, 7 aa, synthetic construct
RGDLNRH

SEQ ID NO: 16465 - protein, 7 aa, synthetic construct
RGDATHA

SEQ ID NO: 16466 - protein, 7 aa, synthetic construct
RGDLTLT

SEQ ID NO: 16467 - protein, 7 aa, synthetic construct
RGDLVNV

SEQ ID NO: 16468 - protein, 7 aa, synthetic construct
RGDNAAT

SEQ ID NO: 16469 - protein, 7 aa, synthetic construct
RGDNFTL

SEQ ID NO: 16470 - protein, 7 aa, synthetic construct
RGDNGQA

SEQ ID NO: 16471 - protein, 7 aa, synthetic construct
RGDNGQK

SEQ ID NO: 16472 - protein, 7 aa, synthetic construct
RGDNHFF

SEQ ID NO: 16473 - protein, 7 aa, synthetic construct
RGDAVAR

SEQ ID NO: 16474 - protein, 7 aa, synthetic construct
RGDNHRR

SEQ ID NO: 16475 - protein, 7 aa, synthetic construct
RGDNIDG

SEQ ID NO: 16476 - protein, 7 aa, synthetic construct
RGDNIHD

SEQ ID NO: 16477 - protein, 7 aa, synthetic construct
RGDNKEE

SEQ ID NO: 16478 - protein, 7 aa, synthetic construct
RGDNKHA

SEQ ID NO: 16479 - protein, 7 aa, synthetic construct
RGDAVHG

SEQ ID NO: 16480 - protein, 7 aa, synthetic construct
RGDNQDH

SEQ ID NO: 16481 - protein, 7 aa, synthetic construct
RGDNRGA

SEQ ID NO: 16482 - protein, 7 aa, synthetic construct
RGDNRVS

SEQ ID NO: 16483 - protein, 7 aa, synthetic construct
RGDNSET

SEQ ID NO: 16484 - protein, 7 aa, synthetic construct
RGDNSQL

SEQ ID NO: 16485 - protein, 7 aa, synthetic construct
RGDNTKV

SEQ ID NO: 16486 - protein, 7 aa, synthetic construct
RGDADKH

SEQ ID NO: 16487 - protein, 7 aa, synthetic construct
RGDQAEH

SEQ ID NO: 16488 - protein, 7 aa, synthetic construct
RGDQASF

SEQ ID NO: 16489 - protein, 7 aa, synthetic construct
RGDQATK

SEQ ID NO: 16490 - protein, 7 aa, synthetic construct
RGDQEKL

SEQ ID NO: 16491 - protein, 7 aa, synthetic construct
RGDQFFE

SEQ ID NO: 16492 - protein, 7 aa, synthetic construct
RGDQLKR

SEQ ID NO: 16493 - protein, 7 aa, synthetic construct
RGDQLNS

SEQ ID NO: 16494 - protein, 7 aa, synthetic construct
RGDQLSG

SEQ ID NO: 16495 - protein, 7 aa, synthetic construct
RGDQLSR

SEQ ID NO: 16496 - protein, 7 aa, synthetic construct
RGDQQRH

SEQ ID NO: 16497 - protein, 7 aa, synthetic construct
RGDDDFA

SEQ ID NO: 16498 - protein, 7 aa, synthetic construct
RGDQSVK

SEQ ID NO: 16499 - protein, 7 aa, synthetic construct
RGDRAEF

SEQ ID NO: 16500 - protein, 7 aa, synthetic construct
RGDRAQR

SEQ ID NO: 16501 - protein, 7 aa, synthetic construct
RGDRDDL

SEQ ID NO: 16502 - protein, 7 aa, synthetic construct
RGDRFQN

SEQ ID NO: 16503 - protein, 7 aa, synthetic construct
RGDRGEG

SEQ ID NO: 16504 - protein, 7 aa, synthetic construct
RGDRGVD

SEQ ID NO: 16505 - protein, 7 aa, synthetic construct
RGDRHVH

SEQ ID NO: 16506 - protein, 7 aa, synthetic construct
RGDRIAH

SEQ ID NO: 16507 - protein, 7 aa, synthetic construct
RGDRINQ

SEQ ID NO: 16508 - protein, 7 aa, synthetic construct
RGDRIQF

SEQ ID NO: 16509 - protein, 7 aa, synthetic construct
RGDRKHV

SEQ ID NO: 16510 - protein, 7 aa, synthetic construct
RGDRKRN

SEQ ID NO: 16511 - protein, 7 aa, synthetic construct
RGDDEGK

SEQ ID NO: 16512 - protein, 7 aa, synthetic construct
RGDRLFA

SEQ ID NO: 16513 - protein, 7 aa, synthetic construct
RGDRLHF

SEQ ID NO: 16514 - protein, 7 aa, synthetic construct
RGDRLKA

SEQ ID NO: 16515 - protein, 7 aa, synthetic construct
RGDRNNE

SEQ ID NO: 16516 - protein, 7 aa, synthetic construct
RGDRQTE

SEQ ID NO: 16517 - protein, 7 aa, synthetic construct
RGDRSDN

SEQ ID NO: 16518 - protein, 7 aa, synthetic construct
RGDRTEN

SEQ ID NO: 16519 - protein, 7 aa, synthetic construct
RGDSAKG

SEQ ID NO: 16520 - protein, 7 aa, synthetic construct
RGDSEFL

SEQ ID NO: 16521 - protein, 7 aa, synthetic construct
RGDSEQL

SEQ ID NO: 16522 - protein, 7 aa, synthetic construct
RGDSERL

SEQ ID NO: 16523 - protein, 7 aa, synthetic construct
RGDSFHQ

SEQ ID NO: 16524 - protein, 7 aa, synthetic construct
RGDDFIK

SEQ ID NO: 16525 - protein, 7 aa, synthetic construct
RGDSKDI

SEQ ID NO: 16526 - protein, 7 aa, synthetic construct
RGDSKHH

SEQ ID NO: 16527 - protein, 7 aa, synthetic construct
RGDSNEH

SEQ ID NO: 16528 - protein, 7 aa, synthetic construct
RGDSNFF

SEQ ID NO: 16529 - protein, 7 aa, synthetic construct
RGDSNFS

SEQ ID NO: 16530 - protein, 7 aa, synthetic construct
RGDSQFI

SEQ ID NO: 16531 - protein, 7 aa, synthetic construct
RGDSQHQ

SEQ ID NO: 16532 - protein, 7 aa, synthetic construct
RGDDGAT

SEQ ID NO: 16533 - protein, 7 aa, synthetic construct
RGDSRIA

SEQ ID NO: 16534 - protein, 7 aa, synthetic construct
RGDSRTH

SEQ ID NO: 16535 - protein, 7 aa, synthetic construct
RGDSSGV

SEQ ID NO: 16536 - protein, 7 aa, synthetic construct
RGDSSHR

SEQ ID NO: 16537 - protein, 7 aa, synthetic construct
RGDSSLF

SEQ ID NO: 16538 - protein, 7 aa, synthetic construct
RGDSSTK

SEQ ID NO: 16539 - protein, 7 aa, synthetic construct
RGDSTDK

SEQ ID NO: 16540 - protein, 7 aa, synthetic construct
RGDSTKT

SEQ ID NO: 16541 - protein, 7 aa, synthetic construct
RGDSTRH

SEQ ID NO: 16542 - protein, 7 aa, synthetic construct
RGDSVVK

SEQ ID NO: 16543 - protein, 7 aa, synthetic construct
RGDTDLA

SEQ ID NO: 16544 - protein, 7 aa, synthetic construct
RGDTFKV

SEQ ID NO: 16545 - protein, 7 aa, synthetic construct
RGDTFTF

SEQ ID NO: 16546 - protein, 7 aa, synthetic construct
RGDTGTH

SEQ ID NO: 16547 - protein, 7 aa, synthetic construct
RGDTHVH

SEQ ID NO: 16548 - protein, 7 aa, synthetic construct
RGDTIVK

SEQ ID NO: 16549 - protein, 7 aa, synthetic construct
RGDTLGN

SEQ ID NO: 16550 - protein, 7 aa, synthetic construct
RGDTNAH

SEQ ID NO: 16551 - protein, 7 aa, synthetic construct
RGDTNVS

SEQ ID NO: 16552 - protein, 7 aa, synthetic construct
RGDTQAV

SEQ ID NO: 16553 - protein, 7 aa, synthetic construct
RGDTQGF

SEQ ID NO: 16554 - protein, 7 aa, synthetic construct
RGDTQRG

SEQ ID NO: 16555 - protein, 7 aa, synthetic construct
RGDTQRV

SEQ ID NO: 16556 - protein, 7 aa, synthetic construct
RGDTRDN

SEQ ID NO: 16557 - protein, 7 aa, synthetic construct
RGDTREI

SEQ ID NO: 16558 - protein, 7 aa, synthetic construct
RGDTRGT

SEQ ID NO: 16559 - protein, 7 aa, synthetic construct
RGDTRGV

SEQ ID NO: 16560 - protein, 7 aa, synthetic construct
RGDTRSH

SEQ ID NO: 16561 - protein, 7 aa, synthetic construct
RGDTSGR

SEQ ID NO: 16562 - protein, 7 aa, synthetic construct
RGDTSHK

SEQ ID NO: 16563 - protein, 7 aa, synthetic construct
RGDTSII

SEQ ID NO: 16564 - protein, 7 aa, synthetic construct
RGDDHRT

SEQ ID NO: 16565 - protein, 7 aa, synthetic construct
RGDTVET

SEQ ID NO: 16566 - protein, 7 aa, synthetic construct
RGDTVIV

SEQ ID NO: 16567 - protein, 7 aa, synthetic construct
RGDTVRT

SEQ ID NO: 16568 - protein, 7 aa, synthetic construct
RGDTVVK

SEQ ID NO: 16569 - protein, 7 aa, synthetic construct
RGDVAHE

SEQ ID NO: 16570 - protein, 7 aa, synthetic construct
RGDVDRQ

SEQ ID NO: 16571 - protein, 7 aa, synthetic construct
RGDVDSE

SEQ ID NO: 16572 - protein, 7 aa, synthetic construct
RGDVFHH

SEQ ID NO: 16573 - protein, 7 aa, synthetic construct
RGDVFHK

SEQ ID NO: 16574 - protein, 7 aa, synthetic construct
RGDVFII

SEQ ID NO: 16575 - protein, 7 aa, synthetic construct
RGDVGFS

SEQ ID NO: 16576 - protein, 7 aa, synthetic construct
RGDVGLV

SEQ ID NO: 16577 - protein, 7 aa, synthetic construct
RGDVHKQ

SEQ ID NO: 16578 - protein, 7 aa, synthetic construct
RGDAEEG

SEQ ID NO: 16579 - protein, 7 aa, synthetic construct
RGDVIHQ

SEQ ID NO: 16580 - protein, 7 aa, synthetic construct
RGDVIST

SEQ ID NO: 16581 - protein, 7 aa, synthetic construct
RGDVKEQ

SEQ ID NO: 16582 - protein, 7 aa, synthetic construct
RGDVLAR

SEQ ID NO: 16583 - protein, 7 aa, synthetic construct
RGDVLGV

SEQ ID NO: 16584 - protein, 7 aa, synthetic construct
RGDVLSQ

SEQ ID NO: 16585 - protein, 7 aa, synthetic construct
RGDVNNN

SEQ ID NO: 16586 - protein, 7 aa, synthetic construct
RGDVQFR

SEQ ID NO: 16587 - protein, 7 aa, synthetic construct
RGDVQHH

SEQ ID NO: 16588 - protein, 7 aa, synthetic construct
RGDVQKF

SEQ ID NO: 16589 - protein, 7 aa, synthetic construct
RGDVQRQ

SEQ ID NO: 16590 - protein, 7 aa, synthetic construct
RGDVQVD

SEQ ID NO: 16591 - protein, 7 aa, synthetic construct
RGDVTTI

SEQ ID NO: 16592 - protein, 7 aa, synthetic construct
RGDVVID

SEQ ID NO: 16593 - protein, 7 aa, synthetic construct
RGDVVLQ

SEQ ID NO: 16594 - protein, 7 aa, synthetic construct
RGDAAFI

SEQ ID NO: 16595 - protein, 7 aa, synthetic construct
RGDAEHR

SEQ ID NO: 16596 - protein, 7 aa, synthetic construct
RGDDNVV

SEQ ID NO: 16597 - protein, 7 aa, synthetic construct
RGDDVGE

SEQ ID NO: 16598 - protein, 7 aa, synthetic construct
RGDDVGN

SEQ ID NO: 16599 - protein, 7 aa, synthetic construct
RGDEAKE

SEQ ID NO: 16600 - protein, 7 aa, synthetic construct
RGDEDRD

SEQ ID NO: 16601 - protein, 7 aa, synthetic construct
RGDEETV

SEQ ID NO: 16602 - protein, 7 aa, synthetic construct
RGDEFHT

SEQ ID NO: 16603 - protein, 7 aa, synthetic construct
RGDEGAS

SEQ ID NO: 16604 - protein, 7 aa, synthetic construct
RGDEGHL

SEQ ID NO: 16605 - protein, 7 aa, synthetic construct
RGDEGLI

SEQ ID NO: 16606 - protein, 7 aa, synthetic construct
RGDAFKA

SEQ ID NO: 16607 - protein, 7 aa, synthetic construct
RGDEHEK

SEQ ID NO: 16608 - protein, 7 aa, synthetic construct
RGDEIGS

SEQ ID NO: 16609 - protein, 7 aa, synthetic construct
RGDELKL

SEQ ID NO: 16610 - protein, 7 aa, synthetic construct
RGDAFTI

SEQ ID NO: 16611 - protein, 7 aa, synthetic construct
RGDENKV

SEQ ID NO: 16612 - protein, 7 aa, synthetic construct
RGDEQAI

SEQ ID NO: 16613 - protein, 7 aa, synthetic construct
RGDEQRF

SEQ ID NO: 16614 - protein, 7 aa, synthetic construct
RGDERDH

SEQ ID NO: 16615 - protein, 7 aa, synthetic construct
RGDERGH

SEQ ID NO: 16616 - protein, 7 aa, synthetic construct
RGDERKI

SEQ ID NO: 16617 - protein, 7 aa, synthetic construct
RGDESQT

SEQ ID NO: 16618 - protein, 7 aa, synthetic construct
RGDAGGI

SEQ ID NO: 16619 - protein, 7 aa, synthetic construct
RGDETKR

SEQ ID NO: 16620 - protein, 7 aa, synthetic construct
RGDAGHH

SEQ ID NO: 16621 - protein, 7 aa, synthetic construct
RGDEVTI

SEQ ID NO: 16622 - protein, 7 aa, synthetic construct
RGDEVVF

SEQ ID NO: 16623 - protein, 7 aa, synthetic construct
RGDAGKT

SEQ ID NO: 16624 - protein, 7 aa, synthetic construct
RGDFAQT

SEQ ID NO: 16625 - protein, 7 aa, synthetic construct
RGDFDVL

SEQ ID NO: 16626 - protein, 7 aa, synthetic construct
RGDFEFS

SEQ ID NO: 16627 - protein, 7 aa, synthetic construct
RGDFEHQ

SEQ ID NO: 16628 - protein, 7 aa, synthetic construct
RGDFENT

SEQ ID NO: 16629 - protein, 7 aa, synthetic construct
RGDFFGT

SEQ ID NO: 16630 - protein, 7 aa, synthetic construct
RGDFHDQ

SEQ ID NO: 16631 - protein, 7 aa, synthetic construct
RGDFHII

SEQ ID NO: 16632 - protein, 7 aa, synthetic construct
RGDFHQG

SEQ ID NO: 16633 - protein, 7 aa, synthetic construct
RGDFKHA

SEQ ID NO: 16634 - protein, 7 aa, synthetic construct
RGDFLRF

SEQ ID NO: 16635 - protein, 7 aa, synthetic construct
RGDFLTI

SEQ ID NO: 16636 - protein, 7 aa, synthetic construct
RGDFNHS

SEQ ID NO: 16637 - protein, 7 aa, synthetic construct
RGDFNNI

SEQ ID NO: 16638 - protein, 7 aa, synthetic construct
RGDFQGE

SEQ ID NO: 16639 - protein, 7 aa, synthetic construct
RGDFSEH

SEQ ID NO: 16640 - protein, 7 aa, synthetic construct
RGDFSLK

SEQ ID NO: 16641 - protein, 7 aa, synthetic construct
RGDFSRA

SEQ ID NO: 16642 - protein, 7 aa, synthetic construct
RGDGALT

SEQ ID NO: 16643 - protein, 7 aa, synthetic construct
RGDGASH

SEQ ID NO: 16644 - protein, 7 aa, synthetic construct
RGDGDRE

SEQ ID NO: 16645 - protein, 7 aa, synthetic construct
RGDGFNS

SEQ ID NO: 16646 - protein, 7 aa, synthetic construct
RGDAIHK

SEQ ID NO: 16647 - protein, 7 aa, synthetic construct
RGDGFQN

SEQ ID NO: 16648 - protein, 7 aa, synthetic construct
RGDGGTE

SEQ ID NO: 16649 - protein, 7 aa, synthetic construct
RGDGHQI

SEQ ID NO: 16650 - protein, 7 aa, synthetic construct
RGDGIHK

SEQ ID NO: 16651 - protein, 7 aa, synthetic construct
RGDAINT

SEQ ID NO: 16652 - protein, 7 aa, synthetic construct
RGDAIST

SEQ ID NO: 16653 - protein, 7 aa, synthetic construct
RGDGNST

SEQ ID NO: 16654 - protein, 7 aa, synthetic construct
RGDGQDN

SEQ ID NO: 16655 - protein, 7 aa, synthetic construct
RGDGSTF

SEQ ID NO: 16656 - protein, 7 aa, synthetic construct
RGDGSTI

SEQ ID NO: 16657 - protein, 7 aa, synthetic construct
RGDGTHS

SEQ ID NO: 16658 - protein, 7 aa, synthetic construct
RGDGTKA

SEQ ID NO: 16659 - protein, 7 aa, synthetic construct
RGDGVGQ

SEQ ID NO: 16660 - protein, 7 aa, synthetic construct
RGDHAFS

SEQ ID NO: 16661 - protein, 7 aa, synthetic construct
RGDHALQ

SEQ ID NO: 16662 - protein, 7 aa, synthetic construct
RGDHDNT

SEQ ID NO: 16663 - protein, 7 aa, synthetic construct
RGDHERK

SEQ ID NO: 16664 - protein, 7 aa, synthetic construct
RGDHHEH

SEQ ID NO: 16665 - protein, 7 aa, synthetic construct
RGDHHKI

SEQ ID NO: 16666 - protein, 7 aa, synthetic construct
RGDHIHT

SEQ ID NO: 16667 - protein, 7 aa, synthetic construct
RGDHKGG

SEQ ID NO: 16668 - protein, 7 aa, synthetic construct
RGDHKGQ

SEQ ID NO: 16669 - protein, 7 aa, synthetic construct
RGDHKIL

SEQ ID NO: 16670 - protein, 7 aa, synthetic construct
RGDHKKH

SEQ ID NO: 16671 - protein, 7 aa, synthetic construct
RGDHKNF

SEQ ID NO: 16672 - protein, 7 aa, synthetic construct
RGDALGI

SEQ ID NO: 16673 - protein, 7 aa, synthetic construct
RGDALGK

SEQ ID NO: 16674 - protein, 7 aa, synthetic construct
RGDHLEH

SEQ ID NO: 16675 - protein, 7 aa, synthetic construct
RGDHLFA

SEQ ID NO: 16676 - protein, 7 aa, synthetic construct
RGDHLNQ

SEQ ID NO: 16677 - protein, 7 aa, synthetic construct
RGDALHN

SEQ ID NO: 16678 - protein, 7 aa, synthetic construct
RGDHNFE

SEQ ID NO: 16679 - protein, 7 aa, synthetic construct
RGDHNKH

SEQ ID NO: 16680 - protein, 7 aa, synthetic construct
RGDHNNQ

SEQ ID NO: 16681 - protein, 7 aa, synthetic construct
RGDHNST

SEQ ID NO: 16682 - protein, 7 aa, synthetic construct
RGDHQNT

SEQ ID NO: 16683 - protein, 7 aa, synthetic construct
RGDHQTG

SEQ ID NO: 16684 - protein, 7 aa, synthetic construct
RGDHQTS

SEQ ID NO: 16685 - protein, 7 aa, synthetic construct
RGDHRHV

SEQ ID NO: 16686 - protein, 7 aa, synthetic construct
RGDHSDL

SEQ ID NO: 16687 - protein, 7 aa, synthetic construct
RGDHSKG

SEQ ID NO: 16688 - protein, 7 aa, synthetic construct
RGDHSLT

SEQ ID NO: 16689 - protein, 7 aa, synthetic construct
RGDHSST

SEQ ID NO: 16690 - protein, 7 aa, synthetic construct
RGDHSTA

SEQ ID NO: 16691 - protein, 7 aa, synthetic construct
RGDHVDH

SEQ ID NO: 16692 - protein, 7 aa, synthetic construct
RGDALTT

SEQ ID NO: 16693 - protein, 7 aa, synthetic construct
RGDHVIK

SEQ ID NO: 16694 - protein, 7 aa, synthetic construct
RGDALVK

SEQ ID NO: 16695 - protein, 7 aa, synthetic construct
RGDIDIR

SEQ ID NO: 16696 - protein, 7 aa, synthetic construct
RGDIDVR

SEQ ID NO: 16697 - protein, 7 aa, synthetic construct
RGDIEFI

SEQ ID NO: 16698 - protein, 7 aa, synthetic construct
RGDIFGF

SEQ ID NO: 16699 - protein, 7 aa, synthetic construct
RGDIFKF

SEQ ID NO: 16700 - protein, 7 aa, synthetic construct
RGDIIFK

SEQ ID NO: 16701 - protein, 7 aa, synthetic construct
RGDILHK

SEQ ID NO: 16702 - protein, 7 aa, synthetic construct
RGDILRF

SEQ ID NO: 16703 - protein, 7 aa, synthetic construct
RGDILVF

SEQ ID NO: 16704 - protein, 7 aa, synthetic construct
RGDIQNA

SEQ ID NO: 16705 - protein, 7 aa, synthetic construct
RGDIRIF

SEQ ID NO: 16706 - protein, 7 aa, synthetic construct
RGDITQK

SEQ ID NO: 16707 - protein, 7 aa, synthetic construct
RGDIVAK

SEQ ID NO: 16708 - protein, 7 aa, synthetic construct
RGDKDGN

SEQ ID NO: 16709 - protein, 7 aa, synthetic construct
RGDAQRK

SEQ ID NO: 16710 - protein, 7 aa, synthetic construct
RGDAQRS

SEQ ID NO: 16711 - protein, 7 aa, synthetic construct
RGDAQSN

SEQ ID NO: 16712 - protein, 7 aa, synthetic construct
RGDKGFF

SEQ ID NO: 16713 - protein, 7 aa, synthetic construct
RGDKGFR

SEQ ID NO: 16714 - protein, 7 aa, synthetic construct
RGDKHFR

SEQ ID NO: 16715 - protein, 7 aa, synthetic construct
RGDKHHF

SEQ ID NO: 16716 - protein, 7 aa, synthetic construct
RGDKIDV

SEQ ID NO: 16717 - protein, 7 aa, synthetic construct
RGDKIKG

SEQ ID NO: 16718 - protein, 7 aa, synthetic construct
RGDKLHD

SEQ ID NO: 16719 - protein, 7 aa, synthetic construct
RGDKLNK

SEQ ID NO: 16720 - protein, 7 aa, synthetic construct
RGDKNFE

SEQ ID NO: 16721 - protein, 7 aa, synthetic construct
RGDKRKV

SEQ ID NO: 16722 - protein, 7 aa, synthetic construct
RGDKRTL

SEQ ID NO: 16723 - protein, 7 aa, synthetic construct
RGDKSDL

SEQ ID NO: 16724 - protein, 7 aa, synthetic construct
RGDKSGS

SEQ ID NO: 16725 - protein, 7 aa, synthetic construct
RGDKSNL

SEQ ID NO: 16726 - protein, 7 aa, synthetic construct
RGDKSRT

SEQ ID NO: 16727 - protein, 7 aa, synthetic construct
RGDKTII

SEQ ID NO: 16728 - protein, 7 aa, synthetic construct
RGDKVIK

SEQ ID NO: 16729 - protein, 7 aa, synthetic construct
RGDKVTH

SEQ ID NO: 16730 - protein, 7 aa, synthetic construct
RGDLDRA

SEQ ID NO: 16731 - protein, 7 aa, synthetic construct
RGDLEFH

SEQ ID NO: 16732 - protein, 7 aa, synthetic construct
RGDLEFK

SEQ ID NO: 16733 - protein, 7 aa, synthetic construct
RGDASGG

SEQ ID NO: 16734 - protein, 7 aa, synthetic construct
RGDLFIK

SEQ ID NO: 16735 - protein, 7 aa, synthetic construct
RGDLFKN

SEQ ID NO: 16736 - protein, 7 aa, synthetic construct
RGDLFSD

SEQ ID NO: 16737 - protein, 7 aa, synthetic construct
RGDLGAT

SEQ ID NO: 16738 - protein, 7 aa, synthetic construct
RGDLGEI

SEQ ID NO: 16739 - protein, 7 aa, synthetic construct
RGDASII

SEQ ID NO: 16740 - protein, 7 aa, synthetic construct
RGDLGNG

SEQ ID NO: 16741 - protein, 7 aa, synthetic construct
RGDLHAI

SEQ ID NO: 16742 - protein, 7 aa, synthetic construct
RGDLHKS

SEQ ID NO: 16743 - protein, 7 aa, synthetic construct
RGDLHRI

SEQ ID NO: 16744 - protein, 7 aa, synthetic construct
RGDLIAK

SEQ ID NO: 16745 - protein, 7 aa, synthetic construct
RGDLISK

SEQ ID NO: 16746 - protein, 7 aa, synthetic construct
RGDLLHI

SEQ ID NO: 16747 - protein, 7 aa, synthetic construct
RGDLLRV

SEQ ID NO: 16748 - protein, 7 aa, synthetic construct
RGDLQFF

SEQ ID NO: 16749 - protein, 7 aa, synthetic construct
RGDLQVG

SEQ ID NO: 16750 - protein, 7 aa, synthetic construct
RGDLRDT

SEQ ID NO: 16751 - protein, 7 aa, synthetic construct
RGDLSEI

SEQ ID NO: 16752 - protein, 7 aa, synthetic construct
RGDLSIK

SEQ ID NO: 16753 - protein, 7 aa, synthetic construct
RGDLSNA

SEQ ID NO: 16754 - protein, 7 aa, synthetic construct
RGDATGN

SEQ ID NO: 16755 - protein, 7 aa, synthetic construct
RGDLTGK

SEQ ID NO: 16756 - protein, 7 aa, synthetic construct
RGDATHK

SEQ ID NO: 16757 - protein, 7 aa, synthetic construct
RGDLVRL

SEQ ID NO: 16758 - protein, 7 aa, synthetic construct
RGDNAFT

SEQ ID NO: 16759 - protein, 7 aa, synthetic construct
RGDNFQL

SEQ ID NO: 16760 - protein, 7 aa, synthetic construct
RGDNGEK

SEQ ID NO: 16761 - protein, 7 aa, synthetic construct
RGDNGVV

SEQ ID NO: 16762 - protein, 7 aa, synthetic construct
RGDNIKH

SEQ ID NO: 16763 - protein, 7 aa, synthetic construct
RGDAVFI

SEQ ID NO: 16764 - protein, 7 aa, synthetic construct
RGDNLAK

SEQ ID NO: 16765 - protein, 7 aa, synthetic construct
RGDNLKS

SEQ ID NO: 16766 - protein, 7 aa, synthetic construct
RGDAVKS

SEQ ID NO: 16767 - protein, 7 aa, synthetic construct
RGDNRGK

SEQ ID NO: 16768 - protein, 7 aa, synthetic construct
RGDNSEG

SEQ ID NO: 16769 - protein, 7 aa, synthetic construct
RGDNTNI

SEQ ID NO: 16770 - protein, 7 aa, synthetic construct
RGDAVTH

SEQ ID NO: 16771 - protein, 7 aa, synthetic construct
RGDQAGT

SEQ ID NO: 16772 - protein, 7 aa, synthetic construct
RGDQEFV

SEQ ID NO: 16773 - protein, 7 aa, synthetic construct
RGDQEVQ

SEQ ID NO: 16774 - protein, 7 aa, synthetic construct
RGDQGQF

SEQ ID NO: 16775 - protein, 7 aa, synthetic construct
RGDQGQK

SEQ ID NO: 16776 - protein, 7 aa, synthetic construct
RGDQHSL

SEQ ID NO: 16777 - protein, 7 aa, synthetic construct
RGDQHTK

SEQ ID NO: 16778 - protein, 7 aa, synthetic construct
RGDADLH

SEQ ID NO: 16779 - protein, 7 aa, synthetic construct
RGDQIKN

SEQ ID NO: 16780 - protein, 7 aa, synthetic construct
RGDQINL

SEQ ID NO: 16781 - protein, 7 aa, synthetic construct
RGDDARV

SEQ ID NO: 16782 - protein, 7 aa, synthetic construct
RGDQLDK

SEQ ID NO: 16783 - protein, 7 aa, synthetic construct
RGDQLIF

SEQ ID NO: 16784 - protein, 7 aa, synthetic construct
RGDQNER

SEQ ID NO: 16785 - protein, 7 aa, synthetic construct
RGDQNFQ

SEQ ID NO: 16786 - protein, 7 aa, synthetic construct
RGDQNII

SEQ ID NO: 16787 - protein, 7 aa, synthetic construct
RGDQNIT

SEQ ID NO: 16788 - protein, 7 aa, synthetic construct
RGDQRIR

SEQ ID NO: 16789 - protein, 7 aa, synthetic construct
RGDQRNF

SEQ ID NO: 16790 - protein, 7 aa, synthetic construct
RGDQSGQ

SEQ ID NO: 16791 - protein, 7 aa, synthetic construct
RGDQTIQ

SEQ ID NO: 16792 - protein, 7 aa, synthetic construct
RGDQVAV

SEQ ID NO: 16793 - protein, 7 aa, synthetic construct
RGDREFE

SEQ ID NO: 16794 - protein, 7 aa, synthetic construct
RGDRFSN

SEQ ID NO: 16795 - protein, 7 aa, synthetic construct
RGDRGFE

SEQ ID NO: 16796 - protein, 7 aa, synthetic construct
RGDRGHG

SEQ ID NO: 16797 - protein, 7 aa, synthetic construct
RGDRGNE

SEQ ID NO: 16798 - protein, 7 aa, synthetic construct
RGDRIAK

SEQ ID NO: 16799 - protein, 7 aa, synthetic construct
RGDRIGH

SEQ ID NO: 16800 - protein, 7 aa, synthetic construct
RGDRIIQ

SEQ ID NO: 16801 - protein, 7 aa, synthetic construct
RGDRILE

SEQ ID NO: 16802 - protein, 7 aa, synthetic construct
RGDRKQF

SEQ ID NO: 16803 - protein, 7 aa, synthetic construct
RGDRLQQ

SEQ ID NO: 16804 - protein, 7 aa, synthetic construct
RGDRRQT

SEQ ID NO: 16805 - protein, 7 aa, synthetic construct
RGDRSLA

SEQ ID NO: 16806 - protein, 7 aa, synthetic construct
RGDRSLG

SEQ ID NO: 16807 - protein, 7 aa, synthetic construct
RGDSGVN

SEQ ID NO: 16808 - protein, 7 aa, synthetic construct
RGDSHKS

SEQ ID NO: 16809 - protein, 7 aa, synthetic construct
RGDSHSR

SEQ ID NO: 16810 - protein, 7 aa, synthetic construct
RGDSIRT

SEQ ID NO: 16811 - protein, 7 aa, synthetic construct
RGDSIVA

SEQ ID NO: 16812 - protein, 7 aa, synthetic construct
RGDSKKI

SEQ ID NO: 16813 - protein, 7 aa, synthetic construct
RGDSLFL

SEQ ID NO: 16814 - protein, 7 aa, synthetic construct
RGDSLNQ

SEQ ID NO: 16815 - protein, 7 aa, synthetic construct
RGDSNQA

SEQ ID NO: 16816 - protein, 7 aa, synthetic construct
RGDSREL

SEQ ID NO: 16817 - protein, 7 aa, synthetic construct
RGDSRQD

SEQ ID NO: 16818 - protein, 7 aa, synthetic construct
RGDSSTD

SEQ ID NO: 16819 - protein, 7 aa, synthetic construct
RGDSVEK

SEQ ID NO: 16820 - protein, 7 aa, synthetic construct
RGDSVNG

SEQ ID NO: 16821 - protein, 7 aa, synthetic construct
RGDTDQF

SEQ ID NO: 16822 - protein, 7 aa, synthetic construct
RGDTEEH

SEQ ID NO: 16823 - protein, 7 aa, synthetic construct
RGDTETF

SEQ ID NO: 16824 - protein, 7 aa, synthetic construct
RGDDGTR

SEQ ID NO: 16825 - protein, 7 aa, synthetic construct
RGDTGHI

SEQ ID NO: 16826 - protein, 7 aa, synthetic construct
RGDTHGG

SEQ ID NO: 16827 - protein, 7 aa, synthetic construct
RGDTKHQ

SEQ ID NO: 16828 - protein, 7 aa, synthetic construct
RGDTLQH

SEQ ID NO: 16829 - protein, 7 aa, synthetic construct
RGDTQTH

SEQ ID NO: 16830 - protein, 7 aa, synthetic construct
RGDTSAQ

SEQ ID NO: 16831 - protein, 7 aa, synthetic construct
RGDTSVF

SEQ ID NO: 16832 - protein, 7 aa, synthetic construct
RGDTSVK

SEQ ID NO: 16833 - protein, 7 aa, synthetic construct
RGDTVIH

SEQ ID NO: 16834 - protein, 7 aa, synthetic construct
RGDTVNR

SEQ ID NO: 16835 - protein, 7 aa, synthetic construct
RGDTVTL

SEQ ID NO: 16836 - protein, 7 aa, synthetic construct
RGDVAER

SEQ ID NO: 16837 - protein, 7 aa, synthetic construct
RGDVASQ

SEQ ID NO: 16838 - protein, 7 aa, synthetic construct
RGDVDKV

SEQ ID NO: 16839 - protein, 7 aa, synthetic construct
RGDVEKN

SEQ ID NO: 16840 - protein, 7 aa, synthetic construct
RGDVELV

SEQ ID NO: 16841 - protein, 7 aa, synthetic construct
RGDVFRF

SEQ ID NO: 16842 - protein, 7 aa, synthetic construct
RGDVGNS

SEQ ID NO: 16843 - protein, 7 aa, synthetic construct
RGDVHHE

SEQ ID NO: 16844 - protein, 7 aa, synthetic construct
RGDVHLQ

SEQ ID NO: 16845 - protein, 7 aa, synthetic construct
RGDVIGK

SEQ ID NO: 16846 - protein, 7 aa, synthetic construct
RGDVIKK

SEQ ID NO: 16847 - protein, 7 aa, synthetic construct
RGDVIRN

SEQ ID NO: 16848 - protein, 7 aa, synthetic construct
RGDVIVQ

SEQ ID NO: 16849 - protein, 7 aa, synthetic construct
RGDVKRI

SEQ ID NO: 16850 - protein, 7 aa, synthetic construct
RGDVKTH

SEQ ID NO: 16851 - protein, 7 aa, synthetic construct
RGDVLGS

SEQ ID NO: 16852 - protein, 7 aa, synthetic construct
RGDVLIH

SEQ ID NO: 16853 - protein, 7 aa, synthetic construct
RGDVLII

SEQ ID NO: 16854 - protein, 7 aa, synthetic construct
RGDVLLK

SEQ ID NO: 16855 - protein, 7 aa, synthetic construct
RGDDITV

SEQ ID NO: 16856 - protein, 7 aa, synthetic construct
RGDVNTQ

SEQ ID NO: 16857 - protein, 7 aa, synthetic construct
RGDVQAQ

SEQ ID NO: 16858 - protein, 7 aa, synthetic construct
RGDVQRD

SEQ ID NO: 16859 - protein, 7 aa, synthetic construct
RGDVQTK

SEQ ID NO: 16860 - protein, 7 aa, synthetic construct
RGDVREE

SEQ ID NO: 16861 - protein, 7 aa, synthetic construct
RGDVTGV

SEQ ID NO: 16862 - protein, 7 aa, synthetic construct
RGDVTHD

SEQ ID NO: 16863 - protein, 7 aa, synthetic construct
RGDDKHK

SEQ ID NO: 16864 - protein, 7 aa, synthetic construct
RGDVTVL

SEQ ID NO: 16865 - protein, 7 aa, synthetic construct
RGDVVEK

SEQ ID NO: 16866 - protein, 7 aa, synthetic construct
RGDVVKQ

SEQ ID NO: 16867 - protein, 7 aa, synthetic construct
RGDDNET

SEQ ID NO: 16868 - protein, 7 aa, synthetic construct
RGDDVQH

SEQ ID NO: 16869 - protein, 7 aa, synthetic construct
RGDEEII

SEQ ID NO: 16870 - protein, 7 aa, synthetic construct
RGDAFGK

SEQ ID NO: 16871 - protein, 7 aa, synthetic construct
RGDEGSS

SEQ ID NO: 16872 - protein, 7 aa, synthetic construct
RGDEGVT

SEQ ID NO: 16873 - protein, 7 aa, synthetic construct
RGDEHIK

SEQ ID NO: 16874 - protein, 7 aa, synthetic construct
RGDEIFH

SEQ ID NO: 16875 - protein, 7 aa, synthetic construct
RGDELRI

SEQ ID NO: 16876 - protein, 7 aa, synthetic construct
RGDENQL

SEQ ID NO: 16877 - protein, 7 aa, synthetic construct
RGDENRR

SEQ ID NO: 16878 - protein, 7 aa, synthetic construct
RGDEQDN

SEQ ID NO: 16879 - protein, 7 aa, synthetic construct
RGDAGFD

SEQ ID NO: 16880 - protein, 7 aa, synthetic construct
RGDESHI

SEQ ID NO: 16881 - protein, 7 aa, synthetic construct
RGDESVS

SEQ ID NO: 16882 - protein, 7 aa, synthetic construct
RGDAGGQ

SEQ ID NO: 16883 - protein, 7 aa, synthetic construct
RGDEVRH

SEQ ID NO: 16884 - protein, 7 aa, synthetic construct
RGDFANR

SEQ ID NO: 16885 - protein, 7 aa, synthetic construct
RGDFDSR

SEQ ID NO: 16886 - protein, 7 aa, synthetic construct
RGDFEKR

SEQ ID NO: 16887 - protein, 7 aa, synthetic construct
RGDFKAF

SEQ ID NO: 16888 - protein, 7 aa, synthetic construct
RGDFKLA

SEQ ID NO: 16889 - protein, 7 aa, synthetic construct
RGDFKNE

SEQ ID NO: 16890 - protein, 7 aa, synthetic construct
RGDFLFG

SEQ ID NO: 16891 - protein, 7 aa, synthetic construct
RGDFLFH

SEQ ID NO: 16892 - protein, 7 aa, synthetic construct
RGDFLTK

SEQ ID NO: 16893 - protein, 7 aa, synthetic construct
RGDFLVK

SEQ ID NO: 16894 - protein, 7 aa, synthetic construct
RGDFLVR

SEQ ID NO: 16895 - protein, 7 aa, synthetic construct
RGDFQTV

SEQ ID NO: 16896 - protein, 7 aa, synthetic construct
RGDFRNE

SEQ ID NO: 16897 - protein, 7 aa, synthetic construct
RGDFSKE

SEQ ID NO: 16898 - protein, 7 aa, synthetic construct
RGDFTFV

SEQ ID NO: 16899 - protein, 7 aa, synthetic construct
RGDFTSQ

SEQ ID NO: 16900 - protein, 7 aa, synthetic construct
RGDFVSD

SEQ ID NO: 16901 - protein, 7 aa, synthetic construct
RGDGFNQ

SEQ ID NO: 16902 - protein, 7 aa, synthetic construct
RGDGFTK

SEQ ID NO: 16903 - protein, 7 aa, synthetic construct
RGDGGAN

SEQ ID NO: 16904 - protein, 7 aa, synthetic construct
RGDGGIL

SEQ ID NO: 16905 - protein, 7 aa, synthetic construct
RGDGHNQ

SEQ ID NO: 16906 - protein, 7 aa, synthetic construct
RGDAILV

SEQ ID NO: 16907 - protein, 7 aa, synthetic construct
RGDGIKA

SEQ ID NO: 16908 - protein, 7 aa, synthetic construct
RGDGIQI

SEQ ID NO: 16909 - protein, 7 aa, synthetic construct
RGDGKTV

SEQ ID NO: 16910 - protein, 7 aa, synthetic construct
RGDGNFS

SEQ ID NO: 16911 - protein, 7 aa, synthetic construct
RGDGNKE

SEQ ID NO: 16912 - protein, 7 aa, synthetic construct
RGDAKAH

SEQ ID NO: 16913 - protein, 7 aa, synthetic construct
RGDGQHV

SEQ ID NO: 16914 - protein, 7 aa, synthetic construct
RGDAKFI

SEQ ID NO: 16915 - protein, 7 aa, synthetic construct
RGDGSRS

SEQ ID NO: 16916 - protein, 7 aa, synthetic construct
RGDGSVE

SEQ ID NO: 16917 - protein, 7 aa, synthetic construct
RGDAKGV

SEQ ID NO: 16918 - protein, 7 aa, synthetic construct
RGDAKHS

SEQ ID NO: 16919 - protein, 7 aa, synthetic construct
RGDGTTR

SEQ ID NO: 16920 - protein, 7 aa, synthetic construct
RGDGVKE

SEQ ID NO: 16921 - protein, 7 aa, synthetic construct
RGDGVSS

SEQ ID NO: 16922 - protein, 7 aa, synthetic construct
RGDHAKF

SEQ ID NO: 16923 - protein, 7 aa, synthetic construct
RGDHAVR

SEQ ID NO: 16924 - protein, 7 aa, synthetic construct
RGDHDRE

SEQ ID NO: 16925 - protein, 7 aa, synthetic construct
RGDHEDQ

SEQ ID NO: 16926 - protein, 7 aa, synthetic construct
RGDHEKE

SEQ ID NO: 16927 - protein, 7 aa, synthetic construct
RGDHEST

SEQ ID NO: 16928 - protein, 7 aa, synthetic construct
RGDHFQK

SEQ ID NO: 16929 - protein, 7 aa, synthetic construct
RGDHGDQ

SEQ ID NO: 16930 - protein, 7 aa, synthetic construct
RGDHGES

SEQ ID NO: 16931 - protein, 7 aa, synthetic construct
RGDHHFL

SEQ ID NO: 16932 - protein, 7 aa, synthetic construct
RGDHHGI

SEQ ID NO: 16933 - protein, 7 aa, synthetic construct
RGDHHHL

SEQ ID NO: 16934 - protein, 7 aa, synthetic construct
RGDHHNS

SEQ ID NO: 16935 - protein, 7 aa, synthetic construct
RGDHLRF

SEQ ID NO: 16936 - protein, 7 aa, synthetic construct
RGDHNFQ

SEQ ID NO: 16937 - protein, 7 aa, synthetic construct
RGDHNFR

SEQ ID NO: 16938 - protein, 7 aa, synthetic construct
RGDHQHT

SEQ ID NO: 16939 - protein, 7 aa, synthetic construct
RGDHQKN

SEQ ID NO: 16940 - protein, 7 aa, synthetic construct
RGDHSLR

SEQ ID NO: 16941 - protein, 7 aa, synthetic construct
RGDHTDN

SEQ ID NO: 16942 - protein, 7 aa, synthetic construct
RGDHTST

SEQ ID NO: 16943 - protein, 7 aa, synthetic construct
RGDHVHQ

SEQ ID NO: 16944 - protein, 7 aa, synthetic construct
RGDHVKI

SEQ ID NO: 16945 - protein, 7 aa, synthetic construct
RGDIARE

SEQ ID NO: 16946 - protein, 7 aa, synthetic construct
RGDIDNG

SEQ ID NO: 16947 - protein, 7 aa, synthetic construct
RGDIEAQ

SEQ ID NO: 16948 - protein, 7 aa, synthetic construct
RGDIEEG

SEQ ID NO: 16949 - protein, 7 aa, synthetic construct
RGDIFNK

SEQ ID NO: 16950 - protein, 7 aa, synthetic construct
RGDANHN

SEQ ID NO: 16951 - protein, 7 aa, synthetic construct
RGDIFSF

SEQ ID NO: 16952 - protein, 7 aa, synthetic construct
RGDIGIV

SEQ ID NO: 16953 - protein, 7 aa, synthetic construct
RGDIHIA

SEQ ID NO: 16954 - protein, 7 aa, synthetic construct
RGDIKEE

SEQ ID NO: 16955 - protein, 7 aa, synthetic construct
RGDINAQ

SEQ ID NO: 16956 - protein, 7 aa, synthetic construct
RGDINKD

SEQ ID NO: 16957 - protein, 7 aa, synthetic construct
RGDIQGV

SEQ ID NO: 16958 - protein, 7 aa, synthetic construct
RGDIQLS

SEQ ID NO: 16959 - protein, 7 aa, synthetic construct
RGDISDN

SEQ ID NO: 16960 - protein, 7 aa, synthetic construct
RGDISEK

SEQ ID NO: 16961 - protein, 7 aa, synthetic construct
RGDISQT

SEQ ID NO: 16962 - protein, 7 aa, synthetic construct
RGDISRD

SEQ ID NO: 16963 - protein, 7 aa, synthetic construct
RGDITLQ

SEQ ID NO: 16964 - protein, 7 aa, synthetic construct
RGDIVQT

SEQ ID NO: 16965 - protein, 7 aa, synthetic construct
RGDKALH

SEQ ID NO: 16966 - protein, 7 aa, synthetic construct
RGDAQNQ

SEQ ID NO: 16967 - protein, 7 aa, synthetic construct
RGDKDSK

SEQ ID NO: 16968 - protein, 7 aa, synthetic construct
RGDAQQF

SEQ ID NO: 16969 - protein, 7 aa, synthetic construct
RGDKDVF

SEQ ID NO: 16970 - protein, 7 aa, synthetic construct
RGDKFTF

SEQ ID NO: 16971 - protein, 7 aa, synthetic construct
RGDAQVE

SEQ ID NO: 16972 - protein, 7 aa, synthetic construct
RGDKGKR

SEQ ID NO: 16973 - protein, 7 aa, synthetic construct
RGDKGTS

SEQ ID NO: 16974 - protein, 7 aa, synthetic construct
RGDKIAR

SEQ ID NO: 16975 - protein, 7 aa, synthetic construct
RGDAREI

SEQ ID NO: 16976 - protein, 7 aa, synthetic construct
RGDKKDV

SEQ ID NO: 16977 - protein, 7 aa, synthetic construct
RGDKLDN

SEQ ID NO: 16978 - protein, 7 aa, synthetic construct
RGDKNNV

SEQ ID NO: 16979 - protein, 7 aa, synthetic construct
RGDKQDR

SEQ ID NO: 16980 - protein, 7 aa, synthetic construct
RGDKQSQ

SEQ ID NO: 16981 - protein, 7 aa, synthetic construct
RGDKREF

SEQ ID NO: 16982 - protein, 7 aa, synthetic construct
RGDKSDN

SEQ ID NO: 16983 - protein, 7 aa, synthetic construct
RGDKVGH

SEQ ID NO: 16984 - protein, 7 aa, synthetic construct
RGDKVTT

SEQ ID NO: 16985 - protein, 7 aa, synthetic construct
RGDASAG

SEQ ID NO: 16986 - protein, 7 aa, synthetic construct
RGDLDGL

SEQ ID NO: 16987 - protein, 7 aa, synthetic construct
RGDLDHV

SEQ ID NO: 16988 - protein, 7 aa, synthetic construct
RGDLDLT

SEQ ID NO: 16989 - protein, 7 aa, synthetic construct
RGDLEGL

SEQ ID NO: 16990 - protein, 7 aa, synthetic construct
RGDLFAV

SEQ ID NO: 16991 - protein, 7 aa, synthetic construct
RGDLFLI

SEQ ID NO: 16992 - protein, 7 aa, synthetic construct
RGDLFRT

SEQ ID NO: 16993 - protein, 7 aa, synthetic construct
RGDLFVA

SEQ ID NO: 16994 - protein, 7 aa, synthetic construct
RGDLGKI

SEQ ID NO: 16995 - protein, 7 aa, synthetic construct
RGDLGRV

SEQ ID NO: 16996 - protein, 7 aa, synthetic construct
RGDLGSR

SEQ ID NO: 16997 - protein, 7 aa, synthetic construct
RGDLHLV

SEQ ID NO: 16998 - protein, 7 aa, synthetic construct
RGDLINH

SEQ ID NO: 16999 - protein, 7 aa, synthetic construct
RGDLISN

SEQ ID NO: 17000 - protein, 7 aa, synthetic construct
RGDLKFT

SEQ ID NO: 17001 - protein, 7 aa, synthetic construct
RGDLLLD

SEQ ID NO: 17002 - protein, 7 aa, synthetic construct
RGDLNDV

SEQ ID NO: 17003 - protein, 7 aa, synthetic construct
RGDLNHK

SEQ ID NO: 17004 - protein, 7 aa, synthetic construct
RGDLQFN

SEQ ID NO: 17005 - protein, 7 aa, synthetic construct
RGDLQTQ

SEQ ID NO: 17006 - protein, 7 aa, synthetic construct
RGDLRNH

SEQ ID NO: 17007 - protein, 7 aa, synthetic construct
RGDLSEN

SEQ ID NO: 17008 - protein, 7 aa, synthetic construct
RGDLSQK

SEQ ID NO: 17009 - protein, 7 aa, synthetic construct
RGDLTSG

SEQ ID NO: 17010 - protein, 7 aa, synthetic construct
RGDNALI

SEQ ID NO: 17011 - protein, 7 aa, synthetic construct
RGDNAVE

SEQ ID NO: 17012 - protein, 7 aa, synthetic construct
RGDNEAH

SEQ ID NO: 17013 - protein, 7 aa, synthetic construct
RGDNEQF

SEQ ID NO: 17014 - protein, 7 aa, synthetic construct
RGDNFKH

SEQ ID NO: 17015 - protein, 7 aa, synthetic construct
RGDNGFT

SEQ ID NO: 17016 - protein, 7 aa, synthetic construct
RGDNGST

SEQ ID NO: 17017 - protein, 7 aa, synthetic construct
RGDNHIK

SEQ ID NO: 17018 - protein, 7 aa, synthetic construct
RGDNIFE

SEQ ID NO: 17019 - protein, 7 aa, synthetic construct
RGDNKQG

SEQ ID NO: 17020 - protein, 7 aa, synthetic construct
RGDNSAK

SEQ ID NO: 17021 - protein, 7 aa, synthetic construct
RGDAVQL

SEQ ID NO: 17022 - protein, 7 aa, synthetic construct
RGDNSQD

SEQ ID NO: 17023 - protein, 7 aa, synthetic construct
RGDAVSD

SEQ ID NO: 17024 - protein, 7 aa, synthetic construct
RGDNTRV

SEQ ID NO: 17025 - protein, 7 aa, synthetic construct
RGDNVFH

SEQ ID NO: 17026 - protein, 7 aa, synthetic construct
RGDNVII

SEQ ID NO: 17027 - protein, 7 aa, synthetic construct
RGDQAHR

SEQ ID NO: 17028 - protein, 7 aa, synthetic construct
RGDQDNN

SEQ ID NO: 17029 - protein, 7 aa, synthetic construct
RGDQFLI

SEQ ID NO: 17030 - protein, 7 aa, synthetic construct
RGDQGAD

SEQ ID NO: 17031 - protein, 7 aa, synthetic construct
RGDQGEV

SEQ ID NO: 17032 - protein, 7 aa, synthetic construct
RGDQIQI

SEQ ID NO: 17033 - protein, 7 aa, synthetic construct
RGDQISN

SEQ ID NO: 17034 - protein, 7 aa, synthetic construct
RGDQLHA

SEQ ID NO: 17035 - protein, 7 aa, synthetic construct
RGDQLNE

SEQ ID NO: 17036 - protein, 7 aa, synthetic construct
RGDQLNT

SEQ ID NO: 17037 - protein, 7 aa, synthetic construct
RGDQLSS

SEQ ID NO: 17038 - protein, 7 aa, synthetic construct
RGDQREL

SEQ ID NO: 17039 - protein, 7 aa, synthetic construct
RGDQSAI

SEQ ID NO: 17040 - protein, 7 aa, synthetic construct
RGDQSDN

SEQ ID NO: 17041 - protein, 7 aa, synthetic construct
RGDQTLT

SEQ ID NO: 17042 - protein, 7 aa, synthetic construct
RGDQVFL

SEQ ID NO: 17043 - protein, 7 aa, synthetic construct
RGDQVTR

SEQ ID NO: 17044 - protein, 7 aa, synthetic construct
RGDRFTA

SEQ ID NO: 17045 - protein, 7 aa, synthetic construct
RGDRGKR

SEQ ID NO: 17046 - protein, 7 aa, synthetic construct
RGDRHNS

SEQ ID NO: 17047 - protein, 7 aa, synthetic construct
RGDRIDF

SEQ ID NO: 17048 - protein, 7 aa, synthetic construct
RGDRIQT

SEQ ID NO: 17049 - protein, 7 aa, synthetic construct
RGDRISK

SEQ ID NO: 17050 - protein, 7 aa, synthetic construct
RGDRNER

SEQ ID NO: 17051 - protein, 7 aa, synthetic construct
RGDRNVR

SEQ ID NO: 17052 - protein, 7 aa, synthetic construct
RGDRQGQ

SEQ ID NO: 17053 - protein, 7 aa, synthetic construct
RGDRQSK

SEQ ID NO: 17054 - protein, 7 aa, synthetic construct
RGDDEQF

SEQ ID NO: 17055 - protein, 7 aa, synthetic construct
RGDRSHS

SEQ ID NO: 17056 - protein, 7 aa, synthetic construct
RGDRSIF

SEQ ID NO: 17057 - protein, 7 aa, synthetic construct
RGDRTDF

SEQ ID NO: 17058 - protein, 7 aa, synthetic construct
RGDRTTL

SEQ ID NO: 17059 - protein, 7 aa, synthetic construct
RGDRVHA

SEQ ID NO: 17060 - protein, 7 aa, synthetic construct
RGDRVQT

SEQ ID NO: 17061 - protein, 7 aa, synthetic construct
RGDRVVR

SEQ ID NO: 17062 - protein, 7 aa, synthetic construct
RGDSAFH

SEQ ID NO: 17063 - protein, 7 aa, synthetic construct
RGDSDDV

SEQ ID NO: 17064 - protein, 7 aa, synthetic construct
RGDSFNH

SEQ ID NO: 17065 - protein, 7 aa, synthetic construct
RGDSFNV

SEQ ID NO: 17066 - protein, 7 aa, synthetic construct
RGDSGGK

SEQ ID NO: 17067 - protein, 7 aa, synthetic construct
RGDSGVT

SEQ ID NO: 17068 - protein, 7 aa, synthetic construct
RGDSIHT

SEQ ID NO: 17069 - protein, 7 aa, synthetic construct
RGDSIIK

SEQ ID NO: 17070 - protein, 7 aa, synthetic construct
RGDDFQK

SEQ ID NO: 17071 - protein, 7 aa, synthetic construct
RGDSKRV

SEQ ID NO: 17072 - protein, 7 aa, synthetic construct
RGDSLDR

SEQ ID NO: 17073 - protein, 7 aa, synthetic construct
RGDSNRG

SEQ ID NO: 17074 - protein, 7 aa, synthetic construct
RGDSNST

SEQ ID NO: 17075 - protein, 7 aa, synthetic construct
RGDSRDK

SEQ ID NO: 17076 - protein, 7 aa, synthetic construct
RGDSRDT

SEQ ID NO: 17077 - protein, 7 aa, synthetic construct
RGDDGDR

SEQ ID NO: 17078 - protein, 7 aa, synthetic construct
RGDSRLD

SEQ ID NO: 17079 - protein, 7 aa, synthetic construct
RGDDGGN

SEQ ID NO: 17080 - protein, 7 aa, synthetic construct
RGDDGGV

SEQ ID NO: 17081 - protein, 7 aa, synthetic construct
RGDSTRE

SEQ ID NO: 17082 - protein, 7 aa, synthetic construct
RGDSTSQ

SEQ ID NO: 17083 - protein, 7 aa, synthetic construct
RGDTANK

SEQ ID NO: 17084 - protein, 7 aa, synthetic construct
RGDTEAL

SEQ ID NO: 17085 - protein, 7 aa, synthetic construct
RGDTEDI

SEQ ID NO: 17086 - protein, 7 aa, synthetic construct
RGDTEQI

SEQ ID NO: 17087 - protein, 7 aa, synthetic construct
RGDTHIE

SEQ ID NO: 17088 - protein, 7 aa, synthetic construct
RGDTHIR

SEQ ID NO: 17089 - protein, 7 aa, synthetic construct
RGDTIIS

SEQ ID NO: 17090 - protein, 7 aa, synthetic construct
RGDTNAL

SEQ ID NO: 17091 - protein, 7 aa, synthetic construct
RGDTQNT

SEQ ID NO: 17092 - protein, 7 aa, synthetic construct
RGDTQTN

SEQ ID NO: 17093 - protein, 7 aa, synthetic construct
RGDTRIN

SEQ ID NO: 17094 - protein, 7 aa, synthetic construct
RGDTRLK

SEQ ID NO: 17095 - protein, 7 aa, synthetic construct
RGDDHNV

SEQ ID NO: 17096 - protein, 7 aa, synthetic construct
RGDTVAF

SEQ ID NO: 17097 - protein, 7 aa, synthetic construct
RGDDHTR

SEQ ID NO: 17098 - protein, 7 aa, synthetic construct
RGDTVHE

SEQ ID NO: 17099 - protein, 7 aa, synthetic construct
RGDTVIK

SEQ ID NO: 17100 - protein, 7 aa, synthetic construct
RGDTVKV

SEQ ID NO: 17101 - protein, 7 aa, synthetic construct
RGDVDII

SEQ ID NO: 17102 - protein, 7 aa, synthetic construct
RGDVEHQ

SEQ ID NO: 17103 - protein, 7 aa, synthetic construct
RGDVFIT

SEQ ID NO: 17104 - protein, 7 aa, synthetic construct
RGDVFTF

SEQ ID NO: 17105 - protein, 7 aa, synthetic construct
RGDVGNA

SEQ ID NO: 17106 - protein, 7 aa, synthetic construct
RGDVIGF

SEQ ID NO: 17107 - protein, 7 aa, synthetic construct
RGDVIID

SEQ ID NO: 17108 - protein, 7 aa, synthetic construct
RGDDINR

SEQ ID NO: 17109 - protein, 7 aa, synthetic construct
RGDVKHD

SEQ ID NO: 17110 - protein, 7 aa, synthetic construct
RGDVKIE

SEQ ID NO: 17111 - protein, 7 aa, synthetic construct
RGDVLFF

SEQ ID NO: 17112 - protein, 7 aa, synthetic construct
RGDVNRD

SEQ ID NO: 17113 - protein, 7 aa, synthetic construct
RGDVQFF

SEQ ID NO: 17114 - protein, 7 aa, synthetic construct
RGDVRDR

SEQ ID NO: 17115 - protein, 7 aa, synthetic construct
RGDVTFF

SEQ ID NO: 17116 - protein, 7 aa, synthetic construct
RGDDKQL

SEQ ID NO: 17117 - protein, 7 aa, synthetic construct
RGDDLFK

SEQ ID NO: 17118 - protein, 7 aa, synthetic construct
RGDAEHF

SEQ ID NO: 17119 - protein, 7 aa, synthetic construct
RGDDLRS

SEQ ID NO: 17120 - protein, 7 aa, synthetic construct
RGDDLSK

SEQ ID NO: 17121 - protein, 7 aa, synthetic construct
RGDAEKI

SEQ ID NO: 17122 - protein, 7 aa, synthetic construct
RGDDSGS

SEQ ID NO: 17123 - protein, 7 aa, synthetic construct
RGDAEQV

SEQ ID NO: 17124 - protein, 7 aa, synthetic construct
RGDDSVV

SEQ ID NO: 17125 - protein, 7 aa, synthetic construct
RGDDTKL

SEQ ID NO: 17126 - protein, 7 aa, synthetic construct
RGDDVEA

SEQ ID NO: 17127 - protein, 7 aa, synthetic construct
RGDDVLF

SEQ ID NO: 17128 - protein, 7 aa, synthetic construct
RGDEAHQ

SEQ ID NO: 17129 - protein, 7 aa, synthetic construct
RGDEDFH

SEQ ID NO: 17130 - protein, 7 aa, synthetic construct
RGDEEHQ

SEQ ID NO: 17131 - protein, 7 aa, synthetic construct
RGDEGAQ

SEQ ID NO: 17132 - protein, 7 aa, synthetic construct
RGDEGGT

SEQ ID NO: 17133 - protein, 7 aa, synthetic construct
RGDEGLV

SEQ ID NO: 17134 - protein, 7 aa, synthetic construct
RGDEGRF

SEQ ID NO: 17135 - protein, 7 aa, synthetic construct
RGDEGRT

SEQ ID NO: 17136 - protein, 7 aa, synthetic construct
RGDEHFQ

SEQ ID NO: 17137 - protein, 7 aa, synthetic construct
RGDEHKV

SEQ ID NO: 17138 - protein, 7 aa, synthetic construct
RGDAAHH

SEQ ID NO: 17139 - protein, 7 aa, synthetic construct
RGDEKLN

SEQ ID NO: 17140 - protein, 7 aa, synthetic construct
RGDEKNA

SEQ ID NO: 17141 - protein, 7 aa, synthetic construct
RGDEKNR

SEQ ID NO: 17142 - protein, 7 aa, synthetic construct
RGDENDI

SEQ ID NO: 17143 - protein, 7 aa, synthetic construct
RGDEQTK

SEQ ID NO: 17144 - protein, 7 aa, synthetic construct
RGDEQTR

SEQ ID NO: 17145 - protein, 7 aa, synthetic construct
RGDERQS

SEQ ID NO: 17146 - protein, 7 aa, synthetic construct
RGDERRL

SEQ ID NO: 17147 - protein, 7 aa, synthetic construct
RGDESGG

SEQ ID NO: 17148 - protein, 7 aa, synthetic construct
RGDAGFQ

SEQ ID NO: 17149 - protein, 7 aa, synthetic construct
RGDEVSK

SEQ ID NO: 17150 - protein, 7 aa, synthetic construct
RGDFAKR

SEQ ID NO: 17151 - protein, 7 aa, synthetic construct
RGDFAND

SEQ ID NO: 17152 - protein, 7 aa, synthetic construct
RGDFATI

SEQ ID NO: 17153 - protein, 7 aa, synthetic construct
RGDFAVL

SEQ ID NO: 17154 - protein, 7 aa, synthetic construct
RGDFDTR

SEQ ID NO: 17155 - protein, 7 aa, synthetic construct
RGDAGQI

SEQ ID NO: 17156 - protein, 7 aa, synthetic construct
RGDFEGG

SEQ ID NO: 17157 - protein, 7 aa, synthetic construct
RGDFENV

SEQ ID NO: 17158 - protein, 7 aa, synthetic construct
RGDFFAN

SEQ ID NO: 17159 - protein, 7 aa, synthetic construct
RGDFFDL

SEQ ID NO: 17160 - protein, 7 aa, synthetic construct
RGDFFIL

SEQ ID NO: 17161 - protein, 7 aa, synthetic construct
RGDFFTL

SEQ ID NO: 17162 - protein, 7 aa, synthetic construct
RGDFGHI

SEQ ID NO: 17163 - protein, 7 aa, synthetic construct
RGDFGLN

SEQ ID NO: 17164 - protein, 7 aa, synthetic construct
RGDAHDI

SEQ ID NO: 17165 - protein, 7 aa, synthetic construct
RGDFIGH

SEQ ID NO: 17166 - protein, 7 aa, synthetic construct
RGDFIGI

SEQ ID NO: 17167 - protein, 7 aa, synthetic construct
RGDFINL

SEQ ID NO: 17168 - protein, 7 aa, synthetic construct
RGDAHET

SEQ ID NO: 17169 - protein, 7 aa, synthetic construct
RGDFLEG

SEQ ID NO: 17170 - protein, 7 aa, synthetic construct
RGDFLEH

SEQ ID NO: 17171 - protein, 7 aa, synthetic construct
RGDFLKF

SEQ ID NO: 17172 - protein, 7 aa, synthetic construct
RGDFLVF

SEQ ID NO: 17173 - protein, 7 aa, synthetic construct
RGDFNLT

SEQ ID NO: 17174 - protein, 7 aa, synthetic construct
RGDFSAE

SEQ ID NO: 17175 - protein, 7 aa, synthetic construct
RGDFTRE

SEQ ID NO: 17176 - protein, 7 aa, synthetic construct
RGDFVAR

SEQ ID NO: 17177 - protein, 7 aa, synthetic construct
RGDFVSH

SEQ ID NO: 17178 - protein, 7 aa, synthetic construct
RGDGANL

SEQ ID NO: 17179 - protein, 7 aa, synthetic construct
RGDGDNI

SEQ ID NO: 17180 - protein, 7 aa, synthetic construct
RGDGENE

SEQ ID NO: 17181 - protein, 7 aa, synthetic construct
RGDGFGR

SEQ ID NO: 17182 - protein, 7 aa, synthetic construct
RGDGGAF

SEQ ID NO: 17183 - protein, 7 aa, synthetic construct
RGDGGFE

SEQ ID NO: 17184 - protein, 7 aa, synthetic construct
RGDGGHN

SEQ ID NO: 17185 - protein, 7 aa, synthetic construct
RGDGGLF

SEQ ID NO: 17186 - protein, 7 aa, synthetic construct
RGDGGQG

SEQ ID NO: 17187 - protein, 7 aa, synthetic construct
RGDGHRR

SEQ ID NO: 17188 - protein, 7 aa, synthetic construct
RGDGKGG

SEQ ID NO: 17189 - protein, 7 aa, synthetic construct
RGDAISR

SEQ ID NO: 17190 - protein, 7 aa, synthetic construct
RGDGNDN

SEQ ID NO: 17191 - protein, 7 aa, synthetic construct
RGDGNVH

SEQ ID NO: 17192 - protein, 7 aa, synthetic construct
RGDGSRE

SEQ ID NO: 17193 - protein, 7 aa, synthetic construct
RGDHAIQ

SEQ ID NO: 17194 - protein, 7 aa, synthetic construct
RGDHDQK

SEQ ID NO: 17195 - protein, 7 aa, synthetic construct
RGDAKTQ

SEQ ID NO: 17196 - protein, 7 aa, synthetic construct
RGDHGRI

SEQ ID NO: 17197 - protein, 7 aa, synthetic construct
RGDHHSG

SEQ ID NO: 17198 - protein, 7 aa, synthetic construct
RGDHLEF

SEQ ID NO: 17199 - protein, 7 aa, synthetic construct
RGDALGR

SEQ ID NO: 17200 - protein, 7 aa, synthetic construct
RGDHLRV

SEQ ID NO: 17201 - protein, 7 aa, synthetic construct
RGDALHS

SEQ ID NO: 17202 - protein, 7 aa, synthetic construct
RGDHLVR

SEQ ID NO: 17203 - protein, 7 aa, synthetic construct
RGDHQGV

SEQ ID NO: 17204 - protein, 7 aa, synthetic construct
RGDHQVG

SEQ ID NO: 17205 - protein, 7 aa, synthetic construct
RGDHRGG

SEQ ID NO: 17206 - protein, 7 aa, synthetic construct
RGDHRHA

SEQ ID NO: 17207 - protein, 7 aa, synthetic construct
RGDHSHL

SEQ ID NO: 17208 - protein, 7 aa, synthetic construct
RGDHSRH

SEQ ID NO: 17209 - protein, 7 aa, synthetic construct
RGDHSTN

SEQ ID NO: 17210 - protein, 7 aa, synthetic construct
RGDHTSV

SEQ ID NO: 17211 - protein, 7 aa, synthetic construct
RGDIEAT

SEQ ID NO: 17212 - protein, 7 aa, synthetic construct
RGDIEKI

SEQ ID NO: 17213 - protein, 7 aa, synthetic construct
RGDIGII

SEQ ID NO: 17214 - protein, 7 aa, synthetic construct
RGDIKDL

SEQ ID NO: 17215 - protein, 7 aa, synthetic construct
RGDIKNS

SEQ ID NO: 17216 - protein, 7 aa, synthetic construct
RGDILGE

SEQ ID NO: 17217 - protein, 7 aa, synthetic construct
RGDINNL

SEQ ID NO: 17218 - protein, 7 aa, synthetic construct
RGDINRH

SEQ ID NO: 17219 - protein, 7 aa, synthetic construct
RGDIRSL

SEQ ID NO: 17220 - protein, 7 aa, synthetic construct
RGDITFG

SEQ ID NO: 17221 - protein, 7 aa, synthetic construct
RGDITSL

SEQ ID NO: 17222 - protein, 7 aa, synthetic construct
RGDKANL

SEQ ID NO: 17223 - protein, 7 aa, synthetic construct
RGDKARL

SEQ ID NO: 17224 - protein, 7 aa, synthetic construct
RGDKDIR

SEQ ID NO: 17225 - protein, 7 aa, synthetic construct
RGDKFHQ

SEQ ID NO: 17226 - protein, 7 aa, synthetic construct
RGDKFRK

SEQ ID NO: 17227 - protein, 7 aa, synthetic construct
RGDKFTN

SEQ ID NO: 17228 - protein, 7 aa, synthetic construct
RGDAQTR

SEQ ID NO: 17229 - protein, 7 aa, synthetic construct
RGDKGFG

SEQ ID NO: 17230 - protein, 7 aa, synthetic construct
RGDAQVL

SEQ ID NO: 17231 - protein, 7 aa, synthetic construct
RGDKHET

SEQ ID NO: 17232 - protein, 7 aa, synthetic construct
RGDKHTR

SEQ ID NO: 17233 - protein, 7 aa, synthetic construct
RGDARFH

SEQ ID NO: 17234 - protein, 7 aa, synthetic construct
RGDKKQK

SEQ ID NO: 17235 - protein, 7 aa, synthetic construct
RGDKNTF

SEQ ID NO: 17236 - protein, 7 aa, synthetic construct
RGDKQFN

SEQ ID NO: 17237 - protein, 7 aa, synthetic construct
RGDKQIL

SEQ ID NO: 17238 - protein, 7 aa, synthetic construct
RGDKQNN

SEQ ID NO: 17239 - protein, 7 aa, synthetic construct
RGDKQQV

SEQ ID NO: 17240 - protein, 7 aa, synthetic construct
RGDKSRG

SEQ ID NO: 17241 - protein, 7 aa, synthetic construct
RGDKTAV

SEQ ID NO: 17242 - protein, 7 aa, synthetic construct
RGDKTGG

SEQ ID NO: 17243 - protein, 7 aa, synthetic construct
RGDKTRG

SEQ ID NO: 17244 - protein, 7 aa, synthetic construct
RGDLAIV

SEQ ID NO: 17245 - protein, 7 aa, synthetic construct
RGDLDFS

SEQ ID NO: 17246 - protein, 7 aa, synthetic construct
RGDLDRI

SEQ ID NO: 17247 - protein, 7 aa, synthetic construct
RGDLEGG

SEQ ID NO: 17248 - protein, 7 aa, synthetic construct
RGDLEGT

SEQ ID NO: 17249 - protein, 7 aa, synthetic construct
RGDLEHI

SEQ ID NO: 17250 - protein, 7 aa, synthetic construct
RGDLEKT

SEQ ID NO: 17251 - protein, 7 aa, synthetic construct
RGDLELV

SEQ ID NO: 17252 - protein, 7 aa, synthetic construct
RGDLGDI

SEQ ID NO: 17253 - protein, 7 aa, synthetic construct
RGDLGSV

SEQ ID NO: 17254 - protein, 7 aa, synthetic construct
RGDLHQD

SEQ ID NO: 17255 - protein, 7 aa, synthetic construct
RGDLIKN

SEQ ID NO: 17256 - protein, 7 aa, synthetic construct
RGDLKFS

SEQ ID NO: 17257 - protein, 7 aa, synthetic construct
RGDLKSE

SEQ ID NO: 17258 - protein, 7 aa, synthetic construct
RGDLLAS

SEQ ID NO: 17259 - protein, 7 aa, synthetic construct
RGDLLAT

SEQ ID NO: 17260 - protein, 7 aa, synthetic construct
RGDLLDK

SEQ ID NO: 17261 - protein, 7 aa, synthetic construct
RGDLLTA

SEQ ID NO: 17262 - protein, 7 aa, synthetic construct
RGDLNVH

SEQ ID NO: 17263 - protein, 7 aa, synthetic construct
RGDLQFR

SEQ ID NO: 17264 - protein, 7 aa, synthetic construct
RGDLQFT

SEQ ID NO: 17265 - protein, 7 aa, synthetic construct
RGDLVRF

SEQ ID NO: 17266 - protein, 7 aa, synthetic construct
RGDNAGN

SEQ ID NO: 17267 - protein, 7 aa, synthetic construct
RGDNAII

SEQ ID NO: 17268 - protein, 7 aa, synthetic construct
RGDNDIV

SEQ ID NO: 17269 - protein, 7 aa, synthetic construct
RGDNDKN

SEQ ID NO: 17270 - protein, 7 aa, synthetic construct
RGDNETF

SEQ ID NO: 17271 - protein, 7 aa, synthetic construct
RGDNETK

SEQ ID NO: 17272 - protein, 7 aa, synthetic construct
RGDNKSN

SEQ ID NO: 17273 - protein, 7 aa, synthetic construct
RGDNLRN

SEQ ID NO: 17274 - protein, 7 aa, synthetic construct
RGDNLTV

SEQ ID NO: 17275 - protein, 7 aa, synthetic construct
RGDNNSR

SEQ ID NO: 17276 - protein, 7 aa, synthetic construct
RGDNQNF

SEQ ID NO: 17277 - protein, 7 aa, synthetic construct
RGDNQSN

SEQ ID NO: 17278 - protein, 7 aa, synthetic construct
RGDNQTL

SEQ ID NO: 17279 - protein, 7 aa, synthetic construct
RGDNRNR

SEQ ID NO: 17280 - protein, 7 aa, synthetic construct
RGDNSES

SEQ ID NO: 17281 - protein, 7 aa, synthetic construct
RGDNSSN

SEQ ID NO: 17282 - protein, 7 aa, synthetic construct
RGDNSTT

SEQ ID NO: 17283 - protein, 7 aa, synthetic construct
RGDNTGK

SEQ ID NO: 17284 - protein, 7 aa, synthetic construct
RGDAVSQ

SEQ ID NO: 17285 - protein, 7 aa, synthetic construct
RGDNVEI

SEQ ID NO: 17286 - protein, 7 aa, synthetic construct
RGDQALH

SEQ ID NO: 17287 - protein, 7 aa, synthetic construct
RGDQAVI

SEQ ID NO: 17288 - protein, 7 aa, synthetic construct
RGDQAVQ

SEQ ID NO: 17289 - protein, 7 aa, synthetic construct
RGDQDRA

SEQ ID NO: 17290 - protein, 7 aa, synthetic construct
RGDQESV

SEQ ID NO: 17291 - protein, 7 aa, synthetic construct
RGDQFFH

SEQ ID NO: 17292 - protein, 7 aa, synthetic construct
RGDQFVH

SEQ ID NO: 17293 - protein, 7 aa, synthetic construct
RGDQHTQ

SEQ ID NO: 17294 - protein, 7 aa, synthetic construct
RGDQHVT

SEQ ID NO: 17295 - protein, 7 aa, synthetic construct
RGDQKFE

SEQ ID NO: 17296 - protein, 7 aa, synthetic construct
RGDQLGH

SEQ ID NO: 17297 - protein, 7 aa, synthetic construct
RGDQNQL

SEQ ID NO: 17298 - protein, 7 aa, synthetic construct
RGDQQNQ

SEQ ID NO: 17299 - protein, 7 aa, synthetic construct
RGDQREF

SEQ ID NO: 17300 - protein, 7 aa, synthetic construct
RGDQRRH

SEQ ID NO: 17301 - protein, 7 aa, synthetic construct
RGDQSAK

SEQ ID NO: 17302 - protein, 7 aa, synthetic construct
RGDQSIR

SEQ ID NO: 17303 - protein, 7 aa, synthetic construct
RGDQTER

SEQ ID NO: 17304 - protein, 7 aa, synthetic construct
RGDQTGN

SEQ ID NO: 17305 - protein, 7 aa, synthetic construct
RGDQVEL

SEQ ID NO: 17306 - protein, 7 aa, synthetic construct
RGDRAER

SEQ ID NO: 17307 - protein, 7 aa, synthetic construct
RGDDDQK

SEQ ID NO: 17308 - protein, 7 aa, synthetic construct
RGDREAN

SEQ ID NO: 17309 - protein, 7 aa, synthetic construct
RGDRGIE

SEQ ID NO: 17310 - protein, 7 aa, synthetic construct
RGDRHEQ

SEQ ID NO: 17311 - protein, 7 aa, synthetic construct
RGDRHHH

SEQ ID NO: 17312 - protein, 7 aa, synthetic construct
RGDRHIF

SEQ ID NO: 17313 - protein, 7 aa, synthetic construct
RGDRIQV

SEQ ID NO: 17314 - protein, 7 aa, synthetic construct
RGDRKDA

SEQ ID NO: 17315 - protein, 7 aa, synthetic construct
RGDRKDD

SEQ ID NO: 17316 - protein, 7 aa, synthetic construct
RGDRKIH

SEQ ID NO: 17317 - protein, 7 aa, synthetic construct
RGDRKQL

SEQ ID NO: 17318 - protein, 7 aa, synthetic construct
RGDRLIA

SEQ ID NO: 17319 - protein, 7 aa, synthetic construct
RGDRLQE

SEQ ID NO: 17320 - protein, 7 aa, synthetic construct
RGDRNGH

SEQ ID NO: 17321 - protein, 7 aa, synthetic construct
RGDRNGS

SEQ ID NO: 17322 - protein, 7 aa, synthetic construct
RGDRNIR

SEQ ID NO: 17323 - protein, 7 aa, synthetic construct
RGDRNNA

SEQ ID NO: 17324 - protein, 7 aa, synthetic construct
RGDRQFS

SEQ ID NO: 17325 - protein, 7 aa, synthetic construct
RGDRQRF

SEQ ID NO: 17326 - protein, 7 aa, synthetic construct
RGDDENT

SEQ ID NO: 17327 - protein, 7 aa, synthetic construct
RGDRRQD

SEQ ID NO: 17328 - protein, 7 aa, synthetic construct
RGDRSRA

SEQ ID NO: 17329 - protein, 7 aa, synthetic construct
RGDRTII

SEQ ID NO: 17330 - protein, 7 aa, synthetic construct
RGDSAGN

SEQ ID NO: 17331 - protein, 7 aa, synthetic construct
RGDSASD

SEQ ID NO: 17332 - protein, 7 aa, synthetic construct
RGDSATH

SEQ ID NO: 17333 - protein, 7 aa, synthetic construct
RGDSDEG

SEQ ID NO: 17334 - protein, 7 aa, synthetic construct
RGDSEAK

SEQ ID NO: 17335 - protein, 7 aa, synthetic construct
RGDSEIR

SEQ ID NO: 17336 - protein, 7 aa, synthetic construct
RGDSENA

SEQ ID NO: 17337 - protein, 7 aa, synthetic construct
RGDSFKD

SEQ ID NO: 17338 - protein, 7 aa, synthetic construct
RGDSGSL

SEQ ID NO: 17339 - protein, 7 aa, synthetic construct
RGDDFKV

SEQ ID NO: 17340 - protein, 7 aa, synthetic construct
RGDSIHE

SEQ ID NO: 17341 - protein, 7 aa, synthetic construct
RGDSNAQ

SEQ ID NO: 17342 - protein, 7 aa, synthetic construct
RGDSNVL

SEQ ID NO: 17343 - protein, 7 aa, synthetic construct
RGDSNVT

SEQ ID NO: 17344 - protein, 7 aa, synthetic construct
RGDSQGS

SEQ ID NO: 17345 - protein, 7 aa, synthetic construct
RGDSQNN

SEQ ID NO: 17346 - protein, 7 aa, synthetic construct
RGDSRHG

SEQ ID NO: 17347 - protein, 7 aa, synthetic construct
RGDSSGD

SEQ ID NO: 17348 - protein, 7 aa, synthetic construct
RGDSTFS

SEQ ID NO: 17349 - protein, 7 aa, synthetic construct
RGDSTGH

SEQ ID NO: 17350 - protein, 7 aa, synthetic construct
RGDSTKA

SEQ ID NO: 17351 - protein, 7 aa, synthetic construct
RGDSTRA

SEQ ID NO: 17352 - protein, 7 aa, synthetic construct
RGDSVFI

SEQ ID NO: 17353 - protein, 7 aa, synthetic construct
RGDSVKT

SEQ ID NO: 17354 - protein, 7 aa, synthetic construct
RGDSVRD

SEQ ID NO: 17355 - protein, 7 aa, synthetic construct
RGDTEGF

SEQ ID NO: 17356 - protein, 7 aa, synthetic construct
RGDDGRV

SEQ ID NO: 17357 - protein, 7 aa, synthetic construct
RGDTGQN

SEQ ID NO: 17358 - protein, 7 aa, synthetic construct
RGDTHNN

SEQ ID NO: 17359 - protein, 7 aa, synthetic construct
RGDTKIK

SEQ ID NO: 17360 - protein, 7 aa, synthetic construct
RGDTLHV

SEQ ID NO: 17361 - protein, 7 aa, synthetic construct
RGDTLLK

SEQ ID NO: 17362 - protein, 7 aa, synthetic construct
RGDTLTT

SEQ ID NO: 17363 - protein, 7 aa, synthetic construct
RGDAEAL

SEQ ID NO: 17364 - protein, 7 aa, synthetic construct
RGDTQFD

SEQ ID NO: 17365 - protein, 7 aa, synthetic construct
RGDTQFK

SEQ ID NO: 17366 - protein, 7 aa, synthetic construct
RGDDHNF

SEQ ID NO: 17367 - protein, 7 aa, synthetic construct
RGDTSAI

SEQ ID NO: 17368 - protein, 7 aa, synthetic construct
RGDTSGS

SEQ ID NO: 17369 - protein, 7 aa, synthetic construct
RGDTSTS

SEQ ID NO: 17370 - protein, 7 aa, synthetic construct
RGDTSVS

SEQ ID NO: 17371 - protein, 7 aa, synthetic construct
RGDTTQK

SEQ ID NO: 17372 - protein, 7 aa, synthetic construct
RGDTTSF

SEQ ID NO: 17373 - protein, 7 aa, synthetic construct
RGDVAHI

SEQ ID NO: 17374 - protein, 7 aa, synthetic construct
RGDVDAL

SEQ ID NO: 17375 - protein, 7 aa, synthetic construct
RGDVDFH

SEQ ID NO: 17376 - protein, 7 aa, synthetic construct
RGDVEIL

SEQ ID NO: 17377 - protein, 7 aa, synthetic construct
RGDVEKK

SEQ ID NO: 17378 - protein, 7 aa, synthetic construct
RGDVERF

SEQ ID NO: 17379 - protein, 7 aa, synthetic construct
RGDVFKE

SEQ ID NO: 17380 - protein, 7 aa, synthetic construct
RGDVGVV

SEQ ID NO: 17381 - protein, 7 aa, synthetic construct
RGDVILA

SEQ ID NO: 17382 - protein, 7 aa, synthetic construct
RGDVIQN

SEQ ID NO: 17383 - protein, 7 aa, synthetic construct
RGDVKIS

SEQ ID NO: 17384 - protein, 7 aa, synthetic construct
RGDVKKK

SEQ ID NO: 17385 - protein, 7 aa, synthetic construct
RGDVLNG

SEQ ID NO: 17386 - protein, 7 aa, synthetic construct
RGDVNHR

SEQ ID NO: 17387 - protein, 7 aa, synthetic construct
RGDDIVE

SEQ ID NO: 17388 - protein, 7 aa, synthetic construct
RGDVQAA

SEQ ID NO: 17389 - protein, 7 aa, synthetic construct
RGDVRHH

SEQ ID NO: 17390 - protein, 7 aa, synthetic construct
RGDVRLS

SEQ ID NO: 17391 - protein, 7 aa, synthetic construct
RGDAEFH

SEQ ID NO: 17392 - protein, 7 aa, synthetic construct
RGDVTFA

SEQ ID NO: 17393 - protein, 7 aa, synthetic construct
RGDVTST

SEQ ID NO: 17394 - protein, 7 aa, synthetic construct
RGDVTTA

SEQ ID NO: 17395 - protein, 7 aa, synthetic construct
RGDVVER

SEQ ID NO: 17396 - protein, 7 aa, synthetic construct
RGDVVGT

SEQ ID NO: 17397 - protein, 7 aa, synthetic construct
RGDVVHQ

SEQ ID NO: 17398 - protein, 7 aa, synthetic construct
RGDDNDL

SEQ ID NO: 17399 - protein, 7 aa, synthetic construct
RGDDNRN

SEQ ID NO: 17400 - protein, 7 aa, synthetic construct
RGDDNTG

SEQ ID NO: 17401 - protein, 7 aa, synthetic construct
RGDDRRD

SEQ ID NO: 17402 - protein, 7 aa, synthetic construct
RGDDSAK

SEQ ID NO: 17403 - protein, 7 aa, synthetic construct
RGDDSEE

SEQ ID NO: 17404 - protein, 7 aa, synthetic construct
RGDDSGG

SEQ ID NO: 17405 - protein, 7 aa, synthetic construct
RGDDTTN

SEQ ID NO: 17406 - protein, 7 aa, synthetic construct
RGDDVDI

SEQ ID NO: 17407 - protein, 7 aa, synthetic construct
RGDEAKA

SEQ ID NO: 17408 - protein, 7 aa, synthetic construct
RGDEGFF

SEQ ID NO: 17409 - protein, 7 aa, synthetic construct
RGDEGHV

SEQ ID NO: 17410 - protein, 7 aa, synthetic construct
RGDEGNK

SEQ ID NO: 17411 - protein, 7 aa, synthetic construct
RGDEGRS

SEQ ID NO: 17412 - protein, 7 aa, synthetic construct
RGDEHFF

SEQ ID NO: 17413 - protein, 7 aa, synthetic construct
RGDEHQF

SEQ ID NO: 17414 - protein, 7 aa, synthetic construct
RGDEHRN

SEQ ID NO: 17415 - protein, 7 aa, synthetic construct
RGDAFNL

SEQ ID NO: 17416 - protein, 7 aa, synthetic construct
RGDEIQI

SEQ ID NO: 17417 - protein, 7 aa, synthetic construct
RGDEIRN

SEQ ID NO: 17418 - protein, 7 aa, synthetic construct
RGDEKQT

SEQ ID NO: 17419 - protein, 7 aa, synthetic construct
RGDAFRT

SEQ ID NO: 17420 - protein, 7 aa, synthetic construct
RGDELAK

SEQ ID NO: 17421 - protein, 7 aa, synthetic construct
RGDENFE

SEQ ID NO: 17422 - protein, 7 aa, synthetic construct
RGDENGV

SEQ ID NO: 17423 - protein, 7 aa, synthetic construct
RGDENQI

SEQ ID NO: 17424 - protein, 7 aa, synthetic construct
RGDENSL

SEQ ID NO: 17425 - protein, 7 aa, synthetic construct
RGDERGR

SEQ ID NO: 17426 - protein, 7 aa, synthetic construct
RGDERKV

SEQ ID NO: 17427 - protein, 7 aa, synthetic construct
RGDERSS

SEQ ID NO: 17428 - protein, 7 aa, synthetic construct
RGDESGA

SEQ ID NO: 17429 - protein, 7 aa, synthetic construct
RGDETAE

SEQ ID NO: 17430 - protein, 7 aa, synthetic construct
RGDFAFN

SEQ ID NO: 17431 - protein, 7 aa, synthetic construct
RGDFASV

SEQ ID NO: 17432 - protein, 7 aa, synthetic construct
RGDFDKH

SEQ ID NO: 17433 - protein, 7 aa, synthetic construct
RGDFDLF

SEQ ID NO: 17434 - protein, 7 aa, synthetic construct
RGDFDVR

SEQ ID NO: 17435 - protein, 7 aa, synthetic construct
RGDFELK

SEQ ID NO: 17436 - protein, 7 aa, synthetic construct
RGDFEQL

SEQ ID NO: 17437 - protein, 7 aa, synthetic construct
RGDFEVI

SEQ ID NO: 17438 - protein, 7 aa, synthetic construct
RGDAGTA

SEQ ID NO: 17439 - protein, 7 aa, synthetic construct
RGDFGGT

SEQ ID NO: 17440 - protein, 7 aa, synthetic construct
RGDFHTA

SEQ ID NO: 17441 - protein, 7 aa, synthetic construct
RGDFIGF

SEQ ID NO: 17442 - protein, 7 aa, synthetic construct
RGDFIKQ

SEQ ID NO: 17443 - protein, 7 aa, synthetic construct
RGDFIVN

SEQ ID NO: 17444 - protein, 7 aa, synthetic construct
RGDFKDR

SEQ ID NO: 17445 - protein, 7 aa, synthetic construct
RGDFKNF

SEQ ID NO: 17446 - protein, 7 aa, synthetic construct
RGDFKVE

SEQ ID NO: 17447 - protein, 7 aa, synthetic construct
RGDFNDT

SEQ ID NO: 17448 - protein, 7 aa, synthetic construct
RGDFNNK

SEQ ID NO: 17449 - protein, 7 aa, synthetic construct
RGDFQLT

SEQ ID NO: 17450 - protein, 7 aa, synthetic construct
RGDFQRF

SEQ ID NO: 17451 - protein, 7 aa, synthetic construct
RGDFQVT

SEQ ID NO: 17452 - protein, 7 aa, synthetic construct
RGDFRDQ

SEQ ID NO: 17453 - protein, 7 aa, synthetic construct
RGDFRDR

SEQ ID NO: 17454 - protein, 7 aa, synthetic construct
RGDFREE

SEQ ID NO: 17455 - protein, 7 aa, synthetic construct
RGDFSLL

SEQ ID NO: 17456 - protein, 7 aa, synthetic construct
RGDFSQG

SEQ ID NO: 17457 - protein, 7 aa, synthetic construct
RGDFSSF

SEQ ID NO: 17458 - protein, 7 aa, synthetic construct
RGDFVED

SEQ ID NO: 17459 - protein, 7 aa, synthetic construct
RGDAHTV

SEQ ID NO: 17460 - protein, 7 aa, synthetic construct
RGDFVIF

SEQ ID NO: 17461 - protein, 7 aa, synthetic construct
RGDGDNA

SEQ ID NO: 17462 - protein, 7 aa, synthetic construct
RGDGFQT

SEQ ID NO: 17463 - protein, 7 aa, synthetic construct
RGDGGSG

SEQ ID NO: 17464 - protein, 7 aa, synthetic construct
RGDGHHK

SEQ ID NO: 17465 - protein, 7 aa, synthetic construct
RGDGHQN

SEQ ID NO: 17466 - protein, 7 aa, synthetic construct
RGDGHSQ

SEQ ID NO: 17467 - protein, 7 aa, synthetic construct
RGDGIAL

SEQ ID NO: 17468 - protein, 7 aa, synthetic construct
RGDAINA

SEQ ID NO: 17469 - protein, 7 aa, synthetic construct
RGDGKDK

SEQ ID NO: 17470 - protein, 7 aa, synthetic construct
RGDGKNA

SEQ ID NO: 17471 - protein, 7 aa, synthetic construct
RGDGKQN

SEQ ID NO: 17472 - protein, 7 aa, synthetic construct
RGDGLNA

SEQ ID NO: 17473 - protein, 7 aa, synthetic construct
RGDGNFN

SEQ ID NO: 17474 - protein, 7 aa, synthetic construct
RGDGQQK

SEQ ID NO: 17475 - protein, 7 aa, synthetic construct
RGDGSKH

SEQ ID NO: 17476 - protein, 7 aa, synthetic construct
RGDGSRA

SEQ ID NO: 17477 - protein, 7 aa, synthetic construct
RGDGTHE

SEQ ID NO: 17478 - protein, 7 aa, synthetic construct
RGDGTLI

SEQ ID NO: 17479 - protein, 7 aa, synthetic construct
RGDGVKR

SEQ ID NO: 17480 - protein, 7 aa, synthetic construct
RGDGVQS

SEQ ID NO: 17481 - protein, 7 aa, synthetic construct
RGDHAVQ

SEQ ID NO: 17482 - protein, 7 aa, synthetic construct
RGDHDTI

SEQ ID NO: 17483 - protein, 7 aa, synthetic construct
RGDHFHT

SEQ ID NO: 17484 - protein, 7 aa, synthetic construct
RGDHFRQ

SEQ ID NO: 17485 - protein, 7 aa, synthetic construct
RGDHGKG

SEQ ID NO: 17486 - protein, 7 aa, synthetic construct
RGDHGKR

SEQ ID NO: 17487 - protein, 7 aa, synthetic construct
RGDHGTR

SEQ ID NO: 17488 - protein, 7 aa, synthetic construct
RGDHHHQ

SEQ ID NO: 17489 - protein, 7 aa, synthetic construct
RGDHHKT

SEQ ID NO: 17490 - protein, 7 aa, synthetic construct
RGDHHSR

SEQ ID NO: 17491 - protein, 7 aa, synthetic construct
RGDHLAV

SEQ ID NO: 17492 - protein, 7 aa, synthetic construct
RGDALHE

SEQ ID NO: 17493 - protein, 7 aa, synthetic construct
RGDHLKE

SEQ ID NO: 17494 - protein, 7 aa, synthetic construct
RGDHNTF

SEQ ID NO: 17495 - protein, 7 aa, synthetic construct
RGDHRRV

SEQ ID NO: 17496 - protein, 7 aa, synthetic construct
RGDHSNK

SEQ ID NO: 17497 - protein, 7 aa, synthetic construct
RGDHTGN

SEQ ID NO: 17498 - protein, 7 aa, synthetic construct
RGDHVGR

SEQ ID NO: 17499 - protein, 7 aa, synthetic construct
RGDHVRS

SEQ ID NO: 17500 - protein, 7 aa, synthetic construct
RGDHVTK

SEQ ID NO: 17501 - protein, 7 aa, synthetic construct
RGDIAVS

SEQ ID NO: 17502 - protein, 7 aa, synthetic construct
RGDIDKV

SEQ ID NO: 17503 - protein, 7 aa, synthetic construct
RGDANEH

SEQ ID NO: 17504 - protein, 7 aa, synthetic construct
RGDIEAR

SEQ ID NO: 17505 - protein, 7 aa, synthetic construct
RGDANFD

SEQ ID NO: 17506 - protein, 7 aa, synthetic construct
RGDIEGR

SEQ ID NO: 17507 - protein, 7 aa, synthetic construct
RGDIFKR

SEQ ID NO: 17508 - protein, 7 aa, synthetic construct
RGDIGES

SEQ ID NO: 17509 - protein, 7 aa, synthetic construct
RGDIGFT

SEQ ID NO: 17510 - protein, 7 aa, synthetic construct
RGDILDV

SEQ ID NO: 17511 - protein, 7 aa, synthetic construct
RGDANSR

SEQ ID NO: 17512 - protein, 7 aa, synthetic construct
RGDILRS

SEQ ID NO: 17513 - protein, 7 aa, synthetic construct
RGDIQAV

SEQ ID NO: 17514 - protein, 7 aa, synthetic construct
RGDIQLF

SEQ ID NO: 17515 - protein, 7 aa, synthetic construct
RGDIQQK

SEQ ID NO: 17516 - protein, 7 aa, synthetic construct
RGDIRGH

SEQ ID NO: 17517 - protein, 7 aa, synthetic construct
RGDIRTQ

SEQ ID NO: 17518 - protein, 7 aa, synthetic construct
RGDAQHN

SEQ ID NO: 17519 - protein, 7 aa, synthetic construct
RGDIVDG

SEQ ID NO: 17520 - protein, 7 aa, synthetic construct
RGDIVIR

SEQ ID NO: 17521 - protein, 7 aa, synthetic construct
RGDIVVT

SEQ ID NO: 17522 - protein, 7 aa, synthetic construct
RGDKAGF

SEQ ID NO: 17523 - protein, 7 aa, synthetic construct
RGDKDDQ

SEQ ID NO: 17524 - protein, 7 aa, synthetic construct
RGDKDHA

SEQ ID NO: 17525 - protein, 7 aa, synthetic construct
RGDKEKR

SEQ ID NO: 17526 - protein, 7 aa, synthetic construct
RGDKETT

SEQ ID NO: 17527 - protein, 7 aa, synthetic construct
RGDKFIQ

SEQ ID NO: 17528 - protein, 7 aa, synthetic construct
RGDKFSL

SEQ ID NO: 17529 - protein, 7 aa, synthetic construct
RGDKFSN

SEQ ID NO: 17530 - protein, 7 aa, synthetic construct
RGDKGGA

SEQ ID NO: 17531 - protein, 7 aa, synthetic construct
RGDKHHR

SEQ ID NO: 17532 - protein, 7 aa, synthetic construct
RGDKKHH

SEQ ID NO: 17533 - protein, 7 aa, synthetic construct
RGDKLEF

SEQ ID NO: 17534 - protein, 7 aa, synthetic construct
RGDKLQF

SEQ ID NO: 17535 - protein, 7 aa, synthetic construct
RGDKNFD

SEQ ID NO: 17536 - protein, 7 aa, synthetic construct
RGDKSAN

SEQ ID NO: 17537 - protein, 7 aa, synthetic construct
RGDKSHL

SEQ ID NO: 17538 - protein, 7 aa, synthetic construct
RGDKSKF

SEQ ID NO: 17539 - protein, 7 aa, synthetic construct
RGDKTGL

SEQ ID NO: 17540 - protein, 7 aa, synthetic construct
RGDKTGN

SEQ ID NO: 17541 - protein, 7 aa, synthetic construct
RGDKVGK

SEQ ID NO: 17542 - protein, 7 aa, synthetic construct
RGDLAQD

SEQ ID NO: 17543 - protein, 7 aa, synthetic construct
RGDLDNR

SEQ ID NO: 17544 - protein, 7 aa, synthetic construct
RGDLEEK

SEQ ID NO: 17545 - protein, 7 aa, synthetic construct
RGDLEFT

SEQ ID NO: 17546 - protein, 7 aa, synthetic construct
RGDLEVR

SEQ ID NO: 17547 - protein, 7 aa, synthetic construct
RGDLFQR

SEQ ID NO: 17548 - protein, 7 aa, synthetic construct
RGDLFSS

SEQ ID NO: 17549 - protein, 7 aa, synthetic construct
RGDLGFQ

SEQ ID NO: 17550 - protein, 7 aa, synthetic construct
RGDLGQA

SEQ ID NO: 17551 - protein, 7 aa, synthetic construct
RGDLHAE

SEQ ID NO: 17552 - protein, 7 aa, synthetic construct
RGDLIKQ

SEQ ID NO: 17553 - protein, 7 aa, synthetic construct
RGDLKAN

SEQ ID NO: 17554 - protein, 7 aa, synthetic construct
RGDLLHN

SEQ ID NO: 17555 - protein, 7 aa, synthetic construct
RGDLNQL

SEQ ID NO: 17556 - protein, 7 aa, synthetic construct
RGDLNRT

SEQ ID NO: 17557 - protein, 7 aa, synthetic construct
RGDLQAN

SEQ ID NO: 17558 - protein, 7 aa, synthetic construct
RGDLSAA

SEQ ID NO: 17559 - protein, 7 aa, synthetic construct
RGDLSLV

SEQ ID NO: 17560 - protein, 7 aa, synthetic construct
RGDLTNH

SEQ ID NO: 17561 - protein, 7 aa, synthetic construct
RGDLTRR

SEQ ID NO: 17562 - protein, 7 aa, synthetic construct
RGDLVQV

SEQ ID NO: 17563 - protein, 7 aa, synthetic construct
RGDLVTR

SEQ ID NO: 17564 - protein, 7 aa, synthetic construct
RGDNDFF

SEQ ID NO: 17565 - protein, 7 aa, synthetic construct
RGDATQE

SEQ ID NO: 17566 - protein, 7 aa, synthetic construct
RGDNEAL

SEQ ID NO: 17567 - protein, 7 aa, synthetic construct
RGDNESK

SEQ ID NO: 17568 - protein, 7 aa, synthetic construct
RGDATTL

SEQ ID NO: 17569 - protein, 7 aa, synthetic construct
RGDATTT

SEQ ID NO: 17570 - protein, 7 aa, synthetic construct
RGDNGQG

SEQ ID NO: 17571 - protein, 7 aa, synthetic construct
RGDNHAR

SEQ ID NO: 17572 - protein, 7 aa, synthetic construct
RGDNHKI

SEQ ID NO: 17573 - protein, 7 aa, synthetic construct
RGDNHSF

SEQ ID NO: 17574 - protein, 7 aa, synthetic construct
RGDNHTT

SEQ ID NO: 17575 - protein, 7 aa, synthetic construct
RGDNIFT

SEQ ID NO: 17576 - protein, 7 aa, synthetic construct
RGDNKKG

SEQ ID NO: 17577 - protein, 7 aa, synthetic construct
RGDNKRT

SEQ ID NO: 17578 - protein, 7 aa, synthetic construct
RGDNKTN

SEQ ID NO: 17579 - protein, 7 aa, synthetic construct
RGDNLVT

SEQ ID NO: 17580 - protein, 7 aa, synthetic construct
RGDNNDL

SEQ ID NO: 17581 - protein, 7 aa, synthetic construct
RGDADIQ

SEQ ID NO: 17582 - protein, 7 aa, synthetic construct
RGDNQQV

SEQ ID NO: 17583 - protein, 7 aa, synthetic construct
RGDNREF

SEQ ID NO: 17584 - protein, 7 aa, synthetic construct
RGDNTRR

SEQ ID NO: 17585 - protein, 7 aa, synthetic construct
RGDQAHE

SEQ ID NO: 17586 - protein, 7 aa, synthetic construct
RGDQAKL

SEQ ID NO: 17587 - protein, 7 aa, synthetic construct
RGDQEHK

SEQ ID NO: 17588 - protein, 7 aa, synthetic construct
RGDQFRH

SEQ ID NO: 17589 - protein, 7 aa, synthetic construct
RGDQFSL

SEQ ID NO: 17590 - protein, 7 aa, synthetic construct
RGDQGET

SEQ ID NO: 17591 - protein, 7 aa, synthetic construct
RGDQGLS

SEQ ID NO: 17592 - protein, 7 aa, synthetic construct
RGDQILI

SEQ ID NO: 17593 - protein, 7 aa, synthetic construct
RGDQIVI

SEQ ID NO: 17594 - protein, 7 aa, synthetic construct
RGDDART

SEQ ID NO: 17595 - protein, 7 aa, synthetic construct
RGDQLKD

SEQ ID NO: 17596 - protein, 7 aa, synthetic construct
RGDDASQ

SEQ ID NO: 17597 - protein, 7 aa, synthetic construct
RGDQRFE

SEQ ID NO: 17598 - protein, 7 aa, synthetic construct
RGDQRIH

SEQ ID NO: 17599 - protein, 7 aa, synthetic construct
RGDQSGS

SEQ ID NO: 17600 - protein, 7 aa, synthetic construct
RGDQTLD

SEQ ID NO: 17601 - protein, 7 aa, synthetic construct
RGDQVNV

SEQ ID NO: 17602 - protein, 7 aa, synthetic construct
RGDQVQS

SEQ ID NO: 17603 - protein, 7 aa, synthetic construct
RGDRDKH

SEQ ID NO: 17604 - protein, 7 aa, synthetic construct
RGDREDQ

SEQ ID NO: 17605 - protein, 7 aa, synthetic construct
RGDRFNS

SEQ ID NO: 17606 - protein, 7 aa, synthetic construct
RGDRHNN

SEQ ID NO: 17607 - protein, 7 aa, synthetic construct
RGDRIGD

SEQ ID NO: 17608 - protein, 7 aa, synthetic construct
RGDRILN

SEQ ID NO: 17609 - protein, 7 aa, synthetic construct
RGDRISN

SEQ ID NO: 17610 - protein, 7 aa, synthetic construct
RGDRKIL

SEQ ID NO: 17611 - protein, 7 aa, synthetic construct
RGDRNNH

SEQ ID NO: 17612 - protein, 7 aa, synthetic construct
RGDDENK

SEQ ID NO: 17613 - protein, 7 aa, synthetic construct
RGDRSIA

SEQ ID NO: 17614 - protein, 7 aa, synthetic construct
RGDRTES

SEQ ID NO: 17615 - protein, 7 aa, synthetic construct
RGDRTHF

SEQ ID NO: 17616 - protein, 7 aa, synthetic construct
RGDSATK

SEQ ID NO: 17617 - protein, 7 aa, synthetic construct
RGDSDGN

SEQ ID NO: 17618 - protein, 7 aa, synthetic construct
RGDSEFQ

SEQ ID NO: 17619 - protein, 7 aa, synthetic construct
RGDSEGL

SEQ ID NO: 17620 - protein, 7 aa, synthetic construct
RGDSEND

SEQ ID NO: 17621 - protein, 7 aa, synthetic construct
RGDSENL

SEQ ID NO: 17622 - protein, 7 aa, synthetic construct
RGDSERI

SEQ ID NO: 17623 - protein, 7 aa, synthetic construct
RGDDFGS

SEQ ID NO: 17624 - protein, 7 aa, synthetic construct
RGDSGTH

SEQ ID NO: 17625 - protein, 7 aa, synthetic construct
RGDSIFK

SEQ ID NO: 17626 - protein, 7 aa, synthetic construct
RGDSKDL

SEQ ID NO: 17627 - protein, 7 aa, synthetic construct
RGDSKQN

SEQ ID NO: 17628 - protein, 7 aa, synthetic construct
RGDSLFF

SEQ ID NO: 17629 - protein, 7 aa, synthetic construct
RGDSLIR

SEQ ID NO: 17630 - protein, 7 aa, synthetic construct
RGDSLST

SEQ ID NO: 17631 - protein, 7 aa, synthetic construct
RGDSNTD

SEQ ID NO: 17632 - protein, 7 aa, synthetic construct
RGDSRDE

SEQ ID NO: 17633 - protein, 7 aa, synthetic construct
RGDSREV

SEQ ID NO: 17634 - protein, 7 aa, synthetic construct
RGDSRNE

SEQ ID NO: 17635 - protein, 7 aa, synthetic construct
RGDSSEI

SEQ ID NO: 17636 - protein, 7 aa, synthetic construct
RGDSVFN

SEQ ID NO: 17637 - protein, 7 aa, synthetic construct
RGDSVIV

SEQ ID NO: 17638 - protein, 7 aa, synthetic construct
RGDTDFV

SEQ ID NO: 17639 - protein, 7 aa, synthetic construct
RGDTDKA

SEQ ID NO: 17640 - protein, 7 aa, synthetic construct
RGDDGRI

SEQ ID NO: 17641 - protein, 7 aa, synthetic construct
RGDTGHN

SEQ ID NO: 17642 - protein, 7 aa, synthetic construct
RGDDGVA

SEQ ID NO: 17643 - protein, 7 aa, synthetic construct
RGDTHAL

SEQ ID NO: 17644 - protein, 7 aa, synthetic construct
RGDTHGA

SEQ ID NO: 17645 - protein, 7 aa, synthetic construct
RGDTKAR

SEQ ID NO: 17646 - protein, 7 aa, synthetic construct
RGDTLGL

SEQ ID NO: 17647 - protein, 7 aa, synthetic construct
RGDTNEF

SEQ ID NO: 17648 - protein, 7 aa, synthetic construct
RGDTRIA

SEQ ID NO: 17649 - protein, 7 aa, synthetic construct
RGDTVIG

SEQ ID NO: 17650 - protein, 7 aa, synthetic construct
RGDVFRT

SEQ ID NO: 17651 - protein, 7 aa, synthetic construct
RGDVFSR

SEQ ID NO: 17652 - protein, 7 aa, synthetic construct
RGDVGRQ

SEQ ID NO: 17653 - protein, 7 aa, synthetic construct
RGDVHVR

SEQ ID NO: 17654 - protein, 7 aa, synthetic construct
RGDVKGQ

SEQ ID NO: 17655 - protein, 7 aa, synthetic construct
RGDVKLD

SEQ ID NO: 17656 - protein, 7 aa, synthetic construct
RGDVLVQ

SEQ ID NO: 17657 - protein, 7 aa, synthetic construct
RGDVNNH

SEQ ID NO: 17658 - protein, 7 aa, synthetic construct
RGDVRAE

SEQ ID NO: 17659 - protein, 7 aa, synthetic construct
RGDVREN

SEQ ID NO: 17660 - protein, 7 aa, synthetic construct
RGDVSEI

SEQ ID NO: 17661 - protein, 7 aa, synthetic construct
RGDVSFT

SEQ ID NO: 17662 - protein, 7 aa, synthetic construct
RGDVSHE

SEQ ID NO: 17663 - protein, 7 aa, synthetic construct
RGDVSTG

SEQ ID NO: 17664 - protein, 7 aa, synthetic construct
RGDVTGG

SEQ ID NO: 17665 - protein, 7 aa, synthetic construct
RGDVTRL

SEQ ID NO: 17666 - protein, 7 aa, synthetic construct
RGDDKQK

SEQ ID NO: 17667 - protein, 7 aa, synthetic construct
RGDDNTV

SEQ ID NO: 17668 - protein, 7 aa, synthetic construct
RGDAEQI

SEQ ID NO: 17669 - protein, 7 aa, synthetic construct
RGDDSES

SEQ ID NO: 17670 - protein, 7 aa, synthetic construct
RGDDVSV

SEQ ID NO: 17671 - protein, 7 aa, synthetic construct
RGDDVVK

SEQ ID NO: 17672 - protein, 7 aa, synthetic construct
RGDEGHS

SEQ ID NO: 17673 - protein, 7 aa, synthetic construct
RGDEGIS

SEQ ID NO: 17674 - protein, 7 aa, synthetic construct
RGDEGVR

SEQ ID NO: 17675 - protein, 7 aa, synthetic construct
RGDEHSN

SEQ ID NO: 17676 - protein, 7 aa, synthetic construct
RGDELSE

SEQ ID NO: 17677 - protein, 7 aa, synthetic construct
RGDENHG

SEQ ID NO: 17678 - protein, 7 aa, synthetic construct
RGDENSI

SEQ ID NO: 17679 - protein, 7 aa, synthetic construct
RGDEQGR

SEQ ID NO: 17680 - protein, 7 aa, synthetic construct
RGDERIK

SEQ ID NO: 17681 - protein, 7 aa, synthetic construct
RGDERLV

SEQ ID NO: 17682 - protein, 7 aa, synthetic construct
RGDESQS

SEQ ID NO: 17683 - protein, 7 aa, synthetic construct
RGDESVT

SEQ ID NO: 17684 - protein, 7 aa, synthetic construct
RGDEVFN

SEQ ID NO: 17685 - protein, 7 aa, synthetic construct
RGDEVIQ

SEQ ID NO: 17686 - protein, 7 aa, synthetic construct
RGDEVTF

SEQ ID NO: 17687 - protein, 7 aa, synthetic construct
RGDEVTR

SEQ ID NO: 17688 - protein, 7 aa, synthetic construct
RGDFANH

SEQ ID NO: 17689 - protein, 7 aa, synthetic construct
RGDFASE

SEQ ID NO: 17690 - protein, 7 aa, synthetic construct
RGDFDLG

SEQ ID NO: 17691 - protein, 7 aa, synthetic construct
RGDFEDL

SEQ ID NO: 17692 - protein, 7 aa, synthetic construct
RGDFEIN

SEQ ID NO: 17693 - protein, 7 aa, synthetic construct
RGDFETN

SEQ ID NO: 17694 - protein, 7 aa, synthetic construct
RGDFGAE

SEQ ID NO: 17695 - protein, 7 aa, synthetic construct
RGDAGVN

SEQ ID NO: 17696 - protein, 7 aa, synthetic construct
RGDAHAI

SEQ ID NO: 17697 - protein, 7 aa, synthetic construct
RGDFHKG

SEQ ID NO: 17698 - protein, 7 aa, synthetic construct
RGDFHRA

SEQ ID NO: 17699 - protein, 7 aa, synthetic construct
RGDFIRF

SEQ ID NO: 17700 - protein, 7 aa, synthetic construct
RGDFISL

SEQ ID NO: 17701 - protein, 7 aa, synthetic construct
RGDFLER

SEQ ID NO: 17702 - protein, 7 aa, synthetic construct
RGDFLKG

SEQ ID NO: 17703 - protein, 7 aa, synthetic construct
RGDFLSK

SEQ ID NO: 17704 - protein, 7 aa, synthetic construct
RGDFLTD

SEQ ID NO: 17705 - protein, 7 aa, synthetic construct
RGDFNTI

SEQ ID NO: 17706 - protein, 7 aa, synthetic construct
RGDFRDD

SEQ ID NO: 17707 - protein, 7 aa, synthetic construct
RGDFSIQ

SEQ ID NO: 17708 - protein, 7 aa, synthetic construct
RGDFTQD

SEQ ID NO: 17709 - protein, 7 aa, synthetic construct
RGDGALR

SEQ ID NO: 17710 - protein, 7 aa, synthetic construct
RGDAIAV

SEQ ID NO: 17711 - protein, 7 aa, synthetic construct
RGDAIDL

SEQ ID NO: 17712 - protein, 7 aa, synthetic construct
RGDAIDS

SEQ ID NO: 17713 - protein, 7 aa, synthetic construct
RGDGDVS

SEQ ID NO: 17714 - protein, 7 aa, synthetic construct
RGDGFHT

SEQ ID NO: 17715 - protein, 7 aa, synthetic construct
RGDGFRF

SEQ ID NO: 17716 - protein, 7 aa, synthetic construct
RGDGGKQ

SEQ ID NO: 17717 - protein, 7 aa, synthetic construct
RGDGGNR

SEQ ID NO: 17718 - protein, 7 aa, synthetic construct
RGDGGRR

SEQ ID NO: 17719 - protein, 7 aa, synthetic construct
RGDAIKF

SEQ ID NO: 17720 - protein, 7 aa, synthetic construct
RGDGHDG

SEQ ID NO: 17721 - protein, 7 aa, synthetic construct
RGDGIVF

SEQ ID NO: 17722 - protein, 7 aa, synthetic construct
RGDGNQD

SEQ ID NO: 17723 - protein, 7 aa, synthetic construct
RGDAKAR

SEQ ID NO: 17724 - protein, 7 aa, synthetic construct
RGDGRTG

SEQ ID NO: 17725 - protein, 7 aa, synthetic construct
RGDGVTS

SEQ ID NO: 17726 - protein, 7 aa, synthetic construct
RGDHDEK

SEQ ID NO: 17727 - protein, 7 aa, synthetic construct
RGDHDGI

SEQ ID NO: 17728 - protein, 7 aa, synthetic construct
RGDAKRH

SEQ ID NO: 17729 - protein, 7 aa, synthetic construct
RGDHEQN

SEQ ID NO: 17730 - protein, 7 aa, synthetic construct
RGDHFFR

SEQ ID NO: 17731 - protein, 7 aa, synthetic construct
RGDHFHI

SEQ ID NO: 17732 - protein, 7 aa, synthetic construct
RGDHFTT

SEQ ID NO: 17733 - protein, 7 aa, synthetic construct
RGDAARS

SEQ ID NO: 17734 - protein, 7 aa, synthetic construct
RGDHGLF

SEQ ID NO: 17735 - protein, 7 aa, synthetic construct
RGDHGVA

SEQ ID NO: 17736 - protein, 7 aa, synthetic construct
RGDHHDD

SEQ ID NO: 17737 - protein, 7 aa, synthetic construct
RGDHHEQ

SEQ ID NO: 17738 - protein, 7 aa, synthetic construct
RGDHHGT

SEQ ID NO: 17739 - protein, 7 aa, synthetic construct
RGDHHVT

SEQ ID NO: 17740 - protein, 7 aa, synthetic construct
RGDHIHF

SEQ ID NO: 17741 - protein, 7 aa, synthetic construct
RGDHLKV

SEQ ID NO: 17742 - protein, 7 aa, synthetic construct
RGDHNGG

SEQ ID NO: 17743 - protein, 7 aa, synthetic construct
RGDALKN

SEQ ID NO: 17744 - protein, 7 aa, synthetic construct
RGDHQFL

SEQ ID NO: 17745 - protein, 7 aa, synthetic construct
RGDHQTN

SEQ ID NO: 17746 - protein, 7 aa, synthetic construct
RGDHRKS

SEQ ID NO: 17747 - protein, 7 aa, synthetic construct
RGDHSIK

SEQ ID NO: 17748 - protein, 7 aa, synthetic construct
RGDHTTV

SEQ ID NO: 17749 - protein, 7 aa, synthetic construct
RGDHVFG

SEQ ID NO: 17750 - protein, 7 aa, synthetic construct
RGDIARH

SEQ ID NO: 17751 - protein, 7 aa, synthetic construct
RGDIEND

SEQ ID NO: 17752 - protein, 7 aa, synthetic construct
RGDIGVS

SEQ ID NO: 17753 - protein, 7 aa, synthetic construct
RGDIGVT

SEQ ID NO: 17754 - protein, 7 aa, synthetic construct
RGDIHIG

SEQ ID NO: 17755 - protein, 7 aa, synthetic construct
RGDIHLF

SEQ ID NO: 17756 - protein, 7 aa, synthetic construct
RGDIINN

SEQ ID NO: 17757 - protein, 7 aa, synthetic construct
RGDANSD

SEQ ID NO: 17758 - protein, 7 aa, synthetic construct
RGDINVI

SEQ ID NO: 17759 - protein, 7 aa, synthetic construct
RGDITFV

SEQ ID NO: 17760 - protein, 7 aa, synthetic construct
RGDKAAN

SEQ ID NO: 17761 - protein, 7 aa, synthetic construct
RGDKDEI

SEQ ID NO: 17762 - protein, 7 aa, synthetic construct
RGDKDRI

SEQ ID NO: 17763 - protein, 7 aa, synthetic construct
RGDKHIV

SEQ ID NO: 17764 - protein, 7 aa, synthetic construct
RGDKIFK

SEQ ID NO: 17765 - protein, 7 aa, synthetic construct
RGDKIIR

SEQ ID NO: 17766 - protein, 7 aa, synthetic construct
RGDKIRN

SEQ ID NO: 17767 - protein, 7 aa, synthetic construct
RGDKKDF

SEQ ID NO: 17768 - protein, 7 aa, synthetic construct
RGDARFF

SEQ ID NO: 17769 - protein, 7 aa, synthetic construct
RGDKLRF

SEQ ID NO: 17770 - protein, 7 aa, synthetic construct
RGDKLTA

SEQ ID NO: 17771 - protein, 7 aa, synthetic construct
RGDKQFF

SEQ ID NO: 17772 - protein, 7 aa, synthetic construct
RGDKSDG

SEQ ID NO: 17773 - protein, 7 aa, synthetic construct
RGDKSGA

SEQ ID NO: 17774 - protein, 7 aa, synthetic construct
RGDKSHS

SEQ ID NO: 17775 - protein, 7 aa, synthetic construct
RGDKSLH

SEQ ID NO: 17776 - protein, 7 aa, synthetic construct
RGDKTSS

SEQ ID NO: 17777 - protein, 7 aa, synthetic construct
RGDKVDK

SEQ ID NO: 17778 - protein, 7 aa, synthetic construct
RGDLDFR

SEQ ID NO: 17779 - protein, 7 aa, synthetic construct
RGDLDIK

SEQ ID NO: 17780 - protein, 7 aa, synthetic construct
RGDLDVT

SEQ ID NO: 17781 - protein, 7 aa, synthetic construct
RGDASFF

SEQ ID NO: 17782 - protein, 7 aa, synthetic construct
RGDLEKR

SEQ ID NO: 17783 - protein, 7 aa, synthetic construct
RGDLETA

SEQ ID NO: 17784 - protein, 7 aa, synthetic construct
RGDLFSN

SEQ ID NO: 17785 - protein, 7 aa, synthetic construct
RGDLGSA

SEQ ID NO: 17786 - protein, 7 aa, synthetic construct
RGDLHDH

SEQ ID NO: 17787 - protein, 7 aa, synthetic construct
RGDLIES

SEQ ID NO: 17788 - protein, 7 aa, synthetic construct
RGDLIII

SEQ ID NO: 17789 - protein, 7 aa, synthetic construct
RGDLILG

SEQ ID NO: 17790 - protein, 7 aa, synthetic construct
RGDASST

SEQ ID NO: 17791 - protein, 7 aa, synthetic construct
RGDLLNL

SEQ ID NO: 17792 - protein, 7 aa, synthetic construct
RGDLLVH

SEQ ID NO: 17793 - protein, 7 aa, synthetic construct
RGDLNIK

SEQ ID NO: 17794 - protein, 7 aa, synthetic construct
RGDLNQN

SEQ ID NO: 17795 - protein, 7 aa, synthetic construct
RGDLQVN

SEQ ID NO: 17796 - protein, 7 aa, synthetic construct
RGDATEK

SEQ ID NO: 17797 - protein, 7 aa, synthetic construct
RGDLSGH

SEQ ID NO: 17798 - protein, 7 aa, synthetic construct
RGDLSNV

SEQ ID NO: 17799 - protein, 7 aa, synthetic construct
RGDLTDN

SEQ ID NO: 17800 - protein, 7 aa, synthetic construct
RGDLTKI

SEQ ID NO: 17801 - protein, 7 aa, synthetic construct
RGDATKN

SEQ ID NO: 17802 - protein, 7 aa, synthetic construct
RGDNAEH

SEQ ID NO: 17803 - protein, 7 aa, synthetic construct
RGDNAQL

SEQ ID NO: 17804 - protein, 7 aa, synthetic construct
RGDNARN

SEQ ID NO: 17805 - protein, 7 aa, synthetic construct
RGDNDFI

SEQ ID NO: 17806 - protein, 7 aa, synthetic construct
RGDNDVS

SEQ ID NO: 17807 - protein, 7 aa, synthetic construct
RGDNGFQ

SEQ ID NO: 17808 - protein, 7 aa, synthetic construct
RGDNGIG

SEQ ID NO: 17809 - protein, 7 aa, synthetic construct
RGDNGIK

SEQ ID NO: 17810 - protein, 7 aa, synthetic construct
RGDNGIQ

SEQ ID NO: 17811 - protein, 7 aa, synthetic construct
RGDNGNF

SEQ ID NO: 17812 - protein, 7 aa, synthetic construct
RGDNHIV

SEQ ID NO: 17813 - protein, 7 aa, synthetic construct
RGDNHRH

SEQ ID NO: 17814 - protein, 7 aa, synthetic construct
RGDNHTQ

SEQ ID NO: 17815 - protein, 7 aa, synthetic construct
RGDNIHE

SEQ ID NO: 17816 - protein, 7 aa, synthetic construct
RGDNKGG

SEQ ID NO: 17817 - protein, 7 aa, synthetic construct
RGDNLAF

SEQ ID NO: 17818 - protein, 7 aa, synthetic construct
RGDNLVR

SEQ ID NO: 17819 - protein, 7 aa, synthetic construct
RGDNNHG

SEQ ID NO: 17820 - protein, 7 aa, synthetic construct
RGDNQNV

SEQ ID NO: 17821 - protein, 7 aa, synthetic construct
RGDNQQK

SEQ ID NO: 17822 - protein, 7 aa, synthetic construct
RGDNRAR

SEQ ID NO: 17823 - protein, 7 aa, synthetic construct
RGDNRFF

SEQ ID NO: 17824 - protein, 7 aa, synthetic construct
RGDNTGN

SEQ ID NO: 17825 - protein, 7 aa, synthetic construct
RGDNTKN

SEQ ID NO: 17826 - protein, 7 aa, synthetic construct
RGDNVLI

SEQ ID NO: 17827 - protein, 7 aa, synthetic construct
RGDNVQT

SEQ ID NO: 17828 - protein, 7 aa, synthetic construct
RGDNVRE

SEQ ID NO: 17829 - protein, 7 aa, synthetic construct
RGDQAHN

SEQ ID NO: 17830 - protein, 7 aa, synthetic construct
RGDQEDH

SEQ ID NO: 17831 - protein, 7 aa, synthetic construct
RGDQEQS

SEQ ID NO: 17832 - protein, 7 aa, synthetic construct
RGDQFRE

SEQ ID NO: 17833 - protein, 7 aa, synthetic construct
RGDQGKH

SEQ ID NO: 17834 - protein, 7 aa, synthetic construct
RGDQGLF

SEQ ID NO: 17835 - protein, 7 aa, synthetic construct
RGDQHKN

SEQ ID NO: 17836 - protein, 7 aa, synthetic construct
RGDQKFS

SEQ ID NO: 17837 - protein, 7 aa, synthetic construct
RGDQKQF

SEQ ID NO: 17838 - protein, 7 aa, synthetic construct
RGDQLVH

SEQ ID NO: 17839 - protein, 7 aa, synthetic construct
RGDDAVN

SEQ ID NO: 17840 - protein, 7 aa, synthetic construct
RGDQQHS

SEQ ID NO: 17841 - protein, 7 aa, synthetic construct
RGDQRIS

SEQ ID NO: 17842 - protein, 7 aa, synthetic construct
RGDQRQE

SEQ ID NO: 17843 - protein, 7 aa, synthetic construct
RGDQSDI

SEQ ID NO: 17844 - protein, 7 aa, synthetic construct
RGDQSFH

SEQ ID NO: 17845 - protein, 7 aa, synthetic construct
RGDQSTS

SEQ ID NO: 17846 - protein, 7 aa, synthetic construct
RGDDDKK

SEQ ID NO: 17847 - protein, 7 aa, synthetic construct
RGDRDDA

SEQ ID NO: 17848 - protein, 7 aa, synthetic construct
RGDRETV

SEQ ID NO: 17849 - protein, 7 aa, synthetic construct
RGDRGHE

SEQ ID NO: 17850 - protein, 7 aa, synthetic construct
RGDRHDR

SEQ ID NO: 17851 - protein, 7 aa, synthetic construct
RGDRHHR

SEQ ID NO: 17852 - protein, 7 aa, synthetic construct
RGDRIGN

SEQ ID NO: 17853 - protein, 7 aa, synthetic construct
RGDRIGR

SEQ ID NO: 17854 - protein, 7 aa, synthetic construct
RGDRKEA

SEQ ID NO: 17855 - protein, 7 aa, synthetic construct
RGDRQVQ

SEQ ID NO: 17856 - protein, 7 aa, synthetic construct
RGDRREG

SEQ ID NO: 17857 - protein, 7 aa, synthetic construct
RGDRRRT

SEQ ID NO: 17858 - protein, 7 aa, synthetic construct
RGDRSAE

SEQ ID NO: 17859 - protein, 7 aa, synthetic construct
RGDRTHG

SEQ ID NO: 17860 - protein, 7 aa, synthetic construct
RGDRVES

SEQ ID NO: 17861 - protein, 7 aa, synthetic construct
RGDRVLN

SEQ ID NO: 17862 - protein, 7 aa, synthetic construct
RGDRVRT

SEQ ID NO: 17863 - protein, 7 aa, synthetic construct
RGDSAIL

SEQ ID NO: 17864 - protein, 7 aa, synthetic construct
RGDSDSK

SEQ ID NO: 17865 - protein, 7 aa, synthetic construct
RGDSEFA

SEQ ID NO: 17866 - protein, 7 aa, synthetic construct
RGDSEGH

SEQ ID NO: 17867 - protein, 7 aa, synthetic construct
RGDSEIK

SEQ ID NO: 17868 - protein, 7 aa, synthetic construct
RGDSFKH

SEQ ID NO: 17869 - protein, 7 aa, synthetic construct
RGDSFLG

SEQ ID NO: 17870 - protein, 7 aa, synthetic construct
RGDSFTR

SEQ ID NO: 17871 - protein, 7 aa, synthetic construct
RGDDFKT

SEQ ID NO: 17872 - protein, 7 aa, synthetic construct
RGDSINL

SEQ ID NO: 17873 - protein, 7 aa, synthetic construct
RGDDFQV

SEQ ID NO: 17874 - protein, 7 aa, synthetic construct
RGDSKQH

SEQ ID NO: 17875 - protein, 7 aa, synthetic construct
RGDSKVH

SEQ ID NO: 17876 - protein, 7 aa, synthetic construct
RGDSLFA

SEQ ID NO: 17877 - protein, 7 aa, synthetic construct
RGDSLKH

SEQ ID NO: 17878 - protein, 7 aa, synthetic construct
RGDSNKR

SEQ ID NO: 17879 - protein, 7 aa, synthetic construct
RGDSQFS

SEQ ID NO: 17880 - protein, 7 aa, synthetic construct
RGDSQQL

SEQ ID NO: 17881 - protein, 7 aa, synthetic construct
RGDSRGQ

SEQ ID NO: 17882 - protein, 7 aa, synthetic construct
RGDSRHF

SEQ ID NO: 17883 - protein, 7 aa, synthetic construct
RGDSSGE

SEQ ID NO: 17884 - protein, 7 aa, synthetic construct
RGDSSHT

SEQ ID NO: 17885 - protein, 7 aa, synthetic construct
RGDSSKA

SEQ ID NO: 17886 - protein, 7 aa, synthetic construct
RGDSSKD

SEQ ID NO: 17887 - protein, 7 aa, synthetic construct
RGDSTFR

SEQ ID NO: 17888 - protein, 7 aa, synthetic construct
RGDDGIR

SEQ ID NO: 17889 - protein, 7 aa, synthetic construct
RGDTAQL

SEQ ID NO: 17890 - protein, 7 aa, synthetic construct
RGDTART

SEQ ID NO: 17891 - protein, 7 aa, synthetic construct
RGDDGSN

SEQ ID NO: 17892 - protein, 7 aa, synthetic construct
RGDTHET

SEQ ID NO: 17893 - protein, 7 aa, synthetic construct
RGDTHVQ

SEQ ID NO: 17894 - protein, 7 aa, synthetic construct
RGDTIIF

SEQ ID NO: 17895 - protein, 7 aa, synthetic construct
RGDTIIL

SEQ ID NO: 17896 - protein, 7 aa, synthetic construct
RGDDHEL

SEQ ID NO: 17897 - protein, 7 aa, synthetic construct
RGDTKFD

SEQ ID NO: 17898 - protein, 7 aa, synthetic construct
RGDTKLF

SEQ ID NO: 17899 - protein, 7 aa, synthetic construct
RGDTKRK

SEQ ID NO: 17900 - protein, 7 aa, synthetic construct
RGDTLGV

SEQ ID NO: 17901 - protein, 7 aa, synthetic construct
RGDTLNL

SEQ ID NO: 17902 - protein, 7 aa, synthetic construct
RGDTNFQ

SEQ ID NO: 17903 - protein, 7 aa, synthetic construct
RGDTQHF

SEQ ID NO: 17904 - protein, 7 aa, synthetic construct
RGDTQII

SEQ ID NO: 17905 - protein, 7 aa, synthetic construct
RGDTRQA

SEQ ID NO: 17906 - protein, 7 aa, synthetic construct
RGDTTGK

SEQ ID NO: 17907 - protein, 7 aa, synthetic construct
RGDTVFQ

SEQ ID NO: 17908 - protein, 7 aa, synthetic construct
RGDTVQR

SEQ ID NO: 17909 - protein, 7 aa, synthetic construct
RGDTVTN

SEQ ID NO: 17910 - protein, 7 aa, synthetic construct
RGDVASD

SEQ ID NO: 17911 - protein, 7 aa, synthetic construct
RGDVETN

SEQ ID NO: 17912 - protein, 7 aa, synthetic construct
RGDVFKT

SEQ ID NO: 17913 - protein, 7 aa, synthetic construct
RGDVGDL

SEQ ID NO: 17914 - protein, 7 aa, synthetic construct
RGDVHSE

SEQ ID NO: 17915 - protein, 7 aa, synthetic construct
RGDVHSH

SEQ ID NO: 17916 - protein, 7 aa, synthetic construct
RGDVHVG

SEQ ID NO: 17917 - protein, 7 aa, synthetic construct
RGDVIKT

SEQ ID NO: 17918 - protein, 7 aa, synthetic construct
RGDVKEG

SEQ ID NO: 17919 - protein, 7 aa, synthetic construct
RGDVKIF

SEQ ID NO: 17920 - protein, 7 aa, synthetic construct
RGDVNFG

SEQ ID NO: 17921 - protein, 7 aa, synthetic construct
RGDVQLI

SEQ ID NO: 17922 - protein, 7 aa, synthetic construct
RGDVQQQ

SEQ ID NO: 17923 - protein, 7 aa, synthetic construct
RGDVRLG

SEQ ID NO: 17924 - protein, 7 aa, synthetic construct
RGDVRSA

SEQ ID NO: 17925 - protein, 7 aa, synthetic construct
RGDVSSH

SEQ ID NO: 17926 - protein, 7 aa, synthetic construct
RGDVTVV

SEQ ID NO: 17927 - protein, 7 aa, synthetic construct
RGDVVGQ

SEQ ID NO: 17928 - protein, 7 aa, synthetic construct
RGDDKQV

SEQ ID NO: 17929 - protein, 7 aa, synthetic construct
RGDDNGS

SEQ ID NO: 17930 - protein, 7 aa, synthetic construct
RGDDNHN

SEQ ID NO: 17931 - protein, 7 aa, synthetic construct
RGDDNHT

SEQ ID NO: 17932 - protein, 7 aa, synthetic construct
RGDDQQL

SEQ ID NO: 17933 - protein, 7 aa, synthetic construct
RGDDRNR

SEQ ID NO: 17934 - protein, 7 aa, synthetic construct
RGDEGKI

SEQ ID NO: 17935 - protein, 7 aa, synthetic construct
RGDEGRA

SEQ ID NO: 17936 - protein, 7 aa, synthetic construct
RGDEGTG

SEQ ID NO: 17937 - protein, 7 aa, synthetic construct
RGDEHKQ

SEQ ID NO: 17938 - protein, 7 aa, synthetic construct
RGDENKA

SEQ ID NO: 17939 - protein, 7 aa, synthetic construct
RGDEQRN

SEQ ID NO: 17940 - protein, 7 aa, synthetic construct
RGDESKN

SEQ ID NO: 17941 - protein, 7 aa, synthetic construct
RGDESRV

SEQ ID NO: 17942 - protein, 7 aa, synthetic construct
RGDEVGH

SEQ ID NO: 17943 - protein, 7 aa, synthetic construct
RGDEVLR

SEQ ID NO: 17944 - protein, 7 aa, synthetic construct
RGDAGKE

SEQ ID NO: 17945 - protein, 7 aa, synthetic construct
RGDFAGQ

SEQ ID NO: 17946 - protein, 7 aa, synthetic construct
RGDFATV

SEQ ID NO: 17947 - protein, 7 aa, synthetic construct
RGDFDKL

SEQ ID NO: 17948 - protein, 7 aa, synthetic construct
RGDFENF

SEQ ID NO: 17949 - protein, 7 aa, synthetic construct
RGDFEQV

SEQ ID NO: 17950 - protein, 7 aa, synthetic construct
RGDFFEL

SEQ ID NO: 17951 - protein, 7 aa, synthetic construct
RGDFFFG

SEQ ID NO: 17952 - protein, 7 aa, synthetic construct
RGDFFHA

SEQ ID NO: 17953 - protein, 7 aa, synthetic construct
RGDFKGE

SEQ ID NO: 17954 - protein, 7 aa, synthetic construct
RGDFLAL

SEQ ID NO: 17955 - protein, 7 aa, synthetic construct
RGDFLDT

SEQ ID NO: 17956 - protein, 7 aa, synthetic construct
RGDFLFA

SEQ ID NO: 17957 - protein, 7 aa, synthetic construct
RGDFLND

SEQ ID NO: 17958 - protein, 7 aa, synthetic construct
RGDFNFN

SEQ ID NO: 17959 - protein, 7 aa, synthetic construct
RGDFNQK

SEQ ID NO: 17960 - protein, 7 aa, synthetic construct
RGDFNTV

SEQ ID NO: 17961 - protein, 7 aa, synthetic construct
RGDFRED

SEQ ID NO: 17962 - protein, 7 aa, synthetic construct
RGDFSRV

SEQ ID NO: 17963 - protein, 7 aa, synthetic construct
RGDFSVA

SEQ ID NO: 17964 - protein, 7 aa, synthetic construct
RGDGDFQ

SEQ ID NO: 17965 - protein, 7 aa, synthetic construct
RGDGFNL

SEQ ID NO: 17966 - protein, 7 aa, synthetic construct
RGDGGIV

SEQ ID NO: 17967 - protein, 7 aa, synthetic construct
RGDGGRT

SEQ ID NO: 17968 - protein, 7 aa, synthetic construct
RGDGGVR

SEQ ID NO: 17969 - protein, 7 aa, synthetic construct
RGDGIFL

SEQ ID NO: 17970 - protein, 7 aa, synthetic construct
RGDGISR

SEQ ID NO: 17971 - protein, 7 aa, synthetic construct
RGDAISI

SEQ ID NO: 17972 - protein, 7 aa, synthetic construct
RGDAIVT

SEQ ID NO: 17973 - protein, 7 aa, synthetic construct
RGDGQGK

SEQ ID NO: 17974 - protein, 7 aa, synthetic construct
RGDAKAS

SEQ ID NO: 17975 - protein, 7 aa, synthetic construct
RGDGRRS

SEQ ID NO: 17976 - protein, 7 aa, synthetic construct
RGDGRSR

SEQ ID NO: 17977 - protein, 7 aa, synthetic construct
RGDGSAS

SEQ ID NO: 17978 - protein, 7 aa, synthetic construct
RGDGSGH

SEQ ID NO: 17979 - protein, 7 aa, synthetic construct
RGDGSHH

SEQ ID NO: 17980 - protein, 7 aa, synthetic construct
RGDGTVL

SEQ ID NO: 17981 - protein, 7 aa, synthetic construct
RGDGVLD

SEQ ID NO: 17982 - protein, 7 aa, synthetic construct
RGDGVND

SEQ ID NO: 17983 - protein, 7 aa, synthetic construct
RGDGVSH

SEQ ID NO: 17984 - protein, 7 aa, synthetic construct
RGDHAVA

SEQ ID NO: 17985 - protein, 7 aa, synthetic construct
RGDHDFS

SEQ ID NO: 17986 - protein, 7 aa, synthetic construct
RGDHDNV

SEQ ID NO: 17987 - protein, 7 aa, synthetic construct
RGDHDRV

SEQ ID NO: 17988 - protein, 7 aa, synthetic construct
RGDHEAA

SEQ ID NO: 17989 - protein, 7 aa, synthetic construct
RGDHEEE

SEQ ID NO: 17990 - protein, 7 aa, synthetic construct
RGDHESN

SEQ ID NO: 17991 - protein, 7 aa, synthetic construct
RGDHFQD

SEQ ID NO: 17992 - protein, 7 aa, synthetic construct
RGDHGQS

SEQ ID NO: 17993 - protein, 7 aa, synthetic construct
RGDHHES

SEQ ID NO: 17994 - protein, 7 aa, synthetic construct
RGDHHNT

SEQ ID NO: 17995 - protein, 7 aa, synthetic construct
RGDHHRF

SEQ ID NO: 17996 - protein, 7 aa, synthetic construct
RGDHHTT

SEQ ID NO: 17997 - protein, 7 aa, synthetic construct
RGDHKFV

SEQ ID NO: 17998 - protein, 7 aa, synthetic construct
RGDALFR

SEQ ID NO: 17999 - protein, 7 aa, synthetic construct
RGDHNEN

SEQ ID NO: 18000 - protein, 7 aa, synthetic construct
RGDALIR

SEQ ID NO: 18001 - protein, 7 aa, synthetic construct
RGDHQEV

SEQ ID NO: 18002 - protein, 7 aa, synthetic construct
RGDHQSS

SEQ ID NO: 18003 - protein, 7 aa, synthetic construct
RGDALNF

SEQ ID NO: 18004 - protein, 7 aa, synthetic construct
RGDHRKF

SEQ ID NO: 18005 - protein, 7 aa, synthetic construct
RGDHRQV

SEQ ID NO: 18006 - protein, 7 aa, synthetic construct
RGDHRRG

SEQ ID NO: 18007 - protein, 7 aa, synthetic construct
RGDALRE

SEQ ID NO: 18008 - protein, 7 aa, synthetic construct
RGDHSSG

SEQ ID NO: 18009 - protein, 7 aa, synthetic construct
RGDHTAK

SEQ ID NO: 18010 - protein, 7 aa, synthetic construct
RGDHTKD

SEQ ID NO: 18011 - protein, 7 aa, synthetic construct
RGDHTRT

SEQ ID NO: 18012 - protein, 7 aa, synthetic construct
RGDHVAF

SEQ ID NO: 18013 - protein, 7 aa, synthetic construct
RGDHVFI

SEQ ID NO: 18014 - protein, 7 aa, synthetic construct
RGDHVFV

SEQ ID NO: 18015 - protein, 7 aa, synthetic construct
RGDHVHA

SEQ ID NO: 18016 - protein, 7 aa, synthetic construct
RGDHVNR

SEQ ID NO: 18017 - protein, 7 aa, synthetic construct
RGDIADV

SEQ ID NO: 18018 - protein, 7 aa, synthetic construct
RGDIDVQ

SEQ ID NO: 18019 - protein, 7 aa, synthetic construct
RGDIFLV

SEQ ID NO: 18020 - protein, 7 aa, synthetic construct
RGDIGAA

SEQ ID NO: 18021 - protein, 7 aa, synthetic construct
RGDIGFH

SEQ ID NO: 18022 - protein, 7 aa, synthetic construct
RGDIGHR

SEQ ID NO: 18023 - protein, 7 aa, synthetic construct
RGDIGSR

SEQ ID NO: 18024 - protein, 7 aa, synthetic construct
RGDIGVH

SEQ ID NO: 18025 - protein, 7 aa, synthetic construct
RGDILTR

SEQ ID NO: 18026 - protein, 7 aa, synthetic construct
RGDINHG

SEQ ID NO: 18027 - protein, 7 aa, synthetic construct
RGDINNK

SEQ ID NO: 18028 - protein, 7 aa, synthetic construct
RGDIQAF

SEQ ID NO: 18029 - protein, 7 aa, synthetic construct
RGDIQAI

SEQ ID NO: 18030 - protein, 7 aa, synthetic construct
RGDIQNV

SEQ ID NO: 18031 - protein, 7 aa, synthetic construct
RGDIQSF

SEQ ID NO: 18032 - protein, 7 aa, synthetic construct
RGDIQTQ

SEQ ID NO: 18033 - protein, 7 aa, synthetic construct
RGDIRHL

SEQ ID NO: 18034 - protein, 7 aa, synthetic construct
RGDISIN

SEQ ID NO: 18035 - protein, 7 aa, synthetic construct
RGDIVFN

SEQ ID NO: 18036 - protein, 7 aa, synthetic construct
RGDAQII

SEQ ID NO: 18037 - protein, 7 aa, synthetic construct
RGDKDGT

SEQ ID NO: 18038 - protein, 7 aa, synthetic construct
RGDKDSQ

SEQ ID NO: 18039 - protein, 7 aa, synthetic construct
RGDAQSV

SEQ ID NO: 18040 - protein, 7 aa, synthetic construct
RGDAQTQ

SEQ ID NO: 18041 - protein, 7 aa, synthetic construct
RGDKHEF

SEQ ID NO: 18042 - protein, 7 aa, synthetic construct
RGDKHGD

SEQ ID NO: 18043 - protein, 7 aa, synthetic construct
RGDKIGI

SEQ ID NO: 18044 - protein, 7 aa, synthetic construct
RGDKKLN

SEQ ID NO: 18045 - protein, 7 aa, synthetic construct
RGDARHD

SEQ ID NO: 18046 - protein, 7 aa, synthetic construct
RGDKLSQ

SEQ ID NO: 18047 - protein, 7 aa, synthetic construct
RGDKNHK

SEQ ID NO: 18048 - protein, 7 aa, synthetic construct
RGDKNRS

SEQ ID NO: 18049 - protein, 7 aa, synthetic construct
RGDKSDI

SEQ ID NO: 18050 - protein, 7 aa, synthetic construct
RGDKSTF

SEQ ID NO: 18051 - protein, 7 aa, synthetic construct
RGDKTAH

SEQ ID NO: 18052 - protein, 7 aa, synthetic construct
RGDLADS

SEQ ID NO: 18053 - protein, 7 aa, synthetic construct
RGDLDIV

SEQ ID NO: 18054 - protein, 7 aa, synthetic construct
RGDLEHT

SEQ ID NO: 18055 - protein, 7 aa, synthetic construct
RGDASHE

SEQ ID NO: 18056 - protein, 7 aa, synthetic construct
RGDLFNV

SEQ ID NO: 18057 - protein, 7 aa, synthetic construct
RGDLGRT

SEQ ID NO: 18058 - protein, 7 aa, synthetic construct
RGDLHDD

SEQ ID NO: 18059 - protein, 7 aa, synthetic construct
RGDLHFI

SEQ ID NO: 18060 - protein, 7 aa, synthetic construct
RGDLHHG

SEQ ID NO: 18061 - protein, 7 aa, synthetic construct
RGDLHIT

SEQ ID NO: 18062 - protein, 7 aa, synthetic construct
RGDLHSA

SEQ ID NO: 18063 - protein, 7 aa, synthetic construct
RGDLINT

SEQ ID NO: 18064 - protein, 7 aa, synthetic construct
RGDLKAQ

SEQ ID NO: 18065 - protein, 7 aa, synthetic construct
RGDLKRE

SEQ ID NO: 18066 - protein, 7 aa, synthetic construct
RGDLLGV

SEQ ID NO: 18067 - protein, 7 aa, synthetic construct
RGDLNLE

SEQ ID NO: 18068 - protein, 7 aa, synthetic construct
RGDLNRE

SEQ ID NO: 18069 - protein, 7 aa, synthetic construct
RGDLQKS

SEQ ID NO: 18070 - protein, 7 aa, synthetic construct
RGDLRDK

SEQ ID NO: 18071 - protein, 7 aa, synthetic construct
RGDLSEQ

SEQ ID NO: 18072 - protein, 7 aa, synthetic construct
RGDLSTD

SEQ ID NO: 18073 - protein, 7 aa, synthetic construct
RGDLVSL

SEQ ID NO: 18074 - protein, 7 aa, synthetic construct
RGDNATS

SEQ ID NO: 18075 - protein, 7 aa, synthetic construct
RGDNERA

SEQ ID NO: 18076 - protein, 7 aa, synthetic construct
RGDNETS

SEQ ID NO: 18077 - protein, 7 aa, synthetic construct
RGDNGGE

SEQ ID NO: 18078 - protein, 7 aa, synthetic construct
RGDNGIE

SEQ ID NO: 18079 - protein, 7 aa, synthetic construct
RGDATVL

SEQ ID NO: 18080 - protein, 7 aa, synthetic construct
RGDNGSS

SEQ ID NO: 18081 - protein, 7 aa, synthetic construct
RGDNGTI

SEQ ID NO: 18082 - protein, 7 aa, synthetic construct
RGDNIKL

SEQ ID NO: 18083 - protein, 7 aa, synthetic construct
RGDNKDK

SEQ ID NO: 18084 - protein, 7 aa, synthetic construct
RGDNKLH

SEQ ID NO: 18085 - protein, 7 aa, synthetic construct
RGDNKRL

SEQ ID NO: 18086 - protein, 7 aa, synthetic construct
RGDAVGS

SEQ ID NO: 18087 - protein, 7 aa, synthetic construct
RGDNRAH

SEQ ID NO: 18088 - protein, 7 aa, synthetic construct
RGDNRGN

SEQ ID NO: 18089 - protein, 7 aa, synthetic construct
RGDNRGS

SEQ ID NO: 18090 - protein, 7 aa, synthetic construct
RGDNRTT

SEQ ID NO: 18091 - protein, 7 aa, synthetic construct
RGDNSKQ

SEQ ID NO: 18092 - protein, 7 aa, synthetic construct
RGDAVRV

SEQ ID NO: 18093 - protein, 7 aa, synthetic construct
RGDNTHN

SEQ ID NO: 18094 - protein, 7 aa, synthetic construct
RGDNTNS

SEQ ID NO: 18095 - protein, 7 aa, synthetic construct
RGDNVGK

SEQ ID NO: 18096 - protein, 7 aa, synthetic construct
RGDNVSD

SEQ ID NO: 18097 - protein, 7 aa, synthetic construct
RGDQAAR

SEQ ID NO: 18098 - protein, 7 aa, synthetic construct
RGDQAGF

SEQ ID NO: 18099 - protein, 7 aa, synthetic construct
RGDQDNF

SEQ ID NO: 18100 - protein, 7 aa, synthetic construct
RGDQFDK

SEQ ID NO: 18101 - protein, 7 aa, synthetic construct
RGDQGFH

SEQ ID NO: 18102 - protein, 7 aa, synthetic construct
RGDDAKK

SEQ ID NO: 18103 - protein, 7 aa, synthetic construct
RGDDAKR

SEQ ID NO: 18104 - protein, 7 aa, synthetic construct
RGDQHLK

SEQ ID NO: 18105 - protein, 7 aa, synthetic construct
RGDQIQF

SEQ ID NO: 18106 - protein, 7 aa, synthetic construct
RGDADLL

SEQ ID NO: 18107 - protein, 7 aa, synthetic construct
RGDQLAH

SEQ ID NO: 18108 - protein, 7 aa, synthetic construct
RGDQQDK

SEQ ID NO: 18109 - protein, 7 aa, synthetic construct
RGDQVAR

SEQ ID NO: 18110 - protein, 7 aa, synthetic construct
RGDRAIG

SEQ ID NO: 18111 - protein, 7 aa, synthetic construct
RGDRDDF

SEQ ID NO: 18112 - protein, 7 aa, synthetic construct
RGDREDK

SEQ ID NO: 18113 - protein, 7 aa, synthetic construct
RGDRHAH

SEQ ID NO: 18114 - protein, 7 aa, synthetic construct
RGDRIFS

SEQ ID NO: 18115 - protein, 7 aa, synthetic construct
RGDRNFE

SEQ ID NO: 18116 - protein, 7 aa, synthetic construct
RGDRNTE

SEQ ID NO: 18117 - protein, 7 aa, synthetic construct
RGDRQED

SEQ ID NO: 18118 - protein, 7 aa, synthetic construct
RGDRQRN

SEQ ID NO: 18119 - protein, 7 aa, synthetic construct
RGDRRDR

SEQ ID NO: 18120 - protein, 7 aa, synthetic construct
RGDRRTS

SEQ ID NO: 18121 - protein, 7 aa, synthetic construct
RGDRSQR

SEQ ID NO: 18122 - protein, 7 aa, synthetic construct
RGDRSRE

SEQ ID NO: 18123 - protein, 7 aa, synthetic construct
RGDRTDQ

SEQ ID NO: 18124 - protein, 7 aa, synthetic construct
RGDRTDT

SEQ ID NO: 18125 - protein, 7 aa, synthetic construct
RGDRVAF

SEQ ID NO: 18126 - protein, 7 aa, synthetic construct
RGDRVDG

SEQ ID NO: 18127 - protein, 7 aa, synthetic construct
RGDRVFS

SEQ ID NO: 18128 - protein, 7 aa, synthetic construct
RGDSFIK

SEQ ID NO: 18129 - protein, 7 aa, synthetic construct
RGDSFNK

SEQ ID NO: 18130 - protein, 7 aa, synthetic construct
RGDSGFK

SEQ ID NO: 18131 - protein, 7 aa, synthetic construct
RGDSGQL

SEQ ID NO: 18132 - protein, 7 aa, synthetic construct
RGDSGST

SEQ ID NO: 18133 - protein, 7 aa, synthetic construct
RGDSHFT

SEQ ID NO: 18134 - protein, 7 aa, synthetic construct
RGDSHNQ

SEQ ID NO: 18135 - protein, 7 aa, synthetic construct
RGDSHTA

SEQ ID NO: 18136 - protein, 7 aa, synthetic construct
RGDSIGI

SEQ ID NO: 18137 - protein, 7 aa, synthetic construct
RGDSIQF

SEQ ID NO: 18138 - protein, 7 aa, synthetic construct
RGDSLDN

SEQ ID NO: 18139 - protein, 7 aa, synthetic construct
RGDSLGE

SEQ ID NO: 18140 - protein, 7 aa, synthetic construct
RGDSLNL

SEQ ID NO: 18141 - protein, 7 aa, synthetic construct
RGDSNHQ

SEQ ID NO: 18142 - protein, 7 aa, synthetic construct
RGDAAES

SEQ ID NO: 18143 - protein, 7 aa, synthetic construct
RGDSRQE

SEQ ID NO: 18144 - protein, 7 aa, synthetic construct
RGDSSEL

SEQ ID NO: 18145 - protein, 7 aa, synthetic construct
RGDSSGG

SEQ ID NO: 18146 - protein, 7 aa, synthetic construct
RGDSTGE

SEQ ID NO: 18147 - protein, 7 aa, synthetic construct
RGDSTHI

SEQ ID NO: 18148 - protein, 7 aa, synthetic construct
RGDDGQE

SEQ ID NO: 18149 - protein, 7 aa, synthetic construct
RGDTGHL

SEQ ID NO: 18150 - protein, 7 aa, synthetic construct
RGDTGLS

SEQ ID NO: 18151 - protein, 7 aa, synthetic construct
RGDTGRS

SEQ ID NO: 18152 - protein, 7 aa, synthetic construct
RGDTGSN

SEQ ID NO: 18153 - protein, 7 aa, synthetic construct
RGDTHFT

SEQ ID NO: 18154 - protein, 7 aa, synthetic construct
RGDTHRI

SEQ ID NO: 18155 - protein, 7 aa, synthetic construct
RGDTHSN

SEQ ID NO: 18156 - protein, 7 aa, synthetic construct
RGDTIEK

SEQ ID NO: 18157 - protein, 7 aa, synthetic construct
RGDTIHD

SEQ ID NO: 18158 - protein, 7 aa, synthetic construct
RGDTITT

SEQ ID NO: 18159 - protein, 7 aa, synthetic construct
RGDTKDI

SEQ ID NO: 18160 - protein, 7 aa, synthetic construct
RGDTKFA

SEQ ID NO: 18161 - protein, 7 aa, synthetic construct
RGDTLLN

SEQ ID NO: 18162 - protein, 7 aa, synthetic construct
RGDTNSR

SEQ ID NO: 18163 - protein, 7 aa, synthetic construct
RGDTREN

SEQ ID NO: 18164 - protein, 7 aa, synthetic construct
RGDTRKE

SEQ ID NO: 18165 - protein, 7 aa, synthetic construct
RGDTTTI

SEQ ID NO: 18166 - protein, 7 aa, synthetic construct
RGDTVHV

SEQ ID NO: 18167 - protein, 7 aa, synthetic construct
RGDTVIQ

SEQ ID NO: 18168 - protein, 7 aa, synthetic construct
RGDVALK

SEQ ID NO: 18169 - protein, 7 aa, synthetic construct
RGDDIAV

SEQ ID NO: 18170 - protein, 7 aa, synthetic construct
RGDVAVI

SEQ ID NO: 18171 - protein, 7 aa, synthetic construct
RGDVDGG

SEQ ID NO: 18172 - protein, 7 aa, synthetic construct
RGDVDIK

SEQ ID NO: 18173 - protein, 7 aa, synthetic construct
RGDVDVT

SEQ ID NO: 18174 - protein, 7 aa, synthetic construct
RGDVEKQ

SEQ ID NO: 18175 - protein, 7 aa, synthetic construct
RGDVFFK

SEQ ID NO: 18176 - protein, 7 aa, synthetic construct
RGDVFQF

SEQ ID NO: 18177 - protein, 7 aa, synthetic construct
RGDDIHS

SEQ ID NO: 18178 - protein, 7 aa, synthetic construct
RGDVHHH

SEQ ID NO: 18179 - protein, 7 aa, synthetic construct
RGDVHLH

SEQ ID NO: 18180 - protein, 7 aa, synthetic construct
RGDVIIV

SEQ ID NO: 18181 - protein, 7 aa, synthetic construct
RGDVKVE

SEQ ID NO: 18182 - protein, 7 aa, synthetic construct
RGDDIRT

SEQ ID NO: 18183 - protein, 7 aa, synthetic construct
RGDVLAI

SEQ ID NO: 18184 - protein, 7 aa, synthetic construct
RGDVLHS

SEQ ID NO: 18185 - protein, 7 aa, synthetic construct
RGDVLRD

SEQ ID NO: 18186 - protein, 7 aa, synthetic construct
RGDVNFN

SEQ ID NO: 18187 - protein, 7 aa, synthetic construct
RGDVRHD

SEQ ID NO: 18188 - protein, 7 aa, synthetic construct
RGDVSAS

SEQ ID NO: 18189 - protein, 7 aa, synthetic construct
RGDVTTH

SEQ ID NO: 18190 - protein, 7 aa, synthetic construct
RGDVVDR

SEQ ID NO: 18191 - protein, 7 aa, synthetic construct
RGDVVLH

SEQ ID NO: 18192 - protein, 7 aa, synthetic construct
RGDVVSS

SEQ ID NO: 18193 - protein, 7 aa, synthetic construct
RGDDLKI

SEQ ID NO: 18194 - protein, 7 aa, synthetic construct
RGDDNKK

SEQ ID NO: 18195 - protein, 7 aa, synthetic construct
RGDDQNF

SEQ ID NO: 18196 - protein, 7 aa, synthetic construct
RGDDRNI

SEQ ID NO: 18197 - protein, 7 aa, synthetic construct
RGDDSSS

SEQ ID NO: 18198 - protein, 7 aa, synthetic construct
RGDDTGN

SEQ ID NO: 18199 - protein, 7 aa, synthetic construct
RGDDTHL

SEQ ID NO: 18200 - protein, 7 aa, synthetic construct
RGDAESN

SEQ ID NO: 18201 - protein, 7 aa, synthetic construct
RGDDVDR

SEQ ID NO: 18202 - protein, 7 aa, synthetic construct
RGDAEVR

SEQ ID NO: 18203 - protein, 7 aa, synthetic construct
RGDEATV

SEQ ID NO: 18204 - protein, 7 aa, synthetic construct
RGDEDGV

SEQ ID NO: 18205 - protein, 7 aa, synthetic construct
RGDAFFV

SEQ ID NO: 18206 - protein, 7 aa, synthetic construct
RGDEEQK

SEQ ID NO: 18207 - protein, 7 aa, synthetic construct
RGDEFKL

SEQ ID NO: 18208 - protein, 7 aa, synthetic construct
RGDEHFD

SEQ ID NO: 18209 - protein, 7 aa, synthetic construct
RGDEHGI

SEQ ID NO: 18210 - protein, 7 aa, synthetic construct
RGDEHRA

SEQ ID NO: 18211 - protein, 7 aa, synthetic construct
RGDEHTE

SEQ ID NO: 18212 - protein, 7 aa, synthetic construct
RGDAAHI

SEQ ID NO: 18213 - protein, 7 aa, synthetic construct
RGDEIRE

SEQ ID NO: 18214 - protein, 7 aa, synthetic construct
RGDESFK

SEQ ID NO: 18215 - protein, 7 aa, synthetic construct
RGDESQD

SEQ ID NO: 18216 - protein, 7 aa, synthetic construct
RGDESSD

SEQ ID NO: 18217 - protein, 7 aa, synthetic construct
RGDESVQ

SEQ ID NO: 18218 - protein, 7 aa, synthetic construct
RGDAGIV

SEQ ID NO: 18219 - protein, 7 aa, synthetic construct
RGDEVQL

SEQ ID NO: 18220 - protein, 7 aa, synthetic construct
RGDFAGH

SEQ ID NO: 18221 - protein, 7 aa, synthetic construct
RGDFASH

SEQ ID NO: 18222 - protein, 7 aa, synthetic construct
RGDFDRE

SEQ ID NO: 18223 - protein, 7 aa, synthetic construct
RGDFEHF

SEQ ID NO: 18224 - protein, 7 aa, synthetic construct
RGDFEHI

SEQ ID NO: 18225 - protein, 7 aa, synthetic construct
RGDFEQT

SEQ ID NO: 18226 - protein, 7 aa, synthetic construct
RGDFGEN

SEQ ID NO: 18227 - protein, 7 aa, synthetic construct
RGDAGVG

SEQ ID NO: 18228 - protein, 7 aa, synthetic construct
RGDFHIK

SEQ ID NO: 18229 - protein, 7 aa, synthetic construct
RGDFIST

SEQ ID NO: 18230 - protein, 7 aa, synthetic construct
RGDFKDH

SEQ ID NO: 18231 - protein, 7 aa, synthetic construct
RGDFKFV

SEQ ID NO: 18232 - protein, 7 aa, synthetic construct
RGDFLII

SEQ ID NO: 18233 - protein, 7 aa, synthetic construct
RGDFLKE

SEQ ID NO: 18234 - protein, 7 aa, synthetic construct
RGDFNAH

SEQ ID NO: 18235 - protein, 7 aa, synthetic construct
RGDFNDQ

SEQ ID NO: 18236 - protein, 7 aa, synthetic construct
RGDFNHH

SEQ ID NO: 18237 - protein, 7 aa, synthetic construct
RGDFNKL

SEQ ID NO: 18238 - protein, 7 aa, synthetic construct
RGDAHKN

SEQ ID NO: 18239 - protein, 7 aa, synthetic construct
RGDFQDQ

SEQ ID NO: 18240 - protein, 7 aa, synthetic construct
RGDFRFG

SEQ ID NO: 18241 - protein, 7 aa, synthetic construct
RGDFRKQ

SEQ ID NO: 18242 - protein, 7 aa, synthetic construct
RGDFRSG

SEQ ID NO: 18243 - protein, 7 aa, synthetic construct
RGDFTAI

SEQ ID NO: 18244 - protein, 7 aa, synthetic construct
RGDFTQK

SEQ ID NO: 18245 - protein, 7 aa, synthetic construct
RGDFTTG

SEQ ID NO: 18246 - protein, 7 aa, synthetic construct
RGDFVHH

SEQ ID NO: 18247 - protein, 7 aa, synthetic construct
RGDGAVN

SEQ ID NO: 18248 - protein, 7 aa, synthetic construct
RGDGDDK

SEQ ID NO: 18249 - protein, 7 aa, synthetic construct
RGDGEHH

SEQ ID NO: 18250 - protein, 7 aa, synthetic construct
RGDGELK

SEQ ID NO: 18251 - protein, 7 aa, synthetic construct
RGDGESK

SEQ ID NO: 18252 - protein, 7 aa, synthetic construct
RGDGFEL

SEQ ID NO: 18253 - protein, 7 aa, synthetic construct
RGDGFHK

SEQ ID NO: 18254 - protein, 7 aa, synthetic construct
RGDGFHL

SEQ ID NO: 18255 - protein, 7 aa, synthetic construct
RGDGFSH

SEQ ID NO: 18256 - protein, 7 aa, synthetic construct
RGDGFTA

SEQ ID NO: 18257 - protein, 7 aa, synthetic construct
RGDGGTI

SEQ ID NO: 18258 - protein, 7 aa, synthetic construct
RGDGKAK

SEQ ID NO: 18259 - protein, 7 aa, synthetic construct
RGDGKAT

SEQ ID NO: 18260 - protein, 7 aa, synthetic construct
RGDGKEH

SEQ ID NO: 18261 - protein, 7 aa, synthetic construct
RGDGKHD

SEQ ID NO: 18262 - protein, 7 aa, synthetic construct
RGDGKKF

SEQ ID NO: 18263 - protein, 7 aa, synthetic construct
RGDGKLV

SEQ ID NO: 18264 - protein, 7 aa, synthetic construct
RGDGKNT

SEQ ID NO: 18265 - protein, 7 aa, synthetic construct
RGDGNRR

SEQ ID NO: 18266 - protein, 7 aa, synthetic construct
RGDGQGH

SEQ ID NO: 18267 - protein, 7 aa, synthetic construct
RGDGSGT

SEQ ID NO: 18268 - protein, 7 aa, synthetic construct
RGDGSNR

SEQ ID NO: 18269 - protein, 7 aa, synthetic construct
RGDGTAQ

SEQ ID NO: 18270 - protein, 7 aa, synthetic construct
RGDGTNF

SEQ ID NO: 18271 - protein, 7 aa, synthetic construct
RGDGVAV

SEQ ID NO: 18272 - protein, 7 aa, synthetic construct
RGDGVHF

SEQ ID NO: 18273 - protein, 7 aa, synthetic construct
RGDGVIR

SEQ ID NO: 18274 - protein, 7 aa, synthetic construct
RGDGVNI

SEQ ID NO: 18275 - protein, 7 aa, synthetic construct
RGDHDNF

SEQ ID NO: 18276 - protein, 7 aa, synthetic construct
RGDHDNK

SEQ ID NO: 18277 - protein, 7 aa, synthetic construct
RGDAKRN

SEQ ID NO: 18278 - protein, 7 aa, synthetic construct
RGDHETF

SEQ ID NO: 18279 - protein, 7 aa, synthetic construct
RGDHFRF

SEQ ID NO: 18280 - protein, 7 aa, synthetic construct
RGDHFST

SEQ ID NO: 18281 - protein, 7 aa, synthetic construct
RGDALAT

SEQ ID NO: 18282 - protein, 7 aa, synthetic construct
RGDHIAT

SEQ ID NO: 18283 - protein, 7 aa, synthetic construct
RGDHIEK

SEQ ID NO: 18284 - protein, 7 aa, synthetic construct
RGDHIVV

SEQ ID NO: 18285 - protein, 7 aa, synthetic construct
RGDHLHR

SEQ ID NO: 18286 - protein, 7 aa, synthetic construct
RGDHLQT

SEQ ID NO: 18287 - protein, 7 aa, synthetic construct
RGDHQAT

SEQ ID NO: 18288 - protein, 7 aa, synthetic construct
RGDHQFT

SEQ ID NO: 18289 - protein, 7 aa, synthetic construct
RGDHRSR

SEQ ID NO: 18290 - protein, 7 aa, synthetic construct
RGDHRTS

SEQ ID NO: 18291 - protein, 7 aa, synthetic construct
RGDHSTE

SEQ ID NO: 18292 - protein, 7 aa, synthetic construct
RGDHTLL

SEQ ID NO: 18293 - protein, 7 aa, synthetic construct
RGDIAQD

SEQ ID NO: 18294 - protein, 7 aa, synthetic construct
RGDIDES

SEQ ID NO: 18295 - protein, 7 aa, synthetic construct
RGDAATS

SEQ ID NO: 18296 - protein, 7 aa, synthetic construct
RGDIEQK

SEQ ID NO: 18297 - protein, 7 aa, synthetic construct
RGDIFIE

SEQ ID NO: 18298 - protein, 7 aa, synthetic construct
RGDIHGG

SEQ ID NO: 18299 - protein, 7 aa, synthetic construct
RGDIKRD

SEQ ID NO: 18300 - protein, 7 aa, synthetic construct
RGDIKSL

SEQ ID NO: 18301 - protein, 7 aa, synthetic construct
RGDILFN

SEQ ID NO: 18302 - protein, 7 aa, synthetic construct
RGDILGF

SEQ ID NO: 18303 - protein, 7 aa, synthetic construct
RGDILNS

SEQ ID NO: 18304 - protein, 7 aa, synthetic construct
RGDINGT

SEQ ID NO: 18305 - protein, 7 aa, synthetic construct
RGDINVL

SEQ ID NO: 18306 - protein, 7 aa, synthetic construct
RGDIQQR

SEQ ID NO: 18307 - protein, 7 aa, synthetic construct
RGDIRRH

SEQ ID NO: 18308 - protein, 7 aa, synthetic construct
RGDIRTD

SEQ ID NO: 18309 - protein, 7 aa, synthetic construct
RGDIRVD

SEQ ID NO: 18310 - protein, 7 aa, synthetic construct
RGDISGA

SEQ ID NO: 18311 - protein, 7 aa, synthetic construct
RGDISIH

SEQ ID NO: 18312 - protein, 7 aa, synthetic construct
RGDITTV

SEQ ID NO: 18313 - protein, 7 aa, synthetic construct
RGDKAAQ

SEQ ID NO: 18314 - protein, 7 aa, synthetic construct
RGDKAIE

SEQ ID NO: 18315 - protein, 7 aa, synthetic construct
RGDKAIL

SEQ ID NO: 18316 - protein, 7 aa, synthetic construct
RGDKAIV

SEQ ID NO: 18317 - protein, 7 aa, synthetic construct
RGDKDHF

SEQ ID NO: 18318 - protein, 7 aa, synthetic construct
RGDKDHT

SEQ ID NO: 18319 - protein, 7 aa, synthetic construct
RGDAQNN

SEQ ID NO: 18320 - protein, 7 aa, synthetic construct
RGDKFGN

SEQ ID NO: 18321 - protein, 7 aa, synthetic construct
RGDKGAL

SEQ ID NO: 18322 - protein, 7 aa, synthetic construct
RGDKISA

SEQ ID NO: 18323 - protein, 7 aa, synthetic construct
RGDKKHE

SEQ ID NO: 18324 - protein, 7 aa, synthetic construct
RGDKLIS

SEQ ID NO: 18325 - protein, 7 aa, synthetic construct
RGDKNNN

SEQ ID NO: 18326 - protein, 7 aa, synthetic construct
RGDKQFL

SEQ ID NO: 18327 - protein, 7 aa, synthetic construct
RGDKRED

SEQ ID NO: 18328 - protein, 7 aa, synthetic construct
RGDKRQG

SEQ ID NO: 18329 - protein, 7 aa, synthetic construct
RGDKSGT

SEQ ID NO: 18330 - protein, 7 aa, synthetic construct
RGDKSKD

SEQ ID NO: 18331 - protein, 7 aa, synthetic construct
RGDKSKR

SEQ ID NO: 18332 - protein, 7 aa, synthetic construct
RGDKTTQ

SEQ ID NO: 18333 - protein, 7 aa, synthetic construct
RGDLATR

SEQ ID NO: 18334 - protein, 7 aa, synthetic construct
RGDLDGG

SEQ ID NO: 18335 - protein, 7 aa, synthetic construct
RGDLDQQ

SEQ ID NO: 18336 - protein, 7 aa, synthetic construct
RGDLDVL

SEQ ID NO: 18337 - protein, 7 aa, synthetic construct
RGDLEKV

SEQ ID NO: 18338 - protein, 7 aa, synthetic construct
RGDLESR

SEQ ID NO: 18339 - protein, 7 aa, synthetic construct
RGDLFLQ

SEQ ID NO: 18340 - protein, 7 aa, synthetic construct
RGDLGHG

SEQ ID NO: 18341 - protein, 7 aa, synthetic construct
RGDLGTL

SEQ ID NO: 18342 - protein, 7 aa, synthetic construct
RGDLHRS

SEQ ID NO: 18343 - protein, 7 aa, synthetic construct
RGDLHSK

SEQ ID NO: 18344 - protein, 7 aa, synthetic construct
RGDLHSV

SEQ ID NO: 18345 - protein, 7 aa, synthetic construct
RGDLIRK

SEQ ID NO: 18346 - protein, 7 aa, synthetic construct
RGDASQR

SEQ ID NO: 18347 - protein, 7 aa, synthetic construct
RGDLKVD

SEQ ID NO: 18348 - protein, 7 aa, synthetic construct
RGDLKVN

SEQ ID NO: 18349 - protein, 7 aa, synthetic construct
RGDLNNA

SEQ ID NO: 18350 - protein, 7 aa, synthetic construct
RGDLNNK

SEQ ID NO: 18351 - protein, 7 aa, synthetic construct
RGDLNSA

SEQ ID NO: 18352 - protein, 7 aa, synthetic construct
RGDLRFG

SEQ ID NO: 18353 - protein, 7 aa, synthetic construct
RGDLRTG

SEQ ID NO: 18354 - protein, 7 aa, synthetic construct
RGDLSSD

SEQ ID NO: 18355 - protein, 7 aa, synthetic construct
RGDLTEQ

SEQ ID NO: 18356 - protein, 7 aa, synthetic construct
RGDLTHQ

SEQ ID NO: 18357 - protein, 7 aa, synthetic construct
RGDLTQR

SEQ ID NO: 18358 - protein, 7 aa, synthetic construct
RGDLVAN

SEQ ID NO: 18359 - protein, 7 aa, synthetic construct
RGDLVDI

SEQ ID NO: 18360 - protein, 7 aa, synthetic construct
RGDLVRA

SEQ ID NO: 18361 - protein, 7 aa, synthetic construct
RGDATKH

SEQ ID NO: 18362 - protein, 7 aa, synthetic construct
RGDNDVA

SEQ ID NO: 18363 - protein, 7 aa, synthetic construct
RGDNEHL

SEQ ID NO: 18364 - protein, 7 aa, synthetic construct
RGDNFHV

SEQ ID NO: 18365 - protein, 7 aa, synthetic construct
RGDNIKF

SEQ ID NO: 18366 - protein, 7 aa, synthetic construct
RGDNIRF

SEQ ID NO: 18367 - protein, 7 aa, synthetic construct
RGDNITK

SEQ ID NO: 18368 - protein, 7 aa, synthetic construct
RGDNLDI

SEQ ID NO: 18369 - protein, 7 aa, synthetic construct
RGDNNAI

SEQ ID NO: 18370 - protein, 7 aa, synthetic construct
RGDAVIL

SEQ ID NO: 18371 - protein, 7 aa, synthetic construct
RGDNQKQ

SEQ ID NO: 18372 - protein, 7 aa, synthetic construct
RGDNRHA

SEQ ID NO: 18373 - protein, 7 aa, synthetic construct
RGDNSHS

SEQ ID NO: 18374 - protein, 7 aa, synthetic construct
RGDNSKH

SEQ ID NO: 18375 - protein, 7 aa, synthetic construct
RGDNSVK

SEQ ID NO: 18376 - protein, 7 aa, synthetic construct
RGDAVSF

SEQ ID NO: 18377 - protein, 7 aa, synthetic construct
RGDNTEQ

SEQ ID NO: 18378 - protein, 7 aa, synthetic construct
RGDNTFK

SEQ ID NO: 18379 - protein, 7 aa, synthetic construct
RGDNTKF

SEQ ID NO: 18380 - protein, 7 aa, synthetic construct
RGDQADK

SEQ ID NO: 18381 - protein, 7 aa, synthetic construct
RGDQAKA

SEQ ID NO: 18382 - protein, 7 aa, synthetic construct
RGDQDVL

SEQ ID NO: 18383 - protein, 7 aa, synthetic construct
RGDQEEK

SEQ ID NO: 18384 - protein, 7 aa, synthetic construct
RGDQEIR

SEQ ID NO: 18385 - protein, 7 aa, synthetic construct
RGDDAGV

SEQ ID NO: 18386 - protein, 7 aa, synthetic construct
RGDQGLE

SEQ ID NO: 18387 - protein, 7 aa, synthetic construct
RGDQGRQ

SEQ ID NO: 18388 - protein, 7 aa, synthetic construct
RGDQGRT

SEQ ID NO: 18389 - protein, 7 aa, synthetic construct
RGDDAKT

SEQ ID NO: 18390 - protein, 7 aa, synthetic construct
RGDQKTH

SEQ ID NO: 18391 - protein, 7 aa, synthetic construct
RGDDATI

SEQ ID NO: 18392 - protein, 7 aa, synthetic construct
RGDQNEH

SEQ ID NO: 18393 - protein, 7 aa, synthetic construct
RGDQNKH

SEQ ID NO: 18394 - protein, 7 aa, synthetic construct
RGDQNNQ

SEQ ID NO: 18395 - protein, 7 aa, synthetic construct
RGDQNQA

SEQ ID NO: 18396 - protein, 7 aa, synthetic construct
RGDQQFT

SEQ ID NO: 18397 - protein, 7 aa, synthetic construct
RGDDDAT

SEQ ID NO: 18398 - protein, 7 aa, synthetic construct
RGDQRSH

SEQ ID NO: 18399 - protein, 7 aa, synthetic construct
RGDQTSV

SEQ ID NO: 18400 - protein, 7 aa, synthetic construct
RGDQVER

SEQ ID NO: 18401 - protein, 7 aa, synthetic construct
RGDQVHR

SEQ ID NO: 18402 - protein, 7 aa, synthetic construct
RGDQVIR

SEQ ID NO: 18403 - protein, 7 aa, synthetic construct
RGDRDLG

SEQ ID NO: 18404 - protein, 7 aa, synthetic construct
RGDREFA

SEQ ID NO: 18405 - protein, 7 aa, synthetic construct
RGDREFG

SEQ ID NO: 18406 - protein, 7 aa, synthetic construct
RGDRIDN

SEQ ID NO: 18407 - protein, 7 aa, synthetic construct
RGDDEDR

SEQ ID NO: 18408 - protein, 7 aa, synthetic construct
RGDRISE

SEQ ID NO: 18409 - protein, 7 aa, synthetic construct
RGDRKQV

SEQ ID NO: 18410 - protein, 7 aa, synthetic construct
RGDRKSD

SEQ ID NO: 18411 - protein, 7 aa, synthetic construct
RGDRLTA

SEQ ID NO: 18412 - protein, 7 aa, synthetic construct
RGDRQLK

SEQ ID NO: 18413 - protein, 7 aa, synthetic construct
RGDRSDL

SEQ ID NO: 18414 - protein, 7 aa, synthetic construct
RGDRSEG

SEQ ID NO: 18415 - protein, 7 aa, synthetic construct
RGDRVDF

SEQ ID NO: 18416 - protein, 7 aa, synthetic construct
RGDDETV

SEQ ID NO: 18417 - protein, 7 aa, synthetic construct
RGDRVIF

SEQ ID NO: 18418 - protein, 7 aa, synthetic construct
RGDRVQK

SEQ ID NO: 18419 - protein, 7 aa, synthetic construct
RGDSAGR

SEQ ID NO: 18420 - protein, 7 aa, synthetic construct
RGDSDEE

SEQ ID NO: 18421 - protein, 7 aa, synthetic construct
RGDSKGD

SEQ ID NO: 18422 - protein, 7 aa, synthetic construct
RGDDFRV

SEQ ID NO: 18423 - protein, 7 aa, synthetic construct
RGDSLKS

SEQ ID NO: 18424 - protein, 7 aa, synthetic construct
RGDSLNK

SEQ ID NO: 18425 - protein, 7 aa, synthetic construct
RGDSLSQ

SEQ ID NO: 18426 - protein, 7 aa, synthetic construct
RGDSNAE

SEQ ID NO: 18427 - protein, 7 aa, synthetic construct
RGDDFVI

SEQ ID NO: 18428 - protein, 7 aa, synthetic construct
RGDSNQH

SEQ ID NO: 18429 - protein, 7 aa, synthetic construct
RGDSQVA

SEQ ID NO: 18430 - protein, 7 aa, synthetic construct
RGDSRGD

SEQ ID NO: 18431 - protein, 7 aa, synthetic construct
RGDSRLK

SEQ ID NO: 18432 - protein, 7 aa, synthetic construct
RGDSTKR

SEQ ID NO: 18433 - protein, 7 aa, synthetic construct
RGDSTSV

SEQ ID NO: 18434 - protein, 7 aa, synthetic construct
RGDSVQG

SEQ ID NO: 18435 - protein, 7 aa, synthetic construct
RGDSVQQ

SEQ ID NO: 18436 - protein, 7 aa, synthetic construct
RGDSVTE

SEQ ID NO: 18437 - protein, 7 aa, synthetic construct
RGDTAGG

SEQ ID NO: 18438 - protein, 7 aa, synthetic construct
RGDDGQQ

SEQ ID NO: 18439 - protein, 7 aa, synthetic construct
RGDTEII

SEQ ID NO: 18440 - protein, 7 aa, synthetic construct
RGDTENA

SEQ ID NO: 18441 - protein, 7 aa, synthetic construct
RGDTGRA

SEQ ID NO: 18442 - protein, 7 aa, synthetic construct
RGDDGVR

SEQ ID NO: 18443 - protein, 7 aa, synthetic construct
RGDTGTK

SEQ ID NO: 18444 - protein, 7 aa, synthetic construct
RGDTHQT

SEQ ID NO: 18445 - protein, 7 aa, synthetic construct
RGDTIHV

SEQ ID NO: 18446 - protein, 7 aa, synthetic construct
RGDTIKV

SEQ ID NO: 18447 - protein, 7 aa, synthetic construct
RGDTITV

SEQ ID NO: 18448 - protein, 7 aa, synthetic construct
RGDTIVT

SEQ ID NO: 18449 - protein, 7 aa, synthetic construct
RGDTLIQ

SEQ ID NO: 18450 - protein, 7 aa, synthetic construct
RGDDHHS

SEQ ID NO: 18451 - protein, 7 aa, synthetic construct
RGDTNIF

SEQ ID NO: 18452 - protein, 7 aa, synthetic construct
RGDTQER

SEQ ID NO: 18453 - protein, 7 aa, synthetic construct
RGDTQFI

SEQ ID NO: 18454 - protein, 7 aa, synthetic construct
RGDTQLF

SEQ ID NO: 18455 - protein, 7 aa, synthetic construct
RGDTQRI

SEQ ID NO: 18456 - protein, 7 aa, synthetic construct
RGDDHLV

SEQ ID NO: 18457 - protein, 7 aa, synthetic construct
RGDTRSA

SEQ ID NO: 18458 - protein, 7 aa, synthetic construct
RGDDHQQ

SEQ ID NO: 18459 - protein, 7 aa, synthetic construct
RGDTSSV

SEQ ID NO: 18460 - protein, 7 aa, synthetic construct
RGDTTSR

SEQ ID NO: 18461 - protein, 7 aa, synthetic construct
RGDVAAV

SEQ ID NO: 18462 - protein, 7 aa, synthetic construct
RGDVAKS

SEQ ID NO: 18463 - protein, 7 aa, synthetic construct
RGDVASS

SEQ ID NO: 18464 - protein, 7 aa, synthetic construct
RGDVELE

SEQ ID NO: 18465 - protein, 7 aa, synthetic construct
RGDVFRE

SEQ ID NO: 18466 - protein, 7 aa, synthetic construct
RGDVGNT

SEQ ID NO: 18467 - protein, 7 aa, synthetic construct
RGDVHDI

SEQ ID NO: 18468 - protein, 7 aa, synthetic construct
RGDVIGN

SEQ ID NO: 18469 - protein, 7 aa, synthetic construct
RGDVIHE

SEQ ID NO: 18470 - protein, 7 aa, synthetic construct
RGDDINL

SEQ ID NO: 18471 - protein, 7 aa, synthetic construct
RGDVIRK

SEQ ID NO: 18472 - protein, 7 aa, synthetic construct
RGDVISF

SEQ ID NO: 18473 - protein, 7 aa, synthetic construct
RGDVKDH

SEQ ID NO: 18474 - protein, 7 aa, synthetic construct
RGDVLAK

SEQ ID NO: 18475 - protein, 7 aa, synthetic construct
RGDVLDT

SEQ ID NO: 18476 - protein, 7 aa, synthetic construct
RGDVLFA

SEQ ID NO: 18477 - protein, 7 aa, synthetic construct
RGDVLGQ

SEQ ID NO: 18478 - protein, 7 aa, synthetic construct
RGDVLQL

SEQ ID NO: 18479 - protein, 7 aa, synthetic construct
RGDVLSN

SEQ ID NO: 18480 - protein, 7 aa, synthetic construct
RGDVLSV

SEQ ID NO: 18481 - protein, 7 aa, synthetic construct
RGDDIVF

SEQ ID NO: 18482 - protein, 7 aa, synthetic construct
RGDVQIQ

SEQ ID NO: 18483 - protein, 7 aa, synthetic construct
RGDVQQL

SEQ ID NO: 18484 - protein, 7 aa, synthetic construct
RGDVSER

SEQ ID NO: 18485 - protein, 7 aa, synthetic construct
RGDVTNI

SEQ ID NO: 18486 - protein, 7 aa, synthetic construct
RGDVTSI

SEQ ID NO: 18487 - protein, 7 aa, synthetic construct
RGDVTTN

SEQ ID NO: 18488 - protein, 7 aa, synthetic construct
RGDVVHS

SEQ ID NO: 18489 - protein, 7 aa, synthetic construct
RGDVVII

SEQ ID NO: 18490 - protein, 7 aa, synthetic construct
RGDVVSK

SEQ ID NO: 18491 - protein, 7 aa, synthetic construct
RGDDKRF

SEQ ID NO: 18492 - protein, 7 aa, synthetic construct
RGDDLEH

SEQ ID NO: 18493 - protein, 7 aa, synthetic construct
RGDDNHQ

SEQ ID NO: 18494 - protein, 7 aa, synthetic construct
RGDDQTR

SEQ ID NO: 18495 - protein, 7 aa, synthetic construct
RGDDSHV

SEQ ID NO: 18496 - protein, 7 aa, synthetic construct
RGDDSKI

SEQ ID NO: 18497 - protein, 7 aa, synthetic construct
RGDDSQN

SEQ ID NO: 18498 - protein, 7 aa, synthetic construct
RGDDTNS

SEQ ID NO: 18499 - protein, 7 aa, synthetic construct
RGDDTSH

SEQ ID NO: 18500 - protein, 7 aa, synthetic construct
RGDDVKS

SEQ ID NO: 18501 - protein, 7 aa, synthetic construct
RGDDVSK

SEQ ID NO: 18502 - protein, 7 aa, synthetic construct
RGDEAFK

SEQ ID NO: 18503 - protein, 7 aa, synthetic construct
RGDEATR

SEQ ID NO: 18504 - protein, 7 aa, synthetic construct
RGDEEKG

SEQ ID NO: 18505 - protein, 7 aa, synthetic construct
RGDEESR

SEQ ID NO: 18506 - protein, 7 aa, synthetic construct
RGDEGFG

SEQ ID NO: 18507 - protein, 7 aa, synthetic construct
RGDEHNQ

SEQ ID NO: 18508 - protein, 7 aa, synthetic construct
RGDENKN

SEQ ID NO: 18509 - protein, 7 aa, synthetic construct
RGDAGDT

SEQ ID NO: 18510 - protein, 7 aa, synthetic construct
RGDERVQ

SEQ ID NO: 18511 - protein, 7 aa, synthetic construct
RGDESTR

SEQ ID NO: 18512 - protein, 7 aa, synthetic construct
RGDETED

SEQ ID NO: 18513 - protein, 7 aa, synthetic construct
RGDAGHV

SEQ ID NO: 18514 - protein, 7 aa, synthetic construct
RGDEVHG

SEQ ID NO: 18515 - protein, 7 aa, synthetic construct
RGDAGNE

SEQ ID NO: 18516 - protein, 7 aa, synthetic construct
RGDFDGH

SEQ ID NO: 18517 - protein, 7 aa, synthetic construct
RGDFDSI

SEQ ID NO: 18518 - protein, 7 aa, synthetic construct
RGDFEHH

SEQ ID NO: 18519 - protein, 7 aa, synthetic construct
RGDFFVF

SEQ ID NO: 18520 - protein, 7 aa, synthetic construct
RGDFGLA

SEQ ID NO: 18521 - protein, 7 aa, synthetic construct
RGDFHAT

SEQ ID NO: 18522 - protein, 7 aa, synthetic construct
RGDFHIV

SEQ ID NO: 18523 - protein, 7 aa, synthetic construct
RGDFIFG

SEQ ID NO: 18524 - protein, 7 aa, synthetic construct
RGDFIHE

SEQ ID NO: 18525 - protein, 7 aa, synthetic construct
RGDFILH

SEQ ID NO: 18526 - protein, 7 aa, synthetic construct
RGDFKEI

SEQ ID NO: 18527 - protein, 7 aa, synthetic construct
RGDFKSG

SEQ ID NO: 18528 - protein, 7 aa, synthetic construct
RGDFLFF

SEQ ID NO: 18529 - protein, 7 aa, synthetic construct
RGDAHIQ

SEQ ID NO: 18530 - protein, 7 aa, synthetic construct
RGDFQFN

SEQ ID NO: 18531 - protein, 7 aa, synthetic construct
RGDFRIF

SEQ ID NO: 18532 - protein, 7 aa, synthetic construct
RGDFRSD

SEQ ID NO: 18533 - protein, 7 aa, synthetic construct
RGDFSDQ

SEQ ID NO: 18534 - protein, 7 aa, synthetic construct
RGDFSII

SEQ ID NO: 18535 - protein, 7 aa, synthetic construct
RGDFTHR

SEQ ID NO: 18536 - protein, 7 aa, synthetic construct
RGDFTTR

SEQ ID NO: 18537 - protein, 7 aa, synthetic construct
RGDFVEQ

SEQ ID NO: 18538 - protein, 7 aa, synthetic construct
RGDGDAF

SEQ ID NO: 18539 - protein, 7 aa, synthetic construct
RGDGDHT

SEQ ID NO: 18540 - protein, 7 aa, synthetic construct
RGDGDKE

SEQ ID NO: 18541 - protein, 7 aa, synthetic construct
RGDGDKI

SEQ ID NO: 18542 - protein, 7 aa, synthetic construct
RGDGEKF

SEQ ID NO: 18543 - protein, 7 aa, synthetic construct
RGDGGFN

SEQ ID NO: 18544 - protein, 7 aa, synthetic construct
RGDGGKH

SEQ ID NO: 18545 - protein, 7 aa, synthetic construct
RGDGGSQ

SEQ ID NO: 18546 - protein, 7 aa, synthetic construct
RGDGGTL

SEQ ID NO: 18547 - protein, 7 aa, synthetic construct
RGDGGVS

SEQ ID NO: 18548 - protein, 7 aa, synthetic construct
RGDGHQS

SEQ ID NO: 18549 - protein, 7 aa, synthetic construct
RGDGHRQ

SEQ ID NO: 18550 - protein, 7 aa, synthetic construct
RGDGHTA

SEQ ID NO: 18551 - protein, 7 aa, synthetic construct
RGDGKDG

SEQ ID NO: 18552 - protein, 7 aa, synthetic construct
RGDGKRA

SEQ ID NO: 18553 - protein, 7 aa, synthetic construct
RGDGKRE

SEQ ID NO: 18554 - protein, 7 aa, synthetic construct
RGDGLHF

SEQ ID NO: 18555 - protein, 7 aa, synthetic construct
RGDGNHQ

SEQ ID NO: 18556 - protein, 7 aa, synthetic construct
RGDGNLA

SEQ ID NO: 18557 - protein, 7 aa, synthetic construct
RGDGNSV

SEQ ID NO: 18558 - protein, 7 aa, synthetic construct
RGDGRER

SEQ ID NO: 18559 - protein, 7 aa, synthetic construct
RGDGRLL

SEQ ID NO: 18560 - protein, 7 aa, synthetic construct
RGDGSDK

SEQ ID NO: 18561 - protein, 7 aa, synthetic construct
RGDGSGE

SEQ ID NO: 18562 - protein, 7 aa, synthetic construct
RGDGSGV

SEQ ID NO: 18563 - protein, 7 aa, synthetic construct
RGDAKFQ

SEQ ID NO: 18564 - protein, 7 aa, synthetic construct
RGDGTQT

SEQ ID NO: 18565 - protein, 7 aa, synthetic construct
RGDGTRR

SEQ ID NO: 18566 - protein, 7 aa, synthetic construct
RGDGVQK

SEQ ID NO: 18567 - protein, 7 aa, synthetic construct
RGDAKKD

SEQ ID NO: 18568 - protein, 7 aa, synthetic construct
RGDAKQI

SEQ ID NO: 18569 - protein, 7 aa, synthetic construct
RGDHEHV

SEQ ID NO: 18570 - protein, 7 aa, synthetic construct
RGDHGDR

SEQ ID NO: 18571 - protein, 7 aa, synthetic construct
RGDHHRE

SEQ ID NO: 18572 - protein, 7 aa, synthetic construct
RGDHLAI

SEQ ID NO: 18573 - protein, 7 aa, synthetic construct
RGDHLRD

SEQ ID NO: 18574 - protein, 7 aa, synthetic construct
RGDHNRF

SEQ ID NO: 18575 - protein, 7 aa, synthetic construct
RGDHRDS

SEQ ID NO: 18576 - protein, 7 aa, synthetic construct
RGDHREN

SEQ ID NO: 18577 - protein, 7 aa, synthetic construct
RGDHSDR

SEQ ID NO: 18578 - protein, 7 aa, synthetic construct
RGDHSFG

SEQ ID NO: 18579 - protein, 7 aa, synthetic construct
RGDHSFH

SEQ ID NO: 18580 - protein, 7 aa, synthetic construct
RGDHTKA

SEQ ID NO: 18581 - protein, 7 aa, synthetic construct
RGDHTSD

SEQ ID NO: 18582 - protein, 7 aa, synthetic construct
RGDHTVV

SEQ ID NO: 18583 - protein, 7 aa, synthetic construct
RGDHVIF

SEQ ID NO: 18584 - protein, 7 aa, synthetic construct
RGDIAGS

SEQ ID NO: 18585 - protein, 7 aa, synthetic construct
RGDIEDT

SEQ ID NO: 18586 - protein, 7 aa, synthetic construct
RGDIELV

SEQ ID NO: 18587 - protein, 7 aa, synthetic construct
RGDIENI

SEQ ID NO: 18588 - protein, 7 aa, synthetic construct
RGDIERK

SEQ ID NO: 18589 - protein, 7 aa, synthetic construct
RGDIFHK

SEQ ID NO: 18590 - protein, 7 aa, synthetic construct
RGDIFKH

SEQ ID NO: 18591 - protein, 7 aa, synthetic construct
RGDIGRG

SEQ ID NO: 18592 - protein, 7 aa, synthetic construct
RGDANKQ

SEQ ID NO: 18593 - protein, 7 aa, synthetic construct
RGDIIVN

SEQ ID NO: 18594 - protein, 7 aa, synthetic construct
RGDIIVQ

SEQ ID NO: 18595 - protein, 7 aa, synthetic construct
RGDANRA

SEQ ID NO: 18596 - protein, 7 aa, synthetic construct
RGDINHK

SEQ ID NO: 18597 - protein, 7 aa, synthetic construct
RGDIQEK

SEQ ID NO: 18598 - protein, 7 aa, synthetic construct
RGDIQER

SEQ ID NO: 18599 - protein, 7 aa, synthetic construct
RGDIRHD

SEQ ID NO: 18600 - protein, 7 aa, synthetic construct
RGDISEQ

SEQ ID NO: 18601 - protein, 7 aa, synthetic construct
RGDISET

SEQ ID NO: 18602 - protein, 7 aa, synthetic construct
RGDAQFQ

SEQ ID NO: 18603 - protein, 7 aa, synthetic construct
RGDITIA

SEQ ID NO: 18604 - protein, 7 aa, synthetic construct
RGDIVNF

SEQ ID NO: 18605 - protein, 7 aa, synthetic construct
RGDKDFT

SEQ ID NO: 18606 - protein, 7 aa, synthetic construct
RGDKDLR

SEQ ID NO: 18607 - protein, 7 aa, synthetic construct
RGDKEKH

SEQ ID NO: 18608 - protein, 7 aa, synthetic construct
RGDAQTH

SEQ ID NO: 18609 - protein, 7 aa, synthetic construct
RGDKFVQ

SEQ ID NO: 18610 - protein, 7 aa, synthetic construct
RGDKGFA

SEQ ID NO: 18611 - protein, 7 aa, synthetic construct
RGDKGQG

SEQ ID NO: 18612 - protein, 7 aa, synthetic construct
RGDKIHL

SEQ ID NO: 18613 - protein, 7 aa, synthetic construct
RGDKIVH

SEQ ID NO: 18614 - protein, 7 aa, synthetic construct
RGDKKDR

SEQ ID NO: 18615 - protein, 7 aa, synthetic construct
RGDARFL

SEQ ID NO: 18616 - protein, 7 aa, synthetic construct
RGDKNFH

SEQ ID NO: 18617 - protein, 7 aa, synthetic construct
RGDKNVH

SEQ ID NO: 18618 - protein, 7 aa, synthetic construct
RGDKQAH

SEQ ID NO: 18619 - protein, 7 aa, synthetic construct
RGDKTTS

SEQ ID NO: 18620 - protein, 7 aa, synthetic construct
RGDLAAG

SEQ ID NO: 18621 - protein, 7 aa, synthetic construct
RGDLARK

SEQ ID NO: 18622 - protein, 7 aa, synthetic construct
RGDLASR

SEQ ID NO: 18623 - protein, 7 aa, synthetic construct
RGDLDFG

SEQ ID NO: 18624 - protein, 7 aa, synthetic construct
RGDLDQV

SEQ ID NO: 18625 - protein, 7 aa, synthetic construct
RGDLEET

SEQ ID NO: 18626 - protein, 7 aa, synthetic construct
RGDASFQ

SEQ ID NO: 18627 - protein, 7 aa, synthetic construct
RGDLERG

SEQ ID NO: 18628 - protein, 7 aa, synthetic construct
RGDLEVA

SEQ ID NO: 18629 - protein, 7 aa, synthetic construct
RGDLHLR

SEQ ID NO: 18630 - protein, 7 aa, synthetic construct
RGDLHTK

SEQ ID NO: 18631 - protein, 7 aa, synthetic construct
RGDLIIS

SEQ ID NO: 18632 - protein, 7 aa, synthetic construct
RGDASQV

SEQ ID NO: 18633 - protein, 7 aa, synthetic construct
RGDASRA

SEQ ID NO: 18634 - protein, 7 aa, synthetic construct
RGDLNFA

SEQ ID NO: 18635 - protein, 7 aa, synthetic construct
RGDLNGA

SEQ ID NO: 18636 - protein, 7 aa, synthetic construct
RGDLNKH

SEQ ID NO: 18637 - protein, 7 aa, synthetic construct
RGDASVF

SEQ ID NO: 18638 - protein, 7 aa, synthetic construct
RGDLNQV

SEQ ID NO: 18639 - protein, 7 aa, synthetic construct
RGDLQKA

SEQ ID NO: 18640 - protein, 7 aa, synthetic construct
RGDLRHG

SEQ ID NO: 18641 - protein, 7 aa, synthetic construct
RGDLSFE

SEQ ID NO: 18642 - protein, 7 aa, synthetic construct
RGDLSQV

SEQ ID NO: 18643 - protein, 7 aa, synthetic construct
RGDLTNA

SEQ ID NO: 18644 - protein, 7 aa, synthetic construct
RGDLVAK

SEQ ID NO: 18645 - protein, 7 aa, synthetic construct
RGDLVGT

SEQ ID NO: 18646 - protein, 7 aa, synthetic construct
RGDNANI

SEQ ID NO: 18647 - protein, 7 aa, synthetic construct
RGDNDVI

SEQ ID NO: 18648 - protein, 7 aa, synthetic construct
RGDNFAQ

SEQ ID NO: 18649 - protein, 7 aa, synthetic construct
RGDNFDT

SEQ ID NO: 18650 - protein, 7 aa, synthetic construct
RGDNFFF

SEQ ID NO: 18651 - protein, 7 aa, synthetic construct
RGDNFQF

SEQ ID NO: 18652 - protein, 7 aa, synthetic construct
RGDNGAQ

SEQ ID NO: 18653 - protein, 7 aa, synthetic construct
RGDNGHV

SEQ ID NO: 18654 - protein, 7 aa, synthetic construct
RGDNIHF

SEQ ID NO: 18655 - protein, 7 aa, synthetic construct
RGDNIKT

SEQ ID NO: 18656 - protein, 7 aa, synthetic construct
RGDNISK

SEQ ID NO: 18657 - protein, 7 aa, synthetic construct
RGDNKDF

SEQ ID NO: 18658 - protein, 7 aa, synthetic construct
RGDNKQA

SEQ ID NO: 18659 - protein, 7 aa, synthetic construct
RGDNLLH

SEQ ID NO: 18660 - protein, 7 aa, synthetic construct
RGDNRDH

SEQ ID NO: 18661 - protein, 7 aa, synthetic construct
RGDNRGT

SEQ ID NO: 18662 - protein, 7 aa, synthetic construct
RGDNRRK

SEQ ID NO: 18663 - protein, 7 aa, synthetic construct
RGDNRTE

SEQ ID NO: 18664 - protein, 7 aa, synthetic construct
RGDADKA

SEQ ID NO: 18665 - protein, 7 aa, synthetic construct
RGDNSEK

SEQ ID NO: 18666 - protein, 7 aa, synthetic construct
RGDNSIT

SEQ ID NO: 18667 - protein, 7 aa, synthetic construct
RGDNSSA

SEQ ID NO: 18668 - protein, 7 aa, synthetic construct
RGDNSSK

SEQ ID NO: 18669 - protein, 7 aa, synthetic construct
RGDNSVT

SEQ ID NO: 18670 - protein, 7 aa, synthetic construct
RGDNTSS

SEQ ID NO: 18671 - protein, 7 aa, synthetic construct
RGDNVIR

SEQ ID NO: 18672 - protein, 7 aa, synthetic construct
RGDNVRQ

SEQ ID NO: 18673 - protein, 7 aa, synthetic construct
RGDNVTG

SEQ ID NO: 18674 - protein, 7 aa, synthetic construct
RGDQANI

SEQ ID NO: 18675 - protein, 7 aa, synthetic construct
RGDQAVN

SEQ ID NO: 18676 - protein, 7 aa, synthetic construct
RGDQEKF

SEQ ID NO: 18677 - protein, 7 aa, synthetic construct
RGDQERN

SEQ ID NO: 18678 - protein, 7 aa, synthetic construct
RGDQGDQ

SEQ ID NO: 18679 - protein, 7 aa, synthetic construct
RGDQHDI

SEQ ID NO: 18680 - protein, 7 aa, synthetic construct
RGDQLFK

SEQ ID NO: 18681 - protein, 7 aa, synthetic construct
RGDQNDK

SEQ ID NO: 18682 - protein, 7 aa, synthetic construct
RGDQQEL

SEQ ID NO: 18683 - protein, 7 aa, synthetic construct
RGDDDFF

SEQ ID NO: 18684 - protein, 7 aa, synthetic construct
RGDQTSF

SEQ ID NO: 18685 - protein, 7 aa, synthetic construct
RGDQVFI

SEQ ID NO: 18686 - protein, 7 aa, synthetic construct
RGDQVQE

SEQ ID NO: 18687 - protein, 7 aa, synthetic construct
RGDQVVR

SEQ ID NO: 18688 - protein, 7 aa, synthetic construct
RGDRAGD

SEQ ID NO: 18689 - protein, 7 aa, synthetic construct
RGDRAHN

SEQ ID NO: 18690 - protein, 7 aa, synthetic construct
RGDRDIQ

SEQ ID NO: 18691 - protein, 7 aa, synthetic construct
RGDREKR

SEQ ID NO: 18692 - protein, 7 aa, synthetic construct
RGDRFFA

SEQ ID NO: 18693 - protein, 7 aa, synthetic construct
RGDRFNE

SEQ ID NO: 18694 - protein, 7 aa, synthetic construct
RGDRFQD

SEQ ID NO: 18695 - protein, 7 aa, synthetic construct
RGDRFTH

SEQ ID NO: 18696 - protein, 7 aa, synthetic construct
RGDRGAE

SEQ ID NO: 18697 - protein, 7 aa, synthetic construct
RGDRHGE

SEQ ID NO: 18698 - protein, 7 aa, synthetic construct
RGDRHKV

SEQ ID NO: 18699 - protein, 7 aa, synthetic construct
RGDRIFH

SEQ ID NO: 18700 - protein, 7 aa, synthetic construct
RGDRIQH

SEQ ID NO: 18701 - protein, 7 aa, synthetic construct
RGDRIVN

SEQ ID NO: 18702 - protein, 7 aa, synthetic construct
RGDRKSA

SEQ ID NO: 18703 - protein, 7 aa, synthetic construct
RGDDEGR

SEQ ID NO: 18704 - protein, 7 aa, synthetic construct
RGDRNHS

SEQ ID NO: 18705 - protein, 7 aa, synthetic construct
RGDRNVE

SEQ ID NO: 18706 - protein, 7 aa, synthetic construct
RGDDENH

SEQ ID NO: 18707 - protein, 7 aa, synthetic construct
RGDRTGR

SEQ ID NO: 18708 - protein, 7 aa, synthetic construct
RGDDEVR

SEQ ID NO: 18709 - protein, 7 aa, synthetic construct
RGDSAVH

SEQ ID NO: 18710 - protein, 7 aa, synthetic construct
RGDSETQ

SEQ ID NO: 18711 - protein, 7 aa, synthetic construct
RGDSFFL

SEQ ID NO: 18712 - protein, 7 aa, synthetic construct
RGDSFRN

SEQ ID NO: 18713 - protein, 7 aa, synthetic construct
RGDSGDG

SEQ ID NO: 18714 - protein, 7 aa, synthetic construct
RGDSGHH

SEQ ID NO: 18715 - protein, 7 aa, synthetic construct
RGDSHNG

SEQ ID NO: 18716 - protein, 7 aa, synthetic construct
RGDSIDV

SEQ ID NO: 18717 - protein, 7 aa, synthetic construct
RGDSIEL

SEQ ID NO: 18718 - protein, 7 aa, synthetic construct
RGDSKTH

SEQ ID NO: 18719 - protein, 7 aa, synthetic construct
RGDSLHG

SEQ ID NO: 18720 - protein, 7 aa, synthetic construct
RGDDFTE

SEQ ID NO: 18721 - protein, 7 aa, synthetic construct
RGDSNTI

SEQ ID NO: 18722 - protein, 7 aa, synthetic construct
RGDADTK

SEQ ID NO: 18723 - protein, 7 aa, synthetic construct
RGDSQQD

SEQ ID NO: 18724 - protein, 7 aa, synthetic construct
RGDSRKS

SEQ ID NO: 18725 - protein, 7 aa, synthetic construct
RGDSRSK

SEQ ID NO: 18726 - protein, 7 aa, synthetic construct
RGDSSDT

SEQ ID NO: 18727 - protein, 7 aa, synthetic construct
RGDSVQN

SEQ ID NO: 18728 - protein, 7 aa, synthetic construct
RGDDGKR

SEQ ID NO: 18729 - protein, 7 aa, synthetic construct
RGDADVG

SEQ ID NO: 18730 - protein, 7 aa, synthetic construct
RGDTDNK

SEQ ID NO: 18731 - protein, 7 aa, synthetic construct
RGDTEFD

SEQ ID NO: 18732 - protein, 7 aa, synthetic construct
RGDTERR

SEQ ID NO: 18733 - protein, 7 aa, synthetic construct
RGDTFRN

SEQ ID NO: 18734 - protein, 7 aa, synthetic construct
RGDTHHH

SEQ ID NO: 18735 - protein, 7 aa, synthetic construct
RGDTHKT

SEQ ID NO: 18736 - protein, 7 aa, synthetic construct
RGDTHLF

SEQ ID NO: 18737 - protein, 7 aa, synthetic construct
RGDTHLI

SEQ ID NO: 18738 - protein, 7 aa, synthetic construct
RGDTISI

SEQ ID NO: 18739 - protein, 7 aa, synthetic construct
RGDTKHN

SEQ ID NO: 18740 - protein, 7 aa, synthetic construct
RGDTKLS

SEQ ID NO: 18741 - protein, 7 aa, synthetic construct
RGDTKRN

SEQ ID NO: 18742 - protein, 7 aa, synthetic construct
RGDTLNT

SEQ ID NO: 18743 - protein, 7 aa, synthetic construct
RGDTLQN

SEQ ID NO: 18744 - protein, 7 aa, synthetic construct
RGDTLVL

SEQ ID NO: 18745 - protein, 7 aa, synthetic construct
RGDTQNI

SEQ ID NO: 18746 - protein, 7 aa, synthetic construct
RGDTRAT

SEQ ID NO: 18747 - protein, 7 aa, synthetic construct
RGDTSNS

SEQ ID NO: 18748 - protein, 7 aa, synthetic construct
RGDTSTQ

SEQ ID NO: 18749 - protein, 7 aa, synthetic construct
RGDTVHR

SEQ ID NO: 18750 - protein, 7 aa, synthetic construct
RGDVDSN

SEQ ID NO: 18751 - protein, 7 aa, synthetic construct
RGDVEHV

SEQ ID NO: 18752 - protein, 7 aa, synthetic construct
RGDVFAE

SEQ ID NO: 18753 - protein, 7 aa, synthetic construct
RGDVHDR

SEQ ID NO: 18754 - protein, 7 aa, synthetic construct
RGDVHFA

SEQ ID NO: 18755 - protein, 7 aa, synthetic construct
RGDVIRR

SEQ ID NO: 18756 - protein, 7 aa, synthetic construct
RGDVISN

SEQ ID NO: 18757 - protein, 7 aa, synthetic construct
RGDVKKD

SEQ ID NO: 18758 - protein, 7 aa, synthetic construct
RGDVNEL

SEQ ID NO: 18759 - protein, 7 aa, synthetic construct
RGDVNFE

SEQ ID NO: 18760 - protein, 7 aa, synthetic construct
RGDVQGN

SEQ ID NO: 18761 - protein, 7 aa, synthetic construct
RGDVREH

SEQ ID NO: 18762 - protein, 7 aa, synthetic construct
RGDVRHG

SEQ ID NO: 18763 - protein, 7 aa, synthetic construct
RGDVSVH

SEQ ID NO: 18764 - protein, 7 aa, synthetic construct
RGDVTVH

SEQ ID NO: 18765 - protein, 7 aa, synthetic construct
RGDVVFT

SEQ ID NO: 18766 - protein, 7 aa, synthetic construct
RGDVVSF

SEQ ID NO: 18767 - protein, 7 aa, synthetic construct
RGDVVTQ

SEQ ID NO: 18768 - protein, 7 aa, synthetic construct
RGDDKTN

SEQ ID NO: 18769 - protein, 7 aa, synthetic construct
RGDDLRK

SEQ ID NO: 18770 - protein, 7 aa, synthetic construct
RGDAERL

SEQ ID NO: 18771 - protein, 7 aa, synthetic construct
RGDDTNH

SEQ ID NO: 18772 - protein, 7 aa, synthetic construct
RGDDTQD

SEQ ID NO: 18773 - protein, 7 aa, synthetic construct
RGDDVKK

SEQ ID NO: 18774 - protein, 7 aa, synthetic construct
RGDDVRH

SEQ ID NO: 18775 - protein, 7 aa, synthetic construct
RGDEAAH

SEQ ID NO: 18776 - protein, 7 aa, synthetic construct
RGDEAIH

SEQ ID NO: 18777 - protein, 7 aa, synthetic construct
RGDEASI

SEQ ID NO: 18778 - protein, 7 aa, synthetic construct
RGDEDFN

SEQ ID NO: 18779 - protein, 7 aa, synthetic construct
RGDEFQK

SEQ ID NO: 18780 - protein, 7 aa, synthetic construct
RGDEGGN

SEQ ID NO: 18781 - protein, 7 aa, synthetic construct
RGDEGRL

SEQ ID NO: 18782 - protein, 7 aa, synthetic construct
RGDEGTK

SEQ ID NO: 18783 - protein, 7 aa, synthetic construct
RGDEHGT

SEQ ID NO: 18784 - protein, 7 aa, synthetic construct
RGDEISR

SEQ ID NO: 18785 - protein, 7 aa, synthetic construct
RGDEKDL

SEQ ID NO: 18786 - protein, 7 aa, synthetic construct
RGDEKSI

SEQ ID NO: 18787 - protein, 7 aa, synthetic construct
RGDEKVQ

SEQ ID NO: 18788 - protein, 7 aa, synthetic construct
RGDEQSH

SEQ ID NO: 18789 - protein, 7 aa, synthetic construct
RGDERAI

SEQ ID NO: 18790 - protein, 7 aa, synthetic construct
RGDERGI

SEQ ID NO: 18791 - protein, 7 aa, synthetic construct
RGDESSV

SEQ ID NO: 18792 - protein, 7 aa, synthetic construct
RGDFAGV

SEQ ID NO: 18793 - protein, 7 aa, synthetic construct
RGDFDIN

SEQ ID NO: 18794 - protein, 7 aa, synthetic construct
RGDFDVS

SEQ ID NO: 18795 - protein, 7 aa, synthetic construct
RGDFEHR

SEQ ID NO: 18796 - protein, 7 aa, synthetic construct
RGDFEVK

SEQ ID NO: 18797 - protein, 7 aa, synthetic construct
RGDFFGN

SEQ ID NO: 18798 - protein, 7 aa, synthetic construct
RGDFFVA

SEQ ID NO: 18799 - protein, 7 aa, synthetic construct
RGDFGKA

SEQ ID NO: 18800 - protein, 7 aa, synthetic construct
RGDFGKL

SEQ ID NO: 18801 - protein, 7 aa, synthetic construct
RGDFGKS

SEQ ID NO: 18802 - protein, 7 aa, synthetic construct
RGDFHVS

SEQ ID NO: 18803 - protein, 7 aa, synthetic construct
RGDFIHA

SEQ ID NO: 18804 - protein, 7 aa, synthetic construct
RGDFIIL

SEQ ID NO: 18805 - protein, 7 aa, synthetic construct
RGDFILT

SEQ ID NO: 18806 - protein, 7 aa, synthetic construct
RGDFLIL

SEQ ID NO: 18807 - protein, 7 aa, synthetic construct
RGDFLQD

SEQ ID NO: 18808 - protein, 7 aa, synthetic construct
RGDFNAG

SEQ ID NO: 18809 - protein, 7 aa, synthetic construct
RGDFNEN

SEQ ID NO: 18810 - protein, 7 aa, synthetic construct
RGDFQFD

SEQ ID NO: 18811 - protein, 7 aa, synthetic construct
RGDFQHV

SEQ ID NO: 18812 - protein, 7 aa, synthetic construct
RGDFSFE

SEQ ID NO: 18813 - protein, 7 aa, synthetic construct
RGDFSVG

SEQ ID NO: 18814 - protein, 7 aa, synthetic construct
RGDFVLH

SEQ ID NO: 18815 - protein, 7 aa, synthetic construct
RGDGARG

SEQ ID NO: 18816 - protein, 7 aa, synthetic construct
RGDGDQQ

SEQ ID NO: 18817 - protein, 7 aa, synthetic construct
RGDAIFR

SEQ ID NO: 18818 - protein, 7 aa, synthetic construct
RGDGERK

SEQ ID NO: 18819 - protein, 7 aa, synthetic construct
RGDGETK

SEQ ID NO: 18820 - protein, 7 aa, synthetic construct
RGDGFTN

SEQ ID NO: 18821 - protein, 7 aa, synthetic construct
RGDGGNH

SEQ ID NO: 18822 - protein, 7 aa, synthetic construct
RGDGGTA

SEQ ID NO: 18823 - protein, 7 aa, synthetic construct
RGDGHHG

SEQ ID NO: 18824 - protein, 7 aa, synthetic construct
RGDGHKA

SEQ ID NO: 18825 - protein, 7 aa, synthetic construct
RGDGHSR

SEQ ID NO: 18826 - protein, 7 aa, synthetic construct
RGDAINV

SEQ ID NO: 18827 - protein, 7 aa, synthetic construct
RGDGLGI

SEQ ID NO: 18828 - protein, 7 aa, synthetic construct
RGDGLKS

SEQ ID NO: 18829 - protein, 7 aa, synthetic construct
RGDGNDR

SEQ ID NO: 18830 - protein, 7 aa, synthetic construct
RGDGNFE

SEQ ID NO: 18831 - protein, 7 aa, synthetic construct
RGDAKDL

SEQ ID NO: 18832 - protein, 7 aa, synthetic construct
RGDGRDV

SEQ ID NO: 18833 - protein, 7 aa, synthetic construct
RGDGSNK

SEQ ID NO: 18834 - protein, 7 aa, synthetic construct
RGDGTHG

SEQ ID NO: 18835 - protein, 7 aa, synthetic construct
RGDGTRG

SEQ ID NO: 18836 - protein, 7 aa, synthetic construct
RGDHDHS

SEQ ID NO: 18837 - protein, 7 aa, synthetic construct
RGDHEAN

SEQ ID NO: 18838 - protein, 7 aa, synthetic construct
RGDHFAV

SEQ ID NO: 18839 - protein, 7 aa, synthetic construct
RGDHFRE

SEQ ID NO: 18840 - protein, 7 aa, synthetic construct
RGDHHNG

SEQ ID NO: 18841 - protein, 7 aa, synthetic construct
RGDHHQI

SEQ ID NO: 18842 - protein, 7 aa, synthetic construct
RGDHKEI

SEQ ID NO: 18843 - protein, 7 aa, synthetic construct
RGDHKRI

SEQ ID NO: 18844 - protein, 7 aa, synthetic construct
RGDHKTV

SEQ ID NO: 18845 - protein, 7 aa, synthetic construct
RGDHNIR

SEQ ID NO: 18846 - protein, 7 aa, synthetic construct
RGDHQLI

SEQ ID NO: 18847 - protein, 7 aa, synthetic construct
RGDHRDV

SEQ ID NO: 18848 - protein, 7 aa, synthetic construct
RGDHSAT

SEQ ID NO: 18849 - protein, 7 aa, synthetic construct
RGDHVHR

SEQ ID NO: 18850 - protein, 7 aa, synthetic construct
RGDHVQV

SEQ ID NO: 18851 - protein, 7 aa, synthetic construct
RGDHVSK

SEQ ID NO: 18852 - protein, 7 aa, synthetic construct
RGDIAGQ

SEQ ID NO: 18853 - protein, 7 aa, synthetic construct
RGDIEFQ

SEQ ID NO: 18854 - protein, 7 aa, synthetic construct
RGDIEGQ

SEQ ID NO: 18855 - protein, 7 aa, synthetic construct
RGDIGQT

SEQ ID NO: 18856 - protein, 7 aa, synthetic construct
RGDIHRQ

SEQ ID NO: 18857 - protein, 7 aa, synthetic construct
RGDIIKH

SEQ ID NO: 18858 - protein, 7 aa, synthetic construct
RGDIKDH

SEQ ID NO: 18859 - protein, 7 aa, synthetic construct
RGDILLK

SEQ ID NO: 18860 - protein, 7 aa, synthetic construct
RGDIQEQ

SEQ ID NO: 18861 - protein, 7 aa, synthetic construct
RGDIQIV

SEQ ID NO: 18862 - protein, 7 aa, synthetic construct
RGDIRKN

SEQ ID NO: 18863 - protein, 7 aa, synthetic construct
RGDISEI

SEQ ID NO: 18864 - protein, 7 aa, synthetic construct
RGDISEL

SEQ ID NO: 18865 - protein, 7 aa, synthetic construct
RGDISFG

SEQ ID NO: 18866 - protein, 7 aa, synthetic construct
RGDITNV

SEQ ID NO: 18867 - protein, 7 aa, synthetic construct
RGDKDFE

SEQ ID NO: 18868 - protein, 7 aa, synthetic construct
RGDKDIV

SEQ ID NO: 18869 - protein, 7 aa, synthetic construct
RGDKDQR

SEQ ID NO: 18870 - protein, 7 aa, synthetic construct
RGDKEAF

SEQ ID NO: 18871 - protein, 7 aa, synthetic construct
RGDKFAT

SEQ ID NO: 18872 - protein, 7 aa, synthetic construct
RGDKFDT

SEQ ID NO: 18873 - protein, 7 aa, synthetic construct
RGDKFIH

SEQ ID NO: 18874 - protein, 7 aa, synthetic construct
RGDKGDK

SEQ ID NO: 18875 - protein, 7 aa, synthetic construct
RGDKGKE

SEQ ID NO: 18876 - protein, 7 aa, synthetic construct
RGDKGLN

SEQ ID NO: 18877 - protein, 7 aa, synthetic construct
RGDKHAL

SEQ ID NO: 18878 - protein, 7 aa, synthetic construct
RGDKHAS

SEQ ID NO: 18879 - protein, 7 aa, synthetic construct
RGDKHFF

SEQ ID NO: 18880 - protein, 7 aa, synthetic construct
RGDKIQT

SEQ ID NO: 18881 - protein, 7 aa, synthetic construct
RGDKKLG

SEQ ID NO: 18882 - protein, 7 aa, synthetic construct
RGDARHT

SEQ ID NO: 18883 - protein, 7 aa, synthetic construct
RGDKNHE

SEQ ID NO: 18884 - protein, 7 aa, synthetic construct
RGDKRIS

SEQ ID NO: 18885 - protein, 7 aa, synthetic construct
RGDKSFS

SEQ ID NO: 18886 - protein, 7 aa, synthetic construct
RGDKSKG

SEQ ID NO: 18887 - protein, 7 aa, synthetic construct
RGDKTEI

SEQ ID NO: 18888 - protein, 7 aa, synthetic construct
RGDKTQL

SEQ ID NO: 18889 - protein, 7 aa, synthetic construct
RGDKVKS

SEQ ID NO: 18890 - protein, 7 aa, synthetic construct
RGDLAKD

SEQ ID NO: 18891 - protein, 7 aa, synthetic construct
RGDLAKI

SEQ ID NO: 18892 - protein, 7 aa, synthetic construct
RGDLANH

SEQ ID NO: 18893 - protein, 7 aa, synthetic construct
RGDLANS

SEQ ID NO: 18894 - protein, 7 aa, synthetic construct
RGDLDEF

SEQ ID NO: 18895 - protein, 7 aa, synthetic construct
RGDLDRS

SEQ ID NO: 18896 - protein, 7 aa, synthetic construct
RGDLETS

SEQ ID NO: 18897 - protein, 7 aa, synthetic construct
RGDLFTK

SEQ ID NO: 18898 - protein, 7 aa, synthetic construct
RGDLGFD

SEQ ID NO: 18899 - protein, 7 aa, synthetic construct
RGDLGHL

SEQ ID NO: 18900 - protein, 7 aa, synthetic construct
RGDLGRQ

SEQ ID NO: 18901 - protein, 7 aa, synthetic construct
RGDLGTI

SEQ ID NO: 18902 - protein, 7 aa, synthetic construct
RGDLHRV

SEQ ID NO: 18903 - protein, 7 aa, synthetic construct
RGDLILN

SEQ ID NO: 18904 - protein, 7 aa, synthetic construct
RGDLLHH

SEQ ID NO: 18905 - protein, 7 aa, synthetic construct
RGDLLVE

SEQ ID NO: 18906 - protein, 7 aa, synthetic construct
RGDLNLD

SEQ ID NO: 18907 - protein, 7 aa, synthetic construct
RGDLQGL

SEQ ID NO: 18908 - protein, 7 aa, synthetic construct
RGDLQHK

SEQ ID NO: 18909 - protein, 7 aa, synthetic construct
RGDLQHS

SEQ ID NO: 18910 - protein, 7 aa, synthetic construct
RGDLRNI

SEQ ID NO: 18911 - protein, 7 aa, synthetic construct
RGDLTRF

SEQ ID NO: 18912 - protein, 7 aa, synthetic construct
RGDLVAV

SEQ ID NO: 18913 - protein, 7 aa, synthetic construct
RGDNATR

SEQ ID NO: 18914 - protein, 7 aa, synthetic construct
RGDATNE

SEQ ID NO: 18915 - protein, 7 aa, synthetic construct
RGDNDVV

SEQ ID NO: 18916 - protein, 7 aa, synthetic construct
RGDNEGS

SEQ ID NO: 18917 - protein, 7 aa, synthetic construct
RGDNFQK

SEQ ID NO: 18918 - protein, 7 aa, synthetic construct
RGDNFRN

SEQ ID NO: 18919 - protein, 7 aa, synthetic construct
RGDNGKF

SEQ ID NO: 18920 - protein, 7 aa, synthetic construct
RGDNGTQ

SEQ ID NO: 18921 - protein, 7 aa, synthetic construct
RGDNIEK

SEQ ID NO: 18922 - protein, 7 aa, synthetic construct
RGDNIIS

SEQ ID NO: 18923 - protein, 7 aa, synthetic construct
RGDNINS

SEQ ID NO: 18924 - protein, 7 aa, synthetic construct
RGDNKAS

SEQ ID NO: 18925 - protein, 7 aa, synthetic construct
RGDNKGE

SEQ ID NO: 18926 - protein, 7 aa, synthetic construct
RGDNLSR

SEQ ID NO: 18927 - protein, 7 aa, synthetic construct
RGDNNAQ

SEQ ID NO: 18928 - protein, 7 aa, synthetic construct
RGDNNGR

SEQ ID NO: 18929 - protein, 7 aa, synthetic construct
RGDNNKE

SEQ ID NO: 18930 - protein, 7 aa, synthetic construct
RGDNRSH

SEQ ID NO: 18931 - protein, 7 aa, synthetic construct
RGDNSKV

SEQ ID NO: 18932 - protein, 7 aa, synthetic construct
RGDNTKH

SEQ ID NO: 18933 - protein, 7 aa, synthetic construct
RGDNTRN

SEQ ID NO: 18934 - protein, 7 aa, synthetic construct
RGDNTRT

SEQ ID NO: 18935 - protein, 7 aa, synthetic construct
RGDNTVI

SEQ ID NO: 18936 - protein, 7 aa, synthetic construct
RGDNVDL

SEQ ID NO: 18937 - protein, 7 aa, synthetic construct
RGDNVLV

SEQ ID NO: 18938 - protein, 7 aa, synthetic construct
RGDQAGK

SEQ ID NO: 18939 - protein, 7 aa, synthetic construct
RGDADKL

SEQ ID NO: 18940 - protein, 7 aa, synthetic construct
RGDQASA

SEQ ID NO: 18941 - protein, 7 aa, synthetic construct
RGDQDLT

SEQ ID NO: 18942 - protein, 7 aa, synthetic construct
RGDQDSH

SEQ ID NO: 18943 - protein, 7 aa, synthetic construct
RGDQEKS

SEQ ID NO: 18944 - protein, 7 aa, synthetic construct
RGDQEQF

SEQ ID NO: 18945 - protein, 7 aa, synthetic construct
RGDQESR

SEQ ID NO: 18946 - protein, 7 aa, synthetic construct
RGDQFNK

SEQ ID NO: 18947 - protein, 7 aa, synthetic construct
RGDQFST

SEQ ID NO: 18948 - protein, 7 aa, synthetic construct
RGDDAKH

SEQ ID NO: 18949 - protein, 7 aa, synthetic construct
RGDQHET

SEQ ID NO: 18950 - protein, 7 aa, synthetic construct
RGDQHFQ

SEQ ID NO: 18951 - protein, 7 aa, synthetic construct
RGDDALK

SEQ ID NO: 18952 - protein, 7 aa, synthetic construct
RGDQHVE

SEQ ID NO: 18953 - protein, 7 aa, synthetic construct
RGDQIST

SEQ ID NO: 18954 - protein, 7 aa, synthetic construct
RGDQKER

SEQ ID NO: 18955 - protein, 7 aa, synthetic construct
RGDQKIN

SEQ ID NO: 18956 - protein, 7 aa, synthetic construct
RGDQLFL

SEQ ID NO: 18957 - protein, 7 aa, synthetic construct
RGDQQHQ

SEQ ID NO: 18958 - protein, 7 aa, synthetic construct
RGDQRFL

SEQ ID NO: 18959 - protein, 7 aa, synthetic construct
RGDQRQH

SEQ ID NO: 18960 - protein, 7 aa, synthetic construct
RGDQSGD

SEQ ID NO: 18961 - protein, 7 aa, synthetic construct
RGDQSVT

SEQ ID NO: 18962 - protein, 7 aa, synthetic construct
RGDQVGQ

SEQ ID NO: 18963 - protein, 7 aa, synthetic construct
RGDRDAT

SEQ ID NO: 18964 - protein, 7 aa, synthetic construct
RGDRDDT

SEQ ID NO: 18965 - protein, 7 aa, synthetic construct
RGDREAS

SEQ ID NO: 18966 - protein, 7 aa, synthetic construct
RGDREGK

SEQ ID NO: 18967 - protein, 7 aa, synthetic construct
RGDRFAQ

SEQ ID NO: 18968 - protein, 7 aa, synthetic construct
RGDRGKE

SEQ ID NO: 18969 - protein, 7 aa, synthetic construct
RGDRHIL

SEQ ID NO: 18970 - protein, 7 aa, synthetic construct
RGDRLIS

SEQ ID NO: 18971 - protein, 7 aa, synthetic construct
RGDRNDD

SEQ ID NO: 18972 - protein, 7 aa, synthetic construct
RGDRNHA

SEQ ID NO: 18973 - protein, 7 aa, synthetic construct
RGDRNKF

SEQ ID NO: 18974 - protein, 7 aa, synthetic construct
RGDRRNA

SEQ ID NO: 18975 - protein, 7 aa, synthetic construct
RGDRSFD

SEQ ID NO: 18976 - protein, 7 aa, synthetic construct
RGDDESA

SEQ ID NO: 18977 - protein, 7 aa, synthetic construct
RGDRVQQ

SEQ ID NO: 18978 - protein, 7 aa, synthetic construct
RGDRVRN

SEQ ID NO: 18979 - protein, 7 aa, synthetic construct
RGDRVTD

SEQ ID NO: 18980 - protein, 7 aa, synthetic construct
RGDSDRK

SEQ ID NO: 18981 - protein, 7 aa, synthetic construct
RGDSEHF

SEQ ID NO: 18982 - protein, 7 aa, synthetic construct
RGDSELI

SEQ ID NO: 18983 - protein, 7 aa, synthetic construct
RGDSELT

SEQ ID NO: 18984 - protein, 7 aa, synthetic construct
RGDSEQI

SEQ ID NO: 18985 - protein, 7 aa, synthetic construct
RGDSEQV

SEQ ID NO: 18986 - protein, 7 aa, synthetic construct
RGDSFTN

SEQ ID NO: 18987 - protein, 7 aa, synthetic construct
RGDSFTV

SEQ ID NO: 18988 - protein, 7 aa, synthetic construct
RGDSFVN

SEQ ID NO: 18989 - protein, 7 aa, synthetic construct
RGDSGNF

SEQ ID NO: 18990 - protein, 7 aa, synthetic construct
RGDSGVK

SEQ ID NO: 18991 - protein, 7 aa, synthetic construct
RGDSHHR

SEQ ID NO: 18992 - protein, 7 aa, synthetic construct
RGDSHKE

SEQ ID NO: 18993 - protein, 7 aa, synthetic construct
RGDSHST

SEQ ID NO: 18994 - protein, 7 aa, synthetic construct
RGDSIFE

SEQ ID NO: 18995 - protein, 7 aa, synthetic construct
RGDSILV

SEQ ID NO: 18996 - protein, 7 aa, synthetic construct
RGDSKFR

SEQ ID NO: 18997 - protein, 7 aa, synthetic construct
RGDSNET

SEQ ID NO: 18998 - protein, 7 aa, synthetic construct
RGDSNIF

SEQ ID NO: 18999 - protein, 7 aa, synthetic construct
RGDSNLV

SEQ ID NO: 19000 - protein, 7 aa, synthetic construct
RGDDFVQ

SEQ ID NO: 19001 - protein, 7 aa, synthetic construct
RGDSNTG

SEQ ID NO: 19002 - protein, 7 aa, synthetic construct
RGDSQDL

SEQ ID NO: 19003 - protein, 7 aa, synthetic construct
RGDSRTA

SEQ ID NO: 19004 - protein, 7 aa, synthetic construct
RGDADTR

SEQ ID NO: 19005 - protein, 7 aa, synthetic construct
RGDSSGQ

SEQ ID NO: 19006 - protein, 7 aa, synthetic construct
RGDSSIV

SEQ ID NO: 19007 - protein, 7 aa, synthetic construct
RGDSTLV

SEQ ID NO: 19008 - protein, 7 aa, synthetic construct
RGDSTQK

SEQ ID NO: 19009 - protein, 7 aa, synthetic construct
RGDSVGS

SEQ ID NO: 19010 - protein, 7 aa, synthetic construct
RGDTAKL

SEQ ID NO: 19011 - protein, 7 aa, synthetic construct
RGDDGQF

SEQ ID NO: 19012 - protein, 7 aa, synthetic construct
RGDDGQK

SEQ ID NO: 19013 - protein, 7 aa, synthetic construct
RGDTERE

SEQ ID NO: 19014 - protein, 7 aa, synthetic construct
RGDTGGN

SEQ ID NO: 19015 - protein, 7 aa, synthetic construct
RGDTGIG

SEQ ID NO: 19016 - protein, 7 aa, synthetic construct
RGDTGSV

SEQ ID NO: 19017 - protein, 7 aa, synthetic construct
RGDTHLR

SEQ ID NO: 19018 - protein, 7 aa, synthetic construct
RGDTHVK

SEQ ID NO: 19019 - protein, 7 aa, synthetic construct
RGDTIIN

SEQ ID NO: 19020 - protein, 7 aa, synthetic construct
RGDTITK

SEQ ID NO: 19021 - protein, 7 aa, synthetic construct
RGDTLIE

SEQ ID NO: 19022 - protein, 7 aa, synthetic construct
RGDTLKT

SEQ ID NO: 19023 - protein, 7 aa, synthetic construct
RGDTLNS

SEQ ID NO: 19024 - protein, 7 aa, synthetic construct
RGDTLSQ

SEQ ID NO: 19025 - protein, 7 aa, synthetic construct
RGDDHIR

SEQ ID NO: 19026 - protein, 7 aa, synthetic construct
RGDTNLF

SEQ ID NO: 19027 - protein, 7 aa, synthetic construct
RGDTVRR

SEQ ID NO: 19028 - protein, 7 aa, synthetic construct
RGDVAHR

SEQ ID NO: 19029 - protein, 7 aa, synthetic construct
RGDVANI

SEQ ID NO: 19030 - protein, 7 aa, synthetic construct
RGDVDHQ

SEQ ID NO: 19031 - protein, 7 aa, synthetic construct
RGDVDNV

SEQ ID NO: 19032 - protein, 7 aa, synthetic construct
RGDVEFH

SEQ ID NO: 19033 - protein, 7 aa, synthetic construct
RGDVEHG

SEQ ID NO: 19034 - protein, 7 aa, synthetic construct
RGDVGAG

SEQ ID NO: 19035 - protein, 7 aa, synthetic construct
RGDVGTR

SEQ ID NO: 19036 - protein, 7 aa, synthetic construct
RGDVKKH

SEQ ID NO: 19037 - protein, 7 aa, synthetic construct
RGDVLGR

SEQ ID NO: 19038 - protein, 7 aa, synthetic construct
RGDVNIV

SEQ ID NO: 19039 - protein, 7 aa, synthetic construct
RGDVQFT

SEQ ID NO: 19040 - protein, 7 aa, synthetic construct
RGDVQIV

SEQ ID NO: 19041 - protein, 7 aa, synthetic construct
RGDVRHS

SEQ ID NO: 19042 - protein, 7 aa, synthetic construct
RGDVRND

SEQ ID NO: 19043 - protein, 7 aa, synthetic construct
RGDVSFD

SEQ ID NO: 19044 - protein, 7 aa, synthetic construct
RGDVTSN

SEQ ID NO: 19045 - protein, 7 aa, synthetic construct
RGDVVKS

SEQ ID NO: 19046 - protein, 7 aa, synthetic construct
RGDVVLT

SEQ ID NO: 19047 - protein, 7 aa, synthetic construct
RGDVVQH

SEQ ID NO: 19048 - protein, 7 aa, synthetic construct
RGDDKNA

SEQ ID NO: 19049 - protein, 7 aa, synthetic construct
RGDDSSK

SEQ ID NO: 19050 - protein, 7 aa, synthetic construct
RGDDTNG

SEQ ID NO: 19051 - protein, 7 aa, synthetic construct
RGDDVFQ

SEQ ID NO: 19052 - protein, 7 aa, synthetic construct
RGDDVFV

SEQ ID NO: 19053 - protein, 7 aa, synthetic construct
RGDDVKR

SEQ ID NO: 19054 - protein, 7 aa, synthetic construct
RGDEAHH

SEQ ID NO: 19055 - protein, 7 aa, synthetic construct
RGDEDNN

SEQ ID NO: 19056 - protein, 7 aa, synthetic construct
RGDEDQK

SEQ ID NO: 19057 - protein, 7 aa, synthetic construct
RGDAFHK

SEQ ID NO: 19058 - protein, 7 aa, synthetic construct
RGDEHAR

SEQ ID NO: 19059 - protein, 7 aa, synthetic construct
RGDEHKH

SEQ ID NO: 19060 - protein, 7 aa, synthetic construct
RGDEHRI

SEQ ID NO: 19061 - protein, 7 aa, synthetic construct
RGDAFNK

SEQ ID NO: 19062 - protein, 7 aa, synthetic construct
RGDAFRQ

SEQ ID NO: 19063 - protein, 7 aa, synthetic construct
RGDELQK

SEQ ID NO: 19064 - protein, 7 aa, synthetic construct
RGDELSA

SEQ ID NO: 19065 - protein, 7 aa, synthetic construct
RGDERHS

SEQ ID NO: 19066 - protein, 7 aa, synthetic construct
RGDERIR

SEQ ID NO: 19067 - protein, 7 aa, synthetic construct
RGDETGS

SEQ ID NO: 19068 - protein, 7 aa, synthetic construct
RGDETHA

SEQ ID NO: 19069 - protein, 7 aa, synthetic construct
RGDFDES

SEQ ID NO: 19070 - protein, 7 aa, synthetic construct
RGDFDTF

SEQ ID NO: 19071 - protein, 7 aa, synthetic construct
RGDFESS

SEQ ID NO: 19072 - protein, 7 aa, synthetic construct
RGDFFGG

SEQ ID NO: 19073 - protein, 7 aa, synthetic construct
RGDFFGQ

SEQ ID NO: 19074 - protein, 7 aa, synthetic construct
RGDFFST

SEQ ID NO: 19075 - protein, 7 aa, synthetic construct
RGDFHQN

SEQ ID NO: 19076 - protein, 7 aa, synthetic construct
RGDFIKT

SEQ ID NO: 19077 - protein, 7 aa, synthetic construct
RGDFITQ

SEQ ID NO: 19078 - protein, 7 aa, synthetic construct
RGDFKDS

SEQ ID NO: 19079 - protein, 7 aa, synthetic construct
RGDFKIV

SEQ ID NO: 19080 - protein, 7 aa, synthetic construct
RGDFKKD

SEQ ID NO: 19081 - protein, 7 aa, synthetic construct
RGDFKQF

SEQ ID NO: 19082 - protein, 7 aa, synthetic construct
RGDFLAH

SEQ ID NO: 19083 - protein, 7 aa, synthetic construct
RGDAHHH

SEQ ID NO: 19084 - protein, 7 aa, synthetic construct
RGDAHKF

SEQ ID NO: 19085 - protein, 7 aa, synthetic construct
RGDFNVR

SEQ ID NO: 19086 - protein, 7 aa, synthetic construct
RGDFQAQ

SEQ ID NO: 19087 - protein, 7 aa, synthetic construct
RGDFRDI

SEQ ID NO: 19088 - protein, 7 aa, synthetic construct
RGDFRRF

SEQ ID NO: 19089 - protein, 7 aa, synthetic construct
RGDFRVG

SEQ ID NO: 19090 - protein, 7 aa, synthetic construct
RGDFSDL

SEQ ID NO: 19091 - protein, 7 aa, synthetic construct
RGDAHRT

SEQ ID NO: 19092 - protein, 7 aa, synthetic construct
RGDFTHE

SEQ ID NO: 19093 - protein, 7 aa, synthetic construct
RGDGARS

SEQ ID NO: 19094 - protein, 7 aa, synthetic construct
RGDGATH

SEQ ID NO: 19095 - protein, 7 aa, synthetic construct
RGDGDVF

SEQ ID NO: 19096 - protein, 7 aa, synthetic construct
RGDAIGF

SEQ ID NO: 19097 - protein, 7 aa, synthetic construct
RGDGFGN

SEQ ID NO: 19098 - protein, 7 aa, synthetic construct
RGDGFRS

SEQ ID NO: 19099 - protein, 7 aa, synthetic construct
RGDAIHR

SEQ ID NO: 19100 - protein, 7 aa, synthetic construct
RGDAIHV

SEQ ID NO: 19101 - protein, 7 aa, synthetic construct
RGDGHEH

SEQ ID NO: 19102 - protein, 7 aa, synthetic construct
RGDGIDH

SEQ ID NO: 19103 - protein, 7 aa, synthetic construct
RGDGIRN

SEQ ID NO: 19104 - protein, 7 aa, synthetic construct
RGDGKIV

SEQ ID NO: 19105 - protein, 7 aa, synthetic construct
RGDGKVT

SEQ ID NO: 19106 - protein, 7 aa, synthetic construct
RGDGLFI

SEQ ID NO: 19107 - protein, 7 aa, synthetic construct
RGDGNDT

SEQ ID NO: 19108 - protein, 7 aa, synthetic construct
RGDGNEI

SEQ ID NO: 19109 - protein, 7 aa, synthetic construct
RGDGNVL

SEQ ID NO: 19110 - protein, 7 aa, synthetic construct
RGDGSKA

SEQ ID NO: 19111 - protein, 7 aa, synthetic construct
RGDGSLN

SEQ ID NO: 19112 - protein, 7 aa, synthetic construct
RGDGSTN

SEQ ID NO: 19113 - protein, 7 aa, synthetic construct
RGDGTKD

SEQ ID NO: 19114 - protein, 7 aa, synthetic construct
RGDGTKS

SEQ ID NO: 19115 - protein, 7 aa, synthetic construct
RGDGTTK

SEQ ID NO: 19116 - protein, 7 aa, synthetic construct
RGDGVHR

SEQ ID NO: 19117 - protein, 7 aa, synthetic construct
RGDGVTF

SEQ ID NO: 19118 - protein, 7 aa, synthetic construct
RGDGVVK

SEQ ID NO: 19119 - protein, 7 aa, synthetic construct
RGDHDGR

SEQ ID NO: 19120 - protein, 7 aa, synthetic construct
RGDHDHK

SEQ ID NO: 19121 - protein, 7 aa, synthetic construct
RGDHEAQ

SEQ ID NO: 19122 - protein, 7 aa, synthetic construct
RGDHEFV

SEQ ID NO: 19123 - protein, 7 aa, synthetic construct
RGDAKSN

SEQ ID NO: 19124 - protein, 7 aa, synthetic construct
RGDHGEN

SEQ ID NO: 19125 - protein, 7 aa, synthetic construct
RGDHGIV

SEQ ID NO: 19126 - protein, 7 aa, synthetic construct
RGDHGVH

SEQ ID NO: 19127 - protein, 7 aa, synthetic construct
RGDHHGN

SEQ ID NO: 19128 - protein, 7 aa, synthetic construct
RGDHIAL

SEQ ID NO: 19129 - protein, 7 aa, synthetic construct
RGDHIRT

SEQ ID NO: 19130 - protein, 7 aa, synthetic construct
RGDHKEE

SEQ ID NO: 19131 - protein, 7 aa, synthetic construct
RGDHKRG

SEQ ID NO: 19132 - protein, 7 aa, synthetic construct
RGDHKVL

SEQ ID NO: 19133 - protein, 7 aa, synthetic construct
RGDHNDI

SEQ ID NO: 19134 - protein, 7 aa, synthetic construct
RGDHNIL

SEQ ID NO: 19135 - protein, 7 aa, synthetic construct
RGDHQAG

SEQ ID NO: 19136 - protein, 7 aa, synthetic construct
RGDHRAH

SEQ ID NO: 19137 - protein, 7 aa, synthetic construct
RGDHRDN

SEQ ID NO: 19138 - protein, 7 aa, synthetic construct
RGDALSV

SEQ ID NO: 19139 - protein, 7 aa, synthetic construct
RGDHTQS

SEQ ID NO: 19140 - protein, 7 aa, synthetic construct
RGDHTVI

SEQ ID NO: 19141 - protein, 7 aa, synthetic construct
RGDALTL

SEQ ID NO: 19142 - protein, 7 aa, synthetic construct
RGDIAGT

SEQ ID NO: 19143 - protein, 7 aa, synthetic construct
RGDIALR

SEQ ID NO: 19144 - protein, 7 aa, synthetic construct
RGDIGQN

SEQ ID NO: 19145 - protein, 7 aa, synthetic construct
RGDIGQV

SEQ ID NO: 19146 - protein, 7 aa, synthetic construct
RGDIGTA

SEQ ID NO: 19147 - protein, 7 aa, synthetic construct
RGDIHAQ

SEQ ID NO: 19148 - protein, 7 aa, synthetic construct
RGDIHFA

SEQ ID NO: 19149 - protein, 7 aa, synthetic construct
RGDIHRV

SEQ ID NO: 19150 - protein, 7 aa, synthetic construct
RGDIIAF

SEQ ID NO: 19151 - protein, 7 aa, synthetic construct
RGDIINF

SEQ ID NO: 19152 - protein, 7 aa, synthetic construct
RGDIKTA

SEQ ID NO: 19153 - protein, 7 aa, synthetic construct
RGDILAV

SEQ ID NO: 19154 - protein, 7 aa, synthetic construct
RGDAQDK

SEQ ID NO: 19155 - protein, 7 aa, synthetic construct
RGDAQDR

SEQ ID NO: 19156 - protein, 7 aa, synthetic construct
RGDIRVS

SEQ ID NO: 19157 - protein, 7 aa, synthetic construct
RGDISQF

SEQ ID NO: 19158 - protein, 7 aa, synthetic construct
RGDAQGF

SEQ ID NO: 19159 - protein, 7 aa, synthetic construct
RGDITIN

SEQ ID NO: 19160 - protein, 7 aa, synthetic construct
RGDIVGI

SEQ ID NO: 19161 - protein, 7 aa, synthetic construct
RGDIVNS

SEQ ID NO: 19162 - protein, 7 aa, synthetic construct
RGDKDAA

SEQ ID NO: 19163 - protein, 7 aa, synthetic construct
RGDKEGI

SEQ ID NO: 19164 - protein, 7 aa, synthetic construct
RGDKIAL

SEQ ID NO: 19165 - protein, 7 aa, synthetic construct
RGDKILK

SEQ ID NO: 19166 - protein, 7 aa, synthetic construct
RGDKKAN

SEQ ID NO: 19167 - protein, 7 aa, synthetic construct
RGDKKDD

SEQ ID NO: 19168 - protein, 7 aa, synthetic construct
RGDKKFR

SEQ ID NO: 19169 - protein, 7 aa, synthetic construct
RGDKKSE

SEQ ID NO: 19170 - protein, 7 aa, synthetic construct
RGDKLRN

SEQ ID NO: 19171 - protein, 7 aa, synthetic construct
RGDKNAT

SEQ ID NO: 19172 - protein, 7 aa, synthetic construct
RGDKNGA

SEQ ID NO: 19173 - protein, 7 aa, synthetic construct
RGDKQIT

SEQ ID NO: 19174 - protein, 7 aa, synthetic construct
RGDKQLG

SEQ ID NO: 19175 - protein, 7 aa, synthetic construct
RGDARLL

SEQ ID NO: 19176 - protein, 7 aa, synthetic construct
RGDKRFL

SEQ ID NO: 19177 - protein, 7 aa, synthetic construct
RGDKSLK

SEQ ID NO: 19178 - protein, 7 aa, synthetic construct
RGDKVIT

SEQ ID NO: 19179 - protein, 7 aa, synthetic construct
RGDLAED

SEQ ID NO: 19180 - protein, 7 aa, synthetic construct
RGDLDHG

SEQ ID NO: 19181 - protein, 7 aa, synthetic construct
RGDASEQ

SEQ ID NO: 19182 - protein, 7 aa, synthetic construct
RGDLFAL

SEQ ID NO: 19183 - protein, 7 aa, synthetic construct
RGDLGHR

SEQ ID NO: 19184 - protein, 7 aa, synthetic construct
RGDLHFR

SEQ ID NO: 19185 - protein, 7 aa, synthetic construct
RGDLHHI

SEQ ID NO: 19186 - protein, 7 aa, synthetic construct
RGDLIEL

SEQ ID NO: 19187 - protein, 7 aa, synthetic construct
RGDLIET

SEQ ID NO: 19188 - protein, 7 aa, synthetic construct
RGDLKGQ

SEQ ID NO: 19189 - protein, 7 aa, synthetic construct
RGDLKHQ

SEQ ID NO: 19190 - protein, 7 aa, synthetic construct
RGDLNGN

SEQ ID NO: 19191 - protein, 7 aa, synthetic construct
RGDLNRG

SEQ ID NO: 19192 - protein, 7 aa, synthetic construct
RGDLRIN

SEQ ID NO: 19193 - protein, 7 aa, synthetic construct
RGDLSIQ

SEQ ID NO: 19194 - protein, 7 aa, synthetic construct
RGDLSVA

SEQ ID NO: 19195 - protein, 7 aa, synthetic construct
RGDNDTK

SEQ ID NO: 19196 - protein, 7 aa, synthetic construct
RGDNELK

SEQ ID NO: 19197 - protein, 7 aa, synthetic construct
RGDNETR

SEQ ID NO: 19198 - protein, 7 aa, synthetic construct
RGDNFHT

SEQ ID NO: 19199 - protein, 7 aa, synthetic construct
RGDNGGK

SEQ ID NO: 19200 - protein, 7 aa, synthetic construct
RGDNGQN

SEQ ID NO: 19201 - protein, 7 aa, synthetic construct
RGDNGSE

SEQ ID NO: 19202 - protein, 7 aa, synthetic construct
RGDNGVH

SEQ ID NO: 19203 - protein, 7 aa, synthetic construct
RGDNHGG

SEQ ID NO: 19204 - protein, 7 aa, synthetic construct
RGDNIAQ

SEQ ID NO: 19205 - protein, 7 aa, synthetic construct
RGDNIRE

SEQ ID NO: 19206 - protein, 7 aa, synthetic construct
RGDNIVV

SEQ ID NO: 19207 - protein, 7 aa, synthetic construct
RGDNKAL

SEQ ID NO: 19208 - protein, 7 aa, synthetic construct
RGDNKHR

SEQ ID NO: 19209 - protein, 7 aa, synthetic construct
RGDAVGT

SEQ ID NO: 19210 - protein, 7 aa, synthetic construct
RGDNLHD

SEQ ID NO: 19211 - protein, 7 aa, synthetic construct
RGDNQHK

SEQ ID NO: 19212 - protein, 7 aa, synthetic construct
RGDNQHT

SEQ ID NO: 19213 - protein, 7 aa, synthetic construct
RGDNSSD

SEQ ID NO: 19214 - protein, 7 aa, synthetic construct
RGDQAIV

SEQ ID NO: 19215 - protein, 7 aa, synthetic construct
RGDQDLV

SEQ ID NO: 19216 - protein, 7 aa, synthetic construct
RGDQFSN

SEQ ID NO: 19217 - protein, 7 aa, synthetic construct
RGDQFVE

SEQ ID NO: 19218 - protein, 7 aa, synthetic construct
RGDQHSS

SEQ ID NO: 19219 - protein, 7 aa, synthetic construct
RGDQIES

SEQ ID NO: 19220 - protein, 7 aa, synthetic construct
RGDQIRD

SEQ ID NO: 19221 - protein, 7 aa, synthetic construct
RGDQKFH

SEQ ID NO: 19222 - protein, 7 aa, synthetic construct
RGDQKLE

SEQ ID NO: 19223 - protein, 7 aa, synthetic construct
RGDQKQS

SEQ ID NO: 19224 - protein, 7 aa, synthetic construct
RGDQLEK

SEQ ID NO: 19225 - protein, 7 aa, synthetic construct
RGDQNLF

SEQ ID NO: 19226 - protein, 7 aa, synthetic construct
RGDQNRH

SEQ ID NO: 19227 - protein, 7 aa, synthetic construct
RGDQRTE

SEQ ID NO: 19228 - protein, 7 aa, synthetic construct
RGDQSDR

SEQ ID NO: 19229 - protein, 7 aa, synthetic construct
RGDQSER

SEQ ID NO: 19230 - protein, 7 aa, synthetic construct
RGDRDEH

SEQ ID NO: 19231 - protein, 7 aa, synthetic construct
RGDRDTA

SEQ ID NO: 19232 - protein, 7 aa, synthetic construct
RGDRDTH

SEQ ID NO: 19233 - protein, 7 aa, synthetic construct
RGDRGDF

SEQ ID NO: 19234 - protein, 7 aa, synthetic construct
RGDRHDQ

SEQ ID NO: 19235 - protein, 7 aa, synthetic construct
RGDRHLN

SEQ ID NO: 19236 - protein, 7 aa, synthetic construct
RGDRIDK

SEQ ID NO: 19237 - protein, 7 aa, synthetic construct
RGDRKHG

SEQ ID NO: 19238 - protein, 7 aa, synthetic construct
RGDDEFL

SEQ ID NO: 19239 - protein, 7 aa, synthetic construct
RGDRLQS

SEQ ID NO: 19240 - protein, 7 aa, synthetic construct
RGDRNHG

SEQ ID NO: 19241 - protein, 7 aa, synthetic construct
RGDRQEA

SEQ ID NO: 19242 - protein, 7 aa, synthetic construct
RGDRRQL

SEQ ID NO: 19243 - protein, 7 aa, synthetic construct
RGDRTKA

SEQ ID NO: 19244 - protein, 7 aa, synthetic construct
RGDSEFD

SEQ ID NO: 19245 - protein, 7 aa, synthetic construct
RGDSERE

SEQ ID NO: 19246 - protein, 7 aa, synthetic construct
RGDDFGE

SEQ ID NO: 19247 - protein, 7 aa, synthetic construct
RGDSFLT

SEQ ID NO: 19248 - protein, 7 aa, synthetic construct
RGDSGVF

SEQ ID NO: 19249 - protein, 7 aa, synthetic construct
RGDDFKR

SEQ ID NO: 19250 - protein, 7 aa, synthetic construct
RGDSHGH

SEQ ID NO: 19251 - protein, 7 aa, synthetic construct
RGDSHHF

SEQ ID NO: 19252 - protein, 7 aa, synthetic construct
RGDSHQN

SEQ ID NO: 19253 - protein, 7 aa, synthetic construct
RGDSLNF

SEQ ID NO: 19254 - protein, 7 aa, synthetic construct
RGDSLSL

SEQ ID NO: 19255 - protein, 7 aa, synthetic construct
RGDSQFF

SEQ ID NO: 19256 - protein, 7 aa, synthetic construct
RGDSQNE

SEQ ID NO: 19257 - protein, 7 aa, synthetic construct
RGDSSGA

SEQ ID NO: 19258 - protein, 7 aa, synthetic construct
RGDSSLV

SEQ ID NO: 19259 - protein, 7 aa, synthetic construct
RGDSTFL

SEQ ID NO: 19260 - protein, 7 aa, synthetic construct
RGDSVGE

SEQ ID NO: 19261 - protein, 7 aa, synthetic construct
RGDTAER

SEQ ID NO: 19262 - protein, 7 aa, synthetic construct
RGDTARR

SEQ ID NO: 19263 - protein, 7 aa, synthetic construct
RGDTAVK

SEQ ID NO: 19264 - protein, 7 aa, synthetic construct
RGDTDSI

SEQ ID NO: 19265 - protein, 7 aa, synthetic construct
RGDTGGH

SEQ ID NO: 19266 - protein, 7 aa, synthetic construct
RGDTGLA

SEQ ID NO: 19267 - protein, 7 aa, synthetic construct
RGDTGNG

SEQ ID NO: 19268 - protein, 7 aa, synthetic construct
RGDTIFQ

SEQ ID NO: 19269 - protein, 7 aa, synthetic construct
RGDDHGA

SEQ ID NO: 19270 - protein, 7 aa, synthetic construct
RGDTKRI

SEQ ID NO: 19271 - protein, 7 aa, synthetic construct
RGDTLDS

SEQ ID NO: 19272 - protein, 7 aa, synthetic construct
RGDTLIN

SEQ ID NO: 19273 - protein, 7 aa, synthetic construct
RGDTLNV

SEQ ID NO: 19274 - protein, 7 aa, synthetic construct
RGDTNRH

SEQ ID NO: 19275 - protein, 7 aa, synthetic construct
RGDTNRV

SEQ ID NO: 19276 - protein, 7 aa, synthetic construct
RGDTNVE

SEQ ID NO: 19277 - protein, 7 aa, synthetic construct
RGDTQHQ

SEQ ID NO: 19278 - protein, 7 aa, synthetic construct
RGDTQIV

SEQ ID NO: 19279 - protein, 7 aa, synthetic construct
RGDTRFD

SEQ ID NO: 19280 - protein, 7 aa, synthetic construct
RGDTSHF

SEQ ID NO: 19281 - protein, 7 aa, synthetic construct
RGDVADI

SEQ ID NO: 19282 - protein, 7 aa, synthetic construct
RGDVADL

SEQ ID NO: 19283 - protein, 7 aa, synthetic construct
RGDVDHL

SEQ ID NO: 19284 - protein, 7 aa, synthetic construct
RGDVEKI

SEQ ID NO: 19285 - protein, 7 aa, synthetic construct
RGDVEQL

SEQ ID NO: 19286 - protein, 7 aa, synthetic construct
RGDVERI

SEQ ID NO: 19287 - protein, 7 aa, synthetic construct
RGDDIGV

SEQ ID NO: 19288 - protein, 7 aa, synthetic construct
RGDVFKH

SEQ ID NO: 19289 - protein, 7 aa, synthetic construct
RGDVGQL

SEQ ID NO: 19290 - protein, 7 aa, synthetic construct
RGDVIFV

SEQ ID NO: 19291 - protein, 7 aa, synthetic construct
RGDVITF

SEQ ID NO: 19292 - protein, 7 aa, synthetic construct
RGDVKRS

SEQ ID NO: 19293 - protein, 7 aa, synthetic construct
RGDVLHE

SEQ ID NO: 19294 - protein, 7 aa, synthetic construct
RGDVLQH

SEQ ID NO: 19295 - protein, 7 aa, synthetic construct
RGDVLTV

SEQ ID NO: 19296 - protein, 7 aa, synthetic construct
RGDVNIN

SEQ ID NO: 19297 - protein, 7 aa, synthetic construct
RGDVRQG

SEQ ID NO: 19298 - protein, 7 aa, synthetic construct
RGDVRRN

SEQ ID NO: 19299 - protein, 7 aa, synthetic construct
RGDVSQQ

SEQ ID NO: 19300 - protein, 7 aa, synthetic construct
RGDVTAK

SEQ ID NO: 19301 - protein, 7 aa, synthetic construct
RGDVTFT

SEQ ID NO: 19302 - protein, 7 aa, synthetic construct
RGDVVIF

SEQ ID NO: 19303 - protein, 7 aa, synthetic construct
RGDVVIQ

SEQ ID NO: 19304 - protein, 7 aa, synthetic construct
RGDDKSS

SEQ ID NO: 19305 - protein, 7 aa, synthetic construct
RGDDLNG

SEQ ID NO: 19306 - protein, 7 aa, synthetic construct
RGDDLSG

SEQ ID NO: 19307 - protein, 7 aa, synthetic construct
RGDDNRG

SEQ ID NO: 19308 - protein, 7 aa, synthetic construct
RGDDRNH

SEQ ID NO: 19309 - protein, 7 aa, synthetic construct
RGDDSDG

SEQ ID NO: 19310 - protein, 7 aa, synthetic construct
RGDDSNL

SEQ ID NO: 19311 - protein, 7 aa, synthetic construct
RGDDTKI

SEQ ID NO: 19312 - protein, 7 aa, synthetic construct
RGDDTQV

SEQ ID NO: 19313 - protein, 7 aa, synthetic construct
RGDDVGI

SEQ ID NO: 19314 - protein, 7 aa, synthetic construct
RGDEDLQ

SEQ ID NO: 19315 - protein, 7 aa, synthetic construct
RGDEEER

SEQ ID NO: 19316 - protein, 7 aa, synthetic construct
RGDEGRH

SEQ ID NO: 19317 - protein, 7 aa, synthetic construct
RGDEGVH

SEQ ID NO: 19318 - protein, 7 aa, synthetic construct
RGDEIED

SEQ ID NO: 19319 - protein, 7 aa, synthetic construct
RGDAAHL

SEQ ID NO: 19320 - protein, 7 aa, synthetic construct
RGDEKLR

SEQ ID NO: 19321 - protein, 7 aa, synthetic construct
RGDELKT

SEQ ID NO: 19322 - protein, 7 aa, synthetic construct
RGDELRS

SEQ ID NO: 19323 - protein, 7 aa, synthetic construct
RGDENQD

SEQ ID NO: 19324 - protein, 7 aa, synthetic construct
RGDEQGK

SEQ ID NO: 19325 - protein, 7 aa, synthetic construct
RGDERLK

SEQ ID NO: 19326 - protein, 7 aa, synthetic construct
RGDERNR

SEQ ID NO: 19327 - protein, 7 aa, synthetic construct
RGDERTA

SEQ ID NO: 19328 - protein, 7 aa, synthetic construct
RGDESKF

SEQ ID NO: 19329 - protein, 7 aa, synthetic construct
RGDESSN

SEQ ID NO: 19330 - protein, 7 aa, synthetic construct
RGDESVL

SEQ ID NO: 19331 - protein, 7 aa, synthetic construct
RGDETTK

SEQ ID NO: 19332 - protein, 7 aa, synthetic construct
RGDEVLI

SEQ ID NO: 19333 - protein, 7 aa, synthetic construct
RGDFAGD

SEQ ID NO: 19334 - protein, 7 aa, synthetic construct
RGDFATK

SEQ ID NO: 19335 - protein, 7 aa, synthetic construct
RGDFAVI

SEQ ID NO: 19336 - protein, 7 aa, synthetic construct
RGDFDEI

SEQ ID NO: 19337 - protein, 7 aa, synthetic construct
RGDFDHL

SEQ ID NO: 19338 - protein, 7 aa, synthetic construct
RGDFEFH

SEQ ID NO: 19339 - protein, 7 aa, synthetic construct
RGDFEID

SEQ ID NO: 19340 - protein, 7 aa, synthetic construct
RGDFFAS

SEQ ID NO: 19341 - protein, 7 aa, synthetic construct
RGDAGSS

SEQ ID NO: 19342 - protein, 7 aa, synthetic construct
RGDFFLV

SEQ ID NO: 19343 - protein, 7 aa, synthetic construct
RGDFFSI

SEQ ID NO: 19344 - protein, 7 aa, synthetic construct
RGDAGTH

SEQ ID NO: 19345 - protein, 7 aa, synthetic construct
RGDFGAF

SEQ ID NO: 19346 - protein, 7 aa, synthetic construct
RGDFGHL

SEQ ID NO: 19347 - protein, 7 aa, synthetic construct
RGDFGIR

SEQ ID NO: 19348 - protein, 7 aa, synthetic construct
RGDFGKD

SEQ ID NO: 19349 - protein, 7 aa, synthetic construct
RGDFGQT

SEQ ID NO: 19350 - protein, 7 aa, synthetic construct
RGDFHFV

SEQ ID NO: 19351 - protein, 7 aa, synthetic construct
RGDFHGH

SEQ ID NO: 19352 - protein, 7 aa, synthetic construct
RGDFNDV

SEQ ID NO: 19353 - protein, 7 aa, synthetic construct
RGDFNGF

SEQ ID NO: 19354 - protein, 7 aa, synthetic construct
RGDFQEI

SEQ ID NO: 19355 - protein, 7 aa, synthetic construct
RGDFQTT

SEQ ID NO: 19356 - protein, 7 aa, synthetic construct
RGDFRTE

SEQ ID NO: 19357 - protein, 7 aa, synthetic construct
RGDFSVN

SEQ ID NO: 19358 - protein, 7 aa, synthetic construct
RGDFVKI

SEQ ID NO: 19359 - protein, 7 aa, synthetic construct
RGDGDTK

SEQ ID NO: 19360 - protein, 7 aa, synthetic construct
RGDGFLQ

SEQ ID NO: 19361 - protein, 7 aa, synthetic construct
RGDGFSQ

SEQ ID NO: 19362 - protein, 7 aa, synthetic construct
RGDAIIF

SEQ ID NO: 19363 - protein, 7 aa, synthetic construct
RGDGGGH

SEQ ID NO: 19364 - protein, 7 aa, synthetic construct
RGDGGRK

SEQ ID NO: 19365 - protein, 7 aa, synthetic construct
RGDGHLQ

SEQ ID NO: 19366 - protein, 7 aa, synthetic construct
RGDGITK

SEQ ID NO: 19367 - protein, 7 aa, synthetic construct
RGDGKDR

SEQ ID NO: 19368 - protein, 7 aa, synthetic construct
RGDGKFS

SEQ ID NO: 19369 - protein, 7 aa, synthetic construct
RGDGNEL

SEQ ID NO: 19370 - protein, 7 aa, synthetic construct
RGDGNGL

SEQ ID NO: 19371 - protein, 7 aa, synthetic construct
RGDAITV

SEQ ID NO: 19372 - protein, 7 aa, synthetic construct
RGDGNHF

SEQ ID NO: 19373 - protein, 7 aa, synthetic construct
RGDGNIK

SEQ ID NO: 19374 - protein, 7 aa, synthetic construct
RGDGNKK

SEQ ID NO: 19375 - protein, 7 aa, synthetic construct
RGDGNSA

SEQ ID NO: 19376 - protein, 7 aa, synthetic construct
RGDGQAL

SEQ ID NO: 19377 - protein, 7 aa, synthetic construct
RGDGREK

SEQ ID NO: 19378 - protein, 7 aa, synthetic construct
RGDGTDH

SEQ ID NO: 19379 - protein, 7 aa, synthetic construct
RGDGTKG

SEQ ID NO: 19380 - protein, 7 aa, synthetic construct
RGDGTNE

SEQ ID NO: 19381 - protein, 7 aa, synthetic construct
RGDGTRH

SEQ ID NO: 19382 - protein, 7 aa, synthetic construct
RGDGVDR

SEQ ID NO: 19383 - protein, 7 aa, synthetic construct
RGDGVSL

SEQ ID NO: 19384 - protein, 7 aa, synthetic construct
RGDAKKI

SEQ ID NO: 19385 - protein, 7 aa, synthetic construct
RGDHAAN

SEQ ID NO: 19386 - protein, 7 aa, synthetic construct
RGDHALI

SEQ ID NO: 19387 - protein, 7 aa, synthetic construct
RGDHDKD

SEQ ID NO: 19388 - protein, 7 aa, synthetic construct
RGDHDLK

SEQ ID NO: 19389 - protein, 7 aa, synthetic construct
RGDHDNR

SEQ ID NO: 19390 - protein, 7 aa, synthetic construct
RGDHEII

SEQ ID NO: 19391 - protein, 7 aa, synthetic construct
RGDHERN

SEQ ID NO: 19392 - protein, 7 aa, synthetic construct
RGDHFGI

SEQ ID NO: 19393 - protein, 7 aa, synthetic construct
RGDHHEF

SEQ ID NO: 19394 - protein, 7 aa, synthetic construct
RGDHHVL

SEQ ID NO: 19395 - protein, 7 aa, synthetic construct
RGDHNII

SEQ ID NO: 19396 - protein, 7 aa, synthetic construct
RGDHRGS

SEQ ID NO: 19397 - protein, 7 aa, synthetic construct
RGDHRRQ

SEQ ID NO: 19398 - protein, 7 aa, synthetic construct
RGDHSES

SEQ ID NO: 19399 - protein, 7 aa, synthetic construct
RGDHSHK

SEQ ID NO: 19400 - protein, 7 aa, synthetic construct
RGDHSLQ

SEQ ID NO: 19401 - protein, 7 aa, synthetic construct
RGDHTFA

SEQ ID NO: 19402 - protein, 7 aa, synthetic construct
RGDHTVQ

SEQ ID NO: 19403 - protein, 7 aa, synthetic construct
RGDHVFQ

SEQ ID NO: 19404 - protein, 7 aa, synthetic construct
RGDIAAT

SEQ ID NO: 19405 - protein, 7 aa, synthetic construct
RGDIAFT

SEQ ID NO: 19406 - protein, 7 aa, synthetic construct
RGDIAGG

SEQ ID NO: 19407 - protein, 7 aa, synthetic construct
RGDIAIV

SEQ ID NO: 19408 - protein, 7 aa, synthetic construct
RGDIDFT

SEQ ID NO: 19409 - protein, 7 aa, synthetic construct
RGDIDHR

SEQ ID NO: 19410 - protein, 7 aa, synthetic construct
RGDIFLF

SEQ ID NO: 19411 - protein, 7 aa, synthetic construct
RGDIFNS

SEQ ID NO: 19412 - protein, 7 aa, synthetic construct
RGDIFTV

SEQ ID NO: 19413 - protein, 7 aa, synthetic construct
RGDANIR

SEQ ID NO: 19414 - protein, 7 aa, synthetic construct
RGDIGRD

SEQ ID NO: 19415 - protein, 7 aa, synthetic construct
RGDIHET

SEQ ID NO: 19416 - protein, 7 aa, synthetic construct
RGDIHLT

SEQ ID NO: 19417 - protein, 7 aa, synthetic construct
RGDIISQ

SEQ ID NO: 19418 - protein, 7 aa, synthetic construct
RGDIKAQ

SEQ ID NO: 19419 - protein, 7 aa, synthetic construct
RGDAAVL

SEQ ID NO: 19420 - protein, 7 aa, synthetic construct
RGDIKIR

SEQ ID NO: 19421 - protein, 7 aa, synthetic construct
RGDAQDF

SEQ ID NO: 19422 - protein, 7 aa, synthetic construct
RGDIQVR

SEQ ID NO: 19423 - protein, 7 aa, synthetic construct
RGDIRDR

SEQ ID NO: 19424 - protein, 7 aa, synthetic construct
RGDIRLE

SEQ ID NO: 19425 - protein, 7 aa, synthetic construct
RGDIRQH

SEQ ID NO: 19426 - protein, 7 aa, synthetic construct
RGDISHE

SEQ ID NO: 19427 - protein, 7 aa, synthetic construct
RGDISNT

SEQ ID NO: 19428 - protein, 7 aa, synthetic construct
RGDIVNI

SEQ ID NO: 19429 - protein, 7 aa, synthetic construct
RGDAQKQ

SEQ ID NO: 19430 - protein, 7 aa, synthetic construct
RGDKAQK

SEQ ID NO: 19431 - protein, 7 aa, synthetic construct
RGDKERT

SEQ ID NO: 19432 - protein, 7 aa, synthetic construct
RGDKESF

SEQ ID NO: 19433 - protein, 7 aa, synthetic construct
RGDKEVI

SEQ ID NO: 19434 - protein, 7 aa, synthetic construct
RGDKFGF

SEQ ID NO: 19435 - protein, 7 aa, synthetic construct
RGDKFKR

SEQ ID NO: 19436 - protein, 7 aa, synthetic construct
RGDKGEH

SEQ ID NO: 19437 - protein, 7 aa, synthetic construct
RGDKGTH

SEQ ID NO: 19438 - protein, 7 aa, synthetic construct
RGDKIDE

SEQ ID NO: 19439 - protein, 7 aa, synthetic construct
RGDKKAH

SEQ ID NO: 19440 - protein, 7 aa, synthetic construct
RGDKLRT

SEQ ID NO: 19441 - protein, 7 aa, synthetic construct
RGDKLTE

SEQ ID NO: 19442 - protein, 7 aa, synthetic construct
RGDKQEL

SEQ ID NO: 19443 - protein, 7 aa, synthetic construct
RGDKQEQ

SEQ ID NO: 19444 - protein, 7 aa, synthetic construct
RGDKQHL

SEQ ID NO: 19445 - protein, 7 aa, synthetic construct
RGDKSHE

SEQ ID NO: 19446 - protein, 7 aa, synthetic construct
RGDKSVN

SEQ ID NO: 19447 - protein, 7 aa, synthetic construct
RGDKTLK

SEQ ID NO: 19448 - protein, 7 aa, synthetic construct
RGDLAHA

SEQ ID NO: 19449 - protein, 7 aa, synthetic construct
RGDLDKA

SEQ ID NO: 19450 - protein, 7 aa, synthetic construct
RGDASEV

SEQ ID NO: 19451 - protein, 7 aa, synthetic construct
RGDLEIN

SEQ ID NO: 19452 - protein, 7 aa, synthetic construct
RGDLESD

SEQ ID NO: 19453 - protein, 7 aa, synthetic construct
RGDLHDN

SEQ ID NO: 19454 - protein, 7 aa, synthetic construct
RGDLHKI

SEQ ID NO: 19455 - protein, 7 aa, synthetic construct
RGDLLEI

SEQ ID NO: 19456 - protein, 7 aa, synthetic construct
RGDLLTI

SEQ ID NO: 19457 - protein, 7 aa, synthetic construct
RGDLNKG

SEQ ID NO: 19458 - protein, 7 aa, synthetic construct
RGDLNKT

SEQ ID NO: 19459 - protein, 7 aa, synthetic construct
RGDLNTG

SEQ ID NO: 19460 - protein, 7 aa, synthetic construct
RGDLNVR

SEQ ID NO: 19461 - protein, 7 aa, synthetic construct
RGDLRDV

SEQ ID NO: 19462 - protein, 7 aa, synthetic construct
RGDLRHT

SEQ ID NO: 19463 - protein, 7 aa, synthetic construct
RGDATEI

SEQ ID NO: 19464 - protein, 7 aa, synthetic construct
RGDLRVE

SEQ ID NO: 19465 - protein, 7 aa, synthetic construct
RGDLSFF

SEQ ID NO: 19466 - protein, 7 aa, synthetic construct
RGDLSHG

SEQ ID NO: 19467 - protein, 7 aa, synthetic construct
RGDLSQT

SEQ ID NO: 19468 - protein, 7 aa, synthetic construct
RGDLTSF

SEQ ID NO: 19469 - protein, 7 aa, synthetic construct
RGDNAVR

SEQ ID NO: 19470 - protein, 7 aa, synthetic construct
RGDNEAD

SEQ ID NO: 19471 - protein, 7 aa, synthetic construct
RGDNEGG

SEQ ID NO: 19472 - protein, 7 aa, synthetic construct
RGDNFRS

SEQ ID NO: 19473 - protein, 7 aa, synthetic construct
RGDNFVT

SEQ ID NO: 19474 - protein, 7 aa, synthetic construct
RGDNIDL

SEQ ID NO: 19475 - protein, 7 aa, synthetic construct
RGDNINL

SEQ ID NO: 19476 - protein, 7 aa, synthetic construct
RGDNKRD

SEQ ID NO: 19477 - protein, 7 aa, synthetic construct
RGDNLFR

SEQ ID NO: 19478 - protein, 7 aa, synthetic construct
RGDNLGN

SEQ ID NO: 19479 - protein, 7 aa, synthetic construct
RGDNLTL

SEQ ID NO: 19480 - protein, 7 aa, synthetic construct
RGDNNAH

SEQ ID NO: 19481 - protein, 7 aa, synthetic construct
RGDNSNE

SEQ ID NO: 19482 - protein, 7 aa, synthetic construct
RGDNSQI

SEQ ID NO: 19483 - protein, 7 aa, synthetic construct
RGDNTAE

SEQ ID NO: 19484 - protein, 7 aa, synthetic construct
RGDNVFF

SEQ ID NO: 19485 - protein, 7 aa, synthetic construct
RGDNVSG

SEQ ID NO: 19486 - protein, 7 aa, synthetic construct
RGDNVTF

SEQ ID NO: 19487 - protein, 7 aa, synthetic construct
RGDQARE

SEQ ID NO: 19488 - protein, 7 aa, synthetic construct
RGDQDIK

SEQ ID NO: 19489 - protein, 7 aa, synthetic construct
RGDDAFE

SEQ ID NO: 19490 - protein, 7 aa, synthetic construct
RGDQEKQ

SEQ ID NO: 19491 - protein, 7 aa, synthetic construct
RGDQELQ

SEQ ID NO: 19492 - protein, 7 aa, synthetic construct
RGDQETK

SEQ ID NO: 19493 - protein, 7 aa, synthetic construct
RGDQFQE

SEQ ID NO: 19494 - protein, 7 aa, synthetic construct
RGDQFTN

SEQ ID NO: 19495 - protein, 7 aa, synthetic construct
RGDQHHN

SEQ ID NO: 19496 - protein, 7 aa, synthetic construct
RGDQHKD

SEQ ID NO: 19497 - protein, 7 aa, synthetic construct
RGDQIRR

SEQ ID NO: 19498 - protein, 7 aa, synthetic construct
RGDQIVT

SEQ ID NO: 19499 - protein, 7 aa, synthetic construct
RGDQKLK

SEQ ID NO: 19500 - protein, 7 aa, synthetic construct
RGDQKSA

SEQ ID NO: 19501 - protein, 7 aa, synthetic construct
RGDQKVL

SEQ ID NO: 19502 - protein, 7 aa, synthetic construct
RGDQLQR

SEQ ID NO: 19503 - protein, 7 aa, synthetic construct
RGDQLRK

SEQ ID NO: 19504 - protein, 7 aa, synthetic construct
RGDQLSV

SEQ ID NO: 19505 - protein, 7 aa, synthetic construct
RGDQNNV

SEQ ID NO: 19506 - protein, 7 aa, synthetic construct
RGDQNSA

SEQ ID NO: 19507 - protein, 7 aa, synthetic construct
RGDQRKF

SEQ ID NO: 19508 - protein, 7 aa, synthetic construct
RGDQRQK

SEQ ID NO: 19509 - protein, 7 aa, synthetic construct
RGDQRSG

SEQ ID NO: 19510 - protein, 7 aa, synthetic construct
RGDDDGR

SEQ ID NO: 19511 - protein, 7 aa, synthetic construct
RGDADNK

SEQ ID NO: 19512 - protein, 7 aa, synthetic construct
RGDQTNI

SEQ ID NO: 19513 - protein, 7 aa, synthetic construct
RGDQTTV

SEQ ID NO: 19514 - protein, 7 aa, synthetic construct
RGDQVFS

SEQ ID NO: 19515 - protein, 7 aa, synthetic construct
RGDRAIF

SEQ ID NO: 19516 - protein, 7 aa, synthetic construct
RGDRAVA

SEQ ID NO: 19517 - protein, 7 aa, synthetic construct
RGDRDSA

SEQ ID NO: 19518 - protein, 7 aa, synthetic construct
RGDREAF

SEQ ID NO: 19519 - protein, 7 aa, synthetic construct
RGDRFNK

SEQ ID NO: 19520 - protein, 7 aa, synthetic construct
RGDRHQA

SEQ ID NO: 19521 - protein, 7 aa, synthetic construct
RGDRKIR

SEQ ID NO: 19522 - protein, 7 aa, synthetic construct
RGDRKQR

SEQ ID NO: 19523 - protein, 7 aa, synthetic construct
RGDRNEG

SEQ ID NO: 19524 - protein, 7 aa, synthetic construct
RGDRNFD

SEQ ID NO: 19525 - protein, 7 aa, synthetic construct
RGDRNRE

SEQ ID NO: 19526 - protein, 7 aa, synthetic construct
RGDRQFE

SEQ ID NO: 19527 - protein, 7 aa, synthetic construct
RGDRQHH

SEQ ID NO: 19528 - protein, 7 aa, synthetic construct
RGDRQKE

SEQ ID NO: 19529 - protein, 7 aa, synthetic construct
RGDRQKS

SEQ ID NO: 19530 - protein, 7 aa, synthetic construct
RGDDENF

SEQ ID NO: 19531 - protein, 7 aa, synthetic construct
RGDRSIE

SEQ ID NO: 19532 - protein, 7 aa, synthetic construct
RGDRVEA

SEQ ID NO: 19533 - protein, 7 aa, synthetic construct
RGDRVER

SEQ ID NO: 19534 - protein, 7 aa, synthetic construct
RGDSAKH

SEQ ID NO: 19535 - protein, 7 aa, synthetic construct
RGDSESH

SEQ ID NO: 19536 - protein, 7 aa, synthetic construct
RGDSEVV

SEQ ID NO: 19537 - protein, 7 aa, synthetic construct
RGDSFAI

SEQ ID NO: 19538 - protein, 7 aa, synthetic construct
RGDSFQT

SEQ ID NO: 19539 - protein, 7 aa, synthetic construct
RGDSGFD

SEQ ID NO: 19540 - protein, 7 aa, synthetic construct
RGDSGHT

SEQ ID NO: 19541 - protein, 7 aa, synthetic construct
RGDSGIT

SEQ ID NO: 19542 - protein, 7 aa, synthetic construct
RGDSGLI

SEQ ID NO: 19543 - protein, 7 aa, synthetic construct
RGDDFKK

SEQ ID NO: 19544 - protein, 7 aa, synthetic construct
RGDSHDG

SEQ ID NO: 19545 - protein, 7 aa, synthetic construct
RGDSHND

SEQ ID NO: 19546 - protein, 7 aa, synthetic construct
RGDSKAS

SEQ ID NO: 19547 - protein, 7 aa, synthetic construct
RGDSKER

SEQ ID NO: 19548 - protein, 7 aa, synthetic construct
RGDSKQA

SEQ ID NO: 19549 - protein, 7 aa, synthetic construct
RGDSLAL

SEQ ID NO: 19550 - protein, 7 aa, synthetic construct
RGDSLNG

SEQ ID NO: 19551 - protein, 7 aa, synthetic construct
RGDSLSR

SEQ ID NO: 19552 - protein, 7 aa, synthetic construct
RGDSNQK

SEQ ID NO: 19553 - protein, 7 aa, synthetic construct
RGDSQDK

SEQ ID NO: 19554 - protein, 7 aa, synthetic construct
RGDSQRR

SEQ ID NO: 19555 - protein, 7 aa, synthetic construct
RGDSQSF

SEQ ID NO: 19556 - protein, 7 aa, synthetic construct
RGDSRRQ

SEQ ID NO: 19557 - protein, 7 aa, synthetic construct
RGDSRSA

SEQ ID NO: 19558 - protein, 7 aa, synthetic construct
RGDSSAQ

SEQ ID NO: 19559 - protein, 7 aa, synthetic construct
RGDSSHG

SEQ ID NO: 19560 - protein, 7 aa, synthetic construct
RGDDGGF

SEQ ID NO: 19561 - protein, 7 aa, synthetic construct
RGDTDEF

SEQ ID NO: 19562 - protein, 7 aa, synthetic construct
RGDTDKN

SEQ ID NO: 19563 - protein, 7 aa, synthetic construct
RGDTDRN

SEQ ID NO: 19564 - protein, 7 aa, synthetic construct
RGDTGAN

SEQ ID NO: 19565 - protein, 7 aa, synthetic construct
RGDDGVL

SEQ ID NO: 19566 - protein, 7 aa, synthetic construct
RGDTGSS

SEQ ID NO: 19567 - protein, 7 aa, synthetic construct
RGDTHRE

SEQ ID NO: 19568 - protein, 7 aa, synthetic construct
RGDTLII

SEQ ID NO: 19569 - protein, 7 aa, synthetic construct
RGDTLLV

SEQ ID NO: 19570 - protein, 7 aa, synthetic construct
RGDTQLH

SEQ ID NO: 19571 - protein, 7 aa, synthetic construct
RGDTRAQ

SEQ ID NO: 19572 - protein, 7 aa, synthetic construct
RGDTRLT

SEQ ID NO: 19573 - protein, 7 aa, synthetic construct
RGDDHSE

SEQ ID NO: 19574 - protein, 7 aa, synthetic construct
RGDTTGN

SEQ ID NO: 19575 - protein, 7 aa, synthetic construct
RGDTVRE

SEQ ID NO: 19576 - protein, 7 aa, synthetic construct
RGDVAIK

SEQ ID NO: 19577 - protein, 7 aa, synthetic construct
RGDVAQA

SEQ ID NO: 19578 - protein, 7 aa, synthetic construct
RGDDIGS

SEQ ID NO: 19579 - protein, 7 aa, synthetic construct
RGDVGGH

SEQ ID NO: 19580 - protein, 7 aa, synthetic construct
RGDVHHK

SEQ ID NO: 19581 - protein, 7 aa, synthetic construct
RGDVHTA

SEQ ID NO: 19582 - protein, 7 aa, synthetic construct
RGDVHTN

SEQ ID NO: 19583 - protein, 7 aa, synthetic construct
RGDVIKE

SEQ ID NO: 19584 - protein, 7 aa, synthetic construct
RGDVINS

SEQ ID NO: 19585 - protein, 7 aa, synthetic construct
RGDVIRE

SEQ ID NO: 19586 - protein, 7 aa, synthetic construct
RGDVIVF

SEQ ID NO: 19587 - protein, 7 aa, synthetic construct
RGDVLQT

SEQ ID NO: 19588 - protein, 7 aa, synthetic construct
RGDVNTS

SEQ ID NO: 19589 - protein, 7 aa, synthetic construct
RGDVSFL

SEQ ID NO: 19590 - protein, 7 aa, synthetic construct
RGDVSFN

SEQ ID NO: 19591 - protein, 7 aa, synthetic construct
RGDVSNG

SEQ ID NO: 19592 - protein, 7 aa, synthetic construct
RGDVSRS

SEQ ID NO: 19593 - protein, 7 aa, synthetic construct
RGDVVVN

SEQ ID NO: 19594 - protein, 7 aa, synthetic construct
RGDDLNE

SEQ ID NO: 19595 - protein, 7 aa, synthetic construct
RGDDRTK

SEQ ID NO: 19596 - protein, 7 aa, synthetic construct
RGDDSEG

SEQ ID NO: 19597 - protein, 7 aa, synthetic construct
RGDDSTA

SEQ ID NO: 19598 - protein, 7 aa, synthetic construct
RGDDSTL

SEQ ID NO: 19599 - protein, 7 aa, synthetic construct
RGDAERV

SEQ ID NO: 19600 - protein, 7 aa, synthetic construct
RGDDVKT

SEQ ID NO: 19601 - protein, 7 aa, synthetic construct
RGDDVRN

SEQ ID NO: 19602 - protein, 7 aa, synthetic construct
RGDAEVQ

SEQ ID NO: 19603 - protein, 7 aa, synthetic construct
RGDDVTL

SEQ ID NO: 19604 - protein, 7 aa, synthetic construct
RGDEAGE

SEQ ID NO: 19605 - protein, 7 aa, synthetic construct
RGDEAHL

SEQ ID NO: 19606 - protein, 7 aa, synthetic construct
RGDEAKS

SEQ ID NO: 19607 - protein, 7 aa, synthetic construct
RGDEDQI

SEQ ID NO: 19608 - protein, 7 aa, synthetic construct
RGDEELT

SEQ ID NO: 19609 - protein, 7 aa, synthetic construct
RGDEHNL

SEQ ID NO: 19610 - protein, 7 aa, synthetic construct
RGDEHQV

SEQ ID NO: 19611 - protein, 7 aa, synthetic construct
RGDEHRV

SEQ ID NO: 19612 - protein, 7 aa, synthetic construct
RGDEIKI

SEQ ID NO: 19613 - protein, 7 aa, synthetic construct
RGDEKHN

SEQ ID NO: 19614 - protein, 7 aa, synthetic construct
RGDAFSK

SEQ ID NO: 19615 - protein, 7 aa, synthetic construct
RGDENHS

SEQ ID NO: 19616 - protein, 7 aa, synthetic construct
RGDEQAQ

SEQ ID NO: 19617 - protein, 7 aa, synthetic construct
RGDEQRT

SEQ ID NO: 19618 - protein, 7 aa, synthetic construct
RGDERQK

SEQ ID NO: 19619 - protein, 7 aa, synthetic construct
RGDERTV

SEQ ID NO: 19620 - protein, 7 aa, synthetic construct
RGDESFR

SEQ ID NO: 19621 - protein, 7 aa, synthetic construct
RGDESQL

SEQ ID NO: 19622 - protein, 7 aa, synthetic construct
RGDAGHE

SEQ ID NO: 19623 - protein, 7 aa, synthetic construct
RGDETRH

SEQ ID NO: 19624 - protein, 7 aa, synthetic construct
RGDEVGT

SEQ ID NO: 19625 - protein, 7 aa, synthetic construct
RGDEVKH

SEQ ID NO: 19626 - protein, 7 aa, synthetic construct
RGDFADG

SEQ ID NO: 19627 - protein, 7 aa, synthetic construct
RGDFAHD

SEQ ID NO: 19628 - protein, 7 aa, synthetic construct
RGDFAKF

SEQ ID NO: 19629 - protein, 7 aa, synthetic construct
RGDFAQH

SEQ ID NO: 19630 - protein, 7 aa, synthetic construct
RGDFARL

SEQ ID NO: 19631 - protein, 7 aa, synthetic construct
RGDAAIT

SEQ ID NO: 19632 - protein, 7 aa, synthetic construct
RGDFDTI

SEQ ID NO: 19633 - protein, 7 aa, synthetic construct
RGDFEAR

SEQ ID NO: 19634 - protein, 7 aa, synthetic construct
RGDFEEI

SEQ ID NO: 19635 - protein, 7 aa, synthetic construct
RGDFEGL

SEQ ID NO: 19636 - protein, 7 aa, synthetic construct
RGDFFNN

SEQ ID NO: 19637 - protein, 7 aa, synthetic construct
RGDFFNS

SEQ ID NO: 19638 - protein, 7 aa, synthetic construct
RGDFHFI

SEQ ID NO: 19639 - protein, 7 aa, synthetic construct
RGDFHGA

SEQ ID NO: 19640 - protein, 7 aa, synthetic construct
RGDFIQG

SEQ ID NO: 19641 - protein, 7 aa, synthetic construct
RGDFKDT

SEQ ID NO: 19642 - protein, 7 aa, synthetic construct
RGDFKVK

SEQ ID NO: 19643 - protein, 7 aa, synthetic construct
RGDFLES

SEQ ID NO: 19644 - protein, 7 aa, synthetic construct
RGDFQGN

SEQ ID NO: 19645 - protein, 7 aa, synthetic construct
RGDFQSL

SEQ ID NO: 19646 - protein, 7 aa, synthetic construct
RGDFRLI

SEQ ID NO: 19647 - protein, 7 aa, synthetic construct
RGDFSIA

SEQ ID NO: 19648 - protein, 7 aa, synthetic construct
RGDFTFI

SEQ ID NO: 19649 - protein, 7 aa, synthetic construct
RGDGATV

SEQ ID NO: 19650 - protein, 7 aa, synthetic construct
RGDGAVQ

SEQ ID NO: 19651 - protein, 7 aa, synthetic construct
RGDAIDR

SEQ ID NO: 19652 - protein, 7 aa, synthetic construct
RGDGEAS

SEQ ID NO: 19653 - protein, 7 aa, synthetic construct
RGDGEGH

SEQ ID NO: 19654 - protein, 7 aa, synthetic construct
RGDGFAL

SEQ ID NO: 19655 - protein, 7 aa, synthetic construct
RGDGFFT

SEQ ID NO: 19656 - protein, 7 aa, synthetic construct
RGDGFNG

SEQ ID NO: 19657 - protein, 7 aa, synthetic construct
RGDGGDN

SEQ ID NO: 19658 - protein, 7 aa, synthetic construct
RGDGGFT

SEQ ID NO: 19659 - protein, 7 aa, synthetic construct
RGDGHAI

SEQ ID NO: 19660 - protein, 7 aa, synthetic construct
RGDGIIL

SEQ ID NO: 19661 - protein, 7 aa, synthetic construct
RGDGKDI

SEQ ID NO: 19662 - protein, 7 aa, synthetic construct
RGDGKNV

SEQ ID NO: 19663 - protein, 7 aa, synthetic construct
RGDGLNR

SEQ ID NO: 19664 - protein, 7 aa, synthetic construct
RGDGLTN

SEQ ID NO: 19665 - protein, 7 aa, synthetic construct
RGDGNTV

SEQ ID NO: 19666 - protein, 7 aa, synthetic construct
RGDGQNH

SEQ ID NO: 19667 - protein, 7 aa, synthetic construct
RGDGRTS

SEQ ID NO: 19668 - protein, 7 aa, synthetic construct
RGDGSAF

SEQ ID NO: 19669 - protein, 7 aa, synthetic construct
RGDAKFE

SEQ ID NO: 19670 - protein, 7 aa, synthetic construct
RGDGVSE

SEQ ID NO: 19671 - protein, 7 aa, synthetic construct
RGDHADK

SEQ ID NO: 19672 - protein, 7 aa, synthetic construct
RGDHAGS

SEQ ID NO: 19673 - protein, 7 aa, synthetic construct
RGDHDKN

SEQ ID NO: 19674 - protein, 7 aa, synthetic construct
RGDHDRQ

SEQ ID NO: 19675 - protein, 7 aa, synthetic construct
RGDHDSE

SEQ ID NO: 19676 - protein, 7 aa, synthetic construct
RGDHGDN

SEQ ID NO: 19677 - protein, 7 aa, synthetic construct
RGDHGHI

SEQ ID NO: 19678 - protein, 7 aa, synthetic construct
RGDAKVH

SEQ ID NO: 19679 - protein, 7 aa, synthetic construct
RGDHHNQ

SEQ ID NO: 19680 - protein, 7 aa, synthetic construct
RGDHLVF

SEQ ID NO: 19681 - protein, 7 aa, synthetic construct
RGDHNHK

SEQ ID NO: 19682 - protein, 7 aa, synthetic construct
RGDHNLG

SEQ ID NO: 19683 - protein, 7 aa, synthetic construct
RGDHQKQ

SEQ ID NO: 19684 - protein, 7 aa, synthetic construct
RGDHRDG

SEQ ID NO: 19685 - protein, 7 aa, synthetic construct
RGDHRHS

SEQ ID NO: 19686 - protein, 7 aa, synthetic construct
RGDHRQA

SEQ ID NO: 19687 - protein, 7 aa, synthetic construct
RGDHSIF

SEQ ID NO: 19688 - protein, 7 aa, synthetic construct
RGDHTRF

SEQ ID NO: 19689 - protein, 7 aa, synthetic construct
RGDHTTE

SEQ ID NO: 19690 - protein, 7 aa, synthetic construct
RGDIAEI

SEQ ID NO: 19691 - protein, 7 aa, synthetic construct
RGDIAHR

SEQ ID NO: 19692 - protein, 7 aa, synthetic construct
RGDIDGK

SEQ ID NO: 19693 - protein, 7 aa, synthetic construct
RGDIDNH

SEQ ID NO: 19694 - protein, 7 aa, synthetic construct
RGDIDTN

SEQ ID NO: 19695 - protein, 7 aa, synthetic construct
RGDIEKE

SEQ ID NO: 19696 - protein, 7 aa, synthetic construct
RGDIEVA

SEQ ID NO: 19697 - protein, 7 aa, synthetic construct
RGDIFAF

SEQ ID NO: 19698 - protein, 7 aa, synthetic construct
RGDANHA

SEQ ID NO: 19699 - protein, 7 aa, synthetic construct
RGDIFHV

SEQ ID NO: 19700 - protein, 7 aa, synthetic construct
RGDIFLH

SEQ ID NO: 19701 - protein, 7 aa, synthetic construct
RGDIGGG

SEQ ID NO: 19702 - protein, 7 aa, synthetic construct
RGDIHTS

SEQ ID NO: 19703 - protein, 7 aa, synthetic construct
RGDIIGF

SEQ ID NO: 19704 - protein, 7 aa, synthetic construct
RGDIKDT

SEQ ID NO: 19705 - protein, 7 aa, synthetic construct
RGDIKES

SEQ ID NO: 19706 - protein, 7 aa, synthetic construct
RGDILGS

SEQ ID NO: 19707 - protein, 7 aa, synthetic construct
RGDILIS

SEQ ID NO: 19708 - protein, 7 aa, synthetic construct
RGDILLI

SEQ ID NO: 19709 - protein, 7 aa, synthetic construct
RGDINLF

SEQ ID NO: 19710 - protein, 7 aa, synthetic construct
RGDINSF

SEQ ID NO: 19711 - protein, 7 aa, synthetic construct
RGDANVR

SEQ ID NO: 19712 - protein, 7 aa, synthetic construct
RGDINTH

SEQ ID NO: 19713 - protein, 7 aa, synthetic construct
RGDIQLK

SEQ ID NO: 19714 - protein, 7 aa, synthetic construct
RGDIQQH

SEQ ID NO: 19715 - protein, 7 aa, synthetic construct
RGDIRGS

SEQ ID NO: 19716 - protein, 7 aa, synthetic construct
RGDIRRV

SEQ ID NO: 19717 - protein, 7 aa, synthetic construct
RGDISID

SEQ ID NO: 19718 - protein, 7 aa, synthetic construct
RGDISKF

SEQ ID NO: 19719 - protein, 7 aa, synthetic construct
RGDISSL

SEQ ID NO: 19720 - protein, 7 aa, synthetic construct
RGDITDQ

SEQ ID NO: 19721 - protein, 7 aa, synthetic construct
RGDITSG

SEQ ID NO: 19722 - protein, 7 aa, synthetic construct
RGDITSH

SEQ ID NO: 19723 - protein, 7 aa, synthetic construct
RGDIVGN

SEQ ID NO: 19724 - protein, 7 aa, synthetic construct
RGDIVIT

SEQ ID NO: 19725 - protein, 7 aa, synthetic construct
RGDAQKH

SEQ ID NO: 19726 - protein, 7 aa, synthetic construct
RGDKDID

SEQ ID NO: 19727 - protein, 7 aa, synthetic construct
RGDAQNS

SEQ ID NO: 19728 - protein, 7 aa, synthetic construct
RGDKENN

SEQ ID NO: 19729 - protein, 7 aa, synthetic construct
RGDKGEV

SEQ ID NO: 19730 - protein, 7 aa, synthetic construct
RGDKGIG

SEQ ID NO: 19731 - protein, 7 aa, synthetic construct
RGDARDK

SEQ ID NO: 19732 - protein, 7 aa, synthetic construct
RGDKIGQ

SEQ ID NO: 19733 - protein, 7 aa, synthetic construct
RGDKLTR

SEQ ID NO: 19734 - protein, 7 aa, synthetic construct
RGDKQFS

SEQ ID NO: 19735 - protein, 7 aa, synthetic construct
RGDKSHN

SEQ ID NO: 19736 - protein, 7 aa, synthetic construct
RGDKVHL

SEQ ID NO: 19737 - protein, 7 aa, synthetic construct
RGDKVKA

SEQ ID NO: 19738 - protein, 7 aa, synthetic construct
RGDKVLT

SEQ ID NO: 19739 - protein, 7 aa, synthetic construct
RGDKVSN

SEQ ID NO: 19740 - protein, 7 aa, synthetic construct
RGDLAHR

SEQ ID NO: 19741 - protein, 7 aa, synthetic construct
RGDLDQK

SEQ ID NO: 19742 - protein, 7 aa, synthetic construct
RGDLDSL

SEQ ID NO: 19743 - protein, 7 aa, synthetic construct
RGDLEFA

SEQ ID NO: 19744 - protein, 7 aa, synthetic construct
RGDASFL

SEQ ID NO: 19745 - protein, 7 aa, synthetic construct
RGDLFHS

SEQ ID NO: 19746 - protein, 7 aa, synthetic construct
RGDLGST

SEQ ID NO: 19747 - protein, 7 aa, synthetic construct
RGDLHDF

SEQ ID NO: 19748 - protein, 7 aa, synthetic construct
RGDLITI

SEQ ID NO: 19749 - protein, 7 aa, synthetic construct
RGDLKHV

SEQ ID NO: 19750 - protein, 7 aa, synthetic construct
RGDLKLH

SEQ ID NO: 19751 - protein, 7 aa, synthetic construct
RGDLKRA

SEQ ID NO: 19752 - protein, 7 aa, synthetic construct
RGDLLAV

SEQ ID NO: 19753 - protein, 7 aa, synthetic construct
RGDLLET

SEQ ID NO: 19754 - protein, 7 aa, synthetic construct
RGDLLNA

SEQ ID NO: 19755 - protein, 7 aa, synthetic construct
RGDLNER

SEQ ID NO: 19756 - protein, 7 aa, synthetic construct
RGDLNFG

SEQ ID NO: 19757 - protein, 7 aa, synthetic construct
RGDLNQS

SEQ ID NO: 19758 - protein, 7 aa, synthetic construct
RGDLQDN

SEQ ID NO: 19759 - protein, 7 aa, synthetic construct
RGDLRAH

SEQ ID NO: 19760 - protein, 7 aa, synthetic construct
RGDLSRQ

SEQ ID NO: 19761 - protein, 7 aa, synthetic construct
RGDLTRV

SEQ ID NO: 19762 - protein, 7 aa, synthetic construct
RGDLTTD

SEQ ID NO: 19763 - protein, 7 aa, synthetic construct
RGDLVKH

SEQ ID NO: 19764 - protein, 7 aa, synthetic construct
RGDNAQK

SEQ ID NO: 19765 - protein, 7 aa, synthetic construct
RGDNDFS

SEQ ID NO: 19766 - protein, 7 aa, synthetic construct
RGDNETI

SEQ ID NO: 19767 - protein, 7 aa, synthetic construct
RGDNFFG

SEQ ID NO: 19768 - protein, 7 aa, synthetic construct
RGDNFFQ

SEQ ID NO: 19769 - protein, 7 aa, synthetic construct
RGDNGVS

SEQ ID NO: 19770 - protein, 7 aa, synthetic construct
RGDNHNN

SEQ ID NO: 19771 - protein, 7 aa, synthetic construct
RGDNHTR

SEQ ID NO: 19772 - protein, 7 aa, synthetic construct
RGDAVDI

SEQ ID NO: 19773 - protein, 7 aa, synthetic construct
RGDAVDN

SEQ ID NO: 19774 - protein, 7 aa, synthetic construct
RGDAVGL

SEQ ID NO: 19775 - protein, 7 aa, synthetic construct
RGDNLNN

SEQ ID NO: 19776 - protein, 7 aa, synthetic construct
RGDNLSH

SEQ ID NO: 19777 - protein, 7 aa, synthetic construct
RGDAVKD

SEQ ID NO: 19778 - protein, 7 aa, synthetic construct
RGDNQGK

SEQ ID NO: 19779 - protein, 7 aa, synthetic construct
RGDNQTQ

SEQ ID NO: 19780 - protein, 7 aa, synthetic construct
RGDNQVL

SEQ ID NO: 19781 - protein, 7 aa, synthetic construct
RGDNRHR

SEQ ID NO: 19782 - protein, 7 aa, synthetic construct
RGDAVSR

SEQ ID NO: 19783 - protein, 7 aa, synthetic construct
RGDNVER

SEQ ID NO: 19784 - protein, 7 aa, synthetic construct
RGDNVEV

SEQ ID NO: 19785 - protein, 7 aa, synthetic construct
RGDNVIL

SEQ ID NO: 19786 - protein, 7 aa, synthetic construct
RGDQAET

SEQ ID NO: 19787 - protein, 7 aa, synthetic construct
RGDQAFA

SEQ ID NO: 19788 - protein, 7 aa, synthetic construct
RGDQDTG

SEQ ID NO: 19789 - protein, 7 aa, synthetic construct
RGDQENN

SEQ ID NO: 19790 - protein, 7 aa, synthetic construct
RGDQENV

SEQ ID NO: 19791 - protein, 7 aa, synthetic construct
RGDQEQV

SEQ ID NO: 19792 - protein, 7 aa, synthetic construct
RGDQEVI

SEQ ID NO: 19793 - protein, 7 aa, synthetic construct
RGDQFFF

SEQ ID NO: 19794 - protein, 7 aa, synthetic construct
RGDQGFA

SEQ ID NO: 19795 - protein, 7 aa, synthetic construct
RGDQHDQ

SEQ ID NO: 19796 - protein, 7 aa, synthetic construct
RGDQHQG

SEQ ID NO: 19797 - protein, 7 aa, synthetic construct
RGDQHQQ

SEQ ID NO: 19798 - protein, 7 aa, synthetic construct
RGDQKEA

SEQ ID NO: 19799 - protein, 7 aa, synthetic construct
RGDQKFN

SEQ ID NO: 19800 - protein, 7 aa, synthetic construct
RGDQKII

SEQ ID NO: 19801 - protein, 7 aa, synthetic construct
RGDQLAR

SEQ ID NO: 19802 - protein, 7 aa, synthetic construct
RGDQLGL

SEQ ID NO: 19803 - protein, 7 aa, synthetic construct
RGDQNFE

SEQ ID NO: 19804 - protein, 7 aa, synthetic construct
RGDQNRE

SEQ ID NO: 19805 - protein, 7 aa, synthetic construct
RGDDDDV

SEQ ID NO: 19806 - protein, 7 aa, synthetic construct
RGDQRQL

SEQ ID NO: 19807 - protein, 7 aa, synthetic construct
RGDQTTS

SEQ ID NO: 19808 - protein, 7 aa, synthetic construct
RGDQVFE

SEQ ID NO: 19809 - protein, 7 aa, synthetic construct
RGDRAEH

SEQ ID NO: 19810 - protein, 7 aa, synthetic construct
RGDRAIN

SEQ ID NO: 19811 - protein, 7 aa, synthetic construct
RGDRAIQ

SEQ ID NO: 19812 - protein, 7 aa, synthetic construct
RGDRDLL

SEQ ID NO: 19813 - protein, 7 aa, synthetic construct
RGDRHIS

SEQ ID NO: 19814 - protein, 7 aa, synthetic construct
RGDRIQN

SEQ ID NO: 19815 - protein, 7 aa, synthetic construct
RGDRNEF

SEQ ID NO: 19816 - protein, 7 aa, synthetic construct
RGDRQEN

SEQ ID NO: 19817 - protein, 7 aa, synthetic construct
RGDRQET

SEQ ID NO: 19818 - protein, 7 aa, synthetic construct
RGDRQLF

SEQ ID NO: 19819 - protein, 7 aa, synthetic construct
RGDRSHF

SEQ ID NO: 19820 - protein, 7 aa, synthetic construct
RGDRTIL

SEQ ID NO: 19821 - protein, 7 aa, synthetic construct
RGDRTQG

SEQ ID NO: 19822 - protein, 7 aa, synthetic construct
RGDRVKG

SEQ ID NO: 19823 - protein, 7 aa, synthetic construct
RGDADRT

SEQ ID NO: 19824 - protein, 7 aa, synthetic construct
RGDSAGT

SEQ ID NO: 19825 - protein, 7 aa, synthetic construct
RGDSAHE

SEQ ID NO: 19826 - protein, 7 aa, synthetic construct
RGDSDGF

SEQ ID NO: 19827 - protein, 7 aa, synthetic construct
RGDSEDQ

SEQ ID NO: 19828 - protein, 7 aa, synthetic construct
RGDSEGN

SEQ ID NO: 19829 - protein, 7 aa, synthetic construct
RGDSENG

SEQ ID NO: 19830 - protein, 7 aa, synthetic construct
RGDSFVR

SEQ ID NO: 19831 - protein, 7 aa, synthetic construct
RGDSGFV

SEQ ID NO: 19832 - protein, 7 aa, synthetic construct
RGDSGLV

SEQ ID NO: 19833 - protein, 7 aa, synthetic construct
RGDSHNT

SEQ ID NO: 19834 - protein, 7 aa, synthetic construct
RGDSIEV

SEQ ID NO: 19835 - protein, 7 aa, synthetic construct
RGDSITR

SEQ ID NO: 19836 - protein, 7 aa, synthetic construct
RGDSLLV

SEQ ID NO: 19837 - protein, 7 aa, synthetic construct
RGDSLRK

SEQ ID NO: 19838 - protein, 7 aa, synthetic construct
RGDSLSV

SEQ ID NO: 19839 - protein, 7 aa, synthetic construct
RGDSLTT

SEQ ID NO: 19840 - protein, 7 aa, synthetic construct
RGDSNFD

SEQ ID NO: 19841 - protein, 7 aa, synthetic construct
RGDSNQT

SEQ ID NO: 19842 - protein, 7 aa, synthetic construct
RGDSNVF

SEQ ID NO: 19843 - protein, 7 aa, synthetic construct
RGDSQDI

SEQ ID NO: 19844 - protein, 7 aa, synthetic construct
RGDSSAL

SEQ ID NO: 19845 - protein, 7 aa, synthetic construct
RGDSSAS

SEQ ID NO: 19846 - protein, 7 aa, synthetic construct
RGDSSES

SEQ ID NO: 19847 - protein, 7 aa, synthetic construct
RGDSTVH

SEQ ID NO: 19848 - protein, 7 aa, synthetic construct
RGDSVAT

SEQ ID NO: 19849 - protein, 7 aa, synthetic construct
RGDDGII

SEQ ID NO: 19850 - protein, 7 aa, synthetic construct
RGDSVKA

SEQ ID NO: 19851 - protein, 7 aa, synthetic construct
RGDTAGQ

SEQ ID NO: 19852 - protein, 7 aa, synthetic construct
RGDTASF

SEQ ID NO: 19853 - protein, 7 aa, synthetic construct
RGDTDIF

SEQ ID NO: 19854 - protein, 7 aa, synthetic construct
RGDTFRT

SEQ ID NO: 19855 - protein, 7 aa, synthetic construct
RGDTGAL

SEQ ID NO: 19856 - protein, 7 aa, synthetic construct
RGDTGHE

SEQ ID NO: 19857 - protein, 7 aa, synthetic construct
RGDTGVN

SEQ ID NO: 19858 - protein, 7 aa, synthetic construct
RGDTHLQ

SEQ ID NO: 19859 - protein, 7 aa, synthetic construct
RGDTIGI

SEQ ID NO: 19860 - protein, 7 aa, synthetic construct
RGDTIHK

SEQ ID NO: 19861 - protein, 7 aa, synthetic construct
RGDTKKD

SEQ ID NO: 19862 - protein, 7 aa, synthetic construct
RGDTLQL

SEQ ID NO: 19863 - protein, 7 aa, synthetic construct
RGDTNRE

SEQ ID NO: 19864 - protein, 7 aa, synthetic construct
RGDTQQK

SEQ ID NO: 19865 - protein, 7 aa, synthetic construct
RGDTRAH

SEQ ID NO: 19866 - protein, 7 aa, synthetic construct
RGDTRIG

SEQ ID NO: 19867 - protein, 7 aa, synthetic construct
RGDTRVG

SEQ ID NO: 19868 - protein, 7 aa, synthetic construct
RGDTSKV

SEQ ID NO: 19869 - protein, 7 aa, synthetic construct
RGDTSQV

SEQ ID NO: 19870 - protein, 7 aa, synthetic construct
RGDTSRT

SEQ ID NO: 19871 - protein, 7 aa, synthetic construct
RGDTTQE

SEQ ID NO: 19872 - protein, 7 aa, synthetic construct
RGDTVDI

SEQ ID NO: 19873 - protein, 7 aa, synthetic construct
RGDVAIL

SEQ ID NO: 19874 - protein, 7 aa, synthetic construct
RGDVDGR

SEQ ID NO: 19875 - protein, 7 aa, synthetic construct
RGDVDRN

SEQ ID NO: 19876 - protein, 7 aa, synthetic construct
RGDVEIR

SEQ ID NO: 19877 - protein, 7 aa, synthetic construct
RGDVETS

SEQ ID NO: 19878 - protein, 7 aa, synthetic construct
RGDVGEQ

SEQ ID NO: 19879 - protein, 7 aa, synthetic construct
RGDVGKT

SEQ ID NO: 19880 - protein, 7 aa, synthetic construct
RGDDIKT

SEQ ID NO: 19881 - protein, 7 aa, synthetic construct
RGDVIII

SEQ ID NO: 19882 - protein, 7 aa, synthetic construct
RGDVIQK

SEQ ID NO: 19883 - protein, 7 aa, synthetic construct
RGDVKDV

SEQ ID NO: 19884 - protein, 7 aa, synthetic construct
RGDVLFS

SEQ ID NO: 19885 - protein, 7 aa, synthetic construct
RGDVLFT

SEQ ID NO: 19886 - protein, 7 aa, synthetic construct
RGDDITQ

SEQ ID NO: 19887 - protein, 7 aa, synthetic construct
RGDVNHF

SEQ ID NO: 19888 - protein, 7 aa, synthetic construct
RGDDKDG

SEQ ID NO: 19889 - protein, 7 aa, synthetic construct
RGDVSET

SEQ ID NO: 19890 - protein, 7 aa, synthetic construct
RGDVSQT

SEQ ID NO: 19891 - protein, 7 aa, synthetic construct
RGDVTHH

SEQ ID NO: 19892 - protein, 7 aa, synthetic construct
RGDVTHN

SEQ ID NO: 19893 - protein, 7 aa, synthetic construct
RGDVTNQ

SEQ ID NO: 19894 - protein, 7 aa, synthetic construct
RGDVTSE

SEQ ID NO: 19895 - protein, 7 aa, synthetic construct
RGDVTTV

SEQ ID NO: 19896 - protein, 7 aa, synthetic construct
RGDDKNF

SEQ ID NO: 19897 - protein, 7 aa, synthetic construct
RGDDKRH

SEQ ID NO: 19898 - protein, 7 aa, synthetic construct
RGDDLNT

SEQ ID NO: 19899 - protein, 7 aa, synthetic construct
RGDAAFL

SEQ ID NO: 19900 - protein, 7 aa, synthetic construct
RGDDRGT

SEQ ID NO: 19901 - protein, 7 aa, synthetic construct
RGDDRHS

SEQ ID NO: 19902 - protein, 7 aa, synthetic construct
RGDDSHI

SEQ ID NO: 19903 - protein, 7 aa, synthetic construct
RGDDSHN

SEQ ID NO: 19904 - protein, 7 aa, synthetic construct
RGDDTSV

SEQ ID NO: 19905 - protein, 7 aa, synthetic construct
RGDAETV

SEQ ID NO: 19906 - protein, 7 aa, synthetic construct
RGDEAHN

SEQ ID NO: 19907 - protein, 7 aa, synthetic construct
RGDEDNR

SEQ ID NO: 19908 - protein, 7 aa, synthetic construct
RGDEEHT

SEQ ID NO: 19909 - protein, 7 aa, synthetic construct
RGDEFSQ

SEQ ID NO: 19910 - protein, 7 aa, synthetic construct
RGDAFHV

SEQ ID NO: 19911 - protein, 7 aa, synthetic construct
RGDEGKF

SEQ ID NO: 19912 - protein, 7 aa, synthetic construct
RGDEHNI

SEQ ID NO: 19913 - protein, 7 aa, synthetic construct
RGDEINR

SEQ ID NO: 19914 - protein, 7 aa, synthetic construct
RGDEKEI

SEQ ID NO: 19915 - protein, 7 aa, synthetic construct
RGDEKHD

SEQ ID NO: 19916 - protein, 7 aa, synthetic construct
RGDEKST

SEQ ID NO: 19917 - protein, 7 aa, synthetic construct
RGDELGR

SEQ ID NO: 19918 - protein, 7 aa, synthetic construct
RGDENGE

SEQ ID NO: 19919 - protein, 7 aa, synthetic construct
RGDAFVK

SEQ ID NO: 19920 - protein, 7 aa, synthetic construct
RGDENTV

SEQ ID NO: 19921 - protein, 7 aa, synthetic construct
RGDAGAT

SEQ ID NO: 19922 - protein, 7 aa, synthetic construct
RGDERIV

SEQ ID NO: 19923 - protein, 7 aa, synthetic construct
RGDERNN

SEQ ID NO: 19924 - protein, 7 aa, synthetic construct
RGDESHA

SEQ ID NO: 19925 - protein, 7 aa, synthetic construct
RGDETFQ

SEQ ID NO: 19926 - protein, 7 aa, synthetic construct
RGDETGN

SEQ ID NO: 19927 - protein, 7 aa, synthetic construct
RGDETKI

SEQ ID NO: 19928 - protein, 7 aa, synthetic construct
RGDEVQQ

SEQ ID NO: 19929 - protein, 7 aa, synthetic construct
RGDFAAT

SEQ ID NO: 19930 - protein, 7 aa, synthetic construct
RGDFALV

SEQ ID NO: 19931 - protein, 7 aa, synthetic construct
RGDAGRH

SEQ ID NO: 19932 - protein, 7 aa, synthetic construct
RGDFFIF

SEQ ID NO: 19933 - protein, 7 aa, synthetic construct
RGDFFQA

SEQ ID NO: 19934 - protein, 7 aa, synthetic construct
RGDFFRI

SEQ ID NO: 19935 - protein, 7 aa, synthetic construct
RGDFIVQ

SEQ ID NO: 19936 - protein, 7 aa, synthetic construct
RGDFKTI

SEQ ID NO: 19937 - protein, 7 aa, synthetic construct
RGDFLAN

SEQ ID NO: 19938 - protein, 7 aa, synthetic construct
RGDFLNG

SEQ ID NO: 19939 - protein, 7 aa, synthetic construct
RGDFNAT

SEQ ID NO: 19940 - protein, 7 aa, synthetic construct
RGDFQGF

SEQ ID NO: 19941 - protein, 7 aa, synthetic construct
RGDFREF

SEQ ID NO: 19942 - protein, 7 aa, synthetic construct
RGDFRFN

SEQ ID NO: 19943 - protein, 7 aa, synthetic construct
RGDFTAG

SEQ ID NO: 19944 - protein, 7 aa, synthetic construct
RGDFTGH

SEQ ID NO: 19945 - protein, 7 aa, synthetic construct
RGDFTNR

SEQ ID NO: 19946 - protein, 7 aa, synthetic construct
RGDFTQA

SEQ ID NO: 19947 - protein, 7 aa, synthetic construct
RGDFTVF

SEQ ID NO: 19948 - protein, 7 aa, synthetic construct
RGDGAHT

SEQ ID NO: 19949 - protein, 7 aa, synthetic construct
RGDGAVV

SEQ ID NO: 19950 - protein, 7 aa, synthetic construct
RGDGDHV

SEQ ID NO: 19951 - protein, 7 aa, synthetic construct
RGDGDNN

SEQ ID NO: 19952 - protein, 7 aa, synthetic construct
RGDGDRK

SEQ ID NO: 19953 - protein, 7 aa, synthetic construct
RGDGFFK

SEQ ID NO: 19954 - protein, 7 aa, synthetic construct
RGDGFFQ

SEQ ID NO: 19955 - protein, 7 aa, synthetic construct
RGDGGEH

SEQ ID NO: 19956 - protein, 7 aa, synthetic construct
RGDGGER

SEQ ID NO: 19957 - protein, 7 aa, synthetic construct
RGDGHLT

SEQ ID NO: 19958 - protein, 7 aa, synthetic construct
RGDGISH

SEQ ID NO: 19959 - protein, 7 aa, synthetic construct
RGDGLGN

SEQ ID NO: 19960 - protein, 7 aa, synthetic construct
RGDGLTG

SEQ ID NO: 19961 - protein, 7 aa, synthetic construct
RGDGNNF

SEQ ID NO: 19962 - protein, 7 aa, synthetic construct
RGDAIVV

SEQ ID NO: 19963 - protein, 7 aa, synthetic construct
RGDGSGD

SEQ ID NO: 19964 - protein, 7 aa, synthetic construct
RGDGTHF

SEQ ID NO: 19965 - protein, 7 aa, synthetic construct
RGDGTSQ

SEQ ID NO: 19966 - protein, 7 aa, synthetic construct
RGDGVSK

SEQ ID NO: 19967 - protein, 7 aa, synthetic construct
RGDHDRI

SEQ ID NO: 19968 - protein, 7 aa, synthetic construct
RGDHDVG

SEQ ID NO: 19969 - protein, 7 aa, synthetic construct
RGDHDVH

SEQ ID NO: 19970 - protein, 7 aa, synthetic construct
RGDHEEK

SEQ ID NO: 19971 - protein, 7 aa, synthetic construct
RGDHEQH

SEQ ID NO: 19972 - protein, 7 aa, synthetic construct
RGDHEQV

SEQ ID NO: 19973 - protein, 7 aa, synthetic construct
RGDHETR

SEQ ID NO: 19974 - protein, 7 aa, synthetic construct
RGDHFTK

SEQ ID NO: 19975 - protein, 7 aa, synthetic construct
RGDHHHN

SEQ ID NO: 19976 - protein, 7 aa, synthetic construct
RGDHIAV

SEQ ID NO: 19977 - protein, 7 aa, synthetic construct
RGDHIHR

SEQ ID NO: 19978 - protein, 7 aa, synthetic construct
RGDHIKI

SEQ ID NO: 19979 - protein, 7 aa, synthetic construct
RGDHKRD

SEQ ID NO: 19980 - protein, 7 aa, synthetic construct
RGDHNGS

SEQ ID NO: 19981 - protein, 7 aa, synthetic construct
RGDHNLT

SEQ ID NO: 19982 - protein, 7 aa, synthetic construct
RGDHNRS

SEQ ID NO: 19983 - protein, 7 aa, synthetic construct
RGDHQGK

SEQ ID NO: 19984 - protein, 7 aa, synthetic construct
RGDHREK

SEQ ID NO: 19985 - protein, 7 aa, synthetic construct
RGDHRNG

SEQ ID NO: 19986 - protein, 7 aa, synthetic construct
RGDHSFS

SEQ ID NO: 19987 - protein, 7 aa, synthetic construct
RGDALST

SEQ ID NO: 19988 - protein, 7 aa, synthetic construct
RGDHVDN

SEQ ID NO: 19989 - protein, 7 aa, synthetic construct
RGDHVFT

SEQ ID NO: 19990 - protein, 7 aa, synthetic construct
RGDALVL

SEQ ID NO: 19991 - protein, 7 aa, synthetic construct
RGDIDLQ

SEQ ID NO: 19992 - protein, 7 aa, synthetic construct
RGDIENF

SEQ ID NO: 19993 - protein, 7 aa, synthetic construct
RGDANFT

SEQ ID NO: 19994 - protein, 7 aa, synthetic construct
RGDIEQN

SEQ ID NO: 19995 - protein, 7 aa, synthetic construct
RGDIESL

SEQ ID NO: 19996 - protein, 7 aa, synthetic construct
RGDANKA

SEQ ID NO: 19997 - protein, 7 aa, synthetic construct
RGDIGQS

SEQ ID NO: 19998 - protein, 7 aa, synthetic construct
RGDIGRV

SEQ ID NO: 19999 - protein, 7 aa, synthetic construct
RGDIIAL

SEQ ID NO: 20000 - protein, 7 aa, synthetic construct
RGDIIKR

SEQ ID NO: 20001 - protein, 7 aa, synthetic construct
RGDIING

SEQ ID NO: 20002 - protein, 7 aa, synthetic construct
RGDIITQ

SEQ ID NO: 20003 - protein, 7 aa, synthetic construct
RGDIKKD

SEQ ID NO: 20004 - protein, 7 aa, synthetic construct
RGDIKQF

SEQ ID NO: 20005 - protein, 7 aa, synthetic construct
RGDIKSA

SEQ ID NO: 20006 - protein, 7 aa, synthetic construct
RGDILAN

SEQ ID NO: 20007 - protein, 7 aa, synthetic construct
RGDILHR

SEQ ID NO: 20008 - protein, 7 aa, synthetic construct
RGDILSR

SEQ ID NO: 20009 - protein, 7 aa, synthetic construct
RGDINFV

SEQ ID NO: 20010 - protein, 7 aa, synthetic construct
RGDIQGG

SEQ ID NO: 20011 - protein, 7 aa, synthetic construct
RGDIRDI

SEQ ID NO: 20012 - protein, 7 aa, synthetic construct
RGDIRRS

SEQ ID NO: 20013 - protein, 7 aa, synthetic construct
RGDISDT

SEQ ID NO: 20014 - protein, 7 aa, synthetic construct
RGDITAT

SEQ ID NO: 20015 - protein, 7 aa, synthetic construct
RGDIVEA

SEQ ID NO: 20016 - protein, 7 aa, synthetic construct
RGDIVER

SEQ ID NO: 20017 - protein, 7 aa, synthetic construct
RGDIVLD

SEQ ID NO: 20018 - protein, 7 aa, synthetic construct
RGDIVLQ

SEQ ID NO: 20019 - protein, 7 aa, synthetic construct
RGDIVLR

SEQ ID NO: 20020 - protein, 7 aa, synthetic construct
RGDKAQN

SEQ ID NO: 20021 - protein, 7 aa, synthetic construct
RGDKFLN

SEQ ID NO: 20022 - protein, 7 aa, synthetic construct
RGDKGGE

SEQ ID NO: 20023 - protein, 7 aa, synthetic construct
RGDKGSH

SEQ ID NO: 20024 - protein, 7 aa, synthetic construct
RGDKHQS

SEQ ID NO: 20025 - protein, 7 aa, synthetic construct
RGDKHSE

SEQ ID NO: 20026 - protein, 7 aa, synthetic construct
RGDARDQ

SEQ ID NO: 20027 - protein, 7 aa, synthetic construct
RGDKIEL

SEQ ID NO: 20028 - protein, 7 aa, synthetic construct
RGDKIIN

SEQ ID NO: 20029 - protein, 7 aa, synthetic construct
RGDKKRS

SEQ ID NO: 20030 - protein, 7 aa, synthetic construct
RGDKLHS

SEQ ID NO: 20031 - protein, 7 aa, synthetic construct
RGDKNRA

SEQ ID NO: 20032 - protein, 7 aa, synthetic construct
RGDKQLK

SEQ ID NO: 20033 - protein, 7 aa, synthetic construct
RGDKRLT

SEQ ID NO: 20034 - protein, 7 aa, synthetic construct
RGDKVAI

SEQ ID NO: 20035 - protein, 7 aa, synthetic construct
RGDADES

SEQ ID NO: 20036 - protein, 7 aa, synthetic construct
RGDLAEQ

SEQ ID NO: 20037 - protein, 7 aa, synthetic construct
RGDLARF

SEQ ID NO: 20038 - protein, 7 aa, synthetic construct
RGDLELI

SEQ ID NO: 20039 - protein, 7 aa, synthetic construct
RGDLESQ

SEQ ID NO: 20040 - protein, 7 aa, synthetic construct
RGDLGFF

SEQ ID NO: 20041 - protein, 7 aa, synthetic construct
RGDLGRH

SEQ ID NO: 20042 - protein, 7 aa, synthetic construct
RGDLHKQ

SEQ ID NO: 20043 - protein, 7 aa, synthetic construct
RGDLIAR

SEQ ID NO: 20044 - protein, 7 aa, synthetic construct
RGDLIHE

SEQ ID NO: 20045 - protein, 7 aa, synthetic construct
RGDLIKS

SEQ ID NO: 20046 - protein, 7 aa, synthetic construct
RGDLKAI

SEQ ID NO: 20047 - protein, 7 aa, synthetic construct
RGDLKDR

SEQ ID NO: 20048 - protein, 7 aa, synthetic construct
RGDLKDT

SEQ ID NO: 20049 - protein, 7 aa, synthetic construct
RGDASQT

SEQ ID NO: 20050 - protein, 7 aa, synthetic construct
RGDLKSQ

SEQ ID NO: 20051 - protein, 7 aa, synthetic construct
RGDLLFG

SEQ ID NO: 20052 - protein, 7 aa, synthetic construct
RGDLLIV

SEQ ID NO: 20053 - protein, 7 aa, synthetic construct
RGDLLLF

SEQ ID NO: 20054 - protein, 7 aa, synthetic construct
RGDLLSR

SEQ ID NO: 20055 - protein, 7 aa, synthetic construct
RGDLNAQ

SEQ ID NO: 20056 - protein, 7 aa, synthetic construct
RGDLNNG

SEQ ID NO: 20057 - protein, 7 aa, synthetic construct
RGDLQDQ

SEQ ID NO: 20058 - protein, 7 aa, synthetic construct
RGDLQSE

SEQ ID NO: 20059 - protein, 7 aa, synthetic construct
RGDLRDI

SEQ ID NO: 20060 - protein, 7 aa, synthetic construct
RGDLRNG

SEQ ID NO: 20061 - protein, 7 aa, synthetic construct
RGDLSVK

SEQ ID NO: 20062 - protein, 7 aa, synthetic construct
RGDLSVS

SEQ ID NO: 20063 - protein, 7 aa, synthetic construct
RGDATHE

SEQ ID NO: 20064 - protein, 7 aa, synthetic construct
RGDNAAL

SEQ ID NO: 20065 - protein, 7 aa, synthetic construct
RGDNALN

SEQ ID NO: 20066 - protein, 7 aa, synthetic construct
RGDNDGF

SEQ ID NO: 20067 - protein, 7 aa, synthetic construct
RGDNDSQ

SEQ ID NO: 20068 - protein, 7 aa, synthetic construct
RGDNELR

SEQ ID NO: 20069 - protein, 7 aa, synthetic construct
RGDNEVQ

SEQ ID NO: 20070 - protein, 7 aa, synthetic construct
RGDATSK

SEQ ID NO: 20071 - protein, 7 aa, synthetic construct
RGDNHLI

SEQ ID NO: 20072 - protein, 7 aa, synthetic construct
RGDNHNT

SEQ ID NO: 20073 - protein, 7 aa, synthetic construct
RGDNHVV

SEQ ID NO: 20074 - protein, 7 aa, synthetic construct
RGDNIGN

SEQ ID NO: 20075 - protein, 7 aa, synthetic construct
RGDNKNH

SEQ ID NO: 20076 - protein, 7 aa, synthetic construct
RGDNLFA

SEQ ID NO: 20077 - protein, 7 aa, synthetic construct
RGDNNLK

SEQ ID NO: 20078 - protein, 7 aa, synthetic construct
RGDNNRE

SEQ ID NO: 20079 - protein, 7 aa, synthetic construct
RGDNQKH

SEQ ID NO: 20080 - protein, 7 aa, synthetic construct
RGDNSNS

SEQ ID NO: 20081 - protein, 7 aa, synthetic construct
RGDNVQN

SEQ ID NO: 20082 - protein, 7 aa, synthetic construct
RGDQAFQ

SEQ ID NO: 20083 - protein, 7 aa, synthetic construct
RGDQENT

SEQ ID NO: 20084 - protein, 7 aa, synthetic construct
RGDQFFQ

SEQ ID NO: 20085 - protein, 7 aa, synthetic construct
RGDQIHN

SEQ ID NO: 20086 - protein, 7 aa, synthetic construct
RGDQIIK

SEQ ID NO: 20087 - protein, 7 aa, synthetic construct
RGDQIVF

SEQ ID NO: 20088 - protein, 7 aa, synthetic construct
RGDQKDL

SEQ ID NO: 20089 - protein, 7 aa, synthetic construct
RGDQNGN

SEQ ID NO: 20090 - protein, 7 aa, synthetic construct
RGDQSDS

SEQ ID NO: 20091 - protein, 7 aa, synthetic construct
RGDQSGE

SEQ ID NO: 20092 - protein, 7 aa, synthetic construct
RGDQSSS

SEQ ID NO: 20093 - protein, 7 aa, synthetic construct
RGDQVKD

SEQ ID NO: 20094 - protein, 7 aa, synthetic construct
RGDRETK

SEQ ID NO: 20095 - protein, 7 aa, synthetic construct
RGDRGEA

SEQ ID NO: 20096 - protein, 7 aa, synthetic construct
RGDRHKS

SEQ ID NO: 20097 - protein, 7 aa, synthetic construct
RGDRIFE

SEQ ID NO: 20098 - protein, 7 aa, synthetic construct
RGDSAQL

SEQ ID NO: 20099 - protein, 7 aa, synthetic construct
RGDSDAA

SEQ ID NO: 20100 - protein, 7 aa, synthetic construct
RGDSDIS

SEQ ID NO: 20101 - protein, 7 aa, synthetic construct
RGDSDLL

SEQ ID NO: 20102 - protein, 7 aa, synthetic construct
RGDSDRN

SEQ ID NO: 20103 - protein, 7 aa, synthetic construct
RGDSFVL

SEQ ID NO: 20104 - protein, 7 aa, synthetic construct
RGDSGAS

SEQ ID NO: 20105 - protein, 7 aa, synthetic construct
RGDSGFQ

SEQ ID NO: 20106 - protein, 7 aa, synthetic construct
RGDSGIH

SEQ ID NO: 20107 - protein, 7 aa, synthetic construct
RGDSGVR

SEQ ID NO: 20108 - protein, 7 aa, synthetic construct
RGDSHDS

SEQ ID NO: 20109 - protein, 7 aa, synthetic construct
RGDSHEA

SEQ ID NO: 20110 - protein, 7 aa, synthetic construct
RGDSHVF

SEQ ID NO: 20111 - protein, 7 aa, synthetic construct
RGDSIRF

SEQ ID NO: 20112 - protein, 7 aa, synthetic construct
RGDSISS

SEQ ID NO: 20113 - protein, 7 aa, synthetic construct
RGDSKFQ

SEQ ID NO: 20114 - protein, 7 aa, synthetic construct
RGDSKLF

SEQ ID NO: 20115 - protein, 7 aa, synthetic construct
RGDSKTA

SEQ ID NO: 20116 - protein, 7 aa, synthetic construct
RGDSLFQ

SEQ ID NO: 20117 - protein, 7 aa, synthetic construct
RGDSNDQ

SEQ ID NO: 20118 - protein, 7 aa, synthetic construct
RGDSNDT

SEQ ID NO: 20119 - protein, 7 aa, synthetic construct
RGDSNNF

SEQ ID NO: 20120 - protein, 7 aa, synthetic construct
RGDSQAA

SEQ ID NO: 20121 - protein, 7 aa, synthetic construct
RGDSSNH

SEQ ID NO: 20122 - protein, 7 aa, synthetic construct
RGDSSSL

SEQ ID NO: 20123 - protein, 7 aa, synthetic construct
RGDSVKH

SEQ ID NO: 20124 - protein, 7 aa, synthetic construct
RGDTANG

SEQ ID NO: 20125 - protein, 7 aa, synthetic construct
RGDTDGV

SEQ ID NO: 20126 - protein, 7 aa, synthetic construct
RGDTEKI

SEQ ID NO: 20127 - protein, 7 aa, synthetic construct
RGDTERI

SEQ ID NO: 20128 - protein, 7 aa, synthetic construct
RGDTGIL

SEQ ID NO: 20129 - protein, 7 aa, synthetic construct
RGDTHGQ

SEQ ID NO: 20130 - protein, 7 aa, synthetic construct
RGDTHHS

SEQ ID NO: 20131 - protein, 7 aa, synthetic construct
RGDTKHS

SEQ ID NO: 20132 - protein, 7 aa, synthetic construct
RGDTNIA

SEQ ID NO: 20133 - protein, 7 aa, synthetic construct
RGDTNRS

SEQ ID NO: 20134 - protein, 7 aa, synthetic construct
RGDTQFV

SEQ ID NO: 20135 - protein, 7 aa, synthetic construct
RGDTQVK

SEQ ID NO: 20136 - protein, 7 aa, synthetic construct
RGDTSEK

SEQ ID NO: 20137 - protein, 7 aa, synthetic construct
RGDTSGE

SEQ ID NO: 20138 - protein, 7 aa, synthetic construct
RGDTSHA

SEQ ID NO: 20139 - protein, 7 aa, synthetic construct
RGDTTHV

SEQ ID NO: 20140 - protein, 7 aa, synthetic construct
RGDTVDT

SEQ ID NO: 20141 - protein, 7 aa, synthetic construct
RGDVATH

SEQ ID NO: 20142 - protein, 7 aa, synthetic construct
RGDVFGN

SEQ ID NO: 20143 - protein, 7 aa, synthetic construct
RGDVFHF

SEQ ID NO: 20144 - protein, 7 aa, synthetic construct
RGDVGFG

SEQ ID NO: 20145 - protein, 7 aa, synthetic construct
RGDVGHQ

SEQ ID NO: 20146 - protein, 7 aa, synthetic construct
RGDVGNG

SEQ ID NO: 20147 - protein, 7 aa, synthetic construct
RGDVGRN

SEQ ID NO: 20148 - protein, 7 aa, synthetic construct
RGDVHQT

SEQ ID NO: 20149 - protein, 7 aa, synthetic construct
RGDVIDK

SEQ ID NO: 20150 - protein, 7 aa, synthetic construct
RGDVILI

SEQ ID NO: 20151 - protein, 7 aa, synthetic construct
RGDVKAS

SEQ ID NO: 20152 - protein, 7 aa, synthetic construct
RGDVLKI

SEQ ID NO: 20153 - protein, 7 aa, synthetic construct
RGDVNVR

SEQ ID NO: 20154 - protein, 7 aa, synthetic construct
RGDDKEH

SEQ ID NO: 20155 - protein, 7 aa, synthetic construct
RGDVTFL

SEQ ID NO: 20156 - protein, 7 aa, synthetic construct
RGDVTVF

SEQ ID NO: 20157 - protein, 7 aa, synthetic construct
RGDVVDI

SEQ ID NO: 20158 - protein, 7 aa, synthetic construct
RGDDLHT

SEQ ID NO: 20159 - protein, 7 aa, synthetic construct
RGDDRII

SEQ ID NO: 20160 - protein, 7 aa, synthetic construct
RGDDSEF

SEQ ID NO: 20161 - protein, 7 aa, synthetic construct
RGDDSVQ

SEQ ID NO: 20162 - protein, 7 aa, synthetic construct
RGDDTGH

SEQ ID NO: 20163 - protein, 7 aa, synthetic construct
RGDDTIR

SEQ ID NO: 20164 - protein, 7 aa, synthetic construct
RGDDTSK

SEQ ID NO: 20165 - protein, 7 aa, synthetic construct
RGDAEVK

SEQ ID NO: 20166 - protein, 7 aa, synthetic construct
RGDEENI

SEQ ID NO: 20167 - protein, 7 aa, synthetic construct
RGDEFKT

SEQ ID NO: 20168 - protein, 7 aa, synthetic construct
RGDEHKF

SEQ ID NO: 20169 - protein, 7 aa, synthetic construct
RGDEHKT

SEQ ID NO: 20170 - protein, 7 aa, synthetic construct
RGDEKFL

SEQ ID NO: 20171 - protein, 7 aa, synthetic construct
RGDENLS

SEQ ID NO: 20172 - protein, 7 aa, synthetic construct
RGDEQNI

SEQ ID NO: 20173 - protein, 7 aa, synthetic construct
RGDERDK

SEQ ID NO: 20174 - protein, 7 aa, synthetic construct
RGDAGEL

SEQ ID NO: 20175 - protein, 7 aa, synthetic construct
RGDESTI

SEQ ID NO: 20176 - protein, 7 aa, synthetic construct
RGDEVTV

SEQ ID NO: 20177 - protein, 7 aa, synthetic construct
RGDFDHG

SEQ ID NO: 20178 - protein, 7 aa, synthetic construct
RGDFEQR

SEQ ID NO: 20179 - protein, 7 aa, synthetic construct
RGDFGAG

SEQ ID NO: 20180 - protein, 7 aa, synthetic construct
RGDFGHR

SEQ ID NO: 20181 - protein, 7 aa, synthetic construct
RGDFGQR

SEQ ID NO: 20182 - protein, 7 aa, synthetic construct
RGDFGTA

SEQ ID NO: 20183 - protein, 7 aa, synthetic construct
RGDFHEE

SEQ ID NO: 20184 - protein, 7 aa, synthetic construct
RGDFHGN

SEQ ID NO: 20185 - protein, 7 aa, synthetic construct
RGDFHRG

SEQ ID NO: 20186 - protein, 7 aa, synthetic construct
RGDFKNI

SEQ ID NO: 20187 - protein, 7 aa, synthetic construct
RGDFLLG

SEQ ID NO: 20188 - protein, 7 aa, synthetic construct
RGDFQII

SEQ ID NO: 20189 - protein, 7 aa, synthetic construct
RGDFRFL

SEQ ID NO: 20190 - protein, 7 aa, synthetic construct
RGDFRLF

SEQ ID NO: 20191 - protein, 7 aa, synthetic construct
RGDFTLL

SEQ ID NO: 20192 - protein, 7 aa, synthetic construct
RGDGAVF

SEQ ID NO: 20193 - protein, 7 aa, synthetic construct
RGDGDTI

SEQ ID NO: 20194 - protein, 7 aa, synthetic construct
RGDGFDS

SEQ ID NO: 20195 - protein, 7 aa, synthetic construct
RGDGGEI

SEQ ID NO: 20196 - protein, 7 aa, synthetic construct
RGDGIEK

SEQ ID NO: 20197 - protein, 7 aa, synthetic construct
RGDGIKR

SEQ ID NO: 20198 - protein, 7 aa, synthetic construct
RGDGKDN

SEQ ID NO: 20199 - protein, 7 aa, synthetic construct
RGDGKFI

SEQ ID NO: 20200 - protein, 7 aa, synthetic construct
RGDGNNN

SEQ ID NO: 20201 - protein, 7 aa, synthetic construct
RGDGQEG

SEQ ID NO: 20202 - protein, 7 aa, synthetic construct
RGDGQNT

SEQ ID NO: 20203 - protein, 7 aa, synthetic construct
RGDGSEH

SEQ ID NO: 20204 - protein, 7 aa, synthetic construct
RGDGTDV

SEQ ID NO: 20205 - protein, 7 aa, synthetic construct
RGDGTTL

SEQ ID NO: 20206 - protein, 7 aa, synthetic construct
RGDGVHN

SEQ ID NO: 20207 - protein, 7 aa, synthetic construct
RGDAKIV

SEQ ID NO: 20208 - protein, 7 aa, synthetic construct
RGDGVQF

SEQ ID NO: 20209 - protein, 7 aa, synthetic construct
RGDHALK

SEQ ID NO: 20210 - protein, 7 aa, synthetic construct
RGDHDNN

SEQ ID NO: 20211 - protein, 7 aa, synthetic construct
RGDHEHK

SEQ ID NO: 20212 - protein, 7 aa, synthetic construct
RGDHELR

SEQ ID NO: 20213 - protein, 7 aa, synthetic construct
RGDHENR

SEQ ID NO: 20214 - protein, 7 aa, synthetic construct
RGDHERD

SEQ ID NO: 20215 - protein, 7 aa, synthetic construct
RGDAKRV

SEQ ID NO: 20216 - protein, 7 aa, synthetic construct
RGDHGHF

SEQ ID NO: 20217 - protein, 7 aa, synthetic construct
RGDAKVV

SEQ ID NO: 20218 - protein, 7 aa, synthetic construct
RGDHHAI

SEQ ID NO: 20219 - protein, 7 aa, synthetic construct
RGDHHGK

SEQ ID NO: 20220 - protein, 7 aa, synthetic construct
RGDHITG

SEQ ID NO: 20221 - protein, 7 aa, synthetic construct
RGDALHK

SEQ ID NO: 20222 - protein, 7 aa, synthetic construct
RGDHNHE

SEQ ID NO: 20223 - protein, 7 aa, synthetic construct
RGDHNQD

SEQ ID NO: 20224 - protein, 7 aa, synthetic construct
RGDHNRV

SEQ ID NO: 20225 - protein, 7 aa, synthetic construct
RGDHRKD

SEQ ID NO: 20226 - protein, 7 aa, synthetic construct
RGDALQT

SEQ ID NO: 20227 - protein, 7 aa, synthetic construct
RGDHSNA

SEQ ID NO: 20228 - protein, 7 aa, synthetic construct
RGDHSRA

SEQ ID NO: 20229 - protein, 7 aa, synthetic construct
RGDALRS

SEQ ID NO: 20230 - protein, 7 aa, synthetic construct
RGDHTSH

SEQ ID NO: 20231 - protein, 7 aa, synthetic construct
RGDHVAV

SEQ ID NO: 20232 - protein, 7 aa, synthetic construct
RGDIATF

SEQ ID NO: 20233 - protein, 7 aa, synthetic construct
RGDIELH

SEQ ID NO: 20234 - protein, 7 aa, synthetic construct
RGDIFFK

SEQ ID NO: 20235 - protein, 7 aa, synthetic construct
RGDIFSR

SEQ ID NO: 20236 - protein, 7 aa, synthetic construct
RGDIGKL

SEQ ID NO: 20237 - protein, 7 aa, synthetic construct
RGDIGKQ

SEQ ID NO: 20238 - protein, 7 aa, synthetic construct
RGDIGKS

SEQ ID NO: 20239 - protein, 7 aa, synthetic construct
RGDIGTI

SEQ ID NO: 20240 - protein, 7 aa, synthetic construct
RGDIHTA

SEQ ID NO: 20241 - protein, 7 aa, synthetic construct
RGDIIDS

SEQ ID NO: 20242 - protein, 7 aa, synthetic construct
RGDIIGQ

SEQ ID NO: 20243 - protein, 7 aa, synthetic construct
RGDIKDD

SEQ ID NO: 20244 - protein, 7 aa, synthetic construct
RGDIKDI

SEQ ID NO: 20245 - protein, 7 aa, synthetic construct
RGDILKA

SEQ ID NO: 20246 - protein, 7 aa, synthetic construct
RGDANST

SEQ ID NO: 20247 - protein, 7 aa, synthetic construct
RGDINSA

SEQ ID NO: 20248 - protein, 7 aa, synthetic construct
RGDIQHQ

SEQ ID NO: 20249 - protein, 7 aa, synthetic construct
RGDISIG

SEQ ID NO: 20250 - protein, 7 aa, synthetic construct
RGDISSF

SEQ ID NO: 20251 - protein, 7 aa, synthetic construct
RGDISTH

SEQ ID NO: 20252 - protein, 7 aa, synthetic construct
RGDIVGQ

SEQ ID NO: 20253 - protein, 7 aa, synthetic construct
RGDKAHE

SEQ ID NO: 20254 - protein, 7 aa, synthetic construct
RGDKAVI

SEQ ID NO: 20255 - protein, 7 aa, synthetic construct
RGDKDGF

SEQ ID NO: 20256 - protein, 7 aa, synthetic construct
RGDKDSA

SEQ ID NO: 20257 - protein, 7 aa, synthetic construct
RGDKEFK

SEQ ID NO: 20258 - protein, 7 aa, synthetic construct
RGDKEFV

SEQ ID NO: 20259 - protein, 7 aa, synthetic construct
RGDKIFF

SEQ ID NO: 20260 - protein, 7 aa, synthetic construct
RGDKKLS

SEQ ID NO: 20261 - protein, 7 aa, synthetic construct
RGDKNES

SEQ ID NO: 20262 - protein, 7 aa, synthetic construct
RGDKNHN

SEQ ID NO: 20263 - protein, 7 aa, synthetic construct
RGDKNLQ

SEQ ID NO: 20264 - protein, 7 aa, synthetic construct
RGDKNVN

SEQ ID NO: 20265 - protein, 7 aa, synthetic construct
RGDKQGA

SEQ ID NO: 20266 - protein, 7 aa, synthetic construct
RGDKRES

SEQ ID NO: 20267 - protein, 7 aa, synthetic construct
RGDKSAD

SEQ ID NO: 20268 - protein, 7 aa, synthetic construct
RGDKSTD

SEQ ID NO: 20269 - protein, 7 aa, synthetic construct
RGDKVQV

SEQ ID NO: 20270 - protein, 7 aa, synthetic construct
RGDLDHT

SEQ ID NO: 20271 - protein, 7 aa, synthetic construct
RGDLEGN

SEQ ID NO: 20272 - protein, 7 aa, synthetic construct
RGDLEHE

SEQ ID NO: 20273 - protein, 7 aa, synthetic construct
RGDLENV

SEQ ID NO: 20274 - protein, 7 aa, synthetic construct
RGDLGDL

SEQ ID NO: 20275 - protein, 7 aa, synthetic construct
RGDLGEE

SEQ ID NO: 20276 - protein, 7 aa, synthetic construct
RGDLHSQ

SEQ ID NO: 20277 - protein, 7 aa, synthetic construct
RGDLILR

SEQ ID NO: 20278 - protein, 7 aa, synthetic construct
RGDLIQG

SEQ ID NO: 20279 - protein, 7 aa, synthetic construct
RGDLKEQ

SEQ ID NO: 20280 - protein, 7 aa, synthetic construct
RGDLLDR

SEQ ID NO: 20281 - protein, 7 aa, synthetic construct
RGDASSS

SEQ ID NO: 20282 - protein, 7 aa, synthetic construct
RGDLLQT

SEQ ID NO: 20283 - protein, 7 aa, synthetic construct
RGDLLRD

SEQ ID NO: 20284 - protein, 7 aa, synthetic construct
RGDLQDS

SEQ ID NO: 20285 - protein, 7 aa, synthetic construct
RGDLSRV

SEQ ID NO: 20286 - protein, 7 aa, synthetic construct
RGDLSVG

SEQ ID NO: 20287 - protein, 7 aa, synthetic construct
RGDLTRE

SEQ ID NO: 20288 - protein, 7 aa, synthetic construct
RGDLTVG

SEQ ID NO: 20289 - protein, 7 aa, synthetic construct
RGDLVKQ

SEQ ID NO: 20290 - protein, 7 aa, synthetic construct
RGDLVSG

SEQ ID NO: 20291 - protein, 7 aa, synthetic construct
RGDNAGF

SEQ ID NO: 20292 - protein, 7 aa, synthetic construct
RGDNARS

SEQ ID NO: 20293 - protein, 7 aa, synthetic construct
RGDNAVH

SEQ ID NO: 20294 - protein, 7 aa, synthetic construct
RGDNEIK

SEQ ID NO: 20295 - protein, 7 aa, synthetic construct
RGDNEQH

SEQ ID NO: 20296 - protein, 7 aa, synthetic construct
RGDNETA

SEQ ID NO: 20297 - protein, 7 aa, synthetic construct
RGDNFSF

SEQ ID NO: 20298 - protein, 7 aa, synthetic construct
RGDNFVQ

SEQ ID NO: 20299 - protein, 7 aa, synthetic construct
RGDNGGS

SEQ ID NO: 20300 - protein, 7 aa, synthetic construct
RGDNGSV

SEQ ID NO: 20301 - protein, 7 aa, synthetic construct
RGDNHAQ

SEQ ID NO: 20302 - protein, 7 aa, synthetic construct
RGDNHAS

SEQ ID NO: 20303 - protein, 7 aa, synthetic construct
RGDNHEK

SEQ ID NO: 20304 - protein, 7 aa, synthetic construct
RGDNHQE

SEQ ID NO: 20305 - protein, 7 aa, synthetic construct
RGDNIGV

SEQ ID NO: 20306 - protein, 7 aa, synthetic construct
RGDNIHR

SEQ ID NO: 20307 - protein, 7 aa, synthetic construct
RGDNITV

SEQ ID NO: 20308 - protein, 7 aa, synthetic construct
RGDNKAV

SEQ ID NO: 20309 - protein, 7 aa, synthetic construct
RGDNKFN

SEQ ID NO: 20310 - protein, 7 aa, synthetic construct
RGDNKQN

SEQ ID NO: 20311 - protein, 7 aa, synthetic construct
RGDNKVV

SEQ ID NO: 20312 - protein, 7 aa, synthetic construct
RGDNLKA

SEQ ID NO: 20313 - protein, 7 aa, synthetic construct
RGDNLNA

SEQ ID NO: 20314 - protein, 7 aa, synthetic construct
RGDNNAL

SEQ ID NO: 20315 - protein, 7 aa, synthetic construct
RGDNSAA

SEQ ID NO: 20316 - protein, 7 aa, synthetic construct
RGDNSEQ

SEQ ID NO: 20317 - protein, 7 aa, synthetic construct
RGDNSGN

SEQ ID NO: 20318 - protein, 7 aa, synthetic construct
RGDNSIL

SEQ ID NO: 20319 - protein, 7 aa, synthetic construct
RGDNSLI

SEQ ID NO: 20320 - protein, 7 aa, synthetic construct
RGDNSTN

SEQ ID NO: 20321 - protein, 7 aa, synthetic construct
RGDNTKQ

SEQ ID NO: 20322 - protein, 7 aa, synthetic construct
RGDNTQK

SEQ ID NO: 20323 - protein, 7 aa, synthetic construct
RGDNVEK

SEQ ID NO: 20324 - protein, 7 aa, synthetic construct
RGDNVLS

SEQ ID NO: 20325 - protein, 7 aa, synthetic construct
RGDNVNN

SEQ ID NO: 20326 - protein, 7 aa, synthetic construct
RGDQAII

SEQ ID NO: 20327 - protein, 7 aa, synthetic construct
RGDQARF

SEQ ID NO: 20328 - protein, 7 aa, synthetic construct
RGDQFLV

SEQ ID NO: 20329 - protein, 7 aa, synthetic construct
RGDDAKQ

SEQ ID NO: 20330 - protein, 7 aa, synthetic construct
RGDQIQD

SEQ ID NO: 20331 - protein, 7 aa, synthetic construct
RGDQITH

SEQ ID NO: 20332 - protein, 7 aa, synthetic construct
RGDQITR

SEQ ID NO: 20333 - protein, 7 aa, synthetic construct
RGDQKHS

SEQ ID NO: 20334 - protein, 7 aa, synthetic construct
RGDQKTE

SEQ ID NO: 20335 - protein, 7 aa, synthetic construct
RGDQLAI

SEQ ID NO: 20336 - protein, 7 aa, synthetic construct
RGDQNEL

SEQ ID NO: 20337 - protein, 7 aa, synthetic construct
RGDQNFK

SEQ ID NO: 20338 - protein, 7 aa, synthetic construct
RGDQRHK

SEQ ID NO: 20339 - protein, 7 aa, synthetic construct
RGDQSFF

SEQ ID NO: 20340 - protein, 7 aa, synthetic construct
RGDQTAK

SEQ ID NO: 20341 - protein, 7 aa, synthetic construct
RGDQTIT

SEQ ID NO: 20342 - protein, 7 aa, synthetic construct
RGDQVAF

SEQ ID NO: 20343 - protein, 7 aa, synthetic construct
RGDQVHN

SEQ ID NO: 20344 - protein, 7 aa, synthetic construct
RGDQVRG

SEQ ID NO: 20345 - protein, 7 aa, synthetic construct
RGDRDQA

SEQ ID NO: 20346 - protein, 7 aa, synthetic construct
RGDRDVS

SEQ ID NO: 20347 - protein, 7 aa, synthetic construct
RGDRGND

SEQ ID NO: 20348 - protein, 7 aa, synthetic construct
RGDRHNG

SEQ ID NO: 20349 - protein, 7 aa, synthetic construct
RGDRIHG

SEQ ID NO: 20350 - protein, 7 aa, synthetic construct
RGDRINF

SEQ ID NO: 20351 - protein, 7 aa, synthetic construct
RGDRKHH

SEQ ID NO: 20352 - protein, 7 aa, synthetic construct
RGDRKVD

SEQ ID NO: 20353 - protein, 7 aa, synthetic construct
RGDRLEK

SEQ ID NO: 20354 - protein, 7 aa, synthetic construct
RGDRLKH

SEQ ID NO: 20355 - protein, 7 aa, synthetic construct
RGDRRFG

SEQ ID NO: 20356 - protein, 7 aa, synthetic construct
RGDRSDV

SEQ ID NO: 20357 - protein, 7 aa, synthetic construct
RGDRTHT

SEQ ID NO: 20358 - protein, 7 aa, synthetic construct
RGDSAGS

SEQ ID NO: 20359 - protein, 7 aa, synthetic construct
RGDSDNH

SEQ ID NO: 20360 - protein, 7 aa, synthetic construct
RGDSDTR

SEQ ID NO: 20361 - protein, 7 aa, synthetic construct
RGDSEFI

SEQ ID NO: 20362 - protein, 7 aa, synthetic construct
RGDSETH

SEQ ID NO: 20363 - protein, 7 aa, synthetic construct
RGDSFTD

SEQ ID NO: 20364 - protein, 7 aa, synthetic construct
RGDSGIQ

SEQ ID NO: 20365 - protein, 7 aa, synthetic construct
RGDSGQV

SEQ ID NO: 20366 - protein, 7 aa, synthetic construct
RGDSHDT

SEQ ID NO: 20367 - protein, 7 aa, synthetic construct
RGDSHED

SEQ ID NO: 20368 - protein, 7 aa, synthetic construct
RGDSIFI

SEQ ID NO: 20369 - protein, 7 aa, synthetic construct
RGDSILG

SEQ ID NO: 20370 - protein, 7 aa, synthetic construct
RGDSIQV

SEQ ID NO: 20371 - protein, 7 aa, synthetic construct
RGDSIRE

SEQ ID NO: 20372 - protein, 7 aa, synthetic construct
RGDSITF

SEQ ID NO: 20373 - protein, 7 aa, synthetic construct
RGDSLEK

SEQ ID NO: 20374 - protein, 7 aa, synthetic construct
RGDSLNV

SEQ ID NO: 20375 - protein, 7 aa, synthetic construct
RGDSLQI

SEQ ID NO: 20376 - protein, 7 aa, synthetic construct
RGDSLVQ

SEQ ID NO: 20377 - protein, 7 aa, synthetic construct
RGDSNAH

SEQ ID NO: 20378 - protein, 7 aa, synthetic construct
RGDSQKD

SEQ ID NO: 20379 - protein, 7 aa, synthetic construct
RGDSQRE

SEQ ID NO: 20380 - protein, 7 aa, synthetic construct
RGDSRDH

SEQ ID NO: 20381 - protein, 7 aa, synthetic construct
RGDSSFA

SEQ ID NO: 20382 - protein, 7 aa, synthetic construct
RGDSTDQ

SEQ ID NO: 20383 - protein, 7 aa, synthetic construct
RGDSTLL

SEQ ID NO: 20384 - protein, 7 aa, synthetic construct
RGDSTSA

SEQ ID NO: 20385 - protein, 7 aa, synthetic construct
RGDSVRH

SEQ ID NO: 20386 - protein, 7 aa, synthetic construct
RGDSVSL

SEQ ID NO: 20387 - protein, 7 aa, synthetic construct
RGDTEQV

SEQ ID NO: 20388 - protein, 7 aa, synthetic construct
RGDDGSR

SEQ ID NO: 20389 - protein, 7 aa, synthetic construct
RGDTHAK

SEQ ID NO: 20390 - protein, 7 aa, synthetic construct
RGDTHGR

SEQ ID NO: 20391 - protein, 7 aa, synthetic construct
RGDTIFR

SEQ ID NO: 20392 - protein, 7 aa, synthetic construct
RGDTIHH

SEQ ID NO: 20393 - protein, 7 aa, synthetic construct
RGDDHFT

SEQ ID NO: 20394 - protein, 7 aa, synthetic construct
RGDTLLF

SEQ ID NO: 20395 - protein, 7 aa, synthetic construct
RGDDHKI

SEQ ID NO: 20396 - protein, 7 aa, synthetic construct
RGDDHKV

SEQ ID NO: 20397 - protein, 7 aa, synthetic construct
RGDAEAV

SEQ ID NO: 20398 - protein, 7 aa, synthetic construct
RGDTRTR

SEQ ID NO: 20399 - protein, 7 aa, synthetic construct
RGDTSFI

SEQ ID NO: 20400 - protein, 7 aa, synthetic construct
RGDTSGI

SEQ ID NO: 20401 - protein, 7 aa, synthetic construct
RGDTSSQ

SEQ ID NO: 20402 - protein, 7 aa, synthetic construct
RGDTTFN

SEQ ID NO: 20403 - protein, 7 aa, synthetic construct
RGDTVRI

SEQ ID NO: 20404 - protein, 7 aa, synthetic construct
RGDVAHA

SEQ ID NO: 20405 - protein, 7 aa, synthetic construct
RGDVALG

SEQ ID NO: 20406 - protein, 7 aa, synthetic construct
RGDVAVK

SEQ ID NO: 20407 - protein, 7 aa, synthetic construct
RGDVDHI

SEQ ID NO: 20408 - protein, 7 aa, synthetic construct
RGDVDLL

SEQ ID NO: 20409 - protein, 7 aa, synthetic construct
RGDVEDF

SEQ ID NO: 20410 - protein, 7 aa, synthetic construct
RGDVEGD

SEQ ID NO: 20411 - protein, 7 aa, synthetic construct
RGDVEVI

SEQ ID NO: 20412 - protein, 7 aa, synthetic construct
RGDVFKK

SEQ ID NO: 20413 - protein, 7 aa, synthetic construct
RGDVGAA

SEQ ID NO: 20414 - protein, 7 aa, synthetic construct
RGDVHQE

SEQ ID NO: 20415 - protein, 7 aa, synthetic construct
RGDVIIS

SEQ ID NO: 20416 - protein, 7 aa, synthetic construct
RGDVKAH

SEQ ID NO: 20417 - protein, 7 aa, synthetic construct
RGDVNSN

SEQ ID NO: 20418 - protein, 7 aa, synthetic construct
RGDVQAL

SEQ ID NO: 20419 - protein, 7 aa, synthetic construct
RGDVQDG

SEQ ID NO: 20420 - protein, 7 aa, synthetic construct
RGDVQQT

SEQ ID NO: 20421 - protein, 7 aa, synthetic construct
RGDVQRG

SEQ ID NO: 20422 - protein, 7 aa, synthetic construct
RGDVSTF

SEQ ID NO: 20423 - protein, 7 aa, synthetic construct
RGDVTFR

SEQ ID NO: 20424 - protein, 7 aa, synthetic construct
RGDVTHL

SEQ ID NO: 20425 - protein, 7 aa, synthetic construct
RGDVTNS

SEQ ID NO: 20426 - protein, 7 aa, synthetic construct
RGDVTTK

SEQ ID NO: 20427 - protein, 7 aa, synthetic construct
RGDVVIV

SEQ ID NO: 20428 - protein, 7 aa, synthetic construct
RGDVVQR

SEQ ID NO: 20429 - protein, 7 aa, synthetic construct
RGDDKSI

SEQ ID NO: 20430 - protein, 7 aa, synthetic construct
RGDDLHR

SEQ ID NO: 20431 - protein, 7 aa, synthetic construct
RGDDLRA

SEQ ID NO: 20432 - protein, 7 aa, synthetic construct
RGDDLSV

SEQ ID NO: 20433 - protein, 7 aa, synthetic construct
RGDDNKD

SEQ ID NO: 20434 - protein, 7 aa, synthetic construct
RGDDNRQ

SEQ ID NO: 20435 - protein, 7 aa, synthetic construct
RGDDQNR

SEQ ID NO: 20436 - protein, 7 aa, synthetic construct
RGDDQTV

SEQ ID NO: 20437 - protein, 7 aa, synthetic construct
RGDDSIK

SEQ ID NO: 20438 - protein, 7 aa, synthetic construct
RGDDTKD

SEQ ID NO: 20439 - protein, 7 aa, synthetic construct
RGDDTSI

SEQ ID NO: 20440 - protein, 7 aa, synthetic construct
RGDDVTK

SEQ ID NO: 20441 - protein, 7 aa, synthetic construct
RGDEAHI

SEQ ID NO: 20442 - protein, 7 aa, synthetic construct
RGDEDFQ

SEQ ID NO: 20443 - protein, 7 aa, synthetic construct
RGDEEKS

SEQ ID NO: 20444 - protein, 7 aa, synthetic construct
RGDEGLT

SEQ ID NO: 20445 - protein, 7 aa, synthetic construct
RGDEGSV

SEQ ID NO: 20446 - protein, 7 aa, synthetic construct
RGDEGTR

SEQ ID NO: 20447 - protein, 7 aa, synthetic construct
RGDEIHH

SEQ ID NO: 20448 - protein, 7 aa, synthetic construct
RGDEKAT

SEQ ID NO: 20449 - protein, 7 aa, synthetic construct
RGDEKTD

SEQ ID NO: 20450 - protein, 7 aa, synthetic construct
RGDELRD

SEQ ID NO: 20451 - protein, 7 aa, synthetic construct
RGDENRS

SEQ ID NO: 20452 - protein, 7 aa, synthetic construct
RGDEQGT

SEQ ID NO: 20453 - protein, 7 aa, synthetic construct
RGDEQII

SEQ ID NO: 20454 - protein, 7 aa, synthetic construct
RGDERHF

SEQ ID NO: 20455 - protein, 7 aa, synthetic construct
RGDESGT

SEQ ID NO: 20456 - protein, 7 aa, synthetic construct
RGDESTV

SEQ ID NO: 20457 - protein, 7 aa, synthetic construct
RGDETRS

SEQ ID NO: 20458 - protein, 7 aa, synthetic construct
RGDEVED

SEQ ID NO: 20459 - protein, 7 aa, synthetic construct
RGDLGLS

SEQ ID NO: 20460 - protein, 7 aa, synthetic construct
RGDEVRK

SEQ ID NO: 20461 - protein, 7 aa, synthetic construct
RGDFEIR

SEQ ID NO: 20462 - protein, 7 aa, synthetic construct
RGDFELI

SEQ ID NO: 20463 - protein, 7 aa, synthetic construct
RGDFESN

SEQ ID NO: 20464 - protein, 7 aa, synthetic construct
RGDFFVH

SEQ ID NO: 20465 - protein, 7 aa, synthetic construct
RGDFHLF

SEQ ID NO: 20466 - protein, 7 aa, synthetic construct
RGDFIIH

SEQ ID NO: 20467 - protein, 7 aa, synthetic construct
RGDFIVL

SEQ ID NO: 20468 - protein, 7 aa, synthetic construct
RGDAHHV

SEQ ID NO: 20469 - protein, 7 aa, synthetic construct
RGDFRAD

SEQ ID NO: 20470 - protein, 7 aa, synthetic construct
RGDFRHN

SEQ ID NO: 20471 - protein, 7 aa, synthetic construct
RGDFTDQ

SEQ ID NO: 20472 - protein, 7 aa, synthetic construct
RGDFTVH

SEQ ID NO: 20473 - protein, 7 aa, synthetic construct
RGDFVII

SEQ ID NO: 20474 - protein, 7 aa, synthetic construct
RGDGATN

SEQ ID NO: 20475 - protein, 7 aa, synthetic construct
RGDAIEN

SEQ ID NO: 20476 - protein, 7 aa, synthetic construct
RGDAIHS

SEQ ID NO: 20477 - protein, 7 aa, synthetic construct
RGDGGHQ

SEQ ID NO: 20478 - protein, 7 aa, synthetic construct
RGDGGLK

SEQ ID NO: 20479 - protein, 7 aa, synthetic construct
RGDGHHS

SEQ ID NO: 20480 - protein, 7 aa, synthetic construct
RGDGIRK

SEQ ID NO: 20481 - protein, 7 aa, synthetic construct
RGDGKRV

SEQ ID NO: 20482 - protein, 7 aa, synthetic construct
RGDGLIQ

SEQ ID NO: 20483 - protein, 7 aa, synthetic construct
RGDGNNK

SEQ ID NO: 20484 - protein, 7 aa, synthetic construct
RGDAIVK

SEQ ID NO: 20485 - protein, 7 aa, synthetic construct
RGDGQAV

SEQ ID NO: 20486 - protein, 7 aa, synthetic construct
RGDGQSV

SEQ ID NO: 20487 - protein, 7 aa, synthetic construct
RGDGQVI

SEQ ID NO: 20488 - protein, 7 aa, synthetic construct
RGDGRHS

SEQ ID NO: 20489 - protein, 7 aa, synthetic construct
RGDGRLK

SEQ ID NO: 20490 - protein, 7 aa, synthetic construct
RGDAKGH

SEQ ID NO: 20491 - protein, 7 aa, synthetic construct
RGDGVLI

SEQ ID NO: 20492 - protein, 7 aa, synthetic construct
RGDHAHL

SEQ ID NO: 20493 - protein, 7 aa, synthetic construct
RGDHARS

SEQ ID NO: 20494 - protein, 7 aa, synthetic construct
RGDHDKH

SEQ ID NO: 20495 - protein, 7 aa, synthetic construct
RGDHFKD

SEQ ID NO: 20496 - protein, 7 aa, synthetic construct
RGDHHHR

SEQ ID NO: 20497 - protein, 7 aa, synthetic construct
RGDHKDI

SEQ ID NO: 20498 - protein, 7 aa, synthetic construct
RGDHKLN

SEQ ID NO: 20499 - protein, 7 aa, synthetic construct
RGDHKTH

SEQ ID NO: 20500 - protein, 7 aa, synthetic construct
RGDHLGS

SEQ ID NO: 20501 - protein, 7 aa, synthetic construct
RGDALHF

SEQ ID NO: 20502 - protein, 7 aa, synthetic construct
RGDHNNE

SEQ ID NO: 20503 - protein, 7 aa, synthetic construct
RGDHQEK

SEQ ID NO: 20504 - protein, 7 aa, synthetic construct
RGDHRGI

SEQ ID NO: 20505 - protein, 7 aa, synthetic construct
RGDHRSG

SEQ ID NO: 20506 - protein, 7 aa, synthetic construct
RGDALSF

SEQ ID NO: 20507 - protein, 7 aa, synthetic construct
RGDHVVT

SEQ ID NO: 20508 - protein, 7 aa, synthetic construct
RGDANAS

SEQ ID NO: 20509 - protein, 7 aa, synthetic construct
RGDIFGI

SEQ ID NO: 20510 - protein, 7 aa, synthetic construct
RGDIFHI

SEQ ID NO: 20511 - protein, 7 aa, synthetic construct
RGDIFIG

SEQ ID NO: 20512 - protein, 7 aa, synthetic construct
RGDIHAK

SEQ ID NO: 20513 - protein, 7 aa, synthetic construct
RGDIIKL

SEQ ID NO: 20514 - protein, 7 aa, synthetic construct
RGDIKNH

SEQ ID NO: 20515 - protein, 7 aa, synthetic construct
RGDILQK

SEQ ID NO: 20516 - protein, 7 aa, synthetic construct
RGDINRE

SEQ ID NO: 20517 - protein, 7 aa, synthetic construct
RGDINSI

SEQ ID NO: 20518 - protein, 7 aa, synthetic construct
RGDIQRF

SEQ ID NO: 20519 - protein, 7 aa, synthetic construct
RGDIRIQ

SEQ ID NO: 20520 - protein, 7 aa, synthetic construct
RGDISVT

SEQ ID NO: 20521 - protein, 7 aa, synthetic construct
RGDIVIQ

SEQ ID NO: 20522 - protein, 7 aa, synthetic construct
RGDIVIV

SEQ ID NO: 20523 - protein, 7 aa, synthetic construct
RGDIVLS

SEQ ID NO: 20524 - protein, 7 aa, synthetic construct
RGDKADN

SEQ ID NO: 20525 - protein, 7 aa, synthetic construct
RGDKANA

SEQ ID NO: 20526 - protein, 7 aa, synthetic construct
RGDKATA

SEQ ID NO: 20527 - protein, 7 aa, synthetic construct
RGDKFRL

SEQ ID NO: 20528 - protein, 7 aa, synthetic construct
RGDKGIA

SEQ ID NO: 20529 - protein, 7 aa, synthetic construct
RGDAQVG

SEQ ID NO: 20530 - protein, 7 aa, synthetic construct
RGDKGVE

SEQ ID NO: 20531 - protein, 7 aa, synthetic construct
RGDKHQH

SEQ ID NO: 20532 - protein, 7 aa, synthetic construct
RGDKIQV

SEQ ID NO: 20533 - protein, 7 aa, synthetic construct
RGDARET

SEQ ID NO: 20534 - protein, 7 aa, synthetic construct
RGDKQSG

SEQ ID NO: 20535 - protein, 7 aa, synthetic construct
RGDKTDQ

SEQ ID NO: 20536 - protein, 7 aa, synthetic construct
RGDKTFL

SEQ ID NO: 20537 - protein, 7 aa, synthetic construct
RGDKTNQ

SEQ ID NO: 20538 - protein, 7 aa, synthetic construct
RGDKTVQ

SEQ ID NO: 20539 - protein, 7 aa, synthetic construct
RGDKVDI

SEQ ID NO: 20540 - protein, 7 aa, synthetic construct
RGDKVKV

SEQ ID NO: 20541 - protein, 7 aa, synthetic construct
RGDLAEV

SEQ ID NO: 20542 - protein, 7 aa, synthetic construct
RGDLAVF

SEQ ID NO: 20543 - protein, 7 aa, synthetic construct
RGDLEKN

SEQ ID NO: 20544 - protein, 7 aa, synthetic construct
RGDLFAI

SEQ ID NO: 20545 - protein, 7 aa, synthetic construct
RGDLGDS

SEQ ID NO: 20546 - protein, 7 aa, synthetic construct
RGDLHKD

SEQ ID NO: 20547 - protein, 7 aa, synthetic construct
RGDLIQF

SEQ ID NO: 20548 - protein, 7 aa, synthetic construct
RGDLKAA

SEQ ID NO: 20549 - protein, 7 aa, synthetic construct
RGDLKEA

SEQ ID NO: 20550 - protein, 7 aa, synthetic construct
RGDLKHS

SEQ ID NO: 20551 - protein, 7 aa, synthetic construct
RGDLKQD

SEQ ID NO: 20552 - protein, 7 aa, synthetic construct
RGDLLFL

SEQ ID NO: 20553 - protein, 7 aa, synthetic construct
RGDLNKE

SEQ ID NO: 20554 - protein, 7 aa, synthetic construct
RGDADGI

SEQ ID NO: 20555 - protein, 7 aa, synthetic construct
RGDLQKD

SEQ ID NO: 20556 - protein, 7 aa, synthetic construct
RGDLREQ

SEQ ID NO: 20557 - protein, 7 aa, synthetic construct
RGDLSQI

SEQ ID NO: 20558 - protein, 7 aa, synthetic construct
RGDLSVF

SEQ ID NO: 20559 - protein, 7 aa, synthetic construct
RGDLTAH

SEQ ID NO: 20560 - protein, 7 aa, synthetic construct
RGDATGV

SEQ ID NO: 20561 - protein, 7 aa, synthetic construct
RGDLTQH

SEQ ID NO: 20562 - protein, 7 aa, synthetic construct
RGDLTSI

SEQ ID NO: 20563 - protein, 7 aa, synthetic construct
RGDLVHE

SEQ ID NO: 20564 - protein, 7 aa, synthetic construct
RGDATKT

SEQ ID NO: 20565 - protein, 7 aa, synthetic construct
RGDNDVN

SEQ ID NO: 20566 - protein, 7 aa, synthetic construct
RGDNEGK

SEQ ID NO: 20567 - protein, 7 aa, synthetic construct
RGDATRA

SEQ ID NO: 20568 - protein, 7 aa, synthetic construct
RGDNEKT

SEQ ID NO: 20569 - protein, 7 aa, synthetic construct
RGDATRS

SEQ ID NO: 20570 - protein, 7 aa, synthetic construct
RGDNEVI

SEQ ID NO: 20571 - protein, 7 aa, synthetic construct
RGDNGFA

SEQ ID NO: 20572 - protein, 7 aa, synthetic construct
RGDNGGT

SEQ ID NO: 20573 - protein, 7 aa, synthetic construct
RGDNHHE

SEQ ID NO: 20574 - protein, 7 aa, synthetic construct
RGDNIQI

SEQ ID NO: 20575 - protein, 7 aa, synthetic construct
RGDNLQH

SEQ ID NO: 20576 - protein, 7 aa, synthetic construct
RGDNLTA

SEQ ID NO: 20577 - protein, 7 aa, synthetic construct
RGDNNSF

SEQ ID NO: 20578 - protein, 7 aa, synthetic construct
RGDNQRD

SEQ ID NO: 20579 - protein, 7 aa, synthetic construct
RGDNRIV

SEQ ID NO: 20580 - protein, 7 aa, synthetic construct
RGDNRLL

SEQ ID NO: 20581 - protein, 7 aa, synthetic construct
RGDNRSA

SEQ ID NO: 20582 - protein, 7 aa, synthetic construct
RGDNSGH

SEQ ID NO: 20583 - protein, 7 aa, synthetic construct
RGDNTHK

SEQ ID NO: 20584 - protein, 7 aa, synthetic construct
RGDNTKE

SEQ ID NO: 20585 - protein, 7 aa, synthetic construct
RGDNTNQ

SEQ ID NO: 20586 - protein, 7 aa, synthetic construct
RGDNTTV

SEQ ID NO: 20587 - protein, 7 aa, synthetic construct
RGDNTVF

SEQ ID NO: 20588 - protein, 7 aa, synthetic construct
RGDNVSE

SEQ ID NO: 20589 - protein, 7 aa, synthetic construct
RGDQAKT

SEQ ID NO: 20590 - protein, 7 aa, synthetic construct
RGDQANA

SEQ ID NO: 20591 - protein, 7 aa, synthetic construct
RGDQARA

SEQ ID NO: 20592 - protein, 7 aa, synthetic construct
RGDQDKF

SEQ ID NO: 20593 - protein, 7 aa, synthetic construct
RGDQDVH

SEQ ID NO: 20594 - protein, 7 aa, synthetic construct
RGDQEFD

SEQ ID NO: 20595 - protein, 7 aa, synthetic construct
RGDQELI

SEQ ID NO: 20596 - protein, 7 aa, synthetic construct
RGDQFSQ

SEQ ID NO: 20597 - protein, 7 aa, synthetic construct
RGDQGNQ

SEQ ID NO: 20598 - protein, 7 aa, synthetic construct
RGDQGQN

SEQ ID NO: 20599 - protein, 7 aa, synthetic construct
RGDQKLV

SEQ ID NO: 20600 - protein, 7 aa, synthetic construct
RGDQKVF

SEQ ID NO: 20601 - protein, 7 aa, synthetic construct
RGDQNEF

SEQ ID NO: 20602 - protein, 7 aa, synthetic construct
RGDQQNR

SEQ ID NO: 20603 - protein, 7 aa, synthetic construct
RGDQREE

SEQ ID NO: 20604 - protein, 7 aa, synthetic construct
RGDDDFT

SEQ ID NO: 20605 - protein, 7 aa, synthetic construct
RGDQSTE

SEQ ID NO: 20606 - protein, 7 aa, synthetic construct
RGDQTGF

SEQ ID NO: 20607 - protein, 7 aa, synthetic construct
RGDQTIF

SEQ ID NO: 20608 - protein, 7 aa, synthetic construct
RGDREDH

SEQ ID NO: 20609 - protein, 7 aa, synthetic construct
RGDRFEH

SEQ ID NO: 20610 - protein, 7 aa, synthetic construct
RGDRFIF

SEQ ID NO: 20611 - protein, 7 aa, synthetic construct
RGDRFIQ

SEQ ID NO: 20612 - protein, 7 aa, synthetic construct
RGDRFTE

SEQ ID NO: 20613 - protein, 7 aa, synthetic construct
RGDRNES

SEQ ID NO: 20614 - protein, 7 aa, synthetic construct
RGDRSVE

SEQ ID NO: 20615 - protein, 7 aa, synthetic construct
RGDRTHL

SEQ ID NO: 20616 - protein, 7 aa, synthetic construct
RGDRTKH

SEQ ID NO: 20617 - protein, 7 aa, synthetic construct
RGDRVRL

SEQ ID NO: 20618 - protein, 7 aa, synthetic construct
RGDSDGS

SEQ ID NO: 20619 - protein, 7 aa, synthetic construct
RGDSDHN

SEQ ID NO: 20620 - protein, 7 aa, synthetic construct
RGDSDKI

SEQ ID NO: 20621 - protein, 7 aa, synthetic construct
RGDSDVA

SEQ ID NO: 20622 - protein, 7 aa, synthetic construct
RGDSEGT

SEQ ID NO: 20623 - protein, 7 aa, synthetic construct
RGDSEHS

SEQ ID NO: 20624 - protein, 7 aa, synthetic construct
RGDSETE

SEQ ID NO: 20625 - protein, 7 aa, synthetic construct
RGDSEVN

SEQ ID NO: 20626 - protein, 7 aa, synthetic construct
RGDSGLN

SEQ ID NO: 20627 - protein, 7 aa, synthetic construct
RGDSHGE

SEQ ID NO: 20628 - protein, 7 aa, synthetic construct
RGDSIKQ

SEQ ID NO: 20629 - protein, 7 aa, synthetic construct
RGDSITA

SEQ ID NO: 20630 - protein, 7 aa, synthetic construct
RGDSKQE

SEQ ID NO: 20631 - protein, 7 aa, synthetic construct
RGDSKQT

SEQ ID NO: 20632 - protein, 7 aa, synthetic construct
RGDSLFD

SEQ ID NO: 20633 - protein, 7 aa, synthetic construct
RGDDFTF

SEQ ID NO: 20634 - protein, 7 aa, synthetic construct
RGDSNEN

SEQ ID NO: 20635 - protein, 7 aa, synthetic construct
RGDSNRH

SEQ ID NO: 20636 - protein, 7 aa, synthetic construct
RGDSQFR

SEQ ID NO: 20637 - protein, 7 aa, synthetic construct
RGDSQFT

SEQ ID NO: 20638 - protein, 7 aa, synthetic construct
RGDSQHN

SEQ ID NO: 20639 - protein, 7 aa, synthetic construct
RGDSSNA

SEQ ID NO: 20640 - protein, 7 aa, synthetic construct
RGDDGFT

SEQ ID NO: 20641 - protein, 7 aa, synthetic construct
RGDSTGI

SEQ ID NO: 20642 - protein, 7 aa, synthetic construct
RGDSTST

SEQ ID NO: 20643 - protein, 7 aa, synthetic construct
RGDSVES

SEQ ID NO: 20644 - protein, 7 aa, synthetic construct
RGDSVKS

SEQ ID NO: 20645 - protein, 7 aa, synthetic construct
RGDTAGH

SEQ ID NO: 20646 - protein, 7 aa, synthetic construct
RGDTGFT

SEQ ID NO: 20647 - protein, 7 aa, synthetic construct
RGDTGNL

SEQ ID NO: 20648 - protein, 7 aa, synthetic construct
RGDTGSH

SEQ ID NO: 20649 - protein, 7 aa, synthetic construct
RGDTHGS

SEQ ID NO: 20650 - protein, 7 aa, synthetic construct
RGDTKVS

SEQ ID NO: 20651 - protein, 7 aa, synthetic construct
RGDTLFG

SEQ ID NO: 20652 - protein, 7 aa, synthetic construct
RGDTLIH

SEQ ID NO: 20653 - protein, 7 aa, synthetic construct
RGDTNQR

SEQ ID NO: 20654 - protein, 7 aa, synthetic construct
RGDTNTF

SEQ ID NO: 20655 - protein, 7 aa, synthetic construct
RGDTNTT

SEQ ID NO: 20656 - protein, 7 aa, synthetic construct
RGDTQSG

SEQ ID NO: 20657 - protein, 7 aa, synthetic construct
RGDDHNI

SEQ ID NO: 20658 - protein, 7 aa, synthetic construct
RGDDHRI

SEQ ID NO: 20659 - protein, 7 aa, synthetic construct
RGDTSVG

SEQ ID NO: 20660 - protein, 7 aa, synthetic construct
RGDTSVQ

SEQ ID NO: 20661 - protein, 7 aa, synthetic construct
RGDVAKH

SEQ ID NO: 20662 - protein, 7 aa, synthetic construct
RGDVDAQ

SEQ ID NO: 20663 - protein, 7 aa, synthetic construct
RGDVDGI

SEQ ID NO: 20664 - protein, 7 aa, synthetic construct
RGDDIEK

SEQ ID NO: 20665 - protein, 7 aa, synthetic construct
RGDVEDE

SEQ ID NO: 20666 - protein, 7 aa, synthetic construct
RGDVFFT

SEQ ID NO: 20667 - protein, 7 aa, synthetic construct
RGDVGEH

SEQ ID NO: 20668 - protein, 7 aa, synthetic construct
RGDVHHD

SEQ ID NO: 20669 - protein, 7 aa, synthetic construct
RGDVHVN

SEQ ID NO: 20670 - protein, 7 aa, synthetic construct
RGDVIDH

SEQ ID NO: 20671 - protein, 7 aa, synthetic construct
RGDVILN

SEQ ID NO: 20672 - protein, 7 aa, synthetic construct
RGDVLKE

SEQ ID NO: 20673 - protein, 7 aa, synthetic construct
RGDVNEN

SEQ ID NO: 20674 - protein, 7 aa, synthetic construct
RGDVNLH

SEQ ID NO: 20675 - protein, 7 aa, synthetic construct
RGDVNTI

SEQ ID NO: 20676 - protein, 7 aa, synthetic construct
RGDVQAT

SEQ ID NO: 20677 - protein, 7 aa, synthetic construct
RGDVTEI

SEQ ID NO: 20678 - protein, 7 aa, synthetic construct
RGDVTGA

SEQ ID NO: 20679 - protein, 7 aa, synthetic construct
RGDVVAI

SEQ ID NO: 20680 - protein, 7 aa, synthetic construct
RGDVVSN

SEQ ID NO: 20681 - protein, 7 aa, synthetic construct
RGDDKRS

SEQ ID NO: 20682 - protein, 7 aa, synthetic construct
RGDDLER

SEQ ID NO: 20683 - protein, 7 aa, synthetic construct
RGDDLHE

SEQ ID NO: 20684 - protein, 7 aa, synthetic construct
RGDDLVL

SEQ ID NO: 20685 - protein, 7 aa, synthetic construct
RGDDRFN

SEQ ID NO: 20686 - protein, 7 aa, synthetic construct
RGDDRGG

SEQ ID NO: 20687 - protein, 7 aa, synthetic construct
RGDDRGS

SEQ ID NO: 20688 - protein, 7 aa, synthetic construct
RGDDSFN

SEQ ID NO: 20689 - protein, 7 aa, synthetic construct
RGDDSQE

SEQ ID NO: 20690 - protein, 7 aa, synthetic construct
RGDDTSN

SEQ ID NO: 20691 - protein, 7 aa, synthetic construct
RGDDVHH

SEQ ID NO: 20692 - protein, 7 aa, synthetic construct
RGDEAFL

SEQ ID NO: 20693 - protein, 7 aa, synthetic construct
RGDEAKF

SEQ ID NO: 20694 - protein, 7 aa, synthetic construct
RGDEAVR

SEQ ID NO: 20695 - protein, 7 aa, synthetic construct
RGDEDIV

SEQ ID NO: 20696 - protein, 7 aa, synthetic construct
RGDEFIL

SEQ ID NO: 20697 - protein, 7 aa, synthetic construct
RGDEFNR

SEQ ID NO: 20698 - protein, 7 aa, synthetic construct
RGDEGGI

SEQ ID NO: 20699 - protein, 7 aa, synthetic construct
RGDEHFR

SEQ ID NO: 20700 - protein, 7 aa, synthetic construct
RGDEKKT

SEQ ID NO: 20701 - protein, 7 aa, synthetic construct
RGDEKVR

SEQ ID NO: 20702 - protein, 7 aa, synthetic construct
RGDELKS

SEQ ID NO: 20703 - protein, 7 aa, synthetic construct
RGDENKT

SEQ ID NO: 20704 - protein, 7 aa, synthetic construct
RGDAAHT

SEQ ID NO: 20705 - protein, 7 aa, synthetic construct
RGDERAT

SEQ ID NO: 20706 - protein, 7 aa, synthetic construct
RGDAGFE

SEQ ID NO: 20707 - protein, 7 aa, synthetic construct
RGDESIE

SEQ ID NO: 20708 - protein, 7 aa, synthetic construct
RGDETHL

SEQ ID NO: 20709 - protein, 7 aa, synthetic construct
RGDETNQ

SEQ ID NO: 20710 - protein, 7 aa, synthetic construct
RGDETTN

SEQ ID NO: 20711 - protein, 7 aa, synthetic construct
RGDFANF

SEQ ID NO: 20712 - protein, 7 aa, synthetic construct
RGDFATQ

SEQ ID NO: 20713 - protein, 7 aa, synthetic construct
RGDFDSA

SEQ ID NO: 20714 - protein, 7 aa, synthetic construct
RGDFEGI

SEQ ID NO: 20715 - protein, 7 aa, synthetic construct
RGDFEIS

SEQ ID NO: 20716 - protein, 7 aa, synthetic construct
RGDFESI

SEQ ID NO: 20717 - protein, 7 aa, synthetic construct
RGDFFDI

SEQ ID NO: 20718 - protein, 7 aa, synthetic construct
RGDFFLN

SEQ ID NO: 20719 - protein, 7 aa, synthetic construct
RGDAGST

SEQ ID NO: 20720 - protein, 7 aa, synthetic construct
RGDFHFL

SEQ ID NO: 20721 - protein, 7 aa, synthetic construct
RGDFIRH

SEQ ID NO: 20722 - protein, 7 aa, synthetic construct
RGDFITV

SEQ ID NO: 20723 - protein, 7 aa, synthetic construct
RGDFKER

SEQ ID NO: 20724 - protein, 7 aa, synthetic construct
RGDFKRD

SEQ ID NO: 20725 - protein, 7 aa, synthetic construct
RGDFKVQ

SEQ ID NO: 20726 - protein, 7 aa, synthetic construct
RGDFLEL

SEQ ID NO: 20727 - protein, 7 aa, synthetic construct
RGDFLIF

SEQ ID NO: 20728 - protein, 7 aa, synthetic construct
RGDAHHN

SEQ ID NO: 20729 - protein, 7 aa, synthetic construct
RGDFNII

SEQ ID NO: 20730 - protein, 7 aa, synthetic construct
RGDFREQ

SEQ ID NO: 20731 - protein, 7 aa, synthetic construct
RGDFRTL

SEQ ID NO: 20732 - protein, 7 aa, synthetic construct
RGDFTSD

SEQ ID NO: 20733 - protein, 7 aa, synthetic construct
RGDFTTA

SEQ ID NO: 20734 - protein, 7 aa, synthetic construct
RGDGALI

SEQ ID NO: 20735 - protein, 7 aa, synthetic construct
RGDGAQF

SEQ ID NO: 20736 - protein, 7 aa, synthetic construct
RGDGAQH

SEQ ID NO: 20737 - protein, 7 aa, synthetic construct
RGDGASQ

SEQ ID NO: 20738 - protein, 7 aa, synthetic construct
RGDGENI

SEQ ID NO: 20739 - protein, 7 aa, synthetic construct
RGDGESF

SEQ ID NO: 20740 - protein, 7 aa, synthetic construct
RGDGFFE

SEQ ID NO: 20741 - protein, 7 aa, synthetic construct
RGDGFGI

SEQ ID NO: 20742 - protein, 7 aa, synthetic construct
RGDGFLT

SEQ ID NO: 20743 - protein, 7 aa, synthetic construct
RGDGGNG

SEQ ID NO: 20744 - protein, 7 aa, synthetic construct
RGDGHEI

SEQ ID NO: 20745 - protein, 7 aa, synthetic construct
RGDGHER

SEQ ID NO: 20746 - protein, 7 aa, synthetic construct
RGDGHNN

SEQ ID NO: 20747 - protein, 7 aa, synthetic construct
RGDGKAN

SEQ ID NO: 20748 - protein, 7 aa, synthetic construct
RGDGKLL

SEQ ID NO: 20749 - protein, 7 aa, synthetic construct
RGDGKVK

SEQ ID NO: 20750 - protein, 7 aa, synthetic construct
RGDGRFS

SEQ ID NO: 20751 - protein, 7 aa, synthetic construct
RGDGSKE

SEQ ID NO: 20752 - protein, 7 aa, synthetic construct
RGDGSLA

SEQ ID NO: 20753 - protein, 7 aa, synthetic construct
RGDGTQR

SEQ ID NO: 20754 - protein, 7 aa, synthetic construct
RGDGVQL

SEQ ID NO: 20755 - protein, 7 aa, synthetic construct
RGDGVVH

SEQ ID NO: 20756 - protein, 7 aa, synthetic construct
RGDHAFK

SEQ ID NO: 20757 - protein, 7 aa, synthetic construct
RGDHAHS

SEQ ID NO: 20758 - protein, 7 aa, synthetic construct
RGDHGID

SEQ ID NO: 20759 - protein, 7 aa, synthetic construct
RGDHHDL

SEQ ID NO: 20760 - protein, 7 aa, synthetic construct
RGDHHNK

SEQ ID NO: 20761 - protein, 7 aa, synthetic construct
RGDHLGQ

SEQ ID NO: 20762 - protein, 7 aa, synthetic construct
RGDHLKH

SEQ ID NO: 20763 - protein, 7 aa, synthetic construct
RGDHNGA

SEQ ID NO: 20764 - protein, 7 aa, synthetic construct
RGDHNHG

SEQ ID NO: 20765 - protein, 7 aa, synthetic construct
RGDHQFR

SEQ ID NO: 20766 - protein, 7 aa, synthetic construct
RGDALSI

SEQ ID NO: 20767 - protein, 7 aa, synthetic construct
RGDHTGT

SEQ ID NO: 20768 - protein, 7 aa, synthetic construct
RGDHTQT

SEQ ID NO: 20769 - protein, 7 aa, synthetic construct
RGDHTRL

SEQ ID NO: 20770 - protein, 7 aa, synthetic construct
RGDHTTF

SEQ ID NO: 20771 - protein, 7 aa, synthetic construct
RGDIDAH

SEQ ID NO: 20772 - protein, 7 aa, synthetic construct
RGDIDHN

SEQ ID NO: 20773 - protein, 7 aa, synthetic construct
RGDIDTV

SEQ ID NO: 20774 - protein, 7 aa, synthetic construct
RGDIEKT

SEQ ID NO: 20775 - protein, 7 aa, synthetic construct
RGDIFIR

SEQ ID NO: 20776 - protein, 7 aa, synthetic construct
RGDIGAG

SEQ ID NO: 20777 - protein, 7 aa, synthetic construct
RGDIGFI

SEQ ID NO: 20778 - protein, 7 aa, synthetic construct
RGDIGKI

SEQ ID NO: 20779 - protein, 7 aa, synthetic construct
RGDIGSN

SEQ ID NO: 20780 - protein, 7 aa, synthetic construct
RGDIHEV

SEQ ID NO: 20781 - protein, 7 aa, synthetic construct
RGDANLE

SEQ ID NO: 20782 - protein, 7 aa, synthetic construct
RGDIHNA

SEQ ID NO: 20783 - protein, 7 aa, synthetic construct
RGDIIFR

SEQ ID NO: 20784 - protein, 7 aa, synthetic construct
RGDIINS

SEQ ID NO: 20785 - protein, 7 aa, synthetic construct
RGDIIRQ

SEQ ID NO: 20786 - protein, 7 aa, synthetic construct
RGDIIRV

SEQ ID NO: 20787 - protein, 7 aa, synthetic construct
RGDIKTE

SEQ ID NO: 20788 - protein, 7 aa, synthetic construct
RGDILHF

SEQ ID NO: 20789 - protein, 7 aa, synthetic construct
RGDINFQ

SEQ ID NO: 20790 - protein, 7 aa, synthetic construct
RGDINLQ

SEQ ID NO: 20791 - protein, 7 aa, synthetic construct
RGDINSG

SEQ ID NO: 20792 - protein, 7 aa, synthetic construct
RGDIQGS

SEQ ID NO: 20793 - protein, 7 aa, synthetic construct
RGDAQDL

SEQ ID NO: 20794 - protein, 7 aa, synthetic construct
RGDIRVL

SEQ ID NO: 20795 - protein, 7 aa, synthetic construct
RGDITFF

SEQ ID NO: 20796 - protein, 7 aa, synthetic construct
RGDAQHF

SEQ ID NO: 20797 - protein, 7 aa, synthetic construct
RGDIVGT

SEQ ID NO: 20798 - protein, 7 aa, synthetic construct
RGDIVRV

SEQ ID NO: 20799 - protein, 7 aa, synthetic construct
RGDKAAS

SEQ ID NO: 20800 - protein, 7 aa, synthetic construct
RGDKARF

SEQ ID NO: 20801 - protein, 7 aa, synthetic construct
RGDKATQ

SEQ ID NO: 20802 - protein, 7 aa, synthetic construct
RGDKDQV

SEQ ID NO: 20803 - protein, 7 aa, synthetic construct
RGDKEFL

SEQ ID NO: 20804 - protein, 7 aa, synthetic construct
RGDKFFK

SEQ ID NO: 20805 - protein, 7 aa, synthetic construct
RGDKFVR

SEQ ID NO: 20806 - protein, 7 aa, synthetic construct
RGDKINH

SEQ ID NO: 20807 - protein, 7 aa, synthetic construct
RGDKISQ

SEQ ID NO: 20808 - protein, 7 aa, synthetic construct
RGDKKEF

SEQ ID NO: 20809 - protein, 7 aa, synthetic construct
RGDKLAT

SEQ ID NO: 20810 - protein, 7 aa, synthetic construct
RGDKLIH

SEQ ID NO: 20811 - protein, 7 aa, synthetic construct
RGDKNVA

SEQ ID NO: 20812 - protein, 7 aa, synthetic construct
RGDKQSK

SEQ ID NO: 20813 - protein, 7 aa, synthetic construct
RGDKSFE

SEQ ID NO: 20814 - protein, 7 aa, synthetic construct
RGDKSII

SEQ ID NO: 20815 - protein, 7 aa, synthetic construct
RGDKSVS

SEQ ID NO: 20816 - protein, 7 aa, synthetic construct
RGDKTHN

SEQ ID NO: 20817 - protein, 7 aa, synthetic construct
RGDKTND

SEQ ID NO: 20818 - protein, 7 aa, synthetic construct
RGDKVDV

SEQ ID NO: 20819 - protein, 7 aa, synthetic construct
RGDKVLL

SEQ ID NO: 20820 - protein, 7 aa, synthetic construct
RGDASAQ

SEQ ID NO: 20821 - protein, 7 aa, synthetic construct
RGDLALG

SEQ ID NO: 20822 - protein, 7 aa, synthetic construct
RGDLANR

SEQ ID NO: 20823 - protein, 7 aa, synthetic construct
RGDLAVG

SEQ ID NO: 20824 - protein, 7 aa, synthetic construct
RGDLDHS

SEQ ID NO: 20825 - protein, 7 aa, synthetic construct
RGDLDKV

SEQ ID NO: 20826 - protein, 7 aa, synthetic construct
RGDLEHD

SEQ ID NO: 20827 - protein, 7 aa, synthetic construct
RGDLEII

SEQ ID NO: 20828 - protein, 7 aa, synthetic construct
RGDLELQ

SEQ ID NO: 20829 - protein, 7 aa, synthetic construct
RGDLFVG

SEQ ID NO: 20830 - protein, 7 aa, synthetic construct
RGDLGDT

SEQ ID NO: 20831 - protein, 7 aa, synthetic construct
RGDLGHV

SEQ ID NO: 20832 - protein, 7 aa, synthetic construct
RGDLIFF

SEQ ID NO: 20833 - protein, 7 aa, synthetic construct
RGDLIVH

SEQ ID NO: 20834 - protein, 7 aa, synthetic construct
RGDLKEV

SEQ ID NO: 20835 - protein, 7 aa, synthetic construct
RGDLLFH

SEQ ID NO: 20836 - protein, 7 aa, synthetic construct
RGDLLHE

SEQ ID NO: 20837 - protein, 7 aa, synthetic construct
RGDLLHF

SEQ ID NO: 20838 - protein, 7 aa, synthetic construct
RGDLLTR

SEQ ID NO: 20839 - protein, 7 aa, synthetic construct
RGDLNTQ

SEQ ID NO: 20840 - protein, 7 aa, synthetic construct
RGDLQRG

SEQ ID NO: 20841 - protein, 7 aa, synthetic construct
RGDLRGE

SEQ ID NO: 20842 - protein, 7 aa, synthetic construct
RGDLRVD

SEQ ID NO: 20843 - protein, 7 aa, synthetic construct
RGDLRVI

SEQ ID NO: 20844 - protein, 7 aa, synthetic construct
RGDLTHG

SEQ ID NO: 20845 - protein, 7 aa, synthetic construct
RGDNAAH

SEQ ID NO: 20846 - protein, 7 aa, synthetic construct
RGDNALL

SEQ ID NO: 20847 - protein, 7 aa, synthetic construct
RGDNASN

SEQ ID NO: 20848 - protein, 7 aa, synthetic construct
RGDNDET

SEQ ID NO: 20849 - protein, 7 aa, synthetic construct
RGDNDIQ

SEQ ID NO: 20850 - protein, 7 aa, synthetic construct
RGDNEIS

SEQ ID NO: 20851 - protein, 7 aa, synthetic construct
RGDATST

SEQ ID NO: 20852 - protein, 7 aa, synthetic construct
RGDNFRE

SEQ ID NO: 20853 - protein, 7 aa, synthetic construct
RGDNGSN

SEQ ID NO: 20854 - protein, 7 aa, synthetic construct
RGDNHHS

SEQ ID NO: 20855 - protein, 7 aa, synthetic construct
RGDNIFL

SEQ ID NO: 20856 - protein, 7 aa, synthetic construct
RGDNLAL

SEQ ID NO: 20857 - protein, 7 aa, synthetic construct
RGDNLGH

SEQ ID NO: 20858 - protein, 7 aa, synthetic construct
RGDNLHT

SEQ ID NO: 20859 - protein, 7 aa, synthetic construct
RGDNLIV

SEQ ID NO: 20860 - protein, 7 aa, synthetic construct
RGDNLKG

SEQ ID NO: 20861 - protein, 7 aa, synthetic construct
RGDNNFI

SEQ ID NO: 20862 - protein, 7 aa, synthetic construct
RGDNNHH

SEQ ID NO: 20863 - protein, 7 aa, synthetic construct
RGDNNHR

SEQ ID NO: 20864 - protein, 7 aa, synthetic construct
RGDNQHN

SEQ ID NO: 20865 - protein, 7 aa, synthetic construct
RGDADIT

SEQ ID NO: 20866 - protein, 7 aa, synthetic construct
RGDNSAV

SEQ ID NO: 20867 - protein, 7 aa, synthetic construct
RGDNSED

SEQ ID NO: 20868 - protein, 7 aa, synthetic construct
RGDAVQT

SEQ ID NO: 20869 - protein, 7 aa, synthetic construct
RGDNSVH

SEQ ID NO: 20870 - protein, 7 aa, synthetic construct
RGDNVAL

SEQ ID NO: 20871 - protein, 7 aa, synthetic construct
RGDAVVR

SEQ ID NO: 20872 - protein, 7 aa, synthetic construct
RGDQADI

SEQ ID NO: 20873 - protein, 7 aa, synthetic construct
RGDQAEK

SEQ ID NO: 20874 - protein, 7 aa, synthetic construct
RGDQAIR

SEQ ID NO: 20875 - protein, 7 aa, synthetic construct
RGDQDSV

SEQ ID NO: 20876 - protein, 7 aa, synthetic construct
RGDQEDR

SEQ ID NO: 20877 - protein, 7 aa, synthetic construct
RGDQETV

SEQ ID NO: 20878 - protein, 7 aa, synthetic construct
RGDQFTV

SEQ ID NO: 20879 - protein, 7 aa, synthetic construct
RGDADLE

SEQ ID NO: 20880 - protein, 7 aa, synthetic construct
RGDQGSG

SEQ ID NO: 20881 - protein, 7 aa, synthetic construct
RGDQIFD

SEQ ID NO: 20882 - protein, 7 aa, synthetic construct
RGDDANR

SEQ ID NO: 20883 - protein, 7 aa, synthetic construct
RGDQKEF

SEQ ID NO: 20884 - protein, 7 aa, synthetic construct
RGDQKGD

SEQ ID NO: 20885 - protein, 7 aa, synthetic construct
RGDQKHH

SEQ ID NO: 20886 - protein, 7 aa, synthetic construct
RGDQKIA

SEQ ID NO: 20887 - protein, 7 aa, synthetic construct
RGDQKRE

SEQ ID NO: 20888 - protein, 7 aa, synthetic construct
RGDDASF

SEQ ID NO: 20889 - protein, 7 aa, synthetic construct
RGDQLHR

SEQ ID NO: 20890 - protein, 7 aa, synthetic construct
RGDDATG

SEQ ID NO: 20891 - protein, 7 aa, synthetic construct
RGDQNHV

SEQ ID NO: 20892 - protein, 7 aa, synthetic construct
RGDQNQF

SEQ ID NO: 20893 - protein, 7 aa, synthetic construct
RGDQQEA

SEQ ID NO: 20894 - protein, 7 aa, synthetic construct
RGDQRTQ

SEQ ID NO: 20895 - protein, 7 aa, synthetic construct
RGDQTDI

SEQ ID NO: 20896 - protein, 7 aa, synthetic construct
RGDQTFL

SEQ ID NO: 20897 - protein, 7 aa, synthetic construct
RGDQVGH

SEQ ID NO: 20898 - protein, 7 aa, synthetic construct
RGDRDAN

SEQ ID NO: 20899 - protein, 7 aa, synthetic construct
RGDRDEG

SEQ ID NO: 20900 - protein, 7 aa, synthetic construct
RGDRDHT

SEQ ID NO: 20901 - protein, 7 aa, synthetic construct
RGDRFDF

SEQ ID NO: 20902 - protein, 7 aa, synthetic construct
RGDRFSR

SEQ ID NO: 20903 - protein, 7 aa, synthetic construct
RGDRGVE

SEQ ID NO: 20904 - protein, 7 aa, synthetic construct
RGDRHHE

SEQ ID NO: 20905 - protein, 7 aa, synthetic construct
RGDRHLF

SEQ ID NO: 20906 - protein, 7 aa, synthetic construct
RGDRKDE

SEQ ID NO: 20907 - protein, 7 aa, synthetic construct
RGDRNDK

SEQ ID NO: 20908 - protein, 7 aa, synthetic construct
RGDRRVA

SEQ ID NO: 20909 - protein, 7 aa, synthetic construct
RGDRRVH

SEQ ID NO: 20910 - protein, 7 aa, synthetic construct
RGDRSEE

SEQ ID NO: 20911 - protein, 7 aa, synthetic construct
RGDRSQA

SEQ ID NO: 20912 - protein, 7 aa, synthetic construct
RGDDESN

SEQ ID NO: 20913 - protein, 7 aa, synthetic construct
RGDRVSA

SEQ ID NO: 20914 - protein, 7 aa, synthetic construct
RGDSDKV

SEQ ID NO: 20915 - protein, 7 aa, synthetic construct
RGDDFFF

SEQ ID NO: 20916 - protein, 7 aa, synthetic construct
RGDSEGS

SEQ ID NO: 20917 - protein, 7 aa, synthetic construct
RGDSEHK

SEQ ID NO: 20918 - protein, 7 aa, synthetic construct
RGDSERF

SEQ ID NO: 20919 - protein, 7 aa, synthetic construct
RGDSFHL

SEQ ID NO: 20920 - protein, 7 aa, synthetic construct
RGDSFII

SEQ ID NO: 20921 - protein, 7 aa, synthetic construct
RGDSFTA

SEQ ID NO: 20922 - protein, 7 aa, synthetic construct
RGDSGHG

SEQ ID NO: 20923 - protein, 7 aa, synthetic construct
RGDSHAS

SEQ ID NO: 20924 - protein, 7 aa, synthetic construct
RGDSHNH

SEQ ID NO: 20925 - protein, 7 aa, synthetic construct
RGDSHNS

SEQ ID NO: 20926 - protein, 7 aa, synthetic construct
RGDAAER

SEQ ID NO: 20927 - protein, 7 aa, synthetic construct
RGDSIQL

SEQ ID NO: 20928 - protein, 7 aa, synthetic construct
RGDSIVR

SEQ ID NO: 20929 - protein, 7 aa, synthetic construct
RGDSKET

SEQ ID NO: 20930 - protein, 7 aa, synthetic construct
RGDSKSQ

SEQ ID NO: 20931 - protein, 7 aa, synthetic construct
RGDSLTL

SEQ ID NO: 20932 - protein, 7 aa, synthetic construct
RGDSNKG

SEQ ID NO: 20933 - protein, 7 aa, synthetic construct
RGDSRIQ

SEQ ID NO: 20934 - protein, 7 aa, synthetic construct
RGDSRSE

SEQ ID NO: 20935 - protein, 7 aa, synthetic construct
RGDSSDR

SEQ ID NO: 20936 - protein, 7 aa, synthetic construct
RGDSSKG

SEQ ID NO: 20937 - protein, 7 aa, synthetic construct
RGDSTKS

SEQ ID NO: 20938 - protein, 7 aa, synthetic construct
RGDSTNG

SEQ ID NO: 20939 - protein, 7 aa, synthetic construct
RGDSVHH

SEQ ID NO: 20940 - protein, 7 aa, synthetic construct
RGDSVSR

SEQ ID NO: 20941 - protein, 7 aa, synthetic construct
RGDSVVT

SEQ ID NO: 20942 - protein, 7 aa, synthetic construct
RGDTARF

SEQ ID NO: 20943 - protein, 7 aa, synthetic construct
RGDTASL

SEQ ID NO: 20944 - protein, 7 aa, synthetic construct
RGDTIDH

SEQ ID NO: 20945 - protein, 7 aa, synthetic construct
RGDTIHI

SEQ ID NO: 20946 - protein, 7 aa, synthetic construct
RGDTKDD

SEQ ID NO: 20947 - protein, 7 aa, synthetic construct
RGDTKFF

SEQ ID NO: 20948 - protein, 7 aa, synthetic construct
RGDTKNE

SEQ ID NO: 20949 - protein, 7 aa, synthetic construct
RGDTLLS

SEQ ID NO: 20950 - protein, 7 aa, synthetic construct
RGDTNNT

SEQ ID NO: 20951 - protein, 7 aa, synthetic construct
RGDTNQL

SEQ ID NO: 20952 - protein, 7 aa, synthetic construct
RGDTREH

SEQ ID NO: 20953 - protein, 7 aa, synthetic construct
RGDTREL

SEQ ID NO: 20954 - protein, 7 aa, synthetic construct
RGDTSHD

SEQ ID NO: 20955 - protein, 7 aa, synthetic construct
RGDTTFG

SEQ ID NO: 20956 - protein, 7 aa, synthetic construct
RGDTTHR

SEQ ID NO: 20957 - protein, 7 aa, synthetic construct
RGDTTVH

SEQ ID NO: 20958 - protein, 7 aa, synthetic construct
RGDDHTT

SEQ ID NO: 20959 - protein, 7 aa, synthetic construct
RGDTVIL

SEQ ID NO: 20960 - protein, 7 aa, synthetic construct
RGDVDVK

SEQ ID NO: 20961 - protein, 7 aa, synthetic construct
RGDVEDL

SEQ ID NO: 20962 - protein, 7 aa, synthetic construct
RGDVFNT

SEQ ID NO: 20963 - protein, 7 aa, synthetic construct
RGDVIVN

SEQ ID NO: 20964 - protein, 7 aa, synthetic construct
RGDVIVT

SEQ ID NO: 20965 - protein, 7 aa, synthetic construct
RGDVLTT

SEQ ID NO: 20966 - protein, 7 aa, synthetic construct
RGDVNRE

SEQ ID NO: 20967 - protein, 7 aa, synthetic construct
RGDVNSF

SEQ ID NO: 20968 - protein, 7 aa, synthetic construct
RGDVNTE

SEQ ID NO: 20969 - protein, 7 aa, synthetic construct
RGDVQIK

SEQ ID NO: 20970 - protein, 7 aa, synthetic construct
RGDVRET

SEQ ID NO: 20971 - protein, 7 aa, synthetic construct
RGDVRKD

SEQ ID NO: 20972 - protein, 7 aa, synthetic construct
RGDVRKK

SEQ ID NO: 20973 - protein, 7 aa, synthetic construct
RGDDKEV

SEQ ID NO: 20974 - protein, 7 aa, synthetic construct
RGDVSGQ

SEQ ID NO: 20975 - protein, 7 aa, synthetic construct
RGDDKFL

SEQ ID NO: 20976 - protein, 7 aa, synthetic construct
RGDDKGG

SEQ ID NO: 20977 - protein, 7 aa, synthetic construct
RGDVTLF

SEQ ID NO: 20978 - protein, 7 aa, synthetic construct
RGDVTQF

SEQ ID NO: 20979 - protein, 7 aa, synthetic construct
RGDVVDG

SEQ ID NO: 20980 - protein, 7 aa, synthetic construct
RGDVVQK

SEQ ID NO: 20981 - protein, 7 aa, synthetic construct
RGDDKKA

SEQ ID NO: 20982 - protein, 7 aa, synthetic construct
RGDDLSS

SEQ ID NO: 20983 - protein, 7 aa, synthetic construct
RGDDLTF

SEQ ID NO: 20984 - protein, 7 aa, synthetic construct
RGDDNSE

SEQ ID NO: 20985 - protein, 7 aa, synthetic construct
RGDDRFE

SEQ ID NO: 20986 - protein, 7 aa, synthetic construct
RGDDRGA

SEQ ID NO: 20987 - protein, 7 aa, synthetic construct
RGDDRHV

SEQ ID NO: 20988 - protein, 7 aa, synthetic construct
RGDDSHH

SEQ ID NO: 20989 - protein, 7 aa, synthetic construct
RGDDSSF

SEQ ID NO: 20990 - protein, 7 aa, synthetic construct
RGDDSVL

SEQ ID NO: 20991 - protein, 7 aa, synthetic construct
RGDDTQL

SEQ ID NO: 20992 - protein, 7 aa, synthetic construct
RGDDVGK

SEQ ID NO: 20993 - protein, 7 aa, synthetic construct
RGDDVIK

SEQ ID NO: 20994 - protein, 7 aa, synthetic construct
RGDEAKQ

SEQ ID NO: 20995 - protein, 7 aa, synthetic construct
RGDEDTR

SEQ ID NO: 20996 - protein, 7 aa, synthetic construct
RGDAFFT

SEQ ID NO: 20997 - protein, 7 aa, synthetic construct
RGDEFKE

SEQ ID NO: 20998 - protein, 7 aa, synthetic construct
RGDAFHH

SEQ ID NO: 20999 - protein, 7 aa, synthetic construct
RGDEGDN

SEQ ID NO: 21000 - protein, 7 aa, synthetic construct
RGDEGGK

SEQ ID NO: 21001 - protein, 7 aa, synthetic construct
RGDEIHE

SEQ ID NO: 21002 - protein, 7 aa, synthetic construct
RGDEIII

SEQ ID NO: 21003 - protein, 7 aa, synthetic construct
RGDELEE

SEQ ID NO: 21004 - protein, 7 aa, synthetic construct
RGDELHF

SEQ ID NO: 21005 - protein, 7 aa, synthetic construct
RGDELQL

SEQ ID NO: 21006 - protein, 7 aa, synthetic construct
RGDENFK

SEQ ID NO: 21007 - protein, 7 aa, synthetic construct
RGDENHF

SEQ ID NO: 21008 - protein, 7 aa, synthetic construct
RGDENHR

SEQ ID NO: 21009 - protein, 7 aa, synthetic construct
RGDENLV

SEQ ID NO: 21010 - protein, 7 aa, synthetic construct
RGDAGAG

SEQ ID NO: 21011 - protein, 7 aa, synthetic construct
RGDEQGE

SEQ ID NO: 21012 - protein, 7 aa, synthetic construct
RGDERGF

SEQ ID NO: 21013 - protein, 7 aa, synthetic construct
RGDERQT

SEQ ID NO: 21014 - protein, 7 aa, synthetic construct
RGDESAV

SEQ ID NO: 21015 - protein, 7 aa, synthetic construct
RGDESHF

SEQ ID NO: 21016 - protein, 7 aa, synthetic construct
RGDETQV

SEQ ID NO: 21017 - protein, 7 aa, synthetic construct
RGDEVGS

SEQ ID NO: 21018 - protein, 7 aa, synthetic construct
RGDAGLK

SEQ ID NO: 21019 - protein, 7 aa, synthetic construct
RGDFDFL

SEQ ID NO: 21020 - protein, 7 aa, synthetic construct
RGDFDKT

SEQ ID NO: 21021 - protein, 7 aa, synthetic construct
RGDFDRF

SEQ ID NO: 21022 - protein, 7 aa, synthetic construct
RGDFEGS

SEQ ID NO: 21023 - protein, 7 aa, synthetic construct
RGDFEIQ

SEQ ID NO: 21024 - protein, 7 aa, synthetic construct
RGDFEKI

SEQ ID NO: 21025 - protein, 7 aa, synthetic construct
RGDFERH

SEQ ID NO: 21026 - protein, 7 aa, synthetic construct
RGDFFDN

SEQ ID NO: 21027 - protein, 7 aa, synthetic construct
RGDFFEF

SEQ ID NO: 21028 - protein, 7 aa, synthetic construct
RGDFFVI

SEQ ID NO: 21029 - protein, 7 aa, synthetic construct
RGDFGRG

SEQ ID NO: 21030 - protein, 7 aa, synthetic construct
RGDFHAF

SEQ ID NO: 21031 - protein, 7 aa, synthetic construct
RGDFIVK

SEQ ID NO: 21032 - protein, 7 aa, synthetic construct
RGDFKHD

SEQ ID NO: 21033 - protein, 7 aa, synthetic construct
RGDAHGE

SEQ ID NO: 21034 - protein, 7 aa, synthetic construct
RGDAHGF

SEQ ID NO: 21035 - protein, 7 aa, synthetic construct
RGDFKTG

SEQ ID NO: 21036 - protein, 7 aa, synthetic construct
RGDAHGN

SEQ ID NO: 21037 - protein, 7 aa, synthetic construct
RGDFLFV

SEQ ID NO: 21038 - protein, 7 aa, synthetic construct
RGDFLQG

SEQ ID NO: 21039 - protein, 7 aa, synthetic construct
RGDFNEF

SEQ ID NO: 21040 - protein, 7 aa, synthetic construct
RGDFNTE

SEQ ID NO: 21041 - protein, 7 aa, synthetic construct
RGDFQFS

SEQ ID NO: 21042 - protein, 7 aa, synthetic construct
RGDFQSQ

SEQ ID NO: 21043 - protein, 7 aa, synthetic construct
RGDFTAH

SEQ ID NO: 21044 - protein, 7 aa, synthetic construct
RGDAALR

SEQ ID NO: 21045 - protein, 7 aa, synthetic construct
RGDFVDN

SEQ ID NO: 21046 - protein, 7 aa, synthetic construct
RGDFVKA

SEQ ID NO: 21047 - protein, 7 aa, synthetic construct
RGDFVQG

SEQ ID NO: 21048 - protein, 7 aa, synthetic construct
RGDGARD

SEQ ID NO: 21049 - protein, 7 aa, synthetic construct
RGDGFGF

SEQ ID NO: 21050 - protein, 7 aa, synthetic construct
RGDGFVT

SEQ ID NO: 21051 - protein, 7 aa, synthetic construct
RGDGGAG

SEQ ID NO: 21052 - protein, 7 aa, synthetic construct
RGDGGHS

SEQ ID NO: 21053 - protein, 7 aa, synthetic construct
RGDGGTQ

SEQ ID NO: 21054 - protein, 7 aa, synthetic construct
RGDGHAS

SEQ ID NO: 21055 - protein, 7 aa, synthetic construct
RGDGHDA

SEQ ID NO: 21056 - protein, 7 aa, synthetic construct
RGDGHDE

SEQ ID NO: 21057 - protein, 7 aa, synthetic construct
RGDGHHI

SEQ ID NO: 21058 - protein, 7 aa, synthetic construct
RGDGHNA

SEQ ID NO: 21059 - protein, 7 aa, synthetic construct
RGDGHVT

SEQ ID NO: 21060 - protein, 7 aa, synthetic construct
RGDGKAS

SEQ ID NO: 21061 - protein, 7 aa, synthetic construct
RGDGKQV

SEQ ID NO: 21062 - protein, 7 aa, synthetic construct
RGDGNER

SEQ ID NO: 21063 - protein, 7 aa, synthetic construct
RGDGNNE

SEQ ID NO: 21064 - protein, 7 aa, synthetic construct
RGDGNNL

SEQ ID NO: 21065 - protein, 7 aa, synthetic construct
RGDGQGI

SEQ ID NO: 21066 - protein, 7 aa, synthetic construct
RGDGQKG

SEQ ID NO: 21067 - protein, 7 aa, synthetic construct
RGDGQVL

SEQ ID NO: 21068 - protein, 7 aa, synthetic construct
RGDAKEK

SEQ ID NO: 21069 - protein, 7 aa, synthetic construct
RGDGRRT

SEQ ID NO: 21070 - protein, 7 aa, synthetic construct
RGDGSDG

SEQ ID NO: 21071 - protein, 7 aa, synthetic construct
RGDGTNS

SEQ ID NO: 21072 - protein, 7 aa, synthetic construct
RGDGTSL

SEQ ID NO: 21073 - protein, 7 aa, synthetic construct
RGDGVDH

SEQ ID NO: 21074 - protein, 7 aa, synthetic construct
RGDGVFN

SEQ ID NO: 21075 - protein, 7 aa, synthetic construct
RGDHAAE

SEQ ID NO: 21076 - protein, 7 aa, synthetic construct
RGDHDAV

SEQ ID NO: 21077 - protein, 7 aa, synthetic construct
RGDHDKL

SEQ ID NO: 21078 - protein, 7 aa, synthetic construct
RGDHEKD

SEQ ID NO: 21079 - protein, 7 aa, synthetic construct
RGDHEVQ

SEQ ID NO: 21080 - protein, 7 aa, synthetic construct
RGDHFNG

SEQ ID NO: 21081 - protein, 7 aa, synthetic construct
RGDHFNQ

SEQ ID NO: 21082 - protein, 7 aa, synthetic construct
RGDHFRG

SEQ ID NO: 21083 - protein, 7 aa, synthetic construct
RGDAKTN

SEQ ID NO: 21084 - protein, 7 aa, synthetic construct
RGDHGKA

SEQ ID NO: 21085 - protein, 7 aa, synthetic construct
RGDHGQG

SEQ ID NO: 21086 - protein, 7 aa, synthetic construct
RGDHGSH

SEQ ID NO: 21087 - protein, 7 aa, synthetic construct
RGDHHEK

SEQ ID NO: 21088 - protein, 7 aa, synthetic construct
RGDHITI

SEQ ID NO: 21089 - protein, 7 aa, synthetic construct
RGDALFV

SEQ ID NO: 21090 - protein, 7 aa, synthetic construct
RGDHLHH

SEQ ID NO: 21091 - protein, 7 aa, synthetic construct
RGDHLSG

SEQ ID NO: 21092 - protein, 7 aa, synthetic construct
RGDHNQE

SEQ ID NO: 21093 - protein, 7 aa, synthetic construct
RGDHQQI

SEQ ID NO: 21094 - protein, 7 aa, synthetic construct
RGDHQRS

SEQ ID NO: 21095 - protein, 7 aa, synthetic construct
RGDHQTA

SEQ ID NO: 21096 - protein, 7 aa, synthetic construct
RGDHQTH

SEQ ID NO: 21097 - protein, 7 aa, synthetic construct
RGDHRAT

SEQ ID NO: 21098 - protein, 7 aa, synthetic construct
RGDHRFE

SEQ ID NO: 21099 - protein, 7 aa, synthetic construct
RGDHRII

SEQ ID NO: 21100 - protein, 7 aa, synthetic construct
RGDHSQD

SEQ ID NO: 21101 - protein, 7 aa, synthetic construct
RGDHTAS

SEQ ID NO: 21102 - protein, 7 aa, synthetic construct
RGDALSH

SEQ ID NO: 21103 - protein, 7 aa, synthetic construct
RGDHTKR

SEQ ID NO: 21104 - protein, 7 aa, synthetic construct
RGDHVES

SEQ ID NO: 21105 - protein, 7 aa, synthetic construct
RGDHVKD

SEQ ID NO: 21106 - protein, 7 aa, synthetic construct
RGDIAGH

SEQ ID NO: 21107 - protein, 7 aa, synthetic construct
RGDIAQE

SEQ ID NO: 21108 - protein, 7 aa, synthetic construct
RGDIEAI

SEQ ID NO: 21109 - protein, 7 aa, synthetic construct
RGDIEGI

SEQ ID NO: 21110 - protein, 7 aa, synthetic construct
RGDIEHN

SEQ ID NO: 21111 - protein, 7 aa, synthetic construct
RGDIEKS

SEQ ID NO: 21112 - protein, 7 aa, synthetic construct
RGDIEQT

SEQ ID NO: 21113 - protein, 7 aa, synthetic construct
RGDIERL

SEQ ID NO: 21114 - protein, 7 aa, synthetic construct
RGDIESS

SEQ ID NO: 21115 - protein, 7 aa, synthetic construct
RGDIFKE

SEQ ID NO: 21116 - protein, 7 aa, synthetic construct
RGDIFVT

SEQ ID NO: 21117 - protein, 7 aa, synthetic construct
RGDIIHQ

SEQ ID NO: 21118 - protein, 7 aa, synthetic construct
RGDIKEF

SEQ ID NO: 21119 - protein, 7 aa, synthetic construct
RGDANSI

SEQ ID NO: 21120 - protein, 7 aa, synthetic construct
RGDANTD

SEQ ID NO: 21121 - protein, 7 aa, synthetic construct
RGDINKS

SEQ ID NO: 21122 - protein, 7 aa, synthetic construct
RGDIQEH

SEQ ID NO: 21123 - protein, 7 aa, synthetic construct
RGDIQET

SEQ ID NO: 21124 - protein, 7 aa, synthetic construct
RGDIQIH

SEQ ID NO: 21125 - protein, 7 aa, synthetic construct
RGDIQRH

SEQ ID NO: 21126 - protein, 7 aa, synthetic construct
RGDIRHQ

SEQ ID NO: 21127 - protein, 7 aa, synthetic construct
RGDIRSG

SEQ ID NO: 21128 - protein, 7 aa, synthetic construct
RGDIRTH

SEQ ID NO: 21129 - protein, 7 aa, synthetic construct
RGDISSA

SEQ ID NO: 21130 - protein, 7 aa, synthetic construct
RGDITAK

SEQ ID NO: 21131 - protein, 7 aa, synthetic construct
RGDITNL

SEQ ID NO: 21132 - protein, 7 aa, synthetic construct
RGDAQNE

SEQ ID NO: 21133 - protein, 7 aa, synthetic construct
RGDKDER

SEQ ID NO: 21134 - protein, 7 aa, synthetic construct
RGDAQNH

SEQ ID NO: 21135 - protein, 7 aa, synthetic construct
RGDKDKH

SEQ ID NO: 21136 - protein, 7 aa, synthetic construct
RGDKDNN

SEQ ID NO: 21137 - protein, 7 aa, synthetic construct
RGDKDNV

SEQ ID NO: 21138 - protein, 7 aa, synthetic construct
RGDKDRA

SEQ ID NO: 21139 - protein, 7 aa, synthetic construct
RGDKFVL

SEQ ID NO: 21140 - protein, 7 aa, synthetic construct
RGDKHGS

SEQ ID NO: 21141 - protein, 7 aa, synthetic construct
RGDKHHS

SEQ ID NO: 21142 - protein, 7 aa, synthetic construct
RGDKHRS

SEQ ID NO: 21143 - protein, 7 aa, synthetic construct
RGDKLSG

SEQ ID NO: 21144 - protein, 7 aa, synthetic construct
RGDKLVF

SEQ ID NO: 21145 - protein, 7 aa, synthetic construct
RGDARIR

SEQ ID NO: 21146 - protein, 7 aa, synthetic construct
RGDKQKN

SEQ ID NO: 21147 - protein, 7 aa, synthetic construct
RGDKRFF

SEQ ID NO: 21148 - protein, 7 aa, synthetic construct
RGDKVLV

SEQ ID NO: 21149 - protein, 7 aa, synthetic construct
RGDLAHD

SEQ ID NO: 21150 - protein, 7 aa, synthetic construct
RGDLAIE

SEQ ID NO: 21151 - protein, 7 aa, synthetic construct
RGDLDDK

SEQ ID NO: 21152 - protein, 7 aa, synthetic construct
RGDLDIH

SEQ ID NO: 21153 - protein, 7 aa, synthetic construct
RGDLDKD

SEQ ID NO: 21154 - protein, 7 aa, synthetic construct
RGDLDKQ

SEQ ID NO: 21155 - protein, 7 aa, synthetic construct
RGDLDVA

SEQ ID NO: 21156 - protein, 7 aa, synthetic construct
RGDLFSK

SEQ ID NO: 21157 - protein, 7 aa, synthetic construct
RGDLHGH

SEQ ID NO: 21158 - protein, 7 aa, synthetic construct
RGDLIEQ

SEQ ID NO: 21159 - protein, 7 aa, synthetic construct
RGDLIVS

SEQ ID NO: 21160 - protein, 7 aa, synthetic construct
RGDLLFE

SEQ ID NO: 21161 - protein, 7 aa, synthetic construct
RGDLNNQ

SEQ ID NO: 21162 - protein, 7 aa, synthetic construct
RGDLQLR

SEQ ID NO: 21163 - protein, 7 aa, synthetic construct
RGDLRSH

SEQ ID NO: 21164 - protein, 7 aa, synthetic construct
RGDLSLN

SEQ ID NO: 21165 - protein, 7 aa, synthetic construct
RGDLSQR

SEQ ID NO: 21166 - protein, 7 aa, synthetic construct
RGDLSSG

SEQ ID NO: 21167 - protein, 7 aa, synthetic construct
RGDLTKK

SEQ ID NO: 21168 - protein, 7 aa, synthetic construct
RGDLVGF

SEQ ID NO: 21169 - protein, 7 aa, synthetic construct
RGDNAHD

SEQ ID NO: 21170 - protein, 7 aa, synthetic construct
RGDNAHS

SEQ ID NO: 21171 - protein, 7 aa, synthetic construct
RGDNART

SEQ ID NO: 21172 - protein, 7 aa, synthetic construct
RGDNDFE

SEQ ID NO: 21173 - protein, 7 aa, synthetic construct
RGDNDKH

SEQ ID NO: 21174 - protein, 7 aa, synthetic construct
RGDNEEH

SEQ ID NO: 21175 - protein, 7 aa, synthetic construct
RGDNENV

SEQ ID NO: 21176 - protein, 7 aa, synthetic construct
RGDNFAF

SEQ ID NO: 21177 - protein, 7 aa, synthetic construct
RGDNFDK

SEQ ID NO: 21178 - protein, 7 aa, synthetic construct
RGDNGGF

SEQ ID NO: 21179 - protein, 7 aa, synthetic construct
RGDNGHL

SEQ ID NO: 21180 - protein, 7 aa, synthetic construct
RGDNGIN

SEQ ID NO: 21181 - protein, 7 aa, synthetic construct
RGDNHDT

SEQ ID NO: 21182 - protein, 7 aa, synthetic construct
RGDNHIL

SEQ ID NO: 21183 - protein, 7 aa, synthetic construct
RGDNIEI

SEQ ID NO: 21184 - protein, 7 aa, synthetic construct
RGDAVDS

SEQ ID NO: 21185 - protein, 7 aa, synthetic construct
RGDNIRS

SEQ ID NO: 21186 - protein, 7 aa, synthetic construct
RGDNISH

SEQ ID NO: 21187 - protein, 7 aa, synthetic construct
RGDNKEF

SEQ ID NO: 21188 - protein, 7 aa, synthetic construct
RGDNKEL

SEQ ID NO: 21189 - protein, 7 aa, synthetic construct
RGDNKGK

SEQ ID NO: 21190 - protein, 7 aa, synthetic construct
RGDNKLI

SEQ ID NO: 21191 - protein, 7 aa, synthetic construct
RGDNKSG

SEQ ID NO: 21192 - protein, 7 aa, synthetic construct
RGDNKTR

SEQ ID NO: 21193 - protein, 7 aa, synthetic construct
RGDAVGR

SEQ ID NO: 21194 - protein, 7 aa, synthetic construct
RGDNSHR

SEQ ID NO: 21195 - protein, 7 aa, synthetic construct
RGDNSRD

SEQ ID NO: 21196 - protein, 7 aa, synthetic construct
RGDNTRG

SEQ ID NO: 21197 - protein, 7 aa, synthetic construct
RGDNVKG

SEQ ID NO: 21198 - protein, 7 aa, synthetic construct
RGDQAFF

SEQ ID NO: 21199 - protein, 7 aa, synthetic construct
RGDQDGN

SEQ ID NO: 21200 - protein, 7 aa, synthetic construct
RGDQEHA

SEQ ID NO: 21201 - protein, 7 aa, synthetic construct
RGDQEKK

SEQ ID NO: 21202 - protein, 7 aa, synthetic construct
RGDQESL

SEQ ID NO: 21203 - protein, 7 aa, synthetic construct
RGDQETF

SEQ ID NO: 21204 - protein, 7 aa, synthetic construct
RGDQFGG

SEQ ID NO: 21205 - protein, 7 aa, synthetic construct
RGDDAHH

SEQ ID NO: 21206 - protein, 7 aa, synthetic construct
RGDQFQA

SEQ ID NO: 21207 - protein, 7 aa, synthetic construct
RGDQGFG

SEQ ID NO: 21208 - protein, 7 aa, synthetic construct
RGDQGVE

SEQ ID NO: 21209 - protein, 7 aa, synthetic construct
RGDQGVR

SEQ ID NO: 21210 - protein, 7 aa, synthetic construct
RGDQGVS

SEQ ID NO: 21211 - protein, 7 aa, synthetic construct
RGDQIIR

SEQ ID NO: 21212 - protein, 7 aa, synthetic construct
RGDQILK

SEQ ID NO: 21213 - protein, 7 aa, synthetic construct
RGDQINE

SEQ ID NO: 21214 - protein, 7 aa, synthetic construct
RGDQKDN

SEQ ID NO: 21215 - protein, 7 aa, synthetic construct
RGDQKDS

SEQ ID NO: 21216 - protein, 7 aa, synthetic construct
RGDQLIH

SEQ ID NO: 21217 - protein, 7 aa, synthetic construct
RGDQLTQ

SEQ ID NO: 21218 - protein, 7 aa, synthetic construct
RGDQNAK

SEQ ID NO: 21219 - protein, 7 aa, synthetic construct
RGDQNQK

SEQ ID NO: 21220 - protein, 7 aa, synthetic construct
RGDDDFK

SEQ ID NO: 21221 - protein, 7 aa, synthetic construct
RGDQSLF

SEQ ID NO: 21222 - protein, 7 aa, synthetic construct
RGDQSVN

SEQ ID NO: 21223 - protein, 7 aa, synthetic construct
RGDQTHG

SEQ ID NO: 21224 - protein, 7 aa, synthetic construct
RGDQTVA

SEQ ID NO: 21225 - protein, 7 aa, synthetic construct
RGDRAIS

SEQ ID NO: 21226 - protein, 7 aa, synthetic construct
RGDRDGD

SEQ ID NO: 21227 - protein, 7 aa, synthetic construct
RGDRDGS

SEQ ID NO: 21228 - protein, 7 aa, synthetic construct
RGDRDHR

SEQ ID NO: 21229 - protein, 7 aa, synthetic construct
RGDRDQN

SEQ ID NO: 21230 - protein, 7 aa, synthetic construct
RGDREDA

SEQ ID NO: 21231 - protein, 7 aa, synthetic construct
RGDREDI

SEQ ID NO: 21232 - protein, 7 aa, synthetic construct
RGDREFN

SEQ ID NO: 21233 - protein, 7 aa, synthetic construct
RGDDDRT

SEQ ID NO: 21234 - protein, 7 aa, synthetic construct
RGDRFHK

SEQ ID NO: 21235 - protein, 7 aa, synthetic construct
RGDRGDE

SEQ ID NO: 21236 - protein, 7 aa, synthetic construct
RGDDDTQ

SEQ ID NO: 21237 - protein, 7 aa, synthetic construct
RGDRIIS

SEQ ID NO: 21238 - protein, 7 aa, synthetic construct
RGDDEFF

SEQ ID NO: 21239 - protein, 7 aa, synthetic construct
RGDRNEV

SEQ ID NO: 21240 - protein, 7 aa, synthetic construct
RGDDEIK

SEQ ID NO: 21241 - protein, 7 aa, synthetic construct
RGDRNKG

SEQ ID NO: 21242 - protein, 7 aa, synthetic construct
RGDRNTD

SEQ ID NO: 21243 - protein, 7 aa, synthetic construct
RGDRQAS

SEQ ID NO: 21244 - protein, 7 aa, synthetic construct
RGDRTFL

SEQ ID NO: 21245 - protein, 7 aa, synthetic construct
RGDRVFA

SEQ ID NO: 21246 - protein, 7 aa, synthetic construct
RGDSARR

SEQ ID NO: 21247 - protein, 7 aa, synthetic construct
RGDSDIT

SEQ ID NO: 21248 - protein, 7 aa, synthetic construct
RGDSDSN

SEQ ID NO: 21249 - protein, 7 aa, synthetic construct
RGDSEDF

SEQ ID NO: 21250 - protein, 7 aa, synthetic construct
RGDSFGF

SEQ ID NO: 21251 - protein, 7 aa, synthetic construct
RGDSFHH

SEQ ID NO: 21252 - protein, 7 aa, synthetic construct
RGDDFKE

SEQ ID NO: 21253 - protein, 7 aa, synthetic construct
RGDSGSI

SEQ ID NO: 21254 - protein, 7 aa, synthetic construct
RGDSHGK

SEQ ID NO: 21255 - protein, 7 aa, synthetic construct
RGDSHLG

SEQ ID NO: 21256 - protein, 7 aa, synthetic construct
RGDSHSA

SEQ ID NO: 21257 - protein, 7 aa, synthetic construct
RGDSIKH

SEQ ID NO: 21258 - protein, 7 aa, synthetic construct
RGDSILI

SEQ ID NO: 21259 - protein, 7 aa, synthetic construct
RGDSLGV

SEQ ID NO: 21260 - protein, 7 aa, synthetic construct
RGDSLSN

SEQ ID NO: 21261 - protein, 7 aa, synthetic construct
RGDSLVR

SEQ ID NO: 21262 - protein, 7 aa, synthetic construct
RGDSNAF

SEQ ID NO: 21263 - protein, 7 aa, synthetic construct
RGDDFVR

SEQ ID NO: 21264 - protein, 7 aa, synthetic construct
RGDSQGK

SEQ ID NO: 21265 - protein, 7 aa, synthetic construct
RGDSQST

SEQ ID NO: 21266 - protein, 7 aa, synthetic construct
RGDSRTE

SEQ ID NO: 21267 - protein, 7 aa, synthetic construct
RGDSRVE

SEQ ID NO: 21268 - protein, 7 aa, synthetic construct
RGDSSFN

SEQ ID NO: 21269 - protein, 7 aa, synthetic construct
RGDSTLD

SEQ ID NO: 21270 - protein, 7 aa, synthetic construct
RGDSTQH

SEQ ID NO: 21271 - protein, 7 aa, synthetic construct
RGDDGHN

SEQ ID NO: 21272 - protein, 7 aa, synthetic construct
RGDSVGK

SEQ ID NO: 21273 - protein, 7 aa, synthetic construct
RGDTAIL

SEQ ID NO: 21274 - protein, 7 aa, synthetic construct
RGDTEAV

SEQ ID NO: 21275 - protein, 7 aa, synthetic construct
RGDDGRE

SEQ ID NO: 21276 - protein, 7 aa, synthetic construct
RGDDGTH

SEQ ID NO: 21277 - protein, 7 aa, synthetic construct
RGDTGHQ

SEQ ID NO: 21278 - protein, 7 aa, synthetic construct
RGDTHAT

SEQ ID NO: 21279 - protein, 7 aa, synthetic construct
RGDTHST

SEQ ID NO: 21280 - protein, 7 aa, synthetic construct
RGDTKGG

SEQ ID NO: 21281 - protein, 7 aa, synthetic construct
RGDTKQF

SEQ ID NO: 21282 - protein, 7 aa, synthetic construct
RGDTLHS

SEQ ID NO: 21283 - protein, 7 aa, synthetic construct
RGDTNHL

SEQ ID NO: 21284 - protein, 7 aa, synthetic construct
RGDTQHL

SEQ ID NO: 21285 - protein, 7 aa, synthetic construct
RGDTSIL

SEQ ID NO: 21286 - protein, 7 aa, synthetic construct
RGDTSRV

SEQ ID NO: 21287 - protein, 7 aa, synthetic construct
RGDTVNH

SEQ ID NO: 21288 - protein, 7 aa, synthetic construct
RGDVAAI

SEQ ID NO: 21289 - protein, 7 aa, synthetic construct
RGDDIDD

SEQ ID NO: 21290 - protein, 7 aa, synthetic construct
RGDVATN

SEQ ID NO: 21291 - protein, 7 aa, synthetic construct
RGDVEAD

SEQ ID NO: 21292 - protein, 7 aa, synthetic construct
RGDVFVH

SEQ ID NO: 21293 - protein, 7 aa, synthetic construct
RGDVLEI

SEQ ID NO: 21294 - protein, 7 aa, synthetic construct
RGDVLFK

SEQ ID NO: 21295 - protein, 7 aa, synthetic construct
RGDVLNE

SEQ ID NO: 21296 - protein, 7 aa, synthetic construct
RGDDITH

SEQ ID NO: 21297 - protein, 7 aa, synthetic construct
RGDVQAF

SEQ ID NO: 21298 - protein, 7 aa, synthetic construct
RGDVQFI

SEQ ID NO: 21299 - protein, 7 aa, synthetic construct
RGDVQTL

SEQ ID NO: 21300 - protein, 7 aa, synthetic construct
RGDVSDN

SEQ ID NO: 21301 - protein, 7 aa, synthetic construct
RGDVSKE

SEQ ID NO: 21302 - protein, 7 aa, synthetic construct
RGDVSTH

SEQ ID NO: 21303 - protein, 7 aa, synthetic construct
RGDVTLR

SEQ ID NO: 21304 - protein, 7 aa, synthetic construct
RGDVVFH

SEQ ID NO: 21305 - protein, 7 aa, synthetic construct
RGDDLHL

SEQ ID NO: 21306 - protein, 7 aa, synthetic construct
RGDDLVK

SEQ ID NO: 21307 - protein, 7 aa, synthetic construct
RGDDNEH

SEQ ID NO: 21308 - protein, 7 aa, synthetic construct
RGDDRER

SEQ ID NO: 21309 - protein, 7 aa, synthetic construct
RGDDSFE

SEQ ID NO: 21310 - protein, 7 aa, synthetic construct
RGDDSFK

SEQ ID NO: 21311 - protein, 7 aa, synthetic construct
RGDDTKN

SEQ ID NO: 21312 - protein, 7 aa, synthetic construct
RGDDVIR

SEQ ID NO: 21313 - protein, 7 aa, synthetic construct
RGDDVKN

SEQ ID NO: 21314 - protein, 7 aa, synthetic construct
RGDEDSH

SEQ ID NO: 21315 - protein, 7 aa, synthetic construct
RGDEHHS

SEQ ID NO: 21316 - protein, 7 aa, synthetic construct
RGDEHKE

SEQ ID NO: 21317 - protein, 7 aa, synthetic construct
RGDEHRD

SEQ ID NO: 21318 - protein, 7 aa, synthetic construct
RGDEHTL

SEQ ID NO: 21319 - protein, 7 aa, synthetic construct
RGDEINK

SEQ ID NO: 21320 - protein, 7 aa, synthetic construct
RGDELHR

SEQ ID NO: 21321 - protein, 7 aa, synthetic construct
RGDELSI

SEQ ID NO: 21322 - protein, 7 aa, synthetic construct
RGDELTN

SEQ ID NO: 21323 - protein, 7 aa, synthetic construct
RGDENQK

SEQ ID NO: 21324 - protein, 7 aa, synthetic construct
RGDENSA

SEQ ID NO: 21325 - protein, 7 aa, synthetic construct
RGDERAH

SEQ ID NO: 21326 - protein, 7 aa, synthetic construct
RGDERHR

SEQ ID NO: 21327 - protein, 7 aa, synthetic construct
RGDERSK

SEQ ID NO: 21328 - protein, 7 aa, synthetic construct
RGDERSN

SEQ ID NO: 21329 - protein, 7 aa, synthetic construct
RGDERVR

SEQ ID NO: 21330 - protein, 7 aa, synthetic construct
RGDESAT

SEQ ID NO: 21331 - protein, 7 aa, synthetic construct
RGDAGFL

SEQ ID NO: 21332 - protein, 7 aa, synthetic construct
RGDESTT

SEQ ID NO: 21333 - protein, 7 aa, synthetic construct
RGDFDKR

SEQ ID NO: 21334 - protein, 7 aa, synthetic construct
RGDFEHT

SEQ ID NO: 21335 - protein, 7 aa, synthetic construct
RGDFEND

SEQ ID NO: 21336 - protein, 7 aa, synthetic construct
RGDFFHD

SEQ ID NO: 21337 - protein, 7 aa, synthetic construct
RGDFFNI

SEQ ID NO: 21338 - protein, 7 aa, synthetic construct
RGDFGEL

SEQ ID NO: 21339 - protein, 7 aa, synthetic construct
RGDFIGN

SEQ ID NO: 21340 - protein, 7 aa, synthetic construct
RGDFINA

SEQ ID NO: 21341 - protein, 7 aa, synthetic construct
RGDFKKG

SEQ ID NO: 21342 - protein, 7 aa, synthetic construct
RGDFLNA

SEQ ID NO: 21343 - protein, 7 aa, synthetic construct
RGDFLRV

SEQ ID NO: 21344 - protein, 7 aa, synthetic construct
RGDFRER

SEQ ID NO: 21345 - protein, 7 aa, synthetic construct
RGDFVAF

SEQ ID NO: 21346 - protein, 7 aa, synthetic construct
RGDFVGD

SEQ ID NO: 21347 - protein, 7 aa, synthetic construct
RGDFVHV

SEQ ID NO: 21348 - protein, 7 aa, synthetic construct
RGDFVLN

SEQ ID NO: 21349 - protein, 7 aa, synthetic construct
RGDGATI

SEQ ID NO: 21350 - protein, 7 aa, synthetic construct
RGDGATQ

SEQ ID NO: 21351 - protein, 7 aa, synthetic construct
RGDGDKR

SEQ ID NO: 21352 - protein, 7 aa, synthetic construct
RGDGEFV

SEQ ID NO: 21353 - protein, 7 aa, synthetic construct
RGDGFFF

SEQ ID NO: 21354 - protein, 7 aa, synthetic construct
RGDGFNT

SEQ ID NO: 21355 - protein, 7 aa, synthetic construct
RGDGFSI

SEQ ID NO: 21356 - protein, 7 aa, synthetic construct
RGDGGLL

SEQ ID NO: 21357 - protein, 7 aa, synthetic construct
RGDGGTG

SEQ ID NO: 21358 - protein, 7 aa, synthetic construct
RGDGHAT

SEQ ID NO: 21359 - protein, 7 aa, synthetic construct
RGDGHLK

SEQ ID NO: 21360 - protein, 7 aa, synthetic construct
RGDGIQK

SEQ ID NO: 21361 - protein, 7 aa, synthetic construct
RGDGKHQ

SEQ ID NO: 21362 - protein, 7 aa, synthetic construct
RGDGLSF

SEQ ID NO: 21363 - protein, 7 aa, synthetic construct
RGDGLVL

SEQ ID NO: 21364 - protein, 7 aa, synthetic construct
RGDGNGR

SEQ ID NO: 21365 - protein, 7 aa, synthetic construct
RGDGNGT

SEQ ID NO: 21366 - protein, 7 aa, synthetic construct
RGDGNHN

SEQ ID NO: 21367 - protein, 7 aa, synthetic construct
RGDGNNI

SEQ ID NO: 21368 - protein, 7 aa, synthetic construct
RGDGNVI

SEQ ID NO: 21369 - protein, 7 aa, synthetic construct
RGDGQEV

SEQ ID NO: 21370 - protein, 7 aa, synthetic construct
RGDGQKT

SEQ ID NO: 21371 - protein, 7 aa, synthetic construct
RGDGQQV

SEQ ID NO: 21372 - protein, 7 aa, synthetic construct
RGDGRIQ

SEQ ID NO: 21373 - protein, 7 aa, synthetic construct
RGDGSAV

SEQ ID NO: 21374 - protein, 7 aa, synthetic construct
RGDGTAF

SEQ ID NO: 21375 - protein, 7 aa, synthetic construct
RGDGTFF

SEQ ID NO: 21376 - protein, 7 aa, synthetic construct
RGDAKHE

SEQ ID NO: 21377 - protein, 7 aa, synthetic construct
RGDGVAI

SEQ ID NO: 21378 - protein, 7 aa, synthetic construct
RGDHAHA

SEQ ID NO: 21379 - protein, 7 aa, synthetic construct
RGDHARD

SEQ ID NO: 21380 - protein, 7 aa, synthetic construct
RGDHATS

SEQ ID NO: 21381 - protein, 7 aa, synthetic construct
RGDHDQF

SEQ ID NO: 21382 - protein, 7 aa, synthetic construct
RGDHDSN

SEQ ID NO: 21383 - protein, 7 aa, synthetic construct
RGDHDSS

SEQ ID NO: 21384 - protein, 7 aa, synthetic construct
RGDHFGN

SEQ ID NO: 21385 - protein, 7 aa, synthetic construct
RGDHGDL

SEQ ID NO: 21386 - protein, 7 aa, synthetic construct
RGDHHET

SEQ ID NO: 21387 - protein, 7 aa, synthetic construct
RGDHIFI

SEQ ID NO: 21388 - protein, 7 aa, synthetic construct
RGDHKKS

SEQ ID NO: 21389 - protein, 7 aa, synthetic construct
RGDHLAR

SEQ ID NO: 21390 - protein, 7 aa, synthetic construct
RGDHLHF

SEQ ID NO: 21391 - protein, 7 aa, synthetic construct
RGDHLTT

SEQ ID NO: 21392 - protein, 7 aa, synthetic construct
RGDHNAQ

SEQ ID NO: 21393 - protein, 7 aa, synthetic construct
RGDHNKD

SEQ ID NO: 21394 - protein, 7 aa, synthetic construct
RGDHNTA

SEQ ID NO: 21395 - protein, 7 aa, synthetic construct
RGDHRRF

SEQ ID NO: 21396 - protein, 7 aa, synthetic construct
RGDHRRN

SEQ ID NO: 21397 - protein, 7 aa, synthetic construct
RGDHRVV

SEQ ID NO: 21398 - protein, 7 aa, synthetic construct
RGDHSEV

SEQ ID NO: 21399 - protein, 7 aa, synthetic construct
RGDHSHE

SEQ ID NO: 21400 - protein, 7 aa, synthetic construct
RGDHTFH

SEQ ID NO: 21401 - protein, 7 aa, synthetic construct
RGDHTNK

SEQ ID NO: 21402 - protein, 7 aa, synthetic construct
RGDHVHI

SEQ ID NO: 21403 - protein, 7 aa, synthetic construct
RGDIAIS

SEQ ID NO: 21404 - protein, 7 aa, synthetic construct
RGDIASF

SEQ ID NO: 21405 - protein, 7 aa, synthetic construct
RGDIDEK

SEQ ID NO: 21406 - protein, 7 aa, synthetic construct
RGDIESN

SEQ ID NO: 21407 - protein, 7 aa, synthetic construct
RGDIFIK

SEQ ID NO: 21408 - protein, 7 aa, synthetic construct
RGDIIGK

SEQ ID NO: 21409 - protein, 7 aa, synthetic construct
RGDANQE

SEQ ID NO: 21410 - protein, 7 aa, synthetic construct
RGDIKDS

SEQ ID NO: 21411 - protein, 7 aa, synthetic construct
RGDANQQ

SEQ ID NO: 21412 - protein, 7 aa, synthetic construct
RGDIKLV

SEQ ID NO: 21413 - protein, 7 aa, synthetic construct
RGDIKQL

SEQ ID NO: 21414 - protein, 7 aa, synthetic construct
RGDILHQ

SEQ ID NO: 21415 - protein, 7 aa, synthetic construct
RGDILVA

SEQ ID NO: 21416 - protein, 7 aa, synthetic construct
RGDINHL

SEQ ID NO: 21417 - protein, 7 aa, synthetic construct
RGDINKL

SEQ ID NO: 21418 - protein, 7 aa, synthetic construct
RGDIQID

SEQ ID NO: 21419 - protein, 7 aa, synthetic construct
RGDIQTV

SEQ ID NO: 21420 - protein, 7 aa, synthetic construct
RGDIRLH

SEQ ID NO: 21421 - protein, 7 aa, synthetic construct
RGDISIS

SEQ ID NO: 21422 - protein, 7 aa, synthetic construct
RGDISIT

SEQ ID NO: 21423 - protein, 7 aa, synthetic construct
RGDISQQ

SEQ ID NO: 21424 - protein, 7 aa, synthetic construct
RGDITHN

SEQ ID NO: 21425 - protein, 7 aa, synthetic construct
RGDIVTI

SEQ ID NO: 21426 - protein, 7 aa, synthetic construct
RGDKAEV

SEQ ID NO: 21427 - protein, 7 aa, synthetic construct
RGDKAVS

SEQ ID NO: 21428 - protein, 7 aa, synthetic construct
RGDKDTK

SEQ ID NO: 21429 - protein, 7 aa, synthetic construct
RGDKGAE

SEQ ID NO: 21430 - protein, 7 aa, synthetic construct
RGDKGSG

SEQ ID NO: 21431 - protein, 7 aa, synthetic construct
RGDKHLQ

SEQ ID NO: 21432 - protein, 7 aa, synthetic construct
RGDAADN

SEQ ID NO: 21433 - protein, 7 aa, synthetic construct
RGDKIIL

SEQ ID NO: 21434 - protein, 7 aa, synthetic construct
RGDKINS

SEQ ID NO: 21435 - protein, 7 aa, synthetic construct
RGDKLEI

SEQ ID NO: 21436 - protein, 7 aa, synthetic construct
RGDKQAT

SEQ ID NO: 21437 - protein, 7 aa, synthetic construct
RGDKQND

SEQ ID NO: 21438 - protein, 7 aa, synthetic construct
RGDARQG

SEQ ID NO: 21439 - protein, 7 aa, synthetic construct
RGDKTKG

SEQ ID NO: 21440 - protein, 7 aa, synthetic construct
RGDKTVI

SEQ ID NO: 21441 - protein, 7 aa, synthetic construct
RGDKVIL

SEQ ID NO: 21442 - protein, 7 aa, synthetic construct
RGDLAHG

SEQ ID NO: 21443 - protein, 7 aa, synthetic construct
RGDLAKV

SEQ ID NO: 21444 - protein, 7 aa, synthetic construct
RGDASDS

SEQ ID NO: 21445 - protein, 7 aa, synthetic construct
RGDLDQR

SEQ ID NO: 21446 - protein, 7 aa, synthetic construct
RGDLEIT

SEQ ID NO: 21447 - protein, 7 aa, synthetic construct
RGDLELK

SEQ ID NO: 21448 - protein, 7 aa, synthetic construct
RGDLEVV

SEQ ID NO: 21449 - protein, 7 aa, synthetic construct
RGDLGLE

SEQ ID NO: 21450 - protein, 7 aa, synthetic construct
RGDLHGF

SEQ ID NO: 21451 - protein, 7 aa, synthetic construct
RGDASLK

SEQ ID NO: 21452 - protein, 7 aa, synthetic construct
RGDLKAE

SEQ ID NO: 21453 - protein, 7 aa, synthetic construct
RGDLKQK

SEQ ID NO: 21454 - protein, 7 aa, synthetic construct
RGDLNVQ

SEQ ID NO: 21455 - protein, 7 aa, synthetic construct
RGDATAL

SEQ ID NO: 21456 - protein, 7 aa, synthetic construct
RGDLSKR

SEQ ID NO: 21457 - protein, 7 aa, synthetic construct
RGDLSTH

SEQ ID NO: 21458 - protein, 7 aa, synthetic construct
RGDLTRG

SEQ ID NO: 21459 - protein, 7 aa, synthetic construct
RGDLVEN

SEQ ID NO: 21460 - protein, 7 aa, synthetic construct
RGDLVFQ

SEQ ID NO: 21461 - protein, 7 aa, synthetic construct
RGDLVIG

SEQ ID NO: 21462 - protein, 7 aa, synthetic construct
RGDNADN

SEQ ID NO: 21463 - protein, 7 aa, synthetic construct
RGDNDQV

SEQ ID NO: 21464 - protein, 7 aa, synthetic construct
RGDNEIV

SEQ ID NO: 21465 - protein, 7 aa, synthetic construct
RGDNEKI

SEQ ID NO: 21466 - protein, 7 aa, synthetic construct
RGDNENN

SEQ ID NO: 21467 - protein, 7 aa, synthetic construct
RGDNGHK

SEQ ID NO: 21468 - protein, 7 aa, synthetic construct
RGDNGVA

SEQ ID NO: 21469 - protein, 7 aa, synthetic construct
RGDNKQS

SEQ ID NO: 21470 - protein, 7 aa, synthetic construct
RGDNKTF

SEQ ID NO: 21471 - protein, 7 aa, synthetic construct
RGDNNRS

SEQ ID NO: 21472 - protein, 7 aa, synthetic construct
RGDNNTI

SEQ ID NO: 21473 - protein, 7 aa, synthetic construct
RGDNQEH

SEQ ID NO: 21474 - protein, 7 aa, synthetic construct
RGDNQGI

SEQ ID NO: 21475 - protein, 7 aa, synthetic construct
RGDNQRG

SEQ ID NO: 21476 - protein, 7 aa, synthetic construct
RGDNRHN

SEQ ID NO: 21477 - protein, 7 aa, synthetic construct
RGDNRQQ

SEQ ID NO: 21478 - protein, 7 aa, synthetic construct
RGDNRTS

SEQ ID NO: 21479 - protein, 7 aa, synthetic construct
RGDNSIK

SEQ ID NO: 21480 - protein, 7 aa, synthetic construct
RGDNSVI

SEQ ID NO: 21481 - protein, 7 aa, synthetic construct
RGDNTNA

SEQ ID NO: 21482 - protein, 7 aa, synthetic construct
RGDNVHD

SEQ ID NO: 21483 - protein, 7 aa, synthetic construct
RGDAVVK

SEQ ID NO: 21484 - protein, 7 aa, synthetic construct
RGDNVQL

SEQ ID NO: 21485 - protein, 7 aa, synthetic construct
RGDQDHQ

SEQ ID NO: 21486 - protein, 7 aa, synthetic construct
RGDQEQK

SEQ ID NO: 21487 - protein, 7 aa, synthetic construct
RGDDAGI

SEQ ID NO: 21488 - protein, 7 aa, synthetic construct
RGDDAHQ

SEQ ID NO: 21489 - protein, 7 aa, synthetic construct
RGDDAHT

SEQ ID NO: 21490 - protein, 7 aa, synthetic construct
RGDQGVN

SEQ ID NO: 21491 - protein, 7 aa, synthetic construct
RGDQHHK

SEQ ID NO: 21492 - protein, 7 aa, synthetic construct
RGDQISS

SEQ ID NO: 21493 - protein, 7 aa, synthetic construct
RGDQLFF

SEQ ID NO: 21494 - protein, 7 aa, synthetic construct
RGDDASS

SEQ ID NO: 21495 - protein, 7 aa, synthetic construct
RGDQNGR

SEQ ID NO: 21496 - protein, 7 aa, synthetic construct
RGDQNQG

SEQ ID NO: 21497 - protein, 7 aa, synthetic construct
RGDQNVQ

SEQ ID NO: 21498 - protein, 7 aa, synthetic construct
RGDQQNT

SEQ ID NO: 21499 - protein, 7 aa, synthetic construct
RGDQQQH

SEQ ID NO: 21500 - protein, 7 aa, synthetic construct
RGDQRIL

SEQ ID NO: 21501 - protein, 7 aa, synthetic construct
RGDQRVL

SEQ ID NO: 21502 - protein, 7 aa, synthetic construct
RGDQSES

SEQ ID NO: 21503 - protein, 7 aa, synthetic construct
RGDRANF

SEQ ID NO: 21504 - protein, 7 aa, synthetic construct
RGDRAVD

SEQ ID NO: 21505 - protein, 7 aa, synthetic construct
RGDRDSR

SEQ ID NO: 21506 - protein, 7 aa, synthetic construct
RGDDDRK

SEQ ID NO: 21507 - protein, 7 aa, synthetic construct
RGDRFAL

SEQ ID NO: 21508 - protein, 7 aa, synthetic construct
RGDRFRE

SEQ ID NO: 21509 - protein, 7 aa, synthetic construct
RGDRHLE

SEQ ID NO: 21510 - protein, 7 aa, synthetic construct
RGDRHRE

SEQ ID NO: 21511 - protein, 7 aa, synthetic construct
RGDRNET

SEQ ID NO: 21512 - protein, 7 aa, synthetic construct
RGDRNKA

SEQ ID NO: 21513 - protein, 7 aa, synthetic construct
RGDRQIS

SEQ ID NO: 21514 - protein, 7 aa, synthetic construct
RGDRSSD

SEQ ID NO: 21515 - protein, 7 aa, synthetic construct
RGDRTER

SEQ ID NO: 21516 - protein, 7 aa, synthetic construct
RGDRVIN

SEQ ID NO: 21517 - protein, 7 aa, synthetic construct
RGDSADN

SEQ ID NO: 21518 - protein, 7 aa, synthetic construct
RGDSAET

SEQ ID NO: 21519 - protein, 7 aa, synthetic construct
RGDSAVK

SEQ ID NO: 21520 - protein, 7 aa, synthetic construct
RGDSDHT

SEQ ID NO: 21521 - protein, 7 aa, synthetic construct
RGDSDND

SEQ ID NO: 21522 - protein, 7 aa, synthetic construct
RGDSEHQ

SEQ ID NO: 21523 - protein, 7 aa, synthetic construct
RGDSEKS

SEQ ID NO: 21524 - protein, 7 aa, synthetic construct
RGDSERR

SEQ ID NO: 21525 - protein, 7 aa, synthetic construct
RGDSFRR

SEQ ID NO: 21526 - protein, 7 aa, synthetic construct
RGDSGFE

SEQ ID NO: 21527 - protein, 7 aa, synthetic construct
RGDSGHK

SEQ ID NO: 21528 - protein, 7 aa, synthetic construct
RGDSGQN

SEQ ID NO: 21529 - protein, 7 aa, synthetic construct
RGDSHGI

SEQ ID NO: 21530 - protein, 7 aa, synthetic construct
RGDSIFA

SEQ ID NO: 21531 - protein, 7 aa, synthetic construct
RGDSITN

SEQ ID NO: 21532 - protein, 7 aa, synthetic construct
RGDSLHR

SEQ ID NO: 21533 - protein, 7 aa, synthetic construct
RGDSLIK

SEQ ID NO: 21534 - protein, 7 aa, synthetic construct
RGDSNHA

SEQ ID NO: 21535 - protein, 7 aa, synthetic construct
RGDSQFH

SEQ ID NO: 21536 - protein, 7 aa, synthetic construct
RGDSQIL

SEQ ID NO: 21537 - protein, 7 aa, synthetic construct
RGDSQIN

SEQ ID NO: 21538 - protein, 7 aa, synthetic construct
RGDSQRV

SEQ ID NO: 21539 - protein, 7 aa, synthetic construct
RGDSRVN

SEQ ID NO: 21540 - protein, 7 aa, synthetic construct
RGDSSEK

SEQ ID NO: 21541 - protein, 7 aa, synthetic construct
RGDSSIR

SEQ ID NO: 21542 - protein, 7 aa, synthetic construct
RGDSSRE

SEQ ID NO: 21543 - protein, 7 aa, synthetic construct
RGDSTEV

SEQ ID NO: 21544 - protein, 7 aa, synthetic construct
RGDSTNF

SEQ ID NO: 21545 - protein, 7 aa, synthetic construct
RGDTAKT

SEQ ID NO: 21546 - protein, 7 aa, synthetic construct
RGDDGQV

SEQ ID NO: 21547 - protein, 7 aa, synthetic construct
RGDTESF

SEQ ID NO: 21548 - protein, 7 aa, synthetic construct
RGDDGVE

SEQ ID NO: 21549 - protein, 7 aa, synthetic construct
RGDTHFN

SEQ ID NO: 21550 - protein, 7 aa, synthetic construct
RGDTIEI

SEQ ID NO: 21551 - protein, 7 aa, synthetic construct
RGDTIGE

SEQ ID NO: 21552 - protein, 7 aa, synthetic construct
RGDTKEH

SEQ ID NO: 21553 - protein, 7 aa, synthetic construct
RGDTLDR

SEQ ID NO: 21554 - protein, 7 aa, synthetic construct
RGDTLNI

SEQ ID NO: 21555 - protein, 7 aa, synthetic construct
RGDTQKI

SEQ ID NO: 21556 - protein, 7 aa, synthetic construct
RGDTQQR

SEQ ID NO: 21557 - protein, 7 aa, synthetic construct
RGDTQQS

SEQ ID NO: 21558 - protein, 7 aa, synthetic construct
RGDTSRF

SEQ ID NO: 21559 - protein, 7 aa, synthetic construct
RGDDHSK

SEQ ID NO: 21560 - protein, 7 aa, synthetic construct
RGDTTKQ

SEQ ID NO: 21561 - protein, 7 aa, synthetic construct
RGDTTVA

SEQ ID NO: 21562 - protein, 7 aa, synthetic construct
RGDTVNQ

SEQ ID NO: 21563 - protein, 7 aa, synthetic construct
RGDTVTV

SEQ ID NO: 21564 - protein, 7 aa, synthetic construct
RGDVAET

SEQ ID NO: 21565 - protein, 7 aa, synthetic construct
RGDVAVH

SEQ ID NO: 21566 - protein, 7 aa, synthetic construct
RGDVDFQ

SEQ ID NO: 21567 - protein, 7 aa, synthetic construct
RGDVDFV

SEQ ID NO: 21568 - protein, 7 aa, synthetic construct
RGDVENI

SEQ ID NO: 21569 - protein, 7 aa, synthetic construct
RGDVEQF

SEQ ID NO: 21570 - protein, 7 aa, synthetic construct
RGDVEVG

SEQ ID NO: 21571 - protein, 7 aa, synthetic construct
RGDVFGI

SEQ ID NO: 21572 - protein, 7 aa, synthetic construct
RGDVFLK

SEQ ID NO: 21573 - protein, 7 aa, synthetic construct
RGDVFLT

SEQ ID NO: 21574 - protein, 7 aa, synthetic construct
RGDVGDR

SEQ ID NO: 21575 - protein, 7 aa, synthetic construct
RGDVGFR

SEQ ID NO: 21576 - protein, 7 aa, synthetic construct
RGDVHIT

SEQ ID NO: 21577 - protein, 7 aa, synthetic construct
RGDVILV

SEQ ID NO: 21578 - protein, 7 aa, synthetic construct
RGDVITG

SEQ ID NO: 21579 - protein, 7 aa, synthetic construct
RGDVIVL

SEQ ID NO: 21580 - protein, 7 aa, synthetic construct
RGDVKFA

SEQ ID NO: 21581 - protein, 7 aa, synthetic construct
RGDVLER

SEQ ID NO: 21582 - protein, 7 aa, synthetic construct
RGDVLHH

SEQ ID NO: 21583 - protein, 7 aa, synthetic construct
RGDVLRK

SEQ ID NO: 21584 - protein, 7 aa, synthetic construct
RGDVNAI

SEQ ID NO: 21585 - protein, 7 aa, synthetic construct
RGDDITL

SEQ ID NO: 21586 - protein, 7 aa, synthetic construct
RGDDITT

SEQ ID NO: 21587 - protein, 7 aa, synthetic construct
RGDVNTF

SEQ ID NO: 21588 - protein, 7 aa, synthetic construct
RGDVQNG

SEQ ID NO: 21589 - protein, 7 aa, synthetic construct
RGDVQVR

SEQ ID NO: 21590 - protein, 7 aa, synthetic construct
RGDVSLF

SEQ ID NO: 21591 - protein, 7 aa, synthetic construct
RGDVTLI

SEQ ID NO: 21592 - protein, 7 aa, synthetic construct
RGDDKQF

SEQ ID NO: 21593 - protein, 7 aa, synthetic construct
RGDDNNF

SEQ ID NO: 21594 - protein, 7 aa, synthetic construct
RGDDQGS

SEQ ID NO: 21595 - protein, 7 aa, synthetic construct
RGDDQHL

SEQ ID NO: 21596 - protein, 7 aa, synthetic construct
RGDDRDF

SEQ ID NO: 21597 - protein, 7 aa, synthetic construct
RGDDRQL

SEQ ID NO: 21598 - protein, 7 aa, synthetic construct
RGDDTRK

SEQ ID NO: 21599 - protein, 7 aa, synthetic construct
RGDEAKV

SEQ ID NO: 21600 - protein, 7 aa, synthetic construct
RGDEAND

SEQ ID NO: 21601 - protein, 7 aa, synthetic construct
RGDEDGT

SEQ ID NO: 21602 - protein, 7 aa, synthetic construct
RGDEEEF

SEQ ID NO: 21603 - protein, 7 aa, synthetic construct
RGDAFFR

SEQ ID NO: 21604 - protein, 7 aa, synthetic construct
RGDEEQR

SEQ ID NO: 21605 - protein, 7 aa, synthetic construct
RGDEFSL

SEQ ID NO: 21606 - protein, 7 aa, synthetic construct
RGDEFSR

SEQ ID NO: 21607 - protein, 7 aa, synthetic construct
RGDEGFQ

SEQ ID NO: 21608 - protein, 7 aa, synthetic construct
RGDEGGG

SEQ ID NO: 21609 - protein, 7 aa, synthetic construct
RGDEGHD

SEQ ID NO: 21610 - protein, 7 aa, synthetic construct
RGDEGLN

SEQ ID NO: 21611 - protein, 7 aa, synthetic construct
RGDEHAK

SEQ ID NO: 21612 - protein, 7 aa, synthetic construct
RGDEHDL

SEQ ID NO: 21613 - protein, 7 aa, synthetic construct
RGDEHTQ

SEQ ID NO: 21614 - protein, 7 aa, synthetic construct
RGDEINQ

SEQ ID NO: 21615 - protein, 7 aa, synthetic construct
RGDEKFK

SEQ ID NO: 21616 - protein, 7 aa, synthetic construct
RGDEKNN

SEQ ID NO: 21617 - protein, 7 aa, synthetic construct
RGDENNN

SEQ ID NO: 21618 - protein, 7 aa, synthetic construct
RGDENVK

SEQ ID NO: 21619 - protein, 7 aa, synthetic construct
RGDESKR

SEQ ID NO: 21620 - protein, 7 aa, synthetic construct
RGDETEE

SEQ ID NO: 21621 - protein, 7 aa, synthetic construct
RGDAGGR

SEQ ID NO: 21622 - protein, 7 aa, synthetic construct
RGDEVFS

SEQ ID NO: 21623 - protein, 7 aa, synthetic construct
RGDFAKN

SEQ ID NO: 21624 - protein, 7 aa, synthetic construct
RGDFDFN

SEQ ID NO: 21625 - protein, 7 aa, synthetic construct
RGDAAIV

SEQ ID NO: 21626 - protein, 7 aa, synthetic construct
RGDFDSV

SEQ ID NO: 21627 - protein, 7 aa, synthetic construct
RGDFESG

SEQ ID NO: 21628 - protein, 7 aa, synthetic construct
RGDFGHE

SEQ ID NO: 21629 - protein, 7 aa, synthetic construct
RGDFGVL

SEQ ID NO: 21630 - protein, 7 aa, synthetic construct
RGDFHIG

SEQ ID NO: 21631 - protein, 7 aa, synthetic construct
RGDFHRI

SEQ ID NO: 21632 - protein, 7 aa, synthetic construct
RGDFIIK

SEQ ID NO: 21633 - protein, 7 aa, synthetic construct
RGDFIIQ

SEQ ID NO: 21634 - protein, 7 aa, synthetic construct
RGDFKEV

SEQ ID NO: 21635 - protein, 7 aa, synthetic construct
RGDFLDF

SEQ ID NO: 21636 - protein, 7 aa, synthetic construct
RGDFLLR

SEQ ID NO: 21637 - protein, 7 aa, synthetic construct
RGDFQDG

SEQ ID NO: 21638 - protein, 7 aa, synthetic construct
RGDFRGE

SEQ ID NO: 21639 - protein, 7 aa, synthetic construct
RGDFSGD

SEQ ID NO: 21640 - protein, 7 aa, synthetic construct
RGDFSTN

SEQ ID NO: 21641 - protein, 7 aa, synthetic construct
RGDFTHG

SEQ ID NO: 21642 - protein, 7 aa, synthetic construct
RGDFVDG

SEQ ID NO: 21643 - protein, 7 aa, synthetic construct
RGDFVFF

SEQ ID NO: 21644 - protein, 7 aa, synthetic construct
RGDGAFI

SEQ ID NO: 21645 - protein, 7 aa, synthetic construct
RGDGDFV

SEQ ID NO: 21646 - protein, 7 aa, synthetic construct
RGDGENA

SEQ ID NO: 21647 - protein, 7 aa, synthetic construct
RGDGFAG

SEQ ID NO: 21648 - protein, 7 aa, synthetic construct
RGDGFQQ

SEQ ID NO: 21649 - protein, 7 aa, synthetic construct
RGDGFVQ

SEQ ID NO: 21650 - protein, 7 aa, synthetic construct
RGDGGSE

SEQ ID NO: 21651 - protein, 7 aa, synthetic construct
RGDAIKQ

SEQ ID NO: 21652 - protein, 7 aa, synthetic construct
RGDGHSN

SEQ ID NO: 21653 - protein, 7 aa, synthetic construct
RGDGNHH

SEQ ID NO: 21654 - protein, 7 aa, synthetic construct
RGDGNRD

SEQ ID NO: 21655 - protein, 7 aa, synthetic construct
RGDGQHH

SEQ ID NO: 21656 - protein, 7 aa, synthetic construct
RGDGQST

SEQ ID NO: 21657 - protein, 7 aa, synthetic construct
RGDGTRK

SEQ ID NO: 21658 - protein, 7 aa, synthetic construct
RGDHDIF

SEQ ID NO: 21659 - protein, 7 aa, synthetic construct
RGDHDQH

SEQ ID NO: 21660 - protein, 7 aa, synthetic construct
RGDHDVA

SEQ ID NO: 21661 - protein, 7 aa, synthetic construct
RGDHEKH

SEQ ID NO: 21662 - protein, 7 aa, synthetic construct
RGDHFFL

SEQ ID NO: 21663 - protein, 7 aa, synthetic construct
RGDHGSS

SEQ ID NO: 21664 - protein, 7 aa, synthetic construct
RGDHKIF

SEQ ID NO: 21665 - protein, 7 aa, synthetic construct
RGDHLDN

SEQ ID NO: 21666 - protein, 7 aa, synthetic construct
RGDHLRT

SEQ ID NO: 21667 - protein, 7 aa, synthetic construct
RGDALHQ

SEQ ID NO: 21668 - protein, 7 aa, synthetic construct
RGDHNAT

SEQ ID NO: 21669 - protein, 7 aa, synthetic construct
RGDHQTE

SEQ ID NO: 21670 - protein, 7 aa, synthetic construct
RGDHRFR

SEQ ID NO: 21671 - protein, 7 aa, synthetic construct
RGDHRLH

SEQ ID NO: 21672 - protein, 7 aa, synthetic construct
RGDHSET

SEQ ID NO: 21673 - protein, 7 aa, synthetic construct
RGDHSFE

SEQ ID NO: 21674 - protein, 7 aa, synthetic construct
RGDHSLL

SEQ ID NO: 21675 - protein, 7 aa, synthetic construct
RGDHSQG

SEQ ID NO: 21676 - protein, 7 aa, synthetic construct
RGDHVTA

SEQ ID NO: 21677 - protein, 7 aa, synthetic construct
RGDIASH

SEQ ID NO: 21678 - protein, 7 aa, synthetic construct
RGDIDAG

SEQ ID NO: 21679 - protein, 7 aa, synthetic construct
RGDIDAK

SEQ ID NO: 21680 - protein, 7 aa, synthetic construct
RGDIEAH

SEQ ID NO: 21681 - protein, 7 aa, synthetic construct
RGDIFFA

SEQ ID NO: 21682 - protein, 7 aa, synthetic construct
RGDIFSN

SEQ ID NO: 21683 - protein, 7 aa, synthetic construct
RGDIGAT

SEQ ID NO: 21684 - protein, 7 aa, synthetic construct
RGDIGLV

SEQ ID NO: 21685 - protein, 7 aa, synthetic construct
RGDIGRS

SEQ ID NO: 21686 - protein, 7 aa, synthetic construct
RGDANKF

SEQ ID NO: 21687 - protein, 7 aa, synthetic construct
RGDIGTN

SEQ ID NO: 21688 - protein, 7 aa, synthetic construct
RGDIHAS

SEQ ID NO: 21689 - protein, 7 aa, synthetic construct
RGDIHQD

SEQ ID NO: 21690 - protein, 7 aa, synthetic construct
RGDIILR

SEQ ID NO: 21691 - protein, 7 aa, synthetic construct
RGDIKFD

SEQ ID NO: 21692 - protein, 7 aa, synthetic construct
RGDILGG

SEQ ID NO: 21693 - protein, 7 aa, synthetic construct
RGDILTI

SEQ ID NO: 21694 - protein, 7 aa, synthetic construct
RGDILTN

SEQ ID NO: 21695 - protein, 7 aa, synthetic construct
RGDANVL

SEQ ID NO: 21696 - protein, 7 aa, synthetic construct
RGDIQLQ

SEQ ID NO: 21697 - protein, 7 aa, synthetic construct
RGDITNT

SEQ ID NO: 21698 - protein, 7 aa, synthetic construct
RGDIVFT

SEQ ID NO: 21699 - protein, 7 aa, synthetic construct
RGDKAIK

SEQ ID NO: 21700 - protein, 7 aa, synthetic construct
RGDADAS

SEQ ID NO: 21701 - protein, 7 aa, synthetic construct
RGDKDDI

SEQ ID NO: 21702 - protein, 7 aa, synthetic construct
RGDKDFF

SEQ ID NO: 21703 - protein, 7 aa, synthetic construct
RGDKESG

SEQ ID NO: 21704 - protein, 7 aa, synthetic construct
RGDKFES

SEQ ID NO: 21705 - protein, 7 aa, synthetic construct
RGDKFKQ

SEQ ID NO: 21706 - protein, 7 aa, synthetic construct
RGDKGHS

SEQ ID NO: 21707 - protein, 7 aa, synthetic construct
RGDKHGA

SEQ ID NO: 21708 - protein, 7 aa, synthetic construct
RGDKHLH

SEQ ID NO: 21709 - protein, 7 aa, synthetic construct
RGDKIAV

SEQ ID NO: 21710 - protein, 7 aa, synthetic construct
RGDKKFN

SEQ ID NO: 21711 - protein, 7 aa, synthetic construct
RGDKLFR

SEQ ID NO: 21712 - protein, 7 aa, synthetic construct
RGDKQKV

SEQ ID NO: 21713 - protein, 7 aa, synthetic construct
RGDKRKL

SEQ ID NO: 21714 - protein, 7 aa, synthetic construct
RGDARQN

SEQ ID NO: 21715 - protein, 7 aa, synthetic construct
RGDKTLN

SEQ ID NO: 21716 - protein, 7 aa, synthetic construct
RGDKVNN

SEQ ID NO: 21717 - protein, 7 aa, synthetic construct
RGDLEEH

SEQ ID NO: 21718 - protein, 7 aa, synthetic construct
RGDLELN

SEQ ID NO: 21719 - protein, 7 aa, synthetic construct
RGDLEQL

SEQ ID NO: 21720 - protein, 7 aa, synthetic construct
RGDLEQT

SEQ ID NO: 21721 - protein, 7 aa, synthetic construct
RGDLFNA

SEQ ID NO: 21722 - protein, 7 aa, synthetic construct
RGDLFVF

SEQ ID NO: 21723 - protein, 7 aa, synthetic construct
RGDLGTV

SEQ ID NO: 21724 - protein, 7 aa, synthetic construct
RGDASKS

SEQ ID NO: 21725 - protein, 7 aa, synthetic construct
RGDLHQA

SEQ ID NO: 21726 - protein, 7 aa, synthetic construct
RGDLHTQ

SEQ ID NO: 21727 - protein, 7 aa, synthetic construct
RGDLIFS

SEQ ID NO: 21728 - protein, 7 aa, synthetic construct
RGDLILS

SEQ ID NO: 21729 - protein, 7 aa, synthetic construct
RGDLKNE

SEQ ID NO: 21730 - protein, 7 aa, synthetic construct
RGDLNSK

SEQ ID NO: 21731 - protein, 7 aa, synthetic construct
RGDLTQI

SEQ ID NO: 21732 - protein, 7 aa, synthetic construct
RGDLVFS

SEQ ID NO: 21733 - protein, 7 aa, synthetic construct
RGDLVLS

SEQ ID NO: 21734 - protein, 7 aa, synthetic construct
RGDLVSK

SEQ ID NO: 21735 - protein, 7 aa, synthetic construct
RGDNAFE

SEQ ID NO: 21736 - protein, 7 aa, synthetic construct
RGDNAHH

SEQ ID NO: 21737 - protein, 7 aa, synthetic construct
RGDNATV

SEQ ID NO: 21738 - protein, 7 aa, synthetic construct
RGDNDRI

SEQ ID NO: 21739 - protein, 7 aa, synthetic construct
RGDNEGQ

SEQ ID NO: 21740 - protein, 7 aa, synthetic construct
RGDNFQV

SEQ ID NO: 21741 - protein, 7 aa, synthetic construct
RGDNHET

SEQ ID NO: 21742 - protein, 7 aa, synthetic construct
RGDNHFK

SEQ ID NO: 21743 - protein, 7 aa, synthetic construct
RGDNHLV

SEQ ID NO: 21744 - protein, 7 aa, synthetic construct
RGDNHVF

SEQ ID NO: 21745 - protein, 7 aa, synthetic construct
RGDNIRT

SEQ ID NO: 21746 - protein, 7 aa, synthetic construct
RGDAVGQ

SEQ ID NO: 21747 - protein, 7 aa, synthetic construct
RGDNLVI

SEQ ID NO: 21748 - protein, 7 aa, synthetic construct
RGDNNSV

SEQ ID NO: 21749 - protein, 7 aa, synthetic construct
RGDNQHD

SEQ ID NO: 21750 - protein, 7 aa, synthetic construct
RGDAVLT

SEQ ID NO: 21751 - protein, 7 aa, synthetic construct
RGDNSEH

SEQ ID NO: 21752 - protein, 7 aa, synthetic construct
RGDNSFA

SEQ ID NO: 21753 - protein, 7 aa, synthetic construct
RGDNTKT

SEQ ID NO: 21754 - protein, 7 aa, synthetic construct
RGDNTNH

SEQ ID NO: 21755 - protein, 7 aa, synthetic construct
RGDQAAH

SEQ ID NO: 21756 - protein, 7 aa, synthetic construct
RGDQESF

SEQ ID NO: 21757 - protein, 7 aa, synthetic construct
RGDQFHK

SEQ ID NO: 21758 - protein, 7 aa, synthetic construct
RGDQFRL

SEQ ID NO: 21759 - protein, 7 aa, synthetic construct
RGDQGHF

SEQ ID NO: 21760 - protein, 7 aa, synthetic construct
RGDQGRF

SEQ ID NO: 21761 - protein, 7 aa, synthetic construct
RGDDAKL

SEQ ID NO: 21762 - protein, 7 aa, synthetic construct
RGDQKIS

SEQ ID NO: 21763 - protein, 7 aa, synthetic construct
RGDQLGR

SEQ ID NO: 21764 - protein, 7 aa, synthetic construct
RGDQLHK

SEQ ID NO: 21765 - protein, 7 aa, synthetic construct
RGDQLTH

SEQ ID NO: 21766 - protein, 7 aa, synthetic construct
RGDQRSE

SEQ ID NO: 21767 - protein, 7 aa, synthetic construct
RGDQSAS

SEQ ID NO: 21768 - protein, 7 aa, synthetic construct
RGDQSFE

SEQ ID NO: 21769 - protein, 7 aa, synthetic construct
RGDQSFG

SEQ ID NO: 21770 - protein, 7 aa, synthetic construct
RGDQSLD

SEQ ID NO: 21771 - protein, 7 aa, synthetic construct
RGDQSNL

SEQ ID NO: 21772 - protein, 7 aa, synthetic construct
RGDQVAS

SEQ ID NO: 21773 - protein, 7 aa, synthetic construct
RGDQVDL

SEQ ID NO: 21774 - protein, 7 aa, synthetic construct
RGDRDEK

SEQ ID NO: 21775 - protein, 7 aa, synthetic construct
RGDRDLT

SEQ ID NO: 21776 - protein, 7 aa, synthetic construct
RGDRDRT

SEQ ID NO: 21777 - protein, 7 aa, synthetic construct
RGDREEF

SEQ ID NO: 21778 - protein, 7 aa, synthetic construct
RGDRENN

SEQ ID NO: 21779 - protein, 7 aa, synthetic construct
RGDREQF

SEQ ID NO: 21780 - protein, 7 aa, synthetic construct
RGDREQS

SEQ ID NO: 21781 - protein, 7 aa, synthetic construct
RGDRFHS

SEQ ID NO: 21782 - protein, 7 aa, synthetic construct
RGDDDVN

SEQ ID NO: 21783 - protein, 7 aa, synthetic construct
RGDADQR

SEQ ID NO: 21784 - protein, 7 aa, synthetic construct
RGDRNDQ

SEQ ID NO: 21785 - protein, 7 aa, synthetic construct
RGDRNGR

SEQ ID NO: 21786 - protein, 7 aa, synthetic construct
RGDRNVD

SEQ ID NO: 21787 - protein, 7 aa, synthetic construct
RGDRSRD

SEQ ID NO: 21788 - protein, 7 aa, synthetic construct
RGDSALF

SEQ ID NO: 21789 - protein, 7 aa, synthetic construct
RGDSANT

SEQ ID NO: 21790 - protein, 7 aa, synthetic construct
RGDSDIK

SEQ ID NO: 21791 - protein, 7 aa, synthetic construct
RGDSDRQ

SEQ ID NO: 21792 - protein, 7 aa, synthetic construct
RGDSEHR

SEQ ID NO: 21793 - protein, 7 aa, synthetic construct
RGDSELL

SEQ ID NO: 21794 - protein, 7 aa, synthetic construct
RGDSENS

SEQ ID NO: 21795 - protein, 7 aa, synthetic construct
RGDSESS

SEQ ID NO: 21796 - protein, 7 aa, synthetic construct
RGDSETT

SEQ ID NO: 21797 - protein, 7 aa, synthetic construct
RGDSFIR

SEQ ID NO: 21798 - protein, 7 aa, synthetic construct
RGDSGDL

SEQ ID NO: 21799 - protein, 7 aa, synthetic construct
RGDSGLE

SEQ ID NO: 21800 - protein, 7 aa, synthetic construct
RGDSIFN

SEQ ID NO: 21801 - protein, 7 aa, synthetic construct
RGDSIFV

SEQ ID NO: 21802 - protein, 7 aa, synthetic construct
RGDSINS

SEQ ID NO: 21803 - protein, 7 aa, synthetic construct
RGDSIQQ

SEQ ID NO: 21804 - protein, 7 aa, synthetic construct
RGDSKQQ

SEQ ID NO: 21805 - protein, 7 aa, synthetic construct
RGDSLAI

SEQ ID NO: 21806 - protein, 7 aa, synthetic construct
RGDSLFE

SEQ ID NO: 21807 - protein, 7 aa, synthetic construct
RGDSLTE

SEQ ID NO: 21808 - protein, 7 aa, synthetic construct
RGDSQVR

SEQ ID NO: 21809 - protein, 7 aa, synthetic construct
RGDSRSG

SEQ ID NO: 21810 - protein, 7 aa, synthetic construct
RGDDGFF

SEQ ID NO: 21811 - protein, 7 aa, synthetic construct
RGDSSLL

SEQ ID NO: 21812 - protein, 7 aa, synthetic construct
RGDSSRG

SEQ ID NO: 21813 - protein, 7 aa, synthetic construct
RGDSSVH

SEQ ID NO: 21814 - protein, 7 aa, synthetic construct
RGDSVFS

SEQ ID NO: 21815 - protein, 7 aa, synthetic construct
RGDSVNE

SEQ ID NO: 21816 - protein, 7 aa, synthetic construct
RGDSVNV

SEQ ID NO: 21817 - protein, 7 aa, synthetic construct
RGDTAKH

SEQ ID NO: 21818 - protein, 7 aa, synthetic construct
RGDTDHH

SEQ ID NO: 21819 - protein, 7 aa, synthetic construct
RGDADVQ

SEQ ID NO: 21820 - protein, 7 aa, synthetic construct
RGDTHGV

SEQ ID NO: 21821 - protein, 7 aa, synthetic construct
RGDTKEQ

SEQ ID NO: 21822 - protein, 7 aa, synthetic construct
RGDTLNG

SEQ ID NO: 21823 - protein, 7 aa, synthetic construct
RGDTNHK

SEQ ID NO: 21824 - protein, 7 aa, synthetic construct
RGDTNNL

SEQ ID NO: 21825 - protein, 7 aa, synthetic construct
RGDTQKQ

SEQ ID NO: 21826 - protein, 7 aa, synthetic construct
RGDTSFA

SEQ ID NO: 21827 - protein, 7 aa, synthetic construct
RGDTTQL

SEQ ID NO: 21828 - protein, 7 aa, synthetic construct
RGDVALF

SEQ ID NO: 21829 - protein, 7 aa, synthetic construct
RGDVANQ

SEQ ID NO: 21830 - protein, 7 aa, synthetic construct
RGDVEGQ

SEQ ID NO: 21831 - protein, 7 aa, synthetic construct
RGDVEHT

SEQ ID NO: 21832 - protein, 7 aa, synthetic construct
RGDVFEK

SEQ ID NO: 21833 - protein, 7 aa, synthetic construct
RGDVFKS

SEQ ID NO: 21834 - protein, 7 aa, synthetic construct
RGDVGAV

SEQ ID NO: 21835 - protein, 7 aa, synthetic construct
RGDVGHA

SEQ ID NO: 21836 - protein, 7 aa, synthetic construct
RGDVGIN

SEQ ID NO: 21837 - protein, 7 aa, synthetic construct
RGDVGSS

SEQ ID NO: 21838 - protein, 7 aa, synthetic construct
RGDVGTI

SEQ ID NO: 21839 - protein, 7 aa, synthetic construct
RGDVHEQ

SEQ ID NO: 21840 - protein, 7 aa, synthetic construct
RGDVIKH

SEQ ID NO: 21841 - protein, 7 aa, synthetic construct
RGDVITT

SEQ ID NO: 21842 - protein, 7 aa, synthetic construct
RGDVKRG

SEQ ID NO: 21843 - protein, 7 aa, synthetic construct
RGDVQEK

SEQ ID NO: 21844 - protein, 7 aa, synthetic construct
RGDVQVH

SEQ ID NO: 21845 - protein, 7 aa, synthetic construct
RGDVSAG

SEQ ID NO: 21846 - protein, 7 aa, synthetic construct
RGDVVIL

SEQ ID NO: 21847 - protein, 7 aa, synthetic construct
RGDVVQE

SEQ ID NO: 21848 - protein, 7 aa, synthetic construct
RGDDKRQ

SEQ ID NO: 21849 - protein, 7 aa, synthetic construct
RGDDKVI

SEQ ID NO: 21850 - protein, 7 aa, synthetic construct
RGDDKVK

SEQ ID NO: 21851 - protein, 7 aa, synthetic construct
RGDDLFH

SEQ ID NO: 21852 - protein, 7 aa, synthetic construct
RGDDLVV

SEQ ID NO: 21853 - protein, 7 aa, synthetic construct
RGDDNDH

SEQ ID NO: 21854 - protein, 7 aa, synthetic construct
RGDDNLV

SEQ ID NO: 21855 - protein, 7 aa, synthetic construct
RGDDNNT

SEQ ID NO: 21856 - protein, 7 aa, synthetic construct
RGDDQRF

SEQ ID NO: 21857 - protein, 7 aa, synthetic construct
RGDDRAA

SEQ ID NO: 21858 - protein, 7 aa, synthetic construct
RGDDRDN

SEQ ID NO: 21859 - protein, 7 aa, synthetic construct
RGDDRNV

SEQ ID NO: 21860 - protein, 7 aa, synthetic construct
RGDDRTL

SEQ ID NO: 21861 - protein, 7 aa, synthetic construct
RGDDTKK

SEQ ID NO: 21862 - protein, 7 aa, synthetic construct
RGDDTNK

SEQ ID NO: 21863 - protein, 7 aa, synthetic construct
RGDDVDK

SEQ ID NO: 21864 - protein, 7 aa, synthetic construct
RGDDVNS

SEQ ID NO: 21865 - protein, 7 aa, synthetic construct
RGDEAIQ

SEQ ID NO: 21866 - protein, 7 aa, synthetic construct
RGDEALA

SEQ ID NO: 21867 - protein, 7 aa, synthetic construct
RGDEDLL

SEQ ID NO: 21868 - protein, 7 aa, synthetic construct
RGDEFDG

SEQ ID NO: 21869 - protein, 7 aa, synthetic construct
RGDEFNF

SEQ ID NO: 21870 - protein, 7 aa, synthetic construct
RGDEGKR

SEQ ID NO: 21871 - protein, 7 aa, synthetic construct
RGDEKVG

SEQ ID NO: 21872 - protein, 7 aa, synthetic construct
RGDENEH

SEQ ID NO: 21873 - protein, 7 aa, synthetic construct
RGDENKR

SEQ ID NO: 21874 - protein, 7 aa, synthetic construct
RGDEQKQ

SEQ ID NO: 21875 - protein, 7 aa, synthetic construct
RGDEQVI

SEQ ID NO: 21876 - protein, 7 aa, synthetic construct
RGDERAL

SEQ ID NO: 21877 - protein, 7 aa, synthetic construct
RGDERTQ

SEQ ID NO: 21878 - protein, 7 aa, synthetic construct
RGDESFH

SEQ ID NO: 21879 - protein, 7 aa, synthetic construct
RGDETVQ

SEQ ID NO: 21880 - protein, 7 aa, synthetic construct
RGDEVFH

SEQ ID NO: 21881 - protein, 7 aa, synthetic construct
RGDEVGG

SEQ ID NO: 21882 - protein, 7 aa, synthetic construct
RGDEVIK

SEQ ID NO: 21883 - protein, 7 aa, synthetic construct
RGDFADH

SEQ ID NO: 21884 - protein, 7 aa, synthetic construct
RGDFAEL

SEQ ID NO: 21885 - protein, 7 aa, synthetic construct
RGDFAFS

SEQ ID NO: 21886 - protein, 7 aa, synthetic construct
RGDFDAH

SEQ ID NO: 21887 - protein, 7 aa, synthetic construct
RGDFDNG

SEQ ID NO: 21888 - protein, 7 aa, synthetic construct
RGDAAKA

SEQ ID NO: 21889 - protein, 7 aa, synthetic construct
RGDFFGK

SEQ ID NO: 21890 - protein, 7 aa, synthetic construct
RGDFGDL

SEQ ID NO: 21891 - protein, 7 aa, synthetic construct
RGDFGVE

SEQ ID NO: 21892 - protein, 7 aa, synthetic construct
RGDFHTG

SEQ ID NO: 21893 - protein, 7 aa, synthetic construct
RGDFIEE

SEQ ID NO: 21894 - protein, 7 aa, synthetic construct
RGDFKSH

SEQ ID NO: 21895 - protein, 7 aa, synthetic construct
RGDFLLT

SEQ ID NO: 21896 - protein, 7 aa, synthetic construct
RGDFNNG

SEQ ID NO: 21897 - protein, 7 aa, synthetic construct
RGDFNQD

SEQ ID NO: 21898 - protein, 7 aa, synthetic construct
RGDFQQD

SEQ ID NO: 21899 - protein, 7 aa, synthetic construct
RGDFSDI

SEQ ID NO: 21900 - protein, 7 aa, synthetic construct
RGDFTGE

SEQ ID NO: 21901 - protein, 7 aa, synthetic construct
RGDFTSF

SEQ ID NO: 21902 - protein, 7 aa, synthetic construct
RGDGATL

SEQ ID NO: 21903 - protein, 7 aa, synthetic construct
RGDGDDT

SEQ ID NO: 21904 - protein, 7 aa, synthetic construct
RGDGDEK

SEQ ID NO: 21905 - protein, 7 aa, synthetic construct
RGDGDGI

SEQ ID NO: 21906 - protein, 7 aa, synthetic construct
RGDGDHN

SEQ ID NO: 21907 - protein, 7 aa, synthetic construct
RGDGFHQ

SEQ ID NO: 21908 - protein, 7 aa, synthetic construct
RGDGFKR

SEQ ID NO: 21909 - protein, 7 aa, synthetic construct
RGDGFTE

SEQ ID NO: 21910 - protein, 7 aa, synthetic construct
RGDGGFD

SEQ ID NO: 21911 - protein, 7 aa, synthetic construct
RGDGGGN

SEQ ID NO: 21912 - protein, 7 aa, synthetic construct
RGDGGIG

SEQ ID NO: 21913 - protein, 7 aa, synthetic construct
RGDGHEQ

SEQ ID NO: 21914 - protein, 7 aa, synthetic construct
RGDGIGH

SEQ ID NO: 21915 - protein, 7 aa, synthetic construct
RGDGING

SEQ ID NO: 21916 - protein, 7 aa, synthetic construct
RGDGLSH

SEQ ID NO: 21917 - protein, 7 aa, synthetic construct
RGDGNFK

SEQ ID NO: 21918 - protein, 7 aa, synthetic construct
RGDGNGV

SEQ ID NO: 21919 - protein, 7 aa, synthetic construct
RGDGNNT

SEQ ID NO: 21920 - protein, 7 aa, synthetic construct
RGDGQED

SEQ ID NO: 21921 - protein, 7 aa, synthetic construct
RGDGQEF

SEQ ID NO: 21922 - protein, 7 aa, synthetic construct
RGDGQVA

SEQ ID NO: 21923 - protein, 7 aa, synthetic construct
RGDGRDL

SEQ ID NO: 21924 - protein, 7 aa, synthetic construct
RGDGRIR

SEQ ID NO: 21925 - protein, 7 aa, synthetic construct
RGDGSNE

SEQ ID NO: 21926 - protein, 7 aa, synthetic construct
RGDGTEI

SEQ ID NO: 21927 - protein, 7 aa, synthetic construct
RGDGVDL

SEQ ID NO: 21928 - protein, 7 aa, synthetic construct
RGDHAFH

SEQ ID NO: 21929 - protein, 7 aa, synthetic construct
RGDHALT

SEQ ID NO: 21930 - protein, 7 aa, synthetic construct
RGDHANQ

SEQ ID NO: 21931 - protein, 7 aa, synthetic construct
RGDHDIV

SEQ ID NO: 21932 - protein, 7 aa, synthetic construct
RGDHDTE

SEQ ID NO: 21933 - protein, 7 aa, synthetic construct
RGDHDVI

SEQ ID NO: 21934 - protein, 7 aa, synthetic construct
RGDHFFT

SEQ ID NO: 21935 - protein, 7 aa, synthetic construct
RGDHHKQ

SEQ ID NO: 21936 - protein, 7 aa, synthetic construct
RGDHIKV

SEQ ID NO: 21937 - protein, 7 aa, synthetic construct
RGDALFL

SEQ ID NO: 21938 - protein, 7 aa, synthetic construct
RGDHLGV

SEQ ID NO: 21939 - protein, 7 aa, synthetic construct
RGDHLTG

SEQ ID NO: 21940 - protein, 7 aa, synthetic construct
RGDHNIF

SEQ ID NO: 21941 - protein, 7 aa, synthetic construct
RGDHQDK

SEQ ID NO: 21942 - protein, 7 aa, synthetic construct
RGDHQQN

SEQ ID NO: 21943 - protein, 7 aa, synthetic construct
RGDHRSH

SEQ ID NO: 21944 - protein, 7 aa, synthetic construct
RGDHSKE

SEQ ID NO: 21945 - protein, 7 aa, synthetic construct
RGDHVEH

SEQ ID NO: 21946 - protein, 7 aa, synthetic construct
RGDHVTE

SEQ ID NO: 21947 - protein, 7 aa, synthetic construct
RGDIALF

SEQ ID NO: 21948 - protein, 7 aa, synthetic construct
RGDIALQ

SEQ ID NO: 21949 - protein, 7 aa, synthetic construct
RGDANAV

SEQ ID NO: 21950 - protein, 7 aa, synthetic construct
RGDIDDQ

SEQ ID NO: 21951 - protein, 7 aa, synthetic construct
RGDIENH

SEQ ID NO: 21952 - protein, 7 aa, synthetic construct
RGDIFQK

SEQ ID NO: 21953 - protein, 7 aa, synthetic construct
RGDIFTA

SEQ ID NO: 21954 - protein, 7 aa, synthetic construct
RGDIGDR

SEQ ID NO: 21955 - protein, 7 aa, synthetic construct
RGDIGLD

SEQ ID NO: 21956 - protein, 7 aa, synthetic construct
RGDIIIS

SEQ ID NO: 21957 - protein, 7 aa, synthetic construct
RGDIKTD

SEQ ID NO: 21958 - protein, 7 aa, synthetic construct
RGDILKG

SEQ ID NO: 21959 - protein, 7 aa, synthetic construct
RGDILLN

SEQ ID NO: 21960 - protein, 7 aa, synthetic construct
RGDINQR

SEQ ID NO: 21961 - protein, 7 aa, synthetic construct
RGDIQFK

SEQ ID NO: 21962 - protein, 7 aa, synthetic construct
RGDIQVT

SEQ ID NO: 21963 - protein, 7 aa, synthetic construct
RGDIRHA

SEQ ID NO: 21964 - protein, 7 aa, synthetic construct
RGDAQFI

SEQ ID NO: 21965 - protein, 7 aa, synthetic construct
RGDISHG

SEQ ID NO: 21966 - protein, 7 aa, synthetic construct
RGDISHL

SEQ ID NO: 21967 - protein, 7 aa, synthetic construct
RGDITVF

SEQ ID NO: 21968 - protein, 7 aa, synthetic construct
RGDIVHG

SEQ ID NO: 21969 - protein, 7 aa, synthetic construct
RGDIVHK

SEQ ID NO: 21970 - protein, 7 aa, synthetic construct
RGDIVRG

SEQ ID NO: 21971 - protein, 7 aa, synthetic construct
RGDIVTQ

SEQ ID NO: 21972 - protein, 7 aa, synthetic construct
RGDKDSS

SEQ ID NO: 21973 - protein, 7 aa, synthetic construct
RGDKFFN

SEQ ID NO: 21974 - protein, 7 aa, synthetic construct
RGDKHES

SEQ ID NO: 21975 - protein, 7 aa, synthetic construct
RGDKIHS

SEQ ID NO: 21976 - protein, 7 aa, synthetic construct
RGDKILL

SEQ ID NO: 21977 - protein, 7 aa, synthetic construct
RGDKISR

SEQ ID NO: 21978 - protein, 7 aa, synthetic construct
RGDKLGE

SEQ ID NO: 21979 - protein, 7 aa, synthetic construct
RGDKNQT

SEQ ID NO: 21980 - protein, 7 aa, synthetic construct
RGDKQHF

SEQ ID NO: 21981 - protein, 7 aa, synthetic construct
RGDKRLS

SEQ ID NO: 21982 - protein, 7 aa, synthetic construct
RGDKRTR

SEQ ID NO: 21983 - protein, 7 aa, synthetic construct
RGDKSDK

SEQ ID NO: 21984 - protein, 7 aa, synthetic construct
RGDLDAA

SEQ ID NO: 21985 - protein, 7 aa, synthetic construct
RGDLDAK

SEQ ID NO: 21986 - protein, 7 aa, synthetic construct
RGDASEL

SEQ ID NO: 21987 - protein, 7 aa, synthetic construct
RGDLEHA

SEQ ID NO: 21988 - protein, 7 aa, synthetic construct
RGDLFEQ

SEQ ID NO: 21989 - protein, 7 aa, synthetic construct
RGDADFK

SEQ ID NO: 21990 - protein, 7 aa, synthetic construct
RGDLGAE

SEQ ID NO: 21991 - protein, 7 aa, synthetic construct
RGDLGEN

SEQ ID NO: 21992 - protein, 7 aa, synthetic construct
RGDLGFT

SEQ ID NO: 21993 - protein, 7 aa, synthetic construct
RGDLGTN

SEQ ID NO: 21994 - protein, 7 aa, synthetic construct
RGDADFS

SEQ ID NO: 21995 - protein, 7 aa, synthetic construct
RGDLIER

SEQ ID NO: 21996 - protein, 7 aa, synthetic construct
RGDLIFE

SEQ ID NO: 21997 - protein, 7 aa, synthetic construct
RGDLINR

SEQ ID NO: 21998 - protein, 7 aa, synthetic construct
RGDLKHA

SEQ ID NO: 21999 - protein, 7 aa, synthetic construct
RGDLKIN

SEQ ID NO: 22000 - protein, 7 aa, synthetic construct
RGDLKRD

SEQ ID NO: 22001 - protein, 7 aa, synthetic construct
RGDLKVG

SEQ ID NO: 22002 - protein, 7 aa, synthetic construct
RGDLLQE

SEQ ID NO: 22003 - protein, 7 aa, synthetic construct
RGDLNDL

SEQ ID NO: 22004 - protein, 7 aa, synthetic construct
RGDLNNN

SEQ ID NO: 22005 - protein, 7 aa, synthetic construct
RGDLNQF

SEQ ID NO: 22006 - protein, 7 aa, synthetic construct
RGDLNTA

SEQ ID NO: 22007 - protein, 7 aa, synthetic construct
RGDLQSA

SEQ ID NO: 22008 - protein, 7 aa, synthetic construct
RGDLQSF

SEQ ID NO: 22009 - protein, 7 aa, synthetic construct
RGDLSDK

SEQ ID NO: 22010 - protein, 7 aa, synthetic construct
RGDLSFV

SEQ ID NO: 22011 - protein, 7 aa, synthetic construct
RGDLSSK

SEQ ID NO: 22012 - protein, 7 aa, synthetic construct
RGDLTDI

SEQ ID NO: 22013 - protein, 7 aa, synthetic construct
RGDLTGE

SEQ ID NO: 22014 - protein, 7 aa, synthetic construct
RGDLTLV

SEQ ID NO: 22015 - protein, 7 aa, synthetic construct
RGDLVRR

SEQ ID NO: 22016 - protein, 7 aa, synthetic construct
RGDNEGV

SEQ ID NO: 22017 - protein, 7 aa, synthetic construct
RGDNFNS

SEQ ID NO: 22018 - protein, 7 aa, synthetic construct
RGDNFST

SEQ ID NO: 22019 - protein, 7 aa, synthetic construct
RGDNGNN

SEQ ID NO: 22020 - protein, 7 aa, synthetic construct
RGDNIFF

SEQ ID NO: 22021 - protein, 7 aa, synthetic construct
RGDNKDR

SEQ ID NO: 22022 - protein, 7 aa, synthetic construct
RGDNKTH

SEQ ID NO: 22023 - protein, 7 aa, synthetic construct
RGDNLAE

SEQ ID NO: 22024 - protein, 7 aa, synthetic construct
RGDNLDE

SEQ ID NO: 22025 - protein, 7 aa, synthetic construct
RGDNLGT

SEQ ID NO: 22026 - protein, 7 aa, synthetic construct
RGDNNEA

SEQ ID NO: 22027 - protein, 7 aa, synthetic construct
RGDNNKL

SEQ ID NO: 22028 - protein, 7 aa, synthetic construct
RGDAVKN

SEQ ID NO: 22029 - protein, 7 aa, synthetic construct
RGDNRGR

SEQ ID NO: 22030 - protein, 7 aa, synthetic construct
RGDAVQE

SEQ ID NO: 22031 - protein, 7 aa, synthetic construct
RGDNSVS

SEQ ID NO: 22032 - protein, 7 aa, synthetic construct
RGDNTFN

SEQ ID NO: 22033 - protein, 7 aa, synthetic construct
RGDNTST

SEQ ID NO: 22034 - protein, 7 aa, synthetic construct
RGDNVES

SEQ ID NO: 22035 - protein, 7 aa, synthetic construct
RGDNVND

SEQ ID NO: 22036 - protein, 7 aa, synthetic construct
RGDNVTH

SEQ ID NO: 22037 - protein, 7 aa, synthetic construct
RGDQAKG

SEQ ID NO: 22038 - protein, 7 aa, synthetic construct
RGDQAQN

SEQ ID NO: 22039 - protein, 7 aa, synthetic construct
RGDQATI

SEQ ID NO: 22040 - protein, 7 aa, synthetic construct
RGDADKN

SEQ ID NO: 22041 - protein, 7 aa, synthetic construct
RGDQDTQ

SEQ ID NO: 22042 - protein, 7 aa, synthetic construct
RGDQEKD

SEQ ID NO: 22043 - protein, 7 aa, synthetic construct
RGDQFAI

SEQ ID NO: 22044 - protein, 7 aa, synthetic construct
RGDQFKD

SEQ ID NO: 22045 - protein, 7 aa, synthetic construct
RGDQGAH

SEQ ID NO: 22046 - protein, 7 aa, synthetic construct
RGDDAIK

SEQ ID NO: 22047 - protein, 7 aa, synthetic construct
RGDQGIT

SEQ ID NO: 22048 - protein, 7 aa, synthetic construct
RGDQHTA

SEQ ID NO: 22049 - protein, 7 aa, synthetic construct
RGDQIKD

SEQ ID NO: 22050 - protein, 7 aa, synthetic construct
RGDQKAT

SEQ ID NO: 22051 - protein, 7 aa, synthetic construct
RGDQKDT

SEQ ID NO: 22052 - protein, 7 aa, synthetic construct
RGDQKIL

SEQ ID NO: 22053 - protein, 7 aa, synthetic construct
RGDQLIV

SEQ ID NO: 22054 - protein, 7 aa, synthetic construct
RGDADLR

SEQ ID NO: 22055 - protein, 7 aa, synthetic construct
RGDQNST

SEQ ID NO: 22056 - protein, 7 aa, synthetic construct
RGDQNVE

SEQ ID NO: 22057 - protein, 7 aa, synthetic construct
RGDQRAL

SEQ ID NO: 22058 - protein, 7 aa, synthetic construct
RGDQRTG

SEQ ID NO: 22059 - protein, 7 aa, synthetic construct
RGDQSIH

SEQ ID NO: 22060 - protein, 7 aa, synthetic construct
RGDQTHH

SEQ ID NO: 22061 - protein, 7 aa, synthetic construct
RGDQTNL

SEQ ID NO: 22062 - protein, 7 aa, synthetic construct
RGDRDTT

SEQ ID NO: 22063 - protein, 7 aa, synthetic construct
RGDRFIV

SEQ ID NO: 22064 - protein, 7 aa, synthetic construct
RGDDDSR

SEQ ID NO: 22065 - protein, 7 aa, synthetic construct
RGDRGEF

SEQ ID NO: 22066 - protein, 7 aa, synthetic construct
RGDDDTR

SEQ ID NO: 22067 - protein, 7 aa, synthetic construct
RGDDEAE

SEQ ID NO: 22068 - protein, 7 aa, synthetic construct
RGDDEDE

SEQ ID NO: 22069 - protein, 7 aa, synthetic construct
RGDRIEN

SEQ ID NO: 22070 - protein, 7 aa, synthetic construct
RGDRKLG

SEQ ID NO: 22071 - protein, 7 aa, synthetic construct
RGDDEGF

SEQ ID NO: 22072 - protein, 7 aa, synthetic construct
RGDRLED

SEQ ID NO: 22073 - protein, 7 aa, synthetic construct
RGDRNAG

SEQ ID NO: 22074 - protein, 7 aa, synthetic construct
RGDRNQG

SEQ ID NO: 22075 - protein, 7 aa, synthetic construct
RGDRQGE

SEQ ID NO: 22076 - protein, 7 aa, synthetic construct
RGDDEVN

SEQ ID NO: 22077 - protein, 7 aa, synthetic construct
RGDDEVQ

SEQ ID NO: 22078 - protein, 7 aa, synthetic construct
RGDSDDI

SEQ ID NO: 22079 - protein, 7 aa, synthetic construct
RGDSDTL

SEQ ID NO: 22080 - protein, 7 aa, synthetic construct
RGDSEEG

SEQ ID NO: 22081 - protein, 7 aa, synthetic construct
RGDSEGK

SEQ ID NO: 22082 - protein, 7 aa, synthetic construct
RGDSELK

SEQ ID NO: 22083 - protein, 7 aa, synthetic construct
RGDSETV

SEQ ID NO: 22084 - protein, 7 aa, synthetic construct
RGDSGGA

SEQ ID NO: 22085 - protein, 7 aa, synthetic construct
RGDDFKD

SEQ ID NO: 22086 - protein, 7 aa, synthetic construct
RGDSIHA

SEQ ID NO: 22087 - protein, 7 aa, synthetic construct
RGDSIQT

SEQ ID NO: 22088 - protein, 7 aa, synthetic construct
RGDSKFN

SEQ ID NO: 22089 - protein, 7 aa, synthetic construct
RGDSKQI

SEQ ID NO: 22090 - protein, 7 aa, synthetic construct
RGDSKVA

SEQ ID NO: 22091 - protein, 7 aa, synthetic construct
RGDSLQR

SEQ ID NO: 22092 - protein, 7 aa, synthetic construct
RGDSNFI

SEQ ID NO: 22093 - protein, 7 aa, synthetic construct
RGDSNSF

SEQ ID NO: 22094 - protein, 7 aa, synthetic construct
RGDSQFK

SEQ ID NO: 22095 - protein, 7 aa, synthetic construct
RGDSQSI

SEQ ID NO: 22096 - protein, 7 aa, synthetic construct
RGDSRSR

SEQ ID NO: 22097 - protein, 7 aa, synthetic construct
RGDSSRH

SEQ ID NO: 22098 - protein, 7 aa, synthetic construct
RGDSTFA

SEQ ID NO: 22099 - protein, 7 aa, synthetic construct
RGDSTGF

SEQ ID NO: 22100 - protein, 7 aa, synthetic construct
RGDSVDE

SEQ ID NO: 22101 - protein, 7 aa, synthetic construct
RGDTAGV

SEQ ID NO: 22102 - protein, 7 aa, synthetic construct
RGDTDFL

SEQ ID NO: 22103 - protein, 7 aa, synthetic construct
RGDDGNL

SEQ ID NO: 22104 - protein, 7 aa, synthetic construct
RGDTDLF

SEQ ID NO: 22105 - protein, 7 aa, synthetic construct
RGDTDRQ

SEQ ID NO: 22106 - protein, 7 aa, synthetic construct
RGDTDRS

SEQ ID NO: 22107 - protein, 7 aa, synthetic construct
RGDTDRV

SEQ ID NO: 22108 - protein, 7 aa, synthetic construct
RGDTEIV

SEQ ID NO: 22109 - protein, 7 aa, synthetic construct
RGDTENS

SEQ ID NO: 22110 - protein, 7 aa, synthetic construct
RGDTFKL

SEQ ID NO: 22111 - protein, 7 aa, synthetic construct
RGDTIHN

SEQ ID NO: 22112 - protein, 7 aa, synthetic construct
RGDTILQ

SEQ ID NO: 22113 - protein, 7 aa, synthetic construct
RGDTIQK

SEQ ID NO: 22114 - protein, 7 aa, synthetic construct
RGDTKQE

SEQ ID NO: 22115 - protein, 7 aa, synthetic construct
RGDTKRT

SEQ ID NO: 22116 - protein, 7 aa, synthetic construct
RGDTLEE

SEQ ID NO: 22117 - protein, 7 aa, synthetic construct
RGDTQAK

SEQ ID NO: 22118 - protein, 7 aa, synthetic construct
RGDTQTS

SEQ ID NO: 22119 - protein, 7 aa, synthetic construct
RGDDHNK

SEQ ID NO: 22120 - protein, 7 aa, synthetic construct
RGDTTNH

SEQ ID NO: 22121 - protein, 7 aa, synthetic construct
RGDTTTQ

SEQ ID NO: 22122 - protein, 7 aa, synthetic construct
RGDTTTT

SEQ ID NO: 22123 - protein, 7 aa, synthetic construct
RGDTVIT

SEQ ID NO: 22124 - protein, 7 aa, synthetic construct
RGDTVSI

SEQ ID NO: 22125 - protein, 7 aa, synthetic construct
RGDTVSN

SEQ ID NO: 22126 - protein, 7 aa, synthetic construct
RGDVAGE

SEQ ID NO: 22127 - protein, 7 aa, synthetic construct
RGDVAKT

SEQ ID NO: 22128 - protein, 7 aa, synthetic construct
RGDVDLK

SEQ ID NO: 22129 - protein, 7 aa, synthetic construct
RGDVELI

SEQ ID NO: 22130 - protein, 7 aa, synthetic construct
RGDVETL

SEQ ID NO: 22131 - protein, 7 aa, synthetic construct
RGDVHGQ

SEQ ID NO: 22132 - protein, 7 aa, synthetic construct
RGDVIVA

SEQ ID NO: 22133 - protein, 7 aa, synthetic construct
RGDVKLG

SEQ ID NO: 22134 - protein, 7 aa, synthetic construct
RGDVLLH

SEQ ID NO: 22135 - protein, 7 aa, synthetic construct
RGDDITA

SEQ ID NO: 22136 - protein, 7 aa, synthetic construct
RGDVQDR

SEQ ID NO: 22137 - protein, 7 aa, synthetic construct
RGDVQHQ

SEQ ID NO: 22138 - protein, 7 aa, synthetic construct
RGDVQSE

SEQ ID NO: 22139 - protein, 7 aa, synthetic construct
RGDVQVQ

SEQ ID NO: 22140 - protein, 7 aa, synthetic construct
RGDVRID

SEQ ID NO: 22141 - protein, 7 aa, synthetic construct
RGDVSQD

SEQ ID NO: 22142 - protein, 7 aa, synthetic construct
RGDVTAI

SEQ ID NO: 22143 - protein, 7 aa, synthetic construct
RGDVTDF

SEQ ID NO: 22144 - protein, 7 aa, synthetic construct
RGDVVVH

SEQ ID NO: 22145 - protein, 7 aa, synthetic construct
RGDDKKI

SEQ ID NO: 22146 - protein, 7 aa, synthetic construct
RGDDKSR

SEQ ID NO: 22147 - protein, 7 aa, synthetic construct
RGDDLFN

SEQ ID NO: 22148 - protein, 7 aa, synthetic construct
RGDDNGN

SEQ ID NO: 22149 - protein, 7 aa, synthetic construct
RGDDNRA

SEQ ID NO: 22150 - protein, 7 aa, synthetic construct
RGDDQTI

SEQ ID NO: 22151 - protein, 7 aa, synthetic construct
RGDAAFV

SEQ ID NO: 22152 - protein, 7 aa, synthetic construct
RGDDRVT

SEQ ID NO: 22153 - protein, 7 aa, synthetic construct
RGDDSQI

SEQ ID NO: 22154 - protein, 7 aa, synthetic construct
RGDDVAR

SEQ ID NO: 22155 - protein, 7 aa, synthetic construct
RGDEDSL

SEQ ID NO: 22156 - protein, 7 aa, synthetic construct
RGDEEDS

SEQ ID NO: 22157 - protein, 7 aa, synthetic construct
RGDEFEQ

SEQ ID NO: 22158 - protein, 7 aa, synthetic construct
RGDEFVH

SEQ ID NO: 22159 - protein, 7 aa, synthetic construct
RGDEHFI

SEQ ID NO: 22160 - protein, 7 aa, synthetic construct
RGDEHRE

SEQ ID NO: 22161 - protein, 7 aa, synthetic construct
RGDEHRQ

SEQ ID NO: 22162 - protein, 7 aa, synthetic construct
RGDEHVR

SEQ ID NO: 22163 - protein, 7 aa, synthetic construct
RGDEITR

SEQ ID NO: 22164 - protein, 7 aa, synthetic construct
RGDEKEF

SEQ ID NO: 22165 - protein, 7 aa, synthetic construct
RGDEKRD

SEQ ID NO: 22166 - protein, 7 aa, synthetic construct
RGDEKSS

SEQ ID NO: 22167 - protein, 7 aa, synthetic construct
RGDEKTN

SEQ ID NO: 22168 - protein, 7 aa, synthetic construct
RGDELFR

SEQ ID NO: 22169 - protein, 7 aa, synthetic construct
RGDELKA

SEQ ID NO: 22170 - protein, 7 aa, synthetic construct
RGDELSR

SEQ ID NO: 22171 - protein, 7 aa, synthetic construct
RGDERFV

SEQ ID NO: 22172 - protein, 7 aa, synthetic construct
RGDERLS

SEQ ID NO: 22173 - protein, 7 aa, synthetic construct
RGDERRF

SEQ ID NO: 22174 - protein, 7 aa, synthetic construct
RGDERRT

SEQ ID NO: 22175 - protein, 7 aa, synthetic construct
RGDESST

SEQ ID NO: 22176 - protein, 7 aa, synthetic construct
RGDETGD

SEQ ID NO: 22177 - protein, 7 aa, synthetic construct
RGDEVDN

SEQ ID NO: 22178 - protein, 7 aa, synthetic construct
RGDEVGL

SEQ ID NO: 22179 - protein, 7 aa, synthetic construct
RGDEVVL

SEQ ID NO: 22180 - protein, 7 aa, synthetic construct
RGDFDFH

SEQ ID NO: 22181 - protein, 7 aa, synthetic construct
RGDFEAH

SEQ ID NO: 22182 - protein, 7 aa, synthetic construct
RGDAGQQ

SEQ ID NO: 22183 - protein, 7 aa, synthetic construct
RGDFEHL

SEQ ID NO: 22184 - protein, 7 aa, synthetic construct
RGDFERF

SEQ ID NO: 22185 - protein, 7 aa, synthetic construct
RGDFEVS

SEQ ID NO: 22186 - protein, 7 aa, synthetic construct
RGDFFSE

SEQ ID NO: 22187 - protein, 7 aa, synthetic construct
RGDFGQD

SEQ ID NO: 22188 - protein, 7 aa, synthetic construct
RGDFHFN

SEQ ID NO: 22189 - protein, 7 aa, synthetic construct
RGDFHGF

SEQ ID NO: 22190 - protein, 7 aa, synthetic construct
RGDFHIN

SEQ ID NO: 22191 - protein, 7 aa, synthetic construct
RGDFHQD

SEQ ID NO: 22192 - protein, 7 aa, synthetic construct
RGDFHQE

SEQ ID NO: 22193 - protein, 7 aa, synthetic construct
RGDFIAK

SEQ ID NO: 22194 - protein, 7 aa, synthetic construct
RGDFIKD

SEQ ID NO: 22195 - protein, 7 aa, synthetic construct
RGDFKIK

SEQ ID NO: 22196 - protein, 7 aa, synthetic construct
RGDFLQR

SEQ ID NO: 22197 - protein, 7 aa, synthetic construct
RGDFNGR

SEQ ID NO: 22198 - protein, 7 aa, synthetic construct
RGDFNKE

SEQ ID NO: 22199 - protein, 7 aa, synthetic construct
RGDFQNF

SEQ ID NO: 22200 - protein, 7 aa, synthetic construct
RGDFQRQ

SEQ ID NO: 22201 - protein, 7 aa, synthetic construct
RGDFRIQ

SEQ ID NO: 22202 - protein, 7 aa, synthetic construct
RGDFSHL

SEQ ID NO: 22203 - protein, 7 aa, synthetic construct
RGDFTES

SEQ ID NO: 22204 - protein, 7 aa, synthetic construct
RGDFTFE

SEQ ID NO: 22205 - protein, 7 aa, synthetic construct
RGDFTVN

SEQ ID NO: 22206 - protein, 7 aa, synthetic construct
RGDGASL

SEQ ID NO: 22207 - protein, 7 aa, synthetic construct
RGDGDQH

SEQ ID NO: 22208 - protein, 7 aa, synthetic construct
RGDGETI

SEQ ID NO: 22209 - protein, 7 aa, synthetic construct
RGDGFKH

SEQ ID NO: 22210 - protein, 7 aa, synthetic construct
RGDGFRD

SEQ ID NO: 22211 - protein, 7 aa, synthetic construct
RGDGGHI

SEQ ID NO: 22212 - protein, 7 aa, synthetic construct
RGDGGLI

SEQ ID NO: 22213 - protein, 7 aa, synthetic construct
RGDGGQS

SEQ ID NO: 22214 - protein, 7 aa, synthetic construct
RGDGIHA

SEQ ID NO: 22215 - protein, 7 aa, synthetic construct
RGDGIHL

SEQ ID NO: 22216 - protein, 7 aa, synthetic construct
RGDAIQV

SEQ ID NO: 22217 - protein, 7 aa, synthetic construct
RGDGLKH

SEQ ID NO: 22218 - protein, 7 aa, synthetic construct
RGDGNVS

SEQ ID NO: 22219 - protein, 7 aa, synthetic construct
RGDGQHG

SEQ ID NO: 22220 - protein, 7 aa, synthetic construct
RGDGQNF

SEQ ID NO: 22221 - protein, 7 aa, synthetic construct
RGDGQSN

SEQ ID NO: 22222 - protein, 7 aa, synthetic construct
RGDGREG

SEQ ID NO: 22223 - protein, 7 aa, synthetic construct
RGDGRHQ

SEQ ID NO: 22224 - protein, 7 aa, synthetic construct
RGDAKEF

SEQ ID NO: 22225 - protein, 7 aa, synthetic construct
RGDGTFQ

SEQ ID NO: 22226 - protein, 7 aa, synthetic construct
RGDGTGQ

SEQ ID NO: 22227 - protein, 7 aa, synthetic construct
RGDGVAF

SEQ ID NO: 22228 - protein, 7 aa, synthetic construct
RGDGVIN

SEQ ID NO: 22229 - protein, 7 aa, synthetic construct
RGDHAGE

SEQ ID NO: 22230 - protein, 7 aa, synthetic construct
RGDHAIK

SEQ ID NO: 22231 - protein, 7 aa, synthetic construct
RGDHANT

SEQ ID NO: 22232 - protein, 7 aa, synthetic construct
RGDHEEF

SEQ ID NO: 22233 - protein, 7 aa, synthetic construct
RGDHEGV

SEQ ID NO: 22234 - protein, 7 aa, synthetic construct
RGDHEHE

SEQ ID NO: 22235 - protein, 7 aa, synthetic construct
RGDHENT

SEQ ID NO: 22236 - protein, 7 aa, synthetic construct
RGDHFGK

SEQ ID NO: 22237 - protein, 7 aa, synthetic construct
RGDHHAK

SEQ ID NO: 22238 - protein, 7 aa, synthetic construct
RGDHHNN

SEQ ID NO: 22239 - protein, 7 aa, synthetic construct
RGDALDS

SEQ ID NO: 22240 - protein, 7 aa, synthetic construct
RGDHIKG

SEQ ID NO: 22241 - protein, 7 aa, synthetic construct
RGDHKHH

SEQ ID NO: 22242 - protein, 7 aa, synthetic construct
RGDHLAG

SEQ ID NO: 22243 - protein, 7 aa, synthetic construct
RGDHLDS

SEQ ID NO: 22244 - protein, 7 aa, synthetic construct
RGDHLNE

SEQ ID NO: 22245 - protein, 7 aa, synthetic construct
RGDHLQH

SEQ ID NO: 22246 - protein, 7 aa, synthetic construct
RGDHLRI

SEQ ID NO: 22247 - protein, 7 aa, synthetic construct
RGDHNEI

SEQ ID NO: 22248 - protein, 7 aa, synthetic construct
RGDHNIV

SEQ ID NO: 22249 - protein, 7 aa, synthetic construct
RGDHRKA

SEQ ID NO: 22250 - protein, 7 aa, synthetic construct
RGDHRSN

SEQ ID NO: 22251 - protein, 7 aa, synthetic construct
RGDHTII

SEQ ID NO: 22252 - protein, 7 aa, synthetic construct
RGDHVDQ

SEQ ID NO: 22253 - protein, 7 aa, synthetic construct
RGDIAHG

SEQ ID NO: 22254 - protein, 7 aa, synthetic construct
RGDIAHH

SEQ ID NO: 22255 - protein, 7 aa, synthetic construct
RGDIDKL

SEQ ID NO: 22256 - protein, 7 aa, synthetic construct
RGDIDTR

SEQ ID NO: 22257 - protein, 7 aa, synthetic construct
RGDIEAV

SEQ ID NO: 22258 - protein, 7 aa, synthetic construct
RGDIEET

SEQ ID NO: 22259 - protein, 7 aa, synthetic construct
RGDIELF

SEQ ID NO: 22260 - protein, 7 aa, synthetic construct
RGDIFRH

SEQ ID NO: 22261 - protein, 7 aa, synthetic construct
RGDIFVR

SEQ ID NO: 22262 - protein, 7 aa, synthetic construct
RGDIHGS

SEQ ID NO: 22263 - protein, 7 aa, synthetic construct
RGDIHRF

SEQ ID NO: 22264 - protein, 7 aa, synthetic construct
RGDIISS

SEQ ID NO: 22265 - protein, 7 aa, synthetic construct
RGDIKDN

SEQ ID NO: 22266 - protein, 7 aa, synthetic construct
RGDIKQI

SEQ ID NO: 22267 - protein, 7 aa, synthetic construct
RGDIKQR

SEQ ID NO: 22268 - protein, 7 aa, synthetic construct
RGDIKSG

SEQ ID NO: 22269 - protein, 7 aa, synthetic construct
RGDILIF

SEQ ID NO: 22270 - protein, 7 aa, synthetic construct
RGDINHI

SEQ ID NO: 22271 - protein, 7 aa, synthetic construct
RGDISTL

SEQ ID NO: 22272 - protein, 7 aa, synthetic construct
RGDITGN

SEQ ID NO: 22273 - protein, 7 aa, synthetic construct
RGDITGR

SEQ ID NO: 22274 - protein, 7 aa, synthetic construct
RGDIVHQ

SEQ ID NO: 22275 - protein, 7 aa, synthetic construct
RGDIVSQ

SEQ ID NO: 22276 - protein, 7 aa, synthetic construct
RGDKDGV

SEQ ID NO: 22277 - protein, 7 aa, synthetic construct
RGDKDHI

SEQ ID NO: 22278 - protein, 7 aa, synthetic construct
RGDKGDQ

SEQ ID NO: 22279 - protein, 7 aa, synthetic construct
RGDKGES

SEQ ID NO: 22280 - protein, 7 aa, synthetic construct
RGDKGIN

SEQ ID NO: 22281 - protein, 7 aa, synthetic construct
RGDKKIF

SEQ ID NO: 22282 - protein, 7 aa, synthetic construct
RGDKKLT

SEQ ID NO: 22283 - protein, 7 aa, synthetic construct
RGDKLED

SEQ ID NO: 22284 - protein, 7 aa, synthetic construct
RGDKQSH

SEQ ID NO: 22285 - protein, 7 aa, synthetic construct
RGDKREL

SEQ ID NO: 22286 - protein, 7 aa, synthetic construct
RGDKRRI

SEQ ID NO: 22287 - protein, 7 aa, synthetic construct
RGDKSIH

SEQ ID NO: 22288 - protein, 7 aa, synthetic construct
RGDKTFD

SEQ ID NO: 22289 - protein, 7 aa, synthetic construct
RGDLAGR

SEQ ID NO: 22290 - protein, 7 aa, synthetic construct
RGDLAST

SEQ ID NO: 22291 - protein, 7 aa, synthetic construct
RGDLDNN

SEQ ID NO: 22292 - protein, 7 aa, synthetic construct
RGDLENT

SEQ ID NO: 22293 - protein, 7 aa, synthetic construct
RGDLEVN

SEQ ID NO: 22294 - protein, 7 aa, synthetic construct
RGDASGS

SEQ ID NO: 22295 - protein, 7 aa, synthetic construct
RGDLGAG

SEQ ID NO: 22296 - protein, 7 aa, synthetic construct
RGDLHFS

SEQ ID NO: 22297 - protein, 7 aa, synthetic construct
RGDLIVE

SEQ ID NO: 22298 - protein, 7 aa, synthetic construct
RGDLKDK

SEQ ID NO: 22299 - protein, 7 aa, synthetic construct
RGDLKER

SEQ ID NO: 22300 - protein, 7 aa, synthetic construct
RGDLLFA

SEQ ID NO: 22301 - protein, 7 aa, synthetic construct
RGDLLIE

SEQ ID NO: 22302 - protein, 7 aa, synthetic construct
RGDLLKE

SEQ ID NO: 22303 - protein, 7 aa, synthetic construct
RGDLQES

SEQ ID NO: 22304 - protein, 7 aa, synthetic construct
RGDLQNQ

SEQ ID NO: 22305 - protein, 7 aa, synthetic construct
RGDLQQR

SEQ ID NO: 22306 - protein, 7 aa, synthetic construct
RGDLQVV

SEQ ID NO: 22307 - protein, 7 aa, synthetic construct
RGDATFL

SEQ ID NO: 22308 - protein, 7 aa, synthetic construct
RGDLSVN

SEQ ID NO: 22309 - protein, 7 aa, synthetic construct
RGDNAGH

SEQ ID NO: 22310 - protein, 7 aa, synthetic construct
RGDNARH

SEQ ID NO: 22311 - protein, 7 aa, synthetic construct
RGDNDAH

SEQ ID NO: 22312 - protein, 7 aa, synthetic construct
RGDNDIL

SEQ ID NO: 22313 - protein, 7 aa, synthetic construct
RGDATNN

SEQ ID NO: 22314 - protein, 7 aa, synthetic construct
RGDNDTR

SEQ ID NO: 22315 - protein, 7 aa, synthetic construct
RGDNEGN

SEQ ID NO: 22316 - protein, 7 aa, synthetic construct
RGDNELV

SEQ ID NO: 22317 - protein, 7 aa, synthetic construct
RGDNENA

SEQ ID NO: 22318 - protein, 7 aa, synthetic construct
RGDNEVK

SEQ ID NO: 22319 - protein, 7 aa, synthetic construct
RGDNFGR

SEQ ID NO: 22320 - protein, 7 aa, synthetic construct
RGDATSQ

SEQ ID NO: 22321 - protein, 7 aa, synthetic construct
RGDNGVG

SEQ ID NO: 22322 - protein, 7 aa, synthetic construct
RGDADHV

SEQ ID NO: 22323 - protein, 7 aa, synthetic construct
RGDNHHN

SEQ ID NO: 22324 - protein, 7 aa, synthetic construct
RGDNIHS

SEQ ID NO: 22325 - protein, 7 aa, synthetic construct
RGDNIKS

SEQ ID NO: 22326 - protein, 7 aa, synthetic construct
RGDNIRD

SEQ ID NO: 22327 - protein, 7 aa, synthetic construct
RGDNKFE

SEQ ID NO: 22328 - protein, 7 aa, synthetic construct
RGDNKVF

SEQ ID NO: 22329 - protein, 7 aa, synthetic construct
RGDNLTS

SEQ ID NO: 22330 - protein, 7 aa, synthetic construct
RGDNNHV

SEQ ID NO: 22331 - protein, 7 aa, synthetic construct
RGDNNVL

SEQ ID NO: 22332 - protein, 7 aa, synthetic construct
RGDNRHG

SEQ ID NO: 22333 - protein, 7 aa, synthetic construct
RGDNSAR

SEQ ID NO: 22334 - protein, 7 aa, synthetic construct
RGDNSQA

SEQ ID NO: 22335 - protein, 7 aa, synthetic construct
RGDNSTK

SEQ ID NO: 22336 - protein, 7 aa, synthetic construct
RGDNTNT

SEQ ID NO: 22337 - protein, 7 aa, synthetic construct
RGDNVKD

SEQ ID NO: 22338 - protein, 7 aa, synthetic construct
RGDQDFR

SEQ ID NO: 22339 - protein, 7 aa, synthetic construct
RGDQDSA

SEQ ID NO: 22340 - protein, 7 aa, synthetic construct
RGDQDTN

SEQ ID NO: 22341 - protein, 7 aa, synthetic construct
RGDQEFK

SEQ ID NO: 22342 - protein, 7 aa, synthetic construct
RGDQEGV

SEQ ID NO: 22343 - protein, 7 aa, synthetic construct
RGDQETN

SEQ ID NO: 22344 - protein, 7 aa, synthetic construct
RGDQEVV

SEQ ID NO: 22345 - protein, 7 aa, synthetic construct
RGDQFHR

SEQ ID NO: 22346 - protein, 7 aa, synthetic construct
RGDQFNV

SEQ ID NO: 22347 - protein, 7 aa, synthetic construct
RGDQGFT

SEQ ID NO: 22348 - protein, 7 aa, synthetic construct
RGDQGTL

SEQ ID NO: 22349 - protein, 7 aa, synthetic construct
RGDQHTN

SEQ ID NO: 22350 - protein, 7 aa, synthetic construct
RGDQIHH

SEQ ID NO: 22351 - protein, 7 aa, synthetic construct
RGDQITV

SEQ ID NO: 22352 - protein, 7 aa, synthetic construct
RGDDAQN

SEQ ID NO: 22353 - protein, 7 aa, synthetic construct
RGDQLHQ

SEQ ID NO: 22354 - protein, 7 aa, synthetic construct
RGDQLLT

SEQ ID NO: 22355 - protein, 7 aa, synthetic construct
RGDDATF

SEQ ID NO: 22356 - protein, 7 aa, synthetic construct
RGDDAVI

SEQ ID NO: 22357 - protein, 7 aa, synthetic construct
RGDDAVR

SEQ ID NO: 22358 - protein, 7 aa, synthetic construct
RGDQNTD

SEQ ID NO: 22359 - protein, 7 aa, synthetic construct
RGDQQTI

SEQ ID NO: 22360 - protein, 7 aa, synthetic construct
RGDQRER

SEQ ID NO: 22361 - protein, 7 aa, synthetic construct
RGDQRHR

SEQ ID NO: 22362 - protein, 7 aa, synthetic construct
RGDQSGH

SEQ ID NO: 22363 - protein, 7 aa, synthetic construct
RGDQSQL

SEQ ID NO: 22364 - protein, 7 aa, synthetic construct
RGDQSVH

SEQ ID NO: 22365 - protein, 7 aa, synthetic construct
RGDQTFK

SEQ ID NO: 22366 - protein, 7 aa, synthetic construct
RGDDDHN

SEQ ID NO: 22367 - protein, 7 aa, synthetic construct
RGDQTTF

SEQ ID NO: 22368 - protein, 7 aa, synthetic construct
RGDQVRK

SEQ ID NO: 22369 - protein, 7 aa, synthetic construct
RGDQVSH

SEQ ID NO: 22370 - protein, 7 aa, synthetic construct
RGDDDKH

SEQ ID NO: 22371 - protein, 7 aa, synthetic construct
RGDRENG

SEQ ID NO: 22372 - protein, 7 aa, synthetic construct
RGDRETA

SEQ ID NO: 22373 - protein, 7 aa, synthetic construct
RGDREVQ

SEQ ID NO: 22374 - protein, 7 aa, synthetic construct
RGDRFHI

SEQ ID NO: 22375 - protein, 7 aa, synthetic construct
RGDRGED

SEQ ID NO: 22376 - protein, 7 aa, synthetic construct
RGDRQLA

SEQ ID NO: 22377 - protein, 7 aa, synthetic construct
RGDRRDE

SEQ ID NO: 22378 - protein, 7 aa, synthetic construct
RGDSGIE

SEQ ID NO: 22379 - protein, 7 aa, synthetic construct
RGDSGRS

SEQ ID NO: 22380 - protein, 7 aa, synthetic construct
RGDSGTL

SEQ ID NO: 22381 - protein, 7 aa, synthetic construct
RGDSGVA

SEQ ID NO: 22382 - protein, 7 aa, synthetic construct
RGDSHRG

SEQ ID NO: 22383 - protein, 7 aa, synthetic construct
RGDSKDT

SEQ ID NO: 22384 - protein, 7 aa, synthetic construct
RGDSKHT

SEQ ID NO: 22385 - protein, 7 aa, synthetic construct
RGDSLTK

SEQ ID NO: 22386 - protein, 7 aa, synthetic construct
RGDSLVT

SEQ ID NO: 22387 - protein, 7 aa, synthetic construct
RGDSNQE

SEQ ID NO: 22388 - protein, 7 aa, synthetic construct
RGDSNQQ

SEQ ID NO: 22389 - protein, 7 aa, synthetic construct
RGDSNSH

SEQ ID NO: 22390 - protein, 7 aa, synthetic construct
RGDSQGH

SEQ ID NO: 22391 - protein, 7 aa, synthetic construct
RGDSQSL

SEQ ID NO: 22392 - protein, 7 aa, synthetic construct
RGDSSQV

SEQ ID NO: 22393 - protein, 7 aa, synthetic construct
RGDDGGR

SEQ ID NO: 22394 - protein, 7 aa, synthetic construct
RGDSTFE

SEQ ID NO: 22395 - protein, 7 aa, synthetic construct
RGDSTVQ

SEQ ID NO: 22396 - protein, 7 aa, synthetic construct
RGDSVFF

SEQ ID NO: 22397 - protein, 7 aa, synthetic construct
RGDTASS

SEQ ID NO: 22398 - protein, 7 aa, synthetic construct
RGDTAVV

SEQ ID NO: 22399 - protein, 7 aa, synthetic construct
RGDTDTN

SEQ ID NO: 22400 - protein, 7 aa, synthetic construct
RGDTEKN

SEQ ID NO: 22401 - protein, 7 aa, synthetic construct
RGDTEVK

SEQ ID NO: 22402 - protein, 7 aa, synthetic construct
RGDTHKH

SEQ ID NO: 22403 - protein, 7 aa, synthetic construct
RGDTHLK

SEQ ID NO: 22404 - protein, 7 aa, synthetic construct
RGDTITL

SEQ ID NO: 22405 - protein, 7 aa, synthetic construct
RGDTKIF

SEQ ID NO: 22406 - protein, 7 aa, synthetic construct
RGDTKTN

SEQ ID NO: 22407 - protein, 7 aa, synthetic construct
RGDTLHG

SEQ ID NO: 22408 - protein, 7 aa, synthetic construct
RGDTNGF

SEQ ID NO: 22409 - protein, 7 aa, synthetic construct
RGDDHIT

SEQ ID NO: 22410 - protein, 7 aa, synthetic construct
RGDTQTT

SEQ ID NO: 22411 - protein, 7 aa, synthetic construct
RGDTTKL

SEQ ID NO: 22412 - protein, 7 aa, synthetic construct
RGDVDID

SEQ ID NO: 22413 - protein, 7 aa, synthetic construct
RGDVDKL

SEQ ID NO: 22414 - protein, 7 aa, synthetic construct
RGDVEIQ

SEQ ID NO: 22415 - protein, 7 aa, synthetic construct
RGDVETA

SEQ ID NO: 22416 - protein, 7 aa, synthetic construct
RGDVFAL

SEQ ID NO: 22417 - protein, 7 aa, synthetic construct
RGDVFHI

SEQ ID NO: 22418 - protein, 7 aa, synthetic construct
RGDDIHL

SEQ ID NO: 22419 - protein, 7 aa, synthetic construct
RGDVFVF

SEQ ID NO: 22420 - protein, 7 aa, synthetic construct
RGDVGTG

SEQ ID NO: 22421 - protein, 7 aa, synthetic construct
RGDVHAL

SEQ ID NO: 22422 - protein, 7 aa, synthetic construct
RGDVHFE

SEQ ID NO: 22423 - protein, 7 aa, synthetic construct
RGDVHFF

SEQ ID NO: 22424 - protein, 7 aa, synthetic construct
RGDVHLS

SEQ ID NO: 22425 - protein, 7 aa, synthetic construct
RGDVKET

SEQ ID NO: 22426 - protein, 7 aa, synthetic construct
RGDVKGD

SEQ ID NO: 22427 - protein, 7 aa, synthetic construct
RGDVLHN

SEQ ID NO: 22428 - protein, 7 aa, synthetic construct
RGDVLNH

SEQ ID NO: 22429 - protein, 7 aa, synthetic construct
RGDVNFA

SEQ ID NO: 22430 - protein, 7 aa, synthetic construct
RGDVNST

SEQ ID NO: 22431 - protein, 7 aa, synthetic construct
RGDVNVQ

SEQ ID NO: 22432 - protein, 7 aa, synthetic construct
RGDVTGL

SEQ ID NO: 22433 - protein, 7 aa, synthetic construct
RGDVVAK

SEQ ID NO: 22434 - protein, 7 aa, synthetic construct
RGDDKRT

SEQ ID NO: 22435 - protein, 7 aa, synthetic construct
RGDDLNQ

SEQ ID NO: 22436 - protein, 7 aa, synthetic construct
RGDDNDT

SEQ ID NO: 22437 - protein, 7 aa, synthetic construct
RGDDQVV

SEQ ID NO: 22438 - protein, 7 aa, synthetic construct
RGDDRTV

SEQ ID NO: 22439 - protein, 7 aa, synthetic construct
RGDDRVK

SEQ ID NO: 22440 - protein, 7 aa, synthetic construct
RGDDSSG

SEQ ID NO: 22441 - protein, 7 aa, synthetic construct
RGDDTFR

SEQ ID NO: 22442 - protein, 7 aa, synthetic construct
RGDDTTR

SEQ ID NO: 22443 - protein, 7 aa, synthetic construct
RGDEEHI

SEQ ID NO: 22444 - protein, 7 aa, synthetic construct
RGDEELI

SEQ ID NO: 22445 - protein, 7 aa, synthetic construct
RGDEGGV

SEQ ID NO: 22446 - protein, 7 aa, synthetic construct
RGDAFIQ

SEQ ID NO: 22447 - protein, 7 aa, synthetic construct
RGDEGVG

SEQ ID NO: 22448 - protein, 7 aa, synthetic construct
RGDEHDF

SEQ ID NO: 22449 - protein, 7 aa, synthetic construct
RGDEHDH

SEQ ID NO: 22450 - protein, 7 aa, synthetic construct
RGDEHET

SEQ ID NO: 22451 - protein, 7 aa, synthetic construct
RGDEHFS

SEQ ID NO: 22452 - protein, 7 aa, synthetic construct
RGDEHRT

SEQ ID NO: 22453 - protein, 7 aa, synthetic construct
RGDEITG

SEQ ID NO: 22454 - protein, 7 aa, synthetic construct
RGDEKVK

SEQ ID NO: 22455 - protein, 7 aa, synthetic construct
RGDAFSL

SEQ ID NO: 22456 - protein, 7 aa, synthetic construct
RGDELTQ

SEQ ID NO: 22457 - protein, 7 aa, synthetic construct
RGDENAV

SEQ ID NO: 22458 - protein, 7 aa, synthetic construct
RGDENQE

SEQ ID NO: 22459 - protein, 7 aa, synthetic construct
RGDENTD

SEQ ID NO: 22460 - protein, 7 aa, synthetic construct
RGDEQHA

SEQ ID NO: 22461 - protein, 7 aa, synthetic construct
RGDEREN

SEQ ID NO: 22462 - protein, 7 aa, synthetic construct
RGDERRA

SEQ ID NO: 22463 - protein, 7 aa, synthetic construct
RGDERRD

SEQ ID NO: 22464 - protein, 7 aa, synthetic construct
RGDESNE

SEQ ID NO: 22465 - protein, 7 aa, synthetic construct
RGDFDEA

SEQ ID NO: 22466 - protein, 7 aa, synthetic construct
RGDFDNN

SEQ ID NO: 22467 - protein, 7 aa, synthetic construct
RGDFDTE

SEQ ID NO: 22468 - protein, 7 aa, synthetic construct
RGDFDVH

SEQ ID NO: 22469 - protein, 7 aa, synthetic construct
RGDFEET

SEQ ID NO: 22470 - protein, 7 aa, synthetic construct
RGDFEFG

SEQ ID NO: 22471 - protein, 7 aa, synthetic construct
RGDFEKL

SEQ ID NO: 22472 - protein, 7 aa, synthetic construct
RGDFETT

SEQ ID NO: 22473 - protein, 7 aa, synthetic construct
RGDFFIN

SEQ ID NO: 22474 - protein, 7 aa, synthetic construct
RGDFGAD

SEQ ID NO: 22475 - protein, 7 aa, synthetic construct
RGDFIKG

SEQ ID NO: 22476 - protein, 7 aa, synthetic construct
RGDFIKR

SEQ ID NO: 22477 - protein, 7 aa, synthetic construct
RGDFILQ

SEQ ID NO: 22478 - protein, 7 aa, synthetic construct
RGDFIQS

SEQ ID NO: 22479 - protein, 7 aa, synthetic construct
RGDFITL

SEQ ID NO: 22480 - protein, 7 aa, synthetic construct
RGDFKGD

SEQ ID NO: 22481 - protein, 7 aa, synthetic construct
RGDFKVF

SEQ ID NO: 22482 - protein, 7 aa, synthetic construct
RGDFLFQ

SEQ ID NO: 22483 - protein, 7 aa, synthetic construct
RGDFLKQ

SEQ ID NO: 22484 - protein, 7 aa, synthetic construct
RGDFNEL

SEQ ID NO: 22485 - protein, 7 aa, synthetic construct
RGDFNIF

SEQ ID NO: 22486 - protein, 7 aa, synthetic construct
RGDFNNQ

SEQ ID NO: 22487 - protein, 7 aa, synthetic construct
RGDFNQF

SEQ ID NO: 22488 - protein, 7 aa, synthetic construct
RGDFQKV

SEQ ID NO: 22489 - protein, 7 aa, synthetic construct
RGDFQQG

SEQ ID NO: 22490 - protein, 7 aa, synthetic construct
RGDFQQV

SEQ ID NO: 22491 - protein, 7 aa, synthetic construct
RGDFQVH

SEQ ID NO: 22492 - protein, 7 aa, synthetic construct
RGDFRVA

SEQ ID NO: 22493 - protein, 7 aa, synthetic construct
RGDFTDN

SEQ ID NO: 22494 - protein, 7 aa, synthetic construct
RGDFVIA

SEQ ID NO: 22495 - protein, 7 aa, synthetic construct
RGDFVLI

SEQ ID NO: 22496 - protein, 7 aa, synthetic construct
RGDFVSF

SEQ ID NO: 22497 - protein, 7 aa, synthetic construct
RGDGAHA

SEQ ID NO: 22498 - protein, 7 aa, synthetic construct
RGDGANH

SEQ ID NO: 22499 - protein, 7 aa, synthetic construct
RGDGATT

SEQ ID NO: 22500 - protein, 7 aa, synthetic construct
RGDGEGI

SEQ ID NO: 22501 - protein, 7 aa, synthetic construct
RGDGEIF

SEQ ID NO: 22502 - protein, 7 aa, synthetic construct
RGDGFLG

SEQ ID NO: 22503 - protein, 7 aa, synthetic construct
RGDGGVA

SEQ ID NO: 22504 - protein, 7 aa, synthetic construct
RGDGHAD

SEQ ID NO: 22505 - protein, 7 aa, synthetic construct
RGDGHET

SEQ ID NO: 22506 - protein, 7 aa, synthetic construct
RGDGHFS

SEQ ID NO: 22507 - protein, 7 aa, synthetic construct
RGDGISL

SEQ ID NO: 22508 - protein, 7 aa, synthetic construct
RGDGKTR

SEQ ID NO: 22509 - protein, 7 aa, synthetic construct
RGDGNQV

SEQ ID NO: 22510 - protein, 7 aa, synthetic construct
RGDGNVT

SEQ ID NO: 22511 - protein, 7 aa, synthetic construct
RGDAKAN

SEQ ID NO: 22512 - protein, 7 aa, synthetic construct
RGDGQVQ

SEQ ID NO: 22513 - protein, 7 aa, synthetic construct
RGDGSQI

SEQ ID NO: 22514 - protein, 7 aa, synthetic construct
RGDGSVH

SEQ ID NO: 22515 - protein, 7 aa, synthetic construct
RGDGVNQ

SEQ ID NO: 22516 - protein, 7 aa, synthetic construct
RGDHALS

SEQ ID NO: 22517 - protein, 7 aa, synthetic construct
RGDHEDL

SEQ ID NO: 22518 - protein, 7 aa, synthetic construct
RGDAKQN

SEQ ID NO: 22519 - protein, 7 aa, synthetic construct
RGDHERG

SEQ ID NO: 22520 - protein, 7 aa, synthetic construct
RGDHHDR

SEQ ID NO: 22521 - protein, 7 aa, synthetic construct
RGDHHSE

SEQ ID NO: 22522 - protein, 7 aa, synthetic construct
RGDHIRV

SEQ ID NO: 22523 - protein, 7 aa, synthetic construct
RGDHKFG

SEQ ID NO: 22524 - protein, 7 aa, synthetic construct
RGDHKIT

SEQ ID NO: 22525 - protein, 7 aa, synthetic construct
RGDHKNQ

SEQ ID NO: 22526 - protein, 7 aa, synthetic construct
RGDHLDK

SEQ ID NO: 22527 - protein, 7 aa, synthetic construct
RGDHLQF

SEQ ID NO: 22528 - protein, 7 aa, synthetic construct
RGDHNGH

SEQ ID NO: 22529 - protein, 7 aa, synthetic construct
RGDHNVK

SEQ ID NO: 22530 - protein, 7 aa, synthetic construct
RGDHQAQ

SEQ ID NO: 22531 - protein, 7 aa, synthetic construct
RGDHRIL

SEQ ID NO: 22532 - protein, 7 aa, synthetic construct
RGDAASV

SEQ ID NO: 22533 - protein, 7 aa, synthetic construct
RGDANFH

SEQ ID NO: 22534 - protein, 7 aa, synthetic construct
RGDIFHH

SEQ ID NO: 22535 - protein, 7 aa, synthetic construct
RGDIFNH

SEQ ID NO: 22536 - protein, 7 aa, synthetic construct
RGDIGFG

SEQ ID NO: 22537 - protein, 7 aa, synthetic construct
RGDIIHK

SEQ ID NO: 22538 - protein, 7 aa, synthetic construct
RGDIIIK

SEQ ID NO: 22539 - protein, 7 aa, synthetic construct
RGDILEN

SEQ ID NO: 22540 - protein, 7 aa, synthetic construct
RGDILIG

SEQ ID NO: 22541 - protein, 7 aa, synthetic construct
RGDILVG

SEQ ID NO: 22542 - protein, 7 aa, synthetic construct
RGDANVI

SEQ ID NO: 22543 - protein, 7 aa, synthetic construct
RGDIQHD

SEQ ID NO: 22544 - protein, 7 aa, synthetic construct
RGDIRAA

SEQ ID NO: 22545 - protein, 7 aa, synthetic construct
RGDISAF

SEQ ID NO: 22546 - protein, 7 aa, synthetic construct
RGDKADE

SEQ ID NO: 22547 - protein, 7 aa, synthetic construct
RGDKADT

SEQ ID NO: 22548 - protein, 7 aa, synthetic construct
RGDKAFT

SEQ ID NO: 22549 - protein, 7 aa, synthetic construct
RGDKANH

SEQ ID NO: 22550 - protein, 7 aa, synthetic construct
RGDKEAV

SEQ ID NO: 22551 - protein, 7 aa, synthetic construct
RGDKEIV

SEQ ID NO: 22552 - protein, 7 aa, synthetic construct
RGDKELT

SEQ ID NO: 22553 - protein, 7 aa, synthetic construct
RGDKGRE

SEQ ID NO: 22554 - protein, 7 aa, synthetic construct
RGDKING

SEQ ID NO: 22555 - protein, 7 aa, synthetic construct
RGDKITK

SEQ ID NO: 22556 - protein, 7 aa, synthetic construct
RGDKKAA

SEQ ID NO: 22557 - protein, 7 aa, synthetic construct
RGDKKQD

SEQ ID NO: 22558 - protein, 7 aa, synthetic construct
RGDKLHG

SEQ ID NO: 22559 - protein, 7 aa, synthetic construct
RGDKLQT

SEQ ID NO: 22560 - protein, 7 aa, synthetic construct
RGDKSRD

SEQ ID NO: 22561 - protein, 7 aa, synthetic construct
RGDKVIR

SEQ ID NO: 22562 - protein, 7 aa, synthetic construct
RGDKVRS

SEQ ID NO: 22563 - protein, 7 aa, synthetic construct
RGDLDGF

SEQ ID NO: 22564 - protein, 7 aa, synthetic construct
RGDLDHF

SEQ ID NO: 22565 - protein, 7 aa, synthetic construct
RGDLDQH

SEQ ID NO: 22566 - protein, 7 aa, synthetic construct
RGDLEIV

SEQ ID NO: 22567 - protein, 7 aa, synthetic construct
RGDLFTQ

SEQ ID NO: 22568 - protein, 7 aa, synthetic construct
RGDLHGG

SEQ ID NO: 22569 - protein, 7 aa, synthetic construct
RGDLIFR

SEQ ID NO: 22570 - protein, 7 aa, synthetic construct
RGDASNL

SEQ ID NO: 22571 - protein, 7 aa, synthetic construct
RGDLKDE

SEQ ID NO: 22572 - protein, 7 aa, synthetic construct
RGDLLRR

SEQ ID NO: 22573 - protein, 7 aa, synthetic construct
RGDLQEK

SEQ ID NO: 22574 - protein, 7 aa, synthetic construct
RGDATFF

SEQ ID NO: 22575 - protein, 7 aa, synthetic construct
RGDLTFR

SEQ ID NO: 22576 - protein, 7 aa, synthetic construct
RGDNAAE

SEQ ID NO: 22577 - protein, 7 aa, synthetic construct
RGDNDHQ

SEQ ID NO: 22578 - protein, 7 aa, synthetic construct
RGDNDTI

SEQ ID NO: 22579 - protein, 7 aa, synthetic construct
RGDNDTT

SEQ ID NO: 22580 - protein, 7 aa, synthetic construct
RGDNFTR

SEQ ID NO: 22581 - protein, 7 aa, synthetic construct
RGDNGVD

SEQ ID NO: 22582 - protein, 7 aa, synthetic construct
RGDNHEV

SEQ ID NO: 22583 - protein, 7 aa, synthetic construct
RGDAVDR

SEQ ID NO: 22584 - protein, 7 aa, synthetic construct
RGDNIIL

SEQ ID NO: 22585 - protein, 7 aa, synthetic construct
RGDNKQH

SEQ ID NO: 22586 - protein, 7 aa, synthetic construct
RGDAVGD

SEQ ID NO: 22587 - protein, 7 aa, synthetic construct
RGDNLEI

SEQ ID NO: 22588 - protein, 7 aa, synthetic construct
RGDNLNT

SEQ ID NO: 22589 - protein, 7 aa, synthetic construct
RGDNLSD

SEQ ID NO: 22590 - protein, 7 aa, synthetic construct
RGDAVHQ

SEQ ID NO: 22591 - protein, 7 aa, synthetic construct
RGDNNEK

SEQ ID NO: 22592 - protein, 7 aa, synthetic construct
RGDNNFK

SEQ ID NO: 22593 - protein, 7 aa, synthetic construct
RGDNNGK

SEQ ID NO: 22594 - protein, 7 aa, synthetic construct
RGDNQFH

SEQ ID NO: 22595 - protein, 7 aa, synthetic construct
RGDNRDT

SEQ ID NO: 22596 - protein, 7 aa, synthetic construct
RGDNSFS

SEQ ID NO: 22597 - protein, 7 aa, synthetic construct
RGDNTDL

SEQ ID NO: 22598 - protein, 7 aa, synthetic construct
RGDNVVR

SEQ ID NO: 22599 - protein, 7 aa, synthetic construct
RGDQADG

SEQ ID NO: 22600 - protein, 7 aa, synthetic construct
RGDQAST

SEQ ID NO: 22601 - protein, 7 aa, synthetic construct
RGDQATH

SEQ ID NO: 22602 - protein, 7 aa, synthetic construct
RGDQDRT

SEQ ID NO: 22603 - protein, 7 aa, synthetic construct
RGDQEGE

SEQ ID NO: 22604 - protein, 7 aa, synthetic construct
RGDQEGF

SEQ ID NO: 22605 - protein, 7 aa, synthetic construct
RGDQENL

SEQ ID NO: 22606 - protein, 7 aa, synthetic construct
RGDQEQD

SEQ ID NO: 22607 - protein, 7 aa, synthetic construct
RGDQFDV

SEQ ID NO: 22608 - protein, 7 aa, synthetic construct
RGDQFET

SEQ ID NO: 22609 - protein, 7 aa, synthetic construct
RGDQFQS

SEQ ID NO: 22610 - protein, 7 aa, synthetic construct
RGDQGIE

SEQ ID NO: 22611 - protein, 7 aa, synthetic construct
RGDQHKE

SEQ ID NO: 22612 - protein, 7 aa, synthetic construct
RGDQIFR

SEQ ID NO: 22613 - protein, 7 aa, synthetic construct
RGDDAQH

SEQ ID NO: 22614 - protein, 7 aa, synthetic construct
RGDQKFI

SEQ ID NO: 22615 - protein, 7 aa, synthetic construct
RGDDASR

SEQ ID NO: 22616 - protein, 7 aa, synthetic construct
RGDQLVR

SEQ ID NO: 22617 - protein, 7 aa, synthetic construct
RGDQRGE

SEQ ID NO: 22618 - protein, 7 aa, synthetic construct
RGDQRHF

SEQ ID NO: 22619 - protein, 7 aa, synthetic construct
RGDQSFA

SEQ ID NO: 22620 - protein, 7 aa, synthetic construct
RGDQVLF

SEQ ID NO: 22621 - protein, 7 aa, synthetic construct
RGDDDRH

SEQ ID NO: 22622 - protein, 7 aa, synthetic construct
RGDRESH

SEQ ID NO: 22623 - protein, 7 aa, synthetic construct
RGDRFDK

SEQ ID NO: 22624 - protein, 7 aa, synthetic construct
RGDRFKD

SEQ ID NO: 22625 - protein, 7 aa, synthetic construct
RGDDDVV

SEQ ID NO: 22626 - protein, 7 aa, synthetic construct
RGDRNRH

SEQ ID NO: 22627 - protein, 7 aa, synthetic construct
RGDRRIR

SEQ ID NO: 22628 - protein, 7 aa, synthetic construct
RGDRSKD

SEQ ID NO: 22629 - protein, 7 aa, synthetic construct
RGDRSKR

SEQ ID NO: 22630 - protein, 7 aa, synthetic construct
RGDRTTA

SEQ ID NO: 22631 - protein, 7 aa, synthetic construct
RGDRVNE

SEQ ID NO: 22632 - protein, 7 aa, synthetic construct
RGDRVNN

SEQ ID NO: 22633 - protein, 7 aa, synthetic construct
RGDRVQH

SEQ ID NO: 22634 - protein, 7 aa, synthetic construct
RGDSDIV

SEQ ID NO: 22635 - protein, 7 aa, synthetic construct
RGDSEFT

SEQ ID NO: 22636 - protein, 7 aa, synthetic construct
RGDSFEF

SEQ ID NO: 22637 - protein, 7 aa, synthetic construct
RGDSFIT

SEQ ID NO: 22638 - protein, 7 aa, synthetic construct
RGDSFSK

SEQ ID NO: 22639 - protein, 7 aa, synthetic construct
RGDSHHE

SEQ ID NO: 22640 - protein, 7 aa, synthetic construct
RGDSIKD

SEQ ID NO: 22641 - protein, 7 aa, synthetic construct
RGDSIRK

SEQ ID NO: 22642 - protein, 7 aa, synthetic construct
RGDSLGF

SEQ ID NO: 22643 - protein, 7 aa, synthetic construct
RGDSLQE

SEQ ID NO: 22644 - protein, 7 aa, synthetic construct
RGDSLVH

SEQ ID NO: 22645 - protein, 7 aa, synthetic construct
RGDSNDD

SEQ ID NO: 22646 - protein, 7 aa, synthetic construct
RGDSNFG

SEQ ID NO: 22647 - protein, 7 aa, synthetic construct
RGDSNNS

SEQ ID NO: 22648 - protein, 7 aa, synthetic construct
RGDSTSE

SEQ ID NO: 22649 - protein, 7 aa, synthetic construct
RGDSVTQ

SEQ ID NO: 22650 - protein, 7 aa, synthetic construct
RGDTAST

SEQ ID NO: 22651 - protein, 7 aa, synthetic construct
RGDTDKQ

SEQ ID NO: 22652 - protein, 7 aa, synthetic construct
RGDTDQE

SEQ ID NO: 22653 - protein, 7 aa, synthetic construct
RGDTEGN

SEQ ID NO: 22654 - protein, 7 aa, synthetic construct
RGDTFKT

SEQ ID NO: 22655 - protein, 7 aa, synthetic construct
RGDDHEV

SEQ ID NO: 22656 - protein, 7 aa, synthetic construct
RGDTKDN

SEQ ID NO: 22657 - protein, 7 aa, synthetic construct
RGDTKIT

SEQ ID NO: 22658 - protein, 7 aa, synthetic construct
RGDTLDQ

SEQ ID NO: 22659 - protein, 7 aa, synthetic construct
RGDTLVD

SEQ ID NO: 22660 - protein, 7 aa, synthetic construct
RGDTQIK

SEQ ID NO: 22661 - protein, 7 aa, synthetic construct
RGDTSIT

SEQ ID NO: 22662 - protein, 7 aa, synthetic construct
RGDDHRN

SEQ ID NO: 22663 - protein, 7 aa, synthetic construct
RGDTSRS

SEQ ID NO: 22664 - protein, 7 aa, synthetic construct
RGDTVEA

SEQ ID NO: 22665 - protein, 7 aa, synthetic construct
RGDDHVI

SEQ ID NO: 22666 - protein, 7 aa, synthetic construct
RGDTVQN

SEQ ID NO: 22667 - protein, 7 aa, synthetic construct
RGDTVQS

SEQ ID NO: 22668 - protein, 7 aa, synthetic construct
RGDVASG

SEQ ID NO: 22669 - protein, 7 aa, synthetic construct
RGDVEFN

SEQ ID NO: 22670 - protein, 7 aa, synthetic construct
RGDDIFT

SEQ ID NO: 22671 - protein, 7 aa, synthetic construct
RGDVGSH

SEQ ID NO: 22672 - protein, 7 aa, synthetic construct
RGDVHRF

SEQ ID NO: 22673 - protein, 7 aa, synthetic construct
RGDVIGR

SEQ ID NO: 22674 - protein, 7 aa, synthetic construct
RGDVITV

SEQ ID NO: 22675 - protein, 7 aa, synthetic construct
RGDVIVS

SEQ ID NO: 22676 - protein, 7 aa, synthetic construct
RGDVKQH

SEQ ID NO: 22677 - protein, 7 aa, synthetic construct
RGDVNNV

SEQ ID NO: 22678 - protein, 7 aa, synthetic construct
RGDVQLH

SEQ ID NO: 22679 - protein, 7 aa, synthetic construct
RGDVQVF

SEQ ID NO: 22680 - protein, 7 aa, synthetic construct
RGDVSEA

SEQ ID NO: 22681 - protein, 7 aa, synthetic construct
RGDVSIT

SEQ ID NO: 22682 - protein, 7 aa, synthetic construct
RGDVTKE

SEQ ID NO: 22683 - protein, 7 aa, synthetic construct
RGDVVHD

SEQ ID NO: 22684 - protein, 7 aa, synthetic construct
RGDVVSV

SEQ ID NO: 22685 - protein, 7 aa, synthetic construct
RGDDLKQ

SEQ ID NO: 22686 - protein, 7 aa, synthetic construct
RGDDNSV

SEQ ID NO: 22687 - protein, 7 aa, synthetic construct
RGDDQNT

SEQ ID NO: 22688 - protein, 7 aa, synthetic construct
RGDDQTL

SEQ ID NO: 22689 - protein, 7 aa, synthetic construct
RGDDRAQ

SEQ ID NO: 22690 - protein, 7 aa, synthetic construct
RGDDRHL

SEQ ID NO: 22691 - protein, 7 aa, synthetic construct
RGDDRNF

SEQ ID NO: 22692 - protein, 7 aa, synthetic construct
RGDAERT

SEQ ID NO: 22693 - protein, 7 aa, synthetic construct
RGDDTKH

SEQ ID NO: 22694 - protein, 7 aa, synthetic construct
RGDDTND

SEQ ID NO: 22695 - protein, 7 aa, synthetic construct
RGDDVEK

SEQ ID NO: 22696 - protein, 7 aa, synthetic construct
RGDEAGG

SEQ ID NO: 22697 - protein, 7 aa, synthetic construct
RGDEDLK

SEQ ID NO: 22698 - protein, 7 aa, synthetic construct
RGDEDNL

SEQ ID NO: 22699 - protein, 7 aa, synthetic construct
RGDEDSA

SEQ ID NO: 22700 - protein, 7 aa, synthetic construct
RGDEEFK

SEQ ID NO: 22701 - protein, 7 aa, synthetic construct
RGDEEQF

SEQ ID NO: 22702 - protein, 7 aa, synthetic construct
RGDEERE

SEQ ID NO: 22703 - protein, 7 aa, synthetic construct
RGDEGSD

SEQ ID NO: 22704 - protein, 7 aa, synthetic construct
RGDEHGS

SEQ ID NO: 22705 - protein, 7 aa, synthetic construct
RGDAFNA

SEQ ID NO: 22706 - protein, 7 aa, synthetic construct
RGDAFSF

SEQ ID NO: 22707 - protein, 7 aa, synthetic construct
RGDENEF

SEQ ID NO: 22708 - protein, 7 aa, synthetic construct
RGDAGDS

SEQ ID NO: 22709 - protein, 7 aa, synthetic construct
RGDERST

SEQ ID NO: 22710 - protein, 7 aa, synthetic construct
RGDERVL

SEQ ID NO: 22711 - protein, 7 aa, synthetic construct
RGDESEL

SEQ ID NO: 22712 - protein, 7 aa, synthetic construct
RGDESFE

SEQ ID NO: 22713 - protein, 7 aa, synthetic construct
RGDESQV

SEQ ID NO: 22714 - protein, 7 aa, synthetic construct
RGDAGIQ

SEQ ID NO: 22715 - protein, 7 aa, synthetic construct
RGDFADL

SEQ ID NO: 22716 - protein, 7 aa, synthetic construct
RGDFDGI

SEQ ID NO: 22717 - protein, 7 aa, synthetic construct
RGDFDKV

SEQ ID NO: 22718 - protein, 7 aa, synthetic construct
RGDFDNI

SEQ ID NO: 22719 - protein, 7 aa, synthetic construct
RGDFEES

SEQ ID NO: 22720 - protein, 7 aa, synthetic construct
RGDAAKD

SEQ ID NO: 22721 - protein, 7 aa, synthetic construct
RGDFERI

SEQ ID NO: 22722 - protein, 7 aa, synthetic construct
RGDFFDQ

SEQ ID NO: 22723 - protein, 7 aa, synthetic construct
RGDFGEH

SEQ ID NO: 22724 - protein, 7 aa, synthetic construct
RGDFGIL

SEQ ID NO: 22725 - protein, 7 aa, synthetic construct
RGDFGSF

SEQ ID NO: 22726 - protein, 7 aa, synthetic construct
RGDAHDK

SEQ ID NO: 22727 - protein, 7 aa, synthetic construct
RGDFIAI

SEQ ID NO: 22728 - protein, 7 aa, synthetic construct
RGDFKDN

SEQ ID NO: 22729 - protein, 7 aa, synthetic construct
RGDFKKA

SEQ ID NO: 22730 - protein, 7 aa, synthetic construct
RGDFKNG

SEQ ID NO: 22731 - protein, 7 aa, synthetic construct
RGDFKNH

SEQ ID NO: 22732 - protein, 7 aa, synthetic construct
RGDFKVN

SEQ ID NO: 22733 - protein, 7 aa, synthetic construct
RGDAHHI

SEQ ID NO: 22734 - protein, 7 aa, synthetic construct
RGDFLQI

SEQ ID NO: 22735 - protein, 7 aa, synthetic construct
RGDFLRK

SEQ ID NO: 22736 - protein, 7 aa, synthetic construct
RGDAHIR

SEQ ID NO: 22737 - protein, 7 aa, synthetic construct
RGDFNRF

SEQ ID NO: 22738 - protein, 7 aa, synthetic construct
RGDFSDH

SEQ ID NO: 22739 - protein, 7 aa, synthetic construct
RGDAHRA

SEQ ID NO: 22740 - protein, 7 aa, synthetic construct
RGDFTFL

SEQ ID NO: 22741 - protein, 7 aa, synthetic construct
RGDFVDD

SEQ ID NO: 22742 - protein, 7 aa, synthetic construct
RGDGAGH

SEQ ID NO: 22743 - protein, 7 aa, synthetic construct
RGDGDKH

SEQ ID NO: 22744 - protein, 7 aa, synthetic construct
RGDGDLV

SEQ ID NO: 22745 - protein, 7 aa, synthetic construct
RGDGDTS

SEQ ID NO: 22746 - protein, 7 aa, synthetic construct
RGDGEHV

SEQ ID NO: 22747 - protein, 7 aa, synthetic construct
RGDGERS

SEQ ID NO: 22748 - protein, 7 aa, synthetic construct
RGDGFFG

SEQ ID NO: 22749 - protein, 7 aa, synthetic construct
RGDGFKA

SEQ ID NO: 22750 - protein, 7 aa, synthetic construct
RGDGIKD

SEQ ID NO: 22751 - protein, 7 aa, synthetic construct
RGDGNTN

SEQ ID NO: 22752 - protein, 7 aa, synthetic construct
RGDGRVR

SEQ ID NO: 22753 - protein, 7 aa, synthetic construct
RGDGTST

SEQ ID NO: 22754 - protein, 7 aa, synthetic construct
RGDGVFD

SEQ ID NO: 22755 - protein, 7 aa, synthetic construct
RGDGVHH

SEQ ID NO: 22756 - protein, 7 aa, synthetic construct
RGDHAGH

SEQ ID NO: 22757 - protein, 7 aa, synthetic construct
RGDHDEI

SEQ ID NO: 22758 - protein, 7 aa, synthetic construct
RGDHENS

SEQ ID NO: 22759 - protein, 7 aa, synthetic construct
RGDHLDQ

SEQ ID NO: 22760 - protein, 7 aa, synthetic construct
RGDHNIA

SEQ ID NO: 22761 - protein, 7 aa, synthetic construct
RGDHNNF

SEQ ID NO: 22762 - protein, 7 aa, synthetic construct
RGDHNRQ

SEQ ID NO: 22763 - protein, 7 aa, synthetic construct
RGDHQFH

SEQ ID NO: 22764 - protein, 7 aa, synthetic construct
RGDHRTQ

SEQ ID NO: 22765 - protein, 7 aa, synthetic construct
RGDHTDV

SEQ ID NO: 22766 - protein, 7 aa, synthetic construct
RGDHVAR

SEQ ID NO: 22767 - protein, 7 aa, synthetic construct
RGDIDRI

SEQ ID NO: 22768 - protein, 7 aa, synthetic construct
RGDIEGT

SEQ ID NO: 22769 - protein, 7 aa, synthetic construct
RGDIEHQ

SEQ ID NO: 22770 - protein, 7 aa, synthetic construct
RGDIGHI

SEQ ID NO: 22771 - protein, 7 aa, synthetic construct
RGDIHDD

SEQ ID NO: 22772 - protein, 7 aa, synthetic construct
RGDIIEL

SEQ ID NO: 22773 - protein, 7 aa, synthetic construct
RGDIIQT

SEQ ID NO: 22774 - protein, 7 aa, synthetic construct
RGDIKRG

SEQ ID NO: 22775 - protein, 7 aa, synthetic construct
RGDILRD

SEQ ID NO: 22776 - protein, 7 aa, synthetic construct
RGDINAR

SEQ ID NO: 22777 - protein, 7 aa, synthetic construct
RGDINFE

SEQ ID NO: 22778 - protein, 7 aa, synthetic construct
RGDINNQ

SEQ ID NO: 22779 - protein, 7 aa, synthetic construct
RGDINNT

SEQ ID NO: 22780 - protein, 7 aa, synthetic construct
RGDIRFL

SEQ ID NO: 22781 - protein, 7 aa, synthetic construct
RGDISRE

SEQ ID NO: 22782 - protein, 7 aa, synthetic construct
RGDISTN

SEQ ID NO: 22783 - protein, 7 aa, synthetic construct
RGDIVKF

SEQ ID NO: 22784 - protein, 7 aa, synthetic construct
RGDKADV

SEQ ID NO: 22785 - protein, 7 aa, synthetic construct
RGDKAKQ

SEQ ID NO: 22786 - protein, 7 aa, synthetic construct
RGDKASA

SEQ ID NO: 22787 - protein, 7 aa, synthetic construct
RGDKELQ

SEQ ID NO: 22788 - protein, 7 aa, synthetic construct
RGDKHIT

SEQ ID NO: 22789 - protein, 7 aa, synthetic construct
RGDKHVH

SEQ ID NO: 22790 - protein, 7 aa, synthetic construct
RGDKIVT

SEQ ID NO: 22791 - protein, 7 aa, synthetic construct
RGDAREV

SEQ ID NO: 22792 - protein, 7 aa, synthetic construct
RGDKKQF

SEQ ID NO: 22793 - protein, 7 aa, synthetic construct
RGDKLQE

SEQ ID NO: 22794 - protein, 7 aa, synthetic construct
RGDKLTS

SEQ ID NO: 22795 - protein, 7 aa, synthetic construct
RGDKNAV

SEQ ID NO: 22796 - protein, 7 aa, synthetic construct
RGDKNEN

SEQ ID NO: 22797 - protein, 7 aa, synthetic construct
RGDKNSN

SEQ ID NO: 22798 - protein, 7 aa, synthetic construct
RGDKQAQ

SEQ ID NO: 22799 - protein, 7 aa, synthetic construct
RGDKQRQ

SEQ ID NO: 22800 - protein, 7 aa, synthetic construct
RGDKQTL

SEQ ID NO: 22801 - protein, 7 aa, synthetic construct
RGDKQTS

SEQ ID NO: 22802 - protein, 7 aa, synthetic construct
RGDKQVQ

SEQ ID NO: 22803 - protein, 7 aa, synthetic construct
RGDKTHR

SEQ ID NO: 22804 - protein, 7 aa, synthetic construct
RGDKTLH

SEQ ID NO: 22805 - protein, 7 aa, synthetic construct
RGDASAH

SEQ ID NO: 22806 - protein, 7 aa, synthetic construct
RGDLAGT

SEQ ID NO: 22807 - protein, 7 aa, synthetic construct
RGDLARA

SEQ ID NO: 22808 - protein, 7 aa, synthetic construct
RGDASFE

SEQ ID NO: 22809 - protein, 7 aa, synthetic construct
RGDLEHK

SEQ ID NO: 22810 - protein, 7 aa, synthetic construct
RGDLEVL

SEQ ID NO: 22811 - protein, 7 aa, synthetic construct
RGDLEVQ

SEQ ID NO: 22812 - protein, 7 aa, synthetic construct
RGDLFDQ

SEQ ID NO: 22813 - protein, 7 aa, synthetic construct
RGDLFFF

SEQ ID NO: 22814 - protein, 7 aa, synthetic construct
RGDLFHK

SEQ ID NO: 22815 - protein, 7 aa, synthetic construct
RGDLFKV

SEQ ID NO: 22816 - protein, 7 aa, synthetic construct
RGDLFTR

SEQ ID NO: 22817 - protein, 7 aa, synthetic construct
RGDLGGD

SEQ ID NO: 22818 - protein, 7 aa, synthetic construct
RGDLGTK

SEQ ID NO: 22819 - protein, 7 aa, synthetic construct
RGDADFR

SEQ ID NO: 22820 - protein, 7 aa, synthetic construct
RGDLHVL

SEQ ID NO: 22821 - protein, 7 aa, synthetic construct
RGDLIIA

SEQ ID NO: 22822 - protein, 7 aa, synthetic construct
RGDLIRD

SEQ ID NO: 22823 - protein, 7 aa, synthetic construct
RGDLKEK

SEQ ID NO: 22824 - protein, 7 aa, synthetic construct
RGDASRD

SEQ ID NO: 22825 - protein, 7 aa, synthetic construct
RGDLKKL

SEQ ID NO: 22826 - protein, 7 aa, synthetic construct
RGDLLED

SEQ ID NO: 22827 - protein, 7 aa, synthetic construct
RGDLNGK

SEQ ID NO: 22828 - protein, 7 aa, synthetic construct
RGDLNHD

SEQ ID NO: 22829 - protein, 7 aa, synthetic construct
RGDLNTI

SEQ ID NO: 22830 - protein, 7 aa, synthetic construct
RGDLQIS

SEQ ID NO: 22831 - protein, 7 aa, synthetic construct
RGDLQNA

SEQ ID NO: 22832 - protein, 7 aa, synthetic construct
RGDLVTK

SEQ ID NO: 22833 - protein, 7 aa, synthetic construct
RGDNADR

SEQ ID NO: 22834 - protein, 7 aa, synthetic construct
RGDNETE

SEQ ID NO: 22835 - protein, 7 aa, synthetic construct
RGDNGGN

SEQ ID NO: 22836 - protein, 7 aa, synthetic construct
RGDNIGF

SEQ ID NO: 22837 - protein, 7 aa, synthetic construct
RGDNIKD

SEQ ID NO: 22838 - protein, 7 aa, synthetic construct
RGDNIRL

SEQ ID NO: 22839 - protein, 7 aa, synthetic construct
RGDNKGD

SEQ ID NO: 22840 - protein, 7 aa, synthetic construct
RGDNKSH

SEQ ID NO: 22841 - protein, 7 aa, synthetic construct
RGDNLNS

SEQ ID NO: 22842 - protein, 7 aa, synthetic construct
RGDNNKT

SEQ ID NO: 22843 - protein, 7 aa, synthetic construct
RGDNNKV

SEQ ID NO: 22844 - protein, 7 aa, synthetic construct
RGDNNRI

SEQ ID NO: 22845 - protein, 7 aa, synthetic construct
RGDNNTH

SEQ ID NO: 22846 - protein, 7 aa, synthetic construct
RGDNQAL

SEQ ID NO: 22847 - protein, 7 aa, synthetic construct
RGDNRRF

SEQ ID NO: 22848 - protein, 7 aa, synthetic construct
RGDNRRG

SEQ ID NO: 22849 - protein, 7 aa, synthetic construct
RGDNRTD

SEQ ID NO: 22850 - protein, 7 aa, synthetic construct
RGDAVQK

SEQ ID NO: 22851 - protein, 7 aa, synthetic construct
RGDNSDF

SEQ ID NO: 22852 - protein, 7 aa, synthetic construct
RGDNSHA

SEQ ID NO: 22853 - protein, 7 aa, synthetic construct
RGDNTDG

SEQ ID NO: 22854 - protein, 7 aa, synthetic construct
RGDNTFH

SEQ ID NO: 22855 - protein, 7 aa, synthetic construct
RGDNTHA

SEQ ID NO: 22856 - protein, 7 aa, synthetic construct
RGDNTQD

SEQ ID NO: 22857 - protein, 7 aa, synthetic construct
RGDNTTK

SEQ ID NO: 22858 - protein, 7 aa, synthetic construct
RGDNVNT

SEQ ID NO: 22859 - protein, 7 aa, synthetic construct
RGDNVVL

SEQ ID NO: 22860 - protein, 7 aa, synthetic construct
RGDQAAG

SEQ ID NO: 22861 - protein, 7 aa, synthetic construct
RGDQALK

SEQ ID NO: 22862 - protein, 7 aa, synthetic construct
RGDQDKQ

SEQ ID NO: 22863 - protein, 7 aa, synthetic construct
RGDDAEH

SEQ ID NO: 22864 - protein, 7 aa, synthetic construct
RGDQGAK

SEQ ID NO: 22865 - protein, 7 aa, synthetic construct
RGDQGTF

SEQ ID NO: 22866 - protein, 7 aa, synthetic construct
RGDQGTT

SEQ ID NO: 22867 - protein, 7 aa, synthetic construct
RGDQHEI

SEQ ID NO: 22868 - protein, 7 aa, synthetic construct
RGDQIRT

SEQ ID NO: 22869 - protein, 7 aa, synthetic construct
RGDQKSE

SEQ ID NO: 22870 - protein, 7 aa, synthetic construct
RGDQKVA

SEQ ID NO: 22871 - protein, 7 aa, synthetic construct
RGDQLQF

SEQ ID NO: 22872 - protein, 7 aa, synthetic construct
RGDQLVS

SEQ ID NO: 22873 - protein, 7 aa, synthetic construct
RGDQNRD

SEQ ID NO: 22874 - protein, 7 aa, synthetic construct
RGDQQTK

SEQ ID NO: 22875 - protein, 7 aa, synthetic construct
RGDQRVE

SEQ ID NO: 22876 - protein, 7 aa, synthetic construct
RGDQSDV

SEQ ID NO: 22877 - protein, 7 aa, synthetic construct
RGDQSET

SEQ ID NO: 22878 - protein, 7 aa, synthetic construct
RGDQTSR

SEQ ID NO: 22879 - protein, 7 aa, synthetic construct
RGDQVAE

SEQ ID NO: 22880 - protein, 7 aa, synthetic construct
RGDQVDN

SEQ ID NO: 22881 - protein, 7 aa, synthetic construct
RGDQVGT

SEQ ID NO: 22882 - protein, 7 aa, synthetic construct
RGDQVTG

SEQ ID NO: 22883 - protein, 7 aa, synthetic construct
RGDRAEN

SEQ ID NO: 22884 - protein, 7 aa, synthetic construct
RGDRDEQ

SEQ ID NO: 22885 - protein, 7 aa, synthetic construct
RGDDDQN

SEQ ID NO: 22886 - protein, 7 aa, synthetic construct
RGDRFEE

SEQ ID NO: 22887 - protein, 7 aa, synthetic construct
RGDRIAG

SEQ ID NO: 22888 - protein, 7 aa, synthetic construct
RGDRITH

SEQ ID NO: 22889 - protein, 7 aa, synthetic construct
RGDDEFK

SEQ ID NO: 22890 - protein, 7 aa, synthetic construct
RGDRLEQ

SEQ ID NO: 22891 - protein, 7 aa, synthetic construct
RGDRLKD

SEQ ID NO: 22892 - protein, 7 aa, synthetic construct
RGDDEHR

SEQ ID NO: 22893 - protein, 7 aa, synthetic construct
RGDDEII

SEQ ID NO: 22894 - protein, 7 aa, synthetic construct
RGDRQRG

SEQ ID NO: 22895 - protein, 7 aa, synthetic construct
RGDRSLH

SEQ ID NO: 22896 - protein, 7 aa, synthetic construct
RGDRSVD

SEQ ID NO: 22897 - protein, 7 aa, synthetic construct
RGDRTVE

SEQ ID NO: 22898 - protein, 7 aa, synthetic construct
RGDRVNA

SEQ ID NO: 22899 - protein, 7 aa, synthetic construct
RGDRVSD

SEQ ID NO: 22900 - protein, 7 aa, synthetic construct
RGDSAHG

SEQ ID NO: 22901 - protein, 7 aa, synthetic construct
RGDDFFH

SEQ ID NO: 22902 - protein, 7 aa, synthetic construct
RGDSFFG

SEQ ID NO: 22903 - protein, 7 aa, synthetic construct
RGDSFSI

SEQ ID NO: 22904 - protein, 7 aa, synthetic construct
RGDSGEF

SEQ ID NO: 22905 - protein, 7 aa, synthetic construct
RGDSGID

SEQ ID NO: 22906 - protein, 7 aa, synthetic construct
RGDSGLF

SEQ ID NO: 22907 - protein, 7 aa, synthetic construct
RGDSGTR

SEQ ID NO: 22908 - protein, 7 aa, synthetic construct
RGDSKRG

SEQ ID NO: 22909 - protein, 7 aa, synthetic construct
RGDDFSF

SEQ ID NO: 22910 - protein, 7 aa, synthetic construct
RGDSLNA

SEQ ID NO: 22911 - protein, 7 aa, synthetic construct
RGDSQDT

SEQ ID NO: 22912 - protein, 7 aa, synthetic construct
RGDSSAT

SEQ ID NO: 22913 - protein, 7 aa, synthetic construct
RGDSSFH

SEQ ID NO: 22914 - protein, 7 aa, synthetic construct
RGDDGFI

SEQ ID NO: 22915 - protein, 7 aa, synthetic construct
RGDSSLT

SEQ ID NO: 22916 - protein, 7 aa, synthetic construct
RGDSSVF

SEQ ID NO: 22917 - protein, 7 aa, synthetic construct
RGDDGLI

SEQ ID NO: 22918 - protein, 7 aa, synthetic construct
RGDTDHK

SEQ ID NO: 22919 - protein, 7 aa, synthetic construct
RGDTDNR

SEQ ID NO: 22920 - protein, 7 aa, synthetic construct
RGDTEKS

SEQ ID NO: 22921 - protein, 7 aa, synthetic construct
RGDTFIR

SEQ ID NO: 22922 - protein, 7 aa, synthetic construct
RGDTFTI

SEQ ID NO: 22923 - protein, 7 aa, synthetic construct
RGDTGGR

SEQ ID NO: 22924 - protein, 7 aa, synthetic construct
RGDTHLD

SEQ ID NO: 22925 - protein, 7 aa, synthetic construct
RGDTIIG

SEQ ID NO: 22926 - protein, 7 aa, synthetic construct
RGDTILI

SEQ ID NO: 22927 - protein, 7 aa, synthetic construct
RGDTQAS

SEQ ID NO: 22928 - protein, 7 aa, synthetic construct
RGDTQGV

SEQ ID NO: 22929 - protein, 7 aa, synthetic construct
RGDTRGS

SEQ ID NO: 22930 - protein, 7 aa, synthetic construct
RGDTSGN

SEQ ID NO: 22931 - protein, 7 aa, synthetic construct
RGDTSLS

SEQ ID NO: 22932 - protein, 7 aa, synthetic construct
RGDTSLT

SEQ ID NO: 22933 - protein, 7 aa, synthetic construct
RGDTTIG

SEQ ID NO: 22934 - protein, 7 aa, synthetic construct
RGDVATT

SEQ ID NO: 22935 - protein, 7 aa, synthetic construct
RGDVATV

SEQ ID NO: 22936 - protein, 7 aa, synthetic construct
RGDVDFR

SEQ ID NO: 22937 - protein, 7 aa, synthetic construct
RGDVDSV

SEQ ID NO: 22938 - protein, 7 aa, synthetic construct
RGDVEVF

SEQ ID NO: 22939 - protein, 7 aa, synthetic construct
RGDVFKN

SEQ ID NO: 22940 - protein, 7 aa, synthetic construct
RGDVFTN

SEQ ID NO: 22941 - protein, 7 aa, synthetic construct
RGDVGAQ

SEQ ID NO: 22942 - protein, 7 aa, synthetic construct
RGDVKDI

SEQ ID NO: 22943 - protein, 7 aa, synthetic construct
RGDVNHH

SEQ ID NO: 22944 - protein, 7 aa, synthetic construct
RGDVNLG

SEQ ID NO: 22945 - protein, 7 aa, synthetic construct
RGDVNSE

SEQ ID NO: 22946 - protein, 7 aa, synthetic construct
RGDVQES

SEQ ID NO: 22947 - protein, 7 aa, synthetic construct
RGDVQII

SEQ ID NO: 22948 - protein, 7 aa, synthetic construct
RGDVQIR

SEQ ID NO: 22949 - protein, 7 aa, synthetic construct
RGDVRDE

SEQ ID NO: 22950 - protein, 7 aa, synthetic construct
RGDVREQ

SEQ ID NO: 22951 - protein, 7 aa, synthetic construct
RGDVRES

SEQ ID NO: 22952 - protein, 7 aa, synthetic construct
RGDVSAI

SEQ ID NO: 22953 - protein, 7 aa, synthetic construct
RGDVSSD

SEQ ID NO: 22954 - protein, 7 aa, synthetic construct
RGDVTFS

SEQ ID NO: 22955 - protein, 7 aa, synthetic construct
RGDVTIN

SEQ ID NO: 22956 - protein, 7 aa, synthetic construct
RGDVTSS

SEQ ID NO: 22957 - protein, 7 aa, synthetic construct
RGDDKHS

SEQ ID NO: 22958 - protein, 7 aa, synthetic construct
RGDAEFL

SEQ ID NO: 22959 - protein, 7 aa, synthetic construct
RGDVVEI

SEQ ID NO: 22960 - protein, 7 aa, synthetic construct
RGDVVGV

SEQ ID NO: 22961 - protein, 7 aa, synthetic construct
RGDDKNH

SEQ ID NO: 22962 - protein, 7 aa, synthetic construct
RGDDQHF

SEQ ID NO: 22963 - protein, 7 aa, synthetic construct
RGDDQKE

SEQ ID NO: 22964 - protein, 7 aa, synthetic construct
RGDDQSH

SEQ ID NO: 22965 - protein, 7 aa, synthetic construct
RGDDRGV

SEQ ID NO: 22966 - protein, 7 aa, synthetic construct
RGDDSFL

SEQ ID NO: 22967 - protein, 7 aa, synthetic construct
RGDDSGK

SEQ ID NO: 22968 - protein, 7 aa, synthetic construct
RGDAERI

SEQ ID NO: 22969 - protein, 7 aa, synthetic construct
RGDDTTE

SEQ ID NO: 22970 - protein, 7 aa, synthetic construct
RGDEEEI

SEQ ID NO: 22971 - protein, 7 aa, synthetic construct
RGDEFGR

SEQ ID NO: 22972 - protein, 7 aa, synthetic construct
RGDEGRE

SEQ ID NO: 22973 - protein, 7 aa, synthetic construct
RGDEHFA

SEQ ID NO: 22974 - protein, 7 aa, synthetic construct
RGDEHFN

SEQ ID NO: 22975 - protein, 7 aa, synthetic construct
RGDEHKA

SEQ ID NO: 22976 - protein, 7 aa, synthetic construct
RGDEIGK

SEQ ID NO: 22977 - protein, 7 aa, synthetic construct
RGDEISH

SEQ ID NO: 22978 - protein, 7 aa, synthetic construct
RGDEKHS

SEQ ID NO: 22979 - protein, 7 aa, synthetic construct
RGDELHG

SEQ ID NO: 22980 - protein, 7 aa, synthetic construct
RGDELSK

SEQ ID NO: 22981 - protein, 7 aa, synthetic construct
RGDELTT

SEQ ID NO: 22982 - protein, 7 aa, synthetic construct
RGDENGN

SEQ ID NO: 22983 - protein, 7 aa, synthetic construct
RGDENSQ

SEQ ID NO: 22984 - protein, 7 aa, synthetic construct
RGDEQHT

SEQ ID NO: 22985 - protein, 7 aa, synthetic construct
RGDEQSE

SEQ ID NO: 22986 - protein, 7 aa, synthetic construct
RGDESAL

SEQ ID NO: 22987 - protein, 7 aa, synthetic construct
RGDESIK

SEQ ID NO: 22988 - protein, 7 aa, synthetic construct
RGDESKS

SEQ ID NO: 22989 - protein, 7 aa, synthetic construct
RGDAAIH

SEQ ID NO: 22990 - protein, 7 aa, synthetic construct
RGDESSK

SEQ ID NO: 22991 - protein, 7 aa, synthetic construct
RGDETKK

SEQ ID NO: 22992 - protein, 7 aa, synthetic construct
RGDETNI

SEQ ID NO: 22993 - protein, 7 aa, synthetic construct
RGDETNK

SEQ ID NO: 22994 - protein, 7 aa, synthetic construct
RGDAGHN

SEQ ID NO: 22995 - protein, 7 aa, synthetic construct
RGDEVFL

SEQ ID NO: 22996 - protein, 7 aa, synthetic construct
RGDEVVS

SEQ ID NO: 22997 - protein, 7 aa, synthetic construct
RGDFADK

SEQ ID NO: 22998 - protein, 7 aa, synthetic construct
RGDFDEK

SEQ ID NO: 22999 - protein, 7 aa, synthetic construct
RGDFDHH

SEQ ID NO: 23000 - protein, 7 aa, synthetic construct
RGDFDID

SEQ ID NO: 23001 - protein, 7 aa, synthetic construct
RGDFDTH

SEQ ID NO: 23002 - protein, 7 aa, synthetic construct
RGDFERT

SEQ ID NO: 23003 - protein, 7 aa, synthetic construct
RGDFFNA

SEQ ID NO: 23004 - protein, 7 aa, synthetic construct
RGDFFVS

SEQ ID NO: 23005 - protein, 7 aa, synthetic construct
RGDFGNF

SEQ ID NO: 23006 - protein, 7 aa, synthetic construct
RGDFGSS

SEQ ID NO: 23007 - protein, 7 aa, synthetic construct
RGDFHDS

SEQ ID NO: 23008 - protein, 7 aa, synthetic construct
RGDFHHG

SEQ ID NO: 23009 - protein, 7 aa, synthetic construct
RGDFILN

SEQ ID NO: 23010 - protein, 7 aa, synthetic construct
RGDFNSG

SEQ ID NO: 23011 - protein, 7 aa, synthetic construct
RGDFQDS

SEQ ID NO: 23012 - protein, 7 aa, synthetic construct
RGDFQSI

SEQ ID NO: 23013 - protein, 7 aa, synthetic construct
RGDFTDT

SEQ ID NO: 23014 - protein, 7 aa, synthetic construct
RGDFTIR

SEQ ID NO: 23015 - protein, 7 aa, synthetic construct
RGDAHTH

SEQ ID NO: 23016 - protein, 7 aa, synthetic construct
RGDAHTQ

SEQ ID NO: 23017 - protein, 7 aa, synthetic construct
RGDFVFA

SEQ ID NO: 23018 - protein, 7 aa, synthetic construct
RGDFVTF

SEQ ID NO: 23019 - protein, 7 aa, synthetic construct
RGDAIAF

SEQ ID NO: 23020 - protein, 7 aa, synthetic construct
RGDAANF

SEQ ID NO: 23021 - protein, 7 aa, synthetic construct
RGDGDSI

SEQ ID NO: 23022 - protein, 7 aa, synthetic construct
RGDGFNE

SEQ ID NO: 23023 - protein, 7 aa, synthetic construct
RGDGFVA

SEQ ID NO: 23024 - protein, 7 aa, synthetic construct
RGDGGEL

SEQ ID NO: 23025 - protein, 7 aa, synthetic construct
RGDGHDT

SEQ ID NO: 23026 - protein, 7 aa, synthetic construct
RGDGIEL

SEQ ID NO: 23027 - protein, 7 aa, synthetic construct
RGDGIQV

SEQ ID NO: 23028 - protein, 7 aa, synthetic construct
RGDGKEG

SEQ ID NO: 23029 - protein, 7 aa, synthetic construct
RGDAIRN

SEQ ID NO: 23030 - protein, 7 aa, synthetic construct
RGDGLFN

SEQ ID NO: 23031 - protein, 7 aa, synthetic construct
RGDGQAI

SEQ ID NO: 23032 - protein, 7 aa, synthetic construct
RGDGQQI

SEQ ID NO: 23033 - protein, 7 aa, synthetic construct
RGDGRVT

SEQ ID NO: 23034 - protein, 7 aa, synthetic construct
RGDAKFS

SEQ ID NO: 23035 - protein, 7 aa, synthetic construct
RGDGSLQ

SEQ ID NO: 23036 - protein, 7 aa, synthetic construct
RGDGVFI

SEQ ID NO: 23037 - protein, 7 aa, synthetic construct
RGDGVFQ

SEQ ID NO: 23038 - protein, 7 aa, synthetic construct
RGDGVIF

SEQ ID NO: 23039 - protein, 7 aa, synthetic construct
RGDHAQQ

SEQ ID NO: 23040 - protein, 7 aa, synthetic construct
RGDHAQS

SEQ ID NO: 23041 - protein, 7 aa, synthetic construct
RGDHDFA

SEQ ID NO: 23042 - protein, 7 aa, synthetic construct
RGDHGIQ

SEQ ID NO: 23043 - protein, 7 aa, synthetic construct
RGDHGRT

SEQ ID NO: 23044 - protein, 7 aa, synthetic construct
RGDHHLR

SEQ ID NO: 23045 - protein, 7 aa, synthetic construct
RGDHIKH

SEQ ID NO: 23046 - protein, 7 aa, synthetic construct
RGDHKET

SEQ ID NO: 23047 - protein, 7 aa, synthetic construct
RGDHNHV

SEQ ID NO: 23048 - protein, 7 aa, synthetic construct
RGDHQVR

SEQ ID NO: 23049 - protein, 7 aa, synthetic construct
RGDHRFD

SEQ ID NO: 23050 - protein, 7 aa, synthetic construct
RGDHSQE

SEQ ID NO: 23051 - protein, 7 aa, synthetic construct
RGDHTEN

SEQ ID NO: 23052 - protein, 7 aa, synthetic construct
RGDHTFV

SEQ ID NO: 23053 - protein, 7 aa, synthetic construct
RGDHVGS

SEQ ID NO: 23054 - protein, 7 aa, synthetic construct
RGDAATH

SEQ ID NO: 23055 - protein, 7 aa, synthetic construct
RGDHVVK

SEQ ID NO: 23056 - protein, 7 aa, synthetic construct
RGDIAAQ

SEQ ID NO: 23057 - protein, 7 aa, synthetic construct
RGDIALN

SEQ ID NO: 23058 - protein, 7 aa, synthetic construct
RGDIAQF

SEQ ID NO: 23059 - protein, 7 aa, synthetic construct
RGDIDFL

SEQ ID NO: 23060 - protein, 7 aa, synthetic construct
RGDIDKH

SEQ ID NO: 23061 - protein, 7 aa, synthetic construct
RGDIDLT

SEQ ID NO: 23062 - protein, 7 aa, synthetic construct
RGDIDVL

SEQ ID NO: 23063 - protein, 7 aa, synthetic construct
RGDIENL

SEQ ID NO: 23064 - protein, 7 aa, synthetic construct
RGDANFV

SEQ ID NO: 23065 - protein, 7 aa, synthetic construct
RGDIERS

SEQ ID NO: 23066 - protein, 7 aa, synthetic construct
RGDANHR

SEQ ID NO: 23067 - protein, 7 aa, synthetic construct
RGDIGHL

SEQ ID NO: 23068 - protein, 7 aa, synthetic construct
RGDIGNH

SEQ ID NO: 23069 - protein, 7 aa, synthetic construct
RGDIGQI

SEQ ID NO: 23070 - protein, 7 aa, synthetic construct
RGDIGTH

SEQ ID NO: 23071 - protein, 7 aa, synthetic construct
RGDIIFL

SEQ ID NO: 23072 - protein, 7 aa, synthetic construct
RGDANNT

SEQ ID NO: 23073 - protein, 7 aa, synthetic construct
RGDIKDF

SEQ ID NO: 23074 - protein, 7 aa, synthetic construct
RGDIKER

SEQ ID NO: 23075 - protein, 7 aa, synthetic construct
RGDIKTF

SEQ ID NO: 23076 - protein, 7 aa, synthetic construct
RGDILIN

SEQ ID NO: 23077 - protein, 7 aa, synthetic construct
RGDANTK

SEQ ID NO: 23078 - protein, 7 aa, synthetic construct
RGDINFR

SEQ ID NO: 23079 - protein, 7 aa, synthetic construct
RGDINHR

SEQ ID NO: 23080 - protein, 7 aa, synthetic construct
RGDINIQ

SEQ ID NO: 23081 - protein, 7 aa, synthetic construct
RGDINIV

SEQ ID NO: 23082 - protein, 7 aa, synthetic construct
RGDIQHH

SEQ ID NO: 23083 - protein, 7 aa, synthetic construct
RGDIQQQ

SEQ ID NO: 23084 - protein, 7 aa, synthetic construct
RGDIQSS

SEQ ID NO: 23085 - protein, 7 aa, synthetic construct
RGDISEV

SEQ ID NO: 23086 - protein, 7 aa, synthetic construct
RGDISHF

SEQ ID NO: 23087 - protein, 7 aa, synthetic construct
RGDISQG

SEQ ID NO: 23088 - protein, 7 aa, synthetic construct
RGDITIK

SEQ ID NO: 23089 - protein, 7 aa, synthetic construct
RGDITQE

SEQ ID NO: 23090 - protein, 7 aa, synthetic construct
RGDITQI

SEQ ID NO: 23091 - protein, 7 aa, synthetic construct
RGDITTH

SEQ ID NO: 23092 - protein, 7 aa, synthetic construct
RGDIVFI

SEQ ID NO: 23093 - protein, 7 aa, synthetic construct
RGDIVHS

SEQ ID NO: 23094 - protein, 7 aa, synthetic construct
RGDKDFV

SEQ ID NO: 23095 - protein, 7 aa, synthetic construct
RGDKEHD

SEQ ID NO: 23096 - protein, 7 aa, synthetic construct
RGDKENS

SEQ ID NO: 23097 - protein, 7 aa, synthetic construct
RGDKEVE

SEQ ID NO: 23098 - protein, 7 aa, synthetic construct
RGDKFDF

SEQ ID NO: 23099 - protein, 7 aa, synthetic construct
RGDKFNQ

SEQ ID NO: 23100 - protein, 7 aa, synthetic construct
RGDKFQE

SEQ ID NO: 23101 - protein, 7 aa, synthetic construct
RGDKGVA

SEQ ID NO: 23102 - protein, 7 aa, synthetic construct
RGDKHAA

SEQ ID NO: 23103 - protein, 7 aa, synthetic construct
RGDKHAV

SEQ ID NO: 23104 - protein, 7 aa, synthetic construct
RGDKHND

SEQ ID NO: 23105 - protein, 7 aa, synthetic construct
RGDKLLR

SEQ ID NO: 23106 - protein, 7 aa, synthetic construct
RGDKNLH

SEQ ID NO: 23107 - protein, 7 aa, synthetic construct
RGDKTDN

SEQ ID NO: 23108 - protein, 7 aa, synthetic construct
RGDKTFE

SEQ ID NO: 23109 - protein, 7 aa, synthetic construct
RGDKTGH

SEQ ID NO: 23110 - protein, 7 aa, synthetic construct
RGDLATF

SEQ ID NO: 23111 - protein, 7 aa, synthetic construct
RGDLDAN

SEQ ID NO: 23112 - protein, 7 aa, synthetic construct
RGDLDKN

SEQ ID NO: 23113 - protein, 7 aa, synthetic construct
RGDASIT

SEQ ID NO: 23114 - protein, 7 aa, synthetic construct
RGDLINQ

SEQ ID NO: 23115 - protein, 7 aa, synthetic construct
RGDASRE

SEQ ID NO: 23116 - protein, 7 aa, synthetic construct
RGDLNLV

SEQ ID NO: 23117 - protein, 7 aa, synthetic construct
RGDLQAS

SEQ ID NO: 23118 - protein, 7 aa, synthetic construct
RGDLQFA

SEQ ID NO: 23119 - protein, 7 aa, synthetic construct
RGDLRLD

SEQ ID NO: 23120 - protein, 7 aa, synthetic construct
RGDLSKF

SEQ ID NO: 23121 - protein, 7 aa, synthetic construct
RGDLSQH

SEQ ID NO: 23122 - protein, 7 aa, synthetic construct
RGDLSTI

SEQ ID NO: 23123 - protein, 7 aa, synthetic construct
RGDATHN

SEQ ID NO: 23124 - protein, 7 aa, synthetic construct
RGDLTTA

SEQ ID NO: 23125 - protein, 7 aa, synthetic construct
RGDLVND

SEQ ID NO: 23126 - protein, 7 aa, synthetic construct
RGDLVTL

SEQ ID NO: 23127 - protein, 7 aa, synthetic construct
RGDLVVF

SEQ ID NO: 23128 - protein, 7 aa, synthetic construct
RGDADHF

SEQ ID NO: 23129 - protein, 7 aa, synthetic construct
RGDNAFN

SEQ ID NO: 23130 - protein, 7 aa, synthetic construct
RGDNDFT

SEQ ID NO: 23131 - protein, 7 aa, synthetic construct
RGDNEAR

SEQ ID NO: 23132 - protein, 7 aa, synthetic construct
RGDNERK

SEQ ID NO: 23133 - protein, 7 aa, synthetic construct
RGDNFDF

SEQ ID NO: 23134 - protein, 7 aa, synthetic construct
RGDNFFV

SEQ ID NO: 23135 - protein, 7 aa, synthetic construct
RGDNFLF

SEQ ID NO: 23136 - protein, 7 aa, synthetic construct
RGDNHNS

SEQ ID NO: 23137 - protein, 7 aa, synthetic construct
RGDNIRV

SEQ ID NO: 23138 - protein, 7 aa, synthetic construct
RGDNKAT

SEQ ID NO: 23139 - protein, 7 aa, synthetic construct
RGDNKFS

SEQ ID NO: 23140 - protein, 7 aa, synthetic construct
RGDNKNE

SEQ ID NO: 23141 - protein, 7 aa, synthetic construct
RGDNKNG

SEQ ID NO: 23142 - protein, 7 aa, synthetic construct
RGDNLDS

SEQ ID NO: 23143 - protein, 7 aa, synthetic construct
RGDNLTK

SEQ ID NO: 23144 - protein, 7 aa, synthetic construct
RGDNNLV

SEQ ID NO: 23145 - protein, 7 aa, synthetic construct
RGDNQFF

SEQ ID NO: 23146 - protein, 7 aa, synthetic construct
RGDNQSH

SEQ ID NO: 23147 - protein, 7 aa, synthetic construct
RGDNRDI

SEQ ID NO: 23148 - protein, 7 aa, synthetic construct
RGDNRGH

SEQ ID NO: 23149 - protein, 7 aa, synthetic construct
RGDNTHR

SEQ ID NO: 23150 - protein, 7 aa, synthetic construct
RGDNVTQ

SEQ ID NO: 23151 - protein, 7 aa, synthetic construct
RGDQAHG

SEQ ID NO: 23152 - protein, 7 aa, synthetic construct
RGDQASI

SEQ ID NO: 23153 - protein, 7 aa, synthetic construct
RGDQDKH

SEQ ID NO: 23154 - protein, 7 aa, synthetic construct
RGDQDKN

SEQ ID NO: 23155 - protein, 7 aa, synthetic construct
RGDQDLN

SEQ ID NO: 23156 - protein, 7 aa, synthetic construct
RGDQDSK

SEQ ID NO: 23157 - protein, 7 aa, synthetic construct
RGDQHKK

SEQ ID NO: 23158 - protein, 7 aa, synthetic construct
RGDQHRT

SEQ ID NO: 23159 - protein, 7 aa, synthetic construct
RGDQKAI

SEQ ID NO: 23160 - protein, 7 aa, synthetic construct
RGDQKLL

SEQ ID NO: 23161 - protein, 7 aa, synthetic construct
RGDQKSD

SEQ ID NO: 23162 - protein, 7 aa, synthetic construct
RGDQKVE

SEQ ID NO: 23163 - protein, 7 aa, synthetic construct
RGDQLET

SEQ ID NO: 23164 - protein, 7 aa, synthetic construct
RGDQNFF

SEQ ID NO: 23165 - protein, 7 aa, synthetic construct
RGDQNHK

SEQ ID NO: 23166 - protein, 7 aa, synthetic construct
RGDQQNS

SEQ ID NO: 23167 - protein, 7 aa, synthetic construct
RGDQSFS

SEQ ID NO: 23168 - protein, 7 aa, synthetic construct
RGDQSHH

SEQ ID NO: 23169 - protein, 7 aa, synthetic construct
RGDQSQG

SEQ ID NO: 23170 - protein, 7 aa, synthetic construct
RGDQTDK

SEQ ID NO: 23171 - protein, 7 aa, synthetic construct
RGDQTFF

SEQ ID NO: 23172 - protein, 7 aa, synthetic construct
RGDQTGT

SEQ ID NO: 23173 - protein, 7 aa, synthetic construct
RGDQTLG

SEQ ID NO: 23174 - protein, 7 aa, synthetic construct
RGDQVFH

SEQ ID NO: 23175 - protein, 7 aa, synthetic construct
RGDRAVH

SEQ ID NO: 23176 - protein, 7 aa, synthetic construct
RGDRDEL

SEQ ID NO: 23177 - protein, 7 aa, synthetic construct
RGDRERF

SEQ ID NO: 23178 - protein, 7 aa, synthetic construct
RGDREVH

SEQ ID NO: 23179 - protein, 7 aa, synthetic construct
RGDRKHA

SEQ ID NO: 23180 - protein, 7 aa, synthetic construct
RGDRLEG

SEQ ID NO: 23181 - protein, 7 aa, synthetic construct
RGDRLTE

SEQ ID NO: 23182 - protein, 7 aa, synthetic construct
RGDDELA

SEQ ID NO: 23183 - protein, 7 aa, synthetic construct
RGDRQKH

SEQ ID NO: 23184 - protein, 7 aa, synthetic construct
RGDRTHD

SEQ ID NO: 23185 - protein, 7 aa, synthetic construct
RGDRVRH

SEQ ID NO: 23186 - protein, 7 aa, synthetic construct
RGDSDAV

SEQ ID NO: 23187 - protein, 7 aa, synthetic construct
RGDSDFI

SEQ ID NO: 23188 - protein, 7 aa, synthetic construct
RGDDFEA

SEQ ID NO: 23189 - protein, 7 aa, synthetic construct
RGDSEDG

SEQ ID NO: 23190 - protein, 7 aa, synthetic construct
RGDSEFS

SEQ ID NO: 23191 - protein, 7 aa, synthetic construct
RGDSEKF

SEQ ID NO: 23192 - protein, 7 aa, synthetic construct
RGDSFTI

SEQ ID NO: 23193 - protein, 7 aa, synthetic construct
RGDSGTA

SEQ ID NO: 23194 - protein, 7 aa, synthetic construct
RGDSIGF

SEQ ID NO: 23195 - protein, 7 aa, synthetic construct
RGDSKHE

SEQ ID NO: 23196 - protein, 7 aa, synthetic construct
RGDSLHH

SEQ ID NO: 23197 - protein, 7 aa, synthetic construct
RGDSLSF

SEQ ID NO: 23198 - protein, 7 aa, synthetic construct
RGDSQDQ

SEQ ID NO: 23199 - protein, 7 aa, synthetic construct
RGDSREH

SEQ ID NO: 23200 - protein, 7 aa, synthetic construct
RGDSSTG

SEQ ID NO: 23201 - protein, 7 aa, synthetic construct
RGDSTGN

SEQ ID NO: 23202 - protein, 7 aa, synthetic construct
RGDSTHR

SEQ ID NO: 23203 - protein, 7 aa, synthetic construct
RGDSTTE

SEQ ID NO: 23204 - protein, 7 aa, synthetic construct
RGDSVEI

SEQ ID NO: 23205 - protein, 7 aa, synthetic construct
RGDSVFQ

SEQ ID NO: 23206 - protein, 7 aa, synthetic construct
RGDSVSK

SEQ ID NO: 23207 - protein, 7 aa, synthetic construct
RGDDGKQ

SEQ ID NO: 23208 - protein, 7 aa, synthetic construct
RGDTAQE

SEQ ID NO: 23209 - protein, 7 aa, synthetic construct
RGDTAQI

SEQ ID NO: 23210 - protein, 7 aa, synthetic construct
RGDTAVQ

SEQ ID NO: 23211 - protein, 7 aa, synthetic construct
RGDTDGN

SEQ ID NO: 23212 - protein, 7 aa, synthetic construct
RGDDHDI

SEQ ID NO: 23213 - protein, 7 aa, synthetic construct
RGDTINQ

SEQ ID NO: 23214 - protein, 7 aa, synthetic construct
RGDTIQL

SEQ ID NO: 23215 - protein, 7 aa, synthetic construct
RGDTKSS

SEQ ID NO: 23216 - protein, 7 aa, synthetic construct
RGDTNIH

SEQ ID NO: 23217 - protein, 7 aa, synthetic construct
RGDTNNS

SEQ ID NO: 23218 - protein, 7 aa, synthetic construct
RGDDHKK

SEQ ID NO: 23219 - protein, 7 aa, synthetic construct
RGDTQDI

SEQ ID NO: 23220 - protein, 7 aa, synthetic construct
RGDTQEL

SEQ ID NO: 23221 - protein, 7 aa, synthetic construct
RGDTQSQ

SEQ ID NO: 23222 - protein, 7 aa, synthetic construct
RGDTTTF

SEQ ID NO: 23223 - protein, 7 aa, synthetic construct
RGDTVDS

SEQ ID NO: 23224 - protein, 7 aa, synthetic construct
RGDTVHQ

SEQ ID NO: 23225 - protein, 7 aa, synthetic construct
RGDTVRN

SEQ ID NO: 23226 - protein, 7 aa, synthetic construct
RGDTVRS

SEQ ID NO: 23227 - protein, 7 aa, synthetic construct
RGDVAQN

SEQ ID NO: 23228 - protein, 7 aa, synthetic construct
RGDVAQT

SEQ ID NO: 23229 - protein, 7 aa, synthetic construct
RGDVATA

SEQ ID NO: 23230 - protein, 7 aa, synthetic construct
RGDVDIS

SEQ ID NO: 23231 - protein, 7 aa, synthetic construct
RGDVEEL

SEQ ID NO: 23232 - protein, 7 aa, synthetic construct
RGDVFFL

SEQ ID NO: 23233 - protein, 7 aa, synthetic construct
RGDDIHE

SEQ ID NO: 23234 - protein, 7 aa, synthetic construct
RGDVFNN

SEQ ID NO: 23235 - protein, 7 aa, synthetic construct
RGDVGAI

SEQ ID NO: 23236 - protein, 7 aa, synthetic construct
RGDVGTH

SEQ ID NO: 23237 - protein, 7 aa, synthetic construct
RGDVHFS

SEQ ID NO: 23238 - protein, 7 aa, synthetic construct
RGDVHTG

SEQ ID NO: 23239 - protein, 7 aa, synthetic construct
RGDVILL

SEQ ID NO: 23240 - protein, 7 aa, synthetic construct
RGDVILS

SEQ ID NO: 23241 - protein, 7 aa, synthetic construct
RGDVISQ

SEQ ID NO: 23242 - protein, 7 aa, synthetic construct
RGDVKHG

SEQ ID NO: 23243 - protein, 7 aa, synthetic construct
RGDDIRN

SEQ ID NO: 23244 - protein, 7 aa, synthetic construct
RGDVLEK

SEQ ID NO: 23245 - protein, 7 aa, synthetic construct
RGDVLEL

SEQ ID NO: 23246 - protein, 7 aa, synthetic construct
RGDVLFE

SEQ ID NO: 23247 - protein, 7 aa, synthetic construct
RGDVNAL

SEQ ID NO: 23248 - protein, 7 aa, synthetic construct
RGDVQRR

SEQ ID NO: 23249 - protein, 7 aa, synthetic construct
RGDVVGD

SEQ ID NO: 23250 - protein, 7 aa, synthetic construct
RGDDKKD

SEQ ID NO: 23251 - protein, 7 aa, synthetic construct
RGDDNEI

SEQ ID NO: 23252 - protein, 7 aa, synthetic construct
RGDDNKN

SEQ ID NO: 23253 - protein, 7 aa, synthetic construct
RGDDNRS

SEQ ID NO: 23254 - protein, 7 aa, synthetic construct
RGDAEKH

SEQ ID NO: 23255 - protein, 7 aa, synthetic construct
RGDDQVF

SEQ ID NO: 23256 - protein, 7 aa, synthetic construct
RGDDRED

SEQ ID NO: 23257 - protein, 7 aa, synthetic construct
RGDDSRQ

SEQ ID NO: 23258 - protein, 7 aa, synthetic construct
RGDDTSG

SEQ ID NO: 23259 - protein, 7 aa, synthetic construct
RGDDVHA

SEQ ID NO: 23260 - protein, 7 aa, synthetic construct
RGDDVRA

SEQ ID NO: 23261 - protein, 7 aa, synthetic construct
RGDDVTI

SEQ ID NO: 23262 - protein, 7 aa, synthetic construct
RGDEATE

SEQ ID NO: 23263 - protein, 7 aa, synthetic construct
RGDEDGF

SEQ ID NO: 23264 - protein, 7 aa, synthetic construct
RGDEETR

SEQ ID NO: 23265 - protein, 7 aa, synthetic construct
RGDEEVL

SEQ ID NO: 23266 - protein, 7 aa, synthetic construct
RGDEGLA

SEQ ID NO: 23267 - protein, 7 aa, synthetic construct
RGDEHAA

SEQ ID NO: 23268 - protein, 7 aa, synthetic construct
RGDAFLI

SEQ ID NO: 23269 - protein, 7 aa, synthetic construct
RGDEIKV

SEQ ID NO: 23270 - protein, 7 aa, synthetic construct
RGDEKQK

SEQ ID NO: 23271 - protein, 7 aa, synthetic construct
RGDELNG

SEQ ID NO: 23272 - protein, 7 aa, synthetic construct
RGDELQV

SEQ ID NO: 23273 - protein, 7 aa, synthetic construct
RGDENSD

SEQ ID NO: 23274 - protein, 7 aa, synthetic construct
RGDEQFV

SEQ ID NO: 23275 - protein, 7 aa, synthetic construct
RGDAGAQ

SEQ ID NO: 23276 - protein, 7 aa, synthetic construct
RGDEQNR

SEQ ID NO: 23277 - protein, 7 aa, synthetic construct
RGDEREL

SEQ ID NO: 23278 - protein, 7 aa, synthetic construct
RGDERER

SEQ ID NO: 23279 - protein, 7 aa, synthetic construct
RGDERIL

SEQ ID NO: 23280 - protein, 7 aa, synthetic construct
RGDESEI

SEQ ID NO: 23281 - protein, 7 aa, synthetic construct
RGDESGN

SEQ ID NO: 23282 - protein, 7 aa, synthetic construct
RGDETDQ

SEQ ID NO: 23283 - protein, 7 aa, synthetic construct
RGDEVDQ

SEQ ID NO: 23284 - protein, 7 aa, synthetic construct
RGDEVGI

SEQ ID NO: 23285 - protein, 7 aa, synthetic construct
RGDEVKQ

SEQ ID NO: 23286 - protein, 7 aa, synthetic construct
RGDFADR

SEQ ID NO: 23287 - protein, 7 aa, synthetic construct
RGDFAIQ

SEQ ID NO: 23288 - protein, 7 aa, synthetic construct
RGDFDKI

SEQ ID NO: 23289 - protein, 7 aa, synthetic construct
RGDFDNF

SEQ ID NO: 23290 - protein, 7 aa, synthetic construct
RGDFEHE

SEQ ID NO: 23291 - protein, 7 aa, synthetic construct
RGDFEVA

SEQ ID NO: 23292 - protein, 7 aa, synthetic construct
RGDFFAA

SEQ ID NO: 23293 - protein, 7 aa, synthetic construct
RGDFFVL

SEQ ID NO: 23294 - protein, 7 aa, synthetic construct
RGDFGGG

SEQ ID NO: 23295 - protein, 7 aa, synthetic construct
RGDFKDA

SEQ ID NO: 23296 - protein, 7 aa, synthetic construct
RGDFLAE

SEQ ID NO: 23297 - protein, 7 aa, synthetic construct
RGDFLHF

SEQ ID NO: 23298 - protein, 7 aa, synthetic construct
RGDFNTS

SEQ ID NO: 23299 - protein, 7 aa, synthetic construct
RGDFNVQ

SEQ ID NO: 23300 - protein, 7 aa, synthetic construct
RGDFRNA

SEQ ID NO: 23301 - protein, 7 aa, synthetic construct
RGDFSDT

SEQ ID NO: 23302 - protein, 7 aa, synthetic construct
RGDAALL

SEQ ID NO: 23303 - protein, 7 aa, synthetic construct
RGDFTQQ

SEQ ID NO: 23304 - protein, 7 aa, synthetic construct
RGDGAAT

SEQ ID NO: 23305 - protein, 7 aa, synthetic construct
RGDGDKN

SEQ ID NO: 23306 - protein, 7 aa, synthetic construct
RGDGELS

SEQ ID NO: 23307 - protein, 7 aa, synthetic construct
RGDGEQG

SEQ ID NO: 23308 - protein, 7 aa, synthetic construct
RGDGEQT

SEQ ID NO: 23309 - protein, 7 aa, synthetic construct
RGDGFIE

SEQ ID NO: 23310 - protein, 7 aa, synthetic construct
RGDGGHG

SEQ ID NO: 23311 - protein, 7 aa, synthetic construct
RGDGGSN

SEQ ID NO: 23312 - protein, 7 aa, synthetic construct
RGDGHII

SEQ ID NO: 23313 - protein, 7 aa, synthetic construct
RGDGKAH

SEQ ID NO: 23314 - protein, 7 aa, synthetic construct
RGDAISL

SEQ ID NO: 23315 - protein, 7 aa, synthetic construct
RGDGNDF

SEQ ID NO: 23316 - protein, 7 aa, synthetic construct
RGDGNQH

SEQ ID NO: 23317 - protein, 7 aa, synthetic construct
RGDGQHR

SEQ ID NO: 23318 - protein, 7 aa, synthetic construct
RGDGQHT

SEQ ID NO: 23319 - protein, 7 aa, synthetic construct
RGDGRKD

SEQ ID NO: 23320 - protein, 7 aa, synthetic construct
RGDGSGN

SEQ ID NO: 23321 - protein, 7 aa, synthetic construct
RGDGSTA

SEQ ID NO: 23322 - protein, 7 aa, synthetic construct
RGDGTIF

SEQ ID NO: 23323 - protein, 7 aa, synthetic construct
RGDAKHD

SEQ ID NO: 23324 - protein, 7 aa, synthetic construct
RGDGVGL

SEQ ID NO: 23325 - protein, 7 aa, synthetic construct
RGDGVHQ

SEQ ID NO: 23326 - protein, 7 aa, synthetic construct
RGDGVTE

SEQ ID NO: 23327 - protein, 7 aa, synthetic construct
RGDHAFA

SEQ ID NO: 23328 - protein, 7 aa, synthetic construct
RGDAKLK

SEQ ID NO: 23329 - protein, 7 aa, synthetic construct
RGDHATE

SEQ ID NO: 23330 - protein, 7 aa, synthetic construct
RGDHDLL

SEQ ID NO: 23331 - protein, 7 aa, synthetic construct
RGDHDLQ

SEQ ID NO: 23332 - protein, 7 aa, synthetic construct
RGDHDQR

SEQ ID NO: 23333 - protein, 7 aa, synthetic construct
RGDHDSF

SEQ ID NO: 23334 - protein, 7 aa, synthetic construct
RGDHEFN

SEQ ID NO: 23335 - protein, 7 aa, synthetic construct
RGDHEIL

SEQ ID NO: 23336 - protein, 7 aa, synthetic construct
RGDHESG

SEQ ID NO: 23337 - protein, 7 aa, synthetic construct
RGDHHDH

SEQ ID NO: 23338 - protein, 7 aa, synthetic construct
RGDHIKT

SEQ ID NO: 23339 - protein, 7 aa, synthetic construct
RGDHLGG

SEQ ID NO: 23340 - protein, 7 aa, synthetic construct
RGDHLGR

SEQ ID NO: 23341 - protein, 7 aa, synthetic construct
RGDHLTH

SEQ ID NO: 23342 - protein, 7 aa, synthetic construct
RGDHNDA

SEQ ID NO: 23343 - protein, 7 aa, synthetic construct
RGDALII

SEQ ID NO: 23344 - protein, 7 aa, synthetic construct
RGDHTFE

SEQ ID NO: 23345 - protein, 7 aa, synthetic construct
RGDALSS

SEQ ID NO: 23346 - protein, 7 aa, synthetic construct
RGDIEFL

SEQ ID NO: 23347 - protein, 7 aa, synthetic construct
RGDIEHE

SEQ ID NO: 23348 - protein, 7 aa, synthetic construct
RGDIEKN

SEQ ID NO: 23349 - protein, 7 aa, synthetic construct
RGDIFGT

SEQ ID NO: 23350 - protein, 7 aa, synthetic construct
RGDIIFG

SEQ ID NO: 23351 - protein, 7 aa, synthetic construct
RGDANQD

SEQ ID NO: 23352 - protein, 7 aa, synthetic construct
RGDANRN

SEQ ID NO: 23353 - protein, 7 aa, synthetic construct
RGDILEG

SEQ ID NO: 23354 - protein, 7 aa, synthetic construct
RGDILQF

SEQ ID NO: 23355 - protein, 7 aa, synthetic construct
RGDINLL

SEQ ID NO: 23356 - protein, 7 aa, synthetic construct
RGDIQEF

SEQ ID NO: 23357 - protein, 7 aa, synthetic construct
RGDIQFL

SEQ ID NO: 23358 - protein, 7 aa, synthetic construct
RGDIQSH

SEQ ID NO: 23359 - protein, 7 aa, synthetic construct
RGDAQDI

SEQ ID NO: 23360 - protein, 7 aa, synthetic construct
RGDIREQ

SEQ ID NO: 23361 - protein, 7 aa, synthetic construct
RGDIRET

SEQ ID NO: 23362 - protein, 7 aa, synthetic construct
RGDIRNE

SEQ ID NO: 23363 - protein, 7 aa, synthetic construct
RGDIRNG

SEQ ID NO: 23364 - protein, 7 aa, synthetic construct
RGDIRSS

SEQ ID NO: 23365 - protein, 7 aa, synthetic construct
RGDIVGE

SEQ ID NO: 23366 - protein, 7 aa, synthetic construct
RGDIVRD

SEQ ID NO: 23367 - protein, 7 aa, synthetic construct
RGDKAGS

SEQ ID NO: 23368 - protein, 7 aa, synthetic construct
RGDKAHG

SEQ ID NO: 23369 - protein, 7 aa, synthetic construct
RGDKDSL

SEQ ID NO: 23370 - protein, 7 aa, synthetic construct
RGDKELR

SEQ ID NO: 23371 - protein, 7 aa, synthetic construct
RGDKGDV

SEQ ID NO: 23372 - protein, 7 aa, synthetic construct
RGDKHFS

SEQ ID NO: 23373 - protein, 7 aa, synthetic construct
RGDKHRT

SEQ ID NO: 23374 - protein, 7 aa, synthetic construct
RGDKLFG

SEQ ID NO: 23375 - protein, 7 aa, synthetic construct
RGDKLNN

SEQ ID NO: 23376 - protein, 7 aa, synthetic construct
RGDKLTF

SEQ ID NO: 23377 - protein, 7 aa, synthetic construct
RGDKQAV

SEQ ID NO: 23378 - protein, 7 aa, synthetic construct
RGDKQDN

SEQ ID NO: 23379 - protein, 7 aa, synthetic construct
RGDKQGG

SEQ ID NO: 23380 - protein, 7 aa, synthetic construct
RGDKQHT

SEQ ID NO: 23381 - protein, 7 aa, synthetic construct
RGDKRFD

SEQ ID NO: 23382 - protein, 7 aa, synthetic construct
RGDKRIE

SEQ ID NO: 23383 - protein, 7 aa, synthetic construct
RGDKSGD

SEQ ID NO: 23384 - protein, 7 aa, synthetic construct
RGDKSQS

SEQ ID NO: 23385 - protein, 7 aa, synthetic construct
RGDKTKL

SEQ ID NO: 23386 - protein, 7 aa, synthetic construct
RGDKTLL

SEQ ID NO: 23387 - protein, 7 aa, synthetic construct
RGDKTSG

SEQ ID NO: 23388 - protein, 7 aa, synthetic construct
RGDKVFT

SEQ ID NO: 23389 - protein, 7 aa, synthetic construct
RGDASAK

SEQ ID NO: 23390 - protein, 7 aa, synthetic construct
RGDLAQE

SEQ ID NO: 23391 - protein, 7 aa, synthetic construct
RGDASDH

SEQ ID NO: 23392 - protein, 7 aa, synthetic construct
RGDADFF

SEQ ID NO: 23393 - protein, 7 aa, synthetic construct
RGDLEVS

SEQ ID NO: 23394 - protein, 7 aa, synthetic construct
RGDLISF

SEQ ID NO: 23395 - protein, 7 aa, synthetic construct
RGDLKIE

SEQ ID NO: 23396 - protein, 7 aa, synthetic construct
RGDLNDF

SEQ ID NO: 23397 - protein, 7 aa, synthetic construct
RGDLQFV

SEQ ID NO: 23398 - protein, 7 aa, synthetic construct
RGDLRKK

SEQ ID NO: 23399 - protein, 7 aa, synthetic construct
RGDLSFH

SEQ ID NO: 23400 - protein, 7 aa, synthetic construct
RGDLVFA

SEQ ID NO: 23401 - protein, 7 aa, synthetic construct
RGDNAQD

SEQ ID NO: 23402 - protein, 7 aa, synthetic construct
RGDNDIR

SEQ ID NO: 23403 - protein, 7 aa, synthetic construct
RGDNDTL

SEQ ID NO: 23404 - protein, 7 aa, synthetic construct
RGDATSN

SEQ ID NO: 23405 - protein, 7 aa, synthetic construct
RGDNFLG

SEQ ID NO: 23406 - protein, 7 aa, synthetic construct
RGDNFRQ

SEQ ID NO: 23407 - protein, 7 aa, synthetic construct
RGDNHDL

SEQ ID NO: 23408 - protein, 7 aa, synthetic construct
RGDNIAI

SEQ ID NO: 23409 - protein, 7 aa, synthetic construct
RGDNIFQ

SEQ ID NO: 23410 - protein, 7 aa, synthetic construct
RGDNKKS

SEQ ID NO: 23411 - protein, 7 aa, synthetic construct
RGDNLSN

SEQ ID NO: 23412 - protein, 7 aa, synthetic construct
RGDNLSQ

SEQ ID NO: 23413 - protein, 7 aa, synthetic construct
RGDNNEN

SEQ ID NO: 23414 - protein, 7 aa, synthetic construct
RGDNNFE

SEQ ID NO: 23415 - protein, 7 aa, synthetic construct
RGDNNNR

SEQ ID NO: 23416 - protein, 7 aa, synthetic construct
RGDNQHE

SEQ ID NO: 23417 - protein, 7 aa, synthetic construct
RGDNQVT

SEQ ID NO: 23418 - protein, 7 aa, synthetic construct
RGDNRGE

SEQ ID NO: 23419 - protein, 7 aa, synthetic construct
RGDNRGG

SEQ ID NO: 23420 - protein, 7 aa, synthetic construct
RGDNRRE

SEQ ID NO: 23421 - protein, 7 aa, synthetic construct
RGDNSKG

SEQ ID NO: 23422 - protein, 7 aa, synthetic construct
RGDNVNS

SEQ ID NO: 23423 - protein, 7 aa, synthetic construct
RGDQAFS

SEQ ID NO: 23424 - protein, 7 aa, synthetic construct
RGDQAHL

SEQ ID NO: 23425 - protein, 7 aa, synthetic construct
RGDQAQR

SEQ ID NO: 23426 - protein, 7 aa, synthetic construct
RGDQDSF

SEQ ID NO: 23427 - protein, 7 aa, synthetic construct
RGDQEQQ

SEQ ID NO: 23428 - protein, 7 aa, synthetic construct
RGDQHVG

SEQ ID NO: 23429 - protein, 7 aa, synthetic construct
RGDQIHL

SEQ ID NO: 23430 - protein, 7 aa, synthetic construct
RGDQKAE

SEQ ID NO: 23431 - protein, 7 aa, synthetic construct
RGDDARA

SEQ ID NO: 23432 - protein, 7 aa, synthetic construct
RGDQNQV

SEQ ID NO: 23433 - protein, 7 aa, synthetic construct
RGDQNSF

SEQ ID NO: 23434 - protein, 7 aa, synthetic construct
RGDQQKG

SEQ ID NO: 23435 - protein, 7 aa, synthetic construct
RGDQQLN

SEQ ID NO: 23436 - protein, 7 aa, synthetic construct
RGDQQRS

SEQ ID NO: 23437 - protein, 7 aa, synthetic construct
RGDQRHD

SEQ ID NO: 23438 - protein, 7 aa, synthetic construct
RGDDDFQ

SEQ ID NO: 23439 - protein, 7 aa, synthetic construct
RGDQSQE

SEQ ID NO: 23440 - protein, 7 aa, synthetic construct
RGDQTGS

SEQ ID NO: 23441 - protein, 7 aa, synthetic construct
RGDRDHG

SEQ ID NO: 23442 - protein, 7 aa, synthetic construct
RGDRFKF

SEQ ID NO: 23443 - protein, 7 aa, synthetic construct
RGDRHTR

SEQ ID NO: 23444 - protein, 7 aa, synthetic construct
RGDRIHH

SEQ ID NO: 23445 - protein, 7 aa, synthetic construct
RGDDEFA

SEQ ID NO: 23446 - protein, 7 aa, synthetic construct
RGDRKTE

SEQ ID NO: 23447 - protein, 7 aa, synthetic construct
RGDRLVD

SEQ ID NO: 23448 - protein, 7 aa, synthetic construct
RGDDEHT

SEQ ID NO: 23449 - protein, 7 aa, synthetic construct
RGDRNDT

SEQ ID NO: 23450 - protein, 7 aa, synthetic construct
RGDRNKS

SEQ ID NO: 23451 - protein, 7 aa, synthetic construct
RGDRNVG

SEQ ID NO: 23452 - protein, 7 aa, synthetic construct
RGDRQTG

SEQ ID NO: 23453 - protein, 7 aa, synthetic construct
RGDRRAH

SEQ ID NO: 23454 - protein, 7 aa, synthetic construct
RGDRSNE

SEQ ID NO: 23455 - protein, 7 aa, synthetic construct
RGDRTLH

SEQ ID NO: 23456 - protein, 7 aa, synthetic construct
RGDSAES

SEQ ID NO: 23457 - protein, 7 aa, synthetic construct
RGDSAGF

SEQ ID NO: 23458 - protein, 7 aa, synthetic construct
RGDSDLK

SEQ ID NO: 23459 - protein, 7 aa, synthetic construct
RGDSDRL

SEQ ID NO: 23460 - protein, 7 aa, synthetic construct
RGDSEKT

SEQ ID NO: 23461 - protein, 7 aa, synthetic construct
RGDSENI

SEQ ID NO: 23462 - protein, 7 aa, synthetic construct
RGDSETI

SEQ ID NO: 23463 - protein, 7 aa, synthetic construct
RGDSGNA

SEQ ID NO: 23464 - protein, 7 aa, synthetic construct
RGDSGVQ

SEQ ID NO: 23465 - protein, 7 aa, synthetic construct
RGDSHAN

SEQ ID NO: 23466 - protein, 7 aa, synthetic construct
RGDSHKH

SEQ ID NO: 23467 - protein, 7 aa, synthetic construct
RGDDFLT

SEQ ID NO: 23468 - protein, 7 aa, synthetic construct
RGDSIEF

SEQ ID NO: 23469 - protein, 7 aa, synthetic construct
RGDSIGV

SEQ ID NO: 23470 - protein, 7 aa, synthetic construct
RGDSIIF

SEQ ID NO: 23471 - protein, 7 aa, synthetic construct
RGDSKDD

SEQ ID NO: 23472 - protein, 7 aa, synthetic construct
RGDSKDE

SEQ ID NO: 23473 - protein, 7 aa, synthetic construct
RGDDFRR

SEQ ID NO: 23474 - protein, 7 aa, synthetic construct
RGDSLSD

SEQ ID NO: 23475 - protein, 7 aa, synthetic construct
RGDSLTG

SEQ ID NO: 23476 - protein, 7 aa, synthetic construct
RGDSNFK

SEQ ID NO: 23477 - protein, 7 aa, synthetic construct
RGDSNGT

SEQ ID NO: 23478 - protein, 7 aa, synthetic construct
RGDSQKQ

SEQ ID NO: 23479 - protein, 7 aa, synthetic construct
RGDSTSK

SEQ ID NO: 23480 - protein, 7 aa, synthetic construct
RGDSVSH

SEQ ID NO: 23481 - protein, 7 aa, synthetic construct
RGDTAHD

SEQ ID NO: 23482 - protein, 7 aa, synthetic construct
RGDDGND

SEQ ID NO: 23483 - protein, 7 aa, synthetic construct
RGDDGNQ

SEQ ID NO: 23484 - protein, 7 aa, synthetic construct
RGDTDQI

SEQ ID NO: 23485 - protein, 7 aa, synthetic construct
RGDTERS

SEQ ID NO: 23486 - protein, 7 aa, synthetic construct
RGDTESQ

SEQ ID NO: 23487 - protein, 7 aa, synthetic construct
RGDTGIV

SEQ ID NO: 23488 - protein, 7 aa, synthetic construct
RGDTGQG

SEQ ID NO: 23489 - protein, 7 aa, synthetic construct
RGDTHIQ

SEQ ID NO: 23490 - protein, 7 aa, synthetic construct
RGDTHQN

SEQ ID NO: 23491 - protein, 7 aa, synthetic construct
RGDTHSG

SEQ ID NO: 23492 - protein, 7 aa, synthetic construct
RGDTIRK

SEQ ID NO: 23493 - protein, 7 aa, synthetic construct
RGDTITS

SEQ ID NO: 23494 - protein, 7 aa, synthetic construct
RGDTNIS

SEQ ID NO: 23495 - protein, 7 aa, synthetic construct
RGDTNKT

SEQ ID NO: 23496 - protein, 7 aa, synthetic construct
RGDTNNN

SEQ ID NO: 23497 - protein, 7 aa, synthetic construct
RGDTNRR

SEQ ID NO: 23498 - protein, 7 aa, synthetic construct
RGDDHQD

SEQ ID NO: 23499 - protein, 7 aa, synthetic construct
RGDDHRQ

SEQ ID NO: 23500 - protein, 7 aa, synthetic construct
RGDTTHN

SEQ ID NO: 23501 - protein, 7 aa, synthetic construct
RGDTVAL

SEQ ID NO: 23502 - protein, 7 aa, synthetic construct
RGDTVEQ

SEQ ID NO: 23503 - protein, 7 aa, synthetic construct
RGDTVEV

SEQ ID NO: 23504 - protein, 7 aa, synthetic construct
RGDTVNF

SEQ ID NO: 23505 - protein, 7 aa, synthetic construct
RGDVAFN

SEQ ID NO: 23506 - protein, 7 aa, synthetic construct
RGDVAIQ

SEQ ID NO: 23507 - protein, 7 aa, synthetic construct
RGDVDKN

SEQ ID NO: 23508 - protein, 7 aa, synthetic construct
RGDVDRL

SEQ ID NO: 23509 - protein, 7 aa, synthetic construct
RGDVDSQ

SEQ ID NO: 23510 - protein, 7 aa, synthetic construct
RGDVDTI

SEQ ID NO: 23511 - protein, 7 aa, synthetic construct
RGDVEDS

SEQ ID NO: 23512 - protein, 7 aa, synthetic construct
RGDVEGH

SEQ ID NO: 23513 - protein, 7 aa, synthetic construct
RGDDINA

SEQ ID NO: 23514 - protein, 7 aa, synthetic construct
RGDVNSA

SEQ ID NO: 23515 - protein, 7 aa, synthetic construct
RGDVQHK

SEQ ID NO: 23516 - protein, 7 aa, synthetic construct
RGDVSHL

SEQ ID NO: 23517 - protein, 7 aa, synthetic construct
RGDVSSE

SEQ ID NO: 23518 - protein, 7 aa, synthetic construct
RGDVSVA

SEQ ID NO: 23519 - protein, 7 aa, synthetic construct
RGDVSVS

SEQ ID NO: 23520 - protein, 7 aa, synthetic construct
RGDVTVG

SEQ ID NO: 23521 - protein, 7 aa, synthetic construct
RGDVTVK

SEQ ID NO: 23522 - protein, 7 aa, synthetic construct
RGDVTVT

SEQ ID NO: 23523 - protein, 7 aa, synthetic construct
RGDVVFG

SEQ ID NO: 23524 - protein, 7 aa, synthetic construct
RGDVVLV

SEQ ID NO: 23525 - protein, 7 aa, synthetic construct
RGDVVSQ

SEQ ID NO: 23526 - protein, 7 aa, synthetic construct
RGDDLDR

SEQ ID NO: 23527 - protein, 7 aa, synthetic construct
RGDDLQK

SEQ ID NO: 23528 - protein, 7 aa, synthetic construct
RGDDNRV

SEQ ID NO: 23529 - protein, 7 aa, synthetic construct
RGDDRSR

SEQ ID NO: 23530 - protein, 7 aa, synthetic construct
RGDDRTN

SEQ ID NO: 23531 - protein, 7 aa, synthetic construct
RGDDSKS

SEQ ID NO: 23532 - protein, 7 aa, synthetic construct
RGDDSRG

SEQ ID NO: 23533 - protein, 7 aa, synthetic construct
RGDDSRR

SEQ ID NO: 23534 - protein, 7 aa, synthetic construct
RGDDTER

SEQ ID NO: 23535 - protein, 7 aa, synthetic construct
RGDDTHD

SEQ ID NO: 23536 - protein, 7 aa, synthetic construct
RGDEAFN

SEQ ID NO: 23537 - protein, 7 aa, synthetic construct
RGDEARS

SEQ ID NO: 23538 - protein, 7 aa, synthetic construct
RGDEDDE

SEQ ID NO: 23539 - protein, 7 aa, synthetic construct
RGDEDNK

SEQ ID NO: 23540 - protein, 7 aa, synthetic construct
RGDEEGF

SEQ ID NO: 23541 - protein, 7 aa, synthetic construct
RGDEEHL

SEQ ID NO: 23542 - protein, 7 aa, synthetic construct
RGDEFKK

SEQ ID NO: 23543 - protein, 7 aa, synthetic construct
RGDEFSS

SEQ ID NO: 23544 - protein, 7 aa, synthetic construct
RGDEGQQ

SEQ ID NO: 23545 - protein, 7 aa, synthetic construct
RGDAFKN

SEQ ID NO: 23546 - protein, 7 aa, synthetic construct
RGDEHGD

SEQ ID NO: 23547 - protein, 7 aa, synthetic construct
RGDEHNA

SEQ ID NO: 23548 - protein, 7 aa, synthetic construct
RGDAFLV

SEQ ID NO: 23549 - protein, 7 aa, synthetic construct
RGDEINT

SEQ ID NO: 23550 - protein, 7 aa, synthetic construct
RGDEKHV

SEQ ID NO: 23551 - protein, 7 aa, synthetic construct
RGDELTL

SEQ ID NO: 23552 - protein, 7 aa, synthetic construct
RGDEQAV

SEQ ID NO: 23553 - protein, 7 aa, synthetic construct
RGDERDI

SEQ ID NO: 23554 - protein, 7 aa, synthetic construct
RGDERRN

SEQ ID NO: 23555 - protein, 7 aa, synthetic construct
RGDESIT

SEQ ID NO: 23556 - protein, 7 aa, synthetic construct
RGDESKH

SEQ ID NO: 23557 - protein, 7 aa, synthetic construct
RGDETVI

SEQ ID NO: 23558 - protein, 7 aa, synthetic construct
RGDEVGN

SEQ ID NO: 23559 - protein, 7 aa, synthetic construct
RGDFARD

SEQ ID NO: 23560 - protein, 7 aa, synthetic construct
RGDFATA

SEQ ID NO: 23561 - protein, 7 aa, synthetic construct
RGDFDFV

SEQ ID NO: 23562 - protein, 7 aa, synthetic construct
RGDFDIF

SEQ ID NO: 23563 - protein, 7 aa, synthetic construct
RGDFDIR

SEQ ID NO: 23564 - protein, 7 aa, synthetic construct
RGDFENG

SEQ ID NO: 23565 - protein, 7 aa, synthetic construct
RGDFERQ

SEQ ID NO: 23566 - protein, 7 aa, synthetic construct
RGDFFAL

SEQ ID NO: 23567 - protein, 7 aa, synthetic construct
RGDFGDD

SEQ ID NO: 23568 - protein, 7 aa, synthetic construct
RGDFIRQ

SEQ ID NO: 23569 - protein, 7 aa, synthetic construct
RGDFKQH

SEQ ID NO: 23570 - protein, 7 aa, synthetic construct
RGDFQQH

SEQ ID NO: 23571 - protein, 7 aa, synthetic construct
RGDFQSE

SEQ ID NO: 23572 - protein, 7 aa, synthetic construct
RGDFRKI

SEQ ID NO: 23573 - protein, 7 aa, synthetic construct
RGDFTEN

SEQ ID NO: 23574 - protein, 7 aa, synthetic construct
RGDFTTF

SEQ ID NO: 23575 - protein, 7 aa, synthetic construct
RGDFVET

SEQ ID NO: 23576 - protein, 7 aa, synthetic construct
RGDGAEQ

SEQ ID NO: 23577 - protein, 7 aa, synthetic construct
RGDGGDI

SEQ ID NO: 23578 - protein, 7 aa, synthetic construct
RGDGGRG

SEQ ID NO: 23579 - protein, 7 aa, synthetic construct
RGDGHGS

SEQ ID NO: 23580 - protein, 7 aa, synthetic construct
RGDGHKH

SEQ ID NO: 23581 - protein, 7 aa, synthetic construct
RGDGIGS

SEQ ID NO: 23582 - protein, 7 aa, synthetic construct
RGDGKKE

SEQ ID NO: 23583 - protein, 7 aa, synthetic construct
RGDGRHN

SEQ ID NO: 23584 - protein, 7 aa, synthetic construct
RGDGRIK

SEQ ID NO: 23585 - protein, 7 aa, synthetic construct
RGDGSEL

SEQ ID NO: 23586 - protein, 7 aa, synthetic construct
RGDAKFF

SEQ ID NO: 23587 - protein, 7 aa, synthetic construct
RGDGSEV

SEQ ID NO: 23588 - protein, 7 aa, synthetic construct
RGDAKFV

SEQ ID NO: 23589 - protein, 7 aa, synthetic construct
RGDGTGE

SEQ ID NO: 23590 - protein, 7 aa, synthetic construct
RGDGTNH

SEQ ID NO: 23591 - protein, 7 aa, synthetic construct
RGDHDHA

SEQ ID NO: 23592 - protein, 7 aa, synthetic construct
RGDHELI

SEQ ID NO: 23593 - protein, 7 aa, synthetic construct
RGDHEVL

SEQ ID NO: 23594 - protein, 7 aa, synthetic construct
RGDAKSD

SEQ ID NO: 23595 - protein, 7 aa, synthetic construct
RGDHFFK

SEQ ID NO: 23596 - protein, 7 aa, synthetic construct
RGDHFGR

SEQ ID NO: 23597 - protein, 7 aa, synthetic construct
RGDHFSK

SEQ ID NO: 23598 - protein, 7 aa, synthetic construct
RGDHIKN

SEQ ID NO: 23599 - protein, 7 aa, synthetic construct
RGDHKNA

SEQ ID NO: 23600 - protein, 7 aa, synthetic construct
RGDHLFF

SEQ ID NO: 23601 - protein, 7 aa, synthetic construct
RGDHLST

SEQ ID NO: 23602 - protein, 7 aa, synthetic construct
RGDAASL

SEQ ID NO: 23603 - protein, 7 aa, synthetic construct
RGDHQNA

SEQ ID NO: 23604 - protein, 7 aa, synthetic construct
RGDHRFF

SEQ ID NO: 23605 - protein, 7 aa, synthetic construct
RGDHRGR

SEQ ID NO: 23606 - protein, 7 aa, synthetic construct
RGDHRHT

SEQ ID NO: 23607 - protein, 7 aa, synthetic construct
RGDHRSS

SEQ ID NO: 23608 - protein, 7 aa, synthetic construct
RGDALSN

SEQ ID NO: 23609 - protein, 7 aa, synthetic construct
RGDHVLE

SEQ ID NO: 23610 - protein, 7 aa, synthetic construct
RGDIAAV

SEQ ID NO: 23611 - protein, 7 aa, synthetic construct
RGDIAET

SEQ ID NO: 23612 - protein, 7 aa, synthetic construct
RGDIAIF

SEQ ID NO: 23613 - protein, 7 aa, synthetic construct
RGDIAVH

SEQ ID NO: 23614 - protein, 7 aa, synthetic construct
RGDIDLR

SEQ ID NO: 23615 - protein, 7 aa, synthetic construct
RGDIDNN

SEQ ID NO: 23616 - protein, 7 aa, synthetic construct
RGDIESF

SEQ ID NO: 23617 - protein, 7 aa, synthetic construct
RGDIFVN

SEQ ID NO: 23618 - protein, 7 aa, synthetic construct
RGDILER

SEQ ID NO: 23619 - protein, 7 aa, synthetic construct
RGDILKE

SEQ ID NO: 23620 - protein, 7 aa, synthetic construct
RGDINLK

SEQ ID NO: 23621 - protein, 7 aa, synthetic construct
RGDINSK

SEQ ID NO: 23622 - protein, 7 aa, synthetic construct
RGDIQAA

SEQ ID NO: 23623 - protein, 7 aa, synthetic construct
RGDIQQV

SEQ ID NO: 23624 - protein, 7 aa, synthetic construct
RGDIQVQ

SEQ ID NO: 23625 - protein, 7 aa, synthetic construct
RGDIRED

SEQ ID NO: 23626 - protein, 7 aa, synthetic construct
RGDISNE

SEQ ID NO: 23627 - protein, 7 aa, synthetic construct
RGDIVSV

SEQ ID NO: 23628 - protein, 7 aa, synthetic construct
RGDIVVI

SEQ ID NO: 23629 - protein, 7 aa, synthetic construct
RGDKADS

SEQ ID NO: 23630 - protein, 7 aa, synthetic construct
RGDKARS

SEQ ID NO: 23631 - protein, 7 aa, synthetic construct
RGDKDEK

SEQ ID NO: 23632 - protein, 7 aa, synthetic construct
RGDKEGF

SEQ ID NO: 23633 - protein, 7 aa, synthetic construct
RGDKERG

SEQ ID NO: 23634 - protein, 7 aa, synthetic construct
RGDKIET

SEQ ID NO: 23635 - protein, 7 aa, synthetic construct
RGDKIIT

SEQ ID NO: 23636 - protein, 7 aa, synthetic construct
RGDKKIH

SEQ ID NO: 23637 - protein, 7 aa, synthetic construct
RGDKLVN

SEQ ID NO: 23638 - protein, 7 aa, synthetic construct
RGDKNKD

SEQ ID NO: 23639 - protein, 7 aa, synthetic construct
RGDKQHE

SEQ ID NO: 23640 - protein, 7 aa, synthetic construct
RGDKQIR

SEQ ID NO: 23641 - protein, 7 aa, synthetic construct
RGDKRTG

SEQ ID NO: 23642 - protein, 7 aa, synthetic construct
RGDKSDH

SEQ ID NO: 23643 - protein, 7 aa, synthetic construct
RGDKSSE

SEQ ID NO: 23644 - protein, 7 aa, synthetic construct
RGDKTES

SEQ ID NO: 23645 - protein, 7 aa, synthetic construct
RGDKTGF

SEQ ID NO: 23646 - protein, 7 aa, synthetic construct
RGDLADG

SEQ ID NO: 23647 - protein, 7 aa, synthetic construct
RGDASAT

SEQ ID NO: 23648 - protein, 7 aa, synthetic construct
RGDLDLV

SEQ ID NO: 23649 - protein, 7 aa, synthetic construct
RGDLDNT

SEQ ID NO: 23650 - protein, 7 aa, synthetic construct
RGDLEIS

SEQ ID NO: 23651 - protein, 7 aa, synthetic construct
RGDLETT

SEQ ID NO: 23652 - protein, 7 aa, synthetic construct
RGDLFDV

SEQ ID NO: 23653 - protein, 7 aa, synthetic construct
RGDLFEL

SEQ ID NO: 23654 - protein, 7 aa, synthetic construct
RGDLFKQ

SEQ ID NO: 23655 - protein, 7 aa, synthetic construct
RGDLFSG

SEQ ID NO: 23656 - protein, 7 aa, synthetic construct
RGDLGAS

SEQ ID NO: 23657 - protein, 7 aa, synthetic construct
RGDLGII

SEQ ID NO: 23658 - protein, 7 aa, synthetic construct
RGDASLR

SEQ ID NO: 23659 - protein, 7 aa, synthetic construct
RGDLIFG

SEQ ID NO: 23660 - protein, 7 aa, synthetic construct
RGDLLAN

SEQ ID NO: 23661 - protein, 7 aa, synthetic construct
RGDLLNH

SEQ ID NO: 23662 - protein, 7 aa, synthetic construct
RGDLLRA

SEQ ID NO: 23663 - protein, 7 aa, synthetic construct
RGDLNEK

SEQ ID NO: 23664 - protein, 7 aa, synthetic construct
RGDLQDI

SEQ ID NO: 23665 - protein, 7 aa, synthetic construct
RGDLQER

SEQ ID NO: 23666 - protein, 7 aa, synthetic construct
RGDLQFK

SEQ ID NO: 23667 - protein, 7 aa, synthetic construct
RGDLQFS

SEQ ID NO: 23668 - protein, 7 aa, synthetic construct
RGDLQHD

SEQ ID NO: 23669 - protein, 7 aa, synthetic construct
RGDATAV

SEQ ID NO: 23670 - protein, 7 aa, synthetic construct
RGDLQRV

SEQ ID NO: 23671 - protein, 7 aa, synthetic construct
RGDLQTA

SEQ ID NO: 23672 - protein, 7 aa, synthetic construct
RGDLRIL

SEQ ID NO: 23673 - protein, 7 aa, synthetic construct
RGDLRTH

SEQ ID NO: 23674 - protein, 7 aa, synthetic construct
RGDLTAV

SEQ ID NO: 23675 - protein, 7 aa, synthetic construct
RGDLVHH

SEQ ID NO: 23676 - protein, 7 aa, synthetic construct
RGDLVIA

SEQ ID NO: 23677 - protein, 7 aa, synthetic construct
RGDNDGT

SEQ ID NO: 23678 - protein, 7 aa, synthetic construct
RGDNDHK

SEQ ID NO: 23679 - protein, 7 aa, synthetic construct
RGDNDIA

SEQ ID NO: 23680 - protein, 7 aa, synthetic construct
RGDADHL

SEQ ID NO: 23681 - protein, 7 aa, synthetic construct
RGDNERS

SEQ ID NO: 23682 - protein, 7 aa, synthetic construct
RGDNIHA

SEQ ID NO: 23683 - protein, 7 aa, synthetic construct
RGDNITA

SEQ ID NO: 23684 - protein, 7 aa, synthetic construct
RGDNLEV

SEQ ID NO: 23685 - protein, 7 aa, synthetic construct
RGDNLQN

SEQ ID NO: 23686 - protein, 7 aa, synthetic construct
RGDNNDT

SEQ ID NO: 23687 - protein, 7 aa, synthetic construct
RGDAVIK

SEQ ID NO: 23688 - protein, 7 aa, synthetic construct
RGDNNKS

SEQ ID NO: 23689 - protein, 7 aa, synthetic construct
RGDNQTR

SEQ ID NO: 23690 - protein, 7 aa, synthetic construct
RGDNRER

SEQ ID NO: 23691 - protein, 7 aa, synthetic construct
RGDAVRQ

SEQ ID NO: 23692 - protein, 7 aa, synthetic construct
RGDNVQR

SEQ ID NO: 23693 - protein, 7 aa, synthetic construct
RGDNVRH

SEQ ID NO: 23694 - protein, 7 aa, synthetic construct
RGDQAEV

SEQ ID NO: 23695 - protein, 7 aa, synthetic construct
RGDQDFV

SEQ ID NO: 23696 - protein, 7 aa, synthetic construct
RGDQDVI

SEQ ID NO: 23697 - protein, 7 aa, synthetic construct
RGDQDVV

SEQ ID NO: 23698 - protein, 7 aa, synthetic construct
RGDQEKR

SEQ ID NO: 23699 - protein, 7 aa, synthetic construct
RGDQELV

SEQ ID NO: 23700 - protein, 7 aa, synthetic construct
RGDQERT

SEQ ID NO: 23701 - protein, 7 aa, synthetic construct
RGDQFRD

SEQ ID NO: 23702 - protein, 7 aa, synthetic construct
RGDQFTT

SEQ ID NO: 23703 - protein, 7 aa, synthetic construct
RGDQGAF

SEQ ID NO: 23704 - protein, 7 aa, synthetic construct
RGDQGNT

SEQ ID NO: 23705 - protein, 7 aa, synthetic construct
RGDQHKG

SEQ ID NO: 23706 - protein, 7 aa, synthetic construct
RGDQIGK

SEQ ID NO: 23707 - protein, 7 aa, synthetic construct
RGDQIHR

SEQ ID NO: 23708 - protein, 7 aa, synthetic construct
RGDQLHL

SEQ ID NO: 23709 - protein, 7 aa, synthetic construct
RGDQQER

SEQ ID NO: 23710 - protein, 7 aa, synthetic construct
RGDQQLH

SEQ ID NO: 23711 - protein, 7 aa, synthetic construct
RGDQSEF

SEQ ID NO: 23712 - protein, 7 aa, synthetic construct
RGDQTAR

SEQ ID NO: 23713 - protein, 7 aa, synthetic construct
RGDRAHS

SEQ ID NO: 23714 - protein, 7 aa, synthetic construct
RGDREIF

SEQ ID NO: 23715 - protein, 7 aa, synthetic construct
RGDRFAH

SEQ ID NO: 23716 - protein, 7 aa, synthetic construct
RGDRFGD

SEQ ID NO: 23717 - protein, 7 aa, synthetic construct
RGDRFHA

SEQ ID NO: 23718 - protein, 7 aa, synthetic construct
RGDRFLQ

SEQ ID NO: 23719 - protein, 7 aa, synthetic construct
RGDRFSE

SEQ ID NO: 23720 - protein, 7 aa, synthetic construct
RGDRHIN

SEQ ID NO: 23721 - protein, 7 aa, synthetic construct
RGDRLSD

SEQ ID NO: 23722 - protein, 7 aa, synthetic construct
RGDRQFG

SEQ ID NO: 23723 - protein, 7 aa, synthetic construct
RGDDELT

SEQ ID NO: 23724 - protein, 7 aa, synthetic construct
RGDDEQQ

SEQ ID NO: 23725 - protein, 7 aa, synthetic construct
RGDDEQV

SEQ ID NO: 23726 - protein, 7 aa, synthetic construct
RGDRTEV

SEQ ID NO: 23727 - protein, 7 aa, synthetic construct
RGDSDEA

SEQ ID NO: 23728 - protein, 7 aa, synthetic construct
RGDSDGV

SEQ ID NO: 23729 - protein, 7 aa, synthetic construct
RGDSEFE

SEQ ID NO: 23730 - protein, 7 aa, synthetic construct
RGDSEKN

SEQ ID NO: 23731 - protein, 7 aa, synthetic construct
RGDDFFT

SEQ ID NO: 23732 - protein, 7 aa, synthetic construct
RGDSFHK

SEQ ID NO: 23733 - protein, 7 aa, synthetic construct
RGDSFSL

SEQ ID NO: 23734 - protein, 7 aa, synthetic construct
RGDSFVK

SEQ ID NO: 23735 - protein, 7 aa, synthetic construct
RGDDFKI

SEQ ID NO: 23736 - protein, 7 aa, synthetic construct
RGDSHFL

SEQ ID NO: 23737 - protein, 7 aa, synthetic construct
RGDSIAQ

SEQ ID NO: 23738 - protein, 7 aa, synthetic construct
RGDSIKE

SEQ ID NO: 23739 - protein, 7 aa, synthetic construct
RGDSITG

SEQ ID NO: 23740 - protein, 7 aa, synthetic construct
RGDSLDK

SEQ ID NO: 23741 - protein, 7 aa, synthetic construct
RGDSQEF

SEQ ID NO: 23742 - protein, 7 aa, synthetic construct
RGDSQNS

SEQ ID NO: 23743 - protein, 7 aa, synthetic construct
RGDSQSN

SEQ ID NO: 23744 - protein, 7 aa, synthetic construct
RGDSRDF

SEQ ID NO: 23745 - protein, 7 aa, synthetic construct
RGDSRFG

SEQ ID NO: 23746 - protein, 7 aa, synthetic construct
RGDSTQV

SEQ ID NO: 23747 - protein, 7 aa, synthetic construct
RGDSTVT

SEQ ID NO: 23748 - protein, 7 aa, synthetic construct
RGDSVGT

SEQ ID NO: 23749 - protein, 7 aa, synthetic construct
RGDDGIL

SEQ ID NO: 23750 - protein, 7 aa, synthetic construct
RGDSVTV

SEQ ID NO: 23751 - protein, 7 aa, synthetic construct
RGDTDTT

SEQ ID NO: 23752 - protein, 7 aa, synthetic construct
RGDTFQK

SEQ ID NO: 23753 - protein, 7 aa, synthetic construct
RGDTHFF

SEQ ID NO: 23754 - protein, 7 aa, synthetic construct
RGDTHHQ

SEQ ID NO: 23755 - protein, 7 aa, synthetic construct
RGDTIEN

SEQ ID NO: 23756 - protein, 7 aa, synthetic construct
RGDTINI

SEQ ID NO: 23757 - protein, 7 aa, synthetic construct
RGDDHEK

SEQ ID NO: 23758 - protein, 7 aa, synthetic construct
RGDTITN

SEQ ID NO: 23759 - protein, 7 aa, synthetic construct
RGDTKAF

SEQ ID NO: 23760 - protein, 7 aa, synthetic construct
RGDTKKG

SEQ ID NO: 23761 - protein, 7 aa, synthetic construct
RGDTKQS

SEQ ID NO: 23762 - protein, 7 aa, synthetic construct
RGDTLVH

SEQ ID NO: 23763 - protein, 7 aa, synthetic construct
RGDTNST

SEQ ID NO: 23764 - protein, 7 aa, synthetic construct
RGDTQFG

SEQ ID NO: 23765 - protein, 7 aa, synthetic construct
RGDTQKV

SEQ ID NO: 23766 - protein, 7 aa, synthetic construct
RGDTQSL

SEQ ID NO: 23767 - protein, 7 aa, synthetic construct
RGDTQVS

SEQ ID NO: 23768 - protein, 7 aa, synthetic construct
RGDTRHH

SEQ ID NO: 23769 - protein, 7 aa, synthetic construct
RGDTTGH

SEQ ID NO: 23770 - protein, 7 aa, synthetic construct
RGDTTRS

SEQ ID NO: 23771 - protein, 7 aa, synthetic construct
RGDTTVQ

SEQ ID NO: 23772 - protein, 7 aa, synthetic construct
RGDVAAQ

SEQ ID NO: 23773 - protein, 7 aa, synthetic construct
RGDVDET

SEQ ID NO: 23774 - protein, 7 aa, synthetic construct
RGDVDIL

SEQ ID NO: 23775 - protein, 7 aa, synthetic construct
RGDVEAE

SEQ ID NO: 23776 - protein, 7 aa, synthetic construct
RGDVETI

SEQ ID NO: 23777 - protein, 7 aa, synthetic construct
RGDVFGS

SEQ ID NO: 23778 - protein, 7 aa, synthetic construct
RGDVFVA

SEQ ID NO: 23779 - protein, 7 aa, synthetic construct
RGDVGKS

SEQ ID NO: 23780 - protein, 7 aa, synthetic construct
RGDVHEH

SEQ ID NO: 23781 - protein, 7 aa, synthetic construct
RGDVIAH

SEQ ID NO: 23782 - protein, 7 aa, synthetic construct
RGDVIAV

SEQ ID NO: 23783 - protein, 7 aa, synthetic construct
RGDVIGT

SEQ ID NO: 23784 - protein, 7 aa, synthetic construct
RGDVNVL

SEQ ID NO: 23785 - protein, 7 aa, synthetic construct
RGDVSAF

SEQ ID NO: 23786 - protein, 7 aa, synthetic construct
RGDVTGE

SEQ ID NO: 23787 - protein, 7 aa, synthetic construct
RGDVTTT

SEQ ID NO: 23788 - protein, 7 aa, synthetic construct
RGDVVNF

SEQ ID NO: 23789 - protein, 7 aa, synthetic construct
RGDDLGE

SEQ ID NO: 23790 - protein, 7 aa, synthetic construct
RGDDLGS

SEQ ID NO: 23791 - protein, 7 aa, synthetic construct
RGDDLKG

SEQ ID NO: 23792 - protein, 7 aa, synthetic construct
RGDDLSA

SEQ ID NO: 23793 - protein, 7 aa, synthetic construct
RGDDNGK

SEQ ID NO: 23794 - protein, 7 aa, synthetic construct
RGDAENR

SEQ ID NO: 23795 - protein, 7 aa, synthetic construct
RGDDRNG

SEQ ID NO: 23796 - protein, 7 aa, synthetic construct
RGDDRSF

SEQ ID NO: 23797 - protein, 7 aa, synthetic construct
RGDDTRH

SEQ ID NO: 23798 - protein, 7 aa, synthetic construct
RGDDTRV

SEQ ID NO: 23799 - protein, 7 aa, synthetic construct
RGDDVEE

SEQ ID NO: 23800 - protein, 7 aa, synthetic construct
RGDDVKG

SEQ ID NO: 23801 - protein, 7 aa, synthetic construct
RGDDVTV

SEQ ID NO: 23802 - protein, 7 aa, synthetic construct
RGDEAEL

SEQ ID NO: 23803 - protein, 7 aa, synthetic construct
RGDEAGT

SEQ ID NO: 23804 - protein, 7 aa, synthetic construct
RGDEAIN

SEQ ID NO: 23805 - protein, 7 aa, synthetic construct
RGDEARH

SEQ ID NO: 23806 - protein, 7 aa, synthetic construct
RGDEDRK

SEQ ID NO: 23807 - protein, 7 aa, synthetic construct
RGDEETF

SEQ ID NO: 23808 - protein, 7 aa, synthetic construct
RGDEGNA

SEQ ID NO: 23809 - protein, 7 aa, synthetic construct
RGDEHHK

SEQ ID NO: 23810 - protein, 7 aa, synthetic construct
RGDEHKN

SEQ ID NO: 23811 - protein, 7 aa, synthetic construct
RGDEHSH

SEQ ID NO: 23812 - protein, 7 aa, synthetic construct
RGDEIFF

SEQ ID NO: 23813 - protein, 7 aa, synthetic construct
RGDEKFE

SEQ ID NO: 23814 - protein, 7 aa, synthetic construct
RGDEKKH

SEQ ID NO: 23815 - protein, 7 aa, synthetic construct
RGDAFTK

SEQ ID NO: 23816 - protein, 7 aa, synthetic construct
RGDERHN

SEQ ID NO: 23817 - protein, 7 aa, synthetic construct
RGDESNA

SEQ ID NO: 23818 - protein, 7 aa, synthetic construct
RGDESVR

SEQ ID NO: 23819 - protein, 7 aa, synthetic construct
RGDEVNQ

SEQ ID NO: 23820 - protein, 7 aa, synthetic construct
RGDEVRF

SEQ ID NO: 23821 - protein, 7 aa, synthetic construct
RGDEVSH

SEQ ID NO: 23822 - protein, 7 aa, synthetic construct
RGDFAEK

SEQ ID NO: 23823 - protein, 7 aa, synthetic construct
RGDFDLS

SEQ ID NO: 23824 - protein, 7 aa, synthetic construct
RGDFEFD

SEQ ID NO: 23825 - protein, 7 aa, synthetic construct
RGDFFQL

SEQ ID NO: 23826 - protein, 7 aa, synthetic construct
RGDFGDS

SEQ ID NO: 23827 - protein, 7 aa, synthetic construct
RGDAGVF

SEQ ID NO: 23828 - protein, 7 aa, synthetic construct
RGDFGLS

SEQ ID NO: 23829 - protein, 7 aa, synthetic construct
RGDFGSE

SEQ ID NO: 23830 - protein, 7 aa, synthetic construct
RGDFHEF

SEQ ID NO: 23831 - protein, 7 aa, synthetic construct
RGDFHKF

SEQ ID NO: 23832 - protein, 7 aa, synthetic construct
RGDFIGQ

SEQ ID NO: 23833 - protein, 7 aa, synthetic construct
RGDFITN

SEQ ID NO: 23834 - protein, 7 aa, synthetic construct
RGDFKAE

SEQ ID NO: 23835 - protein, 7 aa, synthetic construct
RGDFKHE

SEQ ID NO: 23836 - protein, 7 aa, synthetic construct
RGDFLVN

SEQ ID NO: 23837 - protein, 7 aa, synthetic construct
RGDFNAV

SEQ ID NO: 23838 - protein, 7 aa, synthetic construct
RGDFSIS

SEQ ID NO: 23839 - protein, 7 aa, synthetic construct
RGDFSLH

SEQ ID NO: 23840 - protein, 7 aa, synthetic construct
RGDFSTD

SEQ ID NO: 23841 - protein, 7 aa, synthetic construct
RGDFSTH

SEQ ID NO: 23842 - protein, 7 aa, synthetic construct
RGDFSVS

SEQ ID NO: 23843 - protein, 7 aa, synthetic construct
RGDFTEF

SEQ ID NO: 23844 - protein, 7 aa, synthetic construct
RGDFTHD

SEQ ID NO: 23845 - protein, 7 aa, synthetic construct
RGDFVLT

SEQ ID NO: 23846 - protein, 7 aa, synthetic construct
RGDFVRL

SEQ ID NO: 23847 - protein, 7 aa, synthetic construct
RGDFVTL

SEQ ID NO: 23848 - protein, 7 aa, synthetic construct
RGDGDLF

SEQ ID NO: 23849 - protein, 7 aa, synthetic construct
RGDGDNH

SEQ ID NO: 23850 - protein, 7 aa, synthetic construct
RGDGEAH

SEQ ID NO: 23851 - protein, 7 aa, synthetic construct
RGDGEGG

SEQ ID NO: 23852 - protein, 7 aa, synthetic construct
RGDGENL

SEQ ID NO: 23853 - protein, 7 aa, synthetic construct
RGDAIHN

SEQ ID NO: 23854 - protein, 7 aa, synthetic construct
RGDGGHT

SEQ ID NO: 23855 - protein, 7 aa, synthetic construct
RGDGINH

SEQ ID NO: 23856 - protein, 7 aa, synthetic construct
RGDGLSG

SEQ ID NO: 23857 - protein, 7 aa, synthetic construct
RGDGNTE

SEQ ID NO: 23858 - protein, 7 aa, synthetic construct
RGDGQFK

SEQ ID NO: 23859 - protein, 7 aa, synthetic construct
RGDGRFE

SEQ ID NO: 23860 - protein, 7 aa, synthetic construct
RGDGRIE

SEQ ID NO: 23861 - protein, 7 aa, synthetic construct
RGDGSIR

SEQ ID NO: 23862 - protein, 7 aa, synthetic construct
RGDGSIS

SEQ ID NO: 23863 - protein, 7 aa, synthetic construct
RGDGSQN

SEQ ID NO: 23864 - protein, 7 aa, synthetic construct
RGDGTET

SEQ ID NO: 23865 - protein, 7 aa, synthetic construct
RGDHFHS

SEQ ID NO: 23866 - protein, 7 aa, synthetic construct
RGDHFQV

SEQ ID NO: 23867 - protein, 7 aa, synthetic construct
RGDHFTF

SEQ ID NO: 23868 - protein, 7 aa, synthetic construct
RGDHGHD

SEQ ID NO: 23869 - protein, 7 aa, synthetic construct
RGDAKVF

SEQ ID NO: 23870 - protein, 7 aa, synthetic construct
RGDHIQF

SEQ ID NO: 23871 - protein, 7 aa, synthetic construct
RGDHIVL

SEQ ID NO: 23872 - protein, 7 aa, synthetic construct
RGDHKAH

SEQ ID NO: 23873 - protein, 7 aa, synthetic construct
RGDHKSH

SEQ ID NO: 23874 - protein, 7 aa, synthetic construct
RGDHNLI

SEQ ID NO: 23875 - protein, 7 aa, synthetic construct
RGDHNQQ

SEQ ID NO: 23876 - protein, 7 aa, synthetic construct
RGDHQFA

SEQ ID NO: 23877 - protein, 7 aa, synthetic construct
RGDHQRH

SEQ ID NO: 23878 - protein, 7 aa, synthetic construct
RGDHSIQ

SEQ ID NO: 23879 - protein, 7 aa, synthetic construct
RGDHVSA

SEQ ID NO: 23880 - protein, 7 aa, synthetic construct
RGDIAQA

SEQ ID NO: 23881 - protein, 7 aa, synthetic construct
RGDIDFR

SEQ ID NO: 23882 - protein, 7 aa, synthetic construct
RGDIDGV

SEQ ID NO: 23883 - protein, 7 aa, synthetic construct
RGDIDRN

SEQ ID NO: 23884 - protein, 7 aa, synthetic construct
RGDIDSN

SEQ ID NO: 23885 - protein, 7 aa, synthetic construct
RGDANHI

SEQ ID NO: 23886 - protein, 7 aa, synthetic construct
RGDIHEK

SEQ ID NO: 23887 - protein, 7 aa, synthetic construct
RGDIHFI

SEQ ID NO: 23888 - protein, 7 aa, synthetic construct
RGDANNF

SEQ ID NO: 23889 - protein, 7 aa, synthetic construct
RGDIIFA

SEQ ID NO: 23890 - protein, 7 aa, synthetic construct
RGDIINL

SEQ ID NO: 23891 - protein, 7 aa, synthetic construct
RGDANSK

SEQ ID NO: 23892 - protein, 7 aa, synthetic construct
RGDINIS

SEQ ID NO: 23893 - protein, 7 aa, synthetic construct
RGDIQFE

SEQ ID NO: 23894 - protein, 7 aa, synthetic construct
RGDIRRT

SEQ ID NO: 23895 - protein, 7 aa, synthetic construct
RGDISDQ

SEQ ID NO: 23896 - protein, 7 aa, synthetic construct
RGDISFL

SEQ ID NO: 23897 - protein, 7 aa, synthetic construct
RGDKDIQ

SEQ ID NO: 23898 - protein, 7 aa, synthetic construct
RGDKEFT

SEQ ID NO: 23899 - protein, 7 aa, synthetic construct
RGDKFAF

SEQ ID NO: 23900 - protein, 7 aa, synthetic construct
RGDKFNE

SEQ ID NO: 23901 - protein, 7 aa, synthetic construct
RGDKGKF

SEQ ID NO: 23902 - protein, 7 aa, synthetic construct
RGDKIRT

SEQ ID NO: 23903 - protein, 7 aa, synthetic construct
RGDKKSG

SEQ ID NO: 23904 - protein, 7 aa, synthetic construct
RGDADEA

SEQ ID NO: 23905 - protein, 7 aa, synthetic construct
RGDKNIQ

SEQ ID NO: 23906 - protein, 7 aa, synthetic construct
RGDKNRD

SEQ ID NO: 23907 - protein, 7 aa, synthetic construct
RGDKQNT

SEQ ID NO: 23908 - protein, 7 aa, synthetic construct
RGDKRDL

SEQ ID NO: 23909 - protein, 7 aa, synthetic construct
RGDARRI

SEQ ID NO: 23910 - protein, 7 aa, synthetic construct
RGDKSRR

SEQ ID NO: 23911 - protein, 7 aa, synthetic construct
RGDKTAG

SEQ ID NO: 23912 - protein, 7 aa, synthetic construct
RGDKTKE

SEQ ID NO: 23913 - protein, 7 aa, synthetic construct
RGDKTNL

SEQ ID NO: 23914 - protein, 7 aa, synthetic construct
RGDKTQF

SEQ ID NO: 23915 - protein, 7 aa, synthetic construct
RGDKVTS

SEQ ID NO: 23916 - protein, 7 aa, synthetic construct
RGDASDG

SEQ ID NO: 23917 - protein, 7 aa, synthetic construct
RGDLDHN

SEQ ID NO: 23918 - protein, 7 aa, synthetic construct
RGDASEH

SEQ ID NO: 23919 - protein, 7 aa, synthetic construct
RGDLDNV

SEQ ID NO: 23920 - protein, 7 aa, synthetic construct
RGDLFDT

SEQ ID NO: 23921 - protein, 7 aa, synthetic construct
RGDASHH

SEQ ID NO: 23922 - protein, 7 aa, synthetic construct
RGDASHL

SEQ ID NO: 23923 - protein, 7 aa, synthetic construct
RGDLFVV

SEQ ID NO: 23924 - protein, 7 aa, synthetic construct
RGDLGFI

SEQ ID NO: 23925 - protein, 7 aa, synthetic construct
RGDLGKF

SEQ ID NO: 23926 - protein, 7 aa, synthetic construct
RGDASLL

SEQ ID NO: 23927 - protein, 7 aa, synthetic construct
RGDLHTR

SEQ ID NO: 23928 - protein, 7 aa, synthetic construct
RGDLISG

SEQ ID NO: 23929 - protein, 7 aa, synthetic construct
RGDADGD

SEQ ID NO: 23930 - protein, 7 aa, synthetic construct
RGDLLGR

SEQ ID NO: 23931 - protein, 7 aa, synthetic construct
RGDLLQD

SEQ ID NO: 23932 - protein, 7 aa, synthetic construct
RGDASTN

SEQ ID NO: 23933 - protein, 7 aa, synthetic construct
RGDLSHE

SEQ ID NO: 23934 - protein, 7 aa, synthetic construct
RGDLTQN

SEQ ID NO: 23935 - protein, 7 aa, synthetic construct
RGDLTRS

SEQ ID NO: 23936 - protein, 7 aa, synthetic construct
RGDLTSA

SEQ ID NO: 23937 - protein, 7 aa, synthetic construct
RGDLVKG

SEQ ID NO: 23938 - protein, 7 aa, synthetic construct
RGDNARR

SEQ ID NO: 23939 - protein, 7 aa, synthetic construct
RGDNDFG

SEQ ID NO: 23940 - protein, 7 aa, synthetic construct
RGDNDTA

SEQ ID NO: 23941 - protein, 7 aa, synthetic construct
RGDNDVL

SEQ ID NO: 23942 - protein, 7 aa, synthetic construct
RGDNEAI

SEQ ID NO: 23943 - protein, 7 aa, synthetic construct
RGDNEFR

SEQ ID NO: 23944 - protein, 7 aa, synthetic construct
RGDNEQI

SEQ ID NO: 23945 - protein, 7 aa, synthetic construct
RGDNFFH

SEQ ID NO: 23946 - protein, 7 aa, synthetic construct
RGDNHKE

SEQ ID NO: 23947 - protein, 7 aa, synthetic construct
RGDNHKG

SEQ ID NO: 23948 - protein, 7 aa, synthetic construct
RGDNLEF

SEQ ID NO: 23949 - protein, 7 aa, synthetic construct
RGDNLGS

SEQ ID NO: 23950 - protein, 7 aa, synthetic construct
RGDNLSL

SEQ ID NO: 23951 - protein, 7 aa, synthetic construct
RGDNRRH

SEQ ID NO: 23952 - protein, 7 aa, synthetic construct
RGDNSNL

SEQ ID NO: 23953 - protein, 7 aa, synthetic construct
RGDNTAI

SEQ ID NO: 23954 - protein, 7 aa, synthetic construct
RGDAVSS

SEQ ID NO: 23955 - protein, 7 aa, synthetic construct
RGDNTTL

SEQ ID NO: 23956 - protein, 7 aa, synthetic construct
RGDQDNT

SEQ ID NO: 23957 - protein, 7 aa, synthetic construct
RGDQEFL

SEQ ID NO: 23958 - protein, 7 aa, synthetic construct
RGDQFVF

SEQ ID NO: 23959 - protein, 7 aa, synthetic construct
RGDQHQA

SEQ ID NO: 23960 - protein, 7 aa, synthetic construct
RGDQIFN

SEQ ID NO: 23961 - protein, 7 aa, synthetic construct
RGDQLAF

SEQ ID NO: 23962 - protein, 7 aa, synthetic construct
RGDQLGF

SEQ ID NO: 23963 - protein, 7 aa, synthetic construct
RGDQLNN

SEQ ID NO: 23964 - protein, 7 aa, synthetic construct
RGDQNVF

SEQ ID NO: 23965 - protein, 7 aa, synthetic construct
RGDQNVK

SEQ ID NO: 23966 - protein, 7 aa, synthetic construct
RGDQQRT

SEQ ID NO: 23967 - protein, 7 aa, synthetic construct
RGDQRAS

SEQ ID NO: 23968 - protein, 7 aa, synthetic construct
RGDQRLA

SEQ ID NO: 23969 - protein, 7 aa, synthetic construct
RGDQRVD

SEQ ID NO: 23970 - protein, 7 aa, synthetic construct
RGDQSDQ

SEQ ID NO: 23971 - protein, 7 aa, synthetic construct
RGDDDFI

SEQ ID NO: 23972 - protein, 7 aa, synthetic construct
RGDQTLK

SEQ ID NO: 23973 - protein, 7 aa, synthetic construct
RGDQTVS

SEQ ID NO: 23974 - protein, 7 aa, synthetic construct
RGDRARD

SEQ ID NO: 23975 - protein, 7 aa, synthetic construct
RGDRDGV

SEQ ID NO: 23976 - protein, 7 aa, synthetic construct
RGDRDHE

SEQ ID NO: 23977 - protein, 7 aa, synthetic construct
RGDDDNK

SEQ ID NO: 23978 - protein, 7 aa, synthetic construct
RGDRDLR

SEQ ID NO: 23979 - protein, 7 aa, synthetic construct
RGDDDSI

SEQ ID NO: 23980 - protein, 7 aa, synthetic construct
RGDRFIH

SEQ ID NO: 23981 - protein, 7 aa, synthetic construct
RGDRFVH

SEQ ID NO: 23982 - protein, 7 aa, synthetic construct
RGDRHGQ

SEQ ID NO: 23983 - protein, 7 aa, synthetic construct
RGDRHVG

SEQ ID NO: 23984 - protein, 7 aa, synthetic construct
RGDRIFF

SEQ ID NO: 23985 - protein, 7 aa, synthetic construct
RGDRILF

SEQ ID NO: 23986 - protein, 7 aa, synthetic construct
RGDRIRF

SEQ ID NO: 23987 - protein, 7 aa, synthetic construct
RGDRLLS

SEQ ID NO: 23988 - protein, 7 aa, synthetic construct
RGDRQVD

SEQ ID NO: 23989 - protein, 7 aa, synthetic construct
RGDRRGH

SEQ ID NO: 23990 - protein, 7 aa, synthetic construct
RGDRVAA

SEQ ID NO: 23991 - protein, 7 aa, synthetic construct
RGDDFEK

SEQ ID NO: 23992 - protein, 7 aa, synthetic construct
RGDSENV

SEQ ID NO: 23993 - protein, 7 aa, synthetic construct
RGDSLAQ

SEQ ID NO: 23994 - protein, 7 aa, synthetic construct
RGDSLDT

SEQ ID NO: 23995 - protein, 7 aa, synthetic construct
RGDSNVA

SEQ ID NO: 23996 - protein, 7 aa, synthetic construct
RGDSQEI

SEQ ID NO: 23997 - protein, 7 aa, synthetic construct
RGDSQGF

SEQ ID NO: 23998 - protein, 7 aa, synthetic construct
RGDSRDQ

SEQ ID NO: 23999 - protein, 7 aa, synthetic construct
RGDSSDI

SEQ ID NO: 24000 - protein, 7 aa, synthetic construct
RGDSSED

SEQ ID NO: 24001 - protein, 7 aa, synthetic construct
RGDDGHL

SEQ ID NO: 24002 - protein, 7 aa, synthetic construct
RGDSTSS

SEQ ID NO: 24003 - protein, 7 aa, synthetic construct
RGDSVLL

SEQ ID NO: 24004 - protein, 7 aa, synthetic construct
RGDTAIT

SEQ ID NO: 24005 - protein, 7 aa, synthetic construct
RGDTEHI

SEQ ID NO: 24006 - protein, 7 aa, synthetic construct
RGDTFFE

SEQ ID NO: 24007 - protein, 7 aa, synthetic construct
RGDTGAE

SEQ ID NO: 24008 - protein, 7 aa, synthetic construct
RGDDHAA

SEQ ID NO: 24009 - protein, 7 aa, synthetic construct
RGDTHEK

SEQ ID NO: 24010 - protein, 7 aa, synthetic construct
RGDTHGI

SEQ ID NO: 24011 - protein, 7 aa, synthetic construct
RGDTHIA

SEQ ID NO: 24012 - protein, 7 aa, synthetic construct
RGDTIRV

SEQ ID NO: 24013 - protein, 7 aa, synthetic construct
RGDTKLE

SEQ ID NO: 24014 - protein, 7 aa, synthetic construct
RGDTKNA

SEQ ID NO: 24015 - protein, 7 aa, synthetic construct
RGDTLFQ

SEQ ID NO: 24016 - protein, 7 aa, synthetic construct
RGDTLKG

SEQ ID NO: 24017 - protein, 7 aa, synthetic construct
RGDTLLE

SEQ ID NO: 24018 - protein, 7 aa, synthetic construct
RGDTLLT

SEQ ID NO: 24019 - protein, 7 aa, synthetic construct
RGDTQDG

SEQ ID NO: 24020 - protein, 7 aa, synthetic construct
RGDTQTF

SEQ ID NO: 24021 - protein, 7 aa, synthetic construct
RGDTSKH

SEQ ID NO: 24022 - protein, 7 aa, synthetic construct
RGDTTNV

SEQ ID NO: 24023 - protein, 7 aa, synthetic construct
RGDTVAH

SEQ ID NO: 24024 - protein, 7 aa, synthetic construct
RGDVAEL

SEQ ID NO: 24025 - protein, 7 aa, synthetic construct
RGDVAFL

SEQ ID NO: 24026 - protein, 7 aa, synthetic construct
RGDVAGG

SEQ ID NO: 24027 - protein, 7 aa, synthetic construct
RGDVDRH

SEQ ID NO: 24028 - protein, 7 aa, synthetic construct
RGDVDTS

SEQ ID NO: 24029 - protein, 7 aa, synthetic construct
RGDVESA

SEQ ID NO: 24030 - protein, 7 aa, synthetic construct
RGDVESD

SEQ ID NO: 24031 - protein, 7 aa, synthetic construct
RGDVEVV

SEQ ID NO: 24032 - protein, 7 aa, synthetic construct
RGDVFRQ

SEQ ID NO: 24033 - protein, 7 aa, synthetic construct
RGDVIAR

SEQ ID NO: 24034 - protein, 7 aa, synthetic construct
RGDVIDR

SEQ ID NO: 24035 - protein, 7 aa, synthetic construct
RGDVLEF

SEQ ID NO: 24036 - protein, 7 aa, synthetic construct
RGDVLSL

SEQ ID NO: 24037 - protein, 7 aa, synthetic construct
RGDVLVR

SEQ ID NO: 24038 - protein, 7 aa, synthetic construct
RGDVNGR

SEQ ID NO: 24039 - protein, 7 aa, synthetic construct
RGDVNHN

SEQ ID NO: 24040 - protein, 7 aa, synthetic construct
RGDVNSD

SEQ ID NO: 24041 - protein, 7 aa, synthetic construct
RGDVNVH

SEQ ID NO: 24042 - protein, 7 aa, synthetic construct
RGDVQHD

SEQ ID NO: 24043 - protein, 7 aa, synthetic construct
RGDVQNV

SEQ ID NO: 24044 - protein, 7 aa, synthetic construct
RGDVQQV

SEQ ID NO: 24045 - protein, 7 aa, synthetic construct
RGDVQRE

SEQ ID NO: 24046 - protein, 7 aa, synthetic construct
RGDVQST

SEQ ID NO: 24047 - protein, 7 aa, synthetic construct
RGDDKEK

SEQ ID NO: 24048 - protein, 7 aa, synthetic construct
RGDVSIE

SEQ ID NO: 24049 - protein, 7 aa, synthetic construct
RGDVSIL

SEQ ID NO: 24050 - protein, 7 aa, synthetic construct
RGDVVSH

SEQ ID NO: 24051 - protein, 7 aa, synthetic construct
RGDDKTL

SEQ ID NO: 24052 - protein, 7 aa, synthetic construct
RGDDNGE

SEQ ID NO: 24053 - protein, 7 aa, synthetic construct
RGDDNHD

SEQ ID NO: 24054 - protein, 7 aa, synthetic construct
RGDAEIN

SEQ ID NO: 24055 - protein, 7 aa, synthetic construct
RGDAENN

SEQ ID NO: 24056 - protein, 7 aa, synthetic construct
RGDDSNV

SEQ ID NO: 24057 - protein, 7 aa, synthetic construct
RGDDVAQ

SEQ ID NO: 24058 - protein, 7 aa, synthetic construct
RGDEADR

SEQ ID NO: 24059 - protein, 7 aa, synthetic construct
RGDEAKK

SEQ ID NO: 24060 - protein, 7 aa, synthetic construct
RGDEEIN

SEQ ID NO: 24061 - protein, 7 aa, synthetic construct
RGDEGII

SEQ ID NO: 24062 - protein, 7 aa, synthetic construct
RGDEHAH

SEQ ID NO: 24063 - protein, 7 aa, synthetic construct
RGDEIFS

SEQ ID NO: 24064 - protein, 7 aa, synthetic construct
RGDEIQT

SEQ ID NO: 24065 - protein, 7 aa, synthetic construct
RGDEIVR

SEQ ID NO: 24066 - protein, 7 aa, synthetic construct
RGDEKNK

SEQ ID NO: 24067 - protein, 7 aa, synthetic construct
RGDEKQE

SEQ ID NO: 24068 - protein, 7 aa, synthetic construct
RGDEKSL

SEQ ID NO: 24069 - protein, 7 aa, synthetic construct
RGDELLR

SEQ ID NO: 24070 - protein, 7 aa, synthetic construct
RGDELTS

SEQ ID NO: 24071 - protein, 7 aa, synthetic construct
RGDENLQ

SEQ ID NO: 24072 - protein, 7 aa, synthetic construct
RGDEQFS

SEQ ID NO: 24073 - protein, 7 aa, synthetic construct
RGDEQLE

SEQ ID NO: 24074 - protein, 7 aa, synthetic construct
RGDERVK

SEQ ID NO: 24075 - protein, 7 aa, synthetic construct
RGDESLQ

SEQ ID NO: 24076 - protein, 7 aa, synthetic construct
RGDESSE

SEQ ID NO: 24077 - protein, 7 aa, synthetic construct
RGDAAIQ

SEQ ID NO: 24078 - protein, 7 aa, synthetic construct
RGDFAVD

SEQ ID NO: 24079 - protein, 7 aa, synthetic construct
RGDFDGA

SEQ ID NO: 24080 - protein, 7 aa, synthetic construct
RGDFEAS

SEQ ID NO: 24081 - protein, 7 aa, synthetic construct
RGDFEII

SEQ ID NO: 24082 - protein, 7 aa, synthetic construct
RGDFERN

SEQ ID NO: 24083 - protein, 7 aa, synthetic construct
RGDFGTF

SEQ ID NO: 24084 - protein, 7 aa, synthetic construct
RGDFISA

SEQ ID NO: 24085 - protein, 7 aa, synthetic construct
RGDFKAD

SEQ ID NO: 24086 - protein, 7 aa, synthetic construct
RGDFKQS

SEQ ID NO: 24087 - protein, 7 aa, synthetic construct
RGDFNGA

SEQ ID NO: 24088 - protein, 7 aa, synthetic construct
RGDFQHL

SEQ ID NO: 24089 - protein, 7 aa, synthetic construct
RGDFQQS

SEQ ID NO: 24090 - protein, 7 aa, synthetic construct
RGDAHQI

SEQ ID NO: 24091 - protein, 7 aa, synthetic construct
RGDAHRN

SEQ ID NO: 24092 - protein, 7 aa, synthetic construct
RGDFTIV

SEQ ID NO: 24093 - protein, 7 aa, synthetic construct
RGDFTLH

SEQ ID NO: 24094 - protein, 7 aa, synthetic construct
RGDGEIG

SEQ ID NO: 24095 - protein, 7 aa, synthetic construct
RGDAIGI

SEQ ID NO: 24096 - protein, 7 aa, synthetic construct
RGDGFFH

SEQ ID NO: 24097 - protein, 7 aa, synthetic construct
RGDGFHN

SEQ ID NO: 24098 - protein, 7 aa, synthetic construct
RGDGGAS

SEQ ID NO: 24099 - protein, 7 aa, synthetic construct
RGDGGFF

SEQ ID NO: 24100 - protein, 7 aa, synthetic construct
RGDGGQN

SEQ ID NO: 24101 - protein, 7 aa, synthetic construct
RGDGGTV

SEQ ID NO: 24102 - protein, 7 aa, synthetic construct
RGDGHAL

SEQ ID NO: 24103 - protein, 7 aa, synthetic construct
RGDGHLV

SEQ ID NO: 24104 - protein, 7 aa, synthetic construct
RGDAANS

SEQ ID NO: 24105 - protein, 7 aa, synthetic construct
RGDAIQD

SEQ ID NO: 24106 - protein, 7 aa, synthetic construct
RGDGLKT

SEQ ID NO: 24107 - protein, 7 aa, synthetic construct
RGDGNQG

SEQ ID NO: 24108 - protein, 7 aa, synthetic construct
RGDGNVG

SEQ ID NO: 24109 - protein, 7 aa, synthetic construct
RGDGQTA

SEQ ID NO: 24110 - protein, 7 aa, synthetic construct
RGDGQVV

SEQ ID NO: 24111 - protein, 7 aa, synthetic construct
RGDGRFN

SEQ ID NO: 24112 - protein, 7 aa, synthetic construct
RGDGRKH

SEQ ID NO: 24113 - protein, 7 aa, synthetic construct
RGDGRTE

SEQ ID NO: 24114 - protein, 7 aa, synthetic construct
RGDGSDQ

SEQ ID NO: 24115 - protein, 7 aa, synthetic construct
RGDGSEI

SEQ ID NO: 24116 - protein, 7 aa, synthetic construct
RGDGSFL

SEQ ID NO: 24117 - protein, 7 aa, synthetic construct
RGDGSLF

SEQ ID NO: 24118 - protein, 7 aa, synthetic construct
RGDGSNA

SEQ ID NO: 24119 - protein, 7 aa, synthetic construct
RGDGTNL

SEQ ID NO: 24120 - protein, 7 aa, synthetic construct
RGDGVDI

SEQ ID NO: 24121 - protein, 7 aa, synthetic construct
RGDGVTN

SEQ ID NO: 24122 - protein, 7 aa, synthetic construct
RGDHAHI

SEQ ID NO: 24123 - protein, 7 aa, synthetic construct
RGDHDIS

SEQ ID NO: 24124 - protein, 7 aa, synthetic construct
RGDHDRN

SEQ ID NO: 24125 - protein, 7 aa, synthetic construct
RGDHEIV

SEQ ID NO: 24126 - protein, 7 aa, synthetic construct
RGDAKSQ

SEQ ID NO: 24127 - protein, 7 aa, synthetic construct
RGDHGQH

SEQ ID NO: 24128 - protein, 7 aa, synthetic construct
RGDHHSH

SEQ ID NO: 24129 - protein, 7 aa, synthetic construct
RGDHINQ

SEQ ID NO: 24130 - protein, 7 aa, synthetic construct
RGDHITA

SEQ ID NO: 24131 - protein, 7 aa, synthetic construct
RGDHLRA

SEQ ID NO: 24132 - protein, 7 aa, synthetic construct
RGDHQKA

SEQ ID NO: 24133 - protein, 7 aa, synthetic construct
RGDHRES

SEQ ID NO: 24134 - protein, 7 aa, synthetic construct
RGDIEHL

SEQ ID NO: 24135 - protein, 7 aa, synthetic construct
RGDIETK

SEQ ID NO: 24136 - protein, 7 aa, synthetic construct
RGDIFFT

SEQ ID NO: 24137 - protein, 7 aa, synthetic construct
RGDIGIQ

SEQ ID NO: 24138 - protein, 7 aa, synthetic construct
RGDIGSH

SEQ ID NO: 24139 - protein, 7 aa, synthetic construct
RGDIHIQ

SEQ ID NO: 24140 - protein, 7 aa, synthetic construct
RGDIHRR

SEQ ID NO: 24141 - protein, 7 aa, synthetic construct
RGDIITF

SEQ ID NO: 24142 - protein, 7 aa, synthetic construct
RGDIKDR

SEQ ID NO: 24143 - protein, 7 aa, synthetic construct
RGDIKLH

SEQ ID NO: 24144 - protein, 7 aa, synthetic construct
RGDINEK

SEQ ID NO: 24145 - protein, 7 aa, synthetic construct
RGDINIK

SEQ ID NO: 24146 - protein, 7 aa, synthetic construct
RGDIQHF

SEQ ID NO: 24147 - protein, 7 aa, synthetic construct
RGDAQGV

SEQ ID NO: 24148 - protein, 7 aa, synthetic construct
RGDITVH

SEQ ID NO: 24149 - protein, 7 aa, synthetic construct
RGDKAFN

SEQ ID NO: 24150 - protein, 7 aa, synthetic construct
RGDKAQF

SEQ ID NO: 24151 - protein, 7 aa, synthetic construct
RGDKDVT

SEQ ID NO: 24152 - protein, 7 aa, synthetic construct
RGDKEKT

SEQ ID NO: 24153 - protein, 7 aa, synthetic construct
RGDKERQ

SEQ ID NO: 24154 - protein, 7 aa, synthetic construct
RGDKFAQ

SEQ ID NO: 24155 - protein, 7 aa, synthetic construct
RGDAREG

SEQ ID NO: 24156 - protein, 7 aa, synthetic construct
RGDKLDR

SEQ ID NO: 24157 - protein, 7 aa, synthetic construct
RGDKLGA

SEQ ID NO: 24158 - protein, 7 aa, synthetic construct
RGDKNIK

SEQ ID NO: 24159 - protein, 7 aa, synthetic construct
RGDKQIQ

SEQ ID NO: 24160 - protein, 7 aa, synthetic construct
RGDKSEL

SEQ ID NO: 24161 - protein, 7 aa, synthetic construct
RGDARSA

SEQ ID NO: 24162 - protein, 7 aa, synthetic construct
RGDKTDV

SEQ ID NO: 24163 - protein, 7 aa, synthetic construct
RGDKTHD

SEQ ID NO: 24164 - protein, 7 aa, synthetic construct
RGDKTIV

SEQ ID NO: 24165 - protein, 7 aa, synthetic construct
RGDKTQE

SEQ ID NO: 24166 - protein, 7 aa, synthetic construct
RGDKVRG

SEQ ID NO: 24167 - protein, 7 aa, synthetic construct
RGDLAFF

SEQ ID NO: 24168 - protein, 7 aa, synthetic construct
RGDLEDT

SEQ ID NO: 24169 - protein, 7 aa, synthetic construct
RGDLEND

SEQ ID NO: 24170 - protein, 7 aa, synthetic construct
RGDLEQS

SEQ ID NO: 24171 - protein, 7 aa, synthetic construct
RGDLERI

SEQ ID NO: 24172 - protein, 7 aa, synthetic construct
RGDLESH

SEQ ID NO: 24173 - protein, 7 aa, synthetic construct
RGDLFFV

SEQ ID NO: 24174 - protein, 7 aa, synthetic construct
RGDLGSQ

SEQ ID NO: 24175 - protein, 7 aa, synthetic construct
RGDLHHA

SEQ ID NO: 24176 - protein, 7 aa, synthetic construct
RGDLHIR

SEQ ID NO: 24177 - protein, 7 aa, synthetic construct
RGDLIIF

SEQ ID NO: 24178 - protein, 7 aa, synthetic construct
RGDLITH

SEQ ID NO: 24179 - protein, 7 aa, synthetic construct
RGDLKAF

SEQ ID NO: 24180 - protein, 7 aa, synthetic construct
RGDLKAG

SEQ ID NO: 24181 - protein, 7 aa, synthetic construct
RGDLKAS

SEQ ID NO: 24182 - protein, 7 aa, synthetic construct
RGDLKGF

SEQ ID NO: 24183 - protein, 7 aa, synthetic construct
RGDLLFI

SEQ ID NO: 24184 - protein, 7 aa, synthetic construct
RGDASSH

SEQ ID NO: 24185 - protein, 7 aa, synthetic construct
RGDLLNE

SEQ ID NO: 24186 - protein, 7 aa, synthetic construct
RGDLNKF

SEQ ID NO: 24187 - protein, 7 aa, synthetic construct
RGDLQKH

SEQ ID NO: 24188 - protein, 7 aa, synthetic construct
RGDLQSQ

SEQ ID NO: 24189 - protein, 7 aa, synthetic construct
RGDLSGQ

SEQ ID NO: 24190 - protein, 7 aa, synthetic construct
RGDATGQ

SEQ ID NO: 24191 - protein, 7 aa, synthetic construct
RGDLTQQ

SEQ ID NO: 24192 - protein, 7 aa, synthetic construct
RGDNAAR

SEQ ID NO: 24193 - protein, 7 aa, synthetic construct
RGDNAGG

SEQ ID NO: 24194 - protein, 7 aa, synthetic construct
RGDNAIV

SEQ ID NO: 24195 - protein, 7 aa, synthetic construct
RGDNDGK

SEQ ID NO: 24196 - protein, 7 aa, synthetic construct
RGDNDHI

SEQ ID NO: 24197 - protein, 7 aa, synthetic construct
RGDNDHV

SEQ ID NO: 24198 - protein, 7 aa, synthetic construct
RGDNEDQ

SEQ ID NO: 24199 - protein, 7 aa, synthetic construct
RGDATRD

SEQ ID NO: 24200 - protein, 7 aa, synthetic construct
RGDNFGT

SEQ ID NO: 24201 - protein, 7 aa, synthetic construct
RGDNFRD

SEQ ID NO: 24202 - protein, 7 aa, synthetic construct
RGDNGRG

SEQ ID NO: 24203 - protein, 7 aa, synthetic construct
RGDNGVN

SEQ ID NO: 24204 - protein, 7 aa, synthetic construct
RGDNHDF

SEQ ID NO: 24205 - protein, 7 aa, synthetic construct
RGDNIRQ

SEQ ID NO: 24206 - protein, 7 aa, synthetic construct
RGDNKVL

SEQ ID NO: 24207 - protein, 7 aa, synthetic construct
RGDNLKD

SEQ ID NO: 24208 - protein, 7 aa, synthetic construct
RGDNLRD

SEQ ID NO: 24209 - protein, 7 aa, synthetic construct
RGDNQFA

SEQ ID NO: 24210 - protein, 7 aa, synthetic construct
RGDNSAE

SEQ ID NO: 24211 - protein, 7 aa, synthetic construct
RGDNSDD

SEQ ID NO: 24212 - protein, 7 aa, synthetic construct
RGDNSFI

SEQ ID NO: 24213 - protein, 7 aa, synthetic construct
RGDAVSN

SEQ ID NO: 24214 - protein, 7 aa, synthetic construct
RGDNTNF

SEQ ID NO: 24215 - protein, 7 aa, synthetic construct
RGDNTVE

SEQ ID NO: 24216 - protein, 7 aa, synthetic construct
RGDAVTV

SEQ ID NO: 24217 - protein, 7 aa, synthetic construct
RGDAVVT

SEQ ID NO: 24218 - protein, 7 aa, synthetic construct
RGDQAAQ

SEQ ID NO: 24219 - protein, 7 aa, synthetic construct
RGDQAFL

SEQ ID NO: 24220 - protein, 7 aa, synthetic construct
RGDQDDG

SEQ ID NO: 24221 - protein, 7 aa, synthetic construct
RGDQDHI

SEQ ID NO: 24222 - protein, 7 aa, synthetic construct
RGDQEHN

SEQ ID NO: 24223 - protein, 7 aa, synthetic construct
RGDQFGI

SEQ ID NO: 24224 - protein, 7 aa, synthetic construct
RGDQGTA

SEQ ID NO: 24225 - protein, 7 aa, synthetic construct
RGDADLG

SEQ ID NO: 24226 - protein, 7 aa, synthetic construct
RGDQHNG

SEQ ID NO: 24227 - protein, 7 aa, synthetic construct
RGDQIHV

SEQ ID NO: 24228 - protein, 7 aa, synthetic construct
RGDQIVR

SEQ ID NO: 24229 - protein, 7 aa, synthetic construct
RGDQKQE

SEQ ID NO: 24230 - protein, 7 aa, synthetic construct
RGDQLGT

SEQ ID NO: 24231 - protein, 7 aa, synthetic construct
RGDQLKA

SEQ ID NO: 24232 - protein, 7 aa, synthetic construct
RGDQQHF

SEQ ID NO: 24233 - protein, 7 aa, synthetic construct
RGDQVEH

SEQ ID NO: 24234 - protein, 7 aa, synthetic construct
RGDQVEK

SEQ ID NO: 24235 - protein, 7 aa, synthetic construct
RGDRDAD

SEQ ID NO: 24236 - protein, 7 aa, synthetic construct
RGDRDEN

SEQ ID NO: 24237 - protein, 7 aa, synthetic construct
RGDDDNS

SEQ ID NO: 24238 - protein, 7 aa, synthetic construct
RGDRGQE

SEQ ID NO: 24239 - protein, 7 aa, synthetic construct
RGDDEDG

SEQ ID NO: 24240 - protein, 7 aa, synthetic construct
RGDDEEE

SEQ ID NO: 24241 - protein, 7 aa, synthetic construct
RGDDEIQ

SEQ ID NO: 24242 - protein, 7 aa, synthetic construct
RGDDEKN

SEQ ID NO: 24243 - protein, 7 aa, synthetic construct
RGDRQEE

SEQ ID NO: 24244 - protein, 7 aa, synthetic construct
RGDADRG

SEQ ID NO: 24245 - protein, 7 aa, synthetic construct
RGDDEQD

SEQ ID NO: 24246 - protein, 7 aa, synthetic construct
RGDRTET

SEQ ID NO: 24247 - protein, 7 aa, synthetic construct
RGDRTRA

SEQ ID NO: 24248 - protein, 7 aa, synthetic construct
RGDRVGE

SEQ ID NO: 24249 - protein, 7 aa, synthetic construct
RGDRVIG

SEQ ID NO: 24250 - protein, 7 aa, synthetic construct
RGDRVSS

SEQ ID NO: 24251 - protein, 7 aa, synthetic construct
RGDSADK

SEQ ID NO: 24252 - protein, 7 aa, synthetic construct
RGDSDHV

SEQ ID NO: 24253 - protein, 7 aa, synthetic construct
RGDDFER

SEQ ID NO: 24254 - protein, 7 aa, synthetic construct
RGDSDTI

SEQ ID NO: 24255 - protein, 7 aa, synthetic construct
RGDSEHD

SEQ ID NO: 24256 - protein, 7 aa, synthetic construct
RGDSFGS

SEQ ID NO: 24257 - protein, 7 aa, synthetic construct
RGDSFTK

SEQ ID NO: 24258 - protein, 7 aa, synthetic construct
RGDSGFN

SEQ ID NO: 24259 - protein, 7 aa, synthetic construct
RGDDFKA

SEQ ID NO: 24260 - protein, 7 aa, synthetic construct
RGDSHIF

SEQ ID NO: 24261 - protein, 7 aa, synthetic construct
RGDSIDF

SEQ ID NO: 24262 - protein, 7 aa, synthetic construct
RGDDFRF

SEQ ID NO: 24263 - protein, 7 aa, synthetic construct
RGDSKSN

SEQ ID NO: 24264 - protein, 7 aa, synthetic construct
RGDDFTS

SEQ ID NO: 24265 - protein, 7 aa, synthetic construct
RGDSNIV

SEQ ID NO: 24266 - protein, 7 aa, synthetic construct
RGDSQEN

SEQ ID NO: 24267 - protein, 7 aa, synthetic construct
RGDSQHD

SEQ ID NO: 24268 - protein, 7 aa, synthetic construct
RGDSRFD

SEQ ID NO: 24269 - protein, 7 aa, synthetic construct
RGDSRLS

SEQ ID NO: 24270 - protein, 7 aa, synthetic construct
RGDSSFE

SEQ ID NO: 24271 - protein, 7 aa, synthetic construct
RGDSSTH

SEQ ID NO: 24272 - protein, 7 aa, synthetic construct
RGDSTAI

SEQ ID NO: 24273 - protein, 7 aa, synthetic construct
RGDSTHK

SEQ ID NO: 24274 - protein, 7 aa, synthetic construct
RGDSVAS

SEQ ID NO: 24275 - protein, 7 aa, synthetic construct
RGDSVVA

SEQ ID NO: 24276 - protein, 7 aa, synthetic construct
RGDTATH

SEQ ID NO: 24277 - protein, 7 aa, synthetic construct
RGDTDFA

SEQ ID NO: 24278 - protein, 7 aa, synthetic construct
RGDTDHF

SEQ ID NO: 24279 - protein, 7 aa, synthetic construct
RGDTDKS

SEQ ID NO: 24280 - protein, 7 aa, synthetic construct
RGDTEGV

SEQ ID NO: 24281 - protein, 7 aa, synthetic construct
RGDTEIL

SEQ ID NO: 24282 - protein, 7 aa, synthetic construct
RGDTGGV

SEQ ID NO: 24283 - protein, 7 aa, synthetic construct
RGDTGTA

SEQ ID NO: 24284 - protein, 7 aa, synthetic construct
RGDTGVG

SEQ ID NO: 24285 - protein, 7 aa, synthetic construct
RGDDHDK

SEQ ID NO: 24286 - protein, 7 aa, synthetic construct
RGDTIFH

SEQ ID NO: 24287 - protein, 7 aa, synthetic construct
RGDTIII

SEQ ID NO: 24288 - protein, 7 aa, synthetic construct
RGDTIIV

SEQ ID NO: 24289 - protein, 7 aa, synthetic construct
RGDTLLL

SEQ ID NO: 24290 - protein, 7 aa, synthetic construct
RGDTQGI

SEQ ID NO: 24291 - protein, 7 aa, synthetic construct
RGDTQVA

SEQ ID NO: 24292 - protein, 7 aa, synthetic construct
RGDTRVR

SEQ ID NO: 24293 - protein, 7 aa, synthetic construct
RGDDHQK

SEQ ID NO: 24294 - protein, 7 aa, synthetic construct
RGDTSDV

SEQ ID NO: 24295 - protein, 7 aa, synthetic construct
RGDDHSR

SEQ ID NO: 24296 - protein, 7 aa, synthetic construct
RGDTTLT

SEQ ID NO: 24297 - protein, 7 aa, synthetic construct
RGDTTTV

SEQ ID NO: 24298 - protein, 7 aa, synthetic construct
RGDTVKF

SEQ ID NO: 24299 - protein, 7 aa, synthetic construct
RGDVAGS

SEQ ID NO: 24300 - protein, 7 aa, synthetic construct
RGDVDNF

SEQ ID NO: 24301 - protein, 7 aa, synthetic construct
RGDVDNG

SEQ ID NO: 24302 - protein, 7 aa, synthetic construct
RGDVFVQ

SEQ ID NO: 24303 - protein, 7 aa, synthetic construct
RGDVGGS

SEQ ID NO: 24304 - protein, 7 aa, synthetic construct
RGDVGNN

SEQ ID NO: 24305 - protein, 7 aa, synthetic construct
RGDVHAR

SEQ ID NO: 24306 - protein, 7 aa, synthetic construct
RGDVHND

SEQ ID NO: 24307 - protein, 7 aa, synthetic construct
RGDVHSA

SEQ ID NO: 24308 - protein, 7 aa, synthetic construct
RGDVHST

SEQ ID NO: 24309 - protein, 7 aa, synthetic construct
RGDVIFD

SEQ ID NO: 24310 - protein, 7 aa, synthetic construct
RGDVKSE

SEQ ID NO: 24311 - protein, 7 aa, synthetic construct
RGDVLIR

SEQ ID NO: 24312 - protein, 7 aa, synthetic construct
RGDVQKE

SEQ ID NO: 24313 - protein, 7 aa, synthetic construct
RGDVQNQ

SEQ ID NO: 24314 - protein, 7 aa, synthetic construct
RGDVQVV

SEQ ID NO: 24315 - protein, 7 aa, synthetic construct
RGDVTSG

SEQ ID NO: 24316 - protein, 7 aa, synthetic construct
RGDVTTQ

SEQ ID NO: 24317 - protein, 7 aa, synthetic construct
RGDVVIG

SEQ ID NO: 24318 - protein, 7 aa, synthetic construct
RGDDKSF

SEQ ID NO: 24319 - protein, 7 aa, synthetic construct
RGDDLTK

SEQ ID NO: 24320 - protein, 7 aa, synthetic construct
RGDDNTK

SEQ ID NO: 24321 - protein, 7 aa, synthetic construct
RGDAEKV

SEQ ID NO: 24322 - protein, 7 aa, synthetic construct
RGDDRFR

SEQ ID NO: 24323 - protein, 7 aa, synthetic construct
RGDDRIT

SEQ ID NO: 24324 - protein, 7 aa, synthetic construct
RGDDRKV

SEQ ID NO: 24325 - protein, 7 aa, synthetic construct
RGDAEQH

SEQ ID NO: 24326 - protein, 7 aa, synthetic construct
RGDDSQV

SEQ ID NO: 24327 - protein, 7 aa, synthetic construct
RGDDTVA

SEQ ID NO: 24328 - protein, 7 aa, synthetic construct
RGDDVNK

SEQ ID NO: 24329 - protein, 7 aa, synthetic construct
RGDDVTG

SEQ ID NO: 24330 - protein, 7 aa, synthetic construct
RGDEAIL

SEQ ID NO: 24331 - protein, 7 aa, synthetic construct
RGDEDEV

SEQ ID NO: 24332 - protein, 7 aa, synthetic construct
RGDEDFS

SEQ ID NO: 24333 - protein, 7 aa, synthetic construct
RGDEDLS

SEQ ID NO: 24334 - protein, 7 aa, synthetic construct
RGDEEKF

SEQ ID NO: 24335 - protein, 7 aa, synthetic construct
RGDEELE

SEQ ID NO: 24336 - protein, 7 aa, synthetic construct
RGDEETL

SEQ ID NO: 24337 - protein, 7 aa, synthetic construct
RGDEEVK

SEQ ID NO: 24338 - protein, 7 aa, synthetic construct
RGDEFQL

SEQ ID NO: 24339 - protein, 7 aa, synthetic construct
RGDEGHN

SEQ ID NO: 24340 - protein, 7 aa, synthetic construct
RGDEGNS

SEQ ID NO: 24341 - protein, 7 aa, synthetic construct
RGDEGSH

SEQ ID NO: 24342 - protein, 7 aa, synthetic construct
RGDEGSN

SEQ ID NO: 24343 - protein, 7 aa, synthetic construct
RGDEINI

SEQ ID NO: 24344 - protein, 7 aa, synthetic construct
RGDEKKG

SEQ ID NO: 24345 - protein, 7 aa, synthetic construct
RGDEKNT

SEQ ID NO: 24346 - protein, 7 aa, synthetic construct
RGDEKSD

SEQ ID NO: 24347 - protein, 7 aa, synthetic construct
RGDEKTF

SEQ ID NO: 24348 - protein, 7 aa, synthetic construct
RGDELKF

SEQ ID NO: 24349 - protein, 7 aa, synthetic construct
RGDELKI

SEQ ID NO: 24350 - protein, 7 aa, synthetic construct
RGDELRH

SEQ ID NO: 24351 - protein, 7 aa, synthetic construct
RGDENGF

SEQ ID NO: 24352 - protein, 7 aa, synthetic construct
RGDENRD

SEQ ID NO: 24353 - protein, 7 aa, synthetic construct
RGDEQEK

SEQ ID NO: 24354 - protein, 7 aa, synthetic construct
RGDEQFL

SEQ ID NO: 24355 - protein, 7 aa, synthetic construct
RGDEQQL

SEQ ID NO: 24356 - protein, 7 aa, synthetic construct
RGDESLK

SEQ ID NO: 24357 - protein, 7 aa, synthetic construct
RGDESNL

SEQ ID NO: 24358 - protein, 7 aa, synthetic construct
RGDETQL

SEQ ID NO: 24359 - protein, 7 aa, synthetic construct
RGDEVKF

SEQ ID NO: 24360 - protein, 7 aa, synthetic construct
RGDEVLS

SEQ ID NO: 24361 - protein, 7 aa, synthetic construct
RGDFAIS

SEQ ID NO: 24362 - protein, 7 aa, synthetic construct
RGDFAKA

SEQ ID NO: 24363 - protein, 7 aa, synthetic construct
RGDFATH

SEQ ID NO: 24364 - protein, 7 aa, synthetic construct
RGDFDAL

SEQ ID NO: 24365 - protein, 7 aa, synthetic construct
RGDFDSG

SEQ ID NO: 24366 - protein, 7 aa, synthetic construct
RGDFDVA

SEQ ID NO: 24367 - protein, 7 aa, synthetic construct
RGDFEGD

SEQ ID NO: 24368 - protein, 7 aa, synthetic construct
RGDFEIL

SEQ ID NO: 24369 - protein, 7 aa, synthetic construct
RGDFELH

SEQ ID NO: 24370 - protein, 7 aa, synthetic construct
RGDFEQN

SEQ ID NO: 24371 - protein, 7 aa, synthetic construct
RGDFERV

SEQ ID NO: 24372 - protein, 7 aa, synthetic construct
RGDFFQS

SEQ ID NO: 24373 - protein, 7 aa, synthetic construct
RGDFGIG

SEQ ID NO: 24374 - protein, 7 aa, synthetic construct
RGDFHAA

SEQ ID NO: 24375 - protein, 7 aa, synthetic construct
RGDFHGV

SEQ ID NO: 24376 - protein, 7 aa, synthetic construct
RGDAHAL

SEQ ID NO: 24377 - protein, 7 aa, synthetic construct
RGDFHSD

SEQ ID NO: 24378 - protein, 7 aa, synthetic construct
RGDFIIF

SEQ ID NO: 24379 - protein, 7 aa, synthetic construct
RGDFKKE

SEQ ID NO: 24380 - protein, 7 aa, synthetic construct
RGDFLIS

SEQ ID NO: 24381 - protein, 7 aa, synthetic construct
RGDFLNH

SEQ ID NO: 24382 - protein, 7 aa, synthetic construct
RGDFLRD

SEQ ID NO: 24383 - protein, 7 aa, synthetic construct
RGDFLTE

SEQ ID NO: 24384 - protein, 7 aa, synthetic construct
RGDFQNA

SEQ ID NO: 24385 - protein, 7 aa, synthetic construct
RGDAHNA

SEQ ID NO: 24386 - protein, 7 aa, synthetic construct
RGDFRRV

SEQ ID NO: 24387 - protein, 7 aa, synthetic construct
RGDFTDD

SEQ ID NO: 24388 - protein, 7 aa, synthetic construct
RGDFTKE

SEQ ID NO: 24389 - protein, 7 aa, synthetic construct
RGDGANA

SEQ ID NO: 24390 - protein, 7 aa, synthetic construct
RGDGAVH

SEQ ID NO: 24391 - protein, 7 aa, synthetic construct
RGDGDIS

SEQ ID NO: 24392 - protein, 7 aa, synthetic construct
RGDGDSH

SEQ ID NO: 24393 - protein, 7 aa, synthetic construct
RGDGDVK

SEQ ID NO: 24394 - protein, 7 aa, synthetic construct
RGDGEGL

SEQ ID NO: 24395 - protein, 7 aa, synthetic construct
RGDGFEI

SEQ ID NO: 24396 - protein, 7 aa, synthetic construct
RGDGFHD

SEQ ID NO: 24397 - protein, 7 aa, synthetic construct
RGDGHDQ

SEQ ID NO: 24398 - protein, 7 aa, synthetic construct
RGDGHEN

SEQ ID NO: 24399 - protein, 7 aa, synthetic construct
RGDAINN

SEQ ID NO: 24400 - protein, 7 aa, synthetic construct
RGDGIQS

SEQ ID NO: 24401 - protein, 7 aa, synthetic construct
RGDGITQ

SEQ ID NO: 24402 - protein, 7 aa, synthetic construct
RGDGKEA

SEQ ID NO: 24403 - protein, 7 aa, synthetic construct
RGDGLFF

SEQ ID NO: 24404 - protein, 7 aa, synthetic construct
RGDGNEK

SEQ ID NO: 24405 - protein, 7 aa, synthetic construct
RGDGNHD

SEQ ID NO: 24406 - protein, 7 aa, synthetic construct
RGDGNSF

SEQ ID NO: 24407 - protein, 7 aa, synthetic construct
RGDGRDE

SEQ ID NO: 24408 - protein, 7 aa, synthetic construct
RGDGRHI

SEQ ID NO: 24409 - protein, 7 aa, synthetic construct
RGDGRKA

SEQ ID NO: 24410 - protein, 7 aa, synthetic construct
RGDGSES

SEQ ID NO: 24411 - protein, 7 aa, synthetic construct
RGDGSTR

SEQ ID NO: 24412 - protein, 7 aa, synthetic construct
RGDGTTE

SEQ ID NO: 24413 - protein, 7 aa, synthetic construct
RGDGVSI

SEQ ID NO: 24414 - protein, 7 aa, synthetic construct
RGDGVTK

SEQ ID NO: 24415 - protein, 7 aa, synthetic construct
RGDHARV

SEQ ID NO: 24416 - protein, 7 aa, synthetic construct
RGDHDHN

SEQ ID NO: 24417 - protein, 7 aa, synthetic construct
RGDHDHR

SEQ ID NO: 24418 - protein, 7 aa, synthetic construct
RGDHDKT

SEQ ID NO: 24419 - protein, 7 aa, synthetic construct
RGDAKQS

SEQ ID NO: 24420 - protein, 7 aa, synthetic construct
RGDHETG

SEQ ID NO: 24421 - protein, 7 aa, synthetic construct
RGDHFHV

SEQ ID NO: 24422 - protein, 7 aa, synthetic construct
RGDHHDQ

SEQ ID NO: 24423 - protein, 7 aa, synthetic construct
RGDHHDT

SEQ ID NO: 24424 - protein, 7 aa, synthetic construct
RGDHIDK

SEQ ID NO: 24425 - protein, 7 aa, synthetic construct
RGDALEI

SEQ ID NO: 24426 - protein, 7 aa, synthetic construct
RGDHLHG

SEQ ID NO: 24427 - protein, 7 aa, synthetic construct
RGDHRVQ

SEQ ID NO: 24428 - protein, 7 aa, synthetic construct
RGDHSLI

SEQ ID NO: 24429 - protein, 7 aa, synthetic construct
RGDHSRR

SEQ ID NO: 24430 - protein, 7 aa, synthetic construct
RGDHSSA

SEQ ID NO: 24431 - protein, 7 aa, synthetic construct
RGDALSR

SEQ ID NO: 24432 - protein, 7 aa, synthetic construct
RGDHTQN

SEQ ID NO: 24433 - protein, 7 aa, synthetic construct
RGDIAGF

SEQ ID NO: 24434 - protein, 7 aa, synthetic construct
RGDIALS

SEQ ID NO: 24435 - protein, 7 aa, synthetic construct
RGDIANA

SEQ ID NO: 24436 - protein, 7 aa, synthetic construct
RGDIAVF

SEQ ID NO: 24437 - protein, 7 aa, synthetic construct
RGDIDHG

SEQ ID NO: 24438 - protein, 7 aa, synthetic construct
RGDIEKV

SEQ ID NO: 24439 - protein, 7 aa, synthetic construct
RGDIERA

SEQ ID NO: 24440 - protein, 7 aa, synthetic construct
RGDIERV

SEQ ID NO: 24441 - protein, 7 aa, synthetic construct
RGDIGGI

SEQ ID NO: 24442 - protein, 7 aa, synthetic construct
RGDIHVD

SEQ ID NO: 24443 - protein, 7 aa, synthetic construct
RGDIIAD

SEQ ID NO: 24444 - protein, 7 aa, synthetic construct
RGDIIFS

SEQ ID NO: 24445 - protein, 7 aa, synthetic construct
RGDINLS

SEQ ID NO: 24446 - protein, 7 aa, synthetic construct
RGDIQLR

SEQ ID NO: 24447 - protein, 7 aa, synthetic construct
RGDIRAQ

SEQ ID NO: 24448 - protein, 7 aa, synthetic construct
RGDIRKA

SEQ ID NO: 24449 - protein, 7 aa, synthetic construct
RGDIRLA

SEQ ID NO: 24450 - protein, 7 aa, synthetic construct
RGDISHD

SEQ ID NO: 24451 - protein, 7 aa, synthetic construct
RGDITDG

SEQ ID NO: 24452 - protein, 7 aa, synthetic construct
RGDITVR

SEQ ID NO: 24453 - protein, 7 aa, synthetic construct
RGDIVSN

SEQ ID NO: 24454 - protein, 7 aa, synthetic construct
RGDKAHD

SEQ ID NO: 24455 - protein, 7 aa, synthetic construct
RGDKALF

SEQ ID NO: 24456 - protein, 7 aa, synthetic construct
RGDKDDV

SEQ ID NO: 24457 - protein, 7 aa, synthetic construct
RGDKEAT

SEQ ID NO: 24458 - protein, 7 aa, synthetic construct
RGDKFEN

SEQ ID NO: 24459 - protein, 7 aa, synthetic construct
RGDKFIS

SEQ ID NO: 24460 - protein, 7 aa, synthetic construct
RGDKFKD

SEQ ID NO: 24461 - protein, 7 aa, synthetic construct
RGDKFLV

SEQ ID NO: 24462 - protein, 7 aa, synthetic construct
RGDKFSG

SEQ ID NO: 24463 - protein, 7 aa, synthetic construct
RGDKHSR

SEQ ID NO: 24464 - protein, 7 aa, synthetic construct
RGDKIQG

SEQ ID NO: 24465 - protein, 7 aa, synthetic construct
RGDKITH

SEQ ID NO: 24466 - protein, 7 aa, synthetic construct
RGDKLGV

SEQ ID NO: 24467 - protein, 7 aa, synthetic construct
RGDKLQH

SEQ ID NO: 24468 - protein, 7 aa, synthetic construct
RGDKNHG

SEQ ID NO: 24469 - protein, 7 aa, synthetic construct
RGDKNSE

SEQ ID NO: 24470 - protein, 7 aa, synthetic construct
RGDKQIK

SEQ ID NO: 24471 - protein, 7 aa, synthetic construct
RGDKSAA

SEQ ID NO: 24472 - protein, 7 aa, synthetic construct
RGDARRD

SEQ ID NO: 24473 - protein, 7 aa, synthetic construct
RGDKTET

SEQ ID NO: 24474 - protein, 7 aa, synthetic construct
RGDKVKQ

SEQ ID NO: 24475 - protein, 7 aa, synthetic construct
RGDLANK

SEQ ID NO: 24476 - protein, 7 aa, synthetic construct
RGDLDQL

SEQ ID NO: 24477 - protein, 7 aa, synthetic construct
RGDLDSN

SEQ ID NO: 24478 - protein, 7 aa, synthetic construct
RGDLDSR

SEQ ID NO: 24479 - protein, 7 aa, synthetic construct
RGDLEFR

SEQ ID NO: 24480 - protein, 7 aa, synthetic construct
RGDLFGA

SEQ ID NO: 24481 - protein, 7 aa, synthetic construct
RGDLIFI

SEQ ID NO: 24482 - protein, 7 aa, synthetic construct
RGDLIQL

SEQ ID NO: 24483 - protein, 7 aa, synthetic construct
RGDASQQ

SEQ ID NO: 24484 - protein, 7 aa, synthetic construct
RGDLLGE

SEQ ID NO: 24485 - protein, 7 aa, synthetic construct
RGDLLNR

SEQ ID NO: 24486 - protein, 7 aa, synthetic construct
RGDLQAK

SEQ ID NO: 24487 - protein, 7 aa, synthetic construct
RGDLQDR

SEQ ID NO: 24488 - protein, 7 aa, synthetic construct
RGDLQSS

SEQ ID NO: 24489 - protein, 7 aa, synthetic construct
RGDLRAE

SEQ ID NO: 24490 - protein, 7 aa, synthetic construct
RGDLRFF

SEQ ID NO: 24491 - protein, 7 aa, synthetic construct
RGDLSVH

SEQ ID NO: 24492 - protein, 7 aa, synthetic construct
RGDLTTE

SEQ ID NO: 24493 - protein, 7 aa, synthetic construct
RGDNADH

SEQ ID NO: 24494 - protein, 7 aa, synthetic construct
RGDNASS

SEQ ID NO: 24495 - protein, 7 aa, synthetic construct
RGDNAST

SEQ ID NO: 24496 - protein, 7 aa, synthetic construct
RGDNDNT

SEQ ID NO: 24497 - protein, 7 aa, synthetic construct
RGDNEFV

SEQ ID NO: 24498 - protein, 7 aa, synthetic construct
RGDNFKA

SEQ ID NO: 24499 - protein, 7 aa, synthetic construct
RGDADHR

SEQ ID NO: 24500 - protein, 7 aa, synthetic construct
RGDNGIT

SEQ ID NO: 24501 - protein, 7 aa, synthetic construct
RGDNHFS

SEQ ID NO: 24502 - protein, 7 aa, synthetic construct
RGDNINA

SEQ ID NO: 24503 - protein, 7 aa, synthetic construct
RGDNKED

SEQ ID NO: 24504 - protein, 7 aa, synthetic construct
RGDNKHH

SEQ ID NO: 24505 - protein, 7 aa, synthetic construct
RGDNNGT

SEQ ID NO: 24506 - protein, 7 aa, synthetic construct
RGDNNSI

SEQ ID NO: 24507 - protein, 7 aa, synthetic construct
RGDAVKH

SEQ ID NO: 24508 - protein, 7 aa, synthetic construct
RGDNQEL

SEQ ID NO: 24509 - protein, 7 aa, synthetic construct
RGDNQFK

SEQ ID NO: 24510 - protein, 7 aa, synthetic construct
RGDNQGA

SEQ ID NO: 24511 - protein, 7 aa, synthetic construct
RGDNQKS

SEQ ID NO: 24512 - protein, 7 aa, synthetic construct
RGDNRDV

SEQ ID NO: 24513 - protein, 7 aa, synthetic construct
RGDNREI

SEQ ID NO: 24514 - protein, 7 aa, synthetic construct
RGDNSAI

SEQ ID NO: 24515 - protein, 7 aa, synthetic construct
RGDNTGH

SEQ ID NO: 24516 - protein, 7 aa, synthetic construct
RGDQAEI

SEQ ID NO: 24517 - protein, 7 aa, synthetic construct
RGDQAIK

SEQ ID NO: 24518 - protein, 7 aa, synthetic construct
RGDQDAT

SEQ ID NO: 24519 - protein, 7 aa, synthetic construct
RGDQDLI

SEQ ID NO: 24520 - protein, 7 aa, synthetic construct
RGDQEAL

SEQ ID NO: 24521 - protein, 7 aa, synthetic construct
RGDQFII

SEQ ID NO: 24522 - protein, 7 aa, synthetic construct
RGDQGSA

SEQ ID NO: 24523 - protein, 7 aa, synthetic construct
RGDQIET

SEQ ID NO: 24524 - protein, 7 aa, synthetic construct
RGDQIHG

SEQ ID NO: 24525 - protein, 7 aa, synthetic construct
RGDDANK

SEQ ID NO: 24526 - protein, 7 aa, synthetic construct
RGDQIKT

SEQ ID NO: 24527 - protein, 7 aa, synthetic construct
RGDQIQE

SEQ ID NO: 24528 - protein, 7 aa, synthetic construct
RGDQKEH

SEQ ID NO: 24529 - protein, 7 aa, synthetic construct
RGDQLNR

SEQ ID NO: 24530 - protein, 7 aa, synthetic construct
RGDQLQL

SEQ ID NO: 24531 - protein, 7 aa, synthetic construct
RGDQRHG

SEQ ID NO: 24532 - protein, 7 aa, synthetic construct
RGDQSVF

SEQ ID NO: 24533 - protein, 7 aa, synthetic construct
RGDDDII

SEQ ID NO: 24534 - protein, 7 aa, synthetic construct
RGDQVQT

SEQ ID NO: 24535 - protein, 7 aa, synthetic construct
RGDRDNA

SEQ ID NO: 24536 - protein, 7 aa, synthetic construct
RGDRDNT

SEQ ID NO: 24537 - protein, 7 aa, synthetic construct
RGDRDVG

SEQ ID NO: 24538 - protein, 7 aa, synthetic construct
RGDRERN

SEQ ID NO: 24539 - protein, 7 aa, synthetic construct
RGDRHEA

SEQ ID NO: 24540 - protein, 7 aa, synthetic construct
RGDRHEH

SEQ ID NO: 24541 - protein, 7 aa, synthetic construct
RGDRHGD

SEQ ID NO: 24542 - protein, 7 aa, synthetic construct
RGDRQHR

SEQ ID NO: 24543 - protein, 7 aa, synthetic construct
RGDRVHH

SEQ ID NO: 24544 - protein, 7 aa, synthetic construct
RGDRVIS

SEQ ID NO: 24545 - protein, 7 aa, synthetic construct
RGDSASQ

SEQ ID NO: 24546 - protein, 7 aa, synthetic construct
RGDSDDT

SEQ ID NO: 24547 - protein, 7 aa, synthetic construct
RGDSDHK

SEQ ID NO: 24548 - protein, 7 aa, synthetic construct
RGDSDKH

SEQ ID NO: 24549 - protein, 7 aa, synthetic construct
RGDSFAH

SEQ ID NO: 24550 - protein, 7 aa, synthetic construct
RGDDFGN

SEQ ID NO: 24551 - protein, 7 aa, synthetic construct
RGDDFIL

SEQ ID NO: 24552 - protein, 7 aa, synthetic construct
RGDSHDR

SEQ ID NO: 24553 - protein, 7 aa, synthetic construct
RGDSIVN

SEQ ID NO: 24554 - protein, 7 aa, synthetic construct
RGDSLFH

SEQ ID NO: 24555 - protein, 7 aa, synthetic construct
RGDSNAN

SEQ ID NO: 24556 - protein, 7 aa, synthetic construct
RGDSQIT

SEQ ID NO: 24557 - protein, 7 aa, synthetic construct
RGDSRGH

SEQ ID NO: 24558 - protein, 7 aa, synthetic construct
RGDSSNL

SEQ ID NO: 24559 - protein, 7 aa, synthetic construct
RGDDGGD

SEQ ID NO: 24560 - protein, 7 aa, synthetic construct
RGDSSSH

SEQ ID NO: 24561 - protein, 7 aa, synthetic construct
RGDSTSN

SEQ ID NO: 24562 - protein, 7 aa, synthetic construct
RGDSVLV

SEQ ID NO: 24563 - protein, 7 aa, synthetic construct
RGDTARL

SEQ ID NO: 24564 - protein, 7 aa, synthetic construct
RGDTDIK

SEQ ID NO: 24565 - protein, 7 aa, synthetic construct
RGDTDIT

SEQ ID NO: 24566 - protein, 7 aa, synthetic construct
RGDTDNQ

SEQ ID NO: 24567 - protein, 7 aa, synthetic construct
RGDTELI

SEQ ID NO: 24568 - protein, 7 aa, synthetic construct
RGDTFQH

SEQ ID NO: 24569 - protein, 7 aa, synthetic construct
RGDDHAK

SEQ ID NO: 24570 - protein, 7 aa, synthetic construct
RGDTIFK

SEQ ID NO: 24571 - protein, 7 aa, synthetic construct
RGDDHDS

SEQ ID NO: 24572 - protein, 7 aa, synthetic construct
RGDTKDH

SEQ ID NO: 24573 - protein, 7 aa, synthetic construct
RGDTLQQ

SEQ ID NO: 24574 - protein, 7 aa, synthetic construct
RGDTQLL

SEQ ID NO: 24575 - protein, 7 aa, synthetic construct
RGDTQQQ

SEQ ID NO: 24576 - protein, 7 aa, synthetic construct
RGDTQVV

SEQ ID NO: 24577 - protein, 7 aa, synthetic construct
RGDDHQV

SEQ ID NO: 24578 - protein, 7 aa, synthetic construct
RGDTSNI

SEQ ID NO: 24579 - protein, 7 aa, synthetic construct
RGDTSVA

SEQ ID NO: 24580 - protein, 7 aa, synthetic construct
RGDTTSN

SEQ ID NO: 24581 - protein, 7 aa, synthetic construct
RGDVDLQ

SEQ ID NO: 24582 - protein, 7 aa, synthetic construct
RGDVFQN

SEQ ID NO: 24583 - protein, 7 aa, synthetic construct
RGDVHNG

SEQ ID NO: 24584 - protein, 7 aa, synthetic construct
RGDVKRF

SEQ ID NO: 24585 - protein, 7 aa, synthetic construct
RGDVLGE

SEQ ID NO: 24586 - protein, 7 aa, synthetic construct
RGDVLQK

(The sequence listing continues in the following parts.)

What is claimed is:

1. A modified adeno-associated virus (AAV) capsid protein, comprising:
(i) a targeting peptide within VR VIII; or
(ii) a peptide segment within VR I,
wherein the targeting peptide has a sequence of X₁X₂X₃RGDX₇X₈X₉X₁₀, wherein X₁, X₂, X₃, X₇, X₈, X₉ and X₁₀ are independently selected from any amino acid residue, and wherein the peptide segment has an amino acid sequence of P₁P₂P₃P₄P₅P₆P₇P₈NDNP₁₂ and P₁, P₂, P₃, P₄, P₅, P₆, P₇, P₈, and P₁₂ are independently selected from any amino acid residue.

2. The modified AAV capsid protein of claim 1, comprising: (i) the targeting peptide within VR VIII; and (ii) the peptide segment within VR I.

3. The modified AAV capsid protein of claim 1 or 2, wherein targeting peptide does not comprise RGDLLLS (SEQ ID NO: 1).

4. The modified AAV capsid protein of claim 1 or 2, wherein the peptide segment does not comprise an alanine (A) at P₆ and a threonine (T) at P₈.

5. The modified AAV capsid protein of claim 1 or 2, wherein
the targeting peptide does not comprise RGDLLLS (SEQ ID NO: 1); and
the peptide segment does not comprise an alanine (A) at P₆ and a threonine (T) at P₈.

6. The modified AAV capsid protein of any one of claims 1-5, wherein the modified AAV capsid protein has one or more modifications comprising amino acid insertions, deletions, substitutions, or combinations thereof as compared to a reference AAV capsid protein.

7. The modified AAV capsid protein of claim 6, wherein the modified AAV capsid protein comprises one or more modifications comprising an amino acid insertion, deletion, substitution, or a combination thereof as compared to a reference AAV capsid protein to introduce the targeting peptide within VR VIII.

8. The modified AAV capsid protein of any one of claims 6-7, further comprising one or more modifications outside of the VR I and VR VIII of the reference AAV capsid protein.

9. The modified AAV capsid protein of any one of claims 6-8, having at least 90%, 95%, 98%, 99% or 99.5% sequence identity to the sequence of the reference AAV capsid protein.

10. The modified AAV capsid protein of any one of claims 1-9, wherein the AAV capsid protein is selected from VP1, VP2 and VP3.

11. The modified AAV capsid protein of any one of claims 6-10, wherein the reference AAV capsid protein is a capsid protein of an AAV variant selected from the group consisting of: AAV9; Anc8065; Anc80-55; Anc80-129; Anc80-156; Anc80-751; Anc80-1029; Anc80-1712; AAV2; AAV1; AAV6; AAV3; AAV LK03; AAV7; AAV8; AAV hu.37; AAV rh.10; AAV hu.68; AAV10; AAV5; AAV3-3; AAV4-4; AAV1-A; hu.46-A; hu.48-A; hu.44-A; hu.43-A; AAV6-A; hu.34-B; hu.47-B; hu.29-B; rh.63-B; hu.56-B; hu.45-B; rh.57-B; rh.35-B; rh.58-B; rh.28-B; rh.51-B; rh.19-B; rh.49-B; rh.52-B; rh.13-B; AAV2-B; rh.20-B; rh.24-B; rh.64-B; hu.27-B; hu.21-B; hu.22-B; hu.23-B; hu.7-C; hu.61-C; rh.56-C; hu.9-C; hu.54-C; hu.53-C; hu.60-C; hu.55-C; hu.2-C; hu.1-C; hu.18-C; hu.3-C; hu.25-C; hu.15-C; hu.16-C; hu.11-C; hu.10-C; hu.4-C; rh.54-D; rh.48-D; rh.55-D; rh.62-D; AAV7-D; rh.52-E; rh.51-E; hu.39-E; rh.53-E; hu.37-E; rh.43-E; rh.50-E; rh.49-E; rh.61-E; hu.41-E; rh.64-E; rh74; hu.42-E; rh.57-E; rh.40-E; hu.67-E; hu.17-E; hu.6-E; hu.66-E; rh.38-E; hu.32-F; AAV9/hu; hu.31-F; Anc80; Anc81; Anc82; Anc83; Anc84; Anc94; Anc113; Anc126; Anc127; Anc80L27; Anc80L59; Anc80L60; Anc80L62; Anc80L33; Anc80L36; Anc80L44; Anc80L1; Anc110; and Anc80DI.

12. The modified AAV capsid protein of any one of claims 6-11, wherein the reference AAV capsid protein is a capsid protein having a sequence selected from SEQ ID Nos: 54-152, 44885-44898, 44916-44917, or a fragment thereof.

13. The modified AAV capsid protein of any one of 6-12, wherein the reference AAV capsid protein is a capsid protein having a sequence of SEQ ID NO: 61 or a fragment thereof.

14. The modified AAV capsid protein of any one of claims 6-12, wherein the reference AAV capsid protein is a capsid protein having a sequence of SEQ ID NO: 132 or a fragment thereof.

15. The modified AAV capsid protein of any one of claims 6-12, the reference AAV capsid protein is a capsid protein having a sequence of SEQ ID NO: 142 or a fragment thereof.

16. The modified AAV capsid protein of any one of claims 6-12, wherein the reference AAV capsid protein is a capsid protein selected from: Anc80-55, Anc80-129, Anc80-156, Anc80-751, Anc80-1029, and Anc80-1712.

17. The modified AAV capsid protein of claim 16, wherein the reference AAV capsid protein is a capsid protein having a sequence selected from SEQ ID NOs: 44885-44898, and 44916-44917.

18. The modified AAV capsid protein of any one of claims 1-10, having the sequence selected from SEQ ID NOs.: 44900-44909.

19. The modified AAV capsid protein of any one of claims 1-18, wherein X₇, X₈, X₉ and X₁₀ are independently selected from A, D, E, F, G, H, I, K, L, M, N, Q, R, S, T, V, and Y.

20. The modified AAV capsid protein of any one of claims 1-19, wherein X₁, X₂, and X₃ are independently selected from any amino acid residue.

21. The modified AAV capsid protein of claim 20, wherein X₁, X₂, and X₃ are amino acids identical to the amino acids at corresponding positions of the reference AAV capsid protein.

22. The modified AAV capsid protein of claim 20, wherein X₁ is an amino acid that is identical to the amino acid at a corresponding position of the reference AAV capsid protein.

23. The modified AAV capsid protein of claim 20, wherein X₂ is an amino acid that is identical to the amino acid at a corresponding position of the reference AAV capsid protein.

24. The modified AAV capsid protein of claim 20, wherein X₃ is an amino acid that is identical to the amino acid at a corresponding position of the reference AAV capsid protein.

25. The modified AAV capsid protein of claim 20, wherein X₁ and X₃ are amino acids that are identical to the amino acids at corresponding positions of the reference AAV capsid protein.

26. The modified AAV capsid protein of claim 20, wherein X₁ and X₂ are amino acids that are identical to the amino acids at corresponding positions of the reference AAV capsid protein.

27. The modified AAV capsid protein of claim 20, wherein X₂ and X₃ are amino acids that are identical to the amino acids at corresponding positions of the reference AAV capsid protein.

28. The modified AAV capsid protein of claim 20, wherein X₁, X₂, and X₃ are amino acids that are not identical to the amino acids at corresponding positions of the reference AAV capsid protein.

29. The modified AAV capsid protein of claim 20, wherein X₁ is an amino acid that is not identical to the amino acid at a corresponding position of the reference AAV capsid protein.

30. The modified AAV capsid protein of claim 20, wherein X₂ is an amino acid that is not identical to the amino acid at a corresponding position of the reference AAV capsid protein.

31. The modified AAV capsid protein of claim 20, wherein X₃ is an amino acid that is not identical to the amino acid at a corresponding position of the reference AAV capsid protein.

32. The modified AAV capsid protein of claim 20, wherein X₁ and X₃ are amino acids that are not identical to the amino acids at corresponding positions of the reference AAV capsid protein.

33. The modified AAV capsid protein of claim 20, wherein X₁ and X₂ are amino acids that are not identical to the amino acids at corresponding positions of the reference AAV capsid protein.

34. The modified AAV capsid protein of claim 20, wherein X₂ and X₃ are amino acids that are not identical to the amino acids at corresponding positions of the reference AAV capsid protein.

35. The modified AAV capsid protein of any one of claims 1-34, wherein the modified AAV capsid protein comprises one or more substitutions, one or more insertions, one or more deletions, or a combination thereof into VR VIII of the reference AAV capsid protein.

36. The modified AAV capsid protein of claim 35, wherein one or more modifications comprises a substitution of one or more amino acids between amino acid positions 565 and 595 of the reference AAV capsid.

37. The modified AAV capsid protein of any one of claims 1-36, wherein X₁ is selected from S, E, A, D, N, Q, or T.

38. The modified AAV capsid protein of claim 37, wherein X₁ is D or E.

39. The modified AAV capsid protein of claim 37, wherein X₁ is S, A or T.

40. The modified AAV capsid protein of claim 37, wherein X₁ is S, A or E.

41. The modified AAV capsid protein of any one of claims 1-36, wherein X₂ is selected from N, A, D, E, F, G, H, I, K, L, M, N, P, Q, R, S, T, V, W, or Y.

42. The modified AAV capsid protein of claim 41, wherein X₂ is selected from K, E, D, A, S, F, N, V or L.

43. The modified AAV capsid protein of claim 41, wherein X₂ is selected from K, E or D.

44. The modified AAV capsid protein of claim 41, wherein X₂ is selected from N, A or Y.

45. The modified AAV capsid protein of claim 41, wherein X₂ is selected from N, Y or S.

46. The modified AAV capsid protein of any one of claims 1-45, wherein X₃ is selected from R, Q, A, D, E, F, G, H, I, K, L, M, N, P, S, T, V, W, or Y.

47. The modified AAV capsid protein of claim 46, wherein X₃ is selected from Y, V or F.

48. The modified AAV capsid protein of claim 46, wherein X₃ is selected from N, A, Y or S.

49. The modified AAV capsid protein of claim 46, wherein X₃ is selected from I, Q, R, V, T or M.

50. The modified AAV capsid protein of any one of claims 1-49, wherein X₂X₃ is NR.

51. The modified AAV capsid protein of any one of claims 1-50, wherein X₁X₂X₃ is ENR.

52. The modified AAV capsid protein of any one of claims 1-50, wherein X₁X₂X₃ is SNR.

53. The modified AAV capsid protein of any one of claims 1-36, wherein X₁X₂X₃ is selected from the group consisting of: DII, DWM, EEI, DML, DWI, SLE, EIN, NHE, DFI, EEL, TEQ, TDA, EDT, NEV, TDW, QFE, EDY, DTT, EPL, SEN, SEQ, TAE, EVN, ELN, DVQ, ETI, EVI, ESV, ETW, SEW, DNW, EVF, EAW, EPF, EIY, EIF, EPY, DVI, DMM, DQI, DHL, DTL, DVL, NDL, DLL, DMQ, NEF, DFL, DIM, TEW, DYI, SDY, DYY, DHF, DKE, DTW, DTI, ELY, TEY, TEI, DAI, DQY, DMY, EWG, DMV, DMI, EPH, QEG, DIN, NEI, EYY, DIV, SEG, DVG, DYQ, EGF, NDI, EGY, DVF, DVH, DGF, DIY, DSF, DGW, EHY, DRE, TEH, DTS, NEN, NEM, NEH, TEN, DSN, DVT, DQS, DKD, DTH, DVV, DQK, NET, DKP, TEV, NDS, QET, EVL, SET, SDT, AEQ, QEF, SEY, SEF, SPF, EGQ, ETH, TDQ, QEA, QDQ, AEN, ESS, NDT, EFM, EFI, EHM, DFM, QDT, SME, DYT, EHV, ENV, EAV, EAI, ESI, DAT, ENQ, EAM, ADN, EFQ, SDS, TDH, SDH, DAS, TWE, SSF, DRD, EFL, TDF, QDA, EMH, SGE, AEW, DAH, TET, TDM, TNE, SAE, NSE, SFE, QDI, DSA, ADV, SEI, AEI, QDV, ADT, DNM, DNQ, ADL, TDL, SDL, SDM, TDV, DNI, DHY, DTY, DAA, DSY, QLY, DVM, DAY, DMT, DQT, DAQ, DTV, DSH, QDF, DST, DNL, DSI, DFV, DNY, DAF, DKI, DKF, DTM, DSL, NDV, TDI, DSV, DAV, DKV, DAM, DNV, DKM, DKL, DKW, DSM, ENI, SDI, DKT, QGE, NNE, QYW, AGM, ESH, QDH, QEH, DYH, ENS, DKQ, TGE, DSS, EST, DSQ, DNS, EFV, SWE, DKN, DKS, SEH, EAL, EAS, ADQ, SDQ, ADI, SDV, EAH, ASE, EAF, EYV, DKA, SNE, AGE, EGV, EQF, ETF, EVY, EQY, QEY, QEN, SAD, AEF, EMF, SDF, ADF, ADY, AVF, TLY, SIY, SLY, AIY, DYV, AEY, ENF, EMY, QDY, ETY, EAY, TVY, SVY, QVF, QVY, TMY, DKY, ALY, AVY, TMW, EQW, SPW, SIW, DTQ, TFF, AMF, EYT, DRV, SPY, SIF, SLF, ENY, EWY, EYI, EFY, TLF, TVF, TYY, TFY, SVF, SYW, TAW, SAW, TIY, NIM, NFM, NII, NIV, SII, SIV, SEM, TTI, NSY, SSY, SNY, SEV, AEH, ALT, SGQ, QTY, SYY, AMY, QMY, SGF, SGY, ALF, TTF, SFN, QAF, ASF, SAF, TAF, TAY, TGL, SAY, QAY, ADH, ASI, SSV, SSI, TGV, SGV, DPH, TEG, DLY, ESE, TEF, NPE, DHA, DLI, DWG, EWM, EET, EIL, TEL, DYL, EMW, EVW, EPV, EDV, SLD, EGH, QRY, TDG, SQE, ELH, EYW, EMM, EFF, QEI, EQG, DVS, ESP, EIQ, EPM, EPQ, SPE, EPN, NQD, ELQ, TDT, ELT, EPI, ETM, ETG, EHI, EMI, EIT, ETV, EVV, EVM, TPY, QEW, EIW, EPT, EIH, DFY, DQL, NDA, DIW, TDY, ELF, DVY, ESG, EPG, EIG, ELG, EVG, DHI, EIS, DYM, DFT, DFH, EQS, TPF, EEF, DWN, SDN, EYL, AET, DMN, QSP, DNA, DHM, DHT, EQI, ESN, EYF, EHF, NAD, AEG, AES, TEM, SEL, DYS, EVH, EAN, EGL, TFE, ETL, TYE, SHE, ELM, TYD, SYE, ESA, EFT, EAT, AMD, AND, DMS, QMD, SLQ, EYS, QDN, EYQ, EKD, QYD, QFD, DER, AFD, EAA, EFS, DHV, QSE, TSD, SFD, DGY, TWD, QWD, EHL, QGD, QSD, AWD, AGD, QIY, EMQ, EAG, ERD, DDR, DAL, QDL, DNT, EGN, ENH, NGE, DYN, DNH, DNF, ESQ, ESM, ESL, SSD, ENL, EMV, QDS, TSE, SWD, ASD, ENT, SSE, EGM, EGS, EGT, EGI, AIF, NIN, NIQ, NYW, EPW, EGG, TIW, QIW, TTW, EKW, NLY, SVM, TPT, AAW, AIH, TIH, QGT, QFF, QYF, QFY, EHH, QLH, TYF, STY, DRL, EYM, SFF, QLF, QIF, APF, TYW, QII, QPF, SPI, TIL, SVL, NVI, SIM, SLL, QEL, AEM, AEL, QEV, QDM, NDM, SYL, ASL, TPL, ANI, NMI, TIM, AEV, TMI, SWI, SFI, SNW, TNF, NAF, ASP, QSQ, APY, SFM, TAN, QAW, SGS, SGH, TGF, QSN, ERY, QMN, TGQ, NGM, NGV, AMN, ALN, QFV, AAF, TEV, TSY, EDK, ASN, SAV, QSV, QGV, QST, ASM, TAI, QSM, QSL, QSI, SSL, AGV, TGT, AGI, QGM, TGM, SGM, SGI, THD, QVE, ALE, QLE, EWP, AFP, AEE, ADE, NIE, TYP, QIE, TFP, SYP, ELW, DVW, NEW, EPA, EVA, TLE, AWE, NME, QME, ATE, AYE, DQM, TPD, DFG, QPE, EDI, EWL, ELL, QPD, EWF, ALD, SVD, QVD, ADA, APD, AHE, EQL, DTA, AFE, DAW, QAE, TME, STE, THE, QID, AAE, EIA, EML, SDA, SIE, TQE, TVD, NWE, NOE, EYG, QYP, EIV, EII, QFP, TID, EQN, EVS, TYG, EAQ, ELV, QLD, TLD, QQD, TIN, TLN, SPN, TPN, NFD, NEY, DSW, NMD, DGA, DYA, DIH, DNP, DQW, DQV, EFA, EPS, DEN, DWV, ELI, DTF, EQT, DHW, ESF, DEK, DMH, EWS, EHA, TTD, EWI, QLQ, SQD, QHD, NSD, EMA, TND, ATD, DGS, TAD, TMD, QES, AHD, QAD, DGH, DGL, NTE, ENG, SMD, NDQ, EMS, ENA, EMT, EYN, DDK, EWA, EWQ, EFH, QWE, DGT, DGM, EWV, EWH, EWT, QND, DGV, ESY, AAD, SND, ANE, TIG, QIG, AVD, SFP, AWP, QDW, SLW, TPA, AII, TIV, SWP, AFY, APN, AVN, TVN, TIS, TIQ, TLQ, AIQ, QVN, NFY, QFG, EMN, NVF, SYF, SFW, TPQ, AIL, TWI, QWN, TWN, QWQ, AQF, ASA, TWV, EWN, TMF, NGI, ATN, SAS, TMQ, TMN, AYN, TQF, SMF, QMQ, SMQ, QAN, AAY, SFQ, TYQ, TFQ, TWQ, AVI, and SGL.

54. The modified AAV capsid protein of any one of claims 1-36, wherein X₁X₂X₃ is selected from the group consisting of: APW, TEL, TDA, QPY, SPN, EHY, DWK, DLK, DFK, DVK, NSI, DIR, SPF, SEL, DRT, DRF, ADL, TDL, SDL, DNY, DKI, NDV, DKM, DNH, DNF, DSS, EST, EWT, DKN, DKS, SEH, ESQ, ESL, QND, EAH, AIF, AVF, QVF, TMY, ALY, NNG, NIF, NTF, NFF, AWF, NPY, SWF, AII, AYF, AQW, NFY, AGP, QQF, TKE, TNG, NSF, NAW, QAG, ERG, NKD, QSG, QNG, EAK, QWF, SWY, TFF, TYF, NYY, QFG, NWA, AMF, STY, TNW, ANW, AWM, TSF, DRL, DRV, SPY, NVF, SIF, QLF, SLF, QIF, SYF, APF, AGF, SVF, SAW, TIY, DHK, DAK, EGK, DYK, QNL, QPL, SPV, NPM, STL, NIL, AGA, NTV, SQA, QQA, NNF, NWL, NMA, NNA, NHN, NFH, ELR, NYM, ERA, NFS, SRD, NMM, NNL, NNQ, NNS, QDR, SDK, NNI, AQH, ANA, QNH, QWG, AWA, QWA, EQK, SHS, QFA, SFA, TFA, AYG, EKQ, ERN, EMR, EFR, AYM, EAR, EMK, EYK, EWK, QPI, QPF, NPL, SPI, SPL, NPI, SIV, SLL, SSA, AEM, TML, TLL, SML, TYL, QDM, NSN, AQL, NAT, SQQ, QTI, NAH, SQL, STH, NTT, AEK, ANV, QGL, AGL, QMV, STM, NOM, STI, TQL, SMM, SKE, SQT, SYL, ASL, SLV, NAM, TTV, TPI, TPL, ATL, DNK, DSR, ANL, SHL, SNL, TNL, QNI, QAL, ANI, QNM, QYM, SQI, SNI, QNV, SHV, SHM, QMM, ANM, AHM, SQM, NAL, AQT, EKL, NNM, TNM, SNM, QQI, TQV, TQI, THM, SQV, AAV, THL, AQI, NNV, TNN, TNI, SNN, TQM, NAI, TNV, SWT, NMV, NQI, NQL, NMI, NSS, SHF, QNF, SWL, AQM, SYV, TFM, SYM, TYM, ATI, TTI, SLI, ALI, AYI, QLV, TMI, SMI, QFI, NMY, NAY, NMN, NMF, ANF, NWT, QWM, TFT, SWM, TWM, QNW, STF, AFM, NSY, SSY, SNY, THY, TNY, QNY, THE, NSV, ATY, SKD, TNF, TWT, QWT, SFS, TFS, DRQ, NYN, DFR, EKG, ENN, AWN, QWQ, TQH, ALV, QHQ, DVR, STS, SQS, AAA, QGQ, QSQ, QAQ, SIH, APY, QGN, AGQ, ASQ, AAQ, SQN, NON, ERM, ALH, NYH, TGH, ATH, QTH, TQT, QQH, AQF, QMH, EKN, ERV, ERS, AFT, EKF, EKT, QSA, NFT, QYH, NYS, TSA, QYY, AYY, AHY, QFN, AWQ, NWQ, QAW, NMS, NWN, QMF, AMH, TSN, TAH, TMH, QFH, NWS, SWN, QRD, QKD, AKE, TSS, AYH, TSH, AHQ, ADK, ADR, ASA, ASS, SNS, QSS, SAH, SMH, QAH, AAH, AHN, QNS, QAS, ANS, ANN, SWA, SWS, TWS, ERI, EKS, QWS, AYS, AFS, SYS, QFS, QYN, QFT, AYT, TNS, TYS, SFT, QNQ, QYS, SYT, ANQ, SWV, SNQ, ANY, TNQ, ATF, SSQ, SSN, TWA, SGQ, SSS, TWY, SMY, TGN, TGY, QWY, SQF, TGF, QTY, TTY, AMY, QMY, ERY, TGQ, SGY, TMF, ALN, ARD, ATN, NAS, SAS, AQN, SYG, SYN, TFN, TMN, AYN, SGN, QNN, DKG, AAN, SMN, SAN, TTF, TQF, SFN, QAF, QFV, AAF, ASF, SAF, SMF, ASY, AFN, TAF, TSY, TAY, QMQ, SMQ, TYV, TGL, QAY, AAY, ADH, EDK, ASN, QYQ, SFQ, TYQ, TWQ, SWQ, AYQ, SYQ, AMV, TMV, TAV, AQV, TYT, TAT, QGI, QQV, SAQ, NAV, SAV, ASV, QSV, QAV, QAI, QAM, TAM, DTR, DOR, DMR, NNT, NYT, NMT, NST, ATT, SMV, SNT, QNT, AAT, SAM, SAL, QGV, QST, QYT, ASM, TSM, AMT, TST, ANH, SNV, TNT, ANT, SST, AST, TAI, DAR, SSM, TAL, NSM, TSL, SNF, TSI, TSV, TDK, SAT, SAI, QSL, QSI, ASI, SSL, SSV, SSI, AGI, QGM, TGM, SGM, SGL, SGV, ARL, NWE, SFL, TPY, DRP, DTK, DMK, SEY, SME, EAI, AHD, ADN, EFQ, EMH, SGE, DNQ, DNI, QLY, DGT, EGN, DYN, EWV, ESM, EAL, ASD, DKA, ADF, ADY, SLY, AEY, ETY, EAY, TGA, AVM, TPT, SVI, QSH, TTQ, QTN, TLH, AWY, SLT, AWV, QQY, NFV, SFY, TYY, SHA, TEK, QFK, NNY, EPR, NIT, NHI, NTY, SHY, NEM, NEN, NDK, NER, SER, NDR, QDK, SDR, QNA, TNA, THT, SNH, AYA, NFA, AFA, AHA, QHA, EYR, ENR, EHK, QVL, SVL, NIV, NVI, ADM, SAA, SQH, NQV, ALL, ATM, QYA, STT, DGR, NHT, SHT, QHT, TTL, NHM, QHL, DNR, QHM, QFM, QMI, AHV, THI, AHT, TNH, NHV, THV, SHI, ATV, TWI, NYV, TYI, DYR, SFI, NQF, NWM, NSL, NSP, TQY, DRS, ASP, TKD, QWI, QWN, TWN, QWV, THN, TTM, TQQ, NMQ, TYA, STQ, STN, AGN, EKH, ERT, TFH, SFH, AFH, ENK, NYQ, SFM, QGS, AHF, QLT, QHY, AQY, TRD, ERH, QWH, TYH, TRE, TAQ, AER, TDR, ASH, EKI, AFV, TYN, ALT, NGN, SYY, EWN, NGM, NAN, TAS, TFV, SFV, QAN, SGT, SAY, AFQ, TFQ, QFQ, EFK, SYH, QHV, AMM, THQ, AAI, AAM, NSQ, QAT, TSQ, SHQ, QSM, AGV, AGT, TGT, TGI, AVI, TGV, SGI, ESP, SDA, TPN, EAW, NEQ, DSN, DIK, DNA, QES, SLQ, EKD, SDH, SSF, TET, QDI, DSA, DNM, DKT, DGM, SQY, TLT, QEH, DKQ, TGE, DNS, SDV, SNE, EGT, EGV, AAP, AHG, TWK, TQA, TVT, APQ, SVT, NGT, SSH, NLV, AGY, QFF, QYF, NWV, EKA, EKY, SMG, NAG, ASG, TFI, ELK, SEK, QTL, NML, DHS, ETR, NQQ, QWL, ANP, AHH, NEK, NNN, SNA, EWR, ESR, SHN, SFG, SYA, APV, QPV, SPT, TPQ, QVI, TPV, AVL, SEM, NDM, API, QLM, QTM, QQL, QHI, NFL, AYV, NKE, TIM, QYV, SWI, DRN, AWI, SMA, NRE, QTS, QVV, QQT, QMA, QQS, QAA, ATQ, ERL, TGS, QQQ, AQQ, QHF, TAN, QSY, QSN, NGQ, TWH, TMS, QMS, TON, TMT, QTV, THS, TTT, SMT, QMT, SMR, ADA, AAE, EPY, EYL, NWI, TSP, DGQ, NDH, QFD, EHL, ERD, DAF, ENI, ENH, QQW, AGM, ENL, EAF, EYV, ENT, SSE, AGE, QEY, DRH, NIQ, SVV, SVM, QPT, TVL, QTQ, SVQ, TIQ, NLQ, SIQ, AWL, EHH, NGY, NHF, NSA, NAA, NTH, QLI, NWH, QRE, AML, EVR, SNP, NHS, THH, NQS, TTS, AHS, EKV, NFQ, APL, QPM, NPV, SIL, TII, STV, QEL, TFL, SIT, NAQ, TMM, AAL, QQM, AMI, QFL, AHI, SYI, SSP, NVV, TTN, TAA, TOS, TMA, ALA, QQN, NSH, TTH, SRE, ERQ, QHS, SWH, SEV, AVT, ALQ, DKH, AMQ, ARE, TWV, NGL, NGV, TMQ, TLV, EER and QTT.

55. The modified AAV capsid protein of any one of claims 1-36, wherein X₁X₂X₃ is selected from the group consisting of: DMK, ATD, EEK, QMD, EFS, ERD, DDR, TDM, SAE, EHS, ENH, SWE, SNE, NNG, QAG, ERG, QSG, QNG, ASG, QFG, AMF, ELR, NFM, NNS, NNI, SDR, EQR, EHR, EWR, EQK, ESR, EKQ, EYR, ENR, EMK, EYK, EHK, EWK, QNI, TNI, TYI, SNY, DRQ, AWI, QWI, DER, EKG, QYG, QWQ, EKN, EKF, EKT, AFH, ENK, NYS, DKH, AAG, QMF, QFH, QKD, ARE, AHQ, ADK, ADR, AHN, QNS, ANN, SWS, EKS, AFS, QFS, TNQ, TGY, NGL, ARD, AKD, AAF, SMF, AFN, SGT, TGL, ASN, SFQ, AFQ, TFQ, QFQ, EFK, SWQ, AYQ, SYQ, DQR, DMR, ASM, ANT, SHQ, TSL, SNF, QSL, ASI, SGL, SGI, NDA, DHQ, DFK, DTK, DNA, SDS, TDH, DGL, QDV, SDM, DKT, DGM, SQY, DKS, SSD, EMV, TSE, EYV, SSE, EGM, SDF, TTG, QLG, NNP, AGS, QSF, TLM, NGA, AWY, NKD, SWY, TFF, NSG, NGY, QEK, SEK, TEK, AQA, NVL, NHI, TER, NML, NMA, NNA, NHN, ANP, AMS, NER, SER, DKK, NMM, QDK, AHS, TNA, THT, SNH, QNH, ESK, SHS, AYM, SSA, NAT, QLM, QQM, SQI, SNI, QNV, SHV, SHM, NNV, TNN, AHT, TNH, NHV, TQM, THV, SHI, NYL, NMV, NFL, AYV, NQI, NOL, NMI, NSS, SHF, SYM, NYV, AYI, SWI, QFI, ANF, TFT, TWM, QNW, NSY, THY, TNY, NYN, AWN, SMA, NSH, TGH, SFH, SWH, SFM, NFT, QYH, QGS, TGS, TSA, QQQ, QYY, AMQ, TAN, AWH, NMS, TSN, TAH, TMH, QWH, NWS, SWN, QRD, TYH, AKE, TAQ, AER, AYH, ASA, SNS, QSS, SAH, SMH, ASH, QAS, ANS, SYS, QYN, TYN, TNS, SFT, ANQ, SGS, SGH, SSS, TWY, QTY, SYY, NGM, TMS, SYG, TON, SYN, TFN, TMN, AYN, SGN, QNN, SMN, SAN, QAF, ASF, ASY, TAS, TAF, TFV, SMQ, SFV, TMT, QAN, SAY, EDK, AMV, QHV, THS, TAT, QGI, QQV, NAV, SAV, ASV, QSV, QAV, AAI, AAM, QAM, TAM, DTR, NNT, NYT, NMT, ATT, QTT, TTT, QAT, SMV, SNT, QNT, AAT, SAM, SAL, QGV, QST, QYT, TSM, ANH, SNV, TSQ, TNT, SST, AST, TAI, TSI, TSV, TDK, SAT, QSM, SAI, QSI, SSV, SSI, AGT, TGT, AGI, QGM, TGM, TGV, SGM, SGV, SQE, EHT, EYL, DSG, SFE, QND, TQA, AWV, NFV, TSG, SSG, DRG, ANW, TFI, TSF, QNL, STL, TWL, NNF, NND, NYM, NFI, ETR, SNP, EIR, NFS, NNH, NNL, AHL, NNQ, NDR, NNN, QDR, SDK, SNA, AFG, NYA, QHA, QFA, SHN, NFQ, SYA, TFA, EMR, EFR, EAR, NQM, TTL, TQL, SMM, SKE, SYL, ASL, SLV, TTV, AAL, NHL, NHM, QYL, QHL, ATL, DNR, DSR, ANL, SHL, SNL, TNL, QAL, AMI, ANI, QNM, QYM, QHM, QFM, QMM, QMI, ANM, AHM, SQM, AQT, EKL, NNM, TNM, SNM, QQI, TQV, TQI, THI, QHI, THL, SNN, TNV, SWL, AQM, SYV, TFM, TYM, TWI, AFI, ATI, DYR, QLV, TMI, SYI, SFI, NWM, NWT, NSL, STF, SNW, AFM, SSY, NSV, TNF, NAF, TFS, QWV, ERT, TQT, AFT, NYQ, ERL, NRD, TRD, AWQ, TDR, TSH, ASS, AYT, TYS, QYS, SYT, SWV, SNQ, SMS, NAS, SAS, QFV, SAF, TWQ, TAV, AMM, TYT, QAI, TST, DAR, SSM, TAL, NES, DWK, DLR, DIR, SDT, EAN, ETH, TYD, SYE, EAM, TND, AYD, TSP, DRT, NDH, SSF, EFH, DNQ, DSH, DNT, SDI, DKQ, EWT, EAL, EAS, ESL, ASD, EAH, ASE, EAF, ENT, SIY, QDY, APG, AIG, SSW, NPG, ERP, TVI, QSH, SLS, EDR, AWL, SLH, EQH, EHH, NWV, EKY, STY, DRI, EYH, DRV, SPY, NNY, DWR, ERA, QRE, EVR, SRD, AWA, SFA, QTI, SHT, THM, AQI, AHI, SWT, ATV, TTI, SMI, QYV, NMY, SWM, QNY, TWT, QWT, TQY, NRE, QTS, QHQ, DVR, AAA, TYA, EKH, ALH, AWT, ATH, SRE, TFH, QMH, ERV, ERS, QHY, ALQ, QSY, ERH, TRE, TSS, QAH, AAH, SWA, TWS, QWS, AYS, AFV, QNQ, ANY, ALT, SMY, TWV, TTY, AMY, QMY, ERY, TWH, TSY, TAY, TYV, QAY, AAY, QYQ, TYQ, SYH, AQV, EER, THQ, and SMT.

56. The modified AAV capsid protein of any one of claims 1-55, wherein RGDX₇X₈X₉X₁₀ has an amino acid sequence selected from SEQ ID NOs.: 238-44858.

57. The modified AAV capsid protein of any one of claims 1-55, wherein RGDX₇X₈X₉X₁₀ has an amino acid sequence selected from SEQ ID NOs.: 238-248.

58. The modified AAV capsid protein of any one of claims 1-55 wherein RGDX₇X₈X₉X₁₀ has an amino acid sequence selected from SEQ ID NOs.: 238-338.

59. The modified AAV capsid protein of any one of claims 1-55, wherein RGDX₇X₈X₉X₁₀ has an amino acid sequence selected from SEQ ID NOs.: 238-438.

60. The modified AAV capsid protein of any one of claims 1-55, wherein RGDX₇X₈X₉X₁₀ has an amino acid sequence selected from SEQ ID NOs.: 238-538.

61. The modified AAV capsid protein of any one of claims 1-55, wherein RGDX₇X₈X₉X₁₀ has an amino acid sequence selected from SEQ ID NOs.: 238-638.

62. The modified AAV capsid protein of any one of claims 1-55, wherein RGDX₇X₈X₉X₁₀ has an amino acid sequence selected from SEQ ID NOs.: 238-738.

63. The modified AAV capsid protein of any one of claims 1-55, wherein RGDX₇X₈X₉X₁₀ has an amino acid sequence selected from SEQ ID NOs.: 3881, 12092, 14601, 15342, 21498, and 31396.

64. The modified AAV capsid protein of any one of claims 1-55, wherein RGDX₇X₈X₉X₁₀ has the amino acid sequence of SEQ ID NO: 238.

65. The modified AAV capsid protein of any one of claims 1-55, wherein X₁X₂X₃RGDX₇X₈X₉X₁₀ has an amino acid sequence selected from SEQ ID NOs.: 44859-44883, 44911, 44912, 44913, 44918-44919, and 48391-157057.

66. The modified AAV capsid protein of any one of claims 1-55, wherein X₁X₂X₃RGDX₇X₈X₉X₁₀ has an amino acid sequence selected from SEQ ID NOs.: 44864-44867, and 44879-44883.

67. The modified AAV capsid protein of any one of claims 1-55, wherein X₁X₂X₃RGDX₇X₈X₉X₁₀ has an amino acid sequence selected from SEQ ID NOs.: 44859-44878, 44911, 44912, 44913, 44918-44919, and 48391-157057.

68. The modified AAV capsid protein of any one of claims 1-55, wherein the X₇ is selected from R, F, H, L, Q, R, and Y.

69. The modified AAV capsid protein of claim 68, wherein the X₇ is R.

70. The modified AAV capsid protein of claim 68, wherein the X₇ is Y or H.

71. The modified AAV capsid protein of claim 68, wherein the X₇ is F or Y.

72. The modified AAV capsid protein of any one of claims 1-71, wherein X₈ is selected from S, G, D, I, L, N, Q, T, and V.

73. The modified AAV capsid protein of claim 72, wherein X₈ is T, G or S.

74. The modified AAV capsid protein of claim 72, wherein X₈ is N or Q.

75. The modified AAV capsid protein of claim 72, wherein X₈ is S or G.

76. The modified AAV capsid protein of claims 1-75, wherein X₉ is selected from V, S, N, G, Q, L, T, and Y.

77. The modified AAV capsid protein of claim 76, wherein X₉ is selected from V or Q.

78. The modified AAV capsid protein of claim 76, wherein X₉ is selected from S or V.

79. The modified AAV capsid protein of claim 76, wherein X₉ is selected from N or S.

80. The modified AAV capsid protein of any one of claims 1-79, wherein X₁₀ is selected from I, V, S, L, M, R, T, and Q.

81. The modified AAV capsid protein of claim 80, wherein X₁₀ is I or V.

82. The modified AAV capsid protein of claim 80, wherein X₁₀ is V, L or M.

83. The modified AAV capsid protein of claim 80, wherein X₁₀ is T or L.

84. The modified AAV capsid protein of claim 1-55, wherein the targeting peptide has a sequence of X₁X₂X₃RGDRGVV (SEQ ID NO: 98928), X₁X₂X₃RGDRSVV (SEQ ID NO: 98931), X₁X₂X₃RGDRGQI (SEQ ID NO: 98927), X₁X₂X₃RGDRSQT (SEQ ID NO: 98930), X₁X₂X₃RGDRQGI (SEQ ID NO: 98929), X₁X₂X₃RGDFQNT (SEQ ID NO: 98934), X₁X₂X₃RGDHGVL (SEQ ID NO: 98938), X₁X₂X₃RGDYTSV (SEQ ID NO: 98941), X₁X₂X₃RGDYTSM (SEQ ID NO: 98942), X₁X₂X₃RGDLTVT (SEQ ID NO: 98935), X₁X₂X₃RGDFNNT (SEQ ID NO: 98943), X₁X₂X₃RGDYSSV (SEQ ID NO: 98937), X₁X₂X₃RGDHVNL (SEQ ID NO: 98924), X₁X₂X₃RGDQSTL (SEQ ID NO: 98926), X₁X₂X₃RGDLIGR (SEQ ID NO: 98925), X₁X₂X₃RGDENNL (SEQ ID NO: 98933), X₁X₂X₃RGDLLLS (SEQ ID NO: 98932), X₁X₂X₃RGDYNSL (SEQ ID NO: 98940), X₁X₂X₃RGDRDYL (SEQ ID NO: 98939), or X₁X₂X₃RGDYVGL (SEQ ID NO: 98936).

85. The modified AAV capsid protein of claim 84, wherein the targeting peptide has a sequence of X₁X₂X₃RGDRGVV (SEQ ID NO: 98928), X₁X₂X₃RGDRSVV (SEQ ID NO: 98931) or X₁X₂X₃RGDRGQI (SEQ ID NO: 98927).

86. The modified AAV capsid protein of claim 84, wherein the targeting peptide has a sequence of X₁X₂X₃RGDYTSV (SEQ ID NO: 98941), X₁X₂X₃RGDYTSM (SEQ ID NO: 98942), X₁X₂X₃RGDRGVV (SEQ ID NO: 98928), X₁X₂X₃RGDRSVV (SEQ ID NO: 98931), X₁X₂X₃RGDYSSV (SEQ ID NO: 98937), or X₁X₂X₃RGDHGVL (SEQ ID NO: 98938).

87. The modified AAV capsid protein of any one of claims 1-55, wherein the targeting peptide has a sequence of X₁X₂X₃RGDFQNT (SEQ ID NO: 98934), X₁X₂X₃RGDHGVL (SEQ ID NO: 98938), X₁X₂X₃RGDLIGR (SEQ ID NO: 98925), X₁X₂X₃RGDRGQI (SEQ ID NO: 98927), X₁X₂X₃RGDRGVV (SEQ ID NO: 98928), X₁X₂X₃RGDYTSM (SEQ ID NO: 98942) or X₁X₂X₃RGDYTSV (SEQ ID NO: 98941).

88. The modified AAV capsid protein of claim 87, wherein X₁X₂X₃ is selected from the group consisting of EFK, AAY, DQK, QVY, DKL, DNV, ENF, EWK, QNV, and TFM.

89. The modified AAV capsid protein of any one of claims 1-55 wherein the targeting peptide has an amino acid sequence selected from: RGDRSX₉I, RGDRGX₉I, RGDRSX₉V, or RGDRGX₉V.

90. The modified AAV capsid protein of claim 89, wherein the targeting peptide has an amino acid sequence selected from X₁X₂X₃RGDRGQI (SEQ ID NO: 98927), X₁X₂X₃RGDRSVV (SEQ ID NO: 98931) or X₁X₂X₃RGDRGVV (SEQ ID NO: 98928).

91. The modified AAV capsid protein of any one of claims 89-90, wherein X₁ is D or E, X₂ is K, E, D, A, S, F or N, and X₃ is Y, V, or F.

92. The modified AAV capsid protein of any one of claims 89-91, wherein X₁X₂X₃ is selected from the group consisting of: DII, DWM, EEI, DML, DWI, SLE, EIN, NHE, DFI, EEL, TEQ, TDA, EDT, NEV, TDW, QFE, EDY, DTT, EPL, SEN, SEQ, TAE, EVN, ELN, DVQ, ETI, EVI, ESV, ETW, SEW, DNW, EVF, EAW, EPF, EIY, EIF, EPY, DVI, DMM, DQI, DHL, DTL, DVL, NDL, DLL, DMQ, NEF, DFL, DIM, TEW, DYI, SDY, DYY, DHF, DKE, DTW, DTI, ELY, TEY, TEI, DAI, DQY, DMY, EWG, DMV, DMI, EPH, QEG, DIN, NEI, EYY, DIV, SEG, DVG, DYQ, EGF, NDI, EGY, DVF, DVH, DGF, DIY, DSF, DGW, EHY, DRE, TEH, DTS, NEN, NEM, NEH, TEN, DSN, DVT, DQS, DKD, DTH, DVV, DQK, NET, DKP, TEV, NDS, QET, EVL, SET, SDT, AEQ, QEF, SEY, SEF, SPF, EGQ, ETH, TDQ, QEA, QDQ, AEN, ESS, NDT, EFM, EFI, EHM, DFM, QDT, SME, DYT, EHV, ENV, EAV, EAI, ESI, DAT, ENQ, EAM, ADN, EFQ, SDS, TDH, SDH, DAS, TWE, SSF, DRD, EFL, TDF, QDA, EMH, SGE, AEW, DAH, TET, TDM, TNE, SAE, NSE, SFE, QDI, DSA, ADV, SEI, AEI, QDV, ADT, DNM, DNQ, ADL, TDL, SDL, SDM, TDV, DNI, DHY, DTY, DAA, DSY, QLY, DVM, DAY, DMT, DQT, DAQ, DTV, DSH, QDF, DST, DNL, DSI, DFV, DNY, DAF, DKI, DKF, DTM, DSL, NDV, TDI, DSV, DAV, DKV, DAM, DNV, DKM, DKL, DKW, DSM, ENI, SDI, DKT, QGE, NNE, QYW, AGM, ESH, QDH, QEH, DYH, ENS, DKQ, TGE, DSS, EST, DSQ, DNS, EFV, SWE, DKN, DKS, SEH, EAL, EAS, ADQ, SDQ, ADI, SDV, EAH, ASE, EAF, EYV, DKA, SNE, AGE, EGV, EQF, ETF, EVY, EQY, QEY, QEN, SAD, AEF, EMF, SDF, ADF, ADY, AVF, TLY, SIY, SLY, AIY, DYV, AEY, ENF, EMY, QDY, ETY, EAY, TVY, SVY, QVF, QVY, TMY, DKY, ALY, AVY, TMW, EQW, SPW, SIW, DTQ, TFF, AMF, EYT, DRV, SPY, SIF, SLF, ENY, EWY, EYI, EFY, TLF, TVF, TYY, TFY, SVF, SYW, TAW, SAW, TIY, NIM, NFM, NII, NIV, SII, SIV, SEM, TTI, NSY, SSY, SNY, SEV, AEH, ALT, SGQ, QTY, SYY, AMY, QMY, SGF, SGY, ALF, TTF, SFN, QAF, ASF, SAF, TAF, TAY, TGL, SAY, QAY, ADH, ASI, SSV, SSI, TGV, SGV, DPH, TEG, DLY, ESE, TEF, NPE, DHA, DLI, DWG, EWM, EET, EIL, TEL, DYL, EMW, EVW, EPV, EDV, SLD, EGH, QRY, TDG, SQE, ELH, EYW, EMM, EFF, QEI, EQG, DVS, ESP, EIQ, EPM, EPQ, SPE, EPN, NQD, ELQ, TDT, ELT, EPI, ETM, ETG, EHI, EMI, EIT, ETV, EVV, EVM, TPY, QEW, EIW, EPT, EIH, DFY, DQL, NDA, DIW, TDY, ELF, DVY, ESG, EPG, EIG, ELG, EVG, DHI, EIS, DYM, DFT, DFH, EQS, TPF, EEF, DWN, SDN, EYL, AET, DMN, QSP, DNA, DHM, DHT, EQI, ESN, EYF, EHF, NAD, AEG, AES, TEM, SEL, DYS, EVH, EAN, EGL, TFE, ETL, TYE, SHE, ELM, TYD, SYE, ESA, EFT, EAT, AMD, AND, DMS, QMD, SLQ, EYS, QDN, EYQ, EKD, QYD, QFD, DER, AFD, EAA, EFS, DHV, QSE, TSD, SFD, DGY, TWD, QWD, EHL, QGD, QSD, AWD, AGD, QIY, EMQ, EAG, ERD, DDR, DAL, QDL, DNT, EGN, ENH, NGE, DYN, DNH, DNF, ESQ, ESM, ESL, SSD, ENL, EMV, QDS, TSE, SWD, ASD, ENT, SSE, EGM, EGS, EGT, EGI, AIF, NIN, NIQ, NYW, EPW, EGG, TIW, QIW, TTW, EKW, NLY, SVM, TPT, AAW, AIH, TIH, QGT, QFF, QYF, QFY, EHH, QLH, TYF, STY, DRL, EYM, SFF, QLF, QIF, APF, TYW, QII, QPF, SPI, TIL, SVL, NVI, SIM, SLL, QEL, AEM, AEL, QEV, QDM, NDM, SYL, ASL, TPL, ANI, NMI, TIM, AEV, TMI, SWI, SFI, SNW, TNF, NAF, ASP, QSQ, APY, SFM, TAN, QAW, SGS, SGH, TGF, QSN, ERY, QMN, TGQ, NGM, NGV, AMN, ALN, QFV, AAF, TFV, TSY, EDK, ASN, SAV, QSV, QGV, QST, ASM, TAI, QSM, QSL, QSI, SSL, AGV, TGT, AGI, QGM, TGM, SGM, SGI, THD, QVE, ALE, QLE, EWP, AFP, AEE, ADE, NIE, TYP, QIE, TFP, SYP, ELW, DVW, NEW, EPA, EVA, TLE, AWE, NME, QME, ATE, AYE, DQM, TPD, DFG, QPE, EDI, EWL, ELL, QPD, EWF, ALD, SVD, QVD, ADA, APD, AHE, EQL, DTA, AFE, DAW, QAE, TME, STE, THE, QID, AAE, EIA, EML, SDA, SIE, TQE, TVD, NWE, NOE, EYG, QYP, EIV, EII, QFP, TID, EQN, EVS, TYG, EAQ, ELV, QLD, TLD, QQD, TIN, TLN, SPN, TPN, NFD, NEY, DSW, NMD, DGA, DYA, DIH, DNP, DQW, DQV, EFA, EPS, DFN, DWV, ELI, DTF, EQT, DHW, ESF, DEK, DMH, EWS, EHA, TTD, EWI, QLQ, SQD, QHD, NSD, EMA, TND, ATD, DGS, TAD, TMD, QES, AHD, QAD, DGH, DGL, NTE, ENG, SMD, NDQ, EMS, ENA, EMT, EYN, DDK, EWA, EWQ, EFH, QWE, DGT, DGM, EWV, EWH, EWT, QND, DGV, ESY, AAD, SND, ANE, TIG, QIG, AVD, SFP, AWP, QDW, SLW, TPA, AII, TIV, SWP, AFY, APN, AVN, TVN, TIS, TIQ, TLQ, AIQ, QVN, NFY, QFG, EMN, NVF, SYF, SFW, TPQ, AIL, TWI, QWN, TWN, QWQ, AQF, ASA, TWV, EWN, TMF, NGI, ATN, SAS, TMQ, TMN, AYN, TQF, SMF, QMQ, SMQ, QAN, AAY, SFQ, TYQ, TFQ, TWQ, AVI, and SGL.

93. The modified AAV capsid protein of any one of claims 89-92, wherein X₁X₂X₃ is selected from the group consisting of: DAV, DKW, EAY, AEY, DFV, DKF, DKI, DKL, DNV, DNY, DSL, DSV, EFI, SEF, SEY, SLY, ADF, ADY, ALY, AVF, DAF, DAL, DAM, DAT, DHV, DIV, DKA, DKM, DKT, DKV, DKY, DMI, DNF, DNI, DQT, DSI, DVY, DYN, DYV, EAT, EAW, EFV, EGL, EIY, EMF, EMY, ENF, EPF, EPY, EQY, ESY, ETF, EWI, EWT, EYI, EYV, NEM, QDF, QDY, QEY, QLY, QND, QVF, QVY, SDL, SDV, SEH, SII, SIY, SSL, SVY, SWD, SWE, TDF, TDV, TDY, TEF, TEY, TIY, TLY, and TWQ.

94. The modified AAV capsid protein of any one of claims 1-55, wherein X₇ is selected from Y and H; X₈ is selected from T, G and S; X₉ is selected from S and V; X₁₀ is selected from V, L and M.

95. The modified AAV capsid protein of claim 94, wherein the targeting peptide has an amino acid sequence selected from: X₁X₂X₃RGDHGVL (SEQ ID NO: 98938), X₁X₂X₃RGDYSSV (SEQ ID NO: 98937), X₁X₂X₃RGDYTSM (SEQ ID NO: 98942) or X₁X₂X₃RGDYTSV (SEQ ID NO: 98941).

96. The modified AAV capsid protein of claim 94 or 95, wherein X₁ is S, A or T, X₂ is N, A or Y, and X₃ is I, V, M, Q, T, Y or K.

97. The modified AAV capsid protein of any one of claims 94-96, wherein X₁X₂X₃ is selected from the group consisting of: APW, TEL, TDA, QPY, SPN, EHY, DWK, DLK, DFK, DVK, NSI, DIR, SPF, SEL, DRT, DRF, ADL, TDL, SDL, DNY, DKI, NDV, DKM, DNH, DNF, DSS, EST, EWT, DKN, DKS, SEH, ESQ, ESL, QND, EAH, AIF, AVF, QVF, TMY, ALY, NNG, NIF, NTF, NFF, AWF, NPY, SWF, AII, AYF, AQW, NFY, AGP, QQF, TKE, TNG, NSF, NAW, QAG, ERG, NKD, QSG, QNG, EAK, QWF, SWY, TFF, TYF, NYY, QFG, NWA, AMF, STY, TNW, ANW, AWM, TSF, DRL, DRV, SPY, NVF, SIF, QLF, SLF, QIF, SYF, APF, AGF, SVF, SAW, TIY, DHK, DAK, EGK, DYK, QNL, QPL, SPV, NPM, STL, NIL, AGA, NTV, SQA, QQA, NNF, NWL, NMA, NNA, NHN, NFH, ELR, NYM, ERA, NFS, SRD, NMM, NNL, NNQ, NNS, QDR, SDK, NNI, AQH, ANA, QNH, QWG, AWA, QWA, EQK, SHS, QFA, SFA, TFA, AYG, EKQ, ERN, EMR, EFR, AYM, EAR, EMK, EYK, EWK, QPI, QPF, NPL, SPI, SPL, NPI, SIV, SLL, SSA, AEM, TML, TLL, SML, TYL, QDM, NSN, AQL, NAT, SQQ, QTI, NAH, SQL, STH, NTT, AEK, ANV, QGL, AGL, QMV, STM, NOM, STI, TQL, SMM, SKE, SQT, SYL, ASL, SLV, NAM, TTV, TPI, TPL, ATL, DNK, DSR, ANL, SHL, SNL, TNL, QNI, QAL, ANI, QNM, QYM, SQI, SNI, QNV, SHV, SHM, QMM, ANM, AHM, SQM, NAL, AQT, EKL, NNM, TNM, SNM, QQI, TQV, TQI, THM, SQV, AAV, THL, AQI, NNV, TNN, TNI, SNN, TQM, NAI, TNV, SWT, NMV, NQI, NQL, NMI, NSS, SHE, QNF, SWL, AQM, SYV, TFM, SYM, TYM, ATI, TTI, SLI, ALI, AYI, QLV, TMI, SMI, QFI, NMY, NAY, NMN, NMF, ANF, NWT, QWM, TFT, SWM, TWM, QNW, STF, AFM, NSY, SSY, SNY, THY, TNY, QNY, THE, NSV, ATY, SKD, TNF, TWT, QWT, SFS, TFS, DRQ, NYN, DFR, EKG, ENN, AWN, QWQ, TQH, ALV, QHQ, DVR, STS, SQS, AAA, QGQ, QSQ, QAQ, SIH, APY, QGN, AGQ, ASQ, AAQ, SQN, NON, ERM, ALH, NYH, TGH, ATH, QTH, TQT, QQH, AQF, QMH, EKN, ERV, ERS, AFT, EKF, EKT, QSA, NFT, QYH, NYS, TSA, QYY, AYY, AHY, QFN, AWQ, NWQ, QAW, NMS, NWN, QMF, AMH, TSN, TAH, TMH, QFH, NWS, SWN, QRD, QKD, AKE, TSS, AYH, TSH, AHQ, ADK, ADR, ASA, ASS, SNS, QSS, SAH, SMH, QAH, AAH, AHN, QNS, QAS, ANS, ANN, SWA, SWS, TWS, ERI, EKS, QWS, AYS, AFS, SYS, QFS, QYN, QFT, AYT, TNS, TYS, SFT, QNQ, QYS, SYT, ANQ, SWV, SNQ, ANY, TNQ, ATF, SSQ, SSN, TWA, SGQ, SSS, TWY, SMY, TGN, TGY, QWY, SQF, TGF, QTY, TTY, AMY, QMY, ERY, TGQ, SGY, TMF, ALN, ARD, ATN, NAS, SAS, AQN, SYG, SYN, TFN, TMN, AYN, SGN, QNN, DKG, AAN, SMN, SAN, TTF, TQF, SFN, QAF, QFV, AAF, ASF, SAF, SMF, ASY, AFN, TAF, TSY, TAY, QMQ, SMQ, TYV, TGL, QAY, AAY, ADH, EDK, ASN, QYQ, SFQ, TYQ, TWQ, SWQ, AYQ, SYQ, AMV, TMV, TAV, AQV, TYT, TAT, QGI, QQV, SAQ, NAV, SAV, ASV, QSV, QAV, QAI, QAM, TAM, DTR, DQR, DMR, NNT, NYT, NMT, NST, ATT, SMV, SNT, QNT, AAT, SAM, SAL, QGV, QST, QYT, ASM, TSM, AMT, TST, ANH, SNV, TNT, ANT, SST, AST, TAI, DAR, SSM, TAL, NSM, TSL, SNF, TSI, TSV, TDK, SAT, SAI, QSL, QSI, ASI, SSL, SSV, SSI, AGI, QGM, TGM, SGM, SGL, SGV, ARL, NWE, SFL, TPY, DRP, DTK, DMK, SEY, SME, EAI, AHD, ADN, EFQ, EMH, SGE, DNQ, DNI, QLY, DGT, EGN, DYN, EWV, ESM, EAL, ASD, DKA, ADF, ADY, SLY, AEY, ETY, EAY, TGA, AVM, TPT, SVI, QSH, TTQ, QTN, TLH, AWY, SLT, AWV, QQY, NFV, SFY, TYY, SHA, TEK, QFK, NNY, EPR, NIT, NHI, NTY, SHY, NEM, NFN, NDK, NER, SER, NDR, QDK, SDR, QNA, TNA, THT, SNH, AYA, NFA, AFA, AHA, QHA, EYR, ENR, EHK, QVL, SVL, NIV, NVI, ADM, SAA, SQH, NQV, ALL, ATM, QYA, STT, DGR, NHT, SHT, QHT, TTL, NHM, QHL, DNR, QHM, QFM, QMI, AHV, THI, AHT, TNH, NHV, THV, SHI, ATV, TWI, NYV, TYI, DYR, SFI, NQF, NWM, NSL, NSP, TQY, DRS, ASP, TKD, QWI, QWN, TWN, QWV, THN, TTM, TQQ, NMQ, TYA, STQ, STN, AGN, EKH, ERT, TFH, SFH, AFH, ENK, NYQ, SFM, QGS, AHF, QLT, QHY, AQY, TRD, ERH, QWH, TYH, TRE, TAQ, AER, TDR, ASH, EKI, AFV, TYN, ALT, NGN, SYY, EWN, NGM, NAN, TAS, TFV, SFV, QAN, SGT, SAY, AFQ, TFQ, QFQ, EFK, SYH, QHV, AMM, THQ, AAI, AAM, NSQ, QAT, TSQ, SHQ, QSM, AGV, AGT, TGT, TGI, AVI, TGV, SGI, ESP, SDA, TPN, EAW, NEQ, DSN, DIK, DNA, QES, SLQ, EKD, SDH, SSF, TET, QDI, DSA, DNM, DKT, DGM, SQY, TLT, QEH, DKQ, TGE, DNS, SDV, SNE, EGT, EGV, AAP, AHG, TWK, TQA, TVT, APQ, SVT, NGT, SSH, NLV, AGY, QFF, QYF, NWV, EKA, EKY, SMG, NAG, ASG, TFI, ELK, SEK, QTL, NML, DHS, ETR, NQQ, QWL, ANP, AHH, NEK, NNN, SNA, EWR, ESR, SHN, SFG, SYA, APV, QPV, SPT, TPQ, QVI, TPV, AVL, SEM, NDM, API, QLM, QTM, QQL, QHI, NFL, AYV, NKE, TIM, QYV, SWI, DRN, AWI, SMA, NRE, QTS, QVV, QQT, QMA, QQS, QAA, ATQ, ERL, TGS, QQQ, AQQ, QHF, TAN, QSY, QSN, NGQ, TWH, TMS, QMS, TON, TMT, QTV, THS, TTT, SMT, QMT, SMR, ADA, AAE, EPY, EYL, NWI, TSP, DGQ, NDH, QFD, EHL, ERD, DAF, ENI, ENH, QQW, AGM, ENL, EAF, EYV, ENT, SSE, AGE, QEY, DRH, NIQ, SVV, SVM, QPT, TVL, QTQ, SVQ, TIQ, NLQ, SIQ, AWL, EHH, NGY, NHF, NSA, NAA, NTH, QLI, NWH, QRE, AML, EVR, SNP, NHS, THH, NOS, TTS, AHS, EKV, NFQ, APL, QPM, NPV, SIL, TII, STV, QEL, TFL, SIT, NAQ, TMM, AAL, QQM, AMI, QFL, AHI, SYI, SSP, NVV, TTN, TAA, TOS, TMA, ALA, QQN, NSH, TTH, SRE, ERQ, QHS, SWH, SEV, AVT, ALQ, DKH, AMQ, ARE, TWV, NGL, NGV, TMQ, TLV, EER, and QTT.

98. The modified AAV capsid protein of any one of claims 94-97, wherein X₁X₂X₃ is selected from ANY, SNI, AAI, AAM, ANT, AST, AYQ, EHK, ENK, ENR, SFQ, SSI, TAY, TDK, TNT, AAF, AAL, AAY, ADK, AFA, ANF, ANI, ANQ, ANS, AQM, ARE, ASV, AYH, AYT, EMK, EWK, NNM, QAF, QAI, QAM, QAT, QAY, QFT, QGM, QHL, QNF, QNQ, QNS, QNT, QNV, QNY, SAH, SAI, SAL, SFT, SFV, SHI, SHV, SMM, SNF, SNM, SNN, SNQ, SNV, SNY, SQI, SQV, SSL, SWQ, SWS, SYI, SYM, SYN, SYQ, TAM, TAT, TDR, TFM, THV, TNF, TNH, TNI, TNM, TNQ, TNV, TSY, TWA, and TYM.

99. The modified AAV capsid protein of any one of claims 1-55, wherein X₇ is selected from F and Y; X₈ is selected from N and Q; X₉ is selected from N and S; X₁₀ is selected from T and L.

100. The modified AAV capsid protein of claim 99: wherein the targeting peptide has an amino acid sequence selected from: X₁X₂X₃RGDFNNT (SEQ ID NO: 98943), X₁X₂X₃RGDFNNL (SEQ ID NO: 98933), X₁X₂X₃RGDFQNT (SEQ ID NO: 98934) or X₁X₂X₃RGDYNSL (SEQ ID NO: 98940).

101. The modified AAV capsid protein of claim 99 or 100, wherein X₁ is S, A or E, X₂ is N, Y or S, X₃ is I, Q, R, V, T, M or K.

102. The modified AAV capsid protein of any one of claims 99-101, wherein X₁X₂X₃ is selected from the group consisting of: DMK, ATD, EEK, QMD, EFS, ERD, DDR, TDM, SAE, EHS, ENH, SWE, SNE, NNG, QAG, ERG, QSG, QNG, ASG, QFG, AMF, ELR, NFM, NNS, NNI, SDR, EQR, EHR, EWR, EQK, ESR, EKQ, EYR, ENR, EMK, EYK, EHK, EWK, QNI, TNI, TYI, SNY, DRQ, AWI, QWI, DFR, EKG, QYG, QWQ, EKN, EKF, EKT, AFH, ENK, NYS, DKH, AAG, QMF, QFH, QKD, ARE, AHQ, ADK, ADR, AHN, QNS, ANN, SWS, EKS, AFS, QFS, TNQ, TGY, NGL, ARD, AKD, AAF, SMF, AFN, SGT, TGL, ASN, SFQ, AFQ, TFQ, QFQ, EFK, SWQ, AYQ, SYQ, DQR, DMR, ASM, ANT, SHQ, TSL, SNF, QSL, ASI, SGL, SGI, NDA, DHQ, DFK, DTK, DNA, SDS, TDH, DGL, QDV, SDM, DKT, DGM, SQY, DKS, SSD, EMV, TSE, EYV, SSE, EGM, SDF, TTG, QLG, NNP, AGS, QSF, TLM, NGA, AWY, NKD, SWY, TFF, NSG, NGY, QEK, SEK, TEK, AQA, NVL, NHI, TER, NML, NMA, NNA, NHN, ANP, AMS, NER, SER, DKK, NMM, QDK, AHS, TNA, THT, SNH, QNH, ESK, SHS, AYM, SSA, NAT, QLM, QQM, SQI, SNI, QNV, SHV, SHM, NNV, TNN, AHT, TNH, NHV, TQM, THV, SHI, NYL, NMV, NFL, AYV, NQI, NQL, NMI, NSS, SHF, SYM, NYV, AYI, SWI, QFI, ANF, TFT, TWM, QNW, NSY, THY, TNY, NYN, AWN, SMA, NSH, TGH, SFH, SWH, SFM, NFT, QYH, QGS, TGS, TSA, QQQ, QYY, AMQ, TAN, AWH, NMS, TSN, TAH, TMH, QWH, NWS, SWN, QRD, TYH, AKE, TAQ, AER, AYH, ASA, SNS, QSS, SAH, SMH, ASH, QAS, ANS, SYS, QYN, TYN, TNS, SFT, ANQ, SGS, SGH, SSS, TWY, QTY, SYY, NGM, TMS, SYG, TON, SYN, TFN, TMN, AYN, SGN, QNN, SMN, SAN, QAF, ASF, ASY, TAS, TAF, TFV, SMQ, SFV, TMT, QAN, SAY, EDK, AMV, QHV, THS, TAT, QGI, QQV, NAV, SAV, ASV, QSV, QAV, AAI, AAM, QAM, TAM, DTR, NNT, NYT, NMT, ATT, QTT, TTT, QAT, SMV, SNT, QNT, AAT, SAM, SAL, QGV, QST, QYT, TSM, ANH, SNV, TSQ, TNT, SST, AST, TAI, TSI, TSV, TDK, SAT, QSM, SAI, QSI, SSV, SSI, AGT, TGT, AGI, QGM, TGM, TGV, SGM, SGV, SQE, EHT, EYL, DSG, SFE, QND, TQA, AWV, NFV, TSG, SSG, DRG, ANW, TFI, TSF, QNL, STL, TWL, NNF, NND, NYM, NFI, ETR, SNP, EIR, NFS, NNH, NNL, AHL, NNQ, NDR, NNN, QDR, SDK, SNA, AFG, NYA, QHA, QFA, SHN, NFQ, SYA, TFA, EMR, EFR, EAR, NOM, TTL, TQL, SMM, SKE, SYL, ASL, SLV, TTV, AAL, NHL, NHM, QYL, QHL, ATL, DNR, DSR, ANL, SHL, SNL, TNL, QAL, AMI, ANI, QNM, QYM, QHM, QFM, QMM, QMI, ANM, AHM, SQM, AQT, EKL, NNM, TNM, SNM, QQI, TQV, TQI, THI, QHI, THL, SNN, TNV, SWL, AQM, SYV, TFM, TYM, TWI, AFI, ATI, DYR, QLV, TMI, SYI, SFI, NWM, NWT, NSL, STF, SNW, AFM, SSY, NSV, TNF, NAF, TFS, QWV, ERT, TQT, AFT, NYQ, ERL, NRD, TRD, AWQ, TDR, TSH, ASS, AYT, TYS, QYS, SYT, SWV, SNQ, SMS, NAS, SAS, QFV, SAF, TWQ, TAV, AMM, TYT, QAI, TST, DAR, SSM, TAL, NES, DWK, DLR, DIR, SDT, EAN, ETH, TYD, SYE, EAM, TND, AYD, TSP, DRT, NDH, SSF, EFH, DNQ, DSH, DNT, SDI, DKQ, EWT, EAL, EAS, ESL, ASD, EAH, ASE, EAF, ENT, SIY, QDY, APG, AIG, SSW, NPG, ERP, TVI, QSH, SLS, EDR, AWL, SLH, EQH, EHH, NWV, EKY, STY, DRI, EYH, DRV, SPY, NNY, DWR, ERA, QRE, EVR, SRD, AWA, SFA, QTI, SHT, THM, AQI, AHI, SWT, ATV, TTI, SMI, QYV, NMY, SWM, QNY, TWT, QWT, TQY, NRE, QTS, QHQ, DVR, AAA, TYA, EKH, ALH, AWT, ATH, SRE, TFH, QMH, ERV, ERS, QHY, ALQ, QSY, ERH, TRE, TSS, QAH, AAH, SWA, TWS, QWS, AYS, AFV, QNQ, ANY, ALT, SMY, TWV, TTY, AMY, QMY, ERY, TWH, TSY, TAY, TYV, QAY, AAY, QYQ, TYQ, SYH, AQV, EER, THQ, and SMT.

103. The modified AAV capsid protein of any one of claims 99-102, wherein X₁X₂X₃ is selected from the group consisting of: ADR, ASI, EFK, EHK, EWK, SYQ, AAF, AAT, AAY, AFI, AFQ, AGI, AGT, AHI, ANH, ANM, ANN, AQI, ASA, ASH, AST, ASV, AWT, AYQ, AYT, DAR, DMK, DQR, DVR, EAR, EFR, EMK, EMR, EQK, ERA, ERS, ESR, NDA, NDR, NMI, NMV, NNM, NNN, NYL, NYM, NYN, NYQ, NYV, QAM, QFQ, QFV, QGV, QNH, QNI, QNM, QQV, QSF, QSY, SAI, SAM, SAS, SDR, SFQ, SGH, SGM, SGT, SGV, SHL, SHM, SHQ, SHV, SMH, SNA, SNE, SNF, SNI, SNQ, SNT, SRE, SST, SWQ, SWT, SYG, SYY, TFQ, THL, THQ, THV, TMI, TNL, TNS, TSH, TSQ, and TWQ.

104. The modified AAV capsid protein of any one of claims 1-55, wherein RGDRX₈X₉X₁₀ has an amino acid sequence selected from: RGDRGVX₁₀ (SEQ ID NO: 157058), RGDRGSX₁₀ (SEQ ID NO: 157059), RGDRGNX₁₀ (SEQ ID NO: 157060), RGDRGGX₁₀ (SEQ ID NO: 157061), RGDRGQX₁₀ (SEQ ID NO: 157062), RGDRGX₉V (SEQ ID NO: 157063), RGDRGX₉I (SEQ ID NO: 157064), RGDRGX₉S (SEQ ID NO: 157065), RGDRGX₉L (SEQ ID NO: 157066), RGDRGX₉Q (SEQ ID NO: 157067), RGDHX₈X₉L (SEQ ID NO: 157068), RGDRX₈X₉I (SEQ ID NO: 157069), RGDRX₈X₉V (SEQ ID NO: 157070), RGDRX₈X₉L (SEQ ID NO: 157071), RGDYX₈X₉L (SEQ ID NO: 157072), RGDYX₈X₉V (SEQ ID NO: 157073), RGDYX₈X₉M (SEQ ID NO: 157074), and RGDLX₈X₉T (SEQ ID NO: 157075).

105. The modified AAV capsid protein of any one of claims 1-104, wherein the modified sequence does not comprise an amino acid sequence selected from: RGDRMVF (SEQ ID NO: 157080), RGDRTVI (SEQ ID NO: 157081), SRGDRPM (SEQ ID NO: 157082), ISLRGDR (SEQ ID NO: 157083), and RGDLLLS (SEQ ID NO: 1).

106. The modified AAV capsid protein of any one of claims 1-105, wherein the targeting peptide has a sequence selected from: X₁X₂X₃RGDHVNL (SEQ ID NO: 98924); X₁X₂X₃RGDLIGR (SEQ ID NO: 98925); X₁X₂X₃RGDQSTL (SEQ ID NO: 98926); X₁X₂X₃RGDRGQI (SEQ ID NO: 98927); X₁X₂X₃RGDRGVV (SEQ ID NO: 98928); X₁X₂X₃RGDRQGI (SEQ ID NO: 98929); X₁X₂X₃RGDRSQT (SEQ ID NO: 98930); X₁X₂X₃RGDRSVV (SEQ ID NO: 98931); X₁X₂X₃RGDLLLS (SEQ ID NO: 98932); X₁X₂X₃RGDFNNL (SEQ ID NO: 98933); X₁X₂X₃RGDFQNT (SEQ ID NO: 98934); X₁X₂X₃RGDLTVT (SEQ ID NO: 98935); X₁X₂X₃RGDYVGL (SEQ ID NO: 98936); X₁X₂X₃RGDYSSV (SEQ ID NO: 98937); X₁X₂X₃RGDHGVL (SEQ ID NO: 98938); X₁X₂X₃RGDRDYL (SEQ ID NO: 98939); X₁X₂X₃RGDYNSL (SEQ ID NO: 98940); X₁X₂X₃RGDYTSV (SEQ ID NO: 98941); X₁X₂X₃RGDYTSM (SEQ ID NO: 98942); and X₁X₂X₃RGDFNNT (SEQ ID NO: 98943).

107. The modified AAV capsid protein of any one of claims 1-106, wherein the targeting peptide is positioned between 565 and 595 within VR VIII of the modified AAV capsid protein.

108. The modified AAV capsid protein of any one of claims 1-107, wherein:
the reference AAV capsid protein is a capsid protein of AAV1 or a modification thereof and the targeting peptide is between Q585 and T589 of the reference AAV capsid protein;
the reference AAV capsid protein is a capsid protein of AAV2 or a modification thereof and the targeting peptide is between Q584 and R588 or between N587 and R588 of the reference AAV capsid protein;
the reference AAV capsid protein is a capsid protein of AAV3 or a modification thereof and the targeting peptide is between Q585 and T589 of the reference AAV capsid protein;
the reference AAV capsid protein is a capsid protein of AAV4 or a modification thereof and the targeting peptide is between G581 and N585 of the reference AAV capsid protein;
the reference AAV capsid protein is a capsid protein of AAV5 or a modification thereof and the targeting peptide is between Q574 and T578 of the reference AAV capsid protein;
the reference AAV capsid protein is a capsid protein of AAV6 or a modification thereof and the targeting peptide is between Q585 and T589 of the reference AAV capsid protein;
the reference AAV capsid protein is a capsid protein of AAV7 or a modification thereof and the targeting peptide is between (2586 and T590 of the reference AAV capsid protein;
the reference AAV capsid protein is a capsid protein of AAV8 or a modification thereof and the targeting peptide is between Q587 and A591 of the modified AAV capsid protein;
the reference AAV capsid protein is a capsid protein of AAV9 or a modification thereof and the targeting peptide is between H587 and A591 of the reference AAV capsid protein;
the reference AAV capsid protein is a capsid protein of AAVrh10 or a modification thereof and the targeting peptide is between Q587 and A591 of the reference AAV capsid protein;
the reference AAV capsid protein is a capsid protein of AAVpo.1 or a modification thereof and the targeting peptide is between N564 and S568 of the reference AAV capsid protein;
the reference AAV capsid protein is a capsid protein of AAV12 or a modification thereof and the targeting peptide is between N589 and A593 of the reference AAV capsid protein;
the reference AAV capsid protein is a capsid protein of Anc80 or a modification thereof and the targeting peptide is between Q585 and T589 of the reference AAV capsid protein;
the reference AAV capsid protein is a capsid protein of Anc80L65 or a modification thereof and the targeting peptide is between Q585 and T589 of the reference AAV capsid protein;
the reference AAV capsid protein is a capsid protein of Anc80-55 or a modification thereof and the targeting peptide is between Q585 and T589 of the reference AAV capsid protein;
the reference AAV capsid protein is a capsid protein of Anc80-129 or a modification thereof and the targeting peptide is between Q585 and T589 of the reference AAV capsid protein;
the reference AAV capsid protein is a capsid protein of Anc80-156 or a modification thereof and the targeting peptide is between Q585 and T589 of the reference AAV capsid protein;
the reference AAV capsid protein is a capsid protein of Anc80-751 or a modification thereof and the targeting peptide is between Q585 and T589 of the reference AAV capsid protein;
the reference AAV capsid protein is a capsid protein of Anc80-1029 or a modification thereof and the targeting peptide is between Q585 and T589 of the reference AAV capsid protein; or
the reference AAV capsid protein is a capsid protein of Anc80-1712 or a modification thereof and the targeting peptide is between Q585 and T589 of the reference AAV capsid protein.

109. The modified AAV capsid protein of any one of claims 1-107, wherein:
the reference AAV capsid protein is a capsid protein of AAV1 or a modification thereof and the targeting peptide is between D590 and P591 or between S588 and T589 of the reference AAV capsid protein;
the reference AAV capsid protein is a capsid protein of AAV2 or a modification thereof and the targeting peptide is between R588 and Q589 or between N587 and R588 of the reference AAV capsid protein;
the reference AAV capsid protein is a capsid protein of AAV3 or a modification thereof and the targeting peptide is between S586 and S587 or between N588 and T589 of the reference AAV capsid protein;
the reference AAV capsid protein is a capsid protein of AAV4 or a modification thereof and the targeting peptide is between S584 and N585 or between S586 and N587 of the reference AAV capsid protein;
the reference AAV capsid protein is a capsid protein of AAV5 or a modification thereof and the targeting peptide is between S575 and S576 or between T577 and T578 of the reference AAV capsid protein;
the reference AAV capsid protein is a capsid protein of AAV6 or a modification thereof and the targeting peptide is between D590 and P591 or S588 and T589 of the reference AAV capsid protein;
the reference AAV capsid protein is a capsid protein of AAV7 or a modification thereof and the targeting peptide is between N589 and T590 of the reference AAV capsid protein;
the reference AAV capsid protein is a capsid protein of AAV8 or a modification thereof and the targeting peptide is between N590 and T591 of the modified AAV capsid protein;
the reference AAV capsid protein is a capsid protein of AAV9 or a modification thereof and the targeting peptide is between Q588 and A589 of the reference AAV capsid protein;
the reference AAV capsid protein is a capsid protein of AAVrh10 or a modification thereof and the targeting peptide is between N590 and A591 of the reference AAV capsid protein;
the reference AAV capsid protein is a capsid protein of AAVpo.1 or a modification thereof and the targeting peptide is between N567 and S568 or between N569 and T570 of the reference AAV capsid protein;
the reference AAV capsid protein is a capsid protein of AAV12 or a modification thereof and the targeting peptide is between N592 and A593 or between T594 and T595 of the reference AAV capsid protein;
the reference AAV capsid protein is a capsid protein of Anc80 or a modification thereof and the targeting peptide is between T589 and A590 or between N587 and T588 of the reference AAV capsid protein;
the reference AAV capsid protein is a capsid protein of Anc80L65 or a modification thereof and the targeting peptide is between T589 and A590 or between N587 and T588 of the reference AAV capsid protein;
the reference AAV capsid protein is a capsid protein of Anc80-55 or a modification thereof and the targeting peptide is between T589 and A590 or between N587 and T588 of the reference AAV capsid protein;
the reference AAV capsid protein is a capsid protein of Anc80-129 or a modification thereof and the targeting peptide is between T589 and A590 or between N587 and T588 of the reference AAV capsid protein;
the reference AAV capsid protein is a capsid protein of Anc80-156 or a modification thereof and the targeting peptide is between T589 and A590 or between N587 and T588 of the reference AAV capsid protein;
the reference AAV capsid protein is a capsid protein of Anc80-751 or a modification thereof and the targeting peptide is between T589 and A590 or between N587 and T588 of the reference AAV capsid protein;
the reference AAV capsid protein is a capsid protein of Anc80-1029 or a modification thereof and the targeting peptide is between T589 and A590 or between N587 and T588 of the reference AAV capsid protein; or
the reference AAV capsid protein is a capsid protein of Anc80-1712 or a modification thereof and the targeting peptide is between T589 and A590 or between N587 and T588 of the reference AAV capsid protein.

110. The modified AAV capsid protein of any one of claims 1-109, wherein
(i) P₁ is independently selected from an asparagine (N), a serine (S), or a threonine (T);
(ii) P₂ is independently selected from a serine (S) or a glycine (G);
(iii) P₃ is independently selected from a threonine (T), a glutamine (Q), an alanine (A), or glutamate (E);
(iv) P₄ is independently selected from a serine (S), a threonine (T), or an alanine (A);
(v) P₅ is independently selected from a glycine (G) or an alanine (A);
(vi) P₆ is independently selected from a glycine (G) or an alanine (A);
(vii) P₇ is independently selected from an alanine (A) or a serine (S);
(viii) P₈ is independently selected from a serine (S) or a threonine (T); and
(ix) P₁₂ is independently selected from a histidine (H), a threonine (T), or an alanine (A).

111. The modified AAV capsid protein of claim 110, wherein P₅, P₆ or both P₅ and P₆ are not an alanine (A).

112. The modified AAV capsid protein of claim 110, wherein the peptide segment does not comprise an alanine (A) at P₆ and a threonine (T) at P₈.

113. The modified AAV capsid protein of any one of claims 1-112, wherein the peptide segment has a sequence of P₁P₂P₃P₄GGP₇P₈NDNP₁₂ (SEQ ID NO: 44921), wherein P₁, P₂, P₃, P₄, P₇, P₈, and P₁₂ are independently selected from any amino acid residue.

114. The modified AAV capsid protein of claim 113, wherein
(i) P₁ is independently selected from an asparagine (N) or a serine (S);
(ii) P₂ is independently selected from a serine (S) or a glycine (G);
(iii) P₃ is independently selected from a threonine (T) or a glutamine (Q);
(iv) P₄ is independently selected from a serine (S), a threonine (T), or an alanine (A);
(v) P₇ is independently selected from an alanine (A) or a serine (S);
(vi) P₈ is independently selected from a serine (S) or a threonine (T); and
(vii) P₁₂ is independently selected from a histidine (H), a threonine (T), or an alanine (A).

115. The modified AAV capsid protein of any claim one of claims 1-113, wherein the peptide segment has a sequence of P₁P₂TP₄GGP₇P₈NDNP₁₂ (SEQ ID NO: 44922), wherein P₁, P₂, P₄, P₇, P₈, and P₁₂ are independently selected from any amino acid residue.

116. The modified AAV capsid protein of any one of claims 1-113, wherein the peptide segment has a sequence of P₁P₂QP₄GGP₇P₈NDNP₁₂ (SEQ ID NO: 44923), wherein P₁, P₂, P₄, P₇, P₈, and P₁₂ are independently selected from any amino acid residue.

117. The modified AAV capsid protein of any one of claims 1-113, wherein the peptide segment has a sequence of P₁P₂TP₄GGP₇TNDNP₁₂ (SEQ ID NO: 44924), wherein P₁, P₂, P₄, P₇, and P₁₂ are independently selected from any amino acid residue.

118. The modified AAV capsid protein of any one of claims 1-113, wherein the peptide segment has a sequence of NP₂TP₄GGP₇P₈NDNP₁₂ (SEQ ID NO: 44925), wherein P₂, P₄, P₇, and P₁₂ are independently selected from any amino acid residue.

119. The modified AAV capsid protein of any one of claims 1-113, wherein the peptide segment has a sequence of SP₂TP₄GGP₇P₈NDNP₁₂ (SEQ ID NO: 44926), wherein P₂, P₄, P₇, P₈, and P₁₂ are independently selected from any amino acid residue.

120. The modified AAV capsid protein of any one of claims 1-113, wherein the peptide segment is NSTSGGP₇P₈NDNH (SEQ ID NO: 44927), wherein P₇ and P₈ are independently selected from any amino acid residue.

121. The modified AAV capsid of protein of claim 120, wherein P₇ is independently selected from an alanine (A) or a serine (S) and P₈ is independently selected from a serine (S) or a threonine (T).

122. The modified AAV capsid protein of claim 120 or 121, wherein the peptide segment comprises:
(i)
(SEQ ID NO: 46026)
NSTSGGASNDNH,
(ii)
(SEQ ID NO: 46029)
NSTSGGATNDNH,
(iii)
(SEQ ID NO: 46031)
NSTSGGSSNDNH,
or
(iv)
(SEQ ID NO: 46034)
NSTSGGSTNDNH.

123. The modified AAV capsid protein of any one of claims 1-113, wherein the peptide segment is NSTTGGP₇P₈NDNH (SEQ ID NO: 44928), wherein P₇ and P₈ are independently selected from any amino acid residue.

124. The modified AAV capsid protein of claim 123, wherein P₇ is independently selected from an alanine (A) or a serine (S) and P₈ is independently selected from a serine (S) or a threonine (T).

125. The modified AAV capsid protein of claim 123 or 124, wherein the peptide segment comprises:
(i)
(SEQ ID NO: 46073)
NSTTGGASNDNH,
(ii)
(SEQ ID NO: 46076)
NSTTGGATNDNH,
(iii)
(SEQ ID NO: 46079)
NSTTGGSSNDNH,
or
(iv)
(SEQ ID NO: 46082)
NSTTGGSTNDNH.

126. The modified AAV capsid protein of any one of claims 1-113, wherein the peptide segment is SGQTGGP₇P₈NDNH (SEQ ID NO: 44929), wherein P₇ and P₈ are independently selected from any amino acid residue.

127. The modified AAV capsid protein of claim 126, wherein P₇ is independently selected from an alanine (A) or a serine (S) and P₈ is independently selected from a serine (S) or a threonine (T).

128. The modified AAV capsid protein of claim 126 or 127, wherein the peptide segment comprises:
(i)
(SEQ ID NO: 46505)
SGQTGGASNDNH,
(ii)
(SEQ ID NO: 46508)
SGQTGGATNDNH,
(iii)
(SEQ ID NO: 46511)
SGQTGGSSNDNH,
or
(iv)
(SEQ ID NO: 46514)
SGQTGGSTNDNH.

129. The modified AAV capsid protein of any one of claims 1-113, wherein the peptide segment is SGTAGGP₇P₈NDNT (SEQ ID NO: 44930), wherein P₇ and P₈ are independently selected from any amino acid residue.

130. The modified AAV capsid protein of claim 129, wherein P₇ is independently selected from an alanine (A) or a serine (S) and P₈ is independently selected from a serine (S) or a threonine (T).

131. The modified AAV capsid protein of claim 129 or 130, wherein the peptide segment comprises:
(i)
(SEQ ID NO: 46554)
SGTAGGASNDNT,
or
(ii)
(SEQ ID NO: 46560)
SGTAGGSSNDNT.

132. The modified AAV capsid protein of claim 129 or 130, wherein the peptide segment does not comprise SGTAGGATNDNT (SEQ ID NO: 46557) or SGTAGGSTNDNT (SEQ ID NO: 46563).

133. The modified AAV capsid protein of any one of claims 1-113, wherein the peptide segment is SGTSGGP₇P₈NDNA (SEQ ID NO: 44931), wherein P₇ and P₈ are independently selected from any amino acid residue.

134. The modified AAV capsid protein of claim 133, wherein P₇ is independently selected from an alanine (A) or a serine (S) and P₈ is independently selected from a serine (S) or a threonine (T).

135. The modified AAV capsid protein of claim 133 or 134, wherein the peptide segment comprises:
(i)
(SEQ ID NO: 46600)
SGTSGGASNDNA,
(ii)
(SEQ ID NO: 46603)
SGTSGGATNDNA,
(iii)
(SEQ ID NO: 46606)
SGTSGGSSNDNA,
or
(iv)
(SEQ ID NO: 46609)
SGTSGGSTNDNA.

136. The modified AAV capsid protein of any one of claims 1-113, wherein the peptide segment is SGTTGGP₇P₈NDNT (SEQ ID NO: 44932), wherein P₇ and P₈ are independently selected from any amino acid residue.

137. The modified AAV capsid protein of claim 136, wherein P₇ is independently selected from an alanine (A) or a serine (S) and P₈ is independently selected from a serine (S) or a threonine (T).

138. The modified AAV capsid protein of claim 136 or 137, wherein the peptide segment comprises:
(i)
(SEQ ID NO: 46650)
SGTTGGASNDNT,
(ii)
(SEQ ID NO: 46653)
SGTTGGATNDNT,
(iii)
(SEQ ID NO: 46656)
SGTTGGSSNDNT,
or
(iv)
(SEQ ID NO: 46659)
SGTTGGSTNDNT.

139. The modified AAV capsid protein of claim 138, wherein the peptide segment is SGTTGGSSNDNT (SEQ ID NO: 46656).

140. The modified AAV capsid protein of any one of claims 1-113, wherein the peptide segment is SSTAGGP₇P₈NDNA (SEQ ID NO: 44933), wherein P₇ and P₈ are independently selected from any amino acid residue.

141. The modified AAV capsid protein of claim 139, wherein P₇ is independently selected from an alanine (A) or a serine (S) and P₈ is independently selected from a serine (S) or a threonine (T).

142. The modified AAV capsid protein of claim 140 or 141, wherein the peptide segment comprises:
(i)
(SEQ ID NO: 47128)
SSTAGGASNDNA,
(ii)
(SEQ ID NO: 47131)
SSTAGGATNDNA,
(iii)
(SEQ ID NO: 47134)
SSTAGGSSNDNA,
or
(iv)
(SEQ ID NO: 47137)
SSTAGGSTNDNA.

143. The modified AAV capsid protein of claim 142, wherein the peptide segment is SSTAGGASNDNA (SEQ ID NO: 47128).

144. The modified AAV capsid protein of claim 142, wherein the peptide segment is SSTAGGATNDNA (SEQ ID NO: 47131).

145. The modified AAV capsid protein of any one of claims 1-113, wherein the peptide segment is NSTSGASTNDNA (SEQ ID NO: 48390).

146. The modified AAV capsid protein of any one of claims 1-113, wherein the peptide segment is selected from a peptide segment as shown in Tables 20 or 28.

147. The modified AAV capsid protein of any one of claims 1-146, wherein variable region 1 (VR I) corresponds to amino acid residues between about position 259 to about position 275 of the modified capsid protein.

148. The modified AAV capsid protein of any one of claims 1-146, wherein the peptide segment is at a position between S261 and Y274 of an AAV9 capsid protein (SEQ ID NO: 61).

149. The modified AAV capsid protein of any one of claims 1-146, wherein the peptide segment is at a position between S260 and Y273 of an Anc80 capsid protein (SEQ ID NO. 132).

150. The modified AAV capsid protein of any one of claims 1-146, wherein the peptide segment is at a position between S260 and Y273 of an Anc80L65 capsid protein (SEQ ID) NO: 142).

151. The modified AAV capsid protein of any one of claims 1-146, wherein the peptide segment is at a position between S260 and Y273 of an AAV2 capsid protein (SEQ ID NO: 55).

152. The modified AAV capsid protein of any one of claims 1-151, wherein
(i) the targeting peptide has an amino acid sequence selected from SEQ ID NOs: 44864-44867, 44879-44883, 44911, 44912, 44913, 44918-44919, and 48391-157057; and
(ii) the peptide segment has an amino acid sequence selected from SEQ ID NOs: 46026, 46029, 46031, 46035, 46073, 46076, 46079, 46082, 46505, 46508, 46511, 46514, 46554, 46560, 46609, 46600, 46603, 46606, 46650, 46653, 46656, 46659, 47128, 47131, 47134, 47137, and 48390.

153. The modified AAV capsid protein of any one of claims 1-152, wherein
(i) the targeting peptide has an amino acid sequence selected from SEQ ID NOs: 44864-44867, 44879-44883, 44911, 44912, 44913, 44918-44919, and 48391-157057; and
(ii) the peptide segment has the amino acid sequence SGTAGGASNDNT (SEQ ID NO: 46554).

154. The modified AAV capsid protein of any one of claims 1-152, wherein
(i) the targeting peptide has an amino acid sequence selected from SEQ ID NOs: 44864-44867, 44879-44883, 44911, 44912, 44913, 44918-44919, and 48391-157057; and
(ii) the peptide segment has the amino acid sequence SGTSGGSTNDNA (SEQ ID NO: 46609).

155. The modified AAV capsid protein of any one of claims 1-152, wherein
(i) the targeting peptide has an amino acid sequence selected from SEQ ID NOs: 44864-44867, 44879-44883, 44911, 44912, 44913, 44918-44919, and 48391-157057; and
(ii) the peptide segment has the amino acid sequence SGTTGGSTNDNT (SEQ ID NO: 46659).

156. The modified AAV capsid protein of any one of claims 1-152, wherein
(i) the targeting peptide has an amino acid sequence selected from SEQ ID NOs: 44864-44867, 44879-44883, 44911, 44912, 44913, 44918-44919, and 48391-157057; and
(ii) the peptide segment has the amino acid sequence SGTTGGSTNDNT (SEQ ID NO: 47128).

157. The modified AAV capsid protein of any one of claims 1-152, wherein
(i) the targeting peptide has an amino acid sequence selected from SEQ ID NOs: 44864-44867, 44879-44883, 44911, 44912, 44913, 44918-44919, and 48391-157057; and
(ii) the peptide segment has the amino acid sequence NSTSGGSSNDNA (SEQ ID NO: 48388).

158. The modified AAV capsid protein of any one of claims 1-152, wherein
(i) the targeting peptide has an amino acid sequence selected from SEQ ID NOs: 44864-44867, 44879-44883, 44911, 44912, 44913, 44918-44919, and 48391-157057; and
(ii) the peptide segment has the amino acid sequence NSTSGASTNDNA (SEQ ID NO: 48390).

159. The modified AAV capsid protein of any one of claims 1-152, wherein
(i) the targeting peptide has the amino acid sequence ENRRGDFNNL (SEQ ID NOS: 44864); and
(ii) the peptide segment has the amino acid sequence SGTTGGSTNDNT (SEQ ID NO: 46659).

160. The modified AAV capsid protein of any one of claims 1-152, wherein
(i) the targeting peptide has the amino acid sequence ENRRGDENNL (SEQ ID NOs: 44864); and
(ii) the peptide segment has the amino acid sequence SGTTGGSSNDNT (SEQ ID NO: 46656).

161. The modified AAV capsid protein of any one of claims 1-152, wherein
(i) the targeting peptide has the amino acid sequence ENRRGDFNNL (SEQ ID NOS: 44864); and
(ii) the peptide segment has the amino acid sequence SSTAGGASNDNA (SEQ ID NO: 47128).

162. The modified AAV capsid protein of any one of claims 1-152, wherein
(i) the targeting peptide has the amino acid sequence ENRRGDFNNL (SEQ ID NOs: 44864); and
(ii) the peptide segment has the amino acid sequence NSTSGASTNDNA (SEQ ID NO: 48390).

163. The modified AAV capsid protein of any one of claims 1-152, wherein
(i) the targeting peptide has the amino acid sequence SAQRGDRGQI (SEQ ID NO: 44911); and
(ii) the peptide segment has the amino acid sequence SSTAGGATNDNA (SEQ ID NO: 47131).

164. The modified AAV capsid protein of any one of claims 1-152, wherein
(i) the targeting peptide has the amino acid sequence SAQRGDRGQI (SEQ ID NO: 44911); and
(ii) the peptide segment has the amino acid sequence SGTTGGSTNDNT (SEQ ID NO: 46659).

165. The modified AAV capsid protein of any one of claims 1-152, wherein
(i) the targeting peptide has the amino acid sequence SAQRGDRGQI (SEQ ID NO: 44911); and
(ii) the peptide segment has the amino acid sequence SGTTGGSSNDNT (SEQ ID NO: 46656).

166. The modified AAV capsid protein of any one of claims 1-152, wherein
(i) the targeting peptide has the amino acid sequence SAQRGDRGQI (SEQ ID NO: 44911); and
(ii) the peptide segment has the amino acid sequence SSTAGGASNDNA (SEQ ID NO: 47128).

167. The modified AAV capsid protein of any one of claims 1-152, wherein
(i) the targeting peptide has the amino acid sequence ENRRGDENNL (SEQ ID NOs: 44864); and
(ii) the peptide segment has the amino acid sequence NSTSGASTNDNA (SEQ ID NO: 48390).

168. The modified AAV capsid protein of any one of claims 1-152, wherein
(i) the targeting peptide has the amino acid sequence ENRRGDFQNT (SEQ ID NO: 44866); and
(ii) the peptide segment has the amino acid sequence SSTAGGATNDNA (SEQ ID NO: 47131).

169. The modified AAV capsid protein of any one of claims 1-152, wherein
(i) the targeting peptide has the amino acid sequence ENRRGDFQNT (SEQ ID NO: 44866); and
(ii) the peptide segment has the amino acid sequence SGTTGGSTNDNT (SEQ ID NO: 46659).

170. The modified AAV capsid protein of any one of claims 1-152, wherein
(i) the targeting peptide has the amino acid sequence ENRRGDFQNT (SEQ ID NO: 44866); and
(ii) the peptide segment has the amino acid sequence SGTTGGSSNDNT (SEQ ID NO: 46656).

171. The modified AAV capsid protein of any one of claims 1-152, wherein
(i) the targeting peptide has the amino acid sequence ENRRGDFQNT (SEQ ID NO: 44866); and
(ii) the peptide segment has the amino acid sequence NSTSGASTNDNA (SEQ ID NO: 48390).

172. The modified AAV capsid protein of any one of claims 1-152, wherein
(i) the targeting peptide has the amino acid sequence SNRRGDENNT (SEQ ID NO: 44883); and
(ii) the peptide segment has the amino acid sequence SSTAGGASNDNA (SEQ ID NO: 47128).

173. A modified adeno-associated virus (AAV) capsid protein, comprising:
(i) a targeting peptide at a site within VR VIII, wherein the targeting peptide has a sequence selected from SEQ ID NOs: 44864-44867, 44879-44883, 44911, 44912, 44913, and 44918-44919; and
(ii) a peptide segment within VR I, wherein the peptide segment has a sequence selected from SEQ ID NOs: 46026, 46029, 46031, 46035, 46073, 46076, 46079, 46082, 46505, 46508, 46511, 46514, 46554, 46560, 46609, 46600, 46603, 46606, 46650, 46653, 46656, 46659, 47128, 47131, 47134, and 47137.

174. A polynucleotide encoding the modified AAV capsid protein of any one of claims 1-173.

175. A vector comprising the polynucleotide of claim 174.

176. The vector of claim 175, further comprising a promoter operably linked to the polynucleotide.

177. A host cell comprising the modified AAV capsid protein of any one of claims 1 to 172, the polynucleotide specified in claim 174, or the vector of claim 175 or 176.

178. A recombinant AAV virion (rAAV) comprising the modified AAV capsid protein of any one of claims 1-173.

179. The rAAV virion of claim 178, further comprising an exogenous polynucleotide.

180. The rAAV virion of claim 179, wherein the exogenous polynucleotide comprises a template for homology directed repair.

181. The rAAV virion of claim 179, wherein the exogenous polynucleotide comprises an expressible polynucleotide encoding a therapeutic tRNA, miRNA, gene editing guide RNA, or RNA-editing guide RNA.

182. The rAAV virion of claim 179, wherein the exogenous polynucleotide comprises an expressible polynucleotide encoding a therapeutic protein.

183. The rAAV virion of claim 182, wherein the therapeutic protein is MTM1 or a fragment thereof.

184. The rAAV virion of claim 183, wherein the expressible polypeptide comprises the sequence of SEQ ID NO: 165 or a fragment thereof.

185. The rAAV virion of claim 183, wherein the expressible polypeptide comprises the sequence having at least 80%, 85%, 90%, 95%, 98%, 99% or 100% sequence identity to any of SEQ ID Nos: 166-170.

186. The rAAV virion of any one of claims 179-185, wherein the exogenous polynucleotide further comprises a regulatory sequence.

187. The rAAV virion of claim 186, wherein the regulatory sequence comprises expression regulatory elements (EREs).

188. The rAAV virion of claim 187, wherein the EREs comprise a CAG promoter.

189. The rAAV virion of claim 187, wherein the EREs comprise a sequence having at least 90%, at least 95%, at least 98%, at least 99% or 100% sequence identity to any one of SEQ IDs NO: 171-173.

190. A pharmaceutical composition comprising the modified AAV capsid protein of any one of claims 1-173 or the AAV virion of any one of claims 178-189.

191. A method for treating or ameliorating or preventing a disease or condition in a subject, comprising administering a therapeutically effective amount of the rAAV virion of any one of claims 178-189 or the pharmaceutical composition of claim 190.

192. The method of treating or ameliorating or preventing a disease according to claim 191, wherein the disease is a muscular disease and/or the condition is muscle degeneration.

193. The method of treating or ameliorating or preventing a disease according to claim 192, wherein said muscle is a striated muscle, preferably heart or a skeletal muscle or diaphragm.

194. The method of treating or ameliorating or preventing a disease according to claim 193, wherein said muscular disease is a muscular dystrophy, a cardiomyopathy, a myotonia, a muscular atrophy, a myoclonus dystonia, a mitochondrial myopathy, a rhabdomyolysis, a fibromyalgia, and/or a myofascial pain syndrome.

195. The modified adeno-associated virus (AAV) capsid protein of any one of claims 1-173, for use in treating and/or preventing a muscular disease and/or muscle degeneration.

196. An AAV virion comprising the modified AAV capsid protein of any one of claims 1-173 or the AAV virion of any one of claims 178-189 for use in treating and/or preventing a muscular disease and/or in muscle regeneration.

197. A pharmaceutical composition comprising the modified AAV capsid protein of any one of claims 1-159, and/or the AAV virion specified in any one of claims 178-189 for use in treating and/or preventing a muscular disease and/or in muscle regeneration.

198. A method of transferring an exogenous polynucleotide into a muscle cell, comprising the step of administering the AAV virion specified in any one of claims 178-189 to a subject.

199. The method of claim 198, wherein the administration results in transfer of the exogenous polynucleotide in the muscle cell, at a muscle:liver infection ratio of greater than 1 when measured by genome copies of the AAV virion.

200. The method of claim 198, wherein the muscle:liver infection ratio ranges from 1 to 100.

201. The method of claim 199, wherein the muscle:liver infection ration ranges from 1 to 10.

202. The method of claim 201, wherein the muscle:liver infection ratio ranges from 2 to 8.

203. The method of any one of claims 198-202, wherein the administration results in expression of the exogenous polynucleotide in the muscle cell, at a muscle:liver expression ratio of greater than 10.

204. The method of claim 203, wherein the muscle:liver expression ratio ranges from 10 to 100.

205. The method of claim 204, wherein the muscle:liver expression ratio ranges from 20 to 80.

206. The method of any one of claims 198-205, wherein the muscle:liver expression ratio ranges from 50 to 80 when measured by mRNA transcript expression.

207. The method of any one of claims 198-206, wherein the muscle:liver expression ratio ranges from 10 to 50 when measured by protein expression.

208. The method of any one of claims 198-207, wherein the muscle cell is selected from triceps surae, biceps, heart and quadricep.

209. Use of the AAV capsid polypeptide of any one of claims 1-173, and/or the AAV virion specified in any one of claims 178-189 for transferring an exogenous polynucleotide into a muscle cell.

210. The use according to claim 209, wherein said use is a non-therapeutic use, preferably wherein said use is an in vitro use.

211. The use according to claim 209, wherein the muscle cell is selected from triceps surae, biceps, heart and quadricep.
